(19) United States
(12) Patent Application Publication
(10) Pub. No.: US 2024/0318200 A1
(43) Pub. Date: Sep. 26, 2024

(54) COMPOSITIONS AND METHODS FOR GENE EDITING

(71) Applicant: CRISPR THERAPEUTICS AG, Zug (CH)

(72) Inventors: Ante Sven Lundberg, South Boston, MA (US); Samarth Kulkarni, South Boston, MA (US); Lawrence Klein, South Boston, MA (US); Hari Kumar Padmanabhan, South Boston, MA (US); Yvonne Sarah Aratyn, South Boston, MA (US)

(21) Appl. No.: 18/444,368

(22) Filed: Feb. 16, 2024

Related U.S. Application Data
(63) Continuation of application No. 16/487,300, filed on Aug. 20, 2019, now Pat. No. 11,920,148.
(60) Provisional application No. 62/461,829, filed on Feb. 22, 2017.
(60) Provisional application No. 62/526,562, filed on Jun. 29, 2017.
(60) Provisional application No. 62/587,832, filed on Nov. 17, 2017.

(51) Int. Cl. C12N 15/86; C12N 7/00; C12N 9/22; C12N 15/11

(52) U.S. Cl. CPC C12N 15/86; C12N 7/00; C12N 9/22; C12N 15/111; C12N 2310/20; C12N 2750/14143; C12N 2800/80

(57) ABSTRACT

The present application provides materials and methods for treating a patient with one or more conditions associated with ANGPTL3 whether ex vivo or in vivo. In addition, the present application provides materials and methods for editing and/or modulating the expression of ANGPTL3 gene in a cell by genome editing.

### RELATED APPLICATIONS

[0001] This application is a continuation application of U.S. application Ser. No. 16/487,300, filed Aug. 20, 2019, which is a U.S. national phase of International Patent Application No. PCT/IB2018/000228 filed Feb. 21, 2018, which claims the benefit under 35 U.S.C. § 119(e) of U.S. provisional application No. 62/461,829, filed Feb. 22, 2017, U.S. provisional application No. 62/526,562, filed Jun. 29, 2017, and U.S. provisional application No. 62/587,832, filed Nov. 17, 2017, each of which is incorporated by reference herein in its entirety.

### SEQUENCE LISTING

[0002] The present application is being filed along with a Sequence Listing in electronic format. The Sequence Listing file, entitled 80EM-341738-WO_SequenceListing.xml, was created on Feb. 15, 2024, and is 26,465 kilobytes in size. The information in electronic format of the Sequence Listing is incorporated herein by reference in its entirety.

### FIELD

[0003] The present disclosure, in some aspects, relates to the field of gene editing, for example, to the alteration of the angiopoietin-like 3 (ANGPTL3) gene.

### BACKGROUND

[0004] Genome engineering refers to the strategies and techniques for the targeted, specific modification of the genetic information (genome) of living organisms. Genome engineering is a very active field of research because of the wide range of possible applications, particularly in the areas of human health. For example, genome engineering can be used to alter (e.g., correct or knock-out) a gene carrying a harmful mutation or to explore the function of a gene. Early technologies developed to insert a transgene into a living cell were often limited by the random nature of the insertion of the new sequence into the genome. Random insertions into the genome may result in disrupting normal regulation of neighboring genes leading to severe unwanted effects. Furthermore, random integration technologies offer little reproducibility, as there is no guarantee that the sequence would be inserted at the same place in two different cells. Recent genome engineering strategies, such as zinc finger nucleases (ZFNs), transcription activator like effector nucleases (TALENs), homing endonucleases (HEs) and MegaTALs, enable a specific area of the DNA to be modified, thereby increasing the precision of the alteration compared to early technologies. These newer platforms offer a much larger degree of reproducibility, but still have their limitations.

[0005] Despite efforts from researchers and medical professionals worldwide who have been trying to address genetic disorders, and despite the promise of genome engineering approaches, there still remains a critical need for developing safe and effective treatments involving ANGPTL3 related indications.

[0006] By using genome engineering tools to create permanent changes to the genome that can address the ANGPTL3 related disorders or conditions with a single treatment, the resulting therapy may completely remedy certain ANGPTL3 related indications and/or diseases.

### SUMMARY

[0007] The present disclosure provides, in some aspects, highly efficient gene-editing methods for modifying the Angiopoietin-like 3 (ANGPTL3) gene. For example, in some embodiments, the gene-editing methods herein may be used to modify at least 50%, at least 60%, or at least 70% of the cells of a population. Surprisingly, cells of these modified cell populations, in some embodiments, exhibit a 5-fold (or greater) reduction in ANGPTL3 protein secretion. Thus, these methods may be particularly useful for treating ANGPTL3-related indications, such as dyslipidemia. Further, in some embodiments, the methods provided herein use a cross-species (cross-reactive) gene editing system that permits more accurate extrapolation of experimental data from an animal model to humans.

[0008] Provided herein, in some aspects, are methods for producing a population of angiopoietin-like 3 (ANGPTL3)-modified cells, the method comprising: introducing into cells (a) a guide RNA (gRNA) or nucleic acid encoding a gRNA (e.g., as cross-reactive gRNA) that targets the ANGPTL3 genomic locus (e.g., SEQ ID NO: 5304), and (b) a RNA-guided endonuclease or nucleic acid encoding an RNA-guided endonuclease (e.g., Cas9); and producing a population of cells that comprise a modification (e.g., insertion, deletion, or at least one nucleotide mutation) in the ANGPTL3 genomic locus. In some embodiments, the gRNA comprises a (20 bp) spacer sequence that is complementary to a sequence within the ANPTL3 genomic locus (e.g., within the ANGPTL3 gene, e.g., chromosome 1:62,597,486 to 1:62,606,304). An insertion is the introduction of at least one nucleotide, a deletion is the removal of at least one nucleotide, and a mutation is a change in at least one nucleotide (e.g., from one nucleotide such as C to another nucleotide such as A).

[0009] In some embodiments, at least 50% of the cells of the population comprise a modification (e.g., an insertion, a deletion, or at least one nucleotide mutation) in the ANGPTL3 gene. For example, at least 55%, at least 60%, at least 65%, at least 70%, at least 75%, at least 80%, at least 85%, at least 90%, or at least 95% of the population may comprise a modification in the AGPTL3 gene. In some embodiments, 50%-100% of the cells of the population comprise a modification in the ANGPTL3 gene. For example, 50%-60%, 50%-65%, 50%-70%, 50%-75%, 50%-80%, 50%-85%, 50%-90%, or 50%-95% of the cells of the population may comprise a modification in the ANGPTL3 gene. In some embodiments, 50%-70% of the cells of the population comprise a modification in the ANGPTL3 gene.

[0010] In some embodiments, ANGPTL3 protein secreted by cells of the population is reduced by at least 2-fold relative to a control. For example, ANGPTL3 protein secreted by cells of the population may be reduced by at least 3-fold, at least 4-fold, at least 5-fold, at least 6-fold, at least 7-fold, at least 8-fold, at least 9-fold, or at least 10-fold relative to a control. In some embodiments, ANGPTL3 protein secreted by cells of the population is reduced by at least 5-fold relative to a control. In some embodiments, ANGPTL3 protein secreted by cells of the population is reduced by 2-fold to 5-fold relative to a control.

[0011] In some embodiments, the control is a population of unmodified cells and/or a population of cells that did not receive the gRNA comprising a spacer sequence complementary to a region of the ANGPTL3 gene. In some embodiments, the control is a population of cells that receive a gRNA comprising a spacer sequence complementary to a region of a non-ANGPTL3 gene.

[0012] In some embodiments, the RNA-guided endonuclease is a Cas9 endonuclease. In some embodiments, the RNA-guided nuclease is a Cpf1 nuclease. Other RNA-guided nucleases may be used. In some embodiments, the Cas9 endonuclease or Cpf1 endonuclease is selected from S. pyogenes Cas9, S. aureus Cas9, N. meningitides Cas9, S. thermophilus CRISPR1 Cas9, S. thermophilus CRISPR 3 Cas9, T. denticola Cas9, L. bacterium ND2006 Cpf1 and Acidaminococcus sp. BV3L6 Cpf1.

[0013] In some embodiments, the gRNA is a single-guide RNA (sgRNA) (that contains a targeting sequence (crRNA sequence) and a RNA-guided nuclease-recruiting sequence (tracrRNA)).

[0014] In some embodiments, the gRNA targets a regulatory element (e.g., a promoter, enhancer, or other regulatory element) in the ANGPTL3 genomic locus.

[0015] In some embodiments, the gRNA is cross-reactive for human and cynomologous monkey (e.g., the spacer sequence of the gRNA is complementary to a region of the human ANGPTL3 gene and complementary to a region of the cynomologous monkey ANGPTL3 gene).

[0016] In some embodiments, the gRNA is a chemically modified gRNA. In some embodiments, the chemically-modified gRNA comprises phosphorothioated 2′-O-methyl nucleotides at the 3′ end and the 5′end of the gRNA. In some embodiments, the chemically-modified gRNA comprises phosphorothioated 2′-O-methyl nucleotides at the 3′ end of the gRNA. In some embodiments, the chemically-modified gRNA comprises phosphorothioated 2′-O-methyl nucleotides at the 5′end of the gRNA. In some embodiments, the chemically-modified gRNA comprises three phosphorothioated 2′-O-methyl nucleotides at the 3′ end and/or three the 5′end of the gRNA.

[0017] In some embodiments, the cells comprise hepatocytes.

[0018] In some embodiments, the spacer sequence comprises a sequence selected from CAAAGACCUUCUCCAGACCG (SEQ ID NO:17071); GCCAAUGGCCUCCUUCAGUU (SEQ ID NO:17069); and GGCCUCCUUCAGUUGGGACA (SEQ ID NO:17070). In some embodiments, the spacer sequence comprises GCCAAUGGCCUCCUUCAGUU (SEQ ID NO:17069). In some embodiments, the spacer sequence comprises GGCCUCCUUCAGUUGGGACA (SEQ ID NO:17070). In some embodiments, the spacer sequence comprises CAAAGACCUUCUCCAGACCG (SEQ ID NO:17071).

[0019] In some embodiments, the population of cells is present in a subject having an ANGPTL3-related condition. In some embodiments, the ANGPTL3-related condition is Dyslipidemia (abnormal amount of lipids (e.g. triglycerides, cholesterol and/or fat phospholipids)).

[0020] In some embodiments, the gRNA and RNA-guided nuclease are formulated (pre-complexed) as a ribonucleoprotein particle (RNP).

[0021] In some embodiments, the nucleic acid of (a) and/or (b) is present on a viral vector, optionally an adeno-associated viral (AAV) vector.

[0022] In some embodiments, the gRNA or the nucleic acid encoding a gRNA of (a) and/or the RNA-guided endonuclease or the nucleic acid encoding a RNA-guided endonuclease of (b) is/are formulated in a liposome or lipid nanoparticle (LNP).

[0023] Also provided herein, in some aspects, are cross-reactive guide RNA (gRNA) or nucleic acid encoding a cross-reactive gRNA that comprises a spacer sequence selected from GCCAAUGGCCUCCUUCAGUU (SEQ ID NO:17069) and GGCCUCCUUCAGUUGGGACA (SEQ ID NO:17070).

[0024] Thus, provided herein, in some aspects, are cellular, ex vivo and in vivo methods for creating permanent changes to the genome by introducing insertions, deletions or mutations of at least one nucleotide within or near the Angiopoietin-like 3 (ANGPTL3) gene or other DNA sequences that encode regulatory elements of the ANGPTL3 gene by genome editing and reducing or eliminating the expression or function of ANGPTL3 gene products, which can be used to treat an ANGPTL3 related condition or disorder such as Dyslipidemias. Also provided herein are components and compositions, and vectors for performing such methods.

[0025] Also provided herein are methods for editing an ANGPTL3 gene in a cell by genome editing comprising the step of introducing into the cell one or more deoxyribonucleic acid (DNA) endonucleases (e.g., Cas9) to effect one or more single-strand breaks (SSBs) or double-strand breaks (DSBs) within or near the ANGPTL3 gene or ANGPTL3 regulatory elements that results in one or more permanent insertions, deletions or mutations of at least one nucleotide within or near the ANGPTL3 gene, thereby reducing or eliminating the expression or function of ANGPTL3 gene products. In some embodiments, a gRNA targeting the ANGPTL3 genomic locus is also introduced into the cell.

### BRIEF DESCRIPTION OF THE DRAWINGS

[0026] Various aspects of materials and methods disclosed and described in this specification can be better understood by reference to the accompanying figures, in which:

[0027] FIG. 1A is a depiction of the type II CRISPR/Cas system.

[0028] FIG. 1B is another depiction of the type II CRISPR/Cas system.

[0029] FIGS. 2, 3, and 4 are graphs representing the cutting efficiency of gRNAs with an S. pyogenes Cas9 in HEK293T cells targeting the ANGPTL3 gene.

[0030] FIG. 5A is a depiction of cutting efficiency of gRNA targeting ANGPTL3 in Primary Human Hepatocytes.

[0031] FIG. 5B is a depiction of cutting efficiency of gRNA targeting ANGPTL3 in Primary Hepatocytes isolated from Cynomolgous monkey.

[0032] FIG. 6A is a depiction of cutting efficiency of gRNA targeting ANGPTL3 in primary human hepatocytes.

[0033] FIG. 6B describes the effect of gene editing by gRNA on ANGPTL3 protein secretion in primary human hepatocytes.

[0034] FIG. 7A is a depiction of cutting efficiency of gRNA targeting ANGPTL3 in primary human hepatocytes.

[0035] FIG. 7B describes the effect of gene editing by gRNA on ANGPTL3 protein secretion in primary human hepatocytes.

[0036] FIG. 8 describes the effect of gene editing by gRNA on ANGPTL3 protein secretion in monkey hepatocytes.

### BRIEF DESCRIPTION OF SEQUENCE LISTING

[0037] SEQ ID NOs: 1-620 are Cas endonuclease ortholog sequences.

[0038] SEQ ID NOs: 621-631 are intentionally blank.

[0039] SEQ ID NOs: 632-4,715 are microRNA sequences.

[0040] SEQ ID NOs: 4,716-4,733 are intentionally blank.

[0041] SEQ ID NOs: 4,734-5,302 are AAV serotype sequences.

[0042] SEQ ID NO: 5,303 is an ANGPTL3 nucleotide sequence.

[0043] SEQ ID NO: 5,304 is a gene sequence including 5 kilobase pairs upstream and/or downstream of the ANGPTL3 gene.

[0044] SEQ ID NOs: 5,305-5,398 are 20 bp spacer sequences for targeting within or near a ANGPTL3 gene or other DNA sequence that encodes a regulatory element of the ANGPTL3 gene with a T. denticola Cas9 endonuclease.

[0045] SEQ ID NOs: 5,399-5,595 are 20 bp spacer sequences for targeting within or near a ANGPTL3 gene or other DNA sequence that encodes a regulatory element of the ANGPTL3 gene with a S. thermophilus Cas9 endonuclease.

[0046] SEQ ID NOs: 5,596-6,079 are 20 bp spacer sequences for targeting within or near a ANGPTL3 gene or other DNA sequence that encodes a regulatory element of the ANGPTL3 gene with a S. aureus Cas9 endonuclease.

[0047] SEQ ID NOs: 6,080-6,633 are 20 bp spacer sequences for targeting within or near a ANGPTL3 gene or other DNA sequence that encodes a regulatory element of the ANGPTL3 gene with a N. meningitides Cas9 endonuclease.

[0048] SEQ ID NOs: 6,634-10,171 are 20 bp spacer sequences for targeting within or near a ANGPTL3 gene or other DNA sequence that encodes a regulatory element of the ANGPTL3 gene with a S. pyogenes Cas9 endonuclease.

[0049] SEQ ID NOs: 10,172-17,018 are 22 bp spacer sequences for targeting within or near a ANGPTL3 gene or other DNA sequence that encodes a regulatory element of the ANGPTL3 gene with an Acidaminococcus, a Lachnospiraceae, and a Francisella Novicida Cpf1 endonuclease.

[0050] SEQ ID NOs: 17,019-17,048 are intentionally blank.

[0051] SEQ ID NO: 17,049 is a sample guide RNA (gRNA) for a S. pyogenes Cas9 endonuclease.

[0052] SEQ ID NOs: 17,050-17,052 show sample sgRNA sequences.

[0053] SEQ ID NOs: 17,054-17,057 show sample guide target sequences.

[0054] SEQ ID NOs: 17,059-17,066 show sample sgRNA sequences.

[0055] SEQ ID NOs: 17,053 and 17,067 are exemplary unpaired regions of nucleotides within a duplex between the minimum CRISPR RNA and the minimum tracrRNA.

[0056] SEQ ID NOs: 17,068-17,071 are examples ANGPTL3 gRNA spacer sequences.

### DETAILED DESCRIPTION

### I. Introduction

### Genome Editing

[0057] The present disclosure provides strategies and techniques for the targeted, specific alteration of the genetic information (genome) of living organisms. As used herein, the term “alteration” or “alteration of genetic information” refers to any change in the genome of a cell. In the context of treating genetic disorders, alterations may include, but are not limited to, insertion, deletion and correction. As used herein, the term “insertion” refers t an addition of one or more nucleotides in a DNA sequence. Insertions can range from small insertions of a few nucleotides to insertions of large segments such as a cDNA or a gene. The term “deletion” refers to a loss or removal of one or more nucleotides in a DNA sequence or a loss or removal of the function of a gene. In some cases, a deletion can include, for example, a loss of a few nucleotides, an exon, an intron, a gene segment, or the entire sequence of a gene. In some cases, deletion of a gene refers to the elimination or reduction of the function or expression of a gene or its gene product. This can result from not only a deletion of sequences within or near the gene, but also other events (e.g., insertion, nonsense mutation) that disrupt the expression of the gene. The term “correction” as used herein, refers to a change of one or more nucleotides of a genome in a cell, whether by insertion, deletion or substitution. Such correction may result in a more favorable genotypic or phenotypic outcome, whether in structure or function, to the genomic site which was corrected. One non-limiting example of a “correction” includes the correction of a mutant or defective sequence to a wild-type sequence which restores structure or function to a gene or its gene product(s). Depending on the nature of the mutation, correction may be achieved via various strategies disclosed herein. In one non-limiting example, a missense mutation may be corrected by replacing the region containing the mutation with its wild-type counterpart. As another example, duplication mutations (e.g., repeat expansions) in a gene may be corrected by removing the extra sequences.

[0058] In some aspects, alterations may also include a gene knock-in, knock-out or knock-down. As used herein, the term “knock-in” refers to an addition of a DNA sequence, or fragment thereof into a genome. Such DNA sequences to be knocked-in may include an entire gene or genes, may include regulatory sequences associated with a gene or any portion or fragment of the foregoing. For example, a cDNA encoding the wild-type protein may be inserted into the genome of a cell carrying a mutant gene. Knock-in strategies need not replace the defective gene, in whole or in part. In some cases, a knock-in strategy may further involve substitution of an existing sequence with the provided sequence, e.g., substitution of a mutant allele with a wild-type copy. On the other hand, the term “knock-out” refers to the elimination of a gene or the expression of a gene. For example, a gene can be knocked out by either a deletion or an addition of a nucleotide sequence that leads to a disruption of the reading frame. As another example, a gene may be knocked out by replacing a part of the gene with an irrelevant sequence. Finally, the term “knock-down” as used herein refers to reduction in the expression of a gene or its gene product(s). As a result of a gene knock-down, the protein activity or function may be attenuated or the protein levels may be reduced or eliminated.

[0059] Genome editing generally refers to the process of modifying the nucleotide sequence of a genome, preferably in a precise or pre-determined manner. Examples of methods of genome editing described herein include methods of using site-directed nucleases to cut deoxyribonucleic acid (DNA) at precise target locations in the genome, thereby creating single-strand or double-strand DNA breaks at particular locations within the genome. Such breaks can be and regularly are repaired by natural, endogenous cellular processes, such as homology-directed repair (HDR) and non-homologous end joining (NHEJ), as recently reviewed in Cox et al., Nature Medicine 21(2), 121-31 (2015). These two main DNA repair processes consist of a family of alternative pathways. NHEJ directly joins the DNA ends resulting from a double-strand break, sometimes with the loss or addition of nucleotide sequence, which may disrupt or enhance gene expression. HDR utilizes a homologous sequence, or donor sequence, as a template for inserting a defined DNA sequence at the break point. The homologous sequence can be in the endogenous genome, such as a sister chromatid. Alternatively, the donor can be an exogenous nucleic acid, such as a plasmid, a single-strand oligonucleotide, a double-stranded oligonucleotide, a duplex oligonucleotide or a virus, that has regions of high homology with the nuclease-cleaved locus, but which can also contain additional sequence or sequence changes including deletions that can be incorporated into the cleaved target locus. A third repair mechanism can be microhomology-mediated end joining (MMEJ), also referred to as “Alternative NHEJ,” in which the genetic outcome is similar to NHEJ in that small deletions and insertions can occur at the cleavage site. MMEJ can make use of homologous sequences of a few base pairs flanking the DNA break site to drive a more favored DNA end joining repair outcome, and recent reports have further elucidated the molecular mechanism of this process; see, e.g., Cho and Greenberg, Nature 518, 174-76 (2015); Kent et al., Nature Structural and Molecular Biology, Adv. Online doi:10.1038/nsmb.2961(2015); Mateos-Gomez et al., Nature 518, 254-57 (2015); Ceccaldi et al., Nature 528, 258-62 (2015). In some instances, it may be possible to predict likely repair outcomes based on analysis of potential microhomologies at the site of the DNA break.

[0060] Each of these genome editing mechanisms can be used to create desired genomic alterations. A step in the genome editing process can be to create one or two DNA breaks, the latter as double-strand breaks or as two single-stranded breaks, in the target locus as near the site of intended mutation. This can be achieved via the use of site-directed polypeptides, as described and illustrated herein.

### CRISPR Endonuclease System

[0061] A CRISPR (Clustered Regularly Interspaced Short Palindromic Repeats) genomic locus can be found in the genomes of many prokaryotes (e.g., bacteria and archaea). In prokaryotes, the CRISPR locus encodes products that function as a type of immune system to help defend the prokaryotes against foreign invaders, such as virus and phage. There are three stages of CRISPR locus function: integration of new sequences into the CRISPR locus, expression of CRISPR RNA (crRNA), and silencing of foreign invader nucleic acid. Five types of CRISPR systems (e.g., Type I, Type II, Type III, Type U, and Type V) have been identified.

[0062] A CRISPR locus includes a number of short repeating sequences referred to as “repeats.” When expressed, the repeats can form secondary structures (e.g., hairpins) and/or comprise unstructured single-stranded sequences. The repeats usually occur in clusters and frequently diverge between species. The repeats are regularly interspaced with unique intervening sequences referred to as “spacers,” resulting in a repeat-spacer-repeat locus architecture. The spacers are identical to or have high homology with known foreign invader sequences. A spacer-repeat unit encodes a crisprRNA (crRNA), which is processed into a mature form of the spacer-repeat unit. A crRNA comprises a “seed” or spacer sequence that is involved in targeting a target nucleic acid (in the naturally occurring form in prokaryotes, the spacer sequence targets the foreign invader nucleic acid). A spacer sequence is located at the 5′ or 3′ end of the crRNA.

[0063] A CRISPR locus also comprises polynucleotide sequences encoding CRISPR Associated (Cas) genes. Cas genes encode endonucleases involved in the biogenesis and the interference stages of crRNA function in prokaryotes. Some Cas genes comprise homologous secondary and/or tertiary structures.

### Type II CRISPR Systems

[0064] crRNA biogenesis in a Type II CRISPR system in nature requires a trans-activating CRISPR RNA (tracrRNA). Non-limiting examples of Type II CRISPR systems are shown in FIGS. 1A and 1B. The tracrRNA can be modified by endogenous RNaseIII, and then hybridizes to a crRNA repeat in the pre-crRNA array. Endogenous RNaseIII can be recruited to cleave the pre-crRNA. Cleaved crRNAs can be subjected to exoribonuclease trimming to produce the mature crRNA form (e.g., 5′ trimming). The tracrRNA can remain hybridized to the crRNA, and the tracrRNA and the crRNA associate with a site-directed polypeptide (e.g., Cas9). The crRNA of the crRNA-tracrRNA-Cas9 complex can guide the complex to a target nucleic acid to which the crRNA can hybridize. Hybridization of the crRNA to the target nucleic acid can activate Cas9 for targeted nucleic acid cleavage. The target nucleic acid in a Type II CRISPR system is referred to as a protospacer adjacent motif (PAM). In nature, the PAM is essential to facilitate binding of a site-directed polypeptide (e.g., Cas9) to the target nucleic acid. Type II systems (also referred to as Nmeni or CASS4) are further subdivided into Type II-A (CASS4) and II-B (CASS4a). Jinek et al., Science, 337(6096):816-821 (2012) showed that the CRISPR/Cas9 system is useful for RNA-programmable genome editing, and international patent application publication number WO2013/176772 provides numerous examples and applications of the CRISPR/Cas endonuclease system for site-specific gene editing.

### Type V CRISPR Systems

[0065] Type V CRISPR systems have several important differences from Type II systems. For example, Cpf1 is a single RNA-guided endonuclease that, in contrast to Type II systems, lacks tracrRNA. In fact, Cpf1-associated CRISPR arrays can be processed into mature crRNAs without the requirement of an additional trans-activating tracrRNA. The Type V CRISPR array can be processed into short mature crRNAs of 42-44 nucleotides in length, with each mature crRNA beginning with 19 nucleotides of direct repeat followed by 23-25 nucleotides of spacer sequence. In contrast, mature crRNAs in Type II systems can start with 20-24 nucleotides of spacer sequence followed by about 22 nucleotides of direct repeat. Also, Cpf1 can utilize a T-rich protospacer-adjacent motif such that Cpf1-crRNA complexes efficiently cleave target DNA preceded by a short T-rich PAM, which is in contrast to the G-rich PAM following the target DNA for Type II systems. Thus, Type V systems cleave at a point that is distant from the PAM, while Type II systems cleave at a point that is adjacent to the PAM. In addition, in contrast to Type II systems, Cpf1 cleaves DNA via a staggered DNA double-stranded break with a 4 or 5 nucleotide 5′ overhang. Type II systems cleave via a blunt double-stranded break. Similar to Type II systems, Cpf1 contains a predicted RuvC-like endonuclease domain, but lacks a second HNH endonuclease domain, which is in contrast to Type II systems.

### Cas Genes/Polypeptides and Protospacer Adjacent Motifs

[0066] Exemplary CRISPR/Cas polypeptides include the Cas9 polypeptides as published in Fonfara et al., Nucleic Acids Research, 42: 2577-2590 (2014). The CRISPR/Cas gene naming system has undergone extensive rewriting since the Cas genes were discovered. Fonfara et al. also provides PAM sequences for the Cas9 polypeptides from various species (see also SEQ ID NOs: 1-620).

### II. Compositions and Methods

[0067] Provided herein are cellular, ex vivo and in vivo methods for using genome engineering tools to create permanent changes to the genome by deleting or mutating the ANGPTL3 gene or other DNA sequences that encode regulatory elements of the ANGPTL3 gene. Such methods use endonucleases, such as CRISPR-associated (Cas9, Cpf1 and the like) nucleases, to permanently edit within or near the genomic locus of the ANGPTL3 gene or other DNA sequences that encode regulatory elements of the ANGPTL3 gene. In this way, examples set forth in the present disclosure can help to reduce or eliminate the expression of the ANGPTL3 gene with a single treatment (rather than deliver potential therapies for the lifetime of the patient).

### Site-Directed Polypeptides (Endonucleases, Enzymes)

[0068] A site-directed polypeptide is a nuclease used in genome editing to cleave DNA. The site-directed polypeptide can be administered to a cell or a patient as either: one or more polypeptides, or one or more mRNAs encoding the polypeptide. Any of the enzymes or orthologs listed in SEQ ID NOs: 1-620 or disclosed herein may be utilized in the methods herein.

[0069] In the context of a CRISPR/Cas9 or CRISPR/Cpf1 system, the site-directed polypeptide can bind to a guide RNA that, in turn, specifies the site in the target DNA to which the polypeptide is directed. In the CRISPR/Cas9 or CRISPR/Cpf1 systems disclosed herein, the site-directed polypeptide can be an endonuclease, such as a DNA endonuclease.

[0070] A site-directed polypeptide can comprise a plurality of nucleic acid-cleaving (i.e., nuclease) domains. Two or more nucleic acid-cleaving domains can be linked together via a linker. For example, the linker can comprise a flexible linker. Linkers can comprise 1, 2, 3, 4, 5, 6, 7, 8, 9, 10, 11, 12, 13, 14, 15, 16, 17, 18, 19, 20, 21, 22, 23, 24, 25, 30, 35, 40 or more amino acids in length.

[0071] Naturally-occurring wild-type Cas9 enzymes comprise two nuclease domains, a HNH nuclease domain and a RuvC domain. Herein, the term “Cas9” refers to both a naturally-occurring and a recombinant Cas9. Cas9 enzymes contemplated herein can comprise a HNH or HNH-like nuclease domain, and/or a RuvC or RuvC-like nuclease domain.

[0072] HNH or HNH-like domains comprise a McrA-like fold. HNH or HNH-like domains comprises two antiparallel β-strands and an α-helix. HNH or HNH-like domains comprises a metal binding site (e.g., a divalent cation binding site). HNH or HNH-like domains can cleave one strand of a target nucleic acid (e.g., the complementary strand of the crRNA targeted strand).

[0073] RuvC or RuvC-like domains comprise an RNaseH or RNaseH-like fold. RuvC/RNaseH domains are involved in a diverse set of nucleic acid-based functions including acting on both RNA and DNA. The RNaseH domain comprises 5 β-strands surrounded by a plurality of α-helices. RuvC/RNaseH or RuvC/RNaseH-like domains comprise a metal binding site (e.g., a divalent cation binding site). RuvC/RNaseH or RuvC/RNaseH-like domains can cleave one strand of a target nucleic acid (e.g., the non-complementary strand of a double-stranded target DNA).

[0074] Site-directed polypeptides can introduce double-strand breaks or single-strand breaks in nucleic acids, e.g., genomic DNA. The double-strand break can stimulate a cell's endogenous DNA-repair pathways (e.g., homology-dependent repair (HDR) or NHEJ or alternative non-homologous end joining (A-NHEJ) or microhomology-mediated end joining (MMEJ)). NHEJ can repair cleaved target nucleic acid without the need for a homologous template. This can sometimes result in small deletions or insertions (indels) in the target nucleic acid at the site of cleavage, and can lead to disruption or alteration of gene expression. HDR can occur when a homologous repair template, or donor, is available. The homologous donor template can comprise sequences that are homologous to sequences flanking the target nucleic acid cleavage site. The sister chromatid can be used by the cell as the repair template. However, for the purposes of genome editing, the repair template can be supplied as an exogenous nucleic acid, such as a plasmid, duplex oligonucleotide, single-strand oligonucleotide or viral nucleic acid. With exogenous donor templates, an additional nucleic acid sequence (such as a transgene) or modification (such as a single or multiple base change or a deletion) can be introduced between the flanking regions of homology so that the additional or altered nucleic acid sequence also becomes incorporated into the target locus. MMEJ can result in a genetic outcome that is similar to NHEJ in that small deletions and insertions can occur at the cleavage site. MMEJ can make use of homologous sequences of a few base pairs flanking the cleavage site to drive a favored end-joining DNA repair outcome. In some instances, it may be possible to predict likely repair outcomes based on analysis of potential microhomologies in the nuclease target regions.

[0075] Thus, in some cases, homologous recombination can be used to insert an exogenous polynucleotide sequence into the target nucleic acid cleavage site. An exogenous polynucleotide sequence is termed a “donor polynucleotide” (or donor or donor sequence) herein. The donor polynucleotide, a portion of the donor polynucleotide, a copy of the donor polynucleotide, or a portion of a copy of the donor polynucleotide can be inserted into the target nucleic acid cleavage site. The donor polynucleotide can be an exogenous polynucleotide sequence, i.e., a sequence that does not naturally occur at the target nucleic acid cleavage site.

[0076] The modifications of the target DNA due to NHEJ and/or HDR can lead to, for example, mutations, deletions, alterations, integrations, gene correction, gene replacement, gene tagging, transgene insertion, nucleotide deletion, gene disruption, translocations and/or gene mutation. The processes of deleting genomic DNA and integrating non-native nucleic acid into genomic DNA are examples of genome editing.

[0077] The site-directed polypeptide can comprise an amino acid sequence having at least 10%, at least 15%, at least 20%, at least 30%, at least 40%, at least 50%, at least 60%, at least 70%, at least 75%, at least 80%, at least 85%, at least 90%, at least 95%, at least 99%, or 100% amino acid sequence identity to a wild-type exemplary site-directed polypeptide [e.g., Cas9 from S. pyogenes, US2014/0068797 Sequence ID No. 8 or Sapranauskas et al., Nucleic Acids Res, 39(21): 9275-9282 (2011)], and various other site-directed polypeptides. The site-directed polypeptide can comprise at least 70, 75, 80, 85, 90, 95, 97, 99, or 100% identity to a wild-type site-directed polypeptide (e.g., Cas9 from S. pyogenes, supra) over 10 contiguous amino acids. The site-directed polypeptide can comprise at most: 70, 75, 80, 85, 90, 95, 97, 99, or 100% identity to a wild-type site-directed polypeptide (e.g., Cas9 from S. pyogenes, supra) over 10 contiguous amino acids. The site-directed polypeptide can comprise at least: 70, 75, 80, 85, 90, 95, 97, 99, or 100% identity to a wild-type site-directed polypeptide (e.g., Cas9 from S. pyogenes, supra) over 10 contiguous amino acids in a HNH nuclease domain of the site-directed polypeptide. The site-directed polypeptide can comprise at most: 70, 75, 80, 85, 90, 95, 97, 99, or 100% identity to a wild-type site-directed polypeptide (e.g., Cas9 from S. pyogenes, supra) over 10 contiguous amino acids in a HNH nuclease domain of the site-directed polypeptide. The site-directed polypeptide can comprise at least: 70, 75, 80, 85, 90, 95, 97, 99, or 100% identity to a wild-type site-directed polypeptide (e.g., Cas9 from S. pyogenes, supra) over 10 contiguous amino acids in a RuvC nuclease domain of the site-directed polypeptide. The site-directed polypeptide can comprise at most: 70, 75, 80, 85, 90, 95, 97, 99, or 100% identity to a wild-type site-directed polypeptide (e.g., Cas9 from S. pyogenes, supra) over 10 contiguous amino acids in a RuvC nuclease domain of the site-directed polypeptide.

[0078] The site-directed polypeptide can comprise a modified form of a wild-type exemplary site-directed polypeptide. The modified form of the wild-type exemplary site-directed polypeptide can comprise a mutation that reduces the nucleic acid-cleaving activity of the site-directed polypeptide. The modified form of the wild-type exemplary site-directed polypeptide can have less than 90%, less than 80%, less than 70%, less than 60%, less than 50%, less than 40%, less than 30%, less than 20%, less than 10%, less than 5%, or less than 1% of the nucleic acid-cleaving activity of the wild-type exemplary site-directed polypeptide (e.g., Cas9 from S. pyogenes, supra). The modified form of the site-directed polypeptide can have no substantial nucleic acid-cleaving activity. When a site-directed polypeptide is a modified form that has no substantial nucleic acid-cleaving activity, it is referred to herein as “enzymatically inactive.”

[0079] The modified form of the site-directed polypeptide can comprise a mutation such that it can induce a single-strand break (SSB) on a target nucleic acid (e.g., by cutting only one of the sugar-phosphate backbones of a double-strand target nucleic acid). In some aspects, the mutation can result in less than 90%, less than 80%, less than 70%, less than 60%, less than 50%, less than 40%, less than 30%, less than 20%, less than 10%, less than 5%, or less than 1% of the nucleic acid-cleaving activity in one or more of the plurality of nucleic acid-cleaving domains of the wild-type site directed polypeptide (e.g., Cas9 from S. pyogenes, supra). In some aspects, the mutation can result in one or more of the plurality of nucleic acid-cleaving domains retaining the ability to cleave the complementary strand of the target nucleic acid, but reducing its ability to cleave the non-complementary strand of the target nucleic acid. The mutation can result in one or more of the plurality of nucleic acid-cleaving domains retaining the ability to cleave the non-complementary strand of the target nucleic acid, but reducing its ability to cleave the complementary strand of the target nucleic acid. For example, residues in the wild-type exemplary S. pyogenes Cas9 polypeptide, such as Asp10, His840, Asn854 and Asn856, are mutated to inactivate one or more of the plurality of nucleic acid-cleaving domains (e.g., nuclease domains). The residues to be mutated can correspond to residues Asp10, His840, Asn854 and Asn856 in the wild-type exemplary S. pyogenes Cas9 polypeptide (e.g., as determined by sequence and/or structural alignment). Non-limiting examples of mutations include D10A, H840A, N854A or N856A. One skilled in the art will recognize that mutations other than alanine substitutions can be suitable.

[0080] In some aspects, a D10A mutation can be combined with one or more of H840A, N854A, or N856A mutations to produce a site-directed polypeptide substantially lacking DNA cleavage activity. A H840A mutation can be combined with one or more of D10A, N854A, or N856A mutations to produce a site-directed polypeptide substantially lacking DNA cleavage activity. A N854A mutation can be combined with one or more of H840A, D10A, or N856A mutations to produce a site-directed polypeptide substantially lacking DNA cleavage activity. A N856A mutation can be combined with one or more of H840A, N854A, or D10A mutations to produce a site-directed polypeptide substantially lacking DNA cleavage activity. Site-directed polypeptides that comprise one substantially inactive nuclease domain are referred to as “nickases.”

[0081] Nickase variants of RNA-guided endonucleases, for example Cas9, can be used to increase the specificity of CRISPR-mediated genome editing. Wild type Cas9 is typically guided by a single guide RNA designed to hybridize with a specified ˜20 nucleotide sequence in the target sequence (such as an endogenous genomic locus). However, several mismatches can be tolerated between the guide RNA and the target locus, effectively reducing the length of required homology in the target site to, for example, as little as 13 nt of homology, and thereby resulting in elevated potential for binding and double-strand nucleic acid cleavage by the CRISPR/Cas9 complex elsewhere in the target genome—also known as off-target cleavage. Because nickase variants of Cas9 each only cut one strand, in order to create a double-strand break it is necessary for a pair of nickases to bind in close proximity and on opposite strands of the target nucleic acid, thereby creating a pair of nicks, which is the equivalent of a double-strand break. This requires that two separate guide RNAs—one for each nickase—must bind in close proximity and on opposite strands of the target nucleic acid. This requirement essentially doubles the minimum length of homology needed for the double-strand break to occur, thereby reducing the likelihood that a double-strand cleavage event will occur elsewhere in the genome, where the two guide RNA sites—if they exist—are unlikely to be sufficiently close to each other to enable the double-strand break to form. As described in the art, nickases can also be used to promote HDR versus NHEJ. HDR can be used to introduce selected changes into target sites in the genome through the use of specific donor sequences that effectively mediate the desired changes.

[0082] Mutations contemplated can include substitutions, additions, and deletions, or any combination thereof. The mutation converts the mutated amino acid to alanine. The mutation converts the mutated amino acid to another amino acid (e.g., glycine, serine, threonine, cysteine, valine, leucine, isoleucine, methionine, proline, phenylalanine, tyrosine, tryptophan, aspartic acid, glutamic acid, asparagine, glutamine, histidine, lysine, or arginine). The mutation converts the mutated amino acid to a non-natural amino acid (e.g., selenomethionine). The mutation converts the mutated amino acid to amino acid mimics (e.g., phosphomimics). The mutation can be a conservative mutation. For example, the mutation converts the mutated amino acid to amino acids that resemble the size, shape, charge, polarity, conformation, and/or rotamers of the mutated amino acids (e.g., cysteine/serine mutation, lysine/asparagine mutation, histidine/phenylalanine mutation). The mutation can cause a shift in reading frame and/or the creation of a premature stop codon. Mutations can cause changes to regulatory regions of genes or loci that affect expression of one or more genes.

[0083] The site-directed polypeptide (e.g., variant, mutated, enzymatically inactive and/or conditionally enzymatically inactive site-directed polypeptide) can target nucleic acid. The site-directed polypeptide (e.g., variant, mutated, enzymatically inactive and/or conditionally enzymatically inactive endoribonuclease) can target DNA. The site-directed polypeptide (e.g., variant, mutated, enzymatically inactive and/or conditionally enzymatically inactive endoribonuclease) can target RNA.

[0084] The site-directed polypeptide can comprise one or more non-native sequences (e.g., the site-directed polypeptide is a fusion protein).

[0085] The site-directed polypeptide can comprise an amino acid sequence comprising at least 15% amino acid identity to a Cas9 from a bacterium (e.g., S. pyogenes), a nucleic acid binding domain, and two nucleic acid cleaving domains (i.e., a HNH domain and a RuvC domain).

[0086] The site-directed polypeptide can comprise an amino acid sequence comprising at least 15% amino acid identity to a Cas9 from a bacterium (e.g., S. pyogenes), and two nucleic acid cleaving domains (i.e., a HNH domain and a RuvC domain).

[0087] The site-directed polypeptide can comprise an amino acid sequence comprising at least 15% amino acid identity to a Cas9 from a bacterium (e.g., S. pyogenes), and two nucleic acid cleaving domains, wherein one or both of the nucleic acid cleaving domains comprise at least 50% amino acid identity to a nuclease domain from Cas9 from a bacterium (e.g., S. pyogenes).

[0088] The site-directed polypeptide can comprise an amino acid sequence comprising at least 15% amino acid identity to a Cas9 from a bacterium (e.g., S. pyogenes), two nucleic acid cleaving domains (i.e., a HNH domain and a RuvC domain), and non-native sequence (for example, a nuclear localization signal) or a linker linking the site-directed polypeptide to a non-native sequence.

[0089] The site-directed polypeptide can comprise an amino acid sequence comprising at least 15% amino acid identity to a Cas9 from a bacterium (e.g., S. pyogenes), two nucleic acid cleaving domains (i.e., a HNH domain and a RuvC domain), wherein the site-directed polypeptide comprises a mutation in one or both of the nucleic acid cleaving domains that reduces the cleaving activity of the nuclease domains by at least 50%.

[0090] The site-directed polypeptide can comprise an amino acid sequence comprising at least 15% amino acid identity to a Cas9 from a bacterium (e.g., S. pyogenes), and two nucleic acid cleaving domains (i.e., a HNH domain and a RuvC domain), wherein one of the nuclease domains comprises mutation of aspartic acid 10, and/or wherein one of the nuclease domains can comprise a mutation of histidine 840, and wherein the mutation reduces the cleaving activity of the nuclease domain(s) by at least 50%.

[0091] The one or more site-directed polypeptides, e.g. DNA endonucleases, can comprise two nickases that together effect one double-strand break at a specific locus in the genome, or four nickases that together effect or cause two double-strand breaks at specific loci in the genome. Alternatively, one site-directed polypeptide, e.g. DNA endonuclease, can effect or cause one double-strand break at a specific locus in the genome.

[0092] Non-limiting examples of Cas9 orthologs from other bacterial strains include but are not limited to, Cas proteins identified in Acaryochloris marina MBIC11017; Acetohalobium arabaticum DSM 5501; Acidithiobacillus caldus; Acidithiobacillus ferrooxidans ATCC 23270; Alicyclobacillus acidocaldarius LAA1; Alicyclobacillus acidocaldarius subsp. acidocaldarius DSM 446; Allochromatium vinosum DSM 180; Ammonifex degensii KC4; Anabaena variabilis ATCC 29413; Arthrospira maxima CS-328; Arthrospira platensis str. Paraca; Arthrospira sp. PCC 8005; Bacillus pseudomycoides DSM 12442; Bacillus selenitireducens MLS10; Burkholderiales bacterium 1_1_47; Caldicelulosiruptor becscii DSM 6725; Candidatus Desulforudis audaxviator MP104C; Caldicellulosiruptor hydrothermalis 108; Clostridium phage c-st; Clostridium botulinum A3 str. Loch Maree; Clostridium botulinum Ba4 str. 657; Clostridium difficile QCD-63q42; Crocosphaera watsonii WH 8501; Cyanothece sp. ATCC 51142; Cyanothece sp. CCY0110; Cyanothece sp. PCC 7424; Cyanothece sp. PCC 7822; Exiguobacterium sibiricum 255-15; Finegoldia magna ATCC 29328; Ktedonobacter racemifer DSM 44963; Lactobacillus delbrueckii subsp. bulgaricus PB2003/044-T3-4; Lactobacillus salivarius ATCC 11741; Listeria innocua; Lyngbya sp. PCC 8106; Marinobacter sp. ELB 17; Methanohalobium evestigatum Z-7303; Microcystis phage Ma-LMM01; Microcystis aeruginosa NIES-843; Microscilla marina ATCC 23134; Microcoleus chthonoplastes PCC 7420; Neisseria meningitidis; Nitrosococcus halophilus Nc4; Nocardiopsis dassonvillei subsp. dassonvillei DSM 43111; Nodularia spumigena CCY9414; Nostoc sp. PCC 7120; Oscillatoria sp. PCC 6506; Pelotomaculum thermopropionicum SI; Petrotoga mobilis SJ95; Polaromonas naphthalenivorans CJ2; Polaromonas sp. JS666; Pseudoalteromonas haloplanktis TAC125; Streptomyces pristinaespiralis ATCC 25486; Streptomyces pristinaespiralis ATCC 25486; Streptococcus thermophilus; Streptomyces viridochromogenes DSM 40736; Streptosporangium roseum DSM 43021; Synechococcus sp. PCC 7335; and Thermosipho africanus TCF52B (Chylinski et al., RNA Biol., 2013; 10(5): 726-737).

[0093] In addition to Cas9 orthologs, other Cas9 variants such as fusion proteins of inactive dCas9 and effector domains with different functions may be served as a platform for genetic modulation. Any of the foregoing enzymes may be useful in the present disclosure.

[0094] Further examples of endonucleases which may be utilized in the present disclosure are given in SEQ ID NOs: 1-620. These proteins may be modified before use or may be encoded in a nucleic acid sequence such as a DNA, RNA or mRNA or within a vector construct such as the plasmids or AAV vectors taught herein. Further, they may be codon optimized.

[0095] SEQ ID NOs: 1-620 disclose a non-exhaustive list of endonuclease sequences.

### Genome-Targeting Nucleic Acid

[0096] The present disclosure provides a genome-targeting nucleic acid that can direct the activities of an associated polypeptide (e.g., a site-directed polypeptide) to a specific target sequence within a target nucleic acid. The genome-targeting nucleic acid can be an RNA. A genome-targeting RNA is referred to as a “guide RNA” or “gRNA” herein. A guide RNA can comprise at least a spacer sequence that hybridizes to a target nucleic acid sequence of interest, and a CRISPR repeat sequence. In Type II systems, the gRNA also comprises a second RNA called the tracrRNA sequence. In the Type II guide RNA (gRNA), the CRISPR repeat sequence and tracrRNA sequence hybridize to each other to form a duplex. In the Type V guide RNA (gRNA), the crRNA forms a duplex. In both systems, the duplex can bind a site-directed polypeptide, such that the guide RNA and site-direct polypeptide form a complex. The genome-targeting nucleic acid can provide target specificity to the complex by virtue of its association with the site-directed polypeptide. The genome-targeting nucleic acid thus can direct the activity of the site-directed polypeptide.

[0097] Exemplary guide RNAs include the spacer sequences 15-200 bases wherein the genome location is based on the GRCh38 human genome assembly. The ANGPTL3 gene can be located on Chromosome 1: 62,597,486-62,606,304 (Genome Reference Consortium—GRCh38).

[0098] Exemplary guide RNAs include the spacer sequences based on the RNA version of the DNA sequences presented in SEQ ID NOs: 5,305-17,018. As is understood by the person of ordinary skill in the art, each guide RNA can be designed to include a spacer sequence complementary to its genomic target sequence. For example, each of the spacer sequences, e.g., the RNA version of the DNA sequences presented in SEQ ID NOs: 5,305-17,018, can be put into a single RNA chimera or a crRNA (along with a corresponding tracrRNA). See Jinek et al., Science, 337, 816-821 (2012) and Deltcheva et al., Nature, 471, 602-607 (2011).

[0099] The genome-targeting nucleic acid can be a double-molecule guide RNA. The genome-targeting nucleic acid can be a single-molecule guide RNA.

[0100] A double-molecule guide RNA can comprise two strands of RNA. The first strand comprises in the 5′ to 3′ direction, an optional spacer extension sequence, a spacer sequence and a minimum CRISPR repeat sequence. The second strand can comprise a minimum tracrRNA sequence (complementary to the minimum CRISPR repeat sequence), a 3′ tracrRNA sequence and an optional tracrRNA extension sequence.

[0101] A single-molecule guide RNA (sgRNA) in a Type II system can comprise, in the 5′ to 3′ direction, an optional spacer extension sequence, a spacer sequence, a minimum CRISPR repeat sequence, a single-molecule guide linker, a minimum tracrRNA sequence, a 3′ tracrRNA sequence and an optional tracrRNA extension sequence. The optional tracrRNA extension can comprise elements that contribute additional functionality (e.g., stability) to the guide RNA. The single-molecule guide linker can link the minimum CRISPR repeat and the minimum tracrRNA sequence to form a hairpin structure. The optional tracrRNA extension can comprise one or more hairpins.

[0102] The sgRNA can comprise a 20 nucleotide spacer sequence at the 5′ end of the sgRNA sequence. The sgRNA can comprise a less than a 20 nucleotide spacer sequence at the 5′ end of the sgRNA sequence. The sgRNA can comprise a more than 20 nucleotide spacer sequence at the 5′ end of the sgRNA sequence. The sgRNA can comprise a variable length spacer sequence with 17-30 nucleotides at the 5′ end of the sgRNA sequence (see Table 1).

[0103] The sgRNA can comprise no uracil at the 3′end of the sgRNA sequence, such as in SEQ ID NO: 17,051 of Table 1. The sgRNA can comprise one or more uracil at the 3′end of the sgRNA sequence, such as in SEQ ID NO: 17,052 in Table 1. For example, the sgRNA can comprise 1 uracil (U) at the 3′ end of the sgRNA sequence. The sgRNA can comprise 2 uracil (UU) at the 3′ end of the sgRNA sequence. The sgRNA can comprise 3 uracil (UUU) at the 3′ end of the sgRNA sequence. The sgRNA can comprise 4 uracil (UUUU) at the 3′ end of the sgRNA sequence. The sgRNA can comprise 5 uracil (UUUUU) at the 3′ end of the sgRNA sequence. The sgRNA can comprise 6 uracil (UUUUUU) at the 3′ end of the sgRNA sequence. The sgRNA can comprise 7 uracil (UUUUUUU) at the 3′ end of the sgRNA sequence. The sgRNA can comprise 8 uracil (UUUUUUUU) at the 3′ end of the sgRNA sequence.

[0104] The sgRNA can be unmodified or modified. For example, modified sgRNAs can comprise one or more 2′-O-methyl and/or 2′-O-methyl phosphorothioate nucleotides.

TABLE 1
Unmodified sgRNAs

| SEQ ID | |
|---|---|
| NO. | sgRNA sequence |
| 17,050 | NNNNNNNNNNNNNNNNNNNNGUUUUAGAGCUAGAAAUAGC |
| | AAGUUAAAAUAAGGCUAGUCCGUUAUCAACUUGAAAAAGU |
| | GGCACCGAGUCGGUGCUUUU |
| 17,051 | NNNNNNNNNNNNNNNNNNNNGUUUUAGAGCUAGAAAUAGC |
| | AAGUUAAAAUAAGGCUAGUCCGUUAUCAACUUGAAAAAGU |
| | GGCACCGAGUCGGUGC |
| 17,052 | N₍₁₇₋₃₀₎GUUUUAGAGCUAGAAAUAGCAAGUUAAAAUAA |
| | GGCUAGUCCGUUAUCAACUUGAAAAAGU GGCACCGAGU |
| | CGGUGCU₍₁₋₈₎ |

[0105] A single-molecule guide RNA (sgRNA) in a Type V system can comprise, in the 5′ to 3′ direction, a minimum CRISPR repeat sequence and a spacer sequence.

[0106] By way of illustration, guide RNAs used in the CRISPR/Cas9 or CRISPR/Cpf1 system, or other smaller RNAs can be readily synthesized by chemical means, as illustrated below and described in the art. While chemical synthetic procedures are continually expanding, purifications of such RNAs by procedures such as high performance liquid chromatography (HPLC, which avoids the use of gels such as PAGE) tends to become more challenging as polynucleotide lengths increase significantly beyond a hundred or so nucleotides. One approach used for generating RNAs of greater length is to produce two or more molecules that are ligated together. Much longer RNAs, such as those encoding a Cas9 or Cpf1 endonuclease, are more readily generated enzymatically. Various types of RNA modifications can be introduced during or after chemical synthesis and/or enzymatic generation of RNAs, e.g., modifications that enhance stability, reduce the likelihood or degree of innate immune response, and/or enhance other attributes, as described in the art. Spacer Extension Sequence

[0107] In some examples of genome-targeting nucleic acids, a spacer extension sequence can modify activity, provide stability and/or provide a location for modifications of a genome-targeting nucleic acid. A spacer extension sequence can modify on- or off-target activity or specificity. In some examples, a spacer extension sequence can be provided. The spacer extension sequence can have a length of more than 1, 5, 10, 15, 20, 25, 30, 35, 40, 45, 50, 60, 70, 80, 90, 100, 120, 140, 160, 180, 200, 220, 240, 260, 280, 300, 320, 340, 360, 380, 400, 1000, 2000, 3000, 4000, 5000, 6000, or 7000 or more nucleotides. The spacer extension sequence can have a length of less than 1, 5, 10, 15, 20, 25, 30, 35, 40, 45, 50, 60, 70, 80, 90, 100, 120, 140, 160, 180, 200, 220, 240, 260, 280, 300, 320, 340, 360, 380, 400, 1000, 2000, 3000, 4000, 5000, 6000, 7000 or more nucleotides. The spacer extension sequence can be less than 10 nucleotides in length. The spacer extension sequence can be between 10-30 nucleotides in length. The spacer extension sequence can be between 30-70 nucleotides in length.

[0108] The spacer extension sequence can comprise another moiety (e.g., a stability control sequence, an endoribonuclease binding sequence, a ribozyme). The moiety can decrease or increase the stability of a nucleic acid targeting nucleic acid. The moiety can be a transcriptional terminator segment (i.e., a transcription termination sequence). The moiety can function in a eukaryotic cell. The moiety can function in a prokaryotic cell. The moiety can function in both eukaryotic and prokaryotic cells. Non-limiting examples of suitable moieties include: a 5′ cap (e.g., a 7-methylguanylate cap (m7 G)), a riboswitch sequence (e.g., to allow for regulated stability and/or regulated accessibility by proteins and protein complexes), a sequence that forms a dsRNA duplex (i.e., a hairpin), a sequence that targets the RNA to a subcellular location (e.g., nucleus, mitochondria, chloroplasts, and the like), a modification or sequence that provides for tracking (e.g., direct conjugation to a fluorescent molecule, conjugation to a moiety that facilitates fluorescent detection, a sequence that allows for fluorescent detection, etc.), and/or a modification or sequence that provides a binding site for proteins (e.g., proteins that act on DNA, including transcriptional activators, transcriptional repressors, DNA methyltransferases, DNA demethylases, histone acetyltransferases, histone deacetylases, and the like).

### Spacer Sequence

[0109] The spacer sequence hybridizes to a sequence in a target nucleic acid of interest. The spacer of a genome-targeting nucleic acid can interact with a target nucleic acid in a sequence-specific manner via hybridization (i.e., base pairing). The nucleotide sequence of the spacer can vary depending on the sequence of the target nucleic acid of interest.

[0110] In a CRISPR/Cas system herein, the spacer sequence can be designed to hybridize to a target nucleic acid that is located 5′ of a PAM of the Cas9 enzyme used in the system. The spacer may perfectly match the target sequence or may have mismatches. Each Cas9 enzyme has a particular PAM sequence that it recognizes in a target DNA. For example, S. pyogenes recognizes in a target nucleic acid a PAM that comprises the sequence 5′-NRG-3′, where R comprises either A or G, where N is any nucleotide and N is immediately 3′ of the target nucleic acid sequence targeted by the spacer sequence.

[0111] The target nucleic acid sequence can comprise 20 nucleotides. The target nucleic acid can comprise less than 20 nucleotides. The target nucleic acid can comprise more than 20 nucleotides. The target nucleic acid can comprise at least: 5, 10, 15, 16, 17, 18, 19, 20, 21, 22, 23, 24, 25, 30 or more nucleotides. The target nucleic acid can comprise at most: 5, 10, 15, 16, 17, 18, 19, 20, 21, 22, 23, 24, 25, 30 or more nucleotides. The target nucleic acid sequence can comprise 20 bases immediately 5′ of the first nucleotide of the PAM. For example, in a sequence comprising 5′-NNNNNNNNNNNNNNNNNNNNNRG-3′ (SEQ ID NO: 17049), the target nucleic acid can comprise the sequence that corresponds to the Ns, wherein N is any nucleotide, and the underlined NRG sequence is the S. pyogenes PAM. This target nucleic acid sequence is often referred to as the PAM strand, and the complementary nucleic acid sequence is often referred to the non-PAM strand. One of skill in the art would recognize that the spacer sequence hybridizes to the non-PAM strand of the target nucleic acid (FIGS. 1A and 1B).

[0112] The spacer sequence that hybridizes to the target nucleic acid can have a length of at least about 6 nucleotides (nt). The spacer sequence can be at least about 6 nt, at least about 10 nt, at least about 15 nt, at least about 18 nt, at least about 19 nt, at least about 20 nt, at least about 25 nt, at least about 30 nt, at least about 35 nt or at least about 40 nt, from about 6 nt to about 80 nt, from about 6 nt to about 50 nt, from about 6 nt to about 45 nt, from about 6 nt to about 40 nt, from about 6 nt to about 35 nt, from about 6 nt to about 30 nt, from about 6 nt to about 25 nt, from about 6 nt to about 20 nt, from about 6 nt to about 19 nt, from about 10 nt to about 50 nt, from about 10 nt to about 45 nt, from about 10 nt to about 40 nt, from about 10 nt to about 35 nt, from about 10 nt to about 30 nt, from about 10 nt to about 25 nt, from about 10 nt to about 20 nt, from about 10 nt to about 19 nt, from about 19 nt to about 25 nt, from about 19 nt to about 30 nt, from about 19 nt to about 35 nt, from about 19 nt to about 40 nt, from about 19 nt to about 45 nt, from about 19 nt to about 50 nt, from about 19 nt to about 60 nt, from about 20 nt to about 25 nt, from about 20 nt to about 30 nt, from about 20 nt to about 35 nt, from about 20 nt to about 40 nt, from about 20 nt to about 45 nt, from about 20 nt to about 50 nt, or from about 20 nt to about 60 nt. In some examples, the spacer sequence can comprise 20 nucleotides. In some examples, the spacer can comprise 19 nucleotides. In some examples, the spacer can comprise 18 nucleotides. In some examples, the spacer can comprise 22 nucleotides.

[0113] In some examples, the percent complementarity between the spacer sequence and the non-PAM strand of the target nucleic acid is at least about 30%, at least about 40%, at least about 50%, at least about 60%, at least about 65%, at least about 70%, at least about 75%, at least about 80%, at least about 85%, at least about 90%, at least about 95%, at least about 97%, at least about 98%, at least about 99%, or 100%. In some examples, the percent complementarity between the spacer sequence and the target nucleic acid is at most about 30%, at most about 40%, at most about 50%, at most about 60%, at most about 65%, at most about 70%, at most about 75%, at most about 80%, at most about 85%, at most about 90%, at most about 95%, at most about 97%, at most about 98%, at most about 99%, or 100%. In some examples, the percent complementarity between the spacer sequence and the target nucleic acid is 100% over the six contiguous 5′-most nucleotides of the target sequence of the complementary strand of the target nucleic acid. The percent complementarity between the spacer sequence and the target nucleic acid can be at least 60% over about 20 contiguous nucleotides. The length of the spacer sequence and the target nucleic acid can differ by 1 to 6 nucleotides, which may be thought of as a bulge or bulges.

[0114] The spacer sequence can be designed or chosen using a computer program. The computer program can use variables, such as predicted melting temperature, secondary structure formation, predicted annealing temperature, sequence identity, genomic context, chromatin accessibility, % GC, frequency of genomic occurrence (e.g., of sequences that are identical or are similar but vary in one or more spots as a result of mismatch, insertion or deletion), methylation status, presence of SNPs, and the like.

### Minimum CRISPR Repeat Sequence

[0115] In some aspects, a minimum CRISPR repeat sequence is a sequence with at least about 30%, about 40%, about 50%, about 60%, about 65%, about 70%, about 75%, about 80%, about 85%, about 90%, about 95%, or 100% sequence identity to a reference CRISPR repeat sequence (e.g., crRNA from S. pyogenes).

[0116] In some aspects, a minimum CRISPR repeat sequence comprises nucleotides that can hybridize to a minimum tracrRNA sequence in a cell. The minimum CRISPR repeat sequence and a minimum tracrRNA sequence can form a duplex, i.e. a base-paired double-stranded structure. Together, the minimum CRISPR repeat sequence and the minimum tracrRNA sequence can bind to the site-directed polypeptide. At least a part of the minimum CRISPR repeat sequence can hybridize to the minimum tracrRNA sequence. In some aspects, at least a part of the minimum CRISPR repeat sequence comprises at least about 30%, about 40%, about 50%, about 60%, about 65%, about 70%, about 75%, about 80%, about 85%, about 90%, about 95%, or 100% complementary to the minimum tracrRNA sequence. At least a part of the minimum CRISPR repeat sequence can comprise at most about 30%, about 40%, about 50%, about 60%, about 65%, about 70%, about 75%, about 80%, about 85%, about 90%, about 95%, or 100% complementary to the minimum tracrRNA sequence.

[0117] The minimum CRISPR repeat sequence can have a length from about 7 nucleotides to about 100 nucleotides. For example, the length of the minimum CRISPR repeat sequence is from about 7 nucleotides (nt) to about 50 nt, from about 7 nt to about 40 nt, from about 7 nt to about 30 nt, from about 7 nt to about 25 nt, from about 7 nt to about 20 nt, from about 7 nt to about 15 nt, from about 8 nt to about 40 nt, from about 8 nt to about 30 nt, from about 8 nt to about 25 nt, from about 8 nt to about 20 nt, from about 8 nt to about 15 nt, from about 15 nt to about 100 nt, from about 15 nt to about 80 nt, from about 15 nt to about 50 nt, from about 15 nt to about 40 nt, from about 15 nt to about 30 nt, or from about 15 nt to about 25 nt. In some aspects, the minimum CRISPR repeat sequence is approximately 9 nucleotides in length. In some aspects, the minimum CRISPR repeat sequence is approximately 12 nucleotides in length.

[0118] The minimum CRISPR repeat sequence can be at least about 60% identical to a reference minimum CRISPR repeat sequence (e.g., wild-type crRNA from S. pyogenes) over a stretch of at least 6, 7, or 8 contiguous nucleotides. For example, the minimum CRISPR repeat sequence can be at least about 65% identical, at least about 70% identical, at least about 75% identical, at least about 80% identical, at least about 85% identical, at least about 90% identical, at least about 95% identical, at least about 98% identical, at least about 99% identical or 100% identical to a reference minimum CRISPR repeat sequence over a stretch of at least 6, 7, or 8 contiguous nucleotides.

Minimum tracrRNA Sequence

[0119] A minimum tracrRNA sequence can be a sequence with at least about 30%, about 40%, about 50%, about 60%, about 65%, about 70%, about 75%, about 80%, about 85%, about 90%, about 95%, or 100% sequence identity to a reference tracrRNA sequence (e.g., wild type tracrRNA from S. pyogenes).

[0120] A minimum tracrRNA sequence can comprise nucleotides that hybridize to a minimum CRISPR repeat sequence in a cell. A minimum tracrRNA sequence and a minimum CRISPR repeat sequence form a duplex, i.e. a base-paired double-stranded structure. Together, the minimum tracrRNA sequence and the minimum CRISPR repeat can bind to a site-directed polypeptide. At least a part of the minimum tracrRNA sequence can hybridize to the minimum CRISPR repeat sequence. The minimum tracrRNA sequence can be at least about 30%, about 40%, about 50%, about 60%, about 65%, about 70%, about 75%, about 80%, about 85%, about 90%, about 95%, or 100% complementary to the minimum CRISPR repeat sequence.

[0121] The minimum tracrRNA sequence can have a length from about 7 nucleotides to about 100 nucleotides. For example, the minimum tracrRNA sequence can be from about 7 nucleotides (nt) to about 50 nt, from about 7 nt to about 40 nt, from about 7 nt to about 30 nt, from about 7 nt to about 25 nt, from about 7 nt to about 20 nt, from about 7 nt to about 15 nt, from about 8 nt to about 40 nt, from about 8 nt to about 30 nt, from about 8 nt to about 25 nt, from about 8 nt to about 20 nt, from about 8 nt to about 15 nt, from about 15 nt to about 100 nt, from about 15 nt to about 80 nt, from about 15 nt to about 50 nt, from about 15 nt to about 40 nt, from about 15 nt to about 30 nt or from about 15 nt to about 25 nt long. The minimum tracrRNA sequence can be approximately 9 nucleotides in length. The minimum tracrRNA sequence can be approximately 12 nucleotides. The minimum tracrRNA can consist of tracrRNA nt 23-48 described in Jinek et al., supra.

[0122] The minimum tracrRNA sequence can be at least about 60% identical to a reference minimum tracrRNA (e.g., wild type, tracrRNA from S. pyogenes) sequence over a stretch of at least 6, 7, or 8 contiguous nucleotides. For example, the minimum tracrRNA sequence can be at least about 65% identical, about 70% identical, about 75% identical, about 80% identical, about 85% identical, about 90% identical, about 95% identical, about 98% identical, about 99% identical or 100% identical to a reference minimum tracrRNA sequence over a stretch of at least 6, 7, or 8 contiguous nucleotides.

[0123] The duplex between the minimum CRISPR RNA and the minimum tracrRNA can comprise a double helix. The duplex between the minimum CRISPR RNA and the minimum tracrRNA can comprise at least about 1, 2, 3, 4, 5, 6, 7, 8, 9, or 10 or more nucleotides. The duplex between the minimum CRISPR RNA and the minimum tracrRNA can comprise at most about 1, 2, 3, 4, 5, 6, 7, 8, 9, or 10 or more nucleotides.

[0124] The duplex can comprise a mismatch (i.e., the two strands of the duplex are not 100% complementary). The duplex can comprise at least about 1, 2, 3, 4, or 5 or mismatches. The duplex can comprise at most about 1, 2, 3, 4, or 5 or mismatches. The duplex can comprise no more than 2 mismatches.

### Bulges

[0125] In some cases, there can be a “bulge” in the duplex between the minimum CRISPR RNA and the minimum tracrRNA. A bulge is an unpaired region of nucleotides within the duplex. A bulge can contribute to the binding of the duplex to the site-directed polypeptide. The bulge can comprise, on one side of the duplex, an unpaired 5′-rrrn-3′ (SEQ ID NO: 17,053) where r is any purine and n comprises a nucleotide that can form a wobble pair with a nucleotide on the opposite strand, and an unpaired nucleotide region on the other side of the duplex. The number of unpaired nucleotides on the two sides of the duplex can be different.

[0126] In one example, the bulge can comprise an unpaired purine (e.g., adenine) on the minimum CRISPR repeat strand of the bulge. In some examples, the bulge can comprise an unpaired 5′-AAGn-3′ (SEQ ID NO: 17,067) of the minimum tracrRNA sequence strand of the bulge, where n comprises a nucleotide that can form a wobble pairing with a nucleotide on the minimum CRISPR repeat strand.

[0127] A bulge on the minimum CRISPR repeat side of the duplex can comprise at least 1, 2, 3, 4, or 5 or more unpaired nucleotides. A bulge on the minimum CRISPR repeat side of the duplex can comprise at most 1, 2, 3, 4, or 5 or more unpaired nucleotides. A bulge on the minimum CRISPR repeat side of the duplex can comprise 1 unpaired nucleotide.

[0128] A bulge on the minimum tracrRNA sequence side of the duplex can comprise at least 1, 2, 3, 4, 5, 6, 7, 8, 9, or 10 or more unpaired nucleotides. A bulge on the minimum tracrRNA sequence side of the duplex can comprise at most 1, 2, 3, 4, 5, 6, 7, 8, 9, or 10 or more unpaired nucleotides. A bulge on a second side of the duplex (e.g., the minimum tracrRNA sequence side of the duplex) can comprise 4 unpaired nucleotides.

[0129] A bulge can comprise at least one wobble pairing. In some examples, a bulge can comprise at most one wobble pairing. A bulge can comprise at least one purine nucleotide. A bulge can comprise at least 3 purine nucleotides. A bulge sequence can comprise at least 5 purine nucleotides. A bulge sequence can comprise at least one guanine nucleotide. In some examples, a bulge sequence can comprise at least one adenine nucleotide.

### Hairpins

[0130] In various examples, one or more hairpins can be located 3′ to the minimum tracrRNA in the 3′ tracrRNA sequence.

[0131] The hairpin can start at least about 1, 2, 3, 4, 5, 6, 7, 8, 9, 10, 15, or 20 or more nucleotides 3′ from the last paired nucleotide in the minimum CRISPR repeat and minimum tracrRNA sequence duplex. The hairpin can start at most about 1, 2, 3, 4, 5, 6, 7, 8, 9 or 10 or more nucleotides 3′ of the last paired nucleotide in the minimum CRISPR repeat and minimum tracrRNA sequence duplex.

[0132] The hairpin can comprise at least about 1, 2, 3, 4, 5, 6, 7, 8, 9, 10, 15, or 20 or more consecutive nucleotides. The hairpin can comprise at most about 1, 2, 3, 4, 5, 6, 7, 8, 9, 10, 15, or more consecutive nucleotides.

[0133] The hairpin can comprise a CC dinucleotide (i.e., two consecutive cytosine nucleotides).

[0134] The hairpin can comprise duplexed nucleotides (e.g., nucleotides in a hairpin, hybridized together). For example, a hairpin can comprise a CC dinucleotide that is hybridized to a GG dinucleotide in a hairpin duplex of the 3′ tracrRNA sequence.

[0135] One or more of the hairpins can interact with guide RNA-interacting regions of a site-directed polypeptide.

[0136] In some examples, there are two or more hairpins, and in other examples there are three or more hairpins.

3′ tracrRNA sequence

[0137] A 3′ tracrRNA sequence can comprise a sequence with at least about 30%, about 40%, about 50%, about 60%, about 65%, about 70%, about 75%, about 80%, about 85%, about 90%, about 95%, or 100% sequence identity to a reference tracrRNA sequence (e.g., a tracrRNA from S. pyogenes).

[0138] The 3′ tracrRNA sequence can have a length from about 6 nucleotides to about 100 nucleotides. For example, the 3′ tracrRNA sequence can have a length from about 6 nucleotides (nt) to about 50 nt, from about 6 nt to about 40 nt, from about 6 nt to about 30 nt, from about 6 nt to about 25 nt, from about 6 nt to about 20 nt, from about 6 nt to about 15 nt, from about 8 nt to about 40 nt, from about 8 nt to about 30 nt, from about 8 nt to about 25 nt, from about 8 nt to about 20 nt, from about 8 nt to about 15 nt, from about 15 nt to about 100 nt, from about 15 nt to about 80 nt, from about 15 nt to about 50 nt, from about 15 nt to about 40 nt, from about 15 nt to about 30 nt, or from about 15 nt to about 25 nt. The 3′ tracrRNA sequence can have a length of approximately 14 nucleotides.

[0139] The 3′ tracrRNA sequence can be at least about 60% identical to a reference 3′ tracrRNA sequence (e.g., wild type 3′ tracrRNA sequence from S. pyogenes) over a stretch of at least 6, 7, or 8 contiguous nucleotides. For example, the 3′ tracrRNA sequence can be at least about 60% identical, about 65% identical, about 70% identical, about 75% identical, about 80% identical, about 85% identical, about 90% identical, about 95% identical, about 98% identical, about 99% identical, or 100% identical, to a reference 3′ tracrRNA sequence (e.g., wild type 3′ tracrRNA sequence from S. pyogenes) over a stretch of at least 6, 7, or 8 contiguous nucleotides.

[0140] The 3′ tracrRNA sequence can comprise more than one duplexed region (e.g., hairpin, hybridized region). The 3′ tracrRNA sequence can comprise two duplexed regions.

[0141] The 3′ tracrRNA sequence can comprise a stem loop structure. The stem loop structure in the 3′ tracrRNA can comprise at least 1, 2, 3, 4, 5, 6, 7, 8, 9, 10, 15 or 20 or more nucleotides. The stem loop structure in the 3′ tracrRNA can comprise at most 1, 2, 3, 4, 5, 6, 7, 8, 9 or 10 or more nucleotides. The stem loop structure can comprise a functional moiety. For example, the stem loop structure can comprise an aptamer, a ribozyme, a protein-interacting hairpin, a CRISPR array, an intron, or an exon. The stem loop structure can comprise at least about 1, 2, 3, 4, or 5 or more functional moieties. The stem loop structure can comprise at most about 1, 2, 3, 4, or 5 or more functional moieties.

[0142] The hairpin in the 3′ tracrRNA sequence can comprise a P-domain. In some examples, the P-domain can comprise a double-stranded region in the hairpin.

tracrRNA Extension Sequence

[0143] A tracrRNA extension sequence may be provided whether the tracrRNA is in the context of single-molecule guides or double-molecule guides. The tracrRNA extension sequence can have a length from about 1 nucleotide to about 400 nucleotides. The tracrRNA extension sequence can have a length of more than 1, 5, 10, 15, 20, 25, 30, 35, 40, 45, 50, 60, 70, 80, 90, 100, 120, 140, 160, 180, 200, 220, 240, 260, 280, 300, 320, 340, 360, 380, or 400 nucleotides. The tracrRNA extension sequence can have a length from about 20 to about 5000 or more nucleotides. The tracrRNA extension sequence can have a length of more than 1000 nucleotides. The tracrRNA extension sequence can have a length of less than 1, 5, 10, 15, 20, 25, 30, 35, 40, 45, 50, 60, 70, 80, 90, 100, 120, 140, 160, 180, 200, 220, 240, 260, 280, 300, 320, 340, 360, 380, 400 or more nucleotides. The tracrRNA extension sequence can have a length of less than 1000 nucleotides. The tracrRNA extension sequence can comprise less than 10 nucleotides in length. The tracrRNA extension sequence can be 10-30 nucleotides in length. The tracrRNA extension sequence can be 30-70 nucleotides in length.

[0144] The tracrRNA extension sequence can comprise a functional moiety (e.g., a stability control sequence, ribozyme, endoribonuclease binding sequence). The functional moiety can comprise a transcriptional terminator segment (i.e., a transcription termination sequence). The functional moiety can have a total length from about 10 nucleotides (nt) to about 100 nucleotides, from about 10 nt to about 20 nt, from about 20 nt to about 30 nt, from about 30 nt to about 40 nt, from about 40 nt to about 50 nt, from about 50 nt to about 60 nt, from about 60 nt to about 70 nt, from about 70 nt to about 80 nt, from about 80 nt to about 90 nt, or from about 90 nt to about 100 nt, from about 15 nt to about 80 nt, from about 15 nt to about 50 nt, from about 15 nt to about 40 nt, from about 15 nt to about 30 nt, or from about 15 nt to about 25 nt. The functional moiety can function in a eukaryotic cell. The functional moiety can function in a prokaryotic cell. The functional moiety can function in both eukaryotic and prokaryotic cells.

[0145] Non-limiting examples of suitable tracrRNA extension functional moieties include a 3′ poly-adenylated tail, a riboswitch sequence (e.g., to allow for regulated stability and/or regulated accessibility by proteins and protein complexes), a sequence that forms a dsRNA duplex (i.e., a hairpin), a sequence that targets the RNA to a subcellular location (e.g., nucleus, mitochondria, chloroplasts, and the like), a modification or sequence that provides for tracking (e.g., direct conjugation to a fluorescent molecule, conjugation to a moiety that facilitates fluorescent detection, a sequence that allows for fluorescent detection, etc.), and/or a modification or sequence that provides a binding site for proteins (e.g., proteins that act on DNA, including transcriptional activators, transcriptional repressors, DNA methyltransferases, DNA demethylases, histone acetyltransferases, histone deacetylases, and the like). The tracrRNA extension sequence can comprise a primer binding site or a molecular index (e.g., barcode sequence). The tracrRNA extension sequence can comprise one or more affinity tags.

### Single-Molecule Guide Linker Sequence

[0146] The linker sequence of a single-molecule guide nucleic acid can have a length from about 3 nucleotides to about 100 nucleotides. In Jinek et al., supra, for example, a simple 4 nucleotide “tetraloop” (-GAAA-) was used, Science, 337(6096):816-821 (2012). An illustrative linker has a length from about 3 nucleotides (nt) to about 90 nt, from about 3 nt to about 80 nt, from about 3 nt to about 70 nt, from about 3 nt to about 60 nt, from about 3 nt to about 50 nt, from about 3 nt to about 40 nt, from about 3 nt to about 30 nt, from about 3 nt to about 20 nt, from about 3 nt to about 10 nt. For example, the linker can have a length from about 3 nt to about 5 nt, from about 5 nt to about 10 nt, from about 10 nt to about 15 nt, from about 15 nt to about 20 nt, from about 20 nt to about 25 nt, from about 25 nt to about 30 nt, from about 30 nt to about 35 nt, from about 35 nt to about 40 nt, from about 40 nt to about 50 nt, from about 50 nt to about 60 nt, from about 60 nt to about 70 nt, from about 70 nt to about 80 nt, from about 80 nt to about 90 nt, or from about 90 nt to about 100 nt. The linker of a single-molecule guide nucleic acid can be between 4 and 40 nucleotides. The linker can be at least about 100, 500, 1000, 1500, 2000, 2500, 3000, 3500, 4000, 4500, 5000, 5500, 6000, 6500, or 7000 or more nucleotides. The linker can be at most about 100, 500, 1000, 1500, 2000, 2500, 3000, 3500, 4000, 4500, 5000, 5500, 6000, 6500, or 7000 or more nucleotides.

[0147] Linkers can comprise any of a variety of sequences, although in some examples the linker will not comprise sequences that have extensive regions of homology with other portions of the guide RNA, which might cause intramolecular binding that could interfere with other functional regions of the guide. In Jinek et al., supra, a simple 4 nucleotide sequence -GAAA- was used, Science, 337(6096):816-821 (2012), but numerous other sequences, including longer sequences can likewise be used.

[0148] The linker sequence can comprise a functional moiety. For example, the linker sequence can comprise one or more features, including an aptamer, a ribozyme, a protein-interacting hairpin, a protein binding site, a CRISPR array, an intron, or an exon. The linker sequence can comprise at least about 1, 2, 3, 4, or 5 or more functional moieties. In some examples, the linker sequence can comprise at most about 1, 2, 3, 4, or 5 or more functional moieties.

### Nucleic Acid Modifications (Chemical and Structural Modifications)

[0149] In some aspects, polynucleotides introduced into cells can comprise one or more modifications that can be used individually or in combination, for example, to enhance activity, stability or specificity, alter delivery, reduce innate immune responses in host cells, or for other enhancements, as further described herein and known in the art.

[0150] In certain examples, modified polynucleotides can be used in the CRISPR/Cas9 or CRISPR/Cpf1 system, in which case the guide RNAs (either single-molecule guides or double-molecule guides) and/or a DNA or an RNA encoding a Cas9 or Cpf1 endonuclease introduced into a cell can be modified, as described and illustrated below. Such modified polynucleotides can be used in the CRISPR/Cas9 or CRISPR/Cpf1 system to edit any one or more genomic loci.

[0151] Using the CRISPR/Cas9 or CRISPR/Cpf1 system for purposes of nonlimiting illustrations of such uses, modifications of guide RNAs can be used to enhance the formation or stability of the CRISPR/Cas9 or CRISPR/Cpf1 genome editing complex comprising guide RNAs, which can be single-molecule guides or double-molecule, and a Cas9 or Cpf1 endonuclease. Modifications of guide RNAs can also or alternatively be used to enhance the initiation, stability or kinetics of interactions between the genome editing complex with the target sequence in the genome, which can be used, for example, to enhance on-target activity. Modifications of guide RNAs can also or alternatively be used to enhance specificity, e.g., the relative rates of genome editing at the on-target site as compared to effects at other (off-target) sites.

[0152] Modifications can also or alternatively be used to increase the stability of a guide RNA, e.g., by increasing its resistance to degradation by ribonucleases (RNases) present in a cell, thereby causing its half-life in the cell to be increased. Modifications enhancing guide RNA half-life can be particularly useful in aspects in which a Cas9 or Cpf1 endonuclease is introduced into the cell to be edited via an RNA that needs to be translated in order to generate endonuclease, because increasing the half-life of guide RNAs introduced at the same time as the RNA encoding the endonuclease can be used to increase the time that the guide RNAs and the encoded Cas9 or Cpf1 endonuclease co-exist in the cell.

[0153] Modifications can also or alternatively be used to decrease the likelihood or degree to which RNAs introduced into cells elicit innate immune responses. Such responses, which have been well characterized in the context of RNA interference (RNAi), including small-interfering RNAs (siRNAs), as described below and in the art, tend to be associated with reduced half-life of the RNA and/or the elicitation of cytokines or other factors associated with immune responses.

[0154] One or more types of modifications can also be made to RNAs encoding an endonuclease that are introduced into a cell, including, without limitation, modifications that enhance the stability of the RNA (such as by increasing its degradation by RNases present in the cell), modifications that enhance translation of the resulting product (i.e. the endonuclease), and/or modifications that decrease the likelihood or degree to which the RNAs introduced into cells elicit innate immune responses.

[0155] Combinations of modifications, such as the foregoing and others, can likewise be used. In the case of CRISPR/Cas9 or CRISPR/Cpf1, for example, one or more types of modifications can be made to guide RNAs (including those exemplified above), and/or one or more types of modifications can be made to RNAs encoding Cas endonuclease (including those exemplified above).

[0156] By way of illustration, guide RNAs used in the CRISPR/Cas9 or CRISPR/Cpf1 system, or other smaller RNAs can be readily synthesized by chemical means, enabling a number of modifications to be readily incorporated, as illustrated below and described in the art. While chemical synthetic procedures are continually expanding, purifications of such RNAs by procedures such as high performance liquid chromatography (HPLC, which avoids the use of gels such as PAGE) tends to become more challenging as polynucleotide lengths increase significantly beyond a hundred or so nucleotides. One approach that can be used for generating chemically-modified RNAs of greater length is to produce two or more molecules that are ligated together. Much longer RNAs, such as those encoding a Cas9 endonuclease, are more readily generated enzymatically. While fewer types of modifications are available for use in enzymatically produced RNAs, there are still modifications that can be used to, e.g., enhance stability, reduce the likelihood or degree of innate immune response, and/or enhance other attributes, as described further below and in the art; and new types of modifications are regularly being developed.

[0157] By way of illustration of various types of modifications, especially those used frequently with smaller chemically synthesized RNAs, modifications can comprise one or more nucleotides modified at the 2′ position of the sugar, in some aspects a 2′-O-alkyl, 2′-O-alkyl-O-alkyl, or 2′-fluoro-modified nucleotide. In some examples, RNA modifications include 2′-fluoro, 2′-amino or 2′-O-methyl modifications on the ribose of pyrimidines, abasic residues, or an inverted base at the 3′ end of the RNA. Such modifications are routinely incorporated into oligonucleotides and these oligonucleotides have been shown to have a higher Tm (i.e., higher target binding affinity) than 2′-deoxyoligonucleotides against a given target.

[0158] A number of nucleotide and nucleoside modifications have been shown to make the oligonucleotide into which they are incorporated more resistant to nuclease digestion than the native oligonucleotide; these modified oligos survive intact for a longer time than unmodified oligonucleotides. Specific examples of modified oligonucleotides include those comprising modified backbones, for example, phosphorothioates, phosphotriesters, methyl phosphonates, short chain alkyl or cycloalkyl intersugar linkages or short chain heteroatomic or heterocyclic intersugar linkages. Some oligonucleotides are oligonucleotides with phosphorothioate backbones and those with heteroatom backbones, particularly CH₂—NH—O—CH₂, CH,—N(CH₃)—O—CH₂ (known as a methylene(methylimino) or MMI backbone), CH₂—O—N(CH₃)—CH₂, CH₂—N(CH₃)—N(CH₃)—CH₂ and O—N(CH₃)— CH₂—CH₂ backbones, wherein the native phosphodiester backbone is represented as O— P— O— CH); amide backbones [see De Mesmaeker et al., Ace. Chem. Res., 28:366-374 (1995)]; morpholino backbone structures (see Summerton and Weller, U.S. Pat. No. 5,034,506); peptide nucleic acid (PNA) backbone (wherein the phosphodiester backbone of the oligonucleotide is replaced with a polyamide backbone, the nucleotides being bound directly or indirectly to the aza nitrogen atoms of the polyamide backbone, see Nielsen et al., Science 1991, 254, 1497). Phosphorus-containing linkages include, but are not limited to, phosphorothioates, chiral phosphorothioates, phosphorodithioates, phosphotriesters, aminoalkylphosphotriesters, methyl and other alkyl phosphonates comprising 3′alkylene phosphonates and chiral phosphonates, phosphinates, phosphoramidates comprising 3′-amino phosphoramidate and aminoalkylphosphoramidates, thionophosphoramidates, thionoalkylphosphonates, thionoalkylphosphotriesters, and boranophosphates having normal 3′-5′ linkages, 2′-5′ linked analogs of these, and those having inverted polarity wherein the adjacent pairs of nucleoside units are linked 3′-5′ to 5′-3′ or 2′-5′ to 5′-2′; see U.S. Pat. Nos. 3,687,808; 4,469,863; 4,476,301; 5,023,243; 5,177,196; 5,188,897; 5,264,423; 5,276,019; 5,278,302; 5,286,717; 5,321,131; 5,399,676; 5,405,939; 5,453,496; 5,455,233; 5,466,677; 5,476,925; 5,519,126; 5,536,821; 5,541,306; 5,550,111; 5,563,253; 5,571,799; 5,587,361; and 5,625,050.

[0159] Morpholino-based oligomeric compounds are described in Braasch and David Corey, Biochemistry, 41(14): 4503-4510 (2002); Genesis, Volume 30, Issue 3, (2001); Heasman, Dev. Biol., 243: 209-214 (2002); Nasevicius et al., Nat. Genet., 26:216-220 (2000); Lacerra et al., Proc. Natl. Acad. Sci., 97: 9591-9596 (2000); and U.S. Pat. No. 5,034,506, issued Jul. 23, 1991.

[0160] Cyclohexenyl nucleic acid oligonucleotide mimetics are described in Wang et al., J. Am. Chem. Soc., 122: 8595-8602 (2000).

[0161] Modified oligonucleotide backbones that do not include a phosphorus atom therein have backbones that are formed by short chain alkyl or cycloalkyl internucleoside linkages, mixed heteroatom and alkyl or cycloalkyl internucleoside linkages, or one or more short chain heteroatomic or heterocyclic internucleoside linkages. These comprise those having morpholino linkages (formed in part from the sugar portion of a nucleoside); siloxane backbones; sulfide, sulfoxide and sulfone backbones; formacetyl and thioformacetyl backbones; methylene formacetyl and thioformacetyl backbones; alkene containing backbones; sulfamate backbones; methyleneimino and methylenehydrazino backbones; sulfonate and sulfonamide backbones; amide backbones; and others having mixed N, O, S, and CH₂ component parts; see U.S. Pat. Nos. 5,034,506; 5,166,315; 5,185,444; 5,214,134; 5,216,141; 5,235,033; 5,264,562; 5,264,564; 5,405,938; 5,434,257; 5,466,677; 5,470,967; 5,489,677; 5,541,307; 5,561,225; 5,596,086; 5,602,240; 5,610,289; 5,602,240; 5,608,046; 5,610,289; 5,618,704; 5,623,070; 5,663,312; 5,633,360; 5,677,437; and 5,677,439.

[0162] One or more substituted sugar moieties can also be included, e.g., one of the following at the 2′ position: OH, SH, SCH₃, F, OCN, OCH₃, OCH₃ O(CH₂)n CH₃, O(CH₂)n NH₂, or O(CH₂)n CH₃, where n is from 1 to about 10; C1 to C10 lower alkyl, alkoxyalkoxy, substituted lower alkyl, alkaryl or aralkyl; Cl; Br; CN; CF₃; OCF₃; O-, S-, or N-alkyl; O-, S-, or N-alkenyl; SOCH₃; SO₂ CH₃; ONO₂; NO₂; N₃; NH₂; heterocycloalkyl; heterocycloalkaryl; aminoalkylamino; polyalkylamino; substituted silyl; an RNA cleaving group; a reporter group; an intercalator; a group for improving the pharmacokinetic properties of an oligonucleotide; or a group for improving the pharmacodynamic properties of an oligonucleotide and other substituents having similar properties. In some aspects, a modification includes 2′-methoxyethoxy (2′-O—CH₂CH₂OCH₃, also known as 2′-O-(2-methoxyethyl)) (Martin et al, HeIv. Chim. Acta, 1995, 78, 486). Other modifications include 2′-methoxy (2′-O—CH₃), 2′-propoxy (2′-OCH₂ CH₂CH₃) and 2′-fluoro (2′-F). Similar modifications may also be made at other positions on the oligonucleotide, particularly the 3′ position of the sugar on the 3′ terminal nucleotide and the 5′ position of 5′ terminal nucleotide. Oligonucleotides may also have sugar mimetics, such as cyclobutyls in place of the pentofuranosyl group.

[0163] In some examples, both a sugar and an internucleoside linkage, i.e., the backbone, of the nucleotide units can be replaced with novel groups. The base units can be maintained for hybridization with an appropriate nucleic acid target compound. One such oligomeric compound, an oligonucleotide mimetic that has been shown to have excellent hybridization properties, is referred to as a peptide nucleic acid (PNA). In PNA compounds, the sugar-backbone of an oligonucleotide can be replaced with an amide containing backbone, for example, an aminoethylglycine backbone. The nucleobases can be retained and bound directly or indirectly to aza nitrogen atoms of the amide portion of the backbone. Representative United States patents that teach the preparation of PNA compounds comprise, but are not limited to, U.S. Pat. Nos. 5,539,082; 5,714,331; and 5,719,262. Further teaching of PNA compounds can be found in Nielsen et al, Science, 254: 1497-1500 (1991).

[0164] Guide RNAs can also include, additionally or alternatively, nucleobase (often referred to in the art simply as “base”) modifications or substitutions. As used herein, “unmodified” or “natural” nucleobases include adenine (A), guanine (G), thymine (T), cytosine (C), and uracil (U). Modified nucleobases include nucleobases found only infrequently or transiently in natural nucleic acids, e.g., hypoxanthine, 6-methyladenine, 5-Me pyrimidines, particularly 5-methylcytosine (also referred to as 5-methyl-2′ deoxycytosine and often referred to in the art as 5-Me-C), 5-hydroxymethylcytosine (HMC), glycosyl HMC and gentobiosyl HMC, as well as synthetic nucleobases, e.g., 2-aminoadenine, 2-(methylamino)adenine, 2-(imidazolylalkyl)adenine, 2-(aminoalklyamino)adenine or other heterosubstituted alkyladenines, 2-thiouracil, 2-thiothymine, 5-bromouracil, 5-hydroxymethyluracil, 8-azaguanine, 7-deazaguanine, N6 (6-aminohexyl)adenine, and 2,6-diaminopurine. Kornberg, A., DNA Replication, W. H. Freeman & Co., San Francisco, pp 75-77 (1980); Gebeyehu et al., Nucl. Acids Res. 15:4513 (1997). A “universal” base known in the art, e.g., inosine, can also be included. 5-Me-C substitutions have been shown to increase nucleic acid duplex stability by 0.6-1.2° C. (Sanghvi, Y. S., in Crooke, S. T. and Lebleu, B., eds., Antisense Research and Applications, CRC Press, Boca Raton, 1993, pp. 276-278) and are aspects of base substitutions.

[0165] Modified nucleobases can comprise other synthetic and natural nucleobases, such as 5-methylcytosine (5-me-C), 5-hydroxymethyl cytosine, xanthine, hypoxanthine, 2-aminoadenine, 6-methyl and other alkyl derivatives of adenine and guanine, 2-propyl and other alkyl derivatives of adenine and guanine, 2-thiouracil, 2-thiothymine and 2-thiocytosine, 5-halouracil and cytosine, 5-propynyl uracil and cytosine, 6-azo uracil, cytosine and thymine, 5-uracil (pseudo-uracil), 4-thiouracil, 8-halo, 8-amino, 8-thiol, 8-thioalkyl, 8-hydroxyl and other 8-substituted adenines and guanines, 5-halo particularly 5-bromo, 5-trifluoromethyl and other 5-substituted uracils and cytosines, 7-methylquanine and 7-methyladenine, 8-azaguanine and 8-azaadenine, 7-deazaguanine and 7-deazaadenine, and 3-deazaguanine and 3-deazaadenine.

[0166] Further, nucleobases can comprise those disclosed in U.S. Pat. No. 3,687,808, those disclosed in ‘The Concise Encyclopedia of Polymer Science And Engineering’, pages 858-859, Kroschwitz, J. I., ed. John Wiley & Sons, 1990, those disclosed by Englisch et al., Angewandle Chemie, International Edition’, 1991, 30, page 613, and those disclosed by Sanghvi, Y. S., Chapter 15, Antisense Research and Applications’, pages 289-302, Crooke, S. T. and Lebleu, B. ea., CRC Press, 1993. Certain of these nucleobases are particularly useful for increasing the binding affinity of the oligomeric compounds of the disclosure. These include 5-substituted pyrimidines, 6-azapyrimidines and N-2, N-6 and 0-6 substituted purines, comprising 2-aminopropyladenine, 5-propynyluracil and 5-propynylcytosine. 5-methylcytosine substitutions have been shown to increase nucleic acid duplex stability by 0.6-1.2° C. (Sanghvi, Y. S., Crooke, S. T. and Lebleu, B., eds, ‘Antisense Research and Applications’, CRC Press, Boca Raton, 1993, pp. 276-278) and are aspects of base substitutions, even more particularly when combined with 2′-O-methoxyethyl sugar modifications. Modified nucleobases are described in U.S. Pat. No. 3,687,808, as well as U.S. Pat. Nos. 4,845,205; 5,130,302; 5,134,066; 5,175,273; 5,367,066; 5,432,272; 5,457,187; 5,459,255; 5,484,908; 5,502,177; 5,525,711; 5,552,540; 5,587,469; 5,596,091; 5,614,617; 5,681,941; 5,750,692; 5,763,588; 5,830,653; 6,005,096; and US Patent Application Publication 2003/0158403.

[0167] Thus, the term “modified” refers to a non-natural sugar, phosphate, or base that is incorporated into a guide RNA, an endonuclease, or both a guide RNA and an endonuclease. It is not necessary for all positions in a given oligonucleotide to be uniformly modified, and in fact more than one of the aforementioned modifications can be incorporated in a single oligonucleotide, or even in a single nucleoside within an oligonucleotide.

[0168] The guide RNAs and/or mRNA (or DNA) encoding an endonuclease can be chemically linked to one or more moieties or conjugates that enhance the activity, cellular distribution, or cellular uptake of the oligonucleotide. Such moieties comprise, but are not limited to, lipid moieties such as a cholesterol moiety [Letsinger et al., Proc. Natl. Acad. Sci. USA, 86: 6553-6556 (1989)]; cholic acid [Manoharan et al., Bioorg. Med. Chem. Let., 4: 1053-1060 (1994)]; a thioether, e.g., hexyl-S-tritylthiol [Manoharan et al, Ann. N. Y. Acad. Sci., 660: 306-309 (1992) and Manoharan et al., Bioorg. Med. Chem. Let., 3: 2765-2770 (1993)]; a thiocholesterol [Oberhauser et al., Nucl. Acids Res., 20: 533-538 (1992)]; an aliphatic chain, e.g., dodecandiol or undecyl residues [Kabanov et al., FEBS Lett., 259: 327-330 (1990) and Svinarchuk et al., Biochimie, 75: 49-54 (1993)]; a phospholipid, e.g., di-hexadecyl-rac-glycerol or triethylammonium 1,2-di-O-hexadecyl-rac-glycero-3-H-phosphonate [Manoharan et al., Tetrahedron Lett., 36: 3651-3654 (1995) and Shea et al., Nucl. Acids Res., 18: 3777-3783 (1990)]; a polyamine or a polyethylene glycol chain [Mancharan et al., Nucleosides & Nucleotides, 14: 969-973 (1995)]; adamantane acetic acid [Manoharan et al., Tetrahedron Lett., 36: 3651-3654 (1995)]; a palmityl moiety [(Mishra et al., Biochim. Biophys. Acta, 1264: 229-237 (1995)]; or an octadecylamine or hexylamino-carbonyl-t oxycholesterol moiety [Crooke et al., J. Pharmacol. Exp. Ther., 277: 923-937 (1996)]. See also U.S. Pat. Nos. 4,828,979; 4,948,882; 5,218,105; 5,525,465; 5,541,313; 5,545,730; 5,552,538; 5,578,717, 5,580,731; 5,580,731; 5,591,584; 5,109,124; 5,118,802; 5,138,045; 5,414,077; 5,486,603; 5,512,439; 5,578,718; 5,608,046; 4,587,044; 4,605,735; 4,667,025; 4,762,779; 4,789,737; 4,824,941; 4,835,263; 4,876,335; 4,904,582; 4,958,013; 5,082,830; 5,112,963; 5,214,136; 5,082,830; 5,112,963; 5,214,136; 5,245,022; 5,254,469; 5,258,506; 5,262,536; 5,272,250; 5,292,873; 5,317,098; 5,371,241, 5,391,723; 5,416,203, 5,451,463; 5,510,475; 5,512,667; 5,514,785; 5,565,552; 5,567,810; 5,574,142; 5,585,481; 5,587,371; 5,595,726; 5,597,696; 5,599,923; 5,599, 928 and 5,688,941.

[0169] Sugars and other moieties can be used to target proteins and complexes comprising nucleotides, such as cationic polysomes and liposomes, to particular sites. For example, hepatic cell directed transfer can be mediated via asialoglycoprotein receptors (ASGPRs); see, e.g., Hu, et al., Protein Pept Lett. 21(10):1025-30 (2014). Other systems known in the art and regularly developed can be used to target biomolecules of use in the present case and/or complexes thereof to particular target cells of interest.

[0170] These targeting moieties or conjugates can include conjugate groups covalently bound to functional groups, such as primary or secondary hydroxyl groups. Conjugate groups of the disclosure include intercalators, reporter molecules, polyamines, polyamides, polyethylene glycols, polyethers, groups that enhance the pharmacodynamic properties of oligomers, and groups that enhance the pharmacokinetic properties of oligomers. Typical conjugate groups include cholesterols, lipids, phospholipids, biotin, phenazine, folate, phenanthridine, anthraquinone, acridine, fluoresceins, rhodamines, coumarins, and dyes. Groups that enhance the pharmacodynamic properties, in the context of this disclosure, include groups that improve uptake, enhance resistance to degradation, and/or strengthen sequence-specific hybridization with the target nucleic acid. Groups that enhance the pharmacokinetic properties, in the context of this disclosure, include groups that improve uptake, distribution, metabolism or excretion of the compounds of the present disclosure. Representative conjugate groups are disclosed in International Patent Application No. PCT/US92/09196, filed Oct. 23, 1992 (published as WO1993/007883), and U.S. Pat. No. 6,287,860. Conjugate moieties include, but are not limited to, lipid moieties such as a cholesterol moiety, cholic acid, a thioether, e.g., hexyl-5-tritylthiol, a thiocholesterol, an aliphatic chain, e.g., dodecandiol or undecyl residues, a phospholipid, e.g., di-hexadecyl-rac-glycerol or triethylammonium 1,2-di-O-hexadecyl-rac-glycero-3-H-phosphonate, a polyamine or a polyethylene glycol chain, or adamantane acetic acid, a palmityl moiety, or an octadecylamine or hexylamino-carbonyl-oxy cholesterol moiety. See, e.g., U.S. Pat. Nos. 4,828,979; 4,948,882; 5,218,105; 5,525,465; 5,541,313; 5,545,730; 5,552,538; 5,578,717, 5,580,731; 5,580,731; 5,591,584; 5,109,124; 5,118,802; 5,138,045; 5,414,077; 5,486,603; 5,512,439; 5,578,718; 5,608,046; 4,587,044; 4,605,735; 4,667,025; 4,762,779; 4,789,737; 4,824,941; 4,835,263; 4,876,335; 4,904,582; 4,958,013; 5,082,830; 5,112,963; 5,214,136; 5,082,830; 5,112,963; 5,214,136; 5,245,022; 5,254,469; 5,258,506; 5,262,536; 5,272,250; 5,292,873; 5,317,098; 5,371,241, 5,391,723; 5,416,203, 5,451,463; 5,510,475; 5,512,667; 5,514,785; 5,565,552; 5,567,810; 5,574,142; 5,585,481; 5,587,371; 5,595,726; 5,597,696; 5,599,923; 5,599,928 and 5,688,941.

[0171] Longer polynucleotides that are less amenable to chemical synthesis and are typically produced by enzymatic synthesis can also be modified by various means. Such modifications can include, for example, the introduction of certain nucleotide analogs, the incorporation of particular sequences or other moieties at the 5′ or 3′ ends of molecules, and other modifications. By way of illustration, the mRNA encoding Cas9 is approximately 4 kb in length and can be synthesized by in vitro transcription. Modifications to the mRNA can be applied to, e.g., increase its translation or stability (such as by increasing its resistance to degradation with a cell), or to reduce the tendency of the RNA to elicit an innate immune response that is often observed in cells following introduction of exogenous RNAs, particularly longer RNAs such as that encoding Cas9.

[0172] Numerous such modifications have been described in the art, such as polyA tails, 5′ cap analogs (e.g., Anti Reverse Cap Analog (ARCA) or m7G(5′)ppp(5′)G (mCAP)), modified 5′ or 3′ untranslated regions (UTRs), use of modified bases (such as Pseudo-UTP, 2-Thio-UTP, 5-Methylcytidine-5′-Triphosphate (5-Methyl-CTP) or N6-Methyl-ATP), or treatment with phosphatase to remove 5′ terminal phosphates. These and other modifications are known in the art, and new modifications of RNAs are regularly being developed.

[0173] There are numerous commercial suppliers of modified RNAs, including for example, TriLink Biotech, AxoLabs, Bio-Synthesis Inc., Dharmacon and many others. As described by TriLink, for example, 5-Methyl-CTP can be used to impart desirable characteristics, such as increased nuclease stability, increased translation or reduced interaction of innate immune receptors with in vitro transcribed RNA. 5-Methylcytidine-5′-Triphosphate (5-Methyl-CTP), N6-Methyl-ATP, as well as Pseudo-UTP and 2-Thio-UTP, have also been shown to reduce innate immune stimulation in culture and in vivo while enhancing translation, as illustrated in publications by Kormann et al. and Warren et al. referred to below.

[0174] It has been shown that chemically modified mRNA delivered in vivo can be used to achieve improved therapeutic effects; see, e.g., Kormann et al., Nature Biotechnology 29, 154-157 (2011). Such modifications can be used, for example, to increase the stability of the RNA molecule and/or reduce its immunogenicity. Using chemical modifications such as Pseudo-U, N6-Methyl-A, 2-Thio-U and 5-Methyl-C, it was found that substituting just one quarter of the uridine and cytidine residues with 2-Thio-U and 5-Methyl-C respectively resulted in a significant decrease in toll-like receptor (TLR) mediated recognition of the mRNA in mice. By reducing the activation of the innate immune system, these modifications can be used to effectively increase the stability and longevity of the mRNA in vivo; see, e.g., Kormann et al., supra.

[0175] It has also been shown that repeated administration of synthetic messenger RNAs incorporating modifications designed to bypass innate anti-viral responses can reprogram differentiated human cells to pluripotency. See, e.g., Warren, et al., Cell Stem Cell, 7(5):618-30 (2010). Such modified mRNAs that act as primary reprogramming proteins can be an efficient means of reprogramming multiple human cell types. Such cells are referred to as induced pluripotency stem cells (iPSCs), and it was found that enzymatically synthesized RNA incorporating 5-Methyl-CTP, Pseudo-UTP and an Anti Reverse Cap Analog (ARCA) could be used to effectively evade the cell's antiviral response; see, e.g., Warren et al., supra.

[0176] Other modifications of polynucleotides described in the art include, for example, the use of polyA tails, the addition of 5′ cap analogs (such as m7G(5′)ppp(5′)G (mCAP)), modifications of 5′ or 3′ untranslated regions (UTRs), or treatment with phosphatase to remove 5′ terminal phosphates—and new approaches are regularly being developed.

[0177] A number of compositions and techniques applicable to the generation of modified RNAs for use herein have been developed in connection with the modification of RNA interference (RNAi), including small-interfering RNAs (siRNAs). siRNAs present particular challenges in vivo because their effects on gene silencing via mRNA interference are generally transient, which can require repeat administration. In addition, siRNAs are double-stranded RNAs (dsRNA) and mammalian cells have immune responses that have evolved to detect and neutralize dsRNA, which is often a by-product of viral infection. Thus, there are mammalian enzymes such as PKR (dsRNA-responsive kinase), and potentially retinoic acid-inducible gene I (RIG-I), that can mediate cellular responses to dsRNA, as well as Toll-like receptors (such as TLR3, TLR7 and TLR8) that can trigger the induction of cytokines in response to such molecules; see, e.g., the reviews by Angart et al., Pharmaceuticals (Basel) 6(4): 440-468 (2013); Kanasty et al., Molecular Therapy 20(3): 513-524 (2012); Burnett et al., Biotechnol J. 6(9):1130-46 (2011); Judge and MacLachlan, Hum Gene Ther 19(2):111-24 (2008); and references cited therein.

[0178] A large variety of modifications have been developed and applied to enhance RNA stability, reduce innate immune responses, and/or achieve other benefits that can be useful in connection with the introduction of polynucleotides into human cells, as described herein; see, e.g., the reviews by Whitehead K A et al., Annual Review of Chemical and Biomolecular Engineering, 2: 77-96 (2011); Gaglione and Messere, Mini Rev Med Chem, 10(7):578-95 (2010); Chernolovskaya et al, Curr Opin Mol Ther., 12(2):158-67 (2010); Deleavey et al., Curr Protoc Nucleic Acid Chem Chapter 16:Unit 16.3 (2009); Behlke, Oligonucleotides 18(4):305-19 (2008); Fucini et al., Nucleic Acid Ther 22(3): 205-210 (2012); Bremsen et al., Front Genet 3:154 (2012).

[0179] As noted above, there are a number of commercial suppliers of modified RNAs, many of which have specialized in modifications designed to improve the effectiveness of siRNAs. A variety of approaches are offered based on various findings reported in the literature. For example, Dharmacon notes that replacement of a non-bridging oxygen with sulfur (phosphorothioate, PS) has been extensively used to improve nuclease resistance of siRNAs, as reported by Kole, Nature Reviews Drug Discovery 11:125-140 (2012). Modifications of the 2′-position of the ribose have been reported to improve nuclease resistance of the internucleotide phosphate bond while increasing duplex stability (Tm), which has also been shown to provide protection from immune activation. A combination of moderate PS backbone modifications with small, well-tolerated 2′-substitutions (2′-O-Methyl, 2′-Fluoro, 2′-Hydro) have been associated with highly stable siRNAs for applications in vivo, as reported by Soutschek et al. Nature 432:173-178 (2004); and 2′-O-Methyl modifications have been reported to be effective in improving stability as reported by Volkov, Oligonucleotides 19:191-202 (2009). With respect to decreasing the induction of innate immune responses, modifying specific sequences with 2′-O-Methyl, 2′-Fluoro, 2′-Hydro have been reported to reduce TLR7/TLR8 interaction while generally preserving silencing activity; see, e.g., Judge et al., Mol. Ther. 13:494-505 (2006); and Cekaite et al., J. Mol. Biol. 365:90-108 (2007). Additional modifications, such as 2-thiouracil, pseudouracil, 5-methylcytosine, 5-methyluracil, and N6-methyladenosine have also been shown to minimize the immune effects mediated by TLR3, TLR7, and TLR8; see, e.g., Kariko, K. et al., Immunity 23:165-175 (2005).

[0180] As is also known in the art, and commercially available, a number of conjugates can be applied to polynucleotides, such as RNAs, for use herein that can enhance their delivery and/or uptake by cells, including for example, cholesterol, tocopherol and folic acid, lipids, peptides, polymers, linkers and aptamers; see, e.g., the review by Winkler, Ther. Deliv. 4:791-809 (2013), and references cited therein.

### Codon-Optimization

[0181] A polynucleotide encoding a site-directed polypeptide can be codon-optimized according to methods standard in the art for expression in the cell containing the target DNA of interest. For example, if the intended target nucleic acid is in a human cell, a human codon-optimized polynucleotide encoding Cas9 is contemplated for use for producing the Cas9 polypeptide.

### Complexes of a Genome-Targeting Nucleic Acid and a Site-Directed Polypeptide

[0182] A genome-targeting nucleic acid interacts with a site-directed polypeptide (e.g., a nucleic acid-guided nuclease such as Cas9), thereby forming a complex. The genome-targeting nucleic acid guides the site-directed polypeptide to a target nucleic acid.

### Ribonucleoprotein Complexes (RNPs)

[0183] The site-directed polypeptide and genome-targeting nucleic acid can each be administered separately to a cell or a patient. On the other hand, the site-directed polypeptide can be pre-complexed with one or more guide RNAs, or one or more crRNA together with a tracrRNA. The pre-complexed material can then be administered to a cell or a patient. Such pre-complexed material is known as a ribonucleoprotein particle (RNP). The site-directed polypeptide in the RNP can be, for example, a Cas9 endonuclease or a Cpf1 endonuclease. The site-directed polypeptide can be flanked at the N-terminus, the C-terminus, or both the N-terminus and C-terminus by one or more nuclear localization signals (NLSs). For example, a Cas9 endonuclease can be flanked by two NLSs, one NLS located at the N-terminus and the second NLS located at the C-terminus. The NLS can be any NLS known in the art, such as a SV40 NLS. The weight ratio of genome-targeting nucleic acid to site-directed polypeptide in the RNP can be 1:1. For example, the weight ratio of sgRNA to Cas9 endonuclease in the RNP can be 1:1.

### Nucleic Acids Encoding System Components

[0184] The present disclosure provides a nucleic acid comprising a nucleotide sequence encoding a genome-targeting nucleic acid of the disclosure, a site-directed polypeptide of the disclosure, and/or any nucleic acid or proteinaceous molecule necessary to carry out the aspects of the methods of the disclosure.

[0185] The nucleic acid encoding a genome-targeting nucleic acid of the disclosure, a site-directed polypeptide of the disclosure, and/or any nucleic acid or proteinaceous molecule necessary to carry out the aspects of the methods of the disclosure can comprise a vector (e.g., a recombinant expression vector).

[0186] The term “vector” refers to a nucleic acid molecule capable of transporting another nucleic acid to which it has been linked. One type of vector is a “plasmid”, which refers to a circular double-stranded DNA loop into which additional nucleic acid segments can be ligated. Another type of vector is a viral vector, wherein additional nucleic acid segments can be ligated into the viral genome. Certain vectors are capable of autonomous replication in a host cell into which they are introduced (e.g., bacterial vectors having a bacterial origin of replication and episomal mammalian vectors). Other vectors (e.g., non-episomal mammalian vectors) are integrated into the genome of a host cell upon introduction into the host cell, and thereby are replicated along with the host genome.

[0187] In some examples, vectors can be capable of directing the expression of nucleic acids to which they are operatively linked. Such vectors are referred to herein as “recombinant expression vectors”, or more simply “expression vectors”, which serve equivalent functions.

[0188] The term “operably linked” means that the nucleotide sequence of interest is linked to regulatory sequence(s) in a manner that allows for expression of the nucleotide sequence. The term “regulatory sequence” is intended to include, for example, promoters, enhancers and other expression control elements (e.g., polyadenylation signals). Such regulatory sequences are well known in the art and are described, for example, in Goeddel; Gene Expression Technology: Methods in Enzymology 185, Academic Press, San Diego, CA (1990). Regulatory sequences include those that direct constitutive expression of a nucleotide sequence in many types of host cells, and those that direct expression of the nucleotide sequence only in certain host cells (e.g., tissue-specific regulatory sequences). It will be appreciated by those skilled in the art that the design of the expression vector can depend on such factors as the choice of the target cell, the level of expression desired, and the like.

[0189] Expression vectors contemplated include, but are not limited to, viral vectors based on vaccinia virus, poliovirus, adenovirus, adeno-associated virus, SV40, herpes simplex virus, human immunodeficiency virus, retrovirus (e.g., Murine Leukemia Virus, spleen necrosis virus, and vectors derived from retroviruses such as Rous Sarcoma Virus, Harvey Sarcoma Virus, avian leukosis virus, a lentivirus, human immunodeficiency virus, myeloproliferative sarcoma virus, and mammary tumor virus) and other recombinant vectors. Other vectors contemplated for eukaryotic target cells include, but are not limited to, the vectors pXT1, pSG5, pSVK3, pBPV, pMSG, and pSVLSV40 (Pharmacia). Other vectors can be used so long as they are compatible with the host cell.

[0190] In some examples, a vector can comprise one or more transcription and/or translation control elements. Depending on the host/vector system utilized, any of a number of suitable transcription and translation control elements, including constitutive and inducible promoters, transcription enhancer elements, transcription terminators, etc. can be used in the expression vector. The vector can be a self-inactivating vector that either inactivates the viral sequences or the components of the CRISPR machinery or other elements.

[0191] Non-limiting examples of suitable eukaryotic promoters (i.e., promoters functional in a eukaryotic cell) include those from cytomegalovirus (CMV) immediate early, herpes simplex virus (HSV) thymidine kinase, early and late SV40, long terminal repeats (LTRs) from retrovirus, human elongation factor-1 promoter (EF1), a hybrid construct comprising the cytomegalovirus (CMV) enhancer fused to the chicken beta-actin promoter (CAG), murine stem cell virus promoter (MSCV), phosphoglycerate kinase-1 locus promoter (PGK), and mouse metallothionein-I.

[0192] For expressing small RNAs, including guide RNAs used in connection with Cas endonuclease, various promoters such as RNA polymerase III promoters, including for example U6 and H1, can be advantageous. Descriptions of and parameters for enhancing the use of such promoters are known in art, and additional information and approaches are regularly being described; see, e.g., Ma, H. et al., Molecular Therapy—Nucleic Acids 3, ei61 (2014) doi:10.1038/mtna.2014.12.

[0193] The expression vector can also contain a ribosome binding site for translation initiation and a transcription terminator. The expression vector can also comprise appropriate sequences for amplifying expression. The expression vector can also include nucleotide sequences encoding non-native tags (e.g., histidine tag, hemagglutinin tag, green fluorescent protein, etc.) that are fused to the site-directed polypeptide, thus resulting in a fusion protein.

[0194] A promoter can be an inducible promoter (e.g., a heat shock promoter, tetracycline-regulated promoter, steroid-regulated promoter, metal-regulated promoter, estrogen receptor-regulated promoter, etc.). The promoter can be a constitutive promoter (e.g., CMV promoter, UBC promoter). In some cases, the promoter can be a spatially restricted and/or temporally restricted promoter (e.g., a tissue specific promoter, a cell type specific promoter, etc.).

[0195] The nucleic acid encoding a genome-targeting nucleic acid of the disclosure and/or a site-directed polypeptide can be packaged into or on the surface of delivery vehicles for delivery to cells. Delivery vehicles contemplated include, but are not limited to, nanospheres, liposomes, quantum dots, nanoparticles, polyethylene glycol particles, hydrogels, and micelles. As described in the art, a variety of targeting moieties can be used to enhance the preferential interaction of such vehicles with desired cell types or locations.

[0196] Introduction of the complexes, polypeptides, and nucleic acids of the disclosure into cells can occur by viral or bacteriophage infection, transfection, conjugation, protoplast fusion, lipofection, electroporation, nucleofection, calcium phosphate precipitation, polyethyleneimine (PEI)-mediated transfection, DEAE-dextran mediated transfection, liposome-mediated transfection, particle gun technology, calcium phosphate precipitation, direct micro-injection, nanoparticle-mediated nucleic acid delivery, and the like.

### Therapeutic Approach

[0197] Provided herein are methods for treating a patient with Dyslipidemias. An aspect of such method is an ex vivo cell-based therapy. For example, a biopsy of the patient's liver is performed. Then, a liver specific progenitor cell or primary hepatocyte is isolated from the biopsied material. Next, the chromosomal DNA of these progenitor cells or primary hepatocytes is corrected using the materials and methods described herein. Finally, the progenitor cells or primary hepatocytes are implanted into the patient. Any source or type of cell may be used as the progenitor cell.

[0198] Another aspect of such method is an ex vivo cell-based therapy. For example, a patient specific induced pluripotent stem cell (iPSC) can be created. Then, the chromosomal DNA of these iPS cells can be edited using the materials and methods described herein. Next, the genome-edited iPSCs can be differentiated into other cells. Finally, the differentiated cells are implanted into the patient.

[0199] Yet another aspect of such method is an ex vivo cell-based therapy. For example, a mesenchymal stem cell can be isolated from the patient, which can be isolated from the patient's bone marrow or peripheral blood. Next, the chromosomal DNA of these mesenchymal stem cells can be edited using the materials and methods described herein. Next, the genome-edited mesenchymal stem cells can be differentiated into any type of cell, e.g., hepatocytes. Finally, the differentiated cells, e.g., hepatocytes are implanted into the patient.

[0200] One advantage of an ex vivo cell therapy approach is the ability to conduct a comprehensive analysis of the therapeutic prior to administration. Nuclease-based therapeutics can have some level of off-target effects. Performing gene editing ex vivo allows one to characterize the edited cell population prior to implantation. The present disclosure includes sequencing the entire genome of the edited cells to ensure that the off-target effects, if any, can be in genomic locations associated with minimal risk to the patient. Furthermore, populations of specific cells, including clonal populations, can be isolated prior to implantation.

[0201] Another advantage of ex vivo cell therapy relates to genetic modification in iPSCs compared to other primary cell sources. iPSCs are prolific, making it easy to obtain the large number of cells that will be required for a cell-based therapy. Furthermore, iPSCs are an ideal cell type for performing clonal isolations. This allows screening for the correct genomic modification, without risking a decrease in viability. In contrast, other primary cells, such as hepatocytes, are viable for only a few passages and difficult to clonally expand. Thus, manipulation of iPSCs for the treatment of Dyslipidemias can be much easier, and can shorten the amount of time needed to make the desired genetic modification.

[0202] Methods can also include an in vivo based therapy. Chromosomal DNA of the cells in the patient is edited using the materials and methods described herein.

[0203] Although certain cells present an attractive target for ex vivo treatment and therapy, increased efficacy in delivery may permit direct in vivo delivery to such cells. Ideally the targeting and editing would be directed to the relevant cells. Cleavage in other cells can also be prevented by the use of promoters only active in certain cells and or developmental stages. Additional promoters are inducible, and therefore can be temporally controlled if the nuclease is delivered as a plasmid. The amount of time that delivered RNA and protein remain in the cell can also be adjusted using treatments or domains added to change the half-life. In vivo treatment would eliminate a number of treatment steps, but a lower rate of delivery can require higher rates of editing. In vivo treatment can eliminate problems and losses from ex vivo treatment and engraftment.

[0204] An advantage of in vivo gene therapy can be the ease of therapeutic production and administration. The same therapeutic approach and therapy will have the potential to be used to treat more than one patient, for example a number of patients who share the same or similar genotype or allele. In contrast, ex vivo cell therapy typically requires using a patient's own cells, which are isolated, manipulated and returned to the same patient.

[0205] Also provided herein is a cellular method for editing the ANGPTL3 gene in a cell by genome editing. For example, a cell can be isolated from a patient or animal. Then, the chromosomal DNA of the cell can be edited using the materials and methods described herein.

[0206] The methods provided herein, regardless of whether a cellular or ex vivo or in vivo method, can involve reducing (knock-down) or eliminating (knock-out) the expression of the ANGPTL3 gene by introducing one or more insertions, deletions or mutations within or near the ANGPTL3 gene or other DNA sequences that encode regulatory elements of the ANGPTL3 gene.

[0207] For example, the knock-down or knock-out strategy can involve disrupting the reading frame in the ANGPTL3 gene by introducing random insertions or deletions (indels) that arise due to the imprecise NHEJ repair pathway. This can be achieved by inducing one single stranded break or double stranded break in the gene of interest with one or more CRISPR endonucleases and a gRNA (e.g., crRNA+tracrRNA, or sgRNA), or two or more single stranded breaks or double stranded breaks in the gene of interest with two or more CRISPR endonucleases and two or more sgRNAs. This approach can require development and optimization of sgRNAs for the ANGPTL3 gene.

[0208] Alternatively, the knock-down or knock-out strategy can also involve deletion of one or more segments within or near the ANGPTL3 gene or other DNA sequences that encode regulatory elements of the ANGPTL3 gene. This deletion strategy requires at least a pair of gRNAs (e.g., crRNA+tracrRNA, or sgRNA) capable of binding to two different sites within or near the ANGPTL3 gene and one or more CRISPR endonucleases. The CRISPR endonucleases, configured with the two gRNAs, induce two double stranded breaks at the desired locations. After cleavage, the two ends, regardless of whether blunt or with overhangs, can be joined by NHEJ, leading to the deletion of the intervening segment. NHEJ repair pathways can lead to insertions, deletions or mutations at the joints.

[0209] In addition to the above genome editing strategies, another strategy involves modulating expression, function, or activity of ANGPTL3 by editing in the regulatory sequence.

[0210] In addition to the editing options listed above, Cas9 or similar proteins can be used to target effector domains to the same target sites that can be identified for editing, or additional target sites within range of the effector domain. A range of chromatin modifying enzymes, methylases or demethylases can be used to alter expression of the target gene. One possibility is reducing the expression of the ANGPTL3 protein if a mutation leads to undesirable activity. These types of epigenetic regulation have some advantages, particularly as they are limited in possible off-target effects.

[0211] A number of types of genomic target sites can be present in addition to the coding and splicing sequences.

[0212] The regulation of transcription and translation implicates a number of different classes of sites that interact with cellular proteins or nucleotides. Often the DNA binding sites of transcription factors or other proteins can be targeted for mutation or deletion to study the role of the site, though they can also be targeted to change gene expression. Sites can be added through non-homologous end joining NHEJ or direct genome editing by homology directed repair (HDR). Increased use of genome sequencing, RNA expression and genome-wide studies of transcription factor binding have increased our ability to identify how the sites lead to developmental or temporal gene regulation. These control systems can be direct or can involve extensive cooperative regulation that can require the integration of activities from multiple enhancers. Transcription factors typically bind 6-12 bp-long degenerate DNA sequences. The low level of specificity provided by individual sites suggests that complex interactions and rules are involved in binding and the functional outcome. Binding sites with less degeneracy can provide simpler means of regulation. Artificial transcription factors can be designed to specify longer sequences that have less similar sequences in the genome and have lower potential for off-target cleavage. Any of these types of binding sites can be mutated, deleted or even created to enable changes in gene regulation or expression (Canver, M. C. et al., Nature (2015)).

[0213] Another class of gene regulatory regions having these features is microRNA (miRNA) binding sites. miRNAs are non-coding RNAs that play key roles in post-transcriptional gene regulation. miRNA can regulate the expression of 30% of all mammalian protein-encoding genes. Specific and potent gene silencing by double stranded RNA (RNAi) was discovered, plus additional small noncoding RNA (Canver, M. C. et al., Nature (2015)). The largest class of noncoding RNAs important for gene silencing are miRNAs. In mammals, miRNAs are first transcribed as a long RNA transcript, which can be separate transcriptional units, part of protein introns, or other transcripts. The long transcripts are called primary miRNA (pri-miRNA) that include imperfectly base-paired hairpin structures. These pri-miRNA can be cleaved into one or more shorter precursor miRNAs (pre-miRNAs) by Microprocessor, a protein complex in the nucleus, involving Drosha.

[0214] Pre-miRNAs are short stem loops ˜70 nucleotides in length with a 2-nucleotide 3′-overhang that are exported, into the mature 19-25 nucleotide miRNA:miRNA* duplexes. The miRNA strand with lower base pairing stability (the guide strand) can be loaded onto the RNA-induced silencing complex (RISC). The passenger strand (marked with *), can be functional, but is usually degraded. The mature miRNA tethers RISC to partly complementary sequence motifs in target mRNAs predominantly found within the 3′ untranslated regions (UTRs) and induces posttranscriptional gene silencing (Bartel, D. P. Cell 136, 215-233 (2009); Saj, A. & Lai, E. C. Curr Opin Genet Dev 21, 504-510 (2011)).

[0215] miRNAs can be important in development, differentiation, cell cycle and growth control, and in virtually all biological pathways in mammals and other multicellular organisms. miRNAs can also be involved in cell cycle control, apoptosis and stem cell differentiation, hematopoiesis, hypoxia, muscle development, neurogenesis, insulin secretion, cholesterol metabolism, aging, viral replication and immune responses.

[0216] A single miRNA can target hundreds of different mRNA transcripts, while an individual miRNA transcript can be targeted by many different miRNAs. More than 28645 microRNAs have been annotated in the latest release of miRBase (v.21). Some miRNAs can be encoded by multiple loci, some of which can be expressed from tandemly co-transcribed clusters. The features allow for complex regulatory networks with multiple pathways and feedback controls. miRNAs can be integral parts of these feedback and regulatory circuits and can help regulate gene expression by keeping protein production within limits (Herranz, H. & Cohen, S. M. Genes Dev 24, 1339-1344 (2010); Posadas, D. M. & Carthew, R. W. Curr Opin Genet Dev 27, 1-6 (2014)).

[0217] miRNA can also be important in a large number of human diseases that are associated with abnormal miRNA expression. This association underscores the importance of the miRNA regulatory pathway. Recent miRNA deletion studies have linked miRNA with regulation of the immune responses (Stern-Ginossar, N. et al., Science 317, 376-381 (2007)).

[0218] miRNA also has a strong link to cancer and can play a role in different types of cancer. miRNAs have been found to be downregulated in a number of tumors. miRNA can be important in the regulation of key cancer-related pathways, such as cell cycle control and the DNA damage response, and can therefore be used in diagnosis and can be targeted clinically. MicroRNAs can delicately regulate the balance of angiogenesis, such that experiments depleting all microRNAs suppresses tumor angiogenesis (Chen, S. et al., Genes Dev 28, 1054-1067 (2014)).

[0219] As has been shown for protein coding genes, miRNA genes can also be subject to epigenetic changes occurring with cancer. Many miRNA loci can be associated with CpG islands increasing their opportunity for regulation by DNA methylation (Weber, B., Stresemann, C., Brueckner, B. & Lyko, F. Cell Cycle 6, 1001-1005 (2007)). The majority of studies have used treatment with chromatin remodeling drugs to reveal epigenetically silenced miRNAs.

[0220] In addition to their role in RNA silencing, miRNA can also activate translation (Posadas, D. M. & Carthew, R. W. Curr Opin Genet Dev 27, 1-6 (2014)). Knocking out miRNA sites may lead to decreased expression of the targeted gene, while introducing these sites may increase expression.

[0221] Individual miRNA can be knocked out most effectively by mutating the seed sequence (bases 2-8 of the microRNA), which can be important for binding specificity. Cleavage in this region, followed by mis-repair by NHEJ can effectively abolish miRNA function by blocking binding to target sites. miRNA could also be inhibited by specific targeting of the special loop region adjacent to the palindromic sequence. Catalytically inactive Cas9 can also be used to inhibit shRNA expression (Zhao, Y. et al., Sci Rep 4, 3943 (2014)). In addition to targeting the miRNA, the binding sites can also be targeted and mutated to prevent the silencing by miRNA.

[0222] According to the present disclosure, any of the microRNA (miRNA) or their binding sites may be incorporated into the compositions of the disclosure.

[0223] The compositions may have a region such as, but not limited to, a region comprising the sequence of any of the microRNAs listed in SEQ ID NOs: 632-4,715, the reverse complement of the microRNAs listed in SEQ ID NOs: 632-4,715 or the microRNA anti-seed region of any of the microRNAs listed in SEQ ID NOs: 632-4,715.

[0224] The compositions of the disclosure may comprise one or more microRNA target sequences, microRNA sequences, or microRNA seeds. Such sequences may correspond to any known microRNA such as those taught in US Publication US2005/0261218 and US Publication US2005/0059005. As a non-limiting embodiment, known microRNAs, their sequences and their binding site sequences in the human genome are listed below in SEQ ID NOs: 632-4,715.

[0225] A microRNA sequence comprises a “seed” sequence, i.e., a sequence in the region of positions 2-8 of the mature microRNA, which sequence has perfect Watson-Crick complementarity to the miRNA target sequence. A microRNA seed may comprise positions 2-8 or 2-7 of the mature microRNA. In some aspects, a microRNA seed may comprise 7 nucleotides (e.g., nucleotides 2-8 of the mature microRNA), wherein the seed-complementary site in the corresponding miRNA target is flanked by an adenine (A) opposed to microRNA position 1. In some aspects, a microRNA seed may comprise 6 nucleotides (e.g., nucleotides 2-7 of the mature microRNA), wherein the seed-complementary site in the corresponding miRNA target is flanked by an adenine (A) opposed to microRNA position 1. See for example, Grimson A, Farh K K, Johnston W K, Garrett-Engele P, Lim L P, Bartel D P; Mol Cell. 2007 Jul. 6; 27(1):91-105. The bases of the microRNA seed have complete complementarity with the target sequence.

[0226] Identification of microRNA, microRNA target regions, and their expression patterns and role in biology have been reported (Bonauer et al., Curr Drug Targets 2010 11:943-949; Anand and Cheresh Curr Opin Hematol 2011 18:171-176; Contreras and Rao Leukemia 2012 26:404-413 (2011 Dec. 20. doi: 10.1038/leu.2011.356); Bartel Cell 2009 136:215-233; Landgraf et al, Cell, 2007 129:1401-1414; Gentner and Naldini, Tissue Antigens. 2012 80:393-403).

[0227] For example, if the composition is not intended to be delivered to the liver but ends up there, then miR-122, a microRNA abundant in liver, can inhibit the expression of the sequence delivered if one or multiple target sites of miR-122 are engineered into the polynucleotide encoding that target sequence. Introduction of one or multiple binding sites for different microRNA can be engineered to further decrease the longevity, stability, and protein translation hence providing an additional layer of tenability.

[0228] As used herein, the term “microRNA site” refers to a microRNA target site or a microRNA recognition site, or any nucleotide sequence to which a microRNA binds or associates. It should be understood that “binding” may follow traditional Watson-Crick hybridization rules or may reflect any stable association of the microRNA with the target sequence at or adjacent to the microRNA site.

[0229] Conversely, for the purposes of the compositions of the present disclosure, microRNA binding sites can be engineered out of (i.e. removed from) sequences in which they naturally occur in order to increase protein expression in specific tissues. For example, miR-122 binding sites may be removed to improve protein expression in the liver.

[0230] Specifically, microRNAs are known to be differentially expressed in immune cells (also called hematopoietic cells), such as antigen presenting cells (APCs) (e.g. dendritic cells and macrophages), macrophages, monocytes, B lymphocytes, T lymphocytes, granulocytes, natural killer cells, etc. Immune cell specific microRNAs are involved in immunogenicity, autoimmunity, the immune-response to infection, inflammation, as well as unwanted immune response after gene therapy and tissue/organ transplantation. Immune cells specific microRNAs also regulate many aspects of development, proliferation, differentiation and apoptosis of hematopoietic cells (immune cells). For example, miR-142 and miR-146 are exclusively expressed in the immune cells, particularly abundant in myeloid dendritic cells. Introducing the miR-142 binding site into the 3′-UTR of a polypeptide of the present disclosure can selectively suppress the gene expression in the antigen presenting cells through miR-142 mediated mRNA degradation, limiting antigen presentation in professional APCs (e.g. dendritic cells) and thereby preventing antigen-mediated immune response after gene delivery (see, Annoni A et al., blood, 2009, 114, 5152-5161).

[0231] In one embodiment, microRNAs binding sites that are known to be expressed in immune cells, in particular, the antigen presenting cells, can be engineered into the polynucleotides to suppress the expression of the polynucleotide in APCs through microRNA mediated RNA degradation, subduing the antigen-mediated immune response, while the expression of the polynucleotide is maintained in non-immune cells where the immune cell specific microRNAs are not expressed.

[0232] Many microRNA expression studies have been conducted, and are described in the art, to profile the differential expression of microRNAs in various cancer cells/tissues and other diseases. Some microRNAs are abnormally over-expressed in certain cancer cells and others are under-expressed. For example, microRNAs are differentially expressed in cancer cells (WO2008/154098, US2013/0059015, US2013/0042333, WO2011/157294); cancer stem cells (US2012/0053224); pancreatic cancers and diseases (US2009/0131348, US2011/0171646, US2010/0286232, U.S. Pat. No. 8,389,210); asthma and inflammation (U.S. Pat. No. 8,415,096); prostate cancer (US2013/0053264); hepatocellular carcinoma (WO2012/151212, US2012/0329672, WO2008/054828, U.S. Pat. No. 8,252,538); lung cancer cells (WO2011/076143, WO2013/033640, WO2009/070653, US2010/0323357); cutaneous T cell lymphoma (WO2013/011378); colorectal cancer cells (WO2011/0281756, WO2011/076142); cancer positive lymph nodes (WO2009/100430, US2009/0263803); nasopharyngeal carcinoma (EP2112235); chronic obstructive pulmonary disease (US2012/0264626, US2013/0053263); thyroid cancer (WO2013/066678); ovarian cancer cells (US2012/0309645, WO2011/095623); breast cancer cells (WO2008/154098, WO2007/081740, US2012/0214699), leukemia and lymphoma (WO2008/073915, US2009/0092974, US2012/0316081, US2012/0283310, WO2010/018563).

[0233] Non-limiting examples of microRNA sequences and the targeted tissues and/or cells are described in SEQ ID NOs: 632-4,715.

### Genome Engineering Strategies

[0234] In some aspects, the methods of the present disclosure can involve editing of one or both of the alleles. Gene editing to modify the allele(s) has the advantage of permanently altering the target gene or gene products.

[0235] A step of the ex vivo methods of the present disclosure can comprise editing the hepatocytes isolated from the patient using genome engineering. Alternatively, a step of the ex vivo methods of the present disclosure can comprise editing the patient specific iPSC or mesenchymal stem cell. Likewise, a step of the in vivo methods of the disclosure involves editing the cells in Dyslipidemias patient using genome engineering. Similarly, a step in the cellular methods of the present disclosure can comprise editing the ANGPTL3 gene in a human cell by genome engineering.

[0236] Dyslipidemias patients may exhibit different mutations in the ANGPTL3 gene. Any CRISPR endonuclease may be used in the methods of the present disclosure, each CRISPR endonuclease having its own associated PAM, which may or may not be disease specific.

[0237] For example, expression of the ANGPTL3 gene may be disrupted or eliminated by introducing random insertions or deletions (indels) that arise due to the imprecise NHEJ repair pathway. The target region may be the coding sequences of the ANGPTL3 gene (i.e., exons). Inserting or deleting nucleotides into the coding sequence of a gene may cause a “frame shift” where the normal 3-letter codon pattern is disturbed. In this way, gene expression and therefore protein production can be reduced or eliminated. This approach may also be used to target any intron, intron:exon junction, or regulatory DNA element of the ANGPTL3 gene where sequence alteration may interfere with the expression of the ANGPTL3 gene.

[0238] As another example, NHEJ can also be used to delete segments within or near the gene, either directly or by altering splice donor or acceptor sites through cleavage by one gRNA targeting several locations, or several gRNAs. This can be useful if small random indels are inefficient to knock-out the target gene. Pairs of guide strands have been used for this type of deletions.

[0239] Without a donor present, the ends from a DNA break or ends from different breaks can be joined using the several nonhomologous repair pathways in which the DNA ends are joined with little or no base-pairing at the junction. In addition to canonical NHEJ, there are similar repair mechanisms, such as alt-NHEJ. If there are two breaks, the intervening segment can be deleted or inverted. NHEJ repair pathways can lead to insertions, deletions or mutations at the joints.

[0240] NHEJ can also lead to homology-independent target integration. For example, inclusion of a nuclease target site on a donor plasmid can promote integration of a transgene into the chromosomal double-strand break following in vivo nuclease cleavage of both the donor and the chromosome (Cristea., Biotechnol Bioeng. 2013 March; 110(3):871-80). NHEJ was used to insert a 15-kb inducible gene expression cassette into a defined locus in human cell lines after nuclease cleavage. (See e.g., Maresca, M., Lin, V. G., Guo, N. & Yang, Y., Genome Res 23, 539-546 (2013); Cristea et al. Biotechnology and Bioengineering 2013, 871-80, 10.1002/bit.24733). The integrated sequence may disrupt the reading frame of the ANGPTL3 gene or alter the structure of the gene.

[0241] As a further alternative, homology directed repair (HDR) can also be used to knock-out a gene or alter the gene function. HDR is essentially an error-free mechanism that uses a supplied homologous DNA sequence as a template during DSB repair. The rate of HDR is a function of the distance between the mutation and the cut site so choosing overlapping or nearest target sites is important. Templates can include extra sequences flanked by the homologous regions or can contain a sequence that differs from the genomic sequence, thus allowing sequence editing.

[0242] For example, the HDR knock-out strategy can involve disrupting the structure or function of the ANGPTL3 gene by inserting into the gene or replacing a part of the gene with a non-functional or irrelevant sequence. This can be achieved by inducing one single stranded break or double stranded break in the gene of interest with one or more CRISPR endonucleases and a gRNA (e.g., crRNA+tracrRNA, or sgRNA), or two or more single stranded breaks or double stranded breaks in the gene of interest with one or more CRISPR endonucleases and two or more gRNAs, in the presence of a donor DNA template introduced exogenously to direct the cellular DSB response to HDR (the donor DNA template can be a short single stranded oligonucleotide, a short double stranded oligonucleotide, a long single or double stranded DNA molecule). This approach can require development and optimization of gRNAs and donor DNA molecules for the ANGPTL3 gene.

[0243] Homology directed repair is a cellular mechanism for repairing DSBs. The most common form is homologous recombination. There are additional pathways for HDR, including single-strand annealing and alternative-HDR. Genome engineering tools allow researchers to manipulate the cellular homologous recombination pathways to create site-specific modifications to the genome. It has been found that cells can repair a double-stranded break using a synthetic donor molecule provided in trans. Therefore, by introducing a double-stranded break near a specific mutation and providing a suitable donor, targeted changes can be made in the genome. Specific cleavage increases the rate of HDR more than 1,000 fold above the rate of 1 in 10⁶ cells receiving a homologous donor alone. The rate of homology directed repair (HDR) at a particular nucleotide is a function of the distance to the cut site, so choosing overlapping or nearest target sites is important. Gene editing offers the advantage over gene addition, as editing in situ leaves the rest of the genome unperturbed.

[0244] Supplied donors for editing by HDR vary markedly but can contain the intended sequence with small or large flanking homology arms to allow annealing to the genomic DNA. The homology regions flanking the introduced genetic changes can be 30 bp or smaller, or as large as a multi-kilobase cassette that can contain promoters, cDNAs, etc. Both single-stranded and double-stranded oligonucleotide donors have been used. These oligonucleotides range in size from less than 100 nt to over many kb, though longer ssDNA can also be generated and used. Double-stranded donors can be used, including PCR amplicons, plasmids, and mini-circles. In general, it has been found that an AAV vector can be a very effective means of delivery of a donor template, though the packaging limits for individual donors is <5 kb. Active transcription of the donor increased HDR three-fold, indicating the inclusion of promoter may increase conversion. Conversely, CpG methylation of the donor decreased gene expression and HDR.

[0245] In addition to wild-type endonucleases, such as Cas9, nickase variants exist that have one or the other nuclease domain inactivated resulting in cutting of only one DNA strand. HDR can be directed from individual Cas nickases or using pairs of nickases that flank the target area. Donors can be single-stranded, nicked, or dsDNA.

[0246] The donor DNA can be supplied with the nuclease or independently by a variety of different methods, for example by transfection, nano-particle, micro-injection, or viral transduction. A range of tethering options have been proposed to increase the availability of the donors for HDR. Examples include attaching the donor to the nuclease, attaching to DNA binding proteins that bind nearby, or attaching to proteins that are involved in DNA end binding or repair.

[0247] The repair pathway choice can be guided by a number of culture conditions, such as those that influence cell cycling, or by targeting of DNA repair and associated proteins. For example, to increase HDR, key NHEJ molecules can be suppressed, such as KU70, KU80 or DNA ligase IV.

[0248] In addition to genome editing by NHEJ or HDR, site-specific gene insertions have been conducted that use both the NHEJ pathway and HDR. A combination approach may be applicable in certain settings, possibly including intron/exon borders. NHEJ may prove effective for ligation in the intron, while the error-free HDR may be better suited in the coding region.

[0249] The ANGPTL3 gene contains a number of exons as shown in Table 3. Any one or more of these exons or nearby introns can be targeted in order to create one or more insertions or deletions that disrupt the reading frame and eventually eliminate ANGPTL3 protein activity.

[0250] In some embodiments, the methods can provide gRNA pairs that make a deletion by cutting the gene twice at locations flanking an unwanted sequence. This sequence may include one or more exons, introns, intron:exon junctions, other DNA sequences encoding regulatory elements of the ANGPTL3 gene or combinations thereof. The cutting can be accomplished by a pair of DNA endonucleases that each makes a DSB in the genome, or by multiple nickases that together make a DSB in the genome.

[0251] Alternatively, the methods can provide one gRNA to make one double-strand cut within a coding or splicing sequence. The double-strand cut can be made by a single DNA endonuclease or multiple nickases that together make a DSB in the genome.

[0252] Splicing donor and acceptors are generally within 100 base pairs of the neighboring intron. In some examples, methods can provide gRNAs that cut approximately +/−100-3100 bp with respect to each exon/intron junction of interest.

[0253] For any of the genome editing strategies, gene editing can be confirmed by sequencing or PCR analysis.

### Target Sequence Selection

[0254] Shifts in the location of the 5′ boundary and/or the 3′ boundary relative to particular reference loci can be used to facilitate or enhance particular applications of gene editing, which depend in part on the endonuclease system selected for the editing, as further described and illustrated herein.

[0255] In a first non-limiting example of such target sequence selection, many endonuclease systems have rules or criteria that can guide the initial selection of potential target sites for cleavage, such as the requirement of a PAM sequence motif in a particular position adjacent to the DNA cleavage sites in the case of CRISPR Type II or Type V endonucleases.

[0256] In another non-limiting example of target sequence selection or optimization, the frequency of off-target activity for a particular combination of target sequence and gene editing endonuclease (i.e. the frequency of DSBs occurring at sites other than the selected target sequence) can be assessed relative to the frequency of on-target activity. In some cases, cells that have been correctly edited at the desired locus can have a selective advantage relative to other cells. Illustrative, but non-limiting, examples of a selective advantage include the acquisition of attributes such as enhanced rates of replication, persistence, resistance to certain conditions, enhanced rates of successful engraftment or persistence in vivo following introduction into a patient, and other attributes associated with the maintenance or increased numbers or viability of such cells. In other cases, cells that have been correctly edited at the desired locus can be positively selected for by one or more screening methods used to identify, sort or otherwise select for cells that have been correctly edited. Both selective advantage and directed selection methods can take advantage of the phenotype associated with the alteration. In some cases, cells can be edited two or more times in order to create a second modification that creates a new phenotype that is used to select or purify the intended population of cells. Such a second modification could be created by adding a second gRNA for a selectable or screenable marker. In some cases, cells can be correctly edited at the desired locus using a DNA fragment that contains the cDNA and also a selectable marker.

[0257] Whether any selective advantage is applicable or any directed selection is to be applied in a particular case, target sequence selection can also be guided by consideration of off-target frequencies in order to enhance the effectiveness of the application and/or reduce the potential for undesired alterations at sites other than the desired target. As described further and illustrated herein and in the art, the occurrence of off-target activity can be influenced by a number of factors including similarities and dissimilarities between the target site and various off-target sites, as well as the particular endonuclease used. Bioinformatics tools are available that assist in the prediction of off-target activity, and frequently such tools can also be used to identify the most likely sites of off-target activity, which can then be assessed in experimental settings to evaluate relative frequencies of off-target to on-target activity, thereby allowing the selection of sequences that have higher relative on-target activities. Illustrative examples of such techniques are provided herein, and others are known in the art.

[0258] Another aspect of target sequence selection relates to homologous recombination events. Sequences sharing regions of homology can serve as focal points for homologous recombination events that result in deletion of intervening sequences. Such recombination events occur during the normal course of replication of chromosomes and other DNA sequences, and also at other times when DNA sequences are being synthesized, such as in the case of repairs of double-strand breaks (DSBs), which occur on a regular basis during the normal cell replication cycle but can also be enhanced by the occurrence of various events (such as UV light and other inducers of DNA breakage) or the presence of certain agents (such as various chemical inducers). Many such inducers cause DSBs to occur indiscriminately in the genome, and DSBs can be regularly induced and repaired in normal cells. During repair, the original sequence can be reconstructed with complete fidelity, however, in some cases, small insertions or deletions (referred to as “indels”) are introduced at the DSB site.

[0259] DSBs can also be specifically induced at particular locations, as in the case of the endonucleases systems described herein, which can be used to cause directed or preferential gene modification events at selected chromosomal locations. The tendency for homologous sequences to be subject to recombination in the context of DNA repair (as well as replication) can be taken advantage of in a number of circumstances, and is the basis for one application of gene editing systems, such as CRISPR, in which homology directed repair is used to insert a sequence of interest, provided through use of a “donor” polynucleotide, into a desired chromosomal location.

[0260] Regions of homology between particular sequences, which can be small regions of “microhomology” that can comprise as few as ten basepairs or less, can also be used to bring about desired deletions. For example, a single DSB can be introduced at a site that exhibits microhomology with a nearby sequence. During the normal course of repair of such DSB, a result that occurs with high frequency is the deletion of the intervening sequence as a result of recombination being facilitated by the DSB and concomitant cellular repair process.

[0261] In some circumstances, however, selecting target sequences within regions of homology can also give rise to much larger deletions, including gene fusions (when the deletions are in coding regions), which may or may not be desired given the particular circumstances.

[0262] The examples provided herein further illustrate the selection of various target regions for the creation of DSBs designed to induce insertions, deletions or mutations that result in reduction or elimination of ANGPTL3 protein activity, as well as the selection of specific target sequences within such regions that are designed to minimize off-target events relative to on-target events.

### Human Cells

[0263] For ameliorating Dyslipidemias or any disorder associated with ANGPTL3, as described and illustrated herein, the principal targets for gene editing are human cells. For example, in the ex vivo methods, the human cells can be somatic cells, which after being modified using the techniques as described, can give rise to differentiated cells, e.g., hepatocytes or progenitor cells. For example, in the in vivo methods, the human cells may be hepatocytes, renal cells or cells from other affected organs.

[0264] By performing gene editing in autologous cells that are derived from and therefore already completely matched with the patient in need, it is possible to generate cells that can be safely re-introduced into the patient, and effectively give rise to a population of cells that will be effective in ameliorating one or more clinical conditions associated with the patient's disease.

[0265] Stem cells are capable of both proliferation and giving rise to more progenitor cells, these in turn having the ability to generate a large number of mother cells that can in turn give rise to differentiated or differentiable daughter cells. The daughter cells themselves can be induced to proliferate and produce progeny that subsequently differentiate into one or more mature cell types, while also retaining one or more cells with parental developmental potential. The term “stem cell” refers then, to a cell with the capacity or potential, under particular circumstances, to differentiate to a more specialized or differentiated phenotype, and which retains the capacity, under certain circumstances, to proliferate without substantially differentiating. In one aspect, the term progenitor or stem cell refers to a generalized mother cell whose descendants (progeny) specialize, often in different directions, by differentiation, e.g., by acquiring completely individual characters, as occurs in progressive diversification of embryonic cells and tissues. Cellular differentiation is a complex process typically occurring through many cell divisions. A differentiated cell may derive from a multipotent cell that itself is derived from a multipotent cell, and so on. While each of these multipotent cells may be considered stem cells, the range of cell types that each can give rise to may vary considerably. Some differentiated cells also have the capacity to give rise to cells of greater developmental potential. Such capacity may be natural or may be induced artificially upon treatment with various factors. In many biological instances, stem cells can also be “multipotent” because they can produce progeny of more than one distinct cell type, but this is not required for “stem-ness.”

[0266] Self-renewal can be another important aspect of the stem cell. In theory, self-renewal can occur by either of two major mechanisms. Stem cells can divide asymmetrically, with one daughter retaining the stem state and the other daughter expressing some distinct other specific function and phenotype. Alternatively, some of the stem cells in a population can divide symmetrically into two stems, thus maintaining some stem cells in the population as a whole, while other cells in the population give rise to differentiated progeny only. Generally, “progenitor cells” have a cellular phenotype that is more primitive (i.e., is at an earlier step along a developmental pathway or progression than is a fully differentiated cell). Often, progenitor cells also have significant or very high proliferative potential. Progenitor cells can give rise to multiple distinct differentiated cell types or to a single differentiated cell type, depending on the developmental pathway and on the environment in which the cells develop and differentiate.

[0267] In the context of cell ontogeny, the adjective “differentiated,” or “differentiating” is a relative term. A “differentiated cell” is a cell that has progressed further down the developmental pathway than the cell to which it is being compared. Thus, stem cells can differentiate into lineage-restricted precursor cells (such as a myocyte progenitor cell), which in turn can differentiate into other types of precursor cells further down the pathway (such as a myocyte precursor), and then to an end-stage differentiated cell, such as a myocyte, which plays a characteristic role in a certain tissue type, and may or may not retain the capacity to proliferate further.

### Induced Pluripotent Stem Cells

[0268] The genetically engineered human cells described herein can be induced pluripotent stem cells (iPSCs). An advantage of using iPSCs is that the cells can be derived from the same subject to which the progenitor cells are to be administered. That is, a somatic cell can be obtained from a subject, reprogrammed to an induced pluripotent stem cell, and then re-differentiated into a progenitor cell to be administered to the subject (e.g., autologous cells). Because the progenitors are essentially derived from an autologous source, the risk of engraftment rejection or allergic response can be reduced compared to the use of cells from another subject or group of subjects. In addition, the use of iPSCs negates the need for cells obtained from an embryonic source. Thus, in one aspect, the stem cells used in the disclosed methods are not embryonic stem cells.

[0269] Although differentiation is generally irreversible under physiological contexts, several methods have been recently developed to reprogram somatic cells to iPSCs. Exemplary methods are known to those of skill in the art and are described briefly herein below.

[0270] The term “reprogramming” refers to a process that alters or reverses the differentiation state of a differentiated cell (e.g., a somatic cell). Stated another way, reprogramming refers to a process of driving the differentiation of a cell backwards to a more undifferentiated or more primitive type of cell. It should be noted that placing many primary cells in culture can lead to some loss of fully differentiated characteristics. Thus, simply culturing such cells included in the term differentiated cells does not render these cells non-differentiated cells (e.g., undifferentiated cells) or pluripotent cells. The transition of a differentiated cell to pluripotency requires a reprogramming stimulus beyond the stimuli that lead to partial loss of differentiated character in culture. Reprogrammed cells also have the characteristic of the capacity of extended passaging without loss of growth potential, relative to primary cell parents, which generally have capacity for only a limited number of divisions in culture.

[0271] The cell to be reprogrammed can be either partially or terminally differentiated prior to reprogramming. Reprogramming can encompass complete reversion of the differentiation state of a differentiated cell (e.g., a somatic cell) to a pluripotent state or a multipotent state. Reprogramming can encompass complete or partial reversion of the differentiation state of a differentiated cell (e.g., a somatic cell) to an undifferentiated cell (e.g., an embryonic-like cell). Reprogramming can result in expression of particular genes by the cells, the expression of which further contributes to reprogramming. In certain examples described herein, reprogramming of a differentiated cell (e.g., a somatic cell) can cause the differentiated cell to assume an undifferentiated state (e.g., is an undifferentiated cell). The resulting cells are referred to as “reprogrammed cells,” or “induced pluripotent stem cells (iPSCs or iPS cells).”

[0272] Reprogramming can involve alteration, e.g., reversal, of at least some of the heritable patterns of nucleic acid modification (e.g., methylation), chromatin condensation, epigenetic changes, genomic imprinting, etc., that occur during cellular differentiation. Reprogramming is distinct from simply maintaining the existing undifferentiated state of a cell that is already pluripotent or maintaining the existing less than fully differentiated state of a cell that is already a multipotent cell (e.g., a myogenic stem cell). Reprogramming is also distinct from promoting the self-renewal or proliferation of cells that are already pluripotent or multipotent, although the compositions and methods described herein can also be of use for such purposes, in some examples.

[0273] Many methods are known in the art that can be used to generate pluripotent stem cells from somatic cells. Any such method that reprograms a somatic cell to the pluripotent phenotype would be appropriate for use in the methods described herein.

[0274] Reprogramming methodologies for generating pluripotent cells using defined combinations of transcription factors have been described. Mouse somatic cells can be converted to ES cell-like cells with expanded developmental potential by the direct transduction of Oct4, Sox2, Klf4, and c-Myc; see, e.g., Takahashi and Yamanaka, Cell 126(4): 663-76 (2006). iPSCs resemble ES cells, as they restore the pluripotency-associated transcriptional circuitry and much of the epigenetic landscape. In addition, mouse iPSCs satisfy all the standard assays for pluripotency: specifically, in vitro differentiation into cell types of the three germ layers, teratoma formation, contribution to chimeras, germline transmission [see, e.g., Maherali and Hochedlinger, Cell Stem Cell. 3(6):595-605 (2008)], and tetraploid complementation.

[0275] Human iPSCs can be obtained using similar transduction methods, and the transcription factor trio, OCT4, SOX2, and NANOG, has been established as the core set of transcription factors that govern pluripotency; see, e.g., Budniatzky and Gepstein, Stem Cells Transl Med. 3(4):448-57 (2014); Barrett et al., Stem Cells Trans Med 3:1-6 sctm.2014-0121 (2014); Focosi et al., Blood Cancer Journal 4: e211 (2014); and references cited therein. The production of iPSCs can be achieved by the introduction of nucleic acid sequences encoding stem cell-associated genes into an adult, somatic cell, historically using viral vectors.

[0276] iPSCs can be generated or derived from terminally differentiated somatic cells, as well as from adult stem cells, or somatic stem cells. That is, a non-pluripotent progenitor cell can be rendered pluripotent or multipotent by reprogramming. In such instances, it may not be necessary to include as many reprogramming factors as required to reprogram a terminally differentiated cell. Further, reprogramming can be induced by the non-viral introduction of reprogramming factors, e.g., by introducing the proteins themselves, or by introducing nucleic acids that encode the reprogramming factors, or by introducing messenger RNAs that upon translation produce the reprogramming factors (see e.g., Warren et al., Cell Stem Cell, 7(5):618-30 (2010). Reprogramming can be achieved by introducing a combination of nucleic acids encoding stem cell-associated genes, including, for example, Oct-4 (also known as Oct-3/4 or Pouf51), Sox1, Sox2, Sox3, Sox 15, Sox 18, NANOG, Klfl, Klf2, Klf4, Klf5, NR5A2, c-Myc, 1-Myc, n-Myc, Rem2, Tert, and LIN28. Reprogramming using the methods and compositions described herein can further comprise introducing one or more of Oct-3/4, a member of the Sox family, a member of the Klf family, and a member of the Myc family to a somatic cell. The methods and compositions described herein can further comprise introducing one or more of each of Oct-4, Sox2, Nanog, c-MYC and Klf4 for reprogramming. As noted above, the exact method used for reprogramming is not necessarily critical to the methods and compositions described herein. However, where cells differentiated from the reprogrammed cells are to be used in, e.g., human therapy, in one aspect the reprogramming is not effected by a method that alters the genome. Thus, in such examples, reprogramming can be achieved, e.g., without the use of viral or plasmid vectors.

[0277] The efficiency of reprogramming (i.e., the number of reprogrammed cells) derived from a population of starting cells can be enhanced by the addition of various agents, e.g., small molecules, as shown by Shi et al., Cell-Stem Cell 2:525-528 (2008); Huangfu et al., Nature Biotechnology 26(7):795-797 (2008) and Marson et al., Cell-Stem Cell 3: 132-135 (2008). Thus, an agent or combination of agents that enhance the efficiency or rate of induced pluripotent stem cell production can be used in the production of patient-specific or disease-specific iPSCs. Some non-limiting examples of agents that enhance reprogramming efficiency include soluble Wnt, Wnt conditioned media, BIX-01294 (a G9a histone methyltransferase), PD0325901 (a MEK inhibitor), DNA methyltransferase inhibitors, histone deacetylase (HDAC) inhibitors, valproic acid, 5′-azacytidine, dexamethasone, suberoylanilide, hydroxamic acid (SAHA), vitamin C, and trichostatin (TSA), among others.

[0278] Other non-limiting examples of reprogramming enhancing agents include: Suberoylanilide Hydroxamic Acid (SAHA (e.g., MK0683, vorinostat) and other hydroxamic acids), BML-210, Depudecin (e.g., (−)-Depudecin), HC Toxin, Nullscript (4-(1,3-Dioxo-1H,3H-benzo[de]isoquinolin-2-yl)-N-hydroxybutanamide), Phenylbutyrate (e.g., sodium phenylbutyrate) and Valproic Acid ((VP A) and other short chain fatty acids), Scriptaid, Suramin Sodium, Trichostatin A (TSA), APHA Compound 8, Apicidin, Sodium Butyrate, pivaloyloxymethyl butyrate (Pivanex, AN-9), Trapoxin B, Chlamydocin, Depsipeptide (also known as FR901228 or FK228), benzamides (e.g., CI-994 (e.g., N-acetyl dinaline) and MS-27-275), MGCD0103, NVP-LAQ-824, CBHA (m-carboxycinnaminic acid bishydroxamic acid), JNJ16241199, Tubacin, A-161906, proxamide, oxamflatin, 3-Cl-UCHA (e.g., 6-(3-chlorophenylureido)caproic hydroxamic acid), AOE (2-amino-8-oxo-9, 10-epoxydecanoic acid), CHAP31 and CHAP 50. Other reprogramming enhancing agents include, for example, dominant negative forms of the HDACs (e.g., catalytically inactive forms), siRNA inhibitors of the HDACs, and antibodies that specifically bind to the HDACs. Such inhibitors are available, e.g., from BIOMOL International, Fukasawa, Merck Biosciences, Novartis, Gloucester Pharmaceuticals, Titan Pharmaceuticals, MethylGene, and Sigma Aldrich.

[0279] To confirm the induction of pluripotent stem cells for use with the methods described herein, isolated clones can be tested for the expression of a stem cell marker. Such expression in a cell derived from a somatic cell identifies the cells as induced pluripotent stem cells. Stem cell markers can be selected from the non-limiting group including SSEA3, SSEA4, CD9, Nanog, Fbxl5, Ecat1, Esg1, Eras, Gdf3, Fgf4, Cripto, Daxl, Zpf296, Slc2a3, Rex1, Utfl, and Natl. In one case, for example, a cell that expresses Oct4 or Nanog is identified as pluripotent. Methods for detecting the expression of such markers can include, for example, RT-PCR and immunological methods that detect the presence of the encoded polypeptides, such as Western blots or flow cytometric analyses. Detection can involve not only RT-PCR, but can also include detection of protein markers. Intracellular markers may be best identified via RT-PCR, or protein detection methods such as immunocytochemistry, while cell surface markers are readily identified, e.g., by immunocytochemistry.

[0280] The pluripotent stem cell character of isolated cells can be confirmed by tests evaluating the ability of the iPSCs to differentiate into cells of each of the three germ layers. As one example, teratoma formation in nude mice can be used to evaluate the pluripotent character of the isolated clones. The cells can be introduced into nude mice and histology and/or immunohistochemistry can be performed on a tumor arising from the cells. The growth of a tumor comprising cells from all three germ layers, for example, further indicates that the cells are pluripotent stem cells.

### Hepatocytes

[0281] In some aspects, the genetically engineered human cells described herein are hepatocytes. A hepatocyte is a cell of the main parenchymal tissue of the liver. Hepatocytes make up 70-85% of the liver's mass. These cells are involved in: protein synthesis; protein storage; transformation of carbohydrates; synthesis of cholesterol, bile salts and phospholipids; detoxification, modification, and excretion of exogenous and endogenous substances; and initiation of formation and secretion of bile.

Creating Patient Specific iPSCs

[0282] One step of the ex vivo methods of the present disclosure can involve creating a patient specific iPS cell, patient specific iPS cells, or a patient specific iPS cell line. There are many established methods in the art for creating patient specific iPS cells, as described in Takahashi and Yamanaka 2006; Takahashi, Tanabe et al. 2007. For example, the creating step can comprise: a) isolating a somatic cell, such as a skin cell or fibroblast, from the patient; and b) introducing a set of pluripotency-associated genes into the somatic cell in order to induce the cell to become a pluripotent stem cell. The set of pluripotency-associated genes can be one or more of the genes selected from the group consisting of OCT4, SOX1, SOX2, SOX3, SOX15, SOX18, NANOG, KLF1, KLF2, KLF4, KLF5, c-MYC, n-MYC, REM2, TERT and LIN28.

### Performing a Biopsy or Aspirate of the Patient's Liver or Bone Marrow

[0283] A biopsy or aspirate is a sample of tissue or fluid taken from the body. There are many different kinds of biopsies or aspirates. Nearly all of them involve using a sharp tool to remove a small amount of tissue. If the biopsy will be on the skin or other sensitive area, numbing medicine can be applied first. A biopsy or aspirate may be performed according to any of the known methods in the art. For example, in a biopsy, a needle is injected into the liver through the skin of the belly, capturing the liver tissue. For example, in a bone marrow aspirate, a large needle is used to enter the pelvis bone to collect bone marrow.

### Isolating a Liver Specific Progenitor Cell or Primary Hepatocyte

[0284] Liver specific progenitor cells and primary hepatocytes may be isolated according to any method known in the art. For example, human hepatocytes are isolated from fresh surgical specimens. Healthy liver tissue is used to isolate hepatocytes by collagenase digestion. The obtained cell suspension is filtered through a 100-mm nylon mesh and sedimented by centrifugation at 50 g for 5 minutes, resuspended, and washed two to three times in cold wash medium. Human liver stem cells are obtained by culturing under stringent conditions of hepatocytes obtained from fresh liver preparations. Hepatocytes seeded on collagen-coated plates are cultured for 2 weeks. After 2 weeks, surviving cells are removed, and characterized for expression of stem cells markers (Herrera et al., STEM CELLS 2006; 24: 2840-2850).

### Isolating a Mesenchymal Stem Cell

[0285] Mesenchymal stem cells can be isolated according to any method known in the art, such as from a patient's bone marrow or peripheral blood. For example, marrow aspirate can be collected into a syringe with heparin. Cells can be washed and centrifuged on a Percoll. The cells can be cultured in Dulbecco's modified Eagle's medium (DMEM) (low glucose) containing 10% fetal bovine serum (FBS) (Pittinger M F, Mackay A M, Beck S C et al., Science 1999; 284:143-147).

### Genetically Modified Cells

[0286] The term “genetically modified cell” refers to a cell that comprises at least one genetic modification introduced by genome editing (e.g., using the CRISPR/Cas9 or CRISPR/Cpf1 system). In some ex vivo examples herein, the genetically modified cell can be genetically modified progenitor cell. In some in vivo examples herein, the genetically modified cell can be a genetically modified liver cell. A genetically modified cell comprising an exogenous genome-targeting nucleic acid and/or an exogenous nucleic acid encoding a genome-targeting nucleic acid is contemplated herein.

[0287] The term “control treated population” describes a population of cells that has been treated with identical media, viral induction, nucleic acid sequences, temperature, confluency, flask size, pH, etc., with the exception of the addition of the genome editing components. Any method known in the art can be used to measure transcription of ANGPTL3 gene or protein expression or activity, for example Western Blot analysis of the ANGPTL3 protein or quantifying ANGPTL3 mRNA.

[0288] The term “isolated cell” refers to a cell that has been removed from an organism in which it was originally found, or a descendant of such a cell. Optionally, the cell can be cultured in vitro, e.g., under defined conditions or in the presence of other cells. Optionally, the cell can be later introduced into a second organism or re-introduced into the organism from which it (or the cell from which it is descended) was isolated.

[0289] The term “isolated population” with respect to an isolated population of cells refers to a population of cells that has been removed and separated from a mixed or heterogeneous population of cells. In some cases, the isolated population can be a substantially pure population of cells, as compared to the heterogeneous population from which the cells were isolated or enriched. In some cases, the isolated population can be an isolated population of human progenitor cells, e.g., a substantially pure population of human progenitor cells, as compared to a heterogeneous population of cells comprising human progenitor cells and cells from which the human progenitor cells were derived.

[0290] The term “substantially enhanced,” with respect to a particular cell population, refers to a population of cells in which the occurrence of a particular type of cell is increased relative to pre-existing or reference levels, by at least 2-fold, at least 3-, at least 4-, at least 5-, at least 6-, at least 7-, at least 8-, at least 9, at least 10-, at least 20-, at least 50-, at least 100-, at least 400-, at least 1000-, at least 5000-, at least 20000-, at least 100000- or more fold depending, e.g., on the desired levels of such cells for ameliorating Dyslipidemias.

[0291] The term “substantially enriched” with respect to a particular cell population, refers to a population of cells that is at least about 10%, about 20%, about 30%, about 40%, about 50%, about 60%, about 70% or more with respect to the cells making up a total cell population.

[0292] The terms “substantially enriched” or “substantially pure” with respect to a particular cell population, refers to a population of cells that is at least about 75%, at least about 85%, at least about 90%, or at least about 95% pure, with respect to the cells making up a total cell population. That is, the terms “substantially pure” or “essentially purified,” with regard to a population of progenitor cells, refers to a population of cells that contain fewer than about 20%, about 15%, about 10%, about 9%, about 8%, about 7%, about 6%, about 5%, about 4%, about 3%, about 2%, about 1%, or less than 1%, of cells that are not progenitor cells as defined by the terms herein.

Differentiation of Genome-Edited iPSCs into Other Cell Types

[0293] Another step of the ex vivo methods of the present disclosure can comprise differentiating the genome-edited iPSCs into hepatocytes. The differentiating step may be performed according to any method known in the art. For example, hiPSC are differentiated into definitive endoderm using various treatments, including activin and B27 supplement (Life Technology). The definitive endoderm is further differentiated into hepatocyte, the treatment includes: FGF4, HGF, BMP2, BMP4, Oncostatin M, Dexametason, etc. (Duan et al, STEM CELLS; 2010; 28:674-686, Ma et al, STEM CELLS TRANSLATIONAL MEDICINE 2013; 2:409-419).

Differentiation of Genome-Edited Mesenchymal Stem Cells into Hepatocytes

[0294] Another step of the ex vivo methods of the present disclosure can comprise differentiating the genome-edited mesenchymal stem cells into hepatocytes. The differentiating step may be performed according to any method known in the art. For example, hMSC are treated with various factors and hormones, including insulin, transferrin, FGF4, HGF, bile acids (Sawitza I et al, Sci Rep. 2015; 5: 13320).

Implanting Cells into Patients

[0295] Another step of the ex vivo methods of the present disclosure can comprise implanting the hepatocytes into patients. This implanting step may be accomplished using any method of implantation known in the art. For example, the genetically modified cells may be injected directly in the patient's blood or otherwise administered to the patient.

[0296] Another step of the ex vivo methods of the disclosure involves implanting the progenitor cells or primary hepatocytes into patients. This implanting step may be accomplished using any method of implantation known in the art. For example, the genetically modified cells may be injected directly in the patient's liver or otherwise administered to the patient.

### III. Formulations and Delivery

### Pharmaceutically Acceptable Carriers

[0297] The ex vivo methods of administering progenitor cells to a subject contemplated herein involve the use of therapeutic compositions comprising progenitor cells.

[0298] Therapeutic compositions can contain a physiologically tolerable carrier together with the cell composition, and optionally at least one additional bioactive agent as described herein, dissolved or dispersed therein as an active ingredient. In some cases, the therapeutic composition is not substantially immunogenic when administered to a mammal or human patient for therapeutic purposes, unless so desired.

[0299] In general, the progenitor cells described herein can be administered as a suspension with a pharmaceutically acceptable carrier. One of skill in the art will recognize that a pharmaceutically acceptable carrier to be used in a cell composition will not include buffers, compounds, cryopreservation agents, preservatives, or other agents in amounts that substantially interfere with the viability of the cells to be delivered to the subject. A formulation comprising cells can include e.g., osmotic buffers that permit cell membrane integrity to be maintained, and optionally, nutrients to maintain cell viability or enhance engraftment upon administration. Such formulations and suspensions are known to those of skill in the art and/or can be adapted for use with the progenitor cells, as described herein, using routine experimentation.

[0300] A cell composition can also be emulsified or presented as a liposome composition, provided that the emulsification procedure does not adversely affect cell viability. The cells and any other active ingredient can be mixed with excipients that are pharmaceutically acceptable and compatible with the active ingredient, and in amounts suitable for use in the therapeutic methods described herein.

[0301] Additional agents included in a cell composition can include pharmaceutically acceptable salts of the components therein. Pharmaceutically acceptable salts include the acid addition salts (formed with the free amino groups of the polypeptide) that are formed with inorganic acids, such as, for example, hydrochloric or phosphoric acids, or such organic acids as acetic, tartaric, mandelic and the like. Salts formed with the free carboxyl groups can also be derived from inorganic bases, such as, for example, sodium, potassium, ammonium, calcium or ferric hydroxides, and such organic bases as isopropylamine, trimethylamine, ₂-ethylamino ethanol, histidine, procaine and the like.

[0302] Physiologically tolerable carriers are well known in the art. Exemplary liquid carriers are sterile aqueous solutions that contain no materials in addition to the active ingredients and water, or contain a buffer such as sodium phosphate at physiological pH value, physiological saline or both, such as phosphate-buffered saline. Still further, aqueous carriers can contain more than one buffer salt, as well as salts such as sodium and potassium chlorides, dextrose, polyethylene glycol and other solutes. Liquid compositions can also contain liquid phases in addition to and to the exclusion of water. Exemplary of such additional liquid phases are glycerin, vegetable oils such as cottonseed oil, and water-oil emulsions. The amount of an active compound used in the cell compositions that is effective in the treatment of a particular disorder or condition can depend on the nature of the disorder or condition, and can be determined by standard clinical techniques.

### Guide RNA Formulation

[0303] Guide RNAs of the present disclosure can be formulated with pharmaceutically acceptable excipients such as carriers, solvents, stabilizers, adjuvants, diluents, etc., depending upon the particular mode of administration and dosage form. Guide RNA compositions can be formulated to achieve a physiologically compatible pH, and range from a pH of about 3 to a pH of about 11, about pH 3 to about pH 7, depending on the formulation and route of administration. In some cases, the pH can be adjusted to a range from about pH 5.0 to about pH 8. In some cases, the compositions can comprise a therapeutically effective amount of at least one compound as described herein, together with one or more pharmaceutically acceptable excipients. Optionally, the compositions can comprise a combination of the compounds described herein, or can include a second active ingredient useful in the treatment or prevention of bacterial growth (for example and without limitation, anti-bacterial or anti-microbial agents), or can include a combination of reagents of the present disclosure.

[0304] Suitable excipients include, for example, carrier molecules that include large, slowly metabolized macromolecules such as proteins, polysaccharides, polylactic acids, polyglycolic acids, polymeric amino acids, amino acid copolymers, and inactive virus particles. Other exemplary excipients can include antioxidants (for example and without limitation, ascorbic acid), chelating agents (for example and without limitation, EDTA), carbohydrates (for example and without limitation, dextrin, hydroxyalkylcellulose, and hydroxyalkylmethylcellulose), stearic acid, liquids (for example and without limitation, oils, water, saline, glycerol and ethanol), wetting or emulsifying agents, pH buffering substances, and the like.

### Delivery

[0305] Guide RNA polynucleotides (RNA or DNA) and/or endonuclease polynucleotide(s) (RNA or DNA) can be delivered by viral or non-viral delivery vehicles known in the art. Alternatively, endonuclease polypeptide(s) can be delivered by viral or non-viral delivery vehicles known in the art, such as electroporation or lipid nanoparticles. In further alternative aspects, the DNA endonuclease can be delivered as one or more polypeptides, either alone or pre-complexed with one or more guide RNAs, or one or more crRNA together with a tracrRNA.

[0306] Polynucleotides can be delivered by non-viral delivery vehicles including, but not limited to, nanoparticles, liposomes, ribonucleoproteins, positively charged peptides, small molecule RNA-conjugates, aptamer-RNA chimeras, and RNA-fusion protein complexes. Some exemplary non-viral delivery vehicles are described in Peer and Lieberman, Gene Therapy, 18: 1127-1133 (2011) (which focuses on non-viral delivery vehicles for siRNA that are also useful for delivery of other polynucleotides).

[0307] For polynucleotides of the disclosure, the formulation may be selected from any of those taught, for example, in International Application PCT/US2012/069610.

[0308] Polynucleotides, such as guide RNA, sgRNA, and mRNA encoding an endonuclease, may be delivered to a cell or a patient by a lipid nanoparticle (LNP).

[0309] A LNP refers to any particle having a diameter of less than 1000 nm, 500 nm, 250 nm, 200 nm, 150 nm, 100 nm, 75 nm, 50 nm, or 25 nm. Alternatively, a nanoparticle may range in size from 1-1000 nm, 1-500 nm, 1-250 nm, 25-200 nm, 25-100 nm, 35-75 nm, or 25-60 nm.

[0310] LNPs may be made from cationic, anionic, or neutral lipids. Neutral lipids, such as the fusogenic phospholipid DOPE or the membrane component cholesterol, may be included in LNPs as ‘helper lipids’ to enhance transfection activity and nanoparticle stability. Limitations of cationic lipids include low efficacy owing to poor stability and rapid clearance, as well as the generation of inflammatory or anti-inflammatory responses.

[0311] LNPs may also be comprised of hydrophobic lipids, hydrophilic lipids, or both hydrophobic and hydrophilic lipids.

[0312] Any lipid or combination of lipids that are known in the art can be used to produce a LNP. Examples of lipids used to produce LNPs are: DOTMA, DOSPA, DOTAP, DMRIE, DC-cholesterol, DOTAP-cholesterol, GAP-DMORIE-DPyPE, and GL67A-DOPE-DMPE-polyethylene glycol (PEG). Examples of cationic lipids are: 98N12-5, C12-200, DLin-KC2-DMA (KC2), DLin-MC3-DMA (MC3), XTC, MD1, and 7C1. Examples of neutral lipids are: DPSC, DPPC, POPC, DOPE, and SM. Examples of PEG-modified lipids are: PEG-DMG, PEG-CerC14, and PEG-CerC20.

[0313] The lipids can be combined in any number of molar ratios to produce a LNP. In addition, the polynucleotide(s) can be combined with lipid(s) in a wide range of molar ratios to produce a LNP.

[0314] As stated previously, the site-directed polypeptide and genome-targeting nucleic acid can each be administered separately to a cell or a patient. On the other hand, the site-directed polypeptide can be pre-complexed with one or more guide RNAs, or one or more crRNA together with a tracrRNA. The pre-complexed material can then be administered to a cell or a patient. Such pre-complexed material is known as a ribonucleoprotein particle (RNP).

[0315] RNA is capable of forming specific interactions with RNA or DNA. While this property is exploited in many biological processes, it also comes with the risk of promiscuous interactions in a nucleic acid-rich cellular environment. One solution to this problem is the formation of ribonucleoprotein particles (RNPs), in which the RNA is pre-complexed with an endonuclease. Another benefit of the RNP is protection of the RNA from degradation.

[0316] The endonuclease in the RNP can be modified or unmodified. Likewise, the gRNA, crRNA, tracrRNA, or sgRNA can be modified or unmodified. Numerous modifications are known in the art and can be used.

[0317] The endonuclease and sgRNA can be generally combined in a 1:1 molar ratio. Alternatively, the endonuclease, crRNA and tracrRNA can be generally combined in a 1:1:1 molar ratio. However, a wide range of molar ratios can be used to produce a RNP. AAV (adeno associated virus)

[0318] A recombinant adeno-associated virus (AAV) vector can be used for delivery. Techniques to produce rAAV particles, in which an AAV genome to be packaged that includes the polynucleotide to be delivered, rep and cap genes, and helper virus functions are provided to a cell are standard in the art. Production of rAAV typically requires that the following components are present within a single cell (denoted herein as a packaging cell): a rAAV genome, AAV rep and cap genes separate from (i.e., not in) the rAAV genome, and helper virus functions. The AAV rep and cap genes may be from any AAV serotype for which recombinant virus can be derived, and may be from a different AAV serotype than the rAAV genome ITRs, including, but not limited to, AAV serotypes described herein. Production of pseudotyped rAAV is disclosed in, for example, international patent application publication number WO 01/83692.

### AAV Serotypes

[0319] AAV particles packaging polynucleotides encoding compositions of the disclosure, e.g., endonucleases, donor sequences, or RNA guide molecules, of the present disclosure may comprise or be derived from any natural or recombinant AAV serotype. According to the present disclosure, the AAV particles may utilize or be based on a serotype selected from any of the following serotypes, and variants thereof including but not limited to AAV1, AAV10, AAV106.1/hu.37, AAV11, AAV114.3/hu.40, AAV12, AAV127.2/hu.41, AAV127.5/hu.42, AAV128.1/hu.43, AAV128.3/hu.44, AAV130.4/hu.48, AAV145.1/hu.53, AAV145.5/hu.54, AAV145.6/hu.55, AAV16.12/hu.11, AAV16.3, AAV16.8/hu.10, AAV161.10/hu.60, AAV161.6/hu.61, AAV1-7/rh.48, AAV1-8/rh.49, AAV2, AAV2.5T, AAV2-15/rh.62, AAV223.1, AAV223.2, AAV223.4, AAV223.5, AAV223.6, AAV223.7, AAV2-3/rh.61, AAV24.1, AAV2-4/rh.50, AAV2-5/rh.51, AAV27.3, AAV29.3/bb.1, AAV29.5/bb.2, AAV2G9, AAV-2-pre-miRNA-101, AAV3, AAV3.1/hu.6, AAV3.1/hu.9, AAV3-11/rh.53, AAV3-3, AAV33.12/hu.17, AAV33.4/hu.15, AAV33.8/hu.16, AAV3-9/rh.52, AAV3a, AAV3b, AAV4, AAV4-19/rh.55, AAV42.12, AAV42-10, AAV42-11, AAV42-12, AAV42-13, AAV42-15, AAV42-lb, AAV42-2, AAV42-3a, AAV42-3b, AAV42-4, AAV42-5a, AAV42-5b, AAV42-6b, AAV42-8, AAV42-aa, AAV43-1, AAV43-12, AAV43-20, AAV43-21, AAV43-23, AAV43-25, AAV43-5, AAV4-4, AAV44.1, AAV44.2, AAV44.5, AAV46.2/hu.28, AAV46.6/hu.29, AAV4-8/rl1.64, AAV4-8/rh.64, AAV4-9/rh.54, AAV5, AAV52.1/hu.20, AAV52/hu.19, AAV5-22/rh.58, AAV5-3/rh.57, AAV54.1/hu.21, AAV54.2/hu.22, AAV54.4R/hu.27, AAV54.5/hu.23, AAV54.7/hu.24, AAV58.2/hu.25, AAV6, AAV6.1, AAV6.1.2, AAV6.2, AAV7, AAV7.2, AAV7.3/hu.7, AAV8, AAV-8b, AAV-8h, AAV9, AAV9.11, AAV9.13, AAV9.16, AAV9.24, AAV9.45, AAV9.47, AAV9.61, AAV9.68, AAV9.84, AAV9.9, AAVA3.3, AAVA3.4, AAVA3.5, AAVA3.7, AAV-b, AAVC1, AAVC2, AAVC5, AAVCh.5, AAVCh.5R1, AAVcy.2, AAVcy.3, AAVcy.4, AAVcy.5, AAVCy.5R1, AAVCy.5R2, AAVCy.5R3, AAVCy.5R4, AAVcy.6, AAV-DJ, AAV-DJ8, AAVF3, AAVF5, AAV-h, AAVH-1/hu.1, AAVH2, AAVH-5/hu.3, AAVH6, AAVhE1.1, AAVhER1.14, AAVhErl.16, AAVhErl.18, AAVhER1.23, AAVhErl.35, AAVhErl.36, AAVhErL.5, AAVhErl.7, AAVhErl.8, AAVhEr2.16, AAVhEr2.29, AAVhEr2.30, AAVhEr2.31, AAVhEr2.36, AAVhEr2.4, AAVhEr3.1, AAVhu.1, AAVhu.10, AAVhu.11, AAVhu.11, AAVhu.12, AAVhu.13, AAVhu.14/9, AAVhu.15, AAVhu.16, AAVhu.17, AAVhu.18, AAVhu.19, AAVhu.2, AAVhu.20, AAVhu.21, AAVhu.22, AAVhu.23.2, AAVhu.24, AAVhu.25, AAVhu.27, AAVhu.28, AAVhu.29, AAVhu.29R, AAVhu.3, AAVhu.31, AAVhu.32, AAVhu.34, AAVhu.35, AAVhu.37, AAVhu.39, AAVhu.4, AAVhu.40, AAVhu.41, AAVhu.42, AAVhu.43, AAVhu.44, AAVhu.44R1, AAVhu.44R2, AAVhu.44R3, AAVhu.45, AAVhu.46, AAVhu.47, AAVhu.48, AAVhu.48R1, AAVhu.48R2, AAVhu.48R3, AAVhu.49, AAVhu.5, AAVhu.51, AAVhu.52, AAVhu.53, AAVhu.54, AAVhu.55, AAVhu.56, AAVhu.57, AAVhu.58, AAVhu.6, AAVhu.60, AAVhu.61, AAVhu.63, AAVhu.64, AAVhu.66, AAVhu.67, AAVhu.7, AAVhu.8, AAVhu.9, AAVhu.t 19, AAVLG-10/rh.40, AAVLG-4/rh.38, AAVLG-9/hu.39, AAVLG-9/hu.39, AAV-LK01, AAV-LK02, AAVLK03, AAV-LK03, AAV-LK04, AAV-LK05, AAV-LK06, AAV-LK07, AAV-LK08, AAV-LK09, AAV-LK10, AAV-LK11, AAV-LK12, AAV-LK13, AAV-LK14, AAV-LK15, AAV-LK17, AAV-LK18, AAV-LK19, AAVN721-8/rh.43, AAV-PAEC, AAV-PAEC11, AAV-PAEC12, AAV-PAEC2, AAV-PAEC4, AAV-PAEC6, AAV-PAEC7, AAV-PAEC8, AAVpi.1, AAVpi.2, AAVpi.3, AAVrh.10, AAVrh.12, AAVrh.13, AAVrh.13R, AAVrh.14, AAVrh.17, AAVrh.18, AAVrh.19, AAVrh.2, AAVrh.20, AAVrh.21, AAVrh.22, AAVrh.23, AAVrh.24, AAVrh.25, AAVrh.2R, AAVrh.31, AAVrh.32, AAVrh.33, AAVrh.34, AAVrh.35, AAVrh.36, AAVrh.37, AAVrh.37R2, AAVrh.38, AAVrh.39, AAVrh.40, AAVrh.43, AAVrh.44, AAVrh.45, AAVrh.46, AAVrh.47, AAVrh.48, AAVrh.48, AAVrh.48.1, AAVrh.48.1.2, AAVrh.48.2, AAVrh.49, AAVrh.50, AAVrh.51, AAVrh.52, AAVrh.53, AAVrh.54, AAVrh.55, AAVrh.56, AAVrh.57, AAVrh.58, AAVrh.59, AAVrh.60, AAVrh.61, AAVrh.62, AAVrh.64, AAVrh.64R1, AAVrh.64R2, AAVrh.65, AAVrh.67, AAVrh.68, AAVrh.69, AAVrh.70, AAVrh.72, AAVrh.73, AAVrh.74, AAVrh.8, AAVrh.8R, AAVrh8R, AAVrh8R A586R mutant, AAVrh8R R533A mutant, BAAV, BNP61 AAV, BNP62 AAV, BNP63 AAV, bovine AAV, caprine AAV, Japanese AAV 10, true type AAV (ttAAV), UPENN AAV 10, AAV-LK16, AAAV, AAV Shuffle 100-1, AAV Shuffle 100-2, AAV Shuffle 100-3, AAV Shuffle 100-7, AAV Shuffle 10-2, AAV Shuffle 10-6, AAV Shuffle 10-8, AAV SM 100-10, AAV SM 100-3, AAV SM 10-1, AAV SM 10-2, and/or AAV SM 10-8.

[0320] In some aspects, the AAV serotype may be, or have, a mutation in the AAV9 sequence as described by N Pulicherla et al. (Molecular Therapy 19(6):1070-1078 (2011)), such as but not limited to, AAV9.9, AAV9.11, AAV9.13, AAV9.16, AAV9.24, AAV9.45, AAV9.47, AAV9.61, AAV9.68, AAV9.84.

[0321] In some aspects, the AAV serotype may be, or have, a sequence as described in U.S. Pat. No. 6,156,303, such as, but not limited to, AAV3B (SEQ ID NO: 1 and 10 of U.S. Pat. No. 6,156,303), AAV6 (SEQ ID NO: 2, 7 and 11 of U.S. Pat. No. 6,156,303), AAV2 (SEQ ID NO: 3 and 8 of U.S. Pat. No. 6,156,303), AAV3A (SEQ ID NO: 4 and 9, of U.S. Pat. No. 6,156,303), or derivatives thereof.

[0322] In some aspects, the serotype may be AAVDJ or a variant thereof, such as AAVDJ8 (or AAV-DJ8), as described by Grimm et al. (Journal of Virology 82(12): 5887-5911 (2008). The amino acid sequence of AAVDJ8 may comprise two or more mutations in order to remove the heparin binding domain (HBD). As a non-limiting example, the AAV-DJ sequence described as SEQ ID NO: 1 in U.S. Pat. No. 7,588,772 may comprise two mutations: (1) R587Q where arginine (R; Arg) at amino acid 587 is changed to glutamine (Q; Gln) and (2) R590T where arginine (R; Arg) at amino acid 590 is changed to threonine (T; Thr). As another non-limiting example, may comprise three mutations: (1) K406R where lysine (K; Lys) at amino acid 406 is changed to arginine (R; Arg), (2) R587Q where arginine (R; Arg) at amino acid 587 is changed to glutamine (Q; Gln) and (3) R590T where arginine (R; Arg) at amino acid 590 is changed to threonine (T; Thr).

[0323] In some embodiments, the AAV serotype may be, or have, a sequence as described in International Publication No. WO2015121501, such as, but not limited to, true type AAV (ttAAV) (SEQ ID NO: 2 of WO2015121501), “UPenn AAV10” (SEQ ID NO: 8 of WO2015/121501), “Japanese AAV10” (SEQ ID NO: 9 of WO2015/121501), or variants thereof.

[0324] According to the present disclosure, AAV capsid serotype selection or use may be from a variety of species. In one example, the AAV may be an avian AAV (AAAV). The AAAV serotype may be, or have, a sequence as described in U.S. Pat. No. 9,238,800, such as, but not limited to, AAAV (SEQ ID NO: 1, 2, 4, 6, 8, 10, 12, and 14 of U.S. Pat. No. 9,238,800), or variants thereof.

[0325] In one example, the AAV may be a bovine AAV (BAAV). The BAAV serotype may be, or have, a sequence as described in U.S. Pat. No. 9,193,769, such as, but not limited to, BAAV (SEQ ID NO: 1 and 6 of U.S. Pat. No. 9,193,769), or variants thereof. The BAAV serotype may be or have a sequence as described in U.S. Pat. No. 7,427,396, such as, but not limited to, BAAV (SEQ ID NO: 5 and 6 of U.S. Pat. No. 7,427,396), or variants thereof.

[0326] In one example, the AAV may be a caprine AAV. The caprine AAV serotype may be, or have, a sequence as described in U.S. Pat. No. 7,427,396, such as, but not limited to, caprine AAV (SEQ ID NO: 3 of U.S. Pat. No. 7,427,396), or variants thereof.

[0327] In other examples the AAV may be engineered as a hybrid AAV from two or more parental serotypes. In one example, the AAV may be AAV2G9 which comprises sequences from AAV2 and AAV9. The AAV2G9 AAV serotype may be, or have, a sequence as described in United States Patent Publication No. US2016/0017005.

[0328] In one example, the AAV may be a serotype generated by the AAV9 capsid library with mutations in amino acids 390-627 (VP1 numbering) as described by Pulicherla et al. (Molecular Therapy 19(6):1070-1078 (2011). The serotype and corresponding nucleotide and amino acid substitutions may be, but is not limited to, AAV9.1 (G1594C; D532H), AAV6.2 (T1418A and T1436X; V473D and I479K), AAV9.3 (T1238A; F413Y), AAV9.4 (T1250C and A1617T; F417S), AAV9.5 (A1235G, A1314T, A1642G, C1760T; Q412R, T548A, A587V), AAV9.6 (T1231A; F4111), AAV9.9 (G1203A, G1785T; W595C), AAV9.10 (A1500G, T1676C; M559T), AAV9.11 (A1425T, A1702C, A1769T; T568P, Q590L), AAV9.13 (A1369C, A1720T; N457H, T574S), AAV9.14 (T1340A, T1362C, T1560C, G1713A; L447H), AAV9.16 (A1775T; Q592L), AAV9.24 (T1507C, T1521G; W503R), AAV9.26 (A1337G, A1769C; Y446C, Q590P), AAV9.33 (A1667C; D556A), AAV9.34 (A1534G, C1794T; N512D), AAV9.35 (A1289T, T1450A, C1494T, A1515T, C1794A, G1816A; Q430L, Y484N, N98K, V606I), AAV9.40 (A1694T, E565V), AAV9.41 (A1348T, T1362C; T450S), AAV9.44 (A1684C, A1701T, A1737G; N562H, K567N), AAV9.45 (A1492T, C1804T; N498Y, L602F), AAV9.46 (G1441C, T1525C, T1549G; G481R, W509R, L517V), 9.47 (G1241A, G1358A, A1669G, C1745T; S414N, G453D, K557E, T582I), AAV9.48 (C1445T, A1736T; P482L, Q579L), AAV9.50 (A1638T, C1683T, T1805A; Q546H, L602H), AAV9.53 (G1301A, A1405C, C1664T, G1811T; R134Q, S469R, A555V, G604V), AAV9.54 (C1531A, T1609A; L511I, L537M), AAV9.55 (T1605A; F535L), AAV9.58 (C1475T, C1579A; T492I, H527N), AAV.59 (T1336C; Y446H), AAV9.61 (A1493T; N498I), AAV9.64 (C1531A, A1617T; L511I), AAV9.65 (C1335T, T1530C, C1568A; A523D), AAV9.68 (C1510A; P504T), AAV9.80 (G1441A; G481R), AAV9.83 (C1402A, A1500T; P468T, E500D), AAV9.87 (T1464C, T1468C; S490P), AAV9.90 (A1196T; Y399F), AAV9.91 (T1316G, A1583T, C1782G, T1806C; L439R, K5281), AAV9.93 (A1273G, A1421G, A1638C, C1712T, G1732A, A1744T, A1832T; S425G, Q474R, Q546H, P571L, G578R, T582S, D611V), AAV9.94 (A1675T; M559L) and AAV9.95 (T1605A; F535L).

[0329] In one example, the AAV may be a serotype comprising at least one AAV capsid CD8+ T-cell epitope. As a non-limiting example, the serotype may be AAV1, AAV2 or AAV8.

[0330] In one example, the AAV may be a variant, such as PHP.A or PHP.B as described in Deverman. 2016. Nature Biotechnology. 34(2): 204-209.

[0331] In one example, the AAV may be a serotype selected from any of those found in SEQ ID NOs: 4,734-5,302 and in Table 2.

[0332] In one example, the AAV may be encoded by a sequence, fragment or variant as described in SEQ ID NOs: 4,734-5,302.

[0333] General principles of rAAV production are reviewed in, for example, Carter, 1992, Current Opinions in Biotechnology, 1533-539; and Muzyczka, 1992, Curr. Topics in Microbial. and Immunol., 158:97-129). Various approaches are described in Ratschin et al., Mol. Cell. Biol. 4:2072 (1984); Hermonat et al., Proc. Natl. Acad. Sci. USA, 81:6466 (1984); Tratschin et al., Mol. Cell. Biol. 5:3251 (1985); McLaughlin et al., J. Virol., 62:1963 (1988); and Lebkowski et al., 1988 Mol. Cell. Biol., 7:349 (1988). Samulski et al. (1989, J. Virol., 63:3822-3828); U.S. Pat. No. 5,173,414; WO 95/13365 and corresponding U.S. Pat. No. 5,658,776; WO 95/13392; WO 96/17947; PCT/US98/18600; WO 97/09441 (PCT/US96/14423); WO 97/08298 (PCT/US96/13872); WO 97/21825 (PCT/US96/20777); WO 97/06243 (PCT/FR96/01064); WO 99/11764; Perrin et al. (1995) Vaccine 13:1244-1250; Paul et al. (1993) Human Gene Therapy 4:609-615; Clark et al. (1996) Gene Therapy 3:1124-1132; U.S. Pat. Nos. 5,786,211; 5,871,982; and 6,258,595.

[0334] AAV vector serotypes can be matched to target cell types. For example, the following exemplary cell types can be transduced by the indicated AAV serotypes among others.

TABLE 2
Tissue/Cell Types and Serotypes

| Tissue/Cell Type | Serotype |
|---|---|
| Liver | AAV3, AAV5, AAV8, AAV9 |
| Skeletal muscle | AAV1, AAV7, AAV6, AAV8, AAV9 |
| Central nervous system | AAV5, AAV1, AAV4, AAV9 |
| RPE | AAV5, AAV4 |
| Photoreceptor cells | AAV5 |
| Lung | AAV9 |
| Heart | AAV8 |
| Pancreas | AAV8 |
| Kidney | AAV2, AAV8 |
| Hematopoietic stem cells | AAV6 |

[0335] In addition to adeno-associated viral vectors, other viral vectors can be used. Such viral vectors include, but are not limited to, lentivirus, alphavirus, enterovirus, pestivirus, baculovirus, herpesvirus, Epstein Barr virus, papovavirus, poxvirus, vaccinia virus, and herpes simplex virus.

[0336] In some aspects, Cas9 mRNA, sgRNA targeting one or two loci in ANGPTL3 gene, and donor DNA can each be separately formulated into lipid nanoparticles, or are all co-formulated into one lipid nanoparticle.

[0337] In some aspects, Cas9 mRNA can be formulated in a lipid nanoparticle, while sgRNA and donor DNA can be delivered in an AAV vector.

[0338] Options are available to deliver the Cas9 nuclease as a DNA plasmid, as mRNA or as a protein. The guide RNA can be expressed from the same DNA, or can also be delivered as an RNA. The RNA can be chemically modified to alter or improve its half-life, or decrease the likelihood or degree of immune response. The endonuclease protein can be complexed with the gRNA prior to delivery. Viral vectors allow efficient delivery; split versions of Cas9 and smaller orthologs of Cas9 can be packaged in AAV, as can donors for HDR. A range of non-viral delivery methods also exist that can deliver each of these components, or non-viral and viral methods can be employed in tandem. For example, nano-particles can be used to deliver the protein and guide RNA, while AAV can be used to deliver a donor DNA.

### IV. Dosing and Administration

[0339] The terms “administering,” “introducing” and “transplanting” are used interchangeably in the context of the placement of cells, e.g., progenitor cells, into a subject, by a method or route that results in at least partial localization of the introduced cells at a desired site, such as a site of injury or repair, such that a desired effect(s) is produced. The cells e.g., progenitor cells, or their differentiated progeny can be administered by any appropriate route that results in delivery to a desired location in the subject where at least a portion of the implanted cells or components of the cells remain viable. The period of viability of the cells after administration to a subject can be as short as a few hours, e.g., twenty-four hours, to a few days, to as long as several years, or even the life time of the patient, i.e., long-term engraftment. For example, in some aspects described herein, an effective amount of liver progenitor cells is administered via a systemic route of administration, such as an intraperitoneal or intravenous route.

[0340] The terms “individual,” “subject,” “host” and “patient” are used interchangeably herein and refer to any subject for whom diagnosis, treatment or therapy is desired. In some aspects, the subject is a mammal. In some aspects, the subject is a human being.

[0341] When provided prophylactically, progenitor cells described herein can be administered to a subject in advance of any symptom of Dyslipidemias. Accordingly, the prophylactic administration of a progenitor cell population serves to prevent Dyslipidemias.

[0342] A progenitor cell population being administered according to the methods described herein can comprise allogeneic progenitor cells obtained from one or more donors. Such progenitors may be of any cellular or tissue origin, e.g., liver, muscle, cardiac, etc. “Allogeneic” refers to a progenitor cell or biological samples comprising progenitor cells obtained from one or more different donors of the same species, where the genes at one or more loci are not identical. For example, a liver progenitor cell population being administered to a subject can be derived from one more unrelated donor subjects, or from one or more non-identical siblings. In some cases, syngeneic progenitor cell populations can be used, such as those obtained from genetically identical animals, or from identical twins. The progenitor cells can be autologous cells; that is, the progenitor cells are obtained or isolated from a subject and administered to the same subject, i.e., the donor and recipient are the same.

[0343] The term “effective amount” refers to the amount of a population of progenitor cells or their progeny needed to prevent or alleviate at least one or more signs or symptoms of Dyslipidemias, and relates to a sufficient amount of a composition to provide the desired effect, e.g., to treat a subject having Dyslipidemias. The term “therapeutically effective amount” therefore refers to an amount of progenitor cells or a composition comprising progenitor cells that is sufficient to promote a particular effect when administered to a typical subject, such as one who has or is at risk for Dyslipidemias. An effective amount would also include an amount sufficient to prevent or delay the development of a symptom of the disease, alter the course of a symptom of the disease (for example but not limited to, slow the progression of a symptom of the disease), or reverse a symptom of the disease. It is understood that for any given case, an appropriate “effective amount” can be determined by one of ordinary skill in the art using routine experimentation.

[0344] For use in the various aspects described herein, an effective amount of progenitor cells comprises at least 10² progenitor cells, at least 5×10² progenitor cells, at least 10³ progenitor cells, at least 5×10³ progenitor cells, at least 10⁴ progenitor cells, at least 5×10⁴ progenitor cells, at least 10⁵ progenitor cells, at least 2×10⁵ progenitor cells, at least 3×10⁵ progenitor cells, at least 4×10⁵ progenitor cells, at least 5×10⁵ progenitor cells, at least 6×10⁵ progenitor cells, at least 7×10⁵ progenitor cells, at least 8×10⁵ progenitor cells, at least 9×10⁵ progenitor cells, at least 1×10⁶ progenitor cells, at least 2×10⁶ progenitor cells, at least 3×10⁶ progenitor cells, at least 4×10⁶ progenitor cells, at least 5×10⁶ progenitor cells, at least 6×10⁶ progenitor cells, at least 7×10⁶ progenitor cells, at least 8×10⁶ progenitor cells, at least 9×10⁶ progenitor cells, or multiples thereof. The progenitor cells can be derived from one or more donors, or can be obtained from an autologous source. In some examples described herein, the progenitor cells can be expanded in culture prior to administration to a subject in need thereof.

[0345] Modest and incremental decreases in the levels of ANGPTL3 expressed in cells of patients having an ANGPTL3 related disorder can be beneficial for ameliorating one or more symptoms of the disease, for increasing long-term survival, and/or for reducing side effects associated with other treatments. Upon administration of such cells to human patients, the presence of progenitors that are producing decreased levels of ANGPTL3 is beneficial. In some cases, effective treatment of a subject gives rise to at least about 3%, 5% or 7% reduction in ANGPTL3 level relative to total ANGPTL3 in the treated subject. In some examples, the reduction in ANGPTL3 will be at least about 10% of total ANGPTL3. In some examples, the reduction in ANGPTL3 will be at least about 20% to 30% of total ANGPTL3. Similarly, the introduction of even relatively limited subpopulations of cells having significantly reduced levels of ANGPTL3 can be beneficial in various patients because in some situations normalized cells will have a selective advantage relative to diseased cells. However, even modest levels of progenitors with reduced levels of ANGPTL3 can be beneficial for ameliorating one or more aspects of Dyslipidemias in patients. In some examples, about 10%, about 20%, about 30%, about 40%, about 50%, about 60%, about 70%, about 80%, about 90% or more of the liver progenitors in patients to whom such cells are administered are producing decreased levels of ANGPTL3.

[0346] “Administered” refers to the delivery of a progenitor cell composition into a subject by a method or route that results in at least partial localization of the cell composition at a desired site. A cell composition can be administered by any appropriate route that results in effective treatment in the subject, i.e. administration results in delivery to a desired location in the subject where at least a portion of the composition delivered, i.e. at least 1×10⁴ cells are delivered to the desired site for a period of time.

[0347] In one aspect of the method, the pharmaceutical composition may be administered via a route such as, but not limited to, enteral (into the intestine), gastroenteral, epidural (into the dura matter), oral (by way of the mouth), transdermal, peridural, intracerebral (into the cerebrum), intracerebroventricular (into the cerebral ventricles), epicutaneous (application onto the skin), intradermal, (into the skin itself), subcutaneous (under the skin), nasal administration (through the nose), intravenous (into a vein), intravenous bolus, intravenous drip, intraarterial (into an artery), intramuscular (into a muscle), intracardiac (into the heart), intraosseous infusion (into the bone marrow), intrathecal (into the spinal canal), intraperitoneal, (infusion or injection into the peritoneum), intravesical infusion, intravitreal, (through the eye), intracavernous injection (into a pathologic cavity) intracavitary (into the base of the penis), intravaginal administration, intrauterine, extra-amniotic administration, transdermal (diffusion through the intact skin for systemic distribution), transmucosal (diffusion through a mucous membrane), transvaginal, insufflation (snorting), sublingual, sublabial, enema, eye drops (onto the conjunctiva), in ear drops, auricular (in or by way of the ear), buccal (directed toward the cheek), conjunctival, cutaneous, dental (to a tooth or teeth), electro-osmosis, endocervical, endosinusial, endotracheal, extracorporeal, hemodialysis, infiltration, interstitial, intra-abdominal, intra-amniotic, intra-articular, intrabiliary, intrabronchial, intrabursal, intracartilaginous (within a cartilage), intracaudal (within the cauda equine), intracisternal (within the cisterna magna cerebellomedularis), intracorneal (within the cornea), dental intracornal, intracoronary (within the coronary arteries), intracorporus cavernosum (within the dilatable spaces of the corporus cavernosa of the penis), intradiscal (within a disc), intraductal (within a duct of a gland), intraduodenal (within the duodenum), intradural (within or beneath the dura), intraepidermal (to the epidermis), intraesophageal (to the esophagus), intragastric (within the stomach), intragingival (within the gingivae), intraileal (within the distal portion of the small intestine), intralesional (within or introduced directly to a localized lesion), intraluminal (within a lumen of a tube), intralymphatic (within the lymph), intramedullary (within the marrow cavity of a bone), intrameningeal (within the meninges), intramyocardial (within the myocardium), intraocular (within the eye), intraovarian (within the ovary), intrapericardial (within the pericardium), intrapleural (within the pleura), intraprostatic (within the prostate gland), intrapulmonary (within the lungs or its bronchi), intrasinal (within the nasal or periorbital sinuses), intraspinal (within the vertebral column), intrasynovial (within the synovial cavity of a joint), intratendinous (within a tendon), intratesticular (within the testicle), intrathecal (within the cerebrospinal fluid at any level of the cerebrospinal axis), intrathoracic (within the thorax), intratubular (within the tubules of an organ), intratumor (within a tumor), intratympanic (within the aurus media), intravascular (within a vessel or vessels), intraventricular (within a ventricle), iontophoresis (by means of electric current where ions of soluble salts migrate into the tissues of the body), irrigation (to bathe or flush open wounds or body cavities), laryngeal (directly upon the larynx), nasogastric (through the nose and into the stomach), occlusive dressing technique (topical route administration which is then covered by a dressing which occludes the area), ophthalmic (to the external eye), oropharyngeal (directly to the mouth and pharynx), parenteral, percutaneous, periarticular, peridural, perineural, periodontal, rectal, respiratory (within the respiratory tract by inhaling orally or nasally for local or systemic effect), retrobulbar (behind the pons or behind the eyeball), intramyocardial (entering the myocardium), soft tissue, subarachnoid, subconjunctival, submucosal, topical, transplacental (through or across the placenta), transtracheal (through the wall of the trachea), transtympanic (across or through the tympanic cavity), ureteral (to the ureter), urethral (to the urethra), vaginal, caudal block, diagnostic, nerve block, biliary perfusion, cardiac perfusion, photopheresis and spinal.

[0348] Modes of administration include injection, infusion, instillation, and/or ingestion. “Injection” includes, without limitation, intravenous, intramuscular, intra-arterial, intrathecal, intraventricular, intracapsular, intraorbital, intracardiac, intradermal, intraperitoneal, transtracheal, subcutaneous, subcuticular, intraarticular, sub capsular, subarachnoid, intraspinal, intracerebro spinal, and intrasternal injection and infusion. In some examples, the route is intravenous. For the delivery of cells, administration by injection or infusion can be made.

[0349] The cells can be administered systemically. The phrases “systemic administration,” “administered systemically”, “peripheral administration” and “administered peripherally” refer to the administration of a population of progenitor cells other than directly into a target site, tissue, or organ, such that it enters, instead, the subject's circulatory system and, thus, is subject to metabolism and other like processes.

[0350] The efficacy of a treatment comprising a composition for the treatment of Dyslipidemias can be determined by the skilled clinician. However, a treatment is considered “effective treatment,” if any one or all of the signs or symptoms of, as but one example, levels of ANGPTL3 are altered in a beneficial manner (e.g., decreased by at least 10%), or other clinically accepted symptoms or markers of disease are improved or ameliorated. Efficacy can also be measured by failure of an individual to worsen as assessed by hospitalization or need for medical interventions (e.g., progression of the disease is halted or at least slowed). Methods of measuring these indicators are known to those of skill in the art and/or described herein. Treatment includes any treatment of a disease in an individual or an animal (some non-limiting examples include a human, or a mammal) and includes: (1) inhibiting the disease, e.g., arresting, or slowing the progression of symptoms; or (2) relieving the disease, e.g., causing regression of symptoms; and (3) preventing or reducing the likelihood of the development of symptoms.

[0351] The treatment according to the present disclosure can ameliorate one or more symptoms associated with Dyslipidemias by decreasing or altering the amount of ANGPTL3 in the individual.

### V. Features and Properties of the Angiopoietin-Like 3 (Angptl3) Gene

[0352] ANGPTL3 has been associated with diseases and disorders such as, but not limited to, Arteriosclerosis, Atherosclerosis, Cardiovascular Diseases, Coronary heart disease, Diabetes, Diabetes Mellitus, Non-Insulin-Dependent Diabetes Mellitus, Fatty Liver, Hyperinsulinism, Hyperlipidemia, Hypertriglyceridemia, Hypobetalipoproteinemias, Inflammation, Insulin Resistance, Metabolic Diseases, Obesity, Malignant neoplasm of mouth, Lipid Metabolism Disorders, Lip and Oral Cavity Carcinoma, Dyslipidemias, Metabolic Syndrome X, Hypotriglyceridemia, Opitz trigonocephaly syndrome, Ischemic stroke, Hypertriglyceridemia result, Hypobetalipoproteinemia Familial 2, Familial hypobetalipoproteinemia, and Ischemic Cerebrovascular Accident. Editing the ANGPTL3 gene using any of the methods described herein may be used to treat, prevent and/or mitigate the symptoms of the diseases and disorders described herein.

[0353] The ANGPTL3 gene encodes the Angiopoietin-Like 3 protein, which is a determinant factor of high density lipoprotein (HDL) level in human. It positively correlates with plasma triglyceride and HDL cholesterol. The activity of ANGPTL3 is expressed predominantly in the liver. ANGPTL3 is associated with Dyslipidemias. Dyslipidemias is a genetic disease characterized by elevated level of lipids in the blood that contributes to the development of clogged arteries (atherosclerosis). These lipids include plasma cholesterol, triglycerides, or high-density lipoprotein. Dyslipidemia increases the risk of heart attacks, stroke, or other circulatory concerns. Current management includes lifestyle changes such as exercise and dietary modifications as well as use of lipid-lowering drugs such as statins. Non-statin lipid-lowering drugs include bile acid sequestrants, cholesterol absorption inhibitors, drugs for homozygous familial hypercholesteremia, fibrates, nicotinic acid, omega-3 fatty acids and/or combination products. Treatment options usually depend on the specific lipid abnormality, although different lipid abnormalities often coexist. Treatment of children is more challenging as dietary changes may be difficult to implement and lipid-lowering therapies have not been proven effective.

[0354] ANGPTL3 is also known to cause hypobetalipoproteinemia. Hypobetalipoproteinemia is an inherited disease (autosomal recessive) that affects between 1 in 1000 and 1 in 3000 people worldwide. Common symptoms of hypobetalipoproteinemia includes plasma levels of LDL cholesterol or apolipoprotein B below the 5th percentile which impairs the body's ability to absorb and transport fats and can lead to retinal degeneration, neuropathy, coagulopathy, or abnormal buildup of fats in the liver called hepatic steatosis. In severely affected patients, hepatic steatosis may progress to chronic liver disease (cirrhosis). Current treatment of hypobetalipoproteinemia includes severe restriction of long-chain fatty acids to 15 grams per day to improve fat absorption. In infants with hypobetalipoproteinemia, brief supplementation with medium-chain triglycerides may be effective but amount must be closely monitored to avoid liver toxicity. Another option for treating hypobetalipoproteinemia is administration high doses of vitamin E to prevent neurologic complications. Alternatively, vitamin A (10,000-25,000 IU/d) supplementation may be effective if an elevated prothrombin time suggests vitamin K depletion.

[0355] In one example, the target tissue for the compositions and methods described herein is liver tissue.

[0356] In one example, the gene is Angiopoietin-Like 3 (ANGPTL3) which may also be referred to as Angiopoietin 5, ANGPT5, ANG-5, Angiopoietin-Like Protein 3, Angiopoietin-5, FHBL2, and ANL3. ANGPTL3 has a cytogenetic location of 1p31.3 and the genomic coordinate are on Chromosome 1 on the forward strand at position 62,597,487-62,606,159. The nucleotide sequence of ANGPTL3 is shown as SEQ ID NO: 5303. USP1 is the gene upstream of ANGPTL3 on the forward strand and ATG4C is the gene downstream of ANGPTL3 on the forward strand. DOCK7 is the genes located on the reverse strand opposite of ANGPTL3. ANGPTL3 has a NCBI gene ID of 27329, Uniprot ID of Q9Y5C1 and Ensembl Gene ID of ENSG00000132855. ANGPTL3 has 2 SNPs, 9 introns and 12 exons. The exon identifier from Ensembl and the start/stop sites of the introns and exons are shown in Table 3.

TABLE 3
Introns and Exons for ANGPTL3

| Exon | | | Intron | | |
|---|---|---|---|---|---|
| No. | Exon ID | Start/Stop | No. | Intron based on Exon ID | Start/Stop |
| EX1 | ENSE00001454409 | 62,597,487-62,598,061 | INT1 | Intron ENSE00001454409- | 62,598,062-62,598,695 |
| | | | | ENSE00000773251 | |
| EX2 | ENSE00000773251 | 62,598,696-62,598,806 | INT2 | Intron ENSE00000773251- | 62,598,807-62,601,081 |
| | | | | ENSE00000773252 | |
| EX3 | ENSE00000773252 | 62,601,082-62,601,196 | INT3 | Intron ENSE00000773252- | 62,601,197-62,601,768 |
| | | | | ENSE00003627854 | |
| EX4 | ENSE00003627854 | 62,601,769-62,601,882 | INT4 | Intron ENSE00003627854- | 62,601,883-62,602,284 |
| | | | | ENSE00003523493 | |
| EX5 | ENSE00003523493 | 62,602,285-62,602,380 | INT5 | Intron ENSE00003523493- | 62,602,381-62,603,968 |
| | | | | ENSE00000773255 | |
| EX6 | ENSE00000773255 | 62,603,969-62,604,235 | INT6 | Intron ENSE00000773255- | 62,604,236-62,604,632 |
| | | | | ENSE00001454405 | |
| EX7 | ENSE00001454405 | 62,604,633-62,606,159 | INT7 | Intron ENSE00001954304- | 62,602,381-62,603,968 |
| | | | | ENSE00001890600 | |
| EX8 | ENSE00001954304 | 62,602,320-62,602,380 | INT8 | Intron ENSE00001850933- | 62,601,197-62,601,768 |
| | | | | ENSE00003630231 | |
| EX9 | ENSE00001890600 | 62,603,969-62,604,658 | INT9 | Intron ENSE00003630231- | 62,601,883-62,602,284 |
| | | | | ENSE00003553785 | |
| EX10 | ENSE00001850933 | 62,601,034-62,601,196 | | | |
| EX11 | ENSE00003630231 | 62,601,769-62,601,882 | | | |
| EX12 | ENSE00003553785 | 62,602,285-62,602,380 | | | |

[0357] Table 4 provides information on all of the transcripts for the ANGPTL3 gene based on the Ensembl database. Provided in Table 4 are the transcript ID from Ensembl and corresponding NCBI RefSeq ID for the transcript, the translation ID from Ensembl and the corresponding NCBI RefSeq ID for the protein, the biotype of the transcript sequence as classified by Ensembl and the exons and introns in the transcript based on the information in Table 3.

TABLE 4
Transcript Information for ANGPTL3

| | Transcript | | Protein | | Exon ID | Intron ID |
|---|---|---|---|---|---|---|
| | NCBI | | NCBI | Sequence | from | from |
| Transcript ID | RefSeq ID | Translation ID | RefSeq ID | Biotype | Table 3 | Table 3 |
| ENST00000493994.1 | — | — | — | Processed | EX8, EX9 | INT7 |
| | | | | transcript | | |
| ENST00000482591.1 | — | — | — | Processed | EX10, EX11, | INT8, INT9 |
| | | | | transcript | EX12 | |
| ENST00000371129.3 | NM_014495 | ENSP00000360170 | NP_055310 | Protein | EX1, EX2, | INT1, INT2, |
| | | | | coding | EX3, EX4, | INT3, INT4, |
| | | | | | EX5, EX6, | INT5, INT6 |
| | | | | | EX7 | |

[0358] In one example, the guide RNA used in the disclosure may comprise at least one 20 nucleotide (nt) target nucleic acid sequence listed in Table 5. Provided in Table 5 are the gene symbol and the sequence identifier of the gene (Gene SEQ ID NO), the gene sequence including 1-5 kilobase pairs upstream and/or downstream of the target gene (Extended Gene SEQ ID NO), and the 20 nt target nucleic acid sequence (20 nt Target Sequence SEQ ID NO). In the sequence listing the respective target gene, the strand for targeting the gene (noted by a (+) strand or (−) strand in the sequence listing), the associated PAM type and the PAM sequence are described for each of the 20 nt target nucleic acid sequences (SEQ ID NO: 5305-17018). It is understood in the art that the spacer sequence, where “T” is “U,” may be an RNA sequence corresponding to the 20 nt sequences listed in Table 5.

TABLE 5
Nucleic Acid Sequences

| | | | 20 nt Target |
|---|---|---|---|
| | | Extended Gene | Sequence |
| Gene Symbol | Gene SEQ ID NO | SEQ ID NO | SEQ ID NO |
| ANGPTL3 | 5303 | 5304 | 5305-17018 |

[0359] In one example, the guide RNA used in the disclosure may comprise at least one spacer sequence that, where “T” is “U”, may be an RNA sequence corresponding to a 20 nucleotide (nt) target sequence such as, but not limited to, any of SEQ ID NO: 5305-17018.

[0360] In one example, the guide RNA used in the disclosure may comprise at least one spacer sequence which, where “T” is “U,” is an RNA sequence corresponding to the 20 nt sequences such as, but not limited to, any of SEQ ID NO: 5305-17018.

[0361] In one example, a guide RNA may comprise a 20 nucleotide (nt) target nucleic acid sequence associated with the PAM type such as, but not limited to, NAAAAC, NNAGAAW, NNGRRT, NNNNGHTT, NRG, or YTN. As a non-limiting example, the 20 nt target nucleic acid sequence for a specific target gene and a specific PAM type may be, where “T” is “U,” the RNA sequence corresponding to any one of the 20 nt nucleic acid sequences in Table 6.

TABLE 6
Nucleic Acid Sequences by PAM Type

| | PAM: | PAM: | PAM: | PAM: | PAM: | PAM: |
|---|---|---|---|---|---|---|
| | NAAAAC | NNAGAAW | NNGRRT | NNNNGHTT | NRG | YTN |
| | 20 nt | 20 nt | 20 nt | 20 nt | 20 nt | 20 nt |
| | Target | Target | Target | Target | Target | Target |
| | Nucleic | Nucleic | Nucleic | Nucleic | Nucleic | Nucleic |
| Gene | Acid SEQ | Acid SEQ | Acid SEQ | Acid SEQ | Acid SEQ | Acid SEQ |
| Symbol | ID NO | ID NO | ID NO | ID NO | ID NO | ID NO |
| ANGPTL3 | 5305-5398 | 5399-5595 | 5596-6079 | 6080-6633 | 6634-10171 | 10172-17018 |

[0362] In one example, a guide RNA may comprise a 22 nucleotide (nt) target nucleic acid sequence associated with the YTN PAM type. As a non-limiting example, the 22 nt target nucleic acid sequence for a specific target gene may comprise a 20 nt core sequence where the 20 nt core sequence, where “T” is “U,” may be the RNA sequence corresponding to SEQ ID NO: 10172-17018. As another non-limiting example, the 22 nt target nucleic acid sequence for a specific target gene may comprise a core sequence where the core sequence, where “T” is “U,” may be a fragment, segment or region of the RNA sequence corresponding to any of SEQ ID NO: 10172-17018.

### VI. Other Therapeutic Approaches

[0363] Gene editing can be conducted using nucleases engineered to target specific sequences. To date there are four major types of nucleases: meganucleases and their derivatives, zinc finger nucleases (ZFNs), transcription activator like effector nucleases (TALENs), and CRISPR-Cas9 nuclease systems. The nuclease platforms vary in difficulty of design, targeting density and mode of action, particularly as the specificity of ZFNs and TALENs is through protein-DNA interactions, while RNA-DNA interactions primarily guide Cas9.

[0364] CRISPR endonucleases, such as Cas9, can be used in the methods of the present disclosure. However, the teachings described herein, such as therapeutic target sites, could be applied to other forms of endonucleases, such as ZFNs, TALENs, HEs, or MegaTALs, or using combinations of nucleases. However, in order to apply the teachings of the present disclosure to such endonucleases, one would need to, among other things, engineer proteins directed to the specific target sites.

[0365] Additional binding domains can be fused to the Cas9 protein to increase specificity. The target sites of these constructs would map to the identified gRNA specified site, but would require additional binding motifs, such as for a zinc finger domain. In the case of Mega-TAL, a meganuclease can be fused to a TALE DNA-binding domain. The meganuclease domain can increase specificity and provide the cleavage. Similarly, inactivated or dead Cas9 (dCas9) can be fused to a cleavage domain and require the sgRNA/Cas9 target site and adjacent binding site for the fused DNA-binding domain. This likely would require some protein engineering of the dCas9, in addition to the catalytic inactivation, to decrease binding without the additional binding site.

### Zinc Finger Nucleases

[0366] Zinc finger nucleases (ZFNs) are modular proteins comprised of an engineered zinc finger DNA binding domain linked to the catalytic domain of the type II endonuclease FokI. Because FokI functions only as a dimer, a pair of ZFNs must be engineered to bind to cognate target “half-site” sequences on opposite DNA strands and with precise spacing between them to enable the catalytically active FokI dimer to form. Upon dimerization of the FokI domain, which itself has no sequence specificity per se, a DNA double-strand break is generated between the ZFN half-sites as the initiating step in genome editing.

[0367] The DNA binding domain of each ZFN is typically comprised of 3-6 zinc fingers of the abundant Cys2-His2 architecture, with each finger primarily recognizing a triplet of nucleotides on one strand of the target DNA sequence, although cross-strand interaction with a fourth nucleotide also can be important. Alteration of the amino acids of a finger in positions that make key contacts with the DNA alters the sequence specificity of a given finger. Thus, a four-finger zinc finger protein will selectively recognize a 12 bp target sequence, where the target sequence is a composite of the triplet preferences contributed by each finger, although triplet preference can be influenced to varying degrees by neighboring fingers. An important aspect of ZFNs is that they can be readily re-targeted to almost any genomic address simply by modifying individual fingers, although considerable expertise is required to do this well. In most applications of ZFNs, proteins of 4-6 fingers are used, recognizing 12-18 bp respectively. Hence, a pair of ZFNs will typically recognize a combined target sequence of 24-36 bp, not including the typical 5-7 bp spacer between half-sites. The binding sites can be separated further with larger spacers, including 15-17 bp. A target sequence of this length is likely to be unique in the human genome, assuming repetitive sequences or gene homologs are excluded during the design process. Nevertheless, the ZFN protein-DNA interactions are not absolute in their specificity so off-target binding and cleavage events do occur, either as a heterodimer between the two ZFNs, or as a homodimer of one or the other of the ZFNs. The latter possibility has been effectively eliminated by engineering the dimerization interface of the FokI domain to create “plus” and “minus” variants, also known as obligate heterodimer variants, which can only dimerize with each other, and not with themselves. Forcing the obligate heterodimer prevents formation of the homodimer. This has greatly enhanced specificity of ZFNs, as well as any other nuclease that adopts these FokI variants.

[0368] A variety of ZFN-based systems have been described in the art, modifications thereof are regularly reported, and numerous references describe rules and parameters that are used to guide the design of ZFNs; see, e.g., Segal et al., Proc Natl Acad Sci USA 96(6):2758-63 (1999); Dreier B et al., J Mol Biol. 303(4):489-502 (2000); Liu Q et al., J Biol Chem. 277(6):3850-6 (2002); Dreier et al., J Biol Chem 280(42):35588-97 (2005); and Dreier et al., J Biol Chem. 276(31):29466-78 (2001).

### Transcription Activator-Like Effector Nucleases (TALENs)

[0369] TALENs represent another format of modular nucleases whereby, as with ZFNs, an engineered DNA binding domain is linked to the FokI nuclease domain, and a pair of TALENs operate in tandem to achieve targeted DNA cleavage. The major difference from ZFNs is the nature of the DNA binding domain and the associated target DNA sequence recognition properties. The TALEN DNA binding domain derives from TALE proteins, which were originally described in the plant bacterial pathogen Xanthomonas sp. TALEs are comprised of tandem arrays of 33-35 amino acid repeats, with each repeat recognizing a single basepair in the target DNA sequence that is typically up to 20 bp in length, giving a total target sequence length of up to 40 bp. Nucleotide specificity of each repeat is determined by the repeat variable diresidue (RVD), which includes just two amino acids at positions 12 and 13. The bases guanine, adenine, cytosine and thymine are predominantly recognized by the four RVDs: Asn-Asn, Asn-Ile, His-Asp and Asn-Gly, respectively. This constitutes a much simpler recognition code than for zinc fingers, and thus represents an advantage over the latter for nuclease design. Nevertheless, as with ZFNs, the protein-DNA interactions of TALENs are not absolute in their specificity, and TALENs have also benefitted from the use of obligate heterodimer variants of the FokI domain to reduce off-target activity.

[0370] Additional variants of the FokI domain have been created that are deactivated in their catalytic function. If one half of either a TALEN or a ZFN pair contains an inactive FokI domain, then only single-strand DNA cleavage (nicking) will occur at the target site, rather than a DSB. The outcome is comparable to the use of CRISPR/Cas9 or CRISPR/Cpf1 “nickase” mutants in which one of the Cas9 cleavage domains has been deactivated. DNA nicks can be used to drive genome editing by HDR, but at lower efficiency than with a DSB. The main benefit is that off-target nicks are quickly and accurately repaired, unlike the DSB, which is prone to NHEJ-mediated mis-repair.

[0371] A variety of TALEN-based systems have been described in the art, and modifications thereof are regularly reported; see, e.g., Boch, Science 326(5959):1509-12 (2009); Mak et al., Science 335(6069):716-9 (2012); and Moscou et al., Science 326(5959):1501 (2009). The use of TALENs based on the “Golden Gate” platform, or cloning scheme, has been described by multiple groups; see, e.g., Cermak et al., Nucleic Acids Res. 39(12):e82 (2011); Li et al., Nucleic Acids Res. 39(14):6315-25(2011); Weber et al., PLoS One. 6(2):e16765 (2011); Wang et al., J Genet Genomics 41(6):339-47, Epub 2014 May 17 (2014); and Cermak T et al., Methods Mol Biol. 1239:133-59 (2015).

### Homing Endonucleases

[0372] Homing endonucleases (HEs) are sequence-specific endonucleases that have long recognition sequences (14-44 base pairs) and cleave DNA with high specificity—often at sites unique in the genome. There are at least six known families of HEs as classified by their structure, including GIY-YIG, His-Cis box, H—N—H, PD-(D/E)xK, and Vsr-like that are derived from a broad range of hosts, including eukarya, protists, bacteria, archaea, cyanobacteria and phage. As with ZFNs and TALENs, HEs can be used to create a DSB at a target locus as the initial step in genome editing. In addition, some natural and engineered HEs cut only a single strand of DNA, thereby functioning as site-specific nickases. The large target sequence of HEs and the specificity that they offer have made them attractive candidates to create site-specific DSBs.

[0373] A variety of HE-based systems have been described in the art, and modifications thereof are regularly reported; see, e.g., the reviews by Steentoft et al., Glycobiology 24(8):663-80 (2014); Belfort and Bonocora, Methods Mol Biol. 1123:1-26 (2014); Hafez and Hausner, Genome 55(8):553-69 (2012); and references cited therein.

### MegaTAL/Tev-mTALEN/MegaTev

[0374] As further examples of hybrid nucleases, the MegaTAL platform and Tev-mTALEN platform use a fusion of TALE DNA binding domains and catalytically active HEs, taking advantage of both the tunable DNA binding and specificity of the TALE, as well as the cleavage sequence specificity of the HE; see, e.g., Boissel et al., NAR 42: 2591-2601 (2014); Kleinstiver et al., G3 4:1155-65 (2014); and Boissel and Scharenberg, Methods Mol. Biol. 1239: 171-96 (2015).

[0375] In a further variation, the MegaTev architecture is the fusion of a meganuclease (Mega) with the nuclease domain derived from the GIY-YIG homing endonuclease I-TevI (Tev). The two active sites are positioned ˜30 bp apart on a DNA substrate and generate two DSBs with non-compatible cohesive ends; see, e.g., Wolfs et al., NAR 42, 8816-29 (2014). It is anticipated that other combinations of existing nuclease-based approaches will evolve and be useful in achieving the targeted genome modifications described herein.

dCas9-FokI or dCpf1-Fok1 and Other Nucleases

[0376] Combining the structural and functional properties of the nuclease platforms described above offers a further approach to genome editing that can potentially overcome some of the inherent deficiencies. As an example, the CRISPR genome editing system typically uses a single Cas9 endonuclease to create a DSB. The specificity of targeting is driven by a 20 or 24 nucleotide sequence in the guide RNA that undergoes Watson-Crick base-pairing with the target DNA (plus an additional 2 bases in the adjacent NAG or NGG PAM sequence in the case of Cas9 from S. pyogenes). Such a sequence is long enough to be unique in the human genome, however, the specificity of the RNA/DNA interaction is not absolute, with significant promiscuity sometimes tolerated, particularly in the 5′ half of the target sequence, effectively reducing the number of bases that drive specificity. One solution to this has been to completely deactivate the Cas9 or Cpf1 catalytic function—retaining only the RNA-guided DNA binding function—and instead fusing a FokI domain to the deactivated Cas9; see, e.g., Tsai et al., Nature Biotech 32: 569-76 (2014); and Guilinger et al., Nature Biotech. 32: 577-82 (2014). Because FokI must dimerize to become catalytically active, two guide RNAs are required to tether two FokI fusions in close proximity to form the dimer and cleave DNA. This essentially doubles the number of bases in the combined target sites, thereby increasing the stringency of targeting by CRISPR-based systems.

[0377] As further example, fusion of the TALE DNA binding domain to a catalytically active HE, such as I-TevI, takes advantage of both the tunable DNA binding and specificity of the TALE, as well as the cleavage sequence specificity of I-TevI, with the expectation that off-target cleavage can be further reduced.

### VII. Kits

[0378] The present disclosure provides kits for carrying out the methods described herein. A kit can include one or more of a genome-targeting nucleic acid, a polynucleotide encoding a genome-targeting nucleic acid, a site-directed polypeptide, a polynucleotide encoding a site-directed polypeptide, and/or any nucleic acid or proteinaceous molecule necessary to carry out the aspects of the methods described herein, or any combination thereof.

[0379] A kit can comprise: (1) a vector comprising a nucleotide sequence encoding a genome-targeting nucleic acid, (2) the site-directed polypeptide or a vector comprising a nucleotide sequence encoding the site-directed polypeptide, and (3) a reagent for reconstitution and/or dilution of the vector(s) and or polypeptide.

[0380] A kit can comprise: (1) a vector comprising (i) a nucleotide sequence encoding a genome-targeting nucleic acid, and (ii) a nucleotide sequence encoding the site-directed polypeptide; and (2) a reagent for reconstitution and/or dilution of the vector.

[0381] In any of the above kits, the kit can comprise a single-molecule guide genome-targeting nucleic acid. In any of the above kits, the kit can comprise a double-molecule genome-targeting nucleic acid. In any of the above kits, the kit can comprise two or more double-molecule guides or single-molecule guides. The kits can comprise a vector that encodes the nucleic acid targeting nucleic acid.

[0382] In any of the above kits, the kit can further comprise a polynucleotide to be inserted to effect the desired genetic modification.

[0383] Components of a kit can be in separate containers, or combined in a single container.

[0384] Any kit described above can further comprise one or more additional reagents, where such additional reagents are selected from a buffer, a buffer for introducing a polypeptide or polynucleotide into a cell, a wash buffer, a control reagent, a control vector, a control RNA polynucleotide, a reagent for in vitro production of the polypeptide from DNA, adaptors for sequencing and the like. A buffer can be a stabilization buffer, a reconstituting buffer, a diluting buffer, or the like. A kit can also comprise one or more components that can be used to facilitate or enhance the on-target binding or the cleavage of DNA by the endonuclease, or improve the specificity of targeting.

[0385] In addition to the above-mentioned components, a kit can further comprise instructions for using the components of the kit to practice the methods. The instructions for practicing the methods can be recorded on a suitable recording medium. For example, the instructions can be printed on a substrate, such as paper or plastic, etc. The instructions can be present in the kits as a package insert, in the labeling of the container of the kit or components thereof (i.e., associated with the packaging or subpackaging), etc. The instructions can be present as an electronic storage data file present on a suitable computer readable storage medium, e.g. CD-ROM, diskette, flash drive, etc. In some instances, the actual instructions are not present in the kit, but means for obtaining the instructions from a remote source (e.g. via the Internet), can be provided. An example of this case is a kit that comprises a web address where the instructions can be viewed and/or from which the instructions can be downloaded. As with the instructions, this means for obtaining the instructions can be recorded on a suitable substrate.

### VIII. Specific Methods and Compositions

[0386] Accordingly, the present disclosure relates in particular to the following non-limiting methods according to the disclosure: In a first method, Method 1, the present disclosure provides a method for editing an Angiopoietin-like 3 (ANGPTL3) gene in a cell by genome editing comprising the step of introducing into the cell one or more deoxyribonucleic acid (DNA) endonucleases to effect one or more single-strand breaks (SSBs) or double-strand breaks (DSBs) within or near the ANGPTL3 gene or ANGPTL3 regulatory elements that results in one or more permanent insertions, deletions or mutations of at least one nucleotide within or near the ANGPTL3 gene, thereby reducing or eliminating the expression or function of ANGPTL3 gene products.

[0387] In another method, Method 2, the present disclosure provides an ex vivo method for treating a patient having an ANGPTL3 related condition or disorder comprising the steps of: isolating a hepatocyte from a patient; editing within or near an ANGPTL3 gene or other DNA sequences that encode regulatory elements of the ANGPTL3 gene of the hepatocyte; and implanting the genome-edited hepatocyte into the patient.

[0388] In another method, Method 3, the present disclosure provides the method of Method 2, wherein the editing step comprises introducing into the hepatocyte one or more deoxyribonucleic acid (DNA) endonucleases to effect one or more single-strand breaks (SSBs) or double-strand breaks (DSBs) within or near the ANGPTL3 gene or ANGPTL3 regulatory elements that results in one or more permanent insertions, deletions or mutations of at least one nucleotide within or near the ANGPTL3 gene, thereby reducing or eliminating the expression or function of ANGPTL3 gene products.

[0389] In another method, Method 4, the present disclosure provides an ex vivo method for treating a patient having an ANGPTL3 related condition or disorder comprising the steps of: creating a patient specific induced pluripotent stem cell (iPSC); editing within or near an ANGPTL3 gene or other DNA sequences that encode regulatory elements of the ANGPTL3 gene of the iPSC; differentiating the genome-edited iPSC into a hepatocyte; and implanting the hepatocyte into the patient.

[0390] In another method, Method 5, the present disclosure provides the method of Method 4, wherein the editing step comprises introducing into the iPSC one or more deoxyribonucleic acid (DNA) endonucleases to effect one or more single-strand breaks (SSBs) or double-strand breaks (DSBs) within or near the ANGPTL3 gene or ANGPTL3 regulatory elements that results in one or more permanent insertions, deletions or mutations of at least one nucleotide within or near the ANGPTL3 gene, thereby reducing or eliminating the expression or function of ANGPTL3 gene products.

[0391] In another method, Method 6, the present disclosure provides an ex vivo method for treating a patient having an ANGPTL3 related condition or disorder comprising the steps of: isolating a mesenchymal stem cell from the patient; editing within or near an ANGPTL3 gene or other DNA sequences that encode regulatory elements of the ANGPTL3 gene of the mesenchymal stem cell; differentiating the genome-edited mesenchymal stem cell into a hepatocyte; and implanting the hepatocyte into the patient.

[0392] In another method, Method 7, the present disclosure provides the method of Method 6, wherein the editing step comprises introducing into the mesenchymal stem cell one or more deoxyribonucleic acid (DNA) endonucleases to effect one or more single-strand breaks (SSBs) or double-strand breaks (DSBs) within or near the ANGPTL3 gene or ANGPTL3 regulatory elements that results in one or more permanent insertions, deletions or mutations of at least one nucleotide within or near the ANGPTL3 gene, thereby reducing or eliminating the expression or function of ANGPTL3 gene products.

[0393] In another method, Method 8, the present disclosure provides an in vivo method for treating a patient with an ANGPTL3 related disorder comprising the step of editing the ANGPTL3 gene in a cell of the patient.

[0394] In another method, Method 9, the present disclosure provides the method of Method 8, wherein the editing step comprises introducing into the cell one or more deoxyribonucleic acid (DNA) endonucleases to effect one or more single-strand breaks (SSBs) or double-strand breaks (DSBs) within or near the ANGPTL3 gene or ANGPTL3 regulatory elements that results in one or more permanent insertions, deletions or mutations of at least one nucleotide within or near the ANGPTL3 gene, thereby reducing or eliminating the expression or function of ANGPTL3 gene products.

[0395] In another method, Method 10, the present disclosure provides the method of any one of Methods 8-9, wherein the cell is a hepatocyte.

[0396] In another method, Method 11, the present disclosure provides the method of Method 10, wherein the one or more deoxyribonucleic acid (DNA) endonuclease is delivered to the hepatocyte by local injection, systemic infusion, or combinations thereof.

[0397] In another method, Method 12, the present disclosure provides a method of altering the contiguous genomic sequence of an ANGPTL3 gene in a cell comprising contacting the cell with one or more deoxyribonucleic acid (DNA) endonuclease to effect one or more single-strand breaks (SSBs) or double-strand breaks (DSBs).

[0398] In another method, Method 13, the present disclosure provides the method of Method 12, wherein the alteration of the contiguous genomic sequence occurs in one or more exons of the ANGPTL3 gene.

[0399] In another method, Method 14, the present disclosure provides the method of any one of Methods 1-13, wherein the one or more deoxyribonucleic acid (DNA) endonuclease is selected from any of those listed in SEQ ID NOs: 1-620, and variants having at least 70% homology to any of those listed in SEQ ID NOs: 1-620.

[0400] In another method, Method 15, the present disclosure provides the method of Method 14, wherein the one or more deoxyribonucleic acid (DNA) endonuclease is one or more protein or polypeptide.

[0401] In another method, Method 16, the present disclosure provides the method of Method 14, wherein the one or more deoxyribonucleic acid (DNA) endonuclease is one or more polynucleotide encoding the one or more DNA endonuclease.

[0402] In another method, Method 17, the present disclosure provides the method of Method 16, wherein the one or more deoxyribonucleic acid (DNA) endonuclease is one or more ribonucleic acid (RNA) encoding the one or more DNA endonuclease.

[0403] In another method, Method 18, the present disclosure provides the method of Method 17, wherein the one or more ribonucleic acid (RNA) is one or more chemically modified RNA.

[0404] In another method, Method 19, the present disclosure provides the method of Method 18, wherein the one or more ribonucleic acid (RNA) is chemically modified in the coding region.

[0405] In another method, Method 20, the present disclosure provides the method of any one of Methods 16-19, wherein the one or more polynucleotide or one or more ribonucleic acid (RNA) is codon optimized.

[0406] In another method, Method 21, the present disclosure provides the method of any one of Methods 1-20, wherein the method further comprises introducing into the cell one or more gRNAs or one or more sgRNAs.

[0407] In another method, Method 22, the present disclosure provides the method of Method 21, wherein the one or more gRNAs or one or more sgRNAs comprises a spacer sequence that is complementary to a segment of the coding sequence of the ANGPTL3 gene.

[0408] In another method, Method 23, the present disclosure provides the method of Method 21, wherein the one or more gRNAs or one or more sgRNAs comprises a spacer sequence that is complementary to a sequence flanking the ANGPTL3 gene or other sequence that encodes a regulatory element of the ANGPTL3 gene.

[0409] In another method, Method 24, the present disclosure provides the method of any of the Methods 21-23, wherein the one or more gRNAs or one or more sgRNAs is chemically modified.

[0410] In another method, Method 25, the present disclosure provides the method of any one of Methods 21-24, wherein the one or more gRNAs or one or more sgRNAs is pre-complexed with the one or more deoxyribonucleic acid (DNA) endonuclease.

[0411] In another method, Method 26, the present disclosure provides the method of Method 25, wherein the pre-complexing involves a covalent attachment of the one or more gRNAs or one or more sgRNAs to the one or more deoxyribonucleic acid (DNA) endonuclease.

[0412] In another method, Method 27, the present disclosure provides the method of any one of Methods 14-26, wherein the one or more deoxyribonucleic acid (DNA) endonuclease is formulated in a liposome or lipid nanoparticle.

[0413] In another method, Method 28, the present disclosure provides the method of any one of Methods 21-27, wherein the one or more deoxyribonucleic acid (DNA) endonuclease is formulated in a liposome or lipid nanoparticle which also comprises the one or more gRNAs or one or more sgRNAs.

[0414] In another method, Method 29, the present disclosure provides the method of any one of Methods 12, or 21-23, wherein the one or more deoxyribonucleic acid (DNA) endonuclease is encoded in an AAV vector particle, where the AAV vector serotype is selected from those listed in SEQ ID NOs: 4,734-5,302 and in Table 2.

[0415] In another method, Method 30, the present disclosure provides the method of any of the Methods 21-23, wherein the one or more gRNAs or one or more sgRNAs is encoded in an AAV vector particle, where the AAV vector serotype is selected from those listed in SEQ ID NOs: 4,734-5,302 and in Table 2.

[0416] In another method, Method 31, the present disclosure provides the method of any of the Methods 21-23, wherein the one or more deoxyribonucleic acid (DNA) endonuclease is encoded in an AAV vector particle which also encodes the one or more gRNAs or one or more sgRNAs, where the AAV vector serotype is selected from those listed in SEQ ID NOs: 4,734-5,302 and in Table 2.

[0417] The present disclosure also provides a composition, Composition 1, comprising a single-molecule guide RNA comprising at least a spacer sequence that is an RNA sequence corresponding to any of SEQ ID NOs: 5305-17018.

[0418] In another composition, Composition 2, the present disclosure provides the single-molecule guide RNA of Composition 1, wherein the single-molecule guide RNA further comprises a spacer extension region.

[0419] In another composition, Composition 3, the present disclosure provides the single-molecule guide RNA of Composition 1, wherein the single-molecule guide RNA further comprises a tracrRNA extension region.

[0420] In another composition, Composition 4, the present disclosure provides the single-molecule guide RNA of Compositions 1-3, wherein the single-molecule guide RNA is chemically modified.

[0421] In another composition, Composition 5, the present disclosure provides the single-molecule guide RNA of Compositions 1-4, wherein the single-molecule guide RNA is pre-complexed with a DNA endonuclease.

[0422] In another composition, Composition 6, the present disclosure provides single-molecule guide RNA of Composition 5, wherein the DNA endonuclease is a Cas9 or Cpf1 endonuclease.

[0423] In another composition, Composition 7, the present disclosure provides the single-molecule guide RNA of Composition 6, wherein the Cas9 or Cpf1 endonuclease is selected from S. pyogenes Cas9, S. aureus Cas9, N. meningitides Cas9, S. thermophilus CRISPR1 Cas9, S. thermophilus CRISPR 3 Cas9, T. denticola Cas9, L. bacterium ND2006 Cpf1 and Acidaminococcus sp. BV3L6 Cpf1, and variants having at least 70% homology to these enzymes.

[0424] In another composition, Composition 8, the present disclosure provides the single-molecule guide RNA of Composition 7, wherein the Cas9 or Cpf1 enzyme comprises one or more nuclear localization signals (NLSs).

[0425] In another composition, Composition 9, the present disclosure provides the single-molecule guide RNA of Composition 8, wherein at least one NLS is at or within 50 amino acids of the amino-terminus of the Cas9 or Cpf1 endonuclease and/or at least one NLS is at or within 50 amino acids of the carboxy-terminus of the Cas9 or Cpf1 endonuclease.

[0426] In another composition, Composition 10, the present disclosure provides the single-molecule guide RNA of Composition 9, wherein the Cas9 or Cpf1 endonuclease is codon optimized for expression in a eukaryotic cell.

[0427] In another composition, Composition 11, the present disclosure provides a DNA encoding the single-molecule guide RNA of Compositions 1-3.

[0428] In another composition, Composition 12, the present disclosure provides a DNA encoding the CRISPR/Cas system of Compositions 8-10.

[0429] In another composition, Composition 13, the present disclosure provides a vector comprising the DNA of Compositions 11 or 12.

[0430] In another composition, Composition 14, the present disclosure provides the vector of Composition 13, wherein the vector is a plasmid.

[0431] In another composition, Composition 15, the present disclosure provides the vector of Composition 13, wherein the vector is an AAV vector particle, and the AAV vector serotype is selected from those listed in SEQ ID NOs: 4,734-5,302 and in Table 2.

### IX. Definitions

[0432] The term “comprising” or “comprises” is used in reference to compositions, methods, and respective component(s) thereof, that are essential to the invention, yet open to the inclusion of unspecified elements, whether essential or not.

[0433] The term “consisting essentially of” refers to those elements required for a given aspect. The term permits the presence of additional elements that do not materially affect the basic and novel or functional characteristic(s) of that aspect of the invention.

[0434] The term “consisting of” refers to compositions, methods, and respective components thereof as described herein, which are exclusive of any element not recited in that description of the aspect.

[0435] The singular forms “a,” “an,” and “the” include plural references, unless the context clearly dictates otherwise.

[0436] Certain numerical values presented herein are preceded by the term “about.” The term “about” means numerical values within ±10% of the recited numerical value.

[0437] When a range of numerical values is presented herein, it is contemplated that each intervening value between the lower and upper limit of the range, the values that are the upper and lower limits of the range, and all stated values with the range are encompassed within the disclosure. All the possible sub-ranges within the lower and upper limits of the range are also contemplated by the disclosure.

[0438] The details of one or more embodiments of the invention are set forth in the accompanying description below. Although any materials and methods similar or equivalent to those described herein can be used in the practice or testing of the present disclosure, the preferred materials and methods are now described. Other features, objects and advantages of the invention will be apparent from the description. In the description, the singular forms also include the plural unless the context clearly dictates otherwise. Unless defined otherwise, all technical and scientific terms used herein have the same meaning as commonly understood by one of ordinary skill in the art to which this invention belongs. In the case of conflict, the present description will control.

[0439] Any numerical range recited in this specification describes all sub-ranges of the same numerical precision (i.e., having the same number of specified digits) subsumed within the recited range. For example, a recited range of “1.0 to 10.0” describes all sub-ranges between (and including) the recited minimum value of 1.0 and the recited maximum value of 10.0, such as, for example, “2.4 to 7.6,” even if the range of “2.4 to 7.6” is not expressly recited in the text of the specification. Accordingly, the Applicant reserves the right to amend this specification, including the claims, to expressly recite any sub-range of the same numerical precision subsumed within the ranges expressly recited in this specification. All such ranges are inherently described in this specification such that amending to expressly recite any such sub-ranges will comply with written description, sufficiency of description, and added matter requirements, including the requirements under 35 U.S.C. § 112(a) and Article 123(2) EPC. Also, unless expressly specified or otherwise required by context, all numerical parameters described in this specification (such as those expressing values, ranges, amounts, percentages, and the like) may be read as if prefaced by the word “about,” even if the word “about” does not expressly appear before a number. Additionally, numerical parameters described in this specification should be construed in light of the number of reported significant digits, numerical precision, and by applying ordinary rounding techniques. It is also understood that numerical parameters described in this specification will necessarily possess the inherent variability characteristic of the underlying measurement techniques used to determine the numerical value of the parameter.

[0440] The details of one or more aspects of the present disclosure are set forth in the accompanying description below. Although any materials and methods similar or equivalent to those described herein can be used in the practice or testing of the present disclosure, the preferred materials and methods are now described. Other features, objects and advantages of the disclosure will be apparent from the description. In the description, the singular forms also include the plural unless the context clearly dictates otherwise. Unless defined otherwise, all technical and scientific terms used herein have the same meaning as commonly understood by one of ordinary skill in the art to which this disclosure belongs. In the case of conflict, the present description will control.

[0441] The present invention is further illustrated by the following non-limiting examples.

### X. Examples

[0442] The invention will be more fully understood by reference to the following examples, which provide illustrative non-limiting aspects of the disclosure.

[0443] The examples describe the use of the CRISPR system as an illustrative genome editing technique to create defined therapeutic genomic deletions, insertions, or replacements, termed “genomic modifications” herein, in the ANGPTL3 gene that lead to permanent deletion or mutation of the ANGPLT3 gene, that reduce or eliminate the ANGPTL3 protein activity. Introduction of the defined therapeutic modifications represents a novel therapeutic strategy for the potential amelioration of Dyslipidemias, as described and illustrated herein.

### Example 1—CRISPR/SpCas9 Target Sites for the ANGPTL3 Gene

[0444] Regions of the ANGPTL3 gene are scanned for target sites. Each area is scanned for a protospacer adjacent motif (PAM) having the sequence NRG. gRNA 20 bp spacer sequences corresponding to the PAM are then identified, as shown in SEQ ID NOs: 6,634-10,171 of the Sequence Listing.

### Example 2—CRISPR/SaCas9 Target Sites for the ANGPTL3 Gene

[0445] Regions of the ANGPTL3 gene are scanned for target sites. Each area is scanned for a protospacer adjacent motif (PAM) having the sequence NNGRRT. gRNA 20 bp spacer sequences corresponding to the PAM are then identified, as shown in SEQ ID NOs: 5,596-6,079-10,171 of the Sequence Listing.

### Example 3—CRISPR/StCas9 Target Sites for the ANGPTL3 Gene

[0446] Regions of the ANGPTL3 gene are scanned for target sites. Each area is scanned for a protospacer adjacent motif (PAM) having the sequence NNAGAAW. gRNA 20 bp spacer sequences corresponding to the PAM are then identified, as shown in SEQ ID NOs: 5,399-5,595 of the Sequence Listing.

### Example 4—CRISPR/TdCas9 Target Sites for the ANGPTL3 Gene

[0447] Regions of the ANGPTL3 gene are scanned for target sites. Each area is scanned for a protospacer adjacent motif (PAM) having the sequence NAAAAC. gRNA 20 bp spacer sequences corresponding to the PAM are then identified, as shown in SEQ ID NOs: 5,305-5,398 of the Sequence Listing.

### Example 5—CRISPR/NmCas9 Target Sites for the ANGPTL3 Gene

[0448] Regions of the ANGPTL3 gene are scanned for target sites. Each area is scanned for a protospacer adjacent motif (PAM) having the sequence NNNNGATT. gRNA 20 bp spacer sequences corresponding to the PAM are then identified, as shown in SEQ ID NOs: 6,080-6,633 of the Sequence Listing.

### Example 6—CRISPR/Cpf1 Target Sites for the ANGPTL3 Gene

[0449] Regions of the ANGPTL3 gene are scanned for target sites. Each area is scanned for a protospacer adjacent motif (PAM) having the sequence TTN or YTN. gRNA 22 bp spacer sequences corresponding to the PAM are then identified, as shown in SEQ ID NOs: 10,172-17,018 of the Sequence Listing.

### Example 7—Bioinformatics Analysis of the Guide Strands

[0450] Candidate guides were then screened and selected in a single process or multi-step process that involves both theoretical binding and experimentally assessed activity at both on and off-target sites. By way of illustration, candidate guides having sequences that match a particular on-target site, such as a site within the ANGPTL3 gene, with adjacent PAM were assessed for their potential to cleave at off-target sites having similar sequences, using one or more of a variety of bioinformatics tools available for assessing off-target binding, as described and illustrated in more detail below, in order to assess the likelihood of effects at chromosomal positions other than those intended.

[0451] Candidates predicted to have relatively lower potential for off-target activity were then assessed experimentally to measure their on-target activity, and then off-target activities at various sites. Preferred guides have sufficiently high on-target activity to achieve desired levels of gene editing at the selected locus, and relatively lower off-target activity to reduce the likelihood of alterations at other chromosomal loci. The ratio of on-target to off-target activity is often referred to as the “specificity” of a guide.

[0452] For initial screening of predicted off-target activities, there are a number of bioinformatics tools known and publicly available that can be used to predict the most likely off-target sites; and since binding to target sites in the CRISPR/Cas9 or CRISPR/Cpf1 nuclease system is driven by Watson-Crick base pairing between complementary sequences, the degree of dissimilarity (and therefore reduced potential for off-target binding) is essentially related to primary sequence differences: mismatches and bulges, i.e. bases that are changed to a non-complementary base, and insertions or deletions of bases in the potential off-target site relative to the target site. An exemplary bioinformatics tool called COSMID (CRISPR Off-target Sites with Mismatches, Insertions and Deletions) (available on the web at crispr.bme.gatech.edu) compiles such similarities. Other bioinformatics tools include, but are not limited to, autoCOSMID, and CCTop.

[0453] Bioinformatics are used to minimize off-target cleavage in order to reduce the detrimental effects of mutations and chromosomal rearrangements. Studies on CRISPR/Cas9 systems suggested the possibility of high off-target activity due to nonspecific hybridization of the guide strand to DNA sequences with base pair mismatches and/or bulges, particularly at positions distal from the PAM region. Therefore, it is important to have a bioinformatics tool that can identify potential off-target sites that have insertions and/or deletions between the RNA guide strand and genomic sequences, in addition to base-pair mismatches. Bioinformatics tools based upon the off-target prediction algorithm CCTop were used to search genomes for potential CRISPR off-target sites (CCTop is available on the web at crispr.cos.uni-heidelberg.de/). COSMID output ranked lists of the potential off-target sites based on the number and location of mismatches, allowing more informed choice of target sites, and avoiding the use of sites with more likely off-target cleavage.

[0454] Additional bioinformatics pipelines are employed that weigh the estimated on- and/or off-target activity of gRNA targeting sites in a region. Other features that may be used to predict activity include information about the cell type in question, DNA accessibility, chromatin state, transcription factor binding sites, transcription factor binding data, and other CHIP-seq data. Additional factors are weighed that predict editing efficiency, such as relative positions and directions of pairs of gRNAs, local sequence features and micro-homologies.

[0455] Initial evaluation and screening of CRISPR/Cas9 target sites focused on the region of ANGPTL3 ˜200 bp 5′ upstream sequence, Exons 1-6 (out of 7 exons) and Introns 1-6. Full intronic sequences were evaluated, or ˜100-300 bp of sequences proximal to exon-intron junctions were evaluated for large introns. gRNAs within exon sequences can be used to create indels leading to loss of function of the protein through a change in the protein sequence and/or truncation of the protein. gRNAs in the 5′UTR sequence can be used either alone or in combination with gRNAs within exons to remove the translation start site and prevent protein synthesis. gRNAs in the introns can be used alone or in combination with gRNAs within exons to remove splice donor and acceptor sites leading to the production of truncated proteins and consequent loss of function.

[0456] Initial bioinformatics analysis identified around 203 guides that target the ANGPTL3 gene. This subset of guides was further analyzed. Guides having predicted off-target sites (1 or 2 mismatches) were eliminated and guides that overlapped with a SNP having a minor allele frequency >0.0002 were also eliminated. We also prioritized gRNAs for screening based on their location within the Angptl3 sequence; preference was given to gRNAs that target 5′ exons. This analysis left a pool of 192 guides prioritized guides for in vitro transcription-based guide screening protocol (Table 7).

### Example 8—Testing of Preferred Guides in Cells for On-Target Activity

[0457] To identify a large spectrum of gRNAs able to edit the cognate DNA target region, an in vitro transcribed (IT) gRNA screen was conducted. The relevant genomic sequence was submitted for analysis using a gRNA design software. The resulting list of gRNAs were narrowed to a list of about 200 gRNAs based on uniqueness of sequence (only gRNAs without a perfect match somewhere else in the genome were screened) and minimal predicted off targets. This set of gRNAs were in vitro transcribed, and transfected using Lipofectamine MessengerMAX into HEK293T cells that constitutively express Cas9. Cells were harvested 48 hours post transfection, the genomic DNA was isolated, and cutting efficiency was evaluated using TIDE analysis (FIGS. 2-4).

[0458] From among the 192 guides screened in HEK cells, we identified guides that had high editing efficiencies and low CCTop Off Target scores (Table 7 and FIGS. 2-4).

[0459] gRNAs with significant activity was then followed up in cultured cells to measure alteration of the ANGPTL3 gene (Examples 11-13). In particular, two guides were selected that specifically target human ANGPTL3 sequence and two gRNAs that target both human and monkey (cross-reactive) ANGPTL3 (100% match with available Cynomolgus monkey and Rhesus macaque ANGPTL3 sequences) for in vitro editing experiments described below (see, e.g., Table 8). Off Off-target events can be followed again. A variety of cells can be transfected and the level of gene editing and possible off-target events measured. These experiments allow optimization of nuclease and donor design and delivery.

TABLE 7
gRNA sequences and cutting efficiencies in HEK293T cells (thymine may be
substituted for uracil in any one of these sequences in order to
generate a corresponding guide RNA sequence)

| | | Guide Spacer | | | |
|---|---|---|---|---|---|
| SEQ ID | | Sequence/Target Site | | Final | |
| NO | Guide Name | (20 mer) | PAM | Indel | R² |
| 7696 | Angptl3_Int5_Ex6_Int6_T18 | CAGATAATAGCTAATAATGT | GGG | 99.4 | 0.9939 |
| 7425 | Angptl3_Int2_Int5_T65 | ATGATACTGAATATACAATT | AGG | 98.2 | 0.9818 |
| 9199 | Angptl3_In1_Ex2_Int2_T2 | CAAAGACCTTCTCCAGACCG | TGG | 97.6 | 0.9759 |
| 7441 | Angptl3_Int2_Int5_T74 | TATTTCATTCAACTGAAGAA | AGG | 97.4 | 0.9899 |
| 7064 | Angptl3_Up_Ex1_Int1_T31 | ATATTTGCCCAGAAAAGGTA | AGG | 96 | 0.9602 |
| 9078 | Angptl3_Up_Ex1_Int1_T5 | AGCATTGATCTAACTCAATG | TGG | 95.8 | 0.9869 |
| 7420 | Angptl3_Int2_Int5_T57 | AATTAGGGGAAATCTGAGTA | AGG | 95.8 | 0.98 |
| 7091 | Angptl3_Up_Ex1_Int1_T13 | TCCCAACTGAAGGAGGCCAT | TGG | 95.3 | 0.9596 |
| 7063 | Angptl3_Up_Ex1_Int1_T15 | TTGCCCAGAAAAGGTAAGGT | TGG | 95.1 | 0.9512 |
| 7079 | Angptl3_Up_Ex1_Int1_T27 | ATTCTGGAGGAAATAACTAG | AGG | 95.1 | 0.9539 |
| 7436 | Angptl3_Int2_Int5_T20 | GGAGTAGTTCTTGGTGCTCT | TGG | 94.5 | 0.9823 |
| 7423 | Angptl3_Int2_Int5_T44 | GATACTGAATATACAATTAG | GGG | 94.4 | 0.9648 |
| 7445 | Angptl3_Int2_Int5_T53 | TGATAATAATAGCTTCAAGA | AGG | 93.7 | 0.9838 |
| 9081 | Angptl3_Up_Ex1_Int1_T28 | ATCTAACTCAATGTGGAAGA | AGG | 93.6 | 0.9577 |
| 7061 | Angptl3_Up_Ex1_Int1_T7 | CCAGAAAAGGTAAGGTTGGT | AGG | 93.2 | 0.9318 |
| 9179 | Angptl3_In1_Ex2_Int2_T20 | ATTTGAAAGAAGCATACAAG | GGG | 92.9 | 0.9522 |
| 7092 | Angptl3_Up_Ex1_Int1_T11 | GACCATGTCCCAACTGAAGG | AGG | 92.7 | 0.9755 |
| 9359 | Angptl3_Int2_Int5_T21 | AACATGATGGTAAGACACTT | TGG | 92.6 | 0.9521 |
| 9145 | Angptl3_Up_Ex1_Int1_T46 | AAAGTAAGTAGAAAATAAAG | AGG | 92.1 | 0.9249 |
| 7449 | Angptl3_Int2_Int5_T34 | TAGAACAAGTCCTAAGAATA | GGG | 91.9 | 0.9534 |
| 9083 | Angptl3_Up_Ex1_Int1_T4 | TACATTCGTGCAAGTTAACA | CGG | 90.9 | 0.9241 |
| 9115 | Angptl3_Up_Ex1_Int1_T2 | GACTTTGTCCATAAGACGAA | GGG | 90.8 | 0.9507 |
| 7124 | Angptl3_Up_Ex1_Int1_T17 | GAAGTTACTTCTGGGTGTTC | TGG | 89.9 | 0.9573 |
| 9219 | Angptl3_In1_Ex2_Int2_T12 | AACTACCTGCATTTAAACCA | TGG | 89.4 | 0.8942 |
| 7186 | Angptl3_In1_Ex2_Int2_T6 | TAGAGCCATGGTTTAAATGC | AGG | 89.3 | 0.893 |
| 7424 | Angptl3_Int2_Int5_T64 | TGATACTGAATATACAATTA | GGG | 88.8 | 0.9487 |
| 9110 | Angptl3_Up_Ex1_Int1_T9 | GGCCTCCTTCAGTTGGGACA | TGG | 88.6 | 0.9164 |
| 9361 | Angptl3_Int2_Int5_T14 | TGATGGTAAGACACTTTGGT | GGG | 87.8 | 0.889 |
| 7173 | Angptl3_In1_Ex2_Int2_T18 | TTACAGACCTGTGTGAAAGA | TGG | 86.5 | 0.9796 |
| 7121 | Angptl3_Up_Ex1_Int1_T29 | TCTGGGTGTTCTGGAGTTTC | AGG | 85 | 0.9467 |
| 9178 | Angptl3_In1_Ex2_Int2_T22 | TATTTGAAAGAAGCATACAA | GGG | 84.7 | 0.8818 |
| 9357 | Angptl3_Int2_Int5_T81 | ATAAGAAATGTAAAACATGA | TGG | 83 | 0.9431 |
| 9181 | Angptl3_In1_Ex2_Int2_T17 | GAAAGAAGCATACAAGGGGA | AGG | 82.9 | 0.874 |
| 7450 | Angptl3_Int2_Int5_T22 | CTAGAACAAGTCCTAAGAAT | AGG | 82.1 | 0.8852 |
| 9360 | Angptl3_Int2_Int5_T37 | ATGATGGTAAGACACTTTGG | TGG | 81.8 | 0.8558 |
| 7431 | Angptl3_Int2_Int5_T76 | GGAAGATAGAGAAATTTCTG | TGG | 81.5 | 0.8699 |
| 7165 | Angptl3_In1_Ex2_Int2_T3 | GGTCTTCCACGGTCTGGAGA | AGG | 81.4 | 0.8469 |
| 9211 | Angptl3_In1_Ex2_Int2_T4 | GTATGTCCCATCTTTCACAC | AGG | 80.5 | 0.87 |
| 7437 | Angptl3_Int2_Int5_T33 | TGAAGAAAGGGAGTAGTTCT | TGG | 80.2 | 0.9145 |
| 7435 | Angptl3_Int2_Int5_T38 | AGTTCTTGGTGCTCTTGGCT | TGG | 79.9 | 0.9469 |
| 7131 | Angptl3_Up_Ex1_Int1_T43 | ATGCAACAAAGTATTTCAAA | TGG | 79.5 | 0.9419 |
| 9085 | Angptl3_Up_Ex1_Int1_T20 | CTACCAACCTTACCTTTTCT | GGG | 77.7 | 0.812 |
| 7168 | Angptl3_In1_Ex2_Int2_T1 | TATATTGGTCTTCCACGGTC | TGG | 77.3 | 0.8248 |
| 7094 | Angptl3_Up_Ex1_Int1_T10 | TAAGACCATGTCCCAACTGA | AGG | 76.8 | 0.7743 |
| 7053 | Angptl3_Up_Ex1_Int1_T26 | AAATGAGCAACTAACTTAAT | AGG | 76.3 | 0.81 |
| 7076 | Angptl3_Up_Ex1_Int1_T41 | CTAGAGGAACAATAAAAAGA | AGG | 74.1 | 0.79 |
| 9084 | Angptl3_Up_Ex1_Int1_T14 | CCTACCAACCTTACCTTTTC | TGG | 73.3 | 0.877 |
| 9109 | Angptl3_Up_Ex1_Int1_T6 | GCCAATGGCCTCCTTCAGTT | GGG | 72.2 | 0.7228 |
| 7088 | Angptl3_Up_Ex1_Int1_T16 | GCAAATCTTGATTTTGGCTC | TGG | 70 | 0.898 |
| 7082 | Angptl3_Up_Ex1_Int1_T21 | ATTGTCTTGATCAATTCTGG | AGG | 69.5 | 0.7547 |
| 7440 | Angptl3_Int2_Int5_T75 | ATTTCATTCAACTGAAGAAA | GGG | 67.1 | 0.7205 |
| 7125 | Angptl3_Up_Ex1_Int1_T25 | CTTTAAGTGAAGTTACTTCT | GGG | 66.5 | 0.7123 |
| 7430 | Angptl3_Int2_Int5_T82 | GAAGATAGAGAAATTTCTGT | GGG | 64.1 | 0.7737 |
| 9191 | Angptl3_In1_Ex2_Int2_T28 | GAAATTAATAGAAAAGAAAG | AGG | 62.9 | 0.6408 |
| 9108 | Angptl3_Up_Ex1_Int1_T8 | AGCCAATGGCCTCCTTCAGT | TGG | 62.8 | 0.7421 |
| 9128 | Angptl3_Up_Ex1_Int1_T39 | ACTACAAGTCAAAAATGAAG | AGG | 61.6 | 0.6497 |
| 9146 | Angptl3_Up_Ex1_Int1_T47 | AAGTAAGTAGAAAATAAAGA | GGG | 61.4 | 0.6141 |
| 9122 | Angptl3_Up_Ex1_Int1_T48 | TGAAATCAAAGAAGAAGAAA | AGG | 60.2 | 0.8549 |
| 7089 | Angptl3_Up_Ex1_Int1_T35 | AACATAGCAAATCTTGATTT | TGG | 54.1 | 0.9166 |
| 9558 | Angptl3_Int5_Ex6_Int6_T25 | AAGATACACTAAAATGATCA | AGG | 51.2 | 0.5777 |
| 7126 | Angptl3_Up_Ex1_Int1_T19 | ACTTTAAGTGAAGTTACTTC | TGG | 45.2 | 0.722 |
| 9213 | Angptl3_In1_Ex2_Int2_T15 | AATTATTTACAAGCTTTAAC | TGG | 43.5 | 0.8156 |
| 7112 | Angptl3_Up_Ex1_Int1_T33 | GTAGAATTTTTTCTTCTAGG | AGG | 38.3 | 0.3936 |
| 9177 | Angptl3_In1_Ex2_Int2_T21 | CTATTTGAAAGAAGCATACA | AGG | 36.3 | 0.3741 |
| 7073 | Angptl3_Up_Ex1_Int1_T12 | ATTTTCAATTTCAAGCAACG | TGG | 35.9 | 0.9866 |
| 9086 | Angptl3_Up_Ex1_Int1_T18 | TACCTTTTCTGGGCAAATAT | TGG | 34.3 | 0.8831 |
| 9217 | Angptl3_In1_Ex2_Int2_T14 | AGCATAACTGTTAAAATTGC | AGG | 31.7 | 0.8801 |
| 7177 | Angptl3_In1_Ex2_Int2_T26 | TAAAGCTTGTAAATAATTTT | AGG | 30.8 | 0.8673 |
| 7098 | Angptl3_Up_Ex1_Int1_T3 | TAATTTGGCCCTTCGTCTTA | TGG | 30.3 | 0.9134 |
| 7066 | Angptl3_Up_Ex1_Int1_T30 | TACCAATATTTGCCCAGAAA | AGG | 27.6 | 0.9285 |
| 7154 | Angptl3_In1_Ex2_Int2_T25 | TGGATTTGAAAAATGAATAT | TGG | 26.9 | 0.9833 |
| 7456 | Angptl3_Int2_Int5_T43 | GGTTGATACATTGTATTTGA | TGG | 25.5 | 0.8906 |
| 7104 | Angptl3_Up_Ex1_Int1_T36 | TTCTTCTTCTTTGATTTCAC | TGG | 25 | 0.77 |
| 7158 | Angptl3_In1_Ex2_Int2_T10 | AAAGTCTGGATATAGAGAGT | AGG | 24.9 | 0.2492 |
| 7188 | Angptl3_In1_Ex2_Int2_T13 | CACACAAAGTTTTAGAGCCA | TGG | 24.3 | 0.8237 |
| 9444 | Angptl3_Int2_Int5_T29 | ACAAAACTTCAATGAAACGT | GGG | 24 | 0.8734 |
| 7114 | Angptl3_Up_Ex1_Int1_T40 | GAAGTAGAATTTTTTCTTCT | AGG | 23.9 | 0.6149 |
| 9186 | Angptl3_In1_Ex2_Int2_T5 | TTAGATTATGATAGTGTTAC | AGG | 23.9 | 0.4244 |
| 7169 | Angptl3_In1_Ex2_Int2_T11 | TTGTTTATATTGGTCTTCCA | CGG | 21.4 | 0.2199 |
| 9402 | Angptl3_Int2_Int5_T84 | TTTTTTAAAAGAAAATAGTT | TGG | 20.4 | 0.95 |
| 7157 | Angptl3_In1_Ex2_Int2_T7 | TCTGGATATAGAGAGTAGGT | TGG | 19.6 | 0.1961 |
| 9106 | Angptl3_Up_Ex1_Int1_T32 | GATGTAAAAATTTTAGCCAA | TGG | 18.5 | 0.2465 |
| 7171 | Angptl3_In1_Ex2_Int2_T8 | CTTTTATTTGACTATGCTGT | TGG | 18.5 | 0.983 |
| 9206 | Angptl3_In1_Ex2_Int2_T23 | AATAAAAGAAATAGAAAATC | AGG | 18.5 | 0.1879 |
| 7170 | Angptl3_In1_Ex2_Int2_T24 | GTTGGTTTAATTGTTTATAT | TGG | 18 | 0.2054 |
| 7462 | Angptl3_Int2_Int5_T80 | TCTTAGGTATGTCTTTTATA | GGG | 17 | 0.9759 |
| 9378 | Angptl3_Int2_Int5_T79 | CAATCAGAGAAATACAAATA | TGG | 15.7 | 0.963 |
| 9364 | Angptl3_Int2_Int5_T59 | TTATCAAATTCCCTATTCTT | AGG | 13.6 | 0.1364 |
| 7172 | Angptl3_In1_Ex2_Int2_T9 | TACAGACCTGTGTGAAAGAT | GGG | 13 | 0.9615 |
| 7522 | Angptl3_Int2_Int5_T78 | TCAGATTATTTTAGAGGAAA | AGG | 12.9 | 0.9492 |
| 7483 | Angptl3_Int2_Int5_T71 | GTTAAAGCATTTTTCTTAGA | TGG | 11.6 | 0.9787 |
| 9373 | Angptl3_Int2_Int5_T27 | TCAACCTAAACTGGATGCTG | GGG | 11.5 | 0.9769 |
| 9370 | Angptl3_Int2_Int5_T7 | TACAATGTATCAACCTAAAC | TGG | 10.9 | 0.8173 |
| 7134 | Angptl3_Up_Ex1_Int1_T45 | TTTCTGGAGATTATTTTTCT | TGG | 10.4 | 0.9886 |
| 7505 | Angptl3_Int2_Int5_T41 | ATGAAAAACTTGAGAGTTGC | TGG | 10.2 | 0.968 |
| 7415 | Angptl3_Int2_Int5_T60 | TTCAGTTCATAATGTTATAA | CGG | 9.9 | 0.99 |
| 7099 | Angptl3_Up_Ex1_Int1_T37 | TTTGAAATATGTCATTAATT | TGG | 9.8 | 0.9894 |
| 9591 | Angptl3_Int5_Ex6_Int6_T22 | ACTTGGGATCACAAAGCAAA | AGG | 7.3 | 0.9826 |
| 7163 | Angptl3_In1_Ex2_Int2_T16 | CTTGTTTTTCTACAAAAGTC | TGG | 7.2 | 0.9858 |
| 9382 | Angptl3_Int2_Int5_T68 | TGATTATTAGATAATATAGA | AGG | 7.1 | 0.9864 |
| 9453 | Angptl3_Int2_Int5_T13 | TTTTGGGAGGCTTGATGGTA | AGG | 6.7 | 0.5275 |
| 9209 | Angptl3_In1_Ex2_Int2_T19 | CAGGTAAGTCAGTATTTTAA | TGG | 6.6 | 0.0661 |
| 9372 | Angptl3_Int2_Int5_T11 | ATCAACCTAAACTGGATGCT | GGG | 6.4 | 0.9819 |
| 9435 | Angptl3_Int2_Int5_T73 | TTGCCTTTCACTTAACTTTT | GGG | 5.6 | 0.9843 |
| 7660 | Angptl3_Int5_Ex6_Int6_T9 | GTGAGTTATTAAGTACAGGT | TGG | 5.3 | 0.9892 |
| 9446 | Angptl3_Int2_Int5_T5 | ACGTGGGAGAACTACAAATA | TGG | 5.2 | 0.9867 |
| 9442 | Angptl3_Int2_Int5_T6 | TTAATTCAACATCGAATAGA | TGG | 5.1 | 0.9872 |
| 7492 | Angptl3_Int2_Int5_T61 | AGTAATAGGAATAATATCTT | TGG | 4.2 | 0.9883 |
| 9414 | Angptl3_Int2_Int5_T28 | AACAGAGGTGAACATACAAG | TGG | 4.1 | 0.9779 |
| 7692 | Angptl3_Int5_Ex6_Int6_T30 | AAGATATGAAAATAAAGTAT | TGG | 3.8 | 0.9882 |
| 9584 | Angptl3_Int5_Ex6_Int6_T6 | CAATGTCCCCAATGCAATCC | CGG | 3.6 | 0.9873 |
| 7136 | Angptl3_Up_Ex1_Int1_T34 | TAATAGGAAATTTTATTTTC | TGG | 3.5 | 0.976 |
| 9578 | Angptl3_Int5_Ex6_Int6_T7 | TACGAATTGAGTTGGAAGAC | TGG | 3.5 | 0.9915 |
| 7137 | Angptl3_Up_Ex1_Int1_T44 | AACTAACTTGAAATTATAAT | AGG | 3.4 | 0.9738 |
| 9371 | Angptl3_Int2_Int5_T3 | TATCAACCTAAACTGGATGC | TGG | 3.3 | 0.9952 |
| 7689 | Angptl3_Int5_Ex6_Int6_T12 | AAGATACCTGAATAACCCTC | TGG | 3.3 | 0.9891 |
| 9428 | Angptl3_Int2_Int5_T2 | CAACTTACTCATTACGTATT | AGG | 3.2 | 0.987 |
| 7465 | Angptl3_Int2_Int5_T67 | TGTATTTCTCTGATTGTCTT | AGG | 3 | 0.9958 |
| 9434 | Angptl3_Int2_Int5_T54 | ATTGCCTTTCACTTAACTTT | TGG | 3 | 0.99 |
| 9147 | Angptl3_Up_Ex1_Int1_T38 | TCATGTTTATGTTTTCAATG | TGG | 2.8 | 0.9927 |
| 7457 | Angptl3_Int2_Int5_T24 | AGAACCCCAGCATCCAGTTT | AGG | 2.7 | 0.9967 |
| 9409 | Angptl3_Int2_Int5_T72 | AATAACATTTTATTGATTCT | AGG | 2.7 | 0.9848 |
| 7670 | Angptl3_Int5_Ex6_Int6_T17 | ATAATTAGATTGCTTCACTA | TGG | 2.5 | 0.9726 |
| 7084 | Angptl3_Up_Ex1_Int1_T22 | TGAATTGTCTTGATCAATTC | TGG | 2.4 | 0.988 |
| 7545 | Angptl3_Int2_Int5_T15 | CGATGTTGAATTAATGTCCA | TGG | 2.1 | 0.99 |
| 9430 | Angptl3_Int2_Int5_T39 | ACGTATTAGGAAGATTAACC | TGG | 2 | 0.9851 |
| 7524 | Angptl3_Int2_Int5_T42 | GTCACTTCAGATTATTTTAG | AGG | 2 | 0.9921 |
| 7531 | Angptl3_Int2_Int5_T30 | GGTCCCAAAAGTTAAGTGAA | AGG | 2 | 0.9919 |
| 7535 | Angptl3_Int2_Int5_T87 | ATACATTTTATTATTTATTA | TGG | 2 | 0.9926 |
| 7667 | Angptl3_Int5_Ex6_Int6_T15 | CTATGGAGTATATCTTCTCT | AGG | 1.9 | 0.9899 |
| 9587 | Angptl3_Int5_Ex6_Int6_T21 | AAGATTTGGTGTTTTCTACT | TGG | 1.9 | 0.9901 |
| 7536 | Angptl3_Int2_Int5_T62 | AAGGTAGTTTATTAATGTTA | TGG | 1.8 | 0.9938 |
| 7540 | Angptl3_Int2_Int5_T63 | GTTTGTTTGATTTTAATTGG | TGG | 1.8 | 0.9923 |
| 9457 | Angptl3_Int2_Int5_T49 | TATTTACTGAGAACCTCTTA | TGG | 1.8 | 0.9201 |
| 9443 | Angptl3_Int2_Int5_T36 | CACAAAACTTCAATGAAACG | TGG | 1.7 | 0.9926 |
| 9438 | Angptl3_Int2_Int5_T69 | TGATTTCATTCATTATATTC | AGG | 1.6 | 0.9924 |
| 7538 | Angptl3_Int2_Int5_T88 | TTTTAATTGGTGGTTTTGTA | AGG | 1.5 | 0.9931 |
| 9440 | Angptl3_Int2_Int5_T10 | CATTATATTCAGGTAGTCCA | TGG | 1.5 | 0.9931 |
| 9568 | Angptl3_Int5_Ex6_Int6_T20 | CTTTTCAGGAGAATTTTGGT | TGG | 1.5 | 0.9888 |
| 9586 | Angptl3_Int5_Ex6_Int6_T19 | AATCCCGGAAAACAAAGATT | TGG | 1.5 | 0.9886 |
| 9594 | Angptl3_Int5_Ex6_Int6_T10 | AGGACACTTCAACTGTCCAG | AGG | 1.5 | 0.9898 |
| 9347 | Angptl3_Int2_Int5_T52 | TATTCTTTTATCAGCTCAGA | AGG | 1.4 | 0.9938 |
| 9412 | Angptl3_Int2_Int5_T26 | TGTACCACCATTTATAACAG | AGG | 1.4 | 0.9927 |
| 9448 | Angptl3_Int2_Int5_T66 | AGAACTACAAATATGGTTTT | GGG | 1.4 | 0.9951 |
| 9450 | Angptl3_Int2_Int5_T40 | ACTACAAATATGGTTTTGGG | AGG | 1.3 | 0.9943 |
| 9559 | Angptl3_Int5_Ex6_Int6_T24 | AGATACACTAAAATGATCAA | GGG | 1.3 | 0.9892 |
| 9580 | Angptl3_Int5_Ex6_Int6_T29 | TATTGAATATTCTTTTTACT | TGG | 1.3 | 0.9949 |
| 9595 | Angptl3_Int5_Ex6_Int6_T8 | GGACACTTCAACTGTCCAGA | GGG | 1.3 | 0.9917 |
| 9565 | Angptl3_Int5_Ex6_Int6_T27 | TTTTTAAAACTTTTCTTTTC | AGG | 1.1 | 0.9927 |
| 7682 | Angptl3_Int5_Ex6_Int6_T3 | TTTGTTTTCCGGGATTGCAT | TGG | 1.1 | 0.9918 |
| 9597 | Angptl3_Int5_Ex6_Int6_T4 | AACTGTCCAGAGGGTTATTC | AGG | 1.1 | 0.9918 |
| 7488 | Angptl3_Int2_Int5_T51 | CTTGACATTTTATGAAGTTG | TGG | 0.9 | 0.9904 |
| 7504 | Angptl3_Int2_Int5_T50 | TGAAAAACTTGAGAGTTGCT | GGG | 0.9 | 0.9901 |
| 7518 | Angptl3_Int2_Int5_T86 | ATTGAGTAAATACATAAACA | AGG | 0.9 | 0.9908 |
| 7530 | Angptl3_Int2_Int5_T85 | GAAAGGCAATTAATGAATTT | TGG | 0.9 | 0.9934 |
| 7678 | Angptl3_Int5_Ex6_Int6_T23 | TTTTCAGGAGAATTTTGGTT | GGG | 0.9 | 0.9918 |
| 7675 | Angptl3_Int5_Ex6_Int6_T1 | AACTAGATGTAGCGTATAGT | TGG | 0.9 | 0.9897 |
| 7661 | Angptl3_Int5_Ex6_Int6_T14 | ATCTGTGAGTTATTAAGTAC | AGG | 0.8 | 0.9941 |
| 9576 | Angptl3_Int5_Ex6_Int6_T13 | TTATGTTTTACGAATTGAGT | TGG | 0.8 | 0.9931 |
| 9394 | Angptl3_Int2_Int5_T23 | TGAAATATTTACGGAGTTAA | AGG | 0.6 | 0.9862 |
| 7680 | Angptl3_Int5_Ex6_Int6_T11 | TGTTTTCCGGGATTGCATTG | GGG | 0.6 | 0.9907 |
| 7681 | Angptl3_Int5_Ex6_Int6_T2 | TTGTTTTCCGGGATTGCATT | GGG | 0.6 | 0.9915 |
| 7498 | Angptl3_Int2_Int5_T12 | TAAATGGTGGTACATTCAGC | AGG | 0.5 | 0.9884 |
| 9447 | Angptl3_Int2_Int5_T56 | GAGAACTACAAATATGGTTT | TGG | 0.5 | 0.9959 |
| 7684 | Angptl3_Int5_Ex6_Int6_T28 | AACACCAAATCTTTGTTTTC | CGG | 0.5 | 0.9926 |
| 7515 | Angptl3_Int2_Int5_T48 | TGTATAAAACAATGATAACC | AGG | 0.4 | 0.99 |
| 9588 | Angptl3_Int5_Ex6_Int6_T26 | AGATTTGGTGTTTTCTACTT | GGG | 0.4 | 0.9944 |
| 9397 | Angptl3_Int2_Int5_T92 | AAGGTCACTGGACTCCAGAC | TGG | 0.3 | 0.9907 |
| 9419 | Angptl3_Int2_Int5_T4 | GTCTACTGTGATGTTATATC | AGG | 0.3 | 0.9912 |
| 7493 | Angptl3_Int2_Int5_T47 | ATTACATCAGATTTAGTAAT | AGG | 0.2 | 0.9887 |
| 9387 | Angptl3_Int2_Int5_T58 | TCATGGTATTGCAGTTTTAA | AGG | 0.1 | 0.9915 |
| 7470 | Angptl3_Int2_Int5_T19 | TCAGCATGTATCTCTTAAAC | AGG | 0.1 | 0.9922 |
| 7502 | Angptl3_Int2_Int5_T55 | ATGTTCACCTCTGTTATAAA | TGG | 0.1 | 0.9886 |
| 7503 | Angptl3_Int2_Int5_T45 | TTGAGAGTTGCTGGGTCTGA | TGG | 0.1 | 0.9901 |
| 9454 | Angptl3_Int2_Int5_T25 | TTTGGGAGGCTTGATGGTAA | GGG | 0.1 | 0.9851 |
| 9583 | Angptl3_Int5_Ex6_Int6_T5 | CTACATCTAGTTGCGATTAC | TGG | 0.1 | 0.9965 |
| 7697 | Angptl3_Int5_Ex6_Int6_T16 | GCAGATAATAGCTAATAATG | TGG | 0.1 | 0.9941 |
| 9395 | Angptl3_Int2_Int5_T1 | TTTACGGAGTTAAAGGTCAC | TGG | 0 | 0.9912 |
| 7501 | Angptl3_Int2_Int5_T35 | TTCACCTCTGTTATAAATGG | TGG | 0 | 0.9893 |
| 9421 | Angptl3_Int2_Int5_T16 | TATCAGGTAAAACCTGTCTA | AGG | 0 | 0.9913 |
| 7510 | Angptl3_Int2_Int5_T18 | ACTGTCTATTCTCCTTAGAC | AGG | 0 | 0.9899 |
| 9451 | Angptl3_Int2_Int5_T31 | TATGGTTTTGGGAGGCTTGA | TGG | 0 | 0.9886 |
| 9455 | Angptl3_Int2_Int5_T8 | TTGGGAGGCTTGATGGTAAG | GGG | 0 | 0.9872 |
| 7554 | Angptl3_Int2_Int5_T9 | CCTAATACCTGGTCCATAAG | AGG | 0 | 0.9891 |
| 9459 | Angptl3_Int2_Int5_T32 | CTGAGAACCTCTTATGGACC | AGG | 0 | 0.9869 |
| 9461 | Angptl3_Int2_Int5_T17 | CCTCTTATGGACCAGGTATT | AGG | 0 | 0.9883 |
| 7557 | Angptl3_Int2_Int5_T46 | TTACTACTTTTCCTAATACC | TGG | 0 | 0.988 |
| 9581 | Angptl3_Int5_Ex6_Int6_T31 | ATTGAATATTCTTTTTACTT | GGG | 0 | 0.9959 |
| 9092 | Angptl3_Up_Ex1_Int1_T24 | TATATAGAGTTAAGAAGTCT | AGG | | |
| 7072 | Angptl3_Up_Ex1_Int1_T23 | AACGTGGAACTGTTTTCTTC | TGG | | |
| 9114 | Angptl3_Up_Ex1_Int1_T1 | AGACTTTGTCCATAAGACGA | AGG | | |
| 7559 | Angptl3_Int2_Int5_T77 | TTTGATAATAAATTATATGA | AGG | | |

### Example 10—Cross-Reactive Activity of the gRNA Targeting ANGPTL3 in Primary Hepatocytes

[0460] This example demonstrates efficient cross-reactive activity of ANGPTL3 gRNAs in primary hepatocytes isolated from cynomologous monkey and human donors after knockout by lipofectamine transfection complexes comprising Cas9 mRNA and gRNA.

[0461] Primary hepatocytes isolated from human and cynomologous monkey (In Vitro ADMET Laboratories, Maryland) were plated in confluent monolayers and transfected with Cas9 mRNA and gRNA targeting ANGPTL3. gRNA targeting ANGPTL3 synthesized by AXOLabs, the gRNAs were chemically modified using the following format: n*n*n*NNNNNNNNNNNNNNNNNGUUUUAGAgcuaGAAAuagcAAGUUAAAAUAAG GCUAGUCCGUUAUCaacuuGAAAaaguggcaccgagucggugcu*u*u*U, where UPPERCASE: unmodified nucleotide; lowercase: nucleotide with 2′-O-methyl-modification; n or N: any nucleotide; *:phosphorothioate bond (SEQ ID NO: 17,058). The modified gRNAs are shown in Table 8.

[0462] In brief, cells were plated in confluent monolayers in 24-well Collagen-Type I coated plates (Corning Biocoat Collagen I Multiwell Plates, cat #356408) at 0.35×10⁶ cells/well and incubated at 37° C. in 5% CO₂ in InVitroGRO Culture Plating Medium (BioreclamationIVT, Z990003). Hepatocyte monolayers were transfected 3-5 hours after plating with gRNA in complex with Cas9 mRNA. Human hepatocytes were transfected with either human-specific or species cross-reactive gRNAs and monkey hepatocytes were transfected with species cross-reactive gRNAs. Transfections of gRNA were performed using Lipofectamine™ MessengerMax™ transfection reagent (ThermoFisher, Cat. #LMRNA003), according to the manufacture's protocol, at a final gRNA amount of 200ng.

[0463] Hepatocytes were also transfected with Lipofectamine MessengerMax, without Cas9 and gRNA to generate “MOCK” samples. In addition, hepatocytes were transfected with Cas9 mRNA and gRNA controls that were known to be consistently active at a known range of editing efficiency per species of hepatocytes (e.g.: C3 gRNA in human hepatocytes or PCSK9 gRNA in monkey hepatocytes). Cells received a medium change for fresh InVitroGRO culture medium at 16 hours post transfection and were incubated with gRNA-lipofectamine complexes for 48h at which time they were lysed in prepGEM (ZyGem), according to the manufacture's protocol.

[0464] Hepatocytes transfected with Cas9 and ANGPTL3 gRNA and mock transfectants (control group) were analyzed by Tracking of Indels by Decomposition (TIDE) analysis (Brinkman E K, Chen T, Amendola M, van Steensel B. Easy quantitative assessment of genome editing by sequence trace decomposition. Nucleic Acids Res. 2014 Dec. 16; 42(22):e168. doi: 10.1093/nar/gku936), briefly, genomic DNA was used as a template for PCR using KAPA HiFi PCR Kit.

[0465] PCR amplicons were purified using the AxyPrep Mag PCR clean-up kit (Axygen). Amplicons were sequenced and analyzed using the decomposition algorithm. gRNA activity was measured as a ratio of alleles with various indels (insertions of 1 to 50 nt, or deletions of 1 to 50 nt) adjacent to predicted cut site of the S.py. Cas9 (i.e., between nucleotides −4 and −3 upstream of PAM (NGG) on a non-target strand and between 3 and 4 nucleotides downstream of PAM complementary sequence (CCN) on a target strand.

[0466] TIDE analysis showed that ANGPTL3 gRNAs EX2, T6, and T9 induced ˜50%-60% InDel in human hepatocytes, while EX1 gRNA induced <20% efficiency on average (see FIG. 5A). The cross-reactive guides T6 and T9 were active and induced gene editing in monkey hepatocyte. gRNA T6 had highest editing efficiency, with >60% InDel in monkey hepatocytes (see FIG. 5B).

TABLE 8
ANGPTL3 gRNA Sequences

| | | | Modified gRNA sequence | | |
|---|---|---|---|---|---|
| | | | UPPERCASE: unmodified | | |
| | | Guide | nucleotide; lowercase: nucleotide | Unmodified | gRNA |
| | Guide | Target | with 2′-O-methyl-modification; | gRNA | spacer |
| Exon # | ID | Sequence | *: phosphorothioate bond | sequence | sequence |
| Exon 1 | Ex1 | GACTTTGT | g*a*c*UUUGUCCAUAAGA | GACUUUGU | GACUUUG |
| | | CCATAAGA | CGAAGUUUUAGAgcuaGA | CCAUAAGA | UCCAUAA |
| | | CGAA | AAuagcAAGUUAAAAUAA | CGAAGUUU | GACGAA |
| | | (SEQ ID NO: | GGCUAGUCCGUUAUCaacu | UAGAGCUA | (SEQ ID NO: |
| | | 17,054) | uGAAAaaguggcaccgagucggug | GAAAUAGC | 17,068) |
| | | | cu*u*u*U | AAGUUAAA | |
| | | | (SEQ ID NO: 17,059) | AUAAGGCU | |
| | | | | AGUCCGUU | |
| | | | | AUCAACUU | |
| | | | | GAAAAAGU | |
| | | | | GGCACCGA | |
| | | | | GUCGGUGC | |
| | | | | UUUU | |
| | | | | (SEQ ID NO: | |
| | | | | 17,063) | |
| Exon 1 | T6 | GCCAATGG | g*c*c*AAUGGCCUCCUUC | GCCAAUGG | GCCAAUG |
| | | CCTCCTTC | AGUUGUUUUAGAgcuaGA | CCUCCUUC | GCCUCCUU |
| | | AGTT | AAuagcAAGUUAAAAUAA | AGUUGUUU | CAGUU |
| | | (SEQ ID NO: | GGCUAGUCCGUUAUCaacu | UAGAGCUA | (SEQ ID NO: |
| | | 17,055) | uGAAAaaguggcaccgagucggug | GAAAUAGC | 17,069) |
| | | | cu*u*u*U | AAGUUAAA | |
| | | | (SEQ ID NO: 17,060) | AUAAGGCU | |
| | | | | AGUCCGUU | |
| | | | | AUCAACUU | |
| | | | | GAAAAAGU | |
| | | | | GGCACCGA | |
| | | | | GUCGGUGC | |
| | | | | UUUU | |
| | | | | (SEQ ID NO: | |
| | | | | 17,064) | |
| Exon 1 | T9 | GGCCTCCT | g*g*c*CUCCUUCAGUUGG | GGCCUCCU | GGCCUCCU |
| | | TCAGTTGG | GACAGUUUUAGAgcuaGA | UCAGUUGG | UCAGUUG |
| | | GACA | AAuagcAAGUUAAAAUAA | GACAGUUU | GGACA |
| | | (SEQ ID NO: | GGCUAGUCCGUUAUCaacu | UAGAGCUA | (SEQ ID NO: |
| | | 17,056) | uGAAAaaguggcaccgagucggug | GAAAUAGC | 17,070) |
| | | | cu*u*u*U | AAGUUAAA | |
| | | | (SEQ ID NO: 17,061) | AUAAGGCU | |
| | | | | AGUCCGUU | |
| | | | | AUCAACUU | |
| | | | | GAAAAAGU | |
| | | | | GGCACCGA | |
| | | | | GUCGGUGC | |
| | | | | UUUU | |
| | | | | (SEQ ID NO: | |
| | | | | 17,065) | |
| Exon 1 | Ex2 | CAAAGAC | c*a*a*AGACCUUCUCCAG | CAAAGACC | CAAAGAC |
| | | CTTCTCCA | ACCGGUUUUAGAgcuaGA | UUCUCCAG | CUUCUCCA |
| | | GACCG | AAuagcAAGUUAAAAUAA | ACCGGUUU | GACCG |
| | | (SEQ ID NO: | GGCUAGUCCGUUAUCaacu | UAGAGCUA | (SEQ ID NO: |
| | | 17,057) | uGAAAaaguggcaccgagucggug | GAAAUAGC | 17,071) |
| | | | cu*u*u*U | AAGUUAAA | |
| | | | (SEQ ID NO: 17,062) | AUAAGGCU | |
| | | | | AGUCCGUU | |
| | | | | AUCAACUU | |
| | | | | GAAAAAGU | |
| | | | | GGCACCGA | |
| | | | | GUCGGUGC | |
| | | | | UUUU | |
| | | | | (SEQ ID NO: | |
| | | | | 17,066) | |

### Example 11—ANGPTL3 Protein Secretion in Gene-Edited Primary Human Hepatocytes

[0467] This example demonstrates the correlation between efficient gene-editing by T6 gRNA and reduction in secreted ANGPTL3 protein in primary human hepatocytes.

[0468] Primary human hepatocytes (In Vitro ADMET Laboratories) were plated in confluent monolayers in 24-well Collagen-Type I coated plates (Corning Biocoat Collagen I Multiwell Plates, cat #356408) at 0.35×10⁶ cells/well and incubated at 37° C. in 5% CO₂ in InVitroGRO Culture Plating Medium (BioreclamationIVT, Z990003). Hepatocyte monolayers were transfected 3-5 hours after plating with either ANGPTL3 T6 gRNA or C3 gRNA (non-relevant gRNA that efficiently knocks out human C3 but does not edit the ANGPTL3 gene) in complex with Cas9 mRNA. Transfections of gRNA were performed using Lipofectamine MessengerMax, according to the manufacture's protocol, at a final gRNA amount of 200ng. Hepatocytes were also transfected with Lipofectamine MessengerMax, without Cas9 mRNA and gRNA to generate “MOCK” samples. Cells received a medium change for fresh InVitroGRO culture medium at 16 hours post transfection. The samples were incubated with gRNA-lipofectamine complexes for 48h, at which time supernatants were collected for human ANGPTL3 protein analysis and cells were lysed in prepGEM (ZyGem), according to the manufacture's protocol.

[0469] Hepatocytes transfected with Cas9 and T6 gRNA, or Cas9 and C3 gRNA, and ‘MOCK’ transfectants (control group) were analyzed by TIDE. TIDE analysis showed that ANGPTL3 was edited by T6 gRNA (InDel ˜60%)(FIG. 6A). Similarly, C3 gRNA efficiently edited the human C3 gene, with InDel frequency of ˜55% in the same human donor (FIG. 6A).

[0470] A Sandwich Enzyme-Linked Immunosorbent Assay (ELISA) for Human ANGPTL3 protein (Human ANGPTL3 ELISA kit, R&D Systems, cat #DY3829) was used to detect concentrations of ANGPTL3 protein in supernatants collected from the gene-edited samples. The results show that supernatants from the primary hepatocytes having ˜60% efficiency in editing the ANGPTL3 gene by T6 gRNA contained less than 1 ng/mL of ANGPTL3 protein, a significant reduction in ANGPTL3 protein levels relative to control groups (FIG. 6B). The control groups “MOCK” and C3 exhibited similar levels of ANGPTL3 protein ˜2.8 ng/ml (FIG. 6B) and ˜2.6 ng/mL (FIG. 6B), respectively. This study demonstrates that effective editing of the ANGPTL3 gene resulted in a functional reduction of secreted ANGPTL3 protein in primary hepatocytes.

[0471] To increase the detection window for ANGPTL3 protein knock down, co-cultured primary human hepatocytes were cultured and transfected with gRNA and Cas9.

[0472] Primary human hepatocytes (In Vitro ADMET Laboratories) were cultured in the presence of murine 3T3 fibroblasts isolated (S N Bhatia, U J Balis, M L Yarmush, M Toner. “Effect of cell-cell interactions in preservation of cellular phenotype:cocultivation of hepatocytes and nonparenchymal cells” The FASEB Journal 13(14), 1883-1900, SN Bhatia, ML Yarmush, M Toner. “Controlling cell interactions of micropatterning in co-cultures: hepatocytes and 3T3 fibroblasts” J. Biomedical Materials Research 34(2), 189-199) in a co-culture format in 24-well Collagen-Type I coated plates (Corning Biocoat Collagen I Multiwell Plates, Cat #356408) and incubated at 37° C. in 5% CO₂ in InVitroGRO Culture Plating Medium (BioreclamationIVT, Z990003). Hepatocyte co-cultures were transfected 24 hours post the initiation of the culture with a gRNA (Table 8) and Cas9 mRNA. Transfections of gRNA were performed using Lipofectamine MessengerMax, according to the manufacture's protocol, at a final gRNA amount of 200ng. Hepatocytes were also transfected with Lipofectamine MessengerMax. Cells received a medium change for fresh InVitroGRO culture medium at 6 hours post transfection gRNA-Lipofectamine complexes and at every 24 hours for a total duration of 10 days.

[0473] Co-culture primary hepatocytes transfected with Cas9 and T6 gRNA, or Cas9 and C3 gRNA, and ‘MOCK’ transfectants (control group) were analyzed by TIDE. TIDE analysis showed that ANGPTL3 was edited by T6 gRNA (InDel ˜60%) (FIG. 7A). Similarly, C3 gRNA efficiently edited the human C3 gene, with InDel frequency of ˜52% in the same human donor (FIG. 7A). These data demonstrate consistent editing profiles for primary human hepatocytes in mono-culture and co-culture formats.

[0474] A Sandwich Enzyme-Linked Immunosorbent Assay (ELISA) for Human ANGPTL3 protein (Human ANGPTL3 ELISA kit, R&D Systems, cat #DY3829) was used to detect concentrations of ANGPTL3 protein in supernatants collected from the gene-edited samples. The results show that supernatants from the primary hepatocytes having ˜60% efficiency in editing the ANGPTL3 gene by T6 gRNA contained ˜1 ng/mL of ANGPTL3 protein, a significant reduction in ANGPTL3 protein levels relative to control groups (FIG. 7B). The control groups “MOCK” and C3 exhibited similar levels of ANGPTL3 protein ˜29 ng/ml and ˜31 ng/mL, respectively. The co-cultured primary hepatocytes secreted 5-fold higher levels of ANGPTL3 protein as compared to monocultured hepatocytes and demonstrated that disruption of the ANGPTL3 gene resulted in robust reduction of secreted ANGPTL3 protein.

### Example 12—ANGPTL3 Protein Secretion in Gene-Edited Primary Monkey Hepatocytes

[0475] This example demonstrates the correlation between efficient gene-editing by T6 gRNA and reduction in secreted ANGPTL3 protein in primary monkey hepatocytes.

[0476] Primary monkey hepatocytes (In Vitro ADMET Laboratories) were plated in confluent monolayers in 24-well Collagen-Type I coated plates (Corning Biocoat Collagen I Multiwell Plates, cat #356408) at 0.35×10⁶ cells/well and incubated at 37° C. in 5% CO₂ in InVitroGRO Culture Plating Medium (BioreclamationIVT, Z990003). Hepatocyte monolayers were transfected 3-5 hours after plating with either ANGPTL3 T6 gRNA or PCSK9 gRNA (non-relevant gRNA that efficiently knocks out PCSK9 gene in the monkey genome but does not edit the ANGPTL3 gene) in complex with Cas9 mRNA. Transfections of gRNA were performed using Lipofectamine MessengerMax, according to the manufacture's protocol, at a final gRNA amount of 200ng. Hepatocytes were also transfected with Lipofectamine MessengerMax, without Cas9 mRNA and gRNA to generate “MOCK” samples. Cells received a medium change for fresh InVitroGRO culture medium at 16 hours post transfection. The samples were incubated with gRNA-lipofectamine complexes for 48h, at which time supernatants were collected for human ANGPTL3 protein analysis and cells were lysed in prepGEM (ZyGem), according to the manufacture's protocol.

[0477] Monkey hepatocytes transfected with Cas9 and T6 gRNA, T9 gRNA, or PCSK9 gRNA, and ‘MOCK’ transfectants (control group) were analyzed by TIDE. TIDE analysis showed that ANGPTL3 was edited by T6 gRNA (InDel ˜67%) and T9 gRNA (InDel ˜29%) (FIG. 5B). Similarly, PCSK9 gRNA efficiently edited the monkey PCSK9 gene, with InDel frequency of ˜41% in the same monkey donor (FIG. 5B).

[0478] A Sandwich Enzyme-Linked Immunosorbent Assay (ELISA) for Monkey ANGPTL3 protein (Monkey ANGPTL3 ELISA kit, LifeSpan Bio, cat #LS_F38518) was used to detect concentrations of ANGPTL3 protein in supernatants collected from the gene-edited samples. The results show that supernatants from the primary hepatocytes having ˜67% efficiency in editing the ANGPTL3 gene by T6 gRNA contained less than 1 ng/mL of ANGPTL3 protein, a significant reduction in ANGPTL3 protein levels relative to control groups (FIG. 8). The control groups “MOCK” and C3 exhibited similar levels of ANGPTL3 protein ˜3 ng/ml and ˜2.5 ng/mL, respectively. This study demonstrates that effective editing of the ANGPTL3 gene by the cross-reactive gRNA, T6, resulted in a functional reduction of secreted ANGPTL3 protein in primary monkey hepatocytes.

### Example 13—In Vivo Testing in Relevant Animal Model

[0479] After the CRISPR-Cas9/guide combinations have been assessed, the lead formulations will be tested in vivo in an animal model.

[0480] Cross-species ANGPTL3 gRNA combination that yields high efficiency of deletion in the ANGPTL3 gene in primary human hepatocytes, complexes of Cas9 mRNA and gRNA will be formulated into lipid nanoparticles for delivery.

[0481] Cynomolgus monkeys will be used as a large animal model as pre-clinical data has been acquired with both monoclonal antibody and antisense oligonucleotide therapies for ANGPTL3 inhibition. These therapies are currently completing Phase I/II clinical trials to assess the correlation between ANGPTL3 inhibition with reduction in triglycerides, LDL-cholesterol, and HDL-cholesterol in patients with familial hypercholesterolemia.

[0482] Lipid nanoparticles complexed with Cas9 mRNA and T6 gRNA will be infused into the monkeys and whole blood samples will be collected hourly within the first day post-dose and every third day over the span of 14 days. Pre-dose, baseline whole blood collections will also be made. A control group will include saline-infused animals.

[0483] Body weights will be monitored throughout the study and plasma and serum samples will be monitored for cytokines and complement activation (inflammatory response) and clinical lipid panels (Total cholesterol, HDL, LDL-C, and triglycerides). At the completion of the 14 days, liver tissue will be collected and assessed for gene-editing of the ANGPTL3 gene.

[0484] Liver tissue will be homogenized from both control and dosed animals and analyzed by TIDE analysis for evidence of effective ANGPTL3 gene-editing.

[0485] The outcomes of TIDE analysis and lipid chemistry over the course of the study will yield a correlation between InDel frequency and modification in cholesterol levels, with an emphasis in the reduction of the primary biological marker, LDL-C.

[0486] Culture in human cells also allows direct testing on the human target and the background human genome, as described above.

[0487] In addition, preclinical efficacy and safety evaluations can be observed through engraftment of modified mouse or human hepatocytes in a mouse model. The modified cells can be observed in the months after engraftment.

### Example 14—Testing of Preferred Guides in Cells for Off-Target Activity

[0488] The gRNAs having the best on-target activity from the IVT screen in the above example are tested for off-target activity using Hybrid capture assays, GUIDE Seq and whole genome sequencing, in addition to other methods.

### XI. Equivalents and Scope

[0489] Those skilled in the art will recognize, or be able to ascertain using no more than routine experimentation, many equivalents to the specific embodiments in accordance with the invention described herein. The scope of the present invention is not intended to be limited to the above Description, but rather is as set forth in the appended claims.

[0490] Claims or descriptions that include “or” between one or more members of a group are considered satisfied if one, more than one, or all of the group members are present in, employed in, or otherwise relevant to a given product or process unless indicated to the contrary or otherwise evident from the context. The disclosure includes embodiments in which exactly one member of the group is present in, employed in, or otherwise relevant to a given product or process. The disclosure includes embodiments in which more than one, or the entire group members are present in, employed in, or otherwise relevant to a given product or process.

[0491] In addition, it is to be understood that any particular embodiment of the present disclosure that falls within the prior art may be explicitly excluded from any one or more of the claims. Since such embodiments are deemed to be known to one of ordinary skill in the art, they may be excluded even if the exclusion is not set forth explicitly herein. Any particular embodiment of the compositions of the disclosure (e.g., any antibiotic, therapeutic or active ingredient; any method of production; any method of use; etc.) can be excluded from any one or more claims, for any reason, whether or not related to the existence of prior art.

[0492] It is to be understood that the words which have been used are words of description rather than limitation, and that changes may be made within the purview of the appended claims without departing from the true scope and spirit of the disclosure in its broader aspects.

[0493] While the present disclosure has been described at some length and with some particularity with respect to the several described embodiments, it is not intended that it should be limited to any such particulars or embodiments or any particular embodiment, but it is to be construed with references to the appended claims so as to provide the broadest possible interpretation of such claims in view of the prior art and, therefore, to effectively encompass the intended scope of the disclosure.

### Note Regarding Illustrative Examples

[0494] While the present disclosure provides descriptions of various specific aspects for the purpose of illustrating various aspects of the present disclosure and/or its potential applications, it is understood that variations and modifications will occur to those skilled in the art. Accordingly, the invention or inventions described herein should be understood to be at least as broad as they are claimed, and not as more narrowly defined by particular illustrative aspects provided herein.

[0495] Any patent, publication, or other disclosure material identified herein is incorporated by reference into this specification in its entirety unless otherwise indicated, but only to the extent that the incorporated material does not conflict with existing descriptions, definitions, statements, or other disclosure material expressly set forth in this specification. As such, and to the extent necessary, the express disclosure as set forth in this specification supersedes any conflicting material incorporated by reference. Any material, or portion thereof, that is said to be incorporated by reference into this specification, but which conflicts with existing definitions, statements, or other disclosure material set forth herein, is only incorporated to the extent that no conflict arises between that incorporated material and the existing disclosure material. Applicants reserve the right to amend this specification to expressly recite any subject matter, or portion thereof, incorporated by reference herein.

The application's sequence listing, which the Patent Office published only in electronic form, follows.

SEQUENCE LISTING (17071 sequences)

SEQ ID NO: 1 - protein, 1368 aa, Streptococcus pyogenes [sequence omitted]

SEQ ID NO: 2 - DNA, 4107 bp, Streptococcus pyogenes
  source 1..4107: mol_type = genomic DNA
atggataagaaatactcaataggcttagatatcggcacaaatagcgtcggatgggcggtgatcactgatgaatataaggttccgtctaaaaagttcaaggttctgggaaatacagaccgccacagtatcaaaaaaaatcttataggggctcttttatttgacagtggagagacagcggaagcgactcgtctcaaacggacagctcgtagaaggtatacacgtcggaagaatcgtatttgttatctacaggagattttttcaaatgagatggcgaaagtagatgatagtttctttcatcgacttgaagagtcttttttggtggaagaagacaagaagcatgaacgtcatcctatttttggaaatatagtagatgaagttgcttatcatgagaaatatccaactatctatcatctgcgaaaaaaattggtagattctactgataaagcggatttgcgcttaatctatttggccttagcgcatatgattaagtttcgtggtcattttttgattgagggagatttaaatcctgataatagtgatgtggacaaactatttatccagttggtacaaacctacaatcaattatttgaagaaaaccctattaacgcaagtggagtagatgctaaagcgattctttctgcacgattgagtaaatcaagacgattagaaaatctcattgctcagctccccggtgagaagaaaaatggcttatttgggaatctcattgctttgtcattgggtttgacccctaattttaaatcaaattttgatttggcagaagatgctaaattacagctttcaaaagatacttacgatgatgatttagataatttattggcgcaaattggagatcaatatgctgatttgtttttggcagctaagaatttatcagatgctattttactttcagatatcctaagagtaaatactgaaataactaaggctcccctatcagcttcaatgattaaacgctacgatgaacatcatcaagacttgactcttttaaaagctttagttcgacaacaacttccagaaaagtataaagaaatcttttttgatcaatcaaaaaacggatatgcaggttatattgatgggggagctagccaagaagaattttataaatttatcaaaccaattttagaaaaaatggatggtactgaggaattattggtgaaactaaatcgtgaagatttgctgcgcaagcaacggacctttgacaacggctctattccccatcaaattcacttgggtgagctgcatgctattttgagaagacaagaagacttttatccatttttaaaagacaatcgtgagaagattgaaaaaatcttgacttttcgaattccttattatgttggtccattggcgcgtggcaatagtcgttttgcatggatgactcggaagtctgaagaaacaattaccccatggaattttgaagaagttgtcgataaaggtgcttcagctcaatcatttattgaacgcatgacaaactttgataaaaatcttccaaatgaaaaagtactaccaaaacatagtttgctttatgagtattttacggtttataacgaattgacaaaggtcaaatatgttactgaaggaatgcgaaaaccagcatttctttcaggtgaacagaagaaagccattgttgatttactcttcaaaacaaatcgaaaagtaaccgttaagcaattaaaagaagattatttcaaaaaaatagaatgttttgatagtgttgaaatttcaggagttgaagatagatttaatgcttcattaggtacctaccatgatttgctaaaaattattaaagataaagattttttggataatgaagaaaatgaagatatcttagaggatattgttttaacattgaccttatttgaagatagggagatgattgaggaaagacttaaaacatatgctcacctctttgatgataaggtgatgaaacagcttaaacgtcgccgttatactggttggggacgtttgtctcgaaaattgattaatggtattagggataagcaatctggcaaaacaatattagattttttgaaatcagatggttttgccaatcgcaattttatgcagctgatccatgatgatagtttgacatttaaagaagacattcaaaaagcacaagtgtctggacaaggcgatagtttacatgaacatattgcaaatttagctggtagccctgctattaaaaaaggtattttacagactgtaaaagttgttgatgaattggtcaaagtaatggggcggcataagccagaaaatatcgttattgaaatggcacgtgaaaatcagacaactcaaaagggccagaaaaattcgcgagagcgtatgaaacgaatcgaagaaggtatcaaagaattaggaagtcagattcttaaagagcatcctgttgaaaatactcaattgcaaaatgaaaagctctatctctattatctccaaaatggaagagacatgtatgtggaccaagaattagatattaatcgtttaagtgattatgatgtcgatcacattgttccacaaagtttccttaaagacgattcaatagacaataaggtcttaacgcgttctgataaaaatcgtggtaaatcggataacgttccaagtgaagaagtagtcaaaaagatgaaaaactattggagacaacttctaaacgccaagttaatcactcaacgtaagtttgataatttaacgaaagctgaacgtggaggtttgagtgaacttgataaagctggttttatcaaacgccaattggttgaaactcgccaaatcactaagcatgtggcacaaattttggatagtcgcatgaatactaaatacgatgaaaatgataaacttattcgagaggttaaagtgattaccttaaaatctaaattagtttctgacttccgaaaagatttccaattctataaagtacgtgagattaacaattaccatcatgcccatgatgcgtatctaaatgccgtcgttggaactgctttgattaagaaatatccaaaacttgaatcggagtttgtctatggtgattataaagtttatgatgttcgtaaaatgattgctaagtctgagcaagaaataggcaaagcaaccgcaaaatatttcttttactctaatatcatgaacttcttcaaaacagaaattacacttgcaaatggagagattcgcaaacgccctctaatcgaaactaatggggaaactggagaaattgtctgggataaagggcgagattttgccacagtgcgcaaagtattgtccatgccccaagtcaatattgtcaagaaaacagaagtacagacaggcggattctccaaggagtcaattttaccaaaaagaaattcggacaagcttattgctcgtaaaaaagactgggatccaaaaaaatatggtggttttgatagtccaacggtagcttattcagtcctagtggttgctaaggtggaaaaagggaaatcgaagaagttaaaatccgttaaagagttactagggatcacaattatggaaagaagttcctttgaaaaaaatccgattgactttttagaagctaaaggatataaggaagttaaaaaagacttaatcattaaactacctaaatatagtctttttgagttagaaaacggtcgtaaacggatgctggctagtgccggagaattacaaaaaggaaatgagctggctctgccaagcaaatatgtgaattttttatatttagctagtcattatgaaaagttgaagggtagtccagaagataacgaacaaaaacaattgtttgtggagcagcataagcattatttagatgagattattgagcaaatcagtgaattttctaagcgtgttattttagcagatgccaatttagataaagttcttagtgcatataacaaacatagagacaaaccaatacgtgaacaagcagaaaatattattcatttatttacgttgacgaatcttggagctcccgctgcttttaaatattttgatacaacaattgatcgtaaacgatatacgtctacaaaagaagttttagatgccactcttatccatcaatccatcactggtctttatgaaacacgcattgatttgagtcagctaggaggtgactga

SEQ ID NO: 3 - DNA, 4107 bp, Streptococcus pyogenes
  source 1..4107: mol_type = genomic DNA
atggacaagaagtactccattgggctcgctatcggcacaaacagcgtcggctgggccgtcattacggacgagtacaaggtgccgagcaaaaaattcaaagttctgggcaataccgatcgccacagcataaagaagaacctcattggcgccctcctgttcgactccggggagacggccgaagccacgcggctcaaaagaacagcacggcgcagatatacccgcagaaagaatcggatctgctacctgcaggagatctttagtaatgagatggctaaggtggatgactctttcttccataggctggaggagtcctttttggtggaggaggataaaaagcacgagcgccacccaatctttggcaatatcgtggacgaggtggcgtaccatgaaaagtacccaaccatatatcatctgaggaagaagcttgtagacagtactgataaggctgacttgcggttgatctatctcgcgctggcgcatatgatcaaatttcggggacacttcctcatcgagggggacctgaacccagacaacagcgatgtcgacaaactctttatccaactggttcagacttacaatcagcttttcgaagagaacccgatcaacgcatccggagttgacgccaaagcaatcctgagcgctaggctgtccaaatcccggcggctcgaaaacctcatcgcacagctccctggggagaagaagaacggcctgtttggtaatcttatcgccctgtcactcgggctgacccccaactttaaatctaacttcgacctggccgaagatgccaagcttcaactgagcaaagacacctacgatgatgatctcgacaatctgctggcccagatcggcgaccagtacgcagacctttttttggcggcaaagaacctgtcagacgccattctgctgagtgatattctgcgagtgaacacggagatcaccaaagctccgctgagcgctagtatgatcaagcgctatgatgagcaccaccaagacttgactttgctgaaggcccttgtcagacagcaactgcctgagaagtacaaggaaattttcttcgatcagtctaaaaatggctacgccggatacattgacggcggagcaagccaggaggaattttacaaatttattaagcccatcttggaaaaaatggacggcaccgaggagctgctggtaaagcttaacagagaagatctgttgcgcaaacagcgcactttcgacaatggaagcatcccccaccagattcacctgggcgaactgcacgctatcctcaggcggcaagaggatttctacccctttttgaaagataacagggaaaagattgagaaaatcctcacatttcggataccctactatgtaggccccctcgcccggggaaattccagattcgcgtggatgactcgcaaatcagaagagaccatcactccctggaacttcgaggaagtcgtggataagggggcctctgcccagtccttcatcgaaaggatgactaactttgataaaaatctgcctaacgaaaaggtgcttcctaaacactctctgctgtacgagtacttcacagtttataacgagctcaccaaggtcaaatacgtcacagaagggatgagaaagccagcattcctgtctggagagcagaagaaagctatcgtggacctcctcttcaagacgaaccggaaagttaccgtgaaacagctcaaagaagactatttcaaaaagattgaatgtttcgactctgttgaaatcagcggagtggaggatcgcttcaacgcatccctgggaacgtatcacgatctcctgaaaatcattaaagacaaggacttcctggacaatgaggagaacgaggacattcttgaggacattgtcctcacccttacgttgtttgaagatagggagatgattgaagaacgcttgaaaacttacgctcatctcttcgacgacaaagtcatgaaacagctcaagaggcgccgatatacaggatgggggcggctgtcaagaaaactgatcaatgggatccgagacaagcagagtggaaagacaatcctggattttcttaagtccgatggatttgccaaccggaacttcatgcagttgatccatgatgactctctcacctttaaggaggacatccagaaagcacaagtttctggccagggggacagtcttcacgagcacatcgctaatcttgcaggtagcccagctatcaaaaagggaatactgcagaccgttaaggtcgtggatgaactcgtcaaagtaatgggaaggcataagcccgagaatatcgttatcgagatggcccgagagaaccaaactacccagaagggacagaagaacagtagggaaaggatgaagaggattgaagagggtataaaagaactggggtcccaaatccttaaggaacacccagttgaaaacacccagcttcagaatgagaagctctacctgtactacctgcagaacggcagggacatgtacgtggatcaggaactggacatcaatcggctctccgactacgacgtggctgctatcgtgccccagtcttttctcaaagatgattctattgataataaagtgttgacaagatccgataaagctagagggaagagtgataacgtcccctcagaagaagttgtcaagaaaatgaaaaattattggcggcagctgctgaacgccaaactgatcacacaacggaagttcgataatctgactaaggctgaacgaggtggcctgtctgagttggataaagccggcttcatcaaaaggcagcttgttgagacacgccagatcaccaagcacgtggcccaaattctcgattcacgcatgaacaccaagtacgatgaaaatgacaaactgattcgagaggtgaaagttattactctgaagtctaagctggtctcagatttcagaaaggactttcagttttataaggtgagagagatcaacaattaccaccatgcgcatgatgcctacctgaatgcagtggtaggcactgcacttatcaaaaaatatcccaagcttgaatctgaatttgtttacggagactataaagtgtacgatgttaggaaaatgatcgcaaagtctgagcaggaaataggcaaggccaccgctaagtacttcttttacagcaatattatgaattttttcaagaccgagattacactggccaatggagagattcggaagcgaccacttatcgaaacaaacggagaaacaggagaaatcgtgtgggacaagggtagggatttcgcgacagtccggaaggtcctgtccatgccgcaggtgaacatcgttaaaaagaccgaagtacagaccggaggcttctccaaggaaagtatcctcccgaaaaggaacagcgacaagctgatcgcacgcaaaaaagattgggaccccaagaaatacggcggattcgattctcctacagtcgcttacagtgtactggttgtggccaaagtggagaaagggaagtctaaaaaactcaaaagcgtcaaggaactgctgggcatcacaatcatggagcgatcaagcttcgaaaaaaaccccatcgactttctcgaggcgaaaggatataaagaggtcaaaaaagacctcatcattaagcttcccaagtactctctctttgagcttgaaaacggccggaaacgaatgctcgctagtgcgggcgagctgcagaaaggtaacgagctggcactgccctctaaatacgttaatttcttgtatctggccagccactatgaaaagctcaaagggtctcccgaagataatgagcagaagcagctgttcgtggaacaacacaaacactaccttgatgagatcatcgagcaaataagcgaattctccaaaagagtgatcctcgccgacgctaacctcgataaggtgctttctgcttacaataagcacagggataagcccatcagggagcaggcagaaaacattatccacttgtttactctgaccaacttgggcgcgcctgcagccttcaagtacttcgacaccaccatagacagaaagcggtacacctctacaaaggaggtcctggacgccacactgattcatcagtcaattacggggctctatgaaacaagaatcgacctctctcagctcggtggagactaa

SEQ ID NO: 4 - DNA, 4140 bp, Streptococcus pyogenes
  source 1..4140: mol_type = genomic DNA
atggacaagaagtactccattgggctcgatatcggcacaaacagcgtcggctgggccgtcattacggacgagtacaaggtgccgagcaaaaaattcaaagttctgggcaataccgatcgccacagcataaagaagaacctcattggcgccctcctgttcgactccggggagacggccgaagccacgcggctcaaaagaacagcacggcgcagatatacccgcagaaagaatcggatctgctacctgcaggagatctttagtaatgagatggctaaggtggatgactctttcttccataggctggaggagtcctttttggtggaggaggataaaaagcacgagcgccacccaatctttggcaatatcgtggacgaggtggcgtaccatgaaaagtacccaaccatatatcatctgaggaagaagcttgtagacagtactgataaggctgacttgcggttgatctatctcgcgctggcgcatatgatcaaatttcggggacacttcctcatcgagggggacctgaacccagacaacagcgatgtcgacaaactctttatccaactggttcagacttacaatcagcttttcgaagagaacccgatcaacgcatccggagttgacgccaaagcaatcctgagcgctaggctgtccaaatcccggcggctcgaaaacctcatcgcacagctccctggggagaagaagaacggcctgtttggtaatcttatcgccctgtcactcgggctgacccccaactttaaatctaacttcgacctggccgaagatgccaagcttcaactgagcaaagacacctacgatgatgatctcgacaatctgctggcccagatcggcgaccagtacgcagacctttttttggcggcaaagaacctgtcagacgccattctgctgagtgatattctgcgagtgaacacggagatcaccaaagctccgctgagcgctagtatgatcaagcgctatgatgagcaccaccaagacttgactttgctgaaggcccttgtcagacagcaactgcctgagaagtacaaggaaattttcttcgatcagtctaaaaatggctacgccggatacattgacggcggagcaagccaggaggaattttacaaatttattaagcccatcttggaaaaaatggacggcaccgaggagctgctggtaaagcttaacagagaagatctgttgcgcaaacagcgcactttcgacaatggaagcatcccccaccagattcacctgggcgaactgcacgctatcctcaggcggcaagaggatttctacccctttttgaaagataacagggaaaagattgagaaaatcctcacatttcggataccctactatgtaggccccctcgcccggggaaattccagattcgcgtggatgactcgcaaatcagaagagaccatcactccctggaacttcgaggaagtcgtggataagggggcctctgcccagtccttcatcgaaaggatgactaactttgataaaaatctgcctaacgaaaaggtgcttcctaaacactctctgctgtacgagtacttcacagtttataacgagctcaccaaggtcaaatacgtcacagaagggatgagaaagccagcattcctgtctggagagcagaagaaagctatcgtggacctcctcttcaagacgaaccggaaagttaccgtgaaacagctcaaagaagactatttcaaaaagattgaatgtttcgactctgttgaaatcagcggagtggaggatcgcttcaacgcatccctgggaacgtatcacgatctcctgaaaatcattaaagacaaggacttcctggacaatgaggagaacgaggacattcttgaggacattgtcctcacccttacgttgtttgaagatagggagatgattgaagaacgcttgaaaacttacgctcatctcttcgacgacaaagtcatgaaacagctcaagaggcgccgatatacaggatgggggcggctgtcaagaaaactgatcaatgggatccgagacaagcagagtggaaagacaatcctggattttcttaagtccgatggatttgccaaccggaacttcatgcagttgatccatgatgactctctcacctttaaggaggacatccagaaagcacaagtttctggccagggggacagtcttcacgagcacatcgctaatcttgcaggtagcccagctatcaaaaagggaatactgcagaccgttaaggtcgtggatgaactcgtcaaagtaatgggaaggcataagcccgagaatatcgttatcgagatggcccgagagaaccaaactacccagaagggacagaagaacagtagggaaaggatgaagaggattgaagagggtataaaagaactggggtcccaaatccttaaggaacacccagttgaaaacacccagcttcagaatgagaagctctacctgtactacctgcagaacggcagggacatgtacgtggatcaggaactggacatcaatcggctctccgactacgacgtggatcatatcgtgccccagtcttttctcaaagatgattctattgataataaagtgttgacaagatccgataaaaatagagggaagagtgataacgtcccctcagaagaagttgtcaagaaaatgaaaaattattggcggcagctgctgaacgccaaactgatcacacaacggaagttcgataatctgactaaggctgaacgaggtggcctgtctgagttggataaagccggcttcatcaaaaggcagcttgttgagacacgccagatcaccaagcacgtggcccaaattctcgattcacgcatgaacaccaagtacgatgaaaatgacaaactgattcgagaggtgaaagttattactctgaagtctaagctggtctcagatttcagaaaggactttcagttttataaggtgagagagatcaacaattaccaccatgcgcatgatgcctacctgaatgcagtggtaggcactgcacttatcaaaaaatatcccaagcttgaatctgaatttgtttacggagactataaagtgtacgatgttaggaaaatgatcgcaaagtctgagcaggaaataggcaaggccaccgctaagtacttcttttacagcaatattatgaattttttcaagaccgagattacactggccaatggagagattcggaagcgaccacttatcgaaacaaacggagaaacaggagaaatcgtgtgggacaagggtagggatttcgcgacagtccggaaggtcctgtccatgccgcaggtgaacatcgttaaaaagaccgaagtacagaccggaggcttctccaaggaaagtatcctcccgaaaaggaacagcgacaagctgatcgcacgcaaaaaagattgggaccccaagaaatacggcggattcgattctcctacagtcgcttacagtgtactggttgtggccaaagtggagaaagggaagtctaaaaaactcaaaagcgtcaaggaactgctgggcatcacaatcatggagcgatcaagcttcgaaaaaaaccccatcgactttctcgaggcgaaaggatataaagaggtcaaaaaagacctcatcattaagcttcccaagtactctctctttgagcttgaaaacggccggaaacgaatgctcgctagtgcgggcgagctgcagaaaggtaacgagctggcactgccctctaaatacgttaatttcttgtatctggccagccactatgaaaagctcaaagggtctcccgaagataatgagcagaagcagctgttcgtggaacaacacaaacactaccttgatgagatcatcgagcaaataagcgaattctccaaaagagtgatcctcgccgacgctaacctcgataaggtgctttctgcttacaataagcacagggataagcccatcagggagcaggcagaaaacattatccacttgtttactctgaccaacttgggcgcgcctgcagccttcaagtacttcgacaccaccatagacagaaagcggtacacctctacaaaggaggtcctggacgccacactgattcatcagtcaattacggggctctatgaaacaagaatcgacctctctcagctcggtggagacagcagggctgaccccaagaagaagaggaaggtgtga

SEQ ID NO: 5 - DNA, 4200 bp, Streptococcus pyogenes
  source 1..4200: mol_type = genomic DNA
atggacaagaagtactccattgggctcgatatcggcacaaacagcgtcggctgggccgtcattacggacgagtacaaggtgccgagcaaaaaattcaaagttctgggcaataccgatcgccacagcataaagaagaacctcattggcgccctcctgttcgactccggggagacggccgaagccacgcggctcaaaagaacagcacggcgcagatatacccgcagaaagaatcggatctgctacctgcaggagatctttagtaatgagatggctaaggtggatgactctttcttccataggctggaggagtcctttttggtggaggaggataaaaagcacgagcgccacccaatctttggcaatatcgtggacgaggtggcgtaccatgaaaagtacccaaccatatatcatctgaggaagaagcttgtagacagtactgataaggctgacttgcggttgatctatctcgcgctggcgcatatgatcaaatttcggggacacttcctcatcgagggggacctgaacccagacaacagcgatgtcgacaaactctttatccaactggttcagacttacaatcagcttttcgaagagaacccgatcaacgcatccggagttgacgccaaagcaatcctgagcgctaggctgtccaaatcccggcggctcgaaaacctcatcgcacagctccctggggagaagaagaacggcctgtttggtaatcttatcgccctgtcactcgggctgacccccaactttaaatctaacttcgacctggccgaagatgccaagcttcaactgagcaaagacacctacgatgatgatctcgacaatctgctggcccagatcggcgaccagtacgcagacctttttttggcggcaaagaacctgtcagacgccattctgctgagtgatattctgcgagtgaacacggagatcaccaaagctccgctgagcgctagtatgatcaagcgctatgatgagcaccaccaagacttgactttgctgaaggcccttgtcagacagcaactgcctgagaagtacaaggaaattttcttcgatcagtctaaaaatggctacgccggatacattgacggcggagcaagccaggaggaattttacaaatttattaagcccatcttggaaaaaatggacggcaccgaggagctgctggtaaagcttaacagagaagatctgttgcgcaaacagcgcactttcgacaatggaagcatcccccaccagattcacctgggcgaactgcacgctatcctcaggcggcaagaggatttctacccctttttgaaagataacagggaaaagattgagaaaatcctcacatttcggataccctactatgtaggccccctcgcccggggaaattccagattcgcgtggatgactcgcaaatcagaagagaccatcactccctggaacttcgaggaagtcgtggataagggggcctctgcccagtccttcatcgaaaggatgactaactttgataaaaatctgcctaacgaaaaggtgcttcctaaacactctctgctgtacgagtacttcacagtttataacgagctcaccaaggtcaaatacgtcacagaagggatgagaaagccagcattcctgtctggagagcagaagaaagctatcgtggacctcctcttcaagacgaaccggaaagttaccgtgaaacagctcaaagaagactatttcaaaaagattgaatgtttcgactctgttgaaatcagcggagtggaggatcgcttcaacgcatccctgggaacgtatcacgatctcctgaaaatcattaaagacaaggacttcctggacaatgaggagaacgaggacattcttgaggacattgtcctcacccttacgttgtttgaagatagggagatgattgaagaacgcttgaaaacttacgctcatctcttcgacgacaaagtcatgaaacagctcaagaggcgccgatatacaggatgggggcggctgtcaagaaaactgatcaatgggatccgagacaagcagagtggaaagacaatcctggattttcttaagtccgatggatttgccaaccggaacttcatgcagttgatccatgatgactctctcacctttaaggaggacatccagaaagcacaagtttctggccagggggacagtcttcacgagcacatcgctaatcttgcaggtagcccagctatcaaaaagggaatactgcagaccgttaaggtcgtggatgaactcgtcaaagtaatgggaaggcataagcccgagaatatcgttatcgagatggcccgagagaaccaaactacccagaagggacagaagaacagtagggaaaggatgaagaggattgaagagggtataaaagaactggggtcccaaatccttaaggaacacccagttgaaaacacccagcttcagaatgagaagctctacctgtactacctgcagaacggcagggacatgtacgtggatcaggaactggacatcaatcggctctccgactacgacgtggatcatatcgtgccccagtcttttctcaaagatgattctattgataataaagtgttgacaagatccgataaaaatagagggaagagtgataacgtcccctcagaagaagttgtcaagaaaatgaaaaattattggcggcagctgctgaacgccaaactgatcacacaacggaagttcgataatctgactaaggctgaacgaggtggcctgtctgagttggataaagccggcttcatcaaaaggcagcttgttgagacacgccagatcaccaagcacgtggcccaaattctcgattcacgcatgaacaccaagtacgatgaaaatgacaaactgattcgagaggtgaaagttattactctgaagtctaagctggtctcagatttcagaaaggactttcagttttataaggtgagagagatcaacaattaccaccatgcgcatgatgcctacctgaatgcagtggtaggcactgcacttatcaaaaaatatcccaagcttgaatctgaatttgtttacggagactataaagtgtacgatgttaggaaaatgatcgcaaagtctgagcaggaaataggcaaggccaccgctaagtacttcttttacagcaatattatgaattttttcaagaccgagattacactggccaatggagagattcggaagcgaccacttatcgaaacaaacggagaaacaggagaaatcgtgtgggacaagggtagggatttcgcgacagtccggaaggtcctgtccatgccgcaggtgaacatcgttaaaaagaccgaagtacagaccggaggcttctccaaggaaagtatcctcccgaaaaggaacagcgacaagctgatcgcacgcaaaaaagattgggaccccaagaaatacggcggattcgattctcctacagtcgcttacagtgtactggttgtggccaaagtggagaaagggaagtctaaaaaactcaaaagcgtcaaggaactgctgggcatcacaatcatggagcgatcaagcttcgaaaaaaaccccatcgactttctcgaggcgaaaggatataaagaggtcaaaaaagacctcatcattaagcttcccaagtactctctctttgagcttgaaaacggccggaaacgaatgctcgctagtgcgggcgagctgcagaaaggtaacgagctggcactgccctctaaatacgttaatttcttgtatctggccagccactatgaaaagctcaaagggtctcccgaagataatgagcagaagcagctgttcgtggaacaacacaaacactaccttgatgagatcatcgagcaaataagcgaattctccaaaagagtgatcctcgccgacgctaacctcgataaggtgctttctgcttacaataagcacagggataagcccatcagggagcaggcagaaaacattatccacttgtttactctgaccaacttgggcgcgcctgcagccttcaagtacttcgacaccaccatagacagaaagcggtacacctctacaaaggaggtcctggacgccacactgattcatcagtcaattacggggctctatgaaacaagaatcgacctctctcagctcggtggagacgcggccgcagatccaaaaaagaagagaaaggtagatccaaaaaagaagagaaaggtagatccaaaaaagaagagaaaggtagatacggccgcatag

SEQ ID NO: 6 - DNA, 4326 bp, Streptococcus pyogenes
  source 1..4326: mol_type = genomic DNA
atggacaagaagtactccattgggctcgctatcggcacaaacagcgtcggctgggccgtcattacggacgagtacaaggtgccgagcaaaaaattcaaagttctgggcaataccgatcgccacagcataaagaagaacctcattggcgccctcctgttcgactccggggagacggccgaagccacgcggctcaaaagaacagcacggcgcagatatacccgcagaaagaatcggatctgctacctgcaggagatctttagtaatgagatggctaaggtggatgactctttcttccataggctggaggagtcctttttggtggaggaggataaaaagcacgagcgccacccaatctttggcaatatcgtggacgaggtggcgtaccatgaaaagtacccaaccatatatcatctgaggaagaagcttgtagacagtactgataaggctgacttgcggttgatctatctcgcgctggcgcatatgatcaaatttcggggacacttcctcatcgagggggacctgaacccagacaacagcgatgtcgacaaactctttatccaactggttcagacttacaatcagcttttcgaagagaacccgatcaacgcatccggagttgacgccaaagcaatcctgagcgctaggctgtccaaatcccggcggctcgaaaacctcatcgcacagctccctggggagaagaagaacggcctgtttggtaatcttatcgccctgtcactcgggctgacccccaactttaaatctaacttcgacctggccgaagatgccaagcttcaactgagcaaagacacctacgatgatgatctcgacaatctgctggcccagatcggcgaccagtacgcagacctttttttggcggcaaagaacctgtcagacgccattctgctgagtgatattctgcgagtgaacacggagatcaccaaagctccgctgagcgctagtatgatcaagcgctatgatgagcaccaccaagacttgactttgctgaaggcccttgtcagacagcaactgcctgagaagtacaaggaaattttcttcgatcagtctaaaaatggctacgccggatacattgacggcggagcaagccaggaggaattttacaaatttattaagcccatcttggaaaaaatggacggcaccgaggagctgctggtaaagcttaacagagaagatctgttgcgcaaacagcgcactttcgacaatggaagcatcccccaccagattcacctgggcgaactgcacgctatcctcaggcggcaagaggatttctacccctttttgaaagataacagggaaaagattgagaaaatcctcacatttcggataccctactatgtaggccccctcgcccggggaaattccagattcgcgtggatgactcgcaaatcagaagagaccatcactccctggaacttcgaggaagtcgtggataagggggcctctgcccagtccttcatcgaaaggatgactaactttgataaaaatctgcctaacgaaaaggtgcttcctaaacactctctgctgtacgagtacttcacagtttataacgagctcaccaaggtcaaatacgtcacagaagggatgagaaagccagcattcctgtctggagagcagaagaaagctatcgtggacctcctcttcaagacgaaccggaaagttaccgtgaaacagctcaaagaagactatttcaaaaagattgaatgtttcgactctgttgaaatcagcggagtggaggatcgcttcaacgcatccctgggaacgtatcacgatctcctgaaaatcattaaagacaaggacttcctggacaatgaggagaacgaggacattcttgaggacattgtcctcacccttacgttgtttgaagatagggagatgattgaagaacgcttgaaaacttacgctcatctcttcgacgacaaagtcatgaaacagctcaagaggcgccgatatacaggatgggggcggctgtcaagaaaactgatcaatgggatccgagacaagcagagtggaaagacaatcctggattttcttaagtccgatggatttgccaaccggaacttcatgcagttgatccatgatgactctctcacctttaaggaggacatccagaaagcacaagtttctggccagggggacagtcttcacgagcacatcgctaatcttgcaggtagcccagctatcaaaaagggaatactgcagaccgttaaggtcgtggatgaactcgtcaaagtaatgggaaggcataagcccgagaatatcgttatcgagatggcccgagagaaccaaactacccagaagggacagaagaacagtagggaaaggatgaagaggattgaagagggtataaaagaactggggtcccaaatccttaaggaacacccagttgaaaacacccagcttcagaatgagaagctctacctgtactacctgcagaacggcagggacatgtacgtggatcaggaactggacatcaatcggctctccgactacgacgtggctgctatcgtgccccagtcttttctcaaagatgattctattgataataaagtgttgacaagatccgataaagctagagggaagagtgataacgtcccctcagaagaagttgtcaagaaaatgaaaaattattggcggcagctgctgaacgccaaactgatcacacaacggaagttcgataatctgactaaggctgaacgaggtggcctgtctgagttggataaagccggcttcatcaaaaggcagcttgttgagacacgccagatcaccaagcacgtggcccaaattctcgattcacgcatgaacaccaagtacgatgaaaatgacaaactgattcgagaggtgaaagttattactctgaagtctaagctggtctcagatttcagaaaggactttcagttttataaggtgagagagatcaacaattaccaccatgcgcatgatgcctacctgaatgcagtggtaggcactgcacttatcaaaaaatatcccaagcttgaatctgaatttgtttacggagactataaagtgtacgatgttaggaaaatgatcgcaaagtctgagcaggaaataggcaaggccaccgctaagtacttcttttacagcaatattatgaattttttcaagaccgagattacactggccaatggagagattcggaagcgaccacttatcgaaacaaacggagaaacaggagaaatcgtgtgggacaagggtagggatttcgcgacagtccggaaggtcctgtccatgccgcaggtgaacatcgttaaaaagaccgaagtacagaccggaggcttctccaaggaaagtatcctcccgaaaaggaacagcgacaagctgatcgcacgcaaaaaagattgggaccccaagaaatacggcggattcgattctcctacagtcgcttacagtgtactggttgtggccaaagtggagaaagggaagtctaaaaaactcaaaagcgtcaaggaactgctgggcatcacaatcatggagcgatcaagcttcgaaaaaaaccccatcgactttctcgaggcgaaaggatataaagaggtcaaaaaagacctcatcattaagcttcccaagtactctctctttgagcttgaaaacggccggaaacgaatgctcgctagtgcgggcgagctgcagaaaggtaacgagctggcactgccctctaaatacgttaatttcttgtatctggccagccactatgaaaagctcaaagggtctcccgaagataatgagcagaagcagctgttcgtggaacaacacaaacactaccttgatgagatcatcgagcaaataagcgaattctccaaaagagtgatcctcgccgacgctaacctcgataaggtgctttctgcttacaataagcacagggataagcccatcagggagcaggcagaaaacattatccacttgtttactctgaccaacttgggcgcgcctgcagccttcaagtacttcgacaccaccatagacagaaagcggtacacctctacaaaggaggtcctggacgccacactgattcatcagtcaattacggggctctatgaaacaagaatcgacctctctcagctcggtggagacagcagggctgaccccaagaagaagaggaaggtggaggccagcggttccggacgggctgacgcattggacgattttgatctggatatgctgggaagtgacgccctcgatgattttgaccttgacatgcttggttcggatgcccttgatgactttgacctcgacatgctcggcagtgacgcccttgatgatttcgacctggacatgctgattaactctagatga

SEQ ID NO: 7 - DNA, 4359 bp, Streptococcus pyogenes
  source 1..4359: mol_type = genomic DNA
atgcccaagaagaagaggaaggtgggaagggggatggacaagaagtactccattgggctcgctatcggcacaaacagcgtcggctgggccgtcattacggacgagtacaaggtgccgagcaaaaaattcaaagttctgggcaataccgatcgccacagcataaagaagaacctcattggcgccctcctgttcgactccggggagacggccgaagccacgcggctcaaaagaacagcacggcgcagatatacccgcagaaagaatcggatctgctacctgcaggagatctttagtaatgagatggctaaggtggatgactctttcttccataggctggaggagtcctttttggtggaggaggataaaaagcacgagcgccacccaatctttggcaatatcgtggacgaggtggcgtaccatgaaaagtacccaaccatatatcatctgaggaagaagcttgtagacagtactgataaggctgacttgcggttgatctatctcgcgctggcgcatatgatcaaatttcggggacacttcctcatcgagggggacctgaacccagacaacagcgatgtcgacaaactctttatccaactggttcagacttacaatcagcttttcgaagagaacccgatcaacgcatccggagttgacgccaaagcaatcctgagcgctaggctgtccaaatcccggcggctcgaaaacctcatcgcacagctccctggggagaagaagaacggcctgtttggtaatcttatcgccctgtcactcgggctgacccccaactttaaatctaacttcgacctggccgaagatgccaagcttcaactgagcaaagacacctacgatgatgatctcgacaatctgctggcccagatcggcgaccagtacgcagacctttttttggcggcaaagaacctgtcagacgccattctgctgagtgatattctgcgagtgaacacggagatcaccaaagctccgctgagcgctagtatgatcaagcgctatgatgagcaccaccaagacttgactttgctgaaggcccttgtcagacagcaactgcctgagaagtacaaggaaattttcttcgatcagtctaaaaatggctacgccggatacattgacggcggagcaagccaggaggaattttacaaatttattaagcccatcttggaaaaaatggacggcaccgaggagctgctggtaaagcttaacagagaagatctgttgcgcaaacagcgcactttcgacaatggaagcatcccccaccagattcacctgggcgaactgcacgctatcctcaggcggcaagaggatttctacccctttttgaaagataacagggaaaagattgagaaaatcctcacatttcggataccctactatgtaggccccctcgcccggggaaattccagattcgcgtggatgactcgcaaatcagaagagaccatcactccctggaacttcgaggaagtcgtggataagggggcctctgcccagtccttcatcgaaaggatgactaactttgataaaaatctgcctaacgaaaaggtgcttcctaaacactctctgctgtacgagtacttcacagtttataacgagctcaccaaggtcaaatacgtcacagaagggatgagaaagccagcattcctgtctggagagcagaagaaagctatcgtggacctcctcttcaagacgaaccggaaagttaccgtgaaacagctcaaagaagactatttcaaaaagattgaatgtttcgactctgttgaaatcagcggagtggaggatcgcttcaacgcatccctgggaacgtatcacgatctcctgaaaatcattaaagacaaggacttcctggacaatgaggagaacgaggacattcttgaggacattgtcctcacccttacgttgtttgaagatagggagatgattgaagaacgcttgaaaacttacgctcatctcttcgacgacaaagtcatgaaacagctcaagaggcgccgatatacaggatgggggcggctgtcaagaaaactgatcaatgggatccgagacaagcagagtggaaagacaatcctggattttcttaagtccgatggatttgccaaccggaacttcatgcagttgatccatgatgactctctcacctttaaggaggacatccagaaagcacaagtttctggccagggggacagtcttcacgagcacatcgctaatcttgcaggtagcccagctatcaaaaagggaatactgcagaccgttaaggtcgtggatgaactcgtcaaagtaatgggaaggcataagcccgagaatatcgttatcgagatggcccgagagaaccaaactacccagaagggacagaagaacagtagggaaaggatgaagaggattgaagagggtataaaagaactggggtcccaaatccttaaggaacacccagttgaaaacacccagcttcagaatgagaagctctacctgtactacctgcagaacggcagggacatgtacgtggatcaggaactggacatcaatcggctctccgactacgacgtggctgctatcgtgccccagtcttttctcaaagatgattctattgataataaagtgttgacaagatccgataaagctagagggaagagtgataacgtcccctcagaagaagttgtcaagaaaatgaaaaattattggcggcagctgctgaacgccaaactgatcacacaacggaagttcgataatctgactaaggctgaacgaggtggcctgtctgagttggataaagccggcttcatcaaaaggcagcttgttgagacacgccagatcaccaagcacgtggcccaaattctcgattcacgcatgaacaccaagtacgatgaaaatgacaaactgattcgagaggtgaaagttattactctgaagtctaagctggtctcagatttcagaaaggactttcagttttataaggtgagagagatcaacaattaccaccatgcgcatgatgcctacctgaatgcagtggtaggcactgcacttatcaaaaaatatcccaagcttgaatctgaatttgtttacggagactataaagtgtacgatgttaggaaaatgatcgcaaagtctgagcaggaaataggcaaggccaccgctaagtacttcttttacagcaatattatgaattttttcaagaccgagattacactggccaatggagagattcggaagcgaccacttatcgaaacaaacggagaaacaggagaaatcgtgtgggacaagggtagggatttcgcgacagtccggaaggtcctgtccatgccgcaggtgaacatcgttaaaaagaccgaagtacagaccggaggcttctccaaggaaagtatcctcccgaaaaggaacagcgacaagctgatcgcacgcaaaaaagattgggaccccaagaaatacggcggattcgattctcctacagtcgcttacagtgtactggttgtggccaaagtggagaaagggaagtctaaaaaactcaaaagcgtcaaggaactgctgggcatcacaatcatggagcgatcaagcttcgaaaaaaaccccatcgactttctcgaggcgaaaggatataaagaggtcaaaaaagacctcatcattaagcttcccaagtactctctctttgagcttgaaaacggccggaaacgaatgctcgctagtgcgggcgagctgcagaaaggtaacgagctggcactgccctctaaatacgttaatttcttgtatctggccagccactatgaaaagctcaaagggtctcccgaagataatgagcagaagcagctgttcgtggaacaacacaaacactaccttgatgagatcatcgagcaaataagcgaattctccaaaagagtgatcctcgccgacgctaacctcgataaggtgctttctgcttacaataagcacagggataagcccatcagggagcaggcagaaaacattatccacttgtttactctgaccaacttgggcgcgcctgcagccttcaagtacttcgacaccaccatagacagaaagcggtacacctctacaaaggaggtcctggacgccacactgattcatcagtcaattacggggctctatgaaacaagaatcgacctctctcagctcggtggagacagcagggctgaccccaagaagaagaggaaggtggaggccagcggttccggacgggctgacgcattggacgattttgatctggatatgctgggaagtgacgccctcgatgattttgaccttgacatgcttggttcggatgcccttgatgactttgacctcgacatgctcggcagtgacgcccttgatgatttcgacctggacatgctgattaactctagatga

SEQ ID NO: 8 - protein, 1409 aa, Streptococcus thermophilus
MLFNKCIIISINLDFSNKEKCMTKPYSIGLDIGTNSVGWAVITDNYKVPSKKMKVLGNTSKKYIKKNLLGVLLFDSGITAEGRRLKRTARRRYTRRRNRILYLQEIFSTEMATLDDAFFQRLDDSFLVPDDKRDSKYPIFGNLVEEKVYHDEFPTIYHLRKYLADSTKKADLRLVYLALAHMIKYRGHFLIEGEFNSKNNDIQKNFQDFLDTYNAIFESDLSLENSKQLEEIVKDKISKLEKKDRILKLFPGEKNSGIFSEFLKLIVGNQADFRKCFNLDEKASLHFSKESYDEDLETLLGYIGDDYSDVFLKAKKLYDAILLSGFLTVTDNETEAPLSSAMIKRYNEHKEDLALLKEYIRNISLKTYNEVFKDDTKNGYAGYIDGKTNQEDFYVYLKNLLAEFEGADYFLEKIDREDFLRKQRTFDNGSIPYQIHLQEMRAILDKQAKFYPFLAKNKERIEKILTFRIPYYVGPLARGNSDFAWSIRKRNEKITPWNFEDVIDKESSAEAFINRMTSFDLYLPEEKVLPKHSLLYETFNVYNELTKVRFIAESMRDYQFLDSKQKKDIVRLYFKDKRKVTDKDIIEYLHAIYGYDGIELKGIEKQFNSSLSTYHDLLNIINDKEFLDDSSNEAIIEEIIHTLTIFEDREMIKQRLSKFENIFDKSVLKKLSRRHYTGWGKLSAKLINGIRDEKSGNTILDYLIDDGISNRNFMQLIHDDALSFKKKIQKAQIIGDEDKGNIKEVVKSLPGSPAIKKGILQSIKIVDELVKVMGGRKPESIVVEMARENQYTNQGKSNSQQRLKRLEKSLKELGSKILKENIPAKLSKIDNNALQNDRLYLYYLQNGKDMYTGDDLDIDRLSNYDIDHIIPQAFLKDNSIDNKVLVSSASNRGKSDDFPSLEVVKKRKTFWYQLLKSKLISQRKFDNLTKAERGGLLPEDKAGFIQRQLVETRQITKHVARLLDEKFNNKKDENNRAVRTVKIITLKSTLVSQFRKDFELYKVREINDFHHAHDAYLNAVIASALLKKYPKLEPEFVYGDYPKYNSFRERKSATEKVYFYSNIMNIFKKSISLADGRVIERPLIEVNEETGESVWNKESDLATVRRVLSYPQVNVVKKVEEQNHGLDRGKPKGLFNANLSSKPKPNSNENLVGAKEYLDPKKYGGYAGISNSFAVLVKGTIEKGAKKKITNVLEFQGISILDRINYRKDKLNFLLEKGYKDIELIIELPKYSLFELSDGSRRMLASILSTNNKRGEIHKGNQIFLSQKFVKLLYHAKRISNTINENHRKYVENHKKEFEELFYYILEFNENYVGAKKNGKLLNSAFQSWQNHSIDELCSSFIGPTGSERKGLFELTSRGSAADFEFLGVKIPRYRDYTPSSLLKDATLIHQSVTGLYETRIDLAKLGEG

SEQ ID NO: 9 - DNA, 4167 bp, Streptococcus thermophilus
  source 1..4167: mol_type = genomic DNA
atgactaagccatactcaattggacttgatattggaacgaatagtgttggatgggctgtaataactgataattacaaggttccgtctaaaaaaatgaaagtcttaggaaatacgagtaaaaagtatatcaaaaagaacctgttaggtgtattactctttgactctggaatcacagcagaaggaagaagattgaagcgtactgcaagaagacgttatactagacgccgtaatcgtatcctttatttgcaggaaatttttagcacggagatggctacattagatgatgctttctttcaaagacttgacgattcgtttttagttcctgatgataaacgtgatagtaagtatccgatatttggaaacttagtagaagaaaaagtctatcatgatgaatttccaactatctatcatttaaggaaatatttagcagatagtactaaaaaagcagatttgcgtctagtttatcttgcattggctcatatgattaaatatagaggtcacttcttaattgaaggagagtttaattcaaaaaataatgatattcagaagaattttcaagactttttggacacttataatgctatttttgaatcggatttatcacttgagaatagtaaacaacttgaggaaattgttaaagataagattagtaaattagaaaagaaagatcgtattttaaaactcttccctggggagaagaattcggggattttttcagagtttctaaagttgattgtaggaaatcaagctgattttaggaaatgttttaatttagacgaaaaagcctccttacatttttccaaagaaagctatgatgaagatttagagactttgttaggttatattggagatgattacagtgatgtctttctcaaagcaaagaaactttatgatgctattcttttatcgggttttctgactgtaactgataatgagacagaagcacctctctcttctgctatgataaagcgatataatgaacacaaagaagatttagcgttactaaaggaatatataagaaatatttcactaaaaacgtataatgaagtatttaaagatgacaccaaaaatggttatgctggttatattgatggaaaaacaaatcaggaagatttctacgtatatctaaaaaacctattggctgaatttgaaggtgcggattattttcttgaaaaaattgatcgagaagattttttgagaaagcaacgtacatttgacaatggttcgataccatatcagattcatcttcaagaaatgagagcaattcttgataagcaagctaaattttatcctttcttggctaaaaataaagaaagaatcgagaagattttaaccttccgaattccttattatgtaggtccacttgcgagagggaatagtgattttgcctggtcaataagaaaacgaaatgaaaaaattacaccttggaattttgaggacgttattgacaaagaatcttcggcagaggctttcattaatcgaatgactagttttgatttgtatttgccagaagagaaggtacttccaaagcatagtctcttatacgaaacttttaatgtatataatgaattaacaaaagttagatttattgccgaaagtatgagagattatcaatttttagatagtaagcagaagaaagatattgttagactttattttaaagataaaaggaaagttactgataaggatattattgaatatttacatgcaatttatgggtatgatggaattgaattaaaaggcatagagaaacagtttaattctagtttatctacttatcacgatcttttaaatattattaatgataaagagtttttggatgatagttcaaatgaagcgattatcgaagaaattatccatactttgacaatttttgaagatagagagatgataaaacaacgtctttcaaaatttgagaatatattcgataaatccgttttgaaaaagttatctcgtagacattacactggctggggtaagttatctgctaagcttattaatggtattcgagatgaaaaatctggtaatactattcttgattacttaattgatgatggtatttctaaccgtaatttcatgcaacttattcacgatgatgctctttcttttaaaaagaagatacagaaagcacaaattattggtgacgaagataaaggtaatattaaagaggtcgttaagtctttgccaggtagtcctgcgattaaaaaaggtattttacaaagcataaaaattgtagatgaattggtcaaagtaatgggaggaagaaaacccgagtcaattgttgttgagatggctcgtgaaaatcaatataccaatcaaggtaagtctaattcccaacaacgcttgaaacgtttagaaaaatctctcaaagagttaggtagtaagatacttaaggaaaatattcctgcaaaactttctaaaatagacaataacgcacttcaaaatgatcgactttacttatactatcttcaaaatggaaaagatatgtataccggagatgatttagatattgatagattaagtaattatgatattgatcatattattcctcaagcttttttgaaagataattctattgacaataaagtacttgtttcatctgctagtaaccgtggtaaatcagatgattttccaagtttagaggttgtcaaaaaaagaaagacattttggtatcaattattgaaatcaaaattaatttctcaacgaaaatttgataatctgacaaaagctgaacggggaggattgttacctgaggacaaagctggttttattcaacgccagttggttgaaacacgtcaaataacaaaacatgtagctcgtttacttgatgagaaatttaataataaaaaagatgaaaataatagagcggtacgaacagtaaaaattattaccttgaaatctaccttagtttctcaatttcgtaaggattttgaactttataaagttcgtgaaatcaatgattttcatcatgctcatgatgcttacttgaatgccgttatagcaagtgctttacttaagaaataccctaaactagagccagaatttgtgtacggtgattatccaaaatacaatagttttagagaaagaaagtccgctacagaaaaggtatatttctattcaaatatcatgaatatctttaaaaaatctatttctttagctgatggtagagttattgaaagaccacttattgaggtaaatgaggagaccggcgaatccgtttggaataaagaatctgatttagcaactgtaaggagagtactctcttatccgcaagtaaatgttgtgaaaaaagttgaggaacagaatcacggattggatagaggaaaaccaaagggattgtttaatgcaaatctttcctcaaagccaaaaccaaatagtaatgaaaatttagtaggtgctaaagagtatcttgaccccaaaaagtatggggggtatgctggaatttctaattcttttgctgttcttgttaaagggacaattgaaaaaggtgctaagaaaaaaataacaaatgtactagaatttcaaggtatttctattttagataggattaattatagaaaagataaacttaattttttacttgaaaaaggttataaagatattgagttaattattgaactacctaaatatagtttatttgaactttcagatggttcacgtcgtatgttggctagtattttgtcaacgaataataagaggggagagattcacaaaggaaatcagatttttctttcacagaagtttgtgaaattactttatcatgctaagagaataagtaacacaattaatgagaatcatagaaaatatgttgagaaccataaaaaagagtttgaagaattattttactacattcttgagtttaatgagaattatgttggagctaaaaagaatggtaaacttttaaactctgcctttcaatcttggcaaaatcatagtatagatgaactctgtagtagttttataggacctaccggaagtgaaagaaaggggctatttgaattaacctctcgtggaagtgctgctgattttgaatttttaggtgttaaaattccaaggtatagagactataccccatcatccctattaaaagatgccacacttattcatcaatctgttacaggcctctatgaaacacgaatagaccttgccaaactaggagagggttaa

SEQ ID NO: 10 - DNA, 3366 bp, Streptococcus thermophilus
  source 1..3366: mol_type = genomic DNA
atgagcgacctggtgctgggcctggacatcggcatcggcagcgtgggcgtgggcatcctgaacaaggtgaccggcgagatcatccacaagaacagtcgcatcttccctgctgctcaggctgagaacaacctggtgcgccgcaccaaccgccagggtcgccggcttgctcgccgcaagaagcaccggcgcgtgcgcctgaaccgcctgttcgaggagagcggcctgatcaccgacttcaccaagatcagcatcaacctgaacccctaccagctgcgcgtgaagggcctgaccgacgagctgagcaacgaggagctgttcatcgccctgaagaacatggtgaagcaccgcggcatcagctacctggacgacgccagcgacgacggcaacagcagcgtgggcgactacgcccagatcgtgaaggagaacagcaagcagctggagaccaagacccccggccagatccagctggagcgctaccagacctacggccagctgcgcggcgacttcaccgtggagaaggacggcaagaagcaccgcctgatcaacgtgttccccaccagcgcctaccgcagcgaggccctgcgcatcctgcagacccagcaggagttcaacccccagatcaccgacgagttcatcaaccgctacctggagatcctgaccggcaagcgcaagtactaccacggccccggcaacgagaagagccgcaccgactacggccgctaccgcaccagcggcgagaccctggacaacatcttcggcatcctgatcggcaagtgcaccttctaccccgacgagttccgcgccgccaaggccagctacaccgcccaggagttcaacctgctgaacgacctgaacaacctgaccgtgcccaccgagaccaagaagctgagcaaggagcagaagaaccagatcatcaactacgtgaagaacgagaaggccatgggccccgccaagctgttcaagtacatcgccaagctgctgagctgcgacgtggccgacatcaagggctaccgcatcgacaagagcggcaaggccgagatccacaccttcgaggcctaccgcaagatgaagaccctggagaccctggacatcgagcagatggaccgcgagaccctggacaagctggcctacgtgctgaccctgaacaccgagcgcgagggcatccaggaggccctggagcacgagttcgccgacggcagcttcagccagaagcaggtggacgagctggtgcagttccgcaaggccaacagcagcatcttcggcaagggctggcacaacttcagcgtgaagctgatgatggagctgatccccgagctgtacgagaccagcgaggagcagatgaccatcctgacccgcctgggcaagcagaagaccaccagcagcagcaacaagaccaagtacatcgacgagaagctgctgaccgaggagatctacaaccccgtggtggccaagagcgtgcgccaggccatcaagatcgtgaacgccgccatcaaggagtacggcgacttcgacaacatcgtgatcgagatggcccgcgagaccaacgaggacgacgagaagaaggccatccagaagatccagaaggccaacaaggacgagaaggacgccgccatgctgaaggccgccaaccagtacaacggcaaggccgagctgccccacagcgtgttccacggccacaagcagctggccaccaagatccgcctgtggcaccagcagggcgagcgctgcctgtacaccggcaagaccatcagcatccacgacctgatcaacaacagcaaccagttcgaggtggaccacatcctgcccctgagcatcaccttcgacgacagcctggccaacaaggtgctggtgtacgccaccgccaaccaggagaagggccagcgcaccccctaccaggccctggacagcatggacgacgcctggagcttccgcgagctgaaggccttcgtgcgcgagagcaagaccctgagcaacaagaagaaggagtacctgctgaccgaggaggacatcagcaagttcgacgtgcgcaagaagttcatcgagcgcaacctggtggacacccgctacgccagccgcgtggtgctgaacgccctgcaggagcacttccgcgcccacaagatcgacaccaaggtgagcgtggtgcgcggccagttcaccagccagctgcgccgccactggggcatcgagaagacccgcgacacctaccaccaccacgccgtggacgccctgatcattgcggcttctagccagctgaacctgtggaagaagcagaagaacaccctggtgagctacagcgaggaccagctgctggacatcgagaccggcgagctgatcagcgacgacgagtacaaggagagcgtgttcaaggccccctaccagcacttcgtggacaccctgaagagcaaggagttcgaggacagcatcctgttcagctaccaggtggacagcaagttcaaccgcaagatcagcgacgccaccatctacgccacccgccaggccaaggtgggcaaggacaaggccgacgagacctacgtgctgggcaagatcaaggacatctacacccaggacggctacgacgccttcatgaagatctacaagaaggacaagagcaagttcctgatgtaccgccacgacccccagaccttcgagaaggtgatcgagcccatcctggagaactaccccaacaagcagatcaacgataaaggcaaggaggtgccctgcaaccccttcctgaagtacaaggaggagcacggctacatccgcaagtacagcaagaagggcaacggccccgagatcaagagcctgaagtactacgacagcaagctgggcaaccacatcgacatcacccccaaggacagcaacaacaaggtggtgctgcagagcgtgagcccctggcgcgccgacgtgtacttcaacaagaccaccggcaagtacgagatcctgggcctgaagtacgccgacctgcagtttgataagggcaccggcacctacaagatcagccaggagaagtacaacgacatcaagaagaaggagggcgtggacagcgacagcgagttcaagttcaccctgtacaagaacgaccttctgctggtgaaggacaccgagaccaaggagcaacagctgttccgcttcctgagccgcaccatgcccaagcagaagcactacgtggagctgaagccctacgacaagcagaagttcgagggcggcgaggccctgatcaaggtgctgggcaacgtggccaacagcggccagtgcaagaagggcctgggcaagagcaacatcagcatctacaaggtgcgcaccgacgtgctgggcaaccagcacatcatcaagaacgagggcgacaagcccaagctggacttctaa

SEQ ID NO: 11 - DNA, 3366 bp, Streptococcus thermophilus
  source 1..3366: mol_type = genomic DNA
atgagcgacctggtgctgggcctggccatcggcatcggcagcgtgggcgtgggcatcctgaacaaggtgaccggcgagatcatccacaagaacagtcgcatcttccctgctgctcaggctgagaacaacctggtgcgccgcaccaaccgccagggtcgccggcttgctcgccgcaagaagcaccggcgcgtgcgcctgaaccgcctgttcgaggagagcggcctgatcaccgacttcaccaagatcagcatcaacctgaacccctaccagctgcgcgtgaagggcctgaccgacgagctgagcaacgaggagctgttcatcgccctgaagaacatggtgaagcaccgcggcatcagctacctggacgacgccagcgacgacggcaacagcagcgtgggcgactacgcccagatcgtgaaggagaacagcaagcagctggagaccaagacccccggccagatccagctggagcgctaccagacctacggccagctgcgcggcgacttcaccgtggagaaggacggcaagaagcaccgcctgatcaacgtgttccccaccagcgcctaccgcagcgaggccctgcgcatcctgcagacccagcaggagttcaacccccagatcaccgacgagttcatcaaccgctacctggagatcctgaccggcaagcgcaagtactaccacggccccggcaacgagaagagccgcaccgactacggccgctaccgcaccagcggcgagaccctggacaacatcttcggcatcctgatcggcaagtgcaccttctaccccgacgagttccgcgccgccaaggccagctacaccgcccaggagttcaacctgctgaacgacctgaacaacctgaccgtgcccaccgagaccaagaagctgagcaaggagcagaagaaccagatcatcaactacgtgaagaacgagaaggccatgggccccgccaagctgttcaagtacatcgccaagctgctgagctgcgacgtggccgacatcaagggctaccgcatcgacaagagcggcaaggccgagatccacaccttcgaggcctaccgcaagatgaagaccctggagaccctggacatcgagcagatggaccgcgagaccctggacaagctggcctacgtgctgaccctgaacaccgagcgcgagggcatccaggaggccctggagcacgagttcgccgacggcagcttcagccagaagcaggtggacgagctggtgcagttccgcaaggccaacagcagcatcttcggcaagggctggcacaacttcagcgtgaagctgatgatggagctgatccccgagctgtacgagaccagcgaggagcagatgaccatcctgacccgcctgggcaagcagaagaccaccagcagcagcaacaagaccaagtacatcgacgagaagctgctgaccgaggagatctacaaccccgtggtggccaagagcgtgcgccaggccatcaagatcgtgaacgccgccatcaaggagtacggcgacttcgacaacatcgtgatcgagatggcccgcgagaccaacgaggacgacgagaagaaggccatccagaagatccagaaggccaacaaggacgagaaggacgccgccatgctgaaggccgccaaccagtacaacggcaaggccgagctgccccacagcgtgttccacggccacaagcagctggccaccaagatccgcctgtggcaccagcagggcgagcgctgcctgtacaccggcaagaccatcagcatccacgacctgatcaacaacagcaaccagttcgaggtggctgccatcctgcccctgagcatcaccttcgacgacagcctggccaacaaggtgctggtgtacgccaccgccgctcaggagaagggccagcgcaccccctaccaggccctggacagcatggacgacgcctggagcttccgcgagctgaaggccttcgtgcgcgagagcaagaccctgagcaacaagaagaaggagtacctgctgaccgaggaggacatcagcaagttcgacgtgcgcaagaagttcatcgagcgcaacctggtggacacccgctacgccagccgcgtggtgctgaacgccctgcaggagcacttccgcgcccacaagatcgacaccaaggtgagcgtggtgcgcggccagttcaccagccagctgcgccgccactggggcatcgagaagacccgcgacacctaccaccaccacgccgtggacgccctgatcattgcggcttctagccagctgaacctgtggaagaagcagaagaacaccctggtgagctacagcgaggaccagctgctggacatcgagaccggcgagctgatcagcgacgacgagtacaaggagagcgtgttcaaggccccctaccagcacttcgtggacaccctgaagagcaaggagttcgaggacagcatcctgttcagctaccaggtggacagcaagttcaaccgcaagatcagcgacgccaccatctacgccacccgccaggccaaggtgggcaaggacaaggccgacgagacctacgtgctgggcaagatcaaggacatctacacccaggacggctacgacgccttcatgaagatctacaagaaggacaagagcaagttcctgatgtaccgccacgacccccagaccttcgagaaggtgatcgagcccatcctggagaactaccccaacaagcagatcaacgataaaggcaaggaggtgccctgcaaccccttcctgaagtacaaggaggagcacggctacatccgcaagtacagcaagaagggcaacggccccgagatcaagagcctgaagtactacgacagcaagctgggcaaccacatcgacatcacccccaaggacagcaacaacaaggtggtgctgcagagcgtgagcccctggcgcgccgacgtgtacttcaacaagaccaccggcaagtacgagatcctgggcctgaagtacgccgacctgcagtttgataagggcaccggcacctacaagatcagccaggagaagtacaacgacatcaagaagaaggagggcgtggacagcgacagcgagttcaagttcaccctgtacaagaacgaccttctgctggtgaaggacaccgagaccaaggagcaacagctgttccgcttcctgagccgcaccatgcccaagcagaagcactacgtggagctgaagccctacgacaagcagaagttcgagggcggcgaggccctgatcaaggtgctgggcaacgtggccaacagcggccagtgcaagaagggcctgggcaagagcaacatcagcatctacaaggtgcgcaccgacgtgctgggcaaccagcacatcatcaagaacgagggcgacaagcccaagctggacttctaa

SEQ ID NO: 12 - DNA, 3399 bp, Streptococcus thermophilus
  source 1..3399: mol_type = genomic DNA
atgagcgacctggtgctgggcctggacatcggcatcggcagcgtgggcgtgggcatcctgaacaaggtgaccggcgagatcatccacaagaacagtcgcatcttccctgctgctcaggctgagaacaacctggtgcgccgcaccaaccgccagggtcgccggcttgctcgccgcaagaagcaccggcgcgtgcgcctgaaccgcctgttcgaggagagcggcctgatcaccgacttcaccaagatcagcatcaacctgaacccctaccagctgcgcgtgaagggcctgaccgacgagctgagcaacgaggagctgttcatcgccctgaagaacatggtgaagcaccgcggcatcagctacctggacgacgccagcgacgacggcaacagcagcgtgggcgactacgcccagatcgtgaaggagaacagcaagcagctggagaccaagacccccggccagatccagctggagcgctaccagacctacggccagctgcgcggcgacttcaccgtggagaaggacggcaagaagcaccgcctgatcaacgtgttccccaccagcgcctaccgcagcgaggccctgcgcatcctgcagacccagcaggagttcaacccccagatcaccgacgagttcatcaaccgctacctggagatcctgaccggcaagcgcaagtactaccacggccccggcaacgagaagagccgcaccgactacggccgctaccgcaccagcggcgagaccctggacaacatcttcggcatcctgatcggcaagtgcaccttctaccccgacgagttccgcgccgccaaggccagctacaccgcccaggagttcaacctgctgaacgacctgaacaacctgaccgtgcccaccgagaccaagaagctgagcaaggagcagaagaaccagatcatcaactacgtgaagaacgagaaggccatgggccccgccaagctgttcaagtacatcgccaagctgctgagctgcgacgtggccgacatcaagggctaccgcatcgacaagagcggcaaggccgagatccacaccttcgaggcctaccgcaagatgaagaccctggagaccctggacatcgagcagatggaccgcgagaccctggacaagctggcctacgtgctgaccctgaacaccgagcgcgagggcatccaggaggccctggagcacgagttcgccgacggcagcttcagccagaagcaggtggacgagctggtgcagttccgcaaggccaacagcagcatcttcggcaagggctggcacaacttcagcgtgaagctgatgatggagctgatccccgagctgtacgagaccagcgaggagcagatgaccatcctgacccgcctgggcaagcagaagaccaccagcagcagcaacaagaccaagtacatcgacgagaagctgctgaccgaggagatctacaaccccgtggtggccaagagcgtgcgccaggccatcaagatcgtgaacgccgccatcaaggagtacggcgacttcgacaacatcgtgatcgagatggcccgcgagaccaacgaggacgacgagaagaaggccatccagaagatccagaaggccaacaaggacgagaaggacgccgccatgctgaaggccgccaaccagtacaacggcaaggccgagctgccccacagcgtgttccacggccacaagcagctggccaccaagatccgcctgtggcaccagcagggcgagcgctgcctgtacaccggcaagaccatcagcatccacgacctgatcaacaacagcaaccagttcgaggtggaccacatcctgcccctgagcatcaccttcgacgacagcctggccaacaaggtgctggtgtacgccaccgccaaccaggagaagggccagcgcaccccctaccaggccctggacagcatggacgacgcctggagcttccgcgagctgaaggccttcgtgcgcgagagcaagaccctgagcaacaagaagaaggagtacctgctgaccgaggaggacatcagcaagttcgacgtgcgcaagaagttcatcgagcgcaacctggtggacacccgctacgccagccgcgtggtgctgaacgccctgcaggagcacttccgcgcccacaagatcgacaccaaggtgagcgtggtgcgcggccagttcaccagccagctgcgccgccactggggcatcgagaagacccgcgacacctaccaccaccacgccgtggacgccctgatcattgcggcttctagccagctgaacctgtggaagaagcagaagaacaccctggtgagctacagcgaggaccagctgctggacatcgagaccggcgagctgatcagcgacgacgagtacaaggagagcgtgttcaaggccccctaccagcacttcgtggacaccctgaagagcaaggagttcgaggacagcatcctgttcagctaccaggtggacagcaagttcaaccgcaagatcagcgacgccaccatctacgccacccgccaggccaaggtgggcaaggacaaggccgacgagacctacgtgctgggcaagatcaaggacatctacacccaggacggctacgacgccttcatgaagatctacaagaaggacaagagcaagttcctgatgtaccgccacgacccccagaccttcgagaaggtgatcgagcccatcctggagaactaccccaacaagcagatcaacgataaaggcaaggaggtgccctgcaaccccttcctgaagtacaaggaggagcacggctacatccgcaagtacagcaagaagggcaacggccccgagatcaagagcctgaagtactacgacagcaagctgggcaaccacatcgacatcacccccaaggacagcaacaacaaggtggtgctgcagagcgtgagcccctggcgcgccgacgtgtacttcaacaagaccaccggcaagtacgagatcctgggcctgaagtacgccgacctgcagtttgataagggcaccggcacctacaagatcagccaggagaagtacaacgacatcaagaagaaggagggcgtggacagcgacagcgagttcaagttcaccctgtacaagaacgaccttctgctggtgaaggacaccgagaccaaggagcaacagctgttccgcttcctgagccgcaccatgcccaagcagaagcactacgtggagctgaagccctacgacaagcagaagttcgagggcggcgaggccctgatcaaggtgctgggcaacgtggccaacagcggccagtgcaagaagggcctgggcaagagcaacatcagcatctacaaggtgcgcaccgacgtgctgggcaaccagcacatcatcaagaacgagggcgacaagcccaagctggacttcagcagggctgaccccaagaagaagaggaaggtgtga

SEQ ID NO: 13 - DNA, 3459 bp, Streptococcus thermophilus
  source 1..3459: mol_type = genomic DNA
atgagcgacctggtgctgggcctggacatcggcatcggcagcgtgggcgtgggcatcctgaacaaggtgaccggcgagatcatccacaagaacagtcgcatcttccctgctgctcaggctgagaacaacctggtgcgccgcaccaaccgccagggtcgccggcttgctcgccgcaagaagcaccggcgcgtgcgcctgaaccgcctgttcgaggagagcggcctgatcaccgacttcaccaagatcagcatcaacctgaacccctaccagctgcgcgtgaagggcctgaccgacgagctgagcaacgaggagctgttcatcgccctgaagaacatggtgaagcaccgcggcatcagctacctggacgacgccagcgacgacggcaacagcagcgtgggcgactacgcccagatcgtgaaggagaacagcaagcagctggagaccaagacccccggccagatccagctggagcgctaccagacctacggccagctgcgcggcgacttcaccgtggagaaggacggcaagaagcaccgcctgatcaacgtgttccccaccagcgcctaccgcagcgaggccctgcgcatcctgcagacccagcaggagttcaacccccagatcaccgacgagttcatcaaccgctacctggagatcctgaccggcaagcgcaagtactaccacggccccggcaacgagaagagccgcaccgactacggccgctaccgcaccagcggcgagaccctggacaacatcttcggcatcctgatcggcaagtgcaccttctaccccgacgagttccgcgccgccaaggccagctacaccgcccaggagttcaacctgctgaacgacctgaacaacctgaccgtgcccaccgagaccaagaagctgagcaaggagcagaagaaccagatcatcaactacgtgaagaacgagaaggccatgggccccgccaagctgttcaagtacatcgccaagctgctgagctgcgacgtggccgacatcaagggctaccgcatcgacaagagcggcaaggccgagatccacaccttcgaggcctaccgcaagatgaagaccctggagaccctggacatcgagcagatggaccgcgagaccctggacaagctggcctacgtgctgaccctgaacaccgagcgcgagggcatccaggaggccctggagcacgagttcgccgacggcagcttcagccagaagcaggtggacgagctggtgcagttccgcaaggccaacagcagcatcttcggcaagggctggcacaacttcagcgtgaagctgatgatggagctgatccccgagctgtacgagaccagcgaggagcagatgaccatcctgacccgcctgggcaagcagaagaccaccagcagcagcaacaagaccaagtacatcgacgagaagctgctgaccgaggagatctacaaccccgtggtggccaagagcgtgcgccaggccatcaagatcgtgaacgccgccatcaaggagtacggcgacttcgacaacatcgtgatcgagatggcccgcgagaccaacgaggacgacgagaagaaggccatccagaagatccagaaggccaacaaggacgagaaggacgccgccatgctgaaggccgccaaccagtacaacggcaaggccgagctgccccacagcgtgttccacggccacaagcagctggccaccaagatccgcctgtggcaccagcagggcgagcgctgcctgtacaccggcaagaccatcagcatccacgacctgatcaacaacagcaaccagttcgaggtggaccacatcctgcccctgagcatcaccttcgacgacagcctggccaacaaggtgctggtgtacgccaccgccaaccaggagaagggccagcgcaccccctaccaggccctggacagcatggacgacgcctggagcttccgcgagctgaaggccttcgtgcgcgagagcaagaccctgagcaacaagaagaaggagtacctgctgaccgaggaggacatcagcaagttcgacgtgcgcaagaagttcatcgagcgcaacctggtggacacccgctacgccagccgcgtggtgctgaacgccctgcaggagcacttccgcgcccacaagatcgacaccaaggtgagcgtggtgcgcggccagttcaccagccagctgcgccgccactggggcatcgagaagacccgcgacacctaccaccaccacgccgtggacgccctgatcattgcggcttctagccagctgaacctgtggaagaagcagaagaacaccctggtgagctacagcgaggaccagctgctggacatcgagaccggcgagctgatcagcgacgacgagtacaaggagagcgtgttcaaggccccctaccagcacttcgtggacaccctgaagagcaaggagttcgaggacagcatcctgttcagctaccaggtggacagcaagttcaaccgcaagatcagcgacgccaccatctacgccacccgccaggccaaggtgggcaaggacaaggccgacgagacctacgtgctgggcaagatcaaggacatctacacccaggacggctacgacgccttcatgaagatctacaagaaggacaagagcaagttcctgatgtaccgccacgacccccagaccttcgagaaggtgatcgagcccatcctggagaactaccccaacaagcagatcaacgataaaggcaaggaggtgccctgcaaccccttcctgaagtacaaggaggagcacggctacatccgcaagtacagcaagaagggcaacggccccgagatcaagagcctgaagtactacgacagcaagctgggcaaccacatcgacatcacccccaaggacagcaacaacaaggtggtgctgcagagcgtgagcccctggcgcgccgacgtgtacttcaacaagaccaccggcaagtacgagatcctgggcctgaagtacgccgacctgcagtttgataagggcaccggcacctacaagatcagccaggagaagtacaacgacatcaagaagaaggagggcgtggacagcgacagcgagttcaagttcaccctgtacaagaacgaccttctgctggtgaaggacaccgagaccaaggagcaacagctgttccgcttcctgagccgcaccatgcccaagcagaagcactacgtggagctgaagccctacgacaagcagaagttcgagggcggcgaggccctgatcaaggtgctgggcaacgtggccaacagcggccagtgcaagaagggcctgggcaagagcaacatcagcatctacaaggtgcgcaccgacgtgctgggcaaccagcacatcatcaagaacgagggcgacaagcccaagctggacttcgcggccgcagatccaaaaaagaagagaaaggtagatccaaaaaagaagagaaaggtagatccaaaaaagaagagaaaggtagatacggccgcatag

SEQ ID NO: 14 - DNA, 3585 bp, Streptococcus thermophilus
  source 1..3585: mol_type = genomic DNA
atgagcgacctggtgctgggcctggccatcggcatcggcagcgtgggcgtgggcatcctgaacaaggtgaccggcgagatcatccacaagaacagtcgcatcttccctgctgctcaggctgagaacaacctggtgcgccgcaccaaccgccagggtcgccggcttgctcgccgcaagaagcaccggcgcgtgcgcctgaaccgcctgttcgaggagagcggcctgatcaccgacttcaccaagatcagcatcaacctgaacccctaccagctgcgcgtgaagggcctgaccgacgagctgagcaacgaggagctgttcatcgccctgaagaacatggtgaagcaccgcggcatcagctacctggacgacgccagcgacgacggcaacagcagcgtgggcgactacgcccagatcgtgaaggagaacagcaagcagctggagaccaagacccccggccagatccagctggagcgctaccagacctacggccagctgcgcggcgacttcaccgtggagaaggacggcaagaagcaccgcctgatcaacgtgttccccaccagcgcctaccgcagcgaggccctgcgcatcctgcagacccagcaggagttcaacccccagatcaccgacgagttcatcaaccgctacctggagatcctgaccggcaagcgcaagtactaccacggccccggcaacgagaagagccgcaccgactacggccgctaccgcaccagcggcgagaccctggacaacatcttcggcatcctgatcggcaagtgcaccttctaccccgacgagttccgcgccgccaaggccagctacaccgcccaggagttcaacctgctgaacgacctgaacaacctgaccgtgcccaccgagaccaagaagctgagcaaggagcagaagaaccagatcatcaactacgtgaagaacgagaaggccatgggccccgccaagctgttcaagtacatcgccaagctgctgagctgcgacgtggccgacatcaagggctaccgcatcgacaagagcggcaaggccgagatccacaccttcgaggcctaccgcaagatgaagaccctggagaccctggacatcgagcagatggaccgcgagaccctggacaagctggcctacgtgctgaccctgaacaccgagcgcgagggcatccaggaggccctggagcacgagttcgccgacggcagcttcagccagaagcaggtggacgagctggtgcagttccgcaaggccaacagcagcatcttcggcaagggctggcacaacttcagcgtgaagctgatgatggagctgatccccgagctgtacgagaccagcgaggagcagatgaccatcctgacccgcctgggcaagcagaagaccaccagcagcagcaacaagaccaagtacatcgacgagaagctgctgaccgaggagatctacaaccccgtggtggccaagagcgtgcgccaggccatcaagatcgtgaacgccgccatcaaggagtacggcgacttcgacaacatcgtgatcgagatggcccgcgagaccaacgaggacgacgagaagaaggccatccagaagatccagaaggccaacaaggacgagaaggacgccgccatgctgaaggccgccaaccagtacaacggcaaggccgagctgccccacagcgtgttccacggccacaagcagctggccaccaagatccgcctgtggcaccagcagggcgagcgctgcctgtacaccggcaagaccatcagcatccacgacctgatcaacaacagcaaccagttcgaggtggctgccatcctgcccctgagcatcaccttcgacgacagcctggccaacaaggtgctggtgtacgccaccgccgctcaggagaagggccagcgcaccccctaccaggccctggacagcatggacgacgcctggagcttccgcgagctgaaggccttcgtgcgcgagagcaagaccctgagcaacaagaagaaggagtacctgctgaccgaggaggacatcagcaagttcgacgtgcgcaagaagttcatcgagcgcaacctggtggacacccgctacgccagccgcgtggtgctgaacgccctgcaggagcacttccgcgcccacaagatcgacaccaaggtgagcgtggtgcgcggccagttcaccagccagctgcgccgccactggggcatcgagaagacccgcgacacctaccaccaccacgccgtggacgccctgatcattgcggcttctagccagctgaacctgtggaagaagcagaagaacaccctggtgagctacagcgaggaccagctgctggacatcgagaccggcgagctgatcagcgacgacgagtacaaggagagcgtgttcaaggccccctaccagcacttcgtggacaccctgaagagcaaggagttcgaggacagcatcctgttcagctaccaggtggacagcaagttcaaccgcaagatcagcgacgccaccatctacgccacccgccaggccaaggtgggcaaggacaaggccgacgagacctacgtgctgggcaagatcaaggacatctacacccaggacggctacgacgccttcatgaagatctacaagaaggacaagagcaagttcctgatgtaccgccacgacccccagaccttcgagaaggtgatcgagcccatcctggagaactaccccaacaagcagatcaacgataaaggcaaggaggtgccctgcaaccccttcctgaagtacaaggaggagcacggctacatccgcaagtacagcaagaagggcaacggccccgagatcaagagcctgaagtactacgacagcaagctgggcaaccacatcgacatcacccccaaggacagcaacaacaaggtggtgctgcagagcgtgagcccctggcgcgccgacgtgtacttcaacaagaccaccggcaagtacgagatcctgggcctgaagtacgccgacctgcagtttgataagggcaccggcacctacaagatcagccaggagaagtacaacgacatcaagaagaaggagggcgtggacagcgacagcgagttcaagttcaccctgtacaagaacgaccttctgctggtgaaggacaccgagaccaaggagcaacagctgttccgcttcctgagccgcaccatgcccaagcagaagcactacgtggagctgaagccctacgacaagcagaagttcgagggcggcgaggccctgatcaaggtgctgggcaacgtggccaacagcggccagtgcaagaagggcctgggcaagagcaacatcagcatctacaaggtgcgcaccgacgtgctgggcaaccagcacatcatcaagaacgagggcgacaagcccaagctggacttcagcagggctgaccccaagaagaagaggaaggtggaggccagcggttccggacgggctgacgcattggacgattttgatctggatatgctgggaagtgacgccctcgatgattttgaccttgacatgcttggttcggatgcccttgatgactttgacctcgacatgctcggcagtgacgcccttgatgatttcgacctggacatgctgattaactctagatga

SEQ ID NO: 15 - DNA, 3606 bp, Streptococcus thermophilus
  source 1..3606: mol_type = genomic DNA
atgcccaagaagaagaggaaggtgagcgacctggtgctgggcctggccatcggcatcggcagcgtgggcgtgggcatcctgaacaaggtgaccggcgagatcatccacaagaacagtcgcatcttccctgctgctcaggctgagaacaacctggtgcgccgcaccaaccgccagggtcgccggcttgctcgccgcaagaagcaccggcgcgtgcgcctgaaccgcctgttcgaggagagcggcctgatcaccgacttcaccaagatcagcatcaacctgaacccctaccagctgcgcgtgaagggcctgaccgacgagctgagcaacgaggagctgttcatcgccctgaagaacatggtgaagcaccgcggcatcagctacctggacgacgccagcgacgacggcaacagcagcgtgggcgactacgcccagatcgtgaaggagaacagcaagcagctggagaccaagacccccggccagatccagctggagcgctaccagacctacggccagctgcgcggcgacttcaccgtggagaaggacggcaagaagcaccgcctgatcaacgtgttccccaccagcgcctaccgcagcgaggccctgcgcatcctgcagacccagcaggagttcaacccccagatcaccgacgagttcatcaaccgctacctggagatcctgaccggcaagcgcaagtactaccacggccccggcaacgagaagagccgcaccgactacggccgctaccgcaccagcggcgagaccctggacaacatcttcggcatcctgatcggcaagtgcaccttctaccccgacgagttccgcgccgccaaggccagctacaccgcccaggagttcaacctgctgaacgacctgaacaacctgaccgtgcccaccgagaccaagaagctgagcaaggagcagaagaaccagatcatcaactacgtgaagaacgagaaggccatgggccccgccaagctgttcaagtacatcgccaagctgctgagctgcgacgtggccgacatcaagggctaccgcatcgacaagagcggcaaggccgagatccacaccttcgaggcctaccgcaagatgaagaccctggagaccctggacatcgagcagatggaccgcgagaccctggacaagctggcctacgtgctgaccctgaacaccgagcgcgagggcatccaggaggccctggagcacgagttcgccgacggcagcttcagccagaagcaggtggacgagctggtgcagttccgcaaggccaacagcagcatcttcggcaagggctggcacaacttcagcgtgaagctgatgatggagctgatccccgagctgtacgagaccagcgaggagcagatgaccatcctgacccgcctgggcaagcagaagaccaccagcagcagcaacaagaccaagtacatcgacgagaagctgctgaccgaggagatctacaaccccgtggtggccaagagcgtgcgccaggccatcaagatcgtgaacgccgccatcaaggagtacggcgacttcgacaacatcgtgatcgagatggcccgcgagaccaacgaggacgacgagaagaaggccatccagaagatccagaaggccaacaaggacgagaaggacgccgccatgctgaaggccgccaaccagtacaacggcaaggccgagctgccccacagcgtgttccacggccacaagcagctggccaccaagatccgcctgtggcaccagcagggcgagcgctgcctgtacaccggcaagaccatcagcatccacgacctgatcaacaacagcaaccagttcgaggtggctgccatcctgcccctgagcatcaccttcgacgacagcctggccaacaaggtgctggtgtacgccaccgccgctcaggagaagggccagcgcaccccctaccaggccctggacagcatggacgacgcctggagcttccgcgagctgaaggccttcgtgcgcgagagcaagaccctgagcaacaagaagaaggagtacctgctgaccgaggaggacatcagcaagttcgacgtgcgcaagaagttcatcgagcgcaacctggtggacacccgctacgccagccgcgtggtgctgaacgccctgcaggagcacttccgcgcccacaagatcgacaccaaggtgagcgtggtgcgcggccagttcaccagccagctgcgccgccactggggcatcgagaagacccgcgacacctaccaccaccacgccgtggacgccctgatcattgcggcttctagccagctgaacctgtggaagaagcagaagaacaccctggtgagctacagcgaggaccagctgctggacatcgagaccggcgagctgatcagcgacgacgagtacaaggagagcgtgttcaaggccccctaccagcacttcgtggacaccctgaagagcaaggagttcgaggacagcatcctgttcagctaccaggtggacagcaagttcaaccgcaagatcagcgacgccaccatctacgccacccgccaggccaaggtgggcaaggacaaggccgacgagacctacgtgctgggcaagatcaaggacatctacacccaggacggctacgacgccttcatgaagatctacaagaaggacaagagcaagttcctgatgtaccgccacgacccccagaccttcgagaaggtgatcgagcccatcctggagaactaccccaacaagcagatcaacgataaaggcaaggaggtgccctgcaaccccttcctgaagtacaaggaggagcacggctacatccgcaagtacagcaagaagggcaacggccccgagatcaagagcctgaagtactacgacagcaagctgggcaaccacatcgacatcacccccaaggacagcaacaacaaggtggtgctgcagagcgtgagcccctggcgcgccgacgtgtacttcaacaagaccaccggcaagtacgagatcctgggcctgaagtacgccgacctgcagtttgataagggcaccggcacctacaagatcagccaggagaagtacaacgacatcaagaagaaggagggcgtggacagcgacagcgagttcaagttcaccctgtacaagaacgaccttctgctggtgaaggacaccgagaccaaggagcaacagctgttccgcttcctgagccgcaccatgcccaagcagaagcactacgtggagctgaagccctacgacaagcagaagttcgagggcggcgaggccctgatcaaggtgctgggcaacgtggccaacagcggccagtgcaagaagggcctgggcaagagcaacatcagcatctacaaggtgcgcaccgacgtgctgggcaaccagcacatcatcaagaacgagggcgacaagcccaagctggacttcagcagggctgaccccaagaagaagaggaaggtggaggccagcggttccggacgggctgacgcattggacgattttgatctggatatgctgggaagtgacgccctcgatgattttgaccttgacatgcttggttcggatgcccttgatgactttgacctcgacatgctcggcagtgacgcccttgatgatttcgacctggacatgctgattaactctagatga

SEQ ID NO: 16 - DNA, 3366 bp, Streptococcus thermophilus
  source 1..3366: mol_type = genomic DNA
atgagtgacttagttttaggacttgatatcggtataggttctgttggtgtaggtatccttaacaaagtgacaggagaaattatccataaaaactcacgcatcttcccagcagctcaagcggaaaataacctagtacgtagaacgaatcgtcaaggaagacgcttgacacgacgtaaaaaacatcgtagagttcgtttaaatcgtctatttgaggaaagtggattaatcaccgattttacgaagatttcaattaatcttaacccatatcaattacgagttaagggcttgaccgatgaattgtctaatgaagaactgtttatcgctcttaaaaatatggtgaaacaccgtgggattagttacctcgatgatgctagtgatgacggaaattcatcaataggagactatgcacaaattgttaaggaaaatagtaaacaattagaaactaagacaccgggacagatacagttggaacgctaccaaacatatggtcaattacgtggtgattttactgttgagaaagatggcaaaaaacatcgcttgattaatgtctttccaacatcagcttatcgttcagaagccttaaggatactgcaaactcaacaagaatttaatccacagattacagatgaatttattaatcgttatctcgaaattttaactggaaaacggaaatattatcatggacccggaaatgaaaagtcacggactgattatggtcgttacagaacgagtggagaaactttagacaatatttttggaattctaattgggaaatgtacattttatccagacgagtttagagcagcaaaagcttcctacacggctcaagaattcaatttgctaaatgatttgaacaatctaacagttcctactgaaaccaaaaagttgagcaaagaacagaagaatcaaatcattaattatgtcaaaaatgaaaaggcaatggggccagcgaaactttttaaatatatcgctaagttactttcttgtgatgttgcagatatcaagggataccgtatcgacaaatcaggtaaggctgagattcatactttcgaagcctatcgaaaaatgaaaacgcttgaaaccttagatattgagcaaatggatagagaaacgcttgataaattagcctatgtcttaacattaaacactgagagggaaggtattcaagaagccttagaacatgaatttgctgatggtagctttagccagaagcaagttgacgaattggttcaattccgcaaagcaaatagttccatttttggaaaaggatggcataatttttctgtcaaactgatgatggagttaattccagaattgtatgagacgtcagaagagcaaatgactatcctaacacgacttggaaaacaaaaaacgacttcgtcttcaaataaaacaaaatatatagatgaaaaactattaactgaagaaatctataatcctgttgttgctaagtctgttcgccaggctataaaaatcgtaaatgcggcgattaaagaatacggagactttgacaatattgtcatcgaaatggctcgtgaaacaaatgaagatgatgaaaagaaagctattcaaaagattcaaaaagccaacaaagatgaaaaagatgcagcaatgcttaaggctgctaaccaatataatggaaaggctgaattaccacatagtgttttccacggtcataagcaattagcgactaaaatccgcctttggcatcagcaaggagaacgttgcctttatactggtaagacaatctcaatccatgatttgataaataattctaatcagtttgaagtagatcatattttacctctttctatcacattcgatgatagccttgcaaataaggttttggtttatgcaactgctaaccaagaaaaaggacaacgaacaccttatcaggctttagatagtatggatgatgcgtggtctttccgtgaattaaaagcttttgtacgtgagtcaaaaacactttcgaacaagaaaaaagaatacctccttacagaagaagatatttcaaagtttgatgttcgaaagaaatttattgaacgaaatcttgtagatacaagatacgcttcaagagttgtcctcaatgcccttcaagaacactttagagctcacaagattgatacaaaagtttccgtggttcgtggccaatttacatctcaattgagacgccattggggaattgagaagactcgtgatacttatcatcaccatgctgtcgatgcattgattattgccgcctcaagtcagttgaatttgtggaaaaaacaaaagaatacccttgtaagttattcagaagaccaactccttgatattgaaacaggtgaacttattagtgatgatgagtacaaggaatctgtgttcaaagccccttatcaacattttgttgatacattgaagagtaaagaatttgaagacagtatcttattctcttatcaagtggattctaagtttaatcgtaaaatatcagatgccactatttatgcgacaagacaggctaaagtaggaaaagataaggcggatgaaacttatgtcttagggaaaatcaaagatatttatactcaggatggttatgatgcctttatgaagatttataagaaggataagtcaaaattcctcatgtatcgtcacgacccacaaacctttgagaaagttatcgagccaattttagagaactatcctaataagcaaataaatgaaaaagggaaagaggtaccatgtaatcctttcctaaaatataaagaagaacatggctatattcgtaaatatagtaaaaaaggcaatggtcctgaaatcaagagtcttaaatactatgatagtaagctaggcaatcatattgatattactccgaaggatagtaacaataaagttgtcttacagtcagtttctccatggagagcggatgtctatttcaataagactactggaaaatacgaaatcctcggattgaaatatgctgatttacaatttgaaaaagggacaggaacatataagatttcccaggaaaaatacaatgacattaagaaaaaagagggtgtagattctgattcagaattcaagtttacactttataaaaatgatttgttactcgttaaagatacagaaacaaaagaacaacagcttttccgttttctttctcgaactatgcctaaacaaaagcattatgttgaattaaaaccttatgataaacagaaatttgaaggaggtgaggcgttaattaaagtgttgggtaacgttgctaatagtggtcaatgcaaaaaagggctaggaaaatcaaatatttctatttataaggtaagaacagatgtcctaggaaatcagcatatcatcaaaaatgagggtgataagcctaagctagatttttaa

SEQ ID NO: 17 - DNA, 4167 bp, Streptococcus thermophilus; identical to SEQ ID NO: 9
  source 1..4167: mol_type = genomic DNA

SEQ ID NO: 18 - DNA, 3249 bp, Neisseria meningitidis
  source 1..3249: mol_type = genomic DNA
atggccgccttcaagcccaaccccatcaactacatcctgggcctggacatcggcatcgccagcgtgggctgggccatggtggagatcgacgaggacgagaaccccatctgcctgatcgacctgggtgtgcgcgtgttcgagcgcgctgaggtgcccaagactggtgacagtctggctatggctcgccggcttgctcgctctgttcggcgccttactcgccggcgcgctcaccgccttctgcgcgctcgccgcctgctgaagcgcgagggtgtgctgcaggctgccgacttcgacgagaacggcctgatcaagagcctgcccaacactccttggcagctgcgcgctgccgctctggaccgcaagctgactcctctggagtggagcgccgtgctgctgcacctgatcaagcaccgcggctacctgagccagcgcaagaacgagggcgagaccgccgacaaggagctgggtgctctgctgaagggcgtggccgacaacgcccacgccctgcagactggtgacttccgcactcctgctgagctggccctgaacaagttcgagaaggagagcggccacatccgcaaccagcgcggcgactacagccacaccttcagccgcaaggacctgcaggccgagctgatcctgctgttcgagaagcagaaggagttcggcaacccccacgtgagcggcggcctgaaggagggcatcgagaccctgctgatgacccagcgccccgccctgagcggcgacgccgtgcagaagatgctgggccactgcaccttcgagccagccgagcccaaggccgccaagaacacctacaccgccgagcgcttcatctggctgaccaagctgaacaacctgcgcatcctggagcagggcagcgagcgccccctgaccgacaccgagcgcgccaccctgatggacgagccctaccgcaagagcaagctgacctacgcccaggcccgcaagctgctgggtctggaggacaccgccttcttcaagggcctgcgctacggcaaggacaacgccgaggccagcaccctgatggagatgaaggcctaccacgccatcagccgcgccctggagaaggagggcctgaaggacaagaagagtcctctgaacctgagccccgagctgcaggacgagatcggcaccgccttcagcctgttcaagaccgacgaggacatcaccggccgcctgaaggaccgcatccagcccgagatcctggaggccctgctgaagcacatcagcttcgacaagttcgtgcagatcagcctgaaggccctgcgccgcatcgtgcccctgatggagcagggcaagcgctacgacgaggcctgcgccgagatctacggcgaccactacggcaagaagaacaccgaggagaagatctacctgcctcctatccccgccgacgagatccgcaaccccgtggtgctgcgcgccctgagccaggcccgcaaggtgatcaacggcgtggtgcgccgctacggcagccccgcccgcatccacatcgagaccgcccgcgaggtgggcaagagcttcaaggaccgcaaggagatcgagaagcgccaggaggagaaccgcaaggaccgcgagaaggccgccgccaagttccgcgagtacttccccaacttcgtgggcgagcccaagagcaaggacatcctgaagctgcgcctgtacgagcagcagcacggcaagtgcctgtacagcggcaaggagatcaacctgggccgcctgaacgagaagggctacgtggagatcgaccacgccctgcccttcagccgcacctgggacgacagcttcaacaacaaggtgctggtgctgggcagcgagaaccagaacaagggcaaccagaccccctacgagtacttcaacggcaaggacaacagccgcgagtggcaggagttcaaggcccgcgtggagaccagccgcttcccccgcagcaagaagcagcgcatcctgctgcagaagttcgacgaggacggcttcaaggagcgcaacctgaacgacacccgctacgtgaaccgcttcctgtgccagttcgtggccgaccgcatgcgcctgaccggcaagggcaagaagcgcgtgttcgccagcaacggccagatcaccaacctgctgcgcggcttctggggcctgcgcaaggtgcgcgccgagaacgaccgccaccacgccctggacgccgtggtggtggcctgcagcaccgtggccatgcagcagaagatcacccgcttcgtgcgctacaaggagatgaacgccttcgacggtaaaaccatcgacaaggagaccggcgaggtgctgcaccagaagacccacttcccccagccctgggagttcttcgcccaggaggtgatgatccgcgtgttcggcaagcccgacggcaagcccgagttcgaggaggccgacacccccgagaagctgcgcaccctgctggccgagaagctgagcagccgccctgaggccgtgcacgagtacgtgactcctctgttcgtgagccgcgcccccaaccgcaagatgagcggtcagggtcacatggagaccgtgaagagcgccaagcgcctggacgagggcgtgagcgtgctgcgcgtgcccctgacccagctgaagctgaaggacctggagaagatggtgaaccgcgagcgcgagcccaagctgtacgaggccctgaaggcccgcctggaggcccacaaggacgaccccgccaaggccttcgccgagcccttctacaagtacgacaaggccggcaaccgcacccagcaggtgaaggccgtgcgcgtggagcaggtgcagaagaccggcgtgtgggtgcgcaaccacaacggcatcgccgacaacgccaccatggtgcgcgtggacgtgttcgagaagggcgacaagtactacctggtgcccatctacagctggcaggtggccaagggcatcctgcccgaccgcgccgtggtgcagggcaaggacgaggaggactggcagctgatcgacgacagcttcaacttcaagttcagcctgcaccccaacgacctggtggaggtgatcaccaagaaggcccgcatgttcggctacttcgccagctgccaccgcggcaccggcaacatcaacatccgcatccacgacctggaccacaagatcggcaagaacggcatcctggagggcatcggcgtgaagaccgccctgagcttccagaagtaccagatcgacgagctgggcaaggagatccgcccctgccgcctgaagaagcgccctcctgtgcgctaa

SEQ ID NO: 19 - DNA, 3249 bp, Neisseria meningitidis
  source 1..3249: mol_type = genomic DNA
atggccgccttcaagcccaaccccatcaactacatcctgggcctggccatcggcatcgccagcgtgggctgggccatggtggagatcgacgaggacgagaaccccatctgcctgatcgacctgggtgtgcgcgtgttcgagcgcgctgaggtgcccaagactggtgacagtctggctatggctcgccggcttgctcgctctgttcggcgccttactcgccggcgcgctcaccgccttctgcgcgctcgccgcctgctgaagcgcgagggtgtgctgcaggctgccgacttcgacgagaacggcctgatcaagagcctgcccaacactccttggcagctgcgcgctgccgctctggaccgcaagctgactcctctggagtggagcgccgtgctgctgcacctgatcaagcaccgcggctacctgagccagcgcaagaacgagggcgagaccgccgacaaggagctgggtgctctgctgaagggcgtggccgacaacgcccacgccctgcagactggtgacttccgcactcctgctgagctggccctgaacaagttcgagaaggagagcggccacatccgcaaccagcgcggcgactacagccacaccttcagccgcaaggacctgcaggccgagctgatcctgctgttcgagaagcagaaggagttcggcaacccccacgtgagcggcggcctgaaggagggcatcgagaccctgctgatgacccagcgccccgccctgagcggcgacgccgtgcagaagatgctgggccactgcaccttcgagccagccgagcccaaggccgccaagaacacctacaccgccgagcgcttcatctggctgaccaagctgaacaacctgcgcatcctggagcagggcagcgagcgccccctgaccgacaccgagcgcgccaccctgatggacgagccctaccgcaagagcaagctgacctacgcccaggcccgcaagctgctgggtctggaggacaccgccttcttcaagggcctgcgctacggcaaggacaacgccgaggccagcaccctgatggagatgaaggcctaccacgccatcagccgcgccctggagaaggagggcctgaaggacaagaagagtcctctgaacctgagccccgagctgcaggacgagatcggcaccgccttcagcctgttcaagaccgacgaggacatcaccggccgcctgaaggaccgcatccagcccgagatcctggaggccctgctgaagcacatcagcttcgacaagttcgtgcagatcagcctgaaggccctgcgccgcatcgtgcccctgatggagcagggcaagcgctacgacgaggcctgcgccgagatctacggcgaccactacggcaagaagaacaccgaggagaagatctacctgcctcctatccccgccgacgagatccgcaaccccgtggtgctgcgcgccctgagccaggcccgcaaggtgatcaacggcgtggtgcgccgctacggcagccccgcccgcatccacatcgagaccgcccgcgaggtgggcaagagcttcaaggaccgcaaggagatcgagaagcgccaggaggagaaccgcaaggaccgcgagaaggccgccgccaagttccgcgagtacttccccaacttcgtgggcgagcccaagagcaaggacatcctgaagctgcgcctgtacgagcagcagcacggcaagtgcctgtacagcggcaaggagatcaacctgggccgcctgaacgagaagggctacgtggagatcgccgctgccctgcccttcagccgcacctgggacgacagcttcaacaacaaggtgctggtgctgggcagcgaggctcagaacaagggcaaccagaccccctacgagtacttcaacggcaaggacaacagccgcgagtggcaggagttcaaggcccgcgtggagaccagccgcttcccccgcagcaagaagcagcgcatcctgctgcagaagttcgacgaggacggcttcaaggagcgcaacctgaacgacacccgctacgtgaaccgcttcctgtgccagttcgtggccgaccgcatgcgcctgaccggcaagggcaagaagcgcgtgttcgccagcaacggccagatcaccaacctgctgcgcggcttctggggcctgcgcaaggtgcgcgccgagaacgaccgccaccacgccctggacgccgtggtggtggcctgcagcaccgtggccatgcagcagaagatcacccgcttcgtgcgctacaaggagatgaacgccttcgacggtaaaaccatcgacaaggagaccggcgaggtgctgcaccagaagacccacttcccccagccctgggagttcttcgcccaggaggtgatgatccgcgtgttcggcaagcccgacggcaagcccgagttcgaggaggccgacacccccgagaagctgcgcaccctgctggccgagaagctgagcagccgccctgaggccgtgcacgagtacgtgactcctctgttcgtgagccgcgcccccaaccgcaagatgagcggtcagggtcacatggagaccgtgaagagcgccaagcgcctggacgagggcgtgagcgtgctgcgcgtgcccctgacccagctgaagctgaaggacctggagaagatggtgaaccgcgagcgcgagcccaagctgtacgaggccctgaaggcccgcctggaggcccacaaggacgaccccgccaaggccttcgccgagcccttctacaagtacgacaaggccggcaaccgcacccagcaggtgaaggccgtgcgcgtggagcaggtgcagaagaccggcgtgtgggtgcgcaaccacaacggcatcgccgacaacgccaccatggtgcgcgtggacgtgttcgagaagggcgacaagtactacctggtgcccatctacagctggcaggtggccaagggcatcctgcccgaccgcgccgtggtgcagggcaaggacgaggaggactggcagctgatcgacgacagcttcaacttcaagttcagcctgcaccccaacgacctggtggaggtgatcaccaagaaggcccgcatgttcggctacttcgccagctgccaccgcggcaccggcaacatcaacatccgcatccacgacctggaccacaagatcggcaagaacggcatcctggagggcatcggcgtgaagaccgccctgagcttccagaagtaccagatcgacgagctgggcaaggagatccgcccctgccgcctgaagaagcgccctcctgtgcgctaa

SEQ ID NO: 20 - DNA, 3282 bp, Neisseria meningitidis
  source 1..3282: mol_type = genomic DNA
atggccgccttcaagcccaaccccatcaactacatcctgggcctggacatcggcatcgccagcgtgggctgggccatggtggagatcgacgaggacgagaaccccatctgcctgatcgacctgggtgtgcgcgtgttcgagcgcgctgaggtgcccaagactggtgacagtctggctatggctcgccggcttgctcgctctgttcggcgccttactcgccggcgcgctcaccgccttctgcgcgctcgccgcctgctgaagcgcgagggtgtgctgcaggctgccgacttcgacgagaacggcctgatcaagagcctgcccaacactccttggcagctgcgcgctgccgctctggaccgcaagctgactcctctggagtggagcgccgtgctgctgcacctgatcaagcaccgcggctacctgagccagcgcaagaacgagggcgagaccgccgacaaggagctgggtgctctgctgaagggcgtggccgacaacgcccacgccctgcagactggtgacttccgcactcctgctgagctggccctgaacaagttcgagaaggagagcggccacatccgcaaccagcgcggcgactacagccacaccttcagccgcaaggacctgcaggccgagctgatcctgctgttcgagaagcagaaggagttcggcaacccccacgtgagcggcggcctgaaggagggcatcgagaccctgctgatgacccagcgccccgccctgagcggcgacgccgtgcagaagatgctgggccactgcaccttcgagccagccgagcccaaggccgccaagaacacctacaccgccgagcgcttcatctggctgaccaagctgaacaacctgcgcatcctggagcagggcagcgagcgccccctgaccgacaccgagcgcgccaccctgatggacgagccctaccgcaagagcaagctgacctacgcccaggcccgcaagctgctgggtctggaggacaccgccttcttcaagggcctgcgctacggcaaggacaacgccgaggccagcaccctgatggagatgaaggcctaccacgccatcagccgcgccctggagaaggagggcctgaaggacaagaagagtcctctgaacctgagccccgagctgcaggacgagatcggcaccgccttcagcctgttcaagaccgacgaggacatcaccggccgcctgaaggaccgcatccagcccgagatcctggaggccctgctgaagcacatcagcttcgacaagttcgtgcagatcagcctgaaggccctgcgccgcatcgtgcccctgatggagcagggcaagcgctacgacgaggcctgcgccgagatctacggcgaccactacggcaagaagaacaccgaggagaagatctacctgcctcctatccccgccgacgagatccgcaaccccgtggtgctgcgcgccctgagccaggcccgcaaggtgatcaacggcgtggtgcgccgctacggcagccccgcccgcatccacatcgagaccgcccgcgaggtgggcaagagcttcaaggaccgcaaggagatcgagaagcgccaggaggagaaccgcaaggaccgcgagaaggccgccgccaagttccgcgagtacttccccaacttcgtgggcgagcccaagagcaaggacatcctgaagctgcgcctgtacgagcagcagcacggcaagtgcctgtacagcggcaaggagatcaacctgggccgcctgaacgagaagggctacgtggagatcgaccacgccctgcccttcagccgcacctgggacgacagcttcaacaacaaggtgctggtgctgggcagcgagaaccagaacaagggcaaccagaccccctacgagtacttcaacggcaaggacaacagccgcgagtggcaggagttcaaggcccgcgtggagaccagccgcttcccccgcagcaagaagcagcgcatcctgctgcagaagttcgacgaggacggcttcaaggagcgcaacctgaacgacacccgctacgtgaaccgcttcctgtgccagttcgtggccgaccgcatgcgcctgaccggcaagggcaagaagcgcgtgttcgccagcaacggccagatcaccaacctgctgcgcggcttctggggcctgcgcaaggtgcgcgccgagaacgaccgccaccacgccctggacgccgtggtggtggcctgcagcaccgtggccatgcagcagaagatcacccgcttcgtgcgctacaaggagatgaacgccttcgacggtaaaaccatcgacaaggagaccggcgaggtgctgcaccagaagacccacttcccccagccctgggagttcttcgcccaggaggtgatgatccgcgtgttcggcaagcccgacggcaagcccgagttcgaggaggccgacacccccgagaagctgcgcaccctgctggccgagaagctgagcagccgccctgaggccgtgcacgagtacgtgactcctctgttcgtgagccgcgcccccaaccgcaagatgagcggtcagggtcacatggagaccgtgaagagcgccaagcgcctggacgagggcgtgagcgtgctgcgcgtgcccctgacccagctgaagctgaaggacctggagaagatggtgaaccgcgagcgcgagcccaagctgtacgaggccctgaaggcccgcctggaggcccacaaggacgaccccgccaaggccttcgccgagcccttctacaagtacgacaaggccggcaaccgcacccagcaggtgaaggccgtgcgcgtggagcaggtgcagaagaccggcgtgtgggtgcgcaaccacaacggcatcgccgacaacgccaccatggtgcgcgtggacgtgttcgagaagggcgacaagtactacctggtgcccatctacagctggcaggtggccaagggcatcctgcccgaccgcgccgtggtgcagggcaaggacgaggaggactggcagctgatcgacgacagcttcaacttcaagttcagcctgcaccccaacgacctggtggaggtgatcaccaagaaggcccgcatgttcggctacttcgccagctgccaccgcggcaccggcaacatcaacatccgcatccacgacctggaccacaagatcggcaagaacggcatcctggagggcatcggcgtgaagaccgccctgagcttccagaagtaccagatcgacgagctgggcaaggagatccgcccctgccgcctgaagaagcgccctcctgtgcgcagcagggctgaccccaagaagaagaggaaggtgtga

SEQ ID NO: 21 - DNA, 3342 bp, Neisseria meningitidis
  source 1..3342: mol_type = genomic DNA
atggccgccttcaagcccaaccccatcaactacatcctgggcctggacatcggcatcgccagcgtgggctgggccatggtggagatcgacgaggacgagaaccccatctgcctgatcgacctgggtgtgcgcgtgttcgagcgcgctgaggtgcccaagactggtgacagtctggctatggctcgccggcttgctcgctctgttcggcgccttactcgccggcgcgctcaccgccttctgcgcgctcgccgcctgctgaagcgcgagggtgtgctgcaggctgccgacttcgacgagaacggcctgatcaagagcctgcccaacactccttggcagctgcgcgctgccgctctggaccgcaagctgactcctctggagtggagcgccgtgctgctgcacctgatcaagcaccgcggctacctgagccagcgcaagaacgagggcgagaccgccgacaaggagctgggtgctctgctgaagggcgtggccgacaacgcccacgccctgcagactggtgacttccgcactcctgctgagctggccctgaacaagttcgagaaggagagcggccacatccgcaaccagcgcggcgactacagccacaccttcagccgcaaggacctgcaggccgagctgatcctgctgttcgagaagcagaaggagttcggcaacccccacgtgagcggcggcctgaaggagggcatcgagaccctgctgatgacccagcgccccgccctgagcggcgacgccgtgcagaagatgctgggccactgcaccttcgagccagccgagcccaaggccgccaagaacacctacaccgccgagcgcttcatctggctgaccaagctgaacaacctgcgcatcctggagcagggcagcgagcgccccctgaccgacaccgagcgcgccaccctgatggacgagccctaccgcaagagcaagctgacctacgcccaggcccgcaagctgctgggtctggaggacaccgccttcttcaagggcctgcgctacggcaaggacaacgccgaggccagcaccctgatggagatgaaggcctaccacgccatcagccgcgccctggagaaggagggcctgaaggacaagaagagtcctctgaacctgagccccgagctgcaggacgagatcggcaccgccttcagcctgttcaagaccgacgaggacatcaccggccgcctgaaggaccgcatccagcccgagatcctggaggccctgctgaagcacatcagcttcgacaagttcgtgcagatcagcctgaaggccctgcgccgcatcgtgcccctgatggagcagggcaagcgctacgacgaggcctgcgccgagatctacggcgaccactacggcaagaagaacaccgaggagaagatctacctgcctcctatccccgccgacgagatccgcaaccccgtggtgctgcgcgccctgagccaggcccgcaaggtgatcaacggcgtggtgcgccgctacggcagccccgcccgcatccacatcgagaccgcccgcgaggtgggcaagagcttcaaggaccgcaaggagatcgagaagcgccaggaggagaaccgcaaggaccgcgagaaggccgccgccaagttccgcgagtacttccccaacttcgtgggcgagcccaagagcaaggacatcctgaagctgcgcctgtacgagcagcagcacggcaagtgcctgtacagcggcaaggagatcaacctgggccgcctgaacgagaagggctacgtggagatcgaccacgccctgcccttcagccgcacctgggacgacagcttcaacaacaaggtgctggtgctgggcagcgagaaccagaacaagggcaaccagaccccctacgagtacttcaacggcaaggacaacagccgcgagtggcaggagttcaaggcccgcgtggagaccagccgcttcccccgcagcaagaagcagcgcatcctgctgcagaagttcgacgaggacggcttcaaggagcgcaacctgaacgacacccgctacgtgaaccgcttcctgtgccagttcgtggccgaccgcatgcgcctgaccggcaagggcaagaagcgcgtgttcgccagcaacggccagatcaccaacctgctgcgcggcttctggggcctgcgcaaggtgcgcgccgagaacgaccgccaccacgccctggacgccgtggtggtggcctgcagcaccgtggccatgcagcagaagatcacccgcttcgtgcgctacaaggagatgaacgccttcgacggtaaaaccatcgacaaggagaccggcgaggtgctgcaccagaagacccacttcccccagccctgggagttcttcgcccaggaggtgatgatccgcgtgttcggcaagcccgacggcaagcccgagttcgaggaggccgacacccccgagaagctgcgcaccctgctggccgagaagctgagcagccgccctgaggccgtgcacgagtacgtgactcctctgttcgtgagccgcgcccccaaccgcaagatgagcggtcagggtcacatggagaccgtgaagagcgccaagcgcctggacgagggcgtgagcgtgctgcgcgtgcccctgacccagctgaagctgaaggacctggagaagatggtgaaccgcgagcgcgagcccaagctgtacgaggccctgaaggcccgcctggaggcccacaaggacgaccccgccaaggccttcgccgagcccttctacaagtacgacaaggccggcaaccgcacccagcaggtgaaggccgtgcgcgtggagcaggtgcagaagaccggcgtgtgggtgcgcaaccacaacggcatcgccgacaacgccaccatggtgcgcgtggacgtgttcgagaagggcgacaagtactacctggtgcccatctacagctggcaggtggccaagggcatcctgcccgaccgcgccgtggtgcagggcaaggacgaggaggactggcagctgatcgacgacagcttcaacttcaagttcagcctgcaccccaacgacctggtggaggtgatcaccaagaaggcccgcatgttcggctacttcgccagctgccaccgcggcaccggcaacatcaacatccgcatccacgacctggaccacaagatcggcaagaacggcatcctggagggcatcggcgtgaagaccgccctgagcttccagaagtaccagatcgacgagctgggcaaggagatccgcccctgccgcctgaagaagcgccctcctgtgcgcgcggccgcagatccaaaaaagaagagaaaggtagatccaaaaaagaagagaaaggtagatccaaaaaagaagagaaaggtagatacggccgcatag

SEQ ID NO: 22 - DNA, 3468 bp, Neisseria meningitidis
  source 1..3468: mol_type = genomic DNA
atggccgccttcaagcccaaccccatcaactacatcctgggcctggccatcggcatcgccagcgtgggctgggccatggtggagatcgacgaggacgagaaccccatctgcctgatcgacctgggtgtgcgcgtgttcgagcgcgctgaggtgcccaagactggtgacagtctggctatggctcgccggcttgctcgctctgttcggcgccttactcgccggcgcgctcaccgccttctgcgcgctcgccgcctgctgaagcgcgagggtgtgctgcaggctgccgacttcgacgagaacggcctgatcaagagcctgcccaacactccttggcagctgcgcgctgccgctctggaccgcaagctgactcctctggagtggagcgccgtgctgctgcacctgatcaagcaccgcggctacctgagccagcgcaagaacgagggcgagaccgccgacaaggagctgggtgctctgctgaagggcgtggccgacaacgcccacgccctgcagactggtgacttccgcactcctgctgagctggccctgaacaagttcgagaaggagagcggccacatccgcaaccagcgcggcgactacagccacaccttcagccgcaaggacctgcaggccgagctgatcctgctgttcgagaagcagaaggagttcggcaacccccacgtgagcggcggcctgaaggagggcatcgagaccctgctgatgacccagcgccccgccctgagcggcgacgccgtgcagaagatgctgggccactgcaccttcgagccagccgagcccaaggccgccaagaacacctacaccgccgagcgcttcatctggctgaccaagctgaacaacctgcgcatcctggagcagggcagcgagcgccccctgaccgacaccgagcgcgccaccctgatggacgagccctaccgcaagagcaagctgacctacgcccaggcccgcaagctgctgggtctggaggacaccgccttcttcaagggcctgcgctacggcaaggacaacgccgaggccagcaccctgatggagatgaaggcctaccacgccatcagccgcgccctggagaaggagggcctgaaggacaagaagagtcctctgaacctgagccccgagctgcaggacgagatcggcaccgccttcagcctgttcaagaccgacgaggacatcaccggccgcctgaaggaccgcatccagcccgagatcctggaggccctgctgaagcacatcagcttcgacaagttcgtgcagatcagcctgaaggccctgcgccgcatcgtgcccctgatggagcagggcaagcgctacgacgaggcctgcgccgagatctacggcgaccactacggcaagaagaacaccgaggagaagatctacctgcctcctatccccgccgacgagatccgcaaccccgtggtgctgcgcgccctgagccaggcccgcaaggtgatcaacggcgtggtgcgccgctacggcagccccgcccgcatccacatcgagaccgcccgcgaggtgggcaagagcttcaaggaccgcaaggagatcgagaagcgccaggaggagaaccgcaaggaccgcgagaaggccgccgccaagttccgcgagtacttccccaacttcgtgggcgagcccaagagcaaggacatcctgaagctgcgcctgtacgagcagcagcacggcaagtgcctgtacagcggcaaggagatcaacctgggccgcctgaacgagaagggctacgtggagatcgccgctgccctgcccttcagccgcacctgggacgacagcttcaacaacaaggtgctggtgctgggcagcgaggctcagaacaagggcaaccagaccccctacgagtacttcaacggcaaggacaacagccgcgagtggcaggagttcaaggcccgcgtggagaccagccgcttcccccgcagcaagaagcagcgcatcctgctgcagaagttcgacgaggacggcttcaaggagcgcaacctgaacgacacccgctacgtgaaccgcttcctgtgccagttcgtggccgaccgcatgcgcctgaccggcaagggcaagaagcgcgtgttcgccagcaacggccagatcaccaacctgctgcgcggcttctggggcctgcgcaaggtgcgcgccgagaacgaccgccaccacgccctggacgccgtggtggtggcctgcagcaccgtggccatgcagcagaagatcacccgcttcgtgcgctacaaggagatgaacgccttcgacggtaaaaccatcgacaaggagaccggcgaggtgctgcaccagaagacccacttcccccagccctgggagttcttcgcccaggaggtgatgatccgcgtgttcggcaagcccgacggcaagcccgagttcgaggaggccgacacccccgagaagctgcgcaccctgctggccgagaagctgagcagccgccctgaggccgtgcacgagtacgtgactcctctgttcgtgagccgcgcccccaaccgcaagatgagcggtcagggtcacatggagaccgtgaagagcgccaagcgcctggacgagggcgtgagcgtgctgcgcgtgcccctgacccagctgaagctgaaggacctggagaagatggtgaaccgcgagcgcgagcccaagctgtacgaggccctgaaggcccgcctggaggcccacaaggacgaccccgccaaggccttcgccgagcccttctacaagtacgacaaggccggcaaccgcacccagcaggtgaaggccgtgcgcgtggagcaggtgcagaagaccggcgtgtgggtgcgcaaccacaacggcatcgccgacaacgccaccatggtgcgcgtggacgtgttcgagaagggcgacaagtactacctggtgcccatctacagctggcaggtggccaagggcatcctgcccgaccgcgccgtggtgcagggcaaggacgaggaggactggcagctgatcgacgacagcttcaacttcaagttcagcctgcaccccaacgacctggtggaggtgatcaccaagaaggcccgcatgttcggctacttcgccagctgccaccgcggcaccggcaacatcaacatccgcatccacgacctggaccacaagatcggcaagaacggcatcctggagggcatcggcgtgaagaccgccctgagcttccagaagtaccagatcgacgagctgggcaaggagatccgcccctgccgcctgaagaagcgccctcctgtgcgcagcagggctgaccccaagaagaagaggaaggtggaggccagcggttccggacgggctgacgcattggacgattttgatctggatatgctgggaagtgacgccctcgatgattttgaccttgacatgcttggttcggatgcccttgatgactttgacctcgacatgctcggcagtgacgcccttgatgatttcgacctggacatgctgattaactctagatga

SEQ ID NO: 23 - DNA, 3489 bp, Neisseria meningitidis
  source 1..3489: mol_type = genomic DNA
atgcccaagaagaagaggaaggtggccgccttcaagcccaaccccatcaactacatcctgggcctggccatcggcatcgccagcgtgggctgggccatggtggagatcgacgaggacgagaaccccatctgcctgatcgacctgggtgtgcgcgtgttcgagcgcgctgaggtgcccaagactggtgacagtctggctatggctcgccggcttgctcgctctgttcggcgccttactcgccggcgcgctcaccgccttctgcgcgctcgccgcctgctgaagcgcgagggtgtgctgcaggctgccgacttcgacgagaacggcctgatcaagagcctgcccaacactccttggcagctgcgcgctgccgctctggaccgcaagctgactcctctggagtggagcgccgtgctgctgcacctgatcaagcaccgcggctacctgagccagcgcaagaacgagggcgagaccgccgacaaggagctgggtgctctgctgaagggcgtggccgacaacgcccacgccctgcagactggtgacttccgcactcctgctgagctggccctgaacaagttcgagaaggagagcggccacatccgcaaccagcgcggcgactacagccacaccttcagccgcaaggacctgcaggccgagctgatcctgctgttcgagaagcagaaggagttcggcaacccccacgtgagcggcggcctgaaggagggcatcgagaccctgctgatgacccagcgccccgccctgagcggcgacgccgtgcagaagatgctgggccactgcaccttcgagccagccgagcccaaggccgccaagaacacctacaccgccgagcgcttcatctggctgaccaagctgaacaacctgcgcatcctggagcagggcagcgagcgccccctgaccgacaccgagcgcgccaccctgatggacgagccctaccgcaagagcaagctgacctacgcccaggcccgcaagctgctgggtctggaggacaccgccttcttcaagggcctgcgctacggcaaggacaacgccgaggccagcaccctgatggagatgaaggcctaccacgccatcagccgcgccctggagaaggagggcctgaaggacaagaagagtcctctgaacctgagccccgagctgcaggacgagatcggcaccgccttcagcctgttcaagaccgacgaggacatcaccggccgcctgaaggaccgcatccagcccgagatcctggaggccctgctgaagcacatcagcttcgacaagttcgtgcagatcagcctgaaggccctgcgccgcatcgtgcccctgatggagcagggcaagcgctacgacgaggcctgcgccgagatctacggcgaccactacggcaagaagaacaccgaggagaagatctacctgcctcctatccccgccgacgagatccgcaaccccgtggtgctgcgcgccctgagccaggcccgcaaggtgatcaacggcgtggtgcgccgctacggcagccccgcccgcatccacatcgagaccgcccgcgaggtgggcaagagcttcaaggaccgcaaggagatcgagaagcgccaggaggagaaccgcaaggaccgcgagaaggccgccgccaagttccgcgagtacttccccaacttcgtgggcgagcccaagagcaaggacatcctgaagctgcgcctgtacgagcagcagcacggcaagtgcctgtacagcggcaaggagatcaacctgggccgcctgaacgagaagggctacgtggagatcgccgctgccctgcccttcagccgcacctgggacgacagcttcaacaacaaggtgctggtgctgggcagcgaggctcagaacaagggcaaccagaccccctacgagtacttcaacggcaaggacaacagccgcgagtggcaggagttcaaggcccgcgtggagaccagccgcttcccccgcagcaagaagcagcgcatcctgctgcagaagttcgacgaggacggcttcaaggagcgcaacctgaacgacacccgctacgtgaaccgcttcctgtgccagttcgtggccgaccgcatgcgcctgaccggcaagggcaagaagcgcgtgttcgccagcaacggccagatcaccaacctgctgcgcggcttctggggcctgcgcaaggtgcgcgccgagaacgaccgccaccacgccctggacgccgtggtggtggcctgcagcaccgtggccatgcagcagaagatcacccgcttcgtgcgctacaaggagatgaacgccttcgacggtaaaaccatcgacaaggagaccggcgaggtgctgcaccagaagacccacttcccccagccctgggagttcttcgcccaggaggtgatgatccgcgtgttcggcaagcccgacggcaagcccgagttcgaggaggccgacacccccgagaagctgcgcaccctgctggccgagaagctgagcagccgccctgaggccgtgcacgagtacgtgactcctctgttcgtgagccgcgcccccaaccgcaagatgagcggtcagggtcacatggagaccgtgaagagcgccaagcgcctggacgagggcgtgagcgtgctgcgcgtgcccctgacccagctgaagctgaaggacctggagaagatggtgaaccgcgagcgcgagcccaagctgtacgaggccctgaaggcccgcctggaggcccacaaggacgaccccgccaaggccttcgccgagcccttctacaagtacgacaaggccggcaaccgcacccagcaggtgaaggccgtgcgcgtggagcaggtgcagaagaccggcgtgtgggtgcgcaaccacaacggcatcgccgacaacgccaccatggtgcgcgtggacgtgttcgagaagggcgacaagtactacctggtgcccatctacagctggcaggtggccaagggcatcctgcccgaccgcgccgtggtgcagggcaaggacgaggaggactggcagctgatcgacgacagcttcaacttcaagttcagcctgcaccccaacgacctggtggaggtgatcaccaagaaggcccgcatgttcggctacttcgccagctgccaccgcggcaccggcaacatcaacatccgcatccacgacctggaccacaagatcggcaagaacggcatcctggagggcatcggcgtgaagaccgccctgagcttccagaagtaccagatcgacgagctgggcaaggagatccgcccctgccgcctgaagaagcgccctcctgtgcgcagcagggctgaccccaagaagaagaggaaggtggaggccagcggttccggacgggctgacgcattggacgattttgatctggatatgctgggaagtgacgccctcgatgattttgaccttgacatgcttggttcggatgcccttgatgactttgacctcgacatgctcggcagtgacgcccttgatgatttcgacctggacatgctgattaactctagatga

SEQ ID NO: 24 - DNA, 3249 bp, Neisseria meningitidis
  source 1..3249: mol_type = genomic DNA
atggctgccttcaaacctaattcaatcaactacatcctcggcctcgatatcggcatcgcatccgtcggctgggcgatggtagaaattgacgaagaagaaaaccccatccgcctgattgatttgggcgtgcgcgtatttgagcgtgccgaagtaccgaaaacaggcgactcccttgccatggcaaggcgtttggcgcgcagtgttcgccgcctgacccgccgtcgcgcccaccgcctgcttcggacccgccgcctattgaaacgcgaaggcgtattacaagccgccaattttgacgaaaacggcttgattaaatccttaccgaatacaccatggcaacttcgcgcagccgcattagaccgcaaactgacgcctttagagtggtcggcagtcttgttgcatttaatcaaacatcgcggctatttatcgcaacggaaaaacgagggcgaaactgccgataaggagcttggcgctttgcttaaaggcgtagccggcaatgcccatgccttacagacaggcgatttccgcacaccggccgaattggctttaaataaatttgagaaagaaagcggccatatccgcaatcagcgcagcgattattcgcatacgttcagccgcaaagatttacaggcggagctgattttgctgtttgaaaaacaaaaagaatttggcaatccgcatgtttcaggcggccttaaagaaggtattgaaaccctactgatgacgcaacgccctgccctgtccggcgatgccgttcaaaaaatgttggggcattgcaccttcgaaccggcagagccgaaagccgctaaaaacacctacacagccgaacgtttcatctggctgaccaagctgaacaacctgcgtattttagagcaaggcagcgagcggccattgaccgataccgaacgcgccacgcttatggacgagccatacagaaaatccaaactgacttacgcacaagcccgtaagctgctgggtttagaagataccgcctttttcaaaggcttgcgctatggtaaagacaatgccgaagcctcaacattgatggaaatgaaggcctaccatgccatcagccgtgcactggaaaaagaaggattgaaagacaaaaaatccccattaaacctttctcccgaattacaagacgaaatcggcacggcattctccctgttcaaaaccgatgaagacattacaggccgtctgaaagaccgtatacagcccgaaatcttagaagcgctgttgaaacacatcagcttcgataagttcgtccaaatttccttgaaagcattgcgccgaattgtgcctctaatggaacaaggcaaacgttacgatgaagcctgcgccgaaatctacggagaccattacggcaagaagaatacggaagaaaagatttatctgccgccgattcccgccgacgaaatccgcaaccccgtcgtcttgcgcgccttatctcaagcacgtaaggtcattaacggcgtggtacgccgttacggctccccagctcgtatccatattgaaactgcaagggaagtaggtaaatcgtttaaagaccgcaaagaaattgagaaacgccaagaagaaaaccgcaaagaccgggaaaaagccgccgccaaattccgagagtatttccccaattttgtcggagaacccaaatccaaagatattctgaaactgcgcctgtacgagcaacaacacggcaaatgcctgtattcgggcaaagaaatcaacttaggccgtctgaacgaaaaaggctatgtcgaaatcgaccatgccctgccgttctcgcgcacatgggacgacagtttcaacaataaagtactggtattgggcagcgaaaaccaaaacaaaggcaatcaaaccccttacgaatacttcaacggcaaagacaacagccgcgaatggcaggaatttaaagcgcgtgtcgaaaccagccgtttcccgcgcagtaaaaaacaacggattctgctgcaaaaattcgatgaagacggctttaaagaacgcaatctgaacgacacgcgctacgtcaaccgtttcctgtgtcaatttgttgccgaccgtatgcggctgacaggtaaaggcaagaaacgtgtctttgcatccaacggacaaattaccaatctgttgcgcggcttttggggattgcgcaaagtgcgtgcggaaaacgaccgccatcacgccttggacgccgtcgtcgttgcctgctcgaccgttgccatgcagcagaaaattacccgttttgtacgctataaagagatgaacgcgtttgacggtaaaaccatagacaaagaaacaggagaagtgctgcatcaaaaaacacacttcccacaaccttgggaatttttcgcacaagaagtcatgattcgcgtcttcggcaaaccggacggcaaacccgaattcgaagaagccgataccctagaaaaactgcgcacgttgcttgccgaaaaattatcatctcgccccgaagccgtacacgaatacgttacgccactgtttgtttcacgcgcgcccaatcggaagatgagcgggcaagggcatatggagaccgtcaaatccgccaaacgactggacgaaggcgtcagcgtgttgcgcgtaccgctgacacagttaaaactgaaagacttggaaaaaatggtcaatcgggagcgcgaacctaagctatacgaagcactgaaagcacggctggaagcacataaagacgatcctgccaaagcctttgccgagccgttttacaaatacgataaagcaggcaaccgcacccaacaggtaaaagccgtacgcgtagagcaagtacagaaaaccggcgtatgggtgcgcaaccataacggtattgccgacaacgcaaccatggtgcgcgtagatgtgtttgagaaaggcgacaagtattatctggtaccgatttacagttggcaggtagcgaaagggattttgccggatagggctgttgtacaaggaaaagatgaagaagattggcaacttattgatgatagtttcaactttaaattctcattacaccctaatgatttagtcgaggttataacaaaaaaagctagaatgtttggttactttgccagctgccatcgaggcacaggtaatatcaatatacgcattcatgatcttgatcataaaattggcaaaaatggaatactggaaggtatcggcgtcaaaaccgccctttcattccaaaaataccaaattgacgaactgggcaaagaaatcagaccatgccgtctgaaaaaacgcccgcctgtccgttaa

SEQ ID NO: 25 - DNA, 4188 bp, Treponema denticola
  source 1..4188: mol_type = genomic DNA
atgaaaaaggaaattaaggattattttctcggattggatgtaggaaccggatcggttggttgggcagttactgatactgactataaactcttaaaggctaatcgtaaagacctttggggaatgaggtgttttgagacggcggaaactgcggaagtgagaaggcttcacaggggggctaggcgccgtattgagagaagaaaaaaaagaataaagctgcttcaagagcttttttcccaagaaattgcaaaaacagatgagggatttttccaaagaatgaaggaaagccctttctatgcagaagacaagactatattacaggaaaacactctttttaatgataaagattttgccgataagacctaccataaagcctatcctaccataaaccatctgataaaggcttggattgaaaacaaggtaaagccggatccaaggttattatacttagcctgtcataatattataaaaaaaagaggtcattttttattcgagggcgatttcgattcagaaaatcagtttgatacttctatacaagccctttttgaatatctgcgtgaagatatggaagtcgatattgatgccgatagccaaaaagtaaaagagattttaaaggatagctctttaaaaaattccgaaaaacaaagccgcctaaataagattttaggactgaaaccctccgacaaacaaaaaaaagctattactaatttaatatcaggcaacaaaataaactttgccgatctttatgataatccggatttaaaggatgcggagaaaaatagtatatctttttcgaaagatgattttgatgctttgagtgatgatcttgcttccattctaggagattcttttgagcttttattaaaagcaaaggctgtatataactgctcggttctttccaaggtaataggcgatgaacagtatctttcttttgcaaaggtaaaaatatatgaaaagcataaaaccgatttgactaaattaaaaaatgttataaaaaagcatttcccaaaagattataaaaaagtattcggatacaataaaaacgaaaaaaataacaacaattactccggatatgtaggcgtatgtaaaaccaagagtaaaaaactaattataaacaattctgtaaatcaagaagatttttacaaatttttaaaaactatcctttcagcaaaatccgagataaaggaagtaaatgatatattgaccgaaattgaaacagggacttttttacctaaacagatatctaaaagcaatgcggagattccttatcaattacgcaagatggagctggaaaaaatattatcaaacgcagaaaaacatttttcctttttaaaacaaaaagatgaaaaaggtttatctcacagtgaaaagattataatgcttttaacatttaagattccttattatattggacctataaacgataaccataaaaaattttttcccgatagatgctgggtagtaaaaaaagaaaaatcgccttccggtaaaactactccatggaacttttttgatcatatcgataaagaaaaaacagctgaagcatttattacaagcagaaccaatttttgcacatatttagtaggggaatccgttttaccaaaaagttctcttttatattccgagtataccgttttaaatgaaatcaacaatttacagattatcattgacggaaaaaatatctgcgatattaaactaaaacaaaaaatatacgaagatttatttaaaaaatataaaaagattacacaaaaacaaatttcaacttttatcaaacacgaaggtatttgcaataaaactgatgaagtaattattctaggtatcgataaagaatgtacatcttcgttaaaatcatatatagaacttaaaaacatattcggaaagcaagtagatgaaatttctacaaagaatatgcttgaagaaattatacgatgggctactatctatgatgaaggagaaggcaaaacaatacttaaaacaaaaataaaagccgaatatggaaaatattgttctgatgaacagatcaaaaaaattctaaatcttaaattttcaggttggggccgcttgtcacgcaaattccttgaaaccgtcacatcagaaatgccgggttttagcgaaccggtaaatataataactgcaatgcgggaaactcaaaataatttaatggagttgcttagcagtgaatttacatttactgaaaatattaaaaagataaattcgggatttgaagatgctgaaaagcaattttcatatgacggtttggttaagcctctgtttttatcaccatcggtaaaaaaaatgttgtggcagactctaaagcttgtaaaagaaatatcgcatattacccaagcccctcctaaaaaaatatttatagaaatggcaaagggtgcagagcttgaacctgcgaggactaagacaagattaaaaattttacaagacttatacaataactgtaaaaatgatgcggatgcttttagttccgagataaaagacctttcaggtaaaatagaaaatgaagataatttaaggcttcgaagcgacaaactttatctttattacacgcagcttggaaagtgcatgtattgcggtaaaccgattgaaataggccatgtatttgatacaagcaactatgatatagatcatatttatccccaatccaagattaaagatgacagtataagtaatcgggttttagtatgcagcagctgcaataaaaataaggaagataaatatcctttgaagtctgaaattcaatcaaagcaaaggggcttttggaattttttacaacgaaataactttataagccttgaaaaattgaataggttaacaagggccactccaatctcggatgacgaaacggcaaaattcattgccagacagcttgtagaaacaagacaggcgacaaaagtagctgcaaaagtattagaaaaaatgtttcccgaaactaagattgtttattctaaagctgaaaccgtatcaatgtttagaaataaattcgatattgtaaaatgcagagaaataaacgattttcatcatgctcatgatgcatatttaaatattgttgtcggaaatgtatataatacaaaatttacaaataatccttggaactttataaaggagaaacgggataatccaaagattgccgatacttacaattattataaagtttttgattatgatgtaaaaagaaataatattacggcatgggaaaaaggaaaaacaattatcactgtgaaggatatgcttaaaagaaatacccctatttatacacgccaagccgcctgcaaaaaaggagaactctttaaccaaaccattatgaaaaaaggattgggccagcatcctctaaaaaaagaaggtcctttttctaatatttcaaaatatgggggctataataaagtctctgctgcatattatactcttatagaatacgaagaaaaagggaataaaatacgaagcttagaaaccatccctctatatttggtaaaagacattcaaaaagatcaagatgtattaaagagttacttaacagatctgctagggaaaaaagaatttaagattttggttcctaaaataaaaatcaactccctcttaaaaattaacggtttcccttgtcatataacagggaaaaccaatgattctttcttactgcgtccggctgttcagttttgctgttcaaataatgaagttctttattttaaaaaaattataagattcagtgaaataagaagtcaaagagaaaagataggaaaaacaatttctccttatgaagacttatcctttagatcttatatcaaagaaaatttatggaaaaagacaaaaaatgatgaaataggagaaaaggagttttatgaccttcttcaaaagaagaatttggaaatctatgatatgcttttaacaaaacataaggatactatttataaaaaaagacctaactctgcaactattgatatcttagtcaaaggaaaagaaaagtttaaatctttaataatcgaaaatcagtttgaagttattttagagattttaaaactgttttctgccactagaaatgtatcagacttacaacatataggcggaagcaaatattcaggagttgcaaagataggaaataaaatatctagtcttgataactgtattttaatttaccaatcaataacaggtatttttgaaaaaaggattgatttgttaaaggtatga

SEQ ID NO: 26 - DNA, 4188 bp, Treponema denticola
  source 1..4188: mol_type = genomic DNA
atgaagaaggagatcaaggactacttcctgggcctggacgtgggcaccggcagcgtgggctgggccgtgaccgacaccgactacaagctgctgaaggccaaccgcaaggacctgtggggcatgcgctgcttcgagactgctgagaccgccgaggtgcgccggctgcaccgcggtgctcgccggcgcatcgagcgccgcaagaagcgcatcaagctgctgcaggagctgttcagccaggagatcgccaagaccgacgagggcttcttccagcgcatgaaggagagccccttctacgccgaggacaagaccatcctgcaggagaacaccctgttcaacgacaaggacttcgccgacaagacctaccacaaggcctaccccaccatcaaccacctgatcaaggcctggatcgagaacaaggtgaagcccgaccctcgcctgctgtacctggcctgccacaacatcatcaagaagcgcggccacttcctgttcgagggcgacttcgacagcgagaaccagttcgacaccagcatccaggccctgttcgagtacctgcgcgaggacatggaggtggacatcgacgccgacagccagaaggtgaaggagatcctgaaggacagcagcctgaagaacagcgagaagcagagccgcctgaacaagatcctgggcctgaagcccagcgacaagcagaagaaggccatcaccaacctgatcagcggcaacaagatcaacttcgccgacctgtacgacaaccccgacctgaaggacgccgagaagaacagcatcagcttcagcaaggacgacttcgacgccctgagcgacgacctggccagcatcctgggcgacagcttcgagctgctgctgaaggccaaggccgtgtacaactgcagcgtgctgagcaaggtgatcggcgacgagcagtacctgagcttcgccaaggtgaagatctacgagaagcacaagaccgaccttaccaagctgaagaacgtgatcaagaagcacttccccaaggactacaagaaggtgttcggctacaacaagaacgagaagaacaacaacaactacagcggctacgtgggcgtgtgcaagaccaagagcaagaagctgatcatcaacaacagcgtgaaccaggaggacttctacaagttcctgaagaccatcctgagcgccaagagcgagatcaaggaggtgaacgacatcctgaccgagatcgagaccggcaccttcctgcccaagcagatcagcaagagcaacgccgagatcccctaccagctgcgcaagatggagctggagaagatcctgagcaacgccgagaagcacttcagcttcctgaagcagaaggacgagaagggcctgagccacagcgagaagatcatcatgctgctgaccttcaagatcccctactacatcggccccatcaacgacaaccacaagaagttcttccccgaccgctgctgggtggtgaagaaggagaagagccccagcggcaagaccaccccctggaacttcttcgaccacatcgacaaggagaagaccgccgaggccttcatcaccagccgcaccaacttctgcacatacctggtgggcgagagcgtgctgcccaagagcagcctgctgtacagcgagtacaccgtgctgaacgagatcaacaacctgcagatcatcatcgacggcaagaacatctgcgacatcaagctgaagcagaagatctacgaggacctgttcaagaagtacaagaagatcacccagaagcagatcagcaccttcatcaagcacgagggcatctgcaacaagaccgacgaggtgatcatcctgggcatcgacaaggagtgcaccagcagcctgaagagctacatcgagctgaagaacatcttcggcaagcaggtggacgagatcagcaccaagaacatgctggaggagatcatccgctgggccaccatctacgacgagggcgagggcaagaccatcctgaagaccaagatcaaggccgagtacggcaagtactgcagcgacgagcagatcaagaagatcctgaacctgaagttcagcggctggggccgcctgagccgcaagttcctggagaccgtgaccagcgagatgcccggcttcagcgagcccgtgaacatcatcaccgccatgcgcgagacccagaacaacctgatggagctgctgagcagcgagttcaccttcaccgagaacatcaagaagatcaacagcggcttcgaggacgccgagaagcagttcagctacgacggcctggtgaagcccctgttcctgagccccagcgtgaagaagatgctgtggcagaccctgaagctggtgaaggagatcagccacatcacccaggctcctcctaagaagatcttcatcgagatggccaagggcgccgagctggagcctgctcgcaccaagacccgcctgaagatcctgcaggacctgtacaacaactgcaagaacgacgccgacgcattcagcagcgagatcaaggacctgagcggcaagatcgagaacgaggacaacctgcgcctgcgcagcgacaagctgtacctgtactacacccagctgggcaagtgcatgtactgcggcaagcccatcgagatcggccacgtgttcgacaccagcaactacgacatcgaccacatctacccccagagcaagatcaaggacgacagcatcagcaaccgcgtgctggtgtgcagcagctgcaacaagaacaaggaggacaagtaccctctgaagagcgagatccagagcaagcagcgcggcttctggaacttcctgcagcgcaacaacttcatcagcctggagaagctgaaccgcctgacccgcgccacccccatcagcgacgacgagaccgccaagttcatcgcccgccagctggtggagactcgccaagctaccaaggtggccgccaaggtgctggagaagatgttccccgagaccaagatcgtgtacagcaaggccgagaccgtgagcatgttccgcaacaagttcgacatcgtgaagtgccgcgagatcaacgacttccaccacgcccacgacgcctacctgaacatcgtggtgggcaacgtgtacaacaccaagttcaccaacaacccctggaatttcattaaggagaagcgcgacaaccccaagatcgccgacacctacaactactacaaggtgttcgactacgacgtgaagcgcaacaacatcaccgcctgggagaagggcaagaccatcatcaccgtgaaggacatgctgaagcgcaacacccccatctacacccgccaggccgcctgcaagaagggcgagctgttcaaccagaccatcatgaagaagggcctgggccagcaccccctgaagaaggagggccccttcagcaacatcagcaagtacggcggctacaacaaggtgagcgccgcctactacaccctgatcgagtacgaggagaagggcaacaagatccgcagcctggagaccatccccctgtacctggtgaaggacatccagaaggaccaggacgtgctgaagagctacctgaccgacctgctgggcaagaaggagttcaagatcctggtgcccaagatcaagatcaacagcctgctgaagatcaacggcttcccctgccacatcaccggcaagaccaacgacagcttcctgctgcgccccgccgtgcagttctgctgcagcaacaacgaggtgctgtacttcaagaagatcatccgcttcagcgagatccgcagccagcgcgagaagatcggcaagaccatcagcccctacgaggacctgagcttccgcagctacatcaaggagaacctgtggaagaagaccaagaacgacgagatcggcgagaaggagttctacgacctgctgcagaagaagaacctggagatctacgacatgctgctgaccaagcacaaggacaccatctacaagaagcgccccaacagcgccaccatcgacatcctggtgaagggcaaggagaagttcaagagcctgatcatcgagaaccagttcgaggtgatcctggagatcctgaagctgttcagcgccacccgcaacgtgagcgacctgcagcacatcggcggcagcaagtacagcggcgtggccaagatcggcaacaagatcagcagcctggacaactgcatcctgatctaccagagcatcaccggcatcttcgagaagcgcatcgacctgctgaaggtgtaa

SEQ ID NO: 27 - DNA, 4188 bp, Treponema denticola
  source 1..4188: mol_type = genomic DNA
atgaagaaggagatcaaggactacttcctgggcctggccgtgggcaccggcagcgtgggctgggccgtgaccgacaccgactacaagctgctgaaggccaaccgcaaggacctgtggggcatgcgctgcttcgagactgctgagaccgccgaggtgcgccggctgcaccgcggtgctcgccggcgcatcgagcgccgcaagaagcgcatcaagctgctgcaggagctgttcagccaggagatcgccaagaccgacgagggcttcttccagcgcatgaaggagagccccttctacgccgaggacaagaccatcctgcaggagaacaccctgttcaacgacaaggacttcgccgacaagacctaccacaaggcctaccccaccatcaaccacctgatcaaggcctggatcgagaacaaggtgaagcccgaccctcgcctgctgtacctggcctgccacaacatcatcaagaagcgcggccacttcctgttcgagggcgacttcgacagcgagaaccagttcgacaccagcatccaggccctgttcgagtacctgcgcgaggacatggaggtggacatcgacgccgacagccagaaggtgaaggagatcctgaaggacagcagcctgaagaacagcgagaagcagagccgcctgaacaagatcctgggcctgaagcccagcgacaagcagaagaaggccatcaccaacctgatcagcggcaacaagatcaacttcgccgacctgtacgacaaccccgacctgaaggacgccgagaagaacagcatcagcttcagcaaggacgacttcgacgccctgagcgacgacctggccagcatcctgggcgacagcttcgagctgctgctgaaggccaaggccgtgtacaactgcagcgtgctgagcaaggtgatcggcgacgagcagtacctgagcttcgccaaggtgaagatctacgagaagcacaagaccgaccttaccaagctgaagaacgtgatcaagaagcacttccccaaggactacaagaaggtgttcggctacaacaagaacgagaagaacaacaacaactacagcggctacgtgggcgtgtgcaagaccaagagcaagaagctgatcatcaacaacagcgtgaaccaggaggacttctacaagttcctgaagaccatcctgagcgccaagagcgagatcaaggaggtgaacgacatcctgaccgagatcgagaccggcaccttcctgcccaagcagatcagcaagagcaacgccgagatcccctaccagctgcgcaagatggagctggagaagatcctgagcaacgccgagaagcacttcagcttcctgaagcagaaggacgagaagggcctgagccacagcgagaagatcatcatgctgctgaccttcaagatcccctactacatcggccccatcaacgacaaccacaagaagttcttccccgaccgctgctgggtggtgaagaaggagaagagccccagcggcaagaccaccccctggaacttcttcgaccacatcgacaaggagaagaccgccgaggccttcatcaccagccgcaccaacttctgcacatacctggtgggcgagagcgtgctgcccaagagcagcctgctgtacagcgagtacaccgtgctgaacgagatcaacaacctgcagatcatcatcgacggcaagaacatctgcgacatcaagctgaagcagaagatctacgaggacctgttcaagaagtacaagaagatcacccagaagcagatcagcaccttcatcaagcacgagggcatctgcaacaagaccgacgaggtgatcatcctgggcatcgacaaggagtgcaccagcagcctgaagagctacatcgagctgaagaacatcttcggcaagcaggtggacgagatcagcaccaagaacatgctggaggagatcatccgctgggccaccatctacgacgagggcgagggcaagaccatcctgaagaccaagatcaaggccgagtacggcaagtactgcagcgacgagcagatcaagaagatcctgaacctgaagttcagcggctggggccgcctgagccgcaagttcctggagaccgtgaccagcgagatgcccggcttcagcgagcccgtgaacatcatcaccgccatgcgcgagacccagaacaacctgatggagctgctgagcagcgagttcaccttcaccgagaacatcaagaagatcaacagcggcttcgaggacgccgagaagcagttcagctacgacggcctggtgaagcccctgttcctgagccccagcgtgaagaagatgctgtggcagaccctgaagctggtgaaggagatcagccacatcacccaggctcctcctaagaagatcttcatcgagatggccaagggcgccgagctggagcctgctcgcaccaagacccgcctgaagatcctgcaggacctgtacaacaactgcaagaacgacgccgacgcattcagcagcgagatcaaggacctgagcggcaagatcgagaacgaggacaacctgcgcctgcgcagcgacaagctgtacctgtactacacccagctgggcaagtgcatgtactgcggcaagcccatcgagatcggccacgtgttcgacaccagcaactacgacatcgctgctatctacccccagagcaagatcaaggacgacagcatcagcaaccgcgtgctggtgtgcagcagctgcgccaagaacaaggaggacaagtaccctctgaagagcgagatccagagcaagcagcgcggcttctggaacttcctgcagcgcaacaacttcatcagcctggagaagctgaaccgcctgacccgcgccacccccatcagcgacgacgagaccgccaagttcatcgcccgccagctggtggagactcgccaagctaccaaggtggccgccaaggtgctggagaagatgttccccgagaccaagatcgtgtacagcaaggccgagaccgtgagcatgttccgcaacaagttcgacatcgtgaagtgccgcgagatcaacgacttccaccacgcccacgacgcctacctgaacatcgtggtgggcaacgtgtacaacaccaagttcaccaacaacccctggaatttcattaaggagaagcgcgacaaccccaagatcgccgacacctacaactactacaaggtgttcgactacgacgtgaagcgcaacaacatcaccgcctgggagaagggcaagaccatcatcaccgtgaaggacatgctgaagcgcaacacccccatctacacccgccaggccgcctgcaagaagggcgagctgttcaaccagaccatcatgaagaagggcctgggccagcaccccctgaagaaggagggccccttcagcaacatcagcaagtacggcggctacaacaaggtgagcgccgcctactacaccctgatcgagtacgaggagaagggcaacaagatccgcagcctggagaccatccccctgtacctggtgaaggacatccagaaggaccaggacgtgctgaagagctacctgaccgacctgctgggcaagaaggagttcaagatcctggtgcccaagatcaagatcaacagcctgctgaagatcaacggcttcccctgccacatcaccggcaagaccaacgacagcttcctgctgcgccccgccgtgcagttctgctgcagcaacaacgaggtgctgtacttcaagaagatcatccgcttcagcgagatccgcagccagcgcgagaagatcggcaagaccatcagcccctacgaggacctgagcttccgcagctacatcaaggagaacctgtggaagaagaccaagaacgacgagatcggcgagaaggagttctacgacctgctgcagaagaagaacctggagatctacgacatgctgctgaccaagcacaaggacaccatctacaagaagcgccccaacagcgccaccatcgacatcctggtgaagggcaaggagaagttcaagagcctgatcatcgagaaccagttcgaggtgatcctggagatcctgaagctgttcagcgccacccgcaacgtgagcgacctgcagcacatcggcggcagcaagtacagcggcgtggccaagatcggcaacaagatcagcagcctggacaactgcatcctgatctaccagagcatcaccggcatcttcgagaagcgcatcgacctgctgaaggtgtaa

SEQ ID NO: 28 - protein, 1053 aa, Streptococcus aureus
MKRNYILGLDIGITSVGYGIIDYETRDVIDAGVRLFKEANVENNEGRRSKRGARRLKRRRRHRIQRVKKLLFDYNLLTDHSELSGINPYEARVKGLSQKLSEEEFSAALLHLAKRRGVHNVNEVEEDTGNELSTKEQISRNSKALEEKYVAELQLERLKKDGEVRGSINRFKTSDYVKEAKQLLKVQKAYHQLDQSFIDTYIDLLETRRTYYEGPGEGSPFGWKDIKEWYEMLMGHCTYFPEELRSVKYAYNADLYNALNDLNNLVITRDENEKLEYYEKFQIIENVFKQKKKPTLKQIAKEILVNEEDIKGYRVTSTGKPEFTNLKVYHDIKDITARKEIIENAELLDQIAKILTIYQSSEDIQEELTNLNSELTQEEIEQISNLKGYTGTHNLSLKAINLILDELWHTNDNQIAIFNRLKLVPKKVDLSQQKEIPTTLVDDFILSPVVKRSFIQSIKVINAIIKKYGLPNDIIIELAREKNSKDAQKMINEMQKRNRQTNERIEEIIRTTGKENAKYLIEKIKLHDMQEGKCLYSLEAIPLEDLLNNPFNYEVDHIIPRSVSFDNSFNNKVLVKQEENSKKGNRTPFQYLSSSDSKISYETFKKHILNLAKGKGRISKTKKEYLLEERDINRFSVQKDFINRNLVDTRYATRGLMNLLRSYFRVNNLDVKVKSINGGFTSFLRRKWKFKKERNKGYKHHAEDALIIANADFIFKEWKKLDKAKKVMENQMFEEKQAESMPEIETEQEYKEIFITPHQIKHIKDFKDYKYSHRVDKKPNRELINDTLYSTRKDDKGNTLIVNNLNGLYDKDNDKLKKLINKSPEKLLMYHHDPQTYQKLKLIMEQYGDEKNPLYKYYEETGNYLTKYSKKDNGPVIKKIKYYGNKLNAHLDITDDYPNSRNKVVKLSLKPYRFDVYLDNGVYKFVTVKNLDVIKKENYYEVNSKCYEEAKKLKKISNQAEFIASFYNNDLIKINGELYRVIGVNNDLLNRIEVNMIDITYREYLENMNDKRPPRIIKTIASKTQSIKKYSTDILGNLYEVKSKKHPQIIKKG

SEQ ID NO: 29 - DNA, 3162 bp, Streptococcus aureus
  source 1..3162: mol_type = genomic DNA
atgaaaaggaattatatcttaggattagatatcggaattacatcagtgggttatggaattattgattatgaaactagagatgtcatagatgcgggcgtacgtttatttaaagaggctaatgttgaaaataatgaaggacgacgatcaaaaagaggtgccagaaggcttaagaggcgtcgtagacatagaatacaaagagtaaagaaacttttatttgattacaatttgttgacagatcatagtgagctaagtggaatcaatccttacgaggcgcgcgtaaagggattaagtcaaaaattaagtgaagaggaattttctgcggcattgctacatttagcaaagcgtagaggtgtacataatgttaatgaagtggaagaagatacaggtaatgaattatccactaaagaacaaatttcaagaaatagtaaagcgttagaagagaagtatgttgcagaattacagttggaacgtttgaaaaaagacggtgaagtgagaggttcgattaaccgtttcaaaacatctgactatgtaaaagaagcaaagcagttattaaaagtacaaaaagcatatcatcaacttgatcaatcatttatagacacttatattgatttattggaaacaagaagaacatattatgagggaccaggtgaaggtagcccatttggatggaaagatattaaagaatggtatgaaatgttaatgggacattgtacgtatttcccagaagaattacgtagtgtgaaatatgcctataatgctgatttatataatgcgctgaatgatttgaacaacttggttattacacgagatgagaatgagaagctagagtattatgaaaaattccaaattatcgagaatgtctttaaacaaaagaaaaagccgacgcttaaacaaattgcgaaggaaatcttggtgaatgaagaagacatcaaaggctatcgtgtcacaagtacaggtaaaccagaatttacaaacttgaaagtttatcacgatatcaaagatattacagcaagaaaagaaattatcgagaatgcagagctactcgatcaaatagctaaaatattaactatttaccagtcatcagaagatatacaagaagaattaacaaacctaaattcagaattgacacaagaagagattgaacaaatttcaaacttgaaaggttatacaggaactcataacctttcactaaaggcaataaatttaatattagacgaattgtggcatacgaacgataatcaaatagctattttcaatcgtttgaaacttgtacctaaaaaggtagatttaagccaacaaaaagaaattcctactactttagttgatgattttatactgtctccagtagtgaaacgttcatttatacaatctattaaagttattaacgctattattaaaaaatacggtttgccaaatgatattattattgaacttgcgagagaaaagaattctaaagatgcacaaaaaatgattaatgaaatgcagaagagaaatcgtcaaacgaatgaacgtattgaggaaattataagaacgacaggtaaagaaaatgctaaatatttaattgaaaaaattaagctgcacgatatgcaagaagggaaatgtttatactcgttagaagcaatccctctagaagatttacttaataatccattcaattacgaagtagaccatatcattccacgttctgtttctttcgataactctttcaataataaagtgttggtgaaacaagaagaaaatagtaaaaaaggtaatagaacgccatttcaatatttaagttcttcagattctaaaataagttatgagacattcaaaaagcatattttaaatcttgctaaaggcaaaggtagaatctctaagacgaaaaaagaatatttgttagaagaacgagatatcaatcgcttcagtgtccaaaaagattttattaaccgtaacttagtagatacacgctatgcgacaagagggttaatgaacttattaagatcttattttagagtgaataacttagatgtcaaagtgaaatcgattaatggcggattcacaagtttcttaagaaggaaatggaagttcaaaaaagaaagaaataagggctacaaacaccatgctgaagatgcactgattattgcgaacgctgattttattttcaaagaatggaaaaaactagataaagctaaaaaagtgatggaaaatcaaatgtttgaagaaaagcaagctgaaagtatgcctgaaattgagactgagcaagagtataaagaaatttttataacgcctcatcaaattaaacatattaaggattttaaagattataaatattcacatagagttgataaaaagccgaatagagagttaataaatgatacattatattctacgagaaaagatgacaagggtaatacattaatcgttaataacttaaatggtttatacgataaagataatgataaattgaaaaaattaattaataaatcacctgaaaaattattgatgtatcatcatgatccacaaacatatcaaaaattaaaattgatcatggaacaatatggcgatgagaaaaatccgctttataaatattatgaagaaacaggcaattacttaacaaaatatagtaaaaaagataacggaccagtcatcaaaaaaattaaatattatggtaacaagctaaatgcgcatttagatattacggatgattatccaaatagcagaaataaagtagtaaaactttcattaaaaccatatcgctttgatgtttatttagataatggggtatataaatttgtgacagttaaaaatttagatgttatcaaaaaagaaaactactatgaagttaattcaaagtgttatgaagaagcaaaaaaactgaagaaaattagtaatcaagcagaatttatcgcaagtttttacaataatgacttgattaagattaacggagaattatatagagtcataggtgtaaataatgatctacttaacagaattgaagtaaatatgatagacatcacatatagagaatatttagagaacatgaatgataaaagaccacctagaataattaaaacaatagcaagcaaaacacaatctattaaaaagtattctacagatattctaggcaatctttatgaagtgaagagtaaaaagcatcctcaaatcataaagaaaggatga

SEQ ID NO: 30 - protein, 1629 aa, Francisella tularensis
MNFKILPIAIDLGVKNTGVFSAFYQKGTSLERLDNKNGKVYELSKDSYTLLMNNRTARRHQRRGIDRKQLVKRLFKLIWTEQLNLEWDKDTQQAISFLFNRRGFSFITDGYSPEYLNIVPEQVKAILMDIFDDYNGEDDLDSYLKLATEQESKISEIYNKLMQKILEFKLMKLCTDIKDDKVSTKTLKEITSYEFELLADYLANYSESLKTQKFSYTDKQGNLKELSYYHHDKYNIQEFLKRHATINDRILDTLLTDDLDIWNFNFEKFDFDKNEEKLQNQEDKDHIQAHLHHFVFAVNKIKSEMASGGRHRSQYFQEITNVLDENNHQEGYLKNFCENLHNKKYSNLSVKNLVNLIGNLSNLELKPLRKYFNDKIHAKADHWDEQKFTETYCHWILGEWRVGVKDQDKKDGAKYSYKDLCNELKQKVTKAGLVDFLLELDPCRTIPPYLDNNNRKPPKCQSLILNPKFLDNQYPNWQQYLQELKKLQSIQNYLDSFETDLKVLKSSKDQPYFVEYKSSNQQIASGQRDYKDLDARILQFIFDRVKASDELLLNEIYFQAKKLKQKASSELEKLESSKKLDEVIANSQLSQILKSQHTNGIFEQGTFLHLVCKYYKQRQRARDSRLYIMPEYRYDKKLHKYNNTGRFDDDNQLLTYCNHKPRQKRYQLLNDLAGVLQVSPNFLKDKIGSDDDLFISKWLVEHIRGFKKACEDSLKIQKDNRGLLNHKINIARNTKGKCEKEIFNLICKIEGSEDKKGNYKHGLAYELGVLLFGEPNEASKPEFDRKIKKFNSIYSFAQIQQIAFAERKGNANTCAVCSADNAHRMQQIKITEPVEDNKDKIILSAKAQRLPAIPTRIVDGAVKKMATILAKNIVDDNWQNIKQVLSAKHQLHIPIITESNAFEFEPALADVKGKSLKDRRKKALERISPENIFKDKNNRIKEFAKGISAYSGANLTDGDFDGAKEELDHIIPRSHKKYGTLNDEANLICVTRGDNKNKGNRIFCLRDLADNYKLKQFETTDDLEIEKKIADTIWDANKKDFKFGNYRSFINLTPQEQKAFRHALFLADENPIKQAVIRAINNRNRTFVNGTQRYFAEVLANNIYLRAKKENLNTDKISFDYFGIPTIGNGRGIAEIRQLYEKVDSDIQAYAKGDKPQASYSHLIDAMLAFCIAADEHRNDGSIGLEIDKNYSLYPLDKNTGEVFTKDIFSQIKITDNEFSDKKLVRKKAIEGFNTHRQMTRDGIYAENYLPILIHKELNEVRKGYTWKNSEEIKIFKGKKYDIQQLNNLVYCLKFVDKPISIDIQISTLEELRNILTTNNIAATAEYYYINLKTQKLHEYYIENYNTALGYKKYSKEMEFLRSLAYRSERVKIKSIDDVKQVLDKDSNFIIGKITLPFKKEWQRLYREWQNTTIKDDYEFLKSFFNVKSITKLHKKVRKDFSLPISTNEGKFLVKRKTWDNNFIYQILNDSDSRADGTKPFIPAFDISKNEIVEAIIDSFTSKNIFWLPKNIELQKVDNKNIFAIDTSKWFEVETPSDLRDIGIATIQYKIDNNSRPKVRVKLDYVIDDDSKINYFMNHSLLKSRYPDKVLEILKQSTIIEFESSGFNKTIKEMLGMKLAGIYNETSNN

SEQ ID NO: 31 - DNA, 4890 bp, Francisella tularensis
  source 1..4890: mol_type = genomic DNA
atgaatttcaaaatattgccaatagcaatagatttaggtgttaaaaatactggtgtctttagcgcattttatcaaaaaggaacttctcttgagagattggataataaaaatggcaaagtatatgaactatcaaaagattcttatactttattgatgaataatagaacagcaagaagacatcaaagaagagggatagatagaaagcagctagtcaaaaggctctttaagcttatttggacagagcagctaaatttagagtgggataaagacactcaacaagcaattagctttttatttaatcgtagaggttttagttttattactgatggttattcgcctgaatatttaaatattgttccagagcaagtaaaagcgatacttatggatatatttgatgattacaacggtgaagatgatttagacagttatttaaaattagctactgagcaagaaagcaaaatttctgaaatttataacaagctaatgcaaaaaatattagagtttaaattaatgaaattatgtactgatattaaggatgataaagtaagtactaaaacgcttaaagaaatcacaagctatgaatttgagttattagctgattatttagcaaactatagcgagagtttaaaaacacaaaaatttagttatacagataaacaaggtaatttaaaagagctaagctactatcatcatgataaatataatattcaagaatttctaaagcgacatgctactataaatgatcgaattttagatactcttttaactgatgatttagatatttggaattttaattttgagaaatttgattttgataagaatgaagaaaagcttcagaatcaggaagataaagatcatatacaagcgcatttacatcattttgtttttgcagtaaataaaataaaaagtgaaatggcaagtggtggtcgtcatcgtagccaatattttcaagagataacaaatgtgctagatgaaaataatcatcaagagggatatctcaagaatttctgtgaaaatttgcataataaaaaatattcaaatttaagtgttaaaaatttagttaatctaattggtaacctaagtaatttagagctaaaaccgctaagaaaatattttaatgacaaaattcacgcaaaagctgatcattgggatgagcaaaagtttacagaaacttattgccactggatattaggagagtggcgagtaggtgtcaaagatcaagataagaaagatggcgctaaatatagttataaagatctgtgtaatgaattaaaacaaaaagttactaaggctggtttggtagattttttattagagttagatccatgtagaactataccaccatatctggataacaataaccgtaaaccaccaaaatgtcaaagtttgattttaaatccgaagtttttagataatcaatatccaaactggcaacaatatttacaagaattaaagaaactacaaagtattcaaaattatttagacagttttgaaactgatttaaaagtcttaaagtcaagtaaagatcaaccatattttgttgaatacaagagttcaaatcagcaaatagcaagtggtcaaagagattataaagatttagatgctcgaatattacagtttatatttgatagggtaaaagctagtgatgagttgcttttgaatgagatttattttcaggctaaaaaacttaaacaaaaagctagctctgagttagaaaaactcgagtcgagcaaaaagctagatgaagttatagcaaatagtcaactatcacagatactaaagtctcaacatacaaatggtatttttgaacagggtacttttttgcatttggtttgtaaatattataaacaaagacaaagagcgagagactctaggctatatattatgcctgaatatcgttatgataaaaaactacataaatataacaatacaggcaggtttgatgatgataatcagctgctaacatattgtaatcataagccaagacaaaaaagataccaattgttaaatgatttagctggggtgttgcaggtatcacctaattttttgaaagataaaattggttctgatgatgatctatttattagcaaatggttggtagagcatattagaggatttaaaaaagcttgtgaagatagtttaaaaatacaaaaagacaatagaggattattaaatcataaaataaatatagctaggaatacaaaaggcaaatgtgaaaaagaaatatttaatttaatatgtaaaatagaaggttcagaagataaaaaaggtaattacaagcatggtttagcttacgaattaggagtacttttatttggtgaacctaatgaagctagtaaacctgagttcgatagaaaaattaaaaaatttaactcaatatacagttttgcacagattcaacaaattgcttttgcagagcgtaaaggcaatgctaacacttgtgcagtttgtagtgctgataatgctcatagaatgcaacaaattaagatcactgagcctgtagaggacaataaagataagataatcttaagtgccaaagctcagagactaccagcgattccaactagaatagttgacggtgcggttaagaaaatggcaactatattagctaaaaatatagttgatgataattggcagaatatcaaacaagttttatcagcaaaacatcagttacatatacctattatcacagaatcaaatgcttttgagtttgaaccagcattagctgatgtaaaaggtaagagcctaaaagataggagaaaaaaagcattagagagaataagtcctgaaaatatattcaaggataaaaacaatagaataaaagaatttgctaaaggtatatcagcatatagtggtgctaatttaactgatggcgattttgatggtgcaaaagaagaattagatcatataatacctcgttcacataaaaaatacggtactctaaatgatgaagcaaatctaatttgtgtaactcgtggtgataataaaaataaaggtaatagaattttctgcctacgtgatcttgcagataactataaactaaaacagtttgagacaactgatgatttagaaattgaaaagaagatagctgatacaatctgggatgctaacaagaaagattttaaatttggtaattatcgtagttttattaacctaacaccacaagagcagaaagcatttcgtcacgcgctatttctggctgatgaaaatcctatcaaacaagcagtcataagagcgataaataatcgtaatcgtacatttgtaaatggcactcaacgctattttgcagaagtactggcaaacaatatctatctaagggctaaaaaagaaaatctaaatacagataaaatttcatttgattattttggtattccaactataggtaatggtagaggtattgctgaaatccgtcaactttatgaaaaagttgatagtgatatacaagcttatgcaaaaggtgataaacctcaagctagctactctcacctaatagatgcgatgctggctttttgtattgctgctgatgaacacagaaatgatggaagtataggtctagaaatcgataaaaattatagtttatatccattagataaaaatacaggagaagtctttaccaaagatatttttagtcaaattaaaattactgataatgagtttagcgataaaaaattagtaagaaaaaaagctatagagggctttaacacgcatagacaaatgactagagatggcatttatgcagaaaattacctaccaatactaatccataaagaactaaatgaagttagaaaaggctatacttggaaaaatagtgaagaaataaaaatattcaaaggtaaaaagtacgatatacaacaattgaataaccttgtgtattgtctaaaatttgtagataaacctatatctatagatatacaaattagtaccttagaagagttaagaaatatattaacaacaaataatatagctgctacagcagaatactattatataaatctaaaaacccaaaaattacatgagtattatatcgaaaactataatactgccttaggttataaaaaatacagtaaagaaatggagtttttgagaagcttagcttatcgtagcgaaagggtaaaaattaaatcaatagatgatgtaaagcaggttttggataaggatagtaactttatcatcggtaagattactttaccatttaaaaaagagtggcaaagactatatcgtgagtggcaaaatacaactatcaaagatgattatgagtttttaaaatcattctttaatgttaaaagtattactaagttgcataaaaaagttagaaaagatttctctttacctatttctacaaatgaaggtaaattcctggtcaaaagaaaaacatgggataacaattttatctatcagatattaaatgattctgattctagagcagacggaacaaagccatttattccagcttttgacatttctaaaaatgaaatagtcgaagccataattgattcatttacatcaaaaaatattttttggctgcctaaaaatatagaattacaaaaggtggataataaaaacatttttgctatagatactagtaaatggttcgaagtagaaacacctagtgatcttagagacattggaatagcaacaattcaatacaagatagataataattctcgccctaaagtcagagttaaacttgattatgttatcgatgatgatagtaagataaattattttatgaatcattctttattaaaatcaagatatcctgacaaagttttagaaattttaaaacaatcaactattatagaatttgaaagttcaggttttaataaaactatcaaagaaatgcttggtatgaaattagcaggtatttataatgaaacatctaataattag

SEQ ID NO: 32 - DNA, 3903 bp, Francisella tularensis
  source 1..3903: mol_type = genomic DNA; note = Francisella tularensis subsp. novicida (strain U112)
atgtcaatttatcaagaatttgttaataaatatagtttaagtaaaactctaagatttgagttaatcccacagggtaaaacacttgaaaacataaaagcaagaggtttgattttagatgatgagaaaagagctaaagactacaaaaaggctaaacaaataattgataaatatcatcagttttttatagaggagatattaagttcggtttgtattagcgaagatttattacaaaactattctgatgtttattttaaacttaaaaagagtgatgatgataatctacaaaaagattttaaaagtgcaaaagatacgataaagaaacaaatatctgaatatataaaggactcagagaaatttaagaatttgtttaatcaaaaccttatcgatgctaaaaaagggcaagagtcagatttaattctatggctaaagcaatctaaggataatggtatagaactatttaaagccaatagtgatatcacagatatagatgaggcgttagaaataatcaaatcttttaaaggttggacaacttattttaagggttttcatgaaaatagaaaaaatgtttatagtagcaatgatattcctacatctattatttataggatagtagatgataatttgcctaaatttctagaaaataaagctaagtatgagagtttaaaagacaaagctccagaagctataaactatgaacaaattaaaaaagatttggcagaagagctaacctttgatattgactacaaaacatctgaagttaatcaaagagttttttcacttgatgaagtttttgagatagcaaactttaataattatctaaatcaaagtggtattactaaatttaatactattattggtggtaaatttgtaaatggtgaaaatacaaagagaaaaggtataaatgaatatataaatctatactcacagcaaataaatgataaaacactcaaaaaatataaaatgagtgttttatttaagcaaattttaagtgatacagaatctaaatcttttgtaattgataagttagaagatgatagtgatgtagttacaacgatgcaaagtttttatgagcaaatagcagcttttaaaacagtagaagaaaaatctattaaagaaacactatctttattatttgatgatttaaaagctcaaaaacttgatttgagtaaaatttattttaaaaatgataaatctcttactgatctatcacaacaagtttttgatgattatagtgttattggtacagcggtactagaatatataactcaacaaatagcacctaaaaatcttgataaccctagtaagaaagagcaagaattaatagccaaaaaaactgaaaaagcaaaatacttatctctagaaactataaagcttgccttagaagaatttaataagcatagagatatagataaacagtgtaggtttgaagaaatacttgcaaactttgcggctattccgatgatatttgatgaaatagctcaaaacaaagacaatttggcacagatatctatcaaatatcaaaatcaaggtaaaaaagacctacttcaagctagtgcggaagatgatgttaaagctatcaaggatcttttagatcaaactaataatctcttacataaactaaaaatatttcatattagtcagtcagaagataaggcaaatattttagacaaggatgagcatttttatctagtatttgaggagtgctactttgagctagcgaatatagtgcctctttataacaaaattagaaactatataactcaaaagccatatagtgatgagaaatttaagctcaattttgagaactcgactttggctaatggttgggataaaaataaagagcctgacaatacggcaattttatttatcaaagatgataaatattatctgggtgtgatgaataagaaaaataacaaaatatttgatgataaagctatcaaagaaaataaaggcgagggttataaaaaaattgtttataaacttttacctggcgcaaataaaatgttacctaaggttttcttttctgctaaatctataaaattttataatcctagtgaagatatacttagaataagaaatcattccacacatacaaaaaatggtagtcctcaaaaaggatatgaaaaatttgagtttaatattgaagattgccgaaaatttatagatttttataaacagtctataagtaagcatccggagtggaaagattttggatttagattttctgatactcaaagatataattctatagatgaattttatagagaagttgaaaatcaaggctacaaactaacttttgaaaatatatcagagagctatattgatagcgtagttaatcagggtaaattgtacctattccaaatctataataaagatttttcagcttatagcaaagggcgaccaaatctacatactttatattggaaagcgctgtttgatgagagaaatcttcaagatgtggtttataagctaaatggtgaggcagagcttttttatcgtaaacaatcaatacctaaaaaaatcactcacccagctaaagaggcaatagctaataaaaacaaagataatcctaaaaaagagagtgtttttgaatatgatttaatcaaagataaacgctttactgaagataagtttttctttcactgtcctattacaatcaattttaaatctagtggagctaataagtttaatgatgaaatcaatttattgctaaaagaaaaagcaaatgatgttcatatattaagtatagatagaggtgaaagacatttagcttactatactttggtagatggtaaaggcaatatcatcaaacaagatactttcaacatcattggtaatgatagaatgaaaacaaactaccatgataagcttgctgcaatagagaaagatagggattcagctaggaaagactggaaaaagataaataacatcaaagagatgaaagagggctatctatctcaggtagttcatgaaatagctaagctagttatagagtataatgctattgtggtttttgaggatttaaattttggatttaaaagagggcgtttcaaggtagagaagcaggtctatcaaaagttagaaaaaatgctaattgagaaactaaactatctagttttcaaagataatgagtttgataaaactgggggagtgcttagagcttatcagctaacagcaccttttgagacttttaaaaagatgggtaaacaaacaggtattatctactatgtaccagctggttttacttcaaaaatttgtcctgtaactggttttgtaaatcagttatatcctaagtatgaaagtgtcagcaaatctcaagagttctttagtaagtttgacaagatttgttataaccttgataagggctattttgagtttagttttgattataaaaactttggtgacaaggctgccaaaggcaagtggactatagctagctttgggagtagattgattaactttagaaattcagataaaaatcataattgggatactcgagaagtttatccaactaaagagttggagaaattgctaaaagattattctatcgaatatgggcatggcgaatgtatcaaagcagctatttgcggtgagagcgacaaaaagttttttgctaagctaactagtgtcctaaatactatcttacaaatgcgtaactcaaaaacaggtactgagttagattatctaatttcaccagtagcagatgtaaatggcaatttctttgattcgcgacaggcgccaaaaaatatgcctcaagatgctgatgccaatggtgcttatcatattgggctaaaaggtctgatgctactaggtaggatcaaaaataatcaagagggcaaaaaactcaatttggttatcaaaaatgaagagtattttgagttcgtgcagaataggaataactaa

SEQ ID NO: 33 - protein, 1300 aa, Francisella tularensis
  source 1..1300: note = Francisella tularensis subsp. novicida (strain U112)
MSIYQEFVNKYSLSKTLRFELIPQGKTLENIKARGLILDDEKRAKDYKKAKQIIDKYHQFFIEEILSSVCISEDLLQNYSDVYFKLKKSDDDNLQKDFKSAKDTIKKQISEYIKDSEKFKNLFNQNLIDAKKGQESDLILWLKQSKDNGIELFKANSDITDIDEALEIIKSFKGWTTYFKGFHENRKNVYSSNDIPTSIIYRIVDDNLPKFLENKAKYESLKDKAPEAINYEQIKKDLAEELTFDIDYKTSEVNQRVFSLDEVFEIANFNNYLNQSGITKFNTIIGGKFVNGENTKRKGINEYINLYSQQINDKTLKKYKMSVLFKQILSDTESKSFVIDKLEDDSDVVTTMQSFYEQIAAFKTVEEKSIKETLSLLFDDLKAQKLDLSKIYFKNDKSLTDLSQQVFDDYSVIGTAVLEYITQQIAPKNLDNPSKKEQELIAKKTEKAKYLSLETIKLALEEFNKHRDIDKQCRFEEILANFAAIPMIFDEIAQNKDNLAQISIKYQNQGKKDLLQASAEDDVKAIKDLLDQTNNLLHKLKIFHISQSEDKANILDKDEHFYLVFEECYFELANIVPLYNKIRNYITQKPYSDEKFKLNFENSTLANGWDKNKEPDNTAILFIKDDKYYLGVMNKKNNKIFDDKAIKENKGEGYKKIVYKLLPGANKMLPKVFFSAKSIKFYNPSEDILRIRNHSTHTKNGSPQKGYEKFEFNIEDCRKFIDFYKQSISKHPEWKDFGFRFSDTQRYNSIDEFYREVENQGYKLTFENISESYIDSVVNQGKLYLFQIYNKDFSAYSKGRPNLHTLYWKALFDERNLQDVVYKLNGEAELFYRKQSIPKKITHPAKEAIANKNKDNPKKESVFEYDLIKDKRFTEDKFFFHCPITINFKSSGANKFNDEINLLLKEKANDVHILSIDRGERHLAYYTLVDGKGNIIKQDTFNIIGNDRMKTNYHDKLAAIEKDRDSARKDWKKINNIKEMKEGYLSQVVHEIAKLVIEYNAIVVFEDLNFGFKRGRFKVEKQVYQKLEKMLIEKLNYLVFKDNEFDKTGGVLRAYQLTAPFETFKKMGKQTGIIYYVPAGFTSKICPVTGFVNQLYPKYESVSKSQEFFSKFDKICYNLDKGYFEFSFDYKNFGDKAAKGKWTIASFGSRLINFRNSDKNHNWDTREVYPTKELEKLLKDYSIEYGHGECIKAAICGESDKKFFAKLTSVLNTILQMRNSKTGTELDYLISPVADVNGNFFDSRQAPKNMPQDADANGAYHIGLKGLMLLGRIKNNQEGKKLNLVIKNEEYFEFVQNRNN

SEQ ID NO: 34 - DNA, 3924 bp, Acidaminococcus sp.
  source 1..3924: mol_type = genomic DNA; note = Acidaminococcus sp. (strain BV3L6)
atgacccaatttgaaggttttaccaatttataccaagtttcgaagacccttcgttttgaactgattccccaaggaaaaacactcaaacatatccaggagcaagggttcattgaggaggataaagctcgcaatgaccattacaaagagttaaaaccaatcattgaccgcatctataagacttatgctgatcaatgtctccaactggtacagcttgactgggagaatctatctgcagccatagactcctatcgtaaggaaaaaaccgaagaaacacgaaatgcgctgattgaggagcaagcaacatatagaaatgcgattcatgactactttataggtcggacggataatctgacagatgccataaataagcgccatgctgaaatctataaaggactttttaaagctgaacttttcaatggaaaagttttaaagcaattagggaccgtaaccacgacagaacatgaaaatgctctactccgttcgtttgacaaatttacgacctatttttccggcttttatgaaaaccgaaaaaatgtctttagcgctgaagatatcagcacggcaattccccatcgaatcgtccaggacaatttccctaaatttaaggaaaactgccatatttttacaagattgataaccgcagttccttctttgcgggagcattttgaaaatgtcaaaaaggccattggaatctttgttagtacgtctattgaagaagtcttttcctttcccttttataatcaacttctaacccaaacgcaaattgatctttataatcaacttctcggcggcatatctagggaagcaggcacagaaaaaatcaagggacttaatgaagttctcaatctggctatccaaaaaaatgatgaaacagcccatataatcgcgtccctgccgcatcgttttattcctctttttaaacaaattctttccgatcgaaatacgttatcctttattttggaagaattcaaaagcgatgaggaagtcatccaatccttctgcaaatataaaaccctcttgagaaacgaaaatgtactggagactgcagaagcccttttcaatgaattaaattccattgatttgactcatatctttatttcccataaaaagttagaaaccatctcttcagcgctttgtgaccattgggataccttgcgcaatgcactttacgaaagacggatttctgaactcactggcaaaataacaaaaagtgccaaagaaaaagttcaaaggtcattaaaacatgaggatataaatctccaagaaattatttctgctgcaggaaaagaactatcagaagcattcaaacaaaaaacaagtgaaattctttcccatgcccatgctgcacttgaccagcctcttcccacaacattaaaaaaacaggaagaaaaagaaatcctcaaatcacagctcgattcgcttttaggcctttatcatcttcttgattggtttgctgtcgatgaaagcaatgaagtcgacccagaattctcagcacggctgacaggcattaaactagaaatggaaccaagcctttcgttttataataaagcaagaaattatgcgacaaaaaagccctattcggtggaaaaatttaaattgaattttcaaatgccaacccttgcctctggttgggatgtcaataaagaaaaaaataatggagctattttattcgtaaaaaatggtctctattaccttggtatcatgcctaaacagaaggggcgctataaagccctgtcttttgagccgacagaaaaaacatcagaaggattcgataagatgtactatgactacttcccagatgccgcaaaaatgattcctaagtgttccactcagctaaaggctgtaaccgctcattttcaaactcataccacccccattcttctctcaaataatttcattgaacctcttgaaatcacaaaagaaatttatgacctgaacaatcctgaaaaggagcctaaaaagtttcaaacggcttatgcaaagaagacaggcgatcaaaaaggctatagagaagcgctttgcaaatggattgactttacgcgggattttctctctaaatatacgaaaacaacttcaatcgatttatcttcactccgcccttcttcgcaatataaagatttaggggaatattacgccgaactgaatccgcttctctatcatatctccttccaacgaattgctgaaaaggaaatcatggatgctgtagaaacgggaaaattgtatctgttccaaatctacaataaggattttgcgaagggccatcacgggaaaccaaatctccacaccctgtattggacaggtctcttcagtcctgaaaaccttgcgaaaaccagcatcaaacttaatggtcaagcagaattgttctatcgacctaaaagccgcatgaagcggatggcccatcgtcttggggaaaaaatgctgaacaaaaaactaaaggaccagaagacaccgattccagataccctctaccaagaactgtacgattatgtcaaccaccggctaagccatgatctttccgatgaagcaagggccctgcttccaaatgttatcaccaaagaagtctcccatgaaattataaaggatcggcggtttacttccgataaatttttcttccatgttcccattacactgaattatcaagcagccaatagtcccagtaaattcaaccagcgtgtcaatgcctaccttaaggagcatccggaaacgcccatcattggtatcgatcgtggagaacgcaatctaatctatattaccgtcattgacagtactgggaaaattttggagcagcgttccctgaataccatccagcaatttgactaccaaaaaaaattggacaacagggaaaaagagcgtgttgccgcccgtcaagcctggtccgtcgtcggaacgatcaaagaccttaaacaaggctacttgtcacaggtcatccatgaaattgtagacctgatgattcattaccaagctgttgtcgtccttgaaaacctcaacttcggatttaaatcaaaacggacaggcattgccgaaaaagcagtctaccaacaatttgaaaagatgctaatagataaactcaactgtttggttctcaaagattatcctgctgagaaagtgggaggcgtcttaaacccgtatcaacttacagatcagttcacgagctttgcaaaaatgggcacgcaaagcggcttccttttctatgtaccggccccttatacctcaaagattgatcccctgactggttttgtcgatccctttgtatggaagaccattaaaaatcatgaaagtcggaagcatttcctagaaggatttgatttcctgcattatgatgtcaaaacaggtgattttatcctccattttaaaatgaatcggaatctctctttccagagagggcttcctggcttcatgccagcttgggatattgttttcgaaaagaatgaaacccaatttgatgcaaaagggacgcccttcattgcaggaaaacgaattgttcctgtaatcgaaaatcatcgttttacgggtcgttacagagacctctatcccgctaatgaactcattgcccttctggaagaaaaaggcattgtctttagagacggaagtaatatattacccaaacttttagaaaatgatgattctcatgcaattgatacgatggtcgccttgattcgcagtgtactccaaatgagaaacagcaatgccgcaacgggggaagactacatcaactctcccgttagggatctgaacggggtgtgtttcgacagtcgattccaaaatccagaatggccaatggatgcggatgccaacggagcttatcatattgccttaaaagggcagcttcttctgaaccacctcaaagaaagcaaagatctgaaattacaaaacggcatcagcaaccaagattggctggcctacattcaggaactgagaaactga

SEQ ID NO: 35 - protein, 1307 aa, Acidaminococcus sp.
  source 1..1307: note = Acidaminococcus sp. (strain BV3L6)
MTQFEGFTNLYQVSKTLRFELIPQGKTLKHIQEQGFIEEDKARNDHYKELKPIIDRIYKTYADQCLQLVQLDWENLSAAIDSYRKEKTEETRNALIEEQATYRNAIHDYFIGRTDNLTDAINKRHAEIYKGLFKAELFNGKVLKQLGTVTTTEHENALLRSFDKFTTYFSGFYENRKNVFSAEDISTAIPHRIVQDNFPKFKENCHIFTRLITAVPSLREHFENVKKAIGIFVSTSIEEVFSFPFYNQLLTQTQIDLYNQLLGGISREAGTEKIKGLNEVLNLAIQKNDETAHIIASLPHRFIPLFKQILSDRNTLSFILEEFKSDEEVIQSFCKYKTLLRNENVLETAEALFNELNSIDLTHIFISHKKLETISSALCDHWDTLRNALYERRISELTGKITKSAKEKVQRSLKHEDINLQEIISAAGKELSEAFKQKTSEILSHAHAALDQPLPTTLKKQEEKEILKSQLDSLLGLYHLLDWFAVDESNEVDPEFSARLTGIKLEMEPSLSFYNKARNYATKKPYSVEKFKLNFQMPTLASGWDVNKEKNNGAILFVKNGLYYLGIMPKQKGRYKALSFEPTEKTSEGFDKMYYDYFPDAAKMIPKCSTQLKAVTAHFQTHTTPILLSNNFIEPLEITKEIYDLNNPEKEPKKFQTAYAKKTGDQKGYREALCKWIDFTRDFLSKYTKTTSIDLSSLRPSSQYKDLGEYYAELNPLLYHISFQRIAEKEIMDAVETGKLYLFQIYNKDFAKGHHGKPNLHTLYWTGLFSPENLAKTSIKLNGQAELFYRPKSRMKRMAHRLGEKMLNKKLKDQKTPIPDTLYQELYDYVNHRLSHDLSDEARALLPNVITKEVSHEIIKDRRFTSDKFFFHVPITLNYQAANSPSKFNQRVNAYLKEHPETPIIGIDRGERNLIYITVIDSTGKILEQRSLNTIQQFDYQKKLDNREKERVAARQAWSVVGTIKDLKQGYLSQVIHEIVDLMIHYQAVVVLENLNFGFKSKRTGIAEKAVYQQFEKMLIDKLNCLVLKDYPAEKVGGVLNPYQLTDQFTSFAKMGTQSGFLFYVPAPYTSKIDPLTGFVDPFVWKTIKNHESRKHFLEGFDFLHYDVKTGDFILHFKMNRNLSFQRGLPGFMPAWDIVFEKNETQFDAKGTPFIAGKRIVPVIENHRFTGRYRDLYPANELIALLEEKGIVFRDGSNILPKLLENDDSHAIDTMVALIRSVLQMRNSNAATGEDYINSPVRDLNGVCFDSRFQNPEWPMDADANGAYHIALKGQLLLNHLKESKDLKLQNGISNQDWLAYIQELRN

SEQ ID NO: 36 - DNA, 3741 bp, unidentified
  source 1..3741: mol_type = genomic DNA; note = Lachnospiraceae bacterium (strain ND2006)
atgcttaagaatgttggaattgataggttagatgttgaaaaagggagaaaaaatatgtctaaattagagaagtttacaaattgttactctttgtcaaaaacacttcgttttaaggcgattcctgttggaaaaacccaagaaaatattgataataaaagattgcttgtcgaggatgaaaaacgtgcagaagattataagggggttaaaaaattacttgataggtattatttatcatttattaatgatgttcttcattccattaaactaaagaatttaaataattatatttcgttgtttagaaagaaaactcggacggaaaaagaaaacaaagaattagaaaatttagagataaatttacgtaaagaaatcgctaaggcttttaagggtaatgaaggttataaatctttatttaagaaggatattatcgagacgatattgcctgaatttcttgatgataaagatgaaattgctttggttaattcatttaatggatttacaacggcatttaccggtttttttgataatagggaaaatatgttttcggaagaagctaaatcaacctcaattgcttttcgttgtattaatgagaatttaacaagatatatatcaaatatggatatatttgaaaaagttgatgcaattttcgataagcatgaagtacaggaaataaaagaaaaaattctaaacagtgattatgatgttgaagatttcttcgaaggagaattttttaattttgttcttacgcaagaaggtatcgatgtttataacgctataattggtggctttgtgacagaatccggagaaaaaataaaaggattaaatgaatatattaatttatataatcagaaaactaagcaaaaattaccgaagtttaagcctttatataaacaggttttatcagatagagagtcactttctttttatggcgaaggttatacatctgatgaggaagttttagaagtatttagaaatactcttaataagaattcagaaatattttcttcaattaagaaattggaaaagttatttaaaaacttcgatgaatattcaagtgcaggaattttcgtaaaaaatggaccggctatttctacaatttctaaggatatatttggagagtggaatgtaattagagacaaatggaatgcggagtacgatgatatacatttaaaaaagaaggctgtagtaacagaaaaatatgaagatgacaggcgtaaatcattcaaaaaaataggaagtttttcattggagcagttgcaagaatacgctgatgctgatctatctgtggtagagaagttaaaagaaatcattatccaaaaagtggatgagatatataaagtttatggctcgtcagaaaaattgttcgatgctgattttgtactagaaaaatcgttaaaaaagaatgatgcagttgtagcaataatgaaagatttactagattctgtgaagtcttttgaaaattatataaaagccttttttggagagggaaaagaaacaaatcgagatgaatcattttatggtgattttgttttggcatatgacattcttttgaaagtggatcatatttatgatgcaatacgaaattatgtgacacaaaaaccgtattcgaaagataagtttaaattatattttcaaaacccgcaatttatggggggctgggataaggataaagagacagactatagggcaactatacttagatatggctcaaagtattacttggcgattatggataaaaaatatgctaagtgcttgcaaaaaatagataaggatgatgtaaatggaaactatgaaaaaataaattataagttgcttccaggacctaataagatgcttccaaaggtgttttttagtaagaagtggatggcttattataatccgtcggaagatattcaaaaaatatataaaaatggaacatttaaaaaaggagatatgtttaatttaaatgattgtcataaattaattgatttctttaaggattcaatcagtcggtatccgaaatggagtaacgcatatgattttaacttttctgagaccgagaaatataaggatatagcaggtttttacagagaggttgaagaacaaggatataaagtatcatttgaaagtgcgtctaaaaaagaagttgataaattggtagaagaaggaaaattatacatgttccaaatttataataaagacttttcggataaaagtcatggaacgccaaatcttcatacaatgtattttaagttgctgtttgatgaaaataatcatggtcaaattaggctttctggtggtgctgagctattcatgcgacgtgcaagtttgaaaaaggaagaattagttgtgcatcctgccaatagcccgatagcgaataaaaacccggataatccaaagaaaacgactacgttgtcatatgatgtatacaaggacaaaagattttcggaagatcagtatgagttgcatatacctattgcaataaataaatgccctaaaaatatatttaagataaatacagaggttagagtgctgctgaagcatgatgataatccttatgttataggaattgataggggggagagaaatttactttacattgtggtggttgatggtaagggtaatattgtggagcaatattcgctgaatgaaataattaataattttaatggaattagaattaagacggattaccattcacttttggataaaaaggagaaggaaagatttgaagctcgtcaaaattggacgtctatagaaaacattaaagaactaaaagccggatatattagtcaggttgttcataagatatgtgagttggtagaaaaatatgatgcggtaattgcacttgaagatttgaattctggttttaagaatagtcgagttaaagttgaaaagcaagtatatcagaaatttgaaaaaatgctgattgataaacttaactatatggtagataagaaatctaatccttgcgctacgggtggtgctctgaaaggctatcaaattactaacaagtttgagagttttaagtcgatgagtacacaaaatggttttattttttatattccggcgtggttgactagcaaaattgatccgtcaacaggatttgtaaatttgttgaaaacaaagtatacgagcattgcagattcaaagaaatttataagttcttttgacagaattatgtatgtacctgaagaagatttattcgagtttgcattagattataagaatttttctcggacagacgcggattatataaaaaaatggaaactctatagctatggtaacaggattagaatatttagaaatcctaaaaaaaataatgtatttgattgggaagaggtatgtcttacatcagcctataaggaactttttaataaatatgggattaattatcagcaaggagatatacgagctctcttatgtgaacagagtgataaggcattctatagctcttttatggcattaatgtcactcatgctgcaaatgagaaatagtataacaggtaggacggatgtagattttttgatttcaccagtaaaaaattctgacggtattttttatgattccagaaattatgaagctcaggaaaatgcaatattaccgaaaaatgcagatgctaatggggcttataatatcgcaagaaaagttttgtgggctataggtcagtttaaaaaggctgaagatgaaaaacttgataaggttaaaattgcaatatcaaataaggaatggctcgaatatgcgcaaacaagtgttaagcattga

SEQ ID NO: 37 - protein, 1228 aa, unidentified
  source 1..1228: note = Lachnospiraceae bacterium (strain ND2006)
MSKLEKFTNCYSLSKTLRFKAIPVGKTQENIDNKRLLVEDEKRAEDYKGVKKLLDRYYLSFINDVLHSIKLKNLNNYISLFRKKTRTEKENKELENLEINLRKEIAKAFKGNEGYKSLFKKDIIETILPEFLDDKDEIALVNSFNGFTTAFTGFFDNRENMFSEEAKSTSIAFRCINENLTRYISNMDIFEKVDAIFDKHEVQEIKEKILNSDYDVEDFFEGEFFNFVLTQEGIDVYNAIIGGFVTESGEKIKGLNEYINLYNQKTKQKLPKFKPLYKQVLSDRESLSFYGEGYTSDEEVLEVFRNTLNKNSEIFSSIKKLEKLFKNFDEYSSAGIFVKNGPAISTISKDIFGEWNVIRDKWNAEYDDIHLKKKAVVTEKYEDDRRKSFKKIGSFSLEQLQEYADADLSVVEKLKEIIIQKVDEIYKVYGSSEKLFDADFVLEKSLKKNDAVVAIMKDLLDSVKSFENYIKAFFGEGKETNRDESFYGDFVLAYDILLKVDHIYDAIRNYVTQKPYSKDKFKLYFQNPQFMGGWDKDKETDYRATILRYGSKYYLAIMDKKYAKCLQKIDKDDVNGNYEKINYKLLPGPNKMLPKVFFSKKWMAYYNPSEDIQKIYKNGTFKKGDMFNLNDCHKLIDFFKDSISRYPKWSNAYDFNFSETEKYKDIAGFYREVEEQGYKVSFESASKKEVDKLVEEGKLYMFQIYNKDFSDKSHGTPNLHTMYFKLLFDENNHGQIRLSGGAELFMRRASLKKEELVVHPANSPIANKNPDNPKKTTTLSYDVYKDKRFSEDQYELHIPIAINKCPKNIFKINTEVRVLLKHDDNPYVIGIDRGERNLLYIVVVDGKGNIVEQYSLNEIINNFNGIRIKTDYHSLLDKKEKERFEARQNWTSIENIKELKAGYISQVVHKICELVEKYDAVIALEDLNSGFKNSRVKVEKQVYQKFEKMLIDKLNYMVDKKSNPCATGGALKGYQITNKFESFKSMSTQNGFIFYIPAWLTSKIDPSTGFVNLLKTKYTSIADSKKFISSFDRIMYVPEEDLFEFALDYKNFSRTDADYIKKWKLYSYGNRIRIFRNPKKNNVFDWEEVCLTSAYKELFNKYGINYQQGDIRALLCEQSDKAFYSSFMALMSLMLQMRNSITGRTDVDFLISPVKNSDGIFYDSRNYEAQENAILPKNADANGAYNIARKVLWAIGQFKKAEDEKLDKVKIAISNKEWLEYAQTSVKH

SEQ ID NO: 38 - protein, 1064 aa, Bradyrhizobium sp.
  source 1..1064: note = Bradyrhizobium sp. BTAi1
MKRTSLRAYRLGVDLGANSLGWFVVWLDDHGQPEGLGPGGVRIFPDGRNPQSKQSNAAGRRLARSARRRRDRYLQRRGKLMGLLVKHGLMPADEPARKRLECLDPYGLRAKALDEVLPLHHVGRALFHLNQRRGLFANRAIEQGDKDASAIKAAAGRLQTSMQACGARTLGEFLNRRHQLRATVRARSPVGGDVQARYEFYPTRAMVDAEFEAIWAAQAPHHPTMTAEAHDTIREAIFSQRAMKRPSIGKCSLDPATSQDDVDGFRCAWSHPLAQRFRIWQDVRNLAVVETGPTSSRLGKEDQDKVARALLQTDQLSFDEIRGLLGLPSDARFNLESDRRDHLKGDATGAILSARRHFGPAWHDRSLDRQIDIVALLESALDEAAIIASLGTTHSLDEAAAQRALSALLPDGYCRLGLRAIKRVLPLMEAGRTYAEAASAAGYDHALLPGGKLSPTGYLPYYGQWLQNDVVGSDDERDTNERRWGRLPNPTVHIGIGQLRRVVNELIRWHGPPAEITVELTRDLKLSPRRLAELEREQAENQRKNDKRTSLLRKLGLPASTHNLLKLRLWDEQGDVASECPYTGEAIGLERLVSDDVDIDHLIPFSISWDDSAANKVVCMRYANREKGNRTPFEAFGHRQGRPYDWADIAERAARLPRGKRWRFGPGARAQFEELGDFQARLLNETSWLARVAKQYLAAVTHPHRIHVLPGRLTALLRATWELNDLLPGSDDRAAKSRKDHRHHAIDALVAALTDQALLRRMANAHDDTRRKIEVLLPWPTFRIDLETRLKAMLVSHKPDHGLQARLHEDTAYGTVEHPETEDGANLVYRKTFVDISEKEIDRIRDRRLRDLVRAHVAGERQQGKTLKAAVLSFAQRRDIAGHPNGIRHVRLTKSIKPDYLVPIRDKAGRIYKSYNAGENAFVDILQAESGRWIARATTVFQANQANESHDAPAAQPIMRVFKGDMLRIDHAGAEKFVKIVRLSPSNNLLYLVEHHQAGVFQTRHDDPEDSFRWLFASFDKLREWNAELVRIDTLGQPWRRKRGLETGSEDATRIGWTRPKKWP

SEQ ID NO: 39 - protein, 1035 aa, Candidatus Puniceispirillum marinum
MRRLGLDLGTNSIGWCLLDLGDDGEPVSIFRTGARIFSDGRDPKSLGSLKATRREARLTRRRRDRFIQRQKNLINALVKYGLMPADEIQRQALAYKDPYPIRKKALDEAIDPYEMGRAIFHINQRRGFKSNRKSADNEAGVVKQSIADLEMKLGEAGARTIGEFLADRQATNDTVRARRLSGTNALYEFYPDRYMLEQEFDTLWAKQAAFNPSLYIEAARERLKEIVFFQRKLKPQEVGRCIFLSDEDRISKALPSFQRFRIYQELSNLAWIDHDGVAHRITASLALRDHLFDELEHKKKLTFKAMRAILRKQGVVDYPVGFNLESDNRDHLIGNLTSCIMRDAKKMIGSAWDRLDEEEQDSFILMLQDDQKGDDEVRSILTQQYGLSDDVAEDCLDVRLPDGHGSLSKKAIDRILPVLRDQGLIYYDAVKEAGLGEANLYDPYAALSDKLDYYGKALAGHVMGASGKFEDSDEKRYGTISNPTVHIALNQVRAVVNELIRLHGKPDEVVIEIGRDLPMGADGKRELERFQKEGRAKNERARDELKKLGHIDSRESRQKFQLWEQLAKEPVDRCCPFTGKMMSISDLFSDKVEIEHLLPFSLTLDDSMANKTVCFRQANRDKGNRAPFDAFGNSPAGYDWQEILGRSQNLPYAKRWRFLPDAMKRFEADGGFLERQLNDTRYISRYTTEYISTIIPKNKIWVVTGRLTSLLRGFWGLNSILRGHNTDDGTPAKKSRDDHRHHAIDAIVVGMTSRGLLQKVSKAARRSEDLDLTRLFEGRIDPWDGFRDEVKKHIDAIIVSHRPRKKSQGALHNDTAYGIVEHAENGASTVVHRVPITSLGKQSDIEKVRDPLIKSALLNETAGLSGKSFENAVQKWCADNSIKSLRIVETVSIIPITDKEGVAYKGYKGDGNAYMDIYQDPTSSKWKGEIVSRFDANQKGFIPSWQSQFPTARLIMRLRINDLLKLQDGEIEEIYRVQRLSGSKILMAPHTEANVDARDRDKNDTFKLTSKSPGKLQSASARKVHISPTGLIREG

SEQ ID NO: 40 - protein, 1358 aa, Acidaminococcus sp.
MGKMYYLGLDIGTNSVGYAVTDPSYHLLKFKGEPMWGAHVFAAGNQSAERRSFRTSRRRLDRRQQRVKLVQEIFAPVISPIDPRFFIRLHESALWRDDVAETDKHIFFNDPTYTDKEYYSDYPTIHHLIVDLMESSEKHDPRLVYLAVAWLVAHRGHFLNEVDKDNIGDVLSFDAFYPEFLAFLSDNGVSPWVCESKALQATLLSRNSVNDKYKALKSLIFGSQKPEDNFDANISEDGLIQLLAGKKVKVNKLFPQESNDASFTLNDKEDAIEEILGTLTPDECEWIAHIRRLFDWAIMKHALKDGRTISESKVKLYEQHHHDLTQLKYFVKTYLAKEYDDIFRNVDSETTKNYVAYSYHVKEVKGTLPKNKATQEEFCKYVLGKVKNIECSEADKVDFDEMIQRLTDNSFMPKQVSGENRVIPYQLYYYELKTILNKAASYLPFLTQCGKDAISNQDKLLSIMTFRIPYFVGPLRKDNSEHAWLERKAGKIYPWNFNDKVDLDKSEEAFIRRMTNTCTYYPGEDVLPLDSLIYEKFMILNEINNIRIDGYPISVDVKQQVFGLFEKKRRVTVKDIQNLLLSLGALDKHGKLTGIDTTIHSNYNTYHHFKSLMERGVLTRDDVERIVERMTYSDDTKRVRLWLNNNYGTLTADDVKHISRLRKHDFGRLSKMFLTGLKGVHKETGERASILDFMWNTNDNLMQLLSECYTFSDEITKLQEAYYAKAQLSLNDFLDSMYISNAVKRPIYRTLAVVNDIRKACGTAPKRIFIEMARDGESKKKRSVTRREQIKNLYRSIRKDFQQEVDFLEKILENKSDGQLQSDALYLYFAQLGRDMYTGDPIKLEHIKDQSFYNIDHIYPQSMVKDDSLDNKVLVQSEINGEKSSRYPLDAAIRNKMKPLWDAYYNHGLISLKKYQRLTRSTPFTDDEKWDFINRQLVETRQSTKALAILLKRKFPDTEIVYSKAGLSSDFRHEFGLVKSRNINDLHHAKDAFLAIVTGNVYHERFNRRWFMVNQPYSVKTKTLFTHSIKNGNFVAWNGEEDLGRIVKMLKQNKNTIHFTRFSFDRKEGLFDIQPLKASTGLVPRKAGLDVVKYGGYDKSTAAYYLLVRFTLEDKKTQHKLMMIPVEGLYKARIDHDKEFLTDYAQTTISEILQKDKQKVINIMFPMGTRHIKLNSMISIDGFYLSIGGKSSKGKSVLCHAMVPLIVPHKIECYIKAMESFARKFKENNKLRIVEKFDKITVEDNLNLYELFLQKLQHNPYNKFFSTQFDVLTNGRSTFTKLSPEEQVQTLLNILSIFKTCRSSGCDLKSINGSAQAARIMISADLTGLSKKYSDIRLVEQSASGLFVSKSQNLLEYL

SEQ ID NO: 41 - protein, 1358 aa, Acidaminococcus sp.; identical to SEQ ID NO: 40
  source 1..1358: note = Acidaminococcus sp. D21

SEQ ID NO: 42 - protein, 1138 aa, Acidothermus cellulolyticus
MGGSEVGTVPVTWRLGVDVGERSIGLAAVSYEEDKPKEILAAVSWIHDGGVGDERSGASRLALRGMARRARRLRRFRRARLRDLDMLLSELGWTPLPDKNVSPVDAWLARKRLAEEYVVDETERRRLLGYAVSHMARHRGWRNPWTTIKDLKNLPQPSDSWERTRESLEARYSVSLEPGTVGQWAGYLLQRAPGIRLNPTQQSAGRRAELSNATAFETRLRQEDVLWELRCIADVQGLPEDVVSNVIDAVFCQKRPSVPAERIGRDPLDPSQLRASRACLEFQEYRIVAAVANLRIRDGSGSRPLSLEERNAVIEALLAQTERSLTWSDIALEILKLPNESDLTSVPEEDGPSSLAYSQFAPFDETSARIAEFIAKNRRKIPTFAQWWQEQDRTSRSDLVAALADNSIAGEEEQELLVHLPDAELEALEGLALPSGRVAYSRLTLSGLTRVMRDDGVDVHNARKTCFGVDDNWRPPLPALHEATGHPVVDRNLAILRKFLSSATMRWGPPQSIVVELARGASESRERQAEEEAARRAHRKANDRIRAELRASGLSDPSPADLVRARLLELYDCHCMYCGAPISWENSELDHIVPRTDGGSNRHENLAITCGACNKEKGRRPFASWAETSNRVQLRDVIDRVQKLKYSGNMYWTRDEFSRYKKSVVARLKRRTSDPEVIQSIESTGYAAVALRDRLLSYGEKNGVAQVAVFRGGVTAEARRWLDISIERLFSRVAIFAQSTSTKRLDRRHHAVDAVVLTTLTPGVAKTLADARSRRVSAEFWRRPSDVNRHSTEEPQSPAYRQWKESCSGLGDLLISTAARDSIAVAAPLRLRPTGALHEETLRAFSEHTVGAAWKGAELRRIVEPEVYAAFLALTDPGGRFLKVSPSEDVLPADENRHIVLSDRVLGPRDRVKLFPDDRGSIRVRGGAAYIASFHHARVFRWGSSHSPSFALLRVSLADLAVAGLLRDGVDVFTAELPPWTPAWRYASIALVKAVESGDAKQVGWLVPGDELDFGPEGVTTAAGDLSMFLKYFPERHWVVTGFEDDKRINLKPAFLSAEQAEVLRTERSDRPDTLTEAGEILAQFFPRCWRATVAKVLCHPGLTVIRRTALGQPRWRRGHLPYSWRPWSADPWSGGTP

SEQ ID NO: 43 - protein, 1045 aa, Acidovorax avenae
MQKEKPLAYRLALDLGSTSLGWAVLRLSAPGEPSAVIRAGSRIFSDGRNPKDGSSLAVTRRAARAMRRRRDRLLKRKARMLAALERHGFFPQDEAARKALEKLNPYGLRARGLESALKPEEFGRALFHLNQRRGFQSNRKTDRKDSDSGALKQAIGTLRAQMHESGCRTVGEWFWKVRMERKPEGVKGQGVRARYRETPFTTDEGKKRIDKRYDLYVDRAMVAQEFDALWAAQATFAPALFNEAARAELRDILLHQRKLRPVQPGRCTLVPEEPRALLALPSTQRFRIYQEVNHLRVLHDELREEALTLAQRDQIVALLERQAKVTFTAMRKALGFSALFNLEDAKRDGLKGNATTAALGKKDLFGPLWAGFDTALQDEIVTQLMTEESEPRLIAWLQEHTGVDEARAQAIANAGLPEGYGSLGRTALARIVPELQRDVITYDKAVQAAGFAHHSDLGFSFEHDADEVERIGERTIASTGEIKPVFAFKQLPYYGRALQRHVAFAKENPRNDEERYGKIANPTVHIGLNQVRVVVNALMCRYGRPTEVVIELARDLKQSREQKLEAQQRQADNQKRNARIRRSIAEVLGISEERVRTLDIQKWILWEELSHDAADRRCPYSGVQISASMLLGERVEIEHILPFSMTLDDSLNNRTVALREANRIKRNRTPWDARTDFEAHGWSYDGILQRAERMPQRKRHRFAPDGYERWLGEDKDFLARALNDTRYLSRVAAEYLRLVCPGSATRVIPGQMTALLRGKFGLNDVLGLDGEKNRNDHRHHAVDACVIGVTDQRMMQRFAQANAQAREDGLTRLVEDMPLPWPTYRAHVERAVRHIWVSHKPDHGFEGAMMEETSYGILRDGTIKQRRKADGSAGREISRLIRITEPSQPQRHGVDAEGRPLPYKGYVGGSNYCLEITVNDKGKWEGQVISTFDAYRIVREGGLRQLRHSTQGQNGQALAMRLVIGDSVRLEVDEQERVMRIVKINGNNGQVFMAPVHEANVDARNSDKNEAFAYTSKIAGSFQKTKARQVTISPIGELRDPGFKG

SEQ ID NO: 44 - protein, 1131 aa, Acidovorax ebreus
MAQHVFGLDIGIASVGWAILGEQRIIDLGVRCFDKAETAKEGDPLNLTRRQARLLRRRLYRRAWRLTQLSRLLKRKGLIADAKLFAKAPSYGDSAWELRRQGLDRLLTPLEWARVIYHQCKHRGFHWTSKAEEAKADSDAEGGRVKQGLAHTKALMQAKNYRSAAEMVLAEFPDAQRNKRGQYDKALSRVLLGEELALLFATQRRLGNPHASDFFEKLILGDGDRKSGLFWQQKPALSGADLLKMLGKCTFEKGEYRAPKASFSVERHVWLTRLNNLRIVVDGRSRPLNEAERQAALLLPYQTETSKYKTLKNAFIKAGLWGDGVRFGGLAYPSQAQIDAEKTKDPEDQFLVKLPAWHELRKAFKAAGHEALWQQISTPALDGDPTLLDQIATVLSVYKDGAEVVQQLRQLALPEPAASIAVLEKISFDKFSSLSLKALRRIVPLMQSGLRYDEAVAQIPEYGHHSQRIEPGAAKHLYLPPFYEAQRKYAGKGDHIGSMQFRDDADIPRNPVVLRALNQARKVVNALIREYGSPIAVNIEMARDLSRPLDERNKVKRAQEEFRDRNDRARSEFERDFGYKPKAAAFEKWMLYREQLGQCAYSQQPLDIQRVLDDHNYAQVDHALPYSRSYDDSKNNKVLVLTHENQNKGNRTAFEYLTSFPDGEDGERWRTFVAWVQGNKAYRMAKRNRLLRKNYGVDESKGFIDRNLNDTRYICKFFKNYVEEHLQLAARADGDTARRCVVVNGQLTAFLRARWGLTKVRGDSDRHHALDAAVVAACTHGMVKALADYSRRKEISFLQEGFPDPETGEILNPAAFDRARQHFPEPWTHFAHELKARLFTDDLAALREDMQRLGSYTTEDLGRLRTLFVSRAPQRRSGGAVHKETIYAQPESLKQQGGVIEKILLTSLKLQDFDKLLNPESNDHFVEPHRNERLYAAIRQRLEQFGGRADKAFGPDNLFHKPDKNNQPTGPVVRSIKLVRGKQTGIPIRGGLAKNDSMLRVDIFTKAGKFHLVPVYVHHRVTGLPNRAIVAFKDEDEWTLIDESFAFLFSVYPNDYVKVTLKKEQQSGYYSGADRSTGAMNLWAHDRAASVGKDGLIRGIGVKTALSVEKFNVDVLGRIYLAPPETRSGLA

SEQ ID NO: 45 - protein, 1056 aa, Actinobacillus minor
  source 1..1056: note = Actinobacillus minor NM305
MKALNYILGLDLGIASVGWAVVEIDQNELPIRLIDLGVRTFERAEVPKTGDSLALARRLARSSRRLVRRRAVRLLKAKRLLKQEGILQADDFHSSHLKPLPNNPWELRVKGLNHLLDRKEWAAVLLHLLKHRGYLSQRKNESKTDNKELGALLKGVSENRQLLQAQAFSTPAEIAIKKFQQEEGHIRNQRGAYSHTFDRNDLLAELRLLFQKQREFNNPYTSQSLEQAIAELLMWQKPALSGEAILKMLGKCTFEPSEYKAPKNSYSAEYFVWLTKLNNLRILENGADRGLTAEERQLLINQPFEKAKFTYAQARKLLELSDLAIFKGVRYGKDNAESATLMEMKAWHAIRKALESNGLKTEWNGLKTKPELLDKIGTAFSIYKTDEDISQYLNGELSPAVLNALLENLSFDKFIRLSLQSLAKILPLMEQGLRYDEACKQVYGDHYGKKEQLELRFLPKIPVEDIRNPVVLRTLSQARKVINGVVRLYGSPARIHIETGREVGKSFSERRDISKRQEENRNERQRAVEKFKEFFPHFVGEPKAKDILKMRLYEQQHGKCLYSGKELDLNRLLEKGYVEIDHALPFSRTWDDSFNNKVLVLASENQNKGNQTPYEWLNGKENAERWKLFQALVNGSRFPYSKKQRILTKYLDEDGFRERNLNDTRYVARFLCNFIEDNMQLVGQGKKRVFASNGQITALLRRSWGIQKVREDNDRHHAVDAVVVACSTRALQKKITDYVRYKEMNVFTGEKIDQETGEIIKFHFPEPWKFFRQEVEIRVFSETPAEDVVIALPDRPQANHEFIQPLFVSRAPTRKMTGQGHMETIKSAKRLAEGLSVSRVPLTQLKLKDLENMVNREREKALYEALKVRLEKFNNDPAKAFADPFYKKGGQQVKAVRVEQVQKSGVLVRQENGVADNASMVRVDVFIKGGKYFLVPIYTWQVAKGILPNRAATQGKEEEYWDIMDETAIFQFSLYQNDLIKLVTKKKTIFGYFNGLNRATSNINIKEHDLDKSKGKDGIYLEVGVKLALSLEKYQVDELGKNIQPCRSMKKRPPVR

SEQ ID NO: 46 - protein, 1054 aa, Actinobacillus pleuropneumoniae
  source 1..1054: note = Actinobacillus pleuropneumoniae serovar 10 str. D13039
MKLTPLNYILGLDLGIASVGWAVVEIDEQENPLGLIDVGVRTFDRAEVAKTGESLALARRLARSSRRLVKRRADRIKKVKRLLKSENILLSADEQLPNDVWQLRVKGLDQKLERQEWAAVLLHLLKHRGYLSQRKNESKSENKELGALRSGVAANHQILQSAEYRTPAEIAVKKFHVEEGHIRNQRGAYTHTFSRLDLLAEIELLFTRQTELGNPHTSAKLLENLTALLMWQKPALAGEAILKMLGKCTFEPTEYKAAKNSYSAERFVWLTKLNNLRILEQGAERALTDNERFALLDQPYEKAKFTYAQARTMLALPDEAIFKGVRYQGEDKKAVETKTILMEMKAYHQIRKALENADLKAEWNELKNNSELLDDIGTAFSLHKTDEDICRYLDGKLSESILNALLENLNFDKFIQLSLKALQQILPLMLQGQRYDEAVSAIYGDHYGKKSAEINRLLPTIPADEIRNPVVLRTLTQARKVINAVVRLYGSPARIHIETGREVGKSYQDRKKLEKQQEDNRKHRESAVQKFKEYFPNFVGEPKGKDILKMRLYELQQAKCLYSGKSLELHRLLEKGYVEVDHALPFSRTWDDSFNNKVLVLANENQNKGNLTPYEWLDGKNNSEPWQNFVARVQTSGFSHTKKQRILSHKLDEKGFIERNLNDTRYVVRFLCNFIADNMLLTGKGKRKVFASNGQITALLRGRWGLQKVRDDNDRHHALDAVVVACSTVAMQQKITRFVRYEEGNVFSGERIDRETGEIIPLHFPSPWAFFRENVEIRIFSENPKLELENRLPDYPQYNHEFVQPLFVSRMPTRKMTGQGHMETVKSAKRLDEGLSVLKVPLTQLKLNDLERMVNREREMALYESLKVRLEQFDNDPAKAFAEPFYKKGGALVKAVRVEQTQKSGVLVRDGNGVADNASMVRVDVFTKAGKYFLVPIYTWQVAKGILPNKAVTANVDEIDWLEMDESYQFIFTMYPNDLVKVKLKKEEFFGYYGGLDRATGAIVIKEHDLEKSKGRQGIYRIGVKLALSFEKYQVDELGKNIRPCRPTKRQHVR

SEQ ID NO: 47 - protein, 1062 aa, Actinobacillus succinogenes
MNLNYILGLDLGIASVGWAVVEIDEQENPQRLIDVGVRTFDRAEVLKTGESLALARRLARSSRRLVKRRAERIKKAKRLLKAENLLLSADEILPNEAWQLRVKGLDQKLERQEWAAVLLHLLKHRGYLSQRKNESKSENKELGALLSGVAINHQILQSAEYRTPAEIAVNKFQAEEGHIRNQRGAYTHTFSRLDLLAEMELLFQRQATLGNPHTSTKLLENLTALLMWQKPALAGEAILKMLGKCTFEPTEYKAAKNSYSAERFVWLTKLNNLRILEQGAERALTDNERFALLDQPYEKAKLTYAQVRTLLGLSDEAIFKGLRYQGEDKKAVETKTTLMEVKAYHQIRKALEGLDLKAEWNELKNNPALLDEIGTAFSLYKTDDDIHRYLDGKLSESVLNALLENLNFDKFIQLSLKALQQILPLMLQGQRYDEAVSAIYGDHYGKKSDEIDRLLPNIPTDEIRNPVVLRTLTQARKVINAVVRLYGSPARIHIETGREVGKSYQDRKKLEKQQEENRKQRENAVKKFKEYFPNFVGEPKGKDILKMRLYELQQAKCLYSGKSLELYRLLEKGYVEVDHALPFSRTWDDSFNNKVLVLANENQNKGNATPYEWLDGKNNSEGWQHFVARVQTSGFSYAKKQRVLIQELDEKSFIERNLNDTRYVARFLCNHIADNMLLTGKGKRKVFASNGQITALLRGCWGLQKVRENNDRHHALDAVVVACSTKSMQDKITKFVKYKEGRLFKDKKDGVYKGERINRETGEIISLHFPTPWKFFKENVEIRIFSENPKLELENRLPDYPQYNHEFVQPLFVSRMPTRKMTGQGHMETVKSAKRLDKGLSVLKVPLTQLKLSDLERMVNREREMALYEALKECLEQFGNDPAKAFAEPFYKKGGALVKAVRVEQTQKSGVLVRNGNGVADNATGSIVRVDVFTKGGKYFLVPIYTWQVAKGILPNKAVIQGKDESEWEEMDENAVFQFSMHKNDLIKVKTKKGEIFGYFNGLDRATGSIEIEEHDLEKSKGKNGSHRGLGVKTAFFLEKYQVDELGKNIRPCRPTKRQHVR

SEQ ID NO: 48 - protein, 1054 aa, Actinobacillus suis
MKLTPLNYILGLDLGIASVGWAVVEIDEQENPLGLIDVGVRTFDRAEVPKTGESLALARRLARSARRLVKRRADRIKKAKRLLKAENILLSADEHLPNDVWQLRVKGLDQKLERQEWAAVLLHLLKHRGYLSQRKNESKSENKELGALLSGVETNHQILQSAEYRTPAEIAVKKFHVEDGHIRNQRGAYTHTFSRLDLLAEMELLFQRQTDLGNPHTSAKLLENLTALLMWQKPALAGEAILKMLGKCTFEPTEYKAAKNSYSAERFVWLTKLNNLRILEQGAERALTDNERFALLDQPYEKAKFTYAQARTMLALPDEAIFKGVRYQGEDKKAVETKTILMEMKAYHQIRKALENADLKAEWNELKNNSELLDDIGTAFSLHKTDEDICRYLDGKLSESILNALLENLNFDKFIQLSLKALQQILPLMLQGQRYDEAVSAIYGDHYGKKSAEINRLLPTIPADEIRNPVVLRTLTQARKVINAVVRLYGSPARIHIETGREVGKSYQDRKKLEKQQEDNRKQRESAVKKFKEYFPNFVGEPKGKDILKMRLYELQQAKCLYSGKSLELHRLLEKGYVEVDHALPFSRTWDDSFNNKVLVLANENQNKGNLTPYEWLDGKNNSEHWQNFVARVQTSGFSHTKKQRILSHKLDEKGFIERNLNDTRYVARFLCNFIADNMLLTGKGKRKVFASNGQITALLRGRWGLQKVRDDNDRHHALDAVVVACSTVVMQQKITRFVRYEEGNVFSGERIDRETGEIIPLHFPSPWAFFRENVEIRIFSENPKLELENRLPDYPQYNHEFVQPLFVSRMPTRKMTGQGHMETVKSAKRLDEGLSVLKVPLTQLKLSDLERMVNREREVTLYESLKARLEQFGNDPAKAFAEPFHKKGGAVVKAVRVEQTQKSGVLVRDGNGVADNASMVRVDVFTKGGKYFLVPIYTWQVAKGILPNKAVTANVDEIDWLEMDESYQFIFTMYPNDLVKVKLKKEEFFGYYGGLDRATGAIVIKEHDLEKSKGKQGIYRIGVKLALSFEKYQVDELGKNIRPCRPTKRQHVR

SEQ ID NO: 49 - protein, 1105 aa, Actinomyces coleocanis
  source 1..1105: note = Actinomyces coleocanis DSM 15436
MDNKNYRIGIDVGLNSIGFCAVEVDQHDTPLGFLNLSVYRHDAGIDPNGKKTNTTRLAMSGVARRTRRLFRKRKRRLAALDRFIEAQGWTLPDHADYKDPYTPWLVRAELAQTPIRDENDLHEKLAIAVRHIARHRGWRSPWVPVRSLHVEQPPSDQYLALKERVEAKTLLQMPEGATPAEMVVALDLSVDVNLRPKNREKTDTRPENKKPGFLGGKLMQSDNANELRKIAKIQGLDDALLRELIELVFAADSPKGASGELVGYDVLPGQHGKRRAEKAHPAFQRYRIASIVSNLRIRHLGSGADERLDVETQKRVFEYLLNAKPTADITWSDVAEEIGVERNLLMGTATQTADGERASAKPPVDVTNVAFATCKIKPLKEWWLNADYEARCVMVSALSHAEKLTEGTAAEVEVAEFLQNLSDEDNEKLDSFSLPIGRAAYSVDSLERLTKRMIENGEDLFEARVNEFGVSEDWRPPAEPIGARVGNPAVDRVLKAVNRYLMAAEAEWGAPLSVNIEHVREGFISKRQAVEIDRENQKRYQRNQAVRSQIADHINATSGVRGSDVTRYLAIQRQNGECLYCGTAITFVNSEMDHIVPRAGLGSTNTRDNLVATCERCNKSKSNKPFAVWAAECGIPGVSVAEALKRVDFWIADGFASSKEHRELQKGVKDRLKRKVSDPEIDNRSMESVAWMARELAHRVQYYFDEKHTGTKVRVFRGSLTSAARKASGFESRVNFIGGNGKTRLDRRHHAMDAATVAMLRNSVAKTLVLRGNIRASERAIGAAETWKSFRGENVADRQIFESWSENMRVLVEKFNLALYNDEVSIFSSLRLQLGNGKAHDDTITKLQMHKVGDAWSLTEIDRASTPALWCALTRQPDFTWKDGLPANEDRTIIVNGTHYGPLDKVGIFGKAAASLLVRGGSVDIGSAIHHARIYRIAGKKPTYGMVRVFAPDLLRYRNEDLFNVELPPQSVSMRYAEPKVREAIREGKAEYLGWLVVGDELLLDLSSETSGQIAELQQDFPGTTHWTVAGFFSPSRLRLRPVYLAQEGLGEDVSEGSKSIIAGQGWRPAVNKVFGSAMPEVIRRDGLGRKRRFSYSGLPVSWQG

SEQ ID NO: 50 - protein, 1113 aa, Actinomyces georgiae
  source 1..1113: note = Actinomyces georgiae F0490
MSASSQNVERIRYKVGIDVGLRSIGFCAVQVDADDRPVKLLNTVVHVHDAGVSPADAKKADTRKLVSGVARRTRRLYRTRKRRLVDLDRQLDGLGWPLVDPARFADPREPWFAREKLVSGRVDDADERKELLSVALRHIAHHRGWRNPYSTVESLQADAPPSEFLQGLNQRVSEKLGTELDPGLTQGQLVAKLLHRFPNAKIRGPEGILRGKLHQSDNAGELRLICRTQGLDCHITEELVRLVFQAKSPKANKEMRKRIGRDQLPGQGAHIRAEKAHPVFQRFRIVAVLANLRIREAHVDRRLTAEEMRTLTDFLLGLAGSEQPTWEELADNLNIERHQLRGTAKASVDGAPALRFPPIDATTDRIYASKLKWLAEWWRQADEERRGYMVDALSNSGGSEDEPYLDDEIAEMLEQASEEDQAKLDSLHLPGGRASYCLDTLRRLTDAMLGGGLDLFEARKAVFHVDDDWAPPTDPIGAPVGNPPVDRVLKHVARWLEAATGRWGAPQTINIEHVREGLGSEKAARELTRMNDRRRRNNQKLVEEMGEKLGMSGRIRRSDRMRYEAIRRQNCECLYCGQPITYQTMEMDHIVPRAGAASTNSRSNLAAVCRRCNHQKGKLPFAVWAESQDSPAEVRLQDAVQRVRHWLRDAGMGQKELQALRVQVIARLKSKRPDEEFDGRSMESIAWMANELRARVEAQYRGSGTTVRVYRGALTAEARKASGFEGRVNLIGGRGKDRFDRRHHAMDALVIALMNQSVAQTLALRLNMRDSQWLTQSEQTWRQFHGAPGEAARKWEAWDRDMRDASDLFNLALDGGRIPITENVRLRVGNGRVHEDGVIRFKPEYEVKGKTIKGGEARLLGDSLPSEQIDRAETPALWTALTRLPEYDRKSGLPENPDRVIRVNGAVVQATDRIRFFGTPASVAVRGGYAKLGESIHHARIYRINGKTPKYAMIRVYTIDLMRLNHEDIFTAVLKPSTISMRCAEKKLKYAIAEGNAEQIGWLVEGDQLELDAAAYAKGVGADLMREYPMATCWRVAGFPDEAKLRLRPVLLAAEGMGEDAPKFMREVLENQGWRPAVNALLSPGSVRVVRRNVLGEPRFKSSGHLPTTVDLV

SEQ ID NO: 51 - protein, 1101 aa, Actinomyces naeslundii
  source 1..1101: note = Actinomyces naeslundii str. Howell 279
MWYASLMSAHHLRVGIDVGTHSVGLATLRVDDHGTPIELLSALSHIHDSGVGKEGKKDHDTRKKLSGIARRARRLLHHRRTQLQQLDEVLRDLGFPIPTPGEFLDLNEQTDPYRVWRVRARLVEEKLPEELRGPAISMAVRHIARHRGWRNPYSKVESLLSPAEESPFMKALRERILATTGEVLDDGITPGQAMAQVALTHNISMRGPEGILGKLHQSDNANEIRKICARQGVSPDVCKQLLRAVFKADSPRGSAVSRVAPDPLPGQGSFRRAPKCDPEFQRFRIISIVANLRISETKGENRPLTADERRHVVTFLTEDSQADLTWVDVAEKLGVHRRDLRGTAVHTDDGERSAARPPIDATDRIMRQTKISSLKTWWEEADSEQRGAMIRYLYEDPTDSECAEIIAELPEEDQAKLDSLHLPAGRAAYSRESLTALSDHMLATTDDLHEARKRLFGVDDSWAPPAEAINAPVGNPSVDRTLKIVGRYLSAVESMWGTPEVIHVEHVRDGFTSERMADERDKANRRRYNDNQEAMKKIQRDYGKEGYISRGDIVRLDALELQGCACLYCGTTIGYHTCQLDHIVPQAGPGSNNRRGNLVAVCERCNRSKSNTPFAVWAQKCGIPHVGVKEAIGRVRGWRKQTPNTSSEDLTRLKKEVIARLRRTQEDPEIDERSMESVAWMANELHHRIAAAYPETTVMVYRGSITAAARKAAGIDSRINLIGEKGRKDRIDRRHHAVDASVVALMEASVAKTLAERSSLRGEQRLTGKEQTWKQYTGSTVGAREHFEMWRGHMLHLTELFNERLAEDKVYVTQNIRLRLSDGNAHTVNPSKLVSHRLGDGLTVQQIDRACTPALWCALTREKDFDEKNGLPAREDRAIRVHGHEIKSSDYIQVFSKRKKTDSDRDETPFGAIAVRGGFVEIGPSIHHARIYRVEGKKPVYAMLRVFTHDLLSQRHGDLFSAVIPPQSISMRCAEPKLRKAITTGNATYLGWVVVGDELEINVDSFTKYAIGRFLEDFPNTTRWRICGYDTNSKLTLKPIVLAAEGLENPSSAVNEIVELKGWRVAINVLTKVHPTVVRRDALGRPRYSSRSNLPTSWTIE

SEQ ID NO: 52 - protein, 1144 aa, Actinomyces sp.
  source 1..1144: note = Actinomyces sp. ICM47
MSMIDSSENVPGIRYRVGIDVGLKSIGFCAVEVDRNDQPVRMLNSMVFIHDAGVDPNENKAAKSRKLTAGVARRTRRLYRTRHQRLVNLDRVLSKEFGWPLPDLTSFKDPREPWHVRAGLLEGYIADDEKRKEALSIALRHIARHRGWRNPYAKVETLLQPSEPSDFLKGLNDRISEELGRAFPADATPGQLVDTYLAHPDYVGRAGTPKLRGPQGILAGKLHQSDNAQEIRGICDVQRIEPAERDRLIRVVFEAKSPKGSAKERGLVGYDELPGQGRHVRAEKAHPAFQLFRMVSVLANLRIREGREERPLTPDELEDLVDFINQVSLKQEVTWQDLADKLRIERADLRGTAKASFDGSPVLRNPPTDVTTEKIMACKVKWLKEWWKEADDEQRGYMVDAFSNSGGSEDGTDVNDEVAELLEQATEDDQLEFEKISLPQGRAAYSLDSLRRLTDRMLRDGVDLHTARRLEFNVGDDWKPAVEPIGAPTGNPAVDRVLKQVSRWLHAATERWGEPTVINIEHARDGLGSERVARELMRENEKRRKANASAVAEMAAKLKLSGKVHRSDQIRYFALQRQNCQCLYCGAPITYTTAEMDHIVPRADGSSTNDRSNLAAVCRTCNHMKGKIPFAVWASSDKANQGVSLTGALERVNMWQRDSGMSPRQLKQLQREVCARLKSKKPDQEFDGRSMESVAWMAVELRTRIEGFYRSRDEESVPSVGVYRGQLTAEARRASGFESRVNLIGGRGKTRFDRRHHAMDALVIALMNPSVSRTLALRLNMRDAQRLTGVEETWKHFYGKPGEASKRFESWRESMLRGVELFNIALSDNAIPFVENIRLRVGSSVIHDATVHSFCPPKTPDGKQIITKGYGEQHSLGSAMPVELIDRAETPALWTALTRCPDFDPKKGLPENPQRTISVNGTRVGPTELVNFFEFSKSGPKACLKVRGGYVDLSGAIHHARIYRIAGKKTAYAMIRVFQVDLLRLKDHDVFTTPLKPSTISMRTAEPKIREALANGTATQIGWLVEGDELVIDTSKYSGGFIGEVLARYPEATSWRVAGFMTPAKLRIKPILLSKEGFVDETQAALLGVEVTSEAIQKTVDRPGWLPAVNVLFGAGGVRVIRRNCLGEERYHSSASLPVSMTLE

SEQ ID NO: 53 - protein, 1095 aa, Actinomyces sp.
  source 1..1095: note = Actinomyces sp. oral taxon 175 str. F0384
MPAHHLRVGIDVGTHSVGLATLRVDDQGTPIELLSALSHIHDSGIGKEGQKDHDTRKKLSGVARRTRHLLRNRRERLQQLDKVLVDLGFPIPKPEEYPDLSERTDPYRVWRVRARLVEETLPEELRGPAISMAVRHIARHRGWRNPYSKVESLLSPAEESSFMKALRKRIMTKTGEVLDDDITPGQAMAQVALTHKIYMRGPEGILGKLHQSDNANEIRKICARQGISSDVCKQLLRAVFKAESPRGSAVSRVAPDPLPGQGSFRRAPKCDPEFQRFRIISIVANLRISETKGENRPLTVDERRQVVAFLMEDSQADLTWVDVAEKLRVSRQALRGTAMLTADGERSAAQPPIDVTDQIMRKTKISALKTWWDKADAERRGAMVRYLYEGLEDSECAEVIAKLPEKDHAKLDSLHLPAGRAAYSRESLTALSDHMLETTNDLHEARKRLFGVDDSWAPPAEPVGAPVGNPSVDRTLKIVARYLSAVESIWGTPEVIHVEHVRDGFTSERTAEERDKANRSRHNDNQKAIEKIQHDYGKEGYISRGDIVRFHALKLQGSACLYCGTTIGYHTCQLDHIVPQAGPGSNNRRGNLVAVCERCNHSKSNTPFAVWAQKCGIPHVGVKEAISRVNGWVEHNHSTSSGDLTRLKKEVIARLRRTQKDPEIDERSMESVAWMANELHHRIAAAYPETTVMVYRGSITAAARKAASIESRINLIGEKGRKDRLDRRHHAVDASVVALMEPSVAKTLAERSSLRGEQRLTGQEQTWKQYTGLTVGARERFEAWRGHMHRLTELFNESLAADEVYVTQNIRLRLSDGSAHTVKASKLVSHRLGDGLTVQQIDRACTPALWCALTREIDFDEKNGLPAREDRVIRVHGQEISSADCIQVFSKRKKTKSDRDEAPFGAIAVRGGFVEIGSSIHHARIYRIEGEKPAYAMLRVFTHDLLSQRHGDLFSAVIPPQSISMRCAATELRQAISEGRATYLGWIVSGDELHIPVETFTTHKIGSFLKDYPNTTRWRICGYDSETMLILKPRILSAEGLNNSSDIAEYVIKNKGWRVAINKLAKVHPTVVRRDALGRPRHSSRSNLPVTWSIE

SEQ ID NO: 54 - protein, 1181 aa, Actinomyces sp.
  source 1..1181: note = Actinomyces sp. oral taxon 180 str. F0310
MLHCIAVIRVPPSEEPGFFETHADSCALCHHGCMTYAANDKAIRYRVGIDVGLRSIGFCAVEVDDEDHPIRILNSVVHVHDAGTGGPGETESLRKRSGVAARARRRGRAEKQRLKKLDVLLEELGWGVSSNELLDSHAPWHIRKRLVSEYIEDETERRQCLSVAMAHIARHRGWRNSFSKVDTLLLEQAPSDRMQGLKERVEDRTGLQFSEEVTQGELVATLLEHDGDVTIRGFVRKGGKATKVHGVLEGKYMQSDLVAELRQICRTQRVSETTFEKLVLSIFHSKEPAPSAARQRERVGLDELQLALDPAAKQPRAERAHPAFQKFKVVATLANMRIREQSAGERSLTSEELNRVARYLLNHTESESPTWDDVARKLEVPRHRLRGSSRASLETGGGLTYPPVDDTTVRVMSAEVDWLADWWDCANDESRGHMIDAISNGCGSEPDDVEDEEVNELISSATAEDMLKLELLAKKLPSGRVAYSLKTLREVTAAILETGDDLSQAITRLYGVDPGWVPTPAPIEAPVGNPSVDRVLKQVARWLKFASKRWGVPQTVNIEHTREGLKSASLLEEERERWERFEARREIRQKEMYKRLGISGPFRRSDQVRYEILDLQDCACLYCGNEINFQTFEVDHIIPRVDASSDSRRTNLAAVCHSCNSAKGGLAFGQWVKRGDCPSGVSLENAIKRVRSWSKDRLGLTEKAMGKRKSEVISRLKTEMPYEEFDGRSMESVAWMAIELKKRIEGYFNSDRPEGCAAVQVNAYSGRLTACARRAAHVDKRVRLIRLKGDDGHHKNRFDRRNHAMDALVIALMTPAIARTIAVREDRREAQQLTRAFESWKNFLGSEERMQDRWESWIGDVEYACDRLNELIDADKIPVTENLRLRNSGKLHADQPESLKKARRGSKRPRPQRYVLGDALPADVINRVTDPGLWTALVRAPGFDSQLGLPADLNRGLKLRGKRISADFPIDYFPTDSPALAVQGGYVGLEFHHARLYRIIGPKEKVKYALLRVCAIDLCGIDCDDLFEVELKPSSISMRTADAKLKEAMGNGSAKQIGWLVLGDEIQIDPTKFPKQSIGKFLKECGPVSSWRVSALDTPSKITLKPRLLSNEPLLKTSRVGGHESDLVVAECVEKIMKKTGWVVEINALCQSGLIRVIRRNALGEVRTSPKSGLPISLNLR

SEQ ID NO: 55 - protein, 1103 aa, Actinomyces sp.
  source 1..1103: note = Actinomyces sp. oral taxon 181 str. F0379
MTKINDDLRYRVGIDVGLKSIGFCAVEVDENDQPLRLLNSMVFVHDAGVDPNENKAAKSRKLTAGVARRTQRGTAQNRRRLAELDRALSEELNWPLPNLEDFEDSYEPWHTRAELVEHYIKDDAERAEALAIAIRHIARHRGWRNPYLSVDSLLTPQEPSKFLRGLNERVTQALGREFPADATPGQLICAYIDSPKYAETQGIRGDSGILSGKLHQFDNVGEIRKICEVQRLDHDVFKLLVRKVFFAKSPRGSAAGLVGHDQIPGQGKYIRAEKAHPDFQLFRIVAVLTNLRIREGKAERCLTPDELRGLVDYILEVQLKQQVTWADLADNLGIERTDLRGTARASFDGSPALRFPPTDVTAEKIMASKVKWLKDWWDKADSERRGFMVDALSNSGGSTGDNDIDDEVAALLEAATEDEQAELEKIQLPQGRAAYSLDSLRRLTKRMLEEGVDLHTARKEEFNVDDDWRPEPEPIEAPVGNPAVDRVLKQVARWLNMATDRWGVPDVINIEHTRDGLGSEKVARELLRESQKRQDLNQKDMDKMIRELGISGKARRSSLIKYQAIQRQNSMCLYCGTEIGFETAEMDHIVPRALSGSTNDRSNLAAVCRACNHQKGAVPFAVWATSGEAHAGVSLEDAIKRVRLWQKGPGMSPKQHKAFQNEVISRLKSRKPDEEFDGRSMESVAWMAVELRTRIDGYYRKVNSDSVPKVGIYRGQLTAEARKASGFENRVNLIGGKGKTRFDRRHHAMDALVIAMMNQSVSQTLALRVNMRESQRITGQEETWKNFYGKPGQASERFEKWREGMLRAVELFNIELAKNAIPFHENVRLRVGSSKVHDDTVRKFIHAKLGEALSVAMIDCAETPALWTALTRLPDFDPKDGLPEDLSREIYIHSRKITADEQLNFFNSPSACLKVRGGYVEIGSSIHHARVYRIDGKKTTYSMVRVFATDLVKMTHEDVFTTPLKPSTISMRTADPKIRKALADGTATQIGWLVEGDELQLETDKYSGGLIGEVLAEYPQLTSWRVAGFYGVTQLRLRPYMLAAEGIPSDASESLRKVIEGKGWLPAINALLSSGCVKVVRRNCLGEPRFNAKSSLPVSQLLR

SEQ ID NO: 56 - protein, 1120 aa, Actinomyces sp.
  source 1..1120: note = Actinomyces sp. oral taxon 848 str. F0332
MNAMKQYNAGIDVGINSVGFAAIEVDSKGLPLNILNNMVVLHDSGVDPGTAKTGATRLANSGTARRTRKLIARRRKRLQKLDRYIEVQGWPLVDFSSLPDPYTPWKIRAKLTQDRLEGEEQGRGLSIALRHMARHRGWRNPYEGVESLHSPKEASKQFKDLKDRVTKVSGVIFDEDATPAEVVCDIGLSPKQRLRSAPSAKYKEGATLADEPVGGKSKEGLLGGKLMQSDNANELRKIGIVQGLSNEKVNEIIDQVFASESPKGQAGKRAKKDELPGQEQYVRALRAHLAFQRFRIVAAVANLRILEAEPKHERLLSQSEKDKVIEFLMSADGDDGVTWSDVAEELGIERECLSGTAKRGADGERPSSFPPTNSTNISIVRSKVKPLIEWWRKASDDEQATLVTALSNADELTDDQPSAETVRQFLSSPDEQSQEKIDKISLPKGRAAYSVNSLERLTRRMLKDSVDLFEARKREFGVDNNWTPTPDSIGEPVGNPAVDRVLKIVNRWLLAVTRKWGPPKVVNIEHVRVGFTSAAQTRKYEEENKTNRERNLAILEELRDKFGTSGKIRREDITRFAALRRQNCQCAYCGEAITFFDCEMDHIVPRKGPGSTNTRNNLVAICERCNKSKSNMPFSLWAQNCDIPGVSVEAVIDRVRTWIKDPELNPKQYNNFKKDVIERLRKTVDDDAIDNRSIESVAWMATELADRIGSHFRTAGANTKVRVYRGWLTSEARKASGFEGKINLIGGRGKTRLDRRHHAMDAATIALMRQSVAQTLVERASIRESDRLRRVVSSSWKDYRGADRDKQFSYGSWLNSMNALAELFNRAIDADGIPVTQNLRLRLGNGEAHDATIRSLEKKRVGASWTIGEIDRASTPQLWLALTRQEDFDQNDGLPANASRELRVKNHWFHAEENVTLFPTKSAAIAVRGGYAEIGNTIHHARLYKLPGKKLTYGMIRVFAIDLLCAWHTDLFSSPLLPESISLRTAETKVRRAVEDGAAMYIGWLVDGDEIVLDPETKAFKSNKIGEYLCEFPGTKRWKVDGFPDKEKLRLRPLQLAGEGLPEDVSAGTEEILGPKGNGWRVAINALFKSSQLVVVRRTALGMVRKLSRRHLPLTTRLRG

SEQ ID NO: 57 - protein, 1114 aa, Actinomyces turicensis
  source 1..1114: note = Actinomyces turicensis ACS-279-V-Col4
MQFHFYMVYVTMKGMNDKDASQQLRYRVGIDVGTHSIGFCAVEVDESGMPIQLLNSMVHKHDSGIDPGGNDTATTRLAEAGVARRTRRLIRRRKKRLQELDAFIEECGWPLVDLATITDARSPWRIRAHLATEHIDDEAEQGKLLSIALRHMARHRGWRSPYARISSLHIQADPSEQLKALAQRVSEKTGISLTADQTPAQLISVYLDVFETGKLRGPEGILGGKLMQSDNANELRRIATVQGLDNDLLKKIIGFVFAAESPKGSAAKRVGKDVLPGAHGLRAEKAHPAFQQFRIVSIVQNLRIKEGTGLRALTSEETEIVVDFLNQAGLTEAPTWEEVADNLEIPRSHLKGTATEGFDGIAPSTRPPFDVTSQKILNGKLKKLSAWWKDADYDHRCAMVNALSNVGSDDEGSLADDDVREFLSDFTDEELEALDKVELPGGRAAYSVDSLEKLTNTMLSEGCDLHSARKIAFGVDDSWTPPAEPIGQPVGNPAVDRVLKQVARWISAATNQWGTPESVNIEHVRDALGSEKASREYQRSLQTRRIRNEKLFAEMRERLDIGGKPRRSELTRYLALQRQNCQCLYCGMPITYTDAEMDHIVPRKGAASTNTRENFAAVCRACNHQKSNLPFAVWAEKTERPGVSVKEAYKRVSDMRIEPGMNGRQMNEFRKAIRLRLTTKHADAEIDGRSLESVAWMANELRHRIEGFYRSAENDVTVRVFRGAVTAEGRRASGFESRVNLIGGKGKTRLDRRHHAMDALTIALMEPGIAQTIALRMNMRESQRVLGEQETWKSFTGGSDTARKRWEHWCEEMLRASELFNVFLAEDRIPICQNKRLRLGSSAVHKAIVQPFEASDKRIVSDAMPVELIDRASTPALWTALTRDPDFDPKEGLPANPSRTIRLHDKRLGPNETVEFFPTAAACLAIRGGYCEIGAGIHHARIFRISGKKTTYAMLRVYQCDLVRFQKENLLTVELPANTISVRTAVPKLREALAHGTAEQIGWLVVGDELKIDLSGFTTGQIETFNETYPQATRWEVTGFPTKTQLRLKPLLIASEGLADDVPDDIVKIVKGPGWWPAIDKLLKIGNVVLYRRDTHGKPRVVSHRSLPLSSKLQ

SEQ ID NO: 58 - protein, 1101 aa, Akkermansia muciniphila
MSRSLTFSFDIGYASIGWAVIASASHDDADPSVCGCGTVLFPKDDCQAFKRREYRRLRRNIRSRRVRIERIGRLLVQAQIITPEMKETSGHPAPFYLASEALKGHRTLAPIELWHVLRWYAHNRGYDNNASWSNSLSEDGGNGEDTERVKHAQDLMDKHGTATMAETICRELKLEEGKADAPMEVSTPAYKNLNTAFPRLIVEKEVRRILELSAPLIPGLTAEIIELIAQHHPLTTEQRGVLLQHGIKLARRYRGSLLFGQLIPRFDNRIISRCPVTWAQVYEAELKKGNSEQSARERAEKLSKVPTANCPEFYEYRMARILCNIRADGEPLSAEIRRELMNQARQEGKLTKASLEKAISSRLGKETETNVSNYFTLHPDSEEALYLNPAVEVLQRSGIGQILSPSVYRIAANRLRRGKSVTPNYLLNLLKSRGESGEALEKKIEKESKKKEADYADTPLKPKYATGRAPYARTVLKKVVEEILDGEDPTRPARGEAHPDGELKAHDGCLYCLLDTDSSVNQHQKERRLDTMTNNHLVRHRMLILDRLLKDLIQDFADGQKDRISRVCVEVGKELTTFSAMDSKKIQRELTLRQKSHTDAVNRLKRKLPGKALSANLIRKCRIAMDMNWTCPFTGATYGDHELENLELEHIVPHSFRQSNALSSLVLTWPGVNRMKGQRTGYDFVEQEQENPVPDKPNLHICSLNNYRELVEKLDDKKGHEDDRRRKKKRKALLMVRGLSHKHQSQNHEAMKEIGMTEGMMTQSSHLMKLACKSIKTSLPDAHIDMIPGAVTAEVRKAWDVFGVFKELCPEAADPDSGKILKENLRSLTHLHHALDACVLGLIPYIIPAHHNGLLRRVLAMRRIPEKLIPQVRPVANQRHYVLNDDGRMMLRDLSASLKENIREQLMEQRVIQHVPADMGGALLKETMQRVLSVDGSGEDAMVSLSKKKDGKKEKNQVKASKLVGVFPEGPSKLKALKAAIEIDGNYGVALDPKPVVIRHIKVFKRIMALKEQNGGKPVRILKKGMLIHLTSSKDPKHAGVWRIESIQDSKGGVKLDLQRAHCAVPKNKTHECNWREVDLISLLKKYQMKRYPTSYTGTPR

SEQ ID NO: 59 - protein, 1113 aa, Alcanivorax pacificus
  source 1..1113: note = Alcanivorax pacificus W11-5
MRYRVGLDLGTASVGAAVFSMDEQGNPMELIWHYERLFSEPLVPDMGQLKPKKAARRLARQQRRQIDRRASRLRRIAIVSRRLGIAPGRNDSGVHGNDVPTLRAMAVNERIELGQLRAVLLRMGKKRGYGGTFKAVRKVGEAGEVASGASRLEEEMVALASVQNKDSVTVGEYLAARVEHGLPSKLKVAANNEYYAPEYALFRQYLGLPAIKGRPDCLPNMYALRHQIEHEFERIWATQSQFHDVMKDHGVKEEIRNAIFFQRPLKSPADKVGRCSLQTNLPRAPRAQIAAQNFRIEKQMADLRWGMGRRAEMLNDHQKAVIRELLNQQKELSFRKIYKELERAGCPGPEGKGLNMDRAALGGRDDLSGNTTLAAWRKLGLEDRWQELDEVTQIQVINFLADLGSPEQLDTDDWSCRFMGKNGRPRNFSDEFVAFMNELRMTDGFDRLSKMGFEGGRSSYSIKALKALTEWMIAPHWRETPETHRVDEEAAIRECYPESLATPAQGGRQSKLEPPPLTGNEVVDVALRQVRHTINMMIDDLGSVPAQIVVEMAREMKGGVTRRNDIEKQNKRFASERKKAAQSIEENGKTPTPARILRYQLWIEQGHQCPYCESNISLEQALSGAYTNFEHILPRTLTQIGRKRSELVLAHRECNDEKGNRTPYQAFGHDDRRWRIVEQRANALPKKSSRKTRLLLLKDFEGEALTDESIDEFADRQLHESSWLAKVTTQWLSSLGSDVYVSRGSLTAELRRRWGLDTVIPQVRFESGMPVVDEEGAEITPEEFEKFRLQWEGHRVTREMRTDRRPDKRIDHRHHLVDAIVTALTSRSLYQQYAKAWKVADEKQRHGRVDVKVELPMPILTIRDIALEAVRSVRISHKPDRYPDGRFFEATAYGIAQRLDERSGEKVDWLVSRKSLTDLAPEKKSIDVDKVRANISRIVGEAIRLHISNIFEKRVSKGMTPQQALREPIEFQGNILRKVRCFYSKADDCVRIEHSSRRGHHYKMLLNDGFAYMEVPCKEGILYGVPNLVRPSEAVGIKRAPESGDFIRFYKGDTVKNIKTGRVYTIKQILGDGGGKLILTPVTETKPADLLSAKWGRLKVGGRNIHLLRLCAE

SEQ ID NO: 60 - protein, 1029 aa, Alicycliphilus denitrificans
  source 1..1029: note = Alicycliphilus denitrificans BC
MRSLRYRLALDLGSTSLGWALFRLDACNRPTAVIKAGVRIFSDGRNPKDGSSLAVTRRAARAMRRRRDRLLKRKTRMQAKLVEHGFFPADAGKRKALEQLNPYALRAKGLQEALLPGEFARALFHINQRRGFKSNRKTDKKDNDSGVLKKAIGQLRQQMAEQGSRTVGEYLWTRLQQGQGVRARYREKPYTTEEGKKRIDKSYDLYIDRAMIEQEFDALWAAQAAFNPTLFHEAARADLKDTLLHQRPLRPVKPGRCTLLPEEERAPLALPSTQRFRIHQEVNHLRLLDENLREVALTLAQRDAVVTALETKAKLSFEQIRKLLKLSGSVQFNLEDAKRTELKGNATSAALARKELFGAAWSGFDEALQDEIVWQLVTEEGEGALIAWLQTHTGVDEARAQAIVDVSLPEGYGNLSRKALARIVPALRAAVITYDKAVQAAGFDHHSQLGFEYDASEVEDLVHPETGEIRSVFKQLPYYGKALQRHVAFGSGKPEDPDEKRYGKIANPTVHIGLNQVRMVVNALIRRYGRPTEVVIELARDLKQSREQKVEAQRRQADNQRRNARIRRSIAEVLGIGEERVRGSDIQKWICWEELSFDAADRRCPYSGVQISAAMLLSDEVEVEHILPFSKTLDDSLNNRTVAMRQANRIKRNRTPWDARAEFEAQGWSYEDILQRAERMPLRKRYRFAPDGYERWLGDDKDFLARALNDTRYLSRVAAEYLRLVCPGTRVIPGQLTALLRGKFGLNDVLGLDGEKNRNDHRHHAVDACVIGVTDQGLMQRFATASAQARGDGLTRLVDGMPMPWPTYRDHVERAVRHIWVSHRPDHGFEGAMMEETSYGIRKDGSIKQRRKADGSAGREISNLIRIHEATQPLRHGVSADGQPLAYKGYVGGSNYCIEITVNDKGKWEGEVISTFRAYGVVRAGGMGRLRNPHEGQNGRKLIMRLVIGDSVRLEVDGAERTMRIVKISGSNGQIFMAPIHEANVDARNTDKQDAFTYTSKYAGSLQKAKTRRVTISPIGEVRDPGFKG

SEQ ID NO: 61 - protein, 1029 aa, Alicycliphilus sp.; identical to SEQ ID NO: 60

SEQ ID NO: 62 - protein, 1146 aa, Alicyclobacillus hesperidum
  source 1..1146: note = Alicyclobacillus hesperidum URH17-3-68
MAYRLGLDIGITSVGWAVVALEKDESGLKPVRIQDLGVRIFDKAEDSKTGASLALPRREARSARRRTRRRRHRLWRVKRLLEQHGILSMEQIEALYAQRTSSPDVYALRVAGLDRCLIAEEIARVLIHIAHRRGFQSNRKSEIKDSDAGKLLKAVQENENLMQSKGYRTVAEMLVSEATKTDAEGKLVHGKKHGYVSNVRNKAGEYRHTVSRQAIVDEVRKIFAAQRALGNDVMSEELEDSYLKILCSQRNFDDGPGGDSPYGHGSVSPDGVRQSIYERMVGSCTFETGEKRAPRSSYSFERFQLLTKVVNLRIYRQQEDGGRYPCELTQTERARVIDCAYEQTKITYGKLRKLLDMKDTESFAGLTYGLNRSRNKTEDTVFVEMKFYHEVRKALQRAGVFIQDLSIETLDQIGWILSVWKSDDNRRKKLSTLGLSDNVIEELLPLNGSKFGHLSLKAIRKILPFLEDGYSYDVACELAGYQFQGKTEYVKQRLLPPLGEGEVTNPVVRRALSQAIKVVNAVIRKHGSPESIHIELARELSKNLDERRKIEKAQKENQKNNEQIKDEIREILGSAHVTGRDIVKYKLFKQQQEFCMYSGEKLDVTRLFEPGYAEVDHIIPYGISFDDSYDNKVLVKTEQNRQKGNRTPLEYLRDKPEQKAKFIALVESIPLSQKKKNHLLMDKRAIDLEQEGFRERNLSDTRYITRALMNHIQAWLLFDETASTRSKRVVCVNGAVTAYMRARWGLTKDRDAGDKHHAADAVVVACIGDSLIQRVTKYDKFKRNALADRNRYVQQVSKSEGITQYVDKETGEVFTWESFDERKFLPNEPLEPWPFFRDELLARLSDDPSKNIRAIGLLTYSETEQIDPIFVSRMPTRKVTGAAHKETIRSPRIVKVDDNKGTEIQVVVSKVALTELKLTKDGEIKDYFRPEDDPRLYNTLRERLVQFGGDAKAAFKEPVYKISKDGSVRTPVRKVKIQEKLTLGVPVHGGRGIAENGGMVRIDVFAKGGKYYFVPIYVADVLKRELPNRLATAHKPYSEWRVVDDSYQFKFSLYPNDAVMIKPSREVDITYKDRKEPVGCRIMYFVSANIASASISLRTHDNSGELEGLGIQGLEVFEKYVVGPLGDTHPVYKERRMPFRVERKMN

SEQ ID NO: 63 - protein, 1052 aa, Aminomonas paucivorans
  source 1..1052: note = Aminomonas paucivorans DSM 12260
MIGEHVRGGCLFDDHWTPNWGAFRLPNTVRTFTKAENPKDGSSLAEPRRQARGLRRRLRRKTQRLEDLRRLLAKEGVLSLSDLETLFRETPAKDPYQLRAEGLDRPLSFPEWVRVLYHITKHRGFQSNRRNPVEDGQERSRQEEEGKLLSGVGENERLLREGGYRTAGEMLARDPKFQDHRRNRAGDYSHTLSRSLLLEEARRLFQSQRTLGNPHASSNLEEAFLHLVAFQNPFASGEDIRNKAGHCSLEPDQIRAPRRSASAETFMLLQKTGNLRLIHRRTGEERPLTDKEREQIHLLAWKQEKVTHKTLRRHLEIPEEWLFTGLPYHRSGDKAEEKLFVHLAGIHEIRKALDKGPDPAVWDTLRSRRDLLDSIADTLTFYKNEDEILPRLESLGLSPENARALAPLSFSGTAHLSLSALGKLLPHLEEGKSYTQARADAGYAAPPPDRHPKLPPLEEADWRNPVVFRALTQTRKVVNALVRRYGPPWCIHLETARELSQPAKVRRRIETEQQANEKKKQQAEREFLDIVGTAPGPGDLLKMRLWREQGGFCPYCEEYLNPTRLAEPGYAEMDHILPYSRSLDNGWHNRVLVHGKDNRDKGNRTPFEAFGGDTARWDRLVAWVQASHLSAPKKRNLLREDFGEEAERELKDRNLTDTRFITKTAATLLRDRLTFHPEAPKDPVMTLNGRLTAFLRKQWGLHKNRKNGDLHHALDAAVLAVASRSFVYRLSSHNAAWGELPRGREAENGFSLPYPAFRSEVLARLCPTREEILLRLDQGGVGYDEAFRNGLRPVFVSRAPSRRLRGKAHMETLRSPKWKDHPEGPRTASRIPLKDLNLEKLERMVGKDRDRKLYEALRERLAAFGGNGKKAFVAPFRKPCRSGEGPLVRSLRIFDSGYSGVELRDGGEVYAVADHESMVRVDVYAKKNRFYLVPVYVADVARGIVKNRAIVAHKSEEEWDLVDGSFDFRFSLFPGDLVEIEKKDGAYLGYYKSCHRGDGRLLLDRHDRMPRESDCGTFYVSTRKDVLSMSKYQVDPLGEIRLVGSEKPPFVL

SEQ ID NO: 64 - protein, 1361 aa, Anaerococcus tetradius
  source 1..1361: note = Anaerococcus tetradius ATCC 35098
MGNYYLGLDIGTNSVGWAVTDENYNIERFKKKNMWGIRLFDEAKTAESRRIHRQARRMRQRKIQRLNLLMELFDVEISKVDESFFIRKKESDLHYEDKSQDSRYALFNDKEFNDKDYHNKYPTIFHLIMDLIENDEKKDIRLLYLACHYLIKNRGHFIFEGQKFDVNSSLNNNINKLKSHLDQFYNICLDFDNDKLIEILVNQNLNISEKSKKIKELLRKTNLEVGIANLIAGGSIKLSNMFDDDELKNLDYNSLSFKNSNFDEGRELFEEVLEDRFELVEILKDIHDASVLETMLSSASISPDGGKYISSSMINSYNKHKRDLKLLKKIIKKYKKSEYDNIFRDENIKNNYLSYTRTGINKNKKVQAEDNTDSDGFYKYIVKILKDIKENDSDEDIKYILSEIDKKNFVPKQRTKENSVIPYQLREIELRKIIDNQSKYHKFLNEVDEKGISVKEKIISLLTFRIPYYIGPLNPSYNEEKNFTTSWVKRLAKGKVTPWNFEDMVDIDASREAFIENKLNKCSFLLDETVLPKDSLLYQEYMVLNELNNLKINGQSINTDLKKSIYEELFKKYKKVTRKRLISYIKEKENMSGDIVITGIDGDFKQGLKSYIAFKDIIGEKIDDDIYRKEVEKIIRDISLYGDDKSFIQKKIKNENKLDLSDDQISKIAKLKFKDWGRFSKKLLVGIKASDKNTGEIDNIIGFMRNYNYNIMQLMANVFTFKDEIEKLNSKYYTDEKINIDYLDDLYLSSPAKRMLWQSFQIVDEIKNIKNSDPKKIFIEMARSKEDKPTRKMSRKSRLEKLYTDSKKQFIKLFGPDEYDKLNNEIKNKSESDFRWDNLYLYYTQFGRCMYSLDPIDLEELSNKNLYDQDHIYPKSKIYDDSIENRVLVKKQLNLDKSNEYPIPDRVLNKDKNKLLAFWKMLNEKELIGDKKYARLIRKSPFTDEELGDFIARQLVETRQATKETANMLKRLCPDSKIVYVKAKNVSDFRRKFDILKCRSINDLHHAHDAYLNIVVGNVFDTKFTSNPLNFIKNNSKNRSYNLEKIYDYDVIRNEKIAWLAERKEENQDGSIATVLKNLSKNDIRVTRRTYIKCEDLFDENIVRKGNGKFPIKENNNKSDTNKYGGYSGIKNAYFVLLEDEKHNRILEAIPSFIYKKEKNGEKGSVINYLQNILGIKSAKILRDKIKIGSLLKIDKFPYNLAGKSGNGILISGGVQLILDKNTSKYIKKIENYKYKLDENKDYQINIFDKLSKEENIKLFDLFVDKFENSIYKNRVNIKLKEIKLARPKFEHLSIEEQIKTLTQMLILFGRENNAVNLEYIGLPKNTGKTKINKKINNKDIKIINQSITGLYETEEDLANI

SEQ ID NO: 65 - protein, 1552 aa, Anaerophaga sp.
  source 1..1552: note = Anaerophaga sp. HS1
MFSQRNNPYCELLQNVKQLYKEKFGKTNQVDNSIIYGFMKRILGLDLGTNSIGWALVENDENDRKGKIIGMGSRIIPMDMSELDNFNKGASISKTAERTRLRMTRRLRERHLLRRARLHRILNIMGFLPEHYRNSIDFIDKKGCFFEGQEPKIAYKPDKNSEQFCFLFTSSFHEMLEDFRKFQPELIQNRKKVPYDWTIYYLRKKALTQKISKEELAWIILNFNTKRGYYHLRGEDEDNQDNKKIKEFRALKVVNVTEREGANSSGKKWYDMELENGWVYSRQSNLPPNLEGKTIELIVSYTLDNNGNIKKDKNGKEKYSLSMPGEEDWNLVKIKTENDLKTSKKSVGEYIYDHLLKNPDQKIRGKLISTIERKFYKEELSRILKTQMNFYEELKNRELYQKCVEELYPNNKSHQQTLLQKDFIHLIVEDIIFYQRPLKSKRAFVNNCPLEYRVYVDKKSGELIKSGVKCIPKSHPLFQEFRLWQYVRNLRIYERERMVNGRLMVNVDVTNELLPDEEHIVRLFDLLNDRKSFKQDDVLRFVGIKSPKDRKRYSWNYPEDKELPGNETRHLILAWLKKVDGVPEDWLDPEKLKALWHLLYSVTDREEIIKGLHSFAKKYELPDTFVEHFKKIPRLEREYGSFSEKAIKKLLPLMRMGKYWKAEEIPADLLEKAQKIIDAEADDRISDEVREKLLHLKDISQLKGLPLWQASYLVYGRHSETGEVVKWRTSEDLEKYILQFKQHSLRNPVVEQVILEALRVVKDIWEHYGEGKEGFFNEIHVEIGRELKNPADKRKKITSQIQENENTNLRIKALLEELFNDPSVKNVRPYSPAQQEILRIYEDGVLNGQKEIPDDILKISKMARPSKSQLVKYKLWLEQKYRSPYTGEIIPLSQLFTSAYEIEHIIPQARYFDDSFSNKVICEAEVNREKGHQLAFEFITKRGGDEIELNFGKKVTILNVEEYQKFVKDHYGRSLRSLSKMRKLLMEDIPDDFIDRQLNDSRYISKVVRNLLSNIVRAEDENSLVSKHLITCTGGVTTRLKHEWGLNDVWNELITPRFVRLNKMGKEKFGEWINKKGKQVFQIQMPLELQKGFNKKRIDHRHHALDALVVACASRSHVNYLNNDSARANASETRYDLRNKLCYKDKTDSNGNYRWKFYKPWESFTEEAKNRLAGTVVSFKSNRRIMTRSSNRYFKWVDTSEGKKKKLVRQIKGDNQAIRKPLHKDTVLGKVSLRKEKKVSLSKAIDLWESIVDKPLKKRIQSLREQGYDKKLLLKYFKDRNNQFNGQDISRVNIYFFDNNLAARRVTLDASFNSEKRIDGITDSGIKKILYAHLQNEKYHGKKDEKGNEISPYELAFSPEGLEEMNANIKKLNGGKPHCPIYKVRLAETIGEKFKLGEKGNKNKKYVEAAKGTNLFFAVYVDEKGVRSFETIPFSVALERRKQKLAVVPEENENKEKLLFYLSPNDLVYVPDEDEKLIDYRQLSINPTRIYKMVSSSGTQCFFIPHFVASPIVQTMELGPNNKSERAWDGQMIKNVCYKLSVDRLGNVKIEK

SEQ ID NO: 66 - protein, 1515 aa, Anaerophaga thermohalophila
  source 1..1515: note = Anaerophaga thermohalophila DSM 12881
MKRILGLDLGTNSIGWALVESDEEQKSGKIQGIGSRIIPMDQNELDNFNKGNTVSQTAERTRLRMVRRLRERHLLRRERLHRVLKEIGFLPEHYLEQIDFTEKPGGFLPGKEPKIAYKPDNFKDKYDFLFQDSYHEMLSDFQDKNPEFIQKRKKVPQDWTIYYLRKKALTAKITKEELAWIILNFNQKRGYYQLRGEDEDVAKNTKKEEFHALKVVKVKEREDSEGASGKWYDIELENGWVYPRQSNIRPDWEGKILELIVTYNLDKDGNIKTDKEGNEKRSFRMPNKDDWTLRKKRTENEIEKSGKTVGEYIYDNLLDAPDLKIRGKLVSTIERKYYRSELEQILTAQKKYHPELSNSELFNKCISNLYPNNDIHRKALLSKDFVHLIINDIIFYQRPLKSKRSTVSNCPLEYRVYVDKVTGEKKKVPLKCIPKSHPLYQEFRLWQYVKNLRLFEKERFENGRLLTNVDVTEQFLPDEDKYVELFEFLNGRKTFKQDDILKFAGIKSAKDRVKYYWNYPQEKEYPGNETRYLIESRLKKIENVPDEWLNYEKIEELWHLLYSVTDKVEIEKGLQSFAAKYQLPDLFVEVFKGFPRMEREYGAFSKKAIKKLLPLMRMGKYWKLENINPDLIEKVQKIIDGEADDNINDGIRERFSEINEMSDLRGMPLWKASYLVYGRHSEAAEVIRWRTSADLDQYIKDFKQHALRNPIVEQVVLEALRVVKDVWNYFGEGREKFFDEIHVEIGRDLKNPADKRQKIANQIQENENTNLRIKALLVELFNDPEVQNVRPYSPVQQQLLKIYEDGVLNAERDIPDDIQKISRMANPTRNQLIRYKLWLEQKYRSPYTGEIIPLNKLFTSEYEVEHIIPRARYFDDSFSNKIISEAEVNRKKDRMLAFEFIKKLGGSTIDLNYGKKVSVLTVEEYQQFVKDHYGINPHSRLKMQKLLMDEIPESFIERQLNDSRYISKMVRNLLSNIVREENENSPVAKQLITCSGSITNTLKQEWGLNDVWNTIITPRFERLNKMGEQKYGEWVNKEGKPVFQIQMPLELQKGFNKKRIDHRHHALDALIVASATRSHVNYLSNEAAKTNAKDTRFDLRNRLCYKEKRGQNRNFTWRFYKPWNTFTEDAKNALNDIVVSFKSNHRVINKSTNRYFKWENLPGGMKKKRLVRQEKGDNWAIRQSLHKDTVLGKVSLRKVKPVSLSVALDSWNNIVDKALKKKIRSLKDQGYDKKLMLKYFKDRRNEYNGENISRVNVYYFDEEMAARRVDLDTSFNSEKRIEGITDSGIKKIIYAHLKNEKYHGQKDDKGKDISPYELAFSPEGIAEMNANIKQLNGGKPHCPIYKVRLAEPVGEKFQLGETGNKTEKLVEVAKGTNLFFGVYANDEGVRSFATVPFYLAVEREKQGLPAVPQENENGDQLLFWLSPNDLVYVPSEEDAHFANPKQIELDNSRIYKMVSSTGTQCFFIPHFVATPIVQTIELGPNNKSERAWDGQMIKKVCYKLSVDRLGNVEIE

SEQ ID NO: 67 - protein, 1168 aa, Azospirillum lipoferum
MARPAFRAPRREHVNGWTPDPHRISKPFFILVSWHLLSRVVIDSSSGCFPGTSRDHTDKFAEWECAVQPYRLSFDLGTNSIGWGLLNLDRQGKPREIRALGSRIFSDGRDPQDKASLAVARRLARQMRRRRDRYLTRRTRLMGALVRFGLMPADPAARKRLEVAVDPYLARERATRERLEPFEIGRALFHLNQRRGYKPVRTATKPDEEAGKVKEAVERLEAAIAAAGAPTLGAWFAWRKTRGETLRARLAGKGKEAAYPFYPARRMLEAEFDTLWAEQARHHPDLLTAEAREILRHRIFHQRPLKPPPVGRCTLYPDDGRAPRALPSAQRLRLFQELASLRVIHLDLSERPLTPAERDRIVAFVQGRPPKAGRKPGKVQKSVPFEKLRGLLELPPGTGFSLESDKRPELLGDETGARIAPAFGPGWTALPLEEQDALVELLLTEAEPERAIAALTARWALDEATAAKLAGATLPDFHGRYGRRAVAELLPVLERETRGDPDGRVRPIRLDEAVKLLRGGKDHSDFSREGALLDALPYYGAVLERHVAFGTGNPADPEEKRVGRVANPTVHIALNQLRHLVNAILARHGRPEEIVIELARDLKRSAEDRRREDKRQADNQKRNEERKRLILSLGERPTPRNLLKLRLWEEQGPVENRRCPYSGETISMRMLLSEQVDIDHILPFSVSLDDSAANKVVCLREANRIKRNRSPWEAFGHDSERWAGILARAEALPKNKRWRFAPDALEKLEGEGGLRARHLNDTRHLSRLAVEYLRCVCPKVRVSPGRLTALLRRRWGIDAILAEADGPPPEVPAETLDPSPAEKNRADHRHHALDAVVIGCIDRSMVQRVQLAAASAEREAAAREDNIRRVLEGFKEEPWDGFRAELERRARTIVVSHRPEHGIGGALHKETAYGPVDPPEEGFNLVVRKPIDGLSKDEINSVRDPRLRRALIDRLAIRRRDANDPATALAKAAEDLAAQPASRGIRRVRVLKKESNPIRVEHGGNPSGPRSGGPFHKLLLAGEVHHVDVALRADGRRWVGHWVTLFEAHGGRGADGAAAPPRLGDGERFLMRLHKGDCLKLEHKGRVRVMQVVKLEPSSNSVVVVEPHQVKTDRSKHVKISCDQLRARGARRVTVDPLGRVRVHAPGARVGIGGDAGRTAMEPAEDIS

SEQ ID NO: 68 - protein, 1068 aa, Bacillus cereus
  source 1..1068: note = Bacillus cereus BAG4X12-1
MRYVLGLDIGIASCGWAVINQEKERIEDLGVRIFDKAENPKDGKSLAAPRRDARSTRRTLRRKKHRMQRIKILLVKQGLLFKTELNHLYESATEFDVWNLRLDALERKLHPKEFARVLIHLAKRRGFKSNRKETTLSENGQILESISENQQIMEQQNYRTVGEMILKDKKFENHKRNKDGTYIGTVTRQQLQDEIQMIFHTQRLYKNDYATEEFESSYLEIWASQRPYASKDQIEKMIGYCTLEPKEKRTPKASWSFQYFVALQTINNLRLISKDKIEELSFEEKKQIMNLALEKPIVKYIDIRKLLSIPNDFQFNSLSYSADTVDTTLENKRCIELKEYHSINKVYKQVYGKNTPNLLPIDYDTIAYGLTIFKDDKDILEYLQNKYVNAKGKPIKNLAKKTYDDTFIQALLNLNFTKMGHLSFKALKNIIPFLEEGLSYDKACEKAGYNFKGTSYTERTKYLPVIPQNTNPVVHRALSQTRKVINAIIKKYGSPNAIHIETARELSKTFQERKEIDSRYQDNSKKNEHAIHKLKELGNINPSGINIVKFKLWSEQDGRCMYSGKYIEPHRLFEEGYTEVDHILPYSRSLDDSYNNKILTLGTENQRKGNKTPYEYMGNTSIWDEFETRVQSNKKINFKKQQKLLLQNFSYAREQEFIERNLNDTRYATIYLTSLIQQHLIFSESSSKKKVRTVSGIITSHLRSRWGFNKDRKEGHIHHALDAVIVAVTSNHMIQRVTKYYKLKELNKNLQAKQLPFPEPWEGFRLELEARISPNTQQYLKGIHFKNYADVNLSDIKPIFVSRMPKRSITGELHQETIRKFLGYNEKGKVLTAIKTKLEDIPFDANGDFPMYGKETDLYTYNAIKERYLSHEKDKRKSFQEPLYKPTKSGEIGPLIKSIKIMDTRTIVNPVNQGKGVVYNSKIARTDVFKKEDKYYLIPIYTIDLLKNILPHKAITAGKGYEDWTTIDSSFTFLFSLFPNDLIQIVPSKNKTIKARTTVSKKEILLPSLTGYFKGVHSGTAGITVETHDGSVIANVGSKQLLLFEKYQVDVLGHYTKIKEEKRMGMAI

SEQ ID NO: 69 - protein, 1078 aa, Bacillus cereus
  source 1..1078: note = Bacillus cereus BAG4X2-1
MRYVLGLDIGIASCGWAVINQEKERIEDLGVRIFDKAENPKDGKSLAAPRRDARSTRRTLRRKKHRMQRIKVLLVKHGLLSKTELDHLYESATEVDVWNLRLDALERKLYPKEFARILIHLAKRRGFKSNRKETTLSENGQILESISENQQIMEKQNYRTVGEMILKDKKFENHKRNKNGTYVGTVTRQQLQDEIQMIFHAQRLYKNDYATEEFESSYLEIWASQRPYASKDQIEKMIGYCTLEPKEKRAPKASWSFQYFVALQTINNLRLISKDRIEELSFEEKKQIMNLALEKSIVKYIDIRKLLSVPNEFQFNSLSYSADTVDTAVESRKCIELKEYHSINKVYKQIYGENALNLLPKYYDTIAYGLTIFKDDKDILEYLQNKYVNAKGKPISNFANKTYDDTFIQALLNLNFTKMGHLSFKALKNIIPFLEEGLSYDKACEKAGYNFKGTSYTEQTKYLPVIPQNTNPVVHRALSQTRKVINAIIKKYGSPNAIHIETARELSKTFQERKEIDSMYQDNSKKNEHAIHKLKELGNINPSGINIVKFKLWNEQDGRCMYSGKYIEPHRLFEEGYTEVDHILPYSRSLDDSYNNKTLTLGTENQRKGNKIPYEYMGNTSIWNDFETRVQSNKKINKKKQQKLLLQHFSYAREQEFIERNLNDTRYATIYLSSLIQQHLIFSESSRKKKVHTVSGIITSHLRSRWGFNKDRKEGHIHHALDAVIVAVTSDHMIQRVTKYYKLKELNRNLQAKRMPFPEPWEGFRLELEARISPNTQQYLKGLRFKNYADVNLSEIKSIFVSRMPKHSITGELHQETIRKFIGYNEKGKVLTAIKTKLEDIPFDANGDFPMYGKESDLYTYNAIKERYLSHKKDKRKSFQEPLYKPTKSGGIGPLIKSIKIMDTRTIVNPVNQGKGVVYNSKIARTDVFKKEEKYYLIPIYTIDLMKNILPQKAITAGKGYEDWTTIDPSFTFLFSLFPNDLIQIVPSKNKTIKARTTVSKKEVLLPSLTGYFKGVHSGTAGITVETHDGSVIANVGSKQLLLIEKYQVDVLGNYTKIKEEKRIGLTTYNDNKKIAAC

SEQ ID NO: 70 - protein, 1069 aa, Bacillus cereus
  source 1..1069: note = Bacillus cereus Rock1-15
MNYDIGLRIGITSCGWSIINKDLERIEDLGVRVFEKAENPDGTASAAPRREARKSRRKHRRKKHRIERIKRLIVQHDLLSKKELDSLYLSPFNIDVWNLQVEALERKLDNREFARVLIHLVQRRGFQTIRKSVEIQEEGKLLENVSENERIMKVNGYKTVGEMFSKHEKFTHHKRNKDGSYTSVVTRSLLLKEIKTIFNSQRILGNVFSTQKLESDYLYIWGSQRPTLTYEQLMSMVGNCIYEKKEKRAPKTSWAFQYFSLLQKINKLKVSDDNTLRKLSKEERDIVIELAFKKKNVSFVDIRKALKLNDNTKFNHLTYSHVVETKKVEKATFIELKGYHLIKKQLKDRNVELTQELQPKDYDAIAAASTFFKNDIEFRDYLRNQYLDSNGKRKSNIANKVFEDKVIAAVFELNFSKVCHLSFKSLYKLIPHLEKGLDYKEAILCAGYNFRDENKRDKKLFLPVIQQETNPVVHRALTQARKVINAIIREYGSPNTIRFVVANDLAKTYKQRKELESTLKKNRAENEKIKTKLLSMGIINPTGMDIVKYKLWYEQSGICLYTGRQMELSSLFKPGYSIVNHIIPYNRSFDDTYHNRVLTLTETKYEKGNKIPFEYFGAEETCWNEYEKRVSTSKKIHDKKREKLLIRNFDIEYENEMISNNVFDTHYIGSYFEKYIDEHLQFKKSTKKQKVFSIHGNMVAHLHSRWGFNKNSREIYLNHAVDAAIVAVLTDQLIRNIADYYRRDNILEQKGSLKFPEPWKSFSIELEARISPQVRDLIKKLNLDSYLDVDILHIKPVFISKKPRRKVNGEAHKSTIRSLIGINEIGKTVTCIKTRLEDIPFDENGDFPMYGKDTDKYTYTAIKERYLEFNKDKEKAFSTPLYKLKRNGEPGNQIKSVKIIDTRNIVNKVNQGKGIAYNSNIIRVDVFSRDQKYYVVPIYLRDFIKGSLPNKIITAAKGFMQWPETDNSYTFLFSIFPNDLIKVVPKEGKFIKAKNENKENINLTEILGYFKGLDSSTGAFTLESHDGSLLARGIGTKNLLLIEKYQVDVLGRYNKVGNEERQDIKIQQN

SEQ ID NO: 71 - protein, 1088 aa, Bacillus smithii
  source 1..1088: note = Bacillus smithii 7_3_47FAA
MNYKMGLDIGIASVGWAVINLDLKRIEDLGVRIFDKAEHPQNGESLALPRRIARSARRRLRRRKHRLERIRRLLVSENVLTKEEMNLLFKQKKQIDVWQLRVDALERKLNNDELARVLLHLAKRRGFKSNRKSERNSKESSEFLKNIEENQSILAQYRSVGEMIVKDSKFAYHKRNKLDSYSNMIARDDLEREIKLIFEKQREFNNPVCTERLEEKYLNIWSSQRPFASKEDIEKKVGFCTFEPKEKRAPKATYTFQSFIVWEHINKLRLVSPDETRALTEIERNLLYKQAFSKNKMTYYDIRKLLNLSDDIHFKGLLYDPKSSLKQIENIRFLELDSYHKIRKCIENVYGKDGIRMFNETDIDTFGYALTIFKDDEDIVAYLQNEYITKNGKRVSNLANKVYDKSLIDELLNLSFSKFAHLSMKAIRNILPYMEQGEIYSKACELAGYNFTGPKKKEKALLLPVIPNIANPVVMRALTQSRKVVNAIIKKYGSPVSIHIELARDLSHSFDERKKIQKDQTENRKKNETAIKQLIEYELTKNPTGLDIVKFKLWSEQQGRCMYSLKPIELERLLEPGYVEVDHILPYSRSLDDSYANKVLVLTKENREKGNHTPVEYLGLGSERWKKFEKFVLANKQFSKKKKQNLLRLRYEETEEKEFKERNLNDTRYISKFFANFIKEHLKFADGDGGQKVYTINGKITAHLRSRWDFNKNREESDLHHAVDAVIVACATQGMIKKITEFYKAREQNKESAKKKEPIFPQPWPHFADELKARLSKFPQESIEAFALGNYDRKKLESLRPVFVSRMPKRSVTGAAHQETLRRCVGIDEQSGKIQTAVKTKLSDIKLDKDGHFPMYQKESDPRTYEAIRQRLLEHNNDPKKAFQEPLYKPKKNGEPGPVIRTVKIIDTKNKVVHLDGSKTVAYNSNIVRTDVFEKDGKYYCVPVYTMDIMKGTLPNKAIEANKPYSEWKEMTEEYTFQFSLFPNDLVRIVLPREKTIKTSTNEEIIIKDIFAYYKTIDSATGGLELISHDRNFSLRGVGSKTLKRFEKYQVDVLGNIHKVKGEKRVGLAAPTNQKKGKTVDSLQSVSD

SEQ ID NO: 72 - protein, 1069 aa, Bacillus thuringiensis
MNYDIGLRIGITSCGWSIINKDLERIEDLGVRVFEKAENPDGTASAAPRREARKSRRKHRRKKHRIERIKRLIVQHDLLSKKELDSLYLSPFNIDVWNLRVEALERKLDNREFARVLIHLVQRRGFQTIRKSVEIQEEGKLLENVSENERIMKVNGYKTVGEMFSKHEKFTHHKRNKDGSYTSVVTRSLLLKEIKTIFNSQRILGNVFSTQKLESDYLYIWGSQRPTLTYEQLMSMVGNCIYEKKEKRAPKTSWAFQYFSLLQKINKLKVSDDNTLRKLSKEERDIVIELAFKKKNVSFVDIRKALKLNDNTKFNHLTYSHVVETKKVEKATFIELKGYHLIKKQLKDRNVELTQELQPKDYDAIAAASTFFKNDIEFRDYLRNQYLDSNGKRKSNIANKVFEDKVIAAVFELNFSKVCHLSFKSLYKLIPHLEKGLDYKEAILCAGYNFRDENKRDKKLFLPVIQQETNPVVHRALTQARKVINAIIREYGSPNTIRFVVANDLAKTYKQRKELESTLKKNRAENEKIKTKLLSMGIINPTGMDIVKYKLWYEQSGICLYTGRQMELSSLFKPGYSIVNHIIPYNRSFDDTYHNRVLTLTETKYEKGNKIPFEYFGAEETCWNEYEKRVSTSKKIHDKKREKLLIRNFDIEYENEMISNNVFDTHYIGSYFEKYIDEHLQFKKSTKKQKVFSIHGNMVAHLHSRWGFNKNSREIYLNHAVDAAIVAVLTDQLIRNIADYYRRDNILEQKGSLKFPEPWKSFSIELEARISPQVRDLIKKLNLDSYLDVDILHIKPVFISKKPRRKVNGEAHKSTIRSLIGINEIGKTVTCIKTRLEDIPFDENGDFPMYGKDTDKYTYTAIKERYLEFNKDKEKAFSTPLYKLKRNGEPGNQIKSVKIIDTRNIVNKVNQGKGIAYNSNIIRVDVFSRDQKYYVVPIYLRDFIKGSLPNKIITAAKGFMQWPETDNSYTFLFSIFPNDLIKVVPKEGKFIKAKNENKENINLTEILGYFKGLDSSTGAFTLESHDGSLLARGIGTKNLLLIEKYQVDVLGRYNKVGNEERQDIKIQQN

SEQ ID NO: 73 - protein, 1509 aa, Bacteroides coprophilus
  source 1..1509: note = Bacteroides coprophilus DSM 18228
MKKTLGLDLGTNSIGWAVINSNIDSEGKEKLVGISSCGSRIIPMDATTLGDFGKGNTKSPVAERTRLRGIRRLLERSLLRRERLHRVLSVMGFLPEHYASQLDRYGKFLPETEPKLAWYKDDSGRYQFLFQKSFHEMLEDFRQHQPELVAGEKKIPYDWTIYYLRKKALSQEITKEELAWILLNFNQKRGYYQLRGEEEQEENNKSVEYHALKVVSVEDSGERKGKDIWYNVTLENGWVYRRASNIPLDWTGKVKEFVVTTELDDAGNPKKDKEGNVKRSFRAPKEDDWGLLKTRTQAQIDESGKTVGTYIYESLLCMPNQKIRGKLVRTIERKYYKDELRQILVKQSEFHAALQDHNLLLSCIEELYPNNEAHRRLLSASSFIYFLIEDILFYQRPLKSQKGLIDNCPYESHIYKDKKDGSLHHVPLKCVSKSHPLFQEFRLWQFLSNLRIYQRERMMDGSLKLDVDVTREFLPSEEDYVKLFDWLNERKEISQKFLLAYKPFGLKKNEQANYRWNYVEDKSYPCNETRAEIKSRLSKAGVPEEFLTEEKEEALWHILYSISDKKELTKALGTFAAKNCLNESFVEVFAKIPPFESNYAAYSLKAIRKLLALMRMGKYWNEQAIDRQTRDRIEKILTGEYDETIRSRVREKAMLLTDISSFRGLPLWLACYIVYDRHSESKELVKWETPADIDHFLSKFKQNSLRNPIVEQVITESLRTVRDIWKQEGKIDEIHVELGREMKNPAKERARITAQVQENENTNLRIKALLAEFMNPEFEIENVHPYSPGQQEILRIYEDGVLSGIAEKDLPDDITAILKKFRENDVKKRPTTSEVLRYKLWLEQRYRSPYTGRVIPLGKLFTPAYEIEHVIPQSRYFDDSISNKVICESAVNKLKDNCLGYEFIKKHSGEMVELGNGETVPVFSVEEYERFVKESYFGNSKKMKKLLLEDIPDSFIERQLNDSRYISRVVTSLLSNLVCEEGEQDGLSKNVIVCTGGITDRLKKDWGVQEVWNRIILPRFLRLNEITGRTDFTSTSVNGHLLPALPLYLQKGFNKKRIDHRHHAMDAIVIACANRNIVNYLNNSSARKNSEISRYDLQRLLCEKVKTDANGNYKWILRKPWETFTQDVYAALTNIVVSFKQNLRVINRTTNYYQHYNEAGEKRMIPQTKGDRWAIRKPMHKDTVYGEVNLRKEKTLPLRDVVKNPSIVVDKSLKNKLYELLKSQYDLKAIAKYFETHQDVWADVNLKKIKVYYFTKETNERFFATRKSLDPSFDQKKIEEEVTDTGVQKILLHHLQQNNNDPDMAFSPDGIDRMNQNMTILNDGKWHQPIYKVRTYEKADKFAVGESGNKAKKFVEAAKGTNLFFAVYESVQEDEAIGKQVCKRTFATIPLNEVIKRKKQGLPAAPEDLNGNLPKFVLSPNDLVYLPTEEERNSSRIIQPLDRERIYKMVSSSGSQCFFIKVFVANSIWDKNEYSSLNKMERAITNEMIKEICVPIKIDRLGNVSLIQI

SEQ ID NO: 74 - protein, 1504 aa, Bacteroides coprosuis
  source 1..1504: note = Bacteroides coprosuis DSM 18011
MKKVLGLDIGTNSVGWAVVNQNDKGEFLSIEKIGSRIIPMSQDVMDKFGAGQTESSTAQRTQYRGVRRLRERSLLRRERLHRVLHILHFLPQHYDAAIGWNKKENKTYGKFLPGVEVNIPWVATDQGHQFIFMDSYAEMLKDLKQHQPHLFEKSSTPVPLDWTIYYLRKKALTQAISKEELAWILLNFNQKRGYYQLRGEEVEDNTKREEFYALKVVKVELDKDNTSAKTWYKVHLENGFIYPCPSDTPIDSWVGMVKDFIVTTTLEKDGSEKRTADGEIKRSFRAPKEDDWTLLKKKTESELEKSGKQVGAFIYDTLLSNPDQKIIGGLIKTIERKYYKKELEQILETQQKFIAELSDKKLFQACAEELYPLNDSHRENLLERDFKHLFVQDIIFYHRPLKTKKSLISNCTYEYRTFYKNGEKQISPIKCIAKSNPLFQEFRVWQFVQNLRILQRQRSEGDSIKYNVDVTAEFLKDENDIANLFTWLNERKVIKQDQLLKSYFKLKVNKETKELDYRWNYVDDKNKEYPCNATRTHILSFLEKCKEEKRIEDDRFVYSLWHLLYSVVEPIELRGALAKFAEREHLHPSFVDVFAQFPPLEKEYGSYSEKAIKRLLPLMRMGDYWHEDKIDVKTKQRIQRIIDGEADDDITHRSREKVENLRSITDFKGLPLWKAGYVVYNRHSESGELTKWKTPHELSNYIQNEFKQYSLRNPIVEQIVLETLRVVHDLWVKHGDFSEIHLELGRDIKNSSDKRKRMAERQQENENSRQRVLEMLIDLKKEAAFADLNPYSPSQQEKLRIVEDGVLRSNIEIPKDIEKITKSAKPTSRELTKYRLWLDQKYRSPYTGQPISLAQLFTSKYEIEHVIPQAKYFDDSFTNKVICESEVNKEKGSMLAHEFILKNGGSTVNVGGRQVQVLKNDAYVELINRLYGKNNPVKAKKLLAEDIDEVVGDFSERQLNDTRYISRVVQKLLSNIVREEDEQESTSKHVIGCSGQVTTALKKDWGLNDIWNKIIQPRFERLNEMTATEDYGVWQSPNHFQIRVPEEIQKGFTKKRIDHRHHAMDALVIACATRSHINYISNRSGQDRNAKFETTRTDLRSKLCYKENSSGNNYNYIFNKPWDTFTQDAHRALENIVVSHKQNLRVLTKTNNYTQFINKDGKKDLQKQVKGDHFAVRKPMHQETIYGRVSIRSIKEVALKKALENWKQIVDRTLKDKIRELIGAYGKYDAQTILKYFKDRDYKFNNLKINRVEVYEYDHNCAAVRKSIGDDLTIKQIERITDESIRKILMNHLSNYDDNLKEAFSPEGLMEMNKNIKELNGGKNHQPIYKVRLFEDLGSKFPLGVSHNNPDKYAIAAKGTNLFFGIYEDQEGKRMFDSIPLNIVIDRLKEKKSPVPETYNESKLKFHLSPNDLVYVPTDEEQKQPELVDVDHLSDEQKGRVYKAVSFTGNRAFFVNHRVSKVIHDYVEFGTKNKIENDDDKRSLKHICWKLKVNRLGEITDVKR

SEQ ID NO: 75 - protein, 1504 aa, Bacteroides dorei
  source 1..1504: note = Bacteroides dorei DSM 17855
MKNIVGLDLGTNSIGWAVVNGSVNDDGSEQLVKIQASGSRIIPMDAAMIGDFNKGNSISQTAERTRLRGVRRLSERYLLRRERLHRILDILGFLPFHFAQDLDRHGKIVKGKEPKLAWRKNEAGQFEFIFQDSFKEMLEDFKLNYPNLITDDKKVPYDWTIYYLRKKGLTSKISKEELAWILLNFNQKRGYYQLRGEEEEENKDKLVEFYALKVVAVEDSGEKKGKDIWYNVHLENGWVYRRTSNMSLDWVGKTKEFIVTTDLEKDGTPKKDKEGNVKRSFRAPKEDDWSLVKKKTEADIDQTHKTVGAYIYDTLLGNPSQKIRGRLVRTIERKYYKEELKLILEKQKEFHLELQDRALYAACIEELYPINEAHRNNVGNRDFTYLFLEDILFYQRPLKSKKSLIDNCPYEENQGLDKETGEIKSFPVKCIAKSHPLFQEFRLWQFIINLRIYRKDLAQDVDVTNELLKTEEDYVALFDWLNGKKEIDQKAFLKYPVFGLKKEIENYRWNYVQDKPYPCNETRSLMLARLEKCDISIEFLTKENEEALWHILYSVEDKNEIVKALQKFADKHDLNASFVDVFQKFPPFKKEYGSYSAKAIKKLLPLMRMGKYWSENSIDKGTRERIDKIITGEYDEKIENRVREKAIHLADVSDFKGLPLWLVCYIVYGRHSEAKEIIQWKSPADIDSYLRSFKQHSLRNPIVEQIIIETLRVVRDIWKQVGNIDEIHVELGREMKNPADKRKKMTQQMSENENTNLRIKYLLTEFLNPEYEVENVRPYSPSQQDILRIYEEGVLNSVSDLPEEISDILKKFTETDLKKRPSRSEVLRYKLWLEQKYRSPYTGEVIPLGKLFTPAYEIEHVIPQSYYFDDSFSNKVICEAEVNKLKSNLLGHEFIVKHHGEIVELPFGKKVRIFTVDEYEQFVKDNYSRTRSKMKKLLMDDIPEEFVTRQLNDSRYISKVVKSLLSNIVREKGEEEAISKNVIPCTGGVTDRLKKDWGINEVWNKIILPRFQRLNELTGTNKFTTKNVGIQEIPTMPLELQKGFNKKRIDHRHHAMDAIIIACANRNIINYLNNKSATAKAELSRYDLQKMLCDKAKTDNNGNYKWVIRKPWASFTQDTYLALENIIVSFKQNLRVINKATNRFLHYNEEGKKIFVKQGKGDNWAIRKSMHKDTVFGEVNLRRIKTVALNEAMKNPQSIVVKDFKRKLLELWNLGFDAKRIKKYFEDNRETWSDINLSKIEVYYFSKDTKDRFFATRKPLDTSFDRKKIENNITDTGIQKILLRHLELKDNNPDIAFSPDGIDEMNRNIIQLNNGKYHQPIIKIRWYEQADKFAVGQTGNKSSKFVEAAKGTNLFFAVYESNILDKKTNTIIKKRNYATIPLNVAIERQKQGLPVAPEDENGNDPIFVLSPNDLVYLPTDDELANGIIAQPLDRGRIYKMVSSSGEQCFFIKHIVANVLVDKFEFSPLNKMERALTGEMIKMICIPIKVDRLGNVLESSSSYKK

SEQ ID NO: 76 - protein, 1509 aa, Bacteroides eggerthii
  source 1..1509: note = Bacteroides eggerthii 1_2_48FAA
MKTILGLDLGTNSVGWAVINSVIKEQAERIWIEMAGSRIIPMDAAVLGDFDKGNSISQTSERTRLRGARRLRERQLLRRERLHKVLNILGFLPNHYLEYIDFEKHPGKFLADAEPKLAWVKDEQGKYTFLFQAAFDEMLADFAIHQPSLVSGDKKIPYDWTIYYLRKKALTEMISKEELAWILLNFNQKRGYYQLRGEEEEDNAGKSVEFYALKVLTVEATDEKKGRDVWYNVHLENGWIYRRSSSVPLDWEGQVKEFIVTTDLNPDGTPKLDKYGEVKRSFRAPKEDDWMLIKKRTEADIANTHKTVGAYIYDTLLQKPQQKIIGKLVKTVERKLYRDELSLILQKQCAFHAELQDRALYARCVEALYPSNEVRRKNIANRDFVYLLMDDILFYQRPLKTKKSLIANCPYEENEYVDRETGEIKKTPLKCIAKSHPLFQEFRLWNFLSNIRIYQKEKEINGTLHLDVDVTAEFLKTEDDYVALFDWLNSRKEIEQKTFLKYPKFGLKKEISNYRWNYVEDKQYPCNETRHAILSSLEKANVCIDFLSNEKEVALWHILYSVSDKQEIEKALRTFAAKNGLDESFVEAFKKFPPFKSEYGAYSAKAIKKMLPLMRCGKYWDVSSIDDTTKERIKKIVTGEYDERISVKVRDKVMNLSDISCFRRLPLWLACYIVYNRHSEDKEAVKWESPADIDAYLASFKQHSLRNPIVEQVITETLRVVRDIWKQVGRIDEIHIELGREMKNPADKRKRMTAQILENENANLRIKALLAEFMNPEYEIENVRPYSPSQQEILRIYEDTVLHAEDQLPEEIDAILKKFNSSKVPTKSEFLRYKLWLEQKYRSPYTGELIPLGKLFTAAYEIEHVIPQSRYFDDSFSNKVICESAVNKLKDNQLGYEFIKNHHGQKVEVGFGKSVEIFSVDSYERFVKEQYAKSAVKMKKLLMDDIPEQFIERQLNDSRYISKVIKGLLSNIVREKNDSGEYEPEAVSKNIVVCTGSVTDRLKRDWGMNDVWNSIVYPRFERLNSLTDTQSFGHWENKSGKKVFQTELPLEYQKGFSKKRIDHRHHAMDAIVIACATRNHVNYLSNESASRNAKISRYDLQRLLCDKNRTDDNGNYKWVIKKPWDTFTQDAREVLSKIVVSLKQNLRIINKTTNVYRHLDATGNRVYEKQKTGDSWAIRKPMHKDTVFGAVNLRKVKVVRLSVALDTPAMIVDKRVKNKVFELLSYKYDKKRIEKYFKENAFLWKELDLAKVAVYYFTEATTEPLVAVRKPLDSTFNEKKIKESVTDTGIQKILLNHLCTKEGKPDLAFSAEGIEEMNRNLLQLNNGKSHQPIYKVRVYEPRGNKFSVGVLGNKGTKWVEAAKGTNLFFAIYITEDGKRTYETIPLNVVIEREKQGLVPVPDRNKKGDKLLFWLSPNDLVYLPTEEEREFGRINEPIDRGRIYKMVSCTGNEGHFIPANVANPIVPVIELGSNNKAQRAWTNEMIKDICIPIKVDRLGHIIEVKYRIDE

SEQ ID NO: 77 - protein, 1526 aa, Bacteroides faecis
  source 1..1526: note = Bacteroides faecis MAJ27
MKKILGLDLGTNSIGWAVLNAADDNSLKYIEAAGSRIIPMDAAILGDFDRGNSISQTAERTRIRGMRHLRERYLLRRARLHRILNLLGFLPFHYAQDIDRYGNFSADMEPKIAWCKNLEGELEFIFIESFNEMLEDFRKNQPELVADNKKVPYDWVIYYLRKKALEKKISKEELAWILLNFNQKRGYYQLRGEDDDESMKTAKTRQYFDKQIIKNIIDTNQTYKGQRILIVELQNGDKGKIFKKEIPDWIGQEKNIIVTVDIDKDGNDKYEESGSLSCRFKIPTDAEWESEWKLIKMKTQKDLDESNKTVGTYIYDSILQNPTQKVRGKLVRTIERKYYKAELKQILEKQTEFHSELQDKDLYIECLNELYSNNDTHRNAITDRDFVYLFMNDILFYQRPLKSKKSLIDNCPYERNIYIDKETGEIKYSPIKCIAKSHPLFQEFRLWKFISSIRIYQRESVVEVVDKQLDLFSSQSTSVQKLVTDVDVTDKFLTCENDYVALFEWLNKKKIIDQKEFLKYRPFGLKGDIDNYRWNYVEDKSYPCNETHAMILTYFAKAGISEDILTKEMEEALWHILYSVEDRQEITKALRTFASKYHLSDSFVKVFSNIPPFKKEYGSYSAKAIKKLLSLMRMGKYWSEDAIDVNTRERIDKIVTGEYDEKIRDRVREKTIRLNDIRHFRALPDWLACYVVYDRHSETREITEWKSPEEIDEYIRNFKQHSLRNPIVEQVITETLRTVRDIWKQVGCIDEIHVELGREMKNPADKRKRITSQIIENENANLRVKALLTEFVNSEFEIENVRPYSLSQQDILRIYEDGVLNSVAEVPGDIAGILKKFNENDAKKRPTTSEILRYKLWLEQKYRSPYTGEMIPLSKLFTSAYEIEHVIPQSRYFDDSFSNKVICEAEVNKLKDNALGYEFIKKHHGEKVELGFGKIVEIFSVSVYEQFVKDNYSRNRGKMKKLLMDEIPEQFIERQLNDSRYISKVVKTLLSNVVREKAEQEAVSKNVIVCTGGVTDRLKKDWGINDVWNKIVLPRFLRLNELTNSTNFTAKNAAGNEIPAMPLELQKGFNKKRIDHRHHAMDAIVIACANRNIVNYLNNESASRKAKISRHDLQAILCDKVRTDDKGNYQWRVKKPWDTFTQDVYVALENIIVSFKQNLRVINKTSNYYWHYENGKKVLVKQVKGDSWAIRKPMHKDTVFGEVNLRKVKSVSLNEALKNPQFIVEKDLKRQLLSLLQQNFDIKKIKKYFEEHKDIWSDISLSKMNIYYFTKETKDRYFATRKPLDASFDKKKIESCITDTGIQQILLRHLELKENDPERAFSPDGIDEMNRNIIQLNKGKGHHPIAKVRVYEKADKFEVGQRGNKSSKFVEAAKGTNLFFAVYETEYPDEKTNSIVRKRNYATIPLNIAIERQKRGLSTAPEDEKGNVPSFVLSPNDLVYLPTSEDIVNGHITQPIDKSRIYKMVSSSGSQCFFIKHNIANIIVDKYEFSPLNKMERAISNEMIKEICIPVKVDRLGNIVKLGKSE

SEQ ID NO: 78 - protein, 1509 aa, Bacteroides fluxus
  source 1..1509: note = Bacteroides fluxus YIT 12057
MKTILGLDLGTNSVGWAVINSVIKEQAERIWIEMAGSRIIPMDAAVLGDFDKGNSISQTSERTRLRGVRRLRERQLLRRERLHKVLNILGFLPNHYLEYIDFEKHPGKFLSDAEPKLPWVKDEQGKYTFLFQAAFDEMLADFAIHQPSLVSGDKKIPYDWTIYYLRKKALTEMISKEELAWILLNFNQKRGYYQLRGEEEEDNAGKSVEFYALKVLTVEATDEKKGRDVWYNVHLENGWIYRRSSSVPLDWEGQIKEFIVTTDLNPDSTPKLDKYGEVKRSFRAPKEDDWMLIKKRTEADIANTHKTVGAYIYDTLLQKPQQKIIGKLVKTVERKLYRDELSLILQKQCAFHAELQDRTLYARCVEALYPNNEVQRRNIANRDFVYLLMDDVLFYQRPLKTKKSLIANCPYEENEYVDRETGEIKKAPLKCIAKSHPLFQEFRLWNFLSNIRIYQKEKEINGTLHLDVDVTAEFLKTEDDYVALFDWLNSRKEIEQKTFLKYPKFGLKKEISNYRWNYVEDKQYPCNETRHAILSRLEKANVCIDFLSNEKEVALWHILYSVSDKQEIEKALRTFAAKNGLDESFVEAFKKFPPFKSEYGAYSAKAIKKLLPLMRCGKYWDVSSIDDTTKERIKKIVAGEYDERIAVKVRDKVMNLSDISCFKRLPLWLACYIVYNRHSEDKEAVKWESPADIDAYLASFKQHSLRNPIVEQVITETLRVVRDIWKQVGRIDEIHIELGREMKNPADKRKRMTAQILENENANLRIKALLAEFMNPEYEIENVRPYSPSQQEILRIYEDMVLHAEDQLPEEIDAILKKFNSSKVPTKSEFLRYKLWLEQKYRSPYTGELIPLGKLFTAAYEIEHVIPQSRYFDDSFSNKVICESAVNKLKDNQLGYEFIKNHHGQKVEVGFGKSVEIFSVDSYERFVKEQYAKSAVKMKKMLMDDIPEQFIERQLNDSRYISKVIKGLLSNIVREKNDSGEYEPEAVSKNIVVCTGSVTDRLKRDWGMNDVWNSIVYPRFERLNSLTDTQSFGHWENKSGKKVFQTELPLEYQKGFSKKRIDHRHHAMDAIVIACATRNHVNYLSNESASRNAKISRYDLQRLLCDKSRTDDNGNYKWVIKKPWDTFTQDAREVLSKIVVSLKQNLRIINKTTNVYRHLDATGNRVYEKQKTGDSWAIRKPMHKDTVFGAVNLRKVKVVRLSVALDAPTMIVDKRVKNKVFELLSYKYDKKRIEKYFKENAVLWKELDLARVAVYYFTEATTEPLVAVRKPLDSTFNEKKIKESVTDTGIQKILLNHLCTKEGKPDLAFSAEGIEEMNRNLLQLNNGKRHQPIYKVRVYEPRGNKFSVGVLGNKGTKWVEAAKGTNLFFAIYITEDGKRTYETIPLNMVIEREKQGLAPVPDKNEKGDKLLFWLSPNDLVYLPTEEELEFGRINEPIDRGRIYKMVSSSGNQCFFIPQSISNAIIPTKELGANNKAERSWDGAMIKNICIPVKVDRLGRIIEVKYRINE

SEQ ID NO: 79 - protein, 1436 aa, Bacteroides fragilis
MKRILGLDLGTNSIGWALVNEAENKDERSSIVKLGVRVNPLTVDELTNFEKGKSITTNADRTLKRGMRRNLQRYKLRRETLTEVLKEHKLITEDTILSENGNRTTFETYRLRAKAVTEEISLEEFARVLLMINKKRGYKSSRKAKGVEEGTLIDGMDIARELYNNNLTPGELCLQLLDAGKKFLPDFYRSDLQNELDRIWEKQKEYYPEILTDVLKEELRGKKRDAVWAICAKYFVWKENYTEWNKEKGKTEQQEREHKLEGIYSKRKRDEAKRENLQWRVNGLKEKLSLEQLVIVFQEMNTQINNSSGYLGAISDRSKELYFNKQTVGQYQMEMLDKNPNASLRNMVFYRQDYLDEFNMLWEKQAVYHKELTEELKKEIRDIIIFYQRRLKSQKGLIGFCEFESRQIEVDIDGKKKIKTVGNRVISRSSPLFQEFKIWQILNNIEVTVVGKKRKRRKLKENYSALFEELNDAEQLELNGSRRLCQEEKELLAQELFIRDKMTKSEVLKLLFDNPQELDLNFKTIDGNKTGYALFQAYSKMIEMSGHEPVDFKKPVEKVVEYIKAVFDLLNWNTDILGFNSNEELDNQSYYKLWHLLYSFEGDNTPTGNGRLIQKMTELYGFEKEYATILANVSFQDDYGSLSAKAIHKILPHLKEGNRYDVACVYAGYRHSESSLTREEIANKVLKDRLMLLPKNSLHNPVVEKILNQMVNVINVIIDIYGKPDEIRVELARELKKNAKEREELTKSIAQTTKAHEEYKTLLQTEFGLTNVSRTDILRYKLYKELESCGYKTLYSNTYISREKLFSKEFDIEHIIPQARLFDDSFSNKTLEARSVNIEKGNKTAYDFVKEKFGESGADNSLEHYLNNIEDLFKSGKISKTKYNKLKMAEQDIPDGFIERDLRNTQYIAKKALSMLNEISHRVVATSGSVTDKLREDWQLIDVMKELNWEKYKALGLVEYFEDRDGRQIGRIKDWTKRNDHRHHAMDALTVAFTKDVFIQYFNNKNASLDPNANEHAIKNKYFQNGRAIAPMPLREFRAEAKKHLENTLISIKAKNKVITGNINKTRKKGGVNKNMQQTPRGQLHLETIYGSGKQYLTKEEKVNASFDMRKIGTVSKLAYRDALLKRLYENDNDPKKAFAGKNSLDKQPIWLDKEQMRKVPEKVKIVTLEAIYTIRKEISPDLKVDKVIDVGVRKILIDRLNEYGNDAKKAFSNLDENPIWLNKEKGISIKRVTISGISNAQSLHVKKDKDGKPILDENGRNIPVDFVNTGNNHHVAVYYRPVIDKRGQLVVDEAGNPKYELEEVVVSFFEAVTRANLGQPIIDKDYKTTEGWQFLFSMKQNEYFVFPNEKTGFNPKEIDLLDVENYGLISPNLFRVQKFSLKNYVFRHHLETTIKDTSSILRGITWIDFRSSKGLDTIVKVRVNHIGQIVSVGEY

SEQ ID NO: 80 - protein, 1436 aa, Bacteroides sp.
MKRILGLDLGTNSIGWALVNEAENKDERSSIVKLGVRVNPLTVDELTNFEKGKSITTNADRTLKRGMRRNLQRYKLRRETLTEVLKEHKLITEDTILSENGNRTTFETYRLRAKAVTEEISLEEFARVLLMINKKRGYKSSRKAKGVEEGTLIDGMDIARELYNNNLTPGELCLQLLDAGKKFLPDFYRSDLQNELDRIWEKQKEYYPEILTDVLKEELRGKKRDAVWAICAKYFVWKENYTEWNKEKGKTEQQEREHKLEGIYSKRKRDEAKRENLQWRVNGLKEKLSLEQLVIVFQEMNTQINNSSGYLGAISDRSKELYFNKQTVGQYQMEMLDKNPNASLRNMVFYRQDYLDEFNMLWEKQAVYHKELTEELKKEIRDIIIFYQRRLKSQKGLIGFCEFESRQIEVDIDGKKKIKTVGNRVISRSSPLFQEFKIWQILNNIEVTVVGKKRKRRKLKENYSALFEELNDAEQLELNGSRRLCQEEKELLAQELFIRDKMTKSEVLKLLFDNPQELDLNFKTIDGNKTGYALFQAYSKMIEMSGHEPVDFKKPVEKVVEYIKAVFDLLNWNTDILGFNSNEELDNQPYYKLWHLLYSFEGDNTPTGNGRLIQKMTELYGFEKEYATILANVSFQDDYGSLSAKAIHKILPHLKEGNRYDVACVYAGYRHSESSLTREEIANKVLKDRLMLLPKNSLHNPVVEKILNQMVNVINVIIDIYGKPDEIRVELARELKKNAKEREELTKSIAQTTKAHEEYKTLLQTEFGLTNVSRTDILRYKLYKELESCGYKTLYSNTYISREKLFSKEFDIEHIIPQARLFDDSFSNKTLEARSVNIEKGNKTAYDFVKEKFGESGADNSLEHYLNNIEDLFKSGKISKTKYNKLKMAEQDIPDGFIERDLRNTQYIAKKALSMLNEISHRVVATSGSVTDKLREDWQLIDVMKELNWEKYKALGLVEYFEDRDGRQIGRIKDWTKRNDHRHHAMDALTVAFTKDVFIQYFNNKNASLDPNANEHAIKNKYFQNGRAIAPMPLREFRAEAKKHLENTLISIKAKNKVITGNINKTRKKGGVNKNMQQTPRGQLHLETIYGSGKQYLTKEEKVNASFDMRKIGTVSKSAYRDALLKRLYENDNDPKKAFAGKNSLDKQPIWLDKEQMRKVPEKVKIVTLEAIYTIRKEISPDLKVDKVIDVGVRKILIDRLNEYGNDAKKAFSNLDKNPIWLNKEKGISIKRVTISGISNAQSLHVKKDKDGKPILDENGRNIPVDFVNTGNNHHVAVYYRPVIDKRGQLVVDEAGNPKYELEEVVVSFFEAVTRANLGLPIIDKDYKTTEGWQFLFSMKQNEYFVFPNEKTGFNPKEIDLLDVENYGLISPNLFRVQKFSLKNYVFRHHLETTIKDTSSILRGITWIDFRSSKGLDTIVKVRVNHIGQIVSVGEY

SEQ ID NO: 81 - protein, 1512 aa, Bacteroides nordii
  source 1..1512: note = Bacteroides nordii CL02T12C05
MKNILGLDLGTNSIGWAVINSEEDGPIVKKRIELAGSRIIPMDAAVLGNFDSGVTKSQTAERTSFRSIRRLRERQLLRRERLHKVLQILGFLPEHYVNDIDFENHPGKIKRNTEPKLPWRKNSMGQFEFIFQDSFEAMLTDFATHQPVFVSEGKKVPYDWTLYYLRKKALTEGISKEELAWLILNFNQKRGYYQLRGEEEEEQSNKLVEFYALRVVKVEATDDKKGKDTWYNVHLENGWIYRRTSNIPLDWEGKVKEFIVTTDLNEDGTPKLDKYGEVKRSFRAPKEDDWTLIKKKTESDIANSHKTVGCYIYDALLQNPHQKIKGRLVRTVERKFYKEELRLILEKQLSFHPELQDRDLYRACIDALYVSNEAHKNNISGRDFVYLFIDDIIFYQRPLKTKKSLIDNCPYEENQYMDRETGEVKQAPIKCIAKSHPLFQEFRLWQFISNIRIYQRERVLDDGKLETDVDVTPDFLKTEDDYTTLFEWFNDRKEVDQKAFLKNPQFGLKKTFTEYRWNYVEDKSYPCNETRNAILNGLQKAGVSADFLSREVEEALWHILYSVEDKIEIESALRKFASKHDLDDRFADVFKKLPPFKKEYGAYSAKAIKKLLPLMRIGKYWELSNIDDKTKERIDKIITGEWDENIHDRVREKAIKLSDITDFKGLPLWLSCYVVYNRHSEARAIAKWESPEDIDSYLRLFRQHSLRNPIVEQVITETLRTVRDIWKRVGQIDEIHVELGREIKNPADKRAKMTAQIVENENTNLRIKALLAEFINSEYEIENVRPYSSNQQEKLKIYEDTVLNGVKEIPEDINTILKKFRESDLKKRPTKSDFLHYKLWLEQKYCSPYTGRIIPLGKLFTSAYEIEHIIPQAHYFDDSFSNKVICEAEVNGLKDKKLGYEFIKHNPGKMVEIGFGKPPVRIFSVEEYERFVKENYSGIKNKMNKLLMDDIPETFIERQLNDSRYISKVVKSLLSNIVREKDSNGEYEPEAISKNVIVCTGSVTDRLKRDWGVNDVWNSIIYPRFERLNELTGSQQFGCWENKEGKRVFQTAVPLEMQKGFSKKRIDHRHHAMDAIVIACATRNHINYLSNESASKKAKISRTDLQRLLCTKCRTDDNGNYKWIVKKPWPAFTQDIRKALENITVSFKQNLRVINKTTNYYVHFDESGKKVLEKQINGDSWAIRKPMHKDTVFGKVNLQKVKEVRLSLALDTPKMIVDKKLKEKVLQLYSYKYDKKRIDKYFKENASLWKDLNLSKVAVYYFTNDSTEPLVAVRKPLDTSFNAKKIKESVTDTGIQKILLNHLSNNQDDPNLAFSPDGIDKMNKNLTALNDGKYHQPIYKVRVCEPQGNKFSVGTSGNKTSKYVEAAKGTNLFFAVYQTEDGKRSYETIPLNVVIEREKLGWTPVPENNNNGDKLLFWLSPNDLVYVPTADELNNGMRLDNMDKGRIYKMISCSGPQCFFIPQNVSNAIIPVIELGANNKAEKSWNNEMIKVVCVPIRVDRLGCITQINNQK

SEQ ID NO: 82 - protein, 1436 aa, Bacteroides sp.
  source 1..1436: note = Bacteroides sp. 2_1_16
MKRILGLDLGTNSIGWALVNEAENKDERSSIVKLGVRVNPLTVDELTNFEKGKSITTNADRTLKRGMRRNLQRYKLRRETLTEVLKEHKLITEDTILSENGNRTTFETYRLRAKAVTEEISLEEFARVLLMINKKRGYKSSRKAKGVEEGTLIDGMDIARELYNNNLTPGELCLQLLDAGKKFLPDFYRSDLQNELDRIWEKQKEYYPEILTDVLKEELRGKKRDAVWAICAKYFVWKETYTEWNKEKGKTEQQEREHKLEGIYSKRKRDEAKRENLQWRVNGLKEKLSLEQLVIVFQEMNTQINNSSGYLGAISDRSKELYFNKQTVGQYQMEMLDKNPNASLRNMVFYRQDYLDEFNMLWEKQAVYHKELTEELKKEIRDIIIFYQRRLKSQKGLIGFCEFESRQIEVDIDGKKKIKTVGNRVISRSSPLFQEFKIWQILNNIEVTVVGKKRKRRKLKENYSAIFEELNDAEQLELNGSRRLCQEEKELLAQELFVRDKMTKSEVLKLLFDNPQELDLNFKTIDGNKTGYALFQAYSKMIEMSGHEPVDFKKPVEKVVEYIKAVFDLLNWNTDILGFNSNEELDNQSYYKLWHLLYSFEGDNTPTGNGRLIQKMTELYGFEKEYATILANVSFQDDYGSLSAKAIHKILPHLKEGNRYDVACVYAGYRHSESSLTREEIANKVLKDRLMLLPKNSLHNPVVEKILNQMVNVINVIIDIYGKPDEIRVELARELKKNAKEREELTKSIAQTTKANEEYKTLLQTEFGLTNVSRTDILRYKLYKELESCGYKTLYSNTYISREKLFSKEFDIEHIIPQARLFDDSFSNKTLEARSVNIEKGNKTAYDFVKEKFGESGADNSLEHYLNNIEDLFKSGKISKTKYNKLKMAEQDIPDGFIERDLRNTQYIAKKALSMLNEISHRVVATSGSVTDKLREDWQLIDVMKELNWEKYKALGLVEYFEDRDGRQIGRIKDWTKRNDHRHHAMDALTVAFTKDVFIQYFNNKNASLDPNANEHAIKNKYFQNGRAIAPMPLREFRAEAKKHLENTLISIKAKNKVITGNINKTRKKGGVNKNMQQTPRGQLHLETIYGSGKQYLTKEEKVNASFDMRKIETVSKSAYRDALLKRLYENDNDPKKAFAGKNSLDKQPIWLDKEQMRKVPEKVKIVTLEAIYTIRKEISPDLKVDKVIDVGVRKILIDRLNEYGNDAKKAFSNLDKNPIWLNKEKGISIKRVTISGISNAQSLHVKKDKDGKPILDENGRNIPVDFVNTGNNHHVAVYYRPVIDKRGQLVVDEAGNPKYELEEVVVSFFEAVTRANLGLPIIDKDYKTTEGWQFLFSMKQNEYFVFPNEKIGFNPKEIDLLDVENYGLISPNLFRVQKFSLKNYVFRHHLETTIKDTSSILRGITWIDFRSSKGLDTIVKVRVNHIGQIVSVGEY

SEQ ID NO: 83 - protein, 1517 aa, Bacteroides sp.
  source 1..1517: note = Bacteroides sp. 20_3
MKKIVGLDLGTNSIGWALINAYINKEHLYGIEACGSRIIPMDAAILGNFDKGNSISQTADRTSYRGIRRLRERHLLRRERLHRILDLLGFLPKHYSDSLNRYGKFLNDIECKLPWVKDETGSYKFIFQESFKEMLANFTEHHPILIANNKKVPYDWTIYYLRKKALTQKISKEELAWILLNFNQKRGYYQLRGEEEETPNKLVEYYSLKVEKVEDSGERKGKDTWYNVHLENGMIYRRTSNIPLDWEGKTKEFIVTTDLEADGSPKKDKEGNIKRSFRAPKDDDWTLIKKKTEADIDKIKMTVGAYIYDTLLQKPDQKIRGKLVRTIERKYYKNELYQILKTQSEFHEELRDKQLYIACLNELYPNNEPRRNSISTRDFCHLFIEDIIFYQRPLKSKKSLIDNCPYEENRYIDKESGEIKHASIKCIAKSHPLYQEFRLWQFIVNLRIYRKETDVDVTQELLPTEADYVTLFEWLNEKKEIDQKAFFKYPPFGFKKTTSNYRWNYVEDKPYPCNETHAQIIARLGKAHIPKAFLSKEKEETLWHILYSIEDKQEIEKALHSFANKNNLSEEFIEQFKNFPPFKKEYGSYSAKAIKKLLPLMRMGKYWSIENIDNGTRIRINKIIDGEYDENIRERVRQKAINLTDITHFRALPLWLACYLVYDRHSEVKDIVKWKTPKDIDLYLKSFKQHSLRNPIVEQVITETLRTVRDIWQQVGHIDEIHIELGREMKNPADKRARMSQQMIKNENTNLRIKALLTEFLNPEFGIENVRPYSPSQQDLLRIYEEGVLNSILELPEDIGIILGKFNQTDTLKRPTRSEILRYKLWLEQKYRSPYTGEMIPLSKLFTPAYEIEHIIPQSRYFDDSLSNKVICESEINKLKDRSLGYEFIKNHHGEKVELAFDKPVEVLSVEAYEKLVHESYSHNRSKMKKLLMEDIPDQFIERQLNDSRYISKVVKSLLSNIVREENEQEAISKNVIPCTGGITDRLKKDWGINDVWNKIVLPRFIRLNELTESTRFTSINTNNTMIPSMPLELQKGFNKKRIDHRHHAMDAIIIACANRNIVNYLNNVSASKNTKITRRDLQTLLCHKDKTDNNGNYKWVIDKPWETFTQDTLTALQKITVSFKQNLRVINKTTNHYQHYENGKKIVSNQSKGDSWAIRKSMHKETVHGEVNLRMIKTVSFNEALKKPQAIVEMDLKKKILAMLELGYDTKRIKNYFEENKDTWQDINPSKIKVYYFTKETKDRYFAVRKPIDTSFDKKKIKESITDTGIQQIMLRHLETKDNDPTLAFSPDGIDEMNRNILILNKGKKHQPIYKVRVYEKAEKFTVGQKGNKRTKFVEAAKGTNLFFAIYETEEIDKDTKKVIRKRSYSTIPLNVVIERQKQGLSSAPEDENGNLPKYILSPNDLVYVPTQEEINKGEVVMPIDRDRIYKMVDSSGITANFIPASTANLIFALPKATAEIYCNGENCIQNEYGIGSPQSKNQKAITGEMVKEICFPIKVDRLGNIIQVGSCILTN

SEQ ID NO: 84 - protein, 1424 aa, Bacteroides sp.
  source 1..1424: note = Bacteroides sp. 3_1_19
MKRILGLDLGTNSIGWALVNEAETDEEVSSIIRLGVRVNPLTVDETQNFEKGKSITTNAERTLKRSMRRNLQRYKLRRDALVEFLKELGFITDETILSEQGNRTTFETCRLRAKAAEEEISLEELSRVLLMINKKRGYKSSRKVKKEEDGVLIDGMEIAKKLYEEDLTPGQLCSQLLESGKKVLPDFYHSDLQEELDRIWSVQKQFHPDVFCDAAKEEIKGKNRSQTWAILANYFVWKEEVVGWNDREAKNETIEKECKLVGLKRTTKGYELKKENYRWRAQALTEQLGLEEIAVVLQEINGQINASSGYLGAISDRSKVLYFNHQTVGQYQMAELDKNPHASLRNMVFYRQDYLDEFDRIWEKQAEFHKELTAELKKEIRDMIIFYQRRLKSQKGLISFCEFERLEIVVEKDGKKQTKVIGCKVIPRSHPLFQEFKVWQTLNDIKVLGREKKRNALSASESRALYPEEKEILARELAIKENMKKADVLKLLFENPQELDLNFKQIDGNRTGFSLFSAYSKMIEKYGYEPLDFKKPADEIIGQLRTIFTDLGWNTNLFTIDLTKEGKELEMQPYFRLWHLLYSFEGDNTSTGNGKLIEKIMQLCGVEKEYAVELASLSFQDDYGSLSAKAIKRILPYLKEGNLYDVACEYAGYRHSKSSLTKEEIENKVLKGKLEVLPKNSLRNPVVEKILSQMVNVINTIIDTYGKPDEIRVELARELKKSAKEREELTKAIAKSTREHEEIRKLLQDEFGMMNVSRNDIIRYKLYEELKDNGYKTLYSNQYIPKEKIFSKEIDIEHIIPQSRLFDDSLSNKTLEYKAINIEKGNKTAYDFVKEKYGEEGLQQYINRCESLFNDKKAKLRKLKMEQKDIPDGFIDRDLRNTQYIAKKALAMLNEICRRVVATTGSITDQLREDWQLVDVMKELNLPKYEALGFVETYEDKDGRKIKRIKDWTKRNDHRHHAMDALTVAFTKDAFIQYFNNKNAAQDSGNRNHTNIIGIKTRYFDKGRALPPIPLEQFRIEAKQHLEKLLVSIKAKNKVVTVNVNRTKKRKGENTKIQQTPRGQLHLETVYGSHKQYVTKIEKVNASFDAAKIATVSKRAYRNALLKRLETFGNDPKKAFTGKNALEKNPLYADKYQTIRVPEKVQTVEFETIYTIRKPVDPALNVDKVVDVKVRAILERRLKEYGGDPKKAFVNFWENPIWLNKEKGISIKRVSIRGINNAQSIHVKKDKNGNPIWDENGKQIPVDFVNTGNNHHVAIYRKPVLDKKGQVTFDEDGNLMYELDEVVVPFFEAVTRANLGLPIIDKDYRKSEGWQFLFSMKQNEYFVFPNEKTGFNPKEVDLLNPDNYAMISPNLFRVQTMSKVMYGNNVVRDYKFRHHLETTVKDMKELKDIAYKQYKTLSFGNSVVKIRINHIGQIVSVGEY

SEQ ID NO: 85 - protein, 1510 aa, Bacteroides sp.
  source 1..1510: note = Bacteroides sp. D2
MKRILGLDLGTNSIGWALVDSEEQRILGMGSRIIPMDQGVLDTFSGGNPVETQTAARTAYRGTRRLRERALLRRERLIRVLNMMKFLPEHYASQIDFEKRLGQFFDEKEPKLAWKQNDEGRFEFIFQQSFNEMIEEFKNKGVVREDKKIPYDWTIYYLRKKALSQEIEKEELAWILLNFNQKRGYYQLRGEEEEENPNKLVEYYSLKIVDVIADEKPNSKGDIWYSLHLENGWIYRRSSKIPLFGWKDKTRDFIVTTDLNDDGTVKKDKEGIEKRSFRAPSENDWVLLKKKTESDIEKSHKTVGAYVYETLLQNPMQKVRGKLVRTIERKFYKDELKQILEKQREFHPELRDEDLYNDCVRELYRSNETYQFILSKRDFVHLFLDDILFYQRPLRSQKSAIGDCILEFKTYKDKDGNNIKEYLKVISKSNPLYQEFRIWQWLYNLKIYRKEDDEDVTLQFIANIEDKEQLFDFLSNRKSIEQKPLLEYLIKAKGLKKQVKTEAYRWNYVEDKIYPCSETKTMISTRLAKVENIPDNFFTKEIEQKLWHIIYSVTDKNEFEKALRTFAKKYDLDIASFVDNFKKIPPFKNEYGSFSEKAIKKLLPLMRLGKYWKWNDIDNNTQNRISKIITGEYDEEIKDIVREKSIALTNENDFQGLQLWLAQYLVYGRHSEADIAGKWHSVADLEKYLNEFKQHSLRNPIVEQIITETLRVVRDIWRKYGQGAENFFSEIHVELGRDMKNTADERKKIVNVVTENENTNLRIKALLMELKNNSDGKLEVENVRPYSPTQQDILKIYEEYAISTGLDNEKDEKVKEDIKKISRVAQPTTTELQRYKLWLEQKYCSPYTGKVIPLGKLFTEEYQIEHIIPKSRYYDDSFSNKVICEAAVNKLKDKCLGLEFIKNYHGQIVETGFGQKVTIFDEEAYQNFVKQHYAYNRSKRTKLLLEEIPEKMIERQMNDTRYISKFVLPLLSNLVRAEENDNGVNSKNVLPVNGKITTMLKQDWGLNDVWNDLILPRFVRMNELAKTIAFTSWNEQHQKYLPTVPLELSKGFQKKRIDHRHHAMDALVIACATRDHVNLLNNKHANTDTIRYDLQRKLRLFERVTYIDPQTKNNVTKDIPKEFKKPWDNFTVDARNELEKIIVSFKQNLRIINKATNIYTKYENGKKIKVGQKGLNWAIRKPLHKETVFAKVSLRKRKTVRLSEALKDWKKIVDKKLKQEIKRLTCQYGKFDVDTILRYFKDRKYQFGEVDVSKVKMYYFDEENAAVRKNVDTSFTEKFIQGSVTDTGIQKILLNHLEAKGNKVEIAFSPEGIEEMNKNIIQLNEGKLHLPIFKVRVYETIGNKFSVGVKGNKKDKYVEAAKGTNLFFAIYVDENGIRSYETIPLNIVIERLKQGLSVVPEKNRKEHSLLFYLSPNDLVYVPIEDERENIHAVNLDQLNNEQRKRIYKMVSCTGSECHFVPYYVASPIVNKVEYSSLNKIGRSLTGEMIKDVCIKLKVDRLGNVKGISGL

SEQ ID NO: 86 - protein, 1436 aa, Bacteroides sp.
  source 1..1436: note = Bacteroides sp. D2
MKRILGLDLGTNSIGWALVDEAENKDERSSIVKLGVRVNPLTVDELTNFEKGKSITTNADRTLKRGMRRNLQRYKLRRETLMEVLKEHKLITEDTILSENGNRTTFETYRLRAKAATEKISLEEFARVLLMINKKRGYKSCRKAKGAEEGTLIDGMDIARELYNNNLTPGELCLQLLDAGKKYLPDFYRSDLQNELDRIWEKQKEYYPEILTEVLKEELRGKKRDAVWAICAKSFVWEEYYTEWNKEKGKTEQQEREHKLEGIYSKRKRDEAKRENLQWRVNGLKEKLSLEQLVIVLQEMNIQINNSSGYLGAISDRSKELYFNKQTVGQYQMEMLDKNPNASLRNMVFYRQDYLDEFNTLWEKQAEYHKELTGELKKEIRDIVIFYQRRLKSQKGLVGFCEFESRQIEVEIDGKKKIKTVGNRVIPRSSPLFQEFKIWQILNNIEVTVVGKKGKRRKQKDNSPTLFDGLDDTEQLELNGSRYLYQEEKELLAQELFVRDKMTKSDVLKLLFDNPQELDLNFKTIDGNKTGYTLFQAYSKMIEMSGHEPVDFKKTVEKVVEHVKAVFDLLNWNTDILGFNSNEELDNQSYYKLWHLLYSFEGDNTPTGNARLVQKITELYGFEKEYAIILANVTFQDDYGSLSAKAIHKILPHLKEGNRYDVACAYAGYKHSESSLTKEEIANKALKDRLTLLPKNNLRNPVVEKILNQMVNVINAIIDTYGKPDEIRVELARELKKNAKEREELTKFIAETTRKHEEFKILLQSEFGLTNVSRTDILRYKLYKELESCGYKTLYSNTYIPREKLFSKEFDIEHIIPQARLFDDSFSNKTLEARSINLEKGNKTAYDFVKEKFGESGADNSLDHYLNNIEDLFKSGKISKTKYNKLKMAEQDIPDGFINRDLRNTQYIAKKALSMLNEISRRVVATSGTITDKLRQDWQLVDVMKELNWEKYKALGLVEYFEDKDGRQIGRIKDWTKRNDHRHHAMDALTVAFTKDIFIQYFNNKNASLNSNTNEYAIKNKYFQNGRAIAPIPLREFRVEAKKHLENTLISIKAKNKVVTGNINKTKKRGGVNKYLQQTPRGQLHLETIYGSGKQYLTKEEKVNASFDMKKIATVSKSAYRDVLLKRLHENDNDPKKAFTGKNSLDKQPIWLDKEQTRKVPEKVKTVTLETIYTVRKEISPDLKVDKVIDAGVRKILTGRLNEYGNDAKKAFSNLDENPIWLNKEKGISIKRVTISGISNAQSLHVKKDKDGKPILDEDSRNIPVDFVNTGNNHHVAVYRRPVIDKRGQLVIDEAGNPKYELEEVVVSFFEAVTRANLGQPIIDKDYKTSEGWQFLFSMKQNEYFVFPNEKTGFNPKEIDLLDAENYGVISPNLFRVQKFAHKNYVFRHHLETTIKDTSSILKGITWIDFRSSKGLDAIVKVRVNHIGQIVSVGEY

SEQ ID NO: 87 - protein, 1508 aa, Bacteroides uniformis
  source 1..1508: note = Bacteroides uniformis CL03T00C23
MRTILGLDLGTNSIGWAVINSVIKEQTERIWIEMAGSRIIPMDAAILGDFDKGNSISQTAERTRFRGVRRLRERQLLRRERLHKVLKILGFLPEHYLKGIDFEKHTGKFLSGSEPKLPWVKDRWGKYSFLFQTAFNEMLADFAKHQPSLVFDGKKIPYDWTVYYLRKKALTEMISKEELAWILLNFNQKRGYYQLRGEEEEDNAGKSVEFYALKVLSVEATDEKKGRDIWYNVHLENGWVYRRSSNVPLDWEGRVKEFIVTTDLNPDGTPKLDKYGEVKRSFRAPKEDDWMLIKKRTEADITGTHKTIGSYIYDALLQEPQQKIIGKLVKTVERKFYKEELNFILQKQCAFHAELQDRDLYMRCIEALYPGNEVQRRNIANRDFIYLLIDDVLFYQRPLKTKKSLIANCPYEENEYVNRKTGEIKTAPLKCIAKSHPLFQEFRLWYFLSNIRVYQKEREVNGTLHLDVDVTTEFLKTEDDYVALFDWLNSRKEIDQKAFLRYPAFGLKKEINNYRWNYVEDKFYPCNETRHAILSRLEKAGIGIDFLSDEKETALWHILYSVSDKQEIEKALATFAVKNGLNESFVEVFKKFPPFKSEYGAYSAKAIKKLLPLMRCGKYWDMSLIDGTTKERIERIIAGECDESIGAKVREKAMNLSDISCFKRLPLWLACYVVYNRHSEDKEITKWETPADIDAYLAAFKQHSLRNPIVEQVITETLRVVRDIWKQVGKIDEIRIELGREMKNPADKRKRMTTQILENENANLRIKALLAEFVNPEYGVENVRPYSPSQQEILRIYEDAVLKGEEQIPEDIDVILKKFNTSKLPTKSEFLRYKLWLEQKYRSPYTGELIPLAKLFTAAYEIEHVIPQSRYFDDSFSNKVICESAVNKLKDNQLGYEFIKNHHGQKVEVGFGKTVEIFSVDSYERFVKEQYAKSGIKMKKLLMDDIPEQFIERQLNDSRYISKVVKGLLSNIVREKNDSGEYEPEAVSKNILVCTGSVTDRLKKDWGMNDVWNSIVSPRFERLNALTETQCFGHWENKDGKKVFQTAVPLEYQKGFSKKRIDHRHHAMDAIVIACATRNHVNYLNNESASRNAKISRYDLQRLLCDKSRGDGNGNYRWIIKKPWTTFTQDAREALSGIIVSLKQNLRIINKTTNIYQHFDANGTRVYEKQKIGDSWAIRKPMHKDTVFGAVNLRKVKVVRLSVALDTPSMIVNKRVKNKVLELLSYKYDKKKIEKYFKENAFLWKELDIAKVAVYYFTENTTEPLVAVRKSLDSTFNEKKIASVTDTGIQKILLNHLKSKEGKAELAFSAEGIEEMNRNLLQLNDGKGHQPIYKVRVYEPRGNKFKVGVLGNKGAKWVEAAKGTNLFFAIYITEDGNRTYETIPLNWVIEREKQGLVPVPDRNEKGDKLLFWLSPNDLVYLPTEEERDFGRINEPIDRGRIYKMVSSSGNQCFFIPQSISNAIISTKELGSNNKAEKSWDGEMIKNICIPVKVDRLGRIIEVKYRVNE

SEQ ID NO: 88 - protein, 1504 aa, Bacteroides vulgatus
  source 1..1504: note = Bacteroides vulgatus CL09T03C04
MKNIVGLDLGTNSIGWAVVNGSVNDDGSEQLVKIQASGSRIIPMDAAMIGDFNKGNSISQTAERTRLRGVRRLSERYLLRRERLHRILDILGFLPFHFAQDLDRHGKIVKGKEPKLAWRKNEAGQFEFIFQDSFKEMLEDFKLNHPNLITDDKKVPYDWTIYYLRKKGLTSKISKEELAWILLNFNQKRGYYQLRGEEEEENKNKLVEFYALKVVAVEDSGEKKGKDIWYNVHLENGWVYRRTSNMPLDWVGKTKEFIVTTDLEKDGTPKKDKEGNVKRSFRAPKEDDWSLLKKKTEADIDQTHKTVGVYIYDTLLGNPSQKIRGRLVRTIERKYYKEELKQILEKQKEFHLELQDRALYAACIEELYPINEAHRNNVGNRDFTYLFLEDILFYQRPLKSKKSLIDNCPYEENQGLDKETGEIKSFPVKCIAKSHPLFQEFRLWQFIVNLRIYRKDLAQDVDVTNELLKTEEDYVALFDWLNGKKEIDQKAFLKYPVFGLKKEIENYRWNYVQDKPYPCNETRSLMLARLEKCDISIEFLTKENEEALWHILYSVEDKNEIVKALQKFADKHDLNASFVDVFQKFPPFKKEYGSYSAKAIKKLLPLMRMGKYWSENSIDKGTRERIDKIITGEYDEKIENRVREKAIHLADVSDFKGLPLWLVCYIVYGRHSEAKEITQWKSPADIDSYLRSFKQHSLRNPIVEQIIIETLRVVRDIWKQVGNIDEIHVELGREMKNPADKRKKMTQQMSENENTNLRIKYLLTEFLNPEYEVENVRPYSPSQQDILRIYEEGVLNSVSDLPEEISDILKKFTETDLKKRPSRSEILRYKLWLEQKYRSPYTGEVIPLGKLFTPAYEIEHVIPQSCYFDDSFSNKVICEAEVNKLKSNLLGHEFIVKHHGEIVELPFGKKVRIFTVDEYEQFVKDNYSRTRSKMKKLLMDDIPEEFVTRQLNDSRYISKVVKSLLSNIVREKGEEEAISKNVIPCTGGVTDRLKKDWGINEVWNKIILPRFQRLNELTGTNKFTTKNVGIQEIPTMPLELQKGFNKKRIDHRHHAMDAIIIACANRNIINYLNNESATAKAELSRYDLQKMLCDKAKTDNNGNYKWVIRKPWASFTQDTYLALENIIVSFKQNLRVINKATNRFLHYNEEGKKIFVKQGKGDNWAIRKSMHKDTVFGEVNLRRIKTVALNEAMKNPQSIVVKDFKRKLLELWNLGFDAKRIKKYFEDNRETWSDINLSKIEVYYFSKDTKDRFFATRKPLDTSFDRKKIENNITDTGIQKILLRHLELKDNNPDIAFSPDGIDEMNRNIIQLNNGKYHQPIIKIRWYEQADKFAVGQTGNKFSKFVEAAKGTNLFFAVYESNILDKKTNTIIKKRNYATIPLNVAIERQKQGLPVAPEDENGNDPIFVLSPNDLVYLPTDDELANGIIAQPLDRGRIYKMVSCTGNEGHFIPARIANPILQTIELGSNNKAQKAWTDEMIKEICMPIKVDRLGNVLESSSSYKK

SEQ ID NO: 89 - protein, 1434 aa, unidentified
  REGION 1..1434: note = Bacteroidetes oral taxon 274 str. F0058 polypeptide
MKNILGLDLGTNSIGWAYVKQAQNDSEKSEIAELGVRVNPLTVDEKTNFEKGKPISTNADRTLKRGARRNLQRYKLRRQELIELLKDYQVISDKTILAEDGKETTFETLRLRVKSAKEQVSLEELARILLMINKKRGYKSSRKAKNEDEGQLIDGMEIARRLYDENLTTGQLSLQLLKEGKKSLPDYYRSDLQHELDKVWNFQKQFHPDILTDEFYTSIQGKGQKATRESFSSKYGIDTAENKGSREEKKLQAYQWRADATHKELTKEELAFVITEINNNINNSSGYLGAISDRSKELIFANETVGEYLWKQIQNDPHTSLKNQVFYRQDYFDEFERIWETQSGFYPQILTESLKNELRDILIFYQRKLKSQKALVSICEFESKEIPLKDKQGNPISKNGIPVTKLVGPKVAPKSSPLFQEFKIWQNLNNVLVRPKGSRKRKVTTNQQSTLLEGQEPVFELNLEQKELLFEELNLKGNLKTDYCLELIGYSAKEWEMNYPTLEGNKTNKALYEAYLKIIDSEGYDAKKLLKVKTDKDDINLDDIKVSASEIKTMISDIFNELGINTKILDFDAELERKQFEAQASYRLWHLLYSYEGDDSKSGNELLYRLLEDKFGFKREHSKTLANVSLLSDYGNLSTKAIRTIYPYIKENKFSTACELAGYRHSKLSISKEENENRTLKDTLDVLKKNSLRQPVVEKILNQMINLINELIEKHSEKDEKGNIVKYFKFDEIHIELARELKKNAEERRELDSKVREGKDRNEKIITILKSEFGLPYPTKNDITRYRLYEELKDNGYKDLYTNTYIPREKLFSKEIDIEHIIPKSRLFNDSFSNKTICYRQDNLNKGERTAYDYIEGLGKTQLDEYLNRVENLYTNKFITKAKYRNLLKKESEIGDGFIERDLRETQYIAKKAKEMLLQITRHVVSTTGSITDRLRDDWELVNVMRELNLPKYKVLGLTEIQERKNGQTVEVITDWTKRNDHRHHAMDALTVAFTKHSHIQYLNFLNARKDEKHKEYSNIMGIQQLETEKTTDKDGKDRRVFKTPIPNFRQVAKEHLESILISHKTKNKVVTRATNKIAGSKKQQETLSPRGQLHKETVYGKYRRYVQKEEKIGSKFDLQTIERVANPLYKRLLTKRLEENGGDPKKAFTGKNALAKSPIYLDETQTQQLPEKVKLVWLETDFSIRKDITPDNFKDEKSIDKVLDEGIKRILKDRLKSFDGDAKRAFTDLEQNPIWLNKEKGIAIKRVTISGVSNAEPLHTKKDHLGNEIFDDTGKPIPVDYVSTGNNHHIAIYRDENGNLQEKAVSFFEAVTRANQGLPTVDKTYNQHLGWQFLFTMKQNEMFVFPNKETGFDPQEIDLLDPKNKKLISPNLFRVQKISTKNYFFRHHLETSVETHNALNGVTYKSQLGLNGITDIIKVRINHLGDIVHIGEY

SEQ ID NO: 90 - protein, 1153 aa, Barnesiella intestinihominis
  source 1..1153: note = Barnesiella intestinihominis YIT 11860
MKNILGLDLGLSSIGWSVIRENSEEQELVAMGSRVVSLTAAELSSFTQGNGVSINSQRTQKRTQRKGYDRYQLRRTLLRNKLDTLGMLPDDSLSYLPKLQLWGLRAKAVTQRIELNELGRVLLHLNQKRGYKSIKSDFSGDKKITDYVKTVKTRYDELKEMRLTIGELFFRRLTENAFFRCKEQVYPRQAYVEEFDCIMNCQRKFYPDILTDETIRCIRDEIIYYQRPLKSCKYLVSRCEFEKRFYLNAAGKKTEAGPKVSPRTSPLFQVCRLWESINNIVVKDRRNEIVFISAEQRAALFDFLNTHEKLKGSDLLKLLGLSKTYGYRLGEQFKTGIQGNKTRVEIERALGNYPDKKRLLQFNLQEESSSMVNTETGEIIPMISLSFEQEPLYRLWHVLYSIDDREQLQSVLRQKFGIDDDEVLERLSAIDLVKAGFGNKSSKAIRRILPFLQLGMNYAEACEAAGYNHSNNYTKAENEARALLDRLPAIKKNELRQPVVEKILNQMVNVVNALMEKYGRFDEIRVELARELKQSKEERSNTYKSINKNQRENEQIAKRIVEYGVPTRSRIQKYKMWEESKHCCIYCGQPVDVGDFLRGFDVEVEHIIPKSLYFDDSFANKVCSCRSCNKEKNNRTAYDYMKSKGEKALSDYVERVNTMYTNNQISKTKWQNLLTPVDKISIDFIDRQLRESQYIARKAKEILTSICYNVTATSGSVTSFLRHVWGWDTVLHDLNFDRYKKVGLTEVIEVNHRGSVIRREQIKDWSKRFDHRHHAIDALTIACTKQAYIQRLNNLRAEEGPDFNKMSLERYIQSQPHFSVAQVREAVDRILVSFRAGKRAVTPGKRYIRKNRKRISVQSVLIPRGALSEESVYGVIHVWEKDEQGHVIQKQRAVMKYPITSINREMLDKEKVVDKRIHRILSGRLAQYNDNPKEAFAKPVYIDKECRIPIRTVRCFAKPAINTLVPLKKDDKGNPVAWVNPGNNHHVAIYRDEDGKYKERTVTFWEAVDRCRVGIPAIVTQPDTIWDNILQRNDISENVLESLPDVKWQFVLSLQQNEMFILGMNEEDYRYAMDQQDYALLNKYLYRVQKLSKSDYSFRYHTETSVEDKYDGKPNLKLSMQMGKLKRVSIKSLLGLNPHKVHISVLGEIKEIS

SEQ ID NO: 91 - protein, 1352 aa, Belliella baltica
MKKILGLDLGTTSIGWAFIKEPEKDVVGSEIVDMGVRIVPLSSDEENDFAKGNTISINADRTLKRGARRNLQRFKQRRNALLEIFKEKKLISTNFKYAEDGPSSTFSTLNLRAKAAKEKIELQDLVKVLLQINKKRGYKSSRKAKSEEDDGSAIDSMGIAKELYENDLTPGQWVYEALQKGRKNVPDFYRSDLQEEFKKIVNYQSEFFPDIFNASFVEDWMGKASTPTKQYFNKKGVQLAENKGKREERRLQEYKWRAEAVNFKIDLSEIALILSQINSQISNSSGYLGAISDRSKELYFKNLTVGQYLYQQIKKNPHTRLKGQVFYRQDYLDEFERIWSVQSSFYPQLNDALKREVRDITIFFQRRLKSQKHLISNCEFEDHHKVVPKSHPVFQEFRIWQNLNNLLLIKKDNLNEKFDLELESKIALANELAFKRELNVKDALKILGLKPNEWEFNFTKIEGNRTNQAFFDAFAKIIELEDGEPIDLGDLKADDILDQFSEAFLRIGIDTELLQVNSDIEGAEYEKQSYIQFWHLLYSSEDDQKLKLNLIRKFGFKPEHAKILASISLQDDHASLSSRAIKKILPHLQSGLIYDKACTYAGYNHSSSFTKDENEKRELRAELELLKKNSLRNPVVEKILNQMINVVNAILKDPELGRPDEIRVEMARELKANAEQRKNMTSNIASATRDHDKYREILKSEFGLKRVTKNDLLRYKLWLETDGISLYTGKPIEASKLFSKEYDIEHIIPKARLFDDSFSNKTICERQLNIDKANVTAFSFLQNKLSADEFEQYQSRVKSLYGKLSKAKIQKLLMANDKIPEDFIARQLQETRYISKKAKEILFEISRRVSVTTGTITDKLREDWGLVEIMKELNWEKYDKLGLTYTIEGKHGERLNKIKDWSKRNDHRHHAMDALTVALTKPAYIQYLNNLNAKGLNNKKGTEVFAIEQKYLKRENGKLCFIPPIENIRSEAKKHLSRILVSYKAKNKVVTINKNKTKSKAGLNEQIALTPRGQLHKETVYGKSFHYSTKFEKIGASFNVQKINTVAKKEEREALLKRLAENGNDPKKAFTGKNTLNKMPIYLDLGKNIKLSEKVKTVVLEQNYTIRKNIDPDLKVDKVIDVGIKRILESRLEEFGGNAKLAFSNLEENPIWLNKEKGISIKRVKISGVSNVESLHVKKDHFGEPILDQEGNEIPVDFVSTGNNHHVAIYEDENGNLQEEVVSFFEAVVRQNQGLPIIKKNHTLGWKFLFTLKQNEYFVFPSDDFVPADVDLMDEQNYHLISPNLFRVQKIARKNYVFNNHLETKAVDNDLLKSKKELSKITYHFYQTPEHLRGIIKIRINHLGKIIQIGEY

SEQ ID NO: 92 - protein, 1415 aa, Bergeyella zoohelcum
  source 1..1415: note = Bergeyella zoohelcum ATCC 43767
MKHILGLDLGTNSIGWALIERNIEEKYGKIIGMGSRIVPMGAELSKFEQGQAQTKNADRRTNRGARRLNKRYKQRRNKLIYILQKLDMLPSQIKLKEDFSDPNKIDKITILPISKKQEQLTAFDLVSLRVKALTEKVGLEDLGKIIYKYNQLRGYAGGSLEPEKEDIFDEEQSKDKKNKSFIAFSKIVFLGEPQEEIFKNKKLNRRAIIVETEEGNFEGSTFLENIKVGDSLELLINISASKSGDTITIKLPNKTNWRKKMENIENQLKEKSKEMGREFYISEFLLELLKENRWAKIRNNTILRARYESEFEAIWNEQVKHYPFLENLDKKTLIEIVSFIFPGEKESQKKYRELGLEKGLKYIIKNQVVFYQRELKDQSHLISDCRYEPNEKAIAKSHPVFQEYKVWEQINKLIVNTKIEAGTNRKGEKKYKYIDRPIPTALKEWIFEELQNKKEITFSAIFKKLKAEFDLREGIDFLNGMSPKDKLKGNETKLQLQKSLGELWDVLGLDSINRQIELWNILYNEKGNEYDLTSDRTSKVLEFINKYGNNIVDDNAEETAIRISKIKFARAYSSLSLKAVERILPLVRAGKYFNNDFSQQLQSKILKLLNENVEDPFAKAAQTYLDNNQSVLSEGGVGNSIATILVYDKHTAKEYSHDELYKSYKEINLLKQGDLRNPLVEQIINEALVLIRDIWKNYGIKPNEIRVELARDLKNSAKERATIHKRNKDNQTINNKIKETLVKNKKELSLANIEKVKLWEAQRHLSPYTGQPIPLSDLFDKEKYDVDHIIPISRYFDDSFTNKVISEKSVNQEKANRTAMEYFEVGSLKYSIFTKEQFIAHVNEYFSGVKRKNLLATSIPEDPVQRQIKDTQYIAIRVKEELNKIVGNENVKTTTGSITDYLRNHWGLTDKFKLLLKERYEALLESEKFLEAEYDNYKKDFDSRKKEYEEKEVLFEEQELTREEFIKEYKENYIRYKKNKLIIKGWSKRIDHRHHAIDALIVACTEPAHIKRLNDLNKVLQDWLVEHKSEFMPNFEGSNSELLEEILSLPENERTEIFTQIEKFRAIEMPWKGFPEQVEQKLKEIIISHKPKDKLLLQYNKAGDRQIKLRGQLHEGTLYGISQGKEAYRIPLTKFGGSKFATEKNIQKIVSPFLSGFIANHLKEYNNKKEEAFSAEGIMDLNNKLAQYRNEKGELKPHTPISTVKIYYKDPSKNKKKKDEEDLSLQKLDREKAFNEKLYVKTGDNYLFAVLEGEIKTKKTSQIKRLYDIISFFDATNFLKEEFRNAPDKKTFDKDLLFRQYFEERNKAKLLFTLKQGDFVYLPNENEEVILDKESPLYNQYWGDLKERGKNIYVVQKFSKKQIYFIKHTIADIIKKDVEFGSQNCYETVEGRSIKENCFKLEIDRLGNIVKVIKR

SEQ ID NO: 93 - protein, 1430 aa, Bergeyella zoohelcum
  source 1..1430: note = Bergeyella zoohelcum CCUG 30536
MKHILGLDLGTNSIGWAVVKEAQNDNEQSEIVDVGVRVNPLTTDEKTNFEKGKPISTNADRTLKRSARRNLQRYKLRRKELIELLKEHQLISTDTILTENGKGTTFQTLELRAKSAKEKISLEELARVFLTINKKRGYKSSRKAKNEDEGQLIDGMEIAKRLYEENLTTGQLSLQLLKEGKKSLPDYYRSDLQFELDKVWNFQKQFHSDILTDEFYAQLKGKGQRATSALFLAKYQIYTAENKGSREDKKLQAYQWRVDALSKELTREQLAFVITEINNNLNNSSGYLGAISDRSKELYFNNETVGEYLWKQIAANPHTSLKNQVFYRQDYLDEFEQIWKTQSAFYPEILTDELKKELRDVVIFYQRKLKSQKSLVSFCEFENKEIEIKKEDGTSTKKVIGLKVAPKSSPLFQEFKIWQNLNNVLIRKKGSKTKKVAKNQQAVLFEEEKTISELDLEAKQALFNELNLKGNLKADYCLEILGYSPKEWEMNYSVLEGNRTNKALYEAYLKITDLEGYDAKNHLKVKLNKDEVELDDLKVPASEIKDMVQAIFKEAGINTDILHFNAELDGKDFENQASYQLWHLLYSYEGDDSKSGNELLYKLLETKFGFKKEYAQILANVSLSDDYGSLSTKAMRKIHPYIKENKFSTACELAGYRHSKHSLTKEENDNRVLKDSLEVLKKNSLRQPVVEKILNQMINLVNALLKKYRTENPNFKFDEIRIELARELKKNAEERANMTANINKAKTEHEKIIKILKNEFGLPNPTRNDIIRYRLYEELKANGYKDLYTNIKIPQEKLFTKEIDIEHIIPKSRVFDDSFSNKTLSFRKTNLDKGERTAFDYMESKFGADKLEEYVARVEDLYKNNIISKAKYQKLLKKESEIGDGFVERDLRETQYIAKKAKEILLQITPNVLSTSGGITDRLREDWDLINVMKELNLPKYRALGLTQMEDRKYGQQVEVITDWTKRNDHRHHAMDALTVAFTKHNHIQYLNYLNARKNEKHKEHSNIMGIQQLETIKVTDKNGNEKRVFKAPMPNFRQVTKAFLENILISHKAKNKVVTKNKNKVAGSNKVQEVLTPRGQLHKETVYGKYQYYVQKEEKIGAKFDLETIKKVANPLYQSLLKKRLEENGGDPKKAFTGKNSLAKNPIYLDDTQTEQLPEKVKLVWLENSFSIRKDITPENFKDEKLIDKILDEGVKRILKERLQSFGNDAKKAFSDLDKNPIWLNKEKGITIKRVTISGVANAEPLHTKKDHLGKEILDKEGKPIPVDFISTGSNHHVAVYRDEKGNLQEKVVSVFEAVVRANQGLPIIDKTYNQHLGWEFLFTMKQNEMFVFPNESTGFNPNDIDLLDPKNKRIISPNLFRVQKFSKLQYGNSFVREFVFRHHLETTVEDRKELQGITYKQMKNSTFFNDIIKVRINHLGDIVSIGEY

SEQ ID NO: 94 - protein, 1420 aa, Bifidobacterium bifidum
MSRKNYVDDYAISLDIGNASVGWSAFTPNYRLVRAKGHELIGVRLFDPADTAESRRMARTTRRRYSRRRWRLRLLDALFDQALSEIDPSFLARRKYSWVHPDDENNADCWYGSVLFDSNEQDKRFYEKYPTIYHLRKALMEDDSQHDIREIYLAIHHMVKYRGNFLVEGTLESSNAFKEDELLKLLGRITRYEMSEGEQNSDIEQDDENKLVAPANGQLADALCATRGSRSMRVDNALEALSAVNDLSREQRAIVKAIFAGLEGNKLDLAKIFVSKEFSSENKKILGIYFNKSDYEEKCVQIVDSGLLDDEEREFLDRMQGQYNAIALKQLLGRSTSVSDSKCASYDAHRANWNLIKLQLRTKENEKDINENYGILVGWKIDSGQRKSVRGESAYENMRKKANVFFKKMIETSDLSETDKNRLIHDIEEDKLFPIQRDSDNGVIPHQLHQNELKQIIKKQGKYYPFLLDAFEKDGKQINKIEGLLTFRVPYFVGPLVVPEDLQKSDNSENHWMVRKKKGEITPWNFDEMVDKDASGRKFIERLVGTDSYLLGEPTLPKNSLLYQEYEVLNELNNVRLSVRTGNHWNDKRRMRLGREEKTLLCQRLFMKGQTVTKRTAENLLRKEYGRTYELSGLSDESKFTSSLSTYGKMCRIFGEKYVNEHRDLMEKIVELQTVFEDKETLLHQLRQLEGISEADCALLVNTHYTGWGRLSRKLLTTKAGECKISDDFAPRKHSIIEIMRAEDRNLMEIITDKQLGFSDWIEQENLGAENGSSLMEVVDDLRVSPKVKRGIIQSIRLIDDISKAVGKRPSRIFLELADDIQPSGRTISRKSRLQDLYRNANLGKEFKGIADELNACSDKDLQDDRLFLYYTQLGKDMYTGEELDLDRLSSAYDIDHIIPQAVTQNDSIDNRVLVARAENARKTDSFTYMPQIADRMRNFWQILLDNGLISRVKFERLTRQNEFSEREKERFVQRSLVETRQIMKNVATLMRQRYGNSAAVIGLNAELTKEMHRYLGFSHKNRDINDYHHAQDALCVGIAGQFAANRGFFADGEVSDGAQNSYNQYLRDYLRGYREKLSAEDRKQGRAFGFIVGSMRSQDEQKRVNPRTGEVVWSEEDKDYLRKVMNYRKMLVTQKVGDDFGALYDETRYAATDPKGIKGIPFDGAKQDTSLYGGFSSAKPAYAVLIESKGKTRLVNVTMQEYSLLGDRPSDDELRKVLAKKKSEYAKANILLRHVPKMQLIRYGGGLMVIKSAGELNNAQQLWLPYEEYCYFDDLSQGKGSLEKDDLKKLLDSILGSVQCLYPWHRFTEEELADLHVAFDKLPEDEKKNVITGIVSALHADAKTANLSIVGMTGSWRRMNNKSGYTFSDEDEFIFQSPSGLFEKRVTVGELKRKAKKEVNSKYRTNEKRLPTLSGASQP

SEQ ID NO: 95 - protein, 1138 aa, Bifidobacterium dentium
MLCRCHRRYRIGIDVGLMSVGLAAIEVDETGFPIRILNIQSVIHDGGIDPQLGKKKSISRKAISGVARRTRRMRRRKVVRLRQLDATLESLGFPIVEPDSLDTWEIWLTRAKLASSYIQDDETRKEDVSIALRHIARHRGWRNPYSNVESLFVDVAPSEQYEELRRKAEEKLGTSLSGNPTSAEIVECILKRQVGEVQLRTRSRKGVNGNAVEKEGLLPTKLMQSDNAAEIRRIFKVQRIDDETGRKLLRAVFKACSPKGSVERRVGRDALAPGLPRALKASLAFQEYRIANVLTNLVISEDGTKRKLTIAEKQRVFGFLSSNETDDITWIDVAEKLGLERRQIQGVGCLTADGEERISSTPPRNITALHIHSAKPVIREKLVAWWKAASPTVRETMVELLSNTVDIDRVREDMDYSSAVAFIDSLGDEELTALDSVDLLSGRAAYSRQTLKQLTERMLNTDDDLHEARKAVFGVDDNWKPPVDAISTSVGNPAVDRVLKIVNRYLLACQKRWRNPQSVQIEHVRESFSSVAKAKETERVQGERARYRNDLRRELCEQEGLNKIRESDIRRWESVQRQNGTCLYCGSPITFRTCEMDHIVPRKGVGSTNTRVNLAAACAACNKLKSNTAFSVWARTEGAANRKVSQRDAIERVKTFIFNKSVPPREQRAFKQAVISRLRQAESDPAIDNRSIESVAWMADELHRRIEAYFNQDADVSGNTPATQVWVFQGRVTALARKASGIEGRIHFAGEWKKTRLDRRHHAVDAAVIAMMNHSAAQTLVERDSLRLSQWITRKPETWKNYPFSEGQKKTRFKEWLDCMNALLDLLNDALDSDRVPVTRCQRMSLGNSQAHAATIRKMKRVELFSPMDADLIRRASTPALYCALTRLPEYSPEKGLPENRGREIVLNGRHIRSTETVDFFASGAAQLMVRNGSAEIGDSIHHMRIYRYRKTGAKSQEYVYGMIRVFQIDLLHASSENLFAVQLPSQSVSVRYGDKNVVQAIQEGRAEYLGHIVPNDEILISYEGVRMKDSEKIGAYANDFSGTASELAQRRHWVVVGSDVSKLALRPSYLSEEGLENSGSESERLSKQTRKVIEGKGWVVAVNILAKYHPVVIRRNALGEPRFRTNSGMPVSWRWDR

SEQ ID NO: 96 - protein, 1187 aa, Bifidobacterium longum
MLSRQLLGASHLARPVSYSYNVQDNDVHCSYGERCFMRGKRYRIGIDVGLNSVGLAAVEVSDENSPVRLLNAQSVIHDGGVDPQKNKEAITRKNMSGVARRTRRMRRRKRERLHKLDMLLGKFGYPVIEPESLDKPFEEWHVRAELATRYIEDDELRRESISIALRHMARHRGWRNPYRQVDSLISDNPYSKQYGELKEKAKAYNDDATAAEEESTPAQLVVAMLDAGYAEAPRLRWRTGSKKPDAEGYLPVRLMQEDNANELKQIFRVQRVPADEWKPLFRSVFYAVSPKGSAEQRVGQDPLAPEQARALKASLAFQEYRIANVITNLRIKDASAELRKLTVDEKQSIYDQLVSPSSEDITWSDLCDFLGFKRSQLKGVGSLTEDGEERISSRPPRLTSVQRIYESDNKIRKPLVAWWKSASDNEHEAMIRLLSNTVDIDKVREDVAYASAIEFIDGLDDDALTKLDSVDLPSGRAAYSVETLQKLTRQMLTTDDDLHEARKTLFNVTDSWRPPADPIGEPLGNPSVDRVLKNVNRYLMNCQQRWGNPVSVNIEHVRSSFSSVAFARKDKREYEKNNEKRSIFRSSLSEQLRADEQMEKVRESDLRRLEAIQRQNGQCLYCGRTITFRTCEMDHIVPRKGVGSTNTRTNFAAVCAECNRMKSNTPFAIWARSEDAQTRGVSLAEAKKRVTMFTFNPKSYAPREVKAFKQAVIARLQQTEDDAAIDNRSIESVAWMADELHRRIDWYFNAKQYVNSASIDDAEAETMKTTVSVFQGRVTASARRAAGIEGKIHFIGQQSKTRLDRRHHAVDASVIAMMNTAAAQTLMERESLRESQRLIGLMPGERSWKEYPYEGTSRYESFHLWLDNMDVLLELLNDALDNDRIAVMQSQRYVLGNSIAHDATIHPLEKVPLGSAMSADLIRRASTPALWCALTRLPDYDEKEGLPEDSHREIRVHDTRYSADDEMGFFASQAAQIAVQEGSADIGSAIHHARVYRCWKTNAKGVRKYFYGMIRVFQTDLLRACHDDLFTVPLPPQSISMRYGEPRVVQALQSGNAQYLGSLVVGDEIEMDFSSLDVDGQIGEYLQFFSQFSGGNLAWKHWVVDGFFNQTQLRIRPRYLAAEGLAKAFSDDVVPDGVQKIVTKQGWLPPVNTASKTAVRIVRRNAFGEPRLSSAHHMPCSWQWRHE

SEQ ID NO: 97 - protein, 1124 aa, Bifidobacterium longum
  source 1..1124: note = Bifidobacterium longum subsp. longum 2-2B
LTGHSGHTFWPTSSSPPIQLEQEKRPLPQRNTSQNGHTFWPITRERCFMRGKRYRIGIDVGLNSVGLAAVEVSDENSPVRLLNAQSVIHDGGVDPQKNKEAITRKNMSGVARRTRRMRRRKRERLHKLDMLLGKFGYPVIEPESLDKPFEEWHVRAELATRYIEDDELRRESISIALRHMARHRGWRNPYRQVDSLISDNPYSKQYGELKEKAKAYNDDATAAEEESTPAQLVVAMLDAGYAEAPRLRWRTGSKKPDAEGYLPVRLMQEDNANELKQIFRVQRVPADEWKPLFRSVFYAVSPKGSAEQRVGQDPLAPEQARALKASLAFQEYRIANVITNLRIKDASAELRKLTVDEKQSIYDQLVSPSSEDITWSDLCDFLGFKRSQLKGVGSLTEDGEERISSRPPRLTSVQRIYESDNKIRKPLVAWWKSASDNEHEAMIRLLSNTVDIDKVREDVAYASAIEFIDGLDDDALTKLDSVDLPSGRAAYSVETLQKLTRQMLTTDDDLHEARKTLFNVTDSWRPPADPIGEPLGNPSVDRVLKNVNRYLMNCQQRWGNPVSVNIEHVRSSFSSVAFARKDKREYEKNNEKRSIFRSSLSEQLRADEQMEKVRESDLRRLEAIQRQNGQCLYCGRTITFRTCEMDHIVPRKGVGSTNTRTNFAAVCAECNRMKSNTPFAIWARSEDAQTRGVSLAEAKKRVTMFTFNPKSYAPREVKAFKQAVIARLQQTEDDAAIDNRSIESVAWMADELHRRIDWYFNAKQYVNSASIDDAEAETMKTTVSVFQGRVTASARRAAGIEGKIHFIGQQSKTRLDRRHHAVDASVIAMMNTAAAQTLMERESLRESQRLIGLMPGERSWKEYPYEGTSRYESFHLWLDNMDVLLELLNDALDNDRIAVMQSQRYVLGNSIAHDATIHPLEKVPLGSAMSADLIRRASTPALWCALTRLPDYDEKEGLPEDSHREIRVHDTRYSADDEMGFFASQAAQIAVQEGSADIGSAIHHARVYRCWKTNAKGVRKYFYGMIRVFQTDLLRACHDDLFTVPLPPQSISMRYGEPRVVQALQSGNAQYLGSLVVGDEIEMDFPVSMLMVRLASIYNSSRSLVEGTLHGNIGLLMDSLTRRS

SEQ ID NO: 98 - protein, 1138 aa, Bifidobacterium sp.
MNSVGLAAVEVSDENSPVRLLNAQSVIHDGGVDPQKNKEAITRKNMSGVARRTRRMRRRKRERLHKLDMLLGKFGYPVIEPESLDKPFEEWHVRAELATRYIEDDELRRESISIALRHMARHRGWRNPYRQVDSLISDNPYSKQYGELKEKAKAYNDDATAAEEESTPAQLVVAMLDAGYAEAPRLRWRTGSKKPDAEGYLPVRLMQEDNANELKQIFRVQRVPADEWKPLFRSVFYAVSPKGSAEQRVGQDPLAPEQARALKASLAFQEYRIANVITNLRIKDASAELRKLTVDEKQSIYDQLVSPSSEDITWSDLCDFLGFKRSQLKGVGSLTEDGEERISSRPPRLTSVQRIYESDNKIRKPLVAWWKSASDNEHEAMIRLLSNTVDIDKVREDVAYASAIEFIDGLDDDALTKLDSVDLPSGRAAYSVETLQKLTRQMLTTDDDLHEARKTLFNVTDSWRPPADPIGEPLGNPSVDRVLKNVNRYLMNCQQRWGNPVSVNIEHVRSSFSSVAFARKDKREYEKNNEKRSIFRSSLSEQLRADEQMEKVRESDLRRLEAIQRQNGQCLYCGRTITFRTCEMDHIVPRKGVGSTNTRTNFAAVCAECNRMKSNTPFAIWARSEDAQTRGVSLAEAKKRVTMFTFNPKSYAPREVKAFKQAVIARLQQTEDDAAIDNRSIESVAWMADELHRRIDWYFNAKQYVNSASIDDAEAETMKTTVSVFQGRVTASARRAAGIEGKIHFIGQQSKTRLDRRHHAVDASVIAMMNTAAAQTLMERESLRESQRLIGLMPGERSWKEYPYEGTSRYESFHLWLDNMDVLLELLNDALDNDRIAVMQSQRYVLGNSIAHDATIHPLEKVPLGSAMSADLIRRASTPALWCALTRLPDYDEKEGLPEDSHREIRVHDTRYSADDEMGFFASQAAQIAVQEGSADIGSAIHHARVYRCWKTNAKGVRKYFYGMIRVFQTDLLRACHDDLFTVPLPPQSISMRYGEPRVVQALQSGNAQYLGSLVVGDEIEMDFSSLDVDGQIGEYLQFFSQFSGGNLAWKHWVVDGFFNQTQLRIRPRYLAAEGLAKAFSDDVVPDGVQKIVTKQGWLPPVNTASKTAVRIVRRNAFGEPRLSSAHHMPCSWQWRHE

SEQ ID NO: 99 - protein, 1151 aa, Bifidobacterium sp.
  source 1..1151: note = Bifidobacterium sp. 12_1_47BFAA
MRGKRYRIGIDVGLNSVGLAAVEVSDENSPVRLLNAQSVIHDGGVDPQKNKEAITRKNMSGVARRTRRMRRRKRERLHKLDMLLGKFGYPVIEPESLDKPFEEWHVRAELATRYIEDDELRRESISIALRHMARHRGWRNPYRQVDSLISDNPYSKQYGELKEKAKAYNDDATAAEEESTPAQLVVAMLDAGYAEAPRLRWRTGSKKPDAEGYLPVRLMQEDNANELKQIFRVQRVPADEWKPLFRSVFYAVSPKGSAEQRVGQDPLAPEQARALKASLAFQEYRIANVITNLRIKDASAELRKLTVDEKQSIYDQLVSPSSEDITWSDLCDFLGFKRSQLKGVGSLTEDGEERISSRPPRLTSVQRIYESDNKIRKPLVAWWKSASDNEHEAMIRLLSNTVDIDKVREDVAYASAIEFIDGLDDDALTKLDSVDLPSGRAAYSVETLQKLTRQMLTTDDDLHEARKTLFNVTDSWRPPADPIGEPLGNPSVDRVLKNVNRYLMNCQQRWGNPVSVNIEHVRSSFSSVAFARKDKREYEKNNEKRSIFRSSLSEQLRADEQMEKVRESDLRRLEAIQRQNGQCLYCGRTITFRTCEMDHIVPRKGVGSTNTRTNFAAVCAECNRMKSNTPFAIWARSEDAQTRGVSLAEAKKRVTMFTFNPKSYAPREVKAFKQAVIARLQQTEDDAAIDNRSIESVAWMADELHRRIDWYFNAKQYVNSASIDDAEAETMKTTVSVFQGRVTASARRAAGIEGKIHFIGQQSKTRLDRRHHAVDASVIAMMNTAAAQTLMERESLRESQRLIGLMPGERSWKEYPYEGTSRYESFHLWLDNMDVLLELLNDALDNDRIAVMQSQRYVLGNSIAHDATIHPLEKVPLGSAMSADLIRRASTPALWCALTRLPDYDEKEGLPEDSHREIRVHDTRYSADDEMGFFASQAAQIAVQEGSADIGSAIHHARVYRCWKTNAKGVRKYFYGMIRVFQTDLLRACHDDLFTVPLPPQSISMRYGEPRVVQALQSGNAQYLGSLVVGDEIEMDFSSLDVDGQIGEYLQFFSQFSGGNLAWKHWVVDGFFNQTQLRIRPRYLAAEGLAKAFSDDVVPDGVQKIVTKQGWLPPVNTASKTAVRIVRRNAFGEPRLSSAHHMPCSWQWRHE

SEQ ID NO: 100 - protein, 1092 aa, Brevibacillus laterosporus
  source 1..1092: note = Brevibacillus laterosporus GI-9
MAYTMGIDVGIASCGWAIVDLERQRIIDIGVRTFEKAENPKNGEALAVPRREARSSRRRLRRKKHRIERLKYMFVRNGLAVDIQHLEQTLRSQNEIDVWQLRVDGLDRMLTQKEWLRVLIHLAQRRGFQSNRKTDGSSEDGQVLVNVTENDRLMEEKDYRTVAEMMVKDEKFSDHKRNKNGNYHGVVSRASLLVEIHTLFESQRQHHNFLASKDFELEYINIWSSQRPVATKDQIEKMIGTCTFLPKEKRAPKASWHFQYFMLLQTINHIRITNAQGTRPLNKEEIEQVVNMALTKSKVSYHDIRKVLDLSEEYQFVGLDYGKEDEKKKVESKETIIKLDDYHKLNKIFNEVELAKGETWEAVDYDTVAYALTFFKDDEDIRDYLQNKYKDSKNRLVKNVANKEYTNELIEKVSTLSFRKVGHLSLKALRKIIPFLEQGMTYDKACQAAGFNFQGISKKKRSVVLPVIDQISNPVVNRALTQTRKVINALIKKYGSPETIHIETARELSKRFDERKNITKDYKENRDKNERAKKHLSELGIINPTGLDIVKYKLWCEQQGRCMYSNQPISFERLRESGYTEVDHIIPYSRSMNDSYNNRVLVMTRENREKSNQTPYEYMGNDTQRWDEFEQRVTTNPQIKKEKRQNLLLKGFTNRRELEMLERNLNDTRHITKYLSHFISTNLEFSPSDKKKKVVNTSGRITSHLRSRWGLEKNREQNDLHHAMDAVVIAVTSDSFIQQVTNYYKRKERRELNGDDKFPLPWKFFREEVIARLSPNPKEQIEALPNHFYSEDELADLQPIFVSRMPKRSITGEAHQAQFRRVVGKTKEGKNITAKKTALVDISYDKNGDFNMYGRETDPATYEAIKERYLEFGGNAKKAFSTDLHKPKKDGTKGPLIKSVRIMENKTLVHPVNKGKGVVYNSSIVRTDVFQRKEKYYLLPVYVTDVTKGKLPNKVIAAKKGYDDWIEVDDSFTFLYSLYPNDLIFIRQNPKKKISLKKRIESHSISDSKEVQEILTYYKGVDSSTAAIEFITHDGSYYAKGVGVQNLDCFEKYQVDILGNYSKVKGEKRLELETSDNNHKGKDVNSIKSTSR

SEQ ID NO: 101 - protein, 1428 aa, unidentified
  source 1..1428: note = Burkholderiales bacterium 1_1_47
MGKTHIIGVGLDLGGTYTGTFITSHPSDEAEHRDHSSAFTVVNSEKLSFSSKSRTAVRHRVRSYKGFDLRRRLLLLVAEYQLLQKKQTLAPEERENLRIALSGYLKRKGYARTEAETDTSVLESLDPSVFSSAPSFTNFFNDSEPLNIQWEAIANSPETTKALNKELSGQKEADFKKYIKTSFPEYSAKEILANYVEGRRAILDASKYIANLQSLGHKHRSKYLSDILQDMKRDSRITRLSEAFGSTDNLWRIIGNISNLQERAVRWYFNDAKFEQGQEQLDAVKLKNVLVRALKYLRSDDKEWSASQKQIIQSLEQSGDVLDVLAGLDPDRTIPPYEDQNNRRPPEDQTLYLNPKALSSEYGEKWKSWANKFAGAYPLLTEDLTEILKNTDRKSRIKIRSDVLPDSDYRLAYILQRAFDRSIALDECSIRRTAEDFENGVVIKNEKLEDVLSGHQLEEFLEFANRYYQETAKAKNGLWFPENALLERADLHPPMKNKILNVIVGQALGVSPAEGTDFIEEIWNSKVKGRSTVHSICNAIENERKTYGPYFSEDYKFVKTALKEGKTEKELSKKFAAVIKVLKMVSEVVPFIGKELRLSDEAQSKFDNPYSLAQLYNLIETERNGFSKVSLAAHLENAWRMTMTDGSAQCCRLPADCVRPFDGFIRKAIDRNSWEVAKRIAEEVKKSVDFTNGTVKIPVAIEANSFNFTASLTDLKYIQLKEQKLKKKLEDIQRNEENQEKRWLSKEERIRADSHGICAYTGRPLDDVGEIDHIIPRSLTLKKSESIYNSEVNLIFVSAQGNQEKKNNIYLLSNLAKNYLAAVFGASDLSQITNEIESTVLQLKAAGRLGYFDLLSEKERACARHALFLNSDSEARRAVIDVLGSRRKASVNGTQAWFVRSIFSKVRQALAAWTQETGNELIFDAISVPAADSSEMRKRFAEYRPEFRKPKVQPVASHSIDAMCIYLAACSDPFKTKRMGSQLAIYEPINFDNLFTGSCQVIQNTPRNFSDKTNIANSPIFKETIYAERFLDIIVSRGEIFIGYPSNMPFEEKPNRISIGGKDPFSILSVLGAYLDKAPSSEKEKLTIYRVVKNKAFELFSKVAGSKFTAEEDKAAKILEALHFVTVKQDVAATVSDLIKSKKELSKDSIENLAKQKGCLKKVEYSSKEFKFKGSLIIPAAVEWGKVLWNVFKENTAEELKDENALRKALEAAWPSSFGTRNLHSKAKRVFSLPVVATQSGAVRIRRKTAFGDFVYQSQDTNNLYSSFPVKNGKLDWSSPIIHPALQNRNLTAYGYRFVDHDRSISMSEFREVYNKDDLMRIELAQGTSSRRYLRVEMPGEKFLAWFGENSISLGSSFKFSVSEVFDNKIYTENAEFTKFLPKPREDNKHNGTIFFELVGPRVIFNYIVGGAASSLKEIFSEAGKERS

SEQ ID NO: 102 - protein, 1442 aa, Caenispirillum salinarum
  source 1..1442: note = Caenispirillum salinarum AK4
MPVLSPLSPNAAQGRRRWSLALDIGEGSIGWAVAEVDAEGRVLQLTGTGVTLFPSAWSNENGTYVAHGAADRAVRGQQQRHDSRRRRLAGLARLCAPVLERSPEDLKDLTRTPPKADPRAIFFLRADAARRPLDGPELFRVLHHMAAHRGIRLAELQEVDPPPESDADDAAPAATEDEDGTRRAAADERAFRRLMAEHMHRHGTQPTCGEIMAGRLRETPAGAQPVTRARDGLRVGGGVAVPTRALIEQEFDAIRAIQAPRHPDLPWDSLRRLVLDQAPIAVPPATPCLFLEELRRRGETFQGRTITREAIDRGLTVDPLIQALRIRETVGNLRLHERITEPDGRQRYVPRAMPELGLSHGELTAPERDTLVRALMHDPDGLAAKDGRIPYTRLRKLIGYDNSPVCFAQERDTSGGGITVNPTDPLMARWIDGWVDLPLKARSLYVRDVVARGADSAALARLLAEGAHGVPPVAAAAVPAATAAILESDIMQPGRYSVCPWAAEAILDAWANAPTEGFYDVTRGLFGFAPGEIVLEDLRRARGALLAHLPRTMAAARTPNRAAQQRGPLPAYESVIPSQLITSLRRAHKGRAADWSAADPEERNPFLRTWTGNAATDHILNQVRKTANEVITKYGNRRGWDPLPSRITVELAREAKHGVIRRNEIAKENRENEGRRKKESAALDTFCQDNTVSWQAGGLPKERAALRLRLAQRQEFFCPYCAERPKLRATDLFSPAETEIDHVIERRMGGDGPDNLVLAHKDCNNAKGKKTPHEHAGDLLDSPALAALWQGWRKENADRLKGKGHKARTPREDKDFMDRVGWRFEEDARAKAEENQERRGRRMLHDTARATRLARLYLAAAVMPEDPAEIGAPPVETPPSPEDPTGYTAIYRTISRVQPVNGSVTHMLRQRLLQRDKNRDYQTHHAEDACLLLLAGPAVVQAFNTEAAQHGADAPDDRPVDLMPTSDAYHQQRRARALGRVPLATVDAALADIVMPESDRQDPETGRVHWRLTRAGRGLKRRIDDLTRNCVILSRPRRPSETGTPGALHNATHYGRREITVDGRTDTVVTQRMNARDLVALLDNAKIVPAARLDAAAPGDTILKEICTEIADRHDRVVDPEGTHARRWISARLAALVPAHAEAVARDIAELADLDALADADRTPEQEARRSALRQSPYLGRAISAKKADGRARAREQEILTRALLDPHWGPRGLRHLIMREARAPSLVRIRANKTDAFGRPVPDAAVWVKTDGNAVSQLWRLTSVVTDDGRRIPLPKPIEKRIEISNLEYARLNGLDEGAGVTGNNAPPRPLRQDIDRLTPLWRDHGTAPGGYLGTAVGELEDKARSALRGKAMRQTLTDAGITAEAGWRLDSEGAVCDLEVAKGDTVKKDGKTYKVGVITQGIFGMPVDAAGSAPRTPEDCEKFEEQYGIKPWKAKGIPLA

SEQ ID NO: 103 - protein, 984 aa, Campylobacter coli
  source 1..984: note = Campylobacter coli 1098
MARILAFDIGISSIGWAFSENDELKDCGVRIFTKAENPKTGESLALPRRLARSARKRLARRKARLNHLKHLIANEFKLNYEDYQSFDESLAKAYKGSLISPYELRFRALNELLSKQDFARVILHIAKRRGYDDIKNNGDEEKSEILKAIKQNEEKLVNYQSVGEYLYKEYFQKFKENSKEFINVRNKKESYERCIAQSFLKDELKLIFQKQREFGFSFSKKFEEEVLSVAFYKRALKDFSHLVGNCSFFTDEKRAPKNSPLAFMFVALTRIINLLNNLKNTEGILYTKDDLNALLNEVLKNGTLTYKQTKKLLGLSDDYEFKGEKGTYFIEFKKYKEFIKALGEHNLSQDDLNEIAKDITLIKDEIKLKKALAKYDLNQNQIDSLSKLEFKDHLNISFKALKLITPLMLEGKKYDEACNELNLKVAINEDKKDFLPAFNETYYKDEVTNPVVLRAIKEYRKVLNALLKKYGKVHKINIELAREVGKNYSQRAKIEKEQNENYKAKKDAELECEKLGLKINSKNILKLRLFKEQKEFCAYSGEKIKISDLQDEKMLEIDHIYPYSRSFDDSYMNKVLVFTKQNQEKLNQTPFEAFGNDSAKWQKIEVLAKNLPTKKQKRILDKNYKDKEQKNFKDRNLNDTRYIARLVLNYTKDYLDFLPLSDDENTKLNDTQKGSKVHVEAKSGMLTSALRHTWGFSAKDRNNHLHHAIDAVIIAYANNSIVKAFSDFKKEQESNSAELYAKKISELDYKNKRKFFEPFSGFRQKVLDKIDEIFVSKPERKKPSGALHEETFRKEEEFYQSYGGKEGVLKALELGKIRKVNGKIVKNGDMFRVDIFKHKKTNKFYAVPIYTMDFALKVLPNKAVARSKKGEIKDWILMDENYEFCFSLYKDSLILIQTKDMQEPEFVYYNAFTSSTVSLIVSKHDNKFETLSKNQKILFKNANEKEVIAKSIGIQNLKVFEKYIVSALGEVTKAEFRQREDFKK

SEQ ID NO: 104 - protein, 984 aa, Campylobacter coli
  source 1..984: note = Campylobacter coli 111-3
MARILAFDIGISSIGWAFSENDELKDCGVRIFTKAENPKTGESLALPRRLARSARKRLARRKARLNHLKHLIANEFKLNYEDYQSFDESLAKAYKGSLISPYELRFRALNELLSKQDFARVILHIAKRRGYDDIKNNGDEEKSEILKAIKQNEEKLVNYQSVGEYLYKEYFQKFKENSKEFINVRNKKESYERCIAQSFLKDELKLIFQKQREFGFSFSKKFEEEVLSVAFYKRALKDFSHLVGNCSFFTDEKRAPKNSPLAFMFVALTRIINLLNNLKNTEGILYTKDDLNTLLNEVLKNGTLTYKQTKKLLGLSDDYEFKGEKGTYFIEFKKYKEFIKALGEHNLSQDNLNEIAKDITLIKDEIKLKKALAKYDLNQNQIDSLSKLEFKDHLNISFKALKLITPLMLEGKKYDEAYNELNLKVAINEDKKDFLPAFNETYYKDEVTNPVVLRAIKEYRKVLNALLKKYGKVHKINIELAREVGKNHSQRAKIEKEQNENYKAKKDAELECEKLGLKINSKNILKLRLFKEQKEFCAYSGEKIKISDLQDEKMLEIDHIYPYSRSFDDSYMNKVLVFTKQNQEKLNQTPFEAFGNDSAKWQKIEVLAKNLPTKKQKRILDKNYKDKEQKDFKDRNLNDTRYIARLVLNYTKDYLDFLPLSDDENTKLNDTQKGSKVHVEAKSGMLTSALRHTWGFSAKDRNNHLHHAIDAVIIAYANNSIVKAFSDFKKEQESNSAELYAKKISELDYKNKRKFFEPFSGFRQKVLDKIDEIFVSKPERKKPSGALHEETFRKEEEFYQSYGGKEGVLKALELGKIRKVNGKIVKNGDMFRVDIFKHKKTNKFYAVPIYTMDFALKVLPNKAVARSKKGEIKDWILMDENYEFCFSLYKDSLILIQTKDMQEPELVYFNAFTSSTVSLIVSKHDNKFETLSKNQKILFKNANEKEVIAKSIGIQNLKVFEKYIVSALGEVTKAEFRQREDFKK

SEQ ID NO: 105 - protein, 987 aa, Campylobacter coli
  source 1..987: note = Campylobacter coli 132-6
MARILAFDIGISSIGWAFSENDELKDCGVRIFTKAENPKTGESLALPRRLARSARKRLARRKARLNHLKHLIANEFKLNYEDYQSFDESLAKAYKGSLISPYELRFRALNELLSKQDFARVILHIAKRRGYDDIKNNGDEEKSEILKAIKQNEEKLVNYQSVGEYLYKEYFQKFKENSKEFINVRNKKESYERCIAQSFLKDELKLIFQKQREFGFSFSKKFEEEVLSVAFYKRALKDFSHLVGNCSFFTDEKRAPKNSPLAFMFVALTRIINLLNNLKNTEGILYTKDDLNTLLNEVLKNGTLTYKQTKKLLGLSDDYEFKGEKGTYFIEFKKYKEFIKALGEHNLSQDNLNEIAKDITLIKDEIKLKKALAKYDLNQNQIDSLSKLEFKDHLNISFKALKLITPLMLEGKKYDEAYNELNLKVAINEDKKDFLPAFNETYYKDEVTNPVVLRAIKEYRKVLNALLKKYGKVHKINIELAREVGKNHSQRAKIEKEQNENYKAKKDAELECEKLGLKINSKNILKLRLFKEQKEFCAYSGEKIKISDLQDEKMLEIDHIYPYSRSFDDSYMNKVLVFTKQNQEKLNQTPFEAFGNDSAKWQKIEVLAKNLPTKKQKRILDKNYKDKEQKDFKDRNLNDTRYIARLVLNYTKDYLDFLPLSDDENTKLNDTQKGSKVHVEAKSGMLTSALRHTWGFSAKDRNNHLHHAIDAVIIAYANNSIVKAFSDFKKEQESNSAELYAKKISELDYKNKRKFFEPFSGFRQKVLDKIDEIFVSKPERKKPSGALHEETFRKEEEFYQSYGGKEGVLKALELGKIRKVNGKIVKNGDMFRVDIFKHKKTNKFYAVPIYTMDFALKVLPNKAVARSKKGEIKDWILMDENYEFCFSLYKDSLILIQTKDMQEPELVYFNAFTSSTVSLIVSKHDNKFETLSKNQKILFKNANEKEVIAKSIGIQNLKVFEKYIVSALGEVTKAEFRQREDFKNELR

SEQ ID NO: 106 - protein, 984 aa, Campylobacter coli
  source 1..984: note = Campylobacter coli 151-9
MARILAFDIGISSIGWAFSENDELKDCGVRIFTKAENPKTGESLALPRRLARSARKRLARRKARLNHLKHLIANEFKLNYEDYQSFDESLAKAYKGSLISPYELRFRALNELLSKQDFARVILHIAKRRGYDDIKNNGDEEKSEILKAIKQNEEKLVNYQSVGEYLYKEYFQKFKENSKEFINVRNKKESYERCIAQSFLKDELKLIFQKQREFGFSFSKKFEEEVLSVAFYKRALKDFSHLVGNCSFFTDEKRAPKNSPLAFMFVALTRIINLLNNLKNTEGILYTKDDLNTLLNEVLKNGTLTYKQTKKLLGLSDDYEFKGEKGTYFIEFKKYKEFIKALGEHNLSQDNLNEIAKDITLIKDEIKLKKALAKYDLNQNQIDSLSKLEFKDHLNISFKALKLITPLMLEGKKYDEAYNELNLKVAINEDKKDFLPAFNETYYKDEVTNPVVLRAIKEYRKVLNALLKKYGKVHKINIELAREVGKNHSQRAKIEKEQNENYKAKKDAELECEKLGLKINSKNILKLRLFKEQKEFCAYSGEKIKISDLQDEKMLEIDHIYPYSRSFDDSYMNKVLVFTKQNQEKLNQTPFEAFGNDSAKWQKIEVLAKNLPTKKQKRILDKNYKDKEQKDFKDRNLNDTRYIARLVLNYTKDYLDFLPLSNDENTKLNDTQKGSKVHVEAKSGMLTSALRHTWGFSAKDRNNHLHHAIDAVIIAYANNSIVKAFSDFKKEQESNSAELYAKKISELDYKNKRKFFEPFSGFRQKVLDKIDEIFVSKPERKKPSGALHEETFRKEEEFYQSYGGKEGVLKALELGKIRKVNGKIVKNGDMFRVDIFKHKKTNKFYAVPIYTMDFALKVLPNKAVARSKKGEIKDWILMDENYEFCFSLYKDSLILIQTKDMQEPELVYFNAFTSSTVSLIVSKHDNKFETLSKNQKILFKNANEKEVIAKSIGIQNLKVFEKYIVSALGEVTKAEFRQREDFKK

SEQ ID NO: 107 - protein, 984 aa, Campylobacter coli
  source 1..984: note = Campylobacter coli 1909
MARILAFDIGISSIGWAFSENDELKDCGVRIFTKAENPKTGESLALPRRLARSARKCLARRKARLNHLKHLIANEFKLNYEDYQSFDESLAKAYKGSLISPYELRFRALNELLSKQDFARVILHIAKRRGYDDIKNNGDEEKSEILKAIKQNEEKLVNYQSVGEYLYKEYFQKFKENSKEFINVRNKKESYERCIAQSFLKDELKLIFQKQREFGFSFSKKFEEEVLSVAFYKRALKDFSHLVGNCSFFTDEKRAPKNSPLAFMFVALTRIINLLNNLKNTEGILYTKDDLNALLNEVLKNGTLTYKQTKKLLGLSDDYEFKGEKGTYFIEFKKYKEFIKALGEHNLSQDDLNEIAKDITLIKDEIKLKKALAKYDLNQNQIDSLSKLEFKDHLNISFKALKLITPLMLEGKKYDEACNELNLKVAINEDKKDFLPAFNETYYKDEVTNPVVLRAIKEYRKVLNALLKKYGKVHKINIELAREVGKNHSQRAKIEKEQNENYKAKKDAELECEKLGLKINSKNILKLRLFKEQKEFCAYSGEKIKISDLQDEKMLEIDHIYPYSRSFDDSYMNKVLVFTKQNQEKLNQTPFEAFGNDSAKWQKIEVLAKNLPTKKQKRILDKNYKDKEQKNFKDRNLNDTRYIARLVLNYTKDYLDFLPLSDDENTKLNDTQKGSKVHVEAKSGMLTSALRHTWGFSAKDRNNHLHHAIDAVIIAYANNSIVKAFSDFKKEQESNSAELYAKKISELDYKNKRKFFEPFSGFRQKVLDKIDEIFVSKPERKKPSGALHEETFRKEEEFYQSYGGKEGVLKALELGKIRKVNGKIVKNGDMFRVDIFKHKKTNKFYAVPIYTMDFALKVLPNKAVARSKKGEIKDWILMDENYEFCFSLYKDSLILIQTKDMQEPEFVYYNAFTSSTVSLIVSKHDNKFETLSKNQKILFKNANEKEVIAKSIGIQNLKVFEKYIVSALGEVTKAEFRQREDFKK

SEQ ID NO: 108 - protein, 965 aa, Campylobacter coli
  source 1..965: note = Campylobacter coli 1957
MKIIGFNLGIANIGWALRENDEIIDCGVRVFDIPENPKNGNSLALERRENKARMKIVKRKKARMLATKTFLKKELNVDLSKLFLIGSTQSIYELRTKALSSLISKEELSAIILHIAKHRGYDDSALKNENGTIIEALNKNKEAMLKFKSVGEYFYKNFVQNKEVKKIRNTTEDYSNSVPRSLLKQELDLILDKQKELGLIKNADFKEKLFEIIFFKRPLKDFSNKIGNCIFFENEKRAAKNTISACEFVALGKVVNLLKSIEKDIGIVYEKDSINEIMSIILDKTSISYKKIRDILNLPQDINFKGLDYSKNNAENSKLVDLKKLNEFKKALGDGFANLDKDILDSIATDITLTKDTATLKEKLKNYNVLNAEQIEKLSELVFNDHINLSLKALKQIIPLMYEGKRYDEACELCNFTIAKNQEKNEYLPLFEKTRFAKDISSPVVIRAICEFRKLLNDIIRRYGSVHKIHLELTRDFGISFNDRKKIIKEIEQNEQSRIKALETIKELKLEETSKNIQIVRLFEDQKGICPYSGLKMDLKCLDELVIDYIRPYNRSLDDSYSNKILTFKKLNDLKQGKTPFEAFGEDEKLWAEINERIKEYNGKKRFKIFDKFFKDKKPFDFTEQTLQDTRWLTKLVASYLNEYLLFLPINEDENTALGYGEKGSKQHVVLSSGMITQMLRNFWYLGFKNHKDYKNNAMDAIIVAFTTNSIIFAFNNFKKELDLAKAEFYANKISESDYLLKRKFLPPFSGFKEQALEKVKNIFVSHSLKIKNKGTLHELTPLKIKELKNTYGDLDLAVKLGKIRKYNDKYYANAKGSLVRTDLFADKENKFHAVSIYKADFSTKKLPNKTPATTSNGETKEGIEMNENYNFCMSLYKNTPISVKIKGMKEPIICYYHGFNTSGSKITYKKHDNNYHNLSEDEMVVFRKNDKESIVVGKILEIKKYSISPSGELSLIENEERKWF

SEQ ID NO: 109 - protein, 984 aa, Campylobacter coli
  source 1..984: note = Campylobacter coli 2692
MARILAFDIGISSIGWAFSENDELKDCGVRIFTKAENPKTGESLALPRRLARSARKRLARRKARLNHLKHLIANEFKLNYEDYQSFDESLAKAYKGSLISPYELRFRALNELLSKQDFARVILHIAKRRGYDDIKNSDDKEKGAILKAIKQNEEKLTNYQSVGEYLYKEYFQKFKENSKEFTNVRNKKESYERCIAQSFLKDELKLIFKKQREFGFSFSKKFEEEVLSVAFYKRALKDFSHLVGNCSFFTDEKRAPKNSPLAFMFVALTRIINLLNNLKNTEGILYTKDDLNALLNEVLKNGTLTYKQTKKLLGLSDDYEFKGEKGTYFIEFKKYKEFIKALGDHSLSQDDLNEIAKDITLIKDEIKLKKALAKYDLNQNQIDSLSKLEFKDHLNISFKALKLITPLMLEGKKYDEACNELNLKVAINEDKKDFLPAFNETYYKDEVTNPVVLRAIKEYRKVLNALLKKYGKVHKINIELAREVGKNYSQRAKIEKEQNENYKAKKDAELECEKLGLKINSKNILKLRLFKEQKEFCAYSGEKIKISDLQDEKMLEIDHIYPYSRSFDDSYMNKVLVFTKQNQEKLNQTPFEAFGNDSAKWQKIEVLAKNLPTKKQKRILDKNYKDKEQKDFKDRNLNDTRYIARLVLNYTKDYLDFLPLSDDENTKLNDTQKGSKVHVEAKSGMLTSALRHTWGFSAKDRNNHLHHAIDAVIIAYANNSIVKAFSDFKKEQESNSAELYAKKISELDYKNKRKFFEPFSGFRQKVLDKIDEIFVSKPERKKPSGALHEETFRKEEEFYQSYGGKEGVLKALELGKIRKVNGKIVKNGDMFRVDIFKHKKTNKFYAVPIYTMDFALKVLPNKAVARSKKGEIKDWILMDENYEFCFSLYKDSLILIQTKDMQEPEFVYYNAFTSSTVSLIVSKHDNKFETLSKNQKILFKNANEKEVIAKSIGIQNLKVFEKYIVSALGEVTKAEFRQREDFKK

SEQ ID NO: 110 - protein, 984 aa, Campylobacter coli
  source 1..984: note = Campylobacter coli 59-2
MARILAFDIGISSIGWAFSENDELKDCGVRIFTKAENPKTGESLALPRRLARSARKRLARRKARLNHLKHLIANEFKLNYEDYQSFDESLAKAYKGSLISPYELRFRALNELLSKQDFARVILHIAKRRGYDDIKNNGDEEKGKILKAIKQNEEKLVNYQSVGEYLYKEYFQKFKENSKEFINVRNKKESYERCITQSFLKYELKLIFQKQREFGFSFSKKFEEEVLSVAFYKRALKDFSHLVGNCSFFSDEKRAPKNSPLAFMFVALTRIINLLNNLKNTEGILYTKDDLNALLNEVLKNGTLTYKQTKKLLGLSDDYEFKGEKGTYFIEFKKYKEFIKALGEHNLSQDDLNEIAKDITLIKDEIKLKKALAKYDLNQNQIDSLSKLEFKDHLNISFKALKLITPLMLEGKKYDEACNELNLKVAINEDKKDFLPAFNETYYKDEVTNPVVLRAIKEYRKVLNALLKKYGKVHKINIELAREVGKNYSQRAKIEKEQNENYKAKKDAELECEKLGLKINSKNILKLRLFKEQKEFCAYSGEKIKISDLQDEKMLEIDHIYPYSRSFDDSYMNKVLVFTKQNQEKLNQTPFEAFGNDSAKWQKIEVLAKNLPTKKQKRILDKNYKDKEQKNFKDRNLNDTRYIARLVLNYTKDYLDFLPLSDDENTKLNDTQKGSKVHVEAKSGMLTSALRHTWGFSAKDRNNHLHHAIDAVIIAYANNSIVKAFSDFKKEQESNSAELYAKKISELDYKNKRKFFEPFSGFRQKVLDKIDEIFVSKPERKKPSGALHEETFRKEEEFYQSYGGKEGVLKALELGKIRKVNGKIVKNGDMFRVDIFKHKKTNKFYAVPIYTMDFALKVLPNKAVARSKKGEIKDWILMDENYEFCFSLYKDSLILIQTKDMQEPEFVYYNAFTSSTVSLIVSKHDNKFETLSKNQKILFKNANEKEVIAKSIGIQNLKVFEKYIVSALGEVTKAEFRQREDFKK

SEQ ID NO: 111 - protein, 965 aa, Campylobacter coli
  source 1..965: note = Campylobacter coli 67-8
MKIIGFNLGIANIGWALRENDEIIDCGVRVFDIPENPKNGNSLALERRENKARMKIVKRKKARMLATKTFLKKELNVDLSKLFLIGSTQSIYELRTKALSSLISKEELSAIILHIAKHRGYDDSALKNENGTIIEALNKNKEAMLKFKSVGEYFYKNFVQNKEVKKIRNTTEDYSNSVPRSLLKQELDLILDKQKELGLIKNADFKAKLFEIIFFKRPLKDFSNKIGNCIFFENEKRAAKNTISACEFVALGKVVNLLKSIEKDIGIVYEKDSINEIMSIILDKTSISYKKIRDILNLPQDINFKGLDYSKNNAENSKLVDLKKLNEFKKALGDGFANLDKDILDSIATDITLTKDTATLKEKLKNYNVLNAEQIEKLSELVFNDHINLSLKALKQIIPLMYEGKRYDEACELCNFTIAKNQEKNEYLPLFEKTRFAKDISSPVVIRAICEFRKLLNDIIRRYGSVHKIHLELTRDFGISFNDRKKIIKEIEQNEQSRIKALETIKELKLEETSKNIQIVRLFEDQKGICPYSGLKMDLKCLDELVIDYIRPYNRSLDDSYSNKVLTFKKLNDLKQGKTPFEAFGEDEKLWAEINERIKEYNGKKRFKIFDKFFKDKKPFDFTEQTLQDTRWLTKLVASYLNEYLSFLPISEDENTALGYGEKGSKQHVVLSSGMITQMLRNFWYLGFKNHKNYKNNAMDAIIVAFTTNSIIFAFNNFKKELDLAKAEFYANKISESDYLLKRKFLPPFSGFKEQALEKVKNIFVSHSLKIKNKGTLHELTPLKIKELKNTYGDLDLAVKLGKIRKYNDKYYANTKGSLVRTDLFVDKENKFHAVSIYKADFSTKKLPNKTPATTSNGETKEGIEMNENYNFCMSLYKNTPVSVKIKGMKEPIICYYHGFNTSGSKITYKKHDNNYHNLSEDEMVVFRKNDKESIVVGKILEIKKYSISPSGELSLIENEKRKWF

SEQ ID NO: 112 - protein, 965 aa, Campylobacter coli
  source 1..965: note = Campylobacter coli 80352
MKIIGFNLGIANIGWALRENDEIIDCGVRVFDIPENPKNGNSLALERRENKARMKIVKRKKARMLATKTFLKKELNVDLSKLFLIGSTQSIYELRTKALSSLISKEELSAIILHIAKHRGYDDSALKNENGTIIEALNKNKEAMLKFKSVGEYFYKNFVQNKEVKKIRNTTEDYSNSVPRSLLKQELDLILDKQKELGLIKNADFKAKLFEIIFFKRPLKDFSNKIGNCIFFENEKRAAKNTISACEFVALGKVVNLLKSIEKDIGIVYEKDSINEIMSIILDKTSISYKKIRDILNLPQDINFKGLDYSKNNVENSKLVDLKKLNEFKKALGDGFTNLDKDILDSIATDITLTKDTATLKEKLKNYNVLNAEQIEKLSELVFNDHINLSLKALKQIIPLMYEGKRYDEACELCNFTIAKNQEKNEYLPLFEKTRFAKDISSPVVIRAICEFRKLLNDIIRRYGSVHKIHLELTRDFGISFNDRKKIIKEIEQNEQSRIKALETIKELKLEETSKNIQIVRLFEDQKGICPYSGLKMDLKCLDELVIDYIRPYNRSLDDSYSNKVLTFKKLNDLKQGKTPFEAFGEDEKLWAEINERIKEYNGKKRFKIFDKFFKDKKPFDFTEQTLQDTRWLTKLVASYLNEYLSFLPISEDENTALGYGEKGSKQHVILSSGMITQMLRNFWYLGFKNHKDYKNNAMDAIIVAFTTNSIIFTFNNFKKELDLAKAEFYANKISESDYLLKRKFLPPFSGFKEQALEKVKNIFVSHSLKIKNKGTLHELTPLKIKELKNTYGDLDLAVKLGKIRKYNDKYYANAKGSLVRTDLFADKENKFHAVSIYKADFSTKKLPNKTPATTSNGETKEGIEMNENYNFCMSLYKNTPISVKIKGMKEPIICYYHGFNTSGSKITYKKHDNNYHNLSEDEMVVFRKNDKESIVVGKILEIKKYSISPSGELSLIENEERKWF

SEQ ID NO: 113 - protein, 987 aa, Campylobacter coli
  source 1..987: note = Campylobacter coli 80352
MARILAFDIGISSIGWAFSENDELKDCGVRIFTKAENPKTGESLALPRRLARSARKRLARRKARLNHLKHLIANEFKLNYEDYQSFDESLAKAYKGSLISPYELRFRALNELLSKQDFARVILHIAKRRGYDDIKNSDDKEKGAILKAIKQNEEKLANYQSVGEYLYKEYFQKFKENSKEFTNVRNKKESYERCIAQSFLKDELKLIFKKQREFGFSFSKKFEEEVLSVAFYKRALKDFSHLVGNCSFFTDEKRAPKNSPLAFMFVALTRIINLLNNLKNTEGILYTKDDLNALLNEVLKNGTLTYKQTKKLLGLSDDYEFKGEKGTYFIEFKKYKEFIKALGDHSLSQDDLNEIAKDITLIKDEIKLKKALAKYDLNQNQIDSLSKLEFKDHLNISFKALKLITPLMLEGKKYDEACNELNLKVAINEDKKDFLPAFNETYYKDEVTNPVVLRAIKEYRKVLNALLKKYGKVHKINIELAREVGKNYSQRAKIEKEQNENYKAKKDAELECEKLGLKINSKNILKLRLFKEQKEFCAYSGEKIKISDLQDEKMLEIDHIYPYSRSFDDSYMNKVLVFTKQNQEKLNKTPFEAFGNDSTKWQKIEVLAKNLPEKKQKRILDKNYKDKEQKDFKDRNLNDTRYIARLVLNYTKDYLDFLPLSDDENTKLNDTQKGSKVHVEAKSGMLTSALRHTWGFSTKDRNNHLHHAIDAVIIAYANNSIVKAFSDFKKEQESNSAELYAKKISELDYKNKRKFFEPFSGFRQKVLDKIDEIFVSKPERKKPSGALHEETFRKEEEFYQSYGGKEGVLKALELGKIRKVNGKIVKNGDMFRVDIFKHKKTNKFYAVPIYTMDFALKVLPNKAVARSKKGEIKDWILMDENYEFCFSLYKDSLILIQTKDMQEPEFVYYNAFTSSTVSLIVSKHDNKFETLSKNQKILFKNANEKEVIAKSIGIQNLKVFEKYIVSALGEVTKAEFRQREDFKNELR

SEQ ID NO: 114 - protein, 984 aa, Campylobacter jejuni
MAKILAFDIGISSIGWAFSENDELKDCGVRIFTKAENPKTGESLALPRRIARSARKRLARRKARLNHLKHLIANEFKLNYEDYQSFDEILAKAYKGSLISPYELRFRALNELLSKQDFARVILHIAKRRGYDDIKNNGDEEKGKILKAIKQNEEKLANYQSVGEYLYKEYFQKFKENSKEFINVRNKKESYERCIAQSFLKDELKLIFKKQREFGFSFSKKFEEEVLSVAFYKRALKDFSHLVGNCSFFTDEKRAPKNSPLAFMFVALTRIINLLNNLKNTLYTKDDLNALLNEVLKNGTLTYKQTKKLLGLSDDYEFKGEKGNYFIEFKKYKEFIKALGEHSLSQDDLNEIAKDITLIKDEIKLKKALAKYDLNENQIDNLSKLEFKDHLNISFKALKLITPLMLEGKKYDEACNELTLKVAINEDKKDFLPAFNETYYKDEVTNPVVLRAIKEYRKVLNALLKKYGKVHKINIELAREVGKNHSQRAKIEKEQNENYKAKKDAELECEKLGLKINSKNILKLRLFKEQKEFCVYSGEKIKLSDLQDEKMLEIDHIYPYSRSFDDSYMNKVLVFTKQNQEKLNQTPFEAFGNDSAKWQKIEVLAKNLPTKKQKRILDKNYKDKEQKDFKDRNLNDTRYIARLVLNYTKDYLDFLPLSDDENTKLNDTQKGSKVHVEAKSGMLTSALRHTWGFSTKDRNNHLHHAIDAVIIAYANNSIVKAFSDFKKEQESNTAELYAKKISELDYKNKRKFFEPFSGFRQKVLDKIDEIFVSKPERKKPSGALHEETFRKEEEFYQSYGGKEGVLKALELGKIRKVNGKIVKNGDMFRVDIFKHKKTNKFYAVPIYTMDFALKVLPNKAVARSKKGEIKDWILMDENYEFCFSLYKDSLILIQTKDMQEPEFVYYNAFTSSTVSLIVSKHDNKFETLSKNQKILFKNANEKEVIAKSIGIQNLKVFEKYIVSALGEVTKAEFRQREEFKNELR

SEQ ID NO: 115 - protein, 987 aa, Campylobacter jejuni
  source 1..987: note = Campylobacter jejuni subsp. jejuni 110-21
MARILAFDIGISSIGWAFSENDELKDCGVRIFTKAENPKTGESLALPRRLARSARKRLARRKARLNHLKHLIANEFKLNYEDYQSFDESLAKAYKGSLISPYELRFRALNELLSKQDFARVILHIAKRRGYDNIKNSDNEEKSEILKAIKQNEEKLVNYQSVGEYLYKEYFQKFKENSKEFINVRNKKESYERCIAQSFLKDELKLIFQKQREFGLSFSKKFEEEVLSVAFYKRALKDFSHLVGNCSFFTDEKRAPKNSPLAFMFVALTRIINLLNNLKNTEGILYTKDDLNTLLNEVLKNGTLTYKQTKKLLGLSDDYEFKGEKGTYFIEFKKYKEFIKALGDHSLSQDDLNEIAKDITLIKDEIKLKKALAKYDLNQNQIDSLSKLEFKDHLNISFKALKLITPLMLEGKKYDEACNELNLKVVINEDKKDFLPAFNETYYKDEVTNPVVLRAIKEYRKVLNALLKKYGKVHKINIELAREVGKNHSQRAKIEKEQNENYKAKKDAELECEKLGLKINNKNILKLRLFKEQKEFCAYSGEKIKLSDLQDEKMLEIDHIYPYSRSFDDSYMNKVLVFTKQNQEKLNKTPFEAFGNDSTKWQKIEVLAKNLPTKKQKRILDKNYKDKEQKDFKDRNLNDTRYIARLVLNYTKDYLDFLPLSDDENTKLNDIQKGSKVHVEAKSGMLTSALRHTWGFSTKDRNNHLHHAIDAVIIAYANNSIVKAFSDFKKEQESNSAELYAKKISELDYKNKRKFFEPFSGFRQKVLDKIDEIFVSKPERKKPSGALHEETFRKEEEFYQSYGGKEGVLKALELGKIRKVNGKIVKNGDMFRVDIFKHKKTNKFYAVPIYTMDFALKVLPNKAVVQGKDKKSGLIKDWILMDENYEFCFSLYKDSLILIQTKDMQEPEFVYYNAFTSSTVSLIVSKHDNKFETLSKNQKILFKNANEKEVIAKSIGIQNLKVFEKYIVSALGEVTKAEFRQREDFKK

SEQ ID NO: 116 - protein, 987 aa, Campylobacter jejuni
  source 1..987: note = Campylobacter jejuni subsp. jejuni 129-258
MARILAFDIGISSIGWAFSENDELKDCGVRIFTKAENPKTGESLALPRRLARSARKRLARRKARLNHLKHLIANEFKLNYEDYQSFNESLAKAYKGSLISPYELRFRALNELLSKQDFARVILHIAKRRGYDDIKNSDDKEKGAILKVIKQNEEKLANYQSVGEYLYKEYFQKFKENSKEFTNVRNKKESYERCIAQSFLKDELKLIFQKQREFGFSFSKKFEEEVLSVAFYKRALKDFSHLVGNCSFFTDEKRAPKNSPLAFMFVALTRIINLLNNLKNTEGILYTKDDLNALLNEVLKNGTLTYKQTKKLLGLSDDYEFKGEKGTYFIEFKKYKEFIKALGDHSLSQDDLNEIAKDITLIKDEIKLKKALAKYDLNQNQIDSLSKLEFKDHLNISFKALKLITPLMLEGKKYDEACNELNLKVAINEDKKDFLPAFNETYYKDEVTNPVVLRAIKEYRKVLNALLKKYGKVHKINIELAREVGKNYSQRAKIEKEQNENYKAKKDAELECEKLGLKINSKNILKLRLFKEQKEFCAYSGEKIKISDLQDEKMLEIDHIYPYSRSFDDSYMNKVLVFTKQNQEKLNQTPFEAFGNDSAKWQKIEVLAKNLPTKKQKRILDKNYKDKEQKDFKDRNLNDTRYIARLVLNYTKDYLDFLPLSDDENTKLNDTQKGSKVHVEAKSGMLTSALRHTWGFSAKDRNNHLHHAIDAVIIAYANNSIVKAFSDFKKEQESNSAELYAKKISELDYKNKRKFFEPFSGFRQKVLDKIDEIFVSKPERKKPSGALHEETFRKEEEFYQSYGGKEGVLKALELGKIRKVNGKIVKNGDMFRVDIFKHKKTNKFYAVPIYTMDFALKVLPNKAVARSKKGEIKDWILMDENYEFCFSLYKDSLILIQTKDMQEPELVYFNAFTSSTVSLIVSKHDNKFETLSKNQKILFKNANEKEVIAKSIGIQNLKVFEKYIVSALGEVTKAEFRQREDFKNELR

SEQ ID NO: 117 - protein, 987 aa, Campylobacter jejuni
  source 1..987: note = Campylobacter jejuni subsp. jejuni 1336
MARILAFDIGISSIGWAFSENDELKDCGVRIFTKAENPKTGESLALPRRLARSARKRLARRKARLNHLKHLIANEFKLNYEDYQSFDESLAKAYKGSLISPYELRFRALNELLSKQDFARVILHIAKRRGYDDIKNNGDEEKGKILKAIKQNEEKLVSYQSVGEYLYKEYFQKFKENSKEFINVRNKKESYERCIAQSFLKDELKLIFQKQREFGFSFSKKFEEEVLSVAFYKRALKDFSHLVGNCSFLLMKKERQKNSPLAFMFVALTRIINLLNNLKNTEGILYTKDDLNTLLNEALKNGTLTYKQTKKLLGLSNDYEFKGEKGTYFIEFQKYKEFVKALGEHNLSQDDLNEIAKDITLIKDEIKLKKALAKYDLNQNQIDSLSKLEFKDHLNISFKALKLITPLMLEGKKYDEACNELNLKVAINEDKKDFLPAFNETYYKDEVTNPVVLRAIKEYRKVLNALLKKYGKVHKINIELAREVGKNHSQRAKIEKEQNENYKAKKDAELECEKLGLKINSKNILKLRLFKEQKEFCVYSGEKIKISDLQDEKMLEIDHIYPYSRSFDDSYMNKVLVFTKQNQEKLNKTPFETFGNDRVKWQKIEVLAKNLPTKKQKRILDKNYKDKEQKDFKDRNLNDTRYIARLVLNYTKDYLDFLPLSDDENTKLNDTQKGSKVHVEAKSGMLTSTLRHTWGFSTKDRNNHLHHAIDAAIIAYANNSIVKAFSDFKKEQESNTAELYAKKISELDYKNKRKFFEPFSGFRQKLLDKIDEIFVSKPERKKPSGALHEETFRKEEEFYQSYGGKEGVLKALELGKIRKVNGKMVKNGDMFRVDIFKHKKTNKFYAVPIYTMDFALKVLPNKAVVQGKDKKSGLIKDWILMDENYEFCFSLYKDSLILIQTKDMQEPELVYYERLDSSNASLTVSKHDNKFETLSKNQKILFKNANEKEVIAKSIGIQNLKVFEKYIVSALGEVTKAEFRQREDFKK

SEQ ID NO: 118 - protein, 984 aa, Campylobacter jejuni
  source 1..984: note = Campylobacter jejuni subsp. jejuni 140-16
MARILAFDIGISSIGWAFSENDELKDCGVRIFTKVENPKTGESLALPRRLARSARKRLARRKARLNHLKHLIANEFKLNYEDYQSFDESLAKAYKGSLISPYELRFRALNELLSKQDFARVILHIAKRRGYDDIKNSDDKEKGAILKAIKQNEEKLANYQSVGEYLYKEYFQKFKENSKEFTNVRNKKESYERCIAQSFLKDELKLIFKKQREFGFSFSKKFEEEVLSVAFYKRALKDFSHLVGNCSFFTDEKRAPKNSPLAFMFVALTRIINLLNNLKNTEGILYTKDDLNALLNEVLKNGTLTYKQTKKLLGLSDDYEFKGEKGTYFIEFKKYKEFIKALGEHNLSQDDLNEIAKDITLIKDEIKLKKALAKYDLNQNQIDSLSKLEFKDHLNISFKALKLITPLMLEGKKYDEACNELNLKVAINEDKKDFLPAFNETYYKDEVTNPVVLRAIKEYRKVLNALLKKYGKVHKINIELAREVGKNHSQRAKIEKEQNENYKAKKDAELECEKLGLKINSKNILKLRLFKEQKEFCAYSGEKIKISDLQDEKMLEIDHIYPYSRSFDDSYMNKVLVFTKQNQEKLNKTPFEAFGNDSAKWQKIEVLAKNLPTKKQKRILDKNYKDKEQKDFKDRNLNDTRYIARLVLNYTKDYLDFLPLSDDENTKLNDTQKGSKVHVEAKSGMLTSALRHTWGFSTKDRNNHLHHAIDAVIIAYANNSIVKAFSDFKKEQESNSAELYAKKISELDYKNKRKFFEPFSGFRQKVLDKIDEIFVSKPERKKPSGALHEETFRKEEEFYQSYGGKEGVLKALELGKIRKVNGKIVKNGDMFRVDIFKHKKTNKFYAVPIYTMDFALKVLPNKAVARSKKGEIKDWILMDENYEFCFSLYKDSLILIQTKDMQEPEFVYYNAFTSSTVSLIVSKHDNKFETLSKNQKILFKNANEKEVIAKSIGIQNLKVFEKYIVSALGEVTKAEFIQREDFKK

SEQ ID NO: 119 - protein, 984 aa, Campylobacter jejuni
  source 1..984: note = Campylobacter jejuni subsp. jejuni 1577
MARILAFDIGISSIGWAFSENDELKDCGVRIFTKVENPKTGESLALPRRLARSARKRLARRKVRLNHLKHLIANEFKLNYEDYQSFDESLAKAYKGSLISPYELRFRALNELLSKQDFARVILHIAKRRGYDDIKNSDDKEKGAILKAIKQNEEKLANYQSVGEYLYKEYFQKFKENSKEFTNVRNKKESYERCIAQSFLKDELKLIFKKQREFGFSFSKKFEEEVLSVAFYKRALKDFSHLVGNCSFFTDEKRAPKNSPLAFMFVALTRIINLLNNLKNTEGILYTKDDLNALLNEVLKNGTLTYKQTKKLLGLSDDYEFKGEKGTYFIEFKKYKEFIKALGEHNLSQDDLNEIAKDITLIKDEIKLKKALAKYDLNQNQIDSLSKLEFKDHLNISFKALKLITPLMLEGKKYDEACNELNLKVAINEDKKDFLPAFNETYYKDEVTNPVVLRAIKEYRKVLNALLKKYGKVHKINIELAREVGKNHSQRAKIEKEQNENYKAKKDAELECEKLGLKINSKNILKLRLFKEQKEFCAYSGEKIKISDLQDEKMLEIDHIYPYSRSFDDSYMNKVLVFTKQNQEKLNKTPFEAFGNDSAKWQKIEVLAKNLPTKKQKRILDKNYKDKEQKDFKDRNLNDTRYIARLVLNYTKDYLDFLPLSDDENTKLNDTQKGSKVHVEAKSGMLTSALRHTWGFSTKDRNNHLHHAIDAVIIAYANNSIVKAFSDFKKEQESNSAELYAKKISELDYKNKRKFFEPFSGFRQKVLDKIDEIFVSKPERKKPSGALHEETFRKEEEFYQSYGGKEGVLKALELGKIRKVNGKIVKNGDMFRVDIFKHKKTNKFYAVPIYTMDFALKVLPNKAVARSKKGEIKDWILMDENYEFCFSLYKDSLILIQTKDMQEPEFVYYNAFTSSTVSLIVSKHDNKFETLSKNQKILFKNANEKEVIAKSIGIQNLKVFEKYIVSALGEVTKAEFRQREDFKK

SEQ ID NO: 120 - protein, 987 aa, Campylobacter jejuni
  source 1..987: note = Campylobacter jejuni subsp. jejuni 1854
MARILAFDIGISSIGWAFSENDELKDCGVRIFTKAENPKTGESLALPRRLARSARKRLARRKARLNHLKHLIANEFKLNYEDYQSFDESLAKAYKGSLISPYELRFRALNELLSKQDFARVILHIAKRRGYDDIKNSDDKEKGAILKAIKQNEEKLANYQSVGEYLYKEYFQKFKENSKEFTNVRNKKESYERCIAQSFLKDELKLIFKKQREFGFSFSKKFEEEVLSVAFYKRALKDFSHLVGNCSFFTDEKRAPKNSPLAFMFVALTRIINLLNNLKNTEGILYTKDDLNTLLNEVLKNGTLTYKQTKKLLGLSDDYEFKGEKGTYFIEFKKYKEFIKSLGDHSLSQDDLNEIAKDITLIKDEIKLKKALAKYDLNQNQIDSLSKLEFKDHLNISFKALKLITPLMLEGKKYDEACNELNLKVAINEDKKDFLPAFNETYYKDEVTNPVVLRAIKEYRKVLNALLKKYGKVHKINIELAREVGKNHSQRAKIEKEQNENYKAKKDAELECEKLGLKINSKNILKLRLFKEQKEFCAYSGEKIKISDLQDEKMLEIDHIYPYSRSFDDSYMNKVLVFTKQNQEKLNQTPFEAFGNDSAKWQKIEVLAKNLPTKKQKRILDKNYKDKEQKNFKDRNLNDTRYIARLVLNYTKDYLDFLPLSDDENTKLNDTQKGSKVHVEAKSGMLTSALRHTWGFSAKDRNNHLHHAIDAVIIAYANNSIVKAFSDFKKEQESNSAELYAKKISELDYKNKRKFFEPFSGFRQKVLDKIDEIFVSKPERKKPSGALHEETFRKEEEFYQSYGGKEGVLKALELGKIRKVNGKIVKNGDMFRVDIFKHKKTNKFYAVPIYTMDFALKVLPNKAVARSKKGEIKDWILMDENYEFCFSLYKDSLILIQTKDMQEPEFVYYNAFTSSTVSLIVSKHDNKFETLSKNQKILFKNANEKEVIAKSIGIQNLKVFEKYIVSALGEVTKAEFRQREDFKNELR

SEQ ID NO: 121 - protein, 984 aa, Campylobacter jejuni
  source 1..984: note = Campylobacter jejuni subsp. jejuni 1997-10
MARILAFDIGISSIGWAFSENDELKDCGVRIFTKAENPKTGESLALPRRLARSARKRLARRKARLNRLKHLIANEFKLNYEDYQSFDESLAKAYKGSLISPYELRFRALNELLSKQDFARVILHIAKRRGYDDIKNSDDKEKGAILKAIKQNEEKLANYQSVGEYLYKEYFQKFKENSKEFTNVRNKKESYERCIAQSFLKDELKLIFKKQREFGFSFSKKFEEEVLSVAFYKRALKDFSHLVGNCSFFTDEKRAPKNSPLAFMFVALTRIINLLNNLKNTEGILYTKDDLNALLNEVLKNGTLTYKQTKKLLGLSDDYEFKGEKGTYFIEFKKYKEFIKALGDHSLNQDDLNEIAKDITLIKDEIKLKKALAKYDLNQNQIDSLSKLEFKDHLNISFKALKLITPLMLEGKKYDEACNELNLKVAINEDKKDFLPAFNETYYKDEVTNPVVLRAIKEYRKVLNALLKKYGKVHKINIELAREVGKNYSQRAKIEKEQNENYKAKKDAELECEKLGLKINSKNILKLRLFKEQKEFCVYSGEKIKISDLQDEKMLEIDHIYPYSRSFDDSYMNKVLVFTKQNQEKLNQTPFEAFGNDSAKWQKIEVLAKNLPTKKQKRILDKNYKDKEQKDFKDRNLNDTRYIARLVLNYTKDYLDFLPLSDDENTKLNDTQKGSKVYVEAKSGMLTSALRHTWGFSTKDRNNHLHHAIDAVIIAYANNSIVKAFSDFKKEQESNSAELYAKKISELDYKNKRKFFEPFSGFRQKVLDKIDEIFVSKPERKKPSGALHEETFRKEEEFYQSYGGKEGVLKALELGKIRKVNGKIVKNGDMFRVDIFKHKKTNKFYAVPIYTMDFALKVLPNKAVARSKKGEIKDWILMDENYEFCFSLYKDSLILIQTKDMQEPEFVYYNAFTSSTVSLIVSKHDNKFETLSKNQKILFKNANEKEVIAKSIGIQNLKVFEKYIVSALGEVTKAEFRQREDFKK

SEQ ID NO: 122 - protein, 987 aa, Campylobacter jejuni
  source 1..987: note = Campylobacter jejuni subsp. jejuni 2008-1025
MARILAFDIGISSIGWAFSENDELKDCGVRIFTKAENPKTGESLALPRRLARSARKRLARRKARLNHLKHLIANEFKLNYEDYQSFDESLAKAYKGSLISPYELRFRALNELLSKQDFARVILHIAKRRGYDDIKNNGDEEKSEILKAIKQNEEKLVNYQSVGEYLYKEYFQKFKENSKEFINVRNKKESYERCIAQSFLKDELKLIFQKQREFGFSFSKKFEEEVLSVAFYKRALKDFSHLVGNCSFFTDEKRAPKNSPLAFMFVALTRIINLLNNLKNTEGILYTKDDLNTLLNEVLKNGTLTYKQTKKLLGLSDDYEFKGEKGTYFIEFKKYKEFIKALGEHNLSQDNLNEIAKDITLIKDEIKLKKALAKYDLNQNQIDSLSKLEFKDHLNISFKALKLITPLMLEGKKYDEAYNELNLKVAINEDKKDFLPAFNETYYKDEVTNPVVLRAIKEYRKVLNALLKKYGKVHKINIELAREVGKNHSQRAKIEKEQNENYKAKKDAELECEKLGLKINSKNILKLRLFKEQKEFCAYSGEKIKISDLQDEKMLEIDHIYPYSRSFDDSYMNKVLVFTKQNQEKLNQTPFEAFGNDSAKWQKIEVLAKNLPTKKQKRILDKNYKDKEQKDFKDRNLNDTRYIARLVLNYTKDYLDFLPLSDDENTKLNDTQKGSKVHVEAKSGMLTSALRHTWGFSAKDRNNHLHHAIDAVIIAYANNSIVKAFSDFKKEQESNSAELYAKKISELDYKNKRKFFEPFSGFRQKVLDKIDEIFVSKPERKKPSGALHEETFRKEEEFYQSYGGKEGVLKALELGKIRKVNGKIVKNGDMFRVDIFKHKKTNKFYAVPIYTMDFALKVLPNKAVVQGKDKKSGLIKDWILMDENYEFCFSLYKDSLILIQTKDMQEPELVYFNAFTSSTVSLIVSKHDNKFETLSKNQKILFKNANEKEVIAKSIGIQNLKVFEKYIVSALGEVTKAEFRQREDFKK

SEQ ID NO: 123 - protein, 984 aa, Campylobacter jejuni
  source 1..984: note = Campylobacter jejuni subsp. jejuni 2008-872
MARILAFDIGISSIGWAFSENDELKDCGVRIFTKVENPKTGESLALPRRLARSARKRLARRKARLNHLKHLIANEFKLNYEDYQSFDESLAKAYKGSLISPYELRFRALNELLSKQDFARVILHIAKRRGYDDIKNSDDKEKGAILKAIKQNEEKLANYQSVGEYLYKEYFQKFKENSKEFTNVRNKKESYERCIAQSFLKDELKLIFKKQREFGFSFSKKFEEEVLSVAFYKRALKDFSHLVGNCSFFTDEKRAPKNSPLAFMFVALTRIINLLNNLKNTEGILYTKDDLNALLNEVLKNGTLTYKQTKKLLGLSDDYEFKGEKGTYFIEFKKYKEFIKALGEHNLSQDDLNEIAKDITLIKDEIKLKKALAKYDLNQNQIDSLSKLEFKDHLNISFKALKLITPLMLEGKKYDEACNELNLKVAINEDKKDFLPAFNETYYKDEVTNPVVLRAIKEYRKVLNALLKKYGKVHKINIELAREVGKNHSQRAKIEKEQNENYKAKKDAELECEKLGLKINSKNILKLRLFKEQKEFCAYSGEKIKISDLQDEKMLEIDHIYPYSRSFDDSYMNKVLVFTKQNQEKLNKTPFEAFGNDSAKWQKIEVLAKNLPTKKQKRILDKNYKDKEQKDFKDRNLNDTRYIARLVLNYTKDYLDFLPLSDDENTKLNDTQKGSKVHVEAKSGMLTSALRHTWGFSTKDRNNHLHHAIDAVIIAYANNSIVKAFSDFKKEQESNSAELYAKKISELDYKNKRKFFEPFSGFRQKVLDKIDEIFVSKPERKKPSGALHEETFRKEEEFYQSYGGKEGVLKALELGKIRKVNGKIVKNGDMFRVDIFKHKKTNKFYAVPIYTMDFALKVLPNKAVARSKKGEIKDWILMDENYEFCFSLYKDSLILIQTKDMQEPEFVYYNAFTSSTVSLIVSKHDNKFETLSKNQKILFKNANEKEVIAKSIGIQNLKVFEKYIVSALGEVTKAEFRQREDFKK

SEQ ID NO: 124 - protein, 987 aa, Campylobacter jejuni
  source 1..987: note = Campylobacter jejuni subsp. jejuni 2008-979
MARILAFDIGISSIGWAFSENDELKDCGVRIFTKAENPKTGESLALPRRLARSARKRLARRKARLNHLKHLIANEFKLNYEDYQSFDESLAKAYKGSLISPYELRFRALNELLSKQDFARVILHIAKRRGYDDIKNSDDKEKGAILKAIKQNEEKLVNYQSVGEYLYKEYFQKFKENSKEFTNVRNKKESYERCIAQSFLKDELKLIFKKQREFGFSFSKKFEEEVLSVAFYKRALKDFSHLVGNCSFFTDEKRAPKNSPLAFMFVALTRIINLLNNLKNTEGILYTKDDLNALLNEVLKNGTLTYKQTKKLLGLSDDYEFKGEKGTYFIEFKKYKEFIKALGDHSLSQDDLNEIAKDITLIKDEIKLKKALAKYDLNQNQIDSLSKLEFKDHLNISFKALKLITPLMLEGKKYDEACNELNLKVAINEDKKDFLPAFNETYYKDEVTNPVVLRAIKEYRKVLNALLKKYGKVHKINIELAREVGKNYSQRAKIEKEQNENYKAKKDAELECEKLGLKINSKNILKLRLFKEQKEFCAYSGEKIKISDLQDEKMLEIDHIYPYSRSFDDSYMNKVLVFTKQNQEKLNQTPFEAFGNDSAKWQKIEVLAKNLPTKKQKRILDKNYKDKEQKDFKDRNLNDTRYIARLVLNYTKDYLDFLPLSDDENTKLNDTQKGSKVHVEAKSGMLTSALRHTWGFSAKDRNNHLHHAIDAVIIAYANNSIVKAFSDFKKEQESNSAELYAKKISELDYKNKRKFFEPFSGFRQKVLDKIDEIFVSKPERKKPSGALHEETFRKEEEFYQSYGGKEGVLKALELGKIRKVNGKIVKNGDMFRVDIFKHKKTNKFYAVPIYTMDFALKVLPNKAVARSEKGEIKDWILMDENYEFCFSLYKDSLILIQTKDMQEPELVYFNAFTSSTVSLIVSKHDNKFETLSKNQKILFKNANEKEVIAKSIGIQNLKVFEKYIVSALGEVTKAEFRQREDFKNELR

SEQ ID NO: 125 - protein, 965 aa, Campylobacter jejuni
  source 1..965: note = Campylobacter jejuni subsp. jejuni 2008-988
MKIIGFNLGIANIGWALRENDEIIDCGVRVFDIPENPKNGNSLALERRENKARMKIVKRKKARMLATKTFLKKELNVDLSKLFLIGSTQSIYELRAKALSSLISKEELSAIILHIAKHRGYDDSALKNENGTIIEALNKNKETMLKFKSVGEYFYKNFVQNKEVKKIRNTTEDYSNSVPRSLLKQELDLILDKQKELGLIKNADFKEKLFEIIFFKRPLKDFSNKIGNCIFFENEKRAAKNTISACEFVALGKVVNLLKSIEKDIGIVYEKDSINEIMSIILDKTSISYKKIRDILNLPQEINFKGLDYSKNNVENSKLVDLKKLNEFKKALGDGFANLDKDILDSIATDITLTKDTATLKEKLKNYNVLNAEQIEKLSELVFNDHINLSLKALKQIIPLMYEGKRYDEACELCNFTIAKNQEKSEYLPLFEKTRFAKDISSPVVIRAICEFRKLLNDIIRRYGSVHKIHLELTRDFGISFSDRKKIIKEIEQNEQSRIKALETIKELKLEETSKNIQIVRLFEDQKGICPYSGLKMDLNRLDELVIDYIRPYNRSLDDSYSNKVLTFKKLSDLKQGKTPFEAFGEDEKLWAEINERIKEYNGKKRFKIFDKFFKDKKPFDFTEQTLQDTRWLTKLVASYLNEYLSFLPISEDENTALGYGEKGSKQHVILSSGMITQMLRNFWYLGFKNHKDYKNNAMDAIIVAFTTNSIIFAFNNFKKELDLAKAEFYANKISESDYLLKRKFLPPFSGFKEQALEKVKNIFVSHSLKIKNKGTLHDLTPLKIKELKNTYGDLDLAVKLGKIRKYNDKYYANANGSLVRADLFVDKKNKFHAVSIYKADFSTKKLPNKTPATTSNGETKEGIEMNENYNFCMSLYKNTPISVKIKGMKEPIICYYHGFNTSGSKITYKKHDNNYHNLSEDEMVVFRKNDKESIAVGKILEIKKYSISPSGELSLIENEERKWF

SEQ ID NO: 126 - protein, 984 aa, Campylobacter jejuni
  source 1..984: note = Campylobacter jejuni subsp. jejuni 2008-988
MARILAFDIGISSIGWAFSENDELKDCGVRIFTKVENPKTGESLALPRRLARSARKRLARRKARLNHLKHLIANEFKLNYEDYQSFDESLAKAYKGSLISPYELRFRALNELLSKQDFARVILHIAKRRGYDDIKNSDDKEKGAILKAIKQNEEKLANYQSVGEYLYKEYFQKFKENSKEFTNVRNKKESYERCIAQSFLKDELKLIFKKQREFGFSFSKKFEEEVLSVAFYKRALKDFSHLVGNCSFFTDEKRAPKNSPLAFMFVTLTRIINLLNNLKNTEGILYTKDDLNALLNEVLKNGTLTYKQTKKLLGLSDDYEFKGEKGTYFIEFKKYKEFIKALGEHNLSQDDLNEIAKDITLIKDEIKLKKALAKYDLNQNQIDSLSKLEFKDHLNISFKALKLITPLMLEGKKYDEACNELNLKVAINEDKKDFLPAFNETYYKDEVTNPVVLRAIKEYRKVLNALLKKYGKVHKINIELAREVGKNHSQRAKIEKEQNENYKAKKDAELECEKLGLKINSKNILKLRLFKEQKEFCAYSGEKIKISDLQDEKMLEIDHIYPYSRSFDDSYMNKVLVFTKQNQEKLNKTPFEAFGNDSAKWQKIEVLAKNLPTKKQKRILDKNYKDKEQKDFKDRNLNDTRYIARLVLNYTKDYLDFLPLSDDENTKLNDTQKGSKVHVEAKSGMLTSALRHTWGFSTKDRNNHLHHAIDAVIIAYANNSIVKAFSDFKKEQESNSAELYAKKISELDYKNKRKFFEPFSGFRQKVLDKIDEIFVSKPERKKPSGALHEETFRKEEEFYQSYGGKEGVLKALELGKIRKVNGKIVKNGDMFRVDIFKHKKTNKFYAVPIYTMDFALKVLPNKAVARSKKGEIKDWILMDENYEFCFSLYKDSLILIQTKDMQEPEFVYYNAFTSSTVSLIVSKHDNKFETLSKNQKILFKNANEKEVIAKSIGIQNLKVFEKYIVSALGEVTKAEFRQREDFKK

SEQ ID NO: 127 - protein, 961 aa, Campylobacter jejuni
  source 1..961: note = Campylobacter jejuni subsp. jejuni 260.94
MARILAFDIGISSIGWAFSENDELKDCGVRIFTKAENPKTGESLALPRRLARSARKRLARRKARLNHLKHLIANEFKLNYEDYQSFDESLAKAYKGSLISPYELRFRALNELLSKQDFARVILHIAKRRGYDDIKNNGDEEKGKILKAIKQNEEKLVNYQSVGEYLYKEYFQKFKENSKEFINVRNKKESYERCITQSFLKYELKLIFQKQREFGFSFSKKFEEEVLSVAFYKRALKDFSHLVGNCSFFSDEKRAPKNSPLAFMFVALTRIINLLNNLKNTEGILYTKDDLNALLNEVLKNGTLTYKQTKKLLGLSDDYEFKGEKGTYFIEFKKYKEFIKALGEHNLSQDDLNEIAKDITLIKDEIKLKKALAKYDLNQNQIDSLSKLEFKDHLNIGFKALKLITPLMLEGKKYDEACNELNLKVAINEDKKDFLPAFNETYYKDEVTNPVVLRAIKEYRKVLNALLKKYGKVHKINIELAREVGKNHSQRAKIEKEQNENYKAKKDAELECEKLGLKINSKNILKLRLFKEQKEFCAYSGEKIKLSDLQDEKMLEIDHIYPYSRSFDDSYMNKVLVFTKQNQEKLNKTPFEAFGNDNVKWQKIEVLAKNLPEKKQKRILDKNYKDKEQKDFKDRNLNDTRYIARLVLNYTKDYLDFLPLSDDENTKLKGSKVHVEAKSGMLTSALRHTWGFSTKDRNNHLHHAIDAAIIAYANNSIVKDFSDFKKEQESNSAELYAKKISELDYKNKRKFFEPFSGFRQKVLDKIDEIFVSKPERKKPSGALHEETFRKEEEFYQSYGGKEGVLKALELGKIRKVNGKIVKNGDMFRVDIFKHKKTNKFYAVPIYTMDFALKVLPNKAVARSKKGEIKDWILMDENYEFCFSLYKDSLILIQTKDMQEPELVYFNAFTSSTVSLIVSKHDNKFETLSKNLKVFEKYIVSALGEVTKAEFRQREDFKNELR

SEQ ID NO: 128 - protein, 985 aa, Campylobacter jejuni
  source 1..985: note = Campylobacter jejuni subsp. jejuni 414
MAKILAFDIGISSIGWAFVENDELKDCGVRIFTKAENPKTGESLALPRRLARSARKRLARRKARLNHLKHLIANEFKLNYEDYQSFDESLAKAYKGTLISPYELRFKALNELLSKQDLARVILHIAKRRGYDNIKNSDDKEKGAILKAVKENEEKLANYKSVGEYLYKEYFQKFKENSKEFINVRNKKESYERCIAQSFLKDELKLIFQKQREFGFNFSKKFEEEVLSVAFYKRALKDFSHLVGNCSFFVDEKRAPKNSPLAFEFVALTRIVNLLNNLNKNNSYIKDDLNALLSEVLKNGTLTYKQTKKILGLSDDYEFKGQKGNYFIEFKKYKEFIKALCEHNLNQDDLNEIAKDITLVKDETKLKKALAKYDLNQNQIENLSKIEFKDHLNISFKALKLIVPLMREGKKYDEVCNELNLKTAINEDKKEFLPAFNETYYKDEVNNPVVLRAIKEYRKVLNSLLKKYGKVHKINIELAREVGKNHRERSKIEKEQNENFKAKKDAELECEKLGLKINSKNILKLRLFKEQKEFCVYSGEKIKISDLQDEKMLEIDHIYPYSRSFDDSYMNKVLVFTKQNQEKLNKTPFEAFGKDDVKWQKIETLAKNLPAKKQKRILDKNYKDKEQKDFKDRNLNDTRYIARLVLNYTKDYLEFLPLSDDENIKLNDTQKGSKVHVEAKSGMLTSVLRHTWGFSTKDRNNHLHHAIDAVIIAYANASVVKAFSDFKKEQENYTAELYAKKINELDFKNKRKFFEPFSNFRQKVLEKIDEIFVSKPERKKPSGALHEETFYKEEEFYKEYGGKEGVLKALELGKIRKVNGKIVSNANMFRVDIFKYKKTNKFYAVPIYTMDFALGILPNKAVVGGKDKQGIIKDWLLMDENYEFCFSLYKDSLILLQTKDMQEPELVYFKSFKSSTAGLVVSKHDNKFENLNENQKKLFKSANEKKVVAEGIGIQNLKVFEKYIVSALGEITKAEIKERENFKKK

SEQ ID NO: 129 - protein, 984 aa, Campylobacter jejuni
  source 1..984: note = Campylobacter jejuni subsp. jejuni 51037
MARILAFDIGISSIGWAFSENDELKDCGVRIFTKAENPKTGESLALPRRLARSARKRLARRKARLNHLKHLIANEFKLNYEDYQSFDESLAKAYKGSLISPYELRFRALNELLSKQDFARVILHIVKRRGYDDIKNSDDKEKGTILKAIKQNEEKLANYQSVGEYLYKEYFQKFKENSKEFTNVRNKKESYERCIAQSFLKDELKLIFKKQREFGFSFSKKFEEEVLSVAFYKRALKDFSHLVGNCSFFTDEKRAPKNSPLAFMFVALTRIINLLNNLKNTEGILYTKDDLNTLLNEVLKNGTLTYKQTKKLLGLSDDYEFKGEKGTYFIEFKKYKEFIKALGEHNLSQDDLNEIAKDITLIKDEIKLKKALAKYDLNQNQIDSLSKLEFKDHLNISFKALKLITPLMLEGKKYDEACNELNLKVAINEDKKDFLPAFNETYYKDEVTNPVVLRAIKEYRKVLNALLKKYGKVHKINIELAREVGKNYSQRAKIEKEQNENYKAKKDAELECEKLGLKINSKNILKLRLFKEQKEFCAYSGEKIKISDLQDEKMLEIDHIYPYSRSFDDSYMNKVLVFTKQNQEKLNQTPFEAFGNDSAKWQKIEVLAKNLPTKKQKRILDKNYKDKEQKDFKDRNLNDTRYIARLVLNYTKDYLDFLPLSDDENTKLNDTQKGSKVHVEAKSGMLTSALRHTWGFSAKDRNNHLHHAIDAVIIAYANNSIVKAFSDFKKEQESNSAELYAKKISELDYKNKRKFFEPFSGFRQKVLDKIDEIFVSKPERKKPSGALHEETFRKEEEFYQSYGGKEGVLKALELGKIRKVNGKIVKNGDMFRVDIFKHKKTNKFYAVPIYTMDFALKVLPNKAVARSKKGEIKDWILMDENYEFCFSLYKDSLILIQTKDMQEPEFVYYNAFTSSTVSLIVSKHDNKFETLSKNQKILFKNANEKEVIAKSIGIQNLKVFEKYIVSALGEVTKAEFRQREDFKK

SEQ ID NO: 130 - protein, 984 aa, Campylobacter jejuni
  source 1..984: note = Campylobacter jejuni subsp. jejuni 51494
MARILAFDIGISSIGWAFSENDELKDCGVRIFTKAENPKTGESLALPRRLARSARKRLARRKARLNHLKHLIANEFKLNYEDYQSFDESLAKAYKGSLISPYELRFRALNELLSKQDFARVILHIAKRRGYDDIKNSDDKEKGAILKAIKQNEEKLANYQSVGEYLYKEYFQKFKENSKEFTNVRNKKESYERCIAQSFLKDELKLIFKKQREFGFSFSKKFEEEVLSVAFYKRALKDFSHLVGNCSFFTDEKRAPKNSPLAFMFVALTRIINLLNNLKNTEGILYTKDDLNTLLNEVLKNGTLTYKQTKKLLGLSDDYEFKGEKGTYFIEFKKYKEFIKALGEHNLSQDDLNEIAKDITLIKDEIKLKKALAKYDLNQNQIDSLSKLEFKDHLNISFKALKLITPLMLEGKKYDEACNELNLKVAINEDKKDFLPAFNETYYKDEVTNPVVLRAIKEYRKVLNALLKKYGKVHKINIELAREVGKNYSQRAKIEKEQNENYKAKKDAELECEKLGLKINSKNILKLRLFKEQKEFCAYSGEKIKISDLQDEKMLEIDHIYPYSRSFDDSYMNKVLVFTKQNQEKLNKTPFEAFGNDSTKWQKIEVLAKNLPEKKQKRILDKNYKDKEQKDFKDRNLNDTRYIARLVLNYTKDYLDFLPLSDDENTKLNDTQKGLKVHVEAKSGMLTSALRHTWGFSAKDRNNHLHHAIDAVIIAYANNSIVKAFSDFKKEQESNSAELYAKKISELDYKNKRKFFEPFSGFRQKVLDKIDEIFVSKPERKKPSGALHEETFRKEEEFYQSYGGKEGVLKALELGKIRKVNGKIVKNGDMFRVDIFKHKKTNKFYAVPIYTMDFALKVLPNKAVARSKKGEIKDWILMDENYEFCFSLYKDSLILIQTKDMQEPEFVYYNAFTSSTVSLIVSKHDNKFETLSKNQKILFKNANEKEVIAKSIGIQNLKVFEKYIVSALGEVTKAEFRQREDFKK

SEQ ID NO: 131 - protein, 987 aa, Campylobacter jejuni
  source 1..987: note = Campylobacter jejuni subsp. jejuni 53161
MARILAFDIGISSIGWAFSENDELKDCGVRIFTKAENPKTGESLALPRRLARSARKRLARRKARLNHLKHLIANEFKLNYEDYQSFDEGLAKAYKGSLISPYELRFRALNELLSKQDFARVILHIAKRRGYDDIKNNGDEEKSEILKAIKQNEEKLVNYQSVGEYLYKEYFQKFKENSKEFINVRNKKESYERCIAQSFLKDELKLIFQKQREFGFSFSKKFEEEVLSVAFYKRALKDFSHLVGNCSFFTDEKRAPKNSPLAFMFVALTRIINLLNNLKNTEGILYTKDDLNTLLNEVLKNGTLTYKQTKKLLGLSDDYEFKGEKGTYFIEFKKYKEFIKALGEHNLSQDNLNEIAKDITLIKDEIKLKKALAKYDLNQNQIDSLSKLEFKDHLNISFKALKLITPLMLEGKKYDEAYNELNLKVAINEDKKDFLPAFNETYYKDEVTNPVVLRAIKEYRKVLNALLKKYGKVHKINIELAREVGKNHSQRAKIEKEQNENYKAKKDAELECEKLGLKINSKNILKLRLFKEQKEFCAYSGEKIKISDLQDEKMLEIDHIYPYSRSFDDSYMNKVLVFTKQNQEKLNQTPFEAFGNDSAKWQKIEVLAKNLPTKKQKRILDKNYKDKEQKDFKDRNLNDTRYIARLVLNYTKDYLDFLPLSDDENTKLNDTQKGSKVHVEAKSGMLTSALRHTWGFSAKDRNNHLHHAIDAVIIAYANNSIVKAFSDFKKEQESNSAELYAKKISELDYKNKRKFFEPFSGFRQKVLDKIDEIFVSKPERKKPSGALHEETFRKEEEFYQSYGGKEGVLKALELGKIRKVNGKIVKNGDMFRVDIFKHKKTNKFYAVPIYTMDFALKVLPNKAVVQGKDKKSGLIKDWILMDENYEFCFSLYKDSLILIQTKDMQEPELVYFNAFTSSTVSLIVSKHDNKFETLSKNQKILFKNANEKEVIAKSIGIQNLKVFEKYIVSALGEVTKAEFRQREDFKK

SEQ ID NO: 132 - protein, 984 aa, Campylobacter jejuni
  source 1..984: note = Campylobacter jejuni subsp. jejuni 60004
MARILAFDIGISSIGWAFSENDELKDCGVRIFTKAENPKTGESLALPRRLARSARKRLARRKARLNHLKHLIANEFKLNYEDYQSFDESLAKAYKGSLISPYELRFRALNELLSKQDFARVILHIAKRRGYDDIKNNGDEEKGKILKAIKQNEEKLVNYQSVGEYLYKEYFQKFKENSKEFINVRNKKESYERCITQSFLKYELKLIFQKQREFGFSFSKKFEEEVLSVAFYKRALKDFSHLVGNCSFFTDEKRAPKNSPLAFMFVALTRIINILNNLKNTEGILYTKDDLNALLNEVLKNGTLTYKQTKKLLGLSDDYEFKGEKGTYFIEFKKYKEFIKALGEHNLSQDDLNEIAKDITLIKDEIKLKKALAKYDLNQNQIDSLSKLEFKDHLNISFKALKLITPLMLEGKKYDEACNELNLKVAINEDKKDFLPAFNETYYKDEVTNPVVLRAIKEYRKILNALLKKYGKVHKINIELAREVGKNHSQRAKIEKEQNENYKAKKDAEIECEKLGLKINSKNILKLRLFKEQKEFCAYSGEKIKISDLQDEKMLEIDHIYPYSRSFDDSYMNKVLVFTKQNQEKLNQTPFEAFGNDSAKWQKIEVLAKNLPTKKQKRILDKNYKDKEQKDFKDRNLNDTRYIARLVLNYTKDYLDFLPLSDDENTKLNDTQKGSKVHVEAKSGMLTSALRHTWGFSAKDRNNHLHHAIDAVIIAYANNSIVKAFSDFKKEQESNSAELYAKKISELDYKNKRKFFEPFSGFRQKVLDKIDEIFVSKPERKKPSGALHEETFRKEEEFYQSYGGKEGVLKALELGKIRKVNGKIVKNGDMFRVDIFKHKKTNKFYAVPIYTMDFALKVLPNKAVARSKKGEIKDWILMDENYEFCFSLYKDSLILIQTKDMQEPEFVYYNAFTSSTVSLIVSKHDNKFETLSKNQKILFKNANEKEVIAKSIGIQNLKVFEKYIVSALGEVTKAEFRQREDFKK

SEQ ID NO: 133 - protein, 984 aa, Campylobacter jejuni
MARILAFDIGISSIGWAFSENDELKDCGVRIFTKAENPKTGESLALPRRLARSARKRLARRKARLNHLKHLIANEFKLNYEDYQSFDESLAKAYKGSLISPYELRFRALNELLSKQDFARVILHIAKRRGYDDIKNNGDEEKSEILKAIKQNEEKLVNYQSVGEYLYKEYFQKFKENSKEFINVRNKKESYERCITQSFLKDELKLIFQKQREFGFSFSKKFEEEVLSVAFYKRALKDFSHLVGNCSFFTDEKRAPKNSPLAFMFVALTRIINILNNLKNTEGILYTKDDLNALLNEVLKNGTLTYKQTKKLLGLSDDYEFKGEKGTYFIEFKKYKEFIKALGEHNLSQDDLNEIAKDITLIKDEIKLKKALAKYDLNQNQIDSLSKLEFKDHLNISFKALKLITPLMLEGKKYDEACNELNLKVAINEDKKDFLPAFNETYYKDEVTNPVVLRAIKEYRKILNALLKKYGKVHKINIELAREVGKNHSQRAKIEKEQNENYKAKKDAEIECEKLGLKINSKNILKLRLFKEQKEFCAYSGEKIKLSDLQDEKMLEIDHIYPYSRSFDDSYMNKVLVFTKQNQEKLNKTPFEAFGNDSTKWQKIEVLAKNLPEKKQKRILDKNYKDKEQKDFKDRNLNDTRYIARLVLNYTKDYLDFLPLSDDENTKLNDTQKGSKVHVEAKSGMLTSALRHTWGFSAKDRNNHLHHAIDAAIIAYANNSIVKAFSDFKKEQESNSVELYAKKISELDYKNKRKFFEPFSGFRQKVLDKIDEIFVSKPERKKPSGALHEETFRKEEEFYQSYGGKEGVLKALELGKIRKVNGKIVKNGDMFRVDIFKHKKTNKFYAVPIYTMDFALKVLPNKAVARSKKGEIKDWILMDENYEFCFSLYKDSLILIQTKDMQEPELVYFNAFTSSTVSLIVSKHDNKFETLSKNQKILFKNANEKEVIAKSIGIQNLKVFEKYIVSALGEVTKAEFRQREDFKK

SEQ ID NO: 134 - protein, 984 aa, Campylobacter jejuni
  source 1..984: note = Campylobacter jejuni subsp. jejuni 84-25
MVRILAFDIGISSIGWAFSENDELKDCGVRIFTKVENPKTGESLALPRRLARSARKRLARRKARLNHLKHLIANEFKLNYEDYQSFDESLAKAYKGSLISPYELRFRALNELLSKQDFARVILHIAKRRGYDDIKNSDDKEKGAILKAIKQNEEKLANYQSVGEYLYKEYFQKFKENSKEFTNVRNKKESYERCIAQSFLKDELKLIFKKQREFGFSFSKKFEEEVLSVAFYKRALKDFSHLVGNCSFFTDEKRAPKNSPLAFMFVALTRIINLLNNLKNTEGILYTKDDLNALLNEVLKNGTLTYKQTKKLLGLSDDYEFKGEKGTYFIEFKKYKEFIKALGEHNLSQDDLNEIAKDITLIKDEIKLKKALAKYDLNQNQIDSLSKLEFKDHLNISFKALKLITPLMLEGKKYDEACNELNLKVAINEDKKDFLPAFNETYYKDEVTNPVVLRAIKEYRKVLNALLKKYGKVHKINIELAREVGKNHSQRAKIEKEQNENYKAKKDAELECEKLGLKINSKNILKLRLFKEQKEFCAYSGEKIKISDLQDEKMLEIDHIYPYSRSFDDSYMNKVLVFTKQNQEKLNKTPFEAFGNDSAKWQKIEVLAKNLPTKKQKRILDKNYKDKEQKDFKDRNLNDTRYIARLVLNYTKDYLDFLPLSDDENTKLNDTQKGSKVHVEAKSGMLTSALRHTWGFSTKDRNNHLHHAIDAVIIAYANNSIVKAFSDFKKEQESNSAELYAKKISELDYKNKRKFFEPFSGFRQKVLDKIDEIFVSKPERKKPSGALHEETFRKEEEFYQSYGGKEGVLKALELGKIRKVNGKIVKNGDMFRVDIFKHKKTNKFYAVPIYTMDFALKVLPNKAVARSKKGEIKDWILMDENYEFCFSLYKDSLILIQTKDMQEPEFVYYNAFTSSTVSLIVSKHDNKFETLSKNQKILFKNANEKEVIAKSIGIQNLKVFEKYIVSALGEVTKAEFRQREDFKK

SEQ ID NO: 135 - protein, 984 aa, Campylobacter jejuni
  source 1..984: note = Campylobacter jejuni subsp. jejuni 87459
MARILAFDIGISSIGWAFSENDELKDCGVRIFTKAENPKTGESLALPRRLARSARKRLARRKARLNHLKHLIANEFKLNYEDYQSFDESLAKAYKGSLISPYELRFRALNELLSKQDFARVILHIAKRRGYDDIKNSDDKEKGAILKAIKQNEEKLANYQSVGEYLYKEYFQKFKENSKEFTNVRNKKESYERCIAQSFLKDELKLIFKKQREFGFSFSKKFEEEVLSVAFYKRALKDFSHLVGNCSFFTDEKRAPKNSPLAFMFVALTRIINLLNNLKNTEGILYTKDDLNTFLNEVLKNGTLTYKQTKKLLGLSDDYEFKGEKGTYFIEFKKYKEFIKALGDHNLSQDDLNEIAKDITLIKDEIKLKKALAKYDLNQNQIDSLSKLEFKDHLNISFKALKLITPLMLEGKKYDEACNELNLKVAINEDKKDFLPAFNETYYKDEVTNPVVLRAIKEYRKVLNALLKKYGKVHKINIELAREVGKNHSQRAKIEKEQNENYKAKKDAELECEKLGLKINSKNILKLRLFKEQKEFCAYSGEKIKISDLQDEKMLEIDHIYPYSRSFDDSYMNKVLVFTKQNQEKLNKTPFEAFGNDSAKWQKIEVLAKNLPTKKQKRILDKNYKDKEQKDFKDRNLNDTRYIARLVLNYTKDYLDFLPLSDDENTKLNDTQKGSKVHVEAKSGMLTSALRHTWGFSTKDRNNHLHHAIDAVIIAYANNSIVKAFSDFKKEQESNSAELYAKKISELDYKNKRKFFEPFSGFRQKVLDKIDEIFVSKPERKKPSGALHEETFRKEEEFYQSYGGKEGVLKALELGKIRKVNGKIVKNGDMFRVDIFKHKKTNKFYAVPIYTMDFALKVLPNKAVARSKKGEIKDWILMDENYEFCFSLYKDSLILIQTKDMQEPEFVYYNAFTSSTVSLIVSKHDNKFETLSKNQKILFKNANEKEVIAKSIGIQNLKVFEKYIVSALGEVTKAEFRQREDFKK

SEQ ID NO: 136 - protein, 984 aa, Campylobacter jejuni
  source 1..984: note = Campylobacter jejuni subsp. jejuni ATCC 33560
MARILAFDIGISSIGWAFSENDELKDCGVRIFTKAENPKTGESLALPRRLARSARKRLARRKARLNHLKHLIANEFKLNYEDYQSFDESLAKAYKGSLISPYELRFRALNELLSKQDFARVILHIAKRRGYDDIKNSDDKEKGAILKAIKQNEEKLANYQSVGEYLYKEYFQKFKENSKEFTNVRNKKESYERCIAQSFLKDELKLIFKKQREFGFSFSKKFEEEVLSVAFYKRALKDFSHLVGNCSFFTDEKRAPKNSPLAFMFVALTRIINLLNNLKNTEGILYTKDDLNALLNEVLKNGTLTYKQTKKLLGLSDDYEFKGEKGTYFIEFKKYKEFIKALGDHSLSQDDLNEIAKDITLIKDEIKLKKALAKYDLNQNQIDSLSKLEFKDHLNISFKALKLITPLMLEGKKYDEACNELNLKVAINEDKKDFLPAFNETYYKDEVTNPVVLRAIKEYRKVLNALLKKYGKVHKINIELAREVGKNYSQRAKIEKEQNENYKAKKDAELECEKLGLKINSKNILKLRLFKEQKEFCAYSGEKIKISDLQDEKMLEIDHIYPYSRSFDDSYMNKVLVFTKQNQEKLNQTPFEAFGNDSAKWQKIEVLAKNLPTKKQKRILDKNYKDKEQKNFKDRNLNDTRYIARLVLNYTKDYLDFLPLSDDENTKLNDTQKGSKVHVEAKSGMLTSALRHTWGFSAKDRNNHLHHTIDAVIIAYANNSIVKAFSDFKKEQESNSAELYAKKISELDYKNKRKFFEPFSGFRQKVLDKIDEIFVSKPERKKPSGALHEETFRKEEEFYQSYGGKEGVLKALELGKIRKVNGKIVKNGDMFRVDIFKHKKTNKFYAVPIYTMDFALKVLPNKAVARSKKGEIKDWILMDENYEFCFSLYKDSLILIQTKDMQEPEFVYYNAFTSSTVSLIVSKHDNKFETLSKNQKILFKNANEKEVIAKSIGIQNLKVFEKYIVSALGEVTKAEFRQREDFKK

SEQ ID NO: 137 - protein, 987 aa, Campylobacter jejuni
  source 1..987: note = Campylobacter jejuni subsp. jejuni CF93-6
MARILAFDIGISSIGWAFSENDELKDCGVRIFTKVENPKTGESLALPRRLARSARKRLARRKARLNHLKHLIANEFKLNYEDYQSFDESLAKAYKGSLISPYELRFRALNELLSKQDFARVILHIAKRRGYDDIKNSDDKEKGAILKAIKQNEEKLANYQSVGEYLYKEYFQKFKENSKEFTNVRNKKESYERCIAQSFLKDELKLIFKKQREFGFSFSKKFEEEVLSVAFYKRALKDFSHLVGNCSFFTDEKRVPKNSPLAFMFVALTRIINLLNNLKNTEGILYTKDDLNALLNEVLKNGTLTYKQTKKLLGLSDDYEFKGEKGTYFIEFKKYKEFIKALGEHNLSQDDLNEIAKDITLIKDEIKLKKALAKYDLNQNQIDSLSKLEFKDHLNISFKALKLITPLMLEGKKYDEACNELNLKVAINEDKKDFLPAFNETYYKDEVTNPVVLRAIKEYRKVLNALLKKYGKVHKINIELAREVGKNHSQRAKIEKEQNENYKAKKDAELECEKLGLKINSKNILKLRLFKEQKEFCAYSGEKIKISDLQDEKMLEIDHIYPYSRSFDDSYMNKVLVFTKQNQEKLNQTPFEAFGNDSAKWQKIEVLAKNLPTKKQKRILDKNYKDKEQKNFKDRNLNDTRYIARLVLNYTKDYLDFLPLSDDENTKLNDTQKGSKVHVEAKSGMLTSALRHTWGFSAKDRNNHLHHAIDAVIIAYANNSIVKAFSDFKKEQESNSAELYAKKISELDYKNKRKFFEPFSGFRQKVLDKIDEIFVSKPERKKPSGALHEETFRKEEEFYQSYGGKEGVLKALELGKIRKVNGKIVKNGDMFRVDIFKHKKTNKFYGVPIYTMDFALKVLPNKAVARSKKGEIKDWILMDENYEFCFSLYKDSLILIQTKDMQEPEFVYYNAFTSSTVSLIVSKHDNKFETLSKNQKILFKNANEKEVIAKSIGIQNLKVFEKYIVSALGEVTKAEFRQREDFKNELR

SEQ ID NO: 138 - protein, 984 aa, Campylobacter jejuni
  source 1..984: note = Campylobacter jejuni subsp. jejuni CG8486
MARILAFDIGISSIGWAFSENDELKDCGVRIFTKAENPKTGESLALPRRLARSARKRLARRKARLNHLKHLIANEFKLNYEDYQSFDESLAKAYKGSLISPYELRFRALNELLSKQDFARVILHIAKRRGYDDIKNSDDKEKGAILKAIKQNEEKLANYQSVGEYLYKEYFQKFKENSKEFTNVRNKKESYERCIAQSFLKDELKLIFKKQREFGFSFSKKFEEEVLSVAFYKRALKDFSHLVGNCSFFTDEKRAPKNSPLAFMFVALTRIINLLNNLKNTEGILYTKDDLNALLNEVLKNGTLTYKQTKKLLGLSDDYEFKGEKGTYFIEFKKYKEFIKALGDHSLSQDDLNEIAKDITLIKDEIKLKKALAKYDLNQNQIDSLSKLEFKDHLNISFKALKLITPLMLEGKKYDEACNELNLKVAINEDKKDFLPAFNETYYKDEVTNPVVLRAIKEYRKVLNALLKKYGKVHKINIELAREVGKNYSQRAKIEKEQNENYKAKKDAELECEKLGLKINSKNILKLRLFKEQKEFCAYSGEKIKISDLQDEKMLEIDHIYPYSRSFDDSYMNKVLVFTKQNQEKLNQTPFEAFGNDSAKWQKIEVLAKNLPTKKQKRILDKNYKDKEQKDFKDRNLNDTRYIARLVLNYTKDYLDFLPLSDDENTKLNDTQKGSKVHVEAKSGMLTSALRHTWGFSAKDRNNHLHHAIDAVIIAYANNSIVKAFSDFKKEQESNSAELYAKKISELDYKNKRKFFEPFSGFRQKVLDKIDEIFVSKPERKKPSGALHEETFRKEEEFYQSYGGKEGVLKALELGKIRKVNGKIVKNGDMFRVDIFKHKKTNKFYAVPIYTMDFALKVLPNKAVARSKKGEIKDWILMDENYEFCFSLYKDSLILIQTKDMQEPEFVYYNAFTSSTVSLIVSKHDNKFETLSKNQKILFKNANEKEVIAKSIGIQNLKVFEKYIVSALGEVTKAEFRQREDFKK

SEQ ID NO: 139 - protein, 984 aa, Campylobacter jejuni
  source 1..984: note = Campylobacter jejuni subsp. jejuni HB93-13
MARILAFDIGISSIGWAFSENDELKDCGVRIFTKVENPKTGESLALPRRLARSARKRLARRKARLNHLKHLIANEFKLNYEDYQSFDESLAKAYKGSLISPYELRFRALNELLSKQDFARVILHIAKRRGYDDIKNSDDKEKGAILKAIKQNEEKLANYQSVGEYLYKEYFQKFKENSKEFTNVRNKKESYERCIAQSFLKDELKLIFKKQREFGFSFLKKFEEEVLSVAFYKRALKDFSHLVGNCSFFTDEKRAPKNSPLAFMFVALTRIINLLNNLKNTEGILYTKDDLNALLNEVLKNGTLTYKQTKKLLGLSDDYEFKGEKGTYFIEFKKYKEFIKALGEHNLSQDDLNEIAKDITLIKDEIKLKKALAKYDLNQNQIDSLSKLEFKDHLNISFKALKLITPLMLEGKKYDEAYNELNLKVAINEDKKDFLPAFNETYYKDEVTNPVVLRAIKEYRKVLNALLKKYGKVHKINIELAREVGKNHSQRAKIEKEQNENYKAKKDAELECEKLGLKINSKNILKLRLFKEQKEFCAYSGEKIKISDLQDEKMLEIDHIYPYSRSFDDSYMNKVLVFTKQNQEKLNQTPFEAFGNDSAKWQKIEVLAKNLPTKKQKRILDKNYKDKEQKDFKDRNLNDTRYIARLVLNYTKDYLDFLPLSDDENTKLNDTQKGSKVHVEAKSGMLTSALRHTWGFSAKDRNNHLHHAIDAVIIAYANNSIVKAFSDFKKEQESNSAELYAKKISELDYKNKRKFFEPFSGFRQKVLDKIDEIFVSKPERKKPSGALHEETFRKEEEFYQSYGGKEGVLKALELGKIRKVNGKIVKNGDMFRVDIFKHKKTNKFYAVPIYTMDFALKVLPNKAVARSKKGEIKDWILMDENYEFCFSLYKDSLILIQTKDMQEPELVYFNAFTSSTVSLIVSKHDNKFETLSKNQKILFKNANEKEVIAKSIGIQNLKVFEKYIVSALGEVTKAEFRQREDFKK

SEQ ID NO: 140 - protein, 987 aa, Campylobacter jejuni
  source 1..987: note = Campylobacter jejuni subsp. jejuni LMG 23210
MARILAFDIGISSIGWAFSENDELKDCGVRIFTKAENPKTGESLALPRRLARSARKRLARRKARLNHLKHLIANEFKLNYEDYQSFDESLAKAYKGSLISPYELRFRALNELLSKQDFARVILHIAKRRGYDDIKNSDDKEKGAILKAIKQNEEKLANYQSVGEYLYKEYFQKFKENSKEFTNVRNKKESYERCIAQSFLKDELKLIFKKQREFGFSFSKKFEEEVLSVAFYKRALKDFSHLVGNCSFFTDEKRAPKNSPLAFMFVALTRIINLLNNLKNTEGILYTKDDLNALLNEVLKNGTLTYKQTKKLLGLSDDYEFKGEKGTYFIEFKKYKEFIKALGDHSLSQDDLNEIAKDITLIKDEIKLKKALVKYDLNQNQIDSLSKLEFKDHLNISFKALKLITPLMLEGKKYDEACNELNLKVAINEDKKDFLPAFNETYYKDEVTNPVVLRAIKEYRKVLNALLKKYGKVHKINIELAREVGKNYSQRAKIEKEQNENYKAKKDAELECEKLGLKINSKNILKLRLFKEQKEFCAYSGEKIKISDLQDEKMLEIDHIYPYSRSFDDSYMNKVLVFTKQNQEKLNQTPFEAFGNDSAKWQKIEVLAKNLPTKKQKRILDKNYKDKEQKDFKDRNLNDTRYIARLVLNYTKDYLDFLPLSDDENTKLNDTQKGSKVHVEAKSGMLTSALRHTWGFSAKDRNNHLHHAIDAVIIAYANNSIVKAFSDFKKEQESNSAELYAKKISELDYKNKRKFFEPFSGFRQKVLDKIDEIFVSKPERKKPSGALHEETFRKEEEFYQSYGGKEGVLKALELGKIRKVNGKIVKNGDMFRVDIFKHKKTNKFYAVPIYTMDFALKVLPNKAVARSKKGEIKDWILMDENYEFCFSLYKDSLILIQTKDMQEPELVYFNAFTSSTVSLIVSKHDNKFETLSKNQKILFKNANEKEVIAKSIGIQNLKVFEKYIVSALGEVTKAEFRQREDFKNELR

SEQ ID NO: 141 - protein, 984 aa, Campylobacter jejuni
  source 1..984: note = Campylobacter jejuni subsp. jejuni LMG 23211
MARILAFDIGISSIGWAFSENDELKDCGVRIFTKAENPKTGESLALPRRLARSARKRLARRKARLNHLKHLIANEFKLNYEDYQSFDESLAKAYKGSLISPYELRFRALNELLSKQDFARVILHIAKRRGYDDIKNNGDEEKSEILKAIKQNEEKLVNYQSVGEYLYKEYFQKFKENSKEFINVRNKKESYERCITQSFLKDELKLIFQKQREFGFSFSKKFEEEVLSVAFYKRALKDFSHLVGNCSFFTDEKRAPKNSPLAFMFVALTRIINLLNNLKNTEGILYTKDDLNALLNEVLKNGTLTYKQTKKLLGLSDDYEFKGEKGTYFIEFKKYKEFIKALDEHSLSQDDLNEIAKDITLIKDEIKLKKALAKYDLNQNQIDSLSKLEFKDHLNISFKALKLITPLMLEGKKYDEACNELNLKVAINEDKKDFLPAFNETYYKDEVTNPVVLRAIKEYRKILNALLKKYGKVHKINIELAREVGKNHSQRAKIEKEQNENYKAKKDAEIECEKLGLKINSKNILKLRLFKEQKEFCAYSGEKIKISDLQDEKMLEIDHIYPYSRSFDDSYMNKVLVFTKQNQEKLNKTPFEAFGNDGVKWQKIEVLAKNLPEKKQKRILDKNYKDKEQKDFKDRNLNDTRYIARLVLNYTKDYLDFLPLSDDENTKLNDTQKGSKVHVEAKSGMLTSALRHTWGFSTKDRNNHLHHAIDAAIIAYANNSIVKAFSDFKKEQESNSAELYAKKISELDYKNKRKFFEPFSGFRQKVLDKIDEIFVSKPERKKPSGALHEETFRKEEEFYQSYGGKEGVLKALELGKIRKVNGKIVKNGDMFRVDIFKHKKTNKFYAVPIYTMDFALKVLPNKAVARSKKGEIKDWILMDENYEFCFSLYKDSLILIQTKDMQEPELVYFNAFTSSTVSLVVSKHDNKFETLSKNQKILFKNANEKEVIAKSIGIQNLKVFEKYIVSALGEVTKAEFRQREDFKK

SEQ ID NO: 142 - protein, 984 aa, Campylobacter jejuni
  source 1..984: note = Campylobacter jejuni subsp. jejuni LMG 23263
MARILAFDIGISSIGWAFSENDELKDCGVRIFTKAENPKTGESLALPRRLARSARKRLARRKARLNHLKHLIANEFKLNYEDYQSFDESLAKAYKGSLISPYELRFRALNELLSKQDFARVILHIVKRRGYDDIKNSDDKEKGAILKAIKQNEEKLANYQSVGEYLYKEYFQKFKENSKEFTNVRNKKESYERCIAQSFLKDELKLIFKKQREFGFSFSKKFEEEVLSVAFYKRALKDFSHLVGNCSFFTDEKRAPKNSPLAFMFVALTRIINLLNNLKNTEGILYTKDDLNTLLNEVLKNGTLTYKQTKKLLGLSDDYEFKGEKGTYFIEFKKYKEFIKALGDHSLSQDDLNEIAKDITLIKDEIKLKKALAKYDLNQNQIDSLSKLEFKDHLNISFKALKLITPLMLEGKKYDEACNELNLKVAINEDKKDFLPAFNETYYKDEVTNPVVLRAIKEYRKVLNALLKKYGKVHKINIELAREVGKNHSQRAKIEKEQNENYKAKKDAEFECEKLGLKINSKNILKLRLFKEQKEFCAYSGEKIKISDLQDEKMLEIDHIYPYSRSFDDSYMNKVLVFTKQNQEKLNKTPFEAFGNDSAKWQKIEVLAKNLPTKKQKRILDKNYKDKEQKDFKDRNLNDTRYIARLVLNYTKDYLDFLPLSDDENTKLNDTQKGSKVHVEAKSGMLTSALRHTWGFSTKDRNNHLHHAIDAVIIAYANNSIVKAFSDFKKEQESNSAELYAKKISELDYKNKRKFFEPFSGFRQKVLDKIDEIFVSKPERKKPSGALHEETFRKEEEFYQSYGGKEGVLKALELGKIRKVNGKIVKNGDMFRVDIFKHKKTNKFYAVPIYTMDFALKVLPNKAVARSKKGEIKDWILMDENYEFCFSLYKDSLILIQTKDMQEPEFVYYNAFTSSTVSLIVSKHDNKFETLSKNQKILFKNANEKEVIAKSIGIQNLKVFEKYIVSALGEVTKAEFRQREDFKK

SEQ ID NO: 143 - protein, 984 aa, Campylobacter jejuni
  source 1..984: note = Campylobacter jejuni subsp. jejuni LMG 23264
MARILAFDIGISSIGWAFSENDELKDCGVRIFTKVENPKTGESLALPRRLARSARKRLARRKARLNHLKHLIANEFKLNYEDYQSFDESLAKAYKGSLISPYELRFRALNELLSKQDFARVILHIAKRRGYDDIKNSDDKEKGAILKAIKQNEEKLANYQSVGEYLYKEYFQKFKENSKEFTNVRNKKESYERCIAQSFLKDELKLIFKKQREFGFSFSKKFEEEVLSVAFYKRALKDFSHLVGNCSFFTDEKRAPKNSPLAFMFVALTRIINLLNNLKNTEGILYTKDDLNALLNEVLKNGTLTYKQTKKLLGLSDDYEFKGEKGTYFIEFKKYKEFIKALGEHNLSQDDLNEIAKDITLIKDEIKLKKALAKYDLNQNQIDSLSKLEFKDHLNISFKALKLITPLMLEGKKYDEACNELNLKVAINEDKKDFLPAFNETYYKDEVTNPVVLRAIKEYRKVLNALLKKYGKVHKINIELAREVGKNHSQRAKIEKEQNENYKAKKDAELECEKLGLKINSKNILKLRLFKEQKEFCAYSGEKIKISDLQDEKMLEIDHIYPYSRSFDDSYMNKVLVFTKQNQEKLNKTPFEAFGNDSAKWQKIEVLAKNLPTKKQKRILDKNYKDKEQKDFKDRNLNDTRYIARLVLNYTKDYLDFLPLSNDENTKLNDTQKGSKVHVEAKSGMLTSALRHTWGFSTKDRNNHLHHAIDAVIIAYANNSIVKAFSDFKKEQESNSAELYAKKISELDYKNKRKFFEPFSGFRQKVLDKIDEIFVSKPERKKPSGALHEETFRKEEEFYQSYGGKEGVLKALELGKIRKVNGKIVKNGDMFRVDIFKHKKTNKFYAVPIYTMDFALKVLPNKAVARSKKGEIKDWILMDENYEFCFSLYKDSLILIQTKDMQEPEFVYYNAFTSSTVSLIVSKHDNKFETLSKNQKILFKNANEKEVIAKSIGIQNLKVFEKYIVSALGEVTKAEFRQREDFKK

SEQ ID NO: 144 - protein, 987 aa, Campylobacter jejuni
  source 1..987: note = Campylobacter jejuni subsp. jejuni LMG 23269
MARILAFDIGISSIGWAFSENDELKDCGVRIFTKAENPKTGESLALPRRLARSARKRLARRKARLNHLKHLIANEFKLNYEDYQSFDESLAKAYKGSLISPYELRFRALNELLSKQDFARVILHIAKRRGYDDIKNNGDEEKSEILKAIKQNEEKLVNYQSVGEYLYKEYFQKFKENSKEFINVRNKKESYERCIAQSFLKDELKLIFQKQREFGFSFSKKFEEEVLSVAFYKRALKDFSHLVGNCSFFTDEKRAPKNSPLAFMFVALTRIINLLNNLKNTEGILYTKDDLNTLLNEVLKNGTLTYKQTKKLLGLSDDYEFKGEKGTYFIEFKKYKEFIKALGEHNLSQDNLNEIAKDITLIKDEIKLKKALAKYDLNQNQIDSLSKLEFKDHLNISFKALKLITPLMLEGKKYDEAYNELNLKVAINEDKKDFLPAFNETYYKDEVTNPVVLRAIKEYRKVLNALLKKYGKVHKINIELAREVGKNHSQRAKIEKEQNENYKAKKDAELECEKLGLKINSKNILKLRLFKEQKEFCAYSGEKIKISDLQDEKMLEIDHIYPYSRSFDDSYMNKVLVFTKQNQEKLNQTPFEAFGNDSAKWQKIEVLAKNLPTKKQKRILDKNYKDKEQKDFKDRNLNDTRYIARLVLNYTKDYLDFLPLSDDENTKLNDTQKGSKVHVEAKSGMLTSALRHTWGFSAKDRNNHLHHAIDAVIIAYANNSIVKAFSDFKKEQESNSAELYAKKISELDYKNKRKFFEPFSGFRQKVLDKIDEIFVSKPERKKPSGALHEETFRKEEEFHQSYGGKEGVLKALELGKIRKVNGKIVKNGDMFRVDIFKHKKTNKFYAVPIYTMDFALKVLPNKAVVQGKDKKSGLIKDWILMDENYEFCFSLYKDSLILIQTKDMQEPELVYFNAFTSSTVSLIVSKHDNKFETLSKNQKILFKNANEKEVIAKSIGIQNLKVFEKYIVSALGEVTKAEFRQREDFKK

SEQ ID NO: 145 - protein, 987 aa, Campylobacter jejuni
  source 1..987: note = Campylobacter jejuni subsp. jejuni LMG 23357
MARILAFDIGISSIGWAFSENDELKDCGVRIFTKAENPKTGESLALPRCLARSARKRLARRKARLNHLKHLIANEFKLNYEDYQSFDESLAKAYKGSLISPYELRFRALNELLSKQDFARVILHIAKRRGYDDIKNNGDEEKGEILKAIKQNEEKLVSYQSVGEYLYKEYFQKFKENSKEFINVRNKKESYERCIAQSFLKDELKLIFQKQRKFGFSFSKKFEEEVLSVAFYKRALKDFSHLVGNCSFFTDEKRAPKNSPLAFMFVALTRIINLLNNLKNTEGILYTKDDLNTLLNEVLKNGTLTYKQTKKLLGLSNDYEFKGEKGTYFIEFQKYKEFVKALGEHNLSQDDLNEIAKDITLIKDEIKLKKALAKYDLNQNQIDSLSKLEFKDHLNISFKALKLITPLMLEGKKYDEACNELNLKVAINEDKKDFLPAFNETYYKDEVTNPVVLRAIKEYRKVLNALLKKYGKVHKINIELAREVGKNHSQRAKIEKEQNENYKAKKDAELECEKLGLKINSKNILKLRLFKEQKEFCVYSGEKIKISDLQDEKMLEIDHIYPYSRSFDDSYMNKVLVFTKQNQEKLNKTPFETFGNDRVKWQKIEVLAKNLPTKKQKRILDKNYKDKEQKDFKDRNLNDTRYIARLVLNYTKDYLDFLPLSDDENTKLNDTQKGSKVHVEAKSGMLTSTLRHTWGFSTKDRNNHLHHAIDAAIIAYANNSIVKAFSDFKKEQESNTAELYAKKISELDYKNKRKFFEPFSGFRQKLLDKIDEIFVSKPERKKPSGALHEETFRKEEEFYQSYGGKEGVLKALELGKIRKVNGKIVSNGDMFRVDIFKHKKTNKFYAVPIYTMDFALKVLPNKAVVQGKDKKSGLIKDWILMDENYEFCFSLYKDSLILIQTKDMQEPELVYYERLDSSNASLTVSKHDNKFETLSKNQKILFKNANEKEVIAKSIGIQNLKVFEKYIVSALGEVTKAEFRQREDFKK

SEQ ID NO: 146 - protein, 984 aa, Campylobacter jejuni
  source 1..984: note = Campylobacter jejuni subsp. jejuni NCTC 11168 = ATCC 700819
MARILAFDIGISSIGWAFSENDELKDCGVRIFTKVENPKTGESLALPRRLARSARKRLARRKARLNHLKHLIANEFKLNYEDYQSFDESLAKAYKGSLISPYELRFRALNELLSKQDFARVILHIAKRRGYDDIKNSDDKEKGAILKAIKQNEEKLANYQSVGEYLYKEYFQKFKENSKEFTNVRNKKESYERCIAQSFLKDELKLIFKKQREFGFSFSKKFEEEVLSVAFYKRALKDFSHLVGNCSFFTDEKRAPKNSPLAFMFVALTRIINLLNNLKNTEGILYTKDDLNALLNEVLKNGTLTYKQTKKLLGLSDDYEFKGEKGTYFIEFKKYKEFIKALGEHNLSQDDLNEIAKDITLIKDEIKLKKALAKYDLNQNQIDSLSKLEFKDHLNISFKALKLVTPLMLEGKKYDEACNELNLKVAINEDKKDFLPAFNETYYKDEVTNPVVLRAIKEYRKVLNALLKKYGKVHKINIELAREVGKNHSQRAKIEKEQNENYKAKKDAELECEKLGLKINSKNILKLRLFKEQKEFCAYSGEKIKISDLQDEKMLEIDHIYPYSRSFDDSYMNKVLVFTKQNQEKLNQTPFEAFGNDSAKWQKIEVLAKNLPTKKQKRILDKNYKDKEQKNFKDRNLNDTRYIARLVLNYTKDYLDFLPLSDDENTKLNDTQKGSKVHVEAKSGMLTSALRHTWGFSAKDRNNHLHHAIDAVIIAYANNSIVKAFSDFKKEQESNSAELYAKKISELDYKNKRKFFEPFSGFRQKVLDKIDEIFVSKPERKKPSGALHEETFRKEEEFYQSYGGKEGVLKALELGKIRKVNGKIVKNGDMFRVDIFKHKKTNKFYAVPIYTMDFALKVLPNKAVARSKKGEIKDWILMDENYEFCFSLYKDSLILIQTKDMQEPEFVYYNAFTSSTVSLIVSKHDNKFETLSKNQKILFKNANEKEVIAKSIGIQNLKVFEKYIVSALGEVTKAEFRQREDFKK

SEQ ID NO: 147 - protein, 983 aa, Campylobacter jejuni
  source 1..983: note = Campylobacter jejuni subsp. jejuni NW
MARILAFDIGISSIGWAFSENDELKDCGVRIFTKAENPKTGESLALPRRLARSARKRLARRKARLNHLKHLIANEFKLNYEDYQSFDESLAKAYKGSLISPYELRFRALNELLSKQDFARVILHIAKRRGYDDIKNSDDKEKGAILKAIKQNEEKLANYQSVGEYLYKEYFQKFKENSKEFTNVRNKKESYERCIAQSFLKDELKLIFKKQREFGFSFSKKFEEEVLSVAFYKRALKDFSHLVGNCSFFTDEKRAPKNSPLAFMFVALTRIINLLNNLKNTEGILYTKDDLNALLNEVLKNGTLTYKQTKKLLGLSDDYEFKGEKGTYFIEFKKYKEFIKALGEHNLSQDDLNEIAKDITLIKDEIKLKKALAKYDLNQNQIDSLSKLEFKDHLNISFKALKLVTPLMLEGKKYDEACNELNLKVAINEDKKDFLPAFNETYYKDEVTNPVVLRAIKEYRKVLNALLKKYGKVHKINIELAREVGKNHSQRAKIEKEQNENYKAKKDAELECEKLGLKINSKNILKLRLFKEQKEFCAYSGEKIKISDLQDEKMLEIDHIYPYSRSFDDSYMNKVLVFTKQNQEKLNQTPFEAFGNDSAKWQKIEVLAKNLPTKKQKRILDKNYKDKEQKNFKDRNLNDTRYIARLVLNYTKDYLDFLPLSDDENTKLNDTQKGSKVHVEAKSGMLTSALRHTWGFSAKDRNNHLHHAIDAVIIAYANNSIVKAFSDFKKEQESNSAELYAKKISELDYKNKRKFFEPFSGFRQKVLDKIDEIFVSKPERKKPSGALHEETFRKEEFYQSYGGKEGVLKALELGKIRKVNGKIVKNGDMFRVDIFKHKKTNKFYAVPIYTMDFALKVLPNKAVARSKKGEIKDWILMDENYEFCFSLYKDSLILIQTKDMQEPEFVYYNAFTSSTVSLIVSKHDNKFETLSKNQKILFKNANEKEVIAKSIGIQNLKVFEKYIVSALGEVTKAEFRQREDFKK

SEQ ID NO: 148 - protein, 987 aa, Campylobacter jejuni
MARILAFDIGISSIGWAFSENDELKDCGVRIFTKAENPKTGESLALPRRLARSARKRLARRKARLNHLKHLIANEFKLNYEDYQSFDESLAKAYKGSLISPYELRFRALNELLSKQDFARVILHIAKRRGYDDIKNNGDEEKSEILKAIKQNEEKLVNYQSVGEYLYKEYFQKFKENSKEFINVRNKKESYERCIAQSFLKDELKLIFQKQREFGFSFSKKFEEEVLSVAFYKRALKDFSHLVGNCSFFTDEKRAPKNSPLAFMFVALTRIINLLNNLKNTEGILYTKDDLNTLLNEVLKNGTLTYKQTKKLLGLSDDYEFKGEKGTYFIEFKKYKEFIKALGEHNLSQDNLNEIAKDITLIKDEIKLKKALAKYDLNQNQIDSLSKLEFKDHLNISFKALKLITPLMLEGKKYDEAYNELNLKVAINEDKKDFLPAFNETYYKDEVTNPVVLRAIKEYRKVLNALLKKYGKVHKINIELAREVGKNHSQRAKIEKEQNENYKAKKDAELECEKLGLKINSKNILKLRLFKEQKEFCAYSGEKIKISDLQDEKMLEIDHIYPYSRSFDDSYMNKVLVFTKQNQEKLNQTPFEAFGNDSAKWQKIEVLAKNLPTKKQKRILDKNYKDKEQKDFKDRNLNDTRYIARLVLNYTKDYLDFLPLSDDENTKLNDTQKGSKVHVEAKSGMLTSALRHTWGFSAKDRNNHLHHAIDAVIIAYANNSIVKAFSDFKKEQESNSAELYAKKISELDYKNKRKFFEPFSGFRQKVLDKIDEIFVSKPERKKPSGALHEETFRKEEEFYQSYGGKEGVLKALELGKIRKVNGKIVKNGDMFRVDIFKHKKTNKFYPVPIYTMDFALKVLPNKAVVQGKDKKSGLIKDWILMDENYEFCFSLYKDSLILIQTKDMQEPELVYFNAFTSSTVSLIVSKHDNKFETLSKNQKILFKNANEKEVIAKSIGIQNLKVFEKYIVSALGEVTKAEFRQREDFKK

SEQ ID NO: 149 - protein, 1003 aa, Campylobacter lari
MRILGFDIGINSIGWAFVENDELKDCGVRIFTKAENPKNKESLALPRRNARSSRRRLKRRKARLIAIKRILAKELKLNYKDYVAADGELPKAYEGSLASVYELRYKALTQNLETKDLARVILHIAKHRGYMNKNEKKSNDAKKGKILSALKNNALKLENYQSVGEYFYKEFFQKYKKNTKNFIKIRNTKDNYNNCVLSSDLEKELKLILEKQKEFGYNYSEDFINEILKVAFFQRPLKDFSHLVGACTFFEEEKRACKNSYSAWEFVALTKIINEIKSLEKISGEIVPTQTINEVLNLILDKGSITYKKFRSCINLHESISFKSLKYDKENAENAKLIDFRKLVEFKKALGVHSLSRQELDQISTHITLIKDNVKLKTVLEKYNLSNEQINNLLEIEFNDYINLSFKALGMILPLMREGKRYDEACEIANLKPKTVDEKKDFLPAFCDSIFAHELSNPVVNRAISEYRKVLNALLKKYGKVHKIHLELARDVGLSKKAREKIEKEQKENQAVNAWALKECENIGLKASAKNILKLKLWKEQKEICIYSGNKISIEHLKDEKALEVDHIYPYSRSFDDSFINKVLVFTKENQEKLNKTPFEAFGKNIEKWSKIQTLAQNLPYKKKNKILDENFKDKQQEDFISRNLNDTRYIATLIAKYTKEYLNFLLLSENENANLKSGEKGSKIHVQTISGMLTSVLRHTWGFDKKDRNNHLHHALDAIIVAYSTNSIIKAFSDFRKNQELLKARFYAKELTSDNYKHQVKFFEPFKSFREKILSKIDEIFVSKPPRKRARRALHKDTFHSENKIIDKCSYNSKEGLQIALSCGRVRKIGTKYVENDTIVRVDIFKKQNKFYAIPIYAMDFALGILPNKIVITGKDKNNNPKQWQTIDESYEFCFSLYKNDLILLQKKNMQEPEFAYYNDFSISTSSICVEKHDNKFENLTSNQKLLFSNAKEGSVKVESLGIQNLKVFEKYIITPLGDKIKADFQPRENISLKTSKKYGLR

SEQ ID NO: 150 - protein, 1430 aa, Capnocytophaga canimorsus
MKHILGLDLGTNSIGWAVVKEAQNDNEQSEIVDVGVRVNPLTTDEKTNFEKGKPISTNADRTLKRSARRNLQRYKLRRKELIELLKEHQLISTDTILTENGKGTTFQTLELRAKSAKEKISLEELARVFLTINKKRGYKSSRKAKNEDEGQLIDGMEIAKRLYEENLTTGQLSLQLLKEGKKSLPDYYRSDLQFELDKVWNFQKQFHSHILTDEFYAQLKGKGQRATSALFLAKYQIYTAENKGSREDKKLQAYQWRVDALSKELTREQLAFVITEINNNLNNSSGYLGAISDRSKELYFNNETVGEYLWKQIAANPHTSLKNQVFYRQDYLDEFEQIWKTQSAFYPEILTDELKKELRDVVIFYQRKLKSQKSLVSFCEFENKEIEIKKEDGTSTKKVIGLKVAPKSSPLFQEFKIWQNLNNVLIRKKGSKTKKVDKNQQAVLFEEEKTIFELDLEAKQALFNELNLKGNLKAYYCLEILGYSPKEWEMNYSVLEGNRTNKALYEAYLKITDLEGYDAKNHLKVKLNKDEVELDDLKVPASEIKDMVQAIFKEAGINTDILHFNAELDGKDFENQASYQLWHLLYSYEGDDSKSGNELLYKLLETKFGFKKEYAQILANVSLSDDYGSLSTKAMRKIHPYIKENKFSTACELAGYRHSKHSLTKEENDNRVLKDSLEVLKKNSLRQPVVEKILNQMINLVNALLKKYRTENPNFKFDEIRIELARELKKNAEERANMTVNINKAKTEHEKIIKILKNEFGLPNPTRNDIIRYRLYEELKANGYKDLYTNEYIEKQDLFTKNIDIEHIIPKSRVFDDSFSNKTLSFRKTNLDKGERTAFDYIESKFGADKLEEYVARVEDLYKNNIISKAKYQKLLKKESEIGDGFVERDLRETQYIAKKAKEILLQITPNVLSTSGGITDRLREDWDLINVMKELNLPKYRALGLTQMEDRKYGQQVEVIIDWTKRNDHRHHAMDALTVAFTKHNHIQYLNYLNARKNEKHREHSNIMGIQQLETIKVTDKNGNEKRVFKAPMPNFRQVTKAFLENVLISHKAKNKVVTKNKNKVAGSNKVQEVLTPRGQLHKETVYGKYQYYVQKEEKIGGKFDLETIKKVANPLYQSLLKKRLEENGGDPKKAFTGKNSLAKNPIYLDDAQTEQLPEKVKLVWLENSFSIRKDITPENFKDEKLIDKILDEGVKRILKERLQSFGNDAKKAFSDLDKNPIWLNKEKGIAIKRVAISGVANAEPLHTKKDHLGKEILDKEGKSIPVDFISTGNNHHVAVYRDEKGNLQEKVVSVFEAVVRANQGLPIIDKTYNQHLGWEFLFTMKQNEMFVFSNESTGFNPNDIDLLDPKNKKIISPNLFRVQKFSKLQYGNSFVREFVFRHHLETTVEDRKELQGITYKQMKNSAFFNDIIKVRINHLGGIVSVGEY

SEQ ID NO: 151 - protein, 1436 aa, Capnocytophaga gingivalis
  source 1..1436: note = Capnocytophaga gingivalis ATCC 33624
MKYIKYILGLDIGSNSIGWALIQLDLLQKTKRIIAAGSRIIPMDQKVLSDFGKGITISPTAQRTSYRNARHCRERHLLRRERLHRVLHILGFLPTHYDKQIDFSKRYGKFVDNTEPKIAYNEGKFLFMDSFQEMLSDFKSHQPDLFYTKKNGEESKIPYDWTIYYLRKKALSQKISKEELAWIILNFNQKRGYYQLREEEGNKENDFEIISSKIISVIKKDKDKKYNKYWYDIILENGLVYQAAFYNDFVYNWINQDREFIIERTSLKNGAEKVKLSYLPTFDEIDKMDKKEQDKYYKKIKIKTENSIGNKTVGCYIYDHILQNPNEKIKGKLVRTIERKYYKEELKAILEKQIALQPELFTDQLLADCIRELYSKNEAQQRNLAARDFVHLLVEDIIFYQRPLRRQKSTLANCSLESRSYIDKDSHTRKEAPLKVCPKSNPYYQEFRVLQWLQNLKIYEIDSDQEVTHQFIKTLEDKQQLFEFLMAQKEIDCEELLKYFLNQTYPNAKEKALKSELKKWKDTYRWNYVYDIGEKSSKKYPMNETRYELKRHLEKVANLPDDFLSSEVEYLLWHLIYSVKDKVAYEKGLKKFAQKHHLDKDSFVESFKKFNPYPSEYGSFSEKAIRKLLPLMRFGAHWDFNHIDKNTQKRIEDLITGVENEEIRTILREKAEKYQLEKETDFQDLPLWLAQYIVYNRHAEASSLEKWTSVNDLETYLNEFKQHSLRNPIVEQVVMETLRVVRDIWQQYGQGQASFFNEIHIELGRELKKTAKEREKLSKQNQKNEDINLSIKEKLKELEKYNTRAYSITHQEKYKLWLEQKHISPYTGQIISPENLFTDNYEIEHIIPQSRFFDDSLSNKVVCESIVNKAPYKDRQLGLEFIKNQGGRIVKELSKENKTIKIFTEEQYRTFIKEHYSNNPEKTKKLLLEEIPEKMVARQMNDTCYISKFISEILSKIVRSDEQDEGVHSKNVILCTGKITSILRQDWGLNDIWDNLILPRFERMNNLLQKEKFTIYSIEKQKKIPVVPINDQFKSFQKKRIDHRHHAMDAIIIACTTREHINYINNQHALEKEKDKKEKQEERDKLREKLCIKKYNNRSEGNYSWIFKKPWDTFTQEVRVALEDIVVSFKQNLRVINKATNYYERWVEENGKYIKKMVKQEGTNWAIRKPLHEETISGKIYLDREKITKNDILTATRKTVDSSFDDKRIKKITDTGIQKILLNYLKYKGSPEIAFSPEGLEELNKNLSIYNDGKPHKPIYKVRIYEKGSGRFALGEKGRKYKKYVQGASNLYFGIYQGAKRSFATIPLNEVIERQKQGLPSVPEYNEKGDLLLFSLSPNDLVYVPIEGEIIENIDFRNLSKEQKERIYNVNDFSSTCYFTPNRIAKAIFPKEVDLQRKGDKLSGSYDTKTASLEGIQIKEVCIKLKVDRLGNISKA

SEQ ID NO: 152 - protein, 1426 aa, Capnocytophaga ochracea
MKNILGLDLGTTSIGFAHIVEDENKEKSEIKELGVRIVSLTTDEQSDFEKGKSITTNANRTLKHGARLNLDRYQQRRKYLIDLLQKANLITPSSILAENGKNTTHSTWQLRAKAVTERIEKEEFARILLAINKKRGYKSSRKAKTEDEGQAIDGMAIAKRLYDENLTPGQLSLQLLQQNKKLLPDFYRSDLQKEFDLVWNFQKQFYPDILTDIFYKELQGKGKDATSKAFSKRYHFDTTENKGSKESVRLQAYQWRAEAISKQLSKEEVAYVLTEINNNLNNASGYLGAISDRSKELYFNRQTVGQYLYAKLQENRHNSLKNKVFYRQDYLDEFERIWETQASFHKELTDELKKQIRDVVIFYQRKPKSQKGLISFCEFESKEIEIEKDGKTITKNIGARVVPKSSPLFQEFKIWQILNNVICKRKGIRKKKISAKTTQLDLLNESSQTIFSLDMECKQLLFDELNLKGDLKSDKVLKLLGYSPQEWEINYNQLEGNRTQKALYEAYLKIVEMEAHDVKDILQIKSAKDDWSLDESPLSASEIREKVKAIFQTLGICTKILYFDPLLPVKEFEEQDSYQLWHLLYSYESDDSTSGNETLYRILEKKYAFKREHARILANVALQDDYGSLSTKAIRKIYPNIKENQYSTACEKAGYKHSKLSLTTEELEARELKNIIPLLKKNALRNPVVEKILNQMINVVNALIEKNSERDAEGKITKYFHFDEIRIELARELKKNAQKRYEMTQNINKAKLEHQKISEILQKEFGIKNPTKSDIIRYRLYQELEHNGYKELYTNAPIARDMLFSKNIEIEHIVPKARVFDDSFSNKTLTFHRINSDKGEYTAFDYITSLNSEEELNQYLTRVENAYKTKSISPTKYKNLLKKASEIGDDFINRDLRDTQYIAKKAKEILFQVTKNVLSTSGSITDRLREDWGLVDVMKELNMPKYQSLGLTEVEERKDGNKVTVIKNWTKRNDHRHHAMDALTVAFTKPSYIQYLNHLNARKDENNKNYSVILAIEEKETIKVPTNNGKNKRVFIEPIPNFRQVAKKHLEEIFISHKAKNKVVTKNTNKPAGTDKQQITLTPRGQLHKETIYGKYQYYINKEEKIGVKFDERTIAKVSNPVYREALLKRLQANDNDPKKAFAGKNALSKNPIYLDESKTKTLPEKVNLTYLEEDFSIRKDISPDNFKDLKSIEKVIDQGVKRILIKRLQAYDNDPKKAFVDLEKNPIWLNKEKGIAIKRVTISGVNNAQPLHIGKDHLGKTTLNKEGKEIPVDYVSTGNNHHVAIYRDKEGNLQEQIVSFFDAVVRAQQGIPIIDKTYKQAEGWQFLFTMKQNEMFVFPNATTGFNPAEIDLLDPKNKKLISPNLFRVQKIATKDYFFRHHLETNVETDNILKNVTWKREGLSGLKDIVKVRINHLGDIVSIGEY

SEQ ID NO: 153 - protein, 1437 aa, Capnocytophaga sp.
  source 1..1437: note = Capnocytophaga sp. CM59
MKYIKYILGLDIGSNSIGWALIQLDLLQKTKRIIATGSRIIPMDQKVLSDFGKGITISPTAQRTSYRNARHCRERHLLRRERLHRVLHILGFLPTHYDKQIDFSKRYGKFVDNTEPKIAYNERKFLFMDSFQEMLADFKIHQPDLFYTKKNGEESKIPYDWTIYYLRKKALSRKISKEELAWIILNFNQKRGYYQLREEEEENKENDFEIISSKIISVIKKDKDKKYNKYWYDIILENGLVYQAAFYNDFVYNWINQDREFIIERISLKNGTEKVKLSYLPTFDEIDKMDKKEQDKYYKKIKIKTENSIGNKTVGCYIYDHILQNPNEKIKGKLVRTIERKYYKEELKAILEKQVALQPELFTDQLFADCIRELYSKNEAQQRNLAARDFVHLFVEDIIFYQRSLRRQKSTLANCSLESRSYIDKDSHTRKEAPLKVCPKSNPYYQEFRVLQWLQNLKIYEIDTDQEVTHEFIKTLEDKQQFFDFLMNQKEIDCEELLKYFLNQTYPNAREKALKSELKKWKDTYRWNYVYDIGEKSSKKYPMNETRYELKRHLEKVANLPDDFLSSEVEYLLWHLIYSVKDKVAYEKGLKTFAQKHHLDKDSFVESFKKFKPYPSEYGSFSEKAIRKLLPLMRFGSYWDFNHIDKNTQKRIEDLITGVENEEIRTILREKAEKYQLEKETDFQDLPLWLAQYIVYNRHAEASSLEKWTSVNDLETYLNEFKQYSLRNPIVEQVVMETLRVVRDIWQQYGQGQASFFDEIHIELGRELKKTAKEREKLSKQNQKNEDINLSIKEKLKELEKYNTRAYSITHQEKYKLWLEQKHISPYTGQIISPENLFTDNYEIEHIIPQSRFFDDSLSNKVVCESIVNKAPYKDRQLGLEFIKNQGGRIVKELSTENKTIKIFTEEQYRTFIKEHYSNNPEKTKKLLLEEIPEKMVARQMNDTCYISKFISEILSKIVRSDEQDEGVHSKNVILCTGKITSALKQDWGVNDVWNDLILPRFERMNDLTQSTLFTTYNEKYQKYLPTVPMEYSNGFQKKRIDHRHHAMDAIIIACATREHINYINNQHALEKGKDKKEKQKEHDKLREKLCIKKDNKGSEENYSWIFKKPWDTFTQEVQAALEGIVVSFKQNLRVINKATNYYERWVEENGKYIKKMVKQEGTNWAIRKPLHEETISGKIYLDREEITKNDILTATRKTVDSSFDEKRIKKITDTGIQKILLNYLKYKGSPEIAFSPEGLEELNKNLSIYNDGKPHKPIYKVRIYEKGSGRFALGEKGRKYKKYVQGAPNLYFGIYQGANKRSFATIPLNEVIERQKQGRPSIPEYNEKGDPLLFSLSPNDLVYVPVEGEIIEDIDFQNLSKEQKERIYNVNDFSSTCYFTPNRIAKAIFPKEVDLQRKGDKLPGSYDTKTASLEGIQIKEVCIKLKIDRLGNISKA

SEQ ID NO: 154 - protein, 1471 aa, Capnocytophaga sp.
  source 1..1471: note = Capnocytophaga sp. oral taxon 324 str. F0483
MCKYFYIKNFITFVLSKSIIPMKHILGLDLGSNSIGWAFVQQDFENKQGKIIATGSRIIPMDQGILGDFERGNTVSQTAERTTYRSTRRLRERHLLRRERLHRVLHILGFLPPHYDAQIDFTKRYGKFIDNAEPKIAYNNGNFIFMNSFNEMIEDFKKHQPQLFYKKSNGEESKIPYDWTIYYLRKKALSQKITQQELAWLILHFNQKRGYYQLRGEEETENPNKEVAFHSLKVVDVEAEAPNKKGEIWYTIRLENGWIYRRTSKIPLDDWKGKTRDFIVTTDLNDDGTIKVDKEGKEKRSFRAPDENDWNLLKKKTEHDIDFSGKTVGAYIYDHLLQNPNQKIKGKLVRTIERKYYKDELKAILAKQIALQPELFTETLLADCIRELYRKNETQQQNLLSKDFLHLFVEDIIFYQRPLRSKKSTIANCTLEKRSYIDKETNERKDAPIKVCAKSNPYYQEFRVLQWLQNLRIYEIETDREVTAEFIETPQDCEALFNFLMSQKEIDNKGLLKYFLFAKNPQIKDKAAKSELKKWLTTYRWNYVYDAADNSSKKYPMNETGYELQRYLQKVEGLPANFLTFDITYQLWHLLYSVKDKVEFEKALKKFAKKKQLDKTSFVDSFKNFKPYPNEYGSFSEKAIKKLLPLMRFGNHWDFNRIDVSTQKRIDDLINGVANEDIRTIIREKAEKYQLNSETCFQDLPLWLAQYVVYNRHAEATDIEKWTSVSDLEAYLEDFKQHSLRNPIVEQVVTETLRVVRDIWQQYGGGQANFFDEIHIELGRELKKTAEERKQLSDKNQENESTNLRIKKLLAELKEDASIQNVRPYSLVQQELLKIYEEGVFSATDEVEEDIQKIRKKAEPSKADLQRYKLWLEQKYKSPYTGEVISLTKLFTEEYEIEHIIPQSRYYDDSLSNKVICESAVNKLKTNQLGLEFIQNHHGEKVRITANKEVTIFTEEQYKEFVKKHYANNSAKQQKLLLNEIPEKMVARQLNDTRYISKYISEILSKIVRSDEKDEGVNSKNIIPCTGKITTALKQDWGLNDVWNKLILPRFERMNQLTQTQLFTSYNDRLQKNLPTVPIEYSQGFQKKRIDHRHHAMDALVIACATREHINYMNNQHALDKSKDKKEKQQSRIDLRTILCEKKNNNWQFKKPWSTFTQEAKEALEHIVVSFKQNLRVINKATNYYEKWEEKNGVLVKKKVKQEGTNWAIRKPLHKETVSGKIVLDRKIGKDKILTATRKAVDITFTEKIISSITDTGIQKILLNYLKYKGSPEVAFSTEGLEELNKNIAQYNNGKKHQPIYKVRIFEEGSKFPLGETGAKATKYVEAAKGTNLFFGVYQGKGKRTYATIPLNEVIERQKQGLPSVPERNEKGEPLLFSLSPNDLVYVPMEGEIAETIDFNNLSKEQKERIYKTVSFTGNQCFFVQEAVATPIVNKMEYSPLNKMERDILGTMIKEVCIKLKVDRLGNITKA

SEQ ID NO: 155 - protein, 1450 aa, Capnocytophaga sp.
  source 1..1450: note = Capnocytophaga sp. oral taxon 326 str. F0382
MKRILGLDLGSNSIGWAFVEQDFENKQGKIIATGSRIIPMDQGILGDFEKGNTVSQTAERTTYRSMRRLRERHLLRRERLHRVLHILGFLPPHYDAQIDFTKRYGKFIDNAEPKIAYNNGNFIFMNSFNEMIEDFKKYQPQLFYKKSNGEESKIPYDWTIYYLRKKVLSQKITQQELAWLILHFNQKRGYYQLRGEEETENPNKEVAFHSLKVVDVEAEAPNKKGEIWYTIRLENGWIYRRTSKIPLDDWKGKTRDFIVTTDLNDDGTIKVDKEGKEKRSFRAPDENDWNLLKKKTEHDIDFSGKTVGAYIYDHLLQNPNQKIKGKLVRTIERKYYKDELKAILAKQIALQPELFTETLLADCIRELYRKNETQQQNLLSKDFLHLFVEDIIFYQRPLRSKKSTIANCTLEKRSYIDKETNERKDTFIKVCAKSNPYYQEFRVLQWLQNLRIYEIETDREVTAEFIETAEDYEALFNFLMSQKEIDNEGLLKYFLFAKNPQIKDKVAKSELKKWLTTYRWNYVYDAADNSSKKYPMNETGYDLQRYLQKVEGLPANFLTFDITYRLWHLLYSVKDKVEFEKALKKFAQEYQLDEASFVDSFKNFKPYPNEYGSFSEKAIKKLLPLMRFGNHWDFNRIDVSTQKRIDDLINGVANDEIRTIIREKAEKYQLNSESCFQGLPLWLAQYVVYNRHAEATDIEKWTSVSDLETYLEDFKQHSLRNPIVEQVVTETLRVVRDIWQQYGGGQANFFDEIHIELGRELKKTAEERKQLSNRNQENENTNLRIKKLLAELKEDASIQNVRPYSPVQQELLKIYEEGVFSSTDQVEEDIQKIRKKAEPTTPEIQRYKLWLEQKYKSPYTGEVISLTKLFTEEYEIEHIIPQSRYYDDSLSNKVICESAVNKLKTNQLGLEFIQNHHGEKVRITGNKEVTIFTEEQYKEFVKKHYANNSAKQQKLLLNEIPEKMVARQLNDTRYISKYISEILSKIVRSDEKDEGVNSKNVIPCTGKITTALKQDWGLNDVWNELILPRFERMNQLTQTQLFTSYNDRFQKNLPTVPIEYSQGFQKKRIDHRHHAMDALVIACATREHINYMNNQHALDKNKDKKEKQQSRIDLRTILCEKKNNNWQFKKPWSTFTQETKEALEHIVVSFKQNLRVINKATNYYEKWEEKNGVLVKKKVKQEGTNWAIRKPLHKETVSGKIVLDRKIGKDKILTATRKEVDITFTEKIISSITDTGIQKILLNYLNYKGSPEVAFSAEGLEELNKNIAQYNDGKKHQPIYKVRIFEEGSKFPLGETGAKATKFVEAAKGTNLFFGVYQGKEKRSYATIPLNEVIERQKQGLPSVPERNEKGEPLLFSLSPNDLVYVPMEGEIAETIDFNNLSKEQKERIYKTVSFTGNQCFFVQEAVATPIVNKMEYSPLNKMERDILGTMIKEVCIKLKVDRLGNITKA

SEQ ID NO: 156 - protein, 1435 aa, Capnocytophaga sp.
  source 1..1435: note = Capnocytophaga sp. oral taxon 329 str. F0087
MKNILGLDLGTTSIGFAHIVEDENKEKSEIKELGVRIVSLATDEQSDFEKGKSISTNANRTLKHGARLNLDRYQQRRKFLIDLLQKANLITSASILAENGKNTTHSTWQLRAKAVTERIEKEEFARVLLAINKKRGYKNSRKTKTEDEGQAIDGMAIAKCLYDENLTPGQLSLQLLQQNKKLLPDFYRSDLQKEFDLVWNLQKQFYPDILTDSFYKELQGKGKDATSKAFSKRYHFDTAENKGSKESVRLQAYQWRAEAISKQLSKEEVAYVLTEINNNLNNSSGYLGAISDRSKELYFNRQTVGQYLYAQLQENRHNSLKNKVFYRQDYLDEFERIWETQASFHKELTDELKKQIRDVVIFYQRKLKSQKGLVSFCEFESKEIEIEKDGKAITKSIGARVVPKSSPLFQEFKIWQILNNVTCKRKGIRKKKSSAKSTELDLFNEPSQSIFSLDMECKQLLFDELNLKGDLKSDKVLKLLGYSPQEWEINYNQLEGNRTQKSLYEAYLKIIEIEGYEVKDILQIKSTKDDWSLDESPLSASEIRERVKVIFQTLGICTKILYFDPLLPVKEFEQQYSYQLWHLLYSYESDDSTSGNETLYRILEKKYAFKREHATILANVALQDDYGSLSTKAIRKIYPYIKENQYSTACELAGYKHSKLSLTTEELEARELKNIIPLLKKNALRNPVVEKILNQMINVVNALIEKNSERDAEGKITKYFHFDEIRIELARELKKNAQERYEMTQNINKAKLEHQKISEKLQKQFGIKNPTKSDIIRYRLYQELEHNGYKELYTNTYIAPDVLFSKNIDIEHIVPKARVFDDSFSNKTLAFKEFNIKKGESTAFDYITSLNCEGELNQYLTRVENAYKTKSISLTKYKNLLKKASEIGDGFINRDLRDTQYIAKKAKEILFQVTKNVLSTSGSITDRLREDWGLVDVMKELNMPKYQSLGLTEVEERKDGNKVTVIKDWTKRNDHRHHAMDALTVAFTKPSYIQYLNHLNARKDENNKNYSVILAIEKKETIKVPINNGKNKRVFIEPILNFRQVAKKHLEEIFISHKAKNKVVTKNINKPAGTDKQQITLTPRGQLHKETIYGKYQYYVNKEEKVGVKFDERTITKVSNPLYREALLKRLQANDNDPKKAFAGKNALSKNPIYLDEAKTKTLPEKVNLTYLEEDFSIRKDISPDNFKDLKSIEKVIDQGVKRILIKRLQAYDNDPKKAFVDLEKNPIWLNKEKGIAIKRVTISGVSNAQPLHIGKDHLGKTTLNKEGKEVPVDYVSTGNNHHVAIYRDKEGNLQEQIVSFFEAVVRAQQGLPIIDKNYKQAEGWQFMFTMKQNEMFVFPNEATGFNPAEIDLLDPKNKKLISPNLFRVQTISIVKYGNSVVRDFKFRHHLETTLQDDKILQGITFQQIKSLEPLRNIVKVRINHLGDIVNIGEY

SEQ ID NO: 157 - protein, 1426 aa, Capnocytophaga sp.
  source 1..1426: note = Capnocytophaga sp. oral taxon 335 str. F0486
MKNILGLDLGTTSIGFTHIVEDENKEKSEIKELGVRIVSLTTDEQSDFEKGKSISTNANRTLKHGARLNLDRYQQRRKFLIDLLQKANLITSSSILAENGKNTTHSTWQLRAKAVTERIEKEEFARVLLAINKKRGYKSSRKAKTEDEGQAIDGMAIAKRLYDENLTPGQLSLQLLQQNKKLLPDFYRSDLQKEFDLVWNFQKQFYPDILTDSFYKELQGKGKDATSKAFSKRYHFDTAENKGSRESVRLQAYQWRAEAISKQLSKEEVAYVLTEINNNLNNASGYLGAISDRSKELYFNRQTVGQYLYAQLQENKHNSLKNKVFYRQDYLDEFERIWETQASFHKELTEELKKQIRDVVIFYQRKLKSQKGLISFCEFESKEIEIEKDGKTITKSIGARVVPKSSPLFQEFKIWQILNNVTCKRKGIRKKKSSAKSTELDLFNEPSQTIFSLDMECKQLLFEELNLKGDLKSDKVLKLLGYSPQEWEINYNQLEGNRTQKALYEAYLKIVEMEAHDVKDILQIKSTKDDWALEESPLSASEIRERVKAIFQTLGICTKILYFDPLLPVKEFEEQDSYQLWHLLYSYESDDSTSGNETLYRILEKKYAFKREHATILANVTLQDDYGSLSTKAIRKIYPYIKENQYSTACEKAGYKHSKLSLTTEELEARELKNIIPLLKKNALRNPVVEKILNQMINVVNALIEKNSERDAEGKITKYFHFDEIRIELARELKKNAQERYEMTQNINKAKLEHQKISGILQKEFGIKNPTKSDITRYRLYQELAHNGYNDLYTNTYIPKELLFSKNIDIEHIVSKARVFDDSFSNKTLAFREFNIKKGESTAFDYITSLNNEEELNQYLNRVENAYKTKNISPAKYKNLLKKASEIGDGFINRDLRDTQYIAKKAKEILFQVTKNVLSTSGSITDRLREDWGLVDVMKELNMPKYQSLGLTEVEERKEGNKVTVIKNWTKRNDHRHHAMDALTVAFTKPSYIQYLNHLNARKDKNNKNYSVILAIEEKETIKVPTNNGKNKRVFIEPIPNFRQVAKKHLEEIFISHKAKNKVVTKNTNKPAGTDKQQITLTPRGQLHKETVYGKYQYYVNKEEKIGVKFDKETIAKVSNPVYREALLKRLQANDNDPKKAFAGKNALSKNPIYLDEAKTKTLTEKVNLTYLEEDFSIRKDISPDNFKDLKSIEKVIDQGVKRILIKRLQDYDNDPKKAFVDLEKNPIWLNKEKGIAIKRVTISGVNNAQPLHIGKDHLGKTTLNKEGKEIPVDYVSTGNNHHVAIYRDKEGNLQEQIVSFFEAVVGAQQGLPIVDKTYKQAEGWQFLFTMKQNEMFVFPNEATGFNPAEIDLLDPKNKKQISPNLFRVQKIATKDYFFRHHLETNVDTDNVLKNTTWKREGLSGLKDIVKVRINHLGDIVSIGEY

SEQ ID NO: 158 - protein, 1432 aa, Capnocytophaga sp.
  source 1..1432: note = Capnocytophaga sp. oral taxon 380 str. F0488
MKNILGLDLGTTSIGFAHIVEDENKEKSEIKELGVRIVSLTTDEQSDFEKGKSITTNANRTLKHGARLNLDRYQQRRKYLIDLLHKANLITPSSILAENGKNTTHSTWQLRAKAVTERIEKEEFARILLAINKKRGYKSSRKAKTEDEGQAIDGMAIAKRLYDENLTPGQLSLQLLQQNKKLLPDFYRSDLQKEFDLVWNFQKQFYPDILTDIFYKELQGKGKDATSKAFSKRYHFDTAENKGSKESVRLQAYQWRAEAVSKQLSKEEVAYVLTEINNNLNNASGYLGAISDRSKELYFNRQTVGQYLYAQLQENRHNSLKNKVFYRQDYLDEFERIWETQALFHKELTDELKKQIRDVVIFYQRKPKSQKGLISFCEFESKEIEIEKDGKTITKNIGARVVPKSSPLFQEFKIWQILNNVICKRKGIRKKKISAKTTQLDLLNESSQTIFSLDMECKQLLFDELNLKGDLKSDKVLKLLGYSPQEWEINYNQLEGNRTQKALYEAYLKIVEMEAHDVKDILQIKSTKDDWSLDESPLSASEIRESVKAIFQALGICTKILYFDPLLPVKDFEEQDSYQLWHLLYSYESDDSTSGNETLYRILEKKYAFKREHARILANVALQDDYGSLSTKAIRKIYPNIKENQYSTACEMAGYKHSKLSLTTEELEARELKNIIPLLKKNALRNPVVEKILNQMINVVNALIEKNSERDAEGKITKYFHFDEIRIELARELKKNAQKRYEMTQNINKAKSEHQKISEILQKEFGIKNPTKSDIIRYRLYKELEHNGYKELYTNTYIAPDVLFSKNIDIEHIVPKARVFDDSFSNKTLAFKDFNIKKGESTAFDYITSLKNEEKLNQYLARVENAYKTKNISPAKYKNLLKKASEIGDGFINRDLRDTQYIAKKAKEILFQVTKNVLSTSGSITDRLREDWSLVDVMKELNMPKYQSLGLTEVEERKDGNKVTVIKDWTKRNDHRHHAMDALTVAFTKPSYIQYLNHLNARKDENNKNYSVILAIEKKETIKVPTNNGKNKRVFIEPIPNFRQVAKKHLEEIFISHKAKNKVVTKNTNKPAGTNKQQITLTPRGQLHKETIYGKYQYYVNKEEKVGVKFDKETIAKVSNPLYREALLKRLQANDNDPKKAFTGKNALSKNPIYLDEAKTKTLPEKVNLTYLEEDFSVRKKIVPKNPTSKEFVPNLKSIEKVVDEGVRNILIERLRVYNNDPEKAFVDLEKNPIWLNKEKGIAIKRVTISGVNNAQPLHIGKDHLGKTTLNKEGKEIPVDYVSTGNNHHVAIYRDKEGNLQEQIVSFFEAVVRTQQGLPIIDKTYKQEEGWQFLFTMKQNEMFVFPNEATGFNPAEIDLLDPKNKKQISPNLFRVQKIATKDYFFRHHLETNVETDNVLKNTTWKREGLSGLKDIVKVRINHLGDIVSIGEY

SEQ ID NO: 159 - protein, 1450 aa, Capnocytophaga sp.
  source 1..1450: note = Capnocytophaga sp. oral taxon 412 str. F0487
MKHILGLDLGSNSIGWAFVQQDFENKQGKIIATGSRIIPMDQGILGDFERGNTVSQTAERTTYRNTRRLRERHLLRRERLHRVLHILGFLPPHYDSQIDFTKRYGKFIDNAEPKIAYNNGNFIFMNSFNEMIEDFKKYQPQLFYKKSNGEESKIPYDWTIYYLRKKALSQKITQQELAWLILHFNQKRGYYQLRGEEETENPNKEVAFHSLEVVDVEAEAPNKKGEIWYTIRLENGWIYRRTSKIPLDDWKGKTRDFIVTTDLNDDGTIKLDKEGKEKRSFRAPDENDWNLLKKKTEHDIDFSGKTVGAYIYDHLLQNPNQKIKGKLVRTIERKYYKDELKAILAKQIALQPELFTETLLADCIRELYRKNETQQQNLLSKDFLHLFVEDIIFYQRPLRSKKSTIANCTLEKRSYIDKETNERKDTPIKVCAKSNPYYQEFRVLQWLQNLRIYEIETDREVTAEFIETAQDNEALFNFLMSQKEIDNESLLKYFLFAKNPQIKDKVAKSELKKWLTTYRWNYVYDAADNSSKKYPMNETGYELQQYLQKVEGLPANFLTFDITYRLWHLLYSVKDKVEFEKALKKFAQEYQLDEASFVDSFKNFKPYPNEYGSFSEKAIKKLLPLMRFGNHWDFNRIDVSTQKRIDDLINGVANDEIRTIIREKAEKYQLNSETCFQGLPLWLAQYVVYNRHAEAADIEKWTSVNDLEAYLEDFKQHSLRNPIVEQVITETLRVVRDIWQRYGGGQANFFDEIHIELGRELKKTAEERKQLSNRNQENENTNLRIKKLLAELKEDASIQNVRPYSPVQQELLKIYEEGVFSATDEVEEDIQKIRKKAEPTTPEIQRYKLWLEQKYKSPYTGEVISLTKLFTEEYEIEHIIPQSRYYDDSLSNKVICESAVNKLKTNQLGLEFIQNHHGEKVRITANKEVTIFTEEQYKEFVKKHYANNSAKQQKLLLNEIPEKMVARQLNDTRYISKYISEILSKIVRSDEKDEGVNSKNIIPCTGKITTALKQDWGLNDVWNELILPRFERMNQLTQTQLFTSYNDRFQKNLPTVPIEYSQGFQKKRIDHRHHAMDALVIACATREHINYMNNQHALDKSKDKKEKQQSRIDLRTILCEKKNNNWQFKKPWSTFTQEAQEALEHIVVSFKQNLRVINKATNYYEKWEEKNGVLVKKKVKQEGTNWAIRKPLHKETVSGKIVLDRKIGKDKILTATRKSVDITFTEKIISSITDTGIQKILLNYLKYKGSPEVAFSAEGLEELNKNIAQYNDGKKHQPIYKVRIFEEGSKFPLGETGAKATKYVEAAKGTNLFFGVYQGKGKRTYATIPLNEVIERQKQGLPSVPERNEKGEPLLFSLSPNDLVYVPMEGEIAETIDFNNLSKEQKERIYKTVSFTGNQCFFVQEAVATPIVNKIEYSPLNKMERDILGTMIKEVCIKLKVDRLGNITKA

SEQ ID NO: 160 - protein, 1426 aa, Capnocytophaga sputigena
  source 1..1426: note = Capnocytophaga sputigena ATCC 33612
MKNILGLDLGITSISFAHIVEDENKEKSEIKELGVRIVSLTTDEQSDFEKGKSITTNANRTLKHGARLNLDRYQQRRKYLIDLLQKANLITSSSILAENGKNTTHSTWQLRAKAVTERIEKEEFARVLLAINKKRGYKSSRKAKTEDEGQAIDGMAIAKRLYDENLTPGQLSLQLLQQNKKLLPDFYRSDLQREFDLVWNFQKQFYPDILTDSFYKELQGKGKDATSKAFSKRYHFDTAENKGSKESVRLQAYQWRAEAISKQLSKEEVAYVLTEINNNLNNASGYLGAISDRSKELYFNRQTVGQYLYAQLQENRHNSLKNKVFYRQDYLDEFERIWETQASFHKELTDELKKQIRDVVIFYQRKLKSQKGLISFCEFESKEIEIEKDGKTITKTIGARVVPKSSPLFQEFKIWQILNNVTCKRKGIRKKKSSAKSTELDLFNEPSQTIFSLDMECKQLLFDELNLKGDLKSDKVLKLLGYSPQEWEINYNQLEGNRTQKALYEAYLKIVEMEAHDVKDILQIKSAKDDWSLDESPLSASEIKEKVKDIFQALGICTKILYFDPLLPVKEFEKQDSYQLWHLLYSYESDDSTSGNETLYRILEKKYAFKREHARILANVALQDDYGSLSTKAIRKIYPNIKENQYSKACELAGYKHSKLSLTTEELEARELKNIIPLLKKNALRNPVVEKILNQMINVVNALIEKNSERDAEGKITKYFHFDEIRIELARELKKNAQKRYEMTQNINKAKLEHQKISEILQKKFGIKNPTKSDIIRYRLYQELEHNGYKELYTNAPIARDMLFSKNIEIEHIVPKARVFDDSFSNKTLTFHRINSNKGEYTAFDYITSLNSEEELNQYLTRVENAYKTKSISLTKYKNLLKKASEIGDGFINRDLRDTQYIAKKAKEILFQVTKNVLSTSGSITDRLREDWGLVDVMKELNMPKYQSLGLTEVEERKEGNKVTVIKNWTKRNDHRHHAMDALTVAFTKPSYIQYLNHLNARKDENNKNYSVILAIEEKETIKVPTNNGKNKRVFIEPIPNFRQVAKKHLEEIFISHKAKNKVVTKNVNKPAGTDKQQITLTPRGQLHKETIYGKYQYYVNKEEKVGVKFDERTITKVSNPLYREALLKRLQANDNDPKKAFTGKNALSKNPIYLDETKTKTLPEKVNLTYLEEDFSIRKDISPDNFKDLKSIEKVIDQGVKRILIKRLQDYDNDPKKAFVDLEKNPIWLNKEKGIAIKRVTISGVSNAQPLHIGKDHLGKTTLNKEGNEIPVDYVSTGNNHHVAIYRDKEGNLQEQIVSFFEAVVRTQQGLPIIDKTYKQEEGWQFLFTMKQNEMFVFPNATTGFNPAEIDLLDPKNKKLISPNLFRVQKIATKDYFFRHHLETNVETDNVLKNTTWKREGLSGLKDIVKVRINHLGDIVSIGEY

SEQ ID NO: 161 - protein, 1140 aa, Catellicoccus marimammalium
  source 1..1140: note = Catellicoccus marimammalium M35/04/3
MKNMTKVNVGLDVGISSAGWSVINAETNQILESGVRLFSGSDADENVNRRNQRQGRRLFRRRKLRIQEAKKYLENVFQLKDIEPKDEWNPYEIRVRALNEKVSKEELSIALLNIVKHRGISYELEDVTDEEGTNTQSFQSGLDYNRRLLKTKTVGEIQYDRLQKYGQVRGQIQTEDGLLINIFPTKNYVEEVERILETQKKYHPEIDDVFIEKIISFVTRKREYFVGPGNEKSRTDYGIYRENGETLDNLFEILIGKDKFYPEEYRAAGSSYTAQIFNLLNDLNNLRIPTTEDHHLTKAQKEEIITELKNTSRLSGGMLKLISKVTKAPKEEISGYRKDEKDKPDLHSLAYYRKQKNMLEKEGIQIADFSEELLDELATMMTLNTEPGEIRKQLNKITNQYDILTPEVIEVLVKNHTAFVATSNHKWHRFSLKLMKEFIPELLETSKEQSTILCERGFIQNRASYLDENHHFNYAELRENLYNPVVRKSTCEMLKVFTAIQEKYPNIQNVIVELPRETNEDEQKRKIKKINDNNAKRKKEILKEAQAQSGLSEEALEEKLLKTKGLYLKLMLWYEQEGKCVYSGQEIPLSDLLQNKGGYEVDHIIPISISFDDRLCNKVLVRQQLNSQKSNQTPFEYMTTHTDGHLSFHELKELVGKNKRFSKEKRELLLAEIYSNDIETRKRFINRNLVDTSYTARIVLNALQQYKKENQLSMNVSVVRGAMTNILRKKVKLDKTRETFHHHAIDASLMAVIPNIEFFKERKEWLPKSANEEVVEVEVSEEETMPEKEFKVKMRLPESFIQDVQILQRNSFAKEEVSGPQTRERNLKIKFSHQVDQKMNRKVADDTIYGTRQAQLGKDKKEETYVIGKIKDIYNYDEYVRFKKRYDKNKESFLMYHHDPQTFEKLEEILAQYPEYIEDEKGKKKKVSPFALYREENGPVTKYAKKNNGPVIKQLKYYDSKLNRKIDISHKYSTKNRQVVLQSLKPYRTDVYRNQDTGEYTLVGIDQNDGKFVNGHYGIPKSRYEEIKANNKLSEHDEFVFSLYKNSMVKVIDENGESIVVRYLSRSMPNRKNNAEIKPVEKYQFEDGEVVPVYGKCRKQMQTVFVKKGWTLLKGNTDILGNTYFVEKESENPKKMIDDK

SEQ ID NO: 162 - protein, 1329 aa, Catenibacterium mitsuokai
  source 1..1329: note = Catenibacterium mitsuokai DSM 15897
IVDYCIGLDLGTGSVGWAVVDMNHRLMKRNGKHLWGSRLFSNAETAANRRASRSIRRRYNKRRERIRLLRAILQDMVLEKDPTFFIRLEHTSFLDEEDKAKYLGTDYKDNYNLFIDEDFNDYTYYHKYPTIYHLRKALCESTEKADPRLIYLALHHIVKYRGNFLYEGQKFNMDASNIEDKLSDIFTQFTSFNNIPYEDDEKKNLEILEILKKPLSKKAKVDEVMTLIAPEKDYKSAFKELVTGIAGNKMNVTKMILCEPIKQGDSEIKLKFSDSNYDDQFSEVEKDLGEYVEFVDALHNVYSWVELQTIMGATHTDNASISEAMVSRYNKHHDDLKLLKDCIKNNVPNKYFDMFRNDSEKSKGYYNYINRPSKAPVDEFYKYVKKCIEKVDTPEAKQILNDIELENFLLKQNSRTNGSVPYQMQLDEMIKIIDNQAEYYPILKEKREQLLSILTFRIPYYFGPLNETSEHAWIKRLEGKENQRILPWNYQDIVDVDATAEGFIKRMRSYCTYFPDEEVLPKNSLIVSKYEVYNELNKIRVDDKLLEVDVKNDIYNELFMKNKTVTEKKLKNWLVNNQCCSKDAEIKGFQKENQFSTSLTPWIDFTNIFGKIDQSNFDLIENIIYDLTVFEDKKIMKRRLKKKYALPDDKVKQILKLKYKDWSRLSKKLLDGIVADNRFGSSVTVLDVLEMSRLNLMEIINDKDLGYAQMIEEATSCPEDGKFTYEEVERLAGSPALKRGIWQSLQIVEEITKVMKCRPKYIYIEFERSEEAKERTESKIKKLENVYKDLDEQTKKEYKSVLEELKGFDNTKKISSDSLFLYFTQLGKCMYSGKKLDIDSLDKYQIDHIVPQSLVKDDSFDNRVLVVPSENQRKLDDLVVPFDIRDKMYRFWKLLFDHELISPKKFYSLIKTEYTERDEERFINRQLVETRQITKNVTQIIEDHYSTTKVAAIRANLSHEFRVKNHIYKNRDINDYHHAHDAYIVALIGGFMRDRYPNMHDSKAVYSEYMKMFRKNKNDQKRWKDGFVINSMNYPYEVDGKLIWNPDLINEIKKCFYYKDCYCTTKLDQKSGQLFNLTVLSNDAHADKGVTKAVVPVNKNRSDVHKYGGFSGLQYTIVAIEGQKKKGKKTELVKKISGVPLHLKAASINEKINYIEEKEGLSDVRIIKDNIPVNQMIEMDGGEYLLTSPTEYVNARQLVLNEKQCALIADIYNAIYKQDYDNLDDILMIQLYIELTNKMKVLYPAYRGIAEKFESMNENYVVISKEEKANIIKQMLIVMHRGPQNGNIVYDDFKISDRIGRLKTKNHNLNNIVFISQSPTGIYTKKYKL

SEQ ID NO: 163 - protein, 1419 aa, Chryseobacterium sp.
  source 1..1419: note = Chryseobacterium sp. CF314
MMIKNILGLDLGTNSIGWALIKQNFENKYGEILGMGSRIIPMSQDVLGEFGKGNSVSQTAARTGYRGVRRLRERFLLRRERLHRVLNVLNFLPEHYASQIDFEKRFGKFKYETEPKLAYNNDGFFFKNSFDEMLGDFKDHQFHLLENGRKVPYDWTIYYLRKKALSQKIEKEELAWILLNFNQKRGYYQLRGEDFEEEKDRVFVRLKVDRVVDSGENIKGKILYDVYFENGWKYEKQIVKTEDWIGRTKEFIVTESILKNGDTKRTFKAVDSEKDWIAIKTKTEQEIDKSHKTVGAYIYEALLQNPKQKIKGKLVRTIERKFYREELKKILERQKEFHPELQSDDLYNDCIRELYRNNEAHQITLSKKDFVHLLLNDLIFYQRPLRSQKSSVSNCTLEFRKYKDENGVEHAQYLKTIPKSNPYYQEFRVWQWMFNLNIYRKDDDTNVTKEFLSSTEDYETLFEFLNNRKEVDQKALLRHFKLNEKTHRWNYVEDKKYPCNETKTMISTRLEKVENYPSDFLTREMEQNIWHIIYSVNDKIEYEKALKSFAHKNNLDENSFFEAFKKFPPFKSEYGSFSEKAIKKLLPLLRLGKYWNWESIDRKSQGRIEKIITGEFDGNIKDKVREKAIHLTAENDFQGLQLWLAQYIVYGRHSEASMIGKWNSADDLEEFLKGFKQHSLRNPIVEQVITETLRVVKDIWLKYGNGAKDFFSEIHIELGREMKQTKDERVDATKRITENENTNLRIKALLAEMMNDNSVENIRPYSPMQQEILKIYEDGILKSDIEIDDDILKISKTAQPSSSDLKRYKLWLEQRYKSPYTGQIIPLNKLFTSEYEIEHIIPQSRYFDDSFSNKIICESAVNKLKDNYIGLGFIKQFGGMIVECGFGKSVEIFKAEEYEDFVKKHYANNRSKRNKLLLEEIPEKMIDRQLNDTRHISKYISGVLSNIVRQEDGTDEGVNSKNIVPGNGKITTQLKQDWGLNDVWNELILPRFERMNQLTNSTDFTSWNKNHQKFLPTVPIEFSKGFSKKRIDHRHHAMDALVIACATKDHINLLNNQSAKSDTKRYDLKRKLMKFERVVYSHSKTGEKIEKEVPKQFLKPWDNFTVDAKNKMETIIVSFKQNLRVINKATNHYEKWIEKDGIKRKELIKQEGTNWAIRKPMHKETVSGKVDLPGIKIPKGKILTATRKSLDTSFDLKTINSITDTGIQKILKNYLEFKGSSELAFSPEGIEDMNKNIEKFNDGKPHQSINKVRIFELGSKFSVGQTGNKKDKYVEAAKGTNLFFAVYEDKNGKRSYETIPLNEVIERQKQGLDSVSFKNKEDFLLCPNDLVYVPSEDELENIYNIDFKNLTTEKTGNIYKVVSFSGNQIFFIRQDIAISIVNKAEFSTLNKMERAIDGSMIKENCIKLKIDRLGNIAKI

SEQ ID NO: 164 - protein, 1021 aa, Clostridium cellulolyticum
MKYTLGLDVGIASVGWAVIDKDNNKIIDLGVRCFDKAEESKTGESLATARRIARGMRRRISRRSQRLRLVKKLFVQYEIIKDSSEFNRIFDTSRDGWKDPWELRYNALSRILKPYELVQVLTHITKRRGFKSNRKEDLSTTKEGVVITSIKNNSEMLRTKNYRTIGEMIFMETPENSNKRNKVDEYIHTIAREDLLNEIKYIFSIQRKLGSPFVTEKLEHDFLNIWEFQRPFASGDSILSKVGKCTLLKEELRAPTSCYTSEYFGLLQSINNLVLVEDNNTLTLNNDQRAKIIEYAHFKNEIKYSEIRKLLDIEPEILFKAHNLTHKNPSGNNESKKFYEMKSYHKLKSTLPTDIWGKLHSNKESLDNLFYCLTVYKNDNEIKDYLQANNLDYLIEYIAKLPTFNKFKHLSLVAMKRIIPFMEKGYKYSDACNMAELDFTGSSKLEKCNKLTVEPIIENVTNPVVIRALTQARKVINAIIQKYGLPYMVNIELAREAGMTRQDRDNLKKEHENNRKAREKISDLIRQNGRVASGLDILKWRLWEDQGGRCAYSGKPIPVCDLLNDSLTQIDHIYPYSRSMDDSYMNKVLVLTDENQNKRSYTPYEVWGSTEKWEDFEARIYSMHLPQSKEKRLLNRNFITKDLDSFISRNLNDTRYISRFLKNYIESYLQFSNDSPKSCVVCVNGQCTAQLRSRWGLNKNREESDLHHALDAAVIACADRKIIKEITNYYNERENHNYKVKYPLPWHSFRQDLMETLAGVFISRAPRRKITGPAHDETIRSPKHFNKGLTSVKIPLTTVTLEKLETMVKNTKGGISDKAVYNVLKNRLIEHNNKPLKAFAEKIYKPLKNGTNGAIIRSIRVETPSYTGVFRNEGKGISDNSLMVRVDVFKKKDKYYLVPIYVAHMIKKELPSKAIVPLKPESQWELIDSTHEFLFSLYQNDYLVIKTKKGITEGYYRSCHRGTGSLSLMPHFANNKNVKIDIGVRTAISIEKYNVDILGNKSIVKGEPRRGMEKYNSFKSN

SEQ ID NO: 165 - protein, 1065 aa, Clostridium perfringens
  source 1..1065: note = Clostridium perfringens C str. JGS1495
MNKDINYALGLDIGITSVGWAVINLDLNRIEDLGVRIFNAAENPKDGSSLALPRRLARGRRRLLRRKAYRVERVRKLIVKNNILTKEELEGLFKNKEVIDVWEARVKGLDYKLSREEWAKILINFCKRRGFKSNRKNETKDKEAGQILSSISYNIEKMKETNSRTIGEYIYNEVKNSDDSYAPLRNKFGEYKMCVSRDVLREEIHTLFEKQRELGNNFASDEIEDKYFEIFNSQRPFSNFEDLEKLVGFCTFERKKHKRAPKHCISSEEFTLYEGINKLSIIKDGEKRKLSEEERTLVVNEAFNKKEIKYTTLRKLLGLSEDELFSTLTYSIDKDISKTENTKFVSLKGYHEIKRAIEKGVSKKAWQDIENNRNLLNDIAYVLTLGKTDDEIEKQLRLRNVPEELFESLLDMSFSKFNNLSIYALEKILPFMKEGYQYNEACEKAGYNFKAIYEGVRTKKLPVIEIDEIVNPVVNRALAQTRKVINSVIDKYGSPVRINIELARDLAKNFKDRKLIEKEQKENRANLDKIRENLRELMDKEPTAVEVLKYRLWEQQRGECAYTQSQIALERLFSPGYCEIDHIIPFSRSFDDSLSNKILVLGSENQRKGNKIPYEYFGEDSERWNSFEIWVKGSYLNYKKKANLLKKKFTEEEQRDWKARNLQDTKYICRYISNFVNNRLEFKESENKQKVITVNGRATAYLRSRWGLNKVREDGDKHHALDAAVVGVTTQGMVQKISKYSKAHELYTVRKNDEFVDVETGECVDVDEYKEIRKDILPRPWRGFSEELKLRLSDNPLEELKKLPIETYNEEFIKENVKPIFVSRVPFRKISGKLFKETIYSERAFKDGYFVSKKSLVDLKRGDLDNFYNYECDKKLYDAISERMKEFNYNGKKAFESPFRKPTKSGKEGPVVRSVKIKSAAPFKDGIPMNEGLVAKEGMVRIDIYEKEGKYFVVPVYRYQLAKGIVPKRAAIAGKSELKWPIMDQTYNFKFSIFKNDLIEIKYAKKDGYFGYYDGFDRHTASLVIENHDNSDRYRGIGVKTGVVEFNKYEVDVLGNYHKVNLGGN

SEQ ID NO: 166 - protein, 1065 aa, Clostridium perfringens
  source 1..1065: note = Clostridium perfringens D str. JGS1721
MNKDINYALGLDIGITSVGWAVINLDLNRIEDLGVRIFNAAENLKDGSSLALPRRLARGRRRLLRRKAYRVERVRKLILKNNILTKEELEGLFKNKEVIDVWEARVKGLDYKLSREEWAKILINFCKRRGFKSNRKNEAKDKEAGQILSSISYNIEKMKETNSRTIGEYIYNEVKNSEDSYAPLRNKFGEYKMCVSRDVIREEIHTLFEKQRELGNNFASDEIEDKYFEIFNSQRPFSNFEDLEKLVGFCTFERKKHKRAPKHCISSEEFTLYEGINKLSIIKDGEKRKLSEEERTLVVNEAFNKKEIKYTTLRKLLGLSEEELFSTLTYSIDKDISKTENTKFVSLKGYHEIKRAIEKGVSKKAWQDIENNRNLLNDIAYVLTLGKTDDEIEKQLRLRNVPEELFESLLDMSFNKFNNLSIYALEKILPFMKEGYQYNEACEKAGYNFKAIYEGVRTKKLPVIEIDEIVNPVVNRALAQTRKVINSVIDKYGSPVRINIELARDLAKNFKDRKLIEKEQKENRANLDKIRENLRELMDKEPTVVEVLKYRLWEQQRGECAYTQSQIPLERLFSPGYCEIDHIIPFSRSFDDSLSNKILVLGSENQRKGNRTPYEYFGEDSERWNSFEIWVKGSYLNYKKKANLLKKKFSEEEQRDWKARNLQDTKYICRYISNFVNNRLEFKESENKQKVITVNGRATAYLRSRWGLNKVREDGDKHHALDAAVVGVTTQGMVQKISKYSKAHELYTVRKNDEFVDVETGECVDVDEYKEIRKDILPRPWRGFSEELKLRLSDNPLEELKKSPIETYNEEFIKENVKPIFVSRVPFRKISGKLFKETIYSERAFKDGYFVSKKSLVDLKRGDLDNFYNYECDKKLYDAISERMKEFNYNGKKAFESPFRKPTKSGKEGPVVRSVKIKSAVPFKDGIPMNEGLVAKEGMVRIDIYEKEGKYFVVPVYRYQLAKGIVPKRAAIAKKDELKWPIMDQTYNFKFSIYKNDLIEVKYDKKGVYFGYYDGFDRNSASLTIEKHDNSERYRSIGLKVGVLEINKYEVDVLGNYHKVKLGGN

SEQ ID NO: 167 - protein, 1116 aa, Clostridium spiroforme
  source 1..1116: note = Clostridium spiroforme DSM 1552
MVEFLLKEMKIMGRLVLGLDIGITSVGYGVIDIDKNEFVDYGVRLFKEGTAINNEERRSKRGARRLKRRKTNRIADMKKLLERNGLIDEQYTALNNPYEIRKKGLKNKLSNYELATAILHITKNRGTCLESNADETQDEESTKNILSKNALELKDKYICEIQLARLEESGKIRGINNNFKTEDYLKELSKILENQDLEKETIDKIKEIVARRRRYDQGPGSEKSPTPYGSYRMENGELVHVNLIDMMRGKCSVFPDQLRAPQQSYSAELFNLLNDLNNLKINGEKLSSTEKQKIIDFVNEKGGITVKQLLKLIDVGITEISGFRIDKNEKPLITEFKGYKKVLKVFKNYNQESLLNDKSIVDTIMDINTKIKSIDERSDQLKQVLPSLDTSIINDLASIKGVSGYHSLSLKALNLINNEMLKTEMNQMQVLHQLDIFDKNRVSLKGQRQIYADDNAILSPVAKRAHRETFKVINKLRSIYGEFDSIVIETTRDKNTQDQKKRIKNNQKNYEERNTEVNNFLKEAGYNPENINAKTKMKIRLYIEQDAKSAYTLQDINLKELIEDEKAYEIDHIIPISISLDDSFNNKVLTTHDENQEKGNLTPISAFLKGKFHNGNLNTYKVFIQNNKNLNRKKKEYLLCEDDITRYEVVQNFINRNLVDTSYACRTVMNTLVHYFKDNEINTKVHTIKGQATSTFRKRIGLIKDREEDYFHHAIDALIVASLKKMNLINSYLMKVDFNEMYDEETGEIFNVLPDNSYLDEKYISFVSNLKNIYEESNKYIRGVMIKEKMTYPLIKVSHKIDTKPNRKISDDTIYSTRNVDNQDMLVERIKNIYDPKENAANTLINDIINDNTDKYIMYHKDPQTFDKIKAIVLNHFNEFKTDKNCYIVTKEGLYKLKGTSPLALYYEEFGPITKYAKKNNGPTIHSMKFYSEKLGNHLSITHKYSTVNKKVITKQISPYRTDFYQSPEGKYKFVTVRYKDVAYNAKKDKYIIDHSWYREQKKLKKIADEWIFVCSVHRDELIGIMKADGQKRIFDSSTESDGETLYHDAKTYEILKFTATNNDITGRFEVKPIYCYCKKQLMVSIGTCRKIQKFATDVLGNLYIVKDNVLKLEFK

SEQ ID NO: 168 - protein, 1338 aa, Coprococcus catus
  source 1..1338: note = Coprococcus catus GD/7
MKQEYFLGLDMGTGSLGWAVTDSTYQVMRKHGKALWGTRLFESASTAEERRMFRTARRRLDRRNWRIQVLQEIFSEEISKVDPGFFLRMKESKYYPEDKRDAEGNCPELPYALFVDDNYTDKNYHKDYPTIYHLRKMLMETTEIPDIRLVYLVLHHMMKHRGHFLLSGDISQIKEFKSTFEQLIQNIQDEELEWHISLDDAAIQFVEHVLKDRNLTRSTKKSRLIKQLNAKSACEKAILNLLSGGTVKLSDIFNNKELDESERPKVSFADSGYDDYIGIVEAELAEQYYIIASAKAVYDWSVLVEILGNSVSISEAKIKVYQKHQADLKTLKKIVRQYMTKEDYKRVFVDTEEKLNNYSAYIGMTKKNGKKVDLKSKQCTQADFYDFLKKNVIKVIDHKEITQEIESEIEKENFLPKQVTKDNGVIPYQVHDYELKKILDNLGTRMPFIKENAEKIQQLFEFRIPYYVGPLNRVDDGKDGKFTWSVRKSDARIYPWNFTEVIDVEASAEKFIRRMTNKCTYLVGEDVLPKDSLVYSKFMVLNELNNLRLNGEKISVELKQRIYEELFCKYRKVTRKKLERYLVIEGIAKKGVEITGIDGDFKASLTAYHDFKERLTDVQLSQRAKEAIVLNVVLFGDDKKLLKQRLSKMYPNLTTGQLKGICSLSYQGWGRLSKTFLEEITVPAPGTGEVWNIMTALWQTNDNLMQLLSRNYGFTNEVEEFNTLKKETDLSYKTVDELYVSPAVKRQIWQTLKVVKEIQKVMGNAPKRVFVEMAREKQEGKRSDSRKKQLVELYRACKNEERDWITELNAQSDQQLRSDKLFLYYIQKGRCMYSGETIQLDELWDNTKYDIDHIYPQSKTMDDSLNNRVLVKKNYNAIKSDTYPLSLDIQKKMMSFWKMLQQQGFITKEKYVRLVRSDELSADELAGFIERQIVETRQSTKAVATILKEALPDTEIVYVKAGNVSNFRQTYELLKVREMNDLHHAKDAYLNIVVGNAYFVKFTKNAAWFIRNNPGRSYNLKRMFEFDIERSGEIAWKAGNKGSIVTVKKVMQKNNILVTRKAYEVKGGLFDQQIMKKGKGQVPIKGNDERLADIEKYGGYNKAAGTYFMLVKSLDKKGKEIRTIEFVPLYLKNQIEINHESAIQYLAQERGLNSPEILLSKIKIDTLFKVDGFKMWLSGRTGNQLIFKGANQLILSHQEAAILKGVVKYVNRKNENKDAKLSERDGMTEEKLLQLYDTFLDKLSNTVYSIRLSAQIKTLTEKRAKFIGLSNEDQCIVLNEILHMFQCQSGSANLKLIGGPGSAGILVMNNNITACKQISVINQSPTGIYEKEIDLIKL

SEQ ID NO: 169 - protein, 1384 aa, Coriobacterium glomerans
MKLRGIEDDYSIGLDMGTSSVGWAVTDERGTLAHFKRKPTWGSRLFREAQTAAVARMPRGQRRRYVRRRWRLDLLQKLFEQQMEQADPDFFIRLRQSRLLRDDRAEEHADYRWPLFNDCKFTERDYYQRFPTIYHVRSWLMETDEQADIRLIYLALHNIVKHRGNFLREGQSLSAKSARPDEALNHLRETLRVWSSERGFECSIADNGSILAMLTHPDLSPSDRRKKIAPLFDVKSDDAAADKKLGIALAGAVIGLKTEFKNIFGDFPCEDSSIYLSNDEAVDAVRSACPDDCAELFDRLCEVYSAYVLQGLLSYAPGQTISANMVEKYRRYGEDLALLKKLVKIYAPDQYRMFFSGATYPGTGIYDAAQARGYTKYNLGPKKSEYKPSESMQYDDFRKAVEKLFAKTDARADERYRMMMDRFDKQQFLRRLKTSDNGSIYHQLHLEELKAIVENQGRFYPFLKRDADKLVSLVSFRIPYYVGPLSTRNARTDQHGENRFAWSERKPGMQDEPIFPWNWESIIDRSKSAEKFILRMTGMCTYLQQEPVLPKSSLLYEEFCVLNELNGAHWSIDGDDEHRFDAADREGIIEELFRRKRTVSYGDVAGWMERERNQIGAHVCGGQGEKGFESKLGSYIFFCKDVFKVERLEQSDYPMIERIILWNTLFEDRKILSQRLKEEYGSRLSAEQIKTICKKRFTGWGRLSEKFLTGITVQVDEDSVSIMDVLREGCPVSGKRGRAMVMMEILRDEELGFQKKVDDFNRAFFAENAQALGVNELPGSPAVRRSLNQSIRIVDEIASIAGKAPANIFIEVTRDEDPKKKGRRTKRRYNDLKDALEAFKKEDPELWRELCETAPNDMDERLSLYFMQRGKCLYSGRAIDIHQLSNAGIYEVDHIIPRTYVKDDSLENKALVYREENQRKTDMLLIDPEIRRRMSGYWRMLHEAKLIGDKKFRNLLRSRIDDKALKGFIARQLVETGQMVKLVRSLLEARYPETNIISVKASISHDLRTAAELVKCREANDFHHAHDAFLACRVGLFIQKRHPCVYENPIGLSQVVRNYVRQQADIFKRCRTIPGSSGFIVNSFMTSGFDKETGEIFKDDWDAEAEVEGIRRSLNFRQCFISRMPFEDHGVFWDATIYSPRAKKTAALPLKQGLNPSRYGSFSREQFAYFFIYKARNPRKEQTLFEFAQVPVRLSAQIRQDENALERYARELAKDQGLEFIRIERSKILKNQLIEIDGDRLCITGKEEVRNACELAFAQDEMRVIRMLVSEKPVSRECVISLFNRILLHGDQASRRLSKQLKLALLSEAFSEASDNVQRNVVLGLIAIFNGSTNMVNLSDIGGSKFAGNVRIKYKKELASPKVNVHLIDQSVTGMFERRTKIGL

SEQ ID NO: 170 - protein, 1099 aa, Corynebacterium accolens
  source 1..1099: note = Corynebacterium accolens ATCC 49725
MSLSYRVGIDVGTYSLGCTAIEVDDNDQPVNILSSVSLIHDSGLDPDQQKRAVTRLASSGVARRTRRLYRRRRRRMINLEKFLTSQGWETRPFEHYSDPYLPWNARVALVNGYISDDAQRGMYLSIAFRHIANHRGWRNPYWKVSSLYSPDKPSDAFEQIRKELEESTGHKIPETVTVGQLISFAQFGKDRLRGGGKKKDEKKPQEQVNQAVISARLHQIDHAREINEICRVQKIDDALRKQILDLVFAAESPKGAQIGRVGKDPLQPKLPRALKASDAFQQYRIVALAGNLRIYRDGVSTPLDRDEKLIVFNYLINLSHKEEPSWLKVAEVLNIDRGQLHGTATMTDDGERAGAAPPVHDTNRTILGCKIKPLVHWWEGANDDERAAMLKALSNSEVEDFDSPAGAQTQAFFANLDESEQEKLDSLHLPIGRAAYSEDTLMRLTSRMLDENLDLYEARLAEFDIPKDWAPPAPRIGEPVGNPAVDRVLKGVARWLEAAADEWGAPKSVVIEHVRDGFISKSKANEIDRANNARHKRNRELFKQMQENLGIDGKLRSSDLWRYQSVQRQNCQCAYCGSPITYTTCEMDHIVPRAGEGSTNTRDNLVATCHRCNLAKKNIPFAVWAAQTNIPGVSVKEALDRTRHWSEDSGMTSKDFKKFRKNVCDRLKRTVVDEPLDARSMESVAWMANELRGRVAQRFQEENTVVNVYRGELTAEARRAAGISDKLRFIDGTGKSRLDRRHHAVDAAVVAFTQNYVAETLAIRSNKKREAQLLQAAEQWKEFTGSDAEHRAAWNAWLPKMQKLAVLLQKALDEDRIAVTSNLRLRLGNGRAHEDSIGELKTIRVGDAISVTDIDRASSEALWCALTREPDFDENNGLPENPDRRIRIHGTWYDAEDDIEVFPVGAGAIKVRGGYAELSRFHHARIYKIPGKKAPVYCMLRVYNADLIRHRHEDLFSVEIKPQTMSVRQAEPKLRKALAENTAEYLGWLVTDDELVIDTSNFNTGQIAEMQSELGQVRRWRLDGFYSPSTLRLRPLQMSAEGLREDTSIGAKKIIDRPGWLPAINKLFGEGHVTVVRRDALGRARLTSNAHLPISWKAE

SEQ ID NO: 171 - protein, 1099 aa, Corynebacterium accolens
  source 1..1099: note = Corynebacterium accolens ATCC 49726
MSLLYRVGIDVGTYSLGCTAIEVDDNDQPVSILSSVSLIHDSGLDPDQQKRAVTRLASSGVARRTRRLYRRRRRRMVKLENFLTAQGWETLPFERYSDPYLPWHARVALVNGYISDDTQRGQYLSIAFRHIANHRGWRNPYWKVSSLYSPDKPSDAFEQIRKELEASTGRQIPETATVGQLISFAQFGKDRLRGGGKQKDKKKPQEQVNQAVISARLHQIDHAREINEICRVQKIDDTLRKQILDLVFAAESPKGAQKGRVGKDPLQPKLFRALKASDAFQQYRIAALTGNLRIYRNGVTVPLDRDEKLIVFNYLVNLPKKEEPSWLKIAEILNIDRGQLRGTATMTDDGERAGATPPVHDTNRTILDSKVKPLAHWWENASDDERAAMLKSLSNSEVEDFDSPAGAQVQAFFADLDETEQEKLDSLHLPMGRAAYSEDTLMRLTNRMLDENLDLYEARLAEFGIPKDWAPPAPRIGEPVGNPAVDRVLKGVARWLEAAADEWGAPKSVVIEHVRDGFVSKSKAIEIDRANNNRHKRNRELFQKMQENLGIEGKVRSSDLWRYQSVQRQNCQCAYCGSPITYTTCEMDHIVPRAGEGSTNTRDNLVATCHRCNLAKKNIPFAVWAEKSTIPGVSVKEALDRTRHWSEDSGMSKKDFQKFRKNVCERLNRTVVDEPLDARSMESVAWMANELRGRVAQRFQEENTTVNVYRGALTAEARRAAGITDKLRFIDGTGKSRLDRRHHAVDAAVVAFIHNYVAETLAIRSNKKREAQLLQGTSQWKEFTGSDDKHRAVWNAWIPKMQKLAVLLQIALDEDRIVVTSNLRLRLGNGRAHEDTISELKTIRVGDAISVTDIDRASSEALWCALTREPDFDEKDGLPENPNRRIRVHGTWYDAEDEIEVFPVGAGAIKVRGGYAKLSRFHHARVYKIPGKKAPIYCMLRVYNTDLVQHRHEDLFSVELKPQTMSVRQAEPKLRKALAENTAEYLGWLVTDDELIIDTSTFRTGLIEEMQSEFGLVRRWRLDGFDSPSLLTLRPLHMSAEGLPDDCALGSRKIIDTKGWRVSINKVFNAGNTTVVRRDALGRARLTSNAHLPISWKEE

SEQ ID NO: 172 - protein, 1084 aa, Corynebacterium diphtheriae
MKYHVGIDVGTFSVGLAAIEVDDAGMPIKTLSLVSHIHDSGLDPDKIKSAVTRLASSGIARRTRRLYRRKRRRLQQLDKFIQRQGWPVIELEDYSDPLYPWKVRAELAASYIADEKERGEKLSVALRHIARHRGWRNPYAKVSSLYLPDEPSDAFKAIREEIKRASGQPVPETATVGQMVTLCELGTLKLRGEGGVLSARLQQSDHAREIQEICRMQEIGQELYRKIIDVVFAAESPKGSASSRVGKDPLQPGKNRALKASDAFQRYRIAALIGNLRVRVDGEKRILSVEEKNLVFDHLVNLAPKKEPEWVTIAEILGIDRGQLIGTATMTDDGERAGARPPTHDTNRSIVNSRIAPLVDWWKTASALEQHAMVKALSNAEVDDFDSPEGAKVQAFFADLDDDVHAKLDSLHLPVGRAAYSEDTLVRLTRRMLADGVDLYTARLQEFGIEPSWTPPAPRIGEPVGNPAVDRVLKTVSRWLKSATKTWGAPERVIIEHVREGFVTEKRAREMDGDMRRRAARNAKLFQEMQEKLNVQGKPSRADLWRYQSVQRQNCQCAYCGSPITFSNSEMDHIVPRAGQGSTNTRENLVAVCHRCNQSKGNTPFAIWAKNTSIEGVSVKEAVERTRHWVTDTGMRSTDFKKFTKAVVERFQRATMDEEIDARSMESVAWMANELRSRVAQHFASHGTTVRVYRGSLTAEARRASGISGKLEFLDGVGKSRLDRRHHAIDAAVIAFTSDYVAETLAVRSNLKQSQAHRQEAPQWREFTGKDAEHRAAWRVWCQKMEKLSALLTEDLRDDRVVVMSNVRLRLGNGSAHEETIGKLSKVKLGSQLSVSDIDKASSEALWCALTREPDFDPKDGLPANPERHIRVNGTHVYAGDNIGLFPVSAGSIALRGGYAELGSSFHHARVYKITSGKKPAFAMLRVYTIDLLPYRNQDLFSVELKPQTMSMRQAEKKLRDALATGNAEYLGWLVVDDELVVDTSKIATDQVKAVEAELGTIRRWRVDGFFGDTRLRLRPLQMSKEGIKKESAPELSKIIDRPGWLPAVNKLFSEGNVTVVRRDSLGRVRLESTAHLPVTWKVQ

SEQ ID NO: 173 - protein, 1084 aa, Corynebacterium diphtheriae
MKYHVGIDVGTFSVGLAAIEVDDAGMPIKTLSLVSHIHDSGLDPDKMKSAVTRLASSGIARRTRRLYRRKRRRLQQLDKFIQRQGWPVIELEDYSDPLYPWKVRAELAASYIADEKERGEKLSVALRHIARHRGWRNPYAKVSSLYLPDEPSDAFKSIREEIKRASGQPVPETATVGQMVTLCELGTLKLRGEGGVLSARLQQSDHAREIQEICRMQEIGQELYRKIIDVVFAAESPKGSASSRVGKDPLQPGKNRALKASDAFQRYRIAALIGNLRVRVDGEKRILSVEEKNLVFDHLVNLAPKKEPEWVTIAEILGIDRGQLIGTATMTDDGERAGARPPTHDTNRSIVNSRIAPLVDWWKTASALEQHAMVKALSNAEVDDFDSPEGAKVQAFFADLDDDVHAKLDSLHLPVGRAAYSEDTLVRLTRRMLADGVDLYTARLQEFGIEPSWTPPAPRIGEPVGNPAVDRVLKTVSRWLESATKTWGAPERVIIEHVREGFVTEKRAREMDGDMRRRAARNAKLFQEMQEKLNVQGKPSRADLWRYQSVQRQNCQCAYCGSPITFSNSEMDHIVPRAGQGSTNTRENLVAVCHRCNQSKGNTPFAIWAKNTSIEGVSVKEAVERTRHWVTDTGMRSTDFKKFTKAVVERFQRATMDEEIDARSMESVAWMANELRSRVAQHFASHGTTVRVYRGSLTAEARRASGISGKLEFLDGVGKSRLDRRHHAIDAAVIAFTSDYVAETLAVRSNLKQSQAHRQEAPQWREFTGKDAEHRAAWRVWCQKMEKLSALLTEDLRDDRVVVMSNVRLRLGNGSAHEETIGKLSKVKLGSQLSVSDIDKASSEALWCALTREPDFDPKDGLPANPERHIRVNGTHVYAGDNIGLFPVSAGSIALRGGYAELGSSFHHARVYKITSGKKPAFAMLRVYTIDLLPYRNQDLFSVELKPQTMSMRQAEKKLRDALATGNAEYLGWLVVDDELVVDTSKIATDQVKAVEAELGTIRRWRVDGFFGDTRLRLRPLQMSKEGIKKESAPELSKIIDRPGWLPAVNKLFSEGNVTVVRRDSLGRVRLESTAHLPVTWKVQ

SEQ ID NO: 174 - protein, 1084 aa, Corynebacterium diphtheriae
MKYHVGIDVGTFSVGLAAIEVDDAGMPIKTLSLVSHIHDSRLDPDKIKSAVTRLASSGIARRTRRLYRRKRRRLQQLDKFIQRQGWPVIELEDYSDPLYPWKVRAELAASYIADEKERGEKLSVALRHIARHRGWRNPYAKVSSLYLPDEPSDAFKAIREEIKRASGQPVPETATVGQMVTLCELGTLKLRGEGGVLSARLQQSDHAREIQEICRMQEIGQELYRKIIDVVFAAESPKGSASSRVGKDPLQPGKNRALKASDAFQRYRIAALIGNLRVRVDGEKRILSVEEKNLVFDHLVNLAPKKEPEWVTIAEILGIDRGQLIGTATMTDDGERAGARPPTHDTNRSIVNSRIAPLVDWWKTASALEQHAMVKALSNAEVDDFDSPEGAKVQAFFADLDDDVHAKLDSLHLPVGRAAYSEDTLVRLTRRMLADGVDLYTARLQEFGIEPSWTPPAPRIGEPVGNPAVDRVLKTVSRWLESATKTWGAPERVIIEHVREGFVTEKRAREMDGDMRRRAARNAKLFQEMQEKLNIQGKPSRADLWRYQSVQRQNCQCAYCGSPITFSNSEMDHIVPRAGQGSTNTRENLVAVCHRCNQSKGNTPFAIWAKNTSIEGVSVKEAVERTRHWVTDTGMRSTDFKKFTKAVVERFQRVTMDEEIDARSMESVAWMANELRSRVAQHFASRGTTVRVYRGSLTAEARRASGISGKLEFLDGVGKSRLDRRHHAIDAAVIAFTSDYVAETLAVRSNLKQSQAHRQEAPQWREFTGKDAEHRAAWRVWCQKMEKLSALLTEDLRDDRVVVMSNVRLRLGNGSAHEETIGKLSKVKLGSQLSVSDIDKASSEALWCALTREPDFDPKDGLPANPERHIRVNGTHVYAGDNIGLFPVSAGSIALRGGYAELGSSFHHARVYKITSGKKPAFAMLRVYTIDLLPYRNQDLFSVELKPQTMSMRQAEKKLRDALATGNAEYLGWLVVDDELVVDTSKIATDQVKAVEAELGTIRRWRVDGFFGDTRLRLRPLQMSKEGIKKESAPELSKIIDRPGWLPAVNKLFSEGNVTVVRRDSLGRVRLESTAHLPVTWKVQ

SEQ ID NO: 175 - protein, 1084 aa, Corynebacterium diphtheriae
  source 1..1084: note = Corynebacterium diphtheriae bv. intermedius str. NCTC 5011
MKYHVGIDVGTFSVGLAAIEVDDAGMPIKTLSLVSHIHDSGLDPDEIKSAVTRLASSGIARRTRRLYRRKRRRLQQLDKFIQRQGWPVIELEDYSDPLYPWKVRAELAASYIADEKERGEKLSVALRHIARHRGWRNPYAKVSSLYLPDGPSDAFKAIREEIKRASGQPVPETATVGQMVTLCELGTLKLRGEGGVLSARLQQSDHAREIQEICRMQEIGQELYRKIIDVVFAAESPKGSASSRVGKDPLQPGKNRALKASDAFQRYRIAALIGNLRVRVDGEKRILSVEEKNLVFDHLVNLAPKKEPEWVTIAEILGIDRGQLIGTATMTDDGERAGARPPTHDTNRSIVNSRIAPLVDWWKTASALEQHAMVKALSNAEVDDFDSPEGAKVQAFFADLDDDVHAKLDSLHLPVGRAAYSEDTLVRLTRRMLADGVDLYTARLQEFGIEPSWTPPAPRIGEPVGNPAVDRVLKTVSRWLESATKTWGAPERVIIEHVREGFVTEKRAREMDGDMQRRAARNAKLFQEMQEKLNVQGKPSRADLWRYQSVQRQNCQCAYCGSPITFSNSEMDHIVPRAGQGSTNTRENLVAVCHRCNQSKGNTPFAIWAKNTSIEGVSVKEAVERTRHWVTDTGMRSPDFKKFTKAVVERFQRATMDEEIDARSMESVAWMANELRSRVAQHFASHGTTVRVYRGSLTAEARRASGISGKLKFFDGVGKSRLDRRHHAIDAAVIAFTSDYVAETLAVRSNLKQSQAHRQEAPQWREFTGKDAEHRAAWRVWCQKMEKLSALLTEDLRDDRVVVMSNVRLRLGNGSAHKETIGKLSKVKLGSQLSVSDIDKASSEALWCALTREPDFDPKEGLPANPERHIRVNGTHVYAGDNIGLFPVSAGSIALRGGYAELGSSFHHARVYKITSGKKPAFAMLRVYTIDLLPYRNQDLFSVELKPQTMSMRQAEKKLRDALATGNAEYLGWLVVDDELVVDTSKIATDQVKAVEAELGTIRRWRVDGFFSPSKLRLRPLQMSKEGIKKESAPELSKIIDRPGWLPAVNKLFSDGNVTVVRRDSLGRVRLESTAHLPVTWKVQ

SEQ ID NO: 176 - protein, 1084 aa, Corynebacterium diphtheriae
MKYHVGIDVGTFSVGLAAIEVDDAGMPIKTLSLVSHIHDSGLDPDKIKSAVTRLASSGIARRTRRLYRRKRRRLQQLDKFIQRQGWPVIELEDYSDPLYPWKVRAELAASYIADEKERGEKLSVALRHIARHRGWRNPYAKVSSLYLPDEPSDAFKAIREEIKRASGQPVPETATVGQMVTLCELGTLKLRGEGGVLSARLQQSDHAREIQEICRMQEIGQELYRKIIDVVFAAESPKGSASSRVGKDPLQPGKNRALKASDAFQRYRIAALIGNLRVRVDGEKRILSVEEKNLVFDHLVNLAPKKEPEWVTIAEILGIDRGQLIGTATMTDDGERAGARPPTHDTNRSIVNSRIAPLVDWWKTASALEQHAMVKALSNAEVDDFDSPEGAKVQAFFADLDDDVHAKLDSLHLPVGRAAYSEDTLVRLTRRMLADGVDLYTARLQEFGIEPSWTPPAPRIGEPVGNPAVDRVLKTVSRWLESATKTWGAPERVIIEHVREGFVTEKRAREMDGDMRRRAARNAKLFQEMQEKLNVQGKPSRADLWRYQSVQRQNCQCAYCGSPITFSNSEMDHIVPRAGQGSTNTRENLVAVCHRCNQSKGNTPFAIWAKNTSIEGVSVKEAVERTRHWVTDTGMRSTDFKKFTKAVVERFQRATMDEEIDARSMESVAWMANELRSRVAQHFASHGTTVRVYRGSLTAEARRASGISGKLEFLDGVGKSRLDRRHHAIDAAVIAFTSDYVAETLAVRSNLKQSQAHRQEAPQWREFTGKDAEHRAAWRVWCQKMEKLSALLTEDLRDDRVVVMSNVRLRLGNGSAHEETIGKLSKVKLGSQLSVSDIDKASSEALWCALTREPDFDPKDGLPANPERHIRVNGTHVYAGDNIGLFPVSAGSIALRGGYAELGSSFHHARVYKITSGKKPAFAMLRVYTIDLLPYRNQDLFSVELKPQTMSMRQAEKKLRDALATGNAEYLGWLVVDDELVVDTSKIATDQVKAVEAELGTIRRWRVDGFFGDTRLRLRPLQMSKEGIKKESAPELSKIIDRPGWLPAVNKLFSEGNVTVVRRDSLGRVRLESTAHLPVTWKVQ

SEQ ID NO: 177 - protein, 1084 aa, Corynebacterium diphtheriae
MKYHVGIDVGTFSVGLAAIEVDDAGMPIKTLSLVSHIHDSGLDPDEIKSAVTRLASSGIARRTRRLYRRKRRRLQQLDKFIQRQGWPVIELEDYSDPLYPWKVRAELAASYIADEKERGEKLSVALRHIARHRGWRNPYAKVSSLYLPDGPSDAFKAIREEIKRASGQPVPETATVGQMVTLCELGTLKLRGEGGVLSARLQQSDHAREIQEICRMQEIGQELYRKIIDVVFAAESPKGSASSRVGKDPLQPGKNRALKASDAFQRYRIAALIGNLRVWVDGEKRILSVEEKNLVFDHLVNLTPKKEPEWVTIAEILGIDRGQLIGTATMTDDGERAGARPPTHDTNRSIVNSRIAPLVDWWKTASALEQHAMVKALSNAEVDDFDSPERAKVQAFFADLDDDVHAKLDSLHLPVGRAAYSEDTLVRLTRRMLSDGVDLYTARLQEFGIEPSWTPPTPRIGEPVGNPAVDRVLKTVSRWLESATKTWGAPERVIIEHVREGFVTEKRAREMDGDMRRRAARNAKLFQEMQEKLNVQGKPSRADLWRYQSVQRQNCQCAYCGSPITFSNSEMDHIVPRAGQGSTNTRENLVAVCHRCNQSKGNTPFAIWAKNTSIEGVSVKEAVERTRHWVTDTGMRSTDFKKFTKAVVERFQRATMDEEIDARSMESVAWMANELRSRVAQHFASHGTTVRVYRGSLTAEARRASGISGKLEFLDGVGKSRLDRRHHAIDAAVIAFTSDYVAETLAVRSNLKQSQAHRQEAPQWREFTGKDAEHRATWRVWCQKMEKLSALLTEDLRDDRVVVMSNVRLRLGNGSAHEETIGKLSKVKLGSQLSVSDIDKASSEALWCALTREPDFDPKDGLPANPERHIRVNGTHVYAGDNIGLFPVSAGSIALRGGYAELGSSFHHARVYKITSGKKPAFAMLRVYTIDLLPYRNQDLFSVELKPQTMSMRQAEKKLRDALATGNAEYLGWLVVDDELVVDTSKIATDQVKAVEAELGTIRRWRVDGFFGDTRLRLRPLQMSKEGIKKESAPELSKIIDRPGWLPAVNKLFSEGNVTVVRRDSLGRVRLESTAHLPVTWKVQ

SEQ ID NO: 178 - protein, 1084 aa, Corynebacterium diphtheriae
MKYHVGIDVGTFSVGLAAIEVDDAGMPIKTLSLVSHIHDSGLDPDEIKSAVTRLASSGIARRTRRLYRRKRRRLQQLDKFIQRQGWPVIELEDYSDPLYPWKVRAELAASYIADEKERGEKLSVALRHIARHRGWRNPYAKVSSLYLPDGPSDAFKAIREEIKRASGQPVPETATVGQMVTLCELGTLKLRGEGGVLSARLQQSDYAREIQEICRMQEIGQELYRKIIDVVFAAESPKGSASSRVGKDPLQPGKNRALKASDAFQRYRIAALIGNLRVRVDGEKRILSVEEKNLVFDHLVNLTPKKEPEWVTIAEILGIDRGQLIGTATMTDDGERAGARPPTHDTNRSIVNSRIAPLVDWWKTASALEQHAMVKALSNAEVDDFDSPEGAKVQAFFADLDDDVHAKLDSLHLPVGRAAYSEDTLVRLTRRMLSDGVDLYTARLQEFGIEPSWTPPTPRIGEPVGNPAVDRVLKTVSRWLESATKTWGAPERVIIEHVREGFVTEKRAREMDGDMRRRAARNAKLFQEMQEKLNVQGKPSRADLWRYQSVQRQNCQCAYCGSPITFSNSEMDHIVPRAGQGSTNTRENLVAVCHRCNQSKGNTPFAIWAKNTSIEGVSVKEAVERTRHWVTDTGMRSTDFKKFTKAVVERFQRATMDEEIDARSMESVAWMANELRSRVAQHFASHGTTVRVYRGSLTAEARRASGISGKLKFFDGVGKSRLDRRHHAIDAAVIAFTSDYVAETLAVRSNLKQSQAHRQEAPQWREFTGKDAEHRAAWRVWCQKMEKLSALLTEDLRDDRVVVMSNVRLRLGNGSAHKETIGKLSKVKLSSQLSVSDIDKASSEALWCALTREPGFDPKEGLPANPERHIRVNGTHVYAGDNIGLFPVSAGSIALRGGYAELGSSFHHARVYKITSGKKPAFAMLRVYTIDLLPYRNQDLFSVELKPQTMSMRQAEKKLRDALATGNAEYLGWLVVDDELVVDTSKIATDQVKAVEAELGTIRRWRVDGFFSPSKLRLRPLQMSKEGIKKESAPELSKIIDRPGWLPAVNKLFSDGNVTVVRRDSLGRVRLESTAHLPVTWKVQ

SEQ ID NO: 179 - protein, 1084 aa, Corynebacterium diphtheriae
MKYHVGIDVGTFSVGLAAIEVDDAGMPIKTLSLVSHIHDSGLDPDKMKSAVTRLASSGIARRTRRLYRRKRRRLQQLDKFIQRQGWPVIELEDYSDPLYPWKVRAELAASYIADEKERGEKLSVALRHIARHRGWRNPYAKVSSLYLPDEPSDAFKSIREEIKRASGQPVPETATVGQMVTLCELGTLKLRGEGGVLSARLQQSDHAREIQEICRMQEIGQELYRKIIDVVFAAESPKGSASSRVGKDPLQPGKNRALKASDSFQRYRIAALISNLRVRVDGEKRILSVEEKNLVFDHLVNLAPKKEPEWVTIAEILGIDRGQLIGTATMTDDGERAGARPPTHDTNRSIVNSRIAPLVDWWKTASALEQHAMVKALSNAEVDDFDSPEGAKVQAFFADLDDDVHAKLDSLHLPVGRAAYSEDTLVRLTRRMLADGVDLYTARLQEFGIEPSWTPPAPRIGEPVGNPAVDRVLKTVSRWLESATKTWGAPERVIIEHVRDGFVTEKRAREMDGDMRRRAARNAKLFQEMQEKLNVQGKPSRADLWRYQSVQRQNCQCAYCGSPITFSNSEMDHIVPRAGQGSTNTRENLVAVCHRCNQSKGNTPFAIWAKNTSIEGVSVKEAVERTRHWVTDTGMRSTDFKKFTKAVVERFQRATMDEEIDARSMESVAWMANELRSRVAQHFASHGTTVRVYRGSLTAEARRASGISGKLEFLDGVGKSRLDRRHHAIDAAVIAFTSDYVAETLAVRSNLKQSQAHRQEAPQWREFTGKDAEHRAAWRVWCQKMEKLSALLTEDLRDDRVVVMSNVRLRLGNGSAHEETIGKLSKVKLGSQLSVSDIDKASSEALWCALTREPDFDPKDGLPANPERHIRVNGTHVYAGDNIGLFPVSAGSIALRGGYAELGSSFHHARVYKITSGKKPAFAMLRVYTIDLLPYRNQDLFSVELKPQTMSMRQAEKKLRDALATGNAEYLGWLVVDDELVVDTSKIATDQVKAVEAELGTIRRWRVDGFFGDTRLRLRPLQMSKEGIKKELAPELSKIIDRPGWLPAVNKLFSEGNVTVVRRDSLGRVRLESTAHLPVTWKVQ

SEQ ID NO: 180 - protein, 1089 aa, Corynebacterium matruchotii
  source 1..1089: note = Corynebacterium matruchotii ATCC 14266
MNSANVNYRVGIDVGSYSLGMAAIAIDDDGKPTEILSAISLIHDSGVDPDSAKSAATRLATSGIARRTRRLYRRKRKRLAKLDKFISSQGWPLKEFEKYEDPFYPWRVRAELATTAITDQQELGEKLSIALRHIARHRGWRNPYSKVTALYTVTEPSDAFLAMQEECAKQLGRTIPETITVGQLVTGMNLGKTRLRGENSLLAARPRQSDNANEIHTIAKVQGLSNELVRQIIDHVFAAESPKGSAAEQVGKDPLQPTKKRALKASDAFQQYRIAALIGNLRIRGGKGNRRLTTEETRLVFDYLRSLPAKQEPTWQLVAEQLKIDRGNLVGTAIMTDDGERAGAKPPVHDTNRIMENTKIKPLATWWKSADADARAAMVKALSNAEVDDFDSQAGAQVQEFFFGISDEDQEKLDGLHLPIGRAAYSEDTLDRLTKRMIGEGMDLYEARQAEFKISNDWAPPAPEIGERVGNPAVDRVLKATARWLNAAERQWGAPKSVNIEHVRAAFMSESSARELDRDNQQRAKRNVKVVAEMQEKLGIEGRPSRADVWRFQSIQRQNGKCAYCGAEISFKNSEMDHIIPQAGEGSTNTRDNLVAVCRECNSSKSNIAFAVWAENTSRPGVSVQKAIERTHHWVTDSGLRKPEFDKFRKQVCDRLRRKATDEPIDARSLESVAWMANELRSRIAQKFKDGDTKVRVYKGALTAEARRASGISGKLEFVDGKGKSRLDRRHHAVDAAVVAFTSNYVAETLALRSNMKFDQELRRKAPQWREFTGSDHVHQVEWTKWKYRMQALAELLNNALVQDRIVVMHNLRLRLGNGAAHEDTIGKLTRLKVGDAISTTDIDRASSEALWCALTRDPDYDPKTGLPENPNRTIRIHGTHLTASDEITVFPVAAASIPIRDGFAKLGSNYHHVRLFRVPSGKKYKYCLMQVYTVDLLKFRKEDLFTVELKPQTISVRTCEALLRKALANGTAEYLGWLVSDDELLIDTSSFDTPGIVKLREEYGPVNRWRLAGLTSVTRLNLRPLYLSKEGLKPNVNPEIKKIIDNRSWIITVNKLFSSGHVKIIRRDALGRPRLHSAAHLPICWEVK

SEQ ID NO: 181 - protein, 1069 aa, Corynebacterium matruchotii
  source 1..1069: note = Corynebacterium matruchotii ATCC 33806
MAAIAIDDDGKPTEILSAISLIHDSGVDPDSAKSAATRLATSGIARRTRRLYRRKRKRLAKLDKFISSQGWPLKEFEKYEDPFYPWRVRAELATTAITDQQELGEKLSIALRHIARHRGWRNPYSKVTALYTVTEPSDAFLAMQEECAKQLGRTIPETITVGQLVTGMNLGKTRLRGENSLLAARPRQSDNANEIHTIAKVQGLSNELVRQIIDHVFAAESPKGSAAEQVGKDPLQPTKKRALKASDAFQQYRIAALIGNLRIRGGKGNRRLTTEETRLVFDYLRSLPAKQEPTWQLVAEQLKIDRGNLVGTAIMTDDGERAGAKPPVHDTNRIMENTKIKPLATWWKSADADARAAMVKALSNAEVDDFDSQAGAQVQEFFFGISDEDQEKLDGLHLPIGRAAYSEDTLDRLTKRMIGEGMDLYEARQAEFKISNDWAPPAPEIGERVGNPAVDRVLKATARWLNAAERQWGAPKSVNIEHVRAAFMSESSARELDRDNQQRAKRNVKVVAEMQEKLGIEGRPSRADVWRFQSIQRQNGKCAYCGAEISFKNSEMDHIIPQVGEGSTNTRDNLVAVCRECNSSKSNIAFAVWAENTSRPGVSVQKAIERTHHWVTDSGLRKPEFDKFRKQVCDRLRRKATDEPIDARSLESVAWMANELRSRIAQKFKDGDTKVRVYKGALTAEARRASGISGKLEFVDGKGKSRLDRRHHAVDAAVVAFTSNYVAETLALRSNMKFDQELRRKAPQWREFTGSDHVHQVEWTKWKYRMQALAELLNNALVQDRIVVMHNLRLRLGNGAAHEDTIGKLTRLKVGDAISTTDIDRASSEALWCALTRDPDYDPKTGLPENPNRTIRIHGTHLTASDEITVFPVAAASIPIRDGFAKLGSNYHHVRLFRVPSGKKYKYCLMQVYTVDLLKFRKEDLFTVELKPQTISVRTCEALLRKALANGTAEYLGWLVSDDELLIDTSSFDTPGIVKLREEYGPVNRWRLAGLTSVTRLNLRPLYLSKEGLKPNVNPEIKKIIDNRSWIITVNKLFSSGHVKIIRRDALGRPRLHSAAHLPICWEVK

SEQ ID NO: 182 - protein, 1079 aa, Dinoroseobacter shibae
MRLGLDIGTSSIGWWLYETDGAGSDARITGVVDGGVRIFSDGRDPKSGASLAVDRRAARAMRRRRDRYLRRRATLMKVLAETGLMPADPAEAKALEALDPFALRAAGLDEPLPLPHLGRALFHLNQRRGFKSNRKTDRGDNESGKIKDATARLDMEMMANGARTYGEFLHKRRQKATDPRHVPSVRTRLSIANRGGPDGKEEAGYDFYPDRRHLEEEFHKLWAAQGAHHPELTETLRDLLFEKIFFQRPLKEPEVGLCLFSGHHGVPPKDPRLPKAHPLTQRRVLYETVNQLRVTADGREARPLTREERDQVIHALDNKKPTKSLSSMVLKLPALAKVLKLRDGERFTLETGVRDAIACDPLRASPAHPDRFGPRWSILDADAQWEVISRIRRVQSDAEHAALVDWLTEAHGLDRAHAEATAHAPLPDGYGRLGLTATTRILYQLTADVVTYADAVKACGWHHSDGRTGECFDRLPYYGEVLERHVIPGSYHPDDDDITRFGRITNPTVHIGLNQLRRLVNRIIETHGKPHQIVVELARDLKKSEEQKRADIKRIRDTTEAAKKRSEKLEELEIEDNGRNRMLLRLWEDLNPDDAMRRFCPYTGTRISAAMIFDGSCDVDHILPYSRTLDDSFPNRTLCLREANRQKRNQTPWQAWGDTPHWHAIAANLKNLPENKRWRFAPDAMTRFEGENGFLDRALKDTQYLARISRSYLDTLFTKGGHVWVVPGRFTEMLRRHWGLNSLLSDAGRGAVKAKNRTDHRHHAIDAAVIAATDPGLLNRISRAAGQGEAAGQSAELIARDTPPPWEGFRDDLRVRLDRIIVSHRADHGRIDHAARKQGRDSTAGQLHQETAYSIVDDIHVASRTDLLSLKPAQLLDEPGRSGQVRDPQLRKALRVATGGKTGKDFENALRYFASKPGPYQAIRRVRIIKPLQAQARVPVPAQDPIKAYQGGSNHLFEIWRLPDGEIEAQVITSFEAHTLEGEKRPHPAAKRLLRVHKGDMVALERDGRRVVGHVQKMDIANGLFIVPHNEANADTRNNDKSDPFKWIQIGARPAIASGIRRVSVDEIGRLRDGGTRPI

SEQ ID NO: 183 - protein, 1332 aa, Dolosigranulum pigrum
  source 1..1332: note = Dolosigranulum pigrum ATCC 51524
MQKNYTIGLDIGTNSVGWAVMKDDYTLIRKRMKVLGNTDIKKIKKNFWGVRLFDEGETAKETRLKRGTRRRYQRRRNRLIYLQDIFQQPMLAIDENFFHRLDDSFFVPDDKSYDRHPIFGSLEEEVAYHNTYPTIYHLRKHLADNPEKADLRLVYTALAHIVKYRGHFLIEGELNTENTSISETFEQFLDTYSDIFKEQLVGDISKVEEILSSKQSRSRKHEQIMALFPNENKLGNFGRFMMLIVGNTSNFKPVFDLDDEYKLKLSDETYEEDLDTLLGMTDDVFLDVFMAAKNVYDAVEMSAIISTDTGNSKAVLSNQMINFYDEHKVDLAQLKQFFKTHLPDKYYECFSDPSKNGYAGYIDGKTNQEDFYKYIEKVMKTIKSDKKDYFLDKIDREVFLRKQRSFYNSVIPHQIHLQEMQAILDRQSQYYPFLAENRDKIESLVTFRIPYYVGPLTVSDQSEFAWMERQSDEPIRPWNFDEIVNKERSAEKFIERMTNMDTYLLEEKVLPKRSLLYQTFEVYNELTKVRYTNEQGKTEKLNRQQKAEIIETLFKQKNRVREKDIANYLEQYGYVDGTDIKGVEDKFNASLSTYNDLAKIDGAKAYLDDPEYADVWEDIIKILTIFEDKAMRKKQLQTYSDTLSPEILKKLERKHYTGWGRFSKKLINGLRDEGSNKTILDYLKSDEGSSGPTNRNFMQLIRDNTLSFKKKIEDAQTIEDTTHIYDTVAELPGSPAIKKGIRQALKIVEEIIDIIGYEPENIVVEMARESQTTKKGKDLSKERLEKLTEAIKEFDGPSDVKVKDLKNENLRNDRLYLYYLQNGRDMYTNEPLDINNLSKYDIDHIIPQSFTTDNSIDNKVLVSRTKNQGNKSDDVPSINIVHKMKPFWRQLHKAGLISDRKFKNLTKAEHGGLTEADRAHFLNRQLVETRQITKHVANLLDSQYNTAEEQRINIVLLKSSMTSRFRKEFKLYKVREINDYHHGHDAYLNAVVATTIMKVYPNLKPQFVYGQYKKTSMFKEEKATARKHFYSNITKFFKKEKVVNEETGEILWDTERHLSTIKRVLSWKQMNIVKKVEKQKGQLWKETIYPKGDSSKLIPVKEGMDPQKYGGLSQVSEAFAVVITHEKGKKKQLKSDLISIPIVDQKAYEQHPTAYLEEAGYNNPTVLHELFKYQLFELEDGSRRMIASAKEFQKGNQMVLPLELVELLYHANRYDKVKFPDSIEYVHDNLAKFDDLLEYVIDFSNKYINADKNVQKIQKIYKEHGTEDVELTVESFVNLMTFTAMGAPATFKFYGESITRSRYTSITEFRGSTLIFQSITGLYETRYKLEDN

SEQ ID NO: 184 - protein, 1340 aa, Dorea longicatena
  source 1..1340: note = Dorea longicatena DSM 13814
MEQEYYLGLDMGTGSVGWAVTDSEYHVLRKHGKALWGVRLFESASTAEERRMFRTSRRRLDRRNWRIEILQEIFAEEISKKDPGFFLRMKESKYYPEDKRDINGNCPELPYALFVDDDFTDKDYHKKFPTIYHLRKMLMNTEETPDIRLVYLAIHHMMKHRGHFLLSGDINEIKEFGTTFSKLLENIKNEELDWNLELGKEEYAVVESILKDNMLNRSTKKTRLIKALKAKSICEKAVLNLLAGGTVKLSDIFGLEELNETERPKISFADNGYDDYIGEVENELGEQFYIIETAKAVYDWAVLVEILGKYTSISEAKVATYEKHKSDLQFLKKIVRKYLTKEEYKDIFVSTSDKLKNYSAYIGMTKINGKKVDLQSKRCSKEEFYDFIKKNVLKKLEGQPEYEYLKEELERETFLPKQVNRDNGVIPYQIHLYELKKILGNLRDKIDLIKENEDKLVQLFEFRIPYYVGPLNKIDDGKEGKFTWAVRKSNEKIYPWNFENVVDIEASAEKFIRRMTNKCTYLMGEDVLPKDSLLYSKYMVLNELNNVKLDGEKLSVELKQRLYTDVFCKYRKVTVKKIKNYLKCEGIISGNVEITGIDGDFKASLTAYHDFKEILTGTELAKKDKENIITNIVLFGDDKKLLKKRLNRLYPQITPNQLKKICALSYTGWGRFSKKFLEEITAPDPETGEVWNIITALWESNNNLMQLLSNEYRFMEEVETYNMGKQTKTLSYETVENMYVSPSVKRQIWQTLKIVKELEKVMKESPKRVFIEMAREKQESKRTESRKKQLIDLYKACKNEEKDWVKELGDQEEQKLRSDKLYLYYTQKGRCMYSGEVIELKDLWDNTKYDIDHIYPQSKTMDDSLNNRVLVKKKYNATKSDKYPLNENIRHERKGFWKSLLDGGFISKEKYERLIRNTELSPEELAGFIERQIVETRQSTKAVAEILKQVFPESEIVYVKAGTVSRFRKDFELLKVREVNDLHHAKDAYLNIVVGNSYYVKFTKNASWFIKENPGRTYNLKKMFTSGWNIERNGEVAWEVGKKGTIVTVKQIMNKNNILVTRQVHEAKGGLFDQQIMKKGKGQIAIKETDERLASIEKYGGYNKAAGAYFMLVESKDKKGKTIRTIEFIPLYLKNKIESDESIALNFLEKGRGLKEPKILLKKIKIDTLFDVDGFKMWLSGRTGDRLLFKCANQLILDEKIIVTMKKIVKFIQRRQENRELKLSDKDGIDNEVLMEIYNTFVDKLENTVYRIRLSEQAKTLIDKQKEFERLSLEDKSSTLFEILHIFQCQSSAANLKMIGGPGKAGILVMNNNISKCNKISIINQSPTGIFENEIDLLKI

SEQ ID NO: 185 - protein, 1380 aa, Eggerthella sp.
  source 1..1380: note = Eggerthella sp. YY7918
MNLRHVGNYNIGLDMGTASVGWAAIDEQGELLHFKGKPTWGSRLFDSANTAATARMPRGQRRRYIRRRWRLDLLQKFFSEEMAEKDPEFFIRLRQSSLWPEDREGGHTAYHWPLFNDSDFNEKEYYEKFPTIFHLRQWLMETDEKADIRLIYLAFHNIVKHRGNFLQENNDSLSAQNANMRESLESFCIALEEWCDEKELTCSCDPQKLEHLFKEVKYRSDIRDGFAALLGLACSGENEVDVKAMAKEMGKAIVGYKADFSKIFTECDKEGSSFRLSDDEGPEAFLDICPDDGIALFEAIQMVYSSFILTGMLTEKGLSLSKISAYNQYGQDLESLKALVKEYVPNEYSSFFRGPTYSGSTEYDPSKAQGYTRYNLGPSKKGSGAKPMAYEDFKKSVEQLFANTNAINDERYKEMMGRFAEEKFLRRLRTSDNGRIPFQLNLEEMTAIIINQGKYYPFLLEQQEKLESLVRFRIPYYVGPLTRINARLDSKGNACFAWSKRKDGMDSASIKPWNWDEVIDKHASAQAFIERMTGTCTYLRGEPVLPRCSLLYEEYCVLNELNGARWTQDGDKFIRFDYKDRSDIIEELFKKRRGRIQYAAVADWMKQERSHANVHVSGGQGENAFESRLSSYHFFCNDVFGVDELPGSYVDMVEEIILWSTLFEDRSILREEIQRKYGDVLNEEQIKTICKKRFSGWGRLSRKLLCSLKAQTDNGPKSIMDILQEGDQNNGRVGRAMVFQEILHDEQLGFEQKIEEENTQSMLEGENLLIEDLPGSPAIRRSINQAVRIVDEIVGIAGHAPDNIFIEVTREDDTKKKGKRTTTRYSNIQKALEALKEEGAEALRELKTYKHNELDKRLSLYFMQNGKSLYSGIPLDIRRLSEYQIDHIIPQSYIKDDSYENMALVLPGENQSKADNLLISQDIRIKMKATWTALHKAGLMGDKKYNNLMNSSISDAKMKGFINRQLVETSQSVKLTQMMLSQKYPGAKVRPIKASISSQLRDACDLVKCREANDYHHAHDAYLACQVGRFVLKRHSSMFDNPIGMTKVIRDFVKRQGQEFKRNGKLPAYASRSGFIVQSFMRSGFDAETGELLRDDWNAPFEIARIKRCLNYRDCYISRMPMEDSGAFWDATIYSPKAGKKGALPVKQGLPVEKYGSYSREQFAYFFVYKAYNPKKKAYRLEFEAVPVRVASAVETRENALEEYAKSVAKQAGLEFVEVARPKVYKYQLIELGEDRLYITGKREVRNASQLAFSLDEIDLLKRLAEGEETSSEERERLFDVLIEKYARYAPRLARQLSVDSMSATFETLNAEEQLGILLSLVEIANGKRNMIDLSSAGGSKNAGCMNPTFSSELSSPGSNFTFIDQSVTGMFERRQRLEL

SEQ ID NO: 186 - protein, 1195 aa, Elusimicrobium minutum
MQKNINTKQNHIYIKQAQKIKEKLGDKPYRIGLDLGVGSIGFAIVSMEENDGNVLLPKEIIMVGSRIFKASAGAADRKLSRGQRNNHRHTRERMRYLWKVLAEQKLALPVPADLDRKENSSEGETSAKRFLGDVLQKDIYELRVKSLDERLSLQELGYVLYHIAGHRGSSAIRTFENDSEEAQKENTENKKIAGNIKRLMAKKNYRTYGEYLYKEFFENKEKHKREKISNAANNHKFSPTRDLVIKEAEAILKKQAGKDGFHKELTEEYIEKLTKAIGYESEKLIPESGFCPYLKDEKRLPASHKLNEERRLWETLNNARYSDPIVDIVTGEITGYYEKQFTKEQKQKLFDYLLTGSELTPAQTKKLLGLKNTNFEDIILQGRDKKAQKIKGYKLIKLESMPFWARLSEAQQDSFLYDWNSCPDEKLLTEKLSNEYHLTEEEIDNAFNEIVLSSSYAPLGKSAMLIILEKIKNDLSYTEAVEEALKEGKLTKEKQAIKDRLPYYGAVLQESTQKIIAKGFSPQFKDKGYKTPHTNKYELEYGRIANPVVHQTLNELRKLVNEIIDILGKKPCEIGLETARELKKSAEDRSKLSREQNDNESNRNRIYEIYIRPQQQVIITRRENPRNYILKFELLEEQKSQCPFCGGQISPNDIINNQADIEHLFPIAESEDNGRNNLVISHSACNADKAKRSPWAAFASAAKDSKYDYNRILSNVKENIPHKAWRFNQGAFEKFIENKPMAARFKTDNSYISKVAHKYLACLFEKPNIICVKGSLTAQLRMAWGLQGLMIPFAKQLITEKESESFNKDVNSNKKIRLDNRHHALDAIVIAYASRGYGNLLNKMAGKDYKINYSERNWLSKILLPPNNIVWENIDADLESFESSVKTALKNAFISVKHDHSDNGELVKGTMYKIFYSERGYTLTTYKKLSALKLTDPQKKKTPKDFLETALLKFKGRESEMKNEKIKSAIENNKRLFDVIQDNLEKAKKLLEEENEKSKAEGKKEKNINDASIYQKAISLSGDKYVQLSKKEPGKFFAISKPTPTTTGYGYDTGDSLCVDLYYDNKGKLCGEIIRKIDAQQKNPLKYKEQGFTLFERIYGGDILEVDFDIHSDKNSFRNNTGSAPENRVFIKVGTFTEITNNNIQIWFGNIIKSTGGQDDSFTINSMQQYNPRKLILSSCGFIKYRSPILKNKEG

SEQ ID NO: 187 - protein, 1337 aa, Enterococcus faecalis
  source 1..1337: note = Enterococcus faecalis ATCC 29200
MKKDYVIGLDIGTNSVGWAVMTEDYQLVKKKMPIYGNTEKKKIKKNFWGVRLFEEGHTAEDRRLKRTARRRISRRRNRLRYLQAFFEEAMTDLDENFFARLQESFLVPEDKKWHRHPIFAKLEDEVAYHETYPTIYHLRKKLADSSEQADLRLIYLALAHIVKYRGHFLIEGKLSTENISVKEQFQQFMIIYNQTFVNGESRLVSAPLPESVLIEEELTEKASRTKKSEKVLQQFPQEKANGLFGQFLKLMVGNKADFKKVFGLEEEAKITYASESYEEDLEGILAKVGDEYSDVFLAAKNVYDAVELSTILADSDKKSHAKLSSSMIVRFTEHQEDLKKFKRFIRENCPDEYDNLFKNEQKDGYAGYIAHAGKVSQLKFYQYVKKIIQDIAGAEYFLEKIAQENFLRKQRTFDNGVIPHQIHLAELQAIIHRQAAYYPFLKENQEKIEQLVTFRIPYYVGPLSKGDASTFAWLKRQSEEPIRPWNLQETVDLDQSATAFIERMTNFDTYLPSEKVLPKHSLLYEKFMVFNELTKISYTDDRGIKANFSGKEKEKIFDYLFKTRRKVKKKDIIQFYRNEYNTEIVTLSGLEEDQFNASFSTYQDLLKCGLTRAELDHPDNAEKLEDIIKILTIFEDRQRIRTQLSTFKGQFSAEVLKKLERKHYTGWGRLSKKLINGIYDKESGKTILGYLIKDDGVSKHYNRNFMQLINDSQLSFKNAIQKAQSSEHEETLSETVNELAGSPAIKKGIYQSLKIVDELVAIMGYAPKRIVVEMARENQTTSTGKRRSIQRLKIVEKAMAEIGSNLLKEQPTTNEQLRDTRLFLYYMQNGKDMYTGDELSLHRLSHYDIDHIIPQSFMKDDSLDNLVLVGSTENRGKSDDVPSKEVVKDMKAYWEKLYAAGLISQRKFQRLTKGEQGGLTLEDKAHFIQRQLVETRQITKNVAGILDQRYNANSKEKKVQIITLKASLTSQFRSIFGLYKVREVNDYHHGQDAYLNCVVATTLLKVYPNLAPEFVYGEYPKFQTFKENKATAKAIIYTNLLRFFTEDEPRFTKDGEILWSNSYLKTIKKELNYHQMNIVKKVEVQKGGFSKESIKPKGPSNKLIPVKNGLDPQKYGGFDSPIVAYTVLFTHEKGKKPLIKQEILGITIMEKTRFEQNPILFLEEKGFLRPRVLMKLPKYTLYEFPEGRRRLLASAKEAQKGNQMVLPEHLLTLLYHAKQCLLPNQSESLAYVEQHQPEFQEILERVVDFAEVHTLAKSKVQQIVKLFEANQTADVKEIAASFIQLMQFNAMGAPSTFKFFQKDIERARYTSIKEIFDATIIYQSTTGLYETRRKVVD

SEQ ID NO: 188 - protein, 1337 aa, Enterococcus faecalis
  source 1..1337: note = Enterococcus faecalis ATCC 4200
MKKDYVIGLDIGTNSVGWAVMTEDYQLVKKKMPIYGNTEKKKIKKNFWGVRLFEEGHTAEDRRLKRTARRRISRRRNRLRYLQAFFEEAMTALDENFFARLQESFLVPEDKKWHRHPIFAKLEDEVAYHETYPTIYHLRKKLADSSEQADLRLIYLALAHIVKYRGHFLIEGKLSTENISVKEQFQQFMIIYNQTFVNGESRLVSAPLPESVLIEEELTEKASRTKKSEKVLQQFPQEKANGLFGQFLKLMVGNKADFKKVFGLEEEAKITYASESYEEDLEGILAKVGDEYSDVFLAAKNVYDAVELSTILADSDKKSHAKLSSSMIVRFTEHQEDLKKFKRFIRENCPDEYDNLFKNEQKDGYAGYIAHAGKVSQLKFYQYVKKIIQDIAGAEYFLEKIAQENFLRKQRTFDNGVIPHQIHLAELQAIIHRQAAYYPFLKENQEKIEQLVTFRIPYYIGPLSKGDASTFAWLKRQSEEPIRPWNLQETVDLDQSATAFIERMTNFDTYLSSEKVLPKHSLLYEKFMVFNELTKISYTDDRGIKANFSGKEKEKIFDYLFKTRRKVKKKDIIQFYRNEYNTEIVTLSGLEEDQFNASFSTYQDLLKCGLTRAELDHPDNAEKLEDIIKILTIFEDRQRIRTQLSTFKGQFSAEVLKKLERKHYTGWGRLSKKLINGIYDKESGKTILGYLIKDDGVSKHYNRNFMQLINDSQLSFKNAIQKAQSSEHEETLSETVNELAGSPAIKKGIYQSLKIVDELVAIMGYAPKRIVVEMARENQTTSTGKRRSIQRLKIVEKAMAEIGSNLLKEQPTTNEQLRDTRLFLYYMQNGKDMYTGDELSLHRLSHYDIDHIIPQSFMKDDSLDNLVLVGSTENRGKSDDVPSKEVVKDMKAYWEKLYAAGLISQRKFQRLTKGEQGGLTLEDKAHFIQRQLVETRQITKNVAGILDQRYNANSKEKKVQIITLKASLTSQFRSIFGLYKVREVNDYHHGQDAYLNCVVATTLLKVYPNLAPEFVYGEYPKFQAFKENKATAKAIIYTNLLRFFTEDEPRFTKDGEILWSNSYLKTIKKELNYHQMNIVKKVEVQKGGFSKESIKPKGPSNKLIPVKNGLDPQKYGGFDSPVVAYTVLFTHEKGKKPLIKQEILGITIMEKTRFEQNPILFLEEKGFLRPRVLMKLPKYTLYEFPEGRRRLLASAKEAQKGNQMVLPEHLLTLLYHAKQCLLPNQSESLAYVEQHQPEFQEILERVVDFAEVHTLAKSKVQQIVKLFEANQTADVKEIAASFIQLMQFNAMGAPSTFKFFQKDIERARYTSIKEIFDATIIYQSTTGLYETRRKVVD

SEQ ID NO: 189 - protein, 1337 aa, Enterococcus faecalis
  source 1..1337: note = Enterococcus faecalis D6
MKKDYVIGLDIGTNSVGWAVMTEDYQLVKKKMPIYGNTEKKKIKKNFWGVRLFEEGHTAEDRRLKRTARRRISRRRNRLRYLQAFFEEAMTALDENFFARLQESFLVPEDKKWHRHPIFAKLEDEVAYHETYPTIYHLRKKLADSSEQADLRLIYLALAHIVKYRGHFLIEGKLSTENISVKEQFQQFMIIYNQTFVNGESRLVSAPLPESVLIEEELTEKASRTKKSEKVLQQFPQEKANGLFGQFLKLMVGNKADFKKVFGLEEEAKITYASESYEEDLEGILAKVGDEYSDVFLAAKNVYDAVELSTILADSDKKSHAKLSSSMIVRFTEHQEDLKNFKRFIRENCPDEYDNLFKNEQKDGYAGYITHAGKVSQLKFYQYVKKIIQDIAGAEYFLEKIAQENFLRKQRTFDNGVIPHQIHLAELQAIIHRQAAYYPFLKENQEKIEQLVTFRIPYYVGPLSKGDANTFAWLKRQSEEPIRPWNLQETVDLDQSATAFIERMTNFDTYLPSEKVLPKHSLLYEKFMVFNELTKISYTDDRGIKANFSGKEKEKIFDYLFKTRRKVKKKDIIQFYRNEYNTEIVTLSGLEEDQFNASFSTYQDLLKCGLTRAELDHPDNAEKLEDIIKILTIFEDRQRIRTQLSTFKGQFSAEVLKKLERKHYTGWGRLSKKLINGIYDKESGKTILDYLIKDDGVSKHYNRNFMQLINDSQLSFKNAIQKAQSSEHEETLSETVNELAGSPAIKKGIYQSLKIVDELVAIMGYAPKRIVVEMARENQTTSTGKRRSIQRLKIVEKAMAEIGSNLLKEQPTTNEQLRDTRLFLYYMQNGKDMYTGDELSLHRLSHYDIDHIIPQSFMKDDSLDNLVLVGSTENRGKSDDVPSKEVVKDMKAYWEKLYAAGLISQRKFQRLTKGEQGGLTLEDKAHFIQRQLVETRQITKNVAGILDQRYNAKSKEKKVQIITLKASLTSQFRSIFGLYKVREVNDYHHGQDAYLNCVVATTLLKVYPNLAPEFVYGEYPKFQTFKENKATAKAIIYTNLLRFFTEDEPRFTKDGEILWSNSYLKTIKKELNYHQMNIVKKVEVQKGGFSKESIKPKGPSNKLIPVKNGLDPQKYGGFDSPIVAYTVLFTHEKGKKPLIKQEILGITIMEKTRFEQNPILFLEEKGFLRPRVLMKLPKYTLYQFPEGRRRLLASAKEAQKGNQMVLPEHLLTLLYHAKQCLLPNQSESLAYVEQHQPEFQEILERVVDFAEVHTLAKSKVQQIVKLFEANQTADVKEIAASFIQLMQFNAMGAPSTFKFFQKDIERARYTSIKEIFDATIIYQSTTGLYETRRKVVD

SEQ ID NO: 190 - protein, 1337 aa, Enterococcus faecalis
  source 1..1337: note = Enterococcus faecalis E1Sol
MKKDYVIGLDIGTNSVGWAVMTEDYQLVKKKMPIYGNTEKKKIKKNFWGVRLFEEGHTAEDRRLKRTARRRISRRRNRLRYLQAFFEEAMTDLDENFFARLQESFLVPEDKKWHRHPIFAKLEDEVAYHETYPTIYHLRKKLADSSEQADLRLIYLALAHIVKYRGHFLIEGKLSTENTSVKEQFQQFMVIYNQTFVNGESRLVSAPLPESVLIEEELTEKASRTKKSEKVLQQFPQEKANGLFGQFLKLMVGNKADFKKVFGLEEEAKITYASESYEEDLEGILAKVGDEYSDVFLAAKNVYDAVELSTILADSDKKSHAKLSSSMIVRFTEHQEDLKKFKRFIRENCPDEYDNLFKNEQKDGYAGYIAHAGKVSQLKFYQYVKKIIQDIAGAEYFLEKIAQENFLRKQRTFDNGVIPHQIHLAELQAIIHRQAAYYPFLKENQEKIEQLVTFRIPYYVGPLSKGDASTFAWLKRQSEEPIRPWNLQETVDLDQSATAFIERMTNFDTYLPSEKVLPKHSLLYEKFMVFNELTKISYTDDRGIKANFSGKEKEKIFDYLFKTRRKVKKKDIIQFYRNEYNTEIVTLSGLEEDQFNASFSTYQDLLKCGLTRAELDHPDNAEKLEDIIKILTIFEDRQRIRTQLSTFKGQFSAEVLKKLERKHYTGWGRLSKKLINGIYDKESGKTILDYLVKDDGVSKHYNRNFMQLINDSQLSFKNAIQKAQSSEHEETLSETVNELAGSPAIKKGIYQSLKIVDELVAIMGYAPKRIVVEMARENQTTSTGKRRSIQRLKIVEKAMAEIGSNLLKEQPTTNEQLRDTRLFLYYMQNGKDMYTGDELSLHRLSHYDIDHIIPQSFMKDDSLDNLVLVGSTENRGKSDDVPSKKVVKKMKAYWEKLYAAGLISQRKFQRLTKGEQGGLTLEDKAHFIQRQLVETRQITKNVAGILDQRYNAKSKEKKVQIITLKASLTSQFRSIFGLYKVREVNDYHHGQDAYLNCVVATTLLKVYPNLAPEFVYGEYPKFQAFKENKATAKTIIYTNLMRFFTEDEPRFTKDSEILWSNSYLKTIKKELNYHQMNIVKKVEVQKGGFSKESIKPKGPSNKLIPVKNGLDPQKYGGFDSPVVAYTVLFTHEKGKKPLIKQEILGITIMEKTRFEQNPILFLEEKGFLRPRVLMKLPKYTLYEFPEGRRRLLASAKEAQKGNQMVLPEHLLTLLYHAKQCLLPNQSESLAYVEQHQPEFQEILERVVDFAEVHTLAKSKVQQIVKLFEANQTADVKEIAASFIQLMQFNAMGAPSTFKFFQKDIERARYTSIKEIFDATIIYQSTTGLYETRRKVVD

SEQ ID NO: 191 - protein, 1150 aa, Enterococcus faecalis
  source 1..1150: note = Enterococcus faecalis Fly1
MYSIGLDLGISSVGWSVIDERTGNVIDLGVRLFSAKNSEKNLERRTNRGGRRLIRRKTNRLKDAKKILAAVGFYEDKSLKNSCPYQLRVKGLTEPLSKGEIYKVTLHILKKRGISYLDEDDTEAAKESQDYKEQVRKNAQLLTKYTPGQIQLQRLKENNRVKTGINAQGNYQLNVFKVSAYANELATILKTQQAFYPNELTDDWIALFVQPGIAEEAGLIYRKRPYYHGPGNEANNSPYGRWSDFKKTGQPATNIFDRLIGKDFQGELRASGLSLSAQQYNLLNDLTNLKIDGEIPLSPEQKEYILAELMTKEFTRFGVNDVAKLLGVKKERLSGWRLDKKGKPEIHTLKGYRNWRKIFAESGIDLATLPTETIDCLAKVLTLNTEHEGIENTLAFELPELAESVKLLVLDRYKELSQSVSTQAWHRFSLKTLHLLIPELMNATSEQNTLLEQFQLKSDVRKRYSEYKKLPTKDVLTEIYNPTVNKTVSQAFKVIDALLVKYGKEQIRYITIEMPRDDNEEDEKKRIKELHAKNSQRKNDSQSYFMQKSGWSQEKFQTTIQKNRRFLAKLLYYYEQDGICAYTGLSISPELLVSDSTEIDHIIPISISLDDSINNKVLVLSKANQVKGQQTPYDAWMDGSFKKINGKFSNWDDYQKWVESRHFSHKKENNLLETRNIFDSEQVEKFLARNLNDTRYASRLVLNTLQSFFANHETKVRVVNGSFTHTLRKKWGADLDKTRETHHHHAVDATLCAVTPFVKVSRYHYAVKEETGEKVMREIDFETGEIVDEMSYQEFKKSKKYERKTYQVKWPNFREQLKPVNLHPRIKFSHQVDRKANRKLSDATIYSVREKTEVKTLKSGKQKITTDEYTIGKIKDIYTVDGWEAFKKKQDKLLMKDLDEKTYERLLSIAETTPDFQEVEEKNGKVKRVKRSPFAVYCEENDIPAIQKYAKKNNGPLIRSLKYYDGKLNKHINITKDSQGRPVEKTKNGRKVTLQSLKPYRYDIYQDLETKAYYTVQLYYSDLRFVEGKYGITEKEYMKKVAEQTKGQVVRFCFSLQKNDGLEIEWKDSQRYDVRFYNFQSANSINFKGLEQEMMPAENQFKQKPYNNGAINLNIAKYGKEGKKLRKFNTDILGKKHYLYYEKEPKNIIK

SEQ ID NO: 192 - protein, 1337 aa, Enterococcus faecalis
MKKDYVIGLDIGTNSVGWAVMTEDYQLVKKKMPIYGNTEKKKIKKNFWGVRLFEEGHTAEDRRLKRTARRRISRRRNRLRYLQAFFEEAMTDLDENFFARLQESFLVPEDKKWHRHPIFAKLEDEVAYHETYPTIYHLRKKLADSSEQADLRLIYLALAHIVKYRGHFLIEGKLSTENISVKEQFQQFMIIYNQTFVNGESRLVSAPLPESVLIEEELTEKASRTKKSEKVLQQFPQEKANGLFGQFLKLMVGNKADFKKVFGLEEEAKITYASESYEEDLEGILAKVGDEYSDVFLAAKNVYDAVELSTILADSDKKSHAKLSSSMIVRFTEHQEDLKKFKRFIRENCPDEYDNLFKNEQKDGYAGYIAHAGKVSQLKFYQYVKKIIQDIAGAEYFLEKIAQENFLRKQRTFDNGVIPHQIHLAELQAIIHRQAAYYPFLKENQEKIEQLVTFRIPYYVGPLSKGDASTFAWLKRQSEEPIRPWNLQETVDLDQSATAFIERMTNFDTYLPSEKVLPKHSLLYEKFMVFNELTKISYTDDRGIKANFSGKEKEKIFDYLFKTRRKVKKKDIIQFYRNEYNTEIVTLSGLEEDQFNASFSTYQDLLKCGLTRAELDHPDNAEKLEDIIKILTIFEDRQRIRTQLSTFKGQFSAEVLKKLERKHYTGWGRLSKKLINGIYDKESGKTILDYLVKDDGVSKHYNRNFMQLINDSQLSFKNAIQKAQSSEHEETLSETVNELAGSPAIKKGIYQSLKIVDELVAIMGYAPKRIVVEMARENQTTSTGKRRSIQRLKIVEKAMAEIGSNLLKEQPTTNEQLRDTRLFLYYMQNGKDMYTGDELSLHRLSHYDIDHIIPQSFMKDDSLDNLVLVGSTENRGKSDDVPSKEVVKDMKAYWEKLYAAGLISQRKFQRLTKGEQGGLTLEDKAHFIQRQLVETRQITKNVAGILNQRYNANSKEKKVQIITLKASLTSQFRSIFGLYKVREVNDYHHGQDAYLNCVVATTLLKVYPNLAPEFVYGEYPKFQTFKENKATAKAIIYTNLLRFFTEDEPRFTKDGEILWSNSYLKTIKKELNYHQMNIVKKVEVQKGGFSKESIKPKGPSNKLIPVKNGLDPQKYGGFDSPVVAYTVLFTHEKGKKPLIKQEILGITIMEKTRFEQNPILFLEEKGFLRPRVLMKLPKYTLYEFPEGRRRLLASAKEAQKGNQMVLPEHLLTLLYHAKQCLLPNQSESLAYVEQHQPEFQEILERVVDFAEVHTLAKSKVQQIVKLFEANQTADVKEIAASFIQLMQFNAMGAPSTFKFFQKDIERARYTSIKEIFDATIIYQSTTGLYETRRKVVD

SEQ ID NO: 193 - protein, 1150 aa, Enterococcus faecalis
  source 1..1150: note = Enterococcus faecalis R508
MYSIGLDLGISSVGWSVIDERTGNVIDLGVRLFSAKNSEKNLERRTNRGGRRLIRRKTNRLKDAKKILAAVGFYEDKSLKNSCPYQLRVKGLTEPLSKGEIYKVTLHILKKRGISYLDEDDTEAAKESQDYKEQVRKNAQLLTKYTPGQIQLQRLKENNRVKTGINVQGNYQLNVFKVSAYANELATILKTQQAFYPNELTDDWIALFVQPGIAEEAGLIYRKRPYYHGPGNEANNSPYGRWSDFQKTGEPATNIFDKLIGKDFQGELRASGLSLSAQQYNLLNDLTNLKIDGEVPLSSEQKEYILTELMTKEFTRFGVNDVVKLLGVKKERLSGWRLDKKGKPEIHTLKGYRNWRKIFAEAGIDLATLPTETIDCLAKVLTLNTEREGIENTLAFELPELSESVKLLVLDRYKELSQSISTQSWHRFSLKTLHLLIPELMNATSEQNTLLEQFQLKSDVRKRYSEYKKLPTKDVLAEIYNPTVNKTVSQAFKVIDALLVKYGKEQIRYITIEMPRDDNEEDEKKRIKELHAKNSQRKNDSQSYFMQKSGWSQEKFQTTIQKNRRFLAKLLYYYEQDGICAYTGLPISPELLVSDSTEIDHIIPISISLDDSINNKVLVLSKANQVKGQQTPYDAWMDGSFKKINGKFSNWDDYQKWVESRHFSHKKENNLLETRNIFDSEQVEKFLARNLNDTRYASRLVLNTLQSFFTNQETKVRVVNGSFTHTLRKKWGADLDKTRETHHHHAVDATLCAVTPFVKVSRYHYAVKEETGEKVMREIDFETGEIVNEMSYREFKKSKKYERKTYQVKWPNFREQLKPVNLHPRIKFSHQVDRKANRKLSDATIYSVREKTEVKTLKSGKQKITTDEYTIGKIKDIYTLDGWEAFKKKQDKLLMKDLDEKTYERLLSIAETTPDFQEVEEKNGKVKRVKRSPFAVYCEENDIPAIQKYAKKNNGPLIRSLKYYDGKLNKHINITKDSQGRPVEKTKNGRKVTLQSLKPYRYDIYQDLETKAYYTVQLYYSDLRFVEGKYGITEKEYMKKVAEQTKGQVVRFCFSLQKNDGLEIEWKDSQRYDVRFYNFQSANSINFKGLEQEIMPAENQFKQKPYNNGAINLNIAKYGKEGKKLRKFNTDILGKKHYLFYEKEPKNIIK

SEQ ID NO: 194 - protein, 1150 aa, Enterococcus faecalis
  source 1..1150: note = Enterococcus faecalis T11
MYSIGLDLGISSVGWSVIDERTGNVIDLGVRLFSAKNSEKNLERRTNRGGRRLIRRKTNRLKDAKKILAAVGFYEDKSLKNSCPYQLRVKGLTEPLSKGEIYKVTLHILKKRGISYLDEDDTEAAKESQDYKEQVRENAQLLTKYTPGQIQLQRLKENNRVKTGINAQGNYQLNVFKVSAYANELATILKTQQAFYPNELTDDWIALFVQPGIAEEAGLIYRKRPYYHGPGNEANNSPYGRWSDFKKTGQPATNIFDKLIGKDFQGELRASGLSLSAQQYNLLNDLTNLKIDGEIPLSPEQKEYILAELMTKEFTRFGVNDVVKLLGVKKERLSGWRLDKKGKPEIHTLKGYRNWRKIFAESGIDLAMLPTETIDCLAKILTLNTEREGIENTLAFELPELAESVKLLVLDRYKELSQSVSTQAWHRFSLKTLHLLIPELMNATSEQNTLLEQFQLKSDVRKRYSEYKKLPTKDVLTEIYNPTVNKTVSQAFKVIDALLVKYGKEQIRYITIEMPRDDNEEDEKKRIKELHAKNSQRKNDSQSYFMQKSGWSQEKFQTTIQKNRRFLAKLLYYYEQDGICAYTGLSISPELLVSDSTEIDHIIPISISLDDSINNKVLVLSKANQVKGQQTPYDAWMDGSFKKINGKFSNWDDYQKWVESRHFSHKKENNLLETRNIFDSEQVEKFLARNLNDTRYASRLVLNTLQSFFANQETKVRVVNGSFTHTLRKKWGADLDKTRETHHHHAVDATLCAVTPFVKVSRYHYAVKEETGEKVMREIDFETGEIVDEMSYREFKKSKKYERKTYQVKWPNFREQLKPVNLHPRIKFSHQVDRKANRKLSDATIYSVREKTEVKTLKSGKQKITTDEYTIGKIKDIYTVDGWEAFKKKQDKLLMKDLDEKTYERLLSIAETTPDFQEVEEKNGKVKRVKRSPFAVYCEENDIPAIRKYAKKNNGPLIRSLKYYDGKLNKHINITKDSQGRPVEKTKNGRKVTLQSLKPYRYDIYQDLETKAYYTVQLYYSDLRFVEGKYGITEKEYMKKVAEQTKGQVVRFCFSLQKNDGLEIEWKDSQRYDVRFYNFQSANSINFKGLEQEMMPAENQFKQKPYNNGAINLNIAKYGKEGKKLRKFNTDILGKKHYLYYEKEPKNIIK

SEQ ID NO: 195 - protein, 1150 aa, Enterococcus faecalis
  source 1..1150: note = Enterococcus faecalis TX0012
MYSIGLDLGISSVGWSVIDERTGNVIDLGVRLFSAKNSEKNLERRTNRGGRRLIRRKTNRLKDAKKILAAVGFYEDKSLKNSCPYQLRVKGLTEPLSRGEIYKVTLHILKKRGISYLDEVDTEAAKESQDYKEQVRKNAQLLTKYTPGQIQLQRLKENNRVKTGINAQGNYQLNVFKVSAYANELATILKTQQAFYPNELTDDWIALFVQPGIAEEAGLIYRKRPYYHGPGNEANNSPYGRWSDFQKTGEPATNIFDKLIGKDFQGELRASGLSLSAQQYNLLNDLTNLKIDGEVPLSSEQKEYILTELMTKEFTRFGVNDVVKLLGVKKERLSGWRLDKKGKPEIHTLKGYRNWRKIFAEAGIDLATLPTETIDCLAKVLTLNTEREGIENTLAFELPELSESVKLLVLDRYKELSQSISTQSWHRFSLKTLHLLIPELMNATSEQNTLLEQFQLKSDVRKRYSEYKKLPTKDVLAEIYNPTVNKTVSQAFKVIDALLVKYGKEQIRYITIEMPRDDNEEDEKKRIKELHAKNSQRKNDSQSYFMQKSGWSQEKFQTTIQKNRRFLAKLLYYYEQDGICAYTGLPISPELLVSDSTEIDHIIPISISLDDSINNKVLVLSKANQVKGQQTPYDAWMDGSFKKINGKFSNWDDYQKWVESRHFSHKKENNLLETRNIFDSEQVEKFLARNLNDTRYASRLVLNTLQSFFTNQETKVRVVNGSFTHTLRKKWGADLDKTRETHHHHAVDATLCAVTSFVKVSRYHYAVKEETGEKVMREIDFETGEIVNEMSYWEFKKSKKYERKTYQVKWPNFREQLKPVNLHPRIKFSHQVDRKANRKLSDATIYSVREKTEVKTLKSGKQKITTDEYTIGKIKDIYTLDGWEAFKKKQDKLLMKDLDEKTYERLLSIAETTPDFQEVEEKNGKVKRVKRSPFAVYCEENDIPAIQKYAKKNNGPLIRSLKYYDGKLNKHINITKDSQGRPVEKTKNGRKVTLQSLKPYRYDIYQDLETKAYYTVQLYYSDLRFVEGKYGITEKEYMKKVAEQTKGQVVRFCFSLQKNDGLEIEWKDSQRYDVRFYNFQSANSINFKGLEQEMMPAENQFKQKPYNNGAINLNIAKYGKEGKKLRKFNTDILGKKHYLFYEKEPKNIIK

SEQ ID NO: 196 - protein, 1150 aa, Enterococcus faecalis; identical to SEQ ID NO: 195
  source 1..1150: note = Enterococcus faecalis TX0012

SEQ ID NO: 197 - protein, 1337 aa, Enterococcus faecalis
  source 1..1337: note = Enterococcus faecalis TX0470
MKKDYVIGLDIGTNSVGWAVMTEDYQLVKKKMPIYGNTEKKKIKKNFWGVRLFEEGHTAEDRRLKRTARRRISRRRNRLRYLQAFFEEAMTALDENFFARLQESFLVPEDKKWHRHPIFAKLEDEVAYHETYPTIYHLRKKLADSSEQADLRLIYLALAHIVKYRGHFLIEGKLSTENISVKEQFQQFMIIYNQTFVNGESRLVSTPLPESVLIEEELTEKASRTKKSEKVLQQFPQEKANGLFGQFLKLMVGNKADFKKVFGLEEEAKITYASESYEEDLEGILAKVGDEYSDVFLAAKNVYDAVELSTILADSDKKSHAKLSSSMIVRFTEHQEDLKNFKRFIRENCPDEYDNLFKNEQKDGYAGYITHAGKVSQLKFYQYVKKIIQDIAGAEYFLEKIAQENFLRKQRTFDNGVIPHQIHLAELQAIIHRQAAYYPFLKENQEKIEQLVTFRIPYYVGPLSKGDASTFAWLKRQSEEPIRPWNLQETVDLDQSATAFIERMTNFDTYLPSEKVLPKHSLLYEKFMVFNELTKISYTDDRGIKANFSGKEKEKIFDYLFKTRRKVKKKDIIQFYRNEYNTEIVTLSGLEEDQFNASFSTYQDLLKCGLTRAELDHPDNAEKLEDIIKILTIFEDRQRIRTQLSTFKGQFSAEVLKKLERKHYTGWGRLSKKLINGIYDKESGKTILDYLVKDDGVSKHYNRNFMQLINDSQLSFKNAIQKAQSSEHEETLSETVNELAGSPAIKKGIYQSLKIVDELVAIMGYAPKRIVVEMARENQTTSTGKRRSIQRLKIVEKAMAEIGSNLLKEQPTTNEQLRDTRLFLYYMQNGKDMYTGDELSLHRLSHYDIDHIIPQSFMKDDSLDNLVLVGSTENRGKSDDVPSKEVVKDMKAYWEKLYAAGLISQRKFQRLTKGEQGGLTLEDKAHFIQRQLVETRQITKNVAGILDQRYNAKSKEKKVQIITLKASLTSQFRSIFGLYKVREVNDYHHGQDAYLNCVVATTLLKVYPNLAPEFVYGEYPKFQTFKENKATAKAIIYTNLLRFFTEDEPRFTKDGEILWSNSYLKTIKKELNYHQMNIVKKVEVQKGGFSKESIKPKGPSNKLIPVKNGLDPQKYGGFDSPIVAYTVLFTHEKGKKPLIKQEILGITIMEKTRFEQNPILFLEEKGFLRPRVLMKLPKYTLYEFPEGRRRLLASAKEAQKGNQMVLPEHLLTLLYHAKQCLLPNQSESLAYVEQHQPEFQEILERVVDFAEVHTLAKSKVQQIVKLFEANQTADVKEIAASFIQLMQFNAMGAPSTFKFFQKDIERARYTSIKEIFDATIIYQSTTGLYETRRKVVD

SEQ ID NO: 198 - protein, 1150 aa, Enterococcus faecalis
  source 1..1150: note = Enterococcus faecalis TX1342
MYSIGLDLGVSSVGWSVIDERTGNVIDLGVRLFSAKNSEKNLERRTNRGGRRLIRRKTNRLKDAKKILAAVGFYEDKSLKNSCPYQLRVKGLTEPLSKGEIYKVTLHILKKRGISYLDEDDTEAAKESQDYKEQVRENAQLLTKYTPGQIQLQRLKENNRVKTGINAQGNYQLNVFKVSAYANELATILKTQQAFYPNELTDDWIALFVQPGIAEEAGLIYRKRPYYHGPGNEANNSPYGRWSDFKKTGQPATNIFDKLIGKDFQGELRASGLSLSAQQYNLLNDLTNLKIDGEIPLSPEQKEYILAELMTKEFTRFGINDVAKLLGVKKERLSGWRLDKKGKPEIHTLKGYRNWRKIFAESGIDLATLPTETIDCLAKVLTLNTEREGIENTLAFELPELAESVKLLVLDRYKELSQSVSTQAWHRFSLKTLHLLIPELMNATSEQNTLLEQFQLKSDVRKRYSEYKKLPTKDVLTEIYNPTVNKTVSQAFKVIDALLVKYGKEQIRYITIEMPRDDNEEDEKKRIKELHAKNSQRKNDSQSYFMQKSGWSQEKFQTTIQKNRRFLAKLLYYYEQDGICAYTGLSISPELLVSDSTEIDHIIPISISLDDSINNKVLVLSKANQVKGQQTPYDAWMDGSFKKINGKFSNWDDYQKWVESRHFSHKKENNLLETRNIFDSEQVEKFLARNLNDTRYASRLVLNTLQSFFANQETKVRVVNGSFTHTLRKKWGADLDKTRETHHHHAVDATLCAVTPFVKVSRYHYAVKEETGEKVMREIDFETGEIVDEMSYREFKKSKKYERKTYQVKWPNFREQLKPVNLHPRIKFSHQVDRKANRKLSDATIYSVREKTEVKTLKSGKQKITTDEYTIGKIKDIYTVDGWEAFKKKQDKLLMKDLDEKTYERLLSIAETTPDFQEVEEKNGKVKRVKRSPFAVYCEENDIPAIRKYAKNNNGPLIRSLKYYDGKLNKHINITKDSQGRPVEKTKNGRKVTLQSLKPYRYDIYQDLETKAYYTVQLYYSDLRFVEGKYGITEKEYMKKVAEQTKGQVVRFCFSLQKNDGLEIEWKDSQCYDVRFYNFQSANSINFKGLEQEMMPAENQFKQKPYNNGAINLNIAKYGKEGKKLRKFNTDILGKKHYLYYEKEPKNIIK

SEQ ID NO: 199 - protein, 1337 aa, Enterococcus faecalis
  source 1..1337: note = Enterococcus faecalis TX4244
MKKDYVIGLDIGTNSVGWAVMTEDYQLVKKKMPIYGNTEKKKIKKNFWGVRLFEEGHTAEDRRLKRTARRRISRRRNRLRYLQAFFEEAMTDLDENFFARLQESFLVPEDKKWHRHPIFAKLEDEVAYHETYPTIYHLRKKLADSSEQADLRLIYLALAHIVKYRGHFLIEGKLSTENISVKEQFQQFMIIYNQTFVNGESRLVSAPLPESVLIEEELTEKASRTKKSEKVLQQFPQEKANGLFGQFLKLMVGNKADFKKVFGLEEEAKITYASESYEEDLEGILAKVGDEYSDVFLAAKNVYDAVELSTILADSDKKSHAKLSSSMIVRFTEHQEDLKKFKRFIRENCPDEYDNLFKNEQKDGYAGYIAHAGKVSQLKFYQYVKKIIQDIAGAEYFLEKIAQENFLRKQRTFDNGVIPHQIHLAELQAIIHRQAAYYPFLKENQEKIEQLVTFRIPYYVGPLSKGDASTFAWLKRQSEEPIRPWNLQETVDLDQSATAFIERMTNFDTYLPSEKVLPKHSLLYEKFMVFNELTKISYTDDRGIKANFSGKEKEKIFDYLFKTRRKVKKKDIIQFYRNEYNTEIVTLSGLEEDQFNASFSTYQDLLKCGLTRAELDHPDNAEKLEDIIKILTIFEDRQRIRTQLSTFKGQFSAEVLKKLERKHYTGWGRLSKKLINGIYDKESGKTILGYLIKDDGVSKHYNRNFMQLINDSQLSFKNAIQKAQSSEHEETLSETVNELAGSPAIKKGIYQSLKIVDELVAIMGYAPKRIVVEMARENQTTSTGKRRSIQRLKIVEKAMAEIGSNLLKEQPTTNEQLRDTRLFLYYMQNGKDMYTGDELSLHRLSHYDIDHIIPQSFMKDDSLDNLVLVGSTENLGKSDDVPSKEVVKDMKAYWEKLYAAGLISQRKFQRLTKGEQGGLTLEDKAHFIQRQLVETRQITKNVAGILDQRYNANSKEKKVQIITLKASLTSQFRSIFGLYKVREVNDYHHGQDAYLNCVVATTLLKVYPNLAPEFVYGEYPKFQTFKENKATAKAIIYTNLLRFFTEDEPRFTKDGEILWSNSYLKTIKKELNYHQMNIVKKVEVQKGGFSKESIKPKGPSNKLIPVKNGLDPQKYGGFDSPIVAYTVLFTHEKGKKPLIKQEILGITIMEKTRFEQNPILFLEEKGFLRPRVLMKLPKYTLYEFPEGRRRLLASAKEAQKGNQMVLPEHLLTLLYHAKQCLLPNQSESLAYVEQHQPEFQEILERVVDFAEVHTLAKSKVQQIVKLFEANQTADVKEIAASFIQLMQFNAMGAPSTFKFFQKDIERARYTSIKEIFDATIIYQSTTGLYETRRKVVD

SEQ ID NO: 200 - protein, 1339 aa, Enterococcus faecium
  source 1..1339: note = Enterococcus faecium 1,141,733
MKKEYTIGLDIGTNSVGWSVLTDDYRLVSKKMKVAGNTEKSSTKKNFWGVRLFDEGQTAEARRSKRTARRRLARRRQRILELQKIFAPEILKIDEHFFARLNESFLVLDEKKQSRHPVFATIKQEKSYHQTYPTIYHLRQALADSSEKADIRLVYLAMAHLLKYRGHFLIEGELNTENSSVTETFRQFLSTYNQQFSEADDKQTEKLDEAVDCSFVFTEKMSKTKKAETLLKYFPHEKSNGYLSQFIKLMVGNQGNFKNVFGLEEAKLQFSKETYEEDLEELLEKIGDDYIDLFVQAKNVYDAVLLSEILSDSTKNTRAKLSAGMIRRYDAHKEDLVLLKRFVKENLPKKYRAFFGDNSVNGYAGYIEGHATQEDFYKFVKKELTGIRGSEVFLTKIEQENFLRKQRTFDNGVIPHQIHLTELRAIIANQKKHYPFLKEEQEKLESLLTFKIPYYVGPLAKKQENSPFAWLIRKSEEKIKPWNLPEIVDMEGSAVRFIERMINTDMYMPHNKVLPKNSLLYQKFSIYNELTKVRYQDERGQMNYFSSIEKKEIFHELFEKNRKVTKKDLQEFLYLKYDIKHAELSGIEKAFNASYTTYHDFLTMSENKREMKQWLEDPELASMFEEIIKTLTVFEDREMIKTRLSHHEATLGKHIIKKLTKKHYTGWGRLSKELIQGIRDKQSNKTILDYLINDDDFPHHRNRNFMQLINDDSLSFKKEIKKAQMITDTENLEEIVKELTGSPAIKKGILQSLKIVDEIVGIMGYEPANIVVEMARENQTTGRGLKSSRPRLKALEESLKDFGSQLLKEYPTDNSSLQKDRLYLYYLQNGRDMYTGAPLDIHRLSDYDIDHIIPRSFTTDNSIDNKVLVSSKENRLKKDDVPSEKVVKKMRSFWYDLYSSKLISKRKLDNLTKIKLTEEDKAGFIKRQLVETRQITKHVAGILHHRFNKAEDTNEPIRKVRIITLKSALVSQFRNRFGIYKVREINEYHHAHDAYLNGVVALALLKKYPQLAPEFVYGEYLKFNAHKANKATVKKEFYSNIMKFFESDTPVCDENGEIFWDKSKSIAQVKKVINHHHMNIVKKTEIQKGGFSKETVEPKKDSSKLLPRKNNWDPAKYGGLGSPNVAYTVAFTYEKGKARKRTNALEGITIMEREAFEQSPVLFLKNKGYEQAEIEMKLPKYALFELENGRKRMVASNKEAQKANSFLLPEHLVTLLYHAKQYDEISHKESFDYVNEHHKEFSEVFARVLEFAGKYTLAEKNIEKLEKIYKENQTDDLAKLASSFVNLMQFNAMGAPADFKFFDVTIPRKRYTSLTEIWQSTIIHQSITGLYETRIRMGK

SEQ ID NO: 201 - protein, 1340 aa, Enterococcus faecium
  source 1..1340: note = Enterococcus faecium 1,231,408
MKKEYTIGLDIGTNSVGWSVLTDDYRLVSKKMKVAGNTEKSSTKKNFWGVRLFDEGQTAEARRSKRTARRRLARRRQRILELQKIFAPEILKIDEHFFARLNESFLVPDEKKQSRHPVFATIKQEKSYHQTYPTIYHLRQALADSSEKADIRLVYLAMAHLLKYRGHFLIEGELNTENSSVTETFRQFLSTYNQQFSEAGDKQTEKLDEAVDCSFVFTEKMSKTKKAETLLKYFPHEKSNGYLSQFIKLMVGNQGNFKNVFGLEEEAKLQFSKETYEEDLEELLEKIGDDYIDLFVQAKNVYDAVLLSEILSDSTKNTRAKLSAGMIRRYDAHKEDLVLLKRFVKENLPKKYRAFFGDNSVNGYAGYIEGHATQEAFYKFVKKELTGIRGSEVFLTKIEQENFLRKQRTFDNGVIPHQIHLSELRAIIANQKKHYPFLKEEQEKLESLLTFKIPYYVGPLAKKQENSPFAWLIRKSEEKIKPWNLPEIVDMEGSAVRFIERMINTDMYMPHNKVLPKNSLLYQKFSIYNELTKVRYQDERGQMNYFSSIEKKEIFHELFEKNRKVTKKDLQEFLYLKYDIKHAELSGIEKAFNASYTTYHDFLTMSENKREMKQWLEDPELASMFEEIIKTLTVFEDREMIKTRLSHHEATLGKHIIKKLTKKHYTGWGRLSKELIQGIRDKQSNKTILDYLINDDDFPHHRNRNFMQLINDDSLSFKKEIKKAQMITDTENLEEIVKELTGSPAIKKGILQSLKIVDEIVGIMGYEPANIVVEMARENQTTGRGLKSSRPRLKALEESLKDFGSQLLKEYPTDNSSLQKDRLYLYYLQNGRDMYTGAPLDIHRLSDYDIDHIIPRSFTTDNSIDNKVLVSSKENRLKKDDVPSEKVVKKMRSFWYDLYSSKLISKRKLDNLTKIKLTEEDKAGFIKRQLVETRQITKHVAGILHHRFNKAEDTNDPIRKVRIITLKSALVSQFRNRFGIYKVREINEYHHAHDAYLNGVVALALLKKYPQLAPEFVYGEYLKFNAHKANKATVKKEFYSNIMKFFESDTPVCDENGEIFWDKSKSIAQVKKVINHHHMNIVKKTEIQKGGFSKETVEPKKDSSKLLPRKNNWDPAKYGGLGSPNVAYTVAFTYEKGKARKRTNALEGITIMEREAFEQSPVLFLKNKGYEQAEIEMKLPKYALFELENGRKRMVASNKEAQKANSFLLPEHLVTLLYHAKQYDEISHKESFDYVNEHHKEFSEVFARVLEFAGKYTLAEKNIEKLEKIYKENQTDDLAKLASSFVNLMQFNAMGAPADFKFFDVTIPRKRYTSLTEIWQSTIIHQSITGLYETRIRMGK

SEQ ID NO: 202 - protein, 1339 aa, Enterococcus faecium
  source 1..1339: note = Enterococcus faecium E1133
MKKEYTIGLDIGTNSVGWSVLTDDYRLVSKKMKVAGNTEKSSTKKNFWGVRLFDEGQTAEARRSKRTARRRLARRRQRILELQKIFAPEILKIDEHFFARLNESFLVLDEKKQSRHPVFATIKQEKSYHQTYPTIYHLRQALADSSEKADIRLVYLAMAHLLKYRGHFLIEGELNTENSSVTETFRQFLSTYNQQFSEADDKQTEKLDEAVDCSFVFTEKMSKTKKAETLLKYFPHEKSNGYLSQFIKLMVGNQGNFKNVFGLEEAKLQFSKETYEEDLEELLEKIGDDYIDLFVQAKNVYDAVLLSEILSDSTKNTRAKLSAGMIRRYDAHKEDLVLLKRFVKENLPKKYRAFFGDNSVNGYAGYIEGHATQEDFYKFVKKELTGIRGSEVFLTKIEQENFLRKQRTFDNGVIPHQIHLTELRAIIANQKKHYPFLKEEQEKLESLLTFKIPYYVGPLAKKQENSPFAWLIRKSEEKIKPWNLPEIVDMEGSAVRFIERMINTDMYIPHNKVLPKNSLLYQKFSIYNELTKVRYQDERGQMNYFSSIEKKEIFHELFEKNRKVTKKDLQEFLYLKYDIKHAELSGIEKAFNASYTTYHDFLTMSENKREMKQWLEDPELASMFEEIIKTLTVFEDREMIKTRLSHHEATLGKHIIKKLTKKHYTGWGRLSKELIQGIRDKQSNKTILDYLINDDDFPHHRNRNFMQLINDDSLSFKKEIKKAQMITDTENLEEIVKELTGSPAIKKGILQSLKIVDEIVGIMGYEPANIVVEMARENQTTGRGLKSSRPRLKALEESLKDFGSQLLKEYPTDNSSLQKDRLYLYYLQNGRDMYTGAPLDIHRLSDYDIDHIIPRSFTTDNSIDNKVLVSSKENRLKKDDVPSEKVVKKMRSFWYDLYSSKLISKRKLDNLTKIKLTEEDKAGFIKRQLVETRQITKHVAGILHHRFNKAEDTNEPIRKVRIITLKSALVSQFRNRFGIYKVREINEYHHAHDAYLNGVVALALLKKYPQLAPEFVYGEYLKFNAHKANKATVKKEFYSNIMKFFESDTPVCDENGEIFWDKSKSIAQVKKVINHHHMNIVKKTEIQKGGFSEETVEPKKDSSKLLPRKNNWDPAKYGGLGSPNVAYTVAFTYEKGKARKRTNALEGITIMEREAFEQSPVLFLKNKGYEQAEIEMKLPKYALFELENGRKRMVASNKEAQKANSFLLPEHLVTLLYHAKQYDEISHKESFDYVNEHHKEFSEVFARVLEFAGKYTLAEKNIEKLEKIYKENQTDDLAKLASSFVNLMQFNAMGAPADFKFFDVTIPRKRYTSLTEIWQSTIIHQSITGLYETRIRMGK

SEQ ID NO: 203 - protein, 1340 aa, Enterococcus faecium
  source 1..1340: note = Enterococcus faecium E3083
MKKEYTIGLDIGTNSVGWSVLTDDYRLVSKKMKVAGNTEKSSTKKNFWGVRLFDEGQTAEARRSKRTARRRLARRRQRILELQKIFAPEILKIDEHFFARLNESFLVLDEKKQSRHPVFATIKQEKSYHQTYPTIYHLRQALADSSEKADIRLVYLAMAHLLKYRGHFLIEGELNTENSSVTETFRQFLSTYNQQFSEADDKQTEKLDEAVDCSFVFTEKMSKTKKAETLLKYFPHEKSNGYLSQFIKLMVGNQGNFKNVFGLEEEAKLQFSKETYEEDLEELLEKIGDDYIDLFVQAKNVYDAVLLSEILSDSTKNTRAKLSAGMIRRYDAHKEDLVLLKRFVKENLPKKYRAFFGDNSVNGYAGYIEGHATQEDFYKFVKKELTGIRGSEVFLTKIEQENFLRKQRTFDNGVIPHQIHLTELRAIIANQKKHYPFLKEEQEKLESLLTFKIPYYVGPLAKKQENSPFAWLIRKSEEKIKPWNLPEIVDMEGSAVRFIERMINTDMYIPHNKVLPKNSLLYQKFSIYNELTKVRYQDERGQMNYFSSIEKKEIFHELFEKNRKVTKKDLQEFLYLKYDIKHAELSGIEKAFNASYTTYHDFLTMSENKREMKQWLEDPELASMFEEIIKTLTVFEDREMIKTRLSHHEATLGKHIIKKLTKKHYTGWGRLSKELIQGIRDKQSNKTILDYLINDDDFPHHRNRNCMQLINDDSLSFKKEIKKAQMITDTENLEEIVKELTGSPAIKKGILQSLKIVDEIVGIMGYEPANIVVEMARENQTTGRGLKSSRPRLKALEESLKDFGSQLLKEYPTDNSSLQKDRLYLYYLQNGRDMYTGAPLDIHRLSDYDIDHIIPRSFTTDNSIDNKVLVSSKENRLKKDDVPSEKVVKKMRSFWYDLYSSKLISKRKLDNLTKIKLTEEDKAGFIKRQLVETRQITKHVAGILHHRFNKAEDTNEPIRKVRIITLKSALVSQFRNRFGIYKVREINEYHHAHDAYLNGVVALALLKKYPQLAPEFVYGEYLKFNAHKANKATVKKEFYSNIMKFFESDTPVCDENGEIFWDKSKSIAQVKKVINHHHMNIVKKTEIQKGGFSKETVEPKKDSSKLLPRKNNWDPTKYGGLGSPNVAYTVAFTYEKGKARKRTNALEGITIMEREAFEQSPVLFLKNKGYEQAEIEMKLPKYALFELENGRKRMVASNKEAQKANSFLLPEHLVTLLYHAKQYDEISHKESFDYVNEHHKEFSEVFARVLEFAGKYTLAEKNIEKLEKIYKENQTDDLAKLASSFVNLMQFNAMGAPADFKFFDVTIPRKRYTSLTEIWQSTIIHQSITGLYETRIRMGK

SEQ ID NO: 204 - protein, 1340 aa, Enterococcus faecium
  source 1..1340: note = Enterococcus faecium PC4.1
MKKEYTIGLDIGTNSVGWSVLTDDYRLVSKKMKVAGNTEKSSTKKNFWGVRLFDEGQTAEARRSKRTARRRLARRRQRILELQKIFAPEILKIDEHFFARLNESFLVLDEKKQSRHPVFATIKQEKSYHQTYPTIYHLRQALADSSEKADIRLVYLAMAHLLKYRGHFLIEGELNTENSSVTETFRQFLSTYNQQFSEADDKQTEKLDEAVDCSFVFTEKMSKTKKAETLLKYFPHEKSNGYLSQFIKLMVGNQGNFKNVFGLEEEAKLQFSKETYEEDLEELLEKIGDDYIDLFVQAKNVYDAVLLSEILSDSTKNTRAKLSAGMIRRYDAHKEDLVLLKRFVKENLPKKYRAFFGDNSVNGYAGYIEGHATQEDFYKFVKKELTGIRGSEVFLTKIEQENFLRKQRTFDNGVIPHQIHLTELRAIIANQKKHYPFLKEEQEKLESLLTFKIPYYVGPLAKKQENSPFAWLIRKSEEKIKPWNLPEIVDMEGSAVRFIERMINTDMYIPHNKVLPKNSLLYQKFSIYNELTKVRYQDERGQMNYFSSIEKKEIFHELFEKNRKVTKKDLQEFLYLKYDIKHAELSGIEKAFNASYTTYHDFLTMSENKREMKQWLEDPELASMFEEIIKTLTVFEDREMIKTRLSHHEATLGKHIIKKLTKKHYTGWGRLSKELIQGIRDKQSNKTILDYLINDDDFPHHRNRNFMQLINDDSLSFKKEIKKAQMITDTENLEEIVKELTGSPAIKKGILQSLKIVDEIVGIMGYEPANIVVEMARENQTTGRGLKSSRPRLKALEESLKDFGSQLLKEYPTDNSSLQKDRLYLYYLQNGRDMYTGAPLDIHRLSDYDIDHIIPRSFTTDNSIDNKVLVSSKENRLKKDDVPSEKVVKKMRSFWYDLYSSKLISKRKLDNLTKIKLTEEDKAGFIKRQLVETRQITKHVAGILHHRFNKAEDTNEPIRKVRIITLKSALVSQFRNRFGIYKVREINEYHHAHDAYLNGVVALALLKKYPQLAPEFVYGEYLKFNAHKANKATVKKEFYSNIMKFFESDTPVCDENGEIFWDKSKSIAQVKKVINHHHMNIVKKTEIQKGGFSKETVEPKKDSSKLLPRKNNWDPAKYGGLGSPNVAYTVAFTYEKGKARKRTNALEGITIMEREAFEQSPVLFLKNKGYEQAEIEMKLPKYALFELENGRKRMVASNKEAQKANSFLLPEHLVTLLYHAKQYDEISHKESFDYVNEHHKEFSEVFARVLEFAGKYTLAEKNIEKLEKIYKENQTDDLAKLASSFVNLMQFNAMGAPADFKFFDVTIPRKRYTSLTEIWQSTIIHQSITGLYETRIRMGK

SEQ ID NO: 205 - protein, 1340 aa, Enterococcus faecium
  source 1..1340: note = Enterococcus faecium TX1330
MKKEYTIGLDIGTNSVGWSVLTDDYRLVSKKMKVAGNTEKSSTKKNFWGVRLFDEGQTAEARRSKRTARRRLARRRQRILELQKIFAPEILKIDEHFFARLNESFLVLDEKKQSRHPVFATIKQEKSYHQTYPTIYHLRQALADSSEKADIRLVYLAMAHLLKYRGHFLIEGELNTENSSVTETFRQFLSTYNQQFSEADDKQTEKLDEAVDCSFVFTEKMSKTKKAETLLKYFPHEKSNGYLSQFIKLMVGNQGNFKNVFGLEEEAKLQFSKETYEEDLEELLEKIGDDYIDLFVQAKNVYDAVLLSEILSDSTKNTRAKLSAGMIRRYDAHKEDLVLLKRFVKENLPKKYRAFFGDNSVNGYAGYIEGHATQEDFYKFVKKELTGIRGSEVFLTKIEQENFLRKQRTFDNGVIPHQIHLTELRAIIANQKKHYPFLKEEQEKLESLLTFKIPYYVGPLAKKQENSPFAWLIRKSEEKIKPWNLPEIVDMEGSAVRFIERMNNTDMYIPHNKVLPKNSLLYQKFSIYNELTKVRYQDERGQMNYFSSIEKKEIFHELFEKNRKVTKKDLQEFLYLKYDIKHAELSGIEKAFNASYTTYHDFLTMSENKREMKQWLEDPELASMFEEIIKTLTVFEDREMIKTRLSHHEATLGKHIIKKLTKKHYTGWGRLSKELIQGIRDKQSNKTILDYLINDDDFPHHRNRNFMQLINDDSLSFKKEIKKAQMITDTENLEEIVKELTGSPAIKKGILQSLKIVDEIVGIMGYEPANIVVEMARENQTTGRGLKSSRPRLKALEESLKDFGSQLLKEYPTDNSSLQKDRLYLYYLQNGRDMYTGAPLDIHRLSDYDIDHIIPRSFTTDNSIDNKVLVSSKENRLKKDDVPSEKVVKKMRSFWYDLYSSKLISKRKLDNLTKIKLTEEDKAGFIKRQLVETRQITKHVAGILHHRFNKAEDTNEPIRKVRIITLKSALVSQFRNRFGIYKVREINEYHHAHDAYLNGVVALALLKKYPQLAPEFVYGEYLKFNAHKANKATVKKEFYSNIMKFFESDTPVCDENGEIFWDKSKSIAQVKKVINHHHMNIVKKTEIQKGGFSKETVEPKKDSSKLLPRKNNWDPAKYGGLGSPNVAYTVAFTYEKGKARKRTNALEGITIMEREAFEQSPVLFLKNKGYEQAEIEMKLPKYALFELENGRKRMVASNKEAQKANSFLLPEHLVTLLYHAKQYDEISHKESFDYVNEHHKEFSEVFARVLEFAGKYTLAEKNIEKLEKIYKENQTDDLAKLASSFVNLMQFNAMGAPADFKFFDVTIPRKRYTSLTEIWQSTIIHQSITGLYETRIRMGK

SEQ ID NO: 206 - protein, 1340 aa, Enterococcus faecium
  source 1..1340: note = Enterococcus faecium TX1337RF
MKKEYTIGLDIGTNSVGWSVLTDDYRLVSKKMKVAGNTEKSSTKKNFWGVRLFDEGQTAEARRSKRTARRRLARRRQRILELQKIFAPEILKIDEHFFARLNESFLVLDEKKQSRHPVFATIKQEKSYHQTYPTIYHLRQALADSSEKADIRLVYLAMAHLLKYRGHFLIEGELNTENSSVTETFRQFLSTYNQQFSEADDKQTEKLDEAVDCSFVFTEKMSKTKKAETLLKYFPHEKSNGYLSQFIKLMVGNQGNFKNVFGLEEEAKLQFSKETYEEDLEELLEKIGDDYIDLFVQAKNVYDAVLLSEILSDSTKNTRAKLSAGMIRRYDAHKEDLVLLKRFVKENLPKKYRAFFGDNSVNGYAGYIEGHATQEDFYKFVKKELTGIRGSEVFLTKIEQENFLRKQRTFDNGVIPHQIHLTELRAIIANQKKHYPFLKEEQEKLESLLTFKIPYYVGPLAKKQENSPFAWLIRKSEEKIKPWNLPEIVDMEGSAVRFIERMINTDMYMPHNKVLPKNSLLYQKFSIYNELTKVRYQDERGQMNYFSSIEKKEIFHELFEKNRKVTKKDLQEFLYLKYDIKHAELSGIEKAFNASYTTYHDFLTMSENKREMKQWLEDPELASMFEEIIKTLTVFEDREMIKTRLSHHEATLGKHIIKKLTKKHYTGWGRLSKELIQGIRDKQSNKTILDYLINDDDFPHHRNRNFMQLINDDSLSFKKEIKKAQMITDTENLEEIVKELTGSPAIKKGILQSLKIVDEIVGIMGYEPANIVVEMARENQTTGRGLKSSRPRLKALEESLKDFGSQLLKEYPTDNSSLQKDRLYLYYLQNGRDMYTGAPLDIHRLSDYDIDHIIPRSFTTDNSIDNKVLVSSKENRLKKDDVPSEKVVKKMRSFWYDLYSSKLISKRKLDNLTKIKLTEEDKAGFIKRQLVETRQITKHVAGILHHRFNKAEDTNEPIRKVRIITLKSALVSQFRNRFGIYKVREINEYHHAHDAYLNGVVALALLKKYPQLAPEFVYGEYLKFNAHKANKATVKKEFYSNIMKFFESDTPVCDENGEIFWDKSKSIAQVKKVINHHHMNIVKKTEIQKGGFSKETVEPKKDSSKLLPRKNNWDPAKYGGLGSPNVAYTVAFTYEKGKARKRTNALEGITIMEREAFEQSPVLFLKNKGYEQAEIEMKLPKYALFELENGRKRMVASNKEAQKANSFLLPEHLVTLLYHAKQYDEISHKESFDYVNEHHKEFSEVFARVLEFAGKYTLAEKNIEKLEKIYKENQTDDLAKLASSFVNLMQFNAMGAPADFKFFDVTIPRKRYTSLTEIWQSTIIHQSITGLYETRIRMGK

SEQ ID NO: 207 - protein, 1336 aa, Enterococcus hirae
MTKDYTIGLDIGTNSVGWAVLTDDYQLMKRKMSVHGNTEKKKIKKNFWGARLFDEGQTAEFRRTKRTNRRRLARRKYRLSKLQDLFAEELCKQDDCFFVRLEESFLVPEEKQYKPASIFPTLEEEKEYYQKYPTIYHLRQKLVDSTEKEDLRLVYLALAHLLKYRGHFLFEGDLDTENTSIEESFRVFLEQYSKQSDQPLIVHQPVLTILTDKLSKTKKVEEILKYYPTEKINSFFAQCLKLIVGNQANFKRIFDLEAEVKLQFSKETYEEDLESLLEKIGDEYLDIFLQAKKVHDAILLSEIISSTVKHTKAKLSSGMVERYERHKADLAKFKQFVKENVPQKATVFFKDTTKNGYAGYIKGKTTQEEFYKFVKKELSGVVGSEPFLEKIDQETFLLKQRTYTNGVIPHQVHLIELKAIIDQQKQHYPFLEEAGPKIIALFKFRIPYYVGPLAKEQEASSFAWIERKTAEKINPWNFSEVVDIEKSAMRFIQRMTKQDTYLPTEKVLPKNSLLYQKYMIFNELTKVSYKDERGVKQYFSGDEKQQIFKQLFQKERGKITVKKLQNFLYTHYHIENAQIFGIEKAFNASYSTYHDFMKLAKTNQKAMQEWLEQPEMEPIFEDIVKILTIFEDRQMIKHQLSKYQEVFGEKLLKEFARKHYTGWGRFSAKLIHGIRDRKTNKTILDYLINDDDVPANRNRNLMQLINDEHLSFKEEIAKATVFSKHKSLVDVIQDLPGSPAIKKGIWQSLKIVEELIAIIGYKPKNIVIEMARENQKTHRTSPRLKALENGLKQIGSTLLKEQPTDNKALQKERLYLYYLQNGRDMYTGEPLEIENLHQYEVDHIIPRSFIVDNSIDNKVLVASKQNQKKRDDVPKKQIVNEQRIFWNQLKEAKLISPKKYAYLTKIELTPEDKARFIQRQLVETRQITKHVANILHQSFNQEEEGTDCDGVQIITLKATLTSQFRQTFGLYKVREINPHHHAHDAYLNGFIANVLLKRYPKLAPEFVYGKYVKYSLARENKATAKKEFYSNILKFLESDEPFCDENGEIYWEKSHHLPRIKKVLSSHQVNVVKKVEQQKGGFYKETVNSKEKPDKLIERKNNWDVTKYGGFGSPVIAYAIAFVYAKGKTQKKTRAIEGITIMEQAAFEKDPTTFLKEKGFPQVTEFIKLPKYTLFEFDNGRRRFLASHKESQKGNPFILSDQLVTLLYHAQHYDKITYQESFDYVNTHLSDFSAILTEVLAFAEKYTLADKNIERIQELYEENKYGETSMIAQSFLQLLQFNAIGAPADFKFFGVTIPRKRYTSLTEIWDATIIYQSVTGLYETRIRMGDLWAGEQ

SEQ ID NO: 208 - protein, 1330 aa, Enterococcus italicus
  source 1..1330: note = Enterococcus italicus DSM 15952
MKNDYTIGLDIGTNSVGYSVVTDDYKVISKKMNVFGNTEKKSIKKNFWGVRLFESGQTAQEARMKRTSRRRIARRKNRICYLQEIFQPEMNHLDNNFFYRLNESFLVADDAKYDKHPIFGTLDEEIHFHEQFPTIYHLRKYLADGDEKADLRLVYLAIAHIIKFRGNFLIEGELNTENNSVIELSKVFVQLYNQTLSELEGFQFIDESIDFSEVLTQQLSKSERADNVLKLFPDEKGTGIFAQFIKLIVGNQGNFKKVFQLEEDQKLQLSTDDYEENIENLLAIIGDEYGDIFVAAQNLYQAILLAGILTSTEKTRAKLSASMIQRYEEHAKDLKLLKRFVKEHIPDKYAEIFNDATKNGYAGYIDGKTKEEEFYKYLKTTLVQKSGYQYFIEKIEQENFLRKQRIYDNGVIPHQVHAEELRAILRKQEKYYSFLKENHEKIEQIFKVRIPYYVGPLAKHNEQSRFAWNIRKSDEPIRPWNMNDVVDENASAVAFIERMTIKDIYLNENVLPRHSLIYEKFTVFNELTKVLYADDRGVFQRFSAEEKEDIFEKLFKSERKVTKKKLENYLRIELSISSPSVKGIEEQFNANFGTYLDLKKFDELHPYLDDEKYQDTLEEVIKVLTVFEDRSMIQNQLEQLPLNLSTKTIKALSRRKYTGWGRLSARLIDGIHDKNSGKTILDYLIEDESDSYIVNRNFMQLINDDHLSFKKIIEDSQPYKEQQSAEEIVSELSGSPAIKKGILQSLKIVDELVAIMGYKPKNIVVEMARENQTTGRGKQNSKPRLKGIENGLKEFSDSVLKGSSIDNKQLQNDRLYLYYLQNGKDMYTGHELDIDHLSTYDIDHIIPQSFLTDNSIDNRVLTTSKSNRGKSDNVPSEEVVRKMDRFWRKLLNAKLISERKYTNLTKKELTESDKAGFLKRQLVETRQITKHVATILDSKFNEDSNNRDVQIITLKSALVSEFRKTFNLYKVREINDLHHAHDAYLNAVVALSLLRVYPQLKPEFVYGEYGKNSIHDQNKATIKKQFYSNITRYFASKDYIINDDGEILWNKQETIAQVIKTLGMHQVNVVKKVEIQKGGFSKESIQPKGESQKLIRRKQQWNTKKYGGFDSPVVAYAILLSFDKGKRKARSFKIVGITIQDRESFEGNPILYLSKKDYHNPKVEAILPKYSLFEFENGRRRMVASASETQKGNQLIIPGHLMELLYHSKKIINGKNSDSVSYIQNNKEKFREIFEYIVDFSSKYISADANLNKIEKIFENNFHKASEQEIAKSFINLLTFTAMGAPADFEFFGEKIPRKRYVSISEIIDAVFIHQSITGLYETRVRLTEV

SEQ ID NO: 209 - protein, 1096 aa, Eubacterium dolichum
  source 1..1096: note = Eubacterium dolichum DSM 3991
MMEVFMGRLVLGLDIGITSVGFGIIDLDESEIVDYGVRLFKEGTAAENETRRTKRGGRRLKRRRVTRREDMLHLLKQAGIISTSFHPLNNPYDVRVKGLNERLNGEELATALLHLCKHRGSSVETIEDDEAKAKEAGETKKVLSMNDQLLKSGKYVCEIQKERLRTNGHIRGHENNFKTRAYVDEAFQILSHQDLSNELKSAIITIISRKRMYYDGPGGPLSPTPYGRYTYFGQKEPIDLIEKMRGKCSLFPNEPRAPKLAYSAELFNLLNDLNNLSIEGEKLTSEQKAMILKIVHEKGKITPKQLAKEVGVSLEQIRGFRIDTKGSPLLSELTGYKMIREVLEKSNDEHLEDHVFYDEIAEILTKTKDIEGRKKQISELSSDLNEESVHQLAGLTKFTAYHSLSFKALRLINEEMLKTELNQMQSITLFGLKQNNELSVKGMKNIQADDTAILSPVAKRAQRETFKVVNRLREIYGEFDSIVVEMAREKNSEEQRKAIRERQKFFEMRNKQVADIIGDDRKINAKLREKLVLYQEQDGKTAYSLEPIDLKLLIDDPNAYEVDHIIPISISLDDSITNKVLVTHRENQEKGNLTPISAFVKGRFTKGSLAQYKAYCLKLKEKNIKTNKGYRKKVEQYLLNENDIYKYDIQKEFINRNLVDTSYASRVVLNTLTTYFKQNEIPTKVFTVKGSLTNAFRRKINLKKDRDEDYGHHAIDALIIASMPKMRLLSTIFSRYKIEDIYDESTGEVFSSGDDSMYYDDRYFAFIASLKAIKVRKFSHKIDTKPNRSVADETIYSTRVIDGKEKVVKKYKDIYDPKFTALAEDILNNAYQEKYLMALHDPQTFDQIVKVVNYYFEEMSKSEKYFTKDKKGRIKISGMNPLSLYRDEHGMLKKYSKKGDGPAITQMKYFDGVLGNHIDISAHYQVRDKKVVLQQISPYRTDFYYSKENGYKFVTIRYKDVRWSEKKKKYVIDQQDYAMKKAEKKIDDTYEFQFSMHRDELIGITKAEGEALIYPDETWHNFNFFFHAGETPEILKFTATNNDKSNKIEVKPIHCYCKMRLMPTISKKIVRIDKYATDVVGNLYKVKKNTLKFEFD

SEQ ID NO: 210 - protein, 1114 aa, Eubacterium rectale
MNYTEKEKLFMKYILALDIGIASVGWAILDKESETVIEAGSNIFPEASAADNQLRRDMRGAKRNNRRLKTRINDFIKLWENNNLSIPQFKSTEIVGLKVRAITEEITLDELYLILYSYLKHRGISYLEDALDDTVSGSSAYANGLKLNAKELETHYPCEIQQERLNTIGKYRGQSQIINENGEVLDLSNVFTIGAYRKEIQRVFEIQKKYHPELTDEFCDGYMLIFNRKRKYYEGPGNEKSRTDYGRFTTKLDANGNYITEDNIFEKLIGKCSVYPDELRAAAASYTAQEYNVLNDLNNLTINGRKLEENEKHEIVERIKSSNTINMRKIISDCMGENIDDFAGARIDKSGKEIFHKFEVYNKMRKALLEIGIDISNYSREELDEIGYIMTINTDKEAMMEAFQKSWIDLSDDVKQCLINMRKTNGALFNKWQSFSLKIMNELIPEMYAQPKEQMTLLTEMGVTKGTQEEFAGLKYIPVDVVSEDIFNPVVRRSVRISFKILNAVLKKYKALDTIVIEMPRDRNSEEQKKRINDSQKLNEKEMEYIEKKLAVTYGIKLSPSDFSSQKQLSLKLKLWNEQDGICLYSGKTIDPNDIINNPQLFEIDHIIPRSISFDDARSNKVLVYRSENQKKGNQTPYYYLTHSHSEWSFEQYKATVMNLSKKKEYAISRKKIQNLLYSEDITKMDVLKGFINRNINDTSYASRLVLNTIQNFFMANEADTKVKVIKGSYTHQMRCNLKLDKNRDESYSHHAVDAMLIGYSELGYEAYHKLQGEFIDFETGEILRKDMWDENMSDEVYADYLYGKKWANIRNEVVKAEKNVKYWHYVMRKSNRGLCNQTIRGTREYDGKQYKINKLDIRTKEGIKVFAKLAFSKKDSDRERLLVYLNDRRTFDDLCKIYEDYSDAANPFVQYEKETGDIIRKYSKKHNGPRIDKLKYKDGEVGACIDISHKYGFEKGSKKVILESLVPYRMDVYYKEENHSYYLVGVKQSDIKFEKGRNVIDEEAYARILVNEKMIQPGQSRADLENLGFKFKLSFYKNDIIEYEKDGKIYTERLVSRTMPKQRNYIETKPIDKAKFEKQNLVGLGKTKFIKKYRYDILGNKYSCSEEKFTSFC

SEQ ID NO: 211 - protein, 1391 aa, Eubacterium sp.
  source 1..1391: note = Eubacterium sp. AS15
MENKQYYIGLDVGTNSVGWAVTDTSYNLLRAKGKDMWGARLFDEAKTAVERRTKRTSRRRSEREKARKAMLKELFADEINKVDPNFFIRLEESKFFLDDRSENNRQRYTLFNDAKFTDKDYYEKYKTIFHLRSALINSDEKFDVRLVFLAILNLFSHRGHFLNASLKGDGEIQGVDIFYNDLYEVCEEFEIDLPQISNIDNFEKILSQKGKSRTKILEELSEELSISKKEKIKYSLLKLICGMKIKVVDIYADEDIQEDDKKKDLGFRESDYEKSSLEVKEIIGDDHFELIERAKAVHDIGLLANIIGNSKYLCEARVEAYDNHHKDLQKIKELLKKYDIKAYTDMFRKMTDKNYSAYVGSVNSNIAKERRSVDNRKIEDLYEYIKKIALKNISDDNEDKIEILKKIETGEFLKKQLTASNGVIPNQLQSRELRAILKKAENYLPFLKEKGEKNLTVSEMIIQLFEFQIPYYVGPLDKNPKKDKNANSWAVIPSGGRILPWNFEDKVDVKGSRKEFIEKMVRKCTYLSEEHTLPKQSLLYEKFMVLNEINNIKIDGEKISVEAKQKIYNDLFMKGKKVSQKAIKQELISLNIMSKDSVLSGIDTVCNAYLSSIAKFRGVFDENVNNQSTIDMIEDIIFLKTVYSDEKRFVKEEIVEKYGDEIDKDKIKRILGFKFSNWGNISKSFLELEGADVGTGEIRSIIQSLWETNFNLMELLSSRFTYMDELEKRVKKLEKPLSEWTIEDLDDMYLSSPVKRMIWQSMKIVDEIQTVIGYAPKRIFVEMTRSEGEKVRTKSRKDRLKELYSAIKEDSKQWVKELDAKDESYFRSKKMYLYYLQKGRCMYSGEVIELDKLMDDNLYDIDHIYPRSFVKDDSLDNLVLVKKEINNRKQNDPITPQIQASCQGFWKVLHEQGFISNEKYSRLTRKTQEFSDEEKLSFINRQIVETGQATKCMAQILQKSMGEDVDVVFSKARLVSEFRHKFELFKSRLINDFHHANDAYLNIVVGNSYFVKFTRNPANFIKDARKNPDNPAYKYHMDRFFERDVKSKSEVAWIGQSEGNAGTIAIVKKTMSKNSPLITKKVEEGHGSITKETIVGVKEIKFGRNKVEKADKTPKKANLQAYRPIKTSDERLCNILRYGGRTSISISGYCLVEYVKKRKTIRSLEAIPVYLGRKDSLSEEKLLNYFRYNLNDGGKDSVSDIRLCLPFISTNSLVKIDGYLYYLGGKNDDRIQLYNAYQLKMKKEEVEYIRKIEKAVSMSKFDEIDREKNPVLTEEKNIELYNKIQDKFENTVFSKRMSLVKYNKKDLSFGDFLKNKKSKFEEIDLEKQCKVLYNIIFNLSNLKEVDLSDIGGSKSTGKCRCKKNITNYKEFKLIQQSITGLYSCEKDLMTI

SEQ ID NO: 212 - protein, 1107 aa, Eubacterium ventriosum
  source 1..1107: note = Eubacterium ventriosum ATCC 27560
MGYTVGLDIGVASVGVAVLDENDNIVEAVSNIFDEADTSNNKVRRTLREGRRTKRRQKTRIEDFKQLWETSGYIIPHKLHLNIIELRNKGLTELLSLDELYCVLLSMLKHRGISYLEDADDGEKGNAYKKGLAFNEKQLKEKMPCEIQLERMKKYGKYHGEFIIEINDEKEYQSNVFTTKAYKKELEKIFETQRCNGNKINTKFIKKYMEIYERKREYYIGPGNEKSRTDYGIYTTRTDEEGNFIDEKNIFGKLIGKCSVYPEEYRASSASYTAQEFNLLNDLNNLKINNEKLTEFQKKEIVEIIKDASSVNMRKIIKKVIDEDIEQYSGARIDKKGKEIYHTFEIYRKLKKELKTINVDIDSFTREELDKTMDILTLNTERESIVKAFDEQKFVYEENLIKKLIEFRKNNQRLFSGWHSFSYKAMLQLIPVMYKEPKEQMQLLTEMNVFKSKKEKYVNYKYIPENEVVKEIYNPVVVKSIRTTVKILNALIKKYGYPESVVIEMPRDKNSDDEKEKIDMNQKKNQEEYEKILNKIYDEKGIEITNKDYKKQKKLVLKLKLWNEQEGLCLYSGKKIAIEDLLNHPEFFEIDHIIPKSISLDDSRSNKVLVYKTENSIKENDTPYHYLTRINGKWGFDEYKANVLELRRRGKIDDKKVNNLLCMEDITKIDVVKGFINRNLNDTRYASRVVLNEMQSFFESRKYCNTKVKVIRGSLTYQMRQDLHLKKNREESYSHHAVDAMLIAFSQKGYEAYRKIQKDCYDFETGEILDKEKWNKYIDDDEFDDILYKERMNEIRKKIIEAEEKVKYNYKIDKKCNRGLCNQTIYGTREKDGKIHKISSYNIYDDKECNSLKKMINSGKGSDLLMYNNDPKTYRDMLKILETYSSEKNPFVAYNKETGDYFRKYSKNHNGPKVEKVKYYSGQINSCIDISHKYGHAKNSKKVVLVSLNPYRTDVYYDNDTGKYYLVGVKYNHIKCVGNKYVIDSETYNELLRKEGVLNSDENLEDLNSKNITYKFSLYKNDIIQYEKGGEYYTERFLSRIKEQKNLIETKPINKPNFQRKNKKGEWENTRNQIALAKTKYVGKLVTDVLGNCYIVNMEKFSLVVDK

SEQ ID NO: 213 - protein, 1391 aa, Eubacterium yurii
  source 1..1391: note = Eubacterium yurii subsp. margaretiae ATCC 43715
MENKQYYIGLDVGTNSVGWAVTDTSYNLLRAKGKDMWGARLFEKANTAAERRTKRTSRRRSEREKARKAMLKELFADEINRVDPSFFIRLEESKFFLDDRSENNRQRYTLFNDATFTDKDYYEKYKTIFHLRSALINSDEKFDVRLVFLAILNLFSHRGHFLNASLKGDGDIQGMDVFYNDLVESCEYFEIELPRITNIDNFEKILSQKGKSRTKILEELSEELSISKKDKSKYNLIKLISGLEASVVELYNIEDIQDENKKIKIGFRESDYEESSLKVKEIIGDEYFDLVERAKSVHDMGLLSNIIGNSKYLCEARVEAYENHHKDLLKIKELLKKYDKKAYNDMFRKMTDKNYSAYVGSVNSNIAKERRSVDKRKIEDLYKYIEDTALKNIPDDNKDKIEILEKIKLGEFLKKQLTASNGVIPNQLQSRELRAILKKAENYLPFLKEKGEKNLTVSEMIIQLFEFQIPYYVGPLDKNPKKDNKANSWAKIKQGGRILPWNFEDKVDVKGSRKEFIEKMVRKCTYISDEHTLPKQSLLYEKFMVLNEINNIKIDGEKISVEAKQKIYNDLFVKGKKVSQKDIKKELISLNIMDKDSVLSGTDTVCNAYLSSIGKFTGVFKEEINKQSIVDMIEDIIFLKTVYGDEKRFVKEEIVEKYGDEIDKDKIKRILGFKFSNWGNLSKSFLELEGADVGTGEVRSIIQSLWETNFNLMELLSSRFTYMDELEKRVKKLEKPLSEWTIEDLDDMYLSSPVKRMIWQSMKIVDEIQTVIGYAPKRIFVEMTRSEGEKVRTKSRKDRLKELYNGIKEDSKQWVKELDSKDESYFRSKKMYLYYLQKGRCMYSGEVIELDKLMDDNLYDIDHIYPRSFVKDDSLDNLVLVKKEINNRKQNDPITPQIQASCQGFWKILHDQGFMSNEKYSRLTRKTQEFSDEEKLSFINRQIVETGQATKCMAQILQKSMGEDVDVVFSKARLVSEFRHKFELFKSRLINDFHHANDAYLNIVVGNSYFVKFTRNPANFIKDARKNPDNPVYKYHMDRFFERDVKSKSEVAWIGQSEGNSGTIVIVKKTMAKNSPLITKKVEEGHGSITKETIVGVKEIKFGRNKVEKADKTPKKPNLQAYRPIKTSDERLCNILRYGGRTSISISGYCLVEYVKKRKTIRSLEAIPVYLGRKDSLSEEKLLNYFRYNLNDGGKDSVSDIRLCLPFISTNSLVKIDGYLYYLGGKNDDRIQLYNAYQLKMKKEEVEYIRKIEKAVSMSKFDEIDREKNPVLTEEKNIELYNKIQDKFENTVFSKRMSLVKYNKKDLSFGDFLKNKKSKFEEIDLEKQCKVLYNIIFNLSNLKEVDLSDIGGSKSTGKCRCKKNITNYKEFKLIQQSITGLYSCEKDLMTI

SEQ ID NO: 214 - protein, 1142 aa, Facklamia hominis
  source 1..1142: note = Facklamia hominis CCUG 36813
MYSVGLDIGIASCGYSIINDVNGNIVELGTLLFKSRNSDNNEERRTNRGSRRLINRRRTRLDDGKKLLAEKGFKQDSKLKHVCPYELRVKGLHEKLTQGEIYKVVLHILKKRGISYLDESDENSSGIDGASYKDQVNLNLNLQKELTPGQIQLKRLKENGRIKSGVTFENGYQLNVFSVSAYANELNKILTKQSEYYSEIDQIWIDRFTKNGYRKEAGLVYRKRPYYDGPGNEKNNSIYGRWANFKEDGHPKENIFDQLIGLDSVDSTQVRASASTLTAQKYNLLNDLNNLTIIEDDRKFTTDEKVSIINYLMTQDITRFGPKELAKFYQLEVDQIRGWRIDNKGNPEIHSLKVYRDWKKIFNTSSIDLTSIQTWVVDELANVITLNTEIPSTLATLKIKIPDIDQQILNFVENNFYELKKKTSKNSWHSFSLKTLNILIPELLNTSEEQNTILERLNLKFDLKNKYAEKNQIPVKELLEQIYNPTVTKSVHQSIKLFNEIIEKYGKNNISYVTIEMPRDKNDQDQKDTIKRINKLNSERKNDSEKYFLERSGWDTIRFESALKKPRFAEKLLFYYEQKGKCAYSGQDILAESLLNESCEVDHIIPLSISFDDSIHNKVLVTASSNQEKGQRTPYMAFIDGAKLGQSWDDFVAWVNSCGFHRKKVQNLLYEENIFNPDVQRGFVSRNLNDTRYASRIVLNAIQSFFYKQKDLTKVKVVNGSFTHTLRKKWGSSLDKNRDTYHHHAVDATLCAVTPFINIVKYEFFEEDGIKYMVDLTTGEKVAYSDYKKMKFYDKRAYVPIWDGFIKQLTPANLYPKIKFSHQVDSKWNRKISDATIYSTRKIVETKINKKGVAKETVKDIVIDKIKDIYTPEGWRKFKEKQDKLLMKNFDEKTYNKLIKIAKEYPEKKEVQTSNGKVSLVEVSPFKMYCEEQNVPAIRKYSKKGNGPYIRSLKFYDKELGKHINITKDSYGNDIERTIRNKKIILKNQNSWRTDVYYNSVNNCYELLGIKYCHLKFYRGKYGIPKSIYDELKKEDEISSESVFKFSLYRHDRVRFEKDGEYIEALFGSKNESNKNYLELSPIDKNKWLSKENVKFFGEVAASGRFIKGLKPGIKVIKQSTDYMGHVYAIHQEKLKFVLSDA

SEQ ID NO: 215 - protein, 1512 aa, Fibrobacter succinogenes
MKKILGLDLGTNSIGWAVVNADEITRDDGSRYLKPNGISAAGSRIIPMSADILGDFEKGNSISQTAERTRMRMARRLHERALLRRERLLRVLNLLDFLPKHFADKIDRYGKFTDDSEPKLAWRKNTEGKYEFIFQDAFNEMLAEFKDKQPEIVEEGKKIPYDWTIYYLRKKALEKALSKEELSWILLQFNQKRGYYQLRGEEEEIPQDKKIEYLAQKVVKVEATDQKKGDDVWYNVYLENGMIYRRTSKAPLDWEGKVKEFIVTTEVENDGETPKKDKEGNIKRSFRAPKEDDWTLLKKKTEADIENSHKTVGCYIYDSLLNNPKQKIIGKLVRTVERKFYKEELTQILKKQVELIPELRDDNLYKQCIEELYPINEAHRNTIAKTDFANLFINDILFYQRPLKSKKSQIDNCPYEERIFIDSKTGEKKKVPVKCIAKSNPLFQEFRLWQFIQNLRIYQREKEIDGKLLTDIDITSECLKSEEDYVRLFDWLNDRETIEQEDLLKHLFNTKKSKNKENPYRWNYVEDKVYPCNETRATILKGFSKCGINASVLSPELEMALWHILYSVEDKKEIETALTHFAQKQGWNDDFAKVFSKAKPFKKDYGSYSEKAIKKLLSLMRMGKYWNQDNIDKNTLDRIDKIINGEYDEKISNRVRDNAINLKDISDFRGLPVWLACYIVYDRHSEAKDCTKWNSPEEIDSYLKKFKQHSLRNPIVEQVVTETLRTVRDIWIQEEQIDEIHLELGRDLKNPADKRKKMSENILKNENTNLRIKAMLMEFMNPSMGIENVRPYSPSQQDILRIYEENALDNLTKDDKDFDFISKISKQAQPSKTDIIRYKCWLEQKYRSPYTGKTISLSKLFTPAYEIEHVIPQSLYFDDSFSNKVICEAEVNKLKDRQLGYKFIAEHHGEKVQLSQGEVVEILSVDAYEKFVKENYANNRIKMKKLLMESIPDEFIERQLNDSRYISKVVKGLLSNIVREKIDDENYEPEAVSKNLISCNGAITDRLKKDWGMNDVWNSIILPRFIRMNQITGKDCFTTTNAEGHLIPQMPLELQKGFNKKRIDHRHHAMDAIVIACTTRDHVNLLNNEAAHSKFNATRYQLQRKLRRFEKAVIDGKEREVAKEFLKPWDSFSSDSKNILENIIVSFKQNQRVINKTTNAFLHFDENGKKTFIKQGKGDSWAIRKSMHKDTVFGEINLRKVRSVSLNEAIKVPERVLNKKIKEKILELKNNKIDAKNIKKYIEENHTGGYGIDSSKIDVFYFTKETKERFFATRKTLDTSFNQAKIKDSIADSGIQKILLAHLKSKNGDAEQAFSPDGIDEMNKNIVELNNGKFHQPILKVRVYEKADKFAVGQKGNKKVKFVEAAKGTNLFFAIFEKDGKRSYLTIPLNVMIDCQKQYGNQWKNNIEAYLKEKELVEKDVKLQFILSPNDLVYLPTEGSIDKKRIYKVVSFTNNRLYAIPYAIAKSIVDKNEFTQLNKIEFTDNKESIKDACVPVIIDRLGNVIEFNGKRL

SEQ ID NO: 216 - protein, 1365 aa, Filifactor alocis
MTKEYYLGLDVGTNSVGWAVTDSQYNLCKFKKKDMWGIRLFESANTAKDRRLQRGNRRRLERKKQRIDLLQEIFSPEICKIDPTFFIRLNESRLHLEDKSNDFKYPLFIEKDYSDIEYYKEFPTIFHLRKHLIESEEKQDIRLIYLALHNIIKTRGHFLIDGDLQSAKQLRPILDTFLLSLQEEQNLSVSLSENQKDEYEEILKNRSIAKSEKVKKLKNLFEISDELEKEEKKAQSAVIENFCKFIVGNKGDVCKFLRVSKEELEIDSFSFSEGKYEDDIVKNLEEKVPEKVYLFEQMKAMYDWNILVDILETEEYISFAKVKQYEKHKTNLRLLRDIILKYCTKDEYNRMFNDEKEAGSYTAYVGKLKKNNKKYWIEKKRNPEEFYKSLGKLLDKIEPLKEDLEVLTMMIEECKNHTLLPIQKNKDNGVIPHQVHEVELKKILENAKKYYSFLTETDKDGYSVVQKIESIFRFRIPYYVGPLSTRHQEKGSNVWMVRKPGREDRIYPWNMEEIIDFEKSNENFITRMTNKCTYLIGEDVLPKHSLLYSKYMVLNELNNVKVRGKKLPTSLKQKVFEDLFENKSKVTGKNLLEYLQIQDKDIQIDDLSGFDKDFKTSLKSYLDFKKQIFGEEIEKESIQNMIEDIIKWITIYGNDKEMLKRVIRANYSNQLTEEQMKKITGFQYSGWGNFSKMFLKGISGSDVSTGETFDIITAMWETDNNLMQILSKKFTFMDNVEDFNSGKVGKIDKITYDSTVKEMFLSPENKRAVWQTIQVAEEIKKVMGCEPKKIFIEMARGGEKVKKRTKSRKAQLLELYAACEEDCRELIKEIEDRDERDFNSMKLFLYYTQFGKCMYSGDDIDINELIRGNSKWDRDHIYPQSKIKDDSIDNLVLVNKTYNAKKSNELLSEDIQKKMHSFWLSLLNKKLITKSKYDRLTRKGDFTDEELSGFIARQLVETRQSTKAIADIFKQIYSSEVVYVKSSLVSDFRKKPLNYLKSRRVNDYHHAKDAYLNIVVGNVYNKKFTSNPIQWMKKNRDTNYSLNKVFEHDVVINGEVIWEKCTYHEDTNTYDGGTLDRIRKIVERDNILYTEYAYCEKGELFNATIQNKNGNSTVSLKKGLDVKKYGGYFSANTSYFSLIEFEDKKGDRARHIIGVPIYIANMLEHSPSAFLEYCEQKGYQNVRILVEKIKKNSLLIINGYPLRIRGENEVDTSFKRAIQLKLDQKNYELVRNIEKFLEKYVEKKGNYPIDENRDHITHEKMNQLYEVLLSKMKKFNKKGMADPSDRIEKSKPKFIKLEDLIDKINVINKMLNLLRCDNDTKADLSLIELPKNAGSFVVKKNTIGKSKIILVNQSVTGLYENRREL

SEQ ID NO: 217 - protein, 1347 aa, Finegoldia magna
  source 1..1347: note = Finegoldia magna ACS-171-V-Col3
MKSEKKYYIGLDVGTNSVGWAVTDEFYNILRAKGKDLWGVRLFEKAKTAADTRTFRSGRRRNDRKGMRLQILREIFEDEIKKVDKDFYDRLDESKFWAEDKKVSGKYSLFNDKNFSDKQYFEKFPTIFHLRKYLMEEHGKVDIRYYFLAINQMMKRRGHFLIDGQISHVTDDKPLKEQLILLINDLLKIELEEELMDSIFEILADVNEKRTDKKNNLKELIKGQDFNKQEGNILNSIFESIVTGKAKIKNIISDEDILEKIKEDNKEDFVLTGDSYEENLQYFEEVLQENITLFNTLKSTYDFVILQSILKGKSTLSDAQVERYDEHKKDLEILKKVIKKYDEDGKLFKQVFKEDNGNGYVSYIGYYLNKNKKITAKKKISNIEFTKYVKGILEKQCDCEDEAVKYLLGKIEQENFLLKQISSINSVIPHQIHLFELDKILENLAKNYPSFNNKKEEFTKIEKIRKTFTFRIPYYVGPLNDYHKNNGGNAWIFRNKGEKIRPWNFEKIVDLHKSEEEFIKRMLNQCTYLPEETVLPKSSILYSEYMVLNELNNLRIKGKPLDTDVKLKLIEELFKKKTKVTLKSIRDYMIRNNFADKEDFDNSEKNLEIVSNMKSYIDFNNILGDKFELEMVEDLIEKITIHTGNKTLLKKYIEETYPDLSSSQIQKIINLKYKDWGRLSRKLLDGIKGRNKTDDVNTVINFMRNSSDNLMQIIEGKNYSFNEYIDNLRKKYIPQEISYEVVENLYVSPSVKKMIWQVIRVTEEITKVMGYDPDKIFIEMAKSEEEKKTTISRKNKLLDLYKAIKKDERDSQYEKLLTGLNKLDESELRSKKLYLYYTQMGRDMYTGEKIDLDKLFDSTHYDKDHIIPQSMKKDDSIINNLVLVNKNANQTTKGNIYPVPSSIRNNPDIYNYWKYLMEKEFISKEKYNRLIRNTPLTNEELGVFINRQLVETRQSTKAIKELFEKFYQKSKIIPVKASLASDLRKDMNTLKSREVNDLHHAHDAFLNIVAGDVWNREFTSNPINYVNENREGDKVKYSLSKYFTRPRKSKGKVIWTPEKGRKLIVDTLNKPSVLISNESHVKKGELFNATISGKKDYKKGKIYLPLKKDDRLKDVSKYGGYKAINGAFFFLVEHTKSKKRIRSIELFPLHLLSKFYEDKNTVLDYAINVLQLQDPKIIIDKINYRTEIIIDNFSYLISTKSNDGSITVKPNEQMYWRVDEISNLKKIENKYKKDAILTEEDRKIMESYIDKIYQQFKAGKYKNRRTTDTIIEKYEIIDLDTLDNKQLYQLLVAFISLSYKTSNNAVDFTVIGLGTECGKPRITNLPDNTYLVYKSITGIYEKRIRIK

SEQ ID NO: 218 - protein, 1348 aa, Finegoldia magna
MKSEKKYYIGLDVGTNSVGWAVTDEFYNILRAKGKDLWGVRLFEKADTAANTRIFRSGRRRNDRKGMRLQILREIFEDEIKKVDKDFYDRLDESKFWAEDKKVSGKYSLFNDKNFSDKQYFEKFPTIFHLRKYLMEEHGKVDIRYYFLAINQMMKRRGHFLIDGQISHVTDDKPLKEQLILLINDLLKIELEEELMDSIFEILADVNEKRTDKKNNLKELIKGQDFNKQEGNILNSIFESIVTGKAKIKNIISDEDILEKIKEDNKEDFVLTGDSYEENLQYFEEVLQENITLFNTLKSTYDFLILQSILKGKSTLSDAQVERYDEHKKDLEILKKVIKKYDEDGKLFKQVFKEDNGNGYVSYIGYYLNKNKKITAKKKISNIEFTKYVKGILEKQCDCEDEDVKYLLGKIEQENFLLKQISSINSVIPHQIHLFELDKILENLAKNYPSFNNKKEEFTKIEKIRKTFTFRIPYYVGPLNDYHKNNGGNAWIFRNKGEKIRPWNFEKIVDLHKSEEEFIKRMLNQCTYLPEETVLPKSSILYSEYMVLNELNNLRINGKPLDTDVKLKLIEELFKKKTKVTLKSIRDYMVRNNFADKEDFDNSEKNLEIASNMKSYIDFNNILEDKFDVEMVEDLIEKITIHTGNKKLLKKYIEETYPDLSSSQIQKIINLKYKDWGRLSRKLLDGIKGTKKETEKTDTVINFLRNSSDNLMQIIGSQNYSFNEYIDKLRKKYIPQEISYEVVENLYVSPSVKKMIWQVIRVTEEITKVMGYDPDKIFIEMAKSEEEKKTTISRKNKLLDLYKAIKKDERDSQYEKLLTGLNKLDDSDLRSRKLYLYYTQMGRDMYTGEKIDLDKLFDSTHYDKDHIIPQSMKKDDSIINNLVLVNKNANQTTKGNIYPVPSSIRNNPKIYNYWKYLMEKEFISKEKYNRLIRNTPLTNEELGGFINRQLVETRQSTKAIKELFEKFYQKSKIIPVKASLASDLRKDMNTLKSREVNDLHHAHDAFLNIVAGDVWNREFTSNPINYVKENREGDKVKYSLSKDFTRPRKSKGKVIWTPEKGRKLIVDTLNKPSVLISNESHVKKGELFNATIAGKKDYKKGKIYLPLKKDDRLQDVSKYGGYKAINGAFFFLVEHTKSKKRIRSIELFPLHLLSKFYEDKNTVLDYAINVLQLQDPKIIIDKINYRTEIIIDNFSYLISTKSNDGSITVKPNEQMYWRVDEISNLKKIENKYKKDAILTEEDRKIMESYIDKIYQQFKAGKYKNRRTTDTIIEKYEIIDLDTLDNKQLYQLLVAFISLSYKTSNNAVDFTVIGLGTECGKPRITNLPDNTYLVYKSITGIYEKRIRIK

SEQ ID NO: 219 - protein, 1348 aa, Finegoldia magna
  source 1..1348: note = Finegoldia magna SY403409CC001050417
MKSEKKYYIGLDVGTNSVGWAVTDEFYNILRAKGKDLWGVRLFEKAKTAADTRTFRSGRRRNDRKGVRLQILREIFEDEIKKVDKDFYDRLDESKFWAEDKKVSGKYSLFNDKNFSDKQYFEKFPTIFHLRKYLMEEHGKVDIRYYFLAINQMMKRRGHFLIDGQISHVTDDKPLKQQLILLINDLLKIELEEEFMDSIFEILADVNEKKTEKKNILKELINAQDFNKQEGKILYSIFESIVTGKAKIKNIISDEDILEKIKEDNKEDFVLTGDSYEENLQYFEEVLQENITLFNTLKSAYDFVILQSILKGKSTLSDAQVERYDEHKKDLEILKKVIKKYDEDGKLFKQVFKEDNGNGYVSYIGYYLNKNKKITAKKKISNIEFTKYVKGILEKQCDCEDEDVKYLLGKIEQENFLLKQISSINSVIPHQIHLFELDKILENLAKYYPSFNNKKEEFTKIEKIRKTFTFRIPYYVGPLNDYHKNNGGNAWIFRNKGEKIRPWNFEKIVDLHKSEEEFIKRMLNQCTYLPEETVLPKSSILYSEYMVLNELNNLRINGKPIDTDVKLKLIEELFKKKTKVTLKSIRDYMIRNNFADKEDFDNSEKNLEIVSNMKSYIDFNNILGDKFELEMVEDLIEKITIHTGNKKLLKKYIEETYPDLSSSQIQKIINLKYKDWGRLSRKLLDGITGTNIETGEIDTVINFLRNSSDNLMQIIGSQNYSFNNDIDKLRKKYIPQEISYEVVENLYVSPSVKKMIWQVIRITEEITKVMGYDPDKIFIEMAKSEEGKKTTISRKNKLLALYKAIKKDERDSQYEKLLTGLNKLDDSDLRSRKLYLYYTQMGRDMYTGEKIDLDKLFDSTHYDKDHIIPQSMKKDDSIINNLVLVNKNANQTTKGNIYPVPSSIRNNPKIYNYWKYLMEKEFISKEKYNRLIRNTPLTNEELGGFINRQLVETRQSTKAIKELFEKFYKKSKIIPVKAILASDLRKDMNTLKSREVNDLHHAHDAFLNIVAGDVWNREFTSNPINYVKENREGDKVKYSLSKYFTRPRKSKGKVIWTPEKGRKLIVDTLNKPSVLISNESHVKKGELFNATIAGKKDYKKGKIYLPLKKDDRLQDVSKYGGYKAINGAFFFLVEHTKSKKRIRSIELFPLHLLSKFYEDKNTVLDYAINVLQLQDPKIIIDKINYRTEIIIDNFSYLISTKSNDGSITVKPNEQMYWRVDEISNLKKIENKYKKDAILTEEDRKIMESYIDKIYQQFKAGKYKNRRTTDTIIEKYEIIDLDTLDNKQLYQLLVAFISLSYKTSNNAVDFTVIGLGTECGKPRITNLPDNTYLVYKSITGIYEKRIRIK

SEQ ID NO: 220 - protein, 1516 aa, unidentified
  source 1..1516: note = Flavobacteriaceae bacterium S85
MLKQQKDKIIGMNKKILGLDLGTNSIGWALVKQDLENKYGEIIGCGSRIIPMSQDVLGKFDAGISISQTAERTNYRSVRKLIQRNTLRRERLHRVLHQLDFLPKHYNDSIDFEKKLGQFKTDKETKLNYFVNQHGKHEFLFKDSFNEMVKEFKEEQPELFYIKNNGKETKIPYDWTIYYLRKKALSKKISKEELSWLVLNFNQKRGYYQLRGEIDEEKEKNKRYEKLYVSEVVKTNNTIKKTGEYLYDIYFDNGWKYEKQTTKPQDWLHKHKEFIITTTTLKNGETKRTFKTVDSEKDWIAIKSKTEQDIKESNKTVGAFIYDTLLKNPTQKIRGSLVKTIERKFYREEFEKILKEQIKHRPEINVNTAIGKENYTKCVTELYPRNEAHANNILTNDFNYLFTKDILFYQRPLKSKKSEIANCQYEYRTYIKKKEKTGKEERVKQPLKATPKSHPLFQEFRLWQFIHNLKIYIRETTVGNKPLFDVDITDTFFTSENDWATLFEYLNNKKEIEQKHVLEYLVSKKIISKSEKTDYRWNYVEDKKYPGNETRVDFINRLKKVENLNVDEFLTSELEFKLWHIIYSVTDKNEYEKALENFAIRQNIDKDSFVNSFKKFPPFKSDYGAYSTKAIKKLLPLMRLGKFWDGSEIPKVVVEKITDIKTRLTSVNYDESLFKKDEKKILETIVDDITPKQLLKSFVKLKGKNHLAGLNTYQACYLVYERHSESSDITQWENPDDIDSFLNHFKQHSLRNPIVEQVVTETLRTVRDIWKYYGNGSPNYFNEIHIELGREMKNPADKRKQMSAKINENENTNQRIKGILQELMNDGVQDIKPYSPSQQEILKIYEEGISQNPNVDYSKVSEDEITKIKKSNNPTLKEIQRYKLWLEQKYISPYTGKPIPLSELFTPAYQIEHIIPQSRYFDNSLSNKIICESEVNEDKSNKTAYEYLKTNGGSIVHGHHLLSLKEYEDHCQHYFKKNRTKLKNLLSEEIPEGFINRQLNDSRYISKLIKGLLSNIVREENEQEATSKNIVPVTGSITSKLKQDWGLNDKWNEIIAPRFKRLNKMTNSNDFGYFDEKINTFRIQVPDAISRGFNKKRIDHRHHTLDALVIACCTKKHIQYLNSLNNEIIKHELKPSILIKNAQGDYTKHFMLPWNNFPIDCKNAIENTIVSFKQNLRVINKTSNKYQSYKDENGNLRLGKDGKPKKGLTKQTKGNNWAVRKAMHEDTFYGEIVDGENKGKLKIKTLLDTSFDVKKIEDKVLDKSIRTILINYLKQDKYKNLSKPHEEAFSPNGIIEMNKNIISLNNNIPHKPIKRVTLKHEKGKKFSIKTLLDKKTKFAKSATGTNVFFCIYKNINGKIKYHTPSFEEIIEIQKQEFEIKYKSKLNVPETLFDKKESFELLFYLQPNDLVYLPNDEELKNRQLIDFNNLNKKQIKRIYKFTDGSGTTANFIPYQVAKVIFNLNKKEQAKSSFKYPIQNEFGVGSPQSKNQKSIEGILIKERCIKLKIDRLGNISKA

SEQ ID NO: 221 - protein, 1473 aa, Flavobacterium branchiophilum
MAKILGLDLGTNSIGWAVVERENIDFSLIDKGVRIFSEGVKSEKGIESSRAAERTGYRSARKIKYRRKLRKYETLKVLSLNRMCPLSIEEVEEWKKSGFKDYPLNPEFLKWLSTDEESNVNPYFFRDRASKHKVSLFELGRAFYHIAQRRGFLSNRLDQSAEGILEEHCPKIEAIVEDLISIDEISTNITDYFFETGILDSNEKNGYAKDLDEGDKKLVSLYKSLLAILKKNESDFENCKSEIIERLNKKDVLGKVKGKIKDISQAMLDGNYKTLGQYFYSLYSKEKIRNQYTSREEHYLSEFITICKVQGIDQINEEEKINEKKFDGLAKDLYKAIFFQRPLKSQKGLIGKCSFEKSKSRCAISHPDFEEYRMWTYLNTIKIGTQSDKKLRFLTQDEKLKLVPKFYRKNDFNFDVLAKELIEKGSSFGFYKSSKKNDFFYWFNYKPTDTVAACQVAASLKNAIGEDWKTKSFKYQTINSNKEQVSRTVDYKDLWHLLTVATSDVYLYEFAIDKLGLDEKNAKAFSKTKLKKDFASLSLSAINKILPYLKEGLLYSHAVFVANIENIVDENIWKDEKQRDYIKTQISEIIENYTLEKSRFEIINGLLKEYKSENEDGKRVYYSKEAEQSFENDLKKKLVLFYKSNEIENKEQQETIFNELLPIFIQQLKDYEFIKIQRLDQKVLIFLKGKNETGQIFCTEEKGTAEEKEKKIKNRLKKLYHPSDIEKFKKKIIKDEFGNEKIVLGSPLTPSIKNPMAMRALHQLRKVLNALILEGQIDEKTIIHIEMARELNDANKRKGIQDYQNDNKKFREDAIKEIKKLYFEDCKKEVEPTEDDILRYQLWMEQNRSEIYEEGKNISICDIIGSNPAYDIEHTIPRSRSQDNSQMNKTLCSQRFNREVKKQSMPIELNNHLEILPRIAHWKEEADNLTREIEIISRSIKAAATKEIKDKKIRRRHYLTLKRDYLQGKYDRFIWEEPKVGFKNSQIPDTGIITKYAQAYLKSYFKKVESVKGGMVAEFRKIWGIQESFIDENGMKHYKVKDRSKHTHHTIDAITIACMTKEKYDVLAHAWTLEDQQNKKEARSIIEASKPWKTFKEDLLKIEEEILVSHYTPDNVKKQAKKIVRVRGKKQFVAEVERDVNGKAVPKKAASGKTIYKLDGEGKKLPRLQQGDTIRGSLHQDSIYGAIKNPLNTDEIKYVIRKDLESIKGSDVESIVDEVVKEKIKEAIANKVLLLSSNAQQKNKLVGTVWMNEEKRIAINKVRIYANSVKNPLHIKEHSLLSKSKHVHKQKVYGQNDENYAMAIYELDGKRDFELINIFNLAKLIKQGQGFYPLHKKKEIKGKIVFVPIEKRNKRDVVLKRGQQVVFYDKEVENPKDISEIVDFKGRIYIIEGLSIQRIVRPSGKVDEYGVIMLRYFKEARKADDIKQDNFKPDGVFKLGENKPTRKMNHNQFTAFVEGIDFKVLPSGKFEKI

SEQ ID NO: 222 - protein, 1459 aa, Flavobacterium columnare
MKFNLGLDIGTNSIGWALVNEDYENKKGKIIAAGSRIIPMTQDILDKFGSGAITETQTALRTDYRSKRKLIQRFLLRRERLHRVLNVLDFLPKHYAESIDFEKYFGKFLPNTEPKLAYNQNQFIFQNSFLEMLKEFQEKHPELLTNNKKIPYDWTIYYLRKKALNQRIEKEELAWLLLQFNQKRGYNQLRDEEEESVPNKQVEFYSLKIIDVVADQPKEGRDKRWYSINLENGWTYRRESKTPLFNWEGKTKDFIVTTDLNQDGSIKKDKEGKEKRSFRAPSEGDWTLLKKKTEKEIYESGKTLGTYIYDALLNTPDLKIKGDFIRTIDRSIYKEELQQIINKQKEYHLELNSSKLYKACLEELYPKNEIYKSALKNKDIAYLFINDILYYQRPLKAPKYNIGKCTYESRTFKKEDKKIREYIPAVAKSHPLFQEFRLWQWIKNLKIYEKLSSDNCTDFFLTNEQDFENLFEFLWNKKEIDHKGILEYLVKTKFPDLKPKQVKTKVKEYRWNYVYDHEKDESKTYPCGETYFLLKNKLDKIYNAQDDFLDKERLYNLWHIIYSVTDKKQYEKALAKFALKNHLDTKSFVNTFKRIPPFKNDYAIYSLKAIKKLLPLMRVGKYWNYDDIDPITKQKIQCIITGEENDTISTLVREKTNHFSNENDFKNLPLWLAGYIVYNSHNESSEIEKWKSPQDIDTFLKKFKQHALRNPIVEQVVTETLRVVRDIWSKKGQGKKDFFNEIHIELGKDLKNPVDKRRKLSSTNTKNESTNTRIKALLIELFTQGVENVKPNSPKHQEILKIFEEGALNSGIEIEEDIIKISNTDQPTKKQLELYILWLEHKYKSPYTGQSIPLSKLFTPNYEIEHIIPRSKYYDDNLSNKVICETEINRLKNNQLGYEFINNHEIREVTLEEGKTIRLLSPEQYWNFVTTYYAKNKAKRENLLLKELPVQMVEKQLNDTRYVSKYVMQLLSKIVRKEDGTDNGINSTNILSISGKMTRALKNDWDLNDVWNDLLLYRFERLNTITKTNLFTTYSEQKQKRMPIVPDQYAKGFHKKRLDHRHHALDAIVIACITRNHINYMNNQNIQGEKLKKNAIEKENYREILQKSRLDIRAQLCEKKYNDNDPTKYNWVFIKPWADFTENTKDILESIIPSFKQNLRIINKTVNYYEKYNENGKKVKVRQIKGDNWAIRKPLHKETISGKVHLSYKTPAKGKILTATRKVLDSSMDFKSIEKITDTGIQKILKNYLEYKKSPELAFSPEGIEELNATITKYNNGFHHKPIYKVRIYEEGVKFPLGNKGNKKSKYVEAEKGTNLFFAIYKDQENNRYFETIPFNDVLETLKKGMSAVPEKNQEENTLVFALSPQDLVFVPTLDEIENPDIVDFKNLTKDQTNRIYKMVSSSGKQCFFIKAEVATSIVNKMEFSTSNKMENSIEGIQIKSNCWKLKLDRLGTITRVIK

SEQ ID NO: 223 - protein, 1535 aa, Flavobacterium columnare
MTKILGLDLGTNSIGWAIRDTENEGINQILDKGARIFSEGVKSENGKEISRAAERTAYRSARKIKYRRKLRKYETLKVLSINGMCPLSVEEVEQWKKSGFKEYPLNPEFLDWLRTNEDKNINPYLFRDKASKQKVTLFELGRALYHIAQRRGFLSNRLDQSAEGVFEEHNPQIQNLIEDLDSSNTILNELKEYYINLGIIDETEKSGFKKDLDEGEKKLKSLYNSLVAITKKNANDIETCKQELIARLNKKEDLGKVKGKIKDISQAMLDRNFKTLGQYFFSLYNKERIRNQYTSREEHYLEEFIIICQTQGIEGINTNEKLPEKKFTGLAKDLYRAIFFQRPLKSQKGLIGKCSFEKNKSRCAVSHPDYEEFRMWSYLNTIKIGTQSEKTLRFLTLEEKLKLVPKFYRKSDFNFEVLAKELVEKGASFGYYKSSKKNEFFYWFNYKPTDSVSACVVSASLENAIGKDWKIKTFEYQTRNTEKNEVTKSVDYKDLWHLLSVATSDTYLYDFAIEKLKLEPKNAKAFSKTKLKKDFASLSLAAIAKILPYLKQGLLYSHAVFMANIENIVDADIWKDEEQQKFIQSKIVELVDNYIVEKSKLELINGLLKIYNTEDKEGRKVYYSKEAESLFEADLRKKLVPFYKANIIIEEHEQEIIFQDLFPILMDQLKKQEFIKIGRLDKQIEAFLEGENEEGQIFCNHTDKLKKLYHPSDIEVFKKKTIKDEWGNEKVVLGSPLTTSIKNPMAMRALHQLRKVLNTLIANDQIDEDTRIHIEMARELNDANKRKGIQDFQNENKKFREEAIKEIKKLYLEECHKDVNPTEDDILRYQLWLEQGKCEIYEEGNNISICDIIGSNPSYDIEHTIPRSISQDNSQMNKTLCSLKFNRSIKKQKMPVELSNYNDILPRIAHWKKEAEELTRQIETISRSIKSAATKVAKDKNIRKRHYLTLKRDYILGKYERFTWEEPKVGFKNSQIPDTGIITKYAQAYLKSYFKRVESVKGGAVAEFRKLWGIQESFIDENWWKHYKDKDRDKHTHHTIDAITIACMPKDKYDLLAHAWRLEDEQDKKAAKVLIEQAKPWKTFKEDIEKIETEILVSHFTPDNVKKQSKSIIKNRGKKVYVLKNELPVNFKNKIEGKDYFKLKFDSKILYKIPKKKEKQTDTFYEELPKNYLNGVEGKDYFKINTTGKTFYKIPIFNQGDTIRGSLHQETTYGAIKLPDIDIETKKPLHTDKGGFILKKDIKGNEIVFFVVRKEISKISENDVQNIVDNVVRKKIENAIANSLITFKIVKKKKVAVIKEGVTIWMREPNIEKGIEGIPIKKVRIITNSVKNPIEIKVHSPLSKSRHKHKQKVYGQNDENYAMALYELDGKREFELINNFNLAKLLKQSQSYYPLHKEKEIKGKKILVPIEKRNNKDVILKRGQQVVFYDKTVENPKDISEIIDFRERIYIIEGLTIQRQKDKKTSKVNEYGIIQLRHFKEARKSEEISKDNFKPDGEFKINENKPTRKMNHNQFTAFVEGIDFKVLPSGKFQKI

SEQ ID NO: 224 - protein, 1354 aa, Flavobacterium psychrophilum
  source 1..1354: note = Flavobacterium psychrophilum JIP02/86
MKKILGLDLGTNSIGWAFINEAENEIEVSSIVNTGVRIVPLTTDEESDFKKGNTISINADRTLKRGARRGLQRFKQRREALLETFNRIKFIATDFVYAETGAATTFSSYQLRAKSAVEAVTKEELVKVLLMLNKKRGYKSSRKAKTAEEGDAIDGMKIAKEIFENNLTPGQWVYNSLSKGGKFIPDFYHSDLQKELEKIVRFQNQFHSEQINDKLLADIQGKSRTQTSQHFSKTLNIPLAENKGTREETKLQHYQWRNEALANELDMKILAFIITEINNQINQSSGYLGAISDRSKELYFNQETVGQYQYKQLQENVHAKLKNQVFYRQDYLDEFEKIWETQAKFHSELNEKLKAEIRDITIFYQRKLKSQKHLVSFCEFEKGHKAIPKSSPLFQEFRIWQNLNNVVVKNETTKEVFELSEELKQLIAEELQFKESMTDVQMLTFCELKKGTHTVNFKKIEGNRTNTSIYKAFEKILEVEGYEIDFSKMKPLEIKETVAPIFETLNINTVILDFDPTIQGNDFDKQPYYQLWHLLYSAEDDDKLKETLKTKFGFKENHLPFILNINLQADYGSLSAKAIKKILPHLMDGHIYDKACLMVGYNHSSSLTTAQNNDRVLKDTLELLKKNSLRNPVVEKILNQMINVINAIMKDPAMGKPDEIRVELARELKANNEQRKKATSDINTATTEHERIRKLLHSEFNIPRVTRNDIIRYKLWLETGGISLYTGNPIKASDLFSKNYDIEHIIPKSRLFDDSFSNKTLCERQLNIDKSNKTAYSFLQEKLSENDFAAYENRVKDLFKTGKIKSYTKYKKLLMADNEIPEGFIDRQLRETQYIAKKAKEILLEVSRNVTATIGSVTDKLRQDWELVDVMKELNWEKYDKLGLTHIEEGKNGERLSKIKDWTKRNDHRHHAMDAITVAFTKPAYIQYLNNLNAKTQGENKANSIIGIENKHLYRDKNNKLRFISPMKNFREEAKKQLESILISYKAKNKVVTKNKNTTKKSGGTNQKIQLTPRGRLHKETVYGKLQQYATKEEKVNASFTEDYIQKVAKKEYREALLKRLEENDNDPKKAFTGKNALNKTPIYISLKDNIIVPEKVKTVWLETDYTIRKDITPDLKIDKVIDVGIKRILQNRLNEFNGDPKKAFVNLGESPIWLNKEKGIAIKRVTISGVSNAQALHTKKDHLGNEILDKNGNPIPVDFISTGNNHHVAIYRDEKGNLQEEVVSFYDAVIRRNLGLSVINKNHEKGWEFLFSMKQNEFFIFPSDGFNPHEIDLLNPNNYHLISPNIFRVQKISTKNYMFNHHLETKAVDGEMLKSKKELSKTSYHFIQTPTNLNGIIKVRINHLGKIVHLGEY

SEQ ID NO: 225 - protein, 1458 aa, Fluviicola taffensis
MTKTILGLDLGTNSIGWALINQDFDNKKGEILGMGSRIIPMTQDIKDEFGKGNSISQTAERTRLRGVRRLIHRTLLRRERLHRVLNIIGFLPEHYANQIDFEKRFGKFKPESEPKISFDGNDVFLFEKSYQEMLVDFKIHQPQLVSNGKKIPHDWTIYYLRKKALSKKIEKEELAWILLNFNQKRGYYQLRGEEEEETPNKLVEFHSLKIVEVNADEPQKGKPEIWYSLVLENGWVYRRASKTPLFDWKDKIREFIVTTEINNDGTVKTDKEGTEKRSFRAPKPEDWTLQKKKTEFELSKSGNEVGAFIYESILQKPNQKIRGKLISTIERKFYKEELKTILKTQLFFHKELKDEKLYNACIEELYKNNEAHRSLLSNKGFEHLFINDILFYQRPLRSKKSQISNCPLEKRTYKKEGIEITEGIKVISKSNPIYQEFRLWQWISNLSLYCIEPTETNVTSTFLNSIEDYENLFEFLNNRKEIEQKHLLKYLLENQGFKGKLLTNELEKFRWNFVADKKYPCNETGSLLHTRLSKVKNISPDFLTKEIEHQLWHIIYSVTDKIEYEQALKTFARKNNLDVDSFFEHFKKIPPFESTYGAYSEKAIKKLLPLIRLGKYWNWEAIDSISKDRISKILSGEYDENIKNRVREKAVHLTSENNFQGLQEWLAKYIVYDRHSEGNDLGKWTSVSDLETYLKEFKQHSLRNPIVEQVITETLRVVKDIWIKHGKGTENFFDEIHVELGREMKNNSEDRKRLTNTITENENTNLRIKALLMEMMNDNDVENVRPYSPSQQEILKIYEDGALNSNIELDDEIVKISKKAEPTKSELQRYKLWLEQKYRSPYTGQVIPLNKLFTSEYEIEHVVPQSRFFDDSFSNKVICESAVNKRKDNQLGLQFIKNHSGEKVELGFGKVVQVFTEEQYLDFVKEHYSKNRSKHNKLLLEEIPEKMIERQLNDTRYISKFVSSILSNIVRSEKDDDGLNSKNILPGNGKITTELKRDWGLNDVWNDLILPRFERMNTITNSDLFTTYNDKYQKHLPTVPFEYSKGFQKKRIDHRHHAMDALVIACATRDHLNLMNNQSAKSELKRYDLQNKLRKKEPYFNQKENKQKEAFKDFIKPWGTFTEDSKNALEKIIISFKQNLRVINKATNSYESYKDEDGNLRIGKDGKPEKGLIKQKGLNWAIRKPLHKDTVSGQINLSRIKLPNGKILTATRKNLDTSFDLKTIENSITDTGIQKILKNYLLSKESPELAFSPEGLEEMNNEIEKYNNGKFHHPINKARIYELGSKFNVGQTGNRRDKFVEAAKGTNLFFAIYQDENKNRSYETIPLNEVIEHQKWRASLPKEEQEKIPLVPVNKLKGTFIFSLSPNDLVYVPSNDELERSASIDFSKLKKEQINRLYKMVSSSGSQCFFVKSEVATSVVNKMEYSSLNKMEKSIDNLMVKEICIKLKIDRLGNISKA

SEQ ID NO: 226 - protein, 1646 aa, Francisella tularensis
MNIKILPIAIDLGAKNTGVFSAFYQKGTSLESLDNKNGKVYELSKDSYTLLMNNRTARRHQRRGIDRKQLVKRLFKLIWTKQLNLEWNKDTQQTISFLLNRRGFSFITDGYSPEYLNIAPEAVKAILMSILDDYNGEDDLDSYLQSATENDSKIDELYNKLLQKALEFKLRKLCIDIKEDKVTTKTLKELSNTEFKLLANYLVDYDRILRTQKFSYTDKQGNLRELNYYHHDKYNIQEFLKRNIIINDVILEKLTDDLDIWNLNFDKFDFEKNLEKLENQEDKDYLQTHLHHFVFAVNKIKSEMASGGRHRSQYFQEITNVLVENNHQEGYLKNFCENLHNKKYSNLSVKNLVNLIGNLSNLELKPLRKYFNDKIHAKADYWDEQKFAETYSDWILGEWRVGAKDKDKKDGAKYSYKNLCDELKQKVGINQDGIINQTKSDFVDFLLELDPCRTIPPYLDNNNRKPPKCQSLILNPKFLDNKYPNWQQYLQELKKLQTVQNYLGNFEIDLKDLKSSKEQPYFVKYKSLNQQIASGQRDYKDLDARVLQFIFDRVKASDELLLNEIYSHAKKLKQNTSSELEKLELCKKLDEVIANSQLSQILKSQHVNGIFEQGTFLHLVCKYYKQRQRARDSRLYIMPEYRYDKKLDKYNNTGRFDDDNQLLTYCNHKPRQKRYQLLNDLAGVLQVSPNFLKDKIGSDDDLFISKWLVEHIRGFKKACEDSLKIQKDNRGLLNHKINIARNTKGKCEKEIFNLICKIEGSEDKKGNYKHGLAYELGVLLFGEPNQASKLEFDRKIKKFNSIYSFAQIQQIAFAERKGNANTCAVCSADNAHRMQQIKVAKPVEGNKDNIILSAKAQRLPAIPTRIVDGAVKKIATILARNIVDDNWDNIKQALSNNQQLHVPIITESNAFEFEPALADIKGKSLKDKRKKALERIDPENVFKDKNNRIKEFAKGISAYSDANLANGDFDGAKEELDHIIPRSHKKYGTLNDEANLICVTREDNQNRGNKAVFLYDLKPNYKLKQFNTTDDLEIEKKIADTIWDASKQDFKFGNYRSFINLTPQEQIAFRHALFLADKNPIKKAVIRAIDNRNRTFVNGTQRYFAEVLANNIYLRAKKENLATNRITFDYFGIETTNSNGRGIADVRKLYEKVDSDIQAYAKGDKPQDSYSHLIDAMIAFCVAADEHKNEGSIGLKMGNQYGLFPTPDKYDENTGEIISWHNDDIFRKIKVSDNQFSDKKLVRKKATEGFNTHRQMTRDGIYGESYLPILIHKNLNEVRKGYNWENSEEIKIFKGKKYDIQQLNNLVYCLKFVDKPISIDIQITTLEELRNILETNNISTTAEYYYINLKTQKLHEYYIENYNTALGYKKYTKEMEFLRSLAYRTERVKIKSIDDVSMILAKDSNFKAGKIELPFKTEWQRLYLEWQNTTIKDNHEFLKSYFSVKNATKQHKKVRKDFSLPISTNEGKLLVKRKTWDNNFIYQILNDSDSRADGTKPFIPAFDISKNEIVETIIKSFTSKNIFWLPKNIELQKVDNKSIFAIDTSRWFEVETPKDLIEIGVSTIQYKIDNNSRPKVRVKLDYVMDDDSKINYFMNHSLLKSRYPDKVLEILKQSTIIEFESSGFNKTIKEMLGMTLAGIYNETSNN

SEQ ID NO: 227 - protein, 1629 aa, Francisella tularensis
MNFKILPIAIDLGVKNTGVFSAFYQKGTSLERLDNKNGKVYELSKDSYTLLMNNRTARRHQRRGIDRKQLVKRLFKLIWTEQLNLEWDKDTQQAISFLFNRRGFSFITDGYSPEYLNIVPEQVKAILMDIFDDYNGEDDLDSYLKLATEQESKISEIYNKLMQKILEFKLRKLCTDIKDDKVSTKTLKEITSYEFELLADYLANYSEILKTQKFSYTDKQGNLKELSYYHHDKYNIQEFLKRHATINIQILDTLLTDDLDIWNFNFEKFDFDKNEEKLQNQEDKDHIQAHLHHFVFAVNKIKSEMASGGRHRSQYFQEITNVLDENNHQEGYLKNFCENLHNKKYSNLSVKNLVNLIGNLSNLELKPLRKYFNDKIHAKADHWDEQKFTETYCHWILGEWRVGVKDQDKKDGAKYSYKDLCNELKQKVTKAGLVDFLLELDPCRTIPPYLDNNNRKPPKCQSLILNPKFLDNQYPNWQQYLQELKKLQSIQNYLESFETDLKVLKSSKDQPYFVEYRSSNQQIASGQRDYKDLDARILQFIFDRVKASDELLLNEIYFQAKKLKQKASSELEKLESSKKLDEVIANSQLSQILKSQHTNGIFEQGTFLHLVCKYYKQRQRARDSRLYIMPEYRYDKKLHKYNNTGRFDDDNQLLTYCNHKPRQKRYQLLNDLAGVLQVSPNFLKDKIGSDDDLFISKWLVEHIRGFKKACEDSLKIQKDNRGLLNHKINIARNTKGKCEKEIFNLICKIEGSEDKKGNYKHGLAYELGVLLFGEPNEASKPEFDRKIKKFNSIYSFAQIQQIAFAERKGNANTCAVCSADNAHRMQQIKITEPVEDNKDKIILSAKAQRLPAITTRIVDGAVKKMATILAKNIVDDNWQNIKQVLSAKHQLHIPIITESNAFEFEPALADVKGKSLKDRRKKALERISPENIFKDKNNRIKEFAKGISAYSGANLTDGDFDGAKEELDHIIPRSHKKYGTLNDEANLICVTRGDNKNKGNRIFCLRDLANNYKLKQFETTDDLEIEKKIADTIWDANKKDFKFGNYRSFINLTPQEQKAFRHALFLADENPIKQAVIRAINNRNRTFVNGTQRYFAEVLANNIYLRAKKENLNTDKISFDYFGIPTIGNGRGIAEIRQLYEKVDSDIQAYAKGDKPQASYSHLIDAMLAFCIAADEHRNDGSIGLEIDKNYSLYPLDKNTGEVFTKDIFSQIKITDNEFSDKKLVRKKATEGFNTHRQMTRDGIYAENYLPILIHKELDEVRKGYTWKNSEEIKIFKGKKYDIQQLNNLLYCLKFVDKPISIDIQISTLEELRNILTTNNIAATAEYYYINLKTQKLHEYYIENYNTALGYKKYTKEMEFLRSLAYRSERVKIKSIDDVKQVLDKDSNFIIGKITLPFKKEWQRLYREWQNITIKDDYEFLKSFFNVKSITKLHKKVRKDFSLPISTNEGKFLVKRKTWDNNFIYQILNDSDSRVDGTKPFIPAFDISKNEIVEAIIDSFTSKNIFWLPKNIELQKVDNKNIFAIDTSKWFEVETPSDLRDIGVATIQYKIDNNSRPKVRVKLDYVIDDDSKINYFTNHSLLKSRYPDKVLEILKQSTIIEFESSGFNKTIKEMLGMTLAGIYNETSNN

SEQ ID NO: 228 - protein, 1629 aa, Francisella tularensis
  source 1..1629: note = Francisella novicida FTG
MNFKILPIAIDLGVKNTGVFSAFYQKGTSLERLDNKNGKVYELSKDSYTLLMNNRTARRHQRRGIDRKQLVKRLFKLIWTEQLNLEWDKDTQQAISFLFNRRGFSFITDGYSPEYLNIVPEQVKAILMDIFDDYNGEDDLDSYLKLATEQESKISEIYNKLMQKILEFKLMKLCTDIKDDKVSTKTLKEITSYEFELLADYLANYSESLKTQKFSYTDKQGNLKELSYYHHDKYNIQEFLKRHATINDRILDTLLTDDLDIWNFNFEKFDFDKNEEKLQNQEDKDHIQAHLHHFVFAVNKIKSEMASGGRHRSQYFQEITNVLDENNHQEGYLKNFCENLHNKKYSNLSVKNLVNLIGNLSNLELKPLRKYFNDKIHAKADHWDEQKFTETYCHWILGEWRVGVKDQDKKDGAKYSYKDLCNELKQKVTKAGLVDFLLELDPCRTIPPYLDNNNRKPPKCQSLILNPKFLDNQYPNWQQYLQELKKLQSIQNYLDSFETDLKVLKSSKDQPYFVEYKSSNQQIASGQRDYKDLDARILQFIFDRVKASDELLLNEIYFQAKKLKQKASSELEKLESSKKLDEVIANSQLSQILKSQHTNGIFEQGTFLHLVCKYYKQRQRARDSRLYIMPEYRYDKKLHKYNNTGRFDDDNQLLTYCNHKPRQKRYQLLNDLAGVLQVSPNFLKDKIGSDDDLFISKWLVEHIRGFKKACEDSLKIQKDNRGLLNHKINIARNTKGKCEKEIFNLICKIEGSEDKKGNYKHGLAYELGVLLFGEPNEASKPEFDRKIKKFNSIYSFAQIQQIAFAERKGNANTCAVCSADNAHRMQQIKITEPVEDNKDKIILSAKAQRLPAIPTRIVDGAVKKMATILAKNIVDDNWQNIKQVLSAKHQLHIPIITESNAFEFEPALADVKGKSLKDRRKKALERISPENIFKDKNNRIKEFAKGISAYSGANLTDGDFDGAKEELDHIIPRSHKKYGTLNDEANLICVTRGDNKNKGNRIFCLRDLADNYKLKQFETTDDLEIEKKIADTIWDANKKDFKFGNYRSFINLTPQEQKAFRHALFLADENPIKQAVIRAINNRNRTFVNGTQRYFAEVLANNIYLRAKKENLNTDKISFDYFGIPTIGNGRGIAEIRQLYEKVDSDIQAYAKGDKPQASYSHLIDAMLAFCIAADEHRNDGSIGLEIDKNYSLYPLDKNTGEVFTKDIFSQIKITDNEFSDKKLVRKKAIEGFNTHRQMTRDGIYAENYLPILIHKELNEVRKGYTWKNSEEIKIFKGKKYDIQQLNNLVYCLKFVDKPISIDIQISTLEELRNILTTNNIAATAEYYYINLKTQKLHEYYIENYNTALGYKKYSKEMEFLRSLAYRSERVKIKSIDDVKQVLDKDSNFIIGKITLPFKKEWQRLYREWQNTTIKDDYEFLKSFFNVKSITKLHKKVRKDFSLPISTNEGKFLVKRKTWDNNFIYQILNDSDSRVDGTKPFIPAFDISKNEIVEAIIDSFTSKNIFWLPKNIELQKVDNKNIFAIDTSKWFEVETPSDLRDIGVATIQYKIDNNSRPKVRVKLDYVIDDDSKINYFTNHSLLKSRYPDKVLEILKQSTTIEFESSGFNKTIKEMLGMTLAGIYNETSNN

SEQ ID NO: 229 - protein, 1629 aa, Francisella tularensis
  source 1..1629: note = Francisella novicida GA99-3548
MNFKILPIAIDLGVKNTGVFSAFYQKGTSLERLDNKNGKVYELSKDSYTLLMNNRTARRHQRRGIDRKQLVKKLFKLIWTEQLNLEWDKDTQQAISFLFNRRGFSFITDGYSPEYLNIVPEQVKAILMDIFDDYNGEDDLDSYLKLATEQESKISEIYNKLMQKILEFKLRKLCTDIKDDKVSTKTLKEITSYEFELLADYLANYSESLKTQKFSYTDKQGNLKELSYYHHDKYNIQEFLKRHATINDEILDTLLTDDLDIWNFNFEKFDFDKNEEKLQNQEDKDHTQAHLHHFVFAVNKIKSEMASGGRHRGQYFQEITNVLDENNHQEGYLKNFCENLHNKKYSNLSVKNLVNLIGNLSNLELKPLRKYFNDKIHAKADHWDEQKFTETYCHWILGEWRVGLKDQDKKEGAKYSYKDLCNELKQKVTNAGLIDFLLELDPCRTIPPYLDNNNRKPPKCQSLILNPKFLDNQYPNWQQYLQELKKLQIIQDYLESFETDLKVLKSSKDQPYFVEYKSSNQQIASGQRDYKDLDARILQFIFDRVKASDELLLNEIYFQAKKLKQKASSELEKLESSKKLDEVIANSQLSKILKSQHTNGIFEQGTFLHLVCKYYKQRQRARDSRLYIMPEYRYDKKLDKYNNTGRFDDDNQLLTYCNHKPRQKRYQLLNDLAGVLQVSPNFLKDKIGSDDDLFISKWLVEHIRGFKKACEDSLKIQKDNRGLLNHKINIARNTKGKCEKEIFNLICKIEGSEDKKGNYKHGLAYELGVLLFGEPNEASKPEFDRKIKKFNSIYSFAQIQQIAFAERKGNANTCAVCSADNAHRMQQIKITEPVEDNKDKIILSAKAQRLPAIPTRIVDGAVKKMATILAKNIVDDNWQNIKQVLSAKHQLHIPIITESNAFEFEPALADVKGKSLKDRRKKALERISPENIFKDKNNRIKEFAKGISAYSGANLTDGDFDGAKEELDHIIPRSHKKYGTLNDEANLICVTRDDNKNKGNRIFCLHDLANNYKLKQFETTDDLEIEKKIADTIWDASKKDFKFGNYRSFINLTPQEQKAFRHALFLADENPIKQAVIRAINNRNRTFVNGTQRYFAEVLANNIYLRAKKENLNTDKISFDYFGIPTIGNGRGIAEIRQLYEKVDSDIQVYAKGDKPQASYSHLIDAMLAFCIAADEHRNDGSIGLEIDKNYSLYPLDKNTGEVFTKDIFSQIKITDNEFSDKKLVRKKATEGFNTHRQMTRDGIYAENYLPILIHKELDEVRKGYTWKNSEEIKIFKGKKYDIQQLNNLLYCLKFVDKPISIDIQISTLEELRNILTTNNIAATAEYYYINLKTQKLHEYYIENYNTALGYKKYTKEMEFLRSLAYRSERVKIKSIDDVKQVLDKDSNFIIGKITLPFKKEWQRLYREWQNTTIKDDYEFLKSFFNVKSITKLHKKVRKDFSLPISTNEGKFLVKRKTWDNNFIYQILNDSDSRVDGTKPFIPAFDISKNEIVEAIIDSFTSKNIFWLPKNIELQKVDNKNIFAIDTSKWFEVETPSDLRDIGVATIQYKIDNNSRPKVRVKLDYVIDDDSKINYFTNHSLLKSRYPDKVLEILKQSTIIEFESSGFNKTIKEMLGMTLAGIYNETSNN

SEQ ID NO: 230 - protein, 1629 aa, Francisella tularensis; identical to SEQ ID NO: 30

SEQ ID NO: 231 - protein, 1629 aa, Francisella tularensis
  source 1..1629: note = Francisella novicida GA99-3549
MNVKILPIAIDLGVKNTGVFSAFYQKGTSLERLDNKNGKVYELSKDSYTLLMNNRTARRHQRRGIDRKQLVKRLFKLIWTEQLNLEWDKDTQQAISFLFNRRGFSFITDGYSPEYLNIVPEQVKAILMDIFDDYNGEDDLDSYLKLATEQESKISEIYNKLMQKILEFKLRKLCTDIKDDKVSTKTLKEITSYEFELLADYLANYSEILKTQKFSYTDKQGNLKELSYYHHDKYNIQEFLKRHATINDEILDTLLTDDLDIWNFNFEKFDFDKNEEKLQNQEDKDHTQAHLHHFVFAVNKIKSEMASGGRHRGQYFQEITNVLDENNHQEGYLKNFCENLHNKKYSNLSVKNLVNLIGNLSNLELKPLRKYFNDKIHAKADHWDEQKFTETYCHWILGEWRVGVKDQDKKDGAKYSYKDLCNELKQKVTKAGLVDFLLELDPCRTIPPYLDNNNRKPPKCQSLILNPKFLDNQYPNWQQYLQELKKLQSIQNYLESFETDLKVLKSSKDQPYFVEYKSSNQQIASGQRDYKDLDARILQFIFDRVKASDELLLNEIYFQAKKLKQKASSELEKLESSKKLDEVIANSQLSQILKSQHTNGIFEQGTFLHLVCKYYKQRQRARDSRLYIMPEYRYDKKLDKYNNTGRFDDDNQLLTYCNHKPRQKRYQLLNDLAGVLQVSPNFLKDKIGSDDDLFISKWLVEHIRGFKKACEDSLKIQKDNRGLLNHKINIARNTKGKCEKEIFNLICKIEGSEDKKGNYKHGLAYELGVLLFGEPNEASKPEFDRKIKKFNSIYSFAQIQQIAFAERKGNANTCAVCSADNAHRMQQIKITEPVEDNKDKIILSAKAQRLPAIPTRIVDGAVKKMATILAKNIVDDNWQNIKQVLSAKHQLHIPIITESNAFEFEPALADVKGKSIKDRRKKALERISPENIFKDKNNRIKEFAKGISAYSGDNLASGDFDGAKEELDHIIPRSHKKYGTLNDEANLICVTRDDNKNKGNRIFCLHDLANNYKLKQFETTDDLEIEKKIADTIWDASKKDFKFGNYRSFINLTPQEQKAFRHALFLADENPIKQAVIRAINNRNRTFVNGTQRYFAEVLANNIYLRAKKENLNTDKISFDYFGIPTIGNGRGIVEIRQLYEKVDSDIQAYAKGDKPQASYSHLIDAMLAFCIAADEHRNDGSIGLEIDKNYSLYPLDKNTGEVFTKDIFSQIKITNNEFSDKKLVRKKATEGFNTHRQMTRDGIYAENYLPILIHKELDEVRKGYTWGNSEELKIHKGKKYDIQQLNNLVYCLKFIDKSISIDIQISTLEELRNILTTNNIATTAEYYYINLKTQKLHEYYIENYNTALGYKKYTKEMEFLRSLAYRSERVKIKSIDDVKQVLDKDSNFIIGKITLPFKKEWQRLYREWQNTTIKDDYEFLKSFFNVKSITKLHKKVRKDFSLPISTNEGKFLVKRKTWDNNFIYQILNDSDSRVDGTKPFIPAFDISKNEIVEAIIDSFTSKNIFWLPKNIELQKVDNKNIFAIDTSKWFEVETPSDLRDIGVATIQYKIDNNSRPKVRVKLDYVIDDDSKINYFTNHSLLKSRYPDKVLEILKQSTIIEFESSGFNKTIKEMLGMTLAGIYNETSNN

SEQ ID NO: 232 - protein, 1323 aa, Fructobacillus fructosus
  source 1..1323: note = Fructobacillus fructosus KCTC 3544
MVYDVGLDIGTGSVGWVALDENGKLARAKGKNLVGVRLFDTAQTAADRRGFRTTRRRLSRRKWRLRLLDELFSAEINEIDSSFFQRLKYSYVHPKDEENKAHYYGGYLFPTEEETKKFHRSYPTIYHLRQELMAQPNKRFDIREIYLAIHHLVKYRGHFLSSQEKITIGSTYNPEDLANAIEVYADEKGLSWELNNPEQLTEIISGEAGYGLNKSMKADEALKLFEFDNNQDKVAIKTLLAGLTGNQIDFAKLFGKDISDKDEAKLWKLKLDDEALEEKSQTILSQLTDEEIELFHAVVQAYDGFVLIGLLNGADSVSAAMVQLYDQHREDRKLLKSLAQKAGLKHKRFSEIYEQLALATDEATIKNGISTARELVEESNLSKEVKEDTLRRLDENEFLPKQRTKANSVIPHQLHLAELQKILQNQGQYYPFLLDTFEKEDGQDNKIEELLRFRIPYYVGPLVTKKDVEHAGGDADNHWVERNEGFEKSRVTPWNFDKVFNRDKAARDFIERLTGNDTYLIGEKTLPQNSLRYQLFTVLNELNNVRVNGKKFDSKTKADLINDLFKARKTVSLSALKDYLKAQGKGDVTITGLADESKFNSSLSSYNDLKKTFDAEYLENEDNQETLEKIIEIQTVFEDSKIASRELSKLPLDDDQVKKLSQTHYTGWGRLSEKLLDSKIIDERGQKVSILDKLKSTSQNFMSIINNDKYGVQAWITEQNTGSSKLTFDEKVNELTTSPANKRGIKQSFAVLNDIKKAMKEEPRRVYLEFAREDQTSVRSVPRYNQLKEKYQSKSLSEEAKVLKKTLDGNKNKMSDDRYFLYFQQQGKDMYTGRPINFERLSQDYDIDHIIPQAFTKDDSLDNRVLVSRPENARKSDSFAYTDEVQKQDGSLWTSLLKSGFINRKKYERLTKAGKYLDGQKTGFIARQLVETRQIIKNVASLIEGEYENSKAVAIRSEITADMRLLVGIKKHREINSFHHAFDALLITAAGQYMQNRYPDRDSTNVYNEFDRYTNDYLKNLRQLSSRDEVRRLKSFGFVVGTMRKGNEDWSEENTSYLRKVMMFKNILTTKKTEKDRGPLNKETIFSPKSGKKLIPLNSKRSDTALYGGYSNVYSAYMTLVRANGKNLLIKIPISIANQIEVGNLKINDYIVNNPAIKKFEKILISKLPLGQLVNEDGNLIYLASNEYRHNAKQLWLSTTDADKIASISENSSDEELLEAYDILTSENVKNRFPFFKKDIDKLSQVRDEFLDSDKRIAVIQTILRGLQIDAAYQAPVKIISKKVSDWHKLQQSGGIKLSDNSEMIYQSATGIFETRVKISDLL

SEQ ID NO: 233 - protein, 1374 aa, Fusobacterium nucleatum
  source 1..1374: note = Fusobacterium nucleatum subsp. vincentii ATCC 49256
MKKQKFSDYYLGFDIGTNSVGWCVTDLDYNVLRFNKKDMWGSRLFDEAKTAAERRVQRNSRRRLKRRKWRLNLLEEIFSDEIMKIDSNFFRRLKESSLWLEDKNSKEKFTLFNDDNYKDYDFYKQYPTIFHLRDELIKNPEKKDIRLIYLALHSIFKSRGHFLFEGQNLKEIKNFETLYNNLISFLEDNGINKSIDKDNIEKLEKIICDSGKGLKDKEKEFKGIFNSDKQLVAIFKLSVGSSVSLNDLFDTDEYKKEEVEKEKISFREQIYEDDKPIYYSILGEKIELLDIAKSFYDFMVLNNILSDSNYISEAKVKLYEEHKKDLKNLKYIIRKYNKENYDKLFKDKNENNYPAYIGLNKEKDKKEVVEKSRLKIDDLIKVIKGYLPKPERIEEKDKTIFNEILNKIELKTILPKQRISDNGTLPYQIHEVELEKILENQSKYYDFLNYEENGVSTKDKLLKTFKFRIPYYVGPLNSYHKDKGGNSWIVRKEEGKILPWNFEQKVDIEKSAEEFIKRMTNKCTYLNGEDVIPKDSFLYSEYIILNELNKVQVNDEFLNEENKRKIIDELFKENKKVSEKKFKEYLLVNQIANRTVELKGIKDSFNSNYVSYIKFKDIFGEKLNLDIYKEISEKSILWKCLYGDDKKIFEKKIKNEYGDILNKDEIKKINSFKFNTWGRLSEKLLTGIEFINLETGECYSSVMEALRRTNYNLMELLSSKFTLQESIDNENKEMNEVSYRDLIEESYVSPSLKRAILQTLKIYEEIKKITGRVPKKVFIEMARGGDESMKNKKIPARQEQLKKLYDSCGNDIANFSIDIKEMKNSLSSYDNNSLRQKKLYLYYLQFGKCMYTGREIDLDRLLQNNDTYDIDHIYPRSKVIKDDSFDNLVLVLKNENAEKSNEYPVKKEIQEKMKSFWRFLKEKNFISDEKYKRLTGKDDFELRGFMARQLVNVRQTTKEVGKILQQIEPEIKIVYSKAEIASSFREMFDFIKVRELNDTHHAKDAYLNIVAGNVYNTKFTEKPYRYLQEIKENYDVKKIYNYDIKNAWDKENSLEIVKKNMEKNTVNITRFIKEEKGELFNLNPIKKGETSNEIISIKPKLYDGKDNKLNEKYGYYTSLKAAYFIYVEHEKKNKKVKTFERITRIDSTLIKNEKNLIKYLVSQKKLLNPKIIKKIYKEQTLIIDSYPYTFTGVDSNKKVELKNKKQLYLEKKYEQILKNALKFVEDNQGETEENYKFIYLKKRNNNEKNETIDAVKERYNIEFNEMYDKFLEKLSSKDYKNYINNKLYTNFLNSKEKFKKLKLWEKSLILREFLKIFNKNTYGKYEIKDSQTKEKLFSFPEDTGRIRLGQSSLGNNKELLEESVTGLFVKKIKL

SEQ ID NO: 234 - protein, 1367 aa, Fusobacterium sp.
  source 1..1367: note = Fusobacterium sp. 1_1_41FAA
MKKQQFSDYYLGFDIGTNSVGWCVTDFNYNVLRFNKKDMWGSRLFDEAKTAAERRVQRNSRRRLKRRKWRLNLLEEIFSDEILKIDSNFFRRLKESSLWLEDKSSKEKFTLFNDDNYKDYDFYKQYPTIFHLRNELIKNPEKKDIRLVYLALHSIFKSRGHFLFEGQNLKDIKNFETLYNNLMAFLEDNDIYKNIDSSYIGNLENIICDSKKGLKDKEKEFKEIFNSDKQLVGFFKLSVGSSVSLNDLFDTDEYKKGEVEKEKISFREQIYEDDKPIYYSILGEKIEFLDIAKSFYDFMVLNNILADSQYISEAKVKLYDEHKRDLKNLKYIIRKYNKENYDKLFKDKNESNYSAYIGLNKEKGKKEVIEKSRLKIDDFAKIIKGYLPKAEKIDEKDRSIFNEILDKIELKTILPKQRISDNGTLPYQIHEAELEKILENQAKYYDFLNHEENGISTKDKLLMTFKFRIPYYVGPLNSYHKNKGGNSWIVRKEEGKILPWNFEQKVDIEKSAEEFIKRMTNKCTYLNGEDVIPKDSFLYSEYIILNELNKVQVNDEFLNKEIKKKIIEDLFKKSKKISEKNFREYLLVNQITNKTVELKGVKDAFNSNYVSYIKFKDIFGDKLNLDIYKEISEKSILWKCLYGDDKKIFEKKIKSVYGDILTKDEIKKINSFKFNTWGRLSEKLLTEIEFIDLETGECYSSVMDALRRTNYNLMELLSSKFTLQENIDNENKEVSEFSYRDLVEESYVSPSLKRAILQTLKIYEEIRKITGRIPKKVFIEMARGGDETMKNKKIPARQEQLKKLYDSCGKDISNFSIDIKEMKNSLNSYDNNSLRQKKLYLYYLQFGKCMYTGKEIDLNRLLQNNDTYDIDHIYPRSKVIKDDSFDNLVLVLKNENAEKSNEYPLKKEIQEKMKSFWKFLKEKNFISDEKYKRLTGKDEFELRGFMARQLVNVRQTTKEAGKILQQIEPEIKIVYSKAEIASSFREMFDFIKVRELNDTHHAKDAYLNIVAGNVYNTKFTEKPYRYLQEIKENYDVKKIYNYDIKNAWDKEKSLEIVKKNMEKNTVNITRFIKEEKGQLFDLNPIRKGETSNEIIAIKPKFYEGSTEKLNEKYGYYKSLNPAYFIYVEHKEKNKIIRSFERVNLVDVNKIKDEKSLIKYLIENKGLIEPKVIKKVYKRQVILINNFPYSIVALDSNKLMDFENLKPLFLERKYEKILKNAIKFLEDNQGKTEEYYKFLYLKKKDRNEKNETIDSVKERYNIEFNEMYDKFLEKLDSKDYKNYINNKKYSELVNVKEKFIKLNLFDKAFTLKSFLDLFNRKTMADFSKVGLTKYLGKIQKISSNVLSKNELHLLEESVTGLFVKKIKL

SEQ ID NO: 235 - protein, 1367 aa, Fusobacterium sp.
  source 1..1367: note = Fusobacterium sp. 3_1_27
MKKQKFSDYYLGFDIGTNSVGWCVTDLDYNVLRFNKKDMWGSRLFDEAKTAAERRVQRNSRRRLKRRKWRLNLLEEIFSDEIMKIDSNFFRRLKESSLWLEDKNSKEKFTLFNDDNYKDYDFYKQYPTIFHLRDELIKNPEKKDIRLIYLALHSIFKSRGHFLFEGQNLKEIKNFETLYNNLISFLEDNGINKSIDKDNIKKLEKIICDSGKGLKDKEKEFKEIFNSDKQLVAIFKLSVGSSVSLNDLFDTDEYKKEEVEKEKISFREQIYEDDKPIYYSILGEKIELLDIAKSFYDFMVLNNILSDSNYISEAKVKLYEEHKKDLKNLKYIIRKYNKENYDKLFKDKNENNYPAYIGLNKEKGKKEVVEKSGLKIDDLIKVIKGYLPKPERIEEKDKIIFNEILNKIELKTILPKQRISDNGTLPYQIHEVELEKILENQSKYYDFLNYEENGVSTKDKLLKTFKFRIPYYVGPLNSYHKDKGGNSWIVRKEEGKILPWNFEQKVDIEKSAEEFIKRMTNKCTYLNGEDVIPKDSFLYSEYIILNELNKVQVNDEFLNEENKRKIIDELFKENKKVSEKKFKEYLLVNQIANRTVELKGIKDSFNSNYVSYIKFKDIFGEKLNLDIYKEISEKSILWKCLYGDDKKIFEKKIKNEYGDILNKDEIKKINSFKFNTWGRLSEKLLTGIEFINLETGECYSSVMEALRRTNYNLMELLSSKFTLQESIDNGNKEMNEVSYRDLIEESYVSPSLKRAILQTLKIYEEIKKITGRVPKKVFIEMARGGDETMKNKKIPARQEQLKKLYDSCGNDIANFSIDIKKMKSSLSSYDNNSLRQKKLYLYYLQFGKCMYTGREIDLDRLLQNNDTYDIDHIYPRSKVIKDDSFDNLVLVLKNENAEKSNEYPVKKEIQEKMKSFWRFLKEKNFISDEKYKRLTGKDDFELRGFMARQLVNVRQTTKEVGKILQQIEPEIKIVYSKAEIASSFREMFDFIKVRELNDTHHAKDAYLNIVAGNVYNTKFTEKPYRYLQEIKENYDVKKIYNYDIKNAWDKENSLEIVKKNMKKNTVNITRFIKEEKGQLFDLNPIKKGETSNEIISIKPKLYNGKEEKLNEKYGYYKSLNPAYFLYVEHKEKNKRIKSFERVNLVDVNNIKDEKSLVKYLIENKKLVEPRLIKKVYKRQVILINDYPYSIVALDSNKLMDFENLKPLFLENKYEKILKNVIKFLEDNQGKSEENYKFIYLKKKDRYEKNETLESVKDRYNLEFNEMYDKFLEKLDSKDYKNYINNKKYKNLLDVKEKFIKLNLFDKAFTLKSFLDLFNRKTMADFSKVGLTKYLGKIQKISSNVLSKNELYLLEESVTGLFVKKIKL

SEQ ID NO: 236 - protein, 1367 aa, Fusobacterium sp.
  source 1..1367: note = Fusobacterium sp. 3_1_36A2
MKKQKFSDYYLGFDIGTNSVGWCVTDLDYNVLRFNKKDMWGSRLFDEAKTAAERRVQRNSRRRLKRRKWRLNLLEEIFSDEIMKIDSNFFRRLKESSLWLEDKNSKEKFTLFNDDNYKDYDFYKQYPTIFHLRDELIKNPEKKDIRLIYLALHSIFKSRGHFLFEGQNLKEIKNFETLYNNLISFLEDNGINKSIDKDNIKKLEKIICDSGKGLKDKEKEFKEIFNSDKQLVAIFKLSVGSSVSLNDLFDTDEYKKEEVEKEKISFREQIYEDDKPIYYSILGEKIELLDIAKSFYDFMVLNNILSDSNYISEAKVKLYEEHKKDLKNLKYIIRKYNKENYDKLFKDKNENNYPAYIGLNKEKGKKEVVEKSGLKIDDLIKVIKGYLPKPERIEEKDKTIFNEILNKIELKTILPKQRISDNGTLPYQIHEVELEKILENQSKYYDFLNYEENGVSTKDKLLKTFKFRIPYYVGPLNSYHKDKGGNSWIVRKEEGKILPWNFEQKVDIEKSAEEFIKRMTNKCTYLNGEDVIPKDSFLYSEYIILNELNKVQVNDEFLNEENKRKIIDELFKENKKVSEKKFKEYLLVNQIANRTVELKGIKDSFNSNYVSYIKFKDIFGEKLNLDIYKEISEKSILWKCLYGDDKKIFEKKIKNEYGDILNKDEIKKINSFKFNTWGRLSEKLLTGIEFINLETGECYSSVMEALRRTNYNLMELLSSKFTLQESIDNGNKEMNEVSYRDLIEESYVSPSLKRAILQTLKIYEEIKKITGRVPKKVFIEMARGGDETMKNKKIPARQEQLKKLYDSCGNDIANFSIDIKKMKSSLSSYDNNSLRQKKLYLYYLQFGKCMYTGREIDLDRLLQNNDTYDIDHIYPRSKVIKDDSFDNLVLVLKNENAEKSNEYPVKKEIQEKMKSFWRFLKEKNFISDEKYKRLTGKDDFELRGFMARQLVNVRQTTKEVGKILQQIEPEIKIVYSKAEIASSFREMFDFIKVRELNDTHHAKDAYLNIVAGNVYNTKFTEKPYRYLQEIKENYDVKKIYNYDIKNAWDKENSLEIVKKNMKKNTVNITRFIKEEKGQLFDLNPIKKGETSNEIISIKPKLYNGKEEKLNEKYGYYKSLNPAYFLYVEHKEKNKRIKSFERVNLVDVNNIKDEKSLVKYLIENKKLVEPRLIKKVYKRQVILINDYPYSIVALDSNKLMDFENLKPLFLENKYEKILKNVIKFLEDNQGKSEENYKFIYLKKKDRYEKNETLESVKDRYNLEFNEMYDKFLEKLDSKDYKNYINNKKYKNLLDVKEKFIKLNLFDKAFTLKSFLDLFNRKTMADFSKVGLTKYLGKIQKISSNVLSKNELYLLEESVTGLFVKKIKL

SEQ ID NO: 237 - protein, 1391 aa, Galbibacter sp.
  source 1..1391: note = Galbibacter sp. ck-I2-15
MKTILGLDLGTNSIGWALVKEAENENEVSDIIKLGVRVNPLTVDELTNFEGGKAYSNNAERTLKRGARRNLQRYKLRRENLIEILLKNGLINKDTALTEVGKETTHQTLKLRSKSANEKVSLEDLAKILLSINKKRGYKSSRKVNAEDDGVAIDGMEVAKLLYDENMTPGEYVLRLLESGKKHLPDFYRSDLQEEFNLVWKKQSEFYPLILTKELFFELHGKNKSQTWAICKEPLGIVGVKLKGSAKEQKFARYRLRKEALTQQIELEHLAIVLQDINNDSNKSSGYLGAISDRSKELFFNKETVGQYQYKQLQKDPNTSLKNQVFYRQDYLDEFEVIWRNQAKFYPQLTNELKQEIRDVVIFYQRKLKSQKNLISFCQFESTQQNYVEKETGKTKIRTIGRRVIPRSSPLFQEFKIWQSLNNLKFVNSESNQIIQFIELEDDVKKVVFDELNLRGDLKPNQVLKILSKYMKIGKLTQWKCNLEEIEGNRTNSALYNVFQMIAEEEGYGFNWGKKSALEIKSELKAIFSSIGINDSILDFDFSKKLDQQLSYQLWHLLYSAEEGNSKITEEDKFTYGNTGVALKKKLHLKFGFKPEYSTLISNLRFTSDYGNLSSKAISKILPFLRDGSDYSKACQYAGYNHSNSLSADELDNRELKPKLELLKKNSLRNPVVEKILNQMVNVVNQVIDNYGKPDEVRIELARELKKSAKERSQMTKNISDATRRNAEIKKYLSKEFGIPNPTKGDVIRYRLWEELASNGYKDLFRDKYIPKEKLFSNEIDIEHIIPKALLFDDSFSNKTLAFKVDNLKKADRTAFDFMSTDFSKDVDSYIGRIETLHKDGKISSSKYKKLMIPKSKLVDGFIERDLRNTQYIAKQARKMLLEVFKTVVPTTGKITDKLREDWDLINVMKELNFPKYKALGLTKKIERFDVGSEKIKSINVIEGWSKRNDHRHHAMDALAVAFTTHNHIQYLNYLNARKDIHHEMHGTIKSIENQIIGKDVMGKRRFIPPISDLRMKAKLQIESILISFKNKNKVVTWSVNKTKLKGKDNYNKRRQLTPRGQLHKETVYGKIKLIDPKPLKLNNKFTLVRASMIVDKVHREIVLQHLSKYDNNSEVAFDSKTIKIDPILIEGIGLKEVVCYEDVFKIRKKISGDNFKNEKHLEKVIDEKVKQILKDRVIKFQGNFKEAFSNLEENPIWLNKSKGIAVKSVAIKGVNNAESLHEGKDHFGDQILDKNKKQIPVDFVSTGNNHHVGIYEDKDGNLQERVVSFFEAVTRVNEGLPIIDKTYNSDIGWKFKFTMKQNEMFVFPSDDFDPNEFDLTDGKNAAKISPNLYRVQKIATKNYMFRHHLETVVTNDLEFTYKSIRSTGWLRNLVKVRINHLGEIVYVGEY

SEQ ID NO: 238 - protein, 1025 aa, unidentified
  source 1..1025: note = gamma proteobacterium HdN1 polypeptide
MGGYMPQLMRYRLALDIGSTSIGWAMIRLSMQNEPIAIIRMGVRIFSDGRNPKDGSSLAVTRRVARQMRRRRDRLLKRKTRLLNALVQKKFFPEDADARKALVVLNPYELRKEGLYRQLSGPEFGRALFHISQRRGFLSNRKTDKKDNDSSVLKKAIVDLRQQLEVENCQTIGEWLFKQQQSGKSVRARLRGKTQKDKAYDFYIDRAMIAHEFDTLWVSQAKYDPLLFNEDARAILRDILLYQRPLKPVKPGRCTLIPDESRAPLALPLTQQARIYQELNHLRITTPALGAQALTVAQRNTIAALLEKSDVTFVKIAKALGLTSTTEFNLQDIKRDRLKGNATAIILARNQYFGRRWHDFNADLQNLIVDKLVNEGSETALIEWLKANTDVDESAAERVSGVTLPEGYGSLSVAALRRLLPALKEDVVVYSEAVKRAGFDSHSALSLIEQTGELYQELPYYGEVLQRHVGFGSGDPNDSPERRFGKIANPTVHIGLNELRKIINALIKRYGNPAEVVVELARDLKLSREKRKEIQEEQKQRQDRNEKRIKDACEILGIDPLVIDRGKRREISQKMQLWDELNPKDAANRRCPYTGDQISIEKLLSAEVEIEHILPFSKTLDDSLNNKTVAMRRANRDKGNRTPYEAFGESLNPDYDYDAILQRASLMPREKRKRFASDGYQQWLRDDKDFLSRALNDTAYLSRIAKEYLTLICPPNSVRAIPGRMTAQLRAMFGLNRLLSEGGIKNREDHRHHAIDAAVIGVTDQGLLQKFSRASARTRELQLSRLVDDMPLPWDTYREHVTRALEHLVVSHKPDHGYQGKMHEDTAWGLRDNGQVTRRVRSEDGGPRQRLLENKNVVKINSTRDFSRHGIDEQGQVNAYKGYVGGSNYCIEIWIDEKGKWNSDVVSTFQAYQIVRELGEKAAWQKLRNPLLSLSAKPLVMRLIIDDVVKMQIAGQNKIMRVVKIAQNGQIFFAEHNEANVDARDKDKNNPFKYISKTAGSLQKAGGIHMAISPIGDARPVRYGR

SEQ ID NO: 239 - protein, 1397 aa, unidentified
  source 1..1397: note = gamma proteobacterium HTCC5015 polypeptide
MTKNYISPIAIDLGAKFTGVALYQYLEGADCTQEVAKGLLVDDRGNVTWSQEGRRGKRHQVRGYKRRKMAKRLLWLILDSEYGIKREEVTEPLLKFINGLLNRRGYTYISEEVDEESMNVSPLPFSEMMPDYFNSSAPLLEQLAKLLSDKNKLVRFRAEGKIPSNKNEFKKLLDTALDGKYKDEKKELSEAWGNILIASENVLKSTVDGHKSRSEYLANIKEDIKSNEELEKQISSKEIDGFYNLVGHLSNFQLRLLRKYFNDPNMSGVSYWDEKRLEKYFYQWVQGWHTKGGTDEAEKKNIILKTKGAPLLKTLKSLSADLTIPPYEDQNNRRPPKCQSVLLSDEKLTMHYPKWKEWVGQLVKQNDNAYLNENVTLANALHRIVERSRSIDPYQLRLLISITDAEKRNDLAGYKRLKLSLGSEVDEFLLLVKNIVDETKEAREGLWFETENKLFFKCGKTPPRKEKLKSTLLSAVLGKNLSDDEQSSFIEEFWKSGTPKIERRNVRGWCRLASQVQKTYGVYLKEYGLQQLHKLEAGKKLDDKPLALLYKNSGLIASKIGEALNIEPDEVSRFASPHSLAQIFNIIEGDVAGFNKTCRACTYENIWRMQEEKVESLLTNQLLSEIHGERKVPLKSAMCTRLSADSTRPFDGQMASIIEHIARKIAQHKIAQINDVPKEFSIDIPIIIESNQFSFTAELEEIKRGRGSAKAKKAKELGEKSKAGWVSKTERIKTSSEGICPYTGAPLGGSGEIDHIIPRSLTGRTKKTVFNSEANLIYCSSKGNHDKGNRVYVIEQLNDKYLKKQFSTSDVNLIKKKIKTTIQRFTEGGEKLRSFSELSREDQKAFRHALFVPELKSEVTSLLAVKNITRVNGTQAWLAKKIASLLAEHLDKQGRDYTLSAHQIDPWSVSKQRKMLASAEPIWAKKDPQPAASHVVDAVCTFLEALEQPHTASRLKTISSTSFEKTGWRSALIPDLIKVDALDRRPKYRRYNIGSTSLFKDGIYAERFLPILIDENGLMAGYDIDNSLKAKGADVVFESLSPFLLFKGEEVGAQSLSDWQERIDGRYLYMSIDKVKAFDYLQEKVGEKDIAAELLNSIHFTQRKTELRAKFSDDSGKKMKTLDAIRKSLKLTVTVNEIGKRKEKCGFSGTIGIPAKSAWENLLDEPLLETYWGTKMPPQEIWEKVYRKHFPRNIPNQAHRKVRKDFSLPVVDSVSGGFRVKRKTPNGYNYQLLAIDGYSAVGFKKEGDNVDFKSPALVPQIAESKSVTPISSELVHLDKNEIVYFDEWRKIDISDSDLKQFVSSLELAPGSQNRFYIRFTVDEDQFERHFKSALRVNGIQDLDTVNKTFDWNREIPSLLIPPRSNLFLLETGQKITFEYIANGANAEVKKAYSLRRA

SEQ ID NO: 240 - protein, 1186 aa, Gardnerella vaginalis
  source 1..1186: note = Gardnerella vaginalis 1500E
MEGNISYAIGIDVGLNSVGLAAIRLDNNGEPIRILKAMSVIHDAGIDPNGAKESDTRKAISGVARRVRRLYRQRRRRLQKLDFLLHSLGFPVVENKDLDFSDSFIPWIFRAKLADEYIADEKQRKQMLSVAIRHIARHRGWRNPYQSIKSMTQETEYSEFYNELLKNIEKFAPGVGCEGSTPAQLVRDYLLLQQGKASRRLRITTDEKRKNHPNSLNPILPRKLMQSDNMLEILNIFNVQHIDDKYVREQIINAVFYAKSPRGSAENRVGKDAITGKGKRALKASLAFQKYRIISTISNLRIRENSKERCLTIEEKQSVYKLLTTSTDESSKEKSAEAPLYTWIDVADCLGIERYKLRGVGSQIGDGESVGNRPPMLNSELAIIYANNKSLGKSLLTWWLDANRTQEDKEALIEILSNTVDIEAIHDNPEYQDKYGSAIAFIDSMDETEIAALENISLPDGRAAYSLETLDKLNKQMLETDDDLFEARKKLFNLPNNWRPSEAPIAEPTGNPSVDRVLKIVHRFLISAKNRWGNPERINIEHVRSGFKSKKMANSYKELLDKRTKGKENLKAMMRNSLHLGMSDSISDADIRRYEAVQRQNGQCLYCGSEITYHTCELDHIVPRKGPGSTNTRENLVATCSLCNAQKCNTPFSTWCEQSTYCKNHDISVDSAINRVRAFIFPPNSYDKRGANQFKKEVIARLKQKVGDEAFDNRSIESVAWMANELHRRIDWYYNSQNYQTNNGISDITNKAQTNVGVYAGSLTAIARRMSGIDGKLEFFDGRRKTRFDRRHHAVDASVIAMMTPGIAQILAIKCNLRETQLLQGNKVVPGGIDWKEYPTANDQGYQQYANWSVRMNALLKLLNEEMRADRIAVVNSIRLRYNNSSVHQYKVNALLKLHVGDEIDSGTIRRSSTPALYCALTRNPDYDVNNGLPENPNRAILLHDKKLNADDSITFFKAQAVQLFVREGSAEIGSSTHHLRIYEYFKKLKSGKIKKSYGMIRVFQNDLHRHIHEDLFSCDLPEQSISMRYADTEVAHAVQTGNSNYLGYLVPGDEIIVDFSHVKLSGNIGTFVEFLNKIGANCAAYNHWVVVGTDTEKVLILKPSMISSEGIDKLYSNCKRNNFDYSSYEKSINEILVGKGWRVSVNVLAKYNAETIRRNALGEVRWTSRSHLPISWSWNTGENRE

SEQ ID NO: 241 - protein, 1186 aa, Gardnerella vaginalis
  source 1..1186: note = Gardnerella vaginalis 284V
MEGNISYAIGIDVGLNSVGLAAIRLDDYGEPIRILKAMSVIHDAGIDPNGAKESDTRKAISGVARRVRRLYRQRRRRLQKLDFLLQSLGWPVVENKDLDFSDSFIPWIFRAKLADEYIADEEQRKQMLSVAIRHIARHRGWRNPYQSIKSMMQETEYSEFYNELLKNIEKLAPGVGCEGSTPAQLVRDYLLSQQGKASRRLRITTGGRRKNHPHSLDPVLPRKLMQSDNMLEILNIFNVQHIDDKYVREQIINAVFYAESPRGSAENRVGKDAITGKGKRALKASLAFQKYRIISTISNLRIRENSKERCLTIEEKQNVYKLLTTSIDKSSKRKSAEAPLYTWIDVADCLGIERYKLRGVGSQIGDGESVGNRPPMLNSELAILYANNKSLGQSLITWWLASNRTQEDKEALIEILSNTVDIEAIHDNPEYQDKYGSAIAFIDSMNETEIAALENISLPDGRAAYSLETLDELNKQMLETDDDLFEARKKLFNLPNNWRPAEAPIAEPTGNPSVDRVLKIVHRFLISAKNRWGNPERINIEHVRSGFQSKKMANSYKELLDKRTEGKENLKAMMRNSLHLGTSDSISDADIRRYEAVQRQNGQCLYCGSEITYHTCELDHIVPRKGPGSTNTRENLVATCSSCNAQKCNTPFATWCEQSTYCKNHDISADSAINRVRAFIFPPNSYDKRGANQFKKEVIARLKQKVGDEAFDNRSIESVAWMANELHRRIDWYYNSQNYQTNNGISDISNKAQTNVGVYAGSLTAIARRMSGIDGKLEFFDGRRKTRFDRRHHAVDASVIAMMTPGIAQILAIKCNLRETQLLQGNKVVPGGIDWKEYPTANDQGYQQYANWSVRMNALLKLLNEEMRADRIAVVNSIRLRYSNSSVHQYEVNALLKLHVGDEIDSETIRRSSTPALYCALTRNPDYDVNNGFPENPGRTILLHNKKLNADDSITFFKAQAVQLFVREGSAKIGNSIHHLRIYEYFEKLKSGKIKKSYGMIRVFQNDLHRHIHEDLFSCDLPEQSISMRYADTKVAHAVQTGNANYLGYLVPGDEIIVDFSHITLSENIGKFVEFLNKIGADCTAYRHWVVVGTDTEKVLILKPSMISSEGIDKLYSNCERNNFDYSSYEKSINEILAGKGWRVSVNVLAQYKAATIRRNALGEVRWASRSHLPISWSWDTGENRE

SEQ ID NO: 242 - protein, 1186 aa, Gardnerella vaginalis
  source 1..1186: note = Gardnerella vaginalis 5-1
MEGNISYAIGIDVGLNSVGLAAIRLDNNGEPIRILKAMSVIHDAGIDPNGAKESDTRKAISGVARRVRRLYRQRRRRLQKLDFLLHSLGFPVVENKDLDFSDSFTPWIFRAKLADEYIADEKQRKQMLSVAIRHIARHRGWRNPYQSIKSMTQETEYSEFYNELLKNIEKFAPGVSCEGSTPAQLVRDYLLSQQGKASRRLRITTDDRRKNHPNSLDPVLPRKLMQSDNMLEILNIFNVQHIDNKYVREQIINAVFYAKSPRGSAENRVGKDAITGKGKRALKASLAFQKYRIISTISNLRIRENSKERCLTIEEKQSVYKLLTTSTDEYSKEKSAEAPLYTWIDVADCLGIERYKLRGVGSQIEDGESVGNRPPMLNSELAILYANAKSLKQSLITWWLAANRTQEDKEAFIEILSNTVDIEAIHDNPEYQDKYGSVIAFIDSMDETEIAALENISLPNGRAAYSLETLDKLNKQMLETDDDLFEARKKLFNLPNNWRPSEAPIAEPTGNPSVDRVLKIVHRFLISAKNRWGNPERINIEHVRSGFQSKKMANSYKKLLDKRTEGKENLKAMMRNSLHLGTSDSISDADIRRYEAVQRQNGQCLYCGSEITYHTCELDHIVPRKGPGSTNTRENLVATCSSCNAQKCNTPFATWCEESTYCKNHDISVDSAINRVRAFIFPPNSYDKRGASQFKKEVIARLKQKVGDEAFDNRSIESVAWMANELHRRIDWYYNSQNYQTNNGISDITNKAQTNVGVYAGSLTAIARRMSGIDGKLEFFDGRRKTRFDRRHHAVDASVIAMMTPGIAQILAIKCNLRETQLLQGNKVVPGGIDWKEYPTANDQGYQQYANWSVRMNALLELLNEEMRADRIAVVNSIRLRYSNSSVHKDDVHALLKLHVGDEIDSETIRRASTPALYCALTRNPDYDVNNGLPENTDRTILLHDKKLNADDSITFFKSKAAQLFVREGSVEIGNSIHHLRIYEYFEKLKSGKVKKSYGMIRVFQDDLHRYIHEDLFSCDLPEQSISMRYADTKVAHAVQTGNANYLGYLVPGDEIIVDFSHVKLSGYIGEFVEFLNKIGANCAAYKHWVVAGTDDKTTLILKPSMISSEGIDKLYSNCERNNFDYASYEKSIDKILVDKGWRVSVNVLDQYKAATIRRNALGEPRWASRSHLPISWSWDTGENRE

SEQ ID NO: 243 - protein, 1392 aa, Gemella haemolysans
  source 1..1392: note = Gemella haemolysans ATCC 10379
MANKTWYLGLDIGSASVGWAATDTGYKIIRKNKKRLWGVRLFEEAKTAEDRRGYRSSRRRLARRKWRLNLLEELFTSEVKKVDENFFLRLKESQYHYEDKTHKVPYAIFNDKDYTDKDYYKDYPTIYHLRSKLMTEENPDIRKVFLAIHHIIKNRGHFLLQGQSFKDGNLNNLIKELLELDILHVGFEVTEEVVDKIADISLEKKTSKDKLNDIKELYPKEKQLLEVFRLIFGGKTSLDKLFAIDEYKELDAAIKSVSFKEKIYEEVRHDYEQVLSNYIELLDLAKLVYDSIILSDIKKEGKTLSESKVELFEKHRDDLLKLKNLVKNDSKLSEDKKVELYALIFKEDKDKGTNYVNYIRKSEEGKGCNYEDFKKFLVKELAKLEESSVKTEIIKDLELEQFLPLQRTKDNSVVPYQIHKEELVKILDNAARYHSFLNEKDESGYNVREKVIQLLEFRIPYYVGPLNSSKKAKEGGFAWSVRNTGYENTPVTPWNYSKVIDESASAEKFITNLTNKCTYLKGEDVLPKSSLLYSEFALLNELNALKYDGNRISLEARNTIIEKLFKQQGKKVTKTSIKNLLKAEGYIDGKGEITGIDITVKNDLKSYRDFKKILGNKFNSEHVENIILWITLYGESRKLIKAKIESVYGEVYSKDEITKMSRLVYKDWGRFSRKLLTELVSKKLYNEETGECLNIIGAMRQNNILFMELLADRFDYSKQIVEFNKELQEDVTEIAPEILDDLYVSPAVKRSIWQTVRIVEELKKIIGCAPAKIFVETTRSNQEKKKPTDSRKKQLELAYKAVKKDVKELEKEIGTINFDVLNDRLSSVEPSKLKAKKLYLYYTQLGRCMYSEEPINISELFDNNKYDIDHIYPQSKIKDDSFTNTVLVKRESNAAKTDRYPLGSDIQTPSNRRFWKFLKEKGLISDEKYNRLVRTEEFSDEELSGFIARQLVETSQSVKAVASILGELNPETSICYSKAENVSSFRQNFGKIKKGDRDSKNNDQLIKVREINDYHHAKDAYLNVVVGNVYDTKFTRNVFNFIKDKKDGRKYSLNKVFYENVSDSKTVAWEMDKTIHQVEKVMNNNNIMVTRRTSEQKGGLFDATVYKAKVAAKAKDGVYYPLKTSNSVVKDVAKYGGYTSIGIAYYSIFEYTIVNKKGEEKITRIIPIPIYISQNIKDSTALIEFGKSQIFCRAYEKIKDFKLLYRKLCIGSKININNYQYYIGGKSDERFYYDSAIQVTLDKKSEKYLKILSKYQNWKKENKDGELWENITKENNIELYNKLVEKMNSEIFTKKKSNKYNELNSEEIRNNFIKISVEEQAKVLLEILNLLTNKKSIFDLKSIDIKAARGKISFNLTSLIQFSIIEQSITGFYEKEITIIGDKGNDMENNNS

SEQ ID NO: 244 - protein, 1385 aa, Gemella morbillorum
  source 1..1385: note = Gemella morbillorum M424
MKNKTWYLGLGVGPTSIGWAATDSNYKLLRKNKKRLWGVRLFEEAKTAVDRRTFRAERRRLARRKWRISLLEELFAKEVSKNDPNFFLRLKESKYHFEDKSLMNEYILFNDKDYTDKDYYKEYPTIYHLRLSLTTEENPDIRKVYLAVHSMLKNRGHFLLQGQSFNDSNIDSVIKELLELETVKINFEVTDEVIHSLKKIALEKKNLSDKNNDVKKLYPKEKQLQEIFKLVFGGKTSLDKLYDIEEYKELDNSVKSISFKEKVYEEVRPDYEQILSNYIELLDLAKLVYDSIVLADIKKEGKTISESKVELYNKHKDDLANLKKLVKIDSKLSEDKKKEVYFTIFKEDKEKGTNYVNYTHRSQEGKSCSYEDFKKFLKKELEKLEDSPTKTTILEELDLETFLPLQRTKDNSVVPYQIHKEELVKILDNAAKYHSFLAEKDDSGYSTREKVVQLFEFRIPYYIGPLNAHHNTENGGYSWAIRKKGMESVPVTPWNFKDVIDESASAEAFVNNLKNKCAYLSGEDVLPKNSLLYSEYALLNELNALRYEGNRISVEARDVIVTKLFKEQGKKVTKKTIKELLKTEGFIDGKGEIVGIDNIVKNDLKSYRDFKKILADKFDKERVENIILWITLYGESRKLIKEKITKVYGDFYTVDEIEKMSRLTYKDWGILSRKLLTELVSEKLYNEETGECLNIIGAMRQGTILFMELLADKFDYMSQIKNHNKENKDDITEITPDILENLHASPAVKRSIWQTVRIVEELKTIIGCVPTKIFIETTKRNNAPYKVPTLNRNDLVTKYKTIREHEIFELEKELKNTLDFTLNKNRLINEEPSKLKATKLYLYYTQLGRCMYTGKKIDLGELFDNNNKYDIDHIYPQSKVKDGSFNNIVLVTKASNDMKADVFPLKSKFQTKENKIFWRFLKEKKLITEEKYNRLVRTEEFSNGELTGFITRQLVETSQAIKVISNVLRELNPETTICYSKAENVSSFRQSFGKIKEANRKAENNEKLIRVQEINDYYNAKDAYLSIVVGNVYDVKFTRNVHNFIKNNKDARRYSLNGLFYTDVKNANTIAWEMDKTVHVVEKTMNNNNILITRRTSEQKGALYDATLYKAKVAEKAKEGTYYPLKTTDSKIKDVGKYGGFTKIKIAYYSIFEYTLDGKKGKQKITRIVPIPIYISQNIKDDKALLEYAQTRLPGKDLKIKYRKLCIGSLVKINNFNYYIGGKTNNNFTFDSAVQVILDKDSESYIKELAKYLNWKKENKDGKLWESITEDKNIQLYDSLVKKMNTGIFIRKTPNKYTELLTLEVKNKFINIDIDEQVKLLLEILNLLTNKKFTSKLNEIGITASRGVCSFNLSNQSQFSIIEQSVTGVYEKEKLIIEKKKEGIL

SEQ ID NO: 245 - protein, 1003 aa, Gluconacetobacter diazotrophicus
MIDESLTFGIDLGIGSCGWAVLRRPSAFGRKGVIEGMGSWCFDVPETSKERTPTNQIRRSNRLLRRVIRRRRNRMAAIRRLLHAAGLLPSTDSDALKRPGHDPWELRARGLDKPLKPVEFAVVLGHIAKRRGFKSAAKRKATNISSDDKKMLTALEATRERLGRYRTVGEMFARDPDFASRRRNREGKYDRTTARDDLEHEVHALFAAQRRLGQGFASPELEEAFTASAFHQRPMQDSERLVGFCPFERTEKRAAKLTPSFERFRLLARLLNLRITTPDGERPLTVDEIALVTRDLGKTAKLSIKRVRTLIGLEDNQRFTTIRPEDEDRDIVARTGGAMTGTATLRKALGEALWTDMQERPEQLDAIVQVLSFFEANETITEKLREIGLTLAVLDVLLTALDAGVFAKFKGAAHISTKAARNLLPHLEQGRRYDEACTMAGYDHAASRLSHHGQIVAKTQFNALVTEIGESIANPIARKALIEGLKQIWAMRNHWGLPGSIHVELARDVGNSIEKRREIEKHIEKNTALRARERREVHDLLDLEDVNGDTLLRYRLWKEQGGKCLYTGKAIHIRQIAATDNSVQVDHILPWSRFGDDSFNNKTLCLASANQQKKRSTPYEWLSGQTGDAWNAFVQRIETNKELRGFKKRNYLLKNAKEAEEKFRSRNLNDTRYAARLFAEAVKLLYAFGERQEKGGNRRVFTRPGALTAALRQAWGVESLKKQDGKRINDDRHHALDALTVAAVDEAEIQRLTKSFHEWEQQGLGRPLRRVEPPWESFRADVEATYPEVFVARPERRRARGEGHAATIRQVKERECTPIVFERKAVSSLKEADLERIKDGERNEAIVEAIRSWIATGRPADAPPRSPRGDIITKIRLATTIKAAVPVRGGTAGRGEMVRADVFSKPNRRGKDEWYLVPVYPHQIMNRKAWPKPPMRSIVANKDEDEWTEVGPEHQFRFSLYPRSNIEIIRPSGEVIEGYFVGLHRNTGALIPTPVGPDSYVIA

SEQ ID NO: 246 - protein, 1050 aa, Gluconacetobacter diazotrophicus
MGENMIDESLTFGIDLGIGSCGWAVLRRPSAFGRKGVIEGMGSWCFDVPETSKERTPTNQIRRSNRLLRRVIRRRRNRMAAIRRLLHAAGLLPSTDSDALKRPGHDPWELRARGLDKPLKPVEFAVVLGHIAKRRGFKSAAKRKATNISSDDKKMLTALEATRERLGRYRTVGEMFARDPDFASRRRNREGKYDRTTARDDLEHEVHALFAAQRRLGQGFASPELEEAFTASAFHQRPMQDSERLVGFCPFERTEKRAAKLTPSFERFRLLARLLNLRITTPDGERPLTVDEIALVTRDLGKTAKLSIKRVRTLIGLEDNQRFTTIRPEDEDRDIVARTGGAMTGTATLRKALGEALWTDMQERPEQLDAIVQVLSFFEANETITEKLREIGLTLAVLDVLLTALDAGVFAKFKGAAHISTKAARNLLPHLEQGRRYDEACTMAGYDHAASRLSHHGQIVAKTQFNALVTEIGESIANPIARKALIEGLKQIWAMRNHWGLPGSIHVELARDVGNSIEKRREIEKHIEKNTALRARERREVHDLLDLEDVNGDTLLRYRLWKEQGGKCLYTGKAIHIRQIAATDNSVQVDHILPWSRFGDDSFNNKTLCLASANQQKKRSTPYEWLSGQTGDAWNAFVQRIETNKELRGFKKRNYLLKNAKEAEEKFRSRNLNDTRYAARLFAEAVKLLYAFGERQEKGGNRRVFTRPGALTAALRQAWGVESLKKQDGKRINDDRHHALDALTVAAVDEAEIQRLTKSFHEWEQQGLGRPLRRVEPPWESFRADVEATYPEVFVARPERRRARGEGHAATIRQVKERECTPIVFERKAVSSLKEADLERIKDGERNEAIVEAIRSWIATGRPADAPPRSPRGDIITKIRLATTIKAAVPVRGGTAGRGEMVRADVFSKPNRRGKDEWYLVPVYPHQIMNRKAWPKPPMRSIVANKDEDEWTEVGPEHQFRFSLYPRSNIEIIRPSGEVIEGYFVGLHRNTGALTISAHNDPKSIHSGIGTKTLLAISKYQVDRFGRKSPVRKEVRTWHGEACISPTPPG

SEQ ID NO: 247 - protein, 1371 aa, Gordonibacter pamelaeae
  source 1..1371: note = Gordonibacter pamelaeae 7-10-1-b
MNLRNVESYQVGLDIGTGSVGWAVLDDNGDLCRFKGKPTWGSRVFPTAETAAEARVHRGQRRRYDRRRQRIDLLQRFFADEVAKVDPEFFIRLNQARLHPENRDPAHADYRWPLFNGSNFTEKDYYRQFPTIYHLRAHLLKSDEPADIRLVYLALHNIVKHRGNFLHQDNPSLSARNANVGDAVEALCLALDEWCGAHDVECACDEAALAEALGDASLRPGEKRERAEAALGVEKAHKKLAKAVSSAVVGYAAEFGHVFFAESEGSKFALSNDEKVEAYVCPDEGRDLFDAMRAVHSSYVLMGILSEAQGELLSVCKVGEYERYKRDLETLKSLVRAYGPERYDEFFCGPFYEGTRDYDPGKAQGYTKYNLGASKLSHEDFLKEVQKLLKDIGAQADERYADIERAIEAGAFLRRLKTSDNGTIPYQLHLEEMDAIIERQAAFYPFLAQEKDKLKSLVSFRIPYYVGPLTQKNAARDGKGEARFAWSSRKPGMEDARVYPWNWEDVIDKDQSAEDFIRRMTGTCTYLKGEPVLARCSLDYELFCVLNELAGARWTQDGDKSYRFDAADRLGIVEDLFKKRKRVTYEAAEKWLARTHGPESGKSAGGAYHVSGGQGEDAFESQLSSHYDFCKILGVDELSDADEAMAEDIILWNTVFEDRSILKRKIKLAYGDRLGDAQVRKLCQKRYTGWGRLSGELLRGLRSATDNGPKTIMDILLEGDPNHARRMGAAMNLMEILHDDLLEFQAKIDEHNRERALAVGGMSVDEVTGSPALRRGINQALRVVDEIAGIAGKPPAHIYVEVTRDEGARNKGRRTTSRYRALEAALSSIKAQCADVYAELKERDPRALDDERLTLYFMQCGKCMYSGDALDINKLQTYQVDHILPQSYVKDDSFENKVLVRPDTNQRKGDTLLLDERLIARMRGFWRTLRDAELIGEKKFNNLTRTSVSDEQMKKFVSRQLVETGQMVKQVQQLLQARYPESEVQPVKAGVSHQLRVGCALAKSREINDFHHAHDAYLACQVGRFVQYRHSAVYSEPVKMAAVVKQFIKKQAEDYRRTRELPGSDGFIVSSFMTPGFDVKTGEVFRDAWDAGAEIDRIRRCFDYKDCFISRMPEETHGAFWDATIYSPRAAGKTLSLPLKRGLDPRKYGSYSREQFAYFFVYEAVKPKKKQRVLEFAPVPVRVASALANDPDALEDYARELAEAEGLVFERIRRRKVYKYQQIIVGDSRLYVTGREEVRNARQLAFSQDETKLICRIEQGEECEEGELLDLFRSMQRKYLACAPRLARLMKVAEMEEGFIAATASGKREVLLSLTSIAAAHRNSIDLKPIGRKGSSGQMKITFSKELSTNGILFVDSSVTGMFERRCRLGL

SEQ ID NO: 248 - protein, 1054 aa, Haemophilus parainfluenzae
  source 1..1054: note = Haemophilus parainfluenzae ATCC 33392
MENKNLNYILGLDLGIASVGWAVVEIDEKENPLRLIDVGVRTFERAEVPKTGESLALSRRLARSARRLTQRRVARLKKAKRLLKSENILLSTDERLPHQVWQLRVEGLDHKLERQEWAAVLLHLIKHRGYLSQRKNESKSENKELGALLSGVDNNHKLLQQATYRSPAELAVKKFEVEEGHIRNQQGAYTHTFSRLDLLAEMELLFSRQQHFGNPFASEKLLENLTALLMWQKPALSGEAILKMLGKCTFEDEYKAAKNTYSAERFVWITKLNNLRIQENGLERALNDNERLALMEQPYDKNRLFYSQVRSILKLSDEAIFKGLRYSGEDKKAIETKAVLMEMKAYHQIRKVLEGNNLKAEWAELKANPTLLDEIGTAFSLYKTDEDISAYLAGKLSQPVLNALLENLSFDKFIQLSLKALYKLLPLMQQGLRYDEACREIYGDHYGKKTEENHHFLPQIPADEIRNPVVLRTLTQARKVINGVVRLYGSPARIHIETGREVGKSYKDRRELEKRQEENRKQRENAIKEFKEYFPHFAGEPKAKDILKMRLYKQQNAKCLYSGKPIELHRLLEKGYVEVDHALPFSRTWDDSFNNKVLVLANENQNKGNLTPFEWLDGKHNSERWRAFKALVETSAFPYAKKQRILSQKLDEKGFIERNLNDTRYVARFLCNFIADNMHLTGEGKRKVFASNGQITALLRSRWGLAKSREDNDRHHALDAVVVACSTVAMQQKITRFVRFEAGDVFTGERIDRETGEIIPLHFPTPWQFFKQEVEIRIFSDNPKLELENRLPDRPQANHEFVQPLFVSRMPTRKMTGQGHMETVKSAKRLNEGISVIKMPLTKLKLKDLELMVNREREKDLYDTLKARLEAFNDDPAKAFAEPFIKKGGAIVKSVRVEQIQKSGVLVREGNGVADNASMVRVDVFTKGGKYFLVPIYTWQVAKGILPNKAATQYKDEEDWEVMDNSATFKFSLHPNDLVKLVTKKKTILGYFNGLNRATGNIDIKEHDLDKSKGKQGIFEGVGIKLALSFEKYQVDELGKNIRLCKPSKRQPVR

SEQ ID NO: 249 - protein, 1052 aa, Haemophilus sputorum
  source 1..1052: note = Haemophilus sputorum CCUG 13788
MKNTSLNYVLGLDLGISSVGWAVVEIDEKENPLSLIDVGVRTFERAETQKGESLALARRLARSARRLTQRRVARLKKAKRLLKSENILLSTDECLPHQVWQLRVEGLERKLERQEWAAVLLHLIKHRGYLSQRKNESKSENKELGALLSGVANNHKLLQQTTYRTPAELAVKKFEVEEGHIRNQQGSYTHTFSRLDLLSEMELLFSRQQHFGNPFTSEKLLENLTALLMWQKPALSGDAILKMLGKCTFENEYKAAKHTYSAERFIWITKLNNLRIQENGLERALNDNERLALMKQPYEKAKLTYAQVRSILNLSDEAIFKGLRYSGEDKKTSETKTVLMEMKAYHQIRLALEKNDLKTEWAELKVNSSLLDEIGTAFSLYKTDEDISTCLAGKLSQPVLNALLENLNFDKFIQLSLKALHKILPLMQQGLRYDEACAEIYGDHYGKKTEENHLLLPQIPADEIRNPVVLRTLTQARKVINGVVRLYSSPARIHIETGREVGKSYQDRRELEKRQEENRKQREKAISEIKTLFPNFSGEPKAKDILKMRLYYQQNAKCLYSGKPLELHRLLEQGYVEIDHALPFSRTWDDSFNNKVLVLANENQNKGNLTPFEWLDGKNNSERWKAFKALVETSAFPYTKKQRILSQKLDEKGFIERNLNDTRYVARFLCNFIADNMHLTGEGKRKVFASNGQITALLRGRWGLAKSREDNDRHHALDAVVVACSTVSMQQKITRFVRFEEGNVFTGERIDRETGEIIPLHFPAPWKFFREEVEIRIFSDNPKLELENRLIARPQANHEFVQPLFVSRMPTRKMIGQGHMETIKSAKRLNEGLSVIKMLLTKLRLKDLESMVNREREKELYEALKARLEAFNDEPAKAFAEPFMKKGGAIVKSVRVEQVQKSGVLVRDGNGVADNASMVRVDVFTKGGKYFLVPIYTWQVAKGILPNKAVIQGKNEEDWEVMDDATFRFSLHQNDLVKLVTKKKTIFGYFNGLNRATGNIDIKEHDLEKSKVKDGIHQSIGIKLALSFEKYQVDELGKNIRLCKSSKRQAVR

SEQ ID NO: 250 - protein, 1052 aa, Haemophilus parainfluenzae
MENKNLHYILGLDLGIASVGWAVVEIDEKENPLRLIDVGVRTFERAETQKGESLALSRRSARSARRLTQRRVARLKKAKRLLKSENILLSTDERLPHQVWQLRVEGLDRKLERQEWAAVLLHLIKHRGYLSQRKNESKSENKELGALLSGVASNHELLQQATYRTPAELAVKKFEVEEGHIRNQQGAYTHTFSRLDLLAEMELLFSRQQHFGNPFASEKLLENLTALLMWQKPALSGEDILKMLGKCTFEDEYKAAKNTYTAERFVWITKLNNLRIQENGLERALSDNERLMLIEQPYEKAKLTYAQVRSILNLSDDAIFKGVRYSGEDKKAIETKTTLMEMKAYHQIRKVLEGNNLKAEWVALKANPTLLDEIGTAFSLYKTDEDISAYLAGKLSQPVLNALLENLSFDKFIQLSLKALYKLLPLMQQGLRYDEACREIYGDHYGKKTEETHHFLPQIPADEIRNPVVLRTLTQARKVINGVVRLYGSPARIHIETGREVGKSYKDRHELKKRQEENRKQREKTISEIKTLFPNFSGEPKGKDILKMRLYYQQNAKCLYSGKPLELHRLFEQKYVEVDHALPLSRTWDDSFNNKVLVLANENQNKGNLTPFEWLDGKNNSERWRTFKALVETSAFPYAKKQRILSQKLDEKGFIERNLNDTRYVARFLCNFIADNMHLTGEGKRKVFASNGQITALLRRRWGLAKSREDNDRHHALDAVLVACSTVAMQQKITRFVRFKAGDVFTGERIDRETGEIIPLHFPTPWQFFKQEVEIRIFSDNPKLELENRLPDRPQANHEFVQPLFVSRMPTRKMTGQGHMETVKSAKRLNEGISMIKMPLTKLKLKDLELMVNREREKDLYDALKTRLEAFNDDPAKAFAEPFMKKGGAIVKSVRVEQVQKSGVLVRQGNGVADNASMVRVDVFTKDGKYFLVPIYTWQVAKGILPNKAVIQGKDEEDWEDIDDATFQFSLHPNDLISVKTKKDEFLGYFNGLNRHTGGINIRTHDLEKSKGKQGIFEGIGVKIALSFEKYQIDELGKNIRLCKPSKRQPVR

SEQ ID NO: 251 - protein, 1052 aa, Haemophilus sputorum
  source 1..1052: note = Haemophilus sputorum HK 2154
MKNTSLNYVLGLDLGISSVGWAVVEIDEKENPLSLIDVGVRTFERAETQKGESLALARRLARSARRLTQRRVARLKKAKRLLKSENILLSTDECLPHQVWQLRVEGLERKLERQEWAAVLLHLIKHRGYLSQRKNESKSENKELGALLSGVANNHKLLQQTTYRTPAELAVKKFEVEEGHIRNQQGSYTHTFSRLDLLSEMELLFSRQQHFGNPFTSEKLLENLTALLMWQKPALSGDAILKMLGKCTFENEYKAAKHTYSAERFIWITKLNNLRIQENGLERALNDNERLALMKQPYEKAKLTYAQVRSILNLSDEAIFKGLRYSGEDKKTSETKTVLMEMKAYHQIRLALEKNDLKTEWAELKVNSSLLDEIGTAFSLYKTDEDISTCLAGKLSQPVLNALLENLNFDKFIQLSLKALHKILPLMQQGLRYDEACAEIYGDHYGKKTEENHLLLPQIPADEIRNPVVLRTLTQARKVINGVVRLYSSPARIHIETGREVGKSYQDRRELEKRQEENRKQREKAISEIKTLFPNFSGEPKAKDILKMRLYYQQNAKCLYSGKPLELHRLLEQGYVEIDHALPFSRTWDDSFNNKVLVLANENQNKGNLTPFEWLDGKNNSERWKAFKALVETSAFPYTKKQRILSQKLDEKGFIERNLNDTRYVARFLCNFIADNMHLTGEGKRKVFASNGQITALLRGRWGLAKSREDNDRHHALDAVVVACSTVSMQQKITRFVRFEEGNVFTGERIDRETGEIIPLHFPAPWKFFREEVEIRIFSDNPKLELENRLIARPQANHEFVQPLFVSRMPTRKMTGQGHMETIKSAKRLNEGLSVIKMLLTKLRLKDLESMVNREREKELYEALKARLEAFNDEPAKAFAEPFMKKGGAIVKSVRVEQVQKSGVLVRDGNGVADNASMVRVDVFTKGGKYFLVPIYTWQVAKGILPNKAVIQGKNEEDWEVMDDATFRFSLHQNDLVKLVTKKKTIFGYFNGLNRATGNIDIKEHDLEKSKVKDGIHQSIGIKLALSFEKYQVDELGKNIRLCKSSKRQAVR

SEQ ID NO: 252 - protein, 1338 aa, Helcococcus kunzii
  source 1..1338: note = Helcococcus kunzii ATCC 51366
MQDYYLGLDIGTNSVGWAVTDENYNLLRKKGKDLWGVRLFKEAQPATERRGHRSSRRRTIRKSLRKQLLRELFEEEINAIDKDFFLRLDESKYWLEDKKIEGKYSLFNDENFTDKDYYEKFPTIFHLRKALIESDDKEDIRLYFLAINQMMKRRGHFLIDGKLSNVEDITPFKECIQNLINEELDTEIETEFYDKAIKIVSDYSLKKTEKKNLIKDLVKETDSIEDSKKIINIFNLLISGKSKVNGIFDDEEILEKIKEDNKEDFYLTSEKYEENLEYFSQLLDYRFELISSLKSIYDYIILQEVLKGKKYLSYAQVERYKNHKEDLRKLKQLIKKYDKNGKIYYQIFRDENFKKGYVAYLGYYKKNKKNVPVKKCDYDTFSKNIKSTLDKICDKEDPLYIELIDKIEKGGFLLKQIVSTNSVIPHQVHELELDKILENLEKNYPSFKEISDGVSKIDKIKMIFNFRIPYYVGPLNDYHKDKVNSNTWIVKNEGFENENIRPWNFSKIVDEHACEEEFIKRMINECSYIPGEKVLPKSSLLYSEYMVLNELNNLRVNGDKLNPKIKKEIVENIYKKERKVTLKKIRNFLIINNYVDSKVEFSGLSDGIKANMSSYIDFAEILDDNFDNNMVEDLIEQITIHVGNVKLLTEKISNKYPNLEKKQINKIVNLKFKDWARFSRKLLVGIEGTEKETGEINTIIGFLRETNENFMELMSNRYTFSEEISEIKKKYIPNKLSKQIVDDLYVSPAVKKMIWQVLNINDELIKVLGKQPKKIFIEMARGKEEKPEVKDSRKNKLIELYKNLGKEGKEWLNRIEDKTEADFRNRALYLYYTQMGRCMYTGEIIDIERLYDKELYDLDHIIPRKMKKDDSIHKNLVLVTRNSNQYEKKDNYPVPEVIKSRENVRHLWYALKKKGLITEEKYNRLTRINPLSDKELSEFIERQLVETRQTTKVVKDLFENYYTDSKIVTVKAGLVSELRRDFEVLKCREINDLNHAHDAFLNIIVGDVWSKKFTSNPYNFVKKNREKYTLNNIFTKNQKDLRGNEIWNCAEGKKRIIKTLNKPSVLFSVENFEQTGQLFDQNIIGKQDYKEKTSYVPIKGDERLQDISKYGGYRGISGAYFFIVEHTEKNKRVKTIESLPIYMKSYVEENGLLDFCTNEMKLVDPKIIVKKLNYKSEIIVDGFKYLISGKTENRLSLETNEYLYWNHTQTTDIKKILNINEKIELEKYNGDIESERENIIKYIQIILEKFKLKPFIKRRNLPNIEINFADYETEKLLQLLVNLIPLTTKYVSPVDLTVISGSKYAGKVLIPKKISNLNEVIFISKSITGIYESRRRII

SEQ ID NO: 253 - protein, 1007 aa, Helicobacter canadensis
  source 1..1007: note = Helicobacter canadensis MIT 98-5491
MKVLGFDIGINSIGWAFVENNELKDCGVRLFTKAENPKTKESLALPRRNARSSRVRLRRRRSRLLSLKHIISKEFGLHYEDYIALDGNLPKAYTGKIESIYKLRYEALSQAISKEDLARVILHIAKHRGYMNKNQKTSQDSEKGAILSAIKENSNKIKHYQTAGEYFYKELFENLRDGTKEFKNIRNKAMKNEKTGNMESTYYNTILASDLEKELKLILEKQQAYHNYSDTFIKEVLEIAFYQRPLKDFSHLVGSCTFYENEKRACKNSYSAWEFIALGKIINTLESIKKDTGEIFSNEIITQILKEVLDKGSLSYTKLRKMINLDEKVKFKGLKYDKEGVEKTNLIEFKKLKEFKKALGEHNLERKTLDEIATHITLTKDENQLKKQLEQYALSQNQIDALAELDFNDHINLSFKALYEILPLMEKGKRYDEACNELGLKAKTSNQKSEFLPAFCDSIFAQELTNPIVNRAISEYRKVLNRLLKKYGKMHKIHIELARDAGLSKEARNKIEKEQKENKDINDKAEKTCKEFGLKPNAKNILKIKLWREQGEICAYSGKKITIDDLKEDKALEVDHIYPYSRSYDDSYNNKVLVFIKENQLKLNQTPYEAFGSNQEKWSKIQVLAQKLPYKKKNRILDENFKNKDQIEFISRNLNDTRYATSLIAKYTKEYLEFLPLSDDEDISLKSGEKGSKTHVQTMNGMLTSVLRHAWGFSQKDRNNHLHHALDAIIIAYSTNSIIKAFSDFKKNQEILKAKLYAKKLTSEEYKNQSKFTGFEKYRSKILEKLDSIFVSKPPNKNTKGALHEQTFYSYQDILEEYKTQEGLKRALECGKVRKIGTKYVVNDRMVRLDIFKKDNKFYGIPIYTMDFALGVLPNKVVTIGTDKDKIKKEWKTIDETYEFCFSLYKGDLVLIQKKEMQESEFAYYNGFDISSASISLEKHDNKFENLTENQKLLFPKAKEGDVEVRGIGIQGLKVFKKYMVTPLGEIQETRTEARQNIQPRKKHGLR

SEQ ID NO: 254 - protein, 1023 aa, Helicobacter cinaedi
  source 1..1023: note = Helicobacter cinaedi CCUG 18818 = ATCC BAA-847
MKIYSFDIGVASIGWAFIENEVLQDCGIRIFTKAENPKNGASLALPRREARGVRKRLARRRGRLNTIKQLLCKEFGLQLEDYLSNDGELPKAYTASKANPLKSPYELRTLALSQKLDSKDLVRVILHIAKHRGYGNKHAKDSKDTESGKVKKAIEFNRKTLAEKGYRSVGEYLYREFFQQSRISQNNGATEFINVRNKAGNYEHCVAQDMLKEELESILNAQRQFGFSLKQDFESKLLTKIFEQRPLKSFADKVGNCCFIAGEKRAPKDSPSAIEFIALSRTINTLINLSKESGEIYNRAIILQIVESTLKKGEISYKELREIIRLDERLRFKDPRLDYSREIKEAEKVKFLEFKQLKGFKKALGESFTTLAISQLDEIAEHIALIKDRVKLNEKLESYALTKEQREALSNLSFSAHINLSLQALKQILPFMRGDNGEQCLDYDESVEKAGLKALSKDTLKGQMLPPLNEFEPYLSNPVVARALAEYRKVLNVLLKQYGSPHKIHIEYAREAKLSSTERQKYEKEQKDNYAANQAAHKKCQELGLEPSSTNLLKLKLWQEQGGLCLYSGAKITISYLQDPTALQVDHIYPYSRSFDDSYMNKCLVLTKANQEKGNRTPFEAFGTDSAKWGVITTLAQKLPHKKRRRILNTAFNDKEAGFKLRNLNDTSYIARLVADYTETYLEFLPLVESENTTLSKGQKGSKKHIAIVNGVLTSTMRYYLGFASKDRDNHLHHALDAVIIGFMNDSVIKAFSDFKKTQETSKAAYYAHTLSKQEYKKQRAFIQLPSGENFRVSVLEKVESVFVSKPPRKRVRGALHEATFYSPNDPKLLKNYGGTKGVERALALGKMRKVGAKIVSNGAMVRVDIFRHKSSGKFYGVPVYTMDFALGILPNKAVVVGKDQNGVIKDWLEMDSSYEFIFSLYKDDVILVQKKEMQRPELCYFVSFDTSGASIKVAKHDNNFSTLTENQKLLFSNATKEEVVGKSIGIQNLKVFEKWQVSVLGEVKRTQSYPRENISLASKAKK

SEQ ID NO: 255 - protein, 1023 aa, Helicobacter cinaedi
  source 1..1023: note = Helicobacter cinaedi CCUG 18818
MKIYSFDIGVASIGWAFIENEVLQDCGIRIFTKAENPKNGASLALPRREARGVRKRLARRRGRLNTIKQLLCKEFGLQLEDYLSNDGELPKAYTASKANPLKSPYELRTLALSQKLDSKDLVRVILHIAKHRGYGNKHAKDSKDTESGKVKKAIEFNRKTLAEKGYRSVGEYLYREFFQQSRISQNNGATEFINVRNKAGNYEHCVAQDMLKEELESILNAQRQFGFSLKQDFENKLLTKIFEQRPLKSFADKVGNCCFIAGEKRAPKDSPSAIEFIALSRTINTLINLSKESGEIYNRAIILQIVESTLKKGEISYKELREIIRLDERLRFKDPRLDYSREIKEAEKVKFLEFKQLKGFKKALGESFTTLAISQLDEIAEHIALIKDRVKLNEKLESYALTKEQREALSNLSFSAHINLSLQALKQILPFMRGDNGEQCLDYDESVEKAGLKALSKDTLKGQMLPPLNEFEPYLSNPVVARALAEYRKVLNVLLKQYGSPHKIHIEYAREAKLSSTERQKYEKEQKDNYAANQAAHKKCQELGLEPSSTNLLKLKLWQEQGGLCLYSGAKITISYLQDPTALQVDHIYPYSRSFDDSYMNKCLVLTKANQEKGNRTPFEAFGTDSAKWGVITTLAQKLPHKKRRRILNTAFNDKEAGFKLRNLNDTSYIARLVADYTETYLEFLPLVESENTTLSKGQKGSKKHIAIVNGVLTSTMRYYLGFASKDRDNHLHHALDAVIIGFMNDSVIKAFSDFKKTQETSKAAYYAHTLSKQEYKKQRAFIQLPSGENFRVSVLEKVESVFVSKPPRKRVRGALHEATFYSPNDPKLLKNYGGTKGVERALALGKMRKVGAKIVSNGAMVRVDIFRHKSSGKFYGVPVYTMDFALGILPNKAVVVGKDQNGVIKDWLEMDSSYEFIFSLYKDDVILVQKKEMQRPELCYFVSFDTSGASIKVAKHDNNFSTLTENQKLLFSNATKEEVVGKSIGIQNLKVFEKWQVSVLGEVKRTQSYPRENISLASKAKK

SEQ ID NO: 256 - protein, 1023 aa, Helicobacter cinaedi
MKIYSFDIGVASIGWAFIENEVLQDCGIRIFTKAENPKNGASLALPRREARGVRKRLARRRGRLNTIKQLLCKEFGLQLEDYLSNDGELPKAYTASKANPLKSPYELRTLALSQKLDSKDLVRVILHIAKHRGYGNKHAKDSKDTESGKVKKAIEFNRKTLAEKGYRSVGEYLYREFFQQSRISQNNGATEFINVRNKAGNYEHCVAQDMLKEELESILNAQRQFGFSLKQDFENKLLTKIFEQRPLKSFADKVGNCCFIAGEKRTPKDSLSAIEFIALSRTINTLINLSKESGEIYNRAIILQIVESTLKKGEISYKELREIIRLDERLRFKDPRLDYSREIKEAEKVKFLEFKQLKGFKKALGESFTTLARSQLDEIAEHIALIKDRVKLNEKLESYALTKEQREALSNLSFSAHINLSLQALKQILPFMRGDNGEQCLDYDESVEKAGLKALSKDTLKGQMLPPLNEFEPYLSNPVVARALAEYRKVLNALLKQYGSPHKIHIEYAREAKLSSTERQKYEKEQKDNYAANQAAHKKCQELGLEPSSTNLLKLKLWQEQGGLCLYSGAKITISYLQDPTALQVDHIYPYSRSFDDSYMNKCLVLTKANQEKGNRTPFEAFGTDSAKWGVITTLAQKLPHKKRRRILNTAFNDKEAGFKLRNLNDTSYIARLVADYTETYLEFLPLVESENTTLGKGQKGSKKHIAIVNGALTSTMRYYLGFASKDRDNHLHHALDAVIIGFMNDSVIKAFSDFKKTQETSKAAYYAHTLSKQEYKKQRAFIQLPSGENFRASVLEKVESVFVSKPPRKRVRGALHEATFYSPNDPKLLKNYGGTKGVERALALGKMRKVGAKIVSNGAMVRVDIFRHKSSGKFYGVPVYTMDFALGILPNKAVVVGKDKNGVIKDWLEMDSSYEFIFSLYKDDLLLVQKKEMAEPELCYFMSFNSSIAQISVAKHDNNFSTLTKNQKLLFSNATQEDVSGKSIGIQNLQVFEKWQVSVLGEVKRTQSYPRENISLASKAKK

SEQ ID NO: 257 - protein, 1024 aa, Helicobacter mustelae
MIRTLGIDIGIASIGWAVIEGEYTDKGLENKEIVASGVRVFTKAENPKNKESLALPRTLARSARRRNARKKGRIQQVKHYLSKALGLDLECFVQGEKLATLFQTSKDFLSPWELRERALYRVLDKEELARVILHIAKRRGYDDITYGVEDNDSGKIKKAIAENSKRIKEEQCKTIGEMMYKLYFQKSLNVRNKKESYNRCVGRSELREELKTIFQIQQELKSPWVNEELIYKLLGNPDAQSKQEREGLIFYQRPLKGFGDKIGKCSHIKKGENSPYRACKHAPSAEEFVALTKSINFLKNLTNRHGLCFSQEDMCVYLGKILQEAQKNEKGLTYSKLKLLLDLPSDFEFLGLDYSGKNPEKAVFLSLPSTFKLNKITQDRKTQDKIANILGANKDWEAILKELESLQLSKEQIQTIKDAKLNFSKHINLSLEALYHLLPLMREGKRYDEGVEILQERGIFSKPQPKNRQLLPPLSELAKEESYFDIPNPVLRRALSEFRKVVNALLEKYGGFHYFHIELTRDVCKAKSARMQLEKINKKNKSENDAASQLLEVLGLPNTYNNRLKCKLWKQQEEYCLYSGEKITIDHLKDQRALQIDHAFPLSRSLDDSQSNKVLCLTSSNQEKSNKTPYEWLGSDEKKWDMYVGRVYSSNFSPSKKRKLTQKNFKERNEEDFLARNLVDTGYIGRVTKEYIKHSLSFLPLPDGKKEHIRIISGSMTSTMRSFWGVQEKNRDHHLHHAQDAIIIACIEPSMIQKYTTYLKDKETHRLKSHQKAQILREGDHKLSLRWPMSNFKDKIQESIQNIIPSHHVSHKVTGELHQETVRTKEFYYQAFGGEEGVKKALKFGKIREINQGIVDNGAMVRVDIFKSKDKGKFYAVPIYTYDFAIGKLPNKAIVQGKKNGIIKDWLEMDENYEFCFSLFKNDCIKIQTKEMQEAVLAIYKSTNSAKATIELEHLSKYALKNEDEEKMFTDTDKEKNKTMTRESCGIQGLKVFQKVKLSVLGEVLEHKPRNRQNIALKTTPKHV

SEQ ID NO: 258 - protein, 1688 aa, Ignavibacterium album
MEFKKVLGLDIGTNSIGCALLSLPKSIQDYGKGGRLEWLTSRVIPLDADYMKAFIDGKNGLPQVITPAGKRRQKRGSRRLKHRYKLRRSRLIRVFKTLNWLPEDFPLDNPKRIKETISTEGKFSFRISDYVPISDESYREFYREFGYPENEIEQVIEEINFRRKTKGKNKNPMIKLLPEDWVVYYLRKKALIKPTTKEELIRIIYLFNQRRGFKSSRKDLTETAILDYDEFAKRLAEKEKYSAENYETKFVSITKVKEVVELKTDGRKGKKRFKVILEDSRIEPYEIERKEKPDWEGKEYTFLVTQKLEKGKFKQNKPDLPKEEDWALCTTALDNRMGSKHPGEFFFDELLKAFKEKRGYKIRQYPVNRWRYKKELEFIWTKQCQLNPELNNLNINKEILRKLATVLYPSQSKFFGPKIKEFENSDVLHIISEDIIYYQRDLKSQKSLISECRYEKRKGIDGEIYGLKCIPKSSPLYQEFRIWQDIHNIKVIRKESEVNGKKKINIDETQLYINENIKEKLFELFNSKDSLSEKDILELISLNIINSGIKISKKEEETTHRINLFANRKELKGNETKSRYRKVFKKLGFDGEYILNHPSKLNRLWHSDYSNDYADKEKTEKSILSSLGWKNRNGKWEKSKNYDVFNLPLEVAKAIANLPPLKKEYGSYSALAIRKMLVVMRDGKYWQHPDQIAKDQENTSLMLFDKNLIQLTNNQRKVLNKYLLTLAEVQKRSTLIKQKLNEIEHNPYKLELVSDQDLEKQVLKSFLEKKNESDYLKGLKTYQAGYLIYGKHSEKDVPIVNSPDELGEYIRKKLPNNSLRNPIVEQVIRETIFIVRDVWKSFGIIDEIHIELGRELKNNSEERKKTSESQEKNFQEKERARKLLKELLNSSNFEHYDENGNKIFSSFTVNPNPDSPLDIEKFRIWKNQSGLTDEELNKKLKDEKIPTEIEVKKYILWLTQKCRSPYTGKIIPLSKLFDSNVYEIEHIIPRSKMKNDSTNNLVICELGVNKAKGDRLAANFISESNGKCKFGEVEYTLLKYGDYLQYCKDTFKYQKAKYKNLLATEPPEDFIERQINDTRYIGRKLAELLTPVVKDSKNIIFTIGSITSELKITWGLNGVWKDILRPRFKRLESIINKKLIFQDEDDPNKYHFDLSINPQLDKEGLKRLDHRHHALDATIIAATTREHVRYLNSLNAADNDEEKREYFLSLCNHKIRDFKLPWENFTSEVKSKLLSCVVSYKESKPILSDPFNKYLKWEYKNGKWQKVFAIQIKNDRWKAVRRSMFKEPIGTVWIKKIKEVSLKEAIKIQAIWEEVKNDPVRKKKEKYIYDDYAQKVIAKIVQELGLSSSMRKQDDEKLNKFINEAKVSAGVNKNLNTTNKTIYNLEGRFYEKIKVAEYVLYKAKRMPLNKKEYIEKLSLQKMFNDLPNFILEKSILDNYPEILKELESDNKYIIEPHKKNNPVNRLLLEHILEYHNNPKEAFSTEGLEKLNKKAINKIGKPIKYITRLDGDINEEEIFRGAVFETDKGSNVYFVMYENNQTKDREFLKPNPSISVLKAIEHKNKIDFFAPNRLGFSRIILSPGDLVYVPTNDQYVLIKDNSSNETIINWDDNEFISNRIYQVKKFTGNSCYFLKNDIASLILSYSASNGVGEFGSQNISEYSVDDPPIRIKDVCIKIRVDRLGNVRPL

SEQ ID NO: 259 - protein, 1092 aa, Ilyobacter polytropus
MKYSIGLDIGIASVGWSVINKDKERIEDMGVRIFQKAENPKDGSSLASSRREKRGSRRRNRRKKHRLDRIKNILCESGLVKKNEIEKIYKNAYLKSPWELRAKSLEAKISNKEIAQILLHIAKRRGFKSFRKTDRNADDTGKLLSGIQENKKIMEEKGYLTIGDMVAKDPKFNTHVRNKAGSYLFSFSRKLLEDEVRKIQAKQKELGNTHFTDDVLEKYIEVFNSQRNFDEGPSKPSPYYSEIGQIAKMIGNCTFESSEKRTAKNTWSGERFVFLQKLNNFRIVGLSGKRPLTEEERDIVEKEVYLKKEVRYEKLRKILYLKEEERFGDLNYSKDEKQDKKTEKTKFISLIGNYTIKKLNLSEKLKSEIEEDKSKLDKIIEILTFNKSDKTIESNLKKLELSREDIEILLSEEFSGTLNLSLKAIKKILPYLEKGLSYNEACEKADYDYKNNGIKFKRGELLPVVDKDLIANPVVLRAISQTRKVVNAIIRKYGTPHTIHVEVARDLAKSYDDRQTIIKENKKRELENEKTKKFISEEFGIKNVKGKLLLKYRLYQEQEGRCAYSRKELSLSEVILDESMTDIDHIIPYSRSMDDSYSNKVLVLSGENRKKSNLLPKEYFDRQGRDWDTFVLNVKAMKIHPRKKSNLLKEKFTREDNKDWKSRALNDTRYISRFVANYLENALEYRDDSPKKRVFMIPGQLTAQLRARWRLNKVRENGDLHHALDAAVVAVTDQKAINNISNISRYKELKNCKDVIPSIEYHADEETGEVYFEEVKDTRFPMPWSGFDLELQKRLESENPREEFYNLLSDKRYLGWFNYEEGFIEKLRPVFVSRMPNRGVKGQAHQETIRSSKKISNQIAVSKKPLNSIKLKDLEKMQGRDTDRKLYEALKNRLEEYDDKPEKAFAEPFYKPTNSGKRGPLVRGIKVEEKQNVGVYVNGGQASNGSMVRIDVFRKNGKFYTVPIYVHQTLLKELPNRAINGKPYKDWDLIDGSFEFLYSFYPNDLIEIEFGKSKSIKNDNKLTKTEIPEVNLSEVLGYYRGMDTSTGAATIDTQDGKIQMRIGIKTVKNIKKYQVDVLGNVYKVKREKRQTF

SEQ ID NO: 260 - protein, 1354 aa, Indibacter alkaliphilus
  source 1..1354: note = Indibacter alkaliphilus LW1
MKKILGLDLGTTSIGWAFIKEPEKDVVGSEIVDMGVRIVPLSSDEENDFAKGNTISINADRTLKRGARRNLQRFKQRRNALLETFKEKNLIPSNFQYAEDGPSSTFSTLKLRDKAAKEKIELDDFVKVLLQINKKRGYKSSRKAMSEEDEGTAIDSMGIAKELYENDLTPGQWVYEALKNGRKNVPDFYRSDLQEEFKKIVNYQSEFYPDILNTSFVEDWMGKASTPTKQYFNKRGVQLAENKGKREERRLQEYKWRAEAVNFKIDLSEIALILSQINSQISNSSGYLGAISDRSKELYFKNLTVGQYLYQQVKKNPHTRLKGQVFYRQDYLDEFEKIWSVQSSFYPQLNDELKQEVRDVTIFFQRRLKSQKHLISNCEFEEHHKVVPKSHPIFQEFRIWQNLNNLTLIKKDNLNEKCELALEDKTALANELAFKKELSVKDALKVLGLKPSDWEFNFTKIEGNRTNHAFFEAFAKIIELEDGEPIDLGNLKADDILDQFSEAFLRIGIDTELLQVNSDIEGAEYEKQSYIQFWHLLYSSEDDQKLKQNLIRKFGFKPEHAKILASISLQDDHASLSSRAIKKILPHLQSGLIYDKACTYAGYNHSSSFTKDENEKRELRAELELLKKNSLRNPVVEKILNQMINVVNAILKDPNLGRPDEIRVEMARELKANAEQRKNMTSNIASATRDHEKYREILKKEFGLKRVTKNDLLRYKLWLETDGISLYTGKPIEASKLFSKEYDIEHIIPKARLFDDSFSNKTICERQLNIDKANVTAFSFLQNKLSADEFEQYQSRVKSLYGKLSKAKIQKLLMANDKIPEDFIARQLQETRYISKKAKEILFEITMRVSVTTGTITDKLREDWGLVEIMKELNWEKYDKLGLTYTIEGKHGERLNKIKDWNKRNDHRHHAMDALTVALTKPAYIQYLNNLNAKAIGNKKGTEIFAIEQKYLKRENGKLCFIPPIENIRAEAKKHLSKILVSYKAKNKVVTINKNKTKKKAGFNEQTALTPRGQLHKETVYGKSFHYSTKFEKIGASFDAQKINTVAKKEEREALLKRLAENGNDPKKAFTGKNSLNKMPIYLDLGKNIKLSEKVKTVVLEQNYTIRKNIDPDLKVDKVIDVGIKRILESRLEEFGGNAKLAFSNLEENPIWLNKEKGIPIKRVKISGVSNVESLHVKKDHFGEKILDEEGNEIPVDFVSTGNNHHVAIYEDEDGNLQDEVVNFYEAVIRRNQGESIIKYRHEEGWNFLYSIKQNEFFVFPSQDFNPNDFDLLDPKNYDLISPNLYRAQKFSKVMYGNSAVRDYVFRHHLETVLNDVKELKDVAYKQLKSLQYLNGIKKVRLNHLGQIIQVGEY

SEQ ID NO: 261 - protein, 1397 aa, Joostella marina
  source 1..1397: note = Joostella marina DSM 19592
MKKVLGLDLGTNSIGWALVNEATKEEKKEGKSSEIIKLGVRVNPLTVDEKTNFEKGRPLSTNADRTLKRSARRNLQRYKLRRRNLIEILIKNGFITKDTPLTETGKDTTHQTLKLRAKSAKEKVDLKDFAKILLTINKKRGYKSSRKVNSDEDGLAIDGMAVAKHLYEQNLTPGQYVLNLLQKNKKYVPDFYRSDLQEEFKNIWNNQKTYYFDILTDTLFEELKDKNKSQTWAICKKPFDIAGIKQIGKASDKRLERYKWRTEGLTQKLNLEYLAIALQEINNDINKSSGYLGAISDRSKELFFNKETVGENLYRQLVKTPHTSLRNQVFYRQDYLDEFETIWETQAKFYPQLTHTLKEEIRDVIIFYQRKLKSQKSLISFCQFESWEQTYIEKETGKSKTRTVGRKVIPKSSPLFQEFKIWQNLNSLEFRNSDEGEIIEFIKLDEDIRQTVFEELNLRGNLKPNDVLKILGNYISLGKVSQWKCNFEEIEGNRTNAALYNVYQIIAENEGYGFDWAKKTASEINKELKNIFPQLGIDASILDFDFTQANFDKQTSYQLWHLLYSAEEDFKISEEDKVLYGNSSVSLKKKLHQKYGFKPEYTKLLTNISLQPDYGNLSAKAICNILPYLKENNVYSEACDLTGYNHSNFLTAEEQAKRPLKPILELLKKNSLRNPVVEKILNQMVNVVNQVIETYGKPDEIRIELTRELKKSAKERANMTKSIADATRRNDDYRKTIIKEFGIPNPTKSDVVRYRLWQELASRGYKDIFTDTEIKPQELFSNKIDIEHIIPKALLFDDSFSNKTLAFKKDNLKKANRTAYDFIANDYAPNLENYIERVESLHKDRKITRAKRNKLLMLQSKLPDGFIERDLRNSQYITKEAKKMLYEVCRTVVSTSGSITDKLREDWDLINVMKELNFPKYKALGLTEKIERYDIGAEKMKEVEIIEDWNKRNDHRHHAIDALTVAFSTHSHIQYLNHLNARRDEGHKKHAAIIAIESTITEKEGNKKRRFIAPLPNFRLQAKEHIESILVSFKNKNKVVTNNINKTKRIKKDKFNTKVQLTPRGQLHKETIYGKIKQPLEKHIKLNKSFTLEQAKLIIDKRQREKVLNHLEKYAHNSDIAFNSKTLKKNPLLISDEPLKEVLCFEEVFTIRKDISYDNFKNEKQLDKVIDEKVKQALKERINQYNGDFREAFSDIERNPIWLNKAKGICVKRATIKGVSNAEPLHTAKNHLGEEVLTENKEQIPVDYVSTGNNHHVAIYEDEDGNLQEKVVSFYEAVIRVNEGLPIIDKEYNKSLGWTFKFTMKQNEMFVFPSEDFNPTEIDLLDQKNASLISPNLFRVQKFTIKDYFFRHHLETTVENNNTLKNTTWRREGLSGIYGIIKIRLNHLGEIVQVGEY

SEQ ID NO: 262 - protein, 1060 aa, Kingella kingae
  source 1..1060: note = Kingella kingae PYKK081
MAAKSLNYILGLDLGIASCGWAVVEMDEQENPLRLIDVGVRTFEEAENPKDGSSLAETRRLARAQRRLISRRANRMNKLCRLLKQENVLQANDYDEKGLIIGLPNQAWELRAQGLDRKLEPKEWAAVLIHLVKHRGYLSQRKNESQTADKELGALLSGMNHNHQLLQSQSNQYRTPAELAIKQFATQDGHIRNQRGAYTHTFNRLDLQNELNQLFDAQTRLGNPHVSGSLKTAINDLLMNQKAALSGDAILEMLGRCTFEPSEYKAAKNTYSAERFVWLGKLTNLRIQDNGLESALSREQRELLLNEPYNKTKLTYQQVRKLLRLPETAFFKGLRYGKDNAESATFMEMKSYHAIRKSLENKSLKSEWEKLKTQPKLLDLIGTAFSIYKTDDEIAGCLKNQLPENVIIALQGQLNFSNFMELSLKALEKLLPLMEQGLRYDEACTQIYGNRHEKIADKTEKFLPNIPADKLRNPVVLRTLTQARKVINAIIRRYGSPARVHIETGREVGKSFSDRDKLKKQQEENQEQRRRAIDEWKQFFPNAAHEPKAVDILKLRLYQLQQGKCLYSGLPIDVRRLPEKGYVEIDHALPFSRTWDDSFNNKILVLASENQNKGNQTPYEYLRGADNSESWRLFVENVQNCQFSPNKKQKIMAKQLDEKGFLERNLNDTRYVSRFLCQFISEHLHLTGKGKKRVFASNGQITALLRGRWGLSKNREENDRHHAVDAVVVACSTVAMQQKITQFVRYQKGNVFTGERIDKETGEVISIHFPTPWEHFREEVMIRVFDDNPLRTLPEKLPNRPEALHEYVMPLFVSRMPTRKMTGQGHKETIKSAKRLDEKISVLRVPLTQLKLNDLENMVNREREPALYEALKARLEQFKNDPAKAFAEPFFKQGGQQVKAVRVEIVQKSGMLLRKINGVADNGSMVRVDVFEKSGKFYLVPIYAWQVAEGILPNYAVVAHKDESDWILMDESYHFKFALYKNDLLEVQTKKGGIMGYFASLDRATGAITIREHDRDKKKCKDGEHRSIGVKMASSFKKLQVDELGKNIHETRSRKRPNIG

SEQ ID NO: 263 - protein, 1391 aa, Kordia algicida
  source 1..1391: note = Kordia algicida OT-1
MKKILGLDLGTNSIGWALVNEAEHEHEQSSIVKLGVRVNPLSVDEKTNFEKGRPLSINADRTSKRSARRNLQRFKLRRKNLINLLLKHHIISNETILTEVGKNTTHQTLKLRSKATQEKISLEEFARILLSINKKRGYKSSRKEKNEDEGFTIDGMAIAKELYDNQLTPGQYVYNILQDGKNYIPDFYRSDLQAEFDDVWQFQKKFYSSILTDEFYLKLKGQGKENTRKLFLAIHQVYTAENKGKRDAVKLQYYKWRSEAVKKQLSIEEVAYVLVEINNNINKSSGYLGAISDRSKALYFNNETVGEYLYGQLVKNRHNSLRNQVFYRQDYLDEFEKIWETQAKFYDELTNELKQEIRDVVIFYQRKLKSQKHLISDCLFEKHHKAIPKSSPLFQEFKIWQNLNYLEFVHTQSKEKIFFSELDDETRQFVFAELNIRGTLKIKEIKKLIGLETPVYWKSNFDEIEGNRTNQVLYNVYQNIADDLGYGFDWSKKHAFEINAELQAIFKDVGIDTAILNFDASIEENDFDKQKSYQLWHLLYSAEDTDKATEEDKLIYGNINTKLKKQLHQKYGFEAKYGNLLANISLQQDYGNLSAKAIKKILPYLESGNSFYEACTIVGYNPSNSLTKEQQQNRKLKDKLELLPKNSLRNPVVEKILNQKVNLINQLIDEYGKPDEVRIELARELKKSAKQRADLSKHINDATLKNQNIRKTLQKDFGIQNPSKNDVIRYKLYDELKDNGYKTLFTNKYIPKEQLFSKDVDIEHIIPKAILFDDSFSNKTLAYRNVNLAKADATAFDFISSKHLDDLDNYKARVETLFQSKRISKGKYKKLLMTRQNLPEDFIERDLRNSQYIAKKATAMLKEVFRSVVPTSGRITDKLREDWDLVNVMKELNLPKYRTLGLTEFIERKNGNKIEQIIDWTKRNDHRHHAMDALTVAFTTHNHIQYLNNLNVTHGLNGVDTDHEKSRLYAIKQAITKVYIVGKTKKRKFIPPMENFRSHAKNHLEGILISFKNKNKVVTKNKNRTKTKTKGVFNEKIQLTPRGQLHKETIYGHAKKVIVTKEKVSSKFTHEKILQVTKPAYREALLKRLASFKNDPKKAFSGKNALSKNPLYFDITSGKKVPDTVKLSYFENSYVIRKEVNSDNFKNEKSLQKVLDVGIRRILEKRLADYNGNAKEAFSNLEKNPIWKDKEKGVCIKKVRIEALKNAEPLHVKKDHLGKIILDDENKSTPVDFISTGNNHHVAIYEDKDGKLHDKVVSFYEVVSRVNLGLPIIDKSFNSHLDWKFLFSMKQNEMFVFPSEDFNPKEIDIGNPKNNELISKYLFRVQKFSKVTYGNSAVRDYVFRHHLETELIDKKELKGITYYQLKSIGMLEKLVKVRINHIGKIVHIGEY

SEQ ID NO: 264 - protein, 1314 aa, Lactobacillus animalis
  source 1..1314: note = Lactobacillus animalis KCTC 3501
MLKKDYSIGLDIGTNSVGHAVVTDDYKVPTKKMKVFGDTSKKTIKKNMLGVLLFNEGQTAADTRLKRGTRRRYTRRKNRLRYLQEIFAPELAKVDPNFLYRLEESSLVAEDKKYDVYPIFGKREEELLYHDTYKTIYHLRSALANNDQPADLRLVYLALAHIIKYRGNFLLEGEIDLRTTDINKVFAEFSETLNENSDENLGKLDVADIFKNNTFSKTKKSEELLKLSGAKKNQLAHQLFKMMVGNMGSFKKVLGTDEEHKLSFGKDTYEDDLNDLLAEAGDQYLDIFVAAKKVYDAAILASILDVKDTQTKTVFSQAMIERYEEHQKDLIELKRVFKKYLPEKCHDFFSEPKISGYAGYIDGKVSEEDFYKYTKKTLKGIPETEEILQKIDANNYLRKQRTFDNGAIPHQVHLKELVAIVENQGKYYPFLRENKDKFEKILNFRIPYYVGPLARGNSKFAWLTRAGEGKITPYNFDEMIDKETSAEDFIKHMTINDLYLPTEPVLPKHSLLYERYTIFNELAGVRYVTENGEAKYFDAQTKRSIFELFKLDRKVSEKMVIKHLKVVMPAIRIQALKGLDNGKFNASYGTYKDLVDMGVAPELLNDEVNSEKWEDIIKTLTIFEGRKLIKRRLENYRDFLGEDILRKLSRKKYTGWGRLSAKLLDGIYDKKTHKTILDCLMTEDYSQNFMQLINDDNYSFKETIKNAQVIEKEETLAKTVQELPGSPAIKKGILQSLEIVDEIIKVMGYKPKSIVVEMARETQKTHGTRKREDRVQQIVENLKDANELPEKLPSNAELSDERKYLYCLQNGRDMYTGAPLDYDHLQFYDVDHIIPQSFLKDDSIENKVLTIKKENVRKTNGLPSEAVIQKMGSFWKKLLDAGAMTNKKYDNLRRNLHGGLNEKLKERFIERQLVETRQITKYVAQLLDQRLNYDGNGVELDEKIAIVTLKAQLASQFRSEFKLRKVRALNNLHHAHDAYLNAIVANLIMAKYPELEPEFVYGKYRKAKFKGLGKATAKNTLYANVLYFLKENEVYPFWDKARDLPTIKRYLYRAQVNKVRKAERQIGGFSDEMLVPKSDSGKLLPRKEGLDPVKYGGYAKAVESYAVLITADEVKKGKTKKVKTLVNIPIIDSKKYEADPTAYLASRGYTNVTNSFILPKYSLLEDPEGRRRYLASFKEFQKANELILPQHLVELLYWVNAKDGEQKLEDHKAEFKELFDKIMEFADKYVVAPKNSEKIRRLYEENQDATPMELGKNFVELLRYTADGAASDFKFFGENIPRKRYNSAGSLLNGTLIYQSKTGLYETRIDLGKL

SEQ ID NO: 265 - protein, 1377 aa, Lactobacillus brevis
  source 1..1377: note = Lactobacillus brevis subsp. gravesensis ATCC 27305
MESNHDGEQVKYTLGLDIGTSSIGYAAIDKHQKPIRAKGKHVIGVRLFQEGQTAADRRAFRTTRRRLKRRKWRLNLLNRLFDPYLSEVDPNFLPRLRQSNLSPKDDNKHFNGSTLFPDKTDAAFYRQYPTMYHLRYALMTEKRKFDIREVYLAIHHIVKYRGNFLNSATVDSFKTSNIDFTSQFDRLNELYRQVILDEPFQINMDQVDEMTNKLLDNDALKLDTQKQVAKLLPVIYNDKPIDKQYTRIATEFSKAILGYKTKLDVILNLDTQNAKDWVIRLDDEDIDDKLPALVENLDESRQEIVTIIRDLYAQITLNAIVPKGKSLSESMVDKYNDHKDHLDLLMGLIHELGDDSAKGIKLREAYTQYVGKSDDKTLNQDDFYAAIKKNLDEDSKRSPKIQRLIEQASFMPKQRTSANGVIPHQLHQLELDRIIENQGRYYPFLKKPNPNTHKPNGGKYKLDELVAFRIPYYVGPLITKRDQEKTSGADFAWMIRKPGQEGEITPWNFDQKVDRMASANRFIRRMTTKDSYLVAEDVLPDASLIYEKFKALNELNMLKVNDSRLSPSQKQDLFNNLFKKQKTIRTKKLQTYIRTNWELPSVMISGLADPDKFNSSLSTYIDFRDIFGEKVDDPNRQADYEEIIEWSTVFEDRKIYQAKLNQLDWLTEPQRKALLTKRYTGWGRLSKKLLTGLKDQNGDSILDQLWKTNDNFMQIQSRDEFAKQIHDENAKQFHEANNVDDILDDAFTSPQNKKAIRQVDKVVQDVVKAVGYAPDKIAIEFTRSLENNPQRTVSRQRQLQAAYKNIPREIMKSGLMAELGSVADSKKVLSDKLYLYFTQMGKDMYEDKTINIDNLPNYDIDHILPQAFIKDDSIDNRVLISKEENARKSNRVPLKFFGAKRMGFWKDLLNNGLISNRKFQNLTTDPEKISKYSAKGFIHRQLVETSQVIRLVANILGNEYSQAGTTIIEVSAKMNRQLREDFHLIKNRNVNDYHHAMDAYLTAYVGDYLYLRYPKLRPYFVYGDFKKAEDQDLNIRNFNFLHDLKDNESLDKIVDSETGEIVWEKHGSVKQLKKVYHYKFMLVSQEVYTRQDALFNQTIYPASDADKRKLIPIKNSKPVDVYGGYSGNIDAYMAIVRVHGKKEDNYKVVGIPMRAVTKLKKAEKEGHDSYLNAVHEVLKPQFTKKKKNRKTGEITETVDEFDVLLGKVYYRQLIVDGNKKFMLGSSSYQYNAKQLVLSDKAMQVLSKNGKVKSQDENQNLIDVYDEILEKVDQYFELYDQRHYRESLHKGRGIFVNLPLSNQYDGSKLTSYGKYETIDAILNGLHANATMSNLRYLGISSPFGKMQASNGLTIDPDSIICYQSPTGLFERQIKLSDL

SEQ ID NO: 266 - protein, 1371 aa, Lactobacillus buchneri
MKVNNYHIGLDIGTSSIGWVAIGKDGKPLRVKGKTAIGARLFQEGNPAADRRMFRTTRRRLSRRKWRLKLLEEIFDPYITPVDSTFFARLKQSNLSPKDSRKEFKGSMLFPDLTDMQYHKNYPTIYHLRHALMTQDKKFDIRMVYLAIHHIVKYRGNFLNSTPVDSFKASKVDFVDQFKKLNELYAAINPEESFKINLANSEDIGHQFLDPSIRKFDKKKQIPKIVPVMMNDKVTDRLNGKIASEIIHAILGYKAKLDVVLQCTPVDSKPWALKFDDEDIDAKLEKILPEMDENQQSIVAILQNLYSQVTLNQIVPNGMSLSESMIEKYNDHHDHLKLYKKLIDQLADPKKKAVLKKAYSQYVGDDGKVIEQAEFWSSVKKNLDDSELSKQIMDLIDAEKFMPKQRTSQNGVIPHQLHQRELDEIIEHQSKYYPWLVEINPNKHDLHLAKYKIEQLVAFRVPYYVGPMITPKDQAESAETVFSWMERKGTETGQITPWNFDEKVDRKASANRFIKRMTTKDTYLIGEDVLPDESLLYEKFKVLNELNMVRVNGKLLKVADKQAIFQDLFENYKHVSVKKLQNYIKAKTGLPSDPEISGLSDPEHFNNSLGTYNDFKKLFGSKVDEPDLQDDFEKIVEWSTVFEDKKILREKLNEITWLSDQQKDVLESSRYQGWGRLSKKLLTGIVNDQGERIIDKLWNTNKNFMQIQSDDDFAKRIHEANADQMQAVDVEDVLADAYTSPQNKKAIRQVVKVVDDIQKAMGGVAPKYISIEFTRSEDRNPRRTISRQRQLENTLKDTAKSLAKSINPELLSELDNAAKSKKGLTDRLYLYFTQLGKDIYTGEPINIDELNKYDIDHILPQAFIKDNSLDNRVLVLTAVNNGKSDNVPLRMFGAKMGHFWKQLAEAGLISKRKLKNLQTDPDTISKYAMHGFIRRQLVETSQVIKLVANILGDKYRNDDTKIIEITARMNHQMRDEFGFIKNREINDYHHAFDAYLTAFLGRYLYHRYIKLRPYFVYGDFKKFREDKVTMRNFNFLHDLTDDTQEKIADAETGEVIWDRENSIQQLKDVYHYKFMLISHEVYTLRGAMFNQTVYPASDAGKRKLIPVKADRPVNVYGGYSGSADAYMAIVRIHNKKGDKYRVVGVPMRALDRLDAAKNVSDADFDRALKDVLAPQLTKTKKSRKTGEITQVIEDFEIVLGKVMYRQLMIDGDKKFMLGSSTYQYNAKQLVLSDQSVKTLASKGRLDPLQESMDYNNVYTEILDKVNQYFSLYDMNKFRHKLNLGFSKFISFPNHNVLDGNTKVSSGKREILQEILNGLHANPTFGNLKDVGITTPFGQLQQPNGILLSDETKIRYQSPTGLFERTVSLKDL

SEQ ID NO: 267 - protein, 1371 aa, Lactobacillus buchneri
MKVNNYHIGLDIGTSSIGWVAIGEDGKPLRIKGKTAIGARLFQEGNPAADRRMFRTTRRRLSRRKWRLKLLEEIFDPYITPVDSTFFARLKQSNLSPKDSRKEFKGSMLFPDLTDMQYHKDYPTIYHLRHALMTQDEKFDIRMVYLAIHHIVKYRGNFLNSTPVDSFKASKVNFVDQFKKLNELYTAINPEESFQINLANSEDIGHQFLDPSIRKFDKKKQIPKIVPVSVDDKATDKINGKIASEIINAILGYKSKLDVVVQCTPVDSKSWALKFDEEDIDAKLQKILPEMDENQQSIIAILQNLYSQVTLNQIVPNGMSLSESMIEKYNDHHDHLKLYKKIIDQLADPKKKAALKKAYSQYVGDDGKVIEQADFWSSVKKNLDDSDLSKQIMDLIDAEKFMPKQRTSQNGVIPHQLHQRELDEIIEHQSKYYPWLAEINPNKHDLHLAKYKIEELVAFRVPYYVGPMITPDDQAKSAETVFSWMERKGKEAGQITPWNFDEKVDRNASANRFIKRMTTKDTYLIGEDVLPDESLLYEKFKVLNELNMVRVNGKLLKVADKQAIFQDLFENYKHISVKKLQNYIKSKTGLPSDPEISGLSDPEYFNNSLGTYNDFKKLFGNKVDEPDLQDDFEKIVEWSTVFEDKRILREKLNEITWLSDQQKDVLESSRYQGWGRLSKKLLTGIVNDQGERIIDELWNTNKNFMQIQSDNDFAKRIHEANADQMKAVDVEDVLADAYTSPQNKKAIRQVVKVVDDIQKAMGGVAPKYISIEFTRSEDRNPRRTISRQRQLENTLKDTAKSLAKSINPELLSELDNAAKSKKGLTDRLYLYFTQLGKDIYTGKPINIDEISTYDIDHILPQAFVKDDSLNNRVLVSKAINNGKSDNVPVQLFGAKMGHFWKQLAEAGLISKRKLKNLQTDPDTISKYAMHGFIRRQLVETSQVIKLVANILGDKYRNDNTKIIEITARMNHQMRDEFGFIKNREINDYHHAFDAYLTAFLGRYLYHRYIKLRPYFVYGDFKKFKEDKVTMRNFNFLHDLTDDTQEKIADAETGEVIWDRENSIQQLKDVYHYKFMLISHEVYTLRGAMFNQTVYPASDAGKRKLIPIKADRPINVYGGYSGSADAYMAIVRIHNKKGDKYRVVGVPMRARDRLDAAKKVSDADCDRALKDVLTPQLTKTKKSRKTGEITQVVEDFEIVLGKVMYRQLMIDGDKKFMLGSSTYQYNAKQLVLSDQSVKTLASKGRLDPLQESMDYNNVYTEILDKVNQYFSLYDMNKFRHKLNLGFSKFISFPNHNVFDGNTKASSGKREILEEVLNGLHANPTFGNLKDIGITTPFGQLQQPNGILLSDEAKIRYQSPTGLFERTVSLKDL

SEQ ID NO: 268 - protein, 1361 aa, Lactobacillus casei
  source 1..1361: note = Lactobacillus casei BL23
MTKLGKPYGIGVDIGSNSIGFAAVDENSHLIRLKGKTVIGARLFEEGKAAADRRASRTTRRRLSRNRWRLSFLRDFFESHITPTGPNFFMRQKYSEISPKDKARYKYEKRLFNDRTDAEFYQQYPTMYHLRNRLLTDPSKADVREIYFAIHHILKSRGHFLTSGYAKDFNTNKVALNEIFPALQDAYAQVYPDLDITFDENKVNEFKTVLLNEKATPSDTQRALVNLLLAEDGDKDILKQQKQVLTEFAKAVVGLKTKLNVALGTEVDSSEATVWNFSLGQLDDKWAGIESAMTDEGTEILDQIRDLYRARLLNGIVPAGKTLSQAKVDDYAQHHEDLELFKDYLKQLEDDGTAKAIRQLYDRYIDGDDAKPFVREDFVKALTKEVTAHPNAKSPELLERLAQPDFMLKQRNKANGAIPVQMQQRELDQIIKNQSVYYDWLAAPNPVEKHRKSMPYQLDELLNFRIPYYVGPLVTAKEQKAAQGGVFAWMVRKDPDGNITPYNFDEKVDREASANTFIQRMKTTDTYLIGEDVLPKQSLLYQRYEVLNELNNVRVNNEKLSIEQKQQVIRELFERHNSVTIKQFAENLRAHGDYAHIPEIRGLADEKRFLSSLSTYRQLKSLLPDAIDDPAKQADIENIIAWSTVFEDAAIFKTKLKEINWLDSQTITKLSNIRYRGWGQFSHKFLNGLTLGNGHTIIQELFLSNNNLMQILTDETLQKKMTELNADKLKAANINDAIDDAYTSPSNKKALRQVLRVIEDIKRAADGQDPSWLYVETADGGGTPGKRTRARQHQLQEIYANAAHELIDSAVRGELEDKIADKADFNDRLVLYFMQGGRDIYTGTPLNIDQLSSYDIDHILPQSLIKDNSLDNRVLVHAIINREKNATFASTIYAQKMNATWRQWHEAGLISGRKLRNLQMRPDQIDKYASGFVARQLVETRQIIKLTEQIVAAQYPETKIIAVKAGLSHQLREELEFPKNRDVNHYHHAFDAFLAARIGTYLLKRFPNLQAFFTYGKFKKADVKKLRGFNFIRDITHAEDKIVVKDTGEVIWDKKRDVDELDRIYNFKRMLITHEVHFEKADLFKQTVYGAKDSKEAGGKKQLISKKKGYPVDIYGGYTQETGSYLSVVRLTKKAMYAVVKVSTRDAAKLAVAKSISEQKENETLNDIIDEKLSKISKNGKITHELFEVVLPRVGQKTLFKNSKYNLFLVNSDTYMHNYQELWMPREYQKMWKDISLSKYGDAQTEDQLDQIFGFIVSQVNSYFNLYDINQFRKKLNDAADKFATLPMRDTDDMQGKIATIGQLLIGLQANAARSDLRNLDIKTPLGLLQIPNGISLDSDTSVVYQSPTGLLEREVHLSDL

SEQ ID NO: 269 - protein, 1361 aa, Lactobacillus casei
  source 1..1361: note = Lactobacillus casei Lc-10
MTKLGKPYGIGVDIGSNSIGFAAVDENSHLIRLKGKTVIGARLFEEGKAAADRRASRTTRRRLSRNRWRLSFLRDFFESHITPTGPNFFMRQKYSEISPKDKARYKYEKRLFNDRTDAEFYQQYPTMYHLRNRLLTDPSKADVREIYFAIHHILKSRGHFLTSGYAKDFNTNKVALNEIFPALQDAYAQVYPDLDITFDENKVNEFKTVLLNEKATPSDTQRALVNLLLAEDGDKDILKQQKQVLTEFAKAVVGLKTKLNVALGTEVDSSEATVWNFSLGQLDDKWAGIESAMTDEGTEILDQIRDLYRARLLNGIVPAGNTLSQAKVDDYAQHHEDLELFKDYLKQLEDDGTAKAIRQLYDRYIDGDDAKPFVREDFVKALTKEVTAHPNAKSPELLERLAQPDFMLKQRNKANGAIPVQMQQRELDQIIKNQSVYYDWLAAPNPVEKHRKSMPYQLDELLNFRIPYYVGPLVTAKEQKAAQGGVFAWMVRKDPDGNITPYNFDEKVDREASANTFIQRMKTTDTYLIGEDVLPKQSLLYQRYEVLNELNNVRVNNEKLSIEQKQQVIRELFERHNSVTIKQFAENLRAHGDYAHIPEIRGLADEKRFLSSLSTYRQLKSLLPDAIDDPAKQADIENIIAWSTVFEDAAIFKTKLKEINWLDSQTITKLSNIRYRGWGQFSHKFLNGLTLGNGHTIIQELFLSNNNLMQILTDETLQKKMTELNADKLKAANINDAIDDAYTSPSNKKALRQVLRVIEDIKRAADGQDPSWLYVETADGGGTPGKRTRARQHQLQEIYANAAHELIDSAVRGELEDKIADKADFNDRLVLYFMQGGRDIYTGTPLNIDQLSSYDIDHILPQSLIKDNSLDNRVLVHAIINREKNATFASTIYAQKMNATWRQWHEAGLISGRKLRNLQMRPDQIDKYASGFVARQLVETRQIIKLTEQIVAAQYPETKIIAVKAGLSHQLREELEFPKNRDVNHYHHAFDAFLAARIGTYLLKRFPNLQAFFTYGKFKKADVKKLRGFNFIRDITHAEDKIVVKDTGEVIWDKKRDVDELDRIYNFKRMLITHEVHFEKADLFKQTVYGAKDSKEAGGKKQLISKKKGYPVDIYGGYTQETGSYLSVVRLTKKAMYAVVKVSTRDAAKLAVAKSISEQKENETLNDIIDEKLSKISKNGKITHELFEVVLPRVGQKTLFKNSKYNLFLVNSDTYMHNYQELWMPREYQKMWKDISLSKYGDAQTEDQLDQIFGFIVSQVNSYFNLYDINQFRKKLNDAADKFATLPMRDTDDMQGKIATIGQLLIGLQANAARSDLRNLDIKTPLGLLQIPNGISLDSDTSVVYQSPTGLLEREVHLSDL

SEQ ID NO: 270 - protein, 1363 aa, Lactobacillus casei
  source 1..1363: note = Lactobacillus casei M36
MTKLGKPYGIGVDIGSNSIGFAAVDENSHLIRLKGKTVIGARLFEEGKAAADRRASRTTRRRLSRNRWRLSFLRDFFESHITPTDPNFFMRQKYSEISPKDKARYKYEKRLFNDRTDAEFYQQYPTMYHLRNRLLTDPSKADVREIYFAIHHILKSRGHFLTSGYAKDFNTNKVALNEIFPALQDAYAQVYPDLDITFDENKVNEFKTVLLDEKATPSDTQRALVNLLLAEDGDKDILKQQKQVLTEFAKAVVGLKMKLNVALGTEVDSSEATAWNFSLGQLDDKWAGIESAMTDEGTEILDQIRDLYRARLLNGIVPAGKTLSQAKVDDYEQHHEDLELFKDYLKQLEDDGMAKVIRQLYDRYIDGDDAKPFVREDFVKALTKEVTAHPNAKSPELLERLVQPDFMLKQRNKANGAIPVQMQQRELDQIIKNQSVYYDWLAAPNPVEKHRQSMPYQLDELLNFRIPYYVGPLVTAKEQKAAQGGVFAWMVRKDPDGNITPYNFDEKVDREASANTFIQRMKTTDTYLIGEDVLPKQSLLYQSYEVLNELNNVRVNDNKLSFDQKQQVLGELFERHNTVTIKQFVDNLLAHGDYDRIPEVRGLADEKRFLSSLSTYNQLKGILHEAIDDSDKQTDIEKIIAWSTIFEDKAIFKTKLNEISWLTAGMINSLANIRYRGWGQFSHKLLNELTLSTGRTVFEELLISSHNLMQILTDEVLKQKIAELNAHELKASGIYAAIDDAYTSPSNKKALRQVLSVIDDITNAAGQAPNWLYIETADGDGVPGKRTNSRQRKIQEIYANAAQELITGSVRGELEDKIASRADFTDRLVLYFMQGGRDIYTGEPLNIDNLSSYDIDHILPQSLIKDNSLDNRVLVHPLVNREKDTIFASTRFAKQMNGMWRQWHAAGLISSRKLRNLQMRPDEIDKYASGFVARQLVETRQIIKLTEQIVADQYPDAKIIAVKAGLSSQLRKELDFPKNREVNHYHHAFDAFLAARIGTYLLKRYPNLEPFFTYGKFKKTEVKKLKSLKSFNFIRDMTHAKDKIVAKETGEIVWDNASDINELDRIYNFKRMLITHEVRFETASLFKQTLYAAKNSKNRGGSRQLIPKKKGYLVDIYGGYTQETGSYLSVVRLTKKAMYAVVKVSTRDAAKLAVAKSISEQKENETLKKIIDGKLSKTSKKGKTTHQLFEIVLPRVGQKTLFKNSKYNQFLVNSDTYMHNYQELWMPREYQRMWKDILLSNHGDAQLEGQLDQIFKFIVSQVNSYFNLYDINQFRKKIADATDKFAKLPTHDTDNARGKIATIGQLLIGLQANAMRSDLRNLDIKTPFGLLQIGTGITLDLDTSIIYQSPTGLFEREVPLTDL

SEQ ID NO: 271 - protein, 1361 aa, Lactobacillus casei; identical to SEQ ID NO: 268
  source 1..1361: note = Lactobacillus casei group

SEQ ID NO: 272 - protein, 1360 aa, Lactobacillus casei
  source 1..1360: note = Lactobacillus casei T71499
MTKLGKPYGIGVDIGSNSIGFAAVDENSHLIRLKGKTVIGARLFEEGKAAADRRASRTTRRRLSRNRWRLSFLRDFFESHITPTDPNFFMRQKYSEISPKDKARYKYEKRLFNDRTDAEFYQQYPTMYHLRTRLLTDPSKADVREIYFAIHHILKSRGHFLTPGYAKDFNTNKVALNEIFPALQDAYAQVYPDLDITFDENKVNEFKTVLLNEKATPSDTQRALVNLLLAEDGDKDILKQQKQVLTEFAKAVVGLKTKLNVALGTEVDSSEATVWNFSLGQLDDKWAGIESAMTDEGTEILDQIRDLYRARLLNGIVPAGKTLSQAKVDDYAQHHEDLELFKDYLKQLEDDGTAKAIRQLYDRYIDGDDAKPFVREDFVKALTKEVTAHPNAKSPELLERLAQPDFMLKQRNKANGAIPVQMQQRELDQIIKNQSVYYDWLAAPNPVEKHRKSMPYQLDELLNFRIPYYVGPLVTAKEQKAAQGGVFAWMVRKDPDGNITPYNFDEKVDREASANTFIQRMKTTDTYLIGEDVLPKQSLLYQSYEVLNELNNVRVNDNKLSFDQKQQVLGELFERHNTVTIKQFVDNLLAHGDYDRIPEVRGLADEKRFLSSLSTYNQLKGILHEAIDDADKQTDIENIIAWSTIFEDKAIFKTKLNEISWLNAGMINSLANIRYRGWGQFSHKLLNELTLSTGRTVFEELLISSRNLMQILTDEVLKQKIAELNAHELKASGIYAAIDDAYTSPSNKKALRQVLSVIDDITNAAGQAPNWLYIETADGDGVPGKRTNSRQRKIQEIYANAAQELITGSVRGELEDKIASRADFTDRLVLYFMQGGRDIYTGEPLNIDNLSSYDIDHILPQSLIKDNSLDNRVLVHPLVNREKDTIFASTRFAKQMNGMWRQWHAAGLISSRKLRNLQMRPDEIDKYASGFVARQLVETRQIIKLTEQIVADQYPDTKIIAVKAGLSSQLRKELDFPKNREVNHYHHAFDAFLAARIGTYLLKRYPNLEPFFTYGKFKKTEVKKLKSFNFIRDMTHAKDKIVAKETGEIVWDNASDINELDRIYNFKRMLITHEVRFETASLFKQTLYAAKNSKNRGGSRQLIPKKKGYLVDIYGGYTQETGSYLSVVRLTKKAMYAVVKVSTRDAAKLAVAKSISEQKENETLKKIIDGKLSKTSKKGKTTHQLFEIVLPRVGQKTLFKNSKYNQFLVNSDTYMHNYQELWMPREYQRMWKDILLSNHGDAQLEGQLDQIFKFIVSQVNSYFNLYDINQFRKKIADATDKFAKLPTHDTDNARGKIATIGQLLIGLQANAMRSDLRNLDIKTPFGLLQIGTGITLDLDTSIIYQSPTGLFEREVPLTDL

SEQ ID NO: 273 - protein, 1366 aa, Lactobacillus casei
  source 1..1366: note = Lactobacillus casei UCD174
MTKLGKPYGIGVDIGSNSIGFAAVDENSHLIRLKGKTVIGARLFEEGKAAAYRRASRTTRRRLSRNRWRLSFLRDFFESHITPTDPNFFMRQKYSEISPKDKARYKYEKRLFNDRTDAEFYQQYPTMYHLRTRLLTDPSKADVREIYFAIHHILKSRGHFLTPGYAKDFNTNKVALNEIFPALQDAYAQVYPDLDITFDENKVNEFKTVLLNEKATPSDTQRALVNLLLAKEGDRDILKQQKQVLTEFAKAVVGLKTKLNVALGTEVDSSEATAWNFSLGQLDDKWAGIESAMTDEGTEILDQIRDLYRARLLNGIVPAGKTLSQAKVDDYAQHHEDLELFKDYLKQLEDDGTAKAIRQLYDRYIDGDDAKPFVREDFVKALTKEVTAHPNAKSPELLERLAQPDFMLKQRNKANGAIPVQMQQRELDQIIKNQAVYYDWLAAPNPVEKHRQSMTYQLDELLNFRIPYYVGPLVTAKEQKAAQGGVFAWMVRKDPDGNITPYNFDEKVDREASANTFIQRMKTTDTYLIGEDVLPKQSLLYQSYEVLNELNNVRVNDNKLSFDQKQQVLGELFERHNTVTIKQFVDNLLAHGDYDRIPEVRGLADEKRFLSSLSTYNQLKGILHEAIDDADKQTDIENIIAWSTIFEDKAIFKTKLNEISWLNAGMINSLANIRYRGWGQFSHKLLNELTLSTGRTVFEELLISSRNLMQILTDEVLKQKIAELNAHELKASGIYAAIDDAYTSPSNKKALRQVLSVIDDITNAAGQAPNWLYIETADGDGVPGKRTNSRQRKIQEIYANAAQELITGSVRGEFEDKIASRADFTDRLVLYFMQGGRDIYTGEPLNIDNLSSYDIDHILPQSLIKDNSLDNRVLVHPLVNREKDTIFASTRFAKQMNGMWRQWHAAGLISSRKLRNLQMRPDEIDKYASGFVARQLVETRQIIKLTEQIVADQYPDTKIIAVKAGLSSQLRKELDFPKNREVNHYHHAFDAFLAARIGTYLLKRYPNLEPFFTYGKFKKTEVKKLKSLKSLKSFNFIRDMTHAKDKIVAKETGEIVWDNASDINELDRIYNFKRMLITHEVRFETASLFKQTLYAAKNSKNRGGSRQLIPKKKGYLVDIYGGYTQETGSYLSVVRLTKKAMYAVVKVSTRDAAKLAVAKSISEQKENETLKKIIDGKLSKTSKKGKTTHQLFEIVLPRVGQKTLFKNSKYNQFLVNSDTYMHNYQELWMPREYQRMWKDILLSNHGDAQIEGQLDQIFKFIVSQVNSYFNLYDINQFRKKIADATDKFAKLPTHDTDNARGKIATIGQLLIGLQANAMRSDLRNLDIKTPFGLLQIGTGITLDLDTSIIYQSPTGLFEREVPLTDL

SEQ ID NO: 274 - protein, 1389 aa, Lactobacillus casei
MIIRTYELKTITTIAILKMFQLLTGGLSMTKLGKPYGIGVDIGSNSIGFAAVDENSHLIRLKGKTVIGARLFEEGKAAADRRASRTTRRRLSRNRWRLSFLRDFFESHITPTGPNFFMRQKYSEISPKDKARYKYEKRLFNDRTDAEFYQQYPTMYHLRNRLLTDPSKADVREIYFAIHHILKSRGHFLTSGYAKDFNTNKVALNEIFPALQDAYAQVYPDLDITFDENKVNEFKTVLLNEKATPSDTQRALVNLLLAEDGDKDILKQQKQVLTEFAKAVVGLKTKLNVALGTEVDSSEATVWNFSLGQLDDKWAGIESAMTDEGTEILDQIRDLYRARLLNGIVPAGKTLSQAKVDDYAQHHEDLELFKDYLKQLEDDGTAKAIRQLYDRYIDGDDAKPFVREDFVKALTKEVTAHPNAKSPELLERLAQPDFMLKQRNKANGAIPVQMQQRELDQIIKNQSVYYDWLAAPNPVEKHRKSMPYQLDELLNFRIPYYVGPLVTAKEQKAAQGGVFAWMVRKDPDGNITPYNFDEKVDREASANTFIQRMKTTDTYLIGEDVLPKQSLLYQRYEVLNELNNVRVNNEKLSIEQKQQVIRELFERHNSVTIKQFAENLRAHGDYAHIPEIRGLADEKRFLSSLSTYRQLKSLLPDAIDDPAKQADIENIIAWSTVFEDAAIFKTKLKEINWLDSQTITKLSNIRYRGWGQFSHKFLNGLTLGNGHTIIQELFLSNNNLMQILTDETLQKKMTELNADKLKAANINDAIDDAYTSPSNKKALRQVLRVIEDIKRAADGQDPSWLYVETADGGGTPGKRTRARQHQLQEIYANAAHELIDSAVRGELEDKIADKADFNDRLVLYFMQGGRDIYTGTPLNIDQLSSYDIDHILPQSLIKDNSLDNRVLVHAIINREKNATFASTIYAQKMNATWRQWHEAGLISGRKLRNLQMRPDQIDKYASGFVARQLVETRQIIKLTEQIVAAQYPETKIIAVKAGLSHQLREELEFPKNRDVNHYHHAFDAFLAARIGTYLLKRFPNLQAFFTYGKFKKADVKKLRGFNFIRDITHAEDKIVVKDTGEVIWDKKRDVDELDRIYNFKRMLITHEVHFEKADLFKQTVYGAKDSKEAGGKKQLISKKKGYPVDIYGGYTQETGSYLSVVRLTKKAMYAVVKVSTRDAAKLAVAKSISEQKENETLNDIIDEKLSKISKNGKITHELFEVVLPRVGQKTLFKNSKYNLFLVNSDTYMHNYQELWMPREYQKMWKDISLSKYGDAQTEDQLDQIFGFIVSQVNSYFNLYDINQFRKKLNDAADKFATLPMRDTDDMQGKIATIGQLLIGLQANAARSDLRNLDIKTPLGLLQIPNGISLDSDTSVVYQSPTGLLEREVHLSDL

SEQ ID NO: 275 - protein, 1354 aa, Lactobacillus coryniformis
  source 1..1354: note = Lactobacillus coryniformis subsp. coryniformis KCTC 3167
MTLHYNVGLDIGTNSVGYTIVDDNGKILQVKGKNGYGVRVFKEGATAAERRIFRTTHRRLKRRKWRLRLLQDFFEPYILPQDDGFFIRRKESNLVLNDRDEDTASLFNDRSDRDFYQAYPTIYHLRQALMTEKRQFDVREIYLAMHHIIKYRGHFLLNGTVNNFTNNKIDLHSDFEELNALLLNVIPELKFQIDLDHSTMFQTTLLNTTISRSGRQRDLVKSFYNGSDDKQLAKQQKSVATELLKAILGLKAKFHKLFNLDLLETTEWEFSFDAEDIDDKLAKLEPLMTENQQQVMDILQRIFAAITLNGIVPEGKTLSASKVDSYQKHKQDLKLLKAIAQHSDKKTATVLQTAYNEYINGIASKPLKQEDFYKRLTNAVKKSSDPQVADMLALIDQEKFLPKQRTKENGAIPHQLHQLELERIIDNQKDYYPWLAELNPNQARQKVAKYKLSELVAFRVPYYVGPLIEPEVQQATSNAHFAWMARKEAGPITPWNFDQKVDRNVSAERFIKRMTTKDTYLLAEDVLPLHSLLYQRFIVLNELNNVRVNGQKLTKKQKQAVYQDLFKRQPHVTKKQFKSYLVQTGEFAESSKIEGLANETSFNSGLTTENELRKIFGAQLDEARYQVDFEQIIEWATLFEDAKILRTKLAEITWLTTEQIEKLAGIRYRGWGRFSRKLLAGLRDQNGQQIIDLLWDTPNNFMVIVSQAAFSEAITKENEKLIDRRGAQDVITDLYTSPQNKKALRQVLAIVADVQKAMGGVPPQRIFIEFAREDEKNPRRSVERSRQLEKLYQTISNEFLINSEVRQELKEAVDQKVNFKDRLFLYFLQGGVDLYSGKRINIDQLSHYDIDHILPQSFIKDDSLDNRVLVSQKLNRSKSDSVPLSEFANYKFGPAMQAKWLQLKEAGLLSKRKYDNLTLDPTKLSKFAPLGFVNRQLVETRQVIKLAANLLASEETKVVTIKANMTHQVRKELDFPKNRNVNNYHHAFDAYLTAFVGIFLSKRYPKLKPYFTYGDFQKGNKLPDLKNFNFLYELKNKDRSIDSNTGEIIWDKQRDLAYMNKIYNFKKVTVVHEVLTKSGALYNQTLYKASEDKASGRGTKQLIRKKDNMPTELYGGYTGSTSAFMSIVRLWKKDKPYYKVVGIPTRMAAKLANQAQLLDYLTKKFTTRKLVKKTGDYKTTVERFELVVPKVGFNQLVIDGGQPFMLGSATYQYNARELFISKEAVKALNKQLSTHVDLVQVFDEILVQVNRWFPLYDTNGFREKLSHGRDRFMKLNDSFEEKSDTQIDVLNRILIGFHANAARTNLKILGLGTDLGFMTQQAGIRLTEKAILVHQSPSGLFERKVALRDLKGLR

SEQ ID NO: 276 - protein, 1119 aa, Lactobacillus coryniformis
  source 1..1119: note = Lactobacillus coryniformis subsp. torquens KCTC 3535
MGYRIGLDVGITSTGYAVLKTDKNGLPYKILTLDSVIYPRAENPQTGASLAEPRRIKRGLRRRTRRTKFRKQRTQQLFIHSGLLSKPEIEQILATPQAKYSVYELRVAGLDRRLTNSELFRVLYFFIGHRGFKSNRKAELNPENEADKKQMGQLLNSIEEIRKAIAEKGYRTVGELYLKDPKYNDHKRNKGYIDGYLSTPNRQMLVDEIKQILDKQRELGNEKLTDEFYATYLLGDENRAGIFQAQRDFDEGPGAGPYAGDQIKKMVGKDIFEPTEDRAAKATYTFQYFNLLQKMTSLNYQNTTGDTWHTLNGLDRQAIIDAVFAKAEKPTKTYKPTDFGELRKLLKLPDDARFNLVNYGSLQTQKEIETVEKKTRFVDFKAYHDLVKVLPEEMWQSRQLLDHIGTALTLYSSDKRRRRYFAEELNLPAELIEKLLPLNFSKFGHLSIKSMQNIIPYLEMGQVYSEATTNTGYDFRKKQISKDTIREEITNPVVRRAVTKTIKIVEQIIRRYGKPDGINIELARELGRNFKERGDIQKRQDKNRQTNDKIAAELTELGIPVNGQNIIRYKLHKEQNGVDPYTGDQIPFERAFSEGYEVDHIIPYSISWDDSYTNKVLTSAKCNREKGNRIPMVYLANNEQRLNALTNIADNIIRNSRKRQKLLKQKLSDEELKDWKQRNINDTRFITRVLYNYFRQAIEFNPELEKKQRVLPLNGEVTSKIRSRWGFLKVREDGDLHHAIDATVIAAITPKFIQQVTKYSQHQEVKNNQALWHDAEIKDAEYAAEAQRMDADLFNKIFNGFPLPWPEFLDELLARISDNPVEMMKSRSWNTYTPIEIAKLKPVFVVRLANHKISGPAHLDTIRSAKLFDEKGIVLSRVSITKLKINKKGQVATGDGIYDPENSNNGDKVVYSAIRQALEAHNGSGELAFPDGYLEYVDHGTKKLVRKVRVAKKVSLPVRLKNKAAADNGSMVRIDVFNTGKKFVFVPIYIKDTVEQVLPNKAIARGKSLWYQITESDQFCFSLYPGDMVHIESKTGIKPKYSNKENNTSVVPIKNFYGYFDGADIATASILVRAHDSSYTARSIGIAGLLKFEKYQVDYFGRYHKVHEKKRQLFVKRDE

SEQ ID NO: 277 - protein, 1368 aa, Lactobacillus curvatus
  source 1..1368: note = Lactobacillus curvatus CRL 705
MSRPYNIGLDIGTSSIGWSVVDDQSKLVSVRGKYGYGVRLYDEGQTAAERRSFRTTRRRLKRRKWRLGLLREIFEPYITPIDDTFFLRQKQSNLSPKDQRKLYTQTSLFNDRTDRAFYDDYPTIYHLRYRLMTEKRQFDIREIYLAMHHIVKYRGHFLNEAPVSSFKSSEINLVAHFDRLNTIFADLFSESGFQLETDKLAEVKALLLDNQQSASNRQRQALSLIYTPSTNKAVEKQNKAIATELLKAILGLKAKFNVLTGIEAEDVKAWTLTFNAENFDEEMVKLESSLDDNAHQIIESLQELYSGVLLAGIVPENQSLSQAMITKYDDHQKHLKMLKAVREALAPGDRQRLKQAYDQYVDGQENTKAYSKEDFYGDITKALKNNPDHPIVSEIKKLIELDQFMPKQRTKDNGAIPHQLHQQELDRIIENQQQYYPWLAELNPNSKRQTVAKYKLDELVAFRVPYYVGPLITAEQQRQSSDAKFAWLIRKAEGRITPWNFDDKVDRQASANEFIKRMTTTDTYLLAEDVLPKQSLIYQRFEVLNELNGLKIDDQPITTELKQAIFTDLFMQKISVTVKNIQDYLVSEKRYASRPAITGLSDENKFNSRLSTYHDLKMIVGDAVDDVDKQADLEKCIEWSTIFEDGKIYSAKLNEIDWLTDQQRVQLAAKRYRGWGRLSAKLLTQIVNANGQRIMDLLWDTTDNFMRIVHSEDFDKLITEANQMMLAENDVQDVINDLYTSPQNKKALRQILLVVNDIQKAMKGQAPERILIEFAREDEVNSRLSVQRKRQVEQVYQNISNELLNNTEIRNELKDLSNSALSNTRLFLYFMQGGRDMYTGDSLNIDRLSTYDIDHILPQSFIKDNSLDNRVLVSQKMNRSKADQVPTDFTSVELGQKMQIQWEQMLRAGLITKKKYDNLTLNPDHISKYAMKGFINRQLVETRQVIKLATNLLMEQYGEDNIELITVKSGLTHQMRTEFDFPKNRNLNNHHHAFDAYLTAFVGLYLLKRYPKLKPYFVYGEYQKASQQDKWRNFNFLNGLKKDELVDENTEAVIWDKESGLAYLNKIYQFKKILVTRGVHENSGALFNQTLYAAKDDKASGQGGKQLIPAKQDRSTALYGGYSGKTVAYMCIVRIKNKKGDLYKVCGVETSWLAQLKQLTDEDSQKAFLEQKISPQFTKVKKQKGNIIEAVEEFEVIAPHILINQRFFDNGQELTLGSATYKHNEQELILDKTAVKLLNGALPLTQSEELAEQVYDEILDQVMHYFPLYDTNQFRAKLSTGKAAFMKLPWKSQWDGNKMVQVGQQVILDRILIGLHANAAMSDLKVLKMTTPFGMIQQSTGITLSADTQIIYQSPTGLFERRVALRDL

SEQ ID NO: 278 - protein, 1126 aa, Lactobacillus farciminis
  source 1..1126: note = Lactobacillus farciminis KCTC 3681
MADRISLGLDIGVASVGFSVLDIDKGKVIELGARLFSATVAAGNQDRRDMRGARRLLNRNKQRRQDTGKLFKKFGLIDDFDKGSFYDNFNQNLNPYELRVKGLTEQLTKEELAESLYQIVKHRGISYALKDADVDEGGTDYSVSLKINSQELAEKTPAQIQLQRLNDYGKVRGQVVIGDDPDNQKVLLNVFPTSAYEKEAKQIIATQQQFYPESLTDKFTEEYCQILTRKRDYFVGPGNEKSRTDYGIYKTDGRTLDNLFEELIGHDKIYPEELRASAASYTAQLFNVLNDLNNLRILNYEDGKLTKEDKEKIIAEIKNNTTTINMLNVIKKVAGCSKDDIKGFRVNEKDKPEISSMPVYRKIHKDLLKAGVDISDWPVEFIDELSFILTLNTENGEIRKQLNNRLAPKFDFLNADLIQLIIDNKDSFEIKTNNKWHRFSVKTMNKLIPEMMERPVEQMTLLNEMGLVKKDKKRFENNKYLPYKEIAKDIFNPVASKSVREALKIVNAVLKKYGHIDYLVVEMPRDKNLKEEQDNIKEFQNKNKKAKDAAFEAFVKSVGSEQRVKEALSKNRKLQMKMRLWYQQQEIDPYNGKTIDATDLINNPDKFEIDHIIPQSISFYDSINNKTLCFASMNQVKGQKTPYEFMLEGHGQSYDKFKATVMANKNFGKAKRANYLFEENVSDIETRKRFLSRNLVDTRYSSRVVLNSLQDFFREKSADTKVTVIRGKFTSNMRKHWHIDKTRETFHHHAIDASIIAATPFLRMWKKGGTIFPVKVGEESIDIETGEILDDKNFDKAMYEEPYSGFVSEIMNADDRIKFSHQVDKKMNRKVSDATIYSTRTGKLAKDKKDAEYIVAKVKDIYSVDGFKKFKKVYDKDKTKFLLYKYDPRTFSKLERIISDCPDKVEKVQTNGKVKAVDISPFEMYRRDHGMIKKYSKKGNGPAIKQLKYLDKKLGSHIDITPANANGKHVILQSLKPWRTDVYLNHETGEYEIMGIKYSDLKFNKNEGYGIKKDKYLEIKKVEEVSEKSEFMFSLYRKDRVKVQDMKTGESVELLFWSRNFSNKKYAELKPISQAENDKKLPVYGKGRLIKRLIPKNCKIWKVNTTILGDPYYLEKESDSPKDILD

SEQ ID NO: 279 - protein, 1356 aa, Lactobacillus farciminis
  source 1..1356: note = Lactobacillus farciminis KCTC 3681
MTKKEQPYNIGLDIGTSSVGWAVTNDNYDLLNIKKKNLWGVRLFEEAQTAKETRLNRSTRRRYRRRKNRINWLNEIFSEELAKTDPSFLIRLQNSWVSKKDPDRKRDKYNLFIDGPYTDKEYYREFPTIFHLRKELILNKDKADIRLIYLALHNILKYRGNFTYEHQKFNISNLNNNLSKELIELNQQLIKYDISFPDDCDWNHISDILIGRGNATQKSSNILKDFTLDKETKKLLKEVINLILGNVAHLNTIFKTSLTKDEEKLNFSGKDIESKLDDLDSILDDDQFTVLDAANRIYSTITLNEILNGESYFSMAKVNQYENHAIDLCKLRDMWHTTKNEEAVEQSRQAYDDYINKPKYGTKELYTSLKKFLKVALPTNLAKEAEEKISKGTYLVKPRNSENGVVPYQLNKIEMEKIIDNQSQYYPFLKENKEKLLSILSFRIPYYVGPLQSAEKNPFAWMERKSNGHARPWNFDEIVDREKSSNKFIRRMTVTDSYLVGEPVLPKNSLIYQRYEVLNELNNIRITENLKTNPIGSRLTVETKQRIYNELFKKYKKVTVKKLTKWLIAQGYYKNPILIGLSQKDEFNSTLTTYLDMKKIFGSSFMEDNKNYDQIEELIEWLTIFEDKQILNEKLHSSKYSYTPDQIKKISNMRYKGWGRLSKKILMDITTETNTPQLLQLSNYSILDLMWATNNNFISIMSNDKYDFKNYIENHNLNKNEDQNISDLVNDIHVSPALKRGITQSIKIVQEIVKFMGHAPKHIFIEVTRETKKSEITTSREKRIKRLQSKLLNKANDFKPQLREYLVPNKKIQEELKKHKNDLSSERIMLYFLQNGKSLYSEESLNINKLSDYQVDHILPRTYIPDDSLENKALVLAKENQRKADDLLLNSNVIDRNLERWTYMLNNNMIGLKKFKNLTRRVITDKDKLGFIHRQLVQTSQMVKGVANILDNMYKNQGTTCIQARANLSTAFRKALSGQDDTYHFKHPELVKNRNVNDFHHAQDAYLASFLGTYRLRRFPTNEMLLMNGEYNKFYGQVKELYSKKKKLPDSRKNGFIISPLVNGTTQYDRNTGEIIWNVGFRDKILKIFNYHQCNVTRKTEIKTGQFYDQTIYSPKNPKYKKLIAQKKDMDPNIYGGFSGDNKSSITIVKIDNNKIKPVAIPIRLINDLKDKKTLQNWLEENVKHKKSIQIIKNNVPIGQIIYSKKVGLLSLNSDREVANRQQLILPPEHSALLRLLQIPDEDLDQILAFYDKNILVEILQELITKMKKFYPFYKGEREFLIANIENFNQATTSEKVNSLEELITLLHANSTSAHLIFNNIEKKAFGRKTHGLTLNNTDFIYQSVTGLYETRIHIE

SEQ ID NO: 280 - protein, 1313 aa, Lactobacillus fermentum
  source 1..1313: note = Lactobacillus fermentum 28-3-CHN
MHYLDEIFAPHLQEVDENFLRRLKQSNIHPEDPAKNQAFIGKLLFPDLLKKNERGYPTLIKMRDELPVEQRAHYPVTNIYKLREAMINEDRQFDLREVYLAVHHIMKYRGHFLNNASVDKFKVGRIDFYKSFNVLNEAYEELQNGEGSFTIEPSKVEKIGQLLLDTKMRKLNRQKAVAKLLEVKVADKEETKRNKQIATAMSKLVLGYKADFATVAMANGNEWKIDLSSETSEDEIEKFREELSDAQNDILTEITSLFSQIMLNEIVPNGMSISESMMDRYWTHERQLAEVKEYLATQPASARKEFDQVYNKYIGQAPKERGFDLEKGLKKILSKKENWKEIDELLKAGDFLPKQRTSANGVIPHQMHQQELDRIIEKQAKYYPWLATENPATGERDRHQAKYELDQLVSFRIPYYVGPLVTPEVQKATSGAKFAWAKRKEDGEITPWNLWDKIDRAESAEAFIKRMTVKDTYLLNEDVLPANSLLYQKYNVLNELNNVRVNGRRLSVGIKQDIYTELFKKKKTVKVSDVASLVMAKTRGVNKPSVEGLSDPKKFNSNLATYLDLKSIVGDKVDDNRYQTDLENIIEWRSVFEDGEIFADKLTEVEWLTDQQRSALVKKRYKGWGRLSKKLLTGIVDENGQRIIDLMWNTDQNFMQIVNQPVFKEQIDQLNQKAITNDGMTLREWVESVLDGAYTSPQNKKAIWQVVRVVEDIVKAVGNAPKSISIEFARNEGNKGEITRSRRTQLQKLFEDQAHELVKDTSLTEELEKAPDLSDRYYLYFTQGGKDMYTGDPINFDEISTKYDIDHILPQSFVKDDSLDNRVLVSRAENNKKSDRVPAKLYAAKMKPYWNQLLKQGLITQRKFENLTMDVDQNIKYRSLGFVKRQLVETRQVIKLTANILGSMYQEAGTDIIETRAGLTKQLREEFDLPKVREVNDYHHAVDAYLTTFAGQYLNRRYPKLRSFFVYGEYMKFKHGSDLKLRNFNFFHELMEGDKSQGKVVDQQTGELITTRDEVAKSFDRLLNMKYMLVSKEVHDRSDQLYGATIVTAKESGKLTSPIEIKKKRPVDLYGAYTNGTSAFMTIIKFTGNKPKYKVIGVPTTSAVGLKRVGKPGSESYNQELHRIIKSNPKVKKDFEIVVPHVSYSQLIVDDDCKFTLASDTYQHPATQLVLSKESMEIIADDFKFVKENTATADEQLVRVFDEIVNQMNHYFTIFDQRSNRQKVTKARDKFVSLPTESEYEGAKKTQVGKTEVITNLLMGLHANSAQGDLKVLGLSTFGFFQSSGGLNLSEDAMIVYQSPTGLFERRICLKDI

SEQ ID NO: 281 - protein, 1381 aa, Lactobacillus fermentum
  source 1..1381: note = Lactobacillus fermentum ATCC 14931
MDYVKEYHIGLDIGTSSIGWAVTDSQFKLMRIKGKTAIGVRLFEEGKTAAERRTFRTTRRRLKRRKWRLHYLDKIFAPHLQEVDENFLRRLKQSNIHPEDPAKNQAFIGKLLFPDLLKKNERGYPTLIKMRDELPVEQRAHYPVTNIYKLREAMINEDRQFDLREVYLAVHHIVKYRGHFLNNASVDKFKVGRIDFDKSFNVLNEAYEELQNGEGSFTIEPSKVEKIGQLLLDTKMRKLDRQKAVAKLLEVKVADKEETKRNKQIATAMSKLVLGYKADFATVAMANGNEWKIDLSSETSEDEIEKFREELSDAQNDILTEITSLFSQIMLNAIVPNGMSISESMMDRYWTHERQLAEVKEYLATQPASARKEFDQVYNKYIGQVPKEKGFDLEKGLKKILSKKENWKEIDELLKAGDFLPKQRTSANGVIPHQMHQQELDRIIEKQAKYYPWLATENPATGERDRHQAKYELDQLVSFRIPYYVGPLVTPEVQKATSGAKFAWAKRKEDGEITPWNLWDKIDRAESAEAFIKRMTVKDTYLLNEDVLPANSLLYQKYNVLNELNNVRVNGRRLSVGIKQDIYTELFKKKKTVKAGDVASLVMAKTRGVNKPSVEGLSDPKKFNSNLATYLDLKSIMGDKVDDNRYQMDLENIIEWRSVFEDGEIFADKLTEVEWLTDEQRSALVKKRYKGWGRLSKKLLTGIVDENGQRIIDLMWNTDQNFMQIVNQPVFKEQIDQLNQKAITNDGMTLRERVESVLDDAYTSPQNKKAIWQVVRVVEDIVKAVGNAPKSISIEFARNEGNKGEITRSRRTQLQKLFEDQAHELVKDTSLTEELEKAPDLSDRYYFYFTQGGKDMYTGDPINFDEISTKYDIDHILPQSFVKDDSLDNRVLVSRAENNKKSDRVPAKLYAAKMKPYWNQLLKQGLITQRKFENLTMDVDQNIKYRSLGFVKRQLVETRQVIKLTANILGSMYQEAGTDIIETRAGLTKQLREEFDLPKVREVNDYHHAVDAYLTTFAGQYLNRRYPKLRSFFVYGEYMKFKHGSDLKLRNFNFFHELMEGDKSQGKVVDQQTGELITTRDEVAKSFDRLLNMKYMLVSKEVHDRSDQLYGATIVTAKESGKLTSPIEIKKNRPVDLYGAYTNGTSAFMTIIKFTGNKPKYKVIGVPTTSAVGLKRVGKPGSESYNQELHRIIKSNPKVKKDFEIVVPHVSYSQLIVDGDCKFTLASDTYQHPATQLVLSKESMEIIADDFKFVKENPATADEQLVRVFDEIVNQMNHYFTIFDQRSNRQKVTKARDKFVSLPTESEYEGAKKTQVGKTEVITNLLMGLHANAAQGDLKVLGLSTFGFFQSSGGLNLSEDAMIVYQSPTGLFERRICLKDI

SEQ ID NO: 282 - protein, 1327 aa, Lactobacillus florum
  source 1..1327: note = Lactobacillus florum 2F
MTEQQQPYNIGLDIGTSSIGWAVTDQNDKLLHIRGHNGIGVRLFKEGESAAERRGFRTTRRRLSRRRWRLRFLDRIFDAELAKVDPNFLARLKQSNISPLDPNKQMFGNILFDDPQFDDQKFHQQYPTIYHLRSALAQPDAPQADVRLIYLALHHMIKFRGHFLNGAAVEKFHGGQLHLESEFQELNQIFSNQQRDHVQLQTSSLDEVATILKDNQRTPSDRQRELSARLFVPVDKTIDKENKKLATELLKAVLGLKAKFDVILGVEATDPQAFKLQFSSDDFDDKIAELASELTDEANEILTVLQRLYFSLNLADILTNRQTKQVADSISTAMINRYDDHKHHLKMLKELEAQVTQEQRDGLKKAYDEYIDGDKPTIDTFYTNIKKNLDDSELANQIKSLIDLQAFMPKQRSKENGSIPHQLHQRELDQLIEVQGKYYPWLLAAKDKLDALIAFRVPYYVGPMIDPNQSDDPQNTKFAWMVRKEAGEITPWNFEEKVDKTSSATNFIKRMTTTDTYLLGEPVLPKNSLLYQQFTVLNELNKLKVNGKALTVDQKKYLYEHVCKKQRRVTLKKLSDCLMARGDFPMGAIFTGTTDQKNMNNTLKTYQDFQEIFGDEIDNPDRQVDFEKMIEWSAIFEDREIFKLKLAELNWLTSEQLERVSKKRYQGWGRLSQKLLTHIVNENGERIIDQLWNTNQNFMEIMGQDSVKQAIQEHNGANVAQTGINETIDELYTSPQNKKAIRQILLVVDDIKKAVGYAPANIMMEFAREDRDDHRLIASRARQLEKTYQEISKNWFDNESVTQELKDQIKNKTKFTDRLYLYFIQGGIDLYTGHPLNIDQLSSYDIDHILPQSFLLDNSLNNRVLTSQAENRVHKEDRLPGETVANKMRPTWKMMREQGLMTQRKYNNLTLKPDQISKFNNRGQFINRQLVETRQVIKLAADIMSQKYQADQTKVVTVKANLTHHMREKFNFYKSRNVNDYHHAFDAYLTLFVGNWLLKEYPKLQPYFVYGDFAKTGTNNLKSFNFLYRFERDHKLNDKGAIDTDKDQQLGYMKRIYRFKKMLVTKQLETNEGALYGQTLYPAPKNDKKTRNLINSKKNRPSDIYGGYSNENGSFLTLVKLKKGSKYDYRLVAVPVSKISEIKESELATIEKAIAPQFLKSSGKYRDFQVVLSKILINQKVIDDGMIFTIGSKSYKHNAKQVVLSDNSIQIVSTLSRISDKEKLITVFDEIVDITSKYLPWYKVNDVEKTKMLFRQMQDIDEMKKIIDNSLIGLHCNASITDLGKVGLSKYWGRFVLTAGISLTVDAQLIYQSPTGLFEHRVKVSDL

SEQ ID NO: 283 - protein, 1391 aa, Lactobacillus gasseri
  source 1..1391: note = Lactobacillus gasseri JV-V03
MTKIKNEYIVGLDVGTNSCGWVAMDFQNTILRMHGKTAIGSHLFDAGNSAADRRAFRTTRRRIKRRKWRLKLLEEIFDPYMTEVDPYFFARLKESGLSPLDKRKNVSSIVFPTALEDKKFYCNYPTIYHLRYDLMSEDKKFDLREIYLAIHHIVKYRGNFLYNTPVKDFEASKIDVKDSLEKLNELYERLDSEFTVELDSSNALEIEKIIRDKKVFKINKVKSIHQLLSLKTENKERTKLIKDVSKQIINAILGYKTKFETILLKNISKDEADDWEFKLTDVDADNKFENLIGDLNENEQEILLEIRNLANAITLSNIVEEGKTLSESMIDKYNKHSDDLELLKQVISDHPDRDKAKKLALAYDLYVNNRHGKLLQAKDVLGSKKTLSKEDFYKEVKKNLDDSKASQEILDTIALDSFMPKQRTNENGVIPYQLHQLELDRIIKNQGKYYPFLKEVNPVSSHLKEAPYKLDELIRFRVPYYVGPLISPNESTKNKQTKKNQNFAWMIRKEQGQITPWNFDQKVDRMASANKFIKRMTTKDTYLLGEDVLPANSLLYQKFTVLNELNNIKINGKRISVPLKEELYNNLFKKNSTVTTNKLKSYLKENYNLINVEIKGLADEKKFNSGLTTYNKLRNLKIFDQQLDDLNYDKDFERIIEWSTIFEDKAIYKDKLKTIKWLSDRQIDKLSKIRMQGWGQLSKKLLSQLTDNNGQTIIEQLWDSQNNFMQIVNQSDFKDAIAVANQNLLVNTSVEDILNEAYTSPANKKAIRQVVKVVDDIVKAASGKVPKQIAIEFTRDADDKAKISQTRANKLRKVYKELSNELASETIRNELERVAKDQKLLKDKYYLYFMQLGRDAYTGEPINIDDLGQYDIDHILPQSFIKDDSLENRVLVKKAVNNGKSDNVPVKLYGNRMAADLGMTIRHMWEKWKDQGLITKTKYNNLIIDPDKINKYESSGFIHRQLVETSQIIKLVSTILQSKYPDTEIIVVKARYNHYLRKHLNLYKSREVNDYHHAIDAYLSAICGNLLYQVYPYLRPFFVYGQYKKFSSDPKKEKIIYDKTRKYNFISQIFENKSNDIISLETKKKVFDKKDIIEKLKHAYNYKYMLVSRETETHDQEMFKMTVYPRLSRDTKKSRNLISKKKDMPTEIYGGYTNNSDAYMVIARINKKKGTEYRVFGVPMRELVNLRKAEKNGRYNAYLKQVLEPEIMYSKNGKKNKTISSFEIVKAKVPYKQVILDGDKKFMLASSTYVQNAKQLTLSQNSMQAITDNCENDTEEEKALEEKALIEAYDEILTNIDKYLPLFDINKFREKLHAGREKFINLSLDVKKDTILQVLNGLHDNAVMPKIKSLGLSTPLGFMQFSSGVPLSENAKLIYQSPTGLFEKRVKISDL

SEQ ID NO: 284 - protein, 1386 aa, Lactobacillus hominis
  source 1..1386: note = Lactobacillus hominis CRBIP 24.179
MTKITEDYIVGLDIGTNSCGWVAMDSKNTILRMHGKTAIGSHLFDAGNSAADRRAFRTTRRRIKRRKWRLKLLEEIFDSHLAKVDPYFFARLKESGLSPLDTRKNVSSIIYPTSLEDKKFYVDNPTIYHLRYKLMTEDRKFDLREVYLAIHHIVKYRGNFLYNTPVKAFEASKIDVKGSLKKLNELYEGLDSEFNVELDSNNALEIENIIRDKKIFKINKVKEINQLLSLKTEDKERTKLMKDVSKQIVNAILGYKTKFETILLKDVSKDEADDWEFKLTDVDADNKFENLIGDLNENEQEILLVIRKLANAITLSNIVEEGKTLSESMKDKYKKHSDDLKLLKQVISDHPDRDKAKKLALAYDLYVNNRHGKILQAKDILEKKKTLSKEDFYKEIKKNLDDSKESQEILDAISLDSFMPKQRTNENGVIPYQLHQLELDKIIENQGKYYPFLKEVNPVSSHLKQAPYKLDELIRFRVPYYVGPLISPNESTKNKQTKKNQNFAWMIRKEQGQITPWNFDQKVDRMASANKFIKRMTTIDTYLLGEDVLPANSLLYQKFTVLNELNNVKINGKRISVPLKQELYNNLFKKNSTVTTNKLKSYLKENYKLIKVEIKGLSDEKKFNSGLTTYNKLKNLKIFDQQIDDPNYNKDFERIIEWSTIFEDKAIYKEKLKTIDWLSDRQIDKLSKIRMQGWGQLSKKLLSQLTDNNGQTIIEQLWDSQNNFMQIVNQADFKDAIAVANQNLLVDTSVEDILNEAYTSPANKKAIRQVVKVVDDIVKATSGKVPKQIAIEFTRDADDNAKISQSRANKLRKVYKEMSNELASETIRNELERVAKDQKLLKDKHYLYFMQLGRDAYTGELIDIDNLEQYDIDHVLPQSFIKDDSLENRVLVKKAVNNGKSDNVPVKLYGNRMATDLGMTIRHMWEKWKEQGLITKTKYNNLIIDPDKINKYESSGFIHRQLVETSQIIKLVSTILQSKYPDTEIIVVKARYNHYLRKRLNLYKSREVNDYHHAIDAYLSAICGNLLYQVYPYLRPFFVYGQYKKFSSEPEKEKIIYDKTRRYNFISQIFENKDNDIISRETKKKVFDKKDIIEKLKRAYNYKYMLVSRETETHDQEMFKMTVYPRLSRDTKKSRNLIPKKKDMPTEIYGGYTNNSDAYMIIARINKKKGPEYRVFGVPMRELVNLRKAEKNGHYKAYLKQVLEPEIMYSKNGKKNKTISSFEIVKAKVPYKQVILDGDKKFMLASSTYVQNAKQLTLSQYSMQAITDNCENDTEEEKALVEAYDEILTNIDKYLPLFDINKFREKLHAGREKFVDLPLAEKKETILQVLNGLHDNAVMPKIKSLGLSTPLGFMQFHTGVSLSENAKLIYQSPTGLFEKRLKISDL

SEQ ID NO: 285 - protein, 1369 aa, Lactobacillus iners
  source 1..1369: note = Lactobacillus iners LactinV 11V1-d
MNNNYYLGLDLGTNSVGWAVTDDHYNIIKFHGKHMWGMRLFEEAETAKDRRLHRQARRRRQRLVERINLLEELFDKEISKVDQGFFARKKESDLHFEDKTTKSEYALFNDKSYTDRDYYKQYPTIFHLIMDLIENDKKRDIRLVYLACHYLIKHRGHFIFDGKNFTVDNSFENLLDKLITYLKDNDDITLSFPKDQLINIFKNSNLNSTEKSDQLKPFFGRTNLEKGIIKLLSGGKQDLSNMFRDETLKNSNYKNLKFSDNRFDDERDGYAADLGDRIDLLILLKQIYDASILESMMSQARVSIDGHKYISSAKVCAYEKHKSDLKRLKSLIKKYLPSEYNNIFRKITEKDNYVAYSKSNITNNKREKALKYVKYVDFTKYLTKKLKTIKTQDAEDDQEIFEIKGELEKQSFLPKQRTLDNSIIPYQLHLMELKKILDNQSKYYDFLLAKDDQEGITVKDKIISLLTFRLPYYIGPVNPAVHGKFAWVKRLANGKVTPWNYKEKIDIDASHEEFIKTKLSKCSFLIGCDVLPKNSLLYQKYMVLSELNTIKFNGVNISEKLKDDIYQNLFKNIQKVTKKRLQNYIKEHENIIGDVIVTGIDNAFKQGLVSYLKFKKIIGDKVDDDRYQKVLEKIIRDITLYDECAGKKIKKEYKDSDLFTEDELNKIVKLTFNDWGRLSAELLDQLEGEDTVSGETGKIIEFMQKHNYNLMQLMSKKFTFKSKIDEINKSYYQHDKFNYKSMIDSLYVSPATKRILWQSLKVVHEISKIMKHDPEKIFIEMARSKEDHPKRKLSRKADLKQVYKDSKKQIISIIGKDKYQDLSNELDNKDDRDLRWDNLYLYYTQLGRSMYSLKPIDISELMNKNLYDQDHIFPKSKKYDDSIENRVLVEKELNVKKSDIYPISDANIIPQKIKGQVESFWKMLYDHKLIGDKKYARLIRSKAFTDDELAGFIARQLVETRQATKETADLLKRLCPKSRIVYAKAQNASIFRQKFDIPKSRTINDLHHAQDAYLNIVVGNIFDTKFTQDPRNFIKNTKDSRNYNLEKIYDYNVERNNYVAWIAPDGETNGTIANVKCNLSTKDFRVTRPSFYKKGALFNQNLSRKGSNLAPIKEHSPKSNPLKYGGYSGKNNSFFVVVAGKDNKGKDIVKLIPVNTLIYNKMLHCDYKAKQELLTSYVANNFAINNFRIVKDDIKMYSLVKIDGAYYYLVGGTDERIEVKNAMQLLLSKDSIKAVKILEKESKDQFANIKNYKDIDIKLGRTFNEVVSKYTNSVFGKSMLISDKYRKDIFKSVEKSILEFNHLDTIGKADNLLKFVTLMRPSGSAHSLKMVGLIERIRKSNVISNFNEFKLINQSVTGLFENEEDLLKL

SEQ ID NO: 286 - protein, 1391 aa, Lactobacillus jensenii
  source 1..1391: note = Lactobacillus jensenii 269-3
MKEIKDYIIGLDIGTNSCGYVVTDKQNNILKLKGKTAIGARLFKEGEAAADRRAFRTTRRRLARRRWRLSLLEEIFDEEMNKVDPSFFRRLKESDYSPKDRRKQFNSIVFESSEADKAFYEKYPTIYHLRNALMHDNQKHDLREIFLAVHHIVKYRGNFLREDSVKAFKAAKFTLQGEDGIGPVDKLNDLLKEIYIEAAPELATDNLSKIEDIIKDKKLYKQDKLKQIANLLPKAVDSKDKAKLNKDIAKQVANALMGYMFRLDTLFSFTDVDVKDYKLKFSDANIDESLDALTSLLTDAQIEFVLELQSIYNTIVLNEIVPDGMSLSESMVKKYDDHKKDLKLYKEYIDSLSDQKKAKQLEAAYALYVNYRKADLLAAKKLFEKKKIGDKKFVDVISNFEVFGKFVSDNLDDSELANKIKARLDLGEFLPKQRTNQNGVIPYQLHQVELTQILEKQGKYYPFLITPNPVESHRNNAPYEISELVSFRVPYYVGPLIDNQSIKDKQNKNKFAWMVRQKQGQITPWNFEEMVDTTESANQFIKRMTRKDTYLLAEDVLPKSSLIYQKFMILDELNRIKIDGKKLTSKLKHDIFEKLFKKQKSINLDNLKNYLLAEGNIPGLIEGLSDGINFNNSFSTYIDYRNIFGDEIDNPNKQADFEKMIEWSTVFEDRKIFKRKLKEITWLTPEQIKQVSSKRYSGWGRLSKKLLTQITDENGVNILQRLWNEPETLTEVLANPVIKRKISEANSLFVQINKVENILDDAYTSPQNKKAIRQVIRVVDDIIAAAHGKKPSQIAIEFARSSQNKAKVPDTRKKQLDKIYNKISSEILDSSIKNELKNLKSNKYLSKDKLFLYFKQMGRDAYTGDKLSLDQLQNYDIDHIFPRSFIKDDSLDNRVLTQKPINAKKSDYGIPALEFGNKYVPDLGITVKEMWKLWQENGLISKSKLINLCTNPKKIGSKRASGFINRQLVETSQVIKLVAIILQAEFPDTEIIEVKALQNTTLRESFHLYKNRSVNDYHHAIDAYLTTIVGNYLYQVYPKLRPYFVYGQFKKFNQEKNIDILKRLKNFNFLRQLIFNTDDNIYISGTKEIVFNKKDIIHKLETAYGYKYMNISRECYQETSSLFNQTLYAHNSSVKNSLIPKKKGLPTEIYGGYSGNKDSFFVLVKIVKKRTNLYRIVGIPTRELAKLNSSNNYNQALNKIVESKLCLKETESFKILIKRLLYGTLIVDNGQKFRIGSFKEKHNVQQLVLQLKSMKYIKFYIDGGQNYFTDVERKKLEKQDRDKCLLYVFDDIMNVVNKRFTLFDMSKYEKDGDSLREKFNCLDFNDKVSILSDLLKAFHANSDRTSITKLKITNLGRHQAGKNGITLTTNAQIIYQSPTGLFERRIKIKDL

SEQ ID NO: 287 - protein, 1395 aa, Lactobacillus jensenii
  source 1..1395: note = Lactobacillus jensenii 27-2-CHN
MKEIKDYIIGLDIGTNSCGYVVTDKQNNILKLKGKTAIGARLFKEGQAAADRRSFRTTRRRLARRHWRLGLLEEIFDPEMEKIDPNFFRRLKESDYSPKDSRKQFNAIVFKSIKADKRFYKKYPTIYHLRNALMHDNQKHDLREIFMAVHHIVKYRGNFLREDSVNAFKAAKFSLRGEDGIGPVDKLNDLLKEIYSEYSPELATNNLSKIEDIIKDKNLYKQDKLKQVATLLIKEADSKDKAKLNKDIAKQVANSFMGYMFRLDTLFSLTDVDVKDYKLKFSDANIDESLDDLTSLLTDAQIEFVLELQSIYNTIVLNEIVPDGMSLSESMIKKYDDHKEDLKIFKEYIDSLSDQKKAKKLLSAYNLYVNYRKSDLVEAKNLFKNKKVGDKNFADVISNFEVFGKFVSDNLDDSELANKIKARLDLGEFLPKQRTNQNGVIPYQLHQVELTQILEKQGKYYPFLITPNPVESHRNNAPYEISELVSFRVPYYVGPLIDNQSIKDKQNKNKFAWMVRQKQGQITPWNLEEMVDTTESANQFIKRMTRKDTYLLAEDVLPKSSLVYQKFMILDELNRIKIDGKKLTSELKHDIFEKLFKKQKSINLDNLKNYLLVEGNIPGLIEGLSDGINFNNSFSTYIDYRNIFGDEIDNPNKQADFEKMIEWSTVFEDRKIFKRKLKEITWLTSEQIKQVSSKRYSGWGRLSKKLLTQITDENGVNILQRLWNEPETLTEVLANPVIKRKIVEANSSFTKAKDMKDILVEAYTSPQNKKAIRQVMRVVDDIIAAAHGKKPSQIAIEFAREDQDNPQMTKSRKAQLDQIYAKISDEFLDDAVKNELKNMKDNKPLAKDKVFLYFKQMGRDAYSGEKLSLDNLQDYDIDHIYPQSFIKDDSFDNRVLVQRAYNNGKSDNVPVLLFGNKIAAGLGITIRQMWKKWLELGLISKRKFNNLITDPEKISRNMASGFVNRQLVETSQVIKLVANILQAKLPDTEIIEVKASYNSILRKEFNLYKSREVNDYHHAIDAYLTTIVGNYLYQVYPKLRPYFVYGQFKKFGKAENQEDDPVKKIKKFNFIYQLIWGKDDAICISHTNQQVFSKKDIIDKLTTAYNFKYMNISHAVYTRNNNMFKQTLFPIIERTTAKTKSLIPKKLDRPTDIYGGYSNNNDAYLALVKVDKKRGSEYRVVGIPMRAAAMLKASKNYDEDLRKVIEPMVMFDKNGKAKRGIEGFRVLVGKMPFKQAVLDGNKKFMLTGTVDTPNLKQLVLSQQNMKYILDYIEDVDCRKHKFGDKVQNPDKCLLEVFDEIIEIVDKYFELFDSRDFREKLRNSRNKFIKLEASKKADTILAILKGLQAKSTRATIKELNISDFGRIITSSISPEAQLIYQSPTGLFERRVKVKDL

SEQ ID NO: 288 - protein, 1375 aa, Lactobacillus johnsonii
MTKIKDDYIVGLDIGTDSCGWVAMNSNNDILKLQGKTAIGSRLFEGGKSAAERRLFRTTHRRIKRRRWRLKLLEEFFDPYMAEVDPYFFARLKESGLSPLDKRKTVSSIVFPTSAEDKKFYDDYPTIYHLRYKLMTEDEKFDLREVYLAIHHIIKYRGNFLYNTSVKDFKASKIDVKSSIEKLNELYENLGLDLNVEFNISNTAEIEKVLKDKQIFKRDKVKKIAELFAIKTDNKEQSKRIKDISKQVANAVLGYKTRFDTIALKEISKDELSDWNFKLSDIDADSKFEALMGNLDENEQAILLTIKELFNEVTLNGIVEDGNTLSESMINKYNDHRDDLKLLKEVIENHIDRKKAKELALAYDLYVNNRHGQLLQAKKKLGKIKPRSKEDFYKVVNKNLDDSRASKEIKKKIELDSFMPKQRTNANGVIPYQLQQLELDKIIENQSKYYPFLKEINPVSSHLKEAPYKLDELIRFRVPYYVGPLISPNESTKDIQTKKNQNFAWMIRKEEGRITPWNFDQKVDRIESANKFIKRMTTKDTYLFGEDVLPANSLLYQKFTVLNELNNIRINGKRISVDLKQEIYENLFKKHTTVTVKKLENYLKENHNLVKVEIKGLADEKKFNSGLTTYNRFKNLNIFDNQIDDLKYRNDFEKIIEWSTIFEDKSIYKEKLRSIDWLNEKQINALSNIRLQGWGRLSKKLLAQLHDHNGQTIIEQLWDSQNNFMQIVTQADFKDAIAKANQNLLVATSVEDILNNAYTSPANKKAIRQVIKVVDDIVKAASGKVPKQIAIEFTRDADENPKRSQTRGSKLQKVYKDLSTELASKTIAEELNEAIKDKKLVQDKYYLYFMQLGRDAYTGEPINIDEIQKYDIDHILPQSFIKDDALDNRVLVSRAVNNGKSDNVPVKLFGNEMAANLGMTIRKMWEEWKNIGLISKTKYNNLLTDPDHINKYKSAGFIRRQLVETSQIIKLVSTILQSRYPNTEIITVKAKYNHYLREKFDLYKSREVNDYHHAIDAYLSAICGNLLYQNYPNLRPFFVYGQYKKFSSDPDKEKAIFNKTRKFSFISQLLKNKSENSKEIAKKLKRAYQFKYMLVSRETETRDQEMFKMTVYPRFSHDTVKAPRNLIPKKMGMSPDIYGGYTNNSDAYMVIVRIDKKKGTEYKILGIPTRELVNLKKAEKEDHYKSYLKEILTPRILYNKNGKRDKKITSFEIVKSKIPYKQVIQDGDKKFMLGSSTYVYNAKQLTLSTESMKAITNNFDKDSDENDALIKAYDEILDKVDKYLPLFDINKFREKLHSGREKFIKLSLEDKKDTILKVLEGLHDNAVMTKIPTIGLSTPLGFMQFPNGVILSENAKLIYQSPTGLFKKSVKISDL

SEQ ID NO: 289 - protein, 1382 aa, Lactobacillus mucosae
  source 1..1382: note = Lactobacillus mucosae LM1
MDIGTNSIGWTAIDDHFSLLRVKGKNAIGVRTFKEGETAADRRGFRTARRRLSRRRWRLQFLDEFFAPYLAEVDPNFLARLKQSDISAKDPAKNQEYMGKLLFPDQEAASDGNGYPTLIQMRKAMPAEKAADFPVFNIYQLRYALMNEKRKFDLREIYLAVHHIVKYRGNFLNNTSVDKFKADQIDFNKSFETLNDLFRQVQPIAPFQIDLTKVDELGKLLLDTKQKKLDRQKAVAKLLPLIEDGTDKEIVKAHQQTAREISKLILGYKAKVGLILQNNLDQTLDMSTENSDDQLMQIAEELDDYQMELINQLSLLYSQIMLNEIVPNGETVSASMLNRYYKHRCQLKELKDYGAAQDKKTREQLDHLYAEYIGQIPKDSKFDFTKDLKKLMDKSDLGQKIKDEIEAGDYLPKQRTSANGVIPHQMHQQELDQIIENQKEYYPWLAEPNPVEKNIKNAKYKLDQLVSFRVPYYVGPMITLADQQKTSKASFAWAVRKKAGKITPWNFYDMIDREKSANNFIKRMTNKDTYLLSEDVLPASSLLYQKFTVLNELNNIRVNGRKLQPALKQAIYTDLFQKRKTVNLKTLTNFLAIHEPTLTKPKIEGLSNGRSFNSSLGTYIDMSKILGDSLDDLNYRDDIEKIIEWSTVFEDSEIYGVKLQEIQWLTNEQREKLVRKRYQGWGRLSKKLLTGITDENGQRIIDLMWDTSKNFMQIVHQPVFEEQIAELNQQLLQDADKAPLEVVDDILADAYTSPQNKKAIRQVVKVVADVVKAVGNAPASISIEFARNEDRNKELKNSRRHSIEKLYHETAEKLVKQTNLLEELGNVKDLNDRYYLYFTQAGRDMYDGTPINIDEISTHYEIDHILPQSFLKDNSLDNRVLVKKSENAAKSDRVPAKLYGAKMRAFWKQLKESQLISNRKYLNLTTDPEQVDKYQMQGFVHRQLVETRQIIKLAANIFGSLYPDSAVIETRAELTKQLREKFSLYKVRDVNDYHHAVDAYLTAFAGHYLYQRYPKLRPMFVYGDYAKIYADDLKRLRSVNLFHDLEKDQYNSGTAVNPETKEKIVDVDWLSDYVSKIQHFKYMLISKAVYTQHGQLYGATILPVAQVDKISAPIGIKDDKPVDIYGAYTNEVAAYMAIVRVNGKKPKYKVVSVPVRMLQRLKMAEQKGHDQYMQTLHDVLLRNFTSLKKNRKTGLKEAVVKDFDVLVPCVRYNQLVIDGDTKFTLGSATYQHNAKQLVLCNHSLETLANNFEYVRKHPDEADERMIMLYDDILDQVNHYFTLYDKNKFREKLNAGRDKYLKLPTFSQFENNKKTAIGKSEAIINILRGLHANAAITNLKCLGVSTPFGQLQSPSGIELSENAKLVYQSPTGLFSREVLLKDL

SEQ ID NO: 290 - protein, 1362 aa, Lactobacillus paracasei
  source 1..1362: note = Lactobacillus paracasei subsp. paracasei 8700:2
MTKLGKPYGIGVDIGSNSIGFAAVDENSHLIRLKGKTVIGARLFEEGKAAAKRRAGRTTRRRLSRNRWRLSFLRDFFESHITPTDPNFFMRQKYSEISPKDKARYKYEKRLFNDRTDAEFYQQYSTMYHLRNRLMTDPSRADVREIYFAIHHILKSRGHFLTPGDAKDFNTNDVALDEIFPALQDAYAQVYPDLGITFDEDKANEFKTILLNEIATSIDTQRALVKLLLAEEDDKDILKQQKQVLTEFAKAVVGLKTKLNLALGTEVDSSEATAWNFSLGQLDDKWAGIESAMTDEGTEILDQIRDLYRARLLNGIVPTGKTLSQAKVDDYTQHHEDLQLFKAYLKQLEDDGTAKAIRQLYDRYIDGDDAAPFLRENFVKALTKDVTAHPNTKSPELLERLAQPDFMLKQRNKANGAIPVQMQQRELDQIIKNQAVYYDWLAAPNPVEKHRKSMPYQLDELLNFRIPYYVGPLVTAKEQKAAQGGVFAWMVRKDPEGNITPYNFDEKVDREASANTFIQRMKTTDTYLIGEDVLPKQSLLYQRYEVLNELNNVRVNNEKLSIEQKQQVIRELFERHNSVTIKQFAENLRAHGDYAHIPEIRGLADEKRFLSSLSTYRQLKSLLPEAIDDPAKQADIENIIAWSTVFEDAAIFKTKLKEISWLGSEAITKLSNIRYRGWGQFSRKFLNGLTLGNGHTIIQELLLSTNNLMQILTDETLQKKMTELNADKLKTANINDAIDNAYTSPSNKKALRQVLRVVDDIKRAADGQDPSWLYVETADGGGTPGKRTRARQHQLQEIYANAAHELIDTAVRGELEDKISDKADFNDRLVLYFMQGGRDIYTGAPLNIDQLSSYDIDHILPQSLIKDNSLDNRVLVHAIINREKNATFASTIYAQKMNATWRQWHEAGLISGRKLRNLQMRPDQIDKYASGFVARQLVETRQIIKLTEQIVAAQYPDTKIIAVKAGLSHQLREELEFPKNRDVNHYHHAFDAFLAARIGTYLLKRFPNLQAFFTYGKFTKADVKKLRGFNFIRDITHAEDKIVAKDTGEVVWDKQRDVDELDRIYNFKRMLITHEVRFETADLFKQTVYGARDSKEAGGSKQLIPKKKGYPVDIYGGYFRENTAYLAVVKVTKKTETIFKVVKIATSQVAALNKARSRSTAEELSVLTELLKPKFSKVGKNGKITDTPFEVVLPRVPREQLFYNAKYGFFMVNSDTMFHNFQEIWVSRSDQKILQQIRKAKIDYPNVDQDLDNLFHNLADQIVKYFDLYSIAGFKEKISQSQNTFNDLAVDDTDQSVGKITVINELLKGAQANGMTGSLKVLKISTPFGFTQDKSGVLTKDSSIIYQSPTGLFERSVRLTDL

SEQ ID NO: 291 - protein, 1382 aa, Lactobacillus pentosus
  source 1..1382: note = Lactobacillus pentosus IG1
MKKIVNYNLGLDIGTSSIGYAAIDDQGRPVRHQNKTVMGVRLFKEGKTAESTRIFRGTRRRLSHRHWRLGYLDRIFDNEIAKVDENFLPRLKASKRARSDEKRSFRGSLLFPETGDDAYYQKYPTIYHLRYALITQKKQFDIRLIYLALHHMIKYRGNFLDTTPVSAFNIHDIDLTDQFASLNDCYQLLDMDFEFQFDLNNIEQVQKLLLDETLSKTKRQAAVSKVLVMSTGNKAFDDQQNGIASEFIKALLGGPFDLSKILNLSVADVKSWKLHMTDKDVDDTLNSLVEELDENHKQIVNLLQMIYSQVMMLGLLNGQQSISASMIERYDDHAKHWAALKKLLPALGEQEQSTIIHAYTAYTGHSRTKQLSRAEFYTKVNSILKKHENIAEATGLIELIDRNEFMPKQRDAVNGVIPHQLHQRELQLIIQNQQKYYPFLAAKAYPDADETMIEQLLSFRVPYYAGPLVDRDFINESSDQEQAMQNTKFSWLKRREAGEITPWNFEQKVDVQETANRFIKRLTTKDTYLMTEDVLPKESLIYQRFEVLNELNAIRINDRRLTAENKQLAFQQLFMAGNTKNVSIKKFRNFVFDSLKFPEKVKITGFAGQHNFLAKLSTYHDFKKIFGERVDHTDLQPDFERIVEWCTIFEDRHIYREKLKEIQWLSQSEIDQLVLIRNHGWGRLSKRLLTGIRDSDGRTVMDQLWFGTDNFMRIISQSDFAAAIANENRTQLNQHGLEDVLDSAFMSPQNKKAIRQVLKVVDDIEQTLGCPPKKVMIEFTRSPDKKKQRTVTRLEKVQQAYKAVADQLAGQSIVSELDQYANTHSKLSDTYYLYFMQLGRDLYSGKPIDIDSPMLDDDHILPRAFMKDNSLDNRALTEKPINNTKAAKFPSKVFGQQKEVTDFWKLLRRCGLMSNIKEKHLYLDPDNVDKWTRRGFIHRQLVETSQVIKIVANILNDRYQQSQTEVLEVPARLGTELRECFGWYKVREVNDYHHVFDAYLAAFIGNYLYRRYPKLQPYFVYGNFAELNKAQLKNIKSFNFLYNITDNKRVVKDIETGQTLWDDQIRQQIQHIYEYKYMLTSHEAFTQHKELYGQTIYPRREFKPGTLKAIKQDQPQELYGGYKNLTAAYMCIVKIQARKRRAAEYRVVRVATESLSALQQAKRLGVQAYERCLRQELVRNNEILRTNADPNSAPREFEVLLDRVLCHQMIISDGQKYLLGSHAYKINCMQLVLSNNSMKILSTSIVKLKQMTNEPLVQVYREILDVVNKYFTLYDVNSFRENLNQFFDKFRTLPITNEYESSKSGKKLIHRGQLETLTLILRGLHANSDKVQYGDQSTLLGGFQTKDGIKLSKDSVIQYTSPAGLNVRTVKLRDLEQKEAQK

SEQ ID NO: 292 - protein, 1361 aa, Lactobacillus pentosus
  source 1..1361: note = Lactobacillus pentosus KCA1
MNEPYGVGLDIGTNSVGWTVVDMNGRVRKVKGKTALGARLFKEGATAEDRRGFRTTRRRLKRVKWRLRLLREFFDQPISKIDPNFFARRKYSDISPRDPNYNGLAKTLFNDRTDKEFYDDYATIYHLRDKLMTSNRKFDIREIYLAIHHIVKYRGNFLRTGPASQYGSASLHLATSFQKLNDLFAQSEETLNLKLVTDEALLQQIQQILVRTDLSRSEQQRQIWPLMAVLTGASAAEKKRQKNVVVELSKALVGLKAKMNVVTLTEVDAAVVKDWTFTMEESQDKLPEIEEQLSEVGQQIMDEVIQLYASVNLAQLIPAGKRFSQHMVEKYKHHEKNLELLKAYIHSQSDSKRGREIRATYDRYIDGVDSKPVTQEMFYKDLMKYVEADATSNHLAAEIKDEIDSEQFMPKLRTKQNGSIPYQVQQYELDQIISHQKKYYPWLGEENPVAERRGKFPYKLDELVGFRVPYYVGPLITKEDQQATSGAGFAWMVRKADGPITPWNFDQKVDRIASATAFIQRMQTTDTYLIGEDVLPARSLIYQRFMVLNELNNMRVEDRKLAPQQKQRLYNQVFKQHQHVSVKNIQQNLMDAGEYRKTPQITGLADPKGFNSSLSTYHDFKKILLEAIADEHKRADIEKIILWSTTFEDSAIFKQKLEEVAWLTDAQRKQLSGLRYRGWGQLSHKLLTAFKDDKGRSIMDGLWETSDNFMQLRKQPAIETQIKEANQANLTDADIQDTINELYTSPQNKKAIREVMLVLDDIKNAMHGQTPSWIFVEAARGGGVAGRRTQSRSSQIVEAYKGTAKEIVSEKVQHELNEKIKAKADFNTRLVLYFLQNGRDLYTNEAINIDRLSEYDIDHILPQSLVKDDSLDNRVLTSARINREKNDTFASEKFGRKMGAQWRELHRNGLMTQRKLKHLLMRPDEISKHATDFINRQLVETRQVIKLVEELISSEYPAASIVAVKANLTHQFRQTFNFPKLREVNDYHHAFDASLTAFIGMYLLKQYPKLERFFVYGKFAKQPINLTRFNIIRKLAVAEKPIANIETGEILWDKTADIKYFEKLYNYKRLLVTHEVRENYGAMFKQTLFKASYNKSKTLVPKKNHMETSVYGGYSNQETAYLAIVRIPFKSGFKFIVVGIPTRMVAKIKHYQSLGATLNQATHKVIEPKFTKISRKTKQTVISDYEVVLPKVYLDQVVRDQVKGQMYRFSLGSDKEYHNVQELYLPLSIQQAFVGHYDESDDQRSNDLVKVYDAALKQLQRYFPLHLSRNFDQVASQAHQSFEGLKNNVQTSDKQLGKKEVLNSLFVGLHANATRSNLSVLGMSKDFGRIKSNGITLTDQAEIIYQSPTGLFERKVALKDL

SEQ ID NO: 293 - protein, 1358 aa, Lactobacillus pentosus
  source 1..1358: note = Lactobacillus pentosus MP-10
MNEPYGVGLDIGTNSVGWTVVDMNGRVRKVKGKTALGARLFKEGATAEDRRGFRTTRRRLKRVKWRLRLLREFFDQPISKIDPNFFARRKYSDISPRDPNYNGLAKTLFNDRTDQEFYHDYPTIYHLRDKLMTSDRKFDIREIYLAIHHIVKYRGNFLRTGPASQYGSASLHLATSFQKLNDLFAQSEESLNFKLVTDEAQLQQIQQILVRTDLSRSEQQRQIWPLMVVLMGATAAEKKRQKDFAKELANALVGLKAKLNVVTLTNVDTTVVKDWTFTLEESQDKLPEIEEQLSEVGQQIMDEVIQLYASVNLAQLIPAGKRFSQHMVEKYNHHEKNLELLKAYIHSQSDSKRGREIRATYDRYIDGVKSKPVTQEMFYKDLMKYVEADATSNHLAAEIKDEIDSEQFMPKLRTKQNGSIPYQVQQYELDQIISHQKKYYPWLGEENPVAERRGKFPYKLDELVGFRVPYYVGPLITKEDQQATSGAGFAWMVRKADGPITPWNFDQKVDRIASATAFIQRMQTTDTYLIGEDVLPARSLIYQRFMVLNELNNMRVEDQKLAPRQKQRLYNQVFKQHQHVSVKNIQQNLMDAGEYRETPKITGLADPKGFNSSLSTYHDFKKILPEAIADEHKRADIEKIILWSTTFEDSAIFKQKLEEVAWLTDAQRKQLSGLRYRGWGQLSHKLLTAFKDDNGRSVMDGLWETSDNFMQLRKQPAIETQIKEANQANLTDADIQDTINELYTSPQNKKAIREVMLVLDDIKNAMHGQTPSWIFIEAARGGGVAGRRTQSRSKQIVEAYKSTAKEIVSEKVQHELNEKIKAKADFNTRLVLYFLQNGRDLYTNEAINIDRLSEYDIDHILPQSLVKDDSLDNRVLTSARINREKNDTFASEKFGRKMGAQWRELHRNGLMTQRKLKHLLMRPDEISKHATDFINRQLVETRQVIKLVEELISSEYPSASIVAVKANLTHQFRQTFNFPKLREVNDYHHAFDASLTAFIGMYLLKQYPKLERFFVYGKFAKQPINLTRFNVIRKLAVAEEPIANIETGEILWDKTADIKCFEKLYNYKRLLVTHEVRENYGAMFDQTIFKATDSRKRLIQKKKGFATETYGGYTGRTLAYLAIVKVVTNKDTQYQVVGIPTTMVTQIQQLEASGLTSKQAVTKAIGAMINENNKKLQSYEVLLPKVRFEQVVRDEVKGHIHRFALGTDTYYHNIQELYLPLTIQRAFLGKRNDTDAQTEQNLLTVFETTLAQVNRYFPLYEMNKFKQILNSAQEKFAALPTKNKTVKNKLVTGKDGVLNNLFIGLHANASLGDLKILGMKIGFGKLQVPGGLKLTDQAEIIYQSPTGLFERKVALKDL

SEQ ID NO: 294 - protein, 1358 aa, Lactobacillus plantarum
MKEPYGVGLDIGTNSVGWTVVDASGHVRKIKGQTGIGVRLFKEGAAAADRRGFRTTRRRLKRVKWRLRLLREFFDQPISKVDINFFARRKYSDVSPRDPNYNGLEKTLFNDRSDQDFYHDYPTIYHLREALMTQHRKFDVREIYLAIHHIVKYRGNFLRNDAATAYRSGTLDLQQHFETLNHLFSQADLELNLNLTTDVALLDSIKQTLVRTDISRSDRQKLIMPLLAVLTGATTAEKKRQKAVVTEFAKALVGNKTKIDVLTLTDIDATEAKDWAFSLEENQDKLPGIEDRFSEVGQQIIDEVIRLYASVNLAQLIPEGKRFSQSMVEKYKRHGEDLKLLKAYIRSQSDAKRGRAIRATYDQYIDGVKSKQVTQEAFQKALGKFVDADVDLNSWAAQIKQAIDSEQFMPKLRTKQNGAIPYQVQQNELDQIISNQKEYYPWLGEENPVIKRRGKFPYKLDELFGFRVPYYVGPLITKEMQAATANAGFAWMVRKADGPITPWNFDDKVDRVASATAFIQRMQTTDTYLIGEEVLPARSLIYQRFMVLNELNNIRVDDGQLTPRQKQRLYNQVFKKHKRVTAKNIQDNLVAAREFPTAPRITGLADPKVFNSSLSTYHDLKQVLPEAMSDVRKQADIEKIILWSTIFEDSTIFKQKLTEISWLTAAQLKQLGQLRYRGWGQLLRKLLTGLKDDNNRSIMDGLWETNANFMQLRSQPAIENQIKSANQANLTTADLQDTINELYTSPQNKKAIREVMVVLADIKDAMHGQTPNWIFVEAARGGGVAGRRTQSRSKQIVAAYQGTAQAIVRDQVQRELKEKIKNKANFNTRLVLYFLQNGRDLYTGDAINIDRLSEYDIDHILPQSLVKDDSLDNRVLTNARINREKNDTFASEKFGKKMGAKWKEMHRMGLMTKRKLDHLLMRPDEISKYATGFINRQLVETRQVIKLVEELINAEYPSTAIVSVKANLTHQFRQTFDFPKIREVNDYHHAFDAALTAFIGTYLLKRYPKLERFFVYGKFAKQPVNLTRFNVIRKLAKTDTPITDIDTGEVLWDKLTDIKYFETLYDYKRLLVTREVSENYGAMFDQTLLKASDNGKRLIRKKQSFDTAIYGGYTGKTLAYMAIVKVSTKKDVQYQVVGVPTTMVTQIEQLEQQGMTNKQAVTKVIEPLIAANNKKMLTYEVLLPKVRFEQVVRDRIKGQTHRFALGTDTYYHNIQELYLPLTLQRAFLGKQNESEVQLNQNLLTVFDATLAQVNRYFPLYEMNKFKKILNSARDQIELLEAKNQFVKNKLVLGKQGILTNMFIGLHANASYGDLKVLGVKIDFGKLQVPGGIKLTGDAEIIYQSPTGLFERKIALKDL

SEQ ID NO: 295 - protein, 1363 aa, Lactobacillus rhamnosus
MTKLNQPYGIGLDIGSNSIGFAVVDANSHLLRLKGETAIGARLFREGQSAADRRGSRTTRRRLSRTRWRLSFLRDFFAPHITKIDPDFFLRQKYSEISPKDKDRFKYEKRLFNDRTDAEFYEDYPSMYHLRLHLMTHTHKADPREIFLAIHHILKSRGHFLTPGAAKDFNTDKVDLEDIFPALTEAYAQVYPDLELTFDLAKADDFKAKLLDEQATPSDTQKALVNLLLSSDGEKEIVKKRKQVLTEFAKAITGLKTKFNLALGTEVDEADASNWQFSMGQLDDKWSNIETSMTDQGTEIFEQIQELYRARLLNGIVPAGMSLSQAKVADYGQHKEDLELFKTYLKKLNDHELAKTIRGLYDRYINGDDAKPFLREDFVKALTKEVTAHPNEVSEQLLNRMGQANFMLKQRTKANGAIPIQLQQRELDQIIANQSKYYDWLAAPNPVEAHRWKMPYQLDELLNFHIPYYVGPLITPKQQAESGENVFAWMVRKDPSGNITPYNFDEKVDREASANTFIQRMKTTDTYLIGEDVLPKQSLLYQKYEVLNELNNVRINNECLGTDQKQRLIREVFERHSSVTIKQVADNLVAHGDFARRPEIRGLADEKRFLSSLSTYHQLKEILHEAIDDPTKLLDIENIITWSTVFEDHTIFETKLAEIEWLDPKKINELSGIRYRGWGQFSRKLLDGLKLGNGHTVIQELMLSNHNLMQILADETLKETMTELNQDKLKTDDIEDVINDAYTSPSNKKALRQVLRVVEDIKHAANGQDPSWLFIETADGTGTAGKRTQSRQKQIQTVYANAAQELIDSAVRGELEDKIADKASFTDRLVLYFMQGGRDIYTGAPLNIDQLSHYDIDHILPQSLIKDDSLDNRVLVNATINREKNNVFASTLFAGKMKATWRKWHEAGLISGRKLRNLMLRPDEIDKFAKGFVARQLVETRQIIKLTEQIAAAQYPNTKIIAVKAGLSHQLREELDFPKNRDVNHYHHAFDAFLAARIGTYLLKRYPKLAPFFTYGEFAKVDVKKFREFNFIGALTHAKKNIIAKDTGEIVWDKERDIRELDRIYNFKRMLITHEVYFETADLFKQTIYAAKDSKERGGSKQLIPKKQGYPTQVYGGYTQESGSYNALVRVAEADTTAYQVIKISAQNASKIASANLKSREKGKQLLNEIVVKQLAKRRKNWKPSANSFKIVIPRFGMGTLFQNAKYGLFMVNSDTYYRNYQELWLSRENQKLLKKLFSIKYEKTQMNHDALQVYKAIIDQVEKFFKLYDINQFRAKLSDAIERFEKLPINTDGNKIGKTETLRQILIGLQANGTRSNVKNLGIKTDLGLLQVGSGIKLDKDTQIVYQSPSGLFKRRIPLADL

SEQ ID NO: 296 - protein, 1361 aa, Lactobacillus rhamnosus
  source 1..1361: note = Lactobacillus rhamnosus HN001
MTKLNQPYGIGLDIGSNSIGFAVVDANSHLLRLKGETAIGARLFREGQSAAERRESRTTRRRLSRTRWRLSFLRDFFAPHITKIDPDFFLRQKYSEISPKDKDRFKYEKRLFNDRTDAEFYEDYPSMYHLRLHLMTHTHKADPREIFLAIHHILKSRGHFLTPGAAKDFNTDKVDLEDIFPALTEAYAQVYPDLELTFDLAKADDFKAKLLDEQATPSDTQKALVNLLLSSDGEKEIVKKRKQVLTEFAKAITGLKTKFNLALGTEVDEADASNWQFSMGQLDDKWSNIETSMTDQGTEIFEQIQEHYRARLLNGIVPAGMSLSQAKVADYGQHKEDLELFKTYLKKLNDHELAKTIRGLYDRYINGDDAKPFLREDFVKALTKEVTAHPNEVSEQLLNRMGQANFMLKQRTKANGAIPVQLQQRELDQIIANQSKYYDWLAKPNPVEKHRASKPYQLDELLTFRIPYYVGPLITPKEQAESRENVFAWMIRKDPSGNITPYNFDEKVDCPASANMFIQRMKNTDTYLIGEDVLPKRSLLYQKYEVLNELNNVSIDGRRLGADQKQRLIREVFERHSSVTIKQVAENLVAHGDFAKRPEIRGLADEKRFLSSLSTYHQLKKILHEAIDDPTKEHDIENIITWSTVFEDAAIFKTELAKISWLDSDTIKALSNIRYRGWGQFSRKLLDGLKLGNGHTVIQELMLSNHNLMQILTDETLKTTMAELNQDKLKADDIEDVINDAYTSPSNKKALRQVLRVVEDIKHAANGQDPSWLYIETADGPGTAGKRTQSRQKQIQTVYANAAQELIDSAVRGELEDKIADKASFTDRLVLYFMQGGRDIYTGAPLNIDQLSHYDIDHILPQSLIKDDSLDNRVLVNATINREKNNVFASTLFASKMAATWRKWHEAGLISGRKLRNLMLRPDEIDKFAHGFVARQLVETRQIIKLTEQIAAAQYPNTKIIAVKAGLSHQLREELDFPKNRDVNHYHHAFDAFLAARIGTYLLKRYPKLAPFFTYGEFAKVDVKKFREFNFIGALTHAKKNIVAKDTGEIVWDKERDIQELDRIYNFKRMLITHEVYFETADLFKQTIYAAKDSKERGGSKQLIPKKQGYPTQVYGGYTRENTAYLAVVKTVEKKADVYRVVRIATSQVAALKEARAQSTVKERELLKKFLTTKFTKIGKNGKKAITPFDIVIPRVPREQLFHNKRYGFFMVNSDTLMHNYQELWMSRSDQQILSKLVKSAKTVENGQVGRLFENIVEQINKYFPLYDINQFRKKLDQSKDIFSKLPLEGNGTTSGKRETIQNILTGAGTGAKNGDLKNLGIKTPFGFLQVPSGIVLDDDTTLIYQSPTGMLNRIVRLSEL

SEQ ID NO: 297 - protein, 1361 aa, Lactobacillus rhamnosus
  source 1..1361: note = Lactobacillus rhamnosus R0011
MTKLNQPYGIGLDIGSNSIGFAVVDANSHLLRLKGETAIGARLFREGQSAAERRESRTTRRRLSRTRWRLSFLRDFFAPHITKIDPDFFLRQKYSEISPKDKDRFKYEKRLFNDRTDAEFYEDYPSMYHLRLHLMTHTHKADPREIFLAIHHILKSRGHFLTPGAAKDFNTDKVDLEDIFPALTEAYAQVYPDLELTFDLAKADDFKAKLLDEQATPSDTQKALVNLLLSSDGEKEIVKKRKQVLTEFAKAITGLKTKFNLALGTEVDEADASNWQFSMGQLDDKWSNIETSMTDQGTEIFEQIQELYRARLLNGIVPAGMSLSQAKVADYGQHKEDLELFKTYLKKLNDHELAKTIRGLYDRYINGDDAKPFLREDFVKALTKEVTAHPNEVSEQLLNRMGQANFMLKQRTKANGAIPVQLQQRELDQIIANQSKYYDWLAKPNPVEKHRASKPYQLDELLTFRIPYYVGPLITPKEQAESRENVFAWMIRKDPSGNITPYNFDEKVDCPASANMFIQRMKNTDTYLIGEDVLPKRSLLYQKYEVLNELNNVSIDGRRLGADQKQRLIREVFERHSSVTIKQVAENLVAHGDFAKRPEIRGLADEKRFLSSLSTYHQLKKILHEAIDDPTKEHDIENIITWSTVFEDAAIFKTELAKISWLDSDTIKALSNIRYRGWGQFSRKLLDGLKLGNGHTVIQELMLSNHNLMQILTDETLKTTMAELNQDKLKADDIEDVINDAYTSPSNKKALRQVLRVVEDIKHAANGQDPSWLYIETADGPGTAGKRTQSRQKQIQTVYANAAQELIDSAVRGELEDKIADKASFTDRLVLYFMQGGRDIYTGAPLNIDQLSHYDIDHILPQSLIKDDSLDNRVLVNATINREKNNVFASTLFASKMAATWRKWHEAGLISGRKLRNLMLRPDEIDKFAHGFVARQLVETRQIIKLTEQIAAAQYPNTKIIAVKAGLSHQLREELDFPKNRDVNHYHHAFDAFLAARIGTYLLKRYPKLAPFFTYGEFAKVDVKKFREFNFIGALTHAKKNIVAKDTGEIVWDKERDIQELDRIYNFKRMLITHEVYFETADLFKQTIYAAKDSKERGGSKQLIPKKQGYPTQVYGGYTRENTAYLAVVKTVEKKADVYRVVRIATSQVAALKEARAQSTVKERELLKKFLTTKFTKIGKNGKKAITPFDIVIPRVPREQLFHNKRYGFFMVNSDTLMHNYQELWMSRSDQQILSKLVKSAKTVENGQVGRLFENIVEQINKYFPLYDINQFRKKLDQSKDIFSKLPLEGNGTTSGKRETIQNILTGAGTGAKNGDLKNLGIKTPFGFLQVPSGIVLDDDTTLIYQSPTGMLNRIVRLSEL

SEQ ID NO: 298 - protein, 1375 aa, Lactobacillus ruminis
  source 1..1375: note = Lactobacillus ruminis ATCC 25644
MRKNQEPYNIGLDIGTSSIGWSIMNDNFDLMRVKGKKGIGVRLYNEGQSAAERRMHRTARRRYGRRKWRLRLLEDFFDEHMAEVDDTFFARLKDSNISPKDDKKYRKSLLFPKSKGVTYQDDGEFYKKYPTMYHLRYALMTEHRKFDLREIYLAFHHMVKYRGNFLYDTSVDSFEAKNLDIKGKFDEINDLLSSYTDFYVDNSNAALVESILLEKNTTRKDKSKKIAKLLHVEDKEKGKNKKAKDLATQISNAVLGLKCNFHLIFELQQKYSFDLCSEKTEENIAKLSEVLDENQKMLLMILKEVQDQVMLNAFVPSGMSLSEAMMQKYDDYGEQLKIYHELEHSVSDDSAAKLRGAYRDYNDNIIKRIDGDNKKDTFYKRVKNILTKISKEYVDQDVLESCGKLKKLIDENKLFIRQRTAANGVLPHQLHQIEMRKIIDNQKEYYPWLAEPNPNEKRRVYSKYKVEELIAFRIPYYVGPLVDPNNADKNKEARFSWMVRKKDGEITPWNFYDKVDWAESANNFIERMKSKDTYLLGEDVVPKESMLYQKYEVLNELNNLRINDSGLSDSFEDVKLKQAIYNDLFKKQKIVKITDLQNYLVQNHKYLVKPKISGLADENRFLSSLSTYSDLKTIFGDKVDDRTYFNDFEKMVEYSTVFEDGHDYNQKLDEYTWLTKEEKYKIGKKRYRGWGKLSKKLLTGLRDKNNHTIMDNLWETNRNFMQIQTADEFSKQIAEENERHLKGSVSDAINDMYTSPANKKAIRQVLRVVDDIQKAMGYAPSSISLEFAREDGPSVRTVSRANRMKSIYEKYASEVSEEVMKDLDGVIKDKKGLNDRLYLYFEQQGKDMYSGHPLDFDKVISGQEYDIDHILPQAVIKDDSLDNRVLTTKALNNDVKSKGVPCRMFNGMHSFWKNLYDKGFISRRKFNNLTTNPENIDKYKMKGFVNRQLVETRQIIKLVANVLNDKYQNDDVDIIEVRAELTHDVRKHFKFYKNRNVNDYHHAFDAYLTSFIGHYLFKKYPNLRPLFDYNDFMKVSDNVFKQLRGNNFLGEFLNKTGDIISTDGNFVLNKEEMINKLNKAYAFKKILVTKEVGQRTGAMFNETRYPAPNSRKAALKYRRMPKPDSLISVKDYKNTDIYGGYSGKNDAYMVIVDMGKQYMVVGVPVRYTEKLDKLRIKHSELYRDELRKVLSRDKTLLDSKGNVKRFDIVLDRVLYGQLIEDGNELFTLGSSKYKRNFRQLFLDKQCIEILDSSATPQPTDEELIWVYDQILDKVDKYFELYDINRQRETLRKGRAAFCSLPNISMKKDDVTKKKILNEILVALHANESESNCEKIGKKVFGRLQVPGGIKLSKEAKLIYQSPTGLFERVVYLKDL

SEQ ID NO: 299 - protein, 1339 aa, Lactobacillus salivarius
  source 1..1339: note = Lactobacillus salivarius SMXD51
MERYHIGLDIGTSSIGWAVIGDDFKIKKKKGKNLIGTRLFNEGATAAERRGFRTQRRRLNRRKWRLKLLEEIFDPYMAEVDEYFFARLKSSNLSPKDSNKKYLGSLLFPDKSDSNFYDKYPTIYHLRRDLMEKDEKFDLREIYLAIHHIVKYRGNFLEKVPAKNYKNSGASIGFLLEEVNSLYKDIIGDESIAILNSEKFEDVEKIILDEETRNLDKQKSVGKLLVEDKKKKNIVTAFSKAIFGYKFNIEDLLLIENDEKNKLTFNDENIDDIFNELSHSLDDKQMDLLTKTREIYFKFKLNMIVPTGYTLSESMIEKYEMHKAHLKMYKEFINTLNTKDRKILKNAYSDYINTEKAKAANAQENFYKTVKKIIKDNNSDTAKKIIVLIDEGNFMPKQRTGENGVIPHQLHQIELDRIIENQAKYYPWLAEANPVEKNRKFAKYKLDELVTFRVPYYVGPLIDKTESNKNEKETKFAWMVRKAKGTITPWNFENLVDRTESANRFIKRMTSKDTYIIGEDVLPASSLLYEKFKVLNELNNIKVNEKKLDIEQKQDIYLNLFTTAKNVTKKSLATYLNCSADSISGLSDGEKFNSSLSSYIDLKAILGNIVDDCNKNEDLEKIIEYSTVFEDGNIYKEKLSEISWLTDEQIEKLSNIHFKGWGRLSKKLLTQITNENGERIIDALWNTSNNFMQIINDESIQAKLAEINGKYAGKSDLEDILSEAYTSPQNKKAIRQVMKVVEDIEKAMQCEPTSISIEFTRKKQKSRLTNTRYKKISDVYEKIADEVISEYELRKLQSELDSNANNMRDRYYLYFMQLGRDMYTGEKINIDELHQRYDIDHILPQSFIKDDSINNRVLTRKDVNNKEKSDKTAADLYAVEMSDFWRKLRKQGLITEQKYKNLLTKSDSIDKYAKKGFIKRQLVETSQVVKLVANILQDKYSDTKIIEVRAKLNSNLREEYKLIKNRAVNDYHHAIDGYLTTFIGQYLYKTYPKLRSYFVYNDFKKLDSNYLKHMKKFNFLWQLQDDKTIDIYDNVNNKFVLNVPEMKKYIQKIYNYKYMLVSKEVTTKNGAFYDQTKYNAKTVNLIPIKKNKPTNIYGGYKGKVSSYMMLVKIRKKKEVIYKFVGVPRLWTDELDRLKDTTERKILLNEIAKNSLSKTEQDFEVILDKVYYGQLIIDGNQKYTLGSSEYKYNAMQLHLSKHALEVLAKENVKDAEITDKDLVSVYEEILSVVNKYFELYDINKFRQKLNEGLEIFRKLPVYNVYESNKIKQVGKFEVLNRILMGLHANAMITDLKVLGIKTKLGQMQVNGGIKLSPDAKLIYQSPTGIFSRAVRVKDLG

SEQ ID NO: 300 - protein, 1331 aa, Lactobacillus sanfranciscensis
MNKQPYNIGLDIGTSSVGWSATELDNRLLHIKGHNGIGVRLFKEGESAADRRGFRTTRRRLARRKWRLRLLNEIFATEIAKVDPSFFARLKQSNVSPKDPNKTMFENILFDDENLDDQKFHHDYKTIYHLRQAIINHPEQKFDIRLIYLAMHHIIKYRGHFLNQANVQDFKGGKIDLEKSFKALNDIFENQGRDLRLVTDKANQYVKVLSDNAKTRSDRKKELSKLLYVPIDKDTDKNSKKVTGEILKAILGNKAKFDVIFGIEVENPKEWVLTFNSDDFDDKIEGLSSQMTDEDSEILLILKELYFALNLSDILNNSVTDKNAKTLSEAMINRYDDHKNQLAMLKKVIDSSDKKHAKELKEAYSAYIDGENNKKISFEDLKKRIQKNLVDSELSQKINDLLDHDYFLPKQRSKENGAIPHQLQQQELDQIIESQKQYYPFLAELNPNEKRSRQAKYKLDELVAFRVPYYVGPMVEVTDSNQENNGKFAWMIRKEQGEITPWNFDEKVDRTETATKFITRMTTTDTYLIGEPVLPKNSLLYQKFVVLNELNNLKINQEIITPGQKQYLYEHVMKKNKRVTLKKIADALVIKGDYPYAPEVKGTTDQKNLNNGLTTYIDLAKIFGNELDDVDREADFEKIIEWSTIFEDQHIFALKLQELKWLTEKQRNQVVKLRYQGWGKLSKELLAGLVDDNGQRIIDLLWSDNQNFMQIVNQKSFKESIADHNGAHLEEKNLKDVINDLYTSPQNKKAIRQVILVVDDIINAVGYEPANIMMEFAREDSNDHRLTNSRSRQLENVYKDITNSWFDNDSVKDELEDKIKNKDKFTDRLYLYFTQGGKDLYTGEPLNIDDLSSYDIDHILPQSFILDNSLDNRVLTSQRNNRVSKEDQLPGELFGTKMHAFWKRLKAAHLISNKKYYNLTLTPNSISKFNNQGRFINRQLVETRQVIKLAAEILHNRYSEEKGTNIVTIKANLTHHMREKFNFYKNRNVNDYHHAFDAYLTAFVGNWLLQQYPKLKPYFVYGDFAKTEINNLKSFNMLYKFEQAHQLNEKDGKIAKDADALLGYMKNVYHFKKMLVTKKLETNHGALFKQTLYPSPAHDIKKRQLIKPKDNRPTDIYGGYTHEERKYMSLVKVIGKKDNEYRMANVPLLKINKNNDIKEILKSQFSNKKFEIVLPKVLKNQLFSENGALFVIGSKGYKYNANQLVLSDLDMKLLNDLSNNKSIDEVTINQLFKNIVDSTNKYMPLYEIKNLNEVVEKFNNLEFNDKKKTITDFLLATHANPTMSNLKNIGLPSYFGRFTSGNAGIKLSENANVIYQSPTGLFSRKVKISDF

SEQ ID NO: 301 - protein, 1419 aa, Lactobacillus sp.
  source 1..1419: note = Lactobacillus sp. 66c
MAKPQNYTIGLDIGTNSVGWTVTDDQNNILRIKSKKAIGARLFEEGKVAAERRSFRTTRRRLSRRKWRIKLLEELFDEEISKVDPNFFARSHESWISPKDKRERYSAIVFPTPEEDKKFHNEYPTIYHLRDRLMKDDQKHDIREIYVAIHHIMKYRGNFLHDESIETYRSGMSSLGGGDERTILNTKILDDLNDAFADNLATQGISVNSASADQINEIVTSGHLNVDSQKAIAKLLLPTTLSSDDKKQDKKIKKLATDAAKNVASAWLGYKANFAAILNIQEVDKDKKKIYSFALQGADEEDKVETLESVLSQDQIEIVDRIIRIRHAIVLGEIIPVGMTLSEAMIEKYDQHAKDLKNLKTVIRNLKDRKNAVKLQAIYDLYVNNRHADTAKAMKLAGVKKRTELLEPEEFNKSIEKLLDDSPVSAEIKKRIAEKDFLPLQRSNSNGVIPNQLHQIELDEIIKKQSKYYPFLGETNEHASADVARKAPTKLDQLLTFRVPYYVGPLITKEEQEEQDGHSFAWMIRKNPKDHEKITPWNFDEKVDRMASATQFIKRMTTKDTYLLGEDVLPSSSLKYQLFTVLNELNNLRINHKKLTREEKEQVIEDLFKKYKTVKADKFKNYWQKGHAGLDVKIQGMADPEKFNSTMSTYIDLQKIFGDQLDDAQRQNDFEKIIEYSTIFEDRKILGEKLRADFVWLSEDQIKRLCRLRLQGWGRLSLKLLTRLTDADGQNVLERLLNSNDNFMQIVKDPVIKAKIEQKNQKLLRADWSENATESILDEAYTSPQNKKAIRQVMRVVHDIVKACDGNLPAKFAIEFARSQDDDPKRTVARADRLQKIYAQISDEVVSQGVKDQLSGMKSLKDRYYLYFMQGGRDAYTGKPLNIDRLSDYDIDHIMPQSFIKDDSLDNRVLVTRAVNNQKSDNVPVLLYGNHLVADLGITIREMWDRWQKSGMISKRKLANLLTDPATLSEYRAEGFINRQLVETSQVIKLTATILQSEFPDSKIIEVPAKYNSILRKQFDLYKSREVNDYHHAIDAYLSTIVGNYLYQVYPNLRRLFVYGEFKKFSHGEEESSHQAVRRVKSMNFLDDLLRGKHGDDIYCRVTGEVIFSRKDIISKLKQAYSFKQMLVTQEVFTKKSALFDQTVYPSPARDSKTRSGLIPRKQGMDTEIYGGYSGNKDAYFVLAQVVKSKGHTLQVVGVPIRALRALANCSNYSEQLLKIVKAQVLFNKKTGKAKKGISDVRILLDKIPYRQPVLDGSAFYMLGSSTYKYNLKQISLSQQSMKYILDYIDDPNFNKHEMTKIDQQNEKECLLSVYDEILDKMDKYLSLYDINGFRKKLHVGRDKFIKLEVEKQAEAIKNVLRGFHANSDMTKLSDLGLSTSLGFMQASDGIKLSDNAVFIYQSPTGLFERRVKVSDLLK

SEQ ID NO: 302 - protein, 1289 aa, Lactobacillus versmoldensis
  source 1..1289: note = Lactobacillus versmoldensis KCTC 3814
MRRRYRRRRNRLNWLDELFADELAKIDPSFLLRMKNSWVSKKESTRKRDPYNLFIDEKYNDVDYFNQYPTIFHLRKELITEDKKVDIRLIYLAIHNIIKYRGNFTLENQNFDISQLSSNFSQQISDFFALFSDFGVIMPEDFDPDKISDILLNPNLSPSGKVSEAIATISPKTNVKAKIKIILLLLVGNNGDLKKLFDLETTEKIAVKLSSRHIDSELPIILSELNEQQENIITIANSIFGSIILKDFLGDETSISAAKVISFEDHKQDLQKLKTMWRETSNKEAVKAGKKAYEDYIGHEDSETFYKKIKKFLEKAQPVDLANKALAEIELENYLPKQRNRNNTVIPYQLNENELIAILDHQEKYYPFLKENRDKILSLLTFRIPYYVGPLQDSNNNRFSWMTRKASGAIRPWNFSEKVNVEQSSNDFIKRMRSTDTYLIGEPVLPKKSLIYQCYEVLSELNNTRVKDGSSNPKRLDVTIKQRIYNEIFKNQKSVSVKVLQNWLIKESYFKSPEISGLADKKKYLSSLSTYIDFKKIFGQRFVDDPVNSPQLEELAEWLTLFEDKKILLIKLQNSKYSYDQATINKLSTMRYQGTGKLSKKLLVDLKTTKKSIGKSGAESLSILDLMWSTKDNFMQIIHDADYTFEQQIKEFNYDTEDELTPLEKVANLHGSPALKRGLNQSIKVVADIVKFMGHDPEKIFIEFTRSDDFSKLTISRYRRIKKQYLEIAKAIKKIPAEFKDIKEYQTQLEENKGKLASERLMLYFLQCGHSLYSNKPIDLNMINSSKYHVDHILPQSYIKDDSLENKALVLASENENKIDNMLISHDIIATNLPRWQALKDQNLMGSKKFADLTRTTVTENQKKGFIQRQLVQTSQIVKNITLILNDLYKNTSCIETRATLSSEFRKAFSNFDETTYHYQFPEFVKNRDVNDFHHAQDAFLACVIGEYQLKKYPKDNLRLVYDQYSKFLDSLKKDTRKKNGRMPRYTQNGFIIGSMFNGKTYVDDNGEIIWDQKIKESIRKTFNYHQFNVVRQTIEQHGKLFNDTIQPHSDRYKLIPLKTNRDPAIYGGYNNDNNAYSVVLDVDGKKKINGIPIRIANQLKSDELDLSSWLENNIKHKKPMTILIDKVPKYQRIINEETGDLLITSANEVINNVQLFLPSMYTALISLLDSTKTEMYSKLLSNYEANILIDIYDYLLTKLKNNYPLYRKEWAKLAEHRDDFIESDLVTQASTLQQLIKFMHADPSNVNLKFGNFKGNRFGRKNGNIKLSKTDFIYESPTGLFKSIKHID

SEQ ID NO: 303 - protein, 1372 aa, Legionella pneumophila
  source 1..1372: note = Legionella pneumophila 130b
MESSQILSPIGIDLGGKFTGVCLSHLEAFAELPNHANTKYSVILIDHNNFQLSQAQRRATRHRVRNKKRNQFVKRVALQLFQHILSRDLNAKEETALCHYLNNRGYTYVDTDLDEYIKDETTINLLKELLPSESEHNFIDWFLQKMQSSEFRKILVSKVEEKKDDKELKNAVKNIKNFITGFEKNSVEGHRHRKVYFENIKSDITKDNQLDSIKKKIPSVCLSNLLGHLSNLQWKNLHRYLAKNPKQFDEQTFGNEFLRMLKNFRHLKGSQESLAVRNLIQQLEQSQDYISILEKTPPEITIPPYEARTNTGMEKDQSLLLNPEKLNNLYPNWRNLIPGIIDAHPFLEKDLEHTKLRDRKRIISPSKQDEKRDSYILQRYLDLNKKIDKFKIKKQLSFLGQGKQLPANLIETQKEMETHFNSSLVSVLIQIASAYNKEREDAAQGIWFDNAFSLCELSNINPPRKQKILPLLVGAILSEDFINNKDKWAKFKNFWNTHKIGRTSLKSKCKEIEEARKNSGNAFKIDYEEALNHPEHSNNKALIKIIQTIPDIIQAIQSHLGHNDSQALIYHNPFSLSQLYTILETKRDGFHKNCVAVTCENYWRSQKTEIDPEISYASRLPADSVRPFDGVLARMMQRLAYEIAMAKWEQIKHIPDNSSLLIPIYLEQNRFEFEESFKKIKGGSSDKTLEQAIEKQNIQWEEKFQRIINASMNICPYKGASIGGQGEIDHIYPRSLSKKHFGVIFNSEANLIYCSSQGNREKKEEHYLLEHLSPLYLKHQFGTDNVSDIKNFISQNVANIKKYISFHLLTPEQQKAARHALFLDYDDEAFKTITKFLMSQQKARVNGTQKFLGKQIMEFLSTLADSKQLQLEFSIKQITAEEVHDHRELLSKQEPKLVKSRQQSFPSHAIDATLTMSIGLKEFPQFSQELDNSWFINHLMPDEVHLNPVRSKEKYNKPNISSTPLFKDSLYAERFIPVWVKGETFAIGFSEKDLFEIKPSNKEKLFTLLKTYSTKNPGESLQELQAKSKAKWLYFPINKTLALEFLHHYFHKEIVTPDDTTVCHFINSLRYYTKKESITVKILKEPMPVLSVKFESSKKNVLGSFKHTIALPATKDWERLFNHPNFLALKANPAPNPKEFNEFIRKYFLSDNNPNSDIPNNGHNIKPQKHKAVRKVFSLPVIPGNAGTMMRIRRKDNKGQPLYQLQTIDDTPSMGIQINEDRLVKQEVLMDAYKTRNLSTIDGINNSEGQAYATFDNWLTLPVSTFKPEIIKLEMKPHSKTRRYIRITQSLADFIKTIDEALMIKPSDSIDDPLNMPNEIVCKNKLFGNELKPRDGKMKIVSTGKIVTYEFESDSTPQWIQTLYVTQLKKQP

SEQ ID NO: 304 - protein, 1372 aa, Legionella pneumophila
MESSQILSPIGIDLGGKFTGVCLSHLEAFAELPNHANTKYSVILIDHNNFQLSQAQRRATRHRVRNKKRNQFVKRVALQLFQHILSRDLNAKEETALCHYLNNRGYTYVDTDLDEYIKDETTINLLKELLPSESEHNFIDWFLQKMQSSEFRKILVSKVEEKKDDKELKNAVKNIKNFITGFEKNSVEGHRHRKVYFENIKSDITKDNQLDSIKKKIPSVCLSNLLGHLSNLQWKNLHRYLAKNPKQFDEQTFGNEFLRMLKNFRHLKGSQESLAVRNLIQQLEQSQDYISILEKTPPEITIPPYEARTNTGMEKDQSLLLNPEKLNNLYPNWRNLIPGIIDAHPFLEKDLEHTKLRDRKRIISPSKQDEKRDSYILQRYLDLNKKIDKFKIKKQLSFLGQGKQLPANLIETQKEMETHFNSSLVSVLIQIASAYNKEREDAAQGIWFDNAFSLCELSNINPPRKQKILPLLVGAILSEDFINNKDKWAKFKIFWNTHKIGRTSLKSKCKEIEEARKNSGNAFKIDYEEALNHPEHSNNKALIKIIQTIPDIIQAIQSHLGHNDSQALIYHNPFSLSQLYTILETKRDGFHKNCVAVTCENYWRSQKTEIDPEISYASRLPADSVRPFDGVLARMMQRLAYEIAMAKWEQIKHIPDNSSLLIPIYLEQNRFEFEESFKKIKGSSSDKTLEQAIEKQNIQWEEKFQRIINASMNICPYKGASIGGQGEIDHIYPRSLSKKHFGVIFNSEVNLIYCSSQGNREKKEEHYLLEHLSPLYLKHQFGTDNVSDIKNFISQNVANIKKYISFHLLTPEQQKAARHALFLDYDDEAFKTITKFLMSQQKARVNGTQKFLGKQIMEFLSTLADSKQLQLEFSIKQITAEEVHDHRELLSKQEPKLVKSRQQSFPSHAIDATLTMSIGLKEFPQFSQELDNSWFINHLMPDEVHLNPVRSKEKYNKPNISSTPLFKDSLYAERFIPVWVKGETFAIGFSEKDLFEIKPSNKEKLFTLLKTYSTKNPGESLQELQAKSKAKWLYFPINKTLALEFLHHYFHKEIVTPDDTTVCHFINSLRYYTKKESITVKILKEPMPVLSVKFESSKKNVLGSFKHTIALPATKDWERLFNHPNFLALKANPAPNPKEFNEFIRKYFLSDNNPNSDIPNNGHNIKPQKHKAVRKVFSLPVIPGNAGTMMRIRRKDNKGQPLYQLQTIDDTPSMGIQINEDRLVKQEVLMDAYKTRNLSTIDGINNSEGQAYATFDNWLTLPVSTFKPEIIKLEMKPHSKTRRYIRITQSLADFIKTIDEALMIKPSDSIDDPLNMPNEIVCKNKLFGNELKPRDGKMKIVSTGKIVTYEFESDSTPQWIQTLYVTQLKKQP

SEQ ID NO: 305 - protein, 1355 aa, Leuconostoc gelidum
  source 1..1355: note = Leuconostoc gelidum KCTC 3527
MTYSIGLDIGTGSVGWAVIGDDYRLKRAKGKNLIGVRLFDSATTAAERRGYRTTRRRLSRRHWRLRLLNDIFASDLAEQDENFLPRLKYSWVNPDDEQNPQLNSDVANGALFGSSETDKAFHKNYPTIYHLRHELMTDTAKHDLREVYLAIHHIVKYRGNFLNTADKINAENSFNVDLFIAALDEYNEFLETPITSIKDAQLFSDKLTDINARNKSVRVENAMSETYDDKSKIFKAILTALVGNTANFQTIFDLSDLEKDEAKNFKFKLDLEDVETKLDVVRAKLSDEQNAFLEAVLIAYDGITLKMILGDYKSISQSMIESYKSHQRDWKYIKNNVRLNEQKIEPDKNSVKFFKLDPKKLIYPSNLAYLQVISSNEDEHRKGLDYFKTAIQDADILQRIENDTFLPRQRTKRNGVLPYQLHLAELEQIIKKQSKYYPFLANIYTQDNKTENKLIGLLKFRVPYYVGPLVEAEKVTGDGKNHWLIKKELQENTPITPFNFDDVVDKDKSGEQFIKRITGTDSYLIGEPTLPENSLLYQKYNVLQELNNVRNERHQRLPIKVKQDIFEHVFKIDKNVNAKKVMAYLKLNGYGDFQIAGLSDTRTGKFNSNLSSYNYFVDLLGREKTEKIREDRLEEIIEIQTVFEDKILVAKRLSNLDFLTPQEKSKLSAKHYTGWGRLSQKLLTTQFIKTALSEAGDIIPQSHSIIDLLYYTDKNLMEILNDKTFNVRNWLTEQNKGTESGNSLYDQIDALAGPKDIKRGITQVFSIIDDIKKAMGSNPETVYLEFARETQTSRLTNSRLNRVQEIYNSPELKTEFAYLAKKLEAETKESIHDDRLYLYYLQEGRDMYTGKEIPFDQISSNYDIDHIIPQAFTKDDSLDNRVLVNRATNARKSNSPTFTNDIIDNRKSWWQSLVKRGLMSKEKFERLTDKRKTFSENQTNHFIARQLVETRQIIKNVADLIKNNYDGTQAVAIRASLTGEMRRYLDWPKNRDMNDYHHAHDALMMATVGKYVDRRGFFDNGSVSDGAGNAYNLYTKDWLVAARVGTRNDSQRVNPYGFIVGSMNSKAVRQQVNKETGEIVWGNENLDYLRHVLSYKKILVTRRLSGSSGRLYAETLFSPNPKAKLIAQKANRSVALYGGFTKAESAYTALVEFNKKGDRSYKLIKVPMAIANRVNDKQITVTAYIASLNLRDFSRVVLEHLPLGTLIRESDGSEFYAASSEYKHNAKELWAPKEILRSSKKLDKATADNLIDIFDFLTNDKTISNFKFYEKDLLHLKNVRDKFVEASDEIKIKVLSDVIYELHNDAGWRDPFKHIQEKPAWTMLQVKGGIKLSEKAAIVYQSPTGLFETITIVGE

SEQ ID NO: 306 - protein, 1337 aa, Listeria innocua
  source 1..1337: note = Listeria innocua ATCC 33091
MKNMKKPYTIGLDIGTNSVGWAVLTDQYDLVKRKMKIAGDSEKKQIKKNFWGVRLFDEGQTAADRRMARTARRRIERRRNRISYLQGIFAEEMSKTDANFFCRLSDSFYVDNEKRNSRHPFFATIEEEVEYHKNYPTIYHLREELVNSSEKADLRLVYLALAHIIKYRGNFLIEGALDTQNTSVDGIYKQFIQTYNQVFASGIEDGSLKKLEDNKDVAKILVEKVTRKEKLERILKLYPGEKSAGMFAQFISLIVGSKGNFQKPFDLIEKSDIECAKDSYEEDLESLLALIGDEYAELFVAAKNAYSAVVLSSIITVAETETNAKLSASMIERFDTHEEDLGELKAFIKLHLPKHYEEIFSNTEKHGYAGYIDGKTKQADFYKYMKMTLENIEGADYFIAKIEKENFLRKQRTFDNGAIPHQLHLEELEAILHQQAKYYPFLKENYDKIKSLVTFRIPYFVGPLANGQSEFAWLTRKADGEIRPWNIEEKVDFGKSAVDFIEKMTNKDTYLPKENVLPKHSLCYQKYLVYNELTKVRYINDQGKTSYFSGQEKEQIFNDLFKQKRKVKKKDLELFLRNMSHVESPTIEGLEDSFNSSYSTYHDLLKVGIKQEILDNPVNTEMLENIVKILTVFEDKRMIKEQLQQFSDVLDGVVLKKLERRHYTGWGRLSAKLLMGIRDKQSHLTILDYLMNDDGLNRNLMQLINDSNLSFKSIIEKEQVTTADKDIQSIVADLAGSPAIKKGILQSLKIVDELVSVMGYPPQTIVVEMARENQTTGKGKNNSRPRYKSLEKAIKEFGSQILKEHPTDNQELRNNRLYLYYLQNGKDMYTGQDLDIHNLSNYDIDHIVPQSFITDNSIDNLVLTSSAGNREKGDDVPPLEIVRKRKVFWEKLYQGNLMSKRKFDYLTKAERGGLTEADKARFIHRQLVETRQITKNVANILHQRFNYEKDDHGNTMKQVRIVTLKSALVSQFRKQFQLYKVRDVNDYHHAHDAYLNGVVANTLLKVYPQLEPEFVYGDYHQFDWFKANKATAKKQFYTNIMLFFAQKDRIIDENGEILWDKKYLDTVKKVMSYRQMNIVKKTEIQKGEFSKATIKPKGNSSKLISRKTNWDPMKYGGLDSPNMAYAVVIEYAKGKNKLVFEKKIIRVTIMERKAFEKDEKAFLEEQGYRQPKVLAKLPKYTLYECEEGRRRMLASANEAQKGNQQVLPNHLVTLLHHVANCEVSDGKSLDYIESNREMFAELLAHVSEFAKRYTLAEANLNKINQLFEQNKEGDIKAIAQSFVDLMAFNAMGAPASFKFFETTIERKRYNNLKELLNSTIIYQSITGLYESRKRLDD

SEQ ID NO: 307 - protein, 1334 aa, Listeria innocua
MKKPYTIGLDIGTNSVGWAVLTDQYDLVKRKMKIAGDSEKKQIKKNFWGVRLFDEGQTAADRRMARTARRRIERRRNRISYLQGIFAEEMSKTDANFFCRLSDSFYVDNEKRNSRHPFFATIEEEVEYHKNYPTIYHLREELVNSSEKADLRLVYLALAHIIKYRGNFLIEGALDTQNTSVDGIYKQFIQTYNQVFASGIEDGSLKKLEDNKDVAKILVEKVTRKEKLERILKLYPGEKSAGMFAQFISLIVGSKGNFQKPFDLIEKSDIECAKDSYEEDLESLLALIGDEYAELFVAAKNAYSAVVLSSIITVAETETNAKLSASMIERFDTHEEDLGELKAFIKLHLPKHYEEIFSNTEKHGYAGYIDGKTKQADFYKYMKMTLENIEGADYFIAKIEKENFLRKQRTFDNGAIPHQLHLEELEAILHQQAKYYPFLKENYDKIKSLVTFRIPYFVGPLANGQSEFAWLTRKADGEIRPWNIEEKVDFGKSAVDFIEKMTNKDTYLPKENVLPKHSLCYQKYLVYNELTKVRYINDQGKTSYFSGQEKEQIFNDLFKQKRKVKKKDLELFLRNMSHVESPTIEGLEDSFNSSYSTYHDLLKVGIKQEILDNPVNTEMLENIVKILTVFEDKRMIKEQLQQFSDVLDGVVLKKLERRHYTGWGRLSAKLLMGIRDKQSHLTILDYLMNDDGLNRNLMQLINDSNLSFKSIIEKEQVTTADKDIQSIVADLAGSPAIKKGILQSLKIVDELVSVMGYPPQTIVVEMARENQTTGKGKNNSRPRYKSLEKAIKEFGSQILKEHPTDNQELRNNRLYLYYLQNGKDMYTGQDLDIHNLSNYDIDHIVPQSFITDNSIDNLVLTSSAGNREKGDDVPPLEIVRKRKVFWEKLYQGNLMSKRKFDYLTKAERGGLTEADKARFIHRQLVETRQITKNVANILHQRFNYEKDDHGNTMKQVRIVTLKSALVSQFRKQFQLYKVRDVNDYHHAHDAYLNGVVANTLLKVYPQLEPEFVYGDYHQFDWFKANKATAKKQFYTNIMLFFAQKDRIIDENGEILWDKKYLDTVKKVMSYRQMNIVKKTEIQKGEFSKATIKPKGNSSKLIPRKTNWDPMKYGGLDSPNMAYAVVIEYAKGKNKLVFEKKIIRVTIMERKAFEKDEKAFLEEQGYRQPKVLAKLPKYTLYECEEGRRRMLASANEAQKGNQQVLPNHLVTLLHHAANCEVSDGKSLDYIESNREMFAELLAHVSEFAKRYTLAEANLNKINQLFEQNKEGDIKAIAQSFVDLMAFNAMGAPASFKFFETTIERKRYNNLKELLNSTIIYQSITGLYESRKRLDD

SEQ ID NO: 308 - protein, 1334 aa, Listeria monocytogenes
MKNPYTIGLDIGTNSVGWAVLTNQYDLVKRKMKVAGNSDKKQIKKNFWGVRLFDDGQTAVDRRMNRTARRRIERRRNRISYLQEIFAVEMANIDANFFCRLNDSFYVDSEKRNSRHPFFATIEEEVAYHKNYRTIYHLREELVNSSEKADLRLVYLALAHIIKYRGNFLIEGALDTKNTSVDGVYEQFIQTYNQVFMSNIEEGTLAKVEENIEVANILAGKFTRREKFERILQLYPGEKSTGMFAQFISLIVGSKGNFQKVFDLIEKTDIECAKDSYEEDLEALLAIIGDEYAELFVAAKNTYNAVVLSSIITVTATETNAKLSASMIERFDAHEKDLGELKAFIKLHLPKQYQEIFNNAAIDGYAGYIDGKTKQVDFYKYLKTILENIEGADYFIAKIEEENFLRKQRTFDNGAIPHQLHLEELEAIIHQQAKYYPFLREDYEKIKSLVTFRIPYFVGPLAKGQSEFAWLTRKADGEIRPWNIEEKVDFGKSAVDFIEKMTNKDTYLPKENVLPKHSLCYQKYMVYNELTKVRYIDDQGKTNYFSGQEKQQIFNDLFKQKRKVKKKDLELFLRNINHIESPTIEGLEDSFNASYATYHDLLKVGMKQEILDNPLNTEMLEDIVKILTVFEDKPMIKEQLQQFSDVLDGGVLKKLERRHYTGWGRLSAKLLVGIREKQSHLTILDYLMNDDGLNRNLMQLINDSNLSFKSIIEKEQVSTTDKDLQSIVADLAGSPAIKKGILQSLKIVDELVSIMGYPPQTIVVEMARENQTTGKGKNNSKPRYKSLEKAIKEFGSKILKEHPTDNQELKNNRLYLYYLQNGKDMYTGQELDIHNLSNYDIDHIVPQSFITDNSIDNLVLTSSAGNREKGGDVPPLEIVRKRKVFWEKLYQGNLMSKRKFDYLTKAERGGLTDADKARFIHRQLVETRQITKNVANILHQRFNNETDNHGNTMEQVRIVTLKSALVSQFRKQFQLYKVREVNDYHHAHDAYLNGVVANTLLKVYPQLEPEFVYGEYHQFDWFKANKATAKKQFYTNIMLFFGQKERIIDENGEILWDKKYLETIKKVLDYRQMNIVKKTEIQKGEFSKATIKPKGNSSKLIPRKENWDPMKYGGLDSPNMAYAVIIEHAKGKKKLIFEKKIIRITIMERKMFEKDEEAFLEEKGYRHPKVLTKLPKYTLYECEKGRRRMLASANEAQKGNQLVLSNHLVSLLYHAKNCEASDGKSLKYIEAHRETFSELLAQVSEFATRYTLADANLSKINNLFEQNKEGDIQAIAQSFVDLMAFNAMGAPASFKFFEATIDRKRYTNLKELLSSTIIYQSITGLYESRKRLDD

SEQ ID NO: 309 - protein, 1334 aa, Listeria monocytogenes
  source 1..1334: note = Listeria monocytogenes FSL J1-194
MKNPYTIGLDIGTNSVGWAVLTDQYDLVKRKMKVAGNSDKKQIKKNFWGVRLFDDGQTAVDRRMNRTARRRIERRRNRISYLQEIFAVEMANIDANFFCRLNDSFYVDSEKRNSRHPFFATIEEEVAYHKNYRTIYHLREELVNSSEKADLRLVYLALAHIIKYRGNFLIEGALDTKNTSVDEVYKQFIQTYNQVFMSNIEEGALAKVEENTEVASILAGKFTRREKFERILRLYPGEKSTGMFAQFISLIVGNKGNFQKVFNLVEKTDIECAKDSYEEDLEALLAIIGDEYAELFVAAKNTYNAVVLSSIITVTATETNAKLSASMIERFDAHEKELGELKAFIKLHLPKQYQEIFNNAEIDGYAGYIDGKTKQVDFYKYLKTTLENVEGADYFITKIEEENFLRKQRTFDNGVIPHQLHLEELEAILHQQAKYYPFLREGYDKIKSLVTFRIPYFVGPLANGQSEFAWLTRKDDGEIRPWNIEEKVDFGKSAVDFIEKMTNKDTYLPKENVLPKHSLCYQKYMVYNELTKIRYIDDQGKTNYFSGREKQQIFNDLFKQKRKVKKKDLELFLRNINHIESPTIEGLEDSFNASYATYHDLLKVGLKQEILDNPLNTEILEDIVKILTVFEDKRMIKEQLEQFSDVLDGVVLKKLERRHYTGWGRLSAKLLVGIRDKQSHLTILDYLMNDDGLNRNLMQLINDSNLSFKSIIEKEQVSTTDKDLQSIVADLAGSPAIKKGILQSLKIVDELVSIMGYPPQTIVVEMARENQTTGKGKNNSKPRYKSLEKAIKDFGSQILKEHPTDNQELKNNRLYLYYLQNGKDIYTGQELDIHNLSNYDIDHIVPQSFITDNSIDNLVLTSSAGNREKGGDVPPLEIVRKRKVFWEKLYQGNLMSKRKFDYLTKAERGGLTEADKARFIHRQLVETRQITKNVANILHQRFNKETDNHGNTMEQVRIVTLKSALVSQFRKQFQLYKVREVNDYHHAHDAYLNGVVANTLLKVYPQLEPEFVYGEYHQFDWFKANKATAKKQFYTNIMLFFAQKERIIDENGEILWDKKYLETIKKVLDYRQINIVKKTEIQKGEFSKATIKPKGNSSKLIPRKENWDPMKYGGLDSPNMAYAVIIEHAKGKKKIVIEKKLIQINIMERKMFEKDEEAFLEEKGYHQPKVLTKLPKYTLYECEKGRRRMLSSANEAQKGNQLVLSNHLVSLLYHAKNCEASDGKSLKYIEAHRETFSELLAQVSEFATKYTLADANLSKINNLFEQNKEGDIKAIAQSFVDLMAFNAMGAPASFKFFEATIDRKRYTNLKELLSSTIIYQSITGLYESRKRLDD

SEQ ID NO: 310 - protein, 1334 aa, Listeria monocytogenes
  source 1..1334: note = Listeria monocytogenes FSL J1-208
MKNPYTIGLDIGTNSVGWAVLTDQYDLVKRKMKVAGNSDKKQIKKNFWGVRLFDEGETAADRRMNRTARRRIERRRNRISYLQEIFALEMANIDANFFCRLNDSFYVDSEKRNSRHPFFATIEEEVAYHKNYRTIYHLREELVNSSEKADLRLVYLALAHIIKYRGNFLIEGALDTKNTSVDGVYKQFIQTYNQVFISNIEEGTLAKMEENTTVADILAGKFTRKEKLERILQLYPGEKSTGMFAQFISLIVGSKGNFQKVFDLVEKTDIECAKDSYEEDLEALLAIIGDEYAELFVAAKNTYNAVVLSSIITVTDTETNAKLSASMIERFDAHEKDLSELKAFIKLHLPKQYEEIFSNVAIDGYAGYIDGKTKQVDFYKYLKTLLENIEGADYFIAKIEEENFLRKQRTFDNGAIPHQLHLEELEAILHQQAKYYPFLKEAYDKIKSLVTFRIPYFVGPLANGQSDFAWLTRKADGEIRPWNIEEKVDFGKSAVDFIEKMTNKDTYLPKENVLPKHSLYYQKYMVYNELTKVRYIDDQGKTNYFSGQEKQQIFNDYFKQKRKVSKKDLEQFLRNMSHIESPTIEGLEDSFNSSYATYHDLLKVGIKQEVLENPLNTEMLEDIVKILTVFEDKRMIKEQLQQFSDVLDGAVLKKLERRHYTGWGRLSAKLLVGIRDKQSHLTILDYLMNDDGLNRNLMQLINDSNLSFKSIIEKEQVSTTDKDLQSIVADLAGSPAIKKGILQSLKIVDELVSIMGYPPQTIVVEMARENQTTVKGKNNSRPRYKSLEKAIKEFGSQILKEHPTDNQELRNNRLYLYYLQNGKDMYTGQELDIHNLSNYDIDHIVPQSFITDNSIDNLVLTSSAGNREKGDDVPPLEIVRKRKVFWEKLFQGNLMSKRKFDYLTKAERGGLTEADKATFIHRQLVETRQITKNVANILHQRFNNETDNHGNNMEQVRIVMLKSALVSQFRKQFQLYKVREVNDYHHAHDAYLNGVVANTLLKVYPQLEPEFVYGEYHQFDWFKANKATAKKQFYTNIMLFFAQKERIIDENGEILWDKKYLETIKKVLDYRQMNIVKKTEIQKGEFSKATIKPKGNSSKLIPRKENWDPMKYGGLDSPNMAYAVIIEHAKGKKKVVFEKKIIRITIMERKAFEKDEKSFLEKQGYRQPKVLTKLPKYTLYECENGRRRMLASANEAQKGNQQVLKGQLITLLHHAKNCEASDGKSLDYIESNREMFGELLAHVSEFAKRYTLADANLSKINQLFEQNKDNDIKVIAQSFVNLMAFNAMGAPASFKFFEATIERKRYTNLKELLSATIIYQSITGLYEARKRLDG

SEQ ID NO: 311 - protein, 1334 aa, Listeria monocytogenes
  source 1..1334: note = Listeria monocytogenes FSL N3-165
MKKPYTIGLDIGTNSVGWAVLTDQYDLVKRKMKISGDSEKKQIKKNFWGVRLFEKGETAAKRRMSRTARRRIERRRNRISYLQEIFAIQMNEVDDNFFNRLKESFYAESDKKYNRHPFFGTVEEEVAYYKDFPTIYHLRKELIDSQKKADLRLVYLALAHIIKYRGHFLIEGALDTKNTSIDEMFKQFLQIYNQVFANDIEEASLKKTEKNQEVAQILAEKFTRKDKLDKILSLYPGEKTTGVFAQFVNIIVGSTGKFKKHFNLHEKKDINCAEDTYDTDLESLLAIIGDEFAEVFVAAKNAYNAVVLSNIITVTDSTTRAKLSASLIERFENHKEDLKKMKRFVRTYLPEKYDEIFDDTEKHGYAGYISGKTKQADFYKYMKATLEKIEGADYFIAKIEEENFLRKQRTFDNGVIPHQLHLEELEAILHQQAKYYPFLREDYEKIKSLVTFRIPYFVGPLAKGQSEFAWLTRKADGEIRPWNIEEKVDFGKSAVDFIEKMTNKDTYLPKENVLPKHSLCYQKYMVYNELTKVRYIDDQGKTNYFSGQEKQQIFNDLFKQKRKVKKKDLELFLRNINQIESPTIEGLEDSFNASYATYHDLLKVGMKQEILDNPLNTEMLEDIVKILTVFEDKRMIKEQLQQFSDVLDGTVLKKLERRHYTGWGRLSAKLLVGIRDKQSHLTILDYLMNDDGLNRNLMQLINDSNLSFKSIIEKEQVSTTDKDLQSIVAELAGSPAIKKGILQSLKIVDELVSVMGYPPQTIVVEMARENQTTNKGKNNSKPRYKSLEKAIKEFGSQILKEHPTDNQELKNNRLYLYYLQNGKDMYTGQELDIHNLSNYDIDHIVPQSFITDNSVDNLVLTSSAGNREKGDNVPPLEIVQKRKIFWEKLYQGNLMSKRKFDYLTKAERGGLTEADKARFIHRQLVETRQITKNVANILHQRFNYKTDGNKDTMETVRIVTLKSALVSQFRKQFQFYKVREVNDYHHAHDAYLNGVVANTLLKVYPQLEPEFVYGEYHQFGWFKANKATAKKQFYTNIMLFFAQKDRIIDENGEILWDKRYLETVKKVLGYRQMNIVKKTEIQKGEFSNVTPNPKGKSNKLIPRKKDWDPIKYGGFDGSKMAYAIIIEYEKQKRKVRIEKKLIQINIMEREAFEKDEKTFLEEKGYHQPKVLIKVPKYTLYECKNGRRRMLGSANEAHKGNQMLLPNHLMALLYHAEKYEAIDGESLAYIEVHRALFDELLAYISEFARKYTLSNDRLDEINMLYERNKDGDVKSIAESFVSLKKFNAFGVHQDFSFFGTKIERKRDRKLNELLNSTIIYQSITGLYESRKRLDN

SEQ ID NO: 312 - protein, 1334 aa, Listeria monocytogenes
  source 1..1334: note = Listeria monocytogenes FSL R2-503
MKNPYTIGLDIGTNSVGWAVLTDQYDLVKRKMKVAGNSDKKQIKKNFWGVRLFDDGQTAVDRRMNRTARRRIERRRNRISYLQEIFAVEMANIDANFFCRLNDSFYVDSEKRNSRHPFFATIEEEVAYHKNYRTIYHLREELVNSSEKADLRLVYLALAHIIKYRGNFLIEGALDTKNTSVDEVYKQFIQTYNQVFMSNIEEGALAKVEENTEVASILAGKFTRREKFERILRLYPGEKSTGMFAQFISLIVGNKGNFQKVFNLVEKTDIECAKDSYEEDLEALLAIIGDEYAELFVAAKNTYNAVVLSSIITVTATETNAKLSASMIERFDAHEKELGELKAFIKLHLPKQYQEIFNNAEIDGYAGYIDGKTKQVDFYKYLKTTLENVEGADYFITKIEEENFLRKQRTFDNGVIPHQLHLEELEAILHQQAKYYPFLREGYDKIKSLVTFRIPYFVGPLANGQSEFAWLTRKDDGEIRPWNIEEKVDFGKSAVDFIEKMTNKDTYLPKENVLPKHSLCYQKYMVYNELTKIRYIDDQGKTNYFSGREKQQIFNDLFKQKRKVKKKDLELFLRNINHIESPTIEGLEDSFNASYATYHDLLKVGLKQEILDNPLNTEILEDIVKILTVFEDKRMIKEQLEQFSDVLDGVVLKKLERRHYTGWGRLSAKLLVGIRDKQSHLTILDYLMNDDGLNRNLMQLINDSNLSFKSIIEKEQVSTTDKDLQSIVADLAGSPAIKKGILQSLKIVDELVSIMGYPPQTIVVEMARENQTTGKGKNNSKPRYKSLEKAIKDFGSQILKEHPTDNQELKNNRLYLYYLQNGKDIYTGQELDIHNLSNYDIDHIVPQSFITDNSIDNLVLTSSAGNREKGGDVPPLEIVRKRKVFWEKLYQGNLMSKRKFDYLTKAERGGLTEADKARFIHRQLVETRQITKNVANILHQRFNKETDNHGNTMEQVRIVTLKSALVSQFRKQFQLYKVREVNDYHHAHDAYLNGVVANTLLKVYPQLEPEFVYGEYHQFDWFKANKATAKKQFYTNIMLFFAQKERIIDENGEILWDKKYLETIKKVLDYRQINIVKKTEIQKGEFSKATIKPKGNSSKLIPRKENWDPVKYGGLDSPNMAYAVIIEHAKGKKKIVIEKKLIQINIMERKMFEKDEEAFLEEKGYHQPKVLTKLPKYTLYECEKGRRRMLSSANEAQKGNQLVLSNHLVSLLYHAKNCEASDGKSLKYIEAHRETFSELLAQVSEFATKYTLADANLSKINNLFEQNKEGDIKAIAQSFVDLMAFNAMGAPASFKFFEATIDRKRYTNLKELLSSTIIYQSITGLYESRKRLDD

SEQ ID NO: 313 - protein, 1334 aa, Listeria monocytogenes
  source 1..1334: note = Listeria monocytogenes serotype 1/2a str. F6854
MKNPYTIGLDIGTNSVGWAVLTNQYDLVKRKMKVAGNSDKKQIKKNFWGVRLFDDGQTAVDRRMNRTARRRIERRRNRISYLQEIFAVEMANIDANFFCRLNDSFYVDSEKRNSRHPFFATIEEEVAYHDNYRTIYHLREKLVNSSEKADLRLVYLALAHIIKYRGNFLIEGALDTKNTSVDEVYKQFIETYNQVFMSNIEEGALAKVEENIEVANILAGKFTRREKFERILQLYPGEKSTGMFAQFISLIVGSKGNFQKVFDLIEKTDIECAKDSYEEDLETLLAIIGDEYAELFVAAKNTYNAVVLSSIITVTDTETNAKLSASMIERFDAHEKDLVELKAFIKLNLPKQYEEIFSNAAIDGYAGYIDGKTKQVDFYKYLKTILENIEGSDYFIAKIEEENFLRKQRTFDNGAIPHQLHLEELEAIIHQQAKYYPFLKEDYDKIKSLVTFRIPYFVGPLANGQSEFAWLTRKADGEIRPWNIEEKVDFGKSAVDFIEKMTNKDTYLPKENVLPKHSLCYQKYMVYNELTKIRYIDDQGKTNYFSGREKQQVFNDLFKQKRKVKKKDLELFLRNINHIESPTIEGLEDSFNASYATYHDLLKVGMKQEILDNPLNTEMLEDIVKILTVFEDKPMIKEQLQQFSDVLDGGVLKKLERRHYTGWGRLSAKLLVGIREKQSHLTILDYLMNDDGLNRNLMQLINDSNLSFKSIIEKEQVSTTDKDLQSIVAELAGSPAIKKGILQSLKIVDELVSIMGYPPQTIVVEMARENQTTGKGKNNSKPRYKSLEKAIKEFGSQILKEHPTDNQELKNNRLYLYYLQNGKDMYTGQELDIHNLSNYDIDHIVPQSFITDNSIDNLVLTSSAGNREKGGDVPPLEIVRKRKVFWEKLYQGNLMSKRKFDYLTKAERGGLTEADKARFIHRQLVETRQITKNVANILYQRFNKETDNHGNTMEQVRIVTLKSALVSQFRKQFQLYKVREVNGYHHAHDAYLNGVVANTLLKVYPQLEPEFVYGEYHQFDWFKANKATAKKQFYTNIMLFFAQKERIIDENGEILWDKKYLETIKKVLDYRQMNIVKKTEIQKGEFSKATIKPKGNSSKLIPRKENWDPMKYGGLDSPNMAYAVIIEHAKGKKKIVIEKKLIQINIMERKMFEKDEEAFLEEKGYRHPKVLTKLPKYTLYECEKGRRRMLASANEAQKGNQLVLSNHLVSLLYHAKNCEASDGKSLKYIEAHRETFSELLAQVSEFATRYTLADANLSKINNLFEQNKEGDIKAIAQSFVDLMAFNAMGAPASFKFFEATIDRKRYTNLKELLSSTIIYQSITGLYESRKRLDD

SEQ ID NO: 314 - protein, 1087 aa, unidentified
  source 1..1087: note = Listeriaceae bacterium TTU M1-001
MKKLVLGLDIGVASVGWGIIDAENGDVVDTGVRLFSSRDASENESRRTSRQSRRLSRRKKHRRERIKQLLLAHDMDICDIVNENPYELRVKGLNEKLEVSEIYVALTHLAKRRGVSYLDDVVEEGGTIKSEHLNKNMEEIKSGKMPCEIQLERFEKYGQVRGMIEINQDTEESSFLVNIFRTSDYIKEAKTILATQQKFHKQITNEFIDEYIHIMASKRDYFIGPGNEKSRTDYGVYRTNGDTWDNLFEILIGKCSVFPEETRAARSSYVAQEFNLLNDLNNLKISNLESGKLSASQKHDIVEKVKNSKKFGTKDLLKYIASVCECKIEDIGGCRVDKNRKPIMHTFENYRKVHNALNEAGVDLRLSETDYDELMKIMTLNSETLEIKKQCKEKLPQLTEDYLNVCLVLNKKGAFSGWHALSLKAMKLMMPELYGTSKNQMQIIHTMQLGKAYLKPLNQQKYLNSEAILEEIYNPIAARSIRQTIKVTNAILKKYGHLDSVIIEMPRDYQTSEDERKMIEKMQKENEKEKKAALKRAREEYPFPDEAFRNHKELATKLRLWYQQDQFCVYSGRKISVVDLVRNPNQFEIDHIIPQSVSLDDSLNNKVLCFSEENQKKGQQTPFYYHKGKSGNWTYEQYKLFVEKLFDKKKISNKKRELLLFEEDINKWDVRRGFIARNLVDTRYASRVILNSYQQYFGNHEMGTKVKVVRGKFTSQLRKKWRIFKDRNESHSHHAIDALIVAATANLRLWKKNTLGVSDEGKVYDKETGEILPFEKLTESEYNEMMNKEPYLNFKTKLQNIETKVKYSYRVSKKVNRKISDATIYSTRERDGIDYIVGKIKNIYDVKTYKDQFLKRYKKNKEQFLMYQHDPQTFAILENIMATYQDAENPFLAYKKEYGVIRKYSKKGGGSPVTSLKFIDKVLGQKIDLTAKNQAALPKNKKVVLQSITPYRADVYYDEIDKRYHLIGVKYSLFSFSKQGYVINPIAYQKLLEKEQIHSEMKFCFSLYREDIIEFGEDPDSLTRYRFWSKNESGKNKIEVKPIEKPNFEKQTVLTITKKIKILNKYQTDVLGNSFKAQEEKDPRNIE

SEQ ID NO: 315 - protein, 1345 aa, Marinilabilia sp.
  source 1..1345: note = Marinilabilia sp. AK2
MKKILGLDLGTTSIGWAFIKEPEKDVVGSEIVDMGVRIVALSSDEENDFAKGNTISINADRTLKRGARRNLQRFKLRRDALLEIFKEMKLIPSNFKYAEDGPSSTFSTLKLRDKAAKEKIELDDLVKVLLQINKKRGYRSSRKAKSEEDDGSAIDSMGIAKELYENDLTPGQWVFEALQKGRKNVPDFYRSDLQEEFKKIVNYQSEFYPDVLNSSFVEDWMGKASTPTKQYFNKKGVHLAENKGKREERRLQEYNWRAVAVNSKIDLSEIALILSQINSQISNSSGYLGAISDRSKELYFKNQTVGQYLYQQIKINPHTRLKGQVFYRQDYLDEFEKIWSVQSGFHPQLNDALKKEIRDITIFFQRRLKSQKHLISNCEFEDYHKVVPKSHPIFQEFRIWQNLNNLTLIKKDNLNEKSELALEDKIALANELAFKREQSVKDALNILGLKSSEWEFNFTKIEGNRTNHAFFEAFAKIIEIEDGEPLDLGNLKADDILDQFSEAFLRIGIDPGLLQVNNDIEGPNYEKQPYIQFWHLLYSSEDDQKLKQNLIKKFGFKPDHAKILASISLQDDHASLSSRAIKKILPHLQSGLIYDKACTYAGYNHSSSFTKEENEKRELSSELDLLKKNSLRNPVVEKILNQMINVVNAILKDPNLGKPDEIRVEMARELKANAEQRKNMTSNIASATRDHEKYREILKKEFGLKRVTKNDLLRYKLWLETDGISLYTGKPIEASKLFSKEYDIEHIIPKTRLFDDSFSNKTICERQLNIDKANVTAFSFLQNKLSGDEFEQYQSRVKSLFGKLSKAKIQKLLMANDKIPEDFIARQLQETRYISKKAKEILFEITRRVSVTTGTITDKLREDWGLVEIMKELNWEKYDKLGLTYTIEGKHGERLNKIKDWSKRNDHRHHAMDALTVALTKPAYIQYLNNLNAKELNGKKSTEIFAIEQKYLKRENGKLCFIPPVENIRTEAKKHLSKVLISYKAKNKVVTINKNRTNKKAGFNEQIALTPRGQLHKETVYGKAFHYSTKFEKIGASFDVQKINAVAKKEEREALLKRLAENGDDPKKAFTGKNSLSKMPIYLDLKRNIKLPEKVKTVVLEQNYTIRKNIDPDLKLDKVIDVGVKRILENRLKEFGGNAKLALSNLDENPIWLNKEKGITIKRVKISGVSNVESLHVKKDHFGEPILDQVGNEIPVDFVSTGNNHHVAIYEDEKGNLQEEVVSFFEAVVRQNQGLPIINKNHSLGWKFLFTLKQNEYFVFPSDDFDPTDVDLMDEENYHLISPNLFRVQKFTTKDYFFRHHLETTVEDKSELKGVSFKRLGLPGLNCIKKIRINHLGKIIQVGEY

SEQ ID NO: 316 - protein, 1352 aa, Megasphaera sp.
  source 1..1352: note = Megasphaera sp. UPII 135-E
MKKRNREEYYVGLDIGTSSVGWAVATPDYRIPKFRGHKMWGSRLFAEGKRAAERRQFRTNRRRLARRRDRLQILEELFAEEMAKVDNTFFMRLKESKFFLEDKTVKEKHILFSTDKFDADRFYKDNPTIYHVRKRLMEEEPQDIRELFLAVHHILKYRGHFLFAGSLEQNGASIEELVRTLLGKQGLAILDDTIDSNEMVNILKNTGETKSDRKKDVQELWNPLKDKVKKAQAAEMAGLVLGLKSDISKLFANSDYKDLDSSIKNINFSSGDYEEKRDDYANSIGDDIVLLDTMKALYDTLILSQILQGKRSISAAKVEDYNTHKEQLRALKAILKPHKRLYNEMFRENNKKDLSNYVAYISSYSEGKRVNREGFYKYVQAVLKQVDDSDSKQAILEAIRLETFLPLLRVKDNAVIPHQIHQAELEAILETARKKYNFLNDVSDGVSVKDKIIQLFTFRIPYYVGPLNPHSGETVADRKQGTGWVVRKQRGKVYPWNFADMVDVKASAEAFITNLTNKCTYLIGEDVLPKRSLLYSEFMLLNELNMIKYDGHELPVAIKQLYIEQVFKQEHKKQTKGRVLDFLKRNGLITGSATAVITGMDDAIKGDLQSYRDMVRIFGAGFDHSMAERIIRWVTLFGEAKDILENKIREVYGNSISDSQMRAIKKLKYADWGRLSQAFLIAVKGCDKSGVERNIITCLRASSQNLMEILSDQGTYIKQIKAWNHQHTTNMMDTLDYQLVDDLYVAPSVKRSIWQSLCIVEELVKIMGQAPKKIFVEVTRTKQAEKTKKDSRKKRLVELYTAIGKEGAAWKKEIEAHQAGDFRRKKLYLYYTQMGRCMYSNEPIAMDALFTSAYDIDHIYPQSLTKDGSWDNLVLVKSQLNKEKSDQYPLRPAIREKNKAHWQYLCRAGFISEKKYERLMRTTELTAEELSGFIARQLVETSQATKAVTGLLERIYTNTEICFVKAETVSQFRHQHNFIKIRELNNYHHAKDAYLNIVVGNVYHEKFTKNPWEFIARSTERRPYNLNRMYDFDLLKQGRVIWQVPKSLETVQAMMKSNDVRITKKLLVQKGELYDATITKAHKAKEGTYFPLKGADARLRDVHRYGGYEKIKIAYYSVFSCREKASNTIHTLIIPIPVYKAGLLQTEADLTAYAWQTKQKTKPIKDIYSAITPIYKKLCINTVVKIDGFKYFLGGKTGDYMWLDPAIPVVLDEQAAAYLKAISKVGRADDVENTAQAIDLITAEANEAFYDVLLKKMEAKIFAKAYQTIVEKLASETARERFRELSIGAQCSCLLEILNLLANNKTTFTFFKDKMGVTMSRRKQPMDLTKLEECIVYETSITGLYEKAVSLL

SEQ ID NO: 317 - protein, 1080 aa, Methylocystis sp.
  source 1..1080: note = Methylocystis sp. ATCC 49242
MRVLGLDGGIASIGWALIEIFEDHEPSDGRIIDTGAWMFDAPEEKSQTGTKLKSELRRIFRGQRRVIRRRRQRMNEVRRILHRHGLLSSDNRDALKQPGLDPWKIRAEGIDRLLSPIEFAVALGHIARHRGFKSNSKGAKTSDLDAESSRMKKAVGETREKLARFGSPAKLLVEDEGFVLRQTKLKSGALETVRRFRNRDGDYSRSLLRDDLAAEVRALFRAQARLQSTFAKVELEAEFTQAAFFQRPLQDSERLVGPCPFEPAEKRSPKRGYSFELFRFLSRLNHLTLREGSEERTLTVEELRTAAADFGGVAKFTFSTLRKRLALPDIAIFVGIKADDEKKLDVVARSGEAATGTARLRRVVIDALGELAWGALISAPERLDKITEIITFRSDLDRIRAGLIEAGFDTPLIEAIVRAAADGKLDAFTGVGHISAKAARNIIPGLMRGMTYDKACAAAGYDHTASRERDAFDVGMHGKEALKKILQEERISRELVGSPSARKALIEAVKQVKAIIEKYGVPDRIHVELARDVGKSIEERRDIHFGIEKRSRQKDKLRELFGKEVGHLPQDGERGKEELLRFELWNEQMGRCLYTDEYINPKQLVASDNSVQVDHILPWSRFGDDSYLNKTLCTAKANQDKKGRTPYEWFRADKPEAEWDAFVARVESIQFMKGLKKRNYKLKNAEEAAEKFRSRNLNDTRWTCRLLAEALKQLYPKGEKDKDGKERRRVFTRPGALTNRLRRAWSLQRRKKSEKGERIADDRHHALDAIIVAATTESLLIRATREVQDIERKGLHYDLTKNITQPWPGFADEALDAVEKVFVARAERRRARGKAHDATIRHIAVRDDEAKVYERKKVGDIKLGDLIRVKDAERNAPLIENLRKWIEAGSPRDNPPLSPKGDPVSKVRLVTKNKVNITLDTGNPERLATVDRGEMARVDVFRKANRKGKYEYYLVPIYPHEIATMETPPMRAVQGGGDDDKWPEIDSTFEFLWSINQLSLLELTKPDGEVIRSYFRSLDRNTGALTVSGIANSTATRKGIGTRTLIDFKKLHVDRLGQIFEVERELRTWRGETWRGKDCI

SEQ ID NO: 318 - protein, 1082 aa, Methylosinus trichosporium
  source 1..1082: note = Methylosinus trichosporium OB3b
MRVLGLDAGIASLGWALIEIEESNRGELSQGTIIGAGTWMFDAPEEKTQAGAKLKSEQRRTFRGQRRVVRRRRQRMNEVRRILHSHGLLPSSDRDALKQPGLDPWRIRAEALDRLLGPVELAVALGHIARHRGFKSNSKGAKTNDPADDTSKMKRAVNETREKLARFGSAAKMLVEDESFVLRQTPTKNGASEIVRRFRNREGDYSRSLLRDDLAAEMRALFTAQARFQSAIATADLQTAFTKAAFFQRPLQDSEKLVGPCPFEVDEKRAPKRGYSFELFRFLSRLNHVTLRDGKQERTLTRDELALAAADFGAAAKVSFTALRKKLKLPETTVFVGVKADEESKLDVVARSGKAAEGTARLRSVIVDALGELAWGALLCSPEKLDKIAEVISFRSDIGRISEGLAQAGCNAPLVDALTAAASDGRFDPFTGAGHISSKAARNILSGLRQGMTYDKACCAADYDHTASRERGAFDVGGHGREALKRILQEERISRELVGSPTARKALIESIKQVKAIVERYGVPDRIHVELARDVGKSIEEREEITRGIEKRNRQKDKLRGLFEKEVGRPPQDGARGKEELLRFELWSEQMGRCLYTDDYISPSQLVATDDAVQVDHILPWSRFADDSYANKTLCMAKANQDKKGRTPYEWFKAEKTDTEWDAFIVRVEALADMKGFKKRNYKLRNAEEAAAKFRNRNLNDTRWACRLLAEALKQLYPKGEKDKDGKERRRVFSRPGALTDRLRRAWGLQWMKKSTKGDRIPDDRHHALDAIVIAATTESLLQRATREVQEIEDKGLHYDLVKNVTPPWPGFREQAVEAVEKVFVARAERRRARGKAHDATIRHIAVREGEQRVYERRKVAELKLADLDRVKDAERNARLIEKLRNWIEAGSPKDDPPLSPKGDPIFKVRLVTKSKVNIALDTGNPKRPGTVDRGEMARVDVFRKASKKGKYEYYLVPIYPHDIATMKTPPIRAVQAYKPEDEWPEMDSSYEFCWSLVPMTYLQVISSKGEIFEGYYRGMNRSVGAIQLSAHSNSSDVVQGIGARTLTEFKKFNVDRFGRKHEVERELRTWRGETWRGKAYI

SEQ ID NO: 319 - protein, 1123 aa, Mobiluncus curtisii
  source 1..1123: note = Mobiluncus curtisii subsp. holmesii ATCC 35242
MFVYLNSPRGFGPATFLTDLPHFCIIFGNNDFMDNRKYHVGIDVGTNSVGFAAVEVGDSGSPIRFLNTMVVIHDSGVDPEQKKYAITRLASAGTARRTRRLYRTRRQRLRELDDFISNELGYPLVNLENFADPYEPWKVRADLATIKLPADELPEAMSIALRHMARHRGWRSPYQRVEALHLHAEISEEFSALKKRVMEKTGDVFSDDATPAEVLVDLMGRQKIRGADGMLSGKLRQSDNANELRKIASVQGIDDETLNRIIDRVFFSRSPKGKASERVGMDALPGQGSKPRALKAMPSFQKFRIVSVICNLRIKDSGDDNRPLSMEEKEQLIGYLMSSTTDDHVTWTDVAELLHVKRSNLQGTAKEGPDGERPYTRPPVNSAWSKIKDSKIKSLVALWKTGDVDVQSAIVEALSNASVLEDARPGADIVVAYLESLDDKELESLDKVGLPAGRASYSEDSLERLTERMLQDDCDLFEARKREFGVSDDWKPPADPIYAPVGNPGVDRVLKIVNRLLMAAEREWGAPTQINIEHVRSGFSSELMQREFERENERRRAQNEEAVKAILTEKGGNSHVSKYDIIRYYAVKRQNCQCLYCGTPITFSDCELDHIVPRKGVGSTNSRVNLAAACRSCNRDKSNLPFAVWAGKTSNFDVSIDGAVSRVKQWQRSQNEGAREFRAFQNEVISRLLKTTEDPEIDSRSLESVAWMARELHHRVEYYFQSKGAQTQVSVYRGAVTAQARKSSGLEDKVKMIGGGGKTRLDRRHHAMDAATIALMTPGISTTLSEKNNLRDAQKFTGQSETWKDYCGRTETAREHFAVWKSNMERLTDLFNDKLENDAIPVVQPLRLRLSDSKAHDDGIGKLDSKKLGSVWSLADIDRAATPQIWTALTRCDDFDPTKGLPENANRVIRAQGVKYESEDNIPVFPSNVAAIAVRDGYAEIGSTIHHARIYRIDDGKKIFYSMIRVFAVDLLKHQAEDLFTVKLPPSAISIRTCEDSLRRALSNGTAEYLGWLVPGDEIIVDTSDKAFHTGQIGDLLRNFPVNSFRLTGFPSNSRLRLKPVLLAGEGLRDDAEDSIKKILSGQGWRPAINVLFSKGKPRIVRRNSLGIERPSSNNGLPFSWEA

SEQ ID NO: 320 - protein, 1091 aa, Mobiluncus mulieris
  source 1..1091: note = Mobiluncus mulieris 28-1
MDSRKYRVGIDVGTNSVGFAAVEEDDSGSPTRFLNTMVVIHDSGVDPEQKKYAITRLASAGTARRTRRLYRTRRQRLRELDDFISNELGYPLVNLENFADPYEPWKVRADLATTKLPNDELPEAMSIALRHMARHRGWRSPYQRVEALHLHAEISKEFAALKERVVEKTGDVFSDDATPAEVLVDLMGRQKVRGADGVLSGKLRQSDNANELRKIASVQGIDDETLNRIIDRVFSSKSPKGKASERVGMDALPGQGSKPRALKAMPSFQKFRVVSVICNLRIKDSGGDARPLSMEEKEKLIDYLMSSTTDDHVTWTDVADLLHVKRSQLQGTAKEGFDGERPYTRPPVNSTWSKIKDSKIKSLVALWKTGDVDVQSAIVEALSNASVLEDSRPGADIVVAYLESLDDKELESLDKVGLPAGRASYSEDSLERLTERMLRDDCDLFEARKREFNVADDWKPPADPIYAPVGNPGVDRVLKIVNRLLMAAEREWGAPTQINIEHVRSGFSSELMQREFERENERRRAQNEEAVKAILTEKGGNSRVSKYDITRYYAVKRQHCQCLYCGTPITFSDCELDHIVPRKGVGSTNTRVNLAAACRSCNRDKSNLPFAVWAGKASNFDVSIDDAVSRVKQWQRSQNEGVREFRAFQNEVISRLLKTTEDPEIDSRSLESVAWMARELHHRVEYYFQSKGAQTQVSVYRGAVTAQARKSSGLEDKVKMIGGGGKTRLDRRHHAMDAATIALMTPGISTTLSEKNNLRDAQKFTGQSETWKDYCGRTETARKHFAVWKSNMERLTDLFNDKLENDAIPVVQPLRLRLSNSKAHDDGIGKLDSKKLGSVWSLADIDRAATPQIWTALTRCDDFDPTKGLPENANRVIRAQGVKYESEDNIPVFPSNVAAIAVRDGYAEIGSTIHHARIYRIDDGKKTFYSMIRVFAVDLLKHQAEDLFTVKLPPSAISIRTCEDSLRRALSNGTAEYLGWLVPGDEIIVDTSDKAFHTGQIGDLLRNFPVNSFRLTGFPSNSRLRLKPVLLAGEGLRDDAEDSIKKILLGQGWRPAINVLFSKGKPRIVRRNSLGIERPSSNNGLPFSWEA

SEQ ID NO: 321 - protein, 1091 aa, Mobiluncus mulieris
  source 1..1091: note = Mobiluncus mulieris FB024-16
MDSRKYRVGIDVGTNSVGFAAVEEDDSGSPTRFLNTMVVIHDSGVDSEQKKYAITRLASAGTARRTRRLYRTRRQRLRELDDFISNELGYPLVNLENFADPYEPWKVRADLATTKLPNDELPEAMSIALRHMARHRGWRSPYQRVEALHLHAEISKEFAALKERVVEKTGDVFSDDATPAEVLVDLMGRQKVRGADGVLSGKLRQSDNANELRKIASVQGIDDETLNRIIDRVFSSKSPKGKASERVGMDALPGQGSKPRALKAMPSFQKFRVVSVICNLRIKDSGGDARPLSMEEKEKLIDYLMSSTTDDHVTWTDVADLLHVKRSQLQGTAKEGFDGERPYTRPPVNSTWSKIKDSKIKSLVALWKTGDVDVQSAIVEALSNASVLEDSRPGADIVVAYLESLDDKELESLDKVGLPAGRASYSEDSLERLTERMLRDDCDLFEARKREFNVADDWKPPADPIYAPVGNPGVDRVLKIVNRLLMAAEREWGAPTQINIEHVRSGFSSELMQREFERENERRRAQNEEAVKAILTEKGGNSRVSKYDITRYYAVKRQHCQCLYCGTPITFSDCELDHIVPRKGVGSTNTRVNLAAACRSCNRDKSNLPFAVWAGKASNFDVSIDDAVSRVKQWQRSQNEGVREFRAFQNEVISRLLKTTEDPEIDSRSLESVAWMARELHHRVEYYFQSKGAQTQVSVYRGAVTAQARKSSGLEDKVKMIGGGGKTRLDRRHHAMDAATIALMTPGISTTLSEKNNLRDAQKFTGQSETWKDYCGRTETARKHFAVWKSNMERLTDLFNDKLENDAIPVVQPLRLRLSNSKAHDDGIGKLDSKKLGSVWSLADIDRAATPQIWTALTRCDDFDPTKGLPENANRVIRAQGVKYESEDNIPVFPSNVAAIAVRDGYAEIGSTIHHARIYRIDDGKKTFYSMIRVFAVDLLKHQAEDLFTVKLPPSAISIRTCEDSLRRALSNGTAEYLGWLVPGDEIIVDTSDKAFHTGQIGDLLRNFPVNSFRLTGFPSNSRLRLKPVLLAGEGLRDDAEDSIKKILLGQGWRPAINVLFSKGKPRIVRRNSLGIERPSSNNGLPFSWEA

SEQ ID NO: 322 - protein, 1473 aa, Mucilaginibacter paludis
  source 1..1473: note = Mucilaginibacter paludis DSM 18603
MKNILGLDLGTNSIGWALIEKDTDQKNGNILGTGSRIIPMSQDIKDEFGKGNSISQTADRTKFRSVRRLRERHLLRRERLHRVLNVLGFLPKHYADQIDFKKRLGKLVNETEPKLVYDNKNFIFKKSFEAMLSDFNQHQPLLLADGKKVPFDWTIYYLRKKALTEKIEKEELAWLILNFNQKRGYYQLRGEEEEENPNKMVAFHSLKIVEVIADESQKGKAETWYSLILENGWIYRRSSKTPLYDWKGKQRDFIVTTDLNDDGSIKTDKEGLEKRSFRAPVEDDWTLVKKKTEQEINRSHKTVGTYIYENLLQDPKQKIKGKLVRTIEREFYKDELKMILKNQQKFHPELNDEHLYINCVRELYRNNQAHQTILSKKDFVHLFIDDIIFYQRPLRSQKSSISNCTLEFRKYKNENGTDQTDYLKAIPKSHPLFQEFRLWQWIYNLGIYQKEDDTNVTDELIKNIDGYQDLFDFLNNKKEIRQDILIKFLVEQTGLKGKPLSSVVAKYRWNFVEDKIYPCNETGTQIRTRLAKVENTPEDFLTAETEIKLWHIIYSVNDKADYEKALKTFAEKHNLDTHSFVENFKKFPPFKSEYGSFSEKAIKKLLPLIRLGKYWSWENIDKKTQERIEKILTGEFDEAIKSRVRDKAIHLTEEDHFQGLQLWLASYVVYGRHSEADNLDKWHTVADLEDYLAEFRQHSLRNPIVEQVITETLRVVKDIWLQYGQGAKDFFSEIHIELAREMKNTGDERKRLTSLVTDNENTNLRIKVLLSELLNDGNVENVRPYSPMQQEALKIFEDGVLNSDIEIEDDILKISKMAQPTNTELKRYKLWLEQKYRSPYTGQIIPLNRLFTADYEIEHIIPQSRFFDDSFSNKIICESAVNQLKDKQLGLEFIKNHSGTIVKLGMGKTAKILDVESYNEFVKGNYTKNISKRNKLMLEEIPDKMIERQLNDTRYISKFIISALSNIVRSESNDDGFNSKNVLPGNGKITSRLKQDWGMNDIWNELILPRFERMNKITDSAVFTAWNENNQKFLPIVPLEFSKGFQKKRIDHRHHALDALVIAASTREHINLLNNEHAKSDKRFDLNRKLRKFEKVAYNDPKTGKRIEKEVPTIFLKPWETFTVDAKNSLESIIVSFKQNLRVINRATNYSESYNDENGALRLGKDGNPLKEKIKQSKGDSWAIRKPMHKDFVYGKVHLQNVKLPKDKFITAIRKSLDVTFDLKRIETITDTGIQKILKNYLHSKENKVELAFSPEGIEDMNQHIERYNDGKKHQPIHKVRVFEIGSRFSLGESGNKKTKFVEAAKGTNLFFAVYQDDNKGKRNYETIPLNIVIERQKLGLHSVPTEDAKGGKLLFHLSPNDMVYVPTSEELEDNLASVNIKRLNTAQRKRIYKVEKASGVECYFIRQDIAYLIKNYDAKTKIGELESQNKLQTTMTDDRLKITDVCVKLNIDRLGSIAETFLGNQYGASKKT

SEQ ID NO: 323 - protein, 1233 aa, Mycoplasma canis
  source 1..1233: note = Mycoplasma canis PG 14
MEKKRKVTLGFDLGIASVGWAIVDSETNQVYKLGSRLFDAPDTNLERRTQRGTRRLLRRRKYRNQKFYNLVKRTEVFGLSSREAIENRFRELSIKYPNIIELKTKALSQEVCPDEIAWILHDYLKNRGYFYDEKETKEDFDQQTVESMPSYKLNEFYKKYGYFKGALSQPTESEMKDNKDLKEAFFFDFSNKEWLKEINYFFNVQKNILSETFIEEFKKIFSFTRDISKGPGSDNMPSPYGIFGEFGDNGQGGRYEHIWDKNIGKCSIFTNEQRAPKYLPSALIFNFLNELANIRLYSTDKKNIQPLWKLSSVDKLNILLNLFNLPISEKKKKLTSTNINDIVKKESIKSIMISVEDIDMIKDEWAGKEPNVYGVGLSGLNIEESAKENKFKFQDLKILNVLINLLDNVGIKFEFKDRNDIIKNLELLDNLYLFLIYQKESNNKDSSIDLFIAKNESLNIENLKLKLKEFLLGAGNEFENHNSKTHSLSKKAIDEILPKLLDNNEGWNLEAIKNYDEEIKSQIEDNSSLMAKQDKKYLNDNFLKDAILPPNVKVTFQQAILIFNKIIQKFSKDFEIDKVVIELAREMTQDQENDALKGIAKAQKSKKSLVEERLEANNIDKSVFNDKYEKLIYKIFLWISQDFKDPYTGAQISVNEIVNNKVEIDHIIPYSLCFDDSSANKVLVHKQSNQEKSNSLPYEYIKQGHSGWNWDEFTKYVKRVFVNNVDSILSKKERLKKSENLLTASYDGYDKLGFLARNLNDTRYATILFRDQLNNYAEHHLIDNKKMFKVIAMNGAVTSFIRKNMSYDNKLRLKDRSDFSHHAYDAAIIALFSNKTKTLYNLIDPSLNGIISKRSEGYWVIEDRYTGEIKELKKEDWTSIKNNVQARKIAKEIEEYLIDLDDEVFFSRKTKRKTNRQLYNETIYGIATKTDEDGITNYYKKEKFSILDDKDIYLRLLREREKFVINQSNPEVIDQIIEIIESYGKENNIPSRDEAINIKYTKNKINYNLYLKQYMRSLTKSLDQFSEEFINQMIANKTFVLYNPTKNTTRKIKFLRLVNDVKINDIRKNQVINKFNGKNNEPKAFYENINSLGAIVFKNSANNFKTLSINTQIAIFGDKNWDIEDFKTYNMEKIEKYKEIYGIDKTYNFHSFIFPGTILLDKQNKEFYYISSIQTVRDIIEIKFLNKIEFKDENKNQDTSKTPKRLMFGIKSIMNNYEQVDISPFGINKKIFE

SEQ ID NO: 324 - protein, 1233 aa, Mycoplasma canis; identical to SEQ ID NO: 323
  source 1..1233: note = Mycoplasma canis PG 14

SEQ ID NO: 325 - protein, 1233 aa, Mycoplasma canis
  source 1..1233: note = Mycoplasma canis UF31
MEKKRKVTLGFDLGIASIGWAIVDSETNQVYKLGSRLFDAPDTNLERRTQRGTRRLLRRRKYRNQKFYNLVKRTEVFGLSSREAIENRFRELSIKYPNIIELKTKALSQEVCPDEIAWILHDYLKNRGYFYDEKETKEDFDQQTVESMPSYKLNEFYKKYGYFKGALSQPTESEMKDNKDLKEAFFFDFSNKEWLKEINYFFNVQKNILSETFIEEFKKIFSFTRDISKGPGSDNMPSPYGIFGEFGDNGQGGRYEHIWDKNIGKCSIFTNEQRAPKYLPSALIFNFLNELANIRLYSTDKKNIQPLWKLSSIDKLNILLNLFNLPISEKKKKLTNANINDIVKKESTKSIMLSVEDIDMIKDEWAGKEPNVYGVGLSGLNIEESAKENKFKFQDLKILNVLINLLDNVGIKFEFKDRNDIIKNLELLDNLYLFLIYQKESNNKDSSIDLFIAKNELLNIENLKLKLKEFLLGAGNEFENHNSKTHSLSKKAIDAILPKLLDNNEGWNLEAIKNYDEEIKSQIEDNSSLMAKQDKKYLNDNFLKDAILPPNVKVTFQQAILIFNKIIQKFSKDFEIDKVVIELAREMTQDQENDALKGIAKAQKSKKSLVEERLEANNIDKSVFNDKYEKLIYKIFLWISQDFKDPYTGAQISTNEIVNNKVEIDHIIPYSLCFDDSSANKVLVHKQSNQEKSNSLPYEYIKQGHSGWNWDEFTKYVKRVFVNNVDSILSKKERLKKSENLLTTSYDGYDKLGFLARNLNDTRYATILFRDQLNNYAEHHLIDNKKMFKVIAMNGAVTSFIRKNMSYDNKLRLKDRSDFSHHAYDAAIIALFSNKTKTLYNLIDPSLNGIISKRSEGYWVIEDRYTGEIKELKKEDWTSIKNNVQARKIAKEIEEYLIDLDDEVFFSRKTKRKTNRQLYNETIYGIAAKTDEDGITNYYKKEKFSILDDKDIYLRLLREREKFVINQSNPEVIDQIIEIIESYGKENNIPSRDEAINIKYTKNKINYNLYLKQYMRSLTKSLDQFSEEFINQMIANKTFVLYNPTKNTTRKIKFLRLVNDVKINDIRKNQVINKFNGKNNEPKAFYENINSLGAIVFKNSANNFKTLSINTQIAIFGDKNWDIEDFKTYNMEKIEKYKEIYGIDKTYNFHSFIFPGTILLDKQNKEFYYISSIQTVRDIIEIKFLNKIEFKDENKNPDTSKTPKRLMFGIKSIMNNYEQVDISPFGINKKIFE

SEQ ID NO: 326 - protein, 1233 aa, Mycoplasma canis
  source 1..1233: note = Mycoplasma canis UF33
MEKKRKVTLGFDLGIASVGWAIVDSETNQVYKLGSRLFDAPDTNLERRTQRGTRRLLRRRKYRNQKFYNLVKRTEVFGLSSREAIENRFRELSIKYPNIIELKTKALSQEVCPDEIAWILHDYLKNRGYFYDEKETKEDFDQQTVESMPSYKLNEFYKKYGYFKGALSQPTESEMKDNKDLKEAFFFDFSNKEWLKEINYFFNVQKNILSETFIEEFKKIFSFTRDISKGPGSDNMPSPYGIFGEFGDNGQGGRYEHIWDKNIGKCSIFTNEQRAPKYLPSALIFNFLNELANIRLYSTDKKNIQPLWKLSSVDKLNILLNLFNLPISEKKKKLTSTNINDIVKKESIKSIMISVEDIDMIKDEWAGKEPNVYGVGLSGLNIEENAKENKFKFQDLKILNVLINLLDNVGIKFEFKDRNDIIKNLELLDNLYLFLIYQKESNNKDSSIDLFIAKNKSLNIENLKLKLKEFLLGAGNEFENHNSKSHSLSKKAIDAILPKLLDNNEGWNLEAIKNYDEEIKSQIEDNSSLMAKQDKKYLNDNFLKDAILPPNVKVTFQQAILIFNKIIQKFSKDFEIDKVVIELAREMTQDQENDALKGMAKAQKSKKSLVEERLEANNIDKSVFNDKYEKLIYKIFLWISQDFKDPYTGAQISVNEIVNNKVEIDHIIPYSLCFDDSSANKVLVHKQSNQEKSNSLPYEYIKQGHSGWNWDEFTKYVKRVFVNNVDSILSKKERLKKSENLLTTSYDGYDKLGFLARNLNDTRYATILFRDQLNNYAEHHLIDNKKMFKVIAMNGAVTSFIRKNMSYDNKLRLKDRSDFSHHAYDAAIIALFSNKTKTLYNLIDPSLNGIISKRSEGYWVIEDRYTGEIKELKKEDWTSIKNNVQARKIAKEIEEYLIDLDDEVFFSRKTKRKTNRQLYNETIYGIAAKTDEDGITNYYKKEKFSILDDKDIYLRLLREREKFVINQSNPEVIDQIIEIIESYGKENNIPSRDEAINIKYTKNKINYNLYLKQYMRSLTKSLDKFSEEFINQMIANKTFVLYNPTKNTTRKIKFLRLVNDVKINDIRKNQVINKFNGKNNEPKAFYENINSLGAIVFKNSANNFKTLSINTQIAIFGDKNWDIEDFKTYNMEKIEKYKEIYGIDKTYNFHSFIFPGTILLDKQNKEFYYISSIQTVRDIIEIKFLNKIEFKDENKNQDTSKTPKRLMFGIKSIMNNYEQVDISPFGINKKIFE

SEQ ID NO: 327 - protein, 1233 aa, Mycoplasma canis
  source 1..1233: note = Mycoplasma canis UFG1
MEKKRKVTLGFDLGIASVGWAIVDSETNQVYKLGSRLFDAPDTNLERRTQRGTRRLLRRRKYRNQKFYNLVKRTEVFGLSSREAIENRFRELSIKYPNIIELKTKALSQEVCPDEIAWILHDYLKNRGYFYDEKETKEDFDQQTVESMPSYKLNEFYKKYGYFKGALSQPTESEMKDNKDLKEAFFFDFSNKEWLKEINYFFNVQKNILSETFIEEFKKIFSFTRDISKGPGSDNMPSPYGIFGEFGDNGQGGRYEHIWDKNIGKCSIFTNEQRAPKYLPSALIFNFLNELANIRLYSTDKKNIQPLWKLSSVDKLNILLNLFNLPISEKKKKLTSTNINDIVKKESIKSIMLSVEDIDMIKYEWAGKEPNVYGVGLSGLNIEESAKENKFKFQDLKILNVLINLLDNVGIKFEFKDRNDIIKNLELLDNLYLFLIYQKESNNKDSSIDLFIAKNKSLNIENLKLKLKEFLLGAGNEFENHNSKTHSLSKKAIDAILPKLLDNNEGWNLEAIKNYDEEIKSQIEDNSSLMAKQDKKYLNDNFLKDAILPPNVKVTFQQAILIFNKIIQKFSKDFEIDKVVIELAREMTQDQENDALKGIAKAQKSKKSLVEERLEANNIDKSVFDDKYEKLIYKIFLWISQDFKDPYTGAKISANEIVNNKVEIDHIIPYSLCFDDSSANKVLVHKQSNQEKSNSLPYEYIKQGHSGWNWDEFTKYVKRVFVNNVDSILSKKERLKKSENLLTTSYDGYDKLGFLARNLNDTRYATILFRDQLNNYAEHHLIDNKKMFKVIAMNGAVTSFIRKNMSYDNKLRLKDRSDFSHHAYDAAIIALFSNKTKTLYNLIDPSLNGIISKRSEGYWVIEDRYTGEIKELKKEDWTSIKNNVQARKIAKEIEEYLIDLDDEVFFSRKTKRKTNRQLYNETIYGIAAKTDEDGITNYYKKEKFSILDDKDIYLRLLREREKFVINQSNPEVIDQIIEIIESYGKENNIPSRDEAINIKYTKNKINYNLYLKQYMRSLTKSLDQFSEEFINQMIANKTFVLYNPTKNTTRKIKFLRLVNDVKINDIRKNQVINKFNGKNNEPKAFYENINSLGAIVFKNSANNFKTLSINTQIAIFGDKNWDIEDFKTYNMEKIEKYKEIYGIDKTYNFHSFIFPGTILLDKQNKEFYYISSIQTVRDIIEIKFLNKIEFKDENKNQDTSKTPKRLMFGIKSIMNNYEQVDISPFGINKKIFE

SEQ ID NO: 328 - protein, 1233 aa, Mycoplasma canis
  source 1..1233: note = Mycoplasma canis UFG4
MEKKRKVTLGFDLGIASVGWAIVDSETNQVYKLGSRLFDAPDTNLERRTQRGTRRLLRRRKYRNQKFYNLVKRTEVFGLSSREAIENRFRELSIKYPNIIELKTKALSQEVCPDEIAWILHDYLKNRGYFYDEKETKEDFDQQTIESMPSYKLNEFYKKYGYFKGALSQPTESEMKDNKDLKEAFFFDFSNKEWLKEINYFFNVQKNILSETFIEEFKKIFSFTRDISKGPGSDNMPSPYGIFGEFGDNGQGGRYEHIWDKNIGKCSIFTNEQRAPKYLPSALIFNFLNELANIRLYSTDKKNIQPLWKLSSIDKLNILLNLFNLPISEKKKKLTSANINDIVKKESTKSIMLSVEDIDMIKDEWAGKEPNVYGVGLSGLNIEESAKENKFKFQDLKILNVLINLLDNVGIKFEFKDRNDIIKNLELLDNLYLFLIYQKESNNKDSSIDLFIAKNESLNIENLKLKLKEFLLGAGNEFENHNSKTHSLSKKAIDAILPKLLDNNEGWNLEAIKNYDEEIKSQIEDNSFLMAKQDKKYLNDNFLKDAILPPNVKVTFQQAILIFNKIIQKFSKDFEIDKVVIELAREMTQDQENDALKGIAKAQKSKKSLVEERLEANNIDKSVFNEKYEKLIYKIFLWISQDFKDPYTGAKISANEIVDNKVEIDHIIPYSLCFDDSSANKVLVHKQSNQEKSNSLPYEYIKQGHSGWNWDEFTKYVKRVFVNNVDSILSKKERLKKSENLLTTSYDGYDKLGFLARNLNDTRYATILFRDQLNNYAEHHLIDDKKMFKVIAMNGAVTSFIRKNMSYDNKLRLKNRNDFSHHAYDAAIIALFSNKTKTLYNLIDPSLNGIISKRSEGYWVIEDRYTGEIKELKKEDWTSIKNNVQARKIAKEIEEYLIDLDDEVFFSRKTKRKTNRQLYNETIYGIAAKTDEDGITNYYKKEKLSILDDKDIYLRLLREREKFVINQSNPEVIDQIIEIIESYGKENNIPSRDEAINIKYTKNKINYNLYLKQYMRSLTKSLDQFSEEFINQMIANKTFVLYNPTKNTTRKIKFLRLVNDVKINDIRKNQVINKFNGKNNEPKAFYENINSLGAIVFKNSANNFKTLSINTQIAIFGDKNWDIEDFKTYNMEKIEKYKEIYGIDKTYNFHSFIFPGTILLDKQNKEFYYISSIQTVRDIIEIKFLNKIEFKDENKNQDTSKTPKRLMFGIKSIMNNYEQVDISPFGINKKIFE

SEQ ID NO: 329 - protein, 1239 aa, Mycoplasma cynos
MEEKRKVTLGFDLGVASVGWAIVDSETNEVYKLGSRLFDIPDTNIDRRAKRGSRRLVRRRSYRNQKFYNLIKRTKTFGFLDKEAIEKEFVLLSIKYPNIIELKVKGLQEEVSKSEAVWILHDYLKNRGYFYDDKEEKDDLENPSIESMPSYKLYEFYKEYGYFKGALSSPTESEKNKDSDLEKAIFFNFSNKEWTKEINHFFKIQKNIFSEDFKAKFMEFFSFIRDISKGPGSENMPSQYSIFGKYGDDGMGGKYQHIWDKNIGKCSIFKDKVRAPKYLPSALFFNLLNELSNIRLYSVDKREKSVLWRLSSKDKINIILNILQIILFKNDGKISNLDINKIVKNESIKSIILNEIDLDLIKDMWFEKEPNVYGIGLSGLNIEENKKENRFKFQDLKIFSVFIDLLKKSNINIEFNNEKDIIHNLKLLDELYFFLITQKYSRDKYGSIKKFILNNKSFNIDNLDEKLNIFLSISDDEFDNHNSKTHSLSKEAIYFIFPKLLHNNEGWNLEAIKNYDIDVREEISKHSFGIKKQDKKYLDDAFLDDAILPPSVKVTIKQSILIFNKIIKKFSNKFQIDNVVIELAREMTQEKEMDAQKSLNRLKKSRKKIIEERLNANNIDSKMFRDKTGEISPNYIYKIYLWISQNFKDPYTGENISANDILKNNVEIDHIIPYSLCFDDSSSNKVLVFKHSNQSKGNFLPFDMISTFSENSVWNWKEYTQYVEKTFKTNLESILDKKERVKKADNLLTSSYDGYDKLGFLARNLNDTRYATILFRDQLINYSENHLIDSKKMFKVIAMNGGVTSFIRKNMSFDSGLKVKDRSIFSHHAYDAAIIALFSNKTKILYNLINPSLDGIISKRSEGYWVLEDRLTGEIRKLNYNDWQSIKNNVEVKKIAREIESHLSNLDNVVMFSRKSKRKTNKELYNETLYGIATRIDENGIKNYYKKEKFNILEDENIYLRLLNERENFIINRSNPEVIDAIIEIFETIDKNKIPARDVAKNIKYTDNKIKYNLYLKDYMRKLVDEFPDKFRKDFIEQMIAKKIFILFNPIKNTTRKIKSLRSINNNKIEDIRKKQVLEKFNTAKNEPRSFYESLNSLGAIIFKNNLNIYKKMSISSQIATFGDKNWKIDDINTYNKEKLNKYKEIYGIDETYDFYSFIFPGTILLDEKNKEFLYISSIQTLKDKIELKFLDRIEFEKKNVNSNLKPKIKREIISTKKLMSDYKIIKISPLGINKKIFE

SEQ ID NO: 330 - protein, 1269 aa, Mycoplasma gallisepticum
MNNSIKSKPEVTIGLDLGVGSVGWAIVDNETNIIHHLGSRLFSQAKTAEDRRSFRGARRLIRRRKYKLKRFINLIWKYNSYFGFKNKEDILNNYQEQQKLHNTVLNLKLEALNAKIDPKALSWILHDYLKNRGHFYEDNRDFNVYPTEELANYFGEYGYYKGIIDSKEDNDDKLEEGLTKYKFSNQHWLEEIKKVLSNQTGLPEKFKEEYESLFSYVRNYSEGPGSINSVSPYGIYHLDEKEGKVVQKYNNIWDKTIGKCSIFPDEYRAPKNSPIAMIFNEINELSTIRSYSIYLTGWFINQEFKKAYLNKLLDLLIKTNSEKPIDARQFKKLREETIAESIGKETLKDVEREEKLEKEDHKWKLKGLKLNTNGKIQYNDLSSLAKFVHKLKQHLKLDFLLEDQYTTLDKINFLQSLFVYLGKHLRYSNRVDSANLKEFSDSNKLFERVLQEQKDDLFKLFEQTDKDDEKILAQTHSLSTKAMLLAITRMTNLDNDEDNQKNNDKGWNFEAIKNFDQKFIDITKKNNNLSLKQDKRYLDDRFINDAILSPGVKRILREATKVFNAILKQFSEEYDVTKVVIELARELSEEKELENTKNYEKLIKKNSDKISERLEALDIAEDKIEDILKSPTKSYKVLLWLQQDHIDPYSQKEIAFEDILTKTEKTEIDHIIPYSISFDDSSSNKLLVLAESNQAKSNQTPYEFITSGNAGIKWEDYEAYCRKFKDGDTSLLDSTQRSKKFAKMMKTDTSSKYDIGFLARNLNDTRYATIVFRDALKDYANNHLVEDKPMFKVVCINGGVTSFLRKNFDKSWYAKKDRDKNIHHAVDASIISIFSNETKTLFNQLTQFADYKLFKNTDGSWKKIDPKTGVVTEVTDENWKQIRVRNQVSEIAKVINKCIQDSNIERKARYSRKIENKTNISLFNDTVYSAKKVGYEDQIKRKNLKTLDIHESAEENKNSKVKKQFVYRKLVNVSLLNNDKLADLFAEKEDILMYRANPWVINLAEQIFNEYTENKKIKSQNVFEKYMLDLTKEFPEKFSEAFVKSMLRNKTAIIYNVEKKVVHRIKRLKILSSELKENKLSNVIIRSKNESGTKLSYQDTINSIALMIMRSIDPTAKKQYIRVPLNTLNLHLGDQDFDLHNIDAYLKKPKFVKYLKANEIGDEYKPWRVLTSGTLLIHKKDKKLMYISSFQNLKDVIEIKNLIETEYKENDDSDPKKKKKANRFLMTLSTILNDYILLDAKDNFDILGLSKNRIDEILNSKLGLDKITK

SEQ ID NO: 331 - protein, 1224 aa, Mycoplasma gallisepticum
MNNSIKSKPEVTIGLDLGVGSVGWAIVDNETNIIHHLGSRLFSQAKTAEDRRSFRGARRLIRRRKYKLKRFINLIWKYNSYFGFKNKEDILNNYQEQQKLHNTVLNLKLEALNAKIDPKALSWILHDYLKNRGHFYEDNRDFNVYPTEELANYFGEYGYYKGIIDSKEDNDDKLEEGLTKYKFSNQHWLEEIKKVLSNQTGLPEKFKEEYESLFSYVRNYSEGPGSINSVSPYGIYHLDEKEGKVVQKYNNIWDKTIGKCSIFPDEYRAPKNSPIAMIFNEINELSTIRSYSIYLTGWFINQEFKKAYLNKLLDLLIKTNSEKPIDARQFKKLREETIAESIGKETLKDVEREEKLEKEDHKWKLKGLKLNTNGKIQYNDLSSLAKFVHKLKQHLKLDFLLEDQYTTLDKINFLQSLFVYLGKHLRYSNRVDSANLKEFSDSNKLFERVLQEQKDDLFKLFEQTDKDDEKILAQTHSLSTKAMLLAITRMTNLDNDEDNQKNNDKGWNFEAIKNFDQKFIDITKKNNNLSLKQDKRYLDDRFINDAILSPGVKRILREATKVFNAILKQFSEEYDVTKVVIELARELSEEKELENTKNYEKLIKKNSDKISERLEALDIAEDKIEDILKSPTKSYKVLLWLQQDHIDPYSQKEIAFEDILTKTEKTEIDHIIPYSISFDDSSSNKLLVLAESNQAKSNQTPYEFITSGNAGIKWEDYEAYCRKFKDGDTSLLDSTQRSKKFAKMMKTDTSSKYDIGFLARNLNDTRYATIVFRDALKDYANNHLVEDKPMFKVVCINGGVTSFLRKNFDKSWYAKKDRDKNIHHAVDASIISIFSNETKTLFNQLTQFADYKLFKNTDGSWKKIDPKTGVVTEVTDENWKQIRVRNQVSEIAKVINKCIQDSNIERKARYSRKIENKTNISLFNDTVYSAKKVGYEDQIKRKNLKTLDIHESAEENKNSKVKKQFVYRKLVNVSLLNNDKLADLFAEKEDILMYRANPWVINLAEQIFNEYTENKKIKSQNVFEKYMLDLTKEFPEKFSEAFVKSMLRNKTAIIYNVEKKVVHRIKRLKILSSELKENKLSNVIIRSKNESGTKLSYQDTINSIALMIMRSIDPTAKKQYIRVPLNTLNLHLGDQDFDLHNIDAYLKKPKFVKYLKANEIGDEYKPWRVLTSGTLLIHKKDKKLMYISSFQNLKDVIEIKNLIETEYKENDDSDPKKRRKQIGS

SEQ ID NO: 332 - protein, 1269 aa, Mycoplasma gallisepticum
MNNSIKSKPEVTIGLDLGVGSVGWAIVDNETNIIHHLGSRLFSQAKTAEDRRSFRGVRRLIRRRKYKLKRFVNLIWKYNSYFGFKNKEDILNNYQEQQKLHNTVLNLKSEALNAKIDPKALSWILHDYLKNRGHFYEDNRDFNVYPTKELAKYFDKYGYYKGIIDSKEDNDNKLEEELTKYKFSNKHWLEEVKKVLSNQTGLPEKFKEEYESLFSYVRNYSEGPGSINSVSPYGIYHLDEKEGKVVQKYNNIWDKTIGKCNIFPDEYRAPKNSPIAMIFNEINELSTIRSYSIYLTGWFINQEFKKAYLNKLLDLLIKTNGEKPIDARQFKKLREETIAESIGKETLKDVENEEKLEKEDHKWKLKGLKLNTNGKIQYNDLSSLAKFVHKLKQHLKLDFLLEDQYATLDKINFLQSLFVYLGKHLRYSNRVDSANLKEFSDSNKLFERILQKQKDGLFKLFEQTDKDDEKILAQTHSLSTKAMLLAITRMTNLDNDEDNQKNNDKGWNFEAIKNFDQKFIDITKKNNNLSLKQNKRYLDDRFINDAILSPGVKRILREATKVFNAILKQFSEEYDVTKVVIELARELSEEKELENTKNYKKLIKKNGDKISEGLKALGISEDEIKDILKSPTKSYKFLLWLQQDHIDPYSLKEIAFDDIFTKTEKFEIDHIIPYSISFDDSSSNKLLVLAESNQAKSNQTPYEFISSGNAGIKWEDYEAYCRKFKDGDSSLLDSTQRSKKFAKMMKTDTSSKYDIGFLARNLNDTRYATIVFRDALEDYANNHLVEDKPMFKVVCINGSVTSFLRKNFDDSSYAKKDRDKNIHHAVDASIISIFSNETKTLFNQLTQFADYKLFKNTDGSWKKIDPKTGVVTEVTDENWKQIRVRNQVSEIAKVIEKYIQDSNIERKARYSRKIENKTNISLFNDTVYSAKKVGYEDQIKRKNLKTLDIHESAKENKNSKVKRQFVYRKLVNVSLLNNDKLADLFAEKEDILMYRANPWVINLAEQIFNEYTENKKIKSQNVFEKYMLDLTKEFPEKFSEFLVKSMLRNKTAIIYDDKKNIVHRIKRLKMLSSELKENKLSNVIIRSKNQSGTKLSYQDTINSLALMIMRSIDPTAKKQYIRVPLNTLNLHLGDHDFDLHNMDAYLKKPKFVKYLKANEIGDEYKPWRVLTSGTLLIHKKDKKLMYISSFQNLNDVIEIKNLIETEYKENDDSDSKKKKKANRFLMTLSTILNDYILLDAKDNFDILGLSKNRIDEILNSKLGLDKIVK

SEQ ID NO: 333 - protein, 1269 aa, Mycoplasma gallisepticum; identical to SEQ ID NO: 332
  source 1..1269: note = Mycoplasma gallisepticum str. F

SEQ ID NO: 334 - protein, 1270 aa, Mycoplasma gallisepticum
MNNSIKSKPEVTIGLDLGVGSVGWAIVDNETNIIHHLGSRLFSQAKTAEDRRSFRGVRRLIRRRKYKLKRFVNLIWKYNSYFGFKNKEDILNNYQEQQKLHNTVLNLKLEALNAKIDPKALSWILHDYLKNRGHFYEDNRDFNVYPTEELANYFDEFGYYKGIIDSKNDDDDKLEEGLTKYKFSNQHWLEEVKKVLSNQTGLPEKFKEEYESLFSYVRNYSEGPGSINSVSPYGIYHLDEKEGKVVQKYNNIWDKTIGKCSIFPDEYRAPKNSPIAMIFNEINELSTIRSYSIYLTGWFINQEFKKAYLNKLLDLLIKTNSEKPIDARQFKKLREETIAESIGKETLKDVESEEKLEKDDHKWKLKGLKLNTNGKIQYNDLSSLAKFVHKLKQHLKLDFLLEDQYTPLDKINFLQSLYVYLGKHLRYSNRVDSANLKEFSDSSRLFERVLQEQKDGLFKLFEQTDKDDEKILTQTHSLSTKAMLLAITRMTNLDNDEDNQKNNDKGWNFEAIKNFDQKFIDITKTNNNLSLKQDKRYLDDQFINDAILSPGVKRILREATKVFNAILKQFSEEYDVTKVVIELARELSEEKELENTKNYKKLIKKNGDKISEGLKALGIAEDKIEEILKSPTKSYKVLLWLQQDHIDPYSQKEIAFDDILTKTEKTEIDHIIPYSISFDDSSSNKLLVLAESNQAKSNQTPYEFINSGKAEITWEVYEAYCHKFKNGDSSLLDSTQRSKKFAKMMKTDTSSKYDIGFLARNLNDTRYATIVFRDALKDYANNHLVEDKPMFKVVCINGGVTSFLRKNFDPKSWYAKKDRDKNIHHAVDASIISIFSNETKTLFNQLTKFADYKLFKNTDGSWKKIDPKTGVVSEVTDENWKQIRVRNQVSEIAKVIDKYIQDSNIERKARYSRKIENKTNISLFNDTVYSAKKVGYEDQIKRKNLKTLDIHESAEENKNSKVKKQFVYRKLVNVSLLNNDKLADLFAEKEDILMYRANPWVINLAEQIFNEYTENKKIKSQNVFEKYMLDLTKEFPEKFSEAFVKSMIRNKTAIIYNVEKDVVHRIKRLKILSSELKENKWSNVIIRSKNESGTKLSYQDTINSIALMIMRSIDPTAKKQYIRVPLNTLNLHLGDQDFDLHNIDAYLKKPKFVKYLKANEIGDEYKPWRVLTSGTLLIHKKDKKLMYISSFQNLNDLIEIKNLIETEYKENVDSDPKKKKKASQILRSLSVILNDYILLDAKYNFDILGLSKNKIDEILNSKLDLDKIAK

SEQ ID NO: 335 - protein, 1236 aa, Mycoplasma mobile
MYFYKNKENKLNKKVVLGLDLGIASVGWCLTDISQKEDNKFPIILHGVRLFETVDDSDDKLLNETRRKKRGQRRRNRRLFTRKRDFIKYLIDNNIIELEFDKNPKILVRNFIEKYINPFSKNLELKYKSVTNLPIGFHNLRKAAINEKYKLDKSELIVLLYFYLSLRGAFFDNPEDTKSKEMNKNEIEIFDKNESIKNAEFPIDKIIEFYKISGKIRSTINLKFGHQDYLKEIKQVFEKQNIDFMNYEKFAMEEKSFFSRIRNYSEGPGNEKSFSKYGLYANENGNPELIINEKGQKIYTKIFKTLWESKIGKCSYDKKLYRAPKNSFSAKVFDITNKLTDWKHKNEYISERLKRKILLSRFLNKDSKSAVEKILKEENIKFENLSEIAYNKDDNKINLPIINAYHSLTTIFKKHLINFENYLISNENDLSKLMSFYKQQSEKLFVPNEKGSYEINQNNNVLHIFDAISNILNKFSTIQDRIRILEGYFEFSNLKKDVKSSEIYSEIAKLREFSGTSSLSFGAYYKFIPNLISEGSKNYSTISYEEKALQNQKNNFSHSNLFEKTWVEDLIASPTVKRSLRQTMNLLKEIFKYSEKNNLEIEKIVVEVTRSSNNKHERKKIEGINKYRKEKYEELKKVYDLPNENTTLLKKLWLLRQQQGYDAYSLRKIEANDVINKPWNYDIDHIVPRSISFDDSFSNLVIVNKLDNAKKSNDLSAKQFIEKIYGIEKLKEAKENWGNWYLRNANGKAFNDKGKFIKLYTIDNLDEFDNSDFINRNLSDTSYITNALVNHLTFSNSKYKYSVVSVNGKQTSNLRNQIAFVGIKNNKETEREWKRPEGFKSINSNDFLIREEGKNDVKDDVLIKDRSFNGHHAEDAYFITIISQYFRSFKRIERLNVNYRKETRELDDLEKNNIKFKEKASFDNFLLINALDELNEKLNQMRFSRMVITKKNTQLFNETLYSGKYDKGKNTIKKVEKLNLLDNRTDKIKKIEEFFDEDKLKENELTKLHIFNHDKNLYETLKIIWNEVKIEIKNKNLNEKNYFKYFVNKKLQEGKISFNEWVPILDNDFKIIRKIRYIKFSSEEKETDEIIFSQSNFLKIDQRQNFSFHNTLYWVQIWVYKNQKDQYCFISIDARNSKFEKDEIKINYEKLKTQKEKLQIINEEPILKINKGDLFENEEKELFYIVGRDEKPQKLEIKYILGKKIKDQKQIQKPVKKYFPNWKKVNLTYMGEIFKK

SEQ ID NO: 336 - protein, 1265 aa, Mycoplasma ovipneumoniae
  source 1..1265: note = Mycoplasma ovipneumoniae SC01
MHNKKNITIGFDLGIASIGWAIIDSTTSKILDWGTRTFEERKTANERRAFRSTRRNIRRKAYRNQRFINLILKYKDLFELKNISDIQRANKKDTENYEKIISFFTEIYKKCAAKHSNILEVKVKALDSKIEKLDLIWILHDYLENRGFFYDLEEENVADKYEGIEHPSILLYDFFKKNGFFKSNSSIPKDLGGYSFSNLQWVNEIKKLFEVQEINPEFSEKFLNLFTSVRDYAKGPGSEHSASEYGIFQKDEKGKVFKKYDNIWDKTIGKCSFFVEENRSPVNYPSYEIFNLLNQLINLSTDLKTTNKKIWQLSSNDRNELLDELLKVKEKAKIISISLKKNEIKKIILKDFGFEKSDIDDQDTIEGRKIIKEEPTTKLEVTKHLLATIYSHSSDSNWININNILEFLPYLDAICIILDREKSRGQDEVLKKLTEKNIFEVLKIDREKQLDFVKSIFSNTKFNFKKIGNFSLKAIREFLPKMFEQNKNSEYLKWKDEEIRRKWEEQKSKLGKTDKKTKYLNPRIFQDEIISPGTKNTFEQAVLVLNQIIKKYSKENIIDAIIIESPREKNDKKTIEEIKKRNKKGKGKTLEKLFQILNLENKGYKLSDLETKPAKLLDRLRFYHQQDGIDLYTLDKINIDQLINGSQKYEIEHIIPYSMSYDNSQANKILTEKAENLKKGKLIASEYIKRNGDEFYNKYYEKAKELFINKYKKNKKLDSYVDLDEDSAKNRFRFLTLQDYDEFQVEFLARNLNDTRYSTKLFYHALVEHFENNEFFTYIDENSSKHKVKISTIKGHVTKYFRAKPVQKNNGPNENLNNNKPEKIEKNRENNEHHAVDAAIVAIIGNKNPQIANLLTLADNKTDKKFLLHDENYKENIETGELVKIPKFEVDKLAKVEDLKKIIQEKYEEAKKHTAIKFSRKTRTILNGGLSDETLYGFKYDEKEDKYFKIIKKKLVTSKNEELKKYFENPFGKKADGKSEYTVLMAQSHLSEFNKLKEIFEKYNGFSNKTGNAFVEYMNDLALKEPTLKAEIESAKSVEKLLYYNFKPSDQFTYHDNINNKSFKRFYKNIRIIEYKSIPIKFKILSKHDGGKSFKDTLFSLYSLVYKVYENGKESYKSIPVTSQMRNFGIDEFDFLDENLYNKEKLDIYKSDFAKPIPVNCKPVFVLKKGSILKKKSLDIDDFKETKETEEGNYYFISTISKRFNRDTAYGLKPLKLSVVKPVAEPSTNPIFKEYIPIHLDELGNEYPVKIKEHTDDEKLMCTIK

SEQ ID NO: 337 - protein, 1314 aa, Mycoplasma synoviae
MLRLYCANNLVLNNVQNLWKYLLLLIFDKKIIFLFKIKVILIRRYMENNNKEKIVIGFDLGVASVGWSIVNAETKEVIDLGVRLFSEPEKADYRRAKRTTRRLLRRKKFKREKFHKLILKNAEIFGLQSRNEILNVYKDQSSKYRNILKLKINALKEEIKPSELVWILRDYLQNRGYFYKNEKLTDEFVSNSFPSKKLHEHYEKYGFFRGSVKLDNKLDNKKDKAKEKDEEEESDAKKESEELIFSNKQWINEIVKVFENQSYLTESFKEEYLKLFNYVRPFNKGPGSKNSRTAYGVFSTDIDPETNKFKDYSNIWDKTIGKCSLFEEEIRAPKNLPSALIFNLQNEICTIKNEFTEFKNWWLNAEQKSEILKFVFTELFNWKDKKYSDKKFNKNLQDKIKKYLLNFALENFNLNEEILKNRDLENDTVLGLKGVKYYEKSNATADAALEFSSLKPLYVFIKFLKEKKLDLNYLLGLENTEILYFLDSIYLAISYSSDLKERNEWFKKLLKELYPKIKNNNLEIIENVEDIFEITDQEKFESFSKTHSLSREAFNHIIPLLLSNNEGKNYESLKHSNEELKKRTEKAELKAQQNQKYLKDNFLKEALVPLSVKTSVLQAIKIFNQIIKNFGKKYEISQVVIEMARELTKPNLEKLLNNATNSNIKILKEKLDQTEKFDDFTKKKFIDKIENSVVFRNKLFLWFEQDRKDPYTQLDIKINEIEDETEIDHVIPYSKSADDSWFNKLLVKKSTNQLKKNKTVWEYYQNESDPEAKWNKFVAWAKRIYLVQKSDKESKDNSEKNSIFKNKKPNLKFKNITKKLFDPYKDLGFLARNLNDTRYATKVFRDQLNNYSKHHSKDDENKLFKVVCMNGSITSFLRKSMWRKNEEQVYRFNFWKKDRDQFFHHAVDASIIAIFSLLTKTLYNKLRVYESYDVQRREDGVYLINKETGEVKKADKDYWKDQHNFLKIRENAIEIKNVLNNVDFQNQVRYSRKANTKLNTQLFNETLYGVKEFENNFYKLEKVNLFSRKDLRKFILEDLNEESEKNKKNENGSRKRILTEKYIVDEILQILENEEFKDSKSDINALNKYMDSLPSKFSEFFSQDFINKCKKENSLILTFDAIKHNDPKKVIKIKNLKFFREDATLKNKQAVHKDSKNQIKSFYESYKCVGFIWLKNKNDLEESIFVPINSRVIHFGDKDKDIFDFDSYNKEKLLNEINLKRPENKKFNSINEIEFVKFVKPGALLLNFENQQIYYISTLESSSLRAKIKLLNKMDKGKAVSMKKITNPDEYKIIEHVNPLGINLNWTKKLENNN

SEQ ID NO: 338 - protein, 1304 aa, Mycoplasma synoviae
  source 1..1304: note = Mycoplasma synoviae 53
MLNNVQNLWKYLLLLIFDKKIIFLFKIKVILIRRYMENNNKEKIVIGFDLGVASVGWSIVNAETKEVIDLGVRLFSEPEKADYRRAKRTTRRLLRRKKFKREKFHKLILKNAEIFGLQSRNEILNVYKDQSSKYRNILKLKINALKEEIKPSELVWILRDYLQNRGYFYKNEKLTDEFVSNSFPSKKLHEHYEKYGFFRGSVKLDNKLDNKKDKAKEKDEEEESDAKKESEELIFSNKQWINEIVKVFENQSYLTESFKEEYLKLFNYVRPFNKGPGSKNSRTAYGVFSTDIDPETNKFKDYSNIWDKTIGKCSLFEEEIRAPKNLPSALIFNLQNEICTIKNEFTEFKNWWLNAEQKSEILKFVFTELFNWKDKKYSDKKFNKNLQDKIKKYLLNFALENFNLNEEILKNRDLENDTVLGLKGVKYYEKSNATADAALEFSSLKPLYVFIKFLKEKKLDLNYLLGLENTEILYFLDSIYLAISYSSDLKERNEWFKKLLKELYPKIKNNNLEIIENVEDIFEITDQEKFESFSKTHSLSREAFNHIIPLLLSNNEGKNYESLKHSNEELKKRTEKAELKAQQNQKYLKDNFLKEALVPLSVKTSVLQAIKIFNQIIKNFGKKYEISQVVIEMARELTKPNLEKLLNNATNSNIKILKEKLDQTEKFDDFTKKKFIDKIENSVVFRNKLFLWFEQDRKDPYTQLDIKINEIEDETEIDHVIPYSKSADDSWFNKLLVKKSTNQLKKNKTVWEYYQNESDPEAKWNKFVAWAKRIYLVQKSDKESKDNSEKNSIFKNKKPNLKFKNITKKLFDPYKDLGFLARNLNDTRYATKVFRDQLNNYSKHHSKDDENKLFKVVCMNGSITSFLRKSMWRKNEEQVYRFNFWKKDRDQFFHHAVDASIIAIFSLLTKTLYNKLRVYESYDVQRREDGVYLINKETGEVKKADKDYWKDQHNFLKIRENAIEIKNVLNNVDFQNQVRYSRKANTKLNTQLFNETLYGVKEFENNFYKLEKVNLFSRKDLRKFILEDLNEESEKNKKNENGSRKRILTEKYIVDEILQILENEEFKDSKSDINALNKYMDSLPSKFSEFFSQDFINKCKKENSLILTFDAIKHNDPKKVIKIKNLKFFREDATLKNKQAVHKDSKNQIKSFYESYKCVGFIWLKNKNDLEESIFVPINSRVIHFGDKDKDIFDFDSYNKEKLLNEINLKRPENKKFNSINEIEFVKFVKPGALLLNFENQQIYYISTLESSSLRAKIKLLNKMDKGKAVSMKKITNPDEYKIIEHVNPLGINLNWTKKLENNN

SEQ ID NO: 339 - protein, 1401 aa, Myroides injenensis
  source 1..1401: note = Myroides injenensis M09-0166
MKRILGLDLGTTSIGWAYVHEAENVNETSSIQKVGVRVNPLTTEEQTNFEKGKPITTNASRTLARSARRNLQRYKLRRDNLIQILKENNWINNTTSLTETGNHSTFETYELRNKAASEKLTLDQLSRVLLMLNKKRGYKSSRKVNSKEEGQLIDGMEVAKKLYHEQLTPGQLSLQLMNQGVKKLPDYYRSDLNQELESIWNFQQQFYPNILTDKFKEEINGKGLTSTSSAFWNIYNFNTAENKGSRDEKKKQALQWRSEALSKQLSKEIVAYIIADLNGQIYNSSGYLGAISDRSKELYFNNLTVGQYLFKQLKSNPHTSLKNQVFYRQDYLNEFEKIWETQSKFYPKELTAALKREIRDVIIFYQRKLKSQKGLISFCEFEQKQKTINGKTKTIGHRVIPKSSPLFQEFKIWQQLHNVVLRNKKTNEIVSLADEQKVHLFEELNLKGKLKSNQVLKLIENKPKDWELNYTELEGNNTNKALYNAYLDILDIEGYDVRNELKVKLNKDDIELSDLDVNASEIKEMIFSVFKHLGINTEILEFDATLEDKVFEKQASYQLWHLLYSYEEDNSPTGLDRLYNLLHKKFGFKLNHAKLIGNVLFQDDYGSLSSKAIKNIFPYITENNYYTACELAGYKHSKHSLTKEENETRELKNRLTILPKNSLRNPVVEKIINQMINVVNTLIDEENNILIAQGKEPNFQFDEIRIELARELKKNAKEREELTKSINKSKTDHEKIIKILQKEDGIKNPTRNDIVRFKLYSELKNNGYKDLYTNEYIERKDIFTKEYDIEHIIPQSKLFDDSFSNKTLVRRNVNLKKGNQTAYDFILCEYGQEKANEFETRITNLYNLGKDEGISKSKFKKLLMQESEIGNGFIERDLRETQYIAKKAKSLLLEITRNVISTSGSITDRLREDWGLINVMKELNLQKYRDAGLTEFVKMKDGNKKEVIIDWTKRNDHRHHAMDALTIAFTKHNHIQYLNHLNARKNVNNELHNNIIAIEKLETTLVSDERGNKKRIFKEPIANFRTIAKSHLEAILVSHKAKNKVVTKNINKISGKKISQQTLTPRGQLHKETIYGKIRQYVSKQEKVGPKFTIEVIEQVSNPTYRNLLLKRLEENNNDPKKAFGGKNSLNKNPIYINLEKNIKVPEVLKLVWLEDNYTIRKEISPDLKIDKVIDQGVKQILQNRLAQYKGDSKLAFSNLDANPIWLNEDKGIAIKRVTISGIATAQPLHRKKDHLGQPILDHNGQEIPVDFISTGNNHHVAIYEDENGKLQESVVSHFEAVERVNQKLPIIDKTFNQHLGWKFLFTMKQNELFLFPSDDFNPNEIDLFDKQNYTVISKHLFRIQKLSTKDYSFRHHLETNVEEIKDLKTITWRREGLNGIQNIIKVRTNHLGEIIHIGEY

SEQ ID NO: 340 - protein, 1466 aa, Myroides odoratus
  source 1..1466: note = Myroides odoratus DSM 2801
MKNILGLDLGTNSIGWALVKEDFENKQGEILGLGSRIIPMSQDILGEFGRGNSISQTADRTGYRGVRRLRERHLLRRERLHRVLNILGFLPNHYAKEIDFTKRLGKFINHAEPKLSFDKEFIFKDSFNEMLKDFQQNQPGFIINKHGEEALVPYDWTIYYLRKKALTQKIDKEELAWILLNFNQKRGYYQLRGEEEEENTNKLVEFYSLKIIDVIADNEVNKKGEVWYSLHLENGWIYRRSSKISLVDWKDKVRDFIVTTDVNDDGSEKLDKDGVVKRSFRAPSADDWTLLKKKTEQDIDNSNKTVGAYIYENLLLNPKQKIKGKLVRTIERKFYKDELKQILEKQKEFHQELQNEQLLQDCVRELYKYNEQHQQMLESKDFVHLFLNDIIFYQRPLRSQKSLISNCTLEKRVSRDGVVFPIKVISKSNPYYQEFRLLQWLQNLAIYRKDDDVNVTQEFLNSIESWENLLQFLNAKKEIKQEQLIKFLLEQKGLKGNSLKTAILTYRWNYVTDKVYPMNETRSLIQDKLKKVENVATDFLSFDNEMALWHIIYSVNDKIEYEKALAKFASKHNLDEISFVESFKKFPPFKSDYGSFSEKAIKKLLPLMRFGSVWNKNNIVPSVLDRIDKILTGEYDEKIKIRVREKAEQFQLNQIEDFQNLPLWLAQYVVYDRHSEAEIAGKWNSVKDLENYLKEFKQHSLRNPIVEQIITETLRVVKDIWQQYGNGVQNFFDEIHIELGREMKNTADERKRITNSVTENENTNLRIKALLVELKEDTNIENVRPHSPMQQEILKIYEEGVLNAVENIDEDILKISKTAQPSKSELIRYKLWLEQKYQSPYTGEMIPLSRLFTSDYEIEHVIPQSRYFDDSLSNKVICEAAVNKRKDNQLGLEFIKNHHSEKIELGNGRTAQVLEVEAYESFVKKNYDKNRGKRNKLLLEDVPEKMIERQLNDTRYISKFVTHLLSNIVRKDEVNSKDDGINSKNIIPGNGKITSQLKQDWGLNDVWNELILPRFERMNNLTNSTDFTSTNTNGKIIPTVPLEYSKGFSKKRIDHRHHALDALVIALATRDHVNLLNNESALPKKDRTKEEQKSFRFDLQVNLRNKEKYFNVKEGREKEKFTTFKKPWNTLTQDTRDALENMVVSFKQNLRVINKATNYYESYTDENGNLRLDKYGNPKKELISQKGTNWAIRKSLHKETVSGQIHLDRVKVTKGKIVTATRKSLDSSFNEKSIESITDTGIQKILRNYLKAKDNKPDVAFSPEGIEELNKSISVYNEGKNHQPIIKVRIFEQGSKFPVGETGNKIAKFVEAAKGTNLFFGIYQDKTGKRSYDTIPLNLVIERLKQGLSPVPETNEKGHQLLFHLSPNDLVYVPTIDDNEQLDSNRVYKFTDSSDTTCNFIPSNISAIIFNINSKEQEKRGINYPIQNELGVGSPQSKNQKSFDGFMIKEVCIKLKVDRLGNISKT

SEQ ID NO: 341 - protein, 1077 aa, Neisseria bacilliformis
  source 1..1077: note = Neisseria bacilliformis ATCC BAA-1200
MQQKPQRYILGLDLGIASVGWACVWADENEHPTGLLDCGVRTFERAEVPKTGDSLALARRQARSVRRLIRRRAHRLLRLRRLLKREGVLLSADFNENGLVRGLPIDAWALRVAGLDRKLSNKEWAAVLLHLVKHRGYLSQRKNETQSKDKELGRLLAGVNGNREALQNRSDEYRTAAELAVKKFAAENNGSLRNKGGDYSHTFDRKDLQRELHLLFERQRALDNPFTSSEMEAAVDELLMKQRSALQGEAVLKMLGRCTFEPSEYKAAKNTYSAERFVWLTKLNNLRIQYNGEERALSEAERRLLLDEPYQKAKLTYKQVRTILELPESAVFKGLRYGHGEDGLKAESGTLMEMKAYHAVRKALKDAGLEGEWENRIRNPELLDAIGTAFSLYKTDEDIRANLAAFRLSENVLEALLAGLNFDKFVHLSLKALAKILPLMEQGMRYDEACKEAYGDHYGAKEQEDHRLLPPFVADDIRNPVVFRTLTQARKIVNEIVRRYGSPLRVHIETGREVGKSFSDRKEIEKRQEENRKERERAAAHFKELFPNFAGEPKAQDILKLRLYEQQHGKCLYSGKEIDLRRLPEKGYVEIDHALPFSRTWDDSFNNKVLVLGKENQDKRNRTPYEYLDGKGNSGAWRAFAERVSGCRFPYAKKQRLLTQKLDEKTEQGFLERNLNDTRYVARFLCQFIEEKMHLEGAGKKRVFASNGQITALLRGFWGLKKVREENDRHHALDAVVVACSSVSMQQKITRHFRYREELEHIDRETGEVIHGFPQPWEFFRQEVMTRVFSDDPVSELAEKLDSRPEAVHEFVTPLFVSRAPHRKVTGQGHLETIRSAKRLDEKISVVKLPLTQLKTKDIERIVGYPNREPALYDALAARLAAFKDDPAKAFSEPFYKTGKDGKCGVLVKAVRVENVQKSGLLVRKDESGKMQGVADNATMVRVDVFGKNGKNYLVPVYAWQVEKGELPNRAVVAYADEEDWDEMDDSFEFKFSLYPNDLVEVVTKKDKFFGYYSGFNRATGAINIKEHDLSKSKVKNGVYEGIGVKTAQSFQKYQVDTLGKTIRLCKPEKRMGFKKK

SEQ ID NO: 342 - protein, 1082 aa, Neisseria cinerea
  source 1..1082: note = Neisseria cinerea ATCC 14685
MAAFKPNPMNYILGLDIGIASVGWAIVEIDEEENPIRLIDLGVRVFERAEVPKTGDSLAAARRLARSVRRLTRRRAHRLLRARRLLKREGVLQAADFDENGLIKSLPNTPWQLRAAALDRKLTPLEWSAVLLHLIKHRGYLSQRKNEGETADKELGALLKGVADNTHALQTGDFRTPAELALNKFEKESGHIRNQRGDYSHTFNRKDLQAELNLLFEKQKEFGNPHVSDGLKEGIETLLMTQRPALSGDAVQKMLGHCTFEPTEPKAAKNTYTAERFVWLTKLNNLRILEQGSERPLTDTERATLMDEPYRKSKLTYAQARKLLDLDDTAFFKGLRYGKDNAEASTLMEMKAYHAISRALEKEGLKDKKSPLNLSPELQDEIGTAFSLFKTDEDITGRLKDRVQPEILEALLKHISFDKFVQISLKALRRIVPLMEQGNRYDEACTEIYGDHYGKKNTEEKIYLPPIPADEIRNPVVLRALSQARKVINGVVRRYGSPARIHIETAREVGKSFKDRKEIEKRQEENRKDREKSAAKFREYFPNFVGEPKSKDILKLRLYEQQHGKCLYSGKEINLGRLNEKGYVEIDHALPFSRTWDDSFNNKVLALGSENQNKGNQTPYEYFNGKDNSREWQEFKARVETSRFPRSKKQRILLQKFDEDGFKERNLNDTRYINRFLCQFVADHMLLTGKGKRRVFASNGQITNLLRGFWGLRKVRAENDRHHALDAVVVACSTIAMQQKITRFVRYKEMNAFDGKTIDKETGEVLHQKAHFPQPWEFFAQEVMIRVFGKPDGKPEFEEADTPEKLRTLLAEKLSSRPEAVHKYVTPLFISRAPNRKMSGQGHMETVKSAKRLDEGISVLRVPLTQLKLKDLEKMVNREREPKLYEALKARLEAHKDDPAKAFAEPFYKYDKAGNRTQQVKAVRVEQVQKTGVWVHNHNGIADNATIVRVDVFEKGGKYYLVPIYSWQVAKGILPDRAVVQGKDEEDWTVMDDSFEFKFVLYANDLIKLTAKKNEFLGYFVSLNRATGAIDIRTHDTDSTKGKNGIFQSVGVKTALSFQKYQIDELGKEIRPCRLKKRPPVR

SEQ ID NO: 343 - protein, 1081 aa, Neisseria flavescens
  source 1..1081: note = Neisseria flavescens SK114
MTAFKPNPINYILGLDIGIASVGWAMVEIDEEENPIRLIDLGVRVFERAEVPKTGDSLAAARRLARSVRRLTRRRAHRLLRARRLLKREGVLQAADFDENGLIKSLPNTPWQLRAAALDRKLTPLEWSAVLLHLIKHRGYLSQRKNEGETADKELGALLKGVADNAHALQTGDFRTPAELAVNKFEKESGHIRNQRGDYSHTFSRKDLQAELVLLFEKQKEFGNPHISDGLKEGIETLLMAQRPALSGDAVQKMLGYCTFEPTEPKAAKNTYTAERFIWLTKLNNLRILEQGSERPLTDTERATLIDMPYKNKLTYAKARELLGLDDTAFFKGLRYGKDNAESATLMEMKAYHAIRRALEKEGLKDKKSPLSLSPELQDEIGTAFSLFKTDEDITGRLKGCLQPEILDALLKHINFDKFVQISLKALRRIVPLMEQGKRYDEACAETYGDHYGEKNSEEMLYLPPIPADEIRNPVVLRALSQARKVINGVVRRYGSPARIHIETAREVGKSFKDRKEIEKRQEENRKDREKAAAKFREYFPNFVGEPKSKDILKLRLYEQQHGKCLYSGKAIDIRRLNGKGYVEIDHALPFSRTWDDSFNNKVLVLGSENQNKGNRTPYEYLNGKDNSREWLEFKARVETSRFPHSKKQRVLLQKFDEKGFKERNLNDTRYVNRFLCQFVADHMQLTGKGKRRVFASNGQITNLLRGFWGLHKVRAENDRHHALDAVVVACSTVAMQQKITCFVRYKEMNAFDGKTVDKETGEVLHQKTHFPQPWEFFAQEVMIRVFGKPDGKPEFEEADTPEKLRALLAEKLSSRPEAVHEYVTPLFVSRAPNRKMSGAHKDTLRSAKRFVKHNEKISVKRVWLTEIKLADLENMVNYKNGREIELYEALKARLGAYGGNAKQAFDPKDNPFYKKGGQLVKAVRVEKTQESGVLLNKKNAYTIADNGDMVRVDVFCKVDKKGKNQYFIVPIYAWQVAENILPDIDCKGYRIDDSYTFCFSLHKYDLIAFQKDEKSKVEFAYYINCDSSNGRFYLAWHDKGSKEQQFRISTQNLVLMQKYQIDELGKEIRPCRLKKRPPVR

SEQ ID NO: 344 - protein, 1082 aa, Neisseria lactamica
MAAFKPNPMNYILGLDIGIASVGWAMVEIDKEENPIRLIDLGVRVFERAEVPKTGDSLAMARRLARSVRRLTRRRAHRLLRARRLLKREGVLQDADFDENGLVKSLPNTPWQLRAAALDRKLTCLEWSAVLLHLIKHRGYLSQRKNEGETADKELGALLKGVADNAHALQTGDFRTPAELALNKFEKESGHIRNQRGDYSHTFSRKDLQAELNLLFEKQKEFSNPHVSDSLKEGIETLLMAQRPALSGDAVQKMLGHCTFEPAEPKAAKNTYTAERFIWLTKLNNLRILEQGSERPLTDTERATLMDEPYRKSKLTYAQARKLLGLEDTAFFKGLRYGKDNAEAPTLMEMKAYHAISRALEKEGLKDKKSPLNLSTELQDEIGTAFSLFKTDKDITGRLKDRVQPEILEALLKHISFDKFVQISLKALRRIVPLMEQGKRYDEACAEIYGDHYCKKNAEEKIYLPPIPADEIRNPVVLRALSQARKVINCVVRRYGSPARIHIETAREVGKSFKDRKEIEKRQEENRKDREKAAAKFREYFPNFVGEPKSKDILKLRLYEQQHGKCLYSGKEINLVRLNEKGYVEIDHALPFSRTWDDSFNNKVLVLGSENQNKGNQTPYEYFNGKDNSREWQEFKARVETSRFPRSKKQRILLQKFDEEGFKERNLNDTRYVNRFLCQFVADHILLTGKGKRRVFASNGQITNLLRGFWGLRKVRAENDRHHALDAVVVACSTVAMQQKITRFVRYKEMNAFDGKTIDKETGEVLHQKAHFPQPWEFFAQEVMIRVFGKPDGKPEFEEADTPEKLRTLLAEKLSSRPEAVHEYVTPLFVSRAPNRKMSGQGHMETVKSAKRLDEGISVLRVPLTQLKLKGLEKMVNREREPKLYDALKAQLETHKDNPAKAFAEPFYKYDKAGNRTQQVKAVRIEQVQKTGVWVRNHNGIADNATMVRVDVFEKGGKYYLVPIYSWQVAKGILPDRAVVAFKDEEDWTVMDDSFEFRFVLYANDLIKLTAKKNEFLGYFVSLNRATGAIDIRTHDTDSTKGKNGIFQSVGVKTALSFQKNQIDELGKEIRPCRLKKRPPVR

SEQ ID NO: 345 - protein, 1082 aa, Neisseria meningitidis
MAAFKPNPINYILGLDIGIASVGWAMVEIDEDENPICLIDLGVRVFERAEVPKTGDSLAMARRLARSVRRLTRRRAHRLLRARRLLKREGVLQAADFDENGLIKSLPNTPWQLRAAALDRKLTPLEWSAVLLHLIKHRGYLSQRKNEGETADKELGALLKGVADNAHALQTGDFRTPAELALNKFEKESGHIRNQRGDYSHTFSRKDLQAELNLLFEKQKEFGNPHISDGLKEGIETLLMTQRPALSGDAVQKMLGHCTFEPAEPKAAKNTYTAERFIWLTKLNNLRILEQGSERPLTDTERTTLIDEPYRKSKLTYAQARKLLELDNTAFFKGLRYGKDNAEASTLMEMKAYHAISRALEKEGLKDKKSPLNLSPELQDEIGTAFSLFKTDEDITGRLKDRVQPEILEALLKHISFDKFVQISLKALRRIVPLMEQGKRYDEACAEIYGDHYGKKNTEEKIDLPPIPADEIRNPVVLRALSQARKVINGVVRRYGSPARIHIETAREVGKSFKDRKEIEKRQEENRKDREKAATKFREYFPNFVGEPKSKDILKLRLYEQQHGKCLYSGKEINLGRLNEKGYVEIDHALPFSRTWDDSFNNKVLVLGSENQNKGNQTPYEYFNGKDNSREWQEFKARVETSRFPRSKKQRILLQKFDEEGFKERNLNDTRYVNRFLCQFVADHMLLTGKGKRRVFASNGQITNLLRGFWGLRKVRAENDRHHALDAVVVACSTVAMQQKITRFVRYKEMNAFDGKTIDKETGEVLHQKTHFPQPWEFFAQEVMIRVFGKPDGKPEFEEADTPEKLRTLLAEKLSSRPEAVHEYVTPLFVSRAPNRKMSGQGHMETVKSAKRLDEGVSVLRVPLTQLKLKDLEKMVNREREPKLYEALKARLEAHKDDPAKAFAEPFYKYDKAGNRTQQVKAVRVEQVQKTGVWVRNHNGIADNATMVRVDVFEKGDKYYLVPIYSWQVAKGILPDRAVVQGKDEEDWQLIDDSFNFKFSLHPNDLVEVITKKARMFGYFASCHRGTGNINIRIHDLDHKIGKNGILEGIGVKTALSFQKYQIDELGKEIRPCRLKKRPPVR

SEQ ID NO: 346 - protein, 1082 aa, Neisseria meningitidis
  source 1..1082: note = Neisseria meningitidis 2007056
MAAFKPNPINYILGLDIGIASVGWAMVEIDEDENPICLIDLGVRVFERAEVPKTGDSLAMARRLARSVRRLTRRRAHRLLRARRLLKREGVLQAADFDENGLIKSLPNTPWQLRAAALDRKLTPLEWSAVLLHLIKHRGYLSQRKNEGETADKELGALLKGVADNAHALQTGDFRTPAELALNKFEKESGHIRNQRGDYSHTFSRKDLQAELILLFEKQKEFGNPHVSGGLKEGIETLLMTQRPALSGDAVQKMLGHCTFEPAEPKAAKNTYTAERFIWLTKLNNLRILEQGSERPLTDTERATLMDEPYRKSKLTYAQARKLLGLEDTAFFKGLRYGKDNAEASTLMEMKAYHAISRALEKEGLKDKKSPLNLSPELQDEIGTAFSLFKTDEDITGRLKDRIQPEILEALLKHISFDKFVQISLKALRRIVPLMEQGKRYDEACAEIYGDHYGKKNTEEKIYLPPIPADEIRNPVVLRALSQARKVINGVVRRYGSPARIHIETAREVGKSFKDRKEIEKRQEENRKDREKAAAKFREYFPNFVGEPKSKDILKLRLYEQQHGKCLYSGKEINLGRLNEKGYVEIDHALPFSRTWDDSFNNKVLVLGSENQNKGNQTPYEYFNGKDNSREWQEFKARVETSRFPRSKKQRILLQKFDEDGFKERNLNDTRYVNRFLCQFVADRMRLTGKGKKRVFASNGQITNLLRGFWGLRKVRAENDRHHALDAVVVACSTVAMQQKITRFVRYKEMNAFDGKTIDKETGEVLHQKTHFPQPWEFFAQEVMIRVFGKPDGKPEFEEADTPEKLRTLLAEKLSSRPEAVHEYVTPLFVSRAPNRKMSGQGHMETVKSAKRLDEGVSVLRVPLTQLKLKDLEKMVNREREPKLYEALKARLEAHKDDPAKAFAEPFYKYDKAGNRTQQVKAVRVEQVQKTGVWVRNHNGIADNATMVRVDVFEKGDKYYLVPIYSWQVAKGILPDRAVVQGKDEEDWQLIDDSFNFKFSLHPNDLVEVITKKARMFGYFASCHRGTGNINIRIHDLDHKIGKNGILEGIGVKTALSFQKYQIDELGEEIRPCRLKKRPPVR

SEQ ID NO: 347 - protein, 1082 aa, Neisseria meningitidis
  source 1..1082: note = Neisseria meningitidis 63049
MAAFKPNPINYILGLDIGIASVGWAMVEIDEEENPIRLIDLSVRVFERAEVPKTGDSLAMARRLARSVRRLTRRRAHRLLRARRLLKREGVLQAADFDENGLIKSLPNTPWQLRAAALDRKLTPLEWSAVLLHLIKHRGYLSQRKNEGETADKELGALLKGVADNAHALQTGDFRTPAELALNKFEKESGHIRNQRGDYSHTFSRKDLQAELILLFEKQKEFGNPHVSGGLKEGIETLLMTQRPALSGDAVQKMLGHCTFEPAEPKAAKNTYTAERFVWLTKLNNLRILEQGSERPLTDTERATLMDEPYRKSKLTYAQARKLLGLEDTAFFKGLRYGKDNAEASTLMEMKAYHAISRALEKEGLKDKKSPLRLSPELQDEIGTAFSLFKTDEDITGRLKDRVQPEILEALLKHISFDKFVQISLKALRRIVPLMEQGKRYDEACAEIYGDHYGKKNAEEKIYLPPIPADEIRNPVVLRALSQARKVINGVVRRYGSPARIHIETAREVGKSFKDRKEIEKRQEENRKDREKAAAKFREYFPNFVGEPKSKDILKLRLYEQQHGKCLYSGKEINLGRLNEKGYVEIDHALPFSRTWDDSFNNKVLVLGSENQNKGNQTPYEYFNGKDNSREWQEFKARVETSRFPRSKKQRILLQKFDEDGFKERNLNDTRYVNRFLCQFVADRMRLTGKGKKRVFASNGQITNLLRGFWGLRKVRAENDRHHALDAVVVACSTVAMQQKITRFVRYKEMNAFDGKTIDKETGEVLHQKTHFPQPWEFFAQEVMIRVFGKPDGKPEFEEADTPEKLRTLLAEKLSSRPEAVHEYVTPLFVSRAPNRKMSGQGHMETVKSAKRLDEGVSVLRVPLTQLKLKDLEKMVNREREPKLYEALKARLEAHKDDPAKAFAEPFYKYDKAGNRTQQVKAVRVEQVQKTGVWVRNHNGIADNATMVRVDVFEKGDKYYLVPIYSWQVAKGILPDRAVVQGKDEEDWQLIDDSFNFKFSLHPNDLVEVITKKARMFGYFASCHRGTGNINIRIHDLDHKIGKNGILEGIGVKTALSFQKYQIDELGKEIRPCRLKKRPPVR

SEQ ID NO: 348 - protein, 1082 aa, Neisseria meningitidis
MAAFKPNSINYILGLDIGIASVGWAMVEIDEEENPIRLIDLGVRVFERAEVPKTGDSLAMARRLARSVRRLTRRRAHRLLRTRRLLKREGVLQAANFDENGLIKSLPNTPWQLRAAALDRKLTPLEWSAVLLHLIKHRGYLSQRKNEGETADKELGALLKGVAGNAHALQTGDFRTPAELALNKFEKESGHIRNQRSDYSHTFSRKDLQAELILLFEKQKEFGNPHVSGGLKEGIETLLMTQRPALSGDAVQKMLGHCTFEPAEPKAAKNTYTAERFIWLTKLNNLRILEQGSERPLTDTERATLMDEPYRKSKLTYAQARKLLGLEDTAFFKGLRYGKDNAEASTLMEMKAYHAISRALEKEGLKDKKSPLNLSPELQDEIGTAFSLFKTDEDITGRLKDRIQPEILEALLKHISFDKFVQISLKALRRIVPLMEQGKRYDEACAEIYGDHYGKKNTEEKIYLPPIPADEIRNPVVLRALSQARKVINGVVRRYGSPARIHIETAREVGKSFKDRKEIEKRQEENRKDREKAAAKFREYFPNFVGEPKSKDILKLRLYEQQHGKCLYSGKEINLGRLNEKGYVEIDHALPFSRTWDDSFNNKVLVLGSENQNKGNQTPYEYFNGKDNSREWQEFKARVETSRFPRSKKQRILLQKFDEDGFKERNLNDTRYVNRFLCQFVADRMRLTGKGKKRVFASNGQITNLLRGFWGLRKVRAENDRHHALDAVVVACSTVAMQQKITRFVRYKEMNAFDGKTIDKETGEVLHQKTHFPQPWEFFAQEVMIRVFGKPDGKPEFEEADTLEKLRTLLAEKLSSRPEAVHEYVTPLFVSRAPNRKMSGQGHMETVKSAKRLDEGVSVLRVPLTQLKLKDLEKMVNREREPKLYEALKARLEAHKDDPAKAFAEPFYKYDKAGNRTQQVKAVRVEQVQKTGVWVRNHNGIADNATMVRVDVFEKGDKYYLVPIYSWQVAKGILPDRAVVQGKDEEDWQLIDDSFNFKFSLHPNDLVEVITKKARMFGYFASCHRGTGNINIRIHDLDHKIGKNGILEGIGVKTALSFQKYQIDELGKEIRPCRLKKRPPVR

SEQ ID NO: 349 - protein, 1082 aa, Neisseria meningitidis
  source 1..1082: note = Neisseria meningitidis 92045
MAAFKPNPINYILGLDIGIASVGWAMVEIDEEENPIRLIDLGVRVFERAEVPKTGDSLAMARRLARSVRRLTRRRAHRLLRARRLLKREGVLQAADFDENGLIKSLPNTPWQLRAAALDRKLTPLEWSAVLLHLIKHRGYLSQRKNEGETADKELGALLKGVADNAHALQTGDFRTPAELALNKFEKECGHIRNQRGDYSHTFSRKDLQAELNLLFEKQKEFGNPHVSGGLKEGIETLLMTQRPALSGDAVQKMLGHCTFEPAEPKAAKNTYTAERFIWLTKLNNLRILEQGSERPLTDTERATLMDEPYRKSKLTYAQARKLLGLEDTAFFKGLRYGKDNAEASTLMEMKAYHAISRALEKEGLKDKKSPLNLSPELQDEIGTAFSLFKTDEDITGRLKDRIQPEILEALLKHISFDKFVQISLKALRRIVPLMEQGKRYDEACAEIYGDHYGKKNTEEKIYLPPIPADEIRNPVVLRALSQARKVINGVVRRYGSPARIHIETAREVGKSFKDRKEIEKRQEENRKDREKAAAKFREYFPNFVGEPKSKDILKLRLYEQQHGKCLYSGKEINLVRLNEKGYVEIDHALPFSRTWDDSFNNKVLVLGSENQNKGNQTPYEYFNGKDNSREWQEFKARVETSRFPRSKKQRILLQKFDEEGFKERNLNDTRYVNRFLCQFVADHILLTGKGKRRVFASNGQITNLLRGFWGLRKVRAENDRHHALDAVVVACSTVAMQQKITRFVRYKEMNAFDGKTIDKETGEVLHQKTHFPQPWEFFAQEVMIRVFGKPDGKPEFEEADTPEKLRTLLAEKLSSRPEAVHEYVTPLFVSRAPNRKMSGQGHMETVKSAKRLDEGVSVLRVPLTQLKLKDLEKMVNREREPKLYEALKARLEAHKDDPAKAFAEPFYKYDKAGNRTQQVKAVRVEQVQKTGVWVRNHNGIADNATMVRVDVFEKGGKYYLVPIYSWQVAKGILPDRAVVQGKDEEDWQLIDDSFNFKFSLHPNDLVEVITKKARMFGYFASCHRGTGNINIRIHDLDHKIGKNGILEGIGVKTALSFQKYQIDELGKEIRPCRLKKRPPVR

SEQ ID NO: 350 - protein, 1081 aa, Neisseria meningitidis
  source 1..1081: note = Neisseria meningitidis 93003
MAAFKPNPINYILGLDIGIASVGWAMVEIDEEENPIRLIDLGVRVFERAEVPKTGDSLAMARRLARSVRRLTRRRAHRLLRARRLLKREGVLQAADFDENGLIKSLPNTPWQLRAAALDRKLTPLEWSAVLLHLIKHRGYLSQRKNEGETADKELGALLKGVADNAHALQTGDFRTPAELALNKFEKESGHIRNQRGDYSHTFSRKDLQAELILLFEKQKEFGNPHVSGGLKEGIETLLMTQRPALSGDAVQKMLGHCTFEPAEPKAAKNTYTAERFIWLTKLNNLRILEQGSERPLTDTERATLMDEPYRKSKLTYAQARKLLGLEDTAFFKGLRYGKDNAEASTLMEMKAYHAISRALEKEGLKDKKSPLNLSPELQDEIGTAFSLFKTDEDITGRLKDRVQPEILEALLKHISFDKFVQISLKALRRIVPLMEQGKRYDEACAEIYGDHYGKKNTEEEIYLPPITADEIRNPVVLRALSQARKVINAVVRRYGSPARIHIETAREVGKSFKDRKEIEKRQEENRKDREKAAAKFREYFPNFVGEPKSKDILKLRLYEQQHGKCLYSGKEINLVRLNEKGYVEIDHALPFSRTWDDSFNNKVLVLGSENQNKGNQTPYEYFNGKENSREWQEFKARVETSRFPRSKKQRILLQKFDEDGFKERNLNDTRYVNRFLCQFVADRMRLTGKGKKRVFASNGQITNLLRGFWGLHKVRAENDRHHALDAVVVACSTIAMQQKITRFVRYKEMNAFDGKTIDKETGEVLHQKAHFPQPWEFFAQEVMIRVFGKPDGKPEFEEADTPEKLRTLLAEKLSSRPEAVHEYVTPLFVSRAPNRKMSGQGHMETVKSAKRLDEGISVLRVPLTQLKLKDLEKMVNRAREPKLYEALKARLEAHKDDPAKAFAEPFYKYDKAGNRTQQVKAVRVEQVQKTGVWVRNHNGIADNATMVRVDVFEKAGKYYLVPIYSWQVAKGILPDRAVVAYADEEDWTVIDESFRFKFVLYSNDLIKVQLKKDSFLGYFSGLDRATGAISLREHDLEKSKGKDGMHRIGVKTALSFQKYQIDEMGKEIRPCRLKKRPPVR

SEQ ID NO: 351 - protein, 1081 aa, Neisseria meningitidis
  source 1..1081: note = Neisseria meningitidis 93004
MAAFKPNPINYILGLDIGIASVGWAMVEIDEDENPICLIDLGVRVFERAEVPKTGDSLAMARRLARSVRRLTRRRAHRLLRARRLLKREGVLQAADFDENGLIKSLPNTPWQLRAAALDRKLTPLEWSAVLLHLIKHRGYLSQRKNEGETADKELGALLKGVADNAHALQTGDFRTPAKLALNKFEKESGHIRNQRGDYSHTFSRKDLQAELNLLFEKQKEFGNPHISDGLKEGIETLLMTQRPALSGDAVQKMLGHCTFEPTEPKAAKNTYTAERFVWLTKLNNLRILEQGSEQPLTDTQRAKLMDEPYRKSKLTYAQARKLLGLEDTAFFKGLRYGKDNAEASTLMEMKAYHAISRALEKEGLKDKKSPLNLSPELQDEIGTAFSLFKTDEDITGRLKDRVQPEILEALLKHISFDKFVQISLKALRRIVPLMEQGKRYNEACAEIYGDHYGKKNTEEKIYLPPIPADEIRNPVVLRALSQARKVINGVVRRYGSPARIHIETAREVGKSFKDRKEIEKRQEENRKDREKAAAKFQEYFPNFVGEPKSKDILKLRLYEQQHGKCLYSGKEINLGRLNEKGYVEIDHALPFSRTWDDSFNNKVLVLGSENQNKGNQTPYEYFNGKDNSREWQEFKARVETSRFPRSKKQRILLQKFDEDGFKERNLNDTRYVNRFLCQFVADRMRLTGKGKKRVFASNGQITNLLRGFWGLRKVRAENDRHHALDAVVVACSTVAMQQKITRFVRYKEMNAFDGKTIDKETGEVLHQKTHFPQPWEFFAQEVMIRVFGKPDGKPEFEEADTPEKLRTLLAEKLSSRPEAVHEYVTPLFVSRAPNRKMSGQGHMETVKSAKRLDEGVSVLRVPLTQLKLKDLEKMVNREREPKLYEALKARLEAHKDDPAKAFAEPFYKYDKAGNRTQQVKAVRVEQVQKTGVWVRNHNGIADNATMVRVDVFEKGDKYYLVPIYSWQVAKGILPDRAVVAYADEEDWTVIDESFRFKFVLYSNDLIKVQLKKDSFLGYFSGLDRATGAISLREHDLEKSKGKDGMHRIGVKTALSFQKYQIDEMGKEIRPCRLKKRPPVR

SEQ ID NO: 352 - protein, 1082 aa, Neisseria meningitidis
  source 1..1082: note = Neisseria meningitidis 96023
MAAFKPNPINYILGLDIGIASVGWAMVEIDEDENPICLIDLGVRVFERAEVPKTGDSLAMARRLARSVRRLTRRRAHRLLRARRLLKREGVLQAADFDENGLIKSLPNTPWQLRAAALDRKLTPLEWSAVLLHLIKHRGYLSQRKNEGETADKELGALLKGVADNAHALQTGDFRTPAELALNKFEKESGHIRNQRGDYSHTFSRKDLQAELILLFEKQKEFGNPHVSGGLKEGIETLLMTQRPALSSDAVQKMLGHCTFEPAEPKAAKNTYTAERFIWLTKLNNLRILEQGSERPLTDTERATLMDEPYRKSKLTYAQARKLLGLEDTAFFKGLRYGKDNAEASTLMEMKAYHAISRALEKEGLKDKKSPLNLSPELQDEIGTAFSLFKTDEDITGRLKDRIQPEILEALLKHISFDKFVQISLKALRRIVPLMEQGKRYDEACAEIYGDHYGKKNTEEKIYLPPIPADEIRNPVVLRALSQARKVINGVVRRYGSPARIHIETAREVGKSFKDRKEIEKRQEENRKDREKAAAKFREYFPNFVGEPKSKDILKLRLYEQQHGKCLYSGKEINLGRLNEKGYVEIDHALPFSRTWDDSFNNKVLVLGSENQNKGNQTPYEYFNGKDNSREWQEFKARVETSRFPRSKKQRILLQKFDEDGFKERNLNDTRYVNRFLYQFVADRMRLTGKGKKRVFASNGQITNLLRGFWGLRKVRAENDRHHALDAVVVACSTVAMQQKITRFVRYKEMNAFDGKTIDKETGEVLHQKTHFPQPWEFFAQEVMIRVFGKPDGKPEFEEADTPEKLRTLLAEKLSSRPEAVHEYVTPLFVSRAPNRKMSGQGHMETVKSAKRLDEGVSVLRVPLTQLKLKDLEKMVNREREPKLYEALKARLEAHKDDPAKAFAEPFYKYDKAGNRTQQVKAVRVEQVQKTGVWVRNHNGIADNATMVRVDVFEKGDKYYLVPIYSWQVAKGILPDRAVVQGKDEEDWQLIDDSFNFKFSLHPNDLVEVITKKARMFGYFASCHRGTGNINIRIHDLDHKIGKNGILEGIGVKTALSFQKYQIDELGKEIRPCRLKKRPPVR

SEQ ID NO: 353 - protein, 1081 aa, Neisseria meningitidis
  source 1..1081: note = Neisseria meningitidis 98008
MAAFKPNPINYILGLDIGIASVGWAMVEIDEDENPICLIDLGVRVFERAEVPKTGDSLAAARRLARSVRRLTRRRAHRLLRARRLLKREGVLQAADFDENGLIKSLPNTPWQLRSAALDRKLTPLEWSAVLLHLIKHRGYLSQRKNEGETADKELGALLKGVANNAHALQTGDFRTPAELALNKFEKESGHIRNQRGDYSHTFSRKDLQAELILLFEKQKEFGNPHVSGGLKEGIETLLMTQRPALSGDAVQKMLGHCTFEPAEPKAAKNTYTAERFIWLTKLNNLRILEQGSERPLTDTERATLMDEPYRKSKLTYAQARKLLGLEDTAFFKGLRYGKDNAEASTLMEMKAYHAISRALEKEGLKDKKSPLNLSPELQDEIGTAFSLFKTDEDITGRLKDRIQPEILEALLKHISFDKFVQISLKALRRIVPLMEQGKRYDEACAEIYGDHYGKKNTEEKIYLPPIPADEIRNPVVLRALSQARKVINGVVRRYGSPARIHIETAREVGKSFKDRKEIEKRQEENRKDREKAAAKFREYFPNFVGEPKSKDILKLRLYEQQHGKCLYSGKEINLGRLNEKGYVEIDHALPFSRTWDDSFNNKVLVLGSENQNKGNQTPYEYFNGKDNSREWQEFKARVETSRFPRSKKQRILLQKFDEDGFKERNLNDTRYVNRFLCQFVADRMRLTGKGKKRVFASNGQITNLLRGFWGLRKVRAENDRHHALDAVVVACSTVAMQQKITRFVRYKEMNAFDGKTIDKETGEVLHQKTHFPQPWEFFAQEVMIRVFGKPDGKPEFEEADTPEKLRTLLAEKLSSRPEAVHEYVTPLFVSRAPNRKMSGQGHMETVKSAKRLDEGVSVLRVPLTQLKLKDLEKMVNREREPKLYEALKARLEAHKDDPAKAFAEPFYKYDKAGNRTQQVKAVRVEQVQKTGVWVRNHNGIADNATMVRVDVFEKAGKYYLVPIYSWQVAKGILPDRAVVAYADEEGWTVIDESFRFKFVLYSNDLIKVQLKKDSFLGYFSGLDRATGAISLREHDLEKSKGKDGMHRIGVKTALSFQKYQIDEMGKEIRLCRLKKRPPVR

SEQ ID NO: 354 - protein, 1082 aa, Neisseria meningitidis
MAAFKPNPINYILGLDIGIASVGWAMVEIDEEENPIRLIDLGVRVFERAEVPKTGDSLAMVRRLARSVRRLTRRRAHRLLRARRLLKREGVLQAADFDENGLIKSLPNTPWQLRAAALDRKLTPLEWSAVLLHLIKHRGYLSQRKNEGETADKELGALLKGVADNAHALQTGDFRTPAELALNKFEKESGHIRNQRGDYSHTFSRKDLQAELILLFEKQKEFGNPHISGGLKEGIETLLMTQRPALSGDAVQKMLGHCTFEPAEPKAAKNTYTAERFIWLTKLNNLRILEQGSERPLTDTERATLMDEPYRKSKLTYAQARKLLGLEDTAFFKGLRYGKDNAEASTLMEMKAYHAISRALEKEGLKDKKSPLNLSPELQDEIGTAFSLFKTDEDITGRLKDRIQPEILEALLKHISFDKFVQISLKALRRIVPLMEQGKRYDEACAEIYGDHYGKKNTEEKIYLPPIPADEIRNPVVLRALSQARKVINGVVRRYGSPARIHIETAREVGKSFKDRKEIEKRQEENRKDREKAAAKFREYFPNFVGEPKSKDILKLRLYEQQHGKCLYSGKEINLGRLNEKGYVEIDHALPFSRTWDDSFNNKVLVLGSENQNKGNQTPYEYFNGKDNSREWQEFKARVETSRFPRSKKQRILLQKFDEDGFKERNLNDTRYVNRFLCQFVADRMRLTGKGKKRVFASNGQITNLLRGFWGLRKVRAENDRHHALDAVVVACSTVAMQQKITRFVRYKEMNAFDGKTIDKETGEVLHQKTHFPQPWEFFAQEVMIRVFGKPDGKPEFEEADTPEKLRTLLAEKLSSRPEAVHEYVTPLFVSRAPNRKMSGQGHMETVKSAKRLDEGVSVLRVPLTQLKLKDLEKMVNREREPKLYEALKARLEAHKDDPAKAFAEPFYKYDKAGNRTQQVKAVRVEQVQKTGVWVRNHNGIADNATMVRVDVFEKGDKYYLVPIYSWQVAKGILPDRAVVQGKDEEDWQLIDDSFNFKFSLHPNDLVEVITKKARMFGYFASCHRGTGNINIRIHDLDHKIGKNGILEGIGVKTALSFQKYQIDELGKEIRPCRLKKRPPVR

SEQ ID NO: 355 - protein, 1082 aa, Neisseria meningitidis
  source 1..1082: note = Neisseria meningitidis alpha275
MAAFKPNPINYILGLDIGIASVGWAMVEIDEDENPICLIDLGVRVFERAEVPKTGDSLAAARRLARSVRRLTRRRAHRLLRARRLLKREGVLQAADFDENGLIKSLPNTPWQLRAAALDRKLTPLEWSAVLLHLIKHRGYLSQRKNEGETADKELGALLKGVADNAHALQTGDFRTPAELALNKFEKESGHIRNQRGDYSHTFSRKDLQAELILLFEKQKEFGNPHVSGGLKEGIETLLMTQRPALSGDAVQKMLGHCTFEPAEPKAAKNTYTAERFIWLTKLNNLRILEQGSERPLTDTERATLMDEPYRKSKLTYAQARKLLGLEDTAFFKGLRYGKDNAEASTLMEMKAYHAISRALEKEGLKDKKSPLNLSPELQDEIGTAFSLFKTDEDITGRLKDRVQPEILEALLKHISFDKFVQISLKALRRIVPLMEQGKRYDEACAEIYGDHYGKKNTEEKIYLPPIPADEIRNPVVLRALSQARKVINGVVRRYGSPARIHIETAREVGKSFKDRKEIEKRQEENRKDREKAAAKFREYFPNFVGEPKSKDILKLRLYEQQHGKCLYSGKEINLGRLNEKGYVEIDHALPFSRTWDDSFNNKVLVLGSENQNKGNQTPYEYFNGKDNSREWQEFKARVETSRFPRSKKQRILLQKFDEDGFKERNLNDTRYVNRFLCQFVADRMRLTGKGKKRVFASNGQITNLLRGFWGLRKVRAENDRHHALDAVVVACSTVAMQQKITRFVRYKEMNAFDGKTIDKETGEVLHQKTHFPQPWEFFAQEVMIRVFGKPDGKPEFEEADTPEKLRTLLAEKLSSRPEAVHEYVTPLFVSRAPNRKMSGQGHMETVKSAKRLDEGVSVLRVPLTQLKLKDLEKMVNREREPKLYEALKARLEAHKDDPAKAFAEPFYKYDKAGNRTQQVKAVRVEQVQKTGVWVRNHNGIADNATMVRVDVFEKGDKYYLVPIYSWQVAKGILPDRAVVQGKDEEDWQLIDDSFNFKFSLHPNDLVEVITKKARMFGYFASCHRGTGNINIRIHDLDHKIGKNGILEGIGVKTALSFQKYQIDELGKEIRPCRLKKRPPVR

SEQ ID NO: 356 - protein, 1082 aa, Neisseria meningitidis
  source 1..1082: note = Neisseria meningitidis ATCC 13091
MAAFKPNPINYILGLDIGIASVGWAMVEIDEEENPIRLIDLGVRVFERAEVPKTGDSLAMARRLARSVRRLTRRRAHRLLRTRRLLKREGVLQAANFDENGLIKSLPNTLWQLRAAALDRKLTPLEWSAVLLHLIKHRGYLSQRKNEGETADKELGALLKGVAGNAHALQTGDFRTPAELALNKFEKESGHIRNQRGDYSHTFSRKDLQAELNLLFEKQKEFGNPHISDGLKEGIETLLMTQRPALSGDAVQKMLGHCTFEPTEPKAAKNTYTTERFIWLTKLNNLRILEQGSERPLTDTERATLMDEPYRKSKLTYAQARKLLELDDIAFFKGLRYGKDNAEASTLMEMKAYHAISRALEKEGLKDKKSPLNLSPELQDEIGTAFSLFKTDEDITGRLKDRIQPEILEALLKHINFDKFVQISLKALRRIVPLMEQGKRYDEACAEIYGDHYGKKNTEEKIDLPPIPADEIHNPVVLRALSQARKVINGVVRRYGSPARIHIETAREVGKSFKDRKEIEKRQEENRKDREKAAAKFREYFPNFVGEPKSKDILKLRLYEQQHGKCLYSGKEINLGRLNEKGYVEIDHALPFSRTWDDSFNNKVLVLGSENQNKGNQTPYEYFNGKDNSREWQEFKARVETSRFPRSKKQRILLQKFDEDGFKERNLNDTRYVNRFLCQFVADRMRLTGKGKKRVFASNGQITNLLRGFWGLRKVRAENDRHHALDAVVVACSTVAMQQKITRFVRYKEMNAFDGKTIDKETGEVLHQKTHFPQPWEFFAQEVMIRVFGKPDGKPEFEEADTPEKLRTLLTEKLSSRPEAVHEYVTPLFVSRAPNRKMSGQGHMETVKSAKRLDEGISVLRVPLTQLKLKDLEKMVNREREPKLYEALKARLEAHKDDPAKAFAEPFYKYDKAGNRTQQVKAMRVEQVQKTGVWVRNHNGIADNATMVRVDVFEKGDKYYLVPIYSWQVAKGILPDRAVVQGKDEEDWQLIDDSFNFKFSLHPNDLVEVITKKARMFGYFASCHRGTGNINIRIHDLDHKIGKNGILEGIGVKTALSFQKYQIDELGKEIRPCRLKKRPPVR

SEQ ID NO: 357 - protein, 1081 aa, Neisseria meningitidis
  source 1..1081: note = Neisseria meningitidis N1568
MAAFKPNPINYILGLDIGIASVGWAMVEIDEEENPIRLIDLGVRVFERAEVPKTGDSLAMARRLARSVRRLTRRRAHRLLRARRLLKREGVLQAADFDENGLIKSLPNTPWQLRAAALDRKLTPLEWSAVLLHLIKHRGYLSQRKNEGETADKELGALLKGVADNAHALQTGDFRTPAELALNKFEKECGHIRNQRGDYSHTFSRKDLQAELNLLFEKQKEFGNPHVSGGLKEGIETLLMTQRPALSGDAVQKMLGHCTFEPAEPKAAKNTYTAERFIWLTKLNNLRILEQGSERPLTDTERATLMDEPYRKSKLTYAQARKLLSLEDTAFFKGLRYGKDNAEASTLMEMKAYHTISRALEKEGLKDKKSPLNLSPELQDEIGTAFSLFKTDEDITGRLKDRIQPEILEALLKHISFDKFVQISLKALRRIVPLMEQGKRYDEACAEIYGDHYGKKNTEEKIYLPPIPADEIRNPVVLRALSQARKVINGVVRRYGSPARIHIETAREVGKSFKDRKEIEKRQEENRKDREKAAAKFREYFPNFVGEPKSKDILKLRLYEQQHGKCLYSGKEINLGRLNEKGYVEIDHALPFSRTWDDSFNNKVLVLGSENQNKGNQTPYEYFNGKDNSREWQEFKARVETSRFPRSKKQRILLQKFDEDGFKERNLNDTRYVNRFLCQFVADRMRLTGKGKKRVFASNGQITNLLRGFWGLRKVRAENDRHHALDAVVVACSTVAMQQKITRFVRYKEMNAFDGKTIDKETGEVLHQKTHFPQPWEFFAQEVMIRVFGKPDGKPEFEEADTPEKLRTLLAEKLSSRPEAVHEYVTPLFVSRAPNRKMSGQGHMETVKSAKRLDEGVSVLRVPLTQLKLKDLEKMVNREREPKLYEALKARLEAHKDDPAKAFAEPFYKYDKAGNRTQQVKAVRVEQVQKTGVWVRNHNGIADNATMVRVDVFEKGDKYYLVPIYSWQVAKGILPDRAVVAYADEEDWTVIDESFRFKFVLYSNDLIKVQLKKDSFLGYFSGLDRATGAISLREHDLEKSKGKDGMHRIGVKTALSFQKYQIDEMGKEIRPCRLKKRPPVR

SEQ ID NO: 358 - protein, 1081 aa, Neisseria meningitidis
  source 1..1081: note = Neisseria meningitidis NM140
MAAFKPNPINYILGLDIGIASVGWAMVEIDEDENPICLIDLGVRVFERAEVPKTGDSLAAARRLARSVRRLTRRRAHRLLRARRLLKREGVLQAADFDENGLIKSLPNTPWQLRSAALDRKLTPLEWSAVLLHLIKHRGYLSQRKNEGETADKELGALLKGVADNAHALQTGDFRTPAELALNKFEKESGHIRNRRGDYSHTFSRKDLQAELDLLFEKQKEFGNPHISDDLKEGIETLLMTQRPALSGDAVQKMLGHCTFEPTEPKAAKNTYTAERFVWLTKLNNLRILEQGSERPLTDTERATLMDEPYRKSKLTYAQARKLLELDDTAFFKGLRYGKDNAEASTLMEMKAYHAISRALEKEGLKDKKSPLNLSPELQDEIGTAFSLFKTDEDITGRLKDRVQPEILEVLLKHISFDKFVQISLKALRRIVPLMEQGKRYDEACAEIYGDHDGKKNTEEKIYLPPIPADEIRNPVVLRALSQARKVINAVVRRYGSPARIHIETAREVGKSFKDRKEIEKRQEENRKDREKAAAKFREYFPNFVGEPKSKDILKLRLYEQQHGKCLYSGKEINLGRLNEKGYVEIDHALPFSRTWDDSFNNKVLVLGSENQNKGNQTPYEYFNGKDNSREWQEFKARVETSRFPRSKKQRILLQKFDEEGFKERNLNDTRYVNRFLCQFVADHMLLTGKGKRRVFASNGQITNLLRGFWGLRKVRAENNRHHALDAVVVACSTVAMQQKITRFVRYKEMNAFDGKTIDKETGEVLHQKTHFPQPWEFFAQEVMIRVFGKPDGKPEFEEADTPEKLRTLLAEKLSSRPEAVHEYVTPLFVSRAPNRKMSGQGHMETVKSAKRLDEGVSVLRVPLTQLKLKDLEKMVNREREPKLYEALKARLEAHKDDPAKAFAEPFYKYDKAGNRTQQVKAVRVEQVQKTGVWVRNHNGIADNATMVRVDVFEKAGKYYLVPIYSWQVAKGILPDRAVVAYADEEGWTVIDESFRFKFVLYSNDLIKVQLKKDSFLGYFSGLDRATGAISLREHDLEKSKGKDGMHRIGVKTALSFQKYQIDEMGKEIRLCRLKKRPPVR

SEQ ID NO: 359 - protein, 1082 aa, Neisseria meningitidis
  source 1..1082: note = Neisseria meningitidis NM220
MAAFKPNPINYILGLDIGIASVGWAMVEIDEEENPIRLIDLGVRVFERAEVPKTGDSLAMARRLARSVRRLTRRRAHRLLRARRLLKREGVLQAADFDENGLIKSLPNTPWQLRAAALDRKLTPLEWSAVLLHLIKHRGYLSQRKNEGETADKELGALLKGVANNAHALQTGDFRTPAELALNKFEKESGHIRNQRGDYSHTFSRKDLQAELILLFEKQKEFGNPHVSGGLKEGIETLLMTQRPALSGDAVQKMLGHCTFEPAEPKAAKNTYTAERFIWLTKLNNLRILEQGSERPLTDTERATLMDEPYRKSKLTYAQARKLLGLEDTAFFKGLRYGKDNAEASTLMEMKAYHAISRALEKEGLKDKKSPLNLSSELQDEIGTAFSLFKTDEDITGRLKDRVQPEILEALLKHISFDKFVQISLKALRRIVPLMEQGKRYDEACAEIYGDHYGKKNTEEKIYLPPIPADEIRNPVVLRALSQARKVINGVVRRYGSPARIHIETAREVGKSFKDRKEIEKRQEENRKDREKAAAKFREYFPNFVGEPKSKDILKLRLYEQQHGKCLYSGKEINLVRLNEKGYVEIDHALPFSRTWDDSFNNKVLVLGSENQNKGNQTPYEYFNGKDNSREWQEFKARVETSRFPRSKKQRILLQKFDEDGFKECNLNDTRYVNRFLCQFVADHILLTGKGKRRVFASNGQITNLLRGFWGLRKVRAENDRHHALDAVVVACSTVAMQQKITRFVRYKEMNAFDGKTIDKETGKVLHQKTHFPQPWEFFAQEVMIRVFGKPDGKPEFEEADTPEKLRTLLAEKLSSRPEAVHEYVTPLFVSRAPNRKMSGAHKDTLRSAKRFVKHNEKISVKRVWLTEIKLADLENMVNYKNGREIELYEALKARLEAYGGNAKQAFDPKDNPFYKKGGQLVKAVRVEKTQESGVLLNKKNAYTIADNGDMVRVDVFCKVDKKGKNQYFIVPIYAWQVAENILPDIDCKGYRIDDSYTFCFSLHKYDLIAFQKDEKSKVEFAYYINCDSSNGRFYLAWHDKGSKEQQFRISTQNLVLIQKYQVNELGKEIRPCRLKKRPPVR

SEQ ID NO: 360 - protein, 1082 aa, Neisseria meningitidis
  source 1..1082: note = Neisseria meningitidis NM233
MAAFKPNPINYILGLDIGIASVGWAMVEIDEEENPIRLIDLGVRVFERAEVPKTGDSLAMARRLARSVRRLTRRRAHRLLRARRLLKREGVLQAADFDENGLIKSLPNTPWQLRAAALDRKLTPLEWSAVLLHLIKHRGYLSQRKNEGETADKELGALLKGVANNAHALQTGDFRTPAELALNKFEKESGHIRNQRGDYSHTFSRKDLQAELILLFEKQKEFGNPHVSGGLKEGIETLLMTQRPALSGDAVQKMLGHCTFEPAEPKAAKNTYTAERFIWLTKLNNLRILEQGSERPLTDTERATLMDEPYRKSKLTYAQARKLLGLEDTAFFKGLRYGKDNAEASTLMEMKAYHAISRALEKEGLKDKKSPLNLSSELQDEIGTAFSLFKTDEDITGRLKDRVQPEILEALLKHISFDKFVQISLKALRRIVPLMEQGKRYDEACAEIYGDHYGKKNTEEKIYLPPIPADKIRNPVVLRALSQARKVINGVVRRYGSPARIHIETAREVGKSFKDRKEIEKRQEENRKDREKAAAKFREYFPNFVGEPKSKDILKLRLYEQQHGKCLYSGKEINLVRLNEKGYVEIDHALPFSRTWDDSFNNKVLVLGSENQNKGNQTPYEYFNGKDNSREWQEFKARVETSRFPRSKKQRILLQKFDEDGFKECNLNDTRYVNRFLCQFVADHILLTGKGKRRVFASNGQITNLLRGFWGLRKVRAENDRHHALDAVVVACSTVAMQQKITRFVRYKEMNAFDGKTIDKETGKVLHQKTHFPQPWEFFAQEVMIRVFGKPDGKPEFEEADTPEKLRTLLAEKLSSRPEAVHEYVTPLFVSRAPNRKMSGAHKDTLRSAKRFVKHNEKISVKRVWLTEIKLADLENMVNYKNGREIELYEALKARLEAYGGNAKQAFDPKDNPFYKKGGQLVKAVRVEKTQESGVLLNKKNAYTIADNGDMVRVDVFCKVDKKGKNQYFIVPIYAWQVAENILPDIDCKGYRIDDSYTFCFSLHKYDLIAFQKDEKSKVEFAYYINCDSSNGRFYLAWHDKGSKEQQFRISTQNLVLIQKYQVNELGKEIRPCRLKKRPPVR

SEQ ID NO: 361 - protein, 1082 aa, Neisseria meningitidis
MAAFKPNPINYILGLDIGIASVGWAMVEIDEDENPICLIDLGVRVFERAEVPKTGDSLAMARRLARSVRRLTRRRAHRLLRARRLLKREGVLQAADFDENGLIKSLPNTPWQLRAAALDRKLTPLEWSAVLLHLIKHRGYLSQRKNEGETADKELGALLKGVADNAHALQTGDFRTPAELALNKFEKESGHIRNQRGDYSHTFSRKDLQAELILLFEKQKEFGNPHVSGGLKEGIETLLMTQRPALSSDAVQKMLGHCTFEPAEPKAAKNTYTAERFIWLTKLNNLRILEQGSERPLTDTERATLMDEPYRKSKLTYAQARKLLGLEDTAFFKGLRYGKDNAEASTLMEMKAYHAISRALEKEGLKDKKSPLNLSPELQDEIGTAFSLFKTDEDITGRLKDRIQPEILEALLKHISFDKFVQISLKALRRIVPLMEQGKRYDEACAEIYGDHYGKKNTEEKIYLPPIPADEIRNPVVLRALSQARKVINGVVRRYGSPARIHIETAREVGKSFKDRKEIEKRQEENRKDREKAAAKFREYFPNFVGEPKSKDILKLRLYEQQHGKCLYSGKEINLGRLNEKGYVEIDHALPFSRTWDDSFNNKVLVLGSENQNKGNQTPYEYFNGKDNSREWQEFKARVETSRFPRSKKQRILLQKFDEDGFKERNLNDTRYVNRFLCQFVADRMRLTGKGKKRVFASNGQITNLLRGFWGLRKVRAENDRHHALDAVVVACSTVAMQQKITRFVRYKEMNAFDGKTIDKETGEVLHQKTHFPQPWEFFAQEVMIRVFGKPDGKPEFEEADTPEKLRTLLAEKLSSRPEAVHEYVTPLFVSRAPNRKMSGQGHMETVKSAKRLDEGVSVLRVPLTQLKLKDLEKMVNREREPKLYEALKARLEAHKDDPAKAFAEPFYKYDKAGNRTQQVKAVRVEQVQKTGVWVRNHNGIADNATMVRVDVFEKGDKYYLVPIYSWQVAKGILPDRAVVQGKDEEDWQLIDDSFNFKFSLHPNDLVEVITKKARMFGYFASCHRGTGNINIRIHDLDHKIGKNGILEGIGVKTALSFQKYQIDELGKEIRPCRLKKRPPVR

SEQ ID NO: 362 - protein, 1082 aa, Neisseria meningitidis
MAAFKPNPINYILGLDIGIASVGWAMVEIDEDENPICLIDLGVRVFERAEVPKTGDSLAMARRLARSVRRLTRRRAHRLLRARRLLKREGVLQAADFDENGLIKSLPNTPWQLRAAALDRKLTPLEWSAVLLHLIKHRGYLSQRKNEGETADKELGALLKGVADNAHALQTGDFRTPAELALNKFEKESGHIRNQRGDYSHTFSRKDLQAELILLFEKQKEFGNPHVSGGLKEGIETLLMTQRPALSGDAVQKMLGHCTFEPAEPKAAKNTYTAERFIWLTKLNNLRILEQGSERPLTDTERATLMDEPYRKSKLTYAQARKLLGLEDTAFFKGLRYGKDNAEASTLMEMKAYHAISRALEKEGLKDKKSPLNLSPELQDEIGTAFSLFKTDEDITGRLKDRIQPEILEALLKHISFDKFVQISLKALRRIVPLMEQGKRYDEACAEIYGDHYGKKNTEEKIYLPPIPADEIRNPVVLRALSQARKVINGVVRRYGSPARIHIETAREVGKSFKDRKEIEKRQEENRKDREKAAAKFREYFPNFVGEPKSKDILKLRLYEQQHGKCLYSGKEINLGRLNEKGYVEIDHALPFSRTWDDSFNNKVLVLGSENQNKGNQTPYEYFNGKDNSREWQEFKARVETSRFPRSKKQRILLQKFDEDGFKERNLNDTRYVNRFLCQFVADRMRLTGKGKKRVFASNGQITNLLRGFWGLRKVRAENDRHHALDAVVVACSTVAMQQKITRFVRYKEMNAFDGKTIDKETGEVLHQKTHFPQPWEFFAQEVMIRVFGKPDGKPEFEEADTPEKLRTLLAEKLSSRPEAVHEYVTPLFVSRAPNRKMSGQGHMETVKSAKRLDEGVSVLRVPLTQLKLKDLEKMVNREREPKLYEALKARLEAHKDDPAKAFAEPFYKYDKAGNRTQQVKAVRVEQVQKTGVWVRNHNGIADNATMVRVDVFEKGDKYYLVPIYSWQVAKGILPDRAVVQGKDEEDWQLIDDSFNFKFSLHPNDLVEVITKKARMFGYFASCHRGTGNINIRIHDLDHKIGKNGILEGIGVKTALSFQKYQIDELGKEIRPCRLKKRPPVR

SEQ ID NO: 363 - protein, 1089 aa, Neisseria sp.
  source 1..1089: note = Neisseria sp. oral taxon 014 str. F0314
MTAFKPNPLNYILGLDIGIASVGWAMVEIDDKENPVRLIDLGVRVFERAEMPKTGDSLAAARRLARSVRRLTRRRAHRLLRARRLLKHEGVLKPEDFDENGLVKPLPYIPKQPRNTPWQLRAAALDRKLTPLEWAAVLLHLVKHRGYLSQRKNEGETDDKELGALLKGVADNTHALQAGNFRTPAELALNKFEKESGHIRNQRGDYSHTFSRKDLQAELVLLFEKQKEFGNPYVSDDLKNGIENLLMTQRPALSGDAIQKMLGHCTFEPAEPKAAKNTYTAERFIWLTKLNNLRILNQGNERPLTDAERTTLMDEPYKKSKLTYAQARKLLDLDDTAFFKGLRYGKDNAESATLMEMKAYHAISRALEKEGLKDKKSPLSLSPELQDEIGTAFSLFKTDEEITGRLKGCLQPEILDALLKHISFDKFVQISLKALRRIVPLMEQGKRYDEACAEIYGDHHGRRNSEETLYLPPIPADEIRNPVVLRALSQARKVINGVGRRYGSPARIHIETAREVGKSFKDRKEIEKRQEENRKDREKAAAEFQEYFPNFVGEPKSKDILKLRLYRQQNCKCLYSGKEINLGRLNEKGYVEIDHALPFSRTWDDSFNNKVLVLGSENQNKGNRTPYEYLNGKDNSREWQEFKARVETSRFPHSKKQRILLQKFDEEGFKERNLNDTRYVNRFLCKFVADHMQLTGKGKRRVFASNGQITNLLRGFWGLRKVRAENDRHHALDAVVVACSTVAMQQRITRFVRYKEMNAFDGKTVDKETGEVLHQKTHFPQPWEFFAQEVMIRVFGKPDGKPELEEADTPEKLRALLAEKLSSRPEAVHEYVAPLFVSRAPNRKMSGQGHMETIKSPKRLDEGISVVRVPLTQLKLKDLEKMVNREREPKLYEALKARLEAHKDDPAKAFAEPFYKQDKAGNRTQQVKAVRIEQVQKTGVWVRNQNGIADNATMVRVDVFEKGGKYYLVPIYSWQVAKGILPDKAIIAFKDEEEWQLIDDSFNFKFPLHPNDLVEVITKKARIFGYFASCHRGTGNINIRIHDLDNKVGKNGILEGIGVKTALSFQKYQIDELGKEIRPCRLKKRPPVR

SEQ ID NO: 364 - protein, 1097 aa, Neisseria wadsworthii
  source 1..1097: note = Neisseria wadsworthii 9715
MKKQPQRYILGLDLGIASVGWALILVDGAENPVGLLDCGVRTFERAEVPKTGDSLALARRQARSVRRLIRRRAHRLLRLRRLLKREGILSAADFNSDGLPNLPIDAWQLRVAGLERKLTNQEWAAVLLHLVKHRGYLSQRKSETQTENKELGRLLAGVAENSKLLSESSEQYRTPAELAVKLFAEQSGHLRNKGGEYTHTFNRLDLQKELHLLFERQYALGNPFASAELQSKVDELLMTQRSALQGEAVLKMLGKCTFEPSEYKAAKNTYSAERFIWLTKLNNLRILYNGEERALDEGDRKKLLDEPYKKAKLTYKQVRSILNLPESAVFKGLRYGKDSDGLKAENGTLMEMKAYHKIRTILDKAGLKGEWENRIRNPEILDKIGTAFSLYKTDEDIQAALADLRLPENVLDALLAGLNFDKFIQLSLKALRNILPLMERGIRYDEACKEVYGDHRALAESKNQVLLPPIPADEIRNPVVLRTLTQARKVINAIIRRYGSPQRVHIETARELGKSKQERDKIDRKNKENQNDRNRLASDIRKHFNFEPTPKDILKLRLYEQQHGKCLYSDLREEKGECLYTGNVIELHRLFEDGYVEIDHALPLSRTWDNSLNNKVLVLKSSNQNKGNKTPYEWLDGANNSRRWREFQARVQGCHFPYVKKQRIQTAKLDSKAEQGFLERNLNDTRYISKFMCQFITANLRLAETSNALMEEVAGENPYWKERKRQRVFAPSGSIIALLRGLWGLKKVREDNDRHHALDAIVVACSTVSMQQKITKAMQRRETLETVDSETGEVKTRIPQPWDFFRQEVMIRVFSDSPREELAEKLNSRPEALHDFVSPLFVSRAPNRKMTGQGHLETVKSAKRLSENISVVRKPLTALKLKDIENIVGYPDREPALYQALRERLLAHKDDPVKAFADKPFYKPAKDGGQGSLVKAVRIIENTKHGLKIRNGITDTNGDMVRTDVYQKTDKKGKRQYFIVPVYAWQVEKNELPTVDCKGYEIDDNYEFCFSLYKYDLIEIQNPNDINQELRAYYINCDSSDGRFWLAYHDKSAKEQQFRISTQNQPIIKKYQVDTLGKEIRLCKAEKRTALNGKKKK

SEQ ID NO: 365 - protein, 1426 aa, Niabella soli
  source 1..1426: note = Niabella soli DSM 19437
MPRKNILGLDLGTTSIGFAKIIEDDDYQCSSVELIGVRVNPLTTDEQTNFEKGKPVSVNADRTLKRGMRRNLDRYQLRRDYLIEILRTHHIITADTKLAEDGKNTTHTTYALRALAATAEIPLEAFVRVLLAINKKRGYKSSRKAKNEDEGQLIDGMAIARRLYEESLTPGQFSYQLLKEGKKYLPDFYRSDLNTELNKVWNFQKQFYPEILTDEFKRHLEGKGQRATAVAFWGQHGFSMAENKGSREEKKLHAYKWRSEAAHKQLTKEEVAFVITEINNDLNKSSGYLGAISDRSKELFFNKQTVGQYLHQQLKENPHTRLKGQVFYRQDYLDEFETIWEMQAKFYSALTLELKEEVRDVVIFYQRKLKSQMGLISLCEFESKEIEIEKNGEKAKKRIGLRVAPKSSPLFQEFKIWQVLNNLEFRNKKTKEVFVPEMAAKQQLFDELNIKGNLLASEAIKILGYKTKDWEANYHTLEGNRTNKSLYDAWLKILELEGYDENLLKLSGSDDIDVSKIEKPALEIRQMVLAVFEVLGISGAILDFDAEADGKAFEQQPAYQLWHLLYSAEDDGKKYSQEDIFTYGHDNIGLKKKLCEKFGFRPEHTKILVNVVFSDDYGNLSSKAMRRIYPFIKELTYDKACAEAGYRHSAASLTKEEIAARPLQNRLDLLKKNELRSPVVEKILNQMVNVVNTLVDDENQNRKARGLSEDFHFDEIRIELARELKKNAKERAEMTTNINTAKQSHEKIIRILQTEFGVPNPSRNDIVRYKLYEELKNNGYKDLYTNTYISRDILFSKQIDVDHIIPQMSLFDDSFSNKTVVFRKDNQDKGNKTAYDYILGKYGEQALEEYISRITSLFELGKKNKEEGIGKAKFQKLQKRLVDIGDGFIERDLRESQYIAKKANNMLYAICRSVVSTSGEITARLREDWDLVNVMQEINLPKFRALGLTEMVEKKDGAQKERITDWTKRNDHRHHAMDALAIAFTRHSHIQYLNHLNARKDEANKWHPVVSKIEEKETVLIYDDLGNRKRKFKAPMPNFREVVKEHLENVLISHKAKNKVVTKNKNKIKTVRGEKVKTELTPRGQLHKETIYGRYRYYESKEEKIGPKFDAEMIGMVTNPQYKKLLLERLAANGNDPKKAFWGKNALNKNPLYVDEARQELLPEKILLRWLNDDYSIRKDVTPENLKDIKTIEKILDKGVKKILLKRLADFGNDPKKAFSDLDKNPIWQNEAKRIAIKRVTISGIKNAAPLHHKKDHLGNDILDEKGKQIPSSFVSTGNNHHVAIYRDAEGNLQERVVSLFDAVQLVNGGEPVIDKEYNKGIGWQFLFTMKQNEMFVFPDEKTGFNPREVDLLSSGNRKLISPNLFRVQKLASKNYFFRHHLETSVEEKKELKNIAYKPQLGLNALSNIVKVRINHIGEIVSVGEY

SEQ ID NO: 366 - protein, 1132 aa, Nitratifractor salsuginis
MKKILGVDLGITSFGYAILQETGKDLYRCLDNSVVMRNNPYDEKSGESSQSIRSTQKSMRRLIEKRKKRIRCVAQTMERYGILDYSETMKINDPKNNPIKNRWQLRAVDAWKRPLSPQELFAIFAHMAKHRGYKSIATEDLIYELELELGLNDPEKESEKKADERRQVYNALRHLEELRKKYGGETIAQTIHRAVEAGDLRSYRNHDDYEKMIRREDIEEEIEKVLLRQAELGALGLPEEQVSELIDELKACITDQEMPTIDESLFGKCTFYKDELAAPAYSYLYDLYRLYKKLADLNIDGYEVTQEDREKVIEWVEKKIAQGKNLKKITHKDLRKILGLAPEQKIFGVEDERIVKGKKEPRTFVPFFFLADIAKFKELFASIQKHPDALQIFRELAEILQRSKTPQEALDRLRALMAGKGIDTDDRELLELFKNKRSGTRELSHRYILEALPLFLEGYDEKEVQRILGFDDREDYSRYPKSLRHLHLREGNLFEKEENPINNHAVKSLASWALGLIADLSWRYGPFDEIILETTRDALPEKIRKEIDKAMREREKALDKIIGKYKKEFPSIDKRLARKIQLWERQKGLDLYSGKVINLSQLLDGSADIEHIVPQSLGGLSTDYNTIVTLKSVNAAKGNRLPGDWLAGNPDYRERIGMLSEKGLIDWKKRKNLLAQSLDEIYTENTHSKGIRATSYLEALVAQVLKRYYPFPDPELRKNGIGVRMIPGKVTSKTRSLLGIKSKSRETNFHHAEDALILSTLTRGWQNRLHRMLRDNYGKSEAELKELWKKYMPHIEGLTLADYIDEAFRRFMSKGEESLFYRDMFDTIRSISYWVDKKPLSASSHKETVYSSRHEVPTLRKNILEAFDSLNVIKDRHKLTTEEFMKRYDKEIRQKLWLHRIGNTNDESYRAVEERATQIAQILTRYQLMDAQNDKEIDEKFQQALKELITSPIEVTGKLLRKMRFVYDKLNAMQIDRGLVETDKNMLGIHISKGPNEKLIFRRMDVNNAHELQKERSGILCYLNEMLFIFNKKGLIHYGCLRSYLEKGQGSKYIALFNPRFPANPKAQPSKFTSDSKIKQVGIGSATGIIKAHLDLDGHVRSYEVFGTLPEGSIEWFKEESGYGRVEDDPHH

SEQ ID NO: 367 - protein, 1166 aa, Nitrobacter hamburgensis
MHVEIDFPHFSRGDSHLAMNKNEILRGSSVLYRLGLDLGSNSLGWFVTHLEKRGDRHEPVALGPGGVRIFPDGRDPQSGTSNAVDRRMARGARKRRDRFVERRKELIAALIKYNLLPDDARERRALEVLDPYALRKTALTDTLPAHHVGRALFHLNQRRGFQSNRKTDSKQSEDGAIKQAASRLATDKGNETLGVFFADMHLRKSYEDRQTAIRAELVRLGKDHLTGNARKKIWAKVRKRLFGDEVLPRADAPHGVRARATITGTKASYDYYPTRDMLRDEFNAIWAGQSAHHATITDEARTEIEHIIFYQRPLKPAIVGKCTLDPATRPFKEDPEGYRAPWSHPLAQRFRILSEARNLEIRDTGKGSRRLTKEQSDLVVAALLANREVKFDKLRTLLKLPAEARFNLESDRRAALDGDQTAARLSDKKGFNKAWRGFPPERQIAIVARLEETEDENELIAWLEKECALDGAAAARVANTTLPDGHCRLGLRAIKKIVPIMQDGLDEDGVAGAGYHIAAKRAGYDHAKLPTGEQLGRLPYYGQWLQDAVVGSGDARDQKEKQYGQFPNPTVHIGLGQLRRVVNDLIDKYGPPTEISIEFTRALKLSEQQKAERQREQRRNQDKNKARAEELAKFGRPANPRNLLKMRLWEELAHDPLDRKCVYTGEQISIERLLSDEVDIDHILPVAMTLDDSPANKIICMRYANRHKRKQTPSEAFGSSPTLQGHRYNWDDIAARATGLPRNKRWRFDANAREEFDKRGGFLARQLNETGWLARLAKQYLGAVTDPNQIWVVPGRLTSMLRGKWGLNGLLPSDNYAGVQDKAEEFLASTDDMEFSGVKNRADHRHHAIDGLVTALTDRSLLWKMANAYDEEHEKFVIEPPWPTMRDDLKAALEKMVVSHKPDHGIEGKLHEDSAYGFVKPLDATGLKEEEAGNLVYRKAIESLNENEVDRIRDIQLRTIVRDHVNVEKTKGVALADALRQLQAPSDDYPQFKHGLRHVRILKKEKGDYLVPIANRASGVAYKAYSAGENFCVEVFETAGGKWDGEAVRRFDANKKNAGPKIAHAPQWRDANEGAKLVMRIHKGDLIRLDHEGRARIMVVHRLDAAAGRFKLADHNETGNLDKRHATNNDIDPFRWLMASYNTLKKLAAVPVRVDELGRVWRVMPN

SEQ ID NO: 368 - protein, 1044 aa, Nitrosomonas sp.
  source 1..1044: note = Nitrosomonas sp. AL212
MLHKMRYRLALDLGSTSLGWAMVRLNANQQPCAVIKAGVRIFSNGRNPKDGSSLAVTRREARSMRRRRDRLLKRKARMMRTLIEYGFFPANETQRKALENLNPYALRAKGLDEALTPSEFARALFHINQRRGFKSNRKTDKKDSDSGALKTAIKQLHSVLDPQGNDGKPRTVGELLYKRFTDLSKLPKDRTVRARYRQDKIVKDDGKTKIDKYYDLYIDRAMIEQEFDALWKKQSELNPILFTENARADLKDVLLYQRSLKPVKPGRCTFMSEEERAPLALPSTQRFRMYQEVNNLRILREGLKEESLTLQQRDDLINALEKNNRRTFTQIKKLLGVGGSVQFNFEDPKREELKGNTTSAILGKSEHFGEAWFAFNEAKQDAIVLQLIKEENEAKLVRWLQDETGIDEKRAEVIANAGLPEGYGSLCIEALARILPELRRDVVTYDKAVQAAGFEHHSKLNRNEEIPDITFKIESIDRNSGEIKQFHLHKELPYYGEYLQRHVGFGSGKPEDSIEKRYGKIANPTVHIGLNQVRVVVNALIKRYGHPSEIIVEVARDLKQSKDRRDEENKRQAENQKRNERLRKDIADILGISEERVRRDDIEKMILWEELSFDPADRRCPYSGVQVSTVMLLSDEVEVEHILPFSQTLDDSLNNKTVALRQANRIKGNRTPWEAFGTSNISGFDYSGILTRAELMPKAKRYRFAEDGYQRWLKDDAGFLARALNDTRHLSKIAREYMSLICPNTRVIPGQMTAMLRRNFGLNDVLGLNGEKNRNDHRHHAVDACVIAVTDQGLLQRFAAASASARERQLNRLVENMPLPWESYREHVRRAIDGIWVSHRPDHSHEGAMHNDTAYGLRGNGRVSFHKMVEGKREYIEDNLKVIEITDTKAIDRHGLLPTGKPRPYKGYKGDSNYCIEIVRNEKGRWEGEIISTFDAYQLVRKYGIVQLRYPVLSVSGKPLVMRLIRNDFVRLEHEGITRTLRVCKMREDGQVALADVTEANVDARTRTKEICYVFKTGGSLQKAKARRITISPIGELRDPGFKE

SEQ ID NO: 369 - protein, 1498 aa, Odoribacter laneus
  source 1..1498: note = Odoribacter laneus YIT 12061
METTLGIDLGTNSIGLALVDQEEHQILYSGVRIFPEGINKDTIGLGEKEESRNATRRAKRQMRRQYFRKKLRKAKLLELLIAYDMCPLKPEDVRRWKNWDKQQKSTVRQFPDTPAFREWLKQNPYELRKQAVTEDVTRPELGRILYQMIQRRGFLSSRKGKEEGKIFTGKDRMVGIDETRKNLQKQTLGAYLYDIAPKNGEKYRFRTERVRARYTLRDMYIREFEIIWQRQAGHLGLAHEQATRKKNIFLEGSATNVRNSKLITHLQAKYGRGHVLIEDTRITVTFQLPLKEVLGGKIEIEEEQLKFKSNESVLFWQRPLRSQKSLLSKCVFEGRNFYDPVHQKWIIAGPTPAPLSHPEFEEFRAYQFINNIIYGKNEHLTAIQREAVFELMCTESKDFNFEKIPKHLKLFEKFNFDDTTKVPACTTISQLRKLFPHPVWEEKREEIWHCFYFYDDNTLLFEKLQKDYALQTNDLEKIKKIRLSESYGNVSLKAIRRINPYLKKGYAYSTAVLLGGIRNSFGKRFEYFKEYEPEIEKAVCRILKEKNAEGEVIRKIKDYLVHNRFGFAKNDRAFQKLYHHSQAITTQAQKERLPETGNLRNPIVQQGLNELRRTVNKLLATCREKYGPSFKFDHIHVEMGRELRSSKTEREKQSRQIRENEKKNEAAKVKLAEYGLKAYRDNIQKYLLYKEIEEKGGTVCCPYTGKTLNISHTLGSDNSVQIEHIIPYSISLDDSLANKTLCDATFNREKGELTPYDFYQKDPSPEKWGASSWEEIEDRAFRLLPYAKAQRFIRRKPQESNEFISRQLNDTRYISKKAVEYLSAICSDVKAFPGQLTAELRHLWGLNNILQSAPDITFPLPVSATENHREYYVITNEQNEVIRLFPKQGETPRTEKGELLLTGEVERKVFRCKGMQEFQTDVSDGKYWRRIKLSSSVTWSPLFAPKPISADGQIVLKGRIEKGVFVCNQLKQKLKTGLPDGSYWISLPVISQTFKEGESVNNSKLTSQQVQLFGRVREGIFRCHNYQCPASGADGNFWCTLDTDTAQPAFTPIKNAPPGVGGGQIILTGDVDDKGIFHADDDLHYELPASLPKGKYYGIFTVESCDPTLIPIELSAPKTSKGENLIEGNIWVDEHTGEVRFDPKKNREDQRHHAIDAIVIALSSQSLFQRLSTYNARRENKKRGLDSTEHFPSPWPGFAQDVRQSVVPLLVSYKQNPKTLCKISKTLYKDGKKIHSCGNAVRGQLHKETVYGQRTAPGATEKSYHIRKDIRELKTSKHIGKVVDITIRQMLLKHLQENYHIDITQEFNIPSNAFFKEGVYRIFLPNKHGEPVPIKKIRMKEELGNAERLKDNINQYVNPRNNHHVMIYQDADGNLKEEIVSFWSVIERQNQGQPIYQLPREGRNIVSILQINDTFLIGLKEEEPEVYRNDLSTLSKHLYRVQKLSGMYYTFRHHLASTLNNEREEFRIQSLEAWKRANPVKVQIDEIGRITFLNGPLC

SEQ ID NO: 370 - protein, 1389 aa, Oenococcus kitaharae
  source 1..1389: note = Oenococcus kitaharae DSM 17330
MARDYSVGLDIGTSSVGWAAIDNKYHLIRAKSKNLIGVRLFDSAVTAEKRRGYRTTRRRLSRRHWRLRLLNDIFAGPLTDFGDENFLARLKYSWVHPQDQSNQAHFAAGLLFDSKEQDKDFYRKYPTIYHLRLALMNDDQKHDLREVYLAIHHLVKYRGHFLIEGDVKADSAFDVHTFADAIQRYAESNNSDENLLGKIDEKKLSAALTDKHGSKSQRAETAETAFDILDLQSKKQIQAILKSVVGNQANLMAIFGLDSSAISKDEQKNYKFSFDDADIDEKIADSEALLSDTEFEFLCDLKAAFDGLTLKMLLGDDKTVSAAMVRRFNEHQKDWEYIKSHIRNAKNAGNGLYEKSKKFDGINAAYLALQSDNEDDRKKAKKIFQDEISSADIPDDVKADFLKKIDDDQFLPIQRTKNNGTIPHQLHRNELEQIIEKQGIYYPFLKDTYQENSHELNKITALINFRVPYYVGPLVEEEQKIADDGKNIPDPTNHWMVRKSNDTITPWNLSQVVDLDKSGRRFIERLTGTDTYLIGEPTLPKNSLLYQKFDVLQELNNIRVSGRRLDIRAKQDAFEHLFKVQKTVSATNLKDFLVQAGYISEDTQIEGLADVNGKNFNNALTTYNYLVSVLGREFVENPSNEELLEEITELQTVFEDKKVLRRQLDQLDGLSDHNREKLSRKHYTGWGRISKKLLTTKIVQNADKIDNQTFDVPRMNQSIIDTLYNTKMNLMEIINNAEDDFGVRAWIDKQNTTDGDEQDVYSLIDELAGPKEIKRGIVQSFRILDDITKAVGYAPKRVYLEFARKTQESHLTNSRKNQLSTLLKNAGLSELVTQVSQYDAAALQNDRLYLYFLQQGKDMYSGEKLNLDNLSNYDIDHIIPQAYTKDNSLDNRVLVSNITNRRKSDSSNYLPALIDKMRPFWSVLSKQGLLSKHKFANLTRTRDFDDMEKERFIARSLVETRQIIKNVASLIDSHFGGETKAVAIRSSLTADMRRYVDIPKNRDINDYHHAFDALLFSTVGQYTENSGLMKKGQLSDSAGNQYNRYIKEWIHAARLNAQSQRVNPFGFVVGSMRNAAPGKLNPETGEITPEENADWSIADLDYLHKVMNFRKITVTRRLKDQKGQLYDESRYPSVLHDAKSKASINFDKHKPVDLYGGFSSAKPAYAALIKFKNKFRLVNVLRQWTYSDKNSEDYILEQIRGKYPKAEMVLSHIPYGQLVKKDGALVTISSATELHNFEQLWLPLADYKLINTLLKTKEDNLVDILHNRLDLPEMTIESAFYKAFDSILSFAFNRYALHQNALVKLQAHRDDFNALNYEDKQQTLERILDALHASPASSDLKKINLSSGFGRLFSPSHFTLADTDEFIFQSVTGLFSTQKTVAQLYQETK

SEQ ID NO: 371 - protein, 1389 aa, Oenococcus kitaharae; identical to SEQ ID NO: 370
  source 1..1389: note = Oenococcus kitaharae DSM 17330

SEQ ID NO: 372 - protein, 1399 aa, Olsenella uli
MNLRNTTDEYNIGLDMGTNSVGWAVTDKAGAIAHFKGKPTLGSRLFDAAQTAAGARIHRSQRRRYVRRRWRLDLLQSLFQDEVSKVDSEFFCRLRQSRLYVGDREKGHADYTWPIFNDSDFNEVDYYKRFPTIYHLRKWLMETDEKADIRLIYLATHNIVKHRGNFLRENNKSLSSRDANPAQAVKSLRLALNDWCSERDYECAWKGEEDDGAIDEAILNVLADGEKGRSDQAKEIAKLTGVDCGDAKQSKQCNEAIAKAIVGLKVEMKNIFGEFPAEKTSYIYLSSDEDVEAVRESCPDDSGELFQALCKLYSAYILQELLSYADPSGQTISANMVAKYKQYGRDLRLLKELTRTYAPQKYDLFFRGETYAGSSDYVVDEARGYTRYNLGTTKANYDDFQKSVKELFKGTDALQDERYQEMMVAFGEQKFLRRLKTSDNGSIYYQLHLEELHTILENQGKHYPFLLSEEDKIESLVSFRIPYYVGPLTRKNAAIGHDGKERFAWSSRKDGMEHAVITPWNWEEIIDRDKSAEDFIMRMTGDCTYLQGEPVLPKCSLLYEEFCALNEFNGAHWTVDGDDERRFDAAQRERIMCDLFRRTRSVTYNKVSDWLERKYNFTGARVRGGQGEHGFESKLGSYIFFCKDVFKTDGLDEADYTMIEQIILWSTLFEDRDILKRKIEEAYGGDRLTSEQIKVICKKRFTGWGRLSKRLLTDIKVNTDTGRKSIMDVLREGNPNNGQRSRTMVFMEVLRDEDLGFQKAIDGLNRDYFREHNNGLMDVNDLPGSPAIRRSINQAVRIVDEIASIARKEPTNIFIEVTREEDDPRKKGKRTKRRYDAIKSALEKFKKDDPSLWKELCEKAPGDMDERLSLYFMQRGKCMYSGRPIKIEELHTGKYEVDHIIPRSYIKDDSFENKVLVYREENQHKTDALLIDSSIRQKMGGYWRMLHDAKLVGDKKFRNLFRNHIDDKAMKGFVARQIVETSQMVKLVQTLFEARYPNTRIVPVKAGISHDLREAAGLVKCREANDFHHAHDAFLACRIGLFIQKRHPSVYDNPIGLARIMRDYARMQAREYKKSHCLAHTQGFIVNSFLSSGFDEETGEIFKDDWDAKAEVEGIRRVLNCRQCFISRMPVEGDTRYGGRYWGETIYSPKGKHKHEIPLKQGLDPNLYGGYSDLLYSYFLIYEASDVSSGERVLRFIGIPTSIAARMANQKRLEEYVSRLALQENLEHVRMVRKIMKKQLIEVDNCRLLVTAADAVTNATELAFSLDEMKIISTCAKCINGADPSAIDKIGNAQDSFFDNLKRRGSDRCALLFSQLKLDKLSQNFYMISSDDKSKILISILDRIRAKSNSVDLSLVGGAKHAAQMKFDFNAKLNNPASSFVLIDQSVTGMFERRTRIGL

SEQ ID NO: 373 - protein, 1535 aa, Ornithobacterium rhinotracheale
MNTILGLDLGTNSIGWALIKVLNDKTRLPLEIIDLGVVVIPTDQRTLDKFSKGESISKTAERTKQKGVRKLYERKKLRRERLHRVLNILGFLPEHYSKKIDFKKHLGQFFGNSQPKISYVENDHGKHEFIFMDSYREMLKEFSKHNIKNVPYDWTIYYLRKKALSQKISKEELAWVILNFNKKRGYYQFRDDNADENKENKIEKYYALKVTNVKKEDAQNYTITLENGWIYKNKSKISLLDWVGSTKEFISTEKFDNKGNIIKKKNGEDDRTLKLVDSEKDWIAIKKSTEDRIENYGKTVGTYLYEHLLKDPNQKLNGELINIIDRKFYKNELKQILEKQKEFHPELLNEDLFQKSIIELYPKNSTRQKELKNKDLCYLLIDDVIYYQRDLKKKNSTINKCSFESREYYLNGEKQIQKINCIAKSKPLYQEFRTLQFIKNLKVYEIIDGLEKDITSKLLPDFETKEHFFEWLNDKEKIDQLQLLSYKCFDLHDNVKNDLIAKGIKRPTEKAIRTELLEKYRWNYSKDNDRNFLLNETRFKILKYLKKVDKKLTLTNEQIESLWLLLYSAKDERELKNGLQKFSEKNKLPKKFSDIFISFPPFKKEYGAYSEKALKKLLSLVRFGKYWSFNKIDNNIQNKIMNILNGEVDDSISDRVREKTILLQDKNDFQDLPLWLASYVAYNRFSEVSEIKYWDSPDKIEFLKQHSIGNPIVEKIINETLKLIKDIWVIHGKSCKNFFSEIHIELSREIKSSSKKRAQITNNNTKNQKLNNLIKSLLIEMASDTKYENVTPYSPSQQEILKIYDEGIYSKEENSEKIKEINKIRNNNKISKSDITKYKLWLEQGYISPYTGKIIPLTKLFTAKYQKEHIIPQTKFFDDSFNNKVICEAEVNKLKDNSLAMNFIKAKGGKAVKLSDGETVTILNQEEYKQLVRTSFKKNSIKLRNLLLEEIPDTFTKRQLNDTKYISKLVLSLLSNIVREKGELESTAKRIVSTNGQITSILRNDWGLNNIWNKLITPRFERLNNINKNKIYGNWENKKGKNVFQINYLNDNLSTLNTKRIDHRHHALDALIVACTTRNHINFLNNQYAKSRNQRHDLRAKLKRRETITTEGSKKQVFKDFIKPWESFTQDALKKLETTIVNFKVNKRIINKTINWYKKWEKQKDGTYKKIQKKQTKGDAWAIRKPLHIDTIYGIVCKKLPLKSALENYKNIIDENLKHKIKELKEVNKFDNNQIINFFKECNFIFEDNNIQKVEVYDFKDNRDKTILSSSRQLIDESFTPKKIGKVLDPTIRNILLKHLNSTKYNNKFDSDGNPIKPEKLAFSPEGLKDLNKNIKHLNNNKEHQPIKRVKLFETLGNKIKVGYTQQKNKKFAETATGTNLFLGIYSDNNKRDFKTIPLILAIQREKEGLNPCPDTDEKGNQLLFSLSPNELVFVPNNEERKNPNLVDFENLSKDQIDRIYKFVSCTGSEAYFVPSRTAKPIIENENGTNNKSQRIIEFNEKTSIKNEKNEPVLIKTICWKIEVNRLGKIIKVIK

SEQ ID NO: 374 - protein, 1443 aa, Parabacteroides johnsonii
  source 1..1443: note = Parabacteroides johnsonii DSM 18315
MIKLLYLEKLKQYTMKKILGLDLGTSSIGWALVNEAENSDEVSSIIKLGVRVNPLTVDEMQNFEKGKSITTNADRTLKRSMRRNLQRYKLRRDALIELLKKVGFITDKTILSEQGNRTTFETYRLRAKAAEEEISLKELARVLLMINKKRGYKSSRKAKGEEEGALIDGMEIAKKLYDEDLTPGQLCLQLLESGKKFFPDFYRSDLQEEFNKIWDFQKQFNLFSFCDVAKEEVKGKNKSQTWAILAKYFVETKKVNVWNEHEAQTENREEVYKLVGLKRTVKGEELKKENYRWRVQALTEQLDLEKIAVVLQEINGQISASSGYLGAISDRSKVLYFNRQTVGQYQMAELNKNPNMSLRNMVFYRQDYLDEFNVIWEKQAEFHKELTPELKKEIRDIIIFYQRRLKSQKGLISFCEFENREVVVEKEGKKQTKIIGCKVIPRSHPLFQEFKIWQTLNNIEVFVGEKKGKRKKSNVSSDLFGDTEDALITEGRRFLYQEEKKILAKELSIKKGLTKAEILRLLFENPQELDINFKQIDGNQTGFALFSAYSNMIEKYGYEPLDFKKPAEDLISQLKTVFTDLGWNTDLLFIDLDKENKEWEKQPYFRLWHLLYSFEGDNTPTGNGKLIEKIMQLCGIEKEYAIELANVSLQDDYGSLSAKAIKKILLYLKEGNQYDMACEYAGYRHSKSSLTKEEIENKVLKDKLEILPKNSLRNPVVEKILNQMVNVINTVMEVYGRPDEIRVELARELKKSAKEREELTKAVAKNTREHEEIRKVLQSEFGMINVSRNDIIRYKLYEELKDNGYKTLYSNQYIPREKLFSKEIDIEHIIPQSRLFDDSLSNKTLEYKSINIEKGNKTAYDFVKEKYGEEGLQQYLNRCENLCKDKKAKLRKLKMELNEIPDGFIDRDLRNTQYIAKKALSMLTEICRRVVATTGSITDKLREDWQLVDVMKELNLPKYEALGLVEVYEDKDGRKIKRIKDWTKRNDHRHHAMDALTVAFTKDVFIQYFNNKNAAWESDSKEHTNIVGIKTRYFESGKAVPPIPLGQFRVEAKCHLENLLVSIKAKNKVVTTNVNCIKKKGGTYKNTQQTPRGQLHLETIYGSHNQYVTKIEKVNASFDAVKIATVSKQDYRNALLKRLEVFGNDPKKAFTGKNSLEKNPIYLDRAQTIQVPDKVQTVELETAYTIRKPVDPTLNVDKVVDKKIRLILEQRLKEYGGDAKKAFVNLDENPIWLNEEKGISIKRVTIRGISKAQALHDKKDKDGNFILDETGKRIPVDFVNTGNNHHVAIYRKPVLDKKGQVIFDDEGNPMYELDEDVVPFFEAVTRANLGIPIIDKDYKKSEGWQFLFSMKQNEYFVFPNEKTGFNPKEVDLLDPDNYAMISPNLFRVQKIGLNDYTFRHHLETTIQNDLKFITWIRCGKSGIKDIVKVRINHIGQIVSVGEY

SEQ ID NO: 375 - protein, 1424 aa, Parabacteroides sp.
  source 1..1424: note = Parabacteroides sp. D13
MKRILGLDLGTNSIGWALVNEAETDEEVSSIIRLGVRVNPLTVDETQNFEKGKSITTNAERTLKRSMRRNLQRYKLRRDALVEFLKELGFITDETILSEQGNRTTFETCRLRAKAAEEEISLEELSRVLLMINKKRGYKSSRKVKKEEDGVLIDGMEIAKKLYEEDLTPGQLCSQLLESGKKVLPDFYRSDLQEELDRIWSVQKQFHPDVFCDAAKEEIKGKNRSQTWAILANYFVWKEEVVGWNDREAKNETIEKECKLVGLKRTTKGYELKKENYRWRAQALTEQLGLEEIAVVLQEINGQINASSGYLGAISDRSKVLYFNHQTVGQYQMAELDKNPHASLRNMVFYRQDYLDEFDRIWEKQAEFHKELTAELKKEIRDMIIFYQRRLKSQKGLISFCEFERLEIVVEKDGKKQTKVIGCKVIPRSHPLFQEFKVWQTLNDIKVLGREKKRNALSASESRALYPEEKEILARELAIKENMKKADVLKLLFENPQELDLNFKQIDGNRTGFSLFSAYSKMIEKYGYEPLDFKKPADEIIGQLRTIFTDLGWNTNLFTIDLTKEGKELEMQPYFRLWHLLYSFEGDNTSTGNGKLIEKIMQLCGVEKEYAVELASLSFQDDYGSLSAKAIKRILPYLKEGNLYDVACEYAGYRHSKSSLTKEEIENKVLKGKLEVLPKNSLRNPVVEKILSQMVNVINTIIDTYGKPDEIRVELARELKKSAKEREELTKAIAKSTREHEEIRKLLQDEFGMMNVSRNDIIRYKLYEELKDNGYKTLYSNQYIPKEKIFSKEIDIEHIIPQSRLFDDSLSNKTLEYKAINIEKGNKTAYDFVKEKYGEEGLQQYINRCESLFNDKKAKLRKLKMEQKDIPDGFIDRDLRNTQYIAKKALAMLNEICRRVVATTGSITDQLREDWQLVDVMKELNLPKYEALGFVETYEDKDGRKIKRIKDWTKRNDHRHHAMDALTVAFTKDAFIQYFNNKNAAQDSGNRNHTNIIGIKTRYFDKGRALPPIPLEQFRIEAKQHLEKLLVSIKAKNKVVTVNVNRTKKRKGENTKIQQTPRGQLHLETVYGSHKQYVTKIEKVNASFDAAKIATVSKRAYRNALLKRLETFGNDPKKAFTGKNALEKNPLYADKYQTIRVPEKVQTVEFETIYTIRKPVDPALNVDKVVDVKVRAILERRLKEYGGDPKKAFVNFWENPIWLNKEKGISIKRVSIRGINNAQSIHVKKDKNGNPIWDENGKQIPVDFVNTGNNHHVAIYRKPVLDKKGQVTFDEDGNLMYELDEVVVPFFEAVTRANLGLPIIDKDYRKSEGWQFLFSMKQNEYFVFPNEKTGFNPKEVDLLNPDNYAMISPNLFRVQTMSKVMYGNNVVRDYKFRHHLETTVKDMKELKDIAYKQYKTLSFGNSVVKIRINHIGQIVSVGEY

SEQ ID NO: 376 - protein, 1428 aa, Parasutterella excrementihominis
  source 1..1428: note = Parasutterella excrementihominis YIT 11859
MGKTHIIGVGLDLGGTYTGTFITSHPSDEAEHRDHSSAFTVVNSEKLSFSSKSRTAVRHRVRSYKGFDLRRRLLLLVAEYQLLQKKQTLAPEERENLRIALSGYLKRRGYARTEAETDTSVLESLDPSVFSSAPSFTNFFNDSEPLNIQWEAIANSPETTKALNKELSGQKEADFKKYIKTSFPEYSAKEILANYVEGRRAILDASKYIANLQSLGHKHRSKYLSDILQDMKRDSRITRLSEAFGSTDNLWRIIGNISNLQERAVRWYFNDAKFEQGQEQLDAVKLKNVLVRALKYLRSDDKEWSASQKQIIQSLEQSGDVLDVLAGLDPDRTIPPYEDQNNRRPPEDQTLYLNPKALSSEYGEKWKSWANKFAGAYPLLTEDLTEILKNTDRKSRIKIRSDVLPDSDYRLAYILQRAFDRSIALDECSIRRTAEDFENGVVIKNEKLEDVLSGHQLEEFLEFANRYYQETAKAKNGLWFPENALLERADLHPPMKNKILNVIVGQALGVSPAEGTDFIEEIWNSKVKGRSTVRSICNAIENERKTYGPYFSEDYKFVKTALKEGKTEKELSKKFAAVIKVLKMVSEVVPFIGKELRLSDEAQSKFDNLYSLAQLYNLIETERNGFSKVSLAAHLENAWRMTMTDGSAQCCRLPADCVRPFDGFIRKAIDRNSWEVAKRIAEEVKKSVDFTNGTVKIPVAIEANSFNFTASLTDLKYIQLKEQKLKKKLEDIQRNEENQEKRWLSKEERIRADSHGICAYTGRPLDDVGEIDHIIPRSLTLKKSESIYNSEVNLIFVSAQGNQEKKNNIYLLSNLAKNYLAAVFGTSDLSQITNEIESTVLQLKAAGRLGYFDLLSEKERACARHALFLNSDSEARRAVIDVLGSRRKASVNGTQAWFVRSIFSKVRQALAAWTQETGNELIFDAISVPAADSSEMRKRFAEYRPEFRKPKVQPVASHSIDAMCIYLAACSDPFKTKRMGSQLAIYEPINFDNLFTGSCQVIQNTPRNFSDKTNIANSPIFKETIYAERFLDIIVSRGEIFIGYPSNMPFEEKPNRISIGGKDPFSILSVLGAYLDKAPSSEKEKLTIYRVVKNKAFELFSKVAGSKFTAEEDKAAKILEALHFVTVKQDVAATVSDLIKSKKELSKDSIENLAKQKGCLKKVEYSSKEFKFKGSLIIPAAVEWGKVLWNVFKENTAEELKDENALRKALEAAWPSSFGTRNLHSKAKRVFSLPVVATQSGAVRIRRKTAFGDFVYQSQDTNNLYSSFPVKNGKLDWSSPIIHPALQNRNLTAYGYRFVDHDRSISMSEFREVYNKDDLMRIELAQGTSSRRYLRVEMPGEKFLAWFGENSISLGSSFKFSVSEVFDNKIYTENAEFTKFLPKPREDNKHNGTIFFELVGPRVIFNYIVGGAASSLKEIFSEAGKERS

SEQ ID NO: 377 - protein, 1037 aa, Parvibaculum lavamentivorans
MERIFGFDIGTTSIGFSVIDYSSTQSAGNIQRLGVRIFPEARDPDGTPLNQQRRQKRMMRRQLRRRRIRRKALNETLHEAGFLPAYGSADWPVVMADEPYELRRRGLEEGLSAYEFGRAIYHLAQHRHFKGRELEESDTPDPDVDDEKEAANERAATLKALKNEQTTLGAWLARRPPSDRKRGIHAHRNVVAEEFERLWEVQSKFHPALKSEEMRARISDTIFAQRPVFWRKNTLGECRFMPGEPLCPKGSWLSQQRRMLEKLNNLAIAGGNARPLDAEERDAILSKLQQQASMSWPGVRSALKALYKQRGEPGAEKSLKFNLELGGESKLLGNALEAKLADMFGPDWPAHPRKQEIRHAVHERLWAADYGETPDKKRVIILSEKDRKAHREAAANSFVADFGITGEQAAQLQALKLPTGWEPYSIPALNLFLAELEKGERFGALVNGPDWEGWRRTNFPHRNQPTGEILDKLPSPASKEERERISQLRNPTVVRTQNELRKVVNNLIGLYGKPDRIRIEVGRDVGKSKREREEIQSGIRRNEKQRKKATEDLIKNGIANPSRDDVEKWILWKEGQERCPYTGDQIGFNALFREGRYEVEHIWPRSRSFDNSPRNKTLCRKDVNIEKGNRMPFEAFGHDEDRWSAIQIRLQGMVSAKGGTGMSPGKVKRFLAKTMPEDFAARQLNDTRYAAKQILAQLKRLWPDMGPEAPVKVEAVTGQVTAQLRKLWTLNNILADDGEKTRADHRHHAIDALTVACTHPGMTNKLSRYWQLRDDPRAEKPALTPPWDTIRADAEKAVSEIVVSHRVRKKVSGPLHKETTYGDTGTDIKTKSGTYRQFVTRKKIESLSKGELDEIRDPRIKEIVAAHVAGRGGDPKKAFPPYPCVSPGGPEIRKVRLTSKQQLNLMAQTGNGYADLGSNHHIAIYRLPDGKADFEIVSLFDASRRLAQRNPIVQRTRADGASFVMSLAAGEAIMIPEGSKKGIWIVQGVWASGQVVLERDTDADHSTTTRPMPNPILKDDAKKVSIDPIGRVRPSND

SEQ ID NO: 378 - protein, 1058 aa, Pasteurella multocida
  source 1..1058: note = Pasteurella multocida subsp. gallicida X73
MQTTNLSYILGLDLGIASVGWAVVEINENEDPIGLIDVGVRIFERAEVPKTGESLALSRRLARSTRRLIRRRAHRLLLAKRFLKREGILSTTDLEKGLPNQAWELRVAGLERRLSAIEWGAVLLHLIKHRGYLSKRKNESQTNNKELGALLSGVAQNHQLLQSDDYRTPAELALKKFAKEEGHIRNQRGAYTHTFNRLDLLAELNLLFAQQHQFGNPHCKEHIQQYMTELLMWQKPALSGEAILKMLGKCTHEKNEFKAAKHTYSAERFVWLTKLNNLRILEDGAERALNEEERQLLINHPYEKSKLTYAQVRKLLGLSEQAIFKHLRYSKESAESATFMELKAWHAIRKALENQGLKDTWQDLAKKPDLLDEIGTAFSLYKTDEDIQQYLEGKLPDSVINALLVSLNFDKFIELSLKSLRKILPLMEQGKRYDQACHEIYGHHYGEKNQQISQLLPVIPTQEIRNPVVLRTLSQARKVINAIIRQYGSPARVHIETGRELGKSFKERREIQKQQEDNRTKRESAVQKFKELFSDFSSEPKSKDILKFRLYEQQHGKCLYSGKEINIHRLNEKGYVEIDHALPFSRTWDDSFNNKVLVLASENQNKGNQTPYEWLQGKINSERWKNFVALVLGSQCSAAKKQRLLTQVIDDNKFIDRNLNDTRYIARFLSNYIQENLLLVGKNKKNVFTPNGQITALLRSRWGLIKVRENNDRHHALDAIVVACATPSMQQKITRFIRFKEVHPYKIENRYEMVDQESGEIISPHFPEPWAYFRQEVNIRVFDNHPDTVLKEMLPDRPQANHQFVQPLFVSRAPTRKMSGQGHMETIKSAKRLAEGISVLRIPLTQLKPNLLENMVNKEREPALYVGLKARLAEFNQDPAKAFATPFYKQGGQQVKAIRVELVQKSGVLVRQGNGVADNAPGSIVRTDVFIKNNKFFLVPIYTWQVAKGILPNKAIVAHKNEDEWEEMDEGAKFKFSIFPNDLIELRTKTECFLGYYIGPDRHNGSISLREHDSEISKGNAGVYRVGVKLALSLEKYHIDELGKNRRICRPHQRRPVR

SEQ ID NO: 379 - protein, 1056 aa, Pasteurella multocida
  source 1..1056: note = Pasteurella multocida subsp. multocida str. P52VAC
MQTTNLSYILGLDLGIASVGWAVVEINENEDPIGLIDVGVRIFERAEVPKTGESLALSRRLARSTRRLIRRRARRLLLAKRFLKREGILSTTDLEKGLPNQAWELRVAGLERRLSAIEWGAVLLHLIKHRGYLSKRKNESQTNNKELGALLSGVAQNHQLLQSDDYRTPAELALKKFAKEEGHIRNQRGAYTHTFNRLDLLAELNLLFAQQHQFGNPHCKEHIQQYMTELLMWQKPALSGEAILKMLGKCTHEKNEFKAAKHTYSAERFVWLTKLNNLRILEDGAERALNEEERQLLINHPYEKSKLTYAQVRKLLGLSEQAIFKHLRYSKENAESATFMELKAWHAIRKALENQGLKDTWQDLAKKPDLLDEIGTAFSLYKTDEDIQQYLTNKVPNSVINALLVFLNFDKFIELALKSLRKILPLMEQGKRYDQACREIYGHHYGEANQKTSQLLPAIPAQEIRNPVVLRTLSQARKVINAIIRQYGSPARVHIETGRELGKSFKERREIQKQQEDNRTKRESAVQKFKELFSDFSSEPKSKDILKFRLYEQQHGKCLYSGKEINIHRLNEKGYVEIDHALPFSRTWDDSFNNKVLVLASENQNKGNQTPYEWLQGKINSERWKNFVALVLGSQCSAAKKQRLLTQVIDDNKFIDRNLNDTRYIARFLSNYIQENLLLVGKNKKNVFTPNGQITALLRSRWGLIKIRENNDRHHALDAIVVACATPSMQQKITRFIRFKEVHPYKIENRYEMVDQESGEIISPHFPEPWAYFRQEVNIRVFDNHPDTVLKEMLPDRPQANHQFVQPLFVSRAPTRKMSGQGHMETIKSAKRLAEGISVLRIPLTQLKPNLLENMVNKEREPALYAGLKARLAEFNQDPAKAFTTPFYKQGGQQVKAIRVEQVQKSGVLVRENNGVADNASIVRTDVFIKNNKFFLVPIYTWQVAKGILPNKAIVAHKNEDEWEEMDEGAKFKFSLFPNDLVELKTKKEYFFGYYIGLDRATGNISLKEHDGEISKGKDGVYRVGVKLALSFEKYQVDELGKNRQICRPQQRQPVR

SEQ ID NO: 380 - protein, 1056 aa, Pasteurella multocida
MQTTNLSYILGLDLGIASVGWAVVEINENEDPIGLIDVGVRIFERAEVPKTGESLALSRRLARSTRRLIRRRAHRLLLAKRFLKREGILSTIDLEKGLPNQAWELRVAGLERRLSAIEWGAVLLHLIKHRGYLSKRKNESQTNNKELGALLSGVAQNHQLLQSDDYRTPAELALKKFAKEEGHIRNQRGAYTHTFNRLDLLAELNLLFAQQHQFGNPHCKEHIQQYMTELLMWQKPALSGEAILKMLGKCTHEKNEFKAAKHTYSAERFVWLTKLNNLRILEDGAERALNEEERQLLINHPYEKSKLTYAQVRKLLGLSEQAIFKHLRYSKENAESATFMELKAWHAIRKALENQGLKDTWQDLAKKPDLLDEIGTAFSLYKTDEDIQQYLTNKVPNSVINALLVSLNFDKFIELSLKSLRKILPLMEQGKRYDQACREIYGHHYGEANQKTSQLLPAIPAQEIRNPVVLRTLSQARKVINAIIRQYGSPARVHIETGRELGKSFKERREIQKQQEDNRTKRESAVQKFKELFSDFSSEPKSKDILKFRLYEQQHGKCLYSGKEINIHRLNEKGYVEIDHALPFSRTWDDSFNNKVLVLASENQNKGNQTPYEWLQGKINSERWKNFVALVLGSQCSAAKKQRLLTQVIDDNKFIDRNLNDTRYIARFLSNYIQENLLLVGKNKKNVFTPNGQITALLRSRWGLIKARENNNRHHALDAIVVACATPSMQQKITRFIRFKEVHPYKIENRYEMVDQESGEIISPHFPEPWAYFRQEVNIRVFDNHPDTVLKEMLPDRPQANHQFVQPLFVSRAPTRKMSGQGHMETIKSAKRLAEGISVLRIPLTQLKPNLLENMVNKEREPALYAGLKARLAEFNQDPAKAFATPFYKQGGQQVKAIRVEQVQKSGVLVRENNGVADNASIVRTDVFIKNNKFFLVPIYTWQVAKGILPNKAIVAHKNEDEWEEMDEGAKFKFSLFPNDLVELKTKKEYFFGYYIGLDRATGNISLKEHDGEISKGKDGVYRVGVKLALSFEKYQVDELGKNRQICRPQQRQPVR

SEQ ID NO: 381 - protein, 1364 aa, Pediococcus acidilactici
  source 1..1364: note = Pediococcus acidilactici DSM 20284
MGDRKYNLGLDIGTSSIGFAAVDENNQPIRVKGKTAIGVRLFEEGKTAADRRGFRTTRRRLSRRRWRINLLNEIFDAHLAEVDPTFLARLKESNRSNLDPKKSFQGSLLFPERKDYQFYEEYPTIYHLRKALMEKDRKFDFREIYLAVHHIIKYRGNFLNGTPMRSFKVENIELDTLFDQLNQLYAEIVPDNELAFDLAQVADVKDVLSSTTIYKMDKKKQLVKMMLLPASNKALQSENKKIVTQFVNAILNYKFKLDVLLQVETDADWSLKLNDEGADDKLEEFTGDLDENRLEIIDLLQRLHNWFSLNEITKDGNSLSAAMVEKYENHHHHLGLLKKVIENHPDAKKAKALKETYTAYVGKTDDKTQNQDDFYKAVEKNLDDSPDAKEIKRLIQLDQFMPKQRTGQNGAIPHQLHQQELDQIIEKQSKYYPFLAEPNPNVKRRKDAPYKLDELIAFKIPYYVGPLVTPEEQAQNGENVFAWMKRKAAGPITPWNFDEKVDRMESANRFIRRMTTKDTYLFGEDVLPAESMIYQKFVVLNELNNLKINGRHLSLKDKQDVYNDLFKQQKTVSIKALQNYYVTKKKAATAPTVGGLADPKKFLSSLSTYIDFKNMFGERVNDPQFQEDLEQIVEWSTIFEDRGIFKAKLQALGWLSEKQIQQLVAKRYKGWGRLSKKLLTGLKNAEGYSILDEMWRSTGNFMQIQSRPEFAALIQQANEKQFEGNDPDNVWENIENILGDAYTSPQNKKAIRQVVKVVQDIEKAVGNPPEKIAIEFTREAAANPQRTQSRLRTLEKLYESAEEVVDAGLTAELAEFKENKHVLSDKYYLYFTQLGRDVYTGDTISLDKLNDYDVDHILPQSFIKDDSLDNRVLTIRAVNNGKSDNVPAKMFGKKMGSFWRYLLDNGMISKRKYNNLITDPDNISKYAQKGFINRQLVETSQVIKLTANILNGIYDKDTEIIEVPAKMNSQMRKMFDLVKVREVNDYHHAFDAYLTIFIGNYLYKCYPKLQPYFVYDNFKKFGNKEDIGHKRFNFLGKIEREKKVVAPETGEILWSNVAPNETIKQIKKVYDYKFMIVSREITTRRAELFNQTVYPKNYHGKLIPIKEDRPTDLYGGYSGNTDAYLAIVALEDKKKGKYFKVVGIPTRVAAKLEKLKQQDSQQYLQALHKVIAPQFTKSTKKGIKKTEFEIVLDKVHYRQLVQDGPVKMMLGSSTYKYNAKQLVLSEKALQVIADDRKFDETQKDDNLIAVYDEILSIVNQSFDLYDINGFRKKLNDNRDQFIDLPAETKYEGRKVVAHGKREMILEILKGLHANAAFGNLKPIGFSTAFGQLQVPNGIILSKNAILIHQSPSGLFERKIKLSDL

SEQ ID NO: 382 - protein, 1366 aa, Pediococcus acidilactici
  source 1..1366: note = Pediococcus acidilactici MA18/5M
MGDRKYNLGLDIGTSSIGFAAVDENNQPIRVKGKTAIGVRLFEEGKTAADRRGFRTTRRRLSRRRWRINLLNEIFDAHLAEVDPTFLARLKESNRSNLDPKKSFQGSLLFPERKDYQFYEEYPTIYHLRKALMEEDRKFDIREIYLAVHHIIKYRGNFLNGTPMRSFKVENIELDTLFDQLNQLYAEIVPDNELAFDLAQVADVKDVLSSTTIYKMDKKKQLVKMMLLPASNKALQSENKKIVTQFVNAILNYKFKLDVLLQVETDADWSLKLNDEGADDKLEEFTGDLDENRLEIIDLLQRLHNWFSLNEITKDGNSLSAAMVEKYENHHHHLGLLKKVIENHPDAKKAKALKETYTAYVGKTDDKTQNQDDFYKAVEKNLDDSPDAKEIKRLIQLDQFMPKQRTGQNGAIPHQLHQQELDQIIEKQSKYYPFLAEPNPNVKRRKDAPYKLDELIAFKIPYYVGPLVTPEEQAQNKENVFAWMKRKAAGPITPWNFDEKVDRMESANRFIRRMTTKDTYLFGEDVLPAESMIYQKFVVLNELNNLKINGRHLSLKDKQDVYNDLFKQQKTVSIKALQNYYVTKKKAATAPTVGGLADPKKFLSSLSTYIDFKNMFGERVNDPQFQEDLEQIVEWSTIFEDRGIFKAKLQALGWLSEKQIQQLVAKRYKGWGRLSKKLLTGLKNAEGYSILDEMWRSTENFMQIQTRPEFAALIQQANEKQFEGNDPNNVWENIESILGDAYTSPQNKKAIRQVVKVVQDIEKAVGNPPEKIAIEFTREAAANPQRTQSRLRTLEKLYESAEEVVDAGLTAELAEFKENKHVLSDKYYLYFTQLGRDVYTGDTISLDKLNDYDVDHILPQSFIKDDSLDNRVLTIRAVNNGKSDNVPAKMFGKKMGSFWRYLLDNGMISKRKYNNLITDPDNISKYAQKGFINRQLVETSQVIKLTANILNGIYDKDTEIIEVPAKMNSQMRKMFDLVKVREVNDYHHAFDAYLTIFIGKYLYKCYPKLRPYFVYGKFKKFGDNEDIEVGDGRFNFLNRIERLKNVTDPETGEILWSNVAPNETIKQIKKVYNYKFMLVSRETTTRRAELFNQTVYPKNYRGKLIPIKEDRPTDLYGGYSGNTDAYLAIVALEDKKKGKYFKVVGIPTRAAAKLEKLKQQDSQQYLQALHKVIAPQFTKSTKKGIKKTEFEIVLDKVHYRQLVQDGPVKMMLGSSTYKYNAKQLVLSEKALQVIADDRKFDETQKDDNLIAVYDEILSIVNQSFDLYDINGFRKKLNDNRDQFIDLPAETKYEGRKVVAHGKREMILEILKGLHANAAFGNLKPIGFSTAFGQLQVPNGIILSKNAILIHQSPSGLFERKIKLSDL

SEQ ID NO: 383 - protein, 1364 aa, Peptoniphilus duerdenii
  source 1..1364: note = Peptoniphilus duerdenii ATCC BAA-1640
MKNLKEYYIGLDIGTASVGWAVTDESYNIPKFNGKKMWGVRLFDDAKTAEERRTQRGSRRRLNRRKERINLLQDLFATEISKVDPNFFLRLDNSDLYREDKDEKLKSKYTLFNDKDFKDRDYHKKYPTIHHLIMDLIEDEGKKDIRLLYLACHYLLKNRGHFIFEGQKFDTKNSFDKSINDLKIHLRDEYNIDLEFNNEDLIEIITDTTLNKTNKKKELKNIVGDTKFLKAISAIMIGSSQKLVDLFEDGEFEETTVKSVDFSTTAFDDKYSEYEEALGDTISLLNILKSIYDSSILENLLKDADKSKDGNKYISKAFVKKFNKHGKDLKTLKRIIKKYLPSEYANIFRNKSINDNYVAYTKSNITSNKRTKASKFTKQEDFYKFIKKHLDTIKETKLNSSENEDLKLIDEMLTDIEFKTFIPKLKSSDNGVIPYQLKLMELKKILDNQSKYYDFLNESDEYGTVKDKVESIMEFRIPYYVGPLNPDSKYAWIKRENTKITPWNFKDIVDLDSSREEFIDRLIGRCTYLKEEKVLPKASLIYNEFMVLNELNNLKLNEFLITEEMKKAIFEELFKTKKKVTLKAVSNLLKKEFNLTGDILLSGTDGDFKQGLNSYIDFKNIIGDKVDRDDYRIKIEEIIKLIVLYEDDKTYLKKKIKSAYKNDFTDDEIKKIAALNYKDWGRLSKRFLTGIEGVDKTTGEKGSIIYFMREYNLNLMELMSGHYTFTEEVEKLNPVENRELCYEMVDELYLSPSVKRMLWQSLRVVDEIKRIIGKDPKKIFIEMARAKEAKNSRKESRKNKLLEFYKFGKKAFINEIGEERYNYLLNEINSEEESKFRWDNLYLYYTQLGRCMYSLEPIDLADLKSNNIYDQDHIYPKSKIYDDSLENRVLVKKNLNHEKGNQYPIPEKVLNKNAYGFWKILFDKGLIGQKKYTRLTRRTPFEERELAEFIERQIVETRQATKETANLLKNICQDSEIVYSKAENASRFRQEFDIIKCRTVNDLHHMHDAYLNIVVGNVYNTKFTKNPLNFIKDKDNVRSYNLENMFKYDVVRGSYTAWIADDSEGNVKAATIKKVKRELEGKNYRFTRMSYIGTGGLYDQNLMRKGKGQIPQKENTNKSNIEKYGGYNKASSAYFALIESDGKAGRERTLETIPIMVYNQEKYGNTEAVDKYLKDNLELQDPKILKDKIKINSLIKLDGFLYNIKGKTGDSLSIAGSVQLIVNKEEQKLIKKMDKFLVKKKDNKDIKVTSFDNIKEEELIKLYKTLSDKLNNGIYSNKRNNQAKNISEALDKFKEISIEEKIDVLNQIILLFQSYNNGCNLKSIGLSAKTGVVFIPKKLNYKECKLINQSITGLFENEVDLLNL

SEQ ID NO: 384 - protein, 1087 aa, Phascolarctobacterium succinatutens
  source 1..1087: note = Phascolarctobacterium succinatutens YIT 12067
MLRMKYAIGLDIGIASVGYAVLALDHEENPWGIIRLGSRIFDVAENPKDGASLALPRREARSVRRRLRRHHHRLERIKNLLINTEFITKDELLHLYDGNLSDVYELRVKALDYSVTNAELTRILLHLAQRRGFKSNRKSDANDKEAGQLLEAVSANAKRMQENHYRTVGEMFYKDDLFSKYKRNKGGTYLTTVHRDMIAAEARTILEKQFALGNNICTQDFIDKYLSILLSQRQFDEGPGEPSPYAGNQIANMIGKCTFEPNEYRAAKASYSFERFNLLQKVNHLRLLLEGKSIALDNEQRKKIIALAHDKADLRYSHIRKALGLDEKVLFNTITYNDDVSVIEKKTKFNFLQAYHQIKKVLAEDMQKLTTEQLDNIGQILSTYKSDNKRTEELSALGLEKKIIDALLGINGLSKFAHLSLKALRKINPYLEEGKIYNEACTAAGYDFKAHANTQKTELLPAYKEEMDDITSPVARRAIAQSIKVINAIIREQKGSPLYINIELAREMAKGFDERTQIDKANKENQAKNERIMERIRTEFHKANPTGMDLIKLKLWEEQDGRSPYSQKAISINRLFEPGYVDIDHIVPYSISFDDSFKNKVLVFSDENRDKGNRLPIAYLQSKFGAKAAENFMIWVQSNIKDYKKRQKLLKREITEEDINKFKERNLQDTKTISRFLYNYINDYLLFAPSDTGKKKRVTAVNGTITAYLRKRWGINKIRANGDKHHAVDAVVIACTTDKMIKDLSSFSRYHELEYTHTDTESFLVNSLTGEILKRFPYPWEDFRPELMARLSDNPADALRKLNLIFYHGIDLSTIKPIFVSRMPRHKVTGAAHKATIKSARCLDNGIVICKTSLQNLKLDKEGEIANYYAPESDTILYNALKERLRSYDNKPAKAFAEPFYKPKADGTPGPLVKKVKVYEKSTLNVAVQQNTAVADNDSMVRVDVFHVKGNGYYLVPIYIADTLKKELPNKAIVAYKPYADWPVMDDSNFIFSLYPNDLIKFEHKNSVKFAKVNKESTLNDFYSTKSEIVYFKGCNINTGAITIINHENTYVVSSLGVKTLPSLEKYQADVLGNYTKVKKEVRKPFR

SEQ ID NO: 385 - protein, 1333 aa, Planococcus antarcticus
  source 1..1333: note = Planococcus antarcticus DSM 14505
MKNYTIGLDIGVASVGWVCIDENYKILNYNNRHAFGVHEFESAESAAGRRLKRGMRRRYNRRKKRLQLLQSLFDSYITDSGFFSKTDSQHFWKNNNEFENRSLTEVLSSLRISSRKYPTIYHLRSDLIESNKKMDLRLVYLALHNLVKYRGHFLQEGNWSEAASAEGMDDQLLELVTRYAELENLSPLDLSESQWKAAETLLLNRNLTKTDQSKELTAMFGKEYEPFCKLVAGLGVSLHQLFPSSEQALAYKETKTKVQLSNENVEEVMELLLEEESALLEAVQPFYQQVVLYELLKGETYVAKAKVSAFKQYQKDMASLKNLLDKTFGEKVYRSYFISDKNSQREYQKSHKVEVLCKLDQFNKEAKFAETFYKDLKKLLEDKSKTSIGTTEKDEMLRIIKAIDSNQFLQKQKGIQNAAIPHQNSLYEAEKILRNQQAHYPFITTEWIEKVKQILAFRIPYYIGPLVKDTTQSPFSWVERKGDAPITPWNFDEQIDKAASAEAFISRMRKTCTYLKGQEVLPKSSLTYERFEVLNELNGIQLRTTGAESDFRHRLSYEMKCWIIDNVFKQYKTVSTKRLLQELKKSPYADELYDEHTGEIKEVFGTQKENAFATSLSGYISMKSILGAVVDDNPAMTEELIYWIAVFEDREILHLKIQEKYPSITDVQRQKLALVKLPGWGRFSRLLIDGLPLDEQGQSVLDHMEQYSSVFMEVLKNKGFGLEKKIQKMNQHQVDGTKKIRYEDIEELAGSPALKRGIWRSVKIVEELVSIFGEPANIVLEVAREDGEKKRTKSRKDQWEELTKTTLKNDPDLKSFIGEIKSQGDQRFNEQRFWLYVTQQGKCLYTGKALDIQNLSMYEVDHILPQNFVKDDSLDNLALVMPEANQRKNQVGQNKMPLEIIEANQQYAMRTLWERLHELKLISSGKLGRLKKPSFDEVDKDKFIARQLVETRQIIKHVRDLLDERFSKSDIHLVKAGIVSKFRRFSEIPKIRDYNNKHHAMDALFAAALIQSILGKYGKNFLAFDLSKKDRQKQWRSVKGSNKEFFLFKNFGNLRLQSPVTGEEVSGVEYMKHVYFELPWQTTKMTQTGDGMFYKESIFSPKVKQAKYVSPKTEKFVHDEVKNHSICLVEFTFMKKEKEVQETKFIDLKVIEHHQFLKEPESQLAKFLAEKETNSPIIHARIIRTIPKYQKIWIEHFPYYFISTRELHNARQFEISYELMEKVKQLSERSSVEELKIVFGLLIDQMNDNYPIYTKSSIQDRVQKFVDTQLYDFKSFEIGFEELKKAVAANAQRSDTFGSRISKKPKPEEVAIGYESITGLKYRKPRSVVGTKR

SEQ ID NO: 386 - protein, 1197 aa, Porphyromonas sp.
  source 1..1197: note = Porphyromonas sp. oral taxon 279 str. F0450
MLMSKHVLGLDLGVGSIGWCLIALDAQGDPAEILGMGSRVVPLNNATKAIEAFNAGAAFTASQERTARRTMRRGFARYQLRRYRLRRELEKVGMLPDAALIQLPLLELWELRERAATAGRRLTLPELGRVLCHINQKRGYRHVKSDAAAIVGDEGEKKKDSNSAYLAGIRANDEKLQAEHKTVGQYFAEQLRQNQSESPTGGISYRIKDQIFSRQCYIDEYDQIMAVQRVHYPDILTDEFIRMLRDEVIFMQRPLKSCKHLVSLCEFEKQERVMRVQQDDGKGGWQLVERRVKFGPKVAPKSSPLFQLCCIYEAVNNIRLTRPNGSPCDITPEERAKIVAHLQSSASLSFAALKKLLKEKALIADQLTSKSGLKGNSTRVALASALQPYPQYHHLLDMELETRMMTVQLTDEETGEVTEREVAVVTDSYVRKPLYRLWHILYSIEEREAMRRALITQLGMKEEDLDGGLLDQLYRLDFVKPGYGNKSAKFICKLLPQLQQGLGYSEACAAVGYRHSNSPTSEEITERTLLEKIPLLQRNELRQPLVEKILNQMINLVNALKAEYGIDEVRVELARELKMSREERERMARNNKDREERNKGVAAKIRECGLYPTKPRIQKYMLWKEAGRQCLYCGRSIEEEQCLREGGMEVEHIIPKSVLYDDSYGNKTCACRRCNKEKGNRTALEYIRAKGREAEYMKRINDLLKEKKISYSKHQRLRWLKEDIPSDFLERQLRLTQYISRQAMAILQQGIRRVSASEGGVTARLRSLWGYGKILHTLNLDRYDSMGETERVSREGEATEELHITNWSKRMDHRHHAIDALVVACTRQSYIQRLNRLSSEFGREDKKKEDQEAQEQQATETGRLSNLERWLTQRPHFSVRTVSDKVAEILISYRPGQRVVTRGRNIYRKKMADGREVSCVQRGVLVPRGELMEASFYGKILSQGRVRIVKRYPLHDLKGEVVDPHLRELITTYNQELKSREKGAPIPPLCLDKDKKQEVRSVRCYAKTLSLDKAIPMCFDEKGEPTAFVKSASNHHLALYRTPKGKLVESIVTFWDAVDRARYGIPLVITHPREVMEQVLQRGDIPEQVLSLLPPSDWVFVDSLQQDEMVVIGLSDEELQRALEAQNYRKISEHLYRVQKMSSSYYVFRYHLETSVADDKNTSGRIPKFHRVQSLKAYEERNIRKVRVDLLGRISLL

SEQ ID NO: 387 - protein, 1485 aa, Prevotella bivia
  source 1..1485: note = Prevotella bivia JCVIHMP010
MKNILGLDLGTNSIGWAKISIDDNGKYIKDSIKLGSRIIPMSQDVLSNFSKGVTLSQTSERTSFRGARRLRERTLLRRERLHRILHLLGFLPKHYEKAIGWDRNDNKTYGKFINHAEPKLAWCKDNNGKMRFLFMDSFHDMLSEFSEKHPELLANGKKIPLDWTIYYLRKKALYKAITKEELAWILLNFNQKRGYYQLRGEEDRDSEANKKEYLELKVIGVEATGEKKGNDIWYNIHLENGWIYRRSSKNPLNDWLGKVKSFIVTTDLDADGNPKKDKDGNIKRSFRAPSEGDWTLIKKRTESLLENSGQTVGQFIYNHILEEPSAKIRGNFIRTIERKYYKDELKAILEKQKEFHHELSSESLLTECAKELYKRNIAHQEVLLKKGIIHLLLNDILFYQRPLKIKKSLIDNCPYENYKYVDKKSGDIKVKSIKCIAKSNPFFQEFRLWQFVSNLRLYRKSDDKDVTSEHLVTTDDYANLFTYLNNRKDIKQSVLLKEYFKIKKVKTINGAEYPVRWNYIDDDNKTYPCNETRYDILHALSKTELKSEWLTPERTYRLWHLLYSIESKEETKKALNKLNLSDDFTEAFLTIKPFKKEYGSYSEKAIKKLLSLMRMGYLWSEDEAIKQVGAEIEKTIEGELPDYVLQRLEKSQHNYNKISDFSGLPLWLASYIIYGRHSEAKEIIHWDNPESMMAYIKDFRQHSMRNPIVEQCVLETLRTVHDIWKEIGHIDEIHIELGREMKSTSEQRKAITQNVLHNQNTNIRIKLLLQELKNDNNITGVRPYSPMQQEILRIYEEGALQGLTKEDKDYNDILKISQTAQPTSNELTRYKLWLEQKYRSPYTGKAISLSKLFTSAYQIEHVIPQSRYFDDSLSNKVICESEVNTLKKAMLGMEFIKTCGGQKVHCTLLGDVEIYNEEDYKAFVNEHYSNNRTKRNKLLMEDIPQEFINRQLNDSRYISKMVKQLLSAIVRGQEEVEATSKFVIPCTGGITDRLKKDWGLNDIWNNLVSPRFQRMNALTGSEYFGHWENKEGKRVFQTTMPIQLQQGFSKKRIDHRHHAMDALVIACASRNIISYLNNETAQDTERRRDLRQKLCDKGGSVRKPWDSFTQDTQYALKDIIVTFKNYVRIINKATNYYEHYKTDGKKGMISQKGDELWAIRKPMHKETVFGKVNLRRPKRVSLSKAIDSVDIICNRKLKKYIKARLNEGLQKKQILNIFKELNNVWEGIDVNKIDIWEMSNDKEPMVATRKQLDTSFDEKKIRSISDTGIQKILLNYLITKNNNPELAFTPEGIQEMNSNISEYNDHKKHQPIYKVRVTEPLGAKYPIGTMGNNPKKFVEAQAGTNLYFAIYEDKEGKRNYDTIPLNIAAERLNQQLSPVPETNENNTPLKFYLSPNDLVYVPSEEERHSGNNIQLDKNRIYKMVSSTSKRCFFIHHRVAISLVDKKEFSAQNKMERSIDNEQVMIKSVCWKLITDRLGNIIKVIK

SEQ ID NO: 388 - protein, 1457 aa, Prevotella buccae
  source 1..1457: note = Prevotella buccae ATCC 33574
MKTILGLDLGTNSIGWAKVSVDDYGNYLHDIKLGSRIIPMSQDVLGNFDSGVTVSQTAQRTEFRSKRRLVQRNLQRRERLHRVLHVLDFLPAHYDAAIGWDRTEAVTYGKFLNHAEPKLAWEELGNGKRRFLFMDSFHEMVADFARCQPALVADGKKIPLDWTIYYLRKKALTQAITKEELAWILLNFNQKRGYYQLRGEEEEENPTKQEEYYELKVVSVEATDSRKGNDTWYNVHLENGWIYRRSSKISLDDWVGKVKQFIVTTEYEKDGATLKTDKEGYVKRSFRAPNENDWGLRKKRTETLLEMSGKTVGAFIYDHLLQEPADKIRGNFIRTIERHYYKAELEAILAEQCKYHIELRDKEMLEACARELYLNNLPHQRSLMKKDMTYLLLYDLIFYQRPLKSKKALIANCPYEYYEYVDKETGEIKRQNIKCIAKSNPYFQEFRLWQFVLNLRLFDRVEDKEVTANYLPTADDHARLFTYLNDRKEINQETLLKDYFKLKKVKIGNEKEYPIRWNYIEDKEKKYPCNETRYELLMALDRAGIEHKWLDDNNLEYRLWHLLYSVEVKSESETALRKLKNDDAFVNSFLKVKPFKKEYGAYSEKAIKRLLAVMRKGFLWNEQDICDETRKRIEIIIKGDVDEKVKERMGHAAYSFDRVSDFQGLPEWLACYVVYGRHSEAMDIQHWDSPERLMAYINNFKQYSLRNPIVEQCILETLRTVHDIWKETGQIDEIHVELGREMKSTSEERARRTQNVLRNENTNLRIKSLLIELKNDTDICNVHPYSPMQQEILRIYEEGALQELNREDEDFEEISKISQMSQPSGKELNRYKLWLEQKYRSPYTGKAISLAKLFTPAYQIEHVIPQSRYFDDSFTNKVICEAEVNTLKSNLLGYEFIKKHGGEIIHCTTLGDVRIFSESEYKAFVMDHYANNKSKKDKLLMEDIPQEFLSRQMNDSRYISKVVKTLLSNIVRMADESEATSKSVIVCTGGVTDRLKKDWGLNDVWNSIVYSRFERLNRLTGTEAFGHWENKDGKRVFQTSMPLELQRGFRKKRIDHRHHAMDALVIACASRNIVNYLNNESANNPKKREDLRRQLCDKNRVIRKPWETFTQDAYNALENVVVSFKNYVRVINKATNRYEHYDENGKKRFVQQKGSELWAIRKPMHKETYYGHVNLRRKELVTLQKALDDIPSICDKKLRDYISALVEKHFNKRQLLAHFKSTDYYWQKQYVNKVYVWTFSDDIKPLVATRKLLDTSFDAKRIGTITDTGIQKILRNYLEAKGGNATLAFTPEGIAEMNQNISKYNDGKPHQPILKVRITEPMGAKYRVGQTGNKMAKYVEAQSGTNLYFAIYEDSEGKRSYTTVPLDEVAERLKQRLSPVPEKDENDVPLKFYLSPNDLVYVPTEEELQLRECKLNKDRIYKMVSSTGNECHFIPYYVANVIYNKGGFNMQMHRPQS

SEQ ID NO: 389 - protein, 1218 aa, Prevotella buccalis
  source 1..1218: note = Prevotella buccalis ATCC 35310
MNKRILGLDTGTNSLGWAVVDWDEHAQSYELIKYGDVIFQEGVKIEKGIESSKAAERSGYKAIRKQYFRRRLRKIQVLKVLVKYHLCPYLSDDDLRQWHLQKQYPKSDELMLWQRTSDEEGKNPYYDRHRCLHEKLDLTVEADRYTLGRALYHLTQRRGFLSNRLDTSADNKEDGVVKSGISQLSTEMEEAGCEYLGDYFYKLYHEQGNKVRIRQRYTDRKKHYQHEFDAICEKQELSSELIEDLQRAIFFQLPLKSQRHGVGRCTFERGKPRCADSHPDYEEFRMLCFVNNIQVKGPHDLELRPLTYEEREKIEHLFFRKSKPNFDFEDIAKELAGKKNYAWIHDKEERAYKFNYRMTQGVPGCPTTAQLKSIFGDDWKTGIAETYTLIQKKNGSKSLQEMVDDVWNVLYSFSSVEKLKEFAHHKLQLDEENAEKFAKIKLSHSFAALSLKAIRKFLPFLRKGMYYTHASFFANIPTIVGKEIWNNEQSRKYIMENVGELVFNYQPKHRDVQGTIEMLIKDFLANNFELPAGATDKLYHPSMIETYPHALRNEFGILQLGSPRTNAIRNPMAMRSLHVLRRVVNQLLKESIIDENTEVHVEYARELNDANKRRAIADRQKEQDKQHKKYGDEIRKLYKEETGKDIEPTQTDVLKFQLWEEQNHYCLYTGEQIGITDFIGSNPKFDIEHTIPQSVGGDSTQMNLTLCDNRFNREVKKAKLPTELANHEEILTRIEPWKNKYEQLVKERDKQRTFAGMDKAVKDIRIQKRHKLQMEIDYWRGKYERFTMTEVPEGFSRRQGTGIGLISRYAGLYLKSLFHQADSRNKSNVYVVKGVATAEFRKMWGLQSEYEKKCRDNHSHHCMDAITIACIGKREYDLMAEYYHMEETFRQGRGSKPKFSKPWATFTEDVLNIYKNLLVVHDTPNNMPKHTKKYVQTSKGKVLAQGDTARGSLHLDTYYGAIERDGEIRYVVRRPLSSFTNPKELENIVDETVKRTIKEAIADKNFKQAIAEPIYMNEDKGILIKKVRCFANSVKQPINIRQHRDLSKKEYKQQYHVMNENNYLLAIYEGLVKNKVVREFEIVSYIEAAKYYKRSQDRNIFSSIVPTHSTKYGLPLKTKLLMGQQVLMFEENPDEIQVDNTKDLVKRLYKVVGIEKDGRIKFKHHQEARKEGLTIYSTPYKNNDDYVPIFRQSIKNINILVDGIDFNIDILGKVTLKE

SEQ ID NO: 390 - protein, 1422 aa, Prevotella denticola
  source 1..1422: note = Prevotella denticola CRIS 18C-A
MTQKVLGLDLGTNSIGSSVRNLDLSDDLKGQLEFFSSDIFRSSVNKESNGREYSLAAQRSAHSRSRGLNEARRRKLWATLDLLIKYGFCPMSPESLMRWRTYDKQRGLFREYPIDDKNFNAWILLDFDGDGKPDYSSPYQLRRELVIRQFDFDQPIERYKLGRALYHIAQHRGFKSSKGETLSQQETNSKQSLTDDTADVAGEMKASEEKLSKGLSTYMKENNLLTVGAAFAQLEDEGVRVRNNNDYRAIRSQFQREIETIFKFQQGLSVENELYERLVSEKKNIGTIFYKRPLRSQRGNVGKCTLERTKPRCAIGHPLFEKFRAWTLINNIKVRMSEEEQAEQLPMKLRFELYNDCFLAFVRAEFKFEDIRKYLEKRLGVHFSYNDKTINYKDSTSVAGCPITARFRKLLGEDWESFHVDGQKQRQAHGKNNASFHTVSYSTNDIWHFCYDAEEPEAVLSFAQDNLKWEKKKAEELVRIWSAIPQGYAMLSQKAIRNINKMLILGLKYSDAVLLAKVPEIVEITDGEILSVTEDYHRVEAQVGYEKQINNIVNALIAKYKSASEEYRFADHNYEYQLDKSDEKDIIKQIESNIGTRKWSLLDADEQTDILQKVRDKYQNFFRSHERKFVESPKLGECFEEYLMKKFPMVEGERWKKLYHPSQIAIYRPVPANKDRSALRLGNPDIGAIKNPTVLRVLNTLRKRVNQLLDDGIISPDETRVVVETARELNDANRKWALDTYNRIRHDENEKIKKILAEFYPKRDNISTVDIDKARYVIDQREMDYFTEAKTYHKDIKKYKLWLEQGGQCMYTGRTINLSNLFDPNSFDVEHTIPESISFDSSDMNLTLCDAHYNRFIKKNHIPADLPNYDKSVVIDGKEYSPIKPRLQRWADRVERLNRNVEYWRGQARRAQNKDRKDQCMREMHLWKMELEYWTKKLERFTITEVTDEFKNSQLVDTRVITRHAVLYLKSIFPHVDVQRGDVTAKFRKILGIQSVDEKKDRSLHSHHAIDATTLTIIPGAAKRERMLELFAKIEEVNKMLSFSGNEDRTGLKQELDGLKNQLNKEVKACRIGHNVSEIGTFINDNIIINHHVKNQALTPVRRRLRKRGHIVGGMDNPRWQTGDALRGEIHKASYYGAITQYAKDKEGKVLMKEGRPQINPTIKFVIRRELKYKKSSTDSGFASWDDLGKAIVDKELFALMKGQFPEGTSFKDACEQGIYMIKKGKNGEVDTKLYRIRHIRCKTKQKNALKIKEQAYKSEKEYKRYFYAAVGDLYAMCCYTNGKTREFKIYSLYDISCHRKVGVEDIPEFITDKKGNRLMLDYKLHTGDMILLYKENPEELYDLDNVSLSKLLYKINGFENDGLRIRMVNHLVAKEAMGESVKDYAKLPDIIRCGVKTIKFLVMGENRDFVIKNGKISFNHR

SEQ ID NO: 391 - protein, 1375 aa, Prevotella histicola
  source 1..1375: note = Prevotella histicola F0411
MKKILGLDLGTTSIGWALVYESENTDEKSSIVRLGVRVNPLSVDEKGNFEKGKAITTNADRQQTHGARINLQRYKLRRENLKDCLQKQGWIGTEALCEEGKTSTFETYMLRAKAAEEEISLHELCRVLFMMNKKRGYKSNRKANNKEDGKLFDGMTVAKKLYEEHLTPAEYSFQLLSSGKKFKQEYYRSDLKEEFDRIWNEQQKYYPEILTDDFKQQLQGKSKGNTSKIFLGKYGIYSADLKGLDRKLQPLKWRVEALKQQVDKEVLAFVISDLNGQIASTSGLLGAISDRSKELYFNKQTVGQYLWTSLKETPHVSIKNKPFYRQDYLDEFEKIWETQATYHKELTPELKQEIRDIIIFYQRPLKSKKGLISVCELEQRKVKVTIDGKEKEISIGPKVAPKSSPMFQEFRIWQNLNNILLIDKGNNSIHPLYEEEKNLLYEELSVKEKLSKAEALKVLNKNSKQWDLNYKEIEGNRTQAVLYDCYNRIIVMTGHEEYNFKKLKASEIRSYVKTTFTGLGFNTDILEFDSSLTGHELEKQPMYQLWHLLYSYESDNSRTGNDALLRKLETAFGFPKEYAAVLSDVVFEDSYGNLSVKAMRKILPHLQAGLNYSQACEEAGYKHSRRSLTKNELDQKEYKEKLELLPKNSLHNPVVEKILNQMINVINAVIDEYGKPDEIRIELARELKIGAAERENMTRSINQGNAENKRIREILEKEFALSYISRNDIIKYKLYEELKSNGFKTLYSDTYISKDKLFSKDFDIEHIIPKARLFDDSLSNKTIEARDVNIAKSNKTAFDFISEKYDQQGIEAYKKKLDILLQDGSISKAKYNRLLMKEADIPSGFIDRDLRDTQYIAKKAYEILSDLVRNVTPTTGAVTSRLREDWQLVDVMKELNFEKYQKLGLVEVIEDRDGRKIKRIKDWTKRNDHRHHAMDALTIAFTKPSYIQYLNNLNARSDKNSSIYGIENKELHREDNKLRFNAPLPINEFRAEARRHLKSILVSVKAKNKVMTQNVNVIKTKHGVIKKVQLTPRGELHNATFYGTKKRPIIKMVKVGAALDEVTIKKVSSSFIREALLDRLHEYNGDAKKAFTGRNSIDKNPIYIDEEHKKTVPALVKTIEWEMYHPTRKLISPDLKIDKVIDKGIREILKTRLAKFNGDAQKAFSNLDENPIYKDEAKKITLKRVSLEGVSSVIPLHTLKDREGKLVVGKDGKPVLGDYVQTSNNHHIAFYMDENGNLQDNVVSFFEAAERKSQGVPVIDKNYNHDKGWNFLFTMKQNEYFVFPNEVTGFNPSEVDLMDEANYSIISPNLYRVQKMSKASGRDYWFRHHLEAMLNDDPKLRNSMFKRITSLKALEGIVKVRINCIGKIVAVGEYD

SEQ ID NO: 392 - protein, 1380 aa, Prevotella intermedia
MKRILGLDLGTTSIGWALVNEAENNNEASSIVRLGVRVNPLTVDEKSNFEKGKAITTNADRQLRHGARINLQRYKLRRQNLHDCLQKQGWLGTEAMYEEGKASTFETYKLRAKAAEEEISLHEFARVLFMLNKKRGYKSNRKANNKEDGQLFDGMTIAKKLYEEHLTPAEYSLQLLNKGKKFTQGYYRSDLNAELERIWDEQKKYYPEILTDEFKQQLEGKTKTNTSKIFLAKYGIYSADLKGLDRKFQPLKWRVEALQQQVDKEVLAFVISDLKGQIANTSGLLGAISDRSKELYFNKQTVGQYLWASLEENPHISIKNKPFYRQDYLDEFEKIWETQAAFHKQLTPELKQEIRDIIIFYQRPLKSKKSLISVCELEQRKVKATIDGKEKEITIGPKVAPKSSPVFQEFRIWQNLNNVLLIDNDTNEKRPLDEVERNLLYKELSIKAKLSKTEALKILNKKGKQWDLNYRELEGNRTQAILFDCYNRIITLTGHEECDFKKIKASEIRHYVSTIFKNLGFSTEILDFDPSLKKHELEKQPMYQLWHLLYSYESDNSRTGNESLLRKLETTFGFPEEYATVLCDVVFEEDYGNLSVKAMREILPYLQAGNDYSQACAYAGYNHSRHSLTKEELDQKVYKERLELLPKNSLRNPVVEKILNQMINVINAIIDEYGKPDEIRIEMARELKSSAADRKKTTHAISQGNAENQRIREILEKEFSLSYISRNDIIKYKLYEELEPNYYKTLYSDTYITKDKLFSKDFDIEHIIPKARLFDDSFSNKTLEARNINLEKSNKTAFDFIKEKYGEDGAEAYKKKLDMLLENDAISRPKYNNLLRAEADIPSDFINRDLRNTQYIAKKACEILGELVKTVTPTTGKITNRLREDWQLVDVMKELNFEKYEKLGLTEIVEDRDGRKIKRIKDWTKRNDHRHHAMDALAIAFTKPSFIQYLNNLNARSNKGDSIYAIENKELHYEEGKLRFNAPIPVNEFRAEAKRHLSAILVSIKAKNKVMTQNVNKIKTKHGIIKKIQLTPRGPLHNETIYGTKMRPIIKMVKVGAALDEATINKVSSPAIREALLKRLNEYSGNAKKAFTGKNTLEKNPIYLNAGRTKTVPSLVKTVEWESFHPTRKLIDKDLNVDKVVDKGIREILKARLEEFNGDAKKAFSNLEENPIYLDEAKKIALKRVSIEGVLSAIPLHTLKNQAGKPITGKDGKPVLGNYVQTSNNHHIAFYYDEDGNLQDNAVSFFEAAERKSQGIPVIDKDYNRDKGWRFLFTMKQNEYFVFPNEATGFIPSEVDLTDEANYGIISPNLYRVQKVSRIDKGTSASRDYWFRHHLETILNDDAKLKNLAFKRIRGLLELKDIIKVRINSTGKIVAVGEYD

SEQ ID NO: 393 - protein, 1425 aa, Prevotella micans
  source 1..1425: note = Prevotella micans F0438
MIQKIFGLDLGTNSIGSSVRNLELGENLTEQLEFFSSDIFGSSVSKNSNGREYSLAGNRSAHRRSRGLNEARRRKLWATLDLLIEHGLCPMSPDSLMQWRTYDKQKGLYRQYPIEDKDFNAWIMLDFNGDGKPDYSSPYQLRRELVVRQFDFDQPIERYKLGRALYHIAQHRGFKSSKGETIADQEKNEKKPIAEEGADIANEMKASETKLSKGLVAYMQENHLKTVGEAFAKLEDERVRIRNNESYRAIRSQYQDEIKEIFTYQKKLSVESELYERLTSEKKGVGTIFYKRPLRSQRGNVGKCTLERNKPRCPIGRPEFEEFRAWTLINNIKIRETAGEPYKQLPIKLRQELLKDCFLSKVKADFKFEDIRKYIEKRLGLSFSNDDKTINYKDSVSIAACPVTVRMKKLLGENWANCRIDGEKRRQAHGKNNNNEHIVSYTEEDIWHVCYNAEDPEEVSNFARKALHWDENKIKELVRLWTSIPQGYAMLSLKAIRNINRMLLLGLKYSDAVLLAKLPDIVPVSDEDILAITKEFLQLEDKLNQEKQINNIVNSLIANYKSKLEENRFADHNYQYQLGEGDDEDINTQIKSHIGAKLWVQIGADEQTKIFQAVRSKYQDFFKSYKRKFVESPKLGELLVAFLTEKFPNVKSKQWERLYHPSQIAIYRPIPVDNDRSKLRLGNPNIGAIKNPTVMRVLNTLRRRVNQLLDDGVISPDETRVVVETARELNDANTKWALDRYNRIRRDENEKIRKILKELNPTTNSISEQDIDKARYIFEQCETDFYTDGKVPYYNKDIKKYKLWLEQGGQCLYTGQTINLTNLFNPNAFDMEHTIPKSISFDNSDQNLTLCESYYNRFIKKNNIPTDMPNYDKDVTINGKEYTAIKPRLQRWKERVDRLSRNVDFWKGQARRAQDKDRKDECIREKHLWDMELAYWKGKLERFTMTDVTDGFKNSQLVDTRVITRHAVLYLKSIFNHVEVQRGETTAEFRKILGLQSIDEKKDRSLHSHHAIDATMLTVIPSAAKRDRMLELFYKIEETKKALKNYNDNNKTGLNLELKGLEEKLDKEKKDCRVGRRVNDLDRFINENIIVSHHTKDQALTPAHRRLRKRGKIVGGKEHPRWQTGDSLRGEIHKASYYGAITQFAKDANGKVLMKDGQAQIDPTIYYVIRRELKYKRSTQDSGFTNWEDLEKVIVDTDLFGLMKGQFPEGTSFKDACEQGFYMIKKGKNGEGDVKTHRIRHVRCKAVKTALRIKEQTYKSSKDYKQFFYAAVGDLYVMCYYTDGKKRDFKIYSLYDISNHRKSGTEDIPKFITDKKGNHLPLDYKLRTGDMVLLYKDNPEELKDLDQVNLKRRLYKVNRFESEGLIILLTHHLSTTTERGCSIGKIENYQNLPTAIRCGIKTIKFLIMGKHRDFVIRNGNIEFKH

SEQ ID NO: 394 - protein, 1506 aa, Prevotella nigrescens
  source 1..1506: note = Prevotella nigrescens ATCC 33563
MKTILGLDLGPNSIGWAKVEVDDEGNYLRNIKLGSRIIPMTQDMLGDFDKGVKVSQTAIRTDFRGNRRLIERHLLRRERLHRVLHALKFLPKHYEDAIGWDRNEPATYGKFVNNSEPKLAWERQEDGSMRFLFMESFNEMVADFAQNQPSLVSDGKKIPLDWTIYYLRKKALTRPIKKEELAWILLNFNQKRGYYQLRGEEEEDNLTKRKEYYKLKVVGVEADGAPKGGKTWYNIHLENGWTARCQSKIPLDDWVGKVKEYIVTTEYEDDGKTPKCDKEGKVKRSFKSPEKDDWQLIKTRTEKFIDDSNKTVGAFIYDYLLEKPFDKIRGKYIRTIERKYYKNELREILREQTKYHEGLHSLEALKICAEELYKNNQQHQEYLLKKDMTFLLLNDLIFYQRPLKSKKSLIADCPYEVYKYDDKLTGKKGQKKIKCIAKSNPYYQEFRLWQFIANLRLFSVTDGKEVTAEYLKTEEDYVRLFSFLNDRKDIKQETFLRSFLKLKKESIGSEKIYPIRWNYIEDANKSYPCNATRHELLLAFDRADIPRELLDVEEREYRLWHLLYSIEAKEETESALRKLKANKAFGDLNIDDAFVNSFLKIKPFEKEYGAYSEKAIKKLLAVMRRGSLWKEADICEATKQNIAKILQNDIDEKLKKKIEAAVSSFNKLSDFQGLPTWLACYVVYGRHSEAAQIQCWQSPEDLKTYINKFKQHSLRNPIVEQCLLETLRTVYDIWKDAGQIDEIHIELGRNMKSTAEQRARKTKDILRNENTNLRIKNLLVELKNDDKIENVRPYSPSQQEILRIYEEGALQELSKEDEMFEDISKISKMAQPSPTELSRYKLWLEQKYRSPYTGRVIPLSKLFTTAYQIEHIIPQSRYFDDSFNNKVICESEVNSLKDNMLGYEFIKECGGRIVHCTLLGDVKIFTKEEYKDFVTKHYIDNTYKRDKLLLEDIPQEFSARQLNDSRYISKMVQTVLSNIVRAENEQEATSKFVVSCNGAITNRLKKDWGLNDVWSSIVCPRFKRLNEITKTNAFGHWEDKAGKHVFQTTVPLELQRGFSKKRIDHRHHAMDALVIACASRNIVNYLNNESANSPEKREDLRKKLCDEKRKIRKPWKTFTQDAREALSDVVVSFKNYVRVINKATNYYEHYSSSGNKVMISQKGNDMWAIRKPLHKESVFGRVNLCRKVIVSLKKALENIPAICDKTLRDYINALVEKHFNTRQLLAHFKSINYRLNRQCVEKVEVWQFSDEKIEMVARRKSLDTSFDDKQISSITDTGIQKILLNYLQTKDGNAEIAFTPEGIEEMNKNISLYNDGKAHQPILKVRVATPKGMKYPVGQTGNKATKFVVAEKGTNLYFAIYENELGVRSYDTIPLNIVVERLKEGLSPVPQANEADIPLKFYLSPNDLVYVPTKENEDELCRDRIYKFVDSSGTTANFVPHTSANTIYNVDKEYAEKCCNGAVFLNEYGLGSPQSKNQRALTGEMIKEICWKLKVDRLGNIIKVIK

SEQ ID NO: 395 - protein, 1380 aa, Prevotella nigrescens
  source 1..1380: note = Prevotella nigrescens F0103
MKRILGLDLGTTSIGWALVNEAESNNEASSIVRLGVRVNPLTVDEKSNFEKGKAITTNADRQLRHGARINLQRYKLRRQNLHDCLQKQGWLGTEAMYEEGKASTFETYKLRAKAAEEEISLHEFARVLFMLNKKRGYKSNRKANNKEDGQLFDGMTIAKKLYEEHLTPAEYSLQLLNKGKKFTQGYYRSDLNAELERIWDEQKKYYPEILTDEFKQQLEGKTKTNTSKIFLAKYGIYSADLKGLDRKLQPLKWRVEALKQQVDKEVLAFVISDLKGQIANTSGLLGAISDRSKELYFNKQTVGQYLWASLEENPHISIKNKPFYRQDYLDEFEKIWETQATFHKQLTPELKQEIRDIIIFYQRPLKSKKSLISVCELEQRKVKATIDGKEKEITIGPKVAPKSSPVFQEFRIWQNLNNVLLIDNDTNEKRPLDEDERYLLYKELSIKAKLSKTEALKILNKKGKQWDLNYKELEGNRTQAILFDCYNRIITLTGHEECDFKKIKASEIRHYVSTIFKNLGFSTEILDFDPSLEKHELEKQPMYQLWHLLYSYESDNSRTGNESLLRKLETTFGFPEEYATVLCDVVFEEDYGNLSVKAMRKILPYLQAGNDYSQACAYAGYNHSRHSLTKEELDQKVYKERLELLPKNSLRNPVVEKILNQMINVINAIIDEYGKPDEIRIEMARELKSSAADRKKTTHAINQGNDENQCIREILEKEFALSYISRNDIIKYKLYEELKPNGFKTLYSDTYIPKDKLFSKDFDIEHIIPKARLFDDSYSNKTLEARDINLAKSNKTAFDFVKEKYGEQGAEAYKKKLDMLLGNNVISKPKYNKLLMTEADIPSDFINRDLRNTQYIARKACEILGELVRTVTPTTGKITNRLREDWQLVDVMKELNFEKYEKLGLTEIVEDRDGRKIKRIKDWTKRNDHRHHAMDALAIAFTKPSYIQYLNNLNARSNKGDSIYAIENKELHYEEGKLRFNAPIPVNVFRAEAKRHLSAILVSIKAKNKVMTQNVNKIKTKHGIIKKIQLTPRGPLHNETIYGTKMRPIIKKVKVGAALDEATINKVSSPAIREVLLKRLNEYSGNAKKAFTGKNTLDKNPIYLNAERTKTVPASVKTVEWENYHPIRKPITPDLKVDKVIDKGIGEILKARLEEFNGDAKKAFSNLEENPIYLDQTKKIALKRVSIEGVLSTIPLHTLKNQAGKPIMGKDGKPVLGNYVQTSNNHHIAFYYDEDGNLQDNAVSFFEAAERKSQGISVIDKDYNRDKGWRFLFTMKQNEYFVFPNEATGFIPSEVDLTDEANYGIISPNLYRVQKMSRIEKGTSVSRDYWFRHHLETILNDDSRLKNSAFKRINSLKPLEGIIKVRINSIGKIVAVGEYD

SEQ ID NO: 396 - protein, 1391 aa, Prevotella oralis
  source 1..1391: note = Prevotella oralis ATCC 33269
MKKILGLDLGTTSIGWALVNEKENNEELSSIIRLGVRVNPLTVDEKSNFEKGKDITTNADRTKCRSARRNLQRFKLRREALADCLKRHGLMTDETPLCETNNSIIFKTYSNRAKAVCEKIALDDFVRVLFMINKKRGYKSSRKLNTDDEGTLVDGMDVAKLLYNEQITPGEYLLRLFKKGKKTRPDFYLSDLKAELERIWDFQRTFYPEILCNALKEDLKGKSRTQSSAIFYAKYKVSTAKIAGKDKRLQELTWRTDALRKQLTIDEVAYVICSINGEVNGSSQRLSMISDRSKLLYFNHQTIGQYLMQRLEENPNAGLKNIIFYRQDYEDEFNDIWNSQATYHKELTPELKKEVKDIIFYQRGLKSCKWLINYCELEHEEIEVKTPEGKLRKITIGSKTCPKSSPLFQEFKIWQVLNNLQVSPLNSRRKAKRKKDEEPSLFSDEDMNTACRYLNEEEKLTLFKELSIKKELKKKDALKLLFENYKELDLNYKVISGNVTMANLYRAFQDIISLTGNGEFDFQAMPAEEAEKTVEEIFGGLGYKTAFLHFDASLHDKEFERQPAYRLWHLLYSYAGDQSKTGIEALVKRIQELCGFEPEYARILANISFIPDYGNLSSKAMRKILPYMQDGYEYSEACSKAGYRHSASSLTKEEINKKNYKTHLDEIKRNSLRNPIVEKILNQMVNVVNSVIDTYSNIDEIRIEMARELKKSKPEREDMSFAISKATKETERIKGILEQEFKIQHVTRNDIIRYRLYEELKPNGYKTLYSNTYIPREDLFSKKFDIEHIIPKARLFDDSYSNKTLELRDINIEKGNQTAYDFVLSKYGEEGLYKYEQRVEEFKKNNEQAGTKCRKLLMREADIPSDFLNRDLNDSQYIAKKAHELLREIVPTVTATTGSITNRLREDWKLVNVMKELNWEKYDKLGLTEEYKDKDGNTVRHIKDWTKRNDHRHHAMDALTIAFTKPSFIQYLNNLNARSNRGGSIYGIEQKELERENNKLVFIPPIDPKIFRKQAKEHLSNILISIKAKNKVVTKNVNKTKSKSGTNRKVQLTPRGQLHLETVYGKIRTYKTEEIKVGTKLTEELIAKVADKKIREALMQRLSEYGGNIKKAFQNISKHPIWLNGSHTKHVPEKVKIVFFEDVFTIRKAITPDIKIDKVIDSKIRRILQERLNEFGGEASKAFSNLDENPIWFNRDKGIAIKSVKIRGIAKGTAIRVKKDIHGKTIIGNNGYPVANDYVNTGNNHHVAIFRDKDGNLQEHIVSFYEATARAIQNLPIVDRNYNSEKDWKFLFSMKQNEYFVFPNPNTGFNPSEISLKDEKNYALISPNLFRVQKLSHYYYVFRHHLETNVDTNLQLKDITWKRITAVNNLTGAVKVRIDHLGRIVDVGEYK

SEQ ID NO: 397 - protein, 1204 aa, Prevotella ruminicola
MERILGIDTGTNSLGWAIVDKDENQYHLVAKGTNIFSEGVKIEKGIESSKAAERTEHRSVRKHYWRRKIRKIRLLTILSDNDLCPRLKHEQLRQWRLKKVYPTDDTFMEWQRTEDKAQVNPYKFRYICLTQKLDLSDITQRFILGRALYHLNQRRGFLSNRKEATKESEGTVKEGISSLSKDMKDSGCEYLGEYFYQLYQQGKKIRNHYTARKEHYLKEFKAICSKQELDDALIEKLEKAIFDQRPLKSQKGQVGTCTFEKGKSRCPSSHPLYEDFRMYSFINNIKVQVDTLYDKGERSLTDEEKQLIIPLFKRKSKRTFPFEDIAKKIAGKNNYCYIKSNEEKAYKFNYQMDTQVSGSPVNAQLEEIFGEDWLSSVCEVYTLANNKSRFQIMNDVWHVLFFYDDEDKLKEFAKDRLQLDDELAEKFSKISIPNDYAALSLKAIRKIMPYLRDYGLIYSEAVFLANLVDVLPQHVWGIKEMREAAIENVIDVMHSYDKNNIDGITLEGCVKTFLKERYQVSDDNLKKLYHPSMLDPYPRQRPNDEGVFQLGSPRISSVKNPMAMHSLFRLRKVVNLMLKKGYITPDTKVHIEFSRDLNDANKRWAIQTWQRENEKERERCRKEIEKYIASPSDTDILKYQLWEEQNHKCLYTGDEIRITDFLGDNPKYDIEHTIPRSAGGDSTKMNLTLCSSRFNRDEKKTKLPAELVNHDEILERISNWKEKYEDIDKQIRKISTKGATSKEDKDSKIRRRHYLILQRDYWRGKYQRFTMTEVPEGFSRRQGTDISVISRYARMYLKSVFKQVYIVKGIATSDFRKMWGIQDEYAKKERVNHVHHCIDAITIACIGKAEYDKLADYRHQYDDYLFQGKTKPTFDKPWPSFVIDIKHIQDELLIAHYAKDNLEKFTKKNLRGKDGRIIRDKFGNKLQMKGDTSRNSLHNDKFYGAINHEGEIKYVYRTNIEALDAKSIGNIVDPTVRSIIESAIAIHGSLKAAINKGIWMNEEKHIPIKKVRVFRNDVKKPIELKDQRDLSDKDYKQHYYVTNDGNYMMLIFSKLNNKGREIRQHVVINSLEATEVIKSHKRSQVGKVVWESYYSKEGFDLIYKLKSGTMILLYENNRDEVWDLDIRNLQKRLYIITKMKYDGRIYMMHHQEAREKKDLEEKSGSFKINEDYRPLIVNSYNQFNALVQDLDFEINDLGEIRRLI

SEQ ID NO: 398 - protein, 1424 aa, Prevotella sp.
  source 1..1424: note = Prevotella sp. C561
MTQKVLGLDLGTNSIGSAVRNLDLSDDLQWQLEFFSSDIFRSSVNKESNGREYSLAAQRSAHRRSRGLNEVRRRRLWATLNLLIKHGFCPMSSESLMRWCTYDKRKGLFREYPIDDKDFNAWILLDFNGDGRPDYSSPYQLRRELVTRQFDFEQPIERYKLGRALYHIAQHRGFKSSKGETLSQQETNSKPSSTDEIPDVAGAMKASEEKLSKGLSTYMKEHNLLTVGAAFAQLEDEGVRVRNNNDYRAIRSQFQHEIETIFKFQQGLSVESELYERLISEKKNVGTIFYKRPLRSQRGNVGKCTLERSKPRCAIGHPLFEKFRAWTLINNIKVRMSVDTLDEQLPMKLRLDLYNECFLAFVRTEFKFEDIRKYLEKRLGIHFSYNDKTINYKDSTSVAGCPITARFRKMLGEEWESFRVEGQKERQAHSKNNISFHRVSYSIEDIWHFCYDAEEPEAVLAFAQETLRLERKKAEELVRIWSAMPQGYAMLSQKAIRNINKILMLGLKYSDAVILAKVPELVDVSDEELLSIAKDYYLVEAQVNYDKRINSIVNGLIAKYKSVSEEYRFADHNYEYLLDESDEKDIIRQIENSLGARRWSLMDANEQTDILQKVRDRYQDFFRSHERKFVESPKLGESFENYLTKKFPMVEREQWKKLYHPSQITIYRPVSVGKDRSVLRLGNPDIGAIKNPTVLRVLNTLRRRVNQLLDDGVISPDETRVVVETARELNDANRKWALDTYNRIRHDENEKIKKILEEFYPKRDGISTDDIDKARYVIDQREVDYFTGSKTYNKDIKKYKFWLEQGGQCMYTGRTINLSNLFDPNAFDIEHTIPESLSFDSSDMNLTLCDAHYNRFIKKNHIPTDMPNYDKAITIDGKEYPAITSQLQRWVERVERLNRNVEYWKGQARRAQNKDRKDQCMREMHLWKMELEYWKKKLERFTVTEVTDGFKNSQLVDTRVITRHAVLYLKSIFPHVDVQRGDVTAKFRKILGIQSVDEKKDRSLHSHHAIDATTLTIIPVSAKRDRMLELFAKIEEINKMLSFSGSEDRTGLIQELEGLKNKLQMEVKVCRIGHNVSEIGTFINDNIIVNHHIKNQALTPVRRRLRKKGYIVGGVDNPRWQTGDALRGEIHKASYYGAITQFAKDDEGKVLMKEGRPQVNPTIKFVIRRELKYKKSAADSGFASWDDLGKAIVDKELFALMKGQFPAETSFKDACEQGIYMIKKGKNGMPDIKLHHIRHVRCEAPQSGLKIKEQTYKSEKEYKRYFYAAVGDLYAMCCYTNGKIREFRIYSLYDVSCHRKSDIEDIPEFITDKKGNRLMLDYKLRTGDMILLYKDNPAELYDLDNVNLSRRLYKINRFESQSNLVLMTHHLSTSKERGRSLGKTVDYQNLPESIRSSVKSLNFLIMGENRDFVIKNGKIIFNHR

SEQ ID NO: 399 - protein, 1483 aa, Prevotella sp.
  source 1..1483: note = Prevotella sp. MSX73
MKTILGLDLGTNSIGWAKVSVDDYGNYLHDIKLGSRIIPMSQDVLGNFDSGVTVSQTAQRTEFRSKRRLVQRNLQRRERLHRVLHVLDFLPAHYDAAIGWDRTEAVTYGKFLNHAEPKLAWEELGNGKRRFLFMDSFHEMVADFARCQPALVADGKKIPLDWTIYYLRKKALTQAITKEELAWILLNFNQKRGYYQLRGEEEEENPTKQEEYYELKVVSVEATDSRKGNDTWYNVHLENGWIYRRSSKISLDDWVGKVKQFIVTTEYEKDGTTLKTDKEGNVKRSFRAPNENDWGLRKKRTETLLEMSGKTVGAFIYDHLLQEPADKIRGNFIRTIERHYYKAELEAILAEQCKYHIELRDKEMLEACARELYLNNLPHQRSLMKKDMTYLLLYDLIFYQRPLKSKKALIANCPYEYYEYVDKETGEIKRQNIKCIAKSNPYFQEFRLWQFVLNLRLFDRVEDKEVTANYLPTADDHARLFTYLNDRKEINQETLLKDYFKLKKVKIGNEKEYPIRWNYIEDKEKKYPCNETRYELLMALDRAGIEHKWLDDNNLEYRLWHLLYSVEVKSESETALRKLKNDDAFVNSFLKVKPFKKEYGAYSEKAIKRLLAVMRKGFLWNEQDICDETRKRIEIIIKGDVDEKVKERMGHAAYSFDRVSDFQGLPEWLACYVVYGRHSEAMDIQRWDSPERLMAYINNFKQYSLRNPIVEQCILETLRTVHDIWKETGQIDEIHVELGREMKSTSEERARRTQNVLRNENTNLRIKSLLIELKNDTDICNVHPYSPMQQEILRIYEEGALQELNREDEDFEEISKISQMSQPSGKELNRYKLWLEQKYRSPYTGKAISLAKLFTPAYQIEHVIPQSRYFDDSFTNKVICEAEVNTLKSNLLGYEFIKKHGGEIIHCTTLGDVRIFSESEYKAFVMDHYANNKSKKDKLLMEDIPQEFLSRQMNDSRYISKVVKTLLSNIVRMADESEATSKSVIVCTGGVTDRLKKDWGLNDVWNSIVYSRFERLNRLTGTEAFGHWENKDGKRVFQTSMPLELQRGFRKKRIDHRHHAMDALVIACASRNIVNYLNNESANNPKKREDLRRQLCDKNRVIRKPWETFTQDAYNALENVVVSFKNYVRVINKATNRYEHYDENGKKRFVQQKGSELWAIRKPMHKETYYGHVNLRRKELVTLQKALDDIPSICDKKLRDYISALVEKHFNKRQLLAHFKSTDYYWQKQYVNKVYVWTFSDDIKPLVATRKLLDTSFDAKRIGTITDTGIQKILRNYLEAKGGNATLAFTPEGIVEMNQNISKYNDGKPHQPILKVRITEPMGAKYRVGQTENKMAKYVEAQSGTNLYFAIYEDSEGKRSYTTVPLDEVAERLKQRLSPVPEKDENDVPLKFYLSPNDLVYVPTEEELQLRECKLNKDRIYKMVSSTGSECHFIPYYVANVIYNKVEFEAKNKIGRALTGEMIKAVCWKLEIDRLGNILKVIK

SEQ ID NO: 400 - protein, 1375 aa, Prevotella sp.
  source 1..1375: note = Prevotella sp. oral taxon 306 str. F0472
MKKILGLDLGTTSIGWALVNESENKDEQSSIVRLGVRVIPLTVDEKGNFEKGKAITTNADRQQVHAARINLQRYKLRRENLRDCLQKQGWIGSEPMCEDGKSSTFETYKLRAKAAVEEVSLHEFARVLFMLNKKRGYKSNRKANDKEEGKLFDGMTIAKKLYEEHLTPAEYSLQLLNTGRKFTPEYYRSDLIEEFEKIWNEQQKYYPEILTDEFKQQLEGKAKSNTSKLFLGKYGIYSADTKGLDRRLQPLKWRVEAMKQQVDKDVLAFVISDLKGQIANTSGLLGAISDRSKELYFSKQTIGQYLWASLQENPHISIKNQPFYRQDYLDEFEKIWETQATYHKELTSELKQEIRDIIIFYQRPLKSKKNLIAVCELEQRKVKVTVDGKEKEITIGPKIAPKSSPMFQEFRIWQNLNNILLLDHETNSKRPLYEEERNLLYEELSVKEKLSKTEALKVLGKKSKQWDLNYKELEGNRTQAVLYDCYNRIIVMSGHEECNFKKLKASDIRHYVKMIFKNLAFNTDILCFDSSLKGHELERQPMCQLWHLLYSYEGDNSRTGNDALLRKLETSFGFPKEYAAVLADVIFEDSYGNLSVKAMRNILPHLQAGKDYSQACEEAGYKHSRRSLTKEELNQKVYKEKLELLPKNSLHNPVVEKILNQMVNVINAVIEEYGKPDEIRIELARDLKIGAAERENMTRSINQGNAENKRIREILEKEFALSYLSRNDIIKYKLYEELKSNGFKTLYSDTYISKDKLFSKDFDIEHIIPKARLFDDSLSNKTIEARDVNIAKSNKTAFDFILERYGEQGVKTYKTKLLRLLEDGAISNKKYNNLLKTEADIPSGFIDRDLRNTQYIAKKAYEILSELVKIVTPTTGSVTNRLREDWQLVDVMKELNFEKYQKLGLADVIEDRDGRKVKRIKDWTKRNDHRHHAMDALTIAFTKPSYIQYLNNLNARSDKSSSIYGIEVKELHREEGKFRFNAPLPINEFRAEAKRHLKSVLVSIKAKKKVMTQNVNKIKTKHGIIKKVQLTPRGELHNATYYGTKKRPLVRMVKVGAALDEATIKRVCSPAIRAALLKRLNAYNGDAKEAFTGRNSIDKNPIYLDIEQTKLVPVLVKTIEWGMYHPIRKRITPDLKIDKVIDKGIREKLKARLAEFNGDAQKAFSNLDENPIYMDEAKRITLKRVSIEGVLSAIPLHTLKDKAGKPVIGSDGKPVFGDYVQTSNNHHIAFYIDDKGNLQDNPVSFFEAAERKSQGVPVIDRRYNCDKGWHFVFTMKQNEYFVFPNEATGFIPSEVDLLDEANYCIISPNLYRVQKLSKASGRDYWFRHHLETMLNDDLRLKNSTFKRIQSLKGLEDIVKVRINSIGKIVAVGKYD

SEQ ID NO: 401 - protein, 1216 aa, Prevotella stercorea
  source 1..1216: note = Prevotella stercorea DSM 18206
MTKILGIDTGTNSLGWAIVDKTADNYNLLDKGVNIFQEGVKIEKGIESSKAAERTEHRATRVRYYRIKLRKIRLLRILSDNHLCPPLSQEELSTWRLKKVYPKNELFMQWQRTDDDTEKTPYAYRHKCIHEKLDLSDVTDRYILGRAFYHIIQRRGFLSNRKEQGGEDSGKVKEGISTLTHEMNEAGYEYLGDYFYALYNKGEKIRKHYTARNEHFLSEFKAICEKQDLEKELGSEVVRNIEKAIFDQRPLKSQKGQVGKCVFEKNKTKCPSSHPMYEEFRMLTFINNIKIKTPNDDVLRPLNTGEREKIMPLFFRKSKKQFDFEDITKKLAPKKMYGFYKKEEDAEMPFLFNYPMDTSVSGCPVTAALKDVFGDDWITAICETYTLGEGKSRFDIVNDIWHALYFYSDKDKLAEFAINRLQLSEDEAKIFSEISLPADYASLSLKAICKILPYLRRGLIYSHAVFLGNLCEVMPKYEWSIKEMRETIIDNIIMEMDKCDTKDKRTFEVCIKDYLKGQYNVSDNSLKKLYHPSMIETYPRVQYTNEHGVYQLGSPRIDSVRNPMAMRSMFRLRKLVNRLLVEGKIDQNTEVHIEFARELNDANKRNAIALFVKENQSANDEARKQIITLFKKETGTDIEPTDKDILKYVLWEEQNHICLYTGKQIRISDFIGANPKFDIEHTIPRSVGGDSTKMNLTLCDSRFNREVKKTKLPVELPNHDEIMERIKEWKKNYELLDIQIRKNKKLSKGATTKEQKDTIIRKRHLLELRRDYWRGKYERFTMESVPEGFSRRQGTDISVISKYARLYLKSLFNRVYTVKGIATSDFRKIWGIQDIYSKKERINHVHHCIDAIVIACIGLDEYNKLGAYYHDEENNKWYGMSKASFKKPWATFVEDIKKIQDEILVYHYTPDNMPKQGRRRIKIDGKKILCKGDAARGSLHNDTYYGAIENDGAVKYVKRIDLASLEEKDVKNIVDDTVRSIIEAAIKEKGFKDAMASTIWMNEEKRVPIKKVRCFTPSITKPLNIRKQRDVSIKEYKQQYHVANDSNYLLALYIGTDNKGKEKREFEIVNILQAAQYYRTSNDKEVVDRHIVPIKSEHDYPFAYTLKIGTMVLLYEKSPNEVWDATIKERNRRLYKVTGLSTMRMKGRNGEYAYATVKLIHNEEARPSKDIKAKNGEYEQGEEFRPAIIMLHTQLNALVQGYDFEINELGEIRRLR

SEQ ID NO: 402 - protein, 1234 aa, Prevotella tannerae
  source 1..1234: note = Prevotella tannerae ATCC 51259
MPNFWSIFTENLQTYLMKTRILGLDTGTNSLGWAVVDRDENNQYTPICRGDLIFTEGVKQEKGIEFSLAAERTSYRASRRHYFRRRLRKVEVLKVLVKHKLCPPLSDEALNRWHTKKEYPLDEDFILWQRTNEADNKNPYHDRHICLHRKLNLKDSQTDRYTLGRALYHLTQRRGFLSNRLDQNEEAEETGKVKSAISELSKEMKEAGCEFLGDYFYLLYRTEGNRVRIRSRYTDREKHYLQEFKEICRVQELDEDLAKALEKTIFFQRPLKSQRQGVGKCTMEKGHSRCAVSHPLYEEYRLLCYLNNIRIKTPSDDRLRPLNAEEREKITPLFYKEKNFDFEKIAKKLAGKTPFGWIRDAEDWPYQFNYRMTQEAPACPTTAQLIKVFGEDWKAALAETYTMSAKQDGTLKTEDEICTDIWNVLYSFSSKEKLKEFGLKKLQLDEVQAKAFSEIRLTRDFASLSLKAIRKILFFLRTGEDYSKAIFLANIPTIVGEEIWNDIERRSRLLYKVDLALRPQEERDAEEHRTIAERIKAAVAAEVPDAPIDLLYHPSMIEAYPDAKRNERFDCYQLGSPKTNAVRNPMAMRSLHMVRKVINHLLRKHIIDEKTEIHIEYARELNDANKRQAIADWQRELSKRHTAYAQNIRQLYKAETGLVIEPTKADILKYQLWEEQQHVCLYTGKKIGIADFLGANPKFDIEHTIPRSRGGDSTQENLTLCESKFNRDIKRDKLPTELANYEEILARIEHWKKQCYALKLKRDGIRTHSGLEKSIKDSRIRRRHLVGLEYGYLKGKYDRFTMKEVPEGFSRRQGAGIGLISKYAGLFLKSLFKDPKNPNRSNVYVVKGAITAEFRKLWGLQQADEAKSRENHTHHCIDAYTIACIGPCEYAALAAYYRSDEEFKYGRRREKPQFEKPWPTFTEDLLKLQEELLIVHQTTDKLGKRDRRKVKTPRGKFLTGGDSARGRLHQETYYGAINYDGNIKYVVRKPLDSLTEKDLDKIVDETVMGIVKGAVEAKGSLKEALADGIYMNKEKGILIKRVRIFSDVSEPINLKQLRDVSTKEYKRHIHLRKDENYLFAIYEGIDKKKNKKQTETATVDYLDAAKFYKDSKRRDKANSLVGDYSKKNKLPLKCILKKRQMVLFYEHSPEEIRFKDKKDLSRRLYIVTSIAKDGRVKFLHHQAATATGIQSSPSPFTNDGEHQPYYRLSASNIKVLVAGIDFDINILGEITPKL

SEQ ID NO: 403 - protein, 1487 aa, Prevotella timonensis
  source 1..1487: note = Prevotella timonensis CRIS 5C-B1
MKNILGLDLGSNSVGWALVKVEENGNPIGSIKMGSRIIPMSQDILGSFEKGDTVSQTAQRTLYRGKRRLIERHVLRRERLCRVLHIMNFLPAHFDRLLGWDKTDNKTYGKFIDDSEPKLAWRQNKNEMGKMEFVFMDSFHEMLSDFAKHQPQLIANGKKVPLDWTIYYLRKKALTQLISKEELAWILLNFNKKRGYYQLRGEEEEEQPTKKEEYKVLKVISVDADEGQKGNGIWYNIHLEDGGIYKKKSDIPLYDWVGKTLQLIVVTTYEKDGKTPKIFDSGKQNPSYRLPKEDDWGLVKKRTESQLQSSGKTVGAFIYDNILSKPDDKIRGNLVRTIERKYYKKELIEILQQQAKYHDELHNQNLLESCAKELYAHNDVHYNEVIKSNMINLLVNDIIFYQRPLKSKKSLIANCKYESYEYVDKETGEIKEMPIKCIAKSNPYYQEFRLWQFIHNLRLSDVVTREDVTAQYLSTPQDYCNLFTYLNDRKEIKQDILLKDFFKIKKVQIDKEKVFPIEWNYIKDATKSYPCNETRYELLSALKRAGMDKQWLDDTPNMQYRLWHLLYSVEEKEESAKALRKLYDDDKFVTSFLKIKPFNKCYGAYSEKAIKRLLTLMRMGKAWNEQAIDAKTLKCIQQIITDNVDSKLKEKIDDSRYVLHHVSDFQGLPTYLASYVIYGRHSEVTDIQCWDSPEDLLKFIRDFKQHSLRNPIVEQVILETLRVVYDIWKAEKHIDEIHVEVAREMKLTAQQRNEANLRNLNNEATNLRIKYLLEELKNDTFIKDVRPLSPIHQEKMRIYEQAVLGNLNKQDKDYDDIIKISKKEHPTNAELIRYKLWLEQRYCSPYTGKAISLSKLFTTAYEIEHIIPQSRYFDNSFNNKVICEAEVNKAKGNMLGYEFIKKQGGQKIYCTQLGKAVTILKEEAYKQFVNEHYAHNKRKRDNLLAENIPESFSSRQLNDTRYITKTIMSLLSNVVRQQSEEEATAKNLLPSSGSVTDRLKNDWGLKDVWNTIVTPRFERLNKLSGTNDFGEMKEENGNRYFQTNVPLEYEKGFKKKRIDHRHHAMDALVIACTTRNMVNYISNANANSPKQREDLRQLLCDKNRIINKPWDTFTQDALKALNDIVVSFKNNVRIINRATNRYQRYDKNGKKIIFSQKGDDMWAIRKSMHKETVFGRVNLIRKEVLPIAKALDNISAICNAQLRAYVNDLVDKHFNKKQLVAHFKSLNYKWNRQDVSKVEVWISSDNKTPMVAVRKPLDTSFDKKKIASITDTGIQTILLNYLESKGGDASVAFAPEGIQEMNSNIELYNNGKAHKPIKNVRLSEPLGAKYQVGERGAKTKKYVEADKGTNLFFAIYEDEEGKRYYYSVPLREAIERQKQKLSPVPEYNEKGVALKFYLSPNDLVYVPTEEERTMGTCHIDKARIYKMVSSTGCSCYFVPSTFAKVIVDKVELQSLNKMEKAITDECIKEVCWKLKVDRLGNIINVIK

SEQ ID NO: 404 - protein, 1218 aa, Prevotella timonensis
  source 1..1218: note = Prevotella timonensis CRIS 5C-B1
MNKRILGLDTGTNSLGWAVVDWDEHAQSYELIKYGDVIFQEGVKIEKGIESSKAAERSGYKAIRKQYFRRRLRKIQVLKVLVKYHLCPYLSDDDLRQWHLQKQYPKSDELMLWQRTSDEEGKNPYYDRHRCLHEKLDLTVEADRYTLGRALYHLTQRRGFLSNRLDTSADNKEDGVVKSGISQLSTEMEEAGCEYLGDYFYKLYDAQGNKVRIRQRYTDRNKHYQHEFDAICEKQELSSELIEDLQRAIFFQLPLKSQRHGVGRCTFERGKPRCADSHPDYEEFRMLCFVNNIQVKGPHDLELRPLTYEEREKIEPLFFRKSKPNFDFEDIAKALAGKKNYAWIHDKEERAYKFNYRMTQGVPGCPTIAQLKSIFGDDWKTGIAETYTLIQKKNGSKSLQEMVDDVWNVLYSFSSVEKLKEFAHHKLQLDEESAEKFAKIKLSHSFAALSLKAIRKFLPFLRKGMYYTHASFFANIPTIVGKEIWNKEQNRKYIMENVGELVFNYQPKHREVQGTIEMLIKDFLANNFELPAGATDKLYHPSMIETYPNAQRNEFGILQLGSPRTNAIRNPMAMRSLHILRRVVNQLLKESIIDENTEVHVEYARELNDANKRRAIADRQKEQDKQHKKYGDEIRKLYKEETGKDIEPTQTDVLKFQLWEEQNHHCLYTGEQIGITDFIGSNPKFDIEHTIPQSVGGDSTQMNLTLCDNRFNREVKKAKLPTELANHEEILTRIEPWKNKYEQLVKERDKQRTFAGMDKAVKDIRIQKRHKLQMEIDYWRGKYERFTMTEVPEGFSRRQGTGIGLISRYAGLYLKSLFHQADSRNKSNVYVVKGVATAEFRKMWGLQSEYEKKCRDNHSHHCMDAITIACIGKREYDLMAEYYRMEETFKQGRGSKPKFSKPWATFTEDVLNIYKNLLVVHDTPNNMPKHTKKYVQTSIGKVLAQGDTARGSLHLDTYYGAIERDGEIRYVVRRPLSSFTKPEELENIVDETVKRTIKEAIADKNFKQAIAEPIYMNEEKGILIKKVRCFAKSVKQPINIRQHRDLSKKEYKQQYHVMNENNYLLAIYEGLVKNKVVREFEIVSYIEAAKYYKRSQDRNIFSSIVPTHSTKYGLPLKTKLLMGQLVLMFEENPDEIQVDNTKDLVKRLYKVVGIEKDGRIKFKYHQEARKEGLPIFSTPYKNNDDYAPIFRQSINNINILVDGIDFTIDILGKVTLKE

SEQ ID NO: 405 - protein, 1496 aa, Prevotella veroralis
  source 1..1496: note = Prevotella veroralis F0319
MKTILGLDLGTNSIGWAKVCVDDNGNYLRDIKLGSRIIPMSQDVLGNFDKGVTESQTSVRTGFRGVRRIRERSLLRRERLHRVLHVLGYLPPHYDSAIGWNKNEPSTYGKFLNHGEPKLAWEHKEDGSMRFLFMESFHEMMADFAKSQPSLVSDGKKIPLDWTIYYLRKKALSQPIRKEELAWLLLNFNQKRGYYQLRGEEDDDNPTKCEEYYELKVVGIEADEEGKNGNTWYNVKLENGWIYRRQSKIPLDDWIGKVREFIVTTEYEKDGITLKKDKNGDVKRSFRSPSEDDWGLRKKRTEKLLDSSKMTVGAFVYDHLLAEPSDKIRGKFIRTIERKYYKKELYAILCEQSKYHEELRSGDYLNKCAEELYKNNQPHRNSLLTKDLAYLLLEDLIFYQRPLKTKKSLIAECPYEAYKYVDKETGEIKRQGIKCIAKSNPYYQEFRLWQFISNLRLFNKADDKEVTADYLPTQDDYVRLFAYLNDRKEINQETLLKEFFKLKKITVNSEKVFPIRWNYIEDKEKKYPCNETRHELLLALDRARIDHSWLEKPGQEYRLWHLLYSVESKEETKEALRKLKDDDAFVESFLKVKPFKREYGAYSEKAIKKLLAVMRMGSLWRETDICDTTKGNITKILQGEIDEKLKEKISASVSSYNQLSDFQGLPVWLACYVVYGRHSEAAEIQHWKTPESLLAYINGFKQHSLRNPIVEQCILETLRTVHDIWKEVGHIDEIHVELGRNMKSTADQRARISENVLRNENTNLRIKSLLLELKNDPNIKDVRPYSPMQQEKLRIYEEGVLQELTKDDKDFTEITKISTMAQPSAKELQRYKLWLEQKYRSPYTGKSISLTKLFTSAYQIEHVIPQSRYFDDSFSNKVICESEVNSLKDNMLGYEFIKNHGGEIIHCTMLGDVKVLSESEYKAFVNDHYAHNKRKRENLLLEDIPQEFLNRQMNDSRYISKVVKALLSNIVRAEGEEEATSKFVVSCSGGITDRLKKDWGLNDVWNKIVYPRFERLNRLTGTEAFGQWENKDGKRVFQTAVPLELQRGFNKKRIDHRHHAMDALVIACTSRNIINYLNNESANNPKKREDLRQKLCDKNRTIRKPWETFTQDATAALEDVIVSFKNYVRIINKATNYYERYDVEGKKVIAEQRGDDMWAIRKPMHEATYYGRVNLRRKKKVNLRVALENISSICDNKLRIYINGLVEKGFNTKQILDKFKNTNDHFSMQKIDKVEIWQFTNEEEKLVATRKPLDTSFDTKKIASITDTGIQTILLNYLETKGGDSTIAFTPEGIVEMNQNISKYNNGKEHMPILKVRLYTKLGKKIPVGQTGCKAKQFVIAEAGTNLYFAIYEDEEGKRSYRTIPLNEVVERLKQGLSPVPEKNDKDVHLKFYLSPNDLVYVPIEDEHESLAKDHIYKFVDSSGTTANFIPHRSANVIFELNKKDAEKFCSGSIIQNEYGVGSSQSKNQKAITGEMIKAVCRKLEVDRLGNVIKVI

SEQ ID NO: 406 - protein, 1062 aa, Ralstonia syzygii
  source 1..1062: note = Ralstonia syzygii R24
MAEKQHRWGLDIGTNSIGWAVIALIEGRPAGLVATGSRIFSDGRNPKDGSSLAVERRGPRQMRRRRDRYLRRRDRFMQALINVGLMPGDAAARKALVTENPYVLRQRGLDQALTLPEFGRALFHLNQRRGFQSNRKTDRATAKESGKVKNAIAAFRAGMGNARTVGEALARRLEDGRPVRARMVGQGKDEHYELYIAREWIAQEFDALWASQQRFHAEVLADAARDRLRAILLFQRKLLPVPVGKCFLEPNQPRVAAALPSAQRFRLMQELNHLRVMTLADKRERPLSFQERNDLLAQLVARPKCGFDMLRKIVFGANKEAYRFTIESERRKELKGCDTAAKLAKVNALGTRWQALSLDEQDRLVCLLLDGENDAVLADALREHYGLTDAQIDTLLGLSFEDGHMRLGRSALLRVLDALESGRDEQGLPLSYDKAVVAAGYPAHTADLENGERDALPYYGELLWRYTQDAPTAKNDAERKFGKIANPTVHIGLNQLRKLVNALIQRYGKPAQIVVELARNLKAGLEEKERIKKQQTANLERNERIRQKLQDAGVPDNRENRLRMRLFEELGQGNGLGTPCIYSGRQISLQRLFSNDVQVDHILPFSKTLDDSFANKVLAQHDANRYKGNRGPFEAFGANRDGYAWDDIRARAAVLPRNKRNRFAETAMQDWLHNETDFLARQLTDTAYLSRVARQYLTAICSKDDVYVSPGRLTAMLRAKWGLNRVLDGVMEEQGRPAVKNRDDHRHHAIDAVVIGATDRAMLQQVATLAARAREQDAERLIGDMPTPWPNFLEDVRAAVARCVVSHKPDHGPEGGLHNDTAYGIVAGPFEDGRYRVRHRVSLFDLKPGDLSNVRCDAPLQAELEPIFEQDDARAREVALTALAERYRQRKVWLEELMSVLPIRPRGEDGKTLPDSAPYKAYKGDSNYCYELFINERGRWDGELISTFRANQAAYRRFRNDPARFRRYTAGGRPLLMRLCINDYIAVGTAAERTIFRVVKMSENKITLAEHFEGGTLKQRDADKDDPFKYLTKSPGALRDLGARRIFVDLIGRVLDPGIKGD

SEQ ID NO: 407 - protein, 1066 aa, Rhodopseudomonas palustris
MSERVVRRILGIDLGIASCGWGVVDISGAGGGIIATGVRCFDAPLIDKTGEPKSATRRTARGQRRIVRRRRQRMNGVRRLLCEFGLLPDPRPDALNQAMRRISTASAAAQVTPWTLRAAAHQRLLSNEELAVVLGHIARHRGFRSNAKNEAGANAADETSKMKKAMEATREGLAKYHAFGDMIANDPKFANRKRNRDKDYSHTAKRSDLEDEVRAILRAQLRFGSAAATETLAQTFADVAFFQRPLQDSEDRVGDCPFEPGQKRAARRAPSFELFRFLSRLANLKLAVGRSPERRLTAEEIALAAKGFGETKKTITFKSLREALDLDPNARFSGIGKDKEASLDVVARTGGAAYGTKTLKDALGDAPWRSLSRTPETLDRIAEILSFREDITSIRNGLEDLGLDSLVVEALMQAAANGDFKEFTRAGHISARAARNIIPGLREGLVYSEACARVGYDHAARLSVPLDQVGSPVTRKALSEALKQVRAVAREYGPIDYFHIELARSVGKSAEERKQLTDGIEARNVEKAKRRKQAEEHLGRAPSDDELLRYELAKEQNFKCIYSGDAIDPAGVAANDTRYQVDHILPWSRFGDDSYLNKTLCTARSNQNKRGRTPFEWFEADKTDVEWMEYVARVENLQEVKGRKKRNYSIKDAAAIEDKFKARNLTDTQWATRLLADELSRMFPPRECERAICGRADGGNDGLTIVEERRVFTRPGAITSKLRRAWGLEGLKKQDGKRVEDDRHHAVDALVLAATTESLLQRLTVEVQRREREGRPDDIFHCAEPWRGFRADVRRTVYGSETMPGIFVSRAERRRARGKAHDATIKQIREIEGERLVFERKPVEKLTDKDLEKIPIPKPYGQVSDPKRLRDELVESLRAWIAAGKPKDRPPLSPKGDVIRKVRIQTNDKVSVEINGGTVDRGDMARVDVFRKKNKKAVWEYYVVPIYPHQIVALNDPPDRAVIAYAEDKDWKEIDSSYEFLWSLFGLSYVEISKANGECIDGYFRGLHRGTGAASVCKHISLGKDATVSGIGLKTLASFKKFTIDRLGRKFEIPREVRTWRGEACT

SEQ ID NO: 408 - protein, 1064 aa, Rhodopseudomonas palustris
MSECVTRRILGIDLGIASCGWGVIEVGEASGSIIASGVRCFDAPLIDKTGEPKSATRRTARGQRRIIRRRRQRMNAVRRLLAEFGVLTGRSPDALHQALLRLSQSVAGSQVTPWTLRAAAHERKLTNDELAVVLGHIARHRGFRSNSKNDGGANAADETSKMKKAMETTREGLARYHSFGAMIASDPKFADRKRNRDKDYSHTAKRSDLEDEVRTIFRSQTRFGSLVASEKLSQAFADAAFFQRPLQDSEDMVGSCPFEPGQKRTARRAPSFELFRFLSRLANLKLTVGRAPERRLTPDEIALAAKGFGETKKSITFKSLREALDLDPNARFSGVAKEKESTLDVAARTGGAAYGTKTLKDALGDAPWRSLSRMPEKLDRIAEILSFREDMKAIRNGLEEVGLDGLVVDALMQATANGDFKDFTRAAHISALAARNIIPGLREGLVYSDACTRVGYDHAARPAVPLSQIGSPVTRKALSEALKQVRAVAREYGPIDYFHIELARSIGKSAEERKKLTDGIEARNVEKEKRRKEAAEHLGRAPSDDELLRYELAKEQNFKCIYSGDPIDPAGISANDTRYQVDHILPWSRFGDDSYVNKTLCTARSNQNKRGRTPFEWFDADKTEAEWMEYSARVEDLKEVKGRKKRNYSIKDAASVEDKFKARNLTDTQWATRLLADELKRMFPPRECERVVTVRADGGNDGLSIVEERRVFTRPGAITSKLRRAWGLEGLKKQDGKRVEDDRHHAVDALVLAATTESLLNRLTVEVQQREREGRQDDIFHCSQPWPGFRVDVQRTVYGSETMPGIFVSRAERRRARGKAHDATVKQIRDIDGERIVFERKPIEKLTDKDLERIPVPEPYGKAADPKKLRDELVENLRAWIAAGKPKDKPPRSPKGDIIRKVRIETKDKVAVEINGGTVDRGDMARVDVFRKKNKKGVWEFYVIPIYPHQIVASALPPNRAVIAYKAESEWTAIDGCFEFAWSLNPMSYLELVKSNGELIEGYFRSMDRTTGAINLSPMSTNSETIRSIGVKTLSSFRKFTVDRLGRKFEIPREVRTWRGEACT

SEQ ID NO: 409 - protein, 1173 aa, Rhodospirillum rubrum
  source 1..1173: note = Rhodospirillum rubrum ATCC 11170
MRPIEPWILGLDIGTDSLGWAVFSCEEKGPPTAKELLGGGVRLFDSGRDAKDHTSRQAERGAFRRARRQTRTWPWRRDRLIALFQAAGLTPPAAETRQIALALRREAVSRPLAPDALWAALLHLAHHRGFRSNRIDKRERAAAKALAKAKPAKATAKATAPAKEADDEAGFWEGAEAALRQRMAASGAPTVGALLADDLDRGQPVRMRYNQSDRDGVVAPTRALIAEELAEIVARQSSAYPGLDWPAVTRLVLDQRPLRSKGAGPCAFLPGEDRALRALPTVQDFIIRQTLANLRLPSTSADEPRPLTDEEHAKALALLSTARFVEWPALRRALGLKRGVKFTAETERNGAKQAARGTAGNLTEAILAPLIPGWSGWDLDRKDRVFSDLWAARQDRSALLALIGDPRGPTRVTEDETAEAVADAIQIVLPTGRASLSAKAARAIAQAMAPGIGYDEAVTLALGLHHSHRPRQERLARLPYYAAALPDVGLDGDPVGPPPAEDDGAAAEAYYGRIGNISVHIALNETRKIVNALLHRHGPILRLVMVETTRELKAGADERKRMIAEQAERERENAEIDVELRKSDRWMANARERRQRVRLARRQNNLCPYTSTPIGHADLLGDAYDIDHVIPLARGGRDSLDNMVLCQSDANKTKGDKTPWEAFHDKPGWIAQRDDFLARLDPQTAKALAWRFADDAGERVARKSAEDEDQGFLPRQLTDTGYIARVALRYLSLVTNEPNAVVATNGRLTGLLRLAWDITPGPAPRDLLPTPRDALRDDTAARRFLDGLTPPPLAKAVEGAVQARLAALGRSRVADAGLADALGLTLASLGGGGKNRADHRHHFIDAAMIAVTTRGLINQINQASGAGRILDLRKWPRTNFEPPYPTFRAEVMKQWDHIHPSIRPAHRDGGSLHAATVFGVRNRPDARVLVQRKPVEKLFLDANAKPLPADKIAEIIDGFASPRMAKRFKALLARYQAAHPEVPPALAALAVARDPAFGPRGMTANTVIAGRSDGDGEDAGLITPFRANPKAAVRTMGNAVYEVWEIQVKGRPRWTHRVLTRFDRTQPAPPPPPENARLVMRLRRGDLVYWPLESGDRLFLVKKMAVDGRLALWPARLATGKATALYAQLSCPNINLNGDQGYCVQSAEGIRKEKIRTTSCTALGRLRLSKKAT

SEQ ID NO: 410 - protein, 1059 aa, Rhodovulum sp.
  source 1..1059: note = Rhodovulum sp. PH10
MGIRFAFDLGTNSIGWAVWRTGPGVFGEDTAASLDGSGVLIFKDGRNPKDGQSLATMRRVPRQSRKRRDRFVLRRRDLLAALRKAGLFPVDVEEGRRLAATDPYHLRAKALDESLTPHEMGRVIFHLNQRRGFRSNRKADRQDREKGKIAEGSKRLAETLAATNCRTLGEFLWSRHRGTPRTRSPTRIRMEGEGAKALYAFYPTREMVRAEFERLWTAQSRFAPDLLTPERHEEIAGILFRQRDLAPPKIGCCTFEPSERRLPRALPSVEARGIYERLAHLRITTGPVSDRGLTRPERDVLASALLAGKSLTFKAVRKTLKILPHALVNFEEAGEKGLDGALTAKLLSKPDHYGAAWHGLSFAEKDTFVGKLLDEADEERLIRRLVTENRLSEDAARRCASIPLADGYGRLGRTANTEILAALVEETDETGTVVTYAEAVRRAGERTGRNWHHSDERDGVILDRLPYYGEILQRHVVPGSGEPEEKNEAARWGRLANPTVHIGLNQLRKVVNRLIAAHGRPDQIVVELARELKLNREQKERLDRENRKNREENERRTAILAEHGQRDTAENKIRLRLFEEQARANAGIALCPYTGRAIGIAELFTSEVEIDHILPVSLTLDDSLANRVLCRREANREKRRQTPFQAFGATPAWNDIVARAAKLPPNKRWRFDPAALERFEREGGFLGRQLNETKYLSRLAKIYLGKICDPDRVYVTPGTLTGLLRARWGLNSILSDSNFKNRSDHRHHAVDAVVIGVLTRGMIQRIAHDAARAEDQDLDRVFRDVPVPFEDFRDHVRERVSTITVAVKPEHGKGGALHEDTSYGLVPDTDPNAALGNLVVRKPIRSLTAGEVDRVRDRALRARLGALAAPFRDESGRVRDAKGLAQALEAFGAENGIRRVRILKPDASVVTIADRRTGVPYRAVAPGENHHVDIVQMRDGSWRGFAASVFEVNRPGWRPEWEVKKLGGKLVMRLHKGDMVELSDKDGQRRVKVVQQIEISANRVRLSPHNDGGKLQDRHADADDPFRWDLATIPLLKDRGCVAVRVDPIGVVTLRRSNV

SEQ ID NO: 411 - protein, 1405 aa, Riemerella anatipestifer
MKTILGLDLGTNSIGWALVKEAENSNEKSEIIKLGVRVNPLTVDEKTNFEAGRPLSTNADRTAKRSARRNLQRYKLRRKNLIDLLIKNQLIDKDTPLTEIGKNTTHQTLELRAKAARERIELEDLARVFLAINKKRGYRSSRKVNNEEEGQAVDGMAVAKKLYDENLTPGQYAYELLSKGKKYVPDFYRSDLQAEFNAIWEYQKQFYADILDDELYNALKGQGQQNSRKRFLAIKGVYTAENKGKRDDVKLRHYKWRSEAISKKINIEEVAYVLVEINNDLNKSSGYLGAISDRSKELYFNKETVGENLWKQIQKNPHTSLKNQVFYRQDYLDEFEQIWETQAQFHPQLTLALKEQIRDVIIFYQRKLKSQKGLLSFCQFESWEIERKDENGNVILNKTTQLPKRQTVGRRVAPKSSPLFQEFKIWQNINNLEVTKISEGASKNKKETETLSDDERKLLFEELNLRGNLSQKEVLQILGLKDKEYKTNFSEGLEGNRTNAALFNIYQQIAENEGYGFDWSKKSAQEIKEELKAVFPQIGIQADILDFNANLDGKEFENQASYQLWHLLYSAEEDDKINEEDQIIYGNSAVSLKKKLCEKFGFTPEYAKWIANVSLQDDYGNLSTKAMRKIIPYLIDGNDYSEACALAGYNHSNSLTKEENDNRELLDKLELLPKNSLRNPVVEKILNQMVNVVNQVIETYGKPDEVRIELARELKKSAEKRAEMTKSINEATRRNEDIKKLITKDFGIPNPTKSDVVRYRLWEELAPLAYKDVFTGKQIKKEDLFSSKIDIEHIIPKALLFDDSFSNKTLVFRETNLKKADRTAYDFIESDYNATLDDYIQRVETLYNNTKGTISKGKRNKLLMAQKNLPDGFIERDLRNSQYIAKKAKAMLYQVFKDVNVTSGSITDRLREDWDLINVMKELNFPKYKALGLTEIEERYDIGQEKTKRVEVITDWTKRNDHRHHAMNALTVAFTTSSHIQYLNYLNARKNESHKEHKNIKGIENKITHKQKDKRKFIPPMPNFREEAKKHIETILVSIKNKNKVYTKNINKTKKKSGHNTKEQLTPRGQLHKETVYGKSKRPMSKPTKINKNFSLEQAQLIINVQEKELVLRHLAQFDNNPAVAFDTKTLKKMPLLKNGEPLKEVLCFEEIFTIRKDITPDLKIEKVVDEKIKAILEQRKKDFGGNAKEAFSDLDKNPIWLNKKKGICIKRVTITGVSNAEALHHQKDHLGREILDDNGNPIPADFVSTGNNHHLAVYLDSEGKLQDNIVSFYEAVVRTSQGLPVVDKGLNKDLGWKFLFSLKQNEMFVFPNDDFDINDFDLLDDKKAELISKHLYRVQKISKVSAGNSFVRDIVFRHHLETTVKEVKELKDISYIQLKSLEGLRNIKKVRINHIGKIVQVGEY

SEQ ID NO: 412 - protein, 1400 aa, Riemerella anatipestifer
MKTILGLDLGTNSIGWALVKETENSNEKSEIIKLGVRVNPLTVDEKTNFEAGRPLSTNADRTAKRSARRNLQRYKLRRKNLIDLLIKHRLIDKDTPLTEIGKNTTHQTLELRAKAARERIELEDLARVFLAINKKRGYRSSRKVNNEEEGQVVDGMAVAKKLYDENLTPGQYAYELLSKGKKYVPDFYRSDLQAEFDSIWEYQKQFYADILDDELYNALKGQGQQNSRKRFLAIKGVYTAENKGKRDEVKLQHYKWRSEAITQKLSIEEVAYVLVEINNDLNKSSGYLGAISDRSKELYFNKETVGENLWKQIQKNPHTSLKNQVFYRQDYLDEFEQIWETQAQFHPQLTLALKEQIRDVVIFYQRKLKSQKGLLSFCQFESWEIERKDENGNVILNKTTQLPKRQTVGRRVAPKSSPLFQEFKIWQNINNLEIAKISDGNSKNKKETEALSDDERKLLFEELNLRGNLSQKEVLQILGLKDKEYKTNFPEGLEGNRTNAALFNIYQQIAENEGYGDWTKKSAQEIKEELKAVFPQIGIQADILDFNAELDGKEFENQASYQLWHLLYSAEEDDKINEEDQIIYGNSAVSLKKKLCEKFGFTPEYAKWIANVSLQDDYGNLSTKAMRKIIPYLIDGNDYSEACALAGYNHSNSLTKEENDNRERLNKLELLPKNSLRNPVVEKILNQMVNVVNQVIETYGKPDEVRIELARELKKSAEERAEMTKGINEATRRNEDIKKLITKNFGIPNPTKNDVVRYRLWEELAPLAYKDVFTGRQIKKEDLFSSKIDIEHIIPKALLFDDSFSNKTLAFRETNLKKADRTAYGFIESDYNATLDDYIQRVETLYNNAKGTISKGKRNKLLMAQKNLPDGFIERDLRNSQYIAKKAKSMIEKVFNDVNVTSGSITDRLREDWDLINVMKELNFPKYKALGLTEIEERYDIGQEKTKKVEVITDWTKRNDHRHHAMDALTVAFTTKSHVQYLNNLNTIHSLKGDEVDLELSKLYGLKNTITEVVNKKRKFIPPMPNFREEAKKHIETILVSIKNKNKVYTKNINKTKKESGYHTKEQLTPRGQLHKETVYGKSKRPMNKPTKINKNFSLEQAQLIINVQEKELVLRHLAQFDNNPAVAFDTKTLKKMPLLKNGEPLKEVLCFEEIFTIRKDITPDLKIEKVVDEKIKAILEQRKKDFGGNAKEAFSDLDKNPIWLNKEKGICIKRVTITGVSNAEALHHQKDHLGREILDDNGNPIPADFVSTGNNHHVAIYEDEKGKLQEKVVSLYEAVARANQGLPVVDKGLNEDLGWKFLFTMKQNEMFVFPNDDFDVNDIDLLDENNAKIISQHLFRVQKLATKNYMFRHHLETNVQEVKELNDIAYKSIRSTEPLKNIKKVRINHIGKIVQVGEY

SEQ ID NO: 413 - protein, 1140 aa, Roseburia intestinalis
  source 1..1140: note = Roseburia intestinalis L1-82
MRENGSDERRRNMDEKMDYRIGLDIGIASVGWAVLQNNSDDEPVRIVDLGVRIFDTAEIPKTGESLAGPRRAARTTRRRLRRRKHRLDRIKWLFENQGLINIDDFLKRYNMAGLPDVYQLRYEALDRKLTDEELAQVLLHIAKHRGFRSTRKAETAAKENGAVLKATDENQKRMQEKGYRTVGEMIYLDEAFRTGCSWSEKGYILTPRNKAENYQHTMLRAMLVEEVKEIFSSQRRLGNEKATEELEEKYLEIMTSQRSFDLGPGMQPDGKPSPYAMEGFSDRVGKCTFLGDQGELRGAKGTYTAEYFVALQKINHTKLVNQDGETRNFTEEERRALTLLLFTQKEVKYAAVRKKLGLPEDILFYNLNYKKAATKEEQQKENQNTEKAKFIGMPYYHDYKKCLEERVKYLTENEVRDLFDEIGMILTCYKNDDSRTERLAKLGLVPIEMEGLLAYTPTKFQHLSMKAMRNIIPFLEKGMTYDKACEEAGYDFKADSKGTKQKLLTGENVNQTINEITNPVVKRSVSQTVKVINAIIRTYGSPQAINIELAREMSKTFEERRKIKGDMEKRQKNNEDVKKQIQELGKLSPTGQDILKYRLWQEQQGICMYSGKTIPLEELFKPGYDIDHILPYSITFDDSFRNKVLVTSQENRQKGNRTPYEYMGNDEQRWNEFETRVKTTIRDYKKQQKLLKKHFSEEERSEFKERNLTDTKYITTVIYNMIRQNLEMAPLNRPEKKKQVRAVNGAITAYLRKRWGLPQKNRETDTHHAMDAVVIACCTDGMIQKISRYTKVRERCYSKGTEFVDAETGEIFRPEDYSRAEWDEIFGVHIPKPWETFRAELDVRMGDDPKGFLDTHSDVALELDYPEYIYENLRPIFVSRMPNHKVTGAAHADTIRSPRHFKDEGIVLTKTALTDLKLDKDGEIDGYYNPQSDLLLYEALKKQLLLYGNDAKKAFAQDFHKPKADGTEGPVVRKVKIQKKQTMGVFVDSGNGIAENGGMVRIDVFRVNGKYYFVPVYTADVVKKVLPNRASTAHKPYGEWKVMEDKDFLFSLYSRDLIHIKSKKDIPIKMVNGGMEGIKETYAYYIGADISAANIQGIAHDSRYKFRGLGIQSLDVLEKCQIDVLGHVSVVRSEKRMGFS

SEQ ID NO: 414 - protein, 1128 aa, Roseburia intestinalis
  source 1..1128: note = Roseburia intestinalis M50/1
MDEKMDYRIGLDIGIASVGWAVLQNNSDDEPVRIVDLGVRIFDTAEIPKTGESLAGPRRAARTTRRRLRRRKHRLDRIKWLFENQGLINIDDFLKRYNMAGLPDVYQLRYEALDRKLTDEELAQVLLHIAKHRGFRSTRKAETAAKENGAVLKATDENQKRMQEKGYRTVGEMIYLDEAFRIGCSWSEKGYILTPRNKAENYQHTMLRAMLVEEVKEIFSSQRRLGNKKATEELEEKYLEIMTSQRSFDLGPGMQPDGKPSPYAMEGFSDRVGKCTFLGDQGELRGAKGTYTAEYFVALQKINHTKLVNQDGETRNFTEEERRALTLLLFTQKEVKYAAVRKKLGLPEDILFYNLNYKKAATKEEQQKENQNTEKAKFIGMPYYHDYKKCLEERVKYLTENEVRDLFDEIGMILTCYKNDDSRTERLAKLGLVPIEMEGLLAYTPTKFQHLSMKAMRNIIPFLEKGMTYDKACEEAGYDFKADSKGTKQKLLTGENVNQTINEITNPVVKRSVSQTVKVINAIIRTYGSPQAINIELAREMSKTFEERRKIKGDMEKRQKNNEDVKKQIQELGKLSPTGQDILKYRLWQEQQGICMYSGKTIPLEELFKPGYDIDHILPYSITFDDSFRNKVLVTSQENRQKGNRTPYEYMGNDEQRWNEFETRVKTTIRDYKKQQKLLKKHFSEEERSEFKERNLTDTKYITTVIYNMIRQNLEMAPLNRPEKKKQVRAVNGAITAYLRKRWGLPQKNRETDTHHAMDAVVIACCTDGMIQKISRYTKVRERCYSKGTEFVDAETGEIFRPEDYSRAEWDEIFGVHIPKPWETFRAELDVRMGDDPKGFLDTHSDVALELDYPEYIYENLRPIFVSRMPNHKVTGAAHADTIRSPRHFKDEGIVLTKTALTDLKLDKDGEIDGYYNPQSDLLLYEALKKQLLLYGNDAKKAFAQDFHKPKADGTEGPVVRKVKIQKKQTMGVFVDSGNGIAENGGMVRIDVFRVNGKYYFVPVYTADVVKKVLPNRASTANKPYSEWRTMEDKDFLFSLYSRDLVHIKSKKGIPIKNVDGSLGESKEVYAYYIGADISGAKIEGKAHDSRYTFRGIGVQKLELIEKCQVDILGHISTVKNEKRMGFS

SEQ ID NO: 415 - protein, 1152 aa, Roseburia inulinivorans
  source 1..1152: note = Roseburia inulinivorans DSM 16841
MNAEHGKEGLLIMEENFQYRIGLDIGITSVGWAVLQNNSQDEPVRITDLGVRIFDVAENPKNGDALAAPRRDARTTRRRLRRRRHRLERIKFLLQENGLIEMDSFMERYYKGNLPDVYQLRYEGLDRKLKDEELAQVLIHIAKHRGFRSTRKAETKEKEGGAVLKATTENQKIMQEKGYRTVGEMLYLDEAFHTECLWNEKGYVLTPRNRPDDYKHTILRSMLVEEVHAIFAAQRAHGNQKATEGLEEAYVEIMTSQRSFDMGPGLQPDGKPSPYAMEGFGDRVGKCTFEKDEYRAPKATYTAELFVALQKINHTKLIDEFGTGRFFSEEERKTIIGLLLSSKELKYGTIRKKLNIDPSLKFNSLNYSAKKEGETEEERVLDTEKAKFASMFWTYEYSKCLKDRTEEMPVGEKADLFDRIGEILTAYKNDDSRSSRLKELGLSGEEIDGLLDLSPAKYQRVSLKAMRKMQPYLEDGLIYDKACEAAGYDFRALNDGNKKHLLKGEEINAIVNDITNPVVKRSVSQTIKVINAIIQKYGSPQAVNIELAREMSKNFQDRTNLEKEMKKRQQENERAKQQIIELGKQNPTGQDILKYRLWNDQGGYCLYSGKKIPLEELFDGGYDIDHILPYSITFDDSYRNKVLVTAQENRQKGNRTPYEYFGADEKRWEDYEASVRLLVRDYKKQQKLLKKNFTEEERKEFKERNLNDTKYITRVVYNMIRQNLELEPFNHPEKKKQVWAVNGAVTSYLRKRWGLMQKDRSTDRHHAMDAVVIACCTDGMIHKISRYMQGRELAYSRNFKFPDEETGEILNRDNFTREQWDEKFGVKVPLPWNSFRDELDIRLLNEDPKNFLLTHADVQRELDYPGWMYGEEESPIEEGRYINYIRPLFVSRMPNHKVTGSAHDATIRSARDYETRGVVITKVPLTDLKLNKDNEIEGYYDKDSDRLLYQALVRQLLLHGNDGKKAFAEDFHKPKADGTEGPVVRKVKIEKKQTSGVMVRGGTGIAANGEMVRIDVFRENGKYYFVPVYTADVVRKVLPNRAATHTKPYSEWRVMDDANFVFSLYSRDLIHVKSKKDIKTNLVNGGLLLQKEIFAYYTGADIATASIAGFANDSNFKFRGLGIQSLEIFEKCQVDILGNISVVRHENRQEFH

SEQ ID NO: 416 - protein, 1156 aa, Ruminococcus albus
  source 1..1156: note = Ruminococcus albus 8
MGNYYLGLDVGIGSIGWAVINIEKKRIEDFNVRIFKSGEIQEKNRNSRASQQCRRSRGLRRLYRRKSHRKLRLKNYLSIIGLTTSEKIDYYYETADNNVIQLRNKGLSEKLTPEEIAACLIHICNNRGYKDFYEVNVEDIEDPDERNEYKEEHDSIVLISNLMNEGGYCTPAEMICNCREFDEPNSVYRKFHNSAASKNHYLITRHMLVKEVDLILENQSKYYGILDDKTIAKIKDIIFAQRDFEIGPGKNERFRRFTGYLDSIGKCQFFKDQERGSRFTVIADIYAFVNVLSQYTYTNNRGESVFDTSFANDLINSALKNGSMDKRELKAIAKSYHIDISDKNSDTSLTKCFKYIKVVKPLFEKYGYDWDKLIENYTDTDNNVLNRIGIVLSQAQTPKRRREKLKALNIGLDDGLINELTKLKLSGTANVSYKYMQGSIEAFCEGDLYGKYQAKFNKEIPDIDENAKPQKLPPFKNEDDCEFFKNPVVFRSINETRKLINAIIDKYGYPAAVNIETADELNKTFEDRAIDTKRNNDNQKENDRIVKEIIECIKCDEVHARHLIEKYKLWEAQEGKCLYSGETITKEDMLRDKDKLFEVDHIVPYSLILDNTINNKALVYAEENQKKGQRTPLMYMNEAQAADYRVRVNTMFKSKKCSKKKYQYLMLPDLNDQELLGGWRSRNLNDTRYICKYLVNYLRKNLRFDRSYESSDEDDLKIRDHYRVFPVKSRFTSMFRRWWLNEKTWGRYDKAELKKLTYLDHAADAIIIANCRPEYVVLAGEKLKLNKMYHQAGKRITPEYEQSKKACIDNLYKLFRMDRRTAEKLLSGHGRLTPIIPNLSEEVDKRLWDKNIYEQFWKDDKDKKSCEELYRENVASLYKGDPKFASSLSMPVISLKPDHKYRGTITGEEAIRVKEIDGKLIKLKRKSISEITAESINSIYTDDKILIDSLKTIFEQADYKDVGDYLKKTNQHFFTTSSGKRVNKVTVIEKVPSRWLRKEIDDNNFSLLNDSSYYCIELYKDSKGDNNLQGIAMSDIVHDRKTKKLYLKPDFNYPDDYYTHVMYIFPGDYLRIKSTSKKSGEQLKFEGYFISVKNVNENSFRFISDNKPCAKDKRVSITKKDIVIKLAVDLMGKVQGENNGKGISCGEPLSLLKEKN

SEQ ID NO: 417 - protein, 1341 aa, Ruminococcus lactaris
  source 1..1341: note = Ruminococcus lactaris ATCC 29176
MGKGYYVGLDMGTGSVGWAVTDESYQILRRHGKAMWGVRLFESAKTAEERRMFRTGRRRLDRRGWRIEILQEIFAEEISRVDPGFFLRMKESKYYPEDKRDIQGNCPELPYTLFVDKTFTDKDFHKKYPTIYHLRKMLMETEDTPDMRLVYLALHHMMKHRGHFLLSGDISQVTEFKNTFNQFIENIRNEEMDFEIELDESAVQMIEETLKDKNLTRSAKKSKLVKGLNAKNVRDKAFLTLLSGGTVKLSDLFGMEELNEGERPKISFADNGYEEYAAVVEMELGELYYIVESAKAVYDWAILSDILGGSTSVSDAKVRAYEKHKADLKYLKAVVKEYFPKEVYNAVFVESSDKLNNYPAYIGMTKKNGKKVSLEGKRCSREEFMDFLKKNIVVKLPDEEAKMYLQSELEKDSFLPKQVNKDNGVIPYQVHKYELKKILDNLGDKIPFLKENAEKIEKLFSFRIPYYVGPLRTGNGENSKFAWAERKSTEKIYPWNFENVIDVEQSAENFIRRMTNKCTYLIGEDVLPKDSLLYSKFMVLNELNNLRLDGQKISVELKQKIYRDVFCRSRKVTQKKLKSYLIREGIAGKNVELTGIDGDFKGSLTAYHDFKEKLIDVELTQKEKEEIILNIVLFGDDKKLLKQRLKKKFPQLTEKQINTVTALSYKGWGRLSKKLLEEVTVPAPETGEVWNIITALWETNDNFMQLLSKEYQFSDRIEEFNEEKADPEVSYQTIEDLYVSPAVKRQIWQTLQIIQEIEKVMGEKPKRVFVEMAREKQENKRTESRKKTLSDLYTKCKKEEPEWIEALCTSLEKHEEHQLRSDKLYLYYTQKGRCMYSGEPIDLEDLWDNTKYDIDHIYPQSKTMDDSLKNRVLVKKEYNAKKSDTYPIAADIQKKMMPFWKSLLTGGFIPKEKYDRLVRNNPLDANELAGFIERQIVETRQSTKAVAEILKKILPDTEIVYVKAKTVSKFRQDFDFIKVRDMNDLHHAKDAYLNIVVGNVYFVKFTKNAAWFVKENPGRTYNLEKMFIWDVARDGEIAWKAGKSGSIVQVRAMMEKNHILVTRRSYEVKGGLFDQQILKKGKGQVPVKESDERLRDIGKYGGYNKAAGVYFMLVSSKDKKGKEQRTIEFVPIYLKDRVEKDMESARNYLMEERGLREPKILIKKIKIDTLFKVDGFYMWLSGRTSNQLIFKGANQLILSKEDMKTLKKVVKYIQRQKEDKNVKISMRDGITEEELLKLYETFLDKIRHSIYGARLSSQEKTLVNGKEKFIDLSVEAKCQVLYEILHLFQCQSGAANLKMIGGPASAGILVMNNNISKCKNISIVNQSPTGIYEKEIDLLRV

SEQ ID NO: 418 - protein, 1471 aa, Scardovia wiggsiae
  source 1..1471: note = Scardovia wiggsiae F0424
MGYKAPRNDKGEIDYGVGLDLGNGSVGWVAMDKDYHLIRARGHELIGARLFDPANSAENRRESRTTRRRLSRRRWRLRMLDSLFASELAKIDPNFLARRKYSWVHPKDEQNHENWYGSIIFGSKEQDKQFYKDYPTIYHLRKKLTEDTERHDIREIYVAIHHIVKYRGHFLREGEINSENLFDPEGFVELIKDVIKLNNSYDESTPIFEASPADVSEALLNEHTSRSGRIEDTLDKLDFSVSRVDKHELKGMRDAAKAVIGAIVGNTADFSKIFNLDNLDKDSKDNLKLKFADSNFDEKYGGVVGSGLLDETQIELVDRIHAVYDAVALKGILGDAHTISEAKVESYEKHRKNWKLIKEELRTKENKDEVDLWYGDLSGRQYKNPPDPEKGPDEGSKKDSPIRDSDQKQNLIKKANDYFTELIDDSQLSEEQKNCLKNDINNGQLFPVQRSSDNGVIPYQIHLNELRRIIENQKQYYPFLAETFIRKTAEGKSYEENKIVALLKFRVPYYVGPLVSKEDMEEHSSGNSAYHWMARNPGRGEAITPWNFDEVVDKDESGARFISRLTGTDTYLLGEPTLPQHSLLYEEYMVLSELNNVRLNVRQGNHWSDKNRQRLSYKQKEFLIENLFKEHKTVTRKRAEDCLSSMGCGEVQLFGLSDEKKFASSLSSYITLKKILGKAFVDDSGNSAILERIIEVQTVFEDREPLTHQLSLIDSLTVEQRKQLAKIHYTGWGKLSRKLLTSKKGSYKIHSQNEIMRTQHSIIDIMRGDSLNLIEIIRDKKIGIGEWIDNENLDRETGESDVSRLESVFEGIVMSPRVKRGVVQAVRVIDDLAKAIGNPPQRIFIEMADEVQASQRTVSRLSRLKALYGSPSLQKEFNDLKDLRKSLNETKDADLQEDRLYLYYIQLGKDLYTGKEISIDSLSSAYDIDHIVPQALTQDDSIDNRVLVSRKENARKTDSYLYTPDLIKNMRPLWGKLLAAGLMSQKKYDALTRVDDFKDREKQRFVQRSLVETRQIMKNVSTILRTYYGEDTNVVTLKSSITHDMRKYLGFPYKNRDINDYHHAQDALCISAAGQFMLNRHFVSGGEVTDGASNAYNMYLAEYLQEFRDAKARGERKRSTAFGFVVGSMSSKDDEKRTDHRTGEIVWSETNAEYLRKVMNYKKMLITQKVGDVKTRALYDETRYGHKESSAKSIKFDNLRRDTSLYGGFSGASTAYMMLVEYKKKNKLVSITAQEASLLAVADQKNDTVSVMDGILASHGLSGAKILLPKIVTGQLLDYSDALVTLQSASELNTARQMWLPRNDYNDIDIILKSKDIEDAAHKLGYDSDTVHVLRRIQKLFEAVFRVAESQFPLHQLSKDQQEEILRDPQNYGFGSAVKLLGGLLKALHANAENTNLAGLVKVLHGDKEYSDDGKAKEFKKFGFSPRWRRISNPTGFTLSDSDTFIYQSPSGIFEQRVTVKELKEKADKQK

SEQ ID NO: 419 - protein, 1178 aa, Scardovia inopinata
  source 1..1178: note = Scardovia inopinata F0304
MGKRHNSNMAKKKISYRIGIDVGLNSTGLAAIEVDDDGAPIRILNTMSVIHDGGVDPDAAKVRGTRLAISGIARRTRRMRRRRAKRLDRLEQILEKYGYTDTEPVLEEPYGPWICRAELADGFINDDEQRRMMIGIAIRHIARHRGWRNPYQNVRALLNIDDSDLSEEYKNLKEKVQDQINDGKDLPNFTPSQLVRDYLDNFSGQPAARIRTGKAGPRGNRRDAVGILPQRMRQSDYAYELQRIFDMQKIGRDEAQELLMAVFEAKSPKGSAEKRIGKDPLTGKKRALKASLAFQKYRIVATITNLRIKTGTGSERMLSPTELNDIYTYLLRVQDDNHLPTWEDICEEVLHIGRYQLAGIGKTFEGGERISNMPPVIQTSLAIHGLSEGTLAEKLTKWWDKADDDSRESMIKLLSNTVDIDRVNEVDENFASALDFIDSLDDEELTKLDKIALPRGRAAYSEEALNKLTADMLNTGDDLFSARQRIYHVNNSWRPPQPPIGEPLGNPAVDRVLKITNRYLMNCLNRWGQPRRVTIEHTRSGFTSVKQATEHQKISDKRAEYRRDIVKQLEEAGVESVHEYDIRRWEAVQRQNGQCLYCGRDITFKTCEMDHIVPRKGPGSTNTRTNFAAVCPECNRMKSNIPFASWAETKEAKDRGVSLDKAIKQVRFFNFTKNEYSPQAQRNFKKSMIERLKQKTSDEPLDNRSIESVSWMADELYKRIDWYFNHEQYETSKKAINDDKDNLSGTQVVVYPGSITAEARNAAGLGGNIHFIGGRYKTRLDRRHHAVDACVIAMMEPGIARILTERNQLRQAQRLTARIEDDEVNWKDYPTENTAGYNKYQAWSDRMHALLEYMNNALDYDKIPVVRWERLQLGNRSAHEDTIHPLKKLPLSHEISAIDINHASTPALYEALVSLPDFSEQDGLPADPSRQINVNGERYSGDDLVSFFNSNAAQIAIQGGSAELGTAFHHARIYRCWTVGKNGKKKIFFGMIRVYQHDLLHAKNEDLFTYPLKRSSVSMRYAKKEVVHAILSGNAEYVGYLCVGDELVLDLKGDKSNDEGGSRLSGQVGEFVQKFEEDSKVNSQIVNRWTVDGFPDEAKLRLRPSMFAGEGLKNMKSELVENAAIKNILSKTGWRVSVDVISKKSPVVLRRNAFGEPRWKTNAGLPVSYRWQDTETKE

SEQ ID NO: 420 - protein, 1063 aa, Simonsiella muelleri
  source 1..1063: note = Simonsiella muelleri ATCC 29453
MEKFHYVLGLDLGIASVGWAAIEIDKETETSIGLLDCGVRTFERAEVPKTGDSLAKARREARSTRRLIRRRSHRLLRLKRLLKREIFRQPETFKDLPINAWQLRVKGLDSRLNEYEWAAVLLHLVKHRGYLSQRKSEMSETDSKSEMGRLLAGVAENHQLLQQEQYRTPAELALKKFVKHFRNKGGDYAHTFNRLDLQAELHLLFQKQRELGNPFTSPELERQVDDLLMTQRSALQGDAILKMLGHCGFEPEQFKAAKNTFSAERFIWLTKLNNLRIQDQGKERALTADERTKLLDEPYKKSKLTYAQVRKLLSLPQTAIFKGLRYDLEHDKKAENSTLMEMKSYHNIRQTLEKSGLKTEWQSIATQPEILDAIGTAFSIYKTDEDISHELKTCRLPENVLNELLKNINFDGFIQLSLTALRKILPLMEQGYRYDEACTQIYGNHHSGSLQQESKQFLPHIPIDDVRNPVVFRTLTQARKVVNAIIRRYGSPARVHIEMARELGKSKSDRDRIEKQQQKNKKERENAVAKFKEDFPDFVGEPRGKDILKMRLYEQQHGKCLYSGHDIDINRLNEKGYVEIDHALPFSRTWDDSQNNKVLVLGSENQNKRNQTPDEYLDGANNSQRWLEFQARVQTCHFSYGKKQRIQLAKLDDETEKGFLERNLNDTRYIARFMCQFVQENLYLTGKGKRLVFASNGGMTATLRNLWGLRKVREDNDRHHALDAIVVACSTASMQQKITKAFQRHESIEYVDTETGEVKFRIPQPWDFFRQEVMIRVFSDQPCEDLVEKLSARPEALHDNVTPLFVSRAPNRKMSGQGHLETIKSAKRLSEENSMVKKPLTTLKLKDIPEIVGYPSREPQLYAALKTRLETHDDDPIKAFAKPFYKPNKNGELGALVRSVRVKGVQNTGVMVHDGKGIADNATMVRVDVYTKAGKNYLVPVYVWQVAQGILPNRAVTSGKSEADWDLIDESFEFKFSLSRGDLVEMISNKGRIFGYYNGLDRANGSIGIREHDLEKSKGKDGVHRVGVKTATAFNKYHVDPLGKEIHRCSSEPRPTLKIKSKK

SEQ ID NO: 421 - protein, 1327 aa, Solobacterium moorei
  source 1..1327: note = Solobacterium moorei F0204
MEGQMKNNGNNLQQGNYYLGLDVGTSSVGWAVTDTDYNVLKFRGKSMWGARLFDEASTAEERRTHRGNRRRLARRKYRLLLLEQLFEKEIRKIDDNFFVRLHESNLWADDKSKPSKFLLFNDTNFTDKDYLKKYPTIYHLRSDLIHNSTEHDIRLVFLALHHLIKYRGHFIYDNSANGDVKTLDEAVSDFEEYLNENDIEFNIENKKEFINVLSDKHLTKKEKKISLKKLYGDITDSENINISVLIEMLSGSSISLSNLFKDIEFDGKQNLSLDSDIEETLNDVVDILGDNIDLLIHAKEVYDIAVLTSSLGKHKYLCDAKVELFEKNKKDLMILKKYIKKNHPEDYKKIFSSPTEKKNYAAYSQTNSKNVCSQEEFCLFIKPYIRDMVKSENEDEVRIAKEVEDKSFLTKLKGTNNSVVPYQIHERELNQILKNIVAYLPFMNDEQEDISVVDKIKLIFKFKIPYYVGPLNTKSTRSWVYRSDEKIYPWNFSNVIDLDKTAHEFMNRLIGRCTYTNDPVLPMDSLLYSKYNVLNEINPIKVNGKAIPVEVKQAIYTDLFENSKKKVTRKSIYIYLLKNGYIEKEDIVSGIDIEIKSKLKSHHDFTQIVQENKCTPEEIERIIKGILVYSDDKSMLRRWLKNNIKGLSENDVKYLAKLNYKEWGRLSKTLLTDIYTINPEDGEACSILDIMWNTNATLMEILSNEKYQFKQNIENYKAENYDEKQNLHEELDDMYISPAARRSIWQALRIVDEIVDIKKSAPKKIFIEMAREKKSAMKKKRTESRKDTLLELYKSCKSQADGFYDEELFEKLSNESNSRLRRDQLYLYYTQMGRSMYTGKRIDFDKLINDKNTYDIDHIYPRSKIKDDSITNRVLVEKDINGEKTDIYPISEDIRQKMQPFWKILKEKGLINEEKYKRLTRNYELTDEELSSFVARQLVETQQSTKALATLLKKEYPSAKIVYSKAGNVSEFRNRKDKELPKFREINDLHHAKDAYLNIVVGNVYDTKFTEKFFNNIRNENYSLKRVFDFSVPGAWDAKGSTFNTIKKYMAKNNPIIAFAPYEVKGELFDQQIVPKGKGQFPIKQGKDIEKYGGYNKLSSAFLFAVEYKGKKARERSLETVYIKDVELYLQDPIKYCESVLGLKEPQIIKPKILMGSLFSINNKKLVVTGRSGKQYVCHHIYQLSINDEDSQYLKNIAKYLQEEPDGNIERQNILNITSVNNIKLFDVLCTKFNSNTYEIILNSLKNDVNEGREKFSELDILEQCNILLQLLKAFKCNRESSNLEKLNNKKQAGVIVIPHLFTKCSVFKVIHQSITGLFEKEMDLLK

SEQ ID NO: 422 - protein, 1179 aa, Sphaerochaeta globosa
MSKKVSRRYEEQAQEICQRLGSRPYSIGLDLGVGSIGVAVAAYDPIKKQPSDLVFVSSRIFIPSTGAAERRQKRGQRNSLRHRANRLKFLWKLLAERNLMLSYSEQDVPDPARLRFEDAVVRANPYELRLKGLNEQLTLSELGYALYHIANHRGSSSVRTFLDEEKSSDDKKLEEQQAMTEQLAKEKGISTFIEVLTAFNTNGLIGYRNSESVKSKGVPVPTRDIISNEIDVLLQTQKQFYQEILSDEYCDRIVSAILFENEKIVPEAGCCPYFPDEKKLPRCHFLNEERRLWEAINNARIKMPMQEGAAKRYQSASFSDEQRHILFHIARSGTDITPKLVQKEFPALKTSIIVLQGKEKAIQKIAGFRFRRLEEKSFWKRLSEEQKDDFFSAWTNTPDDKRLSKYLMKHLLLTENEVVDALKTVSLIGDYGPIGKTATQLLMKHLEDGLTYTEALERGMETGEFQELSVWEQQSLLPYYGQILTGSTQALMGKYWHSAFKEKRDSEGFFKPNTNSDEEKYGRIANPVVHQTLNELRKLMNELITILGAKPQEITVELARELKVGAEKREDIIKQQTKQEKEAVLAYSKYCEPNNLDKRYIERFRLLEDQAFVCPYCLEHISVADIAAGRADVDHIFPRDDTADNSYGNKVVAHRQCNDIKGKRTPYAAFSNTSAWGPIMHYLDETPGMWRKRRKFETNEEEYAKYLQSKGFVSRFESDNSYIAKAAKEYLRCLFNPNNVTAVGSLKGMETSILRKAWNLQGIDDLLGSRHWSKDADTSPTMRKNRDDNRHHGLDAIVALYCSRSLVQMINTMSEQGKRAVEIEAMIPIPGYASEPNLSFEAQRELFRKKILEFMDLHAFVSMKTDNDANGALLKDTVYSILGADTQGEDLVFVVKKKIKDIGVKIGDYEEVASAIRGRITDKQPKWYPMEMKDKIEQLQSKNEAALQKYKESLVQAAAVLEESNRKLIESGKKPIQLSEKTISKKALELVGGYYYLISNNKRTKTFVVKEPSNEVKGFAFDTGSNLCLDFYHDAQGKLCGEIIRKIQAMNPSYKPAYMKQGYSLYVRLYQGDVCELRASDLTEAESNLAKTTHVRLPNAKPGRTFVIIITFTEMGSGYQIYFSNLAKSKKGQDTSFTLTTIKNYDVRKVQLSSAGLVRYVSPLLVDKIEKDEVALCGE

SEQ ID NO: 423 - protein, 1426 aa, Sphingobacterium spiritivorum
  source 1..1426: note = Sphingobacterium spiritivorum ATCC 33861
MKHILGLDLGTNSIGWALIKQDFENKQGEILGMGSRIIPMSQDILGDFGKGNSVSQTAERTKYRSVRRLRERFLLRRERLHRILNVLGFLPEHYASQIDFTKRFGKFKEETEPKLVYSNEGFIFKKSFEEMLSDFKTHQPQLLEDNKKIPYDWTIYYLRKKALSRKIEKEELAWILLNFNQKRGYYQLRGEEEEENPNKLIEFYSLKIVDVLADEPQKGKSDIWYSLILENGWIYRRSSKTPLFDWKEKTRDFIVTIDLNDDGSVKTDKEGNEKRSFRAPGENDWTLVKKKTEQEIDSSRKTVGTYIYETLLKNPKQKIKGKLVRTIERKFYKTELKQILEKQKEFHPELRQDDLYSDCVRELYKNNEAHQLTLSKKDFVHLFMEDIIFYQRPLGSQKSSISNCTLEFRKYKDENGTEHTQYLKAIPKSNPYYQEFRIWQWMYNLNIYKKEDDTNVTKDFLNTKADFESLFEFLNNRKEVDQKALLKHFKLNDKTHRWNYVEDKKYPCNETKTMILSRLDKVENISDDFLTREMEQKIWHIIYSVNDKVEYEKALKSFAGKNNLEDNSFFEAFKKFPPFKSEYGAFSEKAIKKLLPLMRMGKFWNYNNISEQSKSRIQKIITGEYDENIKDKVREKAIHLTTETDFQGLQLWLVQYIVYGRHSEAAMLGKWNSADDLEEFLKEFKQHSLRNPIVEQVITETLRVVKDIWQKYGNGAKDFFREIHIELGREMKLPAEERERLTRQISENENTNFRIKALLAEMMDDNSVENVRPFSPMQQEILKIYEEGVLNSDIEIEDDILKISKTAQPSSSDLKRYKLWLEQKYKSPYTGQIIPLNKLFTPEYEIEHIIPQSRYFDDSFTNKIICESAVNKLKDNYIGLEFIKKLGGSIVECGNGKSVAILKHDAYEDFIKKHYANNRSKRNKLLLEDIPEKMIERQMNDTRYISKYISGVLSNIVRVEDGTDEGVNSKNIVPGNGKITTQLKQDWGLNDVWNDLILPRFERMNHLTNSTDFTAWNENHQKFLPTVPVEFSKGFSKKRIDHRHHALDALVIACATKDHVNLLNNQSAKSDTKRYDLKKKLMKFEKVAYNHPQTGERIEREAPKQFLKPWETFTIDAKNHLETIIVSFKQNLRVINKATNYYEKYVEKEGTKVKERVEQKGTNWAIRKPMHKETVSGKIDLPRIKVPKGKILTATRKSLDTSFNLKTIGSITDTGIQKILKNYLQYKDNNPELAFSPEGIEDMNKNIEKFNNGKAHQSISKVRVFELGSKFPLGQSGNKKEKYVEAAKGTNLFFAIYQDKNGKRSYETIPLNEVIERQKQGLSVVDLKGVDDFYLSPNDLVYVPSEDELENISMIDFNKMSSERIYKVVSFTGNQIFFVRQDIATSVVNKAEFSTLNKMERAIDGTMIKETCVKLQIDRLGNISKI

SEQ ID NO: 424 - protein, 1110 aa, Sphingobium sp.
  source 1..1110: note = Sphingobium sp. AP49
MAEGKKRIWRLGADLGANSLGWAAIELSAPVNGKPIAILAAGSRIFSDGRDPKSGASLAVDRRDARAMRRRRDRFKQRQKALIKYLIADGLFPADEAARNAMAAIDPYAVRARALDEALSLPELGRALFHLNQRRGFKSNRKADRKADDDAGKIAIGIDRTRDAIAEDEADAGAEPGSWTFGKWLHERRLKGQSVRTRLRPESGEDAKGDGYDFYPDRALMEEEFDAIWAAQAPHHPDVLTNDVHDRLHEIIFYQRPLKAPQVGMCSLIPGDRRLPKAHPLFQRRRLLEELNALMIVRPGEVAQRLTREERDILLLKLKDKNKVSFATLRKALKLDPDARFNKESEDRTDLKGDEVAAVMGSKTRFGNLWVHLSIEAQWDVLARLDAVESDAEDAAFCAWLVETYALTPEQARAVANAPLPPGYGRFGETATRKLIEALRDGKKDDRVLVYSEAVTEAGLGHHSDRRTGEVFEDAKGRPQLPYYGVALERHIMPGTGDPSDPEEMRVGRLTNPTVHIGLNQLRRILNVLIRAYGPPAEIAIELARELKLTDEDKKRINRENNDNRIAAERRSEKLLAIGQADSGANRALLKLWEELNPANVLDRRCIYSGRQISIDMLFSAAVEVDHILPFAATLDDSNGNKIVCLREANREKRKRSPHDAWGHSARWDEIAARAAQLPRNKRWRFEPDAMDKFRDEGGFQARHLVDTQYLARLSREYLATLYPEKGEGSGHIWVSPGRLTEMVRRKLGLNDLLPDHNFGGGADQAKNRLDHRHHAIDAVVVAIVDRGMLNAIARASGQEGAEGRERIIIPEPWDGFRDALRETVNRITVSHRTDHGTASKAGLPKGKDATAGRLHNDTAYGFTGDTDAKGNSIVVRRVPLSSFKKLADLDRIRDADLKAALYQHLNGLEGKAFEKALAEFHKLEWHNFGGVRRVRVTEPLTVIPIKDRNGRIYKGYKGDSNYRYDVWELPDGKWVTNWKNEAGEAMSSVISMFDAHQSSEPPRPHPAARKILSLHQNDLLAIEREGEDRKLMRVVKFGQSGQITLAEHQQAGDLKKRDAVSNDDDPFKYFAPTSGGLKKVKARQVRIDEIGRVLDPGFPARTARRKTRG

SEQ ID NO: 425 - protein, 1090 aa, Sphingomonas sp.
  source 1..1090: note = Sphingomonas sp. S17
MDWRLGLDLGANSLGWAALRLDRAGDPIGILAMGSRIFSDGRDPKSGASLAVDRRAARAMRRRRDRFKQRQAALLKYLIRDGLFPADQADRQRLADEDPYALRARALDEELSLFEIGRALFHLNQRRGFQSNRKADRGQDDEAGKIAVGVDRLNQQMEEQGARTLGEFLHQRRRAATDANHIPSVRTRLRPETGEGAKGDGYDFYPSRALIAEEFEEIWAAQAPHYPDTLTQQVHDRLYEIIFHQRPLRAPQVGQCTLVAGETRLPKAHPLFQKRRLLEEINALMIVRPGEIAQRLTPEERDTLYLKLKDKRTVSFATLRKTLKLDSAARFNKESENRTELKGDEVAAELGAKTRLGTRWQHLSGDQQWEVVHRLMALESQADEAAFRDWISQTYDLLPEQAAAVLGARLPQGHGRFGPTATTTLIDSLLHDRTEDGRVVVYSEAVQRSGLGHHSDLRHDRDDEDVTELPYYGVALERHIMPGTAEPTDPEEMRIGRLTNPTVHIGLNQLRHVVNRLIRAYGPPKEIAIELARELKLSEDEKKKRNSENRDNRLAAEGRSKKLEEIRQRDTGANRALLKLWEELNPGNVLDRRCIYTGEQISIDMLFSDRVEVDHILPFAQTLDDSNGNKLLCLREANREKRRRSPYEAWGHTDRWPDIAERASRLPKPKRWRFEPDAMQRFATEDGFLARHLVDTQYLGRLAREYLSWLYPGRGEGSGHVWVSPGRLTEMVRRKLGLNDLLPDHNFGGGADQPKNRLDHRHHAIDALVVAIVDRGMLQAIARASGQDGSEGRERIHIPAPWDGFRDDLRVAVNGIIVSHRPDHGTVAKAGLARGRDQTAGRLHNDTAYGLTGETDAKGNSIVVRRIPLSAIKKPADIARVRDPLLRNALAEFTKGLDGKAFEARIGRFHELGPLLYRGIRRVRVVETLTVIPIRDAEGRAYKGYKGDSNYRYDVWEMPDGKWRCQVVSMFDAHQSTEQARPHPAARKILSLQRNDILAIERTEGDRELVRVVKFSEKQFAVAPPHEGGSLKTRDGNADDPFRYLYPSPNTLKGWRARQVRIDELGRVLDPGFPARKSVRRTRPRAAPVD

SEQ ID NO: 426 - protein, 1084 aa, Sporolactobacillus vineae
  source 1..1084: note = Sporolactobacillus vineae DSM 21990 = SL153
MKYSIGLDIGISSVGWSVINLDRERIELMGARLFDAAENPKNGSSLAAPRRDARSARRRLRRRRYRVGRVRHFIIDRGLVTRGQADQLFDWKDGDLDIWLVRVNALERLLTDREFARVLIHIAKNRGYRSNRKSEAKSGENGQVLSAIKANKELMEEKGYQTVAEMLVNEPETFAGRKRNRGGEYTHVIARSELEHEIRLIFTKQRAFGNRFATEENENTYVKIWAAQRPVATKDDILKKIGDCTFEKGEKRAPKASYAFQYFRALDKLNRLRILSVREPSRNLTDDERNLIVPALFNHDKQKYSDLRKILQLRDDQKFNELFYDPGKSLKENENKTFLSLAEQYKIRKVIRDVQGKDGLLQYRPLDIDTIAYALTVFKDDQDTRDYLSNTFVNGNGKQVLNLANRAFDAELIDGLLSLSFAKFGHLSLKALHKLIPHMEQGLSYYDACKKVGYHDNEQVGKSKQHLLPVIPADEIRNPVVVRSLSQTRKVINAIIKRYGSPTFMYIELAREMGRPYNERRDLEKQYNKNRTVNDSAIEQIHELYPEIGAPRGHDILKYKLWQQQDCKCAYSLEKIPAEKIFEPGYAEVDHIIPYSRSFDDSNSNKVLVLSRMNQEKKNRTPYEWFGGDEHRWNKFESYVNALKVNRKKKSLLTKKNMDTEEEDTFKSRHLNDTRYITRFIKSFVEDNLLFREIEGAKQHVFTVNGAYTSLMRKRWGFNKNREESDLHHSVDAVIIAVSQPFRNEVSRYFKHREISLPQLLKRTWDYFPEPWEGFVKELRARTLQDPEKLKLALESLDLDSYDPEFIDEVKPIFISRMPKRSIKGQIHDETLRRNRGKTKDGFVKIVTRTRLENIKFDKNGDFPMYGRESDPKTYQAIKQRYLENNKDKKKAFIEPLYKPAKNPNNASLIRSVKIEDKANQIVPLRDEAVAYNASIVRTEVYRNKETGKFYLAPVYVSDVFAGREPRRFIRANVPYEQWVNITDKFTFLFNLYPNDVIYIKMKKVKTTKSNINKTISWQESYFYFKGTDIHTGAITIIDHMNSFTDRVGTQGLQLFEKYQVDPLGNLSRVHGETQYGVPALSHS

SEQ ID NO: 427 - protein, 1053 aa, Staphylococcus aureus; identical to SEQ ID NO: 28
  source 1..1053: note = Staphylococcus aureus subsp. aureus

SEQ ID NO: 428 - protein, 1054 aa, Staphylococcus lugdunensis
  source 1..1054: note = Staphylococcus lugdunensis M23590
MNQKFILGLDIGITSVGYGLIDYETKNIIDAGVRLFPEANVENNEGRRSKRGSRRLKRRRIHRLERVKKLLEDYNLLDQSQIPQSTNPYAIRVKGLSEALSKDELVIALLHIAKRRGIHKIDVIDSNDDVGNELSTKEQLNKNSKLLKDKFVCQIQLERMNEGQVRGEKNRFKTADIIKEIIQLLNVQKNFHQLDENFINKYIELVEMRREYFEGPGKGSPYGWEGDPKAWYETLMGHCTYFPDELRSVKYAYSADLFNALNDLNNLVIQRDGLSKLEYHEKYHIIENVFKQKKKPTLKQIANEINVNPEDIKGYRITKSGKPQFTEFKLYHDLKSVLFDQSILENEDVLDQIAEILTIYQDKDSIKSKLTELDILLNEEDKENIAQLTGYTGTHRLSLKCIRLVLEEQWYSSRNQMEIFTHLNIKPKKINLTAANKIPKAMIDEFILSPVVKRTFGQAINLINKIIEKYGVPEDIIIELARENNSKDKQKFINEMQKKNENTRKRINEIIGKYGNQNAKRLVEKIRLHDEQEGKCLYSLESIPLEDLLNNPNHYEVDHIIPRSVSFDNSYHNKVLVKQSENSKKSNLTPYQYFNSGKSKLSYNQFKQHILNLSKSQDRISKKKKEYLLEERDINKFEVQKEFINRNLVDTRYATRELTNYLKAYFSANNMNVKVKTINGSFTDYLRKVWKFKKERNHGYKHHAEDALIIANADFLFKENKKLKAVNSVLEKPEIESKQLDIQVDSEDNYSEMFIIPKQVQDIKDFRNFKYSHRVDKKPNRQLINDTLYSTRKKDNSTYIVQTIKDIYAKDNTTLKKQFDKSPEKFLMYQHDPRTFEKLEVIMKQYANEKNPLAKYHEETGEYLTKYSKKNNGPIVKSLKYIGNKLGSHLDVTHQFKSSTKKLVKLSIKPYRFDVYLTDKGYKFITISYLDVLKKDNYYYIPEQKYDKLKLGKAIDKNAKFIASFYKNDLIKLDGEIYKIIGVNSDTRNMIELDLPDIRYKEYCELNNIKGEPRIKKTIGKKVNSIEKLTTDVLGNVFTNTQYTKPQLLFKRGN

SEQ ID NO: 429 - protein, 1334 aa, Staphylococcus pseudintermedius
MGRKPYILSLDIGTGSVGYACMDKGFNVLKYHDKDALGVYLFDGALTAQERRQFRTSRRRKNRRIKRLGLLQELLAPLVQNPNFYQFQRQFAWKNDNMDFKNKSLSEVLSFLGYESKKYPTIYHLQEALLLKDEKFDPELIYMALYHLVKYRGHFLFDHLKIENLTNNDNMHDFVELIETYENLNNIKLNLDYEKTKVIYEILKDNEMTKNDRAKRVKNMEKKLEQFSIMLLGLKFNEGKLFNHADNAEELKGANQSHTFADNYEENLTPFLTVEQSEFIERANKIYLSLTLQDILKGKKSMAMSKVAAYDKFRNELKQVKDIVYKADSTRTQFKKIFVSSKKSLKQYDATPNDQTFSSLCLFDQYLIRPKKQYSLLIKELKKIIPQDSELYFEAENDTLLKVLNTTDNASIPMQINLYEAETILRNQQKYHAEITDEMIEKVLSLIQFRIPYYVGPLVNDHTASKFGWMERKSNESIKPWNFDEVVDRSKSATQFIRRMTNKCSYLINEDVLPKNSLLYQEMEVLNELNATQIRLQTDPKNRKYRMMPQIKLFAVEHIFKKYKTVSHSKFLEIMLNSNHRENFMNHGEKLSIFGTQDDKKFASKLSSYQDMTKIFGDIEGKRAQIEEIIQWITIFEDKKILVQKLKECYPELTSKQINQLKKLNYSGWGRLSEKLLTHAYQGHSIIELLRHSDENFMEILTNDVYGFQNFIKEENQVQSNKIQHQDIANLTTSPALKKGIWSTIKLVRELTSIFGEPEKIIMEFATEDQQKGKKQKSRKQLWDDNIKKNKLKSVDEYKYIIDVANKLNNEQLQQEKLWLYLSQNGKCMYSGQSIDLDALLSPNATKHYEVDHIFPRSFIKDDSIDNKVLVIKKMNQTKGDQVPLQFIQQPYERIAYWKSLNKAGLISDSKLHKLMKPEFTAMDKEGFIQRQLVETRQISVHVRDFLKEEYPNTKVIPMKAKMVSEFRKKFDIPKIRQMNDAHHAIDAYLNGVVYHGAQLAYPNVDLFDFNFKWEKVREKWKALGEFNTKQKSRELFFFKKLEKMEVSQGERLISKIKLDMNHFKINYSRKLANIPQQFYNQTAVSPKTAELKYESNKSNEVVYKGLTPYQTYVVAIKSVNKKGKEKMEYQMIDHYVFDFYKFQNGNEKELALYLAQRENKDEVLDAQIVYSLNKGDLLYINNHPCYFVSRKEVINAKQFELTVEQQLSLYNVMNNKETNVEKLLIEYDFIAEKVINEYHHYLNSKLKEKRVRTFFSESNQTHEDFIKALDELFKVVTASATRSDKIGSRKNSMTHRAFLGKGKDVKIAYTSISGLKTTKPKSLFKLAESRNEL

SEQ ID NO: 430 - protein, 1334 aa, Staphylococcus pseudintermedius; identical to SEQ ID NO: 429
  source 1..1334: note = Staphylococcus pseudintermedius ED99

SEQ ID NO: 431 - protein, 1112 aa, Staphylococcus simulans
  source 1..1112: note = Staphylococcus simulans ACS-120-V-Sch1
MLVGLKFKQSILFENMENAEDIKESATGSDAISLSDDYYENLSEFLTDEQLNFIESANTFFMGIMLDRILKGATSISAAKVRDYKIFKSQLKLIKDIVYQNKYDKYHEFFVTSKEDMRAYQENPDAKNFGKLSKFDQYLIHSKDQYAKLMKDLKGLVPKEYTEVLNLIDEQKFLVVQNTTDNASIPYQNNVFEAENILRNQQKYYPEITEEMIGKVINLISFRIPYYVGPLTNKNGQSDFAWMIRKSDEQTLPWNFDKVIDKSKSAEKFIRRMTSKCTYLLEEDVLPKHSLLYQEMEVLNELNNVQLRGENEPKHRIHRLDPKVKQFIYHNLFQKKKNVTHKDLITLLQNSEHRNTLNKTSGQKLKVFGTQNDSKFASKLSTYNDMKAILGSVENKRQMIEELVLWITIFEDKAILKQKIGEKYPNITEKQLNQIVKLNYSGWGRLSEKLLTKEVNGRSLIDLMYSTENNFMEIITDKTLGFDCFIKNSNKVKNAKISYKDVAELRTSPALKKGIWNAIKMVREISNLFGAPEKIIIEFATEDQAKGKRQKSRSELWDDLVKKNNLKRNKEFEGLFEELKAYPDLDFSNPKLWLYIHQNGKCMYTKKPIDLERLMSDTNNQLYEIDHILPRTFVKDDSINNKVLVIQSANQKKSGDKMPLEIFDNHVLVPFWKMLYENDLISSSKLSKLMKKEFNDLDKEGFIQRQLVETRQIISHVSDFLTEEYPSTTVVPMKANVVSELRRKFDIPKIRQLNDWHHAVDAYLNGFVYQAARVFYPKVNLFEFNFKWEKVREKWRQLGEFTENNKKREFFLFKRMENYVNEYGEGMISKLIFDLDNFKFNYSRKVESTESAFYKQSAFSPKNTTAQYDSDKNKTAIYKEMKNKRGIVVSYTYVKKDQELIGYGVFNETVFEYVNNADVDMNTRALKIVRKAFPKLDIKKAQYLFSINKGDALLVNGHPFLFVSAYERINGKQLEFDIAMQRKIKQALSPYNNMTEQEKVEFYNQFAEKVIEEFRNSIGLQSRDRKVNLIKNLFNNTEKSNDSMTQSILEVLKMTKVSAERSKELKIRWNGQTPNTFIDTKNNAEIQYKSITGLKTTKPKSIFKLAESKNEL

SEQ ID NO: 432 - protein, 1370 aa, Streptococcus agalactiae
  source 1..1370: note = Streptococcus agalactiae 2603V/R
MNKPYSIGLDIGTNSVGWSIITDDYKVPAKKMRVLGNTDKEYIKKNLIGALLFDGGNTAADRRLKRTARRRYTRRRNRILYLQEIFAEEMSKVDDSFFHRLEDSFLVEEDKRGSKYPIFATLQEEKDYHEKFSTIYHLRKELADKKEKADLRLIYIALAHIIKFRGHFLIEDDSFDVRNTDISKQYQDFLEIFNTTFENNDLLSQNVDVEAILTDKISKSAKKDRILAQYPNQKSTGIFAEFLKLIVGNQADFKKYFNLEDKTPLQFAKDSYDEDLENLLGQIGDEFADLFSAAKKLYDSVLLSGILTVIDLSTKAPLSASMIQRYDEHREDLKQLKQFVKASLPEKYQEIFADSSKDGYAGYIEGKTNQEAFYKYLSKLLTKQEDSENFLEKIKNEDFLRKQRTFDNGSIPHQVHLTELKAIIRRQSEYYPFLKENQDRIEKILTFRIPYYIGPLAREKSDFAWMTRKTDDSIRPWNFEDLVDKEKSAEAFIHRMTNNDFYLPEEKVLPKHSLIYEKFTVYNELTKVRYKNEQGETYFFDSNIKQEIFDGVFKEHRKVSKKKLLDFLAKEYEEFRIVDVIGLDKENKAFNASLGTYHDLEKILDKDFLDNPDNESILEDIVQTLTLFEDREMIKKRLENYKDLFTESQLKKLYRRHYTGWGRLSAKLINGIRDKESQKTILDYLIDDGRSNRNFMQLINDDGLSFKSIISKAQAGSHSDNLKEVVGELAGSPAIKKGILQSLKIVDELVKVMGYEPEQIVVEMARENQTTNQGRRNSRQRYKLLDDGVKNLASDLNGNILKEYPTDNQALQNERLFLYYLQNGRDMYTGEALDIDNLSQYDIDHIIPQAFIKDDSIDNRVLVSSAKNRGKSDDVPSLEIVKDCKVFWKKLLDAKLMSQRKYDNLTKAERGGLTSDDKARFIQRQLVETRQITKHVARILDERFNNELDSKGRRIRKVKIVTLKSNLVSNFRKEFGFYKIREVNNYHHAHDAYLNAVVAKAILTKYPQLEPEFVYGDYPKYNSYKTRKSATEKLFFYSNIMNFFKTKVTLADGTVVVKDDIEVNNDTGEIVWDKKKHFATVRKVLSYPQNNIVKKTEIQTGGFSKESILAHGNSDKLIPRKTKDIYLDPKKYGGFDSPIVAYSVLVVADIKKGKAQKLKTVTELLGITIMERSRFEKNPSAFLESKGYLNIRADKLIILPKYSLFELENGRRRLLASAGELQKGNELALPTQFMKFLYLASRYNESKGKPEEIEKKQEFVNQHVSYFDDILQLINDFSKRVILADANLEKINKLYQDNKENISVDELANNIINLFTFTSLGAPAAFKFFDKIVDRKRYTSTKEVLNSTLIHQSITGLYETRIDLGKLGED

SEQ ID NO: 433 - protein, 1377 aa, Streptococcus agalactiae
  source 1..1377: note = Streptococcus agalactiae 515
MNKPYSIGLDIGTNSVGWSIITDDYKVPAKKMRVLGNTDKEYIKKNLIGALLFDGGNTAADRRLKRTARRRYTRRRNRILYLQEIFAEEMSKVDDSFFHRLEDSFLVEEDKRGSKYPIFATMQEEKYYHEKFPTIYHLRKELADKKEKADLRLVYLALAHIIKFRGHFLIEDDRFDVRNTDIQKQYQAFLEIFDTTFENNHLLSQNVDVEAILTDKISKSAKKDRILAQYPNQKSTGIFAEFLKLIVGNQADFKKHFNLEDKTPLQFAKDSYDEDLENLLGQIGDEFADLFSVAKKLYDSVLLSGILTVTDLSTKAPLSASMIQRYDEHHEDLKHLKQFVKASLPENYREVFADSSKDGYAGYIEGKTNQEAFYKYLLKLLTKQEGSEYFLEKIKNEDFLRKQRTFDNGSIPHQVHLTELRAIIRRQSEYYPFLKENQDRIEKILTFRIPYYVGPLAREKSDFAWMTRKTDDSIRPWNFEDLVDKEKSAEAFIHRMTNNDLYLPEEKVLPKHSLIYEKFTVYNELTKVRFLAEGFKDFQFLNRKQKETIFNSLFKEKRKVTEKDIISFLNKVDGYEGIAIKGIEKQFNASLSTYHDLKKILGKDFLDNTDNELILEDIVQTLTLFEDREMIKKCLDIYKDFFTESQLKKLYRRHYTGWGRLSAKLINGIRNKENQKTILDYLIDDGSANRNFMQLINDDDLSFKPIIDKARTGSHSDNLKEVVGELAGSPAIKKGILQSLKIVDELVKVMGYEPEQIVVEMARENQTTAKGLSRSRQRLTTLRESLANLKSNILEEKKPKYVKDQVENHHLSDDRLFLYYLQNGRDMYTKKALDIDNLSQYDIDHIIPQAFIKDDSIDNRVLVSSAKNRGKSDDVPSIEIVKARKMFWKNLLDAKLMSQRKYDNLTKAERGGLTSDDKARFIQRQLVETRQITKHVARILDERFNNEVDNGKKICKVKIVTLKSNLVSNFRKEFGFYKIREVNDYHHAHDAYLNAVVAKAILTKYPQLEPEFVYGMYRQKKLSKIVHEDKEEKYSEATRKMFFYSNLMNMFKRVVRLADGSIVVRPVIETGRYMGKTAWDKKKHFATVRKVLSYPQNNIVKKTEIQTGGFSKESILAHGNSDKLIPRKTKDIYLDPKKYGGFDSPIVAYSVLVVADIKKGKAQKLKTVTELLGITIMERSRFEKNPSAFLESKGYLNIRDDKLMILPKYSLFELENGRRRLLASAGELQKGNELALPTQFMKFLYLASRYNESKGKPEEIEKKQEFVNQHVSYFDDILQLINDFSKRVILADANLEKINKLYQDNKENIPVDELANNIINLFTFTSLGAPAAFKFFDKIVDRKRYTSTKEVLNSTLIHQSITGLYETRIDLGKLGED

SEQ ID NO: 434 - protein, 1370 aa, Streptococcus agalactiae; identical to SEQ ID NO: 432

SEQ ID NO: 435 - protein, 1378 aa, Streptococcus agalactiae
  source 1..1378: note = Streptococcus agalactiae ATCC 13813
MNKPYSIGLDIGTNSVGWSIITDDYKVPAKKMRVLGNTDKEYIKKNLIGALLFDGGNTAADRRLKRTARRRYTRRRNRILYLQEIFAEEMSKVDDSFFHRLEDSFLVEEDKRGSKYPIFATMQEEKYYHEKFPTIYHLRKELADKKEKADLRLIYLALAHIIKFRGHFLIEDDRFDVRNTDIQKQYQAFLEIFDTTFENNDLLSQNVDVEAILTDKISKSAKKDRILARYPNQKSTGIFAEFLKLIVGNQADFKKHFNLEDKTPLQFAKDSYDEDLENLLGQIGDEFADLFSAAKKLYDSVLLSGILTVIDLSTKAPLSASMIQRYDEHHEDLKHLKQFVKASLPENYREVFADSSKDGYAGYIEGKTSQEAFYKYLLKLLTKQEGSEYLLEKIKNEDFLRKQRTFDNGSIPHQVHLTELRAIIRRQSEYYPFLKENLDRIEKILTFRIPYYVGPLAREKSDFAWMTRKTDDSIRPWNFEDLVDKEKSAEAFIHRMTNNDLYLPEEKVLPKHSLIYEKFTVYNELTKVRFLAEGFKDFQFLNRKQKETIFNSLFKEKRKVTEKDIISFLNKVDGYEGIAIKGIEKQFNASLSTYHDLKKILGKDFLDNTDNELILEDIIQTLTLFEDREMIKKRLDIYKDFFTESQLKKLYRRHYTGWGRLSAKLINGIRNKENQKTILDYLIDDGSANRNFMQLIKDAGLSFKPIIDKARTGSHSDNLKEVVGELAGSPAIKKGILQSLKIVDELVKVMGYEPEQIVVEMARENQTTAKGLSRSRQRLTTLRESLGNLKSNILEEKKPKYVKDQVENHHLSDDRLFLYYLQNGKDMYTDDELDIDNLSQYDIDHIIPQAFIKDDSIDNRVLVSSAKNRGKSDDVPSIEIVKARKMFWKNLLDAKLMSQRKYDNLTKAERGGLTSDDKARFIQRQLVETRQITKHVARILDERFNNELDSKGRRIRKVKIVTLKSNLVSNFRKEFGFYKIREVNNYHHAHDAYLNAVVAKAILTKYPQLEPEFVYGLYRRKKLSKIVREDKEEKYSEATRKMFFYSNLMNMFKRVVRLADGSIVVRPVIETGRYMGKTAWDKKKHFATVRKVLSYPQNNIVKKTEIQTGGFSKESILAHGNSDKLIPRKTKDIYLDPKKYGGFDSPIVAYSVLVVADIKKGKAQKLKTVTELLGITIMERSRFEKNTSAFLESKGYLNIRDDKLMILPKYSLFELENGRRRLLASAGELQKGNELALPTQFMKFLYLASRYNESKGKPEEIEKKQEFVNQHVSYFDDILQLINDFSNRVILADANLEKINKLYQDNKENIPVDELANNIINLFTFTSLGAPAAFKFFDKIVDRKRYTSTKEVLNSTLIHQSITGLYETRIDLGKLGEG

SEQ ID NO: 436 - protein, 1370 aa, Streptococcus agalactiae
  MOD_RES 117: note = Any amino acid
  source 1..1370: note = Streptococcus agalactiae CJB111
MNKPYSIGLDIGTNSVGWSIITDDYKVPAKKMRVLGNTDKEYIKKNLIGALLFDGGNTAADRRLKRTARRRYTRRRNRILYLQEIFAEEMSKVDDSFFHRLEDSFLVEEDKRGSKYXIFATLQEEKDYHEKFSTIYHLRKELADKKEKADLRLIYIALAHIIKFRGHFLIEDDSFDVRNTDISKQYQDFLEIFNTTFENNDLLSQNVDVEAILTDKISKSAKKDRILAQYPNQKSTGIFAEFLKLIVGNQADFKKYFNLEDKTPLQFAKDSYDEDLENLLGQIGDEFADLFSAAKKLYDSVLLSGILTVIDLSTKAPLSASMIQRYDEHREDLKQLKQFVKASLPEKYQEIFADSSKDGYAGYIEGKTNQEAFYKYLSKLLTKQEDSENFLEKIKNEDFLRKQRTFDNGSIPHQVHLTELKAIIRRQSEYYPFLKENQDRIEKILTFRIPYYIGPLAREKSDFAWMTRKTDDSIRPWNFEDLVDKEKSAEAFIHRMTNNDFYLPEEKVLPKHSLIYEKFTVYNELTKVRYKNEQGETYFFDSNIKQEIFDGVFKEHRKVSKKKLLDFLAKEYEEFRIVDVIGLDKENKAFNASLGTYHDLEKILDKDFLDNPDNESILEDIVQTLTLFEDREMIKKRLENYKDLFTESQLKKLYRRHYTGWGRLSAKLINGIRDKESQKTILDYLIDDGRSNRNFMQLINDDGLSFKSIISKAQAGSHSDNLKEVVGELAGSPAIKKGILQSLKIVDELVKVMGYEPEQIVVEMARENQTTNQGRRNSRQRYKLLDDGVKNLASDLNGNILKEYPTDNQALQNERLFLYYLQNGRDMYTGEALDIDNLSQYDIDHIIPQAFIKDDSIDNRVLVSSAKNRGKSDDVPSLEIVKDCKVFWKKLLDAKLMSQRKYDNLTKAERGGLTSDDKARFIQRQLVETRQITKHVARILDERFNNELDSKGRRIRKVKIVTLKSNLVSNFRKEFGFYKIREVNNYHHAHDAYLNAVVAKAILTKYPQLEPEFVYGDYPKYNSYKTRKSATEKLFFYSNIMNFFKTKVTLADGTVVVKDDIEVNNDTGEIVWDKKKHFATVRKVLSYPQNNIVKKTEIQTGGFSKESILAHGNSDKLIPRKTKDIYLDPKKYGGFDSPIVAYSVLVVADIKKGKAQKLKTVTELLGITIMERSRFEKNPSAFLESKGYLNIRADKLIILPKYSLFELENGRRRLLASAGELQKGNELALPTQFMKFLYLASRYNESKGKPEEIEKKQEFVNQHVSYFDDILQLINDFSKRVILADANLEKINKLYQDNKENISVDELANNIINLFTFTSLGAPAAFKFFDKIVDRKRYTSTKEVLNSTLIHQSITGLYETRIDLGKLGED

SEQ ID NO: 437 - protein, 1370 aa, Streptococcus agalactiae
  source 1..1370: note = Streptococcus agalactiae COH1
MNKPYSIGLDIGTNSVGYSVVTDDYKVPAKKMRVLGNTDKEYIKKNLIGALLFDGGNTASDRRLKRTARRRYTRRRNRILYLQEIFAEEMSKVDDSFFHRLEDSFLVEDDKRGSKYPIFATMQEEKDYHEKFPTIYHLRKELADKKEKANLRLVYLALAHIIKFRGHFLIEDDSFDVRNTDIQRQYQAFLEIFDTTFENNHLLSQNIDVEGILTDKISKSAKKDRILAQYPNQKSTGIFAEFLKLIVGNQADFKKHFNLEDKTPLQFAKDSYDEDLENLLGQIGDEFADLFSVAKKLYDSVLLSGILTVTDLSTKAPLSASMIQRYDEHREDLKQLKQFVKASLPEKYQEIFTDSSKDGYAGYIEGKTNQGAFYKYLSKLLTKQEGSEYFLEKIKNEDFLRKQRTFDNGSIPHQVHLTELKAIIRRQSEYYPFLKENLDRIEKILTFRIPYYVGPLAREKSDFAWMTRKTDDSIRPWNFEELVDKEASAEAFIHRMTNNDLYLPEEKVLPKHSLIYEKFTVYNELTKVRYKNEQGETYFFDSNIKQEIFDGVFKEHRKVSKKKLLDFLAKEYEEFRIVDVIGLDKENKAFNASLGTYHDLKKILDKDFLDNPDNESILEDIVQTLTLFEDREMIKKRLENYKDLFTESQLKKLYRRHYTGWGRLSAKLINGIRDKESQKTILDYLISDGRANRNFMQLIHDDGLSFKPIIDKAQAGSHSDNLKEVVGELAGSPAIKKGILQSLKIVDELVKVMGYEPEQVVVEMARENQTTNQGRRNTRQRYKLLEEGVKNLASDLNGNILKEYPTDNQALQNERLFLYYLQNGRDMYTGEALDIDNLSQYDIDHIVPQAFIKDDSIDNRVLVSSAKNRGKSDNVPSIDIVKARKAFWKKLLDAKLMSQRKYDNLTKAERGGLTSDDKARFIQRQLVETRQITKHVARILDERFNNELDSKGRRIRKVKIVTLKSNLVSNFRKEFGFYKIREVNDYHHAHDAYLNAVVAKAILTKYPQLEPEFVYGDYPKYNSYKTRKSATEKLFFYSNIMNFFKTKVTLADGTVVVKDDIEVNNDTGEIVWDKKKHFATVRKVLSYPQVNIVKKTEIQTGGFSKESILAHGNSDKLIPRKTKDIYLDPKKYGGFDSPIVAYSVLVVADIKKGKAQKLKTVTELLGITIMERFRFEKNPSAFLESKGYLNIRDDKLMILPKYSLFELENGRRRLLASAGELQKGNELALPTQYMKFLYLASRYNELKGKPEEIEQKQEFVVQHVSYFDDILQIINDFSNRVILADANLEKINKLYQDNKENISVDELANNIINLFTFTSLGAPAAFKFFDKIVDRKRYTSTKEVLNSTLIHQSITGLYETRIDLGKLGED

SEQ ID NO: 438 - protein, 1370 aa, Streptococcus agalactiae
  source 1..1370: note = Streptococcus agalactiae FSL S3-026
MNKPYSIGLDIGTNSVGWSIITDDYKVPAKKMRVLGNTDKEYIKKNLIGALLFDGGNTAADRRLKRTARRRYTRRRNRILYLQEIFAEEMSKVDDSFFHRLEDSFLVEEDKRGSKYPIFATMQEEKYYHEKFPTIYHLRKELADKKEKADLRLIYLALAHIIKFRGHFLIEDDRFDVRNTDIQKQYQAFLEIFDTTFENNDLLSQNVDVEAILTDKISKSAKKDRILARYPNQKSTGIFAEFLKLIVGNQADFKKHFNLEDKTPLQFAKDSYDEDLENLLGQIGDEFADLFSAAKKLYDSVLLSGILTVTDLSTKAPLSASMIQRYDEHREDLKQLKQFVKASLPEKYQEIFADSSKDGYAGYIEGKTNQEAFYKYLSKLLTKQEGSEYLLEKIKNEDFLRKQRTFDNGSIPHQVHLTELRAIIRRQSEYYPFLKENLDRIEKILTFRIPYYVGPLAREKSDFAWMTRKTDDSIRPWNFEDLVDKEKSAEAFIHRMTNNDLYLPEEKVLPKHSLIYEKFTVYNELTKVRFLAEGFKDFQFLNRKQKETIFNSLFKEKRKVTEKDIISFLNKVDGYEGIAIKGIEKQFNASLSTYHDLKKILGKDFLDNTDNELILEDIVQTLTLFEDREMIRKRLDIYKDFFTESQLKKLYRRHYTGWGRLSAKLINGIRNKENQKTILDYLIDDGSANRNFMQLIKDAGLSFKPIIDKARTGSHSDNLKEVVGELAGSPAIKKGILQSLKIVDELVKVMGYEPEQIVVEMARENQTTAKGLSRLRQRLTTLRESLANLKSNILEEKKPKYVKDQVENHHLSDDRLFLYYLQNGKDMYTDDELDIDNLSQYDIDHIIPQAFIKDDSIDNRVLVSSAKNRGKSDDVPSVEIVKDCKVFWKKLLDAKLMSQRKYDNLTKAERGGLTSDDKARFIQRQLVETRQITKHVARILDERFNNELDSKGRRIRKVKIVTLKSNLVSNFRKEFGFYKIREVNNYHHAHDAYLNAVVAKAILTKYPQLEPEFVYGDYPKYNSYKTRKSATEKLFFYSNIMNFFKTKVTLADGTVVVKDDIEVNNDTGEIVWDKKKHFATVRKVLSYPQVNIVKKTEIQTGGFSKESILAHGNSDKLIPRKTKDIYLDPKKYGGFDSPIVAYSVLVVADIKKGKAQKLKTVTELLGITIMERSRFEKNPSAFLESKGYLNIRDDKLMILPKYSLFELENGRRRLLASADELQKGNELALPTQFMKFLYLASRYNELKGKPEEIEQKQEFVVQHVSYFDDILQIINDFSNRVILADANLEKINKLYQDNKENIPVDELANNIINLFTFTSLGAPAAFKFFDKIVDRKRYTSTKEVLNSTLIHQSITGLYETRIDLGKLGED

SEQ ID NO: 439 - protein, 1370 aa, Streptococcus agalactiae
  source 1..1370: note = Streptococcus agalactiae GB00112
MNKPYSIGLDIGTNSVGYSVVTDDYKVPAKKMRVLGNTDKEYIKKNLIGALLFDGGNTASDRRLKRTARRRYTRRRNRILYLQEIFAEEMSKVDDSFFHRLEDSFLVEDDKRGSKYPIFATMQEEKDYHEKFPTIYHLRKELADKKEKADLRLVYLALAHIIKFRGHFLIEDDSFDVRNTDIQRQYQAFLEIFDTTFENNHLLSQNIDVEGILTDKISKSAKKDRILAQYPNQKSTGIFAEFLKLIVGNQADFKKHFNLEDKTPLQFAKDSYDEDLENLLGQIGDEFADLFSVAKKLYDSVLLSGILTVTDLSTKAPLSASMIQRYDEHREDLKQLKQFVKASLPEKYQEIFTDSSKDGYAGYIEGKTNQGAFYKYLSKLLTKQEGSEYFLEKIKNEDFLRKQRTFDNGSIPHQVHLTELKAIIRRQSEYYPFLKENLDRIEKILTFRIPYYVGPLAREKSDFAWMTRKTDDSIRPWNFEELVDKEASAEAFIHRMTNNDLYLPEEKVLPKHSLIYEKFTVYNELTKVRYKNEQGETYFFDSNIKQEIFDGVFKEHRKVSKKKLLDFLAKEYEEFRIVDVIGLDKENKAFNASLGTYHDLKKILDKDFLDNPDNESILEDIVQTLTLFEDREMIKKRLENYKDLFTESQLKKLYRRHYTGWGRLSAKLINGIRDKESQKTILDYLISDGRANRNFMQLIHDDGLSFKPIIDKAQAGSHSDNLKEVVGELAGSPAIKKGILQSLKIVDELVKVMGYEPEQVVVEMARENQTTNQGRRNTRQRYKLLEEGVKNLASDLNGNILKEYPTDNQALQNERLFLYYLQNGRDMYTGEALDIDNLSQYDIDHIVPQAFIKDDSIDNRVLVSSAKNRGKSDNVPSIDIVKARKAFWKKLLDAKLMSQRKYDNLTKAERGGLTSDDKARFIQRQLVETRQITKHVARILDERFNNELDSKGRRIRKVKIVTLKSNLVSNFRKEFGFYKIREVNDYHHAHDAYLNAVVAKAILTKYPQLEPEFVYGDYPKYNSYKTRKSATEKLFFYSNIMNFFKTKVTLADGTVVVKDDIEVNNDTGEIVWDKKKHFATVRKVLSYPQVNIVKKTEIQTGGFSKESILAHGNSDKLIPRKTKDIYLDPKKYGGFDSPIVAYSVLVVADIKKGKAQKLKTVTELLGITIMERFRFEKNPSAFLESKGYLNIRDDKLMILPKYSLFELENGRRRLLASAGELQKGNELALPTQYMKFLYLASRYNELKGKPEEIEQKQEFVVQHVSYFDDILQIINDFSNRVILADANLEKINKLYQDNKENISVDELANNIINLFTFTSLGAPAAFKFFDKIVDRKRYTSTKEVLNSTLIHQSITGLYETRIDLGKLGED

SEQ ID NO: 440 - protein, 1370 aa, Streptococcus agalactiae
  MOD_RES 9: note = Any amino acid
  source 1..1370: note = Streptococcus agalactiae H36B
MNKPYSIGXDIGTNSVGWSIITDDYKVPAKKMRVLGNTDKEYIKKNLIGALLFDGGNTAADRRLKRTARRRYTRRRNRILYLQEIFAEEMSKVDDSFFHRLEDSFLVEEDKRGSKYPIFATLQEEKDYHEKFSTIYHLRKELADKKEKADLRLIYIALAHIIKFRGHFLIEDDSFDVRNTDISKQYQDFLEIFNTTFENNDLLSQNVDVEAILTDKISKSAKKDRILAQYPNQKSTGIFAEFLKLIVGNQADFKKYFNLEDKTPLQFAKDSYDEDLENLLGQIGDEFADLFSAAKKLYDSVLLSGILTVIDLSTKAPLSASMIQRYDEHREDLKQLKQFVKASLPEKYQEIFADSSKDGYAGYIEGKTNQEAFYKYLSKLLTKQEDSENFLEKIKNEDFLRKQRTFDNGSIPHQVHLTELKAIIRRQSEYYPFLKENQDRIEKILTFRIPYYIGPLAREKSDFAWMTRKTDDSIRPWNFEDLVDKEKSAEAFIHRMTNNDFYLPEEKVLPKHSLIYEKFTVYNELTKVRYKNEQGETYFFDSNIKQEIFDGVFKEHRKVSKKKLLDFLAKEYEEFRIVDVIGLDKENKAFNASLGTYHDLEKILDKDFLDNPDNESILEDIVQTLTLFEDREMIKKRLENYKDLFTESQLKKLYRRHYTGWGRLSAKLINGIRDKESQKTILDYLIDDGRSNRNFMQLINDDGLSFKSIISKAQAGSHSDNLKEVVGELAGSPAIKKGILQSLKIVDELVKVMGYEPEQIVVEMARENQTTNQGRRNSRQRYKLLDDGVKNLASDLNGNILKEYPTDNQALQNERLFLYYLQNGRDMYTGEALDIDNLSQYDIDHIIPQAFIKDDSIDNRVLVSSAKNRGKSDDVPSLEIVKDCKVFWKKLLDAKLMSQRKYDNLTKAERGGLTSDDKARFIQRQLVETRQITKHVARILDERFNNELDSKGRRIRKVKIVTLKSNLVSNFRKEFGFYKIREVNNYHHAHDAYLNAVVAKAILTKYPQLEPEFVYGDYPKYNSYKTRKSATEKLFFYSNIMNFFKTKVTLADGTVVVKDDIEVNNDTGEIVWDKKKHFATVRKVLSYPQNNIVKKTEIQTGGFSKESILAHGNSDKLIPRKTKDIYLDPKKYGGFDSPIVAYSVLVVADIKKGKAQKLKTVTELLGITIMERSRFEKNPSAFLESKGYLNIRADKLIILPKYSLFELENGRRRLLASAGELQKGNELALPTQFMKFLYLASRYNESKGKPEEIEKKQEFVNQHVSYFDDILQLINDFSKRVILADANLEKINKLYQDNKENISVDELANNIINLFTFTSLGAPAAFKFFDKIVDRKRYTSTKEVLNSTLIHQSITGLYETRIDLGKLGED

SEQ ID NO: 441 - protein, 1377 aa, Streptococcus agalactiae
MNKPYSIGLDIGTNSVGWSIITDDYKVPAKKMRVLGNTDKEYIKKNLIGALLFDGGNTAADRRLKRTARRRYTRRRNRILYLQEIFAEEMSKVDDSFFHRLEDSFLVEEDKRGSKYPIFATMQEEKYYHEKFPTIYHLRKELADKKEKADLRLVYLALAHIIKFRGHFLIEDDRFDVRNTDIQKQYQAFLEIFDTTFENNHLLSQNVDVEAILTDKISKSAKKDRILAQYPNQKSTGIFAEFLKLIVGNQADFKKHFNLEDKTPLQFAKDSYDEDLENLLGQIGDEFADLFSVAKKLYDSVLLSGILTVTDLSTKAPLSASMIQRYDEHHEDLKHLKQFVKASLPENYREVFADSSKDGYAGYIEGKTNQEAFYKYLLKLLTKQEGSEYFLEKIKNEDFLRKQRTFDNGSIPHQVHLTELRAIIRRQSEYYPFLKENQDRIEKILTFRIPYYVGPLAREKSDFAWMTRKTDDSIRPWNFEDLVDKEKSAEAFIHRMTNNDLYLPEEKVLPKHSLIYEKFTVYNELTKVRFLAEGFKDFQFLNRKQKETIFNSLFKEKRKVTEKDIISFLNKVDGYEGIAIKGIEKQFNASLSTYHDLKKILGKDFLDNTDNELILEDIVQTLTLFEDREMIKKCLDIYKDFFTESQLKKLYRRHYTGWGRLSAKLINGIRNKENQKTILDYLIDDGSANRNFMQLINDDDLSFKPIIDKARTGSHSDNLKEVVGELAGSPAIKKGILQSLKIVDELVKVMGYEPEQIVVEMARENQTTAKGLSRSRQRLTTLRESLANLKSNILEEKKPKYVKDQVENHHLSDDRLFLYYLQNGRDMYTKKALDIDNLSQYDIDHIIPQAFIKDDSIDNRVLVSSAKNRGKSDDVPSIEIVKARKMFWKNLLDAKLMSQRKYDNLTKAERGGLTSDDKARFIQRQLVETRQITKHVARILDERFNNEVDNGKKICKVKIVTLKSNLVSNFRKEFGFYKIREVNDYHHAHDAYLNAVVAKAILTKYPQLEPEFVYGMYRQKKLSKIVHEDKEEKYSEATRKMFFYSNLMNMFKRVVRLADGSIVVRPVIETGRYMRKTAWDKKKHFATVRKVLSYPQNNIVKKTEIQTGGFSKESILAHGNSDKLIPRKTKDIYLDPKKYGGFDSPIVAYSVLVVADIKKGKAQKLKTVTELLGITIMERSRFEKNPSAFLESKGYLNIRDDKLMILPKYSLFELENGRRRLLASAGELQKGNELALPTQFMKFLYLASRYNESKGKPEEIEKKQEFVNQHVSYFDDILQLINDFSKRVILADANLEKINKLYQDNKENIPVDELANNIINLFTFTSLGAPAAFKFFDKIVDRKRYTSTKEVLNSTLIHQSITGLYETRIDLGKLGED

SEQ ID NO: 442 - protein, 1370 aa, Streptococcus agalactiae
MNKPYSIGLDIGTNSVGWSIITDDYKVPAKKMRVLGNTDKEYIKKNLIGALLFDGGNTAADRRLKRTARRRYTRRRNRILYLQEIFAEEMSKVDDSFFHRLEDSFLVEEDKRGSKYPIFATMQEEKDYHEKFPTIYHLRKELADKKEKADLRLVYLALAHIIKFRGHFLIEDDRFDVRNTDIQKQYQAFLEIFDTSFENNHLLSQNVDVEAILTDKISKSAKKDRILAQYPNQKSTGIFAEFLKLIVGNQADFKKHFNLEDKTPLQFAKDSYDEDLENLLGQIGDEFADLFSAAKKLYDSVLLSGILTVTDLSTKAPLSASMIQRYDEHREDLKQLKQFVKASLPEKYQEIFADSSKDGYAGYIEGKTNQEAFYKYLSKLLTKQEDSEYFLEKIKNEDFLRKQRTFDNGSIPHQVHLTELKAIIRRQSEYYPFLKENQDKIEKILTFRIPYYVGPLARGNSDFAWMTRKTDDSIRPWNFEDLVDKEKSAEAFIHRMTNNDLYLPEEKVLPKHSLIYEKFTVYNELTKVRYKNEQGETYFFDSNVKQEIFDGVFKEHRKVSKKQLLDFLAKEFEEFRIVDVTGLDKENKAFNASLGTYHDLKKILDKDFLDNPDNESILEDIVQTITLFEDREMIKKRLENYKDLFTESQLKKLYRRHYTGWGRLSAKLINGIRDRESQKTILDYLISDGRANRNFMQLINDDGLSFKSIISKAQSGSHSDNLKEVVGELAGSPAIKKGILQSLKIVDELVKVMGYEPEQIVVEMARENQTTNQGRRNSRQRYKLLEDGVKNLASDLNGDILKEYPTDNQALQNERLFLYYLQNGRDMYTGEALDIDNLSQYDIDHIVPQAFIKDDSIDNRVLVSSAKNRGKSDDVPSIDIVKARKAFWKKLLDAKLISQRKYDNLTKAERGGLTPDDKAGFIQRQLVETRQITKHVARILDERFNNKVDDNNKPIRKVKIVTLKSNLVSNFRKEFGFYKIREVNNYHHAHDAYLNAVVAKAILTKYPQLEPEFVYGDYPKYNSYKTRKSATEKLFFYSNIMNFFKTKVTLADETVVVKDDIEVNNETGEIAWDKKKHFATVRKVLSYPQVNIVKKTEVQTGGFSKESILAHSNSDKLIPRKTKDIYLDPKKYGGFDSPIVAYSVLVLADIKKGKAQKLKTVKELIGITIMERERFEKNPSAFLESKGYLNIRTDKLIILPKYSLFELENGRRRLLASAGELQKGNELALPTQYMKFLYLASRYNESKGKPEEIEKKQEFVNQHVSYFDDILQLINDFSKRVILADANLEKINKLYSDNKDNTPVDELAKNIINLFTFTSLGAPAAFKFFDKSVDRKRYTSTKEVLDSTLIHQSITGLYETRIDLGKLGED

SEQ ID NO: 443 - protein, 1370 aa, Streptococcus agalactiae
  source 1..1370: note = Streptococcus agalactiae STIR-CD-17
MNKPYSIGLDIGTNSVGWSIITDDYKVPAKKMRVLGNTDKEYIKKNLIGALLFDGGNTAADRRLKRTARRRYTRRRNRILYLQEIFAEEMSKVDDSFFHRLEDSFLVEEDKRGSKYPIFATMQEEKDYHEKFPTIYHLRKELADKKEKADLRLVYLALAHIIKFRGHFLIEDDRFDVRNTDIQKQYQAFLEIFDTSFENNHLLSQNVDVEAILTDKISKSAKKDRILAQYPNQKSTGIFAEFLKLIVGNQADFKKHFNLEDKTPLQFAKDSYDEDLENLLGQIGDEFADLFSAAKKLYDSVLLSGILTVTDLSTKAPLSAYMIQRYDEHREDLKQLKQFVKASLPEKYQEIFADSSKDGYAGYIEGKTNQEAFYKYLSKLLTKQEDSEYFLEKIKNEDFLRKQRTFDNGSIPHQVHLTELKAIIRRQSEYYPFLKENQDKIEKILTFRIPYYVGPLARGNSDFAWMTRKTDDSIRPWNFEDLVDKEKSAEAFIHRMTNNDLYLPEEKVLPKHSLIYEKFTVYNELTKVRYKNEQGETYFFDSNVKQEIFDGVFKEHRKVSKKQLLDFLAKEFEEFRIVDVTGLDKENKAFNASLGTYHDLKKILDKDFLDNPDNESILEDIVQTITLFEDREMIKKRLENYKDLFTESQLKKLYRRHYTGWGRLSAKLINGIRDRESQKTILDYLISDGRANRNFMQLINDDGLSFKSIISKAQSGSHSDNLKEVVGELAGSPAIKKGILQSLKIVDELVKVMGYEPEQIVVEMARENQTTNQGRRNSRQRYKLLEDGVKNLASDLNGDILKEYPTDNQALQNERLFLYYLQNGRDMYTGEALDIDNLSQYDIDHIVPQAFIKDDSIDNRVLVSSAKNRGKSDDVPSIDIVKARKAFWKKLLDAKLISQRKYDNLTKAERGGLTPDDKAGFIQRQLVETRQITKHVARILDERFNNKVDDNNKPIRKVKIVTLKSNLVSNFRKEFGFYKIREVNNYHHAHDAYLNAVVAKAILTKYPQLEPEFVYGDYPKYNSYKTRKSATEKLFFYSNIMNFFKTKVTLADETVVVKDDIEVNNETGEIAWDKKKHFATVRKVLSYPQVNIVKKTEVQTGGFSKESILAHSNSDKLIPRKTKDIYLDPKKYGGFDSPIVAYSVLVLADIKKGKAQKLKTVKELIGITIMERERFEKNPSAFLESKGYLNIRTDKLIILPKYSLFELENGRRRLLASAGELQKGNELALPTQYMKFLYLASRYNESKGKPEEIEKKQEFVNQHISYFDDILQLINDFSKRVILADANLEKINKLYSDNKDNTPVDELAKNIINLFTFTSLGAPAAFKFFDKSVDRKRYTSTKEVLDSTLIHQSITGLYETRIDLGKLGED

SEQ ID NO: 444 - protein, 1125 aa, Streptococcus anginosus
  source 1..1125: note = Streptococcus anginosus 1_2_62CV
MNGLVLGLDIGIASVGVGILNKETGEIIHANSRIFPAATADSNVERRGFRQGRRLGRRKKHRSARLNNLFEEFGFITDFSAIPLNLNPYALRVKGLSEELTNEELFIALKNIIKRRGISYLDDASEDGETASNEYGKAVEENRKLLADKTPGQIQLERFEKYGQVRGDFTVVENGENHRLINVFSTSAYKKEAERILRRQQEFNVRISDEFIEAYLTILTGKRKYYHGPGNEKSRTDYGRFRTDGTTLDNIFGILIGKCTFYPDEYRAAKASYTAQEFNLLNDLNNLTVPTETKKLSPEQKRQIVEYARTAKTLGTPTLLKYIAKLVDGSIDDIKGYRIDKSDKPEMHTFDAYRKMRTLDLVNIDALSRETLDDLAHILTLNTESEGILEALNSKMPSTFTKEQIDELIQFRKKNSAVFGKGWHNFSLKLMNELISELYETSEEQMTILTRLGKQRSREISKRTKYIDEKELTEEIYNPVVAKSVRQAIKIINEATKRYGIFDNIVIEMARENNEEDAKKDYIKRQKANQDEKNASMEKAAFQYNGKKELPDSIFHGHKELATKIRLWHQQGERCLYTGKNISIRDLIHNPHQYEIDHILPLSLSFDDGLANKVLVLATANQEKGQRTPFQAIDSMDDAWSYREFKQYVRNSKSLSNKKKDYLLTEEDISKIEVKQKFIERNLVDTRYSSRVVLNTLQEFYKTNDFDTKISVVRGQFTSQLRRKWKIEKSRDTYHHHAVDALIIAASSQLRLWKKQNNPLISYKEGQFVDPETGEILSLTDDEYKELVFRPPYDYFVDTLKSKSFEDSILFSYQVDSKYNRKISDATIYGTRKAQLGKDKQEETYVLGKIKDIYSQKGYEDFIKRYNKDETQFLIYHKDPQTFEKVIEEILKTYPDKELNEKGKEIPCNPFEKYRQENGPIRKYSKKGKGPEIKSLKYYDNKLGNHIDITPVNSQNQVVLQSLKPWRTDVYFNPRTSKYELMGLKYSDLRFEKGSGSYGISPEKYNKVKAKEGVNEDSEFKFTLYKNDLILIKDTETGEQQLFRYGSRNDTSKHYVELKPYEKAKFEGNQQLMNLLGTVAKGGQCLKGINKPNLSIYKVKTDVLGNKYFIKKEGDQPQLNFKKKF

SEQ ID NO: 445 - protein, 1345 aa, Streptococcus anginosus
  source 1..1345: note = Streptococcus anginosus F0211
MDQKYSIGLDIGTNSVGWAVVTDDYKVPAKKMKVLGNTDKQSIKKNLLGALLFDSGETAEATRLKRTARRRYTRRRNRLRYLQEIFAEEMNKVDENFFQRLDDSFLVDEDKRGERHPIFGNIAAEVKYHDDFPTIYHLRKHLADISQKADLRLVYLALAHMIKFRGHFLIEGQLKAENTNVQALFKDFVEVYDKTVEESHLSEMTVDALSILTEKVSKSRRLENLIAHYPAEKKNTLFGNLIALSLGLQPNFKTNFQLSEDAKLQFSKDTYEEDLEGLLGEIGDEYADLFASAKNLYDAILLSGILTVDDNSTKAPLSASMVKRYEEHQKDLKKLKDFIKVNAPDQYNAIFKDKNKKGYAGYIENGVKQDEFYKYLKGILLQINGSGDFLDKIDREDFLRKQRTFDNGSIPHQIHLQEMHAILRRQEEHYPFLKENQDKIEKILTFRIPYYVGPLARKGSRFAWAEYKADEKITPWNFDDILDKEKSAEKFITRMTLNDLYLPEEKVLPKHSLLYETFTVYNELTKVKYVNEQGEAKFFDANMKQEIFDHVFKENRKVTKDKLLNYLNKEFEEFRIVNLTGLDKENKAFNSSLGTYHDLRKILDKSFLDDKANEKTIEDIIQTLTLFEDREMIRQRLQKYSDIFTKAQLKKLERRHYTGWGRLSYKLINGIRNKENKKTILDYLIDDGYANRNFMQLINDDALSFKEEIARAQIIGDVDDIANVVHDLPGSPAIKKGILQSVKIVDELVKVMGHNPANIIIEMARENQMTDKGRRNSQQRLKLLQDSLKNLDNPVNIKNVENQQLQNDRLFLYYIQNGKDMYTGETLDINNLSQYDIDHIIPQAFIKDNSLDNRVLTRSDKNRGKSDDVPSIEVVHEMKSFWSKLLSVKLITQRKFDNLTKAERGGLTEEDKAGFIKRQLVETRQITKHVAQILDERFNTEFDGNKRRIRNVKIITLKSNLVSNFRKEFELYKVREINDYHHAHDAYLNAVVGNALLLKYPQLEPEFVYGEYPKYNSYRSRKSATEKFLFYSNILRFFKKEDIQTNEDGEIAWNKEKHIKILRKVLSYPQVNIVKKTEEQTGGFSKESILPKGESDKLIPRKTKNSYWNPKKYGGFDSPVVAYSILVFADVEKGKSKKLRKVQDMVGITIMEKKRFEKHPVDFLEQRGYRNVRLEKIIKLPKYSLFELENKRRRLLASARELQKGNELVIPQRFTTLLYHSYQIEKNYEPEHREYVEKHKDEFKELLEYISVFSRKYVLADNNLTKIEMLFSKNKDAEVSSLAKSFISLLTFTAFGAPAAFNFFGENIDRKRYTSVTECLNATLIHQSITGLYETRIDLSKLGED

SEQ ID NO: 446 - protein, 1386 aa, Streptococcus anginosus
  source 1..1386: note = Streptococcus anginosus SK1138
MNQKYSIGLDIGTNSVGWAVITDDYKVPAKKMKVLGNTDKQSIKKNLLGALLFDSGETAEATRLKRTARRRYTRRRNRLRYLQEIFAEEMMQVDESFFQRLDDSFLVDEDKRGERHPIFGNIAAEVKYHDEFPTIYHLRKHLADISQKADLRLVYLALAHMIKFRGHFLIEGQLKAENTNVQALFKDFVEVYDKTVEESHLSEITVDALSILTEKVSKSRRLENLIAHYPAEKKNTLFGNLIALFLGLQPNFKTNFQLSEDAKLQFSKDTYEEDLEGLLGEVGDEYADLFASAKNLYDAILLSGILTVDDNSTKAPLSASMVKRYEEHQKDLKKFEDFIKVNALDQYNAIFKDKNKKGYAGYIESGVKQDEFYKYLKGILLQINGSGDFLDKIDREDFLRKQRTFDNGSIPHQIHLQEMHAILRRQGEHYPFLKENQDKIEKILTFRIPYYVGPLARKGSRFAWAEYKADEKITPWNFDDILDKEKSAEKFITRMTLNDLYLPEEKVLPKHSLLYETFTVYNELTKVKYVNEQGEAKFFDANMKQEIFDHVFKENRKVTKDKLLNYLNKEFEEFRIVNLTGLDKENKVFNSSLGTYHDLRKILNKSFLDNKENAQIIEDIIQTLTLFEDREMIRQRLQKYSDIFTKAQLKKLERRHYTGWGRLSYKLINGIRNKENKKTILDYLIDDGYANRNFMQLINDDALSFKEEIAKAQIIGDVDDIANVVHDLPGSPAIKKGILQSVKIVDELVKVMGHNPANIIIEMARENQTTDRGRRNSQQRLKLLQDSLKNLDNPVNIKNVENQQLQNDRLFLYYIQNGKDMYTGETLDINNLSQYDIDHIIPQAYIKDDSFDNRVLTSSSENRGKSDNVPSIEVVCARKADWMRLRKAGLISQRKFDNLTKAERGGLTENDKAGFIKRQLVETRQITKHVAQVLDARFNAKHDENKKVIRDVKIITLKSNLVSQFRKDFKFYKVREINDYHHAHDAYLNAVIGTALLKKYPKLASEFVYGEFKKYDVRKFIAKSDKEIGKATAKYFFYSNLMNFFKKEVKFADGTVVERPDIETSEDGEIAWNKQTDFKIVRKVLSYPQVNIVKKTEVQTHGLDRGKPRGLFNANPSPKPKPDSSENLVGVKRNLDPKKYGGYAGISNSYAVLVKAIIEKGVKKKETMVLEFQGISILDRITFEKDKRAFLLGKGYKDIKKIIELPKYSLFELKDGSRRMLASILSTNNKRGEIHKGNELFVPQKFTTLLYHAKRINNPINKDHIEYVKKHRDDFKELLNYVLEFNEKYVGATKNGERLKEAVADFDSKSNEEICTSFLGAVNSKNAGLFELTSLGSASDFEFLGVKIPRYRDYTPSSLLKDSTLIHQSITGLYETRIDLSKLGED

SEQ ID NO: 447 - protein, 1396 aa, Streptococcus anginosus
  source 1..1396: note = Streptococcus anginosus SK52 = DSM 20563
MTKPYSIGLDIGTNSVGWAVITDDYKVPAKKMKVLGNTNRDYIKKNLLGALLFDGGETAEGRRLKRTARRRYTRRKNRLRYLQEIFAEEMMQVDESFFQRLDDSFLVEEDKQGSKYPIFGTLKEEKEYHKKFKTIYHLREELANSKEKADLRLVYLALAHMIKFRGHFLYEGDLKAENTDVQALFKDFVEEYDKTIEESHLSEITVDALSILTEKVSKSSRLENLIAHYPTEKKNTLFGNLIALSLGLQANFKTNFQLSEDAKLQFSKDTYEEDLEGLLGEVGDEYADLFVSAKNLYDAILLSGILTVDDNSTKAPLSASMVKRYKEHKEELAAFKRFIKEKLPKKYEEIFKDDTKNGYAGYVGADKKLRKRSGKLATEEEFYKYVKGILNKVEGADYFLDKIDREDFLRKQRTFDNGSIPHQIHLQEMHAILRRQGEHYPFLKENQDKIEKILTFRIPYYVGPLARKGSRFAWAEYKADEKITPWNFDDILDKEKSAEKFITRMTLNDLYLPEEKVLPKHSPLYETFTVYNELTKVKYVNEQGEAKFFDTNMKQEIFDHVFKENRKVTKDKLLNYLNKEFEEFRIVNLTGLDKENKAFNASLGTYHDLRKILDKSFLDDKVNEKIIEDIIQTLTLFEDREMIRQRLQKYSDIFTTQQLKELERRHYTGWGRLSYKLINGIRNKENKKTILDYLIDDGYANRNFMQLINDDALSFKEEIARAQIIGDVDDIANVVHDLPGSPAIKKGILQSVKIVDELVKVMGHNPTNIIIEMARENQTTDKGRRNSQQRLKLLQDSLKNLDNPVNIKNVENQQLQNDRLFLYYIQNGKDMYTGETLDINNLSQYDIDHIIPQAFIKDNSLDNRVLTRSDKNRGKSDDVPSIEVVHEMKSFWSKLLSVKLITQRKFDNLTKAERGGLTENDKAGFIKRQLVETRQITKHVAQVLDARFNAKHDENKKVIRDVKIITLKSNLVSQFRKDFKFYKVREINDYHHAHDAYLNAVIGTALLKKYPKLASEFVYGEFKKYDVRKFIAKSDKEIGKATAKYFFYSNLMNFFKKEVKFADGTVVERPDIETSEDGEIAWNKQTDFKIVRKVLSYPQVNIVKKTEVQTHGLDRGKPRGLFNANPSPKPKPDSSENLVGIKRNLDPKKYGGYAGISNSYAVLVKAIIEKGVKKKETMVLEFQGISILDRITFEKDKRAFLLGKGYKDIKKIIELPKYSLFELKDGSRRMLASILSTNNKRGEIHKGNELFVPQKFTTLLYHAKRINNPINKDHIEYVKKHRDDFKELLNYVLEFNEKYVGATKNGERLKEAVADFDSKSNEEICTSFLGAVNSKNAGLFELTSLGSASDFEFLGVKIPRYRDYTPSSLLKDSILIHQSITGLYETRIDLSKLGED

SEQ ID NO: 448 - protein, 1373 aa, Streptococcus bovis
  source 1..1373: note = Streptococcus bovis ATCC 700338
MTKKNYSIGLDIGTNSVGWAVITDDYKVPAKKMKVLGNTDKKYIKKNLLGALLFDSGETAEATRLKRTARRRYTRRKNRLRYLQEIFAEEMTKVDESFFQRLDESFLRWDDDNKKLGRYPIFGNKADVVKYHQEFPTIYHLRKHLADSSEKADLRLVYLALAHMIKFRGHFLIEGELNAENTDVQKIFADFVGVYDRTFDDSHLSEITVDAASILTEKISKSRRLENLIKYYPTEKKNTLFGNLIALALGLQPNFKMNFKLSEDAKLQFSKDSYEEDLGELLGKIGDDYADLFTSAKNLYDAILLSGILIVDDNSTKAPLSASMIKRYVEHQEDLEKLKEFIKANKSELYHDIFKDKNKNGYAGYIENGVKQDEFYKYLKNTLSKIAGSDYFLDKIEREDFLRKQRTFDNGSIPHQIHLQEMHAILRRQGDYYPFLKENQDRIEKILTFRIPYYVGPLARKDSRFSWAEYHSDEKITPWNFDKVIDKEKSAEKFITRMTLNDLYLPEEKVLPKHSHVYETYAVYNELTKIKYVNEQGKDSFFDSNMKQEIFDHVFKENRKVTKEKLLNYLNKEFPEYRIKDLIGLDKENKSFNASLGTYHDLKKILDKAFLDDKVNEEVIEDIIKTLTLFEDKDMIHERLQKYSDIFTADQLKKLERRHYTGWGRLSYKLINGIRNKENNKTILDYLIDDGSANRNFMQLINDDTLPFKQIIQKSQVVGDVDDIEAVVHDLPGSPAIKKGILQSVKIVDELVKVMGDNPDNIVIEMARENQTTNRGRSQSQQRLKKLQNSLKELGSNILNEEKPSYIEDKVENSHLQNDQLFLYYIQNGKDMYTGDELDIDHLSDYDIDHIIPQAFIKDDSIDNRVLTSSAKNRGKSDDVPSLDIVRARKAEWVRLYKSGLISKRKFDNLTKAERGGLTEADKAGFIKRQLVETRQITKHVAQILDARFNTESDENDKVIRDVKVITLKSNLVSQFRKDFEFYKVREINDYHHAHDAYLNAVVGTALLKKYPKLASEFVYGEYKKYDIRKFITNSSDKATAKYFFYSNLMNFFKRVIRYSNGKVIVRPVVEYSKDTEDIAWDKKSNFRTICKVLSYPQVNIVKKVETQTGGFSKESILPKGDSDKLIPRKTKKAYWDTKKYGGFDSPTVAYSVFVVADVEKGKAKKLKTVKELVGISIMERSFFEENPVEFLENKGYHNIREDKLIKLPKYSLFEFEGGKRRLLASASELQKGNEMVIPGHLVKLLYHAQRINSFNSTKYLDYVSAHKKEFEKVLSCVEDFANLYVDVEKNLSKIRAVADSMDNFSIEEISNSFINLLTLTALGAPADFNFLGEKIPRKRYTSTKECLNATLIHQSITGLYETRIDLSKIGEE

SEQ ID NO: 449 - protein, 1375 aa, Streptococcus canis
  source 1..1375: note = Streptococcus canis FSL Z3-227
MEKKYSIGLDIGTNSVGWAVITDDYKVPSKKFKVLGNTNRKSIKKNLMGALLFDSGETAEATRLKRTARRRYTRRKNRIRYLQEIFANEMAKLDDSFFQRLEESFLVEEDKKNERHPIFGNLADEVAYHRNYPTIYHLRKKLADSPEKADLRLIYLALAHIIKFRGHFLIEGKLNAENSDVAKLFYQLIQTYNQLFEESPLDEIEVDAKGILSARLSKSKRLEKLIAVFPNEKKNGLFGNIIALALGLTPNFKSNFDLTEDAKLQLSKDTYDDDLDELLGQIGDQYADLFSAAKNLSDAILLSDILRSNSEVTKAPLSASMVKRYDEHHQDLALLKTLVRQQFPEKYAEIFKDDTKNGYAGYVGIGIKHRKRTTKLATQEEFYKFIKPILEKMDGAEELLAKLNRDDLLRKQRTFDNGSIPHQIHLKELHAILRRQEEFYPFLKENREKIEKILTFRIPYYVGPLARGNSRFAWLTRKSEEAITPWNFEEVVDKGASAQSFIERMTNFDEQLPNKKVLPKHSLLYEYFTVYNELTKVKYVTERMRKPEFLSGEQKKAIVDLLFKTNRKVTVKQLKEDYFKKIECFDSVEIIGVEDRFNASLGTYHDLLKIIKDKDFLDNEENEDILEDIVLTLTLFEDREMIEERLKTYAHLFDDKVMKQLKRRHYTGWGRLSRKMINGIRDKQSGKTILDFLKSDGFSNRNFMQLIHDDSLTFKEEIEKAQVSGQGDSLHEQIADLAGSPAIKKGILQTVKIVDELVKVMGHKPENIVIEMARENQTTTKGLQQSRERKKRIEEGIKELESQILKENPVENTQLQNEKLYLYYLQNGRDMYVDQELDINRLSDYDVDHIVPQSFIKDDSIDNKVLTRSVENRGKSDNVPSEEVVKKMKNYWRQLLNAKLITQRKFDNLTKAERGGLSEADKAGFIKRQLVETRQITKHVARILDSRMNTKRDKNDKPIREVKVITLKSKLVSDFRKDFQLYKVRDINNYHHAHDAYLNAVVGTALIKKYPKLESEFVYGDYKVYDVRKMIAKSEQEIGKATAKRFFYSNIMNFFKTEVKLANGEIRKRPLIETNGETGEVVWNKEKDFATVRKVLAMPQVNIVKKTEVQTGGFSKESILSKRESAKLIPRKKGWDTRKYGGFGSPTVAYSILVVAKVEKGKAKKLKSVKVLVGITIMEKGSYEKDPIGFLEAKGYKDIKKELIFKLPKYSLFELENGRRRMLASATELQKANELVLPQHLVRLLYYTQNISATTGSNNLGYIEQHREEFKEIFEKIIDFSEKYILKNKVNSNLKSSFDEQFAVSDSILLSNSFVSLLKYTSFGASGGFTFLDLDVKQGRLRYQTVTEVLDATLIYQSITGLYETRTDLSQLGGD

SEQ ID NO: 450 - protein, 1345 aa, Streptococcus constellatus
  source 1..1345: note = Streptococcus constellatus subsp. constellatus SK53
MGKPYSIGLDIGTNSVGWAVVTDDYKVPAKKMKVLGNTDKQSIKKNLLGALLFDSGETAEATRLKRTARRRYTRRKNRLRYLQEIFTGEMNKVDENFFQRLDDSFLVDEDKRGEHHPIFGNIAAEVKYHDDFPTIYHLRRHLADTSKKADLRLVYLALAHMIKFRGHFLYEGDLKAENTDVQALFKDFVEEYDKTIEESHLSEITVDALSILTEKVSKSSRLENLIAHYPTEKKNTLFGNLIALSLDLHPNFKTNFQLSEDAKLQFSKDTYEEDLEGFLGEVGDEYADLFASAKNLYDAILLSGILTVDDNSTKAPLSASMVKRYEEHQKDLKKLKDFIKVNAPDQYNAIFKDKNKKGYASYIESGVKQDEFYKYLKGILLKINGSGDFLDKIDREDFLRKQRTFDNGSIPHQIHLQEMHAILRRQGEHYPFLKENQDKIEKILTFRIPYYVGPLARKGSRFAWAEYKADEKITPWNFDDILDKEKSAEKFITRMTLNDLYLPEEKVLPKHSPLYEAFTVYNELTKVKYVNEQGEAKFFDTNMKQEIFDHVFKENRKVTKDKLLNYLNKEFEEFRIVNLTGLDKENKAFNSSLGTYHDLRKILDKSFLDDKANEKTIEDIIQTLTLFEDREMIRQRLQKYSDIFTKAQLKKLERRHYTGWGRLSYKLINGIRNKENKKTILDYLIDDGYANRNFMQLINDDALSFKEEIARAQIIDDVDDIANVVHDLPGSPAIKKGILQSVKIVDELVKVMGHNPANIIIEMARENQTTDKGRRNSQQRLKLLQDSLKNLDNPVNIKNVENQQLQNDRLFLYYIQNGKDMYTGETLDINNLSQYDIDHIIPQAFIKDNSLDNRVLTRSDKNRGKSDDVPSIEVVHEMKSFWSKLLSVKLITQRKFDNLTKAERGGLTEEDKAGFIKRQLVETRQITKHVAQILDERFNTEFDGNKRRIRNVKIITLKSNLVSNFRKEFELYKVREINDYHHAHDAYLNAVVGNALLLKYPQLEPEFVYGEYPKYNSYRSRKSATEKFLFYSNILRFFKKEDIQTNEDGEIAWNKEKHIKILRKVLSYPQVNIVKKTEEQTGGFSKESILPKGESDKLIPRKTKNSYWDPKKYGGFDSPVVAYSILVFADVEKGKSKKLRKVQDMVGITIMEKKRFEKNPVDFLEQRGYRNVRLEKIIKLPKYSLFELENKRRRLLASAKELQKGNELVIPQRFTTLLYHSYRIEKDYEPEHREYVEKHKDEFKELLEYISVFSRKYVLADNNLTKIEMLFSKNKDAEVSSLAKSFISLLTFTAFGAPAAFNFFGENIDRKRYTSVTECLNATLIHQSITGLYETRIDLSKLGED

SEQ ID NO: 451 - protein, 1371 aa, Streptococcus dysgalactiae
MDKKYSIGLDIGTNSVGWAVITDDYKVPSKKFKVLGNTDRHSIKKNLIGALLFDSGETAEATRLKRTARRRYTRRKNRIRYLQEIFSSEMSKVDDSFFHRLEESFLVEEDKKHERHPIFGNIVDEVAYHEKYPTIYHLRKKLADSTDKADLRLIYLALAHMIKFRGHFLIEGDLNPDNSDMDKLFIQLVQTYNQLFEENPINASRVDAKAILSARLSKSRRLENLIAQLPGEKRNGLFGNLIALSLGLTPNFKSNFDLAEDAKLQLSKDTYDDDLDNLLAQIGDQYADLFLAAKNLSDAILLSDILRVNSEITKAPLSASMIKRYDEHHQDLTLLKALVRQQLPEKYKEIFFDQSKNGYAGYIDGGASQEEFYKFIKPILEKMDGTEELLAKLNREDLLRKQRTFDNGSIPHQIHLGELHAILRRQEDFYPFLKDNREKIEKILTFRIPYYVGPLARGNSRFAWMTRKSEETITPWNFEEVVDKGASAQSFIERMTNFDKNLPNEKVLPKHSLLYEYFTVYNELTKVKYVTEGMRKPEFLSGKQKEAIVDLLFKTNRKVTVKQLKEDYFKKIECFDSVEISGVEDRFNASLGTYHDLLKIIKDKDFLDNEENEDILEDIVLTLTLFEDKEMIEERLKKYANLFDDKVMKQLKRRHYTGWGRLSRKLINGIRDKQSGKTILDFLKSDGFANRNFMQLINDDSLTFKEAIQKAQVSGQGHSLHEQIANLAGSPAIKKGILQSVKVVDELVKVMGHKPENIVIEMARENQTTQKGQKNSRERMKRIEEGIKELGSQILKEHPVENTQLQNEKLYLYYLQNGRDMYVDQELDINRLSDYDVDHIVPQSFIKDDSIDNKVLTRSDKNRGKSDNVPSEEVVKKMKNYWRQLLNAKLITQRKFDNLTKAERGGLSELDKAGFIKRQLVETRQITKHVAQILDSRMNTKYDENDKLIREVKVITLKSKLVSDFRKDFQFYKVREINNYHHAHDAYLNAVVGTALIKKYPKLESEFVYGDYKVYDVRKMIAKSEQEIGKATAKRFFYSNIMNFFKTEITLANGEIRKRPLIETNEETGEIVWDKGRDFATVRKVLSMPQVNIVKKTEVQTGALTNESIYARGSFDKLISRKHRFESSKYGGFGSPTVTYSVLVVAKSKVQDGKVKKIKTGKELIGITLLDKLVFEKNPLKFIEDKGYGNVQIDKCIKLPKYSLFEFENGTRRMLASVMANNNSRGDLQKANEMFLPAKLVTLLYHAHKIESSKELEHEAYILDHYNDLYQLLSYIERFASLYVDVEKNISKVKELFSNIESYSISEICSSVINLLTLTASGAPADFKFLGTTIPRKRYGSPQSILSSTLIHQSITGLYETRIDLSQLGGD

SEQ ID NO: 452 - protein, 1371 aa, Streptococcus dysgalactiae
MDKKYSIGLDIGTNSVGWAVITDDYKVPSKKFKVLGNTDRHSIKKNLIGALLFDSGETAEATRLKRTARRRYTRRKNRIRYLQEIFSSEMSKVDDSFFHRLEESFLVEEDKKHERHPIFGNIVDEVAYHEKYPTIYHLRKKLADSTDKADLRLIYLALAHMIKFRGHFLIEGDLNPDNSDVDKLFIQLVQTYNQLFEEKPINASGVDAKAILSARLSKSKRLENLIAQLPGEKKNGLFGNLIALSLGLTPNFKSNFDLAEDAKLQLSKDTYDDDLDNLLAQIGNQYADLFLAAKNLSDAILLSDILRVNSEITKAPLSASMIKRYDEHHQDLTLLKALVRQQLPEKYKEIFFDQSKNGYAGYIDGGASQEEFYKFIKPILEKMDGTEELLAKLNREDLLRKQRTFDNGSIPHQIHLGELHAILRRQEDFYPFLKDNREKIEKILTFRIPYYVGPLARGNSRFAWMTRKSEETITPWNFEEVVDKGASAQSFIERMTNFDKNLPNEKVLPKHSLLYEYFTVYNELTKVKYVTEGMRKPEFLSGKQKEAIVDLLFKTNRKVTVKQLKEDYFKKIECFDSVEISGVEDRFNASLGTYHDLLKIIKDKDFLDNEENEDILEDIVLTLTLFEDKEMIEERLKKYANLFDDKVMKQLKRRHYTGWGRLSRKLINGIRDKQSGKTILDFLKSDGFANRNFMQLINDDSLTFKEAIQKAQVSGQGHSLHEQIANLAGSPAIKKGILQSVKVVDELVKVMGHKPENIVIEMARENQTTQKGQKNSRERMKRIEEGIKELGSQILKEHPVENTQLQNEKLYLYYLQNGRDMYVDQELDINRLSDYDVDHIVPQSFIKDDSIDNKVLTRSDKNRGKSDNVPSEEVVKKMKNYWRQLLNAKLITQRKFDNLTKAERGGLSELDKAGFIKRQLVETRQITKHVAQILDSRMNTKYDENDKLIREVKVITLKSKLVSDFRKDFQFYKVREINNYHHAHDAYLNAVVGTALIKKYPKLESEFVYGDYKVYDVRKMIAKSEQEIGKATAKRFFYSNIMNFFKTEITLANGEIRKRPLIETNEETGEIVWDKGRDFATVRKVLSMPQVNIVKKTEVQTGALTNESIYARGSFDKLISRKHRFESSKYGGFGSPTVTYSVLVVAKSKVQDGKVKKIKTGKELIGITLLDKLVFEKNPLKFIEDKGYGNVQIDKCIKLPKYSLFEFENGTRRMLASVMANNNSRGDLQKANEMFLPAKLVTLLYHAHKIESSKELEHEAYILDHYNDLYQLLSYIERFASLYVDVEKNISKVKELFSNIESYSISEICSSVINLLTLTASGAPADFKFLGTTIPRKRYGSPQSILSSTLIHQSITGLYETRIDLSQLGGD

SEQ ID NO: 453 - protein, 1371 aa, Streptococcus dysgalactiae
MDKKYSIGLDIGTNSVGWAVITDDYKVPSKKFKVLGNTDRHSIKKNLIGALLFDSGETAEATRLKRTARRRYTRRKNRIRYLQEIFSSEMSKVDDSFFHRLEESFLVEEDKKHERHPIFGNIVDEVAYHEKYPTIYHLRKKLADSTDKADLRLIYLALAHMIKFRGHFLIEGDLNPDNSDMDKLFIQLVQTYNQLFEENPINASRVDAKAILSARLSKSRRLENLIAQLPGEKRNGLFGNLIALSLGLTPNFKSNFDLAEDAKLQLSKDTYDDDLDNLLAQIGDQYADLFLAAKNLSDAILLSDILRVNSEITKAPLSASMIKRYDEHHQDLTLLKALVRQQLPEKYKEIFFDQSKNGYAGYIDGGASQEEFYKFIKPILEKMDGTEELLAKLNREDLLRKQRTFDNGSIPHQIHLGELHAILRRQEDFYPFLKDNREKIEKILTFRIPYYVGPLARGNSRFAWMTRKSEETITPWNFEEVVDKGASAQSFIERMTNFDKNLPNEKVLPKHSLLYEYFTVYNELTKVKYVTEGMRKPEFLSGKQKEAIVDLLFKTNRKVTVKQLKEDYFKKIECFDSVEISGVEDRFNASLGTYHDLLKIIKDKDFLDNEENEDILEDIVLTLTLFEDKEMIEERLKKYANLFDDKVMKQLKRRHYTGWGRLSRKLINGIRDKQSGKTILDFLKSDGFANRNFMQLINDDSLTFKEAIQKAQVSGQGHSLHEQIANLAGSPAIKKGILQSVKVVDELVKVMGHKPENIVIEMARENQTTQKGQKNSRERMKRIEEGIKELGSQILKEHPVENTQLQNEKLYLYYLQNGRDMYVDQELDINRLSDYDVDHIVPQSFIKDDSIDNKILTRSDKNRGKSDNVPSEEVVKKMKNYWRQLLNAKLITQRKFDNLTKAERGGLSELDKAGFIKRQLVETRQITKHVAQILDSRMNTKYDENDKLIREVKVITLKSKLVSDFRKDFQFYKVREINNYHHAHDAYLNAVVGTALIKKYTKLESEFVYGDYKVYDVRKMIAKSEQEIGKATAKRFFYSNIMNFFKTEITLANGEIRKRPLIETNEETGEIVWDKGRDFATVRKVLSMPQVNIVKKTEVQTGALTNESIYARGSFDKLISRKHRFESSKYGGFGSPTVTYSVLVVAKSKVQDGKVKKIKTGKELIGMTLLDKLVFEKNPLKFIEDKGYGNVQIDKCIKLPKYSLFEFENGTRRMLASVMANNNSRGDLQKANEMFLPAKLVTLLYHAHKIESSKELEHEAYILDHYNDLYQLLSYIERFASLYVDVEKNISKVKELFSNIESYSISEICSSVINLLTLTASGAPADFKFLGTTIPRKRYGSPQSILSSTLIHQSITGLYETRIDLSQLGGD

SEQ ID NO: 454 - protein, 1371 aa, Streptococcus dysgalactiae
MDKKYSIGLDIGTNSVGWAVITDDYKVPSKKFKVLGNTDRHSIKKNLIGALLFDSGETAEATRLKRTARRRYTRRKNRIRYLQEIFSSEMSKVDDSFFHRLEESFLVEEDKKHERHPIFGNIVDEVAYHEKYPTIYHLRKKLADSTDKADLRLIYLALAHMIKFRGHFLIEGDLNPDNSDMDKLFIQLVQTYNQLFEENPINASRVDAKAILSARLSKSRRLENLIAQLPGEKRNGLFGNLIALSLGLTPNFKSNFDLAEDAKLQLSKDTYDDDLDNLLAQIGDQYADLFLAAKNLSDAILLSDILRVNSEITKAPLSASMIKRYDEHHQDLTLLKALVRQQLPEKYKEIFFDQSKNGYAGYIDGGASQEEFYKFIKPILEKMDGTEELLAKLNREDLLRKQRTFDNGSIPHQIHLGELHAILRRQEDFYPFLKDNREKIEKILTFRIPYYVGPLARGNSRFAWMTRKSEETITPWNFEEVVDKGASAQSFIERMTNFDKNLPNEKVLPKHSLLYEYFTVYNELTKVKYVTEGMRKPEFLSGKQKEAIVDLLFKTNRKVTVKQLKEDYFKKIECFDSVEISGVEDRFNASLGTYHDLLKIIKDKDFLDNEENEDILEDIVLTLTLFEDKEMIEERLKTYAHLFDDKVMKQLKRRHYTGWGRLSRKLINGIRDKQSGKTILDFLKSDGFANRNFIQLIHDDSLTFKEAIQKAQVSGQGHSLHEQIANLAGSPAIKKGILQSVKVVDELVKVMGHKPENIVIEMARENQTTQKGQKNSRERMKRIEEGIKELGSQILKEHPVENTQLQNEKLYLYYLQNGRDMYVDQELDINRLSDYDVDHIVPQSFIKDDSIDNKVLTRSDKNRGKSDDVPSEEVVKKMKNYWRQLLNAKLITQRKFDNLTKAERGGLSELDKAGFIKRQLVETRQITKHVAQILDSRMNTKYDENDKLIREVKVITLKSKLVSDFRKDFQFYKVREINNYHHAHDAYLNAVVGTALIKKYPKLESEFVYGDYKVYDVRKMIAKSEQEIGKATAKRFFYSNIMNFFKTEITLANGEIRKRPLIETNEETGEIVWNKGRDFATVRKVLSMPQVNIVKKTEVQTGALTNESIYARGSFDKLISRKHRFESSKYGGFGSPTVTYSVLVVAKSKVQDGKVKKIKTGKELIGITLLDKLVFEKNPLKFIEDKGYGNVQIDKCIKLPKYSLFEFENGTRRMLASVMANNNSRGDLQKANEMFLPAKLVTLLYHAHKIESSKELEHEAYILDHYNDLYQLLSYIERFASLYVDVEKNISKVKELFSNIESYSISEICSSVINLLTLTASGAPADFKFLGTTIPRKRYGSPQSILSSTLIHQSITGLYETRIDLSQLGGD

SEQ ID NO: 455 - protein, 1348 aa, Streptococcus equi
MKKPYTIALDIGTNSVGWVVVTDDYRVPTKKMKVLGNTERKTIKKNLIGALLFDSGDTAEGTRLKRTARRRYTRRKNRLRYLKEIFTEEMAKVDDGFFQRLEDSFYVLEDKEGNKHPIFANLADEVAYHKKYPTIYHLRKELVDNPQKADLRLIYLAVAHIIKFRGHFLIEGTLSSKNNNLQKSFDHLVDTYNLLFEEQRLLTEGINAKELLSAALSKSKRLENLISLIPGQKKTGIFGNIIALSLGLTPNFKANFGLSKDVKLQLAKDTYADDLDSLLAQIGDQYADLFLAAKNLSDAILLSDILTESDEITRAPLSASMVKRYREHHKDLVTLKTLIKDQLPEKYQEIFLDKTKNGYAGYIEGQVSQEEFYKYLKPILARLDGSEPLLLKIDREDFLRKQRTFDNGSIPHQIHLEELHAILRRQEVFYPFLKDNRKKIESLLTFRIPYYVGPLARGHSRFAWVKRKFDGAIRPWNFEEIVDEEASAQIFIEKMTKNDLYLPNEKVLPKHSLLYETFTVYNELTKVKYATEGMTRPQFLSADQKQAIVDLLFKTNRKVTVKQLKENYFKKIECWDSVEITGVEDSFNASLGTYHDLLKIIQDKDFLDNPDNQKIIEDIILTLTLFEDKKMISKRLDQYAHLFDKVVLNKLERHHYTGWGRLSGKLINGIRDKQSGKTILDFLKADGFANRNFMQLIHDSELSFIDEIAKAQVIGKTEYSKDLVGNLAGSPAIKKGISQTIKIVDELVKIMGYLPQQIVIEMARENQTTAQGIKNARQRMRKLEETAKKLGSNILKEHPVDNSQLQNDKRYLYYLQNGKDMYTGDDLDIDYLSSYDIDHIIPQSFIKNNSIDNKVLTSQGANRGKLDNVPSEAIVRKMKGYWQSLLRAGAISKQKFDNLTKAERGGLTQVDKAGFIQRQLVETRQITKHVAQILDSRFNTEFDDHNKRIRKVHIITLKSKLVSDFRKEFGLYKIRDINHYHHAHDAYLNAVVAKAILGKYPQLAPEFVYGDYPKYNSFKERQKATQKMLFYSNILKFFKDQESLHVNSDGEEIWNANKHLPIIKNVLSIPQVNIVKKTEVQTGGFYKESILSKGNSDKLIPRKNNWDTRKYGGFDSPTVAYSVLVIAKMEKGKAKVLKPVKEMVGITIMERTAFEENPVVFLEARGYREIQEHLIIKLPKYSLFELENGRRRLLASASELQKGNELFLPVDYMTFLYLAAHYHELTGSSEDVLRKKYFVDRHLHYFDDIIQMINDFAERHILASSNLEKINHTYHNNSDLPVNERAENIINVFTFVALGAPAAFKFFDATIDRKRYTSTKEVLNATLIHQSVTGLYETRIDLSQLGEN

SEQ ID NO: 456 - protein, 1377 aa, Streptococcus equinus
  source 1..1377: note = Streptococcus equinus ATCC 9812
MEKTYSIGLDIGTNSVGWAVITDDYKVPAKKMKVLGNTDKKYIKKNLLGALLFDSGETAEATRLKRAARRRYTRRKNRLRYLQEIFAKEMAKVDESFFQRLEESFLTDDDKTFDSHPIFGNKAEEDTYHQEFPTIYHLRKHLADSPEKVDLRLVYLALAHMIKFRGHFLIEGQLNAENTDVQKIFADFVGVYDRTFDDSHLSEITVDAASILTEKISKSRRLENLIKQYPTEKKNTLFGNLVALALGLQPNFKTNFKLSEDAKLQFSKDTYDEDLEELLGKIGDDYADLFTAAKNLYDAILLSGILTVDDNSTKAPLSASMIKRYEEHHEDLEKLKTFIKVNNFDKYHEIFKDKSKNGYAGYIENGVKQDIFYKHLKSIISEKNGGQYFLDKIEREDFLRKQRTFDNGSIPYQIHLQEMRTILRRQGEYYPFLKENQAKIEKILTFRIPYYVGPLARKNSRFAWAKYHSDEPITPWNFDEVVDKEKSAEKFITRMTLNDLYLPEEKVLPKHSYVYETFAVYNELTKIKYVNEQGKSFFFDANMKQEIFDHVFKENRKVTKAKLLSYLNNEFEEFRINDLIGLDKDSKSFNASLGTYHDLKKILDKSFLDDKTNEQIIEDIVLTLTLFEDRDMIHERLQKYSDIFTSQQLKKLERRHYTGWGRLSYKLINGIRNKENNKTILDFLIDDGDANRNFMQLINDDSLSFKTTIQEAQVVGDVDDIEAVVHDLPGSPAIKKGILQSVKIVDELVKVMGHNPQNIVIEMARENQITGYGRNRSNQRLKRLQDSLKEFGSDILSKKKPSYVDSKVENSHLQNDRLFLYYIQNGKDMYTGEELDIDHLSDYDIDHIIPQAFIKDNSIDNRVLTSSAKNRGKSDDVPSIEIVRNRKSYWYKLYKSGLISKRKFDNLTKAERGGLTETDKAGFIKRQLVETRQITKHVAQILDARFNTKCDENDKVIRDVKVITLKSSLVSQFRKEFKFYKVREINDYHHAHDAYLNAVVGTALLKKYPKLAPEFVYGEYKKYDVRKLVAKSSDNHSELGKATAKYFFYSNLMNFFKTEVKYADGRVFERPDIETNADGEVVWNKQRDFNIVRKVLSYPQVNIVKKVEVQTGGFSKESILPKGDSDKLIPRKTKKLQWETQKYGGFDSPTVAYSVLVVADVEKGKTRKLKTVKELVGISIMERSSFEENPVSFLEKKGYHNVQEDKLIKLPKYSLFEFEGGRRRLLASATELQKGNEVVLPQYMVNLLYHSQHVNNSHKPEHLNYVKQHKDEFKDIFNLIISIARINILKPKVVDNLINEFTEYGQEDISSLSESFINLLKFISFGAPGAFKFLKLDVKQSNLRYKSTTEALSATLIHQSVTGLYETRIDLSKLGEE

SEQ ID NO: 457 - protein, 1370 aa, Streptococcus gallolyticus
MTKKNYSIGLDIGTNSVGWAVITDDYKVPAKKMKVLGNTDKKYIKKNLLGALLFDSGETAEATRLKRTARRRYTRRKNRLRYLQEIFAEEMTKVDESFFYRLDESFLTTDEKDFERHPIFGNKAEEDAYHQKFPTIYHLRNYLADSSEKADLRLVYLALAHMIKYRGHFLIEGKLNAENTDVQKLFTDFVGVYDRTFDDSHLSEITVDVASTLTEKISKSRRLENLIKYYPTEKKNTLFGNLIALALGLQPNFKMNFKLSEDAKLQFSKDTYEEDLEELLGKIGDDYADLFTSAKNLYDAILLSGILTVDDNSTKAPLSASMIKRYVEHHEDLEKLKEFIKANKSELYHDIFKDKNKNGYAGYIENGVKQDEFYKYLKNTLSKIDGSDYFLDKIEREDFLRKQRTFDNGSIPHQIHLQEMHAILRRQGDYYPFLKEKQDRIEKILTFRIPYYVGPLVRKDSRFAWAEYRSDEKITPWNFDKVIDKEKSAEKFITRMTLNDLYLPEEKVLPKHSHVYETYAVYNELTKIKYVNEQGKESFFDSNMKQEIFDHVFKENRKVTKEKLLNYLNKEFPEYRIKDLIGLDKENKSFNASLGTYHDLKKILDKAFLDDKVNEEVIEDIIKTLTLFEDKDMIHERLQKYSDIFTANQLKKLERRHYTGWGRLSYKLINGIRNKENNKTILDYLIDDGSANRNFMQLINDDTLPFKQIIQKSQVVGDVDDIEAVVHDLPGSPAIKKGILQSVKIVDELVKVMGDNPDNIVIEMARENQTTNRGRSQSQQRLKKLQSSLKELGSNILNEEKPSYIEDKVENSHLQNDQLFLYYIQNGKDMYTGDELDIDHLSDYDIDHIIPQAFIKDDSIDNRVLTSSAKNRGKSDDVPSLDIVRARKAEWVRLYKSGLISKRKFDNLTKAERGGLTEADKAGFIKRQLVETRQITKHVAQILDARFNTEHDENDKVIRDVKVITLKSNLVSQFRKDFEFYKVREINDYHHAHDAYLNAVVGTALLKKYPKLASEFVYGEYKKYDIRKFITNSSDKATAKYFFYSNLMNFFKTKVKYADGTVFERPIIETNADGEIAWNKQIDFEKVRKVLSYPQVNIVKKVETQTGGFSKESILPKGDSDKLIPRKTKKVYWDTKKYGGFDSPTVAYSVFVVADVEKGKAKKLKTVKELVGISIMERSFFEENPVEFLENKGYHNIREDKLIKLPKYSLFEFEGGRRRLLASASELQKGNEMVLPGYLVELLYHAHRADNFNSTEYLNYVSEHKKEFEKVLSCVEDFANLYVDVEKNLSKIRAVADSMDNFSIEEISNSFINLLTLTALGAPADFNFLGEKIPRKRYTSTKECLTATLIHQSITGLYETRIDLSKLGEE

SEQ ID NO: 458 - protein, 1370 aa, Streptococcus gallolyticus; identical to SEQ ID NO: 457
  source 1..1370: note = Streptococcus gallolyticus subsp. gallolyticus TX20005

SEQ ID NO: 459 - protein, 1371 aa, Streptococcus gallolyticus
MTEKNYSIGLDIGTNSVGWAVITDDYKVPAKKMKVLGNTDKKYIKKNLLGALLFDNGETAEATRLKRTARRRYTRRKNRLRYLQEIFAEEMAKVDESFFYRLDESFLTTDDKDFERHPIFGNKADEIKYHQEFPTIYHLRKHLADSHEKADLRLIYLALAHMIKFRGHFLIEGELNAENTDVQKLFEAFVEVYDRTFDDSNLSEITVDASSILTEKFSKSRRLENLIKHYPTEKKNTLFGNLVALALGLQPNFKTSFKLSEDAKLQFSKDTYEEDLEELIGKIGDEYADLFTSAKNLYDAILLSGILTVADNTTKAPLSASMIKRYNEHQVDLKKLKEFIKNNASDKYDEIFNDKDKNGYAGYIENGVKQDEFYKYLKTTLSKIDGSDYFLDKIEREDFLRKQRTFDNGSIPHQIHLQEMHAILRRQGEHYAFLKENQAKIEKILTFRIPYYVGPLARKNSRFAWAEYHSDEKITPWNFDEIIDKEKSAEKFITRMTLNDLYLPEEKVLPKHSLVYETYTVYNELTKVKYVNEQGKSNFFDANMKQEIFEHVFKENRKVTKDKFLNYLNKEFPEYRIQDLIGLDKENKSFNASLGTYHDLKKILDKSFLDDKTNETIIEDIIQTLTLFEDRDMIRQRLQKYSDIFTPQQLKKLERRHYTGWGRLSYKLINGIRNKENGKSILDYLIDDGYANRNFMQLISDDTLPFKQIIKDAQIIGDIDDVTSVVRELPGSPAIKKGILQSVKIVDELVKVMGHNPDNIVIEMARENQTTNRGRNQSQQRLKKLQDSLKELGSNILNEEKPSYIEGKVENNHLQDDRLFLYYIQNGKDMYTGDELDIDHLSDYDIDHIIPQAFIKDDSIDNRVLTSSAKNRGKSDDVPSLDIVHDRKADWIRLYKSGLISKRKFDNLTKAERGGLTENDKAGFIKRQLVETRQITKHVAQILDSRFNTERDENDKVIRNVKVITLKSNLVSQFRKDFKFYKVREINDYHHAHDAYLNAVVGTALLKKYPKLAPEFVYGEYKKYDIRKFITSSGDKATAKYFFYSNLMNFFKRVIRYSNGKVVVRPVIECSKDTGEIAWNKQTDFEKVRRVLSYPQVNIVKKVETQTGGFSKESILPKGNSDKLIPRKTKKFRWDTPKYGGFDSPNIAYSVFVIADVEKGKAKKLKTVKELVGISIMERSSFEENPVVFLEKKGYQNVQEDNLIKLPKYSLFEFEGGRRRLLASASELQKGNEVVLSRHLVELLYHAHRVNSFNNSEHLKYVSEHKKEFGEVLSCVENFAKSYVDVEKNLGKIRAVADKIDTFSIEDISISFVNLLTLTALGAPADFNFLGEKIPRKRYTSTKECLNATLIHQSITGLYETRIDLSKLGEE

SEQ ID NO: 460 - protein, 1130 aa, Streptococcus gallolyticus
MTNGKILGLDIGIASVGVGIIEAKTGKVVHANSRLFSAANAENNAERRGFRGSRRLNRRKKHRVKRVRDLFEKYEIVTDFRNLNLNPYELRVKGLTEQLTNEELFAALRTISKRRGISYLDDAEDDSTGSTDYAKSIDENRRLLKTKTPGQIQLERLEKYGQLRGNFTVYDENGEAHRLINVFSTSDYEKEARKILETQADYNKKITAEFIDDYVEILTQKRKYYHGPGNEKSRTDYGRFRTDGTTLENIFGILIGKCSFYPDEYRASKASYTAQEYNFLNDLNNLKVPTETGKLSTEQKEALVEFAKSTATLGPAKLLKEIAKILDCKVDEIKGYREDDKGKPDLHTFEPYRKLKFNLDSVNIDDLSREVLDKLADILTLNTEREGIEDAIRHNLPNQFTEGQISEIIKVRKSQSTAFNKGWHSFSAKLMNELIPELYATSDEQMTILTRLEKFKVNKKSSKNTKTIDEKEVTDEIYNPVVAKSVRQTIKIINAAVKKYGDFDKIVIEMPRDKNADDEKKFIDKRNKENKKEKDDALKRAAYLYNGTDKLPDEVFHGNKQLETKIRLWYQQGERCLYSGKPIPIQELVHNSNNFEIDHILPLSLSFDDSLANKVLVYAWTNQEKGQKTPYQVIDSMDAAWSFREMKDYVLKQKGLGKKKRDYLLTTENIDKIEVKKKFIERNLVDTRYASRVVLNSLQSALRELGKDTKISVIRGQFTSQLRRKWKIDKSRETYHHHAVDALIIAASSQLKLWEKQDNPMFVDYGNNQVVDKQTGEILSVSDDEYKELVFQPPYQGFVNMISSKGFEDEILFSYQVDSKYNRKVSDATIYSTRKAKIGKDKKEETYVLGKIKDIYSQNGFDTFIKKYNKDKTQFLMYQKDPLTWENVIEVILRDYPTTKKSEDGKNDVKCNPFEEYRRENGLVCKYSKKGKGTPIKSLKYYDKKLGNCIDITPEGSKNEVVLQSLNPWRADVYFNPETLKYELLGLKYSDLSFEKGTGKYHISQEKYDVIKEKEGIGKKSEFKFTLYRNDLILIKDTASGEQEIYRFLSRTMPNVKHYAELKPYDKEKFDNVQELVEALGEADKVGRCIKGLNKSNLSIYKVRTDVLGNKYFVKKEGDKPKLDFKNNKK

SEQ ID NO: 461 - protein, 1136 aa, Streptococcus gordonii
MNGLVLGLDIGIASVGVGILEKDTGKIIHASSRLFPAATADNNVERRSNRQGRRLNRRKKHRSVRLQDLFEGYGLLTDFSKVSMNLNPYQLRVQGMENQLTNEELFVALKNIVKRRGISYLDDASEDGGTVSSDYGKAVEENRKLLAEKTPGQIQLERFEKYGQLRGDFTVEENGEKHRLINVFSTSAYRKEAERILRKQQEFNSKITDEFIEDYLIILTGKRKYYHGPGNEKSRTDYGRFRTDGTTLDNIFGILIGKCTFYTEEYRASKASYTAQEFNLLNDLNNLTVPTETKKLSEEQKKLIIEYAKSAKTLGASTLLKYIAKMIDASVDQIRGYRVDVNNKPEMHTFEVYRKMQSLETIKVEELPRKVLDELAHILTLNTEREGIEEAINSKLKDIFNRDQVLELVQFRKNNSSLFSKGWHNFSIKLMMELIPELYETSEEQMTILTRLGKQRSKETSKRTKYIDEKELTEEIYNPVVAKSVRQAIKIINEATKKYGIFDNIVIEMARENNEEDAKKDYIKRQKANQDEKNAAMEKAAFQYNGKKELPDNIFHGHKELTTKIRLWHQQGEKCLYTGKNIPISDLIHNQYKYEIDHILPLSLSFDDSLSNKVLVLATANQEKGQRTPFQALDSMDDAWSYREFKSYVKDSKLLSNKKKDYLLTEEDISKIEVKQKFIERNLVDTRYSSRVVLNALQDFYKSHQLDTTISVVRGQFTSQLRRKWGIEKSRETYHHHAVDALIIAASSQLRLWKKHSNPLIAYKEGQFVDSETGEIVSLSDEEYKELVFKAPYDHFVDTLRSKKFEDSILFSYQVDSKYNRKISDATIYATRKAKLDKEKKEYTYTLGKIKDIYALGTKTPSKTGFYKFLDLYKTDKSQFLMYQKDRKTWDEVIEKIIEQYRPFKEYDKNGKEVDFNPFEKYRIGNGPIRKYSKKGNGPEIKSLKYYDILLGKHKNITPDGSRNTVALLSLNPWRTDVYYNSETKKYEFLGLKYADLCFEEGGAYGISEVKYKKIREKEGIGKNSEFKFTLYKNDLILIKDTETNCQQFFRFWSRTGKDNPKSFEKHKIELKPYEKAKFEKGEELKVLGKVPPSSNQFQKNMQIENLSIYKVKTDILGNKHFIKKEGDEPKLKFKK

SEQ ID NO: 462 - protein, 1129 aa, Streptococcus infantarius
  source 1..1129: note = Streptococcus infantarius subsp. infantarius ATCC BAA-102
MSNGKILGLDIGVASVGVGIIDSKTGNVIHANSRLFSAANAENNAERRGFRGARRLTRRKKHRVKRVRDLFEKYDISTDFRNLNLNPYELRVKGLTEQLTNEELFAALRTIAKRRGISYLDDAEDDSTGSSDYAKSIDENRRLLKTKTPGQIQLERLEKYGQLRGNFTVYDENGEAHRLINVFSTSDYKNEARKILETQSNYNKQITDEFIEDYIEILTQKRKYYHGPGNEKSRTDYGRFRTDGTTLENIFGILIGKCSFYPEEYRASKASYTAQEFNFLNDLNNLKVPTETGKLSTEQKEYLVDFAKKSKALGASKLLKEIAKIVDCSVDDIKGYRVDNKDKPDLHTFEPYRKLKFNLSSIDIDELSRETLDKLADILTLNTEREGIEDAIKRNLPSQFTEEQISEIVQIRKNQSSAFNKGWHSFSAKLMNELIPELYVTSEEQMTILTRLEKFKVNKKSSKNTKTIDEKEITDEIYNPVVAKSVRQTIKIINAAVKKYGDFDKIVIEMPRDKNAEDEKKFIDKKQKENKKEKDDSLKRAAFLYNGTDNLPDGVFHGNKELKTKIRLWYQQGERCLYSGKLISIHDLVHNSNKFEIDHILPLSLSFDDSLANKVLVYAWTNQEKGQKTPYQVIDSMDTAWSFREMKDYVLKQKGLGKKKCEYLLTTENIDKIEVKKKFIERNLVDTRYASRVVLNSLQTALKELGKDTKVSVVRGQFTSQLRRKWNIDKSRETYHHHAVDALIIAASSQLKLWQKQENPMFESYGENQVVNKETGEILSISDDKYKELVFQPPYQGFVNTISSKGFEDEILFSYQVDSKFNRKVSDATIYSTRKAKLGKDKKDETYVLGKIKDIYSQDGFDTFIKRYKKDKTQFLMYQKDPLTWENVIEVILRDYPSEKLSEDGKKTVKCNPFEEYRRENGLICKYSKKGNGTPIKSLKYYDKKLGNCIDITPEKSKNRVVLRQISPWRADIYFNLETLKYELMGLKYSDLSFEKGTGKYHISQEKYDAIREKEGIGKKSEFKFTLYRNDLILIKDTLNNCERMLRFGSKNDTSKHYVELKPLEKGTFDSEEEILPVLGKVAKSGQFIKGLNKPNISIYKVRTDVLGNKFFIKKEGDKPKLDFKNNNK

SEQ ID NO: 463 - protein, 1375 aa, Streptococcus infantarius
MEKSYSIGLDIGTNSVGWAVITDDYKVPAKKMKVLGNTDKKYIKKNLLGALLFDSGETAEVTRLKRTARRRYTRRKNRLRYLQEIFAKEMTKVDESFFQRLEESFLTDDDKTFDSHPIFGNKAEEDAYHQKFPTIYHLRKYLADSQEKADLRLVYLALAHMIKYRGHFLIEGELNAENTDVQKLFNVFVETYDKIVDESHLSEIEVDASSILTEKVSKSRRLENLIKQYPTEKKNTLFGNLIALALGLQPNFKTNFKLSEDAKLQFSKDTYEEDLEELLGKVGDDYADLFISAKNLYDAILLSGILTVDDNSTKAPLSASMIKRYVEHHEDLEKLKEFIKINKLKLYHDIFKDKTKNGYAGYIDNGVKQDEFYKYLKTILTKIDDSDYFLDKIERDDFLRKQRTFDNGSIPHQIHLQEMHSILRRQGDYYPFLKENQAKIEKILTFRIPYYVGPLARKDSRFAWANYHSDEPITPWNFDEVVDKEKSAEKFITRMTLNDLYLPEEKVLPKHSHVYETFTVYNELTKIKYVNEQGESFFFDANMKQEIFDHVFKENRKVTKAKLLSYLNNEFEEFRINDLIGLDKDSKSFNASLGTYHDLKKILDKSFLDDKTNGQIIEDIVLTLTLFEDRDMIHERLQKYSDFFTSQQLKKLERRHYTGWGRLSYKLINGIRNKENNKTILDFLIDDGHANRNFMQLINDESLSFKTIIQEAQVVGDVDDIEAVVHDLPGSPAIKKGILQSVKIVDELVKVMGDNPDNIVIEMARENQTTGYGRNKSNQRLKRLQDSLKEFGSDILSKKKPSYVDSKVENSHLQNDRLFLYYIQNGKDMYTGEELDIDRLSDYDIDHIIPQAFIKDNSIDNKVLTSSAKNRGKSDDVPSIEIVRNRRSYWYKLYKSGLISKRKFDNLTKAERGGLTEADKAGFIKRQLVETRQITKHVAQILDARFNTKRDENDKVIRDVKVITLKSNLVSQFRKEFKFYKVREINDYHHAHDAYLNAVVGTALLKKYPKLTPEFVYGEYKKYDVRKLIAKSSDDYSEMGKATAKYFFYSNLMNFFKTEVKYADGRVFERPDIETNADGEVVWNKQKDFDIVRKVLSYPQVNIVKKVEAQTGGFSKESILSKGDSDKLIPRKTKKVYWNTKKYGGFDSPTVAYSVLVVADIEKGKAKKLKTVKELVGISIMERSFFEENPVSFLEKKGYHNVQEDKLIKLPKYSLFEFEGGRRRLLASATELQKGNEVMLPAHLVELLYHAHRIDSFNSTEHLKYVSEHKKEFEKVLSCVENFSNLYVDVEKNLSKVRAAAESMTNFSLEEISASFINLLTLTALGAPADFNFLGEKIPRKRYTSTKECLSATLIHQSVTGLYETRIDLSKLGEE

SEQ ID NO: 464 - protein, 1368 aa, Streptococcus iniae
  source 1..1368: note = Streptococcus iniae 9117
MRKPYSIGLDIGTNSVGWAVITDDYKVPSKKMRIQGTTDRTSIKKNLIGALLFDNGETAEATRLKRTTRRRYTRRKYRIKELQKIFSSEMNELDIAFFPRLSESFLVSDDKEFENHPIFGNLKDEITYHNDYPTIYHLRQTLADSDQKADLRLIYLALAHIIKFRGHFLIEGNLDSENTDVHVLFLNLVNIYNNLFEEDIVETASIDAEKILTSKTSKSRRLENLIAEIPNQKRNMLFGNLVSLALGLTPNFKTNFELLEDAKLQISKDSYEEDLDNLLAQIGDQYADLFIAAKKLSDAILLSDIITVKGASTKAPLSASMVQRYEEHQQDLALLKNLVKKQIPEKYKEIFDNKEKNGYAGYIDGKTSQEEFYKYIKPILLKLDGTEKLISKLEREDFLRKQRTFDNGSIPHQIHLNELKAIIRRQEKFYPFLKENQKKIEKLFTFKIPYYVGPLANGQSSFAWLKRQSNESITPWNFEEVVDQEASARAFIERMTNFDTYLPEEKVLPKHSPLYEMFMVYNELTKVKYQTEGMKRPVFLSSEDKEEIVNLLFKKERKVTVKQLKEEYFSKMKCFHTVTILGVEDRFNASLGTYHDLLKIFKDKAFLDDEANQDILEEIVWTLTLFEDQAMIERRLVKYADVFEKSVLKKLKKRHYTGWGRLSQKLINGIKDKQTGKTILGFLKDDGVANRNFMQLINDSSLDFAKIIKNEQEKTIKNESLEETIANLAGSPAIKKGILQSIKIVDEIVKIMGQNPDNIVIEMARENQSTMQGIKNSRQRLRKLEEVHKNTGSKILKEYNVSNTQLQSDRLYLYLLQDGKDMYTGKELDYDNLSQYDIDHIIPQSFIKDNSIDNTVLTTQASNRGKSDNVPNIETVNKMKSFWYKQLKSGAISQRKFDHLTKAERGALSDFDKAGFIKRQLVETRQITKHVAQILDSRFNSNLTEDSKSNRNVKIITLKSKMVSDFRKDFGFYKLREVNDYHHAQDAYLNAVVGTALLKKYPKLEAEFVYGDYKHYDLAKLMIQPDSSLGKATTRMFFYSNLMNFFKKEIKLADDTIFTRPQIEVNTETGEIVWDKVKDMQTIRKVMSYPQVNIVMKTEVQTGGFSKESIWPKGDSDKLIARKKSWDPKKYGGFDSPIIAYSVLVVAKIAKGKTQKLKTIKELVGIKIMEQDEFEKDPIAFLEKKGYQDIQTSSIIKLPKYSLFELENGRKRLLASAKELQKGNELALPNKYVKFLYLASHYTKFTGKEEDREKKRSYVESHLYYFDEIMQIIVEYSNRYILADSNLIKIQNLYKEKDNFSIEEQAINMLNLFTFTDLGAPSAFKFFNGDIDRKRYSSTNEIINSTLIYQSPTGLYETRIDLSKLGGK

SEQ ID NO: 465 - protein, 1338 aa, Streptococcus macacae
  source 1..1338: note = Streptococcus macacae NCTC 11558
MTKPYSIGLDIGTNSVGWAVVTDGYKVPAKKMKVLGNTDKSHIKKNLLGALLFDSGNTAKDRRLKRTARRRYTRRRNRILYLQEIFAEEMAKADESFFQRLNESFLTNDDKEFDSHPIFGNKAEEEAHHHKFPTIFHLRKHLADSTEKSDLRLIYLALAHMIKFRGHFLIEGQLKAENTNVQTLFDDFVEVYDKTVEESHLSEISVSSILTEKISKSRRLENLIKYYPTEKKNTLFGNLIALSLGLQPNFKTNFKLSEDAKLQFSKDTYEEDLGELLGKIGDNYADLFISAKNLYDAILLSGILTIDDNTTKAPLSASMIKRYEEHQEDLAQLKKFIRQNLPDQYSEVFSDKTKDGYAGYIDGKTNQEAFYKYIKNMLSKTEGADYFLDKIDREDFLRKQRTFDNGSVPHQIHLQEMHAILRRQGEYYPFLKENQDKIEKILTFRIPYYVGPLARKGSRFAWAEYKADKKVTPWNFDDILDKEKSAEEFITRMTLNDLYLPEEKVLPKHSLVYETFNVYNELTKVKYVNEQGKAIFFDANMKQEIFDHVFKENRKVTKDKLLNYLNKEFEEFRIVNLTGLDKENKAFNSSLGTYHDLRKILDKSFLDDKVNEKIIEDIIQTLTLFEDREMIRQRLQKYSDIFTTQQLKKLERRHYTGWGRLSAKLINGIRDKQSNKTILGYLIDDGYSNRNFMQLINDDSLPFKEEIARAQVIGETDDLNQLVSDIAGSPAIKKGILQSLKIVDELVKVMGHNPANIVIEMARENQTTAKGRRSSQQRYKRLEEAIKNLDHDLNHKILKEHPTDNQALQNDRLFLYYLQNGRDMYTEDPLDINRLSDYDIDHIIPQSFIKDDSIDNKVLVSSAKNRGKSDNVPSEDVVNRMRPFWNKLLSCGLISQRKYSNLTKKELKPDDKAGFIKRQLVETRQITKHVAQILDARFNTKRDENKKVIRDVKIITLKSNLVSQFRKDFKFYKVREINDYHHAHDAYLNAVIGKALLDVYPQLEPEFVYGEYPHFHGYKENKATAKKFFYSNIMNFFKKDDIRTDENGEIVWKKDEHISNIKRVLSYPQVNIVKKVEIQTVGQNGGLFDDNPKSPLEVTPSKLVPLKKELNPKKYGGYQKPTTAYPVLLITDTKQLIPISVMNKKQFEQNPVKFLRDRGYQQVGKNDFIKLPKYTLVDIGDGIKRLWASSKEIHKGNQLVVSKKSQILLYHAHHLDSDLSNDYLQNHNQQFDVLFNEIISFSKKCKLGKEHIQKIENVYSNKKNSASIEELAESFIKLLGFTQLGATSPFNFLGVKLNQKQYKGKKDYILPCTEGTLIRQSITGLYETRVDLSKIGED

SEQ ID NO: 466 - protein, 1130 aa, Streptococcus macedonicus
MTNGKILGLDIGIASVGVGIIEAKTGKVVHANSRLFSAANAENNAERRGFRGSRRLNRRKKHRVKRVRDLFEKYGIVTDFRNLNLNPYELRVKGLTEQLTNEELFAALRTISKRRGISYLDDAEDDSTGSTDYAKSIDENRRLLKTKTPGQIQLERLEKYGQLRGNFTVYDENGEAHRLINVFSTSDYEKEARKILETQADYNKKITAEFIDDYVEILTQKRKYYHGPGNEKSRTDYGRFRTDGTTLENIFGILIGKCNFYPDEYRASKASYTAQEYNFLNDLNNLKVPTETGKLSTEQKESLVEFAKNTAILGPAKLLKEIAKILDCKVDEIKGYREDDKGKPDLHTFEPYRKLKFNLDSVNIDYLSREVLDKLADILTLNTEREGIEDAIKRNLPNQFTEEQISEIINVRKSQSTAFNKGWHSFSAKLMNELIPELYATSDEQMTILTRLEKFKVKKKSSKNIKTIDEKEITDEIYNPVVAKSVRQTIKIINAAVKKYGDFDKIVIEMPRDKNADDEKKFINKRNKENKKEKDDALKRAAYLYNGTDKLPDEVFHGNKQLETKIRLWYQQGERCLYSGKPIPIQELVHNSNNFEIDHILPLSLSFDDSLANKVLVYSWTNQEKGQKTPYQVIDSMDAAWSFREMKEYVLKQKGLGKKKRDYLLTTENIDKIEVKKKFIERNLVDTRYASRVVLNSLQSALRELGKDTKVSVVRGQFTSQLRRKWKIDKSRETYHHHAVDALIIAASSQLKLWEKQDNPMFVDYGNNQVVDKQTGEILSVSDNEYKELVFQPPYQGFVNTISSKGFEDEILFSYQVDSKYNRKVSDATIYSTRKAKIGKDKKEETYVLGKIKDIYSQNGFDTFVKKYNKDKTQFLMYQKDPLTWENVIEVILGDYPTTKKSEDGKNDVKCNPFEEYRRENGLICKYSKKGKGTPIKSLKYYDKKLGNCIDITPEESRNKVILQSINPWRADVYFNPETLKYELMGLKYSDLSFEKGTGNYHISQEKYDAIKEKEGIGKKSEFKFTLYRNDLILIKDIASGEQEIYRFLSRTMPNVNHYVELKPYDKEKFDNVQELVEALGEADKVGRCIKSLNKPNISIYKVRTDVLGNKYFVKKEGDKPKLDFKNNKK

SEQ ID NO: 467 - protein, 1134 aa, Streptococcus mitis
  source 1..1134: note = Streptococcus mitis ATCC 6249
MNGLVLGLDIGIASEGVGILEKNSGKIIHANSRLFPAATADNNVERRKNRQARRLNRRKKHRGVRFQDLFEDYGLLTDFSKVSINLNPYRLRVDGLNQQLTNEELFIALKNIVKRRGISYLDDASEDGGAVSSDYGKAVEENRKLLAEQTPGQIQLERFEKYGQVRGDFTVVENGEKLRLINVFSTSAYKKEAERILRKQQEFNNQITDEFIEDYLKILTGKRKYYHGPGNEKSRTDYGRFRTDGTTLDNIFGILIGKCTFYPEEYRASKASYTAQEFNLLNDLNNLTVPTETKKLSEEQKKVIVEYAKEAKTLGASTLLKYIAKMIDASVDQIRGYRVDVNNKPEMHTFEVYRKMQSLETISVGELSRNVLDELAHILTLNTEREGMEEAINTKLKDSFSQDQVLELVQFRKNNSSLFSKGWHNFSLKLMMELIPELYETSEEQMTILTRLGKQKSKETSKRTKYIDEKELTEEIYNPVVAKSVRQAIKIINEATKKHGIFDNIVIEMARENNEEDAKKDYIKRQKANQDEKNAAMEKAAFQYNGKKELPDNIFHGHKELATKIRLWHQQGEKCLYTGKTIPISDLIYNQYKYEIDHILPLSLSFDDSLSNKVLALATANQEKGQRTPFQALDSMDDAWSYREFKSYVKDLKSLSNKKKDYLLTEEDISKIEVKQKFIERNLVDTRYSSRVVLNALQDFYKSHQFDTTISVVRGQFTSQLRRKWGLEKSRETYHHHAVDALIIAASSQLRLWKKQNNPLITYKEGQFVDSQTGEIISLTDDEYKELVFKAPYDHFVDTLSSKTFEDSILFSYQVDSKFNRKISDATIYATRKAKLDKEKKEYTYTLGKIKDIYSLGTKTPSKTGFYKFLDLYNKDKSQFLMFQKDRKTWDEVIEKIMEQYRPFKEYDKTGKLVDFNPFEKYRQENEPIRKYSKKGNGPEIKSLKYYDILLGKHKNITPEGSRNTVALLSLNPWRTDVYYNMETKKYEFLGLKYADLPFEEGGAYGISTETYNELREKEGIGKNSEFKFTLYKNDLILIKDTETNCQQIFRFWSRTGKDNPKSFEKHKIELKPYEKARFEKGEELEVLGKVPPSSNQLQKNMQIENLSIYKVKTDVLGNKHFIKKEGDKPKLKF

SEQ ID NO: 468 - protein, 1392 aa, Streptococcus mitis
  source 1..1392: note = Streptococcus mitis SK321
MNNNNYSIGLDIGTNSVGWAVITDDYKVPSKKMKVLGNTDKHFIKKNLIGALLFDEGATAEDRRFKRTARRRYTRRKNRLRYLQEIFSEEMSKVDSSFFHRLDDSFLVPEDKRGSKYPIFATLAEEKEYHKKFPTIYHLRKHLADSKEKTDLRLIYLALAHMIKYRGHFLYEESFDIKNNDIQKIFSEFISIYDNTFEGSSLSGQNAQVEAIFTDKISKSAKRERILKLFAYEKSTDLFSEFLKLIVGNQADFKKHFDLEEKAPLQFSKDTYDEDLENLLGQIGDDFADLFLVAKKLYDAILLSGILTVTDSSTKAPLSASMIERYENHQKDLAALKQFIQNNLQEKYDEVFSDQSKDGYARYINGKTTQEAFYKYIKNLLSKFEGSDYFLDKIEREDFLRKQRTFDNGSIPHQIHLQEMNAIIRRQGEHYPFLKEYKEKIETILTFRIPYYVGPLARGNRNFAWLTRNSDQAIRPWNFEEIVDQASSAEEFINKMTNYDLYLPEEKVLPKHSLLYETFAVYNELTKVKFISEGLRDYQFLDSGQKKQIVNQLFKEKRKVTEKDIIQYLHNVDGYDGIELKGIEKQFNASLSTYHDLLKIIKDKEFMDDPKNEEILENIVHTLTIFEDREMIKQRLAQYASIFDKKVIKALTRRHYTGWGKLSAKLINGICDKKTGKTILDYLIDDGYSNRNFMQLINDDGLSFKDIIQKAQVVGKTNDVKQVVQELPGSPAIKKGILQSIKLVDELVKVMGHAPESIVIEIARENQTTARGKKNSQQRYKRIEDALKNLAPGLDSNILKEHPTDNIQLQNDRLFLYYLQNGKDMYTGEALDINQLSSYDIDHIVPQAFIKDDSLDNRVLTSSKDNRGKSDNVPSLEVVQKRKAFWQQLLDSKLISEHKFNNLTKAERGGLDERDKVGFIRRQLVETRQITKHVAQILDARFNTEVNEKDKKNRTVKIITLKSNLVSNFRKEFKLYKVREINDYHHAHDAYLNAVVAKAILKKYPKLEPGFVYGDYQKYDIKRYISRSKDPKEVEKATEKYFFYSNLLNFFKEEVHYADGTIVKRENIEYSKDTGEIAWNKEKDFATIKKVLSLPQVNIVKKTEIQTHGLDRGKPRGLFNSNPSPKPSEDRKENLVPIKQGLDPRKYGGYAGISNSYAVLVKAIIEKGAKKQQKTVLEFQGISILDKINFEKNKENYLLEKGYIKILSTITLPKYSLFEFPDGTRRRLASILSTNNKRGEIHKGNELVIPEKYTTLLYHAKNINKTLEPEHLEYVEKHRNDFAKLLEYVLNFNDKYVGALKNGERIRQAFIDWETVDIEKLCFSFIGPRNSKNAGLFELTSQGSASDFEFLGVKIPRYRDYTPSSLLNATLIHQSITGLYETRIDLSKLGED

SEQ ID NO: 469 - protein, 1345 aa, Streptococcus mutans
  source 1..1345: note = Streptococcus mutans 11SSST2
MKKPYSIGLDIGTNSVGWAVVTDDYKVPAKKMKVLGNTDKSHIKKNLLGALLFDSGNTAADRRLKRTARRRYTRRRNRILYLQEIFAEEMSKVDDSFFHRLEDSFLVTEDKRGERHPIFGNLEEEVKYHENFPTIYHLRQYLADNPEKVDLRLVYLALAHIIKFRGHFLIEGKFDTRNNDVQRLFQEFLAVYDNTFENSSLQEQNVQVEEILTDKISKSAKKDRVLKLFPNEKSNGRFAEFLKLIVGNQADFKKHFELEEKAPLQFSKDTYEEELEVLLTQIGDNYAELFLSAKKLYDSILLSGILTVTDVSTKAPLSASMIQRYNEHQMDLAQLKQFIRQKLSDKYNEVFSDVSKDGYAGYIDGKTNQEAFYKYLKGLLNKIEGSGYFLDKIEREDFLRKQRTFDNGSIPHQIHLQEMRAIIRRQAEFYPFLADNQDRIEKILTFRIPYYVGPLARGKSDFAWLSRKSADKITPWNFDEIVDKESSAEAFINRMTNYDLYLPNQKVLPKHSLLYEKFTVYNELTKVKYKTEQGKTAFFDANMKQEIFDGVFKVYRKVTKDKLMDFLEKEFDEFRIVDLTGLDKENKAFNASYGTYHDLRKILDKDFLDNSKNEKILEDIVLTLTLFEDREMIRKRLENYSDLLTKEQVKKLERRHYTGWGRLSAELIHGIRNKESRKTLLDYLIDDGNSNRNFMQLINDDALSFKEEIAKAQVIGETDNLNQVVSDIAGSPAIKKGILQSLKIVDELVKIMGHQPENIVVEMARENQFTNQGRRNSQQRLKGLTDSIKEFGSQILKEHPVENSQLQNDRLFLYYLQNGRDMYTGEELDIDYLSQYDIDHIIPQAFIKDNSIDNRVLTSSKENRGKSDDVPSKDVVRKMKPYWSKLLSAKLITQRKFDNLTKAERGGLTDDDKAGFIKRQLVETRQITKHVARILDERFNTETDENNKKIRQVKIVTLKSNLVSNFRKEFELYKVREINDYHHAHDAYLNAVIGKALLGVYPQLEPEFVYGDYPHFHGHEENKATAKKFFYSNIMNFFKKDDVRTDKNGEIIWKKDEHISNIKKVLSYPQVNIVKKVEEQTGGFSKESILPKGNSDKLIPRKTKKFYWDTKKYGGFDSPIVAYSILVIADIEKGKSKKLKTVKALVGVTIMEKMTFERDPVAFLERKGYRNVQEENIIKLPKYSLFKLENGRKRLLASARELQKGNEIVLPNHLGTLLYHAKNIHKVDEPKHLDYVDKHKDEFKELLDVVSNFSKKYTLAEGNLEKIKELYAQNNGEDLKELSSSFINLLTFTAIGAPAAFKFFDKNIDRKRYTSTTEILNATLIHQSITGLYETRIDLSKLGGD

SEQ ID NO: 470 - protein, 1345 aa, Streptococcus mutans; identical to SEQ ID NO: 469
  source 1..1345: note = Streptococcus mutans 11SSST2

SEQ ID NO: 471 - protein, 1345 aa, Streptococcus mutans
  source 1..1345: note = Streptococcus mutans 11VS1
MKKPYSIGLDIGTNSVGWAVVTDDYKVPAKKMKVLGNTDKSHIKKNLLGALLFDSGNTAEDRRLKRTARRRYTRRRNRILYLQEIFSEEMGKVDDSFFHRLEDSFLVTEDKRGERHPIFGNLEEEVKYHENFPTIYHLRQYLADNPEKVDLRLVYLALAHIIKFRGHFLIEGKFDTRNNDVQRLFQEFLAVYDNTFENSSLQEQNVQVEEILTDKISKSAKKDRVLKLFPNEKSNGRFAEFLKLIVGNQADFKKHFELEEKAPLQFSKDTYEEELEVLLAQIGDNYAELFLSAKKLYDSILLSGILTVTDVSTKAPLSASMIQRYNEHQMDLAQLKQFIRQKLSDKYNEVFSDVSKDGYAGYIDGKTNQEAFYKYLKGLLNKIEGSGYFLDKIEREDFLRKQRTFDNGSIPHQIHLQEMRAIIRRQAEFYPFLADNQDRIEKILTFRIPYYVGPLARGKSDFAWLSRKSADKITPWNFDEIVDKESSAEAFINRMTNYDLYLPNQKVLPKHSLLYEKFTVYNELTKVKYKTEQGKTAFFDANMKQEIFDGVFKVYRKVTKDKLMDFLEKEFDEFRIVDLTGLDKENKVFNASYGTYHDLCKILDKDFLDNSKNEKILEDIVLTLTLFEDREMIRKRLENYSDLLTKEQVKKLERRHYTGWGRLSAELIHGIRNKESRKTILDYLIDDGNSNRNFMQLINDDALSFKEEIAKAQVIGETDNLNQVVSDIAGSPAIKKGILQSLKIVDELVKIMGHQPENIVVEMARENQFTKQGRRNSQQRLKGLTDSIKEFGSQILKEHPVENSQLQNDRLFLYYLQNGRDMYTGEELDIDYLSQYDIDHIIPQAFIKDNSIDNRVLTSSKENRGKSDDVPSKDVVRKMKSYWSKLLSAKLITQRKFDNLTKAERGGLTDDDKAGFIKRQLVETRQITKHVARILDERFYTETDENNKKIRQVKIVTLKSNLVSNFRKEFELYKVREINDYHHAHDAYLNAVIGKALLGVYPQLEPEFVYGDYPHFHGHKENKATAKKFFYSNIMNFFKKDDVRTDKNGEIIWKKDEHISNIKKVLSYPQVNIVKKVEEQTGGFSKESILPKGNSDKLIPRKTKKFYWDTKKYGGFDSPIVAYSILVIADIEKGKSKKLKTVKALVGVTIMEKMTFERDPVAFLERKGYRNVQEENIIKLPKYSLFKLENGRKRLLASARELQKGNEIVLPNHLGTLLYHAKNIHKVDEPKHLDYVDKHKDEFKELLDVVSNFSKKYTLAEGNLEKIKELYAQNNGEDLKELASSFINLLTFTAIGAPATFKFFDKNIDRKRYTSTTEILNATLIHQSITGLYETRIDLSKLGGD

SEQ ID NO: 472 - protein, 1345 aa, Streptococcus mutans
  source 1..1345: note = Streptococcus mutans 14D
MKKPYSIGLDIGTNSVGWAVVTDDYKVPAKKMKVLGNTDKSHIKKNLLGALLFDSGNTAADRRLKRTARRRYTRRRNRILYLQEIFAEEMSKVDDSFFHRLEDSFLVTEDKRGERHPIFGNLEEEVKYHENFPTIYHLRQYLADNPEKVDLRLVYLALAHIIKFRGHFLIEGKFDTRNNDVQRLFQEFLAVYDNTFENSSLQEQNVQVEEILTDKISKSAKKDRVLKLFPNEKSNGRFAEFLKLIVGNQADFKKHFELEEKAPLQFSKDTYEEELEVLLAQIGDNYAELFLSAKKLYDSILLSGILTVTDVSTKAPLSASMIQRYNEHQMDLAQLKQFIRQKLSDKYNEVFSDVSKDGYAGYIDGKTNQEAFYKYLKGLLNKIEGSGYFLDKIEREDFLRKQRTFDNGSIPHQIHLQEMRAIIRRQAEFYPFLADNQDRIEKILTFRIPYYVGPLARGKSDFAWLSRKSADKITPWNFDEIVDKESSAEAFINRMTNYDLYLPNQKVLPKHSLLYEKFTVYNELTKVKYKTEQGKTAFFDANMKQEIFDGVFKVYRKVTKDKLMDFLEKEFDEFRIVDLTGLDKENKAFNASYGTYHDLRKILDKDFLDNSKNEKILEDIVLTLTLFEDREMIRKRLENYSDLLTKEQVKKLERRHYTGWGRLSAELIHGIRNKESRKTILDYLIDDGNSNRNFMQLINDDALSFKEEIAKAQVIGETDNLNQVVSDIAGSPAIKKGILQSLKIVDELVKIMGHQPENIVVEMARENQFTNQGRRNSQQRLKGLTDSIKEFGSQILKEHPVEHSQLQNDRLFLYYLQNGRDMYTGEELDIDYLSQYDIDHIIPQAFIKDNSIDNRVLTSSKENRGKSDDVPSKNVVRKMKSYWSKLLSAKLITQRKFDNLTKAERGGLTDDDKAGFIKRQLVETRQITKHVARILDERFHTETDENNKKIRQVKIVTLKSNLVSNFRKEFELYKVREINDYHHAHDAYLNAVIGKALLGVYPQLEPEFVYGDYPHFHGHKENKATAKKFFYSNIMNFFKKDDVRTDKNGEIIWKKDEHISNIKKVLSYPQVNIVKKVEEQTGGFSKESILPKGNSDKLIPRKTKKFYWDTKKYGGFDSPIVAYSILVIADIEKGKSKKLKTVKALVGVTIMEKMTFERDPVAFLERKGYRNVQEENIIKLPKYSLFKLENGRKRLLASARELQKGNEIVLPNHLGTLLYHAKNIHKVDEPKHLDYVDKHKDEFKELLDVVSNFSKKYTLAEGNLEKIKELYAQNNGEDLKELASSFINLLTFTAIGAPATFKFFDKNIDRKRYTSTTEILNATLIHQSITGLYETRIDLSKLGGD

SEQ ID NO: 473 - protein, 1355 aa, Streptococcus mutans
  source 1..1355: note = Streptococcus mutans 15VF2
MKKSYSIGLDIGTNSVGWAVVTDDYKVPAKKMKVLGNTDKSHIKKNLLGALLFDSGNTAEDRRLKRTARRRYTRRRNRILYLQEIFSEEMGKVDDSFFHRLDESFLTDDDKNFDSHPIFGNKAEEDAYHQKFPTIYHLRKHLADSTEKADLRLVYLALAHMIKFRGHFLIEGELNAENTDVQKLFADFVGVYDRTFDDSHLSEITVDASSILTEKISKSRRLEKLINNYPKEKKNTLFGNLIALSLGLQPNFKTNFKLSEDAKLQFSKDTYEEDLEELLGKIGDDYADLFTLAKNLYDAILLSGILTADDSSTKAPLSASMIKRYAEHHEDLEKLKEFIKANKPELYHDIFKDETKNGYAGYIENGVKQDEFYKYLKNTLSKIAGSDYFLDKIEREDFLRKQRTFDNGSIPHQIHLQEMHAILRRQGDYYPFLKENQDRIEKILTFRIPYYVGPLARKNSRFAWAEYHSDEAVMPWNFDQVIDKESSAQAFIEHMTNNDLYLPNEKVLPKHSPLYEKYTVYNELTKIKYVTEIGEAKFFDANLKQEIFDGLFKHERKVTKKKLRTFLDKNFDEFRIVDIQGLDKETETFNASYATYQDLLKVIKDKVFMDNPENAEILENIVLTLTLFEDREMIKQRLAKYADVFDKKVIDQLARRHYTGWGRLSAKLLNGIRDKQSCKTIMDYLIDDAQSNRNLMQLITDDNLTFKDDIVKAQYVDNSDDLHQVVQSLAGSPAIKKGILQSLKIVDELVKVMGKEPEQIVVEMARENQTTAKGRRNSQQRYKRLKEAIKSLDRDLNHKILKEHPTDNQALQNNRLFLYYLQNGRDMYTGESLDINRLSDYDIDHVIPQAFIKDNSIDNRVLTSSKANRGKSDDVPSEDVVNRMRPFWNKLLSSGLISQRKYNNLTKKELTPDDKAGFIKRQLVETRQITKHVARMLDERFNKEFDDNNKRIRRVKIVTLKSNLVSSFRKEFELYKVREINDYHHAHDAYLNAVVVKALLVKYPKLEPEFVYGEYPKYNSYRERKTATQKMFFYSNIMNMFKSKVKLADDQIVERPMIEVNDETGEIAWDKTKHITTVKKVLSYPQVNIVKKVEEQTIGQNGGLFDDNPKSPLEVIPSKLVPLKKALNPEKYGGYQKPTTAYPILLIVDTKQLIPISVMDKKRFEQNPVKFLKDKGYQQIEKNNFVKLPKYTLVDIGNGIKRLWASSKEVHKGNQLVVSKKSQDLLYHAHHLDNDYSNEYVKNHYQQFDILFNEITSFSKKCKLGKEHIQKIEEAYSKERDSASIEELADGFIKLLGFTQLGATSPFSFLGIKLNQKQYTGKKDYLLPCMEATLIHQSITGLYETRIDLNKLGGD

SEQ ID NO: 474 - protein, 1355 aa, Streptococcus mutans; identical to SEQ ID NO: 473
  source 1..1355: note = Streptococcus mutans 15VF2

SEQ ID NO: 475 - protein, 1345 aa, Streptococcus mutans
  source 1..1345: note = Streptococcus mutans 1SM1
MKKPYSIGLDIGTNSVGWAVVTDDYKVPAKKMKVLGNTDKSHIKKNLLGALLFDSGNTAEDRRLKRTARRRYTRRRNRILYLQEIFSEEMGKVDDSFFHRLEDSFLVTEDKRGERHPIFGNLEEEVKYHENFPTIYHLRQYLADNPEKVDLRLVYLALAHIIKFRGHFLIEGKFDTRNNDVQRLFQEFLAVYDNTFENSSLQEQNVQVEEILTDKISKSAKKDRVLKLFPNEKSNGRFAEFLKLIVGNQADFKKHFELEEKAPLQFSKDTYEEDLEELLGKIGDDYADLFTLAKNLYDAILLSGILTADDSSTKAPLSASMIQRYNEHQMDLAQLKQFIRQKLSDKYNEVFSDVSKDGYAGYIDGKTNQEAFYKYLKGLLNKIEGSGYFLDKIEREDFLRKQRTFDNGSIPHQIHLQEMRAIIRRQAEFYPFLADNQDRIEKILTFRIPYYVGPLARGKSDFAWLSRKSADKITPWNFDEIVDKESSAEAFINRMTNYDLYLPNQKVLPKHSLLYEKFTVYNELTKVKYKTEQGKTAFFDANMKQEIFDGVFKVYRKVTKDKLMDFLEKEFDEFRIVDLTGLDKENKVFNASYGTYHDLCKILDKDFLDNSKNEKILEDIVLTLTLFEDREMIRKRLENYSDLLTKEQVKKLERRHYTGWGRLSAELIHGIRNKESRKTILDYLIDDGNSNRNFMQLINDDALSFKEEIAKAQVIGETDNLNQVVSDIAGSPAIKKGILQSLKIVDELVKIMGHQPENIVVEMARENQFTNQGRRNSQQRLKGLTDSIKEFGSQILKEHPVENSQLQNDRLFLYYLQNGRDMYTGEELDIDYLSQYDIDHIIPQAFIKDNSIDNRVLTSSKENRGKSDDVPSKDVVRKMKSYWSKLLSAKLITQRKFDNLTKAERGGLTDDDKAGFIKRQLVETRQITKHVARILDERFYTETDENNKKIRQVKIVTLKSNLVSNFRKEFELYKVREINDYHHAHDAYLNAVIGKALLGVYPQLEPEFVYGDYPHFHGHKENKATAKKFFYSNIMNFFKKDDVRTDKNGEIIWKKDEHISNIKKVLSYPQVNIVKKVEEQTGGFSKESILPKGNSDKLIPRKTKKFYWDTKKYGGFDSPIVAYSILVIADIEKGKSKKLKTVKALVGVTIMEKMTFERDPVAFLERKGYRNVQEENIIKLPKYSLFKLENGRKRLLASARELQKGNEIVLPNHLGTLLYHAKNIHKVDEPKHLDYVDKHKDEFKELLDVVSNFSKKYTLAEGNLEKIKELYAQNNGEDLKELASSFINLLTFTAIGAPATFKFFDKNIDRKRYTSTTEILNATLIHQSITGLYETRIDLSKLGGD

SEQ ID NO: 476 - protein, 1345 aa, Streptococcus mutans; identical to SEQ ID NO: 475
  source 1..1345: note = Streptococcus mutans 1SM1

SEQ ID NO: 477 - protein, 1350 aa, Streptococcus mutans
  source 1..1350: note = Streptococcus mutans 24
MKKPYSIGLDIGTNSVGWAVVTDDYKVPAKKMKVLGNTDKSHIEKNLLGALLFDSGNTAEDRRLKRTARRRYTRRRNRILYLQEIFSEEMGKVDDSFFHRLEDSFLVTEDKRGERHPIFGNLEEEVKYHENFPTIYHLRQYLADNPEKVDLRLVYLALAHIIKFRGHFLIEGKFDTRNNDVQRLFQEFLAVYDNTFENSSLQEQNVQVEEILTDKISKSAKKDRVLKLFPNEKSNGRFAEFLKLIVGNQADFKKHFELEEKAPLQFSKDTYEEELEVLLAQIGDNYAELFLSAKKLYDSILLSGILTVTDVSTKAPLSASMIQRYNEHQMDLTQLKQFIRQKLSDKYNEVFSDVSKDGYAGYIDGKTNQEAFYKYLKGLLNKIEGSGYFLDKIEREDFLRKQRTFDNGSIPHQIHLQEMRAIIRRQAEFYPFLADNQDRIEKILTFRIPYYVGPLARGKSDFAWLSRKSADKITPWNFDEIVDKESSAEAFINRMTNYDLYLPNQKVLPKHSLLYEKFTVYNELTKVKYKTEQGKTAFFDANMKQEIFDGVFKVYRKVTKDKLMDFLEKEFDEFRIVDLTGLDKENKAFNASYGTYHDLRKILDKDFLDNSKNEKILEDIVLTLTLFEDREMIRKRLKNYSDLLTKEQLKKLERRHYTGWGRLSAELIHGIRNKESRKTILDYLIDDGNSNRNFMQLINDDALSFKEEIAKAQVIGETDNLNQVVSDIAGSPAIKKGILQSLKIVDELVKIMGHQPENIVVEMARENQFTNQGRQNSQQRLKGLTDSIKEFGSQILKEHPVENSQLQNDRLFLYYLQNGRDMYTGEELDIDYLSQYDIDHIIPQAFIKDNSIDNRVLTSSKENRGKSDDVPSEDVVNRMRPFWNKLLSSGLISQRKYNNLTKKELTLDDKAGFIKRQLVETRQITKHVARMLDERFNKEFDDNNKRICKVKIVTLKSNLVSSFRKEFELYKVREINDYHHAHDAYLNAVVVKALLVKYSKLEPEFVYGEYPKYNSYRERKTATQKMFFYSNIMNMFKSKVKLADDQIVERPMIEVNDETGEIAWDKTKHITTVKKVLSYPQVNIVKKVEEQTIGQNGGLFDDNPKSPLEVIPSKLVPLKKALNPEKYGGYQKPTTAYPILLIVDTKQLIPISVMDKKRFEQNPVKFLKDKGYQQIEKNNFVKLPKYTLVDIGNGIKRLWASSKEVHKGNQLVVSKKSQDLLYHAHHLDNDYSNEYVKNHYQQFDILFNEITSFSKKCKLGKEHIQKIEEAYSKERDSASIEELADGFIKLLGFTQLGATSPFSFLGIKLNQKQYTGKKDYLLPCMEATLIHQSITGLYETRIDLSKLGGD

SEQ ID NO: 478 - protein, 1350 aa, Streptococcus mutans; identical to SEQ ID NO: 477
  source 1..1350: note = Streptococcus mutans 24

SEQ ID NO: 479 - protein, 1345 aa, Streptococcus mutans; identical to SEQ ID NO: 472
  source 1..1345: note = Streptococcus mutans 2VS1

SEQ ID NO: 480 - protein, 1345 aa, Streptococcus mutans; identical to SEQ ID NO: 472
  source 1..1345: note = Streptococcus mutans 2VS1

SEQ ID NO: 481 - protein, 1345 aa, Streptococcus mutans; identical to SEQ ID NO: 471
  source 1..1345: note = Streptococcus mutans 3SN1

SEQ ID NO: 482 - protein, 1345 aa, Streptococcus mutans; identical to SEQ ID NO: 471
  source 1..1345: note = Streptococcus mutans 3SN1

SEQ ID NO: 483 - protein, 1345 aa, Streptococcus mutans
  source 1..1345: note = Streptococcus mutans 4SM1
MKKPYSIGLDIGTNSVGWAVVTDDYKVPAKKMKVLGNTDKSHIKKNLLGALLFDSGNTAEDRRLKRTARRRYTRRRNRILYLQEIFSEEMGKVDDSFFHRLEDSFLVTEDKRGERHPIFGNLEEEVKYHENFPTIYHLRQYLADNPEKVDLRLVYLALAHIIKFRGHFLIEGKFDTRNNDVQRLFQEFLAVYDNTFENSSLQEQNVQVEEILTDKISKSAKKDRVLKLFPNEKSNGRFAEFLKLIVGNQADFKKHFELEEKAPLQFSKDTYEEDLEELLGKIGDDYADLFTLAKNLYDAILLSGILTADDSSTKAPLSASMIQRYNEHQMDLAQLKQFIRQKLSDKYNEVFSDVSKDGYAGYIDGKTNQEAFYKYLKGLLNKIEGSGYFLDKIEREDFLRKQRTFDNGSIPHQIHLQEMRAIIRRQAEFYPFLADNQDRIEKILTFRIPYYVGPLARGKSDFAWLSRKSADKITPWNFDEIVDKESSAEAFINRMTNYDLYLPNQKVLPKHSLLYEKFTVYNELTKVKYKTEQGKTAFFDANMKQEIFDGVFKVYRKVTKDKLMDFLEKEFDEFRIVDLTGLDKENKVFNASYGTYHDLCKILDKDFLDNSKNEKILEDIVLTLTLFEDREMIRKRLENYSDLLTKEQVKKLERRHYTGWGRLSAELIHGIRNKESRKTILDYLIDDGNSNRNFMQLINDDALSFKEEIAKAQVIGETDNLNQVVSDIAGSPAIKKGILQSLKIVDELVKIMGHQPENIVVEMARENQFTNQGRRNSQQRLKGLTDSIKEFGSQILKEHPVENSQLQNDRLFLYYLQNGRDMYTGEELDIDYLSQYDIDHIIPQAFIKDNSIDNRVLTSSKENRGKSDDVPSKDVVRKMKPYWSKLLSAKLITQRKFDNLTKAERGGLTDDDKAGFIKRQLVETRQITKHVARILDERFNTETDENNKKIRQVKIVTLKSNLVSNFRKEFELYKVREINDYHHAHDAYLNAVIGKALLGVYPQLEPEFVYGDYPHFHGHEENKATAKKFFYSNIMNFFKKDDVRTDKNGEIIWKKDEHISNIKKVLSYPQVNIVKKVEEQTGGFSKESILPKGNSDKLIPRKTKKFYWDTKKYGGFDSPIVAYSILVIADIEKGKSKKLKTVKALVGVTIMEKMTFERDPVAFLERKGYRNVQEENIIKLPKYSLFKLENGRKRLLASARELQKGNEIVLPNHLGTLLYHAKNIHKVDEPKHLDYVDKHKDEFKELLDVVSNFSKKYTLAEGNLEKIKELYAQNNGEDLKELASSFINLLTFTAIGAPATFKFFDKNIDRKRYTSTTEILNATLIHQSITGLYETRIDLSKLGGD

SEQ ID NO: 484 - protein, 1345 aa, Streptococcus mutans; identical to SEQ ID NO: 483
  source 1..1345: note = Streptococcus mutans 4SM1

SEQ ID NO: 485 - protein, 1345 aa, Streptococcus mutans
  source 1..1345: note = Streptococcus mutans 4VF1
MKKPYSIGLDIGTNSVGWAVVTDDYKVPAKKMKVLGNTDKSHIKKNLLGALLFDSGNTAEDRRLKRTARRRYTRRRNRILYLQEIFSEEMGKVDDSFFHRLEDSFLVTEDKRGERHPIFGNLEEEVKYHENFPTIYHLRQYLADNPEKVDLRLVYLALAHIIKFRGHFLIEGKFDTRNNDVQRLFQEFLAVYDNTFENSSLQEQNVQVEEILTDKISKSAKKDRVLKLFPNEKSNGRFAEFLKLIVGNQADFKKHFELEEKAPLQFSKDTYEEELEVLLAQIGDNYAELFLSAKKLYDSILLSGILTVTDVSTKAPLSASMIQRYNEHQMDLAQLKQFIRQKLSDKYNEVFSDVSKDGYAGYIDGKTNQEAFYKYLKGLLNKIEGSGYFLDKIEREDFLRKQRTFDNGSIPHQIHLQEMRAIIRRQAEFYPFLADNQDRIEKILTFRIPYYVGPLARGKSDFAWLSRKSADKITPWNFDEIVDKESSAEAFINRMTNYDLYLPNQKVLPKHSLLYEKFTVYNELTKVKYKTEQGKTAFFDANMKQEIFDGVFKVYRKVTKDKLMDFLEKEFDEFRIVDLTGLDKENKVFNASYGTYHDLCKILDKDFLDNSKNEKILEDIVLTLTLFEDREMIRKRLENYSDLLTKEQVKKLERRHYTGWGRLSAELIHGIRNKESRKTILDYLIDDGNSNRNFMQLINDDALSFKEEIAKAQVIGETDNLNQVVSDIAGSPAIKKGILQSLKIVDELVKIMGHQPENIVVEMARENQFTKQGRRNSQQRLKGLTDSIKEFGSQILKEHPVENSQLQNDRLFLYYLQNGRDMYTGEELDIDYLSQYDIDHIIPQAFIKDNSIDNRVLTSSKENRGKSDDVPSKDVVRKMKSYWSKLLSAKLITQRKFDNLTKAERGGLTDDDKAGFIKRQLVETRQITKHVARILDERFYTETDENNKKIRQVKIVTLKSNLVSNFRKEFELYKVREINDYHHAHDAYLNAVIGKALLGVYPQLEPEFVYGDYPHFHGHKENKATAKKFFYSNIMNFFKKDDVRTDRNGEIIWKKDEHISNIKKVLSYPQVNIVKKVEEQTGGFSKESILPKGNSDKLIPRKTKKFYWDTKKYGGFDSPIVAYSILVIADIEKGKSKKLKTVKALVGVTIMEKMTFERDPVAFLERKGYRNVQEENIIKLPKYSLFKLENGRKRLLASARELQKGNEIVLPNHLGTLLYHAKNIHKVDEPKHLDYVDKHKDEFKELLDVVSNFSKKYTLAEGNLEKIKELYAQNNGEDLKELASSFINLLTFTAIGAPATFKFFDKNIDRKRYTSTTEILNATLIHQSITGLYETRIDLSKLGGD

SEQ ID NO: 486 - protein, 1345 aa, Streptococcus mutans; identical to SEQ ID NO: 485
  source 1..1345: note = Streptococcus mutans 4VF1

SEQ ID NO: 487 - protein, 1345 aa, Streptococcus mutans
  source 1..1345: note = Streptococcus mutans 5SM3
MKKPYSIGLDIGTNSVGWAVVTDDYKVPAKKMKVLGNTDKSHIEKNLLGALLFDSGNTAEDRRLKRTARRRYTRRRNRILYLQEIFSEEMGKVDDSFFHRLEDFFLVTEDKRGERHPIFGNLEEEVKYHENFPTIYHLRQYLADNPEKVDLRLVYLALAHIIKFRGHFLIEGKFDTRNNDVQRLFQEFLAVYDNTFENSSLQEQNVQVEEILTDKISKSAKKDRVLKLFPNEKSNGRFAEFLKLIVGNQADFKKHFELEEKAPLQFSKDTYEEELEVLLAQIGDNYAELFLSAKKLYDSILLSGILTADDSSTKAPLSASMIQRYNEHQMDLAQLKQFIRQKLSDKYNEVFSDVSKDGYAGYIDGKTNQEAFYKYLKGLLNKIEGSGYFLDKIEREDFLRKQRTFDNGSIPHQIHLQEMRAIIRRQSEFYPFLADNQDRIEKILTFRIPYYVGPLARGKSDFAWLSRKSADKITPWNFDEIVDKESSAEAFINRMTNYDLYLPNQKVLPKHSLLYEKFTVYNELTKVKYKTEQGETAFFDANMKQEIFDGVFKVYRKVTKDKLMDFLEKEFDEFRIVDLTGLDKENKAFNASYGTYHDLRKILDKDFLDNSKNEKILEDIVLTLTLFEDREMIRKRLKNYSDLLTKEQLKKLERRHYTGWGRLSAELIHGIRNKESRKTILDYLIDDGNSNRNFMQLINDDALSFKEEIAKAQVIGETDNLNQVVSDIAGSPAIKKGILQSLKIVDELVKIMGHQPENIVVEMARENQFTNQGRRNSQQRLKGLTDSIKEFGSQILKEHPVENSQLQNDRLFLYYLQNGRDMYTGEELDIDYLSQYDIDHIIPQAFIKDNSIDNRVLTSSKENRGKSDDVPSKDVVRKMKPYWSKLLSAKLITQRKFDNLTKAERGGLTDDDKAGFIKRQLVETRQITKHVARILDERFNTETDENNKKIRQVKIVTLKSNLVSNFRKEFELYKVREINDYHHAHDAYLNAVIGKALLGVYPQLEPEFVYGDYPHFHGHEENKATAKKFFYSNIMNFFKKDDVRTDKNGEIIWKKDEHISNIKKVLSYPQVNIVKKVEEQTGGFSKESILPKGNSDKLIPRKTKKFYWDTKKYGGFDSPIVAYSILVIADIEKGKSKKLKTVKALVGVTIMEKMTFERDPVAFLERKGYRNVQEENIIKLPKYSLFKLENGRKRLLASARELQKGNEIVLPNHLGTLLYHAKNIHKVDEPKHLDYVDKHKDEFKELLDVVSNFSKKYTLAEGNLEKIKELYAQNNGEDLKELASSFINLLTFTAIGAPATFKFFDKNIDRKRYTSTTEILNATLIHQSITGLYETRIDLSKLGGD

SEQ ID NO: 488 - protein, 1345 aa, Streptococcus mutans; identical to SEQ ID NO: 487
  source 1..1345: note = Streptococcus mutans 5SM3

SEQ ID NO: 489 - protein, 1359 aa, Streptococcus mutans
  source 1..1359: note = Streptococcus mutans 66-2A
MKKPYSIGLDIGTNSVGWAVVTDDYKVPAKKMKVLGNTDKSHIKKNLLGALLFDSGNTAEDRRLKRTARRRYTRRRNRILYLQEIFAEEMMQVDESFFQRLDDSFLVEEDKRGSRYPIFGTLKEEKKYHKEFKTIYHLREKLANSTEKADLRLVYLSLAHMIKFRGHFLIEGQLKAENTNVQALFKDFVEVYDKTVEESHLSEMTVDALSILTEKVSKSRRLENLVECYPTEKKNTLFGNLIALSLGLQPNFKTNFQLSEDAKLQFSKDTYEEDLEGLLGEIGDEYADLFASAKNLYDAILLSGILAVDDNTTKAPLSASMVKRYKEHKEELAAFKRFIKEKLPKKYEEIFKDDTKNGYAGYVGADKKLRKRSGKLATEEEFYKYVKGILNKVEGADVWLDKIDREDFLRKQRTFDNGSIPHQIHLQEMHAILRRQGEHYPFLKENQDKIEKILTFRIPYYVGPLVRKGSRFAWAEYKADEKITPWNFDDILDKEKSAEKFITRMTLNDLYLPEEKVLPKHSLLYETFTVYNELTKVKYVNEQGEAKFFDANMKQEIFDHVFKENRKVTKDKLLNYLNKEFEEFRIVNLTGLDKENKVFNSSLGTYHDLRKILNKSFLDNKENEQIIEDIIQTLTLFEDREMIRQRLQKYSDIFTKAQLKKLERRHYTGWGRLSYKLINGIRDKQSNKTILGYLIDDGYSNRNFMQLINDDALSFKEEIAKAQVIGEMDGLNQVVSDIAGSPAIKKGILQSLKIVDELVKVMGHNPANIVIEMARENQTTAKGRRSSQKRYKRLEEAIKNLDHDLNHKILKEHPTDNQALQNDRLFLYYLQNGRDMYTEDPLDINRLSDYDIDHIIPQAFIKDNSIDNRVLTRSDKNRGKSDDVPSEEVVHKMKPFWSKLLSAKLITQRKFDNLTKAERGGLTDDDKAGFIKRQLVETRQITKHVARILDERFNTETDENNKKIRQVKIVTLKSNLVSNFRKEFELYKVREINDYHHAHDAYLNAVIGKALLGVYPQLEPEFVYGDYPHFHGHKENKATAKKFFYSNIMNFFKKGDVRTDKNGEIIWKKDEHISNIKKVLSYPQVNIVKKVEEQTGGFSKESILPKGNSDKLIPRKTKKFYWDTKKYGGFDSPIVAYSILVIADIEKGKSKKLKTVKALVGVTIMEKMTFERDPVAFLERKGYRNVQEENIIKLPKYSLFKLENGRKRLLASARELQKGNEIVLPNHLETLLYHAKNIHKVDEPKHLDYVDKHKDEFKELLDVVSNFSKKYTLAEGNLEKIKELYAQNNGEDLKELASSFINLLTFTAIGAPAAFKFFDKNIDRKRYTSTTEILNATLIHQSITGLYETRIDLNKLGGD

SEQ ID NO: 490 - protein, 1359 aa, Streptococcus mutans; identical to SEQ ID NO: 489
  source 1..1359: note = Streptococcus mutans 66-2A

SEQ ID NO: 491 - protein, 1345 aa, Streptococcus mutans
  source 1..1345: note = Streptococcus mutans 8ID3
MKKPYSIGLDIGTNSVGWAVVTDDYKVPAKKMKVLGNTDKSHIEKNLLGALLFDSGNTAEDRRLKRTARRRYTRRRNRILYLQEIFSEEMGKVDDSFFHRLEDSFLVTEDKRGERHPIFGNLEEEVKYHENFPTIYHLRQYLADNPEKVDLRLVYLALAHIIKFRGHFLIEGKFDTRNNDVQRLFQEFLAVYDNTFENSSLQEQNVQVEEILTDKISKSAKKDRVLKLFPNEKSNGRFAEFLKLIVGNQADFKKHFELEEKAPLQFSKDTYEEELEVLLAQIGDNYAELFLSAKKLYDSILLSGILTVTDVGTKAPLSASMIQRYNEHQMDLAQLKQFIRQKLSDKYNEVFSDVSKDGYAGYIDGKTNQEAFYKYLKGLLNKIEGSGYFLDKIEREDFLRKQRTFDNGSIPHQIHLQEMRAIIRRQAEFYPFLADNQDRIEKLLTFRIPYYVGPLARGKSDFAWLSRKSADKITPWNFDEIVDKESSAEAFINRMTNYDLYLPNQKVLPKHSLLYEKFTVYNELIKVKYKTEQGKTAFFDANMKQEIFDGVFKVYRKVTKDKLMDFLEKEFDEFRIVDLTGLDKENKVFNASYGTYHDLCKILDKDFLDNSKNEKILEDIVLTLTLFEDREMIRKRLENYSDLLTKEQVKKLERRHYTGWGRLSAELIHGIRNKESRKTILDYLIDDGNSNRNFMQLINDDALSFKEEIAKAQVIGETDNLNQVVSDIAGSPAIKKGILQSLKIVDELVKIMGHQPENIVVEMARENQFTNQGRRNSQQRLKGLTDSIKEFGSQILKEHPVENSQLQNDRLFLYYLQNGRDMYTGEELDIDYLSQYDIDHIIPQAFIKDNSIDNRVLTSSKENRGKSDDVPSKDVVRKMKSYWSKLLSAKLITQRKFDNLTKAERGGLTDDDKAGFIKRQLVETRQITKHVARILDERFNTETDENNKKIRQVKIVTLKSNLVSNFRKEFELYKVREINDYHHAHDAYLNAVIGKALLGVYPQLEPEFVYGDYPHFHGHKENKATAKKFFYSNIMNFFKKDDVRTDKNGEIIWKKDEHISNIKKVLSYPQVNIVKKVEEQTGGFSKESILPKGNSDKLIPRKTKKFYWDTKKYGGFDSPIVAYSILVIADIEKGKSKKLKTVKALVGVTIMEKMTFERDPVAFLERKGYRNVQEENIIKLPKYSLFKLENGRKRLLASARELQKGNEIVLPNHLGTLLYHAKNIHKVDEPKHLDYVDKHKDEFKELLDVVSNFSKKYTLAEGNLEKIKELYAQNNGEDLKELASSFINLLTFTAIGAPATFKFFDKNIDRKRYTSTTEILNATLIHQSITGLYETRIDLNKLGGD

SEQ ID NO: 492 - protein, 1345 aa, Streptococcus mutans; identical to SEQ ID NO: 491
  source 1..1345: note = Streptococcus mutans 8ID3

SEQ ID NO: 493 - protein, 1345 aa, Streptococcus mutans
  source 1..1345: note = Streptococcus mutans A19
MKKPYSIGLDIGTNSVGWSVVTDDYKVPAKKMKVLGNTDKSHIEKNLLGALLFDSGNTAEDRRLKRTARRRYTRRRNRILYLQEIFSEEMGKVDDSFFHRLEDSFLVTEDKRGERHPIFGNLEEEVKYHENFPTIYHLRQYLADNPEKVDLRLVYLALAHIIKFRGHFLIEGKFDTRNNDVQRLFQEFLAVYDNTFENSSLQEQNVQVEEILTDKISKSAKKDRVLKLFPNEKSNGRFAEFLKLIVGNQADFKKHFELEEKAPLQFSKDTYEEELEVLLAQIGDNYAELFLSAKKLYDSILLSGILTVTDVGTKAPLSASMIQRYNEHQMDLAQLKQFIRQKLSDKYNEVFSDVSKDGYAGYIDGKTNQEAFYKYLKGLLNKIEGSGYFLDKIEREDFLRKQRTFDNGSIPHQIHLQEMRAIIRRQAEFYPFLADNQDRIEKLLTFRIPYYVGPLARGKSDFAWLSRKSADKITPWNFDEIVDKESSAEAFINRMTNYDLYLPNQKVLPKHSLLYEKFTVYNELTKVKYKTEQGKTAFFDANMKQEIFDGVFKVYRKVTKDKLMDFLEKEFDEFRIVDLTGLDKENKVFNASYGTYHDLCKILDKDFLDNSKNEKILEDIVLTLTLFEDREMIRKRLENYSDLLTKEQVKKLERRHYTGWGRLSAELIHGIRNKESRKTILDYLIDDGNSNRNFMQLINDDALSFKEEIAKAQVIGETDNLNQVVSDIAGSPAIKKGILQSLKIVDELVKIMGHQPENIVVEMARENQFTNQGRRNSQQRLKGLTDSIKEFGSQILKEHPVENSQLQNDRLFLYYLQNGRDMYTGEELDIDYLSQYDIDHIIPQAFIKDNSIDNRVLTSSKENRGKSDDVPSKDVVRKMKSYWSKLLSAKLITQRKFDNLTKAERGGLTDDDKAGFIKRQLVETRQITKHVARILDERFNTETDENNKKIRQVKIVTLKSNLVSNFRKEFELYKVREINDYHHAHDAYLNAVIGKALLGVYPQLEPEFVYGDYPHFHGHKENKATAKKFFYSNIMNFFKKDDVRIDKNGEIIWKKDEHISNIKKVLSYPQVNIVKKVEEQTGGFSKESILPKGNSDKLIPRKTKKFYWDTKKYGGFDSPIVAYSILVIADIEKGKSKKLKTVKALVGVTIMEKMTFERDPVAFLERKGYRNVQEENIIKLPKYSLFKLENGRKRLLASARELQKGNEIVLPNHLGTLLYHAKNIHKVDEPKHLDYVDKHKDEFKELLDVVSNFSKKYTLAEGNLEKIKELYAQNNGEDLKELASSFINLLTFTAIGAPATFKFFDKNIDRKRYTSTTEILNATLIHQSITGLYETRIDLSKLGGD

SEQ ID NO: 494 - protein, 1345 aa, Streptococcus mutans; identical to SEQ ID NO: 493
  source 1..1345: note = Streptococcus mutans A19

SEQ ID NO: 495 - protein, 1345 aa, Streptococcus mutans; identical to SEQ ID NO: 472
  source 1..1345: note = Streptococcus mutans B

SEQ ID NO: 496 - protein, 1345 aa, Streptococcus mutans; identical to SEQ ID NO: 472
  source 1..1345: note = Streptococcus mutans G123

SEQ ID NO: 497 - protein, 1345 aa, Streptococcus mutans
MKKPYSIGLDIGTNSVGWAVVTDDYKVPAKKMKVLGNTDKSHIKKNLLGALLFDSGNTAEDRRLKRTARRRYTRRRNRILYLQEIFSEEMGKVDDSFFHRLDESFLTDDDKNFDSHPIFGNKAEEDAYHQKFPTIYHLRKHLADSTEKADLRLVYLALAHMIKFRGHFLIEGELNAENTDVQKLFADFVGVYDRTFDDSHLSEITVDASSILTEKISKSRRLEKLINNYPKEKKNTLFGNLIALSLGLQPNFKTNFKLSEDAKLQFSKDTYEEELEVLLAQIGDNYAELFLSAKKLYDSILLSGILTVTDVSTKAPLSASMIQRYNEHQMDLAQLKQFIRQKLSDKYNEVFSDVSKDGYAGYIDGKTNQEAFYKYLKGLLNKIEGSGYFLDKIEREDFLRKQRTFDNGSIPHQIHLQEMRAIIRRQAEFYPFLADNQDRIEKILTFRIPYYVGPLARGKSDFAWLSRKSADKITPWNFDEIVDKESSVEAFINRMTNYDLYLPNQKVLPKHSLLYEKFTVYNELTKVKYKTEQGKTAFFDANMKQEIFDGVFKVYRKVTKDKLMDFLEKEFDEFRIVDLTGLDKENKAFNASYGTYHDLRKILDKDFLDNSKNEKILEDIVLTLTLFEDREMIRKRLKNYSDLLTKEQLKKLERRHYTGWGRLSAELIHGIRNKESRKTILDYLIDDGNSNRNFMQLINDDALSFKEEIAKAQVIGETDNLNQVVSDIAGSPAIKKGILQSLKIVDELVKIMGHQPENIVVEMARENQFTNQGRRNSQQRLKGLTDSIKEFGSQILKEHPVENSQLQNDRLFLYYLQNGRDMYTGEELDIDYLSQYDIDHIIPQAFIKDNSIDNRVLTSSKENRGKSDDVPSKDVVRKMKSYWSKLLSAKLITQRKFDNLTKGERGGLTDDDKAGFIKRQLVETRQITKHVARILDERFNTETDENNKKIRQVKIVTLKSNLVSNFRKEFELYKVREINDYHHAHDAYLNAVIGKALLGVYPQLEPEFVYGDYPHFHGHKENKATAKKFFYSNIMNFFKKDDVRTDKNGEIIWKKDEYISNIKKVLSYPQVNIVKKVEEQTGGFSKESILPKGDSDKLIPRKTKKFYWDTKKYGGFDSPIVAYSILVIADIEKGKSKKLKTVKALVGVTIMEKMTFERDPVAFLERKGYRNVQEENIIKLPKYSLFKLENGRKRLLASARELQKGNEIVLPNHLGTLLYHAKNIHKVDEPKHLDYVDKHKDEFKELLDVVSNFSKKYTLAEGNLEKIKELYAQNNGEDLKELASSFINLLTFTAIGAPATFKFFDKNIDRKRYTSTTEILNATLIHQSITGLYETRIDLSKLGGD

SEQ ID NO: 498 - protein, 1345 aa, Streptococcus mutans
MKKPYSIGLDIGTNSVGWAVVTDDYKVPDKKMKVLGNTDKSHIKKNLLGALLFDSGNTAEDRRLKRTARRRYTRRRNRILYLQEIFSEEMGKVDDSFFHRLEDSFLVTEDKRGERHPIFGNLEEEVKYHENFPTIYHLRQYLADNPEKTDLRLVYLALAHIIKFRGHFLIEGKFDTRNNDVQRLFQEFLAVYDNTFENSSLQEQNVQVEEILTDKISKSAKKDRVLKLFPNEKSNGRFAEFLKLIVGNQADFKKHFELEEKAPLQFSKDIYEEELEVLLAQIGDNYAELFLSAKKLYDSILLSGILTVTDVSTKAPLSASMIQRYNEHQMDLAQLKQFIRQKLSDKYNEVFSDVSKDGYAGYIDGKTNQEAFYKYLKGLLNKIEGSGYFLDKIEREDFLRKQRTFDNGSIPHQIHLQEMRAIIRRQAEFYPFLADNQDRIEKILTFRIPYYVGPLARGKSDFAWLSRKSADKITPWNFDEIVDKESSVEAFINRMTNYDLYLPNQKVLPKHSLLYEKFTVYNELTKVKYKTEQGKTAFFDANMKQEIFDGVFKVYRKVTKDKLMDFLEKEFDEFRIVDLTGLDKENKAFNASYGTYHDLRKILDKDFLDNSKNEKILEDIVLTLTLFEDREMIRKRLKNYSDLLTKEQLKKLERRHYTGWGRLSAELIHGIRNKESRKTILDYLIDDGNSNRNFMQLINDDALSFKEEIAKAQVIGETDNLNQVVSDIAGSPAIKKGILQSLKIVDELVKIMGHQPENIVVEMARENQFTNQGRRNSQQRLKGLTDSIKEFGSQILKEHPVENSQLQNDRLFLYYLQNGRDMYTGEELDIDYLSQYDIDHIIPQAFIKDNSIDNRVLTSSKENRGKSDDVPSKDVVRKMKSYWSKLLSAKLITQRKFDNLTKAERGGLTDDDKAGFIKRQLVETRQITKHVARILDERFYTETDENNKKIRQVKIVTLKSNLVSNFRKEFELYKVREINDYHHAHDAYLNAVIGKALLGVYPQLEPEFVYGDYPHFHGHKENKATAKKFFYSNIMNFFKKDDVRTDKNGEIIWKKDEHISNIKKVLSYPQVNIVKKVEEQTGGFSKESILPKGNSDKLIPRKTKKFYWDTKKYGGFDSPIVAYSILVIADIEKGKSKKLKTVKALVGVTIMEKMTFERDPVAFLERKGYRNVQEENIIKLPKYSLFKLENGRKRLLASARELQKGNEIVLPNHLGTLLYHAKNIHKVDEPKHLDYVDKHKDEFKELLDVVSNFSKKYTLAEGNLEKIKELYAQNNGEDLKELASSFINLLTFTAIGAPATFKFFDKNIDRKRYTSTTEILNATLIHQSITGLYETRIDLSKLGGD

SEQ ID NO: 499 - protein, 1345 aa, Streptococcus mutans
  source 1..1345: note = Streptococcus mutans M21
MKKPYSIGLDIGTNSVGWAVVTDDYKVPAKKMKVLGNTDKSHIKKNLLGALLFDSGNTAEDRRLKRTARRRYTRRRNRILYLQEIFSEEMGKVDDSFFHRLEDSFLVTEDKRGERHPIFGNLEEEVKYHENFPTIYHLRQYLADNPEKTDLRLVYLALAHIIKFRGHFLIEGKFDTRNNDVQRLFQEFLAVYDNTFENSSLQEQNVQVEEILTDKISKSAKKDRVLKLFPNEKSNGRFAEFLKLIVGNQADFKKHFELEEKAPLQFSKDIYEEELEVLLAQIGDNYAELFLSAKKLYDSILLSGILTVTDVSTKAPLSASMIQRYNEHQMDLAQLKQFIRQKLSDKYNEVFSDVSKDGYAGYIDGKTNQEAFYKYLKGLLNKIEGSGYFLDKIEREDFLRKQRTFDNGSIPHQIHLQEMRAIIRRQAEFYPFLADNQDRIEKILTFRIPYYVGPLARGKSDFAWLSRKSADKITPWNFDEIVDKESSVEAFINRMTNYDLYLPNQKVLPKHSLLYEKFTVYNELTKVKYKTEQGKTAFFDANMKQEIFDGVFKVYRKVTKDKLMDFLEKEFDEFRIVDLTGLDKENKAFNASYGTYHDLRKILDKDFLDNSKNEKILEDIVLTLTLFEDREMIRKRLKNYSDLLTKEQLKKLERRHYTGWGRLSAELIHGIRNKESRKTILDYLIDDGNSNRNFMQLINDDALSFKEEIAKAQVIGETDNLNQVVSDIAGSPAIKKGILQSLKIVDELVKIMGHQPENIVVEMARENQFTNQGRRNSQQRLKGLTDSIKEFGSQILKEHPVENSQLQNDRLFLYYLQNGRDMYTGEELDIDYLSQYDIDHIIPQAFIKDNSIDNRVLTSSKENRGKSDDVPSKNVVRKMKSYWSKLLSAKLITQRKFDNLTKAERGGLTDDDKAGFIKRQLVETRQITKHVARILDERFHTETDENNKKIRQVKIVTLKSNLVSNFRKEFELYKVREINDYHHAHDAYLNAVIGKALLGVYPQLEPEFVYGDYPHFHGHKENKATAKKFFYSNIMNFFKKDDVRTDKNGEIIWKKDEHISNIKKVLSYPQVNIVKKVEEQTGGFSKESILPKGNSDKLIPRKTKKFYWDTKKYGGFDSPIVAYSILVIADIEKGKSKKLKTVKALVGVTIMEKMTFERDPVAFLERKGYRNVQEENIIKLPKYSLFKLENGRKRLLASARELQKGNEIVLPNHLGTLLYHAKNIHKVDEPKHLDYVDKHKDEFKELLDVVSNFSKKYTLAEGNLEKIKELYAQNNGEDLKELASSFINLLTFTAIGAPATFKFFDKNIDRKRYTSTTEILNATLIHQSITGLYETRIDLSKLGGD

SEQ ID NO: 500 - protein, 1345 aa, Streptococcus mutans; identical to SEQ ID NO: 499
  source 1..1345: note = Streptococcus mutans M21

SEQ ID NO: 501 - protein, 1345 aa, Streptococcus mutans
  source 1..1345: note = Streptococcus mutans M230
MKKPYSIGLDIGTNSVGWAVVTDDYKVPAKKMKVLGNTDKSHIKKNLLGALLFDSGNTAEDRRLKRTARRRYTRRRNRILYLQEIFSEEMGKVDDSFFHRLEDSFLVTEDKRGERHPIFGNLEEEVKYHENFPTIYHLRQYLADNPEKVDLRLVYLALAHIIKFRGHFLIEGKFDTRNNDVQRLFQEFLAVYDNTFENSSLQEQNVQVEEILTDKISKSAKKDRVLKLFPNEKSNGRFAEFLKLIVGNQADFKKHFELEEKAPLQFSKDTYEEELEVLLAQIGDNYAELFLSAKKLYDSILLSGILTVTDVSTKAPLSASMIQRYNEHQMDLAQLKQFIRQKLSDKYNEVFSDVSKDGYAGYIDGKTNQEAFYKYLKGLLNKIEGSGYFLDKIEREDFLRKQRTFDNGSIPHQIHLQEMRAIIRRQAEFYPFLADNQDRIEKILTFRIPYYVGPLARGKSDFAWLSRKSADKITPWNFDEIVDKESSAEAFINRMTNYDLYLPNQKVLPKHSLLYEKFTVYNELTKVKYKTEQGKTAFFDANMKQEIFDGVFKVYRKVTKDKLMDFLEKEFDEFRIVDLTGLDKENKVFNASYGTYHDLCKILDKDFLDNSKNEKILEDIVLTLTLFEDREMIRKRLENYSDLLTKEQVKKLERRHYTGWGRLSAELIHGIRNKESRKTILDYLIDDGNSNRNFMQLINDDALSFKEEIAKAQVIGETDNLNQVVSDIAGSPAIKKGILQSLKIVDELVKIMGHQPENIVVEMARENQFTNQGRQNSQQRLKGLTDSIKEFGSQILKEHPVENSQLQNDRLFLYYLQNGRDMYTGEELDIDYLSQYDIDHIIPQAFIKDNSIDNRVLTSSKENRGKSDDVPSEDVVRKMKSYWSKLLSAKLITQRKFDNLTKAERGGLTDDDKAGFIKRQLVETRQITKHVARILDERFYTETDENNKKIRQVKIVTLKSNLVSNFRKEFELYKVREINDYHHAHDAYLNAVIGKALLGVYPQLEPEFVYGDYPHFHGHKENKATAKKFFYSNIMNFFKKDDVRTDKNGEIIWKKDEHISNIKKVLSYPQVNIVKKVEEQTGGFSKESILPKGNSDKLIPRKTKKFYWDTKKYGGFDSPIVAYSILVIADIEKGKSKKLKTVKALVGVTIMEKMTFERDPVAFLERKGYRNVQEENIIKLPKYSLFKLENGRKRLLASARELQKGNEIVLPNHLGTLLYHAKNIHKVDEPKHLDYVDKHKDEFKELLDVVSNFSKKYTLAEGNLEKIKELYAQNNGEDLKELASSFINLLTFTAIGAPATFKFFDKNIDRKRYTSTTEILNATLIHQSITGLYETRIDLSKLGGD

SEQ ID NO: 502 - protein, 1345 aa, Streptococcus mutans; identical to SEQ ID NO: 501
  source 1..1345: note = Streptococcus mutans M230

SEQ ID NO: 503 - protein, 1345 aa, Streptococcus mutans
  source 1..1345: note = Streptococcus mutans M2A
MKKPYSIGLDIGTNSVGWAVVTDDYKVPAKKMKVLGNTDKSHIKKNLLGALLFDSGNTAEDRRLKRTARRRYTRRRNRILYLQEIFSEEMGKVDDSFFHRLEDSFLVTEDKRGERHPIFGNLEEEVKYHENFPTIYHLRQYLADNPEKTDLRLVYLALAHIIKFRGHFLIEGKFDTRNNDVQRLFQEFLAVYDNTFENSSLQEQNVQVEEILTDKISKSAKKDRVLKLFPNEKSNGRFAEFLKLIVGNQADFKKHFELEEKAPLQFSKDIYEEELEVLLAQIGDNYAELFLSAKKLYDSILLSGILTVTDVSTKAPLSASMIQRYNEHQMDLAQLKQFIRQKLSDKYNEVFSDVSKDGYAGYIDGKTNQEAFYKYLKGLLNKIEGSGYFLDKIEREDFLRKQRTFDNGSIPHQIHLQEMRAIIRRQAEFYPFLADNQDRIEKILTFRIPYYVGPLARGKSDFAWLSRKSADKITPWNFDEIVDKESSVEAFINRMTNYDLYLPNQKVLPKHSLLYEKFTVYNELTKVKYKTEQGKTAFFDANMKQEIFDGVFKVYRKVTKDKLMDFLEKEFDEFRIVDLTGLDKENKAFNASYGTYHDLRKILDKDFLDNSKNEKILEDIVLTLTLFEDREMIRKRLKNYSDLLTKEQLKKLERRHYTGWGRLSAELIHGIRNKESRKTILDYLIDDGNSNRNFMQLINDDALSFKEEIAKAQVIGETDNLNQVVSDIAGSPAIKKGILQSLKIVDELVKIMGHQPENIVVEMARENQFTNQGRRNSQQRLKGLTDSIKEFGSQILKEHPVENSQLQNDRLFLYYLQNGRDMYTGEELDIDYLSQYDIDHIIPQAFIKDNSIDNRVLTSSKENRGKSDDVPSKDVVRKMKSYWSKLLSAKLITQRKFDNLTKAERGGLTDDDKAGFIKRQLVETRQITKHVARILDERFNTETDENNKKIRQVKIVTLKSNLVSNFRKEFELYKVREINDYHHAHDAYLNAVIGKALLGVYPQLEPEFVYGDYPHFHGHKENKATAKKFFYSNIMNFFKKDDVRTDKNGEIIWKKDEHISNIKKVLSYPQVNIVKKVEEQTGGFSKESILPKGNSYKLIPRKTKKFYWDTKKYGGFDSPIVAYSILVIADIEKGKSKKLKTVKALVGVTIMEKMTFERDPVAFLERKGYRNVQEENIIKLPKYSLFKLENGRKRLLASARELQKGNEIVLPNHLGTLLYHAKNIHKVDEPKHLDYVDKHKDEFKELLDVVSNFSKKYTLAEGNLEKIKELYAQNNGEDLKELASSFINLLTFTAIGAPAAFKFFDKNIDRKRYTSTTEILNATLIHQSITGLYETRIDLSKLGGD

SEQ ID NO: 504 - protein, 1345 aa, Streptococcus mutans; identical to SEQ ID NO: 503
  source 1..1345: note = Streptococcus mutans M2A

SEQ ID NO: 505 - protein, 1345 aa, Streptococcus mutans
  source 1..1345: note = Streptococcus mutans N29
MKKPYSIGLDIGTNSVGWAVVTDDYKVPAKKMKVLGNTDKSHIKKNLLGALLFDSGNTAADRRLKRTARRRYTRRRNRILYLQEIFAEEMSKVDDSFFHRLEDSFLVTEDKRGERHPIFGNLEEEVKYHENFPTIYHLRQYLADNPEKVDLRLVYLALAHIIKFRGHFLIEGKFDTRNNDVQRLFQEFLAVYDNTFENSSLQEQNVQVEEILTDKISKSAKKDRVLKLFPNEKSNGRFAEFLKLIVGNQADFKKHFELEEKAPLQFSKDTYEEELEVLLAQIGDNYAELFLSAKKLYDSILLSGILTVTDVSTKAPLSASMIQRYNEHQMDLAQLKQFIRQKLSDKYNEVFSDVSKDGYAGYIDGKTNQEAFYKYLKGLLNKIEGSGYFLDKIEREDFLRKQRTFDNGSIPHQIHLQEMRAIIRRQAEFYPFLADNQDRIEKILTFRIPYYVGPLARGKSDFAWLSRKSADKITPWNFDEIVDKESSAEAFINRMTNYDLYLPNQKVLPKHSLLYEKFTVYNELTKVKYKTEQGKTAFFDANMKQEIFDGVFKVYRKVTKDKLMDFLEKEFDEFRIVDLTGLDKENKAFNASYGTYHDLRKILDKDFLDNSKNEKILEDIVLTLTLFEDREMIRKRLENYSDLLTKEQVKKLERRHYTGWGRLSAELIHGIRNKESRKTILDYLIDDGNSNRNFMQLINDDALSFKEEIAKAQVIGETDNLNQVVSDIAGSPAIKKGILQSLKIVDELVKIMGHQPENIVVEMARENQFTNQGRRNSQQRLKGLTDSIKEFGSQILKEHPVENSQLQNDRLFLYYLQNGRDMYTGEELDIDYLSQYDIDHIIPQAFIKDNSIDNRVLTSSKENRGKSDDVPSKNVVRKMKSYWSKLLSAKLITQRKFDNLTKAERGGLTDDDKAGFIKRQLVETRQITKHVARILDERFHTETDENNKKIRQVKIVTLKSNLVSNFRKEFELYKVREINDYHHAHDAYLNAVIGKALLGVYPQLEPEFVYGDYPHFHGHKENKATAKKFFYSNIMNFFKKDDVRTDKNGEIIWKKDEHISNIKKVLSYPQVNIVKKVEEQTGGFSKESILPKGNSDKLIPRKTKKFYWDTKKYGGFDSPIVAYSILVIADIEKGKSKKLKTVKALVGVTIMEKMTFERDPVAFLERKGYRNVQEENIIKLPKYSLFKLENGRKRLLASARELQKGNEIVLPNHLGTLLYHAKNIHKVDEPKHLDYVDKHKDEFKELLDVVSNFSKKYTLAEGNLEKIKELYAQNNGEDLKELSSSFINLLTFTAIGAPAAFKFFDKNIDRKRYTSTTEILNATLIHQSITGLYETRIDLSKLGGD

SEQ ID NO: 506 - protein, 1345 aa, Streptococcus mutans; identical to SEQ ID NO: 505
  source 1..1345: note = Streptococcus mutans N29

SEQ ID NO: 507 - protein, 1345 aa, Streptococcus mutans
  source 1..1345: note = Streptococcus mutans N3209
MKKPYSIGLDIGTNSVGWAVVTDDYKVPAKKMKVLGNTDKSHIKKNLLGALLFDSGNTAEDRRLKRTTRRRYTRRRNRILYLQEIFSEEMGKVDDSFFHRLEDSFLVTEDKRGERHPIFGNLEEEVKYHENFPTIYHLRQYLADNPEKTDLRLVYLALAHIIKFRGHFLIEGKFDTRNNDVQRLFQEFLAVYDNTFENSSLQEQNVQVEEILTDKISKSAKKDRVLKLFPNEKSNGCFAEFLKLIVGNQADFKKHFELEEKAPLQFSKDTYEEELEVLLAQIGDNYAELFLSAKKLYDSILLSGILTVTDVSTKAPLSASMIQRYNEHQMDLTQLKQFIRQKLSDKYNEVFSDVSKDGYAGYIDGKTNQEAFYKYLKGLLNKIEGSGYFLDKIEREDFLRKQRTFDNGSIPHQIHLQEMRAIIRRQAEFYPFLADNQDRIEKLLTFRIPYYVGPLASGKSDFAWLSRKSADKITPWNFDEIVDKESSAEAFINRMTNYDLYLPNQKVLPKHSLLYEKFTVYNELTKVKYKTEQGKTAFFDANMKQEIFDGVFKVYRKVTKDKLMDFLEKEFDEFRIVDLTGLDKENKVFNASYGTYHDLCKILDKDFLDNSKNEKILEDIVLTLTLFEDREMIRKRLENYSDLLTKEQVKKLERRHYTGWGRLSAELIHGIRNKESRKTILDYLIDDGNSNRNFMQLINDDALSFKEEIAKAQVIGETDNLNQVVSDIAGSPAIKKGILQSLKIVDELVKIMGHQPENIVVEMARENQFTNQGRRNSQQRLKGLTDSIKEFGSQILKEHPVENSQLQNDRLFLYYLQNGRDMYTGEELDIDYLSQYDIDHIIPQAFIKDNSIDNRVLTSSKENRGKSDDVPSKDVVRKMKSYWSKLLSAKLITQRKFDNLTKAERGGLTDDDKAGFIKRQLVETRQITKHVARILDERFNTETDENNKKIRQVKIVTLKSNLVSNFRKEFELYKVREINDYHHAHDAYLNAVIGKALLGVYPQLEPEFVYGDYPHFHGHKENKATAKKFFYSNIMNFFKKDDVRTDKNGEIIWKKDEHISNIKKVLSYPQVNIVKKVEEQTGGFSKESILPKGNSDKLIPRKTKKFYWDTKKYGGFDSPIVAYSILVIADIEKGKSKKLKTVKALVGVTIMEKMTFERDPVAFLERKGYRNVQEENIIKLPKYSLFKLENGRKRLLASARELQKGNEIVLPNHLGTLLYHAKNIHKVDEPKHLDYVDKHKDEFKELLDVVSNFSKKYTLAEGNLEKIKELYAQNNGEDLKELASSFINLLTFTAIGAPATFKFFDKNIDRKRYTSTTEILNATLIHQSITGLYETRIDLSKLGGD

SEQ ID NO: 508 - protein, 1345 aa, Streptococcus mutans; identical to SEQ ID NO: 507
  source 1..1345: note = Streptococcus mutans N3209

SEQ ID NO: 509 - protein, 1345 aa, Streptococcus mutans
  source 1..1345: note = Streptococcus mutans N66
MKKPYSIGLDIGTNSVGWAVVTDDYKVPAKKMKVLGNTDKSHIKKNLLGALLFDSGNTAEDRRLKRTARRRYTRRRNRILYLQEIFSEEMGKVDDSFFHRLEDSFLVTEDKRGERHPIFGNLEEEVKYHENFPTIYHLRQYLADNPEKTDLRLVYLALAHIIKFRGHFLIEGKFDTRNNDVQRLFQEFLAVYDNTFENSSLQEQNVQVEEILTDKISKSAKKDRVLKLFPNEKSNGRFAEFLKLIVGNQADFKKHFELEEKAPLQFSKDIYEEELEVLLAQIGDNYAELFLSAKKLYDSILLSGILTVTDVSTKAPLSASMIQRYNEHQMDLAQLKQFIRQKLSDKYNEVFSDVSKDGYAGYIDGKTNQEAFYKYLKGLLNKIEGSGYFLDKIEREDFLRKQRTFDNGSIPHQIHLQEMRAIIRRQAEFYPFLADNQDRIEKILTFRIPYYVGPLARGKSDFAWLSRKSADKITPWNFDEIVDKESSAEAFINRMTNYDLYLPNQKVLPKHSLLYEKFTVYNELTKVKYKTEQGKTAFFDANMKQEIFDGVFKVYRKVTKDKLMDFLEKEFDEFRIVDLTGLDKENKAFNASYGTYHDLRKILDKDFLDNSKNEKILEDIVLTLTLFEDREMIRKRLKNYSDLLTKEQLKKLERRHYTGWGRLSAELIHGIRNKESRKTILDYLIDDGNSNRNFMQLINDDALSFKEEIAKAQVIGETDNLNQVVSDIAGSLAIKKGILQSLKIVDELVKIMGHQPENIVVEMARENQFTNQGRRNSQQRLKGLTDSIKEFGSQILKEHPVENSQLQNDRLFLYYLQNGRDMYTGEELDIDYLSQYDIDHIIPQAFIKDNSIDNRVLTSSKENRGKSDDVPSKDVVRKMKSYWSKLLSAKLITQRKFDNLTKGERGGLTDDDKAGFIKRQLVETRQITKHVARILDERFNTETDENNKKIRQVKIVTLKSNLVSNFRKEFELYKVREINDYHHAHDAYLNAVIGKALLGVYPQLEPEFVYGDYPHFHGHKENKATAKKFFYSNIMNFFKKDDVRTDKNGEIIWKKDEYISNIKKVLSYPQVNIVKKVEEQTGGFFKESILPKGDSDKLIPRKTKKFYWDTKKYGGFDSPIVAYSILVIADIEKGKSKKLKTVKALVGVTIMEKMTFERDPVAFLERKGYRNVQEENIIKLPKYSLFKLENGRKRLLASARELQKGNEIVLPNHLGTLLYHAKNIHKVDEPKHLDYVDKHKDEFKELLDVVSNFSKKYTLAEGNLEKIKELYAQNNGEDLKELASSFINLLTFTAIGAPATFKFFDKNIDRKRYTSTTEILNATLIHQSITGLYETRIDLSKLGGD

SEQ ID NO: 510 - protein, 1345 aa, Streptococcus mutans; identical to SEQ ID NO: 509
  source 1..1345: note = Streptococcus mutans N66

SEQ ID NO: 511 - protein, 1350 aa, Streptococcus mutans
  source 1..1350: note = Streptococcus mutans NFSM1
MKKPYSIGLDIGTNSVGWAVVTDDYKVPAKKMTVLGNTDKSHIKKNLLGALLFDSGNTAADRRLKRTARRRYTRRRNRILYLQEIFAEEMSKVDDSFFHRLEDSFLVTEDKRGERHPIFGNLEEEVKYHENFPTIYHLRQYLADNPEKVDLRLVYLALAHIIKFRGHFLIEGKFDTRNNDVQRLFQEFLAVYDNTFENSSLQEQNVQVEEILTDKISKSAKKDRVLKLFPNEKSNGRFAEFLKLIVGNQADFKKHFELEEKTPLQFSKDTYEEELEVLLAQIGDNYAELFLSAKKLYDSILLSGILTVTDVSTKAPLSASMIQRYNEHQMDLAQLKQFIRQKLSDKYNEVFSDVSKDGYAGYIDGKTNQEAFYKYLKGLLNKIEGSGYFLDKIEREDFLRKQRTFDNGSIPHQIHLQEMRAIIRRQAEFYPFLADNQDRIEKILTFRIPYYVGPLARGKSDFAWLSRKSADKITPWNFDEIVDKESSAEAFINRMTNYDLYLPNQKVLPKHSLLYEKFTVYNELTKVKYKTEQGKTAFFDANMKQEIFDGVFKVYRKVTKDKLMDFLEKEFDEFRIVDLTGLDKENKAFNASYGTYHDLRKILDKDFLDNSKNEKILEDIVLTLTLFEDREMIRKRLENYSDLLTKEQVKKLERRHYTGWGRLSAELIHGIRNKESRKTILDYLIDDGNSNRNFMQLINDDALSFKEEIAKAQVIGETDNLNQVVSDIAGSPAIKKGILQSLKIVDELVKIMGHQPENIVVEMARENQFTNQGRRNSQQRLKGLTDSIKEFGSQILKEHPVENSQLQNDRLFLYYLQNGRDMYTGEELDIDYLSQYDIDHIIPQAFIKDNSIDNRVLTSSKENRGKSDDVPSEDVVNRMRPFWNKLLSSGLISQRKYNNLTKKELTPDDKAGFIKRQLVETRQITKHVARMLDERFNKEFDDNNKRIRRVKIVTLKSNLVSSFRKEFELYKVREINDYHHAHDAYLNAVVVKALLVKYPKLEPEFVYGEYPKYNSYRERKTATQKMFFYSNIMNMFKSKVKLADDQIVERPMIEVNDETGEIAWDKTKHITTVKKVLSYPQVNIVKKVEEQTIGQNGGLFDDNPKSPLEVIPSKLVPLKKALNPEKYGGYQKPTTAYPILLIVDTKQLIPISVMDKKRFEQNPVKFLKDKGYQQIEKNNFVKLPKYTLVDIGNGIKRLWASSKEVHKGNQLVVSKKSQDLLYHAHHLDNDYSNEYVKNHYQQFDILFNEITSFSKKCKLGKEHIQKIEEAYSKERDSASIEELADGFIKLLGFTQLGATSPFSFLGIKLNQKQYTGKKDYLLPCMEATLIHQSITGLYETRIDLSKLGGD

SEQ ID NO: 512 - protein, 1350 aa, Streptococcus mutans; identical to SEQ ID NO: 511
  source 1..1350: note = Streptococcus mutans NFSM1

SEQ ID NO: 513 - protein, 1345 aa, Streptococcus mutans; identical to SEQ ID NO: 485
  source 1..1345: note = Streptococcus mutans NLML1

SEQ ID NO: 514 - protein, 1338 aa, Streptococcus mutans
  source 1..1338: note = Streptococcus mutans NLML4
MDLIGTNSVGWAVVTDDYKVPAKKMKVLGNTDKSHIKKNLLGALLFDSGNTAADRRLKRTARRRYTRRRNRILYLQEIFAEEMSKVDDSFFHRLEDSFLVTEDKRGERHPIFGNLEEEVKYHENFPTIYHLRQYLADNPEKVDLRLVYLALAHIIKFRGHFLIEGKFDTRNNDVQRLFQEFLAVYDNTFENSSLQEQNVQVEEILTDKISKSAKKDRVLKLFPNEKSNGRFAEFLKLIVGNQADFKKHFELEEKAPLQFSKDTYEEELEVLLAQIGDNYAELFLSAKKLYDSILLSGILTVTDVSTKAPLSASMIQRYNEHQMDLAQLKQFIRQKLSDKYNEVFSDVSKDGYAGYIDGKTNQEAFYKYLKGLLNKIEGSGYFLDKIEREDFLRKQRTFDNGSIPHQIHLQEMRAIIRRQAEFYPFLADNQDRIEKILTFRIPYYVGPLARGKSDFAWLSRKSADKITPWNFDEIVDKESSAEAFINRMTNYDLYLPNQKVLPKHSLLYEKFTVYNELTKVKYKTEQGKTAFFDANMKQEIFDGVFKVYRKVTKDKLMDFLEKEFDEFRIVDLTGLDKENKAFNASYGTYHDLRKILDKDFLDNSKNEKILEDIVLTLTLFEDREMIRKRLENYSDLLTKEQVKKLERRHYTGWGRLSAELIHGIRNKESRKTILDYLIDDGNSNRNFMQLINDDALSFKEEIAKAQVIGETDNLNQVVSDIAGSPAIKKGILQSLKIVDELVKIMGHQPENIVVEMARENQFTNQGRRNSQQRLKGLTDSIKEFGSQILKEHPVEHSQLQNDRLFLYYLQNGRDMYTGEELDIDYLSQYDIDHIIPQAFIKDNSIDNRVLTSSKENRGKSDDVPSKNVVRKMKSYWSKLLSAKLITQRKFDNLTKAERGGLTDDDKAGFIKRQLVETRQITKHVARILDERFHTETDENNKKIRQVKIVTLKSNLVSNFRKEFELYKVREINDYHHAHDAYLNAVIGKALLGVYPQLEPEFVYGDYPHFHGHKENKATAKKFFYSNIMNFFKKDDVRTDKNGEIIWKKDEHISNIKKVLSYPQVNIVKKVEEQTGGFSKESILPKGNSDKLIPRKTKKFYWDTKKYGGFDSPIVAYSILVIADIEKGKSKKLKTVKALVGVTIMEKMTFERDPVAFLERKGYRNVQEENIIKLPKYSLFKLENGRKRLLASARELQKGNEIVLPNHLGTLLYHAKNIHKVDEPKHLDYVDKHKDEFKELLDVVSNFSKKYTLAEGNLEKIKELYAQNNGEDLKELASSFINLLTFTAIGAPATFKFFDKNIDRKRYTSTTEILNATLIHQSITGLYETRIDLSKLGGD

SEQ ID NO: 515 - protein, 1338 aa, Streptococcus mutans; identical to SEQ ID NO: 514
  source 1..1338: note = Streptococcus mutans NLML4

SEQ ID NO: 516 - protein, 1128 aa, Streptococcus mutans
  source 1..1128: note = Streptococcus mutans NLML5
MANSKILGLDIGIASVGVGIIDKETGKIIHVNSRIFPAATADSNVERRGFRQGRRLVRRKKHRKVRLADLFLDSNLLTDFSKVSLNLNPYQLRVKGLNEELSNEELFIALKSIVSRRGISYLDDASEDSGANSSEYGKAVEENRKLLEDRTPGQIQLERFEKYGKVRGDFTVVENGENHRLINVFSTSAYKKEAERILRRQQEFNIRIADEFIEAYLTILTGKRKYYHGPGNEKSRTDYGRFRTDGTTLDNIFGILIGKCTFYPDEYRAAKASYTAQEFNLLNDLNNLTVPTETKKLSEEQKRQIIEHAKTVKTLGAPTLLKYIAKLVGCSADDIKGYRIDKSDKPEIHTFEAYRKMRTMELIKVADLSRESLDALAHILTLNTEREGIEEAIRDRFTNKEFNQEQINELVLFRKNNSSLFGKGWHNFSLKLMKELIPELYETSEEQMTILTRLGKQRVKKSSNRTNYIDEKELTEEIYNPVVAKSVRQAIKIINLATKKYGVFDNIVIEMARESNEDDEKKAIQNAQKANEDEKEAALLKAAHQFNGKEELPDSIFHGHKELLTKIRLWHQQGEKCLYTGKTIFINDLIHNPYKYEIDHILPLSLSFDDSLANKVLVLSTANQEKGQRTPFQSLDSMDGAWTYREFKAYVKGLKTLSNKKKDYLLNEEDINKNEVKQKFIERNLVDTRYSSRVVLNTLQDFYKKREFDTKISVVRGQFTSQIRRKWRIEKTRETYHHHAVDALIIAASSQLNLWKKQNNPLISYKEDQFVDPETGEILSLSDDEYKELVFKAPYDHFVDTLKSKKFEDSILFSYQVDSKYNRKISDATIYGTRKARLGKDSQEETYVLGKIKDIYSQKGYEDFIKKYKKDKTQFLMYHKDPQTFEKVIEEILKTYSDKELNEKGKEVPCNPFEKYRQENGPVRKYSKKGNGPEIKSIKYYDNKLGNHIDITPNNSHHQVVLQSLKPWRTDVYFNPKSGKYELMGLKYSDLRFEKVSGDYGISVKKYNEIKSKEGVDENSEFKFTLYKNDLILIKDTESGEQELFRFLSRTMPNQKHYVELKPYDKSKFEGHQKLMDIFGEVAKGGQCLKGLNKSNISIYKVKTDVLGNKYFIKKEGDQPQLNFKKKI

SEQ ID NO: 517 - protein, 1128 aa, Streptococcus mutans; identical to SEQ ID NO: 516
  source 1..1128: note = Streptococcus mutans NLML5

SEQ ID NO: 518 - protein, 1125 aa, Streptococcus mutans
  source 1..1125: note = Streptococcus mutans NLML8
MTNGKILGLDIGIASVGVGIINAKTGNVEHASSRIFPAANADNNVERRSARGGRRLIRRKKHRLKRVEDLFEKYNIDTDFSNLNLNPYQLRVKGLNEQLSNEELFAILKNIAKRRGISYLDDAEDDSVGSSDYAKAIDENRKLLKKQTPGEIQLKRLEKYGQLRGNFTIQDENGEYHRLINVFSTSDYVKEARRILETQSYYNKFITESFVEDYIKILQGKRKYYVGPGNEKSRTDYGIYRTDGETLDNLFGILIGKCGFYPEEYRAAKASYTAQEYNFLNDLNNLTVPTETKKLSTEQKYQLVDFAKTASTLEAAKLLKEIAKLVGCQVEEIKGYRLDNKDKPDLHTFEPFRKLKSNLTTIAVENLSITTLDTLAHILTLNTEREGIEEAIQKELPNIFSDEQITGIIAVRKKNSQIFGKGWHSFSIKLMKELIPELYETSEEQMTILIRLKKVKTNSKITNRTKYINEQEVTDEIYNPVVSKSIRQTVKIINAAIKKYGAFDQIVIEMPRESNEEDERKFIADLQKSNAKEKDDAMKQAALLYNGKAELPHGVFHGHKELATKIRLWYQQGERCLYSGKHIDIHDLIHNQHMFEIDHVLPLSLSFDDSLANKVLVYSWANQEKGQRTPFQALPQMASAWSFRELRDYISKQKGISKKKRDYLLTEQDINKVEVKQKFIERNLVDTRYVSRVVLNTLQDALKVMNKETKISVIRGQFTSQLRRQWRIDKSRETYHHHAVDALIIAASSQLRLWKKQNNPMFAEDKHGQKINLDTGEVLSDDAYKELVYQAPYQGFVNTISSKSFEDEILFSYQVDSKVNRKISDATIYATRQAQLGKDKKEETYVLGKIKDIYSQAGYDAFRKKYDKDKAVFLMYQKDPETWEKVIEVILRDYKELDDKGKEIGNPFERYKVKHGFVRKYSRKNKGTEIKSLKYYDNKLGNHIDITPNNSKHSVVLQSINPWRADLYFNPETTKYELMGLKYADLSFEKGTGKYSISREKYDEIKEREGISSKSEFKFTLYKNDLILVKDIGNHKELIARFNSKNDTSKHYVELKPWNKAKFDSEEELIPAFGKVAKSGQFIKGLNKPDLSIYKVKTDILGHKYYIKKEGDKPKLNFENKIKNK

SEQ ID NO: 519 - protein, 1125 aa, Streptococcus mutans; identical to SEQ ID NO: 518
  source 1..1125: note = Streptococcus mutans NLML8

SEQ ID NO: 520 - protein, 1345 aa, Streptococcus mutans
  source 1..1345: note = Streptococcus mutans NLML9
MKKPYSIGLDIGTNSVGWAVVTDDYKVSAKKMKVLGNTDKSHIKKNLLGALLFDSGNTAEDRRLKRTARRRYTRRRNRILYLQEIFAEEMSKVDDSFFHRLEDSFLVTEDKRGERHPIFGNLEEEVKYHENFPTIYHLRQYLADNPEKVDLRLVYLALAHIIKFRGHFLIEGKFDTRNNDVQRLFQEFLAVYDNTFENSSLQEQNVQVEEILTDKISKSAKKDRVLKLFPNEKSNGRFAEFLKLIVGNQADFKKHFELEEKAPLQFSKDTYEEELEVLLAQIGDNYAELFLSAKKLYDSILLSGILTVTDVSTKAPLSASMIQRYNEHQMDLAQLKQFIRQKLSDKYNEVFSDVSKDGYAGYIDGKTNQEAFYKYLKGLLNKIEGSGYFLDKIEREDFLRKQRTFDNGSIPHQIHLQEMRAIIRRQAEFYPFLADNQDRIEKILTFRIPYYVGPLARGKSDFAWLSRKSADKITPWNFDEIVDKESSAEAFINRMTNYDLYLPNQKVLPKHSLLYEKFTVYNELTKVKYKTEQGKTAFFDANMKQEIFDGVFKVYRKVTKDKLMDFLEKEFDEFRIVDLTGLDKENKAFNASYGTYHDLRKILDKDFLDNSKNEKILEDIVLTLTLFEDREMIRKRLENYSDLLTKEQVKKLERRHYTGWGRLSAELIHGIRNKESRKTILDYLIDDGNSNRNFMQLINDDALSFKEEIAKAQVIGETDNLNQVVSDIAGSPAIKKGILQSLKIVDELVKIMGHQPENIVVEMARENQFTNQGRRNSQQRLKGLTDSIKEFGSQILKEHPVEHSQLQNDRLFLYYLQNGRDMYTGEELDIDYLSQYDIDHIIPQAFIKDNSIDNRVLTSSKENRGKSDDVPSKNVVRKMKSYWSKLLSAKLITQRKFDNLTKAERGGLTDDDKAGFIKRQLVETRQITKHVARILDERFHTETDENNKKIRQVKIVTLKSNLVSNFRKEFELYKVREINDYHHTHDAYLNAVIGKALLGVYPQLEPEFVYGDYPHFHGHKENKATAKKFFYSNIMNFFKKDDVRTDKNGEIIWKKDEHISNIKKVLSYPQVNIVKKVEEQTGGFSKESILPKGNSDKLIPRKTKKFYWDTKKYGGFDSPIVAYSILVIADIEKGKSKKLKTVKALVGVTIMEKMTFERDPVAFLERKGYRNVQEENIIKLPKYSLFKLENGRKRLLASARELQKGNEIVLPNHLGTLLYHAKNIHKVDEPKHLDYVDKHKDEFKELLDVVSNFSKKYTLAEGNLEKIKELYAQNNGEDLKELASSFINLLTFTAIGAPATFKFFDKNIDRKRYTSTTEILNATLIHQSITGLYETRIDLSKLGGD

SEQ ID NO: 521 - protein, 1345 aa, Streptococcus mutans; identical to SEQ ID NO: 520
  source 1..1345: note = Streptococcus mutans NLML9

SEQ ID NO: 522 - protein, 1355 aa, Streptococcus mutans
  source 1..1355: note = Streptococcus mutans NMT4863
MKKPYSIGLDIGTNSVGWAVVTDDYKVPAKKMKVLGNTDKSHIKKNLLGALLFDSGNTAEDRRLKRTARRRYTRRRNRILYLQEIFAEEMSKVDDSFFHRLDESFLTDDDKNFDSHPIFGNKAEEDAYHQKFPTIYHLRKHLADSTEKADLRLVYLALAHMIKFRGHFLIEGELNAENTDVQKLFADFVGVYDRTFDDSHLSEITVDASSILTEKISKSRRLEKLINNYPKEKKNTLFGNLIALSLGLQPNFKTNFKLSEDAKLQFSKDTYEEDLEELLGKIGDDYADLFTLAKNLYDAILLSGILTADDSSTKAPLSASMIKRYAEHHEDLEKLKEFIKANKPELYHDIFKDETKNGYAGYIENGVKQDEFYKYLKNTLSKITGSDYFLDQIEREDFLRKQRTFDNGSIPHQIHLQEMHAILRRQGDYYPFLKENQDRIEKILTFRIPYYVGPLARKNSRFAWAEYHSDEAVTPWNFDQVIDKESSAQAFIEHMTNNDLYLPNEKVLPKHSPLYEKYTVYNELTKIKYVTEIGEAKFFDANLKQEIFDGLFKHERKVTKKKLRTFLDKNFDEFRIVDIQGLDKETETFNASYATYQDLLKVIKDKVFMDNPENAEILENIVLTLTLFEDREMIKQRLAKYADVFDKKVIDQLARRHYTGWGRLSAKLLNGIRDKQSCKTIMDYLIDDAQSNRNLMQLITDDNLTFKDDIVKAQYVDNSDDLHQVVQSLAGSPAIKKGILQSLKIVDELVKVMGKEPEQIVVEMARENQTTAKGRRNSQQRYKRLKEAIKSLDRDLNHKILKEHPTDNQALQNNRLFLYYLQNGRDMYTGESLDINRLSDYDIDHVIPQAFIKDNSIDNRVLTSSKANRGKSDDVPSEDVVNRMRPFWNKLLSSGLISQRKYNNLTKKELTLDDKAGFIKRQLVETRQITKHVARMLDERFNKEFDDNNKRIRRVKIVTLKSNLVSSFRKEFELYKVREINDYHHAHDAYLNAVVVKALLVKYPKLEPEFVYGEYPKYNSYRERKTATQKMFFYSNIMNMFKSKVKLADDQIVERPMIEVNDETGEIAWDKTKHITTVKKVLSYPQVNIVKKVEEQTIGQNGGLFDDNPKSPLEVIPSKLVPLKKALNPEKYGGYQKPTTAYPILLIVDTKQLIPISVMDKKRFEQNPVKFLKDKGYQQIEKNNFVKLPKYTLVDIGNGIKRLWASSKEVHKGNQLVVSKKSQDLLYHAHHLDNDYSNEYVKNHYQQFDILFNEITSFSKKCKLGKEHIQKIEEAYSKERDFASIEELADGFIKLLGFTQLGATSPFSFLGIKLNQKQYTGKKDYLLPCMEATLIHQSITGLYETRIDLSKLGGD

SEQ ID NO: 523 - protein, 1355 aa, Streptococcus mutans; identical to SEQ ID NO: 522
  source 1..1355: note = Streptococcus mutans NMT4863

SEQ ID NO: 524 - protein, 1345 aa, Streptococcus mutans
MKKPYSIGLDIGTNSVGWAVVTDDYKVPAKKMKVLGNTDKSHIKKNLLGALLFDSGNTAADRRLKRTARRRYTRRRNRILYLQEIFAEEMSKVDDSFFHRLEDSFLVTEDKRGERHPIFGNLEEEVKYHENFPTIYHLRQYLADNPEKVDLRLVYLALAHIIKFRGHFLIEGKFDTRNNDVQRLFQEFLAVYDNTFENSSLQEQNVQVEEILTDKISKSAKKDRVLKLFPNEKSNGRFAEFLKLIVGNQADFKKHFELEEKAPLQFSKDTYEEELEVLLAQIGDNYAELFLSAKKLYDSILLSGILTVTDVSTKAPLSASMIQRYNEHQMDLAQLKQFIRQKLSDKYNEVFSDVSKDGYAGYIDGKTNQEAFYKYLKGLLNKIEGSGYFLDKIEREDFLRKQRTFDNGSIPHQIHLQEMRAIIRRQAEFYPFLADNQDRIEKILTFRIPYYVGPLARGKSDFAWLSRKSADKITPWNFDEIVDKESSAEAFINRMTNYDLYLPNQKVLPKHSLLYEKFTVYNELTKVKYKTEQGKTAFFDANMKQEIFDGVFKVYRKVTKDKLMDFLEKEFDEFRIVDLTGLDKENKAFNASYGTYHDLRKILDKDFLDNSKNEKILEDIVLTLTLFEDREMIRKRLENYSDLLTKEQVKKLERRHYTGWGRLSAELIHGIRNKESRKTILDYLIDDGNSNRNFMQLINDDALSFKEEIAKAQVIGETDNLNQVVSDIAGSPAIKKGILQSLKIVDELVKIMGHQPENIVVEMARENQFTNQGRRNSQQRLKGLTDSIKEFGSQILKEHPVKHSQLQNDRLFLYYLQNGRDMYTGEELDIDYLSQYDIDHIIPQAFIKDNSIDNRVLTSSKENRGKSDDVPSKNVVRKMKSYWSKLLSAKLITQRKFDNLTKAERGGLTDDDKAGFIKRQLVETRQITKHVARILDERFHTETDENNKKIRQVKIVTLKSNLVSNFRKEFELYKVREINDYHHAHDAYLNAVIGKALLGVYPQLEPEFVYGDYPHFHGHKENKATAKKFFYSNIMNFFKKDDVRTDKNGEIIWKKDEHISNIKKVLSYPQVNIVKKVEEQTGGFSKESILPKGNSDKLIPRKTKKFYWDTKKYGGFDSPIVAYSILVIADIEKGKSKKLKTVKALVGVTIMEKMTFERDPVAFLERKGYRNVQEENIIKLPKYSLFKLENGRKRLLASARELQKGNEIVLPNHLGTLLYHAKNIHKVDEPKHLDYVDKHKDEFKELLDVVSNFSKKYTLAEGNLEKIKELYAQNNGEDLKELASSFINLLTFTAIGAPATFKFFDKNIDRKRYTSTTEILNATLIHQSITGLYETRIDLSKLGGD

SEQ ID NO: 525 - protein, 1345 aa, Streptococcus mutans; identical to SEQ ID NO: 471
  source 1..1345: note = Streptococcus mutans NV1996

SEQ ID NO: 526 - protein, 1345 aa, Streptococcus mutans
  source 1..1345: note = Streptococcus mutans NVAB
MKKPYSIGLDIGTNSVGWAVVTDDYKVPAKKMKVLGNTDKSHIKKNLLGALLFDSGNTAADRRLKRTARRRYTRRRNRILYLQEIFAEEMSKVDDSFFHRLEDSFLVTEDKRGERHPIFGNLEEEVKYHENFPTIYHLRQYLADNPEKVDLRLVYLALAHIIKFRGHFLIEGKFDTRNNDVQRLFQEFLAVYDNTFENSSLQEQNVQVEEILTDKISKSAKKDRVLKLFPNEKSNGRFAEFLKLIVGNQADFKKHFELEEKAPLQFSKDTYEEELEVLLAQIGDNYAELFLSAKKLYDSILLSGILTVTDVSTKAPLSASMIQRYNEHQMDLAQLKQFIRQKLSDKYNEVFSDVSKDGYAGYIDGKTNQEAFYKYLKGLLNKIEGSGYFLDKIEREDFLRKQRTFDNGSIPHQIHLQEMRAIIRRQAEFYPFLADNQDRIEKILTFRIPYYVGPLARGKSDFAWLSRKSADKITPWNFDEIVDKESSAEAFINRMTNYDLYLPNQKVLPKHSLLYEKFTVYNELTKVKYKTEQGKTAFFDANMKQEIFDGVFKVYRKVTKDKLMDFLEKEFDEFRIVDLTGLDKENKVFNASYGTYHDLCKILDKDFLDNSKNEKILEDIVLTLTLFEDREMIRKRLENYSDLLTKEQVKKLERRHYTGWGRLSAELIHGIRNKESRKTILDYLIDDGNSNRNFMQLINDDALSFKEEIAKAQVIGETDNLNQVVSDIAGSPAIKKGILQSLKIVDELVKIMGHQPENIVVEMARENQFTKQGRRNSQQRLKGLTDSIKEFGSQILKEHPVENSQLQNDRLFLYYLQNGRDMYTGEELDIDYLSQYDIDHIIPQAFIKDNSIDNRVLTSSKENRGKSDDVPSKDVVRKMKSYWSKLLSAKLITQRKFDNLTKAERGGLTDDDKAGFIKRQLVETRQITKHVARILDERFYTETDENNKKIRQVKIVTLKSNLVSNFRKEFELYKVREINDYHHAHDAYLNAVIGKALLGVYPQLEPEFVYGDYPHFHGHKENKATAKKFFYSNIMNFFKKDDVRTDKNGEIIWKKDEHISNIKKVLSYPQVNIVKKVEEQTGGFSKESILPKGNSDKLIPRKTKKFYWDTKKYGGFDSPIVAYSILVIADIEKGKSKKLKTVKALVGVTIMEKMTFERDPVAFLERKGYRNVQEENIIKLPKYSLFKLENGRKRLLASARELQKGNEIVLPNHLGTLLYHAKNIHKVDEPKHLDYVDKHKDEFKELLDVVSNFSKKYTLAEGNLEKIKELYAQNNGEDLKELASSFINLLTFTAIGAPATFKFFDKNIDRKRYTSTTEILNATLIHQSITGLYETRIDLSKLGGD

SEQ ID NO: 527 - protein, 1345 aa, Streptococcus mutans; identical to SEQ ID NO: 526
  source 1..1345: note = Streptococcus mutans NVAB

SEQ ID NO: 528 - protein, 1345 aa, Streptococcus mutans
  source 1..1345: note = Streptococcus mutans R221
MKKPYSIGLDIGTNSVGWAVVTDDYKVPAKKMKVLGNTDKSHIKKNLLGALLFDSGNTAEDRRLKRTARRRYTRRRNRILYLQEIFSEEMGKVDDSFFHRLEDSFLVTEDKRGERHPIFGNLEEEVKYHENFPTIYHLRQYLADNPEKTDLRLVYLALAHIIKFRGHFLIEGKFDTRNNDVQRLFQEFLAVYDNTFENSSLQEQNVQVEEILTDKISKSAKKDRVLKLFPNEKSNGRFAEFLKLIVGNQADFKKHFELEEKAPLQFSKDIYEEELEVLLAQIGDNYAELFLSAKKLYDSILLSGILTVTDVSTKAPLSASMIQRYNEHQMDLAQLKQFIRQKLSDKYNEVFSDVSKDGYAGYIDGKTNQEAFYKYLKGLLNKIEGSGYFLDKIEREDFLRKQRTFDNGSIPHQIHLQEMRAIIRRQAEFYPFLADNQDRIEKILTFRIPYYVGPLARGKSDFAWLSRKSADKITPWNFDEIVDKESSVEAFINRMTNYDLYLPNQKVLPKHSLLYEKFTVYNELTKVKYKTEQGKTAFFDANMKQEIFDGVFKVYRKVTKDKLMDFLEKEFDEFRIVDLTGLDKENKAFNASYGTYHDLRKILDKDFLDNSKNEKILEDIVLTLTLFEDREMIRKRLKNYSDLLTKEQLKKLERRHYTGWGRLSAELIHGIRNKESRKTILDYLIDDGNSNRNFMQLINDDALSFKEEIAKAQVIGETDNLNQVVSDIAGSPAIKKGILQSLKIVDELVKIMGHQPENIVVEMARENQFTNQGRRNSQQRLKGLTDSIKEFGSQILKEHPVENSQLQNDRLFLYYLQNGRDMYTGEELDIDYLSQYDIDHIIPQAFIKDNSIDNRVLTSSKENRGKSDDVPSKDVVRKMKSYWSKLLSAKLITQRKFDNLTKAERGGLTDDDKAGFIKRQLVETRQITKHVARILDERFNTETDENNKKIRQVKIVTLKSNLVSNFRKEFELYKVREINDYHHAHDAYLNAVIGKALLGVYPQLEPEFVYGDYPHFHGHKENKATAKKFFYSNIMNFFKKDDVRTDKNGEIIWKKDEHISNIKKVLSYPQVNIVKKVEEQTGGFSKESILPKGNSDKLIPRKTKKFYWDTKKYGGFDSPIVAYSILVIADIEKGKSKKLKTVKALVGVTIMEKMTFERDPVAFLERKGYRNVQEENIIKLPKYSLFKLENGRKRLLASARELQKGNEIVLPNHLGTLLYHAKNIHKVDEPKHLDYVDKHKDEFKELLDVVSNFSKKYTLAEGNLEKIKELYAQNNGEDLKELASSFINLLTFTAIGAPATFKFFDKNIDRKRYTSTTEILNATLIHQSITGLYETRIDLNKLGGD

SEQ ID NO: 529 - protein, 1345 aa, Streptococcus mutans; identical to SEQ ID NO: 528
  source 1..1345: note = Streptococcus mutans R221

SEQ ID NO: 530 - protein, 1345 aa, Streptococcus mutans
  source 1..1345: note = Streptococcus mutans S1B
MKKPYSIGLDIGTNSVGWAVVTDDYKVPAKKMKVLGNTDKSHIKKNLLGALLFDSGNTAEDRRLKRTARRRYTRRRNRILYLQEIFSEEMGKVDDSFFHRLDESFLTDDDKNFDSYPIFGNKAEEDAYHQKFPTIYHLRKHLADSTEKADLRLVYLALAHMIKFRGHFLIEGELNAENTDVQKLFADFVGVYDRTFDDSHLSEITVDASSILTEKISKSRRLEKLINNYPKEKKNTLFRNLVALSLGLQPNFKTNFKLSEDAKLQFSKDTYEEDLEELLGKIGDDYADLFTLAKNLYDAILLSGILTADDSSTKAPLSASMIKRYAEHHEDLEKLKEFIKANKPELYHDIFKDETKNGYAGYIENGVKQDEFYKYLKNTLSKIAGSDYFLDKIEREDFLRKQRTFDNGSIPHQIHLQEMHAILRRQGDYYPFLKENQDRIEKILTFRIPYYVGPLARGKSDFAWLSRKSADKITPWNFDEIVDKESSVEAFINRMTNYDLYLPNQKVLPKHSLLYEKFTVYNELTKVKYKTEQGKTAFFDANMKQEIFDGVFKVYRKVTKDKLMDFLEKEFDEFRIVDLTGLDKENKAFNASYGTYHDLRKILDKDFLDNSKNEKILEDIVLTLTLFEDREMIRKRLKNYSDLLTKEQLKKLERRHYTGWGRLSAELIHGIRNKESRKTILDYLIDDGNSNRNFMQLINDDALSFKEEIAKAQVIGETDNLNQVVSDIAGSPAIKKGILQSLKIVDELVKIMGHQPENIVVEMARENQFTNQGRRNSQQRLKGLTDSIKEFGSQILKEHPVENSQLQNDRLFLYYLQNGRDMYTGEELDIDYLSQYDIDHIIPQAFIKDNSIDNRVLTSSKENRGKSDDVPSKDVVRKMKSYWSKLLSAKLITQRKFDNLTKGERGGLTDDDKAGFIKRQLVETRQITKHVARILDERFNTETDENNKKIRQVKIVTLKSNLVSNFRKEFELYKVREINDYHHAHDAYLNAVIGKALLGVYPQLEPEFVYGDYPHFHGHKENKATAKKFFYSNIMNFFKKDDVRTDKNGEIIWKKDEYISNIKKVLSYPQVNIVKKVEEQTGGFSKESILPKGDSDKLIPRKTKKFYWDTKKYGGFDSPIVAYSILVIADIEKGKSKKLKTVKALVGVTIMEKMTFERDPVAFLERKGYRNVQEENIIKLPKYSLFKLENGRKRLLASARELQKGNEIVLPNHLGTLLYHAKNIHKVDEPKHLDYVDKHKDEFKELLDVVSNFSKKYTLAEGNLEKIKELYAQNNGEDLKELASSFINLLTFTAIGAPATFKFFDKNIDRKRYTSTTEILNATLIHQSITGLYETRIDLSKLGGD

SEQ ID NO: 531 - protein, 1345 aa, Streptococcus mutans; identical to SEQ ID NO: 530
  source 1..1345: note = Streptococcus mutans S1B

SEQ ID NO: 532 - protein, 1345 aa, Streptococcus mutans; identical to SEQ ID NO: 471
  source 1..1345: note = Streptococcus mutans SF1

SEQ ID NO: 533 - protein, 1345 aa, Streptococcus mutans
  source 1..1345: note = Streptococcus mutans SF14
MKKPYSIGLDIGTNSVGWAVVTDDYKVPAKKMKVLGNTDKSHIKKNLLGALLFDSGNTAEDRRLKRTARRRYTRRRNRILYLQEIFSEEMGKVNDSFFHRLEDSFLVTEDKRGERHPIFGNLEEEVKYHENFPTIYHLRQYLADNPEKVDLRLVYLALAHIIKFRGHFLIEGKFDTRNNDVQRLFQEFLAVYDNTFENSSLQEQNVQVEEILTDKISKSAKKDRVLKLFPNEKSNGRFAEFLKLIVGNQADFKKHFELEEKAPLQFSKDTYEEELEVLLAQIGDNYAELFLSAKKLYDSILLSGILTVTDVSTKAPLSASMIQRYNEHQMDLAQLKQFIRQKLSDKYNEVFSDVSKDGYAGYIDGKTNQEAFYKYLKGLLNKIEGSGYFLDKIEREDFLRKQRTFDNGSIPHQIHLQEMRAIIRRQAEFYPFLADNQDRIEKILTFRIPYYVGPLARGKSDFAWLSRKSADKITPWNFDEIVDKESSAEAFINRMTNYDLYLPNQKVLPKHSLLYEKFTVYNELTKVKYKTEQGKTAFFDANMKQEIFDGVFKVYRKVTKDKLMDFLEKEFDEFRIVDLTGLDKENKVFNASYGTYHDLCKILDKDFLDNSKNEKILEDIVLTLTLFEDREMIRKRLENYSDLLTKEQVKKLERRHYTGWGRLSAELIHGIRNKESRKTILDYLIDDGNSNRNFMQLINDDALSFKEEIAKAQVIGETDNLNQVVSDIAGSPAIKKGILQSLKIVDELVKIMGHQPENIVVEMARENQFTKQGRRNSQQRLKGLTDSIKEFGSQILKEHPVENSQLQNDRLFLYYLQNGRDMYTGEELDIDYLSQYDIDHIIPQAFIKDNSIDNRVLTSSKENRGKSDDVPSKDVVRKMKSYWSKLLSAKLITQRKFDNLTKAERGGLTDDDKAGFIKRQLVETRQITKHVARILDERFYTETDENNKKIRQVKIVTLKSNLVSNFRKEFELYKVREINDYHHAHDAYLNAVIGKALLGVYPQLEPEFVYGDYPHFHGHKENKATAKKFFYSNIMNFFKKDDVRTDKNGEIIWKKDEYISNIKKVLSYPQVNIVKKVEEQTGGFSKESILPKGNSDKLIPRKTKKFYWDTKKYGGFDSPIVAYSILVIADIEKGKSKKLKTVKALVGVTIMEKMTFERDPIAFLERKGYRNVQEENIIKLPKYSLFKLENGRKRLLASARELQKGNEIVLPNHLGTLLYHAKNIHKVDEPKHLDYVDKHKDEFKELLDVVSNFSKKYTLAEGNLEKIKELYAQNNGEDLKELASSFINLLTFTAIGAPAAFKFFDKNIDRKRYTSTTEILNATLIHQSITGLYETRIDLSKLGGD

SEQ ID NO: 534 - protein, 1345 aa, Streptococcus mutans; identical to SEQ ID NO: 533
  source 1..1345: note = Streptococcus mutans SF14

SEQ ID NO: 535 - protein, 1345 aa, Streptococcus mutans
  source 1..1345: note = Streptococcus mutans SM1
MKKPYSIGLDIGTNSVGWAVVTDDYKVPAKKMKVLGNTDKSHIKKNLLGALLFDSGNTAEDRRLKRTARRRYTRRRNRILYLQEIFSEEMGKVDDSFFHRLEDSFLVTEDKRGERHPIFGNLEEEVKYHENFPTIYHLRQYLADNPEKVDLRLVYLALAHIIKFRGHFLIEGKFDTRNNDVQKLFQEFLAVYDNTFENSSLQEQNVQVEEILTDKISKSAKKDRVLKLFPNEKSNGRFAEFLKLIVGNQADFKKHFELEEKAPLQLSKDTYEEELEVLLAQIGDNYAELFLSAKKLYDSILLSGILTVTDVSTKAPLSASMIQRYNEHQMDLAQLKQFIRQKLSDKYNEVFSDVSKDGYAGYIDGKTNQEAFYKYLKGLLNKIEGSGYFLDKIEREDFLRKQRTFDNGSIPHQIHLQEMRAIIRRQAEFYPFLADNQDRIEKILTFRIPYYVGPLARGKSDFAWLSRKSADKITPWNFDEIVDKESSVEAFINRMTNYDLYLPNQKVLPKHSLLYEKFTVYNELTKVKYKTEQGKTAFFDANMKQEIFDGVFKVYRKVTKDKLMDFLEKEFDEFRIVDLTGLDKENKAFNASYGTYHDLRKILDKDFLDNSKNEKILEDIVLTLTLFEDREMIRKRLENYSDLLTKEQVKKLERRHYTGWGRLSAELIHGIRNKESRKTLLDYLIDDGNSNRNFMQLINDDALSFKEEIAKAQVIGETDNLNQVVSDIAGSPAIKKGILQSLKIVDELVKIMGHQPENIVVEMARENQFTNQGRRNSQQRLKGLTDSIKEFGSQILKEHPVENSQLQNDRLFLYYLQNGRDMYTGEELDIDYLSQYDIDHIIPQAFIKDNSIDNRVLTSSKENRGKSDDVPSKDVVRKMKSYWSKLLSAKLITQRKFDNLTKAERGGLTDDDKAGFIKRQLVETRQITKHVARILDERFNTETDENNKKIRQVKIVTLKSNLVSNFRKEFELYKVREINDYHHAHDAYLNAVIGKALLGVYPQLEPEFVYGDYPHFHGHKENKATAKKFFYSNIMNFFKKDDVRTDKNGEIIWKKDEYISNIKKVLSYPQVNIVKKVEEQTGGFSKESILPKGNSDKLIPRKTKKFYWDTKKYGGFDSPIVAYSILVIADIEKGKSKKLKTVKALVGVTIMEKMTFERDPIAFLERKGYRNVQEENIIKLPKYSLFKLENGRKRLLASARELQKGNEIVLPNHLGTLLYHAKNIHKVDEPKHLDYVDKHKDEFKELLDVVSNFSKKYTLAEGNLEKIKELYAQNNGEDLKELASSFINLLTFTAIGAPATFKFFDKNIDRKRYTSTTEILNATLIHQSITGLYETRIDLSKLGGD

SEQ ID NO: 536 - protein, 1345 aa, Streptococcus mutans; identical to SEQ ID NO: 535
  source 1..1345: note = Streptococcus mutans SM1

SEQ ID NO: 537 - protein, 1345 aa, Streptococcus mutans
  source 1..1345: note = Streptococcus mutans SM4
MKKPYSIGLDIGTNSVGWAVVTDDYKVPAKKMKVLGNTDKSHIKKNLLGALLFDSGNTAEDRRLKRTARRRYTRRRNRILYLQEIFSEEMDKVDDSFFHRLEDSFLVTEDKRGERHPIFGNLEEEVKYHENFPTIYHLRQYLADNPEKVDLRLVYLALAHIIKFRGHFLIEGKFDTRNNDVQRLFQEFLAVYDNTFENSSLQEQNVQVEEILTDKISKSAKKDRVLKLFPNEKSNGRFAEFLKLIVGNQADFKKHFELEEKAPLQFSKDTYEEELEVLLAQIGDNYAELFLSAKKLYDSILLSGILTVTDVSTKAPLSASMIQRYNEHQMDLAQLKQFIRQKLSDKYNEVFSDVSKDGYAGYIDGKTNQEAFYKYLKGLLNKIEGSGYFLDKIEREDFLRKQRTFDNGSIPHQIHLQEMRAIIRRQAEFYPFLADNQDRIEKILTFRIPYYVGPLARGKSDFAWLSRKSADKITPWNFDEIVDKESSAEAFINRMTNYDLYLPNQKVLPKHSLLYEKFTVYNELTKVKYKTEQGKTAFFDANMKQEIFDGVFKVYRKVTKDKLMDFLEKEFDEFRIVDLTGLDKENKVFNASYGTYHDLCKILDKDFLDNSKNEKILEDIVLTLTLFEDREMIRKRLENYSDLLTKEQVKKLERRHYTGWGRLSAELIHGIRNKESRKTILDYLIDDGNSNRNFMQLINDDALSFKEEIAKAQVIGETDNLNQVVSDIAGSPAIKKGILQSLKIVDELVKIMGHQPENIVVEMARENQFTKQGRRNSQQRLKGLTDSIKEFGSQILKEHPVENSQLQNDRLFLYYLQNGRDMYTGEELDIDYLSQYDIDHIIPQAFIKDNSIDNRVLTSSKENRGKSDDVPSKDVVRKMKSYWSKLLSAKLITQRKFDNLTKAERGGLTDDDKAGFIKRQLVETRQITKHVARILDERFYTETDENNKKIRQVKIVTLKSNLVSNFRKEFELYKVREINDYHHAHDAYLNAVIGKALLGVYPQLEPEFVYGDYPHFHGHKENKATAKKFFYSNIMNFFKKDDVRTDKNGEIIWKKDEHISNIKKVLSYPQVNIVKKVEEQTGGFSKESILPKGNSDKLIPRKTKKFYWDTKKYGGFDSPIVAYSILVIADIEKGKSKKLKTVKALVGVTIMEKMTFERDPVAFLERKGYRNVQEENIIKLPKYSLFKLENGRKRLLASARELQKGNEIVLPNHLGTLLYHAKNIHKVDEPKHLDYVDKHKDEFKELLDVVSNFSKKYTLAEGNLEKIKELYAQNNGEDLKELASSFINLLTFTAIGAPATFKFFDKNIDRKRYTSTTEILNATLIHQSITGLYETRIDLSKLGGD

SEQ ID NO: 538 - protein, 1345 aa, Streptococcus mutans; identical to SEQ ID NO: 537
  source 1..1345: note = Streptococcus mutans SM4

SEQ ID NO: 539 - protein, 1345 aa, Streptococcus mutans
  source 1..1345: note = Streptococcus mutans SM6
MKKPYSIGLDIGTNSVGWAVVTDDYKVPAKKMKVLGNTDKSHIKKNLLGALLFDSGNTAEDRRLKRTARRRYTRRRNRILYLQEIFSEEMGKVDDSFFHRLEDSFLVTEDKRGERHPIFGNLEEEVKYHENFPTIYHLRQYLADNPEKTDLRLVYLALAHIIKFGGHFLIEGKFDTRNNDVQRLFQEFLAVYDNTFENSSLQEQNVQVEEILTDKISKSAKKDRVLKLFPNEKSNGRFAEFLKLIVGNQADFKKHFELEEKAPLQFSKDIYEEELEVLLAQIGDNYAELFLSAKKLYDSILLSGILTVTDVSTKAPLSASMIQRYNEHQMDLAQLKQFIRQKLSDKYNEVFSDVSKDGYAGYIDGKTNQEAFYKYLKGLLNKIEGSGYFLDKIEREDFLRKQRTFDNGSIPHQIHLQEMRAIIRRQAEFYPFLADNQDRIEKILTFRIPYYVGPLARGKSDFAWLSRKSADKITPWNFDEIVDKESSVEAFINRMTNYDLYLPNQKVLPKHSLLYEKFTVYNELTKVKYKTEQGKTAFFDANMKQEIFDGVFKVYRKVTKDKLMDFLEKEFDEFRIVDLTGLDKENKAFNASYGTYHDLRKILDKDFLDNSKNEKILEDIVLTLTLFEDREMIRKRLKNYSDLLTKEQLKKLERRHYTGWGRLSAELIHGIRNKESRKTILDYLIDDGNSNRNFMQLINDDALSFKEEIAKAQVIGETDNLNQVVSDIAGSPAIKKGILQSLKIVDELVKIMGHQPENIVVEMARENQFTNQGRRNSQQRLKGLTDSIKEFGSQILKEHPVENSQLQNDRLFLYYLQNGRDMYTGEELDIDYLSQYDIDHIIPQAFIKDNSIDNRVLTSSKENRGKSDDVPSKNVVRKMKSYWSKLLSAKLITQRKFDNLTKAERGGLTDDDKAGFIKRQLVETRQITKHVARILDERFHTETDENNKKIRQVKIVTLKSNLVSNFRKEFELYKVREINDYHHAHDAYLNAVIGKALLGVYPQLEPEFVYGDYPHFHGHKENKATAKKFFYSNIMNFFKKDDVRTDKNGEIIWKKDEHISNIKKVLSYPQVNIVKKVEEQTGGFSKESILPKGNSDKLIPRKTKKFYWDTKKYGGFDSPIVAYSILVIADIEKGKSKKLKTVKALVGVTIMEKMTFERDPVAFLERKGYRNVQEENIIKLPKYSLFKLENGRKRLLASARELQKGNEIVLPNHLGTLLYHAKNIHKVDEPKHLDYVDKHKDEFKELLDVVSNFSKKYTLAEGNLEKIKELYAQNNGEDLKELASSFINLLTFTAIGAPATFKFFDKNIDRKRYTSTTEILNATLIHQSITGLYETRIDLSKLGGD

SEQ ID NO: 540 - protein, 1345 aa, Streptococcus mutans; identical to SEQ ID NO: 539
  source 1..1345: note = Streptococcus mutans SM6

SEQ ID NO: 541 - protein, 1134 aa, Streptococcus mutans
  source 1..1134: note = Streptococcus mutans ST1
MANGKILGLDIGIASVGVGIIDKETGKIIHVNSRIFPAATADSNVERRGFRQGRRLVRRKKHRKVRLADLFLDSNLLTDFSKVSLNLNPYQLRVKGLNEELSNEELFIALKSIVSRRGISYLDDASEDSGANSSEYGKAVEENRKLLEDRTPGQIQLERFEKYGKVRGDFTVVENGENHRLINVFSTSAYKKEAERILRRQQEFNMRIADEFIEAYLTILTGKRKYYHGPGNEKSRTDYGRFRTDGTTLDNIFGILIGKCTFYPDEYRAAKASYTAQEFNLLNDLNNLTVPTETKKLSEEQKRQIIEHAKTVKTLGAPTLLKYIVKLVGCSADDIKGYRIDKSDKPEIHTFEAYRKMRTMELIKVDDLSRESLDALAHILTLNTEREGIEEAIRDRFTNKEFNQEQINELVLFRKNNSSLFGKGWHNFSLKLMKELIPELYETSEEQMTILTRLGKQRVKKSSNRTNYIDEKELTEEIYNPVVAKSVRQAIKIINLATKKYGVFDNIVIEMARESNEDDEKKAIQNAQKANEDEKKAALLKAAHQFNGKEELPDSIFHGHKELLTKIRLWHQQGEKCLYTGKTIFINDLIHNPYKYEIDHILPLSLSFDDSLANKVLVLSTANQEKGQRTPFQSLDSMDGAWTYREFKSYVKGLKTLSNKKKDYLLTEENIDKIEVKQKFIERNLVDTRYSSRVVLNALQDFYKERKFDTKISVVRGQFTSQLRRKWRIEKTRETYHHHAVDALIIAASSQLNLWKKQNNPLISYKEDQFVDPETGEILSLSDDEYKKLVFKAPYEHFVDTLKSKKFEDSILFSYQVDSKYNRKISGATICGTRKAQLGKDTQEETYVLGKIKDIYSQKGYEDFIKKYKKDKTQFLMYHKDPQTFEKVIEEILKTYPDKELNEKGKEVSCNPFEKYRQENGPVRKYSKKGNGPEIKSLKYYDEVLGKNIDITPKNSLNKVVLRSLNPWRTDVYFNHETRKYEFLGLKYSDLRYLKGEHRYGILIGDYKKIKDKEGIEKESEFKFTLYKNDLILIKDTAKGKEELFRFWSRTGKDNAKTFEKNKIELKPYSKSQFEKGEDTNVLGKLYASSNQLQKSFGTLENLSIYKVRTDVLGNKYFIKKEGDKPQLNFKKKL

SEQ ID NO: 542 - protein, 1134 aa, Streptococcus mutans; identical to SEQ ID NO: 541
  source 1..1134: note = Streptococcus mutans ST1

SEQ ID NO: 543 - protein, 1350 aa, Streptococcus mutans
  source 1..1350: note = Streptococcus mutans ST6
MKKPYSIGLDIGTNSVGWAVVTDDYKVPAKKMKVLGNTDKSHIEKNLLGALLFDSGNTAEDRRLKRTARRRYTRRRNRILYLQEIFSEEMGKVDDSFFHRLEDSFLVTEDKRGERHPIFGNLEEEVKYHENFPTIYHLRQYLADNPEKVDLRLVYLALAHIIKFRGHFLIEGKFDTRNNDVQRLFQEFLAVYDNTFENSSLQEQNVQVEEILTDKISKSAKKDRVLKLFPNEKSNGRFAEFLKLIVGNQADFKKHFELEEKAPLQFSKDTYEEELEVLLAQIGDNYAELFLSAKKLYDSILLSGILTVTDVSTKAPLSASMIQRYNEHQMDLTQLKQFIRQKLSDKYNEVFSDVSKDGYAGYIDGKTNQEAFYKYLKGLLNKIEGSGYFLDKIEREDFLRKQRTFDNGSIPHQIHLQEMRAIIRRQAEFYSFLADNQDRIEKILTFRIPYYVGPLARGKSDFAWLSRKSADKITPWNFDEIVDKESSAEAFINRMTNYDLYLPNQKVLPKHSLLYEKFTVYNELTKVKYKTEQGKTAFFDANMKQEIFDGVFKVYRKVTKDKLMDFLEKEFDEFRIVDLTGLDKENKAFNASYGTYHDLRKILDKDFLDNSKNEKILEDIVLTLTLFEDREMIRKRLENYSDLLTKEQVKKLERRHYTGWGRLSAELIHGIRNKESRKTILDYLIDDGNSNRNFMQLINDDALSFKEEIAKAQVIGETDNLNQVVSDIAGSPAIKKGILQSLKIVDELVKIMGHQPENIVVEMARENQFTNQGRRNSQQRLKGLTDSIKEFGSQILKEHPVENSQLQNDRLFLYYLQNGRDMYTGEELDIDYLSQYDIDHIIPQAFIKDNSIDNRVLTSSKENRGKSDDVPSEDVVNRMRPFWNKLLSSGLISQRKYNNLTKKELTLDDKAGFIKRQLVETRQITKHVARMLDERFNKEFDDNNKRIRKVKIVTLKSNLVSSFRKEFELYKVREINDYHHAHDAYLNAVVVKALLVKYSKLEPEFVYGEYPKYNSYRERKTATQKMFFYSNIMNMFKSKVKLADDQIVERPMIEVNDETGEIAWDKTKHITTVKKVLSYPQVNIVKKVEEQTIGQNGGLFDDNPKSPLEVIPSKLVPLKKALNPEKYGGYQKPTTAYPILLIVDTKQLIPISVMDKKRFEQNPVKFLKDKGYQQIEKNNFVKLPKYTLVDIGNGIKRLWASSKEVHKGNQLVVSKKSQDLLYHAHHLDNDYSNEYVKNHYQQFDILFNEITSFSKKCKLGKEHIQKIEEAYSKERDSASIEELADGFIKLLGFTQLGATSPFSFLGIKLNQKQYTGKKDYLLPCMEATLIHQSITGLYETRIDLSKLGGD

SEQ ID NO: 544 - protein, 1350 aa, Streptococcus mutans; identical to SEQ ID NO: 543
  source 1..1350: note = Streptococcus mutans ST6

SEQ ID NO: 545 - protein, 1125 aa, Streptococcus mutans
  source 1..1125: note = Streptococcus mutans U2A
MTNGKILGLDIGIASVGVGIINAKTGNVEHASSRIFPAANADNNVERRSARGGRRLIRRKKHRLKRVEDLFEKYNIDTDFSNLNLNPYQLRVKGLNEQLSNEELFAILKNIAKRRGISYLDDAEDDSVGSSDYAKAIDENRKLLKKQTPGEIQLKRLEKYGQLRGNFTIQDENGEYHRLINVFSTSDYVKEARRILETQSYYNKFITESFVEDYIKILQGKRKYYVGPGNEKSRTDYGIYRTDGETLDNLFGILIGKCGFYPEEYRAAKASYTAQEYNFLNDLNNLTVPTETKKLSTEQKYQLVDFAKTASTLGAAKLLKEIAKLVGCQVEEIKGYRLDNKDKPDLHTFEPFRKLKSNLTTIAVENLSITTLDTLAHILTLNTEREGIEEAIQKELPNIFSDEQITEIIAVRKKNSQIFGKGWHSFSIKLMKELIPELYETSEEQMTILTRLKKVKTNSKITNRTKYINEEEITDEIYNPVVSKSIRQTVKIINATIKKYGAFDQIIIEMPRESNEEDERKFIADLQKSNAKEKDDAMKQAALLYNGKDELPHDVFHGHKELATKIRLWYQQGERCLYSGKHIDIHDLIHNQHMFEIDHVLPLSLSFDDSLANKVLVYSWANQEKGQRTPFQALPQMASAWSFRELRDYISKQKGISKKKRDYLLTEQDINKVEVKQKFIERNLVDTRYVSRVVLNTLQDALKVMNKETKISVIRGQFTSQLRRQWRIDKSRETYHHHAVDALIIAASSQLRLWKKQNNPMFAEDKHGQKINLDTGEVLSDDAYKELVYQAPYQGFVNTISSKSFEDEILFSYQVDSKVNRKISDATIYATRQAQLGKDKKEETYVLGKIKDIYSQAGYDAFRKKYDKDKAVFLMYQKDPETWEKVIEVILRDYKELDDKGKEIGNPFERYKVKHGFVRKYSRKNKGTEIKSLKYYDNKLGNHIDITPNNSKHSVVLQSINPWRADLYFNPETTKYELMGLKYADLSFEKGTGKYSISREKYDEIKEREGISSKSEFKFTLYKNDLILVKDIGNHKELIARFNSKNDTSKHYVELKPWNKAKFDSEEELIPAFGKVAKSGQFIKGLNKPDLSIYKVKTDILGHKYYIKKEGDKPKLNFENKIKNK

SEQ ID NO: 546 - protein, 1125 aa, Streptococcus mutans; identical to SEQ ID NO: 545
  source 1..1125: note = Streptococcus mutans U2A

SEQ ID NO: 547 - protein, 1345 aa, Streptococcus mutans
  source 1..1345: note = Streptococcus mutans UA159
MKKPYSIGLDIGTNSVGWAVVTDDYKVPAKKMKVLGNTDKSHIEKNLLGALLFDSGNTAEDRRLKRTARRRYTRRRNRILYLQEIFSEEMGKVDDSFFHRLEDSFLVTEDKRGERHPIFGNLEEEVKYHENFPTIYHLRQYLADNPEKVDLRLVYLALAHIIKFRGHFLIEGKFDTRNNDVQRLFQEFLAVYDNTFENSSLQEQNVQVEEILTDKISKSAKKDRVLKLFPNEKSNGRFAEFLKLIVGNQADFKKHFELEEKAPLQFSKDTYEEELEVLLAQIGDNYAELFLSAKKLYDSILLSGILTVTDVGTKAPLSASMIQRYNEHQMDLAQLKQFIRQKLSDKYNEVFSDVSKDGYAGYIDGKTNQEAFYKYLKGLLNKIEGSGYFLDKIEREDFLRKQRTFDNGSIPHQIHLQEMRAIIRRQAEFYPFLADNQDRIEKLLTFRIPYYVGPLARGKSDFAWLSRKSADKITPWNFDEIVDKESSAEAFINRMTNYDLYLPNQKVLPKHSLLYEKFTVYNELTKVKYKTEQGKTAFFDANMKQEIFDGVFKVYRKVTKDKLMDFLEKEFDEFRIVDLTGLDKENKVFNASYGTYHDLCKILDKDFLDNSKNEKILEDIVLTLTLFEDREMIRKRLENYSDLLTKEQVKKLERRHYTGWGRLSAELIHGIRNKESRKTILDYLIDDGNSNRNFMQLINDDALSFKEEIAKAQVIGETDNLNQVVSDIAGSPAIKKGILQSLKIVDELVKIMGHQPENIVVEMARENQFTNQGRRNSQQRLKGLTDSIKEFGSQILKEHPVENSQLQNDRLFLYYLQNGRDMYTGEELDIDYLSQYDIDHIIPQAFIKDNSIDNRVLTSSKENRGKSDDVPSKDVVRKMKSYWSKLLSAKLITQRKFDNLTKAERGGLTDDDKAGFIKRQLVETRQITKHVARILDERFNTETDENNKKIRQVKIVTLKSNLVSNFRKEFELYKVREINDYHHAHDAYLNAVIGKALLGVYPQLEPEFVYGDYPHFHGHKENKATAKKFFYSNIMNFFKKDDVRTDKNGEIIWKKDEHISNIKKVLSYPQVNIVKKVEEQTGGFSKESILPKGNSDKLIPRKTKKFYWDTKKYGGFDSPIVAYSILVIADIEKGKSKKLKTVKALVGVTIMEKMTFERDPVAFLERKGYRNVQEENIIKLPKYSLFKLENGRKRLLASARELQKGNEIVLPNHLGTLLYHAKNIHKVDEPKHLDYVDKHKDEFKELLDVVSNFSKKYTLAEGNLEKIKELYAQNNGEDLKELASSFINLLTFTAIGAPATFKFFDKNIDRKRYTSTTEILNATLIHQSITGLYETRIDLNKLGGD

SEQ ID NO: 548 - protein, 1345 aa, Streptococcus mutans; identical to SEQ ID NO: 472
  source 1..1345: note = Streptococcus mutans W6

SEQ ID NO: 549 - protein, 1121 aa, Streptococcus oralis
  source 1..1121: note = Streptococcus oralis SK1074
MNGLVLGLDIGIASVGVGILEKNSGKIIHANSRLFPAATADNNVERRKNRQARRLNRRKKHRGVRFQDLFEDYGLLTDFSKVSINLNPYRLRVDGLNQQLTNEELFIALKNIVKRRGISYLDDASEDGGAVSSDYGKAVEENRKLLAEQTPGQIQLERFEKYGQVRGDFTVVENGEKCRLINVFSTSAYRKEAEKILRKQQEFNNQITDEFIEDYLKILTGKRKYYHGPGNEKSRTDYGRFRTDGTTLDNIFGVLIGKCTFYPNEYRASKSSYTAQEFNLLNDLNNLTVPTETKKLSEEQKKVIVEYAKEAKTLGASTLLKYIVKMIDASVDQISGYRVDVNNKPEMHTFEVYRKMQSLETISVGELSRNVLDELAHILTLNTEREGIEEAINSKLMGVFSQDQVLELVQFRKNNSSLFSKGWHNFSLKLMMELIPELYETSEEQMTILTRLGKQKSKETSKRTKYIDEKELTEEIYNPVVAKSVRQAIKIINEATKKHGIFDNIVIEMARENNEEDAKKDYIKRQKANQDEKNAAMEKAAFQYNGKKELPGNIFNGHKELATKIRLWHQQGEKCLYTGKTIPISDLIHNQYKYEIDHILPLSLSFDDSLSNKVLVHATANQEKGQRTPFQALDSMDDAWSYREFKSYVKDLKSLSNKKKDYLLTEEDISKIEVKQKFIERNLVDTRYSSRVVLNALQDFYKSHQFDTTISVVRGQFTSQLRRKWGLEKSRETYHHHAVDALIIAASSQLRLWKKQNNPLITYKEGQFVDSQTGEIISLTDDEYKELVFKAPYDHFVDTLHSKTFEDGILFSYQVDSKYNRKISDATIYATRKAKLDKDKSEETYVLGKIKDIYSQAGYDAFIKIYNKDKRKFLMYHKDPQTFEKVIEEILRTYPSKERNDKNKEVPCNPFEKYRQENGPIRKYSKKGNGPEIKCLKYYDNKLGNYIDISPDGSDNQVVLQSLKPWRTDVYFNHQTKEYELMGLKYSDLSFEKGSGKYSISNEKYNSIKRIEGVNEQSEFKFTLYKNDLILIKDSENNEQKLFRFNSRNDTAKHYVELKPYDKARFDGQQELITILGNVAKGGQCLKGLNKSNISIFKVKTDVLGKKHIIKKEGDEPKLKF

SEQ ID NO: 550 - protein, 1373 aa, Streptococcus oralis
  source 1..1373: note = Streptococcus oralis SK304
MENKNYSIGLDIGTNSVGWAVITDDYKVPSKKMKVLGNTDKRFIKKNLIGALLFDEGTTAEARRLKRTARRRYTRRKNRLRYLQEIFAEEMSKVDSSFFHRLDDSFLIPEDKKGSKYPIFATLIEEKEYHKQFPTIYHLRKQLADSKEKTDLRLIYLALAHMIKYRGHFLYEDTFDIKNNDIQKIFNEFISIYNNTFEGNSLSGQNVQVEAIFTDKISKSAKRERVLKLFPDEKSTGLFSEFLKLIVGNQADFKKHFDLEEKAPLQFSRDTYDEDLENLLGQIGDDFADLFVAAKKLYDAILLSGILTVTDPSTKAPLSASMIERYENHQKDLATLKQFIKTNLPEKYDEVFSDQSKDGYAGYIDGKTTQESFYKYIKNLLSKFEGADYFLEKIEREDFLRKQRTFDNGSIPHQIHLQEMNAILRRQGEHYPFLKENKEKIEKILTFRIPYYVGPLARGNRDFAWLTRNSDQAIRPWNFEEIVDKASSAESFINKMTNYDLYLPEEKVLPKHSLLYETFAVYNELTKVKFIAEGLRDYQFLDSRQKKDIFYTLFKAEDKRKVTEKDIIQYLHTVDGYDGIELKGIEKQFNASLSTYHDLLKIIKDKEFMDDPNNEEILENIVHTLTIFEDREMIKQRLAQYDSLFDEKVIKALTRRHYTGWGKLSSKLINGIRDKQTGKTILDYLMDDGYNNRNFMQLINDDELSFKEIIKKAQVVGKTDDVKQVVQELPGSPAIKKGILQSIKLVDELVKVMGHEPESIVIEMARENQTTARGKKNSQQRYKRIEDSLKILASGLNAKILKEHPTDNIQLQNDRLFLYYLQNGRDMYTGKPLDINQLSSYDIDHIVPQAFIKDDSLDNRVLTSLKDNRGKSDNVPSLEVVEKMKTFWQQLLDSKLISYRKFNNLTKAERGGLDERDKVGFIKRQLVETRQITKHVAQILDARYNTEVNEKDKKNRTVKIITLKSNLVSNFRKEFRLYKIREINDYHHAHDAYLNAVVAKAILKKYPKLEPEFVYGDYQKYDLKRYISRSKDPKEIEKATEKYFFYSNLLNFFKEEVHYADGTIVKRENIEYSKDTGEIAWNKEKDFATIKKVLSLPQVNIVKKREVQTGGFSKESILPKGNSDKLIPRKTKDILWDTTKYGGFDSPVIAYSILLIADIEKGKAKRLKTVKTLVGITIMEKATFEKSPIAFLENKGYHNVRKENILCLPKYSLFELKNGRRRMLASAKELQKGNEIVLPVHLTTLLYHAKNIHRLDEPEHLEYIQKHRNEFKGLLNLVSEFSQKYVLADANLEKIKNLYADNEQADIEILANSFINLLTFTALGAPAAFKFFGKDVDRKRYTTVSEILNATLIHQSITGLYETRIDLSKLGED

SEQ ID NO: 551 - protein, 1134 aa, Streptococcus oralis
  source 1..1134: note = Streptococcus oralis SK313
MNGLVLGLDIGIASVGVGILEKNSGKIVHASSRIFPAATADNNVERRKNRQARRLHRRKKHRGARLKDLFEYYGLLTDFSKVSINLNPYRLRVDGLDQQLTNEELFIALKNIVKRRGISYLDDASEDGGTVSSDYGKAVEENRKLLAEQTPGQIQLERFEKYGQLRGDFTVVENSEKCRLINVFSTSAYKKEAERILRKQQEFNNQITDEFIEDYLKILTGKRKYYHGPGNEKSRTDYGRFRTDGATLDNIFGILIGKCTFYPNEYRASKASYTAQEFNLLNDLNNLTVPTETKKLSEEQKKTIIEYAKSAKTLGASTLLKYIAKMIDASVDQIRGYRVDVNNKPEMHTFEVYRKMQSLETISVGELSRNILDELAHILTLNTEREGIEEAINTKLRDSFSQDQVLELVQFRKNNSSLFSKGWHNFSLKLMMELIPELYETSEEQMTILTRLGKQKSKETSKRTKYIDEKEVTEEIYNPVVAKSVRQAIKIINEATKKHGIFDNIVIEMARENNEEDAKKDYIKRQKANQDEKYAAMEKAAFQYNGKKELPDNIFHGHKELATKIRLWHQQGEKCLYTGKSIPISDLIHNQYKYEIDHILPLSLSFDDSLSNKVLVLATANQEKGQRTPFQALDSMDDAWSYREFKSYVKESKLLGNKKKEYLLTEEDISKIEVKQKFIERNLVDTRYSSRVVLNALQDFYKNHNFDTTISVVRGQFTSQLRRKWGLEKSRETYHHHAVDALIIAASSQLRLWKKQNNPLIAYKEGQFVDSQTGEIISLTDDEYKELVFKAPYDHFVDTLSSKTFEDSILFSYQVDSKFNRKISDATIYATRKAKLDKEKKEYTYTLGKIKDIYSLGTKTPSKTGFYKFLDLYNKDKSQFLMFQKDRKTWDEVIEKIMEQYRPFKEYDKAGKLVDFNPFEKYRQENGPIRKYSKKGNGPEIKSLKYYDILLGKHKNITPEGSRNTVALLSLNPWRTDVYYNMETKKYEFLGLKYADLPFEEGGAYGISTETYNELREKEGIGKNSEFKFTLYKNDLILIKDTETNCQQFFRFWSRTGKDNPKSFEKHKIELKPYEKAKFEKGEELEVLGKVPPSSNQFQKNMQIENLSIYKVKTDVLGNKHFIKKEGDKPKLKF

SEQ ID NO: 552 - protein, 1371 aa, Streptococcus oralis
  source 1..1371: note = Streptococcus oralis SK610
MENKNYSIGLDIGTNSVGWSVITDDYKVPSKKMKVLGNTDKRFIKKNLIGALLFDEGTTAEARRLKRTARRRYTRRKNRLRYLQEIFAEEMSKVDSSFFHRLDDSFLIPEDKRGSKYPIFATLAEEKEYHKQFPTIYHLRKQLADSKEKTDLRLIYLALAHMIKYRGHFLYEDTFDIKNNDIQKIFSEFISIYDNTFEGSSLSGQNAQVEAIFTDKISKSAKRERVLKLFPDEKSTGLFSEFLKLIVGNQADFKKHFDLGEKAPLQFSKDTYDEDLENLLGQIGDDFADLFLVAKKLYDAILLSGILTVTDPSTKAPLSASMIERYENHQKDLAVLKQFIKNNLPEKYDEVFSDQSKDGYAGYIDGKTTQEAFYKYIKNLLSKFEGTDYFLEKIEREDFLRKQRTFDNGSIPHQIHLQEMNAILRRQGEHYPFLKDNKEKIEKILTFRIPYYVGPLARGNRDFAWLTRNSDEAIRPWNFEEIVDKASSAEDFINKMTNYDLYLPEEKVLPKHSLLYETFAVYNELTKVKFIAEGLRDYQFLDSGQKKQIVTQLFKEKRKVTEKDIIQFLHNVDGYDGIELKGIEKQFNASLSTYHDLLKIIKDKEFMDDSKNEEILENIVHTLTIFEDREMIKQRLAQYDSLFDEKVIKALIRRHYTGWGKLSAKLIDGICDKQTGNTILDYLIDDGKNNRNFMQLINDDGLSFKEITQKAQVVGKTDDVKQVVQELPGSPAIKKGILQSIKIVDELVKVMGHTPESIVIEMARENQTTARGKKNSQQRYKRIEDALKNLASGLDSNILKEHPTNNIQLQNDRLFLYYLQNGRDMYTGKPLDINQLSSYDIDHIVPQAFIKDDSLDNRVLTSLKDNRGKSDNVPSIEVVQKRKAFWQQLLDSKLISERKFNNLTKAERGGLDERDKVGFIKRQLVETRQITKHVAQILDARFNKEVNEKDKKNRTVKIITLKSNLVSNFRKEFRLYKVREINDYHHAHDAYLNAVVAKAILKKYPKLEPEFVYGDYQKYDLKRYISRSRNPKEVEKATEKYFFYSNLLNFFKEEVHYADGTIVKRENIEYSKDTGEIAWNKEKDFATIKKVLSYPQVNIVKKREVQTGGFSKESILPKGNSDKLIPRKTKDILWETTKYGGFDSPVIAYSILLIADIEKGKAKKLKTVKTLVGITIMEKAAFEENPITFLENKGYHNVRKENILCLPKYSLFELENGRRRLLASAKELQKGNEIVLPVYLTTLLYHSKNVHKLDEPEHLEYIQKHRNEFKDLLNLVSEFSQKYVLADANLEKIQNLYADNEQADIEILANSFINLLTFTALGAPAAFKFFGKDIDRKRYTTVSEILNATLIHQSITGLYETRIDLSKLGED

SEQ ID NO: 553 - protein, 1140 aa, Streptococcus parasanguinis
  source 1..1140: note = Streptococcus parasanguinis F0449
MNGLVLGLDIGIASVGVGILKKDIGEIIHTNSRLFSAATADSNIERRGHRGGKRLTRRKKHRSIRLHDLFEDFGLLTDFSKVSINLNPYQLRVQGLDNQLTNEELFIALKNIVKRRGISYLDDASEDGGTVSSDYGKAVEENRKLLAEQTPGQIQLDRFEKYGQVRGDFNVVENGEKRRLINVFTTSAYSKEAERILRKQQEFNKKITDEFIEDYLTILTGKRKYYHGPGNEKSRTDYGRYTTKKDPEGKYITLDNIFGILIGKCTFYPDEYRASKASYTAQEFNLLNDLNNLTVPTETKKLSEEQKKTIIKYAKTAKTLGASTLLKYIAKLIGASVDQIHGYRIDPNKKPEMHTFETYRKMQSLETISVEELPRKVLDELAHILTLNTEREGIEEAINATLKDTFSQDQVLELVQFRKNNSSLFSKGWHSFSLKLMMELIPELYETSEEQMTILTRLGKQKSKETSKRTKYIDEKELTEEIYNPVVAKSVRQAIKIINEATKKYGIFDNIVIEMARENNEEDAKKEYIKRQKANLDEKNAAMEKAAFQYNGKKELPDNVFHGHKELATKIRLWHQQGEKCLYTGKNIPISDLIQNQYKYEIDHILPLSLSFDDSLSNKVLVLATANQEKGQRTPFQALDSMDDAWSYREFKSYVKDSKLLGNKKKEYLLTEEDISKIEVKQKFIERNLVDTRYSSRVVLNALQDFYKEHQFDTTISVVRGQFTSQLRRKWGLEKSRETYHHHAVDALIIAASSQLRLWKKQNNPLISYTEGQFVDQVTGEIISLSDDEYKELVFKAPYDHFVDTLKSKKFEDSILFSYQVDSKYNRKISDATIYATRKAKLDKENKEYTYTLGKIKDIYALGTKSPSKTGFYKFLDLYNKDKSQFLMFQKDRKTWDEVIEKIIEQYRPFKEYDENGKEVDFNPFEKYRIENGPIRKYSKKGNGPEIKSLKYYDNLLGKFVDITPSESKNPVALLSLNPWRTDVYYNTETSKYEFLGLKYADLCFEKGGAYGISEVKYNKIREKEGIGKESEFKFTLYKNDLILIKDTETNCQQIFRFWSRTGKDNPKSFEKHKIELKPYEKARFEKGEELEVLGKVPPSSNQLQKNMQIENLSIYKVKTDVLGNKHFIKKEGEEPKLKF

SEQ ID NO: 554 - protein, 1130 aa, Streptococcus pasteurianus
MTNGKILGLDIGIASVGVGIIEAKTGKVVHANSRLFSAANAENNAERRGFRGSRRLNRRKKHRVKRVRDLFEKYGIVTDFRNLNLNPYELRVKGLTEQLKNEELFAALRTISKRRGISYLDDAEDDSTGSTDYAKSIDENRRLLKNKTPGQIQLERLEKYGQLRGNFTVYDENGEAHRLINVFSTSDYEKEARKILETQADYNKKITAEFIDDYVEILTQKRKYYHGPGNEKSRTDYGRFRTDGTTLENIFGILIGKCNFYPDEYRASKASYTAQEYNFLNDLNNLKVSTETGKLSTEQKESLVEFAKNTATLGPAKLLKEIAKILDCKVDEIKGYREDDKGKPDLHTFEPYRKLKFNLESINIDDLSREVIDKLADILTLNTEREGIEDAIKRNLPNQFTEEQISEIIKVRKSQSTAFNKGWHSFSAKLMNELIPELYATSDEQMTILTRLEKFKVNKKSSKNTKTIDEKEVTDEIYNPVVAKSVRQTIKIINAAVKKYGDFDKIVIEMPRDKNADDEKKFIDKRNKENKKEKDDALKRAAYLYNSSDKLPDEVFHGNKQLETKIRLWYQQGERCLYSGKPISIQELVHNSNNFEIDHILPLSLSFDDSLANKVLVYAWTNQEKGQKTPYQVIDSMDAAWSFREMKDYVLKQKGLGKKKRDYLLTTENIDKIEVKKKFIERNLVDTRYASRVVLNSLQSALRELGKDTKVSVVRGQFTSQLRRKWKIDKSRETYHHHAVDALIIAASSQLKLWEKQDNPMFVDYGKNQVVDKQTGEILSVSDDEYKELVFQPPYQGFVNTISSKGFEDEILFSYQVDSKYNRKVSDATIYSTRKAKIGKDKKEETYVLGKIKDIYSQNGFDTFIKKYNKDKTQFLMYQKDSLTWENVIEVILRDYPTTKKSEDGKNDVKCNPFEEYRRENGLICKYSKKGKGTPIKSLKYYDKKLGNCIDITPEESRNKVILQSINPWRADVYFNPETLKYELMGLKYSDLSFEKGTGNYHISQEKYDAIKEKEGIGKKSEFKFTLYRNDLILIKDIASGEQEIYRFLSRTMPNVNHYVELKPYDKEKFDNVQELVEALGEADKVGRCIKGLNKPNISIYKVRTDVLGNKYFVKKKGDKPKLDFKNNKK

SEQ ID NO: 555 - protein, 1374 aa, Streptococcus pseudoporcinus
  source 1..1374: note = Streptococcus pseudoporcinus LQ 940-04
MKKRYSYSIGLDIGTNSVGWAVINEDYKVPAKKMTVFGNTDRKTIKKNLLGTVLFDSGETAQARRLKRTNRRRYTRRRYRLCQLQNIFATEMVKVDDTFFQRLSESFFYYQDKAFDKHPIFGNSKEERAYHKTYPTIYHLRKDLADRDQKADLRLIYLALSHIIKFRGHFLIEGKLNSENTDVQKLFIALVTVYNLLFEEEPIAGETCDAKALLTAKTSKSKRLESLISEFPGQKKNGLFGNLLALALGLRPNFKSNFGLSEDAKLQITKDTYEEELDNLLAEIGDHYADLFLAAKNLSDAILLSDILTLSDENTRAPLSASMIKRYEEHQEDLALLKKLVKEQMPEKYWEIFSNAKKNGYAGYIEGKVSQEDFYRYIKPILSRLKGGDEFLAKIDRDDFLRKQRTFDNGSIPHQIHLKELHAILRRQEKYYPFLAEQKEKIEQLLCFRIPYYVGPLAKGGNSSFAWLKRRSDEPITPWNFKDVVDEEASAQAFIEGMTNYDTYLPEEKVLPKHSPLYEMFTVYNELTKVKYIAENMTKPLYLSAEQKEAIIDHLFKQTRKVTVKDLKEKYFSQIEGLENVDVTGVEGAFNASLGTYNDLLKIIKDKAFLDDEANAEILEEIVLILTLFQDEKLIEKRLAKYANLFEKSVLKKLRKRHYRGWGRLSRQLIDGMKDKASGKTILDFLKADDFANRNFIQLINDSSLDFEKLIDDAQKKAIKRESLTEAVANLAGSPAIKKGILQSLKVVDEIVKVMGHNPDNIVIEMSRENQTTAQGLKNARQRLKKIKEVHKKTGSRILEDNSERITNLTLQDNRLYLYLLQDGKDMYTGQDLDINNLSQYDIDHIIPQSFIKDNSIDNLVLTTQKANRGKSDNVPSIEVVRDMKDRVWRRQLANGAISRQKFDHLTKAERGGLADSDKARFLRRQLVETRQITKHVAQLLDSRFNSKSNQNKKLARNVKIITLKSKIVSDFRKDFGLYKLREVNNYHHAHDAYLNAVVGTALLKKYPKLEAEFVYGDYKHFDLVKLISKSDPSLGKATAKVFFYSNIMNFFKEELSLADGTLMKRPVIETNTETGEVVWDKVKDFKTIRKVLSYPQVNIVKKTEIQSGAFSKESVLSKGNSDKLIERKKGWDPKKYGGFDSPNTAYSIFVVAKVAKRKAQKLKTVKEIVGITIMEQAEYEKDNIAFLEKKGYQDIQEKLLIKLPKYSLFELENGRRRLLASANEFQKGNELALSGKYMKFLYLASRYDKLSSKIESEQQKKLFVEQHLHYFDEILDIVVKHATCYIKAENNLKKIISLYKKKEAYSINEQALNMLNLFIFTSLGAPSTFVFFDETIDRKRYTTSSDVLNGILIQQSITGLYETRIDLSRFGGD

SEQ ID NO: 556 - protein, 1368 aa, Streptococcus pyogenes
  source 1..1368: note = Streptococcus pyogenes MGAS10270
MDKKYSIGLDIGTNSVGWAVITDDYKVPSKKFKVLGNTDRHSIKKNLIGALLFDSGETAEATRLKRTARRRYTRRKNRICYLQEIFSNEMAKVDDSFFHRLEESFLVEEDKKHERHPIFGNIVDEVAYHEKYPTIYHLRKKLVDSTDKADLRLIYLALAHMIKFRGHFLIEGDLNPDNSDVDKLFIQLVQTYNQLFEENPINASGVDAKAILSARLSKSRRLENLIAQLPGEKKNGLFGNLIALSLGLTPNFKSNFDLAEDAKLQLSKDTYDDDLDNLLAQIGDQYADLFLAAKNLSDAILLSDILRLNSEITKAPLSASMIKRYDEHHQDLTLLKALVRQQLPEKYKEIFFDQSKNGYAGYIDGGASQEEFYKFIKPILEKMDGTEELLAKLNREDLLRKQRTFDNGSIPHQIHLGELHAILRRQEDFYPFLKDNREKIEKILTFRIPYYVGPLARGNSRFAWMTRKSEETITPWNFEEVVDKGASAQSFIERMTNFDKNLPNEKVLPKHSLLYEYFTVYNELTKVKYVTEGMRKPAFLSGEQKKAIVDLLFKTNRKVTVKQLKEDYFKKIECFDSVEISGVEDRFNASLGTYHDLLKIIKDKDFLDNEENEDILEDIVLTLTLFEDREMIEERLKTYAHLFDDKVMKQLKRRRYTGWGRLSRKLINGIRDKQSGKTILDFLKSDGFANRNFMQLIHDDSLTFKEDIQKAQVSGQGDSLHEHIANLAGSPAIKKGILQTVKVVDELVKVMGRHKPENIVIEMARENQTTQKGQKNSRERMKRIEEGIKELGSQILKEHPVENTQLQNEKLYLYYLQNGRDMYVDQELDINRLSDYDVDHIVPQSFIKDDSIDNKVLTRSDKNRGKSDNVPSEEVVKKMKNYWRQLLNAKLITQRKFDNLTKAERGGLSELDKAGFIKRQLVETRQITKHVAQILDSRMNTKYDENDKLIREVKVITLKSKLVSDFRKDFQFYKVREINNYHHAHDAYLNAVVGTALIKKYPKLESEFVYGDYKVYDVRKMIAKSEQEIGKATAKYFFYSNIMNFFKTEITLANGEIRKRPLIETNGETGEIVWDKGRDFATVRKVLSMPQVNIVKKTEVQTGGFSKESILPKRNSDKLIARKKDWDPKKYGGFDSPTVAYSVLVVAKVEKGKSKKLKSVKELLGLTIMERSSFEKNPIDFLEAKGYKEVKKDLIIKLPKYSLFELENGRKRMLASAGELQKGNELALPSKYVNFLYLASHYEKLKGSPEDNEQKQLFVEQHKHYLDEIIEQISEFSKRVILADANLDKVLSAYNKHRDKPIREQAENIIHLFTLTNLGAPAAFKYFDTTIDRKRYTSTKEVLDATLIHQSITGLYETRIDLSQLGGD

SEQ ID NO: 557 - protein, 1371 aa, Streptococcus pyogenes
MDKKYSIGLDIGTNSVGWAVITDDYKVPSKKFKVLGNTDRHSIKKNLIGALLFDSGETAEATRLKRTARRRYTRRKNRICYLQEIFSNEMAKVDDSFFHRLEESFLVEEDKKHERHPIFGNIVDEVAYHEKYPTIYHLRKKLADSTDKADLRLIYLALAHMIKFRGHFLIEGDLNPDNSDVDKLFIQLVQTYNQLFEENPINASRVDAKAILSARLSKSRRLENLIAQLPGEKKNGLFGNLIALSLGLTPNFKSNFDLAEDAKLQLSKDTYDDDLDNLLAQIGDQYADLFLAAKNLSDATLLSDILRVNSEITKAPLSASMIKRYDEHHQDLTLLKALVRQQLPEKYKEIFFDQSKNGYAGYIDGGASQEEFYKFIKPILEKMDGTEELLAKLNREDLLRKQRTFDNGSIPHQIHLGELHAILRRQEDFYPFLKDNREKIEKILTFRIPYYVGPLARGNSRFAWMTRKSEETITPWNFEEVVDKGASAQSFIERMTNFDKNLPNEKVLPKHSLLYEYFTVYNELTKVKYVTEGMRKPAFLSGEQKKAIVDLLFKTNRKVTVKQLKEDYFKKIECFDSVEISGVEDRFNASLGTYHDLLKIIKDKDFLDNEENEDILEDIVLTLTLFEDKEMIEERLKTYAHLFDDKVMKQLKRRHYTGWGRLSRKLINGIRDKQSGKTILDFLKSDGFANRNFIQLIHDDSLTFKEAIQKAQVSGQGHSLHEQIANLAGSPAIKKGILQSVKVVDELVKVMGHKPENIVIEMARENQTTQKGQKNSRERMKRIEEGIKELGSQILKEHPVENTQLQNEKLYLYYLQNGRDMYVDQELDINRLSDYDVDHIVPQSFIKDDSIDNKVLTRSDKNRGKSDDVPSEEVVKKMKNYWRQLLNAKLITQRKFDNLTKAERGGLSELDKAGFIKRQLVETRQITKHVAQILDSRMNTKYDENDKLIREVKVITLKSKLVSDFRKDFQFYKVREINNYHHAHDAYLNAVVGTALIKKYPKLESEFVYGDYKVYDVRKMIAKSEQEIGKATAKRFFYSNIMNFFKTEITLANGEIRKRPLIETNEETGEIVWDKGRDFATVRKVLSMPQVNIVKKTEVQTGALTNESIYARGSFDKLISRKHRFESSKYGGFGSPTVTYSVLVVAKSKVQDGKVKKIKTGKELIGITLLDKLVFEKNPLKFIEDKGYGNVQIDKCIKLPKYSLFEFENGTRRMLASVMANNNSRGDLQKANEMFLPAKLVTLLYHAHKIESSKELEHEAYILDHYNDLYQLLSYIERFASLYVDVEKNISKVKELFSNIESYSISEICSSVINLLTLTASGAPADFKFLGTTIPRKRYGSPQSILSSTLIHQSITGLYETRIDLSQLGSD

SEQ ID NO: 558 - protein, 1367 aa, Streptococcus pyogenes
MDKKYSIGLDIGTNSVGWAVITDDYKVPSKKFKVLGNTDRHSIKKNLIGALLFGSGETAEATRLKRTARRRYTRRKNRICYLQEIFSNEMAKVDDSFFHRLEESFLVEEDKKHERHPIFGNIVDEVAYHEKYPTIYHLRKKLADSTDKADLRLIYLALAHMIKFRGHFLIEGDLNPDNSDVDKLFIQLVQIYNQLFEENPINASRVDAKAILSARLSKSRRLENLIAQLPGEKRNGLFGNLIALSLGLTPNFKSNFDLAEDAKLQLSKDTYDDDLDNLLAQIGDQYADLFLAAKNLSDAILLSDILRVNSEITKAPLSASMIKRYDEHHQDLTLLKALVRQQLPEKYKEIFFDQSKNGYAGYIDGGASQEEFYKFIKPILEKMDGTEELLVKLNREDLLRKQRTFDNGSIPHQIHLGELHAILRRQEDFYPFLKDNREKIEKILTFRIPYYVGPLARGNSRFAWMTRKSEETITPWNFEEVVDKGASAQSFIERMTNFDKNLPNEKVLPKHSLLYEYFTVYNELTKVKYVTEGMRKPAFLSGEQKKAIVDLLFKTNRKVTVKQLKEDYFKKIECFDSVEISGVEDRFNASLGAYHDLLKIIKDKDFLDNEENEDILEDIVLTLTLFEDRGMIEERLKTYAHLFDDKVMKQLKRRRYTGWGRLSRKLINGIRDKQSGKTILDFLKSDGFANRNFMQLIHDDSLTFKEDIQKAQVSGQGHSLHEQIANLAGSPAIKKGILQTVKIVDELVKVMGHKPENIVIEMARENQTTQKGQKNSRERMKRIEEGIKELGSQILKEHPVENTQLQNEKLYLYYLQNGRDMYVDQELDINRLSDYDVDHIVPQSFIKDDSIDNKVLTRSDKNRGKSDNVPSEEVVKKMKNYWRQLLNAKLITQRKFDNLTKAERGGLSELDKAGFIKRQLVETRQITKHVAQILDSRMNTKYDENDKLIREVKVITLKSKLVSDFRKDFQFYKVREINNYHHAHDAYLNAVVGTALIKKYPKLESEFVYGDYKVYDVRKMIAKSEQEIGKATAKYFFYSNIMNFFKTEITLANGEIRKRPLIETNGETGEIVWDKGRDFATVRKVLSMPQVNIVKKTEVQTGGFSKESILPKRNSDKLIARKKDWDPKKYGGFDSPTVAYSVLVVAKVEKGKSKKLKSVKELLGITIMERSSFEKNPIDFLEAKGYKEVKKDLIIKLPKYSLFELENGRKRMLASAGELQKGNELALPSKYVNFLYLASHYEKLKGSPEDNEQKQLFVEQHKHYLDEIIEQISEFSKRVILADANLDKVLSAYNKHRDKPIREQAENIIHLFTLTNLGAPAAFKYFDTTIDRKRYTSTKEVLDATLIHQSITGLYETRIDLSQLGGD

SEQ ID NO: 559 - protein, 1368 aa, Streptococcus sp.
MDKKYSIGLDIGTNSVGWAVITDDYKVPSKKFKVLGNTDRHSIKKNLIGALLFDSGEIAEATRLKRTARRRYTRRKNRICYLQEIFSNEMAKVDDSFFHRLEESFLVEEDKKHERHPIFGNIVDEVAYHEKYPTIYHLRKKLVDSTDKADLRLIYLALAHMIKFRGHFLIEGDLNPDNSDVDKLFIQLVQTYNQLFEENPINASGVDAKAILSARLSKSRRLENLIAQLPGEKKNGLFGNLIALSLGLTPNFKSNFDLAEDAKLQLSKDTYDDDLDNLLAQIGDQYADLFLAAKNLSDAILLSDILRLNSEITKAPLSASMIKRYDEHHQDLTLLKALVRQQLPEKYKEIFFDQSKNGYAGYIDGGASQEEFYKFIKPILEKMDGTEELLAKLNREDLLRKQRTFDNGSIPHQIHLGELHAILRRQEDFYPFLKDNREKIEKILTFRIPYYVGPLARGNSRFAWMTRKSEETITPWNFEEVVDKGASAQSFIERMTNFDKNLPNEKVLPKHSLLYEYFTVYNELTKVKYVTEGMRKPAFLSGEQKKAIVDLLFKTNRKVTVKQLKEDYFKKIECFDSVEISGVEDRFNASLGTYHDLLKIIKDKDFLDNEENEDILEDIVLTLTLFEDREMIEERLKTYAHLFDDKVMKQLKRRRYTGWGRLSRKLINGIRDKQSGKTILDFLKSDGFANRNFMQLIHDDSLTFKEDIQKAQVSGQGDSLHEHIANLAGSPAIKKGILQTVKVVDELVKVMGRHKPENIVIEMARENQTTQKGQKNSRERMKRIEEGIKELGSQILKEHPVENTQLQNEKLYLYYLQNGRDMYVDQELDINRLSDYDVDHIVPQSFIKDDSIDNKVLTRSDKNRGKSDNVPSEEVVKKMKNYWRQLLNAKLITQRKFDNLTKAERGGLSELDKAGFIKRQLVETRQITKHVAQILDSRMNTKYDENDKLIREVKVITLKSKLVSDFRKDFQFYKVREINNYHHAHDAYLNAVVGTALIKKYPKLESEFVYGDYKVYDVRKMLAKSEQEIGKATAKYFFYSNIMNFFKTEITLANGEIRKRPLIETNGETGEIVWDKGRDFATVRKVLSMPQVNIVKKTEVQTGGFSKESILPKRNSDKLIARKKDWDPKKYGGFDSPTVAYSVLVVAKVEKGKSKKLKSVKELLGITIMERSSFEKNPIDFLEAKGYKEVRKDLIIKLPKYSLFELENGRKRMLASAGELQKGNELALPSKYVNFLYLASHYEKLKGSPEDNEQKQLFVEQHKHYLDEIIEQISEFSKRVILADANLDKVLSAYNKHRDKPIREQAENIIHLFTLTNLGAPTAFKYFDTTIDRKRYTSTKEVLDATFIHQSITGLYETRIDLSQLGGD

SEQ ID NO: 560 - protein, 1368 aa, Streptococcus pyogenes
MDKKYSIGLDIGTNSVGWAVITDDYKVPSKKLKGLGNTDRHGIKKNLIGALLFDSGETAEATRLKRTARRRYTRRKNRICYLQEIFSNEMAKVDDSFFHRLEESFLVEEDKKHERHPIFGNIVDEVAYHEKYPTIYHLRKKLADSTDKVDLRLIYLALAHMIKFRGHFLIEGDLNPDNSDVDKLFIQLVQTYNQLFEENPINASRVDAKAILSARLSKSRRLENLIAQLPGEKKNGLFGNLIALSLGLTPNFKSNFDLAEDAKLQLSKDTYDDDLDNLLAQIGDQYADLFLAAKNLSDATLLSDILRVNSEITKAPLSASMIKRYDEHHQDLTLLKALVRQQLPEKYKEIFFDQSKNGYAGYIDGGASQEEFYKFIKPILEKMDGTEELLAKLNREDLLRKQRTFDNGSIPYQIHLGELHAILRRQEDFYPFLKDNREKIEKILTFRIPYYVGPLARGNSRFAWMTRKSEETITPWNFEEVVDKGASAQSFIERMTNFDKNLPNEKVLPKHSLLYEYFTVYNELTKVKYVTEGMRKPAFLSGEQKKAIVDLLFKTNRKVTVKQLKEDYFKKIECFDSVEISGVEDRFNASLGTYHDLLKIIKDKDFLDNEENEDILEDIVLTLTLFEDREMIEERLKTYAHLFDDKVMKQLKRRRYTGWGRLSRKLINGIRDKQSGKTILDFLKSDGFANRNFMQLIHDDSLTFKEDIQKAQVSGQGDSLHEHIANLAGSPAIKKGILQTVKVVDELVKVMGRHKPENIVIEMARENQTTQKGQKNSRERMKRIEEGIKELGSDILKEYPVENTQLQNEKLYLYYLQNGRDMYVDQELDINRLSDYDVDHIVPQSFLKDDSIDNKVLTRSDKNRGKSDNVPSEEVVKKMKNYWRQLLNAKLITQRKFDNLTKAERGGLSELDKVGFIKRQLVETRQITKHVAQILDSRMNTKYDENDKLIREVRVITLKSKLVSDFRKDFQFYKVREINNYHHAHDAYLNAVVGTALIKKYPKLESEFVYGDYKVYDVRKMIAKSEQEIGKATAKYFFYSNIMNFFKTEITLANGEIRKRPLIETNGETGEIVWDKGRDFATVRKVLSMPQVNIVKKTEVQTGGFSKESILPKRNSDKLIARKKDWDPKKYGGFDSPTVAYSVLVVAKVEKGKSKKLKSVKELLGITIMERSSFEKDPIDFLEAKGYKEVRKDLIIKLPKYSLFELENGRKRMLASAGELQKGNELALPSKYVNFLYLASHYEKLKGSPEDNEQKQLFVEQHKHYLDEIIEQISEFSKRVILADANLDKVLSAYNKHRDKPIREQAENIIHLFTLTNLGAPAAFKYFDTTIDRKRYTSTKEVLDATLIHQSITGLYETRIDLSQLGGD

SEQ ID NO: 561 - protein, 1368 aa, Streptococcus pyogenes
MDKKYSIGLDIGTNSVGWAVITDDYKVPSKKFKVLGNTDRHSIKKNLIGALLFDSGETAEATRLKRTARRRYTRRKNRICYLQEIFSNEMAKVDDSFFHRLEESFLVEEDKKHERHPIFGNIVDEVAYHEKYPTIYHLRKKLVDSTDKADLRLIYLALAHMIKFRGHFLIEGDLNPDNSDVDKLFIQLVQTYNQLFEENPINASGVDAKAILSARLSKSRRLENLIAQLPGEKKNGLFGNLIALSLGLTPNFKSNFDLAEDAKLQLSKDTYDDDLDNLLAQIGDQYADLFLAAKNLSDAILLSDILRVNTEITKAPLSASMIKRYDEHHQDLTLLKALVRQQLPEKYKEIFFDQSKNGYAGYIDGGASQEEFYKFIKPILEKMDGTEELLVKLNREDLLRKQRTFDNGSIPHQIHLGELHAILRRQEDFYPFLKDNREKIEKILTFRIPYYVGPLARGNSRFAWMTRKSEETITPWNFEEVVDKGASAQSFIERMTNFDKNLPNEKVLPKHSLLYEYFTVYNELTKVKYVTEGMRKPAFLSGEQKKAIVDLLFKTNRKVTVKQLKEDYFKKIECFDSVEISGVEDRFNASLGTYHDLLKIIKDKDFLDNEENEDILEDIVLTLTLFEDREMIEERLKTYAHLFDDKVMKQLKRRRYTGWGRLSRKLINGIRDKQSGKTILDFLKSDGFANRNFMQLIHDDSLTFKEDIQKAQVSGQGDSLHEHIANLAGSPAIKKGILQTVKVVDELVKVMGRHKPENIVIEMARENQTTQKGQKNSRERMKRIEEGIKELGSQILKEHPVENTQLQNEKLYLYYLQNGRDMYVDQELDINRLSDYDVDHIVPQSFLKDDSIDNKVLTRSDKNRGKSDNVPSEEVVKKMKNYWRQLLNAKLITQRKFDNLTKAERGGLSELDKAGFIKRQLVETRQITKHVAQILDSRMNTKYDENDKLIREVKVITLKSKLVSDFRKDFQFYKVREINNYHHAHDAYLNAVVGTALIKKYPKLESEFVYGDYKVYDVRKMIAKSEQEIGKATAKYFFYSNIMNFFKTEITLANGEIRKRPLIETNGETGEIVWDKGRDFATVRKVLSMPQVNIVKKTEVQTGGFSKESILPKRNSDKLIARKKDWDPKKYGGFDSPTVAYSVLVVAKVEKGKSKKLKSVKELLGITIMERSSFEKNPIDFLEAKGYKEVKKDLIIKLPKYSLFELENGRKRMLASAGELQKGNELALPSKYVNFLYLASHYEKLKGSPEDNEQKQLFVEQHKHYLDEIIEQISEFSKRVILADANLDKVLSAYNKHRDKPIREQAENIIHLFTLTNLGAPAAFKYFDTTIDRKRYTSTKEVLDATLIHQSITGLYETRIDLSQLGGD

SEQ ID NO: 562 - protein, 1368 aa, Streptococcus pyogenes
MDKKYSIGLDIGTNSVGWAVITDDYKVPSKKFKVLGNTDRHSIKKNLIGALLFDSGETAEATRLKRTARRRYTRRKNRICYLQEIFSNEMAKVDDSFFHRLEESFLVEEDKKHERHPIFGNIVDEVAYHEKYPTIYHLRKKLVDSTDKADLRLIYLALAHMIKFRGHFLIEGDLNPDNSDVDKLFIQLVQTYNQLFEENPINASGVDAKAILSARLSKSRRLENLIAQLPGEKKNGLFGNLIALSLGLTPNFKSNFDLAEDAKLQLSKDTYDDDLDNLLAQIGDQYADLFLAAKNLSDAILLSDILRLNSEITKAPLSASMIKRYDEHHQDLTLLKALVRQQLPEKYKEIFFDQSKNGYAGYIDGGASQEEFYKFIKPILEKMDGTEELLAKLNREDLLRKQRTFDNGSIPHQIHLGELHAILRRQEDFYPFLKDNREKIEKILTFRIPYYVGPLARGNSRFAWMTRKSEETITPWNFEEVVDKGASAQSFIERMTNFDKNLPNEKVLPKHSLLYEYFTVYNELTKVKYVTEGMRKPAFLSGEQKKAIVDLLFKTNRKVTVKQLKEDYFKKIECFDSVEISGVEDRFNASLGTYHDLLKIIKDKDFLDNEENEDILEDIVLTLTLFEDREMIEERLKTYAHLFDDKVMKQLKRRRYTGWGRLSRKLINGIRDKQSGKTILDFLKSDGFANRNFMQLIHDDSLTFKEDIQKAQVSGQGDSLHEHIANLAGSPAIKKGILQTVKVVDELVKVMGRHKPENIVIEMARENQTTQKGQKNSRERMKRIEEGIKELGSQILKEHPVENTQLQNEKLYLYYLQNGRDMYVDQELDINRLSDYDVDHIVPQSFIKDDSIDNKVLTRSDKNRGKSNNVPSEEVVKKMKNYWRQLLNAKLITQRKFDNLTKAERGGLSELDKAGFIKRQLVETRQITKHVAQILDSRMNTKYDENDKLIREVKVITLKSKLVSDFRKDFQFYKVREINNYHHAHDAYLNAVVGTALIKKYPKLESEFVYGDYKVYDVRKMIAKSEQEIGKATAKYFFYSNIMNFFKTEITLANGEIRKRPLIETNGETGEIVWDKGRDFATVRKVLSMPQVNIVKKTEVQTGGFSKESILPKRNSDKLIARKKDWDPKKYGGFDSPTVAYSVLVVAKVEKGKSKKLKSVKELLGITIMERSSFEKNPIDFLEAKGYKEVRKDLIVKLPKYSLFELENGRKRMLASAGELQKGNELALPSKYVNFLYLASHYEKLKGSPEDNEQKQLFVEQHKHYLDEIIEQISEFSKRVILADANLDKVLSAYNKHRDKPIREQAENIIHLFTLTNLGAPAAFKYFDTTIDRKRYTSTKEVLDATFIHQSITGLYETRIDLSQLGGD

SEQ ID NO: 563 - protein, 1368 aa, Streptococcus pyogenes
MDKKYSIGLDIGTNSVGWAVITDDYKVPSKKFKVLGNTDRHSIKKNLIGALLFDSGEIAEATRLKRTARRRYTRRKNRICYLQEIFSNEMAKVDDSFFHRLEESFLVEEDKKHERHPIFGNIVDEVAYHEKYPTIYHLRKKLVDSTDKADLRLIYLALAHMIKFRGHFLIEGDLNPDNSDVDKLFIQLVQTYNQLFEENPINASGVDAKAILSARLSKSRRLENLIAQLPGEKKNGLFGNLIALSLGLTPNFKSNFDLAEDAKLQLSKDTYDDDLDNLLAQIGDQYADLFLAAKNLSDAILLSDILRLNSEITKAPLSASMIKRYDEHHQDLTLLKALVRQQLPEKYKEIFFDQSKNGYAGYIDGGASQEEFYKFIKPILEKMDGTEELLAKLNREDLLRKQRTFDNGSIPHQIHLGELHAILRRQEDFYPFLKDNREKIEKILTFRIPYYVGPLARGNSRFAWMTRKSEETITPWNFEEVVDKGASAQSFIERMTNFDKNLPNEKVLPKHSLLYEYFTVYNELTKVKYVTEGMRKPAFLSGEQKKAIVDLLFKTNRKVTVKQLKEDYFKKIECFDSVEISGVEDRFNASLGTYHDLLKIIKDKDFLDNEENEDILEDIVLTLTLFEDREMIEERLKTYAHLFDDKVMKQLKRRRYTVWGRLSRKLINGIRDKQSGKTILDFLKSDGFANRNFMQLIHDDSLTFKEDIQKAQVSGQGDSLHEHIANLAGSPAIKKGILQTVKVVDELVKVMGRHKPENIVIEMARENQTTQKGQKNSRERMKRIEEGIKELGSQILKEHPVENTQLQNEKLYLYYLQNGRDMYVDQELDINRLSDYDVDHIVPQSFIKDDSIDNKVLTRSDKNRGKSDNVPSEEVVKKMKNYWRQLLNAKLITQRKFDNLTKAERGGLSELDKAGFIKRQLVETRQITKHVAQILDSRMNTKYDENDKLIREVKVITLKSKLVSDFRKDFQFYKVREINNYHHAHDAYLNAVVGTALIKKYPKLESEFVYGDYKVYDVRKMLAKSEQEIGKATAKYFFYSNIMNFFKTEITLANGEIRKRPLIETNGETGEIVWDKGRDFATVRKVLSMPQVNIVKKTEVQTGGFSKESILPKRNSDKLIARKKDWDPKKYGGFDSPTVAYSVLVVAKVEKGKSKKLKSVKELLGITIMERSSFEKNPIDFLEAKGYKEVRKDLIIKLPKYSLFELENGRKRMLASAGELQKGNELALPSKYVNFLYLASHYEKLKGSPEDNEQKQLFVEQHKHYLDEIIEQISEFSKRVILADANLDKVLSAYNKHRDKPIREQAENIIHLFTLTNLGAPTAFKYFDTTIDRKRYTSTKEVLDATFIHQSITGLYETRIDLSQLGGD

SEQ ID NO: 564 - protein, 1368 aa, Streptococcus pyogenes
MDKKYSIGLDIGTNSVGWAVITDDYKVPSKKFKVLGNTDRHSIKKNLIGALLFDSGETAEATRLKRTARRRYTRRKNRICYLQEIFSNEIAKVDDSFFHRLEESFLVEEDKKHERHPIFGNIVDEVAYHEKYPTIYHLRKKLADSTDKADLRLIYLALAHMIKFRGHFLIEGDLNPDNSDVDKLFIQLVQTYNQLFEENPINASRVDAKAILSARLSKSRRLENLIAQLPGEKRNGLFGNLIALSLGLTPNFKSNFDLAEDAKLQLSKDTYDDDLDNLLAQIGDQYADLFLAAKNLSDAILLSDILRVNTEITKAPLSASMIKRYDEHHQDLTLLKALVRQQLPEKYKEIFFDQSKNGYAGYIDGGASQEEFYKFIKPILEKMDGTEELLAKLNREDLLRKQRTFDNGSIPHQIHLGELHAILRRQEDFYPFLKDNREKIEKILTFRIPYYVGPLARGNSRFAWMTRKSEETITPWNFEEVVDKGASAQSFIERMTNFDKNLPNEKVLPKHSLLYEYFTVYNELTKVKYVTEGMRKPAFLSGEQKKAIVDLLFKTNRKVTVKQLKEDYFKKIECFDSVEISGVEDRFNASLGTYHDLLKIIKDKDFLDNEENEDILEDIVLTLTLFEDREMIEERLKTYAHLFDDKVMKQLKRRRYTGWGRLSRKLINGIRDKQSGKTILDFLKSDGFANRNFMQLIHDDSLTFKEDLQKAQVSGQGDSLHEHIANLAGSPAIKKGILQTVKVVDELVKVMGRHKPENIVIEMARENQTTQKGQKNSRERMKRIEEGIKELGSDILKEYPVETTQLQNEKLYLYYLQNGRDMYVDQELDINRLSDYDVDHIVPQSFLKDDSIDNKVLTRSDKNRGKSDNVPSEEVVKKMKNYWKQLLNAKLITQRKFDNLTKAERGGLSELDKAGFIKRQLVETRQITKHVAQILDSRMNTKYDENDKLIREVRVITLKSKLVSDFRKDFQFYKVREINNYHHAHDAYLNAVVGTALIKKYPKLESEFVYGDYKVYDIRKMIAKSEQEIGKATAKYFFYSNIMNFFKTEITLANGEIRKRPLIETNGETGEIVWDKGRDFATVRKVLSMPQVNIVKKTEVQTGGFSKESILPKRNSDKLIARKKDWDPKKYGGFDSPTVAYSVLVVAKVEKGKSKKLKSVKELVGITIMERSSFEKDPVDFLEAKGYKEVRKDLIIKLPKYSLFELENGRKRMLASAGELQKGNELALPSKYVNFLYLASHYEKLKGSPEDNEQKQLFVEQHKHYLDEIIEQISEFSKRVILADANLDKVLSAYNKHRDKPIREQAENIIHLFTLTNLGAPAAFKCFDTTIGRNRYKSIKEVLDATLIHQSITGLYETRIDLSQLGGD

SEQ ID NO: 565 - protein, 1368 aa, Streptococcus pyogenes [sequence omitted]

SEQ ID NO: 566 - protein, 1368 aa, Streptococcus pyogenes; identical to SEQ ID NO: 560

SEQ ID NO: 567 - protein, 1370 aa, Streptococcus ratti
  source 1..1370: note = Streptococcus ratti FA-1 = DSM 20564
MKKPYSIGLDIGTNSVGWAVITDDYKVPAKKMKVLGNTDKNYIKKNLLGALLFDSGNTAEDRRLKRTARRRYTRRRNRLLYLQDIFSDEMNKVDESFFHRLEDSFLVSEDKRGDHHPIFGNVVDEVKYHEQFPTIYHLRKYLADTPEKADLRLVYLALAHMIKFRGHFLIDDPKLDVKNTDSQELFSQFLTAYDVTQEDSHLADVKINISDIITEKMNKSRKVEALLFHFPSQKKNSFFGNLVSLVFGLLPNFKTNFNLAEDAKLQLSKDSYDEDLENLLGQIGDEYTDVFVAARKLYDSILLSGILTVNDLSTKAILSASMVRRYEEHNKDLAKLKAFVKANFTHDVFKEVFSDASKNGYAGYIEGKTSQEDFYKYVKNLIGKVDGSADFIEKIDREDFLRKQRTFDNGSIPHQVHLAEMKAILRRQGEYYPFLKEHAEKIQQILTFRIPYYVGPLDRHGHSDFAWASFNSEEKVTPWNFEEIIDKNKSAQAFIERMTNQDLYLPNEKVLPKHSPLYEKYTVYNELTKIKYVTETGTAKFFDANLKQEIFDGLFKKERKVTKRKLLTFLEKNFDEFRIVDIQGLDKETETFNASYGIYQDLLKIIKDKAFMDDSENADILEDIVLTLTLFEDREMIKQRLAKYADLFDKKVIDNLARRRYTGWGRLSAKLLNGIRDKRSRKTIMDYLVDDGRSNRNLMQLITDDNLTFKDEIAKAQYSDNSDDLHQVVQDLAGSPAIKKGILQSVKIVDELVKVMGYEPEQIVVEMARENQTTAKGRRNSQQRYKRLEEAIKNLDRDLNYKILKEHPTDNQALQNDRLFLYYLQNGRDMYTGESLDINRLSDYDIDHIIPQAFIKDNSIDNRVLVSSAKNRGKSDDVPSEDVVNRMRPFWNKLLNCGLISQRKYSNLTKKELTPNDKAGFIKRQLVETRQITKHVARILDEHFNKEFDEDKKRIRKVKVVTLKSNLVSNFRKEFELYKVREINDYHHAHDAYLNAVVAKALLMKYPKLEPEFVYGEYPKYNSYRERKTATQRMFFYSNIMNMFKSKVKLADERIIERPMIEVNDETGEIAWDKTKHIATVKKVLSYPQINIVKKVEEQTGGLTNETIYPRGSFDKLLNRKNTLEASKYGGFGSPTVAYCVLVVADSKNENGKVKKLKLGSELLGITILEKNDFENNSLDFLSRKGYQGVQEKKIIKLPKYSLFEFQDGSRRMLSSVMANDNKRGDLQKANEMILPAYLVKLLYHAKHINSVGEPAHKNYINEHCSEFQDLLNYIRQFADKFVDVDKNLSKIRSLSKSMAEYSVSEICSSFVNLLTLTALGAPADFKFFGTTIPRKRYGSPQSILSATLIHQSITGLYETRIDLSKLGED

SEQ ID NO: 568 - protein, 1127 aa, Streptococcus salivarius
MSDLVLGLDIGIGSVGVGILNKVTGEIIHKNSRIFPAAQAENNVERRINRQGRRLTRRKKHRRVRLNHLFEESGLITDFTNVSINLNPYQLRVKGLTDELSNEELFIALKNMVKHRGISYLDDASDDGNSSVGDYAQIVKENSKQLETKTPGQIQLERYQKYGQLRGDFTVEEDGKKHRLINVFPTSAYRAEALRILQTQQEFNPQITDEFINSYLQILTGKRKYYHGPGNEKSRTDYGRYTTKKDSEDEYITLDNIFGILIGKCTFYPEEYRAAKASYTAQEFNLLNDLNNLTVPTETKKLSEEQKNQIITNVKNEKAMGPAKLFKYIAKLLSCDVADIKGYRIDKSDKAEIHTFEAYRKMKTLATIDIEQMERENLDKLAYVLTLNTEKEGIQEALEHEFADGTFSQEQIDELVQFRKANSSIFGKGWHSFSVKLMMELIPELYATSEEQMTILTRLGKQKTTSSSNKTKYIDEKQLTEEIYNPVAAKSVRQAIKIVNAAIKEYGDFDNIVIEMARETNEDDEKKAIQKIQKANKDEKDAAMLKAANQYNGKAELPHSVFHGHKQLATKIRLWHQQGERCLYTGKTISIHDLINNSNQFEIDHILPLSITFDDSLANKVLVYATANQEKGQRTPYQALDSMDDAWSFRELKAFVRDSKALSNKKKEYLLTEEDISKFDVRKKFIERNLVDTRYASRVVLNALQEHFRVHKTDTKVSVVRGQFTSQLRRHWGIEKTRDTYHHHAVDALIIAASSQLNLWKKQKNTLVSYSEDQLLDIETGELISDDEYKESVFKAPYQHFVDTLKSKEFEDSILFSYQVDSKFNRKISDATIYATRQAKVGKDKKDETYVLGKIKDIYSQTGYDAFIKIYKKDKSKFLMYRHDPQTFEKVIEPILENYPNKELNEKGKEVPCNPFLKYKEDHGYIRKYSKKGNGPEIKSLKYYDSKLGNHIDITPKNSNNKVVLQSVSPWRADVYFNKTTGKYEILGLKYADLKFEKGTGTYKISEEKYNDIKIKEGVDSDSEFKFTLYKNDLLLIKDTETKEQQLFRFLSRTMPNVKHYVELKPYDKQKFDDNEELIKILGIVAKGGQCKKGVSKPNISIYKIRTDVLGNQHIIKNEGDKPKLDF

SEQ ID NO: 569 - protein, 1385 aa, Streptococcus salivarius
  source 1..1385: note = Streptococcus salivarius K12
MTKPYSIGLDIGTNSVGWAVITDDYKVPSKKMKVLGNTSKKYIKKNLLGALLFDSGITAEGRRLKRTARRRYTRRRNRILYLQEIFSTEMATLDDAFFQRLDDSFLVPDDKRDSKYPIFGNLVEEKVYHDEFPTIYHLRKHLADSSKKADLRLVYLALAHMIKYRGHFLIEGDFNSKNNDLQKNFQDFLDTYNAIFESDLSLENSKQLEEIVKDKISKSAKKDRILKLFPGEKNSGIFSEFLKLIVGNQADFRKYFNLDEKTSLQFSKESYDEDLETLLGHIGDDYSDVFLKAKKLYDAILLSGILTVTDNGTEAPLSSAMIMRYKEHEEDLALLKAYIRNISLETYNEVFKDNTKNGYAGYIDGKTSQEDFYVYLKRLLAGLEGADYFLEKIDREDFLRKQRTFDNGSIPYQIYLQEMRAILDKQAKFYPFLAKNKERIEKILTFRIPYYVGPLARGNSDFAWSIRKRNEKITPWNFEDVIDKESSAEAFINRMTSFDLYLPEEKVLPKHSLLYENFTVYNELTKVRFIAEGMRDYQFLDSKQKKDIVRLYFKGKRKVTDKDIIEYLHAIDGYDGIELKGIEKQFNSSLSTYHDLLNIINDKEFLDDSSNETIIEEIIHTLTMFEDREMIKQRLSKFDNIFDKSVLKKLSRRHYTGWGKLSAKLINGIRDEKSGNTILDYLIDDGVSNRNFMQLIHDDALSFKKKIKKAQIIGDKDNIKQVVKSLPGSPAIKKGILQSIKIVDELVKVMGREPESIVVEMARENQYTNQGKSNSQQRLKRLEESLKGLGSKILKENVPTRLSKIDNNALQNDRLYLYYLQNGKDMYTGEELDIDRLSNYDIDHIIPQAFLKDDSIDNKVLVSSASNRGKSDDVPSLEVVKKRKTLWYQLLKSKLISQRKFDNLTKAERGGLSQEEKAGFIQRQLVETRQITKHVARLLDERFNNKKDENNRTLRTVKIITLKSSLVSQFRKDFELYKVREINDFHHAHDAYLNAVVASALLKKYPKLEPEFVYGDYPKYNSFRERKSATEKVYFYSNIMNIFKKSIPLADGTVIDRPLIEVNEETGESVWNKVADLNTVRKVLSYSQVNIVKKVEEQNHGLDRGKPKGLFNANLSSKPKPNSKENLVGAKEYLDPKKYGGYAGISNSFAILVKGTIEKGAKKKITNVLEFQGISILDRIYYRKDKLNFLLEKGYKDIELIIELPKYSLFELSDGSRRMLASILSTNNKRGEIHKGNQIFISQKFVKLLYHAKRISSTFNENHRKYVENHKKEFEELFYYILEFNENYVGAKKNGELLKSAFQSWQNHSIDELCSSFIGPTGSERKGLFELTSRGGAADFEFLGVKIPRYRDYTPSSLLKDATLIHQSVTGLYETRIDLGKLGED

SEQ ID NO: 570 - protein, 1135 aa, Streptococcus salivarius
  source 1..1135: note = Streptococcus salivarius PS4
MSDLVLGLDIGIGSVGVGILNKVTGEIIHKNSRIFPAAQAENNLERRTNRQGRRLTRRKKHRRVRLNHLFEESGLITDFTKVSINLNPYQLRVKGLTAELSNEELFIALKNMVKHRGISYLDDASDDGNSSVGDYAQIVKENSKQLETKTPGQIQLERYQKYGQLRGDFTVEEDGRKHRLINVFPTSAYHAEALRILQTQQEFNPQITDEFINSYLEILTGKRKYYHGPGNEKSRTDYGKYTTKKDAQGQYITLNNIFGILIGKCTFYPEEYRAAKASYTAQEFNLLNDLNNLTVPTETKKLSEEQKYQIITYVKNEKAMGPAKLFKYIAKLLACDIADIKGYRIDKSDKAEIHTFEAYRKMKTLETIDIEQIEREKLDKLAYVLTLNTEREGIQEALDHEFADGTFSQEQVDELVQFRKANSSIFGKGWHSFSVKLMMELIPELYATSEEQMTILTRLGKQKTTSSSNKTKYIDEKQLTEEIYNPVVAKSVRQAIKIVNAAIKKYGDFDNIVIEMARETNEDDEKKAIQKIQKANKAEKDAAMRKAANQYNGKAELPHSVFHGHKQLATKIRLWHQQGERCLYTGKTISIHDLINNPNQFEIDHILPLSITFDDSLANKVLVYATANQEKGQRTPYQALDSMDDAWSFRELKAFVRESKALSNKKKEYLLTEEDISKFDVRKKFIERNLVDTRYASRVVLNALQEHFKAHKIDTKVSVVRGQFTSQLRRHWGIDKTRDTYHHHAVDALIIAASSQLNLWKKQKNTLVSYSEDQLLDIETGELISDDEYKESVFKAPYQHFVDTLKSKEFEDSILFSYQVDSKFNRKISDATIYATRQAKVGKDKKDETYVLGKIKDIYALGTKTPSKTGFYKFLDLYNKDKSQFLVYQKDRKTWDEVIEKIMEQYRPFKESDKNGKEVDFNPFEKYRIENGPIRKYSRKGNGPEIKSLKYYASKLGNHIDITPKDSNNKVVLQSVSPWRADVYFNKTTGSYEILGLKYADLQFEKGTGTYRISEEKYNDIKKKEGVDSDSEFKFTLYKNDLLLIKDTETKEQRLFRFLSRSMPNKKHYVELKPYSKDKFEKNESLIEILGSADKSGRCIKGLAKSNLSIFKVRTDVLGNQHIIKNEGDKPKLDF

SEQ ID NO: 571 - protein, 1377 aa, Streptococcus sanguinis
  source 1..1377: note = Streptococcus sanguinis SK115
MKKPYSIGLDIGTNSVGWAVITDDYKVPSKKMKVLGNTDKHFIKKNLIGALLFDEGTTAEDRRLKRTSRRRYTRRKNRLRYLQEIFSEEISKLDSSFFHRLDDSFLVPEDKRGSKYPIFATLEEEKEYHKKFPTIYHLRKHLADSKEKTDLRLIYLALAHMIKYRGHFLYEESFDIKNNDIQKIFNEFISIYDNTFEGSSLSGQNAQVEAIFTDKISKSTKRERVLKLFSDEKSTGLFSEFLKLIVGNQADFKKHFDLEEKAPLQFSKDTYDEDLENLLGQIGDGFADLFLVAKKLYDAILLSGILTVTDPSTKAPLSASMIERYENHQEDLAALKQFIKNNLSEKYAEVFSDQSKDGYAGFIDGKTTQEAFYKYIKNLLSKLEGADYFLNKIEREDFLRKQRTFDNGSIPHQIHLQEMNAILRRQGEHYLFLKENREKIEKILAFRIPYYVGPLARGNRDFAWLTRNSDQAIRPWNFEEVVDKASSAEDFINKMTNYDLYLPEEKVLPKHSLLYETFAVYNELTKVKFIAEGLRDYQFLDSGQKKQIVNQLFKDKRKVTEKDIIHYLHNVDGYDGIELKGIEKQFNASLSTYHDLLKIIKDKEFMDNPKNGEILENIIHTLTIFEDREMIKQRLAQYDTLFDEKVIKALTRRHYTGWGKLSAKLINGIRDKQTGKTILEYLIDDGDCNRNFMQLINDDGLSFKEIIQKAQVVGKTDDVKQVVQEIPGSPAIKKGILQSIKIVDELVKVMGHNPESIVIEMARENQTTAKGKKNSQQRYKRIEDALKNLAPGLDSNILKENPTDNIQLQNDRLFLYYLQNGKDMYTGKAIDINQLSNYDIDHIIPQAFIKDDSLDNRVLTSSKDNRGKSDNVPSIEVVQKRKAFWQQLLDSKLISERKFNNLTKAKRGGLDERDKVGFIKRQLVETRQITKHVAQLLDTRFNTEVNEENQKIRTVKIITLKSNLVSNFRKEFGLYKVREINDYHHAHDAYLNAVVAKAILKKYPKLEPEFVYGDYQKYDLKRYILKSKASNTIDKATEKYFFYSNLLNFFKEKVRYADGTIKKRENIEYSNDTGEIAWNKEKDFATIKKVLSLPQVNIVKKTEEQTVGQNGGLFDNNIVSKKKVVDASKLIPIKSSLSPEKYGGYARPTIAYSVLVIADIEKGKGKAKKLKRIKEIVGITIQDKKKFESNPVTYLEECGYKNINSNLIIKLPKYSLFEFNDGQRRLLASSIELQKGNELILPYHLTALLYHAQRINKISEPIHKQYVEAHQNEFKELLTTIISLSKKYIQKPNVELLLQQAFDQADKDIYQLSESFISLLKLTSFGAPGAFKFLGVEISQSSVRYKPNSQFLDTTLIHQSITGLYETRIDLSKLGED

SEQ ID NO: 572 - protein, 1392 aa, Streptococcus sanguinis
  source 1..1392: note = Streptococcus sanguinis SK330
MENKNYSIGLDIGTNSVGWAVITDDYKVPSKKMKVFGNTDKHFIKKNLIGALLFDEGATAEDRRLKRTARRRYTRRKNRLRYLQEIFSEEISKLDSSFFHRLDDSFLVPKDKRGSKYPIFATLEEEKEYHKKFPTIYHLRKHLADSKEKTDLRLIYLALAHMIKYRGHFLYEESFDIKNNDIQKIFNEFISIYDNTFEGSSLSGQNAQVEAIFTDKISKSAKRERVLKLFSDEKSTSLFSEFLKLIVGNQADFKKHFDLEEKAPLQFSKDTYDEDLENLLGQIGDGFTDLFLVAKKLYDAILLSGILTVTDPSTKAPLSASMIERYESHQKDLAALKQFIKNNLPKRYNEVFSDQSKDGYAGYIDGKTTQEAFYKYIKNLLSKFEGADYFLDKIEREDFLRKQRTFDNGSIPHQIHLQEMNAILRRQGEHYPFLKENREKIEKILTFRIPYYVGPLARGNRDFAWLTRNSDQAIRPWNFEEIVDKASSAEEFINKMTNYDLYLPEEKVLPKHSLLYETFAVYNELTKVKFIAEGLRDYQFLDSGQKKQIVNQLFKEKRKVTEKDIIHYLHNVDGYDGIELKGIEKQFNASLSTYHDLLKIIKDKEFMDDPKNEEILENIVHTLTIFEDREMIKQRLAQYDSIFDEKVIKALTRRHYTGWGKLSAKLINGICDKQTGDTILDYLIDDGKINRNFMQLINDDGLSFKEIIQKAQVVGKTDDVKQVVQELPGSPAIKKGILQSIKIVDELVKVMGYAPESIVIEMARENQTTARGKKNSQQRYKRIEDSLKNLAPGLDSNILKENPTDNIQLQNDRLFLYYLQNGKDMYTGKPLDIDQLSSYDIDHIIPQAFIKDDSIDNRVLTSSKDNRGKSDNVPSLEVVQKRKAFWQQLLDSKLISERKFNNLTKAERGGLDERDKVGFIRRQLVETRQITKHVAQILDASFNTEVNEKNQKIRTVKIITLKSNLVSNFRKEFELYKVREINDYHHAHDAYLNAVVAKAILKKYPKLEPEFVYGDYQKYDLKRYISRFKPSKEIEKATEKYFFYSNLLNFFKEEVHYADGIIVKRENIEYSKDTGEIAWNKEKDFATIKKVLSYPQVNIVKKTEIQTHGLDRGKPKGLFNSNPSPKPSEDSKENLVPIKQGLDPRKYGGYAGISNSYAVLVKAIVEKGAKKQQKTILEFQGISILDKINFENNKENYLLKKRYIEILSTITLPKYSLFEFPDGTRRRLASILSTNNKRGEIHKGNELVLPGKYTTLLYHAKNINKKLEPEHLEYVEKHRNDFAKLLECVLNFNDKYVGALKNGERIRQAFTDWETVDIEKLCFSFIGPENSKNAGLFELTSQGSASDFEFLGVKIPRYRDYAPSSLLKATLIHQSITGLYETRIDLSKLGED

SEQ ID NO: 573 - protein, 1370 aa, Streptococcus sanguinis
  source 1..1370: note = Streptococcus sanguinis SK353
MKKPYSIGLDIGTNSVGWAVVTDDYKVPAKKMRVFGDTDRSHIKKNLLGTLLFDDGNTAESRRLKRTARRRYTRRRNRILYLQEIFTESMNEIDESFFHRLDDSFLVPEDKRGSKYPIFATLQEEKEYHKQFPTIYHLRKQLADSKEKSDVRLIYLALAHMIKYRGHFLYEETFDIKNNDIQKIFNEFINIYDNTFEGSSLSGQNAQVEAIFTDKISKSAKRERVLKLFPDEKSTGLFSEFLKLIVGNQADFKKHFDLEEKAPLQFSKDTYDEELENLLGQIGDDFADLFLIAKKLYDAILLSGILTVTDPSTKAPLSASMIERYENHQKDLAALKQFIKNNLPEKYVEVFSDQSKDGYAGYIDGKTTQEAFYKYIKNLLSKFEGADYFLDKIEREDFLRKQRTFDNGSIPHQIHLQEMNAILRRQGEHYPFLKENREKIEKILTFRIPYYVGPLARDNRDFSWLTRNSDEPIRPWNFEEVVDKARSAEDFIHRMTNYDLYLPEEKVLPKHSLLYETFAVYNELTKVKFIAEGLRDYQFLDSGQKKQIVNQLFKEKRKVTEKDIIHYLHNVDGYDGIELKGIEKQFNANLSTYHDLLKITKDKEFMDDPKNEEILENIVHTLTIFEDREMIKQRLAQYDTLFDEKVIKALTRRHYTGWGKLSAKLINGIRDKQSGKTILDYLIDDDKINRNFMQLINDDGLSFKEIIQKAQVVGKTDDVKQVVQELPGSPAIKKGILQSIKIVDELVKVMGYALESIVIEMARENQTTARGKKNSQQRYKRIEDALKNLAPGLDSNILKENPTDNIQLKNDRLFLYYLQNGKDMYTGKPLDINQLSSYDIDHIIPQAFIKDDSIDNRVLTSSKDNRGKSDNVPSLEVVQKRKAFWQQLLDSKLISERKFNNLTKAERGGLDERDKVGFIRRQLVETQQITKNVAQILDARFNTEVKEKNQKIRTVKIITLKSNLVSNFRKEFGLYKVREINNYHHAHDAYLNAVVAKAILKKYPKLEPEFVYGDYQKYDLKKYISRFKPSKEIEKATEKYFFYSNLLNFFKEEVLYADGTIRKRENIEYSKDTGEIAWDKEKDFATIKKVLSYPQVNIVKKREVQTGGFSKESILPKGNSDKLIPRKTKDILWDTTKYGGFDSPVIAYSILLIADIEKGKAKKLKTVKTLVGITIMEKAAFEENPITFLENKGYHNVRKENILCLPKYSLFELENGRRRLLASAKELQKGNEIVLPVCLTTLLYHSKNLHKLDEPEHLEYIQKHRNEFKDLLNLVSEFSQKYILAEANLEKIKDLYADNEQADIEILANSFINLLTFTALGAPAAFKFFGKDVDRKRYTTVSEILNATLIHQSITGLYETRIDLSKLGEE

SEQ ID NO: 574 - protein, 1421 aa, Streptococcus sanguinis
  source 1..1421: note = Streptococcus sanguinis SK49
MTKFNKNYSIGLDIGVSSVGYAVVTEDYRVPAFKFKVLGNTEKEKIKKNLIGSTTFVSAQPAKGTRVFRVNRRRIDRRNHRITYLRDIFQKEIEKVDKNFYRRLDESFRVLGDKSEDLQIKQPFFGDKELETAYHKKYPTIYHLRKHLADADKNSPVADIREVYMAISHILKYRGHFLTLDKINPNNINMQNSWIDFIESCQEVFDLEISDESKNIADIFKSSENRQEKVKKILPYFQQELLKKDKSIFKQLLQLLFGLKTKFKDCFELEEEPDLNFSKENYDENLENFLGSLEEDFSDVFAKLKVLRDTILLSGMLTYTGATHARFSATMVERYEEHRKDLQRFKFFIKQNLSEQDYLDIFGRKTQNGFDVDKETKGYVGYITNKMVLTNPQKQKTIQQNFYDYISGKITGIEGAEYFLNKISDGTFLRKLRTSDNGAIPNQIHAYELEKIIERQGKDYPFLLENKDKLLSILTFKIPYYVGPLAKGSNSRFAWIKRATSSDILDDNDEDTRNGKIRPWNYQKLINMDETRDAFITNLIGNDIILLNEKVLPKRSLIYEEVMLQNELTRVKYKDKYGKAHFFDSELRQNIINGLFKNNSKRVNAKSLIKYLSDNHKDLNAIEIVSGVEKGKSFNSTLKTYNDLKTIFSEELLDSEIYQKELEEIIKVITVFDDKKSIKNYLTKFFGHLEILDEEKINQLSKLRYSGWGRYSAKLLLDIRDEDTGFNLLQFLRNDEENRNLTKLISDNTLSFEPKIKDIQSKSTIEDDIFDEIKKLAGSPAIKRGILNSIKIVDELVQIIGYPPHNIVIEMARENMTTEEGQKKAKTRKTKLESALKNIENSLLENGKVPHSDEQLQSEKLYLYYLQNGKDMYTLDKTGSPAPLYLDQLDQYEVDHIIPYSFLPIDSIDNKVLTHRENNQQKLNNIPDKETVANMKPFWEKLYNAKLISQTKYQRLTTSERTPDGVLTESMKAGFIERQLVETRQIIKHVARILDNRFSDTKIITLKSQLITNFRNTFHIAKIRELNDYHHAHDAYLAVVVGQTLLKVYPKLAPELIYGHHAHFNRHEENKATLRKHLYSNIMRFFNNPDSKVSKDIWDCNRDLPIIKDVIYNSQINFVKRTMIKKGAFYNQNPVGKFNKQLAANNRYPLKTKALCLDTSIYGGYGPMNSALSIIIIAERFNEKKGKIETVKEFHDIFIIDYEKFNNNPFQFLNDTSENGFLKKNNINRVLGFYRIPKYSLMQKIDGTRMLFESKSNLHKATQFKLTKTQNELFFHMKRLLTKSNLMDLKSKSAIKESQNFILKHKEEFDNISNQLSAFSQKMLGNTTSLKNLIKGYNERKIKEIDIRDETIKYFYDNFIKMFSFVKSGAPKDINDFFDNKCTVARMRPKPDKKLLNATLIHQSITGLYETRIDLSKLGED

SEQ ID NO: 575 - protein, 1026 aa, Streptococcus sp.
  source 1..1026: note = Streptococcus sp. BS35b
MNGLVLGLDIGIASVGVGILEKNSGKIIHANSRLFPAATADNNVERRKNRQARRLNRRKKHRGVRFQDLFEDYGLLTDFSKVSINLNPYRLRVDGLNQQLTNEELFIALKNIVKRRGISYLDDASEDGGAVSSDYGKAVEENRKLLAEQTPGQIQLERFEKYGQVRGDFTVVENGEKRRLINVFSTSAYRKEAEKILRKQQEFNNQITDEFIEDYLKILTGKRKYYHGPGNEKSRTDYGRFRTDGTTLDNIFGVLIGKCTFYPNEYRASKSSYTAQEFNLLNDLNNLTVPTETKKLSEEQKKVIVEYAKEAKTLGASTLLKYIVKMIDASVDQISGYRVDVNNKPEMHTFEVYRKMQSLETISVGELSRNVLDELAHILTLNTEREGIEEAINSKLMGVFSQDQVLELVQFRKNNSSLFSKGWHNFSLKLMMELIPELYETSEEQMTILTRLGKQKSKETSKRTKYIDEKELTEEIYNPVVAKSVRQAIKIINEATKKHGIFDNIVIEMARENNEEDAKKDYIKRQKANQDEKNAAMEKAAFQYNGKKELPGNIFNGHKELATKIRLWHQQGEKCLYTGKTIPISDLIHNQYKYEIDHILPLSLSFDDSLSNKVLVHATANQEKGQRTPFQALDSMDDAWSYREFKSYVKDLKSLSNKKKDYLLTEEDISKIEVKQKFIERNLVDTRYSSRVVLNALQDFYKSHQFDTTISVVRGQFTSQLRRKWGLEKSRETYHHHAVDALIIAASSQLRLWKKQNNPLITYKEGQFIDSQTGEIISLTDDEYKELVFKAPYDHFVDTLHSKTFEDGILFSYQVDSKYNRKISDATIYATRKAKLDKDKSEETYVLGKIKDIYSQAGYDAFIKIYNKDKRKFLMYHKDPQTFEKVIEEILRTYPSKERNDKNKEVPCNPFEKYRQENGPIRKYSKKGNGPEIKCLKYYDNKLGNYIDISPDGSDNQVVLQSLKPWRTDVYFNHQTKKYELMGLKYSDLSFEKGSGKYSISNEKYNSIKRIEGVNEQSEFKFTLYK

SEQ ID NO: 576 - protein, 1139 aa, Streptococcus sp.
  source 1..1139: note = Streptococcus sp. C150
MSDLVLGLDIGIGSVGVGILNKVTGEIIHKNSRIFPAAQAENNLERRTNRQGRRLTRRKKHRRVRLNHLFEESGLITDFTKVSINLNPYQLRVKGLTAELSNEELFIALKNMVKHRGISYLDDASDDGNSSVGDYAQIVKENSKQLETKTPGQIQLERYQKYGQLRGDFTVEEDGRKHRLINVFPTSAYHAEALRILQTQQEFNPQITDEFINSYLEILTGKRKYYHGPGNEKSRTDYGKYTTKKDAQGQYITLNNIFGILIGKCTFYPEEYRAAKASYTAQEFNLLNDLNNLTVPTETKKLSEEQKYQIITYVKNEKAMGPAKLFKYIAKLLSCDVADIKGYRIDKSDKAEIHTFEAYRKMKTLETLDVKKMAREELDKLAYVLTLNTEREGIQEALDHEFADGTFSQEQVDELVQFRKANSSIFGKGWHSFSVKLMMELIPELYATSEEQMTILTRLGKQKTTSSSNKTKYIDEKQLTEEIYNPVVAKSVRQAIKIVNAAIKKYGDFDNIVIEMARETNEDDEKKAIQKIQKANKAEKDAAMRKAANQYNGKAELPHSVFHGHKQLATKIRLWHQQGERCLYTGKTISIHDLINNPNQFEIDHILPLSITFDDSLANKVLVYATANQEKGQRTPYQALDSMDDAWSFRELKAFVRESKALSNKKKEYLLTEEDISKFDVRKKFIERNLVDTRYASRVVLNALQEHFRTHKIDTKVSVVRGQFTSQLRRHWGIEKTRDTYHHHAVDALIIAASSQLNLWKKQKNTLVSYSEDQLLDIETGELISDDEYKESVFKAPYQHFVDTLKSKEFEDSILFSYQVDSKFNRKISDATIYATRKAKLDKEKKEYTYTLGKIKDIYALGTKTPSKTGFYKFLDLYKKDKSQFLMYQKDRRTWDEVIEKILEQYRPFKEKDKNGKEVDFNPFEKYRIENGPIRKYSRKGNGPEIKSLKYYDNLLGRFVDITPSESKNPVALLSLNPWRTDVYYNTETRKYEFLGLKYADLCFEKGGSYGISKVKYNKIREKEGIGKNSEFKFTLYKNDLILIKDTETNRQQIFRFWSRTGKDNPKSFEKHKLELKPYEKTRFEKGEELKVLGKVPPSSNRLQKNMQIENLSIYKVRTDVLGNQHIIKNEGDKPKLDF

SEQ ID NO: 577 - protein, 1377 aa, Streptococcus sp.
  source 1..1377: note = Streptococcus sp. C300
MNNKPYSIGLDIGTNSVGWSVITDDYKVPSKKMKVLGNTDKRFIKKNLIGALLFDEGTTAEARRLKRTARRRYTRRKNRLRYLQEIFAEEMSKVDSSFFHRLDDSFLIPEDKRGSKYPIFATLVEEKEYHKQFPTIYHLRKQLADSKEKADLRLIYLVLAHMIKYRGHFLYEEAFDIKNNDIQKIFNEFISIYDNTFEGSSLSGQNAQVETIFTDKISKSAKRERVLKLFPDEKSTGLFSEFLKLIVGNQADFKKHFDLEEKAPLQFSKDTYDEDLENLLEQIGDDFADLFVAAKKLYDAILLSGILTVTDPSTKAPLSASMIERYENHQKDLAVLKQFIKTNLPEKYVEVFSDQSKDGYAGYIDGKTTQEAFYKYIKNLLSKFDGADYFLDKIEREVFLRKQRTFDNGSIPHQIHLQEMNTILRRQGEHYPFLKENKEKIEKILTFRIPYHVGPLARGNRDFAWLTRNSDQAIRPWNFEEIVDKASSAEDFINKMTNYDLYLPEEKVLPKHSLLYETFAVYNELTKVKFIAEGMRDYQFLDSGQKKKIINQLFKKKRKVTEDDIIDCLQKIDNYDGIELKGIEKQFNASLSTYHDILKIIRDKEFMDDPKNGDILENVIHTLTIFEDREMIKQRLAQYNSIFDEKVIKALSRKHYTGWGKLSAKLIDGIRDKQTGKTILDYLMDDGKSNRNFMQLIKDDELSFTEIIQKAQVVGDTDNLRQVVQNLPGSPAIKKGILQSIKIVDELVKVMGHAPESIVIEMARENQTTARGKKNSQQRYKRIEDSLKNLASGLDSNILKENPTDNIQLQNDRLFLYYLQNGKDMYTGEALNINQLSSYDIDHIIPQAFIKDDSLDNRVLTSSKDNRGKSDNVPSLEVVEKMKAFWQQLLDSKLISERKYNNLTKAERERGGLNELDKVGFIKRQLVETRQITKHVAQILDARFNKEVTEKNKKNRNVKIITLKSNMVSNFRKEFGLYKVREINDYHHAHDAYLNAVVAKAILKKYPKLEPEFVYGDYQKYDLKRYISRSKDPKEVEKATEKYFFYSNLLNFFKEEVHYADGTIVKRENIEYSKDTGEIAWNKEKDFATIKKVLSLPQVNIVKKTEEQTVGQNGGLFDNNIVSKKKVVDASKLIPIKSGLSPEKYGGYARPTIAYSVLVTYKQNNKIKNTMVGIPVLTKLEFERDPNLYLRNLGINNVSHVIKLVKYTVLEFKHKYGTYRRFIVSNQELKRANQIFVTTKQMKLISQYTTLDKNEHDSLLKNNQQLIQSIWNQFLEFMLATDLVNKKQYDELILTNNQTIEECRNIMNRVITTLSFTNINAGQKKIIFDDTLSLPIKRWQFTDSDKMVKKIIESTLIHQSITGLYETRIDLSKLGED

SEQ ID NO: 578 - protein, 1371 aa, Streptococcus sp.
  source 1..1371: note = Streptococcus sp. F0441
MENKNYSIGLDIGTNSVGWSVITDDYKVPSKKMKVLGNTDKHFIKKNLIGALLFDEGTTAEARRLKRTARRRYTRRKNRLRYLQEIFSEEIGKVDSSFFHRLDDSFLIPEDKRGSKYPIFATLAEEKKYHKQFPTIYHLRKQLADSKEKTDLRLIYLALAHMIKYRGHFLYEEAFDIKNNDIQKIFNEFISIYNNTFEGNSLSGQNVQVEAIFTDKISKSAKRERVLKLFPDEKSTGLFSEFLKLIVGNQADFKKHFDLEEKAPLQFSRDTYDEDLENLLGQIGDDFADLFLVAKKLYDAILLSGILTVTNPSTKAPLSASMIERYENHQKDLASLKQFIKNNLPEKYDEVFSDQSEDGYAGYIDGKTTQETFYKYIKNLLSKFEGADYFLDKIEREDFLRKQRTFDNGSIPHQIHLQEMNAILRRQGEHYPFLKENKEKIEKILTFRIPYYVGPLARGNRDFAWLTRNSDQAIRPWNFEEIVDKASSAEDFINKMTNYDLYLPEEKVLPKHSLLYETFAVYNELTKVKFIAEGLRDYQFLDSGQKKQIVTQLFKEKRKVTEKDIIQFLHNVDGYDGIELKGIEKQFNASLSTYHDLLKIIKDKAFMDDAKNEAILENIVHTLTIFEDREMIKQRLAQYDSLFDEKVIKALTRRHYTGWGKLSAKLINGISDKQTGNTILDYLIDDGEINRNFMQLINDDGLSFKEIIQKAQVVGKTNDVKQVVQELPGSPAIKKGILQSIKIVDELVKVMGHAPESIVIEMARENQTTARGKKNSQQRYKRIEDSLKILASGLNSKILKEHPTDNIQLQNDRLFLYYLQNGKDMYTGEALDINQLSSCDIDHIIPQAFIKDDSLDNRVLTSSKDNRGKSDNVPSLEVVDKMKVFWQQLLDSKLISYRKFNNLTKAERGGLNELDKVGFIKRQLVETRQITKHVAQILDARFNKEVTEKDKKNRTVKIITLKSNLVSNFRKEFELYKVREINDYHHAHDAYLNAVVAKAILKKYPKLEPEFVYGDYQKYDLKRYISRSKDPKEIEKATEKYFFYSNLLNFFKEEVHYADGTIVKRENIEYSKDTGEIAWNKEKDFATIKKVLSLPQVNIVKKREVQTGGFSKESILPKGNSDKLIPRKTKDILWDTTKYGGFDSPVIAYSILLIADIEKGKAKKLKTVKTLVGITIMEKDAFEKNPIAFLENKGYHNVCKENILCLPKYSLFELENGRRRLLASAKELQKCNEIVLPVYLTTLLYHSKNVHKLDEPGHLEYIQKHRNEFKDLLNLVSEFSQKYVLADANLEKIKNLYADNEQADIEILANSFINLLTFTALGAPAAFKFFGKDVDRKRYTTVSEILNATLIHQSITGLYETRIDLSKLGED

SEQ ID NO: 579 - protein, 1121 aa, Streptococcus sp.
  source 1..1121: note = Streptococcus sp. GMD6S
MNGLVLGLDIGIASVGVGILEKNSGKIIHANSRLFPAATADNNVERRKNRQARRLHRRKKHRGVRFQDLFEDYGLLTDFSKVSINLNPYRLRVDGLNQQLTNEELFIALKNIVKRRGISYLDDASEDGGTVSSDYGKAVEENRKLLAEQTPGQIQLERFEKYGQVRGDFTVVENGEKRRLINVFSTSAYRKEAERILRKQQEFNSKITDEFIEDCLKILTGKRKYYHGPGNEKSRTDYGRFRTDGTTLDNIFGILIGKCTFYPDEYRASKASYTAQEFNLLNDLNNLTVPTETKKLSEEQKKVIVEYAKEAKTLGASTLLKYIAKMIDASVDQIRGYRVDVNNKPEIHTFEAYRKMQSLETISVGELSRNVLDELAHILTLNTEREGIEEAINTKLKDSFSQDQVLELVQFRKNNSSLFSKGWHNFSLKLMMELIPELYETSEEQMTILTRLGKQKSKEISKRTKYIDEKELTEEIYNPVVAKSVRQAIKIINEATKKHGIFDNIVIEMARENNEEDAKKDYIKRQKANQDEKNAAMEKAAFQYNGKKELPDSIFHGQKELATKIRLWHQQGEKCLYTGKNIPISDLIHNQYKYEIDHILPLSLSFDDSLSNKVLVLATANQEKGQRTPFQALDSMDDAWSYREFKSYVKESKLLGNKKKEYLLTEEDISKIEVKQKFIERNLIDTRYSSRVVLNALQDFYKAHKFDTTISVVRGQFTSQLRRKWGLEKSRETYHHHAVDALIIAASSQLRLWKKQNNPLIAYKEGQFVDSETGEIISLSDDEYKELVFKAPYDHFVDTLSSKTFEDSILFSYQVDSKFNRKISDATIYATRKAKLDKEKSEETYVLGKIKDIYSQAGYDAFIKIYNKDKSKFLMYHKDPQTFEKVIEEILRTYPSKELNDKNKEIPCNPFEKYRQENGPIRKYSKKSNGPEIKSLKYYDNKLGNHIDITPESSDNQVVLQSLKPWRTDVYFNHQTKKYELMGLKYSDLSFEKGSGKYSISNQKYNSIKRIEGIDEQSEFKFTLYKNDLILIKDSENNEQKLFRFNSRNDTAKHYIELKPYDKAKFDGEQELITILGNVAKGGRCLKGLNKSNISIFKVKTDVLGKKHIIKKEGDEPKLKF

SEQ ID NO: 580 - protein, 1375 aa, Streptococcus sp.
  source 1..1375: note = Streptococcus sp. M334
MSNKSYSIGLDIGTNSVGWAVITDDYKVPSKKMKVLGNTDKHFIKKNLIGALLFDEGTTAEDRRLKRTARRRYTRRKNRLRYLQEIFSQEISKVDSSFFHRLDDFFLVPEDKRGSKYPIFATLVEEKEYHKKFPTIYHLRKHLADSKEKTDLRLIYLALAHMIKYRGHFLYEESFDIKNNDIQKIFSEFISIYDNTFEGKSLSGQNAQVEAIFTDKISKSTKRERVLKLFPDEKSTGLFSEFLKLIVGNQADFKKHFDLEEKAPLQFSKDTYDEDLENLLGQIGDDFADLFLVAKKLYDAILLSGILTVKDLSTKAPLSASMIERYENHQKDLAALKQFIQNNLQEKYDEVFSDQSKDGYAGYIDGKTTQEAFYKYIKNLLSKFEGADYFLDKIEREDFLKKQRTFDNGSIPHQIHLQEMNAIIRRQGEHYPFLQENKEKIEKILTFRIPYYVGPLARGNGDFAWLTRNSDQAIRPWNFEEIVDQASSAEDFINKMTNYDLYLPEEKVLPKHSLLYETFAVYNELTKVKFIAEGLTRYQFLDKKQKKDIFDTFFKAENKRKVTEKDIIHYLHNVDGYDGIELKGIEKQFNASLSTYHDLLKIIKDKAFMDDSKNEEILENIIHTLTIFEDREMIKQRLAQYDSLFDEKVIKALTRRHYTGWGKLSAKLINGIRDKKSGKTILDYLIDDGEINRNFMQLIHDDGLSFKEIIQKAQVFGKTNDVKQVVQELPGSPAIKKGILQSIKIVDELVKVMGHAPESIVIEMARENQTTARGKKNSQQRYKRIEDSLKNLASGLDSNILKENPTDNIQLQNDRLFLYYLQNGRDMYTGKPLEINQLSNYDIDHIIPQAFIKDDSLDNRVLTSSKDNRGKSDNVPSLEVVEKMKAFWQQLLDSKLISERKFNNLTKAERERGGLNELDKVGFIKRQLVETRQITKHVAQFLDARFNKEVTEKDKKNRNVKIITLKSNLVSNFRKEFGLYKVREINDYHHAHDAYLNAVLAKAILKKYPKLEPEFVYGDYQKYDLQRYISKSREPKEVEKATQKYFFYSNLLNFFKEEVHYADGTIVKRENIEYSKDTGEIAWNKEKDFATVKKVLSLPQVNIVKKTEVQTGGFSKESILPKGNSDKLIPRKTKEILWDTTKYGGFDSPVIAYSILLIADIEKGKAKKLKTVKTLVGITIMEKATFEKNPITFLENKGYHNVRKENILCLPKYSLFELESGRRRMLASAKELQKGNEIVLPVYLTTLLYHSKNVHKLDEPEHLEYIQKHRYEFKDLLNLVSEFSQKYVLADANLEKIKNLYADNEQADIEILANSFINLLTFTALGAPAAFKFLGKDVDRKRYTTVSEILNATLIHQSITGLYETRIDLSKLGED

SEQ ID NO: 581 - protein, 1371 aa, Streptococcus sp.
  source 1..1371: note = Streptococcus sp. oral taxon 056 str. F0418
MNNNNYSIGLDIGTNSVGWAVITDDYKVPSKKMRVLGNTDKRFIKKNLIGALLFDEGTTAEDRRLKRTARRRYTRRKNRLRYLQEIFAEEMSKVDSSFFHRLDDSFLVPEDKSGSKYPIFATLAEEKEYHKKFPTIYHLRKHLADSKEKADLRLIYLALAHITKYRGHFLYEEAFDIKNNDIQKIFNEFINIYDNTFEGSSLSGQNAQVEAIFTGKISKSVKREHVLKLFPDEKSTGLFSEFLKLIVGNQADFKKHFDLEEKASLQFSKDTYDEDLENLLGQIGDDFADLFLVAKKLYDAILLSGILTVTDPSTKAPLSASMIERYENHQEDLAALKQFIKNNLPEKYAEVFSDQSKDGYAGYIDGKTTQEAFYKYIKNLLSKFEGADYFLDKIEREDFLRKQRTFDNGSIPHQIHLQEMNAILRRQGEHYPLLKENKEKIEKILTFRIPYYVGPLARGNRDFAWLTRNSDQAIRPWNFEEIVDKASSAESFINKMTNYDLYLPEEKVLPKHSLLYETFAVYNELTKVKFIAEGLRDYQFFDSGQKKQIVNQLFKEKRKVTEKDIIHYLHNVDGYDGIELKGIEKQFNASLSTYHDLLKIIKDKEFMDNHKNQEILENIVHTLTIFEDREMIKQRLAQYDSIFDEKVIKALTRRHYTGWGKLSAKLINGICDKKTGKTILDYLIDDGYNNRNFMQLINDDGLSFKEIIQKAQVVGKTDDLTQVVRELSGSPAIKKGILQSIKIVDELVKIMGYAPESIVIEMARENQTTAKGKKNSQQRYKRIEDALKNLAPGLDSTISKENPTDNIQLQNDRLFLYYLQNGKDMYTGEALDINQLSSYDIDHIIPQAFIKDDSLDNRVLTSSKDNRGKSDNVPSLEVVKKRKAFWQQLLDSKLISERKFNNLTKAERGGLDERDKVGFIKRQLVETRQITKHVARILDARFNTEVSEKNQKIRSVKIITLKSNLVSNFRKEFKLYKVREINDYHHAHDAYLNAVVAKAILKKYPKLEPEFVYGDYQKYDLKRYISKSKDPKEVEKATEKYFFYSNLLNFFKEEVHYADGTIVKRENIEYSKDTGEIAWNKEKDFVTIKKVLSYPQVNIVKKREVQTGGFSKESILPKGNSDKLIPRKTKDILWDTTKYGGFDSPVIAYSILLIADIEKGKAKKLKTVKTLVGITIMEKAAFEKNPITFLENKGYHNVRKENILCLPKYSLFELENGRRRLLASAKELQKGNEIVLPVYLTTLLYHSKNVHKLDEPEHLEYIQKHRYEFKDLLNLVSEFSQKYVLAEANLEKIKSLYVDNEQADIEILANSFINLLTFTALGAPAAFKFFGKDVDRKRYTTVSEILNATLIHQSITGLYETRIDLSKLGED

SEQ ID NO: 582 - protein, 1420 aa, Streptococcus sp.
  source 1..1420: note = Streptococcus sp. oral taxon 071 str. 73H25AP
MAKFNKNYSIGLDIGVSSVGYAVVTEDYRVPAFKFKVLGNTEKEKIKKNLIGSTTFVPAQSAQGTRVFRVNRRRIDRRNHRIAYLRDIFQKEIEKIDKNFYRRLDESFRVLGDKSEDIQIKQPFFGNKELETAYHKKYPTIYHLRKHLADADKNSPVADIREVYMVLSHILKYRGHFLTLGKIDPNNINMQNSWIDFIESCQDAFDLEISDESKTIAAIFKSSENRQEKVKQILSYFQQELLKKDKSIFKQLLQLLFGLKTKFKDCFELEEEPDLNFSKENYDENLENLLGALEEDFSDVFAKLKILRDTILLSSMLTYTGATHARFSATMVERYEEHRKDLQRFKSFVKQNLSEQDYLDIFGRKTPTGFDVDKETKGYVGYISNKMVLTNPQKQKTIQQNFYDYISGKITGIEGAECFLNKISDGTFLRKLRTTDNGAIPNQIHAYELEKIIERQGRDYPFLLENKDKLLSILTFKIPYYVGPLAKGNNSRFAWIKRTTSQDVLDDNDEDTRNGKIRPWNYHKLINMDETRDAFIINLIGNDIILLNEKVLPKRSLIYEEVMLQNELTRVKYKDKYGKIHFFNSELRQEIINNLFKTNSKRVSSAMLLSYLENFTNLQAVEIVSGIEKGKSLNSTLKTYNDLKTIFSEELLDSEIYQKELEEIIKVITVFDDKKSIKNYLTKYFGHLEFLNEEKINQLSKLRYTGWGRYSGKLLLGIRDEDTGFNLMQFLRNDDENRNLTQLISDTTLSFDSAIKAIQSKSTVEDDVFEEIKNLAGSPAIKRGILNSIKIVDELVQIIGYPPQNIIIEMARENMTTEEGQKKAKTRKSKLESALKNIEDSVLESGKVPHSDEQLQSEKLYLYYLQNGKDMYSLDKTGSPTPLYRDQLDQYEVDHIIPYSFLPIDSIDNKVLTHRENNQRKLNNIPDKETVANMKPFWEKLYNAKLISQTKYQRLTTSERTPDGVLTESMKAGFIERQLVETRQIIKHVARILDNRFSDTKIITLKSQLVTNFRNTFHIAKIRELNDYHHAHDAYLAVVVGQTLLKAYPKLAPELIYGHHAHFNRHEENKATLRKHLYSNIMRFFNNPDSKVSKDIWDCNRDLPIVKDVIYNSQINFVKRTMIKKGAFYNQNPVGKLNKQIAANNRYPLKTKVSSLDTSIYGGYGPMNSALSIIIIAERFNEKKGKIETVKEFHDIFIIDYEKFNNNPFQFLNNVSEEGFLKKNDLNRVLAFYRISKYSLMQKIDGTRMLFESKSNLHKVTQFKLTKTQNELFFHMKRLLTKSNLMDLKSESAIKESQNFIQTHQNEFDNIADRLSNYSQKMLGETKSLQTLINGYNERPIKQIDNNEETIRYYYDNFIKMFSFVKSGAPKDIINFFNDKYTVPRMRPKPDRKMLDATLIHQSITGLYETRIDLSKLGED

SEQ ID NO: 583 - protein, 1122 aa, Streptococcus suis
  source 1..1122: note = Streptococcus suis 89/1591
MSNGKILGLDIGIASVGVGVIDAQTGEIIHASSRIFPSANAANNAERRTFRGSRRLIRRKKHRIKRLDDLFNDFHINLDGEMSTDNPYVLRVKGLSQKLTVEELYISIKNIMKRRGISYLDDAESDNEAGRSDYAKAIERNRQLLTSKTPGEIQLERLEKYGQLRGNFTIIDEEGQSQQIINVFSTSDYVKEVEKILDCQKMYHKFISDEFCDKLIELLREKRKYYVGPGNEKSRTDYGIYRTDGTTLENLFGILIGKCTFYPDQYRSSRASYTAQEFNFLNDLNNLTVPTETKKLSQEQKEFLVNYAKETSVLGAGKILQQIAKLADCKVEDIRGYRLDNKDKPELHTFETYRAMKGLVPLVDIGVLSREQLDILADILTLNTDFEGIREALKKQLPNVFDEKQVKGLASFRKSKSQLFAKGWHNLSQKIMLEVIPELYATSDEQMTILTRLGKFEKSSVAEYPSSINVDEITDEIYNPVVAKSIRQTIKIINASIKKWGEFDQIVIEMPRDRNEDEEKKRIADGQKANAKEKADSILRAAELYCAGKVLPDYVYNGHNQLATKIRLWYQQGERCIYTGQPISIHDLIHNQNQYEIDHILPLSLTFDDSLSNKVLVLATANQEKAQRTPYNYLKSATSAWSYREFKDYVTKRKGIGKKKCEYLTFEEDINGFEVRSKFIQRNLVDTRYASKVILNALQDYFKISGIQTKVSVVRGQFTSQLRHKWGIEKTRETYHHHAVDALIIAASSQLRLWKKQESPLVVDYQEGRQVDLETGEILELTDEQYKELVYQPPYQGFVNTISSSAFDNEILFSYQVDSKVNRKISDATIYATRNAQLGKDKTEGIYVLGKIKDIYTQAGYEAFLKRYTKDKTSFLMYHKDLDTWEKVIEIILRDYREYDEKGKEIGNPFERYRRENGYVKKYSRKGNGTAIKSLKYYDNKLGNHIDITPENSRNAVVLQSLKPWRTDVYFNKETGKYEFLGIKYSDLSFEKGTGEYGISQEKYDSIKIAEGVAKKSIFKFTLYKQDLLFIKDIENNFGKLLRFTSKNDTSKHYVELKPYDKNKFGTEEPLLPVLGNVAKSGQCIKGLNKSNISIYKVRTDILGYRHFIKQEGEHPQLKFKK

SEQ ID NO: 584 - protein, 1122 aa, Streptococcus suis
MSNGKILGLDIGIASVGVGVIDAQTGEIIHASSRIFPSANAANNAERRTFRGSRRLIRRKKHRIKRLDDLFNDFHINLDGEMSTDNPYVLRVKGLSQKLTVEELYISIKNIMKRRGISYLDDAESDNEAGRSDYAKAIERNRQLLTSKTPGEIQLERLEKYGQLRGNFTIIDEEGQSQQIINVFSTSDYVKEVEKILDCQKMYHKFISDEFCDKLIELLREKRKYYVGPGNEKSRTDYGIYRTDGTTLENLFGILIGKCTFYPDQYRSSRASYTAQEFNFLNDLNNLTVPTETKKLSQEQKEFLVNYAKETSVLGAGKILQQIAKLADCKVEDIRGYRLDNKDKPELHTFETYRAMKGLVPLVDIGVLSREQLDILADILTLNTDFEGIREALKKQLPNVFDEKQVKGLASFRKSKSQLFAKGWHNLSQKIMLEVIPELYATSDEQMTILTRLGKFEKSSVAEYPSSINVDEITDEIYNPVVAKSIRQTIKIINASIKKWDEFDQIVIEMPRDRNEDEEKKRIADGQKANAKEKADSILRAAELYCAGKVLPDYVYNGHNQLATKIRLWYQQGERCIYTGQPISIHDLIHNQNQYEIDHILPLSLTFDDSLSNKVLVLATANQEKAQRTPYNYLKSATSAWSYREFKDYVTKRKGIGKKKCEYLTFEEDINGFEVRSKFIQRNLVDTRYASKVILNALQDYFKISGIQTKVSVVRGQFTSQLRHKWGIEKTRETYHHHAVDALIIAASSQLRLWKKQESPLVVDYQEGRQVDLETGEILELTDEQYKELVYQPPYQGFVNTISSSAFDNEILFSYQVDSKVNRKISDATIYATRNAQLGKDKTEGIYVLGKIKDIYTQAGYEAFLKRYTKDKTSFLMYHKDLDTWEKVIEIILRDYREYDEKGKEIGNPFERYRRENGYVKKYSRKGNGTAIKSLKYYDNKLGNHIDITPENSRNAVVLQSLKPWRTDVYFNKETGKYEFLGIKYSDLSFEKGTGEYGISQEKYDSIKIAEGVAKKSIFKFTLYKQDLLFIKDIENNFGKLLRFTSKNDTSKHYVELKPYDKNKFGTEEPLLPVLGNVAKSGQCIKGLNKSNISIYKVRTDILGYRHFIKQEGEHPQLKFKK

SEQ ID NO: 585 - protein, 1381 aa, Streptococcus suis
MVKKKYAIGIDIGTNSVGWSIVTDDYKVPSKKMKVFGNTEKRYIKKNLLGTLLFDEGNTAENRRLKRTARRRYTRRRNRILYLQEIFAEEINKIDDSFFQRLDDSFLIVEDKQGSKHPIFGTLQEEKEYHKQFPTIYHLRKQLADSSQKADIRLIYLALAHIIKYRGHFLFEGDLKSENKDVQHLFNDFVEMFDKTVEGSYLSENLPNVADVLVEKVSKSRRLENILHYFPNEKKNGLFGNFLALALGLQPNFKTNFELAEDAKIQFSKETYEEDLEELLGKIGDDYADLFIATKSLYDGILLAGILSTTDSTTKAPLSSSMVNRYEEHQKDLALLKNFIHQNLSDSYKEVFNDKLKDGYAGYIEGKTTQENFYRFIKKAIEKIEGSNYFIDKIDREDFLRKQRTFDNGSIPHQIHLQEMHAIIRRQAEFYPFLVENQDKIEKILTFRIPYYVGPLARGKSEFAWLNRKSDEKIRPWNFDEMVDKETSAENFITRMTNYDRYLPDQKVLPKHSLLYEKFAVYNELTKVKFIAEGMRDYQFLDSGQKKDIVKTLFKTKRKVTAKDIKAYLENSNGYAGVELKGLEEQFNASLPTYHDLLKILRDKAFIDAEENQEILEDIVLTLTLFEDREMIRKRLEKYKDILTEEQRKKLERRHYTGWGRLSAKLINGILDKVTRKTILGYLIDDGTSNRNFMQLINDDTLSFVDEIRLAQGSGEAEDYRAEVQNLAGSPAIKKGILQSLKIVDELIEVMGYEPEHIVVEMARENQFTNQGRRNSQQRINRLENALKDFGSKILEEQKPYGVSKVNNIHLQSDRLFLYYLQNGKDMYTDEELDIDHLSEYDIDHIIPQAFIKDDSLDNKVLTKSAKNRGKSDDVPSMEIVHNRKNFWRQLLKSKLISQRKFDNLTKAERGGLTNEDKARFIQRQLVETRQITKHVARMLDTRFNTKLDEAGNRIRDPKVNIITLKSNLVSQFRKDYQLYKIREINNYHHAHDAYINAVVATALLKKYPQLAPEFVYGEYPTYNSYNSRKSATEKVLFYSNIMNFFKRIVVHSKTGEVRIRPVIEVNKETGEIVWDKKSDFRTVRKVLSYPQVNVVKKTEVQNHGLDRGKPKGFYNANLSPRPKEGSVENLVPAKQSFDTKRYGGYAGISNSYAVLVNGIIEKGKKKSKAEVTEFQGISILARKDFDKNPKQYLLNLGYKDIKSIIKLPKYSLFELENGSRRMLASILSTNNKRGEIHKGNEMYLPDKFVTLLYHAMRVNRTLEPGHKKYVETHRHVFDELLIYILEYNEKIVGAKANGKRIVEAYSARKDTDNLEELCNSFINLLNLTALGSAVDFEFLGTKIPRYRDYTPSSLLKATLIHQSVTGLYETRIDLSKLGGD

SEQ ID NO: 586 - protein, 1122 aa, Streptococcus suis; identical to SEQ ID NO: 583

SEQ ID NO: 587 - protein, 1388 aa, Streptococcus thermophilus
MTKPYSIGLDIGTNSVGWAVITDNYKVPSKKMKVLGNTSKKYIKKNLLGVLLFDSGITAEGRRLKRTARRRYTRRRNRILYLQEIFSTEMATLDDAFFQRLDDSFLVPDDKRDSKYPIFGNLVEEKVYHDEFPTIYHLRKYLADSTKKADLRLVYLALAHMIKYRGHFLIEGEFNSKNNDIQKNFQDFLDTYNAIFESDLSLENSKQLEEIVKDKISKLEKKDRILKLFPGEKNSGIFSEFLKLIVGNQADFRKCFNLDEKASLHFSKESYDEDLETLLGYIGDDYSDVFLKAKKLYDAILLSGFLTVTDNETEAPLSSAMIKRYNEHKEDLALLKEYIRNISLKTYNEVFKDDTKNGYAGYIDGKTNQEDFYVYLKNLLAEFEGADYFLEKIDREDFLRKQRTFDNGSIPYQIHLQEMRAILDKQAKFYPFLAKNKERIEKILTFRIPYYVGPLARGNSDFAWSIRKRNEKITPWNFEDVIDKESSAEAFINRMTSFDLYLPEEKVLPKHSLLYETFNVYNELTKVRFIAESMRDYQFLDSKQKKDIVRLYFKDKRKVTDKDIIEYLHAIYGYDGIELKGIEKQFNSSLSTYHDLLNIINDKEFLDDSSNEAIIEEIIHTLTIFEDREMIKQRLSKFENIFDKSVLKKLSRRHYTGWGKLSAKLINGIRDEKSGNTILDYLIDDGISNRNFMQLIHDDALSFKKKIQKAQIIGDEDKGNIKEVVKSLPGSPAIKKGILQSIKIVDELVKVMGGRKPESIVVEMARENQYTNQGKSNSQQRLKRLEKSLKELGSKILKENIPAKLSKIDNNALQNDRLYLYYLQNGKDMYTGDDLDIDRLSNYDIDHIIPQAFLKDNSIDNKVLVSSASNRGKSDDFPSLEVVKKRKTFWYQLLKSKLISQRKFDNLTKAERGGLLPEDKAGFIQRQLVETRQITKHVARLLDEKFNNKKDENNRAVRTVKIITLKSTLVSQFRKDFELYKVREINDFHHAHDAYLNAVIASALLKKYPKLEPEFVYGDYPKYNSFRERKSATEKVYFYSNIMNIFKKSISLADGRVIERPLIEVNEETGESVWNKESDLATVRRVLSYPQVNVVKKVEEQNHGLDRGKPKGLFNANLSSKPKPNSNENLVGAKEYLDPKKYGGYAGISNSFAVLVKGTIEKGAKKKITNVLEFQGISILDRINYRKDKLNFLLEKGYKDIELIIELPKYSLFELSDGSRRMLASILSTNNKRGEIHKGNQIFLSQKFVKLLYHAKRISNTINENHRKYVENHKKEFEELFYYILEFNENYVGAKKNGKLLNSAFQSWQNHSIDELCSSFIGPTGSERKGLFELTSRGSAADFEFLGVKIPRYRDYTPSSLLKDATLIHQSVTGLYETRIDLAKLGEG

SEQ ID NO: 588 - protein, 1128 aa, Streptococcus thermophilus
MSDLVLGLDIGIGSVGVGILNKVTGEIIHKNSRIFPAAQAENNLVRRTNRQGRRLTRRKKHRIVRLNRLFEESGLITDFTKISINLNPYQLRVKGLTDELSNEELFIALKNMVKHRGISYLDDASDDGNSSVGDYAQIVKENSKQLETKTPGQIQLERYQTYGQLRGDFTVEKDGKKHRLINVFPTSAYRSEALRILQTQQEFNPQITDEFINRYLEILTGKRKYYHGPGNEKSRTDYGRYRTSGETLDNIFGILIGKCTFYPEEFRAAKASYTAQEFNLLNDLNNLTVPTETKKLSKEQKNQIINYVKNEKAMGPAKLFKYIAKLLSCDVADIKGYRIDKSGKAEIHTFEAYRKMKTLETLDIEQMDRETLDKLAYVLTLNTEREGIQEALEHEFADGSFSQKQVDELVQFRKANSSIFGKGWHNFSVKLMMELIPELYETSEEQMTILTRLGKQKRLRLQIKQNISNKTKYIDEKLLTEEIYNPVVAKSVRQAIKIVNAAIKEYGDFDNIVIEMARETNEDDEKKAIQKIQKANKDEKDAAMLKAANQYNGKAELPHSVFHGHKQLATKIRLWHQQGERCLYTGKTISIHDLINNPNQFEVDHILPLSITFDDSLANKVLVYATANQEKGQRTPYQALDSMDDAWSFRELKAFVRESKTLSNKKKEYLLTEEDISKFDVRKKFIERNLVDTRYASRVVLNALQEHFRAHKIDTKVSVVRGQFTSQLRRHWGIEKTRDTYHHHAVDALIIAASSQLNLWKKQKNTLVSYSEEQLLDIETGELISDDEYKESVFKAPYQHFVDTLKSKEFEDSILFSYQVDSKFNRKISDATIYATRQAKVGKDKKDETYVLGKIKDIYTQDGYDAFMKIYKKDKSKFLMYRHDPQTFEKVIEPILENYPNKQMNEKGKEVPCNPFLKYKEEHGYIRKYSKKGNGPEIKSLKYYDSKLLGNPIDITPENSKNKVVLQSLKPWRTDVYFNKATGKYEILGLKYADLQFEKGTGTYKISQEKYNDIKKKEGVDSDSEFKFTLYKNDLLLVKDTETKEQQLFRFLSRTLPKQKHYVELKPYDKQKFEGGEALIKVLGNVANGGQCIKGLAKSNISIYKVRTDVLGNQHIIKNEGDKPKLDF

SEQ ID NO: 589 - protein, 1121 aa, Streptococcus thermophilus
MSDLVLGLDIGIGSVGVGILNKVTGEIIHKNSRIFPAAQAENNLVRRTNRQGRRLTRRKKHRIVRLNRLFEESGLITDFTKISINLNPYQLRVKGLTDELSNEELFIALKNMVKHRGISYLDDASDDGNSSVGDYAQIVKENSKQLETKTPGQIQLERYQTYGQLRGDFTVEKDGKKHRLINVFPTSAYRSEALRILQTQQEFNPQITDEFINRYLEILTGKRKYYHGPGNEKSRTDYGRYRTSGETLDNIFGILIGKCTFYPDEFRAAKASYTAQEFNLLNDLNNLTVPTETKKLSKEQKNQIINYVKNEKAMGPAKLFKYIAKLLSCDVADIKEYRIDKSGKAEIHTFEAYRKMKTLETLDIEQMDRETLDKLAYVLTLNTEREGIQEALEHEFADGSFSQKQVDELVQFRKANSSIFGKGWHNFSVKLMMELIPELYETSEEQMTILTRLGKQKTTSSSNKTKYIDEKLLTEEIYNPVVAKSVRQAIKIVNAAIKEYGDFDNIVIEMARETNEDDEKKAIQKIQKANKDEKDAAMLKAANQYNGKAELPHSVFHGHKQLATKIRLWHQQGERCLYTGKTISIHDLINNSNQFEVDHILPLSITFDDSLANKVLVYATANQEKGQRTPYQALDSMDDAWSFRELKAFVRESKTLSNKKKEYLLTEEDISKFDVRKKFIERNLVDTRYASRVVLNALQEHFRAHKIDTKVSVVRGQFTSQLRRHWGIEKTRDTYHHHAVDALIIAASIQLNLWKKQKNTLVSYSEDQLLDIETGELISDDEYKESVFKAPYQHFVDTLKSKEFEDSILFSYQVDSKFNRKISDATIYATRQAKVGKDKADETYVLGKIKDIYTQDGYDAFMKIYKKDKSKFLMYRHDPQTFEKVIEPILENYPNKQINEKGKEVPVNPFLKYKEEHGYIRKYSKKGNGPEIKSLKYYDSKLGNHIDITPKDSNNKVVLQSVSPWRADVYFNKTTGKYEILGLKYADLQFEKGTGTYKISQEKYNDIKKKEGVDSDSEFKFTLYKNDLLLVKDTETKEQQLFRFLSRTMPKQKHYVELKPYDKQKFEGGEALIKVLGNVANSGQCKKGLGKSNISIYKVRTDVLGNQHIIKNEGDKPKLDF

SEQ ID NO: 590 - protein, 1388 aa, Streptococcus thermophilus
MTKPYSIGLDIGTNSVGWAVTTDNYKVPSKKMKVLGNTSKKYIKKNLLGVLLFDSGITAEGRRLKRTARRRYTRRRNRILYLQEIFSTEMATLDDAFFQRLDDSFLVPDDKRDSKYPIFGNLVEEKAYHDEFPTIYHLRKYLADSTKKADLRLVYLALAHMIKYRGHFLIEGEFNSKNNDIQKNFQDFLDTYNAIFESDLSLENSKQLEEIVKDKISKLEKKDRILKLFPGEKNSGIFSEFLKLIVGNQADFRKCFNLDEKASLHFSKESYDEDLETLLGYIGDDYSDVFLKAKKLYDAILLSGFLTVTDNETEAPLSSAMIKRYNEHKEDLALLKEYIRNISLKTYNEVFKDDTKNGYAGYIDGKTNQEDFYVYLKKLLAEFEGADYFLEKIDREDFLRKQRTFDNGSIPYQIHLQEMRAILDKQAKFYPFLAKNKERIEKILTFRIPYYVGPLARGNSDFAWSIRKRNEKITPWNFEDVIDKESSAEAFINRMTSFDLYLPEEKVLPKHSLLYETFNVYNELTKVRFIAESMRDYQFLDSKQKKDIVRLYFKDKRKVTDKDIIEYLHAIYGYDGIELKGIEKQFNSSLSTYHDLLNIINDKEFLDDSSNEAIIEEIIHTLTIFEDREMIKQRLSKFENIFDKSVLKKLSRRHYTGWGKLSAKLINGIRDEKSGNTILDYLIDDGISNRNFMQLIHDDALSFKKKIQKAQIIGDEDKGNIKEVVKSLPGSPAIKKGILQSIKIVDELVKVMGGRKPESIVVEMARENQYTNQGKSNSQQRLKRLEKSLKELGSKILKENIPAKLSKIDNNALQNDRLYLYYLQNGKDMYTGDDLDIDRLSNYDIDHIIPQAFLKDNSIDNKVLVSSASNRGKSDDVPSLEVVKKRKTFWYQLLKSKLISQRKFDNLTKAERGGLSPEDKAGFIQRQLVETRQITKHVARLLDEKFNNKKDENNRAVRTVKIITLKSTLVSQFRKDFELYKVREINDFHHAHDAYLNAVVASALLKKYPKLEPEFVYGDYPKYNSFRERKSATEKVYFYSNIMNIFKKSISLADGRVIERPLIEVNEETGESVWNKESDLATVRRVLSYPQVNVVKKVEEQNHGLDRGKPKGLFNANLSSKPKPNSNENLVGAKEYLDPKKYGGYAGISNSFTVLVKGTIEKGAKKKITNVLEFQGISILDRINYRKDKLNFLLEKGYKDIELIIELPKYSLFELSDGSRRMLASILSTNNKRGEIHKGNQIFLSQKFVKLLYHAKRISNTINENHRKYVENHKKEFEELFYYILEFNENYVGAKKNGKLLNSAFQSWQNHSIDELCSSFIGPTGSERKGLFELTSRGSAADFEFLGVKIPRYRDYTPSSLLKDATLIHQSVTGLYETRIDLAKLGEG

SEQ ID NO: 591 - protein, 1121 aa, Streptococcus thermophilus
MSDLVLGLDIGIGSVGVGILNKVTGEIIHKNSRIFPAAQAENNLVRRTNRQGRRLARRKKHRRVRLNRLFEESGLITDFTKISINLNPYQLRVKGLTDELSNEELFIALKNMVKHRGISYLDDASDDGNSSVGDYAQIVKENSKQLETKTPGQIQLERYQTYGQLRGDFTVEKDGKKHRLINVFPTSAYRSEALRILQTQQEFNPQITDEFINRYLEILTGKRKYYHGPGNEKSRTDYGRYRTSGETLDNIFGILIGKCTFYPDEFRAAKASYTAQEFNLLNDLNNLTVPTETKKLSKEQKNQIINYVKNEKAMGPAKLFKYIAKLLSCDVADIKGYRIDKSGKAEIHTFEAYRKMKTLETLDIEQMDRETLDKLAYVLTLNTEREGIQEALEHEFADGSFSQKQVDELVQFRKANSSIFGKGWHNFSVKLMMELIPELYETSEEQMTILTRLGKQKTTSSSNKTKYIDEKLLTEEIYNPVVAKSVRQAIKIVNAAIKEYGDFDNIVIEMARETNEDDEKKAIQKIQKANKDEKDAAMLKAANQYNGKAELPHSVFHGHKQLATKIRLWHQQGERCLYTGKTISIHDLINNSNQFEVDHILPLSITFDDSLANKVLVYATANQEKGQRTPYQALDSMDDAWSFRELKAFVRESKTLSNKKKEYLLTEEDISKFDVRKKFIERNLVDTRYASRVVLNALQEHFRAHKIDTKVSVVRGQFTSQLRRHWGIEKTRDTYHHHAVDALIIAASSQLNLWKKQKNTLVSYSEDQLLDIETGELISDDEYKESVFKAPYQHFVDTLKSKEFEDSILFSYQVDSKFNRKISDATIYATRQAKVGKDKADETYVLGKIKDIYTQDGYDAFMKIYKKDKSKFLMYRHDPQTFEKVIEPILENYPNKQINEKGKEVPCNPFLKYKEEHGYIRKYSKKGNGPEIKSLKYYDSKLGNHIDITPKDSNNKVVLQSVSPWRADVYFNKTTGKYEILGLKYADLQFEKGTGTYKISQEKYNDIKKKEGVDSDSEFKFTLYKNDLLLVKDTETKEQQLFRFLSRTMPKQKHYVELKPYDKQKFEGGEALIKVLGNVANSGQCKKGLGKSNISIYKVRTDVLGNQHIIKNEGDKPKLDF

SEQ ID NO: 592 - protein, 1122 aa, Streptococcus thermophilus
MSDLVLGLDIGIGSVGVGILNKVTGEIIHKNSRIFPAAQAENNLVRRTNRQGRRLTRRKKHRIVRLNRLFEESGLITDFTKISINLNPYQLRVKGLTDELSNEELFIALKNMVKHRGISYLDDASDDGNSSVGDYAQIVKENSKQLETKTPGQIQLERYQTYGQLRGDFTVEKDGKKHRLINVFPTSAYRSEALRILQTQQEFNSQITDEFINRYLEILTGKRKYYHGPGNEKSRTDYGRYRTNGETLDNIFGILIGKCTFYPDEFRAAKASYTAQEFNLLNDLNNLTVPTETKKLSKEQKNQIINYVKNEKVMGPAKLFKYIAKLLSCDVADIKGHRIDKSGKAEIHTFEAYRKMKTLETLDIEQMDRETLDKLAYVLTLNTEREGIQEALEHEFADGSFSQKQVDELVQFRKANSSIFGKGWHNFSVKLMMELIPELYETSEEQMTILTRLGKQKTTSSSNKTKYIDEKLLTEEIYNPVVAKSVRQAIKIVNAAIKEYGDFDNIVIEMARETNEDDEKKAIQKIQKANKDEKDAAMLKAANQYNGKAELPHSVFHGHKQLATKIRLWHQQGERCLYTGKTISIHDLINNPNQFEVDHILPLSITFDDSLANKVLVYATANQEKGQRTPYQALDSMDDAWSFRELKAFVRESKTLSNKKKEYLLTEEDISKFDVRKKFIERNLVDTRYASRVVLNALQEHFRAHKIDTKVSVVRGQFTSQLRRHWGIEKTRDTYHHHAVDALIIAASSQLNLWKKQKNTLVSYSEEQLLDIETGELISDDEYKESVFKAPYQHFVDTLKSKEFEDSILFSYQVDSKFNRKISDATIYATRQAKVGKDKKDETYVLGKIKDIYTQDGYDAFMKIYKKDKSKFLMYRHDPQTFEKVIEPILENYPNKEMNEKGKEVPCNPFLKYKEEHGYIRKYSKKGNGPEIKSLKYYDSKLLGNPIDITPENSKNKVVLQSLKPWRTDVYFNKNTGKYEILGLKYADLQFEKKTGTYKISQEKYNGIMKEEGVDSDSEFKFTLYKNDLLLVKDTETKEQQLFRFLSRTMPNVKYYVELKPYSKDKFEKNESLIEILGSADKSGRCIKGLGKSNISIYKVRTDVLGNQHIIKNEGDKPKLDF

SEQ ID NO: 593 - protein, 1388 aa, Streptococcus thermophilus
MTKPYSIGLDIGTNSVGWAVITDNYKVPSKKMKVLGNTSKKYIKKNLLGVLLFDSGITAEGRRLKRTARRRYTRRRNRILYLQEIFSTEMATLDDAFFQRLDDSFLVPDDKRDSKYPIFGNLVEEKAYHDEFPTIYHLRKYLADSTKKADLRLVYLALAHMIKYRGHFLIEGEFNSKNNDIQKNFQDFLDTYNAIFESDLSLENSKQLEEIVKDKISKLEKKDRILKLFPGEKNSGIFSEFLKLIVGNQADFRKCFNLDEKASLHFSKESYDEDLETLLGYIGDDYSDVFLKAKKLYDAILLSGFLTVTDNETEAPLSSAMIKRYNEHKEDLALLKEYIRNISLKTYNEVFKDDTKNGYAGYIDGKTNQEDFYVYLKNLLAEFEGADYFLEKIDREDFLRKQRTFDNGSIPYQIHLQEMRAILDKQAKFYPFLAKNKERIEKILTFRIPYYVGPLARGNSDFAWSIRKRNEKITPWNFEDVIDKESSAEAFINRMTSFDLYLPEEKVLPKHSLLYETFNVYNELTKVRFIAESMRDYQFLDSKQKKDIVRLYFKDKRKVTDKDIIEYLHAIYGYDGIELKGIEKQFNSSLSTYHDLLNIINDKEFLDDSSNEAIIEEIIHTLTIFEDREMIKQRLSKFENIFDKSVLKKLSRRHYTGWGKLSAKLINGIRDEKSGNTILDYLIDDGISNRNFMQLIHDDALSFKKKIQKAQIIGDEDKGNIKEVVKSLPGSPAIKKGILQSIKIVDELVKVMGGRKPESIVVEMARENQYTNQGKSNSQQRLKRLEKSLKELGSKILKENIPAKLSKIDNNALQNDRLYLYYLQNGKDMYTGDDLDIDRLSNYDIDHIIPQAFLKDNSIDNKVLVSSASNRGKSDDFPSLEVVKKRKTFWYQLLKSKLISQRKFDNLTKAERGGLLPEDKAGFIQRQLVETRQITKHVARLLDEKFNNKKDENNRAVRTVKIITLKSTLVSQFRKDFELYKVREINDFHHAHDAYLNAVIASALLKKYPKLEPEFVYGDYPKYNSFRERKSATEKVYFYSNIMNIFKKSISLADGRVIERPLIEVNEETGESVWNKESDLATVRRVLSYPQVNVVKKVEEQNHGLDRGKPKGLFNANLSSKPKPNSNENLVGAKEYLDPKKYGGYAGISNSFAVLVKGTIEKGAKKKITNVLEFQGISILDRINYRKDKLNFLLEKGYKDIELIIELPKYSLFELSDGSRRMLASILSTNNKRGEIHKGNQIFLSQKFVKLLYHAKRISNTINENHRKYVENHKKEFEELFYYILEFNENYVGAKKNGKLLNSAFQSWQNHSIDELCSSFIGPTGSERKGLFELTSRGSAADFEFLGVKIPRYRDYTPSSLLKDATLIHQSVTGLYETRIDLAKLGEG

SEQ ID NO: 594 - protein, 1121 aa, Streptococcus thermophilus
MSDLVLGLDIGIGSVGVGILNKVTGEIIHKNSRIFPAAQAENNLVRRTNRQGRRLTRRKKHRRVRLNRLFEESGLITDFTKISINLNPYQLRVKGLTDELSNEELFIALKNMVKHRGISYLDDASDDGNSSVGDYAQIVKENSKQLETKTPGQIQLERYQTYGQLRGDFTVEKDGKKHRLINVFPTSAYRSEALRILQTQQEFNPQITDEFVNRYLEILTGKRKYYHGPGNEKSRTDYGRYRTNGETLDNIFGILIGKCTFYPEEFRAAKASYTAQEFNLLNDLNNLTVPTETKKLSKEQKNQIINYVKNEKAMGPAKLFKYIAKLLSCDVADIKGYRIDKSGKAEIHTFEAYRKMKTLETLDIEQMDRETLDKLAYVLTLNTEREGIQEALEHEFADGSFSQKQVDELVQFRKANSSIFGKGWHNFSVKLMMELIPELYETSEEQMTILKRLGKQKTTSSSNKTKYIDEKLLTEEIYNPVVAKSIRQAIKIVNAAIKEYGDFDNIVIEMARETNEDDEKKAIQKIQKANKDEKDAAMLKAANQYNGKAELPHSVFHGHKQLATKIRLWHQQGERCLYTGKTISIHDLINNPNQFEVDHILPLSITFDDSLANKVLVYATANQEKGQRTPYQALDSMDDAWSFRELKAFVRESKTLSNKKKEYLLTEEDISKFDVRKKFIERNLVDTRYASRVVLNALQEHFRAHKIDTKVSVVRGQFTSQLRRHWGIEKTRDTYHHHAVDALIIAASSQLNLWKKQKNTLVSYSEDQLLDIETGELISDDEYKESVFKAPYQHFVDTLKSKEFEDSILFSYQVDSKFNRKISDATIYATRQAKVGKDKKDETYVLGKIKDIYTQDGYDAFMKIYKKDKSKFLMYRHDPQTFEKVIEPILENYPNKEMNEKGKEVPCNPFLKYKEEHGYIRKYSKKGNDPEIKSLKYYDSKLGNHIDITPKDSNNKVVLQSVSPWRADVYFNKTTGKYEILGLKYADLQFEKGTGTYKISQEKYNDIKKKEGVDSDSEFKFTLYKNDLLLVKDTETKEQQLFRFLSRTMPKQKHYVELKPYDKQKFEGGEALIKVLGNVANSGQCKKGLGKSNISIYKVRTDVLGNQHIIKNEGDKPKLDF

SEQ ID NO: 595 - protein, 1122 aa, Streptococcus thermophilus
  source 1..1122: note = Streptococcus thermophilus MTCC 5460
MSDLVLGLDIGIGSVGVGILNKVTGEIIHKNSRIFPAAQAENNVERRTNRQGRRLTRRKKHRRVRLNRLFEESGLITDFTKISINLNPYQLRVRGLTDELSNEELFIALKNMVKHRGISYLDDASDDGNSSVGDYAQIVKENSKQLETKTPGQIQLERYQTYGQLRGDFTVEKDGKKHRLINVFPTSAYRSEALRILQTQQEFNSQITDEFINRYLEILTGKRKYYHGPGNEKSRTDYGRYRTSGETLDNIFGILIGKCTFYPEEFRAAKASYTAQEFNLLNDLNNLTVPTETKKLSKEQKNQIINYVKNEKAMGPAKLFKYIAKLLSCDVADIKGYRIDKSGKAEIHTFEAYRKMKTLETLDIEQMDRETLDKLAYVLTLNTEREGIQEALEHEFADGSFSQKQVDELVQFRKASSSIFGKGWHNFSVKLMMELIPELYETSEEQMTILTRLGKQKTTSSSNKTKYIDEKLLTEEIYNPVVAKSVRQAIKIVNAAIKEYGDFDNIVIEMARETNEDDEKKAIQKIQKANKDEKDAAMLKAANQYNGKAELPHSVFHGHKQLATKIRLWHQQGERCLYTGKTISIHDLINNPNQFEVDHILPLSITFDDSLANKVLVYATANQEKGQRTPYQALDSMDDAWSFRELKAFVRESKTLSNKKKEYLLTEEDISKFDVRKKFIERNLVDTRYASRVVLNALQEHFRAHKIDTKVSVVRGQFTSQLRRHWGIEKTRDTYHHHAVDALIIAASSQLNLWKKQKNTLVSYSEDQLLDIETGELISDDEYKESVFKAPYQHFVDTLKSKEFEDSILFSYQVDSKFNRKLSDATIYATRQAKVGKDKKDETYVLGKIKDIYTQDGYDAFMKIYKKDKSKFLMYRHDPQTFEKVIEPILENYPNKEMNEKGKEVPCNPFLKYKEEHGYIRKYSKKGNGPEIKSLKYYDSKLLGNPIDITPENSKNKVVLQSLKPWRADVYFNKTTGKYEILGLKYADLQFEKKTGTYKISQEKYNGIMKEEGVDSDSEFKFTLYKNDLLLVKDTETKEQQLFRFLSRTMPNVKYYVELKPYSKDKFEKNESLIEILGSADKSGRCIKGLGKSNISIYKVRTDVLGNQHIIKNEGDKPKLDF

SEQ ID NO: 596 - protein, 1121 aa, Streptococcus thermophilus
MSDLVLGLDIGIGSVGVGILNKVTGEIIHKNSRIFPAAQAENNLVRRTNRQGRRLTRRKKHRIVRLNRLFEESGLITDFTKISINLNPYQLRVKGLTDELSNEELFIALKNMVKHRGISYLDDASDDGNSSVGDYAQIVKENSKQLETKTPGQIQLERYQTYGQLRGDFTVEKDGKKHRLINVFPTSAYRSEALRILQTQQEFNPQITDEFINRYLEILTGKRKYYHGPGNEKSRTDYGRYRTSGETLDNIFGILIGKCTFYPDEFRAAKASYTAQEFNLLNDLNNLTVPTETKKLSKEQKNQIINYVKNEKAMGPAKLFKYIAKLLSCDVADIKGYRIDKSGKAEIHTFEAYRKMKTLETLDIEQMDRETLDKLAYVLTLNTEREGIQEALEHEFADGSFSQKQVDELVQFRKANSSIFGKGWHNFSVKLMMELIPELYETSEEQMTILTRLGKQKTTSSSNKTKYIDEKLLTEEIYNPVVAKSVRQAIKIVNAAIKEYGDFDNIVIEMARETNEDDEKKAIQKIQKANKDEKDAAMLKAANQYNGKAELPHSVFHGHKQLATKIRLWHQQGERCLYTGKTISIHDLINNSNQFEVDHILPLSITFDDSLANKVLVYATANQEKGQRTPYQALDSMDDAWSFRELKAFVRESKTLSNKKKEYLLTEEDISKFDVRKKFIERNLVDTRYASRVVLNALQEHFRAHKIDTKVSVVRGQFTSQLRRHWGIEKTRDTYHHHAVDALIIAASSQLNLWKKQKNTLVSYSEDQLLDIETGELISDDEYKESVFKAPYQHFVDTLKSKEFEDSILFSYQVDSKFNRKISDATIYATRQAKVGKDKADETYVLGKIKDIYTQDGYDAFMKIYKKDKSKFLMYRHDPQTFEKVIEPILENYPNKQMNEKGKEVPCNPFLKYKEEHGYIRKYSKKGNGPEIKSLKYYDSKLGNHIDITPKDSNNKVVLQSVSPWRADIYFNNTTGKYEILGLKYADLQFEKGTGTYKISQEKYNDIKKKEGVDSDSEFKFTLYKNDLLLVKETETKEQQLFRFLSRTMPKQKHYVELKPYDKQKFEGGEALIKVLGNVANGGQCIKGLGKSNISIYKVRTDVLGNQHIIKNEGDKPKLDF

SEQ ID NO: 597 - protein, 1388 aa, Streptococcus thermophilus
MTKPYSIGLDIGTNSVGWAVITDNYKVPSKKMKVLGNTSKKYIKKNLLGVLLFDSGITAEGRRLKRTARRRYTRRRNRILYLQEIFSTEMATLDDAFFQRLDDSFLVPDDKRDSKYPIFGNLVEEKAYHDEFPTIYHLRKYLADSTKKADLRLVYLALAHMIKYRGHFLIEGEFNSKNNDIQKNFQDFLDTYNAIFESDLSLENSKQLEEIVKDKISKLEKKDRILKLFPGEKNSGIFSEFLKLIVGNQADFRKCFNLDEKASLHFSKESYDEDLETLLGYIGDDYSDVFLKAKKLYDAILLSGFLTVTDNETEAPLSSAMIKRYNEHKEDLALLKEYIRNISLKTYNEVFKDDTKNGYAGYIDGKTNQEDFYVYLKNLLAEFEGADYFLEKIDREDFLRKQRTFDNGSIPYQIHLQEMRAILDKQAKFYPFLAKNKERIEKILTFRIPYYVGPLARGNSDFAWSIRKRNEKITPWNFEDVIDKESSAEAFINRMTSFDLYLPEEKVLPKHSLLYETFNVYNELTKVRFIAESMRDYQFLDSKQKKDIVRLYFKDKRKVTDKDIIEYLHAIYGYDGIELKGIEKQFNSSLSTYHDLLNIINDKEFLDDSSNEAIIEEIIHTLTIFEDREMIKQRLSKFENIFDKSVLKKLSRRHYTGWGKLSAKLINGIRDEKSGNTILDYLIDDGISNRNFMQLIHDDALSFKKKIQKAQIIGDEDKGNIKEVVKSLPGSPAIKKGILQSIKIVDELVKVMGGRKPESIVVEMARENQYTNQGKSNSQQRLKRLEKSLKELGSKILKENIPAKLSKIDNNALQNDRLYLYYLQNGKDMYTGDDLDIDRLSNYDIDHIIPQAFLKDNSIDNKVLVSSASNRGKSDDFPSLEVVKKRKTFWYQLLKSKLISQRKFDNLTKAERGGLLPEDKAGFIQRQLVETRQITKHVARLLDEKFNNKKDENNRAVRTVKIITLKSTLVSQFRKDFELYKVCEINDFHHAHDAYLNAVIASALLKKYPKLEPEFVYGDYPKYNSFRERKSATEKVYFYSNIMNIFKKSISLADGRVIERPLIEVNEETGESVWNKESDLATVRRVLSYPQVNVVKKVEEQNHGLDRGKPKGLFNANLSSKPKPNSNENLVGAKEYLDPKKYGGYAGISNSFAVLVKGTIEKGAKKKITNVLEFQGISILDRINYRKDKLNFLLEKGYKDIELIIELPKYSLFELSDGSRRMLASILSTNNKRGEIHKGNQIFLSQKFVKLLYHAKRISNTINENHRKYVENHKKEFEELFYYILEFNENYVGAKKNGKLLNSAFQSWQNHSIDELCSSFIGPTGSERKGLFELTSRGSAADFEFLGVKIPRYRDYTPSSLLKDATLIHQSVTGLYETRIDLAKLGEG

SEQ ID NO: 598 - protein, 1128 aa, Streptococcus vestibularis
  source 1..1128: note = Streptococcus vestibularis ATCC 49124
MSDLVLGLDIGIGSVGVGILNKVTGEIIHKNSRIFPAAQAENNVERRTNRQGRRLTRRKKHRRVRLNHLFEESGLITDFTKVSINLNPYQLRVKGLIDELSNEELFIALKNMVKHRGISYLDDASDDGNSSVGDYAQIVKENSKQLETKTPGQIQLERYQKYGQLRGDFTVEEDGKKHRLINVFPTSAYRSEALRILQTQKEFNPQITDEFINRYLEILTGKRKYYHGPGNEKSRTDYGRYTTKKDSENEYITLDNIFGILIGKCTFYPEEYRAAKASYTAQEFNLLNDLNNLTVPTETKKLSEEQKNQIINYVKNEKAMGPAKLFKYIAKLLSCDVADIKGYRIDKSDKAEIHTFEAYRKMKTLETIDFEKMSRDQLDKLAYVLTLNTEREGIQEALDHEFADGNFSQEQIDELVQFRKANSSIFGKGWHNFSVKLMMELIPELYATSEEQMTILTRLGKQKTTSSSNKTKYIDEKLLTEEIYNPVVAKSVRQAIKIVNAAIKEYGDFDNIVIEMARETNEDDEKKAIQKIQKANKDEKDAAMLKAANQYNGRAELPHSVFHGHKQLATKIRLWHQQGERCLYTGKTISIHDLINNPNQFEIDHILPLSITFDDSLANKVLVYATANQEKGQRTPYQALDSMDDAWSFRELKAFVRESKSLSNKKKEYLLTEEDISRFDVRKKFIERNLVDTRYASRVVLNALQEHFRAHKTDTKVSVVRGQFTSQLRRHWGIEKTRDTYHHHAVDALIIAASSQLNLWKKQKNTLVNYSENQLLDIETGELISDDEYKESVFKAPYQHFVDTLKSKEFEDSILFSYQVDSKFNRKISDATIYATRQAKVGKDKKDETYVLGKIKDIYSQTGYDAFIKIYQKDKSKFLMYRHDPQTFEKVIEPILENYPNKEMNEKGKEVPCNPFLKYKEEHGDYIRKYSKKGNGPEIKSLKYYDSKLGNHIDITPKDSNNKVVLQSVSPWRADVYFNKTTGKYEILGLKYADLQFEKGTGTYKISQEKYNVIKKKEGVDSDSEFKFTLYKNDLLLIKDTETKEQQLFRFLSRTKPNVKHYVELKPYDKQKFEGNESLINVLGAVAKGGQCQKGINKPNISIYKVRTDVLGNQHIIKNEGDKPKLDF

SEQ ID NO: 599 - protein, 1084 aa, Subdoligranulum sp.
  source 1..1084: note = Subdoligranulum sp. 4_3_54A2FAA
MKNTLYGIGLDIGVASVGWAVVGLNGTGEPVGLHRLGVRIFDKAEQPKTGESLAAPRRMARGMRRRLRRKALRRADVYALLERSGLSTREELAQMFEAGGLEDIYALRTRALDEPVGKAEFSRILLHLAQRRGFKSNRRTASDGEDGRLLAAVNENRRRMAQGGWRTVGEMLYRHEAFALHKRNKADDYLSTVGRDMVAEEASILFERQRAMGCSWAAPELQAEYLSILLRQRSFDEGPGGNSPYGGNQVEKMVGRCTFEPDEPRAAKAAYSFEYFSLLQKLNHIRLAENGETRPLTQPQRQQLLSLAHKTPDISLARIRKELALPETVQFNGVRCRANETLEESEKKEKFACLPAYHKMRKALDGVVKGRISSLSISQRDAAATALSLYKNEDTLRAKLTEAGFQAPEIDALAGLTGFSKFGHLSLKACRKLIPHLEQGLTYDQACTAAGYDFKGHGAGERAFTLPAAAPEMEQITSPVVRRAVAQTIKVVNGIIREMDASPAWVRIELARELSKTFGERQEMDRSMRENAAQNERLMQELRDTFHLLSPTGQDLVKYRLWKEQDGVCAYSLRRLDVERLFEPGYVDVDHIVPYSLSFDDRRSNKVLVLSSENRQKGNRLPLQYLQGKRREDFIVWTNSSVHDYRKRQNLLREKLSGDEAEGFRQRNLQDTQHMARFLYNYISDHLAFAQSEALGKKRVFAVSGAVTSHLRKRWGLSKVRADGDLHHALDAAVVACTTDGMIRRISGYYGHIEGEYLQDADGAGSQHARTKERFPAPWPRFRDELIVRLSEQPAEPLLDINPEFYCEYGTEHIRPVFVSRMPRRKVTGPGHKETIKGAAAADEGLLTVRKALTELKLDKDGEIKDYYMPSSDTLLYEALKAQLRRFGGDGKKAFAEPFYKPKADGTPGPLVRKVKTTEKATLTVPVHGGAASNDTMVRVDVFLVPGDGYYWVPVYTADTLKPELPNRAVVQGKPYSEWKEMREEDFIFSLYPNDLVYVEHKSGLKFTLQNADSTLEKTRTQTSAFAYFVSGSISTASITIRTHDNAYGIPSLGVKTLKTFHKYQVDVLGNVFPVHKETRQKFR

SEQ ID NO: 600 - protein, 1422 aa, Sutterella wadsworthensis
  source 1..1422: note = Sutterella wadsworthensis 3_1_45B
MTQSERRFSCSIGIDMGAKYTGVFYALFDREELPTNLNSKAMTLVMPETGPRYVQAQRTAVRHRLRGQKRYTLARKLAFLVVDDMIKKQEKRLTDEEWKRGREALSGLLKRRGYSRPNADGEDLTPLENVRADVFAAHPAFSTYFSEVRSLAEQWEEFTANISNVEKFLGDPNIPADKEFIEFAVAEGLIDKTEKKAYQSALSTLRANANVLTGLRQMGHKPRSEYFKAIEADLKKDSRLAKINEAFGGAERLARLLGNLSNLQLRAERWYFNAPDIMKDRGWEPDRFKKTLVRAFKFFHPAKDQNKQHLELIKQIENSEDIIETLCTLDPNRTIPPYEDQNNRRPPLDQTLLLSPEKLTRQYGEIWKTWSARLTSAEPTLAPAAEILERSTDRKSRVAVNGHEPLPTLAYQLSYALQRAFDRSKALDPYALRALAAGSKSNKLTSARTALENCIGGQNVKTFLDCARRYYREADDAKVGLWFDNADGLLERSDLHPPMKKKILPLLVANILQTDETTGQKFLDEIWRKQIKGRETVASRCARIETVRKSFGGGFNIAYNTAQYREVNKLPRNAQDKELLTIRDRVAETADFIAANLGLSDEQKRKFANPFSLAQFYTLIETEVSGFSATTLAVHLENAWRMTIKDAVINGETVRAAQCSRLPAETARPFDGLVRRLVDRQAWEIAKRVSTDIQSKVDFSNGIVDVSIFVEENKFEFSASVADLKKNKRVKDKMLSEAEKLETRWLIKNERIKKASRGTCPYTGDRLAEGGEIDHILPRSLIKDARGIVFNAEPNLIYASSRGNQLKKNQRYSLSDLKANYRNEIFKTSNIAAITAEIEDVVTKLQQTHRLKFFDLLNEHEQDCVRHALFLDDGSEARDAVLELLATQRRTRVNGTQIWMIKNLANKIREELQNWCKTTNNRLHFQAAATNVSDAKNLRLKLAQNQPDFEKPDIQPIASHSIDALCSFAVGSADAERDQNGFDYLDGKTVLGLYPQSCEVIHLQAKPQEEKSHFDSVAIFKEGIYAEQFLPIFTLNEKIWIGYETLNAKGERCGAIEVSGKQPKELLEMLAPFFNKPVGDLSAHATYRILKKPAYEFLAKAALQPLSAEEKRLAALLDALRYCTSRKSLMSLFMAANGKSLKKREDVLKPKLFQLKVELKGEKSFKLNGSLTLPVKQDWLRICDSPELADAFGKPCSADELTSKLARIWKRPVMRDLAHAPVRREFSLPAIDNPSGGFRIRRTNLFGNELYQVHAINAKKYRGFASAGSNVDWSKGILFNELQHENLTECGGRFITSADVTPMSEWRKVVAEDNLSIWIAPGTEGRRYVRVETTFIQASHWFEQSVENWAITSPLSLPASFKVDKPAEFQKAVGTELSELLGQPRSEIFIENVGNAKHIRFWYIVVSSNKKMNESYNNVSKS

SEQ ID NO: 601 - protein, 1049 aa, Tistrella mobilis
MINERLTFGIDLGIGSCGWAVLRHADAAGEPGVIEGLGSWCFDVPETSKERIPTNQVRRSNRLLRRVIRRRRNRMAEIRRLFHAQGLLPSADEDALKRPRLDPWELRARGLDQCLSAEEFAVALGHIARHRGFRSSAKRKAANTSGEDSKMLSALLVTRERTARYRTVGEMFARDPEYSARRRNRDGIFDRTVARDDLIHEVGKLFEAQRARGSAFASPDLEADFNAIAFRQAEMQDSERLVGNCPFERDEKRAARWAPSFERFRLLTRLINLRIATAEGERRFTPEDLARVSAELGATAKLPVSRVRALIGLLPDERFTTIRVEDEDRDIVARTGEAAPGTWRLRKTLGEALWAEMQARPDQLDAIAHVLSFFEATAKIRSELDRLGLPAAVIEALDRGLEDGAFAKFKGAGHISAKACRNLLPHLQQGHRYDQACRLAGYDHAASTLSHTAQVVSKAGFNALVTELGESIANPIARKALTEGLKQIRAMCARWGLPGAIHIELAREVGNSIEKRRELESQRETTTKRRQTERDEIRGLLALEDVDDDTLLRYRLWKEQGGKCLYTGKDIHVRQLIATDNSVQVDHILPWSRFGDDSFNNKTLCLASANQRKRGQTPWEWFSLTGTPEAWEVFASRVETSKDLRGFKKRNLLLKNADEVAQRFRSRNLNDTRYAARLLAEAAKLFYPAGDRQEKDGRRRVLTRPGPLTAALRHAWGLESLKKADGKRVSDDRHHALDALAVAAISEREVQRLTRSFQEWEQQGLARPLRHVAPPWPGFRGDVLAAYAQAFVARPERRRARGKGHDASIRQVVGEGPEAQVFERRGLADLKEADLDRVKDPERNQAIIEAVRAWILAGRPADAPPRSPRGDVIVKLRTAPAKKIKPAVPVRGGTADRGDMVRIDVFTRPNRKGRDEWYLVPIYPHQVMNRKAWPHPPMRSVVAYKDEAGWTEIGAEHSFRFSLYPRSYVQLVKSNGDVIEGYLVSMDRSTGAFRVFVHNNPAEMAKGIGAKTLLNLRKFNVDRFGVRTEVKSEVRTWHGEVCTSPVPPD

SEQ ID NO: 602 - protein, 1395 aa, Treponema denticola
  source 1..1395: note = Treponema denticola AL-2
MKKEIKDYFLGLDVGTGSVGWAVTDTDYKLLKANRKDLWGMRCFETAETAEVRRLHRGARRRIERRKKRIKLLQELFSQEIAKIDEGFFQRMKESPFYAEDKTILQENALFNDKDFTDKTYHKAYPTINHLIKAWIENKVKPDPRLLYLACHNIIKKRGHFLFEGDFDSENQFDTSIQALFEYLREDMEVDIDADSQKVKEILKDSSLKNSEKQSRLNKILGLKPSDKQKKAITNLISGNKINFADLYDNPDLKDAEKNSISFSKDDFDALSDDLASILGDSFELLLKAKAVYNCSVLSKVIGDEQYLSFAKVKIYEKHKTDLTKLKAVIKKHFPNNYKKVFGYNQDNESKNNYSGYVGVCKTKNKKLVINNSVNQEDFYKFLKPILSAKSEIKEVNDILAEIETGNFLPKQISKSNAEIPYQLRKMELEKILSNAEKHFSFLKQKDEKGLSHSEKIIMLLTFKIPYYIGPINDNHKKSFPDRCWVVKKEKSPSGKTTPWNFFDHIDKEKTAEEFITSRTNFCTYLIGESVLPKNSLLYSEYTVLNEINNLQIIIDGKNICDTKLKQKIYEDLFKKYKKITQKQISTFIKHEGICNKTDEVIILGIDKECTSSLKSYIELKNIFGKQVDEISTKNMLEEIIRWATIYDEGEGKTILKTKIKAEYGKYCSDEQIKKILNLKFSGWGRLSRKFLETVTSEMPGFSEPVNIITAMRETQNNLMELLSSEFKFTENIKKINSGFEDAEKQFSYDGLVKPLFLSPSVKKMLWQTLKLVKEISHITQAPPKKIFIEMAKGAELEPARTKTRLKILQDLYSSCKNDADAFSSEIQYLSGKIENEDNLRLRSDKLYLYYTQLGKCMYCGKPIEIGHVFDTSNYDIDHIYPQSKIKDDSISNRVLVCSSCNKNKEDKYPLKSEIQSKQRGFWNFLQRNNFISLEKLNRLTRTTPISDDETAKFIARQLVETRQATKVAAKVLEKMFPETKIVYSKAETVSMFRNKFDIIKCREINDFHHAHDAYLNIVVGNVYNTKFTNNPWNFIKEKRDNPKIADTYNYYKVFDYDVKRNNITAWEKGKTIITVKDMLKRNTPIYTRQAACKKGGLFDQTIMKKGLGQHPLKKEGPFSNISKYGGYNKVSAAYYTLIEYEEKGNKIRSLETIPLYLVKDIQKDQDVLKSYLTDLLGKKEFKILVPKIKINSLLKINGFPCHITGKTNDSFLLRPAVQFCCSNDEVLYFKKIIRFSEIRSQREKIGKTISPYEDLSFRSYIKENLCKKTKNDEIGEKEFYDLLQKKNLEIYDMLLTKHKDTIYKKRPNSATIDILVKGKEKFKSLIIENQFEVILEILKLFSATRNVSELQHIGGSKYSGVAKIGNKISSLDNCILIYQSITGIFEKRIDLLKV

SEQ ID NO: 603 - protein, 1395 aa, Treponema denticola
  source 1..1395: note = Treponema denticola ASLM
MKKEIKDYFLGLDVGTGSVGWAVTDTDYKLLKANRKDLWGMRCFETAETAEVRRLHRGARRRIERRKKRIKLLQELFSQEIAKIDEGFFQRMKESPLYAEDKTILQENTLFNDKDFTDKTYHKAYPTINHLIKAWIENKVKPDPRLLYLACHNIIKKRGHFLFEGDFDSENQFDTSIQALFEYLREDMEVDIDADSQKVKEILKDSSLKNSEKQSRLNKMLGLKPSDKQKKAITNLISGNKINFADLYDNPDLKDAEKNSISFSKDDFDALSDDLASILGDSFELLLKAKAVYNCSVLSKVIGDEQYLSFAKVKIYEKHKTDLTKLKNVIKKHFPKDYKKVFGYNKNEKNNNNYSGYVGVCKTKSKKLIINNSVNQEDFYKFLKTILSAKSEIKEVNDILTEIETGTFLPKQISKSNAEIPYQLRKMELEKILSNAEKHFSFLKQKDEKGLSHSEKIIMLLTFKIPYYIGPINDNHKKSFPDRCWVVKKEKSPSGKTTPWNFFDHIDKEKTAEEFITSRTNFCTYLIGESVLPKNSLLYSEYTVLNEINNLQIIIDGKNICDTKLKQKIYEELFKKYKKITQKQISTFIKHEGICNKTDEVIILGIDKECTSSLKSYIELKNIFGKQVDEISTKNMLEEIIRWATIYDEGEGKTILKTKIKAEYGKYCSDEQIKKILNLKFSGWGRLSRKFLETVTSEMPGFSEPVNIITAMRETQNNLMELLSSEFKFTENIKKINSGFEDVEKQFSYDGLVKPLFLSPSVKKMLWQTLKLVKEISHITQAPPKKIFIEMAKGAELDPVRTKTRLKILQDLYNNCKNDADAFSSEIKDLSGKIENEDNLRLRSDKLYLYYTQLGKCMYCGKPIEIGHVFDTSNYDIDHIYPQSKIKDDSISNRVLVCSSCNKNKEDKYPLKAEIQSKQRGFWNFLQRNNFISLEKFNRLTRATPISDDETAKFIARQLVETRQATKVAARVLEKMFPETKIVYSKAETVSMFRNKFDIVKCREINDFHHAHDAYLNIVVGNVYNTKFTNNLWNFIKEKRDNPKIADTYNYYKVFDYDVKRNNITAWEKGKTIITVKDMLKRNTPIYTRQAACKKGGLFDQTIMKKGLGQHPLKKEGPFSNISKYGGYNKVSAAYYTLIEYEEKGNKIRSLETIPLYLVKDIQKDQDVLKSYLTDLLGKKEFKILVPKIKINSLLKINGFPCHITGKTNDSFLLRPAVQFCCSNDEVLYFKKIIRFSEIRSQREKIGKTISPYEDLSFRSYIKENLCKKTKNDEIGEKEFYDLLQKKNLEIYDMLLTKHKDTIYKKRPNSATIDILVKGKEKFKSLIIENQFEVILEILKLFSATRNVSDLQHIGGSKYSGVAKIGNKISSLDNCILIYQSITGIFEKRIDLLKV

SEQ ID NO: 604 - protein, 1395 aa, Treponema denticola
  source 1..1395: note = Treponema denticola ATCC 35405
MKKEIKDYFLGLDVGTGSVGWAVTDTDYKLLKANRKDLWGMRCFETAETAEVRRLHRGARRRIERRKKRIKLLQELFSQEIAKTDEGFFQRMKESPFYAEDKTILQENTLFNDKDFADKTYHKAYPTINHLIKAWIENKVKPDPRLLYLACHNIIKKRGHFLFEGDFDSENQFDTSIQALFEYLREDMEVDIDADSQKVKEILKDSSLKNSEKQSRLNKILGLKPSDKQKKAITNLISGNKINFADLYDNPDLKDAEKNSISFSKDDFDALSDDLASILGDSFELLLKAKAVYNCSVLSKVIGDEQYLSFAKVKIYEKHKTDLTKLKNVIKKHFPKDYKKVFGYNKNEKNNNNYSGYVGVCKTKSKKLIINNSVNQEDFYKFLKTILSAKSEIKEVNDILTEIETGTFLPKQISKSNAEIPYQLRKMELEKILSNAEKHFSFLKQKDEKGLSHSEKIIMLLTFKIPYYIGPINDNHKKFFPDRCWVVKKEKSPSGKTTPWNFFDHIDKEKTAEAFITSRTNFCTYLVGESVLPKSSLLYSEYTVLNEINNLQIIIDGKNICDIKLKQKIYEDLFKKYKKITQKQISTFIKHEGICNKTDEVIILGIDKECTSSLKSYIELKNIFGKQVDEISTKNMLEEIIRWATIYDEGEGKTILKTKIKAEYGKYCSDEQIKKILNLKFSGWGRLSRKFLETVTSEMPGFSEPVNIITAMRETQNNLMELLSSEFTFTENIKKINSGFEDAEKQFSYDGLVKPLFLSPSVKKMLWQTLKLVKEISHITQAPPKKIFIEMAKGAELEPARTKTRLKILQDLYNNCKNDADAFSSEIKDLSGKIENEDNLRLRSDKLYLYYTQLGKCMYCGKPIEIGHVFDTSNYDIDHIYPQSKIKDDSISNRVLVCSSCNKNKEDKYPLKSEIQSKQRGFWNFLQRNNFISLEKLNRLTRATPISDDETAKFIARQLVETRQATKVAAKVLEKMFPETKIVYSKAETVSMFRNKFDIVKCREINDFHHAHDAYLNIVVGNVYNTKFTNNPWNFIKEKRDNPKIADTYNYYKVFDYDVKRNNITAWEKGKTIITVKDMLKRNTPIYTRQAACKKGELFNQTIMKKGLGQHPLKKEGPFSNISKYGGYNKVSAAYYTLIEYEEKGNKIRSLETIPLYLVKDIQKDQDVLKSYLTDLLGKKEFKILVPKIKINSLLKINGFPCHITGKTNDSFLLRPAVQFCCSNNEVLYFKKIIRFSEIRSQREKIGKTISPYEDLSFRSYIKENLWKKTKNDEIGEKEFYDLLQKKNLEIYDMLLTKHKDTIYKKRPNSATIDILVKGKEKFKSLIIENQFEVILEILKLFSATRNVSDLQHIGGSKYSGVAKIGNKISSLDNCILIYQSITGIFEKRIDLLKV

SEQ ID NO: 605 - protein, 1395 aa, Treponema denticola
  source 1..1395: note = Treponema denticola H1-T
MKKEIKDYFLGLDVGTGSVGWAVTDTDYKLLKANRKDLWGMRCFETAETAEVRRLHRGARRRIERRKKRIKLLQELFSQEIAKIDEGFFQRMKESPFYAEDKTILQENALFNDKDFTDKTYHKAYPTINHLIKAWIENKVKPDPRLLYLACHNIIKKRGHFLFEGDFDSENQFDTSIQALFEYLREDMEVDIDADSQKVKEILKDSSLKNSEKQSRLNKILGLKPSDKQKKAITNLISGNKINFADLYDNPDLKDAEKNSISFSKDDFDALSDDLASILGDSFELLLKAKAVYNCSVLSKVIGDEQYLSFAKVKIYEKHKTDLTKLKAVIKKHFPNNYKKVFGYNQDNESKNNYSGYVGVCKTKNKKLVINNSVNQEDFYKFLKPILSAKSEIKEVNDILAEIETGNFLPKQISKSNAEIPYQLRKMELEKILSNAEKHFSFLKQKDEKGLSHSEKIIMLLTFKIPYYIGPINDNHKKSFPDRCWVVKKEKSPSGKTTPWNFFDHIDKEKTAEEFITSRTNFCTYLIGESVLPKNSLLYSEYTVLNEINNLQIIIDGKNICDTKLKQKIYEDLFKKYKKITQKQISTFIKHEGICNKTDEVIILGIDKECTSSLKSYIELKNIFGKQVDEISTKNMLEEIIRWATIYDEGEGKTILKTKIKAEYGKYCSDEQIKKILNLKFSGWGRLSRKFLETVTSEMPGFSEPVNIITAMRETQNNLMELLSSEFKFTENIKKINSGFEDAEKQFSYDGLVKPLFLSPSVKKMLWQTLKLVKEISHITQAPPKKIFIEMAKGAELEPARTKTRLKILQDLYSSCKNDADAFSSEIQYLSGKIENEDNLRLRSDKLYLYYTQLGKCMYCGKPIEIGHVFDTSNYDIDHIYPQSKIKDDSISNRVLVCSSCNKNKEDKYPLKSEIQSKQRGFWNFLQRNNFISLEKLNRLTRTTPISDDETAKFIARQLVETRQATKVAAKVLEKMFPETKIVYSKAETVSMFRNKFDIIKCREINDFHHAHDAYLNIVVGNVYNTKFTNNPWNFIKEKRDNPKIADTYNYYKVFDYDVKRNNITAWEKGKTIITVKDMLKRNTPIYTRQAACKKGELFNQTIMKKGLGQHPLKKEGPFSNISKYGGYNKVSAAYYTLIEYEEKVNKIRSLETIPLYLVKDIQKDQDVLKSYLTDLLGKKEIKILVPKIKINSLLKINGFPCHITGKTGDSFVLRPAVQFCCSNDEVLYFKKIIRFNEIRSQREKMGKTISPYEDLSFRSYIKENLCKKTKADEIGEKEFYDLLQKKNLEIYDMLLTKHKDTIYNKRPNSTTLGMLTKGRYEFINLKPKDQIIVMLEILKLFCTTREAIDLGLIKGKPAAGVATLGKKISNLDNCILIYQSITGIFEKRIDLLKV

SEQ ID NO: 606 - protein, 1395 aa, Treponema denticola
  source 1..1395: note = Treponema denticola H-22
MKKEIKDYFLGLDVGTGSVGWAVTDTDYKLLKANRKDLWGMRCFETAETAEVRRLHRGARRRIERRKKRIKLLQELFSQEIAKIDEGFFQRMKESPFYAEDKTILQENTLFNDKDFTDKTYHKAYPTINHLIKAWIENKVKPDPRLLYLACHNIIKKRGHFLFEGDFDSENQFDTSIQALFEYLREDMEVDIDADSQKVKEILKDSSLKNSEKQSRLNKILGLKPSDKQKKAITNLISGNKINFADLYDNPDLKDAEKNSISFSKDDFDALSDDLASILGDSFELLLKAKAVYNCSVLSKVIGDEQYLSFAKVKIYEKHKTDLTKLKNVIKKHFPKDYKKVFGYNKNEKNNNNYSGYVGVCKTKSKKLIINNSVNQEDFYKFLKTILSAKSEIKEVNDILTEIETGTFLPKQISKSNAEIPYQLRKMELEKILSNAEKHFSFLKQKDEKGLSHSEKIIMLLTFKIPYYIGPINDNHKKSFPDRCWVIKKEKSPSGKTTPWNFFDHIDKDKTAEAFITSRTNFCTYLVGESVLPKSSLLYSEYTVLNEINNLQIIIDGKNICDIKLKQKIYEELFKKYKKITQKQISTFIKHEGICNKTDEVIILGIDKECTSSLKSYIELKNIFGKQVDEISTKNMLEEIIRWATIYDEGEGKTILKTKIKAEYGKYCSDEQIKKILNLKFSGWGRLSRKFLETVTSEMPGFSEPVNIITAMRETQNNLMELLSSEFKFTENIKKINSGFEDAEKQFSYNGLVKPLFLSPSVKKMLWQTLKLVKEISHITQAPPKKIFIEMAKGAELEPARTKTRLKILQDLYNNCKNDADAFSSEIKDLSGKIENEDNLRLRSDKLYLYYTQLGKCMYCGKPIEIGHVFDTSNYDIDHIYPQSKIKDDSISNRVLVCSSCNKNKEDKYPLKSEIQSKQRGFWNFLQRNNFISLEKLNRLTRTTPISDDETAKFIARQLVETRQATKVAAKVLEKMFPETKIVYSKAETVSMFRNKFDIIKCREINDFHHAHDAYLNIVVGNVYNTKFTNNPWNFIKEKRDNPKIADTYNYYKVFDYDVKRNNITAWEKGKTIITVKDMLKRNTPIYTRQAACKKGGLFDQTIMKKGLGQHPLKKEGAFSNISKYGGYNKVSAAYYTLIEYEEKGNKIRSLETIPLYLVKDIQKDQDVLKSYLTDLLGKKEIKILVPKIKINSLLKINGFPCHITGKTGDSFVLRPAVQFCCSNDEVLYFKKIIRFNEIRSQREKMGKTISPYEDLSFRSYIKENLCKKTKADEIGEKEFYDLLQKKNLEIYDMLLTKHKDTIYNKRPNSTTLGMLTKGRYEFINLKPKDQIIVMLEILKLFCTTREAIDLGLIKGKPAAGVATLGKKISNPDNCILIYQSITGIFEKRIDLLKV

SEQ ID NO: 607 - protein, 1395 aa, Treponema denticola
  source 1..1395: note = Treponema denticola OTK
MKKEIKDYFLGLDVGTGSVGWAVTDTDYKLLKANRKDLWGMRCFETAETAEVRRLHRGARRRIERRKKRIKLLQELFSQEIAKIDEGFFQRMKESPLYAEDKTILQENTLFNDKDFTDKTYHKAYPTINHLIKAWIENKVKPDPRLLYLACHNIIKKRGHFLFEGDFDSENQFDTSIQALFEYLREDMELDIDADSQKVKEILKDSSLKNSEKQSRLNKMLGLKPSDKQKKAITNLISGNKINFADLYDNPDLKDAEKNSISFSKDDFDALSDDLASILGDSFELLLKAKAVYNCSVLSKVIGDEQYLSFAKVKIYEKHKTDLTKLKNVIKKHFPKDYKKVFGYNKNEKNNNNYSAYVGVCKITHKKLVIKNSASQEDFYKFLKTILSAKSEIKEVNDILTEIETGTFLPKQISKSNAEIPYQLRKMELEKILSNAEKHFSFLKQKDEKGLSHSEKIIMLLTFKIPYYIGPINDNHKKSFPDRCWVVKKEKSPSGKTTPWNFFDHIDKEKTAEEFITSRTNFCTYLIGESVLPKSSLLYSEYTVLNEINNLQIIIDGKNICDIKLKQKIYEELFKKYKKITQKQISTFIKHEGICNKTDEVIILGIDKECTSSLKSYIELKNIFGKQVDEISTKNMLEEIIRWATIYDEGEGKTILKTKIKAEYGKYCSDEQIKKILNLKFSGWGRLSRKFLETVTSEMPGFSEPVNIITAMRETQNNLMELLSSEFKFTENIKKINSGFEDAEKQFSYNGLVKPLFLSPSVKKMLWQTLKLVKEISHITQAPPKKIFIEMAKGAELEPARTKTRLKILQDLYSSCKNDADAFSSEIQYLSGKIENEDNLRLRSDKLYLYYTQLGKCMYCGKPIEIGHVFDTSNYDIDHIYPQSKIKDDSISNRVLVCSSCNKNKEDKYPLKAEIQSKQRGFWNFLQRNNFISLEKLNRLTRTSPISDDETAKFIARQLVETRQATKVAAKVLEKMFPETKIVYSKAETVSMFRNKFDIIKCREINDFHHAHDAYLNIVVGNVYNTKFTNNPWNFIKEKRDNPKIADTYNYYKVFDYDVKRNNITAWEKGKTIITVKDMLKRNTPIYTRQAACKKGELFNQTIMKKGLGQHPLKKEGPLSNISKYGGYNKVSAAYYTLIEYEEKGSKIRSLETIPLYLVKDIQKNKDGLKSYLTDQIGKKEIKILIPKIKINSLLKINGFPCHITGKMGEAFVLRPAVQFCCSNDEALYFKKIIRFNEIRKQREKMGKTISPYEDLSFRSYIKDNLCKKTKADEIEEKEFYDLLQKKNLEIYDMLLTKHKDTIYKKRPNSATIDILVKGKEKFKSLIIENQFEVILEILKLFSATRNVSDLQHIGGSKNAGNARVGNKISSLDNCILIYQSITGIFEKRIDLLKI

SEQ ID NO: 608 - protein, 1395 aa, Treponema denticola
  source 1..1395: note = Treponema denticola SP37
MKKEIKDYFLGLDVGTGSVGWAVTDTDYKLLKANRKDLWGMRCFETAETAEVRRLHRGARRRIERRKKRIKLLQELFSQEIAKTDEGFFQRMKESPFYAEDKTILQENALFNDRDFTDKTYHKAYPTINHLIKAWIENKVKPDPRLLYLACHNIIKKRGHFLFEGDFDSENQFDTSIQALFEYLREDMEVDIDADSQKVKEILKDSSLKNSEKQSRLNKMLGLKPSDKQKKAITNLISGNKINFADLYDNPDLKDAEKNSISFSKDDFDALSDDLASILGDSFELLLKAKAVYNCSVLSKVIGDEQYLSFAKVKIYEKHKTDLTKLKNVIKKHFPNDYKKVFGYNKNEKNNNNYSAYVGVCKTKSKKLVINNTVNQEDFYKFLKPILLAKSEIKEVNDILTEIETGTFLPKQISKSNAEIPYQLRKMELEKILSNAEKHFSFLKQKDEKGLSHSEKIIMLLTFKIPYYIGPINDNHKKSFPDRCWVIKKEKSPSGKTTPWNFFDHIDKDKTAEAFITSRTNFCTYLVGESVLPKNSLLYSEYTVLNEINNLQIIIDGKNICDIKLKQKIYEELFKKYKKITQKQISTFIKHEGICNKTDEVIILGIDKECTSSLKSYIELKNIFGKQVDEISTKNMLEEIIRWATIYDEGEGKTILKTKIKAEYGKYCSDEQIKKILNLKFSGWGRLSRKFLETVTSEMPGFSEPVNIITAMRETQNNLMELLSSEFKFTENIKKINSGFEDVEKQFSYDSLVKPLFLSPSVKKMLWQTLKLVKEISHITQAPPKKIFIEMAKGAELDPVRTKTRLKILQDLYNNCKNDADAFSSEIKDLSGKIENEDNLRLRSDKLYLYYTQLGKCMYCGKPIEIGHVFDTSNYDIDHIYPQSKIKDDSISNRVLVCSSCNKNKEDKYPLKAEIQSKQRGFWNFLQRNNFISLEKLNRLTRTSPISDDETAKFIARQLVETRQATKVAAKVLEKMFPETKIVYSKAETVSMFRNKFDIIKCREINDFHHAHDAYLNIVVGNVYNTKFTNNPWNFIKEKRDNPKIADTYNYYKVFDYDVKRNNITAWEKGKTIITVKDMLKRNTPIYTRQAACKKGELFNQTIMKKGLGQHPLKKEGPLSNISKYGGYNKVSAAYYTLIEYEEKGSKIRSLETIPLYLVKDIQKNKDGLKSYLTDQIGKKEIKILIPKIKINSLLKINGFPCHITGKMGEAFVLRPAVQFCCSNDEALYFKKIIRFNEIRKQREKMGKTISPYEDLSFRSYIKDNLCKKTKADEIEEKEFYDLLQKKNLEIYDMLLTKHKDTIYKKRPNSATIDILVKGKEKFKSLIIENQFEVILEILKLFSATRNVSDLQHIGGSKNAGNARVGNKISSLDNCILIYQSITGIFEKRIDLLKI

SEQ ID NO: 609 - protein, 1062 aa, Treponema sp.
  source 1..1062: note = Treponema sp. JC4
MIMKLEKWRLGLDLGTNSIGWSVFSLDKDNSVQDLIDMGVRIFSDGRDPKTKEPLAVARRTARSQRKLIYRRKLRRKQVFKFLQEQGLFPKTKEECMTLKSLNPYELRIKALDEKLEPYELGRALFNLAVRRGFKSNRKDGSREEVSEKKSPDEIKTQADMQTHLEKAIKENGCRTITEFLYKNQGENGGIRFAPGRMTYYPTRKMYEEEFNLIRSKQEKYYPQVDWDDIYKAIFYQRPLKPQQRGYCIYENDKERTFKAMPCSQKLRILQDIGNLAYYEGGSKKRVELNDNQDKVLYELLNSKDKVTFDQMRKALCLADSNSFNLEENRDFLIGNPTAVKMRSKNRFGKLWDEIPLEEQDLIIETIITADEDDAVYEVIKKYDLTQEQRDFIVKNTILQSGTSMLCKEVSEKLVKRLEEIADLKYHEAVESLGYKFADQTVEKYDLLPYYGKVLPGSTMEIDLSAPETNPEKHYGKISNPTVHVALNQTRVVVNALIKEYGKPSQIAIELSRDLKNNVEKKAEIARKQNQRAKENIAINDTISALYHTAFPGKSFYPNRNDRMKYRLWSELGLGNKCIYCGKGISGAELFTKEIEIEHILPFSRTLLDAESNLTVAHSSCNAFKAERSPFEAFGTNPSGYSWQEIIQRANQLKNTSKKNKFSPNAMDSFEKDSSFIARQLSDNQYIAKAALRYLKCLVENPSDVWTTNGSMTKLLRDKWEMDSILCRKFTEKEVALLGLKPEQIGNYKKNRFDHRHHAIDAVVIGLTDRSMVQKLATKNSHKGNRIEIPEFPILRSDLIEKVKNIVVSFKPDHGAEGKLSKETLLGKIKLHGKETFVCRENIVSLSEKNLDDIVDEKIKSKVKDYVAKHKGQKIEAVLSDFSKENGIKKVRCVNRVQTPIEITSGKISRYLSPEDYFAAVIWEIPGEKKTFKAQYIRRNEVEKNSKGLNVVKPAVLENGKPHPAAKQVCLLHKDDYLEFSDKGKMYFCRIAGYAATNNKLDIRPVYAVSYCADWINSTNETMLTGYWKPTPTQNWVSVNVLFDKQKARLVTVSPIGRVFRK

SEQ ID NO: 610 - protein, 1011 aa, unidentified
  REGION 1..1011: note = uncultured delta proteobacterium HF0070_07E19 polypeptide
MSSKAIDSLEQLDLFKPQEYTLGLDLGIKSIGWAILSGERIANAGVYLFETAEELNSTGNKLISKAAERGRKRRIRRMLDRKARRGRHIRYLLEREGLPTDELEEVVVHQSNRTLWDVRAEAVERKLTKQELAAVLFHLVRHRGYFPNTKKLPPDDESDSADEEQGKINRATSRLREELKASDCKTIGQFLAQNRDRQRNREGDYSNLMARKLVFEEALQILAFQRKQGHELSKDFEKTYLDVLMGQRSGRSPKLGNCSLIPSELRAPSSAPSTEWFKFLQNLGNLQISNAYREEWSIDAPRRAQIIDACSQRSTSSYWQIRRDFQIPDEYRFNLVNYERRDPDVDLQEYLQQQERKTLANFRNWKQLEKIIGTGHPIQTLDEAARLITLIKDDEKLSDQLADLLPEASDKAITQLCELDFTTAAKISLEAMYRILPHMNQGMGFFDACQQESLPEIGVPPAGDRVPPFDEMYNPVVNRVLSQSRKLINAVIDEYGMPAKIRVELARDLGKGRELRERIKLDQLDKSKQNDQRAEDFRAEFQQAPRGDQSLRYRLWKEQNCTCPYSGRMIPVNSVLSEDTQIDHILPISQSFDNSLSNKVLCFTEENAQKSNRTPFEYLDAADFQRLEAISGNWPEAKRNKLLHKSFGKVAEEWKSRALNDTRYLTSALADHLRHHLPDSKIQTVNGRITGYLRKQWGLEKDRDKHTHHAVDAIVVACTTPAIVQQVTLYHQDIRRYKKLGEKRPTPWPETFRQDVLDVEEEIFITRQPKKVSGGIQTKDTLRKHRSKPDRQRVALTKVKLADLERLVEKDASNRNLYEHLKQCLEESGDQPTKAFKAPFYMPSGPEAKQRPILSKVTLLREKPEPPKQLTELSGGRRYDSMAQGRLDIYRYKPGGKRKDEYRVVLQRMIDLMRGEENVHVFQKGVPYDQGPEIEQNYTFLFSLYFDDLVEFQRSADSEVIRGYYRTFNIANGQLKISTYLEGRQDFDFFGANRLAHFAKVQVNLLGKVIK

SEQ ID NO: 611 - protein, 1032 aa, unidentified
  REGION 1..1032: note = uncultured Termite group 1 bacterium phylotype Rs-D17 polypeptide
MLYHIANHRGTDSVRSFLEYDDDKIKENTLTAKIAKETKKVIDAKKYRTFGEYLYKGKIEKFQQNIRKKVSNRKTPANKNKEFAVTRDVIIKETEKILASQKQYYTYILTDEYIKKIKDAISYQTEKLIPESGYCPYFKDEKRLPRSHKLNEYRRMYEALNNAKYFDPVLDENTGEILSYQEKEFSREEKKILFDEVLLKGMELTESGAKKLLYHLPDGCEVQLQGRDKTTQKIKGYALVDLEASPFWLRLSQQQQDEFLYDWNSLPLEKLKPKLTNYYSLTESEVDETFQEIKLPSNYASVGKKAMEILLTYIKDGCSYTEALEKAVSEGKLKVDKQTMIYDSLPYYGKILKESTQKLIGKAFSKQFADRNYKEPDTNKNEREFGKIANPVVHQTLNELRKLINEIITVFGKKPLEIGLETTRELKKSKKNREYLSKQQNKNEYARNRIYKEYIEPHLSQIKSRQENPSKYISKFELLEEQNFICPFCSEKITPDDIINSKVDVEHIFPIEESEDITKNNLVIAHNECNADKGKKSPFDAFGDKTSGKYRWNCILHNAQKNLPHKVWRFYQGSLEKFLENKPMSRRFGTDNSYISKIAARYLACLFNDPYHSEIFCIKSSLIAQLRIAWDLNSIMVPLVKNILSEKELEEFKISKNKKIRIDNRHHALDAIVIAYANRGYHNFLNRIHAKEYKINYREKSWLSKILLPPLNRDLEDFKISVKDSIEKANVSIKHDHNTNGSLVKATAYKVYYSGAGEYIITTSKNVEEISFKEKEDPKDTLYRALCKFECRDIDIKDEKLIKKLKYNSTLYKKVQNNLSKAKQELEQDNKKTEEEGKKSQKITEVRIYKKACSLVKGQYIQCGSRLKDKFFAVKEPTEIKTGLGYDTGDNLFLDLYYDKTGKLCGEIIRKVNFNRNKPNYQKEGYTLFERIYQSDILEVDTSEDRISLKNKTGSAPSDRTFIKVNTFTEVNAYFDGKRDKIQIFFGNLLKSSFKNDSFFISSMQKYNVRKVILTSLGIIKYRSQILKNKEV

SEQ ID NO: 612 - protein, 1398 aa, Veillonella atypica
  source 1..1398: note = Veillonella atypica ACS-134-V-Col7a
METQTSNQLITSHLKDYPKQDYFVGLDIGTNSVGWAVTNTSYELLKFHSHKMWGSRLFEEGESAVTRRGFRSMRRRLERRKLRLKLLEELFADAMAQVDSTFFIRLHESKYHYEDKTTGHSSKHILFIDEDYTDQDYFTEYPTIYHLRKDLMENGTDDIRKLFLAVHHILKYRGNFLYEGATFNSNAFTFEDVLKQALVNITFNCFDTNSAISSISNILMESGKTKSDKAKAIERLVDTYTVFDEVNTPDKPQKEQVKEDKKTLKAFANLVLGLSANLIDLFGSVEDIDDDLKKLQIVGDTYDEKRDELAKVWGDEIHIIDDCKSVYDAIILMSIKEPGLTISQSKVKAFDKHKEDLVILKSLLKLDRNVYNEMFKSDKKGLHNYVHYIKQGRTEETSCSREDFYKYTKKIVEGLADSKDKEYILNEIELQTLLPLQRIKDNGVIPYQLHLEELKVILDKCGPKFPFLHTVSDGFSVTEKLIKMLEFRIPYYVGPLNTHHNIDNGGFSWAVRKQAGRVTPWNFEEKIDREKSAAAFIKNLTNKCTYLFGEDVLPKSSLLYSEFMLLNELNNVRIDGKALAQGVKQHLIDSIFKQDHKKMTKNRIELFLKDNNYITKKHKPEITGLDGEIKNDLTSYRDMVRILGNNFDVSMAEDIITDITIFGESKKMLRQTLRNKFGSQLNDETIKKLSKLRYRDWGRLSKKLLKGIDGCDKAGNGAPKTIIELMRNDSYNLMEILGDKFSFMECIEEENAKLAQGQVVNPHDIIDELALSPAVKRAVWQALRIVDEVAHIKKALPSRIFVEVARTNKSEKKKKDSRQKRLSDLYSAIKKDDVLQSGLQDKEFGALKSGLANYDDAALRSKKLYLYYTQMGRCAYTGNIIDLNQLNTDNYDIDHIYPRSLTKDDSFDNLVLCERTANAKKSDIYPIDNRIQTKQKPFWAFLKHQGLISERKYERLTRIAPLTADDLSGFIARQLVETNQSVKATTTLLRRLYPDIDVVFVKAENVSDFRHNNNFIKVRSLNHHHHAKDAYLNIVVGNVYHEKFTRNFRLFFKKNGANRTYNLAKMFNYDVICTNAQDGKAWDVKTSMNTVKKMMASNDVRVTRRLLEQSGALADATIYKASVAAKAKDGAYIGMKTKYSVFADVTKYGGMTKIKNAYSIIVQYTGKKGEEIKEIVPLPIYLINRNATDIELIDYVKSVIPKAKDISIKYRKLCINQLVKVNGFYYYLGGKTNDKIYIDNAIELVVPHDIATYIKLLDKYDLLRKENKTLKASSITTSIYNINTSTVVSLSNKVGIDVFDYFMSKLRTPLYMKMKGNKVDELSSTGRSKFIKMTLEEQSIYLLEVLNLLTNSKTTFDVKPLGITGSRSTIGVKIHNLDEFKIINESITGLYSNEVTIV

SEQ ID NO: 613 - protein, 1398 aa, Veillonella parvula
  source 1..1398: note = Veillonella parvula ATCC 17745
METQASNQLISSHLKGYPIKDYFVGLDIGTSSVGWAVTNKAYELLKFRSHKMWGSRLFDEGESAVARRGFRSMRRRLERRKLRLKLLEELFADAMAQVDPTFFMRLRESKYHYEDKTTGHSSKHILFIDKNYNDQDYFKEYPTVYHLRSELMKSGTDDIRKLFLAVHHILKYRGNFLYEGATFDSNASTLDDVIKQALENITFNCFDCNSAISSIGQILMEAGKTKSDKAKAIEHLVDTYIATDTVDTSSKTQKDQVKEDKKRLKAFANLVLGLNASLIDLFGSVEELEEDLKKLQITGDTYDDKRDELAKAWSDEIYIIDDCKSVYDAIILLSIKEPGLTISESKVKAFNKHKDDLAILKSLLKSDRSIYNTMFKVDEKGLHNYVHYIKQGRTEETSCNREDFYKYTKKIVEGLSDSKDKEYILSQIELQILLPLQRIKDNGVIPYQLHLEELKAILAKCGPKFPFLNEVADGFSVAEKLIKMLEFRIPYYVGPLNTHHNVDNGGFAWAVRKASGRVTPWNFDDKIDREKSAAAFIKNLTNKCTYLLGEDVLPKSSLLYSEFMLLNELNNVRIDGKPLEKVVKEHLIEAVFKQDHKKMTKNRIEQFLKDNGYISETHKHEITGLDGEIKNDLASYRDMVRILGDGFDRSMAEEIITDITIFGESKKMLRETLRKKFASCLDDEAIKKLTKLRYRDWGRLSQKLLNGIEGCDKAGDGTPETIIILMRNFSYNLMELLGDKFSFMERIQEINAKLTEGQIVNPHDIIDDLALSPAVKRAVWQALRIVDEVAHIKKALPARIFVEVTRSNKNEKKKKDSRQKRLSDLYAAIKKDDVLLNGLNNEIFGELKSSLAKYDDAALRSKKLYLYYTQMGRCAYTGEIIELSLLNTDNYDIDHIYPRSLTKDDSFDNLVLCKRTANAQKSDAYPISEEIQKTQKPFWTFLKQQGLISERKYERLTRITPLTADDLSGFIARQLVETNQSVKAATTLLRRLYPGVDVVFVKAENVTDFRHDNNFIKVRSLNHHHHAKDAYLNIVVGNVYHERFTRNFRAFFKKNGANRTYNLAKMFNYDVNCTNAKDGKAWDVKTSMDTVKKMMDSNDVRVTKRLLEQTGALADATIYKATVAGKAKDGAYIGMKTKSSVFADVSKYGGMTKIKNAYSIIVQYTGKKGEVIKEIVPLPIYLTNRNTTDQDLINYVASIIPQAKDISIIYGKLCINQLVKVNGFYYYLGGKTNSKFCIDNAIQVIVSNEWIPYLKVLEKFNNMRKDNKDLKANVVSTRALDNKHTIEVRIVEEKNIEFFDYLVSKLKMPIYQKMKGNKAAELSEKGYGLFKKMSLEEQSIHLIELLNLLTNQKTTFEVKPLGITASRSTVGSKISNQDEFKVINESITGLYSNEVTIV

SEQ ID NO: 614 - protein, 1395 aa, Veillonella sp.
  source 1..1395: note = Veillonella sp. 6_1_27
METQASNQLISSHLKGYPIKDYFVGLDIGTSSVGWAVTNKAYELLKFRSHKMWGSRLFDEGESAVARRGFRSMRRRLERRKLRLKLLEELFADAMAQVDPTFFMRLRESKYHYEDKTTGHSSKHILFIDKNYTDQDYYKEYPTIYHLRVALMKSGTDDIRKLFLAVHHILKYRGNFLYEGATFDSNASTLDDVLKQALENITFNCFDSSAAIGSIGQILMELGKTKSDKAKAIERLVDTYIITDEVDTSGKTQKEQVKEDKKRLKSFANLVLGLSASLTDLFGSVEDLDEDLKKLQIIGDTYDERRDDLAKVWGDEIHIIDDCKSVYDAIILMSIKEPGLTISESKVKAFKKHKDDLAILKSLLKSDRSIYNTMFKVDEKGLHNYVHYIKQGRTEETSCNREDFYKYTKKVVEGLPDSKDKEYILSEIELQTLLPLQRIKDNGVIPYQLHLEELKVILAKCGPKFPFLNEVADGFSVAEKLIKMLEFRIPYYVGPLNTHHNVDNGGFAWAVRKASGRVTPWNFDDKIDREKSAAAFIKNLTNKCTYLLGEDVLPKSSLLYSEFMLLNELNNVRIDGKPLEKAVKEHLIEAVFKQDHKKMTKNRIEQFLKDNNYIPEKHKPEITGLDGEIKNDLASYRDMVRILGNNFDLSMAEEIITDITIFGESKKMLRETLRNKFSSRLDDEAIKKLSKLRYRDWGRLSRKLLNVIEGCDKAGDGTPETIIILMRNFSYNLMELLGDKFSFMERIQEINAKLIEGQIVNPHDIIDDLALSPAVKRAVWQALRIVDEIVHIKKTLPARIFVEVTRSNKAEKKKKDSRQKRLSDLYAAIKKDDALLSGLTNEEFGGLKSGLAKYDDAALRSKKLYLYYTQMGRCAYTGEVIDLSQLNTDNYDIDHIYPRSLTKDDSFDNLVLCKRTANAQKSDTYPISKEIQKAQKAFWIFLKQQGLISERKYERLTRITPLTADDLSGFIARQLVETNQSVKAATTLLRRLYPGVDVVFVKAENVTDFRHDNDFIKVRSLNHHHHAKDAYLNIVVGNVYHERFTRNFRAFFKKNGANRTYNLAKMFNYDVKCTNAKDGKAWAVKTSMDTVKKMMDSNDVRVTKRVYEQKGQLSDINLTKASKVKADIYLPIKANDPIMSQNMKYGGYSDIKNAYYTIIEYSDKKNNSIKAFIPIPIFIATKTLTKQALLEYIKTVLPKANNLRIIYKKVYNDQLLKIDGFNYYLGGRSNDRFCIDNAIQLIVPLEIQFYIKLVEKFTAIISENKNIALKASSVKSRNPINNQVENITLEYTQKLFDYLVSKFNELIYLKMRGNKLTDVNNIGRKQFIKLSLEERCKALAELLNIFTNMNKKLSLSTINVSASRKVVNFKISSLDEFKIVNESITGLYSHEITIV

SEQ ID NO: 615 - protein, 1120 aa, Veillonella sp.
  source 1..1120: note = Veillonella sp. oral taxon 780 str. F0422
MGFKANLVNLFTDEDIEVILPEEKEFKSINLHEGIYEDVRDAYEDAWGDRFAIVDQCKVLHDIIVISSIIKPGQSLSEAKIESYNQHKEDLVLLKSVLKEDRKLYDDMFVVDTDKGTNYVKYTKQGVNGNTSATQEEFYKYVRKVVSVLPETEHTRRIVQKLEEGTFLPLQRISKNGVVPYQLHKEELVRILDKATVNFPFLNKVENGLTVADKIISILEFKIPYYVGPLNPTHSIENGGFAWVVRKEAGQVLPWNFEQKVDVQASAVKFIENLTNKCTYLIDQDVLPKYSLLYAEFSLLNELNNIRVNDKPLPADVKQAFIRDHFISLQDSKTATKKVVAKYLVDNNYVSQPPIITGMDQQIATKLTSHRDMTRILGEHFDHAMAEDIIRYITIFGESKDMLRQVLKNYYGDRLTTEQIKKLGKLTYTGWGRLSKKFLSDIWGMKKNDDDAEAGTIIEHMREGQENLMQLLSSSYSFIDVVQEYVTNVLGEKEKTAFEMLEDLSLSPMVKRSVWQTLRILDEIVSIRKELPKKIFVEVARTNKADKKRTQSRKALLEELYKQIKDEDVHVLQQELESKEDSALNSKKLYLYFTQMGRCMYSGRRIDIHELFTDKYDIDHIYPRSLTKDDSWHNIVLVEKQLNAEKTDRFPILSAIQSKQKGFWKLLWDRGFISEKKYDRLVRTTDLTDEELNQFINRQMVSTNQSVKAVTTLLHQLYPETEVVFSKAENVSDFRHDYDFVKVRSINHHHHAKDAYLNIVVGNVYHEKFTKNFLSFAKQKGTRRTYNLTKIFEYEIKLTEESKKVIWDPNIHMDIVKKMMKSNDVRVTQRAVPQKGGLSDETIYKKGIAKRGVYLPLKSSDERVRDVEKYGGRTSITISEYIILNIRDTSDQDRIEIFSLPLYIAGKKDIHKAIEEAYLSTCKKPASVVDIQILYRGLYIGSKVNINGFTYYMGGKTGSNVSIDSAVDVVMDITSSVYIKLLEKVAIKKIENPKTFRIENIKTSYNHKEVTVSKEQNIALYQELLKKLDTPLFSKMKGNKLEEFRTVGFDTFIALSLEEQASVLLEVLNVLTNFKTKRDITKIGMTSSRSTLGINISNTEQFSVITTSITGLYEQEIKIK

SEQ ID NO: 616 - protein, 1068 aa, Verminephrobacter eiseniae
MNKAVAYRLALDLGSTSLGWAIFRLNEAREPTAIIRAGVRIFSDGRNANSEPLAVHRRVARAMRRRRDRLLKRKKRMHDQLVQHGFFPAEVAERKELERLNPYQLRAKGLHEALTPGEFARALFHINQRRGFKSNRKTDRKDNDSGALKQAISELRKRIQDSDCATAGEWFWKERMQQKPEGVRGQWVRARYRKTPSTTDEGKKRIGYDLYVDRAMVEQEFDALWAAQAALQPGLFTEAARAELKDTLLYQRDLRPVKPGRCTLLPAEERAPLALPSTQRFRILQEVNNLRLLDEALREVPLNLAQRDAVVSALEGKKELSFAAIRKLLTLSGKFNLEDEKRAELKGNATSVILARKDLFGDAWAGFDAAVQDEIVWRLVSQESEGALIAWLQQHTGVDGVCAEAIVNTRLPDGYGRLSRKALERIVPALQREVCTYDKAVQAAGFAHHSDLGFDFDYAEDEVQQVGEHTIASTGEVQAQYAFKQLPYYGKALQRHVAFGSGDAKDHEEKCYGKIANPTVHIGLNQVRTVVNALIRRYGHPTEVVVELARDLKQSREQKQQTQREQADNQKRNEDIRKRIAPILETSPERVRDRDIKKWILWEELNKKDIADRHCPYSGERISATMLLSEAVEIEHILPFSRTLDDSLNNRTVAMRRANRIKGDRTPWEARADFEAQGWRYEAILQRAEGMPPRKRYRFAEDGYQRWLGKDRNFLARALNDTSYLSRLAANYLRLVCPQGVRVIPGQMTDKLRGKFGLNSVLGLDGKKNRNDHRHHAVDACVIGVTDQGLMQRFANASKQARENGLTRLVQDMLLPWWPSYYDHVERAVRHIRVSHRPDHGFEGAMMKGTAHGIREDGIREDGRIKQRPKAKGSADHKTITLIPIDEPRQLARHGVDAEGKPLPYKGYASGSNYCIEITKNGKGKWEGQVISTFDAYRIKAAADAAARAGQVISTVEADSIVRKSGWERLRGAQSQNGQPLVMRLVIGDSVRMEVDGRDEVMRVVKMSGKEMVFAPVREANVDKRNNMPDEQDPFTYTYKRADQLRKAKARQVTISPIGELRDPGFKG

SEQ ID NO: 617 - protein, 1440 aa, Weeksella virosa
MKTILGLDLGTNSIGWALVEQDFENKQGLILGMGSRIIPMDAGIIGKFAEGSSISQTAERTGYRSIRRLRERHLLRRERLHRVLNILKFLPEHYAAEIDFEKRFGQFLAETEPKLAWKKNAEGKFEFLFQRSFDEMVADFKANGQDIKIPYDWTIYYLRKKALTQKISPQELAWIILNFNQKRGYYQLRGEEEEENPNKKVEFYSLKIVDVVADEQPNKKGDTWYSLHLENGWVYRRSSKIPLYDWKDKVRDFIVTTDINEDGSEKLDKDGEVKRSFRAPKEDDWTLIKKKTEQEIEQFNQTVGSYIYEALLDNPTQKIRGKLVRTIERKFYKSELKKILEKQIELQPELFTEDLYNACARELYRRNVAHQQQLSSRDFVYLFLNDIIFYQRPLRSQKSLISNCSLEFRTIKDKDGNGQIIYLKAIPKSNPYYQEFRVWQWLYNLKIFTKEDDKDVTNQFINKVEDLEALFEFLMNQKEVNHTDILTYLIEPIVKSKYPNAKGKAFKDELKKELKKYRWNYVYDADKDESKSYPMNETRYELRKRLDKVENVPADFMTRKIEQHLWHIIYSVTDKIEFEKALKSFANKYDLHQESFVENFKRFKPFDSDYGTYSEKAIKKLLPLMRVGKYWSWDIIDDKTKTRIGKIITGEYDETIKNRVREKAIDLTEENHFQGLQLWLAQYIVYDRHSEADIAGKWNSVADLEQYLSEFKQHSLRNPIVEQVITETLRVVRDIWKQYGKGAKDYFDEIHIELGREMKNTAEERKRLSSIISENETTNLRIRAILEELMYDENMENVRPYSPMQQEALKIYEDGVLSSSVEIPEDIEKISKKSEPTKSEIQRYKLWLEQKYRSPYTGRPIPLSKLFTPAYQIEHIIPQARFFDDGFSNKVICESEVNALKDKMLGLEFIQNYYGQKVTTSFGEVTILTEDAYKAFVKEHYDKNRSKRNKLLLEEIPEKMIDRQMNDTRYISKYISKVLSNLVRGEKDDEGVNSKNIIPGNGKITGILKQDWGLNDVWNDLILPRFERMNQLTNSTDFTAWNEKHQKFLPSVPLELSKGFQKKRIDHRHHALDALIIACATRDHVNLLNNKHAKSRNERYDLQHKLRHTTPWQDKEGKVRTKFTEFKKPWETFTQDTKKELEKIVVNFKQNLRVINKATNYYEKIVDGKKVMFKQEGVNWAIRKPMHKETVSGKIDLPRVKVSKGKILTATRKSLDTSFNAKTILSITDTGIQKILLNYLKAKGNPELAFSPEGIEEMNQNISLYNDGKPHQPILKVRVFEQGSKFPLGETGNKTTKYVEAAKGTNLFFGVYEDNQGKRSYDTIPLNIVIERQKQGLNSVPETNEKGHRLLFSLSPNDLVYVPIEGEVFDETNPDVNRIYKVVSFSGSQMFCVRQDVATSIVYKLEFSSLNKMERTIDGIMIKEICIKLKVDRLGNISKA

SEQ ID NO: 618 - protein, 1409 aa, Wolinella succinogenes
MLVSPISVDLGGKNTGFFSFTDSLDNSQSGTVIYDESFVLSQVGRRSKRHSKRNNLRNKLVKRLFLLILQEHHGLSIDVLPDEIRGLFNKRGYTYAGFELDEKKKDALESDTLKEFLSEKLQSIDRDSDVEDFLNQIASNAESFKDYKKGFEAVFASATHSPNKKLELKDELKSEYGENAKELLAGLRVTKEILDEFDKQENQGNLPRAKYFEELGEYIATNEKVKSFFDSNSLKLTDMTKLIGNISNYQLKELRRYFNDKEMEKGDIWIPNKLHKITERFVRSWHPKNDADRQRRAELMKDLKSKEIMELLTTTEPVMTIPPYDDMNNRGAVKCQTLRLNEEYLDKHLPNWRDIAKRLNHGKFNDDLADSTVKGYSEDSTLLHRLLDTSKEIDIYELRGKKPNELLVKTLGQSDANRLYGFAQNYYELIRQKVRAGIWVPVKNKDDSLNLEDNSNMLKRCNHNPPHKKNQIHNLVAGILGVKLDEAKFAEFEKELWSAKVGNKKLSAYCKNIEELRKTHGNTFKIDIEELRKKDPAELSKEEKAKLRLTDDVILNEWSQKIANFFDIDDKHRQRFNNLFSMAQLHTVIDTPRSGFSSTCKRCTAENRFRSETAFYNDETGEFHKKATATCQRLPADTQRPFSGKIERYIDKLGYELAKIKAKELEGMEAKEIKVPIILEQNAFEYEESLRKSKTGSNDRVINSKKDRDGKKLAKAKENAEDRLKDKDKRIKAFSSGICPYCGDTIGDDGEIDHILPRSHTLKIYGTVFNPEGNLIYVHQKCNQAKADSIYKLSDIKAGVSAQWIEEQVANIKGYKTFSVLSAEQQKAFRYALFLQNDNEAYKKVVDWLRTDQSARVNGTQKYLAKKIQEKLTKMLPNKHLSFEFILADATEVSELRRQYARQNPLLAKAEKQAPSSHAIDAVMAFVARYQKVFKDGTPPNADEVAKLAMLDSWNPASNEPLTKGLSTNQKIEKMIKSGDYGQKNMREVFGKSIFGENAIGERYKPIVVQEGGYYIGYPATVKKGYELKNCKVVTSKNDIAKLEKIIKNQDLISLKENQYIKIFSINKQTISELSNRYFNMNYKNLVERDKEIVGLLEFIVENCRYYTKKVDVKFAPKYIHETKYPFYDDWRRFDEAWRYLQENQNKTSSKDRFVIDKSSLNEYYQPDKNEYKLDVDTQPIWDDFCRWYFLDRYKTANDKKSIRIKARKTFSLLAESGVQGKVFRAKRKIPTGYAYQALPMDNNVIAGDYANILLEANSKTLSLVPKSGISIEKQLDKKLDVIKKTDVRGLAIDNNSFFNADFDTHGIRLIVENTSVKVGNFPISAIDKSAKRMIFRALFEKEKGKRKKKTTISFKESGPVQDYLKVFLKKIVKIQLRTDGSISNIVVRKNAADFTLSFRSEHIQKLLK

SEQ ID NO: 619 - protein, 1059 aa, Wolinella succinogenes
MIERILGVDLGISSLGWAIVEYDKDDEAANRIIDCGVRLFTAAETPKKKESPNKARREARGIRRVLNRRRVRMNMIKKLFLRAGLIQDVDLDGEGGMFYSKANRADVWELRHDGLYRLLKGDELARVLIHIAKHRGYKFIGDDEADEESGKVKKAGVVLRQNFEAAGCRTVGEWLWRERGANGKKRNKHGDYEISIHRDLLVEEVEAIFVAQQEMRSTIATDALKAAYREIAFFVRPMQRIEKMVGHCTYFPEERRAPKSAPTAEKFIAISKFFSTVIIDNEGWEQKIIERKTLEELLDFAVSREKVEFRHLRKFLDLSDNEIFKGLHYKGKPKTAKKREATLFDPNEPTELEFDKVEAEKKAWISLRGAAKLREALGNEFYGRFVALGKHADEATKILTYYKDEGQKRRELTKLPLEAEMVERLVKIGFSDFLKLSLKAIRDILPAMESGARYDEAVLMLGVPHKEKSAILPPLNKTDIDILNPTVIRAFAQFRKVANALVRKYGAFDRVHFELAREINTKGEIEDIKESQRKNEKERKEAADWIAETSFQVPLTRKNILKKRLYIQQDGRCAYTGDVIELERLFDEGYCEIDHILPRSRSADDSFANKVLCLARANQQKTDRTPYEWFGHDAARWNAFETRTSAPSNRVRTGKGKIDRLLKKNFDENSEMAFKDRNLNDTRYMARAIKTYCEQYWVFKNSHTKAPVQVRSGKLTSVLRYQWGLESKDRESHTHHAVDAIIIAFSTQGMVQKLSEYYRFKETHREKERPKLAVPLANFRDAVEEATRIENTETVKEGVEVKRLLISRPPRARVTGQAHEQTAKPYPRIKQVKNKKKWRLAPIDEEKFESFKADRVASANQKNFYETSTIPRVDVYHKKGKFHLVPIYLHEMVLNELPNLSLGTNPEAMDENFFKFSIFKDDLISIQTQGTPKKPAKIIMGYFKNMHGANMVLSSINNSPCEGFTCTPVSMDKKHKDKCKLCPEENRIAGRCLQGFLDYWSQEGLRPPRKEFECDQGVKFALDVKKYQIDPLGYYYEVKQEKRLGTIPQMRSAKKLVKK

SEQ ID NO: 620 - protein, 1388 aa, Zunongwangia profunda
MKRILGLDLGTNSIGWALVNEAENEKEISKIIKLGVRVNPLTIDEKTNFEKGRPLSTNADRTLKRGARRNLQRYKLRRENLIEILIDNHIITKETPLTEIGKGTTYQTLSLRAKAVRERIDLEDFAKVLLAINKKRGYKSSRKASNDEEGQAIDGMAIAKELYERGITPGQYVLELLENDRKYIPDFYRSDLKQEFNKIWNNQKTFYPEILTDELFKELDGKNKSQTWAICQKPFNIKGIKRITKGREKTIENYHWRVKGLSGKLNLEKLAIILQEINNDINQSSGYLGGISDKSKKLYLNKETVGEFLYKQIAKNPHTSLKNQVFYRHDYLDEFEQIWKTQSNFNANLTDELKQEIRDVIIFYQRKIKSQKSLISFCQFESWEQEYFDKETGKTKTRTVGRRVIPKSSPLFQEFKIWQNLNHLVFTNSETDEKIEIKEVEQEIRKELFEELNLRGDLNPNDLLKILRSQFKIGKLSNWKCNFEKIEGNRTNAALFNIYQKISDFEGYGIDWNKSNAKKIRKELKATFPEIGIDASILEFDAYKKQLTNQSSYELWHLLYSAEEDFKISEQDKLIYGNSSVSLKKKLHLKFGFNPEYAKMLANLSLMSDYGNLSAKAIKKILPYLEDGHLYSEACRLAGYNHSKSLTAEELEKFEPKAKLDLLKKNSLRNPVVEKILNQMVNVVNQVIDTYGKPDGVRIELARELKKSAKERAEMTKGIADGTRRNEEIKKIITQKFGIPNPTKSDLVRYRLWQELESRGYKDIFTDKYISPDKIFSSEIDIEHIIPKALLFDDSFSNKTLSFRNVNLKKANRTALDFITQDYQSNVEAYKERVETWNKDNHISKGKRNKLLMSLKDIPDGFIERDLRNSQYIARKAKRMLYEVFPNEVLATSGSITDKLRSDWDLINVMKELNLPKYKALGLTEYEERLDKGTEELFKHEVIKDWTKRNDHRHHAMDALAVAFTTHNHIQYINNLNARKDITQDNHPIIKNIENLITEVNSKGKRVFKAPMSSFRESAKEQIEAILVSFKNKNKVVTKNINQTKKEGGFNYQNAKTPRGQLHKETIYGKSKQPLEKPVKINNRFCKKQVGLIINFKEQEAVLHHLKKYDNNEKIAFSNKTLKSDPIQVNGSPLREVKIFEEIFTIRKDINPDNFKTQKHLDKIIDKGIKEVMKKRLEEYNGDFKTAFSDLDKNPIWLNQSKGITIKRATISGVTNAEPLHQAKDHLGNIILDDNGKEIPIDYVSTGNNHHVAIYQDESGNLQEEVVSFYEAVIRKNQDQPIIKKRHPKGWKFLFTMKQNEMFVFSSENFNPSEIDLLDEKNAAIISPNLFRVQKIATKNYMFRHHLETEVTNNLDFTYRHFQATEWLRNLCKVRIDHIGRIVQIGEY

SEQ ID NO: 621-631 - skipped (11 entries)

SEQ ID NO: 632 - RNA, 22 nt, Homo sapiens
  source 1..22: mol_type = transcribed RNA
tgctcaggttgcacagctggga

SEQ ID NO: 633 - RNA, 22 nt, Homo sapiens
  source 1..22: mol_type = transcribed RNA
tcccagctgtgcaacctgagca

SEQ ID NO: 634 - RNA, 22 nt, Homo sapiens
  source 1..22: mol_type = transcribed RNA
tcaggtgtggaaactgaggcag

SEQ ID NO: 635 - RNA, 22 nt, Homo sapiens
  source 1..22: mol_type = transcribed RNA
ctgcctcagtttccacacctga

SEQ ID NO: 636 - RNA, 22 nt, Homo sapiens
  source 1..22: mol_type = transcribed RNA
caaaaccgcgattactcttgca

SEQ ID NO: 637 - RNA, 22 nt, Homo sapiens
  source 1..22: mol_type = transcribed RNA
tgcaagagtaatcgcggttttg

SEQ ID NO: 638 - RNA, 21 nt, Homo sapiens
  source 1..21: mol_type = transcribed RNA
aaaagtaattgtggtttttgc

SEQ ID NO: 639 - RNA, 21 nt, Homo sapiens
  source 1..21: mol_type = transcribed RNA
gcaaaaaccacaattactttt

SEQ ID NO: 640 - RNA, 21 nt, Homo sapiens
  source 1..21: mol_type = transcribed RNA
aaaaactgcaatcacttttgc

SEQ ID NO: 641 - RNA, 21 nt, Homo sapiens
  source 1..21: mol_type = transcribed RNA
gcaaaagtgattgcagttttt

SEQ ID NO: 642 - RNA, 22 nt, Homo sapiens
  source 1..22: mol_type = transcribed RNA
caaaagtgattgtggtttttgc

SEQ ID NO: 643 - RNA, 22 nt, Homo sapiens
  source 1..22: mol_type = transcribed RNA
gcaaaaaccacaatcacttttg

SEQ ID NO: 644 - RNA, 22 nt, Homo sapiens
  source 1..22: mol_type = transcribed RNA
agcagtgtttgttttgcccaca

SEQ ID NO: 645 - RNA, 22 nt, Homo sapiens
  source 1..22: mol_type = transcribed RNA
tgtgggcaaaacaaacactgct

SEQ ID NO: 646 - RNA, 22 nt, Homo sapiens
  source 1..22: mol_type = transcribed RNA
tcgggcgcaagagcactgcagt

SEQ ID NO: 647 - RNA, 22 nt, Homo sapiens
  source 1..22: mol_type = transcribed RNA
actgcagtgctcttgcgcccga

SEQ ID NO: 648 - RNA, 21 nt, Homo sapiens
  source 1..21: mol_type = transcribed RNA
acacttgttgggatgacctgc

SEQ ID NO: 649 - RNA, 21 nt, Homo sapiens
  source 1..21: mol_type = transcribed RNA
gcaggtcatcccaacaagtgt

SEQ ID NO: 650 - RNA, 24 nt, Homo sapiens
  source 1..24: mol_type = transcribed RNA
aggagctatccactccaggtgtcc

SEQ ID NO: 651 - RNA, 24 nt, Homo sapiens
  source 1..24: mol_type = transcribed RNA
ggacacctggagtggatagctcct

SEQ ID NO: 652 - RNA, 23 nt, Homo sapiens
  source 1..23: mol_type = transcribed RNA
ccagagcagcctgcggtaacagt

SEQ ID NO: 653 - RNA, 23 nt, Homo sapiens
  source 1..23: mol_type = transcribed RNA
actgttaccgcaggctgctctgg

SEQ ID NO: 654 - RNA, 22 nt, Homo sapiens
  source 1..22: mol_type = transcribed RNA
agttgccagggctgcctttggt

SEQ ID NO: 655 - RNA, 22 nt, Homo sapiens
  source 1..22: mol_type = transcribed RNA
accaaaggcagccctggcaact

SEQ ID NO: 656 - RNA, 21 nt, Homo sapiens
  source 1..21: mol_type = transcribed RNA
tagaccatctttctagagtat

SEQ ID NO: 657 - RNA, 21 nt, Homo sapiens
  source 1..21: mol_type = transcribed RNA
atactctagaaagatggtcta

SEQ ID NO: 658 - RNA, 22 nt, Homo sapiens
  source 1..22: mol_type = transcribed RNA
agctctagaaagattgttgacc

SEQ ID NO: 659 - RNA, 22 nt, Homo sapiens
  source 1..22: mol_type = transcribed RNA
ggtcaacaatctttctagagct

SEQ ID NO: 660 - RNA, 21 nt, Homo sapiens
  source 1..21: mol_type = transcribed RNA
gggactaggatgcagacctcc

SEQ ID NO: 661 - RNA, 21 nt, Homo sapiens
  source 1..21: mol_type = transcribed RNA
ggaggtctgcatcctagtccc

SEQ ID NO: 662 - RNA, 23 nt, Homo sapiens
  source 1..23: mol_type = transcribed RNA
aggtctgcattcaaatccccaga

SEQ ID NO: 663 - RNA, 23 nt, Homo sapiens
  source 1..23: mol_type = transcribed RNA
tctggggatttgaatgcagacct

SEQ ID NO: 664 - RNA, 20 nt, Homo sapiens
  source 1..20: mol_type = transcribed RNA
cattacagcacagccattct

SEQ ID NO: 665 - RNA, 20 nt, Homo sapiens
  source 1..20: mol_type = transcribed RNA
agaatggctgtgctgtaatg

SEQ ID NO: 666 - RNA, 21 nt, Homo sapiens
  source 1..21: mol_type = transcribed RNA
tctggctgtgctgtaatgcag

SEQ ID NO: 667 - RNA, 21 nt, Homo sapiens
  source 1..21: mol_type = transcribed RNA
ctgcattacagcacagccaga

SEQ ID NO: 668 - RNA, 21 nt, Homo sapiens
  source 1..21: mol_type = transcribed RNA
tgacttctacctcttccaaag

SEQ ID NO: 669 - RNA, 21 nt, Homo sapiens
  source 1..21: mol_type = transcribed RNA
ctttggaagaggtagaagtca

SEQ ID NO: 670 - RNA, 22 nt, Homo sapiens
  source 1..22: mol_type = transcribed RNA
ttggaataggggatatctcagc

SEQ ID NO: 671 - RNA, 22 nt, Homo sapiens
  source 1..22: mol_type = transcribed RNA
gctgagatatcccctattccaa

SEQ ID NO: 672 - RNA, 22 nt, Homo sapiens
  source 1..22: mol_type = transcribed RNA
tcgtatcagagattccagacac

SEQ ID NO: 673 - RNA, 22 nt, Homo sapiens
  source 1..22: mol_type = transcribed RNA
gtgtctggaatctctgatacga

SEQ ID NO: 674 - RNA, 23 nt, Homo sapiens
  source 1..23: mol_type = transcribed RNA
actgggatgtcactgaatatggt

SEQ ID NO: 675 - RNA, 23 nt, Homo sapiens
  source 1..23: mol_type = transcribed RNA
accatattcagtgacatcccagt

SEQ ID NO: 676 - RNA, 22 nt, Homo sapiens
  source 1..22: mol_type = transcribed RNA
caaagtccttcctatttttccc

SEQ ID NO: 677 - RNA, 22 nt, Homo sapiens
  source 1..22: mol_type = transcribed RNA
gggaaaaataggaaggactttg

SEQ ID NO: 678 - RNA, 21 nt, Homo sapiens
  source 1..21: mol_type = transcribed RNA
gaagaataggagggactttgt

SEQ ID NO: 679 - RNA, 21 nt, Homo sapiens
  source 1..21: mol_type = transcribed RNA
acaaagtccctcctattcttc

SEQ ID NO: 680 - RNA, 22 nt, Homo sapiens
  source 1..22: mol_type = transcribed RNA
tgggccatgcatttctagaact

SEQ ID NO: 681 - RNA, 22 nt, Homo sapiens
  source 1..22: mol_type = transcribed RNA
agttctagaaatgcatggccca

SEQ ID NO: 682 - RNA, 21 nt, Homo sapiens
  source 1..21: mol_type = transcribed RNA
tctagaaatgcatgacccacc

SEQ ID NO: 683 - RNA, 21 nt, Homo sapiens
  source 1..21: mol_type = transcribed RNA
ggtgggtcatgcatttctaga

SEQ ID NO: 684 - RNA, 22 nt, Homo sapiens
  source 1..22: mol_type = transcribed RNA
ttccactgccactacctaattt

SEQ ID NO: 685 - RNA, 22 nt, Homo sapiens
  source 1..22: mol_type = transcribed RNA
aaattaggtagtggcagtggaa

SEQ ID NO: 686 - RNA, 21 nt, Homo sapiens
  source 1..21: mol_type = transcribed RNA
attaggtagtggcagtggaac

SEQ ID NO: 687 - RNA, 21 nt, Homo sapiens
  source 1..21: mol_type = transcribed RNA
gttccactgccactacctaat

SEQ ID NO: 688 - RNA, 21 nt, Homo sapiens
  source 1..21: mol_type = transcribed RNA
caccgactctgtctcctgcag

SEQ ID NO: 689 - RNA, 21 nt, Homo sapiens
  source 1..21: mol_type = transcribed RNA
ctgcaggagacagagtcggtg

SEQ ID NO: 690 - RNA, 22 nt, Homo sapiens
  source 1..22: mol_type = transcribed RNA
cagcaggggagagagaggagtc

SEQ ID NO: 691 - RNA, 22 nt, Homo sapiens
  source 1..22: mol_type = transcribed RNA
gactcctctctctcccctgctg

SEQ ID NO: 692 - RNA, 22 nt, Homo sapiens
  source 1..22: mol_type = transcribed RNA
ttccagcccttctaatggtagg

SEQ ID NO: 693 - RNA, 22 nt, Homo sapiens
  source 1..22: mol_type = transcribed RNA
cctaccattagaagggctggaa

SEQ ID NO: 694 - RNA, 22 nt, Homo sapiens
  source 1..22: mol_type = transcribed RNA
taccattagaagagctggaaga

SEQ ID NO: 695 - RNA, 22 nt, Homo sapiens
  source 1..22: mol_type = transcribed RNA
tcttccagctcttctaatggta

SEQ ID NO: 696 - RNA, 21 nt, Homo sapiens
  source 1..21: mol_type = transcribed RNA
tcaagtgtcatctgtccctag

SEQ ID NO: 697 - RNA, 21 nt, Homo sapiens
  source 1..21: mol_type = transcribed RNA
ctagggacagatgacacttga

SEQ ID NO: 698 - RNA, 23 nt, Homo sapiens
  source 1..23: mol_type = transcribed RNA
tttgggattgacgccacatgtct

SEQ ID NO: 699 - RNA, 23 nt, Homo sapiens
  source 1..23: mol_type = transcribed RNA
agacatgtggcgtcaatcccaaa

SEQ ID NO: 700 - RNA, 21 nt, Homo sapiens
  source 1..21: mol_type = transcribed RNA
ctgcctgttcttccactccag

SEQ ID NO: 701 - RNA, 21 nt, Homo sapiens
  source 1..21: mol_type = transcribed RNA
ctggagtggaagaacaggcag

SEQ ID NO: 702 - RNA, 23 nt, Homo sapiens
  source 1..23: mol_type = transcribed RNA
tatggagtggactttcagctggc

SEQ ID NO: 703 - RNA, 23 nt, Homo sapiens
  source 1..23: mol_type = transcribed RNA
gccagctgaaagtccactccata

SEQ ID NO: 704 - RNA, 22 nt, Homo sapiens
  source 1..22: mol_type = transcribed RNA
cctcaccatcccttctgcctgc

SEQ ID NO: 705 - RNA, 22 nt, Homo sapiens
  source 1..22: mol_type = transcribed RNA
gcaggcagaagggatggtgagg

SEQ ID NO: 706 - RNA, 23 nt, Homo sapiens
  source 1..23: mol_type = transcribed RNA
caggcagaagtggggctgacagg

SEQ ID NO: 707 - RNA, 23 nt, Homo sapiens
  source 1..23: mol_type = transcribed RNA
cctgtcagccccacttctgcctg

SEQ ID NO: 708 - RNA, 20 nt, Homo sapiens
  source 1..20: mol_type = transcribed RNA
tctcttcatctaccccccag

SEQ ID NO: 709 - RNA, 20 nt, Homo sapiens
  source 1..20: mol_type = transcribed RNA
ctggggggtagatgaagaga

SEQ ID NO: 710 - RNA, 21 nt, Homo sapiens
  source 1..21: mol_type = transcribed RNA
ttggagggtgtggaagacatc

SEQ ID NO: 711 - RNA, 21 nt, Homo sapiens
  source 1..21: mol_type = transcribed RNA
gatgtcttccacaccctccaa

SEQ ID NO: 712 - RNA, 22 nt, Homo sapiens
  source 1..22: mol_type = transcribed RNA
ctgccagccccgttccagggca

SEQ ID NO: 713 - RNA, 22 nt, Homo sapiens
  source 1..22: mol_type = transcribed RNA
tgccctggaacggggctggcag

SEQ ID NO: 714 - RNA, 23 nt, Homo sapiens
  source 1..23: mol_type = transcribed RNA
acaaagtacagcattagccttag

SEQ ID NO: 715 - RNA, 23 nt, Homo sapiens
  source 1..23: mol_type = transcribed RNA
ctaaggctaatgctgtactttgt

SEQ ID NO: 716 - RNA, 23 nt, Homo sapiens
  source 1..23: mol_type = transcribed RNA
aaaggtcattgtaaggttaatgc

SEQ ID NO: 717 - RNA, 23 nt, Homo sapiens
  source 1..23: mol_type = transcribed RNA
gcattaaccttacaatgaccttt

SEQ ID NO: 718 - RNA, 22 nt, Homo sapiens
  source 1..22: mol_type = transcribed RNA
tgaggctaatgcactacttcac

SEQ ID NO: 719 - RNA, 22 nt, Homo sapiens
  source 1..22: mol_type = transcribed RNA
gtgaagtagtgcattagcctca

SEQ ID NO: 720 - RNA, 24 nt, Homo sapiens
  source 1..24: mol_type = transcribed RNA
tatagagagcaggaagattaatgt

SEQ ID NO: 721 - RNA, 24 nt, Homo sapiens
  source 1..24: mol_type = transcribed RNA
acattaatcttcctgctctctata

SEQ ID NO: 722 - RNA, 23 nt, Homo sapiens
  source 1..23: mol_type = transcribed RNA
gtgcttcatcgtaattaacctta

SEQ ID NO: 723 - RNA, 23 nt, Homo sapiens
  source 1..23: mol_type = transcribed RNA
taaggttaattacgatgaagcac

SEQ ID NO: 724 - RNA, 24 nt, Homo sapiens
  source 1..24: mol_type = transcribed RNA
gtggaaagcatgcatccagggtgt

SEQ ID NO: 725 - RNA, 24 nt, Homo sapiens
  source 1..24: mol_type = transcribed RNA
acaccctggatgcatgctttccac

SEQ ID NO: 726 - RNA, 22 nt, Homo sapiens
  source 1..22: mol_type = transcribed RNA
agacacatttggagagggaacc

SEQ ID NO: 727 - RNA, 22 nt, Homo sapiens
  source 1..22: mol_type = transcribed RNA
ggttccctctccaaatgtgtct

SEQ ID NO: 728 - RNA, 22 nt, Homo sapiens
  source 1..22: mol_type = transcribed RNA
ttccctttgtcatcctatgcct

SEQ ID NO: 729 - RNA, 22 nt, Homo sapiens
  source 1..22: mol_type = transcribed RNA
aggcataggatgacaaagggaa

SEQ ID NO: 730 - RNA, 21 nt, Homo sapiens
  source 1..21: mol_type = transcribed RNA
gctgggaaggcaaagggacgt

SEQ ID NO: 731 - RNA, 21 nt, Homo sapiens
  source 1..21: mol_type = transcribed RNA
acgtccctttgccttcccagc

SEQ ID NO: 732 - RNA, 21 nt, Homo sapiens
  source 1..21: mol_type = transcribed RNA
taccacagggtagaaccacgg

SEQ ID NO: 733 - RNA, 21 nt, Homo sapiens
  source 1..21: mol_type = transcribed RNA
ccgtggttctaccctgtggta

SEQ ID NO: 734 - RNA, 22 nt, Homo sapiens
  source 1..22: mol_type = transcribed RNA
ggctggagcgagtgcagtggtg

SEQ ID NO: 735 - RNA, 22 nt, Homo sapiens
  source 1..22: mol_type = transcribed RNA
caccactgcactcgctccagcc

SEQ ID NO: 736 - RNA, 18 nt, Homo sapiens
  source 1..18: mol_type = transcribed RNA
ccaggctctgcagtggga

SEQ ID NO: 737 - RNA, 18 nt, Homo sapiens
  source 1..18: mol_type = transcribed RNA
tcccactgcagagcctgg

SEQ ID NO: 738 - RNA, 22 nt, Homo sapiens
  source 1..22: mol_type = transcribed RNA
ctgggaggtgtgatattgtggt

SEQ ID NO: 739 - RNA, 22 nt, Homo sapiens
  source 1..22: mol_type = transcribed RNA
accacaatatcacacctcccag

SEQ ID NO: 740 - RNA, 22 nt, Homo sapiens
  source 1..22: mol_type = transcribed RNA
gggaggtgtgatctcacactcg

SEQ ID NO: 741 - RNA, 22 nt, Homo sapiens
  source 1..22: mol_type = transcribed RNA
cgagtgtgagatcacacctccc

SEQ ID NO: 742 - RNA, 22 nt, Homo sapiens
  source 1..22: mol_type = transcribed RNA
tgtgatatcatggttcctggga

SEQ ID NO: 743 - RNA, 22 nt, Homo sapiens
  source 1..22: mol_type = transcribed RNA
tcccaggaaccatgatatcaca

SEQ ID NO: 744 - RNA, 22 nt, Homo sapiens
  source 1..22: mol_type = transcribed RNA
tgtgatatcgtgcttcctggga

SEQ ID NO: 745 - RNA, 22 nt, Homo sapiens
  source 1..22: mol_type = transcribed RNA
tcccaggaagcacgatatcaca

SEQ ID NO: 746 - RNA, 18 nt, Homo sapiens
  source 1..18: mol_type = transcribed RNA
ggtgggcttcccggaggg

SEQ ID NO: 747 - RNA, 18 nt, Homo sapiens
  source 1..18: mol_type = transcribed RNA
ccctccgggaagcccacc

SEQ ID NO: 748 - RNA, 18 nt, Homo sapiens
  source 1..18: mol_type = transcribed RNA
cactgcaggactcagcag

SEQ ID NO: 749 - RNA, 18 nt, Homo sapiens
  source 1..18: mol_type = transcribed RNA
ctgctgagtcctgcagtg

SEQ ID NO: 750 - RNA, 17 nt, Homo sapiens
  source 1..17: mol_type = transcribed RNA
tgagggaggagactgca

SEQ ID NO: 751 - RNA, 17 nt, Homo sapiens
  source 1..17: mol_type = transcribed RNA
tgcagtctcctccctca

SEQ ID NO: 752 - RNA, 18 nt, Homo sapiens
  source 1..18: mol_type = transcribed RNA
gaggctgaaggaagatgg

SEQ ID NO: 753 - RNA, 18 nt, Homo sapiens
  source 1..18: mol_type = transcribed RNA
ccatcttccttcagcctc

SEQ ID NO: 754 - RNA, 22 nt, Homo sapiens
  source 1..22: mol_type = transcribed RNA
gtcactgatgtctgtagctgag

SEQ ID NO: 755 - RNA, 22 nt, Homo sapiens
  source 1..22: mol_type = transcribed RNA
ctcagctacagacatcagtgac

SEQ ID NO: 756 - RNA, 22 nt, Homo sapiens
  source 1..22: mol_type = transcribed RNA
acctgtctgtggaaaggagcta

SEQ ID NO: 757 - RNA, 22 nt, Homo sapiens
  source 1..22: mol_type = transcribed RNA
tagctcctttccacagacaggt

SEQ ID NO: 758 - RNA, 22 nt, Homo sapiens
  source 1..22: mol_type = transcribed RNA
agagttaactcaaaatggacta

SEQ ID NO: 759 - RNA, 22 nt, Homo sapiens
  source 1..22: mol_type = transcribed RNA
tagtccattttgagttaactct

SEQ ID NO: 760 - RNA, 22 nt, Homo sapiens
  source 1..22: mol_type = transcribed RNA
tgttgggattcagcaggaccat

SEQ ID NO: 761 - RNA, 22 nt, Homo sapiens
  source 1..22: mol_type = transcribed RNA
atggtcctgctgaatcccaaca

SEQ ID NO: 762 - RNA, 17 nt, Homo sapiens
  source 1..17: mol_type = transcribed RNA
gaagatggacgtacttt

SEQ ID NO: 763 - RNA, 17 nt, Homo sapiens
  source 1..17: mol_type = transcribed RNA
aaagtacgtccatcttc

SEQ ID NO: 764 - RNA, 21 nt, Homo sapiens
  source 1..21: mol_type = transcribed RNA
tctgaatagagtctgaagagt

SEQ ID NO: 765 - RNA, 21 nt, Homo sapiens
  source 1..21: mol_type = transcribed RNA
actcttcagactctattcaga

SEQ ID NO: 766 - RNA, 22 nt, Homo sapiens
  source 1..22: mol_type = transcribed RNA
caaggagacgggaacatggagc

SEQ ID NO: 767 - RNA, 22 nt, Homo sapiens
  source 1..22: mol_type = transcribed RNA
gctccatgttcccgtctccttg

SEQ ID NO: 768 - RNA, 20 nt, Homo sapiens
  source 1..20: mol_type = transcribed RNA
aaaagctgggctgagaggcg

SEQ ID NO: 769 - RNA, 20 nt, Homo sapiens
  source 1..20: mol_type = transcribed RNA
cgcctctcagcccagctttt

SEQ ID NO: 770 - RNA, 18 nt, Homo sapiens
  source 1..18: mol_type = transcribed RNA
aggctggagtgagcggag

SEQ ID NO: 771 - RNA, 18 nt, Homo sapiens
  source 1..18: mol_type = transcribed RNA
ctccgctcactccagcct

SEQ ID NO: 772 - RNA, 22 nt, Homo sapiens
  source 1..22: mol_type = transcribed RNA
gcgactctgaaaactagaaggt

SEQ ID NO: 773 - RNA, 22 nt, Homo sapiens
  source 1..22: mol_type = transcribed RNA
accttctagttttcagagtcgc

SEQ ID NO: 774 - RNA, 20 nt, Homo sapiens
  source 1..20: mol_type = transcribed RNA
aaagactctgcaagatgcct

SEQ ID NO: 775 - RNA, 20 nt, Homo sapiens
  source 1..20: mol_type = transcribed RNA
aggcatcttgcagagtcttt

SEQ ID NO: 776 - RNA, 21 nt, Homo sapiens
  source 1..21: mol_type = transcribed RNA
acaggagtgggggtgggacat

SEQ ID NO: 777 - RNA, 21 nt, Homo sapiens
  source 1..21: mol_type = transcribed RNA
atgtcccacccccactcctgt

SEQ ID NO: 778 - RNA, 21 nt, Homo sapiens
  source 1..21: mol_type = transcribed RNA
cgtcccaccccccactcctgt

SEQ ID NO: 779 - RNA, 21 nt, Homo sapiens
  source 1..21: mol_type = transcribed RNA
acaggagtggggggtgggacg

SEQ ID NO: 780 - RNA, 18 nt, Homo sapiens
  source 1..18: mol_type = transcribed RNA
aggagaagtaaagtagaa

SEQ ID NO: 781 - RNA, 18 nt, Homo sapiens
  source 1..18: mol_type = transcribed RNA
ttctactttacttctcct

SEQ ID NO: 782 - RNA, 22 nt, Homo sapiens
  source 1..22: mol_type = transcribed RNA
atggccagagctcacacagagg

SEQ ID NO: 783 - RNA, 22 nt, Homo sapiens
  source 1..22: mol_type = transcribed RNA
cctctgtgtgagctctggccat

SEQ ID NO: 784 - RNA, 21 nt, Homo sapiens
  source 1..21: mol_type = transcribed RNA
tgggctcagggtacaaaggtt

SEQ ID NO: 785 - RNA, 21 nt, Homo sapiens
  source 1..21: mol_type = transcribed RNA
aacctttgtaccctgagccca

SEQ ID NO: 786 - RNA, 21 nt, Homo sapiens
  source 1..21: mol_type = transcribed RNA
cacaggcttagaaaagacagt

SEQ ID NO: 787 - RNA, 21 nt, Homo sapiens
  source 1..21: mol_type = transcribed RNA
actgtcttttctaagcctgtg

SEQ ID NO: 788 - RNA, 22 nt, Homo sapiens
  source 1..22: mol_type = transcribed RNA
gtgactgataccttggaggcat

SEQ ID NO: 789 - RNA, 22 nt, Homo sapiens
  source 1..22: mol_type = transcribed RNA
atgcctccaaggtatcagtcac

SEQ ID NO: 790 - RNA, 22 nt, Homo sapiens
  source 1..22: mol_type = transcribed RNA
tgtcgtggggcttgctggcttg

SEQ ID NO: 791 - RNA, 22 nt, Homo sapiens
  source 1..22: mol_type = transcribed RNA
caagccagcaagccccacgaca

SEQ ID NO: 792 - RNA, 17 nt, Homo sapiens
  source 1..17: mol_type = transcribed RNA
acagggaggagattgta

SEQ ID NO: 793 - RNA, 17 nt, Homo sapiens
  source 1..17: mol_type = transcribed RNA
tacaatctcctccctgt

SEQ ID NO: 794 - RNA, 17 nt, Homo sapiens
  source 1..17: mol_type = transcribed RNA
gccggacaagagggagg

SEQ ID NO: 795 - RNA, 17 nt, Homo sapiens
  source 1..17: mol_type = transcribed RNA
cctccctcttgtccggc

SEQ ID NO: 796 - RNA, 17 nt, Homo sapiens
  source 1..17: mol_type = transcribed RNA
ttggaggcgtgggtttt

SEQ ID NO: 797 - RNA, 17 nt, Homo sapiens
  source 1..17: mol_type = transcribed RNA
aaaacccacgcctccaa

SEQ ID NO: 798 - RNA, 18 nt, Homo sapiens
  source 1..18: mol_type = transcribed RNA
ctcgagttggaagaggcg

SEQ ID NO: 799 - RNA, 18 nt, Homo sapiens
  source 1..18: mol_type = transcribed RNA
cgcctcttccaactcgag

SEQ ID NO: 800 - RNA, 21 nt, Homo sapiens
  source 1..21: mol_type = transcribed RNA
cacggcaaaagaaacaatcca

SEQ ID NO: 801 - RNA, 21 nt, Homo sapiens
  source 1..21: mol_type = transcribed RNA
tggattgtttcttttgccgtg

SEQ ID NO: 802 - RNA, 22 nt, Homo sapiens
  source 1..22: mol_type = transcribed RNA
agattgtttcttttgccgtgca

SEQ ID NO: 803 - RNA, 22 nt, Homo sapiens
  source 1..22: mol_type = transcribed RNA
tgcacggcaaaagaaacaatct

SEQ ID NO: 804 - RNA, 17 nt, Homo sapiens
  source 1..17: mol_type = transcribed RNA
ggtgggggctgttgttt

SEQ ID NO: 805 - RNA, 17 nt, Homo sapiens
  source 1..17: mol_type = transcribed RNA
aaacaacagcccccacc

SEQ ID NO: 806 - RNA, 20 nt, Homo sapiens
  source 1..20: mol_type = transcribed RNA
ggctccttggtctaggggta

SEQ ID NO: 807 - RNA, 20 nt, Homo sapiens
  source 1..20: mol_type = transcribed RNA
tacccctagaccaaggagcc

SEQ ID NO: 808 - RNA, 22 nt, Homo sapiens
  source 1..22: mol_type = transcribed RNA
cgtcccggggctgcgcgaggca

SEQ ID NO: 809 - RNA, 22 nt, Homo sapiens
  source 1..22: mol_type = transcribed RNA
tgcctcgcgcagccccgggacg

SEQ ID NO: 810 - RNA, 22 nt, Homo sapiens
  source 1..22: mol_type = transcribed RNA
tggggatttggagaagtggtga

SEQ ID NO: 811 - RNA, 22 nt, Homo sapiens
  source 1..22: mol_type = transcribed RNA
tcaccacttctccaaatcccca

SEQ ID NO: 812 - RNA, 17 nt, Homo sapiens
  source 1..17: mol_type = transcribed RNA
tggtagagctgaggaca

SEQ ID NO: 813 - RNA, 17 nt, Homo sapiens
  source 1..17: mol_type = transcribed RNA
tgtcctcagctctacca

SEQ ID NO: 814 - RNA, 23 nt, Homo sapiens
  source 1..23: mol_type = transcribed RNA
ttgaattcttggccttaagtgat

SEQ ID NO: 815 - RNA, 23 nt, Homo sapiens
  source 1..23: mol_type = transcribed RNA
atcacttaaggccaagaattcaa

SEQ ID NO: 816 - RNA, 20 nt, Homo sapiens
  source 1..20: mol_type = transcribed RNA
gagcttggtctgtagcggtt

SEQ ID NO: 817 - RNA, 20 nt, Homo sapiens
  source 1..20: mol_type = transcribed RNA
aaccgctacagaccaagctc

SEQ ID NO: 818 - RNA, 20 nt, Homo sapiens
  source 1..20: mol_type = transcribed RNA
ggatccgagtcacggcacca

SEQ ID NO: 819 - RNA, 20 nt, Homo sapiens
  source 1..20: mol_type = transcribed RNA
tggtgccgtgactcggatcc

SEQ ID NO: 820 - RNA, 17 nt, Homo sapiens
  source 1..17: mol_type = transcribed RNA
agggtgtgtgtgttttt

SEQ ID NO: 821 - RNA, 17 nt, Homo sapiens
  source 1..17: mol_type = transcribed RNA
aaaaacacacacaccct

SEQ ID NO: 822 - RNA, 17 nt, Homo sapiens
  source 1..17: mol_type = transcribed RNA
cctggtggcttcctttt

SEQ ID NO: 823 - RNA, 17 nt, Homo sapiens
  source 1..17: mol_type = transcribed RNA
aaaaggaagccaccagg

SEQ ID NO: 824 - RNA, 22 nt, Homo sapiens
  source 1..22: mol_type = transcribed RNA
tcacaaggtattgactggcgta

SEQ ID NO: 825 - RNA, 22 nt, Homo sapiens
  source 1..22: mol_type = transcribed RNA
tacgccagtcaataccttgtga

SEQ ID NO: 826 - RNA, 19 nt, Homo sapiens
  source 1..19: mol_type = transcribed RNA
agaggtaggtgtggaagaa

SEQ ID NO: 827 - RNA, 19 nt, Homo sapiens
  source 1..19: mol_type = transcribed RNA
ttcttccacacctacctct

SEQ ID NO: 828 - RNA, 22 nt, Homo sapiens
  source 1..22: mol_type = transcribed RNA
ccaggaggcggaggaggtggag

SEQ ID NO: 829 - RNA, 22 nt, Homo sapiens
  source 1..22: mol_type = transcribed RNA
ctccacctcctccgcctcctgg

SEQ ID NO: 830 - RNA, 22 nt, Homo sapiens
  source 1..22: mol_type = transcribed RNA
atagtggttgtgaatttacctt

SEQ ID NO: 831 - RNA, 22 nt, Homo sapiens
  source 1..22: mol_type = transcribed RNA
aaggtaaattcacaaccactat

SEQ ID NO: 832 - RNA, 23 nt, Homo sapiens
  source 1..23: mol_type = transcribed RNA
gattgagactagtagggctaggc

SEQ ID NO: 833 - RNA, 23 nt, Homo sapiens
  source 1..23: mol_type = transcribed RNA
gcctagccctactagtctcaatc

SEQ ID NO: 834 - RNA, 23 nt, Homo sapiens
  source 1..23: mol_type = transcribed RNA
tgacacggagggtggcttgggaa

SEQ ID NO: 835 - RNA, 23 nt, Homo sapiens
  source 1..23: mol_type = transcribed RNA
ttcccaagccaccctccgtgtca

SEQ ID NO: 836 - RNA, 17 nt, Homo sapiens
  source 1..17: mol_type = transcribed RNA
gagactggggtggggcc

SEQ ID NO: 837 - RNA, 17 nt, Homo sapiens
  source 1..17: mol_type = transcribed RNA
ggccccaccccagtctc

SEQ ID NO: 838 - RNA, 21 nt, Homo sapiens
  source 1..21: mol_type = transcribed RNA
aaggtttggatagatgcaata

SEQ ID NO: 839 - RNA, 21 nt, Homo sapiens
  source 1..21: mol_type = transcribed RNA
tattgcatctatccaaacctt

SEQ ID NO: 840 - RNA, 22 nt, Homo sapiens
  source 1..22: mol_type = transcribed RNA
ctcaagtagtctgaccagggga

SEQ ID NO: 841 - RNA, 22 nt, Homo sapiens
  source 1..22: mol_type = transcribed RNA
tcccctggtcagactacttgag

SEQ ID NO: 842 - RNA, 18 nt, Homo sapiens
  source 1..18: mol_type = transcribed RNA
gggtgcgggccggcgggg

SEQ ID NO: 843 - RNA, 18 nt, Homo sapiens
  source 1..18: mol_type = transcribed RNA
ccccgccggcccgcaccc

SEQ ID NO: 844 - RNA, 18 nt, Homo sapiens
  source 1..18: mol_type = transcribed RNA
agagcagaaggatgagat

SEQ ID NO: 845 - RNA, 18 nt, Homo sapiens
  source 1..18: mol_type = transcribed RNA
atctcatccttctgctct

SEQ ID NO: 846 - RNA, 21 nt, Homo sapiens
  source 1..21: mol_type = transcribed RNA
tggcaaacgtggaagccgaga

SEQ ID NO: 847 - RNA, 21 nt, Homo sapiens
  source 1..21: mol_type = transcribed RNA
tctcggcttccacgtttgcca

SEQ ID NO: 848 - RNA, 18 nt, Homo sapiens
  source 1..18: mol_type = transcribed RNA
ggtggggggtgttgtttt

SEQ ID NO: 849 - RNA, 18 nt, Homo sapiens
  source 1..18: mol_type = transcribed RNA
aaaacaacaccccccacc

SEQ ID NO: 850 - RNA, 22 nt, Homo sapiens
  source 1..22: mol_type = transcribed RNA
ctagtgctctccgttacaagta

SEQ ID NO: 851 - RNA, 22 nt, Homo sapiens
  source 1..22: mol_type = transcribed RNA
tacttgtaacggagagcactag

SEQ ID NO: 852 - RNA, 22 nt, Homo sapiens
  source 1..22: mol_type = transcribed RNA
caagggaccaagcattcattat

SEQ ID NO: 853 - RNA, 22 nt, Homo sapiens
  source 1..22: mol_type = transcribed RNA
ataatgaatgcttggtcccttg

SEQ ID NO: 854 - RNA, 22 nt, Homo sapiens
  source 1..22: mol_type = transcribed RNA
caggaaggatttagggacaggc

SEQ ID NO: 855 - RNA, 22 nt, Homo sapiens
  source 1..22: mol_type = transcribed RNA
gcctgtccctaaatccttcctg

SEQ ID NO: 856 - RNA, 22 nt, Homo sapiens
  source 1..22: mol_type = transcribed RNA
ctattaaggacatttgtgattc

SEQ ID NO: 857 - RNA, 22 nt, Homo sapiens
  source 1..22: mol_type = transcribed RNA
gaatcacaaatgtccttaatag

SEQ ID NO: 858 - RNA, 22 nt, Homo sapiens
  source 1..22: mol_type = transcribed RNA
attaaggacatttgtgattgat

SEQ ID NO: 859 - RNA, 22 nt, Homo sapiens
  source 1..22: mol_type = transcribed RNA
atcaatcacaaatgtccttaat

SEQ ID NO: 860 - RNA, 17 nt, Homo sapiens
  source 1..17: mol_type = transcribed RNA
gaggctgagctgaggag

SEQ ID NO: 861 - RNA, 17 nt, Homo sapiens
  source 1..17: mol_type = transcribed RNA
ctcctcagctcagcctc

SEQ ID NO: 862 - RNA, 22 nt, Homo sapiens
  source 1..22: mol_type = transcribed RNA
cgcgcggccgtgctcggagcag

SEQ ID NO: 863 - RNA, 22 nt, Homo sapiens
  source 1..22: mol_type = transcribed RNA
ctgctccgagcacggccgcgcg

SEQ ID NO: 864 - RNA, 21 nt, Homo sapiens
  source 1..21: mol_type = transcribed RNA
agccaagtggaagttacttta

SEQ ID NO: 865 - RNA, 21 nt, Homo sapiens
  source 1..21: mol_type = transcribed RNA
taaagtaacttccacttggct

SEQ ID NO: 866 - RNA, 17 nt, Homo sapiens
  source 1..17: mol_type = transcribed RNA
ggagtgggctggtggtt

SEQ ID NO: 867 - RNA, 17 nt, Homo sapiens
  source 1..17: mol_type = transcribed RNA
aaccaccagcccactcc

SEQ ID NO: 868 - RNA, 22 nt, Homo sapiens
  source 1..22: mol_type = transcribed RNA
tttctatttctcagtggggctc

SEQ ID NO: 869 - RNA, 22 nt, Homo sapiens
  source 1..22: mol_type = transcribed RNA
gagccccactgagaaatagaaa

SEQ ID NO: 870 - RNA, 22 nt, Homo sapiens
  source 1..22: mol_type = transcribed RNA
aacccagtgggctatggaaatg

SEQ ID NO: 871 - RNA, 22 nt, Homo sapiens
  source 1..22: mol_type = transcribed RNA
catttccatagcccactgggtt

SEQ ID NO: 872 - RNA, 17 nt, Homo sapiens
  source 1..17: mol_type = transcribed RNA
ggggtggtctgttgttg

SEQ ID NO: 873 - RNA, 17 nt, Homo sapiens
  source 1..17: mol_type = transcribed RNA
caacaacagaccacccc

SEQ ID NO: 874 - RNA, 20 nt, Homo sapiens
  source 1..20: mol_type = transcribed RNA
aaaaggcgggagaagcccca

SEQ ID NO: 875 - RNA, 20 nt, Homo sapiens
  source 1..20: mol_type = transcribed RNA
tggggcttctcccgcctttt

SEQ ID NO: 876 - RNA, 20 nt, Homo sapiens
  source 1..20: mol_type = transcribed RNA
taacggccgcggtaccctaa

SEQ ID NO: 877 - RNA, 20 nt, Homo sapiens
  source 1..20: mol_type = transcribed RNA
ttagggtaccgcggccgtta

SEQ ID NO: 878 - RNA, 17 nt, Homo sapiens
  source 1..17: mol_type = transcribed RNA
gctgggcgaggctggca

SEQ ID NO: 879 - RNA, 17 nt, Homo sapiens
  source 1..17: mol_type = transcribed RNA
tgccagcctcgcccagc

SEQ ID NO: 880 - RNA, 19 nt, Homo sapiens
  source 1..19: mol_type = transcribed RNA
agagctggctgaagggcag

SEQ ID NO: 881 - RNA, 19 nt, Homo sapiens
  source 1..19: mol_type = transcribed RNA
ctgcccttcagccagctct

SEQ ID NO: 882 - RNA, 18 nt, Homo sapiens
  source 1..18: mol_type = transcribed RNA
agggggcgggctccggcg

SEQ ID NO: 883 - RNA, 18 nt, Homo sapiens
  source 1..18: mol_type = transcribed RNA
cgccggagcccgccccct

SEQ ID NO: 884 - RNA, 22 nt, Homo sapiens
  source 1..22: mol_type = transcribed RNA
tctggtaagagatttgggcata

SEQ ID NO: 885 - RNA, 22 nt, Homo sapiens
  source 1..22: mol_type = transcribed RNA
tatgcccaaatctcttaccaga

SEQ ID NO: 886 - RNA, 22 nt, Homo sapiens
  source 1..22: mol_type = transcribed RNA
aatgtggactggtgtgaccaaa

SEQ ID NO: 887 - RNA, 22 nt, Homo sapiens
  source 1..22: mol_type = transcribed RNA
tttggtcacaccagtccacatt

SEQ ID NO: 888 - RNA, 17 nt, Homo sapiens
  source 1..17: mol_type = transcribed RNA
ggggctgggcgcgcgcc

SEQ ID NO: 889 - RNA, 17 nt, Homo sapiens
  source 1..17: mol_type = transcribed RNA
ggcgcgcgcccagcccc

SEQ ID NO: 890 - RNA, 21 nt, Homo sapiens
  source 1..21: mol_type = transcribed RNA
agaaggcctttccatctctgt

SEQ ID NO: 891 - RNA, 21 nt, Homo sapiens
  source 1..21: mol_type = transcribed RNA
acagagatggaaaggccttct

SEQ ID NO: 892 - RNA, 22 nt, Homo sapiens
  source 1..22: mol_type = transcribed RNA
ccagactgtggctgaccagagg

SEQ ID NO: 893 - RNA, 22 nt, Homo sapiens
  source 1..22: mol_type = transcribed RNA
cctctggtcagccacagtctgg

SEQ ID NO: 894 - RNA, 21 nt, Homo sapiens
  source 1..21: mol_type = transcribed RNA
aatgtaaacaggctttttgct

SEQ ID NO: 895 - RNA, 21 nt, Homo sapiens
  source 1..21: mol_type = transcribed RNA
agcaaaaagcctgtttacatt

SEQ ID NO: 896 - RNA, 22 nt, Homo sapiens
  source 1..22: mol_type = transcribed RNA
gaggaaactgaagctgagaggg

SEQ ID NO: 897 - RNA, 22 nt, Homo sapiens
  source 1..22: mol_type = transcribed RNA
ccctctcagcttcagtttcctc

SEQ ID NO: 898 - RNA, 17 nt, Homo sapiens
  source 1..17: mol_type = transcribed RNA
ctccgggacggctgggc

SEQ ID NO: 899 - RNA, 17 nt, Homo sapiens
  source 1..17: mol_type = transcribed RNA
gcccagccgtcccggag

SEQ ID NO: 900 - RNA, 22 nt, Homo sapiens
  source 1..22: mol_type = transcribed RNA
tgggctggcagggcaagtgctg

SEQ ID NO: 901 - RNA, 22 nt, Homo sapiens
  source 1..22: mol_type = transcribed RNA
cagcacttgccctgccagccca

SEQ ID NO: 902 - RNA, 17 nt, Homo sapiens
  source 1..17: mol_type = transcribed RNA
aagactgagaggaggga

SEQ ID NO: 903 - RNA, 17 nt, Homo sapiens
  source 1..17: mol_type = transcribed RNA
tccctcctctcagtctt

SEQ ID NO: 904 - RNA, 17 nt, Homo sapiens
  source 1..17: mol_type = transcribed RNA
tgaggtagtagtttctt

SEQ ID NO: 905 - RNA, 17 nt, Homo sapiens
  source 1..17: mol_type = transcribed RNA
aagaaactactacctca

SEQ ID NO: 906 - RNA, 21 nt, Homo sapiens
  source 1..21: mol_type = transcribed RNA
tatgtgacctcggatgaatca

SEQ ID NO: 907 - RNA, 21 nt, Homo sapiens
  source 1..21: mol_type = transcribed RNA
tgattcatccgaggtcacata

SEQ ID NO: 908 - RNA, 22 nt, Homo sapiens
  source 1..22: mol_type = transcribed RNA
gctgatgatgatggtgctgaag

SEQ ID NO: 909 - RNA, 22 nt, Homo sapiens
  source 1..22: mol_type = transcribed RNA
cttcagcaccatcatcatcagc

SEQ ID NO: 910 - RNA, 22 nt, Homo sapiens
  source 1..22: mol_type = transcribed RNA
tttaagcaggaaatagaattta

SEQ ID NO: 911 - RNA, 22 nt, Homo sapiens
  source 1..22: mol_type = transcribed RNA
taaattctatttcctgcttaaa

SEQ ID NO: 912 - RNA, 22 nt, Homo sapiens
  source 1..22: mol_type = transcribed RNA
tgtgacaatagagatgaacatg

SEQ ID NO: 913 - RNA, 22 nt, Homo sapiens
  source 1..22: mol_type = transcribed RNA
catgttcatctctattgtcaca

SEQ ID NO: 914 - RNA, 18 nt, Homo sapiens
  source 1..18: mol_type = transcribed RNA
aggctgggctgggacgga

SEQ ID NO: 915 - RNA, 18 nt, Homo sapiens
  source 1..18: mol_type = transcribed RNA
tccgtcccagcccagcct

SEQ ID NO: 916 - RNA, 20 nt, Homo sapiens
  source 1..20: mol_type = transcribed RNA
aaatgggtggtctgaggcaa

SEQ ID NO: 917 - RNA, 20 nt, Homo sapiens
  source 1..20: mol_type = transcribed RNA
ttgcctcagaccacccattt

SEQ ID NO: 918 - RNA, 20 nt, Homo sapiens
  source 1..20: mol_type = transcribed RNA
ctgggttgggctgggctggg

SEQ ID NO: 919 - RNA, 20 nt, Homo sapiens
  source 1..20: mol_type = transcribed RNA
cccagcccagcccaacccag

SEQ ID NO: 920 - RNA, 17 nt, Homo sapiens
  source 1..17: mol_type = transcribed RNA
gcggggctgggcgcgcg

SEQ ID NO: 921 - RNA, 17 nt, Homo sapiens
  source 1..17: mol_type = transcribed RNA
cgcgcgcccagccccgc

SEQ ID NO: 922 - RNA, 22 nt, Homo sapiens
  source 1..22: mol_type = transcribed RNA
actaaaggatatagaaggtttt

SEQ ID NO: 923 - RNA, 22 nt, Homo sapiens
  source 1..22: mol_type = transcribed RNA
aaaaccttctatatcctttagt

SEQ ID NO: 924 - RNA, 22 nt, Homo sapiens
  source 1..22: mol_type = transcribed RNA
tgagggagtaggatgtatggtt

SEQ ID NO: 925 - RNA, 22 nt, Homo sapiens
  source 1..22: mol_type = transcribed RNA
aaccatacatcctactccctca

SEQ ID NO: 926 - RNA, 22 nt, Homo sapiens
  source 1..22: mol_type = transcribed RNA
gaagaactgttgcatttgccct

SEQ ID NO: 927 - RNA, 22 nt, Homo sapiens
  source 1..22: mol_type = transcribed RNA
agggcaaatgcaacagttcttc

SEQ ID NO: 928 - RNA, 22 nt, Homo sapiens
  source 1..22: mol_type = transcribed RNA
cagggcctcactgtatcgccca

SEQ ID NO: 929 - RNA, 22 nt, Homo sapiens
  source 1..22: mol_type = transcribed RNA
tgggcgatacagtgaggccctg

SEQ ID NO: 930 - RNA, 22 nt, Homo sapiens
  source 1..22: mol_type = transcribed RNA
agactgacggctggaggcccat

SEQ ID NO: 931 - RNA, 22 nt, Homo sapiens
  source 1..22: mol_type = transcribed RNA
atgggcctccagccgtcagtct

SEQ ID NO: 932 - RNA, 18 nt, Homo sapiens
  source 1..18: mol_type = transcribed RNA
acaggcaggattggggaa

SEQ ID NO: 933 - RNA, 18 nt, Homo sapiens
  source 1..18: mol_type = transcribed RNA
ttccccaatcctgcctgt

SEQ ID NO: 934 - RNA, 22 nt, Homo sapiens
  source 1..22: mol_type = transcribed RNA
aggactggactcccggcagccc

SEQ ID NO: 935 - RNA, 22 nt, Homo sapiens
  source 1..22: mol_type = transcribed RNA
gggctgccgggagtccagtcct

SEQ ID NO: 936 - RNA, 17 nt, Homo sapiens
  source 1..17: mol_type = transcribed RNA
gggagaagggtcggggc

SEQ ID NO: 937 - RNA, 17 nt, Homo sapiens
  source 1..17: mol_type = transcribed RNA
gccccgacccttctccc

SEQ ID NO: 938 - RNA, 25 nt, Homo sapiens
  source 1..25: mol_type = transcribed RNA
aaatatgatgaaactcacagctgag

SEQ ID NO: 939 - RNA, 25 nt, Homo sapiens
  source 1..25: mol_type = transcribed RNA
ctcagctgtgagtttcatcatattt

SEQ ID NO: 940 - RNA, 26 nt, Homo sapiens
  source 1..26: mol_type = transcribed RNA
gctcagggatgataactgtgctgaga

SEQ ID NO: 941 - RNA, 26 nt, Homo sapiens
  source 1..26: mol_type = transcribed RNA
tctcagcacagttatcatccctgagc

SEQ ID NO: 942 - RNA, 18 nt, Homo sapiens
  source 1..18: mol_type = transcribed RNA
cagcagtgcgcagggctg

SEQ ID NO: 943 - RNA, 18 nt, Homo sapiens
  source 1..18: mol_type = transcribed RNA
cagccctgcgcactgctg

SEQ ID NO: 944 - RNA, 22 nt, Homo sapiens
  source 1..22: mol_type = transcribed RNA
gctaaggaagtcctgtgctcag

SEQ ID NO: 945 - RNA, 22 nt, Homo sapiens
  source 1..22: mol_type = transcribed RNA
ctgagcacaggacttccttagc

SEQ ID NO: 946 - RNA, 21 nt, Homo sapiens
  source 1..21: mol_type = transcribed RNA
tgactctgcctgtaggccggt

SEQ ID NO: 947 - RNA, 21 nt, Homo sapiens
  source 1..21: mol_type = transcribed RNA
accggcctacaggcagagtca

SEQ ID NO: 948 - RNA, 21 nt, Homo sapiens
  source 1..21: mol_type = transcribed RNA
gaccgagagggcctcggctgt

SEQ ID NO: 949 - RNA, 21 nt, Homo sapiens
  source 1..21: mol_type = transcribed RNA
acagccgaggccctctcggtc

SEQ ID NO: 950 - RNA, 21 nt, Homo sapiens
  source 1..21: mol_type = transcribed RNA
ggggggatgtgcatgctggtt

SEQ ID NO: 951 - RNA, 21 nt, Homo sapiens
  source 1..21: mol_type = transcribed RNA
aaccagcatgcacatcccccc

SEQ ID NO: 952 - RNA, 22 nt, Homo sapiens
  source 1..22: mol_type = transcribed RNA
tggtctgcaaagagatgactgt

SEQ ID NO: 953 - RNA, 22 nt, Homo sapiens
  source 1..22: mol_type = transcribed RNA
acagtcatctctttgcagacca

SEQ ID NO: 954 - RNA, 22 nt, Homo sapiens
  source 1..22: mol_type = transcribed RNA
tcattatatgtatgatctggac

SEQ ID NO: 955 - RNA, 22 nt, Homo sapiens
  source 1..22: mol_type = transcribed RNA
gtccagatcatacatataatga

SEQ ID NO: 956 - RNA, 18 nt, Homo sapiens
  source 1..18: mol_type = transcribed RNA
cccagcaggacgggagcg

SEQ ID NO: 957 - RNA, 18 nt, Homo sapiens
  source 1..18: mol_type = transcribed RNA
cgctcccgtcctgctggg

SEQ ID NO: 958 - RNA, 17 nt, Homo sapiens
  source 1..17: mol_type = transcribed RNA
atggagaaggcttctga

SEQ ID NO: 959 - RNA, 17 nt, Homo sapiens
  source 1..17: mol_type = transcribed RNA
tcagaagccttctccat

SEQ ID NO: 960 - RNA, 17 nt, Homo sapiens
  source 1..17: mol_type = transcribed RNA
ccccggggagcccggcg

SEQ ID NO: 961 - RNA, 17 nt, Homo sapiens
  source 1..17: mol_type = transcribed RNA
cgccgggctccccgggg

SEQ ID NO: 962 - RNA, 22 nt, Homo sapiens
  source 1..22: mol_type = transcribed RNA
tggaaggaggttgccggacgct

SEQ ID NO: 963 - RNA, 22 nt, Homo sapiens
  source 1..22: mol_type = transcribed RNA
agcgtccggcaacctccttcca

SEQ ID NO: 964 - RNA, 17 nt, Homo sapiens
  source 1..17: mol_type = transcribed RNA
ggatggaggaggggtct

SEQ ID NO: 965 - RNA, 17 nt, Homo sapiens
  source 1..17: mol_type = transcribed RNA
agacccctcctccatcc

SEQ ID NO: 966 - RNA, 17 nt, Homo sapiens
  source 1..17: mol_type = transcribed RNA
gtggacctggctgggac

SEQ ID NO: 967 - RNA, 17 nt, Homo sapiens
  source 1..17: mol_type = transcribed RNA
gtcccagccaggtccac

SEQ ID NO: 968 - RNA, 21 nt, Homo sapiens
  source 1..21: mol_type = transcribed RNA
tcgtgcatatatctaccacat

SEQ ID NO: 969 - RNA, 21 nt, Homo sapiens
  source 1..21: mol_type = transcribed RNA
atgtggtagatatatgcacga

SEQ ID NO: 970 - RNA, 21 nt, Homo sapiens
  source 1..21: mol_type = transcribed RNA
tgtggtagatatatgcacgat

SEQ ID NO: 971 - RNA, 21 nt, Homo sapiens
  source 1..21: mol_type = transcribed RNA
atcgtgcatatatctaccaca

SEQ ID NO: 972 - RNA, 22 nt, Homo sapiens
  source 1..22: mol_type = transcribed RNA
tgagccgagctgagcttagctg

SEQ ID NO: 973 - RNA, 22 nt, Homo sapiens
  source 1..22: mol_type = transcribed RNA
cagctaagctcagctcggctca

SEQ ID NO: 974 - RNA, 22 nt, Homo sapiens
  source 1..22: mol_type = transcribed RNA
gagcttggatgagctgggctga

SEQ ID NO: 975 - RNA, 22 nt, Homo sapiens
  source 1..22: mol_type = transcribed RNA
tcagcccagctcatccaagctc

SEQ ID NO: 976 - RNA, 22 nt, Homo sapiens
  source 1..22: mol_type = transcribed RNA
gctgaactgggctgagctgggc

SEQ ID NO: 977 - RNA, 22 nt, Homo sapiens
  source 1..22: mol_type = transcribed RNA
gcccagctcagcccagttcagc

SEQ ID NO: 978 - RNA, 21 nt, Homo sapiens
  source 1..21: mol_type = transcribed RNA
ttagtcctgcctgtaggttta

SEQ ID NO: 979 - RNA, 21 nt, Homo sapiens
  source 1..21: mol_type = transcribed RNA
taaacctacaggcaggactaa

SEQ ID NO: 980 - RNA, 20 nt, Homo sapiens
  source 1..20: mol_type = transcribed RNA
ttgggctgggctgggttggg

SEQ ID NO: 981 - RNA, 20 nt, Homo sapiens
  source 1..20: mol_type = transcribed RNA
cccaacccagcccagcccaa

SEQ ID NO: 982 - RNA, 20 nt, Homo sapiens
  source 1..20: mol_type = transcribed RNA
taggatgggggtgagaggtg

SEQ ID NO: 983 - RNA, 20 nt, Homo sapiens
  source 1..20: mol_type = transcribed RNA
cacctctcacccccatccta

SEQ ID NO: 984 - RNA, 22 nt, Homo sapiens
  source 1..22: mol_type = transcribed RNA
aaaagtaattgtggattttgct

SEQ ID NO: 985 - RNA, 22 nt, Homo sapiens
  source 1..22: mol_type = transcribed RNA
agcaaaatccacaattactttt

SEQ ID NO: 986 - RNA, 22 nt, Homo sapiens
  source 1..22: mol_type = transcribed RNA
caaaaaccggcaattacttttg

SEQ ID NO: 987 - RNA, 22 nt, Homo sapiens
  source 1..22: mol_type = transcribed RNA
caaaagtaattgccggtttttg

SEQ ID NO: 988 - RNA, 22 nt, Homo sapiens
  source 1..22: mol_type = transcribed RNA
gaaaacgacaatgacttttgca

SEQ ID NO: 989 - RNA, 22 nt, Homo sapiens
  source 1..22: mol_type = transcribed RNA
tgcaaaagtcattgtcgttttc

SEQ ID NO: 990 - RNA, 21 nt, Homo sapiens
  source 1..21: mol_type = transcribed RNA
caaaaactgcaattactttca

SEQ ID NO: 991 - RNA, 21 nt, Homo sapiens
  source 1..21: mol_type = transcribed RNA
tgaaagtaattgcagtttttg

SEQ ID NO: 992 - RNA, 21 nt, Homo sapiens
  source 1..21: mol_type = transcribed RNA
aaaggtaattgtggtttctgc

SEQ ID NO: 993 - RNA, 21 nt, Homo sapiens
  source 1..21: mol_type = transcribed RNA
gcagaaaccacaattaccttt

SEQ ID NO: 994 - RNA, 22 nt, Homo sapiens
  source 1..22: mol_type = transcribed RNA
caaaaactgcagttacttttgc

SEQ ID NO: 995 - RNA, 22 nt, Homo sapiens
  source 1..22: mol_type = transcribed RNA
gcaaaagtaactgcagtttttg

SEQ ID NO: 996 - RNA, 20 nt, Homo sapiens
  source 1..20: mol_type = transcribed RNA
aaaagtgattgcagtgtttg

SEQ ID NO: 997 - RNA, 20 nt, Homo sapiens
  source 1..20: mol_type = transcribed RNA
caaacactgcaatcactttt

SEQ ID NO: 998 - RNA, 22 nt, Homo sapiens
  source 1..22: mol_type = transcribed RNA
aaaggtaattgcagtttttccc

SEQ ID NO: 999 - RNA, 22 nt, Homo sapiens
  source 1..22: mol_type = transcribed RNA
gggaaaaactgcaattaccttt

SEQ ID NO: 1000 - RNA, 21 nt, Homo sapiens
  source 1..21: mol_type = transcribed RNA
taaaaactgcaattactttta

SEQ ID NO: 1001 - RNA, 21 nt, Homo sapiens
  source 1..21: mol_type = transcribed RNA
taaaagtaattgcagttttta

SEQ ID NO: 1002 - RNA, 23 nt, Homo sapiens
  source 1..23: mol_type = transcribed RNA
tgcaaaagtaattgcagtttttg

SEQ ID NO: 1003 - RNA, 23 nt, Homo sapiens
  source 1..23: mol_type = transcribed RNA
caaaaactgcaattacttttgca

SEQ ID NO: 1004 - RNA, 21 nt, Homo sapiens
  source 1..21: mol_type = transcribed RNA
aaaagtaactgcggtttttga

SEQ ID NO: 1005 - RNA, 21 nt, Homo sapiens
  source 1..21: mol_type = transcribed RNA
tcaaaaaccgcagttactttt

SEQ ID NO: 1006 - RNA, 22 nt, Homo sapiens
  source 1..22: mol_type = transcribed RNA
aacggcaatgacttttgtacca

SEQ ID NO: 1007 - RNA, 22 nt, Homo sapiens
  source 1..22: mol_type = transcribed RNA
tggtacaaaagtcattgccgtt

SEQ ID NO: 1008 - RNA, 22 nt, Homo sapiens
  source 1..22: mol_type = transcribed RNA
caaaaactgcagttacttttgt

SEQ ID NO: 1009 - RNA, 22 nt, Homo sapiens
  source 1..22: mol_type = transcribed RNA
acaaaagtaactgcagtttttg

SEQ ID NO: 1010 - RNA, 22 nt, Homo sapiens
  source 1..22: mol_type = transcribed RNA
aaaagtaattgcggtttttgcc

SEQ ID NO: 1011 - RNA, 22 nt, Homo sapiens
  source 1..22: mol_type = transcribed RNA
ggcaaaaaccgcaattactttt

SEQ ID NO: 1012 - RNA, 20 nt, Homo sapiens
  source 1..20: mol_type = transcribed RNA
aaaaggcattgtggtttttg

SEQ ID NO: 1013 - RNA, 20 nt, Homo sapiens
  source 1..20: mol_type = transcribed RNA
caaaaaccacaatgcctttt

SEQ ID NO: 1014 - RNA, 23 nt, Homo sapiens
  source 1..23: mol_type = transcribed RNA
cggcccgggctgctgctgttcct

SEQ ID NO: 1015 - RNA, 23 nt, Homo sapiens
  source 1..23: mol_type = transcribed RNA
aggaacagcagcagcccgggccg

SEQ ID NO: 1016 - RNA, 20 nt, Homo sapiens
  source 1..20: mol_type = transcribed RNA
agaggtatagggcatgggaa

SEQ ID NO: 1017 - RNA, 20 nt, Homo sapiens
  source 1..20: mol_type = transcribed RNA
ttcccatgccctatacctct

SEQ ID NO: 1018 - RNA, 22 nt, Homo sapiens
  source 1..22: mol_type = transcribed RNA
ttcctatgcatatacttctttg

SEQ ID NO: 1019 - RNA, 22 nt, Homo sapiens
  source 1..22: mol_type = transcribed RNA
caaagaagtatatgcataggaa

SEQ ID NO: 1020 - RNA, 22 nt, Homo sapiens
  source 1..22: mol_type = transcribed RNA
atcatagaggaaaatccatgtt

SEQ ID NO: 1021 - RNA, 22 nt, Homo sapiens
  source 1..22: mol_type = transcribed RNA
aacatggattttcctctatgat

SEQ ID NO: 1022 - RNA, 22 nt, Homo sapiens
  source 1..22: mol_type = transcribed RNA
cgtggatattccttctatgttt

SEQ ID NO: 1023 - RNA, 22 nt, Homo sapiens
  source 1..22: mol_type = transcribed RNA
aaacatagaaggaatatccacg

SEQ ID NO: 1024 - RNA, 22 nt, Homo sapiens
  source 1..22: mol_type = transcribed RNA
tgagtattacatggccaatctc

SEQ ID NO: 1025 - RNA, 22 nt, Homo sapiens
  source 1..22: mol_type = transcribed RNA
gagattggccatgtaatactca

SEQ ID NO: 1026 - RNA, 21 nt, Homo sapiens
  source 1..21: mol_type = transcribed RNA
cttccgccccgccgggcgtcg

SEQ ID NO: 1027 - RNA, 21 nt, Homo sapiens
  source 1..21: mol_type = transcribed RNA
cgacgcccggcggggcggaag

SEQ ID NO: 1028 - RNA, 22 nt, Homo sapiens
  source 1..22: mol_type = transcribed RNA
tagcttatcagactgatgttga

SEQ ID NO: 1029 - RNA, 22 nt, Homo sapiens
  source 1..22: mol_type = transcribed RNA
tcaacatcagtctgataagcta

SEQ ID NO: 1030 - RNA, 22 nt, Homo sapiens
  source 1..22: mol_type = transcribed RNA
cactagattgtgagctcctgga

SEQ ID NO: 1031 - RNA, 22 nt, Homo sapiens
  source 1..22: mol_type = transcribed RNA
tccaggagctcacaatctagtg

SEQ ID NO: 1032 - RNA, 22 nt, Homo sapiens
  source 1..22: mol_type = transcribed RNA
aaggagctcacagtctattgag

SEQ ID NO: 1033 - RNA, 22 nt, Homo sapiens
  source 1..22: mol_type = transcribed RNA
ctcaatagactgtgagctcctt

SEQ ID NO: 1034 - RNA, 22 nt, Homo sapiens
  source 1..22: mol_type = transcribed RNA
tacgtcatcgttgtcatcgtca

SEQ ID NO: 1035 - RNA, 22 nt, Homo sapiens
  source 1..22: mol_type = transcribed RNA
tgacgatgacaacgatgacgta

SEQ ID NO: 1036 - RNA, 22 nt, Homo sapiens
  source 1..22: mol_type = transcribed RNA
cacgctcatgcacacacccaca

SEQ ID NO: 1037 - RNA, 22 nt, Homo sapiens
  source 1..22: mol_type = transcribed RNA
tgtgggtgtgtgcatgagcgtg

SEQ ID NO: 1038 - RNA, 21 nt, Homo sapiens
  source 1..21: mol_type = transcribed RNA
caacaccagtcgatgggctgt

SEQ ID NO: 1039 - RNA, 21 nt, Homo sapiens
  source 1..21: mol_type = transcribed RNA
acagcccatcgactggtgttg

SEQ ID NO: 1040 - RNA, 22 nt, Homo sapiens
  source 1..22: mol_type = transcribed RNA
ttcaccaccttctccacccagc

SEQ ID NO: 1041 - RNA, 22 nt, Homo sapiens
  source 1..22: mol_type = transcribed RNA
gctgggtggagaaggtggtgaa

SEQ ID NO: 1042 - RNA, 23 nt, Homo sapiens
  source 1..23: mol_type = transcribed RNA
cgggtagagagggcagtgggagg

SEQ ID NO: 1043 - RNA, 23 nt, Homo sapiens
  source 1..23: mol_type = transcribed RNA
cctcccactgccctctctacccg

SEQ ID NO: 1044 - RNA, 18 nt, Homo sapiens
  source 1..18: mol_type = transcribed RNA
aatccttgctacctgggt

SEQ ID NO: 1045 - RNA, 18 nt, Homo sapiens
  source 1..18: mol_type = transcribed RNA
acccaggtagcaaggatt

SEQ ID NO: 1046 - RNA, 22 nt, Homo sapiens
  source 1..22: mol_type = transcribed RNA
caatttagtgtgtgtgatattt

SEQ ID NO: 1047 - RNA, 22 nt, Homo sapiens
  source 1..22: mol_type = transcribed RNA
aaatatcacacacactaaattg

SEQ ID NO: 1048 - RNA, 22 nt, Homo sapiens
  source 1..22: mol_type = transcribed RNA
tattgcacattactaagttgca

SEQ ID NO: 1049 - RNA, 22 nt, Homo sapiens
  source 1..22: mol_type = transcribed RNA
tgcaacttagtaatgtgcaata

SEQ ID NO: 1050 - RNA, 22 nt, Homo sapiens
  source 1..22: mol_type = transcribed RNA
cctattcttgattacttgtttc

SEQ ID NO: 1051 - RNA, 22 nt, Homo sapiens
  source 1..22: mol_type = transcribed RNA
gaaacaagtaatcaagaatagg

SEQ ID NO: 1052 - RNA, 22 nt, Homo sapiens
  source 1..22: mol_type = transcribed RNA
ttcaagtaatccaggataggct

SEQ ID NO: 1053 - RNA, 22 nt, Homo sapiens
  source 1..22: mol_type = transcribed RNA
agcctatcctggattacttgaa

SEQ ID NO: 1054 - RNA, 23 nt, Homo sapiens
  source 1..23: mol_type = transcribed RNA
ccagttaccgcttccgctaccgc

SEQ ID NO: 1055 - RNA, 23 nt, Homo sapiens
  source 1..23: mol_type = transcribed RNA
gcggtagcggaagcggtaactgg

SEQ ID NO: 1056 - RNA, 21 nt, Homo sapiens
  source 1..21: mol_type = transcribed RNA
gatttcagtggagtgaagttc

SEQ ID NO: 1057 - RNA, 21 nt, Homo sapiens
  source 1..21: mol_type = transcribed RNA
gaacttcactccactgaaatc

SEQ ID NO: 1058 - RNA, 22 nt, Homo sapiens
  source 1..22: mol_type = transcribed RNA
tccttcattccaccggagtctg

SEQ ID NO: 1059 - RNA, 22 nt, Homo sapiens
  source 1..22: mol_type = transcribed RNA
cagactccggtggaatgaagga

SEQ ID NO: 1060 - RNA, 23 nt, Homo sapiens
  source 1..23: mol_type = transcribed RNA
aaaatggtgccctagtgactaca

SEQ ID NO: 1061 - RNA, 23 nt, Homo sapiens
  source 1..23: mol_type = transcribed RNA
tgtagtcactagggcaccatttt

SEQ ID NO: 1062 - RNA, 21 nt, Homo sapiens
  source 1..21: mol_type = transcribed RNA
caagtcactagtggttccgtt

SEQ ID NO: 1063 - RNA, 21 nt, Homo sapiens
  source 1..21: mol_type = transcribed RNA
aacggaaccactagtgacttg

SEQ ID NO: 1064 - RNA, 22 nt, Homo sapiens
  source 1..22: mol_type = transcribed RNA
ccagtattaactgtgctgctga

SEQ ID NO: 1065 - RNA, 22 nt, Homo sapiens
  source 1..22: mol_type = transcribed RNA
tcagcagcacagttaatactgg

SEQ ID NO: 1066 - RNA, 23 nt, Homo sapiens
  source 1..23: mol_type = transcribed RNA
tcccccaggtgtgattctgattt

SEQ ID NO: 1067 - RNA, 23 nt, Homo sapiens
  source 1..23: mol_type = transcribed RNA
aaatcagaatcacacctggggga

SEQ ID NO: 1068 - RNA, 22 nt, Homo sapiens
  source 1..22: mol_type = transcribed RNA
aaaagctgggttgagagggcga

SEQ ID NO: 1069 - RNA, 22 nt, Homo sapiens
  source 1..22: mol_type = transcribed RNA
tcgccctctcaacccagctttt

SEQ ID NO: 1070 - RNA, 22 nt, Homo sapiens
  source 1..22: mol_type = transcribed RNA
tggacggagaactgataagggt

SEQ ID NO: 1071 - RNA, 22 nt, Homo sapiens
  source 1..22: mol_type = transcribed RNA
acccttatcagttctccgtcca

SEQ ID NO: 1072 - RNA, 22 nt, Homo sapiens
  source 1..22: mol_type = transcribed RNA
tggtgggccgcagaacatgtgc

SEQ ID NO: 1073 - RNA, 22 nt, Homo sapiens
  source 1..22: mol_type = transcribed RNA
gcacatgttctgcggcccacca

SEQ ID NO: 1074 - RNA, 22 nt, Homo sapiens
  source 1..22: mol_type = transcribed RNA
agtgcctgctatgtgccaggca

SEQ ID NO: 1075 - RNA, 22 nt, Homo sapiens
  source 1..22: mol_type = transcribed RNA
tgcctggcacatagcaggcact

SEQ ID NO: 1076 - RNA, 22 nt, Homo sapiens
  source 1..22: mol_type = transcribed RNA
cttggcacctagcaagcactca

SEQ ID NO: 1077 - RNA, 22 nt, Homo sapiens
  source 1..22: mol_type = transcribed RNA
tgagtgcttgctaggtgccaag

SEQ ID NO: 1078 - RNA, 23 nt, Homo sapiens
  source 1..23: mol_type = transcribed RNA
ttattgcttaagaatacgcgtag

SEQ ID NO: 1079 - RNA, 23 nt, Homo sapiens
  source 1..23: mol_type = transcribed RNA
ctacgcgtattcttaagcaataa

SEQ ID NO: 1080 - RNA, 22 nt, Homo sapiens
  source 1..22: mol_type = transcribed RNA
ttgcatagtcacaaaagtgatc

SEQ ID NO: 1081 - RNA, 22 nt, Homo sapiens
  source 1..22: mol_type = transcribed RNA
gatcacttttgtgactatgcaa

SEQ ID NO: 1082 - RNA, 22 nt, Homo sapiens
  source 1..22: mol_type = transcribed RNA
gtgaattaccgaagggccataa

SEQ ID NO: 1083 - RNA, 22 nt, Homo sapiens
  source 1..22: mol_type = transcribed RNA
ttatggcccttcggtaattcac

SEQ ID NO: 1084 - RNA, 22 nt, Homo sapiens
  source 1..22: mol_type = transcribed RNA
tatggcactggtagaattcact

SEQ ID NO: 1085 - RNA, 22 nt, Homo sapiens
  source 1..22: mol_type = transcribed RNA
agtgaattctaccagtgccata

SEQ ID NO: 1086 - RNA, 22 nt, Homo sapiens
  source 1..22: mol_type = transcribed RNA
tgatatgtttgatatattaggt

SEQ ID NO: 1087 - RNA, 22 nt, Homo sapiens
  source 1..22: mol_type = transcribed RNA
acctaatatatcaaacatatca

SEQ ID NO: 1088 - RNA, 21 nt, Homo sapiens
  source 1..21: mol_type = transcribed RNA
tgatatgtttgatattgggtt

SEQ ID NO: 1089 - RNA, 21 nt, Homo sapiens
  source 1..21: mol_type = transcribed RNA
aacccaatatcaaacatatca

SEQ ID NO: 1090 - RNA, 18 nt, Homo sapiens
  source 1..18: mol_type = transcribed RNA
agcaggtgcggggcggcg

SEQ ID NO: 1091 - RNA, 18 nt, Homo sapiens
  source 1..18: mol_type = transcribed RNA
cgccgccccgcacctgct

SEQ ID NO: 1092 - RNA, 21 nt, Homo sapiens
  source 1..21: mol_type = transcribed RNA
cagtgcaagtgtagatgccga

SEQ ID NO: 1093 - RNA, 21 nt, Homo sapiens
  source 1..21: mol_type = transcribed RNA
tcggcatctacacttgcactg

SEQ ID NO: 1094 - RNA, 22 nt, Homo sapiens
  source 1..22: mol_type = transcribed RNA
tatgtaatatggtccacatctt

SEQ ID NO: 1095 - RNA, 22 nt, Homo sapiens
  source 1..22: mol_type = transcribed RNA
aagatgtggaccatattacata

SEQ ID NO: 1096 - RNA, 21 nt, Homo sapiens
  source 1..21: mol_type = transcribed RNA
aatataacacagatggcctgt

SEQ ID NO: 1097 - RNA, 21 nt, Homo sapiens
  source 1..21: mol_type = transcribed RNA
acaggccatctgtgttatatt

SEQ ID NO: 1098 - RNA, 22 nt, Homo sapiens
  source 1..22: mol_type = transcribed RNA
atcgggaatgtcgtgtccgccc

SEQ ID NO: 1099 - RNA, 22 nt, Homo sapiens
  source 1..22: mol_type = transcribed RNA
gggcggacacgacattcccgat

SEQ ID NO: 1100 - RNA, 23 nt, Homo sapiens
  source 1..23: mol_type = transcribed RNA
aatgacacgatcactcccgttga

SEQ ID NO: 1101 - RNA, 23 nt, Homo sapiens
  source 1..23: mol_type = transcribed RNA
tcaacgggagtgatcgtgtcatt

SEQ ID NO: 1102 - RNA, 22 nt, Homo sapiens
  source 1..22: mol_type = transcribed RNA
tactcaggagagtggcaatcac

SEQ ID NO: 1103 - RNA, 22 nt, Homo sapiens
  source 1..22: mol_type = transcribed RNA
gtgattgccactctcctgagta

SEQ ID NO: 1104 - RNA, 23 nt, Homo sapiens
  source 1..23: mol_type = transcribed RNA
tggaagactagtgattttgttgt

SEQ ID NO: 1105 - RNA, 23 nt, Homo sapiens
  source 1..23: mol_type = transcribed RNA
acaacaaaatcactagtcttcca

SEQ ID NO: 1106 - RNA, 22 nt, Homo sapiens
  source 1..22: mol_type = transcribed RNA
ataaagctagataaccgaaagt

SEQ ID NO: 1107 - RNA, 22 nt, Homo sapiens
  source 1..22: mol_type = transcribed RNA
actttcggttatctagctttat

SEQ ID NO: 1108 - RNA, 23 nt, Homo sapiens
  source 1..23: mol_type = transcribed RNA
tctttggttatctagctgtatga

SEQ ID NO: 1109 - RNA, 23 nt, Homo sapiens
  source 1..23: mol_type = transcribed RNA
tcatacagctagataaccaaaga

SEQ ID NO: 1110 - RNA, 22 nt, Homo sapiens
  source 1..22: mol_type = transcribed RNA
acaggtgaggttcttgggagcc

SEQ ID NO: 1111 - RNA, 22 nt, Homo sapiens
  source 1..22: mol_type = transcribed RNA
ggctcccaagaacctcacctgt

SEQ ID NO: 1112 - RNA, 24 nt, Homo sapiens
  source 1..24: mol_type = transcribed RNA
tccctgagaccctttaacctgtga

SEQ ID NO: 1113 - RNA, 24 nt, Homo sapiens
  source 1..24: mol_type = transcribed RNA
tcacaggttaaagggtctcaggga

SEQ ID NO: 1114 - RNA, 22 nt, Homo sapiens
  source 1..22: mol_type = transcribed RNA
caacaaatcccagtctacctaa

SEQ ID NO: 1115 - RNA, 22 nt, Homo sapiens
  source 1..22: mol_type = transcribed RNA
ttaggtagactgggatttgttg

SEQ ID NO: 1116 - RNA, 22 nt, Homo sapiens
  source 1..22: mol_type = transcribed RNA
cgtgttcacagcggaccttgat

SEQ ID NO: 1117 - RNA, 22 nt, Homo sapiens
  source 1..22: mol_type = transcribed RNA
atcaaggtccgctgtgaacacg

SEQ ID NO: 1118 - RNA, 20 nt, Homo sapiens
  source 1..20: mol_type = transcribed RNA
taaggcacgcggtgaatgcc

SEQ ID NO: 1119 - RNA, 20 nt, Homo sapiens
  source 1..20: mol_type = transcribed RNA
ggcattcaccgcgtgcctta

SEQ ID NO: 1120 - RNA, 22 nt, Homo sapiens
  source 1..22: mol_type = transcribed RNA
aacacacctggttaacctcttt

SEQ ID NO: 1121 - RNA, 22 nt, Homo sapiens
  source 1..22: mol_type = transcribed RNA
aaagaggttaaccaggtgtgtt

SEQ ID NO: 1122 - RNA, 22 nt, Homo sapiens
  source 1..22: mol_type = transcribed RNA
taacagtctacagccatggtcg

SEQ ID NO: 1123 - RNA, 22 nt, Homo sapiens
  source 1..22: mol_type = transcribed RNA
cgaccatggctgtagactgtta

SEQ ID NO: 1124 - RNA, 22 nt, Homo sapiens
  source 1..22: mol_type = transcribed RNA
accgtggctttcgattgttact

SEQ ID NO: 1125 - RNA, 22 nt, Homo sapiens
  source 1..22: mol_type = transcribed RNA
agtaacaatcgaaagccacggt

SEQ ID NO: 1126 - RNA, 21 nt, Homo sapiens
  source 1..21: mol_type = transcribed RNA
taacagtctccagtcacggcc

SEQ ID NO: 1127 - RNA, 21 nt, Homo sapiens
  source 1..21: mol_type = transcribed RNA
ggccgtgactggagactgtta

SEQ ID NO: 1128 - RNA, 23 nt, Homo sapiens
  source 1..23: mol_type = transcribed RNA
accttggctctagactgcttact

SEQ ID NO: 1129 - RNA, 23 nt, Homo sapiens
  source 1..23: mol_type = transcribed RNA
agtaagcagtctagagccaaggt

SEQ ID NO: 1130 - RNA, 23 nt, Homo sapiens
  source 1..23: mol_type = transcribed RNA
tctcacacagaaatcgcacccgt

SEQ ID NO: 1131 - RNA, 23 nt, Homo sapiens
  source 1..23: mol_type = transcribed RNA
acgggtgcgatttctgtgtgaga

SEQ ID NO: 1132 - RNA, 22 nt, Homo sapiens
  source 1..22: mol_type = transcribed RNA
tggttgaccatagaacatgcgc

SEQ ID NO: 1133 - RNA, 22 nt, Homo sapiens
  source 1..22: mol_type = transcribed RNA
gcgcatgttctatggtcaacca

SEQ ID NO: 1134 - RNA, 23 nt, Homo sapiens
  source 1..23: mol_type = transcribed RNA
cagtaacaaagattcatccttgt

SEQ ID NO: 1135 - RNA, 23 nt, Homo sapiens
  source 1..23: mol_type = transcribed RNA
acaaggatgaatctttgttactg

SEQ ID NO: 1136 - RNA, 22 nt, Homo sapiens
  source 1..22: mol_type = transcribed RNA
agagttgagtctggacgtcccg

SEQ ID NO: 1137 - RNA, 22 nt, Homo sapiens
  source 1..22: mol_type = transcribed RNA
cgggacgtccagactcaactct

SEQ ID NO: 1138 - RNA, 22 nt, Homo sapiens
  source 1..22: mol_type = transcribed RNA
agaattgtggctggacatctgt

SEQ ID NO: 1139 - RNA, 22 nt, Homo sapiens
  source 1..22: mol_type = transcribed RNA
acagatgtccagccacaattct

SEQ ID NO: 1140 - RNA, 21 nt, Homo sapiens
  source 1..21: mol_type = transcribed RNA
tgattgtccaaacgcaattct

SEQ ID NO: 1141 - RNA, 21 nt, Homo sapiens
  source 1..21: mol_type = transcribed RNA
agaattgcgtttggacaatca

SEQ ID NO: 1142 - RNA, 22 nt, Homo sapiens
  source 1..22: mol_type = transcribed RNA
tatagggattggagccgtggcg

SEQ ID NO: 1143 - RNA, 22 nt, Homo sapiens
  source 1..22: mol_type = transcribed RNA
cgccacggctccaatccctata

SEQ ID NO: 1144 - RNA, 23 nt, Homo sapiens
  source 1..23: mol_type = transcribed RNA
tatggctttttattcctatgtga

SEQ ID NO: 1145 - RNA, 23 nt, Homo sapiens
  source 1..23: mol_type = transcribed RNA
tcacataggaataaaaagccata

SEQ ID NO: 1146 - RNA, 22 nt, Homo sapiens
  source 1..22: mol_type = transcribed RNA
atgtagggctaaaagccatggg

SEQ ID NO: 1147 - RNA, 22 nt, Homo sapiens
  source 1..22: mol_type = transcribed RNA
cccatggcttttagccctacat

SEQ ID NO: 1148 - RNA, 23 nt, Homo sapiens
  source 1..23: mol_type = transcribed RNA
tatggcttttcattcctatgtga

SEQ ID NO: 1149 - RNA, 23 nt, Homo sapiens
  source 1..23: mol_type = transcribed RNA
tcacataggaatgaaaagccata

SEQ ID NO: 1150 - RNA, 22 nt, Homo sapiens
  source 1..22: mol_type = transcribed RNA
aaccatcgaccgttgagtggac

SEQ ID NO: 1151 - RNA, 22 nt, Homo sapiens
  source 1..22: mol_type = transcribed RNA
gtccactcaacggtcgatggtt

SEQ ID NO: 1152 - RNA, 22 nt, Homo sapiens
  source 1..22: mol_type = transcribed RNA
aacattcaacctgtcggtgagt

SEQ ID NO: 1153 - RNA, 22 nt, Homo sapiens
  source 1..22: mol_type = transcribed RNA
actcaccgacaggttgaatgtt

SEQ ID NO: 1154 - RNA, 25 nt, Homo sapiens
  source 1..25: mol_type = transcribed RNA
cttccagacgctccgccccacgtcg

SEQ ID NO: 1155 - RNA, 25 nt, Homo sapiens
  source 1..25: mol_type = transcribed RNA
cgacgtggggcggagcgtctggaag

SEQ ID NO: 1156 - RNA, 24 nt, Homo sapiens
  source 1..24: mol_type = transcribed RNA
aacaacaaaatcactagtcttcca

SEQ ID NO: 1157 - RNA, 24 nt, Homo sapiens
  source 1..24: mol_type = transcribed RNA
tggaagactagtgattttgttgtt

SEQ ID NO: 1158 - RNA, 22 nt, Homo sapiens
  source 1..22: mol_type = transcribed RNA
aggtagactgggatttgttgtt

SEQ ID NO: 1159 - RNA, 22 nt, Homo sapiens
  source 1..22: mol_type = transcribed RNA
aacaacaaatcccagtctacct

SEQ ID NO: 1160 - RNA, 22 nt, Homo sapiens
  source 1..22: mol_type = transcribed RNA
aaacaccattgtcacactccac

SEQ ID NO: 1161 - RNA, 22 nt, Homo sapiens
  source 1..22: mol_type = transcribed RNA
gtggagtgtgacaatggtgttt

SEQ ID NO: 1162 - RNA, 23 nt, Homo sapiens
  source 1..23: mol_type = transcribed RNA
tttagtgtgataatggcgtttga

SEQ ID NO: 1163 - RNA, 23 nt, Homo sapiens
  source 1..23: mol_type = transcribed RNA
tcaaacgccattatcacactaaa

SEQ ID NO: 1164 - RNA, 22 nt, Homo sapiens
  source 1..22: mol_type = transcribed RNA
tatggaaagactttgccactct

SEQ ID NO: 1165 - RNA, 22 nt, Homo sapiens
  source 1..22: mol_type = transcribed RNA
agagtggcaaagtctttccata

SEQ ID NO: 1166 - RNA, 21 nt, Homo sapiens
  source 1..21: mol_type = transcribed RNA
agtggcaaagtctttccatat

SEQ ID NO: 1167 - RNA, 21 nt, Homo sapiens
  source 1..21: mol_type = transcribed RNA
atatggaaagactttgccact

SEQ ID NO: 1168 - RNA, 22 nt, Homo sapiens
  source 1..22: mol_type = transcribed RNA
cagcccggatcccagcccactt

SEQ ID NO: 1169 - RNA, 22 nt, Homo sapiens
  source 1..22: mol_type = transcribed RNA
aagtgggctgggatccgggctg

SEQ ID NO: 1170 - RNA, 20 nt, Homo sapiens
  source 1..20: mol_type = transcribed RNA
gtgggttggggcgggctctg

SEQ ID NO: 1171 - RNA, 20 nt, Homo sapiens
  source 1..20: mol_type = transcribed RNA
cagagcccgccccaacccac

SEQ ID NO: 1172 - RNA, 23 nt, Homo sapiens
  source 1..23: mol_type = transcribed RNA
ttcgggctggcctgctgctccgg

SEQ ID NO: 1173 - RNA, 23 nt, Homo sapiens
  source 1..23: mol_type = transcribed RNA
ccggagcagcaggccagcccgaa

SEQ ID NO: 1174 - RNA, 21 nt, Homo sapiens
  source 1..21: mol_type = transcribed RNA
tgtgcagcaggccaaccgaga

SEQ ID NO: 1175 - RNA, 21 nt, Homo sapiens
  source 1..21: mol_type = transcribed RNA
tctcggttggcctgctgcaca

SEQ ID NO: 1176 - RNA, 22 nt, Homo sapiens
  source 1..22: mol_type = transcribed RNA
cagggcaggaagaagtggacaa

SEQ ID NO: 1177 - RNA, 22 nt, Homo sapiens
  source 1..22: mol_type = transcribed RNA
ttgtccacttcttcctgccctg

SEQ ID NO: 1178 - RNA, 22 nt, Homo sapiens
  source 1..22: mol_type = transcribed RNA
gtccacttctgcctgccctgcc

SEQ ID NO: 1179 - RNA, 22 nt, Homo sapiens
  source 1..22: mol_type = transcribed RNA
ggcagggcaggcagaagtggac

SEQ ID NO: 1180 - RNA, 22 nt, Homo sapiens
  source 1..22: mol_type = transcribed RNA
tttggacagaaaacacgcaggt

SEQ ID NO: 1181 - RNA, 22 nt, Homo sapiens
  source 1..22: mol_type = transcribed RNA
acctgcgtgttttctgtccaaa

SEQ ID NO: 1182 - RNA, 20 nt, Homo sapiens
  source 1..20: mol_type = transcribed RNA
cctgcgtgttttctgtccaa

SEQ ID NO: 1183 - RNA, 20 nt, Homo sapiens
  source 1..20: mol_type = transcribed RNA
ttggacagaaaacacgcagg

SEQ ID NO: 1184 - RNA, 22 nt, Homo sapiens
  source 1..22: mol_type = transcribed RNA
tgccgccctctcgctgctctag

SEQ ID NO: 1185 - RNA, 22 nt, Homo sapiens
  source 1..22: mol_type = transcribed RNA
ctagagcagcgagagggcggca

SEQ ID NO: 1186 - RNA, 23 nt, Homo sapiens
  source 1..23: mol_type = transcribed RNA
gagggcagcgtgggtgtggcgga

SEQ ID NO: 1187 - RNA, 23 nt, Homo sapiens
  source 1..23: mol_type = transcribed RNA
tccgccacacccacgctgccctc

SEQ ID NO: 1188 - RNA, 22 nt, Homo sapiens
  source 1..22: mol_type = transcribed RNA
aggagctagccaggcatatgca

SEQ ID NO: 1189 - RNA, 22 nt, Homo sapiens
  source 1..22: mol_type = transcribed RNA
tgcatatgcctggctagctcct

SEQ ID NO: 1190 - RNA, 20 nt, Homo sapiens
  source 1..20: mol_type = transcribed RNA
atatgcctggctagctcctc

SEQ ID NO: 1191 - RNA, 20 nt, Homo sapiens
  source 1..20: mol_type = transcribed RNA
gaggagctagccaggcatat

SEQ ID NO: 1192 - RNA, 19 nt, Homo sapiens
  source 1..19: mol_type = transcribed RNA
cggcgcgaccggcccgggg

SEQ ID NO: 1193 - RNA, 19 nt, Homo sapiens
  source 1..19: mol_type = transcribed RNA
ccccgggccggtcgcgccg

SEQ ID NO: 1194 - RNA, 21 nt, Homo sapiens
  source 1..21: mol_type = transcribed RNA
tcttgaagtcagaacccgcaa

SEQ ID NO: 1195 - RNA, 21 nt, Homo sapiens
  source 1..21: mol_type = transcribed RNA
ttgcgggttctgacttcaaga

SEQ ID NO: 1196 - RNA, 22 nt, Homo sapiens
  source 1..22: mol_type = transcribed RNA
aactcgtgttcaaagcctttag

SEQ ID NO: 1197 - RNA, 22 nt, Homo sapiens
  source 1..22: mol_type = transcribed RNA
ctaaaggctttgaacacgagtt

SEQ ID NO: 1198 - RNA, 23 nt, Homo sapiens
  source 1..23: mol_type = transcribed RNA
cctggacaccgctcagccggccg

SEQ ID NO: 1199 - RNA, 23 nt, Homo sapiens
  source 1..23: mol_type = transcribed RNA
cggccggctgagcggtgtccagg

SEQ ID NO: 1200 - RNA, 21 nt, Homo sapiens
  source 1..21: mol_type = transcribed RNA
actcggctgcggtggacaagt

SEQ ID NO: 1201 - RNA, 21 nt, Homo sapiens
  source 1..21: mol_type = transcribed RNA
acttgtccaccgcagccgagt

SEQ ID NO: 1202 - RNA, 20 nt, Homo sapiens
  source 1..20: mol_type = transcribed RNA
tcactctcaccttgctttgc

SEQ ID NO: 1203 - RNA, 20 nt, Homo sapiens
  source 1..20: mol_type = transcribed RNA
gcaaagcaaggtgagagtga

SEQ ID NO: 1204 - RNA, 22 nt, Homo sapiens
  source 1..22: mol_type = transcribed RNA
ttgctaagtaggctgagattga

SEQ ID NO: 1205 - RNA, 22 nt, Homo sapiens
  source 1..22: mol_type = transcribed RNA
tcaatctcagcctacttagcaa

SEQ ID NO: 1206 - RNA, 22 nt, Homo sapiens
  source 1..22: mol_type = transcribed RNA
caccccctgtttcctggcccac

SEQ ID NO: 1207 - RNA, 22 nt, Homo sapiens
  source 1..22: mol_type = transcribed RNA
gtgggccaggaaacagggggtg

SEQ ID NO: 1208 - RNA, 23 nt, Homo sapiens
  source 1..23: mol_type = transcribed RNA
tgggccagggagcagctggtggg

SEQ ID NO: 1209 - RNA, 23 nt, Homo sapiens
  source 1..23: mol_type = transcribed RNA
cccaccagctgctccctggccca

SEQ ID NO: 1210 - RNA, 24 nt, Homo sapiens
  source 1..24: mol_type = transcribed RNA
tgcccatgccatacttttgcctca

SEQ ID NO: 1211 - RNA, 24 nt, Homo sapiens
  source 1..24: mol_type = transcribed RNA
tgaggcaaaagtatggcatgggca

SEQ ID NO: 1212 - RNA, 22 nt, Homo sapiens
  source 1..22: mol_type = transcribed RNA
atggcatcgtcccctggtggct

SEQ ID NO: 1213 - RNA, 22 nt, Homo sapiens
  source 1..22: mol_type = transcribed RNA
agccaccaggggacgatgccat

SEQ ID NO: 1214 - RNA, 22 nt, Homo sapiens
  source 1..22: mol_type = transcribed RNA
gacacatgaccataaatgctaa

SEQ ID NO: 1215 - RNA, 22 nt, Homo sapiens
  source 1..22: mol_type = transcribed RNA
ttagcatttatggtcatgtgtc

SEQ ID NO: 1216 - RNA, 23 nt, Homo sapiens
  source 1..23: mol_type = transcribed RNA
tggagagagaaaagagacagaag

SEQ ID NO: 1217 - RNA, 23 nt, Homo sapiens
  source 1..23: mol_type = transcribed RNA
cttctgtctcttttctctctcca

SEQ ID NO: 1218 - RNA, 22 nt, Homo sapiens
  source 1..22: mol_type = transcribed RNA
agacagtagttcttgcctggtt

SEQ ID NO: 1219 - RNA, 22 nt, Homo sapiens
  source 1..22: mol_type = transcribed RNA
aaccaggcaagaactactgtct

SEQ ID NO: 1220 - RNA, 19 nt, Homo sapiens
  source 1..19: mol_type = transcribed RNA
accaggcaagaaatattgt

SEQ ID NO: 1221 - RNA, 19 nt, Homo sapiens
  source 1..19: mol_type = transcribed RNA
acaatatttcttgcctggt

SEQ ID NO: 1222 - RNA, 21 nt, Homo sapiens
  source 1..21: mol_type = transcribed RNA
attgtccctctcccttcccag

SEQ ID NO: 1223 - RNA, 21 nt, Homo sapiens
  source 1..21: mol_type = transcribed RNA
ctgggaagggagagggacaat

SEQ ID NO: 1224 - RNA, 22 nt, Homo sapiens
  source 1..22: mol_type = transcribed RNA
actgggaagaggagctgaggga

SEQ ID NO: 1225 - RNA, 22 nt, Homo sapiens
  source 1..22: mol_type = transcribed RNA
tccctcagctcctcttcccagt

SEQ ID NO: 1226 - RNA, 23 nt, Homo sapiens
  source 1..23: mol_type = transcribed RNA
gaagatggtgctgtgctgaggaa

SEQ ID NO: 1227 - RNA, 23 nt, Homo sapiens
  source 1..23: mol_type = transcribed RNA
ttcctcagcacagcaccatcttc

SEQ ID NO: 1228 - RNA, 20 nt, Homo sapiens
  source 1..20: mol_type = transcribed RNA
tgtgggactgcaaatgggag

SEQ ID NO: 1229 - RNA, 20 nt, Homo sapiens
  source 1..20: mol_type = transcribed RNA
ctcccatttgcagtcccaca

SEQ ID NO: 1230 - RNA, 21 nt, Homo sapiens
  source 1..21: mol_type = transcribed RNA
tctgaggcctgcctctcccca

SEQ ID NO: 1231 - RNA, 21 nt, Homo sapiens
  source 1..21: mol_type = transcribed RNA
tggggagaggcaggcctcaga

SEQ ID NO: 1232 - RNA, 24 nt, Homo sapiens
  source 1..24: mol_type = transcribed RNA
tgggcgaggggtgggctctcagag

SEQ ID NO: 1233 - RNA, 24 nt, Homo sapiens
  source 1..24: mol_type = transcribed RNA
ctctgagagcccacccctcgccca

SEQ ID NO: 1234 - RNA, 21 nt, Homo sapiens
  source 1..21: mol_type = transcribed RNA
aggtagaatgaggcctgacat

SEQ ID NO: 1235 - RNA, 21 nt, Homo sapiens
  source 1..21: mol_type = transcribed RNA
atgtcaggcctcattctacct

SEQ ID NO: 1236 - RNA, 19 nt, Homo sapiens
  source 1..19: mol_type = transcribed RNA
tcaggcctctttctacctt

SEQ ID NO: 1237 - RNA, 19 nt, Homo sapiens
  source 1..19: mol_type = transcribed RNA
aaggtagaaagaggcctga

SEQ ID NO: 1238 - RNA, 20 nt, Homo sapiens
  source 1..20: mol_type = transcribed RNA
cggggtgggtgaggtcgggc

SEQ ID NO: 1239 - RNA, 20 nt, Homo sapiens
  source 1..20: mol_type = transcribed RNA
gcccgacctcacccaccccg

SEQ ID NO: 1240 - RNA, 22 nt, Homo sapiens
  source 1..22: mol_type = transcribed RNA
gttctgttaacccatcccctca

SEQ ID NO: 1241 - RNA, 22 nt, Homo sapiens
  source 1..22: mol_type = transcribed RNA
tgaggggatgggttaacagaac

SEQ ID NO: 1242 - RNA, 22 nt, Homo sapiens
  source 1..22: mol_type = transcribed RNA
aggggactggttaatagaacta

SEQ ID NO: 1243 - RNA, 22 nt, Homo sapiens
  source 1..22: mol_type = transcribed RNA
tagttctattaaccagtcccct

SEQ ID NO: 1244 - RNA, 23 nt, Homo sapiens
  source 1..23: mol_type = transcribed RNA
tggagttaagggttgcttggaga

SEQ ID NO: 1245 - RNA, 23 nt, Homo sapiens
  source 1..23: mol_type = transcribed RNA
tctccaagcaacccttaactcca

SEQ ID NO: 1246 - RNA, 22 nt, Homo sapiens
  source 1..22: mol_type = transcribed RNA
tctctgagcaaggcttaacacc

SEQ ID NO: 1247 - RNA, 22 nt, Homo sapiens
  source 1..22: mol_type = transcribed RNA
ggtgttaagccttgctcagaga

SEQ ID NO: 1248 - RNA, 22 nt, Homo sapiens
  source 1..22: mol_type = transcribed RNA
tgtgggatctggaggcatctgg

SEQ ID NO: 1249 - RNA, 22 nt, Homo sapiens
  source 1..22: mol_type = transcribed RNA
ccagatgcctccagatcccaca

SEQ ID NO: 1250 - RNA, 21 nt, Homo sapiens
  source 1..21: mol_type = transcribed RNA
accctcgtcaggtccccgggg

SEQ ID NO: 1251 - RNA, 21 nt, Homo sapiens
  source 1..21: mol_type = transcribed RNA
ccccggggacctgacgagggt

SEQ ID NO: 1252 - RNA, 22 nt, Homo sapiens
  source 1..22: mol_type = transcribed RNA
caccggggatggcagagggtcg

SEQ ID NO: 1253 - RNA, 22 nt, Homo sapiens
  source 1..22: mol_type = transcribed RNA
cgaccctctgccatccccggtg

SEQ ID NO: 1254 - RNA, 23 nt, Homo sapiens
  source 1..23: mol_type = transcribed RNA
tgggctgagggcaggaggcctgt

SEQ ID NO: 1255 - RNA, 23 nt, Homo sapiens
  source 1..23: mol_type = transcribed RNA
acaggcctcctgccctcagccca

SEQ ID NO: 1256 - RNA, 23 nt, Homo sapiens
  source 1..23: mol_type = transcribed RNA
aatgtggaagtggtctgaggcat

SEQ ID NO: 1257 - RNA, 23 nt, Homo sapiens
  source 1..23: mol_type = transcribed RNA
atgcctcagaccacttccacatt

SEQ ID NO: 1258 - RNA, 23 nt, Homo sapiens
  source 1..23: mol_type = transcribed RNA
gtgagtgtggatcctggaggaat

SEQ ID NO: 1259 - RNA, 23 nt, Homo sapiens
  source 1..23: mol_type = transcribed RNA
attcctccaggatccacactcac

SEQ ID NO: 1260 - RNA, 22 nt, Homo sapiens
  source 1..22: mol_type = transcribed RNA
tttcttcttagacatggcaacg

SEQ ID NO: 1261 - RNA, 22 nt, Homo sapiens
  source 1..22: mol_type = transcribed RNA
cgttgccatgtctaagaagaaa

SEQ ID NO: 1262 - RNA, 22 nt, Homo sapiens
  source 1..22: mol_type = transcribed RNA
ctgccatgtctaagaagaaaac

SEQ ID NO: 1263 - RNA, 22 nt, Homo sapiens
  source 1..22: mol_type = transcribed RNA
gttttcttcttagacatggcag

SEQ ID NO: 1264 - RNA, 22 nt, Homo sapiens
  source 1..22: mol_type = transcribed RNA
tttcttcttagacatggcagct

SEQ ID NO: 1265 - RNA, 22 nt, Homo sapiens
  source 1..22: mol_type = transcribed RNA
agctgccatgtctaagaagaaa

SEQ ID NO: 1266 - RNA, 19 nt, Homo sapiens
  source 1..19: mol_type = transcribed RNA
ttgccatgtctaagaagaa

SEQ ID NO: 1267 - RNA, 19 nt, Homo sapiens
  source 1..19: mol_type = transcribed RNA
ttcttcttagacatggcaa

SEQ ID NO: 1268 - RNA, 23 nt, Homo sapiens
  source 1..23: mol_type = transcribed RNA
tgcagctctggtggaaaatggag

SEQ ID NO: 1269 - RNA, 23 nt, Homo sapiens
  source 1..23: mol_type = transcribed RNA
ctccattttccaccagagctgca

SEQ ID NO: 1270 - RNA, 22 nt, Homo sapiens
  source 1..22: mol_type = transcribed RNA
caggatccacagagctagtcca

SEQ ID NO: 1271 - RNA, 22 nt, Homo sapiens
  source 1..22: mol_type = transcribed RNA
tggactagctctgtggatcctg

SEQ ID NO: 1272 - RNA, 22 nt, Homo sapiens
  source 1..22: mol_type = transcribed RNA
aactagctctgtggatcctgac

SEQ ID NO: 1273 - RNA, 22 nt, Homo sapiens
  source 1..22: mol_type = transcribed RNA
gtcaggatccacagagctagtt

SEQ ID NO: 1274 - RNA, 22 nt, Homo sapiens
  source 1..22: mol_type = transcribed RNA
aaagatggacaattggctaaat

SEQ ID NO: 1275 - RNA, 22 nt, Homo sapiens
  source 1..22: mol_type = transcribed RNA
atttagccaattgtccatcttt

SEQ ID NO: 1276 - RNA, 24 nt, Homo sapiens
  source 1..24: mol_type = transcribed RNA
agctgagctccatggacgtgcagt

SEQ ID NO: 1277 - RNA, 24 nt, Homo sapiens
  source 1..24: mol_type = transcribed RNA
actgcacgtccatggagctcagct

SEQ ID NO: 1278 - RNA, 22 nt, Homo sapiens
  source 1..22: mol_type = transcribed RNA
cttccggtctgtgagccccgtc

SEQ ID NO: 1279 - RNA, 22 nt, Homo sapiens
  source 1..22: mol_type = transcribed RNA
gacggggctcacagaccggaag

SEQ ID NO: 1280 - RNA, 22 nt, Homo sapiens
  source 1..22: mol_type = transcribed RNA
tggggtgcccactccgcaagtt

SEQ ID NO: 1281 - RNA, 22 nt, Homo sapiens
  source 1..22: mol_type = transcribed RNA
aacttgcggagtgggcacccca

SEQ ID NO: 1282 - RNA, 26 nt, Homo sapiens
  source 1..26: mol_type = transcribed RNA
ctcggccgcggcgcgtagcccccgcc

SEQ ID NO: 1283 - RNA, 26 nt, Homo sapiens
  source 1..26: mol_type = transcribed RNA
ggcgggggctacgcgccgcggccgag

SEQ ID NO: 1284 - RNA, 23 nt, Homo sapiens
  source 1..23: mol_type = transcribed RNA
ctgggggacgcgtgagcgcgagc

SEQ ID NO: 1285 - RNA, 23 nt, Homo sapiens
  source 1..23: mol_type = transcribed RNA
gctcgcgctcacgcgtcccccag

SEQ ID NO: 1286 - RNA, 21 nt, Homo sapiens
  source 1..21: mol_type = transcribed RNA
catacaatctgacatgtattt

SEQ ID NO: 1287 - RNA, 21 nt, Homo sapiens
  source 1..21: mol_type = transcribed RNA
aaatacatgtcagattgtatg

SEQ ID NO: 1288 - RNA, 21 nt, Homo sapiens
  source 1..21: mol_type = transcribed RNA
atacatgtcagattgtatgcc

SEQ ID NO: 1289 - RNA, 21 nt, Homo sapiens
  source 1..21: mol_type = transcribed RNA
ggcatacaatctgacatgtat

SEQ ID NO: 1290 - RNA, 21 nt, Homo sapiens
  source 1..21: mol_type = transcribed RNA
tccctccttctgtccccacag

SEQ ID NO: 1291 - RNA, 21 nt, Homo sapiens
  source 1..21: mol_type = transcribed RNA
ctgtggggacagaaggaggga

SEQ ID NO: 1292 - RNA, 22 nt, Homo sapiens
  source 1..22: mol_type = transcribed RNA
actggggagcagaaggagaacc

SEQ ID NO: 1293 - RNA, 22 nt, Homo sapiens
  source 1..22: mol_type = transcribed RNA
ggttctccttctgctccccagt

SEQ ID NO: 1294 - RNA, 23 nt, Homo sapiens
  source 1..23: mol_type = transcribed RNA
gaaaatcctttttgtttttccag

SEQ ID NO: 1295 - RNA, 23 nt, Homo sapiens
  source 1..23: mol_type = transcribed RNA
ctggaaaaacaaaaaggattttc

SEQ ID NO: 1296 - RNA, 23 nt, Homo sapiens
  source 1..23: mol_type = transcribed RNA
agggaaaaaaaaaaggatttgtc

SEQ ID NO: 1297 - RNA, 23 nt, Homo sapiens
  source 1..23: mol_type = transcribed RNA
gacaaatccttttttttttccct

SEQ ID NO: 1298 - RNA, 22 nt, Homo sapiens
  source 1..22: mol_type = transcribed RNA
tgtgtccgggaagtggaggagg

SEQ ID NO: 1299 - RNA, 22 nt, Homo sapiens
  source 1..22: mol_type = transcribed RNA
cctcctccacttcccggacaca

SEQ ID NO: 1300 - RNA, 22 nt, Homo sapiens
  source 1..22: mol_type = transcribed RNA
tgaagttacatcatggtcgctt

SEQ ID NO: 1301 - RNA, 22 nt, Homo sapiens
  source 1..22: mol_type = transcribed RNA
aagcgaccatgatgtaacttca

SEQ ID NO: 1302 - RNA, 22 nt, Homo sapiens
  source 1..22: mol_type = transcribed RNA
aagcgaccatgatgtaacttca

SEQ ID NO: 1303 - RNA, 22 nt, Homo sapiens
  source 1..22: mol_type = transcribed RNA
tgaagttacatcatggtcgctt

SEQ ID NO: 1304 - RNA, 21 nt, Homo sapiens
  source 1..21: mol_type = transcribed RNA
ttagtgcatagtctttggtct

SEQ ID NO: 1305 - RNA, 21 nt, Homo sapiens
  source 1..21: mol_type = transcribed RNA
agaccaaagactatgcactaa

SEQ ID NO: 1306 - RNA, 22 nt, Homo sapiens
  source 1..22: mol_type = transcribed RNA
accgaagactgtgcgctaatct

SEQ ID NO: 1307 - RNA, 22 nt, Homo sapiens
  source 1..22: mol_type = transcribed RNA
agattagcgcacagtcttcggt

SEQ ID NO: 1308 - RNA, 21 nt, Homo sapiens
  source 1..21: mol_type = transcribed RNA
ttacacagctggacagaggca

SEQ ID NO: 1309 - RNA, 21 nt, Homo sapiens
  source 1..21: mol_type = transcribed RNA
tgcctctgtccagctgtgtaa

SEQ ID NO: 1310 - RNA, 22 nt, Homo sapiens
  source 1..22: mol_type = transcribed RNA
tccaggcaggagccggactgga

SEQ ID NO: 1311 - RNA, 22 nt, Homo sapiens
  source 1..22: mol_type = transcribed RNA
tccagtccggctcctgcctgga

SEQ ID NO: 1312 - RNA, 21 nt, Homo sapiens
  source 1..21: mol_type = transcribed RNA
ctgggctcgggacgcgcggct

SEQ ID NO: 1313 - RNA, 21 nt, Homo sapiens
  source 1..21: mol_type = transcribed RNA
agccgcgcgtcccgagcccag

SEQ ID NO: 1314 - RNA, 22 nt, Homo sapiens
  source 1..22: mol_type = transcribed RNA
ggggctgtgattgaccagcagg

SEQ ID NO: 1315 - RNA, 22 nt, Homo sapiens
  source 1..22: mol_type = transcribed RNA
cctgctggtcaatcacagcccc

SEQ ID NO: 1316 - RNA, 22 nt, Homo sapiens
  source 1..22: mol_type = transcribed RNA
cactgtttcaccactggctctt

SEQ ID NO: 1317 - RNA, 22 nt, Homo sapiens
  source 1..22: mol_type = transcribed RNA
aagagccagtggtgaaacagtg

SEQ ID NO: 1318 - RNA, 21 nt, Homo sapiens
  source 1..21: mol_type = transcribed RNA
gagccagtggtgagacagtga

SEQ ID NO: 1319 - RNA, 21 nt, Homo sapiens
  source 1..21: mol_type = transcribed RNA
tcactgtctcaccactggctc

SEQ ID NO: 1320 - RNA, 22 nt, Homo sapiens
  source 1..22: mol_type = transcribed RNA
aaggtattgttcagacttatga

SEQ ID NO: 1321 - RNA, 22 nt, Homo sapiens
  source 1..22: mol_type = transcribed RNA
tcataagtctgaacaatacctt

SEQ ID NO: 1322 - RNA, 22 nt, Homo sapiens
  source 1..22: mol_type = transcribed RNA
tctgtgatagagattctttgct

SEQ ID NO: 1323 - RNA, 22 nt, Homo sapiens
  source 1..22: mol_type = transcribed RNA
agcaaagaatctctatcacaga

SEQ ID NO: 1324 - RNA, 21 nt, Homo sapiens
  source 1..21: mol_type = transcribed RNA
tctgaattgtaagagttgtta

SEQ ID NO: 1325 - RNA, 21 nt, Homo sapiens
  source 1..21: mol_type = transcribed RNA
taacaactcttacaattcaga

SEQ ID NO: 1326 - RNA, 23 nt, Homo sapiens
  source 1..23: mol_type = transcribed RNA
agaactcttgcagtcttagatgt

SEQ ID NO: 1327 - RNA, 23 nt, Homo sapiens
  source 1..23: mol_type = transcribed RNA
acatctaagactgcaagagttct

SEQ ID NO: 1328 - RNA, 22 nt, Homo sapiens
  source 1..22: mol_type = transcribed RNA
aacgggaatgcaggctgtatct

SEQ ID NO: 1329 - RNA, 22 nt, Homo sapiens
  source 1..22: mol_type = transcribed RNA
agatacagcctgcattcccgtt

SEQ ID NO: 1330 - RNA, 23 nt, Homo sapiens
  source 1..23: mol_type = transcribed RNA
tctgagttcctggagcctggtct

SEQ ID NO: 1331 - RNA, 23 nt, Homo sapiens
  source 1..23: mol_type = transcribed RNA
agaccaggctccaggaactcaga

SEQ ID NO: 1332 - RNA, 23 nt, Homo sapiens
  source 1..23: mol_type = transcribed RNA
tggagatccagtgctcgcccgat

SEQ ID NO: 1333 - RNA, 23 nt, Homo sapiens
  source 1..23: mol_type = transcribed RNA
atcgggcgagcactggatctcca

SEQ ID NO: 1334 - RNA, 22 nt, Homo sapiens
  source 1..22: mol_type = transcribed RNA
tgttgcaagtcggtggagacgt

SEQ ID NO: 1335 - RNA, 22 nt, Homo sapiens
  source 1..22: mol_type = transcribed RNA
acgtctccaccgacttgcaaca

SEQ ID NO: 1336 - RNA, 22 nt, Homo sapiens
  source 1..22: mol_type = transcribed RNA
ctctctactgacttgcaacata

SEQ ID NO: 1337 - RNA, 22 nt, Homo sapiens
  source 1..22: mol_type = transcribed RNA
tatgttgcaagtcagtagagag

SEQ ID NO: 1338 - RNA, 22 nt, Homo sapiens
  source 1..22: mol_type = transcribed RNA
tctcccttcctgccctggctag

SEQ ID NO: 1339 - RNA, 22 nt, Homo sapiens
  source 1..22: mol_type = transcribed RNA
ctagccagggcaggaagggaga

SEQ ID NO: 1340 - RNA, 26 nt, Homo sapiens
  source 1..26: mol_type = transcribed RNA
cccagggcttggagtggggcaaggtt

SEQ ID NO: 1341 - RNA, 26 nt, Homo sapiens
  source 1..26: mol_type = transcribed RNA
aaccttgccccactccaagccctggg

SEQ ID NO: 1342 - RNA, 23 nt, Homo sapiens
  source 1..23: mol_type = transcribed RNA
tatctgctgggctttctggtgtt

SEQ ID NO: 1343 - RNA, 23 nt, Homo sapiens
  source 1..23: mol_type = transcribed RNA
aacaccagaaagcccagcagata

SEQ ID NO: 1344 - RNA, 21 nt, Homo sapiens
  source 1..21: mol_type = transcribed RNA
tggctgttggagggggcaggc

SEQ ID NO: 1345 - RNA, 21 nt, Homo sapiens
  source 1..21: mol_type = transcribed RNA
gcctgccccctccaacagcca

SEQ ID NO: 1346 - RNA, 22 nt, Homo sapiens
  source 1..22: mol_type = transcribed RNA
cagccctcctcccgcacccaaa

SEQ ID NO: 1347 - RNA, 22 nt, Homo sapiens
  source 1..22: mol_type = transcribed RNA
tttgggtgcgggaggagggctg

SEQ ID NO: 1348 - RNA, 22 nt, Homo sapiens
  source 1..22: mol_type = transcribed RNA
taggggcagcagaggacctggg

SEQ ID NO: 1349 - RNA, 22 nt, Homo sapiens
  source 1..22: mol_type = transcribed RNA
cccaggtcctctgctgccccta

SEQ ID NO: 1350 - RNA, 22 nt, Homo sapiens
  source 1..22: mol_type = transcribed RNA
ttgaggagacatggtgggggcc

SEQ ID NO: 1351 - RNA, 22 nt, Homo sapiens
  source 1..22: mol_type = transcribed RNA
ggcccccaccatgtctcctcaa

SEQ ID NO: 1352 - RNA, 21 nt, Homo sapiens
  source 1..21: mol_type = transcribed RNA
gcagcccagctgaggcctctg

SEQ ID NO: 1353 - RNA, 21 nt, Homo sapiens
  source 1..21: mol_type = transcribed RNA
cagaggcctcagctgggctgc

SEQ ID NO: 1354 - RNA, 22 nt, Homo sapiens
  source 1..22: mol_type = transcribed RNA
gagcaggcgaggctgggctgaa

SEQ ID NO: 1355 - RNA, 22 nt, Homo sapiens
  source 1..22: mol_type = transcribed RNA
ttcagcccagcctcgcctgctc

SEQ ID NO: 1356 - RNA, 23 nt, Homo sapiens
  source 1..23: mol_type = transcribed RNA
ccagccacggactgagagtgcat

SEQ ID NO: 1357 - RNA, 23 nt, Homo sapiens
  source 1..23: mol_type = transcribed RNA
atgcactctcagtccgtggctgg

SEQ ID NO: 1358 - RNA, 23 nt, Homo sapiens
  source 1..23: mol_type = transcribed RNA
gtcctccaggccatgagctgcgg

SEQ ID NO: 1359 - RNA, 23 nt, Homo sapiens
  source 1..23: mol_type = transcribed RNA
ccgcagctcatggcctggaggac

SEQ ID NO: 1360 - RNA, 22 nt, Homo sapiens
  source 1..22: mol_type = transcribed RNA
tcaggcagtgtgggtatcagat

SEQ ID NO: 1361 - RNA, 22 nt, Homo sapiens
  source 1..22: mol_type = transcribed RNA
atctgatacccacactgcctga

SEQ ID NO: 1362 - RNA, 23 nt, Homo sapiens
  source 1..23: mol_type = transcribed RNA
tgagagtggaattcacagtattt

SEQ ID NO: 1363 - RNA, 23 nt, Homo sapiens
  source 1..23: mol_type = transcribed RNA
aaatactgtgaattccactctca

SEQ ID NO: 1364 - RNA, 23 nt, Homo sapiens
  source 1..23: mol_type = transcribed RNA
atactgtgaatttcactgtcaca

SEQ ID NO: 1365 - RNA, 23 nt, Homo sapiens
  source 1..23: mol_type = transcribed RNA
tgtgacagtgaaattcacagtat

SEQ ID NO: 1366 - RNA, 21 nt, Homo sapiens
  source 1..21: mol_type = transcribed RNA
caaatggacaggataacacct

SEQ ID NO: 1367 - RNA, 21 nt, Homo sapiens
  source 1..21: mol_type = transcribed RNA
aggtgttatcctgtccatttg

SEQ ID NO: 1368 - RNA, 22 nt, Homo sapiens
  source 1..22: mol_type = transcribed RNA
aggtgttatcctatccatttgc

SEQ ID NO: 1369 - RNA, 22 nt, Homo sapiens
  source 1..22: mol_type = transcribed RNA
gcaaatggataggataacacct

SEQ ID NO: 1370 - RNA, 22 nt, Homo sapiens
  source 1..22: mol_type = transcribed RNA
tgatctcaccgctgcctccttc

SEQ ID NO: 1371 - RNA, 22 nt, Homo sapiens
  source 1..22: mol_type = transcribed RNA
gaaggaggcagcggtgagatca

SEQ ID NO: 1372 - RNA, 22 nt, Homo sapiens
  source 1..22: mol_type = transcribed RNA
caggaggcagtgggcgagcagg

SEQ ID NO: 1373 - RNA, 22 nt, Homo sapiens
  source 1..22: mol_type = transcribed RNA
cctgctcgcccactgcctcctg

SEQ ID NO: 1374 - RNA, 22 nt, Homo sapiens
  source 1..22: mol_type = transcribed RNA
tgcaagacggatactgtcatct

SEQ ID NO: 1375 - RNA, 22 nt, Homo sapiens
  source 1..22: mol_type = transcribed RNA
agatgacagtatccgtcttgca

SEQ ID NO: 1376 - RNA, 24 nt, Homo sapiens
  source 1..24: mol_type = transcribed RNA
tgtcagtgactcctgccccttggt

SEQ ID NO: 1377 - RNA, 24 nt, Homo sapiens
  source 1..24: mol_type = transcribed RNA
accaaggggcaggagtcactgaca

SEQ ID NO: 1378 - RNA, 22 nt, Homo sapiens
  source 1..22: mol_type = transcribed RNA
agggggcgcagtcactgacgtg

SEQ ID NO: 1379 - RNA, 22 nt, Homo sapiens
  source 1..22: mol_type = transcribed RNA
cacgtcagtgactgcgccccct

SEQ ID NO: 1380 - RNA, 23 nt, Homo sapiens
  source 1..23: mol_type = transcribed RNA
tcaaaatgtagaggaagacccca

SEQ ID NO: 1381 - RNA, 23 nt, Homo sapiens
  source 1..23: mol_type = transcribed RNA
tggggtcttcctctacattttga

SEQ ID NO: 1382 - RNA, 22 nt, Homo sapiens
  source 1..22: mol_type = transcribed RNA
aatttactctgcaatcttctcc

SEQ ID NO: 1383 - RNA, 22 nt, Homo sapiens
  source 1..22: mol_type = transcribed RNA
ggagaagattgcagagtaaatt

SEQ ID NO: 1384 - RNA, 22 nt, Homo sapiens
  source 1..22: mol_type = transcribed RNA
agaagattgcagagtaagttcc

SEQ ID NO: 1385 - RNA, 22 nt, Homo sapiens
  source 1..22: mol_type = transcribed RNA
ggaacttactctgcaatcttct

SEQ ID NO: 1386 - RNA, 26 nt, Homo sapiens
  source 1..26: mol_type = transcribed RNA
cacaggactgactcctcaccccagtg

SEQ ID NO: 1387 - RNA, 26 nt, Homo sapiens
  source 1..26: mol_type = transcribed RNA
cactggggtgaggagtcagtcctgtg

SEQ ID NO: 1388 - RNA, 22 nt, Homo sapiens
  source 1..22: mol_type = transcribed RNA
tctggggatgaggacagtgtgt

SEQ ID NO: 1389 - RNA, 22 nt, Homo sapiens
  source 1..22: mol_type = transcribed RNA
acacactgtcctcatccccaga

SEQ ID NO: 1390 - RNA, 20 nt, Homo sapiens
  source 1..20: mol_type = transcribed RNA
atgggtgatgggtgtggtgt

SEQ ID NO: 1391 - RNA, 20 nt, Homo sapiens
  source 1..20: mol_type = transcribed RNA
acaccacacccatcacccat

SEQ ID NO: 1392 - RNA, 22 nt, Homo sapiens
  source 1..22: mol_type = transcribed RNA
ttggccaccacacctacccctt

SEQ ID NO: 1393 - RNA, 22 nt, Homo sapiens
  source 1..22: mol_type = transcribed RNA
aaggggtaggtgtggtggccaa

SEQ ID NO: 1394 - RNA, 22 nt, Homo sapiens
  source 1..22: mol_type = transcribed RNA
tgtagttgtattgtattgccac

SEQ ID NO: 1395 - RNA, 22 nt, Homo sapiens
  source 1..22: mol_type = transcribed RNA
gtggcaatacaatacaactaca

SEQ ID NO: 1396 - RNA, 23 nt, Homo sapiens
  source 1..23: mol_type = transcribed RNA
tagcaatacagtacaaatatagt

SEQ ID NO: 1397 - RNA, 23 nt, Homo sapiens
  source 1..23: mol_type = transcribed RNA
actatatttgtactgtattgcta

SEQ ID NO: 1398 - RNA, 22 nt, Homo sapiens
  source 1..22: mol_type = transcribed RNA
tcagtcacatatctagtgtcta

SEQ ID NO: 1399 - RNA, 22 nt, Homo sapiens
  source 1..22: mol_type = transcribed RNA
tagacactagatatgtgactga

SEQ ID NO: 1400 - RNA, 22 nt, Homo sapiens
  source 1..22: mol_type = transcribed RNA
gacactaggcatgtgagtgatt

SEQ ID NO: 1401 - RNA, 22 nt, Homo sapiens
  source 1..22: mol_type = transcribed RNA
aatcactcacatgcctagtgtc

SEQ ID NO: 1402 - RNA, 22 nt, Homo sapiens
  source 1..22: mol_type = transcribed RNA
tcaatcacttggtaattgctgt

SEQ ID NO: 1403 - RNA, 22 nt, Homo sapiens
  source 1..22: mol_type = transcribed RNA
acagcaattaccaagtgattga

SEQ ID NO: 1404 - RNA, 25 nt, Homo sapiens
  source 1..25: mol_type = transcribed RNA
agcggggaggaagtgggcgctgctt

SEQ ID NO: 1405 - RNA, 25 nt, Homo sapiens
  source 1..25: mol_type = transcribed RNA
aagcagcgcccacttcctccccgct

SEQ ID NO: 1406 - RNA, 22 nt, Homo sapiens
  source 1..22: mol_type = transcribed RNA
agcccgccccagccgaggttct

SEQ ID NO: 1407 - RNA, 22 nt, Homo sapiens
  source 1..22: mol_type = transcribed RNA
agaacctcggctggggcgggct

SEQ ID NO: 1408 - RNA, 23 nt, Homo sapiens
  source 1..23: mol_type = transcribed RNA
gccccggcgcgggcgggttctgg

SEQ ID NO: 1409 - RNA, 23 nt, Homo sapiens
  source 1..23: mol_type = transcribed RNA
ccagaacccgcccgcgccggggc

SEQ ID NO: 1410 - RNA, 22 nt, Homo sapiens
  source 1..22: mol_type = transcribed RNA
agcaaggcggcatctctctgat

SEQ ID NO: 1411 - RNA, 22 nt, Homo sapiens
  source 1..22: mol_type = transcribed RNA
atcagagagatgccgccttgct

SEQ ID NO: 1412 - RNA, 21 nt, Homo sapiens
  source 1..21: mol_type = transcribed RNA
agagatgccgccttgctcctt

SEQ ID NO: 1413 - RNA, 21 nt, Homo sapiens
  source 1..21: mol_type = transcribed RNA
aaggagcaaggcggcatctct

SEQ ID NO: 1414 - RNA, 23 nt, Homo sapiens
  source 1..23: mol_type = transcribed RNA
ttgaagaggaggtgctctgtagc

SEQ ID NO: 1415 - RNA, 23 nt, Homo sapiens
  source 1..23: mol_type = transcribed RNA
gctacagagcacctcctcttcaa

SEQ ID NO: 1416 - RNA, 22 nt, Homo sapiens
  source 1..22: mol_type = transcribed RNA
acaacagtgacttgctctccaa

SEQ ID NO: 1417 - RNA, 22 nt, Homo sapiens
  source 1..22: mol_type = transcribed RNA
ttggagagcaagtcactgttgt

SEQ ID NO: 1418 - RNA, 18 nt, Homo sapiens
  source 1..18: mol_type = transcribed RNA
gggtgagggcaggtggtt

SEQ ID NO: 1419 - RNA, 18 nt, Homo sapiens
  source 1..18: mol_type = transcribed RNA
aaccacctgccctcaccc

SEQ ID NO: 1420 - RNA, 18 nt, Homo sapiens
  source 1..18: mol_type = transcribed RNA
cgtgtcttctggcttgat

SEQ ID NO: 1421 - RNA, 18 nt, Homo sapiens
  source 1..18: mol_type = transcribed RNA
atcaagccagaagacacg

SEQ ID NO: 1422 - RNA, 23 nt, Homo sapiens
  source 1..23: mol_type = transcribed RNA
tgcatcaggccagaagacatgag

SEQ ID NO: 1423 - RNA, 23 nt, Homo sapiens
  source 1..23: mol_type = transcribed RNA
ctcatgtcttctggcctgatgca

SEQ ID NO: 1424 - RNA, 21 nt, Homo sapiens
  source 1..21: mol_type = transcribed RNA
aatgagagacctgtactgtat

SEQ ID NO: 1425 - RNA, 21 nt, Homo sapiens
  source 1..21: mol_type = transcribed RNA
atacagtacaggtctctcatt

SEQ ID NO: 1426 - RNA, 22 nt, Homo sapiens
  source 1..22: mol_type = transcribed RNA
tccagtacaggtctctcatttc

SEQ ID NO: 1427 - RNA, 22 nt, Homo sapiens
  source 1..22: mol_type = transcribed RNA
gaaatgagagacctgtactgga

SEQ ID NO: 1428 - RNA, 22 nt, Homo sapiens
  source 1..22: mol_type = transcribed RNA
tgggatccagacagtgggagaa

SEQ ID NO: 1429 - RNA, 22 nt, Homo sapiens
  source 1..22: mol_type = transcribed RNA
ttctcccactgtctggatccca

SEQ ID NO: 1430 - RNA, 22 nt, Homo sapiens
  source 1..22: mol_type = transcribed RNA
ttctcccactaccaggctccca

SEQ ID NO: 1431 - RNA, 22 nt, Homo sapiens
  source 1..22: mol_type = transcribed RNA
tgggagcctggtagtgggagaa

SEQ ID NO: 1432 - RNA, 22 nt, Homo sapiens
  source 1..22: mol_type = transcribed RNA
ccaacctaggtggtcagagttg

SEQ ID NO: 1433 - RNA, 22 nt, Homo sapiens
  source 1..22: mol_type = transcribed RNA
caactctgaccacctaggttgg

SEQ ID NO: 1434 - RNA, 22 nt, Homo sapiens
  source 1..22: mol_type = transcribed RNA
aactctgaccccttaggttgat

SEQ ID NO: 1435 - RNA, 22 nt, Homo sapiens
  source 1..22: mol_type = transcribed RNA
atcaacctaaggggtcagagtt

SEQ ID NO: 1436 - RNA, 23 nt, Homo sapiens
  source 1..23: mol_type = transcribed RNA
gtgccaccttaactgcagccaat

SEQ ID NO: 1437 - RNA, 23 nt, Homo sapiens
  source 1..23: mol_type = transcribed RNA
attggctgcagttaaggtggcac

SEQ ID NO: 1438 - RNA, 22 nt, Homo sapiens
  source 1..22: mol_type = transcribed RNA
aagttggctgcagttaaggtgg

SEQ ID NO: 1439 - RNA, 22 nt, Homo sapiens
  source 1..22: mol_type = transcribed RNA
ccaccttaactgcagccaactt

SEQ ID NO: 1440 - RNA, 22 nt, Homo sapiens
  source 1..22: mol_type = transcribed RNA
aagggggaaggaaacatggaga

SEQ ID NO: 1441 - RNA, 22 nt, Homo sapiens
  source 1..22: mol_type = transcribed RNA
tctccatgtttccttccccctt

SEQ ID NO: 1442 - RNA, 22 nt, Homo sapiens
  source 1..22: mol_type = transcribed RNA
tccatgtttccttcccccttct

SEQ ID NO: 1443 - RNA, 22 nt, Homo sapiens
  source 1..22: mol_type = transcribed RNA
agaagggggaaggaaacatgga

SEQ ID NO: 1444 - RNA, 21 nt, Homo sapiens
  source 1..21: mol_type = transcribed RNA
acacatgggtggctgtggcct

SEQ ID NO: 1445 - RNA, 21 nt, Homo sapiens
  source 1..21: mol_type = transcribed RNA
aggccacagccacccatgtgt

SEQ ID NO: 1446 - RNA, 22 nt, Homo sapiens
  source 1..22: mol_type = transcribed RNA
taggccacagccacccatgtgt

SEQ ID NO: 1447 - RNA, 22 nt, Homo sapiens
  source 1..22: mol_type = transcribed RNA
acacatgggtggctgtggccta

SEQ ID NO: 1448 - RNA, 21 nt, Homo sapiens
  source 1..21: mol_type = transcribed RNA
agctgtacctgaaaccaagca

SEQ ID NO: 1449 - RNA, 21 nt, Homo sapiens
  source 1..21: mol_type = transcribed RNA
tgcttggtttcaggtacagct

SEQ ID NO: 1450 - RNA, 22 nt, Homo sapiens
  source 1..22: mol_type = transcribed RNA
tcacaaatctataatatgcagg

SEQ ID NO: 1451 - RNA, 22 nt, Homo sapiens
  source 1..22: mol_type = transcribed RNA
cctgcatattatagatttgtga

SEQ ID NO: 1452 - RNA, 21 nt, Homo sapiens
  source 1..21: mol_type = transcribed RNA
tgcttaagttgtaccaagtat

SEQ ID NO: 1453 - RNA, 21 nt, Homo sapiens
  source 1..21: mol_type = transcribed RNA
atacttggtacaacttaagca

SEQ ID NO: 1454 - RNA, 22 nt, Homo sapiens
  source 1..22: mol_type = transcribed RNA
cctggcatatttggtataactt

SEQ ID NO: 1455 - RNA, 22 nt, Homo sapiens
  source 1..22: mol_type = transcribed RNA
aagttataccaaatatgccagg

SEQ ID NO: 1456 - RNA, 22 nt, Homo sapiens
  source 1..22: mol_type = transcribed RNA
tgagggctccaggtgacggtgg

SEQ ID NO: 1457 - RNA, 22 nt, Homo sapiens
  source 1..22: mol_type = transcribed RNA
ccaccgtcacctggagccctca

SEQ ID NO: 1458 - RNA, 22 nt, Homo sapiens
  source 1..22: mol_type = transcribed RNA
acctgccagcacctccctgcag

SEQ ID NO: 1459 - RNA, 22 nt, Homo sapiens
  source 1..22: mol_type = transcribed RNA
ctgcagggaggtgctggcaggt

SEQ ID NO: 1460 - RNA, 23 nt, Homo sapiens
  source 1..23: mol_type = transcribed RNA
ggcaggagggctgtgccaggttg

SEQ ID NO: 1461 - RNA, 23 nt, Homo sapiens
  source 1..23: mol_type = transcribed RNA
caacctggcacagccctcctgcc

SEQ ID NO: 1462 - RNA, 22 nt, Homo sapiens
  source 1..22: mol_type = transcribed RNA
ccctctctggctcctccccaaa

SEQ ID NO: 1463 - RNA, 22 nt, Homo sapiens
  source 1..22: mol_type = transcribed RNA
tttggggaggagccagagaggg

SEQ ID NO: 1464 - RNA, 24 nt, Homo sapiens
  source 1..24: mol_type = transcribed RNA
tgggggagccatgagataagagca

SEQ ID NO: 1465 - RNA, 24 nt, Homo sapiens
  source 1..24: mol_type = transcribed RNA
tgctcttatctcatggctccccca

SEQ ID NO: 1466 - RNA, 21 nt, Homo sapiens
  source 1..21: mol_type = transcribed RNA
gtaccttctggttcagctagt

SEQ ID NO: 1467 - RNA, 21 nt, Homo sapiens
  source 1..21: mol_type = transcribed RNA
actagctgaaccagaaggtac

SEQ ID NO: 1468 - RNA, 23 nt, Homo sapiens
  source 1..23: mol_type = transcribed RNA
aactgaaccaggagtgagcttcg

SEQ ID NO: 1469 - RNA, 23 nt, Homo sapiens
  source 1..23: mol_type = transcribed RNA
cgaagctcactcctggttcagtt

SEQ ID NO: 1470 - RNA, 22 nt, Homo sapiens
  source 1..22: mol_type = transcribed RNA
tggggaaggcgtcagtgtcggg

SEQ ID NO: 1471 - RNA, 22 nt, Homo sapiens
  source 1..22: mol_type = transcribed RNA
cccgacactgacgccttcccca

SEQ ID NO: 1472 - RNA, 21 nt, Homo sapiens
  source 1..21: mol_type = transcribed RNA
agaccctgcagccttcccacc

SEQ ID NO: 1473 - RNA, 21 nt, Homo sapiens
  source 1..21: mol_type = transcribed RNA
ggtgggaaggctgcagggtct

SEQ ID NO: 1474 - RNA, 22 nt, Homo sapiens
  source 1..22: mol_type = transcribed RNA
acccaggttccctctggccgca

SEQ ID NO: 1475 - RNA, 22 nt, Homo sapiens
  source 1..22: mol_type = transcribed RNA
tgcggccagagggaacctgggt

SEQ ID NO: 1476 - RNA, 23 nt, Homo sapiens
  source 1..23: mol_type = transcribed RNA
agggccagaggagcctggagtgg

SEQ ID NO: 1477 - RNA, 23 nt, Homo sapiens
  source 1..23: mol_type = transcribed RNA
ccactccaggctcctctggccct

SEQ ID NO: 1478 - RNA, 22 nt, Homo sapiens
  source 1..22: mol_type = transcribed RNA
atagtgggaagctggcagattc

SEQ ID NO: 1479 - RNA, 22 nt, Homo sapiens
  source 1..22: mol_type = transcribed RNA
gaatctgccagcttcccactat

SEQ ID NO: 1480 - RNA, 21 nt, Homo sapiens
  source 1..21: mol_type = transcribed RNA
atctgccagcttccacagtgg

SEQ ID NO: 1481 - RNA, 21 nt, Homo sapiens
  source 1..21: mol_type = transcribed RNA
ccactgtggaagctggcagat

SEQ ID NO: 1482 - RNA, 25 nt, Homo sapiens
  source 1..25: mol_type = transcribed RNA
catgctgacctccctcctgccccag

SEQ ID NO: 1483 - RNA, 25 nt, Homo sapiens
  source 1..25: mol_type = transcribed RNA
ctggggcaggagggaggtcagcatg

SEQ ID NO: 1484 - RNA, 23 nt, Homo sapiens
  source 1..23: mol_type = transcribed RNA
tgggaggggagaggcagcaagca

SEQ ID NO: 1485 - RNA, 23 nt, Homo sapiens
  source 1..23: mol_type = transcribed RNA
tgcttgctgcctctcccctccca

SEQ ID NO: 1486 - RNA, 22 nt, Homo sapiens
  source 1..22: mol_type = transcribed RNA
tcatttatctgttgggaagcta

SEQ ID NO: 1487 - RNA, 22 nt, Homo sapiens
  source 1..22: mol_type = transcribed RNA
tagcttcccaacagataaatga

SEQ ID NO: 1488 - RNA, 23 nt, Homo sapiens
  source 1..23: mol_type = transcribed RNA
ctggcggagcccattccatgcca

SEQ ID NO: 1489 - RNA, 23 nt, Homo sapiens
  source 1..23: mol_type = transcribed RNA
tggcatggaatgggctccgccag

SEQ ID NO: 1490 - RNA, 22 nt, Homo sapiens
  source 1..22: mol_type = transcribed RNA
cacacaagtggcccccaacact

SEQ ID NO: 1491 - RNA, 22 nt, Homo sapiens
  source 1..22: mol_type = transcribed RNA
agtgttgggggccacttgtgtg

SEQ ID NO: 1492 - RNA, 22 nt, Homo sapiens
  source 1..22: mol_type = transcribed RNA
tgctgggggccacatgagtgtg

SEQ ID NO: 1493 - RNA, 22 nt, Homo sapiens
  source 1..22: mol_type = transcribed RNA
cacactcatgtggcccccagca

SEQ ID NO: 1494 - RNA, 21 nt, Homo sapiens
  source 1..21: mol_type = transcribed RNA
gccctgacctgtcctgttctg

SEQ ID NO: 1495 - RNA, 21 nt, Homo sapiens
  source 1..21: mol_type = transcribed RNA
cagaacaggacaggtcagggc

SEQ ID NO: 1496 - RNA, 23 nt, Homo sapiens
  source 1..23: mol_type = transcribed RNA
tgtagagcagggagcaggaagct

SEQ ID NO: 1497 - RNA, 23 nt, Homo sapiens
  source 1..23: mol_type = transcribed RNA
agcttcctgctccctgctctaca

SEQ ID NO: 1498 - RNA, 22 nt, Homo sapiens
  source 1..22: mol_type = transcribed RNA
ccaccaggtctagcattgggat

SEQ ID NO: 1499 - RNA, 22 nt, Homo sapiens
  source 1..22: mol_type = transcribed RNA
atcccaatgctagacctggtgg

SEQ ID NO: 1500 - RNA, 22 nt, Homo sapiens
  source 1..22: mol_type = transcribed RNA
aatcccaatgctagacccggtg

SEQ ID NO: 1501 - RNA, 22 nt, Homo sapiens
  source 1..22: mol_type = transcribed RNA
caccgggtctagcattgggatt

SEQ ID NO: 1502 - RNA, 22 nt, Homo sapiens
  source 1..22: mol_type = transcribed RNA
gctgcgggctgcggtcagggcg

SEQ ID NO: 1503 - RNA, 22 nt, Homo sapiens
  source 1..22: mol_type = transcribed RNA
cgccctgaccgcagcccgcagc

SEQ ID NO: 1504 - RNA, 21 nt, Homo sapiens
  source 1..21: mol_type = transcribed RNA
aaaggtgctcaaattagacat

SEQ ID NO: 1505 - RNA, 21 nt, Homo sapiens
  source 1..21: mol_type = transcribed RNA
atgtctaatttgagcaccttt

SEQ ID NO: 1506 - RNA, 22 nt, Homo sapiens
  source 1..22: mol_type = transcribed RNA
cctaatttgaacaccttcggta

SEQ ID NO: 1507 - RNA, 22 nt, Homo sapiens
  source 1..22: mol_type = transcribed RNA
taccgaaggtgttcaaattagg

SEQ ID NO: 1508 - RNA, 19 nt, Homo sapiens
  source 1..19: mol_type = transcribed RNA
aggcaggttatctgggctg

SEQ ID NO: 1509 - RNA, 19 nt, Homo sapiens
  source 1..19: mol_type = transcribed RNA
cagcccagataacctgcct

SEQ ID NO: 1510 - RNA, 20 nt, Homo sapiens
  source 1..20: mol_type = transcribed RNA
atgcgaggatgctgacagtg

SEQ ID NO: 1511 - RNA, 20 nt, Homo sapiens
  source 1..20: mol_type = transcribed RNA
cactgtcagcatcctcgcat

SEQ ID NO: 1512 - RNA, 22 nt, Homo sapiens
  source 1..22: mol_type = transcribed RNA
tgaaactggagcgcctggagga

SEQ ID NO: 1513 - RNA, 22 nt, Homo sapiens
  source 1..22: mol_type = transcribed RNA
tcctccaggcgctccagtttca

SEQ ID NO: 1514 - RNA, 22 nt, Homo sapiens
  source 1..22: mol_type = transcribed RNA
accagcgcgttttcagtttcat

SEQ ID NO: 1515 - RNA, 22 nt, Homo sapiens
  source 1..22: mol_type = transcribed RNA
atgaaactgaaaacgcgctggt

SEQ ID NO: 1516 - RNA, 25 nt, Homo sapiens
  source 1..25: mol_type = transcribed RNA
aagggaggaggagcggaggggccct

SEQ ID NO: 1517 - RNA, 25 nt, Homo sapiens
  source 1..25: mol_type = transcribed RNA
agggcccctccgctcctcctccctt

SEQ ID NO: 1518 - RNA, 22 nt, Homo sapiens
  source 1..22: mol_type = transcribed RNA
gcccgagaggatccgtccctgc

SEQ ID NO: 1519 - RNA, 22 nt, Homo sapiens
  source 1..22: mol_type = transcribed RNA
gcagggacggatcctctcgggc

SEQ ID NO: 1520 - RNA, 22 nt, Homo sapiens
  source 1..22: mol_type = transcribed RNA
aggactgatcctctcgggcagg

SEQ ID NO: 1521 - RNA, 22 nt, Homo sapiens
  source 1..22: mol_type = transcribed RNA
cctgcccgagaggatcagtcct

SEQ ID NO: 1522 - RNA, 23 nt, Homo sapiens
  source 1..23: mol_type = transcribed RNA
tcaggcaaagggatatttacaga

SEQ ID NO: 1523 - RNA, 23 nt, Homo sapiens
  source 1..23: mol_type = transcribed RNA
tctgtaaatatccctttgcctga

SEQ ID NO: 1524 - RNA, 21 nt, Homo sapiens
  source 1..21: mol_type = transcribed RNA
tttctgtcttttctggtccag

SEQ ID NO: 1525 - RNA, 21 nt, Homo sapiens
  source 1..21: mol_type = transcribed RNA
ctggaccagaaaagacagaaa

SEQ ID NO: 1526 - RNA, 23 nt, Homo sapiens
  source 1..23: mol_type = transcribed RNA
tggccggatgggacaggaggcat

SEQ ID NO: 1527 - RNA, 23 nt, Homo sapiens
  source 1..23: mol_type = transcribed RNA
atgcctcctgtcccatccggcca

SEQ ID NO: 1528 - RNA, 23 nt, Homo sapiens
  source 1..23: mol_type = transcribed RNA
tctaaagactagacttcgctatg

SEQ ID NO: 1529 - RNA, 23 nt, Homo sapiens
  source 1..23: mol_type = transcribed RNA
catagcgaagtctagtctttaga

SEQ ID NO: 1530 - RNA, 23 nt, Homo sapiens
  source 1..23: mol_type = transcribed RNA
tggcccggcgacgtctcacggtc

SEQ ID NO: 1531 - RNA, 23 nt, Homo sapiens
  source 1..23: mol_type = transcribed RNA
gaccgtgagacgtcgccgggcca

SEQ ID NO: 1532 - RNA, 23 nt, Homo sapiens
  source 1..23: mol_type = transcribed RNA
tgagtggggctcccgggacggcg

SEQ ID NO: 1533 - RNA, 23 nt, Homo sapiens
  source 1..23: mol_type = transcribed RNA
cgccgtcccgggagccccactca

SEQ ID NO: 1534 - RNA, 21 nt, Homo sapiens
  source 1..21: mol_type = transcribed RNA
agcggtgctcctgcgggccga

SEQ ID NO: 1535 - RNA, 21 nt, Homo sapiens
  source 1..21: mol_type = transcribed RNA
tcggcccgcaggagcaccgct

SEQ ID NO: 1536 - RNA, 23 nt, Homo sapiens
  source 1..23: mol_type = transcribed RNA
ccggtcccaggagaacctgcaga

SEQ ID NO: 1537 - RNA, 23 nt, Homo sapiens
  source 1..23: mol_type = transcribed RNA
tctgcaggttctcctgggaccgg

SEQ ID NO: 1538 - RNA, 22 nt, Homo sapiens
  source 1..22: mol_type = transcribed RNA
aaggcccgggctttcctcccag

SEQ ID NO: 1539 - RNA, 22 nt, Homo sapiens
  source 1..22: mol_type = transcribed RNA
ctgggaggaaagcccgggcctt

SEQ ID NO: 1540 - RNA, 22 nt, Homo sapiens
  source 1..22: mol_type = transcribed RNA
agggaaggaggcttggtcttag

SEQ ID NO: 1541 - RNA, 22 nt, Homo sapiens
  source 1..22: mol_type = transcribed RNA
ctaagaccaagcctccttccct

SEQ ID NO: 1542 - RNA, 21 nt, Homo sapiens
  source 1..21: mol_type = transcribed RNA
gaggtttggggaggatttgct

SEQ ID NO: 1543 - RNA, 21 nt, Homo sapiens
  source 1..21: mol_type = transcribed RNA
agcaaatcctccccaaacctc

SEQ ID NO: 1544 - RNA, 20 nt, Homo sapiens
  source 1..20: mol_type = transcribed RNA
cgcccctcctgcccccacag

SEQ ID NO: 1545 - RNA, 20 nt, Homo sapiens
  source 1..20: mol_type = transcribed RNA
ctgtgggggcaggaggggcg

SEQ ID NO: 1546 - RNA, 22 nt, Homo sapiens
  source 1..22: mol_type = transcribed RNA
tgcggggacaggccagggcatc

SEQ ID NO: 1547 - RNA, 22 nt, Homo sapiens
  source 1..22: mol_type = transcribed RNA
gatgccctggcctgtccccgca

SEQ ID NO: 1548 - RNA, 22 nt, Homo sapiens
  source 1..22: mol_type = transcribed RNA
cctgacccaccccctcccgcag

SEQ ID NO: 1549 - RNA, 22 nt, Homo sapiens
  source 1..22: mol_type = transcribed RNA
ctgcgggagggggtgggtcagg

SEQ ID NO: 1550 - RNA, 22 nt, Homo sapiens
  source 1..22: mol_type = transcribed RNA
ctcgggcggaggtggttgagtg

SEQ ID NO: 1551 - RNA, 22 nt, Homo sapiens
  source 1..22: mol_type = transcribed RNA
cactcaaccacctccgcccgag

SEQ ID NO: 1552 - RNA, 24 nt, Homo sapiens
  source 1..24: mol_type = transcribed RNA
agaggacccgtagctgctagaagg

SEQ ID NO: 1553 - RNA, 24 nt, Homo sapiens
  source 1..24: mol_type = transcribed RNA
ccttctagcagctacgggtcctct

SEQ ID NO: 1554 - RNA, 22 nt, Homo sapiens
  source 1..22: mol_type = transcribed RNA
ttgtggatctcaaggatgtgct

SEQ ID NO: 1555 - RNA, 22 nt, Homo sapiens
  source 1..22: mol_type = transcribed RNA
agcacatccttgagatccacaa

SEQ ID NO: 1556 - RNA, 22 nt, Homo sapiens
  source 1..22: mol_type = transcribed RNA
ttctctttctttagccttgtgt

SEQ ID NO: 1557 - RNA, 22 nt, Homo sapiens
  source 1..22: mol_type = transcribed RNA
acacaaggctaaagaaagagaa

SEQ ID NO: 1558 - RNA, 22 nt, Homo sapiens
  source 1..22: mol_type = transcribed RNA
caaggccaaaggaagagaacag

SEQ ID NO: 1559 - RNA, 22 nt, Homo sapiens
  source 1..22: mol_type = transcribed RNA
ctgttctcttcctttggccttg

SEQ ID NO: 1560 - RNA, 23 nt, Homo sapiens
  source 1..23: mol_type = transcribed RNA
atgcggacctgggttagcggagt

SEQ ID NO: 1561 - RNA, 23 nt, Homo sapiens
  source 1..23: mol_type = transcribed RNA
actccgctaacccaggtccgcat

SEQ ID NO: 1562 - RNA, 22 nt, Homo sapiens
  source 1..22: mol_type = transcribed RNA
agccaggctctgaagggaaagt

SEQ ID NO: 1563 - RNA, 22 nt, Homo sapiens
  source 1..22: mol_type = transcribed RNA
actttcccttcagagcctggct

SEQ ID NO: 1564 - RNA, 22 nt, Homo sapiens
  source 1..22: mol_type = transcribed RNA
tttcccttcagagcctggcttt

SEQ ID NO: 1565 - RNA, 22 nt, Homo sapiens
  source 1..22: mol_type = transcribed RNA
aaagccaggctctgaagggaaa

SEQ ID NO: 1566 - RNA, 22 nt, Homo sapiens
  source 1..22: mol_type = transcribed RNA
ccagagatggttgccttcctat

SEQ ID NO: 1567 - RNA, 22 nt, Homo sapiens
  source 1..22: mol_type = transcribed RNA
ataggaaggcaaccatctctgg

SEQ ID NO: 1568 - RNA, 23 nt, Homo sapiens
  source 1..23: mol_type = transcribed RNA
cagggaggcgctcactctctgct

SEQ ID NO: 1569 - RNA, 23 nt, Homo sapiens
  source 1..23: mol_type = transcribed RNA
agcagagagtgagcgcctccctg

SEQ ID NO: 1570 - RNA, 22 nt, Homo sapiens
  source 1..22: mol_type = transcribed RNA
catgacgtcacagaggcttcgc

SEQ ID NO: 1571 - RNA, 22 nt, Homo sapiens
  source 1..22: mol_type = transcribed RNA
gcgaagcctctgtgacgtcatg

SEQ ID NO: 1572 - RNA, 23 nt, Homo sapiens
  source 1..23: mol_type = transcribed RNA
aggcctctgtgacgtcacggtgt

SEQ ID NO: 1573 - RNA, 23 nt, Homo sapiens
  source 1..23: mol_type = transcribed RNA
acaccgtgacgtcacagaggcct

SEQ ID NO: 1574 - RNA, 23 nt, Homo sapiens
  source 1..23: mol_type = transcribed RNA
tgccccacctgctgaccaccctc

SEQ ID NO: 1575 - RNA, 23 nt, Homo sapiens
  source 1..23: mol_type = transcribed RNA
gagggtggtcagcaggtggggca

SEQ ID NO: 1576 - RNA, 23 nt, Homo sapiens
  source 1..23: mol_type = transcribed RNA
gtgagtgggagccggtggggctg

SEQ ID NO: 1577 - RNA, 23 nt, Homo sapiens
  source 1..23: mol_type = transcribed RNA
cagccccaccggctcccactcac

SEQ ID NO: 1578 - RNA, 21 nt, Homo sapiens
  source 1..21: mol_type = transcribed RNA
taggactagatgttggaatta

SEQ ID NO: 1579 - RNA, 21 nt, Homo sapiens
  source 1..21: mol_type = transcribed RNA
taattccaacatctagtccta

SEQ ID NO: 1580 - RNA, 22 nt, Homo sapiens
  source 1..22: mol_type = transcribed RNA
aaattcatgttcaatctaaacc

SEQ ID NO: 1581 - RNA, 22 nt, Homo sapiens
  source 1..22: mol_type = transcribed RNA
ggtttagattgaacatgaattt

SEQ ID NO: 1582 - RNA, 22 nt, Homo sapiens
  source 1..22: mol_type = transcribed RNA
tttagattgaacatgaagttag

SEQ ID NO: 1583 - RNA, 22 nt, Homo sapiens
  source 1..22: mol_type = transcribed RNA
ctaacttcatgttcaatctaaa

SEQ ID NO: 1584 - RNA, 21 nt, Homo sapiens
  source 1..21: mol_type = transcribed RNA
gagggcatgcgcactttgtcc

SEQ ID NO: 1585 - RNA, 21 nt, Homo sapiens
  source 1..21: mol_type = transcribed RNA
ggacaaagtgcgcatgccctc

SEQ ID NO: 1586 - RNA, 21 nt, Homo sapiens
  source 1..21: mol_type = transcribed RNA
acaaggtgtgcatgcctgacc

SEQ ID NO: 1587 - RNA, 21 nt, Homo sapiens
  source 1..21: mol_type = transcribed RNA
ggtcaggcatgcacaccttgt

SEQ ID NO: 1588 - RNA, 22 nt, Homo sapiens
  source 1..22: mol_type = transcribed RNA
cttctgatcaagatttgtggtg

SEQ ID NO: 1589 - RNA, 22 nt, Homo sapiens
  source 1..22: mol_type = transcribed RNA
caccacaaatcttgatcagaag

SEQ ID NO: 1590 - RNA, 21 nt, Homo sapiens
  source 1..21: mol_type = transcribed RNA
ccaaatcttgatcagaagcct

SEQ ID NO: 1591 - RNA, 21 nt, Homo sapiens
  source 1..21: mol_type = transcribed RNA
aggcttctgatcaagatttgg

SEQ ID NO: 1592 - RNA, 24 nt, Homo sapiens
  source 1..24: mol_type = transcribed RNA
aggcaggggctggtgctgggcggg

SEQ ID NO: 1593 - RNA, 24 nt, Homo sapiens
  source 1..24: mol_type = transcribed RNA
cccgcccagcaccagcccctgcct

SEQ ID NO: 1594 - RNA, 21 nt, Homo sapiens
  source 1..21: mol_type = transcribed RNA
cgcctgcccagccctcctgct

SEQ ID NO: 1595 - RNA, 21 nt, Homo sapiens
  source 1..21: mol_type = transcribed RNA
agcaggagggctgggcaggcg

SEQ ID NO: 1596 - RNA, 22 nt, Homo sapiens
  source 1..22: mol_type = transcribed RNA
ttaactcctttcacacccatgg

SEQ ID NO: 1597 - RNA, 22 nt, Homo sapiens
  source 1..22: mol_type = transcribed RNA
ccatgggtgtgaaaggagttaa

SEQ ID NO: 1598 - RNA, 21 nt, Homo sapiens
  source 1..21: mol_type = transcribed RNA
tggatgtggaaggagttatct

SEQ ID NO: 1599 - RNA, 21 nt, Homo sapiens
  source 1..21: mol_type = transcribed RNA
agataactccttccacatcca

SEQ ID NO: 1600 - RNA, 22 nt, Homo sapiens
  source 1..22: mol_type = transcribed RNA
tgagtgattgatagctatgttc

SEQ ID NO: 1601 - RNA, 22 nt, Homo sapiens
  source 1..22: mol_type = transcribed RNA
gaacatagctatcaatcactca

SEQ ID NO: 1602 - RNA, 21 nt, Homo sapiens
  source 1..21: mol_type = transcribed RNA
atagcaattgctcttttggaa

SEQ ID NO: 1603 - RNA, 21 nt, Homo sapiens
  source 1..21: mol_type = transcribed RNA
ttccaaaagagcaattgctat

SEQ ID NO: 1604 - RNA, 21 nt, Homo sapiens
  source 1..21: mol_type = transcribed RNA
tctgaaagagcagttggtgtt

SEQ ID NO: 1605 - RNA, 21 nt, Homo sapiens
  source 1..21: mol_type = transcribed RNA
aacaccaactgctctttcaga

SEQ ID NO: 1606 - RNA, 23 nt, Homo sapiens
  source 1..23: mol_type = transcribed RNA
cgcgggcgctcctggccgccgcc

SEQ ID NO: 1607 - RNA, 23 nt, Homo sapiens
  source 1..23: mol_type = transcribed RNA
ggcggcggccaggagcgcccgcg

SEQ ID NO: 1608 - RNA, 20 nt, Homo sapiens
  source 1..20: mol_type = transcribed RNA
ccaggagatccagagagaat

SEQ ID NO: 1609 - RNA, 20 nt, Homo sapiens
  source 1..20: mol_type = transcribed RNA
attctctctggatctcctgg

SEQ ID NO: 1610 - RNA, 22 nt, Homo sapiens
  source 1..22: mol_type = transcribed RNA
attctctctggatcccatggat

SEQ ID NO: 1611 - RNA, 22 nt, Homo sapiens
  source 1..22: mol_type = transcribed RNA
atccatgggatccagagagaat

SEQ ID NO: 1612 - RNA, 22 nt, Homo sapiens
  source 1..22: mol_type = transcribed RNA
tctgccatcctccctcccctac

SEQ ID NO: 1613 - RNA, 22 nt, Homo sapiens
  source 1..22: mol_type = transcribed RNA
gtaggggagggaggatggcaga

SEQ ID NO: 1614 - RNA, 24 nt, Homo sapiens
  source 1..24: mol_type = transcribed RNA
ggtgggatggagagaaggtatgag

SEQ ID NO: 1615 - RNA, 24 nt, Homo sapiens
  source 1..24: mol_type = transcribed RNA
ctcataccttctctccatcccacc

SEQ ID NO: 1616 - RNA, 18 nt, Homo sapiens
  source 1..18: mol_type = transcribed RNA
tgagatgacactgtagct

SEQ ID NO: 1617 - RNA, 18 nt, Homo sapiens
  source 1..18: mol_type = transcribed RNA
agctacagtgtcatctca

SEQ ID NO: 1618 - RNA, 21 nt, Homo sapiens
  source 1..21: mol_type = transcribed RNA
agcagacttgacctacaatta

SEQ ID NO: 1619 - RNA, 21 nt, Homo sapiens
  source 1..21: mol_type = transcribed RNA
taattgtaggtcaagtctgct

SEQ ID NO: 1620 - RNA, 22 nt, Homo sapiens
  source 1..22: mol_type = transcribed RNA
cagaacaggagcatagaaaggc

SEQ ID NO: 1621 - RNA, 22 nt, Homo sapiens
  source 1..22: mol_type = transcribed RNA
gcctttctatgctcctgttctg

SEQ ID NO: 1622 - RNA, 22 nt, Homo sapiens
  source 1..22: mol_type = transcribed RNA
ttaattttttgtttcggtcact

SEQ ID NO: 1623 - RNA, 22 nt, Homo sapiens
  source 1..22: mol_type = transcribed RNA
agtgaccgaaacaaaaaattaa

SEQ ID NO: 1624 - RNA, 23 nt, Homo sapiens
  source 1..23: mol_type = transcribed RNA
cttgccatcctggtccactgcat

SEQ ID NO: 1625 - RNA, 23 nt, Homo sapiens
  source 1..23: mol_type = transcribed RNA
atgcagtggaccaggatggcaag

SEQ ID NO: 1626 - RNA, 22 nt, Homo sapiens
  source 1..22: mol_type = transcribed RNA
gtggaccaggatggcaagggct

SEQ ID NO: 1627 - RNA, 22 nt, Homo sapiens
  source 1..22: mol_type = transcribed RNA
agcccttgccatcctggtccac

SEQ ID NO: 1628 - RNA, 22 nt, Homo sapiens
  source 1..22: mol_type = transcribed RNA
atacctcatctagaatgctgta

SEQ ID NO: 1629 - RNA, 22 nt, Homo sapiens
  source 1..22: mol_type = transcribed RNA
tacagcattctagatgaggtat

SEQ ID NO: 1630 - RNA, 22 nt, Homo sapiens
  source 1..22: mol_type = transcribed RNA
ttctagatgagagatatatata

SEQ ID NO: 1631 - RNA, 22 nt, Homo sapiens
  source 1..22: mol_type = transcribed RNA
tatatatatctctcatctagaa

SEQ ID NO: 1632 - RNA, 22 nt, Homo sapiens
  source 1..22: mol_type = transcribed RNA
tcttcttcctttgcagagttga

SEQ ID NO: 1633 - RNA, 22 nt, Homo sapiens
  source 1..22: mol_type = transcribed RNA
tcaactctgcaaaggaagaaga

SEQ ID NO: 1634 - RNA, 22 nt, Homo sapiens
  source 1..22: mol_type = transcribed RNA
aattctgtaaaggaagaagagg

SEQ ID NO: 1635 - RNA, 22 nt, Homo sapiens
  source 1..22: mol_type = transcribed RNA
cctcttcttcctttacagaatt

SEQ ID NO: 1636 - RNA, 22 nt, Homo sapiens
  source 1..22: mol_type = transcribed RNA
taggagggaatagtaaaagcag

SEQ ID NO: 1637 - RNA, 22 nt, Homo sapiens
  source 1..22: mol_type = transcribed RNA
ctgcttttactattccctccta

SEQ ID NO: 1638 - RNA, 22 nt, Homo sapiens
  source 1..22: mol_type = transcribed RNA
acccttgagcctgatccctagc

SEQ ID NO: 1639 - RNA, 22 nt, Homo sapiens
  source 1..22: mol_type = transcribed RNA
gctagggatcaggctcaagggt

SEQ ID NO: 1640 - RNA, 22 nt, Homo sapiens
  source 1..22: mol_type = transcribed RNA
aatgttggaatcctcgctagag

SEQ ID NO: 1641 - RNA, 22 nt, Homo sapiens
  source 1..22: mol_type = transcribed RNA
ctctagcgaggattccaacatt

SEQ ID NO: 1642 - RNA, 21 nt, Homo sapiens
  source 1..21: mol_type = transcribed RNA
tagcggggattccaatattgg

SEQ ID NO: 1643 - RNA, 21 nt, Homo sapiens
  source 1..21: mol_type = transcribed RNA
ccaatattggaatccccgcta

SEQ ID NO: 1644 - RNA, 22 nt, Homo sapiens
  source 1..22: mol_type = transcribed RNA
tgattgtcttcatatctagaac

SEQ ID NO: 1645 - RNA, 22 nt, Homo sapiens
  source 1..22: mol_type = transcribed RNA
gttctagatatgaagacaatca

SEQ ID NO: 1646 - RNA, 22 nt, Homo sapiens
  source 1..22: mol_type = transcribed RNA
ttctggatatgaagacaatcaa

SEQ ID NO: 1647 - RNA, 22 nt, Homo sapiens
  source 1..22: mol_type = transcribed RNA
ttgattgtcttcatatccagaa

SEQ ID NO: 1648 - RNA, 23 nt, Homo sapiens
  source 1..23: mol_type = transcribed RNA
ccccggtgttggggcgcgtctgc

SEQ ID NO: 1649 - RNA, 23 nt, Homo sapiens
  source 1..23: mol_type = transcribed RNA
gcagacgcgccccaacaccgggg

SEQ ID NO: 1650 - RNA, 21 nt, Homo sapiens
  source 1..21: mol_type = transcribed RNA
ggcgcgcccagctcccgggct

SEQ ID NO: 1651 - RNA, 21 nt, Homo sapiens
  source 1..21: mol_type = transcribed RNA
agcccgggagctgggcgcgcc

SEQ ID NO: 1652 - RNA, 20 nt, Homo sapiens
  source 1..20: mol_type = transcribed RNA
tgaggagatgctgggactga

SEQ ID NO: 1653 - RNA, 20 nt, Homo sapiens
  source 1..20: mol_type = transcribed RNA
tcagtcccagcatctcctca

SEQ ID NO: 1654 - RNA, 21 nt, Homo sapiens
  source 1..21: mol_type = transcribed RNA
agagtcggcgacgccgccagc

SEQ ID NO: 1655 - RNA, 21 nt, Homo sapiens
  source 1..21: mol_type = transcribed RNA
gctggcggcgtcgccgactct

SEQ ID NO: 1656 - RNA, 22 nt, Homo sapiens
  source 1..22: mol_type = transcribed RNA
tgaagccagctctggtctgggc

SEQ ID NO: 1657 - RNA, 22 nt, Homo sapiens
  source 1..22: mol_type = transcribed RNA
gcccagaccagagctggcttca

SEQ ID NO: 1658 - RNA, 22 nt, Homo sapiens
  source 1..22: mol_type = transcribed RNA
tgagaccaggactggatgcacc

SEQ ID NO: 1659 - RNA, 22 nt, Homo sapiens
  source 1..22: mol_type = transcribed RNA
ggtgcatccagtcctggtctca

SEQ ID NO: 1660 - RNA, 24 nt, Homo sapiens
  source 1..24: mol_type = transcribed RNA
gatgcgccgcccactgccccgcgc

SEQ ID NO: 1661 - RNA, 24 nt, Homo sapiens
  source 1..24: mol_type = transcribed RNA
gcgcggggcagtgggcggcgcatc

SEQ ID NO: 1662 - RNA, 22 nt, Homo sapiens
  source 1..22: mol_type = transcribed RNA
gcgggggtggcggcggcatccc

SEQ ID NO: 1663 - RNA, 22 nt, Homo sapiens
  source 1..22: mol_type = transcribed RNA
gggatgccgccgccacccccgc

SEQ ID NO: 1664 - RNA, 22 nt, Homo sapiens
  source 1..22: mol_type = transcribed RNA
ttacggaccagctaagggaggc

SEQ ID NO: 1665 - RNA, 22 nt, Homo sapiens
  source 1..22: mol_type = transcribed RNA
gcctcccttagctggtccgtaa

SEQ ID NO: 1666 - RNA, 21 nt, Homo sapiens
  source 1..21: mol_type = transcribed RNA
cacacatagcaggtgtatata

SEQ ID NO: 1667 - RNA, 21 nt, Homo sapiens
  source 1..21: mol_type = transcribed RNA
tatatacacctgctatgtgtg

SEQ ID NO: 1668 - RNA, 22 nt, Homo sapiens
  source 1..22: mol_type = transcribed RNA
gtatacacctgatatgtgtatg

SEQ ID NO: 1669 - RNA, 22 nt, Homo sapiens
  source 1..22: mol_type = transcribed RNA
catacacatatcaggtgtatac

SEQ ID NO: 1670 - RNA, 22 nt, Homo sapiens
  source 1..22: mol_type = transcribed RNA
tgaatggtaaagcgatgtcaca

SEQ ID NO: 1671 - RNA, 22 nt, Homo sapiens
  source 1..22: mol_type = transcribed RNA
tgtgacatcgctttaccattca

SEQ ID NO: 1672 - RNA, 20 nt, Homo sapiens
  source 1..20: mol_type = transcribed RNA
atcgctttaccattcatgtt

SEQ ID NO: 1673 - RNA, 20 nt, Homo sapiens
  source 1..20: mol_type = transcribed RNA
aacatgaatggtaaagcgat

SEQ ID NO: 1674 - RNA, 18 nt, Homo sapiens
  source 1..18: mol_type = transcribed RNA
tggatatgatgactgaaa

SEQ ID NO: 1675 - RNA, 18 nt, Homo sapiens
  source 1..18: mol_type = transcribed RNA
tttcagtcatcatatcca

SEQ ID NO: 1676 - RNA, 18 nt, Homo sapiens
  source 1..18: mol_type = transcribed RNA
cggtgagcgctcgctggc

SEQ ID NO: 1677 - RNA, 18 nt, Homo sapiens
  source 1..18: mol_type = transcribed RNA
gccagcgagcgctcaccg

SEQ ID NO: 1678 - RNA, 23 nt, Homo sapiens
  source 1..23: mol_type = transcribed RNA
tctgcactgtgagttggctggct

SEQ ID NO: 1679 - RNA, 23 nt, Homo sapiens
  source 1..23: mol_type = transcribed RNA
agccagccaactcacagtgcaga

SEQ ID NO: 1680 - RNA, 24 nt, Homo sapiens
  source 1..24: mol_type = transcribed RNA
acatcctgctccacagggcagagg

SEQ ID NO: 1681 - RNA, 24 nt, Homo sapiens
  source 1..24: mol_type = transcribed RNA
cctctgccctgtggagcaggatgt

SEQ ID NO: 1682 - RNA, 22 nt, Homo sapiens
  source 1..22: mol_type = transcribed RNA
tctggctatctcacgagactgt

SEQ ID NO: 1683 - RNA, 22 nt, Homo sapiens
  source 1..22: mol_type = transcribed RNA
acagtctcgtgagatagccaga

SEQ ID NO: 1684 - RNA, 22 nt, Homo sapiens
  source 1..22: mol_type = transcribed RNA
atattattagccacttctggat

SEQ ID NO: 1685 - RNA, 22 nt, Homo sapiens
  source 1..22: mol_type = transcribed RNA
atccagaagtggctaataatat

SEQ ID NO: 1686 - RNA, 21 nt, Homo sapiens
  source 1..21: mol_type = transcribed RNA
agaagtggctaataatattga

SEQ ID NO: 1687 - RNA, 21 nt, Homo sapiens
  source 1..21: mol_type = transcribed RNA
tcaatattattagccacttct

SEQ ID NO: 1688 - RNA, 22 nt, Homo sapiens
  source 1..22: mol_type = transcribed RNA
taaagtggcagagtatagacac

SEQ ID NO: 1689 - RNA, 22 nt, Homo sapiens
  source 1..22: mol_type = transcribed RNA
gtgtctatactctgccacttta

SEQ ID NO: 1690 - RNA, 22 nt, Homo sapiens
  source 1..22: mol_type = transcribed RNA
tgtctatactctgtcactttac

SEQ ID NO: 1691 - RNA, 22 nt, Homo sapiens
  source 1..22: mol_type = transcribed RNA
gtaaagtgacagagtatagaca

SEQ ID NO: 1692 - RNA, 21 nt, Homo sapiens
  source 1..21: mol_type = transcribed RNA
tctcagtaagtggcactctgt

SEQ ID NO: 1693 - RNA, 21 nt, Homo sapiens
  source 1..21: mol_type = transcribed RNA
acagagtgccacttactgaga

SEQ ID NO: 1694 - RNA, 21 nt, Homo sapiens
  source 1..21: mol_type = transcribed RNA
gacagagtgccacttactgaa

SEQ ID NO: 1695 - RNA, 21 nt, Homo sapiens
  source 1..21: mol_type = transcribed RNA
ttcagtaagtggcactctgtc

SEQ ID NO: 1696 - RNA, 22 nt, Homo sapiens
  source 1..22: mol_type = transcribed RNA
aactcacgaagtataccgaagt

SEQ ID NO: 1697 - RNA, 22 nt, Homo sapiens
  source 1..22: mol_type = transcribed RNA
acttcggtatacttcgtgagtt

SEQ ID NO: 1698 - RNA, 22 nt, Homo sapiens
  source 1..22: mol_type = transcribed RNA
ttcggtatactttgtgaattgg

SEQ ID NO: 1699 - RNA, 22 nt, Homo sapiens
  source 1..22: mol_type = transcribed RNA
ccaattcacaaagtataccgaa

SEQ ID NO: 1700 - RNA, 22 nt, Homo sapiens
  source 1..22: mol_type = transcribed RNA
actggcatgctgcatttatata

SEQ ID NO: 1701 - RNA, 22 nt, Homo sapiens
  source 1..22: mol_type = transcribed RNA
tatataaatgcagcatgccagt

SEQ ID NO: 1702 - RNA, 22 nt, Homo sapiens
  source 1..22: mol_type = transcribed RNA
atctaaatgcagcatgccagtc

SEQ ID NO: 1703 - RNA, 22 nt, Homo sapiens
  source 1..22: mol_type = transcribed RNA
gactggcatgctgcatttagat

SEQ ID NO: 1704 - RNA, 19 nt, Homo sapiens
  source 1..19: mol_type = transcribed RNA
catccgtccgtctgtccac

SEQ ID NO: 1705 - RNA, 19 nt, Homo sapiens
  source 1..19: mol_type = transcribed RNA
gtggacagacggacggatg

SEQ ID NO: 1706 - RNA, 21 nt, Homo sapiens
  source 1..21: mol_type = transcribed RNA
agtggaccgaggaaggaagga

SEQ ID NO: 1707 - RNA, 21 nt, Homo sapiens
  source 1..21: mol_type = transcribed RNA
tccttccttcctcggtccact

SEQ ID NO: 1708 - RNA, 22 nt, Homo sapiens
  source 1..22: mol_type = transcribed RNA
tacacaagaaaaccaaggctca

SEQ ID NO: 1709 - RNA, 22 nt, Homo sapiens
  source 1..22: mol_type = transcribed RNA
tgagccttggttttcttgtgta

SEQ ID NO: 1710 - RNA, 21 nt, Homo sapiens
  source 1..21: mol_type = transcribed RNA
taacataatagtgtggattga

SEQ ID NO: 1711 - RNA, 21 nt, Homo sapiens
  source 1..21: mol_type = transcribed RNA
tcaatccacactattatgtta

SEQ ID NO: 1712 - RNA, 21 nt, Homo sapiens
  source 1..21: mol_type = transcribed RNA
tgcttaaccttgccctcgaaa

SEQ ID NO: 1713 - RNA, 21 nt, Homo sapiens
  source 1..21: mol_type = transcribed RNA
tttcgagggcaaggttaagca

SEQ ID NO: 1714 - RNA, 21 nt, Homo sapiens
  source 1..21: mol_type = transcribed RNA
ttggacggtaaggttaagcaa

SEQ ID NO: 1715 - RNA, 21 nt, Homo sapiens
  source 1..21: mol_type = transcribed RNA
ttgcttaaccttaccgtccaa

SEQ ID NO: 1716 - RNA, 21 nt, Homo sapiens
  source 1..21: mol_type = transcribed RNA
aaaagcatcaggaagtaccca

SEQ ID NO: 1717 - RNA, 21 nt, Homo sapiens
  source 1..21: mol_type = transcribed RNA
tgggtacttcctgatgctttt

SEQ ID NO: 1718 - RNA, 21 nt, Homo sapiens
  source 1..21: mol_type = transcribed RNA
gcaggacaggcagaagtggat

SEQ ID NO: 1719 - RNA, 21 nt, Homo sapiens
  source 1..21: mol_type = transcribed RNA
atccacttctgcctgtcctgc

SEQ ID NO: 1720 - RNA, 22 nt, Homo sapiens
  source 1..22: mol_type = transcribed RNA
cagggctggcagtgacatgggt

SEQ ID NO: 1721 - RNA, 22 nt, Homo sapiens
  source 1..22: mol_type = transcribed RNA
acccatgtcactgccagccctg

SEQ ID NO: 1722 - RNA, 22 nt, Homo sapiens
  source 1..22: mol_type = transcribed RNA
atttccctgccattcccttggc

SEQ ID NO: 1723 - RNA, 22 nt, Homo sapiens
  source 1..22: mol_type = transcribed RNA
gccaagggaatggcagggaaat

SEQ ID NO: 1724 - RNA, 22 nt, Homo sapiens
  source 1..22: mol_type = transcribed RNA
tggcggcggtagttatgggctt

SEQ ID NO: 1725 - RNA, 22 nt, Homo sapiens
  source 1..22: mol_type = transcribed RNA
aagcccataactaccgccgcca

SEQ ID NO: 1726 - RNA, 22 nt, Homo sapiens
  source 1..22: mol_type = transcribed RNA
gctccctctagggtcgctcgga

SEQ ID NO: 1727 - RNA, 22 nt, Homo sapiens
  source 1..22: mol_type = transcribed RNA
tccgagcgaccctagagggagc

SEQ ID NO: 1728 - RNA, 22 nt, Homo sapiens
  source 1..22: mol_type = transcribed RNA
tgggaacttagtagaggtttaa

SEQ ID NO: 1729 - RNA, 22 nt, Homo sapiens
  source 1..22: mol_type = transcribed RNA
ttaaacctctactaagttccca

SEQ ID NO: 1730 - RNA, 21 nt, Homo sapiens
  source 1..21: mol_type = transcribed RNA
tggggctagtgatgcaggacg

SEQ ID NO: 1731 - RNA, 21 nt, Homo sapiens
  source 1..21: mol_type = transcribed RNA
cgtcctgcatcactagcccca

SEQ ID NO: 1732 - RNA, 22 nt, Homo sapiens
  source 1..22: mol_type = transcribed RNA
gctgacagcagggctggccgct

SEQ ID NO: 1733 - RNA, 22 nt, Homo sapiens
  source 1..22: mol_type = transcribed RNA
agcggccagccctgctgtcagc

SEQ ID NO: 1734 - RNA, 21 nt, Homo sapiens
  source 1..21: mol_type = transcribed RNA
attggactgctgatggcccgt

SEQ ID NO: 1735 - RNA, 21 nt, Homo sapiens
  source 1..21: mol_type = transcribed RNA
acgggccatcagcagtccaat

SEQ ID NO: 1736 - RNA, 22 nt, Homo sapiens
  source 1..22: mol_type = transcribed RNA
aggccatcagcagtccaatgaa

SEQ ID NO: 1737 - RNA, 22 nt, Homo sapiens
  source 1..22: mol_type = transcribed RNA
ttcattggactgctgatggcct

SEQ ID NO: 1738 - RNA, 22 nt, Homo sapiens
  source 1..22: mol_type = transcribed RNA
ttggacagaaaacacgcaggaa

SEQ ID NO: 1739 - RNA, 22 nt, Homo sapiens
  source 1..22: mol_type = transcribed RNA
ttcctgcgtgttttctgtccaa

SEQ ID NO: 1740 - RNA, 20 nt, Homo sapiens
  source 1..20: mol_type = transcribed RNA
cctgcgtgttttctgtccaa

SEQ ID NO: 1741 - RNA, 20 nt, Homo sapiens
  source 1..20: mol_type = transcribed RNA
ttggacagaaaacacgcagg

SEQ ID NO: 1742 - RNA, 22 nt, Homo sapiens
  source 1..22: mol_type = transcribed RNA
tgagacaggcttatgctgctat

SEQ ID NO: 1743 - RNA, 22 nt, Homo sapiens
  source 1..22: mol_type = transcribed RNA
atagcagcataagcctgtctca

SEQ ID NO: 1744 - RNA, 22 nt, Homo sapiens
  source 1..22: mol_type = transcribed RNA
atagcagcatgaacctgtctca

SEQ ID NO: 1745 - RNA, 22 nt, Homo sapiens
  source 1..22: mol_type = transcribed RNA
tgagacaggttcatgctgctat

SEQ ID NO: 1746 - RNA, 20 nt, Homo sapiens
  source 1..20: mol_type = transcribed RNA
gagacaggttcatgctgcta

SEQ ID NO: 1747 - RNA, 20 nt, Homo sapiens
  source 1..20: mol_type = transcribed RNA
tagcagcatgaacctgtctc

SEQ ID NO: 1748 - RNA, 21 nt, Homo sapiens
  source 1..21: mol_type = transcribed RNA
atagcagcataagcctgtctc

SEQ ID NO: 1749 - RNA, 21 nt, Homo sapiens
  source 1..21: mol_type = transcribed RNA
gagacaggcttatgctgctat

SEQ ID NO: 1750 - RNA, 22 nt, Homo sapiens
  source 1..22: mol_type = transcribed RNA
tgtgtggatcctggaggaggca

SEQ ID NO: 1751 - RNA, 22 nt, Homo sapiens
  source 1..22: mol_type = transcribed RNA
tgcctcctccaggatccacaca

SEQ ID NO: 1752 - RNA, 22 nt, Homo sapiens
  source 1..22: mol_type = transcribed RNA
agacatcaagatcagtcccaaa

SEQ ID NO: 1753 - RNA, 22 nt, Homo sapiens
  source 1..22: mol_type = transcribed RNA
tttgggactgatcttgatgtct

SEQ ID NO: 1754 - RNA, 22 nt, Homo sapiens
  source 1..22: mol_type = transcribed RNA
tttgggactgatcttgatgtct

SEQ ID NO: 1755 - RNA, 22 nt, Homo sapiens
  source 1..22: mol_type = transcribed RNA
agacatcaagatcagtcccaaa

SEQ ID NO: 1756 - RNA, 22 nt, Homo sapiens
  source 1..22: mol_type = transcribed RNA
aaggaaccagaaaatgagaagt

SEQ ID NO: 1757 - RNA, 22 nt, Homo sapiens
  source 1..22: mol_type = transcribed RNA
acttctcattttctggttcctt

SEQ ID NO: 1758 - RNA, 22 nt, Homo sapiens
  source 1..22: mol_type = transcribed RNA
tctggccttgacttgactcttt

SEQ ID NO: 1759 - RNA, 22 nt, Homo sapiens
  source 1..22: mol_type = transcribed RNA
aaagagtcaagtcaaggccaga

SEQ ID NO: 1760 - RNA, 23 nt, Homo sapiens
  source 1..23: mol_type = transcribed RNA
tcaaggccagaggtcccacagca

SEQ ID NO: 1761 - RNA, 23 nt, Homo sapiens
  source 1..23: mol_type = transcribed RNA
tgctgtgggacctctggccttga

SEQ ID NO: 1762 - RNA, 21 nt, Homo sapiens
  source 1..21: mol_type = transcribed RNA
actccagttttagttctcttg

SEQ ID NO: 1763 - RNA, 21 nt, Homo sapiens
  source 1..21: mol_type = transcribed RNA
caagagaactaaaactggagt

SEQ ID NO: 1764 - RNA, 22 nt, Homo sapiens
  source 1..22: mol_type = transcribed RNA
aagagaactgaaagtggagcct

SEQ ID NO: 1765 - RNA, 22 nt, Homo sapiens
  source 1..22: mol_type = transcribed RNA
aggctccactttcagttctctt

SEQ ID NO: 1766 - RNA, 22 nt, Homo sapiens
  source 1..22: mol_type = transcribed RNA
taaggggtgtatggcagatgca

SEQ ID NO: 1767 - RNA, 22 nt, Homo sapiens
  source 1..22: mol_type = transcribed RNA
tgcatctgccatacacccctta

SEQ ID NO: 1768 - RNA, 21 nt, Homo sapiens
  source 1..21: mol_type = transcribed RNA
tttcagataacagtattacat

SEQ ID NO: 1769 - RNA, 21 nt, Homo sapiens
  source 1..21: mol_type = transcribed RNA
atgtaatactgttatctgaaa

SEQ ID NO: 1770 - RNA, 22 nt, Homo sapiens
  source 1..22: mol_type = transcribed RNA
aagcaatactgttacctgaaat

SEQ ID NO: 1771 - RNA, 22 nt, Homo sapiens
  source 1..22: mol_type = transcribed RNA
atttcaggtaacagtattgctt

SEQ ID NO: 1772 - RNA, 22 nt, Homo sapiens
  source 1..22: mol_type = transcribed RNA
tactaactgcagattcaagtga

SEQ ID NO: 1773 - RNA, 22 nt, Homo sapiens
  source 1..22: mol_type = transcribed RNA
tcacttgaatctgcagttagta

SEQ ID NO: 1774 - RNA, 21 nt, Homo sapiens
  source 1..21: mol_type = transcribed RNA
attgcctaacatgtgccagaa

SEQ ID NO: 1775 - RNA, 21 nt, Homo sapiens
  source 1..21: mol_type = transcribed RNA
ttctggcacatgttaggcaat

SEQ ID NO: 1776 - RNA, 22 nt, Homo sapiens
  source 1..22: mol_type = transcribed RNA
tctggtatgtagtaggtaataa

SEQ ID NO: 1777 - RNA, 22 nt, Homo sapiens
  source 1..22: mol_type = transcribed RNA
ttattacctactacataccaga

SEQ ID NO: 1778 - RNA, 22 nt, Homo sapiens
  source 1..22: mol_type = transcribed RNA
agttgcctttttgttcccatgc

SEQ ID NO: 1779 - RNA, 22 nt, Homo sapiens
  source 1..22: mol_type = transcribed RNA
gcatgggaacaaaaaggcaact

SEQ ID NO: 1780 - RNA, 21 nt, Homo sapiens
  source 1..21: mol_type = transcribed RNA
ataggcaccaaaaagcaacaa

SEQ ID NO: 1781 - RNA, 21 nt, Homo sapiens
  source 1..21: mol_type = transcribed RNA
ttgttgctttttggtgcctat

SEQ ID NO: 1782 - RNA, 22 nt, Homo sapiens
  source 1..22: mol_type = transcribed RNA
cctgcaactttgcctgatcaga

SEQ ID NO: 1783 - RNA, 22 nt, Homo sapiens
  source 1..22: mol_type = transcribed RNA
tctgatcaggcaaagttgcagg

SEQ ID NO: 1784 - RNA, 22 nt, Homo sapiens
  source 1..22: mol_type = transcribed RNA
tgatcaggcaaaattgcagact

SEQ ID NO: 1785 - RNA, 22 nt, Homo sapiens
  source 1..22: mol_type = transcribed RNA
agtctgcaattttgcctgatca

SEQ ID NO: 1786 - RNA, 22 nt, Homo sapiens
  source 1..22: mol_type = transcribed RNA
ttgtggctggtcatgaggctaa

SEQ ID NO: 1787 - RNA, 22 nt, Homo sapiens
  source 1..22: mol_type = transcribed RNA
ttagcctcatgaccagccacaa

SEQ ID NO: 1788 - RNA, 21 nt, Homo sapiens
  source 1..21: mol_type = transcribed RNA
ttagtctcatgatcagacaca

SEQ ID NO: 1789 - RNA, 21 nt, Homo sapiens
  source 1..21: mol_type = transcribed RNA
tgtgtctgatcatgagactaa

SEQ ID NO: 1790 - RNA, 22 nt, Homo sapiens
  source 1..22: mol_type = transcribed RNA
aaagatagacaattggctaaat

SEQ ID NO: 1791 - RNA, 22 nt, Homo sapiens
  source 1..22: mol_type = transcribed RNA
atttagccaattgtctatcttt

SEQ ID NO: 1792 - RNA, 22 nt, Homo sapiens
  source 1..22: mol_type = transcribed RNA
ttagccaattgtccatctttag

SEQ ID NO: 1793 - RNA, 22 nt, Homo sapiens
  source 1..22: mol_type = transcribed RNA
ctaaagatggacaattggctaa

SEQ ID NO: 1794 - RNA, 22 nt, Homo sapiens
  source 1..22: mol_type = transcribed RNA
tctgtgagaccaaagaactact

SEQ ID NO: 1795 - RNA, 22 nt, Homo sapiens
  source 1..22: mol_type = transcribed RNA
agtagttctttggtctcacaga

SEQ ID NO: 1796 - RNA, 22 nt, Homo sapiens
  source 1..22: mol_type = transcribed RNA
ttgttctttggtctttcagcca

SEQ ID NO: 1797 - RNA, 22 nt, Homo sapiens
  source 1..22: mol_type = transcribed RNA
tggctgaaagaccaaagaacaa

SEQ ID NO: 1798 - RNA, 23 nt, Homo sapiens
  source 1..23: mol_type = transcribed RNA
cgggctgtccggaggggtcggct

SEQ ID NO: 1799 - RNA, 23 nt, Homo sapiens
  source 1..23: mol_type = transcribed RNA
agccgacccctccggacagcccg

SEQ ID NO: 1800 - RNA, 23 nt, Homo sapiens
  source 1..23: mol_type = transcribed RNA
tctgtattctcctttgcctgcag

SEQ ID NO: 1801 - RNA, 23 nt, Homo sapiens
  source 1..23: mol_type = transcribed RNA
ctgcaggcaaaggagaatacaga

SEQ ID NO: 1802 - RNA, 23 nt, Homo sapiens
  source 1..23: mol_type = transcribed RNA
tacatggatggaaaccttcaagc

SEQ ID NO: 1803 - RNA, 23 nt, Homo sapiens
  source 1..23: mol_type = transcribed RNA
gcttgaaggtttccatccatgta

SEQ ID NO: 1804 - RNA, 22 nt, Homo sapiens
  source 1..22: mol_type = transcribed RNA
tatggaggttctagaccatgtt

SEQ ID NO: 1805 - RNA, 22 nt, Homo sapiens
  source 1..22: mol_type = transcribed RNA
aacatggtctagaacctccata

SEQ ID NO: 1806 - RNA, 22 nt, Homo sapiens
  source 1..22: mol_type = transcribed RNA
gggaccatcctgcctgctgtgg

SEQ ID NO: 1807 - RNA, 22 nt, Homo sapiens
  source 1..22: mol_type = transcribed RNA
ccacagcaggcaggatggtccc

SEQ ID NO: 1808 - RNA, 22 nt, Homo sapiens
  source 1..22: mol_type = transcribed RNA
tcagcaggcaggctggtgcagc

SEQ ID NO: 1809 - RNA, 22 nt, Homo sapiens
  source 1..22: mol_type = transcribed RNA
gctgcaccagcctgcctgctga

SEQ ID NO: 1810 - RNA, 22 nt, Homo sapiens
  source 1..22: mol_type = transcribed RNA
tcacctgacctcccatgcctgt

SEQ ID NO: 1811 - RNA, 22 nt, Homo sapiens
  source 1..22: mol_type = transcribed RNA
acaggcatgggaggtcaggtga

SEQ ID NO: 1812 - RNA, 22 nt, Homo sapiens
  source 1..22: mol_type = transcribed RNA
caggcacgggagctcaggtgag

SEQ ID NO: 1813 - RNA, 22 nt, Homo sapiens
  source 1..22: mol_type = transcribed RNA
ctcacctgagctcccgtgcctg

SEQ ID NO: 1814 - RNA, 21 nt, Homo sapiens
  source 1..21: mol_type = transcribed RNA
tgagtgttgtctacgagggca

SEQ ID NO: 1815 - RNA, 21 nt, Homo sapiens
  source 1..21: mol_type = transcribed RNA
tgccctcgtagacaacactca

SEQ ID NO: 1816 - RNA, 21 nt, Homo sapiens
  source 1..21: mol_type = transcribed RNA
actgacaggagagcattttga

SEQ ID NO: 1817 - RNA, 21 nt, Homo sapiens
  source 1..21: mol_type = transcribed RNA
tcaaaatgctctcctgtcagt

SEQ ID NO: 1818 - RNA, 22 nt, Homo sapiens
  source 1..22: mol_type = transcribed RNA
tgacctgggactcggacagctg

SEQ ID NO: 1819 - RNA, 22 nt, Homo sapiens
  source 1..22: mol_type = transcribed RNA
cagctgtccgagtcccaggtca

SEQ ID NO: 1820 - RNA, 22 nt, Homo sapiens
  source 1..22: mol_type = transcribed RNA
tctcaggagtaaagacagagtt

SEQ ID NO: 1821 - RNA, 22 nt, Homo sapiens
  source 1..22: mol_type = transcribed RNA
aactctgtctttactcctgaga

SEQ ID NO: 1822 - RNA, 22 nt, Homo sapiens
  source 1..22: mol_type = transcribed RNA
aactctgtcttcactcatgagt

SEQ ID NO: 1823 - RNA, 22 nt, Homo sapiens
  source 1..22: mol_type = transcribed RNA
actcatgagtgaagacagagtt

SEQ ID NO: 1824 - RNA, 22 nt, Homo sapiens
  source 1..22: mol_type = transcribed RNA
tggggcggagcttccggaggcc

SEQ ID NO: 1825 - RNA, 22 nt, Homo sapiens
  source 1..22: mol_type = transcribed RNA
ggcctccggaagctccgcccca

SEQ ID NO: 1826 - RNA, 22 nt, Homo sapiens
  source 1..22: mol_type = transcribed RNA
caatcagcaagtatactgccct

SEQ ID NO: 1827 - RNA, 22 nt, Homo sapiens
  source 1..22: mol_type = transcribed RNA
agggcagtatacttgctgattg

SEQ ID NO: 1828 - RNA, 22 nt, Homo sapiens
  source 1..22: mol_type = transcribed RNA
tggcagtgtcttagctggttgt

SEQ ID NO: 1829 - RNA, 22 nt, Homo sapiens
  source 1..22: mol_type = transcribed RNA
acaaccagctaagacactgcca

SEQ ID NO: 1830 - RNA, 22 nt, Homo sapiens
  source 1..22: mol_type = transcribed RNA
ccaatattggctgtgctgctcc

SEQ ID NO: 1831 - RNA, 22 nt, Homo sapiens
  source 1..22: mol_type = transcribed RNA
ggagcagcacagccaatattgg

SEQ ID NO: 1832 - RNA, 21 nt, Homo sapiens
  source 1..21: mol_type = transcribed RNA
tagcagcacagaaatattggc

SEQ ID NO: 1833 - RNA, 21 nt, Homo sapiens
  source 1..21: mol_type = transcribed RNA
gccaatatttctgtgctgcta

SEQ ID NO: 1834 - RNA, 21 nt, Homo sapiens
  source 1..21: mol_type = transcribed RNA
taattttatgtataagctagt

SEQ ID NO: 1835 - RNA, 21 nt, Homo sapiens
  source 1..21: mol_type = transcribed RNA
actagcttatacataaaatta

SEQ ID NO: 1836 - RNA, 22 nt, Homo sapiens
  source 1..22: mol_type = transcribed RNA
gagcttattcataaaagtgcag

SEQ ID NO: 1837 - RNA, 22 nt, Homo sapiens
  source 1..22: mol_type = transcribed RNA
ctgcacttttatgaataagctc

SEQ ID NO: 1838 - RNA, 22 nt, Homo sapiens
  source 1..22: mol_type = transcribed RNA
aagacgggaggaaagaagggag

SEQ ID NO: 1839 - RNA, 22 nt, Homo sapiens
  source 1..22: mol_type = transcribed RNA
ctcccttctttcctcccgtctt

SEQ ID NO: 1840 - RNA, 22 nt, Homo sapiens
  source 1..22: mol_type = transcribed RNA
cagtggttttaccctatggtag

SEQ ID NO: 1841 - RNA, 22 nt, Homo sapiens
  source 1..22: mol_type = transcribed RNA
ctaccatagggtaaaaccactg

SEQ ID NO: 1842 - RNA, 22 nt, Homo sapiens
  source 1..22: mol_type = transcribed RNA
attctaatttctccacgtcttt

SEQ ID NO: 1843 - RNA, 22 nt, Homo sapiens
  source 1..22: mol_type = transcribed RNA
aaagacgtggagaaattagaat

SEQ ID NO: 1844 - RNA, 22 nt, Homo sapiens
  source 1..22: mol_type = transcribed RNA
aaccagcaccccaactttggac

SEQ ID NO: 1845 - RNA, 22 nt, Homo sapiens
  source 1..22: mol_type = transcribed RNA
gtccaaagttggggtgctggtt

SEQ ID NO: 1846 - RNA, 24 nt, Homo sapiens
  source 1..24: mol_type = transcribed RNA
aaagacataggatagagtcacctc

SEQ ID NO: 1847 - RNA, 24 nt, Homo sapiens
  source 1..24: mol_type = transcribed RNA
gaggtgactctatcctatgtcttt

SEQ ID NO: 1848 - RNA, 22 nt, Homo sapiens
  source 1..22: mol_type = transcribed RNA
taactggttgaacaactgaacc

SEQ ID NO: 1849 - RNA, 22 nt, Homo sapiens
  source 1..22: mol_type = transcribed RNA
ggttcagttgttcaaccagtta

SEQ ID NO: 1850 - RNA, 20 nt, Homo sapiens
  source 1..20: mol_type = transcribed RNA
cgtgccacccttttccccag

SEQ ID NO: 1851 - RNA, 20 nt, Homo sapiens
  source 1..20: mol_type = transcribed RNA
ctggggaaaagggtggcacg

SEQ ID NO: 1852 - RNA, 17 nt, Homo sapiens
  source 1..17: mol_type = transcribed RNA
gtggggccaggcggtgg

SEQ ID NO: 1853 - RNA, 17 nt, Homo sapiens
  source 1..17: mol_type = transcribed RNA
ccaccgcctggccccac

SEQ ID NO: 1854 - RNA, 22 nt, Homo sapiens
  source 1..22: mol_type = transcribed RNA
aaaagctgggttgagagggcaa

SEQ ID NO: 1855 - RNA, 22 nt, Homo sapiens
  source 1..22: mol_type = transcribed RNA
ttgccctctcaacccagctttt

SEQ ID NO: 1856 - RNA, 22 nt, Homo sapiens
  source 1..22: mol_type = transcribed RNA
ggtccagaggggagataggttc

SEQ ID NO: 1857 - RNA, 22 nt, Homo sapiens
  source 1..22: mol_type = transcribed RNA
gaacctatctcccctctggacc

SEQ ID NO: 1858 - RNA, 23 nt, Homo sapiens
  source 1..23: mol_type = transcribed RNA
tagccttcagatcttggtgtttt

SEQ ID NO: 1859 - RNA, 23 nt, Homo sapiens
  source 1..23: mol_type = transcribed RNA
aaaacaccaagatctgaaggcta

SEQ ID NO: 1860 - RNA, 23 nt, Homo sapiens
  source 1..23: mol_type = transcribed RNA
ccacttggatctgaaggctgccc

SEQ ID NO: 1861 - RNA, 23 nt, Homo sapiens
  source 1..23: mol_type = transcribed RNA
gggcagccttcagatccaagtgg

SEQ ID NO: 1862 - RNA, 22 nt, Homo sapiens
  source 1..22: mol_type = transcribed RNA
tgtgcgcagggagacctctccc

SEQ ID NO: 1863 - RNA, 22 nt, Homo sapiens
  source 1..22: mol_type = transcribed RNA
gggagaggtctccctgcgcaca

SEQ ID NO: 1864 - RNA, 22 nt, Homo sapiens
  source 1..22: mol_type = transcribed RNA
tgtctactactggagacactgg

SEQ ID NO: 1865 - RNA, 22 nt, Homo sapiens
  source 1..22: mol_type = transcribed RNA
ccagtgtctccagtagtagaca

SEQ ID NO: 1866 - RNA, 21 nt, Homo sapiens
  source 1..21: mol_type = transcribed RNA
aaggcagggcccccgctcccc

SEQ ID NO: 1867 - RNA, 21 nt, Homo sapiens
  source 1..21: mol_type = transcribed RNA
ggggagcgggggccctgcctt

SEQ ID NO: 1868 - RNA, 21 nt, Homo sapiens
  source 1..21: mol_type = transcribed RNA
ctgactgttgccgtcctccag

SEQ ID NO: 1869 - RNA, 21 nt, Homo sapiens
  source 1..21: mol_type = transcribed RNA
ctggaggacggcaacagtcag

SEQ ID NO: 1870 - RNA, 25 nt, Homo sapiens
  source 1..25: mol_type = transcribed RNA
aaaaaccacaattacttttgcacca

SEQ ID NO: 1871 - RNA, 25 nt, Homo sapiens
  source 1..25: mol_type = transcribed RNA
tggtgcaaaagtaattgtggttttt

SEQ ID NO: 1872 - RNA, 23 nt, Homo sapiens
  source 1..23: mol_type = transcribed RNA
caaaaaccgcaattacttttgca

SEQ ID NO: 1873 - RNA, 23 nt, Homo sapiens
  source 1..23: mol_type = transcribed RNA
tgcaaaagtaattgcggtttttg

SEQ ID NO: 1874 - RNA, 22 nt, Homo sapiens
  source 1..22: mol_type = transcribed RNA
atgtgcctgagggagtaagaca

SEQ ID NO: 1875 - RNA, 22 nt, Homo sapiens
  source 1..22: mol_type = transcribed RNA
tgtcttactccctcaggcacat

SEQ ID NO: 1876 - RNA, 20 nt, Homo sapiens
  source 1..20: mol_type = transcribed RNA
tcttactccctcaggcactg

SEQ ID NO: 1877 - RNA, 20 nt, Homo sapiens
  source 1..20: mol_type = transcribed RNA
cagtgcctgagggagtaaga

SEQ ID NO: 1878 - RNA, 22 nt, Homo sapiens
  source 1..22: mol_type = transcribed RNA
agacacatttggagagggaccc

SEQ ID NO: 1879 - RNA, 22 nt, Homo sapiens
  source 1..22: mol_type = transcribed RNA
gggtccctctccaaatgtgtct

SEQ ID NO: 1880 - RNA, 22 nt, Homo sapiens
  source 1..22: mol_type = transcribed RNA
ggttccctctccaaatgtgtct

SEQ ID NO: 1881 - RNA, 22 nt, Homo sapiens
  source 1..22: mol_type = transcribed RNA
agacacatttggagagggaacc

SEQ ID NO: 1882 - RNA, 21 nt, Homo sapiens
  source 1..21: mol_type = transcribed RNA
aaaatttctttcactacttag

SEQ ID NO: 1883 - RNA, 21 nt, Homo sapiens
  source 1..21: mol_type = transcribed RNA
ctaagtagtgaaagaaatttt

SEQ ID NO: 1884 - RNA, 21 nt, Homo sapiens
  source 1..21: mol_type = transcribed RNA
ttagtgaaggctattttaatt

SEQ ID NO: 1885 - RNA, 21 nt, Homo sapiens
  source 1..21: mol_type = transcribed RNA
aattaaaatagccttcactaa

SEQ ID NO: 1886 - RNA, 20 nt, Homo sapiens
  source 1..20: mol_type = transcribed RNA
actgtaaacgctttctgatg

SEQ ID NO: 1887 - RNA, 20 nt, Homo sapiens
  source 1..20: mol_type = transcribed RNA
catcagaaagcgtttacagt

SEQ ID NO: 1888 - RNA, 22 nt, Homo sapiens
  source 1..22: mol_type = transcribed RNA
gcatgtgatgaagcaaatcagt

SEQ ID NO: 1889 - RNA, 22 nt, Homo sapiens
  source 1..22: mol_type = transcribed RNA
actgatttgcttcatcacatgc

SEQ ID NO: 1890 - RNA, 24 nt, Homo sapiens
  source 1..24: mol_type = transcribed RNA
caaagtgatgagtaatactggctg

SEQ ID NO: 1891 - RNA, 24 nt, Homo sapiens
  source 1..24: mol_type = transcribed RNA
cagccagtattactcatcactttg

SEQ ID NO: 1892 - RNA, 20 nt, Homo sapiens
  source 1..20: mol_type = transcribed RNA
gaatcggaaaggaggcgccg

SEQ ID NO: 1893 - RNA, 20 nt, Homo sapiens
  source 1..20: mol_type = transcribed RNA
cggcgcctcctttccgattc

SEQ ID NO: 1894 - RNA, 21 nt, Homo sapiens
  source 1..21: mol_type = transcribed RNA
ttgtgaagaaagaaattctta

SEQ ID NO: 1895 - RNA, 21 nt, Homo sapiens
  source 1..21: mol_type = transcribed RNA
taagaatttctttcttcacaa

SEQ ID NO: 1896 - RNA, 22 nt, Homo sapiens
  source 1..22: mol_type = transcribed RNA
aggaggcatcttgagaaatgga

SEQ ID NO: 1897 - RNA, 22 nt, Homo sapiens
  source 1..22: mol_type = transcribed RNA
tccatttctcaagatgcctcct

SEQ ID NO: 1898 - RNA, 24 nt, Homo sapiens
  source 1..24: mol_type = transcribed RNA
acaaaaaaaaaagcccaacccttc

SEQ ID NO: 1899 - RNA, 24 nt, Homo sapiens
  source 1..24: mol_type = transcribed RNA
gaagggttgggcttttttttttgt

SEQ ID NO: 1900 - RNA, 22 nt, Homo sapiens
  source 1..22: mol_type = transcribed RNA
tgttgtacttttttttttgttc

SEQ ID NO: 1901 - RNA, 22 nt, Homo sapiens
  source 1..22: mol_type = transcribed RNA
gaacaaaaaaaaaagtacaaca

SEQ ID NO: 1902 - RNA, 21 nt, Homo sapiens
  source 1..21: mol_type = transcribed RNA
tctctcggctcctcgcggctc

SEQ ID NO: 1903 - RNA, 21 nt, Homo sapiens
  source 1..21: mol_type = transcribed RNA
gagccgcgaggagccgagaga

SEQ ID NO: 1904 - RNA, 23 nt, Homo sapiens
  source 1..23: mol_type = transcribed RNA
cgagggcatttcatgatgcaggc

SEQ ID NO: 1905 - RNA, 23 nt, Homo sapiens
  source 1..23: mol_type = transcribed RNA
gcctgcatcatgaaatgccctcg

SEQ ID NO: 1906 - RNA, 22 nt, Homo sapiens
  source 1..22: mol_type = transcribed RNA
atgaagtgcactcatgatatgt

SEQ ID NO: 1907 - RNA, 22 nt, Homo sapiens
  source 1..22: mol_type = transcribed RNA
acatatcatgagtgcacttcat

SEQ ID NO: 1908 - RNA, 22 nt, Homo sapiens
  source 1..22: mol_type = transcribed RNA
tgtctacattaatgaaaagagc

SEQ ID NO: 1909 - RNA, 22 nt, Homo sapiens
  source 1..22: mol_type = transcribed RNA
gctcttttcattaatgtagaca

SEQ ID NO: 1910 - RNA, 22 nt, Homo sapiens
  source 1..22: mol_type = transcribed RNA
tcaccctgcatcccgcacccag

SEQ ID NO: 1911 - RNA, 22 nt, Homo sapiens
  source 1..22: mol_type = transcribed RNA
ctgggtgcgggatgcagggtga

SEQ ID NO: 1912 - RNA, 22 nt, Homo sapiens
  source 1..22: mol_type = transcribed RNA
gtgggctgggctgggctgggcc

SEQ ID NO: 1913 - RNA, 22 nt, Homo sapiens
  source 1..22: mol_type = transcribed RNA
ggcccagcccagcccagcccac

SEQ ID NO: 1914 - RNA, 20 nt, Homo sapiens
  source 1..20: mol_type = transcribed RNA
cgcgggtcggggtctgcagg

SEQ ID NO: 1915 - RNA, 20 nt, Homo sapiens
  source 1..20: mol_type = transcribed RNA
cctgcagaccccgacccgcg

SEQ ID NO: 1916 - RNA, 21 nt, Homo sapiens
  source 1..21: mol_type = transcribed RNA
tcacctgagctcccgtgcctg

SEQ ID NO: 1917 - RNA, 21 nt, Homo sapiens
  source 1..21: mol_type = transcribed RNA
caggcacgggagctcaggtga

SEQ ID NO: 1918 - RNA, 20 nt, Homo sapiens
  source 1..20: mol_type = transcribed RNA
aggcatgggaggtcaggtga

SEQ ID NO: 1919 - RNA, 20 nt, Homo sapiens
  source 1..20: mol_type = transcribed RNA
tcacctgacctcccatgcct

SEQ ID NO: 1920 - RNA, 23 nt, Homo sapiens
  source 1..23: mol_type = transcribed RNA
catcagcaccctatgtcctttct

SEQ ID NO: 1921 - RNA, 23 nt, Homo sapiens
  source 1..23: mol_type = transcribed RNA
agaaaggacatagggtgctgatg

SEQ ID NO: 1922 - RNA, 22 nt, Homo sapiens
  source 1..22: mol_type = transcribed RNA
aaagacatagttgcaagatggg

SEQ ID NO: 1923 - RNA, 22 nt, Homo sapiens
  source 1..22: mol_type = transcribed RNA
cccatcttgcaactatgtcttt

SEQ ID NO: 1924 - RNA, 22 nt, Homo sapiens
  source 1..22: mol_type = transcribed RNA
tttgtgacctggtccactaacc

SEQ ID NO: 1925 - RNA, 22 nt, Homo sapiens
  source 1..22: mol_type = transcribed RNA
ggttagtggaccaggtcacaaa

SEQ ID NO: 1926 - RNA, 22 nt, Homo sapiens
  source 1..22: mol_type = transcribed RNA
gatggttgaccagagagcacac

SEQ ID NO: 1927 - RNA, 22 nt, Homo sapiens
  source 1..22: mol_type = transcribed RNA
gtgtgctctctggtcaaccatc

SEQ ID NO: 1928 - RNA, 20 nt, Homo sapiens
  source 1..20: mol_type = transcribed RNA
aaaagctgggttgagagggt

SEQ ID NO: 1929 - RNA, 20 nt, Homo sapiens
  source 1..20: mol_type = transcribed RNA
accctctcaacccagctttt

SEQ ID NO: 1930 - RNA, 21 nt, Homo sapiens
  source 1..21: mol_type = transcribed RNA
cacaaggtattggtattacct

SEQ ID NO: 1931 - RNA, 21 nt, Homo sapiens
  source 1..21: mol_type = transcribed RNA
aggtaataccaataccttgtg

SEQ ID NO: 1932 - RNA, 22 nt, Homo sapiens
  source 1..22: mol_type = transcribed RNA
tagtaccagtaccttgtgttca

SEQ ID NO: 1933 - RNA, 22 nt, Homo sapiens
  source 1..22: mol_type = transcribed RNA
tgaacacaaggtactggtacta

SEQ ID NO: 1934 - RNA, 22 nt, Homo sapiens
  source 1..22: mol_type = transcribed RNA
agtattctgtaccagggaaggt

SEQ ID NO: 1935 - RNA, 22 nt, Homo sapiens
  source 1..22: mol_type = transcribed RNA
accttccctggtacagaatact

SEQ ID NO: 1936 - RNA, 22 nt, Homo sapiens
  source 1..22: mol_type = transcribed RNA
tggcagtgtattgttagctggt

SEQ ID NO: 1937 - RNA, 22 nt, Homo sapiens
  source 1..22: mol_type = transcribed RNA
accagctaacaatacactgcca

SEQ ID NO: 1938 - RNA, 22 nt, Homo sapiens
  source 1..22: mol_type = transcribed RNA
tatacaagggcaagctctctgt

SEQ ID NO: 1939 - RNA, 22 nt, Homo sapiens
  source 1..22: mol_type = transcribed RNA
acagagagcttgcccttgtata

SEQ ID NO: 1940 - RNA, 22 nt, Homo sapiens
  source 1..22: mol_type = transcribed RNA
agcgaggttgccctttgtatat

SEQ ID NO: 1941 - RNA, 22 nt, Homo sapiens
  source 1..22: mol_type = transcribed RNA
atatacaaagggcaacctcgct

SEQ ID NO: 1942 - RNA, 22 nt, Homo sapiens
  source 1..22: mol_type = transcribed RNA
caatcactaactccactgccat

SEQ ID NO: 1943 - RNA, 22 nt, Homo sapiens
  source 1..22: mol_type = transcribed RNA
atggcagtggagttagtgattg

SEQ ID NO: 1944 - RNA, 23 nt, Homo sapiens
  source 1..23: mol_type = transcribed RNA
taggcagtgtcattagctgattg

SEQ ID NO: 1945 - RNA, 23 nt, Homo sapiens
  source 1..23: mol_type = transcribed RNA
caatcagctaatgacactgccta

SEQ ID NO: 1946 - RNA, 22 nt, Homo sapiens
  source 1..22: mol_type = transcribed RNA
cagccacaactaccctgccact

SEQ ID NO: 1947 - RNA, 22 nt, Homo sapiens
  source 1..22: mol_type = transcribed RNA
agtggcagggtagttgtggctg

SEQ ID NO: 1948 - RNA, 22 nt, Homo sapiens
  source 1..22: mol_type = transcribed RNA
aggcagtgtattgttagctggc

SEQ ID NO: 1949 - RNA, 22 nt, Homo sapiens
  source 1..22: mol_type = transcribed RNA
gccagctaacaatacactgcct

SEQ ID NO: 1950 - RNA, 22 nt, Homo sapiens
  source 1..22: mol_type = transcribed RNA
aatcactaaccacacggccagg

SEQ ID NO: 1951 - RNA, 22 nt, Homo sapiens
  source 1..22: mol_type = transcribed RNA
cctggccgtgtggttagtgatt

SEQ ID NO: 1952 - RNA, 23 nt, Homo sapiens
  source 1..23: mol_type = transcribed RNA
aggcagtgtagttagctgattgc

SEQ ID NO: 1953 - RNA, 23 nt, Homo sapiens
  source 1..23: mol_type = transcribed RNA
gcaatcagctaactacactgcct

SEQ ID NO: 1954 - RNA, 20 nt, Homo sapiens
  source 1..20: mol_type = transcribed RNA
gtccgctcggcggtggccca

SEQ ID NO: 1955 - RNA, 20 nt, Homo sapiens
  source 1..20: mol_type = transcribed RNA
tgggccaccgccgagcggac

SEQ ID NO: 1956 - RNA, 23 nt, Homo sapiens
  source 1..23: mol_type = transcribed RNA
gaacgcctgttcttgccaggtgg

SEQ ID NO: 1957 - RNA, 23 nt, Homo sapiens
  source 1..23: mol_type = transcribed RNA
ccacctggcaagaacaggcgttc

SEQ ID NO: 1958 - RNA, 19 nt, Homo sapiens
  source 1..19: mol_type = transcribed RNA
aagtgtgcagggcactggt

SEQ ID NO: 1959 - RNA, 19 nt, Homo sapiens
  source 1..19: mol_type = transcribed RNA
accagtgccctgcacactt

SEQ ID NO: 1960 - RNA, 21 nt, Homo sapiens
  source 1..21: mol_type = transcribed RNA
aggggtgctatctgtgattga

SEQ ID NO: 1961 - RNA, 21 nt, Homo sapiens
  source 1..21: mol_type = transcribed RNA
tcaatcacagatagcacccct

SEQ ID NO: 1962 - RNA, 22 nt, Homo sapiens
  source 1..22: mol_type = transcribed RNA
ctttcagtcagatgtttgctgc

SEQ ID NO: 1963 - RNA, 22 nt, Homo sapiens
  source 1..22: mol_type = transcribed RNA
gcagcaaacatctgactgaaag

SEQ ID NO: 1964 - RNA, 22 nt, Homo sapiens
  source 1..22: mol_type = transcribed RNA
tgtaaacatccccgactggaag

SEQ ID NO: 1965 - RNA, 22 nt, Homo sapiens
  source 1..22: mol_type = transcribed RNA
cttccagtcggggatgtttaca

SEQ ID NO: 1966 - RNA, 22 nt, Homo sapiens
  source 1..22: mol_type = transcribed RNA
tgtaaacatcctcgactggaag

SEQ ID NO: 1967 - RNA, 22 nt, Homo sapiens
  source 1..22: mol_type = transcribed RNA
cttccagtcgaggatgtttaca

SEQ ID NO: 1968 - RNA, 22 nt, Homo sapiens
  source 1..22: mol_type = transcribed RNA
agaagtaattgcggttttgcca

SEQ ID NO: 1969 - RNA, 22 nt, Homo sapiens
  source 1..22: mol_type = transcribed RNA
tggcaaaaccgcaattacttct

SEQ ID NO: 1970 - RNA, 22 nt, Homo sapiens
  source 1..22: mol_type = transcribed RNA
caaaactggcaattacttttgc

SEQ ID NO: 1971 - RNA, 22 nt, Homo sapiens
  source 1..22: mol_type = transcribed RNA
gcaaaagtaattgccagttttg

SEQ ID NO: 1972 - RNA, 22 nt, Homo sapiens
  source 1..22: mol_type = transcribed RNA
aaaagtaattgcgagttttacc

SEQ ID NO: 1973 - RNA, 22 nt, Homo sapiens
  source 1..22: mol_type = transcribed RNA
ggtaaaactcgcaattactttt

SEQ ID NO: 1974 - RNA, 22 nt, Homo sapiens
  source 1..22: mol_type = transcribed RNA
caagaacctcagttgcttttgt

SEQ ID NO: 1975 - RNA, 22 nt, Homo sapiens
  source 1..22: mol_type = transcribed RNA
acaaaagcaactgaggttcttg

SEQ ID NO: 1976 - RNA, 22 nt, Homo sapiens
  source 1..22: mol_type = transcribed RNA
caaaaatctcaattacttttgc

SEQ ID NO: 1977 - RNA, 22 nt, Homo sapiens
  source 1..22: mol_type = transcribed RNA
gcaaaagtaattgagatttttg

SEQ ID NO: 1978 - RNA, 22 nt, Homo sapiens
  source 1..22: mol_type = transcribed RNA
caaaaaccacagtttcttttgc

SEQ ID NO: 1979 - RNA, 22 nt, Homo sapiens
  source 1..22: mol_type = transcribed RNA
gcaaaagaaactgtggtttttg

SEQ ID NO: 1980 - RNA, 22 nt, Homo sapiens
  source 1..22: mol_type = transcribed RNA
aaaagtaattgtggtttttgcc

SEQ ID NO: 1981 - RNA, 22 nt, Homo sapiens
  source 1..22: mol_type = transcribed RNA
ggcaaaaaccacaattactttt

SEQ ID NO: 1982 - RNA, 21 nt, Homo sapiens
  source 1..21: mol_type = transcribed RNA
tgacaactatggatgagctct

SEQ ID NO: 1983 - RNA, 21 nt, Homo sapiens
  source 1..21: mol_type = transcribed RNA
agagctcatccatagttgtca

SEQ ID NO: 1984 - RNA, 21 nt, Homo sapiens
  source 1..21: mol_type = transcribed RNA
aacaggtgactggttagacaa

SEQ ID NO: 1985 - RNA, 21 nt, Homo sapiens
  source 1..21: mol_type = transcribed RNA
ttgtctaaccagtcacctgtt

SEQ ID NO: 1986 - RNA, 21 nt, Homo sapiens
  source 1..21: mol_type = transcribed RNA
aaaacggtgagattttgtttt

SEQ ID NO: 1987 - RNA, 21 nt, Homo sapiens
  source 1..21: mol_type = transcribed RNA
aaaacaaaatctcaccgtttt

SEQ ID NO: 1988 - RNA, 21 nt, Homo sapiens
  source 1..21: mol_type = transcribed RNA
gctagtcctgactcagccagt

SEQ ID NO: 1989 - RNA, 21 nt, Homo sapiens
  source 1..21: mol_type = transcribed RNA
actggctgagtcaggactagc

SEQ ID NO: 1990 - RNA, 21 nt, Homo sapiens
  source 1..21: mol_type = transcribed RNA
agggtaagctgaacctctgat

SEQ ID NO: 1991 - RNA, 21 nt, Homo sapiens
  source 1..21: mol_type = transcribed RNA
atcagaggttcagcttaccct

SEQ ID NO: 1992 - RNA, 22 nt, Homo sapiens
  source 1..22: mol_type = transcribed RNA
atattaccattagctcatcttt

SEQ ID NO: 1993 - RNA, 22 nt, Homo sapiens
  source 1..22: mol_type = transcribed RNA
aaagatgagctaatggtaatat

SEQ ID NO: 1994 - RNA, 22 nt, Homo sapiens
  source 1..22: mol_type = transcribed RNA
gatgagctcattgtaatatgag

SEQ ID NO: 1995 - RNA, 22 nt, Homo sapiens
  source 1..22: mol_type = transcribed RNA
ctcatattacaatgagctcatc

SEQ ID NO: 1996 - RNA, 19 nt, Homo sapiens
  source 1..19: mol_type = transcribed RNA
aggttgacatacgtttccc

SEQ ID NO: 1997 - RNA, 19 nt, Homo sapiens
  source 1..19: mol_type = transcribed RNA
gggaaacgtatgtcaacct

SEQ ID NO: 1998 - RNA, 20 nt, Homo sapiens
  source 1..20: mol_type = transcribed RNA
atgtataaatgtatacacac

SEQ ID NO: 1999 - RNA, 20 nt, Homo sapiens
  source 1..20: mol_type = transcribed RNA
gtgtgtatacatttatacat

SEQ ID NO: 2000 - RNA, 24 nt, Homo sapiens
  source 1..24: mol_type = transcribed RNA
ctgaagtgatgtgtaactgatcag

SEQ ID NO: 2001 - RNA, 24 nt, Homo sapiens
  source 1..24: mol_type = transcribed RNA
ctgatcagttacacatcacttcag

SEQ ID NO: 2002 - RNA, 22 nt, Homo sapiens
  source 1..22: mol_type = transcribed RNA
aagatgtggaaaaattggaatc

SEQ ID NO: 2003 - RNA, 22 nt, Homo sapiens
  source 1..22: mol_type = transcribed RNA
gattccaatttttccacatctt

SEQ ID NO: 2004 - RNA, 21 nt, Homo sapiens
  source 1..21: mol_type = transcribed RNA
tagataaaatattggtacctg

SEQ ID NO: 2005 - RNA, 21 nt, Homo sapiens
  source 1..21: mol_type = transcribed RNA
caggtaccaatattttatcta

SEQ ID NO: 2006 - RNA, 21 nt, Homo sapiens
  source 1..21: mol_type = transcribed RNA
cttcttgtgctctaggattgt

SEQ ID NO: 2007 - RNA, 21 nt, Homo sapiens
  source 1..21: mol_type = transcribed RNA
acaatcctagagcacaagaag

SEQ ID NO: 2008 - RNA, 22 nt, Homo sapiens
  source 1..22: mol_type = transcribed RNA
tatgcattgtatttttaggtcc

SEQ ID NO: 2009 - RNA, 22 nt, Homo sapiens
  source 1..22: mol_type = transcribed RNA
ggacctaaaaatacaatgcata

SEQ ID NO: 2010 - RNA, 21 nt, Homo sapiens
  source 1..21: mol_type = transcribed RNA
tttccataggtgatgagtcac

SEQ ID NO: 2011 - RNA, 21 nt, Homo sapiens
  source 1..21: mol_type = transcribed RNA
gtgactcatcacctatggaaa

SEQ ID NO: 2012 - RNA, 21 nt, Homo sapiens
  source 1..21: mol_type = transcribed RNA
ttggccacaatgggttagaac

SEQ ID NO: 2013 - RNA, 21 nt, Homo sapiens
  source 1..21: mol_type = transcribed RNA
gttctaacccattgtggccaa

SEQ ID NO: 2014 - RNA, 22 nt, Homo sapiens
  source 1..22: mol_type = transcribed RNA
tgtgtcactcgatgaccactgt

SEQ ID NO: 2015 - RNA, 22 nt, Homo sapiens
  source 1..22: mol_type = transcribed RNA
acagtggtcatcgagtgacaca

SEQ ID NO: 2016 - RNA, 23 nt, Homo sapiens
  source 1..23: mol_type = transcribed RNA
acttacagacaagagccttgctc

SEQ ID NO: 2017 - RNA, 23 nt, Homo sapiens
  source 1..23: mol_type = transcribed RNA
gagcaaggctcttgtctgtaagt

SEQ ID NO: 2018 - RNA, 19 nt, Homo sapiens
  source 1..19: mol_type = transcribed RNA
aggctgcggaattcaggac

SEQ ID NO: 2019 - RNA, 19 nt, Homo sapiens
  source 1..19: mol_type = transcribed RNA
gtcctgaattccgcagcct

SEQ ID NO: 2020 - RNA, 23 nt, Homo sapiens
  source 1..23: mol_type = transcribed RNA
taaatcccatggtgccttctcct

SEQ ID NO: 2021 - RNA, 23 nt, Homo sapiens
  source 1..23: mol_type = transcribed RNA
aggagaaggcaccatgggattta

SEQ ID NO: 2022 - RNA, 21 nt, Homo sapiens
  source 1..21: mol_type = transcribed RNA
aaactactgaaaatcaaagat

SEQ ID NO: 2023 - RNA, 21 nt, Homo sapiens
  source 1..21: mol_type = transcribed RNA
atctttgattttcagtagttt

SEQ ID NO: 2024 - RNA, 21 nt, Homo sapiens
  source 1..21: mol_type = transcribed RNA
gttcaaatccagatctataac

SEQ ID NO: 2025 - RNA, 21 nt, Homo sapiens
  source 1..21: mol_type = transcribed RNA
gttatagatctggatttgaac

SEQ ID NO: 2026 - RNA, 19 nt, Homo sapiens
  source 1..19: mol_type = transcribed RNA
ccggttccagtccctggag

SEQ ID NO: 2027 - RNA, 19 nt, Homo sapiens
  source 1..19: mol_type = transcribed RNA
ctccagggactggaaccgg

SEQ ID NO: 2028 - RNA, 20 nt, Homo sapiens
  source 1..20: mol_type = transcribed RNA
agggtgtttctctcatctct

SEQ ID NO: 2029 - RNA, 20 nt, Homo sapiens
  source 1..20: mol_type = transcribed RNA
agagatgagagaaacaccct

SEQ ID NO: 2030 - RNA, 24 nt, Homo sapiens
  source 1..24: mol_type = transcribed RNA
gacctggacatgtttgtgcccagt

SEQ ID NO: 2031 - RNA, 24 nt, Homo sapiens
  source 1..24: mol_type = transcribed RNA
actgggcacaaacatgtccaggtc

SEQ ID NO: 2032 - RNA, 20 nt, Homo sapiens
  source 1..20: mol_type = transcribed RNA
atggagatagatatagaaat

SEQ ID NO: 2033 - RNA, 20 nt, Homo sapiens
  source 1..20: mol_type = transcribed RNA
atttctatatctatctccat

SEQ ID NO: 2034 - RNA, 19 nt, Homo sapiens
  source 1..19: mol_type = transcribed RNA
agctgtctgaaaatgtctt

SEQ ID NO: 2035 - RNA, 19 nt, Homo sapiens
  source 1..19: mol_type = transcribed RNA
aagacattttcagacagct

SEQ ID NO: 2036 - RNA, 21 nt, Homo sapiens
  source 1..21: mol_type = transcribed RNA
agacctggcccagacctcagc

SEQ ID NO: 2037 - RNA, 21 nt, Homo sapiens
  source 1..21: mol_type = transcribed RNA
gctgaggtctgggccaggtct

SEQ ID NO: 2038 - RNA, 23 nt, Homo sapiens
  source 1..23: mol_type = transcribed RNA
acttgggcactgaaacaatgtcc

SEQ ID NO: 2039 - RNA, 23 nt, Homo sapiens
  source 1..23: mol_type = transcribed RNA
ggacattgtttcagtgcccaagt

SEQ ID NO: 2040 - RNA, 24 nt, Homo sapiens
  source 1..24: mol_type = transcribed RNA
actgggggctttcgggctctgcgt

SEQ ID NO: 2041 - RNA, 24 nt, Homo sapiens
  source 1..24: mol_type = transcribed RNA
acgcagagcccgaaagcccccagt

SEQ ID NO: 2042 - RNA, 23 nt, Homo sapiens
  source 1..23: mol_type = transcribed RNA
atcgctgcggttgcgagcgctgt

SEQ ID NO: 2043 - RNA, 23 nt, Homo sapiens
  source 1..23: mol_type = transcribed RNA
acagcgctcgcaaccgcagcgat

SEQ ID NO: 2044 - RNA, 22 nt, Homo sapiens
  source 1..22: mol_type = transcribed RNA
gtccctctccaaatgtgtcttg

SEQ ID NO: 2045 - RNA, 22 nt, Homo sapiens
  source 1..22: mol_type = transcribed RNA
caagacacatttggagagggac

SEQ ID NO: 2046 - RNA, 22 nt, Homo sapiens
  source 1..22: mol_type = transcribed RNA
acttgtatgctagctcaggtag

SEQ ID NO: 2047 - RNA, 22 nt, Homo sapiens
  source 1..22: mol_type = transcribed RNA
ctacctgagctagcatacaagt

SEQ ID NO: 2048 - RNA, 22 nt, Homo sapiens
  source 1..22: mol_type = transcribed RNA
tttaggataagcttgacttttg

SEQ ID NO: 2049 - RNA, 22 nt, Homo sapiens
  source 1..22: mol_type = transcribed RNA
caaaagtcaagcttatcctaaa

SEQ ID NO: 2050 - RNA, 21 nt, Homo sapiens
  source 1..21: mol_type = transcribed RNA
gtgttgaaacaatctctactg

SEQ ID NO: 2051 - RNA, 21 nt, Homo sapiens
  source 1..21: mol_type = transcribed RNA
cagtagagattgtttcaacac

SEQ ID NO: 2052 - RNA, 22 nt, Homo sapiens
  source 1..22: mol_type = transcribed RNA
tatgtctgctgaccatcacctt

SEQ ID NO: 2053 - RNA, 22 nt, Homo sapiens
  source 1..22: mol_type = transcribed RNA
aaggtgatggtcagcagacata

SEQ ID NO: 2054 - RNA, 22 nt, Homo sapiens
  source 1..22: mol_type = transcribed RNA
ggggctggggccggggccgagc

SEQ ID NO: 2055 - RNA, 22 nt, Homo sapiens
  source 1..22: mol_type = transcribed RNA
gctcggccccggccccagcccc

SEQ ID NO: 2056 - RNA, 22 nt, Homo sapiens
  source 1..22: mol_type = transcribed RNA
tgaggtagtaggttgtatggtt

SEQ ID NO: 2057 - RNA, 22 nt, Homo sapiens
  source 1..22: mol_type = transcribed RNA
aaccatacaacctactacctca

SEQ ID NO: 2058 - RNA, 21 nt, Homo sapiens
  source 1..21: mol_type = transcribed RNA
gtgtcttttgctctgcagtca

SEQ ID NO: 2059 - RNA, 21 nt, Homo sapiens
  source 1..21: mol_type = transcribed RNA
tgactgcagagcaaaagacac

SEQ ID NO: 2060 - RNA, 24 nt, Homo sapiens
  source 1..24: mol_type = transcribed RNA
ccccgggaacgtcgagactggagc

SEQ ID NO: 2061 - RNA, 24 nt, Homo sapiens
  source 1..24: mol_type = transcribed RNA
gctccagtctcgacgttcccgggg

SEQ ID NO: 2062 - RNA, 22 nt, Homo sapiens
  source 1..22: mol_type = transcribed RNA
acccgtcccgttcgtccccgga

SEQ ID NO: 2063 - RNA, 22 nt, Homo sapiens
  source 1..22: mol_type = transcribed RNA
tccggggacgaacgggacgggt

SEQ ID NO: 2064 - RNA, 22 nt, Homo sapiens
  source 1..22: mol_type = transcribed RNA
atgggtgaatttgtagaaggat

SEQ ID NO: 2065 - RNA, 22 nt, Homo sapiens
  source 1..22: mol_type = transcribed RNA
atccttctacaaattcacccat

SEQ ID NO: 2066 - RNA, 22 nt, Homo sapiens
  source 1..22: mol_type = transcribed RNA
ctggactgagccgtgctactgg

SEQ ID NO: 2067 - RNA, 22 nt, Homo sapiens
  source 1..22: mol_type = transcribed RNA
ccagtagcacggctcagtccag

SEQ ID NO: 2068 - RNA, 22 nt, Homo sapiens
  source 1..22: mol_type = transcribed RNA
ctggactgagccatgctactgg

SEQ ID NO: 2069 - RNA, 22 nt, Homo sapiens
  source 1..22: mol_type = transcribed RNA
ccagtagcatggctcagtccag

SEQ ID NO: 2070 - RNA, 22 nt, Homo sapiens
  source 1..22: mol_type = transcribed RNA
tacgtagatatatatgtatttt

SEQ ID NO: 2071 - RNA, 22 nt, Homo sapiens
  source 1..22: mol_type = transcribed RNA
aaaatacatatatatctacgta

SEQ ID NO: 2072 - RNA, 24 nt, Homo sapiens
  source 1..24: mol_type = transcribed RNA
aaatatatatatatatgtacgtat

SEQ ID NO: 2073 - RNA, 22 nt, Homo sapiens
  source 1..22: mol_type = transcribed RNA
gctcttttcattaatgtagaca

SEQ ID NO: 2074 - RNA, 22 nt, Homo sapiens
  source 1..22: mol_type = transcribed RNA
tgctggatcagtggttcgagtc

SEQ ID NO: 2075 - RNA, 22 nt, Homo sapiens
  source 1..22: mol_type = transcribed RNA
gactcgaaccactgatccagca

SEQ ID NO: 2076 - RNA, 19 nt, Homo sapiens
  source 1..19: mol_type = transcribed RNA
tggatttttggatcaggga

SEQ ID NO: 2077 - RNA, 19 nt, Homo sapiens
  source 1..19: mol_type = transcribed RNA
tccctgatccaaaaatcca

SEQ ID NO: 2078 - RNA, 22 nt, Homo sapiens
  source 1..22: mol_type = transcribed RNA
ttataaagcaatgagactgatt

SEQ ID NO: 2079 - RNA, 22 nt, Homo sapiens
  source 1..22: mol_type = transcribed RNA
aatcagtctcattgctttataa

SEQ ID NO: 2080 - RNA, 23 nt, Homo sapiens
  source 1..23: mol_type = transcribed RNA
tagtgcaatattgcttatagggt

SEQ ID NO: 2081 - RNA, 23 nt, Homo sapiens
  source 1..23: mol_type = transcribed RNA
accctataagcaatattgcacta

SEQ ID NO: 2082 - RNA, 22 nt, Homo sapiens
  source 1..22: mol_type = transcribed RNA
accctatcaatattgtctctgc

SEQ ID NO: 2083 - RNA, 22 nt, Homo sapiens
  source 1..22: mol_type = transcribed RNA
gcagagacaatattgatagggt

SEQ ID NO: 2084 - RNA, 17 nt, Homo sapiens
  source 1..17: mol_type = transcribed RNA
taagtgcttccatgctt

SEQ ID NO: 2085 - RNA, 17 nt, Homo sapiens
  source 1..17: mol_type = transcribed RNA
aagcatggaagcactta

SEQ ID NO: 2086 - RNA, 22 nt, Homo sapiens
  source 1..22: mol_type = transcribed RNA
tcggcctgaccacccaccccac

SEQ ID NO: 2087 - RNA, 22 nt, Homo sapiens
  source 1..22: mol_type = transcribed RNA
gtggggtgggtggtcaggccga

SEQ ID NO: 2088 - RNA, 21 nt, Homo sapiens
  source 1..21: mol_type = transcribed RNA
ggggggggggggggggggccg

SEQ ID NO: 2089 - RNA, 21 nt, Homo sapiens
  source 1..21: mol_type = transcribed RNA
cggcccccccccccccccccc

SEQ ID NO: 2090 - RNA, 22 nt, Homo sapiens
  source 1..22: mol_type = transcribed RNA
ctatacgacctgctgcctttct

SEQ ID NO: 2091 - RNA, 22 nt, Homo sapiens
  source 1..22: mol_type = transcribed RNA
agaaaggcagcaggtcgtatag

SEQ ID NO: 2092 - RNA, 22 nt, Homo sapiens
  source 1..22: mol_type = transcribed RNA
agaggtagtaggttgcatagtt

SEQ ID NO: 2093 - RNA, 22 nt, Homo sapiens
  source 1..22: mol_type = transcribed RNA
aactatgcaacctactacctct

SEQ ID NO: 2094 - RNA, 22 nt, Homo sapiens
  source 1..22: mol_type = transcribed RNA
ccgcactgtgggtacttgctgc

SEQ ID NO: 2095 - RNA, 22 nt, Homo sapiens
  source 1..22: mol_type = transcribed RNA
gcagcaagtacccacagtgcgg

SEQ ID NO: 2096 - RNA, 21 nt, Homo sapiens
  source 1..21: mol_type = transcribed RNA
taaagtgctgacagtgcagat

SEQ ID NO: 2097 - RNA, 21 nt, Homo sapiens
  source 1..21: mol_type = transcribed RNA
atctgcactgtcagcacttta

SEQ ID NO: 2098 - RNA, 22 nt, Homo sapiens
  source 1..22: mol_type = transcribed RNA
aactggatcaattataggagtg

SEQ ID NO: 2099 - RNA, 22 nt, Homo sapiens
  source 1..22: mol_type = transcribed RNA
cactcctataattgatccagtt

SEQ ID NO: 2100 - RNA, 26 nt, Homo sapiens
  source 1..26: mol_type = transcribed RNA
aagtagttggtttgtatgagatggtt

SEQ ID NO: 2101 - RNA, 26 nt, Homo sapiens
  source 1..26: mol_type = transcribed RNA
aaccatctcatacaaaccaactactt

SEQ ID NO: 2102 - RNA, 21 nt, Homo sapiens
  source 1..21: mol_type = transcribed RNA
aagtgatctaaaggcctacat

SEQ ID NO: 2103 - RNA, 21 nt, Homo sapiens
  source 1..21: mol_type = transcribed RNA
atgtaggcctttagatcactt

SEQ ID NO: 2104 - RNA, 22 nt, Homo sapiens
  source 1..22: mol_type = transcribed RNA
tcagatgatctaaaggcctata

SEQ ID NO: 2105 - RNA, 22 nt, Homo sapiens
  source 1..22: mol_type = transcribed RNA
tataggcctttagatcatctga

SEQ ID NO: 2106 - RNA, 21 nt, Homo sapiens
  source 1..21: mol_type = transcribed RNA
taggcctttagatcacttaaa

SEQ ID NO: 2107 - RNA, 21 nt, Homo sapiens
  source 1..21: mol_type = transcribed RNA
tttaagtgatctaaaggccta

SEQ ID NO: 2108 - RNA, 21 nt, Homo sapiens
  source 1..21: mol_type = transcribed RNA
actctagctgccaaaggcgct

SEQ ID NO: 2109 - RNA, 21 nt, Homo sapiens
  source 1..21: mol_type = transcribed RNA
agcgcctttggcagctagagt

SEQ ID NO: 2110 - RNA, 22 nt, Homo sapiens
  source 1..22: mol_type = transcribed RNA
agaaggaaattgaattcattta

SEQ ID NO: 2111 - RNA, 22 nt, Homo sapiens
  source 1..22: mol_type = transcribed RNA
taaatgaattcaatttccttct

SEQ ID NO: 2112 - RNA, 21 nt, Homo sapiens
  source 1..21: mol_type = transcribed RNA
agagaagaagatcagcctgca

SEQ ID NO: 2113 - RNA, 21 nt, Homo sapiens
  source 1..21: mol_type = transcribed RNA
tgcaggctgatcttcttctct

SEQ ID NO: 2114 - RNA, 24 nt, Homo sapiens
  source 1..24: mol_type = transcribed RNA
agcctggaagctggagcctgcagt

SEQ ID NO: 2115 - RNA, 24 nt, Homo sapiens
  source 1..24: mol_type = transcribed RNA
actgcaggctccagcttccaggct

SEQ ID NO: 2116 - RNA, 23 nt, Homo sapiens
  source 1..23: mol_type = transcribed RNA
aggatgagcaaagaaagtagatt

SEQ ID NO: 2117 - RNA, 23 nt, Homo sapiens
  source 1..23: mol_type = transcribed RNA
aatctactttctttgctcatcct

SEQ ID NO: 2118 - RNA, 22 nt, Homo sapiens
  source 1..22: mol_type = transcribed RNA
aaccactttctttgctcatcca

SEQ ID NO: 2119 - RNA, 22 nt, Homo sapiens
  source 1..22: mol_type = transcribed RNA
tggatgagcaaagaaagtggtt

SEQ ID NO: 2120 - RNA, 22 nt, Homo sapiens
  source 1..22: mol_type = transcribed RNA
cggatgagcaaagaaagtggtt

SEQ ID NO: 2121 - RNA, 22 nt, Homo sapiens
  source 1..22: mol_type = transcribed RNA
aaccactttctttgctcatccg

SEQ ID NO: 2122 - RNA, 22 nt, Homo sapiens
  source 1..22: mol_type = transcribed RNA
aggcattgacttctcactagct

SEQ ID NO: 2123 - RNA, 22 nt, Homo sapiens
  source 1..22: mol_type = transcribed RNA
agctagtgagaagtcaatgcct

SEQ ID NO: 2124 - RNA, 21 nt, Homo sapiens
  source 1..21: mol_type = transcribed RNA
agtgaatgatgggttctgacc

SEQ ID NO: 2125 - RNA, 21 nt, Homo sapiens
  source 1..21: mol_type = transcribed RNA
ggtcagaacccatcattcact

SEQ ID NO: 2126 - RNA, 21 nt, Homo sapiens
  source 1..21: mol_type = transcribed RNA
agttaggattaggtcgtggaa

SEQ ID NO: 2127 - RNA, 21 nt, Homo sapiens
  source 1..21: mol_type = transcribed RNA
ttccacgacctaatcctaact

SEQ ID NO: 2128 - RNA, 19 nt, Homo sapiens
  source 1..19: mol_type = transcribed RNA
atggataaggctttggctt

SEQ ID NO: 2129 - RNA, 19 nt, Homo sapiens
  source 1..19: mol_type = transcribed RNA
aagccaaagccttatccat

SEQ ID NO: 2130 - RNA, 22 nt, Homo sapiens
  source 1..22: mol_type = transcribed RNA
atggtaccctggcatactgagt

SEQ ID NO: 2131 - RNA, 22 nt, Homo sapiens
  source 1..22: mol_type = transcribed RNA
actcagtatgccagggtaccat

SEQ ID NO: 2132 - RNA, 23 nt, Homo sapiens
  source 1..23: mol_type = transcribed RNA
caagtcttatttgagcacctgtt

SEQ ID NO: 2133 - RNA, 23 nt, Homo sapiens
  source 1..23: mol_type = transcribed RNA
aacaggtgctcaaataagacttg

SEQ ID NO: 2134 - RNA, 22 nt, Homo sapiens
  source 1..22: mol_type = transcribed RNA
caggatgtggtcaagtgttgtt

SEQ ID NO: 2135 - RNA, 22 nt, Homo sapiens
  source 1..22: mol_type = transcribed RNA
aacaacacttgaccacatcctg

SEQ ID NO: 2136 - RNA, 23 nt, Homo sapiens
  source 1..23: mol_type = transcribed RNA
cctcagggctgtagaacagggct

SEQ ID NO: 2137 - RNA, 23 nt, Homo sapiens
  source 1..23: mol_type = transcribed RNA
agccctgttctacagccctgagg

SEQ ID NO: 2138 - RNA, 21 nt, Homo sapiens
  source 1..21: mol_type = transcribed RNA
cctgttgaagtgtaatcccca

SEQ ID NO: 2139 - RNA, 21 nt, Homo sapiens
  source 1..21: mol_type = transcribed RNA
tggggattacacttcaacagg

SEQ ID NO: 2140 - RNA, 18 nt, Homo sapiens
  source 1..18: mol_type = transcribed RNA
cgggcgtggtggtggggg

SEQ ID NO: 2141 - RNA, 18 nt, Homo sapiens
  source 1..18: mol_type = transcribed RNA
cccccaccaccacgcccg

SEQ ID NO: 2142 - RNA, 20 nt, Homo sapiens
  source 1..20: mol_type = transcribed RNA
cgggcgtggtggtgggggtg

SEQ ID NO: 2143 - RNA, 20 nt, Homo sapiens
  source 1..20: mol_type = transcribed RNA
cacccccaccaccacgcccg

SEQ ID NO: 2144 - RNA, 23 nt, Homo sapiens
  source 1..23: mol_type = transcribed RNA
ctggagatatggaagagctgtgt

SEQ ID NO: 2145 - RNA, 23 nt, Homo sapiens
  source 1..23: mol_type = transcribed RNA
acacagctcttccatatctccag

SEQ ID NO: 2146 - RNA, 26 nt, Homo sapiens
  source 1..26: mol_type = transcribed RNA
gatgatgatggcagcaaattctgaaa

SEQ ID NO: 2147 - RNA, 26 nt, Homo sapiens
  source 1..26: mol_type = transcribed RNA
tttcagaatttgctgccatcatcatc

SEQ ID NO: 2148 - RNA, 25 nt, Homo sapiens
  source 1..25: mol_type = transcribed RNA
gggcgacaaagcaagactctttctt

SEQ ID NO: 2149 - RNA, 25 nt, Homo sapiens
  source 1..25: mol_type = transcribed RNA
aagaaagagtcttgctttgtcgccc

SEQ ID NO: 2150 - RNA, 25 nt, Homo sapiens
  source 1..25: mol_type = transcribed RNA
gaacccatgaggttgaggctgcagt

SEQ ID NO: 2151 - RNA, 25 nt, Homo sapiens
  source 1..25: mol_type = transcribed RNA
actgcagcctcaacctcatgggttc

SEQ ID NO: 2152 - RNA, 17 nt, Homo sapiens
  source 1..17: mol_type = transcribed RNA
gtgggggagaggctgtc

SEQ ID NO: 2153 - RNA, 17 nt, Homo sapiens
  source 1..17: mol_type = transcribed RNA
gacagcctctcccccac

SEQ ID NO: 2154 - RNA, 20 nt, Homo sapiens
  source 1..20: mol_type = transcribed RNA
taaagagccctgtggagaca

SEQ ID NO: 2155 - RNA, 20 nt, Homo sapiens
  source 1..20: mol_type = transcribed RNA
tgtctccacagggctcttta

SEQ ID NO: 2156 - RNA, 22 nt, Homo sapiens
  source 1..22: mol_type = transcribed RNA
tagtactgtgcatatcatctat

SEQ ID NO: 2157 - RNA, 22 nt, Homo sapiens
  source 1..22: mol_type = transcribed RNA
atagatgatatgcacagtacta

SEQ ID NO: 2158 - RNA, 20 nt, Homo sapiens
  source 1..20: mol_type = transcribed RNA
tcgtttgcctttttctgctt

SEQ ID NO: 2159 - RNA, 20 nt, Homo sapiens
  source 1..20: mol_type = transcribed RNA
aagcagaaaaaggcaaacga

SEQ ID NO: 2160 - RNA, 21 nt, Homo sapiens
  source 1..21: mol_type = transcribed RNA
tggactgccctgatctggaga

SEQ ID NO: 2161 - RNA, 21 nt, Homo sapiens
  source 1..21: mol_type = transcribed RNA
tctccagatcagggcagtcca

SEQ ID NO: 2162 - RNA, 22 nt, Homo sapiens
  source 1..22: mol_type = transcribed RNA
tgggtggtctggagatttgtgc

SEQ ID NO: 2163 - RNA, 22 nt, Homo sapiens
  source 1..22: mol_type = transcribed RNA
gcacaaatctccagaccaccca

SEQ ID NO: 2164 - RNA, 22 nt, Homo sapiens
  source 1..22: mol_type = transcribed RNA
tgtgaggttggcattgttgtct

SEQ ID NO: 2165 - RNA, 22 nt, Homo sapiens
  source 1..22: mol_type = transcribed RNA
agacaacaatgccaacctcaca

SEQ ID NO: 2166 - RNA, 17 nt, Homo sapiens
  source 1..17: mol_type = transcribed RNA
ttcaagtaattcaggtg

SEQ ID NO: 2167 - RNA, 17 nt, Homo sapiens
  source 1..17: mol_type = transcribed RNA
cacctgaattacttgaa

SEQ ID NO: 2168 - RNA, 22 nt, Homo sapiens
  source 1..22: mol_type = transcribed RNA
ttctggaattctgtgtgaggga

SEQ ID NO: 2169 - RNA, 22 nt, Homo sapiens
  source 1..22: mol_type = transcribed RNA
tccctcacacagaattccagaa

SEQ ID NO: 2170 - RNA, 22 nt, Homo sapiens
  source 1..22: mol_type = transcribed RNA
ttttcaactctaatgggagaga

SEQ ID NO: 2171 - RNA, 22 nt, Homo sapiens
  source 1..22: mol_type = transcribed RNA
tctctcccattagagttgaaaa

SEQ ID NO: 2172 - RNA, 18 nt, Homo sapiens
  source 1..18: mol_type = transcribed RNA
acgttggctctggtggtg

SEQ ID NO: 2173 - RNA, 18 nt, Homo sapiens
  source 1..18: mol_type = transcribed RNA
caccaccagagccaacgt

SEQ ID NO: 2174 - RNA, 22 nt, Homo sapiens
  source 1..22: mol_type = transcribed RNA
ccacctcccctgcaaacgtcca

SEQ ID NO: 2175 - RNA, 22 nt, Homo sapiens
  source 1..22: mol_type = transcribed RNA
tggacgtttgcaggggaggtgg

SEQ ID NO: 2176 - RNA, 22 nt, Homo sapiens
  source 1..22: mol_type = transcribed RNA
actcggcgtggcgtcggtcgtg

SEQ ID NO: 2177 - RNA, 22 nt, Homo sapiens
  source 1..22: mol_type = transcribed RNA
cacgaccgacgccacgccgagt

SEQ ID NO: 2178 - RNA, 21 nt, Homo sapiens
  source 1..21: mol_type = transcribed RNA
tcgaccggacctcgaccggct

SEQ ID NO: 2179 - RNA, 21 nt, Homo sapiens
  source 1..21: mol_type = transcribed RNA
agccggtcgaggtccggtcga

SEQ ID NO: 2180 - RNA, 22 nt, Homo sapiens
  source 1..22: mol_type = transcribed RNA
tgagaactgaattccataggct

SEQ ID NO: 2181 - RNA, 22 nt, Homo sapiens
  source 1..22: mol_type = transcribed RNA
agcctatggaattcagttctca

SEQ ID NO: 2182 - RNA, 22 nt, Homo sapiens
  source 1..22: mol_type = transcribed RNA
aatcatacacggttgacctatt

SEQ ID NO: 2183 - RNA, 22 nt, Homo sapiens
  source 1..22: mol_type = transcribed RNA
aataggtcaaccgtgtatgatt

SEQ ID NO: 2184 - RNA, 22 nt, Homo sapiens
  source 1..22: mol_type = transcribed RNA
taggttatccgtgttgccttcg

SEQ ID NO: 2185 - RNA, 22 nt, Homo sapiens
  source 1..22: mol_type = transcribed RNA
cgaaggcaacacggataaccta

SEQ ID NO: 2186 - RNA, 21 nt, Homo sapiens
  source 1..21: mol_type = transcribed RNA
ccagtcctgtgcctgccgcct

SEQ ID NO: 2187 - RNA, 21 nt, Homo sapiens
  source 1..21: mol_type = transcribed RNA
aggcggcaggcacaggactgg

SEQ ID NO: 2188 - RNA, 22 nt, Homo sapiens
  source 1..22: mol_type = transcribed RNA
tctgccccctccgctgctgcca

SEQ ID NO: 2189 - RNA, 22 nt, Homo sapiens
  source 1..22: mol_type = transcribed RNA
tggcagcagcggagggggcaga

SEQ ID NO: 2190 - RNA, 22 nt, Homo sapiens
  source 1..22: mol_type = transcribed RNA
ggaggggtcccgcactgggagg

SEQ ID NO: 2191 - RNA, 22 nt, Homo sapiens
  source 1..22: mol_type = transcribed RNA
cctcccagtgcgggacccctcc

SEQ ID NO: 2192 - RNA, 22 nt, Homo sapiens
  source 1..22: mol_type = transcribed RNA
ccctgtgcccggcccacttctg

SEQ ID NO: 2193 - RNA, 22 nt, Homo sapiens
  source 1..22: mol_type = transcribed RNA
cagaagtgggccgggcacaggg

SEQ ID NO: 2194 - RNA, 20 nt, Homo sapiens
  source 1..20: mol_type = transcribed RNA
ccccagggcgacgcggcggg

SEQ ID NO: 2195 - RNA, 20 nt, Homo sapiens
  source 1..20: mol_type = transcribed RNA
cccgccgcgtcgccctgggg

SEQ ID NO: 2196 - RNA, 22 nt, Homo sapiens
  source 1..22: mol_type = transcribed RNA
accttgccttgctgcccgggcc

SEQ ID NO: 2197 - RNA, 22 nt, Homo sapiens
  source 1..22: mol_type = transcribed RNA
ggcccgggcagcaaggcaaggt

SEQ ID NO: 2198 - RNA, 21 nt, Homo sapiens
  source 1..21: mol_type = transcribed RNA
atttgtgcttggctctgtcac

SEQ ID NO: 2199 - RNA, 21 nt, Homo sapiens
  source 1..21: mol_type = transcribed RNA
gtgacagagccaagcacaaat

SEQ ID NO: 2200 - RNA, 22 nt, Homo sapiens
  source 1..22: mol_type = transcribed RNA
attgtccttgctgtttggagat

SEQ ID NO: 2201 - RNA, 22 nt, Homo sapiens
  source 1..22: mol_type = transcribed RNA
atctccaaacagcaaggacaat

SEQ ID NO: 2202 - RNA, 21 nt, Homo sapiens
  source 1..21: mol_type = transcribed RNA
atccccagatacaatggacaa

SEQ ID NO: 2203 - RNA, 21 nt, Homo sapiens
  source 1..21: mol_type = transcribed RNA
ttgtccattgtatctggggat

SEQ ID NO: 2204 - RNA, 23 nt, Homo sapiens
  source 1..23: mol_type = transcribed RNA
cagtgcaatagtattgtcaaagc

SEQ ID NO: 2205 - RNA, 23 nt, Homo sapiens
  source 1..23: mol_type = transcribed RNA
gctttgacaatactattgcactg

SEQ ID NO: 2206 - RNA, 22 nt, Homo sapiens
  source 1..22: mol_type = transcribed RNA
gctctgactttattgcactact

SEQ ID NO: 2207 - RNA, 22 nt, Homo sapiens
  source 1..22: mol_type = transcribed RNA
agtagtgcaataaagtcagagc

SEQ ID NO: 2208 - RNA, 23 nt, Homo sapiens
  source 1..23: mol_type = transcribed RNA
taagtgcttccatgttttagtag

SEQ ID NO: 2209 - RNA, 23 nt, Homo sapiens
  source 1..23: mol_type = transcribed RNA
ctactaaaacatggaagcactta

SEQ ID NO: 2210 - RNA, 22 nt, Homo sapiens
  source 1..22: mol_type = transcribed RNA
actttaacatggaagtgctttc

SEQ ID NO: 2211 - RNA, 22 nt, Homo sapiens
  source 1..22: mol_type = transcribed RNA
gaaagcacttccatgttaaagt

SEQ ID NO: 2212 - RNA, 23 nt, Homo sapiens
  source 1..23: mol_type = transcribed RNA
taagtgcttccatgtttcagtgg

SEQ ID NO: 2213 - RNA, 23 nt, Homo sapiens
  source 1..23: mol_type = transcribed RNA
ccactgaaacatggaagcactta

SEQ ID NO: 2214 - RNA, 22 nt, Homo sapiens
  source 1..22: mol_type = transcribed RNA
tttaacatgggggtacctgctg

SEQ ID NO: 2215 - RNA, 22 nt, Homo sapiens
  source 1..22: mol_type = transcribed RNA
cagcaggtacccccatgttaaa

SEQ ID NO: 2216 - RNA, 23 nt, Homo sapiens
  source 1..23: mol_type = transcribed RNA
taagtgcttccatgtttgagtgt

SEQ ID NO: 2217 - RNA, 23 nt, Homo sapiens
  source 1..23: mol_type = transcribed RNA
acactcaaacatggaagcactta

SEQ ID NO: 2218 - RNA, 22 nt, Homo sapiens
  source 1..22: mol_type = transcribed RNA
actttaacatggaggcacttgc

SEQ ID NO: 2219 - RNA, 22 nt, Homo sapiens
  source 1..22: mol_type = transcribed RNA
gcaagtgcctccatgttaaagt

SEQ ID NO: 2220 - RNA, 22 nt, Homo sapiens
  source 1..22: mol_type = transcribed RNA
aattgcactttagcaatggtga

SEQ ID NO: 2221 - RNA, 22 nt, Homo sapiens
  source 1..22: mol_type = transcribed RNA
tcaccattgctaaagtgcaatt

SEQ ID NO: 2222 - RNA, 22 nt, Homo sapiens
  source 1..22: mol_type = transcribed RNA
actgttgctaatatgcaactct

SEQ ID NO: 2223 - RNA, 22 nt, Homo sapiens
  source 1..22: mol_type = transcribed RNA
agagttgcatattagcaacagt

SEQ ID NO: 2224 - RNA, 23 nt, Homo sapiens
  source 1..23: mol_type = transcribed RNA
agctcggtctgaggcccctcagt

SEQ ID NO: 2225 - RNA, 23 nt, Homo sapiens
  source 1..23: mol_type = transcribed RNA
actgaggggcctcagaccgagct

SEQ ID NO: 2226 - RNA, 22 nt, Homo sapiens
  source 1..22: mol_type = transcribed RNA
aaaaactgagactacttttgca

SEQ ID NO: 2227 - RNA, 22 nt, Homo sapiens
  source 1..22: mol_type = transcribed RNA
tgcaaaagtagtctcagttttt

SEQ ID NO: 2228 - RNA, 19 nt, Homo sapiens
  source 1..19: mol_type = transcribed RNA
aaaaactgtaattactttt

SEQ ID NO: 2229 - RNA, 19 nt, Homo sapiens
  source 1..19: mol_type = transcribed RNA
aaaagtaattacagttttt

SEQ ID NO: 2230 - RNA, 22 nt, Homo sapiens
  source 1..22: mol_type = transcribed RNA
aaaactgtaattacttttgtac

SEQ ID NO: 2231 - RNA, 22 nt, Homo sapiens
  source 1..22: mol_type = transcribed RNA
gtacaaaagtaattacagtttt

SEQ ID NO: 2232 - RNA, 23 nt, Homo sapiens
  source 1..23: mol_type = transcribed RNA
tgcaaaagtaattgcagtttttg

SEQ ID NO: 2233 - RNA, 23 nt, Homo sapiens
  source 1..23: mol_type = transcribed RNA
caaaaactgcaattacttttgca

SEQ ID NO: 2234 - RNA, 23 nt, Homo sapiens
  source 1..23: mol_type = transcribed RNA
caaaaaccgcaattacttttgca

SEQ ID NO: 2235 - RNA, 23 nt, Homo sapiens
  source 1..23: mol_type = transcribed RNA
tgcaaaagtaattgcggtttttg

SEQ ID NO: 2236 - RNA, 22 nt, Homo sapiens
  source 1..22: mol_type = transcribed RNA
aaaagtaatcgcggtttttgtc

SEQ ID NO: 2237 - RNA, 22 nt, Homo sapiens
  source 1..22: mol_type = transcribed RNA
gacaaaaaccgcgattactttt

SEQ ID NO: 2238 - RNA, 22 nt, Homo sapiens
  source 1..22: mol_type = transcribed RNA
aaaagtacttgcggattttgct

SEQ ID NO: 2239 - RNA, 22 nt, Homo sapiens
  source 1..22: mol_type = transcribed RNA
agcaaaatccgcaagtactttt

SEQ ID NO: 2240 - RNA, 22 nt, Homo sapiens
  source 1..22: mol_type = transcribed RNA
aaaagtatttgcgggttttgtc

SEQ ID NO: 2241 - RNA, 22 nt, Homo sapiens
  source 1..22: mol_type = transcribed RNA
gacaaaacccgcaaatactttt

SEQ ID NO: 2242 - RNA, 21 nt, Homo sapiens
  source 1..21: mol_type = transcribed RNA
caaaggtatttgtggtttttg

SEQ ID NO: 2243 - RNA, 21 nt, Homo sapiens
  source 1..21: mol_type = transcribed RNA
caaaaaccacaaatacctttg

SEQ ID NO: 2244 - RNA, 22 nt, Homo sapiens
  source 1..22: mol_type = transcribed RNA
ccaaaactgcagttacttttgc

SEQ ID NO: 2245 - RNA, 22 nt, Homo sapiens
  source 1..22: mol_type = transcribed RNA
gcaaaagtaactgcagttttgg

SEQ ID NO: 2246 - RNA, 22 nt, Homo sapiens
  source 1..22: mol_type = transcribed RNA
aaaagtaattgcggtttttgcc

SEQ ID NO: 2247 - RNA, 22 nt, Homo sapiens
  source 1..22: mol_type = transcribed RNA
ggcaaaaaccgcaattactttt

SEQ ID NO: 2248 - RNA, 22 nt, Homo sapiens
  source 1..22: mol_type = transcribed RNA
tagcaaaaactgcagttacttt

SEQ ID NO: 2249 - RNA, 22 nt, Homo sapiens
  source 1..22: mol_type = transcribed RNA
aaagtaactgcagtttttgcta

SEQ ID NO: 2250 - RNA, 20 nt, Homo sapiens
  source 1..20: mol_type = transcribed RNA
ggaggttgggaagggcagag

SEQ ID NO: 2251 - RNA, 20 nt, Homo sapiens
  source 1..20: mol_type = transcribed RNA
ctctgcccttcccaacctcc

SEQ ID NO: 2252 - RNA, 18 nt, Homo sapiens
  source 1..18: mol_type = transcribed RNA
tgaggcgggggggcgagc

SEQ ID NO: 2253 - RNA, 18 nt, Homo sapiens
  source 1..18: mol_type = transcribed RNA
gctcgcccccccgcctca

SEQ ID NO: 2254 - RNA, 20 nt, Homo sapiens
  source 1..20: mol_type = transcribed RNA
agagatgaagcgggggggcg

SEQ ID NO: 2255 - RNA, 20 nt, Homo sapiens
  source 1..20: mol_type = transcribed RNA
cgcccccccgcttcatctct

SEQ ID NO: 2256 - RNA, 24 nt, Homo sapiens
  source 1..24: mol_type = transcribed RNA
ggaggccggggtggggcggggcgg

SEQ ID NO: 2257 - RNA, 24 nt, Homo sapiens
  source 1..24: mol_type = transcribed RNA
ccgccccgccccaccccggcctcc

SEQ ID NO: 2258 - RNA, 19 nt, Homo sapiens
  source 1..19: mol_type = transcribed RNA
ggggagcgaggggcggggc

SEQ ID NO: 2259 - RNA, 19 nt, Homo sapiens
  source 1..19: mol_type = transcribed RNA
gccccgcccctcgctcccc

SEQ ID NO: 2260 - RNA, 23 nt, Homo sapiens
  source 1..23: mol_type = transcribed RNA
tattcatttatccccagcctaca

SEQ ID NO: 2261 - RNA, 23 nt, Homo sapiens
  source 1..23: mol_type = transcribed RNA
tgtaggctggggataaatgaata

SEQ ID NO: 2262 - RNA, 24 nt, Homo sapiens
  source 1..24: mol_type = transcribed RNA
actggctagggaaaatgattggat

SEQ ID NO: 2263 - RNA, 24 nt, Homo sapiens
  source 1..24: mol_type = transcribed RNA
atccaatcattttccctagccagt

SEQ ID NO: 2264 - RNA, 22 nt, Homo sapiens
  source 1..22: mol_type = transcribed RNA
ttcatttgcctcccagcctaca

SEQ ID NO: 2265 - RNA, 22 nt, Homo sapiens
  source 1..22: mol_type = transcribed RNA
tgtaggctgggaggcaaatgaa

SEQ ID NO: 2266 - RNA, 24 nt, Homo sapiens
  source 1..24: mol_type = transcribed RNA
tgggctaagggagatgattgggta

SEQ ID NO: 2267 - RNA, 24 nt, Homo sapiens
  source 1..24: mol_type = transcribed RNA
tacccaatcatctcccttagccca

SEQ ID NO: 2268 - RNA, 22 nt, Homo sapiens
  source 1..22: mol_type = transcribed RNA
actccagccccacagcctcagc

SEQ ID NO: 2269 - RNA, 22 nt, Homo sapiens
  source 1..22: mol_type = transcribed RNA
gctgaggctgtggggctggagt

SEQ ID NO: 2270 - RNA, 22 nt, Homo sapiens
  source 1..22: mol_type = transcribed RNA
aggaggaattggtgctggtctt

SEQ ID NO: 2271 - RNA, 22 nt, Homo sapiens
  source 1..22: mol_type = transcribed RNA
aagaccagcaccaattcctcct

SEQ ID NO: 2272 - RNA, 22 nt, Homo sapiens
  source 1..22: mol_type = transcribed RNA
aggcagcggggtgtagtggata

SEQ ID NO: 2273 - RNA, 22 nt, Homo sapiens
  source 1..22: mol_type = transcribed RNA
tatccactacaccccgctgcct

SEQ ID NO: 2274 - RNA, 22 nt, Homo sapiens
  source 1..22: mol_type = transcribed RNA
tccattacactaccctgcctct

SEQ ID NO: 2275 - RNA, 22 nt, Homo sapiens
  source 1..22: mol_type = transcribed RNA
agaggcagggtagtgtaatgga

SEQ ID NO: 2276 - RNA, 22 nt, Homo sapiens
  source 1..22: mol_type = transcribed RNA
actgctgagctagcacttcccg

SEQ ID NO: 2277 - RNA, 22 nt, Homo sapiens
  source 1..22: mol_type = transcribed RNA
cgggaagtgctagctcagcagt

SEQ ID NO: 2278 - RNA, 23 nt, Homo sapiens
  source 1..23: mol_type = transcribed RNA
caaagtgctgttcgtgcaggtag

SEQ ID NO: 2279 - RNA, 23 nt, Homo sapiens
  source 1..23: mol_type = transcribed RNA
ctacctgcacgaacagcactttg

SEQ ID NO: 2280 - RNA, 23 nt, Homo sapiens
  source 1..23: mol_type = transcribed RNA
cacccggctgtgtgcacatgtgc

SEQ ID NO: 2281 - RNA, 23 nt, Homo sapiens
  source 1..23: mol_type = transcribed RNA
gcacatgtgcacacagccgggtg

SEQ ID NO: 2282 - RNA, 23 nt, Homo sapiens
  source 1..23: mol_type = transcribed RNA
agcttctttacagtgctgccttg

SEQ ID NO: 2283 - RNA, 23 nt, Homo sapiens
  source 1..23: mol_type = transcribed RNA
caaggcagcactgtaaagaagct

SEQ ID NO: 2284 - RNA, 23 nt, Homo sapiens
  source 1..23: mol_type = transcribed RNA
agcagcattgtacagggctatga

SEQ ID NO: 2285 - RNA, 23 nt, Homo sapiens
  source 1..23: mol_type = transcribed RNA
tcatagccctgtacaatgctgct

SEQ ID NO: 2286 - RNA, 17 nt, Homo sapiens
  source 1..17: mol_type = transcribed RNA
cctgagaaaagggccaa

SEQ ID NO: 2287 - RNA, 17 nt, Homo sapiens
  source 1..17: mol_type = transcribed RNA
ttggcccttttctcagg

SEQ ID NO: 2288 - RNA, 19 nt, Homo sapiens
  source 1..19: mol_type = transcribed RNA
ggccactgagtcagcacca

SEQ ID NO: 2289 - RNA, 19 nt, Homo sapiens
  source 1..19: mol_type = transcribed RNA
tggtgctgactcagtggcc

SEQ ID NO: 2290 - RNA, 18 nt, Homo sapiens
  source 1..18: mol_type = transcribed RNA
agggcatgtccagggggt

SEQ ID NO: 2291 - RNA, 18 nt, Homo sapiens
  source 1..18: mol_type = transcribed RNA
accccctggacatgccct

SEQ ID NO: 2292 - RNA, 23 nt, Homo sapiens
  source 1..23: mol_type = transcribed RNA
gcctggagctactccaccatctc

SEQ ID NO: 2293 - RNA, 23 nt, Homo sapiens
  source 1..23: mol_type = transcribed RNA
gagatggtggagtagctccaggc

SEQ ID NO: 2294 - RNA, 17 nt, Homo sapiens
  source 1..17: mol_type = transcribed RNA
cagtgttcagagatgga

SEQ ID NO: 2295 - RNA, 17 nt, Homo sapiens
  source 1..17: mol_type = transcribed RNA
tccatctctgaacactg

SEQ ID NO: 2296 - RNA, 18 nt, Homo sapiens
  source 1..18: mol_type = transcribed RNA
atctgacctgatgaaggt

SEQ ID NO: 2297 - RNA, 18 nt, Homo sapiens
  source 1..18: mol_type = transcribed RNA
accttcatcaggtcagat

SEQ ID NO: 2298 - RNA, 18 nt, Homo sapiens
  source 1..18: mol_type = transcribed RNA
ccagaggtggggactgag

SEQ ID NO: 2299 - RNA, 18 nt, Homo sapiens
  source 1..18: mol_type = transcribed RNA
ctcagtccccacctctgg

SEQ ID NO: 2300 - RNA, 17 nt, Homo sapiens
  source 1..17: mol_type = transcribed RNA
ccccgccaccgccttgg

SEQ ID NO: 2301 - RNA, 17 nt, Homo sapiens
  source 1..17: mol_type = transcribed RNA
ccaaggcggtggcgggg

SEQ ID NO: 2302 - RNA, 22 nt, Homo sapiens
  source 1..22: mol_type = transcribed RNA
cagttgggtctaggggtcagga

SEQ ID NO: 2303 - RNA, 22 nt, Homo sapiens
  source 1..22: mol_type = transcribed RNA
tcctgacccctagacccaactg

SEQ ID NO: 2304 - RNA, 19 nt, Homo sapiens
  source 1..19: mol_type = transcribed RNA
cttggggcatggagtccca

SEQ ID NO: 2305 - RNA, 19 nt, Homo sapiens
  source 1..19: mol_type = transcribed RNA
tgggactccatgccccaag

SEQ ID NO: 2306 - RNA, 16 nt, Homo sapiens
  source 1..16: mol_type = transcribed RNA
aggaaacagggaccca

SEQ ID NO: 2307 - RNA, 16 nt, Homo sapiens
  source 1..16: mol_type = transcribed RNA
tgggtccctgtttcct

SEQ ID NO: 2308 - RNA, 17 nt, Homo sapiens
  source 1..17: mol_type = transcribed RNA
gacattcagactacctg

SEQ ID NO: 2309 - RNA, 17 nt, Homo sapiens
  source 1..17: mol_type = transcribed RNA
caggtagtctgaatgtc

SEQ ID NO: 2310 - RNA, 18 nt, Homo sapiens
  source 1..18: mol_type = transcribed RNA
attctaagtgccttggcc

SEQ ID NO: 2311 - RNA, 18 nt, Homo sapiens
  source 1..18: mol_type = transcribed RNA
ggccaaggcacttagaat

SEQ ID NO: 2312 - RNA, 17 nt, Homo sapiens
  source 1..17: mol_type = transcribed RNA
actcagtcatggtcatt

SEQ ID NO: 2313 - RNA, 17 nt, Homo sapiens
  source 1..17: mol_type = transcribed RNA
aatgaccatgactgagt

SEQ ID NO: 2314 - RNA, 19 nt, Homo sapiens
  source 1..19: mol_type = transcribed RNA
ctgtgggctcagctctggg

SEQ ID NO: 2315 - RNA, 19 nt, Homo sapiens
  source 1..19: mol_type = transcribed RNA
cccagagctgagcccacag

SEQ ID NO: 2316 - RNA, 16 nt, Homo sapiens
  source 1..16: mol_type = transcribed RNA
ctaggaggccttggcc

SEQ ID NO: 2317 - RNA, 16 nt, Homo sapiens
  source 1..16: mol_type = transcribed RNA
ggccaaggcctcctag

SEQ ID NO: 2318 - RNA, 16 nt, Homo sapiens
  source 1..16: mol_type = transcribed RNA
tccagctcggtggcac

SEQ ID NO: 2319 - RNA, 16 nt, Homo sapiens
  source 1..16: mol_type = transcribed RNA
gtgccaccgagctgga

SEQ ID NO: 2320 - RNA, 21 nt, Homo sapiens
  source 1..21: mol_type = transcribed RNA
ggctcctcctctcaggatgtg

SEQ ID NO: 2321 - RNA, 21 nt, Homo sapiens
  source 1..21: mol_type = transcribed RNA
cacatcctgagaggaggagcc

SEQ ID NO: 2322 - RNA, 21 nt, Homo sapiens
  source 1..21: mol_type = transcribed RNA
gcaggcacagacagccctggc

SEQ ID NO: 2323 - RNA, 21 nt, Homo sapiens
  source 1..21: mol_type = transcribed RNA
gccagggctgtctgtgcctgc

SEQ ID NO: 2324 - RNA, 20 nt, Homo sapiens
  source 1..20: mol_type = transcribed RNA
tcagggagtcaggggagggc

SEQ ID NO: 2325 - RNA, 20 nt, Homo sapiens
  source 1..20: mol_type = transcribed RNA
gccctcccctgactccctga

SEQ ID NO: 2326 - RNA, 19 nt, Homo sapiens
  source 1..19: mol_type = transcribed RNA
gggggaagaaaaggtgggg

SEQ ID NO: 2327 - RNA, 19 nt, Homo sapiens
  source 1..19: mol_type = transcribed RNA
ccccaccttttcttccccc

SEQ ID NO: 2328 - RNA, 18 nt, Homo sapiens
  source 1..18: mol_type = transcribed RNA
cattcaactagtgattgt

SEQ ID NO: 2329 - RNA, 18 nt, Homo sapiens
  source 1..18: mol_type = transcribed RNA
acaatcactagttgaatg

SEQ ID NO: 2330 - RNA, 18 nt, Homo sapiens
  source 1..18: mol_type = transcribed RNA
cagcagtccctccccctg

SEQ ID NO: 2331 - RNA, 18 nt, Homo sapiens
  source 1..18: mol_type = transcribed RNA
cagggggagggactgctg

SEQ ID NO: 2332 - RNA, 17 nt, Homo sapiens
  source 1..17: mol_type = transcribed RNA
ccaattaccacttcttt

SEQ ID NO: 2333 - RNA, 17 nt, Homo sapiens
  source 1..17: mol_type = transcribed RNA
aaagaagtggtaattgg

SEQ ID NO: 2334 - RNA, 17 nt, Homo sapiens
  source 1..17: mol_type = transcribed RNA
ctcagtgactcatgtgc

SEQ ID NO: 2335 - RNA, 17 nt, Homo sapiens
  source 1..17: mol_type = transcribed RNA
gcacatgagtcactgag

SEQ ID NO: 2336 - RNA, 21 nt, Homo sapiens
  source 1..21: mol_type = transcribed RNA
gcagttctgagcacagtacac

SEQ ID NO: 2337 - RNA, 21 nt, Homo sapiens
  source 1..21: mol_type = transcribed RNA
gtgtactgtgctcagaactgc

SEQ ID NO: 2338 - RNA, 18 nt, Homo sapiens
  source 1..18: mol_type = transcribed RNA
ctagggggtttgcccttg

SEQ ID NO: 2339 - RNA, 18 nt, Homo sapiens
  source 1..18: mol_type = transcribed RNA
caagggcaaaccccctag

SEQ ID NO: 2340 - RNA, 16 nt, Homo sapiens
  source 1..16: mol_type = transcribed RNA
ctctcctcccggcttc

SEQ ID NO: 2341 - RNA, 16 nt, Homo sapiens
  source 1..16: mol_type = transcribed RNA
gaagccgggaggagag

SEQ ID NO: 2342 - RNA, 21 nt, Homo sapiens
  source 1..21: mol_type = transcribed RNA
gagtgtagttctgagcagagc

SEQ ID NO: 2343 - RNA, 21 nt, Homo sapiens
  source 1..21: mol_type = transcribed RNA
gctctgctcagaactacactc

SEQ ID NO: 2344 - RNA, 18 nt, Homo sapiens
  source 1..18: mol_type = transcribed RNA
gggtcccggggagggggg

SEQ ID NO: 2345 - RNA, 18 nt, Homo sapiens
  source 1..18: mol_type = transcribed RNA
cccccctccccgggaccc

SEQ ID NO: 2346 - RNA, 18 nt, Homo sapiens
  source 1..18: mol_type = transcribed RNA
taaaatttgcatccagga

SEQ ID NO: 2347 - RNA, 18 nt, Homo sapiens
  source 1..18: mol_type = transcribed RNA
tcctggatgcaaatttta

SEQ ID NO: 2348 - RNA, 17 nt, Homo sapiens
  source 1..17: mol_type = transcribed RNA
tggggctcagcgagttt

SEQ ID NO: 2349 - RNA, 17 nt, Homo sapiens
  source 1..17: mol_type = transcribed RNA
aaactcgctgagcccca

SEQ ID NO: 2350 - RNA, 18 nt, Homo sapiens
  source 1..18: mol_type = transcribed RNA
gggctcacatcaccccat

SEQ ID NO: 2351 - RNA, 18 nt, Homo sapiens
  source 1..18: mol_type = transcribed RNA
atggggtgatgtgagccc

SEQ ID NO: 2352 - RNA, 18 nt, Homo sapiens
  source 1..18: mol_type = transcribed RNA
gcggcgagtccgactcat

SEQ ID NO: 2353 - RNA, 18 nt, Homo sapiens
  source 1..18: mol_type = transcribed RNA
atgagtcggactcgccgc

SEQ ID NO: 2354 - RNA, 17 nt, Homo sapiens
  source 1..17: mol_type = transcribed RNA
accccactcctggtacc

SEQ ID NO: 2355 - RNA, 17 nt, Homo sapiens
  source 1..17: mol_type = transcribed RNA
ggtaccaggagtggggt

SEQ ID NO: 2356 - RNA, 19 nt, Homo sapiens
  source 1..19: mol_type = transcribed RNA
tctcccttgagggcacttt

SEQ ID NO: 2357 - RNA, 19 nt, Homo sapiens
  source 1..19: mol_type = transcribed RNA
aaagtgccctcaagggaga

SEQ ID NO: 2358 - RNA, 17 nt, Homo sapiens
  source 1..17: mol_type = transcribed RNA
ttgtctgctgagtttcc

SEQ ID NO: 2359 - RNA, 17 nt, Homo sapiens
  source 1..17: mol_type = transcribed RNA
ggaaactcagcagacaa

SEQ ID NO: 2360 - RNA, 19 nt, Homo sapiens
  source 1..19: mol_type = transcribed RNA
gcattgtgcagggctatca

SEQ ID NO: 2361 - RNA, 19 nt, Homo sapiens
  source 1..19: mol_type = transcribed RNA
tgatagccctgcacaatgc

SEQ ID NO: 2362 - RNA, 19 nt, Homo sapiens
  source 1..19: mol_type = transcribed RNA
tgccctcctttcttccctc

SEQ ID NO: 2363 - RNA, 19 nt, Homo sapiens
  source 1..19: mol_type = transcribed RNA
gagggaagaaaggagggca

SEQ ID NO: 2364 - RNA, 16 nt, Homo sapiens
  source 1..16: mol_type = transcribed RNA
ttcagcaggaacagct

SEQ ID NO: 2365 - RNA, 16 nt, Homo sapiens
  source 1..16: mol_type = transcribed RNA
agctgttcctgctgaa

SEQ ID NO: 2366 - RNA, 18 nt, Homo sapiens
  source 1..18: mol_type = transcribed RNA
cccctgggccggccttgg

SEQ ID NO: 2367 - RNA, 18 nt, Homo sapiens
  source 1..18: mol_type = transcribed RNA
ccaaggccggcccagggg

SEQ ID NO: 2368 - RNA, 17 nt, Homo sapiens
  source 1..17: mol_type = transcribed RNA
cagcctgacaggaacag

SEQ ID NO: 2369 - RNA, 17 nt, Homo sapiens
  source 1..17: mol_type = transcribed RNA
ctgttcctgtcaggctg

SEQ ID NO: 2370 - RNA, 17 nt, Homo sapiens
  source 1..17: mol_type = transcribed RNA
gggagtctacagcaggg

SEQ ID NO: 2371 - RNA, 17 nt, Homo sapiens
  source 1..17: mol_type = transcribed RNA
ccctgctgtagactccc

SEQ ID NO: 2372 - RNA, 18 nt, Homo sapiens
  source 1..18: mol_type = transcribed RNA
cagtgcaatgttttcctt

SEQ ID NO: 2373 - RNA, 18 nt, Homo sapiens
  source 1..18: mol_type = transcribed RNA
aaggaaaacattgcactg

SEQ ID NO: 2374 - RNA, 17 nt, Homo sapiens
  source 1..17: mol_type = transcribed RNA
atgtgggctcaggctca

SEQ ID NO: 2375 - RNA, 17 nt, Homo sapiens
  source 1..17: mol_type = transcribed RNA
tgagcctgagcccacat

SEQ ID NO: 2376 - RNA, 16 nt, Homo sapiens
  source 1..16: mol_type = transcribed RNA
tgccttcctgtctgtg

SEQ ID NO: 2377 - RNA, 16 nt, Homo sapiens
  source 1..16: mol_type = transcribed RNA
cacagacaggaaggca

SEQ ID NO: 2378 - RNA, 22 nt, Homo sapiens
  source 1..22: mol_type = transcribed RNA
ctgggacaggaggaggaggcag

SEQ ID NO: 2379 - RNA, 22 nt, Homo sapiens
  source 1..22: mol_type = transcribed RNA
ctgcctcctcctcctgtcccag

SEQ ID NO: 2380 - RNA, 18 nt, Homo sapiens
  source 1..18: mol_type = transcribed RNA
gctggtgacatgagaggc

SEQ ID NO: 2381 - RNA, 18 nt, Homo sapiens
  source 1..18: mol_type = transcribed RNA
gcctctcatgtcaccagc

SEQ ID NO: 2382 - RNA, 18 nt, Homo sapiens
  source 1..18: mol_type = transcribed RNA
tgggagctggactacttc

SEQ ID NO: 2383 - RNA, 18 nt, Homo sapiens
  source 1..18: mol_type = transcribed RNA
gaagtagtccagctccca

SEQ ID NO: 2384 - RNA, 20 nt, Homo sapiens
  source 1..20: mol_type = transcribed RNA
tcccactacttcacttgtga

SEQ ID NO: 2385 - RNA, 20 nt, Homo sapiens
  source 1..20: mol_type = transcribed RNA
tcacaagtgaagtagtggga

SEQ ID NO: 2386 - RNA, 18 nt, Homo sapiens
  source 1..18: mol_type = transcribed RNA
ccagtgtggctcagcgag

SEQ ID NO: 2387 - RNA, 18 nt, Homo sapiens
  source 1..18: mol_type = transcribed RNA
ctcgctgagccacactgg

SEQ ID NO: 2388 - RNA, 17 nt, Homo sapiens
  source 1..17: mol_type = transcribed RNA
ttctgagctgaggacag

SEQ ID NO: 2389 - RNA, 17 nt, Homo sapiens
  source 1..17: mol_type = transcribed RNA
ctgtcctcagctcagaa

SEQ ID NO: 2390 - RNA, 17 nt, Homo sapiens
  source 1..17: mol_type = transcribed RNA
ccggcatgtccagggca

SEQ ID NO: 2391 - RNA, 17 nt, Homo sapiens
  source 1..17: mol_type = transcribed RNA
tgccctggacatgccgg

SEQ ID NO: 2392 - RNA, 18 nt, Homo sapiens
  source 1..18: mol_type = transcribed RNA
cctagacacctccagttc

SEQ ID NO: 2393 - RNA, 18 nt, Homo sapiens
  source 1..18: mol_type = transcribed RNA
gaactggaggtgtctagg

SEQ ID NO: 2394 - RNA, 17 nt, Homo sapiens
  source 1..17: mol_type = transcribed RNA
tggagagaaaggcagta

SEQ ID NO: 2395 - RNA, 17 nt, Homo sapiens
  source 1..17: mol_type = transcribed RNA
tactgcctttctctcca

SEQ ID NO: 2396 - RNA, 19 nt, Homo sapiens
  source 1..19: mol_type = transcribed RNA
aatgttttttcctgtttcc

SEQ ID NO: 2397 - RNA, 19 nt, Homo sapiens
  source 1..19: mol_type = transcribed RNA
ggaaacaggaaaaaacatt

SEQ ID NO: 2398 - RNA, 18 nt, Homo sapiens
  source 1..18: mol_type = transcribed RNA
tccctggagtttcttctt

SEQ ID NO: 2399 - RNA, 18 nt, Homo sapiens
  source 1..18: mol_type = transcribed RNA
aagaagaaactccaggga

SEQ ID NO: 2400 - RNA, 18 nt, Homo sapiens
  source 1..18: mol_type = transcribed RNA
ctggagtctaggattcca

SEQ ID NO: 2401 - RNA, 18 nt, Homo sapiens
  source 1..18: mol_type = transcribed RNA
tggaatcctagactccag

SEQ ID NO: 2402 - RNA, 16 nt, Homo sapiens
  source 1..16: mol_type = transcribed RNA
gcagcattcatgtccc

SEQ ID NO: 2403 - RNA, 16 nt, Homo sapiens
  source 1..16: mol_type = transcribed RNA
gggacatgaatgctgc

SEQ ID NO: 2404 - RNA, 18 nt, Homo sapiens
  source 1..18: mol_type = transcribed RNA
gaaagagagctgagtgtg

SEQ ID NO: 2405 - RNA, 18 nt, Homo sapiens
  source 1..18: mol_type = transcribed RNA
cacactcagctctctttc

SEQ ID NO: 2406 - RNA, 19 nt, Homo sapiens
  source 1..19: mol_type = transcribed RNA
ggccttgttcctgtcccca

SEQ ID NO: 2407 - RNA, 19 nt, Homo sapiens
  source 1..19: mol_type = transcribed RNA
tggggacaggaacaaggcc

SEQ ID NO: 2408 - RNA, 20 nt, Homo sapiens
  source 1..20: mol_type = transcribed RNA
agccccctggccccaaaccc

SEQ ID NO: 2409 - RNA, 20 nt, Homo sapiens
  source 1..20: mol_type = transcribed RNA
gggtttggggccagggggct

SEQ ID NO: 2410 - RNA, 18 nt, Homo sapiens
  source 1..18: mol_type = transcribed RNA
ctctgggaaatgggacag

SEQ ID NO: 2411 - RNA, 18 nt, Homo sapiens
  source 1..18: mol_type = transcribed RNA
ctgtcccatttcccagag

SEQ ID NO: 2412 - RNA, 18 nt, Homo sapiens
  source 1..18: mol_type = transcribed RNA
ccgctttctgagctggac

SEQ ID NO: 2413 - RNA, 18 nt, Homo sapiens
  source 1..18: mol_type = transcribed RNA
gtccagctcagaaagcgg

SEQ ID NO: 2414 - RNA, 17 nt, Homo sapiens
  source 1..17: mol_type = transcribed RNA
ggtgaggctagctggtg

SEQ ID NO: 2415 - RNA, 17 nt, Homo sapiens
  source 1..17: mol_type = transcribed RNA
caccagctagcctcacc

SEQ ID NO: 2416 - RNA, 17 nt, Homo sapiens
  source 1..17: mol_type = transcribed RNA
acattgccagggagttt

SEQ ID NO: 2417 - RNA, 17 nt, Homo sapiens
  source 1..17: mol_type = transcribed RNA
aaactccctggcaatgt

SEQ ID NO: 2418 - RNA, 17 nt, Homo sapiens
  source 1..17: mol_type = transcribed RNA
cactgtgggtacatgct

SEQ ID NO: 2419 - RNA, 17 nt, Homo sapiens
  source 1..17: mol_type = transcribed RNA
agcatgtacccacagtg

SEQ ID NO: 2420 - RNA, 17 nt, Homo sapiens
  source 1..17: mol_type = transcribed RNA
tccctgagcaaagccac

SEQ ID NO: 2421 - RNA, 17 nt, Homo sapiens
  source 1..17: mol_type = transcribed RNA
gtggctttgctcaggga

SEQ ID NO: 2422 - RNA, 18 nt, Homo sapiens
  source 1..18: mol_type = transcribed RNA
gggattctgtagcttcct

SEQ ID NO: 2423 - RNA, 18 nt, Homo sapiens
  source 1..18: mol_type = transcribed RNA
aggaagctacagaatccc

SEQ ID NO: 2424 - RNA, 21 nt, Homo sapiens
  source 1..21: mol_type = transcribed RNA
ttagcggtggaccgccctgcg

SEQ ID NO: 2425 - RNA, 21 nt, Homo sapiens
  source 1..21: mol_type = transcribed RNA
cgcagggcggtccaccgctaa

SEQ ID NO: 2426 - RNA, 21 nt, Homo sapiens
  source 1..21: mol_type = transcribed RNA
ctgtgggctcagcgcgtgggg

SEQ ID NO: 2427 - RNA, 21 nt, Homo sapiens
  source 1..21: mol_type = transcribed RNA
ccccacgcgctgagcccacag

SEQ ID NO: 2428 - RNA, 18 nt, Homo sapiens
  source 1..18: mol_type = transcribed RNA
cagccccacagcctcaga

SEQ ID NO: 2429 - RNA, 18 nt, Homo sapiens
  source 1..18: mol_type = transcribed RNA
tctgaggctgtggggctg

SEQ ID NO: 2430 - RNA, 20 nt, Homo sapiens
  source 1..20: mol_type = transcribed RNA
ccctgagaccctaaccttaa

SEQ ID NO: 2431 - RNA, 20 nt, Homo sapiens
  source 1..20: mol_type = transcribed RNA
ttaaggttagggtctcaggg

SEQ ID NO: 2432 - RNA, 18 nt, Homo sapiens
  source 1..18: mol_type = transcribed RNA
ttgcacttgtctcagtga

SEQ ID NO: 2433 - RNA, 18 nt, Homo sapiens
  source 1..18: mol_type = transcribed RNA
tcactgagacaagtgcaa

SEQ ID NO: 2434 - RNA, 20 nt, Homo sapiens
  source 1..20: mol_type = transcribed RNA
tgttcctctgtctcccagac

SEQ ID NO: 2435 - RNA, 20 nt, Homo sapiens
  source 1..20: mol_type = transcribed RNA
gtctgggagacagaggaaca

SEQ ID NO: 2436 - RNA, 19 nt, Homo sapiens
  source 1..19: mol_type = transcribed RNA
ggcttgcatgggggactgg

SEQ ID NO: 2437 - RNA, 19 nt, Homo sapiens
  source 1..19: mol_type = transcribed RNA
ccagtcccccatgcaagcc

SEQ ID NO: 2438 - RNA, 17 nt, Homo sapiens
  source 1..17: mol_type = transcribed RNA
ccagttttcccaggatt

SEQ ID NO: 2439 - RNA, 17 nt, Homo sapiens
  source 1..17: mol_type = transcribed RNA
aatcctgggaaaactgg

SEQ ID NO: 2440 - RNA, 19 nt, Homo sapiens
  source 1..19: mol_type = transcribed RNA
cctgagaccctagttccac

SEQ ID NO: 2441 - RNA, 19 nt, Homo sapiens
  source 1..19: mol_type = transcribed RNA
gtggaactagggtctcagg

SEQ ID NO: 2442 - RNA, 19 nt, Homo sapiens
  source 1..19: mol_type = transcribed RNA
cctcagatcagagccttgc

SEQ ID NO: 2443 - RNA, 19 nt, Homo sapiens
  source 1..19: mol_type = transcribed RNA
gcaaggctctgatctgagg

SEQ ID NO: 2444 - RNA, 22 nt, Homo sapiens
  source 1..22: mol_type = transcribed RNA
cattgcacttgtctcggtctga

SEQ ID NO: 2445 - RNA, 22 nt, Homo sapiens
  source 1..22: mol_type = transcribed RNA
tcagaccgagacaagtgcaatg

SEQ ID NO: 2446 - RNA, 21 nt, Homo sapiens
  source 1..21: mol_type = transcribed RNA
aggcggagacttgggcaattg

SEQ ID NO: 2447 - RNA, 21 nt, Homo sapiens
  source 1..21: mol_type = transcribed RNA
caattgcccaagtctccgcct

SEQ ID NO: 2448 - RNA, 22 nt, Homo sapiens
  source 1..22: mol_type = transcribed RNA
cctattcttggttacttgcacg

SEQ ID NO: 2449 - RNA, 22 nt, Homo sapiens
  source 1..22: mol_type = transcribed RNA
cgtgcaagtaaccaagaatagg

SEQ ID NO: 2450 - RNA, 19 nt, Homo sapiens
  source 1..19: mol_type = transcribed RNA
aatggatttttggagcagg

SEQ ID NO: 2451 - RNA, 19 nt, Homo sapiens
  source 1..19: mol_type = transcribed RNA
cctgctccaaaaatccatt

SEQ ID NO: 2452 - RNA, 22 nt, Homo sapiens
  source 1..22: mol_type = transcribed RNA
tgcggggctagggctaacagca

SEQ ID NO: 2453 - RNA, 22 nt, Homo sapiens
  source 1..22: mol_type = transcribed RNA
tgctgttagccctagccccgca

SEQ ID NO: 2454 - RNA, 22 nt, Homo sapiens
  source 1..22: mol_type = transcribed RNA
aaaagtaattgcggattttgcc

SEQ ID NO: 2455 - RNA, 22 nt, Homo sapiens
  source 1..22: mol_type = transcribed RNA
ggcaaaatccgcaattactttt

SEQ ID NO: 2456 - RNA, 22 nt, Homo sapiens
  source 1..22: mol_type = transcribed RNA
caaaagtaattgtggattttgt

SEQ ID NO: 2457 - RNA, 22 nt, Homo sapiens
  source 1..22: mol_type = transcribed RNA
acaaaatccacaattacttttg

SEQ ID NO: 2458 - RNA, 23 nt, Homo sapiens
  source 1..23: mol_type = transcribed RNA
taagtgcttccatgttttggtga

SEQ ID NO: 2459 - RNA, 23 nt, Homo sapiens
  source 1..23: mol_type = transcribed RNA
tcaccaaaacatggaagcactta

SEQ ID NO: 2460 - RNA, 23 nt, Homo sapiens
  source 1..23: mol_type = transcribed RNA
acttaaacgtggatgtacttgct

SEQ ID NO: 2461 - RNA, 23 nt, Homo sapiens
  source 1..23: mol_type = transcribed RNA
agcaagtacatccacgtttaagt

SEQ ID NO: 2462 - RNA, 21 nt, Homo sapiens
  source 1..21: mol_type = transcribed RNA
ctatacaatctactgtctttc

SEQ ID NO: 2463 - RNA, 21 nt, Homo sapiens
  source 1..21: mol_type = transcribed RNA
gaaagacagtagattgtatag

SEQ ID NO: 2464 - RNA, 22 nt, Homo sapiens
  source 1..22: mol_type = transcribed RNA
tgaggtagtaggttgtatagtt

SEQ ID NO: 2465 - RNA, 22 nt, Homo sapiens
  source 1..22: mol_type = transcribed RNA
aactatacaacctactacctca

SEQ ID NO: 2466 - RNA, 22 nt, Homo sapiens
  source 1..22: mol_type = transcribed RNA
ctgtacagcctcctagctttcc

SEQ ID NO: 2467 - RNA, 22 nt, Homo sapiens
  source 1..22: mol_type = transcribed RNA
ggaaagctaggaggctgtacag

SEQ ID NO: 2468 - RNA, 20 nt, Homo sapiens
  source 1..20: mol_type = transcribed RNA
caccaggcattgtggtctcc

SEQ ID NO: 2469 - RNA, 20 nt, Homo sapiens
  source 1..20: mol_type = transcribed RNA
ggagaccacaatgcctggtg

SEQ ID NO: 2470 - RNA, 23 nt, Homo sapiens
  source 1..23: mol_type = transcribed RNA
tgagtaccgccatgtctgttggg

SEQ ID NO: 2471 - RNA, 23 nt, Homo sapiens
  source 1..23: mol_type = transcribed RNA
cccaacagacatggcggtactca

SEQ ID NO: 2472 - RNA, 22 nt, Homo sapiens
  source 1..22: mol_type = transcribed RNA
tacccagagcatgcagtgtgaa

SEQ ID NO: 2473 - RNA, 22 nt, Homo sapiens
  source 1..22: mol_type = transcribed RNA
ttcacactgcatgctctgggta

SEQ ID NO: 2474 - RNA, 22 nt, Homo sapiens
  source 1..22: mol_type = transcribed RNA
aagtgctgtcatagctgaggtc

SEQ ID NO: 2475 - RNA, 22 nt, Homo sapiens
  source 1..22: mol_type = transcribed RNA
gacctcagctatgacagcactt

SEQ ID NO: 2476 - RNA, 23 nt, Homo sapiens
  source 1..23: mol_type = transcribed RNA
cactcagccttgagggcactttc

SEQ ID NO: 2477 - RNA, 23 nt, Homo sapiens
  source 1..23: mol_type = transcribed RNA
gaaagtgccctcaaggctgagtg

SEQ ID NO: 2478 - RNA, 22 nt, Homo sapiens
  source 1..22: mol_type = transcribed RNA
tcgacagcacgacactgccttc

SEQ ID NO: 2479 - RNA, 22 nt, Homo sapiens
  source 1..22: mol_type = transcribed RNA
gaaggcagtgtcgtgctgtcga

SEQ ID NO: 2480 - RNA, 22 nt, Homo sapiens
  source 1..22: mol_type = transcribed RNA
taggtagtttcctgttgttggg

SEQ ID NO: 2481 - RNA, 22 nt, Homo sapiens
  source 1..22: mol_type = transcribed RNA
cccaacaacaggaaactaccta

SEQ ID NO: 2482 - RNA, 21 nt, Homo sapiens
  source 1..21: mol_type = transcribed RNA
tacagtactgtgataactgaa

SEQ ID NO: 2483 - RNA, 21 nt, Homo sapiens
  source 1..21: mol_type = transcribed RNA
ttcagttatcacagtactgta

SEQ ID NO: 2484 - RNA, 22 nt, Homo sapiens
  source 1..22: mol_type = transcribed RNA
cagttatcacagtgctgatgct

SEQ ID NO: 2485 - RNA, 22 nt, Homo sapiens
  source 1..22: mol_type = transcribed RNA
agcatcagcactgtgataactg

SEQ ID NO: 2486 - RNA, 23 nt, Homo sapiens
  source 1..23: mol_type = transcribed RNA
tgtgcaaatctatgcaaaactga

SEQ ID NO: 2487 - RNA, 23 nt, Homo sapiens
  source 1..23: mol_type = transcribed RNA
tcagttttgcatagatttgcaca

SEQ ID NO: 2488 - RNA, 22 nt, Homo sapiens
  source 1..22: mol_type = transcribed RNA
agttttgcatagttgcactaca

SEQ ID NO: 2489 - RNA, 22 nt, Homo sapiens
  source 1..22: mol_type = transcribed RNA
tgtagtgcaactatgcaaaact

SEQ ID NO: 2490 - RNA, 23 nt, Homo sapiens
  source 1..23: mol_type = transcribed RNA
agttttgcaggtttgcatccagc

SEQ ID NO: 2491 - RNA, 23 nt, Homo sapiens
  source 1..23: mol_type = transcribed RNA
gctggatgcaaacctgcaaaact

SEQ ID NO: 2492 - RNA, 22 nt, Homo sapiens
  source 1..22: mol_type = transcribed RNA
agttttgcaggtttgcatttca

SEQ ID NO: 2493 - RNA, 22 nt, Homo sapiens
  source 1..22: mol_type = transcribed RNA
tgaaatgcaaacctgcaaaact

SEQ ID NO: 2494 - RNA, 23 nt, Homo sapiens
  source 1..23: mol_type = transcribed RNA
tgtgcaaatccatgcaaaactga

SEQ ID NO: 2495 - RNA, 23 nt, Homo sapiens
  source 1..23: mol_type = transcribed RNA
tcagttttgcatggatttgcaca

SEQ ID NO: 2496 - RNA, 23 nt, Homo sapiens
  source 1..23: mol_type = transcribed RNA
tactgcatcaggaactgattgga

SEQ ID NO: 2497 - RNA, 23 nt, Homo sapiens
  source 1..23: mol_type = transcribed RNA
tccaatcagttcctgatgcagta

SEQ ID NO: 2498 - RNA, 22 nt, Homo sapiens
  source 1..22: mol_type = transcribed RNA
atggttccgtcaagcaccatgg

SEQ ID NO: 2499 - RNA, 22 nt, Homo sapiens
  source 1..22: mol_type = transcribed RNA
ccatggtgcttgacggaaccat

SEQ ID NO: 2500 - RNA, 21 nt, Homo sapiens
  source 1..21: mol_type = transcribed RNA
agctacatctggctactgggt

SEQ ID NO: 2501 - RNA, 21 nt, Homo sapiens
  source 1..21: mol_type = transcribed RNA
acccagtagccagatgtagct

SEQ ID NO: 2502 - RNA, 22 nt, Homo sapiens
  source 1..22: mol_type = transcribed RNA
ctcagtagccagtgtagatcct

SEQ ID NO: 2503 - RNA, 22 nt, Homo sapiens
  source 1..22: mol_type = transcribed RNA
aggatctacactggctactgag

SEQ ID NO: 2504 - RNA, 22 nt, Homo sapiens
  source 1..22: mol_type = transcribed RNA
ttatcagaatctccaggggtac

SEQ ID NO: 2505 - RNA, 22 nt, Homo sapiens
  source 1..22: mol_type = transcribed RNA
gtacccctggagattctgataa

SEQ ID NO: 2506 - RNA, 23 nt, Homo sapiens
  source 1..23: mol_type = transcribed RNA
atcaacagacattaattgggcgc

SEQ ID NO: 2507 - RNA, 23 nt, Homo sapiens
  source 1..23: mol_type = transcribed RNA
gcgcccaattaatgtctgttgat

SEQ ID NO: 2508 - RNA, 21 nt, Homo sapiens
  source 1..21: mol_type = transcribed RNA
caaaacgtgaggcgctgctat

SEQ ID NO: 2509 - RNA, 21 nt, Homo sapiens
  source 1..21: mol_type = transcribed RNA
atagcagcgcctcacgttttg

SEQ ID NO: 2510 - RNA, 22 nt, Homo sapiens
  source 1..22: mol_type = transcribed RNA
cagcagcaattcatgttttgaa

SEQ ID NO: 2511 - RNA, 22 nt, Homo sapiens
  source 1..22: mol_type = transcribed RNA
ttcaaaacatgaattgctgctg

SEQ ID NO: 2512 - RNA, 18 nt, Homo sapiens
  source 1..18: mol_type = transcribed RNA
ttcacagggaggtgtcat

SEQ ID NO: 2513 - RNA, 18 nt, Homo sapiens
  source 1..18: mol_type = transcribed RNA
atgacacctccctgtgaa

SEQ ID NO: 2514 - RNA, 20 nt, Homo sapiens
  source 1..20: mol_type = transcribed RNA
gcggagagagaatggggagc

SEQ ID NO: 2515 - RNA, 20 nt, Homo sapiens
  source 1..20: mol_type = transcribed RNA
gctccccattctctctccgc

SEQ ID NO: 2516 - RNA, 21 nt, Homo sapiens
  source 1..21: mol_type = transcribed RNA
cctgcgagtctccggcggtgg

SEQ ID NO: 2517 - RNA, 21 nt, Homo sapiens
  source 1..21: mol_type = transcribed RNA
ccaccgccggagactcgcagg

SEQ ID NO: 2518 - RNA, 21 nt, Homo sapiens
  source 1..21: mol_type = transcribed RNA
gggctagggcctgctgccccc

SEQ ID NO: 2519 - RNA, 21 nt, Homo sapiens
  source 1..21: mol_type = transcribed RNA
gggggcagcaggccctagccc

SEQ ID NO: 2520 - RNA, 19 nt, Homo sapiens
  source 1..19: mol_type = transcribed RNA
ttctgctgccggccaaggc

SEQ ID NO: 2521 - RNA, 19 nt, Homo sapiens
  source 1..19: mol_type = transcribed RNA
gccttggccggcagcagaa

SEQ ID NO: 2522 - RNA, 22 nt, Homo sapiens
  source 1..22: mol_type = transcribed RNA
tcctcatcacactgcaccttag

SEQ ID NO: 2523 - RNA, 22 nt, Homo sapiens
  source 1..22: mol_type = transcribed RNA
ctaaggtgcagtgtgatgagga

SEQ ID NO: 2524 - RNA, 20 nt, Homo sapiens
  source 1..20: mol_type = transcribed RNA
ggtagtgagttatcagctac

SEQ ID NO: 2525 - RNA, 20 nt, Homo sapiens
  source 1..20: mol_type = transcribed RNA
gtagctgataactcactacc

SEQ ID NO: 2526 - RNA, 20 nt, Homo sapiens
  source 1..20: mol_type = transcribed RNA
gatattcagaggctaggtgg

SEQ ID NO: 2527 - RNA, 20 nt, Homo sapiens
  source 1..20: mol_type = transcribed RNA
ccacctagcctctgaatatc

SEQ ID NO: 2528 - RNA, 21 nt, Homo sapiens
  source 1..21: mol_type = transcribed RNA
acggcccaggcggcattggtg

SEQ ID NO: 2529 - RNA, 21 nt, Homo sapiens
  source 1..21: mol_type = transcribed RNA
caccaatgccgcctgggccgt

SEQ ID NO: 2530 - RNA, 21 nt, Homo sapiens
  source 1..21: mol_type = transcribed RNA
agcatgacagaggagaggtgg

SEQ ID NO: 2531 - RNA, 21 nt, Homo sapiens
  source 1..21: mol_type = transcribed RNA
ccacctctcctctgtcatgct

SEQ ID NO: 2532 - RNA, 21 nt, Homo sapiens
  source 1..21: mol_type = transcribed RNA
gggaagagctgtacggccttc

SEQ ID NO: 2533 - RNA, 21 nt, Homo sapiens
  source 1..21: mol_type = transcribed RNA
gaaggccgtacagctcttccc

SEQ ID NO: 2534 - RNA, 19 nt, Homo sapiens
  source 1..19: mol_type = transcribed RNA
ccgcctgagctagctgtgg

SEQ ID NO: 2535 - RNA, 19 nt, Homo sapiens
  source 1..19: mol_type = transcribed RNA
ccacagctagctcaggcgg

SEQ ID NO: 2536 - RNA, 24 nt, Homo sapiens
  source 1..24: mol_type = transcribed RNA
ttggaagcttggaccaactagctg

SEQ ID NO: 2537 - RNA, 24 nt, Homo sapiens
  source 1..24: mol_type = transcribed RNA
cagctagttggtccaagcttccaa

SEQ ID NO: 2538 - RNA, 19 nt, Homo sapiens
  source 1..19: mol_type = transcribed RNA
tctagtgcgggcgttcccg

SEQ ID NO: 2539 - RNA, 19 nt, Homo sapiens
  source 1..19: mol_type = transcribed RNA
cgggaacgcccgcactaga

SEQ ID NO: 2540 - RNA, 24 nt, Homo sapiens
  source 1..24: mol_type = transcribed RNA
aggagcagtgccggccaaggcgcc

SEQ ID NO: 2541 - RNA, 24 nt, Homo sapiens
  source 1..24: mol_type = transcribed RNA
ggcgccttggccggcactgctcct

SEQ ID NO: 2542 - RNA, 19 nt, Homo sapiens
  source 1..19: mol_type = transcribed RNA
gaatacgtctggttgatcc

SEQ ID NO: 2543 - RNA, 19 nt, Homo sapiens
  source 1..19: mol_type = transcribed RNA
ggatcaaccagacgtattc

SEQ ID NO: 2544 - RNA, 20 nt, Homo sapiens
  source 1..20: mol_type = transcribed RNA
cttatatcagaggctgtggg

SEQ ID NO: 2545 - RNA, 20 nt, Homo sapiens
  source 1..20: mol_type = transcribed RNA
cccacagcctctgatataag

SEQ ID NO: 2546 - RNA, 20 nt, Homo sapiens
  source 1..20: mol_type = transcribed RNA
ttccgccagtcggtggccgg

SEQ ID NO: 2547 - RNA, 20 nt, Homo sapiens
  source 1..20: mol_type = transcribed RNA
ccggccaccgactggcggaa

SEQ ID NO: 2548 - RNA, 19 nt, Homo sapiens
  source 1..19: mol_type = transcribed RNA
aaggggctgggggagcaca

SEQ ID NO: 2549 - RNA, 19 nt, Homo sapiens
  source 1..19: mol_type = transcribed RNA
tgtgctcccccagcccctt

SEQ ID NO: 2550 - RNA, 23 nt, Homo sapiens
  source 1..23: mol_type = transcribed RNA
aggttgggatcggttgcaatgct

SEQ ID NO: 2551 - RNA, 23 nt, Homo sapiens
  source 1..23: mol_type = transcribed RNA
agcattgcaaccgatcccaacct

SEQ ID NO: 2552 - RNA, 22 nt, Homo sapiens
  source 1..22: mol_type = transcribed RNA
gggtggggatttgttgcattac

SEQ ID NO: 2553 - RNA, 22 nt, Homo sapiens
  source 1..22: mol_type = transcribed RNA
gtaatgcaacaaatccccaccc

SEQ ID NO: 2554 - RNA, 22 nt, Homo sapiens
  source 1..22: mol_type = transcribed RNA
tattgcacttgtcccggcctgt

SEQ ID NO: 2555 - RNA, 22 nt, Homo sapiens
  source 1..22: mol_type = transcribed RNA
acaggccgggacaagtgcaata

SEQ ID NO: 2556 - RNA, 22 nt, Homo sapiens
  source 1..22: mol_type = transcribed RNA
tattgcactcgtcccggcctcc

SEQ ID NO: 2557 - RNA, 22 nt, Homo sapiens
  source 1..22: mol_type = transcribed RNA
ggaggccgggacgagtgcaata

SEQ ID NO: 2558 - RNA, 22 nt, Homo sapiens
  source 1..22: mol_type = transcribed RNA
agggacgggacgcggtgcagtg

SEQ ID NO: 2559 - RNA, 22 nt, Homo sapiens
  source 1..22: mol_type = transcribed RNA
cactgcaccgcgtcccgtccct

SEQ ID NO: 2560 - RNA, 21 nt, Homo sapiens
  source 1..21: mol_type = transcribed RNA
atcacattgccagggatttcc

SEQ ID NO: 2561 - RNA, 21 nt, Homo sapiens
  source 1..21: mol_type = transcribed RNA
ggaaatccctggcaatgtgat

SEQ ID NO: 2562 - RNA, 22 nt, Homo sapiens
  source 1..22: mol_type = transcribed RNA
ggggttcctggggatgggattt

SEQ ID NO: 2563 - RNA, 22 nt, Homo sapiens
  source 1..22: mol_type = transcribed RNA
aaatcccatccccaggaacccc

SEQ ID NO: 2564 - RNA, 22 nt, Homo sapiens
  source 1..22: mol_type = transcribed RNA
actgcagtgaaggcacttgtag

SEQ ID NO: 2565 - RNA, 22 nt, Homo sapiens
  source 1..22: mol_type = transcribed RNA
ctacaagtgccttcactgcagt

SEQ ID NO: 2566 - RNA, 23 nt, Homo sapiens
  source 1..23: mol_type = transcribed RNA
agctacattgtctgctgggtttc

SEQ ID NO: 2567 - RNA, 23 nt, Homo sapiens
  source 1..23: mol_type = transcribed RNA
gaaacccagcagacaatgtagct

SEQ ID NO: 2568 - RNA, 22 nt, Homo sapiens
  source 1..22: mol_type = transcribed RNA
acctggcatacaatgtagattt

SEQ ID NO: 2569 - RNA, 22 nt, Homo sapiens
  source 1..22: mol_type = transcribed RNA
aaatctacattgtatgccaggt

SEQ ID NO: 2570 - RNA, 22 nt, Homo sapiens
  source 1..22: mol_type = transcribed RNA
tcgtaccgtgagtaataatgcg

SEQ ID NO: 2571 - RNA, 22 nt, Homo sapiens
  source 1..22: mol_type = transcribed RNA
cgcattattactcacggtacga

SEQ ID NO: 2572 - RNA, 21 nt, Homo sapiens
  source 1..21: mol_type = transcribed RNA
cattattacttttggtacgcg

SEQ ID NO: 2573 - RNA, 21 nt, Homo sapiens
  source 1..21: mol_type = transcribed RNA
cgcgtaccaaaagtaataatg

SEQ ID NO: 2574 - RNA, 23 nt, Homo sapiens
  source 1..23: mol_type = transcribed RNA
tactccagagggcgtcactcatg

SEQ ID NO: 2575 - RNA, 23 nt, Homo sapiens
  source 1..23: mol_type = transcribed RNA
catgagtgacgccctctggagta

SEQ ID NO: 2576 - RNA, 21 nt, Homo sapiens
  source 1..21: mol_type = transcribed RNA
tcccacgttgtggcccagcag

SEQ ID NO: 2577 - RNA, 21 nt, Homo sapiens
  source 1..21: mol_type = transcribed RNA
ctgctgggccacaacgtggga

SEQ ID NO: 2578 - RNA, 23 nt, Homo sapiens
  source 1..23: mol_type = transcribed RNA
cctcaccaccccttctgcctgca

SEQ ID NO: 2579 - RNA, 23 nt, Homo sapiens
  source 1..23: mol_type = transcribed RNA
tgcaggcagaaggggtggtgagg

SEQ ID NO: 2580 - RNA, 24 nt, Homo sapiens
  source 1..24: mol_type = transcribed RNA
ctgcaggcagaagtggggctgaca

SEQ ID NO: 2581 - RNA, 24 nt, Homo sapiens
  source 1..24: mol_type = transcribed RNA
tgtcagccccacttctgcctgcag

SEQ ID NO: 2582 - RNA, 21 nt, Homo sapiens
  source 1..21: mol_type = transcribed RNA
ccaaaccagtcgtgcctgtgg

SEQ ID NO: 2583 - RNA, 21 nt, Homo sapiens
  source 1..21: mol_type = transcribed RNA
ccacaggcacgactggtttgg

SEQ ID NO: 2584 - RNA, 22 nt, Homo sapiens
  source 1..22: mol_type = transcribed RNA
ctcaaaccggctgtgcctgtgg

SEQ ID NO: 2585 - RNA, 22 nt, Homo sapiens
  source 1..22: mol_type = transcribed RNA
ccacaggcacagccggtttgag

SEQ ID NO: 2586 - RNA, 21 nt, Homo sapiens
  source 1..21: mol_type = transcribed RNA
acaggcacgactggtttggca

SEQ ID NO: 2587 - RNA, 21 nt, Homo sapiens
  source 1..21: mol_type = transcribed RNA
tgccaaaccagtcgtgcctgt

SEQ ID NO: 2588 - RNA, 22 nt, Homo sapiens
  source 1..22: mol_type = transcribed RNA
tccgaactctccattcctctgc

SEQ ID NO: 2589 - RNA, 22 nt, Homo sapiens
  source 1..22: mol_type = transcribed RNA
gcagaggaatggagagttcgga

SEQ ID NO: 2590 - RNA, 20 nt, Homo sapiens
  source 1..20: mol_type = transcribed RNA
tgggaatgggggtaagggcc

SEQ ID NO: 2591 - RNA, 20 nt, Homo sapiens
  source 1..20: mol_type = transcribed RNA
ggcccttacccccattccca

SEQ ID NO: 2592 - RNA, 22 nt, Homo sapiens
  source 1..22: mol_type = transcribed RNA
aggcgatgtggggatgtagaga

SEQ ID NO: 2593 - RNA, 22 nt, Homo sapiens
  source 1..22: mol_type = transcribed RNA
tctctacatccccacatcgcct

SEQ ID NO: 2594 - RNA, 21 nt, Homo sapiens
  source 1..21: mol_type = transcribed RNA
tagtggtcagagggcttatga

SEQ ID NO: 2595 - RNA, 21 nt, Homo sapiens
  source 1..21: mol_type = transcribed RNA
tcataagccctctgaccacta

SEQ ID NO: 2596 - RNA, 22 nt, Homo sapiens
  source 1..22: mol_type = transcribed RNA
tctgacatcagtgattctcctg

SEQ ID NO: 2597 - RNA, 22 nt, Homo sapiens
  source 1..22: mol_type = transcribed RNA
caggagaatcactgatgtcaga

SEQ ID NO: 2598 - RNA, 22 nt, Homo sapiens
  source 1..22: mol_type = transcribed RNA
cgcgcctgcaggaactggtaga

SEQ ID NO: 2599 - RNA, 22 nt, Homo sapiens
  source 1..22: mol_type = transcribed RNA
tctaccagttcctgcaggcgcg

SEQ ID NO: 2600 - RNA, 23 nt, Homo sapiens
  source 1..23: mol_type = transcribed RNA
tgggcaggggcttattgtaggag

SEQ ID NO: 2601 - RNA, 23 nt, Homo sapiens
  source 1..23: mol_type = transcribed RNA
ctcctacaataagcccctgccca

SEQ ID NO: 2602 - RNA, 22 nt, Homo sapiens
  source 1..22: mol_type = transcribed RNA
tgcaggggtcgggtgggccagg

SEQ ID NO: 2603 - RNA, 22 nt, Homo sapiens
  source 1..22: mol_type = transcribed RNA
cctggcccacccgacccctgca

SEQ ID NO: 2604 - RNA, 20 nt, Homo sapiens
  source 1..20: mol_type = transcribed RNA
aggcgcacccgaccacatgc

SEQ ID NO: 2605 - RNA, 20 nt, Homo sapiens
  source 1..20: mol_type = transcribed RNA
gcatgtggtcgggtgcgcct

SEQ ID NO: 2606 - RNA, 22 nt, Homo sapiens
  source 1..22: mol_type = transcribed RNA
atagtccgagtaacgtcggggc

SEQ ID NO: 2607 - RNA, 22 nt, Homo sapiens
  source 1..22: mol_type = transcribed RNA
gccccgacgttactcggactat

SEQ ID NO: 2608 - RNA, 23 nt, Homo sapiens
  source 1..23: mol_type = transcribed RNA
ctgggcccgcggcgggcgtgggg

SEQ ID NO: 2609 - RNA, 23 nt, Homo sapiens
  source 1..23: mol_type = transcribed RNA
ccccacgcccgccgcgggcccag

SEQ ID NO: 2610 - RNA, 21 nt, Homo sapiens
  source 1..21: mol_type = transcribed RNA
tacttggaaaggcatcagttg

SEQ ID NO: 2611 - RNA, 21 nt, Homo sapiens
  source 1..21: mol_type = transcribed RNA
caactgatgcctttccaagta

SEQ ID NO: 2612 - RNA, 22 nt, Homo sapiens
  source 1..22: mol_type = transcribed RNA
tgcaacgaacctgagccactga

SEQ ID NO: 2613 - RNA, 22 nt, Homo sapiens
  source 1..22: mol_type = transcribed RNA
tcagtggctcaggttcgttgca

SEQ ID NO: 2614 - RNA, 22 nt, Homo sapiens
  source 1..22: mol_type = transcribed RNA
tgcaacttacctgagtcattga

SEQ ID NO: 2615 - RNA, 22 nt, Homo sapiens
  source 1..22: mol_type = transcribed RNA
tcaatgactcaggtaagttgca

SEQ ID NO: 2616 - RNA, 21 nt, Homo sapiens
  source 1..21: mol_type = transcribed RNA
cactgtgtcctttctgcgtag

SEQ ID NO: 2617 - RNA, 21 nt, Homo sapiens
  source 1..21: mol_type = transcribed RNA
ctacgcagaaaggacacagtg

SEQ ID NO: 2618 - RNA, 22 nt, Homo sapiens
  source 1..22: mol_type = transcribed RNA
cactggctcctttctgggtaga

SEQ ID NO: 2619 - RNA, 22 nt, Homo sapiens
  source 1..22: mol_type = transcribed RNA
tctacccagaaaggagccagtg

SEQ ID NO: 2620 - RNA, 22 nt, Homo sapiens
  source 1..22: mol_type = transcribed RNA
cactgtttcctttctgagtgga

SEQ ID NO: 2621 - RNA, 22 nt, Homo sapiens
  source 1..22: mol_type = transcribed RNA
tccactcagaaaggaaacagtg

SEQ ID NO: 2622 - RNA, 21 nt, Homo sapiens
  source 1..21: mol_type = transcribed RNA
tattcagaaaggtgccagtca

SEQ ID NO: 2623 - RNA, 21 nt, Homo sapiens
  source 1..21: mol_type = transcribed RNA
tgactggcacctttctgaata

SEQ ID NO: 2624 - RNA, 20 nt, Homo sapiens
  source 1..20: mol_type = transcribed RNA
attcctagaaattgttcata

SEQ ID NO: 2625 - RNA, 20 nt, Homo sapiens
  source 1..20: mol_type = transcribed RNA
tatgaacaatttctaggaat

SEQ ID NO: 2626 - RNA, 22 nt, Homo sapiens
  source 1..22: mol_type = transcribed RNA
taatactgtctggtaaaaccgt

SEQ ID NO: 2627 - RNA, 22 nt, Homo sapiens
  source 1..22: mol_type = transcribed RNA
acggttttaccagacagtatta

SEQ ID NO: 2628 - RNA, 22 nt, Homo sapiens
  source 1..22: mol_type = transcribed RNA
tgaaacatacacgggaaacctc

SEQ ID NO: 2629 - RNA, 22 nt, Homo sapiens
  source 1..22: mol_type = transcribed RNA
gaggtttcccgtgtatgtttca

SEQ ID NO: 2630 - RNA, 22 nt, Homo sapiens
  source 1..22: mol_type = transcribed RNA
ctatacaacctactgccttccc

SEQ ID NO: 2631 - RNA, 22 nt, Homo sapiens
  source 1..22: mol_type = transcribed RNA
gggaaggcagtaggttgtatag

SEQ ID NO: 2632 - RNA, 22 nt, Homo sapiens
  source 1..22: mol_type = transcribed RNA
tgaggtagtaggttgtgtggtt

SEQ ID NO: 2633 - RNA, 22 nt, Homo sapiens
  source 1..22: mol_type = transcribed RNA
aaccacacaacctactacctca

SEQ ID NO: 2634 - RNA, 22 nt, Homo sapiens
  source 1..22: mol_type = transcribed RNA
taacactgtctggtaacgatgt

SEQ ID NO: 2635 - RNA, 22 nt, Homo sapiens
  source 1..22: mol_type = transcribed RNA
acatcgttaccagacagtgtta

SEQ ID NO: 2636 - RNA, 22 nt, Homo sapiens
  source 1..22: mol_type = transcribed RNA
catcttaccggacagtgctgga

SEQ ID NO: 2637 - RNA, 22 nt, Homo sapiens
  source 1..22: mol_type = transcribed RNA
tccagcactgtccggtaagatg

SEQ ID NO: 2638 - RNA, 22 nt, Homo sapiens
  source 1..22: mol_type = transcribed RNA
taatactgcctggtaatgatga

SEQ ID NO: 2639 - RNA, 22 nt, Homo sapiens
  source 1..22: mol_type = transcribed RNA
tcatcattaccaggcagtatta

SEQ ID NO: 2640 - RNA, 22 nt, Homo sapiens
  source 1..22: mol_type = transcribed RNA
catcttactgggcagcattgga

SEQ ID NO: 2641 - RNA, 22 nt, Homo sapiens
  source 1..22: mol_type = transcribed RNA
tccaatgctgcccagtaagatg

SEQ ID NO: 2642 - RNA, 23 nt, Homo sapiens
  source 1..23: mol_type = transcribed RNA
taatactgccgggtaatgatgga

SEQ ID NO: 2643 - RNA, 23 nt, Homo sapiens
  source 1..23: mol_type = transcribed RNA
tccatcattacccggcagtatta

SEQ ID NO: 2644 - RNA, 22 nt, Homo sapiens
  source 1..22: mol_type = transcribed RNA
cgtcttacccagcagtgtttgg

SEQ ID NO: 2645 - RNA, 22 nt, Homo sapiens
  source 1..22: mol_type = transcribed RNA
ccaaacactgctgggtaagacg

SEQ ID NO: 2646 - RNA, 22 nt, Homo sapiens
  source 1..22: mol_type = transcribed RNA
tccagcatcagtgattttgttg

SEQ ID NO: 2647 - RNA, 22 nt, Homo sapiens
  source 1..22: mol_type = transcribed RNA
caacaaaatcactgatgctgga

SEQ ID NO: 2648 - RNA, 20 nt, Homo sapiens
  source 1..20: mol_type = transcribed RNA
tacagtatagatgatgtact

SEQ ID NO: 2649 - RNA, 20 nt, Homo sapiens
  source 1..20: mol_type = transcribed RNA
agtacatcatctatactgta

SEQ ID NO: 2650 - RNA, 22 nt, Homo sapiens
  source 1..22: mol_type = transcribed RNA
ggatatcatcatatactgtaag

SEQ ID NO: 2651 - RNA, 22 nt, Homo sapiens
  source 1..22: mol_type = transcribed RNA
cttacagtatatgatgatatcc

SEQ ID NO: 2652 - RNA, 21 nt, Homo sapiens
  source 1..21: mol_type = transcribed RNA
cggggcagctcagtacaggat

SEQ ID NO: 2653 - RNA, 21 nt, Homo sapiens
  source 1..21: mol_type = transcribed RNA
atcctgtactgagctgccccg

SEQ ID NO: 2654 - RNA, 21 nt, Homo sapiens
  source 1..21: mol_type = transcribed RNA
tccttctgctccgtcccccag

SEQ ID NO: 2655 - RNA, 21 nt, Homo sapiens
  source 1..21: mol_type = transcribed RNA
ctgggggacggagcagaagga

SEQ ID NO: 2656 - RNA, 21 nt, Homo sapiens
  source 1..21: mol_type = transcribed RNA
cgggggcggggccgaagcgcg

SEQ ID NO: 2657 - RNA, 21 nt, Homo sapiens
  source 1..21: mol_type = transcribed RNA
cgcgcttcggccccgcccccg

SEQ ID NO: 2658 - RNA, 21 nt, Homo sapiens
  source 1..21: mol_type = transcribed RNA
tcctgcgcgtcccagatgccc

SEQ ID NO: 2659 - RNA, 21 nt, Homo sapiens
  source 1..21: mol_type = transcribed RNA
gggcatctgggacgcgcagga

SEQ ID NO: 2660 - RNA, 22 nt, Homo sapiens
  source 1..22: mol_type = transcribed RNA
catcagaattcatggaggctag

SEQ ID NO: 2661 - RNA, 22 nt, Homo sapiens
  source 1..22: mol_type = transcribed RNA
ctagcctccatgaattctgatg

SEQ ID NO: 2662 - RNA, 22 nt, Homo sapiens
  source 1..22: mol_type = transcribed RNA
agcttccatgactcctgatgga

SEQ ID NO: 2663 - RNA, 22 nt, Homo sapiens
  source 1..22: mol_type = transcribed RNA
tccatcaggagtcatggaagct

SEQ ID NO: 2664 - RNA, 21 nt, Homo sapiens
  source 1..21: mol_type = transcribed RNA
tgacagcgccctgcctggctc

SEQ ID NO: 2665 - RNA, 21 nt, Homo sapiens
  source 1..21: mol_type = transcribed RNA
gagccaggcagggcgctgtca

SEQ ID NO: 2666 - RNA, 24 nt, Homo sapiens
  source 1..24: mol_type = transcribed RNA
agcgcgggctgagcgctgccagtc

SEQ ID NO: 2667 - RNA, 24 nt, Homo sapiens
  source 1..24: mol_type = transcribed RNA
gactggcagcgctcagcccgcgct

SEQ ID NO: 2668 - RNA, 22 nt, Homo sapiens
  source 1..22: mol_type = transcribed RNA
ctgggaggtgtgatatcgtggt

SEQ ID NO: 2669 - RNA, 22 nt, Homo sapiens
  source 1..22: mol_type = transcribed RNA
accacgatatcacacctcccag

SEQ ID NO: 2670 - RNA, 22 nt, Homo sapiens
  source 1..22: mol_type = transcribed RNA
tgtgatatcatggttcctggga

SEQ ID NO: 2671 - RNA, 22 nt, Homo sapiens
  source 1..22: mol_type = transcribed RNA
tcccaggaaccatgatatcaca

SEQ ID NO: 2672 - RNA, 22 nt, Homo sapiens
  source 1..22: mol_type = transcribed RNA
aggtgctccaggctggctcaca

SEQ ID NO: 2673 - RNA, 22 nt, Homo sapiens
  source 1..22: mol_type = transcribed RNA
tgtgagccagcctggagcacct

SEQ ID NO: 2674 - RNA, 22 nt, Homo sapiens
  source 1..22: mol_type = transcribed RNA
gagcaatgtaggtagactgttt

SEQ ID NO: 2675 - RNA, 22 nt, Homo sapiens
  source 1..22: mol_type = transcribed RNA
aaacagtctacctacattgctc

SEQ ID NO: 2676 - RNA, 22 nt, Homo sapiens
  source 1..22: mol_type = transcribed RNA
tgtcctctagggcctgcagtct

SEQ ID NO: 2677 - RNA, 22 nt, Homo sapiens
  source 1..22: mol_type = transcribed RNA
agactgcaggccctagaggaca

SEQ ID NO: 2678 - RNA, 20 nt, Homo sapiens
  source 1..20: mol_type = transcribed RNA
aaaggcataaaaccaagaca

SEQ ID NO: 2679 - RNA, 20 nt, Homo sapiens
  source 1..20: mol_type = transcribed RNA
tgtcttggttttatgccttt

SEQ ID NO: 2680 - RNA, 21 nt, Homo sapiens
  source 1..21: mol_type = transcribed RNA
taacgcataatatggacatgt

SEQ ID NO: 2681 - RNA, 21 nt, Homo sapiens
  source 1..21: mol_type = transcribed RNA
acatgtccatattatgcgtta

SEQ ID NO: 2682 - RNA, 22 nt, Homo sapiens
  source 1..22: mol_type = transcribed RNA
ttgaggaaaagatggtcttatt

SEQ ID NO: 2683 - RNA, 22 nt, Homo sapiens
  source 1..22: mol_type = transcribed RNA
aataagaccatcttttcctcaa

SEQ ID NO: 2684 - RNA, 26 nt, Homo sapiens
  source 1..26: mol_type = transcribed RNA
aagaggaagaaatggctggttctcag

SEQ ID NO: 2685 - RNA, 26 nt, Homo sapiens
  source 1..26: mol_type = transcribed RNA
ctgagaaccagccatttcttcctctt

SEQ ID NO: 2686 - RNA, 20 nt, Homo sapiens
  source 1..20: mol_type = transcribed RNA
gctcggactgagcaggtggg

SEQ ID NO: 2687 - RNA, 20 nt, Homo sapiens
  source 1..20: mol_type = transcribed RNA
cccacctgctcagtccgagc

SEQ ID NO: 2688 - RNA, 21 nt, Homo sapiens
  source 1..21: mol_type = transcribed RNA
acagggccgcagatggagact

SEQ ID NO: 2689 - RNA, 21 nt, Homo sapiens
  source 1..21: mol_type = transcribed RNA
agtctccatctgcggccctgt

SEQ ID NO: 2690 - RNA, 21 nt, Homo sapiens
  source 1..21: mol_type = transcribed RNA
gcagagaacaaaggactcagt

SEQ ID NO: 2691 - RNA, 21 nt, Homo sapiens
  source 1..21: mol_type = transcribed RNA
actgagtcctttgttctctgc

SEQ ID NO: 2692 - RNA, 22 nt, Homo sapiens
  source 1..22: mol_type = transcribed RNA
actgattatcttaactctctga

SEQ ID NO: 2693 - RNA, 22 nt, Homo sapiens
  source 1..22: mol_type = transcribed RNA
tcagagagttaagataatcagt

SEQ ID NO: 2694 - RNA, 23 nt, Homo sapiens
  source 1..23: mol_type = transcribed RNA
tctctgagtaccatatgccttgt

SEQ ID NO: 2695 - RNA, 23 nt, Homo sapiens
  source 1..23: mol_type = transcribed RNA
acaaggcatatggtactcagaga

SEQ ID NO: 2696 - RNA, 22 nt, Homo sapiens
  source 1..22: mol_type = transcribed RNA
aactagtaatgttggattaggg

SEQ ID NO: 2697 - RNA, 22 nt, Homo sapiens
  source 1..22: mol_type = transcribed RNA
ccctaatccaacattactagtt

SEQ ID NO: 2698 - RNA, 22 nt, Homo sapiens
  source 1..22: mol_type = transcribed RNA
atatgtatatgtgactgctact

SEQ ID NO: 2699 - RNA, 22 nt, Homo sapiens
  source 1..22: mol_type = transcribed RNA
agtagcagtcacatatacatat

SEQ ID NO: 2700 - RNA, 21 nt, Homo sapiens
  source 1..21: mol_type = transcribed RNA
tggccaaaaagcaggcagaga

SEQ ID NO: 2701 - RNA, 21 nt, Homo sapiens
  source 1..21: mol_type = transcribed RNA
tctctgcctgctttttggcca

SEQ ID NO: 2702 - RNA, 22 nt, Homo sapiens
  source 1..22: mol_type = transcribed RNA
ggaggaaccttggagcttcggc

SEQ ID NO: 2703 - RNA, 22 nt, Homo sapiens
  source 1..22: mol_type = transcribed RNA
gccgaagctccaaggttcctcc

SEQ ID NO: 2704 - RNA, 23 nt, Homo sapiens
  source 1..23: mol_type = transcribed RNA
gaggctgatgtgagtagaccact

SEQ ID NO: 2705 - RNA, 23 nt, Homo sapiens
  source 1..23: mol_type = transcribed RNA
agtggtctactcacatcagcctc

SEQ ID NO: 2706 - RNA, 21 nt, Homo sapiens
  source 1..21: mol_type = transcribed RNA
ctgtcctaaggttgttgagtt

SEQ ID NO: 2707 - RNA, 21 nt, Homo sapiens
  source 1..21: mol_type = transcribed RNA
aactcaacaaccttaggacag

SEQ ID NO: 2708 - RNA, 21 nt, Homo sapiens
  source 1..21: mol_type = transcribed RNA
tcttcaacctcaggacttgca

SEQ ID NO: 2709 - RNA, 21 nt, Homo sapiens
  source 1..21: mol_type = transcribed RNA
tgcaagtcctgaggttgaaga

SEQ ID NO: 2710 - RNA, 22 nt, Homo sapiens
  source 1..22: mol_type = transcribed RNA
tgtgatatcatggttcctggga

SEQ ID NO: 2711 - RNA, 22 nt, Homo sapiens
  source 1..22: mol_type = transcribed RNA
tcccaggaaccatgatatcaca

SEQ ID NO: 2712 - RNA, 22 nt, Homo sapiens
  source 1..22: mol_type = transcribed RNA
ctgggaggtgtgatattgtggt

SEQ ID NO: 2713 - RNA, 22 nt, Homo sapiens
  source 1..22: mol_type = transcribed RNA
accacaatatcacacctcccag

SEQ ID NO: 2714 - RNA, 22 nt, Homo sapiens
  source 1..22: mol_type = transcribed RNA
caggtagatatttgataggcat

SEQ ID NO: 2715 - RNA, 22 nt, Homo sapiens
  source 1..22: mol_type = transcribed RNA
atgcctatcaaatatctacctg

SEQ ID NO: 2716 - RNA, 21 nt, Homo sapiens
  source 1..21: mol_type = transcribed RNA
gcctatcacatatctgcctgt

SEQ ID NO: 2717 - RNA, 21 nt, Homo sapiens
  source 1..21: mol_type = transcribed RNA
acaggcagatatgtgataggc

SEQ ID NO: 2718 - RNA, 20 nt, Homo sapiens
  source 1..20: mol_type = transcribed RNA
gggctggggcgcggggaggt

SEQ ID NO: 2719 - RNA, 20 nt, Homo sapiens
  source 1..20: mol_type = transcribed RNA
acctccccgcgccccagccc

SEQ ID NO: 2720 - RNA, 18 nt, Homo sapiens
  source 1..18: mol_type = transcribed RNA
tgcttcctttcagagggt

SEQ ID NO: 2721 - RNA, 18 nt, Homo sapiens
  source 1..18: mol_type = transcribed RNA
accctctgaaaggaagca

SEQ ID NO: 2722 - RNA, 21 nt, Homo sapiens
  source 1..21: mol_type = transcribed RNA
tgagttggccatctgagtgag

SEQ ID NO: 2723 - RNA, 21 nt, Homo sapiens
  source 1..21: mol_type = transcribed RNA
ctcactcagatggccaactca

SEQ ID NO: 2724 - RNA, 23 nt, Homo sapiens
  source 1..23: mol_type = transcribed RNA
aacattcattgttgtcggtgggt

SEQ ID NO: 2725 - RNA, 23 nt, Homo sapiens
  source 1..23: mol_type = transcribed RNA
acccaccgacaacaatgaatgtt

SEQ ID NO: 2726 - RNA, 21 nt, Homo sapiens
  source 1..21: mol_type = transcribed RNA
tcacagtgaaccggtctcttt

SEQ ID NO: 2727 - RNA, 21 nt, Homo sapiens
  source 1..21: mol_type = transcribed RNA
aaagagaccggttcactgtga

SEQ ID NO: 2728 - RNA, 22 nt, Homo sapiens
  source 1..22: mol_type = transcribed RNA
caacaaatcacagtctgccata

SEQ ID NO: 2729 - RNA, 22 nt, Homo sapiens
  source 1..22: mol_type = transcribed RNA
tatggcagactgtgatttgttg

SEQ ID NO: 2730 - RNA, 21 nt, Homo sapiens
  source 1..21: mol_type = transcribed RNA
ctcactgaacaatgaatgcaa

SEQ ID NO: 2731 - RNA, 21 nt, Homo sapiens
  source 1..21: mol_type = transcribed RNA
ttgcattcattgttcagtgag

SEQ ID NO: 2732 - RNA, 23 nt, Homo sapiens
  source 1..23: mol_type = transcribed RNA
aacattcattgctgtcggtgggt

SEQ ID NO: 2733 - RNA, 23 nt, Homo sapiens
  source 1..23: mol_type = transcribed RNA
acccaccgacagcaatgaatgtt

SEQ ID NO: 2734 - RNA, 22 nt, Homo sapiens
  source 1..22: mol_type = transcribed RNA
accatcgaccgttgattgtacc

SEQ ID NO: 2735 - RNA, 22 nt, Homo sapiens
  source 1..22: mol_type = transcribed RNA
ggtacaatcaacggtcgatggt

SEQ ID NO: 2736 - RNA, 23 nt, Homo sapiens
  source 1..23: mol_type = transcribed RNA
aacattcaacgctgtcggtgagt

SEQ ID NO: 2737 - RNA, 23 nt, Homo sapiens
  source 1..23: mol_type = transcribed RNA
actcaccgacagcgttgaatgtt

SEQ ID NO: 2738 - RNA, 22 nt, Homo sapiens
  source 1..22: mol_type = transcribed RNA
accactgaccgttgactgtacc

SEQ ID NO: 2739 - RNA, 22 nt, Homo sapiens
  source 1..22: mol_type = transcribed RNA
ggtacagtcaacggtcagtggt

SEQ ID NO: 2740 - RNA, 22 nt, Homo sapiens
  source 1..22: mol_type = transcribed RNA
ctgttgccactaacctcaacct

SEQ ID NO: 2741 - RNA, 22 nt, Homo sapiens
  source 1..22: mol_type = transcribed RNA
aggttgaggttagtggcaacag

SEQ ID NO: 2742 - RNA, 22 nt, Homo sapiens
  source 1..22: mol_type = transcribed RNA
ataagacgagcaaaaagcttgt

SEQ ID NO: 2743 - RNA, 22 nt, Homo sapiens
  source 1..22: mol_type = transcribed RNA
acaagctttttgctcgtcttat

SEQ ID NO: 2744 - RNA, 22 nt, Homo sapiens
  source 1..22: mol_type = transcribed RNA
ataagacgaacaaaaggtttgt

SEQ ID NO: 2745 - RNA, 22 nt, Homo sapiens
  source 1..22: mol_type = transcribed RNA
acaaaccttttgttcgtcttat

SEQ ID NO: 2746 - RNA, 21 nt, Homo sapiens
  source 1..21: mol_type = transcribed RNA
agggagggacgggggctgtgc

SEQ ID NO: 2747 - RNA, 21 nt, Homo sapiens
  source 1..21: mol_type = transcribed RNA
gcacagcccccgtccctccct

SEQ ID NO: 2748 - RNA, 23 nt, Homo sapiens
  source 1..23: mol_type = transcribed RNA
tctggctccgtgtcttcactccc

SEQ ID NO: 2749 - RNA, 23 nt, Homo sapiens
  source 1..23: mol_type = transcribed RNA
gggagtgaagacacggagccaga

SEQ ID NO: 2750 - RNA, 22 nt, Homo sapiens
  source 1..22: mol_type = transcribed RNA
tggaatgtaaagaagtatgtat

SEQ ID NO: 2751 - RNA, 22 nt, Homo sapiens
  source 1..22: mol_type = transcribed RNA
atacatacttctttacattcca

SEQ ID NO: 2752 - RNA, 22 nt, Homo sapiens
  source 1..22: mol_type = transcribed RNA
aacatcacagcaagtctgtgct

SEQ ID NO: 2753 - RNA, 22 nt, Homo sapiens
  source 1..22: mol_type = transcribed RNA
agcacagacttgctgtgatgtt

SEQ ID NO: 2754 - RNA, 21 nt, Homo sapiens
  source 1..21: mol_type = transcribed RNA
ttaagacttgcagtgatgttt

SEQ ID NO: 2755 - RNA, 21 nt, Homo sapiens
  source 1..21: mol_type = transcribed RNA
aaacatcactgcaagtcttaa

SEQ ID NO: 2756 - RNA, 22 nt, Homo sapiens
  source 1..22: mol_type = transcribed RNA
aacatcactgcaagtcttaaca

SEQ ID NO: 2757 - RNA, 22 nt, Homo sapiens
  source 1..22: mol_type = transcribed RNA
tgttaagacttgcagtgatgtt

SEQ ID NO: 2758 - RNA, 21 nt, Homo sapiens
  source 1..21: mol_type = transcribed RNA
acagacttgctgtgatgttca

SEQ ID NO: 2759 - RNA, 21 nt, Homo sapiens
  source 1..21: mol_type = transcribed RNA
tgaacatcacagcaagtctgt

SEQ ID NO: 2760 - RNA, 22 nt, Homo sapiens
  source 1..22: mol_type = transcribed RNA
aaaccgttaccattactgagtt

SEQ ID NO: 2761 - RNA, 22 nt, Homo sapiens
  source 1..22: mol_type = transcribed RNA
aactcagtaatggtaacggttt

SEQ ID NO: 2762 - RNA, 22 nt, Homo sapiens
  source 1..22: mol_type = transcribed RNA
tagcaagagaaccattaccatt

SEQ ID NO: 2763 - RNA, 22 nt, Homo sapiens
  source 1..22: mol_type = transcribed RNA
aatggtaatggttctcttgcta

SEQ ID NO: 2764 - RNA, 23 nt, Homo sapiens
  source 1..23: mol_type = transcribed RNA
tgaggggcagagagcgagacttt

SEQ ID NO: 2765 - RNA, 23 nt, Homo sapiens
  source 1..23: mol_type = transcribed RNA
aaagtctcgctctctgcccctca

SEQ ID NO: 2766 - RNA, 22 nt, Homo sapiens
  source 1..22: mol_type = transcribed RNA
caagctcgcttctatgggtctg

SEQ ID NO: 2767 - RNA, 22 nt, Homo sapiens
  source 1..22: mol_type = transcribed RNA
cagacccatagaagcgagcttg

SEQ ID NO: 2768 - RNA, 22 nt, Homo sapiens
  source 1..22: mol_type = transcribed RNA
aacccgtagatccgatcttgtg

SEQ ID NO: 2769 - RNA, 22 nt, Homo sapiens
  source 1..22: mol_type = transcribed RNA
cacaagatcggatctacgggtt

SEQ ID NO: 2770 - RNA, 22 nt, Homo sapiens
  source 1..22: mol_type = transcribed RNA
caagctcgtgtctgtgggtccg

SEQ ID NO: 2771 - RNA, 22 nt, Homo sapiens
  source 1..22: mol_type = transcribed RNA
cggacccacagacacgagcttg

SEQ ID NO: 2772 - RNA, 22 nt, Homo sapiens
  source 1..22: mol_type = transcribed RNA
cacccgtagaaccgaccttgcg

SEQ ID NO: 2773 - RNA, 22 nt, Homo sapiens
  source 1..22: mol_type = transcribed RNA
cgcaaggtcggttctacgggtg

SEQ ID NO: 2774 - RNA, 23 nt, Homo sapiens
  source 1..23: mol_type = transcribed RNA
tggagacgcggccctgttggagt

SEQ ID NO: 2775 - RNA, 23 nt, Homo sapiens
  source 1..23: mol_type = transcribed RNA
actccaacagggccgcgtctcca

SEQ ID NO: 2776 - RNA, 23 nt, Homo sapiens
  source 1..23: mol_type = transcribed RNA
tctacagtgcacgtgtctccagt

SEQ ID NO: 2777 - RNA, 23 nt, Homo sapiens
  source 1..23: mol_type = transcribed RNA
actggagacacgtgcactgtaga

SEQ ID NO: 2778 - RNA, 22 nt, Homo sapiens
  source 1..22: mol_type = transcribed RNA
caaattcgtatctaggggaata

SEQ ID NO: 2779 - RNA, 22 nt, Homo sapiens
  source 1..22: mol_type = transcribed RNA
tattcccctagatacgaatttg

SEQ ID NO: 2780 - RNA, 23 nt, Homo sapiens
  source 1..23: mol_type = transcribed RNA
taccctgtagatccgaatttgtg

SEQ ID NO: 2781 - RNA, 23 nt, Homo sapiens
  source 1..23: mol_type = transcribed RNA
cacaaattcggatctacagggta

SEQ ID NO: 2782 - RNA, 23 nt, Homo sapiens
  source 1..23: mol_type = transcribed RNA
cctgcagcgacttgatggcttcc

SEQ ID NO: 2783 - RNA, 23 nt, Homo sapiens
  source 1..23: mol_type = transcribed RNA
ggaagccatcaagtcgctgcagg

SEQ ID NO: 2784 - RNA, 22 nt, Homo sapiens
  source 1..22: mol_type = transcribed RNA
tcagtgcactacagaactttgt

SEQ ID NO: 2785 - RNA, 22 nt, Homo sapiens
  source 1..22: mol_type = transcribed RNA
acaaagttctgtagtgcactga

SEQ ID NO: 2786 - RNA, 22 nt, Homo sapiens
  source 1..22: mol_type = transcribed RNA
aaagttctgagacactccgact

SEQ ID NO: 2787 - RNA, 22 nt, Homo sapiens
  source 1..22: mol_type = transcribed RNA
agtcggagtgtctcagaacttt

SEQ ID NO: 2788 - RNA, 22 nt, Homo sapiens
  source 1..22: mol_type = transcribed RNA
cctgttctccattacttggctc

SEQ ID NO: 2789 - RNA, 22 nt, Homo sapiens
  source 1..22: mol_type = transcribed RNA
gagccaagtaatggagaacagg

SEQ ID NO: 2790 - RNA, 21 nt, Homo sapiens
  source 1..21: mol_type = transcribed RNA
ttcaagtaattcaggataggt

SEQ ID NO: 2791 - RNA, 21 nt, Homo sapiens
  source 1..21: mol_type = transcribed RNA
acctatcctgaattacttgaa

SEQ ID NO: 2792 - RNA, 22 nt, Homo sapiens
  source 1..22: mol_type = transcribed RNA
gccctgaacgaggggtctggag

SEQ ID NO: 2793 - RNA, 22 nt, Homo sapiens
  source 1..22: mol_type = transcribed RNA
ctccagacccctcgttcagggc

SEQ ID NO: 2794 - RNA, 22 nt, Homo sapiens
  source 1..22: mol_type = transcribed RNA
gctgactcctagtccagggctc

SEQ ID NO: 2795 - RNA, 22 nt, Homo sapiens
  source 1..22: mol_type = transcribed RNA
gagccctggactaggagtcagc

SEQ ID NO: 2796 - RNA, 22 nt, Homo sapiens
  source 1..22: mol_type = transcribed RNA
atcacacaaaggcaacttttgt

SEQ ID NO: 2797 - RNA, 22 nt, Homo sapiens
  source 1..22: mol_type = transcribed RNA
acaaaagttgcctttgtgtgat

SEQ ID NO: 2798 - RNA, 22 nt, Homo sapiens
  source 1..22: mol_type = transcribed RNA
agaggttgcccttggtgaattc

SEQ ID NO: 2799 - RNA, 22 nt, Homo sapiens
  source 1..22: mol_type = transcribed RNA
gaattcaccaagggcaacctct

SEQ ID NO: 2800 - RNA, 21 nt, Homo sapiens
  source 1..21: mol_type = transcribed RNA
ggtagattttccttctatggt

SEQ ID NO: 2801 - RNA, 21 nt, Homo sapiens
  source 1..21: mol_type = transcribed RNA
accatagaaggaaaatctacc

SEQ ID NO: 2802 - RNA, 21 nt, Homo sapiens
  source 1..21: mol_type = transcribed RNA
atcatagaggaaaatccacgt

SEQ ID NO: 2803 - RNA, 21 nt, Homo sapiens
  source 1..21: mol_type = transcribed RNA
acgtggattttcctctatgat

SEQ ID NO: 2804 - RNA, 22 nt, Homo sapiens
  source 1..22: mol_type = transcribed RNA
gtagattctccttctatgagta

SEQ ID NO: 2805 - RNA, 22 nt, Homo sapiens
  source 1..22: mol_type = transcribed RNA
tactcatagaaggagaatctac

SEQ ID NO: 2806 - RNA, 22 nt, Homo sapiens
  source 1..22: mol_type = transcribed RNA
ctggtacaggcctgggggacag

SEQ ID NO: 2807 - RNA, 22 nt, Homo sapiens
  source 1..22: mol_type = transcribed RNA
ctgtcccccaggcctgtaccag

SEQ ID NO: 2808 - RNA, 22 nt, Homo sapiens
  source 1..22: mol_type = transcribed RNA
tctcccaacccttgtaccagtg

SEQ ID NO: 2809 - RNA, 22 nt, Homo sapiens
  source 1..22: mol_type = transcribed RNA
cactggtacaagggttgggaga

SEQ ID NO: 2810 - RNA, 22 nt, Homo sapiens
  source 1..22: mol_type = transcribed RNA
acgggttaggctcttgggagct

SEQ ID NO: 2811 - RNA, 22 nt, Homo sapiens
  source 1..22: mol_type = transcribed RNA
agctcccaagagcctaacccgt

SEQ ID NO: 2812 - RNA, 22 nt, Homo sapiens
  source 1..22: mol_type = transcribed RNA
tcacaagtcaggctcttgggac

SEQ ID NO: 2813 - RNA, 22 nt, Homo sapiens
  source 1..22: mol_type = transcribed RNA
gtcccaagagcctgacttgtga

SEQ ID NO: 2814 - RNA, 22 nt, Homo sapiens
  source 1..22: mol_type = transcribed RNA
aacccgtagatccgaacttgtg

SEQ ID NO: 2815 - RNA, 22 nt, Homo sapiens
  source 1..22: mol_type = transcribed RNA
cacaagttcggatctacgggtt

SEQ ID NO: 2816 - RNA, 21 nt, Homo sapiens
  source 1..21: mol_type = transcribed RNA
ctgtacaggccactgccttgc

SEQ ID NO: 2817 - RNA, 21 nt, Homo sapiens
  source 1..21: mol_type = transcribed RNA
gcaaggcagtggcctgtacag

SEQ ID NO: 2818 - RNA, 22 nt, Homo sapiens
  source 1..22: mol_type = transcribed RNA
tgaggtagtagtttgtacagtt

SEQ ID NO: 2819 - RNA, 22 nt, Homo sapiens
  source 1..22: mol_type = transcribed RNA
aactgtacaaactactacctca

SEQ ID NO: 2820 - RNA, 22 nt, Homo sapiens
  source 1..22: mol_type = transcribed RNA
tccctgagaccctaacttgtga

SEQ ID NO: 2821 - RNA, 22 nt, Homo sapiens
  source 1..22: mol_type = transcribed RNA
tcacaagttagggtctcaggga

SEQ ID NO: 2822 - RNA, 22 nt, Homo sapiens
  source 1..22: mol_type = transcribed RNA
caagcttgtatctataggtatg

SEQ ID NO: 2823 - RNA, 22 nt, Homo sapiens
  source 1..22: mol_type = transcribed RNA
catacctatagatacaagcttg

SEQ ID NO: 2824 - RNA, 23 nt, Homo sapiens
  source 1..23: mol_type = transcribed RNA
aaagtgctgcgacatttgagcgt

SEQ ID NO: 2825 - RNA, 23 nt, Homo sapiens
  source 1..23: mol_type = transcribed RNA
acgctcaaatgtcgcagcacttt

SEQ ID NO: 2826 - RNA, 22 nt, Homo sapiens
  source 1..22: mol_type = transcribed RNA
tttagagacggggtcttgctct

SEQ ID NO: 2827 - RNA, 22 nt, Homo sapiens
  source 1..22: mol_type = transcribed RNA
agagcaagaccccgtctctaaa

SEQ ID NO: 2828 - RNA, 24 nt, Homo sapiens
  source 1..24: mol_type = transcribed RNA
tggccctgactgaagaccagcagt

SEQ ID NO: 2829 - RNA, 24 nt, Homo sapiens
  source 1..24: mol_type = transcribed RNA
actgctggtcttcagtcagggcca

SEQ ID NO: 2830 - RNA, 21 nt, Homo sapiens
  source 1..21: mol_type = transcribed RNA
gcgacccatacttggtttcag

SEQ ID NO: 2831 - RNA, 21 nt, Homo sapiens
  source 1..21: mol_type = transcribed RNA
ctgaaaccaagtatgggtcgc

SEQ ID NO: 2832 - RNA, 22 nt, Homo sapiens
  source 1..22: mol_type = transcribed RNA
gaaatcaagcgtgggtgagacc

SEQ ID NO: 2833 - RNA, 22 nt, Homo sapiens
  source 1..22: mol_type = transcribed RNA
ggtctcacccacgcttgatttc

SEQ ID NO: 2834 - RNA, 21 nt, Homo sapiens
  source 1..21: mol_type = transcribed RNA
ccctgggcctctgctccccag

SEQ ID NO: 2835 - RNA, 21 nt, Homo sapiens
  source 1..21: mol_type = transcribed RNA
ctggggagcagaggcccaggg

SEQ ID NO: 2836 - RNA, 24 nt, Homo sapiens
  source 1..24: mol_type = transcribed RNA
tggggagctgaggctctgggggtg

SEQ ID NO: 2837 - RNA, 24 nt, Homo sapiens
  source 1..24: mol_type = transcribed RNA
cacccccagagcctcagctcccca

SEQ ID NO: 2838 - RNA, 20 nt, Homo sapiens
  source 1..20: mol_type = transcribed RNA
ggggagctgtggaagcagta

SEQ ID NO: 2839 - RNA, 20 nt, Homo sapiens
  source 1..20: mol_type = transcribed RNA
tactgcttccacagctcccc

SEQ ID NO: 2840 - RNA, 25 nt, Homo sapiens
  source 1..25: mol_type = transcribed RNA
ctagtgagggacagaaccaggattc

SEQ ID NO: 2841 - RNA, 25 nt, Homo sapiens
  source 1..25: mol_type = transcribed RNA
gaatcctggttctgtccctcactag

SEQ ID NO: 2842 - RNA, 20 nt, Homo sapiens
  source 1..20: mol_type = transcribed RNA
agagtcttgtgatgtcttgc

SEQ ID NO: 2843 - RNA, 20 nt, Homo sapiens
  source 1..20: mol_type = transcribed RNA
gcaagacatcacaagactct

SEQ ID NO: 2844 - RNA, 23 nt, Homo sapiens
  source 1..23: mol_type = transcribed RNA
gcagcagagaataggactacgtc

SEQ ID NO: 2845 - RNA, 23 nt, Homo sapiens
  source 1..23: mol_type = transcribed RNA
gacgtagtcctattctctgctgc

SEQ ID NO: 2846 - RNA, 23 nt, Homo sapiens
  source 1..23: mol_type = transcribed RNA
tgagcgcctcgacgacagagccg

SEQ ID NO: 2847 - RNA, 23 nt, Homo sapiens
  source 1..23: mol_type = transcribed RNA
cggctctgtcgtcgaggcgctca

SEQ ID NO: 2848 - RNA, 23 nt, Homo sapiens
  source 1..23: mol_type = transcribed RNA
tccctgtcctccaggagctcacg

SEQ ID NO: 2849 - RNA, 23 nt, Homo sapiens
  source 1..23: mol_type = transcribed RNA
cgtgagctcctggaggacaggga

SEQ ID NO: 2850 - RNA, 22 nt, Homo sapiens
  source 1..22: mol_type = transcribed RNA
ctatacggcctcctagctttcc

SEQ ID NO: 2851 - RNA, 22 nt, Homo sapiens
  source 1..22: mol_type = transcribed RNA
ggaaagctaggaggccgtatag

SEQ ID NO: 2852 - RNA, 22 nt, Homo sapiens
  source 1..22: mol_type = transcribed RNA
tgaggtaggaggttgtatagtt

SEQ ID NO: 2853 - RNA, 22 nt, Homo sapiens
  source 1..22: mol_type = transcribed RNA
aactatacaacctcctacctca

SEQ ID NO: 2854 - RNA, 22 nt, Homo sapiens
  source 1..22: mol_type = transcribed RNA
ctgcgcaagctactgccttgct

SEQ ID NO: 2855 - RNA, 22 nt, Homo sapiens
  source 1..22: mol_type = transcribed RNA
agcaaggcagtagcttgcgcag

SEQ ID NO: 2856 - RNA, 22 nt, Homo sapiens
  source 1..22: mol_type = transcribed RNA
tgaggtagtagtttgtgctgtt

SEQ ID NO: 2857 - RNA, 22 nt, Homo sapiens
  source 1..22: mol_type = transcribed RNA
aacagcacaaactactacctca

SEQ ID NO: 2858 - RNA, 22 nt, Homo sapiens
  source 1..22: mol_type = transcribed RNA
tgccctgtggactcagttctgg

SEQ ID NO: 2859 - RNA, 22 nt, Homo sapiens
  source 1..22: mol_type = transcribed RNA
ccagaactgagtccacagggca

SEQ ID NO: 2860 - RNA, 21 nt, Homo sapiens
  source 1..21: mol_type = transcribed RNA
tggttctagacttgccaacta

SEQ ID NO: 2861 - RNA, 21 nt, Homo sapiens
  source 1..21: mol_type = transcribed RNA
tagttggcaagtctagaacca

SEQ ID NO: 2862 - RNA, 23 nt, Homo sapiens
  source 1..23: mol_type = transcribed RNA
tgtctgcccgcatgcctgcctct

SEQ ID NO: 2863 - RNA, 23 nt, Homo sapiens
  source 1..23: mol_type = transcribed RNA
agaggcaggcatgcgggcagaca

SEQ ID NO: 2864 - RNA, 22 nt, Homo sapiens
  source 1..22: mol_type = transcribed RNA
aaaagtaattgcggtctttggt

SEQ ID NO: 2865 - RNA, 22 nt, Homo sapiens
  source 1..22: mol_type = transcribed RNA
accaaagaccgcaattactttt

SEQ ID NO: 2866 - RNA, 18 nt, Homo sapiens
  source 1..18: mol_type = transcribed RNA
tcgaggagctcacagtct

SEQ ID NO: 2867 - RNA, 18 nt, Homo sapiens
  source 1..18: mol_type = transcribed RNA
agactgtgagctcctcga

SEQ ID NO: 2868 - RNA, 22 nt, Homo sapiens
  source 1..22: mol_type = transcribed RNA
ctatacaatctattgccttccc

SEQ ID NO: 2869 - RNA, 22 nt, Homo sapiens
  source 1..22: mol_type = transcribed RNA
gggaaggcaatagattgtatag

SEQ ID NO: 2870 - RNA, 22 nt, Homo sapiens
  source 1..22: mol_type = transcribed RNA
ctatacagtctactgtctttcc

SEQ ID NO: 2871 - RNA, 22 nt, Homo sapiens
  source 1..22: mol_type = transcribed RNA
ggaaagacagtagactgtatag

SEQ ID NO: 2872 - RNA, 22 nt, Homo sapiens
  source 1..22: mol_type = transcribed RNA
tgaggtagtagattgtatagtt

SEQ ID NO: 2873 - RNA, 22 nt, Homo sapiens
  source 1..22: mol_type = transcribed RNA
aactatacaatctactacctca

SEQ ID NO: 2874 - RNA, 22 nt, Homo sapiens
  source 1..22: mol_type = transcribed RNA
aaaagtaattgtggttttggcc

SEQ ID NO: 2875 - RNA, 22 nt, Homo sapiens
  source 1..22: mol_type = transcribed RNA
ggccaaaaccacaattactttt

SEQ ID NO: 2876 - RNA, 22 nt, Homo sapiens
  source 1..22: mol_type = transcribed RNA
aaaagtaattgcggtttttgcc

SEQ ID NO: 2877 - RNA, 22 nt, Homo sapiens
  source 1..22: mol_type = transcribed RNA
ggcaaaaaccgcaattactttt

SEQ ID NO: 2878 - RNA, 22 nt, Homo sapiens
  source 1..22: mol_type = transcribed RNA
cctctgaaattcagttcttcag

SEQ ID NO: 2879 - RNA, 22 nt, Homo sapiens
  source 1..22: mol_type = transcribed RNA
ctgaagaactgaatttcagagg

SEQ ID NO: 2880 - RNA, 22 nt, Homo sapiens
  source 1..22: mol_type = transcribed RNA
tgagaactgaattccatgggtt

SEQ ID NO: 2881 - RNA, 22 nt, Homo sapiens
  source 1..22: mol_type = transcribed RNA
aacccatggaattcagttctca

SEQ ID NO: 2882 - RNA, 22 nt, Homo sapiens
  source 1..22: mol_type = transcribed RNA
acagcaggcacagacaggcagt

SEQ ID NO: 2883 - RNA, 22 nt, Homo sapiens
  source 1..22: mol_type = transcribed RNA
actgcctgtctgtgcctgctgt

SEQ ID NO: 2884 - RNA, 22 nt, Homo sapiens
  source 1..22: mol_type = transcribed RNA
tgcctgtctacacttgctgtgc

SEQ ID NO: 2885 - RNA, 22 nt, Homo sapiens
  source 1..22: mol_type = transcribed RNA
gcacagcaagtgtagacaggca

SEQ ID NO: 2886 - RNA, 22 nt, Homo sapiens
  source 1..22: mol_type = transcribed RNA
tagcaccatctgaaatcggtta

SEQ ID NO: 2887 - RNA, 22 nt, Homo sapiens
  source 1..22: mol_type = transcribed RNA
taaccgatttcagatggtgcta

SEQ ID NO: 2888 - RNA, 22 nt, Homo sapiens
  source 1..22: mol_type = transcribed RNA
actgatttcttttggtgttcag

SEQ ID NO: 2889 - RNA, 22 nt, Homo sapiens
  source 1..22: mol_type = transcribed RNA
ctgaacaccaaaagaaatcagt

SEQ ID NO: 2890 - RNA, 24 nt, Homo sapiens
  source 1..24: mol_type = transcribed RNA
gctggtttcatatggtggtttaga

SEQ ID NO: 2891 - RNA, 24 nt, Homo sapiens
  source 1..24: mol_type = transcribed RNA
tctaaaccaccatatgaaaccagc

SEQ ID NO: 2892 - RNA, 22 nt, Homo sapiens
  source 1..22: mol_type = transcribed RNA
ctggtttcacatggtggcttag

SEQ ID NO: 2893 - RNA, 22 nt, Homo sapiens
  source 1..22: mol_type = transcribed RNA
ctaagccaccatgtgaaaccag

SEQ ID NO: 2894 - RNA, 23 nt, Homo sapiens
  source 1..23: mol_type = transcribed RNA
tagcaccatttgaaatcagtgtt

SEQ ID NO: 2895 - RNA, 23 nt, Homo sapiens
  source 1..23: mol_type = transcribed RNA
aacactgatttcaaatggtgcta

SEQ ID NO: 2896 - RNA, 22 nt, Homo sapiens
  source 1..22: mol_type = transcribed RNA
tagcaccatttgaaatcggtta

SEQ ID NO: 2897 - RNA, 22 nt, Homo sapiens
  source 1..22: mol_type = transcribed RNA
taaccgatttcaaatggtgcta

SEQ ID NO: 2898 - RNA, 22 nt, Homo sapiens
  source 1..22: mol_type = transcribed RNA
tgaccgatttctcctggtgttc

SEQ ID NO: 2899 - RNA, 22 nt, Homo sapiens
  source 1..22: mol_type = transcribed RNA
gaacaccaggagaaatcggtca

SEQ ID NO: 2900 - RNA, 23 nt, Homo sapiens
  source 1..23: mol_type = transcribed RNA
tgtcactcggctcggcccactac

SEQ ID NO: 2901 - RNA, 23 nt, Homo sapiens
  source 1..23: mol_type = transcribed RNA
gtagtgggccgagccgagtgaca

SEQ ID NO: 2902 - RNA, 22 nt, Homo sapiens
  source 1..22: mol_type = transcribed RNA
ctgccaattccataggtcacag

SEQ ID NO: 2903 - RNA, 22 nt, Homo sapiens
  source 1..22: mol_type = transcribed RNA
ctgtgacctatggaattggcag

SEQ ID NO: 2904 - RNA, 21 nt, Homo sapiens
  source 1..21: mol_type = transcribed RNA
ctgacctatgaattgacagcc

SEQ ID NO: 2905 - RNA, 21 nt, Homo sapiens
  source 1..21: mol_type = transcribed RNA
ggctgtcaattcataggtcag

SEQ ID NO: 2906 - RNA, 20 nt, Homo sapiens
  source 1..20: mol_type = transcribed RNA
actgccccaggtgctgctgg

SEQ ID NO: 2907 - RNA, 20 nt, Homo sapiens
  source 1..20: mol_type = transcribed RNA
ccagcagcacctggggcagt

SEQ ID NO: 2908 - RNA, 22 nt, Homo sapiens
  source 1..22: mol_type = transcribed RNA
aacgccattatcacactaaata

SEQ ID NO: 2909 - RNA, 22 nt, Homo sapiens
  source 1..22: mol_type = transcribed RNA
tatttagtgtgataatggcgtt

SEQ ID NO: 2910 - RNA, 22 nt, Homo sapiens
  source 1..22: mol_type = transcribed RNA
ctttcagtcggatgtttgcagc

SEQ ID NO: 2911 - RNA, 22 nt, Homo sapiens
  source 1..22: mol_type = transcribed RNA
gctgcaaacatccgactgaaag

SEQ ID NO: 2912 - RNA, 22 nt, Homo sapiens
  source 1..22: mol_type = transcribed RNA
aattgcacggtatccatctgta

SEQ ID NO: 2913 - RNA, 22 nt, Homo sapiens
  source 1..22: mol_type = transcribed RNA
tacagatggataccgtgcaatt

SEQ ID NO: 2914 - RNA, 22 nt, Homo sapiens
  source 1..22: mol_type = transcribed RNA
cgggtggatcacgatgcaattt

SEQ ID NO: 2915 - RNA, 22 nt, Homo sapiens
  source 1..22: mol_type = transcribed RNA
aaattgcatcgtgatccacccg

SEQ ID NO: 2916 - RNA, 22 nt, Homo sapiens
  source 1..22: mol_type = transcribed RNA
ctgggaggtggatgtttacttc

SEQ ID NO: 2917 - RNA, 22 nt, Homo sapiens
  source 1..22: mol_type = transcribed RNA
gaagtaaacatccacctcccag

SEQ ID NO: 2918 - RNA, 22 nt, Homo sapiens
  source 1..22: mol_type = transcribed RNA
tgtaaacatcctacactcagct

SEQ ID NO: 2919 - RNA, 22 nt, Homo sapiens
  source 1..22: mol_type = transcribed RNA
agctgagtgtaggatgtttaca

SEQ ID NO: 2920 - RNA, 22 nt, Homo sapiens
  source 1..22: mol_type = transcribed RNA
ctgggagagggttgtttactcc

SEQ ID NO: 2921 - RNA, 22 nt, Homo sapiens
  source 1..22: mol_type = transcribed RNA
ggagtaaacaaccctctcccag

SEQ ID NO: 2922 - RNA, 22 nt, Homo sapiens
  source 1..22: mol_type = transcribed RNA
ctgggagaaggctgtttactct

SEQ ID NO: 2923 - RNA, 22 nt, Homo sapiens
  source 1..22: mol_type = transcribed RNA
agagtaaacagccttctcccag

SEQ ID NO: 2924 - RNA, 23 nt, Homo sapiens
  source 1..23: mol_type = transcribed RNA
tgtaaacatcctacactctcagc

SEQ ID NO: 2925 - RNA, 23 nt, Homo sapiens
  source 1..23: mol_type = transcribed RNA
gctgagagtgtaggatgtttaca

SEQ ID NO: 2926 - RNA, 22 nt, Homo sapiens
  source 1..22: mol_type = transcribed RNA
tttttcattattgctcctgacc

SEQ ID NO: 2927 - RNA, 22 nt, Homo sapiens
  source 1..22: mol_type = transcribed RNA
ggtcaggagcaataatgaaaaa

SEQ ID NO: 2928 - RNA, 23 nt, Homo sapiens
  source 1..23: mol_type = transcribed RNA
tcaagagcaataacgaaaaatgt

SEQ ID NO: 2929 - RNA, 23 nt, Homo sapiens
  source 1..23: mol_type = transcribed RNA
acatttttcgttattgctcttga

SEQ ID NO: 2930 - RNA, 23 nt, Homo sapiens
  source 1..23: mol_type = transcribed RNA
caaagtgcttacagtgcaggtag

SEQ ID NO: 2931 - RNA, 23 nt, Homo sapiens
  source 1..23: mol_type = transcribed RNA
ctacctgcactgtaagcactttg

SEQ ID NO: 2932 - RNA, 22 nt, Homo sapiens
  source 1..22: mol_type = transcribed RNA
ggattcctggaaatactgttct

SEQ ID NO: 2933 - RNA, 22 nt, Homo sapiens
  source 1..22: mol_type = transcribed RNA
agaacagtatttccaggaatcc

SEQ ID NO: 2934 - RNA, 23 nt, Homo sapiens
  source 1..23: mol_type = transcribed RNA
gtccagttttcccaggaatccct

SEQ ID NO: 2935 - RNA, 23 nt, Homo sapiens
  source 1..23: mol_type = transcribed RNA
agggattcctgggaaaactggac

SEQ ID NO: 2936 - RNA, 22 nt, Homo sapiens
  source 1..22: mol_type = transcribed RNA
actgcattatgagcacttaaag

SEQ ID NO: 2937 - RNA, 22 nt, Homo sapiens
  source 1..22: mol_type = transcribed RNA
ctttaagtgctcataatgcagt

SEQ ID NO: 2938 - RNA, 23 nt, Homo sapiens
  source 1..23: mol_type = transcribed RNA
taaagtgcttatagtgcaggtag

SEQ ID NO: 2939 - RNA, 23 nt, Homo sapiens
  source 1..23: mol_type = transcribed RNA
ctacctgcactataagcacttta

SEQ ID NO: 2940 - RNA, 22 nt, Homo sapiens
  source 1..22: mol_type = transcribed RNA
gagggttgggtggaggctctcc

SEQ ID NO: 2941 - RNA, 22 nt, Homo sapiens
  source 1..22: mol_type = transcribed RNA
ggagagcctccacccaaccctc

SEQ ID NO: 2942 - RNA, 22 nt, Homo sapiens
  source 1..22: mol_type = transcribed RNA
ctgtgcgtgtgacagcggctga

SEQ ID NO: 2943 - RNA, 22 nt, Homo sapiens
  source 1..22: mol_type = transcribed RNA
tcagccgctgtcacacgcacag

SEQ ID NO: 2944 - RNA, 22 nt, Homo sapiens
  source 1..22: mol_type = transcribed RNA
ccagtggggctgctgttatctg

SEQ ID NO: 2945 - RNA, 22 nt, Homo sapiens
  source 1..22: mol_type = transcribed RNA
cagataacagcagccccactgg

SEQ ID NO: 2946 - RNA, 22 nt, Homo sapiens
  source 1..22: mol_type = transcribed RNA
tgtaacagcaactccatgtgga

SEQ ID NO: 2947 - RNA, 22 nt, Homo sapiens
  source 1..22: mol_type = transcribed RNA
tccacatggagttgctgttaca

SEQ ID NO: 2948 - RNA, 22 nt, Homo sapiens
  source 1..22: mol_type = transcribed RNA
tcacagtggtctctgggattat

SEQ ID NO: 2949 - RNA, 22 nt, Homo sapiens
  source 1..22: mol_type = transcribed RNA
ataatcccagagaccactgtga

SEQ ID NO: 2950 - RNA, 22 nt, Homo sapiens
  source 1..22: mol_type = transcribed RNA
taatctcagctggcaactgtga

SEQ ID NO: 2951 - RNA, 22 nt, Homo sapiens
  source 1..22: mol_type = transcribed RNA
tcacagttgccagctgagatta

SEQ ID NO: 2952 - RNA, 22 nt, Homo sapiens
  source 1..22: mol_type = transcribed RNA
cagtgcctcggcagtgcagccc

SEQ ID NO: 2953 - RNA, 22 nt, Homo sapiens
  source 1..22: mol_type = transcribed RNA
gggctgcactgccgaggcactg

SEQ ID NO: 2954 - RNA, 20 nt, Homo sapiens
  source 1..20: mol_type = transcribed RNA
gtgcattgctgttgcattgc

SEQ ID NO: 2955 - RNA, 20 nt, Homo sapiens
  source 1..20: mol_type = transcribed RNA
gcaatgcaacagcaatgcac

SEQ ID NO: 2956 - RNA, 19 nt, Homo sapiens
  source 1..19: mol_type = transcribed RNA
actggacttggaggcagaa

SEQ ID NO: 2957 - RNA, 19 nt, Homo sapiens
  source 1..19: mol_type = transcribed RNA
ttctgcctccaagtccagt

SEQ ID NO: 2958 - RNA, 25 nt, Homo sapiens
  source 1..25: mol_type = transcribed RNA
actggacttggagtcagaagagtgg

SEQ ID NO: 2959 - RNA, 25 nt, Homo sapiens
  source 1..25: mol_type = transcribed RNA
ccactcttctgactccaagtccagt

SEQ ID NO: 2960 - RNA, 20 nt, Homo sapiens
  source 1..20: mol_type = transcribed RNA
actggacttggagtcagaaa

SEQ ID NO: 2961 - RNA, 20 nt, Homo sapiens
  source 1..20: mol_type = transcribed RNA
tttctgactccaagtccagt

SEQ ID NO: 2962 - RNA, 19 nt, Homo sapiens
  source 1..19: mol_type = transcribed RNA
actggacttggagtcagga

SEQ ID NO: 2963 - RNA, 19 nt, Homo sapiens
  source 1..19: mol_type = transcribed RNA
tcctgactccaagtccagt

SEQ ID NO: 2964 - RNA, 20 nt, Homo sapiens
  source 1..20: mol_type = transcribed RNA
actggacttggagccagaag

SEQ ID NO: 2965 - RNA, 20 nt, Homo sapiens
  source 1..20: mol_type = transcribed RNA
cttctggctccaagtccagt

SEQ ID NO: 2966 - RNA, 20 nt, Homo sapiens
  source 1..20: mol_type = transcribed RNA
actgggcttggagtcagaag

SEQ ID NO: 2967 - RNA, 20 nt, Homo sapiens
  source 1..20: mol_type = transcribed RNA
cttctgactccaagcccagt

SEQ ID NO: 2968 - RNA, 21 nt, Homo sapiens
  source 1..21: mol_type = transcribed RNA
actggacttggtgtcagatgg

SEQ ID NO: 2969 - RNA, 21 nt, Homo sapiens
  source 1..21: mol_type = transcribed RNA
ccatctgacaccaagtccagt

SEQ ID NO: 2970 - RNA, 21 nt, Homo sapiens
  source 1..21: mol_type = transcribed RNA
actggactaggagtcagaagg

SEQ ID NO: 2971 - RNA, 21 nt, Homo sapiens
  source 1..21: mol_type = transcribed RNA
ccttctgactcctagtccagt

SEQ ID NO: 2972 - RNA, 19 nt, Homo sapiens
  source 1..19: mol_type = transcribed RNA
actggatttggagccagaa

SEQ ID NO: 2973 - RNA, 19 nt, Homo sapiens
  source 1..19: mol_type = transcribed RNA
ttctggctccaaatccagt

SEQ ID NO: 2974 - RNA, 20 nt, Homo sapiens
  source 1..20: mol_type = transcribed RNA
aggaatgttccttctttgcc

SEQ ID NO: 2975 - RNA, 20 nt, Homo sapiens
  source 1..20: mol_type = transcribed RNA
ggcaaagaaggaacattcct

SEQ ID NO: 2976 - RNA, 21 nt, Homo sapiens
  source 1..21: mol_type = transcribed RNA
tcagtgcatgacagaacttgg

SEQ ID NO: 2977 - RNA, 21 nt, Homo sapiens
  source 1..21: mol_type = transcribed RNA
ccaagttctgtcatgcactga

SEQ ID NO: 2978 - RNA, 20 nt, Homo sapiens
  source 1..20: mol_type = transcribed RNA
tcacacctgcctcgcccccc

SEQ ID NO: 2979 - RNA, 20 nt, Homo sapiens
  source 1..20: mol_type = transcribed RNA
ggggggcgaggcaggtgtga

SEQ ID NO: 2980 - RNA, 21 nt, Homo sapiens
  source 1..21: mol_type = transcribed RNA
gtgggcgggggcaggtgtgtg

SEQ ID NO: 2981 - RNA, 21 nt, Homo sapiens
  source 1..21: mol_type = transcribed RNA
cacacacctgcccccgcccac

SEQ ID NO: 2982 - RNA, 22 nt, Homo sapiens
  source 1..22: mol_type = transcribed RNA
acgcccttcccccccttcttca

SEQ ID NO: 2983 - RNA, 22 nt, Homo sapiens
  source 1..22: mol_type = transcribed RNA
tgaagaagggggggaagggcgt

SEQ ID NO: 2984 - RNA, 22 nt, Homo sapiens
  source 1..22: mol_type = transcribed RNA
ttgcatatgtaggatgtcccat

SEQ ID NO: 2985 - RNA, 22 nt, Homo sapiens
  source 1..22: mol_type = transcribed RNA
atgggacatcctacatatgcaa

SEQ ID NO: 2986 - RNA, 23 nt, Homo sapiens
  source 1..23: mol_type = transcribed RNA
gtttgcacgggtgggccttgtct

SEQ ID NO: 2987 - RNA, 23 nt, Homo sapiens
  source 1..23: mol_type = transcribed RNA
agacaaggcccacccgtgcaaac

SEQ ID NO: 2988 - RNA, 22 nt, Homo sapiens
  source 1..22: mol_type = transcribed RNA
gactatagaactttccccctca

SEQ ID NO: 2989 - RNA, 22 nt, Homo sapiens
  source 1..22: mol_type = transcribed RNA
tgagggggaaagttctatagtc

SEQ ID NO: 2990 - RNA, 21 nt, Homo sapiens
  source 1..21: mol_type = transcribed RNA
agggggaaagttctatagtcc

SEQ ID NO: 2991 - RNA, 21 nt, Homo sapiens
  source 1..21: mol_type = transcribed RNA
ggactatagaactttccccct

SEQ ID NO: 2992 - RNA, 21 nt, Homo sapiens
  source 1..21: mol_type = transcribed RNA
ctttttgcggtctgggcttgc

SEQ ID NO: 2993 - RNA, 21 nt, Homo sapiens
  source 1..21: mol_type = transcribed RNA
gcaagcccagaccgcaaaaag

SEQ ID NO: 2994 - RNA, 21 nt, Homo sapiens
  source 1..21: mol_type = transcribed RNA
tcttgtgttctctagatcagt

SEQ ID NO: 2995 - RNA, 21 nt, Homo sapiens
  source 1..21: mol_type = transcribed RNA
actgatctagagaacacaaga

SEQ ID NO: 2996 - RNA, 23 nt, Homo sapiens
  source 1..23: mol_type = transcribed RNA
cccagtgttcagactacctgttc

SEQ ID NO: 2997 - RNA, 23 nt, Homo sapiens
  source 1..23: mol_type = transcribed RNA
gaacaggtagtctgaacactggg

SEQ ID NO: 2998 - RNA, 22 nt, Homo sapiens
  source 1..22: mol_type = transcribed RNA
acagtagtctgcacattggtta

SEQ ID NO: 2999 - RNA, 22 nt, Homo sapiens
  source 1..22: mol_type = transcribed RNA
taaccaatgtgcagactactgt

SEQ ID NO: 3000 - RNA, 22 nt, Homo sapiens
  source 1..22: mol_type = transcribed RNA
acagtagtctgcacattggtta

SEQ ID NO: 3001 - RNA, 22 nt, Homo sapiens
  source 1..22: mol_type = transcribed RNA
taaccaatgtgcagactactgt

SEQ ID NO: 3002 - RNA, 23 nt, Homo sapiens
  source 1..23: mol_type = transcribed RNA
cccagtgtttagactatctgttc

SEQ ID NO: 3003 - RNA, 23 nt, Homo sapiens
  source 1..23: mol_type = transcribed RNA
gaacagatagtctaaacactggg

SEQ ID NO: 3004 - RNA, 22 nt, Homo sapiens
  source 1..22: mol_type = transcribed RNA
tggagtgtgacaatggtgtttg

SEQ ID NO: 3005 - RNA, 22 nt, Homo sapiens
  source 1..22: mol_type = transcribed RNA
caaacaccattgtcacactcca

SEQ ID NO: 3006 - RNA, 22 nt, Homo sapiens
  source 1..22: mol_type = transcribed RNA
tgccctaaatgccccttctggc

SEQ ID NO: 3007 - RNA, 22 nt, Homo sapiens
  source 1..22: mol_type = transcribed RNA
gccagaaggggcatttagggca

SEQ ID NO: 3008 - RNA, 23 nt, Homo sapiens
  source 1..23: mol_type = transcribed RNA
taaggtgcatctagtgcagttag

SEQ ID NO: 3009 - RNA, 23 nt, Homo sapiens
  source 1..23: mol_type = transcribed RNA
ctaactgcactagatgcacctta

SEQ ID NO: 3010 - RNA, 22 nt, Homo sapiens
  source 1..22: mol_type = transcribed RNA
ctcctatatgatgcctttcttc

SEQ ID NO: 3011 - RNA, 22 nt, Homo sapiens
  source 1..22: mol_type = transcribed RNA
gaagaaaggcatcatataggag

SEQ ID NO: 3012 - RNA, 21 nt, Homo sapiens
  source 1..21: mol_type = transcribed RNA
gaacggcttcatacaggagtt

SEQ ID NO: 3013 - RNA, 21 nt, Homo sapiens
  source 1..21: mol_type = transcribed RNA
aactcctgtatgaagccgttc

SEQ ID NO: 3014 - RNA, 22 nt, Homo sapiens
  source 1..22: mol_type = transcribed RNA
tgtgactggttgaccagagggg

SEQ ID NO: 3015 - RNA, 22 nt, Homo sapiens
  source 1..22: mol_type = transcribed RNA
cccctctggtcaaccagtcaca

SEQ ID NO: 3016 - RNA, 23 nt, Homo sapiens
  source 1..23: mol_type = transcribed RNA
actgccctaagtgctccttctgg

SEQ ID NO: 3017 - RNA, 23 nt, Homo sapiens
  source 1..23: mol_type = transcribed RNA
ccagaaggagcacttagggcagt

SEQ ID NO: 3018 - RNA, 23 nt, Homo sapiens
  source 1..23: mol_type = transcribed RNA
taaggtgcatctagtgcagatag

SEQ ID NO: 3019 - RNA, 23 nt, Homo sapiens
  source 1..23: mol_type = transcribed RNA
ctatctgcactagatgcacctta

SEQ ID NO: 3020 - RNA, 22 nt, Homo sapiens
  source 1..22: mol_type = transcribed RNA
cagtgcaatgatgaaagggcat

SEQ ID NO: 3021 - RNA, 22 nt, Homo sapiens
  source 1..22: mol_type = transcribed RNA
atgccctttcatcattgcactg

SEQ ID NO: 3022 - RNA, 21 nt, Homo sapiens
  source 1..21: mol_type = transcribed RNA
actctttccctgttgcactac

SEQ ID NO: 3023 - RNA, 21 nt, Homo sapiens
  source 1..21: mol_type = transcribed RNA
gtagtgcaacagggaaagagt

SEQ ID NO: 3024 - RNA, 24 nt, Homo sapiens
  source 1..24: mol_type = transcribed RNA
tttggcaatggtagaactcacact

SEQ ID NO: 3025 - RNA, 24 nt, Homo sapiens
  source 1..24: mol_type = transcribed RNA
agtgtgagttctaccattgccaaa

SEQ ID NO: 3026 - RNA, 21 nt, Homo sapiens
  source 1..21: mol_type = transcribed RNA
agggccccccctcaatcctgt

SEQ ID NO: 3027 - RNA, 21 nt, Homo sapiens
  source 1..21: mol_type = transcribed RNA
acaggattgagggggggccct

SEQ ID NO: 3028 - RNA, 22 nt, Homo sapiens
  source 1..22: mol_type = transcribed RNA
cagtgcaatgttaaaagggcat

SEQ ID NO: 3029 - RNA, 22 nt, Homo sapiens
  source 1..22: mol_type = transcribed RNA
atgcccttttaacattgcactg

SEQ ID NO: 3030 - RNA, 22 nt, Homo sapiens
  source 1..22: mol_type = transcribed RNA
ttcacattgtgctactgtctgc

SEQ ID NO: 3031 - RNA, 22 nt, Homo sapiens
  source 1..22: mol_type = transcribed RNA
gcagacagtagcacaatgtgaa

SEQ ID NO: 3032 - RNA, 22 nt, Homo sapiens
  source 1..22: mol_type = transcribed RNA
tcggatccgtctgagcttggct

SEQ ID NO: 3033 - RNA, 22 nt, Homo sapiens
  source 1..22: mol_type = transcribed RNA
agccaagctcagacggatccga

SEQ ID NO: 3034 - RNA, 22 nt, Homo sapiens
  source 1..22: mol_type = transcribed RNA
ctgaagctcagagggctctgat

SEQ ID NO: 3035 - RNA, 22 nt, Homo sapiens
  source 1..22: mol_type = transcribed RNA
atcagagccctctgagcttcag

SEQ ID NO: 3036 - RNA, 22 nt, Homo sapiens
  source 1..22: mol_type = transcribed RNA
cctcttccccttgtctctccag

SEQ ID NO: 3037 - RNA, 22 nt, Homo sapiens
  source 1..22: mol_type = transcribed RNA
ctggagagacaaggggaagagg

SEQ ID NO: 3038 - RNA, 22 nt, Homo sapiens
  source 1..22: mol_type = transcribed RNA
tgagtgacaggggaaatgggga

SEQ ID NO: 3039 - RNA, 22 nt, Homo sapiens
  source 1..22: mol_type = transcribed RNA
tccccatttcccctgtcactca

SEQ ID NO: 3040 - RNA, 22 nt, Homo sapiens
  source 1..22: mol_type = transcribed RNA
tcaggacacttctgaacttgga

SEQ ID NO: 3041 - RNA, 22 nt, Homo sapiens
  source 1..22: mol_type = transcribed RNA
tccaagttcagaagtgtcctga

SEQ ID NO: 3042 - RNA, 22 nt, Homo sapiens
  source 1..22: mol_type = transcribed RNA
cagttcagaagtgttcctgagt

SEQ ID NO: 3043 - RNA, 22 nt, Homo sapiens
  source 1..22: mol_type = transcribed RNA
actcaggaacacttctgaactg

SEQ ID NO: 3044 - RNA, 21 nt, Homo sapiens
  source 1..21: mol_type = transcribed RNA
tttccctttccatcctggcag

SEQ ID NO: 3045 - RNA, 21 nt, Homo sapiens
  source 1..21: mol_type = transcribed RNA
ctgccaggatggaaagggaaa

SEQ ID NO: 3046 - RNA, 21 nt, Homo sapiens
  source 1..21: mol_type = transcribed RNA
ttgccagggcaggaggtggaa

SEQ ID NO: 3047 - RNA, 21 nt, Homo sapiens
  source 1..21: mol_type = transcribed RNA
ttccacctcctgccctggcaa

SEQ ID NO: 3048 - RNA, 21 nt, Homo sapiens
  source 1..21: mol_type = transcribed RNA
agagattggtagaaatcaggt

SEQ ID NO: 3049 - RNA, 21 nt, Homo sapiens
  source 1..21: mol_type = transcribed RNA
acctgatttctaccaatctct

SEQ ID NO: 3050 - RNA, 23 nt, Homo sapiens
  source 1..23: mol_type = transcribed RNA
aatcggacccatttaaaccggag

SEQ ID NO: 3051 - RNA, 23 nt, Homo sapiens
  source 1..23: mol_type = transcribed RNA
ctccggtttaaatgggtccgatt

SEQ ID NO: 3052 - RNA, 24 nt, Homo sapiens
  source 1..24: mol_type = transcribed RNA
tctgggcacaggcggatggacagg

SEQ ID NO: 3053 - RNA, 24 nt, Homo sapiens
  source 1..24: mol_type = transcribed RNA
cctgtccatccgcctgtgcccaga

SEQ ID NO: 3054 - RNA, 21 nt, Homo sapiens
  source 1..21: mol_type = transcribed RNA
ccagtgactgagctggagcca

SEQ ID NO: 3055 - RNA, 21 nt, Homo sapiens
  source 1..21: mol_type = transcribed RNA
tggctccagctcagtcactgg

SEQ ID NO: 3056 - RNA, 22 nt, Homo sapiens
  source 1..22: mol_type = transcribed RNA
aggataggaagaatgaagtgct

SEQ ID NO: 3057 - RNA, 22 nt, Homo sapiens
  source 1..22: mol_type = transcribed RNA
agcacttcattcttcctatcct

SEQ ID NO: 3058 - RNA, 22 nt, Homo sapiens
  source 1..22: mol_type = transcribed RNA
aggagagtggattccaggtggt

SEQ ID NO: 3059 - RNA, 22 nt, Homo sapiens
  source 1..22: mol_type = transcribed RNA
accacctggaatccactctcct

SEQ ID NO: 3060 - RNA, 22 nt, Homo sapiens
  source 1..22: mol_type = transcribed RNA
tcctcctctacctcatcccagt

SEQ ID NO: 3061 - RNA, 22 nt, Homo sapiens
  source 1..22: mol_type = transcribed RNA
actgggatgaggtagaggagga

SEQ ID NO: 3062 - RNA, 22 nt, Homo sapiens
  source 1..22: mol_type = transcribed RNA
tgaggggtttggaatgggatgg

SEQ ID NO: 3063 - RNA, 22 nt, Homo sapiens
  source 1..22: mol_type = transcribed RNA
ccatcccattccaaacccctca

SEQ ID NO: 3064 - RNA, 21 nt, Homo sapiens
  source 1..21: mol_type = transcribed RNA
atccagttctctgagggggct

SEQ ID NO: 3065 - RNA, 21 nt, Homo sapiens
  source 1..21: mol_type = transcribed RNA
agccccctcagagaactggat

SEQ ID NO: 3066 - RNA, 22 nt, Homo sapiens
  source 1..22: mol_type = transcribed RNA
aacccctaaggcaactggatgg

SEQ ID NO: 3067 - RNA, 22 nt, Homo sapiens
  source 1..22: mol_type = transcribed RNA
ccatccagttgccttaggggtt

SEQ ID NO: 3068 - RNA, 21 nt, Homo sapiens
  source 1..21: mol_type = transcribed RNA
tcatcctcgtctccctcccag

SEQ ID NO: 3069 - RNA, 21 nt, Homo sapiens
  source 1..21: mol_type = transcribed RNA
ctgggagggagacgaggatga

SEQ ID NO: 3070 - RNA, 22 nt, Homo sapiens
  source 1..22: mol_type = transcribed RNA
agggaaggggacgagggttggg

SEQ ID NO: 3071 - RNA, 22 nt, Homo sapiens
  source 1..22: mol_type = transcribed RNA
cccaaccctcgtccccttccct

SEQ ID NO: 3072 - RNA, 23 nt, Homo sapiens
  source 1..23: mol_type = transcribed RNA
aagaagagactgagtcatcgaat

SEQ ID NO: 3073 - RNA, 23 nt, Homo sapiens
  source 1..23: mol_type = transcribed RNA
attcgatgactcagtctcttctt

SEQ ID NO: 3074 - RNA, 23 nt, Homo sapiens
  source 1..23: mol_type = transcribed RNA
caatggcacaaactcattcttga

SEQ ID NO: 3075 - RNA, 23 nt, Homo sapiens
  source 1..23: mol_type = transcribed RNA
tcaagaatgagtttgtgccattg

SEQ ID NO: 3076 - RNA, 21 nt, Homo sapiens
  source 1..21: mol_type = transcribed RNA
actgaatcctcttttcctcag

SEQ ID NO: 3077 - RNA, 21 nt, Homo sapiens
  source 1..21: mol_type = transcribed RNA
ctgaggaaaagaggattcagt

SEQ ID NO: 3078 - RNA, 22 nt, Homo sapiens
  source 1..22: mol_type = transcribed RNA
tgggatgagggattgaagtgga

SEQ ID NO: 3079 - RNA, 22 nt, Homo sapiens
  source 1..22: mol_type = transcribed RNA
tccacttcaatccctcatccca

SEQ ID NO: 3080 - RNA, 22 nt, Homo sapiens
  source 1..22: mol_type = transcribed RNA
caggccatattgtgctgcctca

SEQ ID NO: 3081 - RNA, 22 nt, Homo sapiens
  source 1..22: mol_type = transcribed RNA
tgaggcagcacaatatggcctg

SEQ ID NO: 3082 - RNA, 22 nt, Homo sapiens
  source 1..22: mol_type = transcribed RNA
tagcagcacataatggtttgtg

SEQ ID NO: 3083 - RNA, 22 nt, Homo sapiens
  source 1..22: mol_type = transcribed RNA
cacaaaccattatgtgctgcta

SEQ ID NO: 3084 - RNA, 22 nt, Homo sapiens
  source 1..22: mol_type = transcribed RNA
cgaatcattatttgctgctcta

SEQ ID NO: 3085 - RNA, 22 nt, Homo sapiens
  source 1..22: mol_type = transcribed RNA
tagagcagcaaataatgattcg

SEQ ID NO: 3086 - RNA, 22 nt, Homo sapiens
  source 1..22: mol_type = transcribed RNA
tagcagcacatcatggtttaca

SEQ ID NO: 3087 - RNA, 22 nt, Homo sapiens
  source 1..22: mol_type = transcribed RNA
tgtaaaccatgatgtgctgcta

SEQ ID NO: 3088 - RNA, 22 nt, Homo sapiens
  source 1..22: mol_type = transcribed RNA
ccaatattactgtgctgcttta

SEQ ID NO: 3089 - RNA, 22 nt, Homo sapiens
  source 1..22: mol_type = transcribed RNA
taaagcagcacagtaatattgg

SEQ ID NO: 3090 - RNA, 22 nt, Homo sapiens
  source 1..22: mol_type = transcribed RNA
ctaggtatggtcccagggatcc

SEQ ID NO: 3091 - RNA, 22 nt, Homo sapiens
  source 1..22: mol_type = transcribed RNA
ggatccctgggaccatacctag

SEQ ID NO: 3092 - RNA, 20 nt, Homo sapiens
  source 1..20: mol_type = transcribed RNA
gtgtgtggaaatgcttctgc

SEQ ID NO: 3093 - RNA, 20 nt, Homo sapiens
  source 1..20: mol_type = transcribed RNA
gcagaagcatttccacacac

SEQ ID NO: 3094 - RNA, 22 nt, Homo sapiens
  source 1..22: mol_type = transcribed RNA
gtgtgcggaaatgcttctgcta

SEQ ID NO: 3095 - RNA, 22 nt, Homo sapiens
  source 1..22: mol_type = transcribed RNA
tagcagaagcatttccgcacac

SEQ ID NO: 3096 - RNA, 23 nt, Homo sapiens
  source 1..23: mol_type = transcribed RNA
agcagcattgtacagggctatca

SEQ ID NO: 3097 - RNA, 23 nt, Homo sapiens
  source 1..23: mol_type = transcribed RNA
tgatagccctgtacaatgctgct

SEQ ID NO: 3098 - RNA, 22 nt, Homo sapiens
  source 1..22: mol_type = transcribed RNA
aactggccctcaaagtcccgct

SEQ ID NO: 3099 - RNA, 22 nt, Homo sapiens
  source 1..22: mol_type = transcribed RNA
agcgggactttgagggccagtt

SEQ ID NO: 3100 - RNA, 22 nt, Homo sapiens
  source 1..22: mol_type = transcribed RNA
cggggttttgagggcgagatga

SEQ ID NO: 3101 - RNA, 22 nt, Homo sapiens
  source 1..22: mol_type = transcribed RNA
tcatctcgccctcaaaaccccg

SEQ ID NO: 3102 - RNA, 21 nt, Homo sapiens
  source 1..21: mol_type = transcribed RNA
gcagggacagcaaaggggtgc

SEQ ID NO: 3103 - RNA, 21 nt, Homo sapiens
  source 1..21: mol_type = transcribed RNA
gcacccctttgctgtccctgc

SEQ ID NO: 3104 - RNA, 22 nt, Homo sapiens
  source 1..22: mol_type = transcribed RNA
ttccctttgtcatccttcgcct

SEQ ID NO: 3105 - RNA, 22 nt, Homo sapiens
  source 1..22: mol_type = transcribed RNA
aggcgaaggatgacaaagggaa

SEQ ID NO: 3106 - RNA, 23 nt, Homo sapiens
  source 1..23: mol_type = transcribed RNA
atggccaaaactgcagttatttt

SEQ ID NO: 3107 - RNA, 23 nt, Homo sapiens
  source 1..23: mol_type = transcribed RNA
aaaataactgcagttttggccat

SEQ ID NO: 3108 - RNA, 25 nt, Homo sapiens
  source 1..25: mol_type = transcribed RNA
aaaaaccacaattacttttgcacca

SEQ ID NO: 3109 - RNA, 25 nt, Homo sapiens
  source 1..25: mol_type = transcribed RNA
tggtgcaaaagtaattgtggttttt

SEQ ID NO: 3110 - RNA, 21 nt, Homo sapiens
  source 1..21: mol_type = transcribed RNA
caaaagtgatcgtggtttttg

SEQ ID NO: 3111 - RNA, 21 nt, Homo sapiens
  source 1..21: mol_type = transcribed RNA
caaaaaccacgatcacttttg

SEQ ID NO: 3112 - RNA, 23 nt, Homo sapiens
  source 1..23: mol_type = transcribed RNA
caaagactgcaattacttttgcg

SEQ ID NO: 3113 - RNA, 23 nt, Homo sapiens
  source 1..23: mol_type = transcribed RNA
cgcaaaagtaattgcagtctttg

SEQ ID NO: 3114 - RNA, 23 nt, Homo sapiens
  source 1..23: mol_type = transcribed RNA
aaaagtaactgcggtttttgcct

SEQ ID NO: 3115 - RNA, 23 nt, Homo sapiens
  source 1..23: mol_type = transcribed RNA
aggcaaaaaccgcagttactttt

SEQ ID NO: 3116 - RNA, 22 nt, Homo sapiens
  source 1..22: mol_type = transcribed RNA
tgcctggaacatagtagggact

SEQ ID NO: 3117 - RNA, 22 nt, Homo sapiens
  source 1..22: mol_type = transcribed RNA
agtccctactatgttccaggca

SEQ ID NO: 3118 - RNA, 21 nt, Homo sapiens
  source 1..21: mol_type = transcribed RNA
ataggactcatatagtgccag

SEQ ID NO: 3119 - RNA, 21 nt, Homo sapiens
  source 1..21: mol_type = transcribed RNA
ctggcactatatgagtcctat

SEQ ID NO: 3120 - RNA, 20 nt, Homo sapiens
  source 1..20: mol_type = transcribed RNA
agacactatacgagtcatat

SEQ ID NO: 3121 - RNA, 20 nt, Homo sapiens
  source 1..20: mol_type = transcribed RNA
atatgactcgtatagtgtct

SEQ ID NO: 3122 - RNA, 23 nt, Homo sapiens
  source 1..23: mol_type = transcribed RNA
tgtgactgcattatgaaaattct

SEQ ID NO: 3123 - RNA, 23 nt, Homo sapiens
  source 1..23: mol_type = transcribed RNA
agaattttcataatgcagtcaca

SEQ ID NO: 3124 - RNA, 20 nt, Homo sapiens
  source 1..20: mol_type = transcribed RNA
tggcttttaactttgatggc

SEQ ID NO: 3125 - RNA, 20 nt, Homo sapiens
  source 1..20: mol_type = transcribed RNA
gccatcaaagttaaaagcca

SEQ ID NO: 3126 - RNA, 21 nt, Homo sapiens
  source 1..21: mol_type = transcribed RNA
cacagcaagtgtagacaggca

SEQ ID NO: 3127 - RNA, 21 nt, Homo sapiens
  source 1..21: mol_type = transcribed RNA
tgcctgtctacacttgctgtg

SEQ ID NO: 3128 - RNA, 21 nt, Homo sapiens
  source 1..21: mol_type = transcribed RNA
cctgtctgtgcctgctgtaca

SEQ ID NO: 3129 - RNA, 21 nt, Homo sapiens
  source 1..21: mol_type = transcribed RNA
tgtacagcaggcacagacagg

SEQ ID NO: 3130 - RNA, 22 nt, Homo sapiens
  source 1..22: mol_type = transcribed RNA
taaatagagtaggcaaaggaca

SEQ ID NO: 3131 - RNA, 22 nt, Homo sapiens
  source 1..22: mol_type = transcribed RNA
tgtcctttgcctactctattta

SEQ ID NO: 3132 - RNA, 22 nt, Homo sapiens
  source 1..22: mol_type = transcribed RNA
tcctttgcctattctatttaag

SEQ ID NO: 3133 - RNA, 22 nt, Homo sapiens
  source 1..22: mol_type = transcribed RNA
cttaaatagaataggcaaagga

SEQ ID NO: 3134 - RNA, 22 nt, Homo sapiens
  source 1..22: mol_type = transcribed RNA
gttgggacaagaggacggtctt

SEQ ID NO: 3135 - RNA, 22 nt, Homo sapiens
  source 1..22: mol_type = transcribed RNA
aagaccgtcctcttgtcccaac

SEQ ID NO: 3136 - RNA, 17 nt, Homo sapiens
  source 1..17: mol_type = transcribed RNA
cagagaattgtttaatc

SEQ ID NO: 3137 - RNA, 17 nt, Homo sapiens
  source 1..17: mol_type = transcribed RNA
gattaaacaattctctg

SEQ ID NO: 3138 - RNA, 20 nt, Homo sapiens
  source 1..20: mol_type = transcribed RNA
tagaggaagctgtggagaga

SEQ ID NO: 3139 - RNA, 20 nt, Homo sapiens
  source 1..20: mol_type = transcribed RNA
tctctccacagcttcctcta

SEQ ID NO: 3140 - RNA, 22 nt, Homo sapiens
  source 1..22: mol_type = transcribed RNA
tccccttctgcaggcctgctgg

SEQ ID NO: 3141 - RNA, 22 nt, Homo sapiens
  source 1..22: mol_type = transcribed RNA
ccagcaggcctgcagaagggga

SEQ ID NO: 3142 - RNA, 23 nt, Homo sapiens
  source 1..23: mol_type = transcribed RNA
atcagggcttgtggaatgggaag

SEQ ID NO: 3143 - RNA, 23 nt, Homo sapiens
  source 1..23: mol_type = transcribed RNA
cttcccattccacaagccctgat

SEQ ID NO: 3144 - RNA, 23 nt, Homo sapiens
  source 1..23: mol_type = transcribed RNA
tctggcaagtaaaaaactctcat

SEQ ID NO: 3145 - RNA, 23 nt, Homo sapiens
  source 1..23: mol_type = transcribed RNA
atgagagttttttacttgccaga

SEQ ID NO: 3146 - RNA, 23 nt, Homo sapiens
  source 1..23: mol_type = transcribed RNA
tcgaggactggtggaagggcctt

SEQ ID NO: 3147 - RNA, 23 nt, Homo sapiens
  source 1..23: mol_type = transcribed RNA
aaggcccttccaccagtcctcga

SEQ ID NO: 3148 - RNA, 24 nt, Homo sapiens
  source 1..24: mol_type = transcribed RNA
tgggtagagaaggagctcagagga

SEQ ID NO: 3149 - RNA, 24 nt, Homo sapiens
  source 1..24: mol_type = transcribed RNA
tcctctgagctccttctctaccca

SEQ ID NO: 3150 - RNA, 22 nt, Homo sapiens
  source 1..22: mol_type = transcribed RNA
taaagaactcttaaaacccaat

SEQ ID NO: 3151 - RNA, 22 nt, Homo sapiens
  source 1..22: mol_type = transcribed RNA
attgggttttaagagttcttta

SEQ ID NO: 3152 - RNA, 23 nt, Homo sapiens
  source 1..23: mol_type = transcribed RNA
tgatggataaaagactacatatt

SEQ ID NO: 3153 - RNA, 23 nt, Homo sapiens
  source 1..23: mol_type = transcribed RNA
aatatgtagtcttttatccatca

SEQ ID NO: 3154 - RNA, 22 nt, Homo sapiens
  source 1..22: mol_type = transcribed RNA
tgcctaggctgagactgcagtg

SEQ ID NO: 3155 - RNA, 22 nt, Homo sapiens
  source 1..22: mol_type = transcribed RNA
cactgcagtctcagcctaggca

SEQ ID NO: 3156 - RNA, 22 nt, Homo sapiens
  source 1..22: mol_type = transcribed RNA
tggcccaacctattcagttagt

SEQ ID NO: 3157 - RNA, 22 nt, Homo sapiens
  source 1..22: mol_type = transcribed RNA
actaactgaataggttgggcca

SEQ ID NO: 3158 - RNA, 23 nt, Homo sapiens
  source 1..23: mol_type = transcribed RNA
ctgactgaataggtagggtcatt

SEQ ID NO: 3159 - RNA, 23 nt, Homo sapiens
  source 1..23: mol_type = transcribed RNA
aatgaccctacctattcagtcag

SEQ ID NO: 3160 - RNA, 24 nt, Homo sapiens
  source 1..24: mol_type = transcribed RNA
tctgtagcctgggagcaatggggt

SEQ ID NO: 3161 - RNA, 24 nt, Homo sapiens
  source 1..24: mol_type = transcribed RNA
accccattgctcccaggctacaga

SEQ ID NO: 3162 - RNA, 23 nt, Homo sapiens
  source 1..23: mol_type = transcribed RNA
taggagctcaacagatgcctgtt

SEQ ID NO: 3163 - RNA, 23 nt, Homo sapiens
  source 1..23: mol_type = transcribed RNA
aacaggcatctgttgagctccta

SEQ ID NO: 3164 - RNA, 19 nt, Homo sapiens
  source 1..19: mol_type = transcribed RNA
gagggcgggtggaggagga

SEQ ID NO: 3165 - RNA, 19 nt, Homo sapiens
  source 1..19: mol_type = transcribed RNA
tcctcctccacccgccctc

SEQ ID NO: 3166 - RNA, 25 nt, Homo sapiens
  source 1..25: mol_type = transcribed RNA
ataacattgtaaagcgcttctttcg

SEQ ID NO: 3167 - RNA, 25 nt, Homo sapiens
  source 1..25: mol_type = transcribed RNA
cgaaagaagcgctttacaatgttat

SEQ ID NO: 3168 - RNA, 24 nt, Homo sapiens
  source 1..24: mol_type = transcribed RNA
agatattttgagtgtttggaattg

SEQ ID NO: 3169 - RNA, 24 nt, Homo sapiens
  source 1..24: mol_type = transcribed RNA
caattccaaacactcaaaatatct

SEQ ID NO: 3170 - RNA, 22 nt, Homo sapiens
  source 1..22: mol_type = transcribed RNA
aactccaaacactcaaaactca

SEQ ID NO: 3171 - RNA, 22 nt, Homo sapiens
  source 1..22: mol_type = transcribed RNA
tgagttttgagtgtttggagtt

SEQ ID NO: 3172 - RNA, 22 nt, Homo sapiens
  source 1..22: mol_type = transcribed RNA
catgctaggatagaaagaatgg

SEQ ID NO: 3173 - RNA, 22 nt, Homo sapiens
  source 1..22: mol_type = transcribed RNA
ccattctttctatcctagcatg

SEQ ID NO: 3174 - RNA, 24 nt, Homo sapiens
  source 1..24: mol_type = transcribed RNA
ggttgggcagtgaggagggtgtga

SEQ ID NO: 3175 - RNA, 24 nt, Homo sapiens
  source 1..24: mol_type = transcribed RNA
tcacaccctcctcactgcccaacc

SEQ ID NO: 3176 - RNA, 22 nt, Homo sapiens
  source 1..22: mol_type = transcribed RNA
tggaaaaaactggtgtgtgctt

SEQ ID NO: 3177 - RNA, 22 nt, Homo sapiens
  source 1..22: mol_type = transcribed RNA
aagcacacaccagttttttcca

SEQ ID NO: 3178 - RNA, 22 nt, Homo sapiens
  source 1..22: mol_type = transcribed RNA
ctggggagatcctcgaggttgg

SEQ ID NO: 3179 - RNA, 22 nt, Homo sapiens
  source 1..22: mol_type = transcribed RNA
ccaacctcgaggatctccccag

SEQ ID NO: 3180 - RNA, 22 nt, Homo sapiens
  source 1..22: mol_type = transcribed RNA
caacctcgacgatctcctcagc

SEQ ID NO: 3181 - RNA, 22 nt, Homo sapiens
  source 1..22: mol_type = transcribed RNA
gctgaggagatcgtcgaggttg

SEQ ID NO: 3182 - RNA, 21 nt, Homo sapiens
  source 1..21: mol_type = transcribed RNA
tgaggagatcgtcgaggttgg

SEQ ID NO: 3183 - RNA, 21 nt, Homo sapiens
  source 1..21: mol_type = transcribed RNA
ccaacctcgacgatctcctca

SEQ ID NO: 3184 - RNA, 22 nt, Homo sapiens
  source 1..22: mol_type = transcribed RNA
caacctcgaggatctccccagc

SEQ ID NO: 3185 - RNA, 22 nt, Homo sapiens
  source 1..22: mol_type = transcribed RNA
gctggggagatcctcgaggttg

SEQ ID NO: 3186 - RNA, 21 nt, Homo sapiens
  source 1..21: mol_type = transcribed RNA
ggtggggcaatgggatcaggt

SEQ ID NO: 3187 - RNA, 21 nt, Homo sapiens
  source 1..21: mol_type = transcribed RNA
acctgatcccattgccccacc

SEQ ID NO: 3188 - RNA, 23 nt, Homo sapiens
  source 1..23: mol_type = transcribed RNA
ggggaaagcgagtagggacattt

SEQ ID NO: 3189 - RNA, 23 nt, Homo sapiens
  source 1..23: mol_type = transcribed RNA
aaatgtccctactcgctttcccc

SEQ ID NO: 3190 - RNA, 22 nt, Homo sapiens
  source 1..22: mol_type = transcribed RNA
cagaaggggagttgggagcaga

SEQ ID NO: 3191 - RNA, 22 nt, Homo sapiens
  source 1..22: mol_type = transcribed RNA
tctgctcccaactccccttctg

SEQ ID NO: 3192 - RNA, 21 nt, Homo sapiens
  source 1..21: mol_type = transcribed RNA
ccaggctctgcagtgggaact

SEQ ID NO: 3193 - RNA, 21 nt, Homo sapiens
  source 1..21: mol_type = transcribed RNA
agttcccactgcagagcctgg

SEQ ID NO: 3194 - RNA, 21 nt, Homo sapiens
  source 1..21: mol_type = transcribed RNA
ctcccacttccagatctttct

SEQ ID NO: 3195 - RNA, 21 nt, Homo sapiens
  source 1..21: mol_type = transcribed RNA
agaaagatctggaagtgggag

SEQ ID NO: 3196 - RNA, 22 nt, Homo sapiens
  source 1..22: mol_type = transcribed RNA
aaagatctggaagtgggagaca

SEQ ID NO: 3197 - RNA, 22 nt, Homo sapiens
  source 1..22: mol_type = transcribed RNA
tgtctcccacttccagatcttt

SEQ ID NO: 3198 - RNA, 22 nt, Homo sapiens
  source 1..22: mol_type = transcribed RNA
ctgccctagtctagctgaagct

SEQ ID NO: 3199 - RNA, 22 nt, Homo sapiens
  source 1..22: mol_type = transcribed RNA
agcttcagctagactagggcag

SEQ ID NO: 3200 - RNA, 22 nt, Homo sapiens
  source 1..22: mol_type = transcribed RNA
ttcagccaggctagtgcagtct

SEQ ID NO: 3201 - RNA, 22 nt, Homo sapiens
  source 1..22: mol_type = transcribed RNA
agactgcactagcctggctgaa

SEQ ID NO: 3202 - RNA, 22 nt, Homo sapiens
  source 1..22: mol_type = transcribed RNA
taggattacaagtgtcggccac

SEQ ID NO: 3203 - RNA, 22 nt, Homo sapiens
  source 1..22: mol_type = transcribed RNA
gtggccgacacttgtaatccta

SEQ ID NO: 3204 - RNA, 22 nt, Homo sapiens
  source 1..22: mol_type = transcribed RNA
agagctgagactagaaagccca

SEQ ID NO: 3205 - RNA, 22 nt, Homo sapiens
  source 1..22: mol_type = transcribed RNA
tgggctttctagtctcagctct

SEQ ID NO: 3206 - RNA, 22 nt, Homo sapiens
  source 1..22: mol_type = transcribed RNA
ggctttctagtctcagctctcc

SEQ ID NO: 3207 - RNA, 22 nt, Homo sapiens
  source 1..22: mol_type = transcribed RNA
ggagagctgagactagaaagcc

SEQ ID NO: 3208 - RNA, 23 nt, Homo sapiens
  source 1..23: mol_type = transcribed RNA
ctgataagaacagaggcccagat

SEQ ID NO: 3209 - RNA, 23 nt, Homo sapiens
  source 1..23: mol_type = transcribed RNA
atctgggcctctgttcttatcag

SEQ ID NO: 3210 - RNA, 21 nt, Homo sapiens
  source 1..21: mol_type = transcribed RNA
tccctacccctccactcccca

SEQ ID NO: 3211 - RNA, 21 nt, Homo sapiens
  source 1..21: mol_type = transcribed RNA
tggggagtggaggggtaggga

SEQ ID NO: 3212 - RNA, 23 nt, Homo sapiens
  source 1..23: mol_type = transcribed RNA
ttagggagtagaagggtggggag

SEQ ID NO: 3213 - RNA, 23 nt, Homo sapiens
  source 1..23: mol_type = transcribed RNA
ctccccacccttctactccctaa

SEQ ID NO: 3214 - RNA, 22 nt, Homo sapiens
  source 1..22: mol_type = transcribed RNA
tataaaatgagggcagtaagac

SEQ ID NO: 3215 - RNA, 22 nt, Homo sapiens
  source 1..22: mol_type = transcribed RNA
gtcttactgccctcattttata

SEQ ID NO: 3216 - RNA, 22 nt, Homo sapiens
  source 1..22: mol_type = transcribed RNA
tgtgactttaagggaaatggcg

SEQ ID NO: 3217 - RNA, 22 nt, Homo sapiens
  source 1..22: mol_type = transcribed RNA
cgccatttcccttaaagtcaca

SEQ ID NO: 3218 - RNA, 22 nt, Homo sapiens
  source 1..22: mol_type = transcribed RNA
aggtggatgcaatgtgacctca

SEQ ID NO: 3219 - RNA, 22 nt, Homo sapiens
  source 1..22: mol_type = transcribed RNA
tgaggtcacattgcatccacct

SEQ ID NO: 3220 - RNA, 23 nt, Homo sapiens
  source 1..23: mol_type = transcribed RNA
cgcagacaatgcctactggccta

SEQ ID NO: 3221 - RNA, 23 nt, Homo sapiens
  source 1..23: mol_type = transcribed RNA
taggccagtaggcattgtctgcg

SEQ ID NO: 3222 - RNA, 17 nt, Homo sapiens
  source 1..17: mol_type = transcribed RNA
gagttctacagtcagac

SEQ ID NO: 3223 - RNA, 17 nt, Homo sapiens
  source 1..17: mol_type = transcribed RNA
gtctgactgtagaactc

SEQ ID NO: 3224 - RNA, 22 nt, Homo sapiens
  source 1..22: mol_type = transcribed RNA
taggactgtgcttggcacatag

SEQ ID NO: 3225 - RNA, 22 nt, Homo sapiens
  source 1..22: mol_type = transcribed RNA
ctatgtgccaagcacagtccta

SEQ ID NO: 3226 - RNA, 22 nt, Homo sapiens
  source 1..22: mol_type = transcribed RNA
ctggggttctgagacagacagt

SEQ ID NO: 3227 - RNA, 22 nt, Homo sapiens
  source 1..22: mol_type = transcribed RNA
actgtctgtctcagaaccccag

SEQ ID NO: 3228 - RNA, 22 nt, Homo sapiens
  source 1..22: mol_type = transcribed RNA
aaaggaggaaataggcaggcca

SEQ ID NO: 3229 - RNA, 22 nt, Homo sapiens
  source 1..22: mol_type = transcribed RNA
tggcctgcctatttcctccttt

SEQ ID NO: 3230 - RNA, 22 nt, Homo sapiens
  source 1..22: mol_type = transcribed RNA
tgccctgcctgttttctccttt

SEQ ID NO: 3231 - RNA, 22 nt, Homo sapiens
  source 1..22: mol_type = transcribed RNA
aaaggagaaaacaggcagggca

SEQ ID NO: 3232 - RNA, 23 nt, Homo sapiens
  source 1..23: mol_type = transcribed RNA
tagtgagttagagatgcagagcc

SEQ ID NO: 3233 - RNA, 23 nt, Homo sapiens
  source 1..23: mol_type = transcribed RNA
ggctctgcatctctaactcacta

SEQ ID NO: 3234 - RNA, 19 nt, Homo sapiens
  source 1..19: mol_type = transcribed RNA
actggcctgggactaccgg

SEQ ID NO: 3235 - RNA, 19 nt, Homo sapiens
  source 1..19: mol_type = transcribed RNA
ccggtagtcccaggccagt

SEQ ID NO: 3236 - RNA, 21 nt, Homo sapiens
  source 1..21: mol_type = transcribed RNA
tgcacggcactggggacacgt

SEQ ID NO: 3237 - RNA, 21 nt, Homo sapiens
  source 1..21: mol_type = transcribed RNA
acgtgtccccagtgccgtgca

SEQ ID NO: 3238 - RNA, 23 nt, Homo sapiens
  source 1..23: mol_type = transcribed RNA
tgtgtacacacgtgccaggcgct

SEQ ID NO: 3239 - RNA, 23 nt, Homo sapiens
  source 1..23: mol_type = transcribed RNA
agcgcctggcacgtgtgtacaca

SEQ ID NO: 3240 - RNA, 17 nt, Homo sapiens
  source 1..17: mol_type = transcribed RNA
ggggcgcggccggatcg

SEQ ID NO: 3241 - RNA, 17 nt, Homo sapiens
  source 1..17: mol_type = transcribed RNA
cgatccggccgcgcccc

SEQ ID NO: 3242 - RNA, 22 nt, Homo sapiens
  source 1..22: mol_type = transcribed RNA
agaaggggtgaaatttaaacgt

SEQ ID NO: 3243 - RNA, 22 nt, Homo sapiens
  source 1..22: mol_type = transcribed RNA
acgtttaaatttcaccccttct

SEQ ID NO: 3244 - RNA, 19 nt, Homo sapiens
  source 1..19: mol_type = transcribed RNA
atcgggccctcggcgccgg

SEQ ID NO: 3245 - RNA, 19 nt, Homo sapiens
  source 1..19: mol_type = transcribed RNA
ccggcgccgagggcccgat

SEQ ID NO: 3246 - RNA, 17 nt, Homo sapiens
  source 1..17: mol_type = transcribed RNA
gcttctgtagtgtagtc

SEQ ID NO: 3247 - RNA, 17 nt, Homo sapiens
  source 1..17: mol_type = transcribed RNA
gactacactacagaagc

SEQ ID NO: 3248 - RNA, 22 nt, Homo sapiens
  source 1..22: mol_type = transcribed RNA
gcctctctcggagtcgctcgga

SEQ ID NO: 3249 - RNA, 22 nt, Homo sapiens
  source 1..22: mol_type = transcribed RNA
tccgagcgactccgagagaggc

SEQ ID NO: 3250 - RNA, 23 nt, Homo sapiens
  source 1..23: mol_type = transcribed RNA
aaagtctcgctctctgcccctca

SEQ ID NO: 3251 - RNA, 23 nt, Homo sapiens
  source 1..23: mol_type = transcribed RNA
tgaggggcagagagcgagacttt

SEQ ID NO: 3252 - RNA, 24 nt, Homo sapiens
  source 1..24: mol_type = transcribed RNA
tgaggggcctcagaccgagctttt

SEQ ID NO: 3253 - RNA, 24 nt, Homo sapiens
  source 1..24: mol_type = transcribed RNA
aaaagctcggtctgaggcccctca

SEQ ID NO: 3254 - RNA, 23 nt, Homo sapiens
  source 1..23: mol_type = transcribed RNA
agaagaaggcggtcggtctgcgg

SEQ ID NO: 3255 - RNA, 23 nt, Homo sapiens
  source 1..23: mol_type = transcribed RNA
ccgcagaccgaccgccttcttct

SEQ ID NO: 3256 - RNA, 20 nt, Homo sapiens
  source 1..20: mol_type = transcribed RNA
ttggccatggggctgcgcgg

SEQ ID NO: 3257 - RNA, 20 nt, Homo sapiens
  source 1..20: mol_type = transcribed RNA
ccgcgcagccccatggccaa

SEQ ID NO: 3258 - RNA, 23 nt, Homo sapiens
  source 1..23: mol_type = transcribed RNA
cctgggcagcgtgtggctgaagg

SEQ ID NO: 3259 - RNA, 23 nt, Homo sapiens
  source 1..23: mol_type = transcribed RNA
ccttcagccacacgctgcccagg

SEQ ID NO: 3260 - RNA, 23 nt, Homo sapiens
  source 1..23: mol_type = transcribed RNA
agaggctttgtgcggatacgggg

SEQ ID NO: 3261 - RNA, 23 nt, Homo sapiens
  source 1..23: mol_type = transcribed RNA
ccccgtatccgcacaaagcctct

SEQ ID NO: 3262 - RNA, 21 nt, Homo sapiens
  source 1..21: mol_type = transcribed RNA
cccttgggtctgatggggtag

SEQ ID NO: 3263 - RNA, 21 nt, Homo sapiens
  source 1..21: mol_type = transcribed RNA
ctaccccatcagacccaaggg

SEQ ID NO: 3264 - RNA, 25 nt, Homo sapiens
  source 1..25: mol_type = transcribed RNA
tgccccatctgtgccctgggtagga

SEQ ID NO: 3265 - RNA, 25 nt, Homo sapiens
  source 1..25: mol_type = transcribed RNA
tcctacccagggcacagatggggca

SEQ ID NO: 3266 - RNA, 23 nt, Homo sapiens
  source 1..23: mol_type = transcribed RNA
tgtggaaggtagacggccagaga

SEQ ID NO: 3267 - RNA, 23 nt, Homo sapiens
  source 1..23: mol_type = transcribed RNA
tctctggccgtctaccttccaca

SEQ ID NO: 3268 - RNA, 20 nt, Homo sapiens
  source 1..20: mol_type = transcribed RNA
tctggccagctacgtcccca

SEQ ID NO: 3269 - RNA, 20 nt, Homo sapiens
  source 1..20: mol_type = transcribed RNA
tggggacgtagctggccaga

SEQ ID NO: 3270 - RNA, 23 nt, Homo sapiens
  source 1..23: mol_type = transcribed RNA
tggggacgtagctggccagacag

SEQ ID NO: 3271 - RNA, 23 nt, Homo sapiens
  source 1..23: mol_type = transcribed RNA
ctgtctggccagctacgtcccca

SEQ ID NO: 3272 - RNA, 22 nt, Homo sapiens
  source 1..22: mol_type = transcribed RNA
ctctctggccgtctaccttcca

SEQ ID NO: 3273 - RNA, 22 nt, Homo sapiens
  source 1..22: mol_type = transcribed RNA
tggaaggtagacggccagagag

SEQ ID NO: 3274 - RNA, 23 nt, Homo sapiens
  source 1..23: mol_type = transcribed RNA
tctgggaggttgtagcagtggaa

SEQ ID NO: 3275 - RNA, 23 nt, Homo sapiens
  source 1..23: mol_type = transcribed RNA
ttccactgctacaacctcccaga

SEQ ID NO: 3276 - RNA, 22 nt, Homo sapiens
  source 1..22: mol_type = transcribed RNA
tcctgcgtaggatctgaggagt

SEQ ID NO: 3277 - RNA, 22 nt, Homo sapiens
  source 1..22: mol_type = transcribed RNA
actcctcagatcctacgcagga

SEQ ID NO: 3278 - RNA, 22 nt, Homo sapiens
  source 1..22: mol_type = transcribed RNA
agctctgctgctcactggcagt

SEQ ID NO: 3279 - RNA, 22 nt, Homo sapiens
  source 1..22: mol_type = transcribed RNA
actgccagtgagcagcagagct

SEQ ID NO: 3280 - RNA, 21 nt, Homo sapiens
  source 1..21: mol_type = transcribed RNA
ggccagccaccaggagggctg

SEQ ID NO: 3281 - RNA, 21 nt, Homo sapiens
  source 1..21: mol_type = transcribed RNA
cagccctcctggtggctggcc

SEQ ID NO: 3282 - RNA, 17 nt, Homo sapiens
  source 1..17: mol_type = transcribed RNA
cgcgccgggcccgggtt

SEQ ID NO: 3283 - RNA, 17 nt, Homo sapiens
  source 1..17: mol_type = transcribed RNA
aacccgggcccggcgcg

SEQ ID NO: 3284 - RNA, 23 nt, Homo sapiens
  source 1..23: mol_type = transcribed RNA
ggaggcgcaggctcggaaaggcg

SEQ ID NO: 3285 - RNA, 23 nt, Homo sapiens
  source 1..23: mol_type = transcribed RNA
cgcctttccgagcctgcgcctcc

SEQ ID NO: 3286 - RNA, 22 nt, Homo sapiens
  source 1..22: mol_type = transcribed RNA
gtggagtcctggggaatggaga

SEQ ID NO: 3287 - RNA, 22 nt, Homo sapiens
  source 1..22: mol_type = transcribed RNA
tctccattccccaggactccac

SEQ ID NO: 3288 - RNA, 23 nt, Homo sapiens
  source 1..23: mol_type = transcribed RNA
agggactgccttaggagaaagtt

SEQ ID NO: 3289 - RNA, 23 nt, Homo sapiens
  source 1..23: mol_type = transcribed RNA
aactttctcctaaggcagtccct

SEQ ID NO: 3290 - RNA, 17 nt, Homo sapiens
  source 1..17: mol_type = transcribed RNA
gggatatgaagaaaaat

SEQ ID NO: 3291 - RNA, 17 nt, Homo sapiens
  source 1..17: mol_type = transcribed RNA
atttttcttcatatccc

SEQ ID NO: 3292 - RNA, 22 nt, Homo sapiens
  source 1..22: mol_type = transcribed RNA
tggaagggagaagagctttaat

SEQ ID NO: 3293 - RNA, 22 nt, Homo sapiens
  source 1..22: mol_type = transcribed RNA
attaaagctcttctcccttcca

SEQ ID NO: 3294 - RNA, 22 nt, Homo sapiens
  source 1..22: mol_type = transcribed RNA
actttcctcactcccgtgaagt

SEQ ID NO: 3295 - RNA, 22 nt, Homo sapiens
  source 1..22: mol_type = transcribed RNA
acttcacgggagtgaggaaagt

SEQ ID NO: 3296 - RNA, 21 nt, Homo sapiens
  source 1..21: mol_type = transcribed RNA
ttcgcgggcgaaggcaaagtc

SEQ ID NO: 3297 - RNA, 21 nt, Homo sapiens
  source 1..21: mol_type = transcribed RNA
gactttgccttcgcccgcgaa

SEQ ID NO: 3298 - RNA, 22 nt, Homo sapiens
  source 1..22: mol_type = transcribed RNA
catctggcatccgtcacacaga

SEQ ID NO: 3299 - RNA, 22 nt, Homo sapiens
  source 1..22: mol_type = transcribed RNA
tctgtgtgacggatgccagatg

SEQ ID NO: 3300 - RNA, 22 nt, Homo sapiens
  source 1..22: mol_type = transcribed RNA
tgagggacagatgccagaagca

SEQ ID NO: 3301 - RNA, 22 nt, Homo sapiens
  source 1..22: mol_type = transcribed RNA
tgcttctggcatctgtccctca

SEQ ID NO: 3302 - RNA, 22 nt, Homo sapiens
  source 1..22: mol_type = transcribed RNA
aaactaatctctacactgctgc

SEQ ID NO: 3303 - RNA, 22 nt, Homo sapiens
  source 1..22: mol_type = transcribed RNA
gcagcagtgtagagattagttt

SEQ ID NO: 3304 - RNA, 22 nt, Homo sapiens
  source 1..22: mol_type = transcribed RNA
gcagtagtgtagagattggttt

SEQ ID NO: 3305 - RNA, 22 nt, Homo sapiens
  source 1..22: mol_type = transcribed RNA
aaaccaatctctacactactgc

SEQ ID NO: 3306 - RNA, 21 nt, Homo sapiens
  source 1..21: mol_type = transcribed RNA
gctgcaccggagactgggtaa

SEQ ID NO: 3307 - RNA, 21 nt, Homo sapiens
  source 1..21: mol_type = transcribed RNA
ttacccagtctccggtgcagc

SEQ ID NO: 3308 - RNA, 21 nt, Homo sapiens
  source 1..21: mol_type = transcribed RNA
tacccagtctccggtgcagcc

SEQ ID NO: 3309 - RNA, 21 nt, Homo sapiens
  source 1..21: mol_type = transcribed RNA
ggctgcaccggagactgggta

SEQ ID NO: 3310 - RNA, 24 nt, Homo sapiens
  source 1..24: mol_type = transcribed RNA
tgtggacagtgaggtagagggagt

SEQ ID NO: 3311 - RNA, 24 nt, Homo sapiens
  source 1..24: mol_type = transcribed RNA
actccctctacctcactgtccaca

SEQ ID NO: 3312 - RNA, 22 nt, Homo sapiens
  source 1..22: mol_type = transcribed RNA
agcttttgggaattcaggtagt

SEQ ID NO: 3313 - RNA, 22 nt, Homo sapiens
  source 1..22: mol_type = transcribed RNA
actacctgaattcccaaaagct

SEQ ID NO: 3314 - RNA, 21 nt, Homo sapiens
  source 1..21: mol_type = transcribed RNA
acctgaattaccaaaagcttt

SEQ ID NO: 3315 - RNA, 21 nt, Homo sapiens
  source 1..21: mol_type = transcribed RNA
aaagcttttggtaattcaggt

SEQ ID NO: 3316 - RNA, 22 nt, Homo sapiens
  source 1..22: mol_type = transcribed RNA
atatacctgttcggtctcttta

SEQ ID NO: 3317 - RNA, 22 nt, Homo sapiens
  source 1..22: mol_type = transcribed RNA
taaagagaccgaacaggtatat

SEQ ID NO: 3318 - RNA, 22 nt, Homo sapiens
  source 1..22: mol_type = transcribed RNA
aggggaccaaagagatatatag

SEQ ID NO: 3319 - RNA, 22 nt, Homo sapiens
  source 1..22: mol_type = transcribed RNA
ctatatatctctttggtcccct

SEQ ID NO: 3320 - RNA, 23 nt, Homo sapiens
  source 1..23: mol_type = transcribed RNA
tttgtatggatatgtgtgtgtat

SEQ ID NO: 3321 - RNA, 23 nt, Homo sapiens
  source 1..23: mol_type = transcribed RNA
atacacacacatatccatacaaa

SEQ ID NO: 3322 - RNA, 22 nt, Homo sapiens
  source 1..22: mol_type = transcribed RNA
tgtgttagaataggggcaataa

SEQ ID NO: 3323 - RNA, 22 nt, Homo sapiens
  source 1..22: mol_type = transcribed RNA
ttattgcccctattctaacaca

SEQ ID NO: 3324 - RNA, 22 nt, Homo sapiens
  source 1..22: mol_type = transcribed RNA
attgcctctgttctaacacaag

SEQ ID NO: 3325 - RNA, 22 nt, Homo sapiens
  source 1..22: mol_type = transcribed RNA
cttgtgttagaacagaggcaat

SEQ ID NO: 3326 - RNA, 22 nt, Homo sapiens
  source 1..22: mol_type = transcribed RNA
aagggcttcctctctgcaggac

SEQ ID NO: 3327 - RNA, 22 nt, Homo sapiens
  source 1..22: mol_type = transcribed RNA
gtcctgcagagaggaagccctt

SEQ ID NO: 3328 - RNA, 21 nt, Homo sapiens
  source 1..21: mol_type = transcribed RNA
cctgcagagaggaagcccttc

SEQ ID NO: 3329 - RNA, 21 nt, Homo sapiens
  source 1..21: mol_type = transcribed RNA
gaagggcttcctctctgcagg

SEQ ID NO: 3330 - RNA, 22 nt, Homo sapiens
  source 1..22: mol_type = transcribed RNA
aggatttcagaaatactggtgt

SEQ ID NO: 3331 - RNA, 22 nt, Homo sapiens
  source 1..22: mol_type = transcribed RNA
acaccagtatttctgaaatcct

SEQ ID NO: 3332 - RNA, 24 nt, Homo sapiens
  source 1..24: mol_type = transcribed RNA
agatgtatggaatctgtatatatc

SEQ ID NO: 3333 - RNA, 24 nt, Homo sapiens
  source 1..24: mol_type = transcribed RNA
gatatatacagattccatacatct

SEQ ID NO: 3334 - RNA, 22 nt, Homo sapiens
  source 1..22: mol_type = transcribed RNA
cggggagagaacgcagtgacgt

SEQ ID NO: 3335 - RNA, 22 nt, Homo sapiens
  source 1..22: mol_type = transcribed RNA
acgtcactgcgttctctccccg

SEQ ID NO: 3336 - RNA, 19 nt, Homo sapiens
  source 1..19: mol_type = transcribed RNA
tggggcggagcttccggag

SEQ ID NO: 3337 - RNA, 19 nt, Homo sapiens
  source 1..19: mol_type = transcribed RNA
ctccggaagctccgcccca

SEQ ID NO: 3338 - RNA, 21 nt, Homo sapiens
  source 1..21: mol_type = transcribed RNA
tcacgcggagagatggctttg

SEQ ID NO: 3339 - RNA, 21 nt, Homo sapiens
  source 1..21: mol_type = transcribed RNA
caaagccatctctccgcgtga

SEQ ID NO: 3340 - RNA, 22 nt, Homo sapiens
  source 1..22: mol_type = transcribed RNA
caggcgtctgtctacgtggctt

SEQ ID NO: 3341 - RNA, 22 nt, Homo sapiens
  source 1..22: mol_type = transcribed RNA
aagccacgtagacagacgcctg

SEQ ID NO: 3342 - RNA, 22 nt, Homo sapiens
  source 1..22: mol_type = transcribed RNA
caccttgcgctactcaggtctg

SEQ ID NO: 3343 - RNA, 22 nt, Homo sapiens
  source 1..22: mol_type = transcribed RNA
cagacctgagtagcgcaaggtg

SEQ ID NO: 3344 - RNA, 22 nt, Homo sapiens
  source 1..22: mol_type = transcribed RNA
aatctgagaaggcgcacaaggt

SEQ ID NO: 3345 - RNA, 22 nt, Homo sapiens
  source 1..22: mol_type = transcribed RNA
accttgtgcgccttctcagatt

SEQ ID NO: 3346 - RNA, 22 nt, Homo sapiens
  source 1..22: mol_type = transcribed RNA
aaggcctttctgaaccttcaga

SEQ ID NO: 3347 - RNA, 22 nt, Homo sapiens
  source 1..22: mol_type = transcribed RNA
tctgaaggttcagaaaggcctt

SEQ ID NO: 3348 - RNA, 22 nt, Homo sapiens
  source 1..22: mol_type = transcribed RNA
gtgacatcacatatacggcagc

SEQ ID NO: 3349 - RNA, 22 nt, Homo sapiens
  source 1..22: mol_type = transcribed RNA
gctgccgtatatgtgatgtcac

SEQ ID NO: 3350 - RNA, 24 nt, Homo sapiens
  source 1..24: mol_type = transcribed RNA
tcagaacaaatgccggttcccaga

SEQ ID NO: 3351 - RNA, 24 nt, Homo sapiens
  source 1..24: mol_type = transcribed RNA
tctgggaaccggcatttgttctga

SEQ ID NO: 3352 - RNA, 22 nt, Homo sapiens
  source 1..22: mol_type = transcribed RNA
tgagaaccacgtctgctctgag

SEQ ID NO: 3353 - RNA, 22 nt, Homo sapiens
  source 1..22: mol_type = transcribed RNA
ctcagagcagacgtggttctca

SEQ ID NO: 3354 - RNA, 17 nt, Homo sapiens
  source 1..17: mol_type = transcribed RNA
tcatattgcttctttct

SEQ ID NO: 3355 - RNA, 17 nt, Homo sapiens
  source 1..17: mol_type = transcribed RNA
agaaagaagcaatatga

SEQ ID NO: 3356 - RNA, 22 nt, Homo sapiens
  source 1..22: mol_type = transcribed RNA
tgtgacagattgataactgaaa

SEQ ID NO: 3357 - RNA, 22 nt, Homo sapiens
  source 1..22: mol_type = transcribed RNA
tttcagttatcaatctgtcaca

SEQ ID NO: 3358 - RNA, 23 nt, Homo sapiens
  source 1..23: mol_type = transcribed RNA
tggagtccaggaatctgcatttt

SEQ ID NO: 3359 - RNA, 23 nt, Homo sapiens
  source 1..23: mol_type = transcribed RNA
aaaatgcagattcctggactcca

SEQ ID NO: 3360 - RNA, 22 nt, Homo sapiens
  source 1..22: mol_type = transcribed RNA
aagcccttaccccaaaaagtat

SEQ ID NO: 3361 - RNA, 22 nt, Homo sapiens
  source 1..22: mol_type = transcribed RNA
atactttttggggtaagggctt

SEQ ID NO: 3362 - RNA, 22 nt, Homo sapiens
  source 1..22: mol_type = transcribed RNA
aagcccttaccccaaaaagcat

SEQ ID NO: 3363 - RNA, 22 nt, Homo sapiens
  source 1..22: mol_type = transcribed RNA
atgctttttggggtaagggctt

SEQ ID NO: 3364 - RNA, 22 nt, Homo sapiens
  source 1..22: mol_type = transcribed RNA
tggaatgtaaggaagtgtgtgg

SEQ ID NO: 3365 - RNA, 22 nt, Homo sapiens
  source 1..22: mol_type = transcribed RNA
ccacacacttccttacattcca

SEQ ID NO: 3366 - RNA, 22 nt, Homo sapiens
  source 1..22: mol_type = transcribed RNA
cttatcagattgtattgtaatt

SEQ ID NO: 3367 - RNA, 22 nt, Homo sapiens
  source 1..22: mol_type = transcribed RNA
aattacaatacaatctgataag

SEQ ID NO: 3368 - RNA, 22 nt, Homo sapiens
  source 1..22: mol_type = transcribed RNA
ttataatacaacctgataagtg

SEQ ID NO: 3369 - RNA, 22 nt, Homo sapiens
  source 1..22: mol_type = transcribed RNA
cacttatcaggttgtattataa

SEQ ID NO: 3370 - RNA, 22 nt, Homo sapiens
  source 1..22: mol_type = transcribed RNA
cttagcaggttgtattatcatt

SEQ ID NO: 3371 - RNA, 22 nt, Homo sapiens
  source 1..22: mol_type = transcribed RNA
aatgataatacaacctgctaag

SEQ ID NO: 3372 - RNA, 22 nt, Homo sapiens
  source 1..22: mol_type = transcribed RNA
atataatacaacctgctaagtg

SEQ ID NO: 3373 - RNA, 22 nt, Homo sapiens
  source 1..22: mol_type = transcribed RNA
cacttagcaggttgtattatat

SEQ ID NO: 3374 - RNA, 22 nt, Homo sapiens
  source 1..22: mol_type = transcribed RNA
cacttagcaggttgtattatat

SEQ ID NO: 3375 - RNA, 22 nt, Homo sapiens
  source 1..22: mol_type = transcribed RNA
atataatacaacctgctaagtg

SEQ ID NO: 3376 - RNA, 22 nt, Homo sapiens
  source 1..22: mol_type = transcribed RNA
ataatacaacctgctaagtgct

SEQ ID NO: 3377 - RNA, 22 nt, Homo sapiens
  source 1..22: mol_type = transcribed RNA
agcacttagcaggttgtattat

SEQ ID NO: 3378 - RNA, 22 nt, Homo sapiens
  source 1..22: mol_type = transcribed RNA
tttggtccccttcaaccagctg

SEQ ID NO: 3379 - RNA, 22 nt, Homo sapiens
  source 1..22: mol_type = transcribed RNA
cagctggttgaaggggaccaaa

SEQ ID NO: 3380 - RNA, 22 nt, Homo sapiens
  source 1..22: mol_type = transcribed RNA
tttggtccccttcaaccagcta

SEQ ID NO: 3381 - RNA, 22 nt, Homo sapiens
  source 1..22: mol_type = transcribed RNA
tagctggttgaaggggaccaaa

SEQ ID NO: 3382 - RNA, 22 nt, Homo sapiens
  source 1..22: mol_type = transcribed RNA
tgtaaacatccttgactggaag

SEQ ID NO: 3383 - RNA, 22 nt, Homo sapiens
  source 1..22: mol_type = transcribed RNA
cttccagtcaaggatgtttaca

SEQ ID NO: 3384 - RNA, 22 nt, Homo sapiens
  source 1..22: mol_type = transcribed RNA
tgtcagtttgtcaaatacccca

SEQ ID NO: 3385 - RNA, 22 nt, Homo sapiens
  source 1..22: mol_type = transcribed RNA
tggggtatttgacaaactgaca

SEQ ID NO: 3386 - RNA, 22 nt, Homo sapiens
  source 1..22: mol_type = transcribed RNA
cgtgtatttgacaagctgagtt

SEQ ID NO: 3387 - RNA, 22 nt, Homo sapiens
  source 1..22: mol_type = transcribed RNA
aactcagcttgtcaaatacacg

SEQ ID NO: 3388 - RNA, 21 nt, Homo sapiens
  source 1..21: mol_type = transcribed RNA
ttcacagtggctaagttccgc

SEQ ID NO: 3389 - RNA, 21 nt, Homo sapiens
  source 1..21: mol_type = transcribed RNA
gcggaacttagccactgtgaa

SEQ ID NO: 3390 - RNA, 22 nt, Homo sapiens
  source 1..22: mol_type = transcribed RNA
agggcttagctgcttgtgagca

SEQ ID NO: 3391 - RNA, 22 nt, Homo sapiens
  source 1..22: mol_type = transcribed RNA
tgctcacaagcagctaagccct

SEQ ID NO: 3392 - RNA, 21 nt, Homo sapiens
  source 1..21: mol_type = transcribed RNA
atcacattgccagggattacc

SEQ ID NO: 3393 - RNA, 21 nt, Homo sapiens
  source 1..21: mol_type = transcribed RNA
ggtaatccctggcaatgtgat

SEQ ID NO: 3394 - RNA, 22 nt, Homo sapiens
  source 1..22: mol_type = transcribed RNA
tgggttcctggcatgctgattt

SEQ ID NO: 3395 - RNA, 22 nt, Homo sapiens
  source 1..22: mol_type = transcribed RNA
aaatcagcatgccaggaaccca

SEQ ID NO: 3396 - RNA, 22 nt, Homo sapiens
  source 1..22: mol_type = transcribed RNA
ctttcagtcggatgtttacagc

SEQ ID NO: 3397 - RNA, 22 nt, Homo sapiens
  source 1..22: mol_type = transcribed RNA
gctgtaaacatccgactgaaag

SEQ ID NO: 3398 - RNA, 22 nt, Homo sapiens
  source 1..22: mol_type = transcribed RNA
tgcctactgagctgatatcagt

SEQ ID NO: 3399 - RNA, 22 nt, Homo sapiens
  source 1..22: mol_type = transcribed RNA
actgatatcagctcagtaggca

SEQ ID NO: 3400 - RNA, 22 nt, Homo sapiens
  source 1..22: mol_type = transcribed RNA
tgcctactgagctgaaacacag

SEQ ID NO: 3401 - RNA, 22 nt, Homo sapiens
  source 1..22: mol_type = transcribed RNA
ctgtgtttcagctcagtaggca

SEQ ID NO: 3402 - RNA, 22 nt, Homo sapiens
  source 1..22: mol_type = transcribed RNA
tggctcagttcagcaggaacag

SEQ ID NO: 3403 - RNA, 22 nt, Homo sapiens
  source 1..22: mol_type = transcribed RNA
ctgttcctgctgaactgagcca

SEQ ID NO: 3404 - RNA, 21 nt, Homo sapiens
  source 1..21: mol_type = transcribed RNA
ttcacagtggctaagttctgc

SEQ ID NO: 3405 - RNA, 21 nt, Homo sapiens
  source 1..21: mol_type = transcribed RNA
gcagaacttagccactgtgaa

SEQ ID NO: 3406 - RNA, 22 nt, Homo sapiens
  source 1..22: mol_type = transcribed RNA
agagcttagctgattggtgaac

SEQ ID NO: 3407 - RNA, 22 nt, Homo sapiens
  source 1..22: mol_type = transcribed RNA
gttcaccaatcagctaagctct

SEQ ID NO: 3408 - RNA, 23 nt, Homo sapiens
  source 1..23: mol_type = transcribed RNA
tgtagtgtttcctactttatgga

SEQ ID NO: 3409 - RNA, 23 nt, Homo sapiens
  source 1..23: mol_type = transcribed RNA
tccataaagtaggaaacactaca

SEQ ID NO: 3410 - RNA, 21 nt, Homo sapiens
  source 1..21: mol_type = transcribed RNA
cataaagtagaaagcactact

SEQ ID NO: 3411 - RNA, 21 nt, Homo sapiens
  source 1..21: mol_type = transcribed RNA
agtagtgctttctactttatg

SEQ ID NO: 3412 - RNA, 22 nt, Homo sapiens
  source 1..22: mol_type = transcribed RNA
tgaaggtctactgtgtgccagg

SEQ ID NO: 3413 - RNA, 22 nt, Homo sapiens
  source 1..22: mol_type = transcribed RNA
cctggcacacagtagaccttca

SEQ ID NO: 3414 - RNA, 22 nt, Homo sapiens
  source 1..22: mol_type = transcribed RNA
ttgtacatggtaggctttcatt

SEQ ID NO: 3415 - RNA, 22 nt, Homo sapiens
  source 1..22: mol_type = transcribed RNA
aatgaaagcctaccatgtacaa

SEQ ID NO: 3416 - RNA, 21 nt, Homo sapiens
  source 1..21: mol_type = transcribed RNA
ctggatggctcctccatgtct

SEQ ID NO: 3417 - RNA, 21 nt, Homo sapiens
  source 1..21: mol_type = transcribed RNA
agacatggaggagccatccag

SEQ ID NO: 3418 - RNA, 23 nt, Homo sapiens
  source 1..23: mol_type = transcribed RNA
tcttggagtaggtcattgggtgg

SEQ ID NO: 3419 - RNA, 23 nt, Homo sapiens
  source 1..23: mol_type = transcribed RNA
ccacccaatgacctactccaaga

SEQ ID NO: 3420 - RNA, 22 nt, Homo sapiens
  source 1..22: mol_type = transcribed RNA
ctcatctgcaaagaagtaagtg

SEQ ID NO: 3421 - RNA, 22 nt, Homo sapiens
  source 1..22: mol_type = transcribed RNA
cacttacttctttgcagatgag

SEQ ID NO: 3422 - RNA, 22 nt, Homo sapiens
  source 1..22: mol_type = transcribed RNA
aactgtttgcagaggaaactga

SEQ ID NO: 3423 - RNA, 22 nt, Homo sapiens
  source 1..22: mol_type = transcribed RNA
tcagtttcctctgcaaacagtt

SEQ ID NO: 3424 - RNA, 22 nt, Homo sapiens
  source 1..22: mol_type = transcribed RNA
cttggttcagggagggtcccca

SEQ ID NO: 3425 - RNA, 22 nt, Homo sapiens
  source 1..22: mol_type = transcribed RNA
tggggaccctccctgaaccaag

SEQ ID NO: 3426 - RNA, 22 nt, Homo sapiens
  source 1..22: mol_type = transcribed RNA
aggaccttccctgaaccaagga

SEQ ID NO: 3427 - RNA, 22 nt, Homo sapiens
  source 1..22: mol_type = transcribed RNA
tccttggttcagggaaggtcct

SEQ ID NO: 3428 - RNA, 21 nt, Homo sapiens
  source 1..21: mol_type = transcribed RNA
acctcctgtgtgcatggatta

SEQ ID NO: 3429 - RNA, 21 nt, Homo sapiens
  source 1..21: mol_type = transcribed RNA
taatccatgcacacaggaggt

SEQ ID NO: 3430 - RNA, 22 nt, Homo sapiens
  source 1..22: mol_type = transcribed RNA
tacccattgcatatcggagttg

SEQ ID NO: 3431 - RNA, 22 nt, Homo sapiens
  source 1..22: mol_type = transcribed RNA
caactccgatatgcaatgggta

SEQ ID NO: 3432 - RNA, 18 nt, Homo sapiens
  source 1..18: mol_type = transcribed RNA
aaagctgggttgagaagg

SEQ ID NO: 3433 - RNA, 18 nt, Homo sapiens
  source 1..18: mol_type = transcribed RNA
ccttctcaacccagcttt

SEQ ID NO: 3434 - RNA, 20 nt, Homo sapiens
  source 1..20: mol_type = transcribed RNA
ggtatccgtttggggatggt

SEQ ID NO: 3435 - RNA, 20 nt, Homo sapiens
  source 1..20: mol_type = transcribed RNA
accatccccaaacggatacc

SEQ ID NO: 3436 - RNA, 22 nt, Homo sapiens
  source 1..22: mol_type = transcribed RNA
gaaggcagcagtgctcccctgt

SEQ ID NO: 3437 - RNA, 22 nt, Homo sapiens
  source 1..22: mol_type = transcribed RNA
acaggggagcactgctgccttc

SEQ ID NO: 3438 - RNA, 22 nt, Homo sapiens
  source 1..22: mol_type = transcribed RNA
tcagtgcatcacagaactttgt

SEQ ID NO: 3439 - RNA, 22 nt, Homo sapiens
  source 1..22: mol_type = transcribed RNA
acaaagttctgtgatgcactga

SEQ ID NO: 3440 - RNA, 22 nt, Homo sapiens
  source 1..22: mol_type = transcribed RNA
aagttctgttatacactcaggc

SEQ ID NO: 3441 - RNA, 22 nt, Homo sapiens
  source 1..22: mol_type = transcribed RNA
gcctgagtgtataacagaactt

SEQ ID NO: 3442 - RNA, 22 nt, Homo sapiens
  source 1..22: mol_type = transcribed RNA
ctggccctctctgcccttccgt

SEQ ID NO: 3443 - RNA, 22 nt, Homo sapiens
  source 1..22: mol_type = transcribed RNA
acggaagggcagagagggccag

SEQ ID NO: 3444 - RNA, 21 nt, Homo sapiens
  source 1..21: mol_type = transcribed RNA
ctagactgaagctccttgagg

SEQ ID NO: 3445 - RNA, 21 nt, Homo sapiens
  source 1..21: mol_type = transcribed RNA
cctcaaggagcttcagtctag

SEQ ID NO: 3446 - RNA, 21 nt, Homo sapiens
  source 1..21: mol_type = transcribed RNA
tcgaggagctcacagtctagt

SEQ ID NO: 3447 - RNA, 21 nt, Homo sapiens
  source 1..21: mol_type = transcribed RNA
actagactgtgagctcctcga

SEQ ID NO: 3448 - RNA, 21 nt, Homo sapiens
  source 1..21: mol_type = transcribed RNA
cacattacacggtcgacctct

SEQ ID NO: 3449 - RNA, 21 nt, Homo sapiens
  source 1..21: mol_type = transcribed RNA
agaggtcgaccgtgtaatgtg

SEQ ID NO: 3450 - RNA, 22 nt, Homo sapiens
  source 1..22: mol_type = transcribed RNA
aggtggtccgtggcgcgttcgc

SEQ ID NO: 3451 - RNA, 22 nt, Homo sapiens
  source 1..22: mol_type = transcribed RNA
gcgaacgcgccacggaccacct

SEQ ID NO: 3452 - RNA, 23 nt, Homo sapiens
  source 1..23: mol_type = transcribed RNA
cgcatcccctagggcattggtgt

SEQ ID NO: 3453 - RNA, 23 nt, Homo sapiens
  source 1..23: mol_type = transcribed RNA
acaccaatgccctaggggatgcg

SEQ ID NO: 3454 - RNA, 20 nt, Homo sapiens
  source 1..20: mol_type = transcribed RNA
cctctgggcccttcctccag

SEQ ID NO: 3455 - RNA, 20 nt, Homo sapiens
  source 1..20: mol_type = transcribed RNA
ctggaggaagggcccagagg

SEQ ID NO: 3456 - RNA, 23 nt, Homo sapiens
  source 1..23: mol_type = transcribed RNA
cctagtaggtgtccagtaagtgt

SEQ ID NO: 3457 - RNA, 23 nt, Homo sapiens
  source 1..23: mol_type = transcribed RNA
acacttactggacacctactagg

SEQ ID NO: 3458 - RNA, 21 nt, Homo sapiens
  source 1..21: mol_type = transcribed RNA
acggtgctggatgtggccttt

SEQ ID NO: 3459 - RNA, 21 nt, Homo sapiens
  source 1..21: mol_type = transcribed RNA
aaaggccacatccagcaccgt

SEQ ID NO: 3460 - RNA, 23 nt, Homo sapiens
  source 1..23: mol_type = transcribed RNA
tcagcaccaggatattgttggag

SEQ ID NO: 3461 - RNA, 23 nt, Homo sapiens
  source 1..23: mol_type = transcribed RNA
ctccaacaatatcctggtgctga

SEQ ID NO: 3462 - RNA, 23 nt, Homo sapiens
  source 1..23: mol_type = transcribed RNA
tcaacaaaatcactgatgctgga

SEQ ID NO: 3463 - RNA, 23 nt, Homo sapiens
  source 1..23: mol_type = transcribed RNA
tccagcatcagtgattttgttga

SEQ ID NO: 3464 - RNA, 22 nt, Homo sapiens
  source 1..22: mol_type = transcribed RNA
aacaatatcctggtgctgagtg

SEQ ID NO: 3465 - RNA, 22 nt, Homo sapiens
  source 1..22: mol_type = transcribed RNA
cactcagcaccaggatattgtt

SEQ ID NO: 3466 - RNA, 23 nt, Homo sapiens
  source 1..23: mol_type = transcribed RNA
ggcaggttctcaccctctctagg

SEQ ID NO: 3467 - RNA, 23 nt, Homo sapiens
  source 1..23: mol_type = transcribed RNA
cctagagagggtgagaacctgcc

SEQ ID NO: 3468 - RNA, 23 nt, Homo sapiens
  source 1..23: mol_type = transcribed RNA
gacacgggcgacagctgcggccc

SEQ ID NO: 3469 - RNA, 23 nt, Homo sapiens
  source 1..23: mol_type = transcribed RNA
gggccgcagctgtcgcccgtgtc

SEQ ID NO: 3470 - RNA, 21 nt, Homo sapiens
  source 1..21: mol_type = transcribed RNA
atgtatgtgtgcatgtgcatg

SEQ ID NO: 3471 - RNA, 21 nt, Homo sapiens
  source 1..21: mol_type = transcribed RNA
catgcacatgcacacatacat

SEQ ID NO: 3472 - RNA, 22 nt, Homo sapiens
  source 1..22: mol_type = transcribed RNA
tatacaagggcagactctctct

SEQ ID NO: 3473 - RNA, 22 nt, Homo sapiens
  source 1..22: mol_type = transcribed RNA
agagagagtctgcccttgtata

SEQ ID NO: 3474 - RNA, 20 nt, Homo sapiens
  source 1..20: mol_type = transcribed RNA
ggcggcggcggaggcggggg

SEQ ID NO: 3475 - RNA, 20 nt, Homo sapiens
  source 1..20: mol_type = transcribed RNA
cccccgcctccgccgccgcc

SEQ ID NO: 3476 - RNA, 22 nt, Homo sapiens
  source 1..22: mol_type = transcribed RNA
gcaggtgctcacttgtcctcct

SEQ ID NO: 3477 - RNA, 22 nt, Homo sapiens
  source 1..22: mol_type = transcribed RNA
aggaggacaagtgagcacctgc

SEQ ID NO: 3478 - RNA, 19 nt, Homo sapiens
  source 1..19: mol_type = transcribed RNA
ggggcctggcggtgggcgg

SEQ ID NO: 3479 - RNA, 19 nt, Homo sapiens
  source 1..19: mol_type = transcribed RNA
ccgcccaccgccaggcccc

SEQ ID NO: 3480 - RNA, 22 nt, Homo sapiens
  source 1..22: mol_type = transcribed RNA
gcccaaaggtgaattttttggg

SEQ ID NO: 3481 - RNA, 22 nt, Homo sapiens
  source 1..22: mol_type = transcribed RNA
cccaaaaaattcacctttgggc

SEQ ID NO: 3482 - RNA, 22 nt, Homo sapiens
  source 1..22: mol_type = transcribed RNA
caaagaattctccttttgggct

SEQ ID NO: 3483 - RNA, 22 nt, Homo sapiens
  source 1..22: mol_type = transcribed RNA
agcccaaaaggagaattctttg

SEQ ID NO: 3484 - RNA, 22 nt, Homo sapiens
  source 1..22: mol_type = transcribed RNA
ctgcaatgtaagcacttcttac

SEQ ID NO: 3485 - RNA, 22 nt, Homo sapiens
  source 1..22: mol_type = transcribed RNA
gtaagaagtgcttacattgcag

SEQ ID NO: 3486 - RNA, 23 nt, Homo sapiens
  source 1..23: mol_type = transcribed RNA
aaaagtgcttacagtgcaggtag

SEQ ID NO: 3487 - RNA, 23 nt, Homo sapiens
  source 1..23: mol_type = transcribed RNA
ctacctgcactgtaagcactttt

SEQ ID NO: 3488 - RNA, 22 nt, Homo sapiens
  source 1..22: mol_type = transcribed RNA
actgtagtatgggcacttccag

SEQ ID NO: 3489 - RNA, 22 nt, Homo sapiens
  source 1..22: mol_type = transcribed RNA
ctggaagtgcccatactacagt

SEQ ID NO: 3490 - RNA, 23 nt, Homo sapiens
  source 1..23: mol_type = transcribed RNA
caaagtgctcatagtgcaggtag

SEQ ID NO: 3491 - RNA, 23 nt, Homo sapiens
  source 1..23: mol_type = transcribed RNA
ctacctgcactatgagcactttg

SEQ ID NO: 3492 - RNA, 23 nt, Homo sapiens
  source 1..23: mol_type = transcribed RNA
ggggtattgtttccgctgccagg

SEQ ID NO: 3493 - RNA, 23 nt, Homo sapiens
  source 1..23: mol_type = transcribed RNA
cctggcagcggaaacaatacccc

SEQ ID NO: 3494 - RNA, 23 nt, Homo sapiens
  source 1..23: mol_type = transcribed RNA
tagcagcgggaacagttctgcag

SEQ ID NO: 3495 - RNA, 23 nt, Homo sapiens
  source 1..23: mol_type = transcribed RNA
ctgcagaactgttcccgctgcta

SEQ ID NO: 3496 - RNA, 21 nt, Homo sapiens
  source 1..21: mol_type = transcribed RNA
cgagcctcaagcaagggactt

SEQ ID NO: 3497 - RNA, 21 nt, Homo sapiens
  source 1..21: mol_type = transcribed RNA
aagtcccttgcttgaggctcg

SEQ ID NO: 3498 - RNA, 22 nt, Homo sapiens
  source 1..22: mol_type = transcribed RNA
tagtcccttccttgaagcggtc

SEQ ID NO: 3499 - RNA, 22 nt, Homo sapiens
  source 1..22: mol_type = transcribed RNA
gaccgcttcaaggaagggacta

SEQ ID NO: 3500 - RNA, 21 nt, Homo sapiens
  source 1..21: mol_type = transcribed RNA
actggacttggagtcagaagg

SEQ ID NO: 3501 - RNA, 21 nt, Homo sapiens
  source 1..21: mol_type = transcribed RNA
ccttctgactccaagtccagt

SEQ ID NO: 3502 - RNA, 22 nt, Homo sapiens
  source 1..22: mol_type = transcribed RNA
ctcctgactccaggtcctgtgt

SEQ ID NO: 3503 - RNA, 22 nt, Homo sapiens
  source 1..22: mol_type = transcribed RNA
acacaggacctggagtcaggag

SEQ ID NO: 3504 - RNA, 22 nt, Homo sapiens
  source 1..22: mol_type = transcribed RNA
tttgttcgttcggctcgcgtga

SEQ ID NO: 3505 - RNA, 22 nt, Homo sapiens
  source 1..22: mol_type = transcribed RNA
tcacgcgagccgaacgaacaaa

SEQ ID NO: 3506 - RNA, 22 nt, Homo sapiens
  source 1..22: mol_type = transcribed RNA
acggatgtttgagcatgtgcta

SEQ ID NO: 3507 - RNA, 22 nt, Homo sapiens
  source 1..22: mol_type = transcribed RNA
tagcacatgctcaaacatccgt

SEQ ID NO: 3508 - RNA, 23 nt, Homo sapiens
  source 1..23: mol_type = transcribed RNA
tcaaatgctcagactcctgtggt

SEQ ID NO: 3509 - RNA, 23 nt, Homo sapiens
  source 1..23: mol_type = transcribed RNA
accacaggagtctgagcatttga

SEQ ID NO: 3510 - RNA, 22 nt, Homo sapiens
  source 1..22: mol_type = transcribed RNA
cggcaacaagaaactgcctgag

SEQ ID NO: 3511 - RNA, 22 nt, Homo sapiens
  source 1..22: mol_type = transcribed RNA
ctcaggcagtttcttgttgccg

SEQ ID NO: 3512 - RNA, 22 nt, Homo sapiens
  source 1..22: mol_type = transcribed RNA
taggtagtttcatgttgttggg

SEQ ID NO: 3513 - RNA, 22 nt, Homo sapiens
  source 1..22: mol_type = transcribed RNA
cccaacaacatgaaactaccta

SEQ ID NO: 3514 - RNA, 22 nt, Homo sapiens
  source 1..22: mol_type = transcribed RNA
caatgtttccacagtgcatcac

SEQ ID NO: 3515 - RNA, 22 nt, Homo sapiens
  source 1..22: mol_type = transcribed RNA
gtgatgcactgtggaaacattg

SEQ ID NO: 3516 - RNA, 21 nt, Homo sapiens
  source 1..21: mol_type = transcribed RNA
gtgcattgtagttgcattgca

SEQ ID NO: 3517 - RNA, 21 nt, Homo sapiens
  source 1..21: mol_type = transcribed RNA
tgcaatgcaactacaatgcac

SEQ ID NO: 3518 - RNA, 18 nt, Homo sapiens
  source 1..18: mol_type = transcribed RNA
atcccacctctgccacca

SEQ ID NO: 3519 - RNA, 18 nt, Homo sapiens
  source 1..18: mol_type = transcribed RNA
tggtggcagaggtgggat

SEQ ID NO: 3520 - RNA, 19 nt, Homo sapiens
  source 1..19: mol_type = transcribed RNA
atcccaccactgccaccat

SEQ ID NO: 3521 - RNA, 19 nt, Homo sapiens
  source 1..19: mol_type = transcribed RNA
atggtggcagtggtgggat

SEQ ID NO: 3522 - RNA, 22 nt, Homo sapiens
  source 1..22: mol_type = transcribed RNA
accttcctctccatgggtcttt

SEQ ID NO: 3523 - RNA, 22 nt, Homo sapiens
  source 1..22: mol_type = transcribed RNA
aaagacccatggagaggaaggt

SEQ ID NO: 3524 - RNA, 22 nt, Homo sapiens
  source 1..22: mol_type = transcribed RNA
aaagacccattgaggagaaggt

SEQ ID NO: 3525 - RNA, 22 nt, Homo sapiens
  source 1..22: mol_type = transcribed RNA
accttctcctcaatgggtcttt

SEQ ID NO: 3526 - RNA, 21 nt, Homo sapiens
  source 1..21: mol_type = transcribed RNA
aatgtagagattgatcaaaat

SEQ ID NO: 3527 - RNA, 21 nt, Homo sapiens
  source 1..21: mol_type = transcribed RNA
attttgatcaatctctacatt

SEQ ID NO: 3528 - RNA, 23 nt, Homo sapiens
  source 1..23: mol_type = transcribed RNA
acggaatatgtatacggaatata

SEQ ID NO: 3529 - RNA, 23 nt, Homo sapiens
  source 1..23: mol_type = transcribed RNA
tatattccgtatacatattccgt

SEQ ID NO: 3530 - RNA, 24 nt, Homo sapiens
  source 1..24: mol_type = transcribed RNA
agagctcacagctgtccttctcta

SEQ ID NO: 3531 - RNA, 24 nt, Homo sapiens
  source 1..24: mol_type = transcribed RNA
tagagaaggacagctgtgagctct

SEQ ID NO: 3532 - RNA, 22 nt, Homo sapiens
  source 1..22: mol_type = transcribed RNA
atcaaataaggactagtctgca

SEQ ID NO: 3533 - RNA, 22 nt, Homo sapiens
  source 1..22: mol_type = transcribed RNA
tgcagactagtccttatttgat

SEQ ID NO: 3534 - RNA, 23 nt, Homo sapiens
  source 1..23: mol_type = transcribed RNA
atgagactcatgtaaaacatctt

SEQ ID NO: 3535 - RNA, 23 nt, Homo sapiens
  source 1..23: mol_type = transcribed RNA
aagatgttttacatgagtctcat

SEQ ID NO: 3536 - RNA, 21 nt, Homo sapiens
  source 1..21: mol_type = transcribed RNA
atggaatgtatatacggaata

SEQ ID NO: 3537 - RNA, 21 nt, Homo sapiens
  source 1..21: mol_type = transcribed RNA
tattccgtatatacattccat

SEQ ID NO: 3538 - RNA, 22 nt, Homo sapiens
  source 1..22: mol_type = transcribed RNA
attgtagaacctaagattggcc

SEQ ID NO: 3539 - RNA, 22 nt, Homo sapiens
  source 1..22: mol_type = transcribed RNA
ggccaatcttaggttctacaat

SEQ ID NO: 3540 - RNA, 22 nt, Homo sapiens
  source 1..22: mol_type = transcribed RNA
catctctaaggaactcccccaa

SEQ ID NO: 3541 - RNA, 22 nt, Homo sapiens
  source 1..22: mol_type = transcribed RNA
ttgggggagttccttagagatg

SEQ ID NO: 3542 - RNA, 23 nt, Homo sapiens
  source 1..23: mol_type = transcribed RNA
tatggggcttctgtagagatttc

SEQ ID NO: 3543 - RNA, 23 nt, Homo sapiens
  source 1..23: mol_type = transcribed RNA
gaaatctctacagaagccccata

SEQ ID NO: 3544 - RNA, 20 nt, Homo sapiens
  source 1..20: mol_type = transcribed RNA
ccgtgtttcccccacgcttt

SEQ ID NO: 3545 - RNA, 20 nt, Homo sapiens
  source 1..20: mol_type = transcribed RNA
aaagcgtgggggaaacacgg

SEQ ID NO: 3546 - RNA, 15 nt, Homo sapiens
  source 1..15: mol_type = transcribed RNA
aggagatcctgggtt

SEQ ID NO: 3547 - RNA, 15 nt, Homo sapiens
  source 1..15: mol_type = transcribed RNA
aacccaggatctcct

SEQ ID NO: 3548 - RNA, 22 nt, Homo sapiens
  source 1..22: mol_type = transcribed RNA
ctcgtgggctctggccacggcc

SEQ ID NO: 3549 - RNA, 22 nt, Homo sapiens
  source 1..22: mol_type = transcribed RNA
ggccgtggccagagcccacgag

SEQ ID NO: 3550 - RNA, 22 nt, Homo sapiens
  source 1..22: mol_type = transcribed RNA
cagtggccagagccctgcagtg

SEQ ID NO: 3551 - RNA, 22 nt, Homo sapiens
  source 1..22: mol_type = transcribed RNA
cactgcagggctctggccactg

SEQ ID NO: 3552 - RNA, 22 nt, Homo sapiens
  source 1..22: mol_type = transcribed RNA
ctgcagagtttgtacggaccgg

SEQ ID NO: 3553 - RNA, 22 nt, Homo sapiens
  source 1..22: mol_type = transcribed RNA
ccggtccgtacaaactctgcag

SEQ ID NO: 3554 - RNA, 20 nt, Homo sapiens
  source 1..20: mol_type = transcribed RNA
tccgtacaaactctgctgtg

SEQ ID NO: 3555 - RNA, 20 nt, Homo sapiens
  source 1..20: mol_type = transcribed RNA
cacagcagagtttgtacgga

SEQ ID NO: 3556 - RNA, 22 nt, Homo sapiens
  source 1..22: mol_type = transcribed RNA
cttccccccagtaatcttcatc

SEQ ID NO: 3557 - RNA, 22 nt, Homo sapiens
  source 1..22: mol_type = transcribed RNA
gatgaagattactggggggaag

SEQ ID NO: 3558 - RNA, 23 nt, Homo sapiens
  source 1..23: mol_type = transcribed RNA
tgaggatatggcagggaagggga

SEQ ID NO: 3559 - RNA, 23 nt, Homo sapiens
  source 1..23: mol_type = transcribed RNA
tccccttccctgccatatcctca

SEQ ID NO: 3560 - RNA, 23 nt, Homo sapiens
  source 1..23: mol_type = transcribed RNA
ttttgcatgaccctgggagtagg

SEQ ID NO: 3561 - RNA, 23 nt, Homo sapiens
  source 1..23: mol_type = transcribed RNA
cctactcccagggtcatgcaaaa

SEQ ID NO: 3562 - RNA, 22 nt, Homo sapiens
  source 1..22: mol_type = transcribed RNA
gactcactcacaggattgtgca

SEQ ID NO: 3563 - RNA, 22 nt, Homo sapiens
  source 1..22: mol_type = transcribed RNA
tgcacaatcctgtgagtgagtc

SEQ ID NO: 3564 - RNA, 22 nt, Homo sapiens
  source 1..22: mol_type = transcribed RNA
acacagtgcttcatccactact

SEQ ID NO: 3565 - RNA, 22 nt, Homo sapiens
  source 1..22: mol_type = transcribed RNA
agtagtggatgaagcactgtgt

SEQ ID NO: 3566 - RNA, 22 nt, Homo sapiens
  source 1..22: mol_type = transcribed RNA
tagtggatgatgcactctgtgc

SEQ ID NO: 3567 - RNA, 22 nt, Homo sapiens
  source 1..22: mol_type = transcribed RNA
gcacagagtgcatcatccacta

SEQ ID NO: 3568 - RNA, 21 nt, Homo sapiens
  source 1..21: mol_type = transcribed RNA
tgatgatacaggtggaggtag

SEQ ID NO: 3569 - RNA, 21 nt, Homo sapiens
  source 1..21: mol_type = transcribed RNA
ctacctccacctgtatcatca

SEQ ID NO: 3570 - RNA, 22 nt, Homo sapiens
  source 1..22: mol_type = transcribed RNA
ctacttctacctgtgttatcat

SEQ ID NO: 3571 - RNA, 22 nt, Homo sapiens
  source 1..22: mol_type = transcribed RNA
atgataacacaggtagaagtag

SEQ ID NO: 3572 - RNA, 22 nt, Homo sapiens
  source 1..22: mol_type = transcribed RNA
tgcgacattggaagtagtatca

SEQ ID NO: 3573 - RNA, 22 nt, Homo sapiens
  source 1..22: mol_type = transcribed RNA
tgatactacttccaatgtcgca

SEQ ID NO: 3574 - RNA, 21 nt, Homo sapiens
  source 1..21: mol_type = transcribed RNA
ttagacctagtacacgtcctt

SEQ ID NO: 3575 - RNA, 21 nt, Homo sapiens
  source 1..21: mol_type = transcribed RNA
aaggacgtgtactaggtctaa

SEQ ID NO: 3576 - RNA, 22 nt, Homo sapiens
  source 1..22: mol_type = transcribed RNA
tttcctaccctacctgaagact

SEQ ID NO: 3577 - RNA, 22 nt, Homo sapiens
  source 1..22: mol_type = transcribed RNA
agtcttcaggtagggtaggaaa

SEQ ID NO: 3578 - RNA, 22 nt, Homo sapiens
  source 1..22: mol_type = transcribed RNA
atctgtaagagaaagtaaatga

SEQ ID NO: 3579 - RNA, 22 nt, Homo sapiens
  source 1..22: mol_type = transcribed RNA
tcatttactttctcttacagat

SEQ ID NO: 3580 - RNA, 24 nt, Homo sapiens
  source 1..24: mol_type = transcribed RNA
cccggacaggcgttcgtgcgacgt

SEQ ID NO: 3581 - RNA, 24 nt, Homo sapiens
  source 1..24: mol_type = transcribed RNA
acgtcgcacgaacgcctgtccggg

SEQ ID NO: 3582 - RNA, 23 nt, Homo sapiens
  source 1..23: mol_type = transcribed RNA
acctggacccagcgtagacaaag

SEQ ID NO: 3583 - RNA, 23 nt, Homo sapiens
  source 1..23: mol_type = transcribed RNA
ctttgtctacgctgggtccaggt

SEQ ID NO: 3584 - RNA, 22 nt, Homo sapiens
  source 1..22: mol_type = transcribed RNA
accaagtctgcgtcatcctctc

SEQ ID NO: 3585 - RNA, 22 nt, Homo sapiens
  source 1..22: mol_type = transcribed RNA
gagaggatgacgcagacttggt

SEQ ID NO: 3586 - RNA, 23 nt, Homo sapiens
  source 1..23: mol_type = transcribed RNA
agtggatgatggagactcggtac

SEQ ID NO: 3587 - RNA, 23 nt, Homo sapiens
  source 1..23: mol_type = transcribed RNA
gtaccgagtctccatcatccact

SEQ ID NO: 3588 - RNA, 24 nt, Homo sapiens
  source 1..24: mol_type = transcribed RNA
gttccacactgacactgcagaagt

SEQ ID NO: 3589 - RNA, 24 nt, Homo sapiens
  source 1..24: mol_type = transcribed RNA
acttctgcagtgtcagtgtggaac

SEQ ID NO: 3590 - RNA, 24 nt, Homo sapiens
  source 1..24: mol_type = transcribed RNA
cctgctggtcaggagtggatactg

SEQ ID NO: 3591 - RNA, 24 nt, Homo sapiens
  source 1..24: mol_type = transcribed RNA
cagtatccactcctgaccagcagg

SEQ ID NO: 3592 - RNA, 23 nt, Homo sapiens
  source 1..23: mol_type = transcribed RNA
gagggtcttgggagggatgtgac

SEQ ID NO: 3593 - RNA, 23 nt, Homo sapiens
  source 1..23: mol_type = transcribed RNA
gtcacatccctcccaagaccctc

SEQ ID NO: 3594 - RNA, 22 nt, Homo sapiens
  source 1..22: mol_type = transcribed RNA
atatacagggggagactcttat

SEQ ID NO: 3595 - RNA, 22 nt, Homo sapiens
  source 1..22: mol_type = transcribed RNA
ataagagtctccccctgtatat

SEQ ID NO: 3596 - RNA, 22 nt, Homo sapiens
  source 1..22: mol_type = transcribed RNA
atatacagggggagactctcat

SEQ ID NO: 3597 - RNA, 22 nt, Homo sapiens
  source 1..22: mol_type = transcribed RNA
atgagagtctccccctgtatat

SEQ ID NO: 3598 - RNA, 21 nt, Homo sapiens
  source 1..21: mol_type = transcribed RNA
agaggataccctttgtatgtt

SEQ ID NO: 3599 - RNA, 21 nt, Homo sapiens
  source 1..21: mol_type = transcribed RNA
aacatacaaagggtatcctct

SEQ ID NO: 3600 - RNA, 22 nt, Homo sapiens
  source 1..22: mol_type = transcribed RNA
tctacaaaggaaagcgctttct

SEQ ID NO: 3601 - RNA, 22 nt, Homo sapiens
  source 1..22: mol_type = transcribed RNA
agaaagcgctttcctttgtaga

SEQ ID NO: 3602 - RNA, 22 nt, Homo sapiens
  source 1..22: mol_type = transcribed RNA
tcaaaactgaggggcattttct

SEQ ID NO: 3603 - RNA, 22 nt, Homo sapiens
  source 1..22: mol_type = transcribed RNA
agaaaatgcccctcagttttga

SEQ ID NO: 3604 - RNA, 24 nt, Homo sapiens
  source 1..24: mol_type = transcribed RNA
ttctccaaaagaaagcactttctg

SEQ ID NO: 3605 - RNA, 24 nt, Homo sapiens
  source 1..24: mol_type = transcribed RNA
cagaaagtgctttcttttggagaa

SEQ ID NO: 3606 - RNA, 23 nt, Homo sapiens
  source 1..23: mol_type = transcribed RNA
ttctcgaggaaagaagcactttc

SEQ ID NO: 3607 - RNA, 23 nt, Homo sapiens
  source 1..23: mol_type = transcribed RNA
gaaagtgcttctttcctcgagaa

SEQ ID NO: 3608 - RNA, 22 nt, Homo sapiens
  source 1..22: mol_type = transcribed RNA
cctctagatggaagcactgtct

SEQ ID NO: 3609 - RNA, 22 nt, Homo sapiens
  source 1..22: mol_type = transcribed RNA
agacagtgcttccatctagagg

SEQ ID NO: 3610 - RNA, 22 nt, Homo sapiens
  source 1..22: mol_type = transcribed RNA
atcgtgcatccctttagagtgt

SEQ ID NO: 3611 - RNA, 22 nt, Homo sapiens
  source 1..22: mol_type = transcribed RNA
acactctaaagggatgcacgat

SEQ ID NO: 3612 - RNA, 22 nt, Homo sapiens
  source 1..22: mol_type = transcribed RNA
atcgtgcatccctttagagtgt

SEQ ID NO: 3613 - RNA, 22 nt, Homo sapiens
  source 1..22: mol_type = transcribed RNA
acactctaaagggatgcacgat

SEQ ID NO: 3614 - RNA, 22 nt, Homo sapiens
  source 1..22: mol_type = transcribed RNA
atcgtgcatccttttagagtgt

SEQ ID NO: 3615 - RNA, 22 nt, Homo sapiens
  source 1..22: mol_type = transcribed RNA
acactctaaaaggatgcacgat

SEQ ID NO: 3616 - RNA, 22 nt, Homo sapiens
  source 1..22: mol_type = transcribed RNA
caaagcgctcccctttagaggt

SEQ ID NO: 3617 - RNA, 22 nt, Homo sapiens
  source 1..22: mol_type = transcribed RNA
acctctaaaggggagcgctttg

SEQ ID NO: 3618 - RNA, 23 nt, Homo sapiens
  source 1..23: mol_type = transcribed RNA
caaagcgcttctctttagagtgt

SEQ ID NO: 3619 - RNA, 23 nt, Homo sapiens
  source 1..23: mol_type = transcribed RNA
acactctaaagagaagcgctttg

SEQ ID NO: 3620 - RNA, 23 nt, Homo sapiens
  source 1..23: mol_type = transcribed RNA
tctctggagggaagcactttctg

SEQ ID NO: 3621 - RNA, 23 nt, Homo sapiens
  source 1..23: mol_type = transcribed RNA
cagaaagtgcttccctccagaga

SEQ ID NO: 3622 - RNA, 21 nt, Homo sapiens
  source 1..21: mol_type = transcribed RNA
gaaagcgcttctctttagagg

SEQ ID NO: 3623 - RNA, 21 nt, Homo sapiens
  source 1..21: mol_type = transcribed RNA
cctctaaagagaagcgctttc

SEQ ID NO: 3624 - RNA, 22 nt, Homo sapiens
  source 1..22: mol_type = transcribed RNA
ctctagagggaagcactttctc

SEQ ID NO: 3625 - RNA, 22 nt, Homo sapiens
  source 1..22: mol_type = transcribed RNA
gagaaagtgcttccctctagag

SEQ ID NO: 3626 - RNA, 22 nt, Homo sapiens
  source 1..22: mol_type = transcribed RNA
aaagtgcatccttttagagtgt

SEQ ID NO: 3627 - RNA, 22 nt, Homo sapiens
  source 1..22: mol_type = transcribed RNA
acactctaaaaggatgcacttt

SEQ ID NO: 3628 - RNA, 22 nt, Homo sapiens
  source 1..22: mol_type = transcribed RNA
ctctagagggaagcgctttctg

SEQ ID NO: 3629 - RNA, 22 nt, Homo sapiens
  source 1..22: mol_type = transcribed RNA
cagaaagcgcttccctctagag

SEQ ID NO: 3630 - RNA, 22 nt, Homo sapiens
  source 1..22: mol_type = transcribed RNA
caaagtgcctccctttagagtg

SEQ ID NO: 3631 - RNA, 22 nt, Homo sapiens
  source 1..22: mol_type = transcribed RNA
cactctaaagggaggcactttg

SEQ ID NO: 3632 - RNA, 22 nt, Homo sapiens
  source 1..22: mol_type = transcribed RNA
aagtgcctccttttagagtgtt

SEQ ID NO: 3633 - RNA, 22 nt, Homo sapiens
  source 1..22: mol_type = transcribed RNA
aacactctaaaaggaggcactt

SEQ ID NO: 3634 - RNA, 22 nt, Homo sapiens
  source 1..22: mol_type = transcribed RNA
ttctccaaaagggagcactttc

SEQ ID NO: 3635 - RNA, 22 nt, Homo sapiens
  source 1..22: mol_type = transcribed RNA
gaaagtgctcccttttggagaa

SEQ ID NO: 3636 - RNA, 22 nt, Homo sapiens
  source 1..22: mol_type = transcribed RNA
aaagtgcttccctttggactgt

SEQ ID NO: 3637 - RNA, 22 nt, Homo sapiens
  source 1..22: mol_type = transcribed RNA
acagtccaaagggaagcacttt

SEQ ID NO: 3638 - RNA, 21 nt, Homo sapiens
  source 1..21: mol_type = transcribed RNA
ctccagagggaagtactttct

SEQ ID NO: 3639 - RNA, 21 nt, Homo sapiens
  source 1..21: mol_type = transcribed RNA
agaaagtacttccctctggag

SEQ ID NO: 3640 - RNA, 22 nt, Homo sapiens
  source 1..22: mol_type = transcribed RNA
acaaagtgcttccctttagagt

SEQ ID NO: 3641 - RNA, 22 nt, Homo sapiens
  source 1..22: mol_type = transcribed RNA
actctaaagggaagcactttgt

SEQ ID NO: 3642 - RNA, 22 nt, Homo sapiens
  source 1..22: mol_type = transcribed RNA
ctacaaagggaagcactttctc

SEQ ID NO: 3643 - RNA, 22 nt, Homo sapiens
  source 1..22: mol_type = transcribed RNA
gagaaagtgcttccctttgtag

SEQ ID NO: 3644 - RNA, 22 nt, Homo sapiens
  source 1..22: mol_type = transcribed RNA
gaaggcgcttccctttagagcg

SEQ ID NO: 3645 - RNA, 22 nt, Homo sapiens
  source 1..22: mol_type = transcribed RNA
cgctctaaagggaagcgccttc

SEQ ID NO: 3646 - RNA, 21 nt, Homo sapiens
  source 1..21: mol_type = transcribed RNA
ctccagagggatgcactttct

SEQ ID NO: 3647 - RNA, 21 nt, Homo sapiens
  source 1..21: mol_type = transcribed RNA
agaaagtgcatccctctggag

SEQ ID NO: 3648 - RNA, 22 nt, Homo sapiens
  source 1..22: mol_type = transcribed RNA
ctctagagggaagcactttctg

SEQ ID NO: 3649 - RNA, 22 nt, Homo sapiens
  source 1..22: mol_type = transcribed RNA
cagaaagtgcttccctctagag

SEQ ID NO: 3650 - RNA, 22 nt, Homo sapiens
  source 1..22: mol_type = transcribed RNA
gaaagtgcttccttttagaggc

SEQ ID NO: 3651 - RNA, 22 nt, Homo sapiens
  source 1..22: mol_type = transcribed RNA
gcctctaaaaggaagcactttc

SEQ ID NO: 3652 - RNA, 23 nt, Homo sapiens
  source 1..23: mol_type = transcribed RNA
ctcttgagggaagcactttctgt

SEQ ID NO: 3653 - RNA, 23 nt, Homo sapiens
  source 1..23: mol_type = transcribed RNA
acagaaagtgcttccctcaagag

SEQ ID NO: 3654 - RNA, 22 nt, Homo sapiens
  source 1..22: mol_type = transcribed RNA
actggacttagggtcagaaggc

SEQ ID NO: 3655 - RNA, 22 nt, Homo sapiens
  source 1..22: mol_type = transcribed RNA
gccttctgaccctaagtccagt

SEQ ID NO: 3656 - RNA, 22 nt, Homo sapiens
  source 1..22: mol_type = transcribed RNA
aaacaaacatggtgcacttctt

SEQ ID NO: 3657 - RNA, 22 nt, Homo sapiens
  source 1..22: mol_type = transcribed RNA
aagaagtgcaccatgtttgttt

SEQ ID NO: 3658 - RNA, 22 nt, Homo sapiens
  source 1..22: mol_type = transcribed RNA
gaagttgcccatgttattttcg

SEQ ID NO: 3659 - RNA, 22 nt, Homo sapiens
  source 1..22: mol_type = transcribed RNA
cgaaaataacatgggcaacttc

SEQ ID NO: 3660 - RNA, 21 nt, Homo sapiens
  source 1..21: mol_type = transcribed RNA
aatcattcacggacaacactt

SEQ ID NO: 3661 - RNA, 21 nt, Homo sapiens
  source 1..21: mol_type = transcribed RNA
aagtgttgtccgtgaatgatt

SEQ ID NO: 3662 - RNA, 22 nt, Homo sapiens
  source 1..22: mol_type = transcribed RNA
gaagttgttcgtggtggattcg

SEQ ID NO: 3663 - RNA, 22 nt, Homo sapiens
  source 1..22: mol_type = transcribed RNA
cgaatccaccacgaacaacttc

SEQ ID NO: 3664 - RNA, 23 nt, Homo sapiens
  source 1..23: mol_type = transcribed RNA
cctccgtgttacctgtcctctag

SEQ ID NO: 3665 - RNA, 23 nt, Homo sapiens
  source 1..23: mol_type = transcribed RNA
ctagaggacaggtaacacggagg

SEQ ID NO: 3666 - RNA, 23 nt, Homo sapiens
  source 1..23: mol_type = transcribed RNA
tgaggatggatagcaaggaagcc

SEQ ID NO: 3667 - RNA, 23 nt, Homo sapiens
  source 1..23: mol_type = transcribed RNA
ggcttccttgctatccatcctca

SEQ ID NO: 3668 - RNA, 22 nt, Homo sapiens
  source 1..22: mol_type = transcribed RNA
ttcagatcccagcggtgcctct

SEQ ID NO: 3669 - RNA, 22 nt, Homo sapiens
  source 1..22: mol_type = transcribed RNA
agaggcaccgctgggatctgaa

SEQ ID NO: 3670 - RNA, 19 nt, Homo sapiens
  source 1..19: mol_type = transcribed RNA
gtcctaggaggctcctctg

SEQ ID NO: 3671 - RNA, 19 nt, Homo sapiens
  source 1..19: mol_type = transcribed RNA
cagaggagcctcctaggac

SEQ ID NO: 3672 - RNA, 21 nt, Homo sapiens
  source 1..21: mol_type = transcribed RNA
caattctcaaaggagcctccc

SEQ ID NO: 3673 - RNA, 21 nt, Homo sapiens
  source 1..21: mol_type = transcribed RNA
gggaggctcctttgagaattg

SEQ ID NO: 3674 - RNA, 21 nt, Homo sapiens
  source 1..21: mol_type = transcribed RNA
gttggggtgcaggggtctgct

SEQ ID NO: 3675 - RNA, 21 nt, Homo sapiens
  source 1..21: mol_type = transcribed RNA
agcagacccctgcaccccaac

SEQ ID NO: 3676 - RNA, 22 nt, Homo sapiens
  source 1..22: mol_type = transcribed RNA
tttccggctcgcgtgggtgtgt

SEQ ID NO: 3677 - RNA, 22 nt, Homo sapiens
  source 1..22: mol_type = transcribed RNA
acacacccacgcgagccggaaa

SEQ ID NO: 3678 - RNA, 23 nt, Homo sapiens
  source 1..23: mol_type = transcribed RNA
tgagtgtgtgtgtgtgagtgtgt

SEQ ID NO: 3679 - RNA, 23 nt, Homo sapiens
  source 1..23: mol_type = transcribed RNA
acacactcacacacacacactca

SEQ ID NO: 3680 - RNA, 22 nt, Homo sapiens
  source 1..22: mol_type = transcribed RNA
agtgggaggccagggcacggca

SEQ ID NO: 3681 - RNA, 22 nt, Homo sapiens
  source 1..22: mol_type = transcribed RNA
tgccgtgccctggcctcccact

SEQ ID NO: 3682 - RNA, 20 nt, Homo sapiens
  source 1..20: mol_type = transcribed RNA
tgagccctgtcctcccgcag

SEQ ID NO: 3683 - RNA, 20 nt, Homo sapiens
  source 1..20: mol_type = transcribed RNA
ctgcgggaggacagggctca

SEQ ID NO: 3684 - RNA, 23 nt, Homo sapiens
  source 1..23: mol_type = transcribed RNA
aagtgccgccatcttttgagtgt

SEQ ID NO: 3685 - RNA, 23 nt, Homo sapiens
  source 1..23: mol_type = transcribed RNA
acactcaaaagatggcggcactt

SEQ ID NO: 3686 - RNA, 20 nt, Homo sapiens
  source 1..20: mol_type = transcribed RNA
actcaaactgtgggggcact

SEQ ID NO: 3687 - RNA, 20 nt, Homo sapiens
  source 1..20: mol_type = transcribed RNA
agtgcccccacagtttgagt

SEQ ID NO: 3688 - RNA, 23 nt, Homo sapiens
  source 1..23: mol_type = transcribed RNA
aagtgcccccacagtttgagtgc

SEQ ID NO: 3689 - RNA, 23 nt, Homo sapiens
  source 1..23: mol_type = transcribed RNA
gcactcaaactgtgggggcactt

SEQ ID NO: 3690 - RNA, 22 nt, Homo sapiens
  source 1..22: mol_type = transcribed RNA
actcaaaagatggcggcacttt

SEQ ID NO: 3691 - RNA, 22 nt, Homo sapiens
  source 1..22: mol_type = transcribed RNA
aaagtgccgccatcttttgagt

SEQ ID NO: 3692 - RNA, 22 nt, Homo sapiens
  source 1..22: mol_type = transcribed RNA
aaacctgtgttgttcaagagtc

SEQ ID NO: 3693 - RNA, 22 nt, Homo sapiens
  source 1..22: mol_type = transcribed RNA
gactcttgaacaacacaggttt

SEQ ID NO: 3694 - RNA, 22 nt, Homo sapiens
  source 1..22: mol_type = transcribed RNA
acagtagagggaggaatcgcag

SEQ ID NO: 3695 - RNA, 22 nt, Homo sapiens
  source 1..22: mol_type = transcribed RNA
ctgcgattcctccctctactgt

SEQ ID NO: 3696 - RNA, 22 nt, Homo sapiens
  source 1..22: mol_type = transcribed RNA
gtgaaatgtttaggaccactag

SEQ ID NO: 3697 - RNA, 22 nt, Homo sapiens
  source 1..22: mol_type = transcribed RNA
ctagtggtcctaaacatttcac

SEQ ID NO: 3698 - RNA, 23 nt, Homo sapiens
  source 1..23: mol_type = transcribed RNA
ttgaactgttaagaaccactgga

SEQ ID NO: 3699 - RNA, 23 nt, Homo sapiens
  source 1..23: mol_type = transcribed RNA
tccagtggttcttaacagttcaa

SEQ ID NO: 3700 - RNA, 22 nt, Homo sapiens
  source 1..22: mol_type = transcribed RNA
tagtggtcctaaacatttcaca

SEQ ID NO: 3701 - RNA, 22 nt, Homo sapiens
  source 1..22: mol_type = transcribed RNA
tgtgaaatgtttaggaccacta

SEQ ID NO: 3702 - RNA, 21 nt, Homo sapiens
  source 1..21: mol_type = transcribed RNA
tgcaggaccaagatgagccct

SEQ ID NO: 3703 - RNA, 21 nt, Homo sapiens
  source 1..21: mol_type = transcribed RNA
agggctcatcttggtcctgca

SEQ ID NO: 3704 - RNA, 21 nt, Homo sapiens
  source 1..21: mol_type = transcribed RNA
ctcccacatgcagggtttgca

SEQ ID NO: 3705 - RNA, 21 nt, Homo sapiens
  source 1..21: mol_type = transcribed RNA
tgcaaaccctgcatgtgggag

SEQ ID NO: 3706 - RNA, 21 nt, Homo sapiens
  source 1..21: mol_type = transcribed RNA
catcccttgcatggtggaggg

SEQ ID NO: 3707 - RNA, 21 nt, Homo sapiens
  source 1..21: mol_type = transcribed RNA
ccctccaccatgcaagggatg

SEQ ID NO: 3708 - RNA, 22 nt, Homo sapiens
  source 1..22: mol_type = transcribed RNA
aaaatgaaatgagcccagccca

SEQ ID NO: 3709 - RNA, 22 nt, Homo sapiens
  source 1..22: mol_type = transcribed RNA
tgggctgggctcatttcatttt

SEQ ID NO: 3710 - RNA, 21 nt, Homo sapiens
  source 1..21: mol_type = transcribed RNA
agccgcggggatcgccgaggg

SEQ ID NO: 3711 - RNA, 21 nt, Homo sapiens
  source 1..21: mol_type = transcribed RNA
ccctcggcgatccccgcggct

SEQ ID NO: 3712 - RNA, 19 nt, Homo sapiens
  source 1..19: mol_type = transcribed RNA
agggacctgagtgtctaag

SEQ ID NO: 3713 - RNA, 19 nt, Homo sapiens
  source 1..19: mol_type = transcribed RNA
cttagacactcaggtccct

SEQ ID NO: 3714 - RNA, 19 nt, Homo sapiens
  source 1..19: mol_type = transcribed RNA
aggtgtgtctgtagagtcc

SEQ ID NO: 3715 - RNA, 19 nt, Homo sapiens
  source 1..19: mol_type = transcribed RNA
ggactctacagacacacct

SEQ ID NO: 3716 - RNA, 24 nt, Homo sapiens
  source 1..24: mol_type = transcribed RNA
catagcccggtcgctggtacatga

SEQ ID NO: 3717 - RNA, 24 nt, Homo sapiens
  source 1..24: mol_type = transcribed RNA
tcatgtaccagcgaccgggctatg

SEQ ID NO: 3718 - RNA, 18 nt, Homo sapiens
  source 1..18: mol_type = transcribed RNA
cggctggaggtgtgagga

SEQ ID NO: 3719 - RNA, 18 nt, Homo sapiens
  source 1..18: mol_type = transcribed RNA
tcctcacacctccagccg

SEQ ID NO: 3720 - RNA, 18 nt, Homo sapiens
  source 1..18: mol_type = transcribed RNA
ctaagaagttgactgaag

SEQ ID NO: 3721 - RNA, 18 nt, Homo sapiens
  source 1..18: mol_type = transcribed RNA
cttcagtcaacttcttag

SEQ ID NO: 3722 - RNA, 19 nt, Homo sapiens
  source 1..19: mol_type = transcribed RNA
gactggacaagctgaggaa

SEQ ID NO: 3723 - RNA, 19 nt, Homo sapiens
  source 1..19: mol_type = transcribed RNA
ttcctcagcttgtccagtc

SEQ ID NO: 3724 - RNA, 21 nt, Homo sapiens
  source 1..21: mol_type = transcribed RNA
gcttgtcgctgcggtgttgct

SEQ ID NO: 3725 - RNA, 21 nt, Homo sapiens
  source 1..21: mol_type = transcribed RNA
agcaacaccgcagcgacaagc

SEQ ID NO: 3726 - RNA, 17 nt, Homo sapiens
  source 1..17: mol_type = transcribed RNA
ggcgggtgcgggggtgg

SEQ ID NO: 3727 - RNA, 17 nt, Homo sapiens
  source 1..17: mol_type = transcribed RNA
ccacccccgcacccgcc

SEQ ID NO: 3728 - RNA, 21 nt, Homo sapiens
  source 1..21: mol_type = transcribed RNA
tgtgtcccattattggtgatt

SEQ ID NO: 3729 - RNA, 21 nt, Homo sapiens
  source 1..21: mol_type = transcribed RNA
aatcaccaataatgggacaca

SEQ ID NO: 3730 - RNA, 22 nt, Homo sapiens
  source 1..22: mol_type = transcribed RNA
tttaagaaaacaccatggagat

SEQ ID NO: 3731 - RNA, 22 nt, Homo sapiens
  source 1..22: mol_type = transcribed RNA
atctccatggtgttttcttaaa

SEQ ID NO: 3732 - RNA, 22 nt, Homo sapiens
  source 1..22: mol_type = transcribed RNA
gctatttcacgacaccagggtt

SEQ ID NO: 3733 - RNA, 22 nt, Homo sapiens
  source 1..22: mol_type = transcribed RNA
aaccctggtgtcgtgaaatagc

SEQ ID NO: 3734 - RNA, 23 nt, Homo sapiens
  source 1..23: mol_type = transcribed RNA
agctggtgttgtgaatcaggccg

SEQ ID NO: 3735 - RNA, 23 nt, Homo sapiens
  source 1..23: mol_type = transcribed RNA
cggcctgattcacaacaccagct

SEQ ID NO: 3736 - RNA, 21 nt, Homo sapiens
  source 1..21: mol_type = transcribed RNA
aataatacatggttgatcttt

SEQ ID NO: 3737 - RNA, 21 nt, Homo sapiens
  source 1..21: mol_type = transcribed RNA
aaagatcaaccatgtattatt

SEQ ID NO: 3738 - RNA, 22 nt, Homo sapiens
  source 1..22: mol_type = transcribed RNA
agatcgaccgtgttatattcgc

SEQ ID NO: 3739 - RNA, 22 nt, Homo sapiens
  source 1..22: mol_type = transcribed RNA
gcgaatataacacggtcgatct

SEQ ID NO: 3740 - RNA, 22 nt, Homo sapiens
  source 1..22: mol_type = transcribed RNA
aatcatgtgcagtgccaatatg

SEQ ID NO: 3741 - RNA, 22 nt, Homo sapiens
  source 1..22: mol_type = transcribed RNA
catattggcactgcacatgatt

SEQ ID NO: 3742 - RNA, 23 nt, Homo sapiens
  source 1..23: mol_type = transcribed RNA
tttggcactagcacatttttgct

SEQ ID NO: 3743 - RNA, 23 nt, Homo sapiens
  source 1..23: mol_type = transcribed RNA
agcaaaaatgtgctagtgccaaa

SEQ ID NO: 3744 - RNA, 22 nt, Homo sapiens
  source 1..22: mol_type = transcribed RNA
tcctgtactgagctgccccgag

SEQ ID NO: 3745 - RNA, 22 nt, Homo sapiens
  source 1..22: mol_type = transcribed RNA
ctcggggcagctcagtacagga

SEQ ID NO: 3746 - RNA, 22 nt, Homo sapiens
  source 1..22: mol_type = transcribed RNA
gctacttcacaacaccagggcc

SEQ ID NO: 3747 - RNA, 22 nt, Homo sapiens
  source 1..22: mol_type = transcribed RNA
ggccctggtgttgtgaagtagc

SEQ ID NO: 3748 - RNA, 22 nt, Homo sapiens
  source 1..22: mol_type = transcribed RNA
catcatcgtctcaaatgagtct

SEQ ID NO: 3749 - RNA, 22 nt, Homo sapiens
  source 1..22: mol_type = transcribed RNA
agactcatttgagacgatgatg

SEQ ID NO: 3750 - RNA, 23 nt, Homo sapiens
  source 1..23: mol_type = transcribed RNA
actccatttgttttgatgatgga

SEQ ID NO: 3751 - RNA, 23 nt, Homo sapiens
  source 1..23: mol_type = transcribed RNA
tccatcatcaaaacaaatggagt

SEQ ID NO: 3752 - RNA, 22 nt, Homo sapiens
  source 1..22: mol_type = transcribed RNA
ctcctacatattagcattaaca

SEQ ID NO: 3753 - RNA, 22 nt, Homo sapiens
  source 1..22: mol_type = transcribed RNA
tgttaatgctaatatgtaggag

SEQ ID NO: 3754 - RNA, 23 nt, Homo sapiens
  source 1..23: mol_type = transcribed RNA
ttaatgctaatcgtgataggggt

SEQ ID NO: 3755 - RNA, 23 nt, Homo sapiens
  source 1..23: mol_type = transcribed RNA
acccctatcacgattagcattaa

SEQ ID NO: 3756 - RNA, 22 nt, Homo sapiens
  source 1..22: mol_type = transcribed RNA
agatcagaaggtgattgtggct

SEQ ID NO: 3757 - RNA, 22 nt, Homo sapiens
  source 1..22: mol_type = transcribed RNA
agccacaatcaccttctgatct

SEQ ID NO: 3758 - RNA, 22 nt, Homo sapiens
  source 1..22: mol_type = transcribed RNA
tactgcagacgtggcaatcatg

SEQ ID NO: 3759 - RNA, 22 nt, Homo sapiens
  source 1..22: mol_type = transcribed RNA
catgattgccacgtctgcagta

SEQ ID NO: 3760 - RNA, 21 nt, Homo sapiens
  source 1..21: mol_type = transcribed RNA
gttagggccaacatctcttgg

SEQ ID NO: 3761 - RNA, 21 nt, Homo sapiens
  source 1..21: mol_type = transcribed RNA
ccaagagatgttggccctaac

SEQ ID NO: 3762 - RNA, 21 nt, Homo sapiens
  source 1..21: mol_type = transcribed RNA
aacatagaggaaattccacgt

SEQ ID NO: 3763 - RNA, 21 nt, Homo sapiens
  source 1..21: mol_type = transcribed RNA
acgtggaatttcctctatgtt

SEQ ID NO: 3764 - RNA, 21 nt, Homo sapiens
  source 1..21: mol_type = transcribed RNA
ggtggatattccttctatgtt

SEQ ID NO: 3765 - RNA, 21 nt, Homo sapiens
  source 1..21: mol_type = transcribed RNA
aacatagaaggaatatccacc

SEQ ID NO: 3766 - RNA, 23 nt, Homo sapiens
  source 1..23: mol_type = transcribed RNA
tcatagccctgtacaatgctgct

SEQ ID NO: 3767 - RNA, 23 nt, Homo sapiens
  source 1..23: mol_type = transcribed RNA
agcagcattgtacagggctatga

SEQ ID NO: 3768 - RNA, 22 nt, Homo sapiens
  source 1..22: mol_type = transcribed RNA
taacactgtctggtaaagatgg

SEQ ID NO: 3769 - RNA, 22 nt, Homo sapiens
  source 1..22: mol_type = transcribed RNA
ccatctttaccagacagtgtta

SEQ ID NO: 3770 - RNA, 22 nt, Homo sapiens
  source 1..22: mol_type = transcribed RNA
catcttccagtacagtgttgga

SEQ ID NO: 3771 - RNA, 22 nt, Homo sapiens
  source 1..22: mol_type = transcribed RNA
tccaacactgtactggaagatg

SEQ ID NO: 3772 - RNA, 22 nt, Homo sapiens
  source 1..22: mol_type = transcribed RNA
aactggcctacaaagtcccagt

SEQ ID NO: 3773 - RNA, 22 nt, Homo sapiens
  source 1..22: mol_type = transcribed RNA
actgggactttgtaggccagtt

SEQ ID NO: 3774 - RNA, 22 nt, Homo sapiens
  source 1..22: mol_type = transcribed RNA
tgggtctttgcgggcgagatga

SEQ ID NO: 3775 - RNA, 22 nt, Homo sapiens
  source 1..22: mol_type = transcribed RNA
tcatctcgcccgcaaagaccca

SEQ ID NO: 3776 - RNA, 21 nt, Homo sapiens
  source 1..21: mol_type = transcribed RNA
atgacctatgaattgacagac

SEQ ID NO: 3777 - RNA, 21 nt, Homo sapiens
  source 1..21: mol_type = transcribed RNA
gtctgtcaattcataggtcat

SEQ ID NO: 3778 - RNA, 22 nt, Homo sapiens
  source 1..22: mol_type = transcribed RNA
aagctgccagttgaagaactgt

SEQ ID NO: 3779 - RNA, 22 nt, Homo sapiens
  source 1..22: mol_type = transcribed RNA
acagttcttcaactggcagctt

SEQ ID NO: 3780 - RNA, 22 nt, Homo sapiens
  source 1..22: mol_type = transcribed RNA
agttcttcagtggcaagcttta

SEQ ID NO: 3781 - RNA, 22 nt, Homo sapiens
  source 1..22: mol_type = transcribed RNA
taaagcttgccactgaagaact

SEQ ID NO: 3782 - RNA, 22 nt, Homo sapiens
  source 1..22: mol_type = transcribed RNA
acagattcgattctaggggaat

SEQ ID NO: 3783 - RNA, 22 nt, Homo sapiens
  source 1..22: mol_type = transcribed RNA
attcccctagaatcgaatctgt

SEQ ID NO: 3784 - RNA, 23 nt, Homo sapiens
  source 1..23: mol_type = transcribed RNA
taccctgtagaaccgaatttgtg

SEQ ID NO: 3785 - RNA, 23 nt, Homo sapiens
  source 1..23: mol_type = transcribed RNA
cacaaattcggttctacagggta

SEQ ID NO: 3786 - RNA, 22 nt, Homo sapiens
  source 1..22: mol_type = transcribed RNA
tagcagcacgtaaatattggcg

SEQ ID NO: 3787 - RNA, 22 nt, Homo sapiens
  source 1..22: mol_type = transcribed RNA
cgccaatatttacgtgctgcta

SEQ ID NO: 3788 - RNA, 21 nt, Homo sapiens
  source 1..21: mol_type = transcribed RNA
tgagatgaagcactgtagctc

SEQ ID NO: 3789 - RNA, 21 nt, Homo sapiens
  source 1..21: mol_type = transcribed RNA
gagctacagtgcttcatctca

SEQ ID NO: 3790 - RNA, 22 nt, Homo sapiens
  source 1..22: mol_type = transcribed RNA
ggtgcagtgctgcatctctggt

SEQ ID NO: 3791 - RNA, 22 nt, Homo sapiens
  source 1..22: mol_type = transcribed RNA
accagagatgcagcactgcacc

SEQ ID NO: 3792 - RNA, 21 nt, Homo sapiens
  source 1..21: mol_type = transcribed RNA
ttgctcactgttcttccctag

SEQ ID NO: 3793 - RNA, 21 nt, Homo sapiens
  source 1..21: mol_type = transcribed RNA
ctagggaagaacagtgagcaa

SEQ ID NO: 3794 - RNA, 18 nt, Homo sapiens
  source 1..18: mol_type = transcribed RNA
cagggtcagctgagcatg

SEQ ID NO: 3795 - RNA, 18 nt, Homo sapiens
  source 1..18: mol_type = transcribed RNA
catgctcagctgaccctg

SEQ ID NO: 3796 - RNA, 21 nt, Homo sapiens
  source 1..21: mol_type = transcribed RNA
aagcattctttcattggttgg

SEQ ID NO: 3797 - RNA, 21 nt, Homo sapiens
  source 1..21: mol_type = transcribed RNA
ccaaccaatgaaagaatgctt

SEQ ID NO: 3798 - RNA, 21 nt, Homo sapiens
  source 1..21: mol_type = transcribed RNA
ccgtcgccgccacccgagccg

SEQ ID NO: 3799 - RNA, 21 nt, Homo sapiens
  source 1..21: mol_type = transcribed RNA
cggctcgggtggcggcgacgg

SEQ ID NO: 3800 - RNA, 27 nt, Homo sapiens
  source 1..27: mol_type = transcribed RNA
cactgtaggtgatggtgagagtgggca

SEQ ID NO: 3801 - RNA, 27 nt, Homo sapiens
  source 1..27: mol_type = transcribed RNA
tgcccactctcaccatcacctacagtg

SEQ ID NO: 3802 - RNA, 23 nt, Homo sapiens
  source 1..23: mol_type = transcribed RNA
gggatggtagaccggtgacgtgc

SEQ ID NO: 3803 - RNA, 23 nt, Homo sapiens
  source 1..23: mol_type = transcribed RNA
gcacgtcaccggtctaccatccc

SEQ ID NO: 3804 - RNA, 21 nt, Homo sapiens
  source 1..21: mol_type = transcribed RNA
taggacacatggtctacttct

SEQ ID NO: 3805 - RNA, 21 nt, Homo sapiens
  source 1..21: mol_type = transcribed RNA
agaagtagaccatgtgtccta

SEQ ID NO: 3806 - RNA, 22 nt, Homo sapiens
  source 1..22: mol_type = transcribed RNA
ctcctgagccattctgagcctc

SEQ ID NO: 3807 - RNA, 22 nt, Homo sapiens
  source 1..22: mol_type = transcribed RNA
gaggctcagaatggctcaggag

SEQ ID NO: 3808 - RNA, 21 nt, Homo sapiens
  source 1..21: mol_type = transcribed RNA
gtgccagctgcagtgggggag

SEQ ID NO: 3809 - RNA, 21 nt, Homo sapiens
  source 1..21: mol_type = transcribed RNA
ctcccccactgcagctggcac

SEQ ID NO: 3810 - RNA, 21 nt, Homo sapiens
  source 1..21: mol_type = transcribed RNA
cccggagccaggatgcagctc

SEQ ID NO: 3811 - RNA, 21 nt, Homo sapiens
  source 1..21: mol_type = transcribed RNA
gagctgcatcctggctccggg

SEQ ID NO: 3812 - RNA, 21 nt, Homo sapiens
  source 1..21: mol_type = transcribed RNA
tcgtggcctggtctccattat

SEQ ID NO: 3813 - RNA, 21 nt, Homo sapiens
  source 1..21: mol_type = transcribed RNA
ataatggagaccaggccacga

SEQ ID NO: 3814 - RNA, 20 nt, Homo sapiens
  source 1..20: mol_type = transcribed RNA
tctgcagggtttgctttgag

SEQ ID NO: 3815 - RNA, 20 nt, Homo sapiens
  source 1..20: mol_type = transcribed RNA
ctcaaagcaaaccctgcaga

SEQ ID NO: 3816 - RNA, 21 nt, Homo sapiens
  source 1..21: mol_type = transcribed RNA
tgttcatgtagatgtttaagc

SEQ ID NO: 3817 - RNA, 21 nt, Homo sapiens
  source 1..21: mol_type = transcribed RNA
gcttaaacatctacatgaaca

SEQ ID NO: 3818 - RNA, 18 nt, Homo sapiens
  source 1..18: mol_type = transcribed RNA
tcagctggccctcatttc

SEQ ID NO: 3819 - RNA, 18 nt, Homo sapiens
  source 1..18: mol_type = transcribed RNA
gaaatgagggccagctga

SEQ ID NO: 3820 - RNA, 21 nt, Homo sapiens
  source 1..21: mol_type = transcribed RNA
tggcagggaggctgggagggg

SEQ ID NO: 3821 - RNA, 21 nt, Homo sapiens
  source 1..21: mol_type = transcribed RNA
cccctcccagcctccctgcca

SEQ ID NO: 3822 - RNA, 20 nt, Homo sapiens
  source 1..20: mol_type = transcribed RNA
tcactgttcagacaggcgga

SEQ ID NO: 3823 - RNA, 20 nt, Homo sapiens
  source 1..20: mol_type = transcribed RNA
tccgcctgtctgaacagtga

SEQ ID NO: 3824 - RNA, 21 nt, Homo sapiens
  source 1..21: mol_type = transcribed RNA
ccccacctcctctctcctcag

SEQ ID NO: 3825 - RNA, 21 nt, Homo sapiens
  source 1..21: mol_type = transcribed RNA
ctgaggagagaggaggtgggg

SEQ ID NO: 3826 - RNA, 19 nt, Homo sapiens
  source 1..19: mol_type = transcribed RNA
gtgaggactcgggaggtgg

SEQ ID NO: 3827 - RNA, 19 nt, Homo sapiens
  source 1..19: mol_type = transcribed RNA
ccacctcccgagtcctcac

SEQ ID NO: 3828 - RNA, 22 nt, Homo sapiens
  source 1..22: mol_type = transcribed RNA
tgagcccctgtgccgcccccag

SEQ ID NO: 3829 - RNA, 22 nt, Homo sapiens
  source 1..22: mol_type = transcribed RNA
ctgggggcggcacaggggctca

SEQ ID NO: 3830 - RNA, 22 nt, Homo sapiens
  source 1..22: mol_type = transcribed RNA
gtgggtacggcccagtgggggg

SEQ ID NO: 3831 - RNA, 22 nt, Homo sapiens
  source 1..22: mol_type = transcribed RNA
ccccccactgggccgtacccac

SEQ ID NO: 3832 - RNA, 22 nt, Homo sapiens
  source 1..22: mol_type = transcribed RNA
tcaccagccctgtgttccctag

SEQ ID NO: 3833 - RNA, 22 nt, Homo sapiens
  source 1..22: mol_type = transcribed RNA
ctagggaacacagggctggtga

SEQ ID NO: 3834 - RNA, 26 nt, Homo sapiens
  source 1..26: mol_type = transcribed RNA
gtgagggcatgcaggcctggatgggg

SEQ ID NO: 3835 - RNA, 26 nt, Homo sapiens
  source 1..26: mol_type = transcribed RNA
ccccatccaggcctgcatgccctcac

SEQ ID NO: 3836 - RNA, 23 nt, Homo sapiens
  source 1..23: mol_type = transcribed RNA
ctctcaccactgccctcccacag

SEQ ID NO: 3837 - RNA, 23 nt, Homo sapiens
  source 1..23: mol_type = transcribed RNA
ctgtgggagggcagtggtgagag

SEQ ID NO: 3838 - RNA, 24 nt, Homo sapiens
  source 1..24: mol_type = transcribed RNA
gtgggtagggtttgggggagagcg

SEQ ID NO: 3839 - RNA, 24 nt, Homo sapiens
  source 1..24: mol_type = transcribed RNA
cgctctcccccaaaccctacccac

SEQ ID NO: 3840 - RNA, 20 nt, Homo sapiens
  source 1..20: mol_type = transcribed RNA
gtgtctgggcggacagctgc

SEQ ID NO: 3841 - RNA, 20 nt, Homo sapiens
  source 1..20: mol_type = transcribed RNA
gcagctgtccgcccagacac

SEQ ID NO: 3842 - RNA, 20 nt, Homo sapiens
  source 1..20: mol_type = transcribed RNA
cttcctcgtctgtctgcccc

SEQ ID NO: 3843 - RNA, 20 nt, Homo sapiens
  source 1..20: mol_type = transcribed RNA
ggggcagacagacgaggaag

SEQ ID NO: 3844 - RNA, 23 nt, Homo sapiens
  source 1..23: mol_type = transcribed RNA
gtgagtgggagccccagtgtgtg

SEQ ID NO: 3845 - RNA, 23 nt, Homo sapiens
  source 1..23: mol_type = transcribed RNA
cacacactggggctcccactcac

SEQ ID NO: 3846 - RNA, 27 nt, Homo sapiens
  source 1..27: mol_type = transcribed RNA
accttcttgtataagcactgtgctaaa

SEQ ID NO: 3847 - RNA, 27 nt, Homo sapiens
  source 1..27: mol_type = transcribed RNA
tttagcacagtgcttatacaagaaggt

SEQ ID NO: 3848 - RNA, 22 nt, Homo sapiens
  source 1..22: mol_type = transcribed RNA
ggcgacaaaacgagaccctgtc

SEQ ID NO: 3849 - RNA, 22 nt, Homo sapiens
  source 1..22: mol_type = transcribed RNA
gacagggtctcgttttgtcgcc

SEQ ID NO: 3850 - RNA, 22 nt, Homo sapiens
  source 1..22: mol_type = transcribed RNA
ttgcttgaacccaggaagtgga

SEQ ID NO: 3851 - RNA, 22 nt, Homo sapiens
  source 1..22: mol_type = transcribed RNA
tccacttcctgggttcaagcaa

SEQ ID NO: 3852 - RNA, 19 nt, Homo sapiens
  source 1..19: mol_type = transcribed RNA
ggagatggaggttgcagtg

SEQ ID NO: 3853 - RNA, 19 nt, Homo sapiens
  source 1..19: mol_type = transcribed RNA
cactgcaacctccatctcc

SEQ ID NO: 3854 - RNA, 21 nt, Homo sapiens
  source 1..21: mol_type = transcribed RNA
accactgcactccagcctgag

SEQ ID NO: 3855 - RNA, 21 nt, Homo sapiens
  source 1..21: mol_type = transcribed RNA
ctcaggctggagtgcagtggt

SEQ ID NO: 3856 - RNA, 22 nt, Homo sapiens
  source 1..22: mol_type = transcribed RNA
ggtggttgaggctgcagtaagt

SEQ ID NO: 3857 - RNA, 22 nt, Homo sapiens
  source 1..22: mol_type = transcribed RNA
acttactgcagcctcaaccacc

SEQ ID NO: 3858 - RNA, 17 nt, Homo sapiens
  source 1..17: mol_type = transcribed RNA
tcgcctcctcctctccc

SEQ ID NO: 3859 - RNA, 17 nt, Homo sapiens
  source 1..17: mol_type = transcribed RNA
gggagaggaggaggcga

SEQ ID NO: 3860 - RNA, 22 nt, Homo sapiens
  source 1..22: mol_type = transcribed RNA
tctatacagaccctggcttttc

SEQ ID NO: 3861 - RNA, 22 nt, Homo sapiens
  source 1..22: mol_type = transcribed RNA
gaaaagccagggtctgtataga

SEQ ID NO: 3862 - RNA, 22 nt, Homo sapiens
  source 1..22: mol_type = transcribed RNA
tctgggcaacaaagtgagacct

SEQ ID NO: 3863 - RNA, 22 nt, Homo sapiens
  source 1..22: mol_type = transcribed RNA
aggtctcactttgttgcccaga

SEQ ID NO: 3864 - RNA, 21 nt, Homo sapiens
  source 1..21: mol_type = transcribed RNA
gatctcactttgttgcccagg

SEQ ID NO: 3865 - RNA, 21 nt, Homo sapiens
  source 1..21: mol_type = transcribed RNA
cctgggcaacaaagtgagatc

SEQ ID NO: 3866 - RNA, 20 nt, Homo sapiens
  source 1..20: mol_type = transcribed RNA
tcgcgccccggctcccgttc

SEQ ID NO: 3867 - RNA, 20 nt, Homo sapiens
  source 1..20: mol_type = transcribed RNA
gaacgggagccggggcgcga

SEQ ID NO: 3868 - RNA, 25 nt, Homo sapiens
  source 1..25: mol_type = transcribed RNA
tgggaacgggttccggcagacgctg

SEQ ID NO: 3869 - RNA, 25 nt, Homo sapiens
  source 1..25: mol_type = transcribed RNA
cagcgtctgccggaacccgttccca

SEQ ID NO: 3870 - RNA, 21 nt, Homo sapiens
  source 1..21: mol_type = transcribed RNA
ttaggccgcagatctgggtga

SEQ ID NO: 3871 - RNA, 21 nt, Homo sapiens
  source 1..21: mol_type = transcribed RNA
tcacccagatctgcggcctaa

SEQ ID NO: 3872 - RNA, 22 nt, Homo sapiens
  source 1..22: mol_type = transcribed RNA
aataggccacggatctgggcaa

SEQ ID NO: 3873 - RNA, 22 nt, Homo sapiens
  source 1..22: mol_type = transcribed RNA
ttgcccagatccgtggcctatt

SEQ ID NO: 3874 - RNA, 21 nt, Homo sapiens
  source 1..21: mol_type = transcribed RNA
cacccagatctgcggcctaat

SEQ ID NO: 3875 - RNA, 21 nt, Homo sapiens
  source 1..21: mol_type = transcribed RNA
attaggccgcagatctgggtg

SEQ ID NO: 3876 - RNA, 22 nt, Homo sapiens
  source 1..22: mol_type = transcribed RNA
ttagggccctggctccatctcc

SEQ ID NO: 3877 - RNA, 22 nt, Homo sapiens
  source 1..22: mol_type = transcribed RNA
ggagatggagccagggccctaa

SEQ ID NO: 3878 - RNA, 22 nt, Homo sapiens
  source 1..22: mol_type = transcribed RNA
ttcattcggctgtccagatgta

SEQ ID NO: 3879 - RNA, 22 nt, Homo sapiens
  source 1..22: mol_type = transcribed RNA
tacatctggacagccgaatgaa

SEQ ID NO: 3880 - RNA, 24 nt, Homo sapiens
  source 1..24: mol_type = transcribed RNA
ttgcagctgcctgggagtgacttc

SEQ ID NO: 3881 - RNA, 24 nt, Homo sapiens
  source 1..24: mol_type = transcribed RNA
gaagtcactcccaggcagctgcaa

SEQ ID NO: 3882 - RNA, 21 nt, Homo sapiens
  source 1..21: mol_type = transcribed RNA
ttgggacatacttatgctaaa

SEQ ID NO: 3883 - RNA, 21 nt, Homo sapiens
  source 1..21: mol_type = transcribed RNA
tttagcataagtatgtcccaa

SEQ ID NO: 3884 - RNA, 22 nt, Homo sapiens
  source 1..22: mol_type = transcribed RNA
tctcactgtagcctcgaacccc

SEQ ID NO: 3885 - RNA, 22 nt, Homo sapiens
  source 1..22: mol_type = transcribed RNA
ggggttcgaggctacagtgaga

SEQ ID NO: 3886 - RNA, 22 nt, Homo sapiens
  source 1..22: mol_type = transcribed RNA
tttgaggctacagtgagatgtg

SEQ ID NO: 3887 - RNA, 22 nt, Homo sapiens
  source 1..22: mol_type = transcribed RNA
cacatctcactgtagcctcaaa

SEQ ID NO: 3888 - RNA, 18 nt, Homo sapiens
  source 1..18: mol_type = transcribed RNA
cagggaggtgaatgtgat

SEQ ID NO: 3889 - RNA, 18 nt, Homo sapiens
  source 1..18: mol_type = transcribed RNA
atcacattcacctccctg

SEQ ID NO: 3890 - RNA, 19 nt, Homo sapiens
  source 1..19: mol_type = transcribed RNA
gatgatgctgctgatgctg

SEQ ID NO: 3891 - RNA, 19 nt, Homo sapiens
  source 1..19: mol_type = transcribed RNA
cagcatcagcagcatcatc

SEQ ID NO: 3892 - RNA, 24 nt, Homo sapiens
  source 1..24: mol_type = transcribed RNA
ccagacagaattctatgcactttc

SEQ ID NO: 3893 - RNA, 24 nt, Homo sapiens
  source 1..24: mol_type = transcribed RNA
gaaagtgcatagaattctgtctgg

SEQ ID NO: 3894 - RNA, 22 nt, Homo sapiens
  source 1..22: mol_type = transcribed RNA
ctcctggggcccgcactctcgc

SEQ ID NO: 3895 - RNA, 22 nt, Homo sapiens
  source 1..22: mol_type = transcribed RNA
gcgagagtgcgggccccaggag

SEQ ID NO: 3896 - RNA, 21 nt, Homo sapiens
  source 1..21: mol_type = transcribed RNA
ctccgtttgcctgtttcgctg

SEQ ID NO: 3897 - RNA, 21 nt, Homo sapiens
  source 1..21: mol_type = transcribed RNA
cagcgaaacaggcaaacggag

SEQ ID NO: 3898 - RNA, 22 nt, Homo sapiens
  source 1..22: mol_type = transcribed RNA
ctcggcgcggggcgcgggctcc

SEQ ID NO: 3899 - RNA, 22 nt, Homo sapiens
  source 1..22: mol_type = transcribed RNA
ggagcccgcgccccgcgccgag

SEQ ID NO: 3900 - RNA, 21 nt, Homo sapiens
  source 1..21: mol_type = transcribed RNA
gccctccgcccgtgcaccccg

SEQ ID NO: 3901 - RNA, 21 nt, Homo sapiens
  source 1..21: mol_type = transcribed RNA
cggggtgcacgggcggagggc

SEQ ID NO: 3902 - RNA, 22 nt, Homo sapiens
  source 1..22: mol_type = transcribed RNA
gcccgcgtgtggagccaggtgt

SEQ ID NO: 3903 - RNA, 22 nt, Homo sapiens
  source 1..22: mol_type = transcribed RNA
acacctggctccacacgcgggc

SEQ ID NO: 3904 - RNA, 22 nt, Homo sapiens
  source 1..22: mol_type = transcribed RNA
aaaaccgtctagttacagttgt

SEQ ID NO: 3905 - RNA, 22 nt, Homo sapiens
  source 1..22: mol_type = transcribed RNA
acaactgtaactagacggtttt

SEQ ID NO: 3906 - RNA, 18 nt, Homo sapiens
  source 1..18: mol_type = transcribed RNA
tccagtgccctcctctcc

SEQ ID NO: 3907 - RNA, 18 nt, Homo sapiens
  source 1..18: mol_type = transcribed RNA
ggagaggagggcactgga

SEQ ID NO: 3908 - RNA, 18 nt, Homo sapiens
  source 1..18: mol_type = transcribed RNA
tgaggcagtagattgaat

SEQ ID NO: 3909 - RNA, 18 nt, Homo sapiens
  source 1..18: mol_type = transcribed RNA
attcaatctactgcctca

SEQ ID NO: 3910 - RNA, 22 nt, Homo sapiens
  source 1..22: mol_type = transcribed RNA
aggggctggctttcctctggtc

SEQ ID NO: 3911 - RNA, 22 nt, Homo sapiens
  source 1..22: mol_type = transcribed RNA
gaccagaggaaagccagcccct

SEQ ID NO: 3912 - RNA, 22 nt, Homo sapiens
  source 1..22: mol_type = transcribed RNA
tggagagaaaggcagttcctga

SEQ ID NO: 3913 - RNA, 22 nt, Homo sapiens
  source 1..22: mol_type = transcribed RNA
tcaggaactgcctttctctcca

SEQ ID NO: 3914 - RNA, 22 nt, Homo sapiens
  source 1..22: mol_type = transcribed RNA
tcgtgtcttgtgttgcagccgg

SEQ ID NO: 3915 - RNA, 22 nt, Homo sapiens
  source 1..22: mol_type = transcribed RNA
ccggctgcaacacaagacacga

SEQ ID NO: 3916 - RNA, 22 nt, Homo sapiens
  source 1..22: mol_type = transcribed RNA
ggctacaacacaggacccgggc

SEQ ID NO: 3917 - RNA, 22 nt, Homo sapiens
  source 1..22: mol_type = transcribed RNA
gcccgggtcctgtgttgtagcc

SEQ ID NO: 3918 - RNA, 21 nt, Homo sapiens
  source 1..21: mol_type = transcribed RNA
cggcggggacggcgattggtc

SEQ ID NO: 3919 - RNA, 21 nt, Homo sapiens
  source 1..21: mol_type = transcribed RNA
gaccaatcgccgtccccgccg

SEQ ID NO: 3920 - RNA, 22 nt, Homo sapiens
  source 1..22: mol_type = transcribed RNA
cgcaggggccgggtgctcaccg

SEQ ID NO: 3921 - RNA, 22 nt, Homo sapiens
  source 1..22: mol_type = transcribed RNA
cggtgagcacccggcccctgcg

SEQ ID NO: 3922 - RNA, 21 nt, Homo sapiens
  source 1..21: mol_type = transcribed RNA
tgagtgccggtgcctgccctg

SEQ ID NO: 3923 - RNA, 21 nt, Homo sapiens
  source 1..21: mol_type = transcribed RNA
cagggcaggcaccggcactca

SEQ ID NO: 3924 - RNA, 22 nt, Homo sapiens
  source 1..22: mol_type = transcribed RNA
gctgcgcttggatttcgtcccc

SEQ ID NO: 3925 - RNA, 22 nt, Homo sapiens
  source 1..22: mol_type = transcribed RNA
ggggacgaaatccaagcgcagc

SEQ ID NO: 3926 - RNA, 23 nt, Homo sapiens
  source 1..23: mol_type = transcribed RNA
caacggaatcccaaaagcagctg

SEQ ID NO: 3927 - RNA, 23 nt, Homo sapiens
  source 1..23: mol_type = transcribed RNA
cagctgcttttgggattccgttg

SEQ ID NO: 3928 - RNA, 22 nt, Homo sapiens
  source 1..22: mol_type = transcribed RNA
tcaggccaggcacagtggctca

SEQ ID NO: 3929 - RNA, 22 nt, Homo sapiens
  source 1..22: mol_type = transcribed RNA
tgagccactgtgcctggcctga

SEQ ID NO: 3930 - RNA, 19 nt, Homo sapiens
  source 1..19: mol_type = transcribed RNA
accgtgcaaaggtagcata

SEQ ID NO: 3931 - RNA, 19 nt, Homo sapiens
  source 1..19: mol_type = transcribed RNA
tatgctacctttgcacggt

SEQ ID NO: 3932 - RNA, 20 nt, Homo sapiens
  source 1..20: mol_type = transcribed RNA
cctcctgccctccttgctgt

SEQ ID NO: 3933 - RNA, 20 nt, Homo sapiens
  source 1..20: mol_type = transcribed RNA
acagcaaggagggcaggagg

SEQ ID NO: 3934 - RNA, 20 nt, Homo sapiens
  source 1..20: mol_type = transcribed RNA
tgttttgataacagtaatgt

SEQ ID NO: 3935 - RNA, 20 nt, Homo sapiens
  source 1..20: mol_type = transcribed RNA
acattactgttatcaaaaca

SEQ ID NO: 3936 - RNA, 23 nt, Homo sapiens
  source 1..23: mol_type = transcribed RNA
gtgttaattaaacctctatttac

SEQ ID NO: 3937 - RNA, 23 nt, Homo sapiens
  source 1..23: mol_type = transcribed RNA
gtaaatagaggtttaattaacac

SEQ ID NO: 3938 - RNA, 23 nt, Homo sapiens
  source 1..23: mol_type = transcribed RNA
ctgtaatataaatttaatttatt

SEQ ID NO: 3939 - RNA, 23 nt, Homo sapiens
  source 1..23: mol_type = transcribed RNA
aataaattaaatttatattacag

SEQ ID NO: 3940 - RNA, 22 nt, Homo sapiens
  source 1..22: mol_type = transcribed RNA
ttggggaaacggccgctgagtg

SEQ ID NO: 3941 - RNA, 22 nt, Homo sapiens
  source 1..22: mol_type = transcribed RNA
cactcagcggccgtttccccaa

SEQ ID NO: 3942 - RNA, 21 nt, Homo sapiens
  source 1..21: mol_type = transcribed RNA
cctcccatgccaagaactccc

SEQ ID NO: 3943 - RNA, 21 nt, Homo sapiens
  source 1..21: mol_type = transcribed RNA
gggagttcttggcatgggagg

SEQ ID NO: 3944 - RNA, 21 nt, Homo sapiens
  source 1..21: mol_type = transcribed RNA
ggttcttagcataggaggtct

SEQ ID NO: 3945 - RNA, 21 nt, Homo sapiens
  source 1..21: mol_type = transcribed RNA
agacctcctatgctaagaacc

SEQ ID NO: 3946 - RNA, 21 nt, Homo sapiens
  source 1..21: mol_type = transcribed RNA
tgttctctttgccaaggacag

SEQ ID NO: 3947 - RNA, 21 nt, Homo sapiens
  source 1..21: mol_type = transcribed RNA
ctgtccttggcaaagagaaca

SEQ ID NO: 3948 - RNA, 22 nt, Homo sapiens
  source 1..22: mol_type = transcribed RNA
aaatctctgcaggcaaatgtga

SEQ ID NO: 3949 - RNA, 22 nt, Homo sapiens
  source 1..22: mol_type = transcribed RNA
tcacatttgcctgcagagattt

SEQ ID NO: 3950 - RNA, 22 nt, Homo sapiens
  source 1..22: mol_type = transcribed RNA
catggttctgtcaagcaccgcg

SEQ ID NO: 3951 - RNA, 22 nt, Homo sapiens
  source 1..22: mol_type = transcribed RNA
cgcggtgcttgacagaaccatg

SEQ ID NO: 3952 - RNA, 21 nt, Homo sapiens
  source 1..21: mol_type = transcribed RNA
ttgtgcttgatctaaccatgt

SEQ ID NO: 3953 - RNA, 21 nt, Homo sapiens
  source 1..21: mol_type = transcribed RNA
acatggttagatcaagcacaa

SEQ ID NO: 3954 - RNA, 22 nt, Homo sapiens
  source 1..22: mol_type = transcribed RNA
tctgcaagtgtcagaggcgagg

SEQ ID NO: 3955 - RNA, 22 nt, Homo sapiens
  source 1..22: mol_type = transcribed RNA
cctcgcctctgacacttgcaga

SEQ ID NO: 3956 - RNA, 22 nt, Homo sapiens
  source 1..22: mol_type = transcribed RNA
gagagcagtgtgtgttgcctgg

SEQ ID NO: 3957 - RNA, 22 nt, Homo sapiens
  source 1..22: mol_type = transcribed RNA
ccaggcaacacacactgctctc

SEQ ID NO: 3958 - RNA, 22 nt, Homo sapiens
  source 1..22: mol_type = transcribed RNA
atcacattgccagtgattaccc

SEQ ID NO: 3959 - RNA, 22 nt, Homo sapiens
  source 1..22: mol_type = transcribed RNA
gggtaatcactggcaatgtgat

SEQ ID NO: 3960 - RNA, 22 nt, Homo sapiens
  source 1..22: mol_type = transcribed RNA
agcagaggcagagaggctcagg

SEQ ID NO: 3961 - RNA, 22 nt, Homo sapiens
  source 1..22: mol_type = transcribed RNA
cctgagcctctctgcctctgct

SEQ ID NO: 3962 - RNA, 23 nt, Homo sapiens
  source 1..23: mol_type = transcribed RNA
tgaggctctgttagccttggctc

SEQ ID NO: 3963 - RNA, 23 nt, Homo sapiens
  source 1..23: mol_type = transcribed RNA
gagccaaggctaacagagcctca

SEQ ID NO: 3964 - RNA, 22 nt, Homo sapiens
  source 1..22: mol_type = transcribed RNA
tatcatggagttggtaaagcac

SEQ ID NO: 3965 - RNA, 22 nt, Homo sapiens
  source 1..22: mol_type = transcribed RNA
gtgctttaccaactccatgata

SEQ ID NO: 3966 - RNA, 22 nt, Homo sapiens
  source 1..22: mol_type = transcribed RNA
gttttaccacctccaggagact

SEQ ID NO: 3967 - RNA, 22 nt, Homo sapiens
  source 1..22: mol_type = transcribed RNA
agtctcctggaggtggtaaaac

SEQ ID NO: 3968 - RNA, 22 nt, Homo sapiens
  source 1..22: mol_type = transcribed RNA
cgcctcttcagcgctgtcttcc

SEQ ID NO: 3969 - RNA, 22 nt, Homo sapiens
  source 1..22: mol_type = transcribed RNA
ggaagacagcgctgaagaggcg

SEQ ID NO: 3970 - RNA, 23 nt, Homo sapiens
  source 1..23: mol_type = transcribed RNA
caggcagtgactgttcagacgtc

SEQ ID NO: 3971 - RNA, 23 nt, Homo sapiens
  source 1..23: mol_type = transcribed RNA
gacgtctgaacagtcactgcctg

SEQ ID NO: 3972 - RNA, 23 nt, Homo sapiens
  source 1..23: mol_type = transcribed RNA
agaattgcgtttggacaatcagt

SEQ ID NO: 3973 - RNA, 23 nt, Homo sapiens
  source 1..23: mol_type = transcribed RNA
actgattgtccaaacgcaattct

SEQ ID NO: 3974 - RNA, 22 nt, Homo sapiens
  source 1..22: mol_type = transcribed RNA
agatgtccagccacaattctcg

SEQ ID NO: 3975 - RNA, 22 nt, Homo sapiens
  source 1..22: mol_type = transcribed RNA
cgagaattgtggctggacatct

SEQ ID NO: 3976 - RNA, 24 nt, Homo sapiens
  source 1..24: mol_type = transcribed RNA
agcagaagcagggaggttctccca

SEQ ID NO: 3977 - RNA, 24 nt, Homo sapiens
  source 1..24: mol_type = transcribed RNA
tgggagaacctccctgcttctgct

SEQ ID NO: 3978 - RNA, 22 nt, Homo sapiens
  source 1..22: mol_type = transcribed RNA
tatgtgggatggtaaaccgctt

SEQ ID NO: 3979 - RNA, 22 nt, Homo sapiens
  source 1..22: mol_type = transcribed RNA
aagcggtttaccatcccacata

SEQ ID NO: 3980 - RNA, 22 nt, Homo sapiens
  source 1..22: mol_type = transcribed RNA
tggtttaccgtcccacatacat

SEQ ID NO: 3981 - RNA, 22 nt, Homo sapiens
  source 1..22: mol_type = transcribed RNA
atgtatgtgggacggtaaacca

SEQ ID NO: 3982 - RNA, 23 nt, Homo sapiens
  source 1..23: mol_type = transcribed RNA
cagtgcaatgatattgtcaaagc

SEQ ID NO: 3983 - RNA, 23 nt, Homo sapiens
  source 1..23: mol_type = transcribed RNA
gctttgacaatatcattgcactg

SEQ ID NO: 3984 - RNA, 17 nt, Homo sapiens
  source 1..17: mol_type = transcribed RNA
taattgcttccatgttt

SEQ ID NO: 3985 - RNA, 17 nt, Homo sapiens
  source 1..17: mol_type = transcribed RNA
aaacatggaagcaatta

SEQ ID NO: 3986 - RNA, 23 nt, Homo sapiens
  source 1..23: mol_type = transcribed RNA
ttgccacactgcaacaccttaca

SEQ ID NO: 3987 - RNA, 23 nt, Homo sapiens
  source 1..23: mol_type = transcribed RNA
tgtaaggtgttgcagtgtggcaa

SEQ ID NO: 3988 - RNA, 21 nt, Homo sapiens
  source 1..21: mol_type = transcribed RNA
tctggctgttgtggtgtgcaa

SEQ ID NO: 3989 - RNA, 21 nt, Homo sapiens
  source 1..21: mol_type = transcribed RNA
ttgcacaccacaacagccaga

SEQ ID NO: 3990 - RNA, 22 nt, Homo sapiens
  source 1..22: mol_type = transcribed RNA
gatatcagctcagtaggcaccg

SEQ ID NO: 3991 - RNA, 22 nt, Homo sapiens
  source 1..22: mol_type = transcribed RNA
cggtgcctactgagctgatatc

SEQ ID NO: 3992 - RNA, 21 nt, Homo sapiens
  source 1..21: mol_type = transcribed RNA
gttcctgctgaactgagccag

SEQ ID NO: 3993 - RNA, 21 nt, Homo sapiens
  source 1..21: mol_type = transcribed RNA
ctggctcagttcagcaggaac

SEQ ID NO: 3994 - RNA, 20 nt, Homo sapiens
  source 1..20: mol_type = transcribed RNA
atatgggtttactagttggt

SEQ ID NO: 3995 - RNA, 20 nt, Homo sapiens
  source 1..20: mol_type = transcribed RNA
accaactagtaaacccatat

SEQ ID NO: 3996 - RNA, 22 nt, Homo sapiens
  source 1..22: mol_type = transcribed RNA
tgctatgccaacatattgccat

SEQ ID NO: 3997 - RNA, 22 nt, Homo sapiens
  source 1..22: mol_type = transcribed RNA
atggcaatatgttggcatagca

SEQ ID NO: 3998 - RNA, 21 nt, Homo sapiens
  source 1..21: mol_type = transcribed RNA
aggcaagatgctggcatagct

SEQ ID NO: 3999 - RNA, 21 nt, Homo sapiens
  source 1..21: mol_type = transcribed RNA
agctatgccagcatcttgcct

SEQ ID NO: 4000 - RNA, 18 nt, Homo sapiens
  source 1..18: mol_type = transcribed RNA
cggggcggcaggggcctc

SEQ ID NO: 4001 - RNA, 18 nt, Homo sapiens
  source 1..18: mol_type = transcribed RNA
gaggcccctgccgccccg

SEQ ID NO: 4002 - RNA, 19 nt, Homo sapiens
  source 1..19: mol_type = transcribed RNA
aaaagctgggttgagagga

SEQ ID NO: 4003 - RNA, 19 nt, Homo sapiens
  source 1..19: mol_type = transcribed RNA
tcctctcaacccagctttt

SEQ ID NO: 4004 - RNA, 22 nt, Homo sapiens
  source 1..22: mol_type = transcribed RNA
cccaatacacggtcgacctctt

SEQ ID NO: 4005 - RNA, 22 nt, Homo sapiens
  source 1..22: mol_type = transcribed RNA
aagaggtcgaccgtgtattggg

SEQ ID NO: 4006 - RNA, 23 nt, Homo sapiens
  source 1..23: mol_type = transcribed RNA
aggttgtccgtggtgagttcgca

SEQ ID NO: 4007 - RNA, 23 nt, Homo sapiens
  source 1..23: mol_type = transcribed RNA
tgcgaactcaccacggacaacct

SEQ ID NO: 4008 - RNA, 23 nt, Homo sapiens
  source 1..23: mol_type = transcribed RNA
gcaaagcacacggcctgcagaga

SEQ ID NO: 4009 - RNA, 23 nt, Homo sapiens
  source 1..23: mol_type = transcribed RNA
tctctgcaggccgtgtgctttgc

SEQ ID NO: 4010 - RNA, 22 nt, Homo sapiens
  source 1..22: mol_type = transcribed RNA
tctctgggcctgtgtcttaggc

SEQ ID NO: 4011 - RNA, 22 nt, Homo sapiens
  source 1..22: mol_type = transcribed RNA
gcctaagacacaggcccagaga

SEQ ID NO: 4012 - RNA, 21 nt, Homo sapiens
  source 1..21: mol_type = transcribed RNA
gcccctgggcctatcctagaa

SEQ ID NO: 4013 - RNA, 21 nt, Homo sapiens
  source 1..21: mol_type = transcribed RNA
ttctaggataggcccaggggc

SEQ ID NO: 4014 - RNA, 22 nt, Homo sapiens
  source 1..22: mol_type = transcribed RNA
tccgtctcagttactttatagc

SEQ ID NO: 4015 - RNA, 22 nt, Homo sapiens
  source 1..22: mol_type = transcribed RNA
gctataaagtaactgagacgga

SEQ ID NO: 4016 - RNA, 22 nt, Homo sapiens
  source 1..22: mol_type = transcribed RNA
aacacacctattcaaggattca

SEQ ID NO: 4017 - RNA, 22 nt, Homo sapiens
  source 1..22: mol_type = transcribed RNA
tgaatccttgaataggtgtgtt

SEQ ID NO: 4018 - RNA, 24 nt, Homo sapiens
  source 1..24: mol_type = transcribed RNA
aatccttggaacctaggtgtgagt

SEQ ID NO: 4019 - RNA, 24 nt, Homo sapiens
  source 1..24: mol_type = transcribed RNA
actcacacctaggttccaaggatt

SEQ ID NO: 4020 - RNA, 22 nt, Homo sapiens
  source 1..22: mol_type = transcribed RNA
taatgcccctaaaaatccttat

SEQ ID NO: 4021 - RNA, 22 nt, Homo sapiens
  source 1..22: mol_type = transcribed RNA
ataaggatttttaggggcatta

SEQ ID NO: 4022 - RNA, 23 nt, Homo sapiens
  source 1..23: mol_type = transcribed RNA
agggacttttgggggcagatgtg

SEQ ID NO: 4023 - RNA, 23 nt, Homo sapiens
  source 1..23: mol_type = transcribed RNA
cacatctgcccccaaaagtccct

SEQ ID NO: 4024 - RNA, 22 nt, Homo sapiens
  source 1..22: mol_type = transcribed RNA
taatgcccctaaaaatccttat

SEQ ID NO: 4025 - RNA, 22 nt, Homo sapiens
  source 1..22: mol_type = transcribed RNA
ataaggatttttaggggcatta

SEQ ID NO: 4026 - RNA, 22 nt, Homo sapiens
  source 1..22: mol_type = transcribed RNA
agggactttcaggggcagctgt

SEQ ID NO: 4027 - RNA, 22 nt, Homo sapiens
  source 1..22: mol_type = transcribed RNA
acagctgcccctgaaagtccct

SEQ ID NO: 4028 - RNA, 24 nt, Homo sapiens
  source 1..24: mol_type = transcribed RNA
gaaaatgatgagtagtgactgatg

SEQ ID NO: 4029 - RNA, 24 nt, Homo sapiens
  source 1..24: mol_type = transcribed RNA
catcagtcactactcatcattttc

SEQ ID NO: 4030 - RNA, 23 nt, Homo sapiens
  source 1..23: mol_type = transcribed RNA
tgagcaccacacaggccgggcgc

SEQ ID NO: 4031 - RNA, 23 nt, Homo sapiens
  source 1..23: mol_type = transcribed RNA
gcgcccggcctgtgtggtgctca

SEQ ID NO: 4032 - RNA, 21 nt, Homo sapiens
  source 1..21: mol_type = transcribed RNA
gctggtctgcgtggtgctcgg

SEQ ID NO: 4033 - RNA, 21 nt, Homo sapiens
  source 1..21: mol_type = transcribed RNA
ccgagcaccacgcagaccagc

SEQ ID NO: 4034 - RNA, 22 nt, Homo sapiens
  source 1..22: mol_type = transcribed RNA
gcctgctggggtggaacctggt

SEQ ID NO: 4035 - RNA, 22 nt, Homo sapiens
  source 1..22: mol_type = transcribed RNA
accaggttccaccccagcaggc

SEQ ID NO: 4036 - RNA, 23 nt, Homo sapiens
  source 1..23: mol_type = transcribed RNA
gaagtgcttcgattttggggtgt

SEQ ID NO: 4037 - RNA, 23 nt, Homo sapiens
  source 1..23: mol_type = transcribed RNA
acaccccaaaatcgaagcacttc

SEQ ID NO: 4038 - RNA, 22 nt, Homo sapiens
  source 1..22: mol_type = transcribed RNA
actcaaaatgggggcgctttcc

SEQ ID NO: 4039 - RNA, 22 nt, Homo sapiens
  source 1..22: mol_type = transcribed RNA
ggaaagcgcccccattttgagt

SEQ ID NO: 4040 - RNA, 22 nt, Homo sapiens
  source 1..22: mol_type = transcribed RNA
tatgtaacatggtccactaact

SEQ ID NO: 4041 - RNA, 22 nt, Homo sapiens
  source 1..22: mol_type = transcribed RNA
agttagtggaccatgttacata

SEQ ID NO: 4042 - RNA, 21 nt, Homo sapiens
  source 1..21: mol_type = transcribed RNA
tggtagactatggaacgtagg

SEQ ID NO: 4043 - RNA, 21 nt, Homo sapiens
  source 1..21: mol_type = transcribed RNA
cctacgttccatagtctacca

SEQ ID NO: 4044 - RNA, 22 nt, Homo sapiens
  source 1..22: mol_type = transcribed RNA
tgtagatacgagcaccagccac

SEQ ID NO: 4045 - RNA, 22 nt, Homo sapiens
  source 1..22: mol_type = transcribed RNA
gtggctggtgctcgtatctaca

SEQ ID NO: 4046 - RNA, 23 nt, Homo sapiens
  source 1..23: mol_type = transcribed RNA
acaggcggctgtagcaatggggg

SEQ ID NO: 4047 - RNA, 23 nt, Homo sapiens
  source 1..23: mol_type = transcribed RNA
cccccattgctacagccgcctgt

SEQ ID NO: 4048 - RNA, 22 nt, Homo sapiens
  source 1..22: mol_type = transcribed RNA
aattcccttgtagataacccgg

SEQ ID NO: 4049 - RNA, 22 nt, Homo sapiens
  source 1..22: mol_type = transcribed RNA
ccgggttatctacaagggaatt

SEQ ID NO: 4050 - RNA, 22 nt, Homo sapiens
  source 1..22: mol_type = transcribed RNA
tacgcgcagaccacaggatgtc

SEQ ID NO: 4051 - RNA, 22 nt, Homo sapiens
  source 1..22: mol_type = transcribed RNA
gacatcctgtggtctgcgcgta

SEQ ID NO: 4052 - RNA, 22 nt, Homo sapiens
  source 1..22: mol_type = transcribed RNA
ttacacacaactgaggatcata

SEQ ID NO: 4053 - RNA, 22 nt, Homo sapiens
  source 1..22: mol_type = transcribed RNA
tatgatcctcagttgtgtgtaa

SEQ ID NO: 4054 - RNA, 23 nt, Homo sapiens
  source 1..23: mol_type = transcribed RNA
tagcccccaggcttcacttggcg

SEQ ID NO: 4055 - RNA, 23 nt, Homo sapiens
  source 1..23: mol_type = transcribed RNA
cgccaagtgaagcctgggggcta

SEQ ID NO: 4056 - RNA, 23 nt, Homo sapiens
  source 1..23: mol_type = transcribed RNA
agggcataggagagggttgatat

SEQ ID NO: 4057 - RNA, 23 nt, Homo sapiens
  source 1..23: mol_type = transcribed RNA
atatcaaccctctcctatgccct

SEQ ID NO: 4058 - RNA, 22 nt, Homo sapiens
  source 1..22: mol_type = transcribed RNA
gaatgttgctcggtgaacccct

SEQ ID NO: 4059 - RNA, 22 nt, Homo sapiens
  source 1..22: mol_type = transcribed RNA
aggggttcaccgagcaacattc

SEQ ID NO: 4060 - RNA, 23 nt, Homo sapiens
  source 1..23: mol_type = transcribed RNA
aggttacccgagcaactttgcat

SEQ ID NO: 4061 - RNA, 23 nt, Homo sapiens
  source 1..23: mol_type = transcribed RNA
atgcaaagttgctcgggtaacct

SEQ ID NO: 4062 - RNA, 22 nt, Homo sapiens
  source 1..22: mol_type = transcribed RNA
tatgtaacacggtccactaacc

SEQ ID NO: 4063 - RNA, 22 nt, Homo sapiens
  source 1..22: mol_type = transcribed RNA
ggttagtggaccgtgttacata

SEQ ID NO: 4064 - RNA, 21 nt, Homo sapiens
  source 1..21: mol_type = transcribed RNA
tagtagaccgtatagcgtacg

SEQ ID NO: 4065 - RNA, 21 nt, Homo sapiens
  source 1..21: mol_type = transcribed RNA
cgtacgctatacggtctacta

SEQ ID NO: 4066 - RNA, 23 nt, Homo sapiens
  source 1..23: mol_type = transcribed RNA
acttcacctggtccactagccgt

SEQ ID NO: 4067 - RNA, 23 nt, Homo sapiens
  source 1..23: mol_type = transcribed RNA
acggctagtggaccaggtgaagt

SEQ ID NO: 4068 - RNA, 18 nt, Homo sapiens
  source 1..18: mol_type = transcribed RNA
gtgttctctgatggacag

SEQ ID NO: 4069 - RNA, 18 nt, Homo sapiens
  source 1..18: mol_type = transcribed RNA
ctgtccatcagagaacac

SEQ ID NO: 4070 - RNA, 22 nt, Homo sapiens
  source 1..22: mol_type = transcribed RNA
caggtcgtcttgcagggcttct

SEQ ID NO: 4071 - RNA, 22 nt, Homo sapiens
  source 1..22: mol_type = transcribed RNA
agaagccctgcaagacgacctg

SEQ ID NO: 4072 - RNA, 21 nt, Homo sapiens
  source 1..21: mol_type = transcribed RNA
tgtcttgcaggccgtcatgca

SEQ ID NO: 4073 - RNA, 21 nt, Homo sapiens
  source 1..21: mol_type = transcribed RNA
tgcatgacggcctgcaagaca

SEQ ID NO: 4074 - RNA, 22 nt, Homo sapiens
  source 1..22: mol_type = transcribed RNA
atcatgatgggctcctcggtgt

SEQ ID NO: 4075 - RNA, 22 nt, Homo sapiens
  source 1..22: mol_type = transcribed RNA
acaccgaggagcccatcatgat

SEQ ID NO: 4076 - RNA, 23 nt, Homo sapiens
  source 1..23: mol_type = transcribed RNA
ttgctagttgcactcctctctgt

SEQ ID NO: 4077 - RNA, 23 nt, Homo sapiens
  source 1..23: mol_type = transcribed RNA
acagagaggagtgcaactagcaa

SEQ ID NO: 4078 - RNA, 25 nt, Homo sapiens
  source 1..25: mol_type = transcribed RNA
taggcagtgtattgctagcggctgt

SEQ ID NO: 4079 - RNA, 25 nt, Homo sapiens
  source 1..25: mol_type = transcribed RNA
acagccgctagcaatacactgccta

SEQ ID NO: 4080 - RNA, 22 nt, Homo sapiens
  source 1..22: mol_type = transcribed RNA
attggggacattttgcattcat

SEQ ID NO: 4081 - RNA, 22 nt, Homo sapiens
  source 1..22: mol_type = transcribed RNA
atgaatgcaaaatgtccccaat

SEQ ID NO: 4082 - RNA, 22 nt, Homo sapiens
  source 1..22: mol_type = transcribed RNA
ttttgcgatgtgttcctaatat

SEQ ID NO: 4083 - RNA, 22 nt, Homo sapiens
  source 1..22: mol_type = transcribed RNA
atattaggaacacatcgcaaaa

SEQ ID NO: 4084 - RNA, 22 nt, Homo sapiens
  source 1..22: mol_type = transcribed RNA
ttgggatcattttgcatccata

SEQ ID NO: 4085 - RNA, 22 nt, Homo sapiens
  source 1..22: mol_type = transcribed RNA
tatggatgcaaaatgatcccaa

SEQ ID NO: 4086 - RNA, 22 nt, Homo sapiens
  source 1..22: mol_type = transcribed RNA
ttttgcaatatgttcctgaata

SEQ ID NO: 4087 - RNA, 22 nt, Homo sapiens
  source 1..22: mol_type = transcribed RNA
tattcaggaacatattgcaaaa

SEQ ID NO: 4088 - RNA, 21 nt, Homo sapiens
  source 1..21: mol_type = transcribed RNA
gcagtccatgggcatatacac

SEQ ID NO: 4089 - RNA, 21 nt, Homo sapiens
  source 1..21: mol_type = transcribed RNA
gtgtatatgcccatggactgc

SEQ ID NO: 4090 - RNA, 22 nt, Homo sapiens
  source 1..22: mol_type = transcribed RNA
tatgtgcctttggactacatcg

SEQ ID NO: 4091 - RNA, 22 nt, Homo sapiens
  source 1..22: mol_type = transcribed RNA
cgatgtagtccaaaggcacata

SEQ ID NO: 4092 - RNA, 23 nt, Homo sapiens
  source 1..23: mol_type = transcribed RNA
atacacatacacgcaacacacat

SEQ ID NO: 4093 - RNA, 23 nt, Homo sapiens
  source 1..23: mol_type = transcribed RNA
atgtgtgttgcgtgtatgtgtat

SEQ ID NO: 4094 - RNA, 23 nt, Homo sapiens
  source 1..23: mol_type = transcribed RNA
ttgcatgtcagattgtaattccc

SEQ ID NO: 4095 - RNA, 23 nt, Homo sapiens
  source 1..23: mol_type = transcribed RNA
gggaattacaatctgacatgcaa

SEQ ID NO: 4096 - RNA, 21 nt, Homo sapiens
  source 1..21: mol_type = transcribed RNA
tcactcctctcctcccgtctt

SEQ ID NO: 4097 - RNA, 21 nt, Homo sapiens
  source 1..21: mol_type = transcribed RNA
aagacgggaggagaggagtga

SEQ ID NO: 4098 - RNA, 22 nt, Homo sapiens
  source 1..22: mol_type = transcribed RNA
tcaggctcagtcccctcccgat

SEQ ID NO: 4099 - RNA, 22 nt, Homo sapiens
  source 1..22: mol_type = transcribed RNA
atcgggaggggactgagcctga

SEQ ID NO: 4100 - RNA, 22 nt, Homo sapiens
  source 1..22: mol_type = transcribed RNA
gtcatacacggctctcctctct

SEQ ID NO: 4101 - RNA, 22 nt, Homo sapiens
  source 1..22: mol_type = transcribed RNA
agagaggagagccgtgtatgac

SEQ ID NO: 4102 - RNA, 22 nt, Homo sapiens
  source 1..22: mol_type = transcribed RNA
agaggctggccgtgatgaattc

SEQ ID NO: 4103 - RNA, 22 nt, Homo sapiens
  source 1..22: mol_type = transcribed RNA
gaattcatcacggccagcctct

SEQ ID NO: 4104 - RNA, 22 nt, Homo sapiens
  source 1..22: mol_type = transcribed RNA
aatcatacagggacatccagtt

SEQ ID NO: 4105 - RNA, 22 nt, Homo sapiens
  source 1..22: mol_type = transcribed RNA
aactggatgtccctgtatgatt

SEQ ID NO: 4106 - RNA, 22 nt, Homo sapiens
  source 1..22: mol_type = transcribed RNA
aatcgtacagggtcatccactt

SEQ ID NO: 4107 - RNA, 22 nt, Homo sapiens
  source 1..22: mol_type = transcribed RNA
aagtggatgaccctgtacgatt

SEQ ID NO: 4108 - RNA, 21 nt, Homo sapiens
  source 1..21: mol_type = transcribed RNA
ttgaaaggctatttcttggtc

SEQ ID NO: 4109 - RNA, 21 nt, Homo sapiens
  source 1..21: mol_type = transcribed RNA
gaccaagaaatagcctttcaa

SEQ ID NO: 4110 - RNA, 21 nt, Homo sapiens
  source 1..21: mol_type = transcribed RNA
cccagataatggcactctcaa

SEQ ID NO: 4111 - RNA, 21 nt, Homo sapiens
  source 1..21: mol_type = transcribed RNA
ttgagagtgccattatctggg

SEQ ID NO: 4112 - RNA, 22 nt, Homo sapiens
  source 1..22: mol_type = transcribed RNA
caacctggaggactccatgctg

SEQ ID NO: 4113 - RNA, 22 nt, Homo sapiens
  source 1..22: mol_type = transcribed RNA
cagcatggagtcctccaggttg

SEQ ID NO: 4114 - RNA, 20 nt, Homo sapiens
  source 1..20: mol_type = transcribed RNA
ccatggatctccaggtgggt

SEQ ID NO: 4115 - RNA, 20 nt, Homo sapiens
  source 1..20: mol_type = transcribed RNA
acccacctggagatccatgg

SEQ ID NO: 4116 - RNA, 22 nt, Homo sapiens
  source 1..22: mol_type = transcribed RNA
cttatgcaagattcccttctac

SEQ ID NO: 4117 - RNA, 22 nt, Homo sapiens
  source 1..22: mol_type = transcribed RNA
gtagaagggaatcttgcataag

SEQ ID NO: 4118 - RNA, 22 nt, Homo sapiens
  source 1..22: mol_type = transcribed RNA
agtggggaacccttccatgagg

SEQ ID NO: 4119 - RNA, 22 nt, Homo sapiens
  source 1..22: mol_type = transcribed RNA
cctcatggaagggttccccact

SEQ ID NO: 4120 - RNA, 23 nt, Homo sapiens
  source 1..23: mol_type = transcribed RNA
aggacctgcgggacaagattctt

SEQ ID NO: 4121 - RNA, 23 nt, Homo sapiens
  source 1..23: mol_type = transcribed RNA
aagaatcttgtcccgcaggtcct

SEQ ID NO: 4122 - RNA, 22 nt, Homo sapiens
  source 1..22: mol_type = transcribed RNA
caaaccacactgtggtgttaga

SEQ ID NO: 4123 - RNA, 22 nt, Homo sapiens
  source 1..22: mol_type = transcribed RNA
tctaacaccacagtgtggtttg

SEQ ID NO: 4124 - RNA, 21 nt, Homo sapiens
  source 1..21: mol_type = transcribed RNA
cagcagcacactgtggtttgt

SEQ ID NO: 4125 - RNA, 21 nt, Homo sapiens
  source 1..21: mol_type = transcribed RNA
acaaaccacagtgtgctgctg

SEQ ID NO: 4126 - RNA, 23 nt, Homo sapiens
  source 1..23: mol_type = transcribed RNA
tttcaagccagggggcgtttttc

SEQ ID NO: 4127 - RNA, 23 nt, Homo sapiens
  source 1..23: mol_type = transcribed RNA
gaaaaacgccccctggcttgaaa

SEQ ID NO: 4128 - RNA, 20 nt, Homo sapiens
  source 1..20: mol_type = transcribed RNA
tcactacctgacaatacagt

SEQ ID NO: 4129 - RNA, 20 nt, Homo sapiens
  source 1..20: mol_type = transcribed RNA
actgtattgtcaggtagtga

SEQ ID NO: 4130 - RNA, 21 nt, Homo sapiens
  source 1..21: mol_type = transcribed RNA
tgctgtattgtcaggtagtga

SEQ ID NO: 4131 - RNA, 21 nt, Homo sapiens
  source 1..21: mol_type = transcribed RNA
tcactacctgacaatacagca

SEQ ID NO: 4132 - RNA, 22 nt, Homo sapiens
  source 1..22: mol_type = transcribed RNA
ttctgcctctgtccaggtcctt

SEQ ID NO: 4133 - RNA, 22 nt, Homo sapiens
  source 1..22: mol_type = transcribed RNA
aaggacctggacagaggcagaa

SEQ ID NO: 4134 - RNA, 24 nt, Homo sapiens
  source 1..24: mol_type = transcribed RNA
agggctggactcagcggcggagct

SEQ ID NO: 4135 - RNA, 24 nt, Homo sapiens
  source 1..24: mol_type = transcribed RNA
agctccgccgctgagtccagccct

SEQ ID NO: 4136 - RNA, 21 nt, Homo sapiens
  source 1..21: mol_type = transcribed RNA
tgactgcctcactgaccactt

SEQ ID NO: 4137 - RNA, 21 nt, Homo sapiens
  source 1..21: mol_type = transcribed RNA
aagtggtcagtgaggcagtca

SEQ ID NO: 4138 - RNA, 24 nt, Homo sapiens
  source 1..24: mol_type = transcribed RNA
aatttggtttctgaggcacttagt

SEQ ID NO: 4139 - RNA, 24 nt, Homo sapiens
  source 1..24: mol_type = transcribed RNA
actaagtgcctcagaaaccaaatt

SEQ ID NO: 4140 - RNA, 21 nt, Homo sapiens
  source 1..21: mol_type = transcribed RNA
tacttttctaggttgttgggg

SEQ ID NO: 4141 - RNA, 21 nt, Homo sapiens
  source 1..21: mol_type = transcribed RNA
ccccaacaacctagaaaagta

SEQ ID NO: 4142 - RNA, 23 nt, Homo sapiens
  source 1..23: mol_type = transcribed RNA
tcacaacaaccttgcagggtaga

SEQ ID NO: 4143 - RNA, 23 nt, Homo sapiens
  source 1..23: mol_type = transcribed RNA
tctaccctgcaaggttgttgtga

SEQ ID NO: 4144 - RNA, 22 nt, Homo sapiens
  source 1..22: mol_type = transcribed RNA
cttggattttcctgggcctcag

SEQ ID NO: 4145 - RNA, 22 nt, Homo sapiens
  source 1..22: mol_type = transcribed RNA
ctgaggcccaggaaaatccaag

SEQ ID NO: 4146 - RNA, 22 nt, Homo sapiens
  source 1..22: mol_type = transcribed RNA
tgaggacagggcaaattcacga

SEQ ID NO: 4147 - RNA, 22 nt, Homo sapiens
  source 1..22: mol_type = transcribed RNA
tcgtgaatttgccctgtcctca

SEQ ID NO: 4148 - RNA, 22 nt, Homo sapiens
  source 1..22: mol_type = transcribed RNA
atcatatgaaccaaactctaat

SEQ ID NO: 4149 - RNA, 22 nt, Homo sapiens
  source 1..22: mol_type = transcribed RNA
attagagtttggttcatatgat

SEQ ID NO: 4150 - RNA, 22 nt, Homo sapiens
  source 1..22: mol_type = transcribed RNA
tagagtctggctgatatggttt

SEQ ID NO: 4151 - RNA, 22 nt, Homo sapiens
  source 1..22: mol_type = transcribed RNA
aaaccatatcagccagactcta

SEQ ID NO: 4152 - RNA, 21 nt, Homo sapiens
  source 1..21: mol_type = transcribed RNA
cctgtgctcccagggcctcgc

SEQ ID NO: 4153 - RNA, 21 nt, Homo sapiens
  source 1..21: mol_type = transcribed RNA
gcgaggccctgggagcacagg

SEQ ID NO: 4154 - RNA, 22 nt, Homo sapiens
  source 1..22: mol_type = transcribed RNA
tgaggcccttggggcacagtgg

SEQ ID NO: 4155 - RNA, 22 nt, Homo sapiens
  source 1..22: mol_type = transcribed RNA
ccactgtgccccaagggcctca

SEQ ID NO: 4156 - RNA, 22 nt, Homo sapiens
  source 1..22: mol_type = transcribed RNA
tcctaaatctgaaagtccaaaa

SEQ ID NO: 4157 - RNA, 22 nt, Homo sapiens
  source 1..22: mol_type = transcribed RNA
ttttggactttcagatttagga

SEQ ID NO: 4158 - RNA, 24 nt, Homo sapiens
  source 1..24: mol_type = transcribed RNA
ttggactttttcagatttggggat

SEQ ID NO: 4159 - RNA, 24 nt, Homo sapiens
  source 1..24: mol_type = transcribed RNA
atccccaaatctgaaaaagtccaa

SEQ ID NO: 4160 - RNA, 22 nt, Homo sapiens
  source 1..22: mol_type = transcribed RNA
atgcacctgggcaaggattctg

SEQ ID NO: 4161 - RNA, 22 nt, Homo sapiens
  source 1..22: mol_type = transcribed RNA
cagaatccttgcccaggtgcat

SEQ ID NO: 4162 - RNA, 23 nt, Homo sapiens
  source 1..23: mol_type = transcribed RNA
taatccttgctacctgggtgaga

SEQ ID NO: 4163 - RNA, 23 nt, Homo sapiens
  source 1..23: mol_type = transcribed RNA
tctcacccaggtagcaaggatta

SEQ ID NO: 4164 - RNA, 22 nt, Homo sapiens
  source 1..22: mol_type = transcribed RNA
ttttgtgtctcccattccccag

SEQ ID NO: 4165 - RNA, 22 nt, Homo sapiens
  source 1..22: mol_type = transcribed RNA
ctggggaatgggagacacaaaa

SEQ ID NO: 4166 - RNA, 22 nt, Homo sapiens
  source 1..22: mol_type = transcribed RNA
agggggatggcagagcaaaatt

SEQ ID NO: 4167 - RNA, 22 nt, Homo sapiens
  source 1..22: mol_type = transcribed RNA
aattttgctctgccatccccct

SEQ ID NO: 4168 - RNA, 22 nt, Homo sapiens
  source 1..22: mol_type = transcribed RNA
gtgcatggctgtatatataaca

SEQ ID NO: 4169 - RNA, 22 nt, Homo sapiens
  source 1..22: mol_type = transcribed RNA
tgttatatatacagccatgcac

SEQ ID NO: 4170 - RNA, 21 nt, Homo sapiens
  source 1..21: mol_type = transcribed RNA
tatatatacagccatgcactc

SEQ ID NO: 4171 - RNA, 21 nt, Homo sapiens
  source 1..21: mol_type = transcribed RNA
gagtgcatggctgtatatata

SEQ ID NO: 4172 - RNA, 22 nt, Homo sapiens
  source 1..22: mol_type = transcribed RNA
aatgcacccgggcaaggattct

SEQ ID NO: 4173 - RNA, 22 nt, Homo sapiens
  source 1..22: mol_type = transcribed RNA
agaatccttgcccgggtgcatt

SEQ ID NO: 4174 - RNA, 22 nt, Homo sapiens
  source 1..22: mol_type = transcribed RNA
aatcctttgtccctgggtgaga

SEQ ID NO: 4175 - RNA, 22 nt, Homo sapiens
  source 1..22: mol_type = transcribed RNA
tctcacccagggacaaaggatt

SEQ ID NO: 4176 - RNA, 22 nt, Homo sapiens
  source 1..22: mol_type = transcribed RNA
aatgcacctgggcaaggattca

SEQ ID NO: 4177 - RNA, 22 nt, Homo sapiens
  source 1..22: mol_type = transcribed RNA
tgaatccttgcccaggtgcatt

SEQ ID NO: 4178 - RNA, 21 nt, Homo sapiens
  source 1..21: mol_type = transcribed RNA
atccttgctatctgggtgcta

SEQ ID NO: 4179 - RNA, 21 nt, Homo sapiens
  source 1..21: mol_type = transcribed RNA
tagcacccagatagcaaggat

SEQ ID NO: 4180 - RNA, 22 nt, Homo sapiens
  source 1..22: mol_type = transcribed RNA
agaccctggtctgcactctatc

SEQ ID NO: 4181 - RNA, 22 nt, Homo sapiens
  source 1..22: mol_type = transcribed RNA
gatagagtgcagaccagggtct

SEQ ID NO: 4182 - RNA, 21 nt, Homo sapiens
  source 1..21: mol_type = transcribed RNA
ttgcagctgcggttgtaaggt

SEQ ID NO: 4183 - RNA, 21 nt, Homo sapiens
  source 1..21: mol_type = transcribed RNA
accttacaaccgcagctgcaa

SEQ ID NO: 4184 - RNA, 22 nt, Homo sapiens
  source 1..22: mol_type = transcribed RNA
cgtcaacacttgctggtttcct

SEQ ID NO: 4185 - RNA, 22 nt, Homo sapiens
  source 1..22: mol_type = transcribed RNA
aggaaaccagcaagtgttgacg

SEQ ID NO: 4186 - RNA, 22 nt, Homo sapiens
  source 1..22: mol_type = transcribed RNA
gggagccaggaagtattgatgt

SEQ ID NO: 4187 - RNA, 22 nt, Homo sapiens
  source 1..22: mol_type = transcribed RNA
acatcaatacttcctggctccc

SEQ ID NO: 4188 - RNA, 21 nt, Homo sapiens
  source 1..21: mol_type = transcribed RNA
taaggcacccttctgagtaga

SEQ ID NO: 4189 - RNA, 21 nt, Homo sapiens
  source 1..21: mol_type = transcribed RNA
tctactcagaagggtgcctta

SEQ ID NO: 4190 - RNA, 22 nt, Homo sapiens
  source 1..22: mol_type = transcribed RNA
tattcaggaaggtgttacttaa

SEQ ID NO: 4191 - RNA, 22 nt, Homo sapiens
  source 1..22: mol_type = transcribed RNA
ttaagtaacaccttcctgaata

SEQ ID NO: 4192 - RNA, 21 nt, Homo sapiens
  source 1..21: mol_type = transcribed RNA
ttttgcaccttttggagtgaa

SEQ ID NO: 4193 - RNA, 21 nt, Homo sapiens
  source 1..21: mol_type = transcribed RNA
ttcactccaaaaggtgcaaaa

SEQ ID NO: 4194 - RNA, 23 nt, Homo sapiens
  source 1..23: mol_type = transcribed RNA
tgattgtagccttttggagtaga

SEQ ID NO: 4195 - RNA, 23 nt, Homo sapiens
  source 1..23: mol_type = transcribed RNA
tctactccaaaaggctacaatca

SEQ ID NO: 4196 - RNA, 23 nt, Homo sapiens
  source 1..23: mol_type = transcribed RNA
gggtttgtagctttgctggcatg

SEQ ID NO: 4197 - RNA, 23 nt, Homo sapiens
  source 1..23: mol_type = transcribed RNA
catgccagcaaagctacaaaccc

SEQ ID NO: 4198 - RNA, 23 nt, Homo sapiens
  source 1..23: mol_type = transcribed RNA
cagggctcagggattggatggag

SEQ ID NO: 4199 - RNA, 23 nt, Homo sapiens
  source 1..23: mol_type = transcribed RNA
ctccatccaatccctgagccctg

SEQ ID NO: 4200 - RNA, 23 nt, Homo sapiens
  source 1..23: mol_type = transcribed RNA
atgctactcggaaatcccactga

SEQ ID NO: 4201 - RNA, 23 nt, Homo sapiens
  source 1..23: mol_type = transcribed RNA
tcagtgggatttccgagtagcat

SEQ ID NO: 4202 - RNA, 21 nt, Homo sapiens
  source 1..21: mol_type = transcribed RNA
gtgggatttctgagtagcatc

SEQ ID NO: 4203 - RNA, 21 nt, Homo sapiens
  source 1..21: mol_type = transcribed RNA
gatgctactcagaaatcccac

SEQ ID NO: 4204 - RNA, 23 nt, Homo sapiens
  source 1..23: mol_type = transcribed RNA
ccggggcagattggtgtagggtg

SEQ ID NO: 4205 - RNA, 23 nt, Homo sapiens
  source 1..23: mol_type = transcribed RNA
caccctacaccaatctgccccgg

SEQ ID NO: 4206 - RNA, 23 nt, Homo sapiens
  source 1..23: mol_type = transcribed RNA
acggagacgacaagactgtgctg

SEQ ID NO: 4207 - RNA, 23 nt, Homo sapiens
  source 1..23: mol_type = transcribed RNA
cagcacagtcttgtcgtctccgt

SEQ ID NO: 4208 - RNA, 22 nt, Homo sapiens
  source 1..22: mol_type = transcribed RNA
aatccacgctgagcttggcatc

SEQ ID NO: 4209 - RNA, 22 nt, Homo sapiens
  source 1..22: mol_type = transcribed RNA
gatgccaagctcagcgtggatt

SEQ ID NO: 4210 - RNA, 23 nt, Homo sapiens
  source 1..23: mol_type = transcribed RNA
aggaaatgaggctggctaggagc

SEQ ID NO: 4211 - RNA, 23 nt, Homo sapiens
  source 1..23: mol_type = transcribed RNA
gctcctagccagcctcatttcct

SEQ ID NO: 4212 - RNA, 22 nt, Homo sapiens
  source 1..22: mol_type = transcribed RNA
tgattggtacgtctgtgggtag

SEQ ID NO: 4213 - RNA, 22 nt, Homo sapiens
  source 1..22: mol_type = transcribed RNA
ctacccacagacgtaccaatca

SEQ ID NO: 4214 - RNA, 22 nt, Homo sapiens
  source 1..22: mol_type = transcribed RNA
aatcagtgaatgccttgaacct

SEQ ID NO: 4215 - RNA, 22 nt, Homo sapiens
  source 1..22: mol_type = transcribed RNA
aggttcaaggcattcactgatt

SEQ ID NO: 4216 - RNA, 21 nt, Homo sapiens
  source 1..21: mol_type = transcribed RNA
ttacaggcgtgaaccaccgcg

SEQ ID NO: 4217 - RNA, 21 nt, Homo sapiens
  source 1..21: mol_type = transcribed RNA
cgcggtggttcacgcctgtaa

SEQ ID NO: 4218 - RNA, 21 nt, Homo sapiens
  source 1..21: mol_type = transcribed RNA
tactgcagacagtggcaatca

SEQ ID NO: 4219 - RNA, 21 nt, Homo sapiens
  source 1..21: mol_type = transcribed RNA
tgattgccactgtctgcagta

SEQ ID NO: 4220 - RNA, 21 nt, Homo sapiens
  source 1..21: mol_type = transcribed RNA
gtttcaccatgttggtcaggc

SEQ ID NO: 4221 - RNA, 21 nt, Homo sapiens
  source 1..21: mol_type = transcribed RNA
gcctgaccaacatggtgaaac

SEQ ID NO: 4222 - RNA, 23 nt, Homo sapiens
  source 1..23: mol_type = transcribed RNA
taaatttcacctttctgagaagg

SEQ ID NO: 4223 - RNA, 23 nt, Homo sapiens
  source 1..23: mol_type = transcribed RNA
ccttctcagaaaggtgaaattta

SEQ ID NO: 4224 - RNA, 22 nt, Homo sapiens
  source 1..22: mol_type = transcribed RNA
ttcacaaggaggtgtcatttat

SEQ ID NO: 4225 - RNA, 22 nt, Homo sapiens
  source 1..22: mol_type = transcribed RNA
ataaatgacacctccttgtgaa

SEQ ID NO: 4226 - RNA, 23 nt, Homo sapiens
  source 1..23: mol_type = transcribed RNA
taaatttcacctttctgagaaga

SEQ ID NO: 4227 - RNA, 23 nt, Homo sapiens
  source 1..23: mol_type = transcribed RNA
tcttctcagaaaggtgaaattta

SEQ ID NO: 4228 - RNA, 22 nt, Homo sapiens
  source 1..22: mol_type = transcribed RNA
ttctcaaggaggtgtcgtttat

SEQ ID NO: 4229 - RNA, 22 nt, Homo sapiens
  source 1..22: mol_type = transcribed RNA
ataaacgacacctccttgagaa

SEQ ID NO: 4230 - RNA, 21 nt, Homo sapiens
  source 1..21: mol_type = transcribed RNA
attgacacttctgtgagtaga

SEQ ID NO: 4231 - RNA, 21 nt, Homo sapiens
  source 1..21: mol_type = transcribed RNA
tctactcacagaagtgtcaat

SEQ ID NO: 4232 - RNA, 23 nt, Homo sapiens
  source 1..23: mol_type = transcribed RNA
tactctggagagtgacaatcatg

SEQ ID NO: 4233 - RNA, 23 nt, Homo sapiens
  source 1..23: mol_type = transcribed RNA
catgattgtcactctccagagta

SEQ ID NO: 4234 - RNA, 21 nt, Homo sapiens
  source 1..21: mol_type = transcribed RNA
attgacacctctgtgagtgga

SEQ ID NO: 4235 - RNA, 21 nt, Homo sapiens
  source 1..21: mol_type = transcribed RNA
tccactcacagaggtgtcaat

SEQ ID NO: 4236 - RNA, 22 nt, Homo sapiens
  source 1..22: mol_type = transcribed RNA
ttctcaagagggaggcaatcat

SEQ ID NO: 4237 - RNA, 22 nt, Homo sapiens
  source 1..22: mol_type = transcribed RNA
atgattgcctccctcttgagaa

SEQ ID NO: 4238 - RNA, 22 nt, Homo sapiens
  source 1..22: mol_type = transcribed RNA
gagtgccttcttttggagcgtt

SEQ ID NO: 4239 - RNA, 22 nt, Homo sapiens
  source 1..22: mol_type = transcribed RNA
aacgctccaaaagaaggcactc

SEQ ID NO: 4240 - RNA, 18 nt, Homo sapiens
  source 1..18: mol_type = transcribed RNA
tgcttcctttcagagggt

SEQ ID NO: 4241 - RNA, 18 nt, Homo sapiens
  source 1..18: mol_type = transcribed RNA
accctctgaaaggaagca

SEQ ID NO: 4242 - RNA, 22 nt, Homo sapiens
  source 1..22: mol_type = transcribed RNA
atctggaggtaagaagcacttt

SEQ ID NO: 4243 - RNA, 22 nt, Homo sapiens
  source 1..22: mol_type = transcribed RNA
aaagtgcttcttacctccagat

SEQ ID NO: 4244 - RNA, 22 nt, Homo sapiens
  source 1..22: mol_type = transcribed RNA
gaaagcgcttccctttgctgga

SEQ ID NO: 4245 - RNA, 22 nt, Homo sapiens
  source 1..22: mol_type = transcribed RNA
tccagcaaagggaagcgctttc

SEQ ID NO: 4246 - RNA, 20 nt, Homo sapiens
  source 1..20: mol_type = transcribed RNA
ctgcaaagggaagccctttc

SEQ ID NO: 4247 - RNA, 20 nt, Homo sapiens
  source 1..20: mol_type = transcribed RNA
gaaagggcttccctttgcag

SEQ ID NO: 4248 - RNA, 21 nt, Homo sapiens
  source 1..21: mol_type = transcribed RNA
caaagcgcttccctttggagc

SEQ ID NO: 4249 - RNA, 21 nt, Homo sapiens
  source 1..21: mol_type = transcribed RNA
gctccaaagggaagcgctttg

SEQ ID NO: 4250 - RNA, 22 nt, Homo sapiens
  source 1..22: mol_type = transcribed RNA
ctctagagggaagcactttctg

SEQ ID NO: 4251 - RNA, 22 nt, Homo sapiens
  source 1..22: mol_type = transcribed RNA
cagaaagtgcttccctctagag

SEQ ID NO: 4252 - RNA, 21 nt, Homo sapiens
  source 1..21: mol_type = transcribed RNA
aaagcgcttcccttcagagtg

SEQ ID NO: 4253 - RNA, 21 nt, Homo sapiens
  source 1..21: mol_type = transcribed RNA
cactctgaagggaagcgcttt

SEQ ID NO: 4254 - RNA, 22 nt, Homo sapiens
  source 1..22: mol_type = transcribed RNA
ctctagagggaagcgctttctg

SEQ ID NO: 4255 - RNA, 22 nt, Homo sapiens
  source 1..22: mol_type = transcribed RNA
cagaaagcgcttccctctagag

SEQ ID NO: 4256 - RNA, 22 nt, Homo sapiens
  source 1..22: mol_type = transcribed RNA
aaagtgcatccttttagaggtt

SEQ ID NO: 4257 - RNA, 22 nt, Homo sapiens
  source 1..22: mol_type = transcribed RNA
aacctctaaaaggatgcacttt

SEQ ID NO: 4258 - RNA, 22 nt, Homo sapiens
  source 1..22: mol_type = transcribed RNA
ctctagagggaagcgctttctg

SEQ ID NO: 4259 - RNA, 22 nt, Homo sapiens
  source 1..22: mol_type = transcribed RNA
cagaaagcgcttccctctagag

SEQ ID NO: 4260 - RNA, 22 nt, Homo sapiens
  source 1..22: mol_type = transcribed RNA
aaagtgcatctttttagaggat

SEQ ID NO: 4261 - RNA, 22 nt, Homo sapiens
  source 1..22: mol_type = transcribed RNA
atcctctaaaaagatgcacttt

SEQ ID NO: 4262 - RNA, 22 nt, Homo sapiens
  source 1..22: mol_type = transcribed RNA
ctctagagggaagcgctttctg

SEQ ID NO: 4263 - RNA, 22 nt, Homo sapiens
  source 1..22: mol_type = transcribed RNA
cagaaagcgcttccctctagag

SEQ ID NO: 4264 - RNA, 21 nt, Homo sapiens
  source 1..21: mol_type = transcribed RNA
aaagtgcttccttttagaggg

SEQ ID NO: 4265 - RNA, 21 nt, Homo sapiens
  source 1..21: mol_type = transcribed RNA
ccctctaaaaggaagcacttt

SEQ ID NO: 4266 - RNA, 22 nt, Homo sapiens
  source 1..22: mol_type = transcribed RNA
aaagtgcttccttttagagggt

SEQ ID NO: 4267 - RNA, 22 nt, Homo sapiens
  source 1..22: mol_type = transcribed RNA
accctctaaaaggaagcacttt

SEQ ID NO: 4268 - RNA, 22 nt, Homo sapiens
  source 1..22: mol_type = transcribed RNA
ctctagagggaagcactttctg

SEQ ID NO: 4269 - RNA, 22 nt, Homo sapiens
  source 1..22: mol_type = transcribed RNA
cagaaagtgcttccctctagag

SEQ ID NO: 4270 - RNA, 22 nt, Homo sapiens
  source 1..22: mol_type = transcribed RNA
aaagtgcttctctttggtgggt

SEQ ID NO: 4271 - RNA, 22 nt, Homo sapiens
  source 1..22: mol_type = transcribed RNA
acccaccaaagagaagcacttt

SEQ ID NO: 4272 - RNA, 20 nt, Homo sapiens
  source 1..20: mol_type = transcribed RNA
ctacaaagggaagccctttc

SEQ ID NO: 4273 - RNA, 20 nt, Homo sapiens
  source 1..20: mol_type = transcribed RNA
gaaagggcttccctttgtag

SEQ ID NO: 4274 - RNA, 21 nt, Homo sapiens
  source 1..21: mol_type = transcribed RNA
aaagtgcttcctttttgaggg

SEQ ID NO: 4275 - RNA, 21 nt, Homo sapiens
  source 1..21: mol_type = transcribed RNA
ccctcaaaaaggaagcacttt

SEQ ID NO: 4276 - RNA, 22 nt, Homo sapiens
  source 1..22: mol_type = transcribed RNA
aagtgcttccttttagagggtt

SEQ ID NO: 4277 - RNA, 22 nt, Homo sapiens
  source 1..22: mol_type = transcribed RNA
aaccctctaaaaggaagcactt

SEQ ID NO: 4278 - RNA, 24 nt, Homo sapiens
  source 1..24: mol_type = transcribed RNA
acaaagtgcttccctttagagtgt

SEQ ID NO: 4279 - RNA, 24 nt, Homo sapiens
  source 1..24: mol_type = transcribed RNA
acactctaaagggaagcactttgt

SEQ ID NO: 4280 - RNA, 22 nt, Homo sapiens
  source 1..22: mol_type = transcribed RNA
aacgcacttccctttagagtgt

SEQ ID NO: 4281 - RNA, 22 nt, Homo sapiens
  source 1..22: mol_type = transcribed RNA
acactctaaagggaagtgcgtt

SEQ ID NO: 4282 - RNA, 22 nt, Homo sapiens
  source 1..22: mol_type = transcribed RNA
aaaatggttccctttagagtgt

SEQ ID NO: 4283 - RNA, 22 nt, Homo sapiens
  source 1..22: mol_type = transcribed RNA
acactctaaagggaaccatttt

SEQ ID NO: 4284 - RNA, 22 nt, Homo sapiens
  source 1..22: mol_type = transcribed RNA
ctctagagggaagcgctttctg

SEQ ID NO: 4285 - RNA, 22 nt, Homo sapiens
  source 1..22: mol_type = transcribed RNA
cagaaagcgcttccctctagag

SEQ ID NO: 4286 - RNA, 23 nt, Homo sapiens
  source 1..23: mol_type = transcribed RNA
gaacgcgcttccctatagagggt

SEQ ID NO: 4287 - RNA, 23 nt, Homo sapiens
  source 1..23: mol_type = transcribed RNA
accctctatagggaagcgcgttc

SEQ ID NO: 4288 - RNA, 22 nt, Homo sapiens
  source 1..22: mol_type = transcribed RNA
ctctagagggaagcgctttctg

SEQ ID NO: 4289 - RNA, 22 nt, Homo sapiens
  source 1..22: mol_type = transcribed RNA
cagaaagcgcttccctctagag

SEQ ID NO: 4290 - RNA, 21 nt, Homo sapiens
  source 1..21: mol_type = transcribed RNA
gaaggcgcttccctttggagt

SEQ ID NO: 4291 - RNA, 21 nt, Homo sapiens
  source 1..21: mol_type = transcribed RNA
actccaaagggaagcgccttc

SEQ ID NO: 4292 - RNA, 20 nt, Homo sapiens
  source 1..20: mol_type = transcribed RNA
ctgcaaagggaagccctttc

SEQ ID NO: 4293 - RNA, 20 nt, Homo sapiens
  source 1..20: mol_type = transcribed RNA
gaaagggcttccctttgcag

SEQ ID NO: 4294 - RNA, 22 nt, Homo sapiens
  source 1..22: mol_type = transcribed RNA
cctcccacacccaaggcttgca

SEQ ID NO: 4295 - RNA, 22 nt, Homo sapiens
  source 1..22: mol_type = transcribed RNA
tgcaagccttgggtgtgggagg

SEQ ID NO: 4296 - RNA, 22 nt, Homo sapiens
  source 1..22: mol_type = transcribed RNA
catgccttgagtgtaggaccgt

SEQ ID NO: 4297 - RNA, 22 nt, Homo sapiens
  source 1..22: mol_type = transcribed RNA
acggtcctacactcaaggcatg

SEQ ID NO: 4298 - RNA, 22 nt, Homo sapiens
  source 1..22: mol_type = transcribed RNA
atcatacaaggacaatttcttt

SEQ ID NO: 4299 - RNA, 22 nt, Homo sapiens
  source 1..22: mol_type = transcribed RNA
aaagaaattgtccttgtatgat

SEQ ID NO: 4300 - RNA, 22 nt, Homo sapiens
  source 1..22: mol_type = transcribed RNA
ggagaaattatccttggtgtgt

SEQ ID NO: 4301 - RNA, 22 nt, Homo sapiens
  source 1..22: mol_type = transcribed RNA
acacaccaaggataatttctcc

SEQ ID NO: 4302 - RNA, 22 nt, Homo sapiens
  source 1..22: mol_type = transcribed RNA
tggtgggcacagaatctggact

SEQ ID NO: 4303 - RNA, 22 nt, Homo sapiens
  source 1..22: mol_type = transcribed RNA
agtccagattctgtgcccacca

SEQ ID NO: 4304 - RNA, 25 nt, Homo sapiens
  source 1..25: mol_type = transcribed RNA
aaaggattctgctgtcggtcccact

SEQ ID NO: 4305 - RNA, 25 nt, Homo sapiens
  source 1..25: mol_type = transcribed RNA
agtgggaccgacagcagaatccttt

SEQ ID NO: 4306 - RNA, 23 nt, Homo sapiens
  source 1..23: mol_type = transcribed RNA
tcggggatcatcatgtcacgaga

SEQ ID NO: 4307 - RNA, 23 nt, Homo sapiens
  source 1..23: mol_type = transcribed RNA
tctcgtgacatgatgatccccga

SEQ ID NO: 4308 - RNA, 22 nt, Homo sapiens
  source 1..22: mol_type = transcribed RNA
aaacattcgcggtgcacttctt

SEQ ID NO: 4309 - RNA, 22 nt, Homo sapiens
  source 1..22: mol_type = transcribed RNA
aagaagtgcaccgcgaatgttt

SEQ ID NO: 4310 - RNA, 22 nt, Homo sapiens
  source 1..22: mol_type = transcribed RNA
attctgcatttttagcaagttc

SEQ ID NO: 4311 - RNA, 22 nt, Homo sapiens
  source 1..22: mol_type = transcribed RNA
gaacttgctaaaaatgcagaat

SEQ ID NO: 4312 - RNA, 22 nt, Homo sapiens
  source 1..22: mol_type = transcribed RNA
acctgaggttgtgcatttctaa

SEQ ID NO: 4313 - RNA, 22 nt, Homo sapiens
  source 1..22: mol_type = transcribed RNA
ttagaaatgcacaacctcaggt

SEQ ID NO: 4314 - RNA, 22 nt, Homo sapiens
  source 1..22: mol_type = transcribed RNA
tcagcaaacatttattgtgtgc

SEQ ID NO: 4315 - RNA, 22 nt, Homo sapiens
  source 1..22: mol_type = transcribed RNA
gcacacaataaatgtttgctga

SEQ ID NO: 4316 - RNA, 22 nt, Homo sapiens
  source 1..22: mol_type = transcribed RNA
tcagtaaatgtttattagatga

SEQ ID NO: 4317 - RNA, 22 nt, Homo sapiens
  source 1..22: mol_type = transcribed RNA
tcatctaataaacatttactga

SEQ ID NO: 4318 - RNA, 22 nt, Homo sapiens
  source 1..22: mol_type = transcribed RNA
agctacagttacttttgcacca

SEQ ID NO: 4319 - RNA, 22 nt, Homo sapiens
  source 1..22: mol_type = transcribed RNA
tggtgcaaaagtaactgtagct

SEQ ID NO: 4320 - RNA, 20 nt, Homo sapiens
  source 1..20: mol_type = transcribed RNA
taaaaactgcaattactttc

SEQ ID NO: 4321 - RNA, 20 nt, Homo sapiens
  source 1..20: mol_type = transcribed RNA
gaaagtaattgcagttttta

SEQ ID NO: 4322 - RNA, 23 nt, Homo sapiens
  source 1..23: mol_type = transcribed RNA
tgcaaaagtaattgcagtttttg

SEQ ID NO: 4323 - RNA, 23 nt, Homo sapiens
  source 1..23: mol_type = transcribed RNA
caaaaactgcaattacttttgca

SEQ ID NO: 4324 - RNA, 22 nt, Homo sapiens
  source 1..22: mol_type = transcribed RNA
aaagaccgtgactacttttgca

SEQ ID NO: 4325 - RNA, 22 nt, Homo sapiens
  source 1..22: mol_type = transcribed RNA
tgcaaaagtagtcacggtcttt

SEQ ID NO: 4326 - RNA, 22 nt, Homo sapiens
  source 1..22: mol_type = transcribed RNA
agaagtaactacggtttttgca

SEQ ID NO: 4327 - RNA, 22 nt, Homo sapiens
  source 1..22: mol_type = transcribed RNA
tgcaaaaaccgtagttacttct

SEQ ID NO: 4328 - RNA, 19 nt, Homo sapiens
  source 1..19: mol_type = transcribed RNA
aaaaaccacaattactttt

SEQ ID NO: 4329 - RNA, 19 nt, Homo sapiens
  source 1..19: mol_type = transcribed RNA
aaaagtaattgtggttttt

SEQ ID NO: 4330 - RNA, 19 nt, Homo sapiens
  source 1..19: mol_type = transcribed RNA
aaaagtaattgcggtcttt

SEQ ID NO: 4331 - RNA, 19 nt, Homo sapiens
  source 1..19: mol_type = transcribed RNA
aaagaccgcaattactttt

SEQ ID NO: 4332 - RNA, 22 nt, Homo sapiens
  source 1..22: mol_type = transcribed RNA
caaaaactgcaattacttttgc

SEQ ID NO: 4333 - RNA, 22 nt, Homo sapiens
  source 1..22: mol_type = transcribed RNA
gcaaaagtaattgcagtttttg

SEQ ID NO: 4334 - RNA, 22 nt, Homo sapiens
  source 1..22: mol_type = transcribed RNA
gaaagtaattgctgtttttgcc

SEQ ID NO: 4335 - RNA, 22 nt, Homo sapiens
  source 1..22: mol_type = transcribed RNA
ggcaaaaacagcaattactttc

SEQ ID NO: 4336 - RNA, 21 nt, Homo sapiens
  source 1..21: mol_type = transcribed RNA
taaaactgcagttatttttgc

SEQ ID NO: 4337 - RNA, 21 nt, Homo sapiens
  source 1..21: mol_type = transcribed RNA
gcaaaaataactgcagtttta

SEQ ID NO: 4338 - RNA, 21 nt, Homo sapiens
  source 1..21: mol_type = transcribed RNA
aaaagtaattgcagtttttgc

SEQ ID NO: 4339 - RNA, 21 nt, Homo sapiens
  source 1..21: mol_type = transcribed RNA
gcaaaaactgcaattactttt

SEQ ID NO: 4340 - RNA, 22 nt, Homo sapiens
  source 1..22: mol_type = transcribed RNA
taaaacccacaattatgtttgt

SEQ ID NO: 4341 - RNA, 22 nt, Homo sapiens
  source 1..22: mol_type = transcribed RNA
acaaacataattgtgggtttta

SEQ ID NO: 4342 - RNA, 22 nt, Homo sapiens
  source 1..22: mol_type = transcribed RNA
aaaagtaattgcgggttttgcc

SEQ ID NO: 4343 - RNA, 22 nt, Homo sapiens
  source 1..22: mol_type = transcribed RNA
ggcaaaacccgcaattactttt

SEQ ID NO: 4344 - RNA, 21 nt, Homo sapiens
  source 1..21: mol_type = transcribed RNA
caaaaccgcagtaacttttgt

SEQ ID NO: 4345 - RNA, 21 nt, Homo sapiens
  source 1..21: mol_type = transcribed RNA
acaaaagttactgcggttttg

SEQ ID NO: 4346 - RNA, 22 nt, Homo sapiens
  source 1..22: mol_type = transcribed RNA
aaaagttattgcggttttggct

SEQ ID NO: 4347 - RNA, 22 nt, Homo sapiens
  source 1..22: mol_type = transcribed RNA
agccaaaaccgcaataactttt

SEQ ID NO: 4348 - RNA, 21 nt, Homo sapiens
  source 1..21: mol_type = transcribed RNA
tggcagttacttttgcaccag

SEQ ID NO: 4349 - RNA, 21 nt, Homo sapiens
  source 1..21: mol_type = transcribed RNA
ctggtgcaaaagtaactgcca

SEQ ID NO: 4350 - RNA, 21 nt, Homo sapiens
  source 1..21: mol_type = transcribed RNA
aaaagtaattgcggtttttgc

SEQ ID NO: 4351 - RNA, 21 nt, Homo sapiens
  source 1..21: mol_type = transcribed RNA
gcaaaaaccgcaattactttt

SEQ ID NO: 4352 - RNA, 20 nt, Homo sapiens
  source 1..20: mol_type = transcribed RNA
aaaactgcagttacttttgc

SEQ ID NO: 4353 - RNA, 20 nt, Homo sapiens
  source 1..20: mol_type = transcribed RNA
gcaaaagtaactgcagtttt

SEQ ID NO: 4354 - RNA, 18 nt, Homo sapiens
  source 1..18: mol_type = transcribed RNA
aaaagtacttgcggattt

SEQ ID NO: 4355 - RNA, 18 nt, Homo sapiens
  source 1..18: mol_type = transcribed RNA
aaatccgcaagtactttt

SEQ ID NO: 4356 - RNA, 20 nt, Homo sapiens
  source 1..20: mol_type = transcribed RNA
gtgcaaaagtcatcacggtt

SEQ ID NO: 4357 - RNA, 20 nt, Homo sapiens
  source 1..20: mol_type = transcribed RNA
aaccgtgatgacttttgcac

SEQ ID NO: 4358 - RNA, 22 nt, Homo sapiens
  source 1..22: mol_type = transcribed RNA
gctggtgcaaaagtaatggcgg

SEQ ID NO: 4359 - RNA, 22 nt, Homo sapiens
  source 1..22: mol_type = transcribed RNA
ccgccattacttttgcaccagc

SEQ ID NO: 4360 - RNA, 22 nt, Homo sapiens
  source 1..22: mol_type = transcribed RNA
aaaagtaatcactgtttttgcc

SEQ ID NO: 4361 - RNA, 22 nt, Homo sapiens
  source 1..22: mol_type = transcribed RNA
ggcaaaaacagtgattactttt

SEQ ID NO: 4362 - RNA, 20 nt, Homo sapiens
  source 1..20: mol_type = transcribed RNA
agtgcctgagggagtaagag

SEQ ID NO: 4363 - RNA, 20 nt, Homo sapiens
  source 1..20: mol_type = transcribed RNA
ctcttactccctcaggcact

SEQ ID NO: 4364 - RNA, 22 nt, Homo sapiens
  source 1..22: mol_type = transcribed RNA
tgtcttactccctcaggcacat

SEQ ID NO: 4365 - RNA, 22 nt, Homo sapiens
  source 1..22: mol_type = transcribed RNA
atgtgcctgagggagtaagaca

SEQ ID NO: 4366 - RNA, 23 nt, Homo sapiens
  source 1..23: mol_type = transcribed RNA
agtgcctgagggagtaagagccc

SEQ ID NO: 4367 - RNA, 23 nt, Homo sapiens
  source 1..23: mol_type = transcribed RNA
gggctcttactccctcaggcact

SEQ ID NO: 4368 - RNA, 21 nt, Homo sapiens
  source 1..21: mol_type = transcribed RNA
gcgacccactcttggtttcca

SEQ ID NO: 4369 - RNA, 21 nt, Homo sapiens
  source 1..21: mol_type = transcribed RNA
tggaaaccaagagtgggtcgc

SEQ ID NO: 4370 - RNA, 22 nt, Homo sapiens
  source 1..22: mol_type = transcribed RNA
ttagcttaaggagtaccagatc

SEQ ID NO: 4371 - RNA, 22 nt, Homo sapiens
  source 1..22: mol_type = transcribed RNA
gatctggtactccttaagctaa

SEQ ID NO: 4372 - RNA, 21 nt, Homo sapiens
  source 1..21: mol_type = transcribed RNA
tatggtactccttaagctaac

SEQ ID NO: 4373 - RNA, 21 nt, Homo sapiens
  source 1..21: mol_type = transcribed RNA
gttagcttaaggagtaccata

SEQ ID NO: 4374 - RNA, 19 nt, Homo sapiens
  source 1..19: mol_type = transcribed RNA
tgagctgctgtaccaaaat

SEQ ID NO: 4375 - RNA, 19 nt, Homo sapiens
  source 1..19: mol_type = transcribed RNA
attttggtacagcagctca

SEQ ID NO: 4376 - RNA, 22 nt, Homo sapiens
  source 1..22: mol_type = transcribed RNA
cacatatgaagtgagccagcac

SEQ ID NO: 4377 - RNA, 22 nt, Homo sapiens
  source 1..22: mol_type = transcribed RNA
gtgctggctcacttcatatgtg

SEQ ID NO: 4378 - RNA, 22 nt, Homo sapiens
  source 1..22: mol_type = transcribed RNA
tgctggctcatttcatatgtgt

SEQ ID NO: 4379 - RNA, 22 nt, Homo sapiens
  source 1..22: mol_type = transcribed RNA
acacatatgaaatgagccagca

SEQ ID NO: 4380 - RNA, 22 nt, Homo sapiens
  source 1..22: mol_type = transcribed RNA
ttccatgcctcctagaagttcc

SEQ ID NO: 4381 - RNA, 22 nt, Homo sapiens
  source 1..22: mol_type = transcribed RNA
ggaacttctaggaggcatggaa

SEQ ID NO: 4382 - RNA, 22 nt, Homo sapiens
  source 1..22: mol_type = transcribed RNA
agccttccaggagaaatggaga

SEQ ID NO: 4383 - RNA, 22 nt, Homo sapiens
  source 1..22: mol_type = transcribed RNA
tctccatttctcctggaaggct

SEQ ID NO: 4384 - RNA, 22 nt, Homo sapiens
  source 1..22: mol_type = transcribed RNA
taaaactttaagtgtgcctagg

SEQ ID NO: 4385 - RNA, 22 nt, Homo sapiens
  source 1..22: mol_type = transcribed RNA
cctaggcacacttaaagtttta

SEQ ID NO: 4386 - RNA, 22 nt, Homo sapiens
  source 1..22: mol_type = transcribed RNA
taggcacacttaaagttatagc

SEQ ID NO: 4387 - RNA, 22 nt, Homo sapiens
  source 1..22: mol_type = transcribed RNA
gctataactttaagtgtgccta

SEQ ID NO: 4388 - RNA, 22 nt, Homo sapiens
  source 1..22: mol_type = transcribed RNA
gaatatgggtatattagtttgg

SEQ ID NO: 4389 - RNA, 22 nt, Homo sapiens
  source 1..22: mol_type = transcribed RNA
ccaaactaatatacccatattc

SEQ ID NO: 4390 - RNA, 22 nt, Homo sapiens
  source 1..22: mol_type = transcribed RNA
aaactaatatacccatattctg

SEQ ID NO: 4391 - RNA, 22 nt, Homo sapiens
  source 1..22: mol_type = transcribed RNA
cagaatatgggtatattagttt

SEQ ID NO: 4392 - RNA, 22 nt, Homo sapiens
  source 1..22: mol_type = transcribed RNA
tagttcttccctttgcccaatt

SEQ ID NO: 4393 - RNA, 22 nt, Homo sapiens
  source 1..22: mol_type = transcribed RNA
aattgggcaaagggaagaacta

SEQ ID NO: 4394 - RNA, 22 nt, Homo sapiens
  source 1..22: mol_type = transcribed RNA
cagggaaatgggaagaactaga

SEQ ID NO: 4395 - RNA, 22 nt, Homo sapiens
  source 1..22: mol_type = transcribed RNA
tctagttcttcccatttccctg

SEQ ID NO: 4396 - RNA, 22 nt, Homo sapiens
  source 1..22: mol_type = transcribed RNA
ctgaatagctgggactacaggt

SEQ ID NO: 4397 - RNA, 22 nt, Homo sapiens
  source 1..22: mol_type = transcribed RNA
acctgtagtcccagctattcag

SEQ ID NO: 4398 - RNA, 22 nt, Homo sapiens
  source 1..22: mol_type = transcribed RNA
tgaagtaccagctactcgagag

SEQ ID NO: 4399 - RNA, 22 nt, Homo sapiens
  source 1..22: mol_type = transcribed RNA
ctctcgagtagctggtacttca

SEQ ID NO: 4400 - RNA, 22 nt, Homo sapiens
  source 1..22: mol_type = transcribed RNA
cagagtgacaagctggttaaag

SEQ ID NO: 4401 - RNA, 22 nt, Homo sapiens
  source 1..22: mol_type = transcribed RNA
ctttaaccagcttgtcactctg

SEQ ID NO: 4402 - RNA, 22 nt, Homo sapiens
  source 1..22: mol_type = transcribed RNA
tatccagcttgttactatatgc

SEQ ID NO: 4403 - RNA, 22 nt, Homo sapiens
  source 1..22: mol_type = transcribed RNA
gcatatagtaacaagctggata

SEQ ID NO: 4404 - RNA, 21 nt, Homo sapiens
  source 1..21: mol_type = transcribed RNA
gccccgggcagtgtgatcatc

SEQ ID NO: 4405 - RNA, 21 nt, Homo sapiens
  source 1..21: mol_type = transcribed RNA
gatgatcacactgcccggggc

SEQ ID NO: 4406 - RNA, 18 nt, Homo sapiens
  source 1..18: mol_type = transcribed RNA
atggtcacctccgggact

SEQ ID NO: 4407 - RNA, 18 nt, Homo sapiens
  source 1..18: mol_type = transcribed RNA
agtcccggaggtgaccat

SEQ ID NO: 4408 - RNA, 19 nt, Homo sapiens
  source 1..19: mol_type = transcribed RNA
aagtcccactaatgccagc

SEQ ID NO: 4409 - RNA, 19 nt, Homo sapiens
  source 1..19: mol_type = transcribed RNA
gctggcattagtgggactt

SEQ ID NO: 4410 - RNA, 21 nt, Homo sapiens
  source 1..21: mol_type = transcribed RNA
actggcattagtgggactttt

SEQ ID NO: 4411 - RNA, 21 nt, Homo sapiens
  source 1..21: mol_type = transcribed RNA
aaaagtcccactaatgccagt

SEQ ID NO: 4412 - RNA, 23 nt, Homo sapiens
  source 1..23: mol_type = transcribed RNA
tgcacatggcaacctagctccca

SEQ ID NO: 4413 - RNA, 23 nt, Homo sapiens
  source 1..23: mol_type = transcribed RNA
tgggagctaggttgccatgtgca

SEQ ID NO: 4414 - RNA, 21 nt, Homo sapiens
  source 1..21: mol_type = transcribed RNA
ggctgggtgctcttgtgcagt

SEQ ID NO: 4415 - RNA, 21 nt, Homo sapiens
  source 1..21: mol_type = transcribed RNA
actgcacaagagcacccagcc

SEQ ID NO: 4416 - RNA, 21 nt, Homo sapiens
  source 1..21: mol_type = transcribed RNA
taaagtaaatatgcaccaaaa

SEQ ID NO: 4417 - RNA, 21 nt, Homo sapiens
  source 1..21: mol_type = transcribed RNA
ttttggtgcatatttacttta

SEQ ID NO: 4418 - RNA, 21 nt, Homo sapiens
  source 1..21: mol_type = transcribed RNA
aataaagttcatgtatggcaa

SEQ ID NO: 4419 - RNA, 21 nt, Homo sapiens
  source 1..21: mol_type = transcribed RNA
ttgccatacatgaactttatt

SEQ ID NO: 4420 - RNA, 21 nt, Homo sapiens
  source 1..21: mol_type = transcribed RNA
ttgccatacatagactttatt

SEQ ID NO: 4421 - RNA, 21 nt, Homo sapiens
  source 1..21: mol_type = transcribed RNA
aataaagtctatgtatggcaa

SEQ ID NO: 4422 - RNA, 21 nt, Homo sapiens
  source 1..21: mol_type = transcribed RNA
atacccatagcttagctccca

SEQ ID NO: 4423 - RNA, 21 nt, Homo sapiens
  source 1..21: mol_type = transcribed RNA
tgggagctaagctatgggtat

SEQ ID NO: 4424 - RNA, 21 nt, Homo sapiens
  source 1..21: mol_type = transcribed RNA
tgggagctaagctatgggtat

SEQ ID NO: 4425 - RNA, 21 nt, Homo sapiens
  source 1..21: mol_type = transcribed RNA
atacccatagcttagctccca

SEQ ID NO: 4426 - RNA, 22 nt, Homo sapiens
  source 1..22: mol_type = transcribed RNA
caaagtttaagatccttgaagt

SEQ ID NO: 4427 - RNA, 22 nt, Homo sapiens
  source 1..22: mol_type = transcribed RNA
acttcaaggatcttaaactttg

SEQ ID NO: 4428 - RNA, 22 nt, Homo sapiens
  source 1..22: mol_type = transcribed RNA
atcaaggatcttaaactttgcc

SEQ ID NO: 4429 - RNA, 22 nt, Homo sapiens
  source 1..22: mol_type = transcribed RNA
ggcaaagtttaagatccttgat

SEQ ID NO: 4430 - RNA, 20 nt, Homo sapiens
  source 1..20: mol_type = transcribed RNA
aaagtagctgtaccatttgc

SEQ ID NO: 4431 - RNA, 20 nt, Homo sapiens
  source 1..20: mol_type = transcribed RNA
gcaaatggtacagctacttt

SEQ ID NO: 4432 - RNA, 19 nt, Homo sapiens
  source 1..19: mol_type = transcribed RNA
aggcacggtgtcagcaggc

SEQ ID NO: 4433 - RNA, 19 nt, Homo sapiens
  source 1..19: mol_type = transcribed RNA
gcctgctgacaccgtgcct

SEQ ID NO: 4434 - RNA, 19 nt, Homo sapiens
  source 1..19: mol_type = transcribed RNA
gggcgcctgtgatcccaac

SEQ ID NO: 4435 - RNA, 19 nt, Homo sapiens
  source 1..19: mol_type = transcribed RNA
gttgggatcacaggcgccc

SEQ ID NO: 4436 - RNA, 23 nt, Homo sapiens
  source 1..23: mol_type = transcribed RNA
agtatgttcttccaggacagaac

SEQ ID NO: 4437 - RNA, 23 nt, Homo sapiens
  source 1..23: mol_type = transcribed RNA
gttctgtcctggaagaacatact

SEQ ID NO: 4438 - RNA, 22 nt, Homo sapiens
  source 1..22: mol_type = transcribed RNA
gagaaatgctggactaatctgc

SEQ ID NO: 4439 - RNA, 22 nt, Homo sapiens
  source 1..22: mol_type = transcribed RNA
gcagattagtccagcatttctc

SEQ ID NO: 4440 - RNA, 22 nt, Homo sapiens
  source 1..22: mol_type = transcribed RNA
agaaagggtggcaatacctctt

SEQ ID NO: 4441 - RNA, 22 nt, Homo sapiens
  source 1..22: mol_type = transcribed RNA
aagaggtattgccaccctttct

SEQ ID NO: 4442 - RNA, 22 nt, Homo sapiens
  source 1..22: mol_type = transcribed RNA
aggtattgccaccctttctagt

SEQ ID NO: 4443 - RNA, 22 nt, Homo sapiens
  source 1..22: mol_type = transcribed RNA
actagaaagggtggcaatacct

SEQ ID NO: 4444 - RNA, 22 nt, Homo sapiens
  source 1..22: mol_type = transcribed RNA
gtagcaccttgcaggataaggt

SEQ ID NO: 4445 - RNA, 22 nt, Homo sapiens
  source 1..22: mol_type = transcribed RNA
accttatcctgcaaggtgctac

SEQ ID NO: 4446 - RNA, 24 nt, Homo sapiens
  source 1..24: mol_type = transcribed RNA
tacagatgcagattctctgacttc

SEQ ID NO: 4447 - RNA, 24 nt, Homo sapiens
  source 1..24: mol_type = transcribed RNA
gaagtcagagaatctgcatctgta

SEQ ID NO: 4448 - RNA, 20 nt, Homo sapiens
  source 1..20: mol_type = transcribed RNA
aactctagcctgagcaacag

SEQ ID NO: 4449 - RNA, 20 nt, Homo sapiens
  source 1..20: mol_type = transcribed RNA
ctgttgctcaggctagagtt

SEQ ID NO: 4450 - RNA, 22 nt, Homo sapiens
  source 1..22: mol_type = transcribed RNA
acagcccagcagttatcacggg

SEQ ID NO: 4451 - RNA, 22 nt, Homo sapiens
  source 1..22: mol_type = transcribed RNA
cccgtgataactgctgggctgt

SEQ ID NO: 4452 - RNA, 21 nt, Homo sapiens
  source 1..21: mol_type = transcribed RNA
tatcgtatcgtattgtattgt

SEQ ID NO: 4453 - RNA, 21 nt, Homo sapiens
  source 1..21: mol_type = transcribed RNA
acaatacaatacgatacgata

SEQ ID NO: 4454 - RNA, 22 nt, Homo sapiens
  source 1..22: mol_type = transcribed RNA
ttagaacgttttagggtcaaat

SEQ ID NO: 4455 - RNA, 22 nt, Homo sapiens
  source 1..22: mol_type = transcribed RNA
atttgaccctaaaacgttctaa

SEQ ID NO: 4456 - RNA, 22 nt, Homo sapiens
  source 1..22: mol_type = transcribed RNA
taacaaacacctgtaaaacagc

SEQ ID NO: 4457 - RNA, 22 nt, Homo sapiens
  source 1..22: mol_type = transcribed RNA
gctgttttacaggtgtttgtta

SEQ ID NO: 4458 - RNA, 22 nt, Homo sapiens
  source 1..22: mol_type = transcribed RNA
agcatacacctgtagtcctaga

SEQ ID NO: 4459 - RNA, 22 nt, Homo sapiens
  source 1..22: mol_type = transcribed RNA
tctaggactacaggtgtatgct

SEQ ID NO: 4460 - RNA, 21 nt, Homo sapiens
  source 1..21: mol_type = transcribed RNA
agttaatgaatcctggaaagt

SEQ ID NO: 4461 - RNA, 21 nt, Homo sapiens
  source 1..21: mol_type = transcribed RNA
actttccaggattcattaact

SEQ ID NO: 4462 - RNA, 21 nt, Homo sapiens
  source 1..21: mol_type = transcribed RNA
tcagctactacctctattagg

SEQ ID NO: 4463 - RNA, 21 nt, Homo sapiens
  source 1..21: mol_type = transcribed RNA
cctaatagaggtagtagctga

SEQ ID NO: 4464 - RNA, 22 nt, Homo sapiens
  source 1..22: mol_type = transcribed RNA
ttgctctgagctccgagaaagc

SEQ ID NO: 4465 - RNA, 22 nt, Homo sapiens
  source 1..22: mol_type = transcribed RNA
gctttctcggagctcagagcaa

SEQ ID NO: 4466 - RNA, 22 nt, Homo sapiens
  source 1..22: mol_type = transcribed RNA
caaataataccacagtgggtgt

SEQ ID NO: 4467 - RNA, 22 nt, Homo sapiens
  source 1..22: mol_type = transcribed RNA
acacccactgtggtattatttg

SEQ ID NO: 4468 - RNA, 20 nt, Homo sapiens
  source 1..20: mol_type = transcribed RNA
aataatatcacagtaggtgt

SEQ ID NO: 4469 - RNA, 20 nt, Homo sapiens
  source 1..20: mol_type = transcribed RNA
acacctactgtgatattatt

SEQ ID NO: 4470 - RNA, 22 nt, Homo sapiens
  source 1..22: mol_type = transcribed RNA
aataatatcacagtaggtgtac

SEQ ID NO: 4471 - RNA, 22 nt, Homo sapiens
  source 1..22: mol_type = transcribed RNA
gtacacctactgtgatattatt

SEQ ID NO: 4472 - RNA, 22 nt, Homo sapiens
  source 1..22: mol_type = transcribed RNA
gcagtggctctgaaatgaactc

SEQ ID NO: 4473 - RNA, 22 nt, Homo sapiens
  source 1..22: mol_type = transcribed RNA
gagttcatttcagagccactgc

SEQ ID NO: 4474 - RNA, 21 nt, Homo sapiens
  source 1..21: mol_type = transcribed RNA
cagatcatgggactgtctcag

SEQ ID NO: 4475 - RNA, 21 nt, Homo sapiens
  source 1..21: mol_type = transcribed RNA
ctgagacagtcccatgatctg

SEQ ID NO: 4476 - RNA, 22 nt, Homo sapiens
  source 1..22: mol_type = transcribed RNA
actccaagaagaatctagacag

SEQ ID NO: 4477 - RNA, 22 nt, Homo sapiens
  source 1..22: mol_type = transcribed RNA
ctgtctagattcttcttggagt

SEQ ID NO: 4478 - RNA, 22 nt, Homo sapiens
  source 1..22: mol_type = transcribed RNA
ctcatttaagtagtctgatgcc

SEQ ID NO: 4479 - RNA, 22 nt, Homo sapiens
  source 1..22: mol_type = transcribed RNA
ggcatcagactacttaaatgag

SEQ ID NO: 4480 - RNA, 22 nt, Homo sapiens
  source 1..22: mol_type = transcribed RNA
tcaagtagtttcatgataaagg

SEQ ID NO: 4481 - RNA, 22 nt, Homo sapiens
  source 1..22: mol_type = transcribed RNA
cctttatcatgaaactacttga

SEQ ID NO: 4482 - RNA, 22 nt, Homo sapiens
  source 1..22: mol_type = transcribed RNA
tgggggagtgcagtgattgtgg

SEQ ID NO: 4483 - RNA, 22 nt, Homo sapiens
  source 1..22: mol_type = transcribed RNA
ccacaatcactgcactccccca

SEQ ID NO: 4484 - RNA, 22 nt, Homo sapiens
  source 1..22: mol_type = transcribed RNA
tcctgtctttccttgttggagc

SEQ ID NO: 4485 - RNA, 22 nt, Homo sapiens
  source 1..22: mol_type = transcribed RNA
gctccaacaaggaaagacagga

SEQ ID NO: 4486 - RNA, 22 nt, Homo sapiens
  source 1..22: mol_type = transcribed RNA
taatgcattaaattattgaagg

SEQ ID NO: 4487 - RNA, 22 nt, Homo sapiens
  source 1..22: mol_type = transcribed RNA
ccttcaataatttaatgcatta

SEQ ID NO: 4488 - RNA, 19 nt, Homo sapiens
  source 1..19: mol_type = transcribed RNA
ttattgtcacgttctgatt

SEQ ID NO: 4489 - RNA, 19 nt, Homo sapiens
  source 1..19: mol_type = transcribed RNA
aatcagaacgtgacaataa

SEQ ID NO: 4490 - RNA, 22 nt, Homo sapiens
  source 1..22: mol_type = transcribed RNA
tgagtcagcaacatatcccatg

SEQ ID NO: 4491 - RNA, 22 nt, Homo sapiens
  source 1..22: mol_type = transcribed RNA
catgggatatgttgctgactca

SEQ ID NO: 4492 - RNA, 18 nt, Homo sapiens
  source 1..18: mol_type = transcribed RNA
aggagaagtcgggaaggt

SEQ ID NO: 4493 - RNA, 18 nt, Homo sapiens
  source 1..18: mol_type = transcribed RNA
accttcccgacttctcct

SEQ ID NO: 4494 - RNA, 22 nt, Homo sapiens
  source 1..22: mol_type = transcribed RNA
cgaaaacagcaattacctttgc

SEQ ID NO: 4495 - RNA, 22 nt, Homo sapiens
  source 1..22: mol_type = transcribed RNA
gcaaaggtaattgctgttttcg

SEQ ID NO: 4496 - RNA, 22 nt, Homo sapiens
  source 1..22: mol_type = transcribed RNA
ttaggccatcatcccattatgc

SEQ ID NO: 4497 - RNA, 22 nt, Homo sapiens
  source 1..22: mol_type = transcribed RNA
gcataatgggatgatggcctaa

SEQ ID NO: 4498 - RNA, 23 nt, Homo sapiens
  source 1..23: mol_type = transcribed RNA
tgtttcggggctcatggcctgtg

SEQ ID NO: 4499 - RNA, 23 nt, Homo sapiens
  source 1..23: mol_type = transcribed RNA
cacaggccatgagccccgaaaca

SEQ ID NO: 4500 - RNA, 22 nt, Homo sapiens
  source 1..22: mol_type = transcribed RNA
aaaggtaattgcagtttttccc

SEQ ID NO: 4501 - RNA, 22 nt, Homo sapiens
  source 1..22: mol_type = transcribed RNA
gggaaaaactgcaattaccttt

SEQ ID NO: 4502 - RNA, 22 nt, Homo sapiens
  source 1..22: mol_type = transcribed RNA
ttctggataacatgctgaagct

SEQ ID NO: 4503 - RNA, 22 nt, Homo sapiens
  source 1..22: mol_type = transcribed RNA
agcttcagcatgttatccagaa

SEQ ID NO: 4504 - RNA, 22 nt, Homo sapiens
  source 1..22: mol_type = transcribed RNA
acgtttgaatgctgtacaaggc

SEQ ID NO: 4505 - RNA, 22 nt, Homo sapiens
  source 1..22: mol_type = transcribed RNA
gccttgtacagcattcaaacgt

SEQ ID NO: 4506 - RNA, 20 nt, Homo sapiens
  source 1..20: mol_type = transcribed RNA
atgagcgactgtgcctgacc

SEQ ID NO: 4507 - RNA, 20 nt, Homo sapiens
  source 1..20: mol_type = transcribed RNA
ggtcaggcacagtcgctcat

SEQ ID NO: 4508 - RNA, 19 nt, Homo sapiens
  source 1..19: mol_type = transcribed RNA
gagccagttggacaggagc

SEQ ID NO: 4509 - RNA, 19 nt, Homo sapiens
  source 1..19: mol_type = transcribed RNA
gctcctgtccaactggctc

SEQ ID NO: 4510 - RNA, 23 nt, Homo sapiens
  source 1..23: mol_type = transcribed RNA
ttcatttggtataaaccgcgatt

SEQ ID NO: 4511 - RNA, 23 nt, Homo sapiens
  source 1..23: mol_type = transcribed RNA
aatcgcggtttataccaaatgaa

SEQ ID NO: 4512 - RNA, 22 nt, Homo sapiens
  source 1..22: mol_type = transcribed RNA
ttgagaatgatgaatcattagg

SEQ ID NO: 4513 - RNA, 22 nt, Homo sapiens
  source 1..22: mol_type = transcribed RNA
cctaatgattcatcattctcaa

SEQ ID NO: 4514 - RNA, 23 nt, Homo sapiens
  source 1..23: mol_type = transcribed RNA
ttacagttgttcaaccagttact

SEQ ID NO: 4515 - RNA, 23 nt, Homo sapiens
  source 1..23: mol_type = transcribed RNA
agtaactggttgaacaactgtaa

SEQ ID NO: 4516 - RNA, 21 nt, Homo sapiens
  source 1..21: mol_type = transcribed RNA
caaagaggaaggtcccattac

SEQ ID NO: 4517 - RNA, 21 nt, Homo sapiens
  source 1..21: mol_type = transcribed RNA
gtaatgggaccttcctctttg

SEQ ID NO: 4518 - RNA, 22 nt, Homo sapiens
  source 1..22: mol_type = transcribed RNA
tcagttccaggccaaccaggct

SEQ ID NO: 4519 - RNA, 22 nt, Homo sapiens
  source 1..22: mol_type = transcribed RNA
agcctggttggcctggaactga

SEQ ID NO: 4520 - RNA, 22 nt, Homo sapiens
  source 1..22: mol_type = transcribed RNA
ttatggtttgcctgggactgag

SEQ ID NO: 4521 - RNA, 22 nt, Homo sapiens
  source 1..22: mol_type = transcribed RNA
ctcagtcccaggcaaaccataa

SEQ ID NO: 4522 - RNA, 19 nt, Homo sapiens
  source 1..19: mol_type = transcribed RNA
tgggcgtatctgtatgcta

SEQ ID NO: 4523 - RNA, 19 nt, Homo sapiens
  source 1..19: mol_type = transcribed RNA
tagcatacagatacgccca

SEQ ID NO: 4524 - RNA, 20 nt, Homo sapiens
  source 1..20: mol_type = transcribed RNA
agaccatgggttctcattgt

SEQ ID NO: 4525 - RNA, 20 nt, Homo sapiens
  source 1..20: mol_type = transcribed RNA
acaatgagaacccatggtct

SEQ ID NO: 4526 - RNA, 22 nt, Homo sapiens
  source 1..22: mol_type = transcribed RNA
ttgtgtcaatatgcgatgatgt

SEQ ID NO: 4527 - RNA, 22 nt, Homo sapiens
  source 1..22: mol_type = transcribed RNA
acatcatcgcatattgacacaa

SEQ ID NO: 4528 - RNA, 19 nt, Homo sapiens
  source 1..19: mol_type = transcribed RNA
tgtctctgctggggtttct

SEQ ID NO: 4529 - RNA, 19 nt, Homo sapiens
  source 1..19: mol_type = transcribed RNA
agaaaccccagcagagaca

SEQ ID NO: 4530 - RNA, 25 nt, Homo sapiens
  source 1..25: mol_type = transcribed RNA
aggcaccagccaggcattgctcagc

SEQ ID NO: 4531 - RNA, 25 nt, Homo sapiens
  source 1..25: mol_type = transcribed RNA
gctgagcaatgcctggctggtgcct

SEQ ID NO: 4532 - RNA, 21 nt, Homo sapiens
  source 1..21: mol_type = transcribed RNA
gaagtgtgccgtggtgtgtct

SEQ ID NO: 4533 - RNA, 21 nt, Homo sapiens
  source 1..21: mol_type = transcribed RNA
agacacaccacggcacacttc

SEQ ID NO: 4534 - RNA, 21 nt, Homo sapiens
  source 1..21: mol_type = transcribed RNA
aagcctgcccggctcctcggg

SEQ ID NO: 4535 - RNA, 21 nt, Homo sapiens
  source 1..21: mol_type = transcribed RNA
cccgaggagccgggcaggctt

SEQ ID NO: 4536 - RNA, 20 nt, Homo sapiens
  source 1..20: mol_type = transcribed RNA
gttgtgtcagtttatcaaac

SEQ ID NO: 4537 - RNA, 20 nt, Homo sapiens
  source 1..20: mol_type = transcribed RNA
gtttgataaactgacacaac

SEQ ID NO: 4538 - RNA, 22 nt, Homo sapiens
  source 1..22: mol_type = transcribed RNA
tggtctaggattgttggaggag

SEQ ID NO: 4539 - RNA, 22 nt, Homo sapiens
  source 1..22: mol_type = transcribed RNA
ctcctccaacaatcctagacca

SEQ ID NO: 4540 - RNA, 22 nt, Homo sapiens
  source 1..22: mol_type = transcribed RNA
cacacactgcaattacttttgc

SEQ ID NO: 4541 - RNA, 22 nt, Homo sapiens
  source 1..22: mol_type = transcribed RNA
gcaaaagtaattgcagtgtgtg

SEQ ID NO: 4542 - RNA, 25 nt, Homo sapiens
  source 1..25: mol_type = transcribed RNA
aggggtggtgttgggacagctccgt

SEQ ID NO: 4543 - RNA, 25 nt, Homo sapiens
  source 1..25: mol_type = transcribed RNA
acggagctgtcccaacaccacccct

SEQ ID NO: 4544 - RNA, 21 nt, Homo sapiens
  source 1..21: mol_type = transcribed RNA
tgagctaaatgtgtgctggga

SEQ ID NO: 4545 - RNA, 21 nt, Homo sapiens
  source 1..21: mol_type = transcribed RNA
tcccagcacacatttagctca

SEQ ID NO: 4546 - RNA, 23 nt, Homo sapiens
  source 1..23: mol_type = transcribed RNA
gcgaggacccctcggggtctgac

SEQ ID NO: 4547 - RNA, 23 nt, Homo sapiens
  source 1..23: mol_type = transcribed RNA
gtcagaccccgaggggtcctcgc

SEQ ID NO: 4548 - RNA, 25 nt, Homo sapiens
  source 1..25: mol_type = transcribed RNA
gctgggcagggcttctgagctcctt

SEQ ID NO: 4549 - RNA, 25 nt, Homo sapiens
  source 1..25: mol_type = transcribed RNA
aaggagctcagaagccctgcccagc

SEQ ID NO: 4550 - RNA, 20 nt, Homo sapiens
  source 1..20: mol_type = transcribed RNA
gggaaaaggaagggggagga

SEQ ID NO: 4551 - RNA, 20 nt, Homo sapiens
  source 1..20: mol_type = transcribed RNA
tcctcccccttccttttccc

SEQ ID NO: 4552 - RNA, 20 nt, Homo sapiens
  source 1..20: mol_type = transcribed RNA
gcggaaggcggagcggcgga

SEQ ID NO: 4553 - RNA, 20 nt, Homo sapiens
  source 1..20: mol_type = transcribed RNA
tccgccgctccgccttccgc

SEQ ID NO: 4554 - RNA, 18 nt, Homo sapiens
  source 1..18: mol_type = transcribed RNA
gtgaaggcccggcggaga

SEQ ID NO: 4555 - RNA, 18 nt, Homo sapiens
  source 1..18: mol_type = transcribed RNA
tctccgccgggccttcac

SEQ ID NO: 4556 - RNA, 19 nt, Homo sapiens
  source 1..19: mol_type = transcribed RNA
tgagggagtgggtgggagg

SEQ ID NO: 4557 - RNA, 19 nt, Homo sapiens
  source 1..19: mol_type = transcribed RNA
cctcccacccactccctca

SEQ ID NO: 4558 - RNA, 19 nt, Homo sapiens
  source 1..19: mol_type = transcribed RNA
actggaattggagtcaaaa

SEQ ID NO: 4559 - RNA, 19 nt, Homo sapiens
  source 1..19: mol_type = transcribed RNA
ttttgactccaattccagt

SEQ ID NO: 4560 - RNA, 19 nt, Homo sapiens
  source 1..19: mol_type = transcribed RNA
tgagggagttgggtgtata

SEQ ID NO: 4561 - RNA, 19 nt, Homo sapiens
  source 1..19: mol_type = transcribed RNA
tatacacccaactccctca

SEQ ID NO: 4562 - RNA, 19 nt, Homo sapiens
  source 1..19: mol_type = transcribed RNA
tgagggagtggattgtatg

SEQ ID NO: 4563 - RNA, 19 nt, Homo sapiens
  source 1..19: mol_type = transcribed RNA
catacaatccactccctca

SEQ ID NO: 4564 - RNA, 19 nt, Homo sapiens
  source 1..19: mol_type = transcribed RNA
ggctggtcagatgggagtg

SEQ ID NO: 4565 - RNA, 19 nt, Homo sapiens
  source 1..19: mol_type = transcribed RNA
cactcccatctgaccagcc

SEQ ID NO: 4566 - RNA, 19 nt, Homo sapiens
  source 1..19: mol_type = transcribed RNA
agcagggctggggattgca

SEQ ID NO: 4567 - RNA, 19 nt, Homo sapiens
  source 1..19: mol_type = transcribed RNA
tgcaatccccagccctgct

SEQ ID NO: 4568 - RNA, 19 nt, Homo sapiens
  source 1..19: mol_type = transcribed RNA
tgagggaggaggttgggta

SEQ ID NO: 4569 - RNA, 19 nt, Homo sapiens
  source 1..19: mol_type = transcribed RNA
tacccaacctcctccctca

SEQ ID NO: 4570 - RNA, 19 nt, Homo sapiens
  source 1..19: mol_type = transcribed RNA
tgaggtggtaggatgtaga

SEQ ID NO: 4571 - RNA, 19 nt, Homo sapiens
  source 1..19: mol_type = transcribed RNA
tctacatcctaccacctca

SEQ ID NO: 4572 - RNA, 22 nt, Homo sapiens
  source 1..22: mol_type = transcribed RNA
tccgagcctgggtctccctctt

SEQ ID NO: 4573 - RNA, 22 nt, Homo sapiens
  source 1..22: mol_type = transcribed RNA
aagagggagacccaggctcgga

SEQ ID NO: 4574 - RNA, 22 nt, Homo sapiens
  source 1..22: mol_type = transcribed RNA
gggggtccccggtgctcggatc

SEQ ID NO: 4575 - RNA, 22 nt, Homo sapiens
  source 1..22: mol_type = transcribed RNA
gatccgagcaccggggaccccc

SEQ ID NO: 4576 - RNA, 22 nt, Homo sapiens
  source 1..22: mol_type = transcribed RNA
agtcattggagggtttgagcag

SEQ ID NO: 4577 - RNA, 22 nt, Homo sapiens
  source 1..22: mol_type = transcribed RNA
ctgctcaaaccctccaatgact

SEQ ID NO: 4578 - RNA, 19 nt, Homo sapiens
  source 1..19: mol_type = transcribed RNA
cagcaggaggtgaggggag

SEQ ID NO: 4579 - RNA, 19 nt, Homo sapiens
  source 1..19: mol_type = transcribed RNA
ctcccctcacctcctgctg

SEQ ID NO: 4580 - RNA, 22 nt, Homo sapiens
  source 1..22: mol_type = transcribed RNA
actcaaaacccttcagtgactt

SEQ ID NO: 4581 - RNA, 22 nt, Homo sapiens
  source 1..22: mol_type = transcribed RNA
aagtcactgaagggttttgagt

SEQ ID NO: 4582 - RNA, 22 nt, Homo sapiens
  source 1..22: mol_type = transcribed RNA
agacttcccatttgaaggtggc

SEQ ID NO: 4583 - RNA, 22 nt, Homo sapiens
  source 1..22: mol_type = transcribed RNA
gccaccttcaaatgggaagtct

SEQ ID NO: 4584 - RNA, 23 nt, Homo sapiens
  source 1..23: mol_type = transcribed RNA
aaactctacttgtccttctgagt

SEQ ID NO: 4585 - RNA, 23 nt, Homo sapiens
  source 1..23: mol_type = transcribed RNA
actcagaaggacaagtagagttt

SEQ ID NO: 4586 - RNA, 21 nt, Homo sapiens
  source 1..21: mol_type = transcribed RNA
ggctagcaacagcgcttacct

SEQ ID NO: 4587 - RNA, 21 nt, Homo sapiens
  source 1..21: mol_type = transcribed RNA
aggtaagcgctgttgctagcc

SEQ ID NO: 4588 - RNA, 21 nt, Homo sapiens
  source 1..21: mol_type = transcribed RNA
acagtctgctgaggttggagc

SEQ ID NO: 4589 - RNA, 21 nt, Homo sapiens
  source 1..21: mol_type = transcribed RNA
gctccaacctcagcagactgt

SEQ ID NO: 4590 - RNA, 23 nt, Homo sapiens
  source 1..23: mol_type = transcribed RNA
atcccttgcaggggctgttgggt

SEQ ID NO: 4591 - RNA, 23 nt, Homo sapiens
  source 1..23: mol_type = transcribed RNA
acccaacagcccctgcaagggat

SEQ ID NO: 4592 - RNA, 22 nt, Homo sapiens
  source 1..22: mol_type = transcribed RNA
gtgagtctctaagaaaagagga

SEQ ID NO: 4593 - RNA, 22 nt, Homo sapiens
  source 1..22: mol_type = transcribed RNA
tcctcttttcttagagactcac

SEQ ID NO: 4594 - RNA, 21 nt, Homo sapiens
  source 1..21: mol_type = transcribed RNA
tctagtaagagtggcagtcga

SEQ ID NO: 4595 - RNA, 21 nt, Homo sapiens
  source 1..21: mol_type = transcribed RNA
tcgactgccactcttactaga

SEQ ID NO: 4596 - RNA, 22 nt, Homo sapiens
  source 1..22: mol_type = transcribed RNA
atgctgacatatttactagagg

SEQ ID NO: 4597 - RNA, 22 nt, Homo sapiens
  source 1..22: mol_type = transcribed RNA
cctctagtaaatatgtcagcat

SEQ ID NO: 4598 - RNA, 22 nt, Homo sapiens
  source 1..22: mol_type = transcribed RNA
gttctcccaacgtaagcccagc

SEQ ID NO: 4599 - RNA, 22 nt, Homo sapiens
  source 1..22: mol_type = transcribed RNA
gctgggcttacgttgggagaac

SEQ ID NO: 4600 - RNA, 21 nt, Homo sapiens
  source 1..21: mol_type = transcribed RNA
tgggtttacgttgggagaact

SEQ ID NO: 4601 - RNA, 21 nt, Homo sapiens
  source 1..21: mol_type = transcribed RNA
agttctcccaacgtaaaccca

SEQ ID NO: 4602 - RNA, 19 nt, Homo sapiens
  source 1..19: mol_type = transcribed RNA
gtgtctgcttcctgtggga

SEQ ID NO: 4603 - RNA, 19 nt, Homo sapiens
  source 1..19: mol_type = transcribed RNA
tcccacaggaagcagacac

SEQ ID NO: 4604 - RNA, 23 nt, Homo sapiens
  source 1..23: mol_type = transcribed RNA
ctaatagtatctaccacaataaa

SEQ ID NO: 4605 - RNA, 23 nt, Homo sapiens
  source 1..23: mol_type = transcribed RNA
tttattgtggtagatactattag

SEQ ID NO: 4606 - RNA, 23 nt, Homo sapiens
  source 1..23: mol_type = transcribed RNA
tgtgcttgctcgtcccgcccgca

SEQ ID NO: 4607 - RNA, 23 nt, Homo sapiens
  source 1..23: mol_type = transcribed RNA
tgcgggcgggacgagcaagcaca

SEQ ID NO: 4608 - RNA, 25 nt, Homo sapiens
  source 1..25: mol_type = transcribed RNA
agggatcgcgggcgggtggcggcct

SEQ ID NO: 4609 - RNA, 25 nt, Homo sapiens
  source 1..25: mol_type = transcribed RNA
aggccgccacccgcccgcgatccct

SEQ ID NO: 4610 - RNA, 21 nt, Homo sapiens
  source 1..21: mol_type = transcribed RNA
atgatccaggaacctgcctct

SEQ ID NO: 4611 - RNA, 21 nt, Homo sapiens
  source 1..21: mol_type = transcribed RNA
agaggcaggttcctggatcat

SEQ ID NO: 4612 - RNA, 19 nt, Homo sapiens
  source 1..19: mol_type = transcribed RNA
agtgtggctttcttagagc

SEQ ID NO: 4613 - RNA, 19 nt, Homo sapiens
  source 1..19: mol_type = transcribed RNA
gctctaagaaagccacact

SEQ ID NO: 4614 - RNA, 19 nt, Homo sapiens
  source 1..19: mol_type = transcribed RNA
tctaggctggtactgctga

SEQ ID NO: 4615 - RNA, 19 nt, Homo sapiens
  source 1..19: mol_type = transcribed RNA
tcagcagtaccagcctaga

SEQ ID NO: 4616 - RNA, 19 nt, Homo sapiens
  source 1..19: mol_type = transcribed RNA
aagcagctgcctctgaggc

SEQ ID NO: 4617 - RNA, 19 nt, Homo sapiens
  source 1..19: mol_type = transcribed RNA
gcctcagaggcagctgctt

SEQ ID NO: 4618 - RNA, 21 nt, Homo sapiens
  source 1..21: mol_type = transcribed RNA
gtggctgcactcacttccttc

SEQ ID NO: 4619 - RNA, 21 nt, Homo sapiens
  source 1..21: mol_type = transcribed RNA
gaaggaagtgagtgcagccac

SEQ ID NO: 4620 - RNA, 21 nt, Homo sapiens
  source 1..21: mol_type = transcribed RNA
aggaggcagcgctctcaggac

SEQ ID NO: 4621 - RNA, 21 nt, Homo sapiens
  source 1..21: mol_type = transcribed RNA
gtcctgagagcgctgcctcct

SEQ ID NO: 4622 - RNA, 21 nt, Homo sapiens
  source 1..21: mol_type = transcribed RNA
aatggcgccactagggttgtg

SEQ ID NO: 4623 - RNA, 21 nt, Homo sapiens
  source 1..21: mol_type = transcribed RNA
cacaaccctagtggcgccatt

SEQ ID NO: 4624 - RNA, 25 nt, Homo sapiens
  source 1..25: mol_type = transcribed RNA
caaccctaggagagggtgccattca

SEQ ID NO: 4625 - RNA, 25 nt, Homo sapiens
  source 1..25: mol_type = transcribed RNA
tgaatggcaccctctcctagggttg

SEQ ID NO: 4626 - RNA, 22 nt, Homo sapiens
  source 1..22: mol_type = transcribed RNA
ataatacatggttaacctcttt

SEQ ID NO: 4627 - RNA, 22 nt, Homo sapiens
  source 1..22: mol_type = transcribed RNA
aaagaggttaaccatgtattat

SEQ ID NO: 4628 - RNA, 21 nt, Homo sapiens
  source 1..21: mol_type = transcribed RNA
aatattatacagtcaacctct

SEQ ID NO: 4629 - RNA, 21 nt, Homo sapiens
  source 1..21: mol_type = transcribed RNA
agaggttgactgtataatatt

SEQ ID NO: 4630 - RNA, 25 nt, Homo sapiens
  source 1..25: mol_type = transcribed RNA
ggcggagggaagtaggtccgttggt

SEQ ID NO: 4631 - RNA, 25 nt, Homo sapiens
  source 1..25: mol_type = transcribed RNA
accaacggacctacttccctccgcc

SEQ ID NO: 4632 - RNA, 24 nt, Homo sapiens
  source 1..24: mol_type = transcribed RNA
tgcctgggtctctggcctgcgcgt

SEQ ID NO: 4633 - RNA, 24 nt, Homo sapiens
  source 1..24: mol_type = transcribed RNA
acgcgcaggccagagacccaggca

SEQ ID NO: 4634 - RNA, 22 nt, Homo sapiens
  source 1..22: mol_type = transcribed RNA
aggcggggcgccgcgggaccgc

SEQ ID NO: 4635 - RNA, 22 nt, Homo sapiens
  source 1..22: mol_type = transcribed RNA
gcggtcccgcggcgccccgcct

SEQ ID NO: 4636 - RNA, 22 nt, Homo sapiens
  source 1..22: mol_type = transcribed RNA
ggtggcccggccgtgcctgagg

SEQ ID NO: 4637 - RNA, 22 nt, Homo sapiens
  source 1..22: mol_type = transcribed RNA
cctcaggcacggccgggccacc

SEQ ID NO: 4638 - RNA, 20 nt, Homo sapiens
  source 1..20: mol_type = transcribed RNA
accaggaggctgaggcccct

SEQ ID NO: 4639 - RNA, 20 nt, Homo sapiens
  source 1..20: mol_type = transcribed RNA
aggggcctcagcctcctggt

SEQ ID NO: 4640 - RNA, 20 nt, Homo sapiens
  source 1..20: mol_type = transcribed RNA
gtccctgagtgtatgtggtg

SEQ ID NO: 4641 - RNA, 20 nt, Homo sapiens
  source 1..20: mol_type = transcribed RNA
caccacatacactcagggac

SEQ ID NO: 4642 - RNA, 21 nt, Homo sapiens
  source 1..21: mol_type = transcribed RNA
tccggttctcagggctccacc

SEQ ID NO: 4643 - RNA, 21 nt, Homo sapiens
  source 1..21: mol_type = transcribed RNA
ggtggagccctgagaaccgga

SEQ ID NO: 4644 - RNA, 23 nt, Homo sapiens
  source 1..23: mol_type = transcribed RNA
aggaagccctggaggggctggag

SEQ ID NO: 4645 - RNA, 23 nt, Homo sapiens
  source 1..23: mol_type = transcribed RNA
ctccagcccctccagggcttcct

SEQ ID NO: 4646 - RNA, 20 nt, Homo sapiens
  source 1..20: mol_type = transcribed RNA
ctgtatgccctcaccgctca

SEQ ID NO: 4647 - RNA, 20 nt, Homo sapiens
  source 1..20: mol_type = transcribed RNA
tgagcggtgagggcatacag

SEQ ID NO: 4648 - RNA, 23 nt, Homo sapiens
  source 1..23: mol_type = transcribed RNA
tggtgcggagagggcccacagtg

SEQ ID NO: 4649 - RNA, 23 nt, Homo sapiens
  source 1..23: mol_type = transcribed RNA
cactgtgggccctctccgcacca

SEQ ID NO: 4650 - RNA, 22 nt, Homo sapiens
  source 1..22: mol_type = transcribed RNA
caactagactgtgagcttctag

SEQ ID NO: 4651 - RNA, 22 nt, Homo sapiens
  source 1..22: mol_type = transcribed RNA
ctagaagctcacagtctagttg

SEQ ID NO: 4652 - RNA, 23 nt, Homo sapiens
  source 1..23: mol_type = transcribed RNA
aaggagcttacaatctagctggg

SEQ ID NO: 4653 - RNA, 23 nt, Homo sapiens
  source 1..23: mol_type = transcribed RNA
cccagctagattgtaagctcctt

SEQ ID NO: 4654 - RNA, 22 nt, Homo sapiens
  source 1..22: mol_type = transcribed RNA
gggacccagggagagacgtaag

SEQ ID NO: 4655 - RNA, 22 nt, Homo sapiens
  source 1..22: mol_type = transcribed RNA
cttacgtctctccctgggtccc

SEQ ID NO: 4656 - RNA, 22 nt, Homo sapiens
  source 1..22: mol_type = transcribed RNA
gcagagtgcaaacaattttgac

SEQ ID NO: 4657 - RNA, 22 nt, Homo sapiens
  source 1..22: mol_type = transcribed RNA
gtcaaaattgtttgcactctgc

SEQ ID NO: 4658 - RNA, 20 nt, Homo sapiens
  source 1..20: mol_type = transcribed RNA
cggctctgggtctgtgggga

SEQ ID NO: 4659 - RNA, 20 nt, Homo sapiens
  source 1..20: mol_type = transcribed RNA
tccccacagacccagagccg

SEQ ID NO: 4660 - RNA, 22 nt, Homo sapiens
  source 1..22: mol_type = transcribed RNA
gcagcagggtgaaactgacaca

SEQ ID NO: 4661 - RNA, 22 nt, Homo sapiens
  source 1..22: mol_type = transcribed RNA
tgtgtcagtttcaccctgctgc

SEQ ID NO: 4662 - RNA, 21 nt, Homo sapiens
  source 1..21: mol_type = transcribed RNA
tggaggagaaggaaggtgatg

SEQ ID NO: 4663 - RNA, 21 nt, Homo sapiens
  source 1..21: mol_type = transcribed RNA
catcaccttccttctcctcca

SEQ ID NO: 4664 - RNA, 23 nt, Homo sapiens
  source 1..23: mol_type = transcribed RNA
tctgctcataccccatggtttct

SEQ ID NO: 4665 - RNA, 23 nt, Homo sapiens
  source 1..23: mol_type = transcribed RNA
agaaaccatggggtatgagcaga

SEQ ID NO: 4666 - RNA, 23 nt, Homo sapiens
  source 1..23: mol_type = transcribed RNA
tgcaccatggttgtctgagcatg

SEQ ID NO: 4667 - RNA, 23 nt, Homo sapiens
  source 1..23: mol_type = transcribed RNA
catgctcagacaaccatggtgca

SEQ ID NO: 4668 - RNA, 23 nt, Homo sapiens
  source 1..23: mol_type = transcribed RNA
ctgggatctccggggtcttggtt

SEQ ID NO: 4669 - RNA, 23 nt, Homo sapiens
  source 1..23: mol_type = transcribed RNA
aaccaagaccccggagatcccag

SEQ ID NO: 4670 - RNA, 22 nt, Homo sapiens
  source 1..22: mol_type = transcribed RNA
tgagacctctgggttctgagct

SEQ ID NO: 4671 - RNA, 22 nt, Homo sapiens
  source 1..22: mol_type = transcribed RNA
agctcagaacccagaggtctca

SEQ ID NO: 4672 - RNA, 23 nt, Homo sapiens
  source 1..23: mol_type = transcribed RNA
tccagtaccacgtgtcagggcca

SEQ ID NO: 4673 - RNA, 23 nt, Homo sapiens
  source 1..23: mol_type = transcribed RNA
tggccctgacacgtggtactgga

SEQ ID NO: 4674 - RNA, 22 nt, Homo sapiens
  source 1..22: mol_type = transcribed RNA
ggagactgatgagttcccggga

SEQ ID NO: 4675 - RNA, 22 nt, Homo sapiens
  source 1..22: mol_type = transcribed RNA
tcccgggaactcatcagtctcc

SEQ ID NO: 4676 - RNA, 21 nt, Homo sapiens
  source 1..21: mol_type = transcribed RNA
gcaggaacttgtgagtctcct

SEQ ID NO: 4677 - RNA, 21 nt, Homo sapiens
  source 1..21: mol_type = transcribed RNA
aggagactcacaagttcctgc

SEQ ID NO: 4678 - RNA, 22 nt, Homo sapiens
  source 1..22: mol_type = transcribed RNA
ctgccctggcccgagggaccga

SEQ ID NO: 4679 - RNA, 22 nt, Homo sapiens
  source 1..22: mol_type = transcribed RNA
tcggtccctcgggccagggcag

SEQ ID NO: 4680 - RNA, 21 nt, Homo sapiens
  source 1..21: mol_type = transcribed RNA
cctggaaacactgaggttgtg

SEQ ID NO: 4681 - RNA, 21 nt, Homo sapiens
  source 1..21: mol_type = transcribed RNA
cacaacctcagtgtttccagg

SEQ ID NO: 4682 - RNA, 22 nt, Homo sapiens
  source 1..22: mol_type = transcribed RNA
tatacctcagttttatcaggtg

SEQ ID NO: 4683 - RNA, 22 nt, Homo sapiens
  source 1..22: mol_type = transcribed RNA
cacctgataaaactgaggtata

SEQ ID NO: 4684 - RNA, 22 nt, Homo sapiens
  source 1..22: mol_type = transcribed RNA
tggtggtttacaaagtaattca

SEQ ID NO: 4685 - RNA, 22 nt, Homo sapiens
  source 1..22: mol_type = transcribed RNA
tgaattactttgtaaaccacca

SEQ ID NO: 4686 - RNA, 22 nt, Homo sapiens
  source 1..22: mol_type = transcribed RNA
tggatttctttgtgaatcacca

SEQ ID NO: 4687 - RNA, 22 nt, Homo sapiens
  source 1..22: mol_type = transcribed RNA
tggtgattcacaaagaaatcca

SEQ ID NO: 4688 - RNA, 21 nt, Homo sapiens
  source 1..21: mol_type = transcribed RNA
tcctcttctccctcctcccag

SEQ ID NO: 4689 - RNA, 21 nt, Homo sapiens
  source 1..21: mol_type = transcribed RNA
ctgggaggagggagaagagga

SEQ ID NO: 4690 - RNA, 20 nt, Homo sapiens
  source 1..20: mol_type = transcribed RNA
gtagaggagatggcgcaggg

SEQ ID NO: 4691 - RNA, 20 nt, Homo sapiens
  source 1..20: mol_type = transcribed RNA
ccctgcgccatctcctctac

SEQ ID NO: 4692 - RNA, 22 nt, Homo sapiens
  source 1..22: mol_type = transcribed RNA
gtgaacgggcgccatcccgagg

SEQ ID NO: 4693 - RNA, 22 nt, Homo sapiens
  source 1..22: mol_type = transcribed RNA
cctcgggatggcgcccgttcac

SEQ ID NO: 4694 - RNA, 22 nt, Homo sapiens
  source 1..22: mol_type = transcribed RNA
gactgacacctctttgggtgaa

SEQ ID NO: 4695 - RNA, 22 nt, Homo sapiens
  source 1..22: mol_type = transcribed RNA
ttcacccaaagaggtgtcagtc

SEQ ID NO: 4696 - RNA, 21 nt, Homo sapiens
  source 1..21: mol_type = transcribed RNA
tactcaaaaagctgtcagtca

SEQ ID NO: 4697 - RNA, 21 nt, Homo sapiens
  source 1..21: mol_type = transcribed RNA
tgactgacagctttttgagta

SEQ ID NO: 4698 - RNA, 21 nt, Homo sapiens
  source 1..21: mol_type = transcribed RNA
ttaatatcggacaaccattgt

SEQ ID NO: 4699 - RNA, 21 nt, Homo sapiens
  source 1..21: mol_type = transcribed RNA
acaatggttgtccgatattaa

SEQ ID NO: 4700 - RNA, 22 nt, Homo sapiens
  source 1..22: mol_type = transcribed RNA
atccgcgctctgactctctgcc

SEQ ID NO: 4701 - RNA, 22 nt, Homo sapiens
  source 1..22: mol_type = transcribed RNA
ggcagagagtcagagcgcggat

SEQ ID NO: 4702 - RNA, 20 nt, Homo sapiens
  source 1..20: mol_type = transcribed RNA
gtgagtcagggtggggctgg

SEQ ID NO: 4703 - RNA, 20 nt, Homo sapiens
  source 1..20: mol_type = transcribed RNA
ccagccccaccctgactcac

SEQ ID NO: 4704 - RNA, 22 nt, Homo sapiens
  source 1..22: mol_type = transcribed RNA
tgcccttaaaggtgaacccagt

SEQ ID NO: 4705 - RNA, 22 nt, Homo sapiens
  source 1..22: mol_type = transcribed RNA
actgggttcacctttaagggca

SEQ ID NO: 4706 - RNA, 22 nt, Homo sapiens
  source 1..22: mol_type = transcribed RNA
tcttctctgttttggccatgtg

SEQ ID NO: 4707 - RNA, 22 nt, Homo sapiens
  source 1..22: mol_type = transcribed RNA
cacatggccaaaacagagaaga

SEQ ID NO: 4708 - RNA, 22 nt, Homo sapiens
  source 1..22: mol_type = transcribed RNA
aaattattgtacatcggatgag

SEQ ID NO: 4709 - RNA, 22 nt, Homo sapiens
  source 1..22: mol_type = transcribed RNA
ctcatccgatgtacaataattt

SEQ ID NO: 4710 - RNA, 22 nt, Homo sapiens
  source 1..22: mol_type = transcribed RNA
ttcaacgggtatttattgagca

SEQ ID NO: 4711 - RNA, 22 nt, Homo sapiens
  source 1..22: mol_type = transcribed RNA
tgctcaataaatacccgttgaa

SEQ ID NO: 4712 - RNA, 22 nt, Homo sapiens
  source 1..22: mol_type = transcribed RNA
ctatacaacttactactttccc

SEQ ID NO: 4713 - RNA, 22 nt, Homo sapiens
  source 1..22: mol_type = transcribed RNA
gggaaagtagtaagttgtatag

SEQ ID NO: 4714 - RNA, 22 nt, Homo sapiens
  source 1..22: mol_type = transcribed RNA
tgaggtagtaagttgtattgtt

SEQ ID NO: 4715 - RNA, 22 nt, Homo sapiens
  source 1..22: mol_type = transcribed RNA
aacaatacaacttactacctca

SEQ ID NO: 4716-4733 - skipped (18 entries)

SEQ ID NO: 4734 - DNA, 3131 bp, Adeno-associated virus
  source 1..3131: mol_type = genomic DNA
gcggccgcgaattcgcccttggctgcgtcaactggaccaatgagaactttcccttcaatgattgcgtcgacaagatggtgatctggtgggaggagggcaagatgacggccaaggtcgtggagtccgccaaggccattctcggcggcagcaaggtgcgcgtggaccaaaagtgcaagtcgtccgcccagatcgaccccacccccgtgatcgtcacctccaacaccaacatgtgcgccgtgattgacgggaacagcaccaccttcgagcaccagcagcctctccaggaccggatgtttaagttcgaactcacccgccgtctggagcacgactttggcaaggtgacaaagcaggaagtcaaagagttcttccgctgggccagtgatcacgtgaccgaggtggcgcatgagttttacgtcagaaagggcggagccagcaaaagacccgcccccgatgacgcggataaaagcgagcccaagcgggcctgcccctcagtcgcggatccatcgacgtcagacgcggaaggagctccggtggactttgccgacaggtaccaaaacaaatgttctcgtcacgcgggcatgcttcagatgctgtttccctgcaaaacgtgcgagagaatgaatcggaatttcaacatttgcttcacacacggggtcagagactgctcagagtgtttccccggcgtgtcagaatctcaaccggtcgtcagaaagaggacgtatcggaaactccgtgcgattcatcatctgctggggcgggctcccgagattgcttgctcggcctgcgatctggtcaacgtggacctggatgactgtgtttctgagcaataaatgacttaaaccaggtatggctgccgatggttatcttccagattggctcgaggacaacctctctgagggcattcgcgagtggtgggcgctgaaacctggagccccgaagcccaaagccaaccagcaaaagcaggacgacggccggggtctggtgcttcctggctacaagtacctcggacccttcaacggactcgacaagggggagcccgtcaacgcggcggacgcagcggccctcgagcacgacaaggcttacgaccagcagctgcaggcgggtgacaatccgtacctgcggtataaccacgccgacgccgagtttcaggagcgtctgcaagaagatacgtcttttgggggcaacctcgggcgagcagtcttccaggccaagaagcgggttctcgaacctctcggtctggttgaggaaggcgctaagacggctcctggaaagaagagaccggtagagccatcaccccagcgttctccagactcctctacgggcatcggcaagaaaggccaacagcccgccagaaaaagactcaattttggtcagactggcgactcagagtcagttccagaccctcaacctctcggagaacctccagcagcgccctctggtgtgggacctaatacaatggctgcaggcggtggcgcaccaatggcagacaataacgaaggcgccgacggagtgggtagttcctcgggaaattggcattgcgattccacatggctgggcgacagagtcatcaccaccagcacccgaacctgggccctgcccacctacaacaaccacctctacaagcaaatctccaacgggacatcgggaggagccaccaacgacaacacctacttcggctacagcaccccctgggggtattttgactttaacagattccactgccacctttcaccacgtgactggcagcgactcatcaacaacaactggggattccgacccaagagactcagcttcaagctcttcaacatccaggtcaaggaggtcacgcagaatgaaggcaccaagaccatcgccaataacctcaccagcaccatccaggtgtttacggactcggagtaccagctgccgtacgttctcggctctgtccaccagggctgcctgcctccgttcccggcggacgtgttcatgattccccagtacggctacctaacactcaacaacggtagtcaggccgtgggacgctcctccttctactgcctggaatactttccttcgcagatgctgagaaccggcaacaacttccagtttacttacaccttcgaggacgtgcctttccacagcagctacgcccacagctagagcttggaccggctgatgaatcctctgattgaccagtacctgtactacttgtctcggactcaaacaacaggaggcacggcaaatacgcagactctgggcttcagccaaggtgggcctaatacaatggccaatcaggcaaagaactggctgccaggaccctgttaccgccaacaacgcgtctcaacgacaaccgggcaaaacaacaatagcaactttgcctggactgctgggaccaaataccatctgaatggaagaaattcattggctaatcctggcatcgctatggcaacacacaaagacgacgaggagcgtttttttcccagtaacgggatcctgatttttggcaaacaaaatgctgccagagacaatgcggattacagcgatgtcatgctcaccagcgaggaagaaatcaaaaccactaaccctgtggctacagaggaatacggtatcgtggcagataacttgcagcagcaaaacacggctcctcaaattggaactgtcaacagccagggggccttacccggtatggtctggcagaaccgggacgtgtacctgcagggtcccatctgggccaagattcctcacacggacggcaacttccacccgtctccgctgatgggcggctttggcctgaaacatcctccgcctcagatcctgatcaagaacacgcctgtacctgcggatcctccgaccaccttcaaccagtcaaagctgaactctttcatcacgcaatacagcaccggacaggtcagcgtggaaattgaatgggagctgcagaaggaaaacagcaagcgctggaaccccgagatccagtacacctccaactactacaaatctataagtgtggactttgctgttaatacagaaggcgtgtactctgaaccccgccccattggcacccgttacctcacccgtaatctgtaattgcctgttaatcaataaaccggttgattcgtttcagttgaactttggtctctgcgaagggcgaattc

SEQ ID NO: 4735 - protein, 728 aa, Adeno-associated virus
MAADGYLPDWLEDNLSEGIREWWDLKPGAPKPKANQQKQDDGRGLVLPGYKYLGPFNGLDKGEPVNEADAAALEHDKAYDKQLEQGDNPYLKYNHADAEFQERLQEDTSFGGNLGRAVFQAKKRVLEPLGLVEEGAKTAPGKKRPIESPDSSTGIGKKGQQPAKKKLNFGQTGDSESVPDPQPLGEPPAAPSGLGSGTMAAGGGAPMADNNEGADGVGNASGNWHCDSTWLGDRVITTSTRTWALPTYNNHLYKQISSQSGATNDNHFFGYSTPWGYFDFNRFHCHFSPRDWQRLINNNWGFRPRKLRFKLFNIQVKEVTTNDGVTTIANNLTSTIQVFSDSEYQLPYVLGSAHQGCLPPFPADVFMIPQYGYLTLNNGSQSMGRSSFYCLEYFPSQMLRTGNNFEFSYTFEEVPFHSSYAHSQSLDRLMNPLIDQYLYYLARTQSTTGSTRELQFHQAGPNTMAEQSKNWLPGPCYRQQRLSKNIDSNNNSNFAWTGATKYHLNGRNSLTNPGVAMATNKDDEGQFFPINGVLVFGKTGAANKTTLENVLMTSEEEIKTTNPVATEEYGVVSSNLQSSTAGPQTQTVNSQGALPGMVWQNRDVYLQGPIWAKIPHTDGNFHPSPLMGGFGLKHPPPQILIKNTPVPANPPGVFTPALFASFITQYSTGQVSVEIEWELQKENSKRWNPEIQYTSNYAKSNNVEFAVNNEGVYTEPRPIGTRYLTRNL

SEQ ID NO: 4736 - protein, 644 aa, Adeno-associated virus
  MOD_RES 434: note = Any amino acid
KAYDQQLKAGDNPYLRYNHADAEFQERLQEDTSFGGNLGRAVFQAKKRVLEPLGLVETPAKTAPGKKRPVDSPDSTSGIGKKGQQPAKKRLNFGQTGDSESVPDPQPIGEPPAGPSGLGSGTMAAGGGAPMADNNEGADGVGNASGNWHCDSTWLGDRVITTSTRTWALPTYNNHLYKQISSQSAGSTNDNVYFGYSTPWGYFDFNRFHCHFSPRDWQRLINNNWGFRPKKLNFKLFNIQVKEVTTNDGVTTIANNLTSTVQVFSDSEYQLPYVLGSAHQGCLPPFPADVFMIPQYGYLTLNNGSQSVGRSSFYCLEYFPSQMLRTGNNFTFSYTFEDVPFHSSYAHSQSLDRLMNPLIDQYLYYLARTQSNAGGTAGNRELQFYQGGPTTMAEQAKNWLPGPCFRQQRVSKTLDQNNNSNFAWTGATKYHLNXRNSLVNPGVAMATHKDDEERFFPSSGVLIFGKTGAANKTTLENVLMTNEEEIRPTNPVATEEYGIVSSNLQAASTAAQTQVVNNQGALPGMVWQNRDVYLQGPIWAKIPHTDGNFHPSPLMGGFGLKHPPPQILIKNTPVPANPPEVFTPAKFASFITQYSTGQVSVEIEWELQKENSKRWNPEIQYTSNFDKQTGVDFAVDSQGVYSEP

SEQ ID NO: 4737 - DNA, 1933 bp, Adeno-associated virus
  source 1..1933: mol_type = genomic DNA
caaggcctacgaccagcagctcaaagcgggtgacaatccgtacctgcggtataaccacgccgacgccgagtttcaggagtgtcttcaagaagatacgtcttttgggggcaacctcgggcgagcagtcttccaggccaaaaagcgggttctcgaacctcttggtctggttgagacgccagctaagacggcacctggaaagaagcgaccggtagactcgccagactccacctcgggcatcggcaagaaaggccagcagcccgcgaaaaagagactcaactttgggcagactggcgactcagagtcagtccccgaccctcaaccaatcggagaaccaccagcaggcccctctggtctgggatctggtacaatggttgcaggcggtggcgcaccaatggctgacaataacgagggcgccgacggagtgggtaatgcctcaggaaattggcattgcgattccacatggctgggcgacagagtcatcaccaccagcacccgaacctgggccctgcccacctacaacaaccacctctacaagcaaatctccagtcagtcagcagggagcaccaacgataacgtctatttcggctacagcaccccctgggggtattttgacttcaacagattccattgccacttctcaccacgtgactggcagcgacttatcaacaacaactggggattccggcccaagaagctcaacttcaagctcttcaacatccaggtcaaggaggtcacgacgaatgacggtgtcacaaccatcgctaataaccttaccagcacggttcaggtcttttcggactcggaatatcaactgccgtacgtcctcggctccgcgcaccagggctgcctgcctccgttcccggcagacgtgttcatgattccgcagtacggatacctgactctgaacaatggcagccaatcggtaggccgttcctccttctactgcctggagtactttccttctcagatgctgagaacgggcaacaacttcacctttagctacaccttcgaggacgtgcctttccacagcagctacgcgcacagccagagtctggaccggctgatgaatcccctcatcgaccagtacctgtactacttggccagaacacagagcaacgcaggaggtactgctggcaatcgggaactgcagttttatcagggcggacctaccaccatggccgaacaagcaaagaactggctgcccggaccttgcttccggcaacagagagtatccaagacgctggatcaaaataacaacagcaactttgcctggactggtgccacaaaataccatttaaatggaagaaattcattggttaatcccggtgtcgccatggcaacccacaaggacgacgaggaacgcttctccccttcgagcggagttctaatttttggcaaaactggagcagctaataaaactacattagaaaacgtgctcatgacaaatgaagaagaaattcgtcctaccaacccggtagctaccgaggaatacgggattgtaagcagcaacttgcaggcggctagcaccgcagcccagacacaagttgttaacaaccagggagccttacctggcatggtctggcagaaccgggacgtgtacctgcaaggtcccatttgggccaagattcctcacacggacggcaactttcacccgtctcctctaatgggtggctttggactgaaacacccgcctccccagatcctgatcaaaaacacgccggtacctgctaatcctccagaagtgtttactcctgccaagtttgcttccttcatcacgcagtacagcaccgggcaagtcagcgttgagatcgagtgggagctgcagaaagagaacagcaagcgctggaacccagagattcagtacacctccaactttgacaaacagactggagtggactttgctgttgacagccagggtgtttactctgagcct

SEQ ID NO: 4738 - protein, 644 aa, Adeno-associated virus
KAYDQQLKAGDNPYLRYNHADAEFQECLQEDTSFGGNLGRAVFQAKKRVLEPLGLVETPAKTAPGKKRPVDSPDSTSGIGKKGQQPAKKRLNFGQTGDSESVPDPQPIGEPPAGPSGLGSGTMVAGGGAPMADNNEGADGVGNASGNWHCDSTWLGDRVITTSTRTWALPTYNNHLYKQISSQSAGSTNDNVYFGYSTPWGYFDFNRFHCHFSPRDWQRLINNNWGFRPKKLNFKLFNIQVKEVTTNDGVTTIANNLTSTVQVFSDSEYQLPYVLGSAHQGCLPPFPADVFMIPQYGYLTLNNGSQSVGRSSFYCLEYFPSQMLRTGNNFTFSYTFEDVPFHSSYAHSQSLDRLMNPLIDQYLYYLARTQSNAGGTAGNRELQFYQGGPTTMAEQAKNWLPGPCFRQQRVSKTLDQNNNSNFAWTGATKYHLNGRNSLVNPGVAMATHKDDEERFSPSSGVLIFGKTGAANKTTLENVLMTNEEEIRPTNPVATEEYGIVSSNLQAASTAAQTQVVNNQGALPGMVWQNRDVYLQGPIWAKIPHTDGNFHPSPLMGGFGLKHPPPQILIKNTPVPANPPEVFTPAKFASFITQYSTGQVSVEIEWELQKENSKRWNPEIQYTSNFDKQTGVDFAVDSQGVYSEP

SEQ ID NO: 4739 - DNA, 1933 bp, Adeno-associated virus
  source 1..1933: mol_type = genomic DNA
caaggcctacgaccagcagctcaaagcgggtgacaatccgtacctgcggtataaccacgccgacgccgagtttcaggagcgtcttcaagaagatacgtcttttgggggcaacctcgggcgagcagtcttccaggccaaaaagcgggttctcgaacctcttggtctggttgagacgccagctaagacggcacctggaaagaagcgaccggtagactcgccagactccacctcgggcatcggcaagaaaggccagcagcccgcgaaaaagagactcaactttgggcagactggcgactcagagccagtccccgaccctcaaccaatcggagaaccaccagcaggcccctctggtctgggatctggtacaatggctgcaggcggtggcgcaccaatggctgacaataacgagggcgccgacggagtgggtaatgcctcaggaaattggcattgcgattccacacggctgggcgacagagtcatcaccaccagcacccgaacctgggccctgcccacctacaacaaccacctctacaagcaaatctccagtcagtcagcagggagcaccaacgataacgtctatttcggctacagcaccccctgggggtattttgacttcaacagattccattgccacttctcaccacgtgactggcagcgacttatcaacaacaactggggattccggcccaagaagctcaacttcaagctcttcaacatccaggtcaaggaggtcacgacgaatgacggcgtcacaaccatcgctaataaccttaccagcacggttcaggtcttttcggactcggaatatcaactgccgtacgtcctcggctccgcgcaccagggctgcctgcctccgttcccggcagacgtgttcatgattccgcagtacggatacctgactctgaacaatggcagccaatcggtaggccgttcctccttctactgcctggagtactttccttctcagatgctgagaacgggcaacaacttcacctttagctacaccttcgaggacgtgcctttccacagcagctacgcgcacagccagagtctgggccggctgatgaatcccctcatcgaccagtacctgtactacttggccagaacacagagcaacgcaggaggtactgctggcaatcgggaactgcagttttatcagggcggacctaccaccatggccgaacaagcaaagaactggctgcccggaccttgcttccggcaacagagagtatccaagacgctggatcaaaataacaacagcaactttgcctggactggtgccacaaaataccatttaaatggaagaaattcattggttaatcccggtgtcgccatggcaacccacaaggacgacgaggaacgcttcttcccttcgagcggagttctaatttttggcaaaactggagcagctaataaaactacattagaaaacgtgctcatgacaaatgaagaagaaattcgtcctaccaacccggtagctaccgaggaatacgggattgtaagcagcaacttgcaggcggctagcaccgcagcccagacacaagttgttaacaaccagggagccttacctggcatggtctggcagaaccgggacgtgtacctgcaaggtcccatttgggccaagattcctcacacggacggcaactttcacccgtctcctctaatgggtggctttggactgaaacacccgcctccccagatcctgatcaaaaacacaccggtacctgctaatcctccagaagtgtttactcctgccaagtttgcttccttcatcacgcagtacagcaccgggcaagtcagcgttgagatcgaatgggagctgcagaaagagaacagcaagcgctggaacccagagattcagtacacctccaactttgacaaacagactggagtggactttgctgttgacagccagggtgtttactctgagcct

SEQ ID NO: 4740 - protein, 644 aa, Adeno-associated virus
KAYDQQLKAGDNPYLRYNHADAEFQERLQEDTSFGGNLGRAVFQAKKRVLEPLGLVETPAKTAPGKKRPVDSPDSTSGIGKKGQQPAKKRLNFGQTGDSEPVPDPQPIGEPPAGPSGLGSGTMAAGGGAPMADNNEGADGVGNASGNWHCDSTRLGDRVITTSTRTWALPTYNNHLYKQISSQSAGSTNDNVYFGYSTPWGYFDFNRFHCHFSPRDWQRLINNNWGFRPKKLNFKLFNIQVKEVTTNDGVTTIANNLTSTVQVFSDSEYQLPYVLGSAHQGCLPPFPADVFMIPQYGYLTLNNGSQSVGRSSFYCLEYFPSQMLRTGNNFTFSYTFEDVPFHSSYAHSQSLGRLMNPLIDQYLYYLARTQSNAGGTAGNRELQFYQGGPTTMAEQAKNWLPGPCFRQQRVSKTLDQNNNSNFAWTGATKYHLNGRNSLVNPGVAMATHKDDEERFFPSSGVLIFGKTGAANKTTLENVLMTNEEEIRPTNPVATEEYGIVSSNLQAASTAAQTQVVNNQGALPGMVWQNRDVYLQGPIWAKIPHTDGNFHPSPLMGGFGLKHPPPQILIKNTPVPANPPEVFTPAKFASFITQYSTGQVSVEIEWELQKENSKRWNPEIQYTSNFDKQTGVDFAVDSQGVYSEP

SEQ ID NO: 4741 - DNA, 1933 bp, Adeno-associated virus; identical to SEQ ID NO: 4739
  source 1..1933: mol_type = genomic DNA

SEQ ID NO: 4742 - protein, 644 aa, Adeno-associated virus; identical to SEQ ID NO: 4740

SEQ ID NO: 4743 - DNA, 1933 bp, Adeno-associated virus
  source 1..1933: mol_type = genomic DNA
caaggcctacgaccagcagctcaaagcgggtgacaatccgtacctgcggtataaccacgccgacgccgagtttcaggagcgtcttcaagaagatacgtcttttgggggcaacctcgggcgagcagtcttccaggccaaaaagcgggttctcgaacctcttggtctggttgagacgccagctaagacggcacctggaaagaagcgaccggtagactcgccagactccacctcgggcatcggcaagaaaggccagcagcccgcgaaaaagagactcaactttgggcagactggcgactcagagtcagtccccgaccctcaaccaatcggagaaccaccagcaggcccctctggtctgggatctggtacaatggctgcaggcggtggcgcaccaatggctgacaatagcgagggcgccgacggagtgggtaatgcctcaggaaattggcattgcgattccacatggctgggcgacagagtcatcaccaccagcacccgaacctgggccctgcccacctacaacaaccacctctacaagcaaatctccagtcagtcagcagggagcaccaacgataacgtctatttcggctacagcaccccctgggggtattttgacttcaacagattccattgccacttctcaccacgtgactggcagcgacttatcaacaacaactggggattccggcccaagaagctcaacttcaagctcttcaacatccaggtcaaggaggtcacgacgaatgacggtgtcacaaccatcgctaataaccttaccagcacggttcaggtcttttcggactcggaatatcaactgccgtacgtcctcggctccgcgcaccagggctgcctgcctccgttcccggcagacgtgttcatgattccgcagtacggatacctgactctgaacaatggcagccaatcggtaggccgttcctccttctactgcctggagtactttccttctcagatgctgagaacgggcaacaacttcacctttagctacaccttcgaggacgtgcctttccacagcagctacgcgcacagccagagtctggaccggctgatgaatcccctcatcgaccagtacctgtactacttggccagaacacagagcaacgcaggaggtactgctggcaatcgggaactgcagttttatcagggcggacctaccaccatggccgaacaagcaaagaactggctgcccggaccttgcttccggcaacagagagtatccaagacgctggatcaaaataacaacagcaactttgcctggactggtgccacaaaataccatttaaatggaagaaattcattggttaatcccggtgtcgccatggcaacccacaaggacgacgaggaacgcttcttcccttcgagcggagttctaatttttggcaaaactggagcagctaataaaactacattagaaaacgtgctcatgacaaatgaagaagaaattcgtcctaccaacccggtagctaccgaggaatacgggattgtaagcagcaacttgcaggcggctagcaccgcagcccagacacaagttgttaacaaccagggagccttacctggcatggtctggcagaaccgggacgtgtacctgcaaggtcccatttgggccaagattcctcacacggacggcaactttcacccgtctcctctaatgggtggctttggactgaaacacccgcctccccagatcctgatcaaaaacacaccggtacctgctaatcctccagaagtgtttactcctgccaagcttgcttccttcatcacgcagtacagcaccgggcaagtcagcgttgagatcgagtgggagctgcagaaagagaacagcaagcgctggaacccagagattcagtacacctccaactttgacaaacagactggagtggactttgctgttgacagccagggtgtttactctgagcct

SEQ ID NO: 4744 - protein, 644 aa, Adeno-associated virus
KAYDQQLKAGDNPYLRYNHADAEFQERLQEDTSFGGNLGRAVFQAKKRVLEPLGLVETPAKTAPGKKRPVDSPDSTSGIGKKGQQPAKKRLNFGQTGDSESVPDPQPIGEPPAGPSGLGSGTMAAGGGAPMADNSEGADGVGNASGNWHCDSTWLGDRVITTSTRTWALPTYNNHLYKQISSQSAGSTNDNVYFGYSTPWGYFDFNRFHCHFSPRDWQRLINNNWGFRPKKLNFKLFNIQVKEVTTNDGVTTIANNLTSTVQVFSDSEYQLPYVLGSAHQGCLPPFPADVFMIPQYGYLTLNNGSQSVGRSSFYCLEYFPSQMLRTGNNFTFSYTFEDVPFHSSYAHSQSLDRLMNPLIDQYLYYLARTQSNAGGTAGNRELQFYQGGPTTMAEQAKNWLPGPCFRQQRVSKTLDQNNNSNFAWTGATKYHLNGRNSLVNPGVAMATHKDDEERFFPSSGVLIFGKTGAANKTTLENVLMTNEEEIRPTNPVATEEYGIVSSNLQAASTAAQTQVVNNQGALPGMVWQNRDVYLQGPIWAKIPHTDGNFHPSPLMGGFGLKHPPPQILIKNTPVPANPPEVFTPAKLASFITQYSTGQVSVEIEWELQKENSKRWNPEIQYTSNFDKQTGVDFAVDSQGVYSEP

SEQ ID NO: 4745 - DNA, 1933 bp, Adeno-associated virus
  source 1..1933: mol_type = genomic DNA
caaggcctacgaccagcagctcaaagcgggtgacaatccgtacctgcggtataaccacgccgacgccgagtttcaggagcgtcttcaagaagatacgtcttttgggggcaacctcgggcgagcagtcttccaggccaaaaagcgggttctcgaacctcttggtctggttgagacgccagctaagacggcacctggaaagaagcgaccggtagactcgccagactccacctcgggcatcggcaagaaaggccagcagcccgcgaaaaagagactcaactttgggcagactggcgactcagagtcagtccccgaccctcaaccaatcggagaaccaccagcaggcccctctggtctgggatctggtacaatggctgcaggcggtggcgcaccaatggctgacaataacgagggcgccgacggagtgggtaatgcctcaggaaattggcattgcgattccacatggctgggcgacagagtcatcaccaccagcacccgaacctgggccctgcccacctacaacaaccacctctacaagcaaatctccagtcagtcagcagggagcaccaacgataacgtctatttcggctacagcaccccctgggggtattttgacttcaacagattccattgccacttctcaccacgtgactggcagcgacttatcaacaacaactggggattccggcccaagaagctcaacttcaagctcttcaacatccaggtcaaggaggtcacgacgaatgacggcgtcacaaccatcgctaataaccttaccagcacggttcaggtcttttcggacccggaatatcaactgccgtacgtcctcggctccgcgcaccagggctgcctgcctccgttcccggcagacgtgttcatgattccgcagtacggatacctgactctgaacaatggcagccaatcggtaggccgttcctccttctactgcctggagtactttccttctcagatgctgagaacgggcaacaacttcacctttagctacaccttcgaggacgtgcctttccacagcagctacgcgcacagccagagtctggaccggctgatgaatcccctcatcgaccagtacctgtactacttggccagaacacagagcaacgcaggaggtactgctggcaatcgggaactgcagttttatcagggcggacctaccaccatggccgaacaagcaaagaactggctgcccggaccttgcttccggcaacagagagtatccaagacgctggatcaaaataacaacagcaactttgcctggactggtgccacaaaataccatttaaatggaagaaattcattggttaatcccggtgtcgccatggcaacccacaaggacgacgaggaacgcttcttcccttcgagcggagttctaatttttggcaaaactggagcagctaataaaactacattagaaaacgtgctcatgacaaatgaagaagaaattcgtcctaccaacccggtagctaccgaggaatacgggattgtaagcagcaacttgcaggcggctagcaccgcagcccagacacaagttgttaacaaccagggagccttacctggcatggtctggcagaaccgggacgtgtacctgcaaggtcccatttgggccaagattcctcacacggacggcaactttcacccgtctcctctaatgggtggctttggactgaaacacccgcctccccagatcctgatcaaaaacacaccggtacctgctaatcctccagaagtgtttactcctgccaagattgcttccttcatcacgcagtacagcaccgggcaagtcagcgttgagatcgagtgggagctgcagaaagagaacagcaagcgctggaacccagagattcagtacacctccaactttgacaaacagactggagtggactttgctgttgacagccagggtgtttactctgagcct

SEQ ID NO: 4746 - protein, 644 aa, Adeno-associated virus
KAYDQQLKAGDNPYLRYNHADAEFQERLQEDTSFGGNLGRAVFQAKKRVLEPLGLVETPAKTAPGKKRPVDSPDSTSGIGKKGQQPAKKRLNFGQTGDSESVPDPQPIGEPPAGPSGLGSGTMAAGGGAPMADNNEGADGVGNASGNWHCDSTWLGDRVITTSTRTWALPTYNNHLYKQISSQSAGSTNDNVYFGYSTPWGYFDFNRFHCHFSPRDWQRLINNNWGFRPKKLNFKLFNIQVKEVTTNDGVTTIANNLTSTVQVFSDPEYQLPYVLGSAHQGCLPPFPADVFMIPQYGYLTLNNGSQSVGRSSFYCLEYFPSQMLRTGNNFTFSYTFEDVPFHSSYAHSQSLDRLMNPLIDQYLYYLARTQSNAGGTAGNRELQFYQGGPTTMAEQAKNWLPGPCFRQQRVSKTLDQNNNSNFAWTGATKYHLNGRNSLVNPGVAMATHKDDEERFFPSSGVLIFGKTGAANKTTLENVLMTNEEEIRPTNPVATEEYGIVSSNLQAASTAAQTQVVNNQGALPGMVWQNRDVYLQGPIWAKIPHTDGNFHPSPLMGGFGLKHPPPQILIKNTPVPANPPEVFTPAKIASFITQYSTGQVSVEIEWELQKENSKRWNPEIQYTSNFDKQTGVDFAVDSQGVYSEP

SEQ ID NO: 4747 - protein, 728 aa, Adeno-associated virus
MAADGYLPDWLEDNLSEGIREWWDLKPGAPKPKANQQKQDDGRGLVLPGYKYLRPFNGLDKGEPVNEADAAALEHDKAYDKQLEQGDNPYLKYNHADAEFQERLQEDTSFGGNLGRAVFQAKKRVLEPLGLVEEVAKTAPGKKRPIESPDSSTGIGKKGQQPAKKKLNFGQTGDSESVPDPQPLGEPPAAPSGLGSGTMAAGGGAPMADNNEGADGVGNASGNWHCDSTWLGDRVITTSTRTWALPTYNNHLYKQISSQSGATNDNHFFSYSTPWGYFDFNRFHCHFSPRDWQRLINNNWGFRPRKLRFKLFNIQVKEVTTNDGVTTIANNLTSTIQVFSDSEYQLPYVLGSAHQGCLPPFPADVFMIPQYGYLTLNNGSQSVGRSSFYCLEYFPSQMLRTGNNFEFSYTFEEVPFHSSYVHSQSLDRLMNPLIDQYLYYLARTQSTTGSTRELQFHQAGPNTMAEQSKNWLPGPCYRQQRLSKNIDSNNNSNFAWTGATKYHLNGRNSLTNPGVAMATNKDDEDQFFPINGVLVFGKTGAANKTTLENVLMTSEEEIKTTNPVATEEYGVVSSNLQSSTAGPQTQTVNSQGALPGMVWQNRDVCLQGPIWAKIPHTDGNFHPSPLMGGFGLKHPPPQILIKNTPVPANPPEVFTPAKFASFITQYSTGQVSVEIEWELQKENSKRWNPEIQYTSNYAKSNNVEFAVNNEGVYTEPRPIGTRYLTRNL

SEQ ID NO: 4748 - protein, 728 aa, Adeno-associated virus
MAADGYLPDWLEDNLSEGIREWWDLKPGAPKPKANQQKQDDGRGLVLPGYKYLGPFNGLDKGEPVNEADAAALEHDKAYDKQLEQGDNPYLKYNHADAEFQERLQEDTSFGGNLGRAVFQAKKRVLEPLGLVEEGAKTASGKKRPIESPDSSTGIGKKGQQPAKKKLNFGQTGDSESVPDPQPLGEPPAAPSGLGSGTMAAGGGAPMADNNEGADGVGNASGNWHCDSTWLGDRVITTSTRTWALPTYNNHLYKQISSQSGATNDNHFFGYSTPWGYFDFNRFHCHFSPRDWQRLINNNWGFRPRKLRFKLFNIQVKEVTTNDGVTTIANNLTSTIQVFSDSEYQLPYVLGSAHQGCLPPFPADVFMIPQYGYLTLNNGSQSVGRSSFCCLEYFPSQMLRTGNNFEFSYTFEEVPFHSSYAHSQSLDRLMNPLIDQYLYYLARTQSTTGSTRELQFHQAGPNTVAEQSKNWLPGPCYRQQRLSKNIDSNNNSNFAWTGATKYHLNGRNSLTNPGVAMATNKDDEDQFLPINGVLVFGKTGAANKTTLENVLMTSEEEIKTTNPVATEEYGVVSSNLQSSTAGPRTQTVNSQGALPGMVWQNRDVYLQGPIWAEIPHTDGNFHPSPLMGGFGLKHPPPQILIKNTPVPANPPEVFTPAKFASFITQYSTGQVSVEIEWELQKENSKRWNPEIQYTSNYAKSNNVEFAVNNEGVYTEPRPIGTRYLTRNL

SEQ ID NO: 4749 - protein, 738 aa, Adeno-associated virus
MAADGYLPDWLEDNLSEGIREWWALKPGAPKPKANQQKQDDGRGLVLPGYKYLGPFNGLDKGEPVNAADAAALEHDKAYDQQLKAGDNPYLRYNHADAEFQERLQEDTSFGGNLGRAVFQAKKRVLEPLGLVEEGAKTAPGKKRPVEPSPQRSPDSTTGIGKKGQQPAKKRLNFGQTGDSESVPDPQPIGEPPAGPSGLGSGTMAAGGGAPMADNNEGADGVGSSSGNWHCDSTWLGDRVITTSTRTWALPTYNNHLYKQISNGTSGGSTNDNTYFGYSTPWGYFDFNRFHCHFSPRDWQRLINNNWGFRPKRLNFKLFNIQVKEVTQNEGTKTIANNLTSTIQVFTDSEYQLPYVLGSARQGCLPPFPADVFMIPQYGYLTLNNGSQAVGRSSFYCLEYFPSQMLRTGNNFEFSYQFEDVPFHSSYAHSQSLDRLMNPLIDQYLYYLSRTQSTGGTAGTQQLLFSQAGPNNMSAQAKNWLPGPCYRQQRVSTTLSQNNNSNFAWTGATKYHLNGRDSLVNPGVAMATHKDDEERFFPSSGVLMFGKQGAGKGNVDYSSVMLTSEEEIKTTNPVATEQYGVVADNLQQQNAAPIVGAVNSQGALPGMVWQNRDVYLQGPIWAKIPHTDGNFHPSPLMGGFGLKHPPPQILIKNTPVPADPPTTFSQAKLASFITQYSTGQVSVEIEWELQKENSKRWNPEIQYTSNYYKSTNVDFAVNTDGTYSEPRPIGTRYLTRNL

SEQ ID NO: 4750 - DNA, 3121 bp, Adeno-associated virus
  source 1..3121: mol_type = genomic DNA
gaattcgcccttcgcagagaccaaagttcaactgaaacgaatcaaccggtttattgattaacaagcaattacagattacgggtgaggtaacgggtgccgatggggcgaggctcagaataagtgccatctgtgttaacagcaaagtccacatttgtagatttgtagtagttggaagtgtattgaatctctgggttccagcgtttgctgttttctttctgcagctcccattcaatttccacgctgacctgtccggtgctgtactgcgtgatgaacgacgccagcttagcttgactgaaggtagttggaggatccgcgggaacaggtgtattcttaatcaggatctgaggaggcgggtgtttcagtccaaagccccccatcagcggcgagggatgaaagtttccgtccgtgtgaggaatcttggcccagataggaccctgcaggtacacgtcccggttctgccagaccatgccaggtaaggctccttgactgttgacggcccctacaataggagcggcgttttgctgttgcaggttatcggccaccacgccgtactgttctgtggccactgggttggtggttttaatttcttcctcactggttagcataacgctgctatagtccacgttgccttttccagctccctgtttcccaaacattaagactccgctggacggaaaaaatcgctcttcgtcgtccttgtgggttgccatagcgacaccgggatttaccagagagtctctgccattcagatgatacttggtggcaccggtccaggcaaagttgctgttgttattttgcgacagtgtcgtggagacgcgttgctgccggtagcagggcccgggtagccagtttttggcctgagccgacatgttattaggcccggcctgagaaaatagcaactgctgagttcctgcggtacctcccgtggactgagtccgagacaggtagtacaggtactggtcgatgagggggttcatcagccggtccaggctttggctgtgcgcgtagctgctgtgaaaaggcacgtcctcaaactggtagctgaactcaaagttgttgcccgttctcagcatttgagaaggaaagtactccaggcagtagaaggaggaacggcccacggcctgactgccattgttcagagtcaggtacccgtactgaggaatcatgaagacgtccgccgggaacggaggcaggcagccctggcgcgcagagccgaggacgtacgggagctggtattccgagtccgtaaagacctgaatcgtgctggtaaggttattggcgatggtcttggtgccttcattctgcgtgacctccttgacctggatgttgaagagcttgaagttgagtctcttgggccggaatccccagttgttgttgatgagtcgctgccagtcacgtggtgagaagtggcagtggaatctgttaaagtcaaaatacccccagggggtgctgtagccgaagtaggtgttgtcgttggtgcttcctcccgaagtcccgttggagatttgcttgtagaggtggttgttgtaggtggggagggcccaggttcgggtgctggtggtgatgactctgtcgcccagccatgtggaatcgcaatgccaatttcctgaggaactacccactccgtcggcgccttcgttattgtctgccattggagcgccaccgcctgcagccattgtaccagatcccagaccagaggggcctgcggggggttctccgattggttgagggtcgggcactgactctgagtcgccagtctgcccaaagttgagtctctttttcgcgggctgctggcctttcttgccgatgcccgtagtggagtctggagaacgctggggtgatggctctaccggtctcttctttccaggagccgtcttagcgccttcctcaaccagaccgagaggttcgagaacccgcttcttggcctggaagactgctcgtccgaggttgcccccaaaagacgtatcttcttgcagacgctcctgaaactcggcgtcggcgtggttataccgcaggtacggattgtcacccgctttgagctgctggtcgtaggccttgtcgtgctcgagggccgctgcgtccgccgcgttgacgggctcccccttgtcgagtccgttgaagggtccgaggtacttgtagccaggaagcaccagaccccggccgtcgtcctgcttttgctggttggctttgggcttcggggctccaggtttcagcgcccaccactcgcgaatgccctcagagaggttgtcctcgagccaatctggaagataaccatcggcagccatacctgatctaaatcatttattgttcaaagatgcagtcatccaaatccacattgaccagatcgcaggcagtgcaagcgtctggcacctttcccatgatatgatgaatgtagcacagtttctgatacgcctttttgacgacagaaacgggttgagattctgacacgggaaagcactctaaacagtctttctgtccgtgagtgaagcagatatttgaattctgattcattctctcgcattgtctgcagggaaacagcatcagattcatgcccacgtgacgagaacatttgttttggtacctgtccgcgtagttgatcgaagcttccgcgtctgacgtcgatggctgcgcaactgactcgcgcacccgtttgggctcacttatatctgcgtcactgggggcgggtcttttcttggctccaccctttttgacgtagaattcatgctccacctcaaccacgtgatcctttgcccaccggaaaaagtctttgacttcctgcttggtgaccttcccaaagtcatgatccagacggcgggtgagttcaaatttgaacatccggtcttgcaacggctgctggtgttcgaaggtcgttgagttcccgtcaatcacggcgcacatgttggtgttggaggtgacgatcacgggagtcgggtctatctgggccgaggacttgcatttctggtccacgcgcaccttgcttcctccgagaatggctttggccgactccacgaccttggcggtcatcttcccctcctcccaccagatcaccatcttgtcgacacagtcgttgaagggaaagttctcattggtccagttgacgcagccgtagaagggcgaattc

SEQ ID NO: 4751 - DNA, 3121 bp, Adeno-associated virus
  source 1..3121: mol_type = genomic DNA
gaattcgcccttctacggctgcgtcaactggaccaatgagaactttcccttcaacgactgtgtcgacaagatggtgatctggtgggaggaggggaagatgaccgccaaggtcgtggagtcggccaaagccattctcggaggaagcaaggtgcgcgtggaccagaaatgcaagtcctcggcccagatagacccgactcccgtgatcgtcacctccaacaccaacatgtgcgccgtgattgacgggaactcaacgaccttcgaacaccagcagccgttgcaagaccggatgttcaaatttgaactcacccgccgtctggatcatgactttgggaaggtcaccaagcaggaagtcaaagactttttccggtgggcaaaggatcacgtggttgaggtggagcacgaattctacgtcaaaaagggtggagccaagaaaagacccgcccccagtgacgcagatataagtgagcccaaacgggtgcgcgagtcagttgcgcagccatcgacgtcagacgcggaagcttcgatcaactacgcagacaggtaccaaaacaaatgttctcgtcacgcgggcatgaatctgatgctgtttccctgcagacaatgcgagagaatgaatcagaattcaaatatctgcttcactcacggacagaaagactgtttagagtgctttcccgtgtcagaatctcaacccgtttctgtcgtcaaaaaggcgtatcagaaactgtgctacattcatcatatcatgggaaaggtgccagacgcttgcactgcctgcgatctggtcgatgtggatttggatgactgcatctttgaacaataaatgatttaaatcaggtatggctgccgatggttatcttccagattggctcgaggacaacctctctgagggcattcgcgagtggtgggcgctgaaacctggagccccgaagcccaaagccaaccagcaaaagcaggacggcggccggggtctggtgcttcctggctacaagtacctcggacccttcaacggactcgacaagggggagcccgtcaacgcggcggacgcagcggccctcgagcacgacaaggcctacgaccagcagctcaaagcgggtgacaatccgtacctgcggtataaccacgccgacgccgagtttcaggagcgtctgcaagaagatacgtcttttgggggcaacctcgggcgagcagtcttccaggccaagaagcgggttctcgaacctctcggtctggttgaggaaggcgctaagacggctcctggaaagaagagaccggtagagccatcaccccagcgttctccagactcctctacgggcatcggcaagaaaggccagcagcccgcgaaaaagagactcaactttgggcagactggcgactcagagtcagtgcccgaccctcaaccaatcggagaaccccccgcaggcccctctggtctgggatctggtacaatggctgcaggcggtggcgctccaatggcagacaataacgaaggcgccgacggagtgggtagttcctcaggaaattggcattgcgattccacatggctgggcgactgagtcatcaccaccagcacccgaacctgggccctccccacctacaacaaccacctctacaagcaaatctccaacgggacttcgggaggaagcaccaacgacaacacctacttcggctacagcaccccctgggggtattttgactttaacagattccactgccacttctcaccacgtgactggcagcgactcatcaacaacaactggggattccggcccaagagactcaacttcaagctcttcaacatccaggtcaaggaggtcacgcagaatgaaggcaccaagaccatcgccaataaccttaccagcacgattcaggtctttacggactcggaataccagctcccgtacgtcctcggctctgcgcaccagggctgcctgcctccgttcccggcggacgtcttcatgattcctcagtacgggtacctgactctgaacaatggcagtcaggccgtgggccgttcctccttctactgcctggagtactttccttctcaaatgctgagaacgggcaacaactttgagttcagctaccagtttgaggacgtgccttttcacagcagctacgcgcacagccaaagcctggaccggctgatgaaccccctcatcgaccagtacctgtactacctgtctcggactcagtccacgggaggtaccgcaggaactcagcagttgctattttctcaggccgggcctaataacatgtcggctcaggccaaaaactggctacccgggccctgctaccggcagtaacgcgtctccacgacactgtcgcaaaataacaacagcaactttgtctggaccggtgccaccaagtatcatctgaatggcagagactctctggtagatcccggtgtcgctatggcaacccacaaggacgacgaagagcgattttttccgtccagcggagtcataatgtttgggaaacagggagctggaaaagacaacgtggactatagcagcgtcatgctaaccagtgaggaagaaattaaaaccaccaacccagtggccacagaacagtacggcgtggtggccgataacctgcaacagcaaaacgccgctcctattgtaggggccgtcaacagtcaaggagccttacctggcatggtctggcagaaccgggacgtgtacctgcagggtcctacctgggccaagattcctcacacggacggaaactttcatccctcgccgctgatgggaggctttggactgaaacacccgcctcctcagatcctgattaagaatacacctgttcccgcggatcctccaactaccttcagtcaagctaagctggcgtcgttcatcacgcagtacagcaccggacaggtcagcgtggaaattgaatgggagctgcaggaagaaaacagcaaacgctggaacccagagattcaatacacttccaactactacaaatctacaaatgtggactttgctgttaacacagatggcacttattctgagcctcgccccatcggcacccgttacctcacccgtaatctgtaattgcttgttaatcaataaaccggttgattcgtttcagttgaactttggtctctgcgaagggcgaattc

SEQ ID NO: 4752 - protein, 738 aa, Adeno-associated virus
MAADGYLPDWLEDNLSEGIREWWALKPGAPKPKANQQKQDDGRGLVLPGYKYLGPFNGLDKGEPVNAADAAALEHDKAYDQQLKAGDNPYLRYNHADAEFQERLQEDTSFGGNLGRAVFQAKKRVLEPLGLVEEGAKTAPGKKRPVEPSPQRSPDSSTGIGKKGQQPAKKRLNFGQTGDSESVPDPQPIGEPPAGPSGLGSGTMAAGGGAPMADNNEGADGVGSSSGNWHCDSTWLGDGVITTSTRTWALPTYNNHLYKQISNGTSGGSTNDNTYFGYSTPWGYFDFNRFHCHFSPRDWQRLINNNWGFRPKSLNFKLFNIQVKEVTQNEGTKTIANNLTSTIQVFTDSEYQLPYVLGSAHQGCLPPFPADVFMIPQYGYLTLNNGSQAVGRSSFYCLEYFPSQMLRTGNNFEFSYQFEDVPFHSSYAHSQSLDRLMNPLIDQYLYYLSRTQSTGGTAGTQQLLFSQAGPNNMSAQAKNWLPGPCYRQQRVSTTLSQNDNSNFAWTGATKYHLNGRDSLVNPGVAMATHKDDEERFFPSSGVLMFGKQGAGKDNVDYSSVMLTSEEEIKTTNPVATEQYGVVADNLQQQNAAPIVGAVNSQGALPGMVWQNRDVYLQGPIWAKIPHTDGNFHPSPLMGGFGLKHPPPQILIKNTPVPADPPTTFSQAKLASFITQYSTGQVSVEIEWELQKENSKRWNPEIQYTSNYYKSTNVDFAVNTDGTYSEPRPIGTRYLTRNL

SEQ ID NO: 4753 - DNA, 3121 bp, Adeno-associated virus
  source 1..3121: mol_type = genomic DNA
gaattcgcccttcgcgagaccaaagttcaactgaaacgaatcaaccggtttattgattaacaagcaattacagattacgggtgaggtaacgggtgccgatggggcgaggctcagaataagtgccatctgtgttaacagcaaagtccacatttgtagatttgtagtagttggaagtgtattgaatctctgggttccagcgtttgctgttttctttctgcagctcccattcaatttccacgctgacctgtccggtgctgtactgcgtgatgaacgacgccagcttagcttgactgaaggtagttggaggatccgcgggaacaggtgtattcttaatcaggatctgaggaggcgggtgtttcagtccaaagcctcccatcagcggcgagggatgaaagtttccgtccgtgtgaggaatcttggcccagataggaccctgcaggtacacgtcccggttctgccagaccatgccaggtaaggctccttgactgttgacggcccctacaataggagcggcgttttgctgttgcaggttatcggccaccacgccgtactgttctgtggccactgggttggtggttttaatttcttcctcactggttagcataacgctgctatagtccacgttgtcttttccagctccctgtttcccaaacattaagactccgctggacggaaaaaatcgctcttcgtcgtccttgtgggttgccatagcgacaccgggatttaccagagagtctctgccattcagatgatacttggtggcaccggtccaggcaaagttgctgttgtcattttgcgacagtgtcgtggagacgcgttgctgccggtagcagggcccgggtagccagtttttggcctgagccgacatgttattaggcccggcctgagaaaatagcaactgctgagttcctgcggtacctcccgtggactgagtccgagacaggtagtacaggtactggtcgatgagggggttcatcagccggtccaggctttggctgtgcgcgtagctgctgtgaaaaggcacgtcctcaaactggtagctgaactcaaagttgttgcccgttctcagcatttgagaaggaaagtactccaggcagtagaaggaggaacggcccacggcctgactgccattgttcagagtcaggtacccgtactgaggaatcatgaagacgtccgccgggaacggaggcaggcagccctggtgcgcagagccgaggacgtacgggagctggtattccgagtccgtaaagacctgaatcgtgctggtaaggttattggcgatggtcttggtgccttcattctgcgtgacctccttgacctggatgttgaagagcttgaagttgaggctcttgggccggaatccccagttgttgttgatgagtcgctgccagtcacgtggtgagaagtggcagtggaatctgttaaagtcaaaatacccccagggggtgctgtagccgaagtaggtgttgtcgttggtgcttcctcccgaagtcccgttggagatttgcttgtagaggtggttgttgtaggtggggagggcccaggttcgggtgctggtggtgatgactccgtcgcccagccatgtggaatcgcaatgccaatttcctgaggaactacccactccgtcggcgccttcgttattgtctgccattggagcgccaccgcctgcagccattgtaccagatcccagaccagaggggcctgcggggggttctccgattggttgagggtcgggcactgactctgagtcgccagtctgcccaaagttgagtctctttttcgcgggctgctggcctttcttgccgatgcccgtagaggagtctggagaacgctggggtgatggctctaccggtctcttctttccaggagccgtcttagcgccttcctcaaccagaccgagaggttcgagaacccgcttcttggcctggaagactgctcgcccgaggttgcccccaaaagacgtatcttcttgcagacgctcctgaaactcggcgtcggcgtggttataccgcaggtacggattgtcacccgctttgagctgctggtcgtaggccttgtcgtgctcgagggccgctgcgtccgccgcgttgacgggctcccccttgtcgagtccgttgaagggtccgaggtacttgtagccaggaagcaccagaccccggccgtcgtcctgcttttgctggttggctttgggcttcggggctccaggtttcagcgcccaccactcgcgaatgccctcagagaggttgtcctcgagccaatctggaagataaccatcggcagccatacctgatttaaatcatttattgttcaaagatgcagtcatccaaatccacattgaccagatcgcaggcagtgcaagcgtctggcacctttcccatgatatgatgaatgtagcacagtttctgatacgcctttttgacgacagaaacgggttgagattctgacacgggaaagcactctaaacagtctttctgtccgtgagtgaagcagatatttgaattctgattcattctctcgcattgtctgcagggaaacagcatcagattcatgcccacgtgacgagaacatttgttttggtacctgtctgcgtagttgatcgaagcttccgcgtctgacgtcgatggctgcgcaactgactcgcgcacccgtttgggctcacttatatctgcgtcactgggggcgggtcttttcttggctccaccctttttgacgtagaattcatgctccacctcaaccacgtgatcctttgcccaccggaaaaagtctttgacttcctgcttggtgaccttcccaaagtcatgatccagacggcgggtgagttcaaatttgaacatccggtcttgcaacggctgctggtgttcgaaggtcgttgagttcccgtcaatcacggcgcacatgttggtgttggaggtgacgatcacgggagtcgggtctatctgggccgaggacttgcatttctggtccacgcgcaccttgcttcctccgagaatggctttggccgactccacgaccttggcggtcatcttcccctcctcccaccagatcaccatcttgtcgacacagtcgttgaagggaaagttctcattggtccagttgacgcagccgtagaaagggcgaattc

SEQ ID NO: 4754 - DNA, 2211 bp, Adeno-associated virus
  source 1..2211: mol_type = genomic DNA
atggctgctgacggttatcttccagattggctcgaggacaacctttctgaaggcattcgtgagtggtgggctctgaaacctggagtccctcaacccaaagcgaaccaacaacaccaggacaaccgtcggggtcttgtgcttccgggttacaaatacctcggacccggtaacggactcgacaaaggagagccggtcaacgaggcggacgcggcagccctcgaacacgacaaagcttacgaccagcagctcaaggccggtgacaacccgtacctcaagtacaaccacgccgacgccgagtttcaggagcgtcttcaagaagatacgtcttttgggggcaaccttggcagagcagtcttccaggccaaaaagaggatccttgagcctcttggtctggttgaggaagcagctaaaacggctcctggaaagaagggggctgtagatcagtctcctcaggaaccggactcatcatctggtgttggcaaatcgggcaaacagcctgccagaaaaagactaaatttcggtcagactggagactcagagtcagtcccagaccctcaacctctcggagaaccaccagcagcccccacaagtttgggatctaatacaatggcttcaggcggtggcgcaccaatggcagacaataacgagggtgccgatggagtgggtaattcctcaggaaattggcattgcgattcccaatggctgggcgacagagtcatcaccaccagcaccagaacctgggccctgcccacttacaacaaccatctctacaagcaaatctccagccaatcaggagcttcaaacgacaaccactactttggctacagcaccccttgggggtattttgactttaacagattccactgccacttctcaccacgtgactggcagcgactcattaacaacaactggggattccggcccaagaaactcagcttcaagctcttcaacatccaagttagaggggtcacgcagaacgatggcacgacgactattgccaataaccttaccagcacggttcaagtgtttacggactcggagtatcagctcccgtacgtgctcgggtcggcgcaccaaggctgtctcccgccgtttccagcggacgtcttcatggtccctcagtatggatacctcaccctgaacaacggaagtcaagcggtgggacgctcatccttttactgcctggagtacttcccttcgcagatgctaaggactggaaataacttccaattcagctataccttcgaggatgtaccttttcacagcagctacgctcacagccagagtttggatcgcttgatgaatcctcttattgatcagtatctgtactacctgaacagaacgcaaggaacaacctctggaacaaccaaccaatcacggctgctttttagccaggctgggcctcagtctatgtctttgcaggccagaaattggctacctgggccctgctaccggcaacagagactttcaaagactgctaacgacaacaacaacagtaactttccttggacagcggccagcaaatatcatctcaatggccgcgactcgctggtgaatccaggaccagctatggccagtcacaaggacgatgaagaaaaatttttccctatgcacggcaatctaatatttggcaaagaagggacaacggcaagtaacgcagaattagataatgtaatgattacggatgaagaagagattcgtaccaccaatcctgtggcaacagagcagtatggaactgtggcaaataacttgcagagctcaaatacagctcccacgactggaactgtcaatcatcagggggccttacctggcatggtgtggcaagatcgtgacgtgtaccttcaaggacctatctgggcaaagattcctcacacggatggacactttcatccttctcctctgatgggaggctttggactgaaacatccgcctcctcaaatcatgatcaaaaatactccggtaccggcaaatcctccgacgactttcagcccggccaagtttgcttcatttatcactcagtactccactggacaggtcagcgtggaaattgagtgggagctacagaaagaaaacagcaaacgttggaatccagagattcagtacacttccaactacaacaagtctgttaatgtggactttactgtagacactaatggtgtttatagtgaacctcgccctattggaacccggtatctcacacgaaacttgtga

SEQ ID NO: 4755 - protein, 737 aa, Adeno-associated virus
MAADGYLPDWLEDNLSEGIREWWDLKPGAPKPKANQQKQDNGRGLVLPGYKYLGPFNGLDKGEPVNAADAAALEHDKAYDQQLNAGDNPYLRYNHADAEFQERLQEDTSFGGNLGRAVFQAKKRVLEPLGLVEEGAKTAPAKKRPVEPSPQRSPDSSTGIGKKGQQPARKRLNFGQTGDSESVPDPQPLGEPPAAPSSVGSGTVAAGGGAPMADNNEGADGVGNASGNWHCDSTWLGDRVITTSTRTWALPTYNNHLYEQISSETAGSTNDNTYFGYSTPWGYFDFNRFHCHFSPRDWQRLINNNWGFRPKKLRFKLFNIQVKEVTTNDGVTTIANNLTSTIQVFSDSEYQLPYVLGSAHQGCLPPFPADVFMIPQYGYLTLNNGSQSVGRSSFYCLEYFPSQMLRTGNNFEFSYSFEDVPFHSSYAHSQSLDRLMNPLIDQYLYYLARTQSDPGGTAGNRELQFYQGGPSTMAEQAKNWLPGPCFRQQRVSKTLDQNNNSNFAWTGATKYHLNGRNSLVNPGVAMATHKDDEDRFFPSSGVLIFGKTGATNKTTLENVLMTNEEEIRPTNPVATEEYGIVSSNLQAANTAAQTQVVNNQGALPGMVWQNRDVYLQGPIWAKIPHTDGNFHPSPLMGGFGLKHPPPQILIKNTPVPANPPEVFTPAKFASFITQYSTGQVSVEIEWELQKENSKRWDPEIQYTSNFEKQTGVDFAVDSQGVYSEPRPIGTRYLTRNL

SEQ ID NO: 4756 - DNA, 2211 bp, Adeno-associated virus
  source 1..2211: mol_type = genomic DNA
atggctgctgacggttatcttccagattggctcgaggacaacctttctgaaggcattcgtgagtggtgggctctgaaacctggagtccctcaacccaaagcgaaccaacaacaccaggacaaccgtcggggtcttgtgcttccgggttacaaatacctcggacccggtaacggactcgacaaaggagagccggtcaacgaggcggacgcggcagccctcgaacacgacaaagcttacgaccagcagctcaaggccggtgacaacccgtacctcaagtacaaccacgccgacgccgagtttcaggagcgtcttcaagaagatacgtcttttgggggcaaccttggcagagcagtcttccaggccaaaaagaggatccttgagcctcttggtctggttgaggaagcagctaaaacggctcctggaaagaagggggctgtagatcagtctcctcaggaaccggactcatcatctggtgttggcaaatcgggcaaacagcctgccagaaaaagactaaatttcggtcagactggagactcagagtcagtcccagaccctcaacctctcggagaaccaccagcagcccccacaagtttgggatctaatacaatggcttcaggcggtggcgcaccaatggcagacaataacgagggtgccgatggagtgggtaattcctcaggaaattggcattgcgattcccaatggctgggcgacagagtcatcaccaccagcaccagaacctgggccctgcccacttacaacaaccatctctacaagcaaatctccagccaatcaggagcttcaaacgacaaccactactttggctacagcaccccttgggggtattttgactttaacagattccactgccacttctcaccacgtgactggcagcgactcattaacaacaactggggattccggcccaagaaactcagcttcaagctcttcaacatccaagttagaggggtcacgcagaacgatggcacgacgactattgccaataaccttaccagcacggttcaagtgtttacggactcggagtatcagctcccgtacgtgctcgggtcggcgcaccaaggctgtctcccgccgtttccagcggacgtcttcatggtccctcagtatggatacctcaccctgaacaacggaagtcaagcggtgggacgctcatccttttactgcctggagtacttcccttcgcagatgctaaggactggaaataacttccaattcagctataccttcgaggatgtaccttttcacagcagctacgctcacagccagagtttggatcgcttgatgaatcctcttattgatcagtatctgtactacctgaacagaacgcaaggaacaacctctggaacaaccaaccaatcacggctgctttttagccaggctgggcctcagtctatgtctttgcaggccagaaattggctacctgggccctgctaccggcaacagagactttcaaagactgctaacgacaacaacaacagtaactttccttggacagcggccagcaaatatcatctcaatggccgcgactcgctggtgaatccaggaccagctatggccagtcacaaggacgatgaagaaaaatttttccctatgcacggcaatctaatatttggcaaagaagggacaacggcaagtaacgcagaattagataatgtaatgattacggatgaagaagagattcgtaccaccaatcctgtggcaacagagcagtatggaactgtggcaaataacttgcagagctcaaatacagctcccacgactggaactgtcaatcatcagggggccttacctggcatggtgtggcaagatcgtgacgtgtaccttcaaggacctatctgggcaaagattcctcacacggatggacactttcatccttctcctctgatgggaggctttggactgaaacatccgcctcctcaaatcatgatcaaaaatactccggtaccggcaaatcctccgacgactttcagcccggccaagtttgcttcatttatcactcagtactccactggacaggtcagcgtggaaattgagtgggagctacagaaagaaaacagcaaacgttggaatccagagattcagtacacttccaactacaacaagtctgttaatgtggactttactgtagacactaatggtgtttatagtgaacctcgccctattggaacccggtatctcacacgaaacttgtaa

SEQ ID NO: 4757 - protein, 736 aa, Adeno-associated virus
MAADGYLPDWLEDNLSEGIREWWALKPGVPQPKANQQHQDNRRGLVLPGYKYLGPGNGLDKGEPVNEADAAALEHDKAYDQQLKAGDNPYLKYNHADAEFQERLQEDTSFGGNLGRAVFQAKKRILEPLGLVEEAAKTAPGKKGAVDQSPQEPDSSSGVGKSGKQPARKRLNFGQTGDSESVPDPQPLGEPPAAPTSLGSNTMASGGGAPMADNNEGADGVGNSSGNWHCDSQWLGDRVITTSTRTWALPTYNNHLYKQISSQSGASNDNHYFGYSTPWGYFDFNRFHCHFSPRDWQRLINNNWGFRPKKLSFKLFNIQVRGVTQNDGTTTIANNLTSTVQVFTDSEYQLPYVLGSAHQGCLPPFPADVFMVPQYGYLTLNNGSQAVGRSSFYCLEYFPSQMLRTGNNFQFSYTFEDVPFHSSYAHSQSLDRLMNPLIDQYLYYLNRTQGTTSGTTNQSRLLFSQAGPQSMSLQARNWLPGPCYRQQRLSKTANDNNNSNFPWTAASKYHLNGRDSLVNPGPAMASHKDDEEKFFPMHGNLIFGKEGTTASNAELDNVMITDEEEIRTTNPVATEQYGTVANNLQSSNTAPTTGTVNHQGALPGMVWQDRDVYLQGPIWAKIPHTDGHFHPSPLMGGFGLKHPPPQIMIKNTPVPANPPTTFSPAKFASFITQYSTGQVSVEIEWELQKENSKRWNPEIQYTSNYNKSVNVDFTVDTNGVYSEPRPIGTRYLTRNL

SEQ ID NO: 4758 - protein, 728 aa, Adeno-associated virus
MAADGYLPDWLEDNLSEGIREWWDLKPGAPKPKANQQKQDDGRGLVLPGYKYLGPFNGLDKGEPVNEADAAALEHDKAYDKQLEQGDNPYLKYNHADAEFQERLQEDTSFGGNLGRAVFQAKKRVLEPLGLVEEGAKTAPGKKRPIESPDSSTGIGRKGQQPAKKKLNFGQTGDSESVPDPQPIGEPPAGPSGLGSGTMAAGGGAPMADNNEGADGVGNASGNWHCDSTWLGDRVITTSTRTWALPTYNNHLYKQISSQSGATNDNHFFGYSTPWGYFDFNRFHCHFSPRDWQRLINNNWGFRPRKLRFKLFNIQVKEVTTNDGVTTIANNLTSTIQVFSDSEYQLPYVLGSAHQGCLPPFPADVFMIPQYGYLTLNNGSQSVGRSSFYCLEYFPSQMLRTGNNFEFSYTFEEVPFHSSYAHSQSLDRLMNPLIDQYLYYLARTQSTTGSTRELQFHQAGPNTMAEQSKNWLPGPCYRQQRLSKNIDSNNNSNFAWTGATKYHLNGRNSLTNPGVAMATNKDDEDQFFPINGVLVFGKTGAANKTTLENVLMTSEEEIKTTNPVATEEYGVVSSNLQSSTAGPQTQTVNSQGALPGMVWQNRDVYLQGPIWAKIPHTDGNFHPSPLMGGFGLKHPPPQILIKNTPVPANPPEVFTPAKFASFITQYSTGQVSVEIEWELQKENSKRWNPEIQYTSNYAKSNNVEFAVNNEGVYTEPRPIGTRYLTRNL

SEQ ID NO: 4759 - protein, 728 aa, Adeno-associated virus
MAADGYLPDWLEDNLSEGIREWWDLKPGAPKPKANQQKQDDGRGLVLPGYKYLGPFNGLDKGEPVNAADAAALEHDKAYDQQLKAGDNPYLRYNHADAEFQERLQEDTSFGGNLGRAVFQAKKRVLEPLGLVEEGAKTAPGKKRPIESPDSSTGIGKKGQQPAKKKLNFGQTGDSESVPDPQPIGEPPAGPSGLGSGTMAAGGGAPMADNNEGADGVGNASGNWHCDSTWLGDRVITTSTRTWALPTYNNHLYKQISSQSGATNDNHFFGYSTPWGYFDFNRFHCHFSPRDWQRLINNNWGFRPRKLRFKLFNIQVKEVTTNDGVTTIANNLTSTIQVFSDSEYQLPYVLGSAHQGCLPPFPADVFMIPQYGYLTLNNGSQSVGRSSFYCLEYFPSQMLRTGNNFEFSYTFEEVPFHSSYAHSQSLDRLMNPLIDQYLYYLARTQSTTGSTRELQFHQAGPNTMAEQSKNWLPGPCYRRQRLSKDIDSNNNSNFAWTGATKYHLNGRNSLTNPGVAMATNKDDEDQFFPINGVLVFGKTGAANKTTLENVLMTSEEEIKTTNPVATEEYGVVSSNLQSSTAGPQTQTVNSQGALPGMVWQNRDVYLQGPIWAKIPHTDGNFHPSPLMGGFGLKHPPPQILIKNTPVPANPPEVFTPAKFASFITQYSTGQVSVEIEWELQKENSKRWNPEIQYTSNYAKSNNVEFAVNNEGVYTEPRPIGTRYLTRNL

SEQ ID NO: 4760 - protein, 685 aa, Adeno-associated virus
MAADGYLPDWLEDNLSEGIREWWDLKPGAPKPKANQQKQDDGRGLVLPGYKYLGPFNGLDKGEPVNEADAAALEHDKAYDKQLEQGDNPYLKYNHADAEFQERLQEDTSFGGNLGRAVFQAKKRVLEPLGLVEEGAKTAPGKKRPVEPSPQRSPDSSTGIGKTGQQPAKKRLNFGQTGDSESVPDPQPIGEPPAGPSGLGSGTMAAGGGAPMADNNEGADGVGSSSGNWHCDSTWLGDRVITTSTRTWALPTYNNHLYKQISNGTSGGSTNDNTYFGYSTPWGYFDFNRFHCHFSPRDWQRLINNNWGFRPKRLNFKLFNIQVKEVTQNEGTKTIANNLTSTIQVFTDSEYQLPYVLGSAHQGCLPPFPADVFMIPQYGYLTLNNGSQAVGRSSFYCLEYFPSQMLRTGNNFEFSYQFEDVPFHSSYAHSQSLDRLTNPLIDQYLYYLARTQSTTGSTRGLQFHQAGPNTMAEQSKNWLPGPCYRQQRLSKNIDSNNNSNFAWTGATKYHLNGRNSLTNPGVAMATNKDDEDQFFPINGVLVFGKTGAANKTTLENVLMTSEEEIKTTNPVATEEYGVVSSNLQSSTAGPQTQTVNSQGALPGMVWQNRDVYLQGPIWAKIPHTDGNFHPSPLMGGFGLKHPPPQILIKYTSNYYKSTNVDFAVNTEGTYSEPRPIGTRYLTRNL

SEQ ID NO: 4761 - protein, 733 aa, Adeno-associated virus
MAADGYLPDWLEDNLSEGIREWWDLKPGAPKPKANQQKQDDGRGLVLPGYKYLGPFNGLDKGEPVNAADAAALEHDKAYDQQLKAGDNPYLRYNHADAEFQERLQEDTSFGGNLGRAVFQAKKRVLEPLGLVEEGAKTAPGKKRPIESPDSSTGIGKKGQQPAKKKLNFGQTGDSESVPDPQPIGEPPAGPSGLGSGTMAAGGGAPMADNNEGADGVGSSSGNWHCDSTWLGDRVITTSTRTWALPTYNNHLYKQISNGTSGGSTNDNTYFGYSTPWGYFDFNRFHCHFSPRDWQRLINNNWGFRPKRLNFKLFNIQVKEVTQNEGTKTIANNLTSTIQVFTDSEYQLPYVLGSAHQGCLPPFPADVFMIPQYGYLTLNNGSQAVGRSSFYCLEYFPSQMLRTGNNFEFSYQFEDVPFHSSYAHSQSLDRLMNPLIDQYLYYLSRTQSTGGTAGTQQLLFSQAGPNNMSAQAKNWLPGPCYRQQRVSTTVSQNNNSNFAWTGATKYHLNGRDSLVNPGVAMATHKGDEERFFPSSGVLMFGKQGAGKDNVDYSSVMLTSEEEIKTTNPVATEQYGVVADNLQQQNAAPIVGAVNSQGALPGMVWQNRDVYLQGPIWAKIPHTDGNFHPSPLMGGFGLKHPPPQILIKNTPVPADPPTTFSQAKLASFITQYSTGQVSVEIEWELQKENSKRWNPEIQYTSNYYKSTNVDFAVNTEGTYSEPRPIGTRYLTRSL

SEQ ID NO: 4762 - protein, 738 aa, Adeno-associated virus
MAADGYLPDWLEDNLSEGIREWWDLKPGAPKPKANQQKQDDGRGLVLPGYKYLGPFNGLDKGEPVNAADAAALEHDKAYDQQLKAGDNPYLRYNHADAEFQERLQEDTSFGGNLGRAVFQAKKRVLEPLGLVEEGAKTAPGKKRPVEPSPQRSPDSSTGIGKTGQQPAKKRLNFGQTGDSESVPDPQPIGEPPAGPSGLGSGTMAAGGGAPMADNNEGADGVGSSSGNWHCDSTWLGDRVITTSTRTWALPTYNNHLYKQISNGTSGGSTNDNTYFGYSTPWGYFDFNRFHCHFSPRDWQRLINNNWGFRPKRLNFKLFNIQVKEVTQNEGTKTIANNLTSTIQVFTDSEYQLPYVLGSAHQGCPPPFPADVFMIPQYGYLTLNNGSQAVGRSSFYCLEYFPSQMRRTGNNFEFSYQFEDVPFHSSYAHSQSLDRLMNPLIDQYLYYLSRTQSTGGTAGTQQLLFSQAGPNNMSAQAKNWLPGPCYRQQRVSTTLSQNNNSNFAWTGATKYHLNGRDSLVNPGVAMATHKDDEERFFPSSGVLMFGKQGAGKDNVDYSSVMLTSEEEIKTTNPVATEQYGVVADNLQQQNAAPIVGAVNSQGALPGMVWQNRDVYLQGPIWAKIPHTDGNFHPSPLMGGFGLKHPPPQILIKNTPVPADPPTTFSQAKLASFITQYSTGQVSVEIEWELQKENSKRWNPEIQYTSNYYKSTNVDFAVNTEGTYSEPRPIGTRYLTRNL

SEQ ID NO: 4763 - protein, 733 aa, Adeno-associated virus
MAADGYLPDWLEDNLSEGIREWWDLRPGAPKPKANQQKQDDGRGLVLPGYKYLGPFNGLDKGEPVNEADAAALEHDKAYDKQLEQGDNPYLKYNHADAEFQERLQEDTSFGGNLGRAVFQAKKRVLEPLGLVEEGAKTAPGKKRPIESPDSSTGIGKKGQQPAKKRLNFGQTGDSESVPDPQPIGEPPAGPSGLGSGTMAAGGGAPMADNNEGADGVGSSSGNWHCDSTWLGDRVITTSTRTWALPTYNNHLYKQISNGTSGGSTNDNTYFGYSTPWGYFDFNRFHCHFSPRDWQRLINNNWGFRPKRLNFKLFNIQVKEVTQNEGTKTIANNLTSTIQVFTDSEYQLPYVLGSAHQGCLPPFPADVFMIPQYGYLTLNNGSQAVGRSSFYCLEYFPSQMLRTGNNFEFSYQFEDVPFHSSYAHSQSLDRLMNPLIDQYLYYLSRTQSTGGTAGTQQLLFSQAGPNNMSAQAKNWLPGPCYRQQRVSTTVSQNNNSNFAWTGATKYHLNGRDSLVNPGVAMATHKGDEERFFPSSGVLMFGKQGAGKDNVDYSSVMLTSEEEIKTTNPVATEQYGVVADNLQQQNAAPIVGAVNSQGALPGMVWQNRDVYLQGPIWAKIPHTDGNFHPSPLMGGFGLKHPPPQILIKNTPVPADPPTTFSQAKLASFITQYSTGQVSVEIEWELQKENSKRWNPEIQYTSNYYKSTNVDFAVNTEGTYSEPRPIGTRYLTRNL

SEQ ID NO: 4764 - DNA, 3098 bp, Adeno-associated virus
  source 1..3098: mol_type = genomic DNA
gaattcgccctttctacggctgcgtcaactggaccaatgagaactttcccttcaacgattgcgtcgacaagatggtgatctggtgggaggagggcaagatgacggccaaggtcgtggagtccgccaaggccattctcggcggcagcaaggtgcgcgtggaccaaaagtgcaagtcttccgcccagatcgatcccacccccgtgatcgtcacttccaacaccaacatgtgcgctgtgattgacgggaacagcaccaccttcgagcaccagcagccgttacaagaccggatgttcaaatttgaactcacccgccgtctggagcacgactttggcaaggtgacaaagcaggaagtcaaagagttcttccgctgggcgcaggatcacgtgaccgaggtggcgcatgagttctacgtcagaaagggtggagccaacaagagacccgcccccgatgacgcggataaaagcgagcccaagcgggcctgcccctcagtcgcggatccatcgacgtcagacgcggaaggagctccggtggactttgccgacaggtaccaaaacaaatgttctcgtcacgcgggcatgcttcagatgctgtttccctgcaagacatgcgagagaatgaatcagaatttcaacatttgcttcacgcacgggaccagagactgttcagaatgtttccccggcgtgtcagaatctcaaccggtcgtcagaaagaggacgtatcggaaactctgtgccattcatcatctgctggggcgggctcccgagattgcttgctcggcctgcgatctggtcaacgtggacctggatgaccgtgtttctgagcaataaatgacttaaaccaggtatggctgccgatggttatcttccagattggctcgaggacaacctctctgagggcattcgcgagtggtgggacttgaaacctggagccccgaaacccaaagccaaccagcaaaagcaggacgacggccggggtctggtgcttcctggctacaagtacctcggacccttcaacggactcgacaagggagagccggtcaacgaggcagacgccgcggccctcgagcacgacaaggcctacgacaagcagctcgagcagggggacaacccgtacctcaagtacaaccacgccgacgccgagtttcaggagcgtcttcaagaagatacgtcttttgggggcaacctcgggcgagcagtcttccaggccaagaagcgggttctcgaacctctcggtctggttgaggaaggcgctaagacggctcctggaaagaagagacccatagaatcccccgactcctccacgggcatcggcaagaaaggccagcagcccgctaaaaagaagctcaactttgggcagactggcgactcagagtcagtgcccgacccccaacctctcggagaacctcccgccgcgccctcaggtctgggatctggtacaatggctgcaggcggtggcgcaccaatggcagacaataacgaaggcgccgacggagtgggtaatgcctccggaaattggcattgcgattccacatggctgggcgacagagtcatcaccaccagcacccgcacctgggccctgcccacctacaacaaccacctctacaagcagatatcaagtcagagcggggctaccaacgacaaccacttcttcggctacagcaccccctggggctattttgacttcaacagattccactgccacttctcaccacgtgactggcagcgactcatcaacaacaactggggattccggcccagaaagctgcggttcaagttgttcaacatccaggtcaaggaggtcacgacgaacgacggcgttacgaccatcgctaataaccttaccagcacgattcaggtcttctcggactcggagtaccaactgccgtacgtcctcggctctgcgcaccagggctgcctccctccgttccctgcggacgtgttcatgattcctcagtacggatatctgactctaaacaacggcagtcagtctgtgggacgttcctccttctactgcctggagtactttccttctcagatgctgagaacgggcaataactttgaattcagctacacctttgaggaagtgcctttccacagcagctatgcgcacagccagagcctggaccggctgatgaatcccctcatcgaccagtacctgtactacctggcccggacccagagcactacggggtccacaagggagctgcagttccatcaggctgggcccaacaccatggccgagcaatcaaagaactggctgcccggaccctgttatcggcagcagagactgtcaaaaaacatagacagcaacaacaacagtaactttgcctggaccggggccactaaataccatctgaatggtagaaattcattaaccaacccgggcgtagccatggccaccaacaaggacgacgaggaccagttctttcccatcaacggagtgctggtttttggcgaaacgggggctgccaacaagacaacgctggaaaacgtgctaatgaccagcgaggaggagatcaaaaccaccaatcccgtggctacagaagaatacggtgtggtctccagcaacctgcaatcgtctacggccggaccccagacacagactgtcaacagccagggggctctgcccggcatggtctggcagaaccgggacgtgtacctgcagggtcccatctgggccaaaattcctcacacggacggcaactttcacccgtctcccctgatgggcggatttggactcaaacacccgcctcctcaaattctcatcaaaaacaccccggtacctgctaatcctccagaggtgtttactcctgccaagtttgcctcatttatcacgcagtacagcaccggccaggtcagcgtggagatcgagtgggaactgcagaaagaaaacagcaaacgctggaatccagagattcagtacacctcaaattatgccaagtctaataatgtggaatttgctgtcaacaacgaaggggtttatactgagcctcgccccattggcacccgttacctcacccgtaacctgtaattgcctgttaatcaataaaccggttaattcgtttcagttgaactttggtctctgcgaagggcgaattc

SEQ ID NO: 4765 - protein, 728 aa, Adeno-associated virus
MAADGYLPDWLEDNLSEGIREWWDLKPGAPKPKANQQKQDDGRGLVLPGYKYLGPFNGLDKGEPVNEADAAALEHDKAYDKQLEQGDNPYLKYNHADAEFQERLQEDTSFGGNLGRAVFQAKKRVLEPLGLVEEGAKTAPGKKRPIESPDSSTGIGKKGQQPAKKKLNFGQTGDSESVPDPQPLGEPPAAPSGLGSGTMAAGGGAPMADNNEGADGVGNASGNWHCDSTWLGDRVITTSTRTWALPTYNNHLYKQISSQSGATNDNHFFGYSTPWGYFDFNRFHCHFSPRDWQRLINNNWGFRPRKLRFKLFNIQVKEVTTNDGVTTIANNLTSTIQVFSDSEYQLPYVLGSAHQGCLPPFPADVFMIPQYGYLTLNNGSQSVGRSSFYCLEYFPSQMLRTGNNFEFSYTFEEVPFHSSYAHSQSLDRLMNPLIDQYLYYLARTQSTTGSTRELQFHQAGPNTMAEQSKNWLPGPCYRQQRLSKNIDSNNNSNFAWTGATKYHLNGRNSLTNPGVAMATNKDDEDQFFPINGVLVFGETGAANKTTLENVLMTSEEEIKTTNPVATEEYGVVSSNLQSSTAGPQTQTVNSQGALPGMVWQNRDVYLQGPIWAKIPHTDGNFHPSPLMGGFGLKHPPPQILIKNTPVPANPPEVFTPAKFASFITQYSTGQVSVEIEWELQKENSKRWNPEIQYTSNYAKSNNVEFAVNNEGVYTEPRPIGTRYLTRNL

SEQ ID NO: 4766 - protein, 733 aa, Adeno-associated virus
MAADGHLPDWLEDNLSEGIREWWDLKPGAPKPKANQQKQDDGRGLVLPGYKYLGPFNGLDKGEPVNAADAAALEHDKAYDQQLKAGDNPYLRYNHADAEFQERLQEDTSFGGNLGRAVFQAKKRVLEPLGLVEEGAKTAPGKKRPIESPDSSTGIGKKGQQPAKKKLNFGQTGDSESVPDPQPIGEPPAGPSGLGSGTMAAGGGAPMADNNEGADGVGSSSGNWHCDSTWLGDRVITTSTRTWALPTYNNHLYKQISNGTSGGSTNDNTYFGYSTPWGYFDFNRFHCHFSPRDWQRLINNSWGFRPKRLNFKLFNIQVKEVTQNEGTKTIANNLTSTIQVFTDSEYQLPYVLGSAHQGCLPPFPADVFMIPQYGYLTLNNGSQAVGRSSFYCLEYFPSQMLRTGNNFEFSYQFEDVPFHSSYAHSQSLDRLMNPLIDQYLYYLSRTQSTGGTAGTQQLLFSQAGPNNMSAQAKNWLPGPCYRQQRVSTTLSQNNNSNFAWTGATKYHLNGRDSLVNPGVAMATHKDDEERFFPSSGVLMFGKQGAGKDNVDYSSVMLTSEEEIKTTNPVATEQYGVVADNLQQQNAAPIVGAVNSQGALPGMVWQNRDVYLQGPIWAKIPHTDGNFHPSPLMGGFGLKHPPPQILIKNTPVPADPPTTFSQAKLASFITQYSTGQVSVEIEWELQKENSKRWNPEIQYTSNYYKSTNVDFAVNTEGTYSEPRPIGTRYLTRNL

SEQ ID NO: 4767 - DNA, 2495 bp, Adeno-associated virus
  source 1..2495: mol_type = genomic DNA
gaattcgccctttctacggctgcgtcaactagaccaatgagaactttcccttcaacgattgcgtcgacaagatggtgatctggtgggaggagggcaagatgacggccaaggtcgtggagtccgccaaggccattcatcatctgctggggcgggctcccgagattgcttgctcggcctgcgatctggtcaacgtggacctggatgactgtgtttctgagcaataaatgacttaaaccaggtatggctgccgatggttatcttccagattggctcgaggacaacctctctgagggcattcgcgagtggtgggacttgaaacctggagccccgaaacccaaagccaaccagcaaaagcaggacgacggccggggtctggtgcttcctggctacaagtacctcggacccttcaacggactcgacaagggagagccggtcaacgaggcagacgccgcggccctcgagcacgacaaggcctacgacaagcagctcgagcagggggacaacccgtacctcaagtacaaccacgccgacgccgagtttcaggagcgtcttcaagaagatacgtcttttgggggcaacctcgggcgagcagtcttccaggccaagaagcgggttctcgaacctctcggtctggttgaggaaggcgctaagacggctcctggaaagaagagacccatagaatcccccgactcctccacgggcatcggcaagaaaggccagcagcccgctaaaaagaagctcaactttgggcagactggcgactcagagtcagtgcccgaccctcaaccaatcggagaaccccccgcaggcccctctggtctgggatctggtacaatggctgcaggcggtggcgctccaatggcagacaataacgaaggcgccgacggagtgggtaatgcctccggaaattggcattgcgattccacatggctgggcgacagagtcatcaccaccagcacccgcacctgggccctgcccacctacaacaaccacctctacaagcagatatcaagtcagagcggggctaccaacgacaaccacttcttcggctacagcaccccctggggctattttgacttcaacagattccactgccacttctcaccacgtgactggcagcgactcatcaacaacaactggggattccggcccagaaagctgcggttcaagttgttcaacatccaggtcaaggaggtcacgacgaacgacggcgttacgaccatcgctaataaccttaccagcacgattcaggtcttctcggactcggagtaccaactgccgtacgtcctcggctctgcgcaccagggctgcctccctccgttccctgcggacgtgttcatgattcctcagtacggatatctgactctaaacaacggcagtcagtctgtgggacgttcctccttctactgcctggagtactttccttctcagatgctgagaacgggcaataactttgaattcagctacacctttgaggaagtgcctttccacagcagctatgcgcacagccagagcctggaccggctgatgaatcccctcatcgaccagtacctgtactacctggcccggacccagagcactacggggtccacaagggagctgcagttccatcaggctgggcccaacaccatggccgagcaatcaaagaactggctgcccggaccctgttatcggcagcagagactgtcaaaaaacatagacagcaacaacaccagtaactttgcctggaccggggccactaaataccatctgaatggtagaaattcattaaccaacccgggcgtagccatggccaccaacaaggacgacgaggaccagttctttcccatcaacggagtgctggtttttggcaaaacgggggctgccaacaagacaacgctggaaaacgtgctaatgaccagcgaggaggagatcaaaaccaccaatcccgtggctacagaacagtacggtgtggtctccagcaacctgcaatcgtctacggccggaccccagacacagactgtcaacagccagggggctctgcccggcatggtctggcagaaccgggacgtgtacctgcagggtcccatctgggccaaaattcctcacacggacggcaactttcacccgtctcccctgatgggcggatttggactcaaacacccgcctcctcaaattctcatcaaaaacaccccggtacctgctaatcctccagaggtgtttactcctgccaagtttgcctcatttatcacgcagtacagcaccggccaggtcagcgtggagatcgagtgggaactgcagaaagaaaacagcaaacgctggaatccagagattcagtacacctcaaattatgccaagtctaataatgtggaatttgctgtcaacaacgaaggggtttatactgagcctcgccccattggcacccgttacctcacccgtaacctgtaattgcctgttaatcaataaaccggttaattcgtttcagttgaactttggtctctgcgaagggcgaattc

SEQ ID NO: 4768 - protein, 728 aa, Adeno-associated virus
MAADGYLPDWLEDNLSEGIREWWDLKPGAPKPKANQQKQDDGRGLVLPGYKYLGPFNGLDKGEPVNEADAAALEHDKAYDKQLEQGDNPYLKYNHADAEFQERLQEDTSFGGNLGRAVFQAKKRVLEPLGLVEEGAKTAPGKKRPIESPDSSTGIGKKGQQPAKKKLNFGQTGDSESVPDPQPIGEPPAGPSGLGSGTMAAGGGAPMADNNEGADGVGNASGNWHCDSTWLGDRVITTSTRTWALPTYNNHLYKQISSQSGATNDNHFFGYSTPWGYFDFNRFHCHFSPRDWQRLINNNWGFRPRKLRFKLFNIQVKEVTTNDGVTTIANNLTSTIQVFSDSEYQLPYVLGSAHQGCLPPFPADVFMIPQYGYLTLNNGSQSVGRSSFYCLEYFPSQMLRTGNNFEFSYTFEEVPFHSSYAHSQSLDRLMNPLIDQYLYYLARTQSTTGSTRELQFHQAGPNTMAEQSKNWLPGPCYRQQRLSKNIDSNNTSNFAWTGATKYHLNGRNSLTNPGVAMATNKDDEDQFFPINGVLVFGKTGAANKTTLENVLMTSEEEIKTTNPVATEQYGVVSSNLQSSTAGPQTQTVNSQGALPGMVWQNRDVYLQGPIWAKIPHTDGNFHPSPLMGGFGLKHPPPQILIKNTPVPANPPEVFTPAKFASFITQYSTGQVSVEIEWELQKENSKRWNPEIQYTSNYAKSNNVEFAVNNEGVYTEPRPIGTRYLTRNL

SEQ ID NO: 4769 - DNA, 2504 bp, Adeno-associated virus
  source 1..2504: mol_type = genomic DNA
gaattcgccctttctacggctgcgtcaactggaccaatgagaactttcccttcaacgattgcgtcgacaagatggtgatctggtgggaggagggcaagatgacggccaaggtcgtggagtccgccaaggccattcatcatctgctggggcgggctcccgagattgcttgctcggcctgcgatctggtcaacgtggacctggatgactgtgtttctgagcaataaatgacttaaaccaggtatggctgccgatggttatcttccagattggctcgaggacaacctctctgagggcattcgcgagtggtgggacttgaaacctggagccccgaaacccaaagccaaccagcaaaagcaggacgacggccggggtctggtgcttcctggctacaagtacctcggacccttcaacggactcgacaagggagagccggtcaacgaggcagacgccgcggccctcgagcacgacaaggcctacgacaagcagctcgagcagggggacaacccgtacctcaagtacaaccacgccgacgccgagtttcaggagcgtcttcaagaagatacgtcttttgggggcaacctcgggcgagcagtcttccaggccaagaagcgggttctcgaacctctcggtctggttgaggaaggcgctaagacggctcctggaaagaagagacccatagaatcccccgactcctccacgggcatcggcaagaaaggccagcagcccgctaaaaagaagctcaactttgggcagactggcgactcagagtcagtgcccgaccctcaaccaatcggagaaccccccgcaggcccctctggtctgggatctggtacaatggctgcaggcggtggcgctccaatggcagacaataacgaaggcgccgacggagtgggtaatgcctccggaaattggcattgcgattccacatggctgggcgacagagtcatcaccaccagcacccgcacctgggccctgcccacctacaacaaccacctctacaagcagatatcaagtcagagcggggctaccaacgacaaccacttcttcggctacagcaccccctggggctattttgacttcaacagattccactgccacttctcatcacgtgactggcagcgactcatcaacaacaactggggattccggcccaagagactcaacttcaagctcttcaacatccaggtcaaggaggtcacgcagaatgaaggcaccaagaccatcgccaataaccttaccagcacgattcaggtctttacggactcggaataccggctcccgtacgtcctcggctctgcgcaccagggctgcctgcctccgttcccggcggacgtcttcatgattcctcagtacgggtacctgactctgaacaacggcagtcaggccgtgggccgttcctccttctactgcctggagtactttccttctcaaatgctgagaacgggcaacaactttgagttcagctaccagtttgaggacgtgccttttcacagcagctacgcgcacagccaaagcctggaccggctgatgaaccccctcatcgaccagtacctgtactacctgtctcggactcagtccacgggaggtaccgcaggaactcagcagttgctattttctcaggccgggcctaataacatgtcggctcaggccaaaaactggctacccgggccctgctaccggcagcaacgcgtctccacgacactgtcgcaaaataacaacagcaactttgcttggaccggtgccaccaagtatcatctgaatggcagagactctctggtaaatcccggtgtcgctatggcaacgcacaaggacgacgaagagcgattttttccatccagcggagtcttgatgtttgggaaacagggagctggaaaagacaacgtggactatagcagcgttatgctaaccagtgaggaagaaatcaaaaccaccaacccagtggccacagaacagtacggcgtggtggccgataacctgcaacagcaaaacgccgctcctattgtaggggccgtcaacagtcaaggagccttacctggcatggtctggcagaaccgggacgtgtacctgcagggtcctatctgggccaagattcctcacacggacggcaactttcatccttcgccgctgatgggaggctttggactgaaacacccgcctcctcagatcctgattaagaatacacctgttcccgcggatcctccaactaccttcagtcaagccaagccggcgtcgttcatcacgcagtacagcaccggacaggtcagcgtggaaattgaatgggagctgcagaaagagaacagcaagcgctggaacccagagattcagtatacttccaactactacaaatctacaaatgtggactttgctgtcaatactgagggtacttattcagagcctcgccccattggcacccgttacctcacccgtaacctgtaattgcctgttaatcaataaaccggttaattcgtttcagttgaactttggtctctgcgaagggcgaattc

SEQ ID NO: 4770 - protein, 731 aa, Adeno-associated virus
MAADGYLPDWLEDNLSEGIREWWDLKPGAPKPKANQQKQDDGRGLVLPGYKYLGPFNGLDKGEPVNEADAAALEHDKAYDKQLEQGDNPYLKYNHADAEFQERLQEDTSFGGNLGRAVFQAKKRVLEPLGLVEEGAKTAPGKKRPIESPDSSTGIGKKGQQPAKKKLNFGQTGDSESVPDPQPIGEPPAGPSGLGSGTMAAGGGAPMADNNEGADGVGNASGNWHCDSTWLGDRVITTSTRTWALPTYNNHLYKQISSQSGATNDNHFFGYSTPWGYFDFNRFHCHFSSRDWQRLINNNWGFRPKRLNFKLFNIQVKEVTQNEGTKTIANNLTSTIQVFTDSEYRLPYVLGSAHQGCLPPFPADVFMIPQYGYLTLNNGSQAVGRSSFYCLEYFPSQMLRTGNNFEFSYQFEDVPFHSSYAHSQSLDRLMNPLIDQYLYYLSRTQSTGGTAGTQQLLFSQAGPNNMSAQAKNWLPGPCYRQQRVSTTLSQNNNSNFAWTGATKYHLNGRDSLVNPGVAMATHKDDEERFFPSSGVLMFGKQGAGKDNVDYSSVMLTSEEEIKTTNPVATEQYGVVADNLQQQNAAPIVGAVNSQGALPGMVWQNRDVYLQGPIWAKIPHTDGNFHPSPLMGGFGLKHPPPQILIKNTPVPADPPTTFSQAKPASFITQYSTGQVSVEIEWELQKENSKRWNPEIQYTSNYYKSTNVDFAVNTEGTYSEPRPIGTRYLTRNL

SEQ ID NO: 4771 - protein, 731 aa, Adeno-associated virus
MAADGYLPDWLEDNLSEGIREWWDLKPGAPKPKANQQKQDDGRGLVLPGYKYLGPFNGLDKGEPVNEADAAALEHDKAYDKQLEQGDNPYLKYNHADAEFQERLQEDTSFGGNLGRAVFRAKKRVLEPLGLVEEGAKTAPGKKRPIESPDSSTGIGKKGQQPAKKKLNFGQTGDSESVPDPQPLGEPPAAPSGLGSGTMAAGGGAPMADNNEGADGVGNASGNWHCDSTWLGDRVITTSTRTWALPTYNNHLYKQISSQSGATNDNHFFGYSTPWGYFDFNRFHCHFSPRDWQRLINNNRGFRPRKLRFKLFNIQVKEVTTNDGVTTIANNLTSTIQVFSDSEYQLPYVLGSAHQGCLPPFPADVFMIPQYGYLTLNNGSQSVGRSSFYCLEYFPSQMLRTGNNFEFSYQFEDVPFHSSYAHSQSLDRLMNPLIDQYLYYLSRTQSTGGTAGTQQLLFSQAGPNNMSAQAKNWLPGPCYRQQRVSTTLSQNNNSNFAWTGATKYHLNGRDSLVNPGVAMATHKDDEERFFPSSGVLMFGKQGAGKDNVDYSSVMLTSEEEIKTTNPVATEQYGVVADNLQQQNAAPIVGAVNSQGALPGMAWQNRDVYLQGPIWAKIPHTDGNFHPSPLMGGFGLKHPPPQILIKNTPVPADPPTTFSQAKLASFITQYSTGQVSVEIEWELQKENSKRWNPEIQYTSNYYKSTNVDFAVNTEGTYSEPRPIGTRYLTRNL

SEQ ID NO: 4772 - protein, 738 aa, Adeno-associated virus
MAADGYLPDWLEDNLSEGIREWWDLKPGAPKPKANQQKQDDGRGLVLPGYKYLGPFNGLDKGEPVNEADAAALEHDKAYDKQLEQGDNPYLKYNHADAEFQERLQEDTSFGGNLGRAVFQAKKRVLEPLGLVEEGAKTAPGKKRPVEPSPQRSPDSSTGIGKTGQQPAKKRLNFGQTGDSESVPDPQPIGEPPAGPSGLGSGTMAAGGGAPMADNNEGADGVGSSSGNWHCDSTWLGDRVITTSTRTWALPTYNNHLYKQISNGTSGGSTNDNTYFGYSTPWGYFDFNRFHCHFSPRDWQRLINNNWGFRPKRLNFKLFNIQVKEVTQNEGTKTIANNLTSTIQVFTDSEYQLPYVLGSAHQGCLPPFPADVFMIPQYGYLTLNNGSQAVGRSSFYCLEYFPSQMLRTGNNFEFSYQFEDVPFHSSYAHSQSLDRLMNPLIDQYLYYLSRTQSTGGTAGTQQLLFSQAGPNNMSAQAKNWLPGPCYRQQRVSTTLSQNNNSNFAWTGATKYHLNGRDSLVNPGVAMATHKDDEERFFPSSGVLMFGKQGAGKDNVDYSSVMLTSEEEIKTTNPVATEQYGVVADNLQQQNAAPIVGAVNSQGALPGMVWQNRDVYLQGPIWAKIPHTDGNFHPSPLMGGFGLKHPPPQILIKNTPVPADPPTTFSQAKLASFITQYSTGQVSVEIEWELQKENSKRWNPEIQYTSNYYKSTNVDFAVNTEGTYSEPRPIGTRYLTRNL

SEQ ID NO: 4773 - protein, 735 aa, Adeno-associated virus
MAADGYLPDWLEDNLSEGIREWWDLKPGAPKPKANQQKQDDGRGLVLPGYKYLGPFNGLDKGEPVNEADAAALEHDKAYDKQLEQGDNPYLKYNHADAEFQERLQEDTSFGGNLGRAVFQAKKRVLEPLGLVEEGAKTAPGKKRPVEPSPQRSPDSSTGIGKTGQQPAKKRLNFGQTGDSESVPDPQPIGEPPAGPSGLGSGTMAAGGGAPMADNNEGADGVGSSSGNWHCDSTWLGDRVITTSTRTWALPTYNNHLYKQISNGTSGGSTNDNTYFGYSTPWGYFDFNRFHCHFSPRDWQRLINNNWGFRPRKLRFKLFNIQVKEVTTDDGVTTIANNLTSTIQVFSDSEYQLPYVLGSAHQGCLPPFPADVFMIPQYGYLTLNNGSQSVGRSSFYCLEYFPSQMLRTGNNFEFSYTFEEVPFHSSYAHSQSLDRLMNPLIDQYLYYLARTQSTTGSTRELQFHQAGPNTMAEQSKNWLPGPCYRQQRLSKNIDSNNNSNFAWTGATKYHLNGRNSLTNPGVAMATNKDDEDQFFPINGVLVFGKTGAANKTTLENVLMTSEEEIKTTNPVATEEYGVVSSNLQSSTAGPQTQTVNSQGALPGMVWQNRDVYLQGPIWAKIPHTDGNFHPSPLMDGFGLKHPPPQILIKNTPVPANPPEVFTPAKFASFITQYSTGQVSVEIEWELQKENSKRWNPEIQYTSNYAKSNNVEFAVNNEGVYTEPRPIGTRYLTRNL

SEQ ID NO: 4774 - DNA, 3128 bp, Adeno-associated virus
  source 1..3128: mol_type = genomic DNA
gaattcgccctttctacggctgcgtcaactggaccaatgagaactttcccttcaacgattgcgtcgacaagatggtgatctggtgggaggagggcaagatgacggccaaggtcgtggagtccgccaaggccattctcggcggcagcaaggtgcgcgtggaccaaaagtgcaagtcttccgcccagatcgatcccacccccgtgatcgtcacttccaacaccaacatgtgcgccgtgattgacgggaacagcaccaccttcgagcaccagcagccgttacaagaccggatgttcaaatttgaactcacccgccgtctggagcacgactttggcaaggtgacaaagcaggaagtcaaagagttcttccgctgggcgcaggatcacgtgaccgaggtggcgcatgagttctacgtcagaaagggtggagccaacaagagacccgcccccgatgacgcggataaaagcgagcccaagcgggcctgcccctcagtcgcggatccatcgacgtcagacgcggaaggagctccggtggactttgccgacaggtaccaaaacaaatgttctcgtcacgcgggcatgcttcagatgctgtttccctgcaagacatgcgagagaatgaatcagaatttcaacatttgcttcacgcacgggaccagagactgttcagaatgtttccccggcgtgtcagaatctcaaccggtcgtcagaaagaggacgtatcggaaactctgtgccattcatcatctgctagggcgggctcccgagattgcttgctcggcctgcgatctggtcaacgtggacctggatgactgtgtttctgagcaataaatgacttaaaccaggtatggctgccgatggttatcttccagattggctcgaggacaacctctctgagggcattcgcgagtggtgggacttgaaacctggagccccgaaacccaaagccaaccagcaaaagcaggacgacggccggggtctggtgcttcctggctacaagtacctcggacccttcaacggactcgacaagggggagcccgtcaacgcggcggacgcagcggccctcgagcacgacaaggcctacgaccagcagctcaaagcgggtgacaatccgtacctgcggtataaccacgccgacgccgagtttcaggagcgtctgcaagaagatacgtcttttgggggcaacctcgggcgagcagtcttccaggccaagaagcgggttctcgaacctctcggtctggttgaggaaggcgctaagacggctcctggaaagaagagaccggtagagccatcaccccagcgttctccagactcctctacgggcatcggcaagacaggccagcagcccgcgaaaaagagactcaactttgggcagactggcgactcagagtcagtgcccgaccctcaaccaatcggagaaccccccgcaggcccctctggtctgggatctggtacaatggctgcaggcggtggcgctccaatggcagacaataacgaaggcgccgacggagtgggtagttcctcaggaaattggcattgcgattccacatggctgggcgacagagtcatcaccaccagcacccgaacctgggccctccccacctacaacaaccacctctacaagcaaatctccaacgggacatcgggaggaagcaccaacgacaacacctacttcggctacagcaccccctgggggtattttgactttaacagattccactgccacttctcaccacgtgactggcagcgactcatcaacaacaactggggattccggcccaagagactcaacttcaagctcttcaacatccaggtcaaggaggtcacgcagaatgaaggcaccaagaccatcgccaataaccttaccagcacgattcaggtctttacggactcggaataccagctcccgtacgtcctcggctctgcgcaccagggctgcctgcctccgttcccggcggacgtcttcatgattcctcagtacgggtacctgactctgaacaacggcagtcaggccgtgggccgttcctccttctactgcctggagtactttccttctcaaatgctgagaacgggcaacaactttgagttcagctaccagtttgaggacgtgccttttcacagcagctacgcgcacagccaaagcctggaccggctgatgaaccccctcatcgaccagtacctgtactacctgtctcggactcagtccacgggaggtaccgcaggaactcagcagttgctattttctcaggccgggcctaataacatgtcggctcaggccaaaaactggctacccgggccctgctaccggcagcaacgcgtctccacgacactgtcgcaaaataacaacagcaactttgcttggaccggtgccaccaagtatcatctgaatggcagagactctctggtaaatcccggtgtcgctatggcaacgcacaaggacgacgaagagcgattttttccatccagcggagtcttgatgtttgggaaacagggagctggaaaagacaacgtggactatagcagcgttatgctaaccagtgaggaagaaatcaaaaccaccaacccagtggccacagaacagtacggcgtggtggccgataacctgcaacagcaaaacgccgctcctattgtaggggccgtcaacagtcaaggagccttacctggcatggtctggcagaaccgggacgtgtacctgcagggtcctatctgggccaagattcctcacacggacggcaactttcatccttcgccgctgatgggaggctttggactgaaacacccgcctcctcagatcctgattaagaatacacctgttcccgcggatcctccaactaccttcagtcaagccaagctggcgtcgttcatcacgcagtacagcaccggacaggtcagcgtggaaattgaatgggagctgcagaaagagaacagcaagcgctggaacccagagattcagtatacttccaactactacaaatctacaaatgtggactttgctgtcaatactgagggtacttattcagagcctcgccccattggcacccgttacctcacccgtaacctgtaattgcctgttaatcaataaaccggctaattcgtttcagttgaactttggtctctgcgaagggcgaattc

SEQ ID NO: 4775 - protein, 738 aa, Adeno-associated virus
MAADGYLPDWLEDNLSEGIREWWDLKPGAPKPKANQQKQDDGRGLVLPGYKYLGPFNGLDKGEPVNAADAAALEHDKAYDQQLKAGDNPYLRYNHADAEFQERLQEDTSFGGNLGRAVFQAKKRVLEPLGLVEEGAKTAPGKKRPVEPSPQRSPDSSTGIGKTGQQPAKKRLNFGQTGDSESVPDPQPIGEPPAGPSGLGSGTMAAGGGAPMADNNEGADGVGSSSGNWHCDSTWLGDRVITTSTRTWALPTYNNHLYKQISNGTSGGSTNDNTYFGYSTPWGYFDFNRFHCHFSPRDWQRLINNNWGFRPKRLNFKLFNIQVKEVTQNEGTKTIANNLTSTIQVFTDSEYQLPYVLGSAHQGCLPPFPADVFMIPQYGYLTLNNGSQAVGRSSFYCLEYFPSQMLRTGNNFEFSYQFEDVPFHSSYAHSQSLDRLMNPLIDQYLYYLSRTQSTGGTAGTQQLLFSQAGPNNMSAQAKNWLPGPCYRQQRVSTTLSQNNNSNFAWTGATKYHLNGRDSLVNPGVAMATHKDDEERFFPSSGVLMFGKQGAGKDNVDYSSVMLTSEEEIKTTNPVATEQYGVVADNLQQQNAAPIVGAVNSQGALPGMVWQNRDVYLQGPIWAKIPHTDGNFHPSPLMGGFGLKHPPPQILIKNTPVPADPPTTFSQAKLASFITQYSTGQVSVEIEWELQKENSKRWNPEIQYTSNYYKSTNVDFAVNTEGTYSEPRPIGTRYLTRNL

SEQ ID NO: 4776 - DNA, 3084 bp, Adeno-associated virus
  source 1..3084: mol_type = genomic DNA
gaattcgccctttctacggctgcatcaactggaccaatgagaactttcccttcaacgattgcgtcgacaagatggtgatctggtgggaggagggcaagatgacggccaaggtcgtggagtccgccaaggccattctcggcggcagcaaggtgcgcgtggaccaaaagtgcaagtcgtccgcccagatcgaccccacccccgtgatcgtcacctccaacaccaacatgtgcgccgtgattgacgggaacagcaccaccttcgagcaccagcagccgttgcaggaccggatgttcaagttcgaactcacccgccgtctggagcacgactttggcaaggtgaccaagcaggaagtcaaagagttcttccgctgggcgcaggatcacgtgaccgaggtggcgcatgagttctacgtcagaaagggcggagccagcaaaagacccgcccccgatgacgcggatataagcgagcccaagcgggcctgcccctcagtcgcggatccatcgacgtcagacgcggaaggagctccggtggactttgccgacaggtaccaaaacaaatgttctcgtcacgcgggcatgcttcagatgctgtttccctgcaaaacgtgcgagaaaatgaatcagaatttcaacatttgcttcacgcacggggtcagagactgctcagaatgtttccccggtgcatcagaatctcaaccggtcgtcagaaaaaaaacgtatcagaaactgtgtgccattcatcatctgctggggcgggcacccgagattgcttgctcggcctgcgatctggtcaacgtggacctggacgactgtgtttctgagcaataaatgacttaaaccaggtatggctgccgatggttatcttccagattggcttgaggacaacctctctgagggcattcgcgagtggtgggacctgaaacctggagccccgaaacccaaagccaaccagcaaaagcaggacgacggccggggtctggtgcttcctggctacaagtacctcggacccttcaacggactcgacaagggggagcccgtcaacgcggcggacgcagcggccctcgagcacgacaaggcctacgaccagcagctcaaagcgggtgacaatccgtacctgcggtataaccacgccgacgccgagtttcaggagcgtctgcaagaagatacgtcttttgggggcaacctcgggcgagcagtcttccaggccaagaagcgggttctcgaacctctcggtctggttgaggaaggcgctaagacggctcctggaaagaagagaccggtagagccatcacctcagcgttcccccgactcctccacgggcatcggcaagaaaggccaccagcccgcgagaaagagactgaactttgggcagactggcgactcggagtcagtccccgaccctcaaccaatcggagaaccaccagcaggcccctctggtctgggatctggtacaatggctgcaggcggtggcgctccaatggcagacaataacgaaggcgccgacggagtgggtagttcctcaggaaattggcattgcgattccacatggctgggcgacagagtcatcaccaccagcacccgaacctgggccctgcccacctacaacaaccatctctacaagcaaatctccaacgggacatcgggaggaagcactaacgacaacacctactttggctacagcaccccctgggggtattttgacttcaacagattccactgccacttctcaccacgtgactggcagcgactcatcaacaataactggggattccggcccaagagactcaacttcaagctcttcaacatccaggtcaaggaggtcacgcagaatgaaggcaccaagaccatcgccaataaccttaccagcacgattcaggtgtttacggactcggaataccagctcccgtacgtccccggctctgcgcaccagggctgcctccctccgttcccggcggacgtcttcatgattcctcagtacgggtatctgaccctaaacaatggcagtcaggctgtgggccgttcctccttctactgcctggaatacttcccttctcaaatgctgaggacgggcaacaactttgaattcagctacaccttcgaggacgtgcctttccacagcagctacgcgcacagccagagcctggaccggctgatgaaccctctcatcgaccagtacctgtattacttatccagaactcagtccacaggaggaactcaaggtactcagcaattgttattttctcaagccgggcccgcaaacatgtcggctcaggccaagaactggctacctggaccgtgttaccgtcagcaacgagtttccacgacactgtcgcaaaacaacaacagcaattttgcttggaccggtgccaccaagtatcacctgaatggcagagactccctggttaatcccggcgttgccatggctacccacaaggacgacgaggagcgcttcttcccgtcaagcggagttctaatgtttggcaagcagggggctggaaaagacaatgtggactacagcagcgtgatgctcaccagcgaagaagaaattaaaactactaacccagtggctacagagcagtatggtgtggtggcagacaacctgcagcagaccaacggagctcccattgtgggaactgtcaacagccagggggccttacctggtatggtctggcaaaaccgggacgtgtacctgcagggccccatctgggccaaaattcctcacacggacggcaactttcatccttcgccgctgatgggaggctttggactgaaacacccgcctcctcagatcctggtgaaaaacactcctgttcctgcggatcctccgaccaccttcagccaggccaagctggcttcttttatcacgcagtacagcaccggacaggtcagcgtggaaatcgaatgggagctgcagaaagaaaacagcaagcgctggaacccagagattcagtatacttccaactactacaaatctacaaatgtggactttgctgtcaatactgagggtacttattcagagcctcgccccattggcactcgttatctcacccgtaatctgtaattgcttgttaatcaataaaccggt

SEQ ID NO: 4777 - protein, 738 aa, Adeno-associated virus
MAADGYLPDWLEDNLSEGIREWWDLKPGAPKPKANQQKQDDGRGLVLPGYKYLGPFNGLDKGEPVNAADAAALEHDKAYDQQLKAGDNPYLRYNHADAEFQERLQEDTSFGGNLGRAVFQAKKRVLEPLGLVEEGAKTAPGKKRPVEPSPQRSPDSSTGIGKKGHQPARKRLNFGQTGDSESVPDPQPIGEPPAGPSGLGSGTMAAGGGAPMADNNEGADGVGSSSGNWHCDSTWLGDRVITTSTRTWALPTYNNHLYKQISNGTSGGSTNDNTYFGYSTPWGYFDFNRFHCHFSPRDWQRLINNNWGFRPKRLNFKLFNIQVKEVTQNEGTKTIANNLTSTIQVFTDSEYQLPYVPGSAHQGCLPPFPADVFMIPQYGYLTLNNGSQAVGRSSFYCLEYFPSQMLRTGNNFEFSYTFEDVPFHSSYAHSQSLDRLMNPLIDQYLYYLSRTQSTGGTQGTQQLLFSQAGPANMSAQAKNWLPGPCYRQQRVSTTLSQNNNSNFAWTGATKYHLNGRDSLVNPGVAMATHKDDEERFFPSSGVLMFGKQGAGKDNVDYSSVMLTSEEEIKTTNPVATEQYGVVADNLQQTNGAPIVGTVNSQGALPGMVWQNRDVYLQGPIWAKIPHTDGNFHPSPLMGGFGLKHPPPQILVKNTPVPADPPTTFSQAKLASFITQYSTGQVSVEIEWELQKENSKRWNPEIQYTSNYYKSTNVDFAVNTEGTYSEPRPIGTRYLTRNL

SEQ ID NO: 4778 - DNA, 3123 bp, Adeno-associated virus
  source 1..3123: mol_type = genomic DNA
gaattcgcccttggctgcgtcaactggaccaatgagaactttcccttcaacgattgcgtcgacaagatggtgatctggtgggaggagggcaagatgacggccaaggtcgtggagtccgccaaggccattctcggcggcagcaaggtgcgcgtggaccaaaagtgcaagtcgtccgcccagatcgaccccacccccgtgatcgtcacctccaacaccaacatgtgcgccgtgattgacgggaacagcaccaccttcgagcaccagcagccgttgcaggaccggatgttcaagttcgaactcacccgccgtctggagcacgactttggcaaggtgaccaagcaggaagtcaaagagttcttccgctgggcgcaggatcacgtgaccgaggtggcgcatgagttctacgtcagaaagggcggagccagcaaaagacccgcccccgatgacgcggatataagcgagcccaagcgggcctgcccctcagtcgcggatccatcgacgtcagacgcggaaggagctccggtggactttgccgacaggtaccaaaacaaatgttctcgtcacgcgggcatgctccagatgctgtttccctgcaaaacgtgcgagagaatgaatcagaatttcaacatttgcttcacgcacggggtcagagactgctcagaatgtttccccggtgcatcagaatctcaaccggtcgtcagaaaaaaaacgtatcagaaactgtgtgccattcatcatctgctggggcgggcacccgagattgcttgctcggcctgcgatctggtcaacgtggacctggacgactgtgtttctgagcaataaatgacttaaaccaggtatggctgccgatggttatcttccagattggcttgaggacaacctctctgagggcattcgcgagtggtgggacctgaaacctggagccccgaaacccaaagccaaccagcaaaagcaggacgacggccggggtctggtgcttcctggctacaagtacctcggacccttcaacggactcgacaagggggagcccgtcaacgcggcggacgcagcggccctcgagcacgacaaggcctacgaccagcagctcaaagcgggtgacaatccgtacctgcggtataaccacgccgacgccgagtttcaggagcgtctgcaagaagatacgtcttttgggggcaacctcgggcgagcagtcttccaggccaagaagcgggttctcgaacctctcggtctggttgaggaaggcgctaagacggctcctggaaagaagagaccggtagagccatcacctcagcgttcccccgactcctccacgggcatcggcaagaaaggccaccagcccgcgagaaagagactgaactttgggcagactggcgactcggagtcagtccccgaccctcaaccaatcggagaaccaccagcaggcccctctggtctgggatctggtacaatggctgcaggcggtggcgctccaatggcagacaataacgaaggcgccgacggagtgggtagttcctcaggaaattggcattgcgattccacatggctgggcgacagagtcatcaccaccagcacccgaacctgggccctgcccacctacaacaaccatctctacaagcaaatctccaacgggacatcgggaggaagcactaacgacaacacctactttggctacagcaccccctgggggtattttgacttcaacagattccactgccacttctcaccacgtgactggcagcgactcatcaacaataactggggattccggcccaagagactcaacttcaagctcttcaacatccaggtcaaggaggtcacgcagaatgaaggcaccaagaccatcgccaataaccttaccagcacgattcaggtgtttacggactcggaataccagctcccgtacgtcctcggctctgcgcaccagggctgcctccctccgttcccggcggacgtcttcatgattcctcagtacgggtatctgaccctaaacaatggcagtcaggctgtgggccgttcctccttctactgcctggaatacttcccttctcaaatgctgaggacgggcaacaactttgaattcagctacaccttcgaggacgtgcctttccacagcagctacgcgcacagccagagcctggaccggctgatgaaccctctcatcgaccagtacctgtattacttatccagaactcagtccacaggaggaactcaaggtactcagcaattgttattttctcaagccgggcccgcaaacatgtcggctcaggccaagaactggctacctggaccgtgttaccgtcagcaacgagtttccacgacactgtcgcaaaacaacaacagcaattttgcttggaccggtgccaccaagtatcacctgaatggcagagactccctggttaatcccggcgttgccatggctacccacaaggacgacgaggagcgcttcttcccgtcaagcggagttctaatgtttggcaagcagggggctggaaaagacaatgtggactacagcagcgtgatgctcaccagcgaagaagaaattaaaactactaacccagtggctacagagcagtatggtgtggtggcagacaacctgcagcagaccaacggagctcccattgtgggaactgtcaacagccagggggccttacctggtatggtctggcaaaaccgggacgtgtacctgcagggccccatctgggccaaaattcctcacacggacggcaactttcatccttcgccgctgatgggaggctttggactgaaacacccgcctcctcagatcctggtgaaaaacactcctgttcctgcggatcctccgaccaccttcagccaggccaagctggcttcttttatcacgcagtacagcaccggacaggtcagcgtggaaatcgaatgggagctgcagaaagaaaacagcaagcgctggaacccagagattcagtatacttccaactactacaaatctacaaatgtggactttgctgtcaatactgagggtacttattcagagcctcgccccattggcactcgttatctcacccgtaatctgtaattgcttgttaatcaataaaccggttaattcgtttcagttgaactttggtctctgcgaagggcgaattc

SEQ ID NO: 4779 - protein, 738 aa, Adeno-associated virus
MAADGYLPDWLEDNLSEGIREWWDLKPGAPKPKANQQKQDDGRGLVLPGYKYLGPFNGLDKGEPVNAADAAALEHDKAYDQQLKAGDNPYLRYNHADAEFQERLQEDTSFGGNLGRAVFQAKKRVLEPLGLVEEGAKTAPGKKRPVEPSPQRSPDSSTGIGKKGHQPARKRLNFGQTGDSESVPDPQPIGEPPAGPSGLGSGTMAAGGGAPMADNNEGADGVGSSSGNWHCDSTWLGDRVITTSTRTWALPTYNNHLYKQISNGTSGGSTNDNTYFGYSTPWGYFDFNRFHCHFSPRDWQRLINNNWGFRPKRLNFKLFNIQVKEVTQNEGTKTIANNLTSTIQVFTDSEYQLPYVLGSAHQGCLPPFPADVFMIPQYGYLTLNNGSQAVGRSSFYCLEYFPSQMLRTGNNFEFSYTFEDVPFHSSYAHSQSLDRLMNPLIDQYLYYLSRTQSTGGTQGTQQLLFSQAGPANMSAQAKNWLPGPCYRQQRVSTTLSQNNNSNFAWTGATKYHLNGRDSLVNPGVAMATHKDDEERFFPSSGVLMFGKQGAGKDNVDYSSVMLTSEEEIKTTNPVATEQYGVVADNLQQTNGAPIVGTVNSQGALPGMVWQNRDVYLQGPIWAKIPHTDGNFHPSPLMGGFGLKHPPPQILVKNTPVPADPPTTFSQAKLASFITQYSTGQVSVEIEWELQKENSKRWNPEIQYTSNYYKSTNVDFAVNTEGTYSEPRPIGTRYLTRNL

SEQ ID NO: 4780 - DNA, 3122 bp, Adeno-associated virus
  source 1..3122: mol_type = genomic DNA
gaattcgccctttctacggctgcgtcaactggaccaatgagaactttcccttcaacgattgcgtcgacaagatggtgatctggtgggaggagggcaagatgacggccaaggtcgtggagtccgccaaggccattctcggcggcagcaaggtgcgtgtggaccaaaagtgcaagtcttccgcccagatcgatcccacccccgtgatcgtcacctccaacaccaacatgtgcgccgtgattgacgggaacagcgccaccttcgagcaccagcagccgttgcaggaccggatgttcaaatttgaactcacccgccgtctggagcatgactttggcaaggtgacgaagcaggaagtcaaagagttcttccgctgggcgcaggatcacgtgaccgaggtggcgcatgagttccacgtcagaaagggtggagccaacaagagacccgcccccgatgacgcggatataagcgagcccaagcgggcctgcccctcagtcgcggatccatcgacgtcagacgcggaaggagctccggtggactttgccgacaggtaccaaaacaaatgttctcgtcacgcgggcatgcttcagatgctgtttccctgcaagacatgcgagagaatgaatcagaatttcaacatttgcttcacgcacgggaccagagactgttcagaatgtttccccggcgtgtcagaatctcaaccggtcgtcagaaagaggacgtatcggaaactctgtgcgattcatcatctgctggggcgggctcccgagattgcttgctcggcctgcgatctggtcaacgtggacctggatgactgtgtttctgagcaataaatgacttaaaccaggtatggctgccgatggttatcttccagattggctcgaggacaacctctctgagggcattcgcgagtggtgggacttgaaacctggagccccgaaacccaaagccaaccagcaaaagcaggacgacggccggggtctggtgcttcctggctacaagtacctcggacccttcaacggactcgacaagggggagcccgtcaacgcggcggacgcagcggccctcgagcacgacaaagcctacgaccagcagctcaaagcgggtgacaatccgtacctgcggtataatcacgccgacgccgagtttcaggagcgtctgcaagaagatacgtcttttgggggcaacctcgggcgagcagtcttccaggccaagaagcgggttctcgaacctctcggtctggttgaggaaggcgctaagacggctcctggaaagaagagactggtagagcagtcgccacaagagccagactcctcctcgggcatcggcaagacaggccagcagcccgctaaaaagagactcaattttggtcagactggcgactcagagtcagtccccgacccacaacctctcggagaacctccagcagccccctcaggtctgggacctaatacaatggcttcaggcggtggcgctccaatggcagacaataacgaaggcgccgacggagtgggtaattcctcgggaaattggcattgcgattccacatggctgggggacagagtcatcaccaccagcacccgaacctgggccctgcccacctacaacaaccacctctacaagcaaatctccaacggcacctcgggaggaagcaccaacgacaacacctattttggctacagcaccccctgggggtattttgacttcaacagattccactgtcacttttcaccacgtgactggcaacgactcatcaacaacaattggggattccggcccaaaagactcaacttcaagctgttcaacatccaggtcaaggaagtcacgacgaacgaaggcaccaagaccatcgccaataatctcaccagcaccgtgcaggtctttacggactcggagtaccagttaccgtacgtgctaggatccgctcaccagggatgtctgcctccgttcccggcggacgtcttcacggttcctcagtacggctatttaactttaaacaatggaagccaagccctgggacgttcctccttctactgtctggagtatttcccatcgcagatgctgagaaccggcaacaactttcagttcagctacaccttcgaggacgtgcctttccacagcagctacgcgcacagccagagcctggacaggctgatgaatcccctcatcgaccagtacctgtactacctggtcagaacgcaaacgactggaactggagggacgcagactctggcattcagccaagcgggtcctagctcaatggccaaccaggctagaaattgggtgcccggaccttgctaccggcagcagcgcgtctccacgacaaccaaccagaacaacaacagcaactttgcctggacgggagctgccaagtttaagctgaacggccgagactctctaatgaatccgggcgtggcaatggcttcccacaaggatgacgacgaccgcttcttcccttcgagcggggtcctgatttttggcaagcaaggagccgggaacgatggagtggattacagccaagtgctgattacagatgaggaagaaatcaaggctaccaaccccgtggccacagaagaatatggagcagtggccatcaacaaccaggccgccaatacgcaggcgcagaccggactcgtgcacaaccagggggtgattcccggcatggtgtggcagaatagagacgtgtacctgcagggtcccatctgggccaaaattcctcacacggacggcaactttcacccgtctcccctgatgggcggctttggactgaagcacccgcctcctcaaattctcatcaagaacacaccggttccagcggacccgccgcttaccttcaaccaggccaagctgaactctttcatcacgcagtacagcaccggacaggtcagcgtggaaatcgagtgggagctgcagaaagaaaacagcaaacgctggaatccagagattcaatacacttccaactactacaaatctacaaatgtggactttgctgtcaacacggaaggagtttatagcgagcctcgccccattggcacccgttacctcacccgcaacctgtaattacatgttaatcaataaaccggttaattcgtttcagttgaactttggtctctgcgaagggcgaattc

SEQ ID NO: 4781 - protein, 736 aa, Adeno-associated virus
MAADGYLPDWLEDNLSEGIREWWDLKPGAPKPKANQQKQDDGRGLVLPGYKYLGPFNGLDKGEPVNAADAAALEHDKAYDQQLKAGDNPYLRYNHADAEFQERLQEDTSFGGNLGRAVFQAKKRVLEPLGLVEEGAKTAPGKKRLVEQSPQEPDSSSGIGKTGQQPAKKRLNFGQTGDSESVPDPQPLGEPPAAPSGLGPNTMASGGGAPMADNNEGADGVGNSSGNWHCDSTWLGDRVITTSTRTWALPTYNNHLYKQISNGTSGGSTNDNTYFGYSTPWGYFDFNRFHCHFSPRDWQRLINNNWGFRPKRLNFKLFNIQVKEVTTNEGTKTIANNLTSTVQVFTDSEYQLPYVLGSAHQGCLPPFPADVFTVPQYGYLTLNNGSQALGRSSFYCLEYFPSQMLRTGNNFQFSYTFEDVPFHSSYAHSQSLDRLMNPLIDQYLYYLVRTQTTGTGGTQTLAFSQAGPSSMANQARNWVPGPCYRQQRVSTTTNQNNNSNFAWTGAAKFKLNGRDSLMNPGVAMASHKDDDDRFFPSSGVLIFGKQGAGNDGVDYSQVLITDEEEIKATNPVATEEYGAVAINNQAANTQAQTGLVHNQGVIPGMVWQNRDVYLQGPIWAKIPHTDGNFHPSPLMGGFGLKHPPPQILIKNTPVPADPPLTFNQAKLNSFITQYSTGQVSVEIEWELQKENSKRWNPEIQYTSNYYKSTNVDFAVNTEGVYSEPRPIGTRYLTRNL

SEQ ID NO: 4782 - DNA, 3117 bp, Adeno-associated virus
  source 1..3117: mol_type = genomic DNA
gaattcgcccttggctgcgtcaactggaccaatgagaactttcccttcaacgattgcgtcgacaagatggtgatctggtgggaggagggcaagatgacggccaaggtcgtggagtccgccaaggccattctcggcggcagcaaggtgcgtgtggaccaaaagtgcaagtcttccgcccagatcgatcccacccccgtgatcgtcacctccaacaccaacatgtgcgccgtgattgacgggaacagcaccaccttcgagcaccagcagccgttgcaggaccggatgttcaaatttgaactcacccgccgtctggagcatgactttggcaaggtgacgaagcaggaagtcaaagagttcttccgctgggcgcaggatcacgtgaccgaggtggcgcatgagttccacgtcagaaagggtggagccaacaagagacccgcccccgatgacgcggatataagcgagcccaagcgggcctgcccctcagtcgcggatccatcgacgtcagacgcggaaggagctccggtggactttgccgacaggtaccaaaacaaatgttctcgtcacgcgggcatgcttcagatgctgtttccctgcaagacatgcgagagaatgaatcagaatttcaacatttgcttcacgcacgggaccagagactgttcagaatgtttccccggcgtgtcagaatctcaaccggtcgtcagaaagaggacgtatcggaaactctgtgcgattcatcatctgctggggcgggctcccgagattgcttgctcggcctgcgatctggtcaacgtggacctggatgactgtgtttctgagcaataaatgacttaaaccaggtatggctgccgatggttatcttccagattggctcgaggacaacctctctgagggcattcgcgagtggtgggacttgaaacctggagccccgaaacccaaagccaaccagcaaaagcaggacgacggccggggtctggtgcttcctggctacaagtacctcggacccttcaacggactcgacaagggggagcccgtcaacgcggcggacgcagcggccctcgagcacgacaaagcctacgaccagcagctcaaagcgggtgacaatccgtacctgcggtataatcacgccgacgccgagtttcaggagcgtctgcaagaagatacgtcttttgggggcaacctcgggcgagcagtcttccaggccaagaagcgggttctcgaacctctcggtctggttgaggaaggcgctaagacggctcctggaaagaagagaccggtagagcagtcgccacaagagccagactcctcctcgggcatcggcaagacaggccagcagcccgctaaaaagagactcaattttggtcagactggcgactcagagtcagtccccgacccacaacctctcggagaacctccagcagccccctcaggtctgggacctaatacaatggcttcaggcggtggcgctccaatggcagacaataacgaaggcgccgacggagtgggtaattcctcgggaaattggcattgcgattccacatggctgggggacagagtcatcaccaccagcacccgaacctgggccctgcccacctacaacaaccacctctacaagcaaatctccaacggcacctcgggaggaagcaccaacgacaacacctattttggctacagcaccccctgggggtattttgacttcaacagattccactgtcacttttcaccacgtgactggcaacgactcatcaacaacaattggggattccggcccaaaagactcaacttcaagctgttcaacatccaggtcaaggaagtcacgacgaacgaaggcaccaagaccatcgccaataatctcaccagcaccgtgcgggtctttacggactcggagtaccagttaccgtacgtgctaggatccgctcaccagggatgtctgcctccgttcccggcggacgtcttcatggttcctcagtacggctatttaactttaaacaatggaagccaagccctgggacgttcctccttctactgtctggagtatttcccatcgcagatgctgagaaccggcaacaactttcagttcagctacaccttcgaggacgtgcctttccacagcagctacgcgcacagccagagcctggacaggctgatgaatcccctcatcgaccagtacctgtactacctggtcagaacgcaaacgactggaactggagggacgcagactctggcattcagccaagcgggtcctagctcaatggccaaccaggctagaaattgggtgcccggaccttgctaccggcagcagcgcgtctccacgacaaccaaccagagcaacaacagcaactttgcctggacgggagctgccaagtttaagctgaacggccgagactctctaatgaatccgggcgtggcaatggcttcccacaaggatgacgacgaccgcttcttcccttcgagcggggtcctgatttttggcaagcaaggagccgggaacgatggagtggattacagccaagtgctgattacagatgaggaagaaatcaaggctaccaaccccgtggccacagaagaatatggagcagtggccatcaacaaccaggccgccaatacgcaggcgcagaccggactcgtgcacaaccagggggtgattcccggcatggtgtggcagaatagagacgtgtacctgcagggtcccatctgggccaaaattcctcacacggacggcaactttcacccgtctcccctgatgggcggctttggactgaagcacccgcctcctcaaattctcatcaagaacacaccggttccagcggacccgccgcttaccttcaaccaggccaagctgaactctttcatcacgcagtacagcaccggacaggtcagcgtggaaatcgagtgggagctgcagaaagaaaacagcaaacgctggaatccagagattcaatacacttccaactactacaaatctacaaatgtggactttgctgtcaacacggaaggagtttatagcgagcctcgccccattggcacccgttacctcacccgcaacctgtaattacatgttaatcaataaaccggttaattcgtttcagttgaactttggtctctgcgaagggcgaattc

SEQ ID NO: 4783 - protein, 736 aa, Adeno-associated virus
MAADGYLPDWLEDNLSEGIREWWDLKPGAPKPKANQQKQDDGRGLVLPGYKYLGPFNGLDKGEPVNAADAAALEHDKAYDQQLKAGDNPYLRYNHADAEFQERLQEDTSFGGNLGRAVFQAKKRVLEPLGLVEEGAKTAPGKKRPVEQSPQEPDSSSGIGKTGQQPAKKRLNFGQTGDSESVPDPQPLGEPPAAPSGLGPNTMASGGGAPMADNNEGADGVGNSSGNWHCDSTWLGDRVITTSTRTWALPTYNNHLYKQISNGTSGGSTNDNTYFGYSTPWGYFDFNRFHCHFSPRDWQRLINNNWGFRPKRLNFKLFNIQVKEVTTNEGTKTIANNLTSTVRVFTDSEYQLPYVLGSAHQGCLPPFPADVFMVPQYGYLTLNNGSQALGRSSFYCLEYFPSQMLRTGNNFQFSYTFEDVPFHSSYAHSQSLDRLMNPLIDQYLYYLVRTQTTGTGGTQTLAFSQAGPSSMANQARNWVPGPCYRQQRVSTTTNQSNNSNFAWTGAAKFKLNGRDSLMNPGVAMASHKDDDDRFFPSSGVLIFGKQGAGNDGVDYSQVLITDEEEIKATNPVATEEYGAVAINNQAANTQAQTGLVHNQGVIPGMVWQNRDVYLQGPIWAKIPHTDGNFHPSPLMGGFGLKHPPPQILIKNTPVPADPPLTFNQAKLNSFITQYSTGQVSVEIEWELQKENSKRWNPEIQYTSNYYKSTNVDFAVNTEGVYSEPRPIGTRYLTRNL

SEQ ID NO: 4784 - DNA, 3121 bp, Adeno-associated virus
  source 1..3121: mol_type = genomic DNA
gaattcgcccttctacggctgcgtcaactggaccaatgagaactttcccttcaacgattgcgtcgacaagatggtgatctggtgggaggagggcaagatgacggccaaggtcgtggagtccgccaaggccattctcggcggcagcaaggtgcgtgtggaccaaaagtgcaagtcttccgcccagatcgatcccacccccgtgatcgtcacctccaacaccaacatgtgcgccgtgattgacgggaacagcaccaccttcgagcaccagcagccgttgcaggaccggatgttcaaatttgaactcacccgccgtctggagcatgactttggcaaggtgacgaagcaggaagtcaaagagttcttccgctgggcgcaggatcacgtgaccgaggtggcgcatgagttccacgtcagaaagggtggcgccaacaagagacccgcccccgatgacgcggatataagcgagcccaagcgggcctgcccctcagtcgcggatccatcgacgtcagacgcggaaggagctccggtggactttgccgacaggtaccaaaacaaatgttctcgtcacgcgggcatgcttcagatgctgtttccctgcaagacatgcgagagaatgaatcagaatttcaacatttgcttcacgcacgggaccagagactgttcagaatgtttccccggcgtgtcagaatctcaaccggtcgtcagaaagaggacgtatcggaaactctgtgcgattcatcatctgctggggcgggctcccgagattgcttgctcggcctgcgatctggtcaacgtggacctggatgactgtgtttctgagcaataaatgacttaaaccaggtatggctgccgatggttatcttccagattggctcgaggacaacctctctgagggcattcgcgagtggtgggacttgaaacctggagccccgaaacccaaagccaaccagcaaaagcaggacgacggccggggtctggtgcttcctggctacaagtacctcggacccttcaacggactcgacaagggggagcccgtcaacgcggcggacgcagcggccctcgagcacgacaaagcctacgaccagcagctcaaagcgggtgacaatccgtacctgcggtataatcacgccgacgccgagtttcaggagcgtctgcaagaagatacgtcctttgggggcaacctcgggcgagcagtcttccaggccaagaagcgggttctcgaacctctcggtctggttgaggaaggcgctaagacggctcctggaaagaagagaccggtagagcagtcgccacaagagccagactcctcctcgggcatcggcaagacaggccagcagcccgctaaaaagagactcaattttggtcagactggcgactcagagtcagtccccgacccacaacctctcggagaacctccagcagccccctcaggtctgggacctaatacaatggcttcaggcggtggcgctccaatggcagacaataacgaaggcgccgacggagtgggtaattcctcgggaaattggcattgcgattccacatggctgggggacagagtcatcaccaccagcacccgaacctgggccctgcccacctacaacaaccacctctacaagcaaatctccaacggcacctcgggaggaagcaccaacgacaacacctattttggctacagcaccccctgggggtattttgacttcaacagattccactgtcacttttcaccacgtgactggcaacgactcatcaacaacaattggggattccggcccaaaagactcaacttcaagctgttcaacatccaggtcaaggaagtcacgacgaacgaaggcaccaagaccatcgccaataatctcaccagcaccgtgcaggtctttacggacttggagtaccagttaccgtacgtgctaggatccgctcaccagggatgtctgcctccgttcccggcggacgtcttcatggttcctcagtacggctatttaactttaaacaatggaagccaagccctgggacgttcctccttctactgtctggagtatttcccatcgcagatgccgagaaccggcaacaactttcagttcagctacaccttcgaggacgtgcctttccacagcagctacgcgcacagccagagcctggacaggctgatgaatcccctcatcgaccagtacctgtactacctggtcagaacgcaaacgactggaactggagggacgcagactctggcattcagccaagcgggtcctagctcaatggccaaccaggctagaaattgggtgcccggaccttgctaccggcagcagcgcgtctccacgacaaccaaccagaacaacaacagcaactttgcctggacgggagctgccaagtttaagctgaacggccgagactctctaatgaatccgggcgtggcaatggcttcccacaaggatgacgacgaccgcttcttcccttcgagcggggtcctgatttttggcaagcaaggagccgggaacgatggagtggattacagccaagtgctgattacagatgaggaagaaatcaaggctaccaaccccgtggccacagaagaatatggagcagtggccatcaacaaccaggccgccaatacgcaggcgcagaccggactcgtgcacaaccagggggtgattcccggcatggtgtggcagaatagagacgtgtacctgcagggtcccatctgggccaaaattcctcacacggacggcaactttcacccgtctcccctgatgggcggctttggactgaagcacccgcctcctcaaattctcatcaagaacacaccggttccagcggacccgccgcttaccttcaaccaggccaagctgaactctttcatcacgcagtacagcaccggacaggtcagcgtggaaatcgagtgggagctgcagaaagaaaacagcaaacgctggaatccagagattcaatacacttccaactactacaaatctacaaatgtggactttgctgtcaacacggaaggagtttatagcgagcctcgccccattggcacccgttacctcacccgcaacctgtaattacatgttaatcaataaaccggttaattcgtttcagttgaactttggtctctgcgaagggcgaattc

SEQ ID NO: 4785 - protein, 736 aa, Adeno-associated virus
MAADGYLPDWLEDNLSEGIREWWDLKPGAPKPKANQQKQDDGRGLVLPGYKYLGPFNGLDKGEPVNAADAAALEHDKAYDQQLKAGDNPYLRYNHADAEFQERLQEDTSFGGNLGRAVFQAKKRVLEPLGLVEEGAKTAPGKKRPVEQSPQEPDSSSGIGKTGQQPAKKRLNFGQTGDSESVPDPQPLGEPPAAPSGLGPNTMASGGGAPMADNNEGADGVGNSSGNWHCDSTWLGDRVITTSTRTWALPTYNNHLYKQISNGTSGGSTNDNTYFGYSTPWGYFDFNRFHCHFSPRDWQRLINNNWGFRPKRLNFKLFNIQVKEVTTNEGTKTIANNLTSTVQVFTDLEYQLPYVLGSAHQGCLPPFPADVFMVPQYGYLTLNNGSQALGRSSFYCLEYFPSQMPRTGNNFQFSYTFEDVPFHSSYAHSQSLDRLMNPLIDQYLYYLVRTQTTGTGGTQTLAFSQAGPSSMANQARNWVPGPCYRQQRVSTTTNQNNNSNFAWTGAAKFKLNGRDSLMNPGVAMASHKDDDDRFFPSSGVLIFGKQGAGNDGVDYSQVLITDEEEIKATNPVATEEYGAVAINNQAANTQAQTGLVHNQGVIPGMVWQNRDVYLQGPIWAKIPHTDGNFHPSPLMGGFGLKHPPPQILIKNTPVPADPPLTFNQAKLNSFITQYSTGQVSVEIEWELQKENSKRWNPEIQYTSNYYKSTNVDFAVNTEGVYSEPRPIGTRYLTRNL

SEQ ID NO: 4786 - DNA, 3122 bp, Adeno-associated virus
  source 1..3122: mol_type = genomic DNA
gaattcgccctttctacggctgcgtcaactggaccaatgagaactttcccttcaacgattgcgtcgacaagatggtgatctggtgggaggagggcaagatgacggccaaggtcgtggagtccgccaaggccattctcggcggcagcaaggtgcgtgtggaccaaaagtgcaagtcttccgcccagatcgatcccacccccgtgatcgtcacctccaacaccaacatgtgcgccgtgattgacgggaacagcaccaccttcgagcaccagcagccgttgcaggaccggatgttcaaatttgaactcacccgccgtctggagcatgactttggcaaggtgacgaagcaggaagtcaaagggttcttccgctgggcgcaggatcacgtgaccgaggtggcgcatgagttccacgtgcgagcccaagcgggcctgcccctcagtcgcggatccatcgacgtcagaccagaaagggtggagccaacaagagacccgcccccgatgacgcggatataagcggaaggagctccggtggactttgccgacaggtaccaaaacaaatgttctcgtcacgcgggcatgcttcagatgctgtttccctgcaagacatgcgagagaatgaatcagaatttcaacatttgcttcacgcacgggaccagagactgttcagaatgtttccccggcgtgtcagaatctcaaccggtcgtcagaaagaggacgtatcggaaactctgtgcgattcatcatctgctggggcgggctcccgagattgcttgctcggcctgcgatctggtcaacgtggacctggatgactgtgtttctgagcaataaatgacttaaaccaggtatggctgccgatggttatcttccagattggctcgaggacaacctctctgagggcattcgcgagtggtgggacttgaaacctggagccccgaaacccaaagccaaccagcaaaagcaggacgacggccggggtctggtgcttcctggctacaagtacctcggacccttcaacggactcgacaagggggagcccgtcaacgcggcggacgcagcggccctcgagcacgacaaagcctacgaccagcagctcaaagcgggtgacaatccgtacctgcggtataatcacgccgacgccgagtttcaggagcgtctgcaagaagatacgtcttttgggggcaacctcgggcgagcagtcttccaggccaagaagcgggttctcgaacctctcggtctggttgaggaaggcgctaagacggctcctggaaagaagagaccggtagagcagtcgccacaagagccagactcctcctcgggcatcggcaagacaggccagcagcccgctaaaaagagactcaattttggtcagactggcgactcagagtcagtccccgacccacaacctctcggagaacctccagcagccccctcaggtctgggacctaatacaatggcttcaggcggtggcgctccaatggcagacaataacgaaggcgccgacggagtgggtaattcctcgggaaattggcattgcgattccacatggctgggggacagagtcatcaccaccagcacccgaacctgggccctgcccacctacaacaaccacctctacaagcaaatctccaacggcacctcgggaggaagcaccaacgacaacacctattttggctacagcaccccctgggggtattttgacttcaacagattccactgtcacttttcaccacgtgactggcaacgactcatcaacaacaattggggattccggcccaaaagactcaacttcaagctgttcaacatccaggtcaaggaagtcacgacgaacgaaggcaccaagaccatcgccaataatctcaccagcaccgtgcaggtctttacggactcggagtaccagttaccgtacgtgctaggatccgctcaccagggatgtctgcctccgttcccggcggacgtcttcatggttcctcagtacggctatttaactttaaacaatggaagccaagccctgggacgttcctccttctactgtctggagtatttcccatcgcagatgctgagaaccggcaacaactttcagttcagctacaccttcgaggacgtgcctttccacagcagctacgcgcacagccagagcctggacaggctgatgaatcccctcatcgaccagtacctgtactacctggtcagaacgcaaacgactggaactggagggacgcagactctggcattcagccaagcgggtcctagctcaatggccaaccaggctagaaattgggtgcccggaccttgctaccggcagcagcgcgtctccacgacaaccaaccagaacaacaacagcaactttgcctggacgggagctgccaagtttaagctgaacggccgagactctctaatgaatccgggcgtggcaatggcttcccacaaggatgacgacgaccgcttcttcccttcgagcggggtcctgatttttggcaagcaaggagccgggaacgatggagtggattacagccaagtgctgattacagatgaggaagaaatcaaggctaccaaccccgtggccacagaagaatatggagcagtggccatcaacaaccaggccgccaatacgcaggcgcagaccggactcgtgcacaaccagggggtgattcccggcatggtgtggcagaatagagacgtgtacctgcagggtcccatctgggccaaaattcctcacacggacggcaactttcacccgtctcccctgatgggcggctttggactgaagcacccgcctcctcaaattctcatcaagaacacaccggttccagcggacccgccgcttaccttcaaccaggccaagctgaactctttcatcacgcagtacagcaccggacaggtcagcgtggaaatcgagtgggagctgcagaaagaaaacagcaaacgctggaatccagagattcaatacacttccaactactacaaatctacaaatgtggactttgctgtcaacacggagggggtttatagcgagcctcgccccattggcacccgttacctcacccgcaacctgtaattacatgttaatcaataaaccggttaattcgtttcagttgaactttggtctctgcgaagggcgaattc

SEQ ID NO: 4787 - protein, 736 aa, Adeno-associated virus
MAADGYLPDWLEDNLSEGIREWWDLKPGAPKPKANQQKQDDGRGLVLPGYKYLGPFNGLDKGEPVNAADAAALEHDKAYDQQLKAGDNPYLRYNHADAEFQERLQEDTSFGGNLGRAVFQAKKRVLEPLGLVEEGAKTAPGKKRPVEQSPQEPDSSSGIGKTGQQPAKKRLNFGQTGDSESVPDPQPLGEPPAAPSGLGPNTMASGGGAPMADNNEGADGVGNSSGNWHCDSTWLGDRVITTSTRTWALPTYNNHLYKQISNGTSGGSTNDNTYFGYSTPWGYFDFNRFHCHFSPRDWQRLINNNWGFRPKRLNFKLFNIQVKEVTTNEGTKTIANNLTSTVQVFTDSEYQLPYVLGSAHQGCLPPFPADVFMVPQYGYLTLNNGSQALGRSSFYCLEYFPSQMLRTGNNFQFSYTFEDVPFHSSYAHSQSLDRLMNPLIDQYLYYLVRTQTTGTGGTQTLAFSQAGPSSMANQARNWVPGPCYRQQRVSTTTNQNNNSNFAWTGAAKFKLNGRDSLMNPGVAMASHKDDDDRFFPSSGVLIFGKQGAGNDGVDYSQVLITDEEEIKATNPVATEEYGAVAINNQAANTQAQTGLVHNQGVIPGMVWQNRDVYLQGPIWAKIPHTDGNFHPSPLMGGFGLKHPPPQILIKNTPVPADPPLTFNQAKLNSFITQYSTGQVSVEIEWELQKENSKRWNPEIQYTSNYYKSTNVDFAVNTEGVYSEPRPIGTRYLTRNL

SEQ ID NO: 4788 - DNA, 2370 bp, Adeno-associated virus
  source 1..2370: mol_type = genomic DNA
gaattcgccctttctacggctgcgtcaactggaccaatgagaactttcccttcaacgattgcgtcgacaagatggtgatctggtgggaggagggcaagatgacggccaaggtcgtggagtccgccaaggccattctcggcggcagcaaggtgcgcgtggaccaaaagtgcaagtcgtccgcccagatcgaccccacccccgtgatcgtcacctccaacaccaacatgtgcgccgtgattgacgggaacagcaccaccttcgagcaccagcagccgttgcaggaccggatgttcaagttcgaactcacccgccgtctggagcacgactttggcaaggtgaccaagcaggaagtcaaagagttcttccgctgggcgcaggatcacgtgaccgaggtggcgcatgagttctacgtcagaaagggcggagccagcaaaagacccgcccccgatgacgcggatataagcgagcccaagcgggcctgcccctcagtcgcggatccatcgacgtcagacgcggaaggagctccggtggactttgccgacaggtaccaaaacaaatgttctcgtcacgcgggcatgcttcagacgctgtttccctgcaaaacgtgcgagagaatgaatcagaatttcaacatttgcttcacgcacggggtcagagactgctcagaatgtttccccggtgcatcagaatctcaaccggtcgtcagaaaaaaaacgtatcagaaactgtgtgccattcatcatctgctggggcgggcacccgagattgcttgctcggcctgcgatctggtcaacgtggacctggacgactgtgtttctgagcaataaatgacttaaaccaggtatggctgccgatggttatcttccagattggcttgaggacaacctctctgagggcattcgcgagtggtgggacctgaaacctggagccccgaaacccaaagccaaccagcaaaagcaggacgacggccggggtctggtgcttcctggctacaagtacctcggacccttcaacggactcgacaagggggagcccgtcaacgcggcggacgcagcggccctcgagcacgacaaggcctacgaccagcagctcaaagcgggtgacaatccgtacctgcggtataaccacgccgacgccgagtttcaggagcgtctgcaagaagatacgtcttttgggggcaacctcgggcgagcagtcttccaggccaagaagcgggttctcgaacctctcggtctggttgaggaaggcgctaagacggctcctggaaagaagagaccggtagagccatcacctcagcgttcccccgactcctccacgggcatcggcaagaaaggccaccagcccgcgagaaagagactgaactttgggcagactggcgactcggagtcagtccccgaccctcaaccaatcggagaaccaccagcaggcccctctggtctgggatctggtacaatggctgcaggcggtggcgctccaatggcagacaataacgaaggcgccgacggagtgggtagttcctcaggaaattggcattgcgattccacatggctgggcgacagagtcatcaccaccagcacccgaacctgggccctgcccacctacaacaaccatctctacaagcaaatctccaacgggacatcgggaggaagcactaacgacaacacctactttggctacagcaccccctgggggtattttgacttcaacagattccactgccacttctcaccacgtgactggcagcgactcatcaacaataactggggattccggcccaagagactcaacttcaagctcttcaacatccaggtcaaggaggtcacgcagaatgaaggcaccaagaccatcgccaataaccttaccagcacgattcaggtgtttacggactcggaataccagctcccgtacgtcctcggctctgcgcaccagggctgcctccctccgttcccggcggacgtcttcatgattcctcagtacgggtatctgaccctaaacaatggcagtcaggctgtgggccgttcctccttctactgcctggaatacttcccttctcaaatgctgaggacgggcaacaactttgaattcagctacaccttcgaggacgtgcctttccacagcagctacgcgcacagccagagcctggaccggctgatgaaccctctcatcgaccagtacctgtattacttatccagaactcagtccacaggaggaactcaaggtactcagcaattgttattttctcaagccgggcccgcaaacatgtyggctcaggccaagaactggctacctggaccgtgttaccgtcagcaacgagtttccacgacactgtcgcaaaacaacaacagcaattttgctggaccggtgccacca

SEQ ID NO: 4789 - protein, 738 aa, Adeno-associated virus; identical to SEQ ID NO: 4779

SEQ ID NO: 4790 - DNA, 2205 bp, Adeno-associated virus
  source 1..2205: mol_type = genomic DNA
atgactgacggttaccttccagattggctagaggacaacctctctgaaggcgttcgagagtggtgggcgctgcaacctggagcccctaaacccaaggcaaatcaacaacatcaggacaacgctcggggtcttgtgcttccgggttacaaatacctcggacccggcaacggactcgacaagggggaacccgtcaacgcagcggacgcggcagccctcgagcacgacaaggcctacgaccagcagctcaaggccggtgacaacccctacctcaagtacaaccacgccgacgcggagttccagcagcggcttcagggcgacacatcgtttgggggcaacctcggcagagcagtcttccaggccaaaaagagggttcttgaacctcttggtctggttgagcaagcgggtgagacggctcctggaaagaagagaccgttgattgaatccccccagcagcccgactcctccacgggtatcggcaaaaaaggcaagcagccggctaaaaagaagctcgttttcgaagacgaaactggagcaggcgacggaccccctgagggatcaacttccggagccatgtctgatgacagtgagatgcgtgcagcagctggcggagctgcagtcgagggcggacaaggtgccgatggagtgggtaatgcctcgggtgattggcattgcgattccacctggtctgagggccacgtcacgaccaccagcaccagaacctgggtcttgcccacctacaacaaccacctctacaagcgactcggagagagcctgcagtccaacacctacaacggattctccaccccctggggatactttgacttcaaccgcttccactgccacttctcaccacgtgactggcagcgactcatcaacaacaactggggcatgcgacccaaagccatgcgggtcaaaatcttcaacatccaggtcaaggaggtcacgacgtcgaacggcgagacaacggtggctaataaccttaccagcacggttcagatctttgcggactcgtcgtacgaactgccgtacgtgatggatgcgggtcaagagggcagcctgcctccttttcccaacgacgtctttatggtgccccagtacggctactgtggactggtgaccggcaacacttcgcagcaacagactgacagaaatgccttctactgcctggagtactttccttcgcagatgctgcggactggcaacaactttgaaattacgtacagttttgagaaggtgcctttccactcgatgtacgcgcacagccagagcctggaccggctgatgaaccctctcatcgaccagtacctgtggggactgcaatcgaccaccaccggaaccaccctgaatgccgggactgccaccaccaactttaccaagctgcggcctaccaacttttccaactttaaaaagaactggctgcccgggccttcaatcaagcagcagggcttctcaaagactgccaatcaaaactacaagatccctgccaccgggtcagacagtctcatcaaatacgagacgcacagcactctggacggaagatggagtgccctgacccccggacctccaatggccacggctggacctgcggacagcaagttcagcaacagccagctcatctttgcggggcctaaacagaacggcaacacggccaccgtacccgggactctgatcttcacctctgaggaggagctggcagccaccaacgccaccgatacggacatgtggggcaacctacctggcggtgaccagagcaacagcaacctgccgaccgtggacagactgacagccttgggagccgtgcctggaatggtctggcaaaacagagacatttactaccagggtcccatttgggccaagattcctcataccgatggacactttcacccctcaccgctgattggtgggtttgggctgaaacacccgcctcctcaaatttttatcaagaacaccccggtacctgcgaatcctgcaacgaccttcagctctactccggtaaactccttcattactcagtacagcactggccaggtgtcggtgcagattgactgggagatccagaaggagcggtccaaacgctggaaccccgaggtccagtttacctccaactacggacagcaaaactctctgttgtgggctcccgatgcggctgggaaatacactgagcctagggctatcggtacccgctacctcacccaccacctgtaa

SEQ ID NO: 4791 - protein, 734 aa, Adeno-associated virus
MTDGYLPDWLEDNLSEGVREWWALQPGAPKPKANQQHQDNARGLVLPGYKYLGPGNGLDKGEPVNAADAAALEHDKAYDQQLKAGDNPYLKYNHADAEFQQRLQGDTSFGGNLGRAVFQAKKRVLEPLGLVEQAGETAPGKKRPLIESPQQPDSSTGIGKKGKQPAKKKLVFEDETGAGDGPPEGSTSGAMSDDSEMRAAAGGAAVEGGQGADGVGNASGDWHCDSTWSEGHVTTTSTRTWVLPTYNNHLYKRLGESLQSNTYNGFSTPWGYFDFNRFHCHFSPRDWQRLINNNWGMRPKAMRVKIFNIQVKEVTTSNGETTVANNLTSTVQIFADSSYELPYVMDAGQEGSLPPFPNDVFMVPQYGYCGLVTGNTSQQQTDRNAFYCLEYFPSQMLRTGNNFEITYSFEKVPFHSMYAHSQSLDRLMNPLIDQYLWGLQSTTTGTTLNAGTATTNFTKLRPTNFSNFKKNWLPGPSIKQQGFSKTANQNYKIPATGSDSLIKYETHSTLDGRWSALTPGPPMATAGPADSKFSNSQLIFAGPKQNGNTATVPGTLIFTSEEELAATNATDTDMWGNLPGGDQSNSNLPTVDRLTALGAVPGMVWQNRDIYYQGPIWAKIPHTDGHFHPSPLIGGFGLKHPPPQIFIKNTPVPANPATTFSSTPVNSFITQYSTGQVSVQIDWEIQKERSKRWNPEVQFTSNYGQQNSLLWAPDAAGKYTEPRAIGTRYLTHHL

SEQ ID NO: 4792 - DNA, 3128 bp, Adeno-associated virus
  source 1..3128: mol_type = genomic DNA
gaattcgccctttctacggctgcgtcaactggaccaatgagaactttcccttcaacgattgcgtcgacaagatgttgatctggtgggaggagggcaagatgacggccaaggtcgtggagtccgccaaggccattctcggcggcagcaaagtgcgcgtggaccaaaagtgcaagccgtccgcccagatcgaccccacccccgtgatcgtcacctccaacaccaacatgtgcgccgtgattgacgggaacagcaccaccttcgagcaccagcagccgttgcgggaccggatgttcaagtttgaactcacccgccgtctggagcacgactttggcaaggtgacaaagcaggaagtcagagagttcttccgctgggcgcaggatcacgtgaccgaggtggcgcacgagttctacgtcagaaagggtggagccaacaagagacccgcccccgatgacgcggataaaagcgagcccaagcgggcctgcccctcagtcgcggatccatcgacgtcagacgcggaaggagctccggtggactttgccgacaggtaccaaaacaaatgttctcgtcacgcgggcatgcttcagatgctgtttccctgcaaaacatgcgagagaatgaatcagaatttcaacatttgcttcacgcacgggaccagagactgttcagaatgtttccccggcgtgtcagaatctcaaccggtcgtcagaaaaaagacgtatcggaaactctgtgcgattcatcatctgctggggcgggcacccgagattgcttgctcggcctgcgatctggtcaacgtggacctagatgactgtgtttctgagcaataaatgacttaaaccaggtatggctgccgatggttatcttccagattggctcgaggacaacctctctgagggcattcgcgagtggtgggacttgaaacctggagccccgaaacccaaagccaaccagcaaaagcaggacgacggccggggtctggtgcttcctggctacaagtacctcggacccttcaacggactcgacaagggggagcccgtcaacgcggcggacgcagcggccctcgagcacgacaaggcctacgaccagcagctcaaagcgggtgacaatccgtacctgcggtataaccacgccgacgccgagtttcaggagcgtctgcaagaagatacgtcttttgggggcaacctcgggcgagcagtcttccaggccaagaagcgggttctcgaacctctcggtctggttgaggaaggcgctaagacggctcctggaaagaagagaccggtagagccatcaccccagcgttctccagactcctctacgggcatcggcaagaaaggccagcagcccgcgaaaaagagactcaactttgggcagactggcgactcagagtcagtgcccgaccctcaaccaatcggagaaccccccgcaggcccctctggtctgggatctggtacaatggctgcaggcggtggcgctccaatggcagacaataacgaaggcgccgacggagtgggtagttcctcaggaaattggcattgcgattccacatggctgggcgacagagtcatcaccaccagcacccgaacctgggccctccccacctacaacaaccacctctacaagcaaatctccaacgggacttcgggaggaagcaccaacgacaacacctacttcggctacagcaccccctgggggtattttgactttaacagattccactgccacttctcaccacgtgactggcagcgactcatcaacaacaactggggattccggcccaagagactcaacttcaagctcttcaacatccaggtcaaggaggtcacgcagaatgaaggcaccaagaccatcgccaataaccttaccagcacgattcaggtctttacggactcggaataccagctcccgtacgtcctcggctctgcgcaccagggctgcctgcctccgttcccggcggacgtcttcatgattcctcagtacgggtacctgactctgaacaatggcagtcaggccgtgggccgttcctccttctactgcctggagtactttccttctcaaatgctgagaacgggcaacaactttgagttcagctaccagtttgaggacgtgccttttcacagcagctacgcgcacagccaaagcctggaccggctgatgaaccccctcatcgaccagtacctgtactacctgtctcggactcagtccacgggaggtaccgcaggaactcagcagttgctattttctcaggccgggcctaataacatgtcggctcaggccaaaaactggctacccgggccctgctaccggcagcaacgcgtctccacgacactgtcgcaaaataacaacagcaactgtaaatcccggtgtcgctatggcaacccacaaggacgacgaagagcgattttgcctggaccggtgccaccaagtatcatctgaatggcagagactctctgttttccgtccagcggagtcttaatgtttgggaaacagggagctggaaaagacaacgtggactatagcagcgttatgctaaccagtgaggaagaaattaaaaccaccaacccagtggccacggaacagtacggcgtggtggccgataacctgcaacagcaaaacgccgctcctattgtaggggccgtcaacagtcaaggagccttacctggcatggtctggcagaaccgggacgtgtacctgcagggtcctatctgggccaagattcctcacacggacggaaactttcatccctcgccgctgatgggaggctttggactgaaacacccgcctcctcagatcctgattaagaatacacctgttcccgcggatcctccaactaccttcagtcaagctaagctggcgtcgttcatcacgcagtacagcaccggacaggtcagcgtggaaattgaatgggagctgcagaaagaaaacagcaaacgctggaacccagagattcaatacacttccaactactacaaatctacaaatgtggacttcgctgttaacacagatggcacttattctgagcctcgccccattggcacccgttacctcacccgtaatctgtaattgctcgttaatcaataaaccggttgattcgtttcagttgaactttggtctctgcgaagggcgaattc

SEQ ID NO: 4793 - protein, 738 aa, Adeno-associated virus
MAADGYLPDWLEDNLSEGIREWWDLKPGAPKPKANQQKQDDGRGLVLPGYKYLGPFNGLDKGEPVNAADAAALEHDKAYDQQLKAGDNPYLRYNHADAEFQERLQEDTSFGGNLGRAVFQAKKRVLEPLGLVEEGAKTAPGKKRPVEPSPQRSPDSSTGIGKKGQQPAKKRLNFGQTGDSESVPDPQPIGEPPAGPSGLGSGTMAAGGGAPMADNNEGADGVGSSSGNWHCDSTWLGDRVITTSTRTWALPTYNNHLYKQISNGTSGGSTNDNTYFGYSTPWGYFDFNRFHCHFSPRDWQRLINNNWGFRPKRLNFKLFNIQVKEVTQNEGTKTIANNLTSTIQVFTDSEYQLPYVLGSAHQGCLPPFPADVFMIPQYGYLTLNNGSQAVGRSSFYCLEYFPSQMLRTGNNFEFSYQFEDVPFHSSYAHSQSLDRLMNPLIDQYLYYLSRTQSTGGTAGTQQLLFSQAGPNNMSAQAKNWLPGPCYRQQRVSTTLSQNNNSNFAWTGATKYHLNGRDSLVNPGVAMATHKDDEERFFPSSGVLMFGKQGAGKDNVDYSSVMLTSEEEIKTTNPVATEQYGVVADNLQQQNAAPIVGAVNSQGALPGMVWQNRDVYLQGPIWAKIPHTDGNFHPSPLMGGFGLKHPPPQILIKNTPVPADPPTTFSQAKLASFITQYSTGQVSVEIEWELQKENSKRWNPEIQYTSNYYKSTNVDFAVNTDGTYSEPRPIGTRYLTRNL

SEQ ID NO: 4794 - DNA, 3129 bp, Adeno-associated virus
  source 1..3129: mol_type = genomic DNA
gaattcgccctttctacggctgcgtcaactggaccaatgagaactttcccttcaacgattgcgtcgacaagatggtgatctggtgggaggagggcaagatgacggccaaggtcgtggagtccgccaaggccattctcggcggcagcaaagtgcgcgtggaccaaaagtgcaagtcgtccgcccagatcgaccccacccccgtgatcgtcacctccaacaccaacatgtgcgccgtgattgacgggaacagcaccaccttcgagcaccagcagccgttgcaggaccggatgttcaagtttgaactcacccgccgtctggagcacgactttggcaaggtgacaaagcaggaagtcagagagttcttccgctgggcgcaggatcacgtgaccgaggtggcgcacgagttctacgtcagaaagggtggagccaacaagagacccgcccccgatgacgcggataaaagcgagcccaagcgggcctgcccctcagtcgcggatccatcgacgtcagacgcggaaggagctccggtggactttgccgacaggtaccaaaacaaatgttctcgtcacgcgggcatgcttcagatgctgtttccctgcaaaacatgcgagagaatgaatcagaatttcaacatttgcttcacgcacgggaccagagactgttcagaatgtttccccggcgtgtcagaatctcaaccggtcgtcagaaaaaagacgtatcggaaactctgtgcgattcatcatctgctgggggcgggcacccgagattgcttgctcggcctgcgatctggtcaacgtggacctagatgactgtgtttctgagcaataaatgacttaaaccaggtatggctgccgatggttatcttccagattggctcgaggacaacctctctgagggcattcgcgagtggtgggacttgaaacctggagccccgaaacccaaagccaaccagcaaaagcaggacgacggccggggtctggtgcttcctggctacaagtacctcggacccttcaacggactcgacaagggggagcccgtcaacgcggcggacgcagcggccctcgagcacgacaaggcctacgaccagcagctcaaagcgggtgacaatccgtacctgcggtataaccacgccgacgccgagtttcaggagcgtctgcaagaagatacgtcttttgggggcaacctcgggcgagcagtcttccaggccaagaagcgggttctcgaacctctcggtctggttgaggaaggcgctaagacggctcctggaaagaagagaccggtagagccatcaccccagcgttctccagactcctctacgggcatcggcaagaaaggccagcagcccgcgaaaaagagactcaactttgggcagactggcgactcagagtcagtgcccgaccctcaaccaatcggagaaccccccgcaggcccctctggtctgggatctggtacaatggctgcaggcggtggcgctccaatggcagacaataacgaaggcgccgacggagtgggtagttcctcaggaaattggcattgcgattccacatggctgggcgacagagtcatcaccaccagcacccgaacctgggccctccccacctacaacaaccacctctacaagcaaatctccaacgggacttcgggaggaagcaccaacgacaacacctacttcggctacagcaccccctgggggtattttgactttaacagattccactgccacttctcaccacgtgactggcagcgactcatcaacaacaactggggattccggcccaagagactcaacttcaagctcttcaacatccaggtcaaggaggtcacgcagaatgaaggcaccaagaccatcgccaataaccttaccagcacgattcaggtctttacggactcggaataccagctcccgtacgtcctcggctctgcgcaccagggctgcctgcctccgttcccggcggacgtcttcatgattcctcagtacgggtacctgactctgaacaatggcagtcaggccgtgggccgttcctccttctactgcctggagtactttccttctcaaatgctgagaacgggcaacaactttgagttcagctaccagtttgaggacgtgccttttcacagcagctacgcgcacagccaaagcctggaccggctgatgaaccccctcatcgaccagtacctgtactacctgtctcggactcagtccacgggaggtaccgcaggaactcagcagttgctattttctcaggccgggcctaataacatgtcggctcaggccaaaaactggctacccgggccctgctaccggcagcaacgcgtctccacgacactgtcgcaaaataacaacagcaactttgcctggaccggtgccaccaagtatcatctgaatggcagagactctctggtaaatcccggtgtcgctatggcaacccacaaggacgacgaagagcgattttttccgtccagcggagtcttaatgtttgggaaacagggagctggaaaagacaacgtggactatagcagcgttatgctaaccagtgaggaagaaattaaaaccaccaacccagtggccacagaacagtacggcgtggtggccgataacctgcaacagcaaaacgccgctcctattgtaggggccgtcaacagtcaaggagccttacctggcatggtctggcagaaccgggacgtgtacctgcagggtcctatctgggccaagattcctcacacggacggaaactttcatccctcgccgctgatgggaggctttggactgaaacacccgcctcctcagatcctgattaagaatacacctgttcccgcggatcctccaactaccttcagtcaagctaagctggcgtcgttcatcacgcagtacagcaccggacaggtcagcgtggaaattgaatgggagctgcagaaagaaaacagcaaacgctggaacccagagattcaatacacttccaactactacaaatctacaaatgtggactttgctgttaacacagatggcacttattctgagcctcgccccatcggcacccgttacctcacccgtaatctgtaattgcttgttaatcaataaaccggttgattcgtttcagttgaactttggtctctgcgaagggcgaattc

SEQ ID NO: 4795 - DNA, 3128 bp, Adeno-associated virus
  source 1..3128: mol_type = genomic DNA
gaattcgccctttctacggctgcgtcaactggaccaatgagaactttcccttcaacgattgcgtcgacaagatggtgatctggtgggaggagggcaagatgacggccaaggtcgtggagtccgccaaggccattctcggcggcagcaaagtgcgcgtggaccaaaagtgcaagtcgtccgcccagatcgaccccacccccgtgatcgtcacctccaacaccaacatgtgcgccgtgattgacgggaacagcaccaccttcgagcaccagcagccgttgcaggaccggatgttcaagtttgaactcacccgccgtctggagcacgactttggcaaggtgacaaagcaggaagtcagagagttcttccgctgggcgcaggatcacgtgaccgaggtggcgcacgagttctacgtcagaaagggtggagccaacaagagacccgcccccgatgacgcggataaaagcgagcccaagcgggcctgcccctcagtcgcggatccatcgacgtcagacgcggaaggagctccggtggactttgccgacaggtaccaaaacaaatgttctcgtcacgcgggcatgcttcagatgctgtttccctgcaaaacatgcgagagaatgaatcagaatttcaacatttgcttcacgcacgggaccagagactgttcagaatgtttccccggcgtgtcagaatctcaaccggttgtcagaaaaaagacgtatcggaaactctgtgcgattcatcatctgctggggcgggcacccgagattgcttgctcggcctgcgatctggtcaacgtggacctagatgactgtgtttctgagcaataaatgacttaaaccaggtatggctgccgatggttatcttccagattggctcgaggacaacctctctgagggcattcgcgagtggtgggacttgaaacctggagccccgaaacccaaagccaaccagcaaaagcaggacgacggccggggtctggtgcttcctggctacaagtacctcggacccttcaacggactcgacaagggggagcccgtcaacgcggcggacgcagcggccctcgagcacgacaaggcctacgaccagcagctcaaagcgggtgacaatccgtacctgcggtataaccacgccgacgccgagtttcaggagcgtctgcaagaagatacgtcttttgggggcaacctcgggcgagcagtcttccaggccaagaagcgggttctcgaacctctcggtctggttgaggaaggcgctaagacggctcctggaaagaagagaccggtagagccatcaccccagcgttctccagactcctctacgggcatcggcaagaaaggccagcagcccgcgaaaaagagactcaactttgggcagactggcgactcagagtcagtgcccgaccctcaaccaatcggagaaccccccgcaggcccctctggtctgggatctggtacaatggctgcaggcggtggcgctccaatggcagacaataacgaaggcgccgacggagtgggtagttcctcaggaaattggcattgcgattccacatggctgggcgacagagtcatcaccaccagcacccgaacctgggccctccccacctacaacaaccacctctacaagcaaatctccaacgggacttcgggaggaagcaccaacgacaacacctacttcggctacagcaccccctgggggtattttgactttaacagattccactgccacttctcaccacgtgactggcagcgactcatcaacaacaactggggattccggcccaagagacccaacttcaagctcttcaacatccaggtcaaggaggtcacgcagaatgaaggcaccaagaccatcgccaataaccttaccagcacgattcaggtctttacggactcggaataccagctcccgtacgtcctcggctctgcgcaccagggctgcctgcctccgttcccggcggacgtcttcatgattcctcagtacgggtacctgactctgaacaatggcagtcaggccgtgggccgttcctccttctactgcctggagtactttccttctcaaatgctgagaacgggcaacaactttgagttcagctaccagtttgaggacgtgccttttcacagcagctacgcgcacagccaaagcctggaccggctgatgaaccccctcatcgaccagtacctgtactacctgtctcggactcagtccacgggaggtaccgcaggaactcagcagttgctattttctcaggccgggcctaataacatgtcggctcaggccaaaaactggctacccgggccctgctaccggcagcaacgcgtctccacgacactgtcgcaaaataacaacagcaactttgcctggaccggtgccaccaagtatcatctgaatggcagagactctctggtaaatcccggtgtcgctatggcaacccacaaggacgacgaagagcgattttttccgtccagcggagtcttaatgtttgggaaacagggagctggaaaagacaacgtggactatagcagcgttatgctaaccagtgaggaagaaattaaaaccaccaacccagtggccacagaacagtacggcgtggtggccgataacctgcaacagcaaaacgccgctcctattgtaggggccgtcaacagtcaaggagccttacctggcatggtctggcagaaccgggacgtgtacctgcagggtcctatctgggccaagattcctcacacggacggaaactttcatccctcgccgctgatgggaggctttggactgaaacacccgcctcctcagatcctgattaagaatacacctgttcccgcggatcctccaactaccttcagtcaagctaagctggcgtcgttcatcacgcagtacagcaccggacaggtcagcgtggaaattgaatgggagctgcagaaagaaaacagcaaacgctggaacccagagattcaatacacttccaactactacaaatctacaaatgtggactttgctgttaacacagatggcacttattctgagcctcgccccattggcacccgttacctcacccgtaatctgtaattgcttgttaatcaataaaccggttgattcgtttcagttgaactttggtctctgcgaagggcgaattc

SEQ ID NO: 4796 - protein, 738 aa, Adeno-associated virus
MAADGYLPDWLEDNLSEGIREWWDLKPGAPKPKANQQKQDDGRGLVLPGYKYLGPFNGLDKGEPVNAADAAALEHDKAYDQQLKAGDNPYLRYNHADAEFQERLQEDTSFGGNLGRAVFQAKKRVLEPLGLVEEGAKTAPGKKRPVEPSPQRSPDSSTGIGKKGQQPAKKRLNFGQTGDSESVPDPQPIGEPPAGPSGLGSGTMAAGGGAPMADNNEGADGVGSSSGNWHCDSTWLGDRVITTSTRTWALPTYNNHLYKQISNGTSGGSTNDNTYFGYSTPWGYFDFNRFHCHFSPRDWQRLINNNWGFRPKRPNFKLFNIQVKEVTQNEGTKTIANNLTSTIQVFTDSEYQLPYVLGSAHQGCLPPFPADVFMIPQYGYLTLNNGSQAVGRSSFYCLEYFPSQMLRTGNNFEFSYQFEDVPFHSSYAHSQSLDRLMNPLIDQYLYYLSRTQSTGGTAGTQQLLFSQAGPNNMSAQAKNWLPGPCYRQQRVSTTLSQNNNSNFAWTGATKYHLNGRDSLVNPGVAMATHKDDEERFFPSSGVLMFGKQGAGKDNVDYSSVMLTSEEEIKTTNPVATEQYGVVADNLQQQNAAPIVGAVNSQGALPGMVWQNRDVYLQGPIWAKIPHTDGNFHPSPLMGGFGLKHPPPQILIKNTPVPADPPTTFSQAKLASFITQYSTGQVSVEIEWELQKENSKRWNPEIQYTSNYYKSTNVDFAVNTDGTYSEPRPIGTRYLTRNL

SEQ ID NO: 4797 - protein, 738 aa, Adeno-associated virus
MAADGYLPDWLEDNLSEGIREWWDLKPGAPKPKANQQKQDDGRGLVLPGYKYLGPFNGLDKGEPVNAADAAALEHDKAYDQQLKAGDNPYLRYNHADAEFQERLQEDTSFGGNLGRAVFQAKKRVLEPLGLVEEAAKTAPGKKRPVEPSPQRSPDSSTGIGKKGQQPAKKRLNFGQTGDSESVPDPQPIGEPPAGPSGLGSGTMAAGGGAPMADNNEGADGVGSSSGNWHCDSTWLGDRVITTSTRTWALPTYNNHLYKQISNGTSGGSTNDNTYFGYSTPWGYFDFNRFHCHFSPRDWQRLINNNWGFRPKRLSFKLFNIQVKEVTQNEGTKTIANNLTSTIQVFTDSEYQLPYVLGSAHQGCLPPFPADVFMIPQYGYLTLNNGSQAVGRSSFYCLEYFPSQMLRTGNNFEFSYTFEDVPFHSSYAHSQSLDRLMNPLIDQYLYYLSRTQSTGGTQGTQQLLFSQAGPANMSAQAKNWLPGPCYRQQRVSTTLSQNNNSNFAWTGATKYHLNGRDSLVNPGVAMATHKDDEERFFPSSGVLMFGKQGAGRDNVDYSSVMLTSEEEIKTTNPVATEQYGVVADNLQQTNTGPIVGNVNSQGALPGMVWQNRDVYLQGPIWAKIPHTDGNFHPSPLMGGFGLKHPPPQILIKNTPVPADPPTTFSQAKLASFITQYSTGQVSVEIEWELQKENSKRWNPEIQYTSNYYKSTNVDFAVNTEGTYSEPRPIGTRYLTRNL

SEQ ID NO: 4798 - protein, 720 aa, Adeno-associated virus
MSFVDHPPDWLEEVGEGLREFLGLEAGPPKPKPNQQHQDQARGLVLPGYNYLGPGNGLDRGEPVNRADEVAREHDISYNEQLEAGDNPYLKYNHADAEFQEKLADDTSFGGNLGKAVFQAKKRVLEPFGLVEEGAKTAPTGKRIDDHFPKRKKARTEEDSKPSTSSDAEAGPSGSQQLQIPAQPASSLGADTMSAGGGGPLGDNNQGADGVGNASGDWHCDSTWMGDRVVTKSTRTWVLPSYNNHQYREIKSGSVDGSNANAYFGYSTPWGYFDFNRFHSHWSPRDWQRLINNYWGFRPRSLRVKIFNIQVKEVTVQDSTTTIANNLTSTVQVFTDDDYQLPYVVGNGTEGCLPAFPPQVFTLPQYGYATLNRDNTENPTERSSFFCLEYFPSKMLRTGNNFEFTYNFEEVPFHSSFAPSQNLFKLANPLVDQYLYRFVSTNNTGGVQFNKNLAGRYANTYKNWFPGPMGRTQGWNLGSGVNRASVSAFATTNRMELEGASYQVPPQPNGMTNNLQGSNTYALENTMIFNSQPANPGTTATYLEGNMLITSESETQPVNRVAYNVGGQMATNNQSSTTAPATGTYNLQEIVPGSVWMERDVYLQGPIWAKIPETGAHFHPSPAMGGFGLKHPPPMMLIKNTPVPGNITSFSDVPVSSFITQYSTGQVTVEMEWELKKENSKRWNPEIQYTNNYNDPQFVDFAPDSTGEYRTTRPIGTRYL

SEQ ID NO: 4799 - protein, 736 aa, Adeno-associated virus
MAADGYLPDWLEDNLSEGIREWWDLKPGAPKPKANQQKQDDGRGLVLPGYKYLGPFNGLDKGEPVNAADAAALEHDKAYDQQLKAGDNPYLRYNHADAEFQERLQEDTSFGGNLGRAVFQAKKRVLEPFGLVEEGAKTAPGKKRPVEQSPQEPDSSSGIGKTGQQPAKKRLNFGQTGDSESVPDPQPLGEPPATPAAVGPTTMASGGGAPMADNNEGADGVGNASGNWHCDSTWLGDRVITTSTRTWALPTYNNHLYKQISSASTGASNDNHYFGYSTPWGYFDFNRFHCHFSPRDWQRLINNNWGFRPKRLNFKLFNIQVKEVTTNDGVTTIANNLTSTVQVFSDSEYQLPYVLGSAHQGCLPPFPADVFMIPQYGYLTLNNGSQAVGRSSFYCLEYFPSQMLRTGNNFTFSYTFEDVPFHSSYAHSQSLDRLMNPLIDQYLYYLNRTQNQSGSAQNKDLLFSRGSPAGMSVQPKNWLPGPCYRQQRVSKTKTDNNNSNFTWTGASKYNLNGRESIINPGTAMASHKDDKDKFFPMSGVMIFGKESAGASNTALDNVMITDEEEIKATNPVATERFGTVAVNLQSSSTDPATGDVHVMGALPGMVWQDRDVYLQGPIWAKIPHTDGHFHPSPLMGGFGLKHPPPQILIKNTPVPANPPAEFSATKFASFITQYSTGQVSVEIEWELQKENSKRWNPEVQYTSNYAKSANVDFTVDNNGLYTEPRPIGTRYLTRPL

SEQ ID NO: 4800 - protein, 736 aa, Adeno-associated virus
MAADGYLPDWLEDNLSEGIREWWDLKPGAPKPKANQQKQDDGRGLVLPGYKYLGPFNGLDKGEPVNAADAAALEHDKAYDQQLKAGDNPYLRYNHADAEFQERLQEDTSFGGNLGRAVFQAKKRVLEPFGLVEEGAKTAPGKKRPVEQSPQEPDSSSGIGKTGQQPAKKRLNFGQTGDSESVPDPQPLGEPPATPAAVGPTTMASGGGAPMADNNEGADGVGNASGNWHCDSTWLGDRVITTSTRTWALPTYNNHLYKQISSASTGASNDNHYFGYSTPWGYFDFNRFHCHFSPRDWQRLINNNWGFRPKRLNFKLFNIQVKEVTTNDGVTTIANNLTSTVQVFSDSEYQLPYVLGSAHQGCLPPFPADVFMIPQYGYLTLNNGSQAVGRSSFYCLEYFPSQMLRTGNNFTFSYTFEDVPFHSSYAHSQSLDRLMNPLIDQYLYYLNRTQNQSGSAQNKDLLFSRGSPAGMSVQPKNWLPGPCYRQQRVSKTKTDNNNSNFTWTGASKYNLNGRESIINPGTAMASHKDDEDKFFPMSGVMIFGKESAGASNTALDNVMITDEEEIKATNPVATERFGTVAVNLQSSSTDPATGDVHVMGALPGMVWQDRDVYLQGPIWAKIPHTDGHFHPSPLMGGFGLKHPPPQILIKNTPVPANPPAEFSATKFASFITQYSTGQVSVEIEWELQKENSKRWNPEVQYTSNYAKSANVDFTVDNNGLYTEPRPIGTRYLTRPL

SEQ ID NO: 4801 - protein, 736 aa, Adeno-associated virus
MAADGYLPDWLEDNLSEGIREWWDLKPGAPKPKANQQKQDDGRGLVLPGYKYLGPFNGLDKGEPVNAADAAALEHDKAYDQQLKAGDNPYLRYNHADAEFQERLQEDTSFGGNLGRAVFQAKKRVLEPLGLVEEGAKTAPGKKRPVEQSPQEPDSSSGIGKTGQQPAKKRLNFGQTGDSESVPDPQPLGEPPATPAAVGPTTMASGGGAPMADNNEGADGVGNASGNWHCDSTWLGDRVITTSTRTWALPTYNNHLYKQISSASTGASNDNHYFGYSTPWGYFDFNRFHCHFSPRDWQRLINNNWGFRPKRLNFKLFNIQVKEVTTNDGVTTIANNLTSTVQVFSDSEYQLPYVLGSAHQGCLPPFPADVFMIPQYGYLTLNNGSQAVGRSSFYCLEYFPSQMLRTGNNFTFSYTFEDVPFHSSYAHSQSLDRLMNPLIDQYLYYLNRTQNQSGSAQNKDLLFSRGSPAGMSVQPKNWLPGPCYRQQRVSKTKTDNNNSNFTWTGASKYNLNGRESIINPGTAMASHKDDEDKFFPMSGVMIFGKESAGASNTALDNVMITDEEEIKATNPVATERFGTVAVNLQSSSTDPATGDVHVMGALPGMVWQDRDVYLQGPIWAKIPHTDGHFHPSPLMGGFGLKHPPPQILIKNTPVPANPPAEFSATKFASFITQYSTGQVSVEIEWELQKENSKRWNPEVQYTSNYAKSANVDFTVDNNGLYTEPRPIGTRYLTRPL

SEQ ID NO: 4802 - protein, 736 aa, Adeno-associated virus
MAADGYLPDWLEDNLSEGIREWWDLKPGAPKPKANQQKQDDGRGLVLPGYKYLGPFNGLDKGEPVNAADAAALEHDKAYDQQLKAGDNPYLRYNHADAEFQERLQEDTSFGGNLGRAVFQAKKRVLEPLGLVEEGAKTAPGKKRPVEQSPQEPDSSSGIGKTGQQPAKKRLNFGQTGDSESVPDPQPLGEPPATPAAVGPTTMASGGGAPMADNNEGADGVGNASGNWHCDSTWLGDRVITTSTRTWALPTYNNHLYKQISSASTGASNDNHYFGYSTPWGYFDFNRFHCHFSPRDWQRLINNNWGFRPKRLNFKLFNIQVKEVTTNDGVTTIANNLTSTVQVFSDSEYQLPYVLGSAHQGCLPPFPADVFMIPQYGYLTLNNGSQAVGRSSFYCLEYFPSQMLRTGNNFTFSYTFEDVPFHSSYAHSQSLDRLMNPLIDQYLYYLNRTQNQSGSAQNKDLLFSRGSPAGMSVQPKNWLPGPCYRQQRVSKTKTDNNNSNFTWTGASKYNLNGRESIINPGTAMASHKDDKDKFFPMSGVMIFGKESAGASNTALDNVMITDEEEIKATNPVATERFGTVAVNLQSSSTDPATGDVHVMGALPGMVWQDRDVYLQGPIWAKIPHTDGHFHPSPLMGGFGLKHPPPQILIKNTPVPANPPAEFSATKFASFITQYSTGQVSVEIEWELQKENSKRWNPEVQYTSNYAKSANVDFTVDNNGLYTEPRPIGTRYLTRPL

SEQ ID NO: 4803 - protein, 728 aa, Adeno-associated virus
MAADGYLPDWLEGNLSEGIREWWDLKPGAPKPKANQQKQDDGRGLVLPGYRYLGPFNGLDKGEPVNEADAAALEHDKAYDKQLEQGDNPYLKYNHADAEFQERLQEDTSFGGNLGRAVFQAKKRVLEPLGLVEEGAKTAPGKKRPIESPDSSTGIGKNGQPPAKKKLNFGQTGDSESVPDPQPLGEPPAAPSGLGSGTMAAGGGAPMADNNEGADGVGNASGNWHCDSTWLGDRVITTSTRTWALPTYNNHLYKQISSQSGATNDNHFFGYSTPWGYFDFNRFHCHFSPRDWQRLINNNWGFRPRKLRFKLFNIQVKEVTTNDGVTTIANNLTSTIQVFSDSEYQLPYVLGSAHQGCLPPFPADVFMIPQYGYLTLNNGSQSVGRSSFYCLEYFPSQMLRTGDNFEFSYTFEEVPFHSSYAHSQSLDRLMNPLIDQYLYYLARTQSTTGSTRELQFHQAGPNTMAEQSKNWLPGPCYRQQRLSKNIDSNNNSNFAWTGATKYHLNGRNSLTNPGVAMATNKDDEDQFFPINGVLVFGKTGAANKTTLENVLMTSEEEIKTTNPVATEEYGVVSSNLQSSTAGPQTQTVNSQGALPGMVWQNRDVYLQGPIWAKIPHTDGNFHPSPLMGGFGLKHPPPQILIKNTPVPANPPEVFTPAKFASFITQYSTGQVSVEIEWELQKENSKRWNPEIQYTSNYAKSNNVEFAVNNEGVYTEPRPIGTRYLTRNL

SEQ ID NO: 4804 - DNA, 2211 bp, Adeno-associated virus
  source 1..2211: mol_type = genomic DNA
atggctgccgatggttatcttccagattggctcgaggacaaccttagtgaaggaattcgcgagtggtgggctttgaaacctggagcccctcaacccaaggcaaatcaacaacatcaagacaacgctcgaggtcttgtgcttccgggttacaaataccttggacccggcaacggactcgacaagggggagccggtcaacgcagcagacgcggcggccctcgagcacgacaaggcctacgaccagcagctcaaggccggagacaacccgtacctcaagtacaaccacgccgacgccgagttccaggagcggctcaaagaagatacgtcttttgggggcaacctcgggcgagcagtcttccaggccaaaaagaggcttcttgaacctcttggtctggttgaggaagcggctaagacggctcctggaaagaagaggcctgtagagcagtctcctcaggaaccggactcctccgcgggtattggcaaatcgggtgcacagcccgctaaaaagagactcaatttcggtcagactggcgacacagagtcagtcccagaccctcaaccaatcggagaacctcccgcagccccctcaggtgtgggatctcttacaatggcttcaggtggtggcgcaccagtggcagacaataacgaaggtgccgatggagtgggtagttcctcgggaaattggcattgcgattcccaatggctgggggacagagtcatcaccaccagcacccgaacctgggccctgcccacctacaacaatcacctctacaagcaaatctccaacagcacatctggaggatcttcaaatgacaacgcctacttcggctacagcaccccctgggggtattttgacttcaacagattccactgccacttctcaccacgtgactggcagcgactcatcaacaacaactggggattccggcctaagcgactcaacttcaagctcttcaacattcaggtcaaagaggttacggacaacaatggagtcaagaccatcgccaataaccttaccagcacggtccaggtcttcacggactcagactatcagctcccgtacgtgctcgggtcggctcacgagggctgcctcccgccgttcccagcggacgttttcatgattcctcagtacgggtatctgacgcttaatgatggaagccaggccgtgggtcgttcgtccttttactgcctggaatatttcccgtcgcaaatgctaagaacgggtaacaacttccagttcagctacgagtttgagaacgtacctttccatagcagctacgctcacagccaaagcctggaccgactaatgaatccactcatcgaccaatacttgtactatctctcaaagactattaacggttctggacagaatcaacaaacgctaaaattcagtgtggccggacccagcaacatggctgtccagggaagaaactacatacctggacccagctaccgacaacaacgtgtctcaaccactgtgactcaaaacaacaacagcgaatttgcttggcctggagcttcttcttgggctctcaatggacgtaatagcttgatgaatcctggacctgctatggccagccacaaagaaggagaggaccgtttctttcctttgtctggatctttaatttttggcaaacaaggaactggaagagacaacgtggatgcggacaaagtcatgataaccaacgaagaagaaattaaaactactaacccggtagcaacggagtcctatggacaagtggccacaaaccaccagagtgcccaagcacaggcgcagaccggctgggttcaaaaccaaggaatacttccgggtatggtttggcaggacagagatgtgtacctgcaaggacccatttgggccaaaattcctcacacggacggcaactttcacccttctccgctgatgggagggtttggaatgaagcacccgcctcctcagatcctcatcaaaaacacacctgtacctgcggatcctccaacggccttcaacaaggacaagctgaactctttcatcacccagtattctactggccaagtcagcgtggagatcgagtgggagctgcagaaggaaaacagcaagcgctggaacccggagatccagtacacttccaactattacaagtctaataatgttgaatttgctgttaatactgaaggtgtatatagtgaaccccgccccattggcaccagatacctgactcgtaatctgtaa

SEQ ID NO: 4805 - protein, 736 aa, Adeno-associated virus
MAADGYLPDWLEDNLSEGIREWWALKPGAPQPKANQQHQDNARGLVLPGYKYLGPGNGLDKGEPVNAADAAALEHDKAYDQQLKAGDNPYLKYNHADAEFQERLKEDTSFGGNLGRAVFQAKKRLLEPLGLVEEAAKTAPGKKRPVEQSPQEPDSSAGIGKSGAQPAKKRLNFGQTGDTESVPDPQPIGEPPAAPSGVGSLTMASGGGAPVADNNEGADGVGSSSGNWHCDSQWLGDRVITTSTRTWALPTYNNHLYKQISNSTSGGSSNDNAYFGYSTPWGYFDFNRFHCHFSPRDWQRLINNNWGFRPKRLNFKLFNIQVKEVTDNNGVKTIANNLTSTVQVFTDSDYQLPYVLGSAHEGCLPPFPADVFMIPQYGYLTLNDGSQAVGRSSFYCLEYFPSQMLRTGNNFQFSYEFENVPFHSSYAHSQSLDRLMNPLIDQYLYYLSKTINGSGQNQQTLKFSVAGPSNMAVQGRNYIPGPSYRQQRVSTTVTQNNNSEFAWPGASSWALNGRNSLMNPGPAMASHKEGEDRFFPLSGSLIFGKQGTGRDNVDADKVMITNEEEIKTTNPVATESYGQVATNHQSAQAQAQTGWVQNQGILPGMVWQDRDVYLQGPIWAKIPHTDGNFHPSPLMGGFGMKHPPPQILIKNTPVPADPPTAFNKDKLNSFITQYSTGQVSVEIEWELQKENSKRWNPEIQYTSNYYKSNNVEFAVNTEGVYSEPRPIGTRYLTRNL

SEQ ID NO: 4806 - DNA, 2460 bp, Adeno-associated virus
  source 1..2460: mol_type = genomic DNA
ggtaattcctccggaaattggcattgcgattccacatggctgggcgaccgagtcattaccaccagcacccggacttgggccctgcccacctacaacaaccacctctacaagcaaatctccagccaatcgggtgccaccaacgacaaccactacttcggctacagcaccccttgggggtattttgatttcaacagattccactgccatttctcaccacgtgactggcagcgactcatcaacaacaactggggattcatggctgccgatggttatcttccagattggctcgaggacactctctctgaaggaatcagacagtggtggaagctcaaacctggcccaccaccgccgaaacctaaccaacaacaccgggacgacagtaggggtcttgtgcttcctgggtacaagtacctcggacccttcaacggactcgacaaaggagagccggtcaacgaggcagacgccgcggccctcgagcacgacaaagcctacgaccaccagctcaagcaaggggacaacccgtacctcaaatacaaccacgcggacgctgaatttcaggagcgtcttcaagaagatacgtctttcgggggcaacctcgggcgagcagtcttccaggccaaaaagagggtactcgagcctcttggtctggttgaggaagctgttaagacggctcctggaaaaaagagacctatagagcagtctcctgcagaaccggactcttcctcgggcatcggcaaatcaggccagcagcccgctaagaaaagactcaattttggtcagactggcgacacagagtcagtcccagaccctcaaccaatcggagaaccccccgcagccccctctggtgtgggatctaatacaatggcttcaggcggtggggcaccaatggcagacaataacgaaggcgccgacggagtgggtaattcctcgggaaattggcattgcgattccacatggatgggcgacagagttatcaccaccagcacaagaacctgggccctccccacctacaataatcacctctacaagcaaatctccagcgaatcgggagccaccaacgacaaccactacttcggctacagcaccccctgggggtattttgactttaacagattccactgtcacttctcaccacgtgactggcagcgactcatcaacaacaactggggatttagacccaagaaactcaatttcaagctcttcaacatccaagtcaaggaggtcacgcagaatgatggaaccacgaccatcgccaataaccttaccagcacggtgcaggtcttcacagactctgagtaccagctgccctacgtcctcggttcggctcaccagggctgccttccgccgttcccagcagacgtcttcatgattcctcagtacggctacttgactctgaacaatggcagccaagcggtaggacgttcttcattctactgtctagagtattttccctctcagatgctgaggacgggaaacaacttcaccttcagctacacttttgaagacgtgcctttccacagcagctacgcgcacagccagagtctggatcggctgatgaatcctctcattgaccagtacctgtattacctgagcaaaactcagggtacaagtggaacaacgcagcaatcgagactgcagttcagccaagctgggcctagctccatggctcagcaggccaaaaactggctaccgggacccagctaccgacagcagcgaatgtctaagacggctaatgacaacaacaacagtgaatttgcttggactgcagccaccaaatattacctgaatggaagaaattctctggtcaatcccgggcccccaatggccagtcacaaggacgatgaggaaaagtatttccccatgcacggaaatctcatctttggaaaacaaggcacaggaactaccaatgtggacattgaatcagtgcttattacagacgaagaagaaatcagaacaactaatcctgtggctacagaacaatacggacaggttgccaccaaccatcagagtcagaacaccacagcttcctatggaagtgtggacagccagggaatcttacctggaatggtgtggcaggaccgcgatgtctatcttcaaggtcccatttgggccaaaactcctcacacggacggacactttcatccttctccgctcatgggaggctttggactgaaacaccctcctccccagatcctgatcaaaaacacacctgtgccagcgaatcccgcgaccactttcactcctggaaagtttgcttcgttcattacccagtattccaccggacaggtcagcgtggaaatagagtgggagctgcagaaagaaaacagcaaacgctggaacccagaaattcagtacacctccaactacaacaagtcggtgaatgtggagtttaccgtggacgcaaacggtgtttattctgaaccccgccctattggcactcgttaccttacccggaacttg

SEQ ID NO: 4807 - DNA, 3123 bp, Adeno-associated virus
  source 1..3123: mol_type = genomic DNA
gaattcgccctttctacggctgcgtcaactggaccaatgaaaactttcccttcaacgattgcgtcgacaagatggtgatctggtgggaggagggaaagatgaccgccaaggtcgtggaatctgccaaagccattctgggtggaggcaaggttcgtgtggaccagaaatgcaagtcttcggcccagatcgacccgactccggtgattgtcacctctaacaccaacatgtgcgccgtgattgacggaaactcgaccaccttcgagcaccagcagccgttgcaagaccggatgttcaaatttgaacttacccgccgtttggatcatgactttgggaaggtcaccaagcaggaagtcaaagactttttccggtgggctcaagatcacgtgactgaggtggagcatgagttctacgtcaaaaagggtggagccaagaaaaggcccgcccccgatgatgtatatataaatgagcccaagcgggcgcgcgagtcagttgcgcagccatcgacgtcagacgcggaagcttcgataaactacgcggacaggtaccaaaacaaatgttctcgtcacgtgggcatgaatctgatgctgtttccctgtcgacaatgcgaaagaatgaatcagaattcaaatatctgcttcacacacgggcaaaaagactgtttggaatgctttcccgtgtcagaatctcaacccgtttctgtcgtcagaaaaacgtatcagaaactttgttacattcatcatatcatgggaaaagtaccagacgcctgcactgcctgcgacctggtaaatgtggacttggatgactgtatttctgagcaataaatgacttaaatcaggtatggctgctgacggttatcttccagattggctcgaggacactctctctgaaggaatcagacagtggtggaagctcaaacctggcccaccaccgccgaaacctaaccaacaacaccgggacgacagtaggggtcttgtgcttcctgggtacaagtacctcggacccttcaacggactcgacaaaggagagccggtcaacgaggcagacgccgcggccctcgagcacgacaaagcctacgaccaccagctcaagcaaggggacaacccgtacctcaaatacaaccacgcggacgctgaatttcaggagcgtcttcaagaagatacgtctttcgggggcaacctcgggcgagcagtcttccaggccaaaaagagggtactcgagcctcttggtctggttgaggaagctgttaagacggctcctggaaaaaagagacctatagagcagtctcctgcagaaccggactcttcctcgggcatcggcaaatcaggccagcagcccgctaagaaaagactcaattttggtcagactggcgacacagagtcagtcccaggccctcaaccaatcggagaaccccccgcagccccctctggtgtgggatctaatacaatggcttcaggcggtggggcaccaatggcagacaataacgaaggcgccgacggagtgggtaattcctcgggaaattggcattgcgattccacatggatgggcgacagagttatcaccaccagcacaagaacctgggccctccccacctacaataatcacctctacaagcaaatctccagcgaatcgggagccaccaacgacaaccactacttcggctacagcaccccctgggggtattttgactttaacagattccactgtcacttctcaccacgtgactggcagcgactcatcaacaacaactggggatttagacccaagaaactcaatttcaagctcttcaacatccaagtcaaggaggtcacgcagaatgatggaaccacgaccatcgccaataaccttaccagcgcggtgcaggtcttcacagactctgagtaccagctgccctacgtcctcggttcggctcaccagggctgccttccgccgttcccagcagacgtcttcatgattcctcagtacggctacttgactctgaacaatggcagccaagcggtaggacgttcttcattctactgtctagagtattttccctctcagatgctgaggacgggaaacaacttcaccttcagctacacttttgaagacgtgcctttccacagcagctacgcgcacagccagagtctggatcggctgatgaatcctctcattgaccagtacctgtattacctgagcaaaactcagggtacaagtggaacaacgcagcaatcgagactgcagttcagccaagctgggcctagctccatggctcagcaggccaaaaactggctaccgggacccagctaccgacagcagcgaatgtctaagacggctaatgacaacaacaacagtgaatttgcttggactgcagccaccaaatattacctgaatggaagaaattctctggtcaatcccgggcccccagtggccagtcacaaggacgatgaggaaaagtatttccccatgcacggaaatctcatctttggaaaacaaggcacaggaactaccaatgtggacattgaatcagtgcttattacagacgaagaagaaatcagaacaactaatcctgtggctacagaacaatacggacaggttgccaccaaccatcagagtcagaacaccacagcttcctatggaagtgtggacagccagggaatcttacctggaatggtgtggcaggaccgcgatgtctatcttcaaggtcccatttgggccaaaactcctcacacggacggacactttcatccttctccgctcatgggaggctttggactgaaacaccctcctccccagatcctgatcaaaaacacacctgtgccagcgaatcccgcgaccactttcactcctggaaagtttgcttcgttcattacccagtattccacctgacaggtcagcgtggaaatagagtgggagctgcagaaagaaaacagcaaacgctggaacccagaaattcagtacacctccaactacaacaagtcggtgaatgtggagtttaccgtggacgcaaacggtgtttattctgaaccccgccctattggcactcgttaccttacccggaacttgtaatttcctgttaatgaataagccgatttatgcgtttcagttgaactttggtctctgcgaagggcgaattcgtttaaacct

SEQ ID NO: 4808 - protein, 735 aa, Adeno-associated virus
MAADGYLPDWLEDTLSEGIRQWWKLKPGPPPPKPNQQHRDDSRGLVLPGYKYLGPFNGLDKGEPVNEADAAALEHDKAYDHQLKQGDNPYLKYNHADAEFQERLQEDTSFGGNLGRAVFQAKKRVLEPLGLVEEAVKTAPGKKRPIEQSPAEPDSSSGIGKSGQQPAKKRLNFGQTGDTESVPGPQPIGEPPAAPSGVGSNTMASGGGAPMADNNEGADGVGNSSGNWHCDSTWMGDRVITTSTRTWALPTYNNHLYKQISSESGATNDNHYFGYSTPWGYFDFNRFHCHFSPRDWQRLINNNWGFRPKKLNFKLFNIQVKEVTQNDGTTTIANNLTSAVQVFTDSEYQLPYVLGSAHQGCLPPFPADVFMIPQYGYLTLNNGSQAVGRSSFYCLEYFPSQMLRTGNNFTFSYTFEDVPFHSSYAHSQSLDRLMNPLIDQYLYYLSKTQGTSGTTQQSRLQFSQAGPSSMAQQAKNWLPGPSYRQQRMSKTANDNNNSEFAWTAATKYYLNGRNSLVNPGPPVASHKDDEEKYFPMHGNLIFGKQGTGTTNVDIESVLITDEEEIRTTNPVATEQYGQVATNHQSQNTTASYGSVDSQGILPGMVWQDRDVYLQGPIWAKTPHTDGHFHPSPLMGGFGLKHPPPQILIKNTPVPANPATTFTPGKFASFITQYSTGQVSVEIEWELQKENSKRWNPEIQYTSNYNKSVNVEFTVDANGVYSEPRPIGTRYLTRNL

SEQ ID NO: 4809 - DNA, 3123 bp, Adeno-associated virus
  source 1..3123: mol_type = genomic DNA
gaattcgccctttctacggctgcgtcaactggaccaatgaaaactttcccttcaacgattgcgtcgacaagatggtgatctggtgggaggagggaaagatgaccgccaaggtcgtggaatctgccaaagccattctgggtggaagcaaggttcgtgtggaccagaaatgcaagtcttcggcccagatcgacccgactccggtgattgtcacctctaacaccaacatgtgcgccgtgattgacggaaactcgaccaccttcgagcaccagcagccgttgcaagaccggatgttcaaatttgaacttacccgccgtttggatcatgactttgggaaggtcaccaagcaggaagtcaaagactttttccggtgggctcaagatcacgtgactgaggtggagcatgagttctacgtcaaaaagggtggagccaagaaaaggcccgcccccgatgatgtatatataaatgagcccaagcgggcgcgcgagtcagttgcgcagccatcgacgtcagacgcggaagcttcgataaactacgcgggcaggtaccaaaacaaatgttctcgtcacgtgggcatgaatctgatgctgtttccctgtcgacaatgcgaaagaatgaatcagaattcaaatatctgcttcacacacgggcaaaaagactgtttggaatgctttcccgtgtcagaatctcaacccgtttctgtcgtcagaaaaacgtatcagaaactttgttacattcatcatatcatgggaaaagaaccagacgcctgcactgcctgcgacctggtaaatgtggacttggatgactgtatttctgagcaataaatgacttaaatcaggtatggctgctgacggttatcttccagattggctcgaggacactctctctgaaggaatcagacagtggtggaagctcaaacctggcccaccaccgccgaaacctaaccaacaacaccgggacgacagtaggggtcttgtgcttcctgggtacaagtacctcggacccttcaacggactcgacaaaggagagccggtcaacgaggcagacgccgcggccctcgagcacgacaaagcctacgaccaccagctcaagcaaggggacaacccgtacctcaaatacaaccacgcggacgctgaatttcaggagcgtcttcaagaagatacgtctttcgggggcaacctcgggcgagcagtcttccaggccaaaaagagggtactcgagcctcttggtctggttgaggaagctgttaagacggctcctggaaaaaagagacctatagagcagtctcctgcagaaccggactcttcctcgggcatcggcgaatcaggccagcagcccgctaagaaaagactcaattttggtcagactggcgacacagagtcagtcccagaccctcaaccaatcggagaaccccccgcagccccctctggtgtgggatctaatacaatggcttcaggcggtggggcaccaatggcagacgataacgaaggcgccgacggagtgggtaattcctcgggaaattggcattgcgattccacatggatgggcgacagagttatcaccaccagcacaagaacctgggccctccccacctacaataatcacctctacaagcaaatctccagcgaatcgggagccaccaacgacaaccactacttcggctacagcaccccctgggggtattttgactttaacagattccactgtcacttctcaccacgtgactggcagcgactcatcaacaacaactggggatttagacccaagaaactcaatttcaagctcttcaacatccaagtcaaggaggtcacgcagaatgatggaaccacgaccatcgccaataaccttaccagcacggtgcaggtcttcacagactctgagtaccagctgccctacgtcctcggttcggctcaccagggctgccttccgccgttcccagcagacgtcttcatgattcctcagtacggctacttgactctgaacaatggcagccaagcggtaggacgttcttcattctactgtctagagtattttccctctcagatgctgaggacgggaaacaacttcaccttcagctacacttttgaagacgtgcctttccacagcagctacgcgcacagccagagtctggatcggctgatgaatcctctcattgaccagtacctgtattacctgagcaaaactcagggtacaagtggaacaacgcagcaatcgagactgcagttcagccaagctgggcctagctccatggctcagcaggccaaaaactggctaccgggacccagctaccgacagcagcgaatgtctaagacggctaatgacaacaacaacagtgaatttgcttggactgcagccaccaaatattacctgaatggaagaaattctctggtcaatcccgggcccccaatggccagtcacaaggacgatgaggaaaagtatttccccatgcacggaaatctcatctttggaaaacaaggcacaggaactaccaatgtggacattgaatcagtgcttattacagacgaagaagaaatcagaacaactaatcctgtggctacagaacaatacggacaggttgccaccaaccatcagagtcaggacaccacagcttcctatggaagtgtggacagccagggaatcttacctggaatggtgtggcaggaccgcgatgtctatcttcaaggtcccatttgggccaaaactcctcacacggacggacactttcatccttctccgctcatgggaggctttggactgaaacaccctcctccccagatcctgatcaaaaacacacctgtgccagcgaatcccgcgaccactttcactcctggaaagtttgcttcgttcattacccagtattccaccggacaggtcagcgtggaaatagagtgggagctgcagaaagaaaacagcaaacgctggaacccagaaattcagtacacctccaactacaacaagtcggtgaatgtggagtttaccgtggacgcaaacggtgtttattctgaaccccgccctattggcactcgttaccttacccggaacttgtaatttcctgttaatgaataaaccgatttatgcgtttcagttgaactttggtctctgcgaagggcgaattcgcggccgcta

SEQ ID NO: 4810 - protein, 735 aa, Adeno-associated virus
MAADGYLPDWLEDTLSEGIRQWWKLKPGPPPPKPNQQHRDDSRGLVLPGYKYLGPFNGLDKGEPVNEADAAALEHDKAYDHQLKQGDNPYLKYNHADAEFQERLQEDTSFGGNLGRAVFQAKKRVLEPLGLVEEAVKTAPGKKRPIEQSPAEPDSSSGIGESGQQPAKKRLNFGQTGDTESVPDPQPIGEPPAAPSGVGSNTMASGGGAPMADDNEGADGVGNSSGNWHCDSTWMGDRVITTSTRTWALPTYNNHLYKQISSESGATNDNHYFGYSTPWGYFDFNRFHCHFSPRDWQRLINNNWGFRPKKLNFKLFNIQVKEVTQNDGTTTIANNLTSTVQVFTDSEYQLPYVLGSAHQGCLPPFPADVFMIPQYGYLTLNNGSQAVGRSSFYCLEYFPSQMLRTGNNFTFSYTFEDVPFHSSYAHSQSLDRLMNPLIDQYLYYLSKTQGTSGTTQQSRLQFSQAGPSSMAQQAKNWLPGPSYRQQRMSKTANDNNNSEFAWTAATKYYLNGRNSLVNPGPPMASHKDDEEKYFPMHGNLIFGKQGTGTTNVDIESVLITDEEEIRTTNPVATEQYGQVATNHQSQDTTASYGSVDSQGILPGMVWQDRDVYLQGPIWAKTPHTDGHFHPSPLMGGFGLKHPPPQILIKNTPVPANPATTFTPGKFASFITQYSTGQVSVEIEWELQKENSKRWNPEIQYTSNYNKSVNVEFTVDANGVYSEPRPIGTRYLTRNL

SEQ ID NO: 4811 - DNA, 3113 bp, Adeno-associated virus
  source 1..3113: mol_type = genomic DNA
gaattcgccctttctacggctgcgtcaactggaccaatgaaaactttcccttcaacgattgcgtcgacaagatggtgatctggtgggaggagggaaagatgaccgccaaggtcgtggaatctgccaaagccattctgggtggaagcaaggttcgtgtggaccagaaatgcaagtcttcggcccagatcgacccgactccggtgattgtcacctctaacaccaacatgtgcgccgtgattgacggaaactcgaccaccttcgagcaccagcagccgttgcaagaccggatgttcaaatttgaacttacccgccgtttggatcatgactttgggaaggtcaccaagcaggaagtcaaagactttttccggtgggctcaagatcacgtgactgaggtggagcatgagttctacgtcaaaaagggtggagccaagaaaaggcccgcccccgatgatgtatatataaatgagcccaagcgggcgcgcgagtcagttgcgcagccatcgacgtcagacgcggaagcttcgataaactacgcggacaggtaccaaaacaaatgttctcgtcacgtgggcatgaatctgatgctgtttccctgtcgacaatgcgaaagaatgaatcagaattcaaatatctgcttcacacacgggcaaaaagactgtttggaatgctttcccgtgtcagaatctcaacccgttcctgtcgtcagaaaaacgtatcagaaactttgttacattcatcatatcatgggaaaagtaccagacgcctgcactgcctgcgacctggtaaatgtggacttggatgactgtatttctgagcaataaatgacttaaatcaggtatggctgctgacggttatcttccagattggctcgaggacactctctctgaaggaatcagacagtggtggaagctcaaacctggcccaccaccgccgaaacctaaccaacaacaccgggacgacagtaggggtcttgtgcttcctgggtacaagtacctcggacccttcaacggactcgacaaaggagagccggtcaacgaggcagacgccgcggccctcgagcacgacaaagcctacgaccaccagctcaagcaaggggacaacccgtacctcaaatacaaccacgcggacgctgaatttcaggagcgtcttcaagaagatacgtctttcgggggcaacctcgggcgagcagtcttccaggccaaaaagagggtactcgagcctcttggtctggttgaggaagctgttaagacggctcctggaaaaaagagacctatagagcagtctcctgcagaaccggactcttcctcgggcatcggcaaatcaggccagcagcccgctaagaaaagactcaattttggtcagactggcgacacagagtcagtcccagaccctcaaccaatcggagaaccccccgcagccccctctggtgtgggatctaatacaatggcttcaggcggtggggcaccaatggcagacaataacgaaggcgccgacggagtgggtaattcctcgggaaattggcattgcgattccacatggatgggcgacagagttatcaccaccagcacaagaacctgggccctccccacctacaataatcacctctacaagcaaatctccagcgaatcgggagccaccaacgacaaccactacttcggctacagcaccccctgggggtattttgactttaacagattccactgtcacttctcaccacgtgactggcagcgactcatcaataacaactggggatttagacccaagaaactcaatttcaagctcttcaacatccaagtcaaggaggtcacgcagaatgatggaaccacgaccatcgccaataaccttaccagcacggtgcaggtcttcacagactctgagtaccagctgccctacgtcctcggttcggctcaccagggctgccttccgccgttcccagcagacgtcttcatgattcctcagtacggctacttgactctgaacaatggcagccaagcggtaggacgttcttcattctactgtctagagtattttccctctcagatgctgaggacgggaaacaacttcaccttcagctacacttttgaagacgtgcctttccacagcagctacgcgcacagccagagtctggatcggctgatgaatcctctcattgaccagtacctgtattacctgagcaaaactcagggtacaagtggaacaacgcagcaatcgagactgcagttcaaccaagctgggcctagctccatggctcagcaggccaaaaactggctaccgggacccagctaccgacagcagcgaatgtctaagacggctaatgacaacaacaacagtgaatttgcttggactgcagccaccaaatattacccgaatggaagaaattctctggtcaatcccgggcccccaatggccagtcacaaggacgatgaggaaaagtatttccccatgcacggaaatctcatctttggaaaacaaggcacaggaactaccaatgtggacattgaatcagtgcttattacagacgaagaagaaatcagaacgactaatcctgtggctacagaacaatacggacaggttgccaccaaccgtcagagtcagaacaccacagcttcctatggaagtgtggacagccagggaatcttacctggaatggtgtggcaggaccgcgatgtctatcttcaaggtcccatttgggccaaaactcctcacacggacggacactttcatccttctccgctcatgggaggctttggactgaaacaccctcctccccagatcctgatcaaaaacacacctgtgccagcgaatcccgcgaccactttcactcctggaaagtttgcttcgttcattacccagtattccaccggacaggtcagcgtggaaatagagtgggagctgcagaaagaaaacagcaaacgctggaacccggaaattcagtacacctccaactacaacaagtcggtgaatgtggagtttaccgtggacgcaaacggtgtttattctgaaccccgccctattggcactcgttaccttacccggaacttgtaatttcctgttaatgaataaaccgatttatgcgtttcagttgaactttggtctctgcgaagggcgaattc

SEQ ID NO: 4812 - protein, 735 aa, Adeno-associated virus
MAADGYLPDWLEDTLSEGIRQWWKLKPGPPPPKPNQQHRDDSRGLVLPGYKYLGPFNGLDKGEPVNEADAAALEHDKAYDHQLKQGDNPYLKYNHADAEFQERLQEDTSFGGNLGRAVFQAKKRVLEPLGLVEEAVKTAPGKKRPIEQSPAEPDSSSGIGKSGQQPAKKRLNFGQTGDTESVPDPQPIGEPPAAPSGVGSNTMASGGGAPMADNNEGADGVGNSSGNWHCDSTWMGDRVITTSTRTWALPTYNNHLYKQISSESGATNDNHYFGYSTPWGYFDFNRFHCHFSPRDWQRLINNNWGFRPKKLNFKLFNIQVKEVTQNDGTTTIANNLTSTVQVFTDSEYQLPYVLGSAHQGCLPPFPADVFMIPQYGYLTLNNGSQAVGRSSFYCLEYFPSQMLRTGNNFTFSYTFEDVPFHSSYAHSQSLDRLMNPLIDQYLYYLSKTQGTSGTTQQSRLQFNQAGPSSMAQQAKNWLPGPSYRQQRMSKTANDNNNSEFAWTAATKYYPNGRNSLVNPGPPMASHKDDEEKYFPMHGNLIFGKQGTGTTNVDIESVLITDEEEIRTTNPVATEQYGQVATNRQSQNTTASYGSVDSQGILPGMVWQDRDVYLQGPIWAKTPHTDGHFHPSPLMGGFGLKHPPPQILIKNTPVPANPATTFTPGKFASFITQYSTGQVSVEIEWELQKENSKRWNPEIQYTSNYNKSVNVEFTVDANGVYSEPRPIGTRYLTRNL

SEQ ID NO: 4813 - DNA, 3122 bp, Adeno-associated virus
  source 1..3122: mol_type = genomic DNA
agcggccgcgaattcgccctttctacggctgcgtcaactggaccaatgaaaactttcccttcaacgattgcgtcgacaagatggtgatctggtgggaggagggaaagatgaccgccaaggtcgtggaatctgccaaagccattctgggtggaagcaaggttcgtgtggaccagaaatgcaggtcttcggcccagatcgacccgactccggtgattgtcacctctaacaccaacatgtgcgccgtgattgacggaaactcgaccaccttcgagcaccagcagccgttgcaagaccggatgttcaaatttgaacttacccgccgtttggatcatgactttgggaaggtcaccaagcaggaagtcaaagactttttccggtgggctcaagatcacgtgactgaggtggagcatgagttctacgtcaaaaagggtggagccaagaaaaggcccgcccccgatgatgtatatataaatgagcccaagcgggcgcgcgagtcagttgcgcagccatcgacgtcagacgcggaagcttcgataaactacgcggacaggtaccaaaacaaatgttctcgtcacgtgggcatgaatctgatgctgtttccctgtcgacaatgcgaaagaatgaatcagaattcaaatatctgcttcacacacgggcaaaaagactgtttggaatgctttcccgtgtcagaatctcaacccgtttctgtcgtcagaaaaacgtatcagaaactttgttacattcatcatatcatgggaaaagtaccagacgcctgcactgcctgcgacctggtaaatgtggacttggatgactgtatttctgagcaataaatgacttaaatcaggtatggctgctgacggttatcttccagattggctcgaggacactctctctgaaggaatcagacagtggtggaagctcaaacctggcccaccaccgccgaaacctaaccaacaacaccgggacgacagtaggggtcttgtgcttcctgggtacaagtacctcggacccttcaacggactcgacaaaggagagccggtcaacgaggcagacgccgcggccctcgagcacgacaaagcctacgaccaccagctcaagcaaggggacaacccgtacctcaaatacaaccacgcggacgctgaatttcaggagcgtcttcaagaagatacgtctttcgggggcaacctcgggcgagcagtcttccaggccaaaaagagggtactcgagcctcttggtctggttgaggaagctgttaagacggctcctggaaaaaagagacctatagagcagtctcctgcagaaccggactcttcctcgggcatcggcaaatcaggccagcagcccgctaagaaaagactcaattttggtcagactggcgacacagagtcagtcccagaccctcaaccaatcggagaaccccccgcagccccctctggtgtgggatctaatacaatggcttcaggcggtggggcaccaatggcagacaataacgaaggcgccgacggagtgggtaattcctcgggaaattggcattgcgattccacatggatgggcgacagagttatcaccaccagcacaagaacctgggccctccccacctacaataatcgcctctacaagcaaatctccagcgaatcgggagccaccaacgacaaccactacttcggctacagcaccccctgggggtattttgactttaacagattccactgtcacttctcaccacgtgactggcagcgactcatcaacaacaactggggatttagacccaagaaactcaatttcaagctcttcaacatccaagtcaaggaggtcacgcagaatgatggaaccacgaccatcgccaataaccttaccagcacggtgcaggtcttcacagactctgagtaccagctgccctacgtcctcggttcggctcaccagggctgccttccgccgttcccagcagacgtcttcatgattcctcagtacggctacttgactctgaacaatggcagccaagcggtaggacgttcttcattctactgtctagagtattttccctctcagatgctgaggacgggaaacaacttcaccttcagctacacttttgaagacgtgcctttccacagcagctacgcgcacagccagagtctggatcggctgatgaatcctctcattgaccagtacctgtattacctgagcaaaactcagggtacaagtggaacaacgcagcaatcgagactgcagttcagccaagctgggcctagctccatggctcagcaggccaaaaactggctaccgggacccagctaccgacagcagcgaatgtctaagacggctaatgacaacaacaacagtgaatttgcttggactgcagccaccaaatattacctgaatggaagaaattctctggtcaatcccgggcccccaatggccagtcacaaggacgatgaggaaaagtatttccccatgcacggaaatctcatctttggaaaacaaggcacaggaactaccaatgtggacattgaatcagtgcttattacagacgaagaagaaatcagaacaactaatcctgtggctacagaacaatacggacaggttgccaccaaccatcagagtcagaacaccacagcttcctatggaagtgtggacagccagggaatcttacctggaatggtgtggcaggaccgcgatgtctatcttcaaggtcccatttgggccaaaactcctcacacggacggacactttcatccttctccgctcatgggaggctttggactgaaacaccctcctccccagatcctgatcaaaaacacacctgtgccagcgaatcccgcgaccactttcactcctggaaagtttgcttcgttcattacccagtattccaccggacaggtcagcgtggaaatagagtgggagctgcagaaagaaaacagcaaacgctggaacccagaaattcagtacacctccaactacaacaagtcggtgaatgtggagtttaccgtggacgcaaacggtgtttattctgaaccccgccctattggcactcgttaccttacccggaacttgtaatttcctgttaatgaataaaccgatttatgcgtttcagttgaactttggtctctgcgaagggcgaattc

SEQ ID NO: 4814 - protein, 735 aa, Adeno-associated virus
MAADGYLPDWLEDTLSEGIRQWWKLKPGPPPPKPNQQHRDDSRGLVLPGYKYLGPFNGLDKGEPVNEADAAALEHDKAYDHQLKQGDNPYLKYNHADAEFQERLQEDTSFGGNLGRAVFQAKKRVLEPLGLVEEAVKTAPGKKRPIEQSPAEPDSSSGIGKSGQQPAKKRLNFGQTGDTESVPDPQPIGEPPAAPSGVGSNTMASGGGAPMADNNEGADGVGNSSGNWHCDSTWMGDRVITTSTRTWALPTYNNRLYKQISSESGATNDNHYFGYSTPWGYFDFNRFHCHFSPRDWQRLINNNWGFRPKKLNFKLFNIQVKEVTQNDGTTTIANNLTSTVQVFTDSEYQLPYVLGSAHQGCLPPFPADVFMIPQYGYLTLNNGSQAVGRSSFYCLEYFPSQMLRTGNNFTFSYTFEDVPFHSSYAHSQSLDRLMNPLIDQYLYYLSKTQGTSGTTQQSRLQFSQAGPSSMAQQAKNWLPGPSYRQQRMSKTANDNNNSEFAWTAATKYYLNGRNSLVNPGPPMASHKDDEEKYFPMHGNLIFGKQGTGTTNVDIESVLITDEEEIRTTNPVATEQYGQVATNHQSQNTTASYGSVDSQGILPGMVWQDRDVYLQGPIWAKTPHTDGHFHPSPLMGGFGLKHPPPQILIKNTPVPANPATTFTPGKFASFITQYSTGQVSVEIEWELQKENSKRWNPEIQYTSNYNKSVNVEFTVDANGVYSEPRPIGTRYLTRNL

SEQ ID NO: 4815 - protein, 733 aa, Adeno-associated virus
MAADGYLPDWLEDNLSEGIREWWDLKPGAPKPKANQQKQDDGRGLVLPGYKYLGPFNGLDKGEPVNAADAAALEHDKAYDQQLKAGDNPYLRYNHADAEFQERLQEDTSFGGNLGRAVFQAKKRVLEPLGLVEEGAKTAPGKKRPLESPQEPDSSSGIGKKGKQPAKKRLNFEEDTGAGDGPPEGSDTSAMSSDIEMRAAPGGNAVDAGQGSDGVGNASGDWHCDSTWSEGKVTTTSTRTWVLPTYNNHLYLRLGTTSNSNTYNGFSTPWGYFDFNRFHCHFSPRDWQRLINNNWGLRPKAMRVKIFNIQVKEVTTSNGETTVANNLTSTVQIFADSSYELPYVMDAGQEGSLSPFPNDVFMVPQYGYCGIVTGENQNQTDRNAFYCLEYFPSQMLRTGNNFEMAYNFGKVPFHSMYAYSQSPDRLMNPLLDQYLWHLQSTTSGETLNQGNAATTFGKIRSGDFAFYRKNWLPGPCVKQQRLSKTASQNYKIPASGGNALLKYDTHYTLNNRWSNIAPGPPMATAGPSDGDFSNAQLIFPGPSVTGNTTTSANNLLFTSEEEIAATNPRDTDMFGQIADNNQNATTAPITGNVTAMGVLPGMVWQNRDIYYQGPIWAKIPHADGHFHPSPLIGGFGLKHPPPQIFIKNTPVPANPATTFTAARVDSFITQYSTGQVAVQIEWEIEKERSKRWNPEVQFTSNYGNQSSMLWAPDTTGKYTEPRVIGSRYLTNHL

SEQ ID NO: 4816 - protein, 733 aa, Adeno-associated virus
MAADGYLPDWLEDNLSEGIREWWDLKPGAPKLKANQQKQDDGRGLVLPGYKYLGPFHGLDKGEPVNAADAAALEHDKAYDQQLKAGDNPYLRYNHADAEFQERLQEDTSFGGNLGRAVFQAKKRVLEPLGLVEEGAKTAPGKKRPLESPQEPDSSSGIGKKGKQPAKKRLNFEEDTGAGDGPPEGSDTSAMSSDIEMRAAPGGNAVDAGQGSDGVGNASGDWHCDSTWSEGKVTTTSTRTWVLPTYNNHLYLRLGTTSNSNTYNGFSTPWGYFDFNRFHCHFSPRDWQRLINNNWGLRPKAMRVKIFNIQVKEVTTSNGETTVANNLTSTVQIFADSSYELPYVMDAGQEGSLPPFPNDVFMVPQYGYCGIVTGENQNQTDRNAFYCLEYFPSQMLRTGNNFEMAYNFEKVPFHSMYAHSQSLDRLMNPLLDQYLWHLQSTTSGETLNQGNAATTFGKIRSGDFAFYRKNWLPGPCVKQQRFSKTASQNYKIPASGGNALLKYDTHYTLNNRWSNIAPGPPMATAGPSDGDFSNAQLIFPGPSVTGNTTTSANNLLFTSEGEIAATNPRDTDMFGQIADNNQNATTAPITGNVTAMGVLPGMVWQNRDIYYQGPIWAKIPHADGHFHPSPLIGGFGLKHPPPQIFIKNTPVPANPATTFTAARVDSFITQYSTGQVAVQIEWEIEKERSKRRNPEVQFTSNYGNQSSMLWAPDTTGKYTEPRVIGSRYLTNHL

SEQ ID NO: 4817 - protein, 733 aa, Adeno-associated virus
MAADGYLPDWLEDNLSEGIREWWDLKPGAPKPKANQQKQDDGRGLVLPGYEYLGPFNGLDKGEPVNAADAAALEHDKAYDQQLKAGDNPYLRYNHADAEFQERLQEDTSFGGNLGRAVFQAKKRVLEPLGLVEEGAKTAPGKKRPLESPQEPDSSSGIGKKGKQPAKKRLNFEEDTGAGDGPPEGSDTSAMSSDIEMRAAPGGNAVDAGQGSDGVGNASGDWHCDSTWSEGKVTTTSTRTWVLPTYNNHLYLRLGTTSNSNTYNGFSTPWGYFDFNRFHCHFSPRDWQRLINNNWGLRPKAMRVKIFNIQVKEVTTSNGETTVANNLTSTVQIFADSSYELPYVMDAGQEGSLPPFPNDVFMVPQYGYCGIVTGENQNQTDRNAFYCLEYFPSQMLRTGNNFETAYNFEKVPFHSMYAHSQSLDGLMNPLLDQYLWHLQSTTSGETLNQGNAATTFGKIRSGDFAFYRKNWLPGPCVKQQRFSKTASQNYKIPASGGNALLKYDTHYTLNNRWSNIAPGPPMATAGPSDGDFSNAQLIFPGPSVTGNTTTSANNLLFTSEEEIAATNPRDTDMFGQIADNNQNATTAPITGNVTAMGVLPGMVWQNRDIYYQGPIWAKIPHADGHFHPSPLIGGFGLKHPPPQIFIKNTPVPAYPATTFTAARVDSFITQYSTGQVAVQIEWEIEKERSKRWNPEVQFTSNCGNQSSMLWAPDTTGKYTEPRVIGSRYLTNHL

SEQ ID NO: 4818 - protein, 735 aa, Adeno-associated virus
MAADGYLPDWLEDTLSEGIRQWWKLKPGPPPPKPNQQHRDDSRGLVLPGYKYLGPFNGLDKGEPVNEADAAALEHDKAYDHQLKQGDNPYLKYNHADAEFQERLQEDTSFGGNLGRAVFQAKKRVLEPLGLVEEAVKTAPGKKRPIEQSPAEPDSSSGIGKSGQQPAKKRLNFGQTGDTESVPDPQPIGEPPAAPSGVGSNTMASGGGAPMADNNEGADGVGNSSGNWHCDSTWMGDRVITTSTRTWALPTYNNHLYKQISSESGATNDNHYFGYSTPWGYFDFNRFHCHFSPRDWQRLINNNWGFRPKKLNFKLFNIQVKEVTQNDGTTTIANNLTSTVQVFTDSEYQLPYVLGSAHQGCLPPFPADVFMIPQYGYLTLNNGSQAVGRSSFYCLEYFPSQMLRTGNNFTFSYTFEDVPFHSSYAHSQSLDRLMNPLIDQYLYYLSKTQGTSGTTQQSRLQFSQAGPSSMAQQAKNWLPGPSYRQQRMSKTANDNNNSEFAWTAATKYYLNGRNSLVNPGPPMASHKDDEEKYFPMHGNLIFGKQGTGTTNVDIESVLITDEEEIRTTNPVATEQYGQVATNHQSQNTTASYGSVDSQGILPGMVWQDRDVYLQGPIWAKIPHTDGHFHPSPLMGGFGLKHPPPQILIKNTPVPANPATTFTPGKFASFITQYSTGQVSVEIEWELQKENSKRWNPEIQYTSNYNKSVNVEFTVDANGVYSEPRPIGTRYLTRNL

SEQ ID NO: 4819 - DNA, 3127 bp, Adeno-associated virus
  source 1..3127: mol_type = genomic DNA
gcggccgcgaattcgcccttcgcagagaccaaagttcaactgaaacgaatcaaccggtttattgattaacatgcaattacagattacgggtgaggtaacgagtgccaatagggcgaggctcagagtaaacaccctggctgtcaacggcaaagtccacaccagtctgcttttcaaagttggaggtgtactgaatctccgggtcccagcgcttgctgttttccttctgcagctcccactcgatttccacgctgacttgtccggtgctgtactgtgtgatgaacgaagcaaacttggcaggagtaaacacctccggaggattagcgggaacgggagtgttcttgatcaggatctgaggaggcggatgtttaagtccaaagccgcccatcaaaggagacgggtgaaagttgccatccgtgtgaggaatcttggcccagatgggaccctgcaggtacacgtcccggttctgccagaccatgccaggtaaggctccctggttgttgacaacttgtgtctgggctgcagtattagccgcttgtaagttgctgctgactatcccgtattcttccgtggctacaggattagtaggacgaatttcttcttcatttgtcattaacacattttccaatgtagttttgttagttgctccagtttttccaaaaatcaggactccgctggatgggaaaaagcggtcctcgtcgtccttgtgagttgccatggcgacgccgggattaaccaacgagtttctgccgttcaggtgatatttggtggcaccagtccaagcaaagttgctgttgttgttttgatccagcgttttggagaccctttgttgccggaagcagggtccaggtaaccaattcttggcttgttcggccatagttgaaggcccgccctggtaaaactgcagttcccgattgccagctgtgcctcctgggtcactctgtgttctggccaggtagtacaagtactggtcgatgaggggattcatcagccggtccaggctctggctgtgtgcgtagctgctgtggaaaggcacgtcctcgaagctgtagctgaactcaaagttgttgcccgttctcagcatctgagaggggaagtactccaggcagtagaaggaggaacgtcccacagactgactgccattgttgagagtcaggtagccgtactgaggaatcatgaagacgtccgccgggaacggaggcaggcagccctggtgcgcagagccgaggacgtacggcagctggtattccgagtccgagaatacctgaatcgtgctggtaaggttattagcgatggtcgtaacgccgtcattcgtcgtgacctccttgacctggatgttgaagagcttgaaccgcagcttcttgggccggaatccccagttgttgttgatgagtcgctgccagtcacgtggtgagaagtggcagtggaatctgttaaagtcaaaatacccccagggggtgctgtagccgaagtaggtgttgtcgttggtactacctgcagtttcactggagatttgctcgtagaggtggttgttgtaggtgggcagggcccaggttcgggtgctggtggtaatgactctgtcgcccagccatgtggaatcgcaatgccaatttcctgaggcattacccactccgtcggcaccttcgttattgtctgccattggtgcgccaccgcctgcagccactgtaccagatcccacactagagggcgctgctggaggttctccgagaggttgagggtcggggactgactctgagtcgccagtctgaccgaaattgagtctctttctggcgggctgctggcccttcttgccgatgcccgtggaggagtcgggggaacgctgaggtgacggctctaccggtctcttctttgcaggagccgtcttagcgccttcctcaaccagaccgagaggttcgagaacccgcttcttggcctggaagactgctcgcccgaggttgcccccaaatgacgtatcttcttgcagacgctcctgaaactcggcgtcggcgtggttataccgcaggtacgggttgtcacccgcattgagctgctggtcgtaggccttgtcgtgctcgagggccgctgcgtccgccgcgttgacgggctcccccttgtcgagtccgttgaagggtccgaggtacttgtagccaggaagcaccagaccccggccgttgtcctgcttttgctggttggctttgggtttcggggctccaggtttcaggtcccaccactcgcgaatgccctcagagaggttgtcctcgagccaatctggaagataaccatcggcagccatacctgatttaaatcatttattgttcaaagatgcagtcatccaaatccacattgaccagatcgcaggcagtgcaagcgtctggcacctttcccatgatatgatgaatgtagcacagtttctgatacgcctttttgacgacagaaacgggtttagattctgacacgggaaagcactctaaacagtctttctgtccgtgagtgaagcagatatttgaattctgattcattctctcgcattgtctgcagggaaacagcatcagattcatgcccacgtgacgagaacatttgttttggtacctgtctgcgtagttgatcgaagcttccgcgtctgacgtcgatggctgcgcaactgactcgcgcacccgtttgggctcacttatatctgcgtcactgggggcgggtcttttcttggctccaccctttttgacgtagaattcatgctccacctcaaccacgtaatcctttgcccaccggaaaaagtctttgacttcctgcttggtgaccttcccaaagtcatgatccagacggcgggtgagttcaaatttgaacatccggtcttgcaacggctgctggtgttcgaaggtcgttgagttcccgtcgatcacggcgcacatgttggtgttggagatgacgatcgcgggagtcgggtctatctgggccgaggacttgcatttctggtccacgcgcaccttgcttcctccgagaatggctttggccgactccacgaccttggcggtcatcttcccctcctcccaccagatcaccatcttgtcgacacagtcgttgaagggaaagttctcattggtccagttgacgcagccgtagaaagggcgaattc

SEQ ID NO: 4820 - DNA, 3106 bp, Adeno-associated virus
  source 1..3106: mol_type = genomic DNA
gcggccgcgaattcgcccttcgcagagaccaaagttcaactgaaacgaatcaaccggtttattgattaacaagtaattacaggttacgggtgaggtaacgggtgccaatggggcgaggctcagtataaaccccttcgttgttgacagcaaattccacattattagacttggcataatttgaggtgtactgaatctctggattccagcgtttgctgttttctttctgcagttcccactcgatctccacgctgacctggccggtgctgtactgcgtgataaatgaggcaaacttggcaggagtaaacacctctggaggattagcaggtaccggggtgtttttgatgagaatttgaggaggcgggtgtttgagtccaaatccgcccatcaggggagacgggtgaaagttgccgtccgtgtgaggaattttggcccagatgggaccctgcaggcacacgtcccggttctgccagaccatgccgggcagagccccctggctgttgacagtctgtgtctggggtccggccgtagacgattgcaggttgctggagaccacaccgtattcttctgtagccacgggattggtggttttgatctcctcctcgctggtcattagcacgttttccagcgttgtcttgttggcagcccccgttttgccaaaaaccagcactccgttgatgggaaagaactggtcctcgtcgtccttgttggtggccatggctacgcccgggttggttaatgaatttctaccattcagatggtatttagtggccccggtccaggcaaagttactgttgttgttgctgtctatgttttttgacagtctctgctgccgataacagggtccgggcagccagttctttgattgctcggccatggtgttgggcccagcctgatggaactgcagctcccttgtggaccccgtagtgctctgggtccgggccaggtagtacaggtactggtcgatgaggggattcatcagccggtctaggctctggctgtgcacatagctgctgtggaaaggcacttcctcaaaggtgtagctgaattcaaagttattgcccgttctcagcatctgagaaggaaagtactccaggcagtagaaggaggaacgtcccacagactgactgccgttgtttagagtcagatatccgtactgaggaatcatgaacacgtccgcagggaacggagggaggcagccctggtgcgcagagccgaggacgtacggcagttggtactccgagtccgagaagacctgaatcgtgctggtaaggttattagcgatggtcgtaacgccgtcgttcgtcgtgacctccttgacctggatgttgaacaacttgaaccgcagctttctgggccggaatccccagttgttgttgatgagtcgctgccagtcacgtggtgagaagtggcagtggaatctgttgaagtcaaaatagccccagggggtgctgtagctgaagaagtggttgtcgttggtagccccgctctgacttgatatctgcttgtagaggtggttgttgtaggtgggcagggcccaggtgcgggtgctggtggtgatgactctgtcgcccagccatgtggaatcgcaatgccaatttccggaggcattacccactccgtcggcgccttcgttattgtctgccattggtgcgccaccgcctgcagccattgtaccagatcccagacctgagggcgcggcgggaggttctccgagaggttgggggtcgggcactgactctgagtcgccagtctgcccaaagttgagcttctttttagcgggctgctggcctttcttgccgatgcccgtggaggagtcgggggattctatgggtctcttctttccaggagccgtcttagcgacttcctcaaccagaccgagaggttcgagaacccgcttcttggcctggaagactgctcgcccgaggttgcccccaaaagacgtatcttcttgaagacgctcctgaaactcggcgtcggcgtggttgtacttgaggtacgggttgtccccctgctcgagctgcttgtcgtaggccttgtcgtgctcgagggccgcggcgtctgcctcgttgaccggctctcccttgtcgagtccgttgaagggtctgaggtacttgtagccaggaagcaccagaccccggccgtcgtcctgcttttgctggttggctttgggtttcggggctccaggtttcaagtcccaccactcgcgaatgccctcagagaggttgtcctcgagccaatctggaagataaccatcggcagccatacctggtttaagtcatttattgctcagaaacacagtcatccaggtccacgttgaccagatcgcaggccgagcaagcaatctcgggagcccgccccagcagatgatgaatggcacagagtttccgatacgtcctctttctgacgaccggttgagattctgacacgccggggaaacattctgaacagtctctggtcccgtgcgtgaagcaaatgttgaaattctgattcactctctcgcatgtcttgcagggaaacagcatctgaagcatgcccgcgtgacgagaacatttgttttggtacctgtcggcaaagtccaccggagctccttccgcgtctgacgtcgatggattcgcgactgaggggcaggcccgcttgggctcgcttttatccgcgtcatcgggggcgggtctcttgttggccccaccctttctgacgtagaacccatgcgccacctcggtcacgtgatcctgcgcccagcggaagaaccttttgacttcctgctttgtcaccttgccaaagttatgctccagacggcgggtgggttcaaatttgaacatccggtcctgcaacggctgctggtgctcgaaggtggcgctgttcccgtcaatcacggcgcacatgttggtgttggaggtgacggtcacgggggtggggtcgatctgggcggacgacttgcacttttggtccacgcgcaccttgctgccgccgagaatggccttggcggactccacgaccttggccgtcatcttgccctcctcccaccagatcaccatcttgtcggcgcaatcgttgaagggaaagttctcattggtccagttgacgcagccgtagaaagggcgaattc

SEQ ID NO: 4821 - DNA, 3102 bp, Adeno-associated virus
  source 1..3102: mol_type = genomic DNA
gcggccgcgaattcgcccttcgcagagaccaaagttcaactgaaacgaatcaaccggtttattgattaacaagtaattacaggttacgggtgaggtaacgggtgccaatggggcgaggctcagtataaaccccttcgttgttgacagcaaattccacattattagacttggcataatttgaggtgtactgaatctctggattccagcgtttgctgttttctttctgcagttcccactcgatctccacgctgacctggccggtgctgtactgcgtgataaatgaggcaaacttggcaggagtaaacacctctggaggattagcaggtaccggggtgtttttgatgagaatttgaggaggcgggtgtttgagtccaaatccgcccatcaggggagacgggtgaaagttgccgtccgtgtgaggaatttcggcccagatgggaccctgcaggtacacgtcccggttctgccagaccatgccgggcagagccccctggctgttgacagtctgtgtccggggtccggccgtagacgattgcaggttgctggagaccacaccgtattcttctgtagccacgggattggtggttttgatctcctcctcgctggtcattagcacgttttccagcgttgtcttgttggcagcccccgttttgccaaaaaccagcactccgttgatgggaaggaactggtcctcgtcgtccttgttggtggccatggctacgcccgggttggttaatgaatttctaccattcagatggtatttagtggccccggtccaggcaaagttactgttgttgttgctgtctatgttttttgacagtctctgctgccgataacagggtccgggcagccagttctttgattgctcggccacggtgttgggcccagcctgatggaactgcagctcccttgtggaccccgtagtgctctgggtccgggccaggtagtacaggtactggtcgatgaggggattcatcagccggtccaggctctggctgtgcgcatagctgctgtggaaaggcacttcctcaaaggtgtagctgaattcaaagttattgcccgttctcagcatctgagaaggaaagtactccaggcagcagaaggaggaacgtcccacagactgactgccgttgtttagagtcagatatccgtactgaggaatcatgaacacgtccgcagggaacggagggaggcagccctggtgcgcagagccgaggacgtacggcagttggtactccgagtccgagaagacctgaatcgtgctggtaaggttattagcgatggtcgtaacgccgtcgttcgtcgtgacctccttgacctggatgttgaacaacttgaaccgcagctttctgggccggaatccccagttgttgttgatgagtcgctgccagtcacgtggtgagaagtggcagtggaatctgttgaagtcaaaatagccccagggggtgctgtagccgaagaagtggttgtcgttggtagccccgctctgacttgatatctgcttgtagaggtggttgttgtaggtgggcagggcccaggtgcgggtgctggtggtgatgactctgtcgcccagccatgtggaatcgcaatgccaatttccggaggcattacccactccgtcggcgccttcgttattgtctgccattggtgcgccaccgcctgcagccattgtaccagatcccagacctgagggcgcggcgggaggttctccgagaggttgggggtcgggcactgactctgagtcgccagtctgcccaaagttgagcttctttttagcgggctgctggcctttcttgccgatgcccgtggaggagtcgggggattctatgggtctcttctttccggaagccgtcttagcgccttcctcaaccagaccgagaggttcgagaacccgcttcttggcctggaagactgctcgcccgaggttgcccccaaaagacgtatcttcttgaagacgctcctgaaactcggcgtcggcgtggttgtacttgaggtacgggttgtccccctgctcgagctgcttgtcgtaggccttgtcgtgctcgagggccgcggcgtctgcctcgttgaccggctctcccttgtcgagtccgttgaagggtccgaggtacttgtagccaggaagcaccagaccccggccgtcgtcctgcttttgctggttggctttgggtttcggggctccaggtttcaagtcccaccactcgcgaatgccctcagagaggttgtcctcgagccaatctggaagataaccatcggcagccatacctggtttaagtcatttattgctcagaaacacagtcatccaggtccacgttgaccagatcgcaggccgagcaagcaatctcgggagcccgccccagcagatgatgaatggcacagagtttccgatacgtcctctttctgacgaccggttgagattctgacacgccggggaaacattctgaacagtctctggtcccgtgcgtgaagcaaatgttgaaattctgattcattctctcgcatgtcttgcagggaaacagcatctgaagcatgcccgcgtgacgagaacatttgttttggtacctgtcggcaaagtccaccggagctccttccgcgtctgacgtcgatggatccgcgactgaggggcaagcccgcttgggctcgcttttatccgcgtcatcgggggcgggtctcttgttggctccaccctttctgacgtagaactcatgcgccacctcggtcacgtgatcctgcgcccagcggaagaactctttgacttcctgctttgtcaccttgccaaagtcatgctccagacggcgggtgagttcaaatttgaacatccggtcttgtaacggctgctggtgctcgaaggtggtgctgttcccgtcaatcacggcgcacatgttggtgttggaagtgacgatcacgggggtgggatcgatctgggcggacgacttgcacttttggtccacgcgcaccttgctgccgccgagaatggccttggcggactccacgaccttggccgtcatcttgccctcctcccaccagatcaccatcttgtcgacgcaatcgttgaagggaaagttctcattggtccagttgacgcagccgaagggcgaattc

SEQ ID NO: 4822 - protein, 728 aa, Adeno-associated virus
MAADGYLPDWLEDNLSEGIREWWDLKPGAPKPKANQQKQDDGRGLVLPGYRYLGPFNGLDKGEPVNEADAAALEHDKAYDKQLEQGDNPYLKYNHADAEFQERLQEDTSFGGNLGRAVFQAKKRVLEPLGLVEEGAKTAPGKKRPIESPDSSTGIGKNGQPPAKKKLNFGQTGDSESVPDPQPLGEPPAAPSGLGSGTMAAGGGAPMADNNEGADGVGNASGNWHCDSTWLGDRVITTSTRTWALPTYNNHLYKQISSQSGATNDNHFFGYSTPWGYFDFNRFHCHFSPRDWQRLINNNWGFRPRKLRFKLFNIQVKEVTTNDGVTTIANNLTSTIQVFSDSEYQLPYVLGSAHQGCLPPFPADVFMIPQYGYLTLNNGSQSVGRSSFYCLEYFPSQMLRTGNNFEFSYTFEEVPFHSSYAHSQSLDRLMNPLIDQYLYYLARTQSTTGSTRELQFHQAGPNTMAEQSKNWLPGPCYRQQRLSKNIDSNNNSNFAWTGATKYHLNGRNSLTNPGVAMATNKDDEDQFFPINGVLVFGKTGAANKTTLENVLMTSEEEIKTTNPVATEEYGVVSSNLQSSTAGPQTQTVNSQGALPGMVWQNRDVYLQGPIWAKIPHTDGNFHPSPLMGGFGLKHPPPQILIKNTPVPANPPEVFTPAKFASFITQYSTGQVSVEIEWELQKENSKRWNPEIQYTSNYAKSNNVEFAVNNEGVYTEPRPIGTRYLTRNL

SEQ ID NO: 4823 - DNA, 2187 bp, Adeno-associated virus
  source 1..2187: mol_type = genomic DNA
atggctgccgatggttatcttccagattggctcgagggcaacctctctgagggcattcgcgagtggtgggacttgaaacctggagccccgaaacccaaagccaaccagcaaaagcaggacgacggccggggtctggtgcttcctggctacaggtacctcggacccttcaacggactcgacaagggagagccggtcaacgaggcagacgccgcggccctcgagcacgacaaggcctacgacaagcagctcgagcagggggacaacccgtacctcaagtacaaccacgccgacgccgagtttcaggagcgtcttcaagaagatacgtcttttgggggcaacctcgggcgagcagtcttccaggccaagaagcgggttctcgaacctctcggtctggttgaggaaggcgctaagacggctcctggaaagaagagacccatagaatcccccgactcctccacgggcatcggcaagaacggccagccgcccgctaaaaagaagctcaactttgggcagactggcgactcagagtcagtgcccgacccccaacctctcggagaacctcccgccgcgccctcaggtctgggatctggtacaatggctgcaggcggtggcgcaccaatggcagacaataacgaaggcgccgacggagtgggtaatgcctccggaaattggcattgcgattccacatggctgggcgacagagtcatcaccaccagcacccgcacctgggccctgcccacctacaacaaccacctctacaagcagatatcaagtcagagcggggctaccaacgacaaccacttcttcggctacagcaccccctggggctattttgacttcaacagattccactgccacttctcaccacgtgactggcagcgactcatcaacaacaactggggattccggcccagaaagctgcggttcaagttgttcaacatccaggtcaaggaggtcacgacgaacgacggcgttacgaccatcgctaataaccttaccagcacgattcaggtcttctcggactcggagtaccaactgccgtacgtcctcggctctgcgcaccagggctgcctccctccgttccctgcggacgtgttcatgattcctcagtacggatatctgactctaaacaacggcagtcagtctgtgggacgttcctccttctactgcctggagtactttccttctcagatgctgagaacgggcgataactttgaattcagctacacctttgaggaagtgcctttccacagcagctatgcgcacagccagagcctggaccggctgatgaatcccctcatcgaccagtacctgtactacctggcccggacccagagcactacggggtccacaagggagctgcagttccatcaggctgggcccaacaccatggccgagcaatcaaagaactggctgcccggaccctgttatcggcagcagagactgtcaaaaaacatagacagcaacaacaacagtaactttgcctggaccggggccactaaataccatctgaatggtagaaattcattaaccaacccgggcgtagccatggccaccaacaaggacgacgaggaccagttctttcccatcaacggagtgctggtttttggcaaaacgggggctgccaacaagacaacgctggaaaacgtgctaatgaccagcgaggaggagatcaaaaccaccaatcccgtggctacagaagaatacggtgtggtctccagcaacctgcaatcgtctacggccggaccccagacacagactgtcaacagccagggggctctgcccggcatggtctggcagaaccgggacgtgtacctgcagggtcccatctgggccaaaattcctcacacggacggcaactttcacccgtctcccctgatgggcggatttggactcaaacacccgcctcctcaaattctcatcaaaaacaccccggtacctgctaatcctccagaggtgtttactcctgccaagtttgcctcatttatcacgcagtacagcaccggccaggtcagcgtggagatcgagtgggaactgcagaaagaaaacagcaaacgctggaatccagagattcagtacacctcaaattatgccaagtctaataatgtggaatttgctgtcaacaacgaaggggtttatactgagcctcgccccattggcacccgttacctcacccgtaacctgtaa

SEQ ID NO: 4824 - protein, 728 aa, Adeno-associated virus; identical to SEQ ID NO: 4803

SEQ ID NO: 4825 - DNA, 3106 bp, Adeno-associated virus
  source 1..3106: mol_type = genomic DNA
gcggccgcgaattcgcccttcgcagagaccaaagttcaactgaaacgaatcagccggtttattgattaacaagtaattacaggttacgggtgaggtaacgggtgccaatggggcgaggctcagtataaaccccttcgttgttgacagcaaattccacattattagacttggcataatttgaggtgtactgaatctctggattccagcgtttgctgttttctttctgcagttcccactcgatctccacgctgacctggccggtgctgtactgcgtgataaatgaggcaaacttggcaggagtaaacacctctggaggattagcaggtaccggggtgtttttgatgagaatttgaggaggcgggtgtttgagtccaaatccgcccatcaggggagacgggtgaaagttgccgtccgtgtgaggaattttggcccagatgggaccctgcaggtacacgtcccggttctgccagaccatgccgggcagagccccctggctgttgacagtctgtgtctggggtccggccgtagacgattgcaggttgctggagaccacaccgtattcttctgtagccacgggattggtggttttgatctcctcctcgctggtcattagcacgttttccagcgttgtcttgttggcagcccccgttttgccaaaaaccagcactccgttgatgggaaagaactggtcctcgtcgtccttgttggtggccatggctacgcccgggttggttaatgaatttctaccattcagatggtatttagtggccccggtccaggcaaagttactgttgttgttgctgtctatgttttttgacagtctctgctgccgataacagggtccgggcagccagttctttgattgctcggccatggtgttgggcccagcctgatggaactgcagctcccttgtggaccccgtagtgctctgggtccgggccaggtagtacaggtactggtcgatgaggggattcatcagccggtccaggctctggctgtgcgcatagctgctgtggaaaggcacttcctcaaaggtgtagctgaattcaaagttatcgcccgttctcagcatctgagaaggaaagtactccaggcagtagaaggaggaacgtcccacagactgactgccgttgtttagagtcagatatccgtactgaggaatcatgaacacgtccgcagggaacggagggaggcagccctggtgcgcagagccgaggacgtacggcagttggtactccgagtccgagaagacctgaatcgtgctggtaaggttattagcgatggtcgtaacgccgtcgttcgtcgtgacctccttgacctggatgttgaacaacttgaaccgcagctttctgggccggaatccccagttgttgttgatgagtcgctgccagtcacgtggtgagaagtggcagtggaatctgttgaagtcaaaatagccccagggggtgctgtagccgaagaagtggttgtcgttggtagccccgctctgacttgatatctgcttgtagaggtggttgttgtaggtgggcagggcccaggtgcgggtgctggtggtgatgactctgtcgcccagccatgtggaatcgcaatgccaatttccggaggcattacccactccgtcggcgccttcgttattgtctgccattggtgcgccaccgcctgcagccattgtaccagatcccagacctgagggcgcggcgggaggttctccgagaggttgggggtcgggcactgactctgagtcgccagtctgcccaaagttgagcttctttttagcgggcggctggccgttcttgccgatgcccgtggaggagtcgggggattctatgggtctcttctttccaggagccgtcttagcgccttcctcaaccagaccgagaggttcgagaacccgcttcttggcctggaagactgctcgcccgaggttgcccccaaaagacgtatcttcttgaagacgctcctgaaactcggcgtcggcgtggttgtacttgaggtacgggttgtccccctgctcgagctgcttgtcgtaggccttgtcgtgctcgagggccgcggcgtctgcctcgttgaccggctctcccttgtcgagtccgttgaagggtccgaggtacctgtagccaggaagcaccagaccccggccgtcgtcctgcttttgctggttggctttgggtttcggggctccaggtttcaagtcccaccactcgcgaatgccctcagagaggttgccctcgagccaatctggaagataaccatcggcagccatacctggtttaagtcatttattgctcagaaacacagtcatccaggtccacgttggccagatcgcaggccgagcaagcaatctcgggagcccgccccagcagatgatgaatggcacagagtttccgatacgtcctctttctgacgaccggttgagattctgacacgccggggaaacattctgaacagtctctggtcccgtgcgtgaagcaaatgttgaaattctgattcattctctcgcatgtcttgcaggggaacagcatctgaagcatgcccgcgtgacgagaacatttgttttggtacctgtcggcaaagtccaccggagctccttccgcgtctgacgtcgatggatccgcgactgaggggcaggcccgcttgggctcgcttttatccgcgtcatcgggggcgggtctcttgttggctccaccctttctgacgtagaactcatacgccacctcggtcacgtgatcctgcgcccagcggaagaactctttgacttcctgctttgtcaccttgccaaagtcatgctccagacggcgggtgagttcaaatttgaacatccggtcttgtaacggctgctggtgctcgaaggtggtgctgttcccgtcaatcacggcgcacatgttggtgttggaagtgacgatcacgggggtgggatcgatctgggcggacgacttgcacttttggtccacgcgcaccttgctgccgccgagaatggccttggcggactccacgaccttggccgtcatcctgccctcctcccaccagatcaccatcttgtcgacgcaatcgttgaagggaaagttctcattggtccagttgacgcagccgtagaaagggcgaattc

SEQ ID NO: 4826 - protein, 728 aa, Adeno-associated virus
MAADGYLPDWLEDNLSEGIREWWDLKPGAPKPKANQQKQDDGRGLVLPGYRYLGPFNGLDKGEPVNEADAAALEHDKAYDKQLEQGDNPYLKYNHADAEFQERLQEDTSFGGNLGRAVFQAKKRVLEPLGLVEEGAKTAPGKKRPIESPDSSTGIGKNGQPPAKKKLNFGQTGDSESVPDPQPLGEPPAAPSGLGSGTMAAGGGAPMADNNEGADGVGNASGNWHCDSTWLGDRVITTSTRTWALPTYNNHLYKQISSQSGATNDNHFFGYSTPWGYFDFNRFHCHFSPRDWQRLINNNWGFRPRKLRFKLFNIQVKEVTTNDGVTTIANNLTSTIQVFSDSEYQLPYVLGSAHQGCLPPFPADVFMIPQYGYLTLNNGSQSVGRSSFYCLEYFPSQMLRTGDNFEFSYTFEEVPFHSSYAHSQSLDRLMNPLIDQYLYYLARTQSTTGSTRELQFHQAGPNTMAEQSKNWLPGPCYRQQRLSKNIDSNNNSNFAWTGATKYHLNGRNSLTNPGVAMATNKDDEDQFFPINGVLVFGKTGAANKTTLENVLMTSEEEIKTTNPVATEEYGVVSSNLQSSTAGPQTQTVNSQGALPGMVWQNRDVYLQGPIWAKIPHTDGNFHPSPLMGGFGLKHPPPQILIKNTPVPANPPEVFTPAKFASFITQYSTGQVSVEIEWELQKENSKRWNPEIQYTSNYAKSNNVEFAVNNEGVYTEPRPIGTRYLTRNL

SEQ ID NO: 4827 - protein, 728 aa, Adeno-associated virus; identical to SEQ ID NO: 4822

SEQ ID NO: 4828 - protein, 728 aa, Adeno-associated virus
MAADGYLPDWLEDNLSEGIREWWDLKPGAPKPKANQQKQDDGRGLVLPGYKYLGPFNGLDKGEPVNEADAAALEHDKAYDKQLEQGDNPYLKYNHADAEFQERLQEDTSFGGNLGRAVFQAKKRVLEPLGLVEEGAKTAPGKKRPIESPDSSTGIGKNGQPPAKKKLNFGQTGDSESVPDPQPLGEPPAAPSGLGSGTMAAGGGAPMADNNEGADGVGNASGNWHCDSTWLGDRVITTSTRTWALPTYNNHLYKQISSQSGATNDNHFFGYSTPWGYFDFNRFHCHFSPRDWQRLINNNWGFRPRKLRFKLFNIQVKEVTTNDGVTTIANNLTSTIQVFSDSEYQLPYVLGSAHQGCLPPFPADVFMIPQYGYLTLNNGSQSVGRSSFYCLEYFPSQMLRTGNNFEFSYTFEEVPFHSSYAHSQSLDRLMNPLIDQYLYYLARTQSTTGSTRELQFHQAGPNTMAEQSKNWLPGPCYRQQRLSKNIDSNNNSNFAWTGATKYHLNGRNSLTNPGVAMATNKDDEDQFFPINGVLVFGKTGAANKTTLENVLMTSEEEIKTTNPVATEEYGVVSSNLQSSTAGPQTQTVNSQGALPGMVWQNRDVYLQGPIWAKIPHTDGNFHPSPLMGGFGLKHPPPQILIKNTPVPANPPEVFTPAKFASFITQYSTGQVSVEIEWELQKENSKRWNPEIQYTSNYAKSNNVEFAVNNEGVYTEPRPIGTRYLTRNL

SEQ ID NO: 4829 - protein, 728 aa, Adeno-associated virus
MAADGYLPDWLEDNLSEGIREWWDLKPGAPKPKANQQKQDDGRGLVLPGYKYLGPFNGLDKGEPVNEADAAALEHDKAYDKQLEQGDNPYLKYNHADAEFQERLQEDTSFGGNLGRAVFQAKKRVLEPLGLVEEGAKTAPGKKRPIESPDSSTGIGKKGQQPAKKKLNFGQTGDSESVPDPQPLGEPPAAPSGLGSGTMAAGGGAPMADNNEGADGVGNASGNWHCDSTWLGDRVITTSTRTWALPTYNNHLYKQISSQSGATNDNHFFGYSTPWGYFDFNRFHCHFSPRDWQRLINNNWGFRPRKLRFKLFNIQVKEVTTNDGVTTIANNLTSTIQVFSDSEYQLPYVLGSAHQGCLPPFPADVFMIPQYGYLTLNNGSQSVGRSSFYCLEYFPSQMLRTGNNFEFSYTFEEVPFHSSYAHSQSLDRLMNPLIDQYLYYLARTQSTTGSTRELQFHQAGPNTMAEQSKNWLPGPCYRQQRLSKNIDSNNNSNFAWTGATKYHLNGRNSLTNPGVAMATNKDDEDQFFPINGVLVFGKTGAANKTTLENVLMTSEEEIKTTNPVATEEYGVVSSNLQSSTAGPQTQTVNSQGALPGMVWQNRDVYLQGPIWAKIPHTDGNFHPSPLMGGFGLKHPPPQILIKNTPVPANPPEVFTPAKFASFITQYSTGQVSVEIEWELQKENSKRWNPEIQYTSNYAKSNNVEFAVNNEGVYTEPRPIGTRYLTRNL

SEQ ID NO: 4830 - DNA, 3098 bp, Adeno-associated virus
  source 1..3098: mol_type = genomic DNA
gaattcgcccttcgcagagaccaaagttcaactgaaacgaatcaaccggtttattgattaacaagtaattacaggttacgggtgaggtaacgggtgccaatggggcgaggctcagtataaaccccttcgttgttgacagcaaattccacattattagacttggcataatttgaggtgtactgaatctctggattccagcgtttgctgttttctttctgcagttcccactcgatctccacgctgacctggccggtgctgtactgcgtgataaatgaggcaaactaggcaggagtaaacacccctggaggattagcaggtaccggggtgtttttgatgagaatttgaggaggcgggtgtttgagtccaaatccgcccatcaggggagacgggtgaaagttgccgtccgtgtgaggaattttggcccagatgggaccctgcaggtacacgtcccggttctgccagaccatgccgggcagagccccctggctgttgacagtctgtgtctggggtccggccgtagacgattgcaggttgctggagaccacaccgtattcttctgtagccacgggattggtggttttgatctcctcctcgctggtcattagcacgttttccagcgttgtcttgttggcagcccccgttttgccaaaaaccagcactccgttgatgggaaagaactggccctcgtcgtccttgttggtggccatggctacgcccgggttggttaatgaatttctaccattcagatggtatttagtggccccggtccaggcaaagttactgttgttgttgctgtctatgttttttgacagtctctgctgccgataacagggtccgggcagccagttctttgattgctcggccatggtgttgggcccagcctgatggaactgcagctcccttgtggaccccgtagtgctctgggtccgggccaggtagtacaggtactggtcgatgaggggattcatcagccggtccaggctctggctgtgcgcatagctgctgtggaaaggcacttcctcaaaggtgtagctgaattcaaagttattgcccgttctcagcatctgagaaggaaagtactccaggcagtagaaggaggaacgtcccatagactgactgccgttgtttagagtcagatatccgtactgaggaatcatgaacacgtccgcagggaacggagggaggcagccctggtgcgcagagccgaggacgtacggcagttggtactccgagtccgagaagacctgaatcgtgctggtaaggttattagcgatggtcgtaacgccgtcgttcgtcgtgacctccttgacctggatgttgaacaacttgaaccgcagctttctgggccggaatccccagttgttgttgatgagtcgctgccagtcacgtggtgagaagtggcagtggaatctgttgaagtcaaaatagccccagggggtgctgtagccgaagaagtggttgtcgttggtagccccgctctgacttgatatctgcttgtagaggtggttgttgtaggtgggcagggcccaggtgcgggtgctggtggtgatgactctgtcgcccagccatgtggaatcgcaatgccaatttccggaggcattacccactccgtcggcgccttcgttattgtctgccattggtgcgccaccgcctgcagccattgtaccagatcccagacctgagggcgcggcgggaggttctccgagaggttgggggtcgggcactgactctgagtcgccagtctgcccaaagttgagcttctttttagcgggctgctggcctttcttgccgatgcccgtggaggagtcgggggattctatgggtctcttctttccaggagccgtcttagcgccttcctcaaccagaccgagaggttcgagaacccgcttcttggcctggaagactgctcgcccgaggttgcccccaaaagacgtatcttcttgaagacgctcctgaaactcagcgtcggcgtggttgtacttgaggtacgggttgtccccctgctcgagctgcttgtcgtaggccttgtcgtgctcgagggccgcggcgtctgcctcgttgaccggctctcccttgtcgagtccgttgaagggtccgaggtacttgtagccaggaagcaccagaccccggccgtcgtcctgcttttgctggttggctttgggtttcggggctccaggtttcaagtcccaccactcgcgaatgccctcagagaggttgtcctcgagccaatctggaagataaccatcggcagccatacctggtttaagtcatttattgctcagaaacacagtcatccaggtccacgttgaccagatcgcaggccgagcaagcaatctcgggagcccgccccagcagatgatgaatggcacagagtttccgatacgtcctctttctgacgaccggttgagattctgacacgccggggaaacattctgaacagtctctggtcccgtgcgtgaagcaaatgttgaaattctgattcattctctcgcatgtcttgcagggaaacagcatctgaagcatgcccgcgtgacgagaacatttgttttggtacctgtcggcaaagtccaccggagctccttccgcgtctgacgtcgatggatccgcgactgaggggcaggcccgcttgggctcgcttttatccgcgtcatcgggggcgggcctcttgttggctccaccctttctgacgtagaactcatgcgccacctcggtcacgtgatcctgcgcccagcggaagaactctttgacttcctgctttgtcaccttgccaaagtcctgctccagacggcgggtgagttcaaatttgaacatccggtcttgtaacggctgctggtgctcgaaggtggtgctgttcccgtcaatcacggcgcacatgttggtgttggaagtgacgatcacgggggtgggatcgatctgggcggacgacttgcacttttggtccacgcgcaccttgctgccgccgagaatggccttggcggactccacgaccttggccgtcatcttgccctcctcccaccagatcaccatcttgtcgacgcaatcgttgaagggaaagttctcattggtccagttgacgcagccgtagaaagggcgaattc

SEQ ID NO: 4831 - protein, 729 aa, Adeno-associated virus
MAADGYLPDWLEDNLSEGIREWWDLKPGAPKPKANQQKQDDGRGLVLPGYKYLGPFNGLDKGEPVNAADAAALEHDKAYDQQLKAGDNPYLRYNHADAEFQERLQEDTSFGGNLGRAVFQAKKRVLEPLGLVEEGAKTAPGKKRPIDSPDSSTGIGKKGQQPAKKKLNFGQTGDSESVPDPQPLGEPPAAPSSVGSGTMAAGGGAPMADNNEGADGVGNASGNWHCDSTWLGDRVITTSTRTWALPTYNNHLYKQISSSSSGATNDNHYFGYSTPWGYFDFNRFHCHFSPRDWQRLINNNWGFRPKKLRFKLFNIQVKEVTTNDGVTTIANNLTSTVQVFSDSEYQLPYVLGSAHQGCLPPFPADVFMIPQYGYLTLNNGSQSVGRSSFYCLEYFPSQMLRTGNNFEFSYSFEDVPFHSSYAHSQSLDRLMNPLIDQYLYYLARTQSTTGSTRELQFHQAGPNTMAEQSKNWLPGPCYRQQGLSKNLDFNNNSNFAWTAATKYHLNGRNSLTNPGIPMATNKDDEDQFFPINGVLVFGKTGAANKTTLENVLMTSEEEIKTTNPVATEEYGVVSSNLQPSTAGPQSQTINSQGALPGMVWQNRDVYLQGPIWAKIPHTDGNFHPSPLMGGFGLKHPPPQILIKNTPVPANPPEVFTPAKFASFITQYSTGQVSVEIEWELQKENSKRWNPEIQYTSNYAKSNNVEFAVNPDGVYTEPRPIGTRYLPRNL

SEQ ID NO: 4832 - protein, 1458 aa, Adeno-associated virus
MAADGYLPDWLEDNLSEGIREWWDLKPGAPKPKANQQKQDDGRGLVLPGYKYLGPFNGLDKGEPVNAADAAALEHDKAYDQQLKAGDNPYLRYNHADAEFQERLQEDTSFGGNLGRAVFQAKKRVLEPLGLVEEGAKTAPGKKRPIDSPDSSTGIGKKGQQPAKKKLNFGQTGDSESVPDPQPLGEPPAAPSSVGSGTMAAGGGAPTADNNEGADGVGNASGNWHCDSTWLGDRVITTSTRTWALPTYNNHLYKQISSSSSGATNDNHYFGYSTPWGYFDFNRFHCHFSPRDWQRLINNNWGFRPKKLRFKLFNIQVKEVTTNDGVTTIANNLTSTVQVFSDSEYQLPYVLGSAHQGCLPPFPADVFMIPQYGYLTLNNGSQSVGRSSFYCLEYFPSQMLRTGNNFEFSYSFEDVPFHSSYAHSQSLDRLMNPLIDQYLYYLARTQSTTGSTRELQFHQAGPNTMAEQSKNWLPGPCYRQQRLSKNLDFNNNSNFAWTAATKYHLNGRNSLTNPGIPMATNKDDEDQFFPINGVLVFGKTGAANKTTLENVLMTSEEEIKTTNPVATEEYGVVSSNLQSSTAGPQSQTINSQGALPGMVWQNRDVYLQGPIWAKIPHTDGNFHPSPLMGGFGLEHPPPQILIKNTPVPANPPEVFTPAKFASFITQYSTGQVSVEIEWELQKENSKRWNPEIQYTSNYAKSNNVEFAVNPDGVYTEPRPIGTRYLTRNLMAADGYLPDWLEDNLSEGIREWWDLKPGAPKPKANQQKQDDGRGLVLPGYKYLGPFNGLDKGEPVNAADAAALEHDKAYDQQLKAGDNPYLRYNHADAEFQERLQEDTSFGGNLGRAVFQAKKRVLEPLGLVEEGAKTAPGKKRPIGSPDSSTGIGKKGQQPAKKKLNFGQTGDSESVPDPQPLGEPPAAPSSVGSGTMAAGGGAPMADNNEGADGVGNASGNWHCDSTWLGDRVITTSTRTWALPTYNNHLYKQISSSSSGATNDNHYFGYSTPWGYFDFNRFHCHFSPRDWQRLINNNWGFRPKKLRFKLLNIQVKEVTTNDGVTTIANNLTSTVQVFSDSEYQLPYVLGSAHQGCLPPFPADVFMIPQYGYLTLDNGSQSVGRSSFYCLEYFPSQMLRTGNNFEFSYSFEDVPFHSSYAHSQSLDRLMNPLIDQYLYYLARTQSTTGSTRELQFHQAGPNTMAEQSKNWLPGPCYRQQRLSKNLDFNNNSNFAWTAATKYHLNGRNSLTNPGIPMATNKDDEDQFFPINGVLVFGKTGAANKTTLENVLMTSEEEIKTTNPVATEEYGVVSSNLQSSTAGPQSQTINSQGALPGMVWQNRDVYLQGPIWAKIPHTDGNFHPSPLMGGFGLKHPPPQILIKNTPVPANPPEVFTPAKFASFITQYSTGQVSVEIEWELQKENSKRWNPEIQYTSNYAKSNNVEFAVNPDGVYTEPRPIGTRYLTRNL

SEQ ID NO: 4833 - protein, 729 aa, Adeno-associated virus
MAADGYLPDWLEDNLSEGIREWWDLKPGAPKPKANQQKQDDGRGLVLPGYKYLGPFNGLDKGEPVNAADAAALEHDKAYDQQLKAGDNPYLRYNHADAEFQERLQEDTSFGGNLGRAVFQAKKRVLEPLGLVEEGAKTAPGKKRPIDSPDSSTGIGKKGQQPAKKKLNFGQTGDSESVPDPQPLGEPPAAPSSVGSGTMAAGGGAPTADNNEGADGVGNASGNWHCDSTWLGDRVITTSTRTWALPTYNNHLYKQISSSSSGATNDNHYFGYSTPWGYFDFNRFHCHFSPRDWQRLINNNWGFRPKKLRFKLFNIQVKEVTTNDGVTTIANNLTSTVQVFSDSEYQLPYVLGSAHQGCLPPFPADVFMIPQYGYLTLNNGSQSVGRSSFYCLEYFPSQMLRTGNNFEFSYSFEDVPFHSSYAHSQSLDRLMNPLIDQYLYYLARTQSTTGSTRELQFHQAGPNTMAEQSKNWLPGPCYRQQRLSKNLDFNNNSNFAWTAATKYHLNGRNSLTNPGIPMATNKDDEDQFFPINGVLVFGKTGAANKTTLENVLMTSEEEIKTTNPVATEEYGVVSSNLQSSTAGPQSQTINSQGALPGMVWQNRDVYLQGPIWAKIPHTDGNFHPSPLMGGFGLEHPPPQILIKNTPVPANPPEVFTPAKFASFITQYSTGQVSVEIEWELQKENSKRWNPEIQYTSNYAKSNNVEFAVNPDGVYTEPRPIGTRYLTRNL

SEQ ID NO: 4834 - DNA, 3075 bp, Adeno-associated virus
  source 1..3075: mol_type = genomic DNA
tgagaactttcctttcaacgattgcgtcggacaagatggtgatctggtgggaggaggggaagatgaccgccaaggtcgtggagtcggccaaagccattcttggaggaagcaaggtgcgtgtggaccagaaatgcaagtcctcggcccagatagacccgactcccgtgatcgtcacctccaacaccaacatgtgcgccgtgattgacgggaactcaacgaccttcgagcaccagcagccgttgcaagaccggatgttcaaatttgaacttacccgccgtctggatcatgactttggaaaggtcaccaagcaggaagtgaaagactttttccggtgggcaaaggatcacgtggttgaggtggagcatgaattctacgtcaaaaagggtggagctaagaaaagacccgcccccagtgacgcagatataagtgagcccaaacgggcgcgcgagtcagttgcgcagccatcaacgtcagacgcggaagcttcgatcaactacgcggacaggtaccaaaaacaaatgttctcgtcacgtgggcatgaatctgatgctgtttccctgcagacaatgcgagagaatgaatcagaattcaaatatctgcttcactcacggacagaaagactgtttagagtgctttcccgtgtcagaatctcaacccgtttctgtcgtcaaaaaggcgtatcagaaactgtgctacattcatcatatcatgggaaaggtgccagacgcttgcactgcctgcgatctggtcaatgtggatttggatgactgcatctctgaacaataaatgatttaaatcaggtatggctgccgatggttatcctccagattggctcgaggacactctctctgaagggataagacagtggtggaagctcaaacctggcccaccaccaccaaagcccgcagagcggcataaggacgacagcaggggtcttgtgcttcctgggtacaagtacctcggacccttcaacggactcgacaagggggagccggtcaacgaggcagacgccgcggccctcgagcacgacaaggcctacgaccggcagctcgacagcggagacaacccgtacctcaagtacaaccacgccgacgcagagtttcaggagcgccttaaagaagatacgtcttttgggggcaacctcggacgagcagtcttccaggcgaaaaagagggttcttgaacctctgggcctggttgaggaacctgttaagacggctccgggaaaaaagaggccggtagagcactctcctgtggagccagactcctcctcgggaaccggaaaagcgggccagcggcctgcaagaaaaagattaaattttggtcagactggagacgcagactccgtacctgacccccagcctctcggacagccaccagcagccccctctggtctgggatctactacaatggctacaggcagtggcgcaccaatggcagacaataacgagggtgccgatggagtgggtaattcctcaggaaattggcattgcgattcccaatggctgggcgacagagtcatcaccaccagcacccgaacctgggccctgcccacatacaacaaccacctctacaagcaaatctccagccaatcaggagccagcaacgacaaccactactttggctacagcaccccctgggggtattttgacttcaacagattccactgccacttttcaccacgtgactggcaaagactcatcaacaacaactggggattccggcccaaaagactcaacttcaagctctttaatattcaagtcaaagaggtcacgcagaatgacggtacgacgacgattgccaataaccttaccagcacggttcaggtgtttactgactcggagtaccagctcccgtacgtcctgggctcggcgcatcaaggatgcctcccgccgtttccagcggacgtcttcatggtcccacagtatggatacctcaccctgaacaacgggagtcaggcggtaggacgctcttccttttactgcctggagtactttccttctcagatgctgcgtactggaaacaactttcagttcagctacacttttgaagacgtgcctttccacagcagctacgctcacagccagagtctggatcggctgatgaatcctctgatcgaccagtacctgtattatctgaacaagacacaaacaaatagtggaactcttcagcagtctcggctactgtttagccaagctggaccaaccaacatgtctcttcaagctaaaaactggctgcctggaccttgctacagacagcagcgtctgtcaaaacaggcaaacgacaacaacaacagcaactttccctggactgcagctacaaagtatcatctaaatggccgggactcgttggttaatccaggaccagctatggccagtcacaaggatgacgaagaaaagtttttccccatgcatggaaccctgatatttggtaaacaaggaacaaatgccaacgacgcggatttggaaaatgtcatgattacagatgaagaagaaatcagggccaccaatcccgtggctacggagcagtacgggactgtgtcaaataatttgcaaaactcaaacactggtccaactactggaactgtcaatcgccaaggagcgttacctggtatggtgtggcaggatcgagacgtgtacctgcagggacccatttgggccaagattcctcacaccgatggacactttcatccttctccactgatgggaggttttggactcaaacacccgcctcctcagatcatgatcaaaaacactcccgttccagccaatcctcccacaaacttcagttctgccaagtttgcttctttcatcacacagtattccacgggacaggtcagcgtggagatcgagtgggagctgcagaaggagaacagcaaacgctggaatcccgaaattcagtacacttccaactacaacaagtctgttaatgtggactttactgtggacactaatggtgtgtattcagagcctcgccccattggcaccagatacctgactcgtaatctgtaattgcttgttaatcaataaaccgtttaattcgtttcagttgaactttggtctctgcgaagggcgaa

SEQ ID NO: 4835 - DNA, 3142 bp, Adeno-associated virus
  source 1..3142: mol_type = genomic DNA
aaaacgacgggccagtgattgtaatacgactcactatagggcgaaattgaaattagcggccgcgaattcgcctttcgcagagaccaaagttcaactgaaacgaattaaacggtttattgattaacaagcaattacagattacgagtcaggtatctggtgccaatggggcgaggctctgaatacacaccattagtgtccacagtaaagtccacattaacagacttgttgtagttggaagtgtactgaatttcgggattccagcgtttgctgttctccttctgcagctcccactcgatctccacgctgacctgtcccgtggaatactgtgtgatgaaagaagcaaacttggcagaactgaagtttgtgggaggattggctggaacgggagtgtttttgatcatgatctgaggaggcgggtgtttgagtccaaaacctcccatcagtggagaaggatgaaagtgtccatcggtgtgaggaatcttggcccaaatgggtccctgcaggtacacgtctcgatcctgccacaccataccaggtaacgctccttggtgattgacagttccagtagttggaccagtgtttgagttttgcaaattatttgacacagtcccgtactgctccgtagccacgggattggtggccctgatttcttcttcatctgtaatcatgacattttccaaatccgcgtcgttggcatttgttccttgtttaccaaatatcagggttccatgcatggggaaaaacttttcttcgtcatccttgtgactggccatagctggtcctggattaaccaacgagtcccggccatttagatgatactttgtagctgcagtccagggaaagttgctgttgttgttgtcgtttgcctgttttgacagacgctgctgtctgtagcaaggtccaggcagccagtttttagcttgaagagacatgttggttggtccagcttggctaaacagtagccgagactgctgaagagttccactatttgtttgtgtcttgttcagataatacaggtactggtcgatcagaggattcatcagccgatccagactctggctgtgagcgtagctgctgtggaaaggcacgtcttcaaaagtgtagctgaactgaaagttgtttccagtacgcagcatctgagaaggaaagtactccaggcagtaaaaggaagagcgtcctaccgcctgactcccgttgttcagggtgaggtatccatactgtgggaccatgaagacgtccgctggaaacggcgggaggcatccttgatgcgccgagcccaggacgtacgggagctggtactccgagtcagtaaacacctgaaccgtgctggtaaggttattggcaatcgtcgtcgtaccgtcattctgcgtgacctctttgacttgaatattaaagagcttgaagttgagtcttttgggccggaatccccggttgttgttgacgagtctttgccagtcacgtggtgaaaagtggcagtggaatctgttgaagtcaaaatacccccagggggtgctgtagccaaagtagtggttgtcgttgctggctcctgattggctggagatttgcttgtagaggtggttgttgtatgtgggcagggcccaggttcgggtgctggtggtgatgactctgtcgcccagccattgggaatcgcaatgccaatttcctgaggaattacccactccatcggcaccctcgttattgtctgccattggtgcgccactgcctgtagccattgtagtagatcccagaccagagggggctgctggtggctgtccgagaggctgggggtcaggtacggagtctgcgtctccagtctgaccaaaatttaatctttttcttgcaggctgctggcccgcttttccggttcccgaggaggagtctggctccacaggagagtgctctaccggcctcttttttcccggagccgtcttaacaggctcctcaaccaggcccagaggttcaagaaccctctttttcgcctggaagactgctcgtccgaggttgcccccaaaagacgtatcttctttaaggcgctcctgaaactctgcgtcggcgtggttgtacttgaggtacgggttgtctccgctgtcgagctgccggtcgtaggccttgtcgtgctcgagggccgcggcgtctgcctcgttgaccggctcccccttgtcgagtccgttgaagggtccgaggtacttgtacccaggaagcacaagacccctgctgtcgtccttatgccgctctgcgggctttggtggtggtgggccaggtttgagcttccaccactgtcttattccttcagagagagtgtcctcgagccaatctggaagataaccatcggcagccatacctgatttaaatcatttattgttcagagatgcagtcatccaaatccacattgaccagatcgcaggcagtgcaagcgtctggcacctttcccatgatatgatgaatgtagcacagtttctgatacgcctttttgacgacagaaacgggttgagattctgacacgggaaagcactctaaacagtctttctgtccgtgagtgaagcagatatttgaattctgattcattctctcgcattgtctgcagggaaacagcatcagattcatgcccacgtgacgagaacatttgttttggtacctgtccgcgtagttgatcgaagcttccgcgtctgacgtcgatggctgcgcaactgactcgcgcgcccgtttgggctcacttatatctgcgtcactgggggcgggtcttttcttagctccaccctttttgacgtagaattcatgctccacctcaaccacgtgatcctttgcccaccggaaaaagtctttcacttcctgcttggtgacctttccaaagtcatgatccagacggcgggtaagttcaaatttgaacatccggtcttgcaacggctgctggtgctcgaaggtcgttgagttcccgtcaatcacggcgcacatgttggtgttggaggtgacgatcacgggagtcgggtctatctgggccgaggacttgcatttctggtccacacgcaccttgcttcctccaagaatggctttggccgactccacgaccttggcggtcatcttcccctcctcccaccagatcaccatcttgtcgacgcaatggtaaaaggaaagttctcattgg

SEQ ID NO: 4836 - DNA, 2208 bp, Adeno-associated virus
  source 1..2208: mol_type = genomic DNA
atggctgccgatggttatcttccagattggctcgaggacactctctctgaaggaataagacagtggtggaagctcaaacctggcccaccaccaccaaagcccgcagagcggcataaggacgacagcaggggtcttgtgcttcctgggtacaagtacctcggacccttcaacggactcgacaagggggagccggtcaacgaggcagacgccgcggccctcgagcacgacaaggcctacgaccggcagctcgacagcggagacaacccgtacctcaagtacaaccacgccgacgcagagtttcaggagcgccttaaagaagatacgtcttttgggggcaacctcggacgagcagtcttccaggcgaaaaagagggttcttgaacctctgggcctggttgaggaacctgttaagacggctccgggaaaaaagaggccggtagagcactctcctgtggagccagactcctcctcgggaaccggaaaagcgggccagcagcctgcaagaaaaagattaaattttggtcagactggagacgcagactccgtacctgacccccagcctctcggacagccaccagcagccccctctggtctgggatctactacaatggctacaggcagtggcgcaccaatggcagacaataacgagggtgccgatggagtgggtaattcctcaggaaattggcattgcgattcccaatggctgggcgacagagtcatcaccaccagcacccgaacctgggccctgcccacatacaacaaccacctctacaagcaaatctccagccaatcaggagccagcaacgacaaccactactttggctacagcaccccctgggggtattttgacttcaacagattccactgccacttttcaccacgtgactggcaaagactcatcaacaacaactggggattccggcccaaaagactcaacttcaagctctttaatattcaagtcaaagaggtcacgcagaatggcggtacgacgacgattgccaataaccttaccagcacggttcaggtgtttactgactcggagtaccagctcccgtacgtcctgggctcggcgcatcaaggatgcctcccgccgtttccagcggacgtcttcatggtcccacagtatggatacctcaccctgaacaacgggagtcaggcggtaggacgctcttccttttactgcctggagtactttccttctcagatgctgcgtactggaaacaactttcagttcagctacacttttgaagacgtgcctttccacagcagctacgctcacagccagagtctggatcggctgatgaatcctctgatcgaccagtacctgtattatctgaacaagacacaaacaaatagtggaactcttcagcagtctcggctactgtttagccaagctggaccaaccaacatgtctcttcaagctaaaaactggctgcctggaccttgctacagacagcagcgtctgtcaaaacaggcaaacggcaacaacaacagcaactttccctggactgcagctacaaagtatcatctaaatggccgggactcgttggttaatccaggaccagctatggccagtcacaaggatgacgaagaaaagtttttccccatgcatggaaccctgatatttggtaaacaaggaacaaatgccaacgacgcggatttggaaaatgtcatgattacagatgaagaagaaatcagggccaccaatcccgtggctacggagcagtacgggactgtgtcaaataatttgcaaaactcaaacactggtccaactactggaactgtcaatcaccaaggagcgttacctggtatggtgtggcaggatcgagacgtgtacctgcagggacccatttgggccaagattcctcacaccgatggacactttcatccttctccactgacgggaggttttggactcaaacacccgcctcctcagatcatgatcaaaaacactcccgttccagccaatcctcccacaaacttcagttctgccaagtttgcttctttcatcacacagtattccacgggacaggtcagcgtggagatcgagtgggagctgcagaaggagaacagcaaacgctggaatcccgaaattcagtacacttccaactacaacaagtctgttaatgtggactttactgtggacactaatggtgtgtattcagagcctcgccccattggcaccagatacctgactcgtaatctgtaa

SEQ ID NO: 4837 - protein, 735 aa, Adeno-associated virus
MAADGYLPDWLEDTLSEGIRQWWKLKPGPPPPKPAERHKDDSRGLVLPGYKYLGPFNGLDKGEPVNEADAAALEHDKAYDRQLDSGDNPYLKYNHADAEFQERLKEDTSFGGNLGRAVFQAKKRVLEPLGLVEEPVKTAPGKKRPVEHSPVEPDSSSGTGKAGQQPARKRLNFGQTGDADSVPDPQPLGQPPAAPSGLGSTTMATGSGAPMADNNEGADGVGNSSGNWHCDSQWLGDRVITTSTRTWALPTYNNHLYKQISSQSGASNDNHYFGYSTPWGYFDFNRFHCHFSPRDWQRLINNNWGFRPKRLNFKLFNIQVKEVTQNGGTTTIANNLTSTVQVFTDSEYQLPYVLGSAHQGCLPPFPADVFMVPQYGYLTLNNGSQAVGRSSFYCLEYFPSQMLRTGNNFQFSYTFEDVPFHSSYAHSQSLDRLMNPLIDQYLYYLNKTQTNSGTLQQSRLLFSQAGPTNMSLQAKNWLPGPCYRQQRLSKQANGNNNSNFPWTAATKYHLNGRDSLVNPGPAMASHKDDEEKFFPMHGTLIFGKQGTNANDADLENVMITDEEEIRATNPVATEQYGTVSNNLQNSNTGPTTGTVNHQGALPGMVWQDRDVYLQGPIWAKIPHTDGHFHPSPLTGGFGLKHPPPQIMIKNTPVPANPPTNFSSAKFASFITQYSTGQVSVEIEWELQKENSKRWNPEIQYTSNYNKSVNVDFTVDTNGVYSEPRPIGTRYLTRNL

SEQ ID NO: 4838 - DNA, 2208 bp, Adeno-associated virus
  source 1..2208: mol_type = genomic DNA
atggctgccgatggttatcttccagattggctcgaggacactctctctgaaggaataagacagtggtggaagctcaaacctggcccaccaccaccaaagctcgcagagcggcatcaggacgacagcaggggtcttgtgcttcctgggtacaagtacctcggacccttcaacggactcgacaaaggagagccggtcaacgaggcagacgccgcggccctcgagcacgacaaggcctacgaccggcagctcgacagcggagacaacccgtacctcaagtacaaccacgccgacgcggagtttcaggagcgtcttaaagaagatacgtcttttgggggcaacctcggacgagcagtcttccaggcgaaaaagagggttcttgaacctctgggcctggttgaggaacctgttaagacggctccgggaaaaaagaggccggtagagcactctcctgtggagccagactcctcctcgggaaccggaaaggcgggccatcagcctgcgagaaagagattgaattttggtcagactggagacgcagactccgtacctgacccccagcctctcggacagccaccagcagcccccacaagtctgggatctactacaatggctacaggcagtggcgcaccaatggcagacaataacgagggtgccgatggagtgggtaattcctcaggaaattggcattgcgattcccaatggctgggcgacagagtcatcaccaccagcacccgaacctgggccctgcccacctacaacaaccacctctacaagcaaatctccagccaatcaggagcctcgaacgacaaccactactttggctacagcaccccctgggggtattttgacttcaacagattccactgtcacttctccccacgtgattggcaaagactcatcaacaacaactggggattccgacccaagagactcaacttcaagctctttaacattcaagtcaaagaggtcacgcagaatgacggtacgacgacgattgccaataaccttaccagcacggttcaggtgtttactgactcggagtaccagctcccgtacgtcctcggctcggcgcatcaaggatgcctcccgccgtttccagcggacgtcttcacggtcccacagtatggatacctcaccctgaacaacgggagtcaggcggtaggacgctcttccttttactgcctggagtactttccttctcagatgctgcgtactggaaacaaccttaccttcagctacacctttgaggacgttcctttccacagcagctacgctcacagccagagtttggaccggctgatgaatcctctgatcgaccagtatctatattatctgaacaggacacaatcaaatagtggaactcttcagcagtctaggctactgtttagccaagctggacccaccagcatgtctcttcaagctaaaaactggctgcctggaccttgctacagacagcagcgtctttcaaagcaggcaaacgacaacaacaacagcaactttccctggactgcggctacaaagtatcatctaaatggccgggactcgttggttaatccaggaccagctatggccagccacaaagacgatgaagaaaagtttttccccatgcatggaaccctgatatttggtaaacaaggaacaaatgctaacgacgcggatttggagcatgttatgattacagatgaagaagaaatcaggaccaccaatcctgtggctacagagcagtacggaaacgtgtcaaataatttgcaaaactcaaatactggtccaactacagaaaatgtcaatcaccagggagcgttacctggtatggtgtggcaggatcgagacgtgtacctgcagggacccatttgggccaagattcctcacaccgacggacactttcacccttctccactgatgggaggttttggactcaaacacccgcctcctcaaatcatgatcaaaaacactcccgttccagccaatcctcccacaaactacagttctgccaagtttgcttctttcatcacacagtattccacgggccaggtcagcgtggagattgagtgggagctgcggaaggagaacagcaaacgctggaaccccgagatccagtatacttccaactacaacaaatctgttaatgtggactttactgtggacactaatggtgtgtattcagagcctcgccccattggcaccagatacctgactcgtaatctgtaa

SEQ ID NO: 4839 - protein, 735 aa, Adeno-associated virus
MAADGYLPDWLEDTLSEGIRQWWKLKPGPPPPKLAERHQDDSRGLVLPGYKYLGPFNGLDKGEPVNEADAAALEHDKAYDRQLDSGDNPYLKYNHADAEFQERLKEDTSFGGNLGRAVFQAKKRVLEPLGLVEEPVKTAPGKKRPVEHSPVEPDSSSGTGKAGHQPARKRLNFGQTGDADSVPDPQPLGQPPAAPTSLGSTTMATGSGAPMADNNEGADGVGNSSGNWHCDSQWLGDRVITTSTRTWALPTYNNHLYKQISSQSGASNDNHYFGYSTPWGYFDFNRFHCHFSPRDWQRLINNNWGFRPKRLNFKLFNIQVKEVTQNDGTTTIANNLTSTVQVFTDSEYQLPYVLGSAHQGCLPPFPADVFTVPQYGYLTLNNGSQAVGRSSFYCLEYFPSQMLRTGNNLTFSYTFEDVPFHSSYAHSQSLDRLMNPLIDQYLYYLNRTQSNSGTLQQSRLLFSQAGPTSMSLQAKNWLPGPCYRQQRLSKQANDNNNSNFPWTAATKYHLNGRDSLVNPGPAMASHKDDEEKFFPMHGTLIFGKQGTNANDADLEHVMITDEEEIRTTNPVATEQYGNVSNNLQNSNTGPTTENVNHQGALPGMVWQDRDVYLQGPIWAKIPHTDGHFHPSPLMGGFGLKHPPPQIMIKNTPVPANPPTNYSSAKFASFITQYSTGQVSVEIEWELRKENSKRWNPEIQYTSNYNKSVNVDFTVDTNGVYSEPRPIGTRYLTRNL

SEQ ID NO: 4840 - DNA, 2208 bp, Adeno-associated virus
  source 1..2208: mol_type = genomic DNA
atggctgccgatggttatcttccagattggctcgaggacactctctctgaaggaataagacagtggtggaagctcaaacctggcccaccaccaccaaagcccgcagagcggcatcaggacgacagcaggggtcttgtgcttcctgggtacaagtacctcggacccttcaacggactcgacaaaggagagccggtcaacgaggcagacgccgcggccctcgagcacgacaaggcctacgaccggcagctcgacagcggagacaacccgtacctcaagtacaaccacgccgacgcggagtttcaggagcgtcttaaagaagatacgtcttttgggggcaacctcggacgagcagtcttccaggcgaaaaagagggttcttgaacctctgggcctggttgaggaacctgttaagacggctccgggaaaaaagaggccggtagagcactctcctgtggagccagactcctcctcgggaaccggaaaagcgggccatcagcctgcgagaaagagattgaattttggtcagactggagacgcagactccgtacctgacccccagcctctcggacagccaccagcagcccccacaagtttgggatctactacaatggctacaggcagtggcgcaccaatggcagacaataacgagggtgccgatggagtgggtaattcctcaggaaattggcattgcgattcccaatggctgggcgacagagtcatcaccaccagcacccgaacctgggccctgcccacctacaacaaccacctctacaagcaaatctccagccaatcaggagcctcgaacgacaaccactactttggctacagcaccccctgggggtattttgacttcaacagattccactgtcacttctccccacgtgattggcaaagactcatcaacaacaactggggattccgacccaagagactcaacttcaagctctttaacattcaagtcaaggaggtcacgcagaatgacggtacgacgacgattgccaataaccttaccagcacggttcaggtgtttactgactcggagtaccagctcccgtacgtcctcggctcggcgcatcaaggatgcctcccgccgtttccagcggacgtcttcatggtcccacagtatggatacctcaccctgaacaacgggagtcaggcggtaggacgctcttccttttactgcctggagtactttccttctcagatgctgcgtactggaaacaactttaccttcagctacacctttgaggacgttcctttccacagcagctacgctcacagccagagtttggaccggctgatgaatcctctgatcgaccagtatctatattatctgaacaggacacaatcaaatagtggaactcttcagcagtctaggctactgtttagccaagctggacccaccagcatgtctcttcaagctaaaaactggctgcctggaccttgctacagacagcagcgtctttcaaagcaggcaaacgacaacaacaacagcaactttccctggactgcggctacaaagtatcgtctaaatggccgggactcgttggttaatccaggaccagctatggccagccacaaagacgatgaagaaaagtttttccccatgcatggaaccctgatatttggtaaacaaggaacaaatgctaacgacgcggatttggagcatgttatgattacagatgaagaagaaatcaggaccaccaatcctgtggctacagagcagtacggaaacgtgtcaaataatttgcaaaactcaaatactggtccaactacagaaaatgtcaatcaccagggagcgttacctggtatggtgtggcaggatcgagacgtgtacctgcagggacccatttgggccaagattcctcacaccgacggacactttcacccttctccactgatgggaggttttggactcaaacacccgcctcctcaaatcatgatcaaaaacactcccgttccagccaatcctcccacaaacttcagttctgccaagtttgcttctttcatcacacagtattccacgggccaggtcagcgtggagattgagtgggagctgcagaaggagaacagcaaacgctggaaccccgagatccagtatacttccaactacaacaaatctgttaatgtggactttactgtggacactaatggtgtgtattcagagcctcgccccattggcaccagatacctgactcgtaatctgtaa

SEQ ID NO: 4841 - protein, 735 aa, Adeno-associated virus
MAADGYLPDWLEDTLSEGIRQWWKLKPGPPPPKPAERHQDDSRGLVLPGYKYLGPFNGLDKGEPVNEADAAALEHDKAYDRQLDSGDNPYLKYNHADAEFQERLKEDTSFGGNLGRAVFQAKKRVLEPLGLVEEPVKTAPGKKRPVEHSPVEPDSSSGTGKAGHQPARKRLNFGQTGDADSVPDPQPLGQPPAAPTSLGSTTMATGSGAPMADNNEGADGVGNSSGNWHCDSQWLGDRVITTSTRTWALPTYNNHLYKQISSQSGASNDNHYFGYSTPWGYFDFNRFHCHFSPRDWQRLINNNWGFRPKRLNFKLFNIQVKEVTQNDGTTTIANNLTSTVQVFTDSEYQLPYVLGSAHQGCLPPFPADVFMVPQYGYLTLNNGSQAVGRSSFYCLEYFPSQMLRTGNNFTFSYTFEDVPFHSSYAHSQSLDRLMNPLIDQYLYYLNRTQSNSGTLQQSRLLFSQAGPTSMSLQAKNWLPGPCYRQQRLSKQANDNNNSNFPWTAATKYRLNGRDSLVNPGPAMASHKDDEEKFFPMHGTLIFGKQGTNANDADLEHVMITDEEEIRTTNPVATEQYGNVSNNLQNSNTGPTTENVNHQGALPGMVWQDRDVYLQGPIWAKIPHTDGHFHPSPLMGGFGLKHPPPQIMIKNTPVPANPPTNFSSAKFASFITQYSTGQVSVEIEWELQKENSKRWNPEIQYTSNYNKSVNVDFTVDTNGVYSEPRPIGTRYLTRNL

SEQ ID NO: 4842 - DNA, 2208 bp, Adeno-associated virus
  source 1..2208: mol_type = genomic DNA
atggctgccgatggttatcttccagattggctcgaggacactctctctgaaggaataagacagtggtggaagctcaaacctggcccaccaccaccaaagcccgcagagcggcatcaggacgacagcaggggtcttgtgcttcctgggtacaagtacctcggacccttcaacggactcgacaaaggagagccggtcaacgaggcagacgccgcggccctcgagcacgacaaggcctacgaccggcagctcgacagcggagacaacccgtacctcaagtacaaccacgccgacgcggagtttcaggagcgtcttaaagaagatacgtcttttgggggcaacctcggacgagcagtcttccaggcgaaaaagagggttcttgaacctctgggcctggttgaggaacctgttaagacggctccgggaaaaaagaggccggtagagcactctcctgtggagccagactcctcctcgggaaccggaaaagcgggccatcagcctgcgagaaagagattgaattttggtcagactggagacgcagactccgtacctgacccccagcctctcggacagccaccagcagcccccacaagtttgggatctactacaatggctacaggcagtggcgcaccaatggcagacaataacgagggtgccgatggagtgggtaattcctcaggaaattggcattgcgattcccaatggctgggcgacagagtcatcaccaccagcacccgaacctgggccctgcccacctacaacaaccacctctacaagcaaatctccagccaatcaggagcctcgaacgacaaccactactttggctacagcaccccctgggggtattttgacttcaacagattccactgtcacttctccccacgtgattggcaaagactcatcaacaacaactggggattccgacccaagagactcaacttcaagctctttaacattcaagtcaaagaggtcacgcagaatgacggtacgacgacgattgccaataaccttaccagcacggttcaggtgtttactgactcggagtaccagctcccgtacgtcctcggctcggcgcatcaaggatgcctcccgccgtttccagcggacgtcttcatggtcccacagtatggatacctcaccctgaacaacgggagtcaggcggtaggacgcccttccttttactgcctggagtactttccttctcagatgctgcgtactggaaacaactttaccttcagctacacctttgaggacgttcctttccacagcagctacgctcacagccagagtttggaccggctgatgaatcctctgatcgaccagtatctatattatctgaacaggacacaatcaaatagtggaactcttcagcagtctaggctactgtttagccaagctggacccaccagcatgtctcttcaagctaaaaactggctgcctggaccttgctacagacagcagcgtctttcaaagcaggcaaacgacaacaacaacagcaactttccctggactgcggctacaaagtatcatctaaatggccgggactcgttggttaatccaggaccagctatggccagccacaaagacgatgaagaaaagtttttccccatgcatgggaccctgatatttggtaaacaaggaacaaatgctaacgacgcggatttggagcatgttatgattacagatgaagaagaaatcaggaccaccaatcctgtggctacagagcagtacggaaacgtgtcaaataatttgcaaaactcaaatactggtccaactacagaaaatgtcaatcaccagggagcgttacctggtatggtgtggcaggatcgagacgtgtacctgcagggacccatttgggccaagattcctcacaccgacggacactttcacccttctccactgatgggaggttttggactcaaacacccgcctcctcaaatcatgatcaaaaacactcccgttccagccaatcctcccacaaacttcagttctgccaagtttgcttctttcatcacacagtattccacgggccaggtcagcgtggagattgagtgggagctgcagaaggagaacagcaaacgctggaaccccgagatccagtatacttccaactacaacaaatctgttaatgtggactttactgtggacactaatggtgtgtattcagagcctcgccccattggcaccagatacctgactcgtaatctgtaa

SEQ ID NO: 4843 - protein, 735 aa, Adeno-associated virus
MAADGYLPDWLEDTLSEGIRQWWKLKPGPPPPKPAERHQDDSRGLVLPGYKYLGPFNGLDKGEPVNEADAAALEHDKAYDRQLDSGDNPYLKYNHADAEFQERLKEDTSFGGNLGRAVFQAKKRVLEPLGLVEEPVKTAPGKKRPVEHSPVEPDSSSGTGKAGHQPARKRLNFGQTGDADSVPDPQPLGQPPAAPTSLGSTTMATGSGAPMADNNEGADGVGNSSGNWHCDSQWLGDRVITTSTRTWALPTYNNHLYKQISSQSGASNDNHYFGYSTPWGYFDFNRFHCHFSPRDWQRLINNNWGFRPKRLNFKLFNIQVKEVTQNDGTTTIANNLTSTVQVFTDSEYQLPYVLGSAHQGCLPPFPADVFMVPQYGYLTLNNGSQAVGRPSFYCLEYFPSQMLRTGNNFTFSYTFEDVPFHSSYAHSQSLDRLMNPLIDQYLYYLNRTQSNSGTLQQSRLLFSQAGPTSMSLQAKNWLPGPCYRQQRLSKQANDNNNSNFPWTAATKYHLNGRDSLVNPGPAMASHKDDEEKFFPMHGTLIFGKQGTNANDADLEHVMITDEEEIRTTNPVATEQYGNVSNNLQNSNTGPTTENVNHQGALPGMVWQDRDVYLQGPIWAKIPHTDGHFHPSPLMGGFGLKHPPPQIMIKNTPVPANPPTNFSSAKFASFITQYSTGQVSVEIEWELQKENSKRWNPEIQYTSNYNKSVNVDFTVDTNGVYSEPRPIGTRYLTRNL

SEQ ID NO: 4844 - DNA, 2208 bp, Adeno-associated virus
  source 1..2208: mol_type = genomic DNA
atggctgccgatggttatcttccagattggctcgaggacactctctctgaaggaataagacagtggtggaagctcaaacctggcccaccaccaccaaagcccgcagagcggcataaggacgacagcaggggtcttgtgcttcctgggtacaagtacctcggacccttcaacggactcgacaagggagagccggtcaacgaggcagacgccgcggccctcgagcacgacaaggcctacgaccggcagctcgacagcggagacaacccgtacctcaagtacaaccacgccgacgcggagtttcaggagcgccttaaagaagatacgtcttttgggggcaacctcggacgagcagtcttccaggcaaaaaagagggttcttgaacctctgggcctggttgaggagcctgttaaaacggctccgggaaaaaagaggccggtagagcactctcctgcggagccagactcctcctcgggaaccggaaaagcgggccagcagcctgcaagaaaaagattgaatttcggtcagactggagacgcagactccgtacctgacccccagcctctcggacagccaccagcagccccctctggtctgggaactaatacgatggcttcaggcagtggcgcaccaatggcagacaataacgagggcgccgacggagtgggtaattcctcgggaaattggcattgcgattccacatggatgggcgacagagtcatcaccaccagcacccgaacttgggccctgcccacctacaacaaccatctctacaagcaaatctccagccaatcaggagccagcaacgacaaccactactttggctacagcaccccttgggggtattttgacttcaacagattccactgccacttttcaccacgtgactggcaaagactcatcaacaacaactggggattccggcccaagagactcaacttcaagctctttaacattcaagtcaaagaggtcacgcagaatgacggtacgacgacgattgccaataaccttaccagcacggttcaggtgtttactgactcggagtaccagctcccgtacgtcctcggctcggcgcatcaaggatgcctcccgccgttcccagcagacgtcttcatggtgccacagtatggatacctcaccctgaacaacgggagtcaggcagtaggacgctcttcattttactgcctggagtactttccttctcagatgctgcgtaccggaaacaactttaccttcagctacacctttgaggacgttcctttccacagcagctacgctcacagccagagtttggaccgtctcatgaatcctctcatcgaccagtacctgtattacttgagcagaacaaacactccaagcggaaccaccacgcagtccaggcttcagttttctcaggccggagcaagtgacattcgggaccagtctaggaactggcttcctggaccctgttaccgccagcagcgagtatcaaagacatctgcggataacaacaacagtgaatactcgtggactggagctaccaagtaccacctcaatggcagagactctctggtgaatccgggcccggccatggccagccacaaggacgatgaagaaaagttttttcctcagagcggggttctcatctttgggaagcaaggctcagagaaaacaaatgtggacattgaaaaggtcatgattacagacgaagaggaaatcaggaccaccaatcccgtggctacggagcagtatggttctgtatctaccaacctgcagggcggcaacacacaagcagctaccgcagatgtcaacacacaaggcgttcttccaggcatggtctggcaggacagagacgtgtacctgcaggggcccatctgggcaaagattccacacacggacggacattttcacccctctcccctcatgggcggattcggacttaaacaccctcctccacagattctcatcaagaacaccccggtacctgcgaatccttcgaccaccttcagtgcggcaaagtttgcttctttcatcacacagtattccacggggcaggtcagcgtggagatcgagtgggagctgcagaaggagaacagcaaacgctggaatcccgagatccagtacacttccaactacaacaaatctgttaatgtggactttactgttgacactaatggcgtgtattcagagcctcgccccattggcaccagatacctgactcgtaatctgtaa

SEQ ID NO: 4845 - protein, 735 aa, Adeno-associated virus
MAADGYLPDWLEDTLSEGIRQWWKLKPGPPPPKPAERHKDDSRGLVLPGYKYLGPFNGLDKGEPVNEADAAALEHDKAYDRQLDSGDNPYLKYNHADAEFQERLKEDTSFGGNLGRAVFQAKKRVLEPLGLVEEPVKTAPGKKRPVEHSPAEPDSSSGTGKAGQQPARKRLNFGQTGDADSVPDPQPLGQPPAAPSGLGTNTMASGSGAPMADNNEGADGVGNSSGNWHCDSTWMGDRVITTSTRTWALPTYNNHLYKQISSQSGASNDNHYFGYSTPWGYFDFNRFHCHFSPRDWQRLINNNWGFRPKRLNFKLFNIQVKEVTQNDGTTTIANNLTSTVQVFTDSEYQLPYVLGSAHQGCLPPFPADVFMVPQYGYLTLNNGSQAVGRSSFYCLEYFPSQMLRTGNNFTFSYTFEDVPFHSSYAHSQSLDRLMNPLIDQYLYYLSRTNTPSGTTTQSRLQFSQAGASDIRDQSRNWLPGPCYRQQRVSKTSADNNNSEYSWTGATKYHLNGRDSLVNPGPAMASHKDDEEKFFPQSGVLIFGKQGSEKTNVDIEKVMITDEEEIRTTNPVATEQYGSVSTNLQGGNTQAATADVNTQGVLPGMVWQDRDVYLQGPIWAKIPHTDGHFHPSPLMGGFGLKHPPPQILIKNTPVPANPSTTFSAAKFASFITQYSTGQVSVEIEWELQKENSKRWNPEIQYTSNYNKSVNVDFTVDTNGVYSEPRPIGTRYLTRNL

SEQ ID NO: 4846 - DNA, 3161 bp, Adeno-associated virus
  source 1..3161: mol_type = genomic DNA
gattgaatttagcggccgcgaattcgcccttgctgcgtcaactggaccaatgagaactttccattcaatgattgcgtcgacaagatggtgatctggtgggaggagggaaagatgaccgccaaggtcatggagtcggccaaagccattctcggaggaagcaaggtgcgcgtggaccagaaatgtaagtcctcggcccagatagacccgactcccgtgattgtcacctccaacaccaacatgtgcgccgtgattgacgggaactcaacgaccttcgagcaccagcagccgttgcaagaccggatgttcaaatttgaactcacccgccgtctggatcatgactttgggaaggtcaccaagcaggaagtcaaagactttttccggtgggcaaaggatcacgtggttgaggtggagcatgaattctacgtcaaaaagggtggagccaagaaaagacccgcccccagtgacgcagatataagtgagcccaaacgggcgcgcgggtcagttgcgcagccatcgacgtcagacgcggaagcttcgatcaactacgcggacaggtaccaaaacaaatgttctcgtcacgtgggcatgaatctgatgctgtttccctgcagacaatgcgagagaatgaatcaaaattcaaatatctgcttcactcacggacagaaggactgtttagagtgctttcccgtgtcagaatctcaacccgtttctgtcgtcaaaaaggcgtatcagaaactttgctacattcatcatatcatgggaaaggtgccagacgcttgcactgcctgcgatctggtcaatgtggatttggatgactgcatctctgaacaataaatgatttaaatcaggtatggctgccgatggttatcttccagattggctcaaggacactctctctgaaggaataagacagtggtggaagctcaaacctggcccaccaccaccaaagcccgcagagcggcataaggacgacagcgggggtcttgtgcttcctgggtacaagtacctcggacccttcaacggactcgacaagggagagccggtcaacgaggcagacgccgcggccctcgagtacgacaaggcctacgaccggcagctcgacagcggagacaacccgtacctcaagtacaaccacgccgacgcggagtttcaggagcgccttaaagaagatacgtcttttgggggcaacctcggacgagcagtcttccaggcgaaaaagagggttcttgaacctctgggcctggttgaggaacctgttaagacggctccgggaaaaaagaggccggtagagcactctcctgtggagccagactcctcctcgggaacaggaaaagcgggccagcagcctgcgagaaagagattgaattttggtcagactggagacgcagactccgtacctgacccccagcctctcggacagccaccagcagccccctctggtctgggaactaatacgatggctacaggcagtggcgcaccaatggcagacaataacgagggcgccgacggagtgggtaattcctcgggaagttggcattgcgattccacatggatgggcgacagagtcatcaccaccagcacccgaacctgggctctgcccacctacaacaaccatctgtacaagcagatctccagccaatcaggagccagcaacgacaaccactactttggctacagcaccccttgggggtattttgacttcaacagattccactgccacttttcaccacgtgactggcaaagactcatcaacaacaactggggattccggcccaagagactcaacttcaagctctttaacattcaagtcaaggaggtcacgcagaatgacggtacgacgacgattgccaataaccttaccagcacggttcaggtgtttactgactcggagtaccagctcccgtacgtccccggctcggcgcatcaaggatgcctcccgccgttcccagcagacgtcttcatggtgccacagtatggatacctcaccctgaacaacgggagtcaggcagtaggacgctcttcattttactgcctggagtactttccttctcagatgcttcgtaccggaaacaactttaccttcagctacacctttgaggatgttcctttccacagcagctacgctcacagccagagtttggaccgtctcatgaatcctctcatcgaccagtacctgtattacttgagcagaacaaacactccaagcggaaccaccacgcagtccaggcttcagttttctcaggccggagcaagtgacattcgggaccagtctaggaactggcttcctggaccctgttaccgccagcagcgagtatcaaagacagctgcggacaacaacaacagtgaatactcgtggactggagctaccaagtaccacctcaatggcagagactctctggtgaatccgggcccggccatggccagccacaaggacgatgaagaaaagttttttcctcaaagcggggttctcatctttgggaagcaaggctcagagaaaacaaatgtggacattgaaaaggtcatgattacagacgaagaggaaatcagaaccaccaatcccgtggccacggagcagtatggttctgtatctaccaacctccagagcggcaacacacaagcagctactgcagatgtcaacacacaaggcgttcttccaggcatggtctggcaggacagagacgtgcacctgcaggggcctatctgggcaaagattccacacacggacggacattttcacccctctcccctcatgggcggatttggacttaaacaccctcctccacagattctcatcaagaacaccccggtacctgcaaatccttcgaccaccttcagtgcggcaaagtttgcttccttcatcacacagtattccacagggcaggtcagcgtggagatcgagtgggagctgcagaaggagaacagcaaacgctggaaccccgagatccagtacacttccaactacaacaaatctgttaatgtggactttactgtggacactaatggtgtgtattcagagcctcgccccattggcaccagatacctgactcgtaatctgtaattgcttgttaatcaataaaccgtttaattcgtttcagttgaactttggtctctgcgaagggcgaattcgtttaaaccctgcaggactagtccctttagtgagg

SEQ ID NO: 4847 - DNA, 3162 bp, Adeno-associated virus
  source 1..3162: mol_type = genomic DNA
gaattgaatttagcggccgcgaattcgcccttcgcagagaccaaagttcaactgaaacgaattaaacggtttattgattaacaagcaattacagattacgagtcaggtatctggtgccaatggggcgaggctctgaatacacgccattagtgtccacagtaaagtccacattaacagacttgttgtagttggaagtgtactgaatttcgggattccagcgtttgctgttttccttctgcagctcccactcgatctccacgctgacctgtcccgtggagtactgtgtgatgaaggaagcaaactttgccgcactgaaggtggtcgaaggattcgcaggtaccggggtgttcttgatgagaatctgtggaggagggtgtttaagtccgaatccacccatgaggggagaggggtgaaaatgtccgtccgtgtgtggaatctttgcccagatgggcccctgaaggtacacatctctgtcctgccagaccatgcctggaagaacgccttgtgtgttgacatctgcggtagctgcttgtctgttgcctctctggaggttggtagatacagaaccgtactgctccgtagccacgggattggttgtcctgatttcctcttcgtctgtaatcatgaccttttcaatgtccacatttgttttctctgagccttgcttcccaaagatgagaaccccgctctgaggaaaaaacttttcttcattgtccttgtggcttgccatggccgggcccggattcaccagagagtctctgccattgaggtggtacttggtagctccagtccacgagtattcactgttgttgttatccgcagatgtctttgatactcgctgctggcggtaacagggtccaggaagccagttcctagactggtcccgaatgtcactcgctccggcctgagaaaactgaagccttgactgcgtggtggttccacttggagtgtttgttgtgctcaagtaatacaggtactggtcgatgagaggattcatgagacggtccagactctggctgtgagcgtagccgctgtggaaaggaacgtcctcaaaagtgtagctgaaggtaaagttgtttccggtacgcagcatctgagaaggaaagtactccaggcagtaaaatgaagagcgtcctactgcctgactcccgttgttcagggtgaggtatccatactgtggcaccatgaagacgtctgctgggaacggcgggaggcatccttgatgcgccgagccgaggacgtacgggagctggtactccgagtcagtaaacacctgaaccgtgctggtaaggttattggcaatcgtcgtcgtaccgtcattctgcgtgacctctttgacttgaatgttaaagagcttgaagttgagtctcttgggtcggaatccccagttgttgttgatgagtctttgccagtcacgtggtgaaaagtggcagtggaatctgttgaagtcaaaatacccccaaggggtgctgtagccaaagtagtgattgtcgttcgaggctcctgattggctggaaatttgtttgtagaggtggttgttgtaggtgggcagggcccaggttcgggtgctggtggtgatgactctgtcgcccatccatgtggaatcgcaatgccaatttcccgaggaattacccactccgtcggcgccctcgttattgtctgccattggtgcgccactgcctgtagccatcgtattagttcccagaccagagggggctgctggtggctgtccgagaggctgggggtcaggtactgagtctgcgtctccagtctgaccaaaattcaatctttttcttgcaggctgctggcccgcctttccggttcccgaggaggagtctggctccacaggagagtgctctaccggcctcttttttcctggagccgtcttgacaggttccccaaccaggcccagaggttcaagaaccctctttttcgcctggaagactgctcgtccgaggttgcccccaaaagacgtatcttctttaaggcgctcctgaaactccgcgtcggcgtggttgtacttgaggtacgggttgtctccgctgtcgagctgccggtcgtaggctttgtcgtgctcgagggccgcggcgtctgcctcgttgaccggctctcccttgtcgagtccgttgaagggtccgaggtacttgtacccaggaagcacaagacccctgctgtcgtccttatgccgctctgcgggctttggtggtggtgggccaggtttgagcttccaccactgtcttattccttcagagagagtgtcctcgagccaatctggaagataaccatcggcagccatacctgatttaaatcatttattgttcaaagatgcagtcatccaaatccacattgaccagatcgcaggcagtgcaagcgtctggcacctttcccatgatatgatgaatgtagcacagtttctgatacgcctttttgacgacagaaacgggttgagattctgacacgggaaagcactctaaacagtctttctgtccgtgagtgaagcagatatttgaattctgattcattctctcgcattgtctgcagggaaacagcatcagattcatgcccacgtgacgagaacatttgttttggtacctgtctgcgtagttgatcgaagcttccgcgtctgacgtcgatggctgcgcaactgactcgcgcacccgtttgggctcacttatatctgcgtcactgggggcgggtcttttcttggctccaccctttttgacgtagaattcatgctccacctcaaccacgtgatcctttgcccaccggaaaaagtctttgacttcctgcttggtgaccttcccaaagtcatgatccagacggcgggtgagttcaaatttgaacatccggtcttgcaacggctgctggtgttcgaaggtcgttgagttcccgtcaatcacggcgcacatgttggtgttggaggtgacgatcacgggagtcgggtctatctgggccgaggacttgcatttctggtccacgcgcaccttgcttcctccgagaatggctttggccgactccacgaccttggcggtcatcttcccctcctcccaccagatcaccatcttgtcgacacagtcgttgaagggaaagttctcattggtccagttgacgcagcaagggcgaattcgtttaaacctgcaggactagtccctttagtgaggg

SEQ ID NO: 4848 - DNA, 3164 bp, Adeno-associated virus
  source 1..3164: mol_type = genomic DNA
gcgaattgaatttagcggccgcgaattcgcccttcgcagagaccaaagttcaactgaaacgaattaaacggtttattgattaacaagcaattacaaattacgagtcaggtatctggtgccaatggggcgaggctctgaatacacgccattagtgtccacagtaaagtccacattaacagacttgttgtagttggaagtgtactgaatttcgggattccagcgtttgctgttttccttctgcagctcccactcgatctccacgctgacctgtcccgtggagtactgtgtgatgaaggaagcaaactttgccgcactgaaggtggtcgaaggattcgcaggtaccggggtgttcttgatgagaatctgtggaggagggtgtttaggtccgaatccacccatgaggggagaggggtgaaaatgtccgtccgtgtgtggaatctttgcccagatgggcccctgaaggtacacatctctgtcctgccagaccatgcctggaagaacgccttgtgtgttgacatctgcggtagctgcttgtctgttgcctctctggaggttggtagatacagaaccatactgctccgtagccacgggattggttgtcctgatttcctcttcgtctgtaatcatgaccttttcaatgtccacatttgttttctctgagccttgcttcccaaagatgagaaccccgctctgaggaaaaaacttttcttcattgtccttgtggcttgccatggccgggcccggattcaccagagagtctctgccattgaggtggtacttggtagctccagtccacgagtattcactgttgttgttatccgcagatgtctttgatactcgctgctggcggtaacagggtccaggaagccagttcctagactggtcccgaatgtcactcgctccggcctgagaaaactgaagccttgactgcgtggtggttccacttggagtgtttgttgtgctcaagtaatacaggtactggtcgatgagaggattcatgagacggtccagactctggctgtgagcgtagctgctgtggaaaggaacgtcctcaaaagtgtagctgaaggtaaagttgtttccggtacgcagcatctgagaaggaaagtactccgggcagtaaaatgaagagcgtcctactgcctgactcccgttgctcagggtgaggtatccatactgtggcaccatgaagacgtctgctgggaacggcgggaggcatccttgatgcgccgagccgaggacgtacgggagctggtactccgagtcagtaaacacctgaaccgtgctggtaaggttattggcaatcgtcgtcgtaccgtcattctgcgtgacctctttgacttgaatgttaaagagcttgaagttgagtctcttgggtcggaatccccagttgttgttgatgagtctttgccagtcacgtggtgaaaagtggcagtggaatctgttgaagtcaaaatacccccaaggggtgctgtagccaaagtagtgattgtcgttcgaggctcctgattggctggaaatttgtctgtagaggtggttgttgtaggtgggcagggcccaggttcgggtgctggtggtgatgactctgtcgcccatccatgtggaatcgcaatgccgatttcccgaggaattacccactccgtcggcgccctcgttattgtctgccattggtgcgccactgcctgtagccatcgtattagttcccagaccagagggggctgctggtggctgtccgagaggctgggggtcaggtactgagtctgcgtctccagtctgaccaaaattcaatctttttcttgcaggctgctggcccgcctttccggttcccgaggaggagtctggctccacaggagagtgctctaccggcctcttttttcccggagccgtcttaacaggttccccaaccaggcccagaggttcaagaaccctctttttcgcctggaagactgctcgtccgaggttgcccccaaaagacgtatcttctttaaggcgctcctgaaactccgcgtcggcgtggttgtacttgaggtacgggttgtctccgctgtcgagctgccggtcgtaggctttgtcgtgctcgagggccgcggcgtctgcctcgttgaccggctctcccttgtcgagtccgttgaagggtccgaggtacttgtacccaggaagcacaagacccctgctgtcgtccttatgccgctctgcgggctttggtggtggtgggccaggtttgagcttccaccactgtcttattccttcagagagagtgtcctcgagccaatctggaagataaccatcggcagccatacctgatttaaatcatttattgttcaaagatgcagtcatccaaatccacattgaccagatcgcaggcagtgcaagcgtctggcacctttcccatgatatgatgaatgtagcacagtttctgatacgcctttttgacgacagaaacgggttgagattctgacacgggaaagcactctaaacagtctttctgtccgtgagtgaagcagatatttgaattctgattcattctctcgcattgtctgcagggaaacagcatcagattcatgcccacgtgacgagaacatttgttttggtacctgtctgcgtagttgatcgaagcttccgcgtctgacgtcgatggctgcgcaactgactcgcgcacccgtttgggcccacttatatctgcgtcactgggggcgggtcttttcttggctccaccctttttgacgtagaattcatgctccacctcaaccacgtgatcctttgcccaccggaaaaagtctttgacttcctgcttggtgaccttcccaaagtcatgatccagacggcgggtgagttcaaatttgaacatccggtcttgcaacggctgctggtgttcgaaggtcgttgagttcccgtcaatcacggcgcacatgttggtgttggaggtgacgatcacgggagtcgggtctatctgggccgaggacttgcatttctggtccacgcgcaccttgcttcctccgagaatggctttggccgactccacgaccttggcggtcatcttcccctcctcccaccagatcaccatcttgtcgacacagtcgttgaagggaaagttctcattggtccagttgacgcagcaagggcgaattcgtttaaacctgcaggactagtccctttagtgaggg

SEQ ID NO: 4849 - DNA, 3163 bp, Adeno-associated virus
  source 1..3163: mol_type = genomic DNA
accctcactaaagggactagtcctgcaggtttaaacgaattcgcccttgctgcgtcaactggagcaatgagaactttcccttcaacgactgtgtcgacaagatggtgatttggtgggaggaggggaagatgaccgccaaggtcgtggagtcggccaaagccattctcggaggaagcaaggtgcgcgtggaccagaaatgcaagtcctcggcccagatagatccgactcccgtgatcgtcacctccaacaccaacatgtgcgccgtgattgacgggaactcaacgaccttcgaacaccagcagccgttgcaagaccggatgttcaaatttgaactcacccgccgtctggatcatgactttgggaaggtcaccaagcaggaagtcaaagactttttccggtgggcaaaggatcacgtggttgaggtggagcatggattctacgtcaaaaagggtggagccaagaaaagacccgcccctagtgacgcagatataagtgagcccaaacgggtgcgcgagtcagttgcgcagccatcgacgtcggacgcggaagcttcgatcaactacgcggacaggtaccaaaacaaatgttctcgtcacgtgggcatgaatctgatgctgtttccctgcagacaatgcgagagaatgaatcaaaattcaaatatctgcttcactcacggacagaaagactgtttagagtgctttcccgtgtcagaatctcaacctgtttctgtcgtcaaaaaggcgtatcagaaactgcgctacattcatcatatcatgggaaaggtgccagacgcttgcactgcctgcgatctggtcaatgtggatttggatgactgcatctctgaacaataaatgatttaaatcaggtatggctgccgatggttatcttccagattggctcgaggacactctctctgaaggaataagacagtggtggaagctcaaacctggcccaccaccaccaaagcccgcagagcggcataaggacgacagcaggggtcttgtgcttcctgggtacaagtacctcggacccttcaacggactcgacaagggagagccggtcaacgaggcagacgccgcggccctcgagcacgacaaggcctacgaccggcagctcgacagcggagacaacccgtacctcaagtacaaccacgccgacgcggagtttcaggagcgtcttaaagaagatacgtcttttgggggcaacctcggacgagcagtcttccaggcgaaaaagagggttcttgaacctctgggcctggttgaggaacctgttaagacggctccgggaaaaaagaggccggtagagcactctcctgcggagccagactcctcctcgggaaccggaaaagcgggccagcagcctgcaagaaaaagactgaatttcggtcagactggagacgcagactccgtacctgacccccagcctctcggacagccaccagcagcccccacaagtttgggatctactacaatggctacaggcagtggcgcaccaatggcagacaataacgagggtgccgatggagtgggtaattcctcaggaaattggcattgcgattcccaatggctgggcgacagagtcatcaccaccagcacccgaacctgggccctgcccacctacaacaaccacctttacaagcaaatctccagccaatcaggagcctcaaacgacaaccactactttggctacagcaccccctgggggtattttgacttcaacagattccactgccacttttcaccacgtgactggcaaagactcatcaacaacaactggggattccgacccaagagactcaacttcaagctctttaacattcaagtcaaagaggtcacgcagaatgacggtacgacgacgattgccaataaccttaccagcacggttcaggtgtttactgactcggagtaccagctcccgtacgtcctcggctcggcgcatcaaggatgcctcccgccgtttccagcggacgtcttcatggtcccacagtatggatacctcaccctgaacaacgggagtcaggcggtaggacgctcttccttttactgcctggagtgctttccttctcagatgctgcgtactggaaacaactttcagttcagctacacttttgaagacgtgcctttccacagcagctacgctcacagccagagtttggatcggctgatgaatcctctgatcgaccagtacctgtattatctaaacagaacacaaacagctagtggaactcagcagtctcggctactgtttagccaagctggacccacaagcatgtctcttcaagctaaaaactggctgcctggaccgtgttatcgccagcagcgtttgtcaaagcaggcaaacgacaacaacaacagcaactttccctggactggagctaccaagtaccacctcaatggcagagactctttggtgaacccgggcccggccatggccagccacaaggacgatgaagaaaagtttttccccatgcatggaaccctaatatttggtaaagaaggaacaaatgctaccaacgcggaattggaaaatgtcatgattacagatgaagaggaaatcaggaccaccaatcccgtggctacagagcagtacggatatgtgtcaaataatttgcaaaactcaaatactgctgcaagtactgaaactgtgaatcaccaaggagcattacctggtatggtgtggcaggatcgagacgtgtacctgcagggacccatttgggccaagattcctcacaccgatggacactttcatccttctccactgatgggaggttttggactcaaacacccgcctcctcagattatgatcaaaaacactcccgttccagccaatcctcccacaaacttcagttctgccaagtttgcttccttcatcacacagtattccacgggacaggtcagcgtggagatcgagtgggagctgcagaaggagaacagcaaacgctggaatcccgaaattcagtacacttccaactacaacaaatctgttaatgtggactttactgtggacactaatggtgtgtattcagagcctcgccccattggcaccagatacctgactcgtaatctgtaattgcttgttaatcaataaaccgtttaattcgtttcagttgaactttggtctctgcgaagggcgaattcgcggccgctaaattcaattcgcc

SEQ ID NO: 4850 - protein, 735 aa, Adeno-associated virus
MAADGYLPDWLEDTLSEGIRQWWKLKPGPPPPKPAERHKDDSRGLVLPGYKYLGPFNGLYKGEPVDEADAAALEHDKAYDRQLDSGDNPYLKYNHADAEFQERLKEDTSFGGNLGRAVFQAKKRVLEPLGLVGEPVKTAPGKKRPVEHSPVEPDSSSGTGKAGNQPARKRLNFGQTGDADSVPDPQPLGQPPAAPSGLGSTTMATGSGAPVADNNEGADGVGNSSGNWHCDSQWLGDRVITTSTRTWALPTYNNHLYKQISSQSGASNDNHYFGYSTPWGYFDFNRFHCHFSPRDRQRLINNNWGFRPKRLNFKLFNIQVKEVTQNDGTTTIANNLTSTVQVFTDSGYQLPYVLGLAHQGCLPPFPADVFMVPQYGYLTLNNGSQAVGRSSFYCLEYFPSQMLRTGNNFQFSYTFEDVPFHSSYAHSQSLDRLMNPLIDQYLYYLNKTQSNSGTLQQSRLLFSQAGPTSMSLQAKNWLPGPCYRQQRLSKQANDNNNSNFPWTAATKYHLNGRDSLVNPGPAMASHKDDEEKFFPMHGTLIFGKQGTNANDADLDNVMITDEEEIRTTNPVATEQYGYVSNNLQNSNTGPTTGTVNHQGALPGMVWQDRDVYLQGPIWAKIPHTDGHFHPSPLMGGFGLKHPPPQIMIKNTPVPANPPTNFSSAKFASFITQYSTGQVSVEIEWELQKEDSKRWNPEIQYTSNYNKPVNVDFTVDTNGVYSEPRPIGTRYLTRNL

SEQ ID NO: 4851 - DNA, 2208 bp, Adeno-associated virus
  source 1..2208: mol_type = genomic DNA
atggctgccgatggttatcttccagattggctcgaggacactctctctgaaggaataagacagtggtggaagctcaaacctggcccaccaccaccaaagcccgcagagcggcataaggacgacagcaggggtcttgtgcttcctgggtacaagtacctcggacccttcaacggactctacaagggagagccggtcgacgaggcagacgccgcggccctcgagcacgacaaggcctacgaccggcagctcgacagcggagacaacccgtacctcaagtacaaccacgccgacgcggagtttcaggagcgccttaaagaagatacgtcttttgggggcaacctcggacgagcagtcttccaggccaaaaagagggttcttgaacctctgggcttggttggggagcctgttaaaacggctccgggaaaaaagaggccggtagagcactctcctgtggagccagactcctcctcgggaaccggaaaagcgggcaaccagcctgcaagaaaaagattgaattttggtcagactggagacgcagactccgtacctgacccccagcctctcggacagccaccagcagccccctctggtctgggatctactacaatggctacaggcagtggcgcaccagtggcagacaataacgagggtgccgatggagtgggtaattcctcaggaaattggcattgcgattcccaatggctgggcgacagagtcatcaccaccagcacccgaacctgggctctgcccacctacaataaccacctctacaagcaaatctccagccaatcaggagcctcaaacgacaaccactactttggctacagcaccccctgggggtattttgacttcaacagattccactgccacttttcaccacgtgaccggcaaagactcatcaacaacaactggggattccgaccaaaaagactcaacttcaagctctttaacattcaagtcaaagaggtcacgcagaatgacggtacgacgacgattgccaataaccttaccagcacggttcaggtgtttactgactcggggtaccagctcccgtacgtcctcggcttggcgcatcaaggatgcctcccgccgttcccagcagacgtcttcatggtgccacagtatggatacctcaccctgaacaacgggagtcaggcggtaggacgctcttccttttactgcctggagtactttccttctcagatgctgcgtactggaaacaactttcagttcagctacacctttgaagacgttcctttccacagcagctacgctcacagccagagtctggatcggctgatgaatcctctgatcgaccagtacctgtattatctgaacaagacacaatcaaatagtggaactcttcagcagtctcggctactgtttagccaagctggacccaccagcatgtctcttcaagctaaaaactggctgcctggaccttgctacagacagcagcgtctgtcaaagcaggcaaacgacaacaacaacagcaactttccctggactgcggctacaaagtatcatctaaatggccgggactcgttggttaatccaggaccagctatggccagccacaaagacgatgaagaaaagtttttccccatgcatggaaccctgatatttggtaaacaaggaacaaatgctaacgacgcggatttggacaatgtcatgattacagatgaagaagaaatccgcaccaccaatcccgtggctacggagcagtacggatatgtgtcaaataatttgcaaaactcaaatactggtccaactactggaactgtcaatcaccaaggagcgttacctggtatggtgtggcaggatcgagacgtgtacctgcagggacccatttgggccaagattcctcacaccgatggacactttcatccttctccacttatgggaggttttggactcaaacacccacctcctcagatcatgattaaaaacactcccgttccagccaatcctcccacaaacttcagttctgccaagtttgcttctttcatcacacagtattccacgggacaagtcagcgtggagatcgagtgggagctgcagaaggaggacagcaaacgctggaaccccgagatccagtacacttccaactataacaaacctgttaatgtggactttactgtggacactaatggtgtgtattcagagcctcgccccattggcaccagatacctgactcgtaatctgtaa

SEQ ID NO: 4852 - DNA, 3161 bp, Adeno-associated virus
  source 1..3161: mol_type = genomic DNA
cgaattgatttagcggccgcgaattcgcccttcgcagagaccaaagttcaactgaaacgaattaaacggtttattgattaacaagcaattacagattacgagtcaggtatctggtgccaatggggcgaggctctgaatacacaccattagtgtccacagtaaagtccacattaacagatttgttgtagttggaagtgtactggatctcgggattccagcgtttgctgttctccttctgtagctcccactcgatctccacgctgacccgccccgtggaatactgtgtgatgaaggaagcaaactttgccgcactgaaggtggtcgaaggattcgcaggtaccggggtgtttttgatgagaatctgtggaggagggtgtttaagtccgaatccgcccatgaggggagaggggtgaaaatgtccgtccgtgtgcggaatctttgcccagataggcccctgcaggtacacgtctctgtcctgccagaccatgcctggaagaacgccttgtgtgttgacatctgcagtagatgcttgtgtgttgccgctctggaggttggtagatacagaaccatactgctccgtggccacgggattggtggttctgatttcctcttcgtctgtaatcatgaccttttcaatgtccacatttgttttctctgatccttgttttccaaagatgagaaccccgctctgaggaaaaaacttttcttcatcgtccttgtggctggccattgccgggcccggattcaccagagagtctctgccattgaggtggtacttggtagctccaatccacgagtattcactgttgttgttgtccgcagatgtctttgatactcgctgctggcggtaacagggtccaggaagccagttcctagactgatcccgaatgtcactcgctccggcctgagaaaactgaagcctggactgcgtggtggttccgcttggagtgtttgttctgctcaagtaatacaggtactggtcgatgagaggattcatgagacggtccaaactctggctgtgagcgtagctgctgtggaaaggaacatcctcaaaggtgtagctgaaggtaaagttgtttccggtacgcagcatctgagaagggaagtactccaggcagtaaaatgaagagcgtcctactgcctgactcccgttgttcagggtgaggtatccatactgtggcaccatgaagacgtctgctgggaacggcgggaggcatccttgatgcgccgagccgaggacgtacgggagctggtactccgagtcagtaaacacctgaaccgtgctggtaaggttattggcaatcgtcgtcgtaccatcattctgcgtgacctctctgacttgaatgttaaagagcttgaagttgagtctcttgggccggaatccccagttgttgttgatgagtctttgccagtcacgtggtgaaaagtggcagtggaatctgttgaagtcaaaatacccccaaggggtgctgtagccaaagtagtggttgtcgttgctggctcctgattggctggaaatctgcttgtacagatggttgttgtaggtgggcagagcccaggttcgggtgctggtggtgatgactctgtcgcccatccatgtggaatcgcaatgccaatttcccgaggaattacccactccgtcggcgccatcgttattgtctgccattggtgcgccactgcctgtagccatcgtattagttcccagaccagagggggctgctggtggctgtccgagaggctgggggtcaggtacggagtctgcgtctccagtctgaccgaaattcaatctctttcttgcaggctggttgcccgcttttccggttcccgaggaggagtctggctccacaggagagtgctctaccggcctcttttttcccggagccgtcttaacaggctcctcaaccaggcccagaggttcaagaaccctcttttttgcctggaagactgctcgtccgaggttgcccccaaaagacgtatcttctttaaggcgctcctgaaactccgcgtcggcgtggtcgtacttgaggtacgggttgtctccgctgtcgagctgccggtcgtaggccttgtcgtgctcgagggccgcggcgtctgcctcgttgaccggctctcccttgtcgagtccgttgaagggtccgaggtacttgtacccaggaagcacaagacccctgctgtcgtccttatgccgctctgcgggctttggtggtggtgggccaggtttgagcttccaccactgtcttattccttcagagagagtgtcctcgagccaatctggaagataaccatcggcagccatacctgatttaaatcatttattgttcagagatgcagtcatccaaatccacattgaccagatcgcaggcagtgcaagcgtctggcacctttcccatgatatgatgaatgtagcaaagtttctgatacgcctttttgacgacagaaacgggttgagattctgacacgggaaagcactctaaacagtctttctgtccgtgagtgaagcagatatttgaattctgattcattctctcgcattgtctgcagggaaacagcatcagattcatgcccacgtgacgagaacatttgttttggtacctgtccgcgtagttgatcgaagcttccgcgtctgacgtcgatggctgcgcaactgactcgcgcgcccgtttgggctcacttatatctgcgtcactgggggcgggtcttttcttggctccaccctttttgacgtagaattcatgctccacctcaaccacgtgatcctttgcccaccggaaaaagtctttcacttcctgcttggtgaccttcccaaagtcatgatccagacggcgggttagttcaaatttgaacatccggtcttgcaacggctgctggtgttcgaaggtcgttgagttcccgtcaatcacggcgcacatgttggtgttggaggtggcgatcacgggagtcgggtctatctgggccgaggacttgcacttttggtccacgcgcaccttgcttcctccgagaatggcttcggccgattccacgaccttggcggtcatctttccctcctcccaccagatcaccatcttgtcgacacagtcgttgaagggaaagttctcattggtccagttgacgcagcaagggcgaattcgtttaaacctgcaggaactagtcccttagtgagg

SEQ ID NO: 4853 - protein, 735 aa, Adeno-associated virus
MAADGYLPDWLEDTLSEGIRQWWKLKPGPPPPKPAERHKDDSRGLVLPGYKYLGPFNGLYKGEPVNEADAAALEHDKAYDRQLDSGDNPYLKYNHAGAEFQERLKEDTSFGGNLGRAVFQAKKRVLEPLGLVEEPVKTAPGKKRPVEHSPVEPDSSSGTGKAGNQPARKRLNFGQTGDADSVPDPQPLGQPPAAPSGLGSTTMATGSGAPVADNNEGADGVGNSSGNWHCDSQWLGDRVITTSTRTWALPTYNNHLYKQISSQSGASNDNHYFGYSTPWGYFDFNRFHCHFSPRDWQRLINNNWGFRPKRLNFKLFNIQVKEVTQNDGTTTIANNLTSTVQVFTDSEYQLPYVLGSAHQGCLPPFPADVFMVPQYGYLTLNNGSQAVGRSSFYCLEYFPSQMLRTGNNFQFSYTFEDVPFHSSYAHSQSLDRLMNPLIDQYLYYLNKTQSNSGTLQQSRLLFSQAGPTSMSLQAKNWLPGPCYRQQRLSKQANDNNNSNFPWTAATKYHLNGRDSLVNPGPAMASHKDDEEKFFPMHGTLIFGKQGTNANDADLDNVMITDEEEIRTTNPVATEQYGYVSNNLQDSNTGPTTGTVNHQGALPGMVWQDRDVYLQGPIWAKIPHTDGHFHPSPLMGGFGLKHPPPQIMIKNTPVPANPPTNFSSAKFASFITQYSTGQVSVEIEWELQKENSKRWNPEIQYTSNYNKSVNVDFTVDTNGVYSEPRPIGTRYLTRNL

SEQ ID NO: 4854 - DNA, 2208 bp, Adeno-associated virus
  source 1..2208: mol_type = genomic DNA
atggctgccgatggttatcttccagattggctcgaggacactctctctgaaggaataagacagtggtggaagctcaaacctggcccaccaccgccaaagcccgcagagcggcataaggacgacagcaggggtcttgtgcttcctgggtacaagtacctcggacccttcaacggactctacaagggagagccggtcaacgaggcagacgccgcggccctcgagcacgacaaggcctacgaccggcagctcgacagcggagacaacccgtacctcaagtacaaccacgccggcgcggagtttcaggagcgccttaaagaagatacgtcttttgggggcaacctcggacgagcagtcttccaggccaaaaagagggttcttgaacctctgggcttggttgaggagcctgttaaaacggctccgggaaaaaagaggccggtagagcactctcctgtggagccagactcctcctcgggaaccggaaaagcgggcaaccagcctgcaagaaaaagattgaattttggtcagactggagacgcagactccgtacctgacccccagcctctcggacagccaccagcagccccctctggtctgggatctactacaatggctacaggcagtggcgcaccagtggcagacaataacgagggtgccgatggagtgggtaattcctcaggaaattggcattgcgattcccaatggctgggcgacagagtcatcaccaccagcacccgaacctgggctctgcccacctacaacaaccacctctacaagcaaatctccagccaatcaggagcctcaaacgacaaccactactttggctacagcaccccctgggggtattttgacttcaacagattccactgccacttttcaccacgtgactggcaaagactcatcaacaacaactggggattccgaccaaagagactcaacttcaagctctttaacattcaagtcaaagaggtcacgcagaatgacggtacgacgacgattgccaataaccttaccagcacggttcaggtgtttactgactcggagtaccagctcccgtacgtcctcggctcggcgcatcaaggatgcctcccgccgttcccagcagacgtcttcatggtgccacagtatggatacctcaccctgaacaacgggagtcaggcggtaggacgctcttccttttactgcctggagtactttccttctcagatgctgcgtactggaaacaactttcagttcagctacacctttgaagacgttcctttccacagcagctacgctcacagccagagtctggatcggctgatgaatcctctgatcgaccagtacctgtattatctgaacaagacacaatcaaatagtggaacccttcagcagtctcggctactgtttagccaagctggacccaccagcatgtctcttcaagctaaaaactggctgcctggaccttgctacagacagcagcgtctgtcaaagcaggcaaacgacaacaacaacagcaactttccctggactgcggctacaaagtatcatctaaatggccgggactcgttggttaatccaggaccagctatggccagccacaaagacgatgaagaaaagtttttccccatgcatggaaccctgatatttggtaaacaaggaacaaatgctaacgacgcggatttggacaatgtcatgattacagatgaagaagaaatccgcaccaccaatcccgtggctacggagcagtacggatatgtgtcaaataatttgcaagactcaaatactggtccaactactggaactgtcaatcaccaaggagcgttacctggtatggtgtggcaggatcgagacgtgtacctgcagggacccatttgggccaagattcctcacaccgatggacactttcatccttctccacttatgggaggttttggactcaaacacccacctcctcagatcatgattaaaaacactcccgttccagccaatcctcccacaaacttcagttctgccaagtttgcttctttcatcacacagtattccacgggacaagtcagcgtagagatcgagtgggagctgcagaaggagaacagcaaacgctggaaccccgagatccagtacacttccaactataacaaatctgttaatgtggactttactgtggacactaatggtgtgtattcagagcctcgccccattggcaccagatacctgactcgtaatctgtaa

SEQ ID NO: 4855 - protein, 738 aa, Adeno-associated virus
MAADGYLPDWLEDNLSEGIREWWDLKPGAPKPKANQQKQDDGRGLVLPGCKYLGPFNGLDKGEPVNAADAAALEHDKAYDQQLKAGDNPYLRYNHADAEFQERLQEDTSFGGNLGRAVFQAKKRVLEPLGLVEEGAKTAPGKKRPVEPSPQRSPDSSTGIGKTGQQPAKKRLNFGQTGDSESVPDPQPIGEPPAGPSGLGSGTMAAGGGAPMADNNEGADGVGSSSGNWHCDSTWLGDRVITTSTRTWALPTYNNHLYKQISNGTSGGSTNDNTYFGYSTPWGYFDFNRFHCHFSPRDWQRLINNNWGFRPKRLNFKLFNIQVKEVTQNEGTKTIANNLTSTIQVFTDSEYQLPYVLGSAHQGCPPPFPADVFMIPQYGYLTLNNGSQAVGRSSFYCLEYFPSQMRRTGNNFEFSYQFEDVPFHSSYAHSQSLDRLMNPLIDQYLYYLSRTQSTGGTAGTQQLLFSQAGPNNMSAQAKNWLPGPCYRQQRVSTTLSQNNNSNFAWTGATKYHLNGRDSLVNPGVAMATHKDDEERFFPSSGVLMFGKQGAGKDNVDYSSVMLTSEEEIKTTNPVATEQYGVVADNLQQQNAAPIVGAVNSQGALPGMVWQNRDVYLQGPIWAKIPHTDGNFHPSPLMGGFGLKHPPPQILIKNTPVPADPPTTFSQAKLASFITQYSTGQVSVEIEWELQKENSKRWNPEIQYTSNYNKSVNVDFTVDTNGVYSEPRPIGTRYLTRNL

SEQ ID NO: 4856 - DNA, 2217 bp, Adeno-associated virus
  source 1..2217: mol_type = genomic DNA
atggctgccgatggttatcttccagattggctcgaggacaacctctctgagggcattcgcgagtggtgggacttgaaacctggagccccgaaacccaaagccaaccagcaaaagcaggacgacggccggggtctggtgcttcctggctgcaagtacctcggacccttcaacggactcgacaagggggagcccgtcaacgcggcggacgcagcggccctcgagcacgacaaggcctacgaccagcagctcaaagcgggtgacaatccgtacctgcggtataaccacgccgacgccgagtttcaggagcgtctgcaagaagatacgtcttttgggggcaacctcgggcgagcagtcttccaggccaagaagcgggttctcgaacctctcggtctggttgaggaaggcgctaagacggctcctggaaagaagagaccggtagagccatcaccccagcgttctccagactcctctacgggcatcggcaagacaggccagcagcccgcgaaaaagagactcaactttgggcagactggcgactcagagtcagtgcccgaccctcaaccaatcggagaaccccccgcaggcccctctggtctgggatctggtacaatggctgcaggcggtggcgctccaatggcagacaataacgaaggcgccgacggagtgggtagttcctcaggaaattggcattgcgattccacatggctgggcgacagagtcatcaccaccagcacccgaacctgggccctccccacctacaacaaccacctctacaagcaaatctccaacgggacatcgggaggaagcaccaacgacaacacctacttcggctacagcaccccctgggggtattttgactttaacagattccactgccacttctcaccacgtgactggcagcgactcatcaacaacaactggggattccggcccaagagactcaacttcaagctcttcaacatccaggtcaaggaggtcacgcagaatgaaggcaccaagaccatcgccaataaccttaccagcacgattcaggtctttacggactcggaataccagctcccgtacgtcctcggctctgcgcaccagggctgcccgcctccgttcccggcggacgtcttcatgattcctcagtacgggtacctgactctgaacaacggcagtcaggccgtgggccgttcctccttctactgcctggagtactttccttctcaaatgcggagaacgggcaacaactttgagttcagctaccagtttgaggacgtgccttttcacagcagctacgcgcatagccaaagcctggaccggctgatgaaccccctcatcgaccagtacctgtactacctgtctcggactcagtccacgggaggtaccgcaggaactcagcagttgctattttctcaggccgggcctaataacatgtcggctcaggccaaaaactggctacccgggccctgctaccggcagcaacgcgtctccacgacactgtcgcaaaataacaacagcaactttgcttggaccggtgccaccaagtatcatctgaatggcagagactctctggtaaatcccggtgtcgctatggcaacgcacaaggacgacgaagagcgattttttccatccagcggagtcttgatgtttgggaaacagggagctggaaaagacaacgtggactatagcagcgttatgctaaccagtgaggaagaaatcaaaaccaccaacccagtggccacagaacagtacggcgtggtggccgataacctgcaacagcaaaacgccgctcctattgtaggggccgtcaacagtcaaggagccttacctggcatggtctggcagaaccgggacgtgtacctgcagggtcctatctgggccaagattcctcacacggacggcaactttcatccttcgccgctgatgggaggctttggactgaaacacccgcctcctcagatcctgattaagaatacacctgttcccgcggatcctccaactaccttcagtcaagccaagctggcgtcgttcatcacgcagtacagcaccggacaggtcagcgtggaaattgaatgggagctgcagaaagagaacagcaagcgctggaacccagagattcagtatacttccaactataacaaatctgttaatgtggactttactgtggacactaatggtgtgtattcagagcctcgccccattggcaccagatacctgactcgtaatctgtaa

SEQ ID NO: 4857 - DNA, 3167 bp, Adeno-associated virus
  source 1..3167: mol_type = genomic DNA
attgaatttagcggccgcgaattcgcccttcgcagagaccaaagttcaactgaaacgaattaaacggtttattgattaacaagcaattacagattacgagtcaggtacctggtgccaatggggcgaggctctgaatacacaccattagtgtccacagtaaagtccacattaacagatttgttgtagttggaagtgtactgaatctcgggattccagcgtttgctgttctccttctgcagctcccactcgatctccacgctgacctgccccgtggagtactgtgtaatgaaggaagcaaactttgccgcactgaaggtagtcgaaggattcgcaggtaccggggtgttcttgatgagaatctgcgggggagggtgtttaagtccgaatccgcccatgaggggagaggggtgaaaatgtccgtccgtgtgtggaatctttgcccagatgggcccctgcaggtacacgtctctgtcctgccacaccatgcctggaagaacgccttgtgtgttgacatctgaggtagctgcttgtgtgttgccgctctggaggttggtagatacagaaccatactgctccgtagccacgggattggtggtcctgatttcctcttcgtctgtaatcatgaccttttcaatgtccacattagtttttcccgagtcttgttttccaaagatgagaaccccgctctgaggaaaaaacttttcttcatcgtccttgtggctggccatggccgggcccggattcaccagagagtctcttccattaaggtggtacttggtagctccagtccacgagtattcactgttgttgttatccgcagatgtctttgatactcgctgctggcggtaacagggtccaggaagccagttcctagactggtcccgaatgtcacttgctccggcctgagaaaactgaagccttgactgcgtggtggttccgcttggagtgtttgttctgctcaagtaatacaggtactggtcgatgagaggattcatgagacggtccaaactctggctgtgggcgtagctgctgtggaaaggaacgtcctcaaaggtgtagctgaaggtaaagttgtttccggtacgcagcatctgagaaggaaagtactccaggcagtaaaatgaagagcgtcctactgcctgactcccgttgttcagggtgaggtatccatactgtggcaccatgaagacgtctgctgggaacggcgggaggcatccttgatgcgccgagccgaggacgtacgggagctggtactccgagtcagtaaacacctgaaccgtgctggtaaggttattggcaatcgtcgtcgtaccgtcattctgcgtgacctccttgacttgaatgttaaagagcttgaagttgagtcttttgggccggaatccccaattgttgttgatgagtctttgccagtcacgtggcgaaaagtggcagtggaatctgttgaagtcaaaatacccccaaggggtgctgtagccaaagtagtggttgtcgtttgaggctcctgattggctggaaatctgcttgtagaggtggttgttgtaggtgggcagagcccaggtgcgggtgctggtggtgatgactctgtcgcccatccatgtggaatcgcaatgccaatttcccgaggaattacccactccgtcggcgccctcgttattgtctgccattggtgcgccactgcctgtagccatcgtattagttcccagaccagagggggctgctggtggctgtccgagaggctgggggtcaggtacggagtctgcgtctccagtctgaccgaaattcaatctctttcttgcaggctgctggcccgcttttccggttcccgaggaggagtctggctccgcaggagagtgctctaccggcctcttttttcccggagccgtcttaacaggttcctcaaccaggcccagaggttcaagaaccctctttttcgcctggaagactgctcgtccgaggttgcccccaaaagacgtatcttctttaagacgctcctggaactccgcgtcggcgtggttgtacttggggtacgggttgtctccgctgtcgagctgccggtcgtaggccttgtcgtgctcgagggccgcggcgtctgcctcgttgaccggctctcccttgtcgagtccgttgaagggtccaaggtacttgtacccaggaagcacaagacccctgctgtcgtccttatgccgctctgcgggctttggtggtggtgggccaggtttgagcttccaccactgtcttattccttcagagagagtgtcctcgagccaatctggaagataaccatcggcagccatacctgatttaaatcatttattgttcagagatgcagtcatccaaatccacattgaccagatcgcaagcagtgcaagcgtctggcacctttcccatgatatgatgaatgtagcacagtttctgatacgcctttttgacgacagaaacgggttgagattctgacacgggaaagcactctaaacagtctttctgtccgtgagtgaagcagatatttgaattctgattcattctctcgcattgtctgcagggaaacagcatcagattcatgcccacgtgacgagaacatttgttttggtacctgtccgcgtagttgattgaagcttccgcgtctgacgtcgatggctgcgcaactgactcgcgcgcccgtttgggctcacttatatctgcgtcactgggggcgggtctttttttggctccaccctttttgacgtagaattcatgctctacctcaaccacgtgatcctttgcccaccggaaaaagtctttgacttcctgcttggtgaccttcccaaagtcatgatccagacggcgggtgagttcaaatttgaacatccggtcttgcaacggctgctggtgttcgaaggtcgttgagttcccgtcaatcactgcgcacatgttggtgttggaggtgacaatcacgggagtcgggtctatctgggccgaggacttgcatttctggtccacgcgcaccttgcttcctccgagaatggctttggccgactccacgaccttggcggtcatcttcccctcctcccaccagatcaccatcttgtcgacgcaatcattgaaaggaaagttctcattggtccagttgacgcagccgtagaaagggcgaattcgtttaaacctgcaggactagtccctttagtgagggt

SEQ ID NO: 4858 - DNA, 3161 bp, Adeno-associated virus
  source 1..3161: mol_type = genomic DNA
aattgaatttagcggccgcgaattcgcccttcgcagagaccaaagttcaactgaaacgaattaaacggtttattgattaacaagcaattacagattacgagtcaggtatctggtgccaatggggcgaggctctgaatacacaccattagtgtccacagtaaagtccacattaacagatttgttgtagttggaagtgtactgaatctcgggattccagcgtttgctgttctccttctgcagctcccactcgatctccacgctgacctgccccgtggagtactgtgtaatgaaggaagcaaactttgccgcactgaaggtagtcgaaggattcgcaggtaccggggtgttcttgatgagaatctgcgggggagggtgtttaagtccgaatccgcccatgaggggagaggggtgaaaatgtccgtccgtgtgtggaatctttgcccagatgggcccctgcaggtacacgtctctgtcctgccacaccatgcctggaagaacgccttgtgtgttgacatctgaggtagctgcttgtgtgttgccgctctggaggttggtagatacagaaccatactgctccgtagccacgggattggtggtcctgatttcctcttcgtctgtaatcatgaccttttcaatgtccacattagtttttcccgagtcttgttttccaaagatgagaaccccgctctgaggaaaaaacttttcttcatcgtccttgtggctggccatggccgggcccggattcaccagagagtctcttccattaaggtggtacttggtagctccagtccacgagtattcactgttgttgttatccgcagatgtctttgatactcgctgctggcggtaacagggtccaggaagccagttcctagactggtcccgaatgtcacttgctccggcctgagaaaactgaagccttgactgcgtggtggttccgcttggagtgtttgttctgctcaagtaatacaggtactggtcgacgagaggattcatgagacggtccaaactctggctgtgggcgtagctgctgtggaaaggaacgtcctcaaaggtgtagctgaaggtaaagttgtttccggtacgcagcatctgagaaggaaagtactccaggcagtaaaatgaagagcgtcctactgcctgactcccgttgttcagggtgaggtatccatactgtggcaccatgaagacgtctgctgggaacggcgggaggcatccttgatgcgccgagccgaggacgtacgggagctggtactccgagtcagtaaacacctgaaccgtgctggtaaggttattggcaatcgtcgtcgtaccgtcattctgcgtgacctccttgacttgaatgttaaagagcttgaagttgagtcttttgggccgggatccccaattgttgttgatgagtctttgccagtcacgtggcgaaaagtggcagtggaatctgttgaagtcaaaatacccccaaggggtgctgtagccaaagtagtggttgtcgtttgaggctcctgattggctggaaatctgcctgtagaggtggttgttgtaggtgggcagagcccaggtgcgggtgctggtggtgatgactctgtcgcccatccatgtggaatcgcaatgccaatttcccgaggaattacccactccgtcggcgccctcgttattgtctgccattggtgcgccactgcctgtagccatcgtattagttcccagaccagagggggctgctggtggctgtccgagaggctgggggtcaggtacggagtctgcgtctccagtctgaccgaaattcaatctccttcttgcaggctgctggcccgcttttccggttcccgaggaggagtctggctccgcaagagagtgctctaccggcctcttttttcccggagccgtcttaacaggttcctcaaccaggcccagaggttcaagaaccctctttttcgcctggaagactgctcgtccgaggttgcccccaaaagacgtatcttctttaagacgctcctggaactccgcgtcggcgtggttgtacttgaggtacgggttgtctccgccgtcgagctgccggtcgtaggccttgtcgtgctcgagggccgcggcgtctgcctcgttgaccggctctcccttgtcgagtccgttgaagggtccaaggtacttgtacccaggaagcacaagacccctgctgtcgtccttatgccgctctgcgggctttggtggtggtgggccaggtttgagcttccaccactgtcttattccttcagagagagtgtcctcgagccaatctggaagataaccatcggcagccatacctgatttaaatcatttattgttcagagatgcagtcatccaaatccacattgaccagatcgcaagcagtgcaagcgtctggcacctttcccatgatatgatgaatgtagcacagtttctgatacgcctttttgacgacagaaacgggttgagattctgacacgggaaagcactctaaacagtctttctgtccgtgagtgaagcagatatttgaattctgattcattctctcgcattgtctgcagggaaacagcatcagattcatgcccacgtgacgagaacatttgttttggtacctgtccgcgtagttgattgaagcttccgcgtctgacgtcgatggctgcgcaactgactcgcgcgcccgtttgggctcacttatatctgcgtcactgggggcgggtctttttttggctccaccctttttgacgtagaattcatgctctacctcaaccacgtgatcctttgcccaccggaaaaagtctttgacttcctgcttggtgaccttcccaaagtcatgatccagacggcgggtgagttcaaatttgaacatccggtcttgcaacggctgctggtgttcgaaggtcgttgagttcccgtcaatcactgcgcacatgttggtgttggaggtgacaatcacgggagtcgggtctatctgggccgaggacttgcatttctggtccacgcgcaccttgcttcctccgagaatggctttggccgactccacgaccttggcggtcatcttcccctcctcccaccagatcaccatcttgtcgacgcaatcattgaaaggaaagttctcattggtccagttgacgcagcaagggcgaattcgtttaaacctgcaggactagtccctttagtgaggg

SEQ ID NO: 4859 - DNA, 3172 bp, Adeno-associated virus
  source 1..3172: mol_type = genomic DNA
gattgaatttagcggccgcgaattcgcccttgctgcgtcaactggaccaatgagaactttcccttcaacgattgcgtcgacaagatggtgatctggtgggaggagggcaagatgaccgccaaggtcgtggagtccgccaaggccattctgggtggaagcaaggtgcgcgtggaccaaaagtgcaagtcatcggcccagatcgaccccacgcccgtgatcgtcacctccaacaccaacatgtgcgccgtgatcgacgggaacagcaccaccttcgagcaccagcagcccctgcaggaccgcatgttcaagttcgagctcacccgccgtctggagcacgactttggcaaggtgaccaagcaggaagtcaaagagttcttccgctgggctcaggatcacgtgactgaggtggcgcatgagttctacgtcagaaagggcggagccaccaaaagacccgcccccagtgacgcggatataagcgagcccaagcgggcctgcccctcagttgcggagccatcgacgtcagacgcggaagcaccggtggactttgcggacaggtaccaaaacaaatgttctcgtcacgcgggcatgcttcagatgctgtttccctgcaagacatgcgagagaatgaatcagaatttcaacgtctgcttcacgcacggggtcagagactgctcagagtgcttccccggcgcgtcggaatctcaacccgtcgtcagaaaaaagacgtatcagaaactgtgcgcgattcatcatctgctggggcgggcacccgagattgcgtgttcggcctgcgatctcgtcaacgtggacttggatgactgtgtttctgagcaataaatgacttaaaccaggtatggctgctgacggttatcttccagattggctcgaggacaacctctctgagggcattcgcgagtggtgggacctgaaacctggagcccccaagcccaaggccaaccagcagaagcaggacgacggccggggtctggtgcttcctggctacaagtacctcggacccttcaacggactcgacaagggggagcccgtcaacgcggcggacgcagcggccctcgagcacgacaaggcctacgaccagcagctcaaagcgggtgacaatccgtacctgcggtataaccacgccgacgccgagtttcaggagcgtctgcaagaagatacgtcttttgggggcaacctcgggcgagcagtcttccaggccaagaagcgggttctcgaacctctcggtctggttgaggaagctgctaagacggctcctggaaagaagagaccggtagaaccgtcacctcagcgttcccccgactcctccgcgggcatcggcaagaaaggccagcagcccgctaaaaagagactgaactttggtcagactggcgactcagagtcagtccccgaccctcaaccaatcggagaaccaccagcaggcccctctggtctgggatctggtacaatggctgcaggcggtggcgctccaatggcagacaataacgaaggcgccgacggagtgggtagttcctcaggaaattggcattgcgattccacatggctgggcgacagagtcatcaccaccagcacccgaacctgggccctgcccacctacaacaaccacctctacaagcaaatatccaatgggacatcgggaggaagcaccaacgacaacacctacttcggctacagcaccccctgggggtattttgacttcaacagattccactgccacttctcaccacgtgactggcagcgactcatcaacaacaactggggattccggccaaaaagactcagcttcaagctcttcaacatccaggtcaaggaggtcacgcagaatgaaggcaccgagaccatcgccaataaccttaccagcacgattcaggtatttacggactcggaataccagctgccgtacgtcctcggctccgcgcaccagggctgcctgcctccgttcccggcggacgtcttcatgattccccagtacggctaccttacactgaacaatggaagtcaagccgtaggccgttcctccttctactgcctggaatattttccatctcaaatgctgcgaactggaaacaattttgaattcagctacaccttcgaggacgtgcctttccacagcagctgcgcacacagccagagctcggaccgactgatgaatcctctcatcgaccagtacctgtactacttatccagaactcggtccacaggaggaactcaaggtacccagcaattgttattttctcaagctgggcctgcaaacatgtcggctcaggctaagaactggctacctggaccttgctaccggcagcagcgagtctctacgacactgtcgcaaaacaacaacagcaactttgcttggactggtgccaccaaatatcacctgaacggaagagactctttggtaaatcccggtgtcgccatggcaacccacaaggacgacgaggaacgcttcttcccgtcgagtggagtcctgatgtttggaaaacagggtgctggaagagacaatgtggactacagcagcgttatgctaaccagcgaagaagaaattaaaaccactaaccctgtagccacagaacaatacggtgtggtggctgacaacttgcagcaaaccaatacagggcctattgtgggaaatgtcaacagccaaggagccttacctggcatggtctggcagaaccgagacgtgtacctgcagggtcccatctgggccaagattcctcacacggacggcaacttccacccttcaccgctaatgggaggatttggactgaagcacccacctcctcagatcctgatcaagaacacgccggtacctgcggatcctccaacaacgttcagccaggcgaaattggcttccttcattacgcagtacagcaccggacaggtcagcgtggaaatcgagtgggagctgcagaaggagaacagcaaacgctggaacccagagattcagtacacttcaaactactacaaatctacaaatgtggactttgctgtcaatacagagggaacttattctgagcctcgccccattggtactcgttacctcacccgtaatctgtaattgctggttaatcaataaaccgtttgattcgtttcagttgaactttggtctctgcgaagggcgaattcgtttaaacctgcaggactagtccctttagtgagg

SEQ ID NO: 4860 - DNA, 3172 bp, Adeno-associated virus
  source 1..3172: mol_type = genomic DNA
gattgaatttagcggccgcgaattcgcccttgctgcgtcaactggaccaatgagaactttcccttcaacgattgcgtcgacaagatggtgatctggtgggaggagggcaagatgaccgccaaggtcgtggagtccgccaaggccattctgggtggaagcaaggtgcgcgtggaccaaaagtgcaagtcatcggcccagatcgaccccacgcccgtgatcgtcacctccaacaccaacatgtgcgccgtgatcggcgggaacagcaccaccttcgagcaccagcagcccctgcaggaccgcatgttcaagttcgagctcacccgccgtctggagcacgactttggcaaggtgaccaagcaggaagtcaaagagttcttccgctgggctcaggatcacgtgactgaggtggcgcatgagttctacgtcagaaagggcggagccaccaaaagacccgcccccagtgacgcggatataagcgagcccaagcgggcctgcccctcagttgcggagccatcgacgtcagacgcggaagcaccggtggactttgcggacaggtaccaaaacaaatgttctcgtcacgcgggcatgcttcagatgctgtttccctgcaagacatgcgagagaatgaatcagaatttcaacgtctgcttcacgcacggggtcagagactgctcagagtgcctccccggcgcgtcagaatctcaacccgtcgtcagaaaaaagacgtatcagaaactgtgcgcgattcatcatctgctggggcgggcacccgagattgcgtgttcggcctgcgatctcgtcaacgtggacttggatgactgtgtttctgagcaataaatgacttaaaccaggtatggctgctgacggttatcttccagattggctcgaggacaacctctctgagggcattcgcgagtggtgggacctgaaacctggagcccccaagcccaaggccaaccagcagaagcaggacgacggccggggtctggtgcttcttggctacaagtacctcggacccttcaacggactcgacaagggggagcccgtcaatgcggcggacgcagcggccctcgagcacgacaaggcctacgaccagcagctcaaagcgggtgacaatccgtacctgcggtataaccacgccgacgccgagtttcaggagcgtctgcaagaagatacgtcttttgggggcaacctcgggcgagcagtcttccaggccaagaagcgggttctcgaacctctcggtctggttgaggaagctgctaagacggctcctggaaagaagagaccggtagaaccgtcacctcagcgttcccccgactcctccacgggcatcggcaagaaaggccagcagcccgctaaaaagagactgaactttggtcagactggcgactcagagtcagtccccgaccctcaaccaatcggagaaccaccagcaggcccctctggtctgggatctggtacaatggctgcaggcggtggcgctccaatggcagacaataacgaaggcgccgacggagtgggtagttcctcaggaaattggcattgcgattccacatggctgggcgacagagtcatcaccaccagcacccgaacctgggccctgcccacctacaacaaccacctctacaagcaaatatccaatgggacatcgggaggaagcaccaacgacaacacctacttcggctacagcaccccctgggggtattttgacttcaacagattccactgccacttctcaccacgtgactggcagcgactcatcaacaacaactggggattccggccaaaaagactcagcttcaagctcttcaacatccaggtcaaggaggtcacgcagaatgaaggcaccaagaccatcgccaataaccttaccagcacgattcaggtatttacggactcggaataccagctgccgtacgtcctcggctccgcgcaccagggctgcctgcctccgttcccggcggacgtcttcatgattccccagtacggctaccttacactgaacaatggaagtcaagccgtaggccgttcctccttctactgcctggaatattttccatctcaaatgctgcgaactggaaacaattttgaattcagctacaccttcgaggacgtgcctttccacagcggctacgcacacagccagagcttggaccgactgatgaatcctctcatcgaccagtacctgtactacttatccagaactcagtccacaggaggaactcaaggtacccagcaattgttattttctcaagctgggcctgcaaacatgtcggctcaggctaagaactggctacctggaccttgctaccggcagcagcgagtctctacgacactgtcgcaaaacaacaacagcaactttgcttggactggtgccaccaaatatcacctgaacggaagagactctttggtaaatcccggtgtcgccatggcaacccacaaggacgacgaggaacgcttcttcccgtcgagtggagtcctgatgtttggaaaacagggtgctggaagagacaatgtggactacagcagcgttatgctaaccagcgaagaagaaattaaaaccactaaccctgtagccacagaacaatacggtgtggtggctgacaacttgcagcaaaccaatacagggcctattgtgggaaatgtcaacagccaaggagccttacctggcatggtctggcagaaccgagacgtgtacctgcagggtcccatctgggccaagattcctcacacggacggcaacttccacccttcaccgctaatgggaggatttggactgaagcacccacctcctcagatcctgatcaagaacacgccggtacctgcggatcctccaacgacgttcagccaggcgaaattggcttccttcattacgcagtacagcaccggacaggtcagcgtggaaatcgagtgggagctgcagaaggagaacagcaaacgctggaacccagagattcagtacacttcaaactactacaaatctacaaatgtggactttgctgtcaatacagagggaacttattctgagcctcgccccattggtactcgttacctcacccgtaatctgtaattgctggttaatcaataaaccgtttgattcgtttcagttgaactttggtctctgcgaagggcgaattcgtttaaacctgcaggactagtccctttagtgagg

SEQ ID NO: 4861 - DNA, 2208 bp, Adeno-associated virus
  source 1..2208: mol_type = genomic DNA
atggctgccgatggttatcttccagattggctcgaggacactctctctgaaggaataagacagtggtggaagctcaaacctggcccaccaccaccaaagcccgcagagcggcataaggacgacagcaggggtcttgtgcttcctgggtacaagtacctcggacccttcaacggactcgacaagggagagccggtcaacgaggcagacgccgcggccctcgagcacgacaaggcctacgaccggcagctcgaaagcggagacaacccgtacctcaagtacaaccacgccgacgcggagtttcaggagcgtcttaaagaagatacgtcttttgggggcaacctcggacgagcagtcttccaggcgaaaaagagggttcttgaacctctgggcctggttgaggagcctgttaaaacggctccgggaaaaaagaggccggtagagcactctcctgtggagccagactcctcctcgggaaccggaaaagcgggccagcagcctgcgagaaaaagattgaattttggtcagactggagacgcagactccgtacctgacccccagcctctcggacagccaccagcagccccctctggtctgggatctactacaatggcttcaggcagtggcgcaccagtggcagacaataacgagggtgccgatggagtgggtaattcctcaggaaattggcattgcgattcccaatggctgggcgacagagtcatcaccaccagcacccgaacctgggccctgcccacctacaacaaccacctctacaagcaaatctccagccaatcaggagcctcaaacgacaaccactactttggctacagcaccccctgggggtattttgacttcaacagattccactgccacttttcaccacgtgactggcaaagactcatcaacaacagctggggattccgacccaaaagactcaacttcaagctctttaacattcaagtcaaagaggtcacgcagaatgacggtacgacgacgattgccaataaccttaccagcacggttcaagtgtttaccgactcggagtaccagctcccgtacgtcctcggctcggcgcatcaaggatgcctcccgccgttcccagcagacgtctttatggtcccacagtatggatacctcaccctgaacaacgggagtcaggcggtaggacgctcttccttttactgcctggagtactttccttctcagatgctgcgtactggaaacaactttcagttcagctacacctttgaagacgttcccttccacagcagctacgctcacagccagagtctggatcggctgctgaatcctctgatcgaccagtacctatattatctgaacaagacacaatcaaatagtggaactcttcagcagtctcggctactgtttagccaagctggacccaccagcatgtctcttcaagctaaaaactggctgcctggaccttgctacagacagcagcgtctgtcaaagcaggcaaacgacaacaacaacagcaactttccctggactgcggctacaaagtatcatctaaatggccgggactcgttggttaatccaggaccagctatggccagccacaaagacgatgaagaaaagtttttccccatgcatggaaccctgatatttggtaaacaaggaacaaatgctaacgacgcggatttggacaatgtcatgattacagatgaagaagaaatccgcaccaccaatcccgtggctacggagcagtacggatatgtgtcaaataatttgcaaaactcaaatactggtccaactactggaactgtcaatcaccaaggagcgttacctggtatggtgtggcaggatcgagacgtgtacctgcagggacccatttgggccaagattcctcacacggacgggcactttcatccttctccactaatgggaggttttgggctcaaacacccgcctcctcagatcatgatcaaaaacactcccgttccagccaatcctcctacaaacttcagttcttccaagtttgcttctttcatcacacagtattccacggggcaggtcagcgtggagatcgagtgggagctgcagaaggagaacagcaaacgctggaatcccgaaattcagtatacttccaactacaacaaatctgttaatgtggactttactgtggacactaatggtgtgtattcagagcctcgccccattggcaccagatacccgactcgtaatctgtaa

SEQ ID NO: 4862 - protein, 735 aa, Adeno-associated virus
MAADGYLPDWLEDTLSEGIRQWWKLKPGPPPPKPAERHKDDSRGLVLPGYKYLGPFNGLDKGEPVNEADAAALEHDKAYDRQLESGDNPYLKYNHADAEFQERLKEDTSFGGNLGRAVFQAKKRVLEPLGLVEEPVKTAPGKKRPVEHSPVEPDSSSGTGKAGQQPARKRLNFGQTGDADSVPDPQPLGQPPAAPSGLGSTTMASGSGAPVADNNEGADGVGNSSGNWHCDSQWLGDRVITTSTRTWALPTYNNHLYKQISSQSGASNDNHYFGYSTPWGYFDFNRFHCHFSPRDWQRLINNSWGFRPKRLNFKLFNIQVKEVTQNDGTTTIANNLTSTVQVFTDSEYQLPYVLGSAHQGCLPPFPADVFMVPQYGYLTLNNGSQAVGRSSFYCLEYFPSQMLRTGNNFQFSYTFEDVPFHSSYAHSQSLDRLLNPLIDQYLYYLNKTQSNSGTLQQSRLLFSQAGPTSMSLQAKNWLPGPCYRQQRLSKQANDNNNSNFPWTAATKYHLNGRDSLVNPGPAMASHKDDEEKFFPMHGTLIFGKQGTNANDADLDNVMITDEEEIRTTNPVATEQYGYVSNNLQNSNTGPTTGTVNHQGALPGMVWQDRDVYLQGPIWAKIPHTDGHFHPSPLMGGFGLKHPPPQIMIKNTPVPANPPTNFSSSKFASFITQYSTGQVSVEIEWELQKENSKRWNPEIQYTSNYNKSVNVDFTVDTNGVYSEPRPIGTRYPTRNL

SEQ ID NO: 4863 - DNA, 2208 bp, Adeno-associated virus
  source 1..2208: mol_type = genomic DNA
atggctgccgatggttatcttccagattggctcgaggacactctctctgaaggaataagacagtggtggaagctcaaacctggcccaccaccaccaaagcccgcagagcggcataaggacgacagcaggggtcttgtgcttcctgggtacaagtacctcggacccttcaacggactcgacaagggagagccggtcaacgaggcagacgccgcggccctcgagcacgacaaggcctacgaccggcagctcgacagcggagacaacccgtacctcaagtacaaccacgccgacgcggagtttcaggagcgtcttaaagaagatacgtcttttgggggcaacctcggacgagcagtcttccaggccaaaaagaggattcttgaacctctgggcctggttgaggaacctgttaagacggctccgggagaaaagaggccggtagagcactctcctgcggagccagactcctcctcgggaaccggaaaagcgggccagcagcctgcaagaaagagattgaattttggccagactggagacgcagactcagtacctgacccccagcctctcggacagccaccagcagccccctctggtctgggaactaatacgatggcttcaggcagtggcgcaccaatggcagacaataacgagggcgccgacggagtgggtaattcctcgggaaattggtattgcgattccacatggatgggcgacagagtcatcaccaccagcacccgcacctgggccctgcccacctacaacaaccatctgtacaagcaaatctccagccagtctggagccagcaacgacaaccactactttggctacagcaccccctgggggtattttgacttcaacagattccactgccacttctccccacgtgactggcaaagactcatcaacaacaactggggattccggcccaagagactcagcttcaagctctttaacattcaagtcaaagaggtcacgcagaatgacggtacgacgacgattgccaataaccttaccagcacggttcaggtgtttactgactcggagtaccagctcccgtacgtcctcggctcggcgcatcaaggatgcctcccgccgttcccagcagacgtcttcatggtgccacagtatggatacctcaccctgaacaacggcagtcaggcggtaggacgctcttccttttactgcctggagtactttccttctcagatgcttcgtaccggaaacaactttaccttcagctacacctttgaagacgttcctttccatagcagctacgctcacagccaaagtctggaccgtctcatgaatcctctcatcgaccagtacctgtattacttgagcagaacaaacactccaagcggaaccaccacgatgtccaggcttcagttttctcaggccggagcaagtgacattcgggaccagtctagaaactggcttcctggaccctgttaccgccagcagcgagtatcaaagacagctgcggacaacaacaacagtgattactcgtggactggagctaccaagtaccacctcaatggaagagactctctggtgaatccgggcccagctatggccagccacaaggacgatgaagaaaaatattttcctcagagcggggttctcatctttggaaaacaagactcgggaaaaactaatgtggacattgaaaaggttatgattacagacgaagaggaaatcaggaccaccaatcccgtggctacggagcagtatggttctgtatctaccaacctccagagcggcaacacacaagcagctacctcagatgtcaacacacaaggcgttcttccaggcatggtctggcaggacagagacgtgtacctgcaggggcccatctgggcaaagattccacacacggacggacattttcacccctctcccctcgtgggcggattcggacttaaacaccctcctccacaaattctcatcaagaacaccccggtacctgcgaatccttcgaccactttcagtgcggcaaagtttgcttccttcatcacacagtactccacggggcaggtcagcgtggagatcgagtgggagctgcagaaggagaacagcaaacgctggaatcccgaaattcagtacacttccaactacaacaaatctgttaatgtggactttactgtggacactaatggtgtgtattcagagcctcgccccattggcaccagatacctgactcgtaatctgtaa

SEQ ID NO: 4864 - protein, 735 aa, Adeno-associated virus
MAADGYLPDWLEDTLSEGIRQWWKLKPGPPPPKPAERHKDDSRGLVLPGYKYLGPFNGLDKGEPVNEADAAALEHDKAYDRQLDSGDNPYLKYNHADAEFQERLKEDTSFGGNLGRAVFQAKKRILEPLGLVEEPVKTAPGEKRPVEHSPAEPDSSSGTGKAGQQPARKRLNFGQTGDADSVPDPQPLGQPPAAPSGLGTNTMASGSGAPMADNNEGADGVGNSSGNWYCDSTWMGDRVITTSTRTWALPTYNNHLYKQISSQSGASNDNHYFGYSTPWGYFDFNRFHCHFSPRDWQRLINNNWGFRPKRLSFKLFNIQVKEVTQNDGTTTIANNLTSTVQVFTDSEYQLPYVLGSAHQGCLPPFPADVFMVPQYGYLTLNNGSQAVGRSSFYCLEYFPSQMLRTGNNFTFSYTFEDVPFHSSYAHSQSLDRLMNPLIDQYLYYLSRTNTPSGTTTMSRLQFSQAGASDIRDQSRNWLPGPCYRQQRVSKTAADNNNSDYSWTGATKYHLNGRDSLVNPGPAMASHKDDEEKYFPQSGVLIFGKQDSGKTNVDIEKVMITDEEEIRTTNPVATEQYGSVSTNLQSGNTQAATSDVNTQGVLPGMVWQDRDVYLQGPIWAKIPHTDGHFHPSPLVGGFGLKHPPPQILIKNTPVPANPSTTFSAAKFASFITQYSTGQVSVEIEWELQKENSKRWNPEIQYTSNYNKSVNVDFTVDTNGVYSEPRPIGTRYLTRNL

SEQ ID NO: 4865 - DNA, 2209 bp, Adeno-associated virus
  source 1..2209: mol_type = genomic DNA
atggctgccgatggttatcctccagattggctcgaggacactctctctgaagggataagacagtggtggaagctcaaacctggcccaccaccaccaaagcccgcagagcggcataaggacgacagcaggggtcttgtgcttcctgggtacaagtacctcggacccttcaacggactcgacaagggggagccggtcaacgaggcagacgccgcggccctcgagcacgacaaggcctacgaccggcagctcgacagcggagacaacccgtacctcaagtacaaccacgccgacgcagagtttcaggagcgccttaaagaagatacgtcttttgggggcaacctcggacgagcagtcttccaggcgaaaaagagggttcttgaacctctgggcctggttgaggaacctgttaagacggctccgggaaaaaagaggccggtagagcactctcctgtggagccagactcctcctcgggaaccggaaaagcgggccagcggcctgcaagaaaaagattaaattttggtcagactggagacgcagactccgtacctgacccccagcctctcggacagccaccagcagccccctctggtctgggatctactacaatggctacaggcagtggcgcaccaatggcagacaataacgagggtgccgatggagtgggtaattcctcaggaaattggcattgcgattcccaatggctgggcgacagagtcatcaccaccagcacccgaacctgggccctgcccacatacaacaaccacctctacaagcaaatctccagccaatcaggagccagcaacgacaaccactactttggctacagcaccccctgggggtattttgacttcaacagattccactgccacttttcaccacgtgactggcaaagactcatcaacaacaactggggattccggcccaaaagactcaacttcaagctctttaatattcaagtcaaagaggtcacgcagaatgacggtacgacgacgattgccaataaccttaccagcacggttcaggtgtttactgactcggagtaccagctcccgtacgtcctgggctcggcgcatcaaggatgcctcccgccgtttccagcggacgtcttcatggtcccacagtatggatacctcaccctgaacaacgggagtcaggcggtaggacgctcttccttttactgcctggagtactttccttctcagatgctgcgtactggaaacaactttcagttcagctacacttttgaagacgtgcctttccacagcagctacgctcacagccagagtctggatcggctgatgaatcctctgatcgaccagtacctgtattatctgaacaagacacaaacaaatagtggaactcttcagcagtctcggctactgtttagccaagctggaccaaccaacatgtctcttcaagctaaaaactggctgcctggaccttgctacagacagcagcgtctgtcaaaacaggcaaacgacaacaacaacagcaactttccctggactgcagctacaaagtatcatctaaatggccgggactcgttggttaatccaggaccagctatggccagtcacaaggatgacgaagaaaagtttttccccatgcatggaaccctgatatttggtaaacaaggaacaaatgccaacgacgcggatttggaaaatgtcatgattacagatgaagaagaaatcagggccaccaatcccgtggctacggagcagtacgggactgtgtcaaataatttgcaaaactcaaacactggtccaactactggaactgtcaatcgccaaggagcgttacctggtatggtgtggcaggatcgagacgtgtacctgcagggacccatttgggccaagattcctcacaccgatggacactttcatccttctccactgatgggaggttttggactcaaacacccgcctcctcagatcatgatcaaaaacactcccgttccagccaatcctcccacaaacttcagttctgccaagtttgcttctttcatcacacagtattccacgggacaggtcagcgtggagatcgagtgggagctgcagaaggagaacagcaaacgctggaatcccgaaattcagtacacttccaactacaacaagtctgttaatgtggactttactgtggacactaatggtgtgtattcagagcctcgccccattggcaccagatacctgactcgtaatctgtaat

SEQ ID NO: 4866 - protein, 735 aa, Adeno-associated virus
MAADGYPPDWLEDTLSEGIRQWWKLKPGPPPPKPAERHKDDSRGLVLPGYKYLGPFNGLDKGEPVNEADAAALEHDKAYDRQLDSGDNPYLKYNHADAEFQERLKEDTSFGGNLGRAVFQAKKRVLEPLGLVEEPVKTAPGKKRPVEHSPVEPDSSSGTGKAGQRPARKRLNFGQTGDADSVPDPQPLGQPPAAPSGLGSTTMATGSGAPMADNNEGADGVGNSSGNWHCDSQWLGDRVITTSTRTWALPTYNNHLYKQISSQSGASNDNHYFGYSTPWGYFDFNRFHCHFSPRDWQRLINNNWGFRPKRLNFKLFNIQVKEVTQNDGTTTIANNLTSTVQVFTDSEYQLPYVLGSAHQGCLPPFPADVFMVPQYGYLTLNNGSQAVGRSSFYCLEYFPSQMLRTGNNFQFSYTFEDVPFHSSYAHSQSLDRLMNPLIDQYLYYLNKTQTNSGTLQQSRLLFSQAGPTNMSLQAKNWLPGPCYRQQRLSKQANDNNNSNFPWTAATKYHLNGRDSLVNPGPAMASHKDDEEKFFPMHGTLIFGKQGTNANDADLENVMITDEEEIRATNPVATEQYGTVSNNLQNSNTGPTTGTVNRQGALPGMVWQDRDVYLQGPIWAKIPHTDGHFHPSPLMGGFGLKHPPPQIMIKNTPVPANPPTNFSSAKFASFITQYSTGQVSVEIEWELQKENSKRWNPEIQYTSNYNKSVNVDFTVDTNGVYSEPRPIGTRYLTRNL

SEQ ID NO: 4867 - DNA, 2208 bp, Adeno-associated virus
  source 1..2208: mol_type = genomic DNA
atggctgccgatggttatcttccagattggctcgaggacactctctctgaaggaataagacagtggtggaagctcaaacctggcccaccaccaccaaagcccgcagagcggcataaggacgacagcaggggtcttgtgcttcctgggtacaggtacctcggacccttcaacggactcgacaagggagagccggtcaacgaggcagacgccgcggccctcgagcacgacaaggcctacgaccggcagctcgacagcggagacaacccgtacctcaagtacaaccacgtcgacgcggagtttcaggagcgtcttaaagaagatacgtcttttgggggcaacctcggacgagcagtcttccaggccaaaaagaggattcttgaacctctgggcctggttgaggaacctgttaaggcggctccgggagaaaagaggccggtagagcactctcctgcggagccagactcctcctcgggaaccggaaaagcgggccagcagcctgcaagaaagagattgaattttggtcagactggagacgcagactcagtacctgacccccagcctctcggacagccaccagcagccccctctggtctgggaactaatacgatggcttcaggcagtggcgcaccaatggcagacaataacgagggcgccgacggagtgggtaattcctcgggaaattggcattgcgattccacatggatgggcgacagagtcatcaccaccagcacccgcacctgggccctgcccacctacaacaaccatctgtacaagcaaatctccagccagtctggagccagcaacgacaaccactactttggctacagcaccccctgggggcattttgacttcaacagattccactgccacttctccccacgtgactggcaaagactcatcaacaacaactggggattccggcccaagagactcagcttcaagctctttaacattcaagtcaaagaggtcacgcagaatgacggtacgacgacgattgccaataaccttaccagcacggttcaggtgtttactgactcggagtaccagctcccgtacgtcctcggctcggcgcatcaaggatgcctcccgccgttcccagcagacgtcttcatggtgccacagtatggatacctcaccctgaacaacggcagtcaggcggtaggacgctcttccttttactgcctggagtactttccttctcagatgcttcgtaccggaaacaactttaccttcagctacacctttgaagacgttcctttccatagcagctacgctcacagccaaagtctggaccgtctcatgaatcctctcatcgaccagtacctgtattacttgagcagaacaaacactccaagcggaaccaccacgatgtccaggcttcagttttctcaggccggagcaagtgacattcgggaccagtctagaaactggcttcctggaccctgttaccgccagcagcgagtatcaaagacagctgcggacaacaacaacagtgattactcgtggactggagctaccaagtaccacctcaatggaagagactctctggtgaatccgggcccagctatggccagccacaaggacgatgaagaaaaatattttcctcagagcggggttctcatctttggaaaacaagactcgggaaaaactaatgtggacattgaaaaggttatgattacagacgaagaggaaatcaggaccaccaatcccgtggctacggagcagtatggttctgtatctaccaacctccagagcggcaacacacaagcagctacctcagatgtcaacacacaaggcgttcttccaggcatggtctggcaggacagagacgtgtacctgcaggggcccatctgggcaaagattccacacacggacggacattttcacccctctccccccatgggcggattcggacttaaacaccctcctccacaaattctcatcaagaacaccccggtacctgcgaatccttcgaccactttcagtgcggcaaagtttgcttccttcatcacacagtactccacggggcaggtcagcgtggagatcgagtgggagctgcagaaggagaacagcaaacgctggaatcccgaaattcagtacacttccaactacaacaaatctgttaatgtggactttactgtggacactaatggtgtgtattcagagcctcgccccattggcgccagatacctgactcgtaatctgtaa

SEQ ID NO: 4868 - protein, 735 aa, Adeno-associated virus
MAADGYLPDWLEDTLSEGIRQWWKLKPGPPPPKPAERHKDDSRGLVLPGYRYLGPFNGLDKGEPVNEADAAALEHDKAYDRQLDSGDNPYLKYNHVDAEFQERLKEDTSFGGNLGRAVFQAKKRILEPLGLVEEPVKAAPGEKRPVEHSPAEPDSSSGTGKAGQQPARKRLNFGQTGDADSVPDPQPLGQPPAAPSGLGTNTMASGSGAPMADNNEGADGVGNSSGNWHCDSTWMGDRVITTSTRTWALPTYNNHLYKQISSQSGASNDNHYFGYSTPWGHFDFNRFHCHFSPRDWQRLINNNWGFRPKRLSFKLFNIQVKEVTQNDGTTTIANNLTSTVQVFTDSEYQLPYVLGSAHQGCLPPFPADVFMVPQYGYLTLNNGSQAVGRSSFYCLEYFPSQMLRTGNNFTFSYTFEDVPFHSSYAHSQSLDRLMNPLIDQYLYYLSRTNTPSGTTTMSRLQFSQAGASDIRDQSRNWLPGPCYRQQRVSKTAADNNNSDYSWTGATKYHLNGRDSLVNPGPAMASHKDDEEKYFPQSGVLIFGKQDSGKTNVDIEKVMITDEEEIRTTNPVATEQYGSVSTNLQSGNTQAATSDVNTQGVLPGMVWQDRDVYLQGPIWAKIPHTDGHFHPSPPMGGFGLKHPPPQILIKNTPVPANPSTTFSAAKFASFITQYSTGQVSVEIEWELQKENSKRWNPEIQYTSNYNKSVNVDFTVDTNGVYSEPRPIGARYLTRNL

SEQ ID NO: 4869 - DNA, 2208 bp, Adeno-associated virus
  source 1..2208: mol_type = genomic DNA
atggctgccgatggttatcttccagattggctcgaggacaccctctctgaaggaataagacagtggtggaagctcaaacctggcccaccaccaccaaagcccgcagagcggcataaggacgacagcaggggtcttgtgcttcctgggtacaagtacctcggacccttcaacggactcgacaagggagagccggtcaacgaggcagacgccgcggccctcgagcacgacaaggcctacgaccggcagctcgacagcggagataacccgtacctcaagtacaaccacgccgacgcggagtttcaggagcgccttaaagaggatacgtcttttgggggcaacctcggacgagcagtcttccaggccaaaaagaggattcttgaacctctgggcctggttgaggaacctgttaagacggctccgggaaaaaagaggccggtagagcactctcctgcggagccagactcctcctcgggaaccggaaaagcgggccagcagcctgcaagaaagagattgaattttggtcagactggagacgcagactcagtacctgacccccggcctctcggacagccaccagcagccccctctggtctgggaactaatacgatggcttcaggcagtggcgcaccaatggcagacaataacgagggcgccgacggagtgggtaattcctcgggaaattggcattgcgattccacatggatgggcgacagagtcatcaccaccagcacccgcacctgggccctgcccacctacaacaaccatctgtacaagcaaatctccagccagtctggagccagcaacgacaaccactactttggctacagcaccccctgggggtattttgacttcaacagattccactgccacttctccccacgtgactggcaaagactcatcaacaacaactggggattccggcccaagagactcagcttcaagctctttaacattcaagtcaaagaggtcacgcagaatgacggtacgacgacgattgccaataaccttaccagcacggttcaggtgtttactgactcggagtaccagctcccgtacgtcctcggctcggcgcatcaaggatgcctcccgccgttcccagcagacgtcttcatggtgccacagtatggatacctcaccctgaacaacggcagtcaggcggtaggacgctcttccttttactgcctggagtactttccttctcagatgcttcgtaccggaaacaactttaccttcagctacacctttgaagacgttcctttccatagcagctacgctcacagccaaagtctggaccgtctcatgaatcctctcatcgaccagtacctgtattacttgagcagaacaaacactccaagcggaaccaccacgatgtccaggcttcagttttctcaggccggagcaagtgacattcgggaccagtctagaaactggcttcctggaccctgttaccgccagcagcgagtatcaaagacagctgcggacaacaacaacagtgattactcgtggactggagctaccaagtaccacctcaatggaagagactctctggtgaatccgggcccagctatggccagccacaaggacgatgaagaaaaatattttcctcagagcggggttctcatctttggaaaacaagactcgggaaaaactaatgtggacattgaaaaggttatgattacagacgaagaggaaatcaggaccaccaatcccgtggctacggagcagtatggttctgtatctaccaacctccagagcggcaacacacaagcagctacctcagatgtcaacacacaaggcgttcttccaggcatggtctggcaggacagagacgtgtacctgcaggggcccatctgggcaaagattccacacacggacggacattttcacccctctcccctcatgggcggattcggacttaaacaccctcctccacaaattctcatcaagaacaccccggtacctgcgaatccttcgaccactttcagtgcggcaaagtttgcttccttcatcacacagtactccacggggcaggtcagcgtggagatcgagtgggagctgcagaaggagaacagcaaacgctggaatcccgaaattcagtacacttccaactacaacaaatctgttaatgtggactttactgtggacactaatggtgtgtattcagagcctcgccccattggcaccagatacctgactcgtaatctgtaa

SEQ ID NO: 4870 - protein, 735 aa, Adeno-associated virus
MAADGYLPDWLEDTLSEGIRQWWKLKPGPPPPKPAERHKDDSRGLVLPGYKYLGPFNGLDKGEPVNEADAAALEHDKAYDRQLDSGDNPYLKYNHADAEFQERLKEDTSFGGNLGRAVFQAKKRILEPLGLVEEPVKTAPGKKRPVEHSPAEPDSSSGTGKAGQQPARKRLNFGQTGDADSVPDPRPLGQPPAAPSGLGTNTMASGSGAPMADNNEGADGVGNSSGNWHCDSTWMGDRVITTSTRTWALPTYNNHLYKQISSQSGASNDNHYFGYSTPWGYFDFNRFHCHFSPRDWQRLINNNWGFRPKRLSFKLFNIQVKEVTQNDGTTTIANNLTSTVQVFTDSEYQLPYVLGSAHQGCLPPFPADVFMVPQYGYLTLNNGSQAVGRSSFYCLEYFPSQMLRTGNNFTFSYTFEDVPFHSSYAHSQSLDRLMNPLIDQYLYYLSRTNTPSGTTTMSRLQFSQAGASDIRDQSRNWLPGPCYRQQRVSKTAADNNNSDYSWTGATKYHLNGRDSLVNPGPAMASHKDDEEKYFPQSGVLIFGKQDSGKTNVDIEKVMITDEEEIRTTNPVATEQYGSVSTNLQSGNTQAATSDVNTQGVLPGMVWQDRDVYLQGPIWAKIPHTDGHFHPSPLMGGFGLKHPPPQILIKNTPVPANPSTTFSAAKFASFITQYSTGQVSVEIEWELQKENSKRWNPEIQYTSNYNKSVNVDFTVDTNGVYSEPRPIGTRYLTRNL

SEQ ID NO: 4871 - DNA, 2208 bp, Adeno-associated virus
  source 1..2208: mol_type = genomic DNA
atggctgccgatggttatcttccagattggctcgaggacactctctctgaaggaataagacagtggtggaagctcaaacctggcccaccaccaccaaagcccgcagagcggcataaggacgacagcaggggtcttgtgcttcctgggtacaagtacctcggacccttcaacggactcgacaagggagagccggtcaacgaggcagacgccgcggccctcgagcacgacaaggcctacgaccggcagctcgacagcggagacaacccgtacctcaagtacaaccacgccgacgcggagtttcaggagcgccttaaaggagatacgtcttttgggggcaacctcggacgagcagtcttccaggccaaaaagaggattcttgaacctctgggcctggttgaggaacctgttaagacggctccgggaaaaaagaggccggtagagcactctcctgcggagccagactcctcctcgggaaccggaaaagcgggccagcagcctgcaagaaagagattgaattttggtcagactggagacgcagactcagtacctgacccccagcctctcggacagccaccagcagccccctctggtctgggaactaatacgatggcttcaggcagtggcgcaccaatggcagacaataacgagggcgccgacggagtgggtaattcctcgggaaattggcattgcgattccacatggatgggcggcagagtcatcaccaccagcacccgcacctgggccctgcccacctacaacaaccatctgtacaagcaaatctccagccagtctggagccagcaacgacaaccactactttggctacagcaccccctgggggtattttgacttcaacagattccactgccacttctccccacgtgactggcaaagactcatcaacaacaactggggattccggcccaagagactcagcttcaagctctttaacattcaagtcaaagaggtcacgcagaatgacggtacgacgacgattgccaataaccttaccagcacggttcaggtgtttactgactcggagtaccagctcccgtacgtcctcggctcggcgcatcaaggatgcctcccgccgttcccagcagacgtcttcatggtgccacagtatggatacctcaccctgaacaacggcagtcaggcggtaggacgctcttccttttactgcctggagtactttccttctcagacgcttcgtaccggaaacaactttaccttcagctacacctttgaagacgttcctttccatagcagctacgctcacagccaaagtctggaccgtctcatgaatcctctcatcgaccagtacctgtattacttgagcagaacaaacactccaagcggaaccaccacgatgtccaggcttcagttttctcaggccggagcaagtgacattcgggaccagtctagaaactggcttcctggaccctgttaccgccagcagcgagtatcaaagacagctgcggacaacaacaacagtgattactcgtggactggagctaccaagtaccacctcaatggaagagactctctggtgaatccgggcccagctatggccagccacaaggacgatgaagaaaaatattttcctcagagcggggttctcatctttggaaaacaagactcgggaaaaactaatgtggacattgaaaaggttatgattacagacgaagaggaaatcaggaccaccaatcccgtggctacggagcagtatggttctgtatctaccaacctccagagcggcaacacacaagcagctacctcagatgtcaacacacaaggcgttcttccaggcatggtctggcaggacagagacgtgtacctgcaggggcccatctgggcaaagattccacacacggacggacattttcacccctctcccctcatgggcggattcggacttaaacaccctcctccacaaattctcatcaagaacaccccggtacctgcgaatccttcgaccactttcagtgcggcaaagtttgcttccttcatcacacagtactccacggggcaggtcagcgtggagatcgagtgggagctgcagaaggagaacagcaaacgctggaatcccgaaattcagtacacttccaactacaacaaatctgttaatgtggactttactgtggacactaatggtgtgtattcagagcctcgccccattggcaccagatacctgactcgtaatctgtaa

SEQ ID NO: 4872 - protein, 735 aa, Adeno-associated virus
MAADGYLPDWLEDTLSEGIRQWWKLKPGPPPPKPAERHKDDSRGLVLPGYKYLGPFNGLDKGEPVNEADAAALEHDKAYDRQLDSGDNPYLKYNHADAEFQERLKGDTSFGGNLGRAVFQAKKRILEPLGLVEEPVKTAPGKKRPVEHSPAEPDSSSGTGKAGQQPARKRLNFGQTGDADSVPDPQPLGQPPAAPSGLGTNTMASGSGAPMADNNEGADGVGNSSGNWHCDSTWMGGRVITTSTRTWALPTYNNHLYKQISSQSGASNDNHYFGYSTPWGYFDFNRFHCHFSPRDWQRLINNNWGFRPKRLSFKLFNIQVKEVTQNDGTTTIANNLTSTVQVFTDSEYQLPYVLGSAHQGCLPPFPADVFMVPQYGYLTLNNGSQAVGRSSFYCLEYFPSQTLRTGNNFTFSYTFEDVPFHSSYAHSQSLDRLMNPLIDQYLYYLSRTNTPSGTTTMSRLQFSQAGASDIRDQSRNWLPGPCYRQQRVSKTAADNNNSDYSWTGATKYHLNGRDSLVNPGPAMASHKDDEEKYFPQSGVLIFGKQDSGKTNVDIEKVMITDEEEIRTTNPVATEQYGSVSTNLQSGNTQAATSDVNTQGVLPGMVWQDRDVYLQGPIWAKIPHTDGHFHPSPLMGGFGLKHPPPQILIKNTPVPANPSTTFSAAKFASFITQYSTGQVSVEIEWELQKENSKRWNPEIQYTSNYNKSVNVDFTVDTNGVYSEPRPIGTRYLTRNL

SEQ ID NO: 4873 - DNA, 2208 bp, Adeno-associated virus
  source 1..2208: mol_type = genomic DNA
atggctgccgatggttatcttccagattggctcgaggacactctctctgaaggaataagacagtggtggaagctcaaacctggcccaccaccaccaaagcccgcagagcggcataaggacgacagcaggggtcttgtgcttcctgggtacaagtacctcggacccttcaacggactcgacaagggagagccggtcaacgaggcagacgccgcggccctcgagcacgacaaggcctacgaccggcagctcgacagcggagacaacccgtacctcaagtacaaccacgccgacgcggagtttcaggagcgtcttaaagaagatacgtcttttgggggcaacctcggacgagcagtcttccaggccaaaaagaggattcttgaacctctgggcctggttgaggaacctgttaagacggctccgggaaaaaagaggccggtagagcactctcctgcggagccagactcctcctcgggaaccggaaaagcgggccagcagcctgcaagaaagagattgaattttggtcagactggagacgcagactcagtacctgacccccagcctctcggacagccaccagcagccccctctggtctgggaactaatacgatggcttcaggcagtggcgcaccaatggcagacaataacgagggcgccgacggagtgggtaattcctcgggaaattggcattgcgattccacatggatgggcgacagagtcatcaccaccagcacccgcacctgggccctgcccacctgcaacaaccatctgtacaagcaaatctccagccagtctggagccagcaacgacaaccactactttggctacagcaccccctgggggtattttgacttcaacagattccactgccacttctccccacgtgactggcaaagactcatcaacaacaactggggattccggcccaagagactcagcttcaagctctttaacattcaagtcaaagaggtcacgcagaatgacggtacgacgacgattgccaataaccttaccagcacggttcaggtgtttactgactcggagtaccagctcccgtacgtcctcggctcggcgcatcaaggatgcctcccgccgttcccagcagacgtcttcatggtgccacagtatggatacctcaccctgaacaacggcagtcaggcggtaggacgctcttccttttactgcctggagtattttccttctcagatgcttcgtaccggaaacaactttaccttcagctacacctttgaagacgttcctttccatagcagctacgctcacagccaaagtctggaccgtctcatgaatcctctcatcgaccagtacctgtattacttgagcagaacaaacactccaagcggaaccaccacgatgtccaggcttcagttttctcaggccggagcaagtgacattcgggaccagtctagaaactggcttcctggaccctgttaccgccagcagcgagtatcaaagacagctgcggacaacaacaacagtgattactcgtggactggagctaccaagtaccacctcaatggaagagactctctggtgaatccgggcccagctatggccagccacaaggacgatgaagaaaaatattttcctcagagcggggttctcatctttggaaaacaagactcgggaaaaactaatgtggacattgaaaaggttatgattacagacgaagaggaaatcaggaccaccaatcccgtggctacggagcagtatggttctgtatctacctacctccagagcggcaacacacaagcagctacctcagatgtcaacacacaaggcgttcttccaggcatggtctggcaggacagagacgtgtacctgcgggggcccatctgggcaaagattccacacacggacggacattttcacccctctcccctcatgggcggatttggacttaaacaccctcctccacaaattctcatcaagaacaccccggtacctgcgaatccttcgaccactttcagtgcggcaaagtttgcttccttcatcacacagtactccacggggcaggtcagcgtggagatcgagtgggagctgcagaaggagaacagcaaacgctggaatcccgaaattcagtacacttccaactacaacaaatctgttaatgtggactttactgtggacactaatggtgtgtattcagagcctcgccccattggcaccagatacctgactcgtaatctgtaa

SEQ ID NO: 4874 - protein, 735 aa, Adeno-associated virus
MAADGYLPDWLEDTLSEGIRQWWKLKPGPPPPKPAERHKDDSRGLVLPGYKYLGPFNGLDKGEPVNEADAAALEHDKAYDRQLDSGDNPYLKYNHADAEFQERLKEDTSFGGNLGRAVFQAKKRILEPLGLVEEPVKTAPGKKRPVEHSPAEPDSSSGTGKAGQQPARKRLNFGQTGDADSVPDPQPLGQPPAAPSGLGTNTMASGSGAPMADNNEGADGVGNSSGNWHCDSTWMGDRVITTSTRTWALPTCNNHLYKQISSQSGASNDNHYFGYSTPWGYFDFNRFHCHFSPRDWQRLINNNWGFRPKRLSFKLFNIQVKEVTQNDGTTTIANNLTSTVQVFTDSEYQLPYVLGSAHQGCLPPFPADVFMVPQYGYLTLNNGSQAVGRSSFYCLEYFPSQMLRTGNNFTFSYTFEDVPFHSSYAHSQSLDRLMNPLIDQYLYYLSRTNTPSGTTTMSRLQFSQAGASDIRDQSRNWLPGPCYRQQRVSKTAADNNNSDYSWTGATKYHLNGRDSLVNPGPAMASHKDDEEKYFPQSGVLIFGKQDSGKTNVDIEKVMITDEEEIRTTNPVATEQYGSVSTYLQSGNTQAATSDVNTQGVLPGMVWQDRDVYLRGPIWAKIPHTDGHFHPSPLMGGFGLKHPPPQILIKNTPVPANPSTTFSAAKFASFITQYSTGQVSVEIEWELQKENSKRWNPEIQYTSNYNKSVNVDFTVDTNGVYSEPRPIGTRYLTRNL

SEQ ID NO: 4875 - DNA, 2208 bp, Adeno-associated virus; identical to SEQ ID NO: 4869
  source 1..2208: mol_type = genomic DNA

SEQ ID NO: 4876 - protein, 735 aa, Adeno-associated virus; identical to SEQ ID NO: 4870

SEQ ID NO: 4877 - DNA, 2208 bp, Adeno-associated virus
  source 1..2208: mol_type = genomic DNA
atggctgccgatggttatcttccagattggctcgaggacactctctctgaaggaataagacagtggtggaagctcaaacctggcccaccaccaccaaagcccgcagagcggcataaggacggcagcaggggtcttgtgcttcctgggtacaagtacctcggacccttcaacggactcgacaagggagagccggtcaacgaggcagacgccgcggccctcgagcacgacaaggcctacgaccggcagctcaacagcggagacaacccgtacctcaagtacaaccacgccgacgcggagtttcaggagcgccttaaagaagatacgtcttttgggggcaacctcggacgagcagtcttccaggcaaaaaagagggttcttgaacctctgggcctggttgaggagcctgttaaaacggctccgggaaaaaagagaccggtagagcactctcctgcggagccagactcctcctcgggaaccggaaaagcgggccagcagcctgcaagaaagagattgaattttggtcagactggagacgcagactccgtacctgacccccagcctctcggacagccaccagcagccccctctggtctgggatctactacaatggctacaggcagtggcgcaccaatggcagacaataacgagggtgccgatggagtgggtaattcctcaggaaattggcattgcgattcccaatggctgggcgacagagtcatcaccacaagcactcgaacctgggccctgcccacctacaacaaccacctctacaagcaaatctccagccaatcaggagcctcaaacgacaaccactattttggctacagcaccccttgggggtattttgacttcaacagattccactgccacttttcaccacgtgactggcaaagactcatcaacaacaactggggattccgacccaagagactcaacttcaagctctttaacattcaagtcaaagaggtcacgcagaatgacggtacgacgacgattgccaataaccttaccagcacggttcaggtgtttactgactcggagtaccagctcccgtacgtcctcggctcggcgcatcaaggatgcctcccgccgttcccagcggacgtcttcatggtcccacagtatggatacctcaccctgaacaacgggagtcaggcggtaggacgctctcccttttactgcctggagtactttccttctcagatgctgcgtactggaaacaactttcagttcagctacacttttgaagacgtgcctttccacagcagctacgctcacagccagagtctggatcggctgatgaatcctctgatcgaccagtacctgtattatctgaacaagacacaaacaaatagtggaactcttcagcagtctcggctactgtttagccaagctggacccaccaacatgtctcttcaagctaaaaactggctgcctggaccttgctacagacagcagcgtctgtcaaagcaggcaaacgacaacaacaacagcaactttccctggactgcagctacaaagtatcatctaaatggccgggactcgttggttaatccaggaccagctatggccagtcacaaggatgacgaagaaaagtttttccccatgcatggaaccctgatatttggtaaacaaggaacaaatgccaacgacgcggatttggaaaatgtcatgattacagatgaagaagaaatcaggaccaccaatcccgtggctacggagcagtacgggactgtgtcaaataatttgcaaaactcaaacactggtccaactactggaactgtcaatcaccaaggagcgttacctggtatggtgtggcaggatcgagatgtgtaccttcagggacccatttgggccaagattcctcacaccgatggacactttcatccttctccactgatgggaggttttggactcaaacacccgcctcctcagattatgatcaaaaacactcccgttccagccaatcctcctacaaacttcagttctgccaagtttgcttctttcatcacacagtattccacggggcaggtcagcgtggagatcgagtgggagctgcagaaggagaacagcaaacgctggaatcccgaaattcagtacacttccaactacaacaaatctgttaatgtggactttactgtggacaataatggcgtgtactcagagcctcgccccattggcaccagatacctgactcgtaatctgtaa

SEQ ID NO: 4878 - protein, 735 aa, Adeno-associated virus
MAADGYLPDWLEDTLSEGIRQWWKLKPGPPPPKPAERHKDGSRGLVLPGYKYLGPFNGLDKGEPVNEADAAALEHDKAYDRQLNSGDNPYLKYNHADAEFQERLKEDTSFGGNLGRAVFQAKKRVLEPLGLVEEPVKTAPGKKRPVEHSPAEPDSSSGTGKAGQQPARKRLNFGQTGDADSVPDPQPLGQPPAAPSGLGSTTMATGSGAPMADNNEGADGVGNSSGNWHCDSQWLGDRVITTSTRTWALPTYNNHLYKQISSQSGASNDNHYFGYSTPWGYFDFNRFHCHFSPRDWQRLINNNWGFRPKRLNFKLFNIQVKEVTQNDGTTTIANNLTSTVQVFTDSEYQLPYVLGSAHQGCLPPFPADVFMVPQYGYLTLNNGSQAVGRSPFYCLEYFPSQMLRTGNNFQFSYTFEDVPFHSSYAHSQSLDRLMNPLIDQYLYYLNKTQTNSGTLQQSRLLFSQAGPTNMSLQAKNWLPGPCYRQQRLSKQANDNNNSNFPWTAATKYHLNGRDSLVNPGPAMASHKDDEEKFFPMHGTLIFGKQGTNANDADLENVMITDEEEIRTTNPVATEQYGTVSNNLQNSNTGPTTGTVNHQGALPGMVWQDRDVYLQGPIWAKIPHTDGHFHPSPLMGGFGLKHPPPQIMIKNTPVPANPPTNFSSAKFASFITQYSTGQVSVEIEWELQKENSKRWNPEIQYTSNYNKSVNVDFTVDNNGVYSEPRPIGTRYLTRNL

SEQ ID NO: 4879 - DNA, 2208 bp, Adeno-associated virus
  source 1..2208: mol_type = genomic DNA
atggctgccgatggttatcttccagattggctcgaggacactctctctgaaggaataagacagtggtggaagctcaaacctggcccaccaccaccaaagcccgcagagcggcataaggacgacagcaggggtcttgtgcttcctgggtacaagtacctcggacccttcaacggactcgacaagggagagccggtcaacgaggcagacgccgcggccctcgagcacgacaaggcctacgaccggcagctcgacagcggagacaacccgtacctcaagtacaaccacgccgacgcggagtttcaggagcgtcttaaagaagatacgtcttttgggggcaacctcggacgagcagtcttccaggccaaaaagaggattcttgaacctctgggcctggttgaggaacctgttaagacggctccgggaaaaaagaggccggtagagcactctcctgcggagccagactcctcctcgggaaccggaaaagcgggccagcagcctgcaagaaagagattgaattttggtcagactggagacgcagactcagtacctgacccccagcctctcggacagccaccagcagccccctctggtctgggaactaatacgatggcttcaggcagtggcgcaccaatggcagacaataacgagggcgccgacggagtgggtaattcctcgggaaattggcattgcgattccacatggatgggcgacagagtcatcaccaccagcacccgcacctgggccctgcccacctacaacaaccatctgtacaagcaaatctccagccagtctggagccagcaacgacaaccactactttggctacagcaccccctgggggtattttgacttcaacagattccactgccacttctccccacgtgactggcaaagactcatcaacaacaactggggattccggcccaagagactcagcttcaagctctttaacattcaagtcaaagaggtcacgcagaatgacggtacgacgacgattgccaataaccttaccagcacggttcaggtgtttactgactcggagtaccagctcccgtacgtcctcggctcggcgcatcaaggatgcctcccgccgttcccagcagacgtcttcatggtgccacagtatggatacctcaccctgaacaacggcagtcaggcggtaggacgctcttccttttactgcctggagtactttccttctcagatgcttcgtaccggaaacaactttaccttcagctacacctttgaagacgttcctttccatagcagctacgctcacagccaaagtctggaccgtctcatgaatcctctcatcgaccagtacctgtattacttgagcagaacaaacactccaagcggaaccaccacgatgtccaggcttcagttttctcaggccggagcaagtgacattcgggaccagtctagaaactggcttcctggaccctgttaccgccagcagcgagtatcaaagacagctgcggacaacaacaacagtgattactcgtggactggagctaccaagtaccacctcaatggaagagactctctggtgaatccgggcccagctatggccagccacaaggacgatgaagaaaaatattttcctcagagcggggttctcatctttggaaaacaagactcgggaaaaactaatgtggacattgaaaaggttatgattacagacgaagaggaaatcaggaccaccaatcccgtggctacggagcagtatggttctgtatctaccaacctccagagcggcaacacacaagcagctacctcagatgtcaacacacaaggcgttcttccaggcatggtctggcaggacagagacgtgtacctgcaggggcccatctgggcaaagattccacacacggacggacattttcacccctctcccctcatgggcggattcggacttaaacaccctcctccacaaattctcatcaagaacaccccggtacctgcgaatccttcgaccactttcagtgcggcaaagtttgcttccttcatcacacagtactccacggggcaggtcagcgtggagatcgagtgggagctgcagaaggagaacagcaaacgctggaatcccgaaattcagtacacttccaactacaacaaatctgttaatgtggactttactgtggacactaatggtgtgtattcagagcctcgccccattggcaccagatacctgactcgtaatctgtaa

SEQ ID NO: 4880 - protein, 735 aa, Adeno-associated virus
MAADGYLPDWLEDTLSEGIRQWWKLKPGPPPPKPAERHKDDSRGLVLPGYKYLGPFNGLDKGEPVNEADAAALEHDKAYDRQLDSGDNPYLKYNHADAEFQERLKEDTSFGGNLGRAVFQAKKRILEPLGLVEEPVKTAPGKKRPVEHSPAEPDSSSGTGKAGQQPARKRLNFGQTGDADSVPDPQPLGQPPAAPSGLGTNTMASGSGAPMADNNEGADGVGNSSGNWHCDSTWMGDRVITTSTRTWALPTYNNHLYKQISSQSGASNDNHYFGYSTPWGYFDFNRFHCHFSPRDWQRLINNNWGFRPKRLSFKLFNIQVKEVTQNDGTTTIANNLTSTVQVFTDSEYQLPYVLGSAHQGCLPPFPADVFMVPQYGYLTLNNGSQAVGRSSFYCLEYFPSQMLRTGNNFTFSYTFEDVPFHSSYAHSQSLDRLMNPLIDQYLYYLSRTNTPSGTTTMSRLQFSQAGASDIRDQSRNWLPGPCYRQQRVSKTAADNNNSDYSWTGATKYHLNGRDSLVNPGPAMASHKDDEEKYFPQSGVLIFGKQDSGKTNVDIEKVMITDEEEIRTTNPVATEQYGSVSTNLQSGNTQAATSDVNTQGVLPGMVWQDRDVYLQGPIWAKIPHTDGHFHPSPLMGGFGLKHPPPQILIKNTPVPANPSTTFSAAKFASFITQYSTGQVSVEIEWELQKENSKRWNPEIQYTSNYNKSVNVDFTVDTNGVYSEPRPIGTRYLTRNL

SEQ ID NO: 4881 - DNA, 2208 bp, Adeno-associated virus
  source 1..2208: mol_type = genomic DNA
atggctgccgatggttatcttccagattggctcgaggacactctctctgaaggaataagacagtggtggaagctcaaacctggcccaccaccaccaaagcccgcagagcggcataaggacgacagcaggggtcttgtgcttcctgggtacaagtacctcggacccttcaacggactcgacaagggagagccggtcaacgaggcagacgccgcggccctcgagcacgacaaggcctacgaccggcagctcgacagcggagacaacccgtacctcaagtacaaccacgccgacgcggagtttcaggagcgtcttaaagaagatacgtcttttgggggcaacctcggacgagcagtcttccaggccaaaaagaggattcttgaacctctgggcctggttgaggaacctgttaagacggctccgggaaaaaagaggccggtagagcactctcctgcggagccagactcctcctcgggaaccggaaaagcgggccagcagcctgcaagaaagagattgaattttggtcagactggagacgcagactcagtacctgacccccagcctctcggacagccaccagcagccccctctggtctgggaactaatacgatggcttcaggcagtggcgcaccaatggcagacaataacgagggcgccgacggagtgggtaattcctcgggaaattggcattgcgattccacatggatgggcgacagagtcatcaccaccagcacccgcacctgggccctgcccacctacaacaaccatctgtacaagcaaatctccagccagtctggagccagcaacgacaaccactactttggctacagcaccccctgggggtatttcgacttcaacagattccactgccacttctccccacgtgactggcaaagactcatcaacaacaactggggattccggcccaagagactcagcttcaagctctttaacattcaagtcaaagaggtcacgcagaatgacggtacgacgacgattgccaataaccttaccagcacggttcaggtgtttactgactcggggtaccagctcccgtacgtcctcggctcggcgcatcaaggatgccttccgccgttcccagcagacgtcttcatggtgccacagtatggatacctcaccctgaacaacggcagtcaggcggtaggacgctcttccttttactgcctggagtactttccttctcagatgcttcgtaccggaaacaactttaccttcagctacacctttgaagacgttcctttccatagcagctacgctcacggccaaagtctggaccgtctcatgaatcctctcatcgaccagtacctgtattacttgagcagaacaaacactccaagcggaaccaccacgatgtccaggcttcagttttctcaggccggagcaagtgacgttcgggaccagtctagaaactggcttcctggaccctgttaccgccagcagcgagtatcaaagacagctgcggacaacaacaacagtgattactcgtggactggagctaccaagtaccacctcaatggaagagactctctggtgaatccgggcccagctatggccagccacaaggacgatgaagaaaaatattttcctcagagcggggttctcgtctttggaaaacaagactcgggaaaaactaatgtggacattgaaaaggttatgattacagacgaagaggaaatcaggaccaccaatcccgcggctacggagcagtatggttctgtatctaccaacctccagagcggcaacacacaagcagctacctcagatgtcaacacacaaggcgttcttccaggcatggtctggcaggacagagacgtgtacctgcaggggcccatctgggcaaagattccacacacggacggacattttcacccctctcccctcatgggcggattcggacttaaacaccctcctccacaaattctcatcaagaacaccccggtacctgcgaatccttcgaccactttcagtgcggcaaagtttgtttccttcatcacacagtactccacggggcaggtcagcgtggagatcgagtgggagctgcagaaggagaacagcaaacgctggaatcccgaaattcagtacacttccaactacaacaaatctgttaatgtggactttactgtggacactaatggtgtgtattcagagcctcgccccattggcaccagatacctgactcgtaatctgtaa

SEQ ID NO: 4882 - protein, 735 aa, Adeno-associated virus
MAADGYLPDWLEDTLSEGIRQWWKLKPGPPPPKPAERHKDDSRGLVLPGYKYLGPFNGLDKGEPVNEADAAALEHDKAYDRQLDSGDNPYLKYNHADAEFQERLKEDTSFGGNLGRAVFQAKKRILEPLGLVEEPVKTAPGKKRPVEHSPAEPDSSSGTGKAGQQPARKRLNFGQTGDADSVPDPQPLGQPPAAPSGLGTNTMASGSGAPMADNNEGADGVGNSSGNWHCDSTWMGDRVITTSTRTWALPTYNNHLYKQISSQSGASNDNHYFGYSTPWGYFDFNRFHCHFSPRDWQRLINNNWGFRPKRLSFKLFNIQVKEVTQNDGTTTIANNLTSTVQVFTDSGYQLPYVLGSAHQGCLPPFPADVFMVPQYGYLTLNNGSQAVGRSSFYCLEYFPSQMLRTGNNFTFSYTFEDVPFHSSYAHGQSLDRLMNPLIDQYLYYLSRTNTPSGTTTMSRLQFSQAGASDVRDQSRNWLPGPCYRQQRVSKTAADNNNSDYSWTGATKYHLNGRDSLVNPGPAMASHKDDEEKYFPQSGVLVFGKQDSGKTNVDIEKVMITDEEEIRTTNPAATEQYGSVSTNLQSGNTQAATSDVNTQGVLPGMVWQDRDVYLQGPIWAKIPHTDGHFHPSPLMGGFGLKHPPPQILIKNTPVPANPSTTFSAAKFVSFITQYSTGQVSVEIEWELQKENSKRWNPEIQYTSNYNKSVNVDFTVDTNGVYSEPRPIGTRYLTRNL

SEQ ID NO: 4883 - DNA, 2208 bp, Adeno-associated virus
  source 1..2208: mol_type = genomic DNA
atggctgccgatggttatcttccagattggctcgaggacactctctctgaaggaataagacagtggtggaaactcaaacctggcccaccaccaccaaagcccgcagagcggcataaggacgacagcaggggtcttgtgcttcctgggtacaagtacctcggacccttcaacggactcgacaagggagagccggtcaacgaggcagacgccgcggccctcgagcacgacaaggcctacgaccggcagctcgacagcggagacaacccgtacctcaagtacaaccacgccgacgcggagtttcaggagcgccttaaagaagatacgtcttttgggggcaacctcggacgagcagtcttccaggcaaaaaagagggttctggaacctctgagcctggttgaggagcctgttaagacggctccgggaaaaaagaggccggtagagcactctcccgcagagccagattcctcctccggaactggaaagtcgggcaaccagcctgcaagaaagagattgaatttcggtcagactggagactcagactccgtacctgacccccagcctctcggacagccaccagcagccccctctggtctgggaactaatacgatggctacaggcagtggcgcaccaatggcagacaataacgagggcgccgacggagtgggtaattcctcgggaaattggcattgcgattccacatggatgggcgacagagtcatcaccaccagcacccgaacctgggccctgcccacctacaacaaccatctgtacaagcaaatatccagccagtctggagccagcaacgacaatcactactttggctacagcaccccctgggggtattttgacttcaacagattccactgccacttttcaccacgtgactggcaaagactcatcaacaacaactggggattccgacccaagagactcaacttcaagctctttaacattcaagtcaaagaggtcacgcagaatgacggtacgacgacgattgccaataaccttaccagcacggttcaggtgtttactgactcggagtaccagctcccgtacgtcctcggctcggcgcatcaaggatgcctcccgccgttcccagcagacgtcttcatggtgccacagtatggatacctcaccctgaacaacgggagtcaggcagtaggacgctcttcattttactgcctagagtactttccttctcagatgctgcgtaccggaaacaactttaccttcagctacacctttgaggacgttcctttccacagcagctacgctcacagccagagtttggaccgtctcatgaatcctctcatcgaccagtacctgtattacttgagcagaacaaacactccaagcggaaccaccacgcagtccaggcttcagttttctcaggccggagcgagtgacattcaggaccagtctaggaactggcttcctggaccctgttaccgtcagcagcgagtatcaaagacatctgcggataacaacaacagtgaatactcgtggactggagctaccaagtaccacctcaatggcagagactctctggtgaatccgggcccggccatggccagccacaaagacgatgaagaaaagttttttcctcagagcggggttcttatctttgggaagcaaggctcagagaaaacaaatgtggatattgaaaaggtcatgattacagacgaagaggaaatcaggaccaccaatcccgtggctacggagcagtatggttctgtatctaccaacctccagagcggcaacacacaagcagctaccgcagatgtcaacacacaaggcgttcttccaggcatggtcgggcaagacagagacgtgtacctgcaggggcctacttgggcaaagattccacacacggacggacattttcacccctctcccctcatgggcggatttggacttaaacaccctcctccacagattctcatcaagaacaccccggtacctgcgaatccttcgaccaccttcagtgcggcaaagtttgcttccttcattacacagtactccacggggcaggtcagcgtggagatcgagtgggagctgcagaaggagaacagcaaacgctggaatcccgagatccagtacacttccaactacaacaagtctgttaatgtggactttactgtggacactaatggcgtgtattcagagcctcgccccattggcaccagatacctgactcgtaatctgtaa

SEQ ID NO: 4884 - protein, 735 aa, Adeno-associated virus
MAADGYLPDWLEDTLSEGIRQWWKLKPGPPPPKPAERHKDDSRGLVLPGYKYLGPFNGLDKGEPVNEADAAALEHDKAYDRQLDSGDNPYLKYNHADAEFQERLKEDTSFGGNLGRAVFQAKKRVLEPLSLVEEPVKTAPGKKRPVEHSPAEPDSSSGTGKSGNQPARKRLNFGQTGDSDSVPDPQPLGQPPAAPSGLGTNTMATGSGAPMADNNEGADGVGNSSGNWHCDSTWMGDRVITTSTRTWALPTYNNHLYKQISSQSGASNDNHYFGYSTPWGYFDFNRFHCHFSPRDWQRLINNNWGFRPKRLNFKLFNIQVKEVTQNDGTTTIANNLTSTVQVFTDSEYQLPYVLGSAHQGCLPPFPADVFMVPQYGYLTLNNGSQAVGRSSFYCLEYFPSQMLRTGNNFTFSYTFEDVPFHSSYAHSQSLDRLMNPLIDQYLYYLSRTNTPSGTTTQSRLQFSQAGASDIQDQSRNWLPGPCYRQQRVSKTSADNNNSEYSWTGATKYHLNGRDSLVNPGPAMASHKDDEEKFFPQSGVLIFGKQGSEKTNVDIEKVMITDEEEIRTTNPVATEQYGSVSTNLQSGNTQAATADVNTQGVLPGMVGQDRDVYLQGPTWAKIPHTDGHFHPSPLMGGFGLKHPPPQILIKNTPVPANPSTTFSAAKFASFITQYSTGQVSVEIEWELQKENSKRWNPEIQYTSNYNKSVNVDFTVDTNGVYSEPRPIGTRYLTRNL

SEQ ID NO: 4885 - DNA, 2208 bp, Adeno-associated virus
  source 1..2208: mol_type = genomic DNA
atggctgccgatggttatcttccagattggctcgaggacactctctctgaaggaataagacagtggtggaagctcaaacctggcccaccaccaccaaagcccgcagagcggcataaggacgacagcaggggtcttgtgcttcctgggtacaagtacctcggacccttcaacggactcgacaagggagagccggtcaacgaggcagacgccgcggccctcgagcacgacaaggcctacgaccggcagctcgacagcggagacaacccgtacctcaagtacaaccacgccgacgcagagtttcaggagcgccttaaagaagatacgtcttttgggggcaacctcggacgagcagtcttccaggcaaaaaagagggttctggaacctctgggcctggttgaggagcctgttaagacggctccgggaaaaaagaggccggtagagcactctcctgcagagccagattcctcctccggaactggaaagtcgggcaaccagcctgcaagaaagagattgaatttcggtcagactggagactcagactccgtacctgacccccagcctctcggacagccaccagcagccccctctggtctgggaactaatacgatggctacaggcagtggcgcaccaatggcagacaataacgagggcgccgacggagtgggtaattcctcgggaaattggcattgcgattccacatggatgggcgacagagtcatcaccaccagcacccgaacctgggccctgcccacctacaacaaccatctgtacaagcaaatatccagccagtctggagccagcaacgacaatcactactttggctacagcaccccctgggggtattttgacttcaacagattccactgccacttttcaccacgtgactggcaaagactcatcaacaacaactggggattccgacccaagagactcaacttcaagctctttaacattcaagtcaaagaggtcacgcagaatgacggtacgacgacgattgccaataaccttaccagcacggttcaggtgtttactgactcggagtaccagctcccgtacgtcctcggctcggcgcatcaaggatgcctcccgccgttcccagcagacgtcttcatggtgccacagtatggatacctcaccctgaacaacgggagtcaggcagtaggacgctcttcattttactgcctagggtactttccttctcagatgctgcgtaccggaaacaactttaccttcagctacacctttgaggacgttcctttccacagcagctacgctcacagccagagtttggaccgtctcatgaatcctctcatcgaccagtacctgtattacttgagcagaacaaacactccaagcggaaccaccacgcagtccaggcttcagttttctcaggccggagcgagtgacattcgggaccagtctaggaactggcttcctggaccctgttaccgtcagcagcgagtatcaaagacatctgcggataacaacaacagtgaatactcgtggactggagctaccaagtaccacctcaatggcagagactctctggtgaatccgggcccggccatggccagccacaaagacgatgaagaaaagttttttcctcagagcggggttcttatctttgggaagcaaggcccagagaaaacaaatgtggatattgaaaaggtcatgattacagacgaagaggaaatcaggaccaccaatcccgtggctacggagcagtatggttctgtatctaccaacctccagagcggcaacacacaagcagctaccgcagatgtcaacacacaaggcgttcttccaggcatggtctggcaagacagagacgtgtacctgcaggggcctatttgggcaaagattccacacacggacggacattttcacccctctcccctcatgggcggatttggacttaaacaccctcctccacagattctcatcaagaacaccccggtacctgcgaatccttcgaccaccttcagtgcggcaaagtttgcttccttcattacacagtactccacggggcaggtcagcgtggagatcgagtgggagctgcagaaggagaacagcaaacgctggaatcccgagatccagtacacttccaactacaacaagtctgttaatgtggactttactgtggacactaatggcgtgtattcagagcctcgccccattggcaccagatacctgactcgtaatctgtaa

SEQ ID NO: 4886 - protein, 735 aa, Adeno-associated virus
MAADGYLPDWLEDTLSEGIRQWWKLKPGPPPPKPAERHKDDSRGLVLPGYKYLGPFNGLDKGEPVNEADAAALEHDKAYDRQLDSGDNPYLKYNHADAEFQERLKEDTSFGGNLGRAVFQAKKRVLEPLGLVEEPVKTAPGKKRPVEHSPAEPDSSSGTGKSGNQPARKRLNFGQTGDSDSVPDPQPLGQPPAAPSGLGTNTMATGSGAPMADNNEGADGVGNSSGNWHCDSTWMGDRVITTSTRTWALPTYNNHLYKQISSQSGASNDNHYFGYSTPWGYFDFNRFHCHFSPRDWQRLINNNWGFRPKRLNFKLFNIQVKEVTQNDGTTTIANNLTSTVQVFTDSEYQLPYVLGSAHQGCLPPFPADVFMVPQYGYLTLNNGSQAVGRSSFYCLGYFPSQMLRTGNNFTFSYTFEDVPFHSSYAHSQSLDRLMNPLIDQYLYYLSRTNTPSGTTTQSRLQFSQAGASDIRDQSRNWLPGPCYRQQRVSKTSADNNNSEYSWTGATKYHLNGRDSLVNPGPAMASHKDDEEKFFPQSGVLIFGKQGPEKTNVDIEKVMITDEEEIRTTNPVATEQYGSVSTNLQSGNTQAATADVNTQGVLPGMVWQDRDVYLQGPIWAKIPHTDGHFHPSPLMGGFGLKHPPPQILIKNTPVPANPSTTFSAAKFASFITQYSTGQVSVEIEWELQKENSKRWNPEIQYTSNYNKSVNVDFTVDTNGVYSEPRPIGTRYLTRNL

SEQ ID NO: 4887 - protein, 735 aa, Adeno-associated virus
MAADGYLPDWLEDTLSEGIRQWWKLKPGPPPPKPAERHKDDSRGLVLPGYKYLGPFNGLDKGEPVNEADAAALEHDKAYDRQLDSGDNPYLKYNHADAEFQERLKEDTSFGGNLGRAVFQAKKRVLEPLGLVEEPVKTAPGKKRPVEHSPAEPDSSSGTGKSGNQPARKRLNFGQTGDSDSVPDPQPLGQPPAAPSGLGTNTMATGSGAPMADNNEGADGVGNSSGNWHCDSTWMGDRVITTSTRTWALPTYNNHLYKQISSQSGASNDNHYFGYSTPWGYFDFNRFHCHFSPRDWQRLINNNWGFRPKRLNFKLFNIQVKEVTQNDGTTTIANNLTSTVQVFTDSEYQLPYVLGSAHQGCLPPFPADVFMVPQYGYLTLNNGSQAVGRSSFYCLEYFPSQMLRTGNNFTFSYTFEDVPFHSSYAHSQSLDRLMNPLIDQYLYYLSRTNTPSGTTTQSRLQFSQAGASDIRDQSRNWLPGPCYRQQRVSKTSADNNNSEYSWTGATKYHLNGRDSLVNPGPAMASHKDDEEKFFPQSGVLIFGKQGPEKTNVDIEKVMITDEEEIRTTNPVATEQYGSVSTNLQSGNTQAATADVNTQGVLPGMVWQDRDVYLQGPIWAKIPHTDGHFHPSPLMGGFGLKHPPPQILIKNTPVPANPSTTFSAAKFASFITQYSTGQVSVEIEWELQKENSKRWNPEIQYTSNYNKSVNVDFTVDTNGVYSEPRPIGTRYLTRNL

SEQ ID NO: 4888 - protein, 735 aa, Adeno-associated virus; identical to SEQ ID NO: 4887

SEQ ID NO: 4889 - DNA, 2211 bp, Adeno-associated virus
  source 1..2211: mol_type = genomic DNA
atggctgccgatggttatcttccagattggctcgaggacactctctctgaaggaataagacagtggtggaagctcaaacctggcccaccaccaccaaagcccgcagagcggcataaggacgacagcaggggtcttgtgcttcctgggtacaagtacctcggacccttcaacggactcgacaagggggagccggtcaacgaggcagacgccgcggccctcgagcacgacaaggcctacgaccggcagctcgacagcggagacaacccgtacctcaagtacaaccacgccgacgcagagtttcaggagcgccttaaagaagatacgtcttttgggggcaacctcggacgagcagtcttccaggcgaaaaagagggttcttgaacctctgcggcctggtttgaggaaacctgttaagacggctccgggaaaaaagaggccggtagagcactctcctgtggagccagactcctcctcgggaaccggaaaagcgggccagcagcctgcaagaaaaagattaaattttggtcagactggagacgcagactccgtacctgacccccagcctctcggacagccaccagcagccccctctggtctgggatctactacaatggctacaggcagtggcgcaccaatggcagacaataacgagggtgccgatggagtgggtaattcctcaggaaattggcattgcgattcccaatggctggacgacagagtcatcgccaccagcacccgaacctgggccctgcccacatacaacaaccacctctacaagcaaatctccagccaatcaggagcctgcaacgacaaccactactttggctacagcaccccctgggggtattttgacttcaacagattccactgccacttttcaccacgtgactggcaaagactcatcaacagcaactggggattccggcccaaaagactcaacttcaagctctttaatattcaagtcaaagaggtcacgcagaatgacggtacgacgacgattgccaataaccttaccagcacggttcaggtgtttactgactcggagtaccagctcccgtacgtcccgggctcggcgcatcaaggatgcctcccgccgtttccagcggacgtcttcatggtcccacagtatggatacctcaccctgaacaacgggagtcaggcggtaggacgctcttccttttactgcctggagtactttccttctcagatgctgcgtactggaaacaactttcagttcagctacacttttgaagacgtgcctttccacagcagctacgctcactgccagagtctggatcggctgatgaatcctctgatcgaccagtacctgtattatctgaacaagacacaaacaaatagtggaactcttcagcagtctcggctactgtttagccaagctggaccaaccaacatgtctcttcaagctaaaaactggctgcctggaccttgctacagacagcagcgtctgtcaaaacaggcaaacgacaataacaactgcaactttccctggactgcagctacaaagtatcatctaaatggccgggactcgttggttaatccaggaccagctatggccagtcacaaggatgacgaagaaaagtttttccccatgcatggaaccctgatatttggtaaacaaggaacaaatgccaacgacgcggatttggaaaatgtcatgattacagatgaagaagaaatcaggcccaccaatcccgtggctacggagcagtacgggactgtgtcaaataatttgcaaaactcaaacactggtccaactacaggaactgtcaatcaccaaggagcgttacctggtatggtgtggcaggatcgagacgtgtacctgcagggacccatttgggccaagattcctcacaccgatggacactttcatccttctccactgatgggaggttttggactcaaacacccgcctcctcagatcatgatcaaaagcactcccgttccagccaatcctcccacaaacttcagttctgccaagtttgcttcttccatcacacagtattccacgggacaggtcagcgtggagatcgagtgggagctgcagaaggagaacagcaaacgctggaatcccgaaattcagtacacttccaactacaacaagtctgttaatgtggactttactgtggacactaatggtgtgtattcagagcctcgccccattggcaccagatacctgactcgtaatctgtaa

SEQ ID NO: 4890 - protein, 736 aa, Adeno-associated virus
MAADGYLPDWLEDTLSEGIRQWWKLKPGPPPPKPAERHKDDSRGLVLPGYKYLGPFNGLDKGEPVNEADAAALEHDKAYDRQLDSGDNPYLKYNHADAEFQERLKEDTSFGGNLGRAVFQAKKRVLEPLRPGLRKPVKTAPGKKRPVEHSPVEPDSSSGTGKAGQQPARKRLNFGQTGDADSVPDPQPLGQPPAAPSGLGSTTMATGSGAPMADNNEGADGVGNSSGNWHCDSQWLDDRVIATSTRTWALPTYNNHLYKQISSQSGACNDNHYFGYSTPWGYFDFNRFHCHFSPRDWQRLINSNWGFRPKRLNFKLFNIQVKEVTQNDGTTTIANNLTSTVQVFTDSEYQLPYVPGSAHQGCLPPFPADVFMVPQYGYLTLNNGSQAVGRSSFYCLEYFPSQMLRTGNNFQFSYTFEDVPFHSSYAHCQSLDRLMNPLIDQYLYYLNKTQTNSGTLQQSRLLFSQAGPTNMSLQAKNWLPGPCYRQQRLSKQANDNNNCNFPWTAATKYHLNGRDSLVNPGPAMASHKDDEEKFFPMHGTLIFGKQGTNANDADLENVMITDEEEIRPTNPVATEQYGTVSNNLQNSNTGPTTGTVNHQGALPGMVWQDRDVYLQGPIWAKIPHTDGHFHPSPLMGGFGLKHPPPQIMIKSTPVPANPPTNFSSAKFASSITQYSTGQVSVEIEWELQKENSKRWNPEIQYTSNYNKSVNVDFTVDTNGVYSEPRPIGTRYLTRNL

SEQ ID NO: 4891 - DNA, 2208 bp, Adeno-associated virus
  source 1..2208: mol_type = genomic DNA
atggctgccgatggttatcttccagattggctcgaggacactctctctgaaggaataagacagtggtggaagctcaaacctggcccaccaccaccaaagcccgcagagcggcataaggacgacagcaggggtcttgtgcttcctgggtacaagtacctcggacccttcaacggactcgacaagggagagccggtcaacgaggcagacgccgcggccctcgagcacgacaaggcctacgaccggcagctcgacagcggagacaacccgtacctcaagtacaaccacgccgacgcggagtttcaggagcgccttaaagaggatacgtcttttgggggcaacctcggacgagcagtcttccaggcaaaaaagagggttctggaacctctgggcctggttgaggagcctgttaagacggctccgggaaaaaagaggccggtagagcactctcctgcagagccagattcctcctccggaactggaaagtcgggcaaccagcctgcaagaaagagattgaatttcggtcagactggagactcagactccgtacctgacccccagcctctcggacagccaccagcagccccctctggtctgggaactaatacgatggctacaggcagtggcgcaccaatggcagacaataacgagggcgccgacggagtgggtaattcctcgggaaattggcattgcgattccacatggatgggcgacagagtcatcaccaccagcacccgaacctgggccctgcccacctacaacaaccatctgtacaagcaaatatccagccagtctggagccagcaacgacaatcactactttggctacagcaccccctgggggtattttgacttcaacagattccactgccacttttcaccacgtgactggcaaagactcatcaacaacaactggggattccgacccaagagactcaacttcaagctctttaacattcaagtcaaagaggtcacgcagaatgacggtacgacgacgattgccaataaccttaccagcacggttcaggtgtttactgactcggagtaccagctcccgtacgtcctcggctcggcgcatcaaggatgcctcccgccgttcccagcagacgtcttcatggtgccacagtatggatacctcaccctgaacaacgggagtcaggcagtaggacgctcttcattttactgcctagagtactttccttctcagatgctgcgtaccggaaacagctttaccttcagctacacctttgaggacgttcctttccacagcagctacgctcacagccagagtttggaccgtctcatgaatcctctcatcgaccagtacctgtattacttgagcagaacaaacactccaagcggaaccaccacgcagtccaggcttcagttttctcaggccggagcgagtgacattcgggaccagtctaggaactggcttcctggaccctgttaccgtcagcagcgagtatcaaagacatctgcggataacaacaacagtgaatactcgtggactggagctaccaagtaccacctcaatggcagagactctctggtgaatccgggcccggccatggccagccacaaagacgatgaagaaaagttctttcctcagagcggggttcttatctttgggaagcaaggctcagagaaaacaaatgtggatattgaaaaggtcatgattacagacgaagaggaaatcaggaccaccaatcccgtggctacggagcagtatggttctgtatctaccaacctccagagcggcaacacacaagcagctaccgcagatgtcaacacacaaggcgttcttccaggcatggtctggcaagacagagacgtgtacctgcaggggcctatttgggcaaagattccacacacggacggacattttcacccctctcccctcatgggcggatttggacttaaacaccctcctccacagattctcatcaagaacaccccggtacctgcgaatccttcgaccaccttcagtgcggcaaagtttgcttccttcattacacagtactccacggggcaggtcagcgtggagatcgagtgggagctgcagaaggagaacagcaaacgctggaatcccgagatccagtacacttccaactacaacaagtctgttaatgtggactttactgtggacactaatggcgtgtattcagagcctcgccccattggcaccagatacctgactcgtaatctgtaa

SEQ ID NO: 4892 - protein, 735 aa, Adeno-associated virus
MAADGYLPDWLEDTLSEGIRQWWKLKPGPPPPKPAERHKDDSRGLVLPGYKYLGPFNGLDKGEPVNEADAAALEHDKAYDRQLDSGDNPYLKYNHADAEFQERLKEDTSFGGNLGRAVFQAKKRVLEPLGLVEEPVKTAPGKKRPVEHSPAEPDSSSGTGKSGNQPARKRLNFGQTGDSDSVPDPQPLGQPPAAPSGLGTNTMATGSGAPMADNNEGADGVGNSSGNWHCDSTWMGDRVITTSTRTWALPTYNNHLYKQISSQSGASNDNHYFGYSTPWGYFDFNRFHCHFSPRDWQRLINNNWGFRPKRLNFKLFNIQVKEVTQNDGTTTIANNLTSTVQVFTDSEYQLPYVLGSAHQGCLPPFPADVFMVPQYGYLTLNNGSQAVGRSSFYCLEYFPSQMLRTGNSFTFSYTFEDVPFHSSYAHSQSLDRLMNPLIDQYLYYLSRTNTPSGTTTQSRLQFSQAGASDIRDQSRNWLPGPCYRQQRVSKTSADNNNSEYSWTGATKYHLNGRDSLVNPGPAMASHKDDEEKFFPQSGVLIFGKQGSEKTNVDIEKVMITDEEEIRTTNPVATEQYGSVSTNLQSGNTQAATADVNTQGVLPGMVWQDRDVYLQGPIWAKIPHTDGHFHPSPLMGGFGLKHPPPQILIKNTPVPANPSTTFSAAKFASFITQYSTGQVSVEIEWELQKENSKRWNPEIQYTSNYNKSVNVDFTVDTNGVYSEPRPIGTRYLTRNL

SEQ ID NO: 4893 - DNA, 2211 bp, Adeno-associated virus; identical to SEQ ID NO: 4804
  source 1..2211: mol_type = genomic DNA

SEQ ID NO: 4894 - protein, 736 aa, Adeno-associated virus
MAADGYLPDWLEDTLSEGIRQWWKLKPGPPPPKPAERHKDDSRGLVLPGYKYLGPGNGLDKGEPVNAADAAALEHDKAYDQQLKAGDNPYLKYNHADAEFQERLKEDTSFGGNLGRAVFQAKKRLLEPLGLVEEAAKTAPGKKRPVEQSPQEPDSSAGIGKSGSQPAKKKLNFGQTGDTESVPDPQPIGEPPAAPSGVGSLTMASGGGAPVADNNEGADGVGSSSGNWHCDSQWLGDRVITTSTRTWALPTYNNHLYKQISNSTSGGSSNDNAYFGYSTPWGYFDFNRFHCHFSPRDWQRLINNNWGFRPKRLNFKLFNIQVKEVTDNNGVKTIANNLTSTVQVFTDSDYQLPYVLGSAHEGCLPPFPADVFMIPQYGYLTLNDGGQAVGRSSFYCLEYFPSQMLRTGNNFQFSYEFENVPFHSSYAHSQSLDRLMNPLIDQYLYYLSKTINGSGQNQQTLKFSVAGPSNMAVQGRNYIPGPSYRQQRVSTTVTQNNNSEFAWPGASSWALNGRNSLMNPGPAMASHKEGEDRFFPLSGSLIFGKQGTGRDNVDADKVMITNEEEIKTTNPVATESYGQVATNHQSAQAQAQTGWVQNQGILPGMVWQDRDVYLQGPIWAKIPHTDGNFHPSPLMGGFGMKHPPPQILIKNTPVPADPPTAFNKDKLNSFITQYSTGQVSVEIEWELQKENSKRWNPEIQYTSNYYKSNNVEFAVSTEGVYSEPRPIGTRYLTRNL

SEQ ID NO: 4895 - DNA, 2211 bp, Adeno-associated virus
  source 1..2211: mol_type = genomic DNA
atggctgccgatggttatcttccagattggctcgaggacactctctctgaaggaataagacagtggtggaagctcaaacctggcccaccaccaccaaagcccgcagagcggcataaggacgacagcaggggtcttgtgcttcctgggtacaagtacctcggacccggcaacggactcgacaagggggagccggtcaacgcagcagacgcggcggccctcgagcacgacaaggcctacgaccagcagctcaaggccggagacaacccgtacctcaagtacaaccacgccgacgccgagttccaggagcggctcaaagaagatacgtcttttgggggcaacctcgggcgagcagtcttccaggccaaaaagaggcttcttgaacctcttggtctggttgaggaagcggctaagacggctcctggaaagaagaggcctgtagagcagtctcctcaggaaccggactcctccgcgggtattggcaaatcgggttcacagcccgctaaaaagaaactcaatttcggtcagactggcgacacagagtcagtccccgaccctcaaccaatcggagaacctcccgcagccccctcaggtgtgggatctcttacaatggcttcaggtggtggcgcaccagtggcagacaataacgaaggtgccgatggagtgggtagttcctcgggaaattggcattgcgattcccaatggctgggggacagagtcatcaccaccagcacccgaacctgggccctgcccacctacaacaatcacctctacaagcaaatctccaacagcacatctggaggatcttcaaatgacaacgcctacttcggctacagcaccccctgggggtattttgacttcaacagattccactgccacttctcaccacgtgactggcagcgactcatcaacaacaactggggattccggcctaagcgactcaacttcaagctcttcaacattcaggtcaaagaggttacggacaacaatggagtcaagaccatcgccaataaccttaccagcacggtccaggtcttcacggactcagactatcagctcccgtacgtgctcgggtcggctcacgagggctgcctcccgccgttcccagcggacgttttcatgattcctcagtacgggtatctgacgcttaatgatgggagccaggccgtgggtcgttcgtccttttactgcctggaatatttcccgtcgcaaatgctaagaacgggtaacaacttccagttcagctacgagtttgagaacgtacctttccatagcagctacgctcacagccaaagcctggaccgactaatgaatccactcatcgaccaatacttgtactatctctcaaagactattaacggttctggacagaatcaacaaacgctaaaattcagcgtggccggacccagcaacatggctgtccagggaagaaactacatacctggacccagctaccgacaacaacgtgtctcaaccactgtgactcaaaacaacaacagcgaatttgcttggcctggagcttcttcttgggctctcaatggacgtaatagcttgatgaatcctggacctgctatggccagccacaaagaaggagaggaccgtttctttcctttgtctggatctttaatttttggcaaacaaggaactggaagagacaacgtggatgcggacaaagtcatgataaccaacgaagaagaaattaaaactactaacccggtagcaacggagtcctatggacaagtggccacaaaccaccagagtgcccaagcacaggcgcagaccggctgggttcaaaaccaaggaatacttccgggtatggtttggcaggacagagatgtgtacctgcaaggacccatttgggccaaaattcctcacacggacggcaactttcacccttctccgctaatgggagggtttggaatgaagcacccgcctcctcagatcctcatcaaaaacacacctgtacctgcggatcctccaacggctttcaataaggacaagctgaactctttcatcacccagtattctactggccaagtcagcgtggagattgagtgggagctgcagaaggaaaacagcaagcgctggaacccggagatccagtacacttccaactattacaagtctaataatgttgaatttgctgttaatactgaaggtgtatatagtgaaccccgccccattggcaccagatacctgactcgtaatctgtaa

SEQ ID NO: 4896 - protein, 736 aa, Adeno-associated virus
MAADGYLPDWLEDTLSEGIRQWWKLKPGPPPPKPAERHKDDSRGLVLPGYKYLGPGNGLDKGEPVNAADAAALEHDKAYDQQLKAGDNPYLKYNHADAEFQERLKEDTSFGGNLGRAVFQAKKRLLEPLGLVEEAAKTAPGKKRPVEQSPQEPDSSAGIGKSGSQPAKKKLNFGQTGDTESVPDPQPIGEPPAAPSGVGSLTMASGGGAPVADNNEGADGVGSSSGNWHCDSQWLGDRVITTSTRTWALPTYNNHLYKQISNSTSGGSSNDNAYFGYSTPWGYFDFNRFHCHFSPRDWQRLINNNWGFRPKRLNFKLFNIQVKEVTDNNGVKTIANNLTSTVQVFTDSDYQLPYVLGSAHEGCLPPFPADVFMIPQYGYLTLNDGSQAVGRSSFYCLEYFPSQMLRTGNNFQFSYEFENVPFHSSYAHSQSLDRLMNPLIDQYLYYLSKTINGSGQNQQTLKFSVAGPSNMAVQGRNYIPGPSYRQQRVSTTVTQNNNSEFAWPGASSWALNGRNSLMNPGPAMASHKEGEDRFFPLSGSLIFGKQGTGRDNVDADKVMITNEEEIKTTNPVATESYGQVATNHQSAQAQAQTGWVQNQGILPGMVWQDRDVYLQGPIWAKIPHTDGNFHPSPLMGGFGMKHPPPQILIKNTPVPADPPTAFNKDKLNSFITQYSTGQVSVEIEWELQKENSKRWNPEIQYTSNYYKSNNVEFAVNTEGVYSEPRPIGTRYLTRNL

SEQ ID NO: 4897 - DNA, 2208 bp, Adeno-associated virus
  source 1..2208: mol_type = genomic DNA
atggctgccgatggttatcttccagattggctcgaggacactctctctgaaggaataagacagcggtggaagctcaaacctggcccaccaccaccagagcccgcagagcggcataaggacgacagcaggggtcttgtgcttcctgggtacaagtacctcggacccttcaacggactcgacaagggagagccggtcaacgaggcagacgccgcggccctcgagcacgacaaagcctacgaccggcagctcgacagcggagacaacccgtacctcaagtacaaccacgccgacgcggagtttcaggagcgccttaaagaagatacgtcttttgggggcaacctcggacgagcagtcttccaggcgaaaaagagggtacttgaacctctgggcctggttgaggaacctgttaagacggctccgggaaaaaagaggccggtagagcactctcctgtggagccagactcctcctcgggaaccggaaaggcgggccagcagcctgcaagaaaaagattgaattttggtcagactggagacgcagactcagtacctgacccccagcctctcggacagccaccagcagccccctctggtctgggaactaatacgatggctacaggcagtggcgcaccaatggcagacaataacgagggcgccgacggagtgggtaattcctcgggaaattggcattgcgattccacatggatgggcgacagagtcatcaccaccagcacccgaacctgggccctgcccacctacaacaaccacctctacaaacaaatttccagccaatcaggagcctcgaacgacaatcactactttggctacagcaccccttgggggtattttgacttcaacagattccactgccacttttcaccacgtgactggcaaagactcatcaacaacaactggggattccgacccaagagactcaacttcaagctctttaacattcaagtcaaagaggtcacgcagaatgacggtacgacgacgattgccaataaccttaccggcacggttcaggtgtttactgactcggagtaccagctcccgtacgtcctcggctcggcgcatcaaggatgcctcccgccgttcccagcagacgtcttcatggtgccacagtatggatacctcaccctgaacaacgggagtcaggcagtaggacgctcttcattttactgcctggagtactttccttctcagatgctgcgtaccggaaacaactttaccttcagctacacttttgaggacgttcctttccacagcagctacgctcacagccagagtctgggccgtctcatgaatcctctcatcgaccagtacctgtattacttgagcagaacaaacactccaagtggaaccaccacgcagtcaaggcttcagttttctcaggccggagcgagtgacattcgggaccagtctaggaactggcttcctggaccctgttaccgccagcagcgagtatcaaagacatctgcggataacaacaacagtgaatactcgtggactggagctaccaagtaccacctcaatggcagagactctctggtgaatccgggcccggccatggcaagccacaaggacgatgaagaaaagttttttcctcagagcggggttctcatctttgggaagcaaggctcagagaaaacaaatgtggacattgaaaaggtcatgattacagacgaagaggaaatcaggacaaccaatcccgtggctacggagcagtatggttctgtatctaccaacctccagagaggcaacagacaagcagctaccgcagatgtcaacacacaaggcgttcttccaggcatggtctggcaggacagagatgtgtaccttcaggggcccatctgggcaaagattccacacacggacggacattttcacccctctcccctcatgggtggattcggacttaaacaccctcctccacagattctcatcaagaacaccccggtacctgcgaatccttcgaccaccttcagtgcggcaaagtttgcttccttcatcacacagtactccacgggacaggtcagcgtggagatcgagtgggagctgcagaaggaaaacagcaaacgctggaatcccgaaattcagtacacttccaactacaacaagtctgttaatgtggactttactgtggacactaatggcgtgtattcagagcctcgccccattggcaccagatacctgactcgtaatctgtaa

SEQ ID NO: 4898 - protein, 735 aa, Adeno-associated virus
MAADGYLPDWLEDTLSEGIRQRWKLKPGPPPPEPAERHKDDSRGLVLPGYKYLGPFNGLDKGEPVNEADAAALEHDKAYDRQLDSGDNPYLKYNHADAEFQERLKEDTSFGGNLGRAVFQAKKRVLEPLGLVEEPVKTAPGKKRPVEHSPVEPDSSSGTGKAGQQPARKRLNFGQTGDADSVPDPQPLGQPPAAPSGLGTNTMATGSGAPMADNNEGADGVGNSSGNWHCDSTWMGDRVITTSTRTWALPTYNNHLYKQISSQSGASNDNHYFGYSTPWGYFDFNRFHCHFSPRDWQRLINNNWGFRPKRLNFKLFNIQVKEVTQNDGTTTIANNLTGTVQVFTDSEYQLPYVLGSAHQGCLPPFPADVFMVPQYGYLTLNNGSQAVGRSSFYCLEYFPSQMLRTGNNFTFSYTFEDVPFHSSYAHSQSLGRLMNPLIDQYLYYLSRTNTPSGTTTQSRLQFSQAGASDIRDQSRNWLPGPCYRQQRVSKTSADNNNSEYSWTGATKYHLNGRDSLVNPGPAMASHKDDEEKFFPQSGVLIFGKQGSEKTNVDIEKVMITDEEEIRTTNPVATEQYGSVSTNLQRGNRQAATADVNTQGVLPGMVWQDRDVYLQGPIWAKIPHTDGHFHPSPLMGGFGLKHPPPQILIKNTPVPANPSTTFSAAKFASFITQYSTGQVSVEIEWELQKENSKRWNPEIQYTSNYNKSVNVDFTVDTNGVYSEPRPIGTRYLTRNL

SEQ ID NO: 4899 - DNA, 2208 bp, Adeno-associated virus
  source 1..2208: mol_type = genomic DNA
atggctgccgatggttatcttccagattggctcgaggacactctctctgaaggaataagacagcggtggaagctcaaacctggcccaccaccaccagagcccgcagagcggcataaggacgacagcaggggtcttgtgcttcctgggtacaagtacctcggacccttcaacggactcgacaagggagagccggtcaacgaggcagacgccgcggccctcgagcacgacaaagcctacgaccggcagctcgacagcggagacaacccgtacctcaagtacaaccacgccgacgcggagtttcaggagcgccttaaagaagatacgtcctttgggggcaacctcggacgagcagtcttccaggcgaaaaagagggtacttgaacctctgggcctggttgaggaacctgttaagacggctccgggaaaaaagaggccggtagagcactctcctgtggagccagactcctcctcgggaaccggaaaggcgggccagcagcctgcaagaaaaagattgaattttggtcagactggagacgcagactcagtacctgacccccagcctctcggacagccaccagcagccccctctggtctgggaactaatacgatggctacaggcagtggcgcaccaatggcagacaataacgagggcgccgacggagtgggtaattcctcgggaaattggcattgcgattccacatggatgggcgacagagtcatcaccaccagcacccgaacctgggccctgcccacctacaacaaccacctctacaaacaaatttccagccaatcaggagcctcgaacgacaatcactactttggctacagcaccccttgggggtattttgacttcaacagattccactgccacttttcaccacgtgactggcaaagactcatcaacaacaactggggattccgacccaagagactcaacttcaagctctttaacattcaagtcaaagaggtcacgcagaatgacggtacgacgacgattgccaataaccttaccagcacggttcaggtgtttactgactcggagtaccagctcccgtacgtcctcggctcggcgcatcaaggatgcctcccgccgttcccagcagacgtcttcatggtgccacagtatggatacctcaccctgaacaacgagagtcaggcagtaggacgctcttcattttactgcctggagtactttccttctcagatgctgcgtaccggaaacaactttaccttcagctacacttttgaggacgttcctttccacagcagctacgctcacagccagagtctgggccgtctcatgaatcctctcatcgaccagtacctgtattacttgagcagaacaaacactccaagtggaaccaccacgcagtcaaggcttcagttttctcaggccggagcgagtgacattcgggaccagtctaggaactggcttcctggaccctgttaccgccagcagcgagtatcaaagacatctgcggataacaacaacagtgaatactcgtggactggagctaccaagtaccacctcaatggcagagactctctggtgaatccgggcccggccatggcaagccacaaggacgatgaagaaaagttttttcctcagagcggggttctcatctttgggaagcaaggctcagagaaaacaaatgtggacattgaaaaggtcatgattacagacgaagaggaaatcaggacaaccaatcccgtggctacggagcagtatggttctgtatctaccaacctccagagaggcaacagacaagcagctaccgcagatgtcaacacacaaggcgttcttccaggcatggtctggcaggacagagatgtgtaccttcaggggcccatctgggcaaagattccacacacggacggacattttcacccctctcccctcatgggtggattcggacttaaacaccctcctccacagattctcatcaagaacaccccggtacctgcgaatccttcgaccaccttcagtgcggcaaagtttgcttccttcatcacacagtactccacgggacaggtcagcgtggagatcgagtgggagctgcagaaggaaaacagcaaacgctggaatcccgaaattcagtacacttccaactacaacaagtctgttaatgtggactttactgtggacactaatggcgtgtattcagagcctcgccccattggcaccagatacctgactcgtaatctgtaa

SEQ ID NO: 4900 - protein, 735 aa, Adeno-associated virus
MAADGYLPDWLEDTLSEGIRQRWKLKPGPPPPEPAERHKDDSRGLVLPGYKYLGPFNGLDKGEPVNEADAAALEHDKAYDRQLDSGDNPYLKYNHADAEFQERLKEDTSFGGNLGRAVFQAKKRVLEPLGLVEEPVKTAPGKKRPVEHSPVEPDSSSGTGKAGQQPARKRLNFGQTGDADSVPDPQPLGQPPAAPSGLGTNTMATGSGAPMADNNEGADGVGNSSGNWHCDSTWMGDRVITTSTRTWALPTYNNHLYKQISSQSGASNDNHYFGYSTPWGYFDFNRFHCHFSPRDWQRLINNNWGFRPKRLNFKLFNIQVKEVTQNDGTTTIANNLTSTVQVFTDSEYQLPYVLGSAHQGCLPPFPADVFMVPQYGYLTLNNESQAVGRSSFYCLEYFPSQMLRTGNNFTFSYTFEDVPFHSSYAHSQSLGRLMNPLIDQYLYYLSRTNTPSGTTTQSRLQFSQAGASDIRDQSRNWLPGPCYRQQRVSKTSADNNNSEYSWTGATKYHLNGRDSLVNPGPAMASHKDDEEKFFPQSGVLIFGKQGSEKTNVDIEKVMITDEEEIRTTNPVATEQYGSVSTNLQRGNRQAATADVNTQGVLPGMVWQDRDVYLQGPIWAKIPHTDGHFHPSPLMGGFGLKHPPPQILIKNTPVPANPSTTFSAAKFASFITQYSTGQVSVEIEWELQKENSKRWNPEIQYTSNYNKSVNVDFTVDTNGVYSEPRPIGTRYLTRNL

SEQ ID NO: 4901 - DNA, 2208 bp, Adeno-associated virus
  source 1..2208: mol_type = genomic DNA
atggctgccgatggttatcttccagattggctcgaggacactctctctgaaggaataagacagcggtggaagctcaaacctggcccaccaccaccagagcccgcagagcggcataaggacgacagcaggggtcttgtgcttcctgggtacaagtacctcggacccttcaacggactcgacaagggagagccggtcaacgaggcagacgccgcggccctcgagcacgacaaagcctacgaccggcagctcgacagcggagacaacccgtacctcaagtacaaccacgccgacgcggagtttcaggagcgccttaaagaagatacgtcttttgggggcaacctcggacgagcagtcttccaggcgaaaaagagggtacttgaacctctgggcctggttgaggaacctgttaagacggctccgggaaaaaagaggccggtagagcactctcctgtggagccagactcctcctcgggaaccggaaaggcgggccagcagcctgcaagaaaaagattgaattttggtcagactggagacgcagactcagtacctgacccccagcctctcggacagccaccagcagccccctctggtctgggaactaatacgatggctacaggcagtggcgcaccaatggcagacaataacgagggcgccgacggagtgggtaattcctcgggaaattggcattgcgattccacatggatgggcgacagagtcatcaccaccagcacccgaacctgggccctgcccacctacaacaaccacctctacaaacaaatttccagccaatcaggagcctcgaacgacaatcactactttggctacagcaccccttgggggtattttgacttcaacagattccactgccacttttcaccacgtgactggcaaagactcatcaacaacaactggggattccgacccaagagactcaacttcaagctctttaacattcaagtcaaagaggtcacgcagaatgacggtacgacgacgattgccaataaccttaccagcacggttcaggtgtttactgactcggagtaccagctcccgtacgtcctcggctcggcgcatcaaggatgcctcccgccgttcccagcagacgtcttcatggtaccacagtatggatacctcaccctgaacaacgggagtcaggcagtaggacgctcttcattttactgcctggagtactttccttctcagatgctgcgtaccggaaacaactttaccttcagctacacttttgaggacgttcctttccacagcagctacgctcacagccagagtctgggccgtctcatgaatcctctcatcgaccagtacctgtattacttgagcagaacaaacactccaagtggaaccaccacgcagtcaaggcttcagttttctcaggccggagcgagtgacattcgggaccagtctaggaactggcttcctggaccctgttaccgccagcagcgagtatcaaagacatctgcggataacaacaacagtgaatactcgtggactggagctaccaagtaccacctcaatggcagagactctctggtgaatccgggcccggccatggcaagccacaaggacgatgaagaaaagttttttcctcagagcggggttctcatctttgggaagcaaggctcagagaaaacaaatgtggacattgaaaaggtcatgattacagacgaagaggaaatcaggacaaccaatcccgtggctacggagcagtatggttctgtatctaccaacctccagagaggcaacagacaagcagctaccgcagatgtcaacacacaaggcgttcttccaggcatggtctggcaggacagagatgtgtaccttcaggggcccatctgggcaaagattccacacacggacggacattttcacccctctcccctcatgggtggattcggacttaaacaccctcctccacagattctcatcaagaacaccccggtacctgcgaatccttcgaccaccttcagtgcggcaaagtttgcttccttcatcacacagtactccacgggacaggtcagcgtggagatcgagtgggagctgcagaaggaaaacagcaaacgctggaatcccgaaattcagtacacttccaactacaacaagtctgttaatgtggactttactgtggacactaatggcgtgtattcagagcctcgccccattggcaccagatacctgactcgtaatctgtaa

SEQ ID NO: 4902 - protein, 735 aa, Adeno-associated virus
MAADGYLPDWLEDTLSEGIRQRWKLKPGPPPPEPAERHKDDSRGLVLPGYKYLGPFNGLDKGEPVNEADAAALEHDKAYDRQLDSGDNPYLKYNHADAEFQERLKEDTSFGGNLGRAVFQAKKRVLEPLGLVEEPVKTAPGKKRPVEHSPVEPDSSSGTGKAGQQPARKRLNFGQTGDADSVPDPQPLGQPPAAPSGLGTNTMATGSGAPMADNNEGADGVGNSSGNWHCDSTWMGDRVITTSTRTWALPTYNNHLYKQISSQSGASNDNHYFGYSTPWGYFDFNRFHCHFSPRDWQRLINNNWGFRPKRLNFKLFNIQVKEVTQNDGTTTIANNLTSTVQVFTDSEYQLPYVLGSAHQGCLPPFPADVFMVPQYGYLTLNNGSQAVGRSSFYCLEYFPSQMLRTGNNFTFSYTFEDVPFHSSYAHSQSLGRLMNPLIDQYLYYLSRTNTPSGTTTQSRLQFSQAGASDIRDQSRNWLPGPCYRQQRVSKTSADNNNSEYSWTGATKYHLNGRDSLVNPGPAMASHKDDEEKFFPQSGVLIFGKQGSEKTNVDIEKVMITDEEEIRTTNPVATEQYGSVSTNLQRGNRQAATADVNTQGVLPGMVWQDRDVYLQGPIWAKIPHTDGHFHPSPLMGGFGLKHPPPQILIKNTPVPANPSTTFSAAKFASFITQYSTGQVSVEIEWELQKENSKRWNPEIQYTSNYNKSVNVDFTVDTNGVYSEPRPIGTRYLTRNL

SEQ ID NO: 4903 - DNA, 2208 bp, Adeno-associated virus
  source 1..2208: mol_type = genomic DNA
atggctgccgatggttatcttccagattggctcgaggacactctctctgaaggaataagacagcggtggaagctcaaacctggcccaccaccaccagagcccgcagagcggcataaggacgacagcaggggtcttgtgcttcctgggtacaagtacctcggacccttcaacggactcgacaagggagagccggtcaacgaggcagacgccgcggccctcgagcacgacaaagcctacgaccggcagctcgacagcggagacaacccgtacctcaagtacaaccacgccgacgcggagtttcaggagcgccttaaagaagatacgtcttttgggggcaacctcggacgagcagtcttccaggcgaaaaagagggtactcgaacctctgggcctggttgaggaacctgttaagacggctccgggaaaaaagaggccggtagagcactctcctgtggagccagactcctcctcgggaaccggaaaggcgggccagcagcctgcaagaaaaagattgaattttggtcagactggagacgcagactcagtacctgacccccagcctctcggacagccaccagcagccccctctggtctgggaactaatacgatggctacaggcagtggcgcaccaatggcagacaataacgagggcgccgacggagtgggtaattcctcgggaaattggcattgcgattccacatggatgggcgacagagtcatcaccaccagcacccgaacctgggccctgcccacctacaacaaccacctctacaaacaaatttccagccaatcaggagcctcgaacgacaatcactactttggctacagcaccccttgggggtattttgacttcaacagattccactgccacttttcaccacgtgactggcaaagactcatcaacaacaactggggattccgacccaagagactcaacttcaagctctttaacattcaagtcaaagaggtcacgcagaatgacggtacgacgacgattgccaataaccttaccagcacggttcaggtgtttactgactcggagtaccagctcccgtacgtcctcggctcggcgcatcaaggatgcctcccgccgttcccagcagacgtcttcatggtgccacagtatggatacctcaccctgaacaacgggagtcaggcagcaggacgctcttcattttactgcctggagtactttccttctcagatgctgcgtaccggaaacaactttaccttcagctacacttttgaggacgttcctttccacagcagctacgctcacagccagagtctgggccgtctcatgaatcctctcatcgaccagtacctgtattacttgagcagaacaaacactccaagtggaaccaccacgcagtcaaggcttcagttttctcaggccggagcgagtgacattcgggaccagtctaggaactggcttcctggaccctgttaccgccagcagcgagtatcaaagacatctgcggataacaacaacagtgaatactcgtggactggagctaccaagtaccacctcaatggcagagactctctggtgaatccgggcccggccatggcaagccacaaggacgatgaagaaaagttttttcctcagagcggggttctcatctttgggaagcaaggctcagagaaaacaaatgtggacattgaaaaggtcatgattacagacgaagaggaaatcaggacaaccaatcccgtggctacggagcagtatggttctgtatctaccaacctccagagaggcaacagacaagcagctaccgcagatgtcaacacacaaggcgttcttccaggcatggtctggcaggacagagatgtgtaccttcaggggcccatctgggcaaagattccacacacggacggacattttcacccctctcccctcatgggtggattcggacttaaacaccctcctccacagattctcatcaagaacaccccggtacctgcgaatccttcgaccaccttcagtgcggcaaagtttgcttccttcatcacacagtactccacgggacaggtcagcgtggagatcgagtgggagctgcagaaggaaaacagcaaacgctggaatcccgaaattcagtacacttccaactacaacaagtccgttaatgtggactttactgtggacactaatggcgtgtattcagagcctcgccccattggcaccagatacctgactcgtaatctgtaa

SEQ ID NO: 4904 - protein, 735 aa, Adeno-associated virus
MAADGYLPDWLEDTLSEGIRQRWKLKPGPPPPEPAERHKDDSRGLVLPGYKYLGPFNGLDKGEPVNEADAAALEHDKAYDRQLDSGDNPYLKYNHADAEFQERLKEDTSFGGNLGRAVFQAKKRVLEPLGLVEEPVKTAPGKKRPVEHSPVEPDSSSGTGKAGQQPARKRLNFGQTGDADSVPDPQPLGQPPAAPSGLGTNTMATGSGAPMADNNEGADGVGNSSGNWHCDSTWMGDRVITTSTRTWALPTYNNHLYKQISSQSGASNDNHYFGYSTPWGYFDFNRFHCHFSPRDWQRLINNNWGFRPKRLNFKLFNIQVKEVTQNDGTTTIANNLTSTVQVFTDSEYQLPYVLGSAHQGCLPPFPADVFMVPQYGYLTLNNGSQAAGRSSFYCLEYFPSQMLRTGNNFTFSYTFEDVPFHSSYAHSQSLGRLMNPLIDQYLYYLSRTNTPSGTTTQSRLQFSQAGASDIRDQSRNWLPGPCYRQQRVSKTSADNNNSEYSWTGATKYHLNGRDSLVNPGPAMASHKDDEEKFFPQSGVLIFGKQGSEKTNVDIEKVMITDEEEIRTTNPVATEQYGSVSTNLQRGNRQAATADVNTQGVLPGMVWQDRDVYLQGPIWAKIPHTDGHFHPSPLMGGFGLKHPPPQILIKNTPVPANPSTTFSAAKFASFITQYSTGQVSVEIEWELQKENSKRWNPEIQYTSNYNKSVNVDFTVDTNGVYSEPRPIGTRYLTRNL

SEQ ID NO: 4905 - protein, 738 aa, Adeno-associated virus; identical to SEQ ID NO: 4797

SEQ ID NO: 4906 - DNA, 2217 bp, Adeno-associated virus
  source 1..2217: mol_type = genomic DNA
atggctgctgacggttatcttccagattggctcgaggacaacctctctgagggcattcgcgagtggtgggacctgaaacctggagcccccaagcccaaggccaaccagcagaagcaggacgacggccggggtctggtgcttcctggctacaagtacctcggacccttcaacggactcgacaagggggagcccgtcaacgcggcggacgcagcggccctcgagcacgacaaggcctacgaccagcagctcaaagcgggtgacaatccgtacctgcggtataaccacgccgacgccgagtttcaggagcgtctgcaagaagatacgtcttttgggggcaacctcgggcgagcagtcttccaggccaagaagcgggttctcgaacctctcggtctggttgaggaagctgctaagacggctcctggaaagaagagaccggtagaaccgtcacctcagcgttcccccgactcctccacgggcatcggcaagaaaggccagcagcccgctaaaaagagactgaactttggtcagactggcgactcagagtcagtccccgaccctcaaccaatcggagaaccaccagcaggcccctctggtctgggatctggtacaatggctgcaggcggtggcgctccaatggcagacaataacgaaggcgccgacggagtgggtagttcctcaggaaattggcattgcgattccacatggctgggcgacagagtcatcaccaccagcacccgaacctgggccctgcccacctacaacaaccacctctacaagcaaatatccaatgggacatcgggaggaagcaccaacgacaacacctacttcggctacagcaccccctgggggtattttgacttcaacagattccactgccacttctcaccacgtgactggcagcgactcatcaacaacaactggggattccggccaaaaagactcagcttcaagctcttcaacatccaggtcaaggaggtcacgcagaatgaaggcaccaagaccatcgccaataaccttaccagcacgattcaggtatttacggactcggaataccagctgccgtacgtcctcggctccgcgcaccagggctgcctgcctccgttcccggcggacgtcttcatgattccccagtacggctaccttacactgaacaatggaagtcaagccgtaggccgttcctccttctactgcctggaatattttccatctcaaatgctgcgaactggaaacaattttgaattcagctacaccttcgaggacgtgcctttccacagcagctacgcacacagccagagcttggaccgactgatgaatcctctcatcgaccagtacctgtactacttatccagaactcagtccacaggaggaactcaaggtacccagcaattgttattttctcaagctgggcctgcaaacatgtcggctcaggctaagaactggctacctggaccttgctaccggcagcagcgagtctctacgacactgtcgcaaaacaacaacagcaactttgcttggactggtgccaccaaatatcacctgaacggaagagactctttggtaaatcccggtgtcgccatggcaacccacaaggacgacgaggaacgcttcttcccgtcgagtggagtcctgatgttcggaaaacagggtgctggaagagacaatgtggactacagcagcgttatgctaaccagcgaagaagaaattaaaaccactaaccccgtagccacagaacaatacggtgtggtggctgacaacttgcagcaaaccaatacagggcctattgtgggaaatgtcaacagccaaggagccttacctggcatggtctggcagaaccgagacgtgtacctgcagggtcccatctgggccaagattcctcacacggacggcaacttccacccttcaccgctaatgggaggatttggactgaagcacccacctcctcagatcctgatcaagaacacgccggtacctgcggatcctccaacaacgttcagccaggcgaaattggcttccttcattacgcagtacagcaccggacaggtcagcgtggaaatcgagtgggagctgcagaaggagaacagcaaacgctggaacccagagattcagtacacttcaaactactacaaatctacaaatgtggactttgctgtcaatacagagggaacttattctgagcctcgccccattggtactcgttacctcacccgtaatctgtaa

SEQ ID NO: 4907 - protein, 738 aa, Adeno-associated virus
MAADGYLPDWLEDNLSEGIREWWDLKPGAPKPKANQQKQDDGRGLVLPGYKYLGPFNGLDKGEPVNAADAAALEHDKAYDQQLKAGDNPYLRYNHADAEFQERLQEDTSFGGNLGRAVFQAKKRVLEPLGLVEEAAKTAPGKKRPVEPSPQRSPDSSTGIGKKGQQPAKKRLNFGQTGDSESVPDPQPIGEPPAGPSGLGSGTMAAGGGAPMADNNEGADGVGSSSGNWHCDSTWLGDRVITTSTRTWALPTYNNHLYKQISNGTSGGSTNDNTYFGYSTPWGYFDFNRFHCHFSPRDWQRLINNNWGFRPKRLSFKLFNIQVKEVTQNEGTKTIANNLTSTIQVFTDSEYQLPYVLGSAHQGCLPPFPADVFMIPQYGYLTLNNGSQAVGRSSFYCLEYFPSQMLRTGNNFEFSYTFEDVPFHSSYAHSQSLDRLMNPLIDQYLYYLSRTQSTGGTQGTQQLLFSQAGPANMSAQAKNWLPGPCYRQQRVSTTLSQNNNSNFAWTGATKYHLNGRDSLVNPGVAMATHKDDEERFFPSSGVLMFGKQGAGRDNVDYSSVMLTSEEEIKTTNPVATEQYGVVADNLQQTNTGPIVGNVNSQGALPGMVWQNRDVYLQGPIWAKIPHTDGNCHPSPLMGGFGLKHPPPQILIKNTPVPADPPTTFSQAKLASFITQYSTGQVSVEIEWELQKENSKRWNPEIQYTSNYYKSTNVDFAVNTEGTYSEPRPIGTRYLTRNL

SEQ ID NO: 4908 - protein, 738 aa, Adeno-associated virus
MAADGYLPDWLEDNLSEGIREWWDLKPGAPKPKANQQKQDDGRGLVLPGYKYLGPFNGLDKGEPVNAADAAALEHDKAYDQQLKAGDNPYLRYNHADAEFQERLQEDTSFGGNLGRAVFQAKKRVLEPLGLVEEGAKTAPGKKRPVEPSPQRSPDSSTGIGKKGQQPARKRLNFGRTGDSESVPDPQPIGEPPAAPSSVGSGTMAAGGGAPMADNNEGADGVGSSSGNWHCDSTWLGDRVITTSTRTWALPTYNNHLYKQISNGTSGGSTNDNTYFGYSTPWGYLDFNRFHCHFSPRDWQRLINNNWGFRPKRLSFKLFNIQVKEVTQNEGTKTIANNLASTIQVFTDSEYQPPYVLGSAHQGCLPPFPADVFMIPQYGYLTLNNGSQAVGRSSFYCLEYFPSQMLRTGNNFSFSYTFEDVPFHSSYAHSQSLDRLMNPLIDQYLYYLSRTQSTGGTAGTQQLLFSRAGPSNMSAQARNWLPGPCYRQQRVSTTLSQNNNSNFAWTGATKYHLNGRDSLVNPGVAMATNKDDEDRFFPSSGILMFGKQGAGKDNVDYSNVMLTSEEEIKTTNPVATEQYGVVADNLQQQNTAPTVGAVNSQGALPGMVWQNRDVYLQGPIWAKIPHTDGNFHPSPLMGGFGLKHPPPQILIKNTPVPADPPTAFNQAKLNSFIAQYSTGQVSVEIEWELQKENSKRWNPEIQYTSNYYKSTNADFAVNTEGVYSEPRPIGTRYLTRNL

SEQ ID NO: 4909 - DNA, 2217 bp, Adeno-associated virus
  source 1..2217: mol_type = genomic DNA
atggctgccgatggttatcttccagattggctcgaggacaacctctctgagggcattcgcgagtggtgggacctgaaacctggagccccgaaacccaaagccaaccagcaaaagcaggacgacggccggggtctggtgcttcctggctacaagtacctcggacccttcaacggactcgacaagggggagcccgtcaacgcggcggacgcagcggccctcgagcacgacaaggcctacgaccagcagctcaaagcgggtgacaatccgtacctgcggtataatcacgccgacgccgagtttcaggagcgtctgcaagaagatacgtcttttgggggcaacctcgggcgagcagtcttccaggccaagaagcgggttctcgaacctctcggtctggttgaggaaggcgctaagacggctcctggaaagaagagaccggtagagccgtcaccacagcgttcccccgactcctccacgggcatcggcaagaaaggccagcagcccgccagaaagagactcaatttcggtcggactggcgactcagagtcagtccccgaccctcaacctatcggagaacctccagcagcgccctctagtgtgggatctggtacaatggctgcaggcggtggcgcaccaatggcagacaataacgaaggtgccgacggagtgggtagttcctcgggaaattggcattgcgattccacatggctgggcgacagagttatcaccaccagcacccgaacctgggccctgcccacctacaacaaccacctctacaagcaaatctccaacgggacctcgggaggcagcaccaacgacaacacctactttggctacagcaccccctgggggtatcttgactttaacagattccactgccacttctcaccacgtgactggcagcgactcatcaacaacaactggggattccggcccaagagactcagcttcaagctcttcaacatccaggtcaaagaggtcacgcagaatgaaggcaccaagaccatcgccaataacctcgccagcaccatccaggtgtttacggactcggaataccagccgccgtacgtcctcggctctgcccaccagggctgcctgcctccgttcccggcggacgtcttcatgattcctcagtacggctacctgactctcaacaacggtagtcaggccgtgggacgttcctccttctactgcctggagtacttcccctctcagatgctgagaacgggcaacaacttttccttcagctacactttcgaggacgtgcctttccacagcagctacgcgcacagccagagtttggacaggctgatgaatcctctcatcgaccagtacctgtactacctgtcaagaacccagtctacgggaggcacagcgggaacccagcagttgctgttttctcgggccgggcctagcaacatgtcggctcaggccagaaactggctgcctggaccctgctacagacagcagcgcgtctccacgacactgtcgcaaaacaacaacagcaactttgcctggactggtgccaccaagtatcatctgaacggcagagactctctggtgaatccgggcgtcgccatggcaaccaacaaggacgacgaggaccgcttcttcccatccagcggcatcctcatgtttggcaagcagggagctggaaaagacaacgtggactatagcaacgtgatgctaaccagcgaggaagaaatcaagaccaccaaccccgtggccacagaacagtatggcgtggtggctgataacctacagcagcaaaacaccgctcctactgtgggggccgtcaacagccagggagccttacctggcatggtctggcagaaccgggacgtgtacctgcagggtcctatttgggccaagattcctcacacagatggcaactttcacccgtctcctttaatgggcggctttggacttaaacatccgcctcctcagatcctcatcaaaaacactcctgttcctgcggatcctccaacagcgttcaaccaggccaagctgaattctttcatcgcgcagtacagcaccggacaagtcagcgtggagatcgagtgggagctgcagaaggagaacagcaagcgctggaacccagagattcagtatacttccaactactacaaatctacaaatgcggactttgctgttaatactgagggtgtttactctgagcctcgccccattggcactcgttacctcacccgtaatctgtaa

SEQ ID NO: 4910 - DNA, 2208 bp, Adeno-associated virus
  source 1..2208: mol_type = genomic DNA
atggctgccgatggttatcttccagattggctcgaggacactctctctgaaggaataagacagtggtggaagctcaaacctggcccaccaccaccaaagcccgcagagcggcataaggacgacagcaggggtcttgtgcttcctgggtacaagtacctcggacccttcaacggactcgacaagggggagccggtcaacgaggcagacgccgcggccctcgagcacgacaaggcctacgaccggcagctcgacagcggagacaacccgtacctcaagtacaaccacgccgacgcagagtttcaggagcgccttaaagaagatacgtcttttgggggcaacctcggacgagcagtcttccaggcgaaaaagagggttcttgaacctctgggcctggttgaggagcctgttaagacggctccgggaaaaaagaggccggtagagcactctcctgtggagccagactcctcctcgggaaccggaaaagcgggccagcagcctgcaagaaaaagattaaattttggtcagactggagacgcagactccgtacctgacccccagcctctcggacagccaccagcagccccctctggtctgggatctactacaatggctacaggcagtggcgcaccaatggcagacaataacgagggtgccgatggagtgggtaattcctcaggaaattggcattgcgattcccaatggctgggcgacagagtcatcaccaccagcacccgaacctgggccctgcccacatacaacaaccacctctacaagcaaatctccagccaatcaggagccagcaacgacaaccactactttggctacagcaccccctgggggtattttgacttcaacagattccactgccacttttcaccacgtgactggcaaagactcgtcaacaacaaccggggattccggcccaaaagactcaacttcaagctctttaatattcaagtcaaagaggtcacgcagaatgacggtacgacgacgattgccaataaccttaccagcacggttcaggtgtttactgactcggagtaccagctcccgtacgtcctgggctcggcgcatcaaggatgcctcccgccgtttccagcggacgtcttcatggtcccacagtatggatacctcaccctgaacaacgggagtcaggcggtaggacgctcttccttttactgcctggagtactttccttctcagatgctgcgtactggaaacaactttcagttcagctacacttttgaagacgtgcctttccacagcagctacgctcacagccagagtctggatcggctgatgaatcctctgatcgaccagtacctgtattatctgaacaagacacaaacaaatagtggaactcttcagcagtctcggctactgtttagccaagctggaccaaccaacatgtctcttcaagctaaaaactggctgcctggaccttgctacagacagcagcgtctgtcaaaacaggcaaacgacaacaacaacagcaactttccctggactgcagctacaaagtatcatctaaatggccgggactcgttggttaatccaggaccagctatggccagtcacaaggatgacgaagaaaagtttttccccatgcatggaaccctgatatttggtaaacaaggaacaaatgccaacgacgcggatttggaaaatgtcatgattacagatgaagaagaaatcagggccaccaatcccgtggctacggagcagtacgggactgtgtcaaataatttgcaaaactcaaacactggtccaactactggaactgtcaatcaccaaggagcgttacctggtatggtgtggcaggatcgagacgtgtacctgcagggacccatttgggccaagattcctcacaccgatggacactttcatccttctccactgatgggaggttttggactcaaacacccgcctcctcagatcatgatcaaaaacactcccgttccagccaatcctcccacaaacttcagttctgccaagtttgcttctttcatcacacagtattccacgggacaggtcagcgtggagatcgagtgggagctgcagaaggagaacagcaaacgctggaatcccgaaattcagtacacttccaactacaacaagtctgttaatgtggactttactgtggacactaatggtgtgtattcagagcctcgccccattggcaccagatacctgactcgtaatctgtaa

SEQ ID NO: 4911 - protein, 735 aa, Adeno-associated virus
MAADGYLPDWLEDTLSEGIRQWWKLKPGPPPPKPAERHKDDSRGLVLPGYKYLGPFNGLDKGEPVNEADAAALEHDKAYDRQLDSGDNPYLKYNHADAEFQERLKEDTSFGGNLGRAVFQAKKRVLEPLGLVEEPVKTAPGKKRPVEHSPVEPDSSSGTGKAGQQPARKRLNFGQTGDADSVPDPQPLGQPPAAPSGLGSTTMATGSGAPMADNNEGADGVGNSSGNWHCDSQWLGDRVITTSTRTWALPTYNNHLYKQISSQSGASNDNHYFGYSTPWGYFDFNRFHCHFSPRDWQRLVNNNRGFRPKRLNFKLFNIQVKEVTQNDGTTTIANNLTSTVQVFTDSEYQLPYVLGSAHQGCLPPFPADVFMVPQYGYLTLNNGSQAVGRSSFYCLEYFPSQMLRTGNNFQFSYTFEDVPFHSSYAHSQSLDRLMNPLIDQYLYYLNKTQTNSGTLQQSRLLFSQAGPTNMSLQAKNWLPGPCYRQQRLSKQANDNNNSNFPWTAATKYHLNGRDSLVNPGPAMASHKDDEEKFFPMHGTLIFGKQGTNANDADLENVMITDEEEIRATNPVATEQYGTVSNNLQNSNTGPTTGTVNHQGALPGMVWQDRDVYLQGPIWAKIPHTDGHFHPSPLMGGFGLKHPPPQIMIKNTPVPANPPTNFSSAKFASFITQYSTGQVSVEIEWELQKENSKRWNPEIQYTSNYNKSVNVDFTVDTNGVYSEPRPIGTRYLTRNL

SEQ ID NO: 4912 - protein, 738 aa, Adeno-associated virus
MAADGYLPDWLEDNLSEGIREWWDLKPGAPKPKANQQKQDDGRGLVLPGYKYLGPFNGLDKGEPVNAADAAALEHDKAYDQQLKAGDNPYLRYNHADAEFQERLQEDTSFGGNLGRAVFQAKKRVLEPLGLVEEAAKTAPGKKRPVEPSPQRSPDSSTGIGKKGQQPAKKRLSFGQTGDSESVPDPQPIGEPPAGPSGLGSGTMAAGGGAPMADNNEGADGVGSSSGNWHCDSTWLGDRVITTSTRTWALPTYNNHLYKQISNGTSGGSTNDNTYFGYSTPWGYFDFNRFHCHFSPRDWQRLINNNWGFRPKRLSFKLFNIQVKEVTQNEGTKTIANNLTSTIQVFTDSEYQLPYVLGSAHQGCLPPFPADVFMIPQYGYLTLNNGSQAVGRSSFYCLEYFPSQMLRTGNNSEFSYTFEDVPFHSSYAHSQSLDRLMNPLIDQYLYYLSRTQSTGGTQGTQQLLFSQAGPANMSAQAKNWLPGPCYRQQRVSTTLSQNNNSNFAWTGATKYHLNGRDSLVNPGVAMATHKDDEERFFPSSGVLMFGKQGAGRDNVDYSSVMLTSEEEIKTTNPVATEQYGVVADNLQQTNTGPIVGNVNSQGALPGMVWQNRDVYLQGPIWAKIPHTDGNFHPSPLMGGFGLKHPPPQILIKNTPVPADPPTTFSQAKLASFITQYSTGQVSVEIEWELQKENSKRWNPEIQYTSNYYKSTNVDFAVNTEGTYSEPRPIGTRYLTRNL

SEQ ID NO: 4913 - DNA, 2217 bp, Adeno-associated virus
  source 1..2217: mol_type = genomic DNA
atggctgctgacggttatcttccagattggctcgaggacaacctctctgagggcattcgcgagtggtgggacctgaaacctggagcccccaagcccaaggccaaccagcagaagcaggacgacggccggggtctggtgcttcctggctacaagtacctcggacccttcaacggactcgacaagggggagcccgtcaacgcggcggacgcagcggccctcgagcacgacaaggcctacgaccagcagctcaaagcgggtgacaatccgtacctgcggtataaccacgccgacgccgagtttcaggagcgtctgcaagaagatacgtcttttgggggcaacctcgggcgagcagtcttccaggccaagaagcgggttctcgaacctctcggtctggttgaggaagctgctaagacggctcctggaaagaagagaccggtagaaccgtcacctcagcgttcccccgactcctccacgggcatcggcaagaaaggccagcagcccgctaaaaagagactgagctttggtcagactggcgactcagagtcagtccccgaccctcaaccaatcggagaaccaccagcaggcccctctggtctgggatctggtacaatggctgcaggcggtggcgctccaatggcagacaataacgaaggcgccgacggagtgggtagttcctcaggaaattggcattgcgattccacatggctgggcgacagagtcatcaccaccagcacccgaacctgggccctgcccacctacaacaaccacctctacaagcaaatatccaatgggacatcgggaggaagcaccaacgacaacacctacttcggctacagcaccccctgggggtattttgacttcaacagattccactgccacttctcaccacgtgactggcagcgactcatcaacaacaactggggattccggccaaaaagactcagcttcaagctcttcaacatccaggtcaaggaggtcacgcagaatgaaggcaccaagaccatcgccaataaccttaccagcacgattcaggtatttacggactcggaataccagctgccgtacgtcctcggctccgcgcaccagggctgcctgcctccgttcccggcggacgtcttcatgattccccagtacggctaccttacactgaacaatggaagtcaagccgtaggccgttcctccttctactgcctggaatattttccatctcaaatgctgcgaactggaaacaattctgaattcagctacaccttcgaggacgtgcctttccacagcagctacgcacacagccagagcttggaccgactgatgaatcctctcatcgaccagtacctgtactacttatccagaactcagtccacaggaggaactcaaggtacccagcaattgttattttctcaagctgggcctgcaaacatgtcggctcaggctaagaactggctacctggaccttgctaccggcagcagcgagtctctacgacactgtcgcaaaacaacaacagcaactttgcttggactggtgccaccaaatatcacctgaacggaagagactctttggtaaatcccggtgtcgccatggcaacccacaaggacgacgaggaacgcttcttcccgtcgagtggagtcctgatgtttggaaaacagggtgctggaagagacaatgtggactacagcagcgttatgctaaccagcgaagaagaaattaaaaccactaaccctgtagccacagaacaatacggtgtggtggctgacaacttgcagcaaaccaatacagggcctattgtgggaaatgtcaacagccaaggagccttacctggcatggtctggcagaaccgagacgtgtacctgcagggtcccatctgggccaagattcctcacacggacggcaacttccacccttcaccgctaatgggaggatttggactgaagcacccacctcctcagatcctgatcaagaacacgccggtacctgcggatcctccaacaacgttcagccaggcgaaattggcttccttcattacgcagtacagcaccggacaggtcagcgtggaaatcgagtgggagctgcagaaggagaacagcaaacgctggaacccagagattcagtacacttcaaactactacaaatctacaaatgtggactttgctgtcaatacagagggaacttattctgagcctcgccccattggtactcgttacctcacccgtaatctgtaa

SEQ ID NO: 4914 - protein, 738 aa, Adeno-associated virus
MAADGYLPDWLEDNLSEGIREWWDLKPGAPKPKANQQKQDDGRGLVLPGYKYLGPFNGLDKGEPVNAADAAALEHDKAYDQQLKAGDNPYLRYNHADAEFQERLQEDTSFGGNLGRAVFQAKKRVLEPLGPVEEAAKTAPGKKRPVEPPPQRSPDSSTGIGKKGQQPAKKRLNFGQTGDSESVPDPQPIGEPPAGPSGLGSGTMAAGGGAPMADNNEGADGVGSSSGNWHCDSTWLGDRVITTSTRTWALPTYNNHLYKQISNGTSGGSTNDNTYFGYSTPWGYFDFNRFHCHFSPRDWQRLINNNWGFRPKRLSFKLFNIQVKEVTQNEGTKTVANNLTSTIQVFTDSEYQLPYVLGSAHQGCLPPFPADVFMIPQYGYLTLNNGSQAVGRSSFYCLEYFPSQMLRTGNNFEFSYTFEDVPFHSSYAHSQSLDRLMNPLIDQYLYYLSRTQSTGGTQGTQQLLFSQAGPANMSAQAKNWLPGPCYRQQRVSTTLSQNNNSNFAWTGATKYHLNGRDSLVNPGVAMATHKDDEERFFPSSGVLMFGKQGAGRDNVDYSSVMLTSEEEIKTTNPVATEQYGVVADNLQQTNTGPIVGNVNSQGALPGMVWQNRDVYLQGPIWAKIPHTDGNFHPSPLMGGFGLKHPPPQILIKNTPVPADPPTTFSQAKLASFITQYSTGQVSVEIEWELQKENSKRWNPEIQYTSNYYKSTNVDFAVNTEGTYSEPRPIGTRYLTRNL

SEQ ID NO: 4915 - DNA, 2217 bp, Adeno-associated virus
  source 1..2217: mol_type = genomic DNA
atggctgctgacggttatcttccagattggctcgaggacaacctctctgagggcattcgcgagtggtgggacctgaaacctggagcccccaagcccaaggccaaccagcagaagcaggacgacggccggggtctggtgcttcctggctacaagtacctcggacccttcaacggactcgacaagggggagcccgtcaacgcggcggacgcagcggccctcgagcacgacaaggcctacgaccagcagctcaaagcgggtgacaatccgtacctgcggtataaccacgccgacgccgagtttcaggagcgtctacaagaagatacgtcttttgggggcaacctcgggcgagcagtcttccaggccaagaagcgggttctcgaacctctcggtccggttgaggaagctgctaagacggctcctggaaagaagagaccggtagaaccgccacctcagcgttcccccgactcctccacgggcatcggcaagaaaggccagcagcccgctaaaaagagactgaactttggtcagactggcgactcagagtcagtccccgaccctcaaccaatcggagaaccaccagcaggcccctctggtctgggatctggtacaatggctgcaggcggtggcgctccaatggcagacaataacgaaggcgccgacggagtgggtagttcctcaggaaattggcattgcgattccacatggctgggcgacagagtcatcaccaccagcacccgaacctgggccctgcccacctacaacaaccacctctacaagcaaatatccaatgggacatcgggaggaagcaccaacgacaacacctacttcggctacagcaccccctgggggtattttgacttcaacagattccactgccacttctcaccacgtgactggcagcgactcatcaacaacaactggggattccggccaaaaagactcagcttcaagctcttcaacatccaggtcaaggaggtcacgcagaatgaaggcaccaagaccgtcgccaataaccttaccagcacgattcaggtatttacggactcggaataccagctgccgtacgtcctcggctccgcgcaccagggctgcctgcctccgttcccggcggacgtcttcatgattccccagtacggctaccttacactgaacaatggaagtcaagccgtaggccgttcctccttctactgcctggaatattttccatctcaaatgctgcgaactggaaacaattttgaattcagctacaccttcgaggacgtgcctttccacagcagctacgcacacagccagagcttggaccgactgatgaatcctctcatcgaccagtacctgtactacttatccagaactcagtccacaggaggaactcaaggtacccagcaattgttattttctcaagctgggcctgcaaacatgtcggctcaggctaagaactggctacctggaccttgctaccggcagcagcgagtctctacgacactgtcgcaaaacaacaacagcaactttgcttggactggtgccaccaaatatcacctgaacggaagagactctttggtaaatcccggtgtcgccatggcaacccacaaggacgacgaggaacgcttcttcccgtcgagtggagtcctgatgtttggaaaacagggtgctggaagagacaatgtggactacagcagcgttatgctaaccagcgaagaagaaattaaaaccactaaccctgtagccacagaacaatacggtgtggtggctgacaacttgcagcaaaccaatacagggcctattgtgggaaatgtcaacagccaaggagccttacctggcatggtctggcagaaccgagacgtgtacctgcagggtcccatctgggccaagattcctcacacggacggcaacttccacccttcaccgctaatgggaggatttggactgaagcacccacctcctcagatcctgatcaagaacacgccggtacctgcggatcctccaacaacgttcagccaggcgaaattggcttccttcattacgcagtacagcaccggacaggtcagcgtggaaatcgagtgggagctgcagaaggagaacagcaaacgttggaacccagagattcagtacacttcaaactactacaaatctacaaatgtggactttgctgtcaatacagagggaacttattctgagcctcgccccattggtactcgttacctcacccgtaatctgtaa

SEQ ID NO: 4916 - protein, 738 aa, Adeno-associated virus
MAADGYLPDWLEDNLSEGIREWWDLKPGAPKPKANQQKQDDGRGLVLPGYKYLGPFNGLDKGEPVNAADAAALEHDKAYDQQLKAGDNPYLRYNHADAEFQERLQEDTSFGGNLGRAVFQAKKRVLEPLGLVEEAAKTAPGKKRPVEPSPQRSPDSSTGIGKKGQQPAKKRLNFGQTGDSESVPDPQPIGEPPAGPSGLGSGTMAAGGGAPMADNNEGADGVGSSSGNWHCDSTWLGDRVITTSTRTWALPTYNNHLYKQISNGTSGGSTNDNTYFGYSTPWGYFDFNRFHCHFSPRDWQRLINNNWGFRPKRLSFKLFNIQVKEVTQNEGTKTIANNLTSTIQVFTDSEYQLPYVLGSAHQGCLPPFPADVFMIPQYGYLTLNNGSQAVGRSSFYCLEYFPSQMLRTGNNFEFSYTFEDVPFHSSYAHSQSLDRLMNPLIDQYLYYLSRTQSTGGTQGTQQLLFSQAGPANMSAQAKNWLPGPCYRQQRVSTTLSQSNNSNFAWTGATKYHLNGRDSLVNPGVAMATHKDDEERFFPSSGVLMFGKQGAGRDNVDYSSVMLTSEEEIKTTNPVATEQYGVVADNLQQTNTGPIVGNVNSQGALPGMVWQNRDVYLQGPIWAKIPHTDGNFHPSPLMGGLGLKHPPPQILIKNTPVPADPPTTFSQAKLASFITQYSTGQVSVEIEWELQKENSKRWNPEIQYTSNYYKSTNVDFAVNTEGTYSEPRPIGTRYLTRNL

SEQ ID NO: 4917 - DNA, 2217 bp, Adeno-associated virus
  source 1..2217: mol_type = genomic DNA
atggctgctgacggttatcttccagattggctcgaggacaacctctctgagggcattcgcgagtggtgggacctgaaacctggagcccccaagcccaaggccaaccagcagaagcaggacgacggccggggtctggtgcttcctggctacaagtacctcggacccttcaacggactcgacaagggggagcccgtcaacgcggcggacgcagcggccctcgagcacgacaaggcctacgaccagcagctcaaagcgggtgacaatccgtacctgcggtataaccacgccgacgccgagtttcaggagcgtctgcaagaagatacgtcttttgggggcaacctcgggcgagcagtcttccaggccaagaagcgggttctcgaacctctcggtctggttgaggaagcggctaagacggctcctggaaagaagagaccggtagaaccgtcacctcagcgttcccccgactcctccacgggcatcggcaagaaaggccagcagcccgctaaaaagagactgaactttggtcagactggcgactcagagtcagtccccgaccctcaaccaatcggagaaccaccagcaggcccctctggtctgggatctggtacaatggctgcaggcggtggcgctccaatggcagacaataacgaaggcgccgacggagtgggtagttcctcaggaaattggcattgcgattccacatggctgggcgacagagtcatcaccaccagcacccgaacctgggccctgcccacctacaacaaccacctctacaagcaaatatccaatgggacatcgggaggaagcaccaacgacaacacctacttcggctacagcaccccctgggggtattttgacttcaacagattccactgccacttctcaccacgtgactggcagcgactcatcaacaacaactggggattccggccaaaaagactcagcttcaagctcttcaacatccaggtcaaggaggtcacgcagaatgaaggcaccaagaccatcgccaataaccttaccagcacgattcaggtatttacggactcggaataccagctgccgtacgtcctcggctccgcgcaccagggctgcctgcctccgttcccggcggacgtcttcatgattccccagtacggctaccttacactgaacaatggaagtcaagccgtaggccgttcctccttctactgcctggaatattttccatctcaaatgctgcgaactggaaacaattttgaattcagctacaccttcgaggacgtgcctttccacagcagctacgcacacagccagagcttggaccgactgatgaatcctctcatcgaccagtacctgtactacttatccagaactcagtccacaggaggaactcaaggtacccagcaattgttattttctcaagctgggcctgcaaacatgtcggctcaggctaagaactggctacctggaccttgctaccggcagcagcgagtctctacgacactgtcgcaaagcaacaacagcaactttgcttggactggtgccaccaaatatcacctgaacggaagagactctttggtaaatcccggtgtcgccatggcaacccacaaggacgacgaggaacgcttcttcccgtcgagtggagtcctgatgtttggaaaacagggtgctggaagagacaatgtggactacagcagcgttatgctaaccagcgaagaagaaattaaaaccactaaccctgtagccacagaacaatacggtgtggtggctgacaacttgcagcaaaccaatacagggcctattgtgggaaatgtcaacagccaaggagccttacctggcatggtctggcagaaccgagacgtgtacctgcagggtcccatctgggccaagattcctcacacggacggcaacttccacccttcaccgctaatgggaggacttggactgaagcacccacctcctcagatcctgatcaagaacacgccggtacctgcggatcctccaacaacgttcagccaggcgaaattggcttccttcattacgcagtacagcaccggacaggtcagcgtggaaatcgagtgggagctgcagaaggagaacagcaaacgctggaacccagagattcagtacacttcaaactactacaaatctacaaatgtggactttgctgtcaatacagagggaacttattctgagcctcgccccattggtactcgttacctcacccgtaatctgtaa

SEQ ID NO: 4918 - protein, 737 aa, Adeno-associated virus
MAADGYLPDWLEDNLSEGIREWWDLKPGAPKPKANQQKQDDGRGLVLPGYKYLGPFNGLDKGEPVNAADAAALEHDKAYDQQLKAGDNPYPRYNHADAEFQERLQEDTPFGGNLGRAVFQAKKRVLEPLGLVEEAAKTAPGKKRPVEPSPQRSPDSSTGIGKKGQQPAKKRLNFGQTGDSESVPDPQPIGEPPAGPSGLGSGTMAAGGGAPMADNNEGADGVGNASGNWHCDSTWLGDRVITTSTRTWALPTYNNHLYKQISSASTGASNDNHYFGYSTPWGYFDFNRFHCHFSPRDWQRLINNNWGFRPKRLNFKLFNIQVKEVTTNDGVTTIANNLTSTVQVFSDSEYQLPYVLGSAHQGCLPPFPADVFMIPQYGYLTLNNGSQAVGRSSFYCLEYFPSQMLRTGNNFTFSYTFEEVPLHSSYAHSQSLDRLMNPLIVQYLYYLNRTQNQSGSAQNKDLLFSRGSPAGMSVQPKNWLPGPCYRQQRVSKTKTDNNNSNFTWTGASKYNLNGRESIINPGTAMASHKDDEDKFFPMSGVMIFGKESAGASNTALDNVMITDEEEIKATNPVATERFGTVAVNFQSSSTDPATGDVHAMGALPGMVWQDRDVYLQGPIWAKIPHTDGHFHPSPLMGGFGLKNPPPQILIKNTPVPANPPAEFSATKFASFITQYSTGQVSVEIEWELQKENSKRWNPEVQYTSNYAKSASVDFTVDNNGLYTEPRPIGTRYLTRPL

SEQ ID NO: 4919 - protein, 737 aa, Adeno-associated virus
MAADGYLPDWLEDNLSEGIREWWDLKPGAPKPKANQQKQDDGRGLVLPGYKYLGPFNGLDKGEPVNAADAAALEHDKAYDQQLKAGDNPYPRYNHADAEFQERLQEDTSFGGNLGRAVFQAKKRVLEPLGLVEEAAKTAPGKKRPVEPSPQRSPDSSTGIGKKGQQPAKKRLNFGQTGDSESVPDPQPIGEPPAGPSGLGSGTMAAGGGAPMADNNEGADGVGNASGNWHCDSTWLGDRVITTSTRTWALPTYNNHLYKQISSASTGASNDNHYFGYSTPWGYFDFNRFHCHFSPRDWQRLINNNWGFRPKRLNFKLFNIQVKEVTTNDGVTTIANNLTSTVQVFSDSEYQLPYVLGSAHQGCLPPFPADVFMIPQYGYLTLNNGSQAVGRSSFYCLEYFPSQMLRTGNNFTFSYTFEEVPLHSSYAHSQSLDRLMNPLIDQYLYYLNRTQNQSGSAQNKDLLFSRGSPAGMSVQPKNWLPGPCYRQQRVSKTKTDNNNSNFTWTGASKYNLNGRESIINPGTAMASHKDDEDKFFPMSGVMIFGKESAGASNTALDNVMITDEEEIKATNPVATERFGTVAVNFQSSSTDPATGDVHAMGALPGMVWQDRDVYLQGPIWAKIPHTDGHFHPSPLMGGFGLKNPPPQILIKNTPVPANPPAEFSATKFASFITQYSTGQVSVEIEWELQKENSKRWNPEVQYTSNYAKSASVDFTVDNNGLYTEPRPIGTRYLTRPL

SEQ ID NO: 4920 - DNA, 2214 bp, Adeno-associated virus
  source 1..2214: mol_type = genomic DNA
atggctgctgacggttatcttccagattggctcgaggacaacctctctgagggcattcgcgagtggtgggacctgaaacctggagcccccaagcccaaggccaaccagcagaagcaggacgacggccggggtctggtgcttcctggctacaagtacctcggacccttcaacggactcgacaagggggagcccgtcaacgcggcggacgcagcggccctcgagcacgacaaggcctacgaccagcagctcaaagcgggtgacaatccgtacccgcggtataaccacgccgacgccgagtttcaggagcgtctgcaagaagatacgccttttgggggcaacctcgggcgagcagtcttccaggccaagaagcgggttctcgaacctctcggtctggttgaggaagctgctaagacggctcctggaaagaagagaccggtagaaccgtcacctcagcgttcccccgactcctccacgggcatcggcaagaaaggccagcagcccgctaaaaagagactgaactttggtcagactggcgactcagagtcagtccccgaccctcaaccaatcggagaaccaccagcaggcccctctggtctgggatctggtacaatggctgcaggcggtggcgctccaatggcagacaataacgaaggcgccgacggagtgggtaatgcctcaggaaattggcattgcgattccacatggctgggcgacagagtcatcaccaccagcacccgcacctgggccttgcccacctacaataaccacctctacaagcaaatctccagtgcttcaacgggggccagcaacgacaaccactacttcggctacagcaccccctgggggtattttgatttcaacagattccactgccacttttcaccacgtgactggcagcgactcatcaacaacaattggggattccggcccaagagactcaacttcaaactcttcaacatccaagtcaaggaggtcacgacgaatgatggcgtcacaaccatcgctaataaccttaccagcacggttcaagtcttctcggactcggagtaccagcttccgtacgtcctcggctctgcgcaccagggctgcctccctccgttcccggcggacgtgttcatgattccgcaatacggctacctgacgctcaacaatggcagccaagccgtgggacgttcatccttttactgcctggaatatttcccttctcagatgctgagaacgggcaacaactttaccttcagctacacctttgaggaagtgcctctccacagcagctacgcgcacagccagagcctggaccggctgatgaatcctctcatcgtccaatacctgtattacctgaacagaactcaaaatcagtccggaagtgcccaaaacaaggacttgctgttcagccgtgggtctccagctggcatgtctgttcagcccaaaaactggctacctggaccctgttatcggcagcagcgcgtttctaaaacaaaaacagacaacaacaacagcaattttacctggactggtgcttcaaaatataacctcaatgggcgtgaatccatcatcaaccctggcactgctatggcctcacacaaagacgacgaagacaagttctttcccatgagcggtgtcatgatttttggaaaagagagcgccggagcttcaaacactgcattggacaatgtcatgattacagacgaagaggaaattaaagccactaaccctgtggccaccgaaagatttgggaccgtggcagtcaatttccagagcagcagcacagaccctgcgaccggagatgtgcatgctatgggagcattacctggcatggtgtggcaagatagagacgtgtacctgcagggtcccatttgggccaaaattcctcacacagatggacactttcacccgtctcctcttatgggcggctttggactcaagaacccgcctcctcagatcctcatcaaaaacacgcctgttcctgcgaatcctccggcggagttttcagctacaaagtttgcttcattcatcacccaatactccacaggacaagtgagtgtggaaattgaatgggagctgcagaaagaaaacagcaagcgctggaatcccgaagtgcagtacacatccaattatgcaaaatctgccagcgttgattttactgtggacaacaatggactttatactgagcctcgccccattggcacccgttaccttacccgtcccctgtaa

SEQ ID NO: 4921 - protein, 736 aa, Adeno-associated virus
MAADGYLPDWLEDTLSEGIRQWWKLRPGPPPPKPAERHKDDSRGLVLPGYKYLGPFNGLDKGEPVNEADAAALEHDKAYDRQLDSGDNPYLKYNHADAEFQERLKEDTSFGGNLGRAVFQAKKRVLEPLGLVEEGAETAPGKKRPVEQSPQGPDSSSGIGKTGQQPAKKRLNFGQTGDSESVPDPQPLGEPPATPAAVGPTTMASGGGAPMADNNEGADGVGNASGNWHCDSTWLGDRVITTSTRTWALPTYNNHLYKQISSASTGASNDNHYFGYSTPWGYFDFNRFHCHFSPRDWQRLINNNWGFRPKRLNFKLFNIQVKEVTTNDGVTTIANNLTSTVQVFSDSEYQLPYVLGSAHQGCLPPFPADVFMIPQYGYLTLNNGSQAVGRSSFYCLEYFPSQMLRTGNNFTFSYTFEEVPFHSSYAHSQSLDRLMNPLIDQYLYYPNRTQNQSGSAQNKDLLFSRGSPAGMSVQPKNWLPGPCYRQQRVSKTKTDNNNSNFTWTGASKYNLNGRESIINPGTAMASHKDDEDKFFPMSGVMIFGKESAGASNTALDNVMITDEEEIKATNPVATERFGTVAVNFQSSSTDPATGDVHAMGALPGMVWQGRDVYLQGPIWAKIPHTDGHFHPSPLMGGFGLKNPPPQILIKNTPVPANPPAEFSATKFASFITQYSTGQVSVEIEWELQKENSKRWNPEVQYTSNYAKSANVDFTVDNNGLYTEPRPIGTRYLTRPL

SEQ ID NO: 4922 - DNA, 2211 bp, Adeno-associated virus
  source 1..2211: mol_type = genomic DNA
atggctgccgatggttatcttccagattggctcgaggacactctctctgaaggaataagacagtggtggaagctcagacctggcccaccaccaccaaagcccgcagagcggcataaggacgacagcaggggtcttgtgcttcctgggtacaagtacctcggacccttcaacggactcgacaagggagagccggtcaacgaggcagacgccgcggccctcgagcacgacaaagcctacgaccggcagctcgacagcggagacaacccgtacctcaagtacaaccacgccgacgcggagtttcaggagcgccttaaagaagatacgtcttttgggggcaacctcgggcgagcagtcttccaggccaagaagcgggttctcgaacctctcggtctggttgaggaaggcgctgagacggctcctggaaagaaacgtccggtagagcagtcgccacaagggccagactcctcctcgggcatcggcaagacaggccagcagcccgctaaaaagagactcaattttggtcagactggcgactcagagtcagtccccgatccacaacctctcggagaacctccagcaacccccgctgctgtgggacctactacaatggcttcaggcggtggcgcaccaatggcagacaataacgaaggcgccgacggagtgggtaatgcctcaggaaattggcattgcgattccacatggctgggcgacagagtcatcaccaccagcacccgcacctgggccttgcccacctacaataaccacctctacaagcaaatctccagtgcttcaacgggggccagcaacgacaaccactacttcggctacagcaccccctgggggtattttgatttcaacagattccactgccacttttcaccacgtgactggcagcgactcatcaacaacaattggggattccggcccaagagactcaacttcaaactcttcaacatccaagtcaaggaggtcacgacgaatgatggcgtcacaaccatcgctaataaccttaccagcacggttcaagtcttctcggactcggagtaccagcttccgtacgtcctcggctctgcgcaccagggctgcctccctccgttcccggcggacgtgttcatgattccgcaatacggctacctgacgctcaacaatggcagccaagccgtgggacgttcatccttttactgcctggaatatttcccttctcagatgctgagaacgggcaacaactttaccttcagctacacctttgaggaagtgcctttccacagcagctacgcgcacagccagagcctggaccggctgatgaatcctctcatcgaccaatacctgtattacccgaacagaactcaaaatcagtccggaagtgcccaaaacaaggacttgctgtttagccgtgggtctccagctggcatgtctgttcagcccaaaaactggctacctggaccctgttatcggcagcagcgcgtttctaaaacaaaaacagacaacaacaacagcaattttacctggactggtgcttcaaaatataacctcaatgggcgtgaatccatcatcaaccctggcactgctatggcctcacacaaagacgacgaagacaagttctttcccatgagcggtgtcatgatttttggaaaagagagcgccggagcttcaaacactgcattggacaatgtcatgattacagacgaagaggaaattaaagccactaaccctgtggccaccgaaagatttgggaccgtggcagtcaatttccagagcagcagcacagaccctgcgaccggagatgtgcatgctatgggagcattacctggcatggtgtggcaaggtagagacgtgtacctgcagggtcccatttgggccaaaattcctcacacagatggacactttcacccgtctcctcttatgggcggctttggactcaagaacccgcctcctcagatcctcatcaaaaacacgcctgttcctgcgaatcctccggcggagttttcagctacaaagtttgcttcattcatcacccaatactccacaggacaagtgagtgtggaaattgaatgggagctgcagaaagaaaacagcaagcgctggaatcccgaagtgcagtacacatccaattatgcaaaatctgccaacgttgattttactgtggacaacaatggactttatactgagcctcgccccattggcacccgttaccttacccgtcccctgtaa

SEQ ID NO: 4923 - protein, 736 aa, Adeno-associated virus
MAADGYLPDWLEDTLSEGIRQWWKLRPGPPPPKPAERHKDDSRGLVLPGYKYLGPFNGLDKGEPVNEADAAALEHDKAYDRQLDSGDNPYLKYNHADAEFQERLKEDTSFGGNLGRAVFQAKKRVLEPLGLVEEGAKTAPGKKRPVEQSPQGPDSSSGIGKTGQQPAKKRLNFGQTGDSESVPDPQPLGEPPATPAAVGPTTMASGGGAPMADNNEGADGVGNASGNWHCDSTWLGDRVITTSTRTWALPTYNNHLYKQISSASTGASNDNHYFGYSTPWGYFDFNRFHCHFSPRDWQRLINNNWGFRPKRLNFKLFNIQVKEVTTNDGVTTIANNLTSTVQVFSDSEYQLPYVLGSAHQGCLPPFPADVFMIPQYGYLTLNNGSQAVGRSSFYCLEYFPSQMLRTGNNFTFSYTFEEVPFHSSYAHSQSLDRLMNPLIDQYLYYPNRTQNQSGSAQNKDLLFSRGSPAGMSVQPKNWLPGPCYRQQRVSKTKTDNNNSNFTWTGASKYNLNGRESIINPGTAMASHKDDEDKFFPMSGVMIFGKESAGASNTALDNVMITDEEEIKATNPVATERFGTVAVNFQSSSTDPATGDVHAMGALPGMVWQGRDVYLQGPIWAKIPHTDGHFHPSPLMGGFGLKNPPPQILIKNTPVPANPPAEFSATKFASFITQYSTGQVSVEIEWELQKENSKRWNPEVQYTSNYAKSANVDFTVDNNGLYTEPRPIGTRYLTRPL

SEQ ID NO: 4924 - protein, 736 aa, Adeno-associated virus
MAADGYLPDWLEDTLSEGIRQWWKLRPGPPPPKPAERHKDDSRGLVLPGYKYLGPFNGLDKGEPVNEADAAALEHDKAYDRQLDSGDNPYLKYNHADAEFQERLKEDTSFGGNLGRAVFQAKKRVLEPLGLVEEGAKTAPGKKRPVEQSPQGPDSSSGIGKTGQQPAKKRLNFGQTGDSESVPDPQPLGEPPATPAAVGPTTMASGGGAPMADNNEGADGVGNASGNWHCDSTWLGDRVITTSTRTWALPTYNNHLYKQISSASTGASNDNHYFGYSTPWGYFDFNRFHCHFSPRDWQRLINNNWGFRPKRLNFKLFNIQVKEVTTNDGVTTIANNLTSTVQVFSDSEYQLPYVLGSAHQGCLPPFPADVFMIPQYGYLTLNNGSQAVGRSSFYCLEYFPSQMLRTGNNFTFSYTFEEVPFHSSYAHSQSLDRLMNPLIDQYLYYLNRTQNQSGSAQNKDLLFSRGSPAGMSVQPKNWLPGPCYRQQRVSKTKTDNNNSNFTWTGASKYNLNGRESIINPGTAMASHKDDEDKFFPMSGVMIFGKESAGASNTALDNVMITDEEEIKATNPVATERFGTVAVNFQSSSTDPATGDVHAMGALPGMVWQGRDVYLQGPIWAKIPHTDGHFHPSPLMGGFGLKNPPPQILIKNTPVPANPPAEFSATKFASFITQYSTGQVSVEIEWELQKENSKRWNPEVQYTSNYAKSANVDFTVDNNGLYTEPRPIGTRYLTRPL

SEQ ID NO: 4925 - protein, 736 aa, Adeno-associated virus
MAADGYLPDWLEDTLSEGIRQWWKLRPGPPPPKPAERHKDDSRGLVLPGYKYLGPFNGLDKGEPVNEADAAALEHDKAYDRQLDSGDNPYLKYNHADAEFQERLKEDTSFGGNLGRAVFQAKKRVLEPLGLVEEGAKTAPGKKRPVEQSPQGPDSSSGIGKTGQQPAKKRLNFGQTGDSESVPDPQPLGEPPATPAAVGPTTMASGGGAPMADNNEGADGVGNASGNWHCDSTWLGDRVITTSTRTWALPTYNNHLYKQISSASTGASNDNHYFGYSTPWGYFDFNRFHCHFSPRDWQRLINNNWGFRPKRLNFKLFNIQVKEVTTNDGVTTIANNLTSTVQVFSDSEYQLPYVLGSAHQGCLPPFPADVFMIPQYGYLTLNNGSQAVGRSSFYCLEYFPSQMLRTGNNFTFSYTFEEVPFHSSYAHSQSLDRLMNPLIDQYLYYLNRTQNQSGSAQNKDLLFSRGSPAGMSVQPKNWLPGPCYRQQRVSKTKTDNNNSNFTWTGASKYNLNGRESIINPGTAMASHKDDEDKFFPMSGVMIFGKESAGASNTALDNVMITDEEEIKATNPVATERFGTVAVNFQSSSTDPATGDVHAMGALPGMVWQDRDVYLQGPIWAKIPHTDGHFHPSPLMGGFGLKNPPPQILIKNTPVPANPPAEFSATKFASFITQYSTGQVSVEIEWELQKENSKRWNPEVQYTSNYAKSANVDFTVDNNGLYTEPRPIGTRYLTRPL

SEQ ID NO: 4926 - DNA, 2208 bp, Adeno-associated virus
  source 1..2208: mol_type = genomic DNA
atggctgccgatggctatcttccagattggctcgaggacactctctctgaaggaataagacagtggtggaagctcaaacctggcccaccaccaccaaagcccgcagagcggcatagggacgacagcaggggtcttgtgcttcctgggtacaagtacctcggacccttcaacggactcgacaagggagagccggtcaacgaggcagacgccgcggccctcgagcacgacaaagcctacgaccggcagctcgacagcggagacaacccgtacctcaagtacaaccacgccgacgcggagtttcaggagcgccttaaagaagatacgtcttttgggggcaacctcggacgagcagtcttccaggcgaaaaagagggttcttgaacctctgggcctggttgaggaacctgttaagacggctccgggaaaaaagaggccggtagagcactctcctgtggagccagactcctcctcgggaaccggaaaggcgggccagcagcctgcaagaaaaagattgaattttggtcagactggagacgcagactcagtacctgacccccagcctctcggacagccaccagcagccccctctggtctgggaactaatacgatggctacaggcagtggcgcaccaatggcagacaataacgagggcgccgacggagtgggtaattcctcgggaaattggcattgcgattccacatggatgggcgacagagtcatcaccaccagcacccgaacctgggccctgcccacctacaacaaccacctctacaaacaaatttccagccaatcaggagcctcgaacgacaatcactactttggctacagcaccccttgggggtattttgacttcaacagattccactgccacttttcaccacgtgactggcaaagactcatcaacaacaactggggattccgacccaagagactcaacttcaagctctttaacattcaagtcaaagaggtcacgcagaatgacggtacgacgacgattgccaataaccttaccagcacggttcaggtgtttactgactcggggtaccagctcccgtacgtcctcggctcggcgcatcaaggatgcctcccgccgttcccagcagacgtcttcatggtgccacagtatggataccccaccctgaacaacgggagtcaggcagtaggacgctcttcattttactgcctggagtactttccttctcagatgctgcgtaccggaaacaactttaccttcagctacacttttgaggacgttcctttccacagcagctacgctcacagccagagtctggaccgtctcatgaatcctctcatcgaccagtacctgtattacttgagcacaacaaacactccaagtggaaccaccacgcagtcaaggcttcagttttctcaggccggagcgagtgacattcgggaccagtctaggaactggcttcctggaccctgttaccgccagcagcgagtatcaaagacatctgcggataacaacaacagtgaatactcgtggactggagctaccaagtaccacctcaatggcagagactctctggtgaatccgggcccggccgtggcaagccacaaggacgatgaagaaaagttttttcctcagagcggggttctcatctttgggaagcaaggctcagagaaaacaaatgtggacattgaaaaggtcatgattacagacgaagaggaaatcaggacaaccaatcccgtggctacggagcagtatggttctgtatctaccaacctccagagaggcaacagacaagcagctaccgcagatgtcaacacacaaggcgttcttccaggcatggtctggcaggacagagatgtgtaccttcaggggcccatctgggcaaagattccacacacggacggacattttcacccctctcccctcatgggtggattcggacttaaacaccctcctccacagattctcatcaagaacaccccggtacctgcgaatccttcgaccaccttcagtgcggcaaagtttgcttccttcatcacacagtactccacgggacaggtcagcgtggagatcgagtgggagctgcagaaggaaaacagcaaacgctggaatcccgaaattcagtacacttccaactacaacaagtctgttaatgtggactttactgtggacactaatggcgtgtattcagagcctcgccccattggcaccagatacctgactcgtaatctgtaa

SEQ ID NO: 4927 - protein, 735 aa, Adeno-associated virus
MAADGYLPDWLEDTLSEGIRQWWKLKPGPPPPKPAERHRDDSRGLVLPGYKYLGPFNGLDKGEPVNEADAAALEHDKAYDRQLDSGDNPYLKYNHADAEFQERLKEDTSFGGNLGRAVFQAKKRVLEPLGLVEEPVKTAPGKKRPVEHSPVEPDSSSGTGKAGQQPARKRLNFGQTGDADSVPDPQPLGQPPAAPSGLGTNTMATGSGAPMADNNEGADGVGNSSGNWHCDSTWMGDRVITTSTRTWALPTYNNHLYKQISSQSGASNDNHYFGYSTPWGYFDFNRFHCHFSPRDWQRLINNNWGFRPKRLNFKLFNIQVKEVTQNDGTTTIANNLTSTVQVFTDSGYQLPYVLGSAHQGCLPPFPADVFMVPQYGYPTLNNGSQAVGRSSFYCLEYFPSQMLRTGNNFTFSYTFEDVPFHSSYAHSQSLDRLMNPLIDQYLYYLSTTNTPSGTTTQSRLQFSQAGASDIRDQSRNWLPGPCYRQQRVSKTSADNNNSEYSWTGATKYHLNGRDSLVNPGPAVASHKDDEEKFFPQSGVLIFGKQGSEKTNVDIEKVMITDEEEIRTTNPVATEQYGSVSTNLQRGNRQAATADVNTQGVLPGMVWQDRDVYLQGPIWAKIPHTDGHFHPSPLMGGFGLKHPPPQILIKNTPVPANPSTTFSAAKFASFITQYSTGQVSVEIEWELQKENSKRWNPEIQYTSNYNKSVNVDFTVDTNGVYSEPRPIGTRYLTRNL

SEQ ID NO: 4928 - DNA, 2211 bp, Adeno-associated virus
  source 1..2211: mol_type = genomic DNA
atggctgccgacggttatcttccagattggctcgaggacactctctctgaaggaataagacagtggtggaagctcaaacctggcccaccaccaccaaagcccgcagagcggcataaggacgacagcaggggtcttgtgcttcctgggtacaagtacctcggacccttcaacggactcgacaagggagagccggtcaacgaggcagacgccgcggccctcgagcacgacaaagcctacgaccggcagctcgacagcggagacaacccgtacctcaagtacaaccacgccgacgcggagtttcaggagcgccttaaagaagatacgtcttttgggggcaacctcgggcgggcagtcttccaggccaagaagcgggttctcgaacctctcggtctggttgaggaaggcgctaagacggctcctggaaagaaacgtccggtagagcagtcgccacaagagccagactccccctcgggcatcggcaagacaggccagcagcccgctaaaaagagactcaattttggtcagactggcgactcagagtcagtccccgatccacaacctctcggagaacctccagcaacccccgctgctgtgggacctactacaatggcttcaggcggtggcgcaccaatggcagacaataacgaaggcgccgacggagtgggtaatgcctcaggaaattggcactgcgattccacatggctgggcgacagagtcatcaccaccagcacccgcacctgggccttgcccacctacaataaccacctctacaagcaaatctccagtgcttcaacgggggccagcaacgacaaccactacttcggctacagcaccccctgggggtattttgatttcaacagattccactgccacttttcaccacgtgactggcagcgactcatcaacaacaattggggattccggcccaagagactcaacttcaaactcttcaacatccaagtcaaggaggtcacgacgaatgatggcgtcacaaccatcgctaataaccttaccagcacggttcaagtcttctcggactcggagtaccagcttccgtacgtcctcggctctgcgcaccagggccgcctccctccgttcccggcggacgtgttcatgattccgcaatacggctacctgacgctcaacaatggcagccaagccgtgggacgttcatcctcttactgcctggaatatttcccttctcagatgctgagaacgggcaacaactttaccttcagctacacctttgaggaagtgcctctccacagcagctgcgcgcacagccagagcctggaccggctgatgaatcctctcatcgaccaatacctgtattacctgaacagaactcaaaatcagtccggaagtgcccaaaacagggacttgctgttcagccgtgggtctccagctggcatgtctgttcagcccaaaaactggctacctggaccctgttatcggcagcagcgcgtttctaaaacaaaaacagacaacaacaacagcaattttacctggactggtgcttcaaaatataacctcaatgggcgtgaatccatcatcaaccctggcactgctatggcctcacacaaagacgacgaagacaagttctttcccatgagcggtgtcatgatttttggaaaagagagcgccggagcttcaaacactgcattggacaatgtcatgattacagacgaagaggaaattaaagccactaaccctgtggccaccgaaagatttgggaccgtggcagtcaatttccagagcagcagcacagaccctgcgaccggagatgtgcatgctatgggagcattacctggcatggtgtggcaagatagagacgtgtacctgcagggtcccatttgggccaaaattcctcacacagatggacactttcacccgtctcctcttatgggcggctttggactcaagaacccgcctcctcagatcctcatcaaaaacacgcctgttcctgcgaatcctccggcggagttttcagctacaaagtttgcttcattcatcacccaatactccgcaggacaagtgagtgtggaaattgaatgggagctgcagaaagaaaacagcaagcgctggaatcccgaagtgcagtacacatccaattatgcaaaatctgccaacgttgattttactgtggacaacaatggactttatactgagcctcgccccattggcacccgttaccttacccgtcccctgtaa

SEQ ID NO: 4929 - protein, 736 aa, Adeno-associated virus
MAADGYLPDWLEDTLSEGIRQWWKLKPGPPPPKPAERHKDDSRGLVLPGYKYLGPFNGLDKGEPVNEADAAALEHDKAYDRQLDSGDNPYLKYNHADAEFQERLKEDTSFGGNLGRAVFQAKKRVLEPLGLVEEGAKTAPGKKRPVEQSPQEPDSPSGIGKTGQQPAKKRLNFGQTGDSESVPDPQPLGEPPATPAAVGPTTMASGGGAPMADNNEGADGVGNASGNWHCDSTWLGDRVITTSTRTWALPTYNNHLYKQISSASTGASNDNHYFGYSTPWGYFDFNRFHCHFSPRDWQRLINNNWGFRPKRLNFKLFNIQVKEVTTNDGVTTIANNLTSTVQVFSDSEYQLPYVLGSAHQGRLPPFPADVFMIPQYGYLTLNNGSQAVGRSSSYCLEYFPSQMLRTGNNFTFSYTFEEVPLHSSCAHSQSLDRLMNPLIDQYLYYLNRTQNQSGSAQNRDLLFSRGSPAGMSVQPKNWLPGPCYRQQRVSKTKTDNNNSNFTWTGASKYNLNGRESIINPGTAMASHKDDEDKFFPMSGVMIFGKESAGASNTALDNVMITDEEEIKATNPVATERFGTVAVNFQSSSTDPATGDVHAMGALPGMVWQDRDVYLQGPIWAKIPHTDGHFHPSPLMGGFGLKNPPPQILIKNTPVPANPPAEFSATKFASFITQYSAGQVSVEIEWELQKENSKRWNPEVQYTSNYAKSANVDFTVDNNGLYTEPRPIGTRYLTRPL

SEQ ID NO: 4930 - protein, 736 aa, Adeno-associated virus
MAADGYLPDWLEDTLSEGIRQWWKLKPGPPPPKPAERHKDDSRGLVLPGYKYLGPFNGLDKGEPVNEADAAALEHDKAYDRQLDSGDNPYLKYNHADAEFQERLKEDTSFGGNLGRAVFQAKKRVLEPLGLVEEGAKTAPGKKRPVEQSPQEPDSSSGIGKTGQQPAKKRLNFGQTGDSESVPDPQPLGEPPATPAAVGPTTMASGGGAPMADNNEGADGVGNASGNWHCDSTWLGDRVITTSTRTWALPTYNNHLYKQISSASTGASNDNHYFGYSTPWGYFDFNRFHCHFSPRDWQRLINNNWGFRPKRLNFKLFNIQVKEVTTNDGVTTIANNLTSTVQVFSDSEYQLPYVLGSAHQGCLPPFPADVFMIPQYGYLTLNNGSQAVGRSSFYCLEYFPSQMLRTGNNFTFSYTFEEVPLHSSCAHSQSLDRLMNPLIDQYLYYLNRTQNQSGSAQNRDLLFSRGSPAGMSVQPKNWLPGPCYRQQRVSKTKTDNNNSNFTWTGASKYNLNGRESIINPGTAMASHKDDEDKFFPMSGVMIFGKESAGASNTALDNVMITDEEEIKATNPVATERFGTVAVNFQSSSTDPATGDVHAMGALPGMVWQDRDVYLQGPIWAKIPHTDGHFHPSPLMGGFGLKNPPPQILIKNTPVPANPPAEFSATKFASFITQYSTGQVSVEIEWELQKENSKRWNPEVQYTSNYAKSANVDFTVDNNGLYTEPRPIGTRYLTRPL

SEQ ID NO: 4931 - DNA, 2208 bp, Adeno-associated virus
  source 1..2208: mol_type = genomic DNA
atggctgccgatggctatcttccagattggctcgaggacactctctctgaaggaataagacagtggtggaagctcaaacctggcccaccaccaccaaagcccgcagagcggcatagggacgacagcaggggtcttgtgcttcctgggtacaagtacctcggacccttcaacggactcgacaagggagagccggtcaacgaggcagacgccgcggccctcgagcacgacaaagcctacgaccggcagctcgacagcggagacaacccgtacctcaagtacaaccacgccgacgcggagtttcaggagcgccttaaagaagatacgtcttttgggggcaacctcggacgagcagtcttccaggcgaaaaagagggttcttgaacctctgggcctggttggggaacctgttaagacggctccgggaaaaaagaggccggtagagcactctcctgtggagccagactcctcctcgggaaccggaaaggcgggccagcagcctgcaagaaaaagattgaattttggtcagactggagacgcagactcagtacctgacccccagcctctcggacagccaccagcagccccctctggtctgggaactaatacgatggctacaggcagtggcgcaccaatggcagacaataacgagggcgccgacggagtgggtaattcctcgggaaattggcattgcgattccacatggatgggcgacagagtcatcaccaccagcacccgaacctgggccctgcccacctacaacaaccacctctacaaacaaatttccagccaatcaggagcctcgaacgacagtcactactttggctacagcaccccttgggggtattttgacttcaacagattccactgccacttttcaccacgtgactggcaaagactcatcaacaacaactggggattccgacccaagagactcaacttcaagctctttaacattcaagtcaaagaggtcacgcagaatgacggtacgacgacgattgccaataaccttaccagcacggttcaggtgtttactgactcggagtaccagctcccgtacgtcctcggctcggcgcatcaaggatgcctcccgccgttcccagcagacgtcttcatggtgccacagtatggatacctcaccctgaacaacgggagtcaggcagtaggacgctcttcattttactgcctggagtactttccttctcagatgctgcgtaccggaaacaactttaccttcagctacacttttgaggacgttcctttccacagcagctacgctcacagccagagtctggaccgtctcatgaatcctctcatcgaccagtacctgtattacttgagcacaacaaacactccaagtggaaccaccacgcagtcaaggctccagttttctcaggccggagcgagtgacattcgggaccagtctaggaactggcttcctggaccctgttaccgccagcagcgagtatcaaagacatctgcggataacaacaacagtgaatactcgtggactggagctaccaagtaccacctcaatggcagagactctctggtgaatccgggcccggccatggcaagccacaaggacaatgaagaaaagttttttcctcagagcggggttctcatctttgggaagcaaggctcagagaaaacaaatgtggacattgaaaaggtcatgattacagacgaagaggaaatcaggacaaccaatcccgtggctacggagcagtatggttctgtatctaccaacctccagagaggcaacagacaagcagctaccgcagatgtcaacacacaaggcgttcttccaggcatggtctggcaggacagagatgtgtaccttcaggggcccatctgggcaaagattccacacacggacggacattttcacccctctcccctcatgggtggattcggacttaaacaccctcctccacagattctcatcaagaacaccccggtacctgcgaatccttcgaccaccttcagtgcggcaaagtttgcttccttcatcacacagtactccacgggacaggtcagcgtggagatcgagtgggagctgcagaaggaaaacagcaaacgctggaatcccgaaattcagtacacttccaactacaacaagtctgttaatgtggactttactgtggacactaatggcgtgtattcagagcctcgccccattggcaccagatacctgactcgtaatctgtaa

SEQ ID NO: 4932 - protein, 735 aa, Adeno-associated virus
MAADGYLPDWLEDTLSEGIRQWWKLKPGPPPPKPAERHRDDSRGLVLPGYKYLGPFNGLDKGEPVNEADAAALEHDKAYDRQLDSGDNPYLKYNHADAEFQERLKEDTSFGGNLGRAVFQAKKRVLEPLGLVGEPVKTAPGKKRPVEHSPVEPDSSSGTGKAGQQPARKRLNFGQTGDADSVPDPQPLGQPPAAPSGLGTNTMATGSGAPMADNNEGADGVGNSSGNWHCDSTWMGDRVITTSTRTWALPTYNNHLYKQISSQSGASNDSHYFGYSTPWGYFDFNRFHCHFSPRDWQRLINNNWGFRPKRLNFKLFNIQVKEVTQNDGTTTIANNLTSTVQVFTDSEYQLPYVLGSAHQGCLPPFPADVFMVPQYGYLTLNNGSQAVGRSSFYCLEYFPSQMLRTGNNFTFSYTFEDVPFHSSYAHSQSLDRLMNPLIDQYLYYLSTTNTPSGTTTQSRLQFSQAGASDIRDQSRNWLPGPCYRQQRVSKTSADNNNSEYSWTGATKYHLNGRDSLVNPGPAMASHKDNEEKFFPQSGVLIFGKQGSEKTNVDIEKVMITDEEEIRTTNPVATEQYGSVSTNLQRGNRQAATADVNTQGVLPGMVWQDRDVYLQGPIWAKIPHTDGHFHPSPLMGGFGLKHPPPQILIKNTPVPANPSTTFSAAKFASFITQYSTGQVSVEIEWELQKENSKRWNPEIQYTSNYNKSVNVDFTVDTNGVYSEPRPIGTRYLTRNL

SEQ ID NO: 4933 - protein, 737 aa, Adeno-associated virus
RMAADGYLPDWLEDNLSEGIREWWDLKPGAPKPKANQQKQDDGRGLVLPGYKYLGPFNGLDKGEPVNAADAAALEHDKAYDQQLKAGDNPYLRYNHADAEFQERLQEDTSFGGNLGRAVFQAKKRVLEPLGLVEEGAKTAPGKKRPVEQSPQEPDSSSGIGKTGQQPAKKRLNFGQTGDSESVPDPQPLGEPPATPAAVGPTTMASGGGAPMADNNEGADGVGNASGNWHCDSTWLGDRVITTSTRTWALPTYNNHLYKQISSTSTGASNDNHYFGYGTPWGYFDFNRFHCHFSPRDWQRLINNNWGFRPKRLNFKLFNIQVEEVTTNDGVTTIANNLTSTVQVFSDSEYQLPYVLGSAHQGCLPPFPADVFMIPQYGYLTLNNGSQAVGRSSFYCLEYFPSQMLRTGNNFTFSYTFEEVPFHSSYAHSQSLDRLMNPLIDQYLYYLNRTQNQSGSAQNKDLLFSRGSPAGMSVQPKNWLPGPCYRQQRVSKTKTDNNNSNFTWTGASKYNLNGRESIINPGTAVASHKDDEDKFFPMSGVMIFGKESAGASSTALDNVMITDEEEIKATNPVATERFGTVAVNFQSSSTDPATGDVHAMGALPGMVWQDRDVYLQGPIWAKIPHTDGHFHPSPLMGGFGLKNPPPQILIKNTPVPANPPAEFSATKFASFITQYSTGQVSVEIEWELQKENSKRWNPEVQYTSNYAKSANVDFTVDNNGLYTEPRPIGTRYLTRPL

SEQ ID NO: 4934 - protein, 736 aa, Adeno-associated virus
MAADGYLPDWLEDNLSEGIREWWDLKPGAPKPKANQQKQDDGRGLVLPGYKYLGPFNGLDKGEPVNAADAAALEHDKAYDQQLKAGDNPYLRYNHADAEFQERLQEDTSFGGNLGRAVFQAKKRVLEPLGLVEEGAKTAPGKKRPVEQSPQEPDSSSGIGKTGQQPAKKRLNFGQTGDSESVPDPQPLGEPPATPAAVGPTTMASGGGAPMADNNEGADGVGNASGNWHCDSTWLGDRVITTSTRTWALPTYNNHLYKQISSTSTGASNDNHYFGYGTPWGYFDFNRFHCHFSPRDWQRLINNNWGFRPKRLNFKLFNIQVEEVTTNDGVTTIANNLTSTVQVFSDSEYQLPYVLGSAHQGCLPPFPADVFMIPQYGYLTLNNGSQAVGRSSFYCLEYFPSQMLRTGNNFTFSYTFEEVPFHSSYAHSQSLDRLMNPLIDQYLYYLNRTQNQSGSAQNKDLLFSRGSPAGMSVQPKNWLPGPCYRQQRVSKTKTDNNNSNFTWTGASKYNLNGRESIINPGTAVASHKDDEDKFFPMSGVMIFGKESAGASSTALDNVMITDEEEIKATNPVATERFGTVAVNFQSSSTDPATGDVHAMGALPGMVWQDRDVYLQGPIWAKIPHTDGHFHPSPLMGGFGLKNPPPQILIKNTPVPANPPAEFSATKFASFITQYSTGQVSVEIEWELQKENSKRWNPEVQYTSNYAKSANVDFTVDNNGLYTEPRPIGTRYLTRPL

SEQ ID NO: 4935 - DNA, 2211 bp, Adeno-associated virus
  source 1..2211: mol_type = genomic DNA
atggctgccgatggttatcttccagattggctcgaggacaacctctctgagggcattcgcgagtggtgggacttgaaacctggagccccgaagcccaaagccaaccagcaaaagcaggacgacggccggggtctggtgcttcctggctacaagtacctcggacccttcaacggactcgacaagggggagcccgtcaacgcggcggacgcagcggccctcgagcacgacaaggcctacgaccagcagctcaaagcgggtgacaatccgtacctgcggtataaccacgccgacgccgagtttcaggagcgtctgcaagaagatacgtcttttgggggcaacctcgggcgagcagtcttccaggccaagaagcgggttctcgaacctctcggtctggttgaggaaggcgctaagacggctcctggaaagaaacgtccggtagagcagtcgccacaagagccagactcctcctcgggcatcggcaagacaggccagcagcccgctaaaaagagactcaattttggccagactggcgactcagagtcagtccccgatccacaacctctcggagaacctccagcaacccccgctgctgtgggacctactacaatggcttcaggcggtggcgcaccaatggcagacaataacgaaggcgccgacggagtgggtaatgcctcaggaaattggcattgcgattccacatggctgggcgacagagtcatcaccaccagcacccgcacctgggccttgcccacctacaataaccacctctacaagcaaatctccagtacttcaacgggggccagcaacgacaaccactacttcggctacggcaccccctgggggtattttgatttcaacagattccactgccacttttcaccacgtgactggcagcgactcatcaacaacaattggggattccggcccaagagactcaacttcaaactcttcaacatccaagtcgaggaggtcacgacgaatgatggcgtcacaaccatcgctaataaccttaccagcacggttcaagtcttctcggactcggagtaccagcttccgtacgtcctcggctctgcgcaccagggctgcctccctccgttcccggcggacgtgttcatgattccgcaatacggctacctgacgctcaacaatggcagccaagccgtgggacgttcatccttttactgcctggaatatttcccttctcagatgctgagaacgggcaacaactttaccttcagctacacctttgaggaagtgcctttccacagcagctacgcgcacagccagagcctggaccggctgatgaatcctctcatcgaccaatacctgtattacctgaacagaacacaaaatcagtccggaagtgcccaaaacaaggacttgctgtttagccgtgggtctccagctggcatgtctgttcagcccaaaaactggctacctggaccctgttatcggcagcagcgcgtttctaaaacaaaaacagacaacaacaacagcaattttacctggactggtgcttcaaaatataacctcaatgggcgtgaatccatcatcaaccctggcaccgctgtggcctcacacaaagacgacgaagacaagttctttcccatgagcggtgtcatgatttttggaaaagagagcgccggagcttcaagcactgcattggacaatgtcatgattacagacgaagaggaaattaaagccactaaccctgtggccaccgaaagatttgggaccgtggcagtcaatttccagagcagcagcacagaccctgcgaccggagatgtgcatgctatgggagcattacctggcatggtgtggcaagatagagacgtgtacctgcagggtcccatttgggccaaaattcctcacacagatggacactttcacccgtctcctcttatgggcggctttggactcaagaacccgcctcctcagatcctcatcaaaaacacgcctgttcctgcgaatcctccggcggagttttcagctacaaagtttgcttcattcatcacccaatactccacaggacaagtgagtgtggaaattgaatgggagctgcagaaagaaaacagcaagcgctggaatcccgaagtgcagtacacatccaattatgcaaaatctgccaacgttgattttactgtggacaacaatggactttatactgagcctcgccccattggcacccgttaccttacccgtcccctgtaa

SEQ ID NO: 4936 - protein, 737 aa, Adeno-associated virus
RMAADGYLPDWLEDNLSEGIREWWDLKPGAPKPKANQQKQDDGRGLVLPGYKYLGPFNGLDKGEPVNAADAAALEHDKAYDQQLKAGDNPYLRYNHADAEFQERLQEDTSFGGNLGRAVFQAKKRVLEPLGLVEEGAKTAPGKKRPVEQSPQEPDSSSGIGKTGQQPAKKRLNFGQTGDSESVPDPQPLGEPPATPAAVGPTTMASGGGAPMADNNEGADGVGNASGNWHCDSTWLGDRVITTSTRTWALPTYNNHLYKQISSTSTGASNDNHYFGYSTPWGYFDFNRFHCHFSPRDWQRLINNNWGFRPKRLNFKLFNIQVEEVTTNDGVTTIANNLTSTVQVFSDSEYQLPYVLGSAHQGCLPPFPADVFMIPQYGYLTLNNGSQAVGRSSFYCLEYFPSQMLRTGNNFTFSYTFEEVPFHSSYAHSQSLDRLMNPLIDQYLYYLNRTQNQSGSAQNKDLLFSRGSPAGMSVQPKNWLPGPCYRQQRVSKTKTDNNNSNFTWTGASKYNLNGRESIINPGTAVASHKDDEDKFFPMSGVMIFGKESAGASSTALDNVMITDEEEIKATNPVATERFGTVAVNFQSSSTDPATGDVHAMGALPGMVWQDRDVYLQGPIWAKIPHTDGHFHPSPLMGGFGLKNPPPQILIKNTPVPANPPAEFSATKFASFITQYSTGQVSVEIEWELQKENSKRWNPEVQYTSNYAKSANVDFTVDNNGLYTEPRPIGTRYLTRPL

SEQ ID NO: 4937 - protein, 737 aa, Adeno-associated virus
RMAADGYLPDWLEDNLSEGIREWWDLKPGAPKPKANQQKQDDGRGLVLPGYKYLGPFNGLDKGEPVNAADAAALEHDKAYDQQLKAGDNPYLRYNHADAEFQERLQEDTSFGGNLGRAVFQAKKRVLEPLGLVEEGAKTAPGKKRPVEQSPQEPDSSSGIGKTGQQPAKKRLNFGQTGDSESVPDPQPLGEPPATPAAVGPTTMASGGGAPMADNNEGADGVGNASGNWHCDSTWLGDRVITTSTRTWALPTYNNHLYKQISSTSTGASNDNHYFGYSTPWGYFDFNRFHCHFSPRDWQRLINNNWGFRPKRLNFKLFNIQVKEVTTNDGVTTIANNLTSTVQVFSDSEYQLPYVLGSAHQGCLPPFPADVFMIPQYGYLTLNNGSQAVGRSSFYCLEYFPSQMLRTGNNFTFSYTFEEVPFHSSYAHSQSLDRLMNPLIDQYLYYLNRTQNQSGSAQNKDLLFSRGSPAGMSVQPKNWLPGPCYRQQRVSKTKTDNNNSNFTWTGASKYNLNGRESIINPGTAVASHKDDEDKFFPMSGVMIFGKESAGASSTALDNVMITDEEEIKATNPVATERFGTVAVNFQSSSTDPATGDVHAMGALPGMVWQDRDVYLQGPIWAKIPHTDGHFHPSPLMGGFGLKNPPPQILIKNTPVPANPPAEFSATKFASFITQYSTGQVSVEIEWELQKENSKRWNPEVQYTSNYAKSANVDFTVDNNGLYTEPRPIGTRYLTRPL

SEQ ID NO: 4938 - protein, 737 aa, Adeno-associated virus
RMAADGYLPDWLEDNLSEGIREWWDLKPGAPKPKANQQKQDDGRGLVLPGYKYLGPFNGLDKGEPVNAADAAALEHDKAYDQQLKAGDNPYLRYNHADAEFQERLQEDTSFGGNLGRAVFQAKKRVLEPLGLVEEGAKTAPGKKRPVEQSPQEPDSSSGIGKTGQQPAKKRLNFGQTGDSESVPDPQPLGEPPATPAAVGPTTMASGGGAPMADNNEGADGVGNASGNWHCDSTWLGDRVITTSTRTWALPTYNNHLYKQISSTSTGASNDNHYFGYSTPWGYFDFNRFHCHFSPRDWQRLINNNWGFRPKRLNFKLFNIQVKEVTTNDGVTTIANNLTSTVQVFSDSEYQLPYVLGSAHQGCLPPFPADVFMIPQYGYLTLNNGSQAVGRSSFYCLEYFPSQMLRTGNNFTFSYTFEEVPFHSSYAHSQSLDRLMNPLIDQYLYYLNRTQNQSGSAQNKDLLFSRGSPAGMSVQPKNWLPGPCYRQQRVSKTKTDNNNSNFTWTGASKYNLNGRESIINPGTAVASHKDDEDKFFPMSGVMIFGKESAGANSTALDNVMITDEEEIKATNPVATERFGTVAVNFQSSSTDPATGDVHAMGALPGMVWQDRDVYLQGPIWAKIPHTDGHFHPSPLMGGFGLKNPPPQILIKNTPVPANPPAEFSATKFASFITQYSTGQVSVEIEWELQKENSKRWNPEVQYTSNYAKSANVDFTVDNNGLYTEPRPIGTRYLTRPL

SEQ ID NO: 4939 - DNA, 2208 bp, Adeno-associated virus
  source 1..2208: mol_type = genomic DNA
atggctgccgatggttatcttccagattggctcaaggacactctctctgaaggaataagacagtggtggaagctcaaacctggcccaccaccaccaaagcccgcagagcggcataaggacgacagcgggggtcttgtgcttcctgggtacaagtacctcggacccttcaacggactcgacaagggagagccggtcaacgaggcagacgccgcggccctcgagtacgacaaggcctacgaccggcagctcgacagcggagacaacccgtacctcaagtacaaccacgccgacgcggagtttcaggagcgccttaaagaagatacgtcttttgggggcaacctcggacgagcagtcttccaggcgaaaaagagggttcttgaacctctgggcctggttgaggaacctgttaagacggctccgggaaaaaagaggccggtagagcactctcctgtggagccagactcctcctcgggaacaggaaaagcgggccagcagcctgcgagaaagagattgaattttggtcagactggagacgcagactccgtacctgacccccagcctctcggacagccaccagcagccccctctggtctgggaactaatacgatggctacaggcagtggcgcaccaatggcagacaataacgagggcgccgacggagtgggtaattcctcgggaagttggcattgcgattccacatggatgggcgacagagtcatcaccaccagcacccgaacctgggctctgcccacctacaacaaccatctgtacaagcagatctccagccaatcaggagccagcaacgacaaccactactttggctacagcaccccttgggggtattttgacttcaacagattccactgccacttttcaccacgtgactggcaaagactcatcaacaacaactggggattccggcccaagagactcaacttcaagctctttaacattcaagtcaaggaggtcacgcagaatgacggtacgacgacgattgccaataaccttaccagcacggttcaggtgtttactgactcggagtaccagctcccgtacgtccccggctcggcgcatcaaggatgcctcccgccgttcccagcagacgtcttcatggtgccacagtatggatacctcaccctgaacaacgggagtcaggcagtaggacgctcttcattttactgcctggagtactttccttctcagatgcttcgtaccggaaacaactttaccttcagctacacctttgaggatgttcctttccacagcagctacgctcacagccagagtttggaccgtctcatgaatcctctcatcgaccagtacctgtattacttgagcagaacaaacactccaagcggaaccaccacgcagtccaggcttcagttttctcaggccggagcaagtgacattcgggaccagtctaggaactggcttcctggaccctgttaccgccagcagcgagtatcaaagacagctgcggacaacaacaacagtgaatactcgtggactggagctaccaagtaccacctcaatggcagagactctctggtgaatccgggcccggccatggccagccacaaggacgatgaagaaaagttttttcctcaaagcggggttctcatctttgggaagcaaggctcagagaaaacaaatgtggacattgaaaaggtcatgattacagacgaagaggaaatcagaaccaccaatcccgtggccacggagcagtatggttctgtatctaccaacctccagagcggcaacacacaagcagctactgcagatgtcaacacacaaggcgttcttccaggcatggtctggcaggacagagacgtgcacctgcaggggcctatctgggcaaagattccacacacggacggacattttcacccctctcccctcatgggcggatttggacttaaacaccctcctccacagattctcatcaagaacaccccggtacctgcaaatccttcgaccaccttcagtgcggcaaagtttgcttccttcatcacacagtattccacagggcaggtcagcgtggagatcgagtgggagctgcagaaggagaacagcaaacgctggaaccccgagatccagtacacttccaactacaacaaatctgttaatgtggactttactgtggacactaatggtgtgtattcagagcctcgccccattggcaccagatacctgactcgtaatctgtaa

SEQ ID NO: 4940 - protein, 735 aa, Adeno-associated virus
MAADGYLPDWLKDTLSEGIRQWWKLKPGPPPPKPAERHKDDSGGLVLPGYKYLGPFNGLDKGEPVNEADAAALEYDKAYDRQLDSGDNPYLKYNHADAEFQERLKEDTSFGGNLGRAVFQAKKRVLEPLGLVEEPVKTAPGKKRPVEHSPVEPDSSSGTGKAGQQPARKRLNFGQTGDADSVPDPQPLGQPPAAPSGLGTNTMATGSGAPMADNNEGADGVGNSSGSWHCDSTWMGDRVITTSTRTWALPTYNNHLYKQISSQSGASNDNHYFGYSTPWGYFDFNRFHCHFSPRDWQRLINNNWGFRPKRLNFKLFNIQVKEVTQNDGTTTIANNLTSTVQVFTDSEYQLPYVPGSAHQGCLPPFPADVFMVPQYGYLTLNNGSQAVGRSSFYCLEYFPSQMLRTGNNFTFSYTFEDVPFHSSYAHSQSLDRLMNPLIDQYLYYLSRTNTPSGTTTQSRLQFSQAGASDIRDQSRNWLPGPCYRQQRVSKTAADNNNSEYSWTGATKYHLNGRDSLVNPGPAMASHKDDEEKFFPQSGVLIFGKQGSEKTNVDIEKVMITDEEEIRTTNPVATEQYGSVSTNLQSGNTQAATADVNTQGVLPGMVWQDRDVHLQGPIWAKIPHTDGHFHPSPLMGGFGLKHPPPQILIKNTPVPANPSTTFSAAKFASFITQYSTGQVSVEIEWELQKENSKRWNPEIQYTSNYNKSVNVDFTVDTNGVYSEPRPIGTRYLTRNL

SEQ ID NO: 4941 - DNA, 2208 bp, Adeno-associated virus
  source 1..2208: mol_type = genomic DNA
atggctgccgatggttatcttccagattggctcgaggacactctctctgaaggaataagacagtggtggaagctcaaacctggcccaccaccaccaaagcccgcagagcggcataaggacgacagcaggggtcttgtgcttcctgggtacaagtacctcggacccttcaacggactcgacaagggggagccggtcaacgaggcagacgccgcggccctcgagcacgacaaggcctacgaccggcagctcgacagcggagacaacccgtacctcaagtacaaccacgccgacgcagagtttcaggagcgccttaaagaagatacgtcttttgggggcaacctcggacgagcagtcttccaggcgaaaaagagggttcttgaacctctgggcctggttgaggaacctgttaagacggctccgggaaaaaagaggccggtagagcactctcctgtggagccagactcctcctcgggaaccggaaaagcgggccagcagcctgcaagaaaaagattaaattttggtcagactggagacgcagactccgtacctgacccccagcctctcggacagccaccagcagccccctctggtctgggatctactacaatggctacaggcagtggcgcaccaatggcagacaataacgagggtgccgatggagtgggtaattcctcaggaaattggcattgcgattcccaatggctgggcgacagagtcatcaccaccagcacccgaacctgggccctgcccacatacaacaaccacctctacaagcaaatctccagccaatcaggagccagcaacgacaaccactactttggctacagcaccccctgggggtattttgacttcaacagattccactgccacttttcaccacgtgactggcaaagactcatcaacaacaactggggattccggcccaaaagactcaacttcaagctctttaatattcaagtcaaagaggtcacgcagaatgacggtacgacgacgattgccaataaccttaccagcacggttcaggtgtttactgactcggagtaccagctcccgtacgtcctgggctcggcgcatcaaggatgcctcccgccgtttccagcggacgtcttcatggtcccacagtatggatacctcaccctgaacaacgggagtcaggcggtaggacgctcttccttttactgcctggagtactttccttctcagatgctgcgtactggaaacaactttcagttcagctacacttttgaagacgtgcctttccacagcagctacgctcacagccagagtctggatcggctgatgaatcctctgatcgaccagtacctgtattatctgaacaagacacaaacaaatagtggaactcttcagcagtctcggctactgtttagccaagctggaccaaccaacatgtctcttcaagctaaaaactggctgcctggaccttgctacagacagcagcgtctgtcaaaacaggcaaacgacaacaacaacagcaactttccctggactgcagctacaaagtatcatctaaatggccgggactcgttggttaatccaggaccagctatggccagtcgcaaggatgacgaagaaaagtttttccccatgcatggaaccctgatatttggtaaacaaggaacaaatgccaacgacgcggatttggaaaatgtcatgattacagatgaagaagaaatcagggccaccaatcccgtggctacggagcagtacgggactgtgtcaaataatttgcaaaactcaaacactggtccaactactggaactgtcaatcaccaaggagcgttacctggtatggtgtggcaggatcgagacgtgtacctgcagggacccatttgggccaagattcctcacaccgatggacactttcatccttctccactgatgggaggttttggactcaaacacccgcctcctcagatcatgatcaaaaacactcccgttccagccaatcctcccacaaacttcagttctgccaagtttgcttctttcatcacacagtattccacgggacaggtcagcgtggagatcgagtgggagctgcagaaggagaacagcaaacgctggaatcccgaaattcagtacacttccaactacaacaagtctgttaatgtggactttactgtggacactaatggtgtgtattcagagcctcgccccattggcaccagatacctgactcgtaatctgtaa

SEQ ID NO: 4942 - protein, 735 aa, Adeno-associated virus
MAADGYLPDWLEDTLSEGIRQWWKLKPGPPPPKPAERHKDDSRGLVLPGYKYLGPFNGLDKGEPVNEADAAALEHDKAYDRQLDSGDNPYLKYNHADAEFQERLKEDTSFGGNLGRAVFQAKKRVLEPLGLVEEPVKTAPGKKRPVEHSPVEPDSSSGTGKAGQQPARKRLNFGQTGDADSVPDPQPLGQPPAAPSGLGSTTMATGSGAPMADNNEGADGVGNSSGNWHCDSQWLGDRVITTSTRTWALPTYNNHLYKQISSQSGASNDNHYFGYSTPWGYFDFNRFHCHFSPRDWQRLINNNWGFRPKRLNFKLFNIQVKEVTQNDGTTTIANNLTSTVQVFTDSEYQLPYVLGSAHQGCLPPFPADVFMVPQYGYLTLNNGSQAVGRSSFYCLEYFPSQMLRTGNNFQFSYTFEDVPFHSSYAHSQSLDRLMNPLIDQYLYYLNKTQTNSGTLQQSRLLFSQAGPTNMSLQAKNWLPGPCYRQQRLSKQANDNNNSNFPWTAATKYHLNGRDSLVNPGPAMASRKDDEEKFFPMHGTLIFGKQGTNANDADLENVMITDEEEIRATNPVATEQYGTVSNNLQNSNTGPTTGTVNHQGALPGMVWQDRDVYLQGPIWAKIPHTDGHFHPSPLMGGFGLKHPPPQIMIKNTPVPANPPTNFSSAKFASFITQYSTGQVSVEIEWELQKENSKRWNPEIQYTSNYNKSVNVDFTVDTNGVYSEPRPIGTRYLTRNL

SEQ ID NO: 4943 - DNA, 2208 bp, Adeno-associated virus
  source 1..2208: mol_type = genomic DNA
atggctgccgatggttatcttccagattggctcgaggacactctctctgaaggaataagacagtggtggaagctcaaacctggcccaccaccaccaaagcccgcagagcggcataaggacgacagcaggggtcttgtgcttcctgggtacaagtacctcggacccttcaacggactcgacaagggagagccggtcaacgaggcagacgccgcggccctcgagcacgacaaagcctacgaccggcagctcgacagcggagacaacccgtacctcaagtacaaccacgccgacgcggagtttcaggagcgccttaaagaagatacgtcttttgggggcaacctcggacgagcagtcttccaggcgaaaaagagggttcttgaacctctgggcctggttggggaacctgtcaagacggctccaggaaaaaagaggccggtagagcactctcctgtggagccagactcctcctcgggaaccggaaaggcgggccagcagcctgcaagaaaaagattgaattttggtcagactggagacgcagactcagtacctgacccccagcctctcggacagccaccagcagccccctctggtctgggaactaatacgatggctacaggcagtggcgcaccaatggcagacaataacgagggcgccgacggagtgggtaattcctcgggaaattggcattgcgattccacatggatgggcgacagagtcatcaccaccagcacccgaacctgggccctgcccacctacaacaaccacctctacaaacaaatttccagccaatcaggagcctcgaacgacaatcactactttggctacagcaccccttgggggtattttgacttcaacagattccactgccacttttcaccacgtgactggcaaagactcatcaacaacaactggggattccgacccaagagactcaacttcaagctctttaacattcaagtcaaagaggtcacgcagaatgacggtacgacgacgattgccaataaccttaccagcacggttcaggtgtttactgactcggagtaccagctcccgtacgtcctcggctcggcgcatcaaggatgcctcccgccgttcccagcagacgtcttcatggtgccacagtatggatacctcaccctgaacaacgggagtcaggcagtaggacgctcttcattttactgcctggagtactttccttctcagatgctgcgtaccggaaacaactttaccttcagctacacttttgaggacgttcctttccacagcggctacgctcacagccagagtctggaccgtctcatgaatcctctcatcgaccagtacctgtattacttgagcacaacaaacactccaagtggaaccaccacgcagtcaaggcttcagttttctcaggccggagcgagtgacattcgggaccagtctaggaactggcttcctggaccctgttaccgccagcagcgagtatcaaagacatctgcggataacaacaacagtgaatactcgtggactggagctaccaagtaccacctcaatggcagagactctctggtgaatccgggcccggccatggcaagccacaaggacaatgaagaaaagttttttcctcagagcggggttctcatctttgggaagcaaggctcagagaaaacaaatgtggacattgaaaaggtcatgattacagacgaagaggaaatcaggacaaccaatcccgtggctacggagcagtacggttctgtatctaccaacctccagagaggcaacagacaagcagctaccgcagatgtcaacacacaaggcgttcttccaggcatggtctggcaggacagagatgtgtaccttcaggggcccatctgggcaaagattccacacacggacggacattttcacccctctcccctcatgggtggattcggacttaaacaccctcctccacagattctcatcaagaacaccccggtacctgcgaatccttcgaccaccttcagtgcggcaaagtttgcttccttcatcacacagtactccacgggacaggtcagcgtggagatcgagtgggagctgcagaaggaaaacagcaaacgctggaatcccgaaattcagtacacttccaactacaacaagtctgttaatgtggactttactgtggacactaatggcgtgtattcagagcctcgccccattggcaccagatacctgactcgtaatctgtaa

SEQ ID NO: 4944 - protein, 735 aa, Adeno-associated virus
MAADGYLPDWLEDTLSEGIRQWWKLKPGPPPPKPAERHKDDSRGLVLPGYKYLGPFNGLDKGEPVNEADAAALEHDKAYDRQLDSGDNPYLKYNHADAEFQERLKEDTSFGGNLGRAVFQAKKRVLEPLGLVGEPVKTAPGKKRPVEHSPVEPDSSSGTGKAGQQPARKRLNFGQTGDADSVPDPQPLGQPPAAPSGLGTNTMATGSGAPMADNNEGADGVGNSSGNWHCDSTWMGDRVITTSTRTWALPTYNNHLYKQISSQSGASNDNHYFGYSTPWGYFDFNRFHCHFSPRDWQRLINNNWGFRPKRLNFKLFNIQVKEVTQNDGTTTIANNLTSTVQVFTDSEYQLPYVLGSAHQGCLPPFPADVFMVPQYGYLTLNNGSQAVGRSSFYCLEYFPSQMLRTGNNFTFSYTFEDVPFHSGYAHSQSLDRLMNPLIDQYLYYLSTTNTPSGTTTQSRLQFSQAGASDIRDQSRNWLPGPCYRQQRVSKTSADNNNSEYSWTGATKYHLNGRDSLVNPGPAMASHKDNEEKFFPQSGVLIFGKQGSEKTNVDIEKVMITDEEEIRTTNPVATEQYGSVSTNLQRGNRQAATADVNTQGVLPGMVWQDRDVYLQGPIWAKIPHTDGHFHPSPLMGGFGLKHPPPQILIKNTPVPANPSTTFSAAKFASFITQYSTGQVSVEIEWELQKENSKRWNPEIQYTSNYNKSVNVDFTVDTNGVYSEPRPIGTRYLTRNL

SEQ ID NO: 4945 - DNA, 2208 bp, Adeno-associated virus
  source 1..2208: mol_type = genomic DNA
atggctgccgatggttatcttccagattggctcgaggacactctctctgaaggaataagacagtggtggaagctcaaacctggcccaccaccaccaaagcccgcagagcggcataaggacgacagcaggggtcttgtgcttcctgggtacaagtacctcggacccttcaacggactcgacaagggagagccggtcaacgaggcagacgccgcggccctcgagcacgacaaagcctacgaccggcagctcgacagcggagacaacccgtacctcaagtacaaccacgccgacgcggagtttcaggagcgccttaaagaagatacgtcttttgggggcaacctcggacgagcagtcttccaggcgaaaaagagggttcttgaacctctgggcctggttggggaacctgttaagacggctccgggaaaaaagaggccggtagagcactctcctgtggagccagactcctcctcgggaaccggaaaggcgggccagcagcctgcaagaaaaagattgaattttggtcagactggagacgcagactcagtacctgacccccagcctctcggacagccaccagcagccccctctggtctgggaactaatacgatggctacaggcagtggcgcaccaatggcagacaataacgagggcgccgacggagtgggtaattcctcgggaaatcggcattgcgattccacatggatgggcgacagagtcatcaccaccagcacccgaacctgggccctgcccacctacaacaaccacctctacagacaaatttccagccaatcaggagcctcgaacgacaatcactactttggctacagcaccccttgggggtattttgacttcaacagattccactgccacttttcaccacgtgactggcaaagactcatcaacaacaactggggattccgacccaagagactcaacttcaagctctttaacattcaagtcaaagaggtcacgcagaatgacggtacgacgacgattgccaataaccttaccagcacggttcaggtgtttactgactcggagtaccagctcccgtacgtcctcggctcggcgcatcaaggatgcctcccgccgttcccagcagacgtcttcatggtgccacagtatggatacctcaccctgagcaacgggagtcaggcagtaggacgctcttcattttactgcccggagtactttccttctcagatgctgcgtaccggaaacaactttaccttcagctacacttttgaggacgttcctttccacagcagctacgctcacagccagagtctggaccgtctcatgaatcctctcatcgaccagtacctgtattacttgagcacaacaaacactccaagtggaaccaccacgcagtcaaggcttcagttttctcaggccggagcgagtgacattcgggaccagtctaggaactggcttcctggaccctgttaccgccagcagcgagtatcaaagacatctgcggataacaacaacagtgaatactcgtggactggagctaccaagtaccacctcaatggcagagactctctggtgaatccgggcccggccatggcaagccacaaggacaatgaagaaaagttttttcctcagagcggggttctcatctttgggaagcaaggctcagagaaaacaaatgtggacattgaaaaggtcatgattacagacgaagaggaaatcaggacaaccaatcccgtggctacggagcagtatggttctgtatctaccaacctccagagaggcaacagacaagcagctaccgcagatgtcaacacacaaggcgttcttccaggcatggtctggcaggacagagatgtgtaccttcaggggcccatctgggcaaagattccacacacggacggacattttcacccctctcccctcatgggtggattcggacctaaacaccctcctccacagattctcatcaagaacaccccggtacctgcgaatccttcgaccaccttcagtgcggcaaagtttgcttccttcatcacacagtactccacgggacaggtcagcgtggagatcgagtgggagctgcagaaggaaaacagcaaacgctggaatcccgaaattcagtacacttccaactacaacaagtctgttaatgtggactttactgtggacactaatggcgtgtattcagagcctcgccccattggcaccagatacctgactcgtaatttgtaa

SEQ ID NO: 4946 - protein, 735 aa, Adeno-associated virus
MAADGYLPDWLEDTLSEGIRQWWKLKPGPPPPKPAERHKDDSRGLVLPGYKYLGPFNGLDKGEPVNEADAAALEHDKAYDRQLDSGDNPYLKYNHADAEFQERLKEDTSFGGNLGRAVFQAKKRVLEPLGLVGEPVKTAPGKKRPVEHSPVEPDSSSGTGKAGQQPARKRLNFGQTGDADSVPDPQPLGQPPAAPSGLGTNTMATGSGAPMADNNEGADGVGNSSGNRHCDSTWMGDRVITTSTRTWALPTYNNHLYRQISSQSGASNDNHYFGYSTPWGYFDFNRFHCHFSPRDWQRLINNNWGFRPKRLNFKLFNIQVKEVTQNDGTTTIANNLTSTVQVFTDSEYQLPYVLGSAHQGCLPPFPADVFMVPQYGYLTLSNGSQAVGRSSFYCPEYFPSQMLRTGNNFTFSYTFEDVPFHSSYAHSQSLDRLMNPLIDQYLYYLSTTNTPSGTTTQSRLQFSQAGASDIRDQSRNWLPGPCYRQQRVSKTSADNNNSEYSWTGATKYHLNGRDSLVNPGPAMASHKDNEEKFFPQSGVLIFGKQGSEKTNVDIEKVMITDEEEIRTTNPVATEQYGSVSTNLQRGNRQAATADVNTQGVLPGMVWQDRDVYLQGPIWAKIPHTDGHFHPSPLMGGFGPKHPPPQILIKNTPVPANPSTTFSAAKFASFITQYSTGQVSVEIEWELQKENSKRWNPEIQYTSNYNKSVNVDFTVDTNGVYSEPRPIGTRYLTRNL

SEQ ID NO: 4947 - DNA, 2205 bp, Adeno-associated virus
  source 1..2205: mol_type = genomic DNA
atggctgccgatggttatcttccagattggctcgaggacactctctctgaaggaataagacagtggtggaagctcaaacctggcccaccaccaccaaagcccgcagagcggcataaggacgacagcaggggtcttgtgcttcctgggtacaagtacctcggacccttcaacggactcgacaagggagagccggtcaacgaggcagacgccgcggccctcgagcacgacaaggcctacgaccggcagctcgacagcggagacaacccgtacctcaagtacaaccacgccgacgcggagtttcaggagcgtcttaaagaagatacgtcttttgggggcaacctcggacgagcagtcttccaggcgaaaaagagggttcttgaacctctgggcctggttgaggaacctgttaagacggctccgggaaaaaagaggccggtagagcactctcctgcggagccagactcctcctcgggaaccggaaaagcgggccagcagcctgcaagaaaaagactgaatttcggtcagactggagacgcagactccgtacctgacccccagcctctcagacagccaccagcagcccccacaagtttgggatctactacaatggctacaggcagtggcgcaccaatggcagacaataacgagggtgccgatggagtgggtaattcctcaggaaattggcattgcgattcccaatggctgggcgacagagtcatcaccaccagcacccgaacctgggccctgcccacctacaacaaccacctttacaagcaaatctccagccaatcaggagcctcaaacgacaaccactactttggctacagcaccccctgggggtattttgacttcaacagattccactgccacttttcaccacgtgactggcaaagactcatcaacaacaactggggattccgacccaagagactcaacttcaagctctttaacattcaagtcaaagaggtcacgcagaatgacggtacgacgacgattgccaataaccttaccagcacggttcaggtgtttactgactcggagtaccagctcccgtacgtcctcggctcggcgcatcaaggatgcctcccgccgtttccagcggacgtcttcatggtcccacagtatggatacctcaccctgaacaacgggagtcaggcggtaggacgctcttccttttactgcctggagtactttccttctcagatgctgcgtactggaaacaactttcagttcagctacacttttgaagacgtgcctttccacagcagctacgctcacagccagagtttggatcggctgatgaatcctctgatcgaccagtacctgtattatctaaacagaacacaaacagctagtggaactcagcagtctcggctactgtttagccaagctggacccacaagcatgtctcttcaagctaaaaactggctgcctggaccgtgttatcgccagcagcgtttgtcaaagcaggcaaacgacaacaacaacagcaactttccctggactggagctaccaagtactacctcaatggcagagactctttggtgaacccgggcccggccatggccagccacaaggacgatgaagaaaagtttttccccatgcatggaaccctaatatttggtaaagaaggaacaaatgctaccaacgcggaattggaaaatgtcatgattacagatgaagaggaaatcaggaccaccaatcccgtggctacagagcagtacggatatgtgtcaaataatttgcaaaactcaaatactgctgcaagtactgaaactgtgaatcaccaaggagcattacctggtatggtgtggcaggatcgagacgtgtacctgcagggacccatttgggccaagattcctcacaccgatggacactttcatccttctccactgatgggaggttttggactcaaacacccgcctcctcagattatgatcaaaaacactcccgttccagccaatcctcccacaaacttcagttctgccaagtttgcttccttcatcacacagtattccacgggacaggtcagcgtggagatcgagtgggagctgcagaaggagaacagcaaacgctggaatcccgaaattcagtacacttccaactacaacaaatctgttaatgtggactttactgtggacactaatggtgtgtattcagagcctcgccccattggcaccagatacctgactcgtaatctgtaa

SEQ ID NO: 4948 - protein, 734 aa, Adeno-associated virus
MAADGYLPDWLEDTLSEGIRQWWKLKPGPPPPKPAERHKDDSRGLVLPGYKYLGPFNGLDKGEPVNEADAAALEHDKAYDRQLDSGDNPYLKYNHADAEFQERLKEDTSFGGNLGRAVFQAKKRVLEPLGLVEEPVKTAPGKKRPVEHSPAEPDSSSGTGKAGQQPARKRLNFGQTGDADSVPDPQPLRQPPAAPTSLGSTTMATGSGAPMADNNEGADGVGNSSGNWHCDSQWLGDRVITTSTRTWALPTYNNHLYKQISSQSGASNDNHYFGYSTPWGYFDFNRFHCHFSPRDWQRLINNNWGFRPKRLNFKLFNIQVKEVTQNDGTTTIANNLTSTVQVFTDSEYQLPYVLGSAHQGCLPPFPADVFMVPQYGYLTLNNGSQAVGRSSFYCLEYFPSQMLRTGNNFQFSYTFEDVPFHSSYAHSQSLDRLMNPLIDQYLYYLNRTQTASGTQQSRLLFSQAGPTSMSLQAKNWLPGPCYRQQRLSKQANDNNNSNFPWTGATKYYLNGRDSLVNPGPAMASHKDDEEKFFPMHGTLIFGKEGTNATNAELENVMITDEEEIRTTNPVATEQYGYVSNNLQNSNTAASTETVNHQGALPGMVWQDRDVYLQGPIWAKIPHTDGHFHPSPLMGGFGLKHPPPQIMIKNTPVPANPPTNFSSAKFASFITQYSTGQVSVEIEWELQKENSKRWNPEIQYTSNYNKSVNVDFTVDTNGVYSEPRPIGTRYLTRNL

SEQ ID NO: 4949 - DNA, 3160 bp, Adeno-associated virus
  source 1..3160: mol_type = genomic DNA
acccttcactaaagggactagtcctgcaggtttaaacgaattcgcccttgctgcgtcaactggaccaatgagaactttcccttcaacgactgtgtcgacaagatggtgatttggtgggaggaggggaagatgaccgccaaggtcgtggagtcggccaaagccattctcggaggaagcaaggtgcgcgtggaccagaaatgcaagtcctcggcccagatagatccgactcccgtgatcgtcacctccaacaccaacatgtgcgccgtgattgacgggaactcaacgaccttcgaacaccagcagccgttgcaagaccggatgttcaaatttgaactcacccgccgtctggatcatgactttgggaaggtcaccaagcgggaagtcaaagactttttccggtgggcaaaggatcacgtggttgaggtggagcatgaattctacgtcaaaaagggtggagccaagaaaagacccgcccctagtgacgcagatataagtgagcccaaacgggtgcgcgagtcagttgcgcagccatcgacgtcagacgcggaagcttcgatcaactacgcggacaggtaccaaaacaaatgttctcgtcacgtgggcatgaatctgatgctgtttccctgcagacaatgcgagagaatgaatcaaaattcaaatatctgcttcactcacggacagaaagactgtttagagtgctttcccgtgtcagaatctcaacctgtttctgtcgtcaaaaaggcgtatcagaaactgtgctacattcatcatatcatgggaaaggtgccagacgcttgcactgcctgcgatctggtcaatgtggatttggatgactgcatctctgaacaataaatgatttaaatcaggtatggctgccgatggttatcttccagattggctcgaggacactctctctgaaggaataagacagtggtggaagctcaaacctggcccaccaccaccaaagcccgcagagcggcataaggacgacagcaggggtcttgtgcttcctgggtacaagtacctcggacccttcaacggactcgacaagggagagccggtcaacgaggcagacgccgcggccctcgagcacgacaaggcctacgaccggcagctcgacagcggagacaacccgtacctcaagtacaaccacgccgacgcggagtttcaggagcgtcttaaagaagatacgtcttttgggggcaacctcggacgagcagtcttccaggcgaaaaagagggttcttgaacctctgggcctggttgaggaacctgttaagacggctccgggaaaaaagaggccggtagagcactctcctgcggagccagactcctcctcgggaaccggaaaagcgggccagcagcctgcaagaaaaagactgaatttcggtcagactggagacgcagactccgtacctgacccccagcctctcagacagccaccagcagcccccacaagtttgggatctactacaatggctacaggcagtggcgcaccaatggcagacaataacgagggtgccgatggagtgggtaattcctcaggaaattggcattgcgattcccaatggctgggcgacagagtcatcaccaccagcacccgaacctgggccctgcccacctacaacaaccacctttacaagcaaatctccagccaatcaggagcctcaaacgacaaccactactttggctacagcaccccctgggggtattttgacttcaacagattccactgccacttttcaccacgtgactggcaaagactcatcaacaacaactggggattccgacccaagagactcaacttcaagctctttaacattcaagtcaaagaggtcacgcagaatgacggtacgacgacgattgccaataaccttaccagcacggttcaggtgtttactgactcggagtaccagctcccgtacgtcctcggctcggcgcatcaaggatgcctcccgccgtttccagcggacgtcttcatggtcccacagtatggatacctcaccctgaacaacgggagtcaggcggtaggacgctcttccttttactgcctggagtactttccttctcagatgctgcgtactggaaacaactttcagttcagctacacttttgaagacgtgcctttccacagcagctacgctcacagccagagtttggatcggctgatgaatcctctgatcgaccagtacctgtattatctaaacagaacacaaacagctagtggaactcagcagtctcggctactgtttagccaagctggacccacaagcatgtctcttcaagctaaaaactggctgcctggaccgtgttatcgccagcagcgtttgtcaaagcaggcaaacgacaacaacaacagcaactttccctggactggagctaccaagtactacctcaatggcagagactctttggtgaacccgggcccggccatggccagccacaaggacgatgaagaaaagtttttccccatgcatggaaccctaatatttggtaaagaaggaacaaatgctaccaacgcggaattggaaaatgtcatgattacagatgaagaggaaatcaggaccaccaatcccgtggctacagagcagtacggatatgtgtcaaataatttgcaaaactcaaatactgctgcaagtactgaaactgtgaatcaccaaggagcattacctggtatggtgtggcaggatcgagacgtgtacctgcagggacccatttgggccaagattcctcacaccgatggacactttcatccttctccactgatgggaggttttggactcaaacacccgcctcctcagattatgatcaaaaacactcccgttccagccaatcctcccacaaacttcagttctgccaagtttgcttccttcatcacacagtattccacgggacaggtcagcgtggagatcgagtgggagctgcagaaggagaacagcaaacgctggaatcccgaaattcagtacacttccaactacaacaaatctgttaatgtggactttactgtggacactaatggtgtgtattcagagcctcgccccattggcaccagatacctgactcgtaatctgtaattgcttgttaatcaataaaccgtttaattcgtttcagttgaactttggtctctgcgaagggcgaattcgcggccgctaaatcaatcg

SEQ ID NO: 4950 - protein, 734 aa, Adeno-associated virus
MAADGYLPDWLEDTLSEGIRQWWKLKPGPPPPKPAERHKDDSRGLVLPGYKYLGPFNGLDKGEPVNEADAAALEHDKAYDRQLDSGDNPYLKYNHADAEFQERLKEDTSFGGNLGRAVFQAKKRVLEPLGLVEEPVKTAPGKKRPVEHSPAEPDSSSGTGKAGQQPARKRLNFGQTGDADSVPDPQPLGQPPAAPTSLGSTTMATGSGAPMADNNEGADGVGNSSGNWHCDSQWLGDRVITTSTRTWALPTYNNHLYKQISSQSGASNDNHYFGYSTPWGYFDFNRFHCRFSPRDWQRLINNNWGFRPKRLNFKLFNIQVKEVTQNDGTTTIANNLTSTVQVFTDSEYQLPYVLGSAHQGCLPPFPADVFMVPQYGYLTLNNGSQAVGRSSFYCLEYFPSQMLRTGNNFQFSYTFEDVPFHSSYAHSQGLDRLMNPLIDQYLYYLNRTQTASGTQQSRLLFSQAGPTSMSLQAKNWLPGPCYRQQRLSKQANDNNNSNFPWTGATKYHLNGGDSLVNPGPAMASHKDDEEKFFPMHGTLIFGKEGTNATNAELENVMITDEEEIRTTNPVATEQYGYVSNNLQNSNTAASTETVNHQGALPGMVWQDRDVYLRGPIWAKIPHADGHFHPSPLMGGFGLKHPPPQIMIKNTPVPANPPTNFSSAKFASFITQYSTGQVSVEIEWELQKENSKRWNPEIQYTSNYNKSVNVDFTVDTNGVYSEPRPIGTRYLTRNL

SEQ ID NO: 4951 - DNA, 3157 bp, Adeno-associated virus
  source 1..3157: mol_type = genomic DNA
ctcactaagggactagtcctgcaggtttaaacgaattcgcccttgctgcgtcaactggaccaatgagaactttcccttcaacgactgtgtcgacaagatggtgatttggtgggaggaggggaagatgaccgccaaggtcgtggagtcggccaaagccactctcggaggaagcaaggtgcgcgtggaccagaaacgcaagtcctcggcccagatagatccgactcccgtgatcgtcacctccaacaccaacatgtgcgccgtgattgacgggaactcaacgaccttcgaacaccagcagccgttgcaagaccgaatgttcaaatttgaactcacccgccgtctggatcatgacttcgggaaggtcaccaagcaggaagtcaaagactttttccggtgggcaaaggatcacgtggttgaggtggagcatgaattctacgtcaaaaagggtggagccaagaaaagacccgcccctagtgacgcagatataagtgagcccaaacgggtgcgcgagtcagttgcgcagccatcgacgtcagacgcggaagcttcgatcaactacgcggacaggtaccaaaacaaatgttctcgtcacgtgggcatgaatctgatgctgtttccctgcagacaatgcgagagaatgaatcaaaattcaaatatctgcttcactcacggacagaaagactgtttagagtgctttcccgtgtcagaatctcaacctgtttctgtcgtcaaaaaggcgtatcagaaactgtgctacattcatcatatcatgggaaaggtgccagacgcttgcactgcctgcgatctggtcaatgtggatttggatgactgcatctctgaacaataaatgatttaaatcaggtatggctgccgatggttatcttccagattggctcgaggacactctctctgaaggaataagacagtggtggaagctcaaacctggcccaccaccaccaaagcccgcagagcggcataaggacgacagcaggggtcttgtgcttcctgggtacaagtacctcggacccttcaacggactcgacaagggagagccggtcaacgaggcagacgccgcggctctcgagcacgacaaggcctacgaccggcagctcgacagcggagacaacccgtacctcaagtacaaccacgccgacgcggagtttcaggagcgtcttaaagaagatacgtcttttgggggcaacctcggacgagcagtcttccaggcgaaaaagagggttcttgaacctctgggcctggttgaggaacctgttaagacggctccgggaaaaaagaggccggtagagcactctcctgcggagccagactcctcctcgggaaccggaaaagcgggccagcagcctgcaagaaaaagactgaatttcggtcagactggagacgcagactccgtacctgacccccagcctctcggacagccaccagcagcccccacaagtttgggatctactacaatggctacaggcagtggcgcaccaatggcagacaataacgagggtgccgatggagtgggtaattcctcaggaaattggcattgcgattcccaatggctgggcgacagagtcatcaccaccagcacccgaacctgggccctgcccacctacaacaaccacctttacaagcaaatctccagccaatcaggagcctcaaacgacaaccactactttggctacagcaccccctgggggtattttgacttcaacagattccactgccgcttttcaccacgtgactggcaaagactcatcaacaacaactggggattccgacccaagagactcaacttcaagctctttaacattcaagtcaaagaggtcacgcagaatgacggtacgacgacgattgccaataaccttaccagcacggttcaggtgtttactgactcggagtaccagctcccgtacgtcctcggctcggcgcatcaaggatgcctcccgccgtttccagcggacgtcttcatggtcccacagtatggatacctcaccctgaacaacgggagtcaggcggtaggacgctcttccttttactgcctggagtactttccttctcagatgctgcgtactggaaacaactttcagttcagctacacttttgaagacgtgcctttccacagcagctacgctcacagccagggtttggatcggctgatgaatcctctgatcgaccagtacctgtattatctaaacagaacacaaacagctagtggaactcagcagtctcggctactgtttagccaagctggacccacaagcatgtctcttcaagctaaaaactggctgcctggaccgtgttatcgccagcagcgtttgtcaaagcaggcaaacgacaacaacaacagcaactttccctggactggagctaccaagtaccacctcaatggcggagactctttggtgaacccgggcccggccatggccagccacaaggacgatgaagaaaagtttttccccatgcatggaaccctaatatttggtaaagaaggaacaaatgctaccaacgcggaattggaaaatgtcatgattacagatgaagaggaaatcaggaccaccaatcccgtggctacagagcagtacggatatgtgtcaaataatttgcaaaactcaaatactgctgcaagtactgaaactgtgaatcaccaaggagcattacctggtatggtgtggcaggatcgagacgtgtacctgcggggacccatttgggccaagattcctcacgccgatggacactttcatccttctccactgatgggaggttttggactcaaacacccgcctcctcagattatgatcaaaaacactcccgttccagccaatcctcccacaaacttcagttctgccaagtttgcttccttcatcacacagtattccacgggacaggtcagcgtggagatcgagtgggagctgcagaaggagaacagcaaacgctggaatcccgaaattcagtacacttccaactacaacaaatctgttaatgtggactttactgtggacactaatggtgtgtattcagagcctcgccccattggcaccagatacctgactcgtaatctgtaattgcttgttaatcaataaaccgtttaattcgtttcagttgaactttggtctctgcgaagggcgaattcgcggccgctaaattcaattcg

SEQ ID NO: 4952 - protein, 734 aa, Adeno-associated virus
MAADGYLPDWLEDTLSEGIRQWWKLKPGPPPPKPAERHKDDSRGLVLPGYKYLGPFNGLDKGEPVNEADAAALEHDKAYDRQLDSGDNPYLKYNHADAEFQERLKEDTSFGGNLGRAVFQAKKRVLEPLGLVEEPVKTAPGKKRPVEHSPAEPDSSSGTGKAGQQPARKRLNFGQTGDADSVPDPQPLGQPPAAPTSLGSTTMATGSGAPMADNNEGADGVGNSSGNWHCDSQWLGDRVITTSTRTWALPTYNNHLYKQISSQSGASNDNHYFGYSTPWGYFDFNRFHCHFSPRDWQRLINNNWGFRPKRLNFKLFNIQVKEVTQNDGTTTIANNLTSTVQVFTDSEYQLPYVLGSAHQGCLPPFPADVFMVPQYGYLTLNNGSQAVGRSSFYCLECFPSQMLRTGNNFQFSYTFEDVPFHSSYAHSQSLDRLMNPLIDQYLYYLNRTQTASGTQQSRLLFSQAGPTSMSLQAKNWLPGPCYRQQRLSKQANDNNNSNFPWTGATKYHLNGRDSLVNPGPAMASHKDDEEKFFPMHGTLIFGKEGTNATNAELENVMITDEEEIRTTNPVATEQYGYVSNNLQNSNTAASTETVNHQGALPGMVWQDRDVYLQGPIWAKIPHTDGHFHPSPLMGGFGLKHPPPQIMIKNTPVPANPPTNFSSAKFASFITQYSTGQVSVEIEWELQKENSKRWNPEIQYTSNYNKSVNVDFTVDTNGVYSEPRPIGTRYLTRNL

SEQ ID NO: 4953 - DNA, 2208 bp, Adeno-associated virus
  source 1..2208: mol_type = genomic DNA
atggctgccgatggttatcttccagattggctcgaggacactctctctgaaggaataagacagtggtggaagctcaaacctggcccaccaccaccaaagcccgcagagcggcataaggacgacagcaggggtcttgtgcttcctggatacaagtacctcggacccttcaacggactcgacaagggagagccggtcaacgaggcagacgccgcggccctcgagcacgacaaggcctacgaccggcagctcgacagcggagacaacccgtacctcaagtacaaccacgccgacgcggagtttcaggagcgccttaaagaagatacgtcttttgggggcaacctcggacgagcagtcttccaggcgaaaaagagggttcttgaacctctgggcctggttgaggaacctgttaagacggctccgggaaaaaagaggccggtagagcactctcctgtggagccagactcctcctcgggaaccggaaaagcgggcaaccagcctgcaagaaaaagattgaatttcggtcagactggagacgcagactccgtacctgacccccagcctctcggacagccaccagcatccccctctggtctgggaactaatacgatggctacaggcagtggcgcaccaatggcagacaataacgagggcgccgacggagtgggtaattcctcgggaaattggcattgcgattccacatggatgggcgacagagtcgtcaccaccagcacccgcacctgggccctgcccacctacaacaaccacctctacaagcagatttccagccaatcaggagccagcaacgacaaccactactttggctacagcaccccttgggggtattttgacttcaacagattccactgccacttttcgccacgcgactggcagagactcatcaacaacaactggggattccggcccaaaagactcaacttcaagctgtttaacattcaagtcaaggaggtcacgcagaatgacggtacgacgacgattgccaataaccttaccagcacggttcaggtgtttactgacttggagtaccagctcccgtacgtcctcggctcggcgcatcaaggatgcctcccgccgttcccagcagacgtcttcatggtgccacagtatggatacctcaccctgaacaacgggagtcaggcggtaggacgctcttccttttactgcctggagtactttccttctcagatgcttcgcaccggaaacaactttaccttcagctacacttttgaagacgttcctttccacagcagctacgctcacagtcaaagtctggaccgtctcatgaatcctctcatcgaccagtacctgtattacttgagcagaacaaacactccaagcggaaccactacgcagtccaggcttcagttttctcaggccggagcgagtgacattcgggaccagtctaggaactggcttcctggaccctgttaccgccagcagcgagtatcaaagacagctgcggataacaacaacagtgaatactcgtggactggagctaccaagtaccacctcaatggcagagactctctggtgaatccgggcccggccatggccagccacaaggacgatgaagaaaagttttttcctcaaagcggggttctcatctttgggaagcaaggctcagagaaaacaaatgtggacattgaaaaggtcatgattacagacgaagaggaaatcaggaccaccaatcccgtggctacggagcagtatggttctgtatctaccaacctccagagcggcaacacacaagcagctacctcagatgtcaacacacaaggcgttcttccaggcatggtctggcaggacagagacgtgtacctgcaggggcccatctgggcaaaaattccacacacggacggacattttcacccctctcccctcatgggcggatttggacttaaacaccctcctccacagattctcattaagaataccccggtacctgcgaatccttcgaccaccttcagcgcggcaaagtttgcttccttcatcacacagtattccacggggcaggtcagcgtggagatcgagtgggagctgcagaaggagaacagcaaacgctggaatcccgaaattcagtacacttccaactacaacaaatctgttaatgtggactttactgtggacactaatggggtgtattcagagcctcgccctattggcaccagatacctgactcgtaatctgtaa

SEQ ID NO: 4954 - DNA, 3159 bp, Adeno-associated virus
  source 1..3159: mol_type = genomic DNA
gattgatttagcggccgcgaattcgcccttgctgcgtcaactggaccaatgagaactttcccttcaacgattgcgtcgacaagatggtgatctggtgggaggagggaaagatgaccgccaaggtcgtggagtcggccaaagccattctcggaggaagcaaggtgcgtgtggaccaaaagtgcaagtcttcggcccagatcgacccgactcccgtgatcgtcacctccaacaccaacatgtgcgccgtgattgatggaaactcaacgaccttcgagcaccagcagccgttgcaagaccggatgttcaaatttgaacttacccgccgtctggatcatgactttggaaaggtcaccaagcaggaagtgaaagactttttccggtgggcaaaggatcacgtggttgaggtggagcatgagttctacgtcaaaaagggtggagccaaaaaaagacccgcccccagtgacgcagatataagtgagcccaaacgggcgcgcgagtcagttgcgcagccatcgacgtcagacgcggaagcttcgatcaactacgcggacaggtaccaaaacaaatgttctcgtcacgtgggcatgaatctgatgctgtttccctgcagacaatgcgagagaatgaatcagaattcaaatatctgcttcactcacggacagaaagactgtccatagtgctttcccgtgtcagaatctcaacccgtttctgtcgtcaaaaaggcgtatcagaaactgtgctacattcatcacatcatgggaaaggtgccagacgcttgcactgcttgcgacctggtcaatgtggatttggatgactgcatctctgaacaataaatgatttaaatcaggtatggctgccgatggttatcttccagattggctcgaggacactctctctgaaggaataagacagtggtggaagctcaaacctggcccaccaccaccaaagcccgcagagcggcataaggacgacagcaggggtcttgtgcttcctggatacaagtacctcggacccttcaacggactcgacaagggagagccggtcaacgaggcagacgccgcggccctcgagcacgacaaggcctacgaccggcagctcgacagcggagacaacccgtacctcaagtacaaccacgccgacgcggagtttcaggagcgccttaaagaagatacgtcttttgggggcaacctcggacgagcagtcttccaggcgaaaaagagggttcttgaacctctgggcctggttgaggaacctgttaagacggctccgggaaaaaagaggccggtagagcactctcctgtggagccagactcctcctcgggaaccggaaaagcgggcaaccagcctgcaagaaaaagattgaatttcggtcagactggagacgcagactccgtacctgacccccagcctctcggacagccaccagcatccccctctggtctgggaactaatacgatggctacaggcagtggcgcaccaatggcagacaataacgagggcgccgacggagtgggtaattcctcgggaaattggcattgcgattccacatggatgggcgacagagtcgtcaccaccagcacccgcacctgggccctgcccacctacaacaaccacctctacaagcagatttccagccaatcaggagccagcaacgacaaccactactttggctacagcaccccttgggggtattttgacttcaacagattccactgccacttttcgccacgcgactggcagagactcatcaacaacaactggggattccggcccaaaagactcaacttcaagctgtttaacattcaagtcaaggaggtcacgcagaatgacggtacgacgacgattgccaataaccttaccagcacggttcaggtgtttactgacttggagtaccagctcccgtacgtcctcggctcggcgcatcaaggatgcctcccgccgttcccagcagacgtcttcatggtgccacagtatggatacctcaccctgaacaacgggagtcaggcggtaggacgctcttccttttactgcctggagtactttccttctcagatgcttcgcaccggaaacaactttaccttcagctacacttttgaagacgttcctttccacagcagctacgctcacagtcaaagtctggaccgtctcatgaatcctctcatcgaccagtacctgtattacttgagcagaacaaacactccaagcggaaccactacgcagtccaggcttcagttttctcaggccggagcgagtgacattcgggaccagtctaggaactggcttcctggaccctgttaccgccagcagcgagtatcaaagacagctgcggataacaacaacagtgaatactcgtggactggagctaccaagtaccacctcaatggcagagactctctggtgaatccgggcccggccatggccagccacaaggacgatgaagaaaagttttttcctcaaagcggggttctcatctttgggaagcaaggctcagagaaaacaaatgtggacattgaaaaggtcatgattacagacgaagaggaaatcaggaccaccaatcccgtggctacggagcagtatggttctgtatctaccaacctccagagcggcaacacacaagcagctacctcagatgtcaacacacaaggcgttcttccaggcatggtctggcaggacagagacgtgtacctgcaggggcccatctgggcaaaaattccacacacggacggacattttcacccctctcccctcatgggcggatttggacttaaacaccctcctccacagattctcattaagaataccccggtacctgcgaatccttcgaccaccttcagcgcggcaaagtttgcttccttcatcacacagtattccacggggcaggtcagcgtggagatcgagtgggagctgcagaaggagaacagcaaacgctggaatcccgaaattcagtacacttccaactacaacaaatctgttaatgtggactttactgtggacactaatggggtgtattcagagcctcgccctattggcaccagatacctgactcgtaatctgtaattgcttgttaatcaataaaccgtttaattcgtttcagttgaactttggtctctgcgaagggcgaattcgtttaaacctgcaggactagtccctttagtgagg

SEQ ID NO: 4955 - protein, 735 aa, Adeno-associated virus
MAADGYLPDWLEDTLSEGIRQWWKLKPGPPPPKPAERHKDDSRGLVLPGYKYLGPFNGLDKGEPVNEADAAALEHDKAYDRQLDSGDNPYLKYNHADAEFQERLKEDTSFGGNLGRAVFQAKKRVLEPLGLVEEPVKTAPGKKRPVEHSPVEPDSSSGTGKAGNQPARKRLNFGQTGDADSVPDPQPLGQPPASPSGLGTNTMATGSGAPMADNNEGADGVGNSSGNWHCDSTWMGDRVVTTSTRTWALPTYNNHLYKQISSQSGASNDNHYFGYSTPWGYFDFNRFHCHFSPRDWQRLINNNWGFRPKRLNFKLFNIQVKEVTQNDGTTTIANNLTSTVQVFTDLEYQLPYVLGSAHQGCLPPFPADVFMVPQYGYLTLNNGSQAVGRSSFYCLEYFPSQMLRTGNNFTFSYTFEDVPFHSSYAHSQSLDRLMNPLIDQYLYYLSRTNTPSGTTTQSRLQFSQAGASDIRDQSRNWLPGPCYRQQRVSKTAADNNNSEYSWTGATKYHLNGRDSLVNPGPAMASHKDDEEKFFPQSGVLIFGKQGSEKTNVDIEKVMITDEEEIRTTNPVATEQYGSVSTNLQSGNTQAATSDVNTQGVLPGMVWQDRDVYLQGPIWAKIPHTDGHFHPSPLMGGFGLKHPPPQILIKNTPVPANPSTTFSAAKFASFITQYSTGQVSVEIEWELQKENSKRWNPEIQYTSNYNKSVNVDFTVDTNGVYSEPRPIGTRYLTRNL

SEQ ID NO: 4956 - DNA, 2205 bp, Adeno-associated virus
  source 1..2205: mol_type = genomic DNA
atggctgccgatggttatcttccagattggctcgaggacactctctctgaaggaataagacagtggtggaagctcaaacctggcccaccaccaaagcccgcagagcggcataaggacgacagcaggggtcttgtgcttcctggatacaagtacctcggacccttcaacggactcgacaagggagagccggtcaacgaggcagacgccgcggccctcgagcacgacaaggcctacgaccggcagctcgacagcggagacaacccgtacctcaagtacaaccacgccgacgcggagtttcaggagcgccttaaagaagatacgtcttttgggggcaacctcggacgagcagtcttccaggcgaaaaagagggttcttgaacctctgggcctggttgaggaacctgttaagacggctccgggaaaaaagaggcccgtagagcactctcctgtggagccagactcctcctcgggaaccggaaaagcgggcaaccagcctgcaagaaaaagattgaatttcggtcagactggagacgcagactccgtacctgacccccagcctctcggacagccaccagcagccccctctggtctgggaactaatacgatggctacaggcagtggcgcaccaatggcagacaataacgagggcgccgacggagtgggtaattcctcgggagattggcattgcgattccacatggatgggcgacagagtcatcaccaccagcacccgcacctgggccctgcccacctacaacaaccacctctacaagcagatttccagccaatcaggagccagcaatgacaaccactactttggctacagcaccccttgggggtattttgacttcaacagattccactgccacttttcgccacgcgactggcagagactcatcaacaacaactggggattccggcccaaaagactcaacctcaagctgtttaacattcaagtcaaggaggtcacgcagaatgacggtacgacgacgattgccaataaccttaccagcacggttcaggtgtttactgacttggagtaccagctcccgtacgtcctcggctcggcgcatcaaggatgcctcccgccgttcccagcagacgtcttcatggtgccacagtatggatacctcaccctgaacaacgggagtcaggcggtaggacgctcttccttttactgcctggagtactttccttctcagatgcttcgtaccggaaacaactttaccttcagctacacttttgaagacgttcctttccacagcagctacgctcacagtcaaagtctggaccgtctcatgaatcctctcatcgaccagtacctgtattacttgagcagaacaaacactccaagcggaaccactacgcagtccaggcttcagttttctcaggccggagcgagtgacattcgggaccagtctaggaactggcttcctggaccctgttaccgccagcagcgagtatcaaagacagctgcggataacaacaacggtgaatactcgtggactggagctaccaagtaccacctcaatggcagagactctctggtgaatccgggcccggccatggccagccacaaggacgatgaagaaaagttttttcctcaaagcggggttctcatctttgggaagcaaggctcagagaaaacaaatgtggacattgaaaaggtcatgattacagacgaagaggaaatcaggaccaccaatcccgtggctacggagcagtatggttctgtatctaccaacctccagagcggcaacacacgagcagctacctcagatgtcaacacacaaggcgttcttccaggcatggtctggcaggacagagacgtgtacctgcaggggcccatctgggcaaaaattccacacacggacggacattttcacccctctcccctcatgggcggatttggacttaaacaccctcctccacagattctcattaagaataccccggtacctgcgaatccttcgaccaccttcagcgcggcaaagtttgcttccttcatcacacagtattccacggggcaggtcagcgtggagatcgagtgggagctgcagaaggagaacagcaaacgctggaatcccgaaattcagtacacttccaactacaacaaatctgttaatgtggactttactgtggacactaatggggtgtattcagagcctcgccctattggcaccagatacctgactcgtaatctgtaa

SEQ ID NO: 4957 - DNA, 3156 bp, Adeno-associated virus
  source 1..3156: mol_type = genomic DNA
cgattgaatttagcggccgcgaattcgcccttgctgcgtcaacggaccaatgagaactttcccttcaacgattgcgtcgacaagatggtgatctggtgggaggagggaaagatgaccgccaaggtcgtggagtcggccaaagccattctcggaggaagcaaggtgcgtgtggaccaaaagtgcaagtcttcggcccagatcgacccgactcccgtgatcgtcacctccaacaccaacatgtgcgccgtgattgatggaaactcaacgaccttcgagcaccagcagccgttgcaagaccggatgttcaaatttgaacttacccgccgtctggatcatgactttggaaaggtcaccaagcaggaagtgaaagactttttccggtgggcaaaggatcacgtggttgaggtggagcatgagttctacgtcaaaaagggtggagccaaaaaaagacccgcccccagtgacgcagatataagtgagcccaaacgggcgcgcgagtcagttgcgcagccatcgacgtcagacgcggaagcttcgatcaactacgcggacaggtaccaaaacaaatgttctcgtcacgtgggcatgaatctgatgctgtttccctgcagacaatgcgagcgaatgaatcagaattcaaatatctgcttcactcacggacagaaagactgtttagagtgctttcccgtgtcagaatctcaacccgtttctgtcgtcaaaaaggcgtatcagaaactgtgctacattcatcacatcatgggaaaggtgccagacgcttgcactgcttgcgacctggtcaatgtggatttggatgactgcatctctgaacaataaatgatttaaatcaggtatggctgccgatggttatcttccagattggctcgaggacactctctctgaaggaataagacagtggtggaagctcaaacctggcccaccaccaaagcccgcagagcggcataaggacgacagcaggggtcttgtgcttcctggatacaagtacctcggacccttcaacggactcgacaagggagagccggtcaacgaggcagacgccgcggccctcgagcacgacaaggcctacgaccggcagctcgacagcggagacaacccgtacctcaagtacaaccacgccgacgcggagtttcaggagcgccttaaagaagatacgtcttttgggggcaacctcggacgagcagtcttccaggcgaaaaagagggttcttgaacctctgggcctggttgaggaacctgttaagacggctccgggaaaaaagaggcccgtagagcactctcctgtggagccagactcctcctcgggaaccggaaaagcgggcaaccagcctgcaagaaaaagattgaatttcggtcagactggagacgcagactccgtacctgacccccagcctctcggacagccaccagcagccccctctggtctgggaactaatacgatggctacaggcagtggcgcaccaatggcagacaataacgagggcgccgacggagtgggtaattcctcgggagattggcattgcgattccacatggatgggcgacagagtcatcaccaccagcacccgcacctgggccctgcccacctacaacaaccacctctacaagcagatttccagccaatcaggagccagcaatgacaaccactactttggctacagcaccccttgggggtattttgacttcaacagattccactgccacttttcgccacgcgactggcagagactcatcaacaacaactggggattccggcccaaaagactcaacctcaagctgtttaacattcaagtcaaggaggtcacgcagaatgacggtacgacgacgattgccaataaccttaccagcacggttcaggtgtttactgacttggagtaccagctcccgtacgtcctcggctcggcgcatcaaggatgcctcccgccgttcccagcagacgtcttcatggtgccacagtatggatacctcaccctgaacaacgggagtcaggcggtaggacgctcttccttttactgcctggagtactttccttctcagatgcttcgtaccggaaacaactttaccttcagctacacttttgaagacgttcctttccacagcagctacgctcacagtcaaagtctggaccgtctcatgaatcctctcatcgaccagtacctgtattacttgagcagaacaaacactccaagcggaaccactacgcagtccaggcttcagttttctcaggccggagcgagtgacattcgggaccagtctaggaactggcttcctggaccctgttaccgccagcagcgagtatcaaagacagctgcggataacaacaacggtgaatactcgtggactggagctaccaagtaccacctcaatggcagagactctctggtgaatccgggcccggccatggccagccacaaggacgatgaagaaaagttttttcctcaaagcggggttctcatctttgggaagcaaggctcagagaaaacaaatgtggacattgaaaaggtcatgattacagacgaagaggaaatcaggaccaccaatcccgtggctacggagcagtatggttctgtatctaccaacctccagagcggcaacacacgagcagctacctcagatgtcaacacacaaggcgttcttccaggcatggtctggcaggacagagacgtgtacctgcaggggcccatctgggcaaaaattccacacacggacggacattttcacccctctcccctcatgggcggatttggacttaaacaccctcctccacagattctcattaagaataccccggtacctgcgaatccttcgaccaccttcagcgcggcaaagtttgcttccttcatcacacagtattccacggggcaggtcagcgtggagatcgagtgggagctgcagaaggagaacagcaaacgctggaatcccgaaattcagtacacttccaactacaacaaatctgttaatgtggactttactgtggacactaatggggtgtattcagagcctcgccctattggcaccagatacctgactcgtaatctgtaattgcttgttaatcaataaaccgtttaattcgtttcagttgaactttggtctctgcgaagggcgaattcgtttaaacctgcaggactagtccctttagtgag

SEQ ID NO: 4958 - protein, 734 aa, Adeno-associated virus
MAADGYLPDWLEDTLSEGIRQWWKLKPGPPPKPAERHKDDSRGLVLPGYKYLGPFNGLDKGEPVNEADAAALEHDKAYDRQLDSGDNPYLKYNHADAEFQERLKEDTSFGGNLGRAVFQAKKRVLEPLGLVEEPVKTAPGKKRPVEHSPVEPDSSSGTGKAGNQPARKRLNFGQTGDADSVPDPQPLGQPPAAPSGLGTNTMATGSGAPMADNNEGADGVGNSSGDWHCDSTWMGDRVITTSTRTWALPTYNNHLYKQISSQSGASNDNHYFGYSTPWGYFDFNRFHCHFSPRDWQRLINNNWGFRPKRLNLKLFNIQVKEVTQNDGTTTIANNLTSTVQVFTDLEYQLPYVLGSAHQGCLPPFPADVFMVPQYGYLTLNNGSQAVGRSSFYCLEYFPSQMLRTGNNFTFSYTFEDVPFHSSYAHSQSLDRLMNPLIDQYLYYLSRTNTPSGTTTQSRLQFSQAGASDIRDQSRNWLPGPCYRQQRVSKTAADNNNGEYSWTGATKYHLNGRDSLVNPGPAMASHKDDEEKFFPQSGVLIFGKQGSEKTNVDIEKVMITDEEEIRTTNPVATEQYGSVSTNLQSGNTRAATSDVNTQGVLPGMVWQDRDVYLQGPIWAKIPHTDGHFHPSPLMGGFGLKHPPPQILIKNTPVPANPSTTFSAAKFASFITQYSTGQVSVEIEWELQKENSKRWNPEIQYTSNYNKSVNVDFTVDTNGVYSEPRPIGTRYLTRNL

SEQ ID NO: 4959 - DNA, 2208 bp, Adeno-associated virus
  source 1..2208: mol_type = genomic DNA
atggctgccgatggttatcttccagattggctcgaggacactctctctgaaggaataagacagtggtggaagctcaaacctggcccaccaccaccaaagcccgcagagcggcataaggacgacagcaggggtcttgtgcttcctgggtacaagtacctcggacccttcaacggactcgacaagggagagccggtcaacgaggcagacgccgcggccctcgagcacgacaaggcctacgaccggcagctcgacagcggagacaacccgtacctcaagtacgaccacgccgacgcggagtttcaggagcgccttaaagaagatacgtcttttgggggcaacctcggacgagcagtcttccaggcaaaaaagagggttcttgaacctctgggcctggttgaggagcctgttaagacggctccgggaaaaaagaggccggtagagcactctcctgtggagccagactcctcctcgggaaccggaaaagcgggcaaccagcctgcaagaaagagattgaatttcggtcagactggagacgcagactccgtacctgacccccagcctctcggacagccaccagcagccccctctggtctgggaactaatacgatggctacaggcagtggcgcaccaatggcagacaataacgatggcgccgacggagtgggtaattcctcgggaaattggcattgcgattccacatggatgggcgacagagtcatcaccaccagcacccgaacctgggctctgcccacctacaacaaccatctgtacaagcagatttccagccaatcaggagccagcaacgacaaccactactttggctacagcaccccttgggggtattttgacttcaacagattccactgccacttttcaccacgtgactggcaaagactcatcaacaacaactggggattccggcccaagagactcaacttcaagctctttaacattcaagtcagagaggtcacgcagaatgatggtacgacgacgattgccaataaccttaccagcacggttcaggtgtttactgactcggagtaccagctcccgtacgtcctcggctcggcgcatcaaggatgcctcccgccgttcccagcagacgtcttcatggtgccacagtatggatacctcaccctgaacaacgggagtcaggcagtaggacgctcttcattttactgcctggagtacttcccttctcagatgctgcgtaccggaaacaactttaccttcagctacacctttgaggatgttcctttccacagcagctacgctcacagccagagtttggaccgtctcatgaatcctctcatcgaccagtacctgtattacttgagcagaacaaacactccaagcggaaccaccacgcagtccaggcttcagttttctcaggccggagcgagtgacattcgggatcagtctaggaactggcttcctggaccctgttaccgccagcagcgagtatcaaagacatctgcggacaacaacaacagtgaatactcgtggattggagctaccaagtaccacctcaatggcagagactctctggtgaatccgggcccggcaatggccagccacaaggacgatgaagaaaagttttttcctcagagcggggttctcatctttggaaaacaaggatcagagaaaacaaatgtggacattgaaaaggtcatgattacagacgaagaggaaatcagaaccaccaatcccgtggccacggagcagtatggttctgtatctaccaacctccagagcggcaacacacaagcatctactgcagatgtcaacacacaaggcgttcttccaggcatggtctggcaggacagagacgtgtacctgcaggggcctatctgggcaaagattccgcacacggacggacattttcacccctctcccctcatgggcggattcggacttaaacaccctcctccacagattctcatcaaaaacaccccggtacctgcgaatccttcgaccaccttcagtgcggcaaagtttgcttccttcatcacacagtattccacggggcgggtcagcgtggagatcgagtgggagctacagaaggagaacagcaaacgctggaatcccgagatccagtacacttccaactacaacaaatctgttaatgtggactttactgtggacactaatggtgtgtattcagagcctcgccccattggcaccagatacctgactcgtaatctgtaa

SEQ ID NO: 4960 - protein, 735 aa, Adeno-associated virus
MAADGYLPDWLEDTLSEGIRQWWKLKPGPPPPKPAERHKDDSRGLVLPGYKYLGPFNGLDKGEPVNEADAAALEHDKAYDRQLDSGDNPYLKYDHADAEFQERLKEDTSFGGNLGRAVFQAKKRVLEPLGLVEEPVKTAPGKKRPVEHSPVEPDSSSGTGKAGNQPARKRLNFGQTGDADSVPDPQPLGQPPAAPSGLGTNTMATGSGAPMADNNDGADGVGNSSGNWHCDSTWMGDRVITTSTRTWALPTYNNHLYKQISSQSGASNDNHYFGYSTPWGYFDFNRFHCHFSPRDWQRLINNNWGFRPKRLNFKLFNIQVREVTQNDGTTTIANNLTSTVQVFTDSEYQLPYVLGSAHQGCLPPFPADVFMVPQYGYLTLNNGSQAVGRSSFYCLEYFPSQMLRTGNNFTFSYTFEDVPFHSSYAHSQSLDRLMNPLIDQYLYYLSRTNTPSGTTTQSRLQFSQAGASDIRDQSRNWLPGPCYRQQRVSKTSADNNNSEYSWIGATKYHLNGRDSLVNPGPAMASHKDDEEKFFPQSGVLIFGKQGSEKTNVDIEKVMITDEEEIRTTNPVATEQYGSVSTNLQSGNTQASTADVNTQGVLPGMVWQDRDVYLQGPIWAKIPHTDGHFHPSPLMGGFGLKHPPPQILIKNTPVPANPSTTFSAAKFASFITQYSTGRVSVEIEWELQKENSKRWNPEIQYTSNYNKSVNVDFTVDTNGVYSEPRPIGTRYLTRNL

SEQ ID NO: 4961 - DNA, 2217 bp, Adeno-associated virus
  source 1..2217: mol_type = genomic DNA
atggctgccgatggttatcttccagattggctcgaggacaacctctctgagggcattcgcgagtggtgggacttgaaacctggagccccgaaacccaaagccaaccagcaaaagcaggacgacggccggggtctggtgcttcctggctacaagtacctcggacccttcaacggactcgacaagggggagcccgtcaacgcggcggacgcagcggccctcgagcacgacaaggcctacgaccagcagctcaaagcgggtgacaatccgtacctgcggtataaccacgccgacgccgagtttcaggagcgtctgcaagaagatacgtcttttgggggcaacctcgggcgagcagtcttccaggccaagaagcgggttctcgaacctctcggtctggttgaggaaggcgctaagacggctcctggaaagaagagaccggtagagccatcaccccagcgttctccagactcctctacgggcatcggcaagacaggccagcagcccgcgaaaaagagactcaactttgggcagactggcgactcagagtcagtgcccgaccctcaaccaatcggagaaccccccgcaggcccctctggtctgggatctggtacaatggctgcaggcggtggcgctccaatggcagacaataacgaaggcgccgacggagtgggtagttcctcaggaaattggcattgcgattccgcatggctgggcgacagagtcatcaccaccagcacccgaccctgggccctccccacctacaacaaccacctctacaagcaaatctccaacgggacatcgggaggaagcaccaacgacaacacctacttcggctacagcaccccctgggggtattttgactttaacagattccactgccacttctcaccacgtgactggcagcgactcatcaacaacaactggggattccggcccaagagactcaacttcaagctcttcaacatccaggtcaaggaggtcacgcagaatgaaggcaccaagaccatcgccaataaccttaccagcacgattcaggtctttacggactcggaataccagctcccgtacgtcctcggctctgcgcaccagggctgcccgcctccgttcccggcggacgtcttcatgattcctcagtacgggtacctgactctgaacaacggcagtcaggccgtgggccgttcctccttctactgcctggagtactttccttctcaaatgcggagaacgggcaacaactttgagttcagctaccagtttgaggacgtgccttttcacagcagctacgcgcatagccaaagcctggaccggctgatgaaccccctcatcgaccagtacctgtactacctgtctcggactcagtccacgggaggtaccgcaggaactcagcagttgctattttctcaggccgggcctaataacatgtcggctcaggccaaaaactggctacccgggccctgctaccggcagcaacgcgtctccacgacactgtcgcaaaataacaacagcaactttgcttggaccggtgccaccaagtatcatctgaatggcagagactctctggtaaatcccggtgtcgctatggcaacgcacaaggacgacgaagagcgattttttccatccagcggagtcttgatgtttgggaaacagggagctggaaaagacaacgtggactatagcagcgttatgctaaccagtgaggaagaaatcaaaaccaccaacccagtggccacagaacagtacggcgtggtggccgataacctgcaacagcaaaacgccgctcctattgtaggggccgtcaacagtcaaggagccttacctggcatggtctggcagaaccgggacgtgtacctgcagggtcctatctgggccaagattcctcacacggacggcaactttcatccttcgccgctgatgggaggctttggactgaaacacccgcctcctcagatcctgattaagaatacacctgttcccgcggatcctccaactaccttcagtcaagccaagctggcgtcgttcatcacgcagtacagcaccggacaggtcagcgtggaaattgaatgggagctgcagaaagagaacagcaagcgctggaacccagagattcagtatacttccaactactacaaatctacaaatgtggactttgctgtcaatactgagggtacttattcagagcctcgccccattggcacccgttacctcacccgtaacctgtaa

SEQ ID NO: 4962 - protein, 738 aa, Adeno-associated virus
MAADGYLPDWLEDNLSEGIREWWDLKPGAPKPKANQQKQDDGRGLVLPGYKYLGPFNGLDKGEPVNAADAAALEHDKAYDQQLKAGDNPYLRYNHADAEFQERLQEDTSFGGNLGRAVFQAKKRVLEPLGLVEEGAKTAPGKKRPVEPSPQRSPDSSTGIGKTGQQPAKKRLNFGQTGDSESVPDPQPIGEPPAGPSGLGSGTMAAGGGAPMADNNEGADGVGSSSGNWHCDSAWLGDRVITTSTRPWALPTYNNHLYKQISNGTSGGSTNDNTYFGYSTPWGYFDFNRFHCHFSPRDWQRLINNNWGFRPKRLNFKLFNIQVKEVTQNEGTKTIANNLTSTIQVFTDSEYQLPYVLGSAHQGCPPPFPADVFMIPQYGYLTLNNGSQAVGRSSFYCLEYFPSQMRRTGNNFEFSYQFEDVPFHSSYAHSQSLDRLMNPLIDQYLYYLSRTQSTGGTAGTQQLLFSQAGPNNMSAQAKNWLPGPCYRQQRVSTTLSQNNNSNFAWTGATKYHLNGRDSLVNPGVAMATHKDDEERFFPSSGVLMFGKQGAGKDNVDYSSVMLTSEEEIKTTNPVATEQYGVVADNLQQQNAAPIVGAVNSQGALPGMVWQNRDVYLQGPIWAKIPHTDGNFHPSPLMGGFGLKHPPPQILIKNTPVPADPPTTFSQAKLASFITQYSTGQVSVEIEWELQKENSKRWNPEIQYTSNYYKSTNVDFAVNTEGTYSEPRPIGTRYLTRNL

SEQ ID NO: 4963 - protein, 735 aa, Adeno-associated virus
MAADGYLPDWLEDTLSEGIRQWWKLKPGPPPPKPAERHKDDSRGLVLPGYKYLGPFNGLDKGEPVNEADAAALEHDKAYDRQLDSGDNPYLKYNHADAEFQERLKEDTSFGGNLGRAVFQAKKRVLEPLGLVEEPVKTAPGKKRPVEHSPVEPDSSSGTGKAGQQPARKRLNFGQTGDADSVPDPQPLGQPPAAPSGLGSTTMATGSGAPMADNNEGADGVGNSSGNWHCDSQWLGDRVITTSTRTWALPTYNNHLYKQISSQSGASNDNHYFGYSTPWGYFDFNRFHCHFSPRDWQRLINNNWGFRPKRLNFKLFNIQVKEVTQNDGTTTIANNLTSTVQVFTDSEYQLPYVLGSAHQGCLPPFPADVFMVPQYGYLTLNNGSQAVGRSSFYCLEYFPSQMLRTGNNFQFSYTFEDVPFHSSYAHSQSLDRLMNPLVDQYLYYLNKTQTNSGTLQQSRLLFSQAGPTNMSLQAKNWLPGPCYRQQRLSKQANDNNNSNFPWTAATKYHLNGRDSLVNPGPAMASHKDDEEKFFPMHGTLIFGKQGTNANDADLENVMITDEEEIRTTNPVATEQYGTVSNNLQNSNTGPTTGTVNHQGALPGMVWQDRDVYLQGPIWAKIPHTDGHFHPSPLMGGFGLKHPPPQIMIKNTPVPANPPTNFSSAKFASFITQYSTGQVSVEIEWELQKENSKRWNPEIQYTSNYNKSVNVDFTVDTNGVYSEPRPIGTRYLTRNL

SEQ ID NO: 4964 - DNA, 3158 bp, Adeno-associated virus
  source 1..3158: mol_type = genomic DNA
gattgaatttagcggccgcgaattcgcccttgctgcgtcaactggaccaatgagaactttcctttcaatgattgcgtcgacaagatggtgatctggtgggaggagggaaagatgaccgccaaggtcgtggagtcggccaaagccattctcggaggaagcaaggtgcgcgcggaccagaaatgcaagtcctcggcccagatagacccgactcccgtgattgtcacctccaacaccaacatgtgcgccgtgattgacgggaactcaacgaccttcgaacaccagcagccgttgcaagaccggatgttcaaatttgaactcacccgccgtctggatcatgactttgggaaggtcaccaagcaggaagtcaaagactttttccggtgggcaaaggatcacgtggttgaggtggagcatgaattctacgtcaaaaagggtggagctaagaaaagacccgcccccagtgacgcagatataagtgagcccaaacgggcgcgcgagtcagttgcgcagccatcgacgtcagacgcggaagcttcgatcaactacgcgggcaggtaccaaaacaaatgttctcgtcacgtgggcatgaatctgatgctgtttccctgcagacaatgcgagagaatgaatcagaattcaaatatctgcttcactcacggacagaaagactgtttagagtgctttcccgtgtcagaatctcaacccgtttctgtcgtcaaaaaggcgtatcagaaactttgctacattcatcatatcatgggaaaggtgccagacgcttgcactgcctgcgatctggtcaatgtggatttggatgactgcatctctgaacaataaatgatttaaatcaggtatggctgccgatggttatcttccagattggctcgaggacactctctctgaaggaataagacagtggtggaagctcaaacctggcccaccaccaccaaagcccgcagagcggcataaggacgacagcaggggtcttgtgcttcctgggtacaagtacctcggacccttcaacggactcgacaagggggagccggtcaacgaggcagacgccgcggccctcgagcacgacaaggcctacgaccggcagctcgacagcggagacaacccgtacctcaagtacaaccacgccgacgcggagtttcaggagcgccttaaagaagatacgtcttttgggggcaacctcggacgagcagtcttccaggcaaaaaagagggttcttgaacctctgggcctggttgaggaacctgttaaaacggctccgggaaaaaagaggccggtagagcactctcctgtggagccagactcctcctcgggaaccggaaaagcgggccagcagcctgcaagaaaaagattgaatttcggtcagactggagacgcagactccgtacctgacccccagcctctcggacagccaccagcagccccctctggtctgggatctactacaatggctacaggcagtggcgcaccaatggcagacaataacgagggtgccgatggagtgggtaattcctcgggaaattggcattgcgattcccaatggctgggcgacagagtcatcaccaccagcacccgcacctgggccctgcccacctacaacaaccacctctacaagcaaatctccagccaatcaggagcctcaaacgacaaccactactttggctacagcaccccctgggggtattttgacttcaacagattccactgccacttttcaccacgtgactggcaaagactcatcaacaacaactggggattccgacccaagagactcaacttcaagctctttaacattcaagtcaaagaggtcacgcagaatgacggtacgacgacgattgccaataaccttaccagcacggttcaggtgtttactgactcggagtaccagctcccgtacgtcctcggctcggcgcatcaaggatgcctcccgccgtttccagcggacgtcttcatggtcccacagtatggatacctcaccctgaacaacgggagtcaggcagtaggacgctcttcattttactgcctggagtactttccttctcagatgctgcgtaccggaaacaactttcaattcagctacacttttgaagacgtgcctttccacagcagctacgctcacagccagagtctggatcggctgatgaatcctctggtcgaccagtacctgtattatctgaacaagacacaaacaaatagtggaactcttcagcagtctcggctactgtttagccaagctggacccaccaacatgtctcttcaagctaaaaactggctgcctggaccttgctacagacagcagcgtctgtcaaagcaggcaaacgacaacaacaacagcaactttccctggactgcagctacaaagtatcatctaaatggccgggactcgttggttaatccaggaccagctatggccagtcacaaggatgacgaagaaaagtttttccccatgcatggaacccttatatttggtaaacaaggaacaaatgccaacgacgcggatttggaaaatgtcatgattacagatgaagaagaaatcaggaccaccaatcccgtggctacggagcagtacggaactgtatcaaataatttgcaaaactcaaacactggtccaactactggaactgtcaatcaccaaggagcgttacctggtatggtgtggcaggatcgagacgtgtacctgcagggacccatttgggccaagattcctcacaccgatggacactttcatccttctccactgatgggaggttttggactcaaacacccacctcctcaaatcatgatcaaaaacactcccgttccagccaatcctcccacaaacttcagttctgccaagtttgcttctttcatcacacagtattccacggggcaggtcagcgtggagatcgagtgggagctgcagaaggagaacagcaaacgctggaatcccgaaattcagtacacttccaactacaacaaatctgttaatgtggactttactgtggacactaatggtgtgtattcagagcctcgccccattggcaccagatacctgactcgtaatctgtaattgcttgttaatcaataaaccgtttaattcgtttcagttgaactttggtctctgcgaagggcgaattcgtttaaacctgcaggactagtccctttagtga

SEQ ID NO: 4965 - protein, 735 aa, Adeno-associated virus
MAADGYLPDWLEDTLSEGIRQWWKLKPGPPPPKPAERHKDDSRGLVLPGYKYLGPFNGLDKGEPVNEADAAALEHDKAYDRQLDSGDNPYLKYNHADAEFQERLKEDTSFGGNLGRAVFQAKKRVLEPLGLVEEPVKTAPGKKRPVEHPPVEPDSSSGTGKAGQQPARKRLNFGQTGDADSVPDPQPLGQPPAAPSGLGSTTMATGSGAPMADNNEGADGVGNSSGNWHCDSQWLGDRVITTSTRTWALPTYNNHLYKQISSQSGASNDNHYFGYSTPWGYFDFNRFHCHFSPRDWQRLINNNWGFRPKRLNFKLFNIQVKEVTQNDGTTTIANNLTSTVQVFTDSEYQLPYVLGSAHQGCLPPFPADVFMVPQYGYLTLNNGSQAVGRSSFYCLEYFPSQMLRTGNNFQFSYTFEDVPFHSSYAHSQSLDRLMNPLIDQYLYYLNKTQTNSGTLQQSRLLFSQAGPTNMSLQAKNRLPGPCYRQQRLSKQANDNNNSNFPWTAATKYHLNGRDSLVNPGPAMASHKDDEEKFFPMHGTLIFGKQGTNANDADLENVMITDEEEIRTTNPVATEQYGTVSNNLQNSNTGPTTGTVNHQGALPGMVWQDRDVYLQGPIWAKIPHTDGHFHPSPLVGGFGLKHPPPQIMIKNTPVPANPPTNFSSAKFASFITQYSTGQVSVEIEWELQKENSKRWNPEIQYTSNYNKSVNVDFTVDTNGVYSEPRPIGTRYLTRNL

SEQ ID NO: 4966 - DNA, 3159 bp, Adeno-associated virus
  source 1..3159: mol_type = genomic DNA
gattgaatttagcggccgcgaattcgcccttgctgcgtcaactggaccaatgagaactttcctttcaatgattgcgtcgacaagatggtgatctggtgggaggagggaaagatgaccgccaaggtcgtggagtcggccaaagccattctcggaggaagcaaggtgcgcgtggaccagaaatgcaagtcctcggcccagatagacccgactcccgtgattgtcacctccaacaccgacatgtgcgccgtgattgacgggaactcaacgaccttcgaacaccagcagccgttgcaagaccggatgttcaaatttgaactcacccgccgtctggatcatgactttgggaaggtcaccaagcaggaagtcaaagactttttccggtgggcaaaggatcacgtggttgaggtggagcatgaattctacgtcaaaaagggtggagctaagaaaagacccgcccccagtgacgcagatataagtgagcccaaacgggcgcgcgagtcagttgcgcagccatcgacgtcagacgcggaagcttcgatcaactacgcggacaggtaccaaaacaaatgttctcgtcacgtgggcatgaatctgatgctgtttccctgcagacaatgcgagagaatgaatcagaattcaaatatctgcttcactcacggacagaaagactgtttagagtgctttcccgtgtcagaatctcaacccgtttctgtcgtcaaaaaggcgtatcagaaactttgctacattcatcatatcatgggaaaggtgccagacgcttgcactgcctgcgatctggtcaatgtggatttggatgactgcatctctgaacaataaatgatttaaatcaggtatggctgccgatggttatcttccagattggctcgaggacactctctctgaaggaataagacagtggtggaagctcaaacctggcccaccaccaccaaagcccgcagagcggcataaggacgacagcaggggtcttgtgcttcctgggtacaagtacctcggacccttcaacggactcgacaagggggagccggtcaacgaggcagacgccgcggccctcgagcacgacaaggcctacgaccggcagctcgacagcggagacaacccgtacctcaagtacaaccacgccgacgcggagtttcaggagcgccttaaagaagatacgtcttttgggggcaacctcggacgagcagtcttccaggcaaaaaagagggttcttgaacctctgggcctggttgaggaacctgttaaaacggctccgggaaaaaagaggccggtagagcaccctcctgtggagccagactcctcctcgggaaccggaaaagcgggccagcagcctgcaagaaaaagattgaatttcggtcagactggagacgcagactccgtacctgacccccagcctctcggacagccaccagcagccccctctggtctgggatctactacaatggctacaggcagtggcgcaccaatggcagacaataacgagggtgccgatggagtgggtaattcctcgggaaattggcattgcgattcccaatggctgggcgacagagtcatcaccaccagcacccgcacctgggccctgcccacctacaacaaccacctctacaagcaaatctccagccaatcaggagcctcaaacgacaaccactactttggctacagcaccccctgggggtattttgacttcaacagattccactgccacttttcaccacgtgactggcaaagactcatcaacaacaactggggattccgacccaagagactcaacttcaagctctttaacattcaagtcaaagaggtcacgcagaatgacggtacgacgacgattgccaataaccttaccagcacggttcaggtgtttactgactcggagtaccagctcccgtacgtcctcggctcggcgcatcaaggatgcctcccgccgtttccagcggacgtcttcatggtcccacagtatggatacctcaccctgaacaacgggagtcaggcagtaggacgctcttcattttactgcctggagtactttccttctcagatgctgcgtaccggaaacaactttcagttcagctacacttttgaagacgtgcctttccacagcagctacgctcacagccagagtctggatcggctgatgaatcctctgatcgaccagtacctgtattatctgaacaagacacaaacaaatagtggaactcttcagcagtctcggctactgtttagccaagctggacccaccaacatgtctcttcaagctaaaaaccggctgcctggaccttgctacagacagcagcgtctgtcaaagcaggcaaacgacaacaacaacagcaactttccctggaccgcagctacaaagtatcatctaaatggccgggactcgttggttaatccaggaccagctatggccagtcacaaggatgacgaagaaaagtttttccccatgcatggaacccttatatttggtaaacaaggaacaaatgccaacgacgcggatttggaaaatgtcatgattacagatgaagaagaaatcaggaccaccaatcccgtggctacggagcagtacggaactgtatcaaataatttgcaaaactcaaacactggtccaactactggaactgtcaatcaccaaggagcgttacctggtatggtgtggcaggatcgagacgtgtacctgcagggacccatttgggccaagattcctcacaccgatggacactttcatccttctccactggtgggaggttttggactcaaacacccacctcctcaaatcatgatcaaaaacactcccgttccagccaatcctcccacaaacttcagttctgccaagtttgcttctttcatcacacagtattccacggggcaggtcagcgtggagatcgagtgggagctgcagaaggagaacagcaaacgctggaatcccgaaattcagtacacttccaactacaacaaatctgttaatgtggactttactgtggacactaatggtgtgtattcagagcctcgccccattggcaccagatacctgactcgtaatctgtaattgcttgttaatcaataaaccgtttaattcgtttcagttgaactttggtctctgcgaagggcgaattcgtttaaacctgcaggactagtccctttagtgag

SEQ ID NO: 4967 - DNA, 2208 bp, Adeno-associated virus
  source 1..2208: mol_type = genomic DNA
atggctgccgatggttatcttccagattggctcgaggacactctctctgaaggaataagacagtggtggaagctcaaacctggcccaccaccaccaaagcccgcagagcggcataaggacgacagcaggggtcttgtgcttcctgggtacaagtaccttggacccttcaacggactcgacaagggagagccggtcaacgaggcagacgccgcggccctcgagcacgacaaggcctacgaccggcagctcgacagcggagacaacccgtaccccaagtacaaccacgccgacgcggagttccaggagcgtcttaaagaagatacgtcttttgggggcaacctcggacgagcagtcttccaggcgaaaaagagggttcttgaacctctgggcctggttgaggaacctgttaagacggctccgggaaaaaagaggccggtagagcactctcctgcggagccagactcctcctcgggaaccggaaaagcgggccagcagcctgcaagaaagagattgaatttcggtcagactggagacgcagactccgtacctgacccccagcctctcggacagccaccagcagccccctctggtctgggaactaatacgatggctacaggcagtggcgcaccaatggcagacaataacgagggcgccgacggagtgggtaattcctcgggaaattggcattgcgattccacatggatgggcgacagagtcatcaccaccagcacccgcacctgggctctgcccacctacaacaaccacctctacaagcagatttccagccaatcaggagcctcaaacgacaaccactactttggctacagcaccccttgggggtattttgacttcaacagattccactgccacttttcgccacgtgactggcaaagactcatcaacaacaattggggattccggcccaaaagactcaacttcaagctctttaacattcaagtcaaggaggtcacgcagaatgacggtacgacgacgattgccaataaccttaccagcacggttcaggtgtttactgactcggagtaccagctcccgtacgtcctcggctcggcgcatcaaggatgcctcccgccgttcccagcagacgtcttcatggtgccacagtatggatacctcaccctgaacaacgggagtcaggcagtaggacgctcttcattttactgcctggagtactttccttctcagatgctgcgtaccggaaacaactttaccttcagctacacctttgaggacgttcctttccacagcagctacgcccacagccagagtttggaccgtctcatgaatcctctcatcgaccagtacctgtattacttgagcagaacaaacactccaagcggaaccaccacgcagtcaaggcttcagttttctcaggccggagcaagtgacattcgggaccagtctaggaactggcttcctggaccctgttaccgccagcagcgagtatcaaagacatctgcggataacaacaacagtgaatactcgtggactggagctaccaagtaccaccttaatggaagagactctctggtgaatccgggcccggccatggccagccacaaggacgatgaagaaaagttttttcctcagagcggggttctcatctttggaaaacaagactcgggaaaaactaatgtggacattgaaaaggtcatgattacagacgaagaggaaatcaggaccaccaatcccgtggctacggagcagtatggttctgtatctaccaacctccagagcggcaacacacaagcagctacctcagatgtcaacacacaaggcgttcttccaggcatggtgtggcaggacagagacgtgtacctgcaggggcccatctgggcaaagattccacacacggacggacattttcacccctctcccctcatgggcggattcggacttaaacaccctcccccgcagattctcatcaagaacaccccggtacctgcgaatccttcgactaccttcagtgcggcaaagtttgcttccttcattacacagtactccacggggcaggtcagcgtggagatcgagtgggagctgcagaaggagaacagcaaacgctggaatcccgagattcagtacacttccaactacaacaaatctgttaatgtggactttactgtggacactaatggtgtgtattcagagcctcgccccattggcaccaggtacctgactcgtaatctgtaa

SEQ ID NO: 4968 - protein, 735 aa, Adeno-associated virus
MAADGYLPDWLEDTLSEGIRQWWKLKPGPPPPKPAERHKDDSRGLVLPGYKYLGPFNGLDKGEPVNEADAAALEHDKAYDRQLDSGDNPYPKYNHADAEFQERLKEDTSFGGNLGRAVFQAKKRVLEPLGLVEEPVKTAPGKKRPVEHSPAEPDSSSGTGKAGQQPARKRLNFGQTGDADSVPDPQPLGQPPAAPSGLGTNTMATGSGAPMADNNEGADGVGNSSGNWHCDSTWMGDRVITTSTRTWALPTYNNHLYKQISSQSGASNDNHYFGYSTPWGYFDFNRFHCHFSPRDWQRLINNNWGFRPKRLNFKLFNIQVKEVTQNDGTTTIANNLTSTVQVFTDSEYQLPYVLGSAHQGCLPPFPADVFMVPQYGYLTLNNGSQAVGRSSFYCLEYFPSQMLRTGNNFTFSYTFEDVPFHSSYAHSQSLDRLMNPLIDQYLYYLSRTNTPSGTTTQSRLQFSQAGASDIRDQSRNWLPGPCYRQQRVSKTSADNNNSEYSWTGATKYHLNGRDSLVNPGPAMASHKDDEEKFFPQSGVLIFGKQDSGKTNVDIEKVMITDEEEIRTTNPVATEQYGSVSTNLQSGNTQAATSDVNTQGVLPGMVWQDRDVYLQGPIWAKIPHTDGHFHPSPLMGGFGLKHPPPQILIKNTPVPANPSTTFSAAKFASFITQYSTGQVSVEIEWELQKENSKRWNPEIQYTSNYNKSVNVDFTVDTNGVYSEPRPIGTRYLTRNL

SEQ ID NO: 4969 - DNA, 2208 bp, Adeno-associated virus
  source 1..2208: mol_type = genomic DNA
atggctgccgatggttatcttccagattggctcgaggacactctctctgaaggaataagacagtggtggaagctcaaacctggcccaccaccaccaaagcccgcagagcggcataaggacgacagcaggggtcttgtgcttcctgggtacaagtaccttggacccttcaacggactcgacaagggagagccggtcaacgaggcagacgccgcggccctcgagcacgacaaggcctacgaccggcagctcgacggcggagacaacccgtacctcaagtacaaccacgccgacgcggagttccaggagcgtcttaaagaagatacgtcttttgggggcaacctcggacgagcagtcttccaggcgaaaaagagggttcttgaacctctgggcctggttgaggaacctgttaagacggctccgggaaaaaagaggccggtagagcactctcttgcggagccagactcctcctcgggaaccggaaaagcgggccagcagcctgcaagaaggagattgaatttcggtcagactggagacgcagactccgtacctgacccccagcctctcggacagccaccagcagccccctctggtctgggaactaatacgatggctacaggcagtggcgcaccaatggcagacaataacgagggcgccgacggagtgggtaattcctcgggaaattggcattgcgattccacatggatgggcgacagagtcatcaccaccagcacccgcacctgggctctgcccacctacaacaaccacctctacaggcagatttccagccaatcaggagcctcaaacgacaaccactactttggctacagcaccccttgggggtattttgacttcaacagattccactgccacttttcgccacgtgactggcaaagactcatcaacaacaattggggatcccggcccaaaagactcaacttcaagctctttaacattcaagtcaaggaggtcacgcagaatgacggtacgacgacgattgccaataaccttaccagcacggttcaggtgtttactgactcggagtaccagctcccgtacgtcctcggctcggcgcatcaaggatgcctcccgccgttcccagcagacgtcttcatggtgccacagtatggatacctcaccctgaacaacgggagtcaggcagtaggacgctcttcattttactgcctggagtactttccttctcagatgctgcgtaccggaaacaactttaccttcagctacacctttgaggacgttcctttccacagcagctacgcccacagccagagtttggaccgtctcatgaatcctctcgtcgaccagtacctgtattacttgagcagaacaaacactccaagcggaaccaccacgcagtcaaggcttcagttttctcaggccggagcaagtgacattcgggaccagtctaggaactggcttcctggaccctgttaccgccagcagcgagtatcaaagacatctgcggataacaacaacagtgaatactcgtggactggagctaccaagtaccaccttaatggaagagactctctggtgaatccgggcccggccatggccagccacaaggacgatgaagaaaagttttttcctcagagcggggttctcatctttggaaaacaagactcgggaaaaactaatgtggacattgaaaaggtcatgattacagacgaagaggaaatcaggaccaccaatcccgtggctacggagcagtatggttctgtatctaccaacctccagagcggcaacacacaagcagctacctcagatgtcaacacacaaggcgttcttccaggcatggtgtggcaggacagagacgtgtacctgcaggggcccatctgggcaaagattccacacacggacggacattttcacccctctcccctcatgggcggattcggacttaaacaccctcccccgcagattctcatcaagaacaccccggtacctgcgaatccttcgactaccttcagtgcggcaaagtttgcttccttcattacacagtactccacggggcaggtcagcgtggagatcgagtgggagctgcagaaggagaacagcaaacgctggaatcccgagattcagtacacttccaactacaacaaatctgttaatgtggactttactgtggacactaatggtgtgtattcagagcctcgccccattggcaccagatacctgactcgtaatctgtaa

SEQ ID NO: 4970 - protein, 735 aa, Adeno-associated virus
MAADGYLPDWLEDTLSEGIRQWWKLKPGPPPPKPAERHKDDSRGLVLPGYKYLGPFNGLDKGEPVNEADAAALEHDKAYDRQLDGGDNPYLKYNHADAEFQERLKEDTSFGGNLGRAVFQAKKRVLEPLGLVEEPVKTAPGKKRPVEHSLAEPDSSSGTGKAGQQPARRRLNFGQTGDADSVPDPQPLGQPPAAPSGLGTNTMATGSGAPMADNNEGADGVGNSSGNWHCDSTWMGDRVITTSTRTWALPTYNNHLYRQISSQSGASNDNHYFGYSTPWGYFDFNRFHCHFSPRDWQRLINNNWGSRPKRLNFKLFNIQVKEVTQNDGTTTIANNLTSTVQVFTDSEYQLPYVLGSAHQGCLPPFPADVFMVPQYGYLTLNNGSQAVGRSSFYCLEYFPSQMLRTGNNFTFSYTFEDVPFHSSYAHSQSLDRLMNPLVDQYLYYLSRTNTPSGTTTQSRLQFSQAGASDIRDQSRNWLPGPCYRQQRVSKTSADNNNSEYSWTGATKYHLNGRDSLVNPGPAMASHKDDEEKFFPQSGVLIFGKQDSGKTNVDIEKVMITDEEEIRTTNPVATEQYGSVSTNLQSGNTQAATSDVNTQGVLPGMVWQDRDVYLQGPIWAKIPHTDGHFHPSPLMGGFGLKHPPPQILIKNTPVPANPSTTFSAAKFASFITQYSTGQVSVEIEWELQKENSKRWNPEIQYTSNYNKSVNVDFTVDTNGVYSEPRPIGTRYLTRNL

SEQ ID NO: 4971 - protein, 738 aa, Adeno-associated virus
MAADGYLPDWLEDNLSEGIREWWDLKPGAPKPKANQQKQDDGRGLVLPGYKYLGPFNGLDKGEPVNAADAAALEHDKAYDQQLKAGDNPYLRYNHADAEFQERLQEDTSFGGNLGRAVFQAKKRVLEPLGLVEEAAKTAPGKKRPVEPSPQRSPDSSAGIGKKGQQPAKKRLNFGQTGDSESVPDPQPIGEPPAGPSGLGSGTMAAGGGAPMADNNEGADGVGSSSGNWHCDSTWLGDRVITTSTRTWALPTYNNHLYKQISNGTSGGSTNDNTYFGYSTPWGYFDFNRFHCHFSPRDWQRLINNNWGFRPKRLSFKLFNIQVKEVTQNEGTETIANNLTSTIQVFTDSEYQLPYVLGSAHQGCLPPFPADVFMIPQYGYLTLNNGSQAVGRSSFYCLEYFPSQMLRTGNNFEFSYTFEDVPFHSSCAHSQSSDRLMNPLIDQYLYYLSRTRSTGGTQGTQQLLFSQAGPANMSAQAKNWLPGPCYRQQRVSTTLSQNNNSNFAWTGATKYHLNGRDSLVNPGVAMATHKDDEERFFPSSGVLMFGKQGAGRDNVDYSSVMLTSEEEIKTTNPVATEQYGVVADNLQQTNTGPIVGNVNSQGALPGMVWQNRDVYLQGPIWAKIPHTDGNFHPSPLMGGFGLKHPPPQILIKNTPVPADPPTTFSQAKLASFITQYSTGQVSVEIEWELQKENSKRWNPEIQYTSNYYKSTNVDFAVNTEGTYSEPRPIGTRYLTRNL

SEQ ID NO: 4972 - DNA, 2217 bp, Adeno-associated virus
  source 1..2217: mol_type = genomic DNA
atggctgctgacggttatcttccagattggctcgaggacaacctctctgagggcattcgcgagtggtgggacctgaaacctggagcccccaagcccaaggccaaccagcagaagcaggacgacggccggggtctggtgcttcttggctacaagtacctcggacccttcaacggactcgacaagggggagcccgtcaatgcggcggacgcagcggccctcgagcacgacaaggcctacgaccagcagctcaaagcgggtgacaatccgtacctgcggtataaccacgccgacgccgagtttcaggagcgtctgcaagaagatacgtcttttgggggcaacctcgggcgagcagtcttccaggccaagaagcgggttctcgaacctctcggtctggttgaggaagctgctaagacggctcctggaaagaagagaccggtagaaccgtcacctcagcgttcccccgactcctccacgggcatcggcaagaaaggccagcagcccgctaaaaagagactgaactttggtcagactggcgactcagagtcagtccccgaccctcaaccaatcggagaaccaccagcaggcccctctggtctgggatctggtacaatggctgcaggcggtggcgctccaatggcagacaataacgaaggcgccgacggagtgggtagttcctcaggaaattggcattgcgattccacatggctgggcgacagagtcatcaccaccagcacccgaacctgggccctgcccacctacaacaaccacctctacaagcaaatatccaatgggacatcgggaggaagcaccaacgacaacacctacttcggctacagcaccccctgggggtattttgacttcaacagattccactgccacttctcaccacgtgactggcagcgactcatcaacaacaactggggattccggccaaaaagactcagcttcaagctcttcaacatccaggtcaaggaggtcacgcagaatgaaggcaccaagaccatcgccaataaccttaccagcacgattcaggtatttacggactcggaataccagctgccgtacgtcctcggctccgcgcaccagggctgcctgcctccgttcccggcggacgtcttcatgattccccagtacggctaccttacactgaacaatggaagtcaagccgtaggccgttcctccttctactgcctggaatattttccatctcaaatgctgcgaactggaaacaattttgaattcagctacaccttcgaggacgtgcctttccacagcggctacgcacacagccagagcttggaccgactgatgaatcctctcatcgaccagtacctgtactacttatccagaactcagtccacaggaggaactcaaggtacccagcaattgttattttctcaagctgggcctgcaaacatgtcggctcaggctaagaactggctacctggaccttgctaccggcagcagcgagtctctacgacactgtcgcaaaacaacaacagcaactttgcttggactggtgccaccaaatatcacctgaacggaagagactctttggtaaatcccggtgtcgccatggcaacccacaaggacgacgaggaacgcttcttcccgtcgagtggagtcctgatgtttggaaaacagggtgctggaagagacaatgtggactacagcagcgttatgctaaccagcgaagaagaaattaaaaccactaaccctgtagccacagaacaatacggtgtggtggctgacaacttgcagcaaaccaatacagggcctattgtgggaaatgtcaacagccaaggagccttacctggcatggtctggcagaaccgagacgtgtacctgcagggtcccatctgggccaagattcctcacacggacggcaacttccacccttcaccgctaatgggaggatttggactgaagcacccacctcctcagatcctgatcaagaacacgccggtacctgcggatcctccaacgacgttcagccaggcgaaattggcttccttcattacgcagtacagcaccggacaggtcagcgtggaaatcgagtgggagctgcagaaggagaacagcaaacgctggaacccagagattcagtacacttcaaactactacaaatctacaaatgtggactttgctgtcaatacagagggaacttattctgagcctcgccccattggtactcgttacctcacccgtaatctgtaa

SEQ ID NO: 4973 - protein, 738 aa, Adeno-associated virus
MAADGYLPDWLEDNLSEGIREWWDLKPGAPKPKANQQKQDDGRGLVLLGYKYLGPFNGLDKGEPVNAADAAALEHDKAYDQQLKAGDNPYLRYNHADAEFQERLQEDTSFGGNLGRAVFQAKKRVLEPLGLVEEAAKTAPGKKRPVEPSPQRSPDSSTGIGKKGQQPAKKRLNFGQTGDSESVPDPQPIGEPPAGPSGLGSGTMAAGGGAPMADNNEGADGVGSSSGNWHCDSTWLGDRVITTSTRTWALPTYNNHLYKQISNGTSGGSTNDNTYFGYSTPWGYFDFNRFHCHFSPRDWQRLINNNWGFRPKRLSFKLFNIQVKEVTQNEGTKTIANNLTSTIQVFTDSEYQLPYVLGSAHQGCLPPFPADVFMIPQYGYLTLNNGSQAVGRSSFYCLEYFPSQMLRTGNNFEFSYTFEDVPFHSGYAHSQSLDRLMNPLIDQYLYYLSRTQSTGGTQGTQQLLFSQAGPANMSAQAKNWLPGPCYRQQRVSTTLSQNNNSNFAWTGATKYHLNGRDSLVNPGVAMATHKDDEERFFPSSGVLMFGKQGAGRDNVDYSSVMLTSEEEIKTTNPVATEQYGVVADNLQQTNTGPIVGNVNSQGALPGMVWQNRDVYLQGPIWAKIPHTDGNFHPSPLMGGFGLKHPPPQILIKNTPVPADPPTTFSQAKLASFITQYSTGQVSVEIEWELQKENSKRWNPEIQYTSNYYKSTNVDFAVNTEGTYSEPRPIGTRYLTRNL

SEQ ID NO: 4974 - protein, 735 aa, Adeno-associated virus
MAADGYLPDWLEDTLSEGIRQWWKLKPGPPPPKPAERHKDDSRGLVLPGYKYLGPFNGLDKGEPVNEADAAALEHDKAYDRQLDSGDNPYLKYNHADAEFQERLKEDTSFGGNLGRAVFQAKKRVLEPLGLVEPPVKTAPGKKRPVEHSPAEPDSSSGTGKAGQQPARKRLNFGQTGDADSVPDPQPLGQPPAAPSGLGSTTMATGSGAPMADNNEGADGVGNSSGNWHCDSQWLGDRVITTSTRTWALPTYNNHLYKQISSQSGASNDNHYFGYSTPWGYFDFNRFHCHFSPRDWQRLINNNWGFRPKRLNFKLFNIQVKEVTQNDGTTTIANNLTSTVQVFTDSEYQLPYVLGSAHQGCLPPFPADVFMVPQYGYLTLNNGSQAVGRSSFYCLEYFPSQMLRTGNNFQFSYTFEDVPFHSSYAHSQSLDRLMNPLIDQYLYYLNKTQSNSGTLQQSRLLFSQAGPTSMSLQAKNWLPGPCYRQQRLSKQANDNNNSNFPWTAATKYHLNGRDSLVNPGPAMASHKDDEEKFFPMHGTLIFGKQGTNANDADLDNVMITDEEEIRTTNPVATEQYGYVSNNLQNSNTGPTTGTVNHQGALPGMVWQDRDVYLQGPIWAKIPHTDGHFHPSPLMGGFGLKHPPPQIMIKNTPVPANPPTNFSSAKFASFITQYSTGQVSVEIEWELQKENSKRWNPEIQYTSNYNKSVNVDFTVDTNGVYSEPRPIGTRYLTRNL

SEQ ID NO: 4975 - protein, 735 aa, Adeno-associated virus
MAADGYLPDWLEDTLSEGIRQWWKLKPGPPPPKPAERHKDDSRGLVLPGYKYLGPFNGLDKGEPVNEADAAALEHDKAYDRQLDSGDNPYLKYNHADAEFQERLKEDTSFGGNLGRAVFQAKKRVLEPLGLVEGPVKTAPGKKRPVEHSPAEPDSSSGTGKAGQQPARKRLNFGQTGDADSVPDPQPLGQPPAAPSGLGSTTMATGSGAPMADNNEGADGVGNSSGNWHCDSQWLGDRVITTSTRTWALPTYNNHLYKQISSQSGASNDNHYFGYSTPWGYFDFNRFHCHFSPRDWQRLINNNWGFRPKRLNFKLFNIQVKEVTQNDGTTTIANNLTSTVQVFTDSEYQLPYVLGSAHQGCLPPFPADVFMVPQYGYLTLNNGSQAVGRSSFYCLEYFPSQMLRTGNNFQFSYTFEDVPFHSSYAHSQSLDRLMNPLIDQYLYYLNKTQSNSGTLQQSRLLFSQAGPTSMSLQAKNWLPGPCYRQQRLSKQANDNNNSNFPWTAATKYHLNGRDSLVNPGPAMASHKDDEEKFFPMHGTLIFGKQGTNANDADLDNVMITDEEEIRTTNPVATEQYGYVSNNLQNSNTGPTTGTVNHQGALPGMVWQDRDVYLQGPIWAKIPHTDGHFHPSPLMGGFGLKHPPPQIMIKNTPVPANPPTNFSSAKFASFITQYSTGQVSVEIEWELQKENSKRWNPEIQYTSNYNKSVNVDFTVDTNGVYSEPRPIGTRYLTRNL

SEQ ID NO: 4976 - DNA, 2208 bp, Adeno-associated virus
  source 1..2208: mol_type = genomic DNA
atggctgccgatggttatcttccagattggctcgaggacactctctctgaaggaataagacagtggtggaagctcaaacctggcccaccaccaccaaagcccgcagagcggcataaggacgacagcaggggtcttgtgcttcctgggtacaagtacctcggacccttcaacggactcgacaagggggagccggtcaacgaggcagacgccgcggccctcgagcacgacaaggcctacgaccggcagctcgacagcggagacaacccgtacctcaagtacaaccacgccgacgcggagtttcaggagcgtcttaaagaagatacgtcttttgggggcaacctcggacgagcagtcttccaggcgaaaaagagggttcttgaacctctgggcctggttgagggacctgttaagacggctccgggaaaaaagaggccggtagagcactctcctgcggagccagactcctcctcgggaaccggaaaagcgggccagcagcctgcaagaaaaagattgaattttggtcagactggagacgcagactccgtacctgacccccagcctctcggacagccaccagcagccccctctggtttgggatctactacaatggctacaggcagtggcgcaccaatggcagacaataacgagggtgccgatggagtgggtaattcctcaggaaattggcattgcgattcccaatggctgggcgacagagtcatcaccaccagcacccgaacctgggccctgcccacctacaacaaccacctctacaagcaaatctcaagccaatcaggagcctcaaacgacaaccactactttggctacagcaccccttgggggtattttgacttcaacagattccactgccacttttcaccacgtgactggcaaagactcatcaacaacaactggggattccgacccaagagactcaacttcaagctctttaacattcaagtcaaagaggtcacgcagaatgacggtacgacgacgattgccaataaccttaccagcacggttcaggtgtttactgactcggagtaccagctcccgtacgtcctcgggtcggcgcatcaaggatgcctcccgccgtttccagcggacgtcttcatggtcccacagtatggatacctcaccctgaacaacgggagtcaggcggtaggacgctcttccttttactgcctggagtactttccttctcagatgcttcgtactggaaacaactttcagttcagctacacctttgaagacgttcctttccacagcagctacgctcacagccagagtctggatcggctgatgaatcctctgatcgaccagtacctgtattatctgaacaaaacacaatcaaatagtggaactcttcagcagtctcggctactgtttagtcaagctggacccaccagcatgtctcttcaagctaaaaactggctacctggaccttgctacagacagcagcgtctgtcaaagcaggcaaacgacaacaacaacagcaactttccctggactgcggctacaaagtatcacctaaatggccgggactcgttggttaatccaggaccagctatggccagtcacaaagacgatgaagaaaagtttttccccatgcatggaaccctgatatttggtaaacaaggaacaaatgctaacgacgcggatttggacaatgtcatgattacagatgaagaagaaatccgcaccaccaatcccgtggctacggagcagtacggatatgtgtcaaataatttgcaaaactcaaatactggtccaactactggaactgtcaatcaccaaggagcgttacctggcatggtgtggcaggatcgagacgtgtacctgcagggacccatttgggccaagattcctcacaccgatggacactttcatccttctccactgatgggaggttttgggctcaaacacccgcctcctcagatcatgatcaaaaacactcccgttccagccaatcctcccacaaacttcagttctgccaagtttgcttctttcatcacacagtattccacggggcaggtcagcgtggagatcgagtgggagctgcagaaagagaacagcaaacgctggaatcccgaaattcagtacacttccaactacaacaaatctgttaatgtggactttactgtggacactaatggcgtgtattcagagcctcgccccattggcaccagatacctgactcgtaatctgtaa

SEQ ID NO: 4977 - DNA, 2211 bp, Adeno-associated virus
  source 1..2211: mol_type = genomic DNA
atggctgccgatggttatcttccagattggctcgaggacaacctctctgagggcattcgcgagtggtgggacttgaaacctggagccccgaagcccaaagccaaccagcaaaagcaggacgacggccggggtctggtgcttcctggctacaagtacctcggacccttcaacggactcgacaagggggagcccgtcaacgcggcggacgcagcggccctcgagcacgacaaggcctacgaccagcagctcaaagcgggtgacaatccgtacctgcggtataaccacgccgacgccgagtttcaggagcgtctgcaagaagatacgtcttttgggggcaacctcgggcgagcagtcttccaggccaagaagcgggttctcgaacctctcggtctggttgaggaaggcgctaagacggctcctggaaagaaacgtccggtagagcagtcgccacaagagccagactcctcctcgggcatcggcaagacaggccagcagcccgctaaaaagagactcaattttggtcagactggcgactcagagtcagtccccgatccacaacctctcggagaacctccagcaacccccgctgctgtgggacctactacaatggcttcaggcggtggcgcaccaatggcagacaataacgaaggcgccgacggagtgggtaatgcctcaggaaattggcattgcgattccacatggctgggcgacagagtcatcaccaccagcacccgcacctgggccttgcccacctacaataaccacctctacaagcaaatctccagtgcttcaacgggggccagcaacgacaaccactacttcggctacagcaccccctgggggtattttgatttcaacagattccactgccacttttcaccacgtgactggcagcgactcatcaacaacaattggggattccggcccaagagactcaacttcaaactcttcaacatccaagtcaaggaggtcacgacgaatgatggcgtcacaaccatcgctaataaccttaccagcacggttcaagtcttctcggactcggagtaccagcttccgtacgtcctcggctctgcgcaccagggctgcctccctccgttcccggcggacgtgttcatgattccgcaatacggctacctgacgctcaacaatggcagccaagccgtgggacgttcatccttttactgcctggaatatttcccttctcagatgctgagaacgggcaacaactttaccttcagctacacctttgaggaagtgcctttccacagcagctacgcgcacagccagagcctggaccggctgatgaatcctctcatcgaccaatacctgtattacctgaacagaactcaaaatcagtccggaagtgcccaaaacaaggacttgctgtttagccgtgggtctccagctggcatgtctgttcagcccaaaaactggctacctggaccctgttatcggcagcagcgcgtttctaaaacaaaaacagacaacaacaacagcaattttacctggactggtgcttcaaaatataacctcaatgggcgtgaatccatcatcaaccctggcactgctatggcctcacacaaagacgacgaagacaagttctttcccatgagcggtgtcatgatttttggaaaagagagcgccggagcttcaaacactgcattggacaatgtcatgattacagacgaagaggaaattaaagccactaaccctgtggccaccgaaagatttgggaccgtggcagtcaatttccagagcagcagcacagaccctgcgaccggagatgtgcatgctatgggagcattacctggcatggtgtggcaagatagagacgtgtacctgcagggtcccatttgggccaaaattcctcacacagatggacactttcacccgtctcctcttatgggcggctttggactcaagaacccgcctcctcagatcctcatcaaaaacacgcctgttcctgcgaatcctccggcggagttttcagctacaaagtttgcttcattcatcacccaatactccacaggacaagtgagtgtggaaattgaatgggagctgcagaaagaaaacagcaagcgctggaatcccgaagtgcagtacacatccaattatgcaaaatctgccaacgttgattttactgtggacaacaatggactttatactgagcctcgccccattggcacccgttaccttacccgtcccctgtaa

SEQ ID NO: 4978 - DNA, 2208 bp, Adeno-associated virus
  source 1..2208: mol_type = genomic DNA
atggctgccgatggttatcttccagattggctcgaggacactctctctgaaggaacaagacagtggtggaagctcaaacctggcccaccaccaccaaagcccgcagagcggcataaggacgacagcaggggtcttgtgcttcctgggtacaagtacctcggacccttcaacggactcgacaagggggagccggtcaacgaggcagacgccgcggccctcgagcacgacaaggcctacgaccggcagctcgacagcggagacaacccgtacctcaagtacaaccacgccgacgcggagtttcaggagcgtcttaaagaagatacgtcttttgggggcaacctcggacgagcagtcttccaggcgaaaaagagggttcttgaacctctgggcctggttgaggaacctgttaagacggctccgggaaaaaagaggccggtagagcactctcctgcggagccagactcctcctcgggaaccggaaaagcgggccagcagcctgcaagaaaaagattgaattttggtcagactggagacgcagactccgtacctgacccccagcctctcggacagccaccagcagccccctctggtttgggatctactacaatggctacaggcagtggcgcaccaatggcagacaataacgagggtgccgatggagtgggtaattcctcaggaaattggcattgcgattcccaatggctgggcgacagagtcatcaccaccagcacccgaacctgggccctgcccacctacaacaaccacctctacaagcaaatctcaagccaatcaggagcctcaaacgacaaccactactttggctacagcaccccttgggggtattttgacttcaacagattccactgccacttttcaccacgtgactggcaaagactcatcaacaacaactggggattccgacccaagagactcaacttcaagctctttaacattcaagtcaaagaggtcacgcagaatgacggtacgacgacgattgccaataaccttaccagcacggttcaggtgtttactgactcggagtaccagctcccgtacgtcctcgggtcggcgcatcaaggatgcctcccgccgtttccagcggacgtcttcatggtcccacagtatggatacctcaccctgaacaacgggagtcaggcggtaggacgctcttccttttactgcctggagtactttccttctcagatgcttcgtactggaaacaactttcagttcagctacacctttgaagacgttcctttccacagcagctacgctcacagccagagtctggatcggctgatgaatcctctgatcgaccagtacctgtattatctgaacaaaacacaatcaaatagtggaactcttcagcagtctcggctactgtttagtcaagctggacccaccagcatgtctcttcaagctaaaaactggctacctggaccttgctacagacagcagcgtctgtcaaagcaggcaaacgacaacaacaacagcaactttccctggactgcggctacaaagtaccacctaaatggccgggactcgttggttaatccaggaccagctatggccagtcacaaagacgatgaagaaaagtttttccccatgcatggaaccctgatatttggtaaacaaggaacaaatgctaacgacgcggatttggacaatgtcatgattacagatgaagaagaaatccgcaccaccaatcccgtggctacggagcagtacggatatgtgtcaaataatttgcaaaactcaaatactggtccaactactggaactgtcaatcaccaaggagcgttacctggcatggtgtggcaggatcgagacgtgtacctgcagggacccatttgggccaagattcctcacaccgatggacactttcatccttctccactgatgggaggttttgggctcaaacacccgcctcctcagatcatgatcaaaaacactcccgttccagccaatcctcccacaaacttcagttctgccaagtttgcttctttcatcacacagtattccacggggcaggtcagcgtggagatcgagtgggagctgcagaaagagaacagcaaacgctggaatcccgaaattcagtacacttccaactacaacaaatctgttaatgtggactttactgtggacactaatggcgtgtattcagagcctcgccccattggcaccagatacctgactcgtaatctgtaa

SEQ ID NO: 4979 - DNA, 2217 bp, Adeno-associated virus
  source 1..2217: mol_type = genomic DNA
atggctgctgacggttatcttccagattggctcgaggacaacctctctgagggcattcgcgagtggtgggacctgaaacctggagcccccaagcccaaggccaaccagcagaagcaggacgacggccggggtctggtgcttcctggctacaagtacctcggacccttcaacggactcgacaagggggagcccgtcaacgcggcggacgcagcggccctcgagcacgacaaggcctacgaccagcagctcaaagcgggtgacaatccgtacctgcggtataaccacgccgacgccgagtttcaggagcgtctgcaagaagatacgtcttttgggggcaacctcgggcgagcagtcttccaggccaagaagcgggttctcgaacctctcggtctggttgaggaagctgctaagacggctcctggaaagaagagaccggtagaaccgtcacctcagcgttcccccgactcctccacgggcatcggcaagaaaggccagcagcccgctaaaaagagactgaactttggtcagactggcgactcagagtcagtccccgaccctcaaccaatcggagaaccacctgcaggcccctctggtctgggatctggtacaatggctgcaggcggtggcgctccaatggcagacaataacgaaggcgccgacggagtgggtagttcctcaggaaattggcattgcgattccacatggctgggcgacagagtcatcaccaccagcacccgaacctgggccctgcccacctacaacaaccacctctacaagcaaatatccaatgggacatcgggagggagcaccaacgacaacacctacttcggctacagcaccccctgggggtattttgacttcaacagattccactgccacttctcaccacgtgactggcagcgactcatcaacaacaactggggattccggccaaaaagactcagcttcaagctcttcaacatccaggtcaaggaggtcacgcagaatgaaggcaccaagaccatcgccaataaccttaccagcacgattcaggtatttacggactcggaataccagctgccgtacgtcctcggctccgcgcaccagggctgcctgcctccgttcccggcggacgtcttcatgattccccagtacggctaccttacactgaacaatggaagtcaagccgtaggccgttcctccttctactgcctggaatattttccatctcaaatgctgcgaactggaaacaattttgaattcagctacaccttcgaggacgtgcctttccacagcagctacgcacacagccagagcttggaccgactgatgaatcctctcatcgaccagtacctgtactacttatccagaactcagtccacaggaggaactcaaggtacccagcaattgttattttctcaagctgggcctgcaaacatgtcggctcaggctaagaactggctacctggaccttgctaccggcagcagcgagtctctacgacactgtcgcaaaacaacaacagcaactttgcttggactggtgccaccaaatatcacctgaacggaagagactctttggtaaatcccggtgtcgccatggcaacccacaaggacgacgaggaacgcttcttcccgtcgagtggagtcctgatgtttggaaaacagggtgctggaagagacaatgtggactacagcagcgttatgctaaccagcgaagaagaaattaaaaccactaaccctgtagccacagaacaatacggtgtggtggctgacaacttgcagcaaaccaatacagggcctattgtgggaaatgtcaacagccaaggagccttacctggcatggtctggcagaaccgagacgtgtacctgcagggtcccatctgggccaagattcctcacacggacggcaactgccacccttcaccgctaatgggaggatttggactgaagcacccacctcctcagatcctgatcaagaacacgccggtacctgcggatcctccaacaacgttcagccaggcgaaattggcttccttcattacgcagtacagcaccggacaggtcagcgtggaaatcgagtgggagctgcagaaggagaacagcaaacgctggaacccagagattcagtacacttcaaactactacaaatctacaaatgtggactttgctgtcaatacagagggaacttattctgagcctcgccccattggtactcgttacctcacccgtaatctgtaa

SEQ ID NO: 4980 - protein, 735 aa, Adeno-associated virus
MAADGYLPDWLEDTLSEGTRQWWKLKPGPPPPKPAERHKDDSRGLVLPGYKYLGPFNGLDKGEPVNEADAAALEHDKAYDRQLDSGDNPYLKYNHADAEFQERLKEDTSFGGNLGRAVFQAKKRVLEPLGLVEEPVKTAPGKKRPVEHSPAEPDSSSGTGKAGQQPARKRLNFGQTGDADSVPDPQPLGQPPAAPSGLGSTTMATGSGAPMADNNEGADGVGNSSGNWHCDSQWLGDRVITTSTRTWALPTYNNHLYKQISSQSGASNDNHYFGYSTPWGYFDFNRFHCHFSPRDWQRLINNNWGFRPKRLNFKLFNIQVKEVTQNDGTTTIANNLTSTVQVFTDSEYQLPYVLGSAHQGCLPPFPADVFMVPQYGYLTLNNGSQAVGRSSFYCLEYFPSQMLRTGNNFQFSYTFEDVPFHSSYAHSQSLDRLMNPLIDQYLYYLNKTQSNSGTLQQSRLLFSQAGPTSMSLQAKNWLPGPCYRQQRLSKQANDNNNSNFPWTAATKYHLNGRDSLVNPGPAMASHKDDEEKFFPMHGTLIFGKQGTNANDADLDNVMITDEEEIRTTNPVATEQYGYVSNNLQNSNTGPTTGTVNHQGALPGMVWQDRDVYLQGPIWAKIPHTDGHFHPSPLMGGFGLKHPPPQIMIKNTPVPANPPTNFSSAKFASFITQYSTGQVSVEIEWELQKENSKRWNPEIQYTSNYNKSVNVDFTVDTNGVYSEPRPIGTRYLTRNL

SEQ ID NO: 4981 - DNA, 2208 bp, Adeno-associated virus
  source 1..2208: mol_type = genomic DNA
atggctgccgatggttatcttccagattggctcgaggacactctctctgaaggaataagacagtggtggaagctcaaacctggcccaccaccaccaaagcccgcagagcggcatcaggacaacagcaggggtcttgtgcttcctgggtacaagtacctcggaccctccaacggactcgacaaaggagagccggtcaacgaggcagacgccgcggccctcgagcacgacaaggcctacgaccggcagctcgacagcggagacaacccgtacctcaagtacaaccacgccgacgcggagtttcaggagcgtcttaaagaagatacgtcttttgggggcaacctcggacgagcagtcttccaggcgaaaaagagggttcttgaacctctgggcctggttgaggaacctgttaagacggctccgggaaaaaagaggccggtagagcactctcctgtggagccagactcctcctcgggaaccggaaaagcgggccatcagcctgcgagaaagagattgaattttggtcagactggagacgcagactccgtacctgacccccagcctctcggacagccaccagcagcccccacaagtttgggatctactacaatggctacaggcagtggcgcaccaatggcagacaataacgagggtgccgatggagtgggtaattcctcaggaaattggcattgcgattcccaatggctgggcgacagagtcatcaccaccagcacccgaacctgggccctgcccacctacaacaaccacctctacaagcaaatctccagccaatcaggagcctcgaacgacaaccactactttggctgcagcaccccctgggggtattttgacttcaacagattccactgtcacttctccccacgtgattggcaaagactcatcaacaacaactggggattccgacccaagagactcaacttcaagctctttaacattcaagtcaaagaggtcacgcagaatgacggtacgacgacgattgccaataaccttaccagcacggttcaggtgtttactgactcggagtacccgctcccgtacgtcctcggctcggcgcatcaaggatgcctcccgccgtttccagcggacgtcttcatggtcccacagtatggatacctcaccctgaacaacgggagtcaggcggtaggacgctcttccttttactgcctggagtactttccttctcagatgctgcgtaccggaaacaactttaccttcagctacacctttgaggacgttcctttccacagcagctacgctcacagccagagtttggaccggctgatgaatcctctgatcgaccagtatctatattatctgaacaggacacaatcaaatagtggaactcttcagcagtctaggctactgtttagccaagctggacccaccagcatgtctcttcaagctaaaaactggctgcctggaccttgctacagacagcagcgtctttcaaagcaggcaaacgacaacaacaacagcaactttccctggactgcggctacaaagtatcatctaaatggccgggactcgttggttaatccaggaccagctatggccagccacaaagacgatgaagaaaagtttttccccatgcatggaaccctgatatttggtaaacaaggaacaaatgctaacgacgcggatttggagcatgttatgattacagatgaagaagaaatcaggaccaccaatcctgtggctacagagcagtacggaaacgtgtcaaataatttgcaaaactcaaatactggtccaactacagaaaatgtcaatcaccagggagcgttacctggtatggtgtggcaggatcgagacgtgtacctgcagggacccatttgggccaagattcctcacaccgacggacactttcacccttctccactgatgggaggttttggactcaaacacccgcctcctcaaatcatgatcaaaaacactcccgttccagccaatcctcccacaaacttcagttctgccaagtttgcttctttcatcacacagtattccacgggccaggtcagcgtggagattgagtgggagctgcagaaggagaacagcaaacgctggaaccccgagatccagtatacttccaactacaacaaatctgttaatgtggactttactgtggacactaatggtgtgtattcagagccttgccccattggcaccagatacctgactcgtaatctgtaa

SEQ ID NO: 4982 - protein, 735 aa, Adeno-associated virus
MAADGYLPDWLEDTLSEGIRQWWKLKPGPPPPKPAERHQDNSRGLVLPGYKYLGPSNGLDKGEPVNEADAAALEHDKAYDRQLDSGDNPYLKYNHADAEFQERLKEDTSFGGNLGRAVFQAKKRVLEPLGLVEEPVKTAPGKKRPVEHSPVEPDSSSGTGKAGHQPARKRLNFGQTGDADSVPDPQPLGQPPAAPTSLGSTTMATGSGAPMADNNEGADGVGNSSGNWHCDSQWLGDRVITTSTRTWALPTYNNHLYKQISSQSGASNDNHYFGCSTPWGYFDFNRFHCHFSPRDWQRLINNNWGFRPKRLNFKLFNIQVKEVTQNDGTTTIANNLTSTVQVFTDSEYPLPYVLGSAHQGCLPPFPADVFMVPQYGYLTLNNGSQAVGRSSFYCLEYFPSQMLRTGNNFTFSYTFEDVPFHSSYAHSQSLDRLMNPLIDQYLYYLNRTQSNSGTLQQSRLLFSQAGPTSMSLQAKNWLPGPCYRQQRLSKQANDNNNSNFPWTAATKYHLNGRDSLVNPGPAMASHKDDEEKFFPMHGTLIFGKQGTNANDADLEHVMITDEEEIRTTNPVATEQYGNVSNNLQNSNTGPTTENVNHQGALPGMVWQDRDVYLQGPIWAKIPHTDGHFHPSPLMGGFGLKHPPPQIMIKNTPVPANPPTNFSSAKFASFITQYSTGQVSVEIEWELQKENSKRWNPEIQYTSNYNKSVNVDFTVDTNGVYSEPCPIGTRYLTRNL

SEQ ID NO: 4983 - DNA, 2196 bp, Adeno-associated virus
  source 1..2196: mol_type = genomic DNA
atggctgctgacggttatcttccagattggctcgaggacaacctctctgagggcattcgcgagtggtgggcgctgaaacctggagccccgcaacccaaagccaaccagcaaaagcaggacgacggccggggtctggtgcttcctggctacaagtacctcggacccttcaacggactcgacaagggggagcccgtcaacgaggcggacgccgcggccctcgagcacgacaaggcctacgaccagcagctcaaagcgggtgacaatccgtacctgcggtataatcacgccgacgccgagtttcaagagcgtctgcaagaagatacgtcctttgggggcaacctcgggcgagcagtcttccaggccaaaaagagggtactcgagcctctgggtctggttgaggaaggcgctaagacggctcctggaaagaagcggccagtagaaccggactccagctcgggcatcggcaagtcaggccagcagcccgcgaaaaagagactgaattttgggcagactggcgactcagagtcagtgcctgacccccaacctctctcagaaccacccgcaggtccctctggtctgggatctggtacaatggctgctggcggtggcgctccaatggcagacaataacgaaggcgccgacggagtgggtaatgtctcaggaaattggcattgcgattccacatggctgggcgaccgagtcatcaccaccagcactcggacctgggccctccccacctacaacaaccacctctacaagcaaatctccaacgggacctcgggaggcagcagcaacgacaacacctactttggctacagcaccccctgggggtattttgactttaacagattccactgccacttttcaccacgtgactggcagcgactcatcaacaacaactgggggttccggcccaagaagctcaacttcaagctcttcaacatccaggtcaaggaggtcacccagaatgaaggcaccaagaccatcgccaataacctcaccagcacggtgcaggtctttacggactcggagtaccagctcccgtacgtgctcggctctgcccaccagggctgcctgcctccgttcccggcggacgtgttcatgattccgcagtacgggtacctgacgctgaacaacgggagccaggccgtggggcgatcctccttctactgcctggagtactttccctcgcagatgctgagaacgggcaacaactttaccttcagctacaccttcgaggacgtgcccttccacagcagctacgcgcacagccagagcctggaccggctgatgaacccgctgattgaccagtacctgtactacctgtctcggactcagaccaacgggaccaatgccacgcagactctgttgtttgctcaggccgggcctcagaacatgtcggctcaggccaagaactggctgcctggtccttgctatcggcagcagcgcgtctctacgacagtgtcgcaaaacaacaacagcaactttacctggaccggggcgaccaagtaccacctgaacggccgagactccctggtgagccccggtgtcgccatggcaacgcacaaggacgacgaggagcgcttcttcccgagcagcggggtcctgatgtttggcaagcagggcgctggaaaggacaatgtcgagtacaccaacgtgatgctcaccagcgaggaggagatcaagaccaccaaccctgtggccacggagcagtacggcgtggtggctgacaatctgcagcagaccaactcagctcccattgtgggggcagtcaacagccagggggccttacccggtatggtctggcagaaccgggacgtgtacctgcagggtcccatctgggccaagatcccgcatacggacggcaactttcacccgtctcctctcatgggcggctttggactgaaacacccgcctccccagatcctgatcaaaaacacgccggtacctgcggatcccccggtgaactttacggacgctaagctggcgagtttcatcacgcagtacagcaccgggcaggtcagcgtggagattgagtgggagctgcagaaggagaacagcaagcgctggaatcccgagattcagtacacttccaattattataaatcagctaatgtggactttgccgtcaatgcagatggtgtatatagtgaaccccgccccattggcactcgttacctcacccgtaatctgtaa

SEQ ID NO: 4984 - protein, 731 aa, Adeno-associated virus
MAADGYLPDWLEDNLSEGIREWWALKPGAPQPKANQQKQDDGRGLVLPGYKYLGPFNGLDKGEPVNEADAAALEHDKAYDQQLKAGDNPYLRYNHADAEFQERLQEDTSFGGNLGRAVFQAKKRVLEPLGLVEEGAKTAPGKKRPVEPDSSSGIGKSGQQPAKKRLNFGQTGDSESVPDPQPLSEPPAGPSGLGSGTMAAGGGAPMADNNEGADGVGNVSGNWHCDSTWLGDRVITTSTRTWALPTYNNHLYKQISNGTSGGSSNDNTYFGYSTPWGYFDFNRFHCHFSPRDWQRLINNNWGFRPKKLNFKLFNIQVKEVTQNEGTKTIANNLTSTVQVFTDSEYQLPYVLGSAHQGCLPPFPADVFMIPQYGYLTLNNGSQAVGRSSFYCLEYFPSQMLRTGNNFTFSYTFEDVPFHSSYAHSQSLDRLMNPLIDQYLYYLSRTQTNGTNATQTLLFAQAGPQNMSAQAKNWLPGPCYRQQRVSTTVSQNNNSNFTWTGATKYHLNGRDSLVSPGVAMATHKDDEERFFPSSGVLMFGKQGAGKDNVEYTNVMLTSEEEIKTTNPVATEQYGVVADNLQQTNSAPIVGAVNSQGALPGMVWQNRDVYLQGPIWAKIPHTDGNFHPSPLMGGFGLKHPPPQILIKNTPVPADPPVNFTDAKLASFITQYSTGQVSVEIEWELQKENSKRWNPEIQYTSNYYKSANVDFAVNADGVYSEPRPIGTRYLTRNL

SEQ ID NO: 4985 - DNA, 2196 bp, Adeno-associated virus
  source 1..2196: mol_type = genomic DNA
atggctgctgacggttatcttccagattggctcgaggacaacctctctgagggcattcgcgagtggtgggcgctgaaacctggagccccgcaacccaaagccaaccagcaaaagcaggacgacggccggggtctggtgcttcctggctacaagtacctcggacccttcaacggactcgacaagggggagcccgtcaacgaggcggacgccgcggccctcgagcacgacaaggcctacgaccagcagctcaaagcgggtgacaatccgtacctgcggtataatcacgccgacgccgagtttcaagagcgtctgcaagaagatacgtcctttgggggcaacctcgggcgagcagtcttccaggccaaaaagagggtactcgagcctctgggtctggttgaggaaggcgctaagacggctcctggaaagaagcggccagtagaaccggactccagctcgggcatcggcaagtcaggccggcagcccgcgaaaaagagactgaattttgggcagactggcgactcagagtcagtgcctgacccccaacctctctcagaaccacccgcaggtccctctggtctgggatctggtacaatggctgcaggcggtggcgctccaatggcagacaataacgaaggcgccgacggagtgggtaatgcctcaggaaattggcattgcgattccacatggctgggcgaccgagtcatcaccaccagcactcggacctgggccctccccacctacaacaaccacctctacaagcaaatctccaacgggacctcgggaggcagcagcaacgacaacacctactttggctacagcaccccctgggggtattttgactttaacagattccactgccacttttcaccacgtgactggcagcgactcatcaacaacaactggggattccggcccaagaggctcaacttcaagctcttcaacatccaggtcaaggaggtcacccagaatgaaggcaccaagaccatcgccaataacctcaccagcacggtgcaggtctttacggactcgaagtaccagctcccgtacgtgctcggctctgcccaccagggctgcctgcctccgttcccggcggacgtgttcatgattccgcagtacgggtacctgacgctgaacaacgggagccaggccgtggggcgatcctccttctactgcctggagtactttccctcgcagatgctgagaacgggcaacaactttaccttcagctacaccttcgaggacgtgcccttccacagcagctacgcgcacagccagagcctggaccggctgatgaacccgctgattgaccagtacctgtactacctgtctcggactcagaccaacgggaccaatgccacgcagactctgttgtttgctcaggccgggcctcagaacatgtcggctcaggccaagaactggctgcctggtccttgctatcggcagcagcgcgtctctacgacagtgtcgcaaaacaacaacagcaactttacctggaccggggcgaccaagtaccacctgaacggccgagactccctggtgaaccccggtgtcgccatggcaacgcacaaggacgacgaggagcgcttcttcccgagcagcggggtcctgatgtttggcaagcagggcgctggaaaggacaatgtcgagtacaccaacgtgatgctcaccagcgaggaggagatcaagaccaccaaccctgtggccacggagcagtacggtgtggtggctgacaatctgcagcagaccaactcggctcccattgtgggggcagtcaacagccagggggccttacccggtatggtctggcagaaccgggacgtgtacctgcagggtcccatctgggccaagatcccgcatacggacggcaactttcacccgtctcctctcatgggcggctttggactgaaacacccgcctccccagatcctgatcaaaaacacgccggtacctgcggatcccccggtgaactttacggacgctaagctggcgagtttcatcacgcagtacagcaccgggcaggtcagcgtggagattgagtgggagctgcagaaggagaacagcaagcgctggaatcccgagattcagtacacttccaattattataaatcagctaatgtggactttgccgtcaatgcagatggtgtatatagtgaaccccgccccattggcactcgttacctcacccgtaatctgtaa

SEQ ID NO: 4986 - protein, 731 aa, Adeno-associated virus
MAADGYLPDWLEDNLSEGIREWWALKPGAPQPKANQQKQDDGRGLVLPGYKYLGPFNGLDKGEPVNEADAAALEHDKAYDQQLKAGDNPYLRYNHADAEFQERLQEDTSFGGNLGRAVFQAKKRVLEPLGLVEEGAKTAPGKKRPVEPDSSSGIGKSGRQPAKKRLNFGQTGDSESVPDPQPLSEPPAGPSGLGSGTMAAGGGAPMADNNEGADGVGNASGNWHCDSTWLGDRVITTSTRTWALPTYNNHLYKQISNGTSGGSSNDNTYFGYSTPWGYFDFNRFHCHFSPRDWQRLINNNWGFRPKRLNFKLFNIQVKEVTQNEGTKTIANNLTSTVQVFTDSKYQLPYVLGSAHQGCLPPFPADVFMIPQYGYLTLNNGSQAVGRSSFYCLEYFPSQMLRTGNNFTFSYTFEDVPFHSSYAHSQSLDRLMNPLIDQYLYYLSRTQTNGTNATQTLLFAQAGPQNMSAQAKNWLPGPCYRQQRVSTTVSQNNNSNFTWTGATKYHLNGRDSLVNPGVAMATHKDDEERFFPSSGVLMFGKQGAGKDNVEYTNVMLTSEEEIKTTNPVATEQYGVVADNLQQTNSAPIVGAVNSQGALPGMVWQNRDVYLQGPIWAKIPHTDGNFHPSPLMGGFGLKHPPPQILIKNTPVPADPPVNFTDAKLASFITQYSTGQVSVEIEWELQKENSKRWNPEIQYTSNYYKSANVDFAVNADGVYSEPRPIGTRYLTRNL

SEQ ID NO: 4987 - DNA, 2196 bp, Adeno-associated virus
  source 1..2196: mol_type = genomic DNA
atggctgctgacggttatcttccagattggctcgaggacaacctctctgagggcattcgcgagtggtgggcgctgaaacctggagccccgcaacccaaagccaaccagcaaaagcaggacgacggccggggtctggtgcttcctggctacaagtacctcggacccttcaacggactcgacaagggggagcccgtcaacgaggcggacgccgcggccctcgagcacgacaaggcctacgaccagcagctcaaagcgggtgacaatccgtacctgcggtataatcacgccgacgccgagtttcaagagcgtctgcaagaagatacgtcctttgggggcaacctcgggcgagcagtcttccaggccaaaaagagggtactcgagcctctgggtctggttgaggaaggcgctaagacggctcctggaaagaagcggccagtagaaccggactccagctcgggcatcggcaagtcaggccagcagcccgcgaaaaagagactgaattttgggccgactggcgactcagagtcagtgcctgacccccaacctctctcagaaccacctgcaggtccctctggtctgggatctggtacaatggctgcaggcggtggcgctccaatggcagacaataacgaaggcgccgacggagtgggtaatgtctcaggaaattggcattgcgattccacatggctgggcgaccgagtcatcaccaccagcactcggacctgggccctccccacctacaacaaccacctctacaagcaaatctccaacgggacctcgggaggcagcagcaacgacaacacctactttggctacagcaccccctgggggtattttgactttaacagattccactgccacttttcaccacgcgactggcagcgactcatcaacaacaactggggattccggcccaagaagctcaacttcaagctcttcaacatccaggtcaaggaggtcacccagaatgaaggcaccaagaccaccgccaataacctcaccagcacggtgcaggtctttacggactcggagtaccagctcccgtacgtgctcggctctgcccaccagggctgcctgcctccgttcccggcggacgtgttcatgattccgcagtacgggtacctgacgctgaacaacgggagccaggccgtggggcgatcctccttctactgcctggagtactttccctcgcagatgctgagaacgggcaacaactttaccttcagctacaccttcgaggacgtgcccttccacagcagctacgcgcacagccagagcctggaccggctgatgaacccgctgattgaccagtacctgtactacctgtctcggactcagaccaacgggaccaatgccacgcagactctgttgtttgctcaggccgggcctcagaacatgtcggctcaggccaagaactggctgcctggtccttgctatcggcagcagcgcgtctctacggcagtgtcgcaaaacaacaacagcaactttacctggaccggggcgaccaagtaccacctgaacggccgagactccctggtgaaccccggtgtcgccatggcaacgcacaaggacgacgaggagcgcttcttcccgagcagcggggtcctgatgtttggcaagcagggcgctggaaaggacaatgtcgagtacaccaacgtgatgctcaccagcgaggaggagatcaagaccaccaaccctgtggccacggagcagtacggtgtggtggctgacaatctgcagcagaccaactcggctcccattgtgggggcagtcaacagccagggggccttacccggtatggtctggcagaaccgggacgtgtacctgcagggtcccatctgggccaagatcccgcatacggacggcaactttcacccgtctcctctcatgggcggctttggactgaaacacccgcctccccagatcctgatcaaaaacacgccggtacctgcggatcccccggtgaactttacggacgctaagctggcgagtttcatcacgcagtacagcaccgggcaggtcagcgtggagattgagtgggagctgcagaaggagaacagcaagcgctggaatcccgagattcagtacacttccaattattataaatcagctaatgtggactttgccgtcaatgcagatggtgtatatagcgaaccccgccccattggcactcgttacctcacccgtaatctgtaa

SEQ ID NO: 4988 - protein, 731 aa, Adeno-associated virus
MAADGYLPDWLEDNLSEGIREWWALKPGAPQPKANQQKQDDGRGLVLPGYKYLGPFNGLDKGEPVNEADAAALEHDKAYDQQLKAGDNPYLRYNHADAEFQERLQEDTSFGGNLGRAVFQAKKRVLEPLGLVEEGAKTAPGKKRPVEPDSSSGIGKSGQQPAKKRLNFGPTGDSESVPDPQPLSEPPAGPSGLGSGTMAAGGGAPMADNNEGADGVGNVSGNWHCDSTWLGDRVITTSTRTWALPTYNNHLYKQISNGTSGGSSNDNTYFGYSTPWGYFDFNRFHCHFSPRDWQRLINNNWGFRPKKLNFKLFNIQVKEVTQNEGTKTTANNLTSTVQVFTDSEYQLPYVLGSAHQGCLPPFPADVFMIPQYGYLTLNNGSQAVGRSSFYCLEYFPSQMLRTGNNFTFSYTFEDVPFHSSYAHSQSLDRLMNPLIDQYLYYLSRTQTNGTNATQTLLFAQAGPQNMSAQAKNWLPGPCYRQQRVSTAVSQNNNSNFTWTGATKYHLNGRDSLVNPGVAMATHKDDEERFFPSSGVLMFGKQGAGKDNVEYTNVMLTSEEEIKTTNPVATEQYGVVADNLQQTNSAPIVGAVNSQGALPGMVWQNRDVYLQGPIWAKIPHTDGNFHPSPLMGGFGLKHPPPQILIKNTPVPADPPVNFTDAKLASFITQYSTGQVSVEIEWELQKENSKRWNPEIQYTSNYYKSANVDFAVNADGVYSEPRPIGTRYLTRNL

SEQ ID NO: 4989 - DNA, 4404 bp, Adeno-associated virus
  source 1..4404: mol_type = genomic DNA
atggctgccgatggttatcttccagattggctcgagggcaacctctctgagggcattcgcgagtggtgggacttgaaacctggagccccgaaacccaaagccaaccagcaaaagcaggacgacggccggggtctggtgcttcctggctacaggtacctcggacccttcaacggactcgacaagggagagccggtcaacgaggcagacgccgcggccctcgagcacgacaaggcctacgacaagcagctcgagcagggggacaacccgtacctcaagtacaaccacgccgacgccgagtttcaggagcgtcttcaagaagatacgtcttttgggggcaacctcgggcgagcagtcttccaggccaagaagcgggttctcgaacctctcggtctggttgaggaaggcgctaagacggctcctggaaagaagagacccatagaatcccccgactcctccacgggcatcggcaagaacggccagccgcccgctaaaaagaagctcaactttgggcagactggcgactcagagtcagtgcccgacccccaacctctcggagaacctcccgccgcgccctcaggtctgggatctggtacaatggctgcaggcggtggcgcaccaatggcagacaataacgaaggcgccgacggagtgggtaatgcctccggaaattggcattgcgattccacatggctgggcgacagagtcatcaccaccagcacccgcacctgggccctgcccacctacaacaaccacctctacaagcagatatcaagtcagagcggggctaccaacgacaaccacttcttcggctacagcaccccctggggctattttgacttcaacagattccactgccacttctcaccacgtgactggcagcgactcatcaacaacaactggggattccggcccagaaagctgcggttcaagttgttcaacatccaggtcaaggaggtcacgacgaacgacggcgttacgaccatcgctaataaccttaccagcacgattcaggtcttctcggactcggagtaccaactgccgtacgtcctcggctctgcgcaccagggctgcctccctccgttccctgcggacgtgttcatgattcctcagtacggatatctgactctaaacaacggcagtcagtctgtgggacgttcctccttctactgcctggagtactttccttctcagatgctgagaacgggcgataactttgaattcagctacacctttgaggaagtgcctttccacagcagctatgcgcacagccagagcctggaccggctgatgaatcccctcatcgaccagtacctgtactacctggcccggacccagagcactacggggtccacaagggagctgcagttccatcaggctgggcccaacaccatggccgagcaatcaaagaactggctgcccggaccctgttatcggcagcagagactgtcaaaaaacatagacagcaacaacaacagtaactttgcctggaccggggccactaaataccatctgaatggtagaaattcattaaccaacccgggcgtagccatggccaccaacaaggacgacgaggaccagttctttcccatcaacggagtgctggtttttggcaaaacgggggctgccaacaagacaacgctggaaaacgtgctaatgaccagcgaggaggagatcaaaaccaccaatcccgtggctacagaagaatacggtgtggtctccagcaacctgcaatcgtctacggccggaccccagacacagactgtcaacagccagggggctctgcccggcatggtctggcagaaccgggacgtgtacctgcagggtcccatctgggccaaaattcctcacacggacggcaactttcacccgtctcccctgatgggcggatttggactcaaacacccgcctcctcaaattctcatcaaaaacaccccggtacctgctaatcctccagaggtgtttactcctgccaagtttgcctcatttatcacgcagtacagcaccggccaggtcagcgtggagatcgagtgggaactgcagaaagaaaacagcaaacgctggaatccagagattcagtacacctcaaattatgccaagtctaataatgtggaatttgctgtcaacaacgaaggggtttatactgagcctcgccccattggcacccgttacctcacccgtaacctgtaaatggctgccgatggttatcttccagattggctcgaggacaacctctctgagggcattcgcgagtggtgggacttgaaacctggagccccgaaacccaaagccaaccagcaaaagcaggacgacggccggggtctggtgcttcctggctacaagtacctcggacccttcaacggactcgacaagggggagcccgtcaacgcggcggacgcagcggccctcgagcacgacaaggcctacgaccagcagctcaaagcgggtgacaatccgtacctgcggtataaccacgccgacgccgagtttcaggagcgtctgcaagaagatacgtcttttgggggcaacctcgggcgagcagtcttccaggccaagaagcgggttctcgaacctctcggtctggttgaggaaggcgctaagacggctcctggaaagaagagaccggtagagccatcaccccagcgttctccagactcctctacgggcatcggcaagaaaggccagcagcccgcgaaaaagagactcaactttgggcagactggcgactcagagtcagtgcccgaccctcaaccaatcggagaaccccccgcaggcccctctggtctgggatctggtacaatggctgcaggcggtggcgctccaatggcagacaataacgaaggcgccgacggagtgggtagttcctcaggaaattggcattgcgattccacatggctgggcgacagagtcatcaccaccagcacccgaacctgggccctccccacctacaacaaccacctctacaagcaaatctccaacgggacttcgggaggaagcaccaacgacaacacctacttcggctacagcaccccctgggggtattttgactttaacagattccactgccacttctcaccacgtgactggcagcgactcatcaacaacaactggggattccggcccaagagactcaacttcaagctcttcaacatccaggtcaaggaggtcacgcagaatgaaggcaccaagaccatcgccaataaccttaccagcacgattcaggtctttacggactcggaataccagctcccgtacgtcctcggctctgcgcaccagggctgcctgcctccgttcccggcggacgtcttcatgattcctcagtacgggtacctgactctgaacaatggcagtcaggccgtgggccgttcctccttctactgcctggagtactttccttctcaaatgctgagaacgggcaacaactttgagttcagctaccagtttgaggacgtgccttttcacagcagctacgcgcacagccaaagcctggaccggctgatgaaccccctcatcgaccagtacctgtactacctgtctcggactcagtccacgggaggtaccgcaggaactcagcagttgctattttctcaggccgggcctaataacatgtcggctcaggccaaaaactggctacccgggccctgctaccggcagcaacgcgtctccacgacactgtcgcaaaataacaacagcaactttgcctggaccggtgccaccaagtatcatctgaatggcagagactctctggtaaatcccggtgtcgctatggcaacccacaaggacgacgaagagcgattttttccgtccagcggagtcttaatgtttgggaaacagggagctggaaaagacaacgtggactatagcagcgttatgctaaccagtgaggaagaaattaaaaccaccaacccagtggccacagaacagtacggcgtggtggccgataacctgcaacagcaaaacgccgctcctattgtaggggccgtcaacagtcaaggagccttacctggcatggtctggcagaaccgggacgtgtacctgcagggtcctatctgggccaagattcctcacacggacggaaactttcatccctcgccgctgatgggaggctttggactgaaacacccgcctcctcagatcctgattaagaatacacctgttcccgcggatcctccaactaccttcagtcaagctaagctggcgtcgttcatcacgcagtacagcaccggacaggtcagcgtggaaattgaatgggagctgcagaaagaaaacagcaaacgctggaacccagagattcaatacacttccaactactacaaatctacaaatgtggactttgctgttaacacagatggcacttattctgagcctcgccccatcggcacccgttacctcacccgtaatctgtaa

SEQ ID NO: 4990 - protein, 738 aa, Adeno-associated virus; identical to SEQ ID NO: 4793

SEQ ID NO: 4991 - protein, 738 aa, Adeno-associated virus; identical to SEQ ID NO: 4793

SEQ ID NO: 4992 - DNA, 2501 bp, Adeno-associated virus
  source 1..2501: mol_type = genomic DNA
gaattcgcccttggctgcgtcaactggaccaatgagaactttcccttcaacgattgcgtcgacaagatggtgatctggtgggaggagggcaagatgacggccaaggtcgtggagtccgccaaggccattcatcatctgctggggcgggctcccgagattgcttgctcggcctgcgatctggtcaacgtggacctggatgactgtgtttctgagcaataaatgacttaaaccaggtatggctgccgatggttatcttccagattggctcgaggacaacctctctgagggcattcgcgagtggtgggacttgagacctggagccccgaaacccaaagccaaccagcaaaagcaggacgacggccggggtctggtgcttcctggctacaagtacctcggacccttcaacggactcgacaagggagagccggtcaacgaggcagacgccgcggccctcgagcacgacaaggcctacgacaagcagctcgagcagggggacaacccgtacctcaagtacaaccacgccgacgccgagtttcaggagcgtcttcaagaagatacgtcttttgggggcaacctcgggcgagcagtcttccaggccaagaagcgggttctcgaacctctcggtctggttgaggaaggcgctaagacggctcctggaaagaagagacccatagaatcccccgactcctccacgggcatcggcaagaaaggccagcagcccgctaaaaagagactcaactttgggcagactggcgactcagagtcagtgcccgaccctcaaccaatcggagaaccccccgcaggcccctctggtctgggatctggcacaatggctgcaggcggtggcgctccaatggcagacaataacgaaggcgccgacggagtgggtagttcctcaggaaattggcattgcgattccacatggctgggcgacagagtcatcaccaccagcacccgaacctgggccctccccacctacaacaaccacctctacaagcaaatctccaacgggacatcgggaggaagcaccaacgacaacacctacttcggctacagcaccccctgggggtattttgactttaacagattccactgccacttctcaccacgtgactggcagcgactcatcaacaacaactggggattccggcccaagagactcaacttcaagctcttcaacatccaggtcaaggaggtcacgcagaatgaaggcaccaagaccatcgccaataaccttaccagcacgattcaggtctttacggactcggaataccagctcccgtacgtcctcggctctgcgcaccagggctgcctgcctccgttcccggcggacgtcttcatgattcctcagtacgggtacctgactctgaacaacggcagtcaggccgtgggccgttcctccttctactgcctggagtactttccttctcaaatgctgagaacgggcaacaactttgagttcagctaccagtttgaggacgtgccttttcacagcagctatgcgcacagccaaagcctggaccggctgatgaaccccctcatcgaccagtacctgtactacctgtctcggactcagtccacgggaggtaccgcaggaactcagcagttgctattttctcaggccgggcctaataacatgtcggctcaggccaaaaactggctacccgggccctgctaccggcagcaacgcgtctccacgacagtgtcgcaaaataacaacagcaactttgcttggaccggtgccaccaagtatcatctgaatggcagagactctctggtaaatcccggtgtcgctatggcaacgcacaagggcgacgaagagcgattttttccatccagcggagtcttgatgtttgggaaacagggagctggaaaagacaacgtagactatagcagcgttatgctaaccagtgaggaagaaatcaaaaccaccaacccagtggccacagaacagtacggcgtggtggccgataacctgcaacagcaaaacgccgctcctattgtaggggccgtcaacagtcaaggagccttacctggcatggtctggcagaaccgggacgtgtacctgcagggtcctatctgggccaagattcctcacacggacggcaactttcatccttcgccgctgatgggaggctttggactgaaacacccgcctcctcagatcctgattaagaatacacctgttcccgcggatcctccaactaccttcagtcaagccaagctggcgtcgttcatcacgcagtacagcaccggacaggtcagcgtggaaattgaatgggagctgcagaaagagaacagcaagcgctggaacccagagattcagtatacttccaactactacaaatctacaaatgtggactttgctgtcaatactgagggtacttattcagagcctcgccccattggcacccgttacctcacccgtaacctgtaattgcctgttaatcaataaaccggttgattcgtttcagttgaactttggtctcaagggcgaattc

SEQ ID NO: 4993 - DNA, 2187 bp, Adeno-associated virus
  source 1..2187: mol_type = genomic DNA
atggctgccgatggttatcttccagattggctcgaggacaacctctctgagggcattcgcgagtggtgggacttgaaacctggagccccgaaacccaaagccaaccagcaaaagcaggacgacggccggggtctggtgcttcctggctacaagtacctcggacccttcaacggactcgacaagggagagccggtcaacgaggcagacgccgcggccctcgagcacgacaaggcctacgacaagcagctcgagcagggggacaacccgtacctcaagtacaaccacgccgacgccgagtttcaggagcgtcttcaagaagatacgtcttttgggggcaacctcgggcgagcagtcttccaggccaagaagcgggttctcgaacctctcggtctggttgaggaaggcgctaagacggctcctggaaagaagagacccatagaatcccccgactcctccacgggcatcggcaagaaaggccagcagcccgctaaaaagaagctcaactttgggcagactggcgactcagagtcagtgcccgacccccaacctctcggagaacctcccgccgcgccctcaggtctgggatctggtacaatggctgcaggcggtggcgcaccaatggcagacaataacgaaggcgccgacggagtgggtaatgcctccggaaattggcattgcgattccacatggctgggcgacagagtcatcaccaccagcacccgcacctgggccctgcccacctacaacaaccacctctacaagcagatatcaagtcagagcggggctaccaacgacaaccacttcttcggctacagcaccccctggggctattttgacttcaacagattccactgccacttctcaccacgtgactggcagcgactcatcaacaacaactggggattccggcccagaaagctgcggttcaagttgttcaacatccaggtcaaggaggtcacgacgaacgacggcgttacgaccatcgctaataaccttaccagcacgattcaggtcttctcggactcggagtaccaactgccgtacgtcctcggctctgcgcaccagggctgcctccctccgttccctgcggacgtgttcatgattcctcagtacggatatctgactctaaacaacggcagtcagtctgtgggacgttcctccttctactgcctggagtactttccttctcagatgctgagaacgggcaataactttgaattcagctacacctttgaggaagtgcctttccacagcagctatgcgcacagccagagcctggaccggctgatgaatcccctcatcgaccagtacctgtactacctggcccggacccagagcactacggggtccacaagggagctgcagttccatcaggctgggcccaacaccatggccgagcaatcaaagaactggctgcccggaccctgttatcggcagcagagactgtcaaaaaacatagacagcaacaacaacagtaactttgcctggaccggggccactaaataccatctgaatggtagaaattcattaaccaacccgggcgtagccatggccaccaacaaggacgacgaggaccagttctttcccatcaacggagtgctggtttttggcgaaacgggggctgccaacaagacaacgctggaaaacgtgctaatgaccagcgaggaggagatcaaaaccaccaatcccgtggctacagaagaatacggtgtggtctccagcaacctgcaatcgtctacggccggaccccagacacagactgtcaacagccagggggctctgcccggcatggtctggcagaaccgggacgtgtacctgcagggtcccatctgggccaaaattcctcacacggacggcaactttcacccgtctcccctgatgggcggatttggactcaaacacccgcctcctcaaattctcatcaaaaacaccccggtacctgctaatcctccagaggtgtttactcctgccaagtttgcctcatttatcacgcagtacagcaccggccaggtcagcgtggagatcgagtgggaactgcagaaagaaaacagcaaacgctggaatccagagattcagtacacctcaaattatgccaagtctaataatgtggaatttgctgtcaacaacgaaggggtttatactgagcctcgccccattggcacccgttacctcacccgtaacctgtaa

SEQ ID NO: 4994 - protein, 728 aa, Adeno-associated virus; identical to SEQ ID NO: 4765

SEQ ID NO: 4995 - protein, 728 aa, Adeno-associated virus; identical to SEQ ID NO: 4829

SEQ ID NO: 4996 - protein, 728 aa, Adeno-associated virus; identical to SEQ ID NO: 4829

SEQ ID NO: 4997 - DNA, 3113 bp, Adeno-associated virus
  source 1..3113: mol_type = genomic DNA
gaattcgccctttctacggctgcgtcaactggaccaatgagaactttcccttcaacgattgcgtcgacaagatggtgatctggtgggaggagggcaagatgacggccaaggtcgtggagtccgccaaggccattctcggcggcagcaaggtgcgcgtggaccaaaagtgcaagtcgtccgcccagatcgatcccacccccgtgatcgtcacttccaacaccaacatgtgcgccgtgattgacgggaacagcaccaccttcgagcaccagcagccgttacaagaccggatgttcaaatttgaactcacccgccgtctggagcatgactttggcaaggtgacaaagcaggaagtcaaagagttcttccgctgggcgcaggatcacgtgaccgaggtggcgcatgagttctacgtcagaaagggtggagccaacaagagacccgcccccgatgacgcggataaaagcgagcccaagcgggcctgcccctcagtcgcggatccatcgacgtcagacgcggaaggagctccggtggactttgccgacaggtaccaaaacaaatgttctcgtcacgcgggcatgcttcagatgctgcttccctgcaagacatgcgagagaatgaatcagaatttcagcatttgcttcacgcacgggaccagagactgttcagaatgtttccccggcgtgtcagaatctcaaccggtcgtcagaaagaggacgtatcggaaactctgtgccattcatcatctgctggggcgggctcccgagattgcttgctcggcctgcgatctggtcaacgtggacctggatgactgtgtttctgagcaataaatgacttaaaccaggtatggctgccgatggtcatcttccagattggctcgaggacaacctctctgagggcattcgcgagtggtgggacttgaaacctggagccccgaaacccaaagccaaccagcaaaagcaggacgacggccggggtctggtgcttcctggctacaagtacctcggacccttcaacggactcgacaagggggagcccgtcaacgcggcggacgcagcggccctcgagcacgacaaggcctacgaccagcagctcaaagcgggtgacaatccgtacctgcggtataaccacgccgacgccgagtttcaggagcgtcttcaagaagatacgtcttttgggggcaacctcgggcgagcagtcttccaggccaagaagcgggttctcgaacctctcggtctggttgaggaaggcgctaagacggctcctggaaagaagagacccatagaatcccccgactcctccacgggcatcggcaagaaaggccagcagcccgctaaaaagaagctcaactttgggcagactggcgactcagagtcagtgcccgaccctcaaccaatcggagaaccccccgcaggcccctctggtctgggatctggtacaatggctgcaggcggtggcgctccaatggcagacaataacgaaggcgccgacggagtgggtagttcctcaggaaattggcattgcgattccacatagctgggcgacagagtcatcaccaccagcacccgaacctgggccctccccacctacaacaaccacctctacaagcaaatctccaacgggacatcgggaggaagcaccaacgacaacacctacttcggctacagcaccccctgggggtattttgactttaacagattccactgccacttctcaccacgtgactggcagcgactcatcaacaacagctggggattccggcccaagagactcaacttcaagctcttcaacatccaggtcaaggaggtcacgcagaatgaaggcaccaagaccatcgccaataaccttaccagcacgattcaggtctttacggactcggaataccagctcccgtacgtcctcggctctgcgcaccagggctgcctgcctccgttcccggcggacgtcttcatgattcctcagtacgggtacctgactctgaacaacggcagtcaggccgtgggccgttcctccttctactgcctggagtactttccttctcaaatgctgagaacgggcaacaactttgagttcagctaccagtttgaggacgtgccttttcacagcagctacgcgcacagccaaagcctggaccggctgatgaaccccctcatcgaccagtacctgtactacctgtctcggactcagtccacgggaggtaccgcaggaactcagcagttgctattttctcaggccgggcctaataacatgtcggctcaggccaaaaactggctacccgggccctgctaccggcagcaacgcgtctccacgacactgtcgcaaaataacaacagcaactttgcttggaccggtgccaccaagtatcatctgaatggcagagactctctggtaaatcccggtgtcgctatggcaacgcacaaggacgacgaagagcgattttttccatccagcggagtcttgatgtttgggaaacagggagctggaaaagacaacgtggactatagcagcgttatgctaaccagtgaggaagaaatcaaaaccaccaacccagtggccacagaacagtacggcgtggtggccgataacctgcaacagcaaaacgccgctcctattgtaggggccgtcaacagtcaaggagccttacctggcatggtctggcagaaccgggacgtgtacctgcagggtcctatctgggccaagattcctcacacggacggcaactttcatccttcgccgctgatgggaggctttggactgaaacacccgcctcctcagatcctgattaagaatacacctgttcccgcggatcctccaactaccttcagtcaagccaagctggcgtcgttcatcacgcagtacagcaccggacaggtcagcgtggaaattgaatgggagctgcagaaagagaacagcaagcgctggaacccagagattcagtatacttccaactactacaaatctacaaatgtggactttgctgtcaatactgagggtacttattcagagcctcgccccattggcacccgttacctcacccgtaacctgtaattgcctgttaatcaataaaccggttaattcgtttcagttgaactttggtctctgcgaagggcgaattc

SEQ ID NO: 4998 - DNA, 3106 bp, Adeno-associated virus
  source 1..3106: mol_type = genomic DNA
gaattcgcccttctacggctgcgtcaactggaccaatgagaactttcccttcaacgattgcgtcgacaagatggtgatctggtgggaggagggcaagatgacggccaaggtcgtggagtccgccaaggccattctcggcggcagcaaggtgcgcgtggaccaaaagtgcaagtcgtccgcccagatcgaccccacccccgtgatcgtcacctccaacaccaacatgtgcgccgtgattgacgggaacagcaccaccttcgagcaccagcagccgttgcaggaccggatgttcaaatttgaactcacccgccgtctggagcatgactttggcaaggcgacaaagcaggaagtcaaagagttcttccgctgggcgcaggatcacgtgaccgaggtggcgcatgagttctacgtcagaaagggtggagccaacaagagacccgcccccgatgacgcggataaaagcgagcccaagcgggcccgcccctcagtcgcggatccatcgacgtcagacgcggaaggagctccggtggactttgccgacaggtaccaaaacaaatgttctcgtcacgcgggcatgcttcagatgctgtttccctgcaaaacatgcgagagaatgaatcagaatttcaacatttgcttcacgcacgggaccagagactgttcagaatgtttccccggcgtgtcagaatctcaaccggtcgtcagaaagaggacgtatcggaaactctgtgccattcatcatctgctggggcgggctcccgagattgcttgctcggcctgcgatctggtcaacgtggacctggatgactgtgtttctgagcaataaatgacttaaaccaggtatggctgccgatggttatcttccagattggctcgaggacaacctctctgagggcattcgcgagtggtgggacttgaaacctggagccccgaaacccaaagccaaccagcaaaagcaggacgacggccggggtctggtgcttcctggctacaagtacctcggacccttcaacggactcgacaagggagagccggtcaacgaggcagacgccgcggccctcgagcacgacaaggcctacgacaagcagctcgagcagggggacaacccgtacctcaagtacaaccacgccgacgccgagtttcaggagcgtcttcaagaagatacgtcttttgggggcaacctcgggcgagcagtcttccgggccaagaagcgggttctcgaacctctcggtctggttgaggaaggcgctaagacggctcctggaaagaagagacccatagaatcccccgactcctccacgggcatcggcaagaaaggccagcagcccgctaaaaagaagctcaactttgggcagactggcgactcagagtcagtgcccgacccccaacctctcggagaacctcccgccgcgccctcaggtctgggatctggtacaatggctgcaggcggtggcgcaccaatggcagacaataacgaaggcgccgacggagtgggtaatgcctccggaaattggcattgcgattccacatggctgggcgacagagtcatcaccaccagcacccgcacctgggccctgcccacctacaacaaccacctctacaagcagatatcaagtcagagcggggctaccaacgacaaccacttcttcggctacagcaccccctggggctattttgacttcaacagattccactgccacttctcaccacgtgactggcagcgactcatcaacaacaaccggggattccggcccagaaagctgcggttcaagttgttcaacatccaggtcaaggaggtcacgacgaacgacggcgttacgaccatcgctaataaccttaccagcacgattcaggtcttctcggactcggagtaccaactgccgtacgtcctcggctctgcgcaccagggctgcctccctccgttccctgcggacgtgttcatgattcctcagtacggatatctgactctaaacaacggcagtcagtctgtgggacgttcctccttctactgcctggagtactttccttctcagatgctgagaacgggcaataactttgaattcagctaccagtttgaggacgtgccctttcacagcagctacgcgcacagccaaagcctggaccggctgatgaaccccctcatcgaccagtacctgtactacctgtctcggactcagtccacgggaggtaccgcaggaactcagcagttgctattttctcaggccgggcctaataacatgtcggctcaggccaaaaactggctacccgggccctgctaccggcagcaacgcgtctccacgacactgtcgcaaaataacaacagcaactttgcttggaccggtgccaccaagtatcatctgaatggcagagactctctggtaaatcccggtgtcgctatggcaacgcacaaggacgacgaagagcgattttttccatccagcggagtcttgatgtttgggaaacagggagctggaaaagacaacgtggactatagcagcgttatgctaaccagtgaggaagaaatcaaaaccaccaacccagtggccacagaacagtacggcgtggtggccgataacctgcaacagcaaaacgccgctcctattgtaggggccgtcaacagtcaaggagccttacctggcatggcctggcagaaccgggacgtgtacctgcagggtcctatctgggccaagattcctcacacggacggcaactttcatccttcgccgctgatgggaggctttggactgaaacacccgcctcctcagatcctgattaagaatacacctgttcccgcggatcctccaactaccttcagtcaagccaagctggcgtcgttcatcacgcagtacagcaccggacaggtcagcgtggaaattgaatgggagctgcagaaagagaacagcaagcgctggaacccagagattcagtatacttccaactactacaaatctacaaatgtggactttgctgtcaatactgagggtacttattcagagcctcgccccattggcacccgttacctcacccgtaacctgtaattgcctgttaatcaataaaccggttaattcgtttcagttgaactttggtctctgcgaagggcgaattc

SEQ ID NO: 4999 - DNA, 3197 bp, Adeno-associated virus
  source 1..3197: mol_type = genomic DNA
gaattcgccctttctacggctgcgtcaactggaccaatgagaactttcccttcaacgattgcgtcgacaagatggtgatctggtgggaggagggcaagatgacggccaaggtcgtggagtccgccaaggccattctcggcggcagcaaggtgcgcgtggaccaaaagtgcaagtcgtccgcccagatcgaccccacccccgtgatcgtcacctccaacaccaacatgtgcgccgtgattgacgggaacagcaccaccttcgagcaccagcagccgttacaagaccggatgttcaaatttgaactcacccgccgtctggagcacgactttggcaaggtgacaaagcaggaagtcaaagagttcttccgctgggcgcaggatcacgtgaccgaggtggcgcatgagttctacgtcagaaagggtggagccaacaagagacccgcccccgatgacgcggataaaagcgagcccaagcgggcctgcccctcagtcgcggatccatcgacgtcagacgcggaaggagctccggtggactttgccgacaggtaccaaaacaaatgttctcgtcacgcgggcatgcttcagatgctgtttccctgcaagacatgcgagagaatgaatcagaatttcaacatttgcttcacgcacgggaccagagactgttcagaatgtttccccggcgtgtcagaatctcaaccggtcgtcagaaagaggacgtatcggaaactctgtgccattcatcatctgctggggcgggctcccgagattgcttgctcggcctgcgatctggtcaacgtggacctggatgactgtgtttctgagcaataaatgacttaaaccaggtatggctgccgatggttatcttccagattggctcgaggacaacctctctgagggcattcgcgagtggtgggacttgaaacctggagccccgaaacccaaagccaaccagcaaaagcaggacgacggccggggtctggtgcttcctggctacaagtacctcggacccttcaacggactcgacaagggagagccggtcaacgaggcagacgccgcggccctcgagcacgacaaggcctacgacaagcagctcgagcagggggacaacccgtacctcaagtacaaccacgccgacgccgagtttcaggagcgtcttcaagaagatacgtcttttgggggcaacctcgggcgagcagtcttccaggccaagaagcgggttctcgaacctctcggtctggttgaggaaggcgctaagacggctcctggaaagaagagaccggtagagccatcaccccagcgttctccagactcctctacgggcatcggcaagacaggccagcagcccgcgaaaaagagactcaactttgggcagactggcgactcagagtcagtgcccgaccctcaaccaatcggagaaccccccgcaggcccctctggtctgggatctggtacaatggctgcaggcggtggcgctccaatggcagacaataacgaaggcgccgacggagtgggtagttcctcaggaaattggcattgcgattccacatggctgggcgacagagtcatcaccaccagcacccgaacctgggccctccccacctacaacaaccacctctacaagcaaatctccaacgggacatcgggaggaagcaccaacgacaacacctacttcggctacagcaccccctgggggtattttgactttaacagattccactgccacttctcaccacgtgactggcagcgactcatcaacaacaactggggattccggcccaagagactcaacttcaagctcttcaacatccaggtcaaggaggtcacgcagaatgaaggcaccaagaccatcgccaataaccttaccagcacgattcaggtctttacggactcggaataccagctcccgtacgtcctcggctctgcgcaccagggctgcctgcctccgttcccggcggacgtcttcatgattcctcagtacgggtacctgactctgaacaacggcagtcaggccgtgggccgttcctccttctactgcctggagtactttccttctcaaatgctgagaacgggcaacaactttgagttcagctaccagtttgaggacgtgccttttcacagcagctacgcgcacagccaaagcctggaccggctgatgaaccccctcatcgaccagtacctgtactacctgtctcggactcagtccacgggaggtaccgcaggaactcagcagttgctattttctcaggccgggcctaataacatgtcggctcaggccaaaaactggctacccgggccctgctaccggcagcaacgcgtctccacgacactgtcgcaaaataacaacagcaactttgcttggaccggtgccaccaagtatcatctgaatggcagagactctctggtaaatcccggtgtcgctatggcaacgcacaaggacgacgaagagcgattttttccatccagcggagtcttgatgtttgggaaacagggagctggaaaagacaacgtggactatagcagcgttatgctaaccagtgaggaagaaatcaaaaccaccaacccagtggccacagaacagtacggcgtggtggccgataacctgcaacagcaaaacgccgctcctattgtaggggccgtcaacagtcaaggagccttacctggcatggtctggcagaaccgggacgtgtacctgcagggtcctatctgggccaagattcctcacacggacggcaactttcatccttcgccgctgatgggaggctttggactgaaacacccgcctcctcagatcctgattaagaatacacctgttcccgcggatcctccaactaccttcagtcaagccaagctggcgtcgttcatcacgcagtacagcaccggacaggtcagcgtggaaattgaatgggagctgcagaaagagaacagcaagcgctggaacccagagattcagtatacttccaactactacaaatctacaaatgtggactttgctgtcaatactgagggtacttattcagagcctcgccccattggcacccgttacctcacccgtaacctgtaattgcctgttaatcaataaaccggttaattcgtttcagttgaactttggtctctgcgaagggcgaattcgtttaaacctgcaggactagtccctttagtgagggttaattctgagcttggcgtaatcatgggtcatag

SEQ ID NO: 5000 - DNA, 3276 bp, Adeno-associated virus
  source 1..3276: mol_type = genomic DNA
gaattcgcccttcgcagagaccaaagttcaactgaaacgaattaaccggtttattgattaacaggcaattacaggttacgggtgaggtaacgggtgccaatggggcgaggctcagtataaaccccttcgttgttgacagcaaattccacattattagacttggcataatttgaggtgtactgaatctctggattccagcgtttgctgttttctttctgcagttcccactcgatctccacgctgacctggccggtgctgtactgcgtgataaatgaggcaaacttggcaggagtaaacacctctggaggattagcaggtaccggggtgtttttgatgagaatttgaggaggcgggtgtttgagtccaaatccgtccatcaggggagacgggtgaaagttgccgtccgtgtgaggaattttggcccagatgggaccctgcaggtacacgtcccggttctgccagaccatgccgggcagagccccctggctgttgacagtctgtgtctggggtccggccgtagacgattgcaggttgctggagaccacaccgtattcttctgtagccacgggattggtggttttgatctcctcctcgctggtcattagcacgttttccagcgttgtcttgttggcagcccccgttttgccaaaaaccagcactccgttgatgggaaagaactggtcctcgtcgtccttgttggtggccatggctacgcccgggttggttaatgaatttctaccattcagatggtatttagtggccccggtccaggcaaagttactgttgttgttgctgtctatgttttttgacagtctctgctgccgataacagggtccgggcagccagttctttgattgctcggccatggtgttgggcccagcctgatggaactgcagctcccttgtggaccccgtagtgctctgggtccgggccaggtagtacaggtactggtcgatgaggggattcatcagccggtccaggctctggctatgcgcatagctgctgtggaaaggcacttcctcaaaggtgtagctgaattcaaagttattgcccgttctcagcatctgagaaggaaagtactccaggcagtagaaggaggaacgtcccacagactgactgccgttgtttagagtcagatatccgtactgaggaatcatgaacacgtccgcagggaacggagggaggcagccctggtgcgcagagccgaggacgtacggcagttggtactccgagtccgagaagacctgaatcgtgctggtaaggttattagcgatggtcgtaacgccgtcgtccgtcgtgacctccttgacctggatgttgaacaacttgaaccgcagctttctgggccggaatccccagttgttgttgatgagtcgctgccagtcacgtggtgagaagtggcagtggaatctgttaaagtcaaaatacccccagggggtgctgtagccgaagtaggtgttgtcgttggtgcttcctcccgatgtcccgttggagatttgcttgtagaggtggttgttgtaggtggggagggcccaggttcgggtgctggtggtgatgactctgtcgcccagccatgtggaatcgcaatgccaatttcctgaggaactacccactccgtcggcgccttcgttattgtctgccattggagcgccaccgcctgcagccattgtaccagatcccagaccagaggggcctgcggggggttctccgattggttgagggtcgggcactgactctgagtcgccagtctgcccaaagttgagtctctttttcgcgggctgctggcctgtcttgccgatgcccgtagaggagtctggagaacgctggggtgatggctctaccggtctcttctttccaggagccgtcttagcgccttcctcaaccagaccgagaggttcgagaacccgcttcttggcctggaagactgctcgcccgaggttgcccccaaaagacgtatcttcttgaagacgctcctgaaactcggcgtcggcgtggttgtacttgaggtacgggttgtccccctgctcgagctgcttgtcgtaggccttgtcgtgctcgagggccgcggcgtctgcctcgttgaccggctctcccttgtcgagtccgttgaagggtccgaggtacttgtagccaggaagcaccagaccccggccgtcgtcctgcttttgctggttggctttgggtttcggggctccaggtttcaagtcccaccactcgcgaatgccctcagagaggttgtcctcgagccaatctggaagataaccatcggcagccatacctggtttaagtcatttattgctcagaaacacagtcatccaggtccacgttgaccagatcgcaggccgagcaagcaatctcgggagcccgccccagcagatgatgaatggcacagagtttccgatacgtcctctttctgacgaccggttgagattctgacacgccggggaaacattctgaacagtctctggtcccgtgcgtgaagcaaatgttgaaattctgattcattctctcgcatgtcttgcagggaaacagcatctgaagcatgcccgcgtgacgagaacacttgttttggtacctgtcggcaaagtccaccggagctccttccgcgtctgacgtcgatggatgcaaaatgtcgcaaaagcactcacgtgacagctaatacaggaccactcccctatgacgtgatttacgtcagcgctatgcccgcgtgacgagaacatttgttttggtacctgtcggcaaagtccaccggagctccttccgcgtctgacgtcgatggatccgcgactgaggggcaggcccgcttgggctcgcttttatccgcgtcatcgggggcgggtctcttgttggctccaccctttctgacgtagaactcatgcgccacctcggtcacgtgatcctgcgcccagcggaagaactctttgacttcctgctttgtcaccttgccaaagtcatgctccagacggcgggtgagttcaaatttgaacatccggtcctgcaacggctgctggtgctcgaaggtggtgctgttcccgtcaatcacggcgcacatgttggtgttggaagtgacgatcacgggggtgggatcgatctgggcggaagacttgcacttttggtccacgcgcaccttgctgccgccgagaatggccttggcggactccacgaccttggccgtcatcttgccctcctcccaccagatcaccatcttgtcgacgcaatcgttgaagggaaagttctcattggtccagttgacgcagccgtagaaagggcgaattc

SEQ ID NO: 5001 - protein, 738 aa, Adeno-associated virus; identical to SEQ ID NO: 4777

SEQ ID NO: 5002 - protein, 738 aa, Adeno-associated virus
MAADGYLPDWLEDNLSEGIREWWDLKPGAPKPKANQQKQDDGRGLVLPGYKYLGPFNGLDKGEPVNAADAAALEHDKAYDQQLKAGDNPYLRYNHADAEFQERLQEDTSFGGNLGRAVFQAKKRVLEPLGLVEEGAKTAPGKKRPVEPSPQRSPDSSTGIGKKGHQPARKRLNFGQTGDSESVPDPQPIGEPPAGPSGLGSGTMAAGGGAPMADNNEGADGVGSSSGNWHCDSTWLGDRVITTSTRTWALPTYNNHLYKQISNGTSGGSTNDNTYFGYSTPWGYFDFNRFHCHFSPRDWQRLINNNWGFRPKRLNFKLFNIQVKEVTQNEGTKTIANNLTSTIQVFTDSEYQLPYVPGSAHQGCLPPFPADVFMIPQYGYLTLNNGSQAVGRSSFYCLEYFPSQMLRTGNNFEFSYTFEDVPFHSSYAHSQSLDRLMNPLIDQYLYYLSRTQSTGGTQGTQQLLFSQAGPANMSAQAKNWLPGPCYRQQRVSTTLSQNNNSNFAWTGATKYHLNGRDSLVNPGVAMATHKDDEERFFPSSGVLMFGKQGAGKDNVDYSSVMLTSEEEIKTTNPVATEQYGVVADNLQQTNGAPIVGTVNSQGALPGMVWQNRDVYLQGPIWAKIPHTDGNFHPSPLMGGFGLKHPPPQILIKNTPVPADPPTTFSQAKLASFITQYSTGQVSVEIEWELQKENSKRWNPEIQYTSNYYKSTNVDFAVNTEGTYSEPRPIGTRYLTRNL

SEQ ID NO: 5003 - protein, 738 aa, Adeno-associated virus; identical to SEQ ID NO: 4775

SEQ ID NO: 5004 - DNA, 2489 bp, Adeno-associated virus
  source 1..2489: mol_type = genomic DNA
gaattcgccctttctacggctgcgtcaactggaccaatgagaactttcccttcaacgattgcgtcgacaagatggtgatctggtgggaggagggcaagatgacggccaaggtcgtgaagtccgccaaggccattcatcatctgctggggcgggctcccgagattgcttgctcggcctgcgatctggtcaacgtggacctggatgactgtgtttctgagcaataaatgacttaaaccaggtatggctgccgatggttatcttccagattggctcgaggacaacctctctgagggcattcgcgagtggtgggacttgaaacctggagccccgaaacccaaagccaaccagcaaaagcaggacgacggccggggtctggtgcttcctggctacaagtacctcggacccttcaacggactcgacaagggagagccggtcaacgaggcagacgccgcggccctcgagcacgacaaggcctacgacaagcagctcgagcagggggacaacccgtacctcaagtacaaccacgccgacgccgagtttcaggagcgtcttcaagaagatacgtcttttgggggcaacctcgggcgagcagtcttccaggccaagaagcgggttctcgaacctctcggtctggttgaggaaggcgctaagacggctcctggaaagaagagacccatagaatcccccgactcctccacgggcatcggcaggaaaggccagcagcccgctaaaaagaagctcaactttgggcagactggcgactcagagtcagtgcccgaccctcaaccaatcggagaaccccccgcaggcccctctggtctgggatctggtacaatggctgcaggcggtggcgctccaatggcagacaataacgaaggcgccgacggagtgggtaatgcctccggaaattggcattgcgattccacatggctgggcgacagagtcatcaccaccagcacccgcacctgggccctgcccacctacaacaaccacctctacaagcagatatcaagtcagagcggggctaccaacgacaaccacttcttcggctacagcaccccctggggctattttgacttcaacagattccactgccacttctcaccacgtgactggcagcgactcatcaacaacaactggggattccggcccagaaagctgcggttcaagttgttcaacatccaggtcaaggaggtcacgacgaacgacggcgttacgaccatcgccaataaccttaccagcacgattcaggtcttctcggactcggagtaccaactgccgtacgtcctcggctctgcgcaccagggctgcctccctccgttccctgcggacgtgttcatgattcctcagtacggatatctgactctaaacaacggcagtcagtctgtgggacgttcctccttctactgcctggagtactttccttctcagatgctgagaacgggcaataactttgaattcagctacacctttgaggaagtgcctttccacagcagctatgcgcacagccagagcctggaccggctgatgaatcccctcatcgaccagtacctgtactacctggcccggacccagagcactacggggtccacaagggagctgcagttccatcaggctgggcccaacaccatggccgagcaatcaaagaactggctgcccggaccctgttatcggcagcagagactgtcaaaaaacatagacagcaacaacaacagtaactttgcctggaccggggccactaaataccatctgaatggtagaaattcattaaccaacccgggcgtagccatggccaccaacaaggacgacgaggaccagttctttcccatcaacggagtgctggtttttggcaaaacgggggctgccaacaagacaacgctggaaaacgtgctaatgaccagcgaggaggagatcaaaaccaccaatcccgtggctacagaagaatacggtgtggtctccagcaacctgcaatcgtctacggccggaccccagacacagactgtcaacagccagggggctctgcccggcatggtctggcagaaccgggacgtgtacctgcagggtcccatctgggccaaaattcctcacacggacggcaactttcacccgtctcccctgatgggcggatttggactcaaacacccgcctcctcaaattctcatcaaaaacaccccggtacctgctaatcctccagaggtgtttactcctgccaagtttgcctcatttatcacgcagtacagcaccggccaggtcagcgtggagatcgagtgggaactgcagaaagaaaacagcaaacgctggaatccagagattcagtacacctcaaattatgccaagtctaataatgtggaatttgctgtcaacaacgaaggggtttatactgagcctcgccccattggcacccgttacctcacccgtaacctgtaattgcctgttaatcaataaaccggttaattcgtttcagttgaactttggtcaagggcgaattc

SEQ ID NO: 5005 - DNA, 3098 bp, Adeno-associated virus
  source 1..3098: mol_type = genomic DNA
gaattcgccctttctacggctgcgtcaactggaccaatgagaactttcccttcaacgattgcgtcgacaagatggtgatctggtgggaggagggcaagatgacggccaaggtcgtggagtccgccaaggccattctcggcggcagcaaggtgcgcgtggaccaaaagtgcaagtcttccgcccagatcgatcccacccccgtgatcgtcacttccaacaccaacatgtgcgccgtgattgacgggaacagcaccaccttcgagcaccagcagccgttacaagaccggatgttcaaatttgaactcacccgccgtctggagcacgactttggcaaggtgacaaagcaggaagtcaaagagttcttccgctgggcgcaggatcacgtgaccgaggtggcgcatgagttctacgtcagaaagggtggagccaacaagagacccgcccccgatgacgcggataaaagcgagcccaagcgggcctgcccctcagtcgcggatccatcgacgtcagacgcggaaggagctccggtggactttgccgacaggtaccaaaacaaatgttctcgtcacgcgggcatgcttcagatgctgtttccctgcaagacatgcgagagaatgaatcagaatttcaacatttgcttcacgcacgggaccggagactgttcagaatgtttccccggcgtgtcagaatctcaaccggtcgtcagaaagaggacgtatcggaaactctgtgccattcatcatctgctggggcgggctcccgagattgcttgctcggcctgcgatctggtcaacgtggacctggatgactgtgtttctgagcaataaatgacttaaaccaggtatggctgccgatggttatcttccagattggctcgaggacaacctctctgagggcattcgcgagtggtgggacttgaaacctggagccccgaaacccaaagccaaccagcaaaagcaggacgacggccggggtctggtgcttcctggctacaagtacctcggacccttcaacggactcgacaagggagagccggtcaacgcggcggacgcagcggccctcgagcacgacaaggcctacgaccagcagctcaaagcgggtgacaatccgtacctgcggtataaccacgccgacgccgagtttcaggagcgtcttcaagaagatacgtcttttgggggcaacctcgggcgagcagtcttccaggccaagaagcgggttctcgaacctctcggtctggttgaggaaggcgctaagacggctcctggaaagaagagacccatagaatcccccgactcctccacgggcatcggcaagaaaggccagcagcccgctaaaaagaagctcaactttgggcagactggcgactcagagtcagtgcccgaccctcaaccaatcggagaaccccccgcaggcccctctggtctgggatctggtacaatggctgcaggcggtggcgctccaatggcagacaataacgaaggcgccgacggagtgggtaatgcctccggaaattggcattgcgattccacatggctgggcgacagagtcatcaccaccagcacccgcacctgggccctgcccacctacaacaaccacctctacaagcagatatcaagtcagagcggggctaccaacgacaaccacttcttcggctacagcaccccctggggctattttgacttcaacagattccactgccacttctcaccacgtgactggcagcgactcatcaacaacaactggggattccggcccagaaagctgcggttcaagttgttcaacatccaggtcaaggaggtcacgacgaacgacggcgttacgaccatcgctaataaccttaccagcacgattcaggtcttctcggactcggagtaccaactgccgtacgtcctcggctctgcgcaccagggctgcctccctccgttccctgcggacgtgttcatgattcctcagtacggatatctgactctaaacaacggcagtcagtctgtgggacgttcctccttctactgcctggagtactttccttctcagatgctgagaacgggcaataactttgaattcagctacacctttgaggaagtgcctttccacagcagctatgcgcacagccagagcctggaccggctgatgaatcccctcatcgaccagtacctgtactacctggcccggacccagagcactacggggtccacaagggagctgcagttccatcaggctgggcccaacaccatggccgagcaatcaaagaactggctgcccggaccctgttatcggcggcagagactgtcaaaagacatagacagcaacaacaacagtaactttgcctggaccggggccactaaataccatctgaatggtagaaattcattaaccaacccgggcgtagccatggccaccaacaaggacgacgaggaccagttctttcccatcaacggagtgctggtttttggcaaaacgggggctgccaacaagacaacgctggaaaacgtgctaatgaccagcgaggaggagatcaaaaccaccaatcccgtggctacagaagaatacggtgtggtctccagcaacctgcaatcgtctacggccggaccccagacacagactgtcaacagccagggggctctgcccggcatggtctggcagaaccgggacgtgtacctgcagggtcccatctgggccaaaattcctcacacggacggcaactttcacccgtctcccctgatgggcggatttggactcaaacacccgcctcctcaaattctcatcaaaaacaccccggtacctgctaatcctccagaggtgtttactcctgccaagtttgcctcatttatcacgcagtacagcaccggccaggtcagcgtggagatcgagtgggaactgcagaaagagaacagcaaacgctggaatccagagattcagtacacctcaaattatgccaagtctaataatgtggaatttgctgtcaacaacgaaggggtttatactgagcctcgccccattggcacccgttacctcacccgtaacctgtaattacttgttaatcaataaaccggttgattcgtttcagttgaactttggtctctgcgaagggcgaattc

SEQ ID NO: 5006 - DNA, 2969 bp, Adeno-associated virus
  source 1..2969: mol_type = genomic DNA
gaattcgccctttctacggctgcgtcaactggaccaatgagaactttcccttcaacgattgcgtcgacaagatggtgatctggtgggaggagggcaagatgacggccaaggtcgtggagtccgccaaggccattctcggcggcagcaaggtgcgcgtggaccaaaagtgcaagtcgtccgcccagatcgaccccacccccgtgatcgtcacctccaacaccaacatgtgcgccgtgattgacgggaacagcaccaccttcgagcaccagcagccgttacaagaccggatgttcaaatttgaactcacccgccgtctggagcacgactttggcaaggtgacaaagcaggaagtcaaagagttcttccgctgggcgcaggatcacgtgaccgaggtggcgcatgagttctacgtcagaaagggtggagccaacaagagacccgcccccgatgacgcggataaaagcgagcccaagcgggcctgcccctcagtcgcggatccatcgacgtcagacgcggaaggagctccggtggactttgccgacaggtaccaaaacaaatgttctcgtcacgcgggcatgcttcagatgctgtttccctgcaagacatgcgagagaatgaatcagaatttcaacatttgcttcacgcacgggaccagagactgttcagaatgtttccccggcgtgtcagaatctcaaccggtcgtcagaaagaggacgtatcggaaactctgtgccattcatcatctgctggggcgggctcccgagattgcttgctcggcctgcgatctggtcaacgtggacctggatgactgtgtttctgagcaataaatgacttaaaccaggtatggctgccgatggttatcttccagattggctcgaggacaacctctctgagggcatccgcgagtggtgggacttgaaacctggagccccgaaacccaaagccaaccagcaaaagcaggacgacggccggggtctggtgcttcctggctacaagtacctcggacccttcaacggactcgacaagggagagccggtcaacgaggcagacgccgcggccctcgagcacgacaaggcctacgacaagcagctcgagcagggggacaacccgtacctcaagtacaaccacgccgacgccgagtttcaggagcgtcttcaagaagatacgtcttttgggggcaacctcgggcgagcagtcttccaggccaagaagcgggttctcgaacctctcggtctggttgaggaaggcgctaagacggctcctggaaagaagagaccggtagagccatcaccccagcgttctccagactcctctacgggcatcggcaagacaggccagcagcccgcgaaaaagagactcaactttgggcagactggcgactcagagtcagtgcccgaccctcaaccaatcggagaaccccccgcaggcccctctggtctgggatctggtacaatggctgcaggcggtggcgctccaatggcagacaataacgaaggcgccgacggagtgggtagttcctcaggaaattggcattgcgattccacatggctgggcgacagagtcatcaccaccagcacccgaacctgggccctccccacctacaacaaccacctctacaagcaaatctccaacgggacatcgggaggaagcaccaacgacaacacctacttcggctacagcaccccctgggggtattttgactttaacagattccactgccacttctcaccacgtgactggcagcgactcatcaacaacaactggggattccggcccaagagactcaacttcaagctcttcaacatccaggtcaaggaggtcacgcagaatgaaggcaccaagaccatcgccaataaccttaccagcacgattcaggtctttacggactcggaataccagctcccgtacgtcctcggctctgcgcaccagggctgcctgcctccgttcccggcggacgtcttcatgattcctcagtacgggtacctgactctgaacaacggcagtcaggccgtgggccgttcctccttctactgcctggagtactttccttctcaaatgctgagaacgggcaacaactttgagttcagctaccagtttgaggacgtgccttttcacagcagctacgcgcacagccaaagcctggaccggctgacgaaccccctcatcgaccagtacctgtactacctggcccggacccagagcactacggggtccacaagggggctgcagttccatcaggctgggcccaacaccatggccgagcaatcaaagaactggctgcccggaccctgttatcggcagcagagactgtcaaaaaacatagacagcaacaacaacagtaactttgcctggaccggggccactaaataccatctgaatggtagaaattcattaaccaacccgggcgtagccatggccaccaacaaggacgacgaggaccagttctttcccatcaacggagtgctggtttttggcaaaacgggggctgccaacaagacaacgctggaaaacgtgctaatgaccagcgaggaggagatcaaaaccaccaatcccgtggctacagaagaatacggtgtggtctccagcaacctgcaatcgtctacggccggaccccagacacagactgtcaacagccagggggctctgcccggcatggtctggcagaaccgggacgtgtacctgcagggtcccatctgggccaaaattcctcacacggacggcaactttcacccgtctcccctgatgggcggatttggactcaaacacccgcctcctcaaattctcatcaagtatacttccaactactacaaatctacaaatgtggactttgctgtcaatactgagggtacttattcagagcctcgccccattggcacccgttacctcacccgtaacctgtaattgcctgttaatcaataaaccggttaattcgtttcagttgaactttggtctctgcgaagggcgaattc

SEQ ID NO: 5007 - DNA, 3113 bp, Adeno-associated virus
  source 1..3113: mol_type = genomic DNA
gaattcgccctttctacggctgcgtcaactggaccaatgagaactttcccttcaacgattgcgtcgacaagatggtgatctggtgggaggagggcaagatgacggccaaggtcgtggagtccgccaaggccattctcggcggcagcaaggtgcgcgtggaccaaaagtgcaagtcgtccgcccagatcgatcccacccccgtgatcgtcacttccaacaccaacatgtgcgccgtgattgacgggaacagcaccaccttcgagcaccagcagccgttacaagaccggatgttcaaatttgaactcacccgccgtctggagcatgactttggcaaggtgacaaagcaggaagtcaaagagttcttccgctgggcgcaggatcacgtgaccgaggtggcgcatgagttctacgtcagaaagggtggagccaacaagagacccgcccccgatgacgcggataaaagcgagcccaagcgggcctgcccctcagtcgcggatccatcgacgtcagacgcggaaggagctccggtggactttgccgacaggtaccaaaacaaatgttctcgtcacgcgggcatgcttcagatgctgtttccctgcaagacatgcgagagaatgaatcagaatttcaacatttgcttcacgcacgggaccagagactgttcagaatgtttccccggcgtgtcagaatctcaaccggtcgtcagaaagaggacgtatcggaaactctgtgccattcatcatctgctggggcgggctcccgagattgcttgctcggcctgcgatctggtcaacgtggacctggatgactgtgtttctgagcaataaatgacttaaaccaggtatggctgccgatggttatcttccagattggctcgaggacaacctctctgagggcattcgcgagtggtgggacttgaaacctggagccccgaaacccaaagccaaccagcaaaagcaggacgacggccggggtctggtgcttcctggctacaagtacctcggacccttcaacggactcgacaagggggagcccgtcaacgcggcggacgcagcggccctcgagcacgacaaggcctacgaccagcagctcaaagcgggtgacaatccgtacctgcggtataaccacgccgacgccgagtttcaggagcgtcttcaagaagatacgtcttttgggggcaacctcgggcgagcagtcttccaggccaagaagcgggttctcgaacctctcggtctggttgaggaaggcgctaagacggctcctggaaagaagagacccatagaatcccccgactcctccacgggcatcggcaagaaaggccagcagcccgctaaaaagaagctcaactttgggcagactggcgactcagagtcagtgcccgaccctcaaccaatcggagaaccccccgcaggcccctctggtctgggatctggtacaatggctgcaggcggtggcgctccaatggcagacaataacgaaggcgccgacggagtgggtagttcctcaggaaattggcattgcgattccacatggctgggcgacagagtcatcaccaccagcacccgaacctgggccctccccacctacaacaaccacctctacaagcaaatctccaacgggacatcgggaggaagcaccaacgacaacacctacttcggctacagcaccccctgggggtattttgactttaacagattccactgccacttctcaccacgtgactggcagcgactcatcaacaacaactggggattccggcccaagagactcaacttcaagctcttcaacatccaggtcaaggaggtcacgcagaatgaaggcaccaagaccatcgccaataaccttaccagcacgattcaggtctttacggactcggaataccagctcccgtacgtcctcggctctgcgcaccagggctgcctgcctccgttcccggcggacgtcttcatgattcctcagtacgggtacctgactctgaacaacggcagtcaggccgtgggccgttcctccttctactgcctggagtactttccttctcaaatgctgagaacgggcaacaactttgagttcagctaccagtttgaggacgtgccttttcacagcagctatgcgcacagccaaagcctggaccggctgatgaaccccctcatcgaccagtacctgtactacctgtctcggactcagtccacgggaggtaccgcaggaactcagcagttgctattttctcaggccgggcctaataacatgtcggctcaggccaaaaactggctacccgggccctgctaccggcagcaacgcgtctccacgacagtgtcgcaaaataacaacagcaactttgcttggaccggtgccaccaagtatcatctgaatggcagagactctctggtaaatcccggtgtcgctatggcaacgcacaagggcgacgaagagcgattttttccatccagcggagtcttgatgtttgggaaacagggagctggaaaagacaacgtggactatagcagcgttatgctaaccagtgaggaagaaatcaaaaccaccaacccagtggccacagaacagtacggcgtggtggccgataacctgcaacagcaaaacgccgctcctattgtaggggccgtcaacagtcaaggagccttacctggcatggtctggcagaaccgggacgtgtacctgcagggtcctatctgggccaagattcctcacacggacggcaactttcatccttcgccgctgatgggaggctttggactgaaacacccgcctcctcagatcctgattaagaatacacctgttcccgcggatcctccaactaccttcagtcaagccaagctggcgtcgttcatcacgcagtacagcaccggacaggtcagcgtggaaattgaatgggagctgcagaaagagaacagcaagcgctggaacccagagattcagtatacttccaactactacaaatctacaaatgtggactttgctgtcaatactgagggtacttattcagagcctcgccccattggcacccgttacctcacccgtagcctgtaattgcctgttaatcaataaaccggttgattcgtttcagttgaactttggtctctgcgaagggcgaattc

SEQ ID NO: 5008 - DNA, 3128 bp, Adeno-associated virus
  source 1..3128: mol_type = genomic DNA
gaattcgccctttctacggctgcgtcaactggaccaatgagaactttcccttcaacgattgcgtcgacaagatggtgatctggtgggaggagggcaagatgacggccaaggtcgtggagtccgccaaggccattctcggcggcagcaaggtgcgcgtggaccaaaagtgcaagtcgtccgcccagatcgaccccacccccgtgatcgtcacctccaacaccaacatgtgcgccgtgattgacgggaacagcaccaccttcgagcaccagcagccgttgcaggaccggatgttcaaatttgaactcacccgccgtctggagcatgactttggcaaggtgacaaagcaggaagtcaaagagttcttccgctgggcgcaggatcacgtgaccgaggtggcgcatgagttctacgtcagaaagggtggagccaacaagagacccgcccccgatgacgcggataaaagcgagcccaagcgggcctgcccctcagtcgcggatccatcgacgtcagacgcggaaggagctccggtggactttgccgacaggtaccaaaacaaatgttctcgtcacgcgggcatgcttcagatgctgtttccctgcaagacatgcgagagaatgaatcagaatttcaacatttgcttcacgcgcgggaccagagactgttcagaatgtttcccgggcgtgtcagaatctcaaccggtcgtcagaaagaggacgtatcggaaactctgtgccattcatcatctgctggggcgggctcccgagattgcttgctcggcctgcgatctggtcaacgtggacctggatgactgtgtttctgagcaataaatgacttaaaccaggtatggctgccgatggttatcttccagattggctcgaggacaacctctctgagggcattcgcgagtggtgggacttgaaacctggagccccgaaacccaaagccaaccagcaaaagcaggacgacggccggggtctggtgcttcctggctacaagtacctcggacccttcaacggactcgacaagggggagcccgtcaacgcggcggacgcagcggccctcgagcacgacaaggcctacgaccagcagctcaaagcgggtgacaatccgtacctgcggtataaccacgccgacgccgagtttcaggagcgtctgcaagaagatacgtcttttgggggcaacctcgggcgagcagtcttccaggccaagaagcgggttctcgaacctctcggtctggttgaggaaggcgctaagacggctcctggaaagaagagaccggtagagccatcaccccagcgttctccagactcctctacgggcatcggcaagacaggccagcagcccgcgaaaaagagactcaactttgggcagactggcgactcagagtcagtgcccgaccctcaaccaatcggagaaccccccgcaggcccctctggtctgggatctggtacaatggctgcaggcggtggcgctccaatggcagacaataacgaaggcgccgacggagtgggtagttcctcaggaaattggcattgcgattccacatggctgggcgacagagtcatcaccaccagcacccgaacctgggccctccccacctacaacaaccacctctacaagcaaatctccaacgggacatcgggaggaagcaccaacgacaacacctacttcggctacagcaccccctgggggtattttgactttaacagattccactgccacttctcaccacgtgactggcagcgactcatcaacaacaactggggattccggcccaagagactcaacttcaagctcttcaacatccaggtcaaggaggtcacgcagaatgaaggcaccaagaccatcgccaataaccttaccagcacgattcaggtctttacggactcggaataccagctcccgtacgtcctcggctctgcgcaccagggctgcccgcctccgttcccggcggacgtcttcatgattcctcagtacgggtacctgactctgaacaacggcagtcaggccgtgggccgttcctccttctactgcctggagtactttccttctcaaatgcggagaacgggcaacaactttgagttcagctaccagtttgaggacgtgccttttcacagcagctacgcgcatagccaaagcctggaccggctgatgaaccccctcatcgaccagtacctgtactacctgtctcggactcagtccacgggaggtaccgcaggaactcagcagttgctattttctcaggccgggcctaataacatgtcggctcaggccaaaaactggctacccgggccctgctaccggcagcaacgcgtctccacgacactgtcgcaaaataacaacagcaactttgcttggaccggtgccaccaagtatcatctgaatggcagagactctctggtaaatcccggtgtcgctatggcaacgcacaaggacgacgaagagcgattttttccatccagcggagtcttgatgtttgggaaacagggagctggaaaagacaacgtggactatagcagcgttatgctaaccagtgaggaagaaatcaaaaccaccaacccagtggccacagaacagtacggcgtggtggccgataacctgcaacagcaaaacgccgctcctattgtaggggccgtcaacagtcaaggagccttacctggcatggtctggcagaaccgggacgtgtacctgcagggtcctatctgggccaagattcctcacacggacggcaactttcatccttcgccgctgatgggaggctttggactgaaacacccgcctcctcagatcctgattaagaatacacctgttcccgcggatcctccaactaccttcagtcaagccaagctggcgtcgttcatcacgcagtacagcaccggacaggtcagcgtggaaattgaatgggagctgcagaaagagaacagcaagcgctggaacccagagattcagtatacttccaactactacaaatctacaaatgtggactttgctgtcaatactgagggtacttattcagagcctcgccccattggcacccgttacctcacccgtaacctgtaattgcctgttaatcaataaaccggttaattcgtttcagttgaactttggtctctgcgaagggcgaattc

SEQ ID NO: 5009 - protein, 738 aa, Adeno-associated virus; identical to SEQ ID NO: 5002

SEQ ID NO: 5010 - DNA, 1933 bp, Adeno-associated virus
  misc_feature 1302: note = a, c, t or g
  source 1..1933: mol_type = genomic DNA
caaggcctacgaccagcagctcaaagcgggtgacaatccgtacctgcggtataaccacgccgacgccgagtttcaggagcgtcttcaagaagatacgtcttttgggggcaacctcgggcgagcagtcttccaggccaaaaagcgggttctcgaacctcttggtctggttgagacgccagctaagacggcacctggaaagaagcgaccggtagactcgccagactccacctcgggcatcggcaagaaaggccagcagcccgcgaaaaagagactcaactttgggcagactggcgactcagagtcagtccccgaccctcaaccaatcggagaaccaccagcaggcccctctggtctgggatctggtacaatggctgcaggcggtggcgcaccaatggctgacaataacgagggcgccgacggagtgggtaatgcctcaggaaattggcattgcgattccacatggctgggcgacagagtcatcaccaccagcacccgaacctgggccctgcccacctacaacaaccacctctacaagcaaatctccagtcagtcagcagggagcaccaacgataacgtctatttcggctacagcaccccctgggggtattttgacttcaacagattccattgccacttctcaccacgtgactggcagcgacttatcaacaacaactggggattccggcccaagaagctcaacttcaagctcttcaacatccaggtcaaggaggtcacgacgaatgacggtgtcacaaccatcgctaataaccttaccagcacggttcaggtcttttcggactcggaatatcaactgccgtacgtcctcggctccgcgcaccagggctgcctgcctccgttcccggcagacgtgttcatgattccgcagtacggatacctgactctgaacaatggcagccaatcggtaggccgttcctccttctactgcctggagtactttccttctcagatgctgagaacgggcaacaacttcacctttagctacaccttcgaggacgtgcctttccacagcagctacgcgcacagccagagtctggaccggctgatgaatcccctcatcgaccagtacctgtactacttggccagaacacagagcaacgcaggaggtactgctggcaatcgggaactgcagttttatcagggcggacctaccaccatggccgaacaagcaaagaactggctgcccggaccttgcttccggcaacagagagtatccaagacgctggatcaaaataacaacagcaactttgcctggactggtgccacaaaataccatttaaatgnaagaaattcattggttaatcccggtgtcgccatggcaacccacaaggacgacgaggaacgcttcttcccttcgagcggagttctaatttttggcaaaactggagcagctaataaaactacattagaaaacgtgctcatgacaaatgaagaagaaattcgtcctaccaacccggtagctaccgaggaatacgggattgtaagcagcaacttgcaggcggctagcaccgcagcccagacacaagttgttaacaaccagggagccttacctggcatggtctggcagaaccgggacgtgtacctgcaaggtcccatttgggccaagattcctcacacggacggcaactttcacccgtctcctctaatgggtggctttggactgaaacacccgcctccccagatcctgatcaaaaacacaccggtacctgctaatcctccagaagtgtttactcctgccaagtttgcttccttcatcacgcagtacagcaccgggcaagtcagcgttgagatcgagtgggagctgcagaaagagaacagcaagcgctggaacccagagattcagtacacctccaactttgacaaacagactggagtggactttgctgttgacagccagggtgtttactctgagcct

SEQ ID NO: 5011 - DNA, 3105 bp, Adeno-associated virus
  source 1..3105: mol_type = genomic DNA
gaattcgcccttgctgcgtcaactggaccaatgagaactttcccttcaacgattgcgtcgacaagatggtgatctggtgggaggagggcaagatgaccgccaaggtcgtggagtccgccaaggccattctgggcggaagcaaggtgcgcgtggaccaaaagtgcaagtcatcggcccagatcgaccccacgcccgtgatcgtcacctccaacaccaacatgtgcgccgtgatcgacgggaacagcaccaccttcgagcaccagcagccgctgcaggaccgcatgttcaagttcgagctcacccgccgtctggagcacgactttggcaaggtgaccaagcaggaagtcaaagagttcttccgctgggctcaggatcacgtgactgaggtggcgcatgagttctacgtcagaaagggcggagccaccaaaagacccgcccccagtgacgcggatataagcgagcccaagcgggcctgcccctcagttgcggagccatcgacgtcagacgcggaagcaccggtggactttgcggacaggtaccaaaacaaatgttctcgtcacgcgggcatgcttcagatgctgtttccctgcaagacatgcgagagaatgaatcagaatttcaacgtctgcttcacgcacggggtcagagactgctcagagtgcttccccggcgcgtcagaatctcaacccgtcgtcagaaaaaagacgtatcagaaactgtgcgcgattcatcatctgctggggcgggcacccgagattgcgtgttcggcccgcgatctcgtcaacgtggacttggatgactgtgtttctgagcaataaatgacttaaaccaggtatggctgctgacggttatcttccagattggctcgaggacaacctctctgagggcattcgcgagtggtgggacctgaaacctggagcccccaagcccaaggccaaccagcagaagcaggacgacggccggggtctggtgcttcctggctacaagtacctcggacccttcaacggactcgacaagggggagcccgtcaacgcggcggacgcagcggccctcgagcacgacaaggcctacgaccagcagctcaaagcgggtgacaatccgtacctgcggtataaccacgccgacgccgagtttcaggagcgtctgcaagaagatacgtcttttgggggcaacctcgggcgagcagtcttccaggccaagaagagggtactcgaacctctgggcctggttgaagaaggtgctaagacggctcctggaaagaagagaccgttagagtcaccacaagagcccgactcctcctcaggaatcggcaaaaaaggcaaacaaccagccaaaaagagactcaactttgaagaggacactggagccggagacggaccccctgaaggatcagataccagcgccatgtcttcagacattgaaatgcgtgcagcaccgggcggaaatgctgtcgatgcgggacaaggttccgatggagtgggtaatgcctcgggtgattggcattgcgattccacctggtctgagggcaaggtcacaacaacctcgaccagaacctgggtcttgcccacctacaacaaccacttgtacctgcggctcggaacaacatcaaacagcaacacctacaacggattctccaccccctggggatactttgactttaacagattccactgtcacttctcaccacgtgactggcaaagactcatcaacaacaactggggactacgaccaaaagccatgcgcgttaaaatcttcaatatccaagttaaggaggtcacaacgtcgaacggcgagactacggtcgctaataaccttaccagcacggttcagatatttgcggactcgtcgtatgagctcccgtacgtgatggacgctggacaagagggaagtctgtctcctttccccaatgacgtcttcatggtgcctcaatatggctactgtggcattgtgactggcgaaaatcagaaccagacggacagaaatgctttctactgcctggagtattttccttcacaaatgctgagaactggcaataactttgaaatggcttacaactttgggaaggtgccgttccactcaatgtatgcttacagccagagcccggacagactgatgaatcccctcctggaccagtacctgtggcacttacagtcgaccacctctggagagactctgaatcaaggcaatgcagcaaccacatttggaaaaatcaggagtggagactttgccttttacagaaagaactggctgcctgggccttgtgttaaacagcagagactctcaaaaactgccagtcaaaattacaagattcctgccagcgggggcaacgctctgttaaagtatgacacccactataccttaaacaaccgctggagcaacatagcgcctggacctccaatggcaacagctggaccttcagatggggacttcagcaacgcccagctcatcttccctggaccatcagtcaccggaaacacaacaacctcagcaaacaatctgttgtttacatcagaagaagaaattgctgccaccaacccaagagacacggacatgtttggtcagattgctgacaataatcagaatgctacaactgctcccataaccggcaacgtgactgctatgggagtgcttcctggcatggtgtggcaaaacagagacatttactaccaagggccaatttgggccaagatcccacacgcggacggacattttcatccttcaccgctaattggcggttttggactgaaacatccgcctccccagatatttatcaaaaacacccccgtacctgccaatcctgcgacaaccttcactgcagccagagtggactctttcatcacacaatacagcaccggccaggtcgctgttcagattgaatgggaaatcgaaaaggaacgctccaaacgctggaatcctgaagtgcagtttacttcaaactatgggaaccagtcttctatgttgtgggctcccgatacaactgggaagtatacagagccgcgggttattggctctcgttatttgactaatcatttgtaactgcctagttaatcaataaaccgtgtgattcgtttcagttgaactttggtctctgcgaagggcgaattc

SEQ ID NO: 5012 - protein, 733 aa, Adeno-associated virus
MAADGYLPDWLEDNLSEGIREWWDLKPGAPKPKANQQKQDDGRGLVLPGYKYLGPFNGLDKGEPVNAADAAALEHDKAYDQQLKAGDNPYLRYNHADAEFQERLQEDTSFGGNLGRAVFQAKKRVLEPLGLVEEGAKTAPGKKRPLESPQEPDSSSGIGKKGKQPAKKRLNFEEDTGAGDGPPEGSDTSAMSSDIEMRAAPGGNAVDAGQGSDGVGNASGDWHCDSTWSEGKVTTTSTRTWVLPTYNNHLYLRLGTTSNSNTYNGFSTPWGYFDFNRFHCHFSPRDWQRLINNNWGLRPKAMRVKIFNIQVKEVTTSNGETTVANNLTSTVQIFADSSYELPYVMDAGQEGSLPPFPNDVFMVPQYGYCGIVTGENQNQTDRNAFYCLEYFPSQMLRTGNNFEMAYNFEKVPFHSMYAHSQSLDRLMNPLLDQYLWHLQSTTSGETLNQGNAATTFGKIRSGDFAFYRKNWLPGPCVKQQRFSKTASQNYKIPASGGNALLKYDTHYTLNNRWSNIAPGPPMATAGPSDGDFSNAQLIFPGPSVTGNTTTSANNLLFTSEEEIAATNPRDTDMFGQIADNNQNATTAPITGNVTAMGVLPGMVWQNRDIYYQGPIWAKIPHADGHFHPSPLIGGFGLKHPPPQIFIKNTPVPANPATTFTAARVDSFITQYSTGQVAVQIEWEIEKERSKRWNPEVQFTSNYGNQSSMLWAPDTTGKYTEPRVIGSRYLTNHL

SEQ ID NO: 5013 - DNA, 3105 bp, Adeno-associated virus
  source 1..3105: mol_type = genomic DNA
gaattcgcccttgctgcgtcaactggaccaatgagaactttcccttcaacgattgcgtcgacaagatggtgatctggtgggaggagggcaagatgaccgccaaggtcgtggagtccgccaaggccattctgggcggaagcaaggtgcgcgtggaccaaaagtgcaagtcatcggcccagatcgaccccacgcccgtgatcgtcacctccaacaccaacatgtgcgccgtgatcgacgggaacagcaccaccttcgagcaccagcagccgctgcaggaccgcatgttcaagttcgagctcacccgccgtctggagcacgactttggcaaggtgaccaagcaggaagtcaaagagttcttccgctgggctcaggatcacgtgactgaggtggcgcatgagttctacgtcagaaagggcggagccaccaaaagacccgcccccagtgacgcggatataagcgagcccaagcgggcctgcccctcagttgcggagccatcgacgtcagacgcggaagcaccggtggactttgcggacaggtaccaaaacaaatgttctcgtcacgcgggcatgcttcagatgctgtttccctgcaagacatgcgagagaatgaatcagaatttcaacgtctgcttcacgcacggggtcagagactgctcagagtgcttccccggcgcgtcagaatctcaacccgtcgtcagaaaaaagacgtatcagaaactgtgcgcgattcatcatctgctggggcgggcacccgagattgcgtgttcggcctgcgatctcgtcaacgtggacttggatgactgtgtttctgagcaataaatgacttaaaccaggtatggctgctgacggttatcttccagattggctcgaggacaacctctctgagggcattcgcgagtggtgggacctgaaacctggagcccccaagctcaaggccaaccagcagaagcaggacgacggccggggtctggtgcttcctggctacaagtacctcggacccttccacggactcgacaagggggagcccgtcaacgcggcggacgcagcggccctcgagcacgacaaggcctacgaccagcagctcaaagcgggtgacaatccgtacctgcggtataaccacgccgacgccgagtttcaggagcgtctgcaagaagatacgtcttttgggggcaacctcgggcgagcagtcttccaggccaagaagagggtactcgaaccactgggcctggttgaagaaggtgctaagacggctcctggaaagaagagaccgttagagtcaccacaagagcccgactcctcctcaggaatcggcaaaaaaggcaaacaaccagccaaaaagagactcaactttgaagaggacactggagccggagacggaccccctgaaggatcagataccagcgccatgtcttcagacattgaaatgcgtgcagcaccgggcggaaatgctgtcgatgcgggacaaggttccgatggagtgggtaatgcctcgggtgattggcattgcgattccacctggtctgagggcaaggtcacaacaacctcgaccagaacctgggtcttgcccacctacaacaaccacttgtacctgcggctcggaacaacatcaaacagcaacacctacaacggattctccaccccctggggatactttgactttaacagattccactgtcacttctcaccacgtgactggcaaagactcatcaacaacaactggggactacgaccaaaagccatgcgcgttaaaatcttcaatatccaagttaaggaggtcacaacgtcgaacggcgagactacggtcgctaataaccttaccagcacggttcagatatttgcggactcgtcgtatgagctcccgtacgtgatggacgctggacaagagggaagtctgcctcctttccccaatgacgtcttcatggtgcctcaatatggctactgtggcattgtgactggcgaaaatcagaaccagacggacagaaatgctttctactgcctggagtattttccttcacaaatgctgagaactggcaataactttgaaatggcttacaactttgagaaggtgccgttccactcaatgtatgctcacagccagagcctggacagactgatgaatcccctcctggaccagtacctgtggcacttacagtcgaccacctctggagagactctgaatcaaggcaatgcagcaaccacatttggaaaaatcaggagtggagactttgccttttacagaaagaactggctgcctgggccttgtgttaaacagcagagattctcaaaaactgccagtcaaaattacaagattcctgccagcgggggcaacgctctgttaaagtatgacacccactataccttaaacaaccgctggagcaacatagcgcctggacctccaatggcaacagctggaccttcagatggggacttcagcaacgcccagctcatcttccctggaccatcagtcaccggaaacacaacaacctcagcaaacaatctgttgtttacatcagaaggagaaattgctgccaccaacccaagagacacggacatgtttggtcagattgctgacaataatcagaatgctacaactgctcccataaccggcaacgtgactgctatgggagtgcttcctggcatggtgtggcaaaacagagacatttactaccaagggccaatttgggccaagatcccacacgcggacggacattttcatccttcaccgctaattggcggttttggactgaaacatccgcctccccagatatttatcaaaaacacccccgtacctgccaatcctgcgacaaccttcactgcagccagagtggactctttcatcacacaatacagcaccggccaggtcgctgttcagattgaatgggaaatcgaaaaggaacgctccaaacgccggaatcctgaagtgcagtttacttcaaactatgggaaccagtcttctatgttgtgggctcccgatacaactgggaagtatacagagccgcgggttattggctctcgttatttgactaatcatttgtaactgcctagttaatcaataaaccgtgtgattcgtttcagttgaactttggtctctgcgaagggcgaattc

SEQ ID NO: 5014 - DNA, 3105 bp, Adeno-associated virus
  source 1..3105: mol_type = genomic DNA
gaattcgcccttcgcagagaccaaagttcaactgaaacgaatcacacggtttattgattaactaggcagttacaaatgattagtcaaataacgagagccaataacccgcggctctgtatacttcccagttgtatcgggagcccacaacatagaagactggttcccacagtttgaagtaaactgcacttcaggattccagcgtttggagcgttccttttcgatttcccattcaatctgaacagcgacctggccggtgctgtattgtgtgatgaaagagtccactctggctgcagtgaaggttgtcgcaggataggcaggtacgggggtgtttttgataaatatctggggaggcggatgtttcagtccaaaaccgccaattagcggtgaaggatgaaaatgtccgtccgcgtgtgggatcttggcccaaattggcccttggtagtaaatgtctctgttttgccacaccatgccaggaagcactcccatagcagtcacgttgccggttatgggagcagttgtagcattctgattattgtcagcaatctgaccaaacatgtccgtgtctcttgggttggtggcagcaatttcttcttctgatgtaaacaacagattgtttgctgaggttgttgtgtttccggtgactgatggtccagggaagatgagctgggcgttgctgaagtccccatctgaaggtccagctgttgccattggaggtccaggcgctatgttgctccagcggttgtttaaggtatagtgggtgtcatactttaacagagcgttgcccccgctggcaggaatcttgtaattttgactggcagtttttgagaatctctgctgtttaacacaaggcccaggcagccagttctttctgtaaaaggcaaagtctccactcctgatttttccaaatgtggttgctgcattgccttgattcagagtctctccagaggtggtcgactgtaagtgccacaggtactggtccaggaggggattcatcagtccgtccaggctctggctgtgagcatacattgagtggaacggcaccttctcaaagttgtaagccgtttcaaagttattgccagttctcagcatttgtgaaggaaaatactccaggcagtagaaagcatttctgtccgtctggttctgattttcgccagtcacaatgccacagtagccatattgaggcaccatgaagacgtcattggggaaaggaggcagacttccctcttgtccagcgtccatcacgtacgggagctcatacgacgagtccgcaaatatctgaaccgtgctggtaaggttattagcgaccgtagtctcgccgttcgacgttgtgacctccttaacttggatattgaagattttaacgcgcatggcttttggtcgtagtccccagttgttgttgatgagtctttgccagtcacgtggtgagaagtgacagtggaatctgttaaagtcaaagtatccccagggggtggagaatccgttgtaggtgttgctgtttgatgttgttccgagccgcaggtacaagtggttgttgtaggtgggcaagacccaggttctggtcgaggttgttgtgaccttgccctcagaccaggtggaatcgcaatgccaatcacccgaggcattacccactccatcggaaccttgtcccgcatcgacagcatttccgcccggtgctgcacgcatttcaatgtctgaagacatggcgctggtatctgatccttcagggggtccgtctccggctccagtgtcctcttcaaagttgagtctctttttggctggttgtttgccttttttgccgattcctgaggaggagtcgggctcttgtggtgactctaacggtctcttctttccaggagccgtcttagcaccttcttcaaccaggcccagaggttcgagtaccctcttcttggcctggaagactgctcgcccgaggttgcccccaaaagacgtatcttcttgcagacgctcctgaaactcggcgtcggcgtggttataccgcaggtacggattgtcacccgctttgagctgctggtcgtaggccttgtcgtgctcgagggccgctgcgtccgccgcgttgacgggctcccccttgtcgagtccgttgaagggtccgaggtactcgtagccaggaagcaccagaccccggccgtcgtcctgcttctgctggttggccttgggcttgggggctccaggtttcaggtcccaccactcgcgaatgccctcagagaggttgtcctcgagccaatctggaagataaccgtcagcagccatacctggtttaagtcatttattgctcagaaacacagtcatccaagtccacgttgacgagatcgcaggccgaacacgcaatctcgggtgcccgccccagcagatgatgaatcgcgcacagtttctgatacgtcttttttctgacgacgggttgagattctgacgcgccggggaagcactctgagcagtctctgaccccgtgcgtgaagcagacgttgaaattctgattcattctctcgcatgtcttgcagggaaacagcatctgaagcatgcccgcgtgacgagaacatttgttttggtacctgtccgcaaggtccaccggtgcttccgcgtctgacgtcgatggctccgcaactgaggggcaggcccgcttgggctcgcttatatccgcgtcactgggggcgggtcttttggtggctccgccctttctgacgtagaactcatgcgccacctcagtcacgtgatcctgagcccagcggaagaactctttgacttcctgcttggtcaccttgccaaagtcgtgctccagacggcgggtgagctcgaacttgaacatgcggtcctgcagcggctgctggtgctcgaaggtggtgctgttcccgtcgatcacggcgcacatgttggtgttggaggtgacgatcacgggcgtggggtcgatctgggccgatgacttgcacttttggtccacgcgcaccttgcttccgcccagaatggccttggcggactccacgaccttggcggtcatcttgccctcctcccaccagatcaccatcttgtcgacgcaatcgttgaagggaaagttctcattggtccagttgacgcagcaagggcgaattc

SEQ ID NO: 5015 - DNA, 3094 bp, Adeno-associated virus
  source 1..3094: mol_type = genomic DNA
gaattcgcccttgctgcgtcaactggaccaagagaactttcccttcaacgattgcgtcgacaagatggtgatctggtgggaggagggcaagatgacggccaaggtcgtggagtccgccaaagccattctgggcggaagcaaggtgcgcgtcgaccaaaagtgcaagtcctcggcccagatcgatcccacccccgtgatcgtcacctccaacaccaacatgtgcgccgtgatcgacgggaacagcaccaccttcgagcaccagcagccgttgcaggaccggatgttcaaatttgaactcacccgccgtctggaacacgactttggcaaggtgaccaagcaggaagtcaaagagttcttccgctgggctagtgatcacgtgactgaggtgacgcatgagttctacgtcagaaagggcggagccagcaaaagacccgcccccgatgacgcggatataagcgagcccaagcgggcctgtccctcagtcacggacccatcgacgtcagacgcggaaggagctccggtggactttgccgacaggtaccaaaacaaatgttctcgtcacgcgggcatgcttcagatgctgtttccctgcaaaacgtgcgagagaatgaatcagaatttcaacatttgcttcacgcacggggtcagagactgtttagaatgtttccccggcgtgtcagaatctcaaccggtcgtcagaaaaaagacgtatcggaagctgtgtgcgattcatcatctgctggggcgggcacccgagattgcttgctcggcctgcgacctggtcaacgtggacctggacgactgtgtttctgagcaataaatgacttaaaccgggtatggctgccgatggttatcttccagattggctcgaggacaacctctctgagggcattcgcgagtggtgggacctgaaacctggagccccgaaacccaaagccaaccagcaaaagcaggacgacggccggggtctggtgcttcctggctacaagtacctcggacccttcaacggactcgacaagggggagcccgtcaacgcggcggacgcagcggccctcgagcacgacaaggcctacgaccagcagctcaaagcgggtgacaatccgtacctgcggtataaccacgccgacgccgagtttcaggagcgtctgcaagaagatacgtcatttgggggcaacctcgggcgagcagtcttccaggccaagaagcgggttctcgaacctctcggtctggttgaggaaggcgctaagacggctcctggaaagaagagacccatagactctccagactcctccacgggcatcggcaaaaaaggccagcagcccgctaaaaagaagctcaattttggtcagactggcgactcagagtcagtccccgaccctcaacctcttggagaacctccagcagcgccctctagtgtgggatctggtacaatggctgcaggcggtggcgcaccaatggcagacaataacgaaggtgccgacggagtgggtaatgcctcaggaaattggcattgcgattccacatggctgggcgacagagtcatcaccaccagcaccagaacctgggccctccccacctacaacaaccacctctacaagcaaatctccagcagcagctcaggagccaccaatgacaaccactacttcggctacagcaccccctgggggtattttgactttaacagattccactgccacttctcaccacgtgactggcagcgactcatcaacaacaactggggattccggcccaagaagctgcggttcaagctcttcaacatccaggtcaaggaggtcacaacgaatgacggcgtcacgaccatcgctaataaccttaccagcacggttcaggtcttctcggactcggaataccagctgccgtacgtcctcggctctgcgcaccagggctgcctgcctccgttcccggcggacgtcttcatgattcctcagtacggctacctgactctgaacaacggcagccaatcggtgggccgttcctccttctactgcctggaatatttcccctctcaaatgctgagaacgggcaacaactttgagttcagttacagcttcgaggacgtgcctttccacagcagctacgcgcacagccagagcctagaccggctgatgaaccctctcatcgaccagtacctgtactacctggcccggacccagagcaccacgggttccaccagggaactgcaatttcatcaagctgggcccaatactatggccgagcagtcaaagaactggctgcctggaccctgctataggcaacagggactgtcaaagaacttggactttaacaacaacagcaattttgcctggactgctgccactaaatatcatctgaatggcagaaactctttgaccaatcctggcattcccatggcaaccaacaaggatgatgaggaccagttctttcccatcaacggggtactggtttttggcaagacgggagctgccaacaaaactacgctggaaaacgttctgatgaccagcgaggaggagatcaagaccactaaccctgtggctacagaagaatacggtgtggtctccagcaacctgcagccgtctacagccgggcctcaatcacagactatcaacagccagggagcactgcctggcatggtctggcagaaccgggacgtgtatctgcagggtcccatctgggccaaaattcctcacacggatggcaactttcacccgtctcctctgatgggcggttttggactcaaacacccgcctccacagatcctgatcaaaaacacacctgtacctgctaatcctccggaggtgtttactcctgccaagtttgcctccttcatcacgcagtacagcaccggacaagtcagcgtggaaatcgagtgggagctgcagaaagaaaacagcaagcgctggaacccagaaattcagtatacttccaattatgccaagtctaataatgttgaatttgctgtgaaccctgatggtgtttatactgagcctcgccccattggcactcgttacctcccccgtaatctgtaattgcttgttaatcaataaaccggttgattcgtttcagttgaactttggtctctgcgaagggcgaattc

SEQ ID NO: 5016 - DNA, 3095 bp, Adeno-associated virus
  source 1..3095: mol_type = genomic DNA
gaattcgcccttcgcagagaccaaagttcaactgaaacgaatcaaccggtttattgattaacaagcaattacagattacgggtgaggtaacgagtgccaatggggcgaggctcagtataaacaccatcagggttcacagcaaattcaacattattagacttggcataattggaagtatactgaatttctgggttccagcgcttgctgttttctttctgcagctcccactcgatttccacgctgacttgtccggtgctgtactgcgtgatgaaggaggcaaacttggcaggagtaaacacctccggaggattagcaggtacaggtgtgtttttgatcaggatctgtggaggcgggtgtttgagtccaaaaccgcccatcagaggagacgggtgaaagttgccatccgtgtgaggaattttggcccagatgggaccctgcagatacacgtcccggttctgccagaccatgccaggcagtgctccctggctgttgatagtctgtgattgaggcccggctgtagacgactgcaggttgctggagaccacaccgtattcttctgtagccacagggttagtggtcttgatctcctcctcgctggtcatcagaacgttttccagcgtagttttgttggcagctcccgtcttgccaaaaaccagtaccccgttgatgggaaagaactggtcctcatcatccttgttggttgccatgggaatgccaggattggtcaaagagtttctgccattcagatgatatttagtggcagcagtccaggcaaaattgctgttgttgttaaagtccaagttctttgacagtctctgttgcctatagcagggtccaggcagccagttctttgactgctcggccatagtattgggcccagcttgatgaaattgcagttccctggtggaacccgtggtgctctgggtccgggccaggtagtacaggtactggtcgatgagagggttcatcagccggtctaggctctggctgtgcgcgtagctgctgtggaaaggcacgtcctcgaagctgtaactgaactcaaagttgttgcccgttctcagcatttgagaggggaaatattccaggcagtagaaggaggaacggcccaccgattggctgccgttgtccagagtcaggtagccgtactgaggaatcatgaagacgtccgccgggaacggaggcaggcagccctggtgcgcagagccgaggacgtacggcagctggtattccgagtccgagaagacctgaaccgtgctggtaaggttattagcgatggtcgtgacgccgtcattcgttgtgacctccttgacctggatgttgaggagcttgaaccgcagcttcttgggccggaatccccagttgttgttgatgagtcgctgccagtcacgtggtgagaagtggcagtggaatctgttaaagtcaaaatacccccagggggtgctgtagccgaagtagtggttgtcattggtggctcctgagctgctgctggagatttgcttgtagaggtggttgttgtaggtggggagggcccaggttctggtgctggtggtgatgactctgtcgcccagccatgtggaatcgcaatgccaatttcctgaggcattacccactccgtcggcaccttcgttattgtctgccattggtgcgccaccgcctgcagccattgtaccagatcccacactagagggcgctgctggaggttctccaagaggttgagggtcggggactgactctgagtcgccagtctgaccaaaattgagcttctttttagcgggctgctggccttttttgccgatgcccgtggaggagtctggagagcctatgggtctcttctttccaggagccgtcttagcgccttcctcaaccagaccgagaggttcgagaacccgcttcttggcctggaagactgctcgcccgaggttgcccccaaatgacgtatcttcttgcagacgctcctgaaactcggcgtcggcgtggttataccgcaggtacggattgtcacccgctttgagctgctggtcgtaggccttgtcgtgctcgagggccgctgcgtccgccgcgttgacgggctcccccttgtcgagtccgttgaagggtccgaggtacttgtagccaggaagcaccagaccccggccgtcgtcctgcttttgctggttggctttgggtttcggggctccaggtttcaggtcccaccactcgcgaatgccctcagagaggttgtcctcgagccaatctggaagataaccatcggcagccatacctggtttaagtcatttattgctcagaaacacagtcgtccaggtccacgttgaccaggtcgcaggccgagcaagcaatctcgggtgcccgccccagcagatgatgaatcgcacacagcttccgatacgtcttttttctgacgaccggttgagattctgacacgccggggaaacattctaaacagtctctgaccccgtgcgtgaagcaaatgttgaaattctgattcattctctcgcacgttttgcagggaaacagcacctgaagcatgcccgcgtgacgagaacatttgttttggtacctgtcggcaaagtccaccggagctccttccgcgtctgacgtcgatgggtccgtgactgagggacgggcccgcttgggctcgcttatatccgcgtcatcgggggcgggtcttttgctggctccgccctttctgacgtagaactcatgcgtcacctcagtcacgtgatcactagcccagcggaagaactctttgacttcctgctttgtcaccttgccaaagtcgtgttccagacggcgggtgagttcaaatttgaacatccggtcctgcaacggttgctggtgctcgaaggtggtgctgttcccgtcgatcacggcgcacatgttggtgttggaggtgacgatcacgggggtgggatcgatctgggcggacgacttgcacttttggtccacgcgcaccttgctgccgccgagaatggccttggcggactccacgaccttggccgtcatcttgccctcctcccaccagatcaccatcttgtcgacgcaatcgttgaagggaaagttctcattggtccagttgacgcagcaagggcgaattc

SEQ ID NO: 5017 - DNA, 3095 bp, Adeno-associated virus
  source 1..3095: mol_type = genomic DNA
gaattcgcccttcgcagagaccaaagttcaactgaaacgaatcaaccggtttattgattaacaagcaattacagattacgggtgaggtaacgagtgccaatggggcgaggctcagtataaacaccatcagggttcacagcaaattcaacattattagacttggcataattggaagtatactgaatttctgggttccagcgcttgctgttttctttctgcagctcccactcgatttccacgctgacttgtccggtgctgtactgcgtgatgaaggaggcaaacttggcaggagtaaacacctccggaggattagcaggtacaggtgtgtttttgatcaggatctgtggaggcgggtgttcgagtccaaaaccgcccatcagaggagacgggtgaaagttgccatccgtgtgaggaattttggcccagatgggaccctgcagatacacgtcccggttctgccagaccatgccaggcagtgctccctggctgttgatagtctgtgattgaggcccggctgtagacgactgcaggttgctggagaccacaccgtattcttctgtagccacagggttagtggtcttgatctcctcctcgctggtcatcagaacgttttccagcgtagttttgttggcagctcccgtcttgccaaaaaccagtaccccgttgatgggaaagaactggtcctcatcatccttgttggttgccatgggaatgccaggattggtcaaagagtttctgccattcagatgatatttagtggcagcagtccaggcaaaattgctgttgttgttaaagtccaagttctttgacagtctctgttgcctatagcagggtccaggcagccagttctttgactgctcggccatagtattgggcccagcttgatgaaattgcagttccctggtggaacccgtggtgctctgggtccgggccaggtagtacaggtactggtcgatgagagggttcatcagccggtctaggctctggctgtgcgcgtagctgctgtggaaaggcacgtcctcgaagctgtaactgaactcaaagttgttgcccgttctcagcatttgagaggggaaatattccaggcagtagaaggaggaacggcccaccgattggctgccgttgttcagagtcaggtagccgtactgaggaatcatgaagacgtccgccgggaacggaggcaggcagccctggtgcgcagagccgaggacgtacggcagctggtattccgagtccgagaagacctgaaccgtgctggtaaggttattagcgatggtcgtgacgccgtcattcgttgtgacctccttgacctggatgttgaagagcttgaaccgcagcttcttgggccggaatccccagttgttgttgatgagtcgctgccagtcacgtggtgagaagtggcagtggaatctgttaaagtcaaaatacccccagggggtgctgtagccgaagtagtggttgtcattggtggctcctgagctgctgctggagatttgcttgtagaggtggttgttgtaggtggggagggcccaggttctggtgctggtggtgatgactctgtcgcccagccatgtggaatcgcaatgccaatttcctgaggcattacccactccgtcggcaccttcgttattgtctgccgttggtgcgccaccgcctgcagccattgtaccagatcccacactagagggcgctgctggaggttctccaagaggttgagggtcggggactgactctgagtcgccagtctgaccaaaattgagcttctttttagcgggctgctggccttttttgccgatgcccgtggaggagtctggagagtctatgggtctcttctttccaggagccgtcttagcgccttcctcaaccagaccgagaggttcgagaacccgcttcttggcctggaagactgctcgcccgaggttgcccccaaatgacgtatcttcttgcaggcgctcctgaaactcggcgtcggcgtggttataccgcaggtacggattgtcacccgctttgagctgctggtcgtaggccttgtcgtgctcgagggccgctgcgtccgccgcgttgacgggctcccccttgtcgagtccgttgaagggtccgaggtacttgtagccaggaagcaccagaccccggccgtcgtcctgcttttgctggttggctttgggtttcggggctccaggtttcaggtcccaccactcgcgaatgccctcagagaggttgtcctcgagccaatctggaagataaccatcggcagccatacctggtttaagccatttattgctcagaaacacagtcgtccaggtccacgttgaccaggtcgcaggccgagcaggcaatctcgggtgcccgccccagcagatgatgaatcgcacacagcttccgatacgtcttttttctgacgaccggttgagattctgacacgccggggaaacattctaaacagtctctgaccccgtgcgtgaagcaaatgttgaaattctgattcattctctcgcacgttttgcagggaaacagcatctgaagcatgcccgcgtggcgagaacatttgttttggtacctgtcggcaaagtccaccggagctccttccgcgtctgacgtcgatgggtccgtgactgagggacaggcccgcttgggctcgcttatatccgcgtcatcgggggcgggtcttttgctggctccgccctttctgacgtagaactcatgcgtcacctcagtcacgtgatcactagcccagcggaagaactctttgacttcctgctttgtcaccttgccaaagtcgtgttccagacggcgggtgagttcaaatttgaacatccggtcctgcaacggctgctggtgctcgaaggtggtgctgttcccgtcgatcacggcgcgcatgttggtgttggaggtgacgatcacgggggtgggatcgatctgggcggacgacttgcacttttggtccacgcgcaccttgctgccgccgagaatggccttggcggactccacgaccttggccgtcatcttgccctcctcccaccagatcaccatcttgtcgacgcaatcgttgaagggaaagttctcattggtccagttgacgcagcaagggcgaattc

SEQ ID NO: 5018 - protein, 729 aa, Adeno-associated virus; identical to SEQ ID NO: 4833

SEQ ID NO: 5019 - protein, 729 aa, Adeno-associated virus
MAADGYLPDWLEDNLSEGIREWWDLKPGAPKPKANQQKQDDGRGLVLPGYKYLGPFNGLDKGEPVNAADAAALEHDKAYDQQLKAGDNPYLRYNHADAEFQERLQEDTSFGGNLGRAVFQAKKRVLEPLGLVEEGAKTAPGKKRPIDSPDSSTGIGKKGQQPAKKKLNFGQTGDSESVPDPQPLGEPPAAPSSVGSGTMAAGGGAPTADNNEGADGVGNASGNWHCDSTWLGDRVITTSTRTWALPTYNNHLYKQISSSSSGATNDNHYFGYSTPWGYFDFNRFHCHFSPRDWQRLINNNWGFRPKKLRFKLFNIQVKEVTTNDGVTTIANNLTSTVQVFSDSEYQLPYVLGSAHQGCLPPFPADVFMIPQYGYLTLNNGSQSVGRSSFYCLEYFPSQMLRTGNNFEFSYSFEDVPFHSSYAHSQSLDRLMNPLIDQYLYYLARTQSTTGSTRELQFHQAGPNTMAEQSKNWLPGPCYRQQRLSKNLDFNNNSNFAWTAATKYHLNGRNSLTNPGIPMATNKDDEDQFFPINGVLVFGKTGAANKTTLENVLMTSEEEIKTTNPVATEEYGVVSSNLQSSTAGPQSQTINSQGALPGMVWQNRDVYLQGPIWAKIPHTDGNFHPSPLMGGFGLKHPPPQILIKNTPVPANPPEVFTPAKFASFITQYSTGQVSVEIEWELQKENSKRWNPEIQYTSNYAKSNNVEFAVNPDGVYTEPRPIGTRYLTRNL

SEQ ID NO: 5020 - protein, 729 aa, Adeno-associated virus
MAADGYLPDWLEDNLSEGIREWWDLKPGAPKPKANQQKQDDGRGLVLPGYKYLGPFNGLDKGEPVNAADAAALEHDKAYDQQLKAGDNPYLRYNHADAEFQERLQEDTSFGGNLGRAVFQAKKRVLEPLGLVEEGAKTAPGKKRPIDSPDSSTGIGKKGQQPAKKKLNFGQTGDSESVPDPQPLGEPPAAPSSVGSGTMAAGGGAPMADNNEGADGVGNASGNWHCDSTWLGDRVITTSTRTWALPTYNNHLYKQISSSSSGATNDNHYFGYSTPWGYFDFNRFHCHFSPRDWQRLINNNWGFRPKKLRFKLFNIQVKEVTTNDGVTTIANNLTSTVQVFSDSEYQLPYVLGSAHQGCLPPFPADVFMIPQYGYLTLNNGSQSVGRSSFYCLEYFPSQMLRTGNNFEFSYSFEDVPFHSSYAHSQSLDRLMNPLIDQYLYYLARTQSTTGSTRELQFHQAGPNTMAEQSKNWLPGPCYRQQRLSKNLDFNNNSNFAWTAATKYHLNGRNSLTNPGIPMATNKDDEDQFFPINGVLVFGKTGAANKTTLENVLMTSEEEIKTTNPVATEEYGVVSSNLQSSTAGPQSQTINSQGALPGMVWQNRDVYLQGPIWAKIPHTDGNFHPSPLMGGFGLKHPPPQILIKNTPVPANPPEVFTPAKFASFITQYSTGQVSVEIEWELQKENSKRWNPEIQYTSNYAKSNNVEFAVNPDGVYTEPRPIGTRYLTRNL

SEQ ID NO: 5021 - DNA, 2217 bp, Adeno-associated virus
  source 1..2217: mol_type = genomic DNA
atggctgctgacggttatcttccagattggctcgaggacaacctctctgagggcattcgcgagtggtgggacctgaaacctggagcccccaagcccaaggccaaccagcagaagcaggacgacggccggggtctggtgcttcctggctacaagtacctcggacccttcaacggactcgacaagggggagcccgtcaacgcggcggacgcagcggccctcgagcacgacaaggcctacgaccagcagctcaaagcgggtgacaatccgtacctgcggtataaccacgccgacgccgagtttcaggagcgtctacaagaagatacgtcttttgggggcaacctcgggcgagcagtcttccaggccaagaagcgggttctcgaacctctcggtctggttgaggaagctgctaagacggctcctggaaagaagagaccggtagaaccgtcacctcagcgttcccccgactcctccacgggcatcggcaagaaaggccagcggcccgctaaaaagagactgaactttggtcagactggcgactcagagtcagtccccgaccctcaaccaatcggagaaccaccagcaggcccctctggtctgggatctggtacaatggctgcaggcggtggcgctccaatggcagacaataacgaaggcgccgacggagtgggtagttcctcaggaaattggcattgcgattccacatggctgggcgacagagtcatcaccaccagcacccgaacctgggccctgcccacctacaacaaccacctctacaagcaaatatccaatgggacatcgggaggaagcaccaacgacaacacctacttcggctacagcaccccctgggggtattttgacttcaacagattccactgccacttctcaccacgtgactggcagcgactcatcaacaacaactggggattccggccaaaaagactcagcttcaagcccttcaacatccaggtcaaggaggtcacgcagaatgaaggcaccaagaccatcgccaataaccttaccagcacgattcaggtatttacggactcggaataccagctgccgtacgtcctcggctccgcgcaccagggctgcctgcctccgttcccggcggacgtcttcatgattccccagtacggctaccttacactgaacaatggaagtcaagccgtaggccgttcctccttctactgcctggaatattttccatctcaaatgctgcgaactggaaacaattttgaattcagctacaccttcgaggacgtgcctttccacagcagctacgcacacagccagagcttggaccgactgatgaatcctctcatcgaccagtacctgcactacttatccagaactcagtccacaggaggaactcaaggtacccagcaattgttattttctcaagctgggcctgcaaacatgtcggctcaggctaagaactggctacctggaccttgctaccggcagcagcgagtctctacgacactgtcgcaaaacaacaacagcaactttgcttggactggtgccaccaaatatcacctgaacggaagagactctttggtaaatcccggtgtcgccatggcaacccacaaggacgacgaggaacgcttcttcccgtcgagtggagtcctgatgtttggaaaacagggtgctggaagagacaatgtggactacagcagcgttatgctaaccagcgaagaagaaattaaaaccactaaccctgtagccacagaacaatacggtgtggtggctgacaacttgcagcaaaccaatacagggcctattgtgggaaatgtcaacagccaaggagccttacctggcatggtctggcagaaccgagacgtgtacctgcagggtcccatctgggccaagattcctcacacggacggcaacttccacccttcaccgctaatgggaggatttggactgaagcacccacctcctcagatcctgatcaagaacacgccggtacctgcggatcctccaacaacgttcagccaggcgaaattggcttccttcattacgcagtacagcaccggacaggtcagcgtggaaatcgagtgggagctgcagaaggagaacagcaaacgctggaacccagagattcagtacacttcaaactactacaaatctacaaatgtggactttgctgtcaatacagagggaacttattctgagcctcgccccattggtactcgctacctcacccgtaatctgtaa

SEQ ID NO: 5022 - protein, 738 aa, Adeno-associated virus
MAADGYLPDWLEDNLSEGIREWWDLKPGAPKPKANQQKQDDGRGLVLPGYKYLGPFNGLDKGEPVNAADAAALEHDKAYDQQLKAGDNPYLRYNHADAEFQERLQEDTSFGGNLGRAVFQAKKRVLEPLGLVEEAAKTAPGKKRPVEPSPQRSPDSSTGIGKKGQRPAKKRLNFGQTGDSESVPDPQPIGEPPAGPSGLGSGTMAAGGGAPMADNNEGADGVGSSSGNWHCDSTWLGDRVITTSTRTWALPTYNNHLYKQISNGTSGGSTNDNTYFGYSTPWGYFDFNRFHCHFSPRDWQRLINNNWGFRPKRLSFKPFNIQVKEVTQNEGTKTIANNLTSTIQVFTDSEYQLPYVLGSAHQGCLPPFPADVFMIPQYGYLTLNNGSQAVGRSSFYCLEYFPSQMLRTGNNFEFSYTFEDVPFHSSYAHSQSLDRLMNPLIDQYLHYLSRTQSTGGTQGTQQLLFSQAGPANMSAQAKNWLPGPCYRQQRVSTTLSQNNNSNFAWTGATKYHLNGRDSLVNPGVAMATHKDDEERFFPSSGVLMFGKQGAGRDNVDYSSVMLTSEEEIKTTNPVATEQYGVVADNLQQTNTGPIVGNVNSQGALPGMVWQNRDVYLQGPIWAKIPHTDGNFHPSPLMGGFGLKHPPPQILIKNTPVPADPPTTFSQAKLASFITQYSTGQVSVEIEWELQKENSKRWNPEIQYTSNYYKSTNVDFAVNTEGTYSEPRPIGTRYLTRNL

SEQ ID NO: 5023 - DNA, 2217 bp, Adeno-associated virus
  source 1..2217: mol_type = genomic DNA
atggctgctgacggttatcttccagattggctcgaggacaacctctctgagggcattcgcgagtggtgggacctgaaacctggagcccccaagcccaaggccaaccagcagaagcaggacgacggccggggtctggtgcttcctggctacaagtacctcggacccttcaacggactcgacaagggggagcccgtcaacgcggcggacgcagcggccctcgagcacgacaaggcctacgaccagcagctcaaagcgggtgacaatccgtacctgcggtataaccacgccgacgccgagtttcaggagcgtctgcaagaagatacgtcttttgggggcaacctcgggcgagcagtcttccaggccaagaagcgggttctcgaacctctcggtctggttgaggaagctgctaagacggctcctggaaagaagagaccggtagaaccgtcacctcagcgttcccccgactcctccacgggcatcggcaagaaaggccagcagcccgctaaaaagagactgaactttggtcagactggcgactcagagtcagtccccgaccctcaaccaatcggagaaccaccagcaggcccctctggtctgggatctggtacaatggctgcaggcggtggcgctccaatggcagacaataacgaaggcgccgacggagtgggtagttcctcaggaaattggcattgcgattccacatggctgggcgacagagtcatcaccaccagcacccgaacctgggccctgcccacctacaacaaccacctctacaagcaaatatccaatgggacatcgggaggaagcaccaacgacaacacctacttcggctacagcaccccctgggggtattttgacttcaacagattccactgccacttctcaccacgtgactggcagcgactcatcaacaacaactggggattccggccaaaaagactcagcttcaagctcttcaacatccaggtcaaggaggtcacgcagaatgaaggcaccaagaccatcgccaataaccttaccagcacgattcaggtatttacggactcggaataccagctgccgtacgtcctcggctccgcgcaccagggctgcctgcctccgttcccggcggacgtcttcatgattccccagtacggctaccttacactgaacaatggaagtcaagccgtaggccgttcctccttctactgcctggaatattttccatctcaaatgctgcgaactggaaacaattttgaattcagctacaccttcgaggacgtgcctttccacagcagctacgcacacagccagagcttggaccgactgatgaatcctctcatcgaccagtacctgtactacttatccagaactcagtccacaggaggaactcaaggtacccagcaattgttattttctcaagctgggcctgcaaacatgtcggctcaggctaagaactggctacctggaccttgctaccggcagcagcgagtctctacgacactgtcgcaaaacaacaacagcaactttgcttggactggtgccaccaaatatcacctgaacggaagagactctttggtaaatcccggtgtcgccatggcaacccacaaggacgacgaggaacgcttcttcccgtcgagtggagtcctgatgtttggaaaacagggtgctggaagagacaatgtggactacagcagcgttatgctaaccagcgaagaagaaattaaaaccactaaccctgtagccacagaacaatacggtgtggtggctgataacttgcagcaaaccaatacggggcctattgtgggaaatgtcaacagccaaggagccttacctggcatggtctggcagaaccgagacgtgtacctgcagggtcccatctgggccaagattcctcacacggacggcaacttccacccttcaccgctaatgggaggatttggactgaagcacccacctcctcagatcctgatcaagaacacgccggtacctgcggatcctccaacaacgttcagccaggcgaaattggcttccttcattacgcagtacagcaccggacaggtcagcgtggaaatcgagtgggagctgcagaaggagaacagcaaacgctggaacccagagattcagtacacttcaaactactacaaatctacaaatgtggactttgctgtcaatacagagggaacttattctgagcctcgccccattggtactcgttacctcacccgtaatctgtaa

SEQ ID NO: 5024 - protein, 738 aa, Adeno-associated virus; identical to SEQ ID NO: 4797

SEQ ID NO: 5025 - protein, 738 aa, Adeno-associated virus
MAADGYLPDWLEDNLSEGIREWWDLKPGAPKPKANQQKQDDGRGLVLPGYKYLGPFNGLDKGEPVNAADAAALEHDKAYDQQLKAGDNPYLRYNHADAEFQERLQEDTSFGGNLGRAVFQAKKRVLEPLGLVEEAAKTAPGKKRPVEPSPQRSPDSSTGIGKKGQQPAKKRLNFGQTGDSESVPDPQPIGEPPAGPSGLGSGTMAAGGGAPMADNNEGADGVGSSSGNWHCDSTWLGDRVITTSTRTWALPTYNNHLYKQISNGTSGGSTNDNTYFGYSTPWGYFDFNRFHCHFSPRDWQRLINNNWGFRPKRLSFKLFNIQVKEVTQDEGTKTIANNLTSTIQVFTDSEYQLPYVLGSAHQGCLPPFPADVFMIPQYGYLTLNNGSQAVGRSSFYCLEYFPSQMLRTGNNFEFSYTFEDVPFHSSYAHSQSLDRLMNPLIDQYLYYLSRTQSTGGTQGTQQLLFSQAGPANMSARAKNWLPGPCYRQQRVSTTLSQNNNSNFAWTGATKYHLNGRDSLVNPGVAMATHKDDEERFFPSSGVLMFGKQGAGRDNVDYSSVMLTSEEEIKTTNPVATEQYGVVADNLQQANTGPIVGNVNSQGALPGMVWQNRDVYLQGPIWAKIPHTDGNFHPSPLMGGFGLKHPPPQILIKNTPVPADPPTTFSQAKLASFITQYSTGQVSVEIEWELQKENSKRWNPEIQYTSNYYKSTNVDFAVNSEGTYSEPRPIGTRYLTRNL

SEQ ID NO: 5026 - DNA, 2217 bp, Adeno-associated virus
  source 1..2217: mol_type = genomic DNA
atggctgctgacggttatcttccagattggctcgaggacaacctctctgagggcattcgcgagtggtgggacctgaaacctggagcccccaagcccaaggccaaccagcagaagcaggacgacggccggggtctggtgcttcctggctacaagtacctcggacccttcaacggactcgacaagggggagcccgtcaacgcggcggacgcagcggccctcgagcacgacaaggcctacgaccagcagctcaaagcgggtgacaatccgtacctgcggtataaccacgccgacgccgagtttcaggagcgtctgcaagaagatacgtcttttgggggcaacctcgggcgagcagtcttccaggccaagaagcgggttctcgaacctctcggtctggttgaggaagctgctaagacggctcctggaaagaagagaccggtagaaccgtcacctcagcgttcccccgactcctccacgggcatcggcaagaaaggccagcagcccgctaaaaagagactgaactttggtcagactggcgactcagagtcagtccccgaccctcaaccaatcggagaaccaccagcaggcccctctggtctgggatctggtacaatggctgcaggcggtggcgctccaatggcagacaataacgaaggcgccgacggagtgggtagttcctcaggaaattggcattgcgattccacatggctgggcgacagagtcatcaccaccagcacccgaacctgggccctgcccacctacaacaaccacctctacaagcaaatatccaatgggacatcgggaggaagcaccaacgacaacacctacttcggctacagcaccccctgggggtattttgacttcaacagattccactgccacttctcaccacgtgactggcagcgactcatcaacaacaactggggattccggccaaaaagactcagcttcaagctcttcaacatccaggtcaaggaggtcacgcaggatgaaggcaccaagaccatcgccaataaccttaccagcacgattcaggtatttacggactcggaataccagctgccgtacgtcctcggctccgcgcaccagggctgcctgcctccgttcccggcggacgtcttcatgattccccagtacggctaccttacactgaacaatggaagtcaagccgtaggccgttcctccttctactgcctggaatattttccatctcaaatgctgcgaactggaaacaattttgaattcagctacaccttcgaggacgtgcctttccacagcagctacgcacacagccagagcttggaccgactgatgaatcctctcatcgaccagtacctgtactacttatccagaactcagtccacaggaggaactcaaggtacccagcaattgttattttctcaagctgggcctgcaaacatgtcggctcgggctaagaactggctacctggaccttgctaccggcagcagcgagtctctacgacactgtcgcaaaacaacaacagcaactttgcttggactggtgccaccaaatatcacctgaacggaagagactctttggtaaatcccggtgttgctatggcaacgcataaggacgacgaggaacgtttctttccatcgagcggagtcctgatgtttggaaaacagggtgctggaagagacaatgtggactatagcagcgttatgctaaccagcgaggaagaaattaaaaccactaaccctgtagccacagaacaatacggtgtggtggctgacaacttgcagcaagccaatacagggcctattgtgggaaatgtcaacagccaaggagccttacctggcatggtctggcagaaccgagacgtgtacctgcagggtcccatctgggccaaaattcctcacacggacggcaattttcacccgtctcctctgatgggcggctttggactgaagcacccacctccccagatcctgatcaagaatacgccggtacctgcggatcctccaacgacgttcagccaggcaaaattggcttccttcatcacgcagtacagcaccggccaggtcagcgtggagatcgagtgggagctgcagaaggagaacagcaagcgatggaacccagaaattcagtacacttccaactactacaaatctacaaatgtggactttgctgtcaattctgagggtacatattcagagcctcgccccattggtactcgttatctgacacgtaatctgtaa

SEQ ID NO: 5027 - DNA, 2211 bp, Adeno-associated virus
  source 1..2211: mol_type = genomic DNA
atggctgccgatggttatcttccagattggctcgaggacaacctctctgagggcattcgcgagtggtgggacttgaaacctggagccccgaaacccaaagccaaccagcaaaagcaggacgacggccggggcctggtgcttcctggctacaagtacctcggacccttcaacggactcgacaagggggagcccgtcaacgcggcggacgcagcggccctcgagcacgacaaggcctacgaccagcagctcgaagcgggtgacaatccgtacctgcggtataaccacgccgacgccgagtttcaggagcgtctgcaagaagatacgtcttttgggggcaacctcgggcgagcagtcttccaggccaagaagcgggttctcgaacctctcggtctggttgaggaaggcgctaagacggctcctggaaagaagagaccagtagagcagtcaccccaagaaccagactcctcctcgggcatcggcaagaaaggccaacagcccgccagaaaaagactcaattttggccagactggcgactcagagtcagttccagaccctcaacctctcggagaacctccagcagcgccctctggtgtgggacctaatacaatggctgcaggcggtggcgcaccaatggcagacaataacgaaggcgccgacggagtgggtagttcctcgggaaattggcattgcgattccacatggctgggcgacagagtcatcaccaccagcacccgaacctgggccctgcccacctacaacaaccacctctacaagcaaatctccaacgggacatcgggaggagccaccaacgacaacacctacttcggctacagcaccccctgggggtattttgactttaacagattccactgccacttttcaccacgtgactggcagcgactcatcaacaacaactggggattccggcccaagagactcagcttcaagctcttcaacatccaggtcaaggaggtcacgcagaatgaaggcaccaagaccatcgccaataacctcaccagcaccatccaggtgtttacggactcggagtaccagctgccgtacgttctcggctctgcccaccagggctgcctgcctccgttcccggcggacgtgttcatgattccccagtacggctacctaacactcaacaacggtagtcaggccgtgggacgctcctccttctactgcctggaatactttccttcgcagatgctgagaaccggcaacaacttccagtttacttacaccttcgaggacgtgcctttccacagcagctacgcccacagccagagcttggaccggctgatgaatcctctgattgaccagtacctgtactacttgtctcggactcaaacaacaggaggcacggcaaatacgcagactctgggcttcagccaaggtgggcctaatacaatggccaatcaggcaaagaactggctgccaggaccctgttaccgccaacaacgcgtctcaacgacaaccgggcaaaacaacaatagcaactttgcctggactgctgggaccaaataccatctgaatggaagaaattcattggctaatcctggcatcgctatggcaacacacaaagacgacgaggagcgttttttcccagtaacgggatcctgtttttggcaacaaaatgctgccagagacaatgcggattacagcgatgtcatgctcaccagcgaggaagaaatcaaaaccactaaccctgtggctacagaggaatacggtatcgtggcagataacttgcagcagcaaaacacggctcctcaaattggaactgtcaacagccagggggccttacccggtatggtctggcagaaccgggacgtgtacctgcagggtcccatctgggccaagattcctcacacggacggcaacttccacccgtctccgctgatgggcggctttggcctgaaacatcctccgcctcagatcctgatcaagaacacgcctgtacctgcggatcctccgaccaccttcaaccagtcaaagctgaactctttcatcacgcaatacagcaccggacaggtcagcgtggaaattgaatgggagctacagaaggaaaacagcaagcgctggaaccccgagatccagtacacctccaactactacaaatctacaagtgtggactttgctgttaatacagaaggcgtgtactctgaaccccgccccattggcacccgttacctcacccgtaatctgtaa

SEQ ID NO: 5028 - protein, 736 aa, Adeno-associated virus
MAADGYLPDWLEDNLSEGIREWWDLKPGAPKPKANQQKQDDGRGLVLPGYKYLGPFNGLDKGEPVNAADAAALEHDKAYDQQLEAGDNPYLRYNHADAEFQERLQEDTSFGGNLGRAVFQAKKRVLEPLGLVEEGAKTAPGKKRPVEQSPQEPDSSSGIGKKGQQPARKRLNFGQTGDSESVPDPQPLGEPPAAPSGVGPNTMAAGGGAPMADNNEGADGVGSSSGNWHCDSTWLGDRVITTSTRTWALPTYNNHLYKQISNGTSGGATNDNTYFGYSTPWGYFDFNRFHCHFSPRDWQRLINNNWGFRPKRLSFKLFNIQVKEVTQNEGTKTIANNLTSTIQVFTDSEYQLPYVLGSAHQGCLPPFPADVFMIPQYGYLTLNNGSQAVGRSSFYCLEYFPSQMLRTGNNFQFTYTFEDVPFHSSYAHSQSLDRLMNPLIDQYLYYLSRTQTTGGTANTQTLGFSQGGPNTMANQAKNWLPGPCYRQQRVSTTTGQNNNSNFAWTAGTKYHLNGRNSLANPGIAMATHKDDEERFFPVTGSCFWQQNAARDNADYSDVMLTSEEEIKTTNPVATEEYGIVADNLQQQNTAPQIGTVNSQGALPGMVWQNRDVYLQGPIWAKIPHTDGNFHPSPLMGGFGLKHPPPQILIKNTPVPADPPTTFNQSKLNSFITQYSTGQVSVEIEWELQKENSKRWNPEIQYTSNYYKSTSVDFAVNTEGVYSEPRPIGTRYLTRNL

SEQ ID NO: 5029 - DNA, 2214 bp, Adeno-associated virus
  source 1..2214: mol_type = genomic DNA
atggctgctgacggttatcttccagattggctcgaggacaacctctctgagggcattcgcgagtggtgggacctgaaacctggagcccccaagcccaaggccaaccagcagaagcaggacgacggccggggtctggtgcttcctggctacaagtacctcggacccttcaacggactcgacaagggggagcccgtcagcgcggcggacgcagcggccctcgagcacgacaaggcctgcgaccagcggctcaaagcgggtgacaatccgtacctgcggtataaccacgccgacgccgagtttcaggagcgtctgcaagaagatacgtcttttgggggcaacctcgggcgagcagtcttccaggccaagaagcgggttctcgaacctctcggtctggttgaggaagctgctaagacggctcctggaaagaagggaccggtagaaccgtcacctcagcgttcccccgactcctccacgggcatcggcaagaaaggccagcagcccgctagaaagagactgaactttgggcagactggcgactcagagtcagtccccgaccctcaaccaatcggagaaccaccagcaggcccctctggtctgggatctggtacaatggctgcaggcggtggcgcaccaatggctgacaataacgagggcgccgacggagtgggtaatgcctcaggaaattggcattgcgattccacatggctgggcgacagagtcatcaccaccagcacccgaacctgggctttgcccacctacaacaatcacctctacaagcaaatctccagtcagtcagcaggtagcaccaacgacaacgtctacttcggctacagcaccccctgggggtattttgacttcaacagattccactgtcacttctcaccacgtgactggcagcggctcatcaacaacaactggggattccggcccaagaagctcaacttcaagctgttcaacatccaggtcaaggaggtcacaacgaatgacggcgtcacgaccatcgccaataaccttaccagcacggttcaggtcttttcggactcggaataccagctgccctacgtcctcggctccgcacaccagggctgcctgcctccgttcccggcggacgtcttcatgattccccagtacggctacctgactctgaacaatggcagccaatcggtgggtcgttcctctttctactgcctggaatatttcccttctcaaatgctgagaacgggcaacaacttcaccttcagctacaccttcgaggacgttcccttccacagcagctacgcacacagccagagcctggaccggctgatgaatcctcttatcgaccagtacctgtattacctggccagaacacagagcaacgcaggaggcacagctggcaatcgggaactgcagttttatcagggcgggcctaccaccatggccgaacaagccaaaaactggctgcctggaccttgcttccggcaacaaagagtctccaagacgctggatcaaaacaacaacagcaactttgcttggactggtgccaccaaataccatctaaatggaagaaattcattggttaatcccggtgtcgccatggcaacccacaaggacgacgaggaacgcttcttcccttcgagcggagtcctgatttttggaaaaactggagcagctaataagactacactggaaaatgtgttaatgacaaatgaagaggaaattcgtcctaccaacccggtagccaccgaggaatacgggactgttagcagcaacctgcaggcggctaacactgcagcccagacacaagttgtcaacaaccagggagccttacctggtatggtctggcagaaccgggacgtgtacctgcagggtcccatctgggccaagattcctcacacggacggcaactttcacccgtctccgctgatgggcggctttggactgaagcatccgcctcctcagatcctgatcaaaaacactcctgttcctgctaatcccccggaggtgtttacgcctgccaagtttgcttctttcatcacacagtacagcaccggccaggtcagcgtggagatcgagtgggagctgcagaaggagaacagcaagcgctggaacccagagattcagtatacctccaattttgacgaacagactggtgtggactttgccgttgacagccagggtgtttattctgagcctcgccccattggtactcgttacctcacccgtaatctgtaa

SEQ ID NO: 5030 - protein, 737 aa, Adeno-associated virus
MAADGYLPDWLEDNLSEGIREWWDLKPGAPKPKANQQKQDDGRGLVLPGYKYLGPFNGLDKGEPVSAADAAALEHDKACDQRLKAGDNPYLRYNHADAEFQERLQEDTSFGGNLGRAVFQAKKRVLEPLGLVEEAAKTAPGKKGPVEPSPQRSPDSSTGIGKKGQQPARKRLNFGQTGDSESVPDPQPIGEPPAGPSGLGSGTMAAGGGAPMADNNEGADGVGNASGNWHCDSTWLGDRVITTSTRTWALPTYNNHLYKQISSQSAGSTNDNVYFGYSTPWGYFDFNRFHCHFSPRDWQRLINNNWGFRPKKLNFKLFNIQVKEVTTNDGVTTIANNLTSTVQVFSDSEYQLPYVLGSAHQGCLPPFPADVFMIPQYGYLTLNNGSQSVGRSSFYCLEYFPSQMLRTGNNFTFSYTFEDVPFHSSYAHSQSLDRLMNPLIDQYLYYLARTQSNAGGTAGNRELQFYQGGPTTMAEQAKNWLPGPCFRQQRVSKTLDQNNNSNFAWTGATKYHLNGRNSLVNPGVAMATHKDDEERFFPSSGVLIFGKTGAANKTTLENVLMTNEEEIRPTNPVATEEYGTVSSNLQAANTAAQTQVVNNQGALPGMVWQNRDVYLQGPIWAKIPHTDGNFHPSPLMGGFGLKHPPPQILIKNTPVPANPPEVFTPAKFASFITQYSTGQVSVEIEWELQKENSKRWNPEIQYTSNFDEQTGVDFAVDSQGVYSEPRPIGTRYLTRNL

SEQ ID NO: 5031 - DNA, 2214 bp, Adeno-associated virus
  source 1..2214: mol_type = genomic DNA
atggctgccgatggttatcttccagattggctcgaggacaacctctctgagggcattcgcgagtggtgggacctgaaacctggagccccgaaacccaaagccaaccagcaaaagcaggacgacggccggggtctggtgcttcctggctacaagtacctcggacccttcaacggactcgacaagggggagcccgtcaacgcggcggacgcagcggccctcgagcacgacaaggcctacgaccagcagctcaaagcgggtgacaatccgtacctgcggtataaccacgccgacgccgagtttcaggagcgtctgcaagaagatacgtcttttgggggcaacctcgggcgagcagtcttccaggccaagaagcgggttctcgaacctctcggtctggttgaggaagctgctaagacggctcctggaaagaagagaccggtagaaccgtcacctcagcgttcccccgactcctccacgggcatcggcaagaaaggccagcagcccgctagaaagagactgaactttgggcagactggcgactcagagtcagtccccgaccctcaaccaatcggagaaccaccagcaggcccctctggtctgggatctggtacaatggctgcaggcggtggcgctccaatggcagacaataacgaaggcgccgacggagtgggtaatgcctcaggaaattggcattgcgattccacatggctgggcgacagagtcatcaccaccagcacccgaacctgggctttgcccacctacaacaaccacctctacaagcaaatctccagtcagtcagcaggtagcaccaacgacaacgtctacttcggctacagcaccccctgggggtattttgacttcaacagattccactgtcacttctcaccacgtgactggcagcggctcatcaacaacaactggggattccggcccaagaagctcaacttcaagctgttcaacatccaggtcaaggaggtcacaacgaatgacggcgtcacgaccatcgccaataaccttaccagcacggttcaggtcttttcggactcggaataccagctgccctacgtcctcggctccgcacaccagggctgcctgcctccgttcccggcggacgtcttcatgattcctcagtacggctacctgactctcaacaacggtagtcaggccgtgggacgttcctccttctactgcctggagtacttcccctctcagatgctgagaacgggcaacaacttttccttcagctacactttcgaggacgtgcctttccacagcagctacgcgcacagccagagtttggacaggctgatgaatcctctcatcgaccagtacctgtactacctgtcaagaacccagtctacgggaggcacagcgggaacccagcagttgctgttttctcaggccgggcctagcaacatgtcgactcaggccagaaactggctgcctggaccctgctacagacagcagcgcgtctccacgacactgtcgcaaaacaacaacagcaactttgcctggactggtgccaccaagtatcatctgaacggcagagactctctggtgaatccgggcgtcgccatggcaaccaacaaggacgacgaggaccgcttcttcccatccagcggcatcctcatgtttggcaagcagggagctggaaaagacaacgtggactatagcaacgtgatgctaaccagcgaggaagaaatcaagaccaccaaccccgtggccacagaacagtatggcgtggtggctgataacctacagcagcaaaacaccgctcctattgtgggggccgtcaacagccagggagccttacctggcatggtctggcagaaccgggacgtgtacctgcagggtcctatttgggccaagattcctcacacagatggcaactttcacccgtctcctttaatgggcggctttggacttaaacatccgcctcctcagatccttatcaaaaacactcctgttcctgcggatcctccaacagcgttcaaccaggccaagctgaattctttcatcacgcagtacagcaccggacaagtcagcgtggagatcgagtgggagctgcagaaggagaacagcaagcgctggaacccagagattcagtatacttccaactactacaaatctacaaatgtggactttgctgttaatactgagggtgcttactctgagcctcgccccattggcactcgttacctcacccgtaatctgtaa

SEQ ID NO: 5032 - protein, 737 aa, Adeno-associated virus
MAADGYLPDWLEDNLSEGIREWWDLKPGAPKPKANQQKQDDGRGLVLPGYKYLGPFNGLDKGEPVNAADAAALEHDKAYDQQLKAGDNPYLRYNHADAEFQERLQEDTSFGGNLGRAVFQAKKRVLEPLGLVEEAAKTAPGKKRPVEPSPQRSPDSSTGIGKKGQQPARKRLNFGQTGDSESVPDPQPIGEPPAGPSGLGSGTMAAGGGAPMADNNEGADGVGNASGNWHCDSTWLGDRVITTSTRTWALPTYNNHLYKQISSQSAGSTNDNVYFGYSTPWGYFDFNRFHCHFSPRDWQRLINNNWGFRPKKLNFKLFNIQVKEVTTNDGVTTIANNLTSTVQVFSDSEYQLPYVLGSAHQGCLPPFPADVFMIPQYGYLTLNNGSQAVGRSSFYCLEYFPSQMLRTGNNFSFSYTFEDVPFHSSYAHSQSLDRLMNPLIDQYLYYLSRTQSTGGTAGTQQLLFSQAGPSNMSTQARNWLPGPCYRQQRVSTTLSQNNNSNFAWTGATKYHLNGRDSLVNPGVAMATNKDDEDRFFPSSGILMFGKQGAGKDNVDYSNVMLTSEEEIKTTNPVATEQYGVVADNLQQQNTAPIVGAVNSQGALPGMVWQNRDVYLQGPIWAKIPHTDGNFHPSPLMGGFGLKHPPPQILIKNTPVPADPPTAFNQAKLNSFITQYSTGQVSVEIEWELQKENSKRWNPEIQYTSNYYKSTNVDFAVNTEGAYSEPRPIGTRYLTRNL

SEQ ID NO: 5033 - DNA, 2217 bp, Adeno-associated virus
  source 1..2217: mol_type = genomic DNA
atggctgccgatggttatcttccagattggctcgaggacaacctctctgagggcattcgcgagtggtgggacctgaaacctggagccccgaaacccaaagccaaccagcaaaagcaggacgacggccggggtctggtgcttcctggctacaagtacctcggacccttcaacggactcgacaagggggagcccgtcaacgcggcggacgcagcggccctcgagcacgacaaggcctacgaccagcagctcaaagcgggtgacaatccgtacctgcggtataatcacgccgacgccgagtttcaggagcgtctgcaagaagatacgtcttttgggggcaacctcgggcgagcagtcttccaggccaagaagcgggttctcgaacctctcggtctggttgaggaaggcgctaagacggctcctggaaagaagagaccggtagagccgtcaccacagcgttcccccgactcctccacgggcatcggcaagaaaggccagcagcccgccagaaagagactcaatttcggtcagactggcgactcagagtcagtccccgaccctcaacctatcggagaacctccagcagcgccctctagtgtgggatctggtacaatggctgcaggcggtggcgcaccaatggcagacaataacgaaggtgccgacggagtgggtagttcctcgggaaattggcattgcgattccacatggctgggcgacagagtcatcaccaccagcacccgaacctgggccctgcccacctacaacaaccacctctacaagcaaatctccaacgggacctcgggaggcagcaccaacgacaacacctactttggctacagcaccccctgggggtattttgactttaacagattccactgccacttctcaccacgtgactggcagcgactcatcaacaacaactggggattccggcccaagagactcagcttcaagctcttcaacatccaggtcaaagaggtcacgcagaatgaaggcaccaagaccatcgccaataacctcaccagcaccatccaggtgtttacggactcggaataccagctgccgtacgtcctcggctctgcccaccagggctgcctgcctccgttcccggcggacgtcttcatgattcctcagtacggctacctgactctcaacaacggtagtcaggccgtgggacgttcctccttctactgcctggagtacttcccctctcagatgctgagaacgggcaacaacttttccttcagctacactttcgaggacgtgcctttccacagcagctacgcgcacagccagagtttggacaggctgatgaatcctctcatcgaccagtacctgtactacctgtcaagaacccagtctacgggaggcacagcgggaacccagcagttgctgttttctcaggccgggcctagcaacatgtcggctcaggccagaaactggctgcctggaccctgctacagacagcagcgcgtctccacgacactgtcgcaaaacaacaacagcaactttgcctggactggtgccaccaagtatcatctgaacggcagagactctctggtgaatccgggcgtcgccatggcaaccaacaaggacgacgaggaccgcttcttcccatccagcggcatcctcatgtttggcaagcagggagctggaaaagacaacgtggactatagcaacgtgatgctaaccagcgaggaagaaatcaaggccaccaaccccgtggccacagaacagtatggcgtggtggctgataacctacagcagcaaaacaccgctcctattgtgggggccgtcaacagccagggagccttacctggcatggtctggcagaaccgggacgtgtacctgcagggtcctatttgggccaagattcctcacacagatggcaactttcacccgtctcctttaatgggcggctttggacttaaacatccgcctcctcagatcctcatcaaaaacactcctgttcctgcggatcctccaacagcgttcaaccaggccaagctgaattctttcatcacgcagtacagcaccggacaagtcagcgtggagatcgagtgggagctgcagaaggagaacagcaagcgctggaacccagagattcagtatacttccaactactacaaatctacaaatgtggactttgctgttaatactgagggtgtttactctgagcctcgccccattggcactcgttacctcacccgtaatctgtaa

SEQ ID NO: 5034 - protein, 738 aa, Adeno-associated virus
MAADGYLPDWLEDNLSEGIREWWDLKPGAPKPKANQQKQDDGRGLVLPGYKYLGPFNGLDKGEPVNAADAAALEHDKAYDQQLKAGDNPYLRYNHADAEFQERLQEDTSFGGNLGRAVFQAKKRVLEPLGLVEEGAKTAPGKKRPVEPSPQRSPDSSTGIGKKGQQPARKRLNFGQTGDSESVPDPQPIGEPPAAPSSVGSGTMAAGGGAPMADNNEGADGVGSSSGNWHCDSTWLGDRVITTSTRTWALPTYNNHLYKQISNGTSGGSTNDNTYFGYSTPWGYFDFNRFHCHFSPRDWQRLINNNWGFRPKRLSFKLFNIQVKEVTQNEGTKTIANNLTSTIQVFTDSEYQLPYVLGSAHQGCLPPFPADVFMIPQYGYLTLNNGSQAVGRSSFYCLEYFPSQMLRTGNNFSFSYTFEDVPFHSSYAHSQSLDRLMNPLIDQYLYYLSRTQSTGGTAGTQQLLFSQAGPSNMSAQARNWLPGPCYRQQRVSTTLSQNNNSNFAWTGATKYHLNGRDSLVNPGVAMATNKDDEDRFFPSSGILMFGKQGAGKDNVDYSNVMLTSEEEIKATNPVATEQYGVVADNLQQQNTAPIVGAVNSQGALPGMVWQNRDVYLQGPIWAKIPHTDGNFHPSPLMGGFGLKHPPPQILIKNTPVPADPPTAFNQAKLNSFITQYSTGQVSVEIEWELQKENSKRWNPEIQYTSNYYKSTNVDFAVNTEGVYSEPRPIGTRYLTRNL

SEQ ID NO: 5035 - DNA, 2217 bp, Adeno-associated virus
  source 1..2217: mol_type = genomic DNA
atggctgccgatggttatcttccagattggctcgaggacaacctctctgagggcattcgcgagtggtgggacctgaaacctggagccccgaaacccaaagccaaccagcaaaagcaggacgacggccggggtctggtgcttcctggctacaagcacctcggacccttcaacggactcgacaagggggagcccgtcaacgcggcggacgcagcggccctcgagcacgacaaggcctacgaccagcagctcaaagcgggtgacaatccgtacctgcggtataatcacgctgacgccgagtttcaggagcgtctgcaagaagatacgtcttttgggggcaacctcgggcgagcagtcttccaggccaagaagcgggttctcgaacctctcggtctggttgaggaaggcgctaagacggctcctggaaagaagagaccggtagagccgtcaccacagcgttcccccgactcctccacgggcatcggcaagaaaggccagcagcccgccagaaagagactcaatttcggtcagactggcgactcagagtcagtccccgaccctcaacctatcggagaacctccagcagcgccctctagtgtgggatctggtacaatggctgcaggcggtggcgcaccaatggcagacaataacgaaggtgccgacggagtgggtagttcctcgggaaattggcattgcgattccacatggctgggcgacagagtcatcaccaccagcacccgaacctgggccctgcccacctacaacaaccacctctacaagcaaatctccaacgggacctcgggaggcagcaccaacgacaacacctactttggctacagcaccccctgggggtattttgactttaacagattccactgccacttctcaccacgtgactggcagcgactcatcaacaacaactggggattccggcccaagagactcagcttcaagctcttcaacatccaggtcaaagaggtcacgcagaatgaaggcaccaagaccatcgccaataaccttaccagcacggttcaggtcttttcggactcggaataccagctgccctacgtcctcggctccgcacaccagggctgcctgcctccgttcccggcggacgtcttcatgattccccagtacggctacctgactctgaacaatggcagccaatcggtgggtcgttcctctttctactgcctggaatatttcccttctcaaatgctgagaacgggcaacaacttcaccttcagctacaccttcgaggacgttcccttccacagcagctacgcacacagccagagcctggaccggctgatgaatcctcttatcgaccagtacctgtattacctggccagaacacagagcaacgcaggaggcacagctggcaatcgggaactgcagttttatcagggcgggcctaccaccatggccgaacaagccaaaaactggctgcctggaccttgcttccggcaacaaagagtctccaagacgctggatcaaaacaacaacagcaactttgcttggactggtgccaccaaataccatctaaatggaagaaattcattggttaatcccggtgtcgccatggcaacccacaaggacgacgaggaacgcttcttcccttcgagcggagtcctgatttttggaaaaactggagcagctaataagactacactggaaaatgtgttaatgacaaatgaagaggaaattcgtcctaccaacccggtagccaccgaggaatacgggactgttagcagcaacctgcaggcggctaacactgcagcccagacacaagttgtcaacaaccagggagccttacctggtatggtctggcagaaccgggacgtgtacctgcagggtcccatctgggccaagattcctcacacggacggcaactttcacccgtctccgctgatgggcggctttggactgaagcatccgcctcctcagatcctgatcaaaaacactcctgttcctgctaatcccccggaggtgtttacgcctgccaagtttgcttctttcatcacacagtacagcaccggccaggtcagcgtggagatcgagtgggagctgcagaaggagaacagcaagcgctggaacccagagattcagtatacctccaattttgacaaacagactggtgtggactttgccgttgacagccagggtgtttattctgagcctcgccccattggtactcgttacctcacccgtaatctgtaa

SEQ ID NO: 5036 - protein, 738 aa, Adeno-associated virus
MAADGYLPDWLEDNLSEGIREWWDLKPGAPKPKANQQKQDDGRGLVLPGYKHLGPFNGLDKGEPVNAADAAALEHDKAYDQQLKAGDNPYLRYNHADAEFQERLQEDTSFGGNLGRAVFQAKKRVLEPLGLVEEGAKTAPGKKRPVEPSPQRSPDSSTGIGKKGQQPARKRLNFGQTGDSESVPDPQPIGEPPAAPSSVGSGTMAAGGGAPMADNNEGADGVGSSSGNWHCDSTWLGDRVITTSTRTWALPTYNNHLYKQISNGTSGGSTNDNTYFGYSTPWGYFDFNRFHCHFSPRDWQRLINNNWGFRPKRLSFKLFNIQVKEVTQNEGTKTIANNLTSTVQVFSDSEYQLPYVLGSAHQGCLPPFPADVFMIPQYGYLTLNNGSQSVGRSSFYCLEYFPSQMLRTGNNFTFSYTFEDVPFHSSYAHSQSLDRLMNPLIDQYLYYLARTQSNAGGTAGNRELQFYQGGPTTMAEQAKNWLPGPCFRQQRVSKTLDQNNNSNFAWTGATKYHLNGRNSLVNPGVAMATHKDDEERFFPSSGVLIFGKTGAANKTTLENVLMTNEEEIRPTNPVATEEYGTVSSNLQAANTAAQTQVVNNQGALPGMVWQNRDVYLQGPIWAKIPHTDGNFHPSPLMGGFGLKHPPPQILIKNTPVPANPPEVFTPAKFASFITQYSTGQVSVEIEWELQKENSKRWNPEIQYTSNFDKQTGVDFAVDSQGVYSEPRPIGTRYLTRNL

SEQ ID NO: 5037 - protein, 737 aa, Adeno-associated virus
MAADGYLPDWLEDNLSEGIREWWDLKPGAPKPKANQQKQDDGRGLVLPGYKYLGPFNGLDKGEPVNAADAAALEHDKAYDQQLKAGDNPYLRYNHADAEFQERLQEDTSFGGNLGRAVFQAKKRVLEPLGLVEEAAKTAPGKKRPVEPSPQRSPDSSTGIGKKGQQPARKRLNFGQTGDSESVPDPQPIGEPPAGPSGLGSGTMAAGGGAPMADNNKGADGVGNASGNWHCDSTWLGDRVITTSTRTWALPTYNNHLYKQISSQSAGSTNDNVYFGYSTPWGYFDFNRFHCHFSPRDWQRLINSNWGFRPKKLNFKLFNIQVKEVTTNDGVTTIANNLTSTVQVFSDSEYQLPYVLGSAHQGCLPPFPADVFMIPQYGYLTLNNGSQSVGRSSFYCLEYFPSQMLRTGNNFTFSYTFEDVPFHSSYAHSQSLDRLMNPLIDQYLYYLARTQSNAGGTAGNRELQFYQGGPTTMAEQAKNWLPGPCFRQQRVSKTLDQNNNSNFAWTGATKYHLNGRNSLVNPGVAMATHKDDEERFFPSSGVLIFGKTGAANKTTLENVLMTNEEEIRPTNPVATEEYGTVSSNLQAANTAAQTQVVNNQGALPGMVWQNRDVYLQGPIWAKIPHTDGNFHPSPLMGGFGLKHPPPQILIKNTPVPANPPEVFTPAKFASFITQYSTGQVSVEIEWELQKENSKRWNPEIQYTSNFDKQTGVDFAVDSQGVYSEPRPIGTRYLTRNL

SEQ ID NO: 5038 - DNA, 2214 bp, Adeno-associated virus
  source 1..2214: mol_type = genomic DNA
atggctgctgacggttatcttccagattggctcgaggacaacctctctgagggcattcgcgagtggtgggacctgaaacctggagcccccaagcccaaggccaaccagcagaagcaggacgacggccggggtctggtgcttcctggctacaagtacctcggacccttcaacggactcgacaagggggagcccgtcaacgcggcggacgcagcggccctcgagcacgacaaggcctacgaccagcagctcaaagcgggtgacaatccgtacctgcggtataaccacgccgacgccgagtttcaggagcgtctgcaagaagatacgtcttttgggggcaacctcgggcgagcagtcttccaggccaagaagcgggttctcgaacctctcggtctggttgaggaagctgctaagacggctcctggaaagaagagaccggtagaaccgtcacctcagcgttcccccgactcctccacgggcatcggcaagaaaggccagcagcccgctagaaagagactgaactttgggcagactggcgactcagagtcagtccccgaccctcaaccaatcggagaaccaccagcaggcccctctggtctgggatctggtacaatggctgcaggcggtggcgcaccaatggctgacaataacaagggcgccgacggagtgggtaatgcctcaggaaattggcattgcgattccacatggctgggcgacagagtcatcaccaccagcacccgaacctgggctttgcccacctacaacaaccacctctacaagcaaatctccagtcagtcagcaggtagcaccaacgacaacgtctacttcggctacagcaccccctgggggtattttgacttcaacagattccactgtcacttctcaccacgtgactggcagcggctcatcaacagcaactggggattccggcccaagaagctcaacttcaagctgttcaacatccaggtcaaggaggtcacaacgaatgacggcgtcacgaccatcgccaataaccttaccagcacggttcaggtcttttcggactcggaataccagctgccctacgtcctcggctccgcacaccagggctgcctgcctccgttcccggcggacgtcttcatgattccccagtacggctacctgactctgaacaatggcagccaatcggtgggtcgttcctctttctactgcctggaatatttcccttctcaaatgctgagaacgggcaacaacttcaccttcagctacaccttcgaggacgttcccttccacagcagctacgcacacagccagagcctggaccggctgatgaatcctcttatcgaccagtacctgtattacctggccagaacacagagcaacgcaggaggcacagctggcaatcgggaactgcagttttatcagggcgggcctaccaccatggccgaacaagccaaaaactggctgcctggaccttgcttccggcaacaaagagtctccaagacgctggatcaaaacaacaacagcaactttgcttggactggtgccaccaaataccatctaaatggaagaaattcattggttaatcccggtgtcgccatggcaacccacaaggacgacgaggaacgcttcttcccttcgagcggagtcctgatttttggaaaaactggagcagctaataagactacactggaaaatgtgttaatgacaaatgaagaggaaattcgtcctaccaacccggtagccaccgaggaatacgggactgttagcagcaacctgcaggcggctaacactgcagcccagacacaagttgtcaacaaccagggagccttacctggtatggtctggcagaaccgggacgtgtacctgcagggtcccatctgggccaagattcctcacacggacggcaactttcacccgtctccgctgatgggcggctttggactgaagcatccgcctcctcagatcctgatcaaaaacactcctgttcctgctaatcccccggaggtgtttacgcctgccaagtttgcttctttcatcacacagtacagcaccggccaggtcagcgtggagatcgagtgggagctgcagaaggagaacagcaagcgctggaacccagagattcagtatacctccaattttgacaaacagactggtgtggactttgccgttgacagccagggtgtttattctgagcctcgccccattggtactcgttacctcacccgtaatctgtaa

SEQ ID NO: 5039 - protein, 737 aa, Adeno-associated virus
MAADGYLPDWLEDNLSEGIREWWDLKPGAPKPKANQQKQDDGRGLVLPGYKYLGPFNGLDKGEPVNAADAAALEHDKAYDQQLKAGDNPYLRYNHADAEFQERLQEDTSFGGNLGRAVFQAKKRVLEPLGLVEEAAKTAPGKKRPVEPSPQRSPDSSTGIGKKGQQPARKRLNFGQTGDSESVPDPQPIGEPPAGPSGLGSGTMAAGGGAPMADNNEGADGVGNASGNWHCDSTWLGDRVITTSTRTWALPTYNNHLYKQISSQSAGSTNDNVYFGYSTPWGYFDFNRFHCHFSPRDWQRLINSNWGFRPKKLNFKLFNIQVKEVTTNDGVTTIANNLTSTVQVFSDSEYQLPYVLGSAHQGCLPPFPADVFMIPQYGYLTLNNGSQSVGRSSFYCLEYFPSQMLRTGNNFTFSYTFEDVPFHSSYAHSQSLDRLMNPLIDQYLYYLARTQSNAGGTAGNRELQFYQGGPTTMAEQAKNWLPGPCFRQQRVSKTLDQNNNSNFAWTGATKYHLNGRNSLVNPGVAMATHKDDEERFFPSSGVLIFGKTGAANKTTLENVLMTNEEEIRPTNPVATEEYGTVSSNLQAANTAAQTQVVNNQGALPGMVWQNRDVYLQGPIWAKIPHTDGNFHPSPLMGGFGLKHPPPQILIKNTPVPANPPEVFTPAKFASFITQYSTGQVSVEIEWELQKENSKRWNPEIQYTSNFDKQTGVDFAVDSQGVYSEPRPIGTRYLTRNL

SEQ ID NO: 5040 - protein, 737 aa, Adeno-associated virus
MAADGYLPDWLEDNLSEGIREWWDLKPGAPKPKANQQKQDDGRGLVLPGYKYLGPFNGLDKGEPVNAADAAALEHDKAYDQQLKAGDNPYLRYNHADAEFQERLQEDTSFGGNLGRAVFQAKKRVLEPLGLVEEAAKTAPGKKRPVEPSPQRSPDSSTGIGKKGQQPARKRLNFGQTGDSESVPDPQPIGEPPAGPSGLGSGTMAAGGGAPMADNNEGADGVGNASGNWHCDSTWLGDRVITTSTRTWALPTYNNHLYKQISSQSAGSTNDNVYFGYSTPWGYFDFNRFHCHFSPRDWQRLINNNWGFRPKKLNFKLFNIQVKEVTTNDGVTTIANNLTSTVQVFSDSEYQLPYVLGSAHQGCLPPFPADVFMIPQYGYLTLNNGSQSVGRSSFYCLEYFPSQMLRTGNNFTFSYTFEDVPFHSSYAHSQSLDRLMNPLIDQYLYYLARTQSNAGGTAGNRELQFYQGGPTTMAEQAKNWLPGPCFRQQRVSKTLDQNNNSNFAWTGATKYHLNGRNSLVNPGVAMATHKDDEERFFPSSGVLIFGKTGAANKTTLENVLMTNEEEIRPTNPVATEEYGTVSSNLQAANTAAQTQVVNNQGALPGMVWQNRDVYLQGPIWAKIPHTDGNFHPSPLMGGFGLKHPPPQILIKNTPVPANPPEVFTPAKFASFITQYSTGQVSVEIEWELQKENSKRWNPEIQYTSNFDKQTGVDFAVDSQGVYSEPRPIGTRYLTRNL

SEQ ID NO: 5041 - protein, 737 aa, Adeno-associated virus
MAADGYLPDWLEDNLSEGIREWWDLKPGAPKPKANQQKQDDGRGLVLPGYKYLGPFNGLDKGEPVNAADAAALEHDKAYDQQLKAGDNPYLRYNHADAEFQERLQEDTSFGGNLGRAVFQAKKRVLEPLGLVEEAAKTAPGKKRPVEPSPQRSPDSSTGIGKKGQQPARKRLNFGQTGDSESVPDPQPIGEPPAGPSGLGSGTMAAGGGAPMADNNKGADGVGNASGNWHCDSTWLGDRVITTSTRTWALPTYNNHLYKQISSQSAGSTNDNVYFGYSTPWGYFDFNRFHCHFSPRDWQRLINNNWGFRPKKLNFKLFNIQVKEVTTNDGVTTIANNLTSTVQVFSDSEYQLPYVLGSAHQGCLPPFPADVFMIPQYGYLTLNNGSQSVGRSSFYCLEYFPSQMLRTGNNFTFSYTFEDVPFHSSYAHSQSLDRLMNPLIDQYLYYLARTQSNAGGTAGNRELQFYQGGPTTMAEQAKNWLPGPCFRQQRVSKTLDQNNNSNFAWTGATKYHLNGRNSLVNPGVAMATHKDDEERFFPSSGVLIFGKTGAANKTTLENVLMTNEEEIRPTNPVATEEYGTVSSNLQAANTAAQTQVVNNQGALPGMVWQNRDVYLQGPIWAKIPHTDGNFHPSPLMGGFGLKHPPPQILIKNTPVPANPPEVFTPAKFASFITQYSTGQVSVEIEWELQKENSKRWNPEIQYTSNFDKQTGVDFAVDSQGVYSEPRPIGTRYLTRNL

SEQ ID NO: 5042 - DNA, 2217 bp, Adeno-associated virus
  source 1..2217: mol_type = genomic DNA
atggctgccgatggttatcttccagattggctcgaggacaacctctctgagggcattcgcgagtggtgggacctgaaacctggagccccgaaacccaaagccaaccagcaaaagcaggacgacggccggggtctggtgcttcctggctacaagtacctcggacccttcaacggactcgacaagggggagcccgtcaacgcggcggacgcagcggccctcgagcacgacaaggcctacgaccagcagctcaaagcgggtgacaatccgcacctgcggtataatcacgccgacgccgagtttcaggagcgtctgcaagaagatacgtcttttgggggcaacctcgggcgagcagtcttccaggccaagaagcgggttctcgaacctctcggtctggttgaggaaggcgctaagacggctcctggaaagaagagaccggtagagccgtcaccacagcgttcccccgactcctccacgggcatcggcaagaaaggccagcagcccgccagaaagagactcaatttcggtcagactggcgactcagagtcagtccccgaccctcaacttatcggagaacctccagcagcgccctctagtgtgggatctggtacaatggctgcaggcggtggcgcaccaatggcagacaataacgaaggtgccgacggagtgggtagttcctcgggaaattggcattgcgattccacatggctgggcgacagagtcatcaccaccagcacccgaacctgggccctgcccacctacaacaaccacctctacaagcaaatctccaacgggacctcgggaggcagcaccaacgacaacacctactttggctacagcaccccctgggggtattttgactttaacagattccactgccacttctcaccacgtgactggcagcgactcatcaacaacaactggggattccggcccaagagactcagcttcaagctcttcaacatccaggtcaaagaggtcacgcagaatgaaggcaccaagaccatcgccaataacctcaccagcaccatccaggtgtttacggactcggagtaccagctgccgtacgtcctcggctctgcccaccagggctgcctgcctccgttcccggcggacgtcttcatgattcctcagtacggcaacctgactctcaacaacggtagtcaggccgtgggacgttcctccttctactgcctggagtacttcccctctcagatgctgagaacgggcaacaacttttccttcagctacactttcgaggacgtgcctttccacagcagctacgcgcacagccagagtttggacaggctgatgaatcctctcatcgaccagtacctgtactacctgtcaagaacccagtctacgggaggcacagcgggaacccagcagttgctgttttctcaggccgggcctagcaacatgtcggctcaggccagaaactggctgcctggaccctgctacagacagcagcgcgtctccacgacactgtcgcaaaacaacaacagcaactttgcctggactggtgccaccaagtatcatctgaacggcagagactctctggtgaatccgggcgtcgccatggcaaccaacaaggacgacgaggaccgcttcttcccatccagcggcatcctcatgtttggcaagcagggagctggaaaagacaacatgggctatagcaacgtgatgctaaccagcgaggaagaaatcaagaccaccaaccccgtggccacagaacagtatggcgtggtggctgataacctacagcagcaaaacaccgctcctattgtgggggccgtcaacagccagggagccttacctggcatggtctggcagaaccgggacgtgtacctgcagggtcctatttgggccaagattcctcacacagatggcaactttcacccgtctcctttaatgggcggctttggacttaaacatccgcctcctcagatcctcatcaaaaacactcctgttcctgcggatcctccaacagcgttcaaccaggccaagctgaattctttcatcacgcagtacggcaccggacaagtcagcgtggagatcgagtgggagctgcagaaggagaacagcaagcgctggaacccagagattcagtatacttccaactactacaaatctacaaatgtggactttgctgttaatactgagggtgtttactctgagcctcgccccattggcactcgttacctcacccgtaatctgtaa

SEQ ID NO: 5043 - protein, 738 aa, Adeno-associated virus
MAADGYLPDWLEDNLSEGIREWWDLKPGAPKPKANQQKQDDGRGLVLPGYKYLGPFNGLDKGEPVNAADAAALEHDKAYDQQLKAGDNPHLRYNHADAEFQERLQEDTSFGGNLGRAVFQAKKRVLEPLGLVEEGAKTAPGKKRPVEPSPQRSPDSSTGIGKKGQQPARKRLNFGQTGDSESVPDPQLIGEPPAAPSSVGSGTMAAGGGAPMADNNEGADGVGSSSGNWHCDSTWLGDRVITTSTRTWALPTYNNHLYKQISNGTSGGSTNDNTYFGYSTPWGYFDFNRFHCHFSPRDWQRLINNNWGFRPKRLSFKLFNIQVKEVTQNEGTKTIANNLTSTIQVFTDSEYQLPYVLGSAHQGCLPPFPADVFMIPQYGNLTLNNGSQAVGRSSFYCLEYFPSQMLRTGNNFSFSYTFEDVPFHSSYAHSQSLDRLMNPLIDQYLYYLSRTQSTGGTAGTQQLLFSQAGPSNMSAQARNWLPGPCYRQQRVSTTLSQNNNSNFAWTGATKYHLNGRDSLVNPGVAMATNKDDEDRFFPSSGILMFGKQGAGKDNMGYSNVMLTSEEEIKTTNPVATEQYGVVADNLQQQNTAPIVGAVNSQGALPGMVWQNRDVYLQGPIWAKIPHTDGNFHPSPLMGGFGLKHPPPQILIKNTPVPADPPTAFNQAKLNSFITQYGTGQVSVEIEWELQKENSKRWNPEIQYTSNYYKSTNVDFAVNTEGVYSEPRPIGTRYLTRNL

SEQ ID NO: 5044 - DNA, 2217 bp, Adeno-associated virus
  source 1..2217: mol_type = genomic DNA
atggctgccgatggttatcttccagattggctcgaggacaacctctctgagggcattcgcgagtggtgggacctgaaacctggagccccgaaacccaaagccaaccagcaaaagcaggacgacggccggggtctggtgcttcctggctacaagtacctcggacccttcaacggactcgacaagggggagcccgtcaacgcggcggacgcagcggccctcgagcacgacaaggcctacgaccagcagctcaaagcgggtgacaatccgtacctgcggtataatcacgccgacgccgagtttcaggagcgtctgcaagaagatacgtcttttgggggcaacctcgggcgagcagtcttccaggccaagaagcgggttctcgaacctctcggtctggttgaggaaggcgctaagacggctcctggaaagaagagaccggtagagccgtcaccacagcgttcccccgactcctccacgggcatcggcaagaaaggccagcagcccgccggaaagagactcaatttcggtcagactggcgactcagagtcagtccccgaccctcaacctatcggagaacctccagcagcgccctctagtgtgggatctggtacaatggctgcaggcggtggcgcaccaatggcagacaataacgaaggtgccgacggagtgggtagttcctcgggaaattggcattgcgattccacatggctgggcgacagagtcatcaccaccagcacccgaacctgggccctgcccacctacaacaaccacctctacaagcaaatctccaacgggacctcgggaggcagcaccaacgacaacacctactttggctacagcaccccctgggggtattttgactttaacagattccactgccacttctcaccacgtgactggcagcgactcatcaacaacaactggggattccggcccaagagactcagcttcaagctcttcaacatccaggtcaaagaggtcacgcagaatgaaggcaccaagaccatcgccaataacctcaccagcaccatccaggtgtttacggactcggaataccagctgccgtacgtcctcggctctgcccaccagggctgcctgcctccgttcccggcggacgtcttcatgattcctcagtacggctacctgactctcaacaacggtagtcaggccgtgggacgttcctccttctactgcctggagtacttcccctctcagatgctgagaacgggcaacaacttttccttcagctacactttcgaggacgtgcctttccacagcagctacgcgcacagccagagtttggacaggctgatgaatcctctcgtcgaccagtacctgtactacctgtcaagaacccagtctacgggaggcacagcgggaacccagcagttgctgttttctcaggccgggcctagcaacatgtcggctcaggccagaaactggctgcctggaccctgctacagacagcagcgcgtctccacgacactgtcgcaaaacaacaacagcaactttgcctggactggtgccaccaagtatcatctgaacggcagagactctctggtgaatccgggcgtcgccatggcaaccaacaaggacgacgaggaccgcttcttcccatccagcggcatcctcatgtttggcaagcagggagctggaaaagacaacgtggactatagcaacgtgatgctaaccagcgaggaagaaatcaagaccaccaaccccgtggccacagaacagtatggcgtggtggctgataacctacagcagcaaaacaccgctcctattgtgggggccgtcaacagccagggagccttacctggcatggtctggcagaaccgggacgtgtacctgcagggtcctatttgggccaagattcctcacacagatggcaactttcacccgtctcctttaatgggcggctttggacttaaacatccgcctcctcagatcctcatcaaaaacactcctgttcctgcggatcctccaacagcgttcaaccaggccaagctgaattctttcatcacgcagtacagcaccggacaagtcagcgtggagatcgagtgggagctgcagaaggagaacagcaagcgctggagcccagagattcagtatacttccaactactacaaatctacaaatgtggactttgctgttaatactgagggtgtttactctgagcctcgccccattggcactcgttacctcacccgtaatctgtaa

SEQ ID NO: 5045 - protein, 738 aa, Adeno-associated virus
MAADGYLPDWLEDNLSEGIREWWDLKPGAPKPKANQQKQDDGRGLVLPGYKYLGPFNGLDKGEPVNAADAAALEHDKAYDQQLKAGDNPYLRYNHADAEFQERLQEDTSFGGNLGRAVFQAKKRVLEPLGLVEEGAKTAPGKKRPVEPSPQRSPDSSTGIGKKGQQPAGKRLNFGQTGDSESVPDPQPIGEPPAAPSSVGSGTMAAGGGAPMADNNEGADGVGSSSGNWHCDSTWLGDRVITTSTRTWALPTYNNHLYKQISNGTSGGSTNDNTYFGYSTPWGYFDFNRFHCHFSPRDWQRLINNNWGFRPKRLSFKLFNIQVKEVTQNEGTKTIANNLTSTIQVFTDSEYQLPYVLGSAHQGCLPPFPADVFMIPQYGYLTLNNGSQAVGRSSFYCLEYFPSQMLRTGNNFSFSYTFEDVPFHSSYAHSQSLDRLMNPLVDQYLYYLSRTQSTGGTAGTQQLLFSQAGPSNMSAQARNWLPGPCYRQQRVSTTLSQNNNSNFAWTGATKYHLNGRDSLVNPGVAMATNKDDEDRFFPSSGILMFGKQGAGKDNVDYSNVMLTSEEEIKTTNPVATEQYGVVADNLQQQNTAPIVGAVNSQGALPGMVWQNRDVYLQGPIWAKIPHTDGNFHPSPLMGGFGLKHPPPQILIKNTPVPADPPTAFNQAKLNSFITQYSTGQVSVEIEWELQKENSKRWSPEIQYTSNYYKSTNVDFAVNTEGVYSEPRPIGTRYLTRNL

SEQ ID NO: 5046 - DNA, 2217 bp, Adeno-associated virus
  source 1..2217: mol_type = genomic DNA
atggttgccgatggttatcttccagattggctcgaggacaacctctctgagggcattcgcgagtggtgggacctgaaacctggagccccgaaacccaaagccaaccagcaaaagcagggcgacggccggggtctggtgcttcctggctacaagtacctcggacccttcaacggactcgacaagggggagcccgtcaacgcggcggacgcagcggccctcgagcacgacaaggcctacgaccagcagcttaaagcgggtgacaatccgtacctgcggtataatcacgccgacgccgagcttcaggagcgtctgcaagaagatacgtcttttgggggcaacctcgggcgagcagtcttccaggccaagaagcgggttctcgaacctctcggtctggttgaggaaggcgctaagacggctcctggaaagaagagaccggtagagccgtcaccacagcgttcccccgactcctccacgggcatcggcaagaaaggccagcagcccgccagaaagagactcaatttcggtcagactggcgactcagagtcagtccccgaccctcaacctatcggagaacctccagcagcgccctctagtgtgggatctggtacaatggctgcaggcggtggcgcgccaatggcagacaataacgaaggtgccgacggagtgggtagttcctcgggaaattggcattgcgattccacatggctgggcgacagagtcatcaccaccagcacccgaacctgggccctgcccacctacaacaaccacctctacaagcaaatctccaacgggacctcgggaggcagcaccaacgacaacacctactttggctacagcaccccctgggggtattttgactttaacagattccactgccacttctcaccacgtgactggcagcgactcatcaacaacaactggggattccggcccaagagactcagcttcaagctcttcaacatccaggtcaaagaggtcacgcagaatgaaggcaccaagaccatcgccaataacctcaccagcaccatccaggtgtttacggactcggaataccagctgccgtacgtcctcggctctgcccaccagggctgccagcctccgttcccggcggacgtcttcatgattcctcagtacggctacctgactctcaacaacggtagtcaggccgtgggacgttcctccttctactgcctggagtacttcccctctcagatgctgagaacgggcaacaacttttccttcagctacactttcgaggacgtgcctttccacagcagctacgcgcacagccagagtttggacaggctgatgaatcctctcatcgaccagtacctgtactacctgtcaagaacccagtctacgggaggcacagcgggaacccagcagttgctgttttctcaggccgggcctagcaacatgtcggctcaggccagaaactggctgcctggaccctgctacagacagcagcgcgtctccacgacactgtcgcaaaacaacaacagcaactttgcctggactggtgccaccaagtatcatctgaacggcagagactctctggtgaatccgggcgtcgccatggcaaccaacaaggacgacgaggaccgcttcttcccatccagcggcatcctcatgtttggcaagcagggagctggaaaagacaacgtggactatagcaacgtgatgctaaccagcgaggaagaaatcaagaccaccaaccccgtggccacagaacagtatggcgtggtggctgataacctacagcagcaaaacaccgctcctattgtgggggccgtcaacagccagggagccttacctggcatggtctggcagaaccgggacgtgtacctgcagggtcctatttgggccaagattcctcacacagatggcaactttcacccgtctcctttaatgggcggctttggacttaaacatccgcctcctcagatcctcatcaaaaacactcctgttcctgcggatcctccaacagcgttcaaccaggccaagctgaattctttcatcacgcagtacagcaccggacaagtcagcgtggagatcgagtgggagccgcagaaggagaacagcaagcgctggaacccagagattcagtatacttccaactactacaaatctacaaatgtggactttgctgttaatactgagggtgtttactctgagcctcgccccattggcactcgttacctcacccgtaatctgtaa

SEQ ID NO: 5047 - protein, 738 aa, Adeno-associated virus
MVADGYLPDWLEDNLSEGIREWWDLKPGAPKPKANQQKQGDGRGLVLPGYKYLGPFNGLDKGEPVNAADAAALEHDKAYDQQLKAGDNPYLRYNHADAELQERLQEDTSFGGNLGRAVFQAKKRVLEPLGLVEEGAKTAPGKKRPVEPSPQRSPDSSTGIGKKGQQPARKRLNFGQTGDSESVPDPQPIGEPPAAPSSVGSGTMAAGGGAPMADNNEGADGVGSSSGNWHCDSTWLGDRVITTSTRTWALPTYNNHLYKQISNGTSGGSTNDNTYFGYSTPWGYFDFNRFHCHFSPRDWQRLINNNWGFRPKRLSFKLFNIQVKEVTQNEGTKTIANNLTSTIQVFTDSEYQLPYVLGSAHQGCQPPFPADVFMIPQYGYLTLNNGSQAVGRSSFYCLEYFPSQMLRTGNNFSFSYTFEDVPFHSSYAHSQSLDRLMNPLIDQYLYYLSRTQSTGGTAGTQQLLFSQAGPSNMSAQARNWLPGPCYRQQRVSTTLSQNNNSNFAWTGATKYHLNGRDSLVNPGVAMATNKDDEDRFFPSSGILMFGKQGAGKDNVDYSNVMLTSEEEIKTTNPVATEQYGVVADNLQQQNTAPIVGAVNSQGALPGMVWQNRDVYLQGPIWAKIPHTDGNFHPSPLMGGFGLKHPPPQILIKNTPVPADPPTAFNQAKLNSFITQYSTGQVSVEIEWEPQKENSKRWNPEIQYTSNYYKSTNVDFAVNTEGVYSEPRPIGTRYLTRNL

SEQ ID NO: 5048 - DNA, 2217 bp, Adeno-associated virus
  source 1..2217: mol_type = genomic DNA
atggctgccgatggttatcttccagattggctcgaggacaacctctctgagggcattcgcgagtggtgggacctgaaacctggagccccgaaacccaaagccaaccagcaaaagcaggacgacggccggggtctggtgcttcctggctacaagtacctcggacccttcaacggactcgacaagggggagcccgtcaacgcggcggacgcagcggccctcgagcacgacaaggcctacgaccagcagctcaaagcgggtgacaatccgtacctgcggtataatcacgccgacgccgagtttcaggagcgtctgcaagaagatacgtcttttgggggcaacctcgggcgagcagtcttccaggccaagaagcgggttctcgaacctctcggtctggttgaggaaggcgctaagacggctcctggaaagaagagaccggtagagccgtcaccacagcgttcccccgactcctccacgggcatcggcaagaaaggccagcagcccgccagaaagagactcaatttcggtcagactggcgactcagagtcagtccccgaccctcaacctatcggagaacctccagcagcgccctctagtgtgggatctggtacaatggctgcaggcggtggcgcaccaatggcagacaataacgaaggtgccgacggagtgggtagttcctcgggaaattggcattgcgattccacatggctgggcgacagagtcatcaccaccagcacccgaacctgggccctgcccacctacaacaaccacctctacaagcaaatctccaacgggacctcgggaggcagcaccaacgacaacacctactttggctacagcaccccctgggggtattttgactttaacagattccactgccacttctcaccacgtgactggcagcgactcatcaacaacaactggggattccggcccaagagactcagcttcaagctcttcaacatccaggtcaaagaggtcacgcagaatgaaggcaccaagaccatcgccaatagcctcaccagcaccatccaggtgtttacggactcggaataccagctgccgtacgtcctcggctctgcccaccagggctgcctgcctccgttcccggcggacgtcttcatgattcctcagtacggctacctgactcccaacaacggtagtcaggccgtgggacgttcctccttctactgcctggagtacttcccctctcagatgctgagaacgggcaacaacttttccttcagctacactttcgaggacgtgcctttccacagcagctacgcgcacagccagagtttggacaggctgatgaatcctctcatcgaccagtacctgtactacctgtcaagaacccagtctacgggaggcacagcgggaacccagcagttgctgtcttctcaggccgggcctagcaacatgtcggctcaggccagaaactggctgcctggaccctgctacagacagcagcgcgtctccacgacactgtcgcaaaacaacaacagcaactttgcctggactggtgccaccaagtatcatctgaacggcagagactctctggtgaatccgggcgtcgccatggcaaccaacaaggacgacgaggaccgcttcttcccatccagcggcatcctcatgtttggcaagcagggagctggaaaagacaacgtggactatagcaacgtgatgctaaccagcgaggaagaaatcaagaccaccaaccccgtggccacagaacagtatggcgtggtggctgataacctacagcagcaaaacaccgctcctattgtgggggccgtcaacagccagggagccttacctggcatggtctggcagaaccgggacgtgtacttgcagggtcctatttgggccaagattcctcacacagatggcaactttcacccgtctcctttaatgggcggctttggacttaaacatccgcctcctcagatcctcatcaaaaacactcctgttcctgcggatcctccaacagcgttcaaccaggccaagctgaattctttcatcacgcagtacagcaccggacaagtcagcgtggagatcgagtgggagctgcagaaggagaacagcaagcgctggaacccagagattcagtatacttccaactactacaaatctacaaatgtggactttgctgttaatactgagggtgtttactctgagcctcgccccattggcactcgttacctcacccgtaatctgtaa

SEQ ID NO: 5049 - protein, 738 aa, Adeno-associated virus
MAADGYLPDWLEDNLSEGIREWWDLKPGAPKPKANQQKQDDGRGLVLPGYKYLGPFNGLDKGEPVNAADAAALEHDKAYDQQLKAGDNPYLRYNHADAEFQERLQEDTSFGGNLGRAVFQAKKRVLEPLGLVEEGAKTAPGKKRPVEPSPQRSPDSSTGIGKKGQQPARKRLNFGQTGDSESVPDPQPIGEPPAAPSSVGSGTMAAGGGAPMADNNEGADGVGSSSGNWHCDSTWLGDRVITTSTRTWALPTYNNHLYKQISNGTSGGSTNDNTYFGYSTPWGYFDFNRFHCHFSPRDWQRLINNNWGFRPKRLSFKLFNIQVKEVTQNEGTKTIANSLTSTIQVFTDSEYQLPYVLGSAHQGCLPPFPADVFMIPQYGYLTPNNGSQAVGRSSFYCLEYFPSQMLRTGNNFSFSYTFEDVPFHSSYAHSQSLDRLMNPLIDQYLYYLSRTQSTGGTAGTQQLLSSQAGPSNMSAQARNWLPGPCYRQQRVSTTLSQNNNSNFAWTGATKYHLNGRDSLVNPGVAMATNKDDEDRFFPSSGILMFGKQGAGKDNVDYSNVMLTSEEEIKTTNPVATEQYGVVADNLQQQNTAPIVGAVNSQGALPGMVWQNRDVYLQGPIWAKIPHTDGNFHPSPLMGGFGLKHPPPQILIKNTPVPADPPTAFNQAKLNSFITQYSTGQVSVEIEWELQKENSKRWNPEIQYTSNYYKSTNVDFAVNTEGVYSEPRPIGTRYLTRNL

SEQ ID NO: 5050 - protein, 738 aa, Adeno-associated virus
MAADGYLPDWLEDNLSEGIREWWDLKPGAPKPKANQQKQDDGRGLVLPGYKYLGPFNGLDKGEPVNAADAAALEHDKAYDQQLKAGDNPYLRYNHADAEFQERLQEDTSFGGNLGRAVFQAKKRVLEPLGLVEEGAKTAPGKKRPVEPSPQRSPDSSTGIGKKGQQPARKRLNFGQTGDSESVPDPQPIGEPPAAPSSVGSGTMAAGGGAPMADNNEGADGVGSSSGNWHCDSTWLGDRVITTSTRTWALPTYNNHLYKQISNGTSGGSTNDNTYFGYSTPWGYFDFNRFHCHFSPRDWQRLINNNWGFRPKRLSFKLFNIQVKEVTQNEGTKTIANNLTSTIQVFTDSEYQLPYVLGSAHQGCLPPFPADVFMIPQYGYLTLNNGSQAVGRSSFYCLEYFPSQMLRTGNNFSFSYTFEDVPFHSSYVHSQSLDRLMNPLIDQYLYYLSRTQSTGGTAGTQQLLFSQAGPSNMSAQARNWLPGPCYRQQRVSTTLSQNNNSNFAWTGATKYHLNGRDSLVNSGVAMATNKDDEDRFFPSSGILMFGKQGAGKDNVDYSNVMLTSEEEIKTTNPVATEQYGVVADNLQQQNTAPIVGAVNSQGALPGMVWQNRDVYLQGPIWAKIPHTDGNFHPSPLMGGFGLKHPPPQILIKNTPVPADPPTAFNQAKLNSFITQYSTGQVSVEIEWELQKENSKRWNPEIQYTSNYYKSTNVDFAVNTEGVYSEPRPIGTRYPTRNL

SEQ ID NO: 5051 - DNA, 2217 bp, Adeno-associated virus
  source 1..2217: mol_type = genomic DNA
atggctgccgatggttatcttccagattggctcgaggacaacctctctgagggcattcgcgagtggtgggacctgaaacctggagccccgaaacccaaagccaaccagcaaaagcaggacgacggccggggtctggtgcttcctggctacaagtacctcggacccttcaacggactcgacaagggggagcccgtcaacgcggcggacgcagcggccctcgagcacgacaaggcctacgaccagcagctcaaagcgggtgacaatccgtacctgcggtataatcacgccgacgccgagtttcaggagcgtctgcaagaagatacgtcttttgggggcaacctcgggcgagcagtcttccaggccaagaagcgggttctcgaacctctcggtctggttgaggaaggcgctaagacggctcctggaaagaagagaccggtagagccgtcaccacagcgttcccccgactcctccacgggcatcggcaagaaaggccagcagcccgccagaaagagactcaatttcggtcagactggcgactcagagtcagtccccgaccctcaacctatcggagaacctccagcagcgccctctagtgtgggatctggtacaatggctgcaggcggtggcgcaccaatggcagacaataacgaaggtgccgacggagtgggtagttcctcgggaaattggcattgcgattccacatggctgggcgacagagtcatcaccaccagcacccgaacctgggccctgcccacctacaacaaccacctctacaagcaaatctccaacgggacctcgggaggcagcaccaacgacaacacctactttggctacagcaccccctgggggtattttgactttaacagattccactgccacttctcaccacgtgactggcagcgactcatcaacaacaactggggattccggcccaagagactcagcttcaagctcttcaacatccaggtcaaagaggtcacgcagaatgaaggcaccaagaccatcgccaataacctcaccagcaccatccaggtgtttacggactcggaataccagctgccgtacgtcctcggctctgcccaccagggctgcctgcctccgttcccggcggacgtcttcatgattcctcagtacggctacctgactctcaacaacggtagtcaggccgtgggacgttcctccttctactgcctggagtacttcccctctcagatgctgagaacgggcaacaacttttccttcagctacactttcgaggacgtgcctttccacagcagctacgtgcacagccagagtttggacaggctgatgaatcctctcatcgaccagtacctgtactacctgtcaagaacccagtctacgggaggcacagcgggaacccagcagttgctgttttctcaggccgggcctagcaacatgtcggctcaggccagaaactggctgcctggaccctgctacagacagcagcgcgtctccacgacactgtcgcaaaacaacaacagcaactttgcctggactggtgccaccaagtatcatctgaacggcagagactctctggtgaattcgggcgtcgccatggcaaccaacaaggacgacgaggaccgcttcttcccatccagcggcatcctcatgtttggcaagcagggagctggaaaagacaacgtggactatagcaacgtgatgctaaccagcgaggaagaaatcaagaccaccaaccccgtggccacagaacagtatggcgtggtggctgataacctacagcagcaaaacaccgctcctattgtgggggccgtcaacagccagggagccttacctggcatggtctggcagaaccgggacgtgtacctgcagggtcctatttgggccaagattcctcacacagatggcaactttcacccgtctcctttaatgggcggctttggacttaaacatccgcctcctcagatcctcatcaaaaacactcctgttcctgcggatcctccaacagcgttcaaccaggccaagctgaattctttcatcacgcagtacagcaccggacaagtcagcgtggagatcgagtgggagctgcagaaggagaacagcaagcgctggaacccagagattcagtatacttccaactactacaaatctacaaatgtggactttgctgttaatactgagggtgtttactctgagcctcgccccattggcactcgttaccccacccgtaatctgtaa

SEQ ID NO: 5052 - protein, 734 aa, Adeno-associated virus; identical to SEQ ID NO: 4948

SEQ ID NO: 5053 - DNA, 2214 bp, Adeno-associated virus
  source 1..2214: mol_type = genomic DNA
atggctgctgacggttatcttccagattggctcgaggacaacctctctgagggcattcgcgagtggtgggacctgaaacctggagccccgaaacccaaagccaaccagcagaagcaggacgacggccggggtctggtgcttcctggctacaagtacctcggacccttcaacggactcgacaagggggagcccgtcaacgcggcggacgcagcggccctcgagcacgacaaggcctacgaccagcagctcaaagcgggtgacaatccgtacctgcggtataaccacgccgacgccgagtttcaggagcgtctgcaagaagatacgtcttttgggggcaacctcgggcgagcagtcttccaggccaagaagcgggttctcgaacctctcggtctggttgaggaagctgctaagacggctcctggaaagaagagaccggtagaaccgtcacctcagcgttcccccgactcctccacgggcatcggcaagaaaggccagcagcccgctagaaagagactgaactttgggcagactggcgactcagagtcagtccccgaccctcaacctctcggagaaccaccagcaggcccctctggtctgggatctggtacaatggctgcaggcggtggcgctccaatggcagacaataacgaaggcgccgacggagtgggtaatgcctcaggaaattggcattgcgattccacatggctgggcgacagagtcatcaccaccagcacccgaacctgggctttgcccacctacaacaaccacctctacaagcaaatctccagtcagtcagcaggtagcaccaacgacaacgtctacttcggctacagcaccccctgggggtattttgacttcaacagattccactgtcacttctcaccacgtgactggcagcgactcatcaacaacaactggggattccggcccaagaagctcaacttcaagctcttcaacatccaagtcaaggaggtcacgacgaatgacggcgtcacgaccatcgctaataaccttaccagcacggttcaggtcttttcggactcggagtaccagctgccgtacgtcctcggctctgcccaccagggctgcctgcctccgttcccggcggacgtcttcatgattcctcagtacggctacctgactctgaacaatggcagccaatcggtgggacgttcatccttctactgcctggaatacttcccttctcaggtgctgagaacgggtaacaacttcaccttcagttacaccttcgaggacgtgcctttccacagcagctacgcgcacagccagagcctagaccggctgatgaatcccctcatcgaccagtacctgtattacctggctagaacacagagtaacccaggaggcacatctggcaatcgggaactgcagttttaccagggcgggccttccaccatggccgaacaagccaagaactggttacctggaccttgcttccggcaacaaagagtttccaaaacactggatcaaaacaacaacagcaactttgcttggactggtgccaccaaatatcacctgaacggcagaaactcattggtgaatcctggtgtcgccatggcaactcacaaggacgacgaggaccgctttttcccatccagcggagtcctgatttttggaaaaactggagcaaccaacaagactacattggaaaacgtgttaatgacaaatgaagaagaaattcgtcctactaatcctgtggccacagaagaatacgggatagtcagcagcaatttacaagcggccaatactgcagcccagacacaagttgtcaacaaccagggagccttacctggcatggtctggcagaaccgggacgtgtacctgcagggtcccatctgggccaaaattcctcacacagacggcaactttcacccgtctccgctgatgggcggctttggactgaagcatccgcctcctcagatcctgatcaaaaacactcctgttcctgctaatcccccggaggtgtttacgcctgccaagtttgcttctttcatcacacagtacagcaccggccaggtcagcgtggagatcgagtgggagctgcagaaggagaacagcaagcgctggaacccagagattcagtatacctccaattttgacaaacagactggtgtggactttgccgttgacagccagggtgtttattctgagcctcgccccattggtactcgttacctcacccgtaatctgtaa

SEQ ID NO: 5054 - protein, 737 aa, Adeno-associated virus
MAADGYLPDWLEDNLSEGIREWWDLKPGAPKPKANQQKQDDGRGLVLPGYKYLGPFNGLDKGEPVNAADAAALEHDKAYDQQLKAGDNPYLRYNHADAEFQERLQEDTSFGGNLGRAVFQAKKRVLEPLGLVEEAAKTAPGKKRPVEPSPQRSPDSSTGIGKKGQQPARKRLNFGQTGDSESVPDPQPLGEPPAGPSGLGSGTMAAGGGAPMADNNEGADGVGNASGNWHCDSTWLGDRVITTSTRTWALPTYNNHLYKQISSQSAGSTNDNVYFGYSTPWGYFDFNRFHCHFSPRDWQRLINNNWGFRPKKLNFKLFNIQVKEVTTNDGVTTIANNLTSTVQVFSDSEYQLPYVLGSAHQGCLPPFPADVFMIPQYGYLTLNNGSQSVGRSSFYCLEYFPSQVLRTGNNFTFSYTFEDVPFHSSYAHSQSLDRLMNPLIDQYLYYLARTQSNPGGTSGNRELQFYQGGPSTMAEQAKNWLPGPCFRQQRVSKTLDQNNNSNFAWTGATKYHLNGRNSLVNPGVAMATHKDDEDRFFPSSGVLIFGKTGATNKTTLENVLMTNEEEIRPTNPVATEEYGIVSSNLQAANTAAQTQVVNNQGALPGMVWQNRDVYLQGPIWAKIPHTDGNFHPSPLMGGFGLKHPPPQILIKNTPVPANPPEVFTPAKFASFITQYSTGQVSVEIEWELQKENSKRWNPEIQYTSNFDKQTGVDFAVDSQGVYSEPRPIGTRYLTRNL

SEQ ID NO: 5055 - DNA, 2214 bp, Adeno-associated virus
  source 1..2214: mol_type = genomic DNA
atggctgccgatggttatcttccagattggctcgaggacaacctctctgagggcattcgcgagtggtgggacctgaaacctggagccccgaaacccaaagccaaccagcaaaagcaggacgacggccggggtctggtgcttcctggctacaagtacctcggacccttcaacggactcgacaagggggagcccgtcaacgcggcggacgcagcggccctcgagcacgacaaggcctacgaccagcagctcaaagcgggtgacaatccgtacctgcggtataatcacgccgacgccgagtttcaggagcgtctgcaagaagatacgtcttttgggggcaacctcgggcgagcagtcttccaggccaagaagcgggttctcgaacctctcggtctggttgaggaaggcgctaagacggctcctggaaagaagagaccggtagagccgtcaccacagcgttcccccgactcctccacgggcatcggcaagaaaggccagcagcccgccagaaagagactcaatttcggtcagactggcgactcagagtcagtccccgaccctcaacctatcggagaacctccagcagcgccctctagtgtgggatctggtacaatggctgcaggcggtggcgcaccaatggcagacaataacgaaggtgccgacggagtgggtagttcctcgggaaattggcattgcgattccacacggctgggcgacagagtcatcaccaccagcacccggacctgggctttgcccacctacaacaaccacctctacaagcaaatctccagtcagtcagcaggtagcaccaacgacaacgtctacttcggctacagcaccccctgggggtattttgacttcaacagattccactgtcacttctcaccacgtgactggcagcggctcatcaacaacaactggggattccggcccaagaagctcaacttcaagctgttcaacatccaggtcaaggaggtcacaacgaatgacggcgtcacgaccatcgccaataaccttaccagcacggttcaggtcttttcggactcggaataccagctgccctacgtcctcggctccgcacaccagggctgcctgcctccgttcccggcggacgtcttcatgattccccagtacggctacctgactctgaacaatggcagccaatcggtgggtcgttcctctttctactgcctggaatatttcccttctcaaatgctgagaacgggcaacaacttcaccttcagctacaccttcgaggacgttcccttccacagcagctacgcacacagccagagcctggaccggctgatgaatcctcttatcgaccagtacctgtattacctggccagaacacagagcaacgcaggaggcacagctggcaatcgggaactgcagttttatcagggcgggcctaccaccatggccgaacaagccaaaaactggctgcctggaccttgcttccggcaacgaagagtctccaagacgctggatcaaaacaacaacagcaactttgcttggactggtgccaccaaataccatctaaatggaagaaattcattggttaatcccggtgtcgccatggcaacccacaaggacgacgaggaacgcttcttcccttcgagcggagtcctgatttttggaaaaactggagcagctaataagactacactggaaaatgtgttaatgacaaatgaagaggaaattcgtcctaccaacccggtagccaccgaggaatacgggactgttagcagcaacctgcaggcggctaacactgcagcccagacacaagttgtcaacaaccagggagccttacctggtatggtctggcagaaccgggacgtgtacctgcagggtcccatctgggccaagattcctcacacggacggcaactttcacccgtctccgctgatgggcggctttggactgaagcatccgcctcctcagatcctgatcaaaaacactcctgttcctgctaatcccccggaggtgtttacgcctgccaagtttgcttctttcatcacacagtacagcaccggccaggtcagcgtggagatcgagtgggagctgcagaaggagaacagcaagcgctggaacccagagattcagtatacctccaattttgacaaacagactggtgtggactttgccgttgacagccagggtgtttattctgagcctcgccccattggtactcgttacctcacccgtaatctgtaa

SEQ ID NO: 5056 - protein, 737 aa, Adeno-associated virus
MAADGYLPDWLEDNLSEGIREWWDLKPGAPKPKANQQKQDDGRGLVLPGYKYLGPFNGLDKGEPVNAADAAALEHDKAYDQQLKAGDNPYLRYNHADAEFQERLQEDTSFGGNLGRAVFQAKKRVLEPLGLVEEGAKTAPGKKRPVEPSPQRSPDSSTGIGKKGQQPARKRLNFGQTGDSESVPDPQPIGEPPAAPSSVGSGTMAAGGGAPMADNNEGADGVGSSSGNWHCDSTRLGDRVITTSTRTWALPTYNNHLYKQISSQSAGSTNDNVYFGYSTPWGYFDFNRFHCHFSPRDWQRLINNNWGFRPKKLNFKLFNIQVKEVTTNDGVTTIANNLTSTVQVFSDSEYQLPYVLGSAHQGCLPPFPADVFMIPQYGYLTLNNGSQSVGRSSFYCLEYFPSQMLRTGNNFTFSYTFEDVPFHSSYAHSQSLDRLMNPLIDQYLYYLARTQSNAGGTAGNRELQFYQGGPTTMAEQAKNWLPGPCFRQRRVSKTLDQNNNSNFAWTGATKYHLNGRNSLVNPGVAMATHKDDEERFFPSSGVLIFGKTGAANKTTLENVLMTNEEEIRPTNPVATEEYGTVSSNLQAANTAAQTQVVNNQGALPGMVWQNRDVYLQGPIWAKIPHTDGNFHPSPLMGGFGLKHPPPQILIKNTPVPANPPEVFTPAKFASFITQYSTGQVSVEIEWELQKENSKRWNPEIQYTSNFDKQTGVDFAVDSQGVYSEPRPIGTRYLTRNL

SEQ ID NO: 5057 - DNA, 2208 bp, Adeno-associated virus
  source 1..2208: mol_type = genomic DNA
atggctgccgatggttatcttccagattggctcgaggacactctctctgaaggaataagacagtggtggaagctcaaacctggcccaccaccaccaaagcccgcagagcggcataaggacgacagcaggggtcttgtgcttcctgggtacaagtacctcggacccttcaacggactcgacaagggggagccggtcaacgaggcagacgccgcggccctcgagcacgacaaggcctacgaccggcagctcgacagcggagacaacccgtacctcaagtacaaccacgccgacgcggagtttcaggagcgtcttaaagaagatacgtcttttgggggcaacctcggacgagcagtcttccaggcgaaaaagagggttcttgaacctctgggcctggttgaggaacctgttaagacggctccgggaaaaaagaggccggtagagcactctcctgcggagccagactcctcctcgggaaccggaaaagcgggccagcagcctgcaagaaaaagattgaattttggtcagactggagacgcagactccgtacctgacccccagcctctcggacagccaccagcagccccctctggtttgggatctactacaatggctacaggcagtggcgcaccaatggcagacaataacgagggtgccgatggagtgggtaattcttcaggaaattggcattgcgattcccaatggctgggcgacagagtcatcaccaccagcacccgaacctgggcccagcccacctacaacaaccacctctacaagcaaatctcaagccaatcaggagcctcaaacgacaaccactactttggctacagcaccccttgggggtattttgacttcaacagattccactgccacttttcaccacgtgactggcaaagactcatcaacaacaactggggattccgacccaagagactcaacttcaagctctttaacattcaagtcaaagaggtcacgcagaatgacggtacgacgacgattgccaataaccttaccagcacggttcaggtgtttactgactcggagtaccagctcccgtacgtcctcgggtcggcgcatcaaggatgcctcccgccgtttccagcggacgtcttcatggtcccacagtatggatacctcaccctgaacaacgggagtcaggcggtaggacgctcttccttttactgcctggagtactttccttctcagatgcttcgtactggaaacaactttcagttcagctacacctttgaagacgttcctttccacagcagctacgctcacagccagagtctggatcggctgatgaatcctctgatcgaccagtacctgtattatctgaacaaaacacaatcaaatagtggagctcttcagcagtctcggctactgtttagtcaagctggacccaccagcatgtctcttcaagctaaaaactggctacctggaccttgctacagacagcagcgtctgtcaaagcaggcaaacgacaacaacaacagcaactttccctggactgcggctacaaagtaccacctaaatggccgggactcgttggttaatccaggaccagctatggccagtcacaaagacgatgaagaaaagtttttccccatgcatggaaccctgatatttggtaaacaaggaacaaatgctaacgacgcggatttggacaatgtcatgattacagatgaagaagaaatccgcaccaccaatcccgtggctacggagcagtacggatatgtgtcaaataatttgcaaaactcaaatactggtccaactactggaactgtcaatcaccgaggagcgttacctggcatggtgtggcaggatcgagacgtgtacctgcagggacccatttgggccaagattcctcacaccgatggacactttcatccttctccactgatgggaggttttgggctcaaacacccgcctcctcagatcatgatcaaaaacactcccgttccagccaatcctcccacaaacttcagttctgccaagtttgcttctttcatcacacagtattccacggggcaggtcagcgtggagatcgagtgggagctgcagaaagagaacagcaaacgctggaatcccgaaattcagtacacttccaactacaacaaatctgttaatgtggactttactgtggacactaatggcgtgtattcagagcctcgccccattggcaccagatacctgactcgtaatctgtaa

SEQ ID NO: 5058 - protein, 735 aa, Adeno-associated virus
MAADGYLPDWLEDTLSEGIRQWWKLKPGPPPPKPAERHKDDSRGLVLPGYKYLGPFNGLDKGEPVNEADAAALEHDKAYDRQLDSGDNPYLKYNHADAEFQERLKEDTSFGGNLGRAVFQAKKRVLEPLGLVEEPVKTAPGKKRPVEHSPAEPDSSSGTGKAGQQPARKRLNFGQTGDADSVPDPQPLGQPPAAPSGLGSTTMATGSGAPMADNNEGADGVGNSSGNWHCDSQWLGDRVITTSTRTWAQPTYNNHLYKQISSQSGASNDNHYFGYSTPWGYFDFNRFHCHFSPRDWQRLINNNWGFRPKRLNFKLFNIQVKEVTQNDGTTTIANNLTSTVQVFTDSEYQLPYVLGSAHQGCLPPFPADVFMVPQYGYLTLNNGSQAVGRSSFYCLEYFPSQMLRTGNNFQFSYTFEDVPFHSSYAHSQSLDRLMNPLIDQYLYYLNKTQSNSGALQQSRLLFSQAGPTSMSLQAKNWLPGPCYRQQRLSKQANDNNNSNFPWTAATKYHLNGRDSLVNPGPAMASHKDDEEKFFPMHGTLIFGKQGTNANDADLDNVMITDEEEIRTTNPVATEQYGYVSNNLQNSNTGPTTGTVNHRGALPGMVWQDRDVYLQGPIWAKIPHTDGHFHPSPLMGGFGLKHPPPQIMIKNTPVPANPPTNFSSAKFASFITQYSTGQVSVEIEWELQKENSKRWNPEIQYTSNYNKSVNVDFTVDTNGVYSEPRPIGTRYLTRNL

SEQ ID NO: 5059 - DNA, 2217 bp, Adeno-associated virus
  source 1..2217: mol_type = genomic DNA
atggctgccgatggttatcttccagattggctcgaggacaacctctctgagggcattcgcgagtggtgggcgctgaaacctggagccccgaagcccaaagccaaccagcaaaagcaggacgacggccggggtctggtgcttcctggctacaagtacctcggacccttcaacggactcgacaagggggagcccgtcaacgcggcggacgcagcggccctcgagcacgacaaggcctacgaccagcagctgcaggcgggtgacaatccgtacctgcggtataatcacgccgacgccgagtttcaggagcgtctgcaagaagatacgtcttttgggggcaacctcgggcgagcagtcttccaggccaagaagcgggttctcgaacctctcggtctggttgaggaaggcgctaagacggctcctggaaagaagagaccggtagagccgtcaccacagcgttcccccgactcctccacgggcatcggcaagaaaggccagcagcccgccagaaagagactcaatttcggtcagactggcgactcagagtcagtccccgaccctcaacctatcggagaacctccagcagcgccctctagtgtgggatctggtacaatggctgcaggcggtggcgcgccaatggcagacaataacgaaggtgccgacggagtgggtagttcctcgggaaattggcattgcgattccacatggctgggcgacagagtcatcaccaccagcacccgaacctgggccctgcccacctacaacaaccacctctacaagcaaacctccaacgggacctcgggaggcagcaccaacgacaacacctactttggctacagcaccccctgggggtattttgactttaacagattccactgccacttctcaccacgtgactggcagcgactcatcaacaacaactggggattccggcccaagagactcagcttcaagctcttcaacatccaggtcaaagaggtcacgcagaatgaaggcaccaagaccatcgccaataacctcaccagcaccatccaggtgtttacggactcggaataccagctgccgtacgtcctcggctctgcccaccagggctgcctgcctccgttcccggcggacgtcttcatgattcctcagtacggctacctgactctcaacaacggtagtcaggccgtgggacgttcctccttctactgcctggagtacttcccctctcagatgctgagaacgggcaacaacttttccttcagctacactttcgaggacgtgcctttccacagcagctacgcgcacagccagagtttggacaggctgatgaatcctctcatcgaccagtacctgtactacctgtcaagaacccagtctacgggaggcacagcgggaacccagcagttgctgttttctcaggccgggcctagcaacatgtcggctcaggccagaaactggctgcctggaccctgctacagacagcagcgcgtctccacgacactgtcgcaaaacaacaacagcaactttgcctggactggtgccaccaagtatcatctgaacggcagagactctctggtgaatccgggcgtcgccatggcaaccaacaaggacgacgaggaccgcttcttcccatccagcggcatcctcatgtttggcaagcagggagctggaaaagacaacgtggactatagcaacgtgatgctaaccagcgaggaagaaatcaagaccaccaaccccgtggccacagaacagtatggcgtggtggctgataacctacagcagcaaaacaccgctcctattgtgggggccgtcaacagccagggagccttacctggcatggtctggcagaaccgggacgtgtacctgcagggtcctatttgggccaagattcctcacacagatggcaactttcacccgtctcctttaatgggcggctttggacttaaacatccgcctcctcagatcctcatcaaaaacactcctgttcctgcggatcctccaacagcgttcaaccaggccaagctgaattctttcatcacgcagtacagcaccggacaagtcagcgcggagatcgagtgggagctgcagaaggagaacagcaagcgctggaacccagagattcagtatacttccaactactacaaatctacaaatgtggactttgctgttaatactgagggtgtttactctgagcctcgccccattggcactcgttacctcacccgtaatctgtaa

SEQ ID NO: 5060 - protein, 738 aa, Adeno-associated virus
MAADGYLPDWLEDNLSEGIREWWALKPGAPKPKANQQKQDDGRGLVLPGYKYLGPFNGLDKGEPVNAADAAALEHDKAYDQQLQAGDNPYLRYNHADAEFQERLQEDTSFGGNLGRAVFQAKKRVLEPLGLVEEGAKTAPGKKRPVEPSPQRSPDSSTGIGKKGQQPARKRLNFGQTGDSESVPDPQPIGEPPAAPSSVGSGTMAAGGGAPMADNNEGADGVGSSSGNWHCDSTWLGDRVITTSTRTWALPTYNNHLYKQTSNGTSGGSTNDNTYFGYSTPWGYFDFNRFHCHFSPRDWQRLINNNWGFRPKRLSFKLFNIQVKEVTQNEGTKTIANNLTSTIQVFTDSEYQLPYVLGSAHQGCLPPFPADVFMIPQYGYLTLNNGSQAVGRSSFYCLEYFPSQMLRTGNNFSFSYTFEDVPFHSSYAHSQSLDRLMNPLIDQYLYYLSRTQSTGGTAGTQQLLFSQAGPSNMSAQARNWLPGPCYRQQRVSTTLSQNNNSNFAWTGATKYHLNGRDSLVNPGVAMATNKDDEDRFFPSSGILMFGKQGAGKDNVDYSNVMLTSEEEIKTTNPVATEQYGVVADNLQQQNTAPIVGAVNSQGALPGMVWQNRDVYLQGPIWAKIPHTDGNFHPSPLMGGFGLKHPPPQILIKNTPVPADPPTAFNQAKLNSFITQYSTGQVSAEIEWELQKENSKRWNPEIQYTSNYYKSTNVDFAVNTEGVYSEPRPIGTRYLTRNL

SEQ ID NO: 5061 - DNA, 2217 bp, Adeno-associated virus
  source 1..2217: mol_type = genomic DNA
atggctgctgacggttatcttccagattggctcgaggacaacctctctgagggcattcgcgagtggtgggacctgaaacctggagcccccaagcccaaggccaaccagcagaagcaggacgacggccggggtctggtgcttcctggctacaagtacctcggacccttcaacggactcgacaagggggagcccgtcaacgcggcggacgcagcggccctcgagcacgacaaggcctacgaccagcagctcaaagcgggtgacaatccgtacctgcggtataatcacgccgacgccgagtttcaggagcgtctgcaagaagatacgtcttttgggggcaacctcgggcgagcagtcttccaggccaagaagcgggttctcgaacctctcggtctggttgaggaagctgctaagacggctcctggaaagaagagaccggtagaaccgtcacctcagcgttcccccgactcctccacgggcatcggcaagaaaggccagcagcccgctagaaagagactgaactttgggcagactggcgactcagagtcagtccccgaccctcaaccaatcggagaacctccagcagcgccctctagtgtgggatctggtacaatggccgcaggcggtggcgcaccaatggcagacaataacgaaggtgccgacggagtgggtagttcctcgggaaattggcattgcgattccacatggctgggcgacagagtcatcaccaccagcacccgaacctgggccctgcccacctacaacaaccacctctacaagcaaatctccaacgggacctcgggaggcagcaccaacgacaacacctactttggctacagcaccccctgggggtattttgactttaacagattccactgccacttctcaccacgtgactggcagcgactcatcaacaacaactggggattccggcccaagagactcagcttcaagctcttcaacatccaggtcaaagaggtcacgcagaatgaaggcaccaagaccatcgccaataacctcaccagcaccatccaggtgtttacggactcggaataccagctgccgtacgtcctcggctctgcccaccagggctgcctgcctccgttcccggcggacgtcttcatgattcctcagtacggctacctgactctcaacaacggtagtcaggccgtgggacgttcctccttctactgcctggagtacttcccctctcagatgctgagaacgggcaacaacttttccttcagctacactttcgaggacgtgcctttccacagcagctacgcgcacagccagagtttggacaggctgatgaatcctctcatcgaccagtacctgtactacctgtcaagaacccagtctacgggaggcacagcgggaacccagcagctgctgttttctcaggccgggcctagcaacatgtcggctcaggccagaaactggctgcctggaccctgctacagacagcagcgcgtctccacgacactgtcgcaaaacaacaacagcaactttgcctggactggtgccaccaagtatcatctgaacggcagagactctctggtgaatccgggcgtcgccatggcaaccaacaaggacgacgaggaccgcttcttcccatccagcggcatcctcatgtttggcaagcagggagctggaaaagacaacgtggactatagcaacgtgatgctaaccagcgaggaagaaatcaagaccaccaaccccgtggccacagaacagtatggcgtggtggctgataacctacagcagcaaaacaccgctcctattgtgggggccgtcaacagccagggagccttacctggcatggtctggcagaaccgggacgtgtacctgcagggtcctatttgggccaagattcctcacacagatggcaactttcacccgtctcctttaatgggcggctttggacttaaacatccgcctcctcagatcctcatcaaaagcactcctgttcctgcggatcctccaacagcgttcaaccaggccaagctgaattctttcatcacgcagtacagcaccggacaagtcagcgtggagatcgagtgggagctgcagaaggagaacagcaagtgctggaacccagagattcagtatacttccaactactacaaatctacaaatgtggactttgctgttaatactgagggtgtttactctgagcctcgccccattggcactcgttacctcacccgtaatctgtaa

SEQ ID NO: 5062 - protein, 738 aa, Adeno-associated virus
MAADGYLPDWLEDNLSEGIREWWDLKPGAPKPKANQQKQDDGRGLVLPGYKYLGPFNGLDKGEPVNAADAAALEHDKAYDQQLKAGDNPYLRYNHADAEFQERLQEDTSFGGNLGRAVFQAKKRVLEPLGLVEEAAKTAPGKKRPVEPSPQRSPDSSTGIGKKGQQPARKRLNFGQTGDSESVPDPQPIGEPPAAPSSVGSGTMAAGGGAPMADNNEGADGVGSSSGNWHCDSTWLGDRVITTSTRTWALPTYNNHLYKQISNGTSGGSTNDNTYFGYSTPWGYFDFNRFHCHFSPRDWQRLINNNWGFRPKRLSFKLFNIQVKEVTQNEGTKTIANNLTSTIQVFTDSEYQLPYVLGSAHQGCLPPFPADVFMIPQYGYLTLNNGSQAVGRSSFYCLEYFPSQMLRTGNNFSFSYTFEDVPFHSSYAHSQSLDRLMNPLIDQYLYYLSRTQSTGGTAGTQQLLFSQAGPSNMSAQARNWLPGPCYRQQRVSTTLSQNNNSNFAWTGATKYHLNGRDSLVNPGVAMATNKDDEDRFFPSSGILMFGKQGAGKDNVDYSNVMLTSEEEIKTTNPVATEQYGVVADNLQQQNTAPIVGAVNSQGALPGMVWQNRDVYLQGPIWAKIPHTDGNFHPSPLMGGFGLKHPPPQILIKSTPVPADPPTAFNQAKLNSFITQYSTGQVSVEIEWELQKENSKCWNPEIQYTSNYYKSTNVDFAVNTEGVYSEPRPIGTRYLTRNL

SEQ ID NO: 5063 - protein, 738 aa, Adeno-associated virus
MAADGYLPDWLEDNLSEGIREWWDLKPGAPKPKANQQKQDDGRGLVLPGYKYLGPFNGLDKGEPVNAADAAALEHDKAYDQQLKAGDNPYLRYNHADAEFQERLQEDTSFGGNLGRAVFQAKKRVLEPLGLVEEAAKTAPGKKRPVEPSPQRSPDSSTGIGKKGQQPARKRLNFGQTGDSESVPDPQPIGEPPAAPSSVGSGTMAAGGGAPMADNNEGADGVGSSSGNWHCDSTWLGDRVITTSTRTWALPTYNNHLYKQISNGTSGGSTNDNTYFGYSTPWGYFDFNRFHCHFSPRDWQRLINNNWGFRPKRLSFKLFNIQVKEVTQNEGTKTIANNLTSTIQVFTDSEYQLPYVLGSAHQGCLPPFPADVFMIPQYGYLTLNNGSQAVGRSSFYCLEYFPSQMLRTGNNFSFSYTFEDVPFHSSYAHSQSLDRLMNPLIDQYLYYLSRTQSTGGTAGTQQLLFSQAGPSNMSAQARNWLPGPCYRQQRVSTTLSQNNNSNFAWTGATKYHLNGRDSLVNPGVAMATNKDDEDRFFPSSGILMFGKQGAGKDNVDYSNVMLTSEEEIKTTNPVATEQYGVVADNLQQQNTAPIVGAVNSQGALPGMVWQNRDVYLQGPIWAKIPHTDGNFHPSPLMGGFGLKHPPPQILIKSTPVPADPPTAFNQAKLNSFITQYSTGQVSVEIEWELQKENSKRWNPEIQYTSNYYKSTNVDFAVNTEGVYSEPRPIGTRYLTRNL

SEQ ID NO: 5064 - DNA, 2217 bp, Adeno-associated virus
  source 1..2217: mol_type = genomic DNA
atggctgctgacggttatcttccagattggctcgaggacaacctctctgagggcattcgcgagtggtgggacctgaaacctggagcccccaagcccaaggccaaccagcagaagcaggacgacggccggggtctggtgcttcctggctacaagtacctcggacccttcaacggactcgacaagggggagcccgtcaacgcggcggacgcagcggccctcgagcacgacaaggcctacgaccagcagctcaaagcgggtgacaatccgtacctgcggtataaccacgccgacgccgagtttcaggagcgtctgcaagaagatacgtcttttgggggcaacctcgggcgagcagtcttccaggccaagaagcgggttctcgaacctctcggtctggttgaggaagctgctaagacggctcctggaaagaagagaccggtagaaccgtcacctcagcgttcccccgactcctccacgggcatcggcaagaaaggccagcagcccgctagaaagagactgaactttgggcagactggcgactcagagtcagtccccgaccctcaaccaatcggagaaccaccagcaggcccctctggtctgggatctggtacaatggctgcaggcggtggcgcaccaatggctgacaataacgagggcgccgacggagtgggtaatgcctcaggaaattggcattgcgattccacatggctgggcgacagagtcatcaccaccagcacccgaacctgggctttgcccacctacaacaaccacctctacaagcaaatctccagtcagtcagcaggtagcaccaacgacaacgtctacttcggctacagcaccccctgggggtattttgacttcaacagattccactgtcacttctcaccacgtgactggcagcggctcatcaacaacaactggggattccggcccaagaagctcaacttcaagctgttcaacatccaggtcaaggaggtcacaacgaatgacggcgtcacgaccatcgccaataaccctaccagcacggttcaggtcttttcggactcggaataccagctgccctacgtcctcggctccgcacaccagggctgcctgcctccgttcccggcggacgtcttcatgattccccagtacggctacctgactctgaacaatggcagccaatcggtgggtcgttcctctttctactgcctggaatatttcccttctcaaatgctgagaacgggcaacaacttcaccttcagctacaccttcgaggacgttcccttccacagcagctacgcacacagccagagcctggaccggctgatgaatcctcttatcgaccagtacctgtattacctggccagaacacagagcaacgcaggaggcacagctggcaatcgggaactgcagttttatcagggcgggcctaccaccatggccgaacaagccaaaaactggctgcctggaccctgctacagacagcagcgcgtctccacgacactgtcgcaaaacaacaacagcaactttgcctggactggtgccaccaagtatcatctgaacggcagagactctctggtgaatccgggcgtcgccatggcaaccaacaaggacgacgaggaccgcttcttcccatccagcggcatcctcatgtttggcaagcagggagctggaaaagacaacgtggactatagcaacgtgatgctaaccagcgaggaagaaatcaagaccaccaaccccgtggccacagaacagtatggcgtggtggctgataacctacagcagcaaaacaccgctcctattgtgggggccgtcaacagccagggagccttacctggcatggtctggcagaaccgggacgtgtacctgcagggtcctatttgggccaagattcctcacacagatggcaactttcacccgtctcctttaatgggcggctttggacttaaacatccgcctcctcagatcctcatcaaaaacactcctgttcctgcggatcctccaacagcgttcaaccaggccaagctgaattctttcatcacgcagtacagcaccggacaagtcagcgtggagatcgagtgggagctgcagaaggagaacagcaagcgctggaacccagagattcagtatacttccaactactacaaatctacaaatgtggactttgctgttaatactgagggtgtttactctgagcctcgccccattggcactcgttacctcacccgtaatctgtaa

SEQ ID NO: 5065 - protein, 738 aa, Adeno-associated virus
MAADGYLPDWLEDNLSEGIREWWDLKPGAPKPKANQQKQDDGRGLVLPGYKYLGPFNGLDKGEPVNAADAAALEHDKAYDQQLKAGDNPYLRYNHADAEFQERLQEDTSFGGNLGRAVFQAKKRVLEPLGLVEEAAKTAPGKKRPVEPSPQRSPDSSTGIGKKGQQPARKRLNFGQTGDSESVPDPQPIGEPPAGPSGLGSGTMAAGGGAPMADNNEGADGVGNASGNWHCDSTWLGDRVITTSTRTWALPTYNNHLYKQISSQSAGSTNDNVYFGYSTPWGYFDFNRFHCHFSPRDWQRLINNNWGFRPKKLNFKLFNIQVKEVTTNDGVTTIANNPTSTVQVFSDSEYQLPYVLGSAHQGCLPPFPADVFMIPQYGYLTLNNGSQSVGRSSFYCLEYFPSQMLRTGNNFTFSYTFEDVPFHSSYAHSQSLDRLMNPLIDQYLYYLARTQSNAGGTAGNRELQFYQGGPTTMAEQAKNWLPGPCYRQQRVSTTLSQNNNSNFAWTGATKYHLNGRDSLVNPGVAMATNKDDEDRFFPSSGILMFGKQGAGKDNVDYSNVMLTSEEEIKTTNPVATEQYGVVADNLQQQNTAPIVGAVNSQGALPGMVWQNRDVYLQGPIWAKIPHTDGNFHPSPLMGGFGLKHPPPQILIKNTPVPADPPTAFNQAKLNSFITQYSTGQVSVEIEWELQKENSKRWNPEIQYTSNYYKSTNVDFAVNTEGVYSEPRPIGTRYLTRNL

SEQ ID NO: 5066 - DNA, 2208 bp, Adeno-associated virus
  source 1..2208: mol_type = genomic DNA
atggctgccgatggttatcttccagattggctcgaggacaacctctctgagggcattcacgagtggtgggacccgaaacctggagccccgaaacccaaagccaaccagcaaaagcaggacgacggccggggtctggtgcttcctggctacaagtacctcggacccttcaacggactcgacaagggggagcccgtcaacgcggcggacgcagcggccctcgagcacgacaaggcctacgaccagcagctcaaagcgggtgacaatccgtacctgcggtataatcacgccgacgccgagtttcaggagcgtctgcaagaagatacgtcttttgggggcaacctcgggcgagcagtcttccaggccaagaagcgggttctcgaacctctcggtctggttgaggaaggcgctaagacggctcctggaaagaagagaccggtagagccgtcaccacagcgttcccccgactcctccacgggcatcggcaagaaaggccagcagcccgccagaaagagactcaatttcggtcagactggcgactcagagtcagtccccgaccctcaacctatcggagaacctccagcagcgccctctagtgtgggatctggtacaatggctgcaggcggtggcgcaccaatggcagacaataacgaaggtgccgacggagtgggtagttcctcgggaaattggcattgcgattccacatggctgggcgacagagtcatcaccaccagcacccgaacctgggccctgcccacccacaacaaccacctctacaagcaaatctccaacgggacctcgggaggcagcaccaacgacaacgtctacttcggctacagcaccccctgggggtattttgacttcaacagattccactgtcacttctcaccacgtgaccggcagcgactcatcaacaacaactggggattccggcccaagagactcagcttcaagctcttcaacatccaggtcaaagaggtcacgcagaatgaaggcaccaagaccatcgccaataacctcaccagcaccatccaggtgtttacggactcggaataccagctgccgtacgtcctcggctctgcccaccagggctgcctgcctccgttcccggcggacgtcttcatgattcctcagtacggctacctgactctcaacaacggtagtcaggccgtgggacgttcctccttctactgcctggagtacttcccctctcagatgctgagaacgggcaacaacttttccttcagctacactttcgaggacgtgcctttccacagcagctacgcgcacagccagagtttggacaggctgatgaatcctctcatcgaccagtacctgtactacctgtcaagaacccagtctacggaaggcacagcgggaacccagcagttgctgttttctcaggccgggcctagcaacatgtcggctcaggccagaaactggctgcctggaccctgctacagacagcagcgcgtctccacgacactgtcgcaaaacaacaacagcaactttgcctggactggtgccaccaagtatcatctgaacggcagagactctctggtgaatccgggcgtcgccatggcaacccacaaggacgacgaggaacgcttcttcccttcgagcggagtcctgatttttggaaaaactggagcagctaataagactacactggaaaatgtgttaatgacaaatgaagaggaaattcgtcctaccaacccggtagccaccgaggaatacgggactgttagcagcaacctgcaggcggctaacactgcagcccagacacaagttgtcaacaaccagggagccttacctggtatggtctggcagaaccgggacgtgtacctgcagggtcccatctgggccaagattcctcacacggacggcaactttcacccgtctccgctgatgggcggctttggactgaagcatcctcagatcctgatcaaaaacactcctgttcctgctaatcccccggaggtgtttacgcctgccaagtttgcttctttcatcacacagtacagcaccggccaggtcagcgtggagatcgagtgggagctgcagaaggagaacagcaagcgctggaacccagagattcagtatacctccaattttgacaaacagactggtgtggactttgccgttgacagccagggtgtttattctgagcctcgccccattggtactcgttacctcacccgtaatctgtaa

SEQ ID NO: 5067 - protein, 735 aa, Adeno-associated virus
MAADGYLPDWLEDNLSEGIHEWWDPKPGAPKPKANQQKQDDGRGLVLPGYKYLGPFNGLDKGEPVNAADAAALEHDKAYDQQLKAGDNPYLRYNHADAEFQERLQEDTSFGGNLGRAVFQAKKRVLEPLGLVEEGAKTAPGKKRPVEPSPQRSPDSSTGIGKKGQQPARKRLNFGQTGDSESVPDPQPIGEPPAAPSSVGSGTMAAGGGAPMADNNEGADGVGSSSGNWHCDSTWLGDRVITTSTRTWALPTHNNHLYKQISNGTSGGSTNDNVYFGYSTPWGYFDFNRFHCHFSPRDRQRLINNNWGFRPKRLSFKLFNIQVKEVTQNEGTKTIANNLTSTIQVFTDSEYQLPYVLGSAHQGCLPPFPADVFMIPQYGYLTLNNGSQAVGRSSFYCLEYFPSQMLRTGNNFSFSYTFEDVPFHSSYAHSQSLDRLMNPLIDQYLYYLSRTQSTEGTAGTQQLLFSQAGPSNMSAQARNWLPGPCYRQQRVSTTLSQNNNSNFAWTGATKYHLNGRDSLVNPGVAMATHKDDEERFFPSSGVLIFGKTGAANKTTLENVLMTNEEEIRPTNPVATEEYGTVSSNLQAANTAAQTQVVNNQGALPGMVWQNRDVYLQGPIWAKIPHTDGNFHPSPLMGGFGLKHPQILIKNTPVPANPPEVFTPAKFASFITQYSTGQVSVEIEWELQKENSKRWNPEIQYTSNFDKQTGVDFAVDSQGVYSEPRPIGTRYLTRNL

SEQ ID NO: 5068 - protein, 738 aa, Adeno-associated virus
MAADGYLPDWLEDNLSEGIREWWDLKPGAPKPKANQQKQDDGRGLVLPGYKYLGPFNGLDKGEPVNAADAAALEHDKAYDQQLKAGDNPYLRYNHADAEFQERLQEDTSFGGNLGRAVFQAKKRVLEPLGLVEEGAKTAPGKKRPVEPSPQRSPDSSTGIGKKGQQPARKRLNFGQTGDSESVPDPQPIGEPPAAPSSVGSGTMAAGGGAPMADNNEGADGVGSSSGNWHCDSTWLGDRVITTSTRTWALPTYNNHLYKQISNGTSGGSTNDNTYFGYSTPWGYFDFNRFHCHFSPRDWQRPINNNWGFRPKRLSFKLFNIQVKEVTQNEGTKTIANNLTSTIQVFTDSEYQLPYVLGSAHQGCLPPFPADVFMIPQYGYLTLNNGSQAVGRSSFYCLEYFPSQMLRTGNNFSFSYPFEDVPFHSSYAHSQSLDRLMNPLIDQYLYYLSRTQSTGGTAGTQQLLFSQAGPSNMSAQARNWLPGPCYRQQRVSTTLSQNNNSNFAWTGATKYHLNGRDSLVNPGVAMATNKDDEDRFFPSSGILMFGKQGAGKDNVDYSNVMLTSEEEIKTTNPVATEQYGVVADNLQQQDTAPIVGAVNSQGALPGMVWQNRDVYLQGPIWAKIPHTDGNFHPSPLMGGFGLKHPPPQVLIKNTPVPADPPTAFNQAKLNSFITQYSTGQVSVEIEWELQKENSKRWNPEIQYTSNYYKSTNVDFAVNTEGVYSEPRPIGTRYLTRNL

SEQ ID NO: 5069 - DNA, 2217 bp, Adeno-associated virus
  source 1..2217: mol_type = genomic DNA
atggctgccgatggttatcttccagattggctcgaggacaacctctctgagggcattcgcgagtggtgggacctgaaacctggagccccgaaacccaaggccaaccagcaaaagcaggacgacggccggggtctggtgcttcctggctacaagtacctcggacccttcaacggactcgacaagggggagcccgtcaacgcggcggacgcagcggccctcgagcacgacaaggcctacgaccagcagctcaaagcgggtgacaatccgtacctgcggtataatcacgccgacgccgagtttcaggagcgtctgcaagaagatacgtcttttgggggcaacctcgggcgagcagtcttccaggccaagaagcgggttctcgaacctctcggtctggttgaggaaggcgctaagacggctcctggaaagaagagaccggtagagccgtcaccacagcgttcccccgactcctccacgggcatcggcaagaaaggccagcagcccgccagaaagagactcaatttcggtcagactggcgactcagagtcagtccccgaccctcaacctatcggagaacctccagcagcgccctctagtgtgggatctggtacaatggctgcaggcggtggcgcaccaatggcagacaataacgaaggtgccgacggagtgggtagttcctcgggaaattggcattgcgattccacatggctgggcgacagagtcatcaccaccagcacccgaacctgggccctgcccacctacaacaaccacctctacaagcaaatctccaacgggacctcgggaggcagcaccaacgacaacacctactttggctacagcaccccctgggggtattttgactttaacagattccactgccacttctcaccacgtgactggcagcgacccatcaacaacaactggggattccggcccaagagactcagcttcaagctcttcaacatccaggtcaaagaggtcacgcagaatgaaggcaccaagaccatcgccaataacctcaccagcaccatccaggtgtttacggactcggaataccagctgccgtacgtcctcggctctgcccaccagggctgcctgcctccgttcccggcggacgtcttcatgattcctcagtacggctacctgactctcaacaacggtagtcaggccgtgggacgttcctccttctactgcctggagtacttcccctctcagatgctgagaacgggcaacaacttttccttcagctaccctttcgaggacgtgcctttccacagcagctacgcgcacagccagagtttggacaggctgatgaatcctctcatcgaccagtacctgtactacctgtcaagaacccagtctacgggaggcacagcgggaacccagcagttgctgttttctcaggccgggcctagcaacatgtcggctcaggccagaaactggctgcctggaccctgctacagacagcagcgcgtctccacgacactgtcgcaaaacaacaacagcaactttgcctggactggtgccaccaagtatcatctgaacggcagagactctctggtgaatccgggcgtcgccatggcaaccaacaaggacgacgaggaccgcttcttcccatccagcggcatcctcatgtttggcaagcagggagctggaaaagacaacgtggactatagcaacgtgatgctaaccagcgaggaagaaatcaagaccaccaaccccgtggccacagaacagtatggcgtggtggctgataacctacagcagcaagacaccgctcctattgtgggggccgtcaacagccagggagccttacctggcatggtctggcagaaccgggacgtgtacctgcagggtcctatttgggccaagattcctcacacagatggcaactttcacccgtctcctttaatgggcggctttggacttaaacatccgcctcctcaggtcctcatcaaaaacactcctgttcctgcggatcctccaacagcgttcaaccaggccaagctgaattctttcatcacgcagtacagcaccggacaagtcagcgtggagatcgagtgggagctgcagaaggagaacagcaagcgctggaacccagagattcagtatacttccaactactacaaatctacaaatgtggactttgctgttaatactgagggtgtttactctgagcctcgccccattggcactcgttacctcacccgtaatctgtaa

SEQ ID NO: 5070 - DNA, 2214 bp, Adeno-associated virus
  source 1..2214: mol_type = genomic DNA
atggctgctgacggttatcttccagattggctcgaggacaacctctctgagggcattcgcgagtggtgggacctgaaacctggagcccccaagcccaaggccaaccagcagaagcaggacgacggccggggtctggtgcttcctggctacaagtacctcggacccttcaacggactcgacaagggggagcccgtcaacgcggcggacgcagcggccctcgagcacgacaaggcctacgaccagcagctcaaagcgggtgacaatccgtacctgcggtataaccacgccgacgccgagttccaggagcgtctgcaagaagatacgtcttttgggggcaacctcgggcgagcagtcttccaggccaagaagcgggttctcgaacctctcggtctggctgaggaagctgctaagacggctcctggaaagaagagaccggtagaaccgtcacctcagcgttcccccgactcctccacgggcatcggcaagaaaggccagcagcccgctagaaagagactgaactttgggcagactggcgactcagagtcagtccccgaccctcaaccaatcggagagccaccagcaggcccctctggtctgggatctggtacaatggctgcaggcggtggcgcaccaatggctgacaataacaagggcgccgacggagtgggtaatgcctcaggaaattggcattgcgattccacatggctgggcgacagagtcatcaccaccagcacccgaacctgggctttgcccacctacaacaaccacctctacaagcaaatctccagtcagtcagcaggtagcaccaacgacaacgtctacttcggctacagcaccccctgggggtattttgacttcaacagattccactgtcacttctcaccacgtgactggcagcggctcatcaacaacaactggggattccggcccaagaagctcaacttcaagctgttcaacatccaggtcaaggaggtcacaacgggtgacggcgtcacgaccatcgccaataaccttaccagcacggttcaggtcttttcggactcggaataccagctgccctacgtcctcggctccgcacaccagggctgcctgcctccgttcccggcggacgtcttcatgattccccagtacggctacctgactctgaacaatgacagccaatcggtgggtcgttcctctttctactgcctggaatatttcccttctcaaatgctgagaacgggcaacaacttcaccttcagctacaccttcgaggacgttcccttccacagcagctacgcacacagccagagcctggaccggctgatgaatcctcttatcgaccagtacctgtattacctggccagaacacagagcaacgcaggaggcacagctggcaatcgggaactgcagttttatcagggcgggcctaccaccatggccgaacaagccaaaaactggctgcctggaccttgcttccggcaacaaagagtctccaagacgctggatcaaaacaacaacagcaactttgcttggactggtgccaccaaataccatctaaatggaagaaattcattggttaatcccggtgtcgccatggcaacccacaaggacgacgaggaacgcttcttcccttcgagcggagtcctgatttttggaaaaactggagcagctaataagactacactggaaaatgtgttaatgacaaatgaagaggaaattcgtcctaccaacccggtagccaccgaggaatacgggactgttagcagcaacctgcaggcggctaacactgcagcccagacacaagttgtcaacaaccagggagccttacctggtatggtctggcagaaccgggacgtgtacctgcagggtcccatctgggccaagattcctcacacggacggcaactttcacccgtctccgctgatgggcggctttggactgaagcatccgcctcctcagatcctgatcaaaaacactcctgttcctgctaatcccccggaggtgtttacgcctgccaagtttgcttctttcatcacacagtacagcaccggccaggtcagcgtggagatcgagtgggagctgcagaaggagaacagcaagcgctggaacccagagattcagtatacctccaattttgacaaacagactggtgtggactttgccgttgacagccagggtgtttattctgagcctcgccccattggtactcgttacctcacccgtaatctgtaa

SEQ ID NO: 5071 - protein, 737 aa, Adeno-associated virus
MAADGYLPDWLEDNLSEGIREWWDLKPGAPKPKANQQKQDDGRGLVLPGYKYLGPFNGLDKGEPVNAADAAALEHDKAYDQQLKAGDNPYLRYNHADAEFQERLQEDTSFGGNLGRAVFQAKKRVLEPLGLAEEAAKTAPGKKRPVEPSPQRSPDSSTGIGKKGQQPARKRLNFGQTGDSESVPDPQPIGEPPAGPSGLGSGTMAAGGGAPMADNNKGADGVGNASGNWHCDSTWLGDRVITTSTRTWALPTYNNHLYKQISSQSAGSTNDNVYFGYSTPWGYFDFNRFHCHFSPRDWQRLINNNWGFRPKKLNFKLFNIQVKEVTTGDGVTTIANNLTSTVQVFSDSEYQLPYVLGSAHQGCLPPFPADVFMIPQYGYLTLNNDSQSVGRSSFYCLEYFPSQMLRTGNNFTFSYTFEDVPFHSSYAHSQSLDRLMNPLIDQYLYYLARTQSNAGGTAGNRELQFYQGGPTTMAEQAKNWLPGPCFRQQRVSKTLDQNNNSNFAWTGATKYHLNGRNSLVNPGVAMATHKDDEERFFPSSGVLIFGKTGAANKTTLENVLMTNEEEIRPTNPVATEEYGTVSSNLQAANTAAQTQVVNNQGALPGMVWQNRDVYLQGPIWAKIPHTDGNFHPSPLMGGFGLKHPPPQILIKNTPVPANPPEVFTPAKFASFITQYSTGQVSVEIEWELQKENSKRWNPEIQYTSNFDKQTGVDFAVDSQGVYSEPRPIGTRYLTRNL

SEQ ID NO: 5072 - DNA, 2217 bp, Adeno-associated virus
  source 1..2217: mol_type = genomic DNA
atggctgccgatggttatcttccagattggctcgaggacaacctctctgagggcattcgcgagtggtgggacctgaaacctggagccccgaaacccaaagccaaccagcaaaagcaggacgacggccggggtctggtgcttcctggctacaagtacctcggacccttcaacggactcgacaagggggagcccgtcaacgcggcggacgcagcggccctcgagcacgacaaggcctacgaccagcagctcaaagcgggtgacaatccgtacctgcggtataatcacgccgacgccgagtttcaggagcgtctgcaagaagatacgtcttttgggggcaacctcgggcgagcagtcttccaggccaagaagcgggttctcgaacctctcggtctggttgaggaaggcgctaagacggctcctggaaagaagagaccggtagagccgtcaccacagcgttcccccgactcctccacgggcatcggcaagaaaggccagcagcccgccagaaagagactcaatttcggtcagactggcgactcagagtcagtccccgaccctcaacctatcggagaacctccagcagcgccctctagtgtgggatctggtacaatggctgcaggcggtggcgcaccaatggcagacaataacgaaggtgccgacggagtgggtagttcctcgggaaattggcattgcgattccacatggctgggcgacagagtcatcaccaccagcacccgaacctgggccctgcccacctacaacaaccacctctacaagcaaatctccaacgggacctcgggaggcagcaccaacgacaacacctactttggctacagcaccccctgggggtattttgactttaacagattccactgccacttctcaccacgtgactggcagcgactcatcaacaacaactggggattccggcccaagagactcagcttcaagctcttcaacatccaggtcaaagaggtcacgcagaatgaaggcaccaagaccatcgccaataacctcaccagcaccatccaggtgtttacggactcggaataccagctgccgtacgtcctcggctctgcccaccagggctgcctgcctccgttcccggcggacgtcttcatgattcctcagtacggctacctgactctcaacaacggtagtcaggccgtgggacgttcctccttctactgcctggagtacttcccctctcagatgctgagaacgggcaacaacttttccttcagctacactttcgaggacgtgcctttccacagcagctacgcgcacagccagagtttggacaggctgatgaatcctctcatcgaccagtacctgtactacctgtcaagaacccagtctacgggaggcacagcgggaacccagcagttgctgttttctcaggccgggcctagcaacatgtcggctcaggccagaaactggctgcctggaccctgctacagacagcagcgcgtctccacgacactgtcgcaaaacaacaacagcaactttgcctggactggtgccaccaagtatcatctgaacggcagagactctctggtgaatccgggcgtcgccatggcaaccaacaaggacgacgaggaccgcttcttcccatccagcggcatcctcatgtttggcaagcagggagctggaaaagacaacgtggactatagcaacgtgatgctaaccagcgaggaagaaatcaagaccaccaaccccgtggccacagaacagtatggcgtggtggctgataacctacagcagcaaaacaccgctcctattgtgggggccgtcaacagccagggagccttacctggcatggtctggcagaaccgggacgtgtacctgcagggtcctatttgggccaagattcctcacacagatggcaactttcacccgtctcctttaatgggcggctttggacttaaacatccgcctcctcagatcctcatcaaaaacactcctgttcctgcggatcctccaacagcgttcaaccaggccaagctgaattctttcatcacgcagtacagcaccggacaagtcagcgtggagatcgtgtgggagctgcagaaggagaacagcaagcgcaggaacccagagattcagtatacttccaactactacaaatctacaaatgtggactttgctgttaatactgagggtgtttactctgagcctcgccccattggcactcgttacctcacccgtaatctgtaa

SEQ ID NO: 5073 - protein, 738 aa, Adeno-associated virus
MAADGYLPDWLEDNLSEGIREWWDLKPGAPKPKANQQKQDDGRGLVLPGYKYLGPFNGLDKGEPVNAADAAALEHDKAYDQQLKAGDNPYLRYNHADAEFQERLQEDTSFGGNLGRAVFQAKKRVLEPLGLVEEGAKTAPGKKRPVEPSPQRSPDSSTGIGKKGQQPARKRLNFGQTGDSESVPDPQPIGEPPAAPSSVGSGTMAAGGGAPMADNNEGADGVGSSSGNWHCDSTWLGDRVITTSTRTWALPTYNNHLYKQISNGTSGGSTNDNTYFGYSTPWGYFDFNRFHCHFSPRDWQRLINNNWGFRPKRLSFKLFNIQVKEVTQNEGTKTIANNLTSTIQVFTDSEYQLPYVLGSAHQGCLPPFPADVFMIPQYGYLTLNNGSQAVGRSSFYCLEYFPSQMLRTGNNFSFSYTFEDVPFHSSYAHSQSLDRLMNPLIDQYLYYLSRTQSTGGTAGTQQLLFSQAGPSNMSAQARNWLPGPCYRQQRVSTTLSQNNNSNFAWTGATKYHLNGRDSLVNPGVAMATNKDDEDRFFPSSGILMFGKQGAGKDNVDYSNVMLTSEEEIKTTNPVATEQYGVVADNLQQQNTAPIVGAVNSQGALPGMVWQNRDVYLQGPIWAKIPHTDGNFHPSPLMGGFGLKHPPPQILIKNTPVPADPPTAFNQAKLNSFITQYSTGQVSVEIVWELQKENSKRRNPEIQYTSNYYKSTNVDFAVNTEGVYSEPRPIGTRYLTRNL

SEQ ID NO: 5074 - protein, 738 aa, Adeno-associated virus
MAADGYLPDWLEDNLSEGIREWWDLKPGAPKPKANQQKQDDGRGLVLPGYKYLGPFNGLDKGEPVNAADAAALEHDKAYDQQLKAGDNPYLRYNHADAEFQERLQEDTSFGGNLGRAVFQAKKRVLEPLGLVEEGAKTAPGKKRPVEPSPQRSPDSSTGIGKKGQQPARKRLNFGQTGDSESVPDPQPIGEPPAAPSSVGSGTMAAGGGAPMADNNEGADGVGSSSGNWHCDSTWLGDRVITTSTRTWALPTYNNHLYKQISNGTSGGSTNDNTYFGYSTPWGYFDFNRFHCHFSPRDWQRLINNNWGFRPKRLSFKLFNIQVKEVTQNEGTKTIANNLTSTIQVFTDSEYQLPYVLGSAHQGCLPPFPADVFMIPQYGYLTLNNGSQAVGRSSFYCLEYFPSQMLRTGNNFSFSYTFEDVPFHSSYAHSQSLDRLMNPLIDQYLYYLSRTQSTGGTAGTQQLLFSQAGPSNMSAQARNWLPGPCYRQQRVSTTLSQNNNSNFAWTGATKYHLNGRDSLVNPGVAMATNKDDEDRFFPSSGILMFGKQGAGKDNVDYSNVMLTSEEEIKTTNPVATEQYGVVADNLQQQNTAPIVGAVNSQGALPGMVWQNRDVYLQGPIWAKIPHTDGNFHPSPLMGGFGLKHPPPQILIKNTPVPADPPTAFNQAKLNSFITQYSTGQVSVEIEWELQKENSKRWNPEIQYTSNYYKSTNVDFAVNTEGVYSEPRPIGTRYLTRNL

SEQ ID NO: 5075 - protein, 738 aa, Adeno-associated virus
MAADGYLPDWLEDNLSEGIREWWDLKPGAPKPKANQQKQDDGRGLVLPGYKYLGPFNGLDKGEPVNAADAAALEHDKAYDQQLKAGDNPYLRYNHADAEFQERLQEDTSFGGNLGRAVFQAKKRVLEPLGLVEEGAKTAPGKKRPVEPSPQRSPDSSTGIGKKGQQPARKRLNFGQTGDSESVPDPQPIGEPPAAPSSVGSGTMAAGGGAPMADNNEGADGVGSSSGNWHCDSTWLGDRVITTSTRTWALPTYNNHLYKQISNGTSGGSTNDNTYFGYSTPWGYFDFNRFHCHFSPRDWQRLINNNWGFRPKRLSFKLFNIQVKEVTQNEGTKTIANNLTSTIQVFTDSEYQLPYVLGSAHQGCLPPFPADVFMIPQYGYLTLNNGSQAVGRSSFYCLEYFPSQMLRTGNNFSFSYTFEDVPFHSSYAHSQSLDRLMNPLIDQYLYYLSRTQSTGGTAGTQQLLFSQAGPSNMSAQARNWLPGPCYRQQRVSTTLSQNNNSNFAWTGATKYHLNGRDSLVNPGVAMATNKDDEDRFFPSSGILMFGKQGAGKDNVDYSNVMLTSEEEIKTTNPVATEQYGVVADNLQQQNTAPIVGAVNSQGALPGMVWQNRDVYLQGPIWAKIPHTDGNFHPSPLMGGFGLKHPPPQILIKNTPVPADPPTAFNQAKLNSFITQYSTGQVSVEIVWELQKENSKRWNPEIQYTSNYYKSTNVDFAVNTEGVYSEPRPIGTRYLTRNL

SEQ ID NO: 5076 - protein, 738 aa, Adeno-associated virus; identical to SEQ ID NO: 5074

SEQ ID NO: 5077 - DNA, 2214 bp, Adeno-associated virus
  source 1..2214: mol_type = genomic DNA
atggctgctgacggttatcttccagattggctcgaggacaacctctctgagggcattcgcgagtggtgggacctgaaacctggagcccccaagcccaaggccaaccagcagaagcaggacgacggccggggtctggtgcttcctggctacaagtacctcggacccttcaacggactcgacaagggggagcccgtcaacgcggcggacgcagcggccctcgagcacgacaaggcctacgaccagcagctcaaagcgggtgacaatccgtacctgcggtataaccacgccgacgccgagtttcaggagcgtctgcaagaagatacgtcttttgggggcaacctcgggcgagcagtcttccaggccaagaagcgggttctcgaacctctcggtctggttgaggaagctgctaagacggctcctggaaagaagagaccggtagaaccgtcacctcagcgttcccccgactcctccacgggcatcggcaagaaaggccagcagcccgctagaaagagactgaactttgggcagactggcgactcagagtcagtccccgaccctcaaccaatcggagaaccaccagcaggcccctctggtctgggatctggtacaatggctgcaggcggtggcgctccaatggcagacaataacgaaggcgccgacggagtgggtaatgcctcaggaaattggcattgcgattccacatggctgggcgacagagtcatcaccaccagcacccgaacctgggctttgcccacctacaacaaccacctctacaagcaaatctccagtcagtcagcaggtagcaccaacgacaacgtctacttcggctacagcaccccctgggggtattttgacttcaacagattccactgtcacttctcaccacgtgactggcagcggctcatcaacaacaactggggattccggcccaagaagctcaacttcaagctgttcaacatccaggtcaaggaggtcacaacgaatgacggcgtcacgaccatcgccaataaccttaccagcacggttcaggtcttttcggactcggaataccagctgccctacgtcctcggctccgcacaccagggctgcctgcctccgttcccggcggacgtcttcatgattccccagtacggctacctgactctgaacaatggcagccaatcggtgggtcgttcctctttctactgcctggaatatttcccttctcaaatgctgagaacgggcaacaacttcaccttcagctacaccttcgaggacgttcccttccacagcagctacgcacacagccagagcctggaccggctgatgaatcctcttatcgaccagtacctgtattacctggccagaacacagagcaacgcaggaggcacagctggcaatcgggaactgcagttttatcagggcgggcctaccaccatggccgaacaagccaaaaactggctgcctagaccttgcttccggcaacaaagagtctccaagacgctggatcaaaacaacaacagcaactttgcttggactggtgccaccaaataccatctaaatggaagaaattcattggttaatcccggtgtcgccatggcaacccacaaggacgacgaggaacgcttcttcccttcgagcggagtcctgatttttggaaaaactggagcagctaataagactacactggaaaatgtgttaatgacaaatgaagaggaaattcgtcctaccaacccggtagccaccgaggaatacgggactgttagcagcaacctgcaggcggctaacactgcagcccagacacaagttgtcaacaaccagggagccttacctggtatggtctggcagaaccgggacgtgtacctgcagggtcccatctgggccaagattcctcacacggacggcaactttcacccgtctccgctgatgggcggctttggactgaagcatccgcctcctcagatcctgatcaaaaacactcctgttcctgctaatcccccggaggtgtttacgcctgccaagtttgcttctttcatcacacagtacagcaccggccaggtcagcgtggagatcgagtgggagctgcagaaggagaacagcaagcgctggaacccagagattcagtatacctccaattttgacaaacagactggtgtggactttgccgttgacagccagggtgtttattctgagcctcgccccattggtactcgttacctcacccgtaatctgtaa

SEQ ID NO: 5078 - protein, 737 aa, Adeno-associated virus
MAADGYLPDWLEDNLSEGIREWWDLKPGAPKPKANQQKQDDGRGLVLPGYKYLGPFNGLDKGEPVNAADAAALEHDKAYDQQLKAGDNPYLRYNHADAEFQERLQEDTSFGGNLGRAVFQAKKRVLEPLGLVEEAAKTAPGKKRPVEPSPQRSPDSSTGIGKKGQQPARKRLNFGQTGDSESVPDPQPIGEPPAGPSGLGSGTMAAGGGAPMADNNEGADGVGNASGNWHCDSTWLGDRVITTSTRTWALPTYNNHLYKQISSQSAGSTNDNVYFGYSTPWGYFDFNRFHCHFSPRDWQRLINNNWGFRPKKLNFKLFNIQVKEVTTNDGVTTIANNLTSTVQVFSDSEYQLPYVLGSAHQGCLPPFPADVFMIPQYGYLTLNNGSQSVGRSSFYCLEYFPSQMLRTGNNFTFSYTFEDVPFHSSYAHSQSLDRLMNPLIDQYLYYLARTQSNAGGTAGNRELQFYQGGPTTMAEQAKNWLPRPCFRQQRVSKTLDQNNNSNFAWTGATKYHLNGRNSLVNPGVAMATHKDDEERFFPSSGVLIFGKTGAANKTTLENVLMTNEEEIRPTNPVATEEYGTVSSNLQAANTAAQTQVVNNQGALPGMVWQNRDVYLQGPIWAKIPHTDGNFHPSPLMGGFGLKHPPPQILIKNTPVPANPPEVFTPAKFASFITQYSTGQVSVEIEWELQKENSKRWNPEIQYTSNFDKQTGVDFAVDSQGVYSEPRPIGTRYLTRNL

SEQ ID NO: 5079 - DNA, 2214 bp, Adeno-associated virus
  source 1..2214: mol_type = genomic DNA
atggctgctgacggttatcttccagattggctcgaggacaacctctctgagggcattcgcgagtggtgggacctgaaacctggagcccccaagcccaaggccaaccagcagaagcaggacgacggccggggtctggtgcttcctggctacaagtacctcggacccttcaacggactcgacaagggggagcccgtcaacgcggcggacgcagcggccctcgagcacgacaaggcctacgaccagcagctcaaagcgggtgacaatccgtacctgcggtataaccatgccgacgccgagtttcaggagcgtctgcaagaagatacgtcttttgggggcaacctcgggcgagcagtcctccaggccaagaagcgggttctcgaacctctcggtctggttgaggaagctgctaagacggctcctggaaagaagagaccggtagaaccgtcacctcagcgttcccccgactcctccacgggcatcggcaagaaaggccagcagcccgctagaaagagactgaactttgggcagactggcgactcagagtcagtccccgaccctcaaccaatcggagaaccaccagcaggcccctctggtctgggatctggtacaatggctgcaggcggtggcgctccaatggcagacaataacgaaggcgccgacggagtgggtaatgcctcaggaaattggcattgcgattccacatggctgggcgacagagtcatcaccaccagcacccgaacctgggctttgcccacctacaacaaccacctctacaagcaaatctccagtcagtcagcaggtagcaccaacgacaacgtctacttcggctacagcaccccctgggggtattttgacttcaacagattccactgtcacttctcaccacgtgactggcagcggctcatcaacaacaactggggattccggcccaagaagctcaacttcaagctgttcaacatccaggtcaaggaggtcacaacgaatgacggcgtcacgaccatcgccaataaccttaccagcacggttcaggtcttttcggactcggaataccagctgccctacgtcctcggctccgcacaccagggctgcctgcctccgttcccggcggacgtcttcatgattccccagtacggctacctgactctgaacaatggcagccaatcggtgggtcgttcctctttctactgcctggaatatttcccttctcaaatgctgagaacgggcaacaacttcaccttcagctacaccttcgaggacgttcccttccacagcagctacgcacacagccagagcctggaccggctgatgaatcctcttatcgaccagtacctgtattacctggccagaacacagagcaacgcaggaggcacagctggcaatcgggaactgcagttttatcagggcgggcctaccaccatggccgaacaagccaaaaactggctgcctggaccttgcttccggcaacaaagagtctccaagacgctggatcaaaacaacaacagcaactttgcttggactggtgccaccaaataccatctaaatggaagaaattcattggttaatcccggtgtcgccatggcaacccacaaggacgacgaggaacgcttcttcccttcgagcggagtcctgatttttggaaaaactggagcagctaataagactacactggaaaatgtgttaatgacaaatgaagaggaaattcgtcctaccaacccggtagccaccgaggaatacgggactgttagcagcaacctgcaggcggctaacactgcagcccagacacaagttgtcaacaaccagggagccttacctggtatggtctggcagaaccgggacgtgtacctgcagggtcccatctgggccaagattcctcacacggacggcaactttcacccgtctccgctgatgggcggctttggactgaagcatccgcctcctcagatcctgatcaaaaacactcctgttcctgctaatcccccggaggtgtttacgcctgccaagtttgcttctttcatcacacagtacagcaccggccaggtcagcgtggagatcgagtgggagctgcagaaggagaacagcaagcgctggaacccagagattcagtatacctccaattttgacaaacagactggtgtggactttgccgttgacagccagggtgtttattctgagcctcgccccattggtactcgttacctcacccgtaatctgtaa

SEQ ID NO: 5080 - protein, 737 aa, Adeno-associated virus; identical to SEQ ID NO: 5040

SEQ ID NO: 5081 - protein, 737 aa, Adeno-associated virus
MAADGYLPDWLEDNLSEGIREWWDLKPGAPKPKANQQKQDDGRGLVLPGYKYLGPFNGLDKGEPVNAADAAALEHDKAYDQQLKAGDNPYLRYNHADAEFQERLQEDTSFGGNLGRAVLQAKKRVLEPLGLVEEAAKTAPGKKRPVEPSPQRSPDSSTGIGKKGQQPARKRLNFGQTGDSESVPDPQPIGEPPAGPSGLGSGTMAAGGGAPMADNNEGADGVGNASGNWHCDSTWLGDRVITTSTRTWALPTYNNHLYKQISSQSAGSTNDNVYFGYSTPWGYFDFNRFHCHFSPRDWQRLINNNWGFRPKKLNFKLFNIQVKEVTTNDGVTTIANNLTSTVQVFSDSEYQLPYVLGSAHQGCLPPFPADVFMIPQYGYLTLNNGSQSVGRSSFYCLEYFPSQMLRTGNNFTFSYTFEDVPFHSSYAHSQSLDRLMNPLIDQYLYYLARTQSNAGGTAGNRELQFYQGGPTTMAEQAKNWLPGPCFRQQRVSKTLDQNNNSNFAWTGATKYHLNGRNSLVNPGVAMATHKDDEERFFPSSGVLIFGKTGAANKTTLENVLMTNEEEIRPTNPVATEEYGTVSSNLQAANTAAQTQVVNNQGALPGMVWQNRDVYLQGPIWAKIPHTDGNFHPSPLMGGFGLKHPPPQILIKNTPVPANPPEVFTPAKFASFITQYSTGQVSVEIEWELQKENSKRWNPEIQYTSNFDKQTGVDFAVDSQGVYSEPRPIGTRYLTRNL

SEQ ID NO: 5082 - DNA, 2217 bp, Adeno-associated virus
  source 1..2217: mol_type = genomic DNA
atggctgccgatggttatcttccagattggctcgaggacaacctctctgagggcattcgcgagtggtgggacctgaaacctggagccccgaaacccaaagccaaccagcaaaagcaggacgacggccggggtctggtgcttcctggctacaagtacctcggacccttcaacggactcgacaagggggagcccgtcaacgcggcggacgcagcggccctcgagcacgacaaggcctacgaccagcagctcaaagcgggtgacaatccgtacctgcggtataatcacgccgacgccgagtttcaggagcgtctgcaagaagatacgtcttttgggggcaacctcgggcgagcagtcttccaggccaagaagcgggttctcgaacctctcggtctggttgaggaaggcgctaagacggctcctggaaagaagagaccggtagagccgtcaccacagcgttcccccgactcctccacgggcatcggcaagaaaggccagcagcccgccagaaagagactcaatttcggtcagactggcgactcagagtcagtccccgaccctcaacctatcggagaacctccagcagcgccctctagtgtgggatctggtacaatggctgcaggcggtggcgcaccaatggcagacaataacgaaggtgccgacggagtgggtagttcctcgggaaattggcattgcgattccacatggctgggcgacagagtcatcaccaccagcacccgaacctgggccctgcccacctacaacaaccacctctacaagcaaatctccaacgggacctcgggaggcagcaccaacgacaacacctactttggctacagcaccccctgggggtattttgactttaacagattccactgccacttctcaccacgtgactggcagcgactcatcaacaacaactggggattccggcccaagagactcagcttcaagctcttcaacatccaggtcaaagaggtcacgcagaatgaaggcaccaagaccatcgccaataacctcaccagcaccatccaggtgtttacggactcggaataccagctgccgtacgtcctcggctctgcccaccagggctgcctgcctccgttcccggcggacgtcttcatgattcctcagtacggctacctgactctcaacaacggtagtcaggccgtgggacgttcctccttctactgcctggagtacttcccctctcagatgctgagaacgggcaacaacttttccttcagctacactttcgaggacgtgcctttccacagcagctacgcgcacagccagagtttggacaggctgatgaatcctctcatcgaccagtacctgtactacctgtcaagaacccagtctacgggaggcacagcgggaacccagcagttgctgttttctcaggccgggcctagcaacatgtcggctcaggccagaaactggctgcctggaccctgctacagacagcagcgcgtctccacgacactgtcgcaaaacaacaacagcaactttgcctggactggtgccaccaagtatcatctgaacggcagagactctctggtgaatccgggcgtcgccatggcaaccaacaaggacgacgaggaccgcttcttcccacccagcggcatcctcatgtttggcaagcagggagctggaaaagacaacgtggactatagcaacgtgatgctaaccagcgaggaagaaatcaagaccaccaaccccgtggccacagaacagtatggcgtggtggctgataacctacagcagcaaaacaccgctcctattgtgggggccgtcaacagccagggagccttacctggcatggtctggcagaaccgggacgtgtacctgcagggtcctatttgggccaagattcctcacacagatggcaactttcacccgtctcctttaatgggcggctttggacttaaacatccgcctcctcagatcctcatcaaaaacactcctgttcctgcggatcctccaacagcgttcaaccaggccaagctgaattctttcatcacgcagtacagcaccggacaagtcagcgtggtgatcgagtgggagctgcagaaggagaacagcaagcgctggaacccagagattcagtatacttccaactactacaaatctacaaatgtggactttgctgttaatactgagggtgtttactctgagcttcgccccattggcactcgttacctcacccgtaatctgtaa

SEQ ID NO: 5083 - protein, 738 aa, Adeno-associated virus
MAADGYLPDWLEDNLSEGIREWWDLKPGAPKPKANQQKQDDGRGLVLPGYKYLGPFNGLDKGEPVNAADAAALEHDKAYDQQLKAGDNPYLRYNHADAEFQERLQEDTSFGGNLGRAVFQAKKRVLEPLGLVEEGAKTAPGKKRPVEPSPQRSPDSSTGIGKKGQQPARKRLNFGQTGDSESVPDPQPIGEPPAAPSSVGSGTMAAGGGAPMADNNEGADGVGSSSGNWHCDSTWLGDRVITTSTRTWALPTYNNHLYKQISNGTSGGSTNDNTYFGYSTPWGYFDFNRFHCHFSPRDWQRLINNNWGFRPKRLSFKLFNIQVKEVTQNEGTKTIANNLTSTIQVFTDSEYQLPYVLGSAHQGCLPPFPADVFMIPQYGYLTLNNGSQAVGRSSFYCLEYFPSQMLRTGNNFSFSYTFEDVPFHSSYAHSQSLDRLMNPLIDQYLYYLSRTQSTGGTAGTQQLLFSQAGPSNMSAQARNWLPGPCYRQQRVSTTLSQNNNSNFAWTGATKYHLNGRDSLVNPGVAMATNKDDEDRFFPPSGILMFGKQGAGKDNVDYSNVMLTSEEEIKTTNPVATEQYGVVADNLQQQNTAPIVGAVNSQGALPGMVWQNRDVYLQGPIWAKIPHTDGNFHPSPLMGGFGLKHPPPQILIKNTPVPADPPTAFNQAKLNSFITQYSTGQVSVVIEWELQKENSKRWNPEIQYTSNYYKSTNVDFAVNTEGVYSELRPIGTRYLTRNL

SEQ ID NO: 5084 - DNA, 2214 bp, Adeno-associated virus
  source 1..2214: mol_type = genomic DNA
atggctgctgacggttatcttccagattggctcgaggacaacctctctgagggcattcgcgagtggtgggacctgaaacctggagcccccaagcccaaggccaaccagcagaagcaggacgacggccggggtctggtgcttcctggctacaagtacctcggacccttcaacggactcgacaagggggagcccgtcaacgcggcggacgcagcggccctcgagcacgacaaggcctacgaccagcagctcaaagcgggtgacaatccgtacctgcggtataaccacgccgacgccgagtttcaggagcgtctgcaagaagatacgtcttttgggggcaacctcgggcgagcagtcttccaggccaagaagcgggttctcgaacctctcggtctggttgaggaagctgctaagacggctcctggaaagaagagaccggtagaaccgtcacctcagcgttcccccgactcctccacgggcatcggcaagaaaggccagcagcccgctagaaagagactgaactttgggcagactggcgactcagagtcagtccccgaccctcaaccaatcggagaaccaccagcaggcccctctggtctgggatctggtacaatggctgcaggcggtggcgccccaatggcagacaataacgaaggcgccgacggagtgggtaatgcctcaggaaattggcattgcgattccacatggctgggcgacagagtcatcaccaccagcacccgaacctgggctttgcccacctacaacaaccacctctacaagcaaatctccagtcagtcagcaggtagcaccaacgacaacgtctacttcggctacagcaccccctgggggtattttgacttcaacagattccactgtcacttctcaccacgtgactggcagcggctcatcaacaacaactggggattccggcccaagaagctcaacttcaagctgttcaacatccaggtcaaggaggtcacaacgaatgacggcgtcacgaccatcgccaataaccttaccagcacggttcaggtcttttcggactcggaataccagctgccctacgtcctcggctccgcacaccagggctgcctgcctccgttcccggcggacgtcttcatgattccccagtacggctacctgactctgaacaatggcagccaatcggtgggtcgttcctctttctactgcctggaatatttcccttctcaaatgctgagaacgggcaacaacttcaccatcagctacaccttcgaggacgttcccttccacagcagctacgcacacagccagagcctggaccggctgatgaatcctcttatcgaccagtacctgtattacctggccagaacacagagcaacgcaggaggcacagctggcaatcaggaactgcagttttatcagggcgggcctaccaccatggccgaacaagccaaaaactggctgcctggaccttgcttccggcaacaaagagtctccaagacgctggatcaaaacaacaacagcaactttgcttggactggtgccaccaaataccatctaaatggaagaaattcattggttaatcccggtgtcgccatggcaacccacaaggacgacgaggaacgcttcttcccttcgagcggagtcctgatttttggaaaaactggagcagctaataagactacactggaaaatgtgttaatgacaaatgaagaggaaattcgtcctaccaacccggtagccaccgaggaatacgggactgttagcagcaacctgcaggcggctaacactgcagcccagacacaagttgtcaacaaccagggagccttacctggtatggtctggcagaaccgggacgtgtacctgcagggtcccatctgggccaagattcctcacacagatggcaactttcacccgtctcctttaatgggcggctttggacttaaacatccgcctcctcagatcctcatcaaaaacactcctgttcctgcggatcctccaacagcgttcaaccaggccaagctgaattctttcatcacgcagtacagcaccggacaagtcagcgtggagatcgagtgggagctgcagaaggagaacagcaagcgctggaacccagagattcagtatacttccaactactacaaatctacaaatgtggactttgctgttaatactgagggtgtttactctgagcctcgccccattggcactcgttacctcacccgtaatctgtaa

SEQ ID NO: 5085 - protein, 737 aa, Adeno-associated virus
MAADGYLPDWLEDNLSEGIREWWDLKPGAPKPKANQQKQDDGRGLVLPGYKYLGPFNGLDKGEPVNAADAAALEHDKAYDQQLKAGDNPYLRYNHADAEFQERLQEDTSFGGNLGRAVFQAKKRVLEPLGLVEEAAKTAPGKKRPVEPSPQRSPDSSTGIGKKGQQPARKRLNFGQTGDSESVPDPQPIGEPPAGPSGLGSGTMAAGGGAPMADNNEGADGVGNASGNWHCDSTWLGDRVITTSTRTWALPTYNNHLYKQISSQSAGSTNDNVYFGYSTPWGYFDFNRFHCHFSPRDWQRLINNNWGFRPKKLNFKLFNIQVKEVTTNDGVTTIANNLTSTVQVFSDSEYQLPYVLGSAHQGCLPPFPADVFMIPQYGYLTLNNGSQSVGRSSFYCLEYFPSQMLRTGNNFTISYTFEDVPFHSSYAHSQSLDRLMNPLIDQYLYYLARTQSNAGGTAGNQELQFYQGGPTTMAEQAKNWLPGPCFRQQRVSKTLDQNNNSNFAWTGATKYHLNGRNSLVNPGVAMATHKDDEERFFPSSGVLIFGKTGAANKTTLENVLMTNEEEIRPTNPVATEEYGTVSSNLQAANTAAQTQVVNNQGALPGMVWQNRDVYLQGPIWAKIPHTDGNFHPSPLMGGFGLKHPPPQILIKNTPVPADPPTAFNQAKLNSFITQYSTGQVSVEIEWELQKENSKRWNPEIQYTSNYYKSTNVDFAVNTEGVYSEPRPIGTRYLTRNL

SEQ ID NO: 5086 - DNA, 2217 bp, Adeno-associated virus
  source 1..2217: mol_type = genomic DNA
atggctgccgatggttatcttccagattggctcgaggacaacctctctgagggcattcgcgagtggtgggacctgaaacctggagccccgaaacccaaagccaaccagcaaaagcaggacgacggccggggtctggtgcttcctggctacaagtacctcggacccttcaacggactcgacaagggggagcccgtcaacgcggcggacgcagcggccctcgagcacgacaaggcctacgaccagcagctcaaagcgggtgacaatccgtacctgcggtataatcacgccgacgccgagtttcaggagcgtctgcaagaagatacgtcttttgggggcaacctcgggcgagcagtcttccaggccaagaagcgggttctcgaacctctcggtctggttgaggaaggcgctaagacggctcctggaaagaagagaccggtagagccgtcaccacagcgttcccccgactcctccacgggcatcggcaagaaaggccagcagcccgccagaaagagactcaatttcggtcagactggcgactcagagtcagtccccgaccctcaacctatcggagaacctccagcagcgccctctagtgtgggatctggtacaatggctgcaggcggtggcgcaccaatggcagacaataacgaaggtgccgacggagtgggtagttcctcgggaaattggcattgcgattccacatggctgggcgacagagtcatcaccaccagcacccgaacctgggccctgcccgcctacaacaaccacctctacaagcaaatctccaacgggacctcgggaggcagcaccaacgacaacacctactttggctacagcaccccctgggggtattttgactttaacagattccactgccacttctcaccacgtgactggcagcgactcatcaacaacaactggggattccggcccaagagactcagcttcaagctcttcaacatccaggtcaaagaggtcacgcagaatgaaggcaccaagaccatcgccaataacctcaccagcaccatccaggtgtttacggactcggaataccagctgccgtacgtcctcggctctgcccaccagggctgcctgcctccgttcccggcggatgtcttcatgattcctcagtacggctacctgactctcaacaacggtagtcaggccgtgggacgttcctccttctactgcctggagtacttcccctctcagatgctgagaacgggcaacaacttttccttcagctacactttcgaggacgtgcctttccacagcagctacgcgcacagccagagtttggacaggctgatgaatcctctcatcgaccagtacctgtactacctgtcaagaacccagtctacgggaggcacagcgggaacccagcagttgctgttttctcaggccgggcctagcaacatgtcggctcaggccagaaactggctgcctggaccctgctacagacagcagcgcgtctccacgacactgtcgcaaaacaacaacagcaactttgcctggactggtgccaccaagtatcatctgagcggcagagactctctggtgaatccgggcgtcgccatggcaaccaacaaggacgacgaggaccgcttcttcccatccagcggcatcctcatgtttggcaagcagggagctggaaaagacaacgtggactatagcaacgtgatgctaaccagcgaggaagaaatcaagaccaccaaccccgtggccacagaacagtatggcgtggtggctgataacctacagcagcaaaacaccgctcctattgtgggggccgtcaacagccagggagccttacctggcatggtctggcagaaccgggacgtgtacctgcagggtcctatttgggccaagattcctcacacagatggcaactttcacccgtctcctttaatgggcggctttggacttaaacatccgcctcctcagatcctcatcaaaaacactcctgttcctgcggatcctccaacagcgttcaaccaggccaagctgaattcttccatcacgcagtacagcaccggacaagtcagcgtggagatcgagtgggagctgcagaaggagaacagcaagcgctggaacccagagattcagtatacttccaactactacaaatctacaaatgtggactttgctgttaatactgagggtgtttactctgagcctcgccccattggcactcgttacctcacccgtaatttgtaa

SEQ ID NO: 5087 - protein, 738 aa, Adeno-associated virus
MAADGYLPDWLEDNLSEGIREWWDLKPGAPKPKANQQKQDDGRGLVLPGYKYLGPFNGLDKGEPVNAADAAALEHDKAYDQQLKAGDNPYLRYNHADAEFQERLQEDTSFGGNLGRAVFQAKKRVLEPLGLVEEGAKTAPGKKRPVEPSPQRSPDSSTGIGKKGQQPARKRLNFGQTGDSESVPDPQPIGEPPAAPSSVGSGTMAAGGGAPMADNNEGADGVGSSSGNWHCDSTWLGDRVITTSTRTWALPAYNNHLYKQISNGTSGGSTNDNTYFGYSTPWGYFDFNRFHCHFSPRDWQRLINNNWGFRPKRLSFKLFNIQVKEVTQNEGTKTIANNLTSTIQVFTDSEYQLPYVLGSAHQGCLPPFPADVFMIPQYGYLTLNNGSQAVGRSSFYCLEYFPSQMLRTGNNFSFSYTFEDVPFHSSYAHSQSLDRLMNPLIDQYLYYLSRTQSTGGTAGTQQLLFSQAGPSNMSAQARNWLPGPCYRQQRVSTTLSQNNNSNFAWTGATKYHLSGRDSLVNPGVAMATNKDDEDRFFPSSGILMFGKQGAGKDNVDYSNVMLTSEEEIKTTNPVATEQYGVVADNLQQQNTAPIVGAVNSQGALPGMVWQNRDVYLQGPIWAKIPHTDGNFHPSPLMGGFGLKHPPPQILIKNTPVPADPPTAFNQAKLNSSITQYSTGQVSVEIEWELQKENSKRWNPEIQYTSNYYKSTNVDFAVNTEGVYSEPRPIGTRYLTRNL

SEQ ID NO: 5088 - protein, 736 aa, Adeno-associated virus
MAADGYLPDWLEDNLSEGIREWWDLKPGAPKPKANQQKQDDGRGLVLPGYKYLGPFNGLDKGEPVNAADAAALEHDKAYDQQLKAGDNPYLRYNHADAEFQERLQEDTSFGGNLGRAVFQAKKRVLEPLGLVEEGAKTAPGKKRPVEQSPQEPDSSSGIGKTGQQPAKKRLNFGQTGDSESVPDPQPLGEPPATPAAVGPTTMASGGGAPMADNNEGADGVGNASGNWHCDSTWLGDRVITTSTRTWALPTYNNHLYKQISSASTGASNDNHYFGYSTPWGYFDFNRFHCHFSPRDWQRLINNNWGFRPKRLNFKLFNIQVKEVTTNDGVTTIANNLTSTVQVFSDSEYQLPYVLGSAHQGCLPPFPADVFMIPQYGYLTLNNGSQAVGRSSFYCLEYFPSQMLRTGNNFTFSYTFEEVPFHSSYAHSQSLDRLMNPLIDQYLYYLNRTQNQSGSAQNKDLLFSRGSPAGMSVQPKNWLPGPCYRQQRVSKTKTDNNNSNFTWTGASKYNLNGRESIINPGTAMASHKDDEDKFFPMSGVMIFGKESAGASNTALDNVMITDEEEIKATNPVATERFGTVAVNFQSSSTDPATGDVHAMGALPGMVWQDRDVYLQGPIWAKIPHTDGHFHPSPLMGGFGLKNPPPQILIKNTPVPANPPAEFSATKFASFITQYSTGQVSVEIEWELQKENSKRWNPEVQYTSNYAKSANVDFTVDNNGLYTEPRPIGTRYLTRPL

SEQ ID NO: 5089 - DNA, 2217 bp, Adeno-associated virus
  source 1..2217: mol_type = genomic DNA
atggctgctgacggttatcttccagattggctcgaggacaacctctctgagggcattcgcgagtggtgggacctgaaacctggagcccccaagcccaaggccaaccagcagaagcaggacgacggccggggtctggtgcttcctggctacaagtacctcggacccttcaacggactcgacaagggggagcccgtcaacgcggcggacgcagcggccctcgagcacgacaaggcctacgaccagcagctcaaagcgggtgacaatccgtacctgcggtataaccacgccgacgccgagtttcaggagcgtctgcaagaagatacgtcttttgggggcaacctcgggcgagcagtcttccaggccaagaagcgggttctcgaacctctcggtctggttgaggaagctgctaagacggctcctggaaagaagagaccggtagaaccgtcacctcagcgttcccccgactcctccacgggcatcggcaagaaaggccagcagcccgctaaaaagagactgaactttggtcagactggcgactcagagtcagtccccgaccctcaaccaatcggagaaccaccagcaggcccctctggtctgggatctggtacaatggctgcaggcggtggcgctccaatggcagacaataacgaaggcgccgacggagtgggtagttcctcaggaaattggcattgcgattccacatggctgggcgacagagtcatcaccaccagcacccgaacctgggccctgcccacctacaacaaccacctctacaagcaaatatccaatgggacatcgggaggaagcaccaacgacaacacctacttcggctacagcaccccctgggggtattttgacttcaacagattccactgccacttctcaccacgtgactggcagcgactcatcaacaacaactggggattccggccaaaaagactcagcttcaagctcttcaacatccaggtcaaggaggtcacgcagaatgaaggcaccaagaccatcgccaataaccttaccagcacgattcaggtatttacggactcggaataccagctgccgtacgtcctcggctccgcgcaccagggctgcctgcctccgttcccggcggacgtcttcatgattccccagtacggctaccttacactgaacaatggaagtcaagccgtaggccgttcctccttctactgcctggaatattttccatctcaaatgctgcgaactggaaacaattttgaattcagctacaccttcgaggacgtgcctttccacagcagctacgcacacagccagagcttggaccgactgatgaatcctctcatcgaccagtacctgtactacttatccagaactcagtccacaggaggaactcaaggtacccagcaattgttattttctcaagctgggcctgcaaacatgtcggctcaggctaagaactggctacctggaccttgctaccggcagcagcgagtctctacgacactgtcgcaaaacaacaacagcaactttgcttggactggtgccaccaaatatcacctgaacggaagagactctttggtaaatcccggtgtcgccatggcaacccacaaggacgacgaggaacgcttcttcccgtcgagtggagtcctgatgtttggaaaacagggtgctggaagagacaatgtggactacagcagcgttatgctaaccagcgaagaagaaattaaaaccactaaccctgtagccacagaacaatacggtgtggtggctgacaacttgcagcaaaccaatacagggcctattgtgggaaatgtcaacagccaaggagccttacctggcatggtctggcagaaccgagacgtgtacctgcagggtcccatctgggccaagattcctcacacggacggcaacttccacccttcaccgctaatgggaggatttggactgaagcacccacctcctcagatcctgatcaagaacacgccggtacctgcggatcctccaacaacgttcagccaggcgaaattggcttccttcattacgcagtacagcaccggacaggtcagcgtggaaatcgagtgggagctgcagaaggagaacagcaaacgctggaacccagagattcagtacacttcaaactactacaaatctacaaatgtggactttgctgtcaatacagagggaacttattctgagcctcgccccattggtactcgttacctcacccgtaatctgtaa

SEQ ID NO: 5090 - protein, 738 aa, Adeno-associated virus
MAADGYLPDWLEDNLSEGIREWWDLKPGAPKPKANQQKQDDGRGLVLPGYKYLGPFNGLDKGEPVNAADAAALEHDKAYDQQLKAGDNPYLRYNHADAEFQERLQEDTSFGGNLGRAVFQAKKRVLEPLGLVEEGAKTAPGKKRPVEPSPQRSPDSSTGIGKKGQQPARKRLNFGQTGDSESVPDPQPLGEPPAAPSSVGSGTMAAGGGAPMADNNEGADGVGSSSGNWHCDSTWLGDRVITTSTRTWALPTYNNHLYKQISNGTSGGSTNDNTYFGYSTPWGYFDFNRFHCHFSPRDWQRLINNNWGFRPKRLSFKLFNIQVKEVTQNEGTKTIANNLTSTIQVFTDSEYQLPYVLGSAHQGCLPPFPADVFMIPQYGYLTLNNGSQAVGRSSFYCLEYFPSQMLRTGNNFSFSYTFEDVPFHSSYAHSQSLDRLMNPLIDQYLYYLSRTQSTGGTAGTQQLLFSQAGPSNMSAQARNWLPGPCYRQQRVSTTLSQNNNSNFAWTGATKYHLNGRDSLVNPGVAMATNKDDEDRFFPSSGILMFGKQGAGKDNVDYSNVMLTSEEEIKTTNPVATEQYGVVADNLQRQNTAPIVGAVNSQGALPGMVWQNRDVYLQGPIWAKIPHTDGNFHPSPLMGGFGLKHPPPQILIKNTPVPADPPTAFNQAKLNSFITQYSTGQVSVEIEWELQKENSKRWNPEIQYTSNYYKSTNVDFAVNTEGVYSEPRPIGTRYLTRNL

SEQ ID NO: 5091 - protein, 736 aa, Adeno-associated virus
MAADGYLPDWLEDNLSEGIREWLNLKPGAPQPKANQQKQDNARGLVLPGYKYLGPFNGLDKGDPVNEADAAALEHDKAYGQQLKAGDNPYLKYNHADAEFQERLQKDTSFGGNLGKAVFQAKKRILEPLGLVETPAKTAPGKKRPVDPSPQRSPDSSSGIGKKSPHPARKRLNFGQTGEAESVPDPQPIGEPPSDPSSVGSGTMAAGGGAPMADNNEGADGVGNSSGNWHCDSTWLGDRVITTSTRTWALPTYNNHLYKQISSQSGATNDNHYFGYSTPWGYFDFNRFHCHFSPRDWQRLINNNWGFRPKRLSFKLFNIQVKEVTQNDGTTTIANNLTSTVQVFTDSEYQLPYVLGSAHQGCLPPFPADVFMIPQYGYLTLNNGSQAVGRSSFYCLEYFPSQMLRTGNNFQFSYTFEDVPFHSSYAHSQSLDRLMNPLIDQYLYYLSKTQGTNATVQGAKLQFSQAGPSNMRDQARNWLPGPCYRQQRVSKTANDNNNSEYAWTGATKYHLNGRDSLVNPGPAMASHKDDEEKFFPMNGTLVFGKNGAGNSNVDIENVMITDEEEIRTTNPVATEQYGVVSDNLQSSNTRPITGDVDSQGVLPGMVWQDRDVYLQGPIWAKIPHTDGHFHPSPLMGGFGLKHPPPQILIKNTPVPANPATTFTPGKFASFITQYSTGQVSVQIEWELQKENSKRWNPEIQYTSNYNKSVNVDFTVDTNGVYSEPRPIGTRYLTRNL

SEQ ID NO: 5092 - protein, 736 aa, Adeno-associated virus; identical to SEQ ID NO: 4787

SEQ ID NO: 5093 - protein, 736 aa, Adeno-associated virus
MAADGYLPDWLEDNLSEGIREWWDLKPGAPKPKANQQKQDDGRGLVLPGYKYLGPFNGLDKGEPVNAADAAALEHDKAYDQQLKAGDNPYLRYNHADAEFQERLQEDTSFGGNLGRAVFQAKKRVLEPLGLVEEGAKTAPGKKRPVEQSPQEPDSSSGIGKTGQQPAKKRLNFGQTGDSESVPDPQPLGEPPAAPSGLGPNTMASGGGAPMADNNEGADGVGNSSGNWHCDSTWLGDRVITTSTRTWALPTYNNHLYKQISNGTSGGSTNDNTYFGYSTPWGYFDFNRFHCHFSPRDWQRLINNNWGFRPKRLNFKLFNIQVKEVTTNEGTKTIANNLTSTVQVFTDSEYQLPYVLGSAHQGCLPPFPADVFMVPQYGYLTLNNGSQALGRSSFYCLEYFPSQMLRTGNNFQFSYTFEDVPFHSSYAHSQSLDRLMNPLIDQYLYYLVRTQTTGTGGTQTLAFSQAGPSSMANQARNWVPGPCYRQQRVSTTTNQNNNSNFAWTGAAKFKLNGRDSLMNPGVAMASHKDDEDRFFPSSGVLIFGKQGAGNDGVDYSQVLITDEEEIKATNPVATEEYGAVAINNQAANTQAQTGLVHNQGVIPGMVWQNRDVYLQGPIWAKIPHTDGNFHPSPLMGGFGLKHPPPQILIKNTPVPADPPLTFNQAKLNSFITQYSTGQVSVEIEWELQKENSKRWNPEIQYTSNYYKSTNVDFAVNTEGVYSEPRPIGTRYLTRNL

SEQ ID NO: 5094 - DNA, 2211 bp, Adeno-associated virus 1; identical to SEQ ID NO: 4977
  source 1..2211: mol_type = genomic DNA

SEQ ID NO: 5095 - protein, 736 aa, Adeno-associated virus 1; identical to SEQ ID NO: 5088

SEQ ID NO: 5096 - DNA, 4718 bp, Adeno-associated virus 1
  source 1..4718: mol_type = genomic DNA
ttgcccactccctctctgcgcgctcgctcgctcggtggggcctgcggaccaaaggtccgcagacggcagagctctgctctgccggccccaccgagcgagcgagcgcgcagagagggagtgggcaactccatcactaggggtaatcgcgaagcgcctcccacgctgccgcgtcagcgctgacgtaaattacgtcataggggagtggtcctgtattagctgtcacgtgagtgcttttgcgacattttgcgacaccacgtggccatttagggtatatatggccgagtgagcgagcaggatctccattttgaccgcgaaatttgaacgagcagcagccatgccgggcttctacgagatcgtgatcaaggtgccgagcgacctggacgagcacctgccgggcatttctgactcgtttgtgagctgggtggccgagaaggaatgggagctgcccccggattctgacatggatctgaatctgattgagcaggcacccctgaccgtggccgagaagctgcagcgcgacttcctggtccaatggcgccgcgtgagtaaggccccggaggccctcttctttgttcagttcgagaagggcgagtcctacttccacctccatattctggtggagaccacgggggtcaaatccatggtgctgggccgcttcctgagtcagattagggacaagctggtgcagaccatctaccgcgggatcgagccgaccctgcccaactggttcgcggtgaccaagacgcgtaatggcgccggaggggggaacaaggtggtggacgagtgctacatccccaactacctcctgcccaagactcagcccgagctgcagtgggcgtggactaacatggaggagtatataagcgcctgtttgaacctggccgagcgcaaacggctcgtggcgcagcacctgacccacgtcagccagacccaggagcagaacaaggagaatctgaaccccaattctgacgcgcctgtcatccggtcaaaaacctccgcgcgctacatggagctggtcgggtggctggtggaccggggcatcacctccgagaagcagtggatccaggaggaccaggcctcgtacatctccttcaacgccgcttccaactcgcggtcccagatcaaggccgctctggacaatgccggcaagatcatggcgctgaccaaatccgcgcccgactacctggtaggccccgctccgcccgcggacattaaaaccaaccgcatctaccgcatcctggagctgaacggctacgaacctgcctacgccggctccgtctttctcggctgggcccagaaaaggttcgggaagcgcaacaccatctggctgtttgggccggccaccacgggcaagaccaacatcgcggaagccatcgcccacgccgtgcccttctacggctgcgtcaactggaccaatgagaactttcccttcaatgattgcgtcgacaagatggtgatctggtgggaggagggcaagatgacggccaaggtcgtggagtccgccaaggccattctcggcggcagcaaggtgcgcgtggaccaaaagtgcaagtcgtccgcccagatcgaccccacccccgtgatcgtcacctccaacaccaacatgtgcgccgtgattgacgggaacagcaccaccttcgagcaccagcagccgttgcaggaccggatgttcaaatttgaactcacccgccgtctggagcatgactttggcaaggtgacaaagcaggaagtcaaagagttcttccgctgggcgcaggatcacgtgaccgaggtggcgcatgagttctacgtcagaaagggtggagccaacaaaagacccgcccccgatgacgcggataaaagcgagcccaagcgggcctgcccctcagtcgcggatccatcgacgtcagacgcggaaggagctccggtggactttgccgacaggtaccaaaacaaatgttctcgtcacgcgggcatgcttcagatgctgtttccctgcaagacatgcgagagaatgaatcagaatttcaacatttgcttcacgcacgggacgagagactgttcagagtgcttccccggcgtgtcagaatctcaaccggtcgtcagaaagaggacgtatcggaaactctgtgccattcatcatctgctggggcgggctcccgagattgcttgctcggcctgcgatctggtcaacgtggacctggatgactgtgtttctgagcaataaatgacttaaaccaggtatggctgccgatggttatcttccagattggctcgaggacaacctctctgagggcattcgcgagtggtgggacttgaaacctggagccccgaagcccaaagccaaccagcaaaagcaggacgacggccggggtctggtgcttcctggctacaagtacctcggacccttcaacggactcgacaagggggagcccgtcaacgcggcggacgcagcggccctcgagcacgacaaggcctacgaccagcagctcaaagcgggtgacaatccgtacctgcggtataaccacgccgacgccgagtttcaggagcgtctgcaagaagatacgtcttttgggggcaacctcgggcgagcagtcttccaggccaagaagcgggttctcgaacctctcggtctggttgaggaaggcgctaagacggctcctggaaagaaacgtccggtagagcagtcgccacaagagccagactcctcctcgggcatcggcaagacaggccagcagcccgctaaaaagagactcaattttggtcagactggcgactcagagtcagtccccgatccacaacctctcggagaacctccagcaacccccgctgctgtgggacctactacaatggcttcaggcggtggcgcaccaatggcagacaataacgaaggcgccgacggagtgggtaatgcctcaggaaattggcattgcgattccacatggctgggcgacagagtcatcaccaccagcacccgcacctgggccttgcccacctacaataaccacctctacaagcaaatctccagtgcttcaacgggggccagcaacgacaaccactacttcggctacagcaccccctgggggtattttgatttcaacagattccactgccacttttcaccacgtgactggcagcgactcatcaacaacaattggggattccggcccaagagactcaacttcaaactcttcaacatccaagtcaaggaggtcacgacgaatgatggcgtcacaaccatcgctaataaccttaccagcacggttcaagtcttctcggactcggagtaccagcttccgtacgtcctcggctctgcgcaccagggctgcctccctccgttcccggcggacgtgttcatgattccgcaatacggctacctgacgctcaacaatggcagccaagccgtgggacgttcatccttttactgcctggaatatttcccttctcagatgctgagaacgggcaacaactttaccttcagctacacctttgaggaagtgcctttccacagcagctacgcgcacagccagagcctggaccggctgatgaatcctctcatcgaccaatacctgtattacctgaacagaactcaaaatcagtccggaagtgcccaaaacaaggacttgctgtttagccgtgggtctccagctggcatgtctgttcagcccaaaaactggctacctggaccctgttatcggcagcagcgcgtttctaaaacaaaaacagacaacaacaacagcaattttacctggactggtgcttcaaaatataacctcaatgggcgtgaatccatcatcaaccctggcactgctatggcctcacacaaagacgacgaagacaagttctttcccatgagcggtgtcatgatttttggaaaagagagcgccggagcttcaaacactgcattggacaatgtcatgattacagacgaagaggaaattaaagccactaaccctgtggccaccgaaagatttgggaccgtggcagtcaatttccagagcagcagcacagaccctgcgaccggagatgtgcatgctatgggagcattacctggcatggtgtggcaagatagagacgtgtacctgcagggtcccatttgggccaaaattcctcacacagatggacactttcacccgtctcctcttatgggcggctttggactcaagaacccgcctcctcagatcctcatcaaaaacacgcctgttcctgcgaatcctccggcggagttttcagctacaaagtttgcttcattcatcacccaatactccacaggacaagtgagtgtggaaattgaatgggagctgcagaaagaaaacagcaagcgctggaatcccgaagtgcagtacacatccaattatgcaaaatctgccaacgttgattttactgtggacaacaatggactttatactgagcctcgccccattggcacccgttaccttacccgtcccctgtaattacgtgttaatcaataaaccggttgattcgtttcagttgaactttggtctcctgtccttcttatcttatcggttaccatggttatagcttacacattaactgcttggttgcgcttcgcgataaaagacttacgtcatcgggttacccctagtgatggagttgcccactccctctctgcgcgctcgctcgctcggtggggcctgcggaccaaaggtccgcagacggcagagctctgctctgccggccccaccgagcgagcgagcgcgcagagagggagtgggcaa

SEQ ID NO: 5097 - DNA, 255 bp, Adeno-associated virus 10
  source 1..255: mol_type = genomic DNA
ggtaattcctccggaaattggcattgcgattccacatggctgggcgacagagtcatcaccaccagcacccgaacctgggtcctgcccacctacaacaaccacatctacaagcaaatctccagcgagacaggagccaccaacgacaaccactacttcggctacagcaccccctgggggtattttgactttaacagattccactgccacttttcaccacgtgactggcagcgactcatcaacaacaactggggattc

SEQ ID NO: 5098 - protein, 738 aa, Adeno-associated virus 10
MAADGYLPDWLEDNLSEGIREWWDLKPGAPKPKANQQKQDDGRGLVLPGYKYLGPFNGLDKGEPVNAADAAALEHDKAYDQQLKAGDNPYLRYNHADAEFQERLQEDTSFGGNLGRAVFQAKKRVLEPLGLVEEAAKTAPGKKRPVEPSPQRSPDSSTGIGKKGQQPAKKRLNFGQTGESESVPDPQPIGEPPAGPSGLGSGTMAAGGGAPMADNNEGADGVGSSSGNWHCDSTWLGDRVITTSTRTWALPTYNNHLYKQISNGTSGGSTNDNTYFGYSTPWGYFDFNRFHCHFSPRDWQRLINNNWGFRPKRLSFKLFNIQVKEVTQNEGTKTIANNLTSTIQVFTDSEYQLPYVLGSAHQGCLPPFPADVFMIPQYGYLTLNNGSQAVGRSSFYCLEYFPSQMLRTGNNFEFSYTFEDVPFHSSYAHSQSLDRLMNPLIDQYLYYLSRTQSTGGTQGTQQLLFSQAGPANMSAQAKNWLPGPCYRQQRVSTTLSQNNNSNFAWTGATKYHLNGRDSLVNPGVAMATHKDDEERFFPSSGVLMFGKQGAGRDNVDYSSVMLTSEEEIKTTNPVATEQYGVVADNLQQANTGPIVGNVNSQGALPGMVWQNRDVYLQGPIWAKIPHTDGNFHPSPLMGGFGLKHPPPQILIKNTPVPADPPTTFSQAKLASFITQYSTGQVSVEIEWELQKENSKRWNPEIQYTSNYYKSTNVDFAVNTEGTYSEPRPIGTRYLTRNL

SEQ ID NO: 5099 - protein, 738 aa, Adeno-associated virus 10; identical to SEQ ID NO: 4793

SEQ ID NO: 5100 - DNA, 258 bp, Adeno-associated virus 11
  source 1..258: mol_type = genomic DNA
ggtaattcctccggaaattggcattgcgattccacatggctgggcgacagagtcatcaccaccagcacccgaacctgggccctgccaacctacaacaaccacctctacaaacaaatctccagcgcttcaacgggggccagcaacgacaaccactactttggctacagcaccccctgggggtattttgactttaacagattccactgccacttctcaccacgtgactggcagcgactcatcaacaacaactggggattc

SEQ ID NO: 5101 - DNA, 255 bp, Adeno-associated virus 12
  source 1..255: mol_type = genomic DNA
ggtaattcctccggaaattggcattgcgattccacatggctgggcgaccgagtcattaccaccagcacccggacttgggccctgcccacctacaacaaccacctctacaagcaaatctccagccaatcgggtgccaccaacgacaaccactacttcggctacagcaccccttgggggtattttgatttcaacagattccactgccatttctcaccacgtgactggcagcgactcatcaacaacaactggggattc

SEQ ID NO: 5102 - DNA, 2208 bp, Adeno-associated virus 2
  source 1..2208: mol_type = genomic DNA
atggctgccgatggttatcttccagattggctcgaggacactctctctgaaggaataagacagtggtggaagctcaaacctggcccaccaccaccaaagcccgcagagcggcataaggacgacagcaggggtcttgtgcttcctgggtacaagtacctcggacccttcaacggactcgacaagggagagccggtcaacgaggcagacgccgcggccctcgagcacgacaaagcctacgaccggcagctcgacagcggagacaacccgtacctcaagtacaaccacgccgacgcggagtttcaggagcgccttaaagaagatacgtcttttgggggcaacctcggacgagcagtcttccaggcgaaaaagagggttcttgaacctctgggcctggttgaggaacctgttaagacggctccgggaaaaaagaggccggtagagcactctcctgtggagccagactcctcctcgggaaccggaaaggcgggccagcagcctgcaagaaaaagattgaattttggtcagactggagacgcagactcagtacctgacccccagcctctcggacagccaccagcagccccctctggtctgggaactaatacgatggctacaggcagtggcgcaccaatggcagacaataacgagggcgccgacggagtgggtaattcctcgggaaattggcattgcgattccacatggatgggcgacagagtcatcaccaccagcacccgaacctgggccctgcccacctacaacaaccacctctacaaacaaatttccagccaatcaggagcctcgaacgacaatcactactttggctacagcaccccttgggggtattttgacttcaacagattccactgccacttttcaccacgtgactggcaaagactcatcaacaacaactggggattccgacccaagagactcaacttcaagctctttaacattcaagtcaaagaggtcacgcagaatgacggtacgacgacgattgccaataaccttaccagcacggttcaggtgtttactgactcggagtaccagctcccgtacgtcctcggctcggcgcatcaaggatgcctcccgccgttcccagcagacgtcttcatggtgccacagtatggatacctcaccctgaacaacgggagtcaggcagtaggacgctcttcattttactgcctggagtactttccttctcagatgctgcgtaccggaaacaactttaccttcagctacacttttgaggacgttcctttccacagcagctacgctcacagccagagtctggaccgtctcatgaatcctctcatcgaccagtacctgtattacttgagcagaacaaacactccaagtggaaccaccacgcagtcaaggcttcagttttctcaggccggagcgagtgacattcgggaccagtctaggaactggcttcctggaccctgttaccgccagcagcgagtatcaaagacatctgcggataacaacaacagtgaatactcgtggactggagctaccaagtaccacctcaatggcagagactctctggtgaatccgggcccggccatggcaagccacaaggacgatgaagaaaagttttttcctcagagcggggttctcatctttgggaagcaaggctcagagaaaacaaatgtggacattgaaaaggtcatgattacagacgaagaggaaatcaggacaaccaatcccgtggctacggagcagtatggttctgtatctaccaacctccagagaggcaacagacaagcagctaccgcagatgtcaacacacaaggcgttcttccaggcatggtctggcaggacagagatgtgtaccttcaggggcccatctgggcaaagattccacacacggacggacattttcacccctctcccctcatgggtggattcggacttaaacaccctcctccacagattctcatcaagaacaccccggtacctgcgaatccttcgaccaccttcagtgcggcaaagtttgcttccttcatcacacagtactccacgggacaggtcagcgtggagatcgagtgggagctgcagaaggaaaacagcaaacgctggaatcccgaaattcagtacacttccaactacaacaagtctgttaatgtggactttactgtggacactaatggcgtgtattcagagcctcgccccattggcaccagatacctgactcgtaatctgtaa

SEQ ID NO: 5103 - protein, 735 aa, Adeno-associated virus 2 [sequence omitted]

SEQ ID NO: 5104 - protein, 621 aa, Adeno-associated virus 2
MPGFYEIVIKVPSDLDGHLPGISDSFVNWVAEKEWELPPDSDMDLNLIEQAPLTVAEKLQRDFLTEWRRVSKAPEALFFVQFEKGESYFHMHVLVETTGVKSMVLGRFLSQIREKLIQRIYRGIEPTLPNWFAVTKTRNGAGGGNKVVDECYIPNYLLPKTQPELQWAWTNMEQYLSACLNLTERKRLVAQHLTHVSQTQEQNKENQNPNSDAPVIRSKTSARYMELVGWLVDKGITSEKQWIQEDQASYISFNAASNSRSQIKAALDNAGKIMSLTKTAPDYLVGQQPVEDISSNRIYKILELNGYDPQYAASVFLGWATKKFGKRNTIWLFGPATTGKTNIAEAIAHTVPFYGCVNWTNENFPFNDCVDKMVIWWEEGKMTAKVVESAKAILGGSKVRVDQKCKSSAQIDPTPVIVTSNTNMCAVIDGNSTTFEHQQPLQDRMFKFELTRRLDHDFGKVTKQEVKDFFRWAKDHVVEVEHEFYVKKGGAKKRPAPSDADISEPKRVRESVAQPSTSDAEASINYADRYQNKCSRHVGMNLMLFPCRQCERMNQNSNICFTHGQKDCLECFPVSESQPVSVVKKAYQKLCYIHHIMGKVPDACTACDLVNVDLDDCIFEQ

SEQ ID NO: 5105 - DNA, 4675 bp, Adeno-associated virus 2
  source 1..4675: mol_type = genomic DNA
ttggccactccctctctgcgcgctcgctcgctcactgaggccgggcgaccaaaggtcgcccgacgcccgggctttgcccgggcggcctcagtgagcgagcgagcgcgcagagagggagtggccaactccatcactaggggttcctggaggggtggagtcgtgacgtgaattacgtcatagggttagggaggtcctgtattagaggtcacgtgagtgttttgcgacattttgcgacaccatgtggtcacgctgggtatttaagcccgagtgagcacgcagggtctccattttgaagcgggaggtttgaacgcgcagccgccatgccggggttttacgagattgtgattaaggtccccagcgaccttgacgggcatctgcccggcatttctgacagctttgtgaactgggtggccgagaaggaatgggagttgccgccagattctgacatggatctgaatctgattgagcaggcacccctgaccgtggccgagaagctgcagcgcgactttctgacggaatggcgccgtgtgagtaaggccccggaggcccttttctttgtgcaatttgagaagggagagagctacttccacatgcacgtgctcgtggaaaccaccggggtgaaatccatggttttgggacgtttcctgagtcagattcgcgaaaaactgattcagagaatttaccgcgggatcgagccgactttgccaaactggttcgcggtcacaaagaccagaaatggcgccggaggcgggaacaaggtggtggatgagtgctacatccccaattacttgctccccaaaacccagcctgagctccagtgggcgtggactaatatggaacagtatttaagcgcctgtttgaatctcacggagcgtaaacggttggtggcgcagcatctgacgcacgtgtcgcagacgcaggagcagaacaaagagaatcagaatcccaattctgatgcgccggtgatcagatcaaaaacttcagccaggtacatggagctggtcgggtggctcgtggacaaggggattacctcggagaagcagtggatccaggaggaccaggcctcatacatctccttcaatgcggcctccaactcgcggtcccaaatcaaggctgccttggacaatgcgggaaagattatgagcctgactaaaaccgcccccgactacctggtgggccagcagcccgtggaggacatttccagcaatcggatttataaaattttggaactaaacgggtacgatccccaatatgcggcttccgtctttctgggatgggccacgaaaaagttcggcaagaggaacaccatctggctgtttgggcctgcaactaccgggaagaccaacatcgcggaggccatagcccacactgtgcccttctacgggtgcgtaaactggaccaatgagaactttcccttcaacgactgtgtcgacaagatggtgatctggtgggaggaggggaagatgaccgccaaggtcgtggagtcggccaaagccattctcggaggaagcaaggtgcgcgtggaccagaaatgcaagtcctcggcccagatagacccgactcccgtgatcgtcacctccaacaccaacatgtgcgccgtgattgacgggaactcaacgaccttcgaacaccagcagccgttgcaagaccggatgttcaaatttgaactcacccgccgtctggatcatgactttgggaaggtcaccaagcaggaagtcaaagactttttccggtgggcaaaggatcacgtggttgaggtggagcatgaattctacgtcaaaaagggtggagccaagaaaagacccgcccccagtgacgcagatataagtgagcccaaacgggtgcgcgagtcagttgcgcagccatcgacgtcagacgcggaagcttcgatcaactacgcagacaggtaccaaaacaaatgttctcgtcacgtgggcatgaatctgatgctgtttccctgcagacaatgcgagagaatgaatcagaattcaaatatctgcttcactcacggacagaaagactgtttagagtgctttcccgtgtcagaatctcaacccgtttctgtcgtcaaaaaggcgtatcagaaactgtgctacattcatcatatcatgggaaaggtgccagacgcttgcactgcctgcgatctggtcaatgtggatttggatgactgcatctttgaacaataaatgatttaaatcaggtatggctgccgatggttatcttccagattggctcgaggacactctctctgaaggaataagacagtggtggaagctcaaacctggcccaccaccaccaaagcccgcagagcggcataaggacgacagcaggggtcttgtgcttcctgggtacaagtacctcggacccttcaacggactcgacaagggagagccggtcaacgaggcagacgccgcggccctcgagcacgtacaaagcctacgaccggcagctcgacagcggagacaacccgtacctcaagtacaaccacgccgacgcggagtttcaggagcgccttaaagaagatacgtcttttgggggcaacctcggacgagcagtcttccaggcgaaaaagagggttcttgaacctctgggcctggttgaggaacctgttaagacggctccgggaaaaaagaggccggtagagcactctcctgtggagccagactcctcctcgggaaccggaaaggcgggccagcagcctgcaagaaaaagattgaattttggtcagactggagacgcagactcagtacctgacccccagcctctcggacagccaccagcagccccctctggtctgggaactaatacgatggctacaggcagtggcgcaccaatggcagacaataacgagggcgccgacggagtgggtaattcctccggaaattggcattgcgattccacatggatgggcgacagagtcatcaccaccagcacccgaacctgggccctgcccacctacaacaaccacctctacaaacaaatttccagccaatcaggagcctcgaacgacaatcactactttggctacagcaccccttgggggtattttgacttcaacagattccactgccacttttcaccacgtgactggcaaagactcatcaacaacaactggggattccgacccaagagactcaacttcaagctctttaacattcaagtcaaagaggtcacgcagaatgacggtacgacgacgattgccaataaccttaccagcacggttcaggtgtttactgactcggagtaccagctcccgtacgtcctcggctcggcgcatcaaggatgcctcccgccgttcccagcagacgtcttcatggtgccacagtatggatacctcaccctgaacaacgggagtcaggcagtaggacgctcttcattttactgcctggagtactttccttctcagatgctgcgtaccggaaacaactttaccttcagctacacttttgaggacgttcctttccacagcagctacgctcacagccagagtctggaccgtctcatgaatcctctcatcgaccagtacctgtattacttgagcagaacaaacactccaagtggaaccaccacgcagtcaaggcttcagttttctcaggccggagcgagtgacattcgggaccagtctaggaactggcttcctggaccctgttaccgccagcagcgagtatcaaagacatctgcggataacaacaacagtgaatactcgtggactggagctaccaagtaccacctcaatggcagagactctctggtgaatccggccatggcaagccacaaggacgatgaagaaaagttttttcctcagagcggggttctcatctttgggaagcaaggctcagagaaaacaaatgtgaacattgaaaaggtcatgattacagacgaagaggaaatcggaacaaccaatcccgtggctacggagcagtatggttctgtatctaccaacctccagagaggcaacagacaagcagctaccgcagatgtcaacacacaaggcgttcttccaggcatggtctggcaggacagagatgtgtaccttcaggggcccatctgggcaaagattccacacacggacggacattttcacccctctcccctcatgggtggattcggacttaaacaccctcctccacagattctcatcaagaacaccccggtacctgcgaatccttcgaccaccttcagtgcggcaaagtttgcttccttcatcacacagtactccacgggacacggtcagcgtggagatcgagtgggagctgcagaaggaaaacagcaaacgctggaatcccgaaattcagtacacttccaactacaacaagtctgttaatcgtggacttaccgtggatactaatggcgtgtattcagagcctcgccccattggcaccagatacctgactcgtaatctgtaattgcttgttaatcaataaaccgtttaattcgtttcagttgaactttggtctctgcgtatttctttcttatctagtttccatggctacgtagataagtagcatggcgggttaatcattaactacaaggaacccctagtgatggagttggccactccctctctgcgcgctcgctcgctcactgaggccgggcgaccaaaggtcgcccgacgcccgggctttgcccgggcggcctcagtgagcgagcgagcgcgcagagagggagtggccaa

SEQ ID NO: 5106 - DNA, 4679 bp, Adeno-associated virus 2
  source 1..4679: mol_type = genomic DNA
ttggccactccctctctgcgcgctcgctcgctcactgaggccgggcgaccaaaggtcgcccgacgcccgggctttgcccgggcggcctcagtgagcgagcgagcgcgcagagagggagtggccaactccatcactaggggttcctggaggggtggagtcgtgacgtgaattacgtcatagggttagggaggtcctgtattagaggtcacgtgagtgttttgcgacattttgcgacaccatgtggtcacgctgggtatttaagcccgagtgagcacgcagggtctccattttgaagcgggaggtttgaacgcgcagccgccatgccggggttttacgagattgtgattaaggtccccagcgaccttgacgggcatctgcccggcatttctgacagctttgtgaactgggtggccgagaaggaatgggagttgccgccagattctgacatggatctgaatctgattgagcaggcacccctgaccgtggccgagaagctgcagcgcgactttctgacggaatggcgccgtgtgagtaaggccccggaggcccttttctttgtgcaatttgagaagggagagagctacttccacatgcacgtgctcgtggaaaccaccggggtgaaatccatggttttgggacgtttcctgagtcagattcgcgaaaaactgattcagagaatttaccgcgggatcgagccgactttgccaaactggttcgcggtcacaaagaccagaaatggcgccggaggcgggaacaaggtggtggatgagtgctacatccccaattacttgctccccaaaacccagcctgagctccagtgggcgtggactaatatggaacagtatttaagcgcctgtttgaatctcacggagcgtaaacggttggtggcgcagcatctgacgcacgtgtcgcagacgcaggagcagaacaaagagaatcagaatcccaattctgatgcgccggtgatcagatcaaaaacttcagccaggtacatggagctggtcgggtggctcgtggacaaggggattacctcggagaagcagtggatccaggaggaccaggcctcatacatctccttcaatgcggcctccaactcgcggtcccaaatcaaggctgccttggacaatgcgggaaagattatgagcctgactaaaaccgcccccgactacctggtgggccagcagcccgtggaggacatttccagcaatcggatttataaaattttggaactaaacgggtacgatccccaatatgcggcttccgtctttctgggatgggccacgaaaaagttcggcaagaggaacaccatctggctgtttgggcctgcaactaccgggaagaccaacatcgcggaggccatagcccacactgtgcccttctacgggtgcgtaaactggaccaatgagaactttcccttcaacgactgtgtcgacaagatggtgatctggtgggaggaggggaagatgaccgccaaggtcgtggagtcggccaaagccattctcggaggaagcaaggtgcgcgtggaccagaaatgcaagtcctcggcccagatagacccgactcccgtgatcgtcacctccaacaccaacatgtgcgccgtgattgacgggaactcaacgaccttcgaacaccagcagccgttgcaagaccggatgttcaaatttgaactcacccgccgtctggatcatgactttgggaaggtcaccaagcaggaagtcaaagactttttccggtgggcaaaggatcacgtggttgaggtggagcatgaattctacgtcaaaaagggtggagccaagaaaagacccgcccccagtgacgcagatataagtgagcccaaacgggtgcgcgagtcagttgcgcagccatcgacgtcagacgcggaagcttcgatcaactacgcagacaggtaccaaaacaaatgttctcgtcacgtgggcatgaatctgatgctgtttccctgcagacaatgcgagagaatgaatcagaattcaaatatctgcttcactcacggacagaaagactgtttagagtgctttcccgtgtcagaatctcaacccgtttctgtcgtcaaaaaggcgtatcagaaactgtgctacattcatcatatcatgggaaaggtgccagacgcttgcactgcctgcgatctggtcaatgtggatttggatgactgcatctttgaacaataaatgatttaaatcaggtatggctgccgatggttatcttccagattggctcgaggacactctctctgaaggaataagacagtggtggaagctcaaacctggcccaccaccaccaaagcccgcagagcggcataaggacgacagcaggggtcttgtgcttcctgggtacaagtacctcggacccttcaacggactcgacaagggagagccggtcaacgaggcagacgccgcggccctcgagcacgacaaagcctacgaccggcagctcgacagcggagacaacccgtacctcaagtacaaccacgccgacgcggagtttcaggagcgccttaaagaagatacgtcttttgggggcaacctcggacgagcagtcttccaggcgaaaaagagggttcttgaacctctgggcctggttgaggaacctgttaagacggctccgggaaaaaagaggccggtagagcactctcctgtggagccagactcctcctcgggaaccggaaaggcgggccagcagcctgcaagaaaaagattgaattttggtcagactggagacgcagactcagtacctgacccccagcctctcggacagccaccagcagccccctctggtctgggaactaatacgatggctacaggcagtggcgcaccaatggcagacaataacgagggcgccgacggagtgggtaattcctccggaaattggcattgcgattccacatggatgggcgacagagtcatcaccaccagcacccgaacctgggccctgcccacctacaacaaccacctctacaaacaaatttccagccaatcaggagcctcgaacgacaatcactactttggctacagcaccccttgggggtattttgacttcaacagattccactgccacttttcaccacgtgactggcaaagactcatcaacaacaactggggattccgacccaagagactcaacttcaagctctttaacattcaagtcaaagaggtcacgcagaatgacggtacgacgacgattgccaataaccttaccagcacggttcaggtgtttactgactcggagtaccagctcccgtacgtcctcggctcggcgcatcaaggatgcctcccgccgttcccagcagacgtcttcatggtgccacagtatggatacctcaccctgaacaacgggagtcaggcagtaggacgctcttcattttactgcctggagtactttccttctcagatgctgcgtaccggaaacaactttaccttcagctacacttttgaggacgttcctttccacagcagctacgctcacagccagagtctggaccgtctcatgaatcctctcatcgaccagtacctgtattacttgagcagaacaaacactccaagtggaaccaccacgcagtcaaggcttcagttttctcaggccggagcgagtgacattcgggaccagtctaggaactggcttcctggaccctgttaccgccagcagcgagtatcaaagacatctgcggataacaacaacagtgaatactcgtggactggagctaccaagtaccacctcaatggcagagactctctggtgaatccgggcccggccatggcaagccacaaggacgatgaagaaaagttttttcctcagagcggggttctcatctttgggaagcaaggctcagagaaaacaaatgtggacattgaaaaggtcatgattacagacgaagaggaaatcaggacaaccaatcccgtggctacggagcagtatggttctgtatctaccaacctccagagaggcaacagacaagcagctaccgcagatgtcaacacacaaggcgttcttccaggcatggtctggcaggacagagatgtgtaccttcaggggcccatctgggcaaagattccacacacggacggacattttcacccctctcccctcatgggtggattcggacttaaacaccctcctccacagattctcatcaagaacaccccggtacctgcgaatccttcgaccaccttcagtgcggcaaagtttgcttccttcatcacacagtactccacgggacaggtcagcgtggagatcgagtgggagctgcagaaggaaaacagcaaacgctggaatcccgaaattcagtacacttccaactacaacaagtctgttaatgtggactttactgtggacactaatggcgtgtattcagagcctcgccccattggcaccagatacctgactcgtaatctgtaattgcttgttaatcaataaaccgtttaattcgtttcagttgaactttggtctctgcgtatttctttcttatctagtttccatggctacgtagataagtagcatggcgggttaatcattaactacaaggaacccctagtgatggagttggccactccctctctgcgcgctcgctcgctcactgaggccgggcgaccaaaggtcgcccgacgcccgggctttgcccgggcggcctcagtgagcgagcgagcgcgcagagagggagtggccaa

SEQ ID NO: 5107 - protein, 735 aa, Adeno-associated virus 2
MAADGYLPDWLEDTLSEGIRQWWKLKPGPPPPKPAERHKDDSRGLVLPGYKYLGPFNGLDKGEPVNEADAAALEHDKAYDRQLDSGDNPYLKYNHADAEFQERLKEDTSFGGNLGRAVFQAKKRVLEPLGLVEEPVKTAPGKKRPVEHSPVEPDSSSGTGKAGQQPARKRLNFGQTGDADSVPDPQPLGEPPATPAAVGPTTMASGGGAPMADNNEGADGVGNASGNWHCDSTWLGDRVITTSTRTWALPTYNNHLYKQISSASTGASNDNHYFGYSTPWGYFDFNRFHCHFSPRDWQRLINNNWGFRPKRLNFKLFNIQVKEVTQNDGTTTIANNLTSTVQVFTDSEYQLPYVLGSAHQGCLPPFPADVFMIPQYGYLTLNNGSQAVGRSSFYCLEYFPSQMLRTGNNFTFSYTFEDVPFHSSYAHSQSLDRLMNPLIDQYLYYLNRTQNQSGSAQDKALLFSRGSPAGMSVQPKNWLPGPCYRQQRVSKTKTDNNNSNFTWTGASKYNLNGRESIINPGTAMASHKDDKDKFFPMSGVMIFGKESAGASNTALDNVMITDEEEIKATNPVATERFGTVAVNFQSSSTDPATGDVHVMGALPGMVWQDRDVYLQGPIWAKIPHTDGHFHPSPLMGGFGLKHPPPQILIKNTPVPANPPAEFSATKFASFITQYSTGQVSVEIEWELQKENSKRWNPEVQYTSNYAKSANVDFTVDNNGLYTEPRPIGTRYLTRP

SEQ ID NO: 5108 - protein, 740 aa, Adeno-associated virus 2
MAADGYLPDWLEDTLSEGIRQWWKLKPGPPPPKPAERHKDDSRGLVLPGYKYLGPFNGLDKGEPVNAADAAALEHDKAYDRQLDSGDNPYLKYNHADAEFQERLKEDTSFGGNLGRAVFQAKKRVLEPLGLVEEPVKTAPGKKRPVEHSPVEPDSSSGTGKAGQQPARKRLNFGQTGDADSVPDPQPLGQPPAAPSGLGTNTMATGSGAPMADNNEGADGVGNSSGNWHCDSTWMGDRVITTSTRTWALPTYNNHLYKQISSQSGASNDNHYFGYSTPWGYFDFNRFHCHFSPRDWQRLINNNWGFRPKRLNFKLFNIQVKEVTQNDGTTTIANNLTSTVQVFTDSEYQLPYVLGSAHQGCLPPFPADVFMVPQYGYLTLNNGSQAVGRSSFYCLEYFPSQMLRTGNNFTFSYTFEDVPFHSSYAHSQSLDRLMNPLIDQYLYYLSRTNTPSGTTTQSGLQFSQAGASDIRDQSRNWLPGPCYRQQRVSKTSADNNNSEYSWTGATKYHLNGRDSLVNPGPAMASHKDDEEKFFPQSGVLIFGKQGSEKTNVDIEKVMITDEEEIRTTNPVATEQYGSVSTNLQRGNRQAATADVNTQGVLPGMVWQDRDVYLQGPIWAKIPHTDGHFHPSPLMGGFGLKHPPPQILIKNTPVPANPSTTFSAAKFASFITQYSTGQVSVEIEWELQKENSKRWNPEIQYTSNYNKSVNVDFTVDTNGVYSEPRPIGTRYLTRNLLLAAA

SEQ ID NO: 5109 - protein, 734 aa, Adeno-associated virus 2
MAADGYLPDWLEDTLSEGIRQWWKLKPGPPPPKPAERHKDDSRGLVLPGYKYLGPFNGLDKGEPVNEADAAALEHDKAYDRQLDSGDNPYLKYNHADAEFQERLKEDTSFGGNLGRAVFQAKKRVLEPLGLVEEPVKTAPGKKRPVEHSPVEPDSSSGTGKAGQQPARKRLNFGQTGDADSVPDPQPLGQPPAAPSGLGTNTMATGSGAPMADNNEGADGVGNSSGNWHCDSTWMGDRVITTSTRTWALPTYNNHLYKQISSQSGASNDNHYFGYSTPWGYFDFNRFHCHFSPRDWQRLINNNWGFRPKRLNFKLFNIQVKEVTQNDGTTTIANNLTSTVQVFTDSEYQLPYVLGSAHQGCLPPFPADVFMVPQYGYLTLNNGSQAVGRSSFYCLEYFPSQMLRTGNNFTFSYTFEDVPFHSSYAHSQSLDRLMNPLIDQYLYYLSRTNTPSGTTTQSGLQFSQAGASDIRDQSRNWLPGPCYRQQRVSKTSADNNNSEYSWTGATMYHLNGRDSLVNPGPAMASHKDDEEKFFPQSGVLIFGKQGSEKTNVDIEKVMITDEEEIRTTNPVATEQYGSVSTNLQRGNRQAATADVNTQGVLPGMVWQDRDVYLQGPIWAKIPHTDGHFHPSPLMGGFGLKHPPPQILIKNTPVPANPSTTFSAAKFASFITQYSTGQVSVEIEWELQKENSKRWNPEIQYTSNYNKSINVDFTVDTNGVYSEPRPIGTRYLTRN

SEQ ID NO: 5110 - protein, 734 aa, Adeno-associated virus 2
MAADGYLPDWLEDTLSEGIRQWWKLKPGPPPPKPAERHKDDSRGLVLPGYKYLGPFNGLDKGEPVNEADAAALEHDKAYDRQLDSGDNPYLKYNHADAEFQERLKEDTSFGGNLGRAVFQAKKRVLEPLGLVEEPVKTAPGKKRPVEHSPVEPDSSSGTGKAGQQPARKRLNFGQTGDADSVPDPQPLGQPPAAPSGLGTNTMATGSGAPMADNNEGADGVGNSSGNWHCDSTWMGDRVITTSTRTWALPTYNNHLYKQISSQSGASNDNHYFGYSTPWGYFDFNRFHCHFSPRDWQRLINNNWGFRPKRLNFKLFNIQVKEVTQNDGTTTIANNLTSTVQVFTDSEYQLPYVLGSAHQGCLPPFPADVFMVPQYGYLTLNNGSQAVGRSSFYCLEYFPSQMLRTGNNFTFSYTFEDVPFHSSYAHSQSLDRLMNPLIDQYLYYLSRTNTPSGTTTQSGLQFSQAGASDIRDQSRNWLPGPCYRQQRVSKTSADNNNSEYSWTGATKYHLNGRDSLVNPGPAMASHKDDEEKFFPQSGVLIFGKQGSEKTNVDIEKVMITDEEEIRTTNPVATEQYGSVSTNLQRGNRQAATADVNTQGVLPGMVWQDRDVYLQGPIWAKIPHTDGHFHPSPLMGGFGLKHPPPQILIKNTPVPANPSTTFSEAKFASFITQYSTGQVSVEIEWELQKENSKRWNPEIQYTSNYNKSVNVDFTVDTNGVYSEPRPIGTRYLTRN

SEQ ID NO: 5111 - protein, 739 aa, Adeno-associated virus 2
MAADGYLPDWLEDTLSEGIRQWWKLKPGPPPPKPAERHKDDSRGLVLPGYKYLGPFNGLDKGEPVNEADAAALEHDKAYDRQLDSGDNPYLKYNHADAEFQERLKEDTSFGGNLGRAVFQAKKRVLEPLGLVEEPVKTAPGKKRPVEHSPVEPDSSSGTGKAGQQPARKRLNFGQTGDADSVPDPQPLGQPPAAPSGLGTNTMATGSGAPMADNNEGADGVGNSSGNWHCDSTWMGDRVITTSTRTWALPTYNNHLYKQISSQSGASNDNHYFGYSTPWGYFDFNRFHCHFSPRDWQRLINNNWGFRPKRLNFKLFNIQVKEVTQNDGTTTIANNLTSTVQVFTDSEYQLPYVLGSAHQGCLPPFPADVFMVPQYGYLTLNNGSQAVGRSSFYCLEYFPSQMLRTGNNFTFSYTFEDVPFHSSYAHSQSLDRLMNPLIDQYLYYLSRTNTPSGTTTQSGLQFSQAGASDIRDQSRNWLPGPCYRQQRVSKTSADNNNSEYSWTGATKYHLNGRDSLVNPGPAMASHKDDEEKFFPQSGVLIFGKQGSEKTNVDIEKVMITDEEEIRTTNPVATEQYGSVSTNLQRGNRQAATADVNTQGVLPGMVWQDRDVYLQGPIWAKIPHTDGHFHPSPLMGGFGLKHPPPQILIKNTPVPANPSTTFSAAKFASFITQYSTGQVSVEIEWELQKENSKRWNPEIQYTSNYNKSVNVDFTVDTNGVYSEPRPIGTRYLTRNLLLAA

SEQ ID NO: 5112 - protein, 725 aa, Adeno-associated virus 2
MAADGYLPDWLEDTLSEGIRQWWKLKPGPPPPKPAERHKDDSRGLVLPGYKYLGPFNGLDKGEPVNEADAAALEHDKAYDRQLDSGDNPYLKYNHADAEFQERLKEDTSFGGNLGRAVFQAKKRVLEPLGLVEEPVKTAPGKKRPVEHSPVEPDSSSGTGKAGQQPARKRLNFGQTGDADSVPDPQPLGQPPAAPSGLGTNTMATGSGAPMADNNEGADGVGNSSGNWHCDSTWMGDRVITTSTRTWALPTYNNHLYKQISSQSGASNDNHYFGYSTPWGYFDFNRFHCHFSPRDWQRLINNNWGFRPKRLNFKLFNIQVKEVTQNDGTTTIANNLTSTVQVFTDSEYQLPYVLGSAHQGCLPPFPADVFMVPQYGYLTLNNGSQAVGRSSFYCLEYFPSQMLRTGNNFTFSYTFEDVPFHSSYAHSQSLDRLMNPLIDQYLYYLSRTNTPSGTTTQSGLQFSQAGASDIRDQSRNWLPGPCYRQQRVSKTSADNNNSEYSWTGATKYHLNGRDSLVNPGPAMASHKDDEEKFFPQSGVLIFGKQGSEKTNVDIEKVMITDEEEIRTTNPVATEQYGSVSTNLQRGNRQAATADVNTQGVLPGMVWQDRDVYLQGPIWAKIPHTDGHFHPSPLMGGFGLKHPPPQILIKNTPVPANPSTTFSAAKFASFITQYSTGQVSVEIEWELQKENSKRWNPEIQYTSNYNKSVNVDFTVDTNGVYSEPRP

SEQ ID NO: 5113 - protein, 707 aa, Adeno-associated virus 2
MAADGYLPDWLEDTLSEGIRQWWKLKPGPPPPKPAERHKDDSRGLVLPGYKYLGPFNGLDKGEPVNEADAAALEHDKAYDRQLDSGDNPYLKYNHADAEFQERLKEDTSFGGNLGRAVFQAKKRVLEPLGLVEEPVKTAPGKKRPVEHSPVEPDSSSGTGKAGQQPARKRLNFGQTGDADSVPDPQPLGQPPAAPSGLGTNTMATGSGAPMADNNEGADGVGNSSGNWHCDSTWMGDRVITTSTRTWALPTYNNHLYKQISSQSGASNDNHYFGYSTPWGYFDFNRFHCHFSPRDWQRLINNNWGFRPKRLNFKLFNIQVKEVTQNDGTTTIANNLTSTVQVFTDSEYQLPYVLGSAHQGCLPPFPADVFMVPQYGYLTLNNGSQAVGRSSFYCLEYFPSQMLRTGNNFTFSYTFEDVPFHSSYAHSQSLDRLMNPLIDQYLYYLSRTNTPSGTTTQSGLQFSQAGASDIRDQSRNWLPGPCYRQQRVSKTSADNNNSEYSWTGATKYHLNGRDSLVNPGPAMASHKDDEEKFFPQSGVLIFGKQGSEKTNVDIEKVMITDEEEIRTTNPVATEQYGSCIYQPPERQQTSSYRRCQHTRRSSRHGLAGQRCVPSGAHLGKDSTHGRTFSPLSPHGWIRTTPSSTDSHQEHPGTCESFDHLQCGKVCFLHHTVLHGTGQRGDRVRAAEGKQQTLESRNSVHFQLQQVC

SEQ ID NO: 5114 - protein, 739 aa, Adeno-associated virus 2; identical to SEQ ID NO: 5111

SEQ ID NO: 5115 - protein, 737 aa, Adeno-associated virus 2
MASDGYLPDWLEDNLSEGIREWWDLKPGAPKPKANQQKQDDGRGLVLPGYKYLGPFNGLDKGEPVNAADAAALEHDKAYDQQLKAGDNPYLRYNHADAEFQERLQEDTSFGGNLGRAVFQAKKRVLEPFGLVEEGAKTAPGKKRPVEQSPQEPDSSSGIGKTGQQPAKKRLNFGQTGDSESVPDPQPLGEPPATPAAVGPTTMASGGGAPMADNNEGADGVGNASGNWHCDSTWLGDRVITTSTRTWALPTYNNHLYKQISSASTGASNDNHYFGYSTPWGYFDFNRFHCHFSPRDWQRLINNNWGFRPKRLNFKLFNIQVKEVTTNDGTTTIANNLTSTVQVFTDSEYQLPYVLGSAHQGCLPPFPADVFMVPQYGYLTLNNGSQAVGRSSFYCLEYFPSQMLRTGNNFTFSYTFEDVPFHSSYAHSQSLDRLMNPLIDQYLYYLSRTNTPSGTTTQSGLQFSQAGASDIRDQSRNWLPGPCYRQQRVSKTSADNNNSEYSWTGATKYHLNGRDSLVNPGPAMASHKDDEEKFFPQSGVLIFGKQGSEKTNVDIEKVMITDEEEIRTTNPVATEQYGSVSTNLQRGNRQAATADVNTQGVLPGMVWQDRDVYLQGPIWAKIPHTDGHFHPSPLMGGFGLKHHPPQILIKNTPVPANPSTTFSAAKFASFITQYSTGQVSVEIEWELQKENSKRWNPEIQYTSNYNKSVNVDFTVDTNGVYSEPRPIGTRYLTRNLL

SEQ ID NO: 5116 - protein, 741 aa, Adeno-associated virus 2
MAADGYLPDWLEDTLSEGIREWWALKPGAPKPKANQQKQDDGRGLVLPGYKYLGPFNGLDKGEPVNEADAAALEHDKAYDQQLQAGDNPYLRYNHADAEFQERLQEDTSFGGNLGRAVFQAKKRVLEPLGLVEEPVKTAPGKKRPVEHSPVEPDSSSGTGKSGQQPARKRLNFGQTGDADSVPDPQPLGQPPAAPSGLGTNTMATGSGAPMADNNEGADGVGNSSGNWHCDSTWMGDRVITTSTRTWALPTYNNHLYKQISSQSGASNDNHYFGYSTPWGYFDFNRFHCHFSPRDWQRLINNNWGFRPKRLNFKLFNIQVKEVTQNDGTTTIANNLTSTVQVFTDSEYQLPYVLGSAHQGCLPPFPADVFMVPQYGYLTLNNGSQAVGRSSFYCLEYFPSQMLRTGNNFTFSYTFEDVPFHSSYAHSQSLDRLMNPLIDQYLYYLSRTNTPSGTTTQSGLQFSQAGASDIRDQSRNWLPGPCYRQQRVSKTSADNNNSEYSWTGATKYHLNGRDSLVNPGPAMASHKDDEEKFFPQSGVLIFGKQGSEKTNVDIEKVMITDEEEIRTTNPVATEQYGSVSTNLQRGNLANHNNTTNARQAATADVNTQGVLPGMVWQDRDVYLQGPIWAKIPHTDGHFHPSPLMGGFGLKHPPPQILIKNTPVPANPSTTFSAAKFASFITQYSTGQVSVEIEWELQKENSKRWNPEIQYTSNYNKSINVDFTVDTNGVYSEPRPIGTRYL

SEQ ID NO: 5117 - protein, 730 aa, Adeno-associated virus 2
MASDGYLPDWLEDNLSEGIREWWDLKPGAPKPKANQQKQDDGRGLVLPGYKYLGPFNGLDKGEPVNAADAAALEHDKAYDQQLKAGDNPYLRYNHADAEFQERLQEDTSFGGNLGRAVFQAKKRVLEPFGLVEEGAKTAPGKKRPVEQSPQEPDSSSGIGKTGQQPAKKRLNFGQTGDSESVPDPQPLGEPPATPAAVGPTTMASGGGAPMADNNEGADGVGNASGNWHCDSTWLGDRVITTSTRTWALPTYNNHLYKQISSASTGASNDNHYFGYSTPWGYFDFNRFHCHFSPRDWQRLINNNWGFRPKRLNFKLFNIQVKEVTTNDGVTTIANNLTSTVQVFSDSEYQLPYVLGSAHQGCLPPFPADVFMIPQYGYLTLNNGSQAVGRSSFYCLEYFPSQMLRTGNNFTFSYTFEDVPFHSSYAHSQSLDRLMNPLIDQYLYYLNRTQNQSGSAQNNDLLFSRGSPAGMSVQPKNWLPGPCYRQQRVSKTKTDNNNSNFTWTGASKYNLNGRESIINPGTAMASHKDDKDKFFPMSGVMIFGKESAGASNTALDNVMITDEEEIKATNPVATERFGTVAVNLQSSSTDPATGDVHVMGALPGMVWQDRDVYLQGPIWAKIPHTDGHFHPSPLMGGFGLKNPPPQILIKNTPVPANPPAEFSATKFASFITQYSTGQVSVEIEWELQKENSKRWNPEVQYTSNYAKSANVDFTVDNNGLYTEPRPIGTR

SEQ ID NO: 5118 - protein, 735 aa, Adeno-associated virus 2
  MOD_RES 239: note = Any amino acid
MASDGYLPDWLEDNLSEGIREWWDLKPGAPKPKANQQKQDDGRGLVLPGYKYLGPFNGLDKGEPVNAADAAALEHDKAYDQQLKAGDNPYLRYNHADAEFQERLQEDTSFGGNLGRAVFQAKKRVLEPFGLVEEGAKTAPGKKRPVEQSPQEPDSSSGIGKTGQQPAKKRLNFGQTGDSESVPDPQPLGEPPATPAAVGPTTMASGGGAPMADNNEGADGVGNASGNWHCDSTWLGDRXITTSTRTWALPTYNNHLYKQISSASTGASNDNHYFGYSTPWGYFDFNRFHCHFSPRDWQRLINNNWGFRPKRLNFKLFNIQVKEVTTNDGVTTIANNLTSTVQVFSDSEYQLPYVLGSAHQGCLPPFPADVFMIPQYGYLTLNNGSQAVGRSSFYCLEYFPSQMLRTGNNFTFSYTFEDVPFHSSYAHSQSLDRLMNPLIDQYLYYLNRTQNQSGSAQNNDLLFSRGSPAGMSVQPKNWLPGPCYRQQRVSKTKTDNNNSNFTWTGASKYNLNGRESIINPGTAMASHKDDKDKFFPMSGVMIFGKESAGASNTALDNVMITDEEEIKATNPVATERFGTVAVNLQSSSTDPATGDVHVMGALPGMVWQDRDVYLQGPIWAKIPHTDGHFHPSPLMGGFGLKNPPPQILIKNTPVPANPPAEFSATKFASFITQYSTGQVSVEIEWELQKENSKRWNPEVQYTSNYAKSANVDFTVDNNGLYTEPRPIGTRYLTRP

SEQ ID NO: 5119 - protein, 733 aa, Adeno-associated virus 2
MASDGYLPDWLEDNLSEGIREWWDLKPGAPKPKANQQKQDDGRGLVLPGYKYLGPFNGLDKGEPVNAADAAALEHDKAYDQQLKAGDNPYLRYNHADAEFQERLQEDTSFGGNLGRAVFLAKKRVLEPFGLVEEGAKTAPGKKRPVEQSPQEPDSSSGIGKTGQQPAKKRLNFGQTGDSESVPDPQPLGEPPATPAAVGPTTMASGGGAPMADNNEGADGVGNASGNWHCDSTWLGDRVITTSTRTWALPTYNNHLYKQISSASTGASNDNHYFGYSTPWGYFDFNRFHCHFSPRDWQRLINNNWGFRPKRLNFKLFNIQVKEVTTNDGVTTIANNLTSTVQVFSDSEYQLPYVLGSAHQGCLPPFPADVFMIPQYGYLTLNNGSQAVGRSSFYCLEYFPSQMLRTGNNFTFSYTFEDVPFHSSYAHSQSLDRLMNPLIDQYLYYLNRTQNQSGSAQNNDLLFSRGSPAGMSVQPKNWLPGPCYRQQRVSKTKTDNNNSNFTWTGASKYNLNGRESIINPGTAMASHKDDKDKFFPMSGVMIFGKESAGASNTALDNVMITDEEEIKATNPVATERFGTVAVNLQSSSTDPATGDVHVMGALPGMVWQDRDVYLQGPIWAKIPHTDGHFHPSPLMGGFGLKNPPPQILIKNTPVPANPPAEFSATKFASFITQYSTGQVSVEIEWELQKENSKRWNPEVQYTSNYAKSANVDFTVDNNGLYTEPRPIGTRYLT

SEQ ID NO: 5120 - protein, 734 aa, Adeno-associated virus 2
MAADGYLPDWLEDTLSEGIRQWWKLKPGPPPPKPAERHKDDSRGLVLPGCKYLGPFNGLDKGEPVNEADAAALEHDKAYDRQLDSGDNPYLKYNHADAEFQERLKEDTSFGGNLGRAVFQAKKRVLEPLGLVEEPVKTAPGKKRPVEHSPVEPDSSSGTGKAGQQPARKRLNFGQTGDADSVPDPQPLGQPPAAPSGLGTNTMATGSGAPMADNNEGADGVGNSSGNWHCDSTWMGDRVITTSTRTWALPTYNNHLYKQISSQSGASNDNHYFGYSTPWGYFDFNRFHCHFSPRDWQRLINNNWGFRPKRLNFKLFNIQVKEVTQNDGTTTIANNLTSTVQVFSDSEYQLPYVLGSAHQGCLPPFPADVFMIPQYGYLTLNNGSQAVGRSSFYCLEYFPSQMLRTGNNFTFNYTFEDVPFHSSYAHSQSLDRLMNPLIDQYLYYLNRTQNQSGSAQNNDLLFSRGSPAGMSVQPKNWLPGPCYRQQRVSKTKTDNNNSNFTWTGASKYNLNGRESIINPGTAMASHKDDKDKFFPMSGVMIFGKESAGASNTALDNVMITDEEEIKATNPVATERFGTVAVNLQSSSTDPATGDVHVMGALPGMVWQDRDVYLQGPIWAKIPHTDGHFHPSPLMGGFGLKNPPPQILIKNTPVPANPPAEFSATKFASFITQYSTGQVSVEIEWELQKENSKRWNPEVQYTSNYAKSANVDFTVDNNGLYTEPRPIGTRYLTRP

SEQ ID NO: 5121 - protein, 734 aa, Adeno-associated virus 2
MAADGYLPDWLEDTLSEGIRQWWKLKPGPPPPKPAERHKDDSRGLVLPGYKYLGPFNGLDKGEPVNEADAAALEHDKAYDRQLDSGDNPYLKYNHADAEFQERLKEDTSFGGNLGRAVFQAKKRVLEPLGLVEEPVKTAPGKKRPVEHSPVEPDSSSGTGKAGQQPARKRLNFGQTGDADSVPDPQPLGQPPAAPSGLGTNTMATGSGAPMADNNEGADGVGNSSGNWHCDSTWMGDRVITTSTRTWALSTYNNHLYKQISSQSGASNDNHYFGYSTPWGYFDFNRFHCHFSPRDWQRLINNNWGFRPKRLNFKLFNIQVKEVTQNDGTTTIANNLTSTVQVFTDSEYQLPYVLGSAHQGCLPPFPADVFMVPQYGYLTLNNGSQAVGRSSFYCLEYFPSQMLRTGNNFTFSYTFEDVPFHSSYAHSQSLDRLMNPLIDQYLYYLSRTNTPSGTTTQSRLQFSQAGASDIRDQSRNWLPGPCYRQQRVSKTSADNNNSEYSWTGATKYHLNGRDSLVNPGPAMASHKDDEEKFFPQSGVLIFGKQGSEKTNVDIEKVMITDEEEIRTTNPVATEQYGSVSTNLQRGNRQAATADVNTQGVLPGMVWQDRDVYLQGPIWAKIPHTDGHFHPSPLMGGFGLKHPPPQILIKNTPVPANPSTTFSAAKFASFITQYSTGQVSVEIEWELQKENSKRWNPEIQYTSNYNKSINVDFTVDTNGVYSEPRPIGTRYLTRN

SEQ ID NO: 5122 - protein, 738 aa, Adeno-associated virus 2
MAADGYLPDWLEDTLSEGIRQWWKLKPGPPPPKPAERHKDDSRGLVLPGYKYLGPFNGLDKGEPVNEADAAALEHDKAYDRQLDGGDNPYLKYNHADAEFQERLKEDTSFGGNLGRAVFQAKKRVLEPLGLVEEPVKTAPGKKRPVEHSPVEPDSSSGTGKAGQQPARKRLNFGQTGDADSVPDPQPLGQPPAAPSGLGTNTMATGSGAPMADNNEGADGVGNSSGNWHCDSTWMGDRVITTSTRTWALPTYNNHLYKQISSQSGASNDNHYFGYSTPWGYFDFNRFHCHFSPRDWQRLINNNWGFRPKRLNFKLFNIQVKEVTQNDGTTTIANNLTSTVQVFTDSEYQLPYVLGSAHQGCLPPFPADVFMVPQYGYLTLNNGSQAVGRSSFYCLEYFPSQMLRTGNNFTFSYTFEDVPFHSSYAHSQSLDRLMNPLIDQYLYYLSRTNTPSGTTTQSGLQFSQAGASDIRDQSRNWLPGPCYRQQRVSKTSADNNNSEYSWTGATKYHLNGRDSLVNPGPAMASHKDDEEKFFPQSGVLIFGKQGSEKTNVDIEKVMITDEEEIRTTNPVATEQYGSVSTNLQRGNRQAATADVNTQGVLPGMVWQDRDVYLQGPIWAKIPHTDGHFHPSPLMGGFGLKHPPPQILIKNTPVPANPSTTFSAAKFASFITQYSTGQVSVEIEWELQKENSKRWNPEIQYTSNYNKSVNVDFTVDTNGVYSEPRPIGTRYLTRNLLRP

SEQ ID NO: 5123 - protein, 736 aa, Adeno-associated virus 3; identical to SEQ ID NO: 4757

SEQ ID NO: 5124 - DNA, 4726 bp, Adeno-associated virus 3
  source 1..4726: mol_type = genomic DNA
ttggccactccctctatgcgcactcgctcgctcggtggggcctggcgaccaaaggtcgccagacggacgtgctttgcacgtccggccccaccgagcgagcgagtgcgcatagagggagtggccaactccatcactagaggtatggcagtgacgtaacgcgaagcgcgcgaagcgagaccacgcctaccagctgcgtcagcagtcaggtgacccttttgcgacagtttgcgacaccacgtggccgctgagggtatatattctcgagtgagcgaaccaggagctccattttgaccgcgaaatttgaacgagcagcagccatgccggggttctacgagattgtcctgaaggtcccgagtgacctggacgagcgcctgccgggcatttctaactcgtttgttaactgggtggccgagaaggaatgggacgtgccgccggattctgacatggatccgaatctgattgagcaggcacccctgaccgtggccgaaaagcttcagcgcgagttcctggtggagtggcgccgcgtgagtaaggccccggaggccctcttttttgtccagttcgaaaagggggagacctacttccacctgcacgtgctgattgagaccatcggggtcaaatccatggtggtcggccgctacgtgagccagattaaagagaagctggtgacccgcatctaccgcggggtcgagccgcagcttccgaactggttcgcggtgaccaaaacgcgaaatggcgccgggggcgggaacaaggtggtggacgactgctacatccccaactacctgctccccaagacccagcccgagctccagtgggcgtggactaacatggaccagtatttaagcgcctgtttgaatctcgcggagcgtaaacggctggtggcgcagcatctgacgcacgtgtcgcagacgcaggagcagaacaaagagaatcagaaccccaattctgacgcgccggtcatcaggtcaaaaacctcagccaggtacatggagctggtcgggtggctggtggaccgcgggatcacgtcagaaaagcaatggattcaggaggaccaggcctcgtacatctccttcaacgccgcctccaactcgcggtcccagatcaaggccgcgctggacaatgcctccaagatcatgagcctgacaaagacggctccggactacctggtgggcagcaacccgccggaggacattaccaaaaatcggatctaccaaatcctggagctgaacgggtacgatccgcagtacgcggcctccgtcttcctgggctgggcgcaaaagaagttcgggaagaggaacaccatctggctctttgggccggccacgacgggtaaaaccaacatcgcggaagccatcgcccacgccgtgcccttctacggctgcgtaaactggaccaatgagaactttcccttcaacgattgcgtcgacaagatggtgatctggtgggaggagggcaagatgacggccaaggtcgtggagagcgccaaggccattctgggcggaagcaaggtgcgcgtggaccaaaagtgcaagtcatcggcccagatcgaacccactcccgtgatcgtcacctccaacaccaacatgtgcgccgtgattgacgggaacagcaccaccttcgagcatcagcagccgctgcaggaccggatgtttgaatttgaacttacccgccgtttggaccatgactttgggaaggtcaccaaacaggaagtaaaggactttttccggtgggcttccgatcacgtgactgacgtggctcatgagttctacgtcagaaagggtggagctaagaaacgccccgcctccaatgacgcggatgtaagcgagccaaaacgggagtgcacgtcacttgcgcagccgacaacgtcagacgcggaagcaccggcggactacgcggacaggtaccaaaacaaatgttctcgtcacgtgggcatgaatctgatgctttttccctgtaaaacatgcgagagaatgaatcaaatttccaatgtctgttttacgcatggtcaaagagactgtggggaatgcttccctggaatgtcagaatctcaacccgtttctgtcgtcaaaaagaagacttatcagaaactgtgtccaattcatcatatcctgggaagggcacccgagattgcctgttcggcctgcgatttggccaatgtggacttggatgactgtgtttctgagcaataaatgacttaaaccaggtatggctgctgacggttatcttccagattggctcgaggacaacctttctgaaggcattcgtgagtggtgggctctgaaacctggagtccctcaacccaaagcgaaccaacaacaccaggacaaccgtcggggtcttgtgcttccgggttacaaatacctcggacccggtaacggactcgacaaaggagagccggtcaacgaggcggacgcggcagccctcgaacacgacaaagcttacgaccagcagctcaaggccggtgacaacccgtacctcaagtacaaccacgccgacgccgagtttcaggagcgtcttcaagaagatacgtcttttgggggcaaccttggcagagcagtcttccaggccaaaaagaggatccttgagcctcttggtctggttgaggaagcagctaaaacggctcctggaaagaagggggctgtagatcagtctcctcaggaaccggactcatcatctggtgttggcaaatcgggcaaacagcctgccagaaaaagactaaatttcggtcagactggagactcagagtcagtcccagaccctcaacctctcggagaaccaccagcagcccccacaagtttgggatctaatacaatggcttcaggcggtggcgcaccaatggcagacaataacgagggtgccgatggagtgggtaattcctcaggaaattggcattgcgattcccaatggctgggcgacagagtcatcaccaccagcaccagaacctgggccctgcccacttacaacaaccatctctacaagcaaatctccagccaatcaggagcttcaaacgacaaccactactttggctacagcaccccttgggggtattttgactttaacagattccactgccacttctcaccacgtgactggcagcgactcattaacaacaactggggattccggcccaagaaactcagcttcaagctcttcaacatccaagttagaggggtcacgcagaacgatggcacgacgactattgccaataaccttaccagcacggttcaagtgtttacggactcggagtatcagctcccgtacgtgctcgggtcggcgcaccaaggctgtctcccgccgtttccagcggacgtcttcatggtccctcagtatggatacctcaccctgaacaacggaagtcaagcggtgggacgctcatccttttactgcctggagtacttcccttcgcagatgctaaggactggaaataacttccaattcagctataccttcgaggatgtaccttttcacagcagctacgctcacagccagagtttggatcgcttgatgaatcctcttattgatcagtatctgtactacctgaacagaacgcaaggaacaacctctggaacaaccaaccaatcacggctgctttttagccaggctgggcctcagtctatgtctttgcaggccagaaattggctacctgggccctgctaccggcaacagagactttcaaagactgctaacgacaacaacaacagtaactttccttggacagcggccagcaaatatcatctcaatggccgcgactcgctggtgaatccaggaccagctatggccagtcacaaggacgatgaagaaaaatttttccctatgcacggcaatctaatatttggcaaagaagggacaacggcaagtaacgcagaattagataatgtaatgattacggatgaagaagagattcgtaccaccaatcctgtggcaacagagcagtatggaactgtggcaaataacttgcagagctcaaatacagctcccacgactggaactgtcaatcatcagggggccttacctggcatggtgtggcaagatcgtgacgtgtaccttcaaggacctatctgggcaaagattcctcacacggatggacactttcatccttctcctctgatgggaggctttggactgaaacatccgcctcctcaaatcatgatcaaaaatactccggtaccggcaaatcctccgacgactttcagcccggccaagtttgcttcatttatcactcagtactccactggacaggtcagcgtggaaattgagtgggagctacagaaagaaaacagcaaacgttggaatccagagattcagtacacttccaactacaacaagtctgttaatgtggactttactgtagacactaatggtgtttatagtgaacctcgccctattggaacccggtatctcacacgaaacttgtgaatcctggttaatcaataaaccgtttaattcgtttcagttgaactttggctcttgtgcacttctttatctttatcttgtttccatggctactgcgtagataagcagcggcctgcggcgcttgcgcttcgcggtttacaactgctggttaatatttaactctcgccatacctctagtgatggagttggccactccctctatgcgcactcgctcgctcggtggggcctggcgaccaaaggtcgccagacggacgtgctttgcacgtccggccccaccgagcgagcgagtgcgcatagagggagtggccaa

SEQ ID NO: 5125 - protein, 736 aa, Adeno-associated virus 3A; identical to SEQ ID NO: 4757

SEQ ID NO: 5126 - protein, 624 aa, Adeno-associated virus 3A
MPGFYEIVLKVPSDLDERLPGISNSFVNWVAEKEWDVPPDSDMDPNLIEQAPLTVAEKLQREFLVEWRRVSKAPEALFFVQFEKGETYFHLHVLIETIGVKSMVVGRYVSQIKEKLVTRIYRGVEPQLPNWFAVTKTRNGAGGGNKVVDDCYIPNYLLPKTQPELQWAWTNMDQYLSACLNLAERKRLVAQHLTHVSQTQEQNKENQNPNSDAPVIRSKTSARYMELVGWLVDRGITSEKQWIQEDQASYISFNAASNSRSQIKAALDNASKIMSLTKTAPDYLVGSNPPEDITKNRIYQILELNGYDPQYAASVFLGWAQKKFGKRNTIWLFGPATTGKTNIAEAIAHAVPFYGCVNWTNENFPFNDCVDKMVIWWEEGKMTAKVVESAKAILGGSKVRVDQKCKSSAQIEPTPVIVTSNTNMCAVIDGNSTTFEHQQPLQDRMFEFELTRRLDHDFGKVTKQEVKDFFRWASDHVTDVAHEFYVRKGGAKKRPASNDADVSEPKRECTSLAQPTTSDAEAPADYADRYQNKCSRHVGMNLMLFPCKTCERMNQISNVCFTHGQRDCGECFPGMSESQPVSVVKKKTYQKLCPIHHILGRAPEIACSACDLANVDLDDCVSEQ

SEQ ID NO: 5127 - protein, 736 aa, Adeno-associated virus 3B
MAADGYLPDWLEDNLSEGIREWWALKPGVPQPKANQQHQDNRRGLVLPGYKYLGPGNGLDKGEPVNEADAAALEHDKAYDQQLKAGDNPYLKYNHADAEFQERLQEDTSFGGNLGRAVFQAKKRILEPLGLVEEAAKTAPGKKRPVDQSPQEPDSSSGVGKSGKQPARKRLNFGQTGDSESVPDPQPLGEPPAAPTSLGSNTMASGGGAPMADNNEGADGVGNSSGNWHCDSQWLGDRVITTSTRTWALPTYNNHLYKQISSQSGASNDNHYFGYSTPWGYFDFNRFHCHFSPRDWQRLINNNWGFRPKKLSFKLFNIQVKEVTQNDGTTTIANNLTSTVQVFTDSEYQLPYVLGSAHQGCLPPFPADVFMVPQYGYLTLNNGSQAVGRSSFYCLEYFPSQMLRTGNNFQFSYTFEDVPFHSSYAHSQSLDRLMNPLIDQYLYYLNRTQGTTSGTTNQSRLLFSQAGPQSMSLQARNWLPGPCYRQQRLSKTANDNNNSNFPWTAASKYHLNGRDSLVNPGPAMASHKDDEEKFFPMHGNLIFGKEGTTASNAELDNVMITDEEEIRTTNPVATEQYGTVANNLQSSNTAPTTRTVNDQGALPGMVWQDRDVYLQGPIWAKIPHTDGHFHPSPLMGGFGLKHPPPQIMIKNTPVPANPPTTFSPAKFASFITQYSTGQVSVEIEWELQKENSKRWNPEIQYTSNYNKSVNVDFTVDTNGVYSEPRPIGTRYLTRNL

SEQ ID NO: 5128 - protein, 624 aa, Adeno-associated virus 3B
MPGFYEIVLKVPSDLDEHLPGISNSFVNWVAEKEWELPPDSDMDPNLIEQAPLTVAEKLQREFLVEWRRVSKAPEALFFVQFEKGETYFHLHVLIETIGVKSMVVGRYVSQIKEKLVTRIYRGVEPQLPNWFAVTKTRNGAGGGNKVVDDCYIPNYLLPKTQPELQWAWTNMDQYLSACLNLAERKRLVAQHLTHVSQTQEQNKENQNPNSDAPVIRSKTSARYMELVGWLVDRGITSEKQWIQEDQASYISFNAASNSRSQIKAALDNASKIMSLTKTAPDYLVGSNPPEDITKNRIYQILELNGYDPQYAASVFLGWAQKKFGKRNTIWLFGPATTGKTNIAEAIAHAVPFYGCVNWTNENFPFNDCVDKMVIWWEEGKMTAKVVESAKAILGGSKVRVDQKCKSSAQIEPTPVIVTSNTNMCAVIDGNSTTFEHQQPLQDRMFKFELTRRLDHDFGKVTKQEVKDFFRWASDHVTDVAHEFYVRKGGAKKRPASNDADVSEPKRQCTSLAQPTTSDAEAPADYADRYQNKCSRHVGMNLMLFPCKTCERMNQISNVCFTHGQRDCGECFPGMSESQPVSVVKKKTYQKLCPIHHILGRAPEIACSACDLANVDLDDCVSEQ

SEQ ID NO: 5129 - DNA, 4722 bp, Adeno-associated virus 3B
  source 1..4722: mol_type = genomic DNA
tggccactccctctatgcgcactcgctcgctcggtggggcctggcgaccaaaggtcgccagacggacgtgctttgcacgtccggccccaccgagcgagcgagtgcgcatagagggagtggccaactccatcactagaggtatggcagtgacgtaacgcgaagcgcgcgaagcgagaccacgcctaccagctgcgtcagcagtcaggtgacccttttgcgacagtttgcgacaccacgtggccgctgagggtatatattctcgagtgagcgaaccaggagctccattttgaccgcgaaatttgaacgagcagcagccatgccggggttctacgagattgtcctgaaggtcccgagtgacctggacgagcacctgccgggcatttctaactcgtttgttaactgggtggccgagaaggaatgggagctgccgccggattctgacatggatccgaatctgattgagcaggcacccctgaccgtggccgaaaagcttcagcgcgagttcctggtggagtggcgccgcgtgagtaaggccccggaggccctcttttttgtccagttcgaaaagggggagacctacttccacctgcacgtgctgattgagaccatcggggtcaaatccatggtggtcggccgctacgtgagccagattaaagagaagctggtgacccgcatctaccgcggggtcgagccgcagcttccgaactggttcgcggtgaccaaaacgcgaaatggcgccgggggcgggaacaaggtggtggacgactgctacatccccaactacctgctccccaagacccagcccgagctccagtgggcgtggactaacatggaccagtatttaagcgcctgtttgaatctcgcggagcgtaaacggctggtggcgcagcatctgacgcacgtgtcgcagacgcaggagcagaacaaagagaatcagaaccccaattctgacgcgccggtcatcaggtcaaaaacctcagccaggtacatggagctggtcgggtggctggtggaccgcgggatcacgtcagaaaagcaatggattcaggaggaccaggcctcgtacatctccttcaacgccgcctccaactcgcggtcccagatcaaggccgcgctggacaatgcctccaagatcatgagcctgacaaagacggctccggactacctggtgggcagcaacccgccggaggacattaccaaaaatcggatctaccaaatcctggagctgaacgggtacgatccgcagtacgcggcctccgtcttcctgggctgggcgcaaaagaagttcgggaagaggaacaccatctggctctttgggccggccacgacgggtaaaaccaacatcgcggaagccatcgcccacgccgtgcccttctacggctgcgtaaactggaccaatgagaactttcccttcaacgattgcgtcgacaagatggtgatctggtgggaggagggcaagatgacggccaaggtcgtggagagcgccaaggccattctgggcggaagcaaggtgcgcgtggaccaaaagtgcaagtcatcggcccagatcgaacccactcccgtgatcgtcacctccaacaccaacatgtgcgccgtgattgacgggaacagcaccaccttcgagcatcagcagccgctgcaggaccggatgtttaaatttgaacttacccgccgtttggaccatgactttgggaaggtcaccaaacaggaagtaaaggactttttccggtgggcttccgatcacgtgactgacgtggctcatgagttctacgtcagaaagggtggagctaagaaacgccccgcctccaatgacgcggatgtaagcgagccaaaacggcagtgcacgtcacttgcgcagccgacaacgtcagacgcggaagcaccggcggactacgcggacaggtaccaaaacaaatgttctcgtcacgtgggcatgaatctgatgctttttccctgtaaaacatgcgagagaatgaatcaaatttccaatgtctgttttacgcatggtcaaagagactgtggggaatgcttccctggaatgtcagaatctcaacccgtttctgtcgtcaaaaagaagacttatcagaaactgtgtccaattcatcatatcctgggaagggcacccgagattgcctgttcggcctgcgatttggccaatgtggacttggatgactgtgtttctgagcaataaatgacttaaaccaggtatggctgctgacggttatcttccagattggctcgaggacaacctttctgaaggcattcgtgagtggtgggctctgaaacctggagtccctcaacccaaagcgaaccaacaacaccaggacaaccgtcggggtcttgtgcttccgggttacaaatacctcggacccggtaacggactcgacaaaggagagccggtcaacgaggcggacgcggcagccctcgaacacgacaaagcttacgaccagcagctcaaggccggtgacaacccgtacctcaagtacaaccacgccgacgccgagtttcaggagcgtcttcaagaagatacgtcttttgggggcaaccttggcagagcagtcttccaggccaaaaagaggatccttgagcctcttggtctggttgaggaagcagctaaaacggctcctggaaagaagaggcctgtagatcagtctcctcaggaaccggactcatcatctggtgttggcaaatcgggcaaacagcctgccagaaaaagactaaatttcggtcagactggcgactcagagtcagtcccagaccctcaacctctcggagaaccaccagcagcccccacaagtttgggatctaatacaatggcttcaggcggtggcgcaccaatggcagacaataacgagggtgccgatggagtgggtaattcctcaggaaattggcattgcgattcccaatggctgggcgacagagtcatcaccaccagcaccagaacctgggccctgcccacttacaacaaccatctctacaagcaaatctccagccaatcaggagcttcaaacgacaaccactactttggctacagcaccccttgggggtattttgactttaacagattccactgccacttctcaccacgtgactggcagcgactcattaacaacaactggggattccggcccaagaaactcagcttcaagctcttcaacatccaagttaaagaggtcacgcagaacgatggcacgacgactattgccaataaccttaccagcacggttcaagtgtttacggactcggagtatcagctcccgtacgtgctcgggtcggcgcaccaaggctgtctcccgccgtttccagcggacgtcttcatggtccctcagtatggatacctcaccctgaacaacggaagtcaagcggtgggacgctcatccttttactgcctggagtacttcccttcgcagatgctaaggactggaaataacttccaattcagctataccttcgaggatgtaccttttcacagcagctacgctcacagccagagtttggatcgcttgatgaatcctcttattgatcagtatctgtactacctgaacagaacgcaaggaacaacctctggaacaaccaaccaatcacggctgctttttagccaggctgggcctcagtctatgtctttgcaggccagaaattggctacctgggccctgctaccggcaacagagactttcaaagactgctaacgacaacaacaacagtaactttccttggacagcggccagcaaatatcatctcaatggccgcgactcgctggtgaatccaggaccagctatggccagtcacaaggacgatgaagaaaaatttttccctatgcacggcaatctaatatttggcaaagaagggacaacggcaagtaacgcagaattagataatgtaatgattacggatgaagaagagattcgtaccaccaatcctgtggcaacagagcagtatggaactgtggcaaataacttgcagagctcaaatacagctcccacgactagaactgtcaatgatcagggggccttacctggcatggtgtggcaagatcgtgacgtgtaccttcaaggacctatctgggcaaagattcctcacacggatggacactttcatccttctcctctgatgggaggctttggactgaaacatccgcctcctcaaatcatgatcaaaaatactccggtaccggcaaatcctccgacgactttcagcccggccaagtttgcttcatttatcactcagtactccactggacaggtcagcgtggaaattgagtgggagctacagaaagaaaacagcaaacgttggaatccagagattcagtacacttccaactacaacaagtctgttaatgtggactttactgtagacactaatggtgtttatagtgaacctcgccctattggaacccggtatctcacacgaaacttgtaatcctggttaatcaataaaccgtttaattcgtttcagttgaactttggctcttgtgcacttcttatcttatcttgtttccatggctactgcgtagataagcagcggcctgcggcgcttgcgcttcgcggtttacaactgctggttaatatttaactctcgccatacctctagtgatggagttggccactccctctatgcgcactcgctcgctcggtggggccggacgtgcaaagcacgtccgtctggcgacctttggtcgccaggccccaccgagcgagcgagtgcgcatagagggagtggccaa

SEQ ID NO: 5130 - DNA, 1800 bp, Adeno-associated virus 4
  misc_feature 342: note = a, c, t or g
  source 1..1800: mol_type = genomic DNA
acggctcctggaaagaagagaccgttgattgaatccccccagcagcccgactcctccacgggtatcggcaaaaaaggcaagcagccggctaaaaagaagctcgttttcgaagacgaaactggagcaggcgacggaccccctgagggatcaacttccggagccatgtctgatgacagtgagatgcgtgcagcagctggcggagctgcagtcgagggsggacaaggtgccgatggagtgggtaatgcctcgggtgattggcattgcgattccacctggtctgagggccacgtcacgaccaccagcaccagaacctgggtcttgcccacctacaacaaccacctntacaagcgactcggagagagcctgcagtccaacacctacaacggattctccaccccctggggatactttgacttcaaccgcttccactgccacttctcaccacgtgactggcagcgactcatcaacaacaactggggcatgcgacccaaagccatgcgggtcaaaatcttcaacatccaggtcaaggaggtcacgacgtcgaacggcgagacaacggtggctaataaccttaccagcacggttcagatctttgcggactcgtcgtacgaactgccgtacgtgatggatgcgggtcaagagggcagcctgcctccttttcccaacgacgtctttatggtgccccagtacggctactgtggactggtgaccggcaacacttcgcagcaacagactgacagaaatgccttctactgcctggagtactttccttcgcagatgctgcggactggcaacaactttgaaattacgtacagttttgagaaggtgcctttccactcgatgtacgcgcacagccagagcctggaccggctgatgaaccctctcatcgaccagtacctgtggggactgcaatcgaccaccaccggaaccaccctgaatgccgggactgccaccaccaactttaccaagctgcggcctaccaacttttccaactttaaaaagaactggctgcccgggccttcaatcaagcagcagggcttctcaaagactgccaatcaaaactacaagatccctgccaccgggtcagacagtctcatcaaatacgagacgcacagcactctggacggaagatggagtgccctgacccccggacctccaatggccacggctggacctgcggacagcaagttcagcaacagccagctcatctttgcggggcctaaacagaacggcaacacggccaccgtacccgggactctgatcttcacctctgaggaggagctggcagccaccaacgccaccgatacggacatgtggggcaacctacctggcggtgaccagagcaacagcaacctgccgaccgtggacagactgacagccttgggagccgtgcctggaatggtctggcaaaacagagacatttactaccagggtcccatttgggccaagattcctcataccgatggacactttcacccctcaccgctgattggtgggtttgggctgaaacacccgcctcctcaaatttttatcaagaacaccccggtacctgcgaatcctgcaacgaccttcagctctactccggtaaactccttcattactcagtacagcactggccaggtgtcggtgcagattgactgggagatccagaaggagcggtccaaacgctggaaccccgaggtccagtttacctccaactacggacagcaaaactctctgttgtgggctcccgatgcggctgggaaatacactgagcctagggctatcggtacccgctacctcacccaccacctgtaataa

SEQ ID NO: 5131 - DNA, 2208 bp, Adeno-associated virus 4
  misc_feature 750: note = a, c, t or g
  source 1..2208: mol_type = genomic DNA
atgactgacggttaccttccagattggctagaggacaacctctctgaaggcgttcgagagtggtgggcgctgcaacctggagcccctaaacccaaggcaaatcaacaacatcaggacaacgctcggggtcttgtgcttccgggttacaaatacctcggacccggcaacggactcgacaagggggaacccgtcaacgcagcggacgcggcagccctcgagcacgacaaggcctacgaccagcagctcaaggccggtgacaacccctacctcaagtacaaccacgccgacgcggagttccagcagcggcttcagggcgacacatcgtttgggggcaacctcggcagagcagtcttccaggccaaaaagagggttcttgaacctcttggtctggttgagcaagcgggtgagacggctcctggaaagaagagaccgttgattgaatccccccagcagcccgactcctccacgggtatcggcaaaaaaggcaagcagccggctaaaaagaagctcgttttcgaagacgaaactggagcaggcgacggaccccctgagggatcaacttccggagccatgtctgatgacagtgagatgcgtgcagcagctggcggagctgcagtcgagggsggacaaggtgccgatggagtgggtaatgcctcgggtgattggcattgcgattccacctggtctgagggccacgtcacgaccaccagcaccagaacctgggtcttgcccacctacaacaaccacctntacaagcgactcggagagagcctgcagtccaacacctacaacggattctccaccccctggggatactttgacttcaaccgcttccactgccacttctcaccacgtgactggcagcgactcatcaacaacaactggggcatgcgacccaaagccatgcgggtcaaaatcttcaacatccaggtcaaggaggtcacgacgtcgaacggcgagacaacggtggctaataaccttaccagcacggttcagatctttgcggactcgtcgtacgaactgccgtacgtgatggatgcgggtcaagagggcagcctgcctccttttcccaacgacgtctttatggtgccccagtacggctactgtggactggtgaccggcaacacttcgcagcaacagactgacagaaatgccttctactgcctggagtactttccttcgcagatgctgcggactggcaacaactttgaaattacgtacagttttgagaaggtgcctttccactcgatgtacgcgcacagccagagcctggaccggctgatgaaccctctcatcgaccagtacctgtggggactgcaatcgaccaccaccggaaccaccctgaatgccgggactgccaccaccaactttaccaagctgcggcctaccaacttttccaactttaaaaagaactggctgcccgggccttcaatcaagcagcagggcttctcaaagactgccaatcaaaactacaagatccctgccaccgggtcagacagtctcatcaaatacgagacgcacagcactctggacggaagatggagtgccctgacccccggacctccaatggccacggctggacctgcggacagcaagttcagcaacagccagctcatctttgcggggcctaaacagaacggcaacacggccaccgtacccgggactctgatcttcacctctgaggaggagctggcagccaccaacgccaccgatacggacatgtggggcaacctacctggcggtgaccagagcaacagcaacctgccgaccgtggacagactgacagccttgggagccgtgcctggaatggtctggcaaaacagagacatttactaccagggtcccatttgggccaagattcctcataccgatggacactttcacccctcaccgctgattggtgggtttgggctgaaacacccgcctcctcaaatttttatcaagaacaccccggtacctgcgaatcctgcaacgaccttcagctctactccggtaaactccttcattactcagtacagcactggccaggtgtcggtgcagattgactgggagatccagaaggagcggtccaaacgctggaaccccgaggtccagtttacctccaactacggacagcaaaactctctgttgtgggctcccgatgcggctgggaaatacactgagcctagggctatcggtacccgctacctcacccaccacctgtaataa

SEQ ID NO: 5132 - DNA, 1872 bp, Adeno-associated virus 4
  source 1..1872: mol_type = genomic DNA
atgccggggttctacgagatcgtgctgaaggtgcccagcgacctggacgagcacctgcccggcatttctgactcttttgtgagctgggtggccgagaaggaatgggagctgccgccggattctgacatggacttgaatctgattgagcaggcacccctgaccgtggccgaaaagctgcaacgcgagttcctggtcgagtggcgccgcgtgagtaaggccccggaggccctcttctttgtccagttcgagaagggggacagctacttccacctgcacatcctggtggagaccgtgggcgtcaaatccatggtggtgggccgctacgtgagccagattaaagagaagctggtgacccgcatctaccgcggggtcgagccgcagcttccgaactggttcgcggtgaccaagacgcgtaatggcgccggaggcgggaacaaggtggtggacgactgctacatccccaactacctgctccccaagacccagcccgagctccagtgggcgtggactaacatggaccagtatataagcgcctgtttgaatctcgcggagcgtaaacggctggtggcgcagcatctgacgcacgtgtcgcagacgcaggagcagaacaaggaaaaccagaaccccaattctgacgcgccggtcatcaggtcaaaaacctccgccaggtacatggagctggtcgggtggctggtggaccgcgggatcacgtcagaaaagcaatggatccaggaggaccaggcgtcctacatctccttcaacgccgcctccaactcgcggtcacaaatcaaggccgcgctggacaatgcctccaaaatcatgagcctgacaaagacggctccggactacctggtgggccagaacccgccggaggacatttccagcaaccgcatctaccgaatcctcgagatgaacgggtacgatccgcagtacgcggcctccgtcttcctgggctgggcgcaaaagaagttcgggaagaggaacaccatctggctctttgggccggccacgacgggtaaaaccaacatcgcggaagccatcgcccacgccgtgcccttctacggctgcgtgaactggaccaatgagaactttccgttcaacgattgcgtcgacaagatggtgatctggtgggaggagggcaagatgacggccaaggtcgtagagagcgccaaggccatcctgggcggaagcaaggtgcgcgtggaccaaaagtgcaagtcatcggcccagatcgacccaactcccgtgatcgtcacctccaacaccaacatgtgcgcggtcatcgacggaaactcgaccaccttcgagcaccaacaaccactccaggaccggatgttcaagttcgagctcaccaagcgcctggagcacgactttggcaaggtcaccaagcaggaagtcaaagactttttccggtgggcgtcagatcacgtgaccgaggtgactcacgagttttacgtcagaaagggtggagctagaaagaggcccgcccccaatgacgcagatataagtgagcccaagcgggcctgtccgtcagttgcgcagccatcgacgtcagacgcggaagctccggtggactacgcggacaggtaccaaaacaaatgttctcgtcacgtgggtatgaatctgatgctttttccctgccggcaatgcgagagaatgaatcagaatgtggacatttgcttcacgcacggggtcatggactgtgccgagtgcttccccgtgtcagaatctcaacccgtgtctgtcgtcagaaagcggacgtatcagaaactgtgtccgattcatcacatcatggggagggcgcccgaggtggcctgctcggcctgcgaactggccaatgtggacttggatgactgtgacatggaacaataa

SEQ ID NO: 5133 - DNA, 1611 bp, Adeno-associated virus 4
  source 1..1611: mol_type = genomic DNA
atgccggggttctacgagatcgtgctgaaggtgcccagcgacctggacgagcacctgcccggcatttctgactcttttgtgagctgggtggccgagaaggaatgggagctgccgccggattctgacatggacttgaatctgattgagcaggcacccctgaccgtggccgaaaagctgcaacgcgagttcctggtcgagtggcgccgcgtgagtaaggccccggaggccctcttctttgtccagttcgagaagggggacagctacttccacctgcacatcctggtggagaccgtgggcgtcaaatccatggtggtgggccgctacgtgagccagattaaagagaagctggtgacccgcatctaccgcggggtcgagccgcagcttccgaactggttcgcggtgaccaagacgcgtaatggcgccggaggcgggaacaaggtggtggacgactgctacatccccaactacctgctccccaagacccagcccgagctccagtgggcgtggactaacatggaccagtatataagcgcctgtttgaatctcgcggagcgtaaacggctggtggcgcagcatctgacgcacgtgtcgcagacgcaggagcagaacaaggaaaaccagaaccccaattctgacgcgccggtcatcaggtcaaaaacctccgccaggtacatggagctggtcgggtggctggtggaccgcgggatcacgtcagaaaagcaatggatccaggaggaccaggcgtcctacatctccttcaacgccgcctccaactcgcggtcacaaatcaaggccgcgctggacaatgcctccaaaatcatgagcctgacaaagacggctccggactacctggtgggccagaacccgccggaggacatttccagcaaccgcatctaccgaatcctcgagatgaacgggtacgatccgcagtacgcggcctccgtcttcctgggctgggcgcaaaagaagttcgggaagaggaacaccatctggctctttgggccggccacgacgggtaaaaccaacatcgcggaagccatcgcccacgccgtgcccttctacggctgcgtgaactggaccaatgagaactttccgttcaacgattgcgtcgacaagatggtgatctggtgggaggagggcaagatgacggccaaggtcgtagagagcgccaaggccatcctgggcggaagcaaggtgcgcgtggaccaaaagtgcaagtcatcggcccagatcgacccaactcccgtgatcgtcacctccaacaccaacatgtgcgcggtcatcgacggaaactcgaccaccttcgagcaccaacaaccactccaggaccggatgttcaagttcgagctcaccaagcgcctggagcacgactttggcaaggtcaccaagcaggaagtcaaagactttttccggtgggcgtcagatcacgtgaccgaggtgactcacgagttttacgtcagaaagggtggagctagaaagaggcccgcccccaatgacgcagatataagtgagcccaagcgggcctgtccgtcagttgcgcagccatcgacgtcagacgcggaagctccggtggactacgcggacagattggctagaggacaacctctctga

SEQ ID NO: 5134 - DNA, 1872 bp, Adeno-associated virus 4; identical to SEQ ID NO: 5132
  source 1..1872: mol_type = genomic DNA

SEQ ID NO: 5135 - DNA, 1617 bp, Adeno-associated virus 4
  misc_feature 162: note = a, c, t or g
  source 1..1617: mol_type = genomic DNA
atgcgtgcagcagctggcggagctgcagtcgagggsggacaaggtgccgatggagtgggtaatgcctcgggtgattggcattgcgattccacctggtctgagggccacgtcacgaccaccagcaccagaacctgggtcttgcccacctacaacaaccacctntacaagcgactcggagagagcctgcagtccaacacctacaacggattctccaccccctggggatactttgacttcaaccgcttccactgccacttctcaccacgtgactggcagcgactcatcaacaacaactggggcatgcgacccaaagccatgcgggtcaaaatcttcaacatccaggtcaaggaggtcacgacgtcgaacggcgagacaacggtggctaataaccttaccagcacggttcagatctttgcggactcgtcgtacgaactgccgtacgtgatggatgcgggtcaagagggcagcctgcctccttttcccaacgacgtctttatggtgccccagtacggctactgtggactggtgaccggcaacacttcgcagcaacagactgacagaaatgccttctactgcctggagtactttccttcgcagatgctgcggactggcaacaactttgaaattacgtacagttttgagaaggtgcctttccactcgatgtacgcgcacagccagagcctggaccggctgatgaaccctctcatcgaccagtacctgtggggactgcaatcgaccaccaccggaaccaccctgaatgccgggactgccaccaccaactttaccaagctgcggcctaccaacttttccaactttaaaaagaactggctgcccgggccttcaatcaagcagcagggcttctcaaagactgccaatcaaaactacaagatccctgccaccgggtcagacagtctcatcaaatacgagacgcacagcactctggacggaagatggagtgccctgacccccggacctccaatggccacggctggacctgcggacagcaagttcagcaacagccagctcatctttgcggggcctaaacagaacggcaacacggccaccgtacccgggactctgatcttcacctctgaggaggagctggcagccaccaacgccaccgatacggacatgtggggcaacctacctggcggtgaccagagcaacagcaacctgccgaccgtggacagactgacagccttgggagccgtgcctggaatggtctggcaaaacagagacatttactaccagggtcccatttgggccaagattcctcataccgatggacactttcacccctcaccgctgattggtgggtttgggctgaaacacccgcctcctcaaatttttatcaagaacaccccggtacctgcgaatcctgcaacgaccttcagctctactccggtaaactccttcattactcagtacagcactggccaggtgtcggtgcagattgactgggagatccagaaggagcggtccaaacgctggaaccccgaggtccagtttacctccaactacggacagcaaaactctctgttgtgggctcccgatgcggctgggaaatacactgagcctagggctatcggtacccgctacctcacccaccacctgtaa

SEQ ID NO: 5136 - DNA, 939 bp, Adeno-associated virus 4
  source 1..939: mol_type = genomic DNA
atggagctggtcgggtggctggtggaccgcgggatcacgtcagaaaagcaatggatccaggaggaccaggcgtcctacatctccttcaacgccgcctccaactcgcggtcacaaatcaaggccgcgctggacaatgcctccaaaatcatgagcctgacaaagacggctccggactacctggtgggccagaacccgccggaggacatttccagcaaccgcatctaccgaatcctcgagatgaacgggtacgatccgcagtacgcggcctccgtcttcctgggctgggcgcaaaagaagttcgggaagaggaacaccatctggctctttgggccggccacgacgggtaaaaccaacatcgcggaagccatcgcccacgccgtgcccttctacggctgcgtgaactggaccaatgagaactttccgttcaacgattgcgtcgacaagatggtgatctggtgggaggagggcaagatgacggccaaggtcgtagagagcgccaaggccatcctgggcggaagcaaggtgcgcgtggaccaaaagtgcaagtcatcggcccagatcgacccaactcccgtgatcgtcacctccaacaccaacatgtgcgcggtcatcgacggaaactcgaccaccttcgagcaccaacaaccactccaggaccggatgttcaagttcgagctcaccaagcgcctggagcacgactttggcaaggtcaccaagcaggaagtcaaagactttttccggtgggcgtcagatcacgtgaccgaggtgactcacgagttttacgtcagaaagggtggagctagaaagaggcccgcccccaatgacgcagatataagtgagcccaagcgggcctgtccgtcagttgcgcagccatcgacgtcagacgcggaagctccggtggactacgcggacagattggctagaggacaacctctctga

SEQ ID NO: 5137 - DNA, 1197 bp, Adeno-associated virus 4
  source 1..1197: mol_type = genomic DNA
atggagctggtcgggtggctggtggaccgcgggatcacgtcagaaaagcaatggatccaggaggaccaggcgtcctacatctccttcaacgccgcctccaactcgcggtcacaaatcaaggccgcgctggacaatgcctccaaaatcatgagcctgacaaagacggctccggactacctggtgggccagaacccgccggaggacatttccagcaaccgcatctaccgaatcctcgagatgaacgggtacgatccgcagtacgcggcctccgtcttcctgggctgggcgcaaaagaagttcgggaagaggaacaccatctggctctttgggccggccacgacgggtaaaaccaacatcgcggaagccatcgcccacgccgtgcccttctacggctgcgtgaactggaccaatgagaactttccgttcaacgattgcgtcgacaagatggtgatctggtgggaggagggcaagatgacggccaaggtcgtagagagcgccaaggccatcctgggcggaagcaaggtgcgcgtggaccaaaagtgcaagtcatcggcccagatcgacccaactcccgtgatcgtcacctccaacaccaacatgtgcgcggtcatcgacggaaactcgaccaccttcgagcaccaacaaccactccaggaccggatgttcaagttcgagctcaccaagcgcctggagcacgactttggcaaggtcaccaagcaggaagtcaaagactttttccggtgggcgtcagatcacgtgaccgaggtgactcacgagttttacgtcagaaagggtggagctagaaagaggcccgcccccaatgacgcagatataagtgagcccaagcgggcctgtccgtcagttgcgcagccatcgacgtcagacgcggaagctccggtggactacgcggacaggtaccaaaacaaatgttctcgtcacgtgggtatgaatctgatgctttttccctgccggcaatgcgagagaatgaatcagaatgtggacatttgcttcacgcacggggtcatggactgtgccgagtgcttccccgtgtcagaatctcaacccgtgtctgtcgtcagaaagcggacgtatcagaaactgtgtccgattcatcacatcatggggagggcgcccgaggtggcctgctcggcctgcgaactggccaatgtggacttggatgactgtgacatggaacaa

SEQ ID NO: 5138 - DNA, 245 bp, Adeno-associated virus 4
  source 1..245: mol_type = genomic DNA
ctccatcatctaggtttgcccactgacgtcaatgtgacgtcctagggttagggaggtccctgtattagcagtcacgtgagtgtcgtatttcgcggagcgtagcggagcgcataccaagctgccacgtcacagccacgtggtccgtttgcgacagtttgcgacaccatgtggtcaggagggtatataaccgcgagtgagccagcgaggagctccattttgcccgcgaattttgaacgagcagcagc

SEQ ID NO: 5139 - protein, 313 aa, Adeno-associated virus 4
  MOD_RES 313: note = Any amino acid
MELVGWLVDRGITSEKQWIQEDQASYISFNAASNSRSQIKAALDNASKIMSLTKTAPDYLVGQNPPEDISSNRIYRILEMNGYDPQYAASVFLGWAQKKFGKRNTIWLFGPATTGKTNIAEAIAHAVPFYGCVNWTNENFPFNDCVDKMVIWWEEGKMTAKVVESAKAILGGSKVRVDQKCKSSAQIDPTPVIVTSNTNMCAVIDGNSTTFEHQQPLQDRMFKFELTKRLEHDFGKVTKQEVKDFFRWASDHVTEVTHEFYVRKGGARKRPAPNDADISEPKRACPSVAQPSTSDAEAPVDYADRLARGQPLX

SEQ ID NO: 5140 - protein, 399 aa, Adeno-associated virus 4
MELVGWLVDRGITSEKQWIQEDQASYISFNAASNSRSQIKAALDNASKIMSLTKTAPDYLVGQNPPEDISSNRIYRILEMNGYDPQYAASVFLGWAQKKFGKRNTIWLFGPATTGKTNIAEAIAHAVPFYGCVNWTNENFPFNDCVDKMVIWWEEGKMTAKVVESAKAILGGSKVRVDQKCKSSAQIDPTPVIVTSNTNMCAVIDGNSTTFEHQQPLQDRMFKFELTKRLEHDFGKVTKQEVKDFFRWASDHVTEVTHEFYVRKGGARKRPAPNDADISEPKRACPSVAQPSTSDAEAPVDYADRYQNKCSRHVGMNLMLFPCRQCERMNQNVDICFTHGVMDCAECFPVSESQPVSVVRKRTYQKLCPIHHIMGRAPEVACSACELANVDLDDCDMEQ

SEQ ID NO: 5141 - protein, 623 aa, Adeno-associated virus 4
MPGFYEIVLKVPSDLDEHLPGISDSFVSWVAEKEWELPPDSDMDLNLIEQAPLTVAEKLQREFLVEWRRVSKAPEALFFVQFEKGDSYFHLHILVETVGVKSMVVGRYVSQIKEKLVTRIYRGVEPQLPNWFAVTKTRNGAGGGNKVVDDCYIPNYLLPKTQPELQWAWTNMDQYISACLNLAERKRLVAQHLTHVSQTQEQNKENQNPNSDAPVIRSKTSARYMELVGWLVDRGITSEKQWIQEDQASYISFNAASNSRSQIKAALDNASKIMSLTKTAPDYLVGQNPPEDISSNRIYRILEMNGYDPQYAASVFLGWAQKKFGKRNTIWLFGPATTGKTNIAEAIAHAVPFYGCVNWTNENFPFNDCVDKMVIWWEEGKMTAKVVESAKAILGGSKVRVDQKCKSSAQIDPTPVIVTSNTNMCAVIDGNSTTFEHQQPLQDRMFKFELTKRLEHDFGKVTKQEVKDFFRWASDHVTEVTHEFYVRKGGARKRPAPNDADISEPKRACPSVAQPSTSDAEAPVDYADRYQNKCSRHVGMNLMLFPCRQCERMNQNVDICFTHGVMDCAECFPVSESQPVSVVRKRTYQKLCPIHHIMGRAPEVACSACELANVDLDDCDMEQ

SEQ ID NO: 5142 - protein, 537 aa, Adeno-associated virus 4
  MOD_RES 537: note = Any amino acid
MPGFYEIVLKVPSDLDEHLPGISDSFVSWVAEKEWELPPDSDMDLNLIEQAPLTVAEKLQREFLVEWRRVSKAPEALFFVQFEKGDSYFHLHILVETVGVKSMVVGRYVSQIKEKLVTRIYRGVEPQLPNWFAVTKTRNGAGGGNKVVDDCYIPNYLLPKTQPELQWAWTNMDQYISACLNLAERKRLVAQHLTHVSQTQEQNKENQNPNSDAPVIRSKTSARYMELVGWLVDRGITSEKQWIQEDQASYISFNAASNSRSQIKAALDNASKIMSLTKTAPDYLVGQNPPEDISSNRIYRILEMNGYDPQYAASVFLGWAQKKFGKRNTIWLFGPATTGKTNIAEAIAHAVPFYGCVNWTNENFPFNDCVDKMVIWWEEGKMTAKVVESAKAILGGSKVRVDQKCKSSAQIDPTPVIVTSNTNMCAVIDGNSTTFEHQQPLQDRMFKFELTKRLEHDFGKVTKQEVKDFFRWASDHVTEVTHEFYVRKGGARKRPAPNDADISEPKRACPSVAQPSTSDAEAPVDYADRLARGQPLX

SEQ ID NO: 5143 - protein, 623 aa, Adeno-associated virus 4; identical to SEQ ID NO: 5141

SEQ ID NO: 5144 - protein, 544 aa, Adeno-associated virus 4
MSDDSEMRAAAGGAAVEGGQGADGVGNASGDWHCDSTWSEGHVTTTSTRTWVLPTYNNHLYKRLGESLQSNTYNGFSTPWGYFDFNRFHCHFSPRDWQRLINNNWGMRPKAMRVKIFNIQVKEVTTSNGETTVANNLTSTVQIFADSSYELPYVMDAGQEGSLPPFPNDVFMVPQYGYCGLVTGNTSQQQTDRNAFYCLEYFPSQMLRTGNNFEITYSFEKVPFHSMYAHSQSLDRLMNPLIDQYLWGLQSTTTGTTLNAGTATTNFTKLRPTNFSNFKKNWLPGPSIKQQGFSKTANQNYKIPATGSDSLIKYETHSTLDGRWSALTPGPPMATAGPADSKFSNSQLIFAGPKQNGNTATVPGTLIFTSEEELAATNATDTDMWGNLPGGDQSNSNLPTVDRLTALGAVPGMVWQNRDIYYQGPIWAKIPHTDGHFHPSPLIGGFGLKHPPPQIFIKNTPVPANPATTFSSTPVNSFITQYSTGQVSVQIDWEIQKERSKRWNPEVQFTSNYGQQNSLLWAPDAAGKYTEPRAIGTRYLTHHL

SEQ ID NO: 5145 - protein, 734 aa, Adeno-associated virus 4; identical to SEQ ID NO: 4791

SEQ ID NO: 5146 - protein, 598 aa, Adeno-associated virus 4
TAPGKKRPLIESPQQPDSSTGIGKKGKQPAKKKLVFEDETGAGDGPPEGSTSGAMSDDSEMRAAAGGAAVEGGQGADGVGNASGDWHCDSTWSEGHVTTTSTRTWVLPTYNNHLYKRLGESLQSNTYNGFSTPWGYFDFNRFHCHFSPRDWQRLINNNWGMRPKAMRVKIFNIQVKEVTTSNGETTVANNLTSTVQIFADSSYELPYVMDAGQEGSLPPFPNDVFMVPQYGYCGLVTGNTSQQQTDRNAFYCLEYFPSQMLRTGNNFEITYSFEKVPFHSMYAHSQSLDRLMNPLIDQYLWGLQSTTTGTTLNAGTATTNFTKLRPTNFSNFKKNWLPGPSIKQQGFSKTANQNYKIPATGSDSLIKYETHSTLDGRWSALTPGPPMATAGPADSKFSNSQLIFAGPKQNGNTATVPGTLIFTSEEELAATNATDTDMWGNLPGGDQSNSNLPTVDRLTALGAVPGMVWQNRDIYYQGPIWAKIPHTDGHFHPSPLIGGFGLKHPPPQIFIKNTPVPANPATTFSSTPVNSFITQYSTGQVSVQIDWEIQKERSKRWNPEVQFTSNYGQQNSLLWAPDAAGKYTEPRAIGTRYLTHHL

SEQ ID NO: 5147 - DNA, 129 bp, Adeno-associated virus 4
  source 1..129: mol_type = genomic DNA
ttggccactccctctatgcgcgctcgctcactcactcggccctgcggccagaggccggcagtctggagacctttggtgtccagggcagggccgagtgagtgagcgagcgcgcatagagggagtggccaa

SEQ ID NO: 5148 - DNA, 125 bp, Adeno-associated virus 4
  source 1..125: mol_type = genomic DNA
ttggccactccctctatgcgcgctcgctcactcactcggccctggagaccaaaggtctccagactgccggcctctggccggcagggccgagtgagtgagcgagcgcgcatagagggagtggccaa

SEQ ID NO: 5149 - DNA, 4768 bp, Adeno-associated virus 4
  misc_feature 3009: note = a, c, t or g
  source 1..4768: mol_type = genomic DNA
ttggccactccctctatgcgcgctcgctcactcactcggccctggagaccaaaggtctccagactgccggcctctggccggcagggccgagtgagtgagcgagcgcgcatagagggagtggccaactccatcatctaggtttgcccactgacgtcaatgtgacgtcctagggttagggaggtccctgtattagcagtcacgtgagtgtcgtatttcgcggagcgtagcggagcgcataccaagctgccacgtcacagccacgtggtccgtttgcgacagtttgcgacaccatgtggtcaggagggtatataaccgcgagtgagccagcgaggagctccattttgcccgcgaattttgaacgagcagcagccatgccggggttctacgagatcgtgctgaaggtgcccagcgacctggacgagcacctgcccggcatttctgactcttttgtgagctgggtggccgagaaggaatgggagctgccgccggattctgacatggacttgaatctgattgagcaggcacccctgaccgtggccgaaaagctgcaacgcgagttcctggtcgagtggcgccgcgtgagtaaggccccggaggccctcttctttgtccagttcgagaagggggacagctacttccacctgcacatcctggtggagaccgtgggcgtcaaatccatggtggtgggccgctacgtgagccagattaaagagaagctggtgacccgcatctaccgcggggtcgagccgcagcttccgaactggttcgcggtgaccaagacgcgtaatggcgccggaggcgggaacaaggtggtggacgactgctacatccccaactacctgctccccaagacccagcccgagctccagtgggcgtggactaacatggaccagtatataagcgcctgtttgaatctcgcggagcgtaaacggctggtggcgcagcatctgacgcacgtgtcgcagacgcaggagcagaacaaggaaaaccagaaccccaattctgacgcgccggtcatcaggtcaaaaacctccgccaggtacatggagctggtcgggtggctggtggaccgcgggatcacgtcagaaaagcaatggatccaggaggaccaggcgtcctacatctccttcaacgccgcctccaactcgcggtcacaaatcaaggccgcgctggacaatgcctccaaaatcatgagcctgacaaagacggctccggactacctggtgggccagaacccgccggaggacatttccagcaaccgcatctaccgaatcctcgagatgaacgggtacgatccgcagtacgcggcctccgtcttcctgggctgggcgcaaaagaagttcgggaagaggaacaccatctggctctttgggccggccacgacgggtaaaaccaacatcgcggaagccatcgcccacgccgtgcccttctacggctgcgtgaactggaccaatgagaactttccgttcaacgattgcgtcgacaagatggtgatctggtgggaggagggcaagatgacggccaaggtcgtagagagcgccaaggccatcctgggcggaagcaaggtgcgcgtggaccaaaagtgcaagtcatcggcccagatcgacccaactcccgtgatcgtcacctccaacaccaacatgtgcgcggtcatcgacggaaactcgaccaccttcgagcaccaacaaccactccaggaccggatgttcaagttcgagctcaccaagcgcctggagcacgactttggcaaggtcaccaagcaggaagtcaaagactttttccggtgggcgtcagatcacgtgaccgaggtgactcacgagttttacgtcagaaagggtggagctagaaagaggcccgcccccaatgacgcagatataagtgagcccaagcgggcctgtccgtcagttgcgcagccatcgacgtcagacgcggaagctccggtggactacgcggacaggtaccaaaacaaatgttctcgtcacgtgggtatgaatctgatgctttttccctgccggcaatgcgagagaatgaatcagaatgtggacatttgcttcacgcacggggtcatggactgtgccgagtgcttccccgtgtcagaatctcaacccgtgtctgtcgtcagaaagcggacgtatcagaaactgtgtccgattcatcacatcatggggagggcgcccgaggtggcctgctcggcctgcgaactggccaatgtggacttggatgactgtgacatggaacaataaatgactcaaaccagatatgactgacggttaccttccagattggctagaggacaacctctctgaaggcgttcgagagtggtgggcgctgcaacctggagcccctaaacccaaggcaaatcaacaacatcaggacaacgctcggggtcttgtgcttccgggttacaaatacctcggacccggcaacggactcgacaagggggaacccgtcaacgcagcggacgcggcagccctcgagcacgacaaggcctacgaccagcagctcaaggccggtgacaacccctacctcaagtacaaccacgccgacgcggagttccagcagcggcttcagggcgacacaccgtttgggggcaacctcggcagagcagtcttccaggccaaaaagagggttcttgaacctcttggtctggttgagcaagcgggtgagacggctcctggaaagaagagaccgttgattgaatccccccagcagcccgactcctccacgggtatcggcaaaaaaggcaagcagccggctaaaaagaagctcgttttcgaagacgaaactggagcaggcgacggaccccctgagggatcaacttccggagccatgtctgatgacagtgagatgcgtgcagcagctggcggagctgcagtcgagggsggacaaggtgccgatggagtgggtaatgcctcgggtgattggcattgcgattccacctggtctgagggccacgtcacgaccaccagcaccagaacctgggtcttgcccacctacaacaaccacctntacaagcgactcggagagagcctgcagtccaacacctacaacggattctccaccccctggggatactttgacttcaaccgcttccactgccacttctcaccacgtgactggcagcgactcatcaacaacaactggggcatgcgacccaaagccatgcgggtcaaaatcttcaacatccaggtcaaggaggtcacgacgtcgaacggcgagacaacggtggctaataaccttaccagcacggttcagatctttgcggactcgtcgtacgaactgccgtacgtgatggatgcgggtcaagagggcagcctgcctccttttcccaacgacgtctttatggtgccccagtacggctactgtggactggtgaccggcaacacttcgcagcaacagactgacagaaatgccttctactgcctggagtactttccttcgcagatgctgcggactggcaacaactttgaaattacgtacagttttgagaaggtgcctttccactcgatgtacgcgcacagccagagcctggaccggctgatgaaccctctcatcgaccagtacctgtggggactgcaatcgaccaccaccggaaccaccctgaatgccgggactgccaccaccaactttaccaagctgcggcctaccaacttttccaactttaaaaagaactggctgcccgggccttcaatcaagcagcagggcttctcaaagactgccaatcaaaactacaagatccctgccaccgggtcagacagtctcatcaaatacgagacgcacagcactctggacggaagatggagtgccctgacccccggacctccaatggccacggctggacctgcggacagcaagttcagcaacagccagctcatctttgcggggcctaaacagaacggcaacacggccaccgtacccgggactctgatcttcacctctgaggaggagctggcagccaccaacgccaccgatacggacatgtggggcaacctacctggcggtgaccagagcaacagcaacctgccgaccgtggacagactgacagccttgggagccgtgcctggaatggtctggcaaaacagagacatttactaccagggtcccatttgggccaagattcctcataccgatggacactttcacccctcaccgctgattggtgggtttgggctgaaacacccgcctcctcaaatttttatcaagaacaccccggtacctgcgaatcctgcaacgaccttcagctctactccggtaaactccttcattactcagtacagcactggccaggtgtcggtgcagattgactgggagatccagaaggagcggtccaaacgctggaaccccgaggtccagtttacctccaactacggacagcaaaactctctgttgtgggctcccgatgcggctgggaaatacactgagcctagggctatcggtacccgctacctcacccaccacctgtaataacctgttaatcaataaaccggtttattcgtttcagttgaactttggtctccgtgtccttcttatcttatctcgtttccatggctactgcgtacataagcagcggcctgcggcgcttgcgcttcgcggtttacaactgccggttaatcagtaacttctggcaaaccatgatgatggagttggccactccctctatgcgcgctcgctcactcactcggccctggagaccaaaggtctccagactgccggcctctggccggcagggccgagtgagtgagcgagcgcgcatagagggagtggccaa

SEQ ID NO: 5150 - protein, 725 aa, Adeno-associated virus 5
MAADGYLPDWLEDTLSEGIRQWWKLKPGPPPPKPAERHKDDSRGLVLPGYKYLGPFNGLDKGEPVNEADAAALEHDKAYDRQLDSGDNPYLKYNHADAEFQERLKEDTSFGGNLGRAVFQAKKRVLEPFGLVEEGAKTAPTGKRIDDHFPKRKKARTEEDSKPSTSSDAEAGPSGSQQLQIPAQPASSLGADTMSAGGGGPLGDNNQGADGVGNASGDWHCDSTWMGDRVVTKSTRTWVLPSYNNHQYREIKSGSVDGSNANAYFGYSTPWGYFDFNRFHSHWSPRDWQRLINNYWGFRPRSLRVKIFNIQVKEVTVQDSTTTIANNLTSTVQVFTDDDYQLPYVVGNGTEGCLPAFPPQVFTLPQYGYATLNRDNTENPTERSSFFCLEYFPSKMLRTGNNFEFTYNFEEVPFHSSFAPSQNLFKLANPLVDQYLYRFVSTNNTGGVQFNKNLAGRYANTYKNWFPGPMGRTQGWNLGSGVNRASVSAFATTNRMELEGASYQVPPQPNGMTNNLQGSNTYALENTMIFNSQPANPGTTATYLEGNMLITSESETQPVNRVAYNVGGQMATNNQSSTTAPTTGTYNLQEIVPGSVWMERDVYLQGPIWAKIPETGAHFHPSPAMGGFGLKHPPPMMLIKNTPVPGNITSFSDVPVSSFITQYSTGQVTVEMEWELKKENSKRWNPEIQYTNNYNDPQFVDFAPDSTGEYRTTRPIGTRYLTRPL

SEQ ID NO: 5151 - protein, 724 aa, Adeno-associated virus 5
MSFVDHPPDWLEEVGEGLREFLGLEAGPPKPKPNQQHQDQARGLVLPGYNYLGPGNGLDRGEPVNRADEVAREHDISYNEQLEAGDNPYLKYNHADAEFQEKLADDTSFGGNLGKAVFQAKKRVLEPFGLVEEGAKTAPTGKRIDDHFPKRKKARTEEDSKPSTSSDAEAGPSGSQQLQIPAQPASSLGADTMSAGGGGPLGDNNQGADGVGNASGDWHCDSTWMGDRVVTKSTRTWVLPSYNNHQYREIKSGSVDGSNANAYFGYSTPWGYFDFNRFHSHWSPRDWQRLINNYWGFRPRSLRVKIFNIQVKEVTVQDSTTTIANNLTSTVQVFTDDDYQLPYVVGNGTEGCLPAFPPQVFTLPQYGYATLNRDNTENPTERSSFFCLEYFPSKMLRTGNNFEFTYNFEEVPFHSSFAPSQNLFKLANPLVDQYLYRFVSTNNTGGVQFNKNLAGRYANTYKNWFPGPMGRTQGWNLGSGVNRASVSAFATTNRMELEGASYQVPPQPNGMTNNLQGSNTYALENTMIFNSQPANPGTTATYLEGNMLITSESETQPVNRVAYNVGGQMATNNQSSTTAPATGTYNLQEIVPGSVWMERDVYLQGPIWAKIPETGAHFHPSPAMGGFGLKHPPPMMLIKNTPVPGNITSFSDVPVSSFITQYSTGQVTVEMEWELKKENSKRWNPEIQYTNNYNDPQFVDFAPDSTGEYRTTRPIGTRYLTRPL

SEQ ID NO: 5152 - DNA, 2175 bp, Adeno-associated virus 5
  source 1..2175: mol_type = genomic DNA
atgtcttttgttgatcaccctccagattggttggaagaagttggtgaaggtcttcgcgagtttttgggccttgaagcgggcccaccgaaaccaaaacccaatcagcagcatcaagatcaagcccgtggtcttgtgctgcctggttataactatctcggacccggaaacggtctcgatcgaggagagcctgtcaacagggcagacgaggtcgcgcgagagcacgacatctcgtacaacgagcagcttgaggcgggagacaacccctacctcaagtacaaccacgcggacgccgagtttcaggagaagctcgccgacgacacatccttcgggggaaacctcggaaaggcagtctttcaggccaagaaaagggttctcgaaccttttggcctggttgaagagggtgctaagacggcccctaccggaaagcggatagacgaccactttccaaaaagaaagaaggctcggaccgaagaggactccaagccttccacctcgtcagacgccgaagctggacccagcggatcccagcagctgcaaatcccagcccaaccagcctcaagtttgggagctgatacaatgtctgcgggaggtggcggcccattgggcgacaataaccaaggtgccgatggagtgggcaatgcctcgggagattggcattgcgattccacgtggatgggggacagagtcgtcaccaagtccacccgaacctgggtgctgcccagctacaacaaccaccagtaccgagagatcaaaagcggctccgtcgacggaagcaacgccaacgcctactttggatacagcaccccctgggggtactttgactttaaccgcttccacagccactggagcccccgagactggcaaagactcatcaacaactactggggcttcagaccccggtccctcagagtcaaaatcttcaacattcaagtcaaagaggtcacggtgcaggactccaccaccaccatcgccaacaacctcacctccaccgtccaagtgtttacggacgacgactaccagctgccctacgtcgtcggcaacgggaccgagggatgcctgccggccttccctccgcaggtctttacgctgccgcagtacggttacgcgacgctgaaccgcgacaacacagaaaatcccaccgagaggagcagcttcttctgcctagagtactttcccagcaagatgctgagaacgggcaacaactttgagtttacctacaactttgaggaggtgcccttccactccagcttcgctcccagtcagaacctgttcaagctggccaacccgctggtggaccagtacttgtaccgcttcgtgagcacaaataacactggcggagtccagttcaacaagaacctggccgggagatacgccaacacctacaaaaactggttcccggggcccatgggccgaacccagggctggaacctgggctccggggtcaaccgcgccagtgtcagcgccttcgccacgaccaataggatggagctcgagggcgcgagttaccaggtgcccccgcagccgaacggcatgaccaacaacctccagggcagcaacacctatgccctggagaacactatgatcttcaacagccagccggcgaacccgggcaccaccgccacgtacctcgagggcaacatgctcatcaccagcgagagcgagacgcagccggtgaaccgcgtggcgtacaacgtcggcgggcagatggccaccaacaaccagagctccaccactgcccccgcgaccggcacgtacaacctccaggaaatcgtgcccggcagcgtgtggatggagagggacgtgtacctccaaggacccatctgggccaagatcccagagacgggggcgcactttcacccctctccggccatgggcggattcggactcaaacacccaccgcccatgatgctcatcaagaacacgcctgtgcccggaaatatcaccagcttctcggacgtgcccgtcagcagcttcatcacccagtacagcaccgggcaggtcaccgtggagatggagtgggagctcaagaaggaaaactccaagaggtggaacccagagatccagtacacaaacaactacaacgacccccagtttgtggactttgccccggacagcaccggggaatacagaaccaccagacctatcggaacccgataccttacccgacccctttaa

SEQ ID NO: 5153 - DNA, 2208 bp, Adeno-associated virus 6
  source 1..2208: mol_type = genomic DNA
atggctgccgatggttatcttccagattggctcgaggacaacctctctgagggcattcgcgagtggtgggacttgaaacctggagccccgaaacccaaagccaaccagcaaaagcaggacgacggccggggtctggtgcttcctggctacaagtacctcggacccttcaacggactcgacaagggggagcccgtcaacgcggcggatgcagcggccctcgagcacgacaaggcctacgaccagcagctcaaagcgggtgacaatccgtacctgcggtataaccacgccgacgccgagtttcaggagcgtctgcaagaagatacgtcttttgggggcaacctcgggcgagcagtcttccaggccaagaagagggttctcgaaccttttggtctggttgaggaaggtgctaagacggctcctggaaagaaacgtccggtagagcagtcgccacaagagccagactcctcctcgggcattggcaagacaggccagcagcccgctaaaaagagactcaattttggtcagactggcgactcagagtcagtccccgacccacaacctctcggagaacctccagcaacccccgctgctgtgggacctactacaatggcttcaggcggtggcgcaccaatggcagacaataacgaaggcgccgacggagtgggtaatgcctcaggaaattggcattgcgattccacatggctgggcgacagagtcatcaccaccagcacccgaacatgggccttgcccacctataacaaccacctctacaagcaaatctccagtgcttcaacgggggccagcaacgacaaccactacttcggctacagcaccccctgggggtattttgatttcaacagattccactgccatttctcaccacgtgactggcagcgactcatcaacaacaattggggattccggcccaagagactcaacttcaagctcttcaacatccaagtcaaggaggtcacgacgaatgatggcgtcacgaccatcgctaataaccttaccagcacggttcaagtcttctcggactcggagtaccagttgccgtacgtcctcggctctgcgcaccagggctgcctccctccgttcccggcggacgtgttcatgattccgcagtacggctacctaacgctcaacaatggcagccaggcagtgggacggtcatccttttactgcctggaatatttcccatcgcagatgctgagaacgggcaataactttaccttcagctacaccttcgaggacgtgcctttccacagcagctacgcgcacagccagagcctggaccggctgatgaatcctctcatcgaccagtacctgtattacctgaacagaactcagaatcagtccggaagtgcccaaaacaaggacttgctgtttagccgggggtctccagctggcatgtctgttcagcccaaaaactggctacctggaccctgttaccggcagcagcgcgtttctaaaacaaaaacagacaacaacaacagcaactttacctggactggtgcttcaaaatataaccttaatgggcgtgaatctataatcaaccctggcactgctatggcctcacacaaagacgacaaagacaagttctttcccatgagcggtgtcatgatttttggaaaggagagcgccggagcttcaaacactgcattggacaatgtcatgatcacagacgaagaggaaatcaaagccactaaccccgtggccaccgaaagatttgggactgtggcagtcaatctccagagcagcagcacagaccctgcgaccggagatgtgcatgttatgggagccttacctggaatggtgtggcaagacagagacgtatacctgcagggtcctatttgggccaaaattcctcacacggatggacactttcacccgtctcctctcatgggcggctttggacttaagcacccgcctcctcagatcctcatcaaaaacacgcctgttcctgcgaatcctccggcagagttttcggctacaaagtttgcttcattcatcacccagtattccacaggacaagtgagcgtggagattgaatgggagctgcagaaagaaaacagcaaacgctggaatcccgaagtgcagtatacatctaactatgcaaaatctgccaacgttgatttcactgtggacaacaatggactttatactgagcctcgccccattggcacccgttacctcacccgtcccctg

SEQ ID NO: 5154 - protein, 736 aa, Adeno-associated virus 6; identical to SEQ ID NO: 4799

SEQ ID NO: 5155 - protein, 623 aa, Adeno-associated virus 6
MPGFYEIVIKVPSDLDEHLPGISDSFVNWVAEKEWELPPDSDMDLNLIEQAPLTVAEKLQRDFLVQWRRVSKAPEALFFVQFEKGESYFHLHILVETTGVKSMVLGRFLSQIRDKLVQTIYRGIEPTLPNWFAVTKTRNGAGGGNKVVDECYIPNYLLPKTQPELQWAWTNMEEYISACLNLAERKRLVAHDLTHVSQTQEQNKENLNPNSDAPVIRSKTSARYMELVGWLVDRGITSEKQWIQEDQASYISFNAASNSRSQIKAALDNAGKIMALTKSAPDYLVGPAPPADIKTNRIYRILELNGYDPAYAGSVFLGWAQKRFGKRNTIWLFGPATTGKTNIAEAIAHAVPFYGCVNWTNENFPFNDCVDKMVIWWEEGKMTAKVVESAKAILGGSKVRVDQKCKSSAQIDPTPVIVTSNTNMCAVIDGNSTTFEHQQPLQDRMFKFELTRRLEHDFGKVTKQEVKEFFRWAQDHVTEVAHEFYVRKGGANKRPAPDDADKSEPKRACPSVADPSTSDAEGAPVDFADRYQNKCSRHAGMLQMLFPCKTCERMNQNFNICFTHGTRDCSECFPGVSESQPVVRKRTYRKLCAIHHLLGRAPEIACSACDLVNVDLDDCVSEQ

SEQ ID NO: 5156 - DNA, 4683 bp, Adeno-associated virus 6
  source 1..4683: mol_type = genomic DNA
ttggccactccctctctgcgcgctcgctcgctcactgaggccgggcgaccaaaggtcgcccgacgcccgggctttgcccgggcggcctcagtgagcgagcgagcgcgcagagagggagtggccaactccatcactaggggttcctggaggggtggagtcgtgacgtgaattacgtcatagggttagggaggtcctgtattagaggtcacgtgagtgttttgcgacattttgcgacaccatgtggtcacgctgggtatttaagcccgagtgagcacgcagggtctccattttgaagcgggaggtttgaacgcgcagcgccatgccggggttttacgagattgtgattaaggtccccagcgaccttgacgagcatctgcccggcatttctgacagctttgtgaactgggtggccgagaaggaatgggagttgccgccagattctgacatggatctgaatctgattgagcaggcacccctgaccgtggccgagaagctgcagcgcgacttcctggtccagtggcgccgcgtgagtaaggccccggaggccctcttctttgttcagttcgagaagggcgagtcctacttccacctccatattctggtggagaccacgggggtcaaatccatggtgctgggccgcttcctgagtcagattagggacaagctggtgcagaccatctaccgcgggatcgagccgaccctgcccaactggttcgcggtgaccaagacgcgtaatggcgccggaggggggaacaaggtggtggacgagtgctacatccccaactacctcctgcccaagactcagcccgagctgcagtgggcgtggactaacatggaggagtatataagcgcgtgtttaaacctggccgagcgcaaacggctcgtggcgcacgacctgacccacgtcagccagacccaggagcagaacaaggagaatctgaaccccaattctgacgcgcctgtcatccggtcaaaaacctccgcacgctacatggagctggtcgggtggctggtggaccggggcatcacctccgagaagcagtggatccaggaggaccaggcctcgtacatctccttcaacgccgcctccaactcgcggtcccagatcaaggccgctctggacaatgccggcaagatcatggcgctgaccaaatccgcgcccgactacctggtaggccccgctccgcccgccgacattaaaaccaaccgcatttaccgcatcctggagctgaacggctacgaccctgcctacgccggctccgtctttctcggctgggcccagaaaaggttcggaaaacgcaacaccatctggctgtttgggccggccaccacgggcaagaccaacatcgcggaagccatcgcccacgccgtgcccttctacggctgcgtcaactggaccaatgagaactttcccttcaacgattgcgtcgacaagatggtgatctggtgggaggagggcaagatgacggccaaggtcgtggagtccgccaaggccattctcggcggcagcaaggtgcgcgtggaccaaaagtgcaagtcgtccgcccagatcgatcccacccccgtgatcgtcacctccaacaccaacatgtgcgccgtgattgacgggaacagcaccaccttcgagcaccagcagccgttgcaggaccggatgttcaaatttgaactcacccgccgtctggagcatgactttggcaaggtgacaaagcaggaagtcaaagagttcttccgctgggcgcaggatcacgtgaccgaggtggcgcatgagttctacgtcagaaagggtggagccaacaagagacccgcccccgatgacgcggataaaagcgagcccaagcgggcctgcccctcagtcgcggatccatcgacgtcagacgcggaaggagctccggtggactttgccgacaggtaccaaaacaaatgttctcgtcacgcgggcatgcttcagatgctgtttccctgcaaaacatgcgagagaatgaatcagaatttcaacatttgcttcacgcacgggaccagagactgttcagaatgtttccccggcgtgtcagaatctcaaccggtcgtcagaaagaggacgtatcggaaactctgtgccattcatcatctgctggggcgggctcccgagattgcttgctcggcctgcgatctggtcaacgtggatctggatgactgtgtttctgagcaataaatgacttaaaccaggtatggctgccgatggttatcttccagattggctcgaggacaacctctctgagggcattcgcgagtggtgggacttgaaacctggagccccgaaacccaaagccaaccagcaaaagcaggacgacggccggggtctggtgcttcctggctacaagtacctcggacccttcaacggactcgacaagggggagcccgtcaacgcggcggatgcagcggccctcgagcacgacaaggcctacgaccagcagctcaaagcgggtgacaatccgtacctgcggtataaccacgccgacgccgagtttcaggagcgtctgcaagaagatacgtcttttgggggcaacctcgggcgagcagtcttccaggccaagaagagggttctcgaaccttttggtctggttgaggaaggtgctaagacggctcctggaaagaaacgtccggtagagcagtcgccacaagagccagactcctcctcgggcattggcaagacaggccagcagcccgctaaaaagagactcaattttggtcagactggcgactcagagtcagtccccgacccacaacctctcggagaacctccagcaacccccgctgctgtgggacctactacaatggcttcaggcggtggcgcaccaatggcagacaataacgaaggcgccgacggagtgggtaatgcctcaggaaattggcattgcgattccacatggctgggcgacagagtcatcaccaccagcacccgaacatgggccttgcccacctataacaaccacctctacaagcaaatctccagtgcttcaacgggggccagcaacgacaaccactacttcggctacagcaccccctgggggtattttgatttcaacagattccactgccatttctcaccacgtgactggcagcgactcatcaacaacaattggggattccggcccaagagactcaacttcaagctcttcaacatccaagtcaaggaggtcacgacgaatgatggcgtcacgaccatcgctaataaccttaccagcacggttcaagtcttctcggactcggagtaccagttgccgtacgtcctcggctctgcgcaccagggctgcctccctccgttcccggcggacgtgttcatgattccgcagtacggctacctaacgctcaacaatggcagccaggcagtgggacggtcatccttttactgcctggaatatttcccatcgcagatgctgagaacgggcaataactttaccttcagctacaccttcgaggacgtgcctttccacagcagctacgcgcacagccagagcctggaccggctgatgaatcctctcatcgaccagtacctgtattacctgaacagaactcagaatcagtccggaagtgcccaaaacaaggacttgctgtttagccgggggtctccagctggcatgtctgttcagcccaaaaactggctacctggaccctgttaccggcagcagcgcgtttctaaaacaaaaacagacaacaacaacagcaactttacctggactggtgcttcaaaatataaccttaatgggcgtgaatctataatcaaccctggcactgctatggcctcacacaaagacgacaaagacaagttctttcccatgagcggtgtcatgatttttggaaaggagagcgccggagcttcaaacactgcattggacaatgtcatgatcacagacgaagaggaaatcaaagccactaaccccgtggccaccgaaagatttgggactgtggcagtcaatctccagagcagcagcacagaccctgcgaccggagatgtgcatgttatgggagccttacctggaatggtgtggcaagacagagacgtatacctgcagggtcctatttgggccaaaattcctcacacggatggacactttcacccgtctcctctcatgggcggctttggacttaagcacccgcctcctcagatcctcatcaaaaacacgcctgttcctgcgaatcctccggcagagttttcggctacaaagtttgcttcattcatcacccagtattccacaggacaagtgagcgtggagattgaatgggagctgcagaaagaaaacagcaaacgctggaatcccgaagtgcagtatacatctaactatgcaaaatctgccaacgttgatttcactgtggacaacaatggactttatactgagcctcgccccattggcacccgttacctcacccgtcccctgtaattgtgtgttaatcaataaaccggttaattcgtgtcagttgaactttggtctcatgtcgttattatcttatctggtcaccatagcaaccggttacacattaactgcttagttgcgcttcgcgaatacccctagtgatggagttgcccactccctctatgcgcgctcgctcgctcggtggggccggcagagcagagctctgccgtctgcggacctttggtccgcaggccccaccgagcgagcgagcgcgcatagagggagtgggcaa

SEQ ID NO: 5157 - DNA, 2211 bp, Adeno-associated virus 6
  source 1..2211: mol_type = genomic DNA
atggctgccgatggttatcttccagattggctcgaggacaacctctctgagggcattcgcgagtggtgggacttgaaacctggagccccgaaacccaaagccaaccagcaaaagcaggacgacggccggggtctggtgcttcctggctacaagtacctcggacccttcaacggactcgacaagggggagcccgtcaacgcggcggatgcagcggccctcgagcacgacaaggcctacgaccagcagctcaaagcgggtgacaatccgtacctgcggtataaccacgccgacgccgagtttcaggagcgtctgcaagaagatacgtcttttgggggcaacctcgggcgagcagtcttccaggccaagaagagggttctcgaaccttttggtctggttgaggaaggtgctaagacggctcctggaaagaaacgtccggtagagcagtcgccacaagagccagactcctcctcgggcattggcaagacaggccagcagcccgctaaaaagagactcaattttggtcagactggcgactcagagtcagtccccgacccacaacctctcggagaacctccagcaacccccgctgctgtgggacctactacaatggcttcaggcggtggcgcaccaatggcagacaataacgaaggcgccgacggagtgggtaatgcctcaggaaattggcattgcgattccacatggctgggcgacagagtcatcaccaccagcacccgaacatgggccttgcccacctataacaaccacctctacaagcaaatctccagtgcttcaacgggggccagcaacgacaaccactacttcggctacagcaccccctgggggtattttgatttcaacagattccactgccatttctcaccacgtgactggcagcgactcatcaacaacaattggggattccggcccaagagactcaacttcaagctcttcaacatccaagtcaaggaggtcacgacgaatgatggcgtcacgaccatcgctaataaccttaccagcacggttcaagtcttctcggactcggagtaccagttgccgtacgtcctcggctctgcgcaccagggctgcctccctccgttcccggcggacgtgttcatgattccgcagtacggctacctaacgctcaacaatggcagccaggcagtgggacggtcatccttttactgcctggaatatttcccatcgcagatgctgagaacgggcaataactttaccttcagctacaccttcgaggacgtgcctttccacagcagctacgcgcacagccagagcctggaccggctgatgaatcctctcatcgaccagtacctgtattacctgaacagaactcagaatcagtccggaagtgcccaaaacaaggacttgctgtttagccgggggtctccagctggcatgtctgttcagcccaaaaactggctacctggaccctgttaccggcagcagcgcgtttctaaaacaaaaacagacaacaacaacagcaactttacctggactggtgcttcaaaatataaccttaatgggcgtgaatctataatcaaccctggcactgctatggcctcacacaaagacgacaaagacaagttctttcccatgagcggtgtcatgatttttggaaaggagagcgccggagcttcaaacactgcattggacaatgtcatgatcacagacgaagaggaaatcaaagccactaaccccgtggccaccgaaagatttgggactgtggcagtcaatctccagagcagcagcacagaccctgcgaccggagatgtgcatgttatgggagccttacctggaatggtgtggcaagacagagacgtatacctgcagggtcctatttgggccaaaattcctcacacggatggacactttcacccgtctcctctcatgggcggctttggacttaagcacccgcctcctcagatcctcatcaaaaacacgcctgttcctgcgaatcctccggcagagttttcggctacaaagtttgcttcattcatcacccagtattccacaggacaagtgagcgtggagattgaatgggagctgcagaaagaaaacagcaaacgctggaatcccgaagtgcagtatacatctaactatgcaaaatctgccaacgttgatttcactgtggacaacaatggactttatactgagcctcgccccattggcacccgttacctcacccgtcccctgtaa

SEQ ID NO: 5158 - DNA, 2214 bp, Adeno-associated virus 7
  source 1..2214: mol_type = genomic DNA
atggctgccgatggttatcttccagattggctcgaggacaacctctctgagggcattcgcgagtggtgggacctgaaacctggagccccgaaacccaaagccaaccagcaaaagcaggacaacggccggggtctggtgcttcctggctacaagtacctcggacccttcaacggactcgacaagggggagcccgtcaacgcggcggacgcagcggccctcgagcacgacaaggcctacgaccagcagctcaaagcgggtgacaatccgtacctgcggtataaccacgccgacgccgagtttcaggagcgtctgcaagaagatacgtcatttgggggcaacctcgggcgagcagtcttccaggccaagaagcgggttctcgaacctctcggtctggttgaggaaggcgctaagacggctcctgcaaagaagagaccggtagagccgtcacctcagcgttcccccgactcctccacgggcatcggcaagaaaggccagcagcccgccagaaagagactcaatttcggtcagactggcgactcagagtcagtccccgaccctcaacctctcggagaacctccagcagcgccctctagtgtgggatctggtacagtggctgcaggcggtggcgcaccaatggcagacaataacgaaggtgccgacggagtgggtaatgcctcaggaaattggcattgcgattccacatggctgggcgacagagtcattaccaccagcacccgaacctgggccctgcccacctacaacaaccacctctacaagcaaatctccagtgaaactgcaggtagtaccaacgacaacacctacttcggctacagcaccccctgggggtattttgactttaacagattccactgccacttctcaccacgtgactggcagcgactcatcaacaacaactggggattccggcccaagaagctgcggttcaagctcttcaacatccaggtcaaggaggtcacgacgaatgacggcgttacgaccatcgctaataaccttaccagcacgattcaggtattctcggactcggaataccagctgccgtacgtcctcggctctgcgcaccagggctgcctgcctccgttcccggcggacgtcttcatgattcctcagtacggctacctgactctcaacaatggcagtcagtctgtgggacgttcctccttctactgcctggagtacttcccctctcagatgctgagaacgggcaacaactttgagttcagctacagcttcgaggacgtgcctttccacagcagctacgcacacagccagagcctggaccggctgatgaatcccctcatcgaccagtacttgtactacctggccagaacacagagtaacccaggaggcacagctggcaatcgggaactgcagttttaccagggcgggccttcaactatggccgaacaagccaagaattggttacctggaccttgcttccggcaacaaagagtctccaaaacgctggatcaaaacaacaacagcaactttgcttggactggtgccaccaaatatcacctgaacggcagaaactcgttggttaatcccggcgtcgccatggcaactcacaaggacgacgaggaccgctttttcccatccagcggagtcctgatttttggaaaaactggagcaactaacaaaactacattggaaaatgtgttaatgacaaatgaagaagaaattcgtcctactaatcctgtagccacggaagaatacgggatagtcagcagcaacttacaagcggctaatactgcagcccagacacaagttgtcaacaaccagggagccttacctggcatggtctggcagaaccgggacgtgtacctgcagggtcccatctgggccaagattcctcacacggatggcaactttcacccgtctcctttgatgggcggctttggacttaaacatccgcctcctcagatcctgatcaagaacactcccgttcccgctaatcctccggaggtgtttactcctgccaagtttgcttcgttcatcacacagtacagcaccggacaagtcagcgtggaaatcgagtgggagctgcagaaggaaaacagcaagcgctggaacccggagattcagtacacctccaactttgaaaagcagactggtgtggactttgccgttgacagccagggtgtttactctgagcctcgccctattggcactcgttacctcacccgtaatctgtaa

SEQ ID NO: 5159 - protein, 738 aa, Adeno-associated virus 7
MAADGYLPDWLEDNLSEGIREWWALKPGAPKPKANQQKQDDGRGLVLPGYKYLGPFNGLDKGEPVNAADAAALEHDKAYDQQLQAGDNPYLRYNHADAEFQERLQEDTSFGGNLGRAVFQAKKRVLEPLGLVEEGAKTAPGKKRPVEPSPQRSPDSSTGIGKKGQQPARKRLNFGQTGDSESVPDPQPLGEPPAAPSGVGPNTMAAGGGAPMADNNEGADGVGSSSGNWHCDSTWLGDRVITTSTRTWALPTYNNHLYKQISNGTSGGATNDNTYFGYSTPWGYFDFNRFHCHFSPRDWQRLINNNWGFRPKRLSFKLFNIQVKEVTQNEGTKTIANNLTSTIQVFTDSEYQLPYVLGSAHQGCLPPFPADVFMIPQYGYLTLNNGSQAVGRSSFYCLEYFPSQMLRTGNNFQFTYTFEDVPFHSSYAHSQSLDRLMNPLIDQYLYYLSRTQTTGGTANTQTLGFSQGGPNTMANQAKNWLPGPCYRQQRVSTTTGQNNNSNFAWTAGTKYHLNGRNSLANPGIAMATHKDDEERFFPSNGILIFGKQNAARDNADYSDVMLTSEEEIKTTNPVATEEYGIVADNLQQQNTAPQIGTVNSQGALPGMVWQNRDVYLQGPIWAKIPHTDGNFHPSPLMGGFGLKHPPPQILIKNTPVPADPPTTFNQSKLNSFITQYSTGQVSVEIEWELQKENSKRWNPEIQYTSNYYKSTSVDFAVNTEGVYSEPRPIGTRYLTRNL

SEQ ID NO: 5160 - protein, 737 aa, Adeno-associated virus 7
MAADGYLPDWLEDNLSEGIREWWDLKPGAPKPKANQQKQDNGRGLVLPGYKYLGPFNGLDKGEPVNAADAAALEHDKAYDQQLKAGDNPYLRYNHADAEFQERLQEDTSFGGNLGRAVFQAKKRVLEPLGLVEEGAKTAPAKKRPVEPSPQRSPDSSTGIGKKGQQPARKRLNFGQTGDSESVPDPQPLGEPPAAPSSVGSGTVAAGGGAPMADNNEGADGVGNASGNWHCDSTWLGDRVITTSTRTWALPTYNNHLYKQISSETAGSTNDNTYFGYSTPWGYFDFNRFHCHFSPRDWQRLINNNWGFRPKKLRFKLFNIQVKEVTTNDGVTTIANNLTSTIQVFSDSEYQLPYVLGSAHQGCLPPFPADVFMIPQYGYLTLNNGSQSVGRSSFYCLEYFPSQMLRTGNNFEFSYSFEDVPFHSSYAHSQSLDRLMNPLIDQYLYYLARTQSNPGGTAGNRELQFYQGGPSTMAEQAKNWLPGPCFRQQRVSKTLDQNNNSNFAWTGATKYHLNGRNSLVNPGVAMATHKDDEDRFFPSSGVLIFGKTGATNKTTLENVLMTNEEEIRPTNPVATEEYGIVSSNLQAANTAAQTQVVNNQGALPGMVWQNRDVYLQGPIWAKIPHTDGNFHPSPLMGGFGLKHPPPQILIKNTPVPANPPEVFTPAKFASFITQYSTGQVSVEIEWELQKENSKRWNPEIQYTSNFEKQTGVDFAVDSQGVYSEPRPIGTRYLTRNL

SEQ ID NO: 5161 - protein, 623 aa, Adeno-associated virus 7
MPGFYEIVIKVPSDLDEHLPGISDSFVNWVAEKEWELPPDSDMDLNLIEQAPLTVAEKLQRDFLVQWRRVSKAPEALFFVQFEKGESYFHLHVLVETTGVKSMVLGRFLSQIREKLVQTIYRGVEPTLPNWFAVTKTRNGAGGGNKVVDECYIPNYLLPKTQPELQWAWTNMEEYISACLNLAERKRLVAQHLTHVSQTQEQNKENLNPNSDAPVIRSKTSARYMELVGWLVDRGITSEKQWIQEDQASYISFNAASNSRSQIKAALDNAGKIMALTKSAPDYLVGPSLPADIKTNRIYRILELNGYDPAYAGSVFLGWAQKKFGKRNTIWLFGPATTGKTNIAEAIAHAVPFYGCVNWTNENFPFNDCVDKMVIWWEEGKMTAKVVESAKAILGGSKVRVDQKCKSSAQIDPTPVIVTSNTNMCAVIDGNSTTFEHQQPLQDRMFKFELTRRLEHDFGKVTKQEVKEFFRWASDHVTEVAHEFYVRKGGASKRPAPDDADISEPKRACPSVADPSTSDAEGAPVDFADRYQNKCSRHAGMIQMLFPCKTCERMNQNFNICFTHGVRDCLECFPGVSESQPVVRKKTYRKLCAIHHLLGRAPEIACSACDLVNVDLDDCVSEQ

SEQ ID NO: 5162 - DNA, 4721 bp, Adeno-associated virus 7
  source 1..4721: mol_type = genomic DNA
ttggccactccctctatgcgcgctcgctcgctcggtggggcctgcggaccaaaggtccgcagacggcagagctctgctctgccggccccaccgagcgagcgagcgcgcatagagggagtggccaactccatcactaggggtaccgcgaagcgcctcccacgctgccgcgtcagcgctgacgtaaatcacgtcataggggagtggtcctgtattagctgtcacgtgagtgcttttgcgacattttgcgacaccacgtggccatttgaggtatatatggccgagtgagcgagcaggatctccattttgaccgcgaaatttgaacgagcagcagccatgccgggtttctacgagatcgtgatcaaggtgccgagcgacctggacgagcacctgccgggcatttctgactcgtttgtgaactgggtggccgagaaggaatgggagctgcccccggattctgacatggatctgaatctgatcgagcaggcacccctgaccgtggccgagaagctgcagcgcgacttcctggtccaatggcgccgcgtgagtaaggccccggaggccctgttctttgttcagttcgagaagggcgagagctacttccaccttcacgttctggtggagaccacgggggtcaagtccatggtgctaggccgcttcctgagtcagattcgggagaagctggtccagaccatctaccgcggggtcgagcccacgctgcccaactggttcgcggtgaccaagacgcgtaatggcgccggcggggggaacaaggtggtggacgagtgctacatccccaactacctcctgcccaagacccagcccgagctgcagtgggcgtggactaacatggaggagtatataagcgcgtgtttgaacctggccgaacgcaaacggctcgtggcgcagcacctgacccacgtcagccagacgcaggagcagaacaaggagaatctgaaccccaattctgacgcgcccgtgatcaggtcaaaaacctccgcgcgctacatggagctggtcgggtggctggtggaccggggcatcacctccgagaagcagtggatccaggaggaccaggcctcgtacatctccttcaacgccgcctccaactcgcggtcccagatcaaggccgcgctggacaatgccggcaagatcatggcgctgaccaaatccgcgcccgactacctggtggggccctcgctgcccgcggacattaaaaccaaccgcatctaccgcatcctggagctgaacgggtacgatcctgcctacgccggctccgtctttctcggctgggcccagaaaaagttcgggaagcgcaacaccatctggctgtttgggcccgccaccaccggcaagaccaacattgcggaagccatcgcccacgccgtgcccttctacggctgcgtcaactggaccaatgagaactttcccttcaacgattgcgtcgacaagatggtgatctggtgggaggagggcaagatgacggccaaggtcgtggagtccgccaaggccattctcggcggcagcaaggtgcgcgtggaccaaaagtgcaagtcgtccgcccagatcgaccccacccccgtgatcgtcacctccaacaccaacatgtgcgccgtgattgacgggaacagcaccaccttcgagcaccagcagccgttgcaggaccggatgttcaaatttgaactcacccgccgtctggagcacgactttggcaaggtgacgaagcaggaagtcaaagagttcttccgctgggccagtgatcacgtgaccgaggtggcgcatgagttctacgtcagaaagggcggagccagcaaaagacccgcccccgatgacgcggatataagcgagcccaagcgggcctgcccctcagtcgcggatccatcgacgtcagacgcggaaggagctccggtggactttgccgacaggtaccaaaacaaatgttctcgtcacgcgggcatgattcagatgctgtttccctgcaaaacgtgcgagagaatgaatcagaatttcaacatttgcttcacacacggggtcagagactgtttagagtgtttccccggcgtgtcagaatctcaaccggtcgtcagaaaaaagacgtatcggaaactctgcgcgattcatcatctgctggggcgggcgcccgagattgcttgctcggcctgcgacctggtcaacgtggacctggacgactgcgtttctgagcaataaatgacttaaaccaggtatggctgccgatggttatcttccagattggctcgaggacaacctctctgagggcattcgcgagtggtgggacctgaaacctggagccccgaaacccaaagccaaccagcaaaagcaggacaacggccggggtctggtgcttcctggctacaagtacctcggacccttcaacggactcgacaagggggagcccgtcaacgcggcggacgcagcggccctcgagcacgacaaggcctacgaccagcagctcaaagcgggtgacaatccgtacctgcggtataaccacgccgacgccgagtttcaggagcgtctgcaagaagatacgtcatttgggggcaacctcgggcgagcagtcttccaggccaagaagcgggttctcgaacctctcggtctggttgaggaaggcgctaagacggctcctgcaaagaagagaccggtagagccgtcacctcagcgttcccccgactcctccacgggcatcggcaagaaaggccagcagcccgccagaaagagactcaatttcggtcagactggcgactcagagtcagtccccgaccctcaacctctcggagaacctccagcagcgccctctagtgtgggatctggtacagtggctgcaggcggtggcgcaccaatggcagacaataacgaaggtgccgacggagtgggtaatgcctcaggaaattggcattgcgattccacatggctgggcgacagagtcattaccaccagcacccgaacctgggccctgcccacctacaacaaccacctctacaagcaaatctccagtgaaactgcaggtagtaccaacgacaacacctacttcggctacagcaccccctgggggtattttgactttaacagattccactgccacttctcaccacgtgactggcagcgactcatcaacaacaactggggattccggcccaagaagctgcggttcaagctcttcaacatccaggtcaaggaggtcacgacgaatgacggcgttacgaccatcgctaataaccttaccagcacgattcaggtattctcggactcggaataccagctgccgtacgtcctcggctctgcgcaccagggctgcctgcctccgttcccggcggacgtcttcatgattcctcagtacggctacctgactctcaacaatggcagtcagtctgtgggacgttcctccttctactgcctggagtacttcccctctcagatgctgagaacgggcaacaactttgagttcagctacagcttcgaggacgtgcctttccacagcagctacgcacacagccagagcctggaccggctgatgaatcccctcatcgaccagtacttgtactacctggccagaacacagagtaacccaggaggcacagctggcaatcgggaactgcagttttaccagggcgggccttcaactatggccgaacaagccaagaattggttacctggaccttgcttccggcaacaaagagtctccaaaacgctggatcaaaacaacaacagcaactttgcttggactggtgccaccaaatatcacctgaacggcagaaactcgttggttaatcccggcgtcgccatggcaactcacaaggacgacgaggaccgctttttcccatccagcggagtcctgatttttggaaaaactggagcaactaacaaaactacattggaaaatgtgttaatgacaaatgaagaagaaattcgtcctactaatcctgtagccacggaagaatacgggatagtcagcagcaacttacaagcggctaatactgcagcccagacacaagttgtcaacaaccagggagccttacctggcatggtctggcagaaccgggacgtgtacctgcagggtcccatctgggccaagattcctcacacggatggcaactttcacccgtctcctttgatgggcggctttggacttaaacatccgcctcctcagatcctgatcaagaacactcccgttcccgctaatcctccggaggtgtttactcctgccaagtttgcttcgttcatcacacagtacagcaccggacaagtcagcgtggaaatcgagtgggagctgcagaaggaaaacagcaagcgctggaacccggagattcagtacacctccaactttgaaaagcagactggtgtggactttgccgttgacagccagggtgtttactctgagcctcgccctattggcactcgttacctcacccgtaatctgtaattgcatgttaatcaataaaccggttgattcgtttcagttgaactttggtctcctgtgcttcttatcttatcggtttccatagcaactggttacacattaactgcttgggtgcgcttcacgataagaacactgacgtcaccgcggtacccctagtgatggagttggccactccctctatgcgcgctcgctcgctcggtggggcctgcggaccaaaggtccgcagacggcagagctctgctctgccggccccaccgagcgagcgagcgcgcatagagggagtggccaa

SEQ ID NO: 5163 - DNA, 2214 bp, Adeno-associated virus 7; identical to SEQ ID NO: 5158
  source 1..2214: mol_type = genomic DNA

SEQ ID NO: 5164 - protein, 737 aa, Adeno-associated virus 7; identical to SEQ ID NO: 5160

SEQ ID NO: 5165 - DNA, 2217 bp, Adeno-associated virus 8
  source 1..2217: mol_type = genomic DNA
atggctgccgatggttatcttccagattggctcgaggacaacctctctgagggcattcgcgagtggtgggcgctgaaacctggagccccgaagcccaaagccaaccagcaaaagcaggacgacggccggggtctggtgcttcctggctacaagtacctcggacccttcaacggactcgacaagggggagcccgtcaacgcggcggacgcagcggccctcgagcacgacaaggcctacgaccagcagctgcaggcgggtgacaatccgtacctgcggtataaccacgccgacgccgagtttcaggagcgtctgcaagaagatacgtcttttgggggcaacctcgggcgagcagtcttccaggccaagaagcgggttctcgaacctctcggtctggttgaggaaggcgctaagacggctcctggaaagaagagaccggtagagccatcaccccagcgttctccagactcctctacgggcatcggcaagaaaggccaacagcccgccagaaaaagactcaattttggtcagactggcgactcagagtcagttccagaccctcaacctctcggagaacctccagcagcgccctctggtgtgggacctaatacaatggctgcaggcggtggcgcaccaatggcagacaataacgaaggcgccgacggagtgggtagttcctcgggaaattggcattgcgattccacatggctgggcgacagagtcatcaccaccagcacccgaacctgggccctgcccacctacaacaaccacctctacaagcaaatctccaacgggacatcgggaggagccaccaacgacaacacctacttcggctacagcaccccctgggggtattttgactttaacagattccactgccacttttcaccacgtgactggcagcgactcatcaacaacaactggggattccggcccaagagactcagcttcaagctcttcaacatccaggtcaaggaggtcacgcagaatgaaggcaccaagaccatcgccaataacctcaccagcaccatccaggtgtttacggactcggagtaccagctgccgtacgttctcggctctgcccaccagggctgcctgcctccgttcccggcggacgtgttcatgattccccagtacggctacctaacactcaacaacggtagtcaggccgtgggacgctcctccttctactgcctggaatactttccttcgcagatgctgagaaccggcaacaacttccagtttacttacaccttcgaggacgtgcctttccacagcagctacgcccacagccagagcttggaccggctgatgaatcctctgattgaccagtacctgtactacttgtctcggactcaaacaacaggaggcacggcaaatacgcagactctgggcttcagccaaggtgggcctaatacaatggccaatcaggcaaagaactggctgccaggaccctgttaccgccaacaacgcgtctcaacgacaaccgggcaaaacaacaatagcaactttgcctggactgctgggaccaaataccatctgaatggaagaaattcattggctaatcctggcatcgctatggcaacacacaaagacgacgaggagcgtttttttcccagtaacgggatcctgatttttggcaaacaaaatgctgccagagacaatgcggattacagcgatgtcatgctcaccagcgaggaagaaatcaaaaccactaaccctgtggctacagaggaatacggtatcgtggcagataacttgcagcagcaaaacacggctcctcaaattggaactgtcaacagccagggggccttacccggtatggtctggcagaaccgggacgtgtacctgcagggtcccatctgggccaagattcctcacacggacggcaacttccacccgtctccgctgatgggcggctttggcctgaaacatcctccgcctcagatcctgatcaagaacacgcctgtacctgcggatcctccgaccaccttcaaccagtcaaagctgaactctttcatcacgcaatacagcaccggacaggtcagcgtggaaattgaatgggagctgcagaaggaaaacagcaagcgctggaaccccgagatccagtacacctccaactactacaaatctacaagtgtggactttgctgttaatacagaaggcgtgtactctgaaccccgccccattggcacccgttacctcacccgtaatctgtaa

SEQ ID NO: 5166 - DNA, 2213 bp, Adeno-associated virus 8
  source 1..2213: mol_type = genomic DNA
atggctgccgatggttatcttccagattggctcgaggacaacctctctgagggcattcgcgagtggtgggcgctgaaacctggagccccgaagcccaaagccaaccagcaaaagcaggacgacggccggggtctggtgcttcctggctacaagtacctcggacccttcaacggactcgacaagggggagcccgtcaacgcggcggacgcagcggccctcgagcacgacaaggcctacgaccagcagctgcaggcgggtgacaatccgtacctgcggtataaccacgccgacgccgagtttcaggagcgtctgcaagaagatacgtcttttgggggcaacctcgggcgagcagtcttccaggccaagaagcgggttctcgaacctctcggtctggttgaggaaggcgctaagacggctcctggaaagaagagaccggtagagccatcaccccagcgttctccagactcctctacgggcatcggcaagaaaggccaacagcccgccagaaaaagactcaattttggtcagactggcgactcagagtcagttccagaccctcaacctctcggagaacctccagcagcgccctctggtgtgggacctaatacaatggctgcaggcggtggcgcaccaatggcagacaataacgaaggcgccgacggagtgggtagttcctcgggaaattggcattgcgattccacatggctgggcgacagagtcatcaccaccagcacccgaacctgggccctgcccacctacaacaaccacctctacaagcaaatctccaacgggacatcgggaggagccaccaacgacaacacctacttcggctacagcaccccctgggggtattttgactttaacagattccactgccacttttcaccacgtgactggcagcgactcatcaacaacaactggggattccggcccaagagactcagcttcaagctcttcaacatccaggtcaaggaggtcacgcagaatgaaggcaccaagaccatcgccaataacctcaccagcaccatccaggtgtttacggactcggagtaccagctgccgtacgttctcggctctgcccaccagggctgcctgcctccgttcccggcggacgtgttcatgattccccagtacggctacctaacactcaacaacggtagtcaggccgtgggacgctcctccttctactgcctggaatactttccttcgcagatgctgagaaccggcaacaacttccagtttacttacaccttcgaggacgtgcctttccacagcagctacgcccacagccagagcttggaccggctgatgaatcctctgattgaccagtacctgtactacttgtctcggactcaaacaacaggaggcacggcaaatacgcagactctgggcttcagccaaggtgggcctaatacaatggccaatcaggcaaagaactggctgccaggaccctgttaccgccaacaacgcgtctcaacgacaaccgggcaaaacaacaatagcaactttgcctggactgctgggaccaaataccatctgaatggaagaaattcattggctaatcctggcatcgctatggcaacacacaaagacgacgaggagcgtttttttcccagtaacgggatcctgatttttggcaaacaaaatgctgccagagacaatgcggattacagcgatgtcatgctcaccagcgaggaagaaatcaaaaccactaaccctgtggctacagaggaatacggtatcgtggcagataacttgcagcagcaaaacacggctcctcaaattggaactgtcaacagccagggggccttacccggtatggtctggcagaaccgggacgtgtacctgcagggtcccatctgggccaagattcctcacacggacggcaacttccacccgtctccgctgatgggcggctttggcctgaaacatcctccgcctcagatcctgatcaagaacacgcctgtacctgcggatcctccgaccaccttcaaccagtcaaagctgaactctttcatcacgcaatacagcaccggacaggtcagcgtggaaattgaatgggagctgcagaaggaaaacagcaagcgctggaaccccgagatccagtacacctccaactactacaaatctacaagtgtggactttgctgtaatacagaaggcgtgtactctgaaccccgccccattggcacccgttacctcacccgtaatctg

SEQ ID NO: 5167 - DNA, 4393 bp, Adeno-associated virus 8
  source 1..4393: mol_type = genomic DNA
cagagagggagtggccaactccatcactaggggtagcgcgaagcgcctcccacgctgccgcgtcagcgctgacgtaaattacgtcataggggagtggtcctgtattagctgtcacgtgagtgcttttgcggcattttgcgacaccacgtggccatttgaggtatatatggccgagtgagcgagcaggatctccattttgaccgcgaaatttgaacgagcagcagccatgccgggcttctacgagatcgtgatcaaggtgccgagcgacctggacgagcacctgccgggcatttctgactcgtttgtgaactgggtggccgagaaggaatgggagctgcccccggattctgacatggatcggaatctgatcgagcaggcacccctgaccgtggccgagaagctgcagcgcgacttcctggtccaatggcgccgcgtgagtaaggccccggaggccctcttctttgttcagttcgagaagggcgagagctactttcacctgcacgttctggtcgagaccacgggggtcaagtccatggtgctaggccgcttcctgagtcagattcgggaaaagcttggtccagaccatctacccgcggggtcgagccccaccttgcccaactggttcgcggtgaccaaagacgcggtaatggcgccggcgggggggaacaaggtggtggacgagtgctacatccccaactacctcctgcccaagactcagcccgagctgcagtgggcgtggactaacatggaggagtatataagcgcgtgcttgaacctggccgagcgcaaacggctcgtggcgcagcacctgacccacgtcagccagacgcaggagcagaacaaggagaatctgaaccccaattctgacgcgcccgtgatcaggtcaaaaacctccgcgcgctatatggagctggtcgggtggctggtggaccggggcatcacctccgagaagcagtggatccaggaggaccaggcctcgtacatctccttcaacgccgcctccaactcgcggtcccagatcaaggccgcgctggacaatgccggcaagatcatggcgctgaccaaatccgcgcccgactacctggtggggccctcgctgcccgcggacattacccagaaccgcatctaccgcatcctcgctctcaacggctacgaccctgcctacgccggctccgtctttctcggctgggctcagaaaaagttcgggaaacgcaacaccatctggctgtttggacccgccaccaccggcaagaccaacattgcggaagccatcgcccacgccgtgcccttctacggctgcgtcaactggaccaatgagaactttcccttcaatgattgcgtcgacaagatggtgatctggtgggaggagggcaagatgacggccaaggtcgtggagtccgccaaggccattctcggcggcagcaaggtgcgcgtggaccaaaagtgcaagtcgtccgcccagatcgaccccacccccgtgatcgtcacctccaacaccaacatgtgcgccgtgattgacgggaacagcaccaccttcgagcaccagcagcctctccaggaccggatgtttaagttcgaactcacccgccgtctggagcacgactttggcaaggtgacaaagcaggaagtcaaagagttcttccgctgggccagtgatcacgtgaccgaggtggcgcatgagttttacgtcagaaagggcggagccagcaaaagacccgcccccgatgacgcggataaaagcgagcccaagcgggcctgcccctcagtcgcggatccatcgacgtcagacgcggaaggagctccggtggactttgccgacaggtaccaaaacaaatgttctcgtcacgcgggcatgcttcagatgctgtttccctgcaaaacgtgcgagagaatgaatcagaatttcaacatttgcttcacacacggggtcagagactgctcagagtgtttccccggcgtgtcagaatctcaaccggtcgtcagaaagaggacgtatcggaaactctgtgcgattcatcatctgctggggcgggctcccgagattgcttgctcggcctgcgatctggtcaacgtggacctggatgactgtgtttctgagcaataaatgacttaaaccaggtatggctgccgatggttatcttccagattggctcgaggacaacctctctgagggcattcgcgagtggtgggcgctgaaacctggagccccgaagcccaaagccaaccagcaaaagcaggacgacggccggggtctggtgcttcctggctacaagtacctcggacccttcaacggactcgacaagggggagcccgtcaacgcggcggacgcagcggccctcgagcacgacaaggcctacgaccagcagctgcaggcgggtgacaatccgtacctgcggtataaccacgccgacgccgagtttcaggagcgtctgcaagaagatacgtcttttgggggcaacctcgggcgagcagtcttccaggccaagaagcgggttctcgaacctctcggtctggttgaggaaggcgctaagacggctcctggaaagaagagaccggtagagccatcaccccagcgttctccagactcctctacgggcatcggcaagaaaggccaacagcccgccagaaaaagactcaattttggtcagactggcgactcagagtcagttccagaccctcaacctctcggagaacctccagcagcgccctctggtgtgggacctaatacaatggctgcaggcggtggcgcaccaatggcagacaataacgaaggcgccgacggagtgggtagttcctcgggaaattggcattgcgattccacatggctgggcgacagagtcatcaccaccagcacccgaacctgggccctgcccacctacaacaaccacctctacaagcaaatctccaacgggacatcgggaggagccaccaacgacaacacctacttcggctacagcaccccctgggggtattttgactttaacagattccactgccacttttcaccacgtgactggcagcgactcatcaacaacaactggggattccggcccaagagactcagcttcaagctcttcaacatccaggtcaaggaggtcacgcagaatgaaggcaccaagaccatcgccaataacctcaccagcaccatccaggtgtttacggactcggagtaccagctgccgtacgttctcggctctgcccaccagggctgcctgcctccgttcccggcggacgtgttcatgattccccagtacggctacctaacactcaacaacggtagtcaggccgtgggacgctcctccttctactgcctggaatactttccttcgcagatgctgagaaccggcaacaacttccagtttacttacaccttcgaggacgtgcctttccacagcagctacgcccacagccagagcttggaccggctgatgaatcctctgattgaccagtacctgtactacttgtctcggactcaaacaacaggaggcacggcaaatacgcagactctgggcttcagccaaggtgggcctaatacaatggccaatcaggcaaagaactggctgccaggaccctgttaccgccaacaacgcgtctcaacgacaaccgggcaaaacaacaatagcaactttgcctggactgctgggaccaaataccatctgaatggaagaaattcattggctaatcctggcatcgctatggcaacacacaaagacgacgaggagcgtttttttcccagtaacgggatcctgatttttggcaaacaaaatgctgccagagacaatgcggattacagcgatgtcatgctcaccagcgaggaagaaatcaaaaccactaaccctgtggctacagaggaatacggtatcgtggcagataacttgcagcagcaaaacacggctcctcaaattggaactgtcaacagccagggggccttacccggtatggtctggcagaaccgggacgtgtacctgcagggtcccatctgggccaagattcctcacacggacggcaacttccacccgtctccgctgatgggcggctttggcctgaaacatcctccgcctcagatcctgatcaagaacacgcctgtacctgcggatcctccgaccaccttcaaccagtcaaagctgaactctttcatcacgcaatacagcaccggacaggtcagcgtggaaattgaatgggagctgcagaaggaaaacagcaagcgctggaaccccgagatccagtacacctccaactactacaaatctacaagtgtggactttgctgttaatacagaaggcgtgtactctgaaccccgccccattggcacccgttacctcacccgtaatctgtaattgcctgttaatcaataaaccggttgattcgtttcagttgaactttggtctctgcg

SEQ ID NO: 5168 - protein, 738 aa, Adeno-associated virus 8; identical to SEQ ID NO: 5159

SEQ ID NO: 5169 - protein, 737 aa, Adeno-associated virus 8
MAADGYLPDWLEDNLSEGIREWWALKPGAPKPKANQQKQDDGRGLVLPGYKYLGPFNGLDKGEPVNAADAAALEHDKAYDQQLQAGDNPYLRYNHADAEFQERLQEDTSFGGNLGRAVFQAKKRVLEPLGLVEEGAKTAPGKKRPVEPSPQRSPDSSTGIGKKGQQPARKRLNFGQTGDSESVPDPQPLGEPPAAPSGVGPNTMAAGGGAPMADNNEGADGVGSSSGNWHCDSTWLGDRVITTSTRTWALPTYNNHLYKQISNGTSGGATNDNTYFGYSTPWGYFDFNRFHCHFSPRDWQRLINNNWGFRPKRLSFKLFNIQVKEVTQNEGTKTIANNLTSTIQVFTDSEYQLPYVLGSAHQGCLPPFPADVFMIPQYGYLTLNNGSQAVGRSSFYCLEYFPSQMLRTGNNFQFTYTFEDVPFHSSYAHSQSLDRLMNPLIDQYLYYLSRTQTTGGTANTQTLGFSQGGPNTMANQAKNWLPGPCYRQQRVSTTTGQNNNSNFAWTAGTKYHLNGRNSLANPGIAMATHKDDEERFFPSNGILIFGKQNAARDNADYSDVMLTSEEEIKTTNPVATEEYGIVADNLQQQNTAPQIGTVNSQGALPGMVWQNRDVYLQGPIWAKIPHTDGNFHPSPLMGGFGLKHPPPQILIKNTPVPADPPTTFNQSKLNSFITQYSTGQVSVEIEWELQKENSKRWNPEIQYTSNYYKSTSVDFAVIQKACTLNPAPLAPVTSPVI

SEQ ID NO: 5170 - DNA, 2217 bp, Adeno-associated virus 8; identical to SEQ ID NO: 5165
  source 1..2217: mol_type = genomic DNA

SEQ ID NO: 5171 - DNA, 4385 bp, Adeno-associated virus 9
  source 1..4385: mol_type = genomic DNA
cagagagggagtggccaactccatcactaggggtaatcgcgaagcgcctcccacgctgccgcgtcagcgctgacgtagattacgtcataggggagtggtcctgtattagctgtcacgtgagtgcttttgcgacattttgcgacaccacatggccatttgaggtatatatggccgagtgagcgagcaggatctccattttgaccgcgaaatttgaacgagcagcagccatgccgggcttctacgagattgtgatcaaggtgccgagcgacctggacgagcacctgccgggcatttctgactcttttgtgaactgggtggccgagaaggaatgggagctgcccccggattctgacatggatcggaatctgatcgagcaggcacccctgaccgtggccgagaagctgcagcgcgacttcctggtccaatggcgccgcgtgagtaaggccccggaggccctcttctttgttcagttcgagaagggcgagagctactttcacctgcacgttctggtcgagaccacgggggtcaagtccatggtgctaggccgcttcctgagtcagattcgggagaagctggtccagaccatctaccgcgggatcgagccgaccctgcccaactggttcgcggtgaccaagacgcgtaatggcgccggcggggggaacaaggtggtggacgagtgctacatccccaactacctcctgcccaagactcagcccgagctgcagtgggcgtggactaacatggaggagtatataagcgcgtgcttgaacctggccgagcgcaaacggctcgtggcgcagcacctgacccacgtcagccagacgcaggagcagaacaaggagaatctgaaccccaattctgacgcgcccgtgatcaggtcaaaaacctccgcgcgctacatggagctggtcgggtggctggtggaccggggcatcacctccgagaagcagtggatccaggaggaccaggcctcgtacatctccttcaacgccgcctccaactcgcggtcccagatcaaggccgcgctggacaatgccggcaagatcatggcgctgaccaaatccgcgcccgactacctggtaggcccttcacttccggtggacattacgcagaaccgcatctaccgcatcctgcagctcaacggctacgaccctgcctacgccggctccgtctttctcggctgggcacaaaagaagttcgggaaacgcaacaccatctggctgtttgggccggccaccacgggaaagaccaacatcgcagaagccattgcccacgccgtgcccttctacggctgcgtcaactggaccaatgagaactttcccttcaacgattgcgtcgacaagatggtgatctggtgggaggagggcaagatgacggccaaggtcgtggagtccgccaaggccattctcggcggcagcaaggtgcgcgtggaccaaaagtgcaagtcgtccgcccagatcgaccccactcccgtgatcgtcacctccaacaccaacatgtgcgccgtgattgacgggaacagcaccaccttcgagcaccagcagcctctccaggaccggatgtttaagttcgaactcacccgccgtctggagcacgactttggcaaggtgacaaagcaggaagtcaaagagttcttccgctgggccagtgatcacgtgaccgaggtggcgcatgagttttacgtcagaaagggcggagccagcaaaagacccgcccccgatgacgcggataaaagcgagcccaagcgggcctgcccctcagtcgcggatccatcgacgtcagacgcggaaggagctccggtggactttgccgacaggtaccaaaacaaatgttctcgtcacgcgggcatgcttcagatgctgcttccctgcaaaacgtgcgagagaatgaatcagaatttcaacatttgcttcacacacggggtcagagactgctcagagtgtttccccggcgtgtcagaatctcaaccggtcgtcagaaagaggacgtatcggaaactctgtgcgattcatcatctgctggggcgggctcccgagattgcttgctcggcctgcgatctggtcaacgtggacctggatgactgtgtttctgagcaataaatgacttaaaccaggtatggctgccgatggttatcttccagattggctcgaggacaacctctctgagggcattcgcgagtggtgggcgctgaaacctggagccccgaagcccaaagccaaccagcaaaagcaggacgacggccggggtctggtgcttcctggctacaagtacctcggacccttcaacggactcgacaagggggagcccgtcaacgcggcggacgcagcggccctcgagcacggcaaggcctacgaccagcagctgcaggcgggtgacaatccgtacctgcggtataaccacgccgacgccgagtttcaggagcgtctgcaagaagatacgtcttttgggggcaacctcgggcgagcagtcttccaggccaagaagcgggttctcgaacctctcggtctggttgaggaaggcgctaagacggctcctggaaagaagagaccggtagagccatcaccccagcgttctccagactcctctacgggcatcggcaagaaaggccaacagcccgccagaaaaagactcaattttggtcagactggcgactcagagtcagttccagaccctcaacctctcggagaacctccagcagcgccctctggtgtgggacctaatacaatggctgcaggcggtggcgcaccaatggcagacaataacgaaggcgccgacggagtgggtaattcctcgggaaattggcattgcgattccacatggctgggggacagagtcatcaccaccagcacccgaacctgggcattgcccacctacaacaaccacctctacaagcaaatctccaatggaacatcgggaggaagcaccaacgacaacacctactttggctacagcaccccctgggggtattttgacttcaacagattccactgccacttctcaccacgtgactggcagcgactcatcaacaacaactggggattccggccaaagagactcaacttcaagctgttcaacatccaggtcaaggaggttacgacgaacgaaggcaccaagaccatcgccaataaccttaccagcaccgtccaggtctttacggactcggagtaccagctaccgtacgtcctaggctctgcccaccaaggatgcctgccaccgtttcctgcagacgtcttcatggttcctcagtacggctacctgacgctcaacaatggaagtcaagcgttaggacgttcttctttctactgtctggaatacttcccttctcagatgctgagaaccggcaacaactttcagttcagctacactttcgaggacgtgcctttccacagcagctacgcacacagccagagtctagatcgactgatgaaccccctcatcgaccagtacctatactacctggtcagaacacagacaactggaactgggggaactcaaactttggcattcagccaagcaggccctagctcaatggccaatcaggctagaaactgggtacccgggccttgctaccgtcagcagcgcgtctccacaaccaccaaccaaaataacaacagcaactttgcgtggacgggagctgctaaattcaagctgaacgggagagactcgctaatgaatcctggcgtggctatggcatcgcacaaagacgacgaggaccgcttctttccatcaagtggcgttctcatatttggcaagcaaggagccgggaacgatggagtcgactacagccaggtgctgattacagatgaggaagaaattaaagccaccaaccctgtagccacagaggaatacggagcagtggccatcaacaaccaggccgctaacacgcaggcgcaaactggacttgtgcataaccagggagttattcctggtatggtctggcagaaccgggacgtgtacctgcagggccctatttgggctaaaatacctcacacagatggcaactttcacccgtctcctctgatgggtggatttggactgaaacacccacctccacagattctaattaaaaatacaccagtgccggcagatcctcctcttaccttcaatcaagccaagctgaactctttcatcacgcagtacagcacgggacaagtcagcgtggaaatcgagtgggagctgcagaaagaaaacagcaagcgctggaatccagagatccagtatacttcaaactactacaaatctacaaatgtggactttgctgtcaataccaaaggtgtttactctgagcctcgccccattggtactcgttacctcacccgtaatttgtaattgcctgttaatcaataaaccggttaattcgtttcagttgaactttggtctctgcg

SEQ ID NO: 5172 - DNA, 4382 bp, Adeno-associated virus 9
  source 1..4382: mol_type = genomic DNA
cagagagggagtggccaactccatcactaggggtaatcgcgaagcgcctcccacgctgccgcgtcagcgctgacgtagattacgtcataggggagtggtcctgtattagctgtcacgtgagtgcttttgcgacattttgcgacaccacatggccatttgaggtatatatggccgagtgagcgagcaggatctccattttgaccgcgaaatttgaacgagcagcagccatgccgggcttctacgagattgtgatcaaggtgccgagcgacctggacgagcacctgccgggcatttctgactcttttgtgaactgggtggccgagaaggaatgggagctgcccccggattctgacatggatcggaatctgatcgagcaggcacccctgaccgtggccgagaagctgtagcgcgacttcctggtccaatggcgccgcgtgagtaaggccccggaggccctcttctttgttcagttcgagaagggcgagagctactttcacctgcacgttctggtcgagaccacgggggtcaagtccatggtgctaggccgcttcctgagtcagattcgggagaagctggtccagaccatctaccgcgggatcgagccgaccctgcccaactggttcgcggtgaccaagacgcgtaatggcgccggcggggggaacaaggtggtggacgagtgctacatccccaactacctcctgcccaagactcagcccgagctgcagtgggcgtggactaacatggaggagtatataagcgcgtgcttgaacctggccgagcgcaaacggctcgtggcgcagcacctgacccacgtcagccagacgcaggagcagaacaaggagaatctgaaccccaattctgacgcgcccgtgatcaggtcaaaaacctccgcgcgctacatggagctggtcgggtggctggtggaccggggcatcacctccgagaagcagtggatccaggaggaccaggcctcgtacatctccttcaacgccgcctccaactcgcggtcccagatcaaggccgcgctggacaatgccggcaagatcatggcgctgaccaaatccgcgcccgactacctggtaggcccttcacttccggtggacattacgcagaaccgcatctaccgcatcctgcagctcaacggctacgaccctgcctacgccggctccgtctttctcggctgggcacaaaagaagttcgggaaacgcaacaccatctggctgtttgggccggccaccacgggaaagaccaacatcgcagaagccattgcccacgccgtgcccttctacggctgcgtcaactggaccaatgagaactttcccttcaacgattgcgtcgacaagatggtgatctggtgggaggagggcaagatgacggccaaggtcgtggagtccgccaaggccattctcggcggcagcaaggtgcgcgtggaccaaaagtgcaagtcgtccgcccagatcgaccccactcccgtgatcgtcacctccaacaccaacatgtgcgccgtgattgacgggaacagcaccaccttcgagcaccagcagcctctccaggaccggatgtttaagttcgaactcacccgccgtctggagcacgactttggcaaggtgacaaagcaggaagtcaaagagttcttccgctgggccagtgatcacgtgaccgaggtggcgcatgagttttacgtcagaaagggcggagccagcaaaagacccgcccccgatgacgcggataaaagcgagcccaagcgggcctgcccctcagtcgcggatccatcgacgtcagacgcggaaggagctccggtggactttgccgacaggtaccaaaacaaatgttctcgtcacgcgggcatgcttcagatgctgcttccctgcaaaacgtgcgagagaatgaatcagaatttcaacatttgcttcacacacggggtcagagactgctcagagtgtttccccggcgtgtcagaatctcaaccggtcgtcagaaagaggacgtatcggaaactctgtgcgattcatcatctgctggggcgggctcccgagattgcttgctcggcctgcgatctggtcaacgtggacctggatgactgtgtttctgagcaataaatgacttaaaccaggtatggctgccgatggttatcttccagattggctcgaggacaacctctctgagggcattcgcgagtggtgggacctgaaacctggagccccgaaacccaaagccaaccagcaaaagcaggacgacggccggggtctggtgcttcctggctacaagtacctcggacccttcaacggactcgacaagggggagcccgtcaacgcggcggacgcagcggccctcgagcacgacaaggcctacgaccagcagctcaaagcgggtgacaatccgtacctgcggtataaccacgccgacgccgagtttcaggagcgtctgcaagaagatacgtcttttgggggcaacctcgggcgagcagtcttccaggccaagaagcgggttctcgaacctctcggtctggttgaggaaggcgctaagacggctcctggaaagaagagaccggtagagcagtcaccccaagaaccagactcatcctcgggcatcggcaaatcaggccagcagcccgctaaaaagagactcaattttggtcagactggcgactcagagtcagtccccgacccacaacctctcggagaacctccagaagccccctcaggtctgggacctaatacaatggcttcaggcggtggcgctccaatggcagacaataacgaaggcgccgacggagtgggtaattcctcgggaaattggcattgcgattccacatggctgggggacagagtcatcaccaccagcacccgaacctgggcattgcccacctacaacaaccacctctacaagcaaatctccaatggaacatcgggaggaagcaccaacgacaacacctactttggctacagcaccccctgggggtattttgacttcaacagattccactgccacttctcaccacgtgactggcagcgactcatcaacaacaactggggattccggccaaagagactcaacttcaagctgttcaacatccaggtcaaggaggttacgacgaacgaaggcaccaagaccatcgccaataaccttaccagcaccgtccaggtctttacggactcggagtaccagctaccgtacgtcctaggctctgcccaccaaggatgcctgccaccgtttcctgcagacgtcttcatggttcctcagtacggctacctgacgctcaacaatggaagtcaagcgttaggacgttcttctttctactgtctggaatacttcccttctcagatgctgagaaccggcaacaactttcagttcagctacactttcgaggacgtgcctttccacagcagctacgcacacagccagagtctagatcgactgatgaaccccctcatcgaccagtacctatactacctggtcagaacacagacaactggaactgggggaactcaaactttggcattcagccaagcaggccctagctcaatggccaatcaggctagaaactgggtacccgggccttgctaccgtcagcagcgcgtctccacaaccaccaaccaaaataacaacagcaactttgcgtggacgggagctgctaaattcaagctgaacgggagagactcgctaatgaatcctggcgtggctatggcatcgcacaaagacgacgaggaccgcttctttccatcaagtggcgttctcatatttggcaagcaaggagccgggaacgatggagtcgactacagccaggtgctgattacagatgaggaagaaattaaagccaccaaccctgtagccacagaggaatacggagcagtggccatcaacaaccaggccgctaacacgcaggcgcaaactggacttgtgcataaccagggagttattcctggtatggtctggcagaaccgggacgtgtacctgcagggccctatttgggctaaaatacctcacacagatggcaactttcacccgtctcctctgatgggtggatttggactgaaacacccacctccacagattctaattaaaaatacaccagtgccggcagatcctcctcttaccttcaatcaagccaagctgaactctttcatcacgcagtacagcacgggacaagtcagcgtggaaatcgagtgggagctgcagaaagaaaacagcaagcgctggaatccagagatccagtatacttcaaactactacaaatctacaaatgtggactttgctgtcaataccgaaggtgtttactctgagcctcgccccattggtactcgttacctcacccgtaatttgtaattgcctgttaatcaataaaccggttaattcgtttcagttgaactttggtctctgcg

SEQ ID NO: 5173 - protein, 736 aa, Adeno-associated virus 9; identical to SEQ ID NO: 4805

SEQ ID NO: 5174 - protein, 736 aa, Adeno-associated virus 9
MAADGYLPDWLEDNLSEGIREWWDLKPGAPKPKANQQKQDDGRGLVLPGYKYLGPFNGLDKGEPVNAADAAALEHDKAYDQQLKAGDNPYLRYNHADAEFQERLQEDTSFGGNLGRAVFQAKKRVLEPLGLVEEGAKTAPGKKRPVEQSPQEPDSSSGIGKSGQQPAKKRLNFGQTGDSESVPDPQPLGEPPEAPSGLGPNTMASGGGAPMADNNEGADGVGNSSGNWHCDSTWLGDRVITTSTRTWALPTYNNHLYKQISNGTSGGSTNDNTYFGYSTPWGYFDFNRFHCHFSPRDWQRLINNNWGFRPKRLNFKLFNIQVKEVTTNEGTKTIANNLTSTVQVFTDSEYQLPYVLGSAHQGCLPPFPADVFMVPQYGYLTLNNGSQALGRSSFYCLEYFPSQMLRTGNNFQFSYTFEDVPFHSSYAHSQSLDRLMNPLIDQYLYYLVRTQTTGTGGTQTLAFSQAGPSSMANQARNWVPGPCYRQQRVSTTTNQNNNSNFAWTGAAKFKLNGRDSLMNPGVAMASHKDDEDRFFPSSGVLIFGKQGAGNDGVDYSQVLITDEEEIKATNPVATEEYGAVAINNQAANTQAQTGLVHNQGVIPGMVWQNRDVYLQGPIWAKIPHTDGNFHPSPLMGGFGLKHPPPQILIKNTPVPADPPLTFNQAKLNSFITQYSTGQVSVEIEWELQKENSKRWNPEIQYTSNYYKSTNVDFAVNTEGVYSEPRPIGTRYLTRNL

SEQ ID NO: 5175 - protein, 623 aa, Adeno-associated virus 9
MPGFYEIVIKVPSDLDEHLPGISDSFVNWVAEKEWELPPDSDMDRNLIEQAPLTVAEKLQRDFLVQWRRVSKAPEALFFVQFEKGESYFHLHVLVETTGVKSMVLGRFLSQIREKLVQTIYRGIEPTLPNWFAVTKTRNGAGGGNKVVDECYIPNYLLPKTQPELQWAWTNMEEYISACLNLAERKRLVAQHLTHVSQTQEQNKENLNPNSDAPVIRSKTSARYMELVGWLVDRGITSEKQWIQEDQASYISFNAASNSRSQIKAALDNAGKIMALTKSAPDYLVGPSLPVDITQNRIYRILQLNGYDPAYAGSVFLGWAQKKFGKRNTIWLFGPATTGKTNIAEAIAHAVPFYGCVNWTNENFPFNDCVDKMVIWWEEGKMTAKVVESAKAILGGSKVRVDQKCKSSAQIDPTPVIVTSNTNMCAVIDGNSTTFEHQQPLQDRMFKFELTRRLEHDFGKVTKQEVKEFFRWASDHVTEVAHEFYVRKGGASKRPAPDDADKSEPKRACPSVADPSTSDAEGAPVDFADRYQNKCSRHAGMLQMLLPCKTCERMNQNFNICFTHGVRDCSECFPGVSESQPVVRKRTYRKLCAIHHLLGRAPEIACSACDLVNVDLDDCVSEQ

SEQ ID NO: 5176 - DNA, 1797 bp, synthetic construct
  misc_feature 1..1797: note = Description of Artificial Sequence: Synthetic polynucleotide
  source 1..1797: mol_type = other DNA
acggctccgaccggagacaagcggaaaggcgaagacgaacctcgtttgcccgacacttcttcacagactcccaagaaaaacaagaagcctcgcaaggaaagaccttccggcggggcagaagatccgggcgaaggcacctcttccaacgctggagcagcagcacccgcctctagtgtgggatcatctatcatggctgaaggaggtggcggcccagtgggcgatgcaggccagggtgccgatggagtgggcaattcctccggaaattggcattgcgattcccaatggctggaaaacggagtcgtcactcgaaccacccgaacctgggtcttgcccagctacaacaaccacctgtacaaacgaatccaaggacccagcggaggcgacaacaacaacaaattctttggattcagcaccccctggggatactttgactacaatcgattccactgccacttttccccgcgagactggcaacgactcatcaacaacaactggggcatccgtcccaaagcgatgcgctttagactctttaacatccaggttaaagaggtcacggtccaagacttcaacaccaccatcggcaacaacctcaccagtacggtccaggtctttgcggacaaggactaccaactgccgtacgtcctcggatcggctaccgaaggcaccttcccgccgttcccagcggatatctacacgatcccgcagtacgggtactgcacgctaaactacaacaacgaggcggtggatcgttcggccttctactgtctggactactttccctcagacatgctgcggacaggaaataactttgagtttacttacaccttcgaggacgttcctttccatagcatgtttgcccacaaccagacgctagaccggctgatgaatcccctcgtggatcagtacctctgggctttcagctccgtcagccaagcaggctcatctggacgagctcttcattactcgcgggcgactaaaaccaacatggcggctcaatataggaactggttacctgggcctttcttccgtgatcagcaaatctttacgggcgctagcaacatcactaaaaataacgtctttagcgtttgggaaaaaggcaagcaatgggaactcgacaatcggaccaacctaatgcagcccggtcctgcggcagcgaccacctttagcggagaacctgaccgtcaagccatgcaaaacacgctggcttttagcaggaccgtctacgatcaaacgaccgccacgaccgatcgtaaccagatactcatcaccaacgaagacgaaatcagacccaccaactcggtcggtatcgacgcgtggggagcagttcccaccaacaaccagtcgatcgtgacccccggcactcgcgcggccgtcaacaatcaaggggcgcttcccgggatggtgtggcaaaacagagacatttaccctacagggacccatttggccaaaattcccgacactgacaatcacttccatccgtccccgcttattgggcggtttggctgcaagcatccccctccccagattttcattaaaaacacacccgtccctgccaacccttcggaaacgttccagacggccaaagtggcctccttcatcaaccagtactcgaccggacagtgcaccgtcgaaatcttttgggaactcaagaaggaaacctccaagcgctggaaccccgaaatccagttcacctccaactttggcaacgcggccgacatccagtttgccgtctccgacacgggatcctattccgaacctcgtcccatcggtacccgttaccttaccaaacctctgtaa

SEQ ID NO: 5177 - DNA, 1989 bp, synthetic construct
  misc_feature 1..1989: note = Description of Artificial Sequence: Synthetic polynucleotide
  source 1..1989: mol_type = other DNA
atgaggtcgtactacgaggtcatcgttcagctgcccaacgacgtcgagagtcaggtacctggaatctccgattcgttcgtcaactggattacgtcgcgagaatggacgttgcctgaggacgccgattgggatttggaccaggtcgatcaagttcaactgacgctcggcgacaaaatccaacgggagattcgaactcattgggggacgatggccaaagaaccggactttcactattttatccaactggaacaaggtgaggtgttctttcatttacacgtcctgctggaaacgtgttccgtaaagccgatggtactcggaagatatatccgacatattcaacaaaaaattgtgagtaaagtctactgcgccacgagcctacgatggaaggatggatgcgtggtgaccaagaccaaaaatttcgggggcgcgaacaaggtccgggccgagtcgtatattcccgcctacctgatcccgaaacagcaaccggaagtgcagtgggcgtggactaacgtgcccgagtatataaaagcgtgcttgcaccgagaactgcgtgccagtctcgcgcgacttcacttcgaggaggcgggcgtctcgcaatccaaggaaaatctcgcgagaactgcagacggcgctcccgtgatgccgacccgcgtcagcaaacgctacatggagctcgtggattggctcgtggagaaggggatcaccaccgagaaggaatggctgctggaaaacagagaaagctttcggagctttcaggcctcgagcaactcggcgcgtcagatcaagacggccctgcaaggcgccattcaggagatgcttctgaccaagacggcggaggactacctcgtcggaaaggatcccgtctcggacgacgacatccgtcagaaccgcatctacaagattctggaactgaaccactacgacccagcgtacgtggggagtattttggtcgggtggtgccagaagaaatggggcaagcgaaacacgctgtggctgttcggacatgcgaccaccggcaagaccaacatcgcggaggctattgcccatgctgtgccgttctatggatgcgttaactggaccaacgagaactttccgttcaacgactgcgtcgaaaaaatgattatctggtgggaggagggcaaaatgaccgccaaagtggtggaaacagccaaggcgattctgggaggatctcgggtgagagtggaccaaaaatgcaaagcttcggttccgatcgaaccgacgccggtcattattaccagtaacaccaacatgtgttatgtcatcgacgggaacacgaccacgttcgagcataagcagccgttggaggacaggatgtttaagctcgaattgctgactcggttgcctgatgactttggtaaggtgaccaaacaggaggtgcgtcaattcttcaggtggtctcaggatcacctgacccctgtgatcccagaattcctagtgcggaaggcggagtctcgcaaaagacccgccccttccggggaaggctatataagcccgacaaagcggcccgcgctcgcagagcagcagcaggcgtcggagagcgcggacccggttcccaccaggtatcgtatcaaatgctcgaaacattgcggtatggataaaatgttgtttccttgccaaatttgtgaatcgatgaacagagatattaatatttgtgctattcataaaacgaccgactgtaaagagtgtttccccgactacggggataaagatgatgtagaactacccccctgtacagaacacaacgtgtctcgttgttatcaatgtcattcgggcgaattgtatcgcgtgacttcggactctgacgagaaacctgcccccgagagtgatgaaggcaccgagccatcctatgctccctgcacgattcaccacctgatgggcaagagtcacgggttagtcacttgcgcggcgtgtcggttgaaaaatagtacgttgcatgatgacttggatgacggtgatctcgaacaataa

SEQ ID NO: 5178 - DNA, 1626 bp, synthetic construct
  misc_feature 1..1626: note = Description of Artificial Sequence: Synthetic polynucleotide
  source 1..1626: mol_type = other DNA
atgaggtcgtactacgaggtcatcgttcagctgcccaacgacgtcgagagtcaggtacctggaatctccgattcgttcgtcaactggattacgtcgcgagaatggacgttgcctgaggacgccgattgggatttggaccaggtcgatcaagttcaactgacgctcggcgacaaaatccaacgggagattcgaactcattgggggacgatggccaaagaaccggactttcactattttatccaactggaacaaggtgaggtgttctttcatttacacgtcctgctggaaacgtgttccgtaaagccgatggtactcggaagatatatccgacatattcaacaaaaaattgtgagtaaagtctactgcgccacgagcctacgatggaaggatggatgcgtggtgaccaagaccaaaaatttcgggggcgcgaacaaggtccgggccgagtcgtatattcccgcctacctgatcccgaaacagcaaccggaagtgcagtgggcgtggactaacgtgcccgagtatataaaagcgtgcttgcaccgagaactgcgtgccagtctcgcgcgacttcacttcgaggaggcgggcgtctcgcaatccaaggaaaatctcgcgagaactgcagacggcgctcccgtgatgccgacccgcgtcagcaaacgctacatggagctcgtggattggctcgtggagaaggggatcaccaccgagaaggaatggctgctggaaaacagagaaagctttcggagctttcaggcctcgagcaactcggcgcgtcagatcaagacggccctgcaaggcgccattcaggagatgcttctgaccaagacggcggaggactacctcgtcggaaaggatcccgtctcggacgacgacatccgtcagaaccgcatctacaagattctggaactgaaccactacgacccagcgtacgtggggagtattttggtcgggtggtgccagaagaaatggggcaagcgaaacacgctgtggctgttcggacatgcgaccaccggcaagaccaacatcgcggaggctattgcccatgctgtgccgttctatggatgcgttaactggaccaacgagaactttccgttcaacgactgcgtcgaaaaaatgattatctggtgggaggagggcaaaatgaccgccaaagtggtggaaacagccaaggcgattctgggaggatctcgggtgagagtggaccaaaaatgcaaagcttcggttccgatcgaaccgacgccggtcattattaccagtaacaccaacatgtgttatgtcatcgacgggaacacgaccacgttcgagcataagcagccgttggaggacaggatgtttaagctcgaattgctgactcggttgcctgatgactttggtaaggtgaccaaacaggaggtgcgtcaattcttcaggtggtctcaggatcacctgacccctgtgatcccagaattcctagtgcggaaggcggagtctcgcaaaagacccgccccttccggggaaggctatataagcccgacaaagcggcccgcgctcgcagagcagcagcaggcgtcggagagcgcggacccggttcccaccagattggttggagcggttggtcaaaaagggagtgaatgctgcagctga

SEQ ID NO: 5179 - DNA, 1323 bp, synthetic construct
  misc_feature 1..1323: note = Description of Artificial Sequence: Synthetic polynucleotide
  source 1..1323: mol_type = other DNA
atggagctcgtggattggctcgtggagaaggggatcaccaccgagaaggaatggctgctggaaaacagagaaagctttcggagctttcaggcctcgagcaactcggcgcgtcagatcaagacggccctgcaaggcgccattcaggagatgcttctgaccaagacggcggaggactacctcgtcggaaaggatcccgtctcggacgacgacatccgtcagaaccgcatctacaagattctggaactgaaccactacgacccagcgtacgtggggagtattttggtcgggtggtgccagaagaaatggggcaagcgaaacacgctgtggctgttcggacatgcgaccaccggcaagaccaacatcgcggaggctattgcccatgctgtgccgttctatggatgcgttaactggaccaacgagaactttccgttcaacgactgcgtcgaaaaaatgattatctggtgggaggagggcaaaatgaccgccaaagtggtggaaacagccaaggcgattctgggaggatctcgggtgagagtggaccaaaaatgcaaagcttcggttccgatcgaaccgacgccggtcattattaccagtaacaccaacatgtgttatgtcatcgacgggaacacgaccacgttcgagcataagcagccgttggaggacaggatgtttaagctcgaattgctgactcggttgcctgatgactttggtaaggtgaccaaacaggaggtgcgtcaattcttcaggtggtctcaggatcacctgacccctgtgatcccagaattcctagtgcggaaggcggagtctcgcaaaagacccgccccttccggggaaggctatataagcccgacaaagcggcccgcgctcgcagagcagcagcaggcgtcggagagcgcggacccggttcccaccaggtatcgtatcaaatgctcgaaacattgcggtatggataaaatgttgtttccttgccaaatttgtgaatcgatgaacagagatattaatatttgtgctattcataaaacgaccgactgtaaagagtgtttccccgactacggggataaagatgatgtagaactacccccctgtacagaacacaacgtgtctcgttgttatcaatgtcattcgggcgaattgtatcgcgtgacttcggactctgacgagaaacctgcccccgagagtgatgaaggcaccgagccatcctatgctccctgcacgattcaccacctgatgggcaagagtcacgggttagtcacttgcgcggcgtgtcggttgaaaaatagtacgttgcatgatgacttggatgacggtgatctcgaacaataa

SEQ ID NO: 5180 - DNA, 960 bp, synthetic construct
  misc_feature 1..960: note = Description of Artificial Sequence: Synthetic polynucleotide
  source 1..960: mol_type = other DNA
atggagctcgtggattggctcgtggagaaggggatcaccaccgagaaggaatggctgctggaaaacagagaaagctttcggagctttcaggcctcgagcaactcggcgcgtcagatcaagacggccctgcaaggcgccattcaggagatgcttctgaccaagacggcggaggactacctcgtcggaaaggatcccgtctcggacgacgacatccgtcagaaccgcatctacaagattctggaactgaaccactacgacccagcgtacgtggggagtattttggtcgggtggtgccagaagaaatggggcaagcgaaacacgctgtggctgttcggacatgcgaccaccggcaagaccaacatcgcggaggctattgcccatgctgtgccgttctatggatgcgttaactggaccaacgagaactttccgttcaacgactgcgtcgaaaaaatgattatctggtgggaggagggcaaaatgaccgccaaagtggtggaaacagccaaggcgattctgggaggatctcgggtgagagtggaccaaaaatgcaaagcttcggttccgatcgaaccgacgccggtcattattaccagtaacaccaacatgtgttatgtcatcgacgggaacacgaccacgttcgagcataagcagccgttggaggacaggatgtttaagctcgaattgctgactcggttgcctgatgactttggtaaggtgaccaaacaggaggtgcgtcaattcttcaggtggtctcaggatcacctgacccctgtgatcccagaattcctagtgcggaaggcggagtctcgcaaaagacccgccccttccggggaaggctatataagcccgacaaagcggcccgcgctcgcagagcagcagcaggcgtcggagagcgcggacccggttcccaccagattggttggagcggttggtcaaaaagggagtgaatgctgcagctga

SEQ ID NO: 5181 - DNA, 1608 bp, synthetic construct
  misc_feature 1..1608: note = Description of Artificial Sequence: Synthetic polynucleotide
  source 1..1608: mol_type = other DNA
atggctgaaggaggtggcggcccagtgggcgatgcaggccagggtgccgatggagtgggcaattcctccggaaattggcattgcgattcccaatggctggaaaacggagtcgtcactcgaaccacccgaacctgggtcttgcccagctacaacaaccacctgtacaaacgaatccaaggacccagcggaggcgacaacaacaacaaattctttggattcagcaccccctggggatactttgactacaatcgattccactgccacttttccccgcgagactggcaacgactcatcaacaacaactggggcatccgtcccaaagcgatgcgctttagactctttaacatccaggttaaagaggtcacggtccaagacttcaacaccaccatcggcaacaacctcaccagtacggtccaggtctttgcggacaaggactaccaactgccgtacgtcctcggatcggctaccgaaggcaccttcccgccgttcccagcggatatctacacgatcccgcagtacgggtactgcacgctaaactacaacaacgaggcggtggatcgttcggccttctactgtctggactactttccctcagacatgctgcggacaggaaataactttgagtttacttacaccttcgaggacgttcctttccatagcatgtttgcccacaaccagacgctagaccggctgatgaatcccctcgtggatcagtacctctgggctttcagctccgtcagccaagcaggctcatctggacgagctcttcattactcgcgggcgactaaaaccaacatggcggctcaatataggaactggttacctgggcctttcttccgtgatcagcaaatctttacgggcgctagcaacatcactaaaaataacgtctttagcgtttgggaaaaaggcaagcaatgggaactcgacaatcggaccaacctaatgcagcccggtcctgcggcagcgaccacctttagcggagaacctgaccgtcaagccatgcaaaacacgctggcttttagcaggaccgtctacgatcaaacgaccgccacgaccgatcgtaaccagatactcatcaccaacgaagacgaaatcagacccaccaactcggtcggtatcgacgcgtggggagcagttcccaccaacaaccagtcgatcgtgacccccggcactcgcgcggccgtcaacaatcaaggggcgcttcccgggatggtgtggcaaaacagagacatttaccctacagggacccatttggccaaaattcccgacactgacaatcacttccatccgtccccgcttattgggcggtttggctgcaagcatccccctccccagattttcattaaaaacacacccgtccctgccaacccttcggaaacgttccagacggccaaagtggcctccttcatcaaccagtactcgaccggacagtgcaccgtcgaaatcttttgggaactcaagaaggaaacctccaagcgctggaaccccgaaatccagttcacctccaactttggcaacgcggccgacatccagtttgccgtctccgacacgggatcctattccgaacctcgtcccatcggtacccgttaccttaccaaacctctgtaa

SEQ ID NO: 5182 - DNA, 2232 bp, synthetic construct
  misc_feature 1..2232: note = Description of Artificial Sequence: Synthetic polynucleotide
  source 1..2232: mol_type = other DNA
atgtctctcatttctgatgcgattccagattggttggagcggttggtcaaaaagggagtgaatgctgcagctgatttctaccatttggaaagcggtcctcctcgtcctaaggcaaatcagcaaactcaagaatctcttgaaaaggacgattcgagaggtctcgtgttcccaggctacaattatctaggccctttcaacggtctagataaaggagaacccgtcaacgaggcagacgctgccgccttagaacacgacaaggcttacgacctcgaaatcaaggacgggcacaacccgtactttgagtacaacgaggccgacagacgtttccaggaacgtctcaaagacgatacctcctttggaggcaatttaggtaaagccatcttccaggccaaaaagagggttctcgaaccctttggtctggtggaagactcaaagacggctccgaccggagacaagcggaaaggcgaagacgaacctcgtttgcccgacacttcttcacagactcccaagaaaaacaagaagcctcgcaaggaaagaccttccggcggggcagaagatccgggcgaaggcacctcttccaacgctggagcagcagcacccgcctctagtgtgggatcatctatcatggctgaaggaggtggcggcccagtgggcgatgcaggccagggtgccgatggagtgggcaattcctccggaaattggcattgcgattcccaatggctggaaaacggagtcgtcactcgaaccacccgaacctgggtcttgcccagctacaacaaccacctgtacaaacgaatccaaggacccagcggaggcgacaacaacaacaaattctttggattcagcaccccctggggatactttgactacaatcgattccactgccacttttccccgcgagactggcaacgactcatcaacaacaactggggcatccgtcccaaagcgatgcgctttagactctttaacatccaggttaaagaggtcacggtccaagacttcaacaccaccatcggcaacaacctcaccagtacggtccaggtctttgcggacaaggactaccaactgccgtacgtcctcggatcggctaccgaaggcaccttcccgccgttcccagcggatatctacacgatcccgcagtacgggtactgcacgctaaactacaacaacgaggcggtggatcgttcggccttctactgtctggactactttccctcagacatgctgcggacaggaaataactttgagtttacttacaccttcgaggacgttcctttccatagcatgtttgcccacaaccagacgctagaccggctgatgaatcccctcgtggatcagtacctctgggctttcagctccgtcagccaagcaggctcatctggacgagctcttcattactcgcgggcgactaaaaccaacatggcggctcaatataggaactggttacctgggcctttcttccgtgatcagcaaatctttacgggcgctagcaacatcactaaaaataacgtctttagcgtttgggaaaaaggcaagcaatgggaactcgacaatcggaccaacctaatgcagcccggtcctgcggcagcgaccacctttagcggagaacctgaccgtcaagccatgcaaaacacgctggcttttagcaggaccgtctacgatcaaacgaccgccacgaccgatcgtaaccagatactcatcaccaacgaagacgaaatcagacccaccaactcggtcggtatcgacgcgtggggagcagttcccaccaacaaccagtcgatcgtgacccccggcactcgcgcggccgtcaacaatcaaggggcgcttcccgggatggtgtggcaaaacagagacatttaccctacagggacccatttggccaaaattcccgacactgacaatcacttccatccgtccccgcttattgggcggtttggctgcaagcatccccctccccagattttcattaaaaacacacccgtccctgccaacccttcggaaacgttccagacggccaaagtggcctccttcatcaaccagtactcgaccggacagtgcaccgtcgaaatcttttgggaactcaagaaggaaacctccaagcgctggaaccccgaaatccagttcacctccaactttggcaacgcggccgacatccagtttgccgtctccgacacgggatcctattccgaacctcgtcccatcggtacccgttaccttaccaaacctctgtaa

SEQ ID NO: 5183 - protein, 535 aa, synthetic construct
  REGION 1..535: note = Description of Artificial Sequence: Synthetic polypeptide
MAEGGGGPVGDAGQGADGVGNSSGNWHCDSQWLENGVVTRTTRTWVLPSYNNHLYKRIQGPSGGDNNNKFFGFSTPWGYFDYNRFHCHFSPRDWQRLINNNWGIRPKAMRFRLFNIQVKEVTVQDFNTTIGNNLTSTVQVFADKDYQLPYVLGSATEGTFPPFPADIYTIPQYGYCTLNYNNEAVDRSAFYCLDYFPSDMLRTGNNFEFTYTFEDVPFHSMFAHNQTLDRLMNPLVDQYLWAFSSVSQAGSSGRALHYSRATKTNMAAQYRNWLPGPFFRDQQIFTGASNITKNNVFSVWEKGKQWELDNRTNLMQPGPAAATTFSGEPDRQAMQNTLAFSRTVYDQTTATTDRNQILITNEDEIRPTNSVGIDAWGAVPTNNQSIVTPGTRAAVNNQGALPGMVWQNRDIYPTGTHLAKIPDTDNHFHPSPLIGRFGCKHPPPQIFIKNTPVPANPSETFQTAKVASFINQYSTGQCTVEIFWELKKETSKRWNPEIQFTSNFGNAADIQFAVSDTGSYSEPRPIGTRYLTKPL

SEQ ID NO: 5184 - protein, 440 aa, synthetic construct
  REGION 1..440: note = Description of Artificial Sequence: Synthetic polypeptide
MELVDWLVEKGITTEKEWLLENRESFRSFQASSNSARQIKTALQGAIQEMLLTKTAEDYLVGKDPVSDDDIRQNRIYKILELNHYDPAYVGSILVGWCQKKWGKRNTLWLFGHATTGKTNIAEAIAHAVPFYGCVNWTNENFPFNDCVEKMIIWWEEGKMTAKVVETAKAILGGSRVRVDQKCKASVPIEPTPVIITSNTNMCYVIDGNTTTFEHKQPLEDRMFKLELLTRLPDDFGKVTKQEVRQFFRWSQDHLTPVIPEFLVRKAESRKRPAPSGEGYISPTKRPALAEQQQASESADPVPTRYRIKCSKHCGMDKMLFPCQICESMNRDINICAIHKTTDCKECFPDYGDKDDVELPPCTEHNVSRCYQCHSGELYRVTSDSDEKPAPESDEGTEPSYAPCTIHHLMGKSHGLVTCAACRLKNSTLHDDLDDGDLEQ

SEQ ID NO: 5185 - protein, 319 aa, synthetic construct
  REGION 1..319: note = Description of Artificial Sequence: Synthetic polypeptide
MELVDWLVEKGITTEKEWLLENRESFRSFQASSNSARQIKTALQGAIQEMLLTKTAEDYLVGKDPVSDDDIRQNRIYKILELNHYDPAYVGSILVGWCQKKWGKRNTLWLFGHATTGKTNIAEAIAHAVPFYGCVNWTNENFPFNDCVEKMIIWWEEGKMTAKVVETAKAILGGSRVRVDQKCKASVPIEPTPVIITSNTNMCYVIDGNTTTFEHKQPLEDRMFKLELLTRLPDDFGKVTKQEVRQFFRWSQDHLTPVIPEFLVRKAESRKRPAPSGEGYISPTKRPALAEQQQASESADPVPTRLVGAVGQKGSECCS

SEQ ID NO: 5186 - protein, 662 aa, synthetic construct
  REGION 1..662: note = Description of Artificial Sequence: Synthetic polypeptide
MRSYYEVIVQLPNDVESQVPGISDSFVNWITSREWTLPEDADWDLDQVDQVQLTLGDKIQREIRTHWGTMAKEPDFHYFIQLEQGEVFFHLHVLLETCSVKPMVLGRYIRHIQQKIVSKVYCATSLRWKDGCVVTKTKNFGGANKVRAESYIPAYLIPKQQPEVQWAWTNVPEYIKACLHRELRASLARLHFEEAGVSQSKENLARTADGAPVMPTRVSKRYMELVDWLVEKGITTEKEWLLENRESFRSFQASSNSARQIKTALQGAIQEMLLTKTAEDYLVGKDPVSDDDIRQNRIYKILELNHYDPAYVGSILVGWCQKKWGKRNTLWLFGHATTGKTNIAEAIAHAVPFYGCVNWTNENFPFNDCVEKMIIWWEEGKMTAKVVETAKAILGGSRVRVDQKCKASVPIEPTPVIITSNTNMCYVIDGNTTTFEHKQPLEDRMFKLELLTRLPDDFGKVTKQEVRQFFRWSQDHLTPVIPEFLVRKAESRKRPAPSGEGYISPTKRPALAEQQQASESADPVPTRYRIKCSKHCGMDKMLFPCQICESMNRDINICAIHKTTDCKECFPDYGDKDDVELPPCTEHNVSRCYQCHSGELYRVTSDSDEKPAPESDEGTEPSYAPCTIHHLMGKSHGLVTCAACRLKNSTLHDDLDDGDLEQ

SEQ ID NO: 5187 - protein, 541 aa, synthetic construct
  REGION 1..541: note = Description of Artificial Sequence: Synthetic polypeptide
MRSYYEVIVQLPNDVESQVPGISDSFVNWITSREWTLPEDADWDLDQVDQVQLTLGDKIQREIRTHWGTMAKEPDFHYFIQLEQGEVFFHLHVLLETCSVKPMVLGRYIRHIQQKIVSKVYCATSLRWKDGCVVTKTKNFGGANKVRAESYIPAYLIPKQQPEVQWAWTNVPEYIKACLHRELRASLARLHFEEAGVSQSKENLARTADGAPVMPTRVSKRYMELVDWLVEKGITTEKEWLLENRESFRSFQASSNSARQIKTALQGAIQEMLLTKTAEDYLVGKDPVSDDDIRQNRIYKILELNHYDPAYVGSILVGWCQKKWGKRNTLWLFGHATTGKTNIAEAIAHAVPFYGCVNWTNENFPFNDCVEKMIIWWEEGKMTAKVVETAKAILGGSRVRVDQKCKASVPIEPTPVIITSNTNMCYVIDGNTTTFEHKQPLEDRMFKLELLTRLPDDFGKVTKQEVRQFFRWSQDHLTPVIPEFLVRKAESRKRPAPSGEGYISPTKRPALAEQQQASESADPVPTRLVGAVGQKGSECCS

SEQ ID NO: 5188 - protein, 743 aa, synthetic construct
  REGION 1..743: note = Description of Artificial Sequence: Synthetic polypeptide
MSLISDAIPDWLERLVKKGVNAAADFYHLESGPPRPKANQQTQESLEKDDSRGLVFPGYNYLGPFNGLDKGEPVNEADAAALEHDKAYDLEIKDGHNPYFEYNEADRRFQERLKDDTSFGGNLGKAIFQAKKRVLEPFGLVEDSKTAPTGDKRKGEDEPRLPDTSSQTPKKNKKPRKERPSGGAEDPGEGTSSNAGAAAPASSVGSSIMAEGGGGPVGDAGQGADGVGNSSGNWHCDSQWLENGVVTRTTRTWVLPSYNNHLYKRIQGPSGGDNNNKFFGFSTPWGYFDYNRFHCHFSPRDWQRLINNNWGIRPKAMRFRLFNIQVKEVTVQDFNTTIGNNLTSTVQVFADKDYQLPYVLGSATEGTFPPFPADIYTIPQYGYCTLNYNNEAVDRSAFYCLDYFPSDMLRTGNNFEFTYTFEDVPFHSMFAHNQTLDRLMNPLVDQYLWAFSSVSQAGSSGRALHYSRATKTNMAAQYRNWLPGPFFRDQQIFTGASNITKNNVFSVWEKGKQWELDNRTNLMQPGPAAATTFSGEPDRQAMQNTLAFSRTVYDQTTATTDRNQILITNEDEIRPTNSVGIDAWGAVPTNNQSIVTPGTRAAVNNQGALPGMVWQNRDIYPTGTHLAKIPDTDNHFHPSPLIGRFGCKHPPPQIFIKNTPVPANPSETFQTAKVASFINQYSTGQCTVEIFWELKKETSKRWNPEIQFTSNFGNAADIQFAVSDTGSYSEPRPIGTRYLTKPL

SEQ ID NO: 5189 - protein, 598 aa, synthetic construct
  REGION 1..598: note = Description of Artificial Sequence: Synthetic polypeptide
TAPTGDKRKGEDEPRLPDTSSQTPKKNKKPRKERPSGGAEDPGEGTSSNAGAAAPASSVGSSIMAEGGGGPVGDAGQGADGVGNSSGNWHCDSQWLENGVVTRTTRTWVLPSYNNHLYKRIQGPSGGDNNNKFFGFSTPWGYFDYNRFHCHFSPRDWQRLINNNWGIRPKAMRFRLFNIQVKEVTVQDFNTTIGNNLTSTVQVFADKDYQLPYVLGSATEGTFPPFPADIYTIPQYGYCTLNYNNEAVDRSAFYCLDYFPSDMLRTGNNFEFTYTFEDVPFHSMFAHNQTLDRLMNPLVDQYLWAFSSVSQAGSSGRALHYSRATKTNMAAQYRNWLPGPFFRDQQIFTGASNITKNNVFSVWEKGKQWELDNRTNLMQPGPAAATTFSGEPDRQAMQNTLAFSRTVYDQTTATTDRNQILITNEDEIRPTNSVGIDAWGAVPTNNQSIVTPGTRAAVNNQGALPGMVWQNRDIYPTGTHLAKIPDTDNHFHPSPLIGRFGCKHPPPQIFIKNTPVPANPSETFQTAKVASFINQYSTGQCTVEIFWELKKETSKRWNPEIQFTSNFGNAADIQFAVSDTGSYSEPRPIGTRYLTKPL

SEQ ID NO: 5190 - DNA, 4694 bp, synthetic construct
  misc_feature 1..4694: note = Description of Artificial Sequence: Synthetic polynucleotide
  source 1..4694: mol_type = other DNA
tggccagtttccaagacaggctcgctcgctcactcgggccggggccccaaaggggcccctagcgaccgcttcgcggtcgcggcccgagtgagcgagcgagcctgtcttggaaactggccagcactccggtgaggtaatgccgtcacgtggtcgggaatgggaacgggaaatctcgcgagaacgtaaacaaatataagacggcgccacacggcgctgcgtcatacgcgcgcgcgcaccggcgagatgaggtcgtactacgaggtcatcgttcagctgcccaacgacgtcgagagtcaggtacctggaatctccgattcgttcgtcaactggattacgtcgcgagaatggacgttgcctgaggacgccgattgggatttggaccaggtcgatcaagttcaactgacgctcggcgacaaaatccaacgggagattcgaactcattgggggacgatggccaaagaaccggactttcactattttatccaactggaacaaggtgaggtgttctttcatttacacgtcctgctggaaacgtgttccgtaaagccgatggtactcggaagatatatccgacatattcaacaaaaaattgtgagtaaagtctactgcgccacgagcctacgatggaaggatggatgcgtggtgaccaagaccaaaaatttcgggggcgcgaacaaggtccgggccgagtcgtatattcccgcctacctgatcccgaaacagcaaccggaagtgcagtgggcgtggactaacgtgcccgagtatataaaagcgtgcttgcaccgagaactgcgtgccagtctcgcgcgacttcacttcgaggaggcgggcgtctcgcaatccaaggaaaatctcgcgagaactgcagacggcgctcccgtgatgccgacccgcgtcagcaaacgctacatggagctcgtggattggctcgtggagaaggggatcaccaccgagaaggaatggctgctggaaaacagagaaagctttcggagctttcaggcctcgagcaactcggcgcgtcagatcaagacggccctgcaaggcgccattcaggagatgcttctgaccaagacggcggaggactacctcgtcggaaaggatcccgtctcggacgacgacatccgtcagaaccgcatctacaagattctggaactgaaccactacgacccagcgtacgtggggagtattttggtcgggtggtgccagaagaaatggggcaagcgaaacacgctgtggctgttcggacatgcgaccaccggcaagaccaacatcgcggaggctattgcccatgctgtgccgttctatggatgcgttaactggaccaacgagaactttccgttcaacgactgcgtcgaaaaaatgattatctggtgggaggagggcaaaatgaccgccaaagtggtggaaacagccaaggcgattctgggaggatctcgggtgagagtggaccaaaaatgcaaagcttcggttccgatcgaaccgacgccggtcattattaccagtaacaccaacatgtgttatgtcatcgacgggaacacgaccacgttcgagcataagcagccgttggaggacaggatgtttaagctcgaattgctgactcggttgcctgatgactttggtaaggtgaccaaacaggaggtgcgtcaattcttcaggtggtctcaggatcacctgacccctgtgatcccagaattcctagtgcggaaggcggagtctcgcaaaagacccgccccttccggggaaggctatataagcccgacaaagcggcccgcgctcgcagagcagcagcaggcgtcggagagcgcggacccggttcccaccaggtatcgtatcaaatgctcgaaacattgcggtatggataaaatgttgtttccttgccaaatttgtgaatcgatgaacagagatattaatatttgtgctattcataaaacgaccgactgtaaagagtgtttccccgactacggggataaagatgatgtagaactacccccctgtacagaacacaacgtgtctcgttgttatcaatgtcattcgggcgaattgtatcgcgtgacttcggactctgacgagaaacctgcccccgagagtgatgaaggcaccgagccatcctatgctccctgcacgattcaccacctgatgggcaagagtcacgggttagtcacttgcgcggcgtgtcggttgaaaaatagtacgttgcatgatgacttggatgacggtgatctcgaacaataaatgattgaaatgtagccatgtctctcatttctgatgcgattccagattggttggagcggttggtcaaaaagggagtgaatgctgcagctgatttctaccatttggaaagcggtcctcctcgtcctaaggcaaatcagcaaactcaagaatctcttgaaaaggacgattcgagaggtctcgtgttcccaggctacaattatctaggccctttcaacggtctagataaaggagaacccgtcaacgaggcagacgctgccgccttagaacacgacaaggcttacgacctcgaaatcaaggacgggcacaacccgtactttgagtacaacgaggccgacagacgtttccaggaacgtctcaaagacgatacctcctttggaggcaatttaggtaaagccatcttccaggccaaaaagagggttctcgaaccctttggtctggtggaagactcaaagacggctccgaccggagacaagcggaaaggcgaagacgaacctcgtttgcccgacacttcttcacagactcccaagaaaaacaagaagcctcgcaaggaaagaccttccggcggggcagaagatccgggcgaaggcacctcttccaacgctggagcagcagcacccgcctctagtgtgggatcatctatcatggctgaaggaggtggcggcccagtgggcgatgcaggccagggtgccgatggagtgggcaattcctccggaaattggcattgcgattcccaatggctggaaaacggagtcgtcactcgaaccacccgaacctgggtcttgcccagctacaacaaccacctgtacaaacgaatccaaggacccagcggaggcgacaacaacaacaaattctttggattcagcaccccctggggatactttgactacaatcgattccactgccacttttccccgcgagactggcaacgactcatcaacaacaactggggcatccgtcccaaagcgatgcgctttagactctttaacatccaggttaaagaggtcacggtccaagacttcaacaccaccatcggcaacaacctcaccagtacggtccaggtctttgcggacaaggactaccaactgccgtacgtcctcggatcggctaccgaaggcaccttcccgccgttcccagcggatatctacacgatcccgcagtacgggtactgcacgctaaactacaacaacgaggcggtggatcgttcggccttctactgtctggactactttccctcagacatgctgcggacaggaaataactttgagtttacttacaccttcgaggacgttcctttccatagcatgtttgcccacaaccagacgctagaccggctgatgaatcccctcgtggatcagtacctctgggctttcagctccgtcagccaagcaggctcatctggacgagctcttcattactcgcgggcgactaaaaccaacatggcggctcaatataggaactggttacctgggcctttcttccgtgatcagcaaatctttacgggcgctagcaacatcactaaaaataacgtctttagcgtttgggaaaaaggcaagcaatgggaactcgacaatcggaccaacctaatgcagcccggtcctgcggcagcgaccacctttagcggagaacctgaccgtcaagccatgcaaaacacgctggcttttagcaggaccgtctacgatcaaacgaccgccacgaccgatcgtaaccagatactcatcaccaacgaagacgaaatcagacccaccaactcggtcggtatcgacgcgtggggagcagttcccaccaacaaccagtcgatcgtgacccccggcactcgcgcggccgtcaacaatcaaggggcgcttcccgggatggtgtggcaaaacagagacatttaccctacagggacccatttggccaaaattcccgacactgacaatcacttccatccgtccccgcttattgggcggtttggctgcaagcatccccctccccagattttcattaaaaacacacccgtccctgccaacccttcggaaacgttccagacggccaaagtggcctccttcatcaaccagtactcgaccggacagtgcaccgtcgaaatcttttgggaactcaagaaggaaacctccaagcgctggaaccccgaaatccagttcacctccaactttggcaacgcggccgacatccagtttgccgtctccgacacgggatcctattccgaacctcgtcccatcggtacccgttaccttaccaaacctctgtaaattaaacccttcaataaaccgtttatgcgtaactgtatttccgtctcctgtcgttattcagtcacatgatgcggcattacctcaccggagtgctggccagtttccaagacaggctcgctcgctcactcgggccggggccccaaaggggcccctagcgaccgcttcgcggtcgcggcccgagtgagcgagcgagcctgtcttggaaactggcca

SEQ ID NO: 5191 - DNA, 2211 bp, synthetic construct
  misc_feature 1..2211: note = Description of Artificial Sequence: Synthetic polynucleotide
  source 1..2211: mol_type = other DNA
atggctgctgatggttatcttccagattggctcgaggacactctctctgaaggaataagacagtggtggaagctcaaacctggcccaccaccaccaaagcccgcagagcggcataaggacgacagcaggggtcttgtgcttcctgggtacaagtacctcggacccttcaacggactcgacaagggagagccggtcaacgaggcagacgcagcggccctcgagcacgacaaggcctacgaccagcagctcaaggccggtgacaacccctacctcaagtacaaccacgccgacgcggagttccagcagcggcttcagggcgacacatcgtttgggggcaacctcggcagagcagtcttccaggccaaaaagagggttcttgaacctcttggtctggttgagcaagcgggtgagacggctcctggaaagaagagaccgttgattgaatccccccagcagcccgactcctccacgggtatcggcaaaaaaggcaagcagccggctaaaaagagactcaattttggtcagactggcgactcagagtcagtccccgacccacaacctctcggagaacctccagcaacccccgctgctgtgggacctactacaatggcttcaggtggtggcgcaccaatggcagacaataacgaaggcgccgacggagtgggtaatgcctcaggaaattggcattgcgattccacatggctgggcgacagagtcatcaccaccagcacccgcacctgggccttgcccacctacaataaccacctctacaagcaaatctccagtgcttcaacgggggccagcaacgacaaccactacttcggctacagcaccccctgggggtattttgacttcaacagattccactgccacttttcaccacgtgactggcagcgactcatcaacaacaattggggattccggcccaagagactcaacttcaaactcttcaacatccaagtcaaggaggtcacgacgaatgatggcgtcacaaccatcgctaataaccttaccagcacggttcaagtcttctcggactcagactatcagctcccgtacgtgctcgggtcggctcacgagggctgcctcccgccgttcccagcagacgtcttcatggtgccacagtatggatacctcaccctgaacaacgggagtcaggcagtaggacgctcttcattttactgcctggagtactttccttctcagatgctgcgtaccggaaacaactttaccttcagctacacttttgaggacgttcctttccacagcagctacgctcacagccagagtctggaccgtctcatgaatcctctcatcgaccagtacctgtattacctgaacagaactcagaatcagtccggaagtgcccaaaacaaggacttgctgtttagccgggggtctccagctggcatgtctgttcagcccaaaaactggctacctggaccctgttatcggcagcagcgcgtttctaaaacaaaaacagacaacaacaacagcaactttacctggactggtgcttcaaaatataaccttaatgggcgtgaatctataatcaaccctggcactgctatggcctcacacaaagacgacaaagacaagttctttcccatgagcggtgtcatgatttttggaaaggagagcgccggagcttcaaacactgcattggacaatgtcatgatcacagacgaagaggaaatcaaagccactaaccccgtggccaccgaaagatttgggactgtggcagtcaatctccagagcagcagcacagaccctgcgaccggagatgtgcatgttatgggagccttacctggaatggtgtggcaagacagagacgtatacctgcagggtcccatttgggccaaaattcctcacacagatggacactttcacccgtctcctcttatgggcggctttggactcaagaacccgcctcctcagatcctcatcaaaaacacgcctgttcctgcgaatcctccggcggagttttcagctacaaagtttgcttcattcatcacccaatactccacaggacaagtgagtgtggaaattgaatgggagctgcagaaagaaaacagcaagcgctggaatcccgaagtgcagtacacatccaattatgcaaaatctgccaacgttgattttactgtggacaacaatggactttatactgagcctcgccccattggcacccgttacctcacccgtcccctgtaa

SEQ ID NO: 5192 - protein, 736 aa, synthetic construct
  REGION 1..736: note = Description of Artificial Sequence: Synthetic polypeptide
MAADGYLPDWLEDTLSEGIRQWWKLKPGPPPPKPAERHKDDSRGLVLPGYKYLGPFNGLDKGEPVNEADAAALEHDKAYDQQLKAGDNPYLKYNHADAEFQQRLQGDTSFGGNLGRAVFQAKKRVLEPLGLVEQAGETAPGKKRPLIESPQQPDSSTGIGKKGKQPAKKRLNFGQTGDSESVPDPQPLGEPPATPAAVGPTTMASGGGAPMADNNEGADGVGNASGNWHCDSTWLGDRVITTSTRTWALPTYNNHLYKQISSASTGASNDNHYFGYSTPWGYFDFNRFHCHFSPRDWQRLINNNWGFRPKRLNFKLFNIQVKEVTTNDGVTTIANNLTSTVQVFSDSDYQLPYVLGSAHEGCLPPFPADVFMVPQYGYLTLNNGSQAVGRSSFYCLEYFPSQMLRTGNNFTFSYTFEDVPFHSSYAHSQSLDRLMNPLIDQYLYYLNRTQNQSGSAQNKDLLFSRGSPAGMSVQPKNWLPGPCYRQQRVSKTKTDNNNSNFTWTGASKYNLNGRESIINPGTAMASHKDDKDKFFPMSGVMIFGKESAGASNTALDNVMITDEEEIKATNPVATERFGTVAVNLQSSSTDPATGDVHVMGALPGMVWQDRDVYLQGPIWAKIPHTDGHFHPSPLMGGFGLKNPPPQILIKNTPVPANPPAEFSATKFASFITQYSTGQVSVEIEWELQKENSKRWNPEVQYTSNYAKSANVDFTVDNNGLYTEPRPIGTRYLTRPL

SEQ ID NO: 5193 - DNA, 2211 bp, synthetic construct
  misc_feature 1..2211: note = Description of Artificial Sequence: Synthetic polynucleotide
  source 1..2211: mol_type = other DNA
atggcttccgatggttatcttccagattggctcgaggacaacctctctgagggcatccgcgagtggtgggacttgaaacctggagccccgaaacccaaagccaaccagcaaaagcaggacgacggccggggtctggtgcttcctggctacaagtacctcggacccttcaacggactcgacaagggggagcccgtcaacgcggcggatgcagcggccctcgagcacgacaaggcctacgaccagcagctcagagcgggtgacaatccgtacctgcggtataaccacgccgacgccgagtttcaggagcgtctgcaagaagatacgtcttttgggggcaacctcgggcgagcagtcttccaggccaagaagagggttctcgaaccttttggtctggttgaggaaggtgctaagacggctcctggaaagaaacgtccggtagagcagtcgccacaagagccagactcctcctcgggcattggcaagacaggccagcagcccgctaaaaagagactcaattttggtcagactggcgactcagagtcagtccccgacccacaacctctcggagaacctccagcaacccccgctgctgtgggacctactacaatggcttcaggcggtggcgcaccaatggcagacaataacgaaggcgccgacggagtgggtaatgcctcaggaaattggcattgcgattccacatggctgggcgacagagtcatcaccaccagcacccgaacatgggccttgcccacctataacaaccacctctacaagcaaatctccagtgcttcaacgggggccagcaacgacaaccactacttcggctacagcaccccctgggggtattttgatttcaacagattccactgccatttctcaccacgtgactggcagcgactcatcaacaacaattggggattccggcccaagagactcaacttcaaactcttcaacatccaagtcaaggaggtcacgacgaatgatggcgtcacaaccatcgctaataaccttaccagcacggttcaagtcttctcggactcggagtaccagcttccgtacgtcctcggctctgcgcaccagggctgcctccctccgttcccggcggacgtgttcatgattccgcagtacggctacctaacgctcaacaatggcagccaggcagtgggacggtcatccttttactgcctggaatatttcccatcgcagatgctgagaacgggcaataactttaccttcagctacaccttcgaggacgtgcctttccacagcagctacgcgcacagccagagcctggaccggctgatgaatcctctcatcgaccagtacctgtattacctgaacagaactcagaatcagtccggaagtgcccaaaacaaggacttgctgtttagccgggggtctccagctggcatgtctgttcagcccaaaaactggctacctggaccctgttaccggcagcagcgcgtttctaaaacaaaaacagacaacaacaacagcaactttacctggactggtgcttcaaaatataaccttaatgggcgtgaatctataatcaaccctggcactgctatggcctcacacaaagacgacaaagacaagttctttcccatgagcggtgtcatgatttttggaaaggagagcgccggagcttcaaacactgcattggacaatgtcatgatcacagacgaagaggaaatcaaagccactaaccccgtggccaccgaaagatttgggactgtggcagtcaatctccagagcagcagcacagaccctgcgaccggagatgtgcatgttatgggagccttacctggaatggtgtggcaagacagagacgtatacctgcagggtcccatttgggccaaaattcctcacacagatggacactttcacccgtctcctcttatgggcggctttggacttaagcacccgcctcctcagatcctcatcaaaaacacgcctgttcctgcgaatcctccggcagagttttcggctacaaagtttgcttcattcatcacccagtattctactggccaagtcagcgtggagattgaatgggagctgcagaaagaaaacagcaaacgctggaatcccgaagtgcagtatacatctaactatgcaaaatctgccaacgttgatttcactgtggacaacaatggactttatactgagcctcgtcccattggcacccgttacctcacccgtcccctgtaa

SEQ ID NO: 5194 - protein, 736 aa, synthetic construct
  REGION 1..736: note = Description of Artificial Sequence: Synthetic polypeptide
MASDGYLPDWLEDNLSEGIREWWDLKPGAPKPKANQQKQDDGRGLVLPGYKYLGPFNGLDKGEPVNAADAAALEHDKAYDQQLRAGDNPYLRYNHADAEFQERLQEDTSFGGNLGRAVFQAKKRVLEPFGLVEEGAKTAPGKKRPVEQSPQEPDSSSGIGKTGQQPAKKRLNFGQTGDSESVPDPQPLGEPPATPAAVGPTTMASGGGAPMADNNEGADGVGNASGNWHCDSTWLGDRVITTSTRTWALPTYNNHLYKQISSASTGASNDNHYFGYSTPWGYFDFNRFHCHFSPRDWQRLINNNWGFRPKRLNFKLFNIQVKEVTTNDGVTTIANNLTSTVQVFSDSEYQLPYVLGSAHQGCLPPFPADVFMIPQYGYLTLNNGSQAVGRSSFYCLEYFPSQMLRTGNNFTFSYTFEDVPFHSSYAHSQSLDRLMNPLIDQYLYYLNRTQNQSGSAQNKDLLFSRGSPAGMSVQPKNWLPGPCYRQQRVSKTKTDNNNSNFTWTGASKYNLNGRESIINPGTAMASHKDDKDKFFPMSGVMIFGKESAGASNTALDNVMITDEEEIKATNPVATERFGTVAVNLQSSSTDPATGDVHVMGALPGMVWQDRDVYLQGPIWAKIPHTDGHFHPSPLMGGFGLKHPPPQILIKNTPVPANPPAEFSATKFASFITQYSTGQVSVEIEWELQKENSKRWNPEVQYTSNYAKSANVDFTVDNNGLYTEPRPIGTRYLTRPL

SEQ ID NO: 5195 - DNA, 2211 bp, synthetic construct
  misc_feature 1..2211: note = Description of Artificial Sequence: Synthetic polynucleotide
  source 1..2211: mol_type = other DNA
atggctgctgatggttatcttccagattggctcgaggacactctctctgaaggaataagacagtggtggaagctcaaacctggcccaccaccaccaaagcccgcagagcggcataaggacgacagcaggggtcttgtgcttcctgggtacaagtacctcggacccttcaacggactcgacaagggagagccggtcaacgaggcagacgcagcggccctcgagcacgacaaggcctacgaccagcagctcaaggccggtgacaacccctacctcaagtacaaccacgccgacgcggagttccagcagcggcttcagggcgacacatcgtttgggggcaacctcggcagagcagtcttccaggccaaaaagagggttcttgaacctcttggtctggttgagcaagcgggtgagacggctcctggaaagaagagaccgttgattgaatccccccagcagcccgactcctccacgggtatcggcaaaaaaggcaagcagccggctaaaaagagactcaattttggtcagactggcgactcagagtcagtccccgacccacaacctctcggagaacctccagcaacccccgctgctgtgggacctactacaatggcttcaggtggtggcgcaccaatggcagacaataacgaaggcgccgacggagtgggtaatgcctcaggaaattggcattgcgattccacatggctgggcgacagagtcatcaccaccagcacccgcacctgggccttgcccacctacaataaccacctctacaagcaaatctccagtgcttcaacgggggccagcaacgacaaccactacttcggctacagcaccccctgggggtattttgacttcaacagattccactgccacttttcaccacgtgactggcagcgactcatcaacaacaattggggattccggcccaagagactcaacttcaaactcttcaacatccaagtcaaggaggtcacgacgaatgatggcgtcacaaccatcgctaataaccttaccagcacggttcaagtcttctcggactcagactatcagctcccgtacgtgctcgggtcggctcacgagggctgcctcccgccgttcccagcagacgtcttcatggtgccacagtatggatacctcaccctgaacaacgggagtcaggcagtaggacgctcttcattttactgcctggagtactttccttctcagatgctgcgtaccggaaacaactttaccttcagctacacttttgaggacgttcctttccacagcagctacgctcacagccagagtctggaccgtctcatgaatcctctcatcgaccagtacctgtattacctgaacagaactcagaatcagtccggaagtgcccaaaacaaggacttgctgtttagccgggggtctccaactggcatgtctgttcagcccaaaaactggctacctggaccctgttatcggcagcagcgcgtttctaaaacaaaaacagacaacaacaacagcaactttacctggactggtgcttcaaaatataaccttaatgggcgtgaatctataatcaaccctggcactgctatggcctcacacaaagacgacaaagacaagttctttcccatgagcggtgtcatgatttttggaaaggagagcgccggagcttcaaacactgcattggacaatgtcatgatcacagacgaagaggaaatcaaagccactaaccccgtggccactgaaagatttgggactgtggcagtcaatctccagagcagcagcacagaccctgcgaccggagatgtgcatgccatgggagccttacctggaatggtgtggcaagacagagacgtatacctgcagggtcctatttgggccaaaattcctcacacggatggacactttcacccgtctcctctcatgggcggctttggactcaagaacccgcctcctcagatcctcatcaaaaacacgcctgttcctgcgaatcctccggcggagttttcagctacaaagtttgcttcattcatcacccagtattccacaggacaagtgagcgtggagattgaatgggagctgcagaaagaaaacagcaaacgctggaatcccgaagtgcagtatacatctaactatgcaaaatctgccaacgttgatttcactgtggacaacaatggactttatactgagcctcgccccattggcacccgttacctcacccgtcccctgtaa

SEQ ID NO: 5196 - protein, 736 aa, synthetic construct
  REGION 1..736: note = Description of Artificial Sequence: Synthetic polypeptide
MAADGYLPDWLEDTLSEGIRQWWKLKPGPPPPKPAERHKDDSRGLVLPGYKYLGPFNGLDKGEPVNEADAAALEHDKAYDQQLKAGDNPYLKYNHADAEFQQRLQGDTSFGGNLGRAVFQAKKRVLEPLGLVEQAGETAPGKKRPLIESPQQPDSSTGIGKKGKQPAKKRLNFGQTGDSESVPDPQPLGEPPATPAAVGPTTMASGGGAPMADNNEGADGVGNASGNWHCDSTWLGDRVITTSTRTWALPTYNNHLYKQISSASTGASNDNHYFGYSTPWGYFDFNRFHCHFSPRDWQRLINNNWGFRPKRLNFKLFNIQVKEVTTNDGVTTIANNLTSTVQVFSDSDYQLPYVLGSAHEGCLPPFPADVFMVPQYGYLTLNNGSQAVGRSSFYCLEYFPSQMLRTGNNFTFSYTFEDVPFHSSYAHSQSLDRLMNPLIDQYLYYLNRTQNQSGSAQNKDLLFSRGSPTGMSVQPKNWLPGPCYRQQRVSKTKTDNNNSNFTWTGASKYNLNGRESIINPGTAMASHKDDKDKFFPMSGVMIFGKESAGASNTALDNVMITDEEEIKATNPVATERFGTVAVNLQSSSTDPATGDVHAMGALPGMVWQDRDVYLQGPIWAKIPHTDGHFHPSPLMGGFGLKNPPPQILIKNTPVPANPPAEFSATKFASFITQYSTGQVSVEIEWELQKENSKRWNPEVQYTSNYAKSANVDFTVDNNGLYTEPRPIGTRYLTRPL

SEQ ID NO: 5197 - DNA, 2211 bp, synthetic construct
  misc_feature 1..2211: note = Description of Artificial Sequence: Synthetic polynucleotide
  source 1..2211: mol_type = other DNA
atggctgccgatggttatcttccagattggctcgaggacaacctctctgagggcattcgcgagtggtgggcgctgaaacctggagccccgaagcccaaagccaaccagcaaaagcaggacgacggccggggtctggtgcttcctggctacaagtacctcggacccttcaacggactcgacaagggggagcccgtcaacgcggcggatgcagcggccctcgagcacgacaaggcctacgaccagcagctcaaagcgggtgacaatccgtacctgcggtataaccacgccgacgccgagtttcaggagcgtctgcaagaagatacgtcttttgggggcaacctcgggcgagcagtcttccaggccaagaagcgggttctcgaacctctcggtctggttgaggaaggcgctaagacggctcctggaaagaaacgtccggtagagcaatcgccacaagagccagactcctcctcgggcatcggcaagacaggccagcagcccgctaaaaagagactcaattttggtcagactggcgactcagagtcagtccccgacccacaacctctcggagaacctccagcaacccccgctgctgtgggacctactacaatggcttcaggcggtggcgcaccaatggcagacaataacgaaggcgccgacggagtgggtaatgcctcaggaaattggcattgcgattccacatggctgggcgacagagtcatcaccaccagcacccgaacatgggccttgcccacctataacaaccacctctacaagcaaatctccagtgcttcgacgggggccagcaacgacaaccactacttcggctacagcaccccctgggggtattttgactttaacagattccactgccacttttcaccacgtgactggcagcgactcatcaacaacaactggggattccggcccaagagactcagcttcaagctcttcaacatccaggtcaaggaggtcacgacgaatgatggcgtcacaaccatcgctaataaccttaccagcacggttcaagtcttctcggactcggagtaccagcttccgtacgtcctcggctctgcgcaccagggctgcctccctccgttcccggcggacgtgttcatgattccgcaatacggctacctgacgctcaacaatggcagccaagccgtgggacgttcatccttttactgcctggaatatttcccttctcagatgctgagaacgggcaacaactttaccttcagctacacctttgaggaagtgcctttccacagcagctacgcgcacagccagagcctggaccggctgatgaatcctctcatcgatcaatacctgtattacctgaacagaactcaaaatcagtccggaagtgcccaaaacaaggacttgctgtttagccgtgggtctccagctggcatgtctgttcagcccaaaaactggctacctggaccctgttatcggcagcagcgcgtttctaaaacaaaaacagacaacaacaacagcaattttacctggactggtgcttcaaaatataacctcaatgggcgtgaatccatcatcaaccctggcactgctatggcctcacataaagacgacgaagacaagttctttcccatgagcggtgtcatgatttttggaaaagagagcgccggagcttcaaacactgcattggacaatgtcatgattacagacgaagaggaaattaaagccactaaccctgtggccaccgaaagatttgggaccgtggcagtcaatttccagagcagcagcacagaccctgcgaccggagatgtgcatgctatgggagcattacctggcatggtgtggcaagatagagacgtgtacctgcagggtcccatttgggccaaaattcctcacacagatggacactttcacccgtctcctcttatgggcggctttggactcaagaacccgcctcctcagatcctcatcaaaaacacgcctgttcctgcgaatcctccggcggagttttcagctacaaagtttgcttcattcatcacccaatactccacaggacaagtgagcgtggagattgaatgggagctgcagaaagaaaacagcaaacgctggaatcccgaagtgcagtatacatctaactatgcaaaatctgccaacattgatttcactgtggacaacaatggactttatactgagcctcgccccattggcacccgttacctcacccgtccccagtaa

SEQ ID NO: 5198 - protein, 736 aa, synthetic construct
  REGION 1..736: note = Description of Artificial Sequence: Synthetic polypeptide
MAADGYLPDWLEDNLSEGIREWWALKPGAPKPKANQQKQDDGRGLVLPGYKYLGPFNGLDKGEPVNAADAAALEHDKAYDQQLKAGDNPYLRYNHADAEFQERLQEDTSFGGNLGRAVFQAKKRVLEPLGLVEEGAKTAPGKKRPVEQSPQEPDSSSGIGKTGQQPAKKRLNFGQTGDSESVPDPQPLGEPPATPAAVGPTTMASGGGAPMADNNEGADGVGNASGNWHCDSTWLGDRVITTSTRTWALPTYNNHLYKQISSASTGASNDNHYFGYSTPWGYFDFNRFHCHFSPRDWQRLINNNWGFRPKRLSFKLFNIQVKEVTTNDGVTTIANNLTSTVQVFSDSEYQLPYVLGSAHQGCLPPFPADVFMIPQYGYLTLNNGSQAVGRSSFYCLEYFPSQMLRTGNNFTFSYTFEEVPFHSSYAHSQSLDRLMNPLIDQYLYYLNRTQNQSGSAQNKDLLFSRGSPAGMSVQPKNWLPGPCYRQQRVSKTKTDNNNSNFTWTGASKYNLNGRESIINPGTAMASHKDDEDKFFPMSGVMIFGKESAGASNTALDNVMITDEEEIKATNPVATERFGTVAVNFQSSSTDPATGDVHAMGALPGMVWQDRDVYLQGPIWAKIPHTDGHFHPSPLMGGFGLKNPPPQILIKNTPVPANPPAEFSATKFASFITQYSTGQVSVEIEWELQKENSKRWNPEVQYTSNYAKSANIDFTVDNNGLYTEPRPIGTRYLTRPQ

SEQ ID NO: 5199 - DNA, 2211 bp, synthetic construct
  misc_feature 1..2211: note = Description of Artificial Sequence: Synthetic polynucleotide
  source 1..2211: mol_type = other DNA
atggctgccgatggttatcttccagattggctcgaggacaacctctctgagggcattcgcgagtggtgggacttgaaacctggagccccgaaacccaaagccaaccagcaaaagcaggacgacggccggggtctggtgcttcctggctacaagtacctcggacccttcaacggactcgacaagggggagcccgtcaacgcggcggatgcagcggccctcgagcacgacaaggcctacgaccagcagctcaaagcgggtgacaatccgtaccttcggtataaccacgccgacgccgagtttcaggagcgtctgcaagaagatacgtcttttgggggcaacctcgggcgagcagtcttccaggccaaaaagagggttctcgaacctctcggtctggttgaggaagcggctaagacggctcctggaaagaaacgtccggtagagcagtcgccacaagagccagactcctcctcgggcattggcaagacaggccagcagcccgctaaaaagagactcaattttggtcagactggcgactcagagtcagtccccgacccacaacctctcggagaacctcccgcagccccctcaggtgtgggatctcttacaatggcttcaggtggtggcgcaccaatggcagacaataacgaaggcgccgacggagtgggtaatgcctcaggaaattggcattgcgattccacatggctgggcgacagagtcatcaccaccagcacccgcacctgggccttgcccacctacaataaccacctctacaagcaaatctccagtgcttcaacgggggccagcaacgacaaccactacttcggctacagcaccccctgggggtattttgacttcaacagattccactgccacttttcaccacgtgactggcaaagactcatcaacaacaattggggattccggcccaagagactcaacttcaagctcttcaacatccaagtcaaggaggtcacgacgaatgatggcgtcacgaccatcgctaataaccttaccagcacggttcaagtcttctcggactcggagtaccagttgccgtacgtcctcggctctgcgcaccagggctgcctccctccgttcccggcggacgtgttcatgattccgcagtacggctacctaacgctcaacaatggcagccaggcagtgggacggtcatccttttactgcctggaatatttcccatcgcagatgctgagaacgggcaacaactttaccttcagctacacctttgaggaagtgcctttccacagcagctacgcgcacagccagagcctggaccggctgatgaatcctctcatcgaccagtacctgtattacctgaacagaactcaaaatcagtccggaagtgcccaaaacaaggacttgctgtttagccgtgggtctccagctggcatgtctgttcagcccaaaaactggctacctggaccctgttaccggcagcagtgcgtttctaaaacaaaaacagacaacaacaacagcaactttacctggactggtgcttcaaaatataaccttaatgggcgtgaatctataatcaaccctggcactgctatggcctcacacaaagacgacaaagacaagttctttcccatgagcggtgtcatgatttttggaaaggagagcgccggagcttcaaacactgcattggacaatgtcatgatcacagacgaagaggaaatcaaagccactaaccccgtggccaccgaaagatttgggactgtggcagtcaatctccagagcagcagcacagaccctgcgaccggagatgtgcatgttatgggagccttacctggaatggtgtggcaagacagagacgtatacctgcagggtcctatttgggccaaaattcctcacacagatggacactttcacccgtctcctcttatgggcggctttggactcaagaacccgcctcctcagatcctcatcaaaaacacgcctgttcctgcgaatcctccggcggagttttcagctacaaagtttgcttcattcatcacccaatactccacaggacaagtgagcgtggagattgaatgggagctgcagaaagaaaacagcaagcgctggaatcccgaagtgcagtacacatccaattatgcaaaatctgccaacgttgatttcactgtggacaacaatggactttatactgagcctcgccccattggcacccgttacctcacccgtcccctgtaa

SEQ ID NO: 5200 - protein, 736 aa, synthetic construct
  REGION 1..736: note = Description of Artificial Sequence: Synthetic polypeptide
MAADGYLPDWLEDNLSEGIREWWDLKPGAPKPKANQQKQDDGRGLVLPGYKYLGPFNGLDKGEPVNAADAAALEHDKAYDQQLKAGDNPYLRYNHADAEFQERLQEDTSFGGNLGRAVFQAKKRVLEPLGLVEEAAKTAPGKKRPVEQSPQEPDSSSGIGKTGQQPAKKRLNFGQTGDSESVPDPQPLGEPPAAPSGVGSLTMASGGGAPMADNNEGADGVGNASGNWHCDSTWLGDRVITTSTRTWALPTYNNHLYKQISSASTGASNDNHYFGYSTPWGYFDFNRFHCHFSPRDWQRLINNNWGFRPKRLNFKLFNIQVKEVTTNDGVTTIANNLTSTVQVFSDSEYQLPYVLGSAHQGCLPPFPADVFMIPQYGYLTLNNGSQAVGRSSFYCLEYFPSQMLRTGNNFTFSYTFEEVPFHSSYAHSQSLDRLMNPLIDQYLYYLNRTQNQSGSAQNKDLLFSRGSPAGMSVQPKNWLPGPCYRQQCVSKTKTDNNNSNFTWTGASKYNLNGRESIINPGTAMASHKDDKDKFFPMSGVMIFGKESAGASNTALDNVMITDEEEIKATNPVATERFGTVAVNLQSSSTDPATGDVHVMGALPGMVWQDRDVYLQGPIWAKIPHTDGHFHPSPLMGGFGLKNPPPQILIKNTPVPANPPAEFSATKFASFITQYSTGQVSVEIEWELQKENSKRWNPEVQYTSNYAKSANVDFTVDNNGLYTEPRPIGTRYLTRPL

SEQ ID NO: 5201 - DNA, 2211 bp, synthetic construct
  misc_feature 1..2211: note = Description of Artificial Sequence: Synthetic polynucleotide
  source 1..2211: mol_type = other DNA
atggctgccgatggttatcttccagattggctcgaggacaacctctctgagggcattcgcgaatggtgggacttgaaacctggagccccgaaacccaaagtcaaccagcaaaagcaggacaacgctcggggtcttgtgcttccgggttacaaatacctcggacccttcaacggactcgacaagggggagcccgtcaacgcggcggacgcagcggccctcgagcacgacaaggcctacgaccagcagctcaaagcgggtgacaatccgtaccttcggtataaccacgccgacgccgagtttcaggagcgtctgcaagaagatacgtcttttgggggcaaccttggacgagcagtcttccaggccaagaagagggttctcgaaccttttggtctggttgaggaaggtgctaagacggctcctggaaagaaacgtccggtagagcagtcgccacaagagccagactcctcctcgggcattggcaagacaggccagcagcccgctaaaaagagactcaattttggtcagactggcgactcagagtcagtccccgacccacaacctctcggagaacctccagcaacccccgctgctgtgggacctactacaatggcttcaggcggtggcgcaccaatggcagacaataacgaaggcgccgacggagtgggtaatgcctcaggaaattggcattgcgattccacatggctgggcgacagagtcatcaccaccagcacccgcacctgggccttgcccacctacaataaccacctctacaagcaaatctccagtgcttcaacgggggccagcaacgacaaccactacttcggctacagcaccccctgggggtattttgacttcaacagattccactgccacttttcaccacgtgactggcaaagactcatcaacaacaattggggattccggcccaagagactcaacttcaagctcttcaacatccaagtcaaggaggtcacgacgaatgatggcgtcacgaccatcgctaataaccttaccagcacggttcaagtcttctcggactcggagtaccagttgccgtacgtcctcggctctgcgcaccagggctgcctccctccgttcccggcggacgtgttcatgattccgcaatacggctacctgacgctcaacaatggcagccaggcagtgggacggtcatccttttactgcctggaatatttcccatcgcagatgctgagaacgggcaataactttaccttcagctacacttttgaggacgttcctttccacagcagctacgctcacagccagagcctggaccggctgatgaatcctctcatcgaccagtacctgtattacctgaacagaactcagaatcagtccggaagtgcccaaaacaaggacttgctgtttagccgtgggtctccaactggcatgtctgttcagcccaaaaactggctacctggaccctgttatcggcagcagcgcgtttctaaaacaaaaacagacaacaacaacagcaactttacctggactggtgcttcaaaatataaccttaatgggcgtgaatctataatcaaccctggcactgctatggcctcacacaaagacgacgaagacaagttctttcccatgagcggtgtcatgatttttggaaaggagagcgccggagcttcaaacactgcattggacaatgtcatgatcacagacgaagaggaaatcaaagccactaaccccgtggccactgaaagatttgggactgtggcagtcaatctccagagcagcagcacagaccctgcgaccggagatgtgcatgccatgggagccttacctggaatggtgtggcaagacagagacgtatacctgcagggtcctatttgggccaaaattcctcacacggatggacactttcacccgtctcctctcatgggcggctttggacttaagcacccgcctcctcagatcctcatcaaaaacacgcctgttcctgcgaatcctccggcagagttttcggctacaaagtttgcttcattcatcacccagtattccacaggacaagtgagcgtggagattgaatgggagctgcagaaagaaaacagcaaacgctggaatcccgaagtgcagtatacatctaactatgcaaaatctgccaacgttgatttcactgtggacaacaatggactttatactgagcctcgccccattggcacccgttacctcacccgtcccctgtaa

SEQ ID NO: 5202 - protein, 736 aa, synthetic construct
  REGION 1..736: note = Description of Artificial Sequence: Synthetic polypeptide
MAADGYLPDWLEDNLSEGIREWWDLKPGAPKPKVNQQKQDNARGLVLPGYKYLGPFNGLDKGEPVNAADAAALEHDKAYDQQLKAGDNPYLRYNHADAEFQERLQEDTSFGGNLGRAVFQAKKRVLEPFGLVEEGAKTAPGKKRPVEQSPQEPDSSSGIGKTGQQPAKKRLNFGQTGDSESVPDPQPLGEPPATPAAVGPTTMASGGGAPMADNNEGADGVGNASGNWHCDSTWLGDRVITTSTRTWALPTYNNHLYKQISSASTGASNDNHYFGYSTPWGYFDFNRFHCHFSPRDWQRLINNNWGFRPKRLNFKLFNIQVKEVTTNDGVTTIANNLTSTVQVFSDSEYQLPYVLGSAHQGCLPPFPADVFMIPQYGYLTLNNGSQAVGRSSFYCLEYFPSQMLRTGNNFTFSYTFEDVPFHSSYAHSQSLDRLMNPLIDQYLYYLNRTQNQSGSAQNKDLLFSRGSPTGMSVQPKNWLPGPCYRQQRVSKTKTDNNNSNFTWTGASKYNLNGRESIINPGTAMASHKDDEDKFFPMSGVMIFGKESAGASNTALDNVMITDEEEIKATNPVATERFGTVAVNLQSSSTDPATGDVHAMGALPGMVWQDRDVYLQGPIWAKIPHTDGHFHPSPLMGGFGLKHPPPQILIKNTPVPANPPAEFSATKFASFITQYSTGQVSVEIEWELQKENSKRWNPEVQYTSNYAKSANVDFTVDNNGLYTEPRPIGTRYLTRPL

SEQ ID NO: 5203 - DNA, 2208 bp, synthetic construct
  misc_feature 1..2208: note = Description of Artificial Sequence: Synthetic polynucleotide
  misc_feature 955: note = a, c, t or g
  misc_feature 971..972: note = a, c, t or g
  misc_feature 981: note = a, c, t or g
  misc_feature 986: note = a, c, t or g
  misc_feature 1235: note = a, c, t or g
  misc_feature 1694..1696: note = a, c, t or g
  misc_feature 1698: note = a, c, t or g
  misc_feature 1763..1765: note = a, c, t or g
  misc_feature 1778: note = a, c, t or g
  misc_feature 2204: note = a, c, t or g
  source 1..2208: mol_type = other DNA
atggctgccgatggttatcttccagattggctcgaggacaacctctctgagggcattcgcgaatggtgggacttgaaacctggagccccgaaacccaaagtcaaccagcaaaagcaggacaacgctcggggtcttgtgcttccgggttacaaatacctcggacccttcaacggactcgacaagggggagcccgtcaacgcggcggacgcagcggccctcgagcacgacaaggcctacgaccagcagctcaaagcgggtgacaatccgtaccttcggtataaccacgccgacgccgagtttcaggagcgtctgcaagaagatacgtcttttgggggcaaccttggacgagcagtcttccaggccaagaagagggttctcgaaccttttggtctggttgaggaaggtgctaagacggctcctggaaagaaacgtccggtagagcagtcgccacaagagccagactcctcctcgggcattggcaagacaggccagcagcccgctaaaaagagactcaattttggtcagactggcgactcagagtcagtccccgacccacaacctctcggagaacctccagcaacccccgctgctgtgggacctactacaatggcttcaggcggtggcgcaccaatggcagacaataacgaaggcgccgacggagtgggtaatgcctcaggaaattggcattgcgattccacatggctgggcgacagagtcatcaccaccagcacccgaacatgggccttgcccacctataacaaccacctctacaagcaaatctccagtgcttcaacgggggccagcaacgacaaccactacttcggctacagcaccccctgggggtattttgatttcaacagattccactgccacttttcaccacgtgactggcagcgactcatcaataacaattggggattccggcccaagagactcaacttcaaactcttcaacntccaagtcaaggaggnnacgacgaangatgncgtcacaaccatcgctaataaccttaccagcacggttcaagtcttctcggactcggagtaccagcttccgtacgtcctcggctctgcgcaccagggctgcctccctccgttcccggcggacgtgttcatgattccgcaatacggctacctgacgctcaacaatggcagccaggcagtgggacggtcatccttttactgcctggaatatttcccatcgcagatgctgagaacgggcaataactttacctncagctacacttttgaggacgttcctttccacagcagctacgctcacagccagagcctggaccggctgatgaatcctctcatcgaccagtacctgtattacctgaacagaactcagaatcagtccggaagtgcccaaaacaaggacttgctgtttagccgtgggtctccaactggcatgtctgttcagcccaaaaactggctacctggaccctgttatcggcagcagcgcgtttctaaaacaaaaacagacaacaacaacagcaactttacctggactggtgcttcaaaatataaccttaatgggcgtgaatctataatcaaccctggcactgctatggcctcacacaaagacgacgaagacaagttctttcccatgagcggtgtcatgatttttggaaaggagagcgccggagcttcaaacactgcattggacaatgtcatgatcacagacgaagagannncnaagccactaaccccgtggccactgaaagatttgggactgtggcagtcaatctccaagcagcacannnaccctgcgaccgnagatgtgcatgccatgggagccttacctggaatggtgtggcaagacagagacgtatacctgcagggtcctatttgggccaaaattcctcacacggatggacactttcacccgtctcctctcatgggcggctttggacttaagcacccgcctcctcagatcctcatcaaaaacacgcctgttcctgcgaatcctccggcagagttttcggctacaaagtttgcttcattcatcacccagtattccacaggacaagtgagcgtggagattgaatgggagctgcagaaagaaaacagcaaacgctggaatcccgaagtgcagtatacatctaactatgcaaaatctgccaacgttgatttcactgtggacaacaatggactttatactgagcctcgccccattggcacccgttacctcacccgtccccngtaa

SEQ ID NO: 5204 - protein, 723 aa, synthetic construct
  REGION 1..723: note = Description of Artificial Sequence: Synthetic polypeptide
MAADGYLPDWLEDNLSEGIREWWDLKPGAPKPKVNQQKQDNARGLVLPGYKYLGPFNGLDKGEPVNAADAAALEHDKAYDQQLKAGDNPYLRYNHADAEFQERLQEDTSFGGNLGRAVFQAKKRVLEPFGLVEEGAKTAPGKKRPVEQSPQEPDSSSGIGKTGQQPAKKRLNFGQTGDSESVPDPQPLGEPPATPAAVGPTTMASGGGAPMADNNEGADGVGNASGNWHCDSTWLGDRVITTSTRTWALPTYNNHLYKQISSASTGASNDNHYFGYSTPWGYFDFNRFHCHFSPRDWQRLINNNWGFRPKRLNFKLFNQVKETTDVTTIANNLTSTVQVFSDSEYQLPYVLGSAHQGCLPPFPADVFMIPQYGYLTLNNGSQAVGRSSFYCLEYFPSQMLRTGNNFTSYTFEDVPFHSSYAHSQSLDRLMNPLIDQYLYYLNRTQNQSGSAQNKDLLFSRGSPTGMSVQPKNWLPGPCYRQQRVSKTKTDNNNSNFTWTGASKYNLNGRESIINPGTAMASHKDDEDKFFPMSGVMIFGKESAGASNTALDNVMITDEEATNPVATERFGTVAVNLQSSPATDVHAMGALPGMVWQDRDVYLQGPIWAKIPHTDGHFHPSPLMGGFGLKHPPPQILIKNTPVPANPPAEFSATKFASFITQYSTGQVSVEIEWELQKENSKRWNPEVQYTSNYAKSANVDFTVDNNGLYTEPRPIGTRYLTRP

SEQ ID NO: 5205 - DNA, 2208 bp, synthetic construct
  misc_feature 1..2208: note = Description of Artificial Sequence: Synthetic polynucleotide
  source 1..2208: mol_type = other DNA
atggctgccgatggttatcttccagattggctcgaggacactctctctgaaggaataagacagtggtggaagctcaaacctggcccaccaccaccaaagcccgcagagcggcataaggacgacagcaggggtcttgtgcttcctgggtacaagtacctcggacccttcaacggactcgacaagggagagccggtcaacgaggcagacgccgcggccctcgagcacgacaaagcctatgaccggcagctcgacagcggagacaacccgtacctcaagtacaaccacgccgacgcggagtttcaggagcgccttaaagaagatacgtcttttgggggcaacctcggacgagcagtcttccaggcgaaaaagagggttcttgaacctctgggcctggttgaggaacctgttaagacggctccgggaaaaaagaggccggtagagcactctcctgtggagccagactcctcctcgggaaccggaaaggcgggtcagcagcctgcaagaaaaagattgaattttggtcagactggagacgcagactcagtacctgacccccagcctctcggacagccaccagcagccccctctggtctgggaactaatacgatggctacaggcagtggcgcaccaatggcagacaataacgagggcgccgacggagtgggtaattcctcgggaaattggcattgcgattccacatggatgggcgacagagtcatcaccaccagcacccgaacctgggccctgcccacctacaacaaccacctctacaaacaaatttccagccaatcaggagcctcgaacgacaatcactactttggctacagcaccccttgggggtattttgacttcaacagattccactgccacttttcaccacgtgactggcaaagactcatcaacaacaactggggattccgacccaagagactcaagttcaagctctttaacattcaagtcaaagaggtcacgcagaatgacggtacgacgacgattgccaataaccttaccagcacggttcaggtgtttactgactcggagtaccagctcccgtacgtcctcggctcggcgcatcaaggatgcctcccgccgttcccagcagacgtcttcatggtgccacagtatggatacctcaccctgaacaacgggagtcaggcagtaggacgctcttcattttactgcctggagtactttccttctcagatgctgcgtaccggtaacaactttaccttcagctacacttttgaggacgttcctttccacagcagctacgctcacagccagagtctggaccgtctcatgaatcctctcatcgaccagtacctgtattacttgagcagaacagacgctccaagtggaaccaccacgcagtcaaggcttcagttttctcaggccggagcgagtgacattcgggaccagtctaggaactggcttcctggaccctgttaccgccagcagcgagtatcaaagacatctgcggataacaacaacagtgaatactcgtggactggagctaccaagtaccacctcaatggcagagactctctggtgaatccgggcccggccatggcaagccacaaggacgatgaagaaaagttttttcctcagagcggggttctcatctttgggaagcaaggctcagagaaaacaagtgtggacattgaaaaggtcatgattacagacgaagaggaaatcaggacaaccaatcccgtggctacggagcagtatggttctgtatctaccaacctccagagaggcaacagacaagcagctaccgcagatgtcaacacacaaggcgttcttccaggcatggtctggcaggacagagatgtgtaccttcaggggcccatctgggcaaagattccacacacggacggacattttcacccctctcccctcatgggtggattcggacttaaacaccctcctccacagattctcatcaagaacaccccggtacctgcgaatccttcgaccaccttcagtgcggcaaagtttgcttccttcatcacacagtactccacgggacaggtcagcgtggagatcgagtgggagctgcagaaggaaaacagcaaacgctggaatcccgaagttcagtacacttccaactacaacaagtctgttaatgtggactttactgtggacactaatggcgtgtattcagagcctcgccccattggcaccagatacctgactcgtaatctgtaa

SEQ ID NO: 5206 - protein, 735 aa, synthetic construct
  REGION 1..735: note = Description of Artificial Sequence: Synthetic polypeptide
MAADGYLPDWLEDTLSEGIRQWWKLKPGPPPPKPAERHKDDSRGLVLPGYKYLGPFNGLDKGEPVNEADAAALEHDKAYDRQLDSGDNPYLKYNHADAEFQERLKEDTSFGGNLGRAVFQAKKRVLEPLGLVEEPVKTAPGKKRPVEHSPVEPDSSSGTGKAGQQPARKRLNFGQTGDADSVPDPQPLGQPPAAPSGLGTNTMATGSGAPMADNNEGADGVGNSSGNWHCDSTWMGDRVITTSTRTWALPTYNNHLYKQISSQSGASNDNHYFGYSTPWGYFDFNRFHCHFSPRDWQRLINNNWGFRPKRLKFKLFNIQVKEVTQNDGTTTIANNLTSTVQVFTDSEYQLPYVLGSAHQGCLPPFPADVFMVPQYGYLTLNNGSQAVGRSSFYCLEYFPSQMLRTGNNFTFSYTFEDVPFHSSYAHSQSLDRLMNPLIDQYLYYLSRTDAPSGTTTQSRLQFSQAGASDIRDQSRNWLPGPCYRQQRVSKTSADNNNSEYSWTGATKYHLNGRDSLVNPGPAMASHKDDEEKFFPQSGVLIFGKQGSEKTSVDIEKVMITDEEEIRTTNPVATEQYGSVSTNLQRGNRQAATADVNTQGVLPGMVWQDRDVYLQGPIWAKIPHTDGHFHPSPLMGGFGLKHPPPQILIKNTPVPANPSTTFSAAKFASFITQYSTGQVSVEIEWELQKENSKRWNPEVQYTSNYNKSVNVDFTVDTNGVYSEPRPIGTRYLTRNL

SEQ ID NO: 5207 - DNA, 2208 bp, synthetic construct
  misc_feature 1..2208: note = Description of Artificial Sequence: Synthetic polynucleotide
  source 1..2208: mol_type = other DNA
atggctgccgatggttatcttccagattggctcgaggacactctctctgaaggaataagacagtggtggaagctcaaacctggcccaccaccaccaaagcccgcagagcggcataaggacgacagcaggggtcttgtgcttcctgggtacaagtacctcggacccttcaacggactcgacaagggagagccggtcaacgaggcagacgccgcggccctcgagcacgacaaagcctatgaccggcagctcgacagcggagacaacccgtacctcaagtacaaccacgccgacgcggagtttcaggagcgccttaaagaagatacgtcttttgggggcaacctcggacgagcagtcttccaggcgaaaaagagggttcttgaacctctgggcctggttgaggaacctgttaagacggctccgggaaaaaagaggccggtagagcactctcctgtggagccagactcctcctcgggaaccggaaaggcgggccagcagcctgcaagaaaaagattgaattttggtcagactggagacgcaaactcagtacctgacccccagcctctcggacagccaccagcagccccctctggtctgggaactaatacgatggctacaggcagtggcgcaccaatggcagacaataacgagggcgccgacggagtgggtaattcctcgggaaattggcattgcgattccacatggatgggcgacagagtcatcaccaccagcacccgaacctgggccctgcccacctacaacaaccacctctacaaacaaatttccagccaatcaggagcctcgaacgacaatcactactttggctacagcaccccttgggggtattttgacttcaacagattccactgccacttttcaccacgtgactggcaaagactcatcaacaacaactggggattccgacccaagagactcaagttcaagctctttaacattcaagtcaaagaggtcacgcagaatgacggtacgacgacgattgccaataaccttaccagcacggttcaggtgtttactgactcggagtaccagctcccgtacgtcctcggctcggcgcatcaaggatgcctcccgccgttcccagcagacgtcttcatggtgccacagtatggatacctcaccctgaacaacgggagtcgggcagtaggacgctcttcattttactgcctggagtactttccttctcagatgctgcgtaccggtaacaactttaccttcagctacacttttgaggacgttcctttccacagcagctacgctcacagccagagtctggaccgtctcatgaatcctctcatcgaccagtacctgtattacttgagcagaacagacactccaagtggaaccaccacgcagtcaaggcttcagttttctcaggccggagcgagtgacattcgggaccagtctaggaactggcttcctggaccctgttaccgccagcagcgagtatcaaagacatctgcggataacaacaacagtgaatactcgtggactggagctaccaagtaccacctcaatggcagagactctctggtgaatccgggcccggccatggcaagccacaaggacgatgaagaaaagttttttcctcagagcggggttctcatctttgggaagcaaggctcagagaaaacaagtgtggacattgaaaaggtcatgattacagacgaagaggaaatcaggacgaccaatcccgtggctacggagcagtatggttctgtatctaccaacctccagagaggcaacagacaagcagctaccgcagatgtcaacacacaaggcgttcttccaggcatggtctggcaggacagagatgtgtaccttcaggggcccatctgggcaaagattccacacacggacggacattttcacccctctcccctcatgggtggattcggacttaaacaccctcctccacagattctcatcaagaacaccccggtacctgcgaatccttcgaccaccttcagtgcggcaaagtttgcttccttcatcacacagtactccacgggacaggtcagcgtggagatcgagtgggagctgcagaaggaaaacagcaaacgctggaatcccgaagttcagtacacttccaactacaacaagtctgttaatgtggactttactgtggacactaatggcgtgtatacagagcctcgccccattggcaccagatacctgactcgtaatctgtaa

SEQ ID NO: 5208 - protein, 735 aa, synthetic construct
  REGION 1..735: note = Description of Artificial Sequence: Synthetic polypeptide
MAADGYLPDWLEDTLSEGIRQWWKLKPGPPPPKPAERHKDDSRGLVLPGYKYLGPFNGLDKGEPVNEADAAALEHDKAYDRQLDSGDNPYLKYNHADAEFQERLKEDTSFGGNLGRAVFQAKKRVLEPLGLVEEPVKTAPGKKRPVEHSPVEPDSSSGTGKAGQQPARKRLNFGQTGDANSVPDPQPLGQPPAAPSGLGTNTMATGSGAPMADNNEGADGVGNSSGNWHCDSTWMGDRVITTSTRTWALPTYNNHLYKQISSQSGASNDNHYFGYSTPWGYFDFNRFHCHFSPRDWQRLINNNWGFRPKRLKFKLFNIQVKEVTQNDGTTTIANNLTSTVQVFTDSEYQLPYVLGSAHQGCLPPFPADVFMVPQYGYLTLNNGSRAVGRSSFYCLEYFPSQMLRTGNNFTFSYTFEDVPFHSSYAHSQSLDRLMNPLIDQYLYYLSRTDTPSGTTTQSRLQFSQAGASDIRDQSRNWLPGPCYRQQRVSKTSADNNNSEYSWTGATKYHLNGRDSLVNPGPAMASHKDDEEKFFPQSGVLIFGKQGSEKTSVDIEKVMITDEEEIRTTNPVATEQYGSVSTNLQRGNRQAATADVNTQGVLPGMVWQDRDVYLQGPIWAKIPHTDGHFHPSPLMGGFGLKHPPPQILIKNTPVPANPSTTFSAAKFASFITQYSTGQVSVEIEWELQKENSKRWNPEVQYTSNYNKSVNVDFTVDTNGVYTEPRPIGTRYLTRNL

SEQ ID NO: 5209 - DNA, 2211 bp, synthetic construct
  misc_feature 1..2211: note = Description of Artificial Sequence: Synthetic polynucleotide
  source 1..2211: mol_type = other DNA
atggctgccgatggttatcttccagattggctcgaggacactctctctgaaggaataagacagtggtggaagctcaaacctggcccaccaccaccaaagcccgcagagcggcataaggacgacagcaggggtcttgtgcttcctgggtacaagtacctcggacccttcaacggactcgacaagggagagccggtcaacgaggcagacgccgcggccctcgagcacgacaaggcctacgaccagcagctcaaagcgggtgacaatccgtacctgcggtataaccacgccgacgccgagtttcaggagcgtctgcaagaagatacgtcttttgggggcaacctcgggcgagcagtcttccaggccaagaagcgggttctcgaacctctcggtctggttgaggaaggcgctaagacggctcctggaaagaaacgtccggtagagcagtcgccacaagagccagactcctcctcgggcatcggcaagacaggccagcagcccgctaaaaagagactcaattttggtcagactggcgactcagagtcagtccccgacccacaacctctcggagaacctccagcaacccccgctgctgtgggacctactacaatggcttcaggcggtggcgcaccaatggcagacaataacgaaggcgccgacggagtgggtaatgcctcaggaaattggcattgcgattccacatggctgggcgacagagtcatcaccaccagcacccgaacatgggccttgcccacctataacaaccacctctacaagcaaatctccagtgcttcgacgggggccagcaacgacaaccactacttcggctacagcaccccctgggggtattttgactttaacagattccactgccacttttcaccacgtgactggcagcgactcatcaacaataactggggattccggcccaagagactcagcttcaagctcttcaacatccaggtcaaggaggtcacgacgaatgatggcgtcacaaccatcgctaataaccttaccagcacggttcaagtcttctcggactcggagtaccagcttccgtacgtcctcggctctgcgcaccagggctgcctccctccgttcccggcggacgtgttcatgattccgcaatacggctacctgacgctcaacaatggcagccaagccgtgggacgttcatccttttactgcctggaatatttcccttctcagatgctgagaacgggcaacaactttaccttcagctacacctttgaggaagtgcctttccacagcagctacgcgcacagccagagcctggaccggctgatgaatcctctcatcgatcaatacctgtattacctgaacagaactcaaaatcagtccggaagtgcccaaaacaaggacttgctgtttagccgtgggtctccagctggcatgtctgttcagcccaaaaactggctacctggaccctgttatcggcagcagcgcgtttctaaaacaaaaacagacaacaacaacagcaattttacctggactggtgcttcaaaatataacctcaatgggcgtgaatccatcatcaaccctggcactgctatggcctcacacaaagacgacgaagacaagttctttcccatgagcggtgtcatgatttttggaaaagagagcgccggagcttcaaacactgcattggacaatgtcatgattacggacgaagaggaaattaaagccactaaccctgtggccaccgaaagatttgggaccgtggcagtcaatttccagagcagcagcacagaccctgcgaccggagatgtgcatgctatgggagcattacctggcatggtgtggcaagatagagacgtgtacctgcagggtcccatttgggccaaaattcctcacacagatggacactttcacccgtctcctcttatgggcggctttggactcaagaacccgcctcctcagatcctcatcaaaaacacgcctgttcctgcgaatcctccggcggagttttcagctacaaagtttgcttcattcatcactcaatactccacaggacaagtgagcgtggaaattgaatgggagctgcagaaagaaaacagcaaacgctggaatcccgaagtgcagtatacatctaactatgcaaaatctgccaacgttgatttcactgtggacaacaatggactttatactgagcctcgccccattggcacccgttacctcacccgtcccctgtaa

SEQ ID NO: 5210 - protein, 736 aa, synthetic construct
  REGION 1..736: note = Description of Artificial Sequence: Synthetic polypeptide
MAADGYLPDWLEDTLSEGIRQWWKLKPGPPPPKPAERHKDDSRGLVLPGYKYLGPFNGLDKGEPVNEADAAALEHDKAYDQQLKAGDNPYLRYNHADAEFQERLQEDTSFGGNLGRAVFQAKKRVLEPLGLVEEGAKTAPGKKRPVEQSPQEPDSSSGIGKTGQQPAKKRLNFGQTGDSESVPDPQPLGEPPATPAAVGPTTMASGGGAPMADNNEGADGVGNASGNWHCDSTWLGDRVITTSTRTWALPTYNNHLYKQISSASTGASNDNHYFGYSTPWGYFDFNRFHCHFSPRDWQRLINNNWGFRPKRLSFKLFNIQVKEVTTNDGVTTIANNLTSTVQVFSDSEYQLPYVLGSAHQGCLPPFPADVFMIPQYGYLTLNNGSQAVGRSSFYCLEYFPSQMLRTGNNFTFSYTFEEVPFHSSYAHSQSLDRLMNPLIDQYLYYLNRTQNQSGSAQNKDLLFSRGSPAGMSVQPKNWLPGPCYRQQRVSKTKTDNNNSNFTWTGASKYNLNGRESIINPGTAMASHKDDEDKFFPMSGVMIFGKESAGASNTALDNVMITDEEEIKATNPVATERFGTVAVNFQSSSTDPATGDVHAMGALPGMVWQDRDVYLQGPIWAKIPHTDGHFHPSPLMGGFGLKNPPPQILIKNTPVPANPPAEFSATKFASFITQYSTGQVSVEIEWELQKENSKRWNPEVQYTSNYAKSANVDFTVDNNGLYTEPRPIGTRYLTRPL

SEQ ID NO: 5211 - protein, 735 aa, synthetic construct
  REGION 1..735: note = Description of Artificial Sequence: Synthetic polypeptide
MAADGYLPDWLEDTLSEGIRQWWKLKPGPPPPKPAERHKDDSRGLVLPGYKYLGPFNGLDKGEPVNEADAAALEHDKAYDRQLDSGDNPYLKYNHADAEFQERLKEDTSFGGNLGRAVFQAKKRVLEPLGLVEEPVKTAPGKKRPVEHSPVEPDSSSGTGKAGQQPARKRLNFGQTGDADSVPDPQPLGQPPAAPSGLGTNTMATGSGAPMADNNEGADGVGNSSGNWHCDSTWMGDRVITTSTRTWALPTYNNHLYKQISSQSGASNDNHYFGYSTPWGYFDFNRFHCHFSPRDWQRLINNNWGFRPKRLKFKLFNIQVKEVTQNDGTTTIANNLTSTVQVFTDSEYQLPYVLGSAHQGCLPPFPADVFMVPQYGYLTLNNGSQAVGRSSFYCLEYFPSQMLRTGNNFTFSYTFEDVPFHSSYAHSQSLDRLMNPLIDQYLYYLSRTDTPSGTTTQSRLQFSQAGASDIRNQSRNWLPGPCYRQQRVSKTSADNNNSEYSWTGATKYHLNGRDSLVNPGPAMASHKDDEEKFFPQSGVLIFGKQGSEKTSVDIEKVMITDEEEIRTTNPVATEQYGSVSTNLQRGNRQAATADVNTQGVLPGMVWQDRDVYLQGPIWAKIPHTDGHFHPSPLMGGFGLKHPPPQILIKNTPVPANPSTTFSAAKFASFITQYSTGQVSVEIEWELQKENSKRWNPEVQYTSNYNKSVNVDFTVDTNGVYSEPRPIGTRYLTRNQ

SEQ ID NO: 5212 - DNA, 2208 bp, synthetic construct
  misc_feature 1..2208: note = Description of Artificial Sequence: Synthetic polynucleotide
  source 1..2208: mol_type = other DNA
atggctgccgatggttatcttccagattggctcgaggacactctctctgaaggaataagacagtggtggaagctcaaacctggcccaccaccaccaaagcccgcagagcggcataaggacgacagcaggggtcttgtgcttcctgggtacaagtacctcggacccttcaacggactcgacaagggagagccggtcaacgaggcagacgccgcggccctcgagcacgacaaagcctatgaccggcagctcgacagcggagacaacccgtacctcaagtacaaccacgccgacgcggagtttcaggaacgccttaaagaagatacgtcttttgggggcaacctcggacgagcagtcttccaggcgaaaaagagggttcttgaacctctgggcctggttgaggaacctgttaagacggctccgggaaaaaagaggccggtagagcactctcctgtggagccagactcctcctcgggaaccggaaaggcgggccagcagcctgcaagaaaaagattgaattttggtcagactggagacgcagactcagtacctgacccccagcctctcggacagccaccagcagccccctctggtctgggaactaatacgatggctacaggcagtggcgcaccaatggcagacaataacgagggcgccgacggagtgggtaattcctcgggaaattggcattgcgattccacatggatgggcgacagagtcatcaccaccagcacccgaacctgggccctgcccacctacaacaaccacctctacaaacaaatttccagccaatcaggagcctcgaacgacaatcactactttggctacagcaccccttgggggtattttgacttcaacagattccactgccacttttcaccacgtgactggcaaagactcatcaacaacaactggggattccgacccaagagactcaagttcaagctctttaacattcaagtcaaagaggtcacgcagaatgacggtacgacgacgattgccaataaccttaccagcacggttcaggtgtttactgactcggagtaccagctcccgtacgtcctcggctcggcgcatcaaggatgcctcccgccgttcccagcagacgtcttcatggtgccacagtatggatacctcaccctgaacaacgggagtcaggcagtaggacgctcttcattttactgcctggagtactttccttctcagatgctgcgtaccggtaacaactttaccttcagctacacttttgaggacgttcctttccacagcagctacgctcacagccagagtctggaccgtctcatgaatcctctcatcgaccagtacctgtattacttgagcagaacagacactccaagtggaaccaccacgcagtcaaggcttcagttttctcaggccggagcgagtgacattcggaaccagtctaggaactggcttcctggaccctgttaccgccagcagcgagtatcaaagacatctgcggataacaacaacagtgaatactcgtggactggagctaccaagtaccacctcaatggcagagactctctggtgaatccgggcccggccatggcaagccacaaggacgatgaagaaaagttttttcctcagagcggggttctcatctttgggaagcaaggctcagagaaaacaagtgtggacattgaaaaggtcatgattacagacgaagaggaaatcaggacaaccaatcccgtggctacggagcagtatggttctgtatctaccaacctccagagaggcaacagacaagcagctaccgcagatgtcaacacacaaggcgttcttccaggcatggtctggcaggacagagatgtgtaccttcaggggcccatctgggcaaagattccacacacggacggacattttcacccctctcccctcatgggtggattcggacttaaacaccctcctccacagattctcatcaagaacaccccggtacctgcgaatccttcgaccaccttcagtgcggcaaagtttgcttccttcatcacacagtactccacgggacaggtcagcgtggagatcgagtgggagctgcagaaggaaaacagcaaacgctggaatcccgaagttcagtacacttccaactacaacaagtctgttaatgtggactttactgtggacactaatggcgtgtattcagagcctcgccccattggcaccagatacctgactcgtaatcagtaa

SEQ ID NO: 5213 - DNA, 2208 bp, synthetic construct
  misc_feature 1..2208: note = Description of Artificial Sequence: Synthetic polynucleotide
  source 1..2208: mol_type = other DNA
atggctgccgatggttatcttccagattggctcgaggacactctctctgaaggaataagacagtggtggaagctcaaacctggcccaccaccaccaaagcccgcagagcggcataaggacgacagcaggggtcttgtgcttcctgggtacaagtacctcggacccttcaacggactcgacaagggagagccggtcaacgaggcagacgccgcggccctcgagcacgacaaagcctatgaccggcagctcgacagcggagacaacccgtacctcaagtacaaccacgccgacgcggagtttcaggagcgccttaaagaagatacgtcttttgggggcaacctcggacgagcagtcttccaggcgaaaaagagggttcttgaacctctgggcctggttgaggaacctgttaagacggctccgggaaaaaagaggccggtagagcactctcctgtggagccagactcctcctcgggaaccggaaaggcgggccagcagcctgcaagaaaaagattgaattttggtcagactggagacgcagactcagtacctgatccccagcctctcggacagccaccagcagccccctctggtctgggaactaatacgatggctacaggcagtggcgcaccaatggcagacaataacgagggcgccgacggagtgggtaattcctcgggaaattggcattgcgattccacatggatgggcgacagagtcatcaccaccagcacccgaacctgggccctgcccacctacaacaaccacctctacaaacaaatttccagccaatcaggagcctcgaacgacaatcactactttggctacagcaccccttgggggtattttgacttcaacagattccactgccacttttcaccacgtgactggcaaagactcatcaacaacaactggggattccgacccaagagactcaagttcaagctctttaacattcaagtcaaagaggtcacgcagaatgacggtacgacgacgattgccaataaccttaccagcacggttcaggtgtttactgactcggagtaccagctcccgtatgtcctcggctcggcgcatcaaggatgcctcccgccgttcccagcagacgtcttcatggtgccacagtatggatacctcaccctgaacaacgggagtcaggcagtaggacgctcttcattttactgcctggagtactttccttctcagatgctgcgtaccggtaacaactttaccttcagctacacttttgaggacgttcctttccacagcagctacgctcacagccagagtctggaccgtctcatgaatcctctcatcgaccagtacctgtattacttgagcagaacagacactccaagtggaaccaccacgcagtcaaggcttcagttttctcaggccggagcgagtgacattcgggaccagtctaggaactggcttcctggaccctgttaccgccagcagcgagtatcaaagacatctgcggataacaacaacagtgaatactcgtggactggagctaccaagtaccacctcaatggcagagactctctggtgaatccgggcccggccatggcaagccacaaggacgatgaagaaaagttttttcctcagagcggggttctcatctttgggaagcaaggctcagagaaaacaagtgtggacattgaaaaggtcatgattacagacgaagaggaaatcaggacaaccaatcccgtggctacggagcagtatggttctgtatctaccaacctccagagaggcaacagacaagcagctaccgcagatgtcaacacacaaggcgttcttccaggcatggtctggcaggacagagatgtgtaccttcaggggcccatctgggcaaagattccacacacggacggacattttcacccctctcccctcatgggtggattcggacttaaacaccctcctccacagattctcatcaagaacaccccggtacctgcgaatccttcgaccaccttcagtgcggcaaagtttgcttccttcatcacacagtactccacgggacaggtcagcgtggagatcgagtgggagctgcagaaggaaaacagcaaacgctggaatcccgaagttcagtacacttccaactacaacaagtctgttaatgtggactttactgtggacactaatggcgtgtattcagagcctcgccccattggcaccagatacctgactcgtaatctgtaa

SEQ ID NO: 5214 - protein, 735 aa, synthetic construct
  REGION 1..735: note = Description of Artificial Sequence: Synthetic polypeptide
MAADGYLPDWLEDTLSEGIRQWWKLKPGPPPPKPAERHKDDSRGLVLPGYKYLGPFNGLDKGEPVNEADAAALEHDKAYDRQLDSGDNPYLKYNHADAEFQERLKEDTSFGGNLGRAVFQAKKRVLEPLGLVEEPVKTAPGKKRPVEHSPVEPDSSSGTGKAGQQPARKRLNFGQTGDADSVPDPQPLGQPPAAPSGLGTNTMATGSGAPMADNNEGADGVGNSSGNWHCDSTWMGDRVITTSTRTWALPTYNNHLYKQISSQSGASNDNHYFGYSTPWGYFDFNRFHCHFSPRDWQRLINNNWGFRPKRLKFKLFNIQVKEVTQNDGTTTIANNLTSTVQVFTDSEYQLPYVLGSAHQGCLPPFPADVFMVPQYGYLTLNNGSQAVGRSSFYCLEYFPSQMLRTGNNFTFSYTFEDVPFHSSYAHSQSLDRLMNPLIDQYLYYLSRTDTPSGTTTQSRLQFSQAGASDIRDQSRNWLPGPCYRQQRVSKTSADNNNSEYSWTGATKYHLNGRDSLVNPGPAMASHKDDEEKFFPQSGVLIFGKQGSEKTSVDIEKVMITDEEEIRTTNPVATEQYGSVSTNLQRGNRQAATADVNTQGVLPGMVWQDRDVYLQGPIWAKIPHTDGHFHPSPLMGGFGLKHPPPQILIKNTPVPANPSTTFSAAKFASFITQYSTGQVSVEIEWELQKENSKRWNPEVQYTSNYNKSVNVDFTVDTNGVYSEPRPIGTRYLTRNL

SEQ ID NO: 5215 - DNA, 2172 bp, synthetic construct
  misc_feature 1..2172: note = Description of Artificial Sequence: Synthetic polynucleotide
  source 1..2172: mol_type = other DNA
atgtcttttgttgatcaccctccagattggttggaagaagttggtgaaggtcttcgcgagtttttgggccttgaagcgggcccaccgaaaccaaaacccaatcagcagcatcaagatcaagcccgtggtcttgtgctgcctggttataactatctcggacccggaaacggtctcgatcgaggagagcctgtcaacagggcagacgaggtcgcgcgagagcacgacatctcgtacaacgagcagcttgaggcgggagacaacccctacctcaagtacaaccacgcggacgccgagtttcaggagaagctcgccgacgacacatccttcgggggaaacctcggaaaggcagtctttcaggccaagaaaagggttctcgaaccttttggcctggttgaagagggtgctaagacggcccctaccggaaagcggatagacgaccactttccaaaaagaaagaaggctcggaccgaagaggactccaagccttccacctcgtcagacgccgaagctggacccagcggatcccagcagctgcaaatcccagcccaaccagcctcaagtttgggagctgatacaatgtctgcgggaggtggcggcccattgggcgacaataaccaaggtgccgatggagtgggcaatgcctcgggagattggcattgcgattccacgtggatgggggacagagtcgtcaccaagtccacccgaacctgggtgctgcccagctacaacaaccaccagtaccgagagatcaaaagcggctccgtcgacggaagcaacgccaacgcctactttggatacagcaccccctgggggtactttgactttaaccgcttccacagccactggagcccccgagactggcaaagactcatcaacaactactggggcttcagaccccggtccctcagagtcaaaatcttcaacattcaagtcaaagaggtcacggtgcaggactccaccaccaccatcgccaacaacctcacctccaccgtccaagtgtttacggacgacgactaccagctgccctacgtcgtcggcaacgggaccgagggatgcctgccggccttccctccgcaggtctttacgctgccgcagtacggttacgcgacgctgaaccgcgacaacacagaaaatcccaccgagaggagcagcttcttctgcctagagtactttcccagcaagatgctgagaacgggcaacaactttgagtttacctacaactttgaggaggtgcccttccactccagcttcgctcccagtcagaacctgttcaagctggccaacccgctggtggaccagtacttgtaccgcttcgtgagcacaaataacactggcggagtccagttcaacaagaacctggccgggagatacgccaacacctacaaaaactggttcccggggcccatgggccgaacccagggctggaacctgggctccggggtcaaccgcgccagtgtcagcgccttcgccacgaccaataggatggagctcgagggcgcgagttaccaggtgcccccgcagccgaacggcatgaccaacaacctccagggcagcaacacctatgccctggagaacactatgatcttcaacagccagccggcgaacccgggcaccaccgccacgtacctcgagggcaacatgctcatcaccagcgagagcgagacgcagccggtgaaccgcgtggcgtacaacgtcggcgggcagatggccaccaacaaccagagctccaccactgcccccgcgaccggcacgtacaacctccaggaaatcgtgcccggcagcgtgtggatggagagggacgtgtacctccaaggacccatctgggccaagatcccagagacgggggcgcactttcacccctctccggccatgggcggattcggactcaaacacccaccgcccatgatgctcatcaagaacacgcctgtgcccggaaatatcaccagcttctcggacgtgcccgtcagcagcttcatcacccagtacagcaccgggcaggtcaccgtggagatggagtgggagctcaagaaggaaaactccaagaggtggaacccagagatccagtacacaaacaactacaacgacccccagtttgtggactttgccccggacagcaccggggaatacagaaccaccagacctatcggaacccgataccttacccgacccctt

SEQ ID NO: 5216 - DNA, 2214 bp, synthetic construct
  misc_feature 1..2214: note = Description of Artificial Sequence: Synthetic polynucleotide
  source 1..2214: mol_type = other DNA
atggctgccgatggttatcttccagattggctcgaggacaacctctctgagggcattcgcgagtggtgggcgctgaaacctggagccccgaagcccaaagccaaccagcaaaagcaggacgacggccggggtctggtgcttcctggctacaagtacctcggacccttcaacggactcgacaagggggagcccgtcaacgcggcggacgcagcggccctcgagcacgacaaggcctacgaccagcagctgcaggcgggtgacaatccgtacctgcggtataaccacgccgacgccgagtttcaggagcgtctgcaagaagatacgtcttttgggggcaacctcgggcgagcagtcttccaggccaagaagcgggttctcgaacctctcggtctggttgaggaaggcgctaagacggctcctggaaagaagagaccggtagagccatcaccccagcgttctccagactcctctacgggcatcggcaagaaaggccaacagcccgccagaaaaagactcaattttggtcagactggcgactcagagtcagttccagaccctcaacctctcggagaacctccagcagcgccctctggtgtgggacctaatacaatggctgcaggcggtggcgcaccaatggcagacaataacgaaggcgccgacggagtgggtagttcctcgggaaattggcattgcgattccacatggctgggcgacagagtcatcaccaccagcacccgaacctgggccctgcccacctacaacaaccacctctacaagcaaatctccaacgggacatcgggaggagccaccaacgacaacacctacttcggctacagcaccccctgggggtattttgactttaacagattccactgccacttttcaccacgtgactggcagcgactcatcaacaacaactggggattccggcccaagagactcagcttcaagctcttcaacatccaggtcaaggaggtcacgcagaatgaaggcaccaagaccatcgccaataacctcaccagcaccatccaggtgtttacggactcggagtaccagctgccgtacgttctcggctctgcccaccagggctgcctgcctccgttcccggcggacgtgttcatgattccccagtacggctacctaacactcaacaacggtagtcaggccgtgggacgctcctccttctactgcctggaatactttccttcgcagatgctgagaaccggcaacaacttccagtttacttacaccttcgaggacgtgcctttccacagcagctacgcccacagccagagcttggaccggctgatgaatcctctgattgaccagtacctgtactacttgtctcggactcaaacaacaggaggcacggcaaatacgcagactctgggcttcagccaaggtgggcctaatacaatggccaatcaggcaaagaactggctgccaggaccctgttaccgccaacaacgcgtctcaacgacaaccgggcaaaacaacaatagcaactttgcctggactgctgggaccaaataccatctgaatggaagaaattcattggctaatcctggcatcgctatggcaacacacaaagacgacgaggagcgtttttttcccagtaacgggatcctgatttttggcaaacaaaatgctgccagagacaatgcggattacagcgatgtcatgctcaccagcgaggaagaaatcaaaaccactaaccctgtggctacagaggaatacggtatcgtggcagataacttgcctgagcggacggcgatgagtcttccgggaactgtcaacagccagggggccttacccggtatggtctggcagaaccgggacgtgtacctgcagggtcccatctgggccaagattcctcacacggacggcaacttccacccgtctccgctgatgggcggctttggcctgaaacatcctccgcctcagatcctgatcaagaacacgcctgtacctgcggatcctccgaccaccttcaaccagtcaaagctgaactctttcatcacgcaatacagcaccggacaggtcagcgtggaaattgaatgggagctgcagaaggaaaacagcaagcgctggaaccccgagatccagtacacctccaactactacaaatctacaagtgtggactttgctgttaatacagaaggcgtgtactctgaaccccgccccattggcacccgttacctcacccgtaatctg

SEQ ID NO: 5217 - protein, 738 aa, synthetic construct
  REGION 1..738: note = Description of Artificial Sequence: Synthetic polypeptide
MAADGYLPDWLEDNLSEGIREWWALKPGAPKPKANQQKQDDGRGLVLPGYKYLGPFNGLDKGEPVNAADAAALEHDKAYDQQLQAGDNPYLRYNHADAEFQERLQEDTSFGGNLGRAVFQAKKRVLEPLGLVEEGAKTAPGKKRPVEPSPQRSPDSSTGIGKKGQQPARKRLNFGQTGDSESVPDPQPLGEPPAAPSGVGPNTMAAGGGAPMADNNEGADGVGSSSGNWHCDSTWLGDRVITTSTRTWALPTYNNHLYKQISNGTSGGATNDNTYFGYSTPWGYFDFNRFHCHFSPRDWQRLINNNWGFRPKRLSFKLFNIQVKEVTQNEGTKTIANNLTSTIQVFTDSEYQLPYVLGSAHQGCLPPFPADVFMIPQYGYLTLNNGSQAVGRSSFYCLEYFPSQMLRTGNNFQFTYTFEDVPFHSSYAHSQSLDRLMNPLIDQYLYYLSRTQTTGGTANTQTLGFSQGGPNTMANQAKNWLPGPCYRQQRVSTTTGQNNNSNFAWTAGTKYHLNGRNSLANPGIAMATHKDDEERFFPSNGILIFGKQNAARDNADYSDVMLTSEEEIKTTNPVATEEYGIVADNLPERTAMSLPGTVNSQGALPGMVWQNRDVYLQGPIWAKIPHTDGNFHPSPLMGGFGLKHPPPQILIKNTPVPADPPTTFNQSKLNSFITQYSTGQVSVEIEWELQKENSKRWNPEIQYTSNYYKSTSVDFAVNTEGVYSEPRPIGTRYLTRNL

SEQ ID NO: 5218 - DNA, 2214 bp, synthetic construct
  misc_feature 1..2214: note = Description of Artificial Sequence: Synthetic polynucleotide
  source 1..2214: mol_type = other DNA
atggctgccgatggttatcttccagattggctcgaggacaacctctctgagggcattcgcgagtggtgggcgctgaaacctggagccccgaagcccaaagccaaccagcaaaagcaggacgacggccggggtctggtgcttcctggctacaagtacctcggacccttcaacggactcgacaagggggagcccgtcaacgcggcggacgcagcggccctcgagcacgacaaggcctacgaccagcagctgcaggcgggtgacaatccgtacctgcggtataaccacgccgacgccgagtttcaggagcgtctgcaagaagatacgtcttttgggggcaacctcgggcgagcagtcttccaggccaagaagcgggttctcgaacctctcggtctggttgaggaaggcgctaagacggctcctggaaagaagagaccggtagagccatcaccccagcgttctccagactcctctacgggcatcggcaagaaaggccaacagcccgccagaaaaagactcaattttggtcagactggcgactcagagtcagttccagaccctcaacctctcggagaacctccagcagcgccctctggtgtgggacctaatacaatggctgcaggcggtggcgcaccaatggcagacaataacgaaggcgccgacggagtgggtagttcctcgggaaattggcattgcgattccacatggctgggcgacagagtcatcaccaccagcacccgaacctgggccctgcccacctacaacaaccacctctacaagcaaatctccaacgggacatcgggaggagccaccaacgacaacacctacttcggctacagcaccccctgggggtattttgactttaacagattccactgccacttttcaccacgtgactggcagcgactcatcaacaacaactggggattccggcccaagagactcagcttcaagctcttcaacatccaggtcaaggaggtcacgcagaatgaaggcaccaagaccatcgccaataacctcaccagcaccatccaggtgtttacggactcggagtaccagctgccgtacgttctcggctctgcccaccagggctgcctgcctccgttcccggcggacgtgttcatgattccccagtacggctacctaacactcaacaacggtagtcaggccgtgggacgctcctccttctactgcctggaatactttccttcgcagatgctgagaaccggcaacaacttccagtttacttacaccttcgaggacgtgcctttccacagcagctacgcccacagccagagcttggaccggctgatgaatcctctgattgaccagtacctgtactacttgtctcggactcaaacaacaggaggcacggcaaatacgcagactctgggcttcagccaaggtgggcctaatacaatggccaatcaggcaaagaactggctgccaggaccctgttaccgccaacaacgcgtctcaacgacaaccgggcaaaacaacaatagcaactttgcctggactgctgggaccaaataccatctgaatggaagaaattcattggctaatcctggcatcgctatggcaacacacaaagacgacgaggagcgtttttttcccagtaacgggatcctgatttttggcaaacaaaatgctgccagagacaatgcggattacagcgatgtcatgctcaccagcgaggaagaaatcaaaaccactaaccctgtggctacagaggaatacggtatcgtggcagataacttgagttttagtcgtgcggttctttgtgatggaactgtcaacagccagggggccttacccggtatggtctggcagaaccgggacgtgtacctgcagggtcccatctgggccaagattcctcacacggacggcaacttccacccgtctccgctgatgggcggctttggcctgaaacatcctccgcctcagatcctgatcaagaacacgcctgtacctgcggatcctccgaccaccttcaaccagtcaaagctgaactctttcatcacgcaatacagcaccggacaggtcagcgtggaaattgaatgggagctgcagaaggaaaacagcaagcgctggaaccccgagatccagtacacctccaactactacaaatctacaagtgtggactttgctgttaatacagaaggcgtgtactctgaaccccgccccattggcacccgttacctcacccgtaatctg

SEQ ID NO: 5219 - protein, 738 aa, synthetic construct
  REGION 1..738: note = Description of Artificial Sequence: Synthetic polypeptide
MAADGYLPDWLEDNLSEGIREWWALKPGAPKPKANQQKQDDGRGLVLPGYKYLGPFNGLDKGEPVNAADAAALEHDKAYDQQLQAGDNPYLRYNHADAEFQERLQEDTSFGGNLGRAVFQAKKRVLEPLGLVEEGAKTAPGKKRPVEPSPQRSPDSSTGIGKKGQQPARKRLNFGQTGDSESVPDPQPLGEPPAAPSGVGPNTMAAGGGAPMADNNEGADGVGSSSGNWHCDSTWLGDRVITTSTRTWALPTYNNHLYKQISNGTSGGATNDNTYFGYSTPWGYFDFNRFHCHFSPRDWQRLINNNWGFRPKRLSFKLFNIQVKEVTQNEGTKTIANNLTSTIQVFTDSEYQLPYVLGSAHQGCLPPFPADVFMIPQYGYLTLNNGSQAVGRSSFYCLEYFPSQMLRTGNNFQFTYTFEDVPFHSSYAHSQSLDRLMNPLIDQYLYYLSRTQTTGGTANTQTLGFSQGGPNTMANQAKNWLPGPCYRQQRVSTTTGQNNNSNFAWTAGTKYHLNGRNSLANPGIAMATHKDDEERFFPSNGILIFGKQNAARDNADYSDVMLTSEEEIKTTNPVATEEYGIVADNLSFSRAVLCDGTVNSQGALPGMVWQNRDVYLQGPIWAKIPHTDGNFHPSPLMGGFGLKHPPPQILIKNTPVPADPPTTFNQSKLNSFITQYSTGQVSVEIEWELQKENSKRWNPEIQYTSNYYKSTSVDFAVNTEGVYSEPRPIGTRYLTRNL

SEQ ID NO: 5220 - DNA, 2215 bp, synthetic construct
  misc_feature 1..2215: note = Description of Artificial Sequence: Synthetic polynucleotide
  source 1..2215: mol_type = other DNA
atggctgccgatggttatcttccagattggctcgaggacactctctctgaaggaataagacagtggtggaagctcaaacctggcccaccaccaccaaagcccgcagagcggcataaggacgacagcaggggtcttgtgcttcctgggtacaagtacctcggacccttcaacggactcgacaagggagagccggtcaacgaggcagacgccgcggccctcgagcacgacaaagcctacgaccggcagctcgacagcggagacaacccgtacctcaagtacaaccacgccgacgccgagttccaggagcggctcaaagaagatacgtcttttgggggcaacctcgggcgagcagtcttccaggccaaaaagaggcttcttgaacctcttggtctggttgaggaagcggctaagacggctcctggaaagaagaggcctgtagagcactctcctgtggagccagactcctcctcgggaaccggaaaggcgggccagcagcctgcaagaaaaagattgaattttggtcagactggagacgcagactcagtcccagaccctcaaccaatcggagaacctcccgcagccccctcaggtgtgggatctcttacaatggctgcaggcggtggcgcaccaatggcagacaataacgagggcgccgacggagtgggtaattcctcgggaaattggcattgcgattccacatggatgggcgacagagtcatcaccaccagcacccgaacctgggccctgcccacctacaacaaccacctctacaagcaaatctccaacagcacatctggaggatcttcaaatgacaacgcctacttcggctacagcaccccctgggggtattttgactttaacagattccactgccacttttcaccacgtgactggcagcgactcatcaacaacaactggggattccggcccaagagactcagcttcaagctcttcaacatccaggtcaaggaggtcacgcagaatgaaggcaccaagaccatcgccaataacctcaccagcaccatccaggtgtttacggactcggagtaccagctgccgtacgttctcggctctgcccaccagggctgcctgcctccgttcccggcggacgtgttcatgattccccagtacggctacctaacactcaacaacggtagtcaggccgtgggacgctcctccttctactgcctggaatactttccttcgcagatgctgagaaccggcaacaacttccagtttacttacaccttcgaggacgtgcctttccacagcagctacgcccacagccagagcttggaccggctgatgaatcctctgattgaccagtacctgtactacttgtctcggactcaaacaacaggaggcacgacaaatacgcagactctgggcttcagccaaggtgggcctaatacaatggccaatcaggcaaagaactggctgccaggaccctgttaccgccagcagcgagtatcaaagacatctgcggataacaacaacagtgaatactcgtggactggagctaccaagtaccacctcaatggcagagactctctggtgaatccgggcccggccatggcaagccacaaggacgatgaagaaaagtttttttcctcagagcggggttctcatctttgggaagcaaggctcagagaaaacaaatgtggacattgaaaaggtcatgattacagacgaagaggaaatcaggacaaccaatcccgtggctacggagcagtatggttctgtatctaccaacctccagagaggcaacagacaagcagctaccgcagatgtcaacacacaaggcgttcttccaggcatggtctggcaggacagagatgtgtaccttcaggggcccatctgggcaaagattccacacacggacggacattttcacccctctcccctcatgggtggattcggacttaaacaccctccgcctcagatcctgatcaagaacacgcctgtacctgcggatcctccgaccaccttcaaccagtcaaagctgaactctttcatcacccagtattctactggccaagtcagcgtggagatcgagtgggagctgcagaaggaaaacagcaagcgctggaaccccgagatccagtacacctccaactactacaaatctacaagtgtggactttgctgttaatacagaaggcgtgtactctgaaccccgccccattggcacccgttacctcacccgtaatctgtaa

SEQ ID NO: 5221 - protein, 737 aa, synthetic construct
  REGION 1..737: note = Description of Artificial Sequence: Synthetic polypeptide
MAADGYLPDWLEDTLSEGIRQWWKLKPGPPPPKPAERHKDDSRGLVLPGYKYLGPFNGLDKGEPVNEADAAALEHDKAYDRQLDSGDNPYLKYNHADAEFQERLKEDTSFGGNLGRAVFQAKKRLLEPLGLVEEAAKTAPGKKRPVEHSPVEPDSSSGTGKAGQQPARKRLNFGQTGDADSVPDPQPIGEPPAAPSGVGSLTMAAGGGAPMADNNEGADGVGNSSGNWHCDSTWMGDRVITTSTRTWALPTYNNHLYKQISNSTSGGSSNDNAYFGYSTPWGYFDFNRFHCHFSPRDWQRLINNNWGFRPKRLSFKLFNIQVKEVTQNEGTKTIANNLTSTIQVFTDSEYQLPYVLGSAHQGCLPPFPADVFMIPQYGYLTLNNGSQAVGRSSFYCLEYFPSQMLKTGNNFQFTYTFEDVPFHSSYAHSQSLDRLMNPLIDQYLYYLSRTQTTGGTTNTQTLGFSQGGPNTMANQAKNWLPGPCYRQQRVSKTSADNNNSEYSWTGATKYHLNGRDSLVNPGPAMASHKDDEEKFFPQSGVLIFGKQGSEKTNVDIEKVMITDEEEIRTTNPVATEQYGSVSTNLQRGNRQAATADVNTQGVLPGMVWQDRDVYLQGPIWAKIPHTDGHFHPSPLMGGFGLKHPPPQILIKNTPVPADPPTTFNQSKLNSFITQYSTGQVSVEIEWELQKENSKRWNPEIQYTSNYYKSTSVDFAVNTEGVYSEPRPIGTRYLTRNL

SEQ ID NO: 5222 - protein, 737 aa, synthetic construct
  REGION 1..737: note = Description of Artificial Sequence: Synthetic polypeptide
MAADGYLPDWLEDTLSEGIRQWWKLKPGPPPPKPAERHKDDSRGLVLPGYKYLGPFNGLDKGEPVNEADAAALEHDKAYDRQLDSGDNPYLKYNHADAEFQERLKEDTSFGGNLGRAVFQAKKRLLEPLGLVEEAAKTAPGKKRPVEHSPVEPDSSSGTGKAGQQPARKRLNFGQTGDADSVPDPQPIGEPPAAPSGVGSLTMAAGGGAPMADNNEGADGVGNSSGNWHCDSTWMGDRVITTSTRTWALPTYNNHLYKQISNSTSGGSSNDNAYFGYSTPWGYFDFNRFHCHFSPRDWQRLINNNWGFRPKRLSFKLFNIQVKEVTQNEGTKTIANNLTSTIQVFTDSEYQLPYVLGSAHQGCLPPFPADVFMIPQYGYLTLNNGSQAVGRSSFYCLEYFPSQMLKTGNNFQFTYTFEDVPFHSSYAHSQSLDRLMNPLIDQYLYYLSRTQTTGGTTNTQTLGFSQGGPNTMANQAKNWLPGPCYRQQRVSKTSADNNNSEYSWTGATKYHLNGRDSLVNPGPAMASHKDDEEKFFPQSGVLIFGKQGSEKTNVDIEKVMITDEEEIRTTNPVATEQYGSVSTNLQQGNTQAATADVNTQGVLPGMVWQDRDVYLQGPIWAKIPHTDGHFHPSPLMGGFGLKHPPPQILIKNTPVPADPPTTFNQSKLNSFITQYSTGQVSVEIEWELQKENSKRWNPEIQYTSNYYKSTSVDFAVNTEGVYSEPRPIGTRYLTRNL

SEQ ID NO: 5223 - protein, 737 aa, synthetic construct
  REGION 1..737: note = Description of Artificial Sequence: Synthetic polypeptide
MAADGYLPDWLEDTLSEGIRQWWKLKPGPPPPKPAERHKDDSRGLVLPGYKYLGPFNGLDKGEPVNEADAAALEHDKAYDRQLDSGDNPYLKYNHADAEFQERLKEDTSFGGNLGRAVFQAKKRLLEPLGLVEEAAKTAPGKKRPVEHSPVEPDSSSGTGKAGQQPARKRLNFGQTGDADSVPDPQPIGEPPAAPSGVGSLTMAAGGGAPMADNNEGADGVGNSSGNWHCDSTWMGDRVITTSTRTWALPTYNNHLYKQISNSTSGGSSNDNAYFGYSTPWGYFDFNRFHCHFSPRDWQRLINNNWGFRPKRLSFKLFNIQVKEVTQNEGTKTIANNLTSTIQVFTDSEYQLPYVLGSAHQGCLPPFPADVFMIPQYGYLTLNNGSQAVGRSSFYCLEYFPSQMLRTGNNFQFTYTFEDVPFHSSYAHSQSLDRLMNPLIDQYLYYLSRTQTTGGTTNTQTLGFSQGGPNTMANQAKNWLPGPCYRQQRVSKTSADNNNSEYSWTGATKYHLNGRDSLVNPGPAMASHKDDEEKFFPQSGVLIFGKQGSEKTNVDIEKVMITDEEEIRTTNPVATEQYGSVSTNLQQGNTQAATADVNTQGVLPGMVWQDRDVYLQGPIWAKIPHTDGHFHPSPLMGGFGLKHPPPQILIKNTPVPADPPTTFNQSKLNSFITQYSTGQVSVEIEWELQKENSKRWNPEIQYTSNYYKSTSVDFAVNTEGVYSEPRPIGTRYLTRNL

SEQ ID NO: 5224 - DNA, 2214 bp, synthetic construct
  misc_feature 1..2214: note = Description of Artificial Sequence: Synthetic polynucleotide
  source 1..2214: mol_type = other DNA
atggctgccgatggttatcttccagattggctcgaggacaaccttagtgaaggaattcgcgagtggtgggctttgaaacctggagcccctcaacccaaggcaaatcaacaacatcaagacaacgctcgaggtcttgtgcttccgggttacaaataccttggacccggcaacggactcgacaagggggagccggtcaacgcagcagacgcggcggccctcgagcacgacaaggcctacgaccagcagctgcaggcgggtgacaatccgtacctgcggtataaccacgccgacgccgagtttcaggagcgtctgcaagaagatacgtcttttgggggcaaccttggcagagcagtcttccaggccaaaaagaggatccttgagcctcttggtctggttgaggaagcagctaaaacggctcctggaaagaagaggcctgtagatcagtctcctcaggaaccggactcatcatctggtgttggcaaatcgggcaaacagcctgccagaaaaagactaaatttcggtcagactggcgactcagagtcagtcccagaccctcaacctctcggagaaccaccagcagcccccacaagtttgggatctaatacaatggcttcaggcggtggcgcaccaatggcagacaataacgagggtgccgatggggtgggtagttcctcgggaaattggcattgcgattcccaatggctgggggacagagtcatcaccaccagcacccgaacctgggccctgcccacctacaacaatcacctctacaagcaaatctccaacgggacatcgggaggagccaccaacgacaacacctacttcggctacagcaccccctgggggtattttgactttaacagattccactgccacttttcaccacgtgactggcagcgactcatcaacaacaactggggattccggcccaagagactcagcttcaagctcttcaacatccaggtcaaggaggtcacgcagaatgaaggcaccaagaccatcgccaataacctcaccagcaccatccaggtgtttacggactcggagtaccagctgccgtacgttctcggctctgcgcaccagggctgcctccctccgttcccggcggacgtgttcatgattccgcaatacggctacctgacgctcaacaatggcagccaagccgtgggacgttcatccttttactgcctggaatatttcccttctcagatgctgagaacgggcaacaactttaccttcagctacacctttgaggaagtgcctttccacagcagctacgcgcacagccagagcttggaccggctgatgaatcctctgattgaccagtacctgtactacttgtctcggactcaaacaacaggaggcacggcaaatacgcagactctgggcttcagccaaggtgggcctaatacaatggccaatcaggcaaagaactggctgccaggaccctgttaccgccaacaacgcgtctcaacgacaaccgggcaaaacaacaatagcaactttgcctggactgctgggaccaaataccatctgaatggaagaaattcattggctaatcctggcatcgctatggcaacacacaaagacgacgaggagcgtttttttcccagtaacgggatcctgatttttggcaaacaaaatgctgccagagacaatgcggattacagcgatgtcatgctcaccagcgaggaagaaatcaaaaccactaaccctgtggctacagaggaatacggtatcgtggcagataacttgcagcagcaaaacacggctcctcaaattggaactgtcaacagccagggggccttacccggtatggtctggcagaaccgggacgtgtacctgcagggtcccatctgggccaagattcctcacacggacggcaacttccacccgtctccgctgatgggcggctttggcctgaaacatcctccgcctcagatcctgatcaagaacacgcctgtacctgcggatcctccgaccaccttcaaccagtcaaagctgaactctttcatcacgcaatacagcaccggacaggtcagcgtggagatcgagtgggagctgcagaaggaaaacagcaagcgctggaacccggagatccagtacacttccaactattacaagtctaataatgttgaatttgctgttaatactgaaggtgtatatagtgaaccccgccccattggcaccagatacctgactcgtaatctgtaa

SEQ ID NO: 5225 - protein, 737 aa, synthetic construct
  REGION 1..737: note = Description of Artificial Sequence: Synthetic polypeptide
MAADGYLPDWLEDNLSEGIREWWALKPGAPQPKANQQHQDNARGLVLPGYKYLGPGNGLDKGEPVNAADAAALEHDKAYDQQLQAGDNPYLRYNHADAEFQERLQEDTSFGGNLGRAVFQAKKRILEPLGLVEEAAKTAPGKKRPVDQSPQEPDSSSGVGKSGKQPARKRLNFGQTGDSESVPDPQPLGEPPAAPTSLGSNTMASGGGAPMADNNEGADGVGSSSGNWHCDSQWLGDRVITTSTRTWALPTYNNHLYKQISNGTSGGATNDNTYFGYSTPWGYFDFNRFHCHFSPRDWQRLINNNWGFRPKRLSFKLFNIQVKEVTQNEGTKTIANNLTSTIQVFTDSEYQLPYVLGSAHQGCLPPFPADVFMIPQYGYLTLNNGSQAVGRSSFYCLEYFPSQMLRTGNNFTFSYTFEEVPFHSSYAHSQSLDRLMNPLIDQYLYYLSRTQTTGGTANTQTLGFSQGGPNTMANQAKNWLPGPCYRQQRVSTTTGQNNNSNFAWTAGTKYHLNGRNSLANPGIAMATHKDDEERFFPSNGILIFGKQNAARDNADYSDVMLTSEEEIKTTNPVATEEYGIVADNLQQQNTAPQIGTVNSQGALPGMVWQNRDVYLQGPIWAKIPHTDGNFHPSPLMGGFGLKHPPPQILIKNTPVPADPPTTFNQSKLNSFITQYSTGQVSVEIEWELQKENSKRWNPEIQYTSNYYKSNNVEFAVNTEGVYSEPRPIGTRYLTRNL

SEQ ID NO: 5226 - DNA, 2211 bp, synthetic construct
  misc_feature 1..2211: note = Description of Artificial Sequence: Synthetic polynucleotide
  source 1..2211: mol_type = other DNA
atggctgccgatggttatcttccagattggctcgaggacaacctctctgagggcattcgcgagtggtgggacttgaaacctggagccccgaagcccaaagccaaccagcaaaagcaggacgacggccggggtctggtgcttcctggctacaagtacctcggacccttcaacggactcgacaagggggagcccgtcaacgcggcggacgcagcggccctcgagcacgacaaggcctacgaccagcagctcaaagcgggtgacaatccgtacctgcggtataaccacgccgacgccgagtttcaggagcgtctgcaagaagatacgtcttttgggggcaacctcgggcgagcagtcttccaggccaagaagcgggttctcgaacctctcggtctggttgaggaaggcgctaagacggctcctggaaagaaacgtccggtagagcagtcgccacaagagccagactcctcctcgggcatcggcaagacaggccagcagcccgctaaaaagagactcaattttggtcagactggcgactcagagtcagtccccgacccacaacctctcggagaacctccagcaacccccgctgctgtgggacctactacaatggcttcaggcggtggcgcaccaatggcagacaataacgaaggcgccgacggagtgggtaatgcctcaggaaattggcattgcgattccacatggctgggcgacagagtcatcaccaccagcacccgaacatgggccttgcccacctataacaaccacctctacaagcaaatctccagtgcttcaacgggggccagcaacgacaaccactacttcggctacagcaccccctgggggtattttgatttcaacagattccactgccatttctcaccacgtgactggcagcgactcatcaacaacaattggggattccggcccaagagactcaacttcaagctcttcaacatccaagtcaaggaggtcacgacgaatgatggcgtcacgaccatcgctaataaccttaccagcacggttcaagtcttctcggactcggagtaccagctgccgtacgttctcggctctgcccaccagggctgcctgcctccgttcccggcggacgtgttcatgattccccagtacggctacctaacactcaacaacggtagtcaggccgtgggacgctcctccttctactgcctggaatactttccttcgcagatgctgagaaccggcaacaacttccagtttacttacaccttcgaggacgtgcctttccacagcagctacgcccacagccagagcttggaccggctgatgaatcctctgattgaccagtacctgtactacttgtctcggactcaaacaacaggaggcacggcaaatacgcagactctgggcttcagccaaggtgggcctaatacaatggccaatcaggcaaagaactggctgccaggaccctgttaccgccaacaacgcgtctcaacgacaaccgggcaaaacaacaatagcaattttacctggactggtgcttcaaaatataacctcaatgggcgtgaatccatcatcaaccctggcactgctatggcctcacacaaagacgacgaagacaagttctttcccatgagcggtgtcatgatttttggaaaagagagcgccggagcttcaaacactgcattggacaatgtcatgattacagacgaagaggaaattaaagccactaaccctgtggccaccgaaagatttgggaccgtggcagtcaatttccagagcagcagcacagaccctgcgaccggagatgtgcatgctatgggagcattacctggcatggtgtggcaagatagagacgtgtacctgcagggtcccatttgggccaaaattcctcacacagatggacactttcacccgtctcctcttatgggcggctttggactcaagaacccgcctcctcagatcctcatcaaaaacacgcctgttcctgcgaatcctccggcggagttttcagctacaaagtttgcttcattcatcacccaatactccacaggacaagtgagtgtggaaattgaatgggagctgcagaaagaaaacagcaagcgctggaatcccgaagtgcagtacacatccaattatgcaaaatctgccaacgttgattttactgtggacaacaatggactttatactgagcctcgccccattggcacccgttacctcacccgtcccctgtaa

SEQ ID NO: 5227 - protein, 736 aa, synthetic construct
  REGION 1..736: note = Description of Artificial Sequence: Synthetic polypeptide
MAADGYLPDWLEDNLSEGIREWWDLKPGAPKPKANQQKQDDGRGLVLPGYKYLGPFNGLDKGEPVNAADAAALEHDKAYDQQLKAGDNPYLRYNHADAEFQERLQEDTSFGGNLGRAVFQAKKRVLEPLGLVEEGAKTAPGKKRPVEQSPQEPDSSSGIGKTGQQPAKKRLNFGQTGDSESVPDPQPLGEPPATPAAVGPTTMASGGGAPMADNNEGADGVGNASGNWHCDSTWLGDRVITTSTRTWALPTYNNHLYKQISSASTGASNDNHYFGYSTPWGYFDFNRFHCHFSPRDWQRLINNNWGFRPKRLNFKLFNIQVKEVTTNDGVTTIANNLTSTVQVFSDSEYQLPYVLGSAHQGCLPPFPADVFMIPQYGYLTLNNGSQAVGRSSFYCLEYFPSQMLRTGNNFQFTYTFEDVPFHSSYAHSQSLDRLMNPLIDQYLYYLSRTQTTGGTANTQTLGFSQGGPNTMANQAKNWLPGPCYRQQRVSTTTGQNNNSNFTWTGASKYNLNGRESIINPGTAMASHKDDEDKFFPMSGVMIFGKESAGASNTALDNVMITDEEEIKATNPVATERFGTVAVNFQSSSTDPATGDVHAMGALPGMVWQDRDVYLQGPIWAKIPHTDGHFHPSPLMGGFGLKNPPPQILIKNTPVPANPPAEFSATKFASFITQYSTGQVSVEIEWELQKENSKRWNPEVQYTSNYAKSANVDFTVDNNGLYTEPRPIGTRYLTRPL

SEQ ID NO: 5228 - DNA, 2211 bp, synthetic construct
  misc_feature 1..2211: note = Description of Artificial Sequence: Synthetic polynucleotide
  source 1..2211: mol_type = other DNA
atggctgctgacggttatcttccagattggctcgaggacaacctttctgaaggcattcgagagtggtgggcgctgcaacctggagcccctaaacccaaggcaaatcaacaacatcaggacaacgctcggggtcttgtgcttccgggttacaaatacctcggacccggcaacggactcgacaagggggaacccgtcaacgcagcggacgcggcagccctcgagcacgacaaggcctacgaccagcagctcaaggccggtgacaacccctacctcaagtacaaccacgccgacgccgagttccaggagcggctcaaagaagatacgtcttttgggggcaacctcgggcgagcagtcttccaggccaaaaagaggcttcttgaacctcttggtctggttgaggaagcggctaagacggctcctggaaagaagaggcctgtagatcagtctcctcaggaaccggactcatcatctggtgttggcaaatcgggcaaacagcctgccagaaaaagactaaatttcggtcagactggcgactcagagtcagtcccagaccctcaacctctcggagaaccaccagcagcccccacaagtttgggatctaatacaatggcttcaggcggtggcgcaccaatggcagacaataacgagggtgccgatggagtgggtaattcctcaggaaattggcattgcgattcccaatggctgggcgacagagtcatcaccaccagcaccagaacctgggccctgcccacttacaacaaccatctctacaagcaaatctccagccaatcaggagcttcaaacgacaaccactactttggctacagcaccccttgggggtattttgactttaacagattccactgccacttctcaccacgtgactggcagcgactcattaacaacaactggggattccggcccaagaaactcagcttcaagctcttcaacatccaagttaaagaggtcacgcagaacgatggcacgacgactattgccaataaccttaccagcacggttcaagtgtttacggactcggagtatcagctcccgtacgtgctcgggtcggcgcaccaaggctgtctcccgccgtttccagcggacgtcttcatggtccctcagtatggatacctcaccctgaacaacggaagtcaagcggtgggacgctcatccttttactgcctggagtacttcccttcgcagatgctaaggactggaaataacttccaattcagctataccttcgaggatgtaccttttcacagcagctacgctcacagccagagtttggatcgcttgatgaatcctcttattgatcagtatctgtactacctgaacagaacgcaaggaacaacctctggaacaaccaaccaatcacggctgctttttagccaggctgggcctcagtctatgtctttgcaggccagaaattggctacctgggccctgctaccggcaacagagactttcaaagactgctaacgacaacaacaacagtaactttccttggacagcggccagcaaatatcatctcaatggccgcgactcgctggtgaatccaggaccagctatggccagtcacaaggacgatgaagaaaaatttttccctatgcacggcaatctaatatttggcaaagaagggacaacggcaagtaacgcagaattagataatgtaatgattacggatgaagaagagattcgtaccaccaatcctgtggcaacagagcagtatggaactgtggcaaataacttgcagagctcaaatacagctcccacgactagaactgtcaatgatcagggggccttacctggcatggtgtggcaagatcgtgacgtgtaccttcaaggacctatctgggcaaagattcctcacacggatggacactttcatccttctcctctgatgggaggctttggactgaaacatccgcctcctcaaatcatgatcaaaaatactccggtaccggcaaatcctccgacgactttcagcccggccaagtttgcttcatttatcactcagtactccactggacaggtcagcgtggaaattgagtgggagctacagaaagaaaacagcaaacgttggaatccagagattcagtacacttccaactacaacaagtctgttaatgtggactttactgtagacactaatggtgtttatagtgaacctcgccccattggcacccgttaccttacccgtcccctgtaa

SEQ ID NO: 5229 - protein, 736 aa, synthetic construct
  REGION 1..736: note = Description of Artificial Sequence: Synthetic polypeptide
MAADGYLPDWLEDNLSEGIREWWALQPGAPKPKANQQHQDNARGLVLPGYKYLGPGNGLDKGEPVNAADAAALEHDKAYDQQLKAGDNPYLKYNHADAEFQERLKEDTSFGGNLGRAVFQAKKRLLEPLGLVEEAAKTAPGKKRPVDQSPQEPDSSSGVGKSGKQPARKRLNFGQTGDSESVPDPQPLGEPPAAPTSLGSNTMASGGGAPMADNNEGADGVGNSSGNWHCDSQWLGDRVITTSTRTWALPTYNNHLYKQISSQSGASNDNHYFGYSTPWGYFDFNRFHCHFSPRDWQRLINNNWGFRPKKLSFKLFNIQVKEVTQNDGTTTIANNLTSTVQVFTDSEYQLPYVLGSAHQGCLPPFPADVFMVPQYGYLTLNNGSQAVGRSSFYCLEYFPSQMLRTGNNFQFSYTFEDVPFHSSYAHSQSLDRLMNPLIDQYLYYLNRTQGTTSGTTNQSRLLFSQAGPQSMSLQARNWLPGPCYRQQRLSKTANDNNNSNFPWTAASKYHLNGRDSLVNPGPAMASHKDDEEKFFPMHGNLIFGKEGTTASNAELDNVMITDEEEIRTTNPVATEQYGTVANNLQSSNTAPTTRTVNDQGALPGMVWQDRDVYLQGPIWAKIPHTDGHFHPSPLMGGFGLKHPPPQIMIKNTPVPANPPTTFSPAKFASFITQYSTGQVSVEIEWELQKENSKRWNPEIQYTSNYNKSVNVDFTVDTNGVYSEPRPIGTRYLTRPL

SEQ ID NO: 5230 - DNA, 2211 bp, synthetic construct
  misc_feature 1..2211: note = Description of Artificial Sequence: Synthetic polynucleotide
  source 1..2211: mol_type = other DNA
atggctgccgatggttatcttccagattggctcgaggacaaccttagtgaaggaattcgcgagtggtgggctttgaaacctggagcccctcaacccaaggcaaatcaacaacatcaagacaacgctcgaggtcttgtgcttccgggttacaaataccttggacccggcaacggactcgacaagggggagccggtcaacgcagcagacgcggcggccctcgagcacgacaaggcctacgaccagcagctcaaggccggagacaacccgtacctcaagtacaaccacgccgacgccgagttccaggagcggctcaaagaagatacgtcttttgggggcaacctcgggcgagcagtcttccaggccaaaaagaggcttcttgaacctcttggtctggttgaggaagcggctaagacggctcctggaaagaagagaccggtagagccatcaccccagcgttctccagactcctctacgggcatcggcaagaaaggccaacagcccgctaaaaagagactcaattttggtcagactggcgactcagagtcagtccccgacccacaacctctcggagaacctccagcaacccccgctgctgtgggacctactacaatggcttcaggcggtggcgcaccaatggcagacaataacgagggtgccgatggagtgggtaattcctcaggaaattggcattgcgattcccaatggctgggcgacagagtcatcaccaccagcaccagaacctgggccctgcccacttacaacaaccatctctacaagcaaatctccagccaatcaggagcttcaaacgacaaccactactttggctacagcaccccttgggggtattttgactttaacagattccactgccacttttcaccacgtgactggcaaagactcatcaacaacaactggggattccgacccaagagactcaacttcaagctcttcaacatccaagtcaaggaggtcacgacgaatgatggcgtcacgaccatcgctaataaccttaccagcacggttcaagtcttctcggactcggagtaccagttgccgtacgtcctcggctctgcgcaccagggctgcctccctccgttcccggcggacgtgttcatgattccgcagtacggctacctaacgctcaacaatggcagccaagccgtgggacgttcatccttttactgcctggaatatttcccttctcagatgctgagaacgggcaacaactttaccttcagctacacttttgaggacgttcctttccacagcagctacgctcacagccagagtctggaccgtctcatgaatcctctcatcgaccagtacctgtattacttgagcagaacaaacactccaagtggaaccaccacgcagtcaaggcttcagttttctcaggccggagcgagtgacattcgggaccagtctaggaactggcttcctggaccctgttaccgccagcagcgcgtttctaaaacaaaaacagacaacaacaacagcaattttacctggactggtgcttcaaaatataaccttaatgggcgtgaatctataatcaaccctggcactgctatggcctcacacaaagacgacgaagacaagttctttcccatgagcggtgtcatgatttttggaaaagagagcgccggagcttcaaacactgcattggacaatgtcatgattacagacgaagaggaaattaaagccactaaccctgtggccaccgaaagatttgggaccgtggcagtcaatttccagagcagcagcacagaccctgcgaccggagatgtgcatgttatgggagccttacctggaatggtgtggcaagacagagacgtatacctgcagggtcctatttgggccaaaattcctcacacggatggacactttcacccgtctcctcttatgggcggctttggactcaagaacccgcctcctcagatcctcatcaaaaacacgcctgttcctgcgaatcctccggcggagttttcagctacaaagtttgcttcattcatcacccaatactccacaggacaagtgagtgtggaaattgaatgggagctgcagaaagaaaacagcaagcgctggaatcccgaagtgcagtacacatccaattatgcaaaatctgccaacgttgattttactgtggacaacaatggactttatactgagcctcgccccattggcacccgttaccttacccgtcccctgtaa

SEQ ID NO: 5231 - protein, 736 aa, synthetic construct
  REGION 1..736: note = Description of Artificial Sequence: Synthetic polypeptide
MAADGYLPDWLEDNLSEGIREWWALKPGAPQPKANQQHQDNARGLVLPGYKYLGPGNGLDKGEPVNAADAAALEHDKAYDQQLKAGDNPYLKYNHADAEFQERLKEDTSFGGNLGRAVFQAKKRLLEPLGLVEEAAKTAPGKKRPVEPSPQRSPDSSTGIGKKGQQPAKKRLNFGQTGDSESVPDPQPLGEPPATPAAVGPTTMASGGGAPMADNNEGADGVGNSSGNWHCDSQWLGDRVITTSTRTWALPTYNNHLYKQISSQSGASNDNHYFGYSTPWGYFDFNRFHCHFSPRDWQRLINNNWGFRPKRLNFKLFNIQVKEVTTNDGVTTIANNLTSTVQVFSDSEYQLPYVLGSAHQGCLPPFPADVFMIPQYGYLTLNNGSQAVGRSSFYCLEYFPSQMLRTGNNFTFSYTFEDVPFHSSYAHSQSLDRLMNPLIDQYLYYLSRTNTPSGTTTQSRLQFSQAGASDIRDQSRNWLPGPCYRQQRVSKTKTDNNNSNFTWTGASKYNLNGRESIINPGTAMASHKDDEDKFFPMSGVMIFGKESAGASNTALDNVMITDEEEIKATNPVATERFGTVAVNFQSSSTDPATGDVHVMGALPGMVWQDRDVYLQGPIWAKIPHTDGHFHPSPLMGGFGLKNPPPQILIKNTPVPANPPAEFSATKFASFITQYSTGQVSVEIEWELQKENSKRWNPEVQYTSNYAKSANVDFTVDNNGLYTEPRPIGTRYLTRPL

SEQ ID NO: 5232 - DNA, 2211 bp, synthetic construct
  misc_feature 1..2211: note = Description of Artificial Sequence: Synthetic polynucleotide
  source 1..2211: mol_type = other DNA
atggctgccgatggttatcttccagattggctcgaggacaacctctctgagggcattcgcgagtggtgggacttgaaacctggagcccctaaacccaaggcaaatcaacaacatcaggacaacgctcgaggtcttgtgcttccgggttacaaataccttggacccggcaacggactcgacaagggggagccggtcaacgcagcagacgcggcggccctcgagcacgacaaggcctacgaccagcagctcaaggccggagacaacccgtacctcaagtacaaccacgccgacgccgagttccaggagcggctcaaagaagatacgtcttttgggggcaacctcgggcgagcagtcttccaggccaaaaagaggcttcttgaacctcttggtctggttgaggaagcggctaagacggctcctggaaagaagagaccggtagagccatcaccccagcgttctccagactcctctacgggcatcggcaagaaaggccaacagcccgctaaaaagagactcaattttggtcagactggcgactcagagtcagtccccgacccacaacctctcggagaacctccagcaacccccgctgctgtgggacctactacaatggcttcaggcggtggcgcaccaatggcagacaataacgagggtgccgatggagtgggtaattcctcaggaaattggcattgcgattcccaatggctgggcgacagagtcatcaccaccagcaccagaacctgggccctgcccacttacaacaaccatctctacaagcaaatctccagccaatcaggagcttcaaacgacaaccactactttggctacagcaccccttgggggtattttgactttaacagattccactgccacttttcaccacgtgactggcaaagactcatcaacaacaactggggattccgacccaagagactcaacttcaagctcttcaacatccaagtcaaggaggtcacgacgaatgatggcgtcacgaccatcgctaataaccttaccagcacggttcaagtcttctcggactcggagtaccagttgccgtacgtcctcggctctgcgcaccagggctgcctccctccgttcccggcggacgtgttcatgattccgcagtacggctacctaacgctcaacaatggcagccaagccgtgggacgttcatccttttactgcctggaatatttcccttctcagatgctgagaacgggcaacaactttaccttcagctacacttttgaggacgttcctttccacagcagctacgctcacagccagagtctggaccgtctcatgaatcccctcatcgaccagtacctgtattacttgagcagaacaaacactccaagtggaaccaccacgcagtcaaggcttcagttttctcaggccggagcgagtgacattcgggaccagtctaggaactggcttcctggaccctgttaccggcagcagcgcgtttctaaaacaaaaacagacaacaacaacagcaactttacctggactggtgcttcaaaatataaccttaatgggcgtgaatctataatcaaccctggcactgctatggcctcacacaaagacgacgaagacaagttctttcccatgagcggtgtcatgatttttggaaaggagagcgccggagcttcaaacactgcattggacaatgtcatgatcacagacgaagaggaaatcaaagccactaaccccgtggccaccgaaagatttgggactgtggcagtcaatctccagagcagcagcacagaccctgcgaccggagatgtgcatgttatgggagccttacctggaatggtgtggcaagacagagacgtgtacctgcagggtcctatttgggccaaaattcctcacacggatggacactttcacccgtctcctctcatgggcggctttggacttaagcacccgcctcctcagatcctcatcaaaaacacgcctgttcctgcgaatcctccggcagagttttcggctacaaagtttgcttcattcatcacccagtattccacaggacaagtgagtgtggaaattgaatgggagctgcagaaagaaaacagcaagcgctggaatcccgaagtgcagtacacatccaattatgcaaaatctgccaacgttgattttactgtggacaacaatggactttatactgagcctcgccccattggcacccgttacctcacccgtcccctgtaa

SEQ ID NO: 5233 - protein, 736 aa, synthetic construct
  REGION 1..736: note = Description of Artificial Sequence: Synthetic polypeptide
MAADGYLPDWLEDNLSEGIREWWDLKPGAPKPKANQQHQDNARGLVLPGYKYLGPGNGLDKGEPVNAADAAALEHDKAYDQQLKAGDNPYLKYNHADAEFQERLKEDTSFGGNLGRAVFQAKKRLLEPLGLVEEAAKTAPGKKRPVEPSPQRSPDSSTGIGKKGQQPAKKRLNFGQTGDSESVPDPQPLGEPPATPAAVGPTTMASGGGAPMADNNEGADGVGNSSGNWHCDSQWLGDRVITTSTRTWALPTYNNHLYKQISSQSGASNDNHYFGYSTPWGYFDFNRFHCHFSPRDWQRLINNNWGFRPKRLNFKLFNIQVKEVTTNDGVTTIANNLTSTVQVFSDSEYQLPYVLGSAHQGCLPPFPADVFMIPQYGYLTLNNGSQAVGRSSFYCLEYFPSQMLRTGNNFTFSYTFEDVPFHSSYAHSQSLDRLMNPLIDQYLYYLSRTNTPSGTTTQSRLQFSQAGASDIRDQSRNWLPGPCYRQQRVSKTKTDNNNSNFTWTGASKYNLNGRESIINPGTAMASHKDDEDKFFPMSGVMIFGKESAGASNTALDNVMITDEEEIKATNPVATERFGTVAVNLQSSSTDPATGDVHVMGALPGMVWQDRDVYLQGPIWAKIPHTDGHFHPSPLMGGFGLKHPPPQILIKNTPVPANPPAEFSATKFASFITQYSTGQVSVEIEWELQKENSKRWNPEVQYTSNYAKSANVDFTVDNNGLYTEPRPIGTRYLTRPL

SEQ ID NO: 5234 - DNA, 2214 bp, synthetic construct
  misc_feature 1..2214: note = Description of Artificial Sequence: Synthetic polynucleotide
  source 1..2214: mol_type = other DNA
atggctgccgatggttatcttccagattggctcgaggacaaccttagtgaaggaattcgcgagtggtgggctttgaaacctggagcccctcaacccaaggcaaatcaacaacatcaagacaacgctcgaggtcttgtgcttccgggttacaaataccttggacccggcaacggactcgacaagggggagccggtcaacgcagcagacgcggcggccctcgagcacgacaaggcctacgaccagcagctgcaggcgggtgacaatccgtacctgcggtataaccacgccgacgccgagtttcaggagcgtctgcaagaagatacgtcttttgggggcaaccttggcagagcagtcttccaggccaaaaagaggatccttgagcctcttggtctggttgaggaagcagctaaaacggctcctggaaagaagaggcctgtagatcagtctcctcaggaaccggactcatcatctggtgttggcaaatcgggcaaacagcctgccagaaaaagactaaatttcggtcagactggcgactcagagtcagtcccagaccctcaacctctcggagaaccaccagcagcccccacaagtttgggatctaatacaatggcttcaggcggtggcgcaccaatggcagacaataacgagggtgccgatggggtgggtagttcctcgggaaattggcattgcgattcccaatgactgggggacagagtcatcaccaccagcacccgaacctgggccctgcccacctacaacaatcacctctacaagcaaatctccaacgggacatcgggaggagccaccaacgacaacacctacttcggctacagcaccccctgggggtattttgactttaacagattccactgccacttttcaccacgtgactggcagcgactcatcaacaacaactggggattccggcccaagagactcagcttcaagctcttcaacatccaggtcaaggaggtcacgcagaatgaaggcaccaagaccatcgccaataacctcaccagcaccatccaggtgtttacggactcggagtaccagctgccgtacgttctcggctctgcgcaccagggctgcctccctccgttcccggcggacgtgttcatgattccgcaatacggctacctgacgctcaacaatggcagccaagccgtgggacgttcatccttttactgcctggaatatttcccttctcagatgctgagaacgggcaacaactttaccttcagctacacctttgaggaagtgcctttccacagcagctacgcgcacagccagagcttggaccggctgatgaatcctctgattgaccagtacctgtactacttgtctcggactcaaacaacaggaggcacggcaaatacgcagactctgggcttcagccaaggtgggcctaatacaatggccaatcaggcaaagaactggctgccaggaccctgttaccgccaacaacgcgtctcaacgacaaccgggcaaaacaacaatagcaactttgcctggactgctgggaccaaataccatctgaatggaagaaattcattggctaatcctggcatcgctatggcaacacacaaagacgacgaggagcgtttttttcccagtaacgggatcctgatttttggcaaacaaaatgctgccagagacaatgcggattacagcgatgtcatgctcaccagcgaggaagaaatcaaaaccactaaccctgtggctacagaggaatacggtatcgtggcagataacttgcagcagcaaaacacggctcctcaaattggaactgtcaacagccagggggccttacccggtatggtctggcagaaccgggacgtgtacctgcagggtcccatctgggccaagattcctcacacggacggcaacttccacccgtctccgctgatgggcggctttggcctgaaacatcctccgcctcagatcctgatcaagaacacgcctgtacctgcggatcctccgaccaccttcaaccagtcaaagctgaactctttcatcacgcaatacagcaccggacaggtcagcgtggagatcgagtgggagctgcagaaggaaaacagcaagcgctggaacccggagatccagtacacttccaactattacaagtctaataatgttgaatttgctgttaatactgaaggtgtatatagtgaaccccgccccattggcaccagatacctgactcgtaatctgtaa

SEQ ID NO: 5235 - protein, 736 aa, synthetic construct
  REGION 1..736: note = Description of Artificial Sequence: Synthetic polypeptide
MAADGYLPDWLEDNLSEGIREWWALKPGAPQPKANQQHQDNARGLVLPGYKYLGPGNGLDKGEPVNAADAAALEHDKAYDQQLQAGDNPYLRYNHADAEFQERLQEDTSFGGNLGRAVFQAKKRILEPLGLVEEAAKTAPGKKRPVDQSPQEPDSSSGVGKSGKQPARKRLNFGQTGDSESVPDPQPLGEPPAAPTSLGSNTMASGGGAPMADNNEGADGVGSSSGNWHCDSQLGDRVITTSTRTWALPTYNNHLYKQISNGTSGGATNDNTYFGYSTPWGYFDFNRFHCHFSPRDWQRLINNNWGFRPKRLSFKLFNIQVKEVTQNEGTKTIANNLTSTIQVFTDSEYQLPYVLGSAHQGCLPPFPADVFMIPQYGYLTLNNGSQAVGRSSFYCLEYFPSQMLRTGNNFTFSYTFEEVPFHSSYAHSQSLDRLMNPLIDQYLYYLSRTQTTGGTANTQTLGFSQGGPNTMANQAKNWLPGPCYRQQRVSTTTGQNNNSNFAWTAGTKYHLNGRNSLANPGIAMATHKDDEERFFPSNGILIFGKQNAARDNADYSDVMLTSEEEIKTTNPVATEEYGIVADNLQQQNTAPQIGTVNSQGALPGMVWQNRDVYLQGPIWAKIPHTDGNFHPSPLMGGFGLKHPPPQILIKNTPVPADPPTTFNQSKLNSFITQYSTGQVSVEIEWELQKENSKRWNPEIQYTSNYYKSNNVEFAVNTEGVYSEPRPIGTRYLTRNL

SEQ ID NO: 5236 - DNA, 2214 bp, synthetic construct
  misc_feature 1..2214: note = Description of Artificial Sequence: Synthetic polynucleotide
  source 1..2214: mol_type = other DNA
atggctgccgatggttatcttccagattggctcgaggacaaccttagtgaaggaattcgcgagtggtgggctttgaaacctggagcccctcaacccaaggcaaatcaacaacatcaagacaacgctcgaggtcttgtgcttccgggttacaaataccttggacccggcaacggactcgacaagggggagccggtcaacgcagcagacgcggcggccctcgagcacgacaaggcctacgaccagcagctgcaggcgggtgacaatccgtacctgcggtataaccacgccgacgccgagtttcaggagcgtctgcaagaagatacgtcttttgggggcaaccttggcagagcagtcttccaggccaaaaagaggatccttgagcctcttggtctggttgaggaagcagctaaaacggctcctggaaagaagaggcctgtagatcagtctcctcaggaaccggactcatcatctggtgttggcaaatcgggcaaacagcctgccagaaaaagactaaatttcggtcagactggcgactcagagtcagtcccagaccctcaacctctcggagaaccaccagcagcccccacaagtttgggatctaatacaatggcttcaggcggtggcgcaccaatggcagacaataacgagggtgccgatggggtgggtagttcctcgggaaattggcattgcgattcccaatggctgggggacagagtcatcaccaccagcacccgaacctgggccctgcccacctacaacaatcacctctacaagcaaatctccaacgggacatcgggaggagccaccaacgacaacacctacttcggctacagcaccccctgggggtattttgactttaacagattccactgccacttttcaccacgtgactggcagcgactcatcaacaacaactggggattccggcccaagagactcagcttcaagctcttcaacatccaggtcaaggaggtcacgcagaatgaaggcaccaagaccatcgccaataacctcaccagcaccatccaggtgtttacggactcggagtaccagctgccgtacgttctcggctctgcgcaccagggctgcctccctccgttcccggcggacgtgttcatgattccgcaatacggctacctgacgctcaacaatggcagccaagccgtgggacgttcatccttttactgcctggaatatttcccttctcagatgctgagaacgggcaacaactttaccttcagctacacctttgaggaagtgccttttcacagcagctacgcgcacagccagagcttggaccggctgatgaatcctctgattgaccagtacctgtactacttgtctcggactcaaacaacaggaggcacggcaaatacgcagactctgggcttcagccaaggtgggcctaatacaatggccaatcaggcaaagaactggctgccaggaccctgttaccgccaacaacgcgtctcaacgacaaccgggcaaaacaacaatagcaactttgcctggactgctgggaccaaataccatctgaatggaagaaattcattggctaatcctggcatcgctatggcaacacacaaagacgacgaggagcgtttttttcccagtaacgggatcctgatttttggcaaacaaaatgctgccagagacaatgcggattacagcgatgtcatgctcaccagcgaggaagaaatcaaaaccactaaccctgtggctacagaggaatacggtatcgtggcagataacttgcagcagcaaaacacggctcctcaaattggaactgtcaacagccagggggccttacccggtatggtctggcagaaccgggacgtgtacctgcagggtcccatctgggccaagattcctcacacggacggcaacttccacccgtctccgctgatgggcggctttggcctgaaacatcctccgcctcagatcctgatcaagaacacgcctgtacctgcggatcctccgaccaccttcaaccagtcaaagctgaactctttcatcacgcaatacagcaccggacaggtcagcgtggagatcgagtgggagctgcagaaggaaaacagcaagcgctggaacccggagatccagtacacttccaactattacaagtctaataatgttgaatttgctgttaatactgaaggtgtatatagtgaaccccgccccattggcaccagatacctgactcgtaatctgtaa

SEQ ID NO: 5237 - protein, 737 aa, synthetic construct; identical to SEQ ID NO: 5225
  REGION 1..737: note = Description of Artificial Sequence: Synthetic polypeptide

SEQ ID NO: 5238 - DNA, 2211 bp, synthetic construct
  misc_feature 1..2211: note = Description of Artificial Sequence: Synthetic polynucleotide
  source 1..2211: mol_type = other DNA
atggctgccgatggttatcttccagattggctcgaggacaacctctctgagggcattcgcgagtggtgggacttgaaacctggagcccctaaacccaaggcaaatcaacaacatcaggacaacgctcgaggtcttgtgcttccgggttacaaataccttggacccggcaacggactcgacaagggggagccggtcaacgcagcagacgcggcggccctcgagcacgacaaggcctacgaccagcagctcaaggccggagacaacccgtacctcaagtacaaccacgccgacgccgagttccaggagcggctcaaagaagatacgtcttttgggggcaacctcgggcgagcagtcttccaggccaaaaagaggcttcttgaacctcttggtctggttgaggaagcggctaagacggctcctggaaagaagagaccggtagagccatcaccccagcgttctccagactcctctacgggcatcggcaagaaaggccaacagcccgctaaaaagagactcaattttggtcagactggcgactcagagtcagtccccgacccacaacctctcggagaacctccagcaacccccgctgctgtgggacctactacaatggcttcaggcggtggcgcaccaatggcagacaataacgagggtgccgatggagtgggtaattcctcaggaaattggcattgcgattcccaatggctgggcgacagagtcatcaccaccagcaccagaacctgggccctgcccacttacaacaaccatctctacaagcaaatctccagccaatcaggagcttcaaacgacaaccactactttggctacagcaccccttgggggtattttgactttaacagattccactgccacttttcaccacgtgactggcaaagactcatcaacaacaactggggattccgacccaagagactcaacttcaagctcttcaacatccaagtcaaggaggtcacgacgaatgatggcgtcacgaccatcgctaataaccttaccagcacggttcaagtcttctcggactcggagtaccagttgccgtacgtcctcggctctgcgcaccagggctgcctccctccgttcccggcggacgtgttcatgattccgcagtacggctacctaacgctcaacaatggcagccaagccgtgggacgttcatccttttactgcctggaatatttcccttctcagatgctgagaacgggcaacaactttaccttcagctacacttttgaggacgttcctttccacagcagctacgctcacagccagagtctggaccgtctcatgaatcctctcatcgaccagtacctgtattacttgagcagaacaaacactccaagtggaaccaccacgcagtcaaggcttcagttttctcaggccggagcgagtgacattcgggaccagtctaggaactggcttcctggaccctgttaccgccagcagcgcgtttctaaaacaaaaacagacaacaacaacagcaattttacctggactggtgcttcaaaatataaccttaatgggcgtgaatctataatcaaccctggcactgctatggcctcacacaaagacgacgaagacaagttctttcccatgagcggtgtcatgatttttggaaaagagagcgccggagcttcaaacactgcattggacaatgtcatgattacagacgaagaggaaattaaagccactaaccctgtggccaccgaaagatttgggaccgtggcagtcaatttccagagcagcagcacagaccctgcgaccggagatgtgcatgctatgggagcattacctggcatggtgtggcaagatagagacgtgtacctgcagggtcccatttgggccaaaattcctcacacagatggacactttcacccgtctcctcttatgggcggctttggactcaagaacccgcctcctcagatcctcatcaaaaacacgcctgttcctgcgaatcctccggcggagttttcagctacaaagtttgcttcattcatcacccaatactccacaggacaagtgagtgtggaaattgaatgggagctgcagaaagaaaacagcaagcgctggaatcccgaagtgcagtacacatccaattatgcaaaatctgccaacgttgattttactgtggacaacaatggactttatactgagcctcgccccattggcacccgttaccttacccgtcccctgtaa

SEQ ID NO: 5239 - protein, 736 aa, synthetic construct
  REGION 1..736: note = Description of Artificial Sequence: Synthetic polypeptide
MAADGYLPDWLEDNLSEGIREWWDLKPGAPKPKANQQHQDNARGLVLPGYKYLGPGNGLDKGEPVNAADAAALEHDKAYDQQLKAGDNPYLKYNHADAEFQERLKEDTSFGGNLGRAVFQAKKRLLEPLGLVEEAAKTAPGKKRPVEPSPQRSPDSSTGIGKKGQQPAKKRLNFGQTGDSESVPDPQPLGEPPATPAAVGPTTMASGGGAPMADNNEGADGVGNSSGNWHCDSQWLGDRVITTSTRTWALPTYNNHLYKQISSQSGASNDNHYFGYSTPWGYFDFNRFHCHFSPRDWQRLINNNWGFRPKRLNFKLFNIQVKEVTTNDGVTTIANNLTSTVQVFSDSEYQLPYVLGSAHQGCLPPFPADVFMIPQYGYLTLNNGSQAVGRSSFYCLEYFPSQMLRTGNNFTFSYTFEDVPFHSSYAHSQSLDRLMNPLIDQYLYYLSRTNTPSGTTTQSRLQFSQAGASDIRDQSRNWLPGPCYRQQRVSKTKTDNNNSNFTWTGASKYNLNGRESIINPGTAMASHKDDEDKFFPMSGVMIFGKESAGASNTALDNVMITDEEEIKATNPVATERFGTVAVNFQSSSTDPATGDVHAMGALPGMVWQDRDVYLQGPIWAKIPHTDGHFHPSPLMGGFGLKNPPPQILIKNTPVPANPPAEFSATKFASFITQYSTGQVSVEIEWELQKENSKRWNPEVQYTSNYAKSANVDFTVDNNGLYTEPRPIGTRYLTRPL

SEQ ID NO: 5240 - DNA, 2211 bp, synthetic construct
  misc_feature 1..2211: note = Description of Artificial Sequence: Synthetic polynucleotide
  source 1..2211: mol_type = other DNA
atggctgccgatggttatcttccagattggctcgaggacaaccttagtgaaggaattcgcgagtggtgggcgctgaaacctggagccccgaagcccaaagccaaccagcaaaagcaggacgacggccggggtctggtgcttccgggttacaaatacctcggacccggtaacggactcgacaaaggagagccggtcaacgaggcggacgcggcagccctcgagcacgacaaggcctacgaccagcagctcaaagcgggtgacaatccgtacctgcggtataaccacgccgacgccgagtttcaggagcgtctgcaagaagatacgtcttttgggggcaacctcgggcgagcagtcttccaggccaagaagcgggttctcgaacctctcggtctggttgaggaaggcgctaagacggctcccggaaagaaacgtccggtagagcagtcgccacaagagccagactcctctacgggcatcggcaagaaaggccaacagcccgccagaaaaagactcaatttcggtcagactggcgactcagagtcagttccagaccctcaacctctcggagaacctccagcagcgccctctggtgtgggacctactacaatggcttcaggcggtggcgcaccaatggcagacaataacgaaggcgccgacggagtgggtaatgcctcaggaaattggcattgcgattccacatggctgggcgacagagtcatcaccaccagcacccgaacatgggccttgcccacctataacaaccacctctacaagcaaatctccagtgcttcaacgggggccagcaacgacaacacctacttcggctacagcaccccctgggggtattttgatttcaacagattccactgccatttctcaccacgtgactggcagcgactcatcaacaacaattggggattccggcccaagagactcaacttcaaactcttcaacatccaagtcaaggaggtcacgacgaatgatggcgtcacgaccatcgctaataaccttaccagcacggttcaagtcttctcggactcggagtaccagttgccgtacgtcctcggctctgcgcaccagggctgcctccctccgttcccggcggacgtgttcatgattccgcagtacggctacctaacgctcaacaatggcagccaggcagtgggacggtcatccttttactgcctggaatatttcccatcgcagatgctgagaacgggcaataactttaccttcagctacaccttcgaggacgtgcctttccacagcagctacgcgcacagccagagcctggaccggctgatgaatcctctcatcgaccagtacctgtattacctgaacagaactcagaatcagtccggaagtgcccaaaacaaggacttgctgtttagccgggggtctccagctggcatgtctgttcagcccaaaaactggctacctggaccctgttatcggcagcagcgcgtttctaaaacaaaaacagacaacaacaacagcaattttacctggactggtgcttcaaaatataacctcaatgggcgtgaatccatcatcaaccctggcactgctatggcctcacacaaagacgacgaagacaagttctttcccatgagcggtgtcatgatttttggaaaagagagcgccggagcttcaaacactgcattggacaatgtcatgattacagacgaagaggaaattaaagccactaaccctgtggccaccgaaagatttgggaccgtggcagtcaatttccagagcagcagcacagaccctgcgaccggagatgtgcatgttatgggagccttacctggaatggtgtggcaagacagagacgtatacctgcagggtcctatttgggccaaaattcctcacacagatggacactttcacccgtctcctcttatgggcggctttggactcaagaacccgcctcctcagatcctcatcaaaaacacgcctgttcctgcgaatcctccggcagagttttcggctacaaagtttgcttcattcatcacccagtattccacaggacaagtgagcgtggagattgaatgggagctgcagaaagaaaacagcaaacgctggaatcccgaagtgcagtatacatctaactatgcaaaatctgccaacgttgatttcactgtggacaacaatggactttatactgagcctcgccccattggcacccgttacctcacccgtcccctgtaa

SEQ ID NO: 5241 - protein, 736 aa, synthetic construct
  REGION 1..736: note = Description of Artificial Sequence: Synthetic polypeptide
MAADGYLPDWLEDNLSEGIREWWALKPGAPKPKANQQKQDDGRGLVLPGYKYLGPGNGLDKGEPVNEADAAALEHDKAYDQQLKAGDNPYLRYNHADAEFQERLQEDTSFGGNLGRAVFQAKKRVLEPLGLVEEGAKTAPGKKRPVEQSPQEPDSSTGIGKKGQQPARKRLNFGQTGDSESVPDPQPLGEPPAAPSGVGPTTMASGGGAPMADNNEGADGVGNASGNWHCDSTWLGDRVITTSTRTWALPTYNNHLYKQISSASTGASNDNTYFGYSTPWGYFDFNRFHCHFSPRDWQRLINNNWGFRPKRLNFKLFNIQVKEVTTNDGVTTIANNLTSTVQVFSDSEYQLPYVLGSAHQGCLPPFPADVFMIPQYGYLTLNNGSQAVGRSSFYCLEYFPSQMLRTGNNFTFSYTFEDVPFHSSYAHSQSLDRLMNPLIDQYLYYLNRTQNQSGSAQNKDLLFSRGSPAGMSVQPKNWLPGPCYRQQRVSKTKTDNNNSNFTWTGASKYNLNGRESIINPGTAMASHKDDEDKFFPMSGVMIFGKESAGASNTALDNVMITDEEEIKATNPVATERFGTVAVNFQSSSTDPATGDVHVMGALPGMVWQDRDVYLQGPIWAKIPHTDGHFHPSPLMGGFGLKNPPPQILIKNTPVPANPPAEFSATKFASFITQYSTGQVSVEIEWELQKENSKRWNPEVQYTSNYAKSANVDFTVDNNGLYTEPRPIGTRYLTRPL

SEQ ID NO: 5242 - DNA, 2205 bp, synthetic construct
  misc_feature 1..2205: note = Description of Artificial Sequence: Synthetic polynucleotide
  source 1..2205: mol_type = other DNA
atggctgctgacggttatcttccagattggctcgaggacaacctttctgaaggcattcgtgagtggtgggctctgaaacctggagtccctcaacccaaagcgaaccaacaacaccaggacaaccgtcggggtcttgtgcttccgggttacaaatacctcggacccggtaacggactcgacaaaggagagccggtcaacgaggcggacgcggcagccctcgaacacgacaaggcctacgaccagcagctcaaggccggagacaacccgtacctcaagtacaaccacgccgacgccgagttccaggagcggctcaaagaagatacgtcttttgggggcaacctcgggcgagcagtcttccaggccaaaaagaggcttcttgaacctcttggtctggttgaggaagcggctaagacggctcctggaaagaagaggcctgtagagcagtctcctcaggaaccggactcctccgcgggtattggcaaatcgggtgcacagcccgctaaaaagagactcaatttcggtcagactggcgacacagagtcagtcccagaccctcaaccaatcggagaacctcccgcagccccctcaggtgtgggatctcttacaatggcttcaggtggtggcgcaccagtggcagacaataacgaaggtgccgatggagtgggtagttcctcgggaaattggcattgcgattcccaatggctgggggacagagtcatcaccaccagcacccgaacctgggccctgcccacctacaacaaccacctctacaaacaaatttccagccaatcaggagcctcgaacgacaatcactactttggctacagcaccccttgggggtattttgacttcaacagattccactgccacttttcaccacgtgactggcagcgactcatcaacaacaactggggattccggcccaagagactcagcttcaagctcttcaacatccaggtcaaagaggttacggacaacaatggagtcaagaccatcgccaataaccttaccagcacggtccaggtcttcacggactcagactatcagctcccgtacgtgctcgggtcggctcacgagggctgcctcccgccgttcccagcggacgttttcatgattcctcagtacgggtatctgacgcttaatgatggaagccaggccgtgggtcgttcgtccttttactgcctggaatatttcccgtcgcaaatgctaagaacgggtaacaacttccagttcagctacgagtttgagaacgtacctttccatagcagctacgctcacagccaaagcctggaccgactaatgaatccactcatcgaccaatacttgtactatctctcaaagactattaacggttctggacagaatcaacaaacgctaaaattcagtgtggccggacccagcaacatggctgtccagggaagaaactacatacctggacccagctaccgacaacaacgtgtctcaaccactgtgactcaaaacaacaacagcgaatttgcttggcctggagcttcttcttgggctctcaatggacgtaatagcttgatgaatcctggacctgctatggccagccacaaagaaggagaggaccgtttctttcctttgtctggatctttaatttttggcaaacaaggaactggaagagacaacgtggatgcggacaaagtcatgataaccaacgaagaagaaattaaaactactaacccggtagcaacggagtcctatggacaagtggccacaaaccaccagagtgcccaagcacaggcgcagaccggctgggttcaaaaccaaggaatacttccgggtatggtttggcaggacagagatgtgtacctgcaaggacccatctgggccaagattcctcacacggacggcaacttccacccgtctccgctgatgggcggctttggcctgaaacatcctccgcctcagatcctgatcaagaacacgcctgtacctgcggatcctccgaccaccttcaaccagtcaaagctgaactctttcatcacgcaatacagcaccggacaggtcagcgtggaaattgaatgggagctgcagaaggaaaacagcaagcgctggaatcccgaagtgcagtatacatctaactatgcaaaatctgccaacgttgatttcactgtggacaacaatggactttatactgagcctcgccccattggcacccgttacctcacccgtcccctgtaa

SEQ ID NO: 5243 - protein, 734 aa, synthetic construct
  REGION 1..734: note = Description of Artificial Sequence: Synthetic polypeptide
MAADGYLPDWLEDNLSEGIREWWALKPGVPQPKANQQHQDNRRGLVLPGYKYLGPGNGLDKGEPVNEADAAALEHDKAYDQQLKAGDNPYLKYNHADAEFQERLKEDTSFGGNLGRAVFQAKKRLLEPLGLVEEAAKTAPGKKRPVEQSPQEPDSSAGIGKSGAQPAKKRLNFGQTGDTESVPDPQPIGEPPAAPSGVGSLTMASGGGAPVADNNEGADGVGSSSGNWHCDSQWLGDRVITTSTRTWALPTYNNHLYKQISSQSGASNDNHYFGYSTPWGYFDFNRFHCHFSPRDWQRLINNNWGFRPKRLSFKLFNIQVKEVTDNNGVKTIANNLTSTVQVFTDSDYQLPYVLGSAHEGCLPPFPADVFMIPQYGYLTLNDGSQAVGRSSFYCLEYFPSQMLRTGNNFQFSYEFENVPFHSSYAHSQSLDRLMNPLIDQYLYYLSKTINGSGQNQQTLKFSVAGPSNMAVQGRNYIPGPSYRQQRVSTTVTQNNNSEFAWPGASSWALNGRNSLMNPGPAMASHKEGEDRFFPLSGSLIFGKQGTGRDNVDADKVMITNEEEIKTTNPVATESYGQVATNHQSAQAQAQTGWVQNQGILPGMVWQDRDVYLQGPIWAKIPHTDGNFHPSPLMGGFGLKHPPPQILIKNTPVPADPPTTFNQSKLNSFITQYSTGQVSVEIEWELQKENSKRWNPEVQYTSNYAKSANVDFTVDNNGLYTEPRPIGTRYLTRPL

SEQ ID NO: 5244 - DNA, 2211 bp, synthetic construct
  misc_feature 1..2211: note = Description of Artificial Sequence: Synthetic polynucleotide
  source 1..2211: mol_type = other DNA
atggctgccgatggttatcttccagattggctcgaggacaacctctctgagggcattcgcgagtggtgggcgctgaaacctggagccccgaagcccaaagccaaccagcaaaagcaggacgacggccggggtctggtgcttcctggctacaagtacctcggacccttcaacggactcgacaagggggagcccgtcaacgcggcggacgcagcggccctcgagcacgacaaggcctacgaccagcagctgcaggcgggtgacaatccgtacctgcggtataaccacgccgacgccgagtttcaggagcgtctgcaagaagatacgtcttttgggggcaacctcgggcgagcagtcttccaggccaagaagtgggttctcgaacctctcggtctggttgaggaaggcgctaagacggctcctggaaagaaacgtccggtagagcagtcgccacaagagccagactcctcctcgggcatcggcaagacaggccagcagcccgctaaaaagagactcaattttggtcagactggcgactcagagtcagtccccgacccacaacctctcggagaacctccagcaacccccgctgctgtgggacctactacaatggcttcaggcggtggcgcaccaatggcagacaataacgaaggcgccgacggagtgggtaatgcctcaggaaattggcattgcgattccacatggctgggcgacagagtcatcaccaccagcacccgcacctgggccttgcccacctacaataaccacctctacaagcaaatctccagtgcttcaacgggggccagcaacgacaaccactacttcggctacagcaccccctgggggtattttgatttcaacagattccactgccatttctcaccacgtgactggcagcgactcatcaacaacaattggggattccggcccaagagactcaacttcaagctcttcaacatccaagtcaaggaggtcacgacgaatgatggcgtcacaaccatcgctaataaccttaccagcacggttcaagtcttctcggactcggagtaccagcttccgtacgtcctcggctctgcgcaccagggctgcctccctccgttcccggcggacgtgttcatgattccgcaatacggctacctgacgctcaacaatggcagccaagccgtgggacgttcatccttttactgcctggaatatttcccttctcagatgctgagaacgggcaacaactttaccttcagctacacctttgaggaagtgcctttccacagcagctacgcgcacagccagagcctggaccggctgatgaatcctctcatcgaccaatacctgtattacctgaacagaactcaaaatcagtccggaagtgcccaaaacaaggacttgctgtttagccgtgggtctccagctggcatgtctgttcagcccaaaaactggctacctggaccctgttatcggcagcagcgcgtttctaaaacaaaaacagacaacaacaacagcaattttacctggactggtgcttcaaaatataacctcaatgggcgtgaatccatcatcaaccctggcactgctatggcctcacacaaagacgacgaagacaagttctttcccatgagcggtgtcatgatttttggaaaggagagcgccggagcttcaaacactgcattggacaatgtcatgatcaccgacgaagaggaaatcaaagccactaaccccgtggccaccgaaagatttgggactgtggcagtcaatctccagagcagcagcacagaccctgcgaccggagatgtgcatgttatgggagccttacctggcatggtgtggcaagatagagacgtgtacctgcagggtcccatttgggccaaaattcctcacacagatggacactttcacccgtctcctcttatgggcggctttggactcaagaacccgcctcctcagatcctcatcaaaaacacgcctgttcctgcgaatcctccggcggagttttcagctacaaagtttgcttcattcatcacccaatactccacaggacaagtgagtgtggaaattgaatgggagctgcagaaagaaaacagcaagcgctggaatcccgaagtgcagtacacatccaattatgcaaaatctgccaacgttgattttactgtggacaacaatggactttatactgagcctcgccccattggcacccgttacctcacccgtcccctgtaa

SEQ ID NO: 5245 - protein, 736 aa, synthetic construct
  REGION 1..736: note = Description of Artificial Sequence: Synthetic polypeptide
MAADGYLPDWLEDNLSEGIREWWALKPGAPKPKANQQKQDDGRGLVLPGYKYLGPFNGLDKGEPVNAADAAALEHDKAYDQQLQAGDNPYLRYNHADAEFQERLQEDTSFGGNLGRAVFQAKKWVLEPLGLVEEGAKTAPGKKRPVEQSPQEPDSSSGIGKTGQQPAKKRLNFGQTGDSESVPDPQPLGEPPATPAAVGPTTMASGGGAPMADNNEGADGVGNASGNWHCDSTWLGDRVITTSTRTWALPTYNNHLYKQISSASTGASNDNHYFGYSTPWGYFDFNRFHCHFSPRDWQRLINNNWGFRPKRLNFKLFNIQVKEVTTNDGVTTIANNLTSTVQVFSDSEYQLPYVLGSAHQGCLPPFPADVFMIPQYGYLTLNNGSQAVGRSSFYCLEYFPSQMLRTGNNFTFSYTFEEVPFHSSYAHSQSLDRLMNPLIDQYLYYLNRTQNQSGSAQNKDLLFSRGSPAGMSVQPKNWLPGPCYRQQRVSKTKTDNNNSNFTWTGASKYNLNGRESIINPGTAMASHKDDEDKFFPMSGVMIFGKESAGASNTALDNVMITDEEEIKATNPVATERFGTVAVNLQSSSTDPATGDVHVMGALPGMVWQDRDVYLQGPIWAKIPHTDGHFHPSPLMGGFGLKNPPPQILIKNTPVPANPPAEFSATKFASFITQYSTGQVSVEIEWELQKENSKRWNPEVQYTSNYAKSANVDFTVDNNGLYTEPRPIGTRYLTRPL

SEQ ID NO: 5246 - DNA, 2214 bp, synthetic construct
  misc_feature 1..2214: note = Description of Artificial Sequence: Synthetic polynucleotide
  source 1..2214: mol_type = other DNA
atggctgccgatggttatcttccagattggctcgaggacaaccttagtgaaggaattcgcgagtggtgggctttgaaacctggagcccctcaacccaaggcaaatcaacaacatcaagacaacgctcgaggtcttgtgcttccgggttacaaataccttggacccggcaacggactcgacaagggggagccggtcaacgcagcagacgcggcggccctcgagcacgacaaggcctacgaccagcagctgcaggcgggtgacaatccgtacctgcggtataaccacgccgacgccgagtttcaggagcgtctgcaagaagatacgtcttttgggggcaaccttggcagagcagtcttccaggccaaaaagaggatccttgagcctcttggtctggttgaggaagcagctaaaacggctcctggaaagaagaggcctgtagatcagtctcctcaggaaccggactcatcatctggtgttggcaaatcgggcaaacagcctgccagaaaaagactaaatttcggtcagactggcgactcagagtcagtcccagaccctcaacctctcggagaaccaccagcagcccccacaagtttgggatctaatacaatggcttcaggcggtggcgcaccaatggcagacaataacgagggtgccgatggggtgggtagttcctcgggaaattggcattgcgattcccaatggctgggggacagagtcatcaccaccagcacccgaacctgggccctgcccacctacaacaatcacctctacaagcaaatctccaacgggacatcgggaggagccaccaacgacaacacctacttcggctacagcaccccctgggggtattttgactttaacagattccactgccacttttcaccacgtgactggcagcgactcatcaacaacaactggggattccggcccaagagactcagcttcaagctcttcaacatccaggtcaaggaggtcacgcagaatgaaggcaccaagaccatcgccaataacctcaccagcaccatccaggtgtttacggactcggagtaccagctgccgtacgttctcggctcggcgcaccagggctgcctccctccgttcccggcggacgtcttcatggtgccacagtatggatacctgacgctcaacaatggcagccaagccgtgggacgttcatccttttactgcctggaatatttcccttctcagatgctgagaacgggcaacaactttaccttcagctacacctttgaggaagtgcctttccacagcagctacgcgcacagccagagcttggaccggctgatgaatcctctgattgaccagtacctgtactacttgtctcggactcaaacaacaggaggcacggcaaatacgcagactctgggcttcagccaaggtgggcctaatacaatggccaatcaggcaaagaactggctgccaggaccctgttaccgccaacaacgcgtctcaacgacaaccgggcaaaacaacaatagcaactttgcctggactgctgggaccaaataccatctgaatggaagaaattcattggctaatcctggcatcgctatggcaacacacaaagacgacgaggagcgtttttttcccagtaacgggatcctgatttttggcaaacaaaatgctgccagagacaatgcggattacagcgatgtcatgctcaccagcgaggaagaaatcaaaaccactaaccctgtggctacagaggaatacggtatcgtggcagataacttgcagcagcaaaacacggctcctcaaattggaactgtcaacagccagggggacttacccggtatggtctggcagaaccgggacgtgtacctgcagggtcccatctgggccaagattcctcacacggacggcaacttccacccgtctccgctgatgggcggctttggcctgaaacatcctccgcctcagatcctgatcaagaacacgcctgtacctgcggatcctccgaccaccttcaaccagtcaaagctgaactctttcatcacgcaatacagcaccggacaggtcagcgtggagatcgagtgggagctgcagaaggaaaacagcaagcgctggaacccggagatccagtacacttccaactattacaagtctaataatgttgaatttgctgttaatactgaaggtgtatatagtgaaccccgccccattggcaccagatacctgactcgtaatctgtaa

SEQ ID NO: 5247 - protein, 737 aa, synthetic construct
  REGION 1..737: note = Description of Artificial Sequence: Synthetic polypeptide
MAADGYLPDWLEDNLSEGIREWWALKPGAPQPKANQQHQDNARGLVLPGYKYLGPGNGLDKGEPVNAADAAALEHDKAYDQQLQAGDNPYLRYNHADAEFQERLQEDTSFGGNLGRAVFQAKKRILEPLGLVEEAAKTAPGKKRPVDQSPQEPDSSSGVGKSGKQPARKRLNFGQTGDSESVPDPQPLGEPPAAPTSLGSNTMASGGGAPMADNNEGADGVGSSSGNWHCDSQWLGDRVITTSTRTWALPTYNNHLYKQISNGTSGGATNDNTYFGYSTPWGYFDFNRFHCHFSPRDWQRLINNNWGFRPKRLSFKLFNIQVKEVTQNEGTKTIANNLTSTIQVFTDSEYQLPYVLGSAHQGCLPPFPADVFMVPQYGYLTLNNGSQAVGRSSFYCLEYFPSQMLRTGNNFTFSYTFEEVPFHSSYAHSQSLDRLMNPLIDQYLYYLSRTQTTGGTANTQTLGFSQGGPNTMANQAKNWLPGPCYRQQRVSTTTGQNNNSNFAWTAGTKYHLNGRNSLANPGIAMATHKDDEERFFPSNGILIFGKQNAARDNADYSDVMLTSEEEIKTTNPVATEEYGIVADNLQQQNTAPQIGTVNSQGDLPGMVWQNRDVYLQGPIWAKIPHTDGNFHPSPLMGGFGLKHPPPQILIKNTPVPADPPTTFNQSKLNSFITQYSTGQVSVEIEWELQKENSKRWNPEIQYTSNYYKSNNVEFAVNTEGVYSEPRPIGTRYLTRNL

SEQ ID NO: 5248 - DNA, 2205 bp, synthetic construct
  misc_feature 1..2205: note = Description of Artificial Sequence: Synthetic polynucleotide
  source 1..2205: mol_type = other DNA
atggctgctgacggttatcttccagattggctcgaggacaacctttctgaaggcattcgtgagtggtgggctctgaaacctggagtccctcaacccaaagcgaaccaacaacaccaggacaactgtcggggtcttgtgcttccgggttacaaatacctcggacccggtaacggactcgacaaaggagagccggtcaacgaggcggacgcggcagccctcgaacacgacaaggcctacgaccagcagctcaaggccggagacaacccgtacctcaagtacaaccacgccgacgccgagttccaggagcggctcaaagaagatacgtcttttgggggcaacctcgggcgagcagtcttccagaccaaaaagaggcttcttgaacctcttggtctggttgaggaagcggctaagacggctcctggaaagaagaggcctgtagagcagtctcctcaggaaccggactcctccgcgggtattggcaaatcgggtgcacagcccgctaaaaagagactcaatttcggtcagactggcgacacagagtcagtcccagaccctcaaccaatcggagaacctcccgcagccccctcaggtgtgggatctcttacaatggcttcaggtggtggcgcaccagtggcagacaataacgaaggtgccgatggagtgggtagttcctcgggaaattggcattgcgattcccaatggctgggggacagagtcatcaccaccagcacccgaacctgggccctgcccacctacaacaaccacctctacaaacaaatttccagccaatcaggagcctcgaacgacaatcactactttggctacagcaccccttgggggtattttgacttcaacagattccactgccacttttcaccacgtgactggcagcgactcatcaacaacaactggggattccggcccaagagactcagcttcaagctcttcaacatccaggtcaaagaggttacggacaacaatggagtcaagaccatcgccaataaccttaccagcacggtccaggtcttcacggactcagactatcagctcccgtacgtgctcgggtcggctcacgagggctgcctcccgccgttcccagcggacgttttcatgattcctcagtacgggtatctgacgcttaatgatggaagccaggccgtgggtcgttcgtccttttactgcctggaatatttcccgtcgcaaatgctaagaacgggtaacaacttccagttcagctacgagtttgagaacgtacctttccatagcagctacgctcacagccaaagcctggaccgactaatgaatccactcatcgaccaatacttgtactatctctcaaagactattaacggttctggacagaatcaacaaacgctaaaattcagtgtggccggacccagcaacatggctgtccagggaagaaactacatacctggacccagctaccgacaacaacgtgtctcaaccactgtgactcaaaacaacaacagcgaatttgcttggcctggagcttcttcttgggctctcaatggacgtaatagcttgatgaatcctggacctgctatggccagccacaaagaaggagaggaccgtttctttcctttgtctggatctttaatttttggcaaacaaggaactggaagagacaacgtggatgcggacaaagtcatgataaccaacgaagaagaaattaaaactactaacccggtagcaacggagtcctatggacaagtggccacaaaccaccagagtgcccaagcacaggcgcagaccggctgggttcaaaaccaaggaatacttccgggtatggtttggcaggacagagatgtgtacctgcaaggacccatctgggccaagattcctcacacggacggcaacttccacccgtctccgctgatgggcggctttggcctgaaacatcctccgcctcagatcctgatcaagaacacgcctgttcctgcgaatcctccggcggagttttcagctacaaagtttgcttcattcatcacccagtactccacaggacaagtgagtgtggaaattgaatgggagctgcagaaagaaaacagcaagcgctggaatcccgaagtgcagtacacatccaattatgcaaaatctgccaacgttgattttactgtggacaacaatggactttatactgagcctcgccccattggcacccgttaccttaccaaacctctgtaa

SEQ ID NO: 5249 - protein, 734 aa, synthetic construct
  REGION 1..734: note = Description of Artificial Sequence: Synthetic polypeptide
MAADGYLPDWLEDNLSEGIREWWALKPGVPQPKANQQHQDNCRGLVLPGYKYLGPGNGLDKGEPVNEADAAALEHDKAYDQQLKAGDNPYLKYNHADAEFQERLKEDTSFGGNLGRAVFQTKKRLLEPLGLVEEAAKTAPGKKRPVEQSPQEPDSSAGIGKSGAQPAKKRLNFGQTGDTESVPDPQPIGEPPAAPSGVGSLTMASGGGAPVADNNEGADGVGSSSGNWHCDSQWLGDRVITTSTRTWALPTYNNHLYKQISSQSGASNDNHYFGYSTPWGYFDFNRFHCHFSPRDWQRLINNNWGFRPKRLSFKLFNIQVKEVTDNNGVKTIANNLTSTVQVFTDSDYQLPYVLGSAHEGCLPPFPADVFMIPQYGYLTLNDGSQAVGRSSFYCLEYFPSQMLRTGNNFQFSYEFENVPFHSSYAHSQSLDRLMNPLIDQYLYYLSKTINGSGQNQQTLKFSVAGPSNMAVQGRNYIPGPSYRQQRVSTTVTQNNNSEFAWPGASSWALNGRNSLMNPGPAMASHKEGEDRFFPLSGSLIFGKQGTGRDNVDADKVMITNEEEIKTTNPVATESYGQVATNHQSAQAQAQTGWVQNQGILPGMVWQDRDVYLQGPIWAKIPHTDGNFHPSPLMGGFGLKHPPPQILIKNTPVPANPPAEFSATKFASFITQYSTGQVSVEIEWELQKENSKRWNPEVQYTSNYAKSANVDFTVDNNGLYTEPRPIGTRYLTKPL

SEQ ID NO: 5250 - DNA, 2211 bp, synthetic construct
  misc_feature 1..2211: note = Description of Artificial Sequence: Synthetic polynucleotide
  source 1..2211: mol_type = other DNA
atggctgccgatggttatcttccagattggctcgaggacaacctctctgagggcattcgcgagtggtgggacttgaaacctggagcccctaaacccaaggcaaatcaacaacatcaggacaacgctcgaggtcttgtgcttccgggttacaaataccttggacccggcaacggactcgacaagggggagccggtcaacgcagcagacgcggcggccctcgagcacgacaaggcctacgaccagcagctcaaggccggagacaacccgtacctcaagtacaaccacgccgacgccgagttccaggagcggctcaaagaagatacgtcttttgggggcaacctcgggcgagcagtcttccaggccaaaaagaggcttcttgaacctcttggtctggttgaggaagcggctaagacggctcctggaaagaagagaccggtagagccatcaccccagcgttctccagactcctctacgggcatcggcaagaaaggccaacagcccgctaaaaagagactcaattttggtcagactggcgactcagagtcagtccccgacccacaacctctcggagaacctccagcaacccccgctgctgtgggacctactacaatggcttcaggcggtggcgcaccaatggcagacaataacgagggtgccgatggagtgggtaattcctcaggaaattggcattgcgattcccaatggctgggcgacagagtcatcaccaccagcaccagaacctgggccctgcccacttacaacaaccatctctacaagcaaatctccagccaatcaggagcttcaaacgacaaccactactttggctacagcaccccttgggggtattttgactttaacagattccactgccacttttcaccacgtgactggcaaagactcatcaacaacaactggggattccgacccaagagactcaacttcaagctcttcaacatccaagtcaaggaggtcacgacgaatgatggcgtcacgaccatcgctaataaccttaccagcacggttcaagtcttctcggactcggagtaccagttgccgtacgtcctcggctctgcgcaccagggctgcctccctccgttcccggcggacgtgttcatgattccgcagtacggctacctaacgctcaacaatggcagccaagccgtgggacgttcatccttttactgcctggaatatttcccttctcagatgctgagaacgggcaacaactttaccttcagctacacttttgaggacgttcctttccacagcagctacgctcacagccagagtctggaccgtctcatgaatcctctcatcgaccagtacctgtattacttgagcagaacaaacactccaagtggaaccaccacgcagtcaaggcttcagttttctcaggccggagcgagtgacattcgggaccagtctaggaactggcttcctggaccctgttaccgccagcagcgcgtttctaaaacaaaaacagacaacaacaacagcaattttacctggactggtgcttcaaaatataaccttaatgggcgtgaatctataatcaaccctggcactgctatggcctcacacaaagacgacgaagacaagttctttcccatgagcggtgtcatgatttttggaaaagagagcgccggagcttcaaacactgcattggacaatgtcatgatcacagacgaagaggaaatcaaagccactaaccccgtggccaccgaaagatttgggactgtggcagtcaatctccagagcagcagcacagaccctgcgaccggagatgtgcatgttatgggagcattacctggcatggtgtggcaagatagagacgtgtacctgcagggtcccatttgggccaaaattcctcacacagatggacactttcacccgtctcctcttatgggcggctttggactcaagaacccgcctcctcagatcctcatcaaaaacacgcctgttcctgcgaatcctccggcggagttttcagctacaaagtttgcttcattcatcacccaatactccacaggacaagtgagtgtggaaattgaatgggagctgcagaaagaaaacagcaagcgctggaatcccgaagtgcagtacacatccaattatgcaaaatctgccaacgttgattttactgtggacaacaatggactttatactgagcctcgccccattggcacccgttaccttacccgtcccctgtaa

SEQ ID NO: 5251 - protein, 736 aa, synthetic construct
  REGION 1..736: note = Description of Artificial Sequence: Synthetic polypeptide
MAADGYLPDWLEDNLSEGIREWWDLKPGAPKPKANQQHQDNARGLVLPGYKYLGPGNGLDKGEPVNAADAAALEHDKAYDQQLKAGDNPYLKYNHADAEFQERLKEDTSFGGNLGRAVFQAKKRLLEPLGLVEEAAKTAPGKKRPVEPSPQRSPDSSTGIGKKGQQPAKKRLNFGQTGDSESVPDPQPLGEPPATPAAVGPTTMASGGGAPMADNNEGADGVGNSSGNWHCDSQWLGDRVITTSTRTWALPTYNNHLYKQISSQSGASNDNHYFGYSTPWGYFDFNRFHCHFSPRDWQRLINNNWGFRPKRLNFKLFNIQVKEVTTNDGVTTIANNLTSTVQVFSDSEYQLPYVLGSAHQGCLPPFPADVFMIPQYGYLTLNNGSQAVGRSSFYCLEYFPSQMLRTGNNFTFSYTFEDVPFHSSYAHSQSLDRLMNPLIDQYLYYLSRTNTPSGTTTQSRLQFSQAGASDIRDQSRNWLPGPCYRQQRVSKTKTDNNNSNFTWTGASKYNLNGRESIINPGTAMASHKDDEDKFFPMSGVMIFGKESAGASNTALDNVMITDEEEIKATNPVATERFGTVAVNLQSSSTDPATGDVHVMGALPGMVWQDRDVYLQGPIWAKIPHTDGHFHPSPLMGGFGLKNPPPQILIKNTPVPANPPAEFSATKFASFITQYSTGQVSVEIEWELQKENSKRWNPEVQYTSNYAKSANVDFTVDNNGLYTEPRPIGTRYLTRPL

SEQ ID NO: 5252 - DNA, 2214 bp, synthetic construct; identical to SEQ ID NO: 5224
  misc_feature 1..2214: note = Description of Artificial Sequence: Synthetic polynucleotide
  source 1..2214: mol_type = other DNA

SEQ ID NO: 5253 - protein, 737 aa, synthetic construct; identical to SEQ ID NO: 5225
  REGION 1..737: note = Description of Artificial Sequence: Synthetic polypeptide

SEQ ID NO: 5254 - DNA, 2205 bp, synthetic construct
  misc_feature 1..2205: note = Description of Artificial Sequence: Synthetic polynucleotide
  source 1..2205: mol_type = other DNA
atggctgctgacggttatcttccagattggctcgaggacaacctttctgaaggcattcgtgagtggtgggctctgaaacctggagtccctcaacccaaagcgaaccaacaacaccaggacaaccgtcggggtcttgtgcttccgggttacaaatacctcggacccggtaacggactcgacaaaggagagccggtcaacgaggcggacgcggcagccctcgaacacgacaaggcctacgaccagcagctcaaggccggagacaacccgtacctcaagtacaaccacgccgacgccgagttccaggagcggctcaaagaagatacgtcttttgggggcaacctcgggcgagcagtcttccaggccaaaaagaggcttcttgaacctcttggtctggttgaggaagcggctaagacggctcctggaaagaagaggcctgtagagcagtctcctcaggaaccggactcctccgcgggtattggcaaatcgggtgcacagcccgctaaaaagagactcaatttcggtcagactggcgacacagagtcagtcccagaccctcaaccaatcggagaacctcccgcagccccctcaggtgtgggatctcttacaatggcttcaggtggtggcgcaccagtggcagacaataacgaaggtgccgatggagtgggtagttcctcgggaaattggcattgcgattcccaatggctgggggacagagtcatcaccaccagcacccgaacctgggccctgcccacctacaacaaccacctctacaaacaaatttccagccaatcaggagcctcgaacgacaatcactactttggctacagcaccccttgggggtattttgacttcaacagattccactgccacttttcaccacgtgactggcagcgactcatcaacaacaactggggattccggcccaagagactcagcttcaagctcttcaacatccaggtcaaagaggttacggacaacaatggagtcaagaccatcgccaataaccttaccagcacggtccaggtcttcacggactcagactatcagctcccgtacgtgctcgggtcggctcacgagggctgcctcccgccgttcccagcggacgttttcatgattcctcagtacgggtatctgacgcttaatgatggaagccaggccgtgggtcgttcgtccttttactgcctggaatatttcccgtcgcaaatgctaagaacgggtaacaacttccagttcagctacgagtttgagaacgtacctttccatagcagctacgctcacagccaaagcctggaccgactaatgaatccactcatcgaccaatacttgtactatctctcaaagactattaacggttctggacagaatcaacaaacgctaaaattcagtgtggccggacccagcaacatggctgtccagggaagaaactacatacctggacccagctaccgacaacaacgtgtctcaaccactgtgactcaaaacaacaacagcgaatttgcttggcctggagcttcttcttgggctctcaatggacgtaatagcttgatgaatcctggacctgctatggccagccacaaagaaggagaggaccgtttctttcctttgtctggatctttaatttttggcaaacaaggaactggaagagacaacgtggatgcggacaaagtcatgataaccaacgaagaagaaattaaaactactaacccggtagcaacggagtcctatggacaagtggccacaaaccaccagagtgcccaagcacaggcgcagaccggctgggttcaaaaccaaggaatacttccgggtatggtttggcaggacagagatgtgtacctgcaaggacccatttgggccaaaattcctcacacggacggcaactttcacccttctccgctgatgggagggtttggaatgaaacacccgcctcctcagatcctcatcaaaaacacacctgtacctgcggatcctccaacggccttcaacaaggacaagctgaactctttcatcacccagtattctactggccaagtcagcgtggagatcgagtgggagctgcagaaggaaaacagcaagcgctggaaccccgagatccagtacacctccaactactacaaatctacaagtgtggactttgctgttaatacagaaggcgtgtactctgaaccccgccccattggcacccgttacctcacccgtaatctgtaa

SEQ ID NO: 5255 - protein, 734 aa, synthetic construct
  REGION 1..734: note = Description of Artificial Sequence: Synthetic polypeptide
MAADGYLPDWLEDNLSEGIREWWALKPGVPQPKANQQHQDNRRGLVLPGYKYLGPGNGLDKGEPVNEADAAALEHDKAYDQQLKAGDNPYLKYNHADAEFQERLKEDTSFGGNLGRAVFQAKKRLLEPLGLVEEAAKTAPGKKRPVEQSPQEPDSSAGIGKSGAQPAKKRLNFGQTGDTESVPDPQPIGEPPAAPSGVGSLTMASGGGAPVADNNEGADGVGSSSGNWHCDSQWLGDRVITTSTRTWALPTYNNHLYKQISSQSGASNDNHYFGYSTPWGYFDFNRFHCHFSPRDWQRLINNNWGFRPKRLSFKLFNIQVKEVTDNNGVKTIANNLTSTVQVFTDSDYQLPYVLGSAHEGCLPPFPADVFMIPQYGYLTLNDGSQAVGRSSFYCLEYFPSQMLRTGNNFQFSYEFENVPFHSSYAHSQSLDRLMNPLIDQYLYYLSKTINGSGQNQQTLKFSVAGPSNMAVQGRNYIPGPSYRQQRVSTTVTQNNNSEFAWPGASSWALNGRNSLMNPGPAMASHKEGEDRFFPLSGSLIFGKQGTGRDNVDADKVMITNEEEIKTTNPVATESYGQVATNHQSAQAQAQTGWVQNQGILPGMVWQDRDVYLQGPIWAKIPHTDGNFHPSPLMGGFGMKHPPPQILIKNTPVPADPPTAFNKDKLNSFITQYSTGQVSVEIEWELQKENSKRWNPEIQYTSNYYKSTSVDFAVNTEGVYSEPRPIGTRYLTRNL

SEQ ID NO: 5256 - DNA, 2217 bp, synthetic construct
  misc_feature 1..2217: note = Description of Artificial Sequence: Synthetic polynucleotide
  source 1..2217: mol_type = other DNA
atggctgccgatggttatcttccagattggctcgaggacaacctctctgagggcattcgcgagtggtgggcgctgaaacctggagccccgaagcccaaagccaaccagcaaaagcaggacgacggccggggtctggtgcttcctggctacaagtacctcggacccttcaacggactcgacaagggggagcccgtcaacgcggcggacgcagcggccctcgagcacgacaaggcctacgaccagcagctgcaggcgggtgacaatccgtacctgcggtataaccacgccgacgccgagtttcaggagcgtctgcaagaagatacgtcttttgggggcaacctcgggcgagcagtcttccaggccaagaagcgggttctcgaacctctcggtctggttgaggaaggcgctaagacggctcctggaaagaagagaccggtagagccatcaccccagcgttctccagactcctctacgggcatcggcaagaaaggccaacagcccgccagaaaaagactcaattttggtcagactggcgactcagagtcagttccagaccctcaacctctcggagaacctccagcagcgccctctggtgtgggacctaatacaatggctgcaggcggtggcgcaccaatggcagacaataacgaaggcgccgacggagtgggtagttcctcgggaaattggcattgcgattccacatggctgggcgacagagtcatcaccaccagcacccgaacctgggccctgcccacctacaacaaccacctctacaagcaaatctccaacgggacatcgggaggagccaccaacgacaacacctacttcggctacagcaccccctgggggtattttgactttaacagattccactgccacttttcaccacgtgactggcagcgactcatcaacaacaactggggattccggcccaagagactcagcttcaagctcttcaacatccaggtcaaggaggtcacgcagaatgaaggcaccaagaccatcgccaataacctcaccagcaccatccaggtgtttacggactcggagtaccagctgccgtacgttctcggctctgcccaccagggctgcctgcctccgttcccggcggacgtgttcatgattccccagtacggctacctaacactcaacaacggtagtcaggccgtgggacgctcctccttctactgcctggaatactttccttcgcagatgctgagaaccggcaacaacttccagtttacttacaccttcgaggacgtgcctttccacagcagctacgcccacagccagagcttggaccggctgatgaatcctctgattgaccagtacctgtactacttgtctcggactcaaacaacaggaggcacggcaaatacgcagactctgggcttcagccaaggtgggcctaatacaatggccaatcaggcaaagaactggctgccaggaccctgttaccgccaacaacgcgtctcaacgacaaccgggcaaaacaacaatagcaactttgcctggactgctgggaccaaataccatctgaatggaagaaattcattggctaatcctggcatcgctatggcaacacacaaagacgacgaggagcgtttttttcccagtaacgggatcctgatttttggcaaacaaaatgctgccagagacaatgcggattacagcgatgtcatgctcaccagcgaggaagaaatcaaaaccactaaccctgtggctacagaggaatacggtatcgtggcagataacttgcagcagcaaaacacggctcctcaaattggaactgtcaacagccagggggccttacccggtatggtctggcagaaccgggacgtgtacctgcagggtcccatctgggccaagattcctcacacggacggcaacttccacccctctcccctcatgggtggattcggacttaaacatcctccgcctcagatcctgatcaagaacacgcctgtacctgcggatcctccgaccaccttcaaccagtcaaagctgaactctttcatcacgcaatacagcaccggacaggtcagcgtggaaattgaatgggagctgcagaaggaaaacagcaagcgctggaaccccgagatccagtacacctccaactactacaaatctacaagtgtggactttgctgttaatacagaaggcgtgtactctgaaccccgccccattggcacccgttacctcacccgtaatctgtaa

SEQ ID NO: 5257 - protein, 738 aa, synthetic construct; identical to SEQ ID NO: 5159
  REGION 1..738: note = Description of Artificial Sequence: Synthetic polypeptide

SEQ ID NO: 5258 - DNA, 2211 bp, synthetic construct
  misc_feature 1..2211: note = Description of Artificial Sequence: Synthetic polynucleotide
  source 1..2211: mol_type = other DNA
atggctgctgacggttatcttccagattggctcgaggacaacctttctgaaggcattcgagagtggtgggcgctgcaacctggagcccctaaacccaaggcaaatcaacaacatcaggacaacgctcggggtcttgtgcttccgggttacaaatacctcggacccggcaacggactcgacaagggggaacccgtcaacgcagcggacgcggcagccctcgagcacgacaaggcctacgaccagcagctcaaggccggtgacaacccctacctcaagtacaaccacgccgacgccgagttccaggagcggctcaaagaagatacgtcttttgggggcaacctcgggcgagcagtcttccaggccaaaaagaggcttcttgaacctcttggtctggttgaggaagcggctaagacggctcctggaaagaagaggcctgtagatcagtctcctcaggaaccggactcatcatctggtgttggcaaatcgggcaaacagcctgccagaaaaagactaaatttcggtcagactggcgactcagagtcagtcccagaccctcaacctctcggagaaccaccagcagcccccacaagtttgggatctaatacaatggcttcaggcggtggcgcaccaatggcagacaataacgagggtgccgatggagtgggtaattcctcaggaaattggcattgcgattcccaatggctgggcgacagagtcatcaccaccagcaccagaacctgggccctgcccacttacaacaaccatctctacaagcaaatctccagccaatcaggagcttcaaacgacaaccactactttggctacagcaccccttgggggtattttgactttaacagattccactgccacttctcaccacgtgactggcagcgactcattaacaacaactggggattccggcccaagaaactcagcttcaagctcttcaacatccaagttaaagaggtcacgcagaacgatggcacgacgactattgccaataaccttaccagcacggttcaggtgtttacggactcggagtatcagctcccgtacgtgctcgggtcggcgcaccaaggctgtctcccgccgtttccagcggacgtcttcatggtccctcagtatggatacctcaccctgaacaacggaagtcaagcggtgggacgctcatccttttactgcctggagtacttcccttcgcagatgctaaggactggaaataacttccaattcagctataccttcgaggatgtaccttttcacagcagctacgctcacagccagagtttggatcgcttgatgaatcctcttattgatcagtatctgtactacctgaacagaacgcaaggaacaacctctggaacaaccaaccaatcacggctgctttttagccaggctgggcctcagtctatgtctttgcaggccagaaattggctacctgggccctgctaccggcaacagagactttcaaagactgctaacgacaacaacaacagtaactttccttggacagcggccagcaaatatcatctcaatggccgcgactcgctggtgaatccaggaccagctatggccagtcacaaggacgatgaagaaaaatttttccctatgcacggcaatctaatatttggcaaagaagggacaacggcaagtaacgcagaattagataatgtaatgattacggatgaagaagagattcgtaccaccaatcctgtggcaacagagcagtatggaactgtggcaaataacttgcagagctcaaatacagctcccacgactagaactgtcaatgatcagggggccttacctggcatggtgtggcaagatcgtgacgtgtaccttcaaggacctatctgggcaaagattcctcacacggatggacactttcatccttctcctctgatgggaggctttggactgaaacatccgcctcctcaaatcatgatcaaaaatactccggtaccggcaaatcctccgacgactttcagcccggccaagtttgcttcatttatcactcagtactccactggacaggtcagcgtggaaattgagtgggagctacagaaagaaaacagcaaacgttggaatccagagattcagtacacttccaactacaacaagtctgttaatgtggactttactgtagacactaatggtgtttatagtgaacctcgccccattggcacccgttaccttacccgtcccctgtaa

SEQ ID NO: 5259 - protein, 736 aa, synthetic construct; identical to SEQ ID NO: 5229
  REGION 1..736: note = Description of Artificial Sequence: Synthetic polypeptide

SEQ ID NO: 5260 - DNA, 2211 bp, synthetic construct; identical to SEQ ID NO: 5228
  misc_feature 1..2211: note = Description of Artificial Sequence: Synthetic polynucleotide
  source 1..2211: mol_type = other DNA

SEQ ID NO: 5261 - protein, 736 aa, synthetic construct; identical to SEQ ID NO: 5229
  REGION 1..736: note = Description of Artificial Sequence: Synthetic polypeptide

SEQ ID NO: 5262 - DNA, 2211 bp, synthetic construct
  misc_feature 1..2211: note = Description of Artificial Sequence: Synthetic polynucleotide
  source 1..2211: mol_type = other DNA
atggctgctgacggttatcttccagattggctcgaggacaacctttctgaaggcattcgtgagtggtgggctctgaaacctggagtccctcaacccaaagcgaaccaacaacaccaggacaaccgtcggggtcttgtgcttccgggttacaaatacctcggacccggtaacggactcgacaaaggagagcccgtcaacgcggcggatgcagcggccctcgagcacgacaaggcctacgaccagcagctcaaagcgggtgacaatccgtacctgcggtataaccacgccgacgccgagtttcaggagcgtctgcaagaagatacgtcttttgggggcaacctcgggcgagcagtcttccaggccaagaagagggttctcgaaccttttggtctggttgaggaaggtgctaagacggctcctggaaagaaacgtccggtagagcagtcgccacaagagccagactcctcctcgggcatcggcaagacaggccagcagcccgctaaaaagagactcaattttggtcagactggcgactcagagtcagtccccgacccacaacctctcggagaacctccagcaacccccgctgctgtgggacctactacaatggcttcaggcggtggcgcaccaatggcagacaataacgaaggcgccgacggagtgggtaatgcctcaggaaattggcattgcgattccacatggctgggcgacagagtcatcaccaccagcacccgcacctgggccttgcccacctacaataaccacctctacaagcaaatctccagtgcttcaacgggggccagcaacgacaaccactacttcggctacagcaccccctgggggtattttgatttcaacagattccactgccatttctcaccacgtgactggcagcgactcatcaacaacaattggggattccggcccaagagactcaacttcaagctcttcaacatccaagtcaaggaggtcacgacgaatgatggcgtcacgaccatcgctaataaccttaccagcacggttcaagtcttctcggactcggagtaccagcttccgtacgtcctcggctctgcgcaccagggctgcctccctccgttcccggcggacgtgttcatgattccgcaatacggctacctgacgctcaacaatggcagccaagccgtgggacgttcatccttttactgcctggaatatttcccttctcagatgctgagaacgggcaacaactttaccttcagctacacctttgaggaagtgcctttccacagcagctacgcgcacagccagagcctggaccggctgatgaatcctctcatcgaccaatacctgtattacctgaacagaactcaaaatcagtccggaagtgcccaaaacaaggacttgctgtttagccgtgggtctccagctggcatgtctgttcagcccaaaaactggctacctggaccctgttatcggcagcagcgcgtttctaaaacaaaaacagacaacaacaacagcaattttacctggactggtgcttcaaaatataacctcaatgggcgtgaatccatcatcaaccctggcactgctatggcctcacacaaagacgacgaagacaagttctttcccatgagcggtgtcatgatttttggaaaagagagcgccggagcttcaaacactgcattggacaatgtcatgattacagacgaagaggaaattaaagccactaaccctgtggccaccgaaagatttgggaccgtggcagtcaatttccagagcagcagcacagaccctgcgaccggagatgtgcatgttatgggagccttacctggaatggtgtggcaagacagagacgtatacctgcagggtcctatttgggccaaaattcctcacacggatggacactttcacccgtctcctctcatgggcggctttggacttaagcacccgcctcctcagatcctcatcaaaaacacgcctgttcctgcgaatcctccggcagagttttcggctacaaagtttgcttcattcatcacccagtattccacaggacaagtgagcgtggagattgaatgggagctgcagaaagaaaacagcaaacgctggaatcccgaagtgcagtatacatctaactatgcaaaatctgccaacgttgatttcactgtggacaacaatggactttatactgagcctcgccccattggcacccgttacctcacccgtcccctgtaa

SEQ ID NO: 5263 - protein, 736 aa, synthetic construct
  REGION 1..736: note = Description of Artificial Sequence: Synthetic polypeptide
MAADGYLPDWLEDNLSEGIREWWALKPGVPQPKANQQHQDNRRGLVLPGYKYLGPGNGLDKGEPVNAADAAALEHDKAYDQQLKAGDNPYLRYNHADAEFQERLQEDTSFGGNLGRAVFQAKKRVLEPFGLVEEGAKTAPGKKRPVEQSPQEPDSSSGIGKTGQQPAKKRLNFGQTGDSESVPDPQPLGEPPATPAAVGPTTMASGGGAPMADNNEGADGVGNASGNWHCDSTWLGDRVITTSTRTWALPTYNNHLYKQISSASTGASNDNHYFGYSTPWGYFDFNRFHCHFSPRDWQRLINNNWGFRPKRLNFKLFNIQVKEVTTNDGVTTIANNLTSTVQVFSDSEYQLPYVLGSAHQGCLPPFPADVFMIPQYGYLTLNNGSQAVGRSSFYCLEYFPSQMLRTGNNFTFSYTFEEVPFHSSYAHSQSLDRLMNPLIDQYLYYLNRTQNQSGSAQNKDLLFSRGSPAGMSVQPKNWLPGPCYRQQRVSKTKTDNNNSNFTWTGASKYNLNGRESIINPGTAMASHKDDEDKFFPMSGVMIFGKESAGASNTALDNVMITDEEEIKATNPVATERFGTVAVNFQSSSTDPATGDVHVMGALPGMVWQDRDVYLQGPIWAKIPHTDGHFHPSPLMGGFGLKHPPPQILIKNTPVPANPPAEFSATKFASFITQYSTGQVSVEIEWELQKENSKRWNPEVQYTSNYAKSANVDFTVDNNGLYTEPRPIGTRYLTRPL

SEQ ID NO: 5264 - DNA, 2217 bp, synthetic construct
  misc_feature 1..2217: note = Description of Artificial Sequence: Synthetic polynucleotide
  source 1..2217: mol_type = other DNA
atggctgccgatggttatcttccagattggctcgaggacaacctctctgagggcattcgcgagtggtgggacttgaaacctggagccccgaaacccaaagccaaccagcaaaagcaggacgacggccggggtctggtgcttcctggctacaagtacctcggacccttcaacggactcgacaagggggagcccgtcaacgcggcggatgcaacggccctcgagcacgacaaggcctacgaccagcagctgcaggcgggtgacaatccgtacctgcggtataaccacgccgacgccgagtttcaggagcgtctgcaagaagatacgtcttttgggggcaacctcgggcgagcagtcttccaggccaagaagcgggttctcgaacctctcggtctggttgaggaaggcgctaagacggctcctggaaagaagagaccggtagagccatcaccccagcgttctccagactcctctacgggcatcggcaagaaaggccaacagcccgccagaaaaagactcaattttggtcagactggcgactcagagtcagttccagaccctcaacctctcggagaaccaccagcagcccccacaagtttgggatctaatacaatggcttcaggcggtggcgcaccaatggcagacaataacgagggtgccgatggagtgggtaattcctcaggaaattggcattgcgattcccaatggctgggcgacagagtcatcaccaccagcacccgcacctgggccttgcccacctacaataaccacctctacaagcaaatctccagtgcttcaacgggggccagcaacgacaaccactacttcggctacagcaccccctgggggtattttgactttaaccgcttccactgccacttctcgccaagagactggcaaagactcatcaacaacaattggggattccggcccaagagactcaacttcaaactcttcaacatccaagtcaaggaggtcacgacgaatgatggcgtcacgaccatcgccaataacctcaccagcaccatccaggtgtttacggactcggagtaccagctgccgtacgttctcggctctgcccaccagggctgcctgcctccgttcccggcggacgtgttcatgattccccagtatggatacctcaccctgaacaacggaagtcaagcggtgggacgctcatccttttactgcctggagtacttcccttcgcagatgctaaggactggaaataacttccaattcagctataccttcgaggatgtaccttttcacagcagctacgctcacagccagagtttggatcgcttgatgaatcctcttattgatcagtatctgtactacctgaacagaacgcaaggaacaacctctggaacaaccaaccaatcacggctgctttttagccaggctgggcctcagtctatgtctttgcaggccagaaattggctacctgggccctgctaccggcaacagagactttcaaagactgctaacgacaacaacaacagtaactttccttggacagcagccagcaaatatcatctcaatggccgcgactcgctggtgaatccaggaccagctatggccagtcacaaggacgatgaagaaaaatttttccctatgcacggcaatctaatatttggcaaagaagggacaacggcaagtaacgcagaattagataatgtaatgattacggatgaagaagagattcgtaccaccaatcctgtggcaacagagcagtatggaactgtggcaaataacttgcagagctcaaatacagctcccacgactagaactgtcaatgatcagggggccttacctggcatggtgtggcaagatcgtgacgtgtaccttcaggggcccatctgggcaaagattccacacacggacggacattttcacccctctcccctcatgggtggattcggacttaaacaccctcctccgcagattctcatcaagaacaccccggtacctgcgaatccttcgaccaccttcagtgcggcaaagtttgcttccttcatcacacagtactccacgggacaggtcagcgtggagatcgagtgggagctgcagaaggaaaacagcaagcgctggaacccggagatccagtacacttccaactattacaagtctaataatgttgaatttgctgttaatactgaaggtgtatatagtgaaccccgccccattggcaccagatacctgactcgtaatctgtaa

SEQ ID NO: 5265 - protein, 738 aa, synthetic construct
  REGION 1..738: note = Description of Artificial Sequence: Synthetic polypeptide
MAADGYLPDWLEDNLSEGIREWWDLKPGAPKPKANQQKQDDGRGLVLPGYKYLGPFNGLDKGEPVNAADATALEHDKAYDQQLQAGDNPYLRYNHADAEFQERLQEDTSFGGNLGRAVFQAKKRVLEPLGLVEEGAKTAPGKKRPVEPSPQRSPDSSTGIGKKGQQPARKRLNFGQTGDSESVPDPQPLGEPPAAPTSLGSNTMASGGGAPMADNNEGADGVGNSSGNWHCDSQWLGDRVITTSTRTWALPTYNNHLYKQISSASTGASNDNHYFGYSTPWGYFDFNRFHCHFSPRDWQRLINNNWGFRPKRLNFKLFNIQVKEVTTNDGVTTIANNLTSTIQVFTDSEYQLPYVLGSAHQGCLPPFPADVFMIPQYGYLTLNNGSQAVGRSSFYCLEYFPSQMLRTGNNFQFSYTFEDVPFHSSYAHSQSLDRLMNPLIDQYLYYLNRTQGTTSGTTNQSRLLFSQAGPQSMSLQARNWLPGPCYRQQRLSKTANDNNNSNFPWTAASKYHLNGRDSLVNPGPAMASHKDDEEKFFPMHGNLIFGKEGTTASNAELDNVMITDEEEIRTTNPVATEQYGTVANNLQSSNTAPTTRTVNDQGALPGMVWQDRDVYLQGPIWAKIPHTDGHFHPSPLMGGFGLKHPPPQILIKNTPVPANPSTTFSAAKFASFITQYSTGQVSVEIEWELQKENSKRWNPEIQYTSNYYKSNNVEFAVNTEGVYSEPRPIGTRYLTRNL

SEQ ID NO: 5266 - DNA, 2208 bp, synthetic construct
  misc_feature 1..2208: note = Description of Artificial Sequence: Synthetic polynucleotide
  source 1..2208: mol_type = other DNA
atggctgccgatggttatcttccagattggctcgaggacaaccttagtgaaggaattcgcgagtggtgggacttgaaacctggagccccgaagcccaaagccaaccagcaaaagcaggacgacggccggggtctggtgcttcctggctacaagtacctcggacccttcaacggactcgacaagggggagcccgtcaacgcggcggacgcagcggccctcgagcacgacaaggcctacgaccagcagctcaaagcgggtgacaatccgtacctgcggtataaccacgccgacgccgagtttcaggagcgtctgcaagaagatacgtcttttgggggcaacctcgggcgagcagtcttccaggccaagaagcgggttctcgaacctctcggtctggttgaggaaggtgctaagacggctcctggaaagaaacgtccggtagagcagtcgccacaagagccagactcctcctcgggcattggcaagacaggccagcagcccgctaaaaagagactcaattttggtcagactggcgactcagagtcagtccccgacccacaacctctcggagaacctccagcaacccccgctgctgtgggacctactacaatggcttcaggcggtggcgcaccaatggcagacaataacgaaggcgccgacggagtgggtaatgcctcaggaaattggcattgcgattccacatggctgggcgacagagtcatcaccaccagcacccgaacctgggccctgcccacctacaacaaccacctctacaaacaaatttccagccaatcaggagcctcgaacgacaatcactactttggctacagcaccccttgggggtattttgatttcaacagattccactgccacttttcaccacgtgactggcagcgactcatcaacaacaattggggattccggcccaagagactcagcttcaagctcttcaacatccaggtcaaggaggtcacgcagaatgaaggcaccaagaccatcgccaataaccttaccagcacggttcaagtgtttacggactcggagtatcagctcccgtacgtgctcggctcggcgcatcaaggatgcctcccgccgttcccagcagacgtcttcatggtgccacagtatggatacctcaccctgaacaacgggagtcaggcagtaggacgctcttcattttactgcctggagtactttccttctcagatgctgcgtaccggaaacaactttaccttcagctacacttttgaggacgttcctttccacagcagctacgctcacagccagagtctggaccgtctcatgaatcctctgattgaccagtacctgtattacttgagcagaacaaacactccaagtggaaccaccacgcagtcaaggcttcagttttctcaggccggagcgagtgacattcgggaccagtctaggaactggcttcctggaccctgttaccgccagcagcgagtatcaaagacatctgcggataacaacaacagtgaatactcgtggactggagctaccaagtaccacctcaatggcagagactctctggtgaatccgggcccggccatggcaagccacaaggactatgaagaaaagttttttcctcagagcggggttctcatctttgggaagcaaggctcagagaaaacaaatgtggacattgaaaaggtcatgattacagacgaagaggaaatcaggacaaccaatcccgtggctacggagcagtatggttctgtatctaccaacctccagagaggcaacagacaagcagctaccgcagatgtcaacacacaaggcgttcttccaggcatggtctggcaggacagagatgtgtaccttcaggggcccatctgggcaaagattccacacacggacggacattttcacccgtctccgctgatgggcggctttggcctgaaacatcctccgcctcagatcctgatcaagaacacgcctgtacctgcggatcctccgaccaccttcaaccagtcaaagctgaactctttcatcactcagtattctactggccaagtcagcgtggagatcgagtgggagctgcagaaggaaaacagcaagcgctggaaccccgagatccagtacacctccaactactacaaatctacaagtgtggactttgctgttaatacagaaggcgtgtactctgaaccccgccccattggcacccgttacctcacccgtaatctgtaa

SEQ ID NO: 5267 - protein, 735 aa, synthetic construct
  REGION 1..735: note = Description of Artificial Sequence: Synthetic polypeptide
MAADGYLPDWLEDNLSEGIREWWDLKPGAPKPKANQQKQDDGRGLVLPGYKYLGPFNGLDKGEPVNAADAAALEHDKAYDQQLKAGDNPYLRYNHADAEFQERLQEDTSFGGNLGRAVFQAKKRVLEPLGLVEEGAKTAPGKKRPVEQSPQEPDSSSGIGKTGQQPAKKRLNFGQTGDSESVPDPQPLGEPPATPAAVGPTTMASGGGAPMADNNEGADGVGNASGNWHCDSTWLGDRVITTSTRTWALPTYNNHLYKQISSQSGASNDNHYFGYSTPWGYFDFNRFHCHFSPRDWQRLINNNWGFRPKRLSFKLFNIQVKEVTQNEGTKTIANNLTSTVQVFTDSEYQLPYVLGSAHQGCLPPFPADVFMVPQYGYLTLNNGSQAVGRSSFYCLEYFPSQMLRTGNNFTFSYTFEDVPFHSSYAHSQSLDRLMNPLIDQYLYYLSRTNTPSGTTTQSRLQFSQAGASDIRDQSRNWLPGPCYRQQRVSKTSADNNNSEYSWTGATKYHLNGRDSLVNPGPAMASHKDYEEKFFPQSGVLIFGKQGSEKTNVDIEKVMITDEEEIRTTNPVATEQYGSVSTNLQRGNRQAATADVNTQGVLPGMVWQDRDVYLQGPIWAKIPHTDGHFHPSPLMGGFGLKHPPPQILIKNTPVPADPPTTFNQSKLNSFITQYSTGQVSVEIEWELQKENSKRWNPEIQYTSNYYKSTSVDFAVNTEGVYSEPRPIGTRYLTRNL

SEQ ID NO: 5268 - DNA, 2214 bp, synthetic construct
  misc_feature 1..2214: note = Description of Artificial Sequence: Synthetic polynucleotide
  source 1..2214: mol_type = other DNA
atggctgccgatggttatcttccagattggctcgaggacaacctctctgagggcattcgcgagtggtgggacttgaaacctggagccccgaaacccaaagccaaccagcaaaagcaggacgacggccggggtctggtgcttcctggctacaagtacctcggacccttcaacggactcgacaagggggagcccgtcaacgcggcggatgcagcggccctcgagcacgacaaggcctacgaccagcagctcaaagcgggtgacaatccgtacctgcggtataaccacgccgacgccgagtttcaggagcgtctgcaagaagatacgtcttttgggggcaacctcgggcgagcagtcttccaggccaagaagagggttctcgaaccttttggtctggttgaggaaggtgctaagacggctcctggaaagaaacgtccggtagagcagtcgccacaagagccagactcctcctcgggcattggcaagacaggccagcagcctgcaagaaaaagattgaattttggtcagactggagacgcagactcagtacctgacccccagcctctcggacagccaccagcagccccctctggtctgggaactaatacgatggctacaggcagtggcgcaccaatggcagacaataacgagggcgccgacggagtgggtaattcctcgggaaattggcattgcgattcccaatggctgggggacagagtcatcaccaccagcacccgaacctgggccctgcccacctacaacaatcacctctacaagcaaatctccaacagcacatctggaggatcttcaaatgacaacgcctacttcggctacagcaccccctgggggtattttgatttcaacagattccactgccatttctcaccacgtgactggcagcgactcatcaacaacaattggggattccggcccaagagactcaacttcaagctcttcaacatccaggtcaaggaggtcacgcagaatgaaggcaccaagaccatcgccaataacctcaccagcaccatccaggtgtttacggactcggagtaccagctgccgtacgttctcggctctgcccaccagggctgcctgcctccgttcccggcggacgtgttcatgattccccagtacggctacctaacactcaacaacggtagtcaggccgtgggacgctcctccttctactgcctggaatactttccttcgcagatgctgagaaccggcaacaacttccagtttacttacaccttcgaggacgtgcctttccacagcagctacgcccacagccagagcttggaccggctgatgaatcctctgattgaccagtacctgtactacttgtctcggactcaaacaacaggaggcacgacaaatacgcagactctgggcttcagccaaggtgggcctaatacaatggccaatcaggcaaagaactggctgccaggaccctgttaccgccagcagcgagtatcaaagacatttgcggataacaacaacagtgaatactcgtggactggagctaccaagtaccacctcaatggcagagactctctggtgaatccgggcccggccatggcaagccacaaggacgatgaagaaaagttttttcctcagagcggggttctcatctttgggaagcaaggctcagagaaaacaaatgtggacattgaaaaggtcatgattacagacgaagaggaaatcaggacaaccaatcccgtggctacggagcagtatggttctgtatctaccaacctccagagaggcaacagacaagcagctaccgcagatgtcaacacacaaggcgttcttccaggcatggtctggcaggacagagatgtgtaccttcaggggcccatctgggcaaagattccacacacggacggacattttcacccctctcccctcatgggtggattcggacttaaacaccctccgcctcagatcctgatcaagaacacgcctgtacccgcggatcctccgaccaccttcaaccagtcaaagctgaactctttcatcacccagtattctactggccaagtcagcgtggagatcgagtgggagctgcagaaggaaaacagcaagcgctggaaccccgagatccagtacacctccaactactacaaatctacaagtgtggactttgctgttaatacagaaggcgtgtactctgaaccccgccccattggcacccgttacctcacccgtaatctgtaa

SEQ ID NO: 5269 - protein, 737 aa, synthetic construct
  REGION 1..737: note = Description of Artificial Sequence: Synthetic polypeptide
MAADGYLPDWLEDNLSEGIREWWDLKPGAPKPKANQQKQDDGRGLVLPGYKYLGPFNGLDKGEPVNAADAAALEHDKAYDQQLKAGDNPYLRYNHADAEFQERLQEDTSFGGNLGRAVFQAKKRVLEPFGLVEEGAKTAPGKKRPVEQSPQEPDSSSGIGKTGQQPARKRLNFGQTGDADSVPDPQPLGQPPAAPSGLGTNTMATGSGAPMADNNEGADGVGNSSGNWHCDSQWLGDRVITTSTRTWALPTYNNHLYKQISNSTSGGSSNDNAYFGYSTPWGYFDFNRFHCHFSPRDWQRLINNNWGFRPKRLNFKLFNIQVKEVTQNEGTKTIANNLTSTIQVFTDSEYQLPYVLGSAHQGCLPPFPADVFMIPQYGYLTLNNGSQAVGRSSFYCLEYFPSQMLRTGNNFQFTYTFEDVPFHSSYAHSQSLDRLMNPLIDQYLYYLSRTQTTGGTTNTQTLGFSQGGPNTMANQAKNWLPGPCYRQQRVSKTFADNNNSEYSWTGATKYHLNGRDSLVNPGPAMASHKDDEEKFFPQSGVLIFGKQGSEKTNVDIEKVMITDEEEIRTTNPVATEQYGSVSTNLQRGNRQAATADVNTQGVLPGMVWQDRDVYLQGPIWAKIPHTDGHFHPSPLMGGFGLKHPPPQILIKNTPVPADPPTTFNQSKLNSFITQYSTGQVSVEIEWELQKENSKRWNPEIQYTSNYYKSTSVDFAVNTEGVYSEPRPIGTRYLTRNL

SEQ ID NO: 5270 - DNA, 2217 bp, synthetic construct
  misc_feature 1..2217: note = Description of Artificial Sequence: Synthetic polynucleotide
  source 1..2217: mol_type = other DNA
atggctgccgatggttatcttccagattggctcgaggacactctctctgaaggaataagacagtggtgggcgctgaaacctggagccccgaagcccaaagccaaccagcaaaagcaggacgacggccggggtctggtgcttcctggctacaagtacctcggacccttcaacggactcgacaagggggagcccgtcaacgcggcggatgcagcggccctcgagcacgacaaggcctacgaccagcagctcaaagcgggtgacaatccgtacctgcggtataaccacgccgacgccgagtttcaggagcgtctgcaagaagatacgtcttttgggggcaacctcgggcgagcagtcttccaggccaagaagcgggttctcgaacctctcggtctggttgaggaaggcgctaagacggctcctggaaagaagagaccggtagagccatcaccccagcgttctccagactcctctacgggcatcggcaagaaaggccaacagcccgccagaaaaagactcaattttggtcagactggcgactcagagtcagttccagaccctcaacctctcggagaaccaccagcagcccccacaagtttgggatctaatacaatggcttcaggcggtggcgcaccaatggcagacaataacgagggtgccgatggagtgggtaattcctcaggaaattggcattgcgattcccaatggctgggcgacagagtcatcaccaccagcacccgcacctgggccttgcccacctacaataaccacctctacaagcaaatctccagtgcttcaacgggggccagcaacgacaaccactacttcggctacagcaccccctgggggtattttgactttaaccgcttccactgccacttctcgccaagagactggcaaagactcatcaacaacaattggggattccggcccaagagactcaacttcaaactcttcaacatccaagtcaaggaggtcacgacgaatgatggcgtcacgaccatcgccaataacctcaccagcaccatccaggtgtttacggactcggagtaccagctgccgtacgttctcggctctgcccaccagggctgcctgcctccgttcccggcggacgtgttcatgattccccagtatggatacctcaccctgaacaacggaagtcaagcggtgggacgctcatccttttactgcctggagtacttcccttcgcagatgctaaggactggaaataacttccaattcagctataccttcgaggatgtaccttttcacagcagctacgctcacagccagagtttggatcgcttgatgaatcctcttattgatcagtatctgtactacctgaacagaacgcaaggaacaacctctggaacaaccaaccaatcacggctgctttttagccaggctgggcctcagtctatgtctttgcaggccagaaattggctacctgggccctgctaccggcaacagagactttcaaagactgctaacgacaacaacaacagtaactttccttggacagcagccagcaaatatcatctcaatggccgcgactcgctggtgaatccaggaccagctatggccagtcacaaggacgatgaagaaaaatttttccctatgcacggcaatctaatatttggcaaagaagggacaacggcaagtaacgcagaattagataatgtaatgattacggatgaagaagagattcgtaccaccaatcctgtggcaacagagcagtatggaactgtggcaaataacttgcagagctcaaatacagctcccacgactagaactgtcaatgatcagggggccttacctggcatggtgtggcaagatcgtgacgtgtaccttcaggggcccatctgggcaaagattccacacacggacggacattttcacccctctcccctcatgggtggattcggacttaaacaccctcctccgcagattctcatcaagaacaccccggtacctgcgaatccttcgaccaccttcagtgcggcaaagtttgcttccttcatcacacagtactccacgggacaggtcagcgtggagatcgagtgggagctgcagaaggaaaacagcaagcgctggaacccggagatccagtacacttccaactattacaagtctaataatgttgaatttgctgttaatactgaaggtgtatatagtgaaccccgccccattggcaccagatacctgactcgtaatctgtaa

SEQ ID NO: 5271 - protein, 738 aa, synthetic construct
  REGION 1..738: note = Description of Artificial Sequence: Synthetic polypeptide
MAADGYLPDWLEDTLSEGIRQWWALKPGAPKPKANQQKQDDGRGLVLPGYKYLGPFNGLDKGEPVNAADAAALEHDKAYDQQLKAGDNPYLRYNHADAEFQERLQEDTSFGGNLGRAVFQAKKRVLEPLGLVEEGAKTAPGKKRPVEPSPQRSPDSSTGIGKKGQQPARKRLNFGQTGDSESVPDPQPLGEPPAAPTSLGSNTMASGGGAPMADNNEGADGVGNSSGNWHCDSQWLGDRVITTSTRTWALPTYNNHLYKQISSASTGASNDNHYFGYSTPWGYFDFNRFHCHFSPRDWQRLINNNWGFRPKRLNFKLFNIQVKEVTTNDGVTTIANNLTSTIQVFTDSEYQLPYVLGSAHQGCLPPFPADVFMIPQYGYLTLNNGSQAVGRSSFYCLEYFPSQMLRTGNNFQFSYTFEDVPFHSSYAHSQSLDRLMNPLIDQYLYYLNRTQGTTSGTTNQSRLLFSQAGPQSMSLQARNWLPGPCYRQQRLSKTANDNNNSNFPWTAASKYHLNGRDSLVNPGPAMASHKDDEEKFFPMHGNLIFGKEGTTASNAELDNVMITDEEEIRTTNPVATEQYGTVANNLQSSNTAPTTRTVNDQGALPGMVWQDRDVYLQGPIWAKIPHTDGHFHPSPLMGGFGLKHPPPQILIKNTPVPANPSTTFSAAKFASFITQYSTGQVSVEIEWELQKENSKRWNPEIQYTSNYYKSNNVEFAVNTEGVYSEPRPIGTRYLTRNL

SEQ ID NO: 5272 - DNA, 2208 bp, synthetic construct; identical to SEQ ID NO: 5102
  misc_feature 1..2208: note = Description of Artificial Sequence: Synthetic polynucleotide
  source 1..2208: mol_type = other DNA

SEQ ID NO: 5273 - protein, 735 aa, synthetic construct [sequence omitted]

SEQ ID NO: 5274 - DNA, 2208 bp, synthetic construct
  misc_feature 1..2208: note = Description of Artificial Sequence: Synthetic polynucleotide
  source 1..2208: mol_type = other DNA
atggctgccgatggttatcttccagattggctcgaggacaacctctctgagggcattcgcgagtggtgggcgctgaaacctggagccccgaagcccaaagccaaccagcaaaagcaggacgacggccggggtctggtgcttcctggctacaagtacctcggacccttcaacggactcgacaagggggagcccgtcaacgcggcggacgccgcggccctcgagcacgacaaggcctacgaccagcagctgcaggcgggtgacaatccgtacctgcggtataaccacgccgacgccgagtttcaggagcgtctgcaagaagatacgtcttttgggggcaacctcgggcgagcagtcttccaggccaaaaagaggcttcttgaacctcttggtctggttgaggaagcagctaaaacggctcctggaaagaagaggcctgtagagcagtctcctcaggaaccggactcctccgcgggtattggcaaatcgggtgcacagcccgccaaaaagagactcaatttcggtcagactggcgactcagagtcagtcccagaccctcaacctctcggagaaccaccagcagcccccacaagtttgggatctaatacaatggcttcaggcggtggcgcaccaatggcagacaataacgaaggcgccgacggagtgggtaatgcctcaggaaattggcattgcgattccacatggctgggcgacagagtcatcaccaccagcacccgcacctgggccttgcccacctacagcaaccatctctacaagcaaatctccagccaatcaggagcttcaaacgacaacgactactttggctacagcaccccttgggggtattttgatttcaacagattccactgccacttttcaccacgtgactggcaaagactcatcaacaacaactggggattccgacccaagagactcaacttcaagctctttaacattcaagtcaaagaggtcacgcagaatgacggtacgacgacgattgccaataaccttaccagcacggttcaggtgtttactgactcggagtaccagctcccgtacgtcctcggctcggcgcatcaaggatgcctcccgccgttcccagcagacgtcttcatggtgccacagtatggatacctcaccctgaacaacgggagtcaggcagtaggacgctcttcattttactgcctggagtactttccttctcagatgctgcgtaccggaaacaactttaccttcagctacacttttgaggacgttcctttccacagcagctacgctcacagccagagtctggaccgtctcatgaatcctctcatcgaccagtacctgtattacttgagcagaacaaacactccaagtggaaccaccacgcagtcaaggcttcagttttctcaggccggagcgagtgacattcgggaccagtctaggaactggcttcctggaccctgttaccgccagcagcgagtatcaaagacatctgaggataacaacaacagtgaatactcgtggactggagctaccaagtaccacctcaatggcagagactctctggtgaatccgggcccggccatggcaagccacaaggacgatgaagaaaagttttttcctcagagcggggttctcatctttgggaagcaaggctcagagaaaacaaatgtggacattgaaaaggtcatgattacagacgaagaggaaatcaggacaaccaatcccgtggctacggagcagtatggttctgtatctaccaacctccagagaggcaacagacaagcagctaccgcagatgtcaacacacaaggcgttcttccaggcatggtctggcaggacagagatgtgtaccttcaggggcccatctgggcaaagattccacacacggacggacattttcacccctctcccctcatgggtggattcggacttaaacaccctcctccacagattctcatcaagaacaccccggtacctgcgaatccttcgaccaccttcagtgcggcaaagtttgcttccttcatcacacagtactccacgggacaggtcagcgtggagatcgagtgggagctgcagaaggaaaacagcaaacgctggaatcccgaaattcagtacacttccaactacaacaagtctgttaatgtggactttactgtggacactaatggcgtgtattcagagcctcgccccattggcaccagatacctgactcgtaatctgtaa

SEQ ID NO: 5275 - protein, 735 aa, synthetic construct
  REGION 1..735: note = Description of Artificial Sequence: Synthetic polypeptide
MAADGYLPDWLEDNLSEGIREWWALKPGAPKPKANQQKQDDGRGLVLPGYKYLGPFNGLDKGEPVNAADAAALEHDKAYDQQLQAGDNPYLRYNHADAEFQERLQEDTSFGGNLGRAVFQAKKRLLEPLGLVEEAAKTAPGKKRPVEQSPQEPDSSAGIGKSGAQPAKKRLNFGQTGDSESVPDPQPLGEPPAAPTSLGSNTMASGGGAPMADNNEGADGVGNASGNWHCDSTWLGDRVITTSTRTWALPTYSNHLYKQISSQSGASNDNDYFGYSTPWGYFDFNRFHCHFSPRDWQRLINNNWGFRPKRLNFKLFNIQVKEVTQNDGTTTIANNLTSTVQVFTDSEYQLPYVLGSAHQGCLPPFPADVFMVPQYGYLTLNNGSQAVGRSSFYCLEYFPSQMLRTGNNFTFSYTFEDVPFHSSYAHSQSLDRLMNPLIDQYLYYLSRTNTPSGTTTQSRLQFSQAGASDIRDQSRNWLPGPCYRQQRVSKTSEDNNNSEYSWTGATKYHLNGRDSLVNPGPAMASHKDDEEKFFPQSGVLIFGKQGSEKTNVDIEKVMITDEEEIRTTNPVATEQYGSVSTNLQRGNRQAATADVNTQGVLPGMVWQDRDVYLQGPIWAKIPHTDGHFHPSPLMGGFGLKHPPPQILIKNTPVPANPSTTFSAAKFASFITQYSTGQVSVEIEWELQKENSKRWNPEIQYTSNYNKSVNVDFTVDTNGVYSEPRPIGTRYLTRNL

SEQ ID NO: 5276 - DNA, 2208 bp, synthetic construct
  misc_feature 1..2208: note = Description of Artificial Sequence: Synthetic polynucleotide
  source 1..2208: mol_type = other DNA
atggctgccgatggttatcttccagattggctcgaggacaacctctctgagggcattcgcgagtggtgggcgctgaaacctggagccccgaagcccaaagccaaccagcaaaagcaggacgacggccggggtctggtgcttcctggctacaagtacctcggacccttcaacggactcgacaagggggagcccgtcaacgcggcggacgcagcggccctcgagcacgacaaggcctacgaccagcagctgcaggcgggtgacaatccgtacctgcggtataaccacgccgacgccgagttccaggagcgtctgcaagaagatacgtcttttgggggcaacctcgggcgagcagtcttccaggccaagaagagggttctcgaaccttttggtctggttgaggaaggtgctaagacggctcctggaaagaaacgtccggtagagcagtcgccacaagagccagactcctcctcgggcattggcaagacaggccagcagcccgctaaaaagagactcaattttggtcagactggcgactcagagtcagtcccagaccctcaacctctcggagaaccaccagcagcccccacaagtttgggatctaatacaatggcttcaggcggtggcgcaccaatggcagacaataacgagggcgccgacggagtgggtaattcctcgggaaattggcattgcgattccacatggatgggcgacagagtcatcaccaccagcacccgaacctgggccctgcccacctacaacaaccacctctacaaacaaatttccagccaatcaggagcttcaaacgacaaccactactttggctacagcaccccttgggggtattttgactttaacagattccactgccacttttcaccacgtgactggcagcgactcattaacaacaactggggattccggcccaagaaactcaacttcaagctctttaacatccaggtcaaggaggtcacgcagaatgaaggcaccaagaccatcgccaataacctcaccagcaccatccaggtgtttacggactcggagtaccagctgccgtacgttctcggctctgcccaccagggctgcctgcctccgttcccggcggacgtgttcatgattccccagtacggctacctaacactcaacaacggtagtcaggccgtgggacgctcctccttctactgcctggaatactttccttcgcagatgctgagaaccggcaacaacttccagtttacttacaccttcgaggacgtgcctttccacagcagctacgcccacagccagagcttggaccggctgatgaatcctctgattgaccagtacctgtattacttgtctcggactcaaacaacaggaggcacgacaaatacgcagactctgggcttcagccaaggtgggcctaatacaatggccaatcaggcaaagaactggctgcctggaccctgttaccgccagcagcgagtatcaaagacatctgcggataacaacaacagtgaatactcgtggactggagctaccaagtaccacctcaatggcagagactctctggtgaatccgggcccggccatggcaagccacaaggacgatgaagaaaagttttttcctcagagcggggttctcatctttgggaagcaaggctcagagaaaacaaatgtggacattgaaaaggttatgattacagacgaagaggaaatcaggacaaccaatcccgtggctacggagcagtatggttctgtatctaccaacctccagagaggcaacagacaagcagctaccgcagatgtcaacacacagggcgttcttccaggcatggtctggcaggacagagatgtgtaccttcagggtcccatttgggccaaaattcctcacacagatggacactttcacccgtcccctcttatgggcggctttggactcaagaacccgcctcctcagatcctcatcaaaaacacgcctgttcctgcgaatcctccggcagagttttcagctacaaagtttgcttcattcatcacccaatactccacaggacaagtgagtgtggaaattgaatgggagctgcagaaagaaaacagcaagcgctggaatcccgaagtgcagtacacatccaattatgcaaaatctgccaacgttgattttactgtggacactaatggcgtgtattcagagcctcgccccattggcaccagatacctcacccgtaatctgtaa

SEQ ID NO: 5277 - protein, 735 aa, synthetic construct
  REGION 1..735: note = Description of Artificial Sequence: Synthetic polypeptide
MAADGYLPDWLEDNLSEGIREWWALKPGAPKPKANQQKQDDGRGLVLPGYKYLGPFNGLDKGEPVNAADAAALEHDKAYDQQLQAGDNPYLRYNHADAEFQERLQEDTSFGGNLGRAVFQAKKRVLEPFGLVEEGAKTAPGKKRPVEQSPQEPDSSSGIGKTGQQPAKKRLNFGQTGDSESVPDPQPLGEPPAAPTSLGSNTMASGGGAPMADNNEGADGVGNSSGNWHCDSTWMGDRVITTSTRTWALPTYNNHLYKQISSQSGASNDNHYFGYSTPWGYFDFNRFHCHFSPRDWQRLINNNWGFRPKKLNFKLFNIQVKEVTQNEGTKTIANNLTSTIQVFTDSEYQLPYVLGSAHQGCLPPFPADVFMIPQYGYLTLNNGSQAVGRSSFYCLEYFPSQMLRTGNNFQFTYTFEDVPFHSSYAHSQSLDRLMNPLIDQYLYYLSRTQTTGGTTNTQTLGFSQGGPNTMANQAKNWLPGPCYRQQRVSKTSADNNNSEYSWTGATKYHLNGRDSLVNPGPAMASHKDDEEKFFPQSGVLIFGKQGSEKTNVDIEKVMITDEEEIRTTNPVATEQYGSVSTNLQRGNRQAATADVNTQGVLPGMVWQDRDVYLQGPIWAKIPHTDGHFHPSPLMGGFGLKNPPPQILIKNTPVPANPPAEFSATKFASFITQYSTGQVSVEIEWELQKENSKRWNPEVQYTSNYAKSANVDFTVDTNGVYSEPRPIGTRYLTRNL

SEQ ID NO: 5278 - DNA, 2214 bp, synthetic construct; identical to SEQ ID NO: 5268
  misc_feature 1..2214: note = Description of Artificial Sequence: Synthetic polynucleotide
  source 1..2214: mol_type = other DNA

SEQ ID NO: 5279 - protein, 737 aa, synthetic construct; identical to SEQ ID NO: 5269
  REGION 1..737: note = Description of Artificial Sequence: Synthetic polypeptide

SEQ ID NO: 5280 - protein, 736 aa, synthetic construct; identical to SEQ ID NO: 5093
  REGION 1..736: note = Description of Artificial Sequence: Synthetic polypeptide

SEQ ID NO: 5281 - protein, 736 aa, synthetic construct
  REGION 1..736: note = Description of Artificial Sequence: Synthetic polypeptide
MAADGYLPDWLEDNLSEGIREWWDLKPGAPKPKANQQKQDDGRGLVLPGYKYLGPFNGLDKGEPVNAADAAALEHDKAYDQQLKAGDNPYLRYNHADAEFQERLQEDTSFGGNLGRAVFQAKKRVLEPLGLVEEGAKTAPGKKRPVEQSPQEPDSSSGIGKTGQQPAKKRLNFGQTGDSESVPDPQPLGEPPAAPSGLGPNTMASGGGAPMADNNEGADGVGNSSGNWHCDSTWLGDRVITTSTRTWALPTYNNHLYKQISNGTSGGSTNDNTYFGYSTPWGYFDFNRFHCHFSPRDWQRLINNNWGFRPKRLNFKLFNIQVKEVTTNEGTKTIANNLTSTVQVFTDSEYQLPYVLGSAHQGCLPPFPADVFMVPQYGYLTLNNGSQALGRSSFYCLEYFPSQMLRTGNNFQFSYTFEDVPFHSSYAHSQSLDRLMNPLIDQYLYYLVRTQTTGTGGTQTLAFSQAGPSSMANQARNWVPGPCYRQQRVSTTTNQNNNSNFAWTGAAKFKLNGRDSLMNPGVAMASHKDDEDRFFPSSGVLIFGKQGAGNDGVDYSQVLITDEEEIKATNPVATEEYGAVAINNQRANTQAQTGLVHNQGVIPGMVWQNRDVYLQGPIWAKIPHTDGNFHPSPLMGGFGLKHPPPQILIKNTPVPADPPLTFNQAKLNSFITQYSTGQVSVEIEWELQKENSKRWNPEIQYTSNYYKSTNVDFAVNTEGVYSEPRPIGTRYLTRNL

SEQ ID NO: 5282 - protein, 736 aa, synthetic construct
  REGION 1..736: note = Description of Artificial Sequence: Synthetic polypeptide
MAADGYLPDWLEDNLSEGIREWWDLKPGAPKPKANQQKQDDGRGLVLPGYKYLGPFNGLDKGEPVNAADAAALEHDKAYDQQLKAGDNPYLRYNHADAEFQERLQEDTSFGGNLGRAVFQAKKRVLEPLGLVEEGAKTAPGKKRPVEQSPQEPDSSSGIGKTGQQPAKKRLNFGQTGDSESVPDPQPLGEPPAAPSGLGPNTMASGGGAPMADNNEGADGVGNSSGNWHCDSTWLGDRVITTSTRTWALPTYNNHLYKQISNGTSGGSTNDNTYFGYSTPWGYFDFNRFHCHFSPRDWQRLINNNWGFRPKRLNFKLFNIQVKEVTTNEGTKTIANNLTSTVQVFTDSEYQLPYVLGSAHQGCLPPFPADVFMVPQYGYLTLNNGSQALGRSSFYCLEYFPSQMLRTGNNFQFSYTFEDVPFHSSYAHSQSLDRLMNPLIDQYLYYLVRTQTTGTGGTQTLAFSQAGPSSMANQARNWVPGPCYRQQRVSTTTNQNNNSNFAWTGAAKFKLNGRDSLMNPGVAMASHKDDEDAFFPSSGVLIFGKQGAGNDGVDYSQVLITDEEEIKATNPVATEEYGAVAINNQAANTQAQTGLVHNQGVIPGMVWQNRDVYLQGPIWAKIPHTDGNFHPSPLMGGFGLKHPPPQILIKNTPVPADPPLTFNQAKLNSFITQYSTGQVSVEIEWELQKENSKRWNPEIQYTSNYYKSTNVDFAVNTEGVYSEPRPIGTRYLTRNL

SEQ ID NO: 5283 - protein, 538 aa, synthetic construct
  REGION 1..538: note = Description of Artificial Sequence: Synthetic polypeptide
MRAAAGGNGGDAGQGAEGVGNASGDWHCDSTWSESHVTTTSTRTWVLPTYNNHLYLRLGSSNASDTFNGFSTPWGYFDFNRFHCHFSPRDWQRLINNHWGLRPKSMQVRIFNIQVKEVTTSNGETTVSNNLTSTVQIFADSTYELPYVMDAGQEGSLPPFPNDVFMVPQYGYCGLVTGGSSQNQTDRNAFYCLEYFPSQMLRTGNNFEMVYKFENVPFHSMYAHSQSLDRLMNPLLDQYLWELQSTTSGGTLNQGNSATNFAKLTKTNFSGYRKNWLPGPMMKQQRFSKTASQNYKIPQGRNNSLLHYETRTTLDGRWSNFAPGTAMATAANDATDFSQAQLIFAGPNITGNTTTDANNLMFTSEDELRATNPRDTDLFGHLATNQQNATTVPTVDDVDGVGVYPGMVWQDRDIYYQGPIWAKIPHTDGHFHPSPLIGGFGLKSPPPQIFIKNTPVPANPATTFSPARINSFITQYSTGQVAVKIEWEIQKERSKRWNPEVQFTSNYGAQDSLLWAPDNAGAYKEPRAIGSRYLTNHL

SEQ ID NO: 5284 - protein, 736 aa, synthetic construct
  REGION 1..736: note = Description of Artificial Sequence: Synthetic polypeptide
MSFVDHPPDWLESIGDGFREFLGLEAGPPKPKANQQKQDNARGLVLPGYKYLGPGNGLDKGDPVNFADEVAREHDLSYQKQLEAGDNPYLKYNHADAEFQEKLASDTSFGGNLGKAVFQAKKRILEPLGLVETPDKTAPAAKKRPLEQSPQEPDSSSGVGKKGKQPARKRLNFDDEPGAGDGPPPEGPSSGAMSTETEMRAAAGGNGGDAGQGAEGVGNASGDWHCDSTWSESHVTTTSTRTWVLPTYNNHLYLRLGSSNASDTFNGFSTPWGYFDFNRFHCHFSPRDWQRLINNHWGLRPKSMQVRIFNIQVKEVTTSNGETTVSNNLTSTVHIFADSTYELPYVMDAGQEGSLPPFPNDVFMVPQYGYCGLVTGGSSQNQTDRNAFYCLEYFPSQMLRTGNNFEMVYKFENVPFHSMYAHSQSLDRLMNPLLDQYLWELQSTTSGGTLNQGNSATNFAKLTNKNFSGYRKNWLPGPMMKQQRFSKTASQNYKIPQGGNNSLLHYETRTTLDRRWSNFAPGTAMATAANDATDFSQAQLIFAGPNITGNTTTDANNLMFTSEDELRATNPRDTDLFGHLATNQQNATTVPTVDDVDGVGVYPGMVWQDRDIYYQGPIWAKIPHTDGHFHPSPLIGGFGLKSPPPQIFIKNTPVPANPATTFSPARINSFITQYSTGQVAVKIEWEIQKERSKRWNPEVQFTSNYGAQDSLLWAPDNAGAYKEPRAIGSRYLTNHL

SEQ ID NO: 5285 - protein, 736 aa, synthetic construct
  REGION 1..736: note = Description of Artificial Sequence: Synthetic polypeptide
MSFVDHPPDWLESIGDGFREFLGLEAGPPKPKANQQKQDNARGLVLPGYKYLGPGNGLDKGDPVNFADEVAREHDLSYQKQLEAGDNPYLKYNHADAEFQEKLASDTSFGGNLGKAVFQAKKRILEPLGLVETPDKTAPAAKKRPLEQSPQEPDSSSGVGKKGKQPARKRLNFDDEPGAGDGPPPEGPSSGAMSTETEMRAAAGGNGGDAGQGAEGVGNASGDWHCDSTWSESHVTTTSTRTWVLPTYNNHLYLRLGSSNASDTFNGFSTPWGYFDFNRFHCHFSPRDWQRLINNHWGLRPKSMQVRIFNIQVKEVTTSNGETTVSNNLTSTVQIFADSTYELPYVMDAGQEGSLPPFPNDVFMVPQYGYCGLVTGGSSQNQTDRNAFYCLEYFPSQMLRTGNNFEMVYKFENVPFHSMYAHSQSLDRLMNPLLDQYLWELQSTTSGGTLNQGNSATNFAKLTKTNFSGYRKNWLPGPMMKQQRFSKTASQNYKIPQGRNNSLLHYETRTTLDGRWSNFAPGTAMATAANDATDFSQAQLIFAGPNITGNTTTDANNLMFTSEDELRATNPRDTDLFGHLATNQQNATTVPTVDDVDGVGVYPGMVWQDRDIYYQGPIWAKIPHTDGHFHPSPLIGGFGLKSPPPQIFIKNTPVPANPATTFSPARINSFITQYSTGQVAVKIEWEIQKERSKRWNPEVQFTSNYGAQDSLLWAPDNAGAYKEPRAIGSRYLTNHL

SEQ ID NO: 5286 - DNA, 2214 bp, synthetic construct
  misc_feature 1..2214: note = Description of Artificial Sequence: Synthetic polynucleotide
  source 1..2214: mol_type = other DNA
atggctgccgatggttatcttccagattggctcgaggacactctctctgaaggaataagacagtggtggaagctcaaacctggcccaccaccaccaaagcccgcagagcggcataaggacgacagcaggggtcttgtgcttcctgggtacaagtacctcggacccttcaacggactcgacaagggagagccggtcaacgaggcagacgccgcggccctcgagcacgacaaagcctacgaccggcagctcgacagcggagacaacccgtacctcaagtacaaccacgccgacgcggagtttcaggagcgccttaaagaagatacgtcttttgggggcaacctcgggcgagcagtcttccaggccaaaaagaggcttcttgaacctcttggtctggttgaggaagcggctaagacggctcctggaaagaagaggcctgtagagcagtctcctcaggaaccggactcctcctcgggcatcggcaagacaggccagcagcccgctaaaaagagactcaatttcggtcagactggcgacacagagtcagtcccagaccctcaaccaatcggagaacctcccgcagccccctcaggtgtgggatctcttacaatggcttcaggtggtggcgcaccagtggcagacaataacgaaggtgccgatggagtgggtagttcctcgggaaattggcattgcgattcccaatggctgggggacagagtcatcaccaccagcacccgaacctgggccctgcccacctacaacaatcacctctacaagcaaatctccaacgggacatcgggaggagccaccaacgacaacacctacttcggctacagcaccccctgggggtattttgactttaacagattccactgccacttttcaccacgtgactggcagcgactcatcaacaacaactggggattccggcccaagagactcagcttcaagctcttcaacatccaggtcaaggaggtcacgcagaatgaaggcaccaagaccatcgccaataaccttaccagcacggtccaggtcttcacggactcggagtaccagctgccgtacgttctcggctctgcccaccagggctgcctgcctccgttcccggcggacgtgttcatgattccccagtacggctacctaacactcaacaacggtagtcaggccgtgggacgctcctccttctactgcctggaatactttccttcgcagatgctgagaaccggcaacaacttccagtttacttacaccttcgaggacgtgcctttccacagcagctacgcccacagccagagcttggaccggctgatgaatcctctgattgaccagtacctgtactacttgtctcggactcaaacaacaggaggcacggcaaatacgcagactctgggcttcagccaaggtgggcctaatacaatggccaatcaggcaaagaactggctgccaggaccctgttaccgccaacaacgcgtctcaacgacaaccgggcaaaacaacaatagcaactttgcctggactgctgggaccaaataccatctgaatggaagaaattcattggctaatcctggcatcgctatggcaacacacaaagacgacaaggagcgtttttttcccagtaacgggatcctgatttttggcaaacaaaatgctgccagagacaatgcggattacagcgatgtcatgctcaccagcgaggaagaaatcaaaaccactaaccctgtggctacagaggaatacggtatcgtggcagataacttgcagcagcaaaacacggctcctcaaattggaactgtcaacagccagggggccttacccggtatggtttggcagaaccgggacgtgtacctgcagggtcccatctgggccaagattcctcacacggacggcaacttccacccgtctccgctgatgggcggctttggcctgaaacatcctccgcctcagatcctgatcaagaacacgcctgtacctgcggatcctccgaccaccttcaaccagtcaaagctgaactctttcatcacgcaatacagcaccggacaggtcagcgtggaaattgaatgggagctgcagaaggaaaacagcaagcgctggaaccccgagatccagtacacctccaactactacaaatctacaagtgtggactttgctgttaatacagaaggcgtgtactctgaaccccaccccattggcacccgttacctcacccgtcccctgtaa

SEQ ID NO: 5287 - protein, 737 aa, synthetic construct
  REGION 1..737: note = Description of Artificial Sequence: Synthetic polypeptide
MAADGYLPDWLEDTLSEGIRQWWKLKPGPPPPKPAERHKDDSRGLVLPGYKYLGPFNGLDKGEPVNEADAAALEHDKAYDRQLDSGDNPYLKYNHADAEFQERLKEDTSFGGNLGRAVFQAKKRLLEPLGLVEEAAKTAPGKKRPVEQSPQEPDSSSGIGKTGQQPAKKRLNFGQTGDTESVPDPQPIGEPPAAPSGVGSLTMASGGGAPVADNNEGADGVGSSSGNWHCDSQWLGDRVITTSTRTWALPTYNNHLYKQISNGTSGGATNDNTYFGYSTPWGYFDFNRFHCHFSPRDWQRLINNNWGFRPKRLSFKLFNIQVKEVTQNEGTKTIANNLTSTVQVFTDSEYQLPYVLGSAHQGCLPPFPADVFMIPQYGYLTLNNGSQAVGRSSFYCLEYFPSQMLRTGNNFQFTYTFEDVPFHSSYAHSQSLDRLMNPLIDQYLYYLSRTQTTGGTANTQTLGFSQGGPNTMANQAKNWLPGPCYRQQRVSTTTGQNNNSNFAWTAGTKYHLNGRNSLANPGIAMATHKDDKERFFPSNGILIFGKQNAARDNADYSDVMLTSEEEIKTTNPVATEEYGIVADNLQQQNTAPQIGTVNSQGALPGMVWQNRDVYLQGPIWAKIPHTDGNFHPSPLMGGFGLKHPPPQILIKNTPVPADPPTTFNQSKLNSFITQYSTGQVSVEIEWELQKENSKRWNPEIQYTSNYYKSTSVDFAVNTEGVYSEPHPIGTRYLTRPL

SEQ ID NO: 5288 - protein, 736 aa, synthetic construct
  REGION 1..736: note = Description of Artificial Sequence: Synthetic polypeptide
MAADGYLPDWLEDNLSEGIREWWDLKPGAPKPKANQQKQDDGRGLVLPGYKYLGPFNGLDKGEPVNAADAAALEHDKAYDQQLKAGDNPYLRYNHADAEFQERLQEDTSFGGNLGRAVFQAKKRVLEPLGLVEEGAKTAPGKKRPVEQSPQEPDSSSGIGKTGQQPAKKRLNFGQTGDTESVPDPQPIGEPPAAPSGVGSLTMASGGGAPVADNNEGADGVGSSSGNWHCDSQWLGDRVITTSTRTWALPTYNNHLYKQISSASTGASNDNHYFGYSTPWGYFDFNRFHCHFSPRDWQRLINNNWGFRPKRLNFKLFNIQVKEVTDNNGVKTIANNLTSTVQVFTDSDYQLPYVLGSAHQGCLPPFPADVFMIPQYGYLTLNNGSQAVGRSSFYCLEYFPSQMLRTGNNFQFTYTFEDVPFHSSYAHSQSLDRLMNPLIDQYLYYLSRTQTTGGTANTQTLGFSQGGPNTMANQAKNWLPGPCYRQQRVSTTTGQNNNSNFAWTAGTKYHLNGRNSLANPGIAMATHKDDKERFFPSNGILIFGKQNAARDNADYSDVMLTSEEEIKTTNPVATEEYGIVADNLQQQNTAPQIGTVNSQGALPGMVWQNRDVYLQGPIWAKIPHTDGNFHPSPLMGGFGLKHPPPQILIKNTPVPADPPTTFNQSKLNSFITQYSTGQVSVEIEWELQKENSKRWNPEIQYTSNYYKSTSVDFAVNTEGVYSEPHPIGTRYLTRPL

SEQ ID NO: 5289 - protein, 736 aa, synthetic construct
  REGION 1..736: note = Description of Artificial Sequence: Synthetic polypeptide
MAADGYLPDWLEDTLSEGIRQWWKLKPGPPPPKPAERHKDDSRGLVLPGYKYLGPFNGLDKGEPVNEADAAALEHDKAYDRQLDSGDNPYLKYNHADAEFQERLQGDTSFGGNLGRAVFQAKKRVLEPLGLVEEGAKTAPGKKRPVEQSPQEPDSSSGIGETGQQPAKKRLNFGQTGDSESVPDPQPLGEPPATPAAVGPTTMASGGGAPMADNNEGADGVGSSSGNWHCDSQWLGDRVITTSTRTWALPTYNNHLYKQISSASTGASNDNHYFGYSTPWGYFDFNRFHCHFSPRDWQRLINNNWGFRPKRLSFKLFNIQVKEVTDNNGVKTIANNLTSTVQVFTDSEYQLPYVLGSAHQGCLPPFPADVFMIPQYGYLTLNNGSQAVGRSSFYCLEYFPSQMLRTGNNFTFSYTFEDVPFHSSYAHSQSLDRLMNPLIDQYLYYLSRTQTTGGTANTQTLGFSQGGPNTMANQAKNWLPGPCYRQQRVSTTTGQNNNSNFAWTAGTKYHLNGRNSLANPGIAMATHKDDKERFFPSNGILIFGKQNAARDNADYSDVMLTSEEEIKTTNPVATEEYGIVADNLQQQNTAPQIGTVNSQGALPGMVWQNRDVYLQGPIWAKIPHTDGNFHPSPLMGGFGLKHPPPQILIKNTPVPADPPTTFNQSKLNSFITQYSTGQVSVEIEWELQKENSKRWNPEIQYTSNYYKSTSVDFAVNTEGVYSEPHPIGTRYLTRPL

SEQ ID NO: 5290 - DNA, 2181 bp, synthetic construct
  misc_feature 1..2181: note = Description of Artificial Sequence: Synthetic polynucleotide
  source 1..2181: mol_type = other DNA
atgtcttttgttgatcaccctccagattggttggaagaagttggtgaaggtcttcgcgagtttttgggccttgaagcgggcccaccgaaaccaaaacccaatcagcagcatcaagatcaagcccgtggtcttgtgctgcctggttataactatctcggacccggaaacggtctcgatcgaggagagcctgtcaacagggcagacgaggtcgcgcgagagcacgacatctcgtacaacgagcagcttgaggcgggagacaacccctacctcaagtacaaccacgcggacgccgagtttcaggagaagctcgccgacgacacatccttcgggggaaacctcggaaaggcagtctttcaggccaagaaaagggttctcgaaccttttggcctggttgaagagggtgctaagacggcccctaccggaaagcggatagacgaccactttccaaaaagaaagaaggctcggaccgaagaggactccaagccttccacctcgtcagacgccgaagctggacccagcggatcccagcagctgcaaatcccagcacaaccagcctcaagtttgggagctgatacaatgtctgcgggaggtggcggcccattgggcgacaataaccaaggtgccgatggagtgggcaatgcctcgggagattggcattgcgattccacgtggatgggggacagagtcgtcaccaagtccacccgcacctgggtgctgcccagctacaacaaccaccagtaccgagagatcaaaagcggctccgtcgacggaagcaacgccaacgcctactttggatacagcaccccctgggggtactttgactttaaccgcttccacagccactggagcccccgagactggcaaagactcatcaacaactattggggcttcagaccccggtctctcagagtcaaaatcttcaacatccaagtcaaagaggtcacggtgcaggactccaccaccaccatcgccaacaacctcacctccaccgtccaagtgtttacggacgacgactaccaactcccgtacgtcgtcggcaacgggaccgagggatgcctgccggccttccccccgcaggtctttacgctgccgcagtacggctacgcgacgctgaaccgagacaacggagacaacccgacagagcggagcagcttcttttgcctagagtactttcccagcaagatgctgaggacgggcaacaactttgagtttacctacagctttgaagaggtgcccttccactgcagcttcgccccgagccagaacctctttaagctggccaacccgctggtggaccagtacctgtaccgcttcgtgagcacctcggccacgggcgccatccagttccaaaagaacctggcgggcagatacgccaacacctacaaaaactggttcccggggcccatgggccgaacccagggctggaacacgagctctggggtcagcagcaccaacagagtcagcgtcaacaacttttccgtctcaaaccggatgaacctggagggggccagctaccaagtgaacccccagcccaacgggatgacaaacacgctccaaggcagcaaccgctacgcgctggaaaacaccatgatcttcaacgctcaaaacgccacgccgggaactacctcggtgtacccagaggacaatctactgctgaccagcgagagcgagactcagcccgtcaaccgggtggcttacaacacgggcggtcagatggccaccaacgcccagaacgccaccacggctcccacggtcgggacctacaacctccaggaagtgcttcctggcagcgtatggatggagagggacgtgtacctccaaggacccatctgggccaagatcccagagacgggggcgcactttcacccctctccggccatgggcggattcggactcaaacacccgccgcccatgatgctcatcaaaaacacgccggtgcccggcaacatcaccagcttctcggacgtgcccgtcagcagcttcatcacccagtacagcaccgggcaggtcaccgtggagatggaatgggagctcaaaaaggaaaactccaagaggtggaacccagagatccagtacaccaacaactacaacgacccccagtttgtggactttgctccagacggctccggcgaatacagaaccaccagagccatcggaacccgatacctcacccgacccctt

SEQ ID NO: 5291 - protein, 726 aa, synthetic construct
  REGION 1..726: note = Description of Artificial Sequence: Synthetic polypeptide
MSFVDHPPDWLEEVGEGLREFLGLEAGPPKPKPNQQHQDQARGLVLPGYNYLGPGNGLDRGEPVNRADEVAREHDISYNEQLEAGDNPYLKYNHADAEFQEKLADDTSFGGNLGKAVFQAKKRVLEPFGLVEEGAKTAPTGKRIDDHFPKRKKARTEEDSKPSTSSDAEAGPSGSQQLQIPAQPASSLGADTMSAGGGGPLGDNNQGADGVGNASGDWHCDSTWMGDRVVTKSTRTWVLPSYNNHQYREIKSGSVDGSNANAYFGYSTPWGYFDFNRFHSHWSPRDWQRLINNYWGFRPRSLRVKIFNIQVKEVTVQDSTTTIANNLTSTVQVFTDDDYQLPYVVGNGTEGCLPAFPPQVFTLPQYGYATLNRDNGDNPTERSSFFCLEYFPSKMLRTGNNFEFTYSFEEVPFHCSFAPSQNLFKLANPLVDQYLYRFVSTSATGAIQFQKNLAGRYANTYKNWFPGPMGRTQGWNTSSGSSTNRVSVNNFSVSNRMNLEGASYQVNPQPNGMTNTLQGSNRYALENTMIFNAQNATPGTTSVYPEDNLLLTSESETQPVNRVAYNTGGQMATNAQNATTAPTVGTYNLQEVLPGSVWMERDVYLQGPIWAKIPETGAHFHPSPAMGGFGLKHPPPMMLIKNTPVPGNITSFSDVPVSSFITQYSTGQVTVEMEWELKKENSKRWNPEIQYTNNYNDPQFVDFAPDGSGEYRTTRAIGTRYLTRPL

SEQ ID NO: 5292 - protein, 735 aa, synthetic construct
  REGION 1..735: note = Description of Artificial Sequence: Synthetic polypeptide
MAADGYLPDWLEDTLSEGIRQWWKLKPGPPPPKPAERHKDDSRGLVLPGYKYLGPFNGLDKGEPVNEADAAALEHDKAYDRQLDSGDNPYLKYNHADAEFQERLKEDTSFGGNLGRAVFQAKKRILEPLGLVEEPVKTAPGKKRPVEHSPAEPDSSSGTGKSGQQPARKRLNFGQTGDADSVPDPQPLGQPPAAPSGLGTNTMASGSGAPMADNNEGADGVGNSSGNWHCDSTWMGDRVITTSTRTWALPTYNNHLYKQISSQSGASNDNHYFGYSTPWGYFDFNRFHCHFSPRDWQRLINNNWGFRPKRLSFKLFNIQVKEVTQNDGTTTIANNLTSTVQVFTDSEYQLPYVLGSAHQGCLPPFPADVFMVPQYGYLTLNNGSQAVGRSSFYCLEYFPSQMLRTGNNFTFSYTFEDVPFHSSYAHSQSLDRLMNPLIDQYLYYLSRTNTPSGTTTMSRLQFSQAGASDIRDQSRNWLPGPCYRQQRVSKTAADNNNSDYSWTGATKYHLNGRDSLVNPGPAMASHKDDEEKYFPQSGVLIFGKQDSGKTNVDIEKVMITDEEEIRTTNPVATEQYGSVSTNLQSGNTQAATSDVNTQGVLPGMVWQDRDVYLQGPIWAKIPHTDGHFHPSPLMGGFGLKHPPPQILIKNTPVPANPSTTFSAAKFASFITQYSTGQVSVEIEWELQKENSKRWNPEIQYTSNYNKSVNVDFTVDTNGVYSEPRPIGTRYLTRNL

SEQ ID NO: 5293 - DNA, 1803 bp, Bovine adeno-associated virus
  source 1..1803: mol_type = genomic DNA
acggcgcctgcggcaaaaaagaggcctctagagcagagtcctcaagagccagactcctcgagcggagttggcaagaaaggcaaacagcctgccagaaagagactcaactttgacgacgaacctggagccggagacgggcctcccccagaaggaccatcttccggagctatgtctactgagactgaaatgcgtgcagcagctggcggaaatggtggcgatgcgggacaaggtgccgagggagtgggtaatgcctccggtgattggcattgcgattccacttggtcagagagccacgtcaccaccacctcaacccgcacctgggtcctgccgacctacaacaaccacctgtacctgcggctcggctcgagcaacgccagcgacaccttcaacggattctccaccccctggggatactttgactttaaccgcttccactgccacttctcgccaagagactggcaaaggctcatcaacaaccactggggactgcgccccaaaagcatgcaagtccgcatcttcaacatccaagttaaggaggtcacgacgtctaacggggagacgaccgtatccaacaacctcaccagcacggtccagatctttgcggacagcacgtacgagctcccgtacgtgatggatgcaggtcaggagggcagcttgcctcctttccccaacgacgtgttcatggtgcctcagtacgggtactgcggactggtaaccggaggcagctctcaaaaccagacagacagaaatgccttctactgtctggagtactttcccagccagatgctgagaaccggaaacaactttgagatggtgtacaagtttgaaaacgtgcccttccactccatgtacgctcacagccagagcctggataggctgatgaacccgctgctggaccagtacctgtgggagctccagtctaccacctctggaggaactctcaaccagggcaattcagccaccaactttgccaagctgaccaaaacaaacttttctggctaccgcaaaaactggctcccggggcccatgatgaagcagcagagattctccaagactgccagtcaaaactacaagattccccagggaagaaacaacagtctgctccattatgagaccagaactaccctcgacggaagatggagcaattttgccccgggaacggccatggcaaccgcagccaacgacgccaccgacttctctcaggcccagctcatctttgcggggcccaacatcaccggcaacaccaccacagatgccaataacctgatgttcacttcagaagatgaacttagggccaccaacccccgggacactgacctgtttggccacctggcaaccaaccagcaaaacgccaccaccgttcctaccgtagacgacgtggacggagtcggcgtgtacccgggaatggtgtggcaggacagagacatttactaccaagggcccatttgggccaaaattccacacacggatggacactttcacccgtctcctctcattggcggatttggactgaaaagcccgcctccacaaatattcatcaaaaacactcctgtacccgccaatcccgcaacgaccttctctccggccagaatcaacagcttcatcacccagtacagcaccggacaggtggctgtcaaaatagaatgggaaatccagaaggagcggtccaagagatggaacccagaggtccagttcacgtccaactacggagcacaggactcgcttctctgggctcccgacaacgccggagcctacaaagagcccagggccattggatcccgatacctcaccaaccacctctag

SEQ ID NO: 5294 - DNA, 1617 bp, Bovine adeno-associated virus
  source 1..1617: mol_type = genomic DNA
atgcgtgcagcagctggcggaaatggtggcgatgcgggacaaggtgccgagggagtgggtaatgcctccggtgattggcattgcgattccacttggtcagagagccacgtcaccaccacctcaacccgcacctgggtcctgccgacctacaacaaccacctgtacctgcggctcggctcgagcaacgccagcgacaccttcaacggattctccaccccctggggatactttgactttaaccgcttccactgccacttctcgccaagagactggcaaaggctcatcaacaaccactggggactgcgccccaaaagcatgcaagtccgcatcttcaacatccaagttaaggaggtcacgacgtctaacggggagacgaccgtatccaacaacctcaccagcacggtccagatctttgcggacagcacgtacgagctcccgtacgtgatggatgcaggtcaggagggcagcttgcctcctttccccaacgacgtgttcatggtgcctcagtacgggtactgcggactggtaaccggaggcagctctcaaaaccagacagacagaaatgccttctactgtctggagtactttcccagccagatgctgagaaccggaaacaactttgagatggtgtacaagtttgaaaacgtgcccttccactccatgtacgctcacagccagagcctggataggctgatgaacccgctgctggaccagtacctgtgggagctccagtctaccacctctggaggaactctcaaccagggcaattcagccaccaactttgccaagctgaccaaaacaaacttttctggctaccgcaaaaactggctcccggggcccatgatgaagcagcagagattctccaagactgccagtcaaaactacaagattccccagggaagaaacaacagtctgctccattatgagaccagaactaccctcgacggaagatggagcaattttgccccgggaacggccatggcaaccgcagccaacgacgccaccgacttctctcaggcccagctcatctttgcggggcccaacatcaccggcaacaccaccacagatgccaataacctgatgttcacttcagaagatgaacttagggccaccaacccccgggacactgacctgtttggccacctggcaaccaaccagcaaaacgccaccaccgttcctaccgtagacgacgtggacggagtcggcgtgtacccgggaatggtgtggcaggacagagacatttactaccaagggcccatttgggccaaaattccacacacggatggacactttcacccgtctcctctcattggcggatttggactgaaaagcccgcctccacaaatattcatcaaaaacactcctgtacccgccaatcccgcaacgaccttctctccggccagaatcaacagcttcatcacccagtacagcaccggacaggtggctgtcaaaatagaatgggaaatccagaaggagcggtccaagagatggaacccagaggtccagttcacgtccaactacggagcacaggactcgcttctctgggctcccgacaacgccggagcctacaaagagcccagggccattggatcccgatacctcaccaaccacctctag

SEQ ID NO: 5295 - DNA, 1173 bp, Bovine adeno-associated virus
  source 1..1173: mol_type = genomic DNA
atggcgctggtaagctggctggtggaacatggcatcacttccgagaagcagtggattcaggagaatcaggagagctacctgtccttcaactccacgggaaactctcggagccagattaaagccgcgcttgacaacgcgtcaaaaattatgagtctgaccaaatctgcctcagactatctcgtgggacagactgttccagaggacatttctgaaaacagaatctggcagatttttgatctcaacggctacgacccggcatacgcgggctctgttctctacggctggtgcactcgcgcctttggaaagaggaacaccgtctggctgtatggacccgcgaccaccggaaagaccaacatcgcggaagccatctctcacaccgtgcccttttatggctgtgtgaactggactaatgagaactttccctttaatgactgtgtggaaaaaatgttgatctggtgggaggagggaaagatgaccagcaaggtggtggaacccgccaaggccatcttgggggggtctagagtacgagtggatcaaaaatgtaaatcctctgtacaagtagactctaccccggtgattatcacctccaatactaacatgtgtgtggtggtggatgggaactccacgacctttgaacaccagcagccgctggaagaccgcatgttcagatttgaactcatgcggcggctcccgccagattttggcaagattaccaagcaggaagtcaaagacttttttgcttgggcaaaggtcaaccaggtgccggtgactcacgagtttatggttcccaagaaagtggcgggaactgagagggcggagacttctagaaaacgcccactggatgacgtcaccaataccaactataaaagtccggagaagcgggcccggctctcagttgttcctgagacgcctcgcagttcagacgtgcctgtagagcccgctcctctgcgacctctcaactggtcttccaggtatgaatgcagatgtgactatcatgctaaatttgactctgtaacgggggaatgtgacgagtgtgaatatttgaatcggggcaaaaatggctgtatctttcataatgctacacattgtcaaatttgtcacgctgttcctccatgggaaaaggaaaatgtgtcagattttaatgattttgatgactgtaataaagagcagtaa

SEQ ID NO: 5296 - DNA, 1833 bp, Bovine adeno-associated virus
  source 1..1833: mol_type = genomic DNA
atggctaccttctatgaagtcattgttcgcgttccatttgatgtggaagagcacctgcctggaatttctgacaactttgtagactgggtaactggtcaaatttgggagctgcctcccgagtcagatttgaatttgactctgattgagcagcctcagctgacggtggctgacagaattcgccgcgtgttcctgtacgagtggaacaaattttccaagcaggagagcaaattctttgtgcagtttgaaaagggatctgaatattttcatctgcacacgctcgtggagacctccggcatctcttctatggtccttggccgctacgtgagtcagattcgcgcccagctggtgaaggtggtgttccagaacattgagccgcggattaacgactgggtcgccatcaccaaggtaaagaagggcggagccaataaggtggtggattctgggtatattcccgcctacctgctgccgaaggtccaaccagagcttcagtgggcgtggactaacctcgaagagtataaattggccgccctcaatctggaggagcgcaaacggctcgtcgctcagtttcagcttgagtcctcgcagcgctcgcaagaggcatcttcccagagggacgtttcggctgacccggtcatcaagagcaagacttcccagaaatacatggcgctggtaagctggctggtggaacatggcatcacttccgagaagcagtggattcaggagaatcaggagagctacctgtccttcaactccacgggaaactctcggagccagattaaagccgcgcttgacaacgcgtcaaaaattatgagtctgaccaaatctgcctcagactatctcgtgggacagactgttccagaggacatttctgaaaacagaatctggcagatttttgatctcaacggctacgacccggcatacgcgggctctgttctctacggctggtgcactcgcgcctttggaaagaggaacaccgtctggctgtatggacccgcgaccaccggaaagaccaacatcgcggaagccatctctcacaccgtgcccttttatggctgtgtgaactggactaatgagaactttccctttaatgactgtgtggaaaaaatgttgatctggtgggaggagggaaagatgaccagcaaggtggtggaacccgccaaggccatcttgggggggtctagagtacgagtggatcaaaaatgtaaatcctctgtacaagtagactctaccccggtgattatcacctccaatactaacatgtgtgtggtggtggatgggaactccacgacctttgaacaccagcagccgctggaagaccgcatgttcagatttgaactcatgcggcggctcccgccagattttggcaagattaccaagcaggaagtcaaagacttttttgcttgggcaaaggtcaaccaggtgccggtgactcacgagtttatggttcccaagaaagtggcgggaactgagagggcggagacttctagaaaacgcccactggatgacgtcaccaataccaactataaaagtccggagaagcgggcccggctctcagttgttcctgagacgcctcgcagttcagacgtgcctgtagagcccgctcctctgcgacctctcaactggtcttccaggtatgaatgcagatgtgactatcatgctaaatttgactctgtaacgggggaatgtgacgagtgtgaatatttgaatcggggcaaaaatggctgtatctttcataatgctacacattgtcaaatttgtcacgctgttcctccatgggaaaaggaaaatgtgtcagattttaatgattttgatgactgtaataaagagcagtaa

SEQ ID NO: 5297 - DNA, 2211 bp, Bovine adeno-associated virus
  source 1..2211: mol_type = genomic DNA
atgtcttttgttgaccaccctccagattggttggaatcgatcggcgacggctttcgtgaatttctcggccttgaggcgggtcccccgaaacccaaggccaatcaacagaagcaagataacgctcgaggtcttgtgcttcctgggtacaagtatcttggtcctgggaacggccttgataagggcgatcctgtcaattttgctgacgaggttgcccgagagcacgacctctcctaccagaaacagcttgaggcgggcgataacccttacctcaagtacaaccacgcggacgcagagtttcaggagaaactcgcttctgacacttcttttgggggaaaccttgggaaggctgttttccaggctaaaaagaggattctcgaacctcttggcctggttgagacgccggataaaacggcgcctgcggcaaaaaagaggcctctagagcagagtcctcaagagccagactcctcgagcggagttggcaagaaaggcaaacagcctgccagaaagagactcaactttgacgacgaacctggagccggagacgggcctcccccagaaggaccatcttccggagctatgtctactgagactgaaatgcgtgcagcagctggcggaaatggtggcgatgcgggacaaggtgccgagggagtgggtaatgcctccggtgattggcattgcgattccacttggtcagagagccacgtcaccaccacctcaacccgcacctgggtcctgccgacctacaacaaccacctgtacctgcggctcggctcgagcaacgccagcgacaccttcaacggattctccaccccctggggatactttgactttaaccgcttccactgccacttctcgccaagagactggcaaaggctcatcaacaaccactggggactgcgccccaaaagcatgcaagtccgcatcttcaacatccaagttaaggaggtcacgacgtctaacggggagacgaccgtatccaacaacctcaccagcacggtccagatctttgcggacagcacgtacgagctcccgtacgtgatggatgcaggtcaggagggcagcttgcctcctttccccaacgacgtgttcatggtgcctcagtacgggtactgcggactggtaaccggaggcagctctcaaaaccagacagacagaaatgccttctactgtctggagtactttcccagccagatgctgagaaccggaaacaactttgagatggtgtacaagtttgaaaacgtgcccttccactccatgtacgctcacagccagagcctggataggctgatgaacccgctgctggaccagtacctgtgggagctccagtctaccacctctggaggaactctcaaccagggcaattcagccaccaactttgccaagctgaccaaaacaaacttttctggctaccgcaaaaactggctcccggggcccatgatgaagcagcagagattctccaagactgccagtcaaaactacaagattccccagggaagaaacaacagtctgctccattatgagaccagaactaccctcgacggaagatggagcaattttgccccgggaacggccatggcaaccgcagccaacgacgccaccgacttctctcaggcccagctcatctttgcggggcccaacatcaccggcaacaccaccacagatgccaataacctgatgttcacttcagaagatgaacttagggccaccaacccccgggacactgacctgtttggccacctggcaaccaaccagcaaaacgccaccaccgttcctaccgtagacgacgtggacggagtcggcgtgtacccgggaatggtgtggcaggacagagacatttactaccaagggcccatttgggccaaaattccacacacggatggacactttcacccgtctcctctcattggcggatttggactgaaaagcccgcctccacaaatattcatcaaaaacactcctgtacccgccaatcccgcaacgaccttctctccggccagaatcaacagcttcatcacccagtacagcaccggacaggtggctgtcaaaatagaatgggaaatccagaaggagcggtccaagagatggaacccagaggtccagttcacgtccaactacggagcacaggactcgcttctctgggctcccgacaacgccggagcctacaaagagcccagggccattggatcccgatacctcaccaaccacctctag

SEQ ID NO: 5298 - DNA, 4694 bp, Bovine adeno-associated virus
  source 1..4694: mol_type = genomic DNA
gtggcactcccccccctgtcgcgttcgctcgttcgctggctcgattgggggggtggcagctcaaagagctgccagacgacggccctctgggccgtcgcccccccaatcgagccagcgaacgagcgaacgcgacaggggggggagtgccacactctctagcaagggggttttgtaggtggtgatgtcattgttgatgtcattatagttgtcacgcgatagttaatgattaacagtcatgtgatgtgtgttatccaataggatgaaagcgcgcgaatgagatctcgcgagacttccggggtataaaaggggtgagtgaacgagcccgccgccattctctgctctggactgctagaggaccctcgctgccatggctaccttctatgaagtcattgttcgcgttccatttgatgtggaagagcacctgcctggaatttctgacaactttgtagactgggtaactggtcaaatttgggagctgcctcccgagtcagatttgaatttgactctgattgagcagcctcagctgacggtggctgacagaattcgccgcgtgttcctgtacgagtggaacaaattttccaagcaggagagcaaattctttgtgcagtttgaaaagggatctgaatattttcatctgcacacgctcgtggagacctccggcatctcttctatggtccttggccgctacgtgagtcagattcgcgcccagctggtgaaggtggtgttccagaacattgagccgcggattaacgactgggtcgccatcaccaaggtaaagaagggcggagccaataaggtggtggattctgggtatattcccgcctacctgctgccgaaggtccaaccagagcttcagtgggcgtggactaacctcgaagagtataaattggccgccctcaatctggaggagcgcaaacggctcgtcgctcagtttcagcttgagtcctcgcagcgctcgcaagaggcatcttcccagagggacgtttcggctgacccggtcatcaagagcaagacttcccagaaatacatggcgctggtaagctggctggtggaacatggcatcacttccgagaagcagtggattcaggagaatcaggagagctacctgtccttcaactccacgggaaactctcggagccagattaaagccgcgcttgacaacgcgtcaaaaattatgagtctgaccaaatctgcctcagactatctcgtgggacagactgttccagaggacatttctgaaaacagaatctggcagatttttgatctcaacggctacgacccggcatacgcgggctctgttctctacggctggtgcactcgcgcctttggaaagaggaacaccgtctggctgtatggacccgcgaccaccggaaagaccaacatcgcggaagccatctctcacaccgtgcccttttatggctgtgtgaactggactaatgagaactttccctttaatgactgtgtggaaaaaatgttgatctggtgggaggagggaaagatgaccagcaaggtggtggaacccgccaaggccatcttgggggggtctagagtacgagtggatcaaaaatgtaaatcctctgtacaagtagactctaccccggtgattatcacctccaatactaacatgtgtgtggtggtggatgggaactccacgacctttgaacaccagcagccgctggaagaccgcatgttcagatttgaactcatgcggcggctcccgccagattttggcaagattaccaagcaggaagtcaaagacttttttgcttgggcaaaggtcaaccaggtgccggtgactcacgagtttatggttcccaagaaagtggcgggaactgagagggcggagacttctagaaaacgcccactggatgacgtcaccaataccaactataaaagtccggagaagcgggcccggctctcagttgttcctgagacgcctcgcagttcagacgtgcctgtagagcccgctcctctgcgacctctcaactggtcttccaggtatgaatgcagatgtgactatcatgctaaatttgactctgtaacgggggaatgtgacgagtgtgaatatttgaatcggggcaaaaatggctgtatctttcataatgctacacattgtcaaatttgtcacgctgttcctccatgggaaaaggaaaatgtgtcagattttaatgattttgatgactgtaataaagagcagtaaataaagtgagtagtcatgtcttttgttgaccaccctccagattggttggaatcgatcggcgacggctttcgtgaatttctcggccttgaggcgggtcccccgaaacccaaggccaatcaacagaagcaagataacgctcgaggtcttgtgcttcctgggtacaagtatcttggtcctgggaacggccttgataagggcgatcctgtcaattttgctgacgaggttgcccgagagcacgacctctcctaccagaaacagcttgaggcgggcgataacccttacctcaagtacaaccacgcggacgcagagtttcaggagaaactcgcttctgacacttcttttgggggaaaccttgggaaggctgttttccaggctaaaaagaggattctcgaacctcttggcctggttgagacgccggataaaacggcgcctgcggcaaaaaagaggcctctagagcagagtcctcaagagccagactcctcgagcggagttggcaagaaaggcaaacagcctgccagaaagagactcaactttgacgacgaacctggagccggagacgggcctcccccagaaggaccatcttccggagctatgtctactgagactgaaatgcgtgcagcagctggcggaaatggtggcgatgcgggacaaggtgccgagggagtgggtaatgcctccggtgattggcattgcgattccacttggtcagagagccacgtcaccaccacctcaacccgcacctgggtcctgccgacctacaacaaccacctgtacctgcggctcggctcgagcaacgccagcgacaccttcaacggattctccaccccctggggatactttgactttaaccgcttccactgccacttctcgccaagagactggcaaaggctcatcaacaaccactggggactgcgccccaaaagcatgcaagtccgcatcttcaacatccaagttaaggaggtcacgacgtctaacggggagacgaccgtatccaacaacctcaccagcacggtccagatctttgcggacagcacgtacgagctcccgtacgtgatggatgcaggtcaggagggcagcttgcctcctttccccaacgacgtgttcatggtgcctcagtacgggtactgcggactggtaaccggaggcagctctcaaaaccagacagacagaaatgccttctactgtctggagtactttcccagccagatgctgagaaccggaaacaactttgagatggtgtacaagtttgaaaacgtgcccttccactccatgtacgctcacagccagagcctggataggctgatgaacccgctgctggaccagtacctgtgggagctccagtctaccacctctggaggaactctcaaccagggcaattcagccaccaactttgccaagctgaccaaaacaaacttttctggctaccgcaaaaactggctcccggggcccatgatgaagcagcagagattctccaagactgccagtcaaaactacaagattccccagggaagaaacaacagtctgctccattatgagaccagaactaccctcgacggaagatggagcaattttgccccgggaacggccatggcaaccgcagccaacgacgccaccgacttctctcaggcccagctcatctttgcggggcccaacatcaccggcaacaccaccacagatgccaataacctgatgttcacttcagaagatgaacttagggccaccaacccccgggacactgacctgtttggccacctggcaaccaaccagcaaaacgccaccaccgttcctaccgtagacgacgtggacggagtcggcgtgtacccgggaatggtgtggcaggacagagacatttactaccaagggcccatttgggccaaaattccacacacggatggacactttcacccgtctcctctcattggcggatttggactgaaaagcccgcctccacaaatattcatcaaaaacactcctgtacccgccaatcccgcaacgaccttctctccggccagaatcaacagcttcatcacccagtacagcaccggacaggtggctgtcaaaatagaatgggaaatccagaaggagcggtccaagagatggaacccagaggtccagttcacgtccaactacggagcacaggactcgcttctctgggctcccgacaacgccggagcctacaaagagcccagggccattggatcccgatacctcaccaaccacctctagcccaattctgttgcataccctcaataaaccgtgtattcgtttcagtaaaatactgcctcttgtggtcattcggcgtacaacagcttacaacaacaacaaaacccccttgctagagagtgtggcactcccccccctgtcgcgttcgctcgttcgctggctcgattgggggggtggcagctcaaagagctgccagacgacggccctctgggccgtcgcccccccaatcgagccagcgaacgagcgaacgcgacaggggggggagtgccac

SEQ ID NO: 5299 - protein, 390 aa, Bovine adeno-associated virus
MALVSWLVEHGITSEKQWIQENQESYLSFNSTGNSRSQIKAALDNASKIMSLTKSASDYLVGQTVPEDISENRIWQIFDLNGYDPAYAGSVLYGWCTRAFGKRNTVWLYGPATTGKTNIAEAISHTVPFYGCVNWTNENFPFNDCVEKMLIWWEEGKMTSKVVEPAKAILGGSRVRVDQKCKSSVQVDSTPVIITSNTNMCVVVDGNSTTFEHQQPLEDRMFRFELMRRLPPDFGKITKQEVKDFFAWAKVNQVPVTHEFMVPKKVAGTERAETSRKRPLDDVTNTNYKSPEKRARLSVVPETPRSSDVPVEPAPLRPLNWSSRYECRCDYHAKFDSVTGECDECEYLNRGKNGCIFHNATHCQICHAVPPWEKENVSDFNDFDDCNKEQ

SEQ ID NO: 5300 - protein, 610 aa, Bovine adeno-associated virus
MATFYEVIVRVPFDVEEHLPGISDNFVDWVTGQIWELPPESDLNLTLIEQPQLTVADRIRRVFLYEWNKFSKQESKFFVQFEKGSEYFHLHTLVETSGISSMVLGRYVSQIRAQLVKVVFQNIEPRINDWVAITKVKKGGANKVVDSGYIPAYLLPKVQPELQWAWTNLEEYKLAALNLEERKRLVAQFQLESSQRSQEASSQRDVSADPVIKSKTSQKYMALVSWLVEHGITSEKQWIQENQESYLSFNSTGNSRSQIKAALDNASKIMSLTKSASDYLVGQTVPEDISENRIWQIFDLNGYDPAYAGSVLYGWCTRAFGKRNTVWLYGPATTGKTNIAEAISHTVPFYGCVNWTNENFPFNDCVEKMLIWWEEGKMTSKVVEPAKAILGGSRVRVDQKCKSSVQVDSTPVIITSNTNMCVVVDGNSTTFEHQQPLEDRMFRFELMRRLPPDFGKITKQEVKDFFAWAKVNQVPVTHEFMVPKKVAGTERAETSRKRPLDDVTNTNYKSPEKRARLSVVPETPRSSDVPVEPAPLRPLNWSSRYECRCDYHAKFDSVTGECDECEYLNRGKNGCIFHNATHCQICHAVPPWEKENVSDFNDFDDCNKEQ

SEQ ID NO: 5301 - protein, 736 aa, Bovine adeno-associated virus; identical to SEQ ID NO: 5285

SEQ ID NO: 5302 - protein, 600 aa, Bovine adeno-associated virus
TAPAAKKRPLEQSPQEPDSSSGVGKKGKQPARKRLNFDDEPGAGDGPPPEGPSSGAMSTETEMRAAAGGNGGDAGQGAEGVGNASGDWHCDSTWSESHVTTTSTRTWVLPTYNNHLYLRLGSSNASDTFNGFSTPWGYFDFNRFHCHFSPRDWQRLINNHWGLRPKSMQVRIFNIQVKEVTTSNGETTVSNNLTSTVQIFADSTYELPYVMDAGQEGSLPPFPNDVFMVPQYGYCGLVTGGSSQNQTDRNAFYCLEYFPSQMLRTGNNFEMVYKFENVPFHSMYAHSQSLDRLMNPLLDQYLWELQSTTSGGTLNQGNSATNFAKLTKTNFSGYRKNWLPGPMMKQQRFSKTASQNYKIPQGRNNSLLHYETRTTLDGRWSNFAPGTAMATAANDATDFSQAQLIFAGPNITGNTTTDANNLMFTSEDELRATNPRDTDLFGHLATNQQNATTVPTVDDVDGVGVYPGMVWQDRDIYYQGPIWAKIPHTDGHFHPSPLIGGFGLKSPPPQIFIKNTPVPANPATTFSPARINSFITQYSTGQVAVKIEWEIQKERSKRWNPEVQFTSNYGAQDSLLWAPDNAGAYKEPRAIGSRYLTNHL

SEQ ID NO: 5303 - DNA, 8673 bp, Homo sapiens
  source 1..8673: mol_type = genomic DNA
atatatagagttaagaagtctaggtctgcttccagaagaaaacagttccacgttgcttgaaattgaaaatcaagataaaaatgttcacaattaagctccttctttttattgttcctctagttatttcctccagaattgatcaagacaattcatcatttgattctctatctccagagccaaaatcaagatttgctatgttagacgatgtaaaaattttagccaatggcctccttcagttgggacatggtcttaaagactttgtccataagacgaagggccaaattaatgacatatttcaaaaactcaacatatttgatcagtctttttatgatctatcgctgcaaaccagtgaaatcaaagaagaagaaaaggaactgagaagaactacatataaactacaagtcaaaaatgaagaggtaaagaatatgtcacttgaactcaactcaaaacttgaaagcctcctagaagaaaaaattctacttcaacaaaaagtgaaatatttagaagagcaactaactaacttaattcaaaatcaacctgaaactccagaacacccagaagtaacttcacttaaagtaagtagaaaataaagagggttcatgtttatgttttcaatgtggatcttttaaaaaaaatatttctaaggcatgccatttgaaatactttgttgcattgttgaaatacttttttttccaagaaaaataatctccagaaaataaaatttcctattataatttcaagttagttttttgtttccctaatgttatatatgaaaacactgaaaatttgcattttatatgaaaattacaaatcggttaaattatacaatctagaacactatgtcattacactattgtaaattactgaaggtaagtaaaaagttaaaaaaaatttaaaactattctccagtgtttaaaacagattaaataatacagtaaatggaaaagatttattcatatgaaaatatgctgggctttttcttttaattgaagttcagaaaatcaaattttagagatagtacaatttaaataaaatgttaaggacaaaaatatgtgctatttgaaagaagcatacaaggggaaggaattgccaatattcatttttcaaatccattattagtttaaaaatttagattatgatagtgttacaggaaattaatagaaaagaaagaggaaagcaacttataaccaacctactctctatatccagacttttgtagaaaaacaagataatagcatcaaagaccttctccagaccgtggaagaccaatataaacaattaaaccaacagcatagtcaaataaaagaaatagaaaatcaggtaagtcagtattttaatggtatgtcccatctttcacacaggtctgtaaaaacactgaatcctaaaattatttacaagctttaactggatcatgagtaaaattatcacatcagcataactgttaaaattgcaggctctgaagctaataaactacctgcatttaaaccatggctctaaaactttgtgtgaccttgaataaattacttcacccctttatctctcagtttcctcacatatactacaaagataataacagaacttataggattattgtaagaaaaaaaattaattcatagcagccaatgtcatcttactaaaattcaaattagatcatgtttctctttgctcaaaaccacacaatagctttccatttcactcatattggctctttagaccaagattacccaacccttcgtcatctcactgacttcacctcctctactctagttattctgaccgctttaccagtattcaaacacatcaaacatactgccacctcaaagcctttgcccttgttgtttcctctaactggaacgctcttctgccctggtatctacgtggcccactctctgatttcccttagggtcgttatcaaacaaaaaattcccaatgaagacttacaaggtcacttaaccaaaaatcacaaccgcctggtcccatccctgaaaacttctacttccttagctacttttctcctgcacactcacctttatttaacataacataaattttagttatttatctcttctattcctgcactaaaatgtaagctctgtgaatacagggattttttccattatcttcatattttccattatttgtatatactccagaatatagaatactgtatggcacacagtaggcatttctgttgaattaataaatgtaatgtcatattcacacagaagcgtgtgctatgattattattacttggattactagaaatagtgtgcctcataattaaaggtcaacattcaacaatgtaattaatctacaatgtaaacatctggtgaagtgacagagggaagcacttgtttagaaaaaagctatgtcagaatccatgtattctaatatgcagtacaatagtttaaaaatattaataatactctcaaacagctattcaagaggattcaaaaaacataatataaactcagagaaactggtaaacaaaatcattttcaagagatataaaacaaatattattaccaatttccactaaacaaacataatgttagtagtgctgctaaaaggttttttatcaactacttttggtttccatactttccttcttatgatgttattattctaaattcttttcaattatatcttttactatgattaaatgaacctgctccccaaagcaaaatgttactatagtaatatacattgtgtctaaaaataaaaatgtgtgaagaaaccaaaacaatgaatttctgagttggaagaagagttagatcatttaactttctcatatttaaattaaaaaaacaaaactctaaaaatttaagtaactttaagatcacatagttacttagtagaaaagagtaatacccagcaagcaaactttacaatagatccttttaaataaggtcctaggaaatatcattcatgccagcatcaaaaaactaacactaataatgcaagatattatatattctgcttttcttactgtcaatgagaaaaactatcattcaataaattgcaaacccaacacacttaaataaaaataaaatgttactgctaaactaacgataaactactgaatatatagaaagtaagcaaacaaacttgccaacctgccaacatctacagatatgtttacaggtcaaaaattatcaaattatcaagaaagcctggttcaaattatgtattatgtctttatcacaggtctgaagatcagtaagacctaaaactgaaaattattaaacttaaaatctgaacagaatatcaaatatattttattcatataaataaaagaatacattacaatattctaagcaaagcagtctctacttttggccttgctctgttttccgaccaatgtctgcttttttgccttgctttatttttttatcttattaaataatgtccctgattaaatattttgagaacaggtaatctgtacaatctgaataacactgtttatctaaatatcaaacaccgttataacattatgaactgaaagacaaactgtacttctgacatccttactcagatttcccctaattgtatattcagtatcattttaaaaaacagatttatattcttttatcagctcagaaggactagtattcaagaacccacagaaatttctctatcttccaagccaagagcaccaagaactactccctttcttcagttgaatgaaataagaaatgtaaaacatgatggtaagacactttggtgggtttccttcttgaagctattattatcaaattccctattcttaggacttgttctagactaaaagatagttaagagatatccatcaaatacaatgtatcaacctaaactggatgctggggttctttttacaccctataaaagacatacctaagacaatcagagaaatacaaatatggacttgattattagataatatagaaggtttattaattttcttagatgtgatcatggtattgcagttttaaaggagaacaatctcctgtttaagagatacatgctgaaatatttacggagttaaaggtcactggactccagactggtgatagaacaagactctgtctctaaaaaataattaattttttaaaagaaaatagtttggtaagatgattcttacattcttaaataacacgccatctaagaaaaatgctttaacataaacattactgaaaaaatgctacatttgccacaacttcataaaatgtcaagtgaaatctcaagctccaaagatattattcctattactaaatctgatgtaataacattttattgattctaggcattcctgctgaatgtaccaccatttataacagaggtgaacatacaagtggcatgtatgccatcagacccagcaactctcaagtttttcatgtctactgtgatgttatatcaggtaaaacctgtctaaggagaatagacagtagttagttcaacttactcattacgtattaggaagattaacctggttatcattgttttatacatatatatatgaaatatatatgagtattcgtataaatataatacttttaccttgtttatgtatttactcaatattctccttttcctctaaaataatctgaagtgactattatcaataagtttactatgccaaaattcattaattgcctttcacttaacttttgggaccataataaataataaaatgtattgccataacattaataaactaccttacaaaaccaccaattaaaatcaaacaaacaaaaaagtgttatttacatctgtcaacataaatctactaaaaatacatgatttcattcattatattcaggtagtccatggacattaattcaacatcgaatagatggatcacaaaacttcaatgaaacgtgggagaactacaaatatggttttgggaggcttgatggtaaggggactacattcaatcattcattcacttgctaatctacaaatatttactgagaacctcttatggaccaggtattaggaaaagtagtaacgaacgagaagcagtctcagccttcatataatttattatcaaacaattacacatttgttagtaaattacacttattacaactgttattatttgaattatatttatcacaattacatgtctgttcttaaatatacttatcacaatttaattccacggcttacaatgatcataactataattattaaagacaattttgattaaatgttatgtcataagtagtaactgttacaaataagctgtgaaaagaaccactcctagcattagtcactctattctctcattaacgttttacatatcaattaattggaagttaaaaggaccaggaaactcagacatacagtatacattttaaaatttcaattatttaaatataatatatagaatgtatggcttataatgaattagttaactcaatgcaaattattctattttgattacaaatagtaaaataagcaagataaaataacagatgtttaaaatccaaaaagcacatacaaaaatccatgaatgatgtctaagtactcacttataaagtagaagacattcattattatatcaaatttttaaatgctcagtactatttgaccatttaaaaattttgtattcaaactaccagtgaaagccctacctagaaggtatactcagtgataagttttgtagctccaaatcttctaatagtgagtgtaaccccaaaataaaaggctgacaggtaagtcgagaatactcacttaattctggtaagaaagcaacccatttgtacttgtatttaccagcaatccttaaaatgaagcttcctactaactcaatagcaataagacaatagtgaatgtttaatgaaaacagtattttataaatactttaataaaaaggattgtgatgaagaacaatctatttatatttgttatttgtttttaattccaataaaaataatttttaaaattacagaaaaaagttattaagaaccatgcttttaaatttaaaatgattttttaaatttattcctgtctttttctacaaagaaagcatacattaagcaaataccaaaggccaggtttacatttgaagaaagtgacattattattactcaagtctctaggaatacttaacacatctcttgactgtatatggatgttaataaatagctgacagtaaagtttatccatataaagacttgcaaatattcctctaccaatgacgagactttaaaatatctataataatgtaacacatttcactggtgaaacatgtcttgtcatatgcattatagaaaggataatcagactttcagttatattaatatttttaacatttttgtgcacatagctatcttcaataaaattgttttaaaaggtattattttaagatacactaaaatgatcaagggattcaagactaaacaactcaattagttgcaccaataaaaaacacttaaaaaaactgtcagtgtccaacctgtacttaataactcacagatttttaaaacttttcttttcaggagaattttggttgggcctagagaagatatactccatagtgaagcaatctaattatgttttacgaattgagttggaagactggaaagacaacaaacattatattgaatattctttttacttgggaaatcacgaaaccaactatacgctacatctagttgcgattactggcaatgtccccaatgcaatcccggaaaacaaagatttggtgttttctacttgggatcacaaagcaaaaggacacttcaactgtccagagggttattcaggtatctttttctgataccaatactttattttcatatcttcaaagtatcttcccacattattagctattatctgcaatgacaacttttaaaaatccgaatcccaaataagcgttttctctctagacgaaaacctcttaactataatgaaagtgttcattctagttcaatcaggtattttacctctaatcttcctcagattttctattttttggtagtgtatagattatttatacagattatttaaaattgggacttatacagattatttaaaactgggatacatgcatctaaaacactgtaatatttataagaaaggaagataaacttacggggaaatacagtaacagtaactacatacgagtctgtacccattaaattgcatatctatctcctttaggaggctggtggtggcatgatgagtgtggagaaaacaacctaaatggtaaatataacaaaccaagagcaaaatctaagccagagaggagaagaggattatcttggaagtctcaaaatggaaggttatactctataaaatcaaccaaaatgttgatccatccaacagattcagaaagctttgaatgaactgaggcaaatttaaaaggcaataatttaaacattaacctcattccaagttaatgtggtctaataatctggtattaaatccttaagagaaagcttgagaaatagattttttttatcttaaagtcactgtctatttaagattaaacatacaatcacataaccttaaagaataccgtttacatttctcaatcaaaattcttataatactatttgttttaaattttgtgatgtgggaatcaattttagatggtcacaatctagattataatcaataggtgaacttattaaataacttttctaaataaaaaatttagagacttttattttaaaaggcatcatatgagctaatatcacaactttcccagtttaaaaaactagtactcttgttaaaactctaaacttgactaaatacagaggactggtaattgtacagttcttaaatgttgtagtattaatttcaaaactaaaaatcgtcagcacagagtatgtgtaaaaatctgtaatacaaatttttaaactgatgcttcattttgctacaaaataatttggagtaaatgtttgatatgatttatttatgaaacctaatgaagcagaattaaatactgtattaaaataagttcgctgtctttaaacaaatggagatgactactaagtcacattgactttaacatgaggtatcactataccttatttgttaaaatatatactgtatacattttatatattttaacacttaatactatgaaaacaaataattgtaaaggaatcttgtcagattacagtaagaatgaacatatttgtggcatcgagttaaagtttatatttcccctaaatatgctgtgattctaatacattcgtgtaggttttcaagtagaaataaacctcgtaacaagttactgaacgtttaaacagcctgacaagcatgtatatatgtttaaaattcaataaacaaagacccagtccctaaattatagaaatttaaattattcttgcatgtttatcgacatcacaacagatccctaaatccctaaatccctaaagattagatacaaattttttaccacagtatcacttgtcagaatttatttttaaatatgattttttaaaactgccagtaagaaattttaaattaaacccatttgttaaaggatatagtgcccaagttatatggtgacctacctttgtcaatacttagcattatgtatttcaaattatccaatatacatgtcatatatatttttatatgtcacatatataaaagatatgtatgatctatgtgaatcctaagtaaatattttgttccagaaaagtacaaaataataaaggtaaaaataatctataa

SEQ ID NO: 5304 - DNA, 18673 bp, Homo sapiens
  source 1..18673: mol_type = genomic DNA
aagtgataccataaacgcaggaggaagaaaatgacaaactgaaaaaatctattgtttgttatatatataacaaagaattagtatccacaatatgtaaataattcctaaaattagtcagaaagagacaaacttaaaaagagggtaacaaggaggggagcaaattatgtacataaccagatgattcgcaaagacggcaacagagatggccagcaaaacaaactagatatatacttgtctattagatttatcaacattttttgcctttttcattaaaagcatttgtaaaaggatataggaaaagaggaactctcatatactcctggcagggatgtaaattggtacaacccttttgaaggacaatctgacaaaagcaatcgtaagttacaagtcaacatctatgaatgtatatgaaaatatttatatacatacatcaccaccataaaagcattttctatacatactgtttataattagaaaattggaaacaaatgattaaaagggggctgattaaattaaggttcatctatataacaggattatgcagctattaaaaaggacgtggtaactctatagacattcataggaaaataaattttaaaatactaagatcctgaatgatatatatatcatgagctattatacataacaagatcccacttgtgttataaaaaattatgtttagtcattcaaagggtctggtatgatagacccaaaatgttaatagagtcgagatttttattttttataggtttttgaaatacctgaattttcacaataagtactttgcacattaaaaatcttagctgggcatggtggctcacgcttgtaatcccagcactctgggaggccaaggtaggcagatcacctgaggtcaggagttcgagaccagtctggccaacatggtgaaaccccgtctctactaaaaatacaaaaattagccaggcttggttgggggtgcctgtaattccagatactcgggaagctgagacaggagaatcgcttgaacccaggagggggaagttgcagtgagctgagatcacgacgctgcactccagcctgggcaacaaagagcaaaactccgtctcaaaaataaataaagaaaaaatctttacatgtccaaagatacggctgttcaactaaaaaatatatatgtataaaacttaacatgttaatagtgaacacacaaaacagtaagatagataaaattattccttcaaagctcacttaacctctggatctacactgtccaaaaagacggtctaatgagacaattgagcacttgataggtgagtggttctaactgagatatgttctcagtataaaacatacaataggatcttcctatacaacattaattaaaaaacaaactattgtagttaaaaaggaaaaaattagagatactatgtaaaaaagagccaaaataccttgtattttatttgaaagacatatctccataagattacacaacctcgtgtaggataaaggactttgctttgcttggaatttaaacaatttaggctcttaaatgtcctaaaattctctgtagctaagaaatttttatattggttcctaggaactaggaatccttaaattaggccctacatttgcttacaagtttattttccttggcataaaattttttagtttttacattactggttatatttgatcagggttctatttaaataggcacaagttcaagcaaagatcagattctgcttttagcagtgtgtactcagacaggaagtattaaaaggcaggcagaaaatcctttataaaattactactttcaatgcattttcccacgttgaaatgcttctgcagtttataattaggcaaattactttaattataatcaataatgctgttcaaattactataagaattatacagatatttataccaagagacaatatactagaaaccaagactacgtgaccattacctctactctgtcagtgttatttgtgagaaattgcacaaattttgcaaaaagtgttagtatcctactacagtaggatataatatagaaggaaataatttcataaagcctgtctttggtactagtgctcagttactttcattaactaaaaaaggggctactcttcaaattcccttctctaaaaagaatgtactatatcaaaagggggtaaacactactacgtatacattctgcacttagaaatccctatatgttgattttatcattctcttattcaataaatattgtttctacaatgtgtaaggcattactgtactaaagcattataaggaatataagttaaaaacacatacaaatcttgccaatcaacagcttatagtgtaataggggagagaagctggcccatctatattctccctcaactagcaagtggatgaaatatcagggtcaatagttataagccacaaaagctgacagcttaattaagagaagttttgaaatatgtatttcatgaccaataattacaactgtaacttttctatttaaagaaggagaaaatttgaatttcttctctagctcaacatacacttctataattccattacatgaaccagagtaaagggtaagatggaaatgaagaatattttcttacccttttgtggttctatattggacacttaaaaatcatacacaacctaatcaaaagatgtaattctttaaaaaggtacgagaccaaaattcagaaaatctagactataacaaaatttctcaatttacattatcttaatatgcaattaattttcaccagtaaaatactatagtatgggtacaaatgcattgattagttctaattacaaaaatggctaatatataatactgtgtagtgtttatgatacatcagataatgttctaagtgctctgaaaatataaacttttaatcttttatacgaccctataaaataggtgttattctcactggagagatgagaaaacaggggttcagagatgtgaagtaatttgaccaaaggtcacaaagctgaagaatatgaaatccgggattctgattcaggcagtcttattccagaatcatgctcttaaccactatggaatactgcctctactgtaactattatacccaaaacccttaatcctaagtcatcaaaaggaagagcctctattttacacaatgaagaggcatttctaagaatagaaatttagggacgagcacagtggcttactcctttaatatcagcactttgagaggctgatatgggaggttcacttgaagtcaggagttcaaggtcagcttgggcaacatagtgaaacacagtctctacaaaatatttaaaaattagctgggtgtggtggcatgcatctatagtctcagctacttgggagacagagggaggaggcttgctcgagcccaggagttcgtggctatagtgagctatgatcatgccactgcactccagcctggacaacagagcaagaccctgtctctaaaaaagaaaagaaatttggaaatggtttattttgtattaacaatttataatttacactgaaatttattatgataaaacttttccctgtgttaaaaagctattaactttatgaaaaatttcttttaggtaaggttgattatatatacccacacacatacacaggttaaaagttagtttcatgtgacataataactagcattttgagcactacctgtttgcccagcactgttctaagtgctctacatgtattattgttaaattatcataacactatgaattatgtactataattaccccagctttacagatgaggagactaatccatggggaggttaagtaacttgtccaaggccagacagctagagccggcttttggacccacaccacagtctgactccagcacccatattcttaacaatttcaccatattaatatgtcaagattaagcagttttaaaggatgctattttctcacaaatttcttaatatgaacactcaataagaataatcactaatataagcatttagtatttttttaacactaagttggaagcatagtggaacatttatttttagaaatattattaattggctgggctcacgcttgtaatcggctgggctcatgcctgtaaattttgggaggccaaggtaaaagaattgcttgagcccagtatttccagaccagcatgggcaatacattaagacatcatctttaaaaaaaaaatgttattaatctcctctttttgttaaatgtatattatcaaaattgttactaagctaacaaacttcagaaaaacttatgatgggcaagctgcttgtgacattgaaggtatttaagattcaattctagtttggtcctagatgaccacatatccattgttccttcaacgagcacatggtaaagagcctagaacacagagacacagaacacagtggagaaaagggagtgaaatgtctttaatgacacttactatatatgggattttgtgacaatatacaaggatggttaagacatataaggtgatgcaaaaaaacatattaacaattatagtgacaaaaaatgaggagcatataattatacattgatttatacagagtaccagaggaacacagcattgagagccgtaacaccacctgagggagtggagaaaggcttcagagagaaagtgttttttggaatggatcactgtttccaaaagaactaaagtacagtttgagaaatgcatacttaattcattacttttttcccctcaactttaataataaatttacccaacaaaaaagtttatttttgacttgtaaatctcttaaaatcataaaaaagtaaaattagcttttaaaaacaggtagtcaccatagcattgaatgtgtagtttataatacagcaaagttaaatacaatttcaaattacctattaagttagttgctcatttctttgatttcatttagcattgatctaactcaatgtggaagaaggttacattcgtgcaagttaacacggcttaatgattaactatgttcacctaccaaccttaccttttctgggcaaatattggtatatatagagttaagaagtctaggtctgcttccagaagaaaacagttccacgttgcttgaaattgaaaatcaagataaaaatgttcacaattaagctccttctttttattgttcctctagttatttcctccagaattgatcaagacaattcatcatttgattctctatctccagagccaaaatcaagatttgctatgttagacgatgtaaaaattttagccaatggcctccttcagttgggacatggtcttaaagactttgtccataagacgaagggccaaattaatgacatatttcaaaaactcaacatatttgatcagtctttttatgatctatcgctgcaaaccagtgaaatcaaagaagaagaaaaggaactgagaagaactacatataaactacaagtcaaaaatgaagaggtaaagaatatgtcacttgaactcaactcaaaacttgaaagcctcctagaagaaaaaattctacttcaacaaaaagtgaaatatttagaagagcaactaactaacttaattcaaaatcaacctgaaactccagaacacccagaagtaacttcacttaaagtaagtagaaaataaagagggttcatgtttatgttttcaatgtggatcttttaaaaaaaatatttctaaggcatgccatttgaaatactttgttgcattgttgaaatacttttttttccaagaaaaataatctccagaaaataaaatttcctattataatttcaagttagttttttgtttccctaatgttatatatgaaaacactgaaaatttgcattttatatgaaaattacaaatcggttaaattatacaatctagaacactatgtcattacactattgtaaattactgaaggtaagtaaaaagttaaaaaaaatttaaaactattctccagtgtttaaaacagattaaataatacagtaaatggaaaagatttattcatatgaaaatatgctgggctttttcttttaattgaagttcagaaaatcaaattttagagatagtacaatttaaataaaatgttaaggacaaaaatatgtgctatttgaaagaagcatacaaggggaaggaattgccaatattcatttttcaaatccattattagtttaaaaatttagattatgatagtgttacaggaaattaatagaaaagaaagaggaaagcaacttataaccaacctactctctatatccagacttttgtagaaaaacaagataatagcatcaaagaccttctccagaccgtggaagaccaatataaacaattaaaccaacagcatagtcaaataaaagaaatagaaaatcaggtaagtcagtattttaatggtatgtcccatctttcacacaggtctgtaaaaacactgaatcctaaaattatttacaagctttaactggatcatgagtaaaattatcacatcagcataactgttaaaattgcaggctctgaagctaataaactacctgcatttaaaccatggctctaaaactttgtgtgaccttgaataaattacttcacccctttatctctcagtttcctcacatatactacaaagataataacagaacttataggattattgtaagaaaaaaaattaattcatagcagccaatgtcatcttactaaaattcaaattagatcatgtttctctttgctcaaaaccacacaatagctttccatttcactcatattggctctttagaccaagattacccaacccttcgtcatctcactgacttcacctcctctactctagttattctgaccgctttaccagtattcaaacacatcaaacatactgccacctcaaagcctttgcccttgttgtttcctctaactggaacgctcttctgccctggtatctacgtggcccactctctgatttcccttagggtcgttatcaaacaaaaaattcccaatgaagacttacaaggtcacttaaccaaaaatcacaaccgcctggtcccatccctgaaaacttctacttccttagctacttttctcctgcacactcacctttatttaacataacataaattttagttatttatctcttctattcctgcactaaaatgtaagctctgtgaatacagggattttttccattatcttcatattttccattatttgtatatactccagaatatagaatactgtatggcacacagtaggcatttctgttgaattaataaatgtaatgtcatattcacacagaagcgtgtgctatgattattattacttggattactagaaatagtgtgcctcataattaaaggtcaacattcaacaatgtaattaatctacaatgtaaacatctggtgaagtgacagagggaagcacttgtttagaaaaaagctatgtcagaatccatgtattctaatatgcagtacaatagtttaaaaatattaataatactctcaaacagctattcaagaggattcaaaaaacataatataaactcagagaaactggtaaacaaaatcattttcaagagatataaaacaaatattattaccaatttccactaaacaaacataatgttagtagtgctgctaaaaggttttttatcaactacttttggtttccatactttccttcttatgatgttattattctaaattcttttcaattatatcttttactatgattaaatgaacctgctccccaaagcaaaatgttactatagtaatatacattgtgtctaaaaataaaaatgtgtgaagaaaccaaaacaatgaatttctgagttggaagaagagttagatcatttaactttctcatatttaaattaaaaaaacaaaactctaaaaatttaagtaactttaagatcacatagttacttagtagaaaagagtaatacccagcaagcaaactttacaatagatccttttaaataaggtcctaggaaatatcattcatgccagcatcaaaaaactaacactaataatgcaagatattatatattctgcttttcttactgtcaatgagaaaaactatcattcaataaattgcaaacccaacacacttaaataaaaataaaatgttactgctaaactaacgataaactactgaatatatagaaagtaagcaaacaaacttgccaacctgccaacatctacagatatgtttacaggtcaaaaattatcaaattatcaagaaagcctggttcaaattatgtattatgtctttatcacaggtctgaagatcagtaagacctaaaactgaaaattattaaacttaaaatctgaacagaatatcaaatatattttattcatataaataaaagaatacattacaatattctaagcaaagcagtctctacttttggccttgctctgttttccgaccaatgtctgcttttttgccttgctttatttttttatcttattaaataatgtccctgattaaatattttgagaacaggtaatctgtacaatctgaataacactgtttatctaaatatcaaacaccgttataacattatgaactgaaagacaaactgtacttctgacatccttactcagatttcccctaattgtatattcagtatcattttaaaaaacagatttatattcttttatcagctcagaaggactagtattcaagaacccacagaaatttctctatcttccaagccaagagcaccaagaactactccctttcttcagttgaatgaaataagaaatgtaaaacatgatggtaagacactttggtgggtttccttcttgaagctattattatcaaattccctattcttaggacttgttctagactaaaagatagttaagagatatccatcaaatacaatgtatcaacctaaactggatgctggggttctttttacaccctataaaagacatacctaagacaatcagagaaatacaaatatggacttgattattagataatatagaaggtttattaattttcttagatgtgatcatggtattgcagttttaaaggagaacaatctcctgtttaagagatacatgctgaaatatttacggagttaaaggtcactggactccagactggtgatagaacaagactctgtctctaaaaaataattaattttttaaaagaaaatagtttggtaagatgattcttacattcttaaataacacgccatctaagaaaaatgctttaacataaacattactgaaaaaatgctacatttgccacaacttcataaaatgtcaagtgaaatctcaagctccaaagatattattcctattactaaatctgatgtaataacattttattgattctaggcattcctgctgaatgtaccaccatttataacagaggtgaacatacaagtggcatgtatgccatcagacccagcaactctcaagtttttcatgtctactgtgatgttatatcaggtaaaacctgtctaaggagaatagacagtagttagttcaacttactcattacgtattaggaagattaacctggttatcattgttttatacatatatatatgaaatatatatgagtattcgtataaatataatacttttaccttgtttatgtatttactcaatattctccttttcctctaaaataatctgaagtgactattatcaataagtttactatgccaaaattcattaattgcctttcacttaacttttgggaccataataaataataaaatgtattgccataacattaataaactaccttacaaaaccaccaattaaaatcaaacaaacaaaaaagtgttatttacatctgtcaacataaatctactaaaaatacatgatttcattcattatattcaggtagtccatggacattaattcaacatcgaatagatggatcacaaaacttcaatgaaacgtgggagaactacaaatatggttttgggaggcttgatggtaaggggactacattcaatcattcattcacttgctaatctacaaatatttactgagaacctcttatggaccaggtattaggaaaagtagtaacgaacgagaagcagtctcagccttcatataatttattatcaaacaattacacatttgttagtaaattacacttattacaactgttattatttgaattatatttatcacaattacatgtctgttcttaaatatacttatcacaatttaattccacggcttacaatgatcataactataattattaaagacaattttgattaaatgttatgtcataagtagtaactgttacaaataagctgtgaaaagaaccactcctagcattagtcactctattctctcattaacgttttacatatcaattaattggaagttaaaaggaccaggaaactcagacatacagtatacattttaaaatttcaattatttaaatataatatatagaatgtatggcttataatgaattagttaactcaatgcaaattattctattttgattacaaatagtaaaataagcaagataaaataacagatgtttaaaatccaaaaagcacatacaaaaatccatgaatgatgtctaagtactcacttataaagtagaagacattcattattatatcaaatttttaaatgctcagtactatttgaccatttaaaaattttgtattcaaactaccagtgaaagccctacctagaaggtatactcagtgataagttttgtagctccaaatcttctaatagtgagtgtaaccccaaaataaaaggctgacaggtaagtcgagaatactcacttaattctggtaagaaagcaacccatttgtacttgtatttaccagcaatccttaaaatgaagcttcctactaactcaatagcaataagacaatagtgaatgtttaatgaaaacagtattttataaatactttaataaaaaggattgtgatgaagaacaatctatttatatttgttatttgtttttaattccaataaaaataatttttaaaattacagaaaaaagttattaagaaccatgcttttaaatttaaaatgattttttaaatttattcctgtctttttctacaaagaaagcatacattaagcaaataccaaaggccaggtttacatttgaagaaagtgacattattattactcaagtctctaggaatacttaacacatctcttgactgtatatggatgttaataaatagctgacagtaaagtttatccatataaagacttgcaaatattcctctaccaatgacgagactttaaaatatctataataatgtaacacatttcactggtgaaacatgtcttgtcatatgcattatagaaaggataatcagactttcagttatattaatatttttaacatttttgtgcacatagctatcttcaataaaattgttttaaaaggtattattttaagatacactaaaatgatcaagggattcaagactaaacaactcaattagttgcaccaataaaaaacacttaaaaaaactgtcagtgtccaacctgtacttaataactcacagatttttaaaacttttcttttcaggagaattttggttgggcctagagaagatatactccatagtgaagcaatctaattatgttttacgaattgagttggaagactggaaagacaacaaacattatattgaatattctttttacttgggaaatcacgaaaccaactatacgctacatctagttgcgattactggcaatgtccccaatgcaatcccggaaaacaaagatttggtgttttctacttgggatcacaaagcaaaaggacacttcaactgtccagagggttattcaggtatctttttctgataccaatactttattttcatatcttcaaagtatcttcccacattattagctattatctgcaatgacaacttttaaaaatccgaatcccaaataagcgttttctctctagacgaaaacctcttaactataatgaaagtgttcattctagttcaatcaggtattttacctctaatcttcctcagattttctattttttggtagtgtatagattatttatacagattatttaaaattgggacttatacagattatttaaaactgggatacatgcatctaaaacactgtaatatttataagaaaggaagataaacttacggggaaatacagtaacagtaactacatacgagtctgtacccattaaattgcatatctatctcctttaggaggctggtggtggcatgatgagtgtggagaaaacaacctaaatggtaaatataacaaaccaagagcaaaatctaagccagagaggagaagaggattatcttggaagtctcaaaatggaaggttatactctataaaatcaaccaaaatgttgatccatccaacagattcagaaagctttgaatgaactgaggcaaatttaaaaggcaataatttaaacattaacctcattccaagttaatgtggtctaataatctggtattaaatccttaagagaaagcttgagaaatagattttttttatcttaaagtcactgtctatttaagattaaacatacaatcacataaccttaaagaataccgtttacatttctcaatcaaaattcttataatactatttgttttaaattttgtgatgtgggaatcaattttagatggtcacaatctagattataatcaataggtgaacttattaaataacttttctaaataaaaaatttagagacttttattttaaaaggcatcatatgagctaatatcacaactttcccagtttaaaaaactagtactcttgttaaaactctaaacttgactaaatacagaggactggtaattgtacagttcttaaatgttgtagtattaatttcaaaactaaaaatcgtcagcacagagtatgtgtaaaaatctgtaatacaaatttttaaactgatgcttcattttgctacaaaataatttggagtaaatgtttgatatgatttatttatgaaacctaatgaagcagaattaaatactgtattaaaataagttcgctgtctttaaacaaatggagatgactactaagtcacattgactttaacatgaggtatcactataccttatttgttaaaatatatactgtatacattttatatattttaacacttaatactatgaaaacaaataattgtaaaggaatcttgtcagattacagtaagaatgaacatatttgtggcatcgagttaaagtttatatttcccctaaatatgctgtgattctaatacattcgtgtaggttttcaagtagaaataaacctcgtaacaagttactgaacgtttaaacagcctgacaagcatgtatatatgtttaaaattcaataaacaaagacccagtccctaaattatagaaatttaaattattcttgcatgtttatcgacatcacaacagatccctaaatccctaaatccctaaagattagatacaaattttttaccacagtatcacttgtcagaatttatttttaaatatgattttttaaaactgccagtaagaaattttaaattaaacccatttgttaaaggatatagtgcccaagttatatggtgacctacctttgtcaatacttagcattatgtatttcaaattatccaatatacatgtcatatatatttttatatgtcacatatataaaagatatgtatgatctatgtgaatcctaagtaaatattttgttccagaaaagtacaaaataataaaggtaaaaataatctataattttcaggaccacagactaagctgtcgaaattaacgctgatttttttagggccagaataccaaaatggctcctctcttcccccaaaattggacaatttcaaatgcaaaataattcattatttaatatatgagttgcttcctctatttggtttccttaaaaaaaaaaaaaactctcataggacatgtttcattttgttcctttcaggagtagtaaattagacgttttccccatataaagcttttttctaccagaaagatacttctggtagaagaagagaaaggagctctttatggttcacacgactgtctcctgtcctaactactttgcttaaagtgctcaaattccatcactactcacagttgtctaatctaagtctaatcccctttgatctctcagactaccttcccttttatctctctactacttaataataagaatatctttttttcaaacttgaccttcattttgctttcacaatactatactctccatggattatcccttatctgaatccatctttataaccctattcctttctcatatttagtactgtgggccaatggacaaccttcaatcatcttttctacactgaccctcagacattctatctgctctcacggactcctttatttaccatgaataaagttccaaaatctacatattcatcccaagtctctttccagttccccttcttacattgcctatttgccatttctcccttcaataccctatacttcactcaaattcaacataccaaaaataaaaggccaggcacggtggctcacacctgtaatcccaggactttgggaggctgaggcaggtggatcacctgaggtcaggagtctgaccagcctgaccaatatggtgaaaccccgtctctacctaaaatacaaaaattagccaggcgtggtggcatgtgcctacagtcccagctactcaagaggctgagacaggagaatcgcttgaacccaggaggcggaggttgcagtgagctgagatcacaccaatgcactgggtgacagaacaagactgactcaaaaaaaaataaataacaaattccccagccccttactgctactgctatccctttctacccacctttccctcctttatactctttcacaccatcttcctcacttctttatatccattaatatgaccagcatgttcccagtcacagaagcctggaacccggaagacatctctggcttttcactcaactttgtaaactacctcttttgtatcataagccaccaagttcaatacaatcttctcttgaaacgtctcttaatcttataagctttcttccccaaagactgtctttaacttcagtgctagattatataagtagtctcttctttcctcctaattttacgtccctctccctgtcaatcttccgaaaaggaatttgtaatggctgcatactgcctggacctgtgtctttcaagctcatctactgaagaagtgtaacagcagaggataatgaaaacaaatccttttattgtctggagttacaggataaaataacttactatatgcacaaatttctttcagaatcttattgggatcttagcttaaatcttagaattttactttaaaattgcatatgaattgtgttttatactttataaatctatcttcatgcctgcagtggctcacacctgtaatccaagtattttgggaggccggggcgggagtactgcttgaacccaggagtccaagatcagcctgtgcaacacggcaaaactccacctctacaaaaaatacaaaaattagctgggtgtggtggcaggtgcctgtaatcccaactacttgggaggctgaggcaggagaatcgctggagcctgggaagtcaagcctgcagcgaaccatgatcctaacactgcattctagcctgggcaacagagtgagactctgtctcaaaaaaaatcttcatataaaaatatttatttccccccaagtatttaaaaagtgatgttcctagaagatgtgtcatgtttatcctgtgaacttgcacgtcccatatagttgtgccctcacaagaatgtatactccaattagaagagtataggcctttggaacaaaatccaaaatccttccaggttttcaaaagtctctatcacctggccccaaattacctcttcagccattttttcccacaacacaaaccttctgctctcatcaaaacgatctacttttaaacatctcctctatgccttcctaatgtattccatttgtctagaatgtctccccacacatttctgattggctagattgtgccgtattttaaggtgcagatatctcaattcttccacaaatattctagtaaatggcagcttgttcatctgaaaccacacagaattactgtccatacacctcaaatggcacttagtgagaaaatacacagaatatggcaaatcataataataaaaattctgaaaaatagtactaaaagctccaaaagcatcaaagatagtcagtttacctgattttagtgaattactgaaaaatttctatatcaagagtttattttgaaccagtatgaattttactgaaaccaagtacacacatgtctcattatgaggtaatctagtgtagtataatctatttccatacactctgtcatcctggaatcagcatattttcatgcttgtatctttacttcctaatagcataactcatggaagtcaactaactcattcattaattttagaaatggtattcattaaacaacacttattgagcatctactatttgtctcctttaaaaaacatattccaaatttgtactcatatatactctaccttctgctgtaggataatcaaatttccttgtgatttttttccccatcactaacagccataaactctgcacttatgtatgtactactgagtgattatcaaacacagcagttttaaaaatgaaaagaaagtgacccaacaattggcccttttatcaaagtccaaagtattatcatggcaaatcaactagggtaaaattacttaactggtgcacagttcaaggtcatgaaagtagcactaacaatcctctattataacccttaataaaatgaggttttaatgacattttaggaaatataaaataaacttaagaattctatctaaaatacaaaggctgtttttcctaaattcatgtttagtcctaagaacagtcatacatctaataaaatgactgggtatataatttgaaagagcaataaattactaccttgaagatgtaaggttgtagctatttatcttaaaatacacagtcaaacctcagtttccacacccaatagatgggaataataatcctgtcaaatctattaatacttcatgggattgtaatcatcaagccagataatgtatttgaatagctttatgaactataaagttctaaacaaatgtatatactttttaaaaacaggttcttccgtgtcatttttcacattcctttaagtaaataatctctacaaacgcttcctaactgaacatattataattctcaggacagaagaacaaaactgcccttctcagagtttgcatctgtttctggaactttactccttcccttcacaatctaagataacactccatcaccttcagatgcaagcccctaactaaaaacttctgggtggctatgttaaaatgttaggaaatagagctcttgactcagaattcttttttttttcgagatggagtctcgctctgtcacccaggctggagtgcagtggcactgcacagtgagctgagtgatctcagctctctgcaacctccgcctcctgggttcaagtgattctcctgcctcagactcctgagtagctaggattacaggtatgtgccaccatgcctggctaatttttgtatttttagtagagacggagtttcatcatgttggtcaggctggtcccgaactcctgacctcgtgatccgccttcctcggcctcccaaagtgctaagattacaggcgtgagcccccgcgcccagccgactcagtttttatagttaaaataaactaggaccaattcgatagaataaaactcagagtggtataacaaggacaaaaccaaaatagcagagtatgtggcagtagcttgagacatctatgaactctaaaaataaaaacaaaaaccaatactttctgaagcagagaaccatacacttgaatagaaaaaaaaatgctcctgaattttcagtaacgttcagctgaaatttatacttccttaaattatgaatgtagtaaaccaaccacagcagtattaccagtatataagattttgtcattaatagaaacatacatttactattattattattattattatactttaagttctgggatacatgcgcagaacgtgcagttttgttacataggtatacacgtggtatggtggtttgctgcacccatcaacccgtcatctacattaggtatttctcctaatgctatccctcccctagccccaccccgacaggtcccagtgtgtgatgttcctttccctgtgtccatgtgttctcattgtttagctcccacttatgagtgagaacatgtggtgtttggttttctgttcctgtgttagtttgctgagaatgatggtttccagcttcatccatgtccctacaaaggacatgaactcatccttttttatggctgcatagtattccatggtgtatatgtgccacattttcttcatccagtctatcattgatgggcatttgggttggttccaagtctttgttattgtgaatagtgctgcaataaacatgtgtgcatgtgtctttatagtagaatgatttataatcctttgaatatatacccaataatgggattactgggtcaaatggtatttctagttctagttccttgaggaatcgccacactgtcttccacaatggttgaactaatttgaaacatacatatttttatatcacaactattatagacatctcaaaatattgttgatgcttattactatttagaaaatacaatagttttttaacct

SEQ ID NO: 5305 - DNA, 20 bp, synthetic construct
  misc_feature 1..20: note = Description of Artificial Sequence: Synthetic oligonucleotide
  misc_feature 1..20: note = Target: ANGPTL3; (-) strand; PAM type: NAAAAC; PAM sequence: AAAAAC
  source 1..20: mol_type = other DNA
tgtgaaaattcaggtatttc

SEQ ID NO: 5306 - DNA, 20 bp, synthetic construct
  misc_feature 1..20: note = Description of Artificial Sequence: Synthetic oligonucleotide
  misc_feature 1..20: note = Target: ANGPTL3; (-) strand; PAM type: NAAAAC; PAM sequence: AAAAAC
  source 1..20: mol_type = other DNA
tcaaatataaccagtaatgt

SEQ ID NO: 5307 - DNA, 20 bp, synthetic construct
  misc_feature 1..20: note = Description of Artificial Sequence: Synthetic oligonucleotide
  misc_feature 1..20: note = Target: ANGPTL3; (-) strand; PAM type: NAAAAC; PAM sequence: CAAAAC
  source 1..20: mol_type = other DNA
tggtcatgaaatacatattt

SEQ ID NO: 5308 - DNA, 20 bp, synthetic construct
  misc_feature 1..20: note = Description of Artificial Sequence: Synthetic oligonucleotide
  misc_feature 1..20: note = Target: ANGPTL3; (-) strand; PAM type: NAAAAC; PAM sequence: TAAAAC
  source 1..20: mol_type = other DNA
tgtgagaaaatagcatcctt

SEQ ID NO: 5309 - DNA, 20 bp, synthetic construct
  misc_feature 1..20: note = Description of Artificial Sequence: Synthetic oligonucleotide
  misc_feature 1..20: note = Target: ANGPTL3; (-) strand; PAM type: NAAAAC; PAM sequence: AAAAAC
  source 1..20: mol_type = other DNA
ggaaacagtgatccattcca

SEQ ID NO: 5310 - DNA, 20 bp, synthetic construct
  misc_feature 1..20: note = Description of Artificial Sequence: Synthetic oligonucleotide
  misc_feature 1..20: note = Target: ANGPTL3; (-) strand; PAM type: NAAAAC; PAM sequence: GAAAAC
  source 1..20: mol_type = other DNA
ttttttaaaagatccacatt

SEQ ID NO: 5311 - DNA, 20 bp, synthetic construct
  misc_feature 1..20: note = Description of Artificial Sequence: Synthetic oligonucleotide
  misc_feature 1..20: note = Target: ANGPTL3; (-) strand; PAM type: NAAAAC; PAM sequence: AAAAAC
  source 1..20: mol_type = other DNA
tatataacattagggaaaca

SEQ ID NO: 5312 - DNA, 20 bp, synthetic construct
  misc_feature 1..20: note = Description of Artificial Sequence: Synthetic oligonucleotide
  misc_feature 1..20: note = Target: ANGPTL3; (-) strand; PAM type: NAAAAC; PAM sequence: AAAAAC
  source 1..20: mol_type = other DNA
gaaaccaaaagtagttgata

SEQ ID NO: 5313 - DNA, 20 bp, synthetic construct
  misc_feature 1..20: note = Description of Artificial Sequence: Synthetic oligonucleotide
  misc_feature 1..20: note = Target: ANGPTL3; (-) strand; PAM type: NAAAAC; PAM sequence: GAAAAC
  source 1..20: mol_type = other DNA
aaaaaagcagacattggtcg

SEQ ID NO: 5314 - DNA, 20 bp, synthetic construct
  misc_feature 1..20: note = Description of Artificial Sequence: Synthetic oligonucleotide
  misc_feature 1..20: note = Target: ANGPTL3; (-) strand; PAM type: NAAAAC; PAM sequence: TAAAAC
  source 1..20: mol_type = other DNA
aacaggagattgttctcctt

SEQ ID NO: 5315 - DNA, 20 bp, synthetic construct
  misc_feature 1..20: note = Description of Artificial Sequence: Synthetic oligonucleotide
  misc_feature 1..20: note = Target: ANGPTL3; (-) strand; PAM type: NAAAAC; PAM sequence: AAAAAC
  source 1..20: mol_type = other DNA
ataacatcacagtagacatg

SEQ ID NO: 5316 - DNA, 20 bp, synthetic construct
  misc_feature 1..20: note = Description of Artificial Sequence: Synthetic oligonucleotide
  misc_feature 1..20: note = Target: ANGPTL3; (-) strand; PAM type: NAAAAC; PAM sequence: TAAAAC
  source 1..20: mol_type = other DNA
atatttcatatatatatgta

SEQ ID NO: 5317 - DNA, 20 bp, synthetic construct
  misc_feature 1..20: note = Description of Artificial Sequence: Synthetic oligonucleotide
  misc_feature 1..20: note = Target: ANGPTL3; (-) strand; PAM type: NAAAAC; PAM sequence: CAAAAC
  source 1..20: mol_type = other DNA
ccccttaccatcaagcctcc

SEQ ID NO: 5318 - DNA, 20 bp, synthetic construct
  misc_feature 1..20: note = Description of Artificial Sequence: Synthetic oligonucleotide
  misc_feature 1..20: note = Target: ANGPTL3; (-) strand; PAM type: NAAAAC; PAM sequence: TAAAAC
  source 1..20: mol_type = other DNA
acttccaattaattgatatg

SEQ ID NO: 5319 - DNA, 20 bp, synthetic construct
  misc_feature 1..20: note = Description of Artificial Sequence: Synthetic oligonucleotide
  misc_feature 1..20: note = Target: ANGPTL3; (-) strand; PAM type: NAAAAC; PAM sequence: CAAAAC
  source 1..20: mol_type = other DNA
tattagaagatttggagcta

SEQ ID NO: 5320 - DNA, 20 bp, synthetic construct
  misc_feature 1..20: note = Description of Artificial Sequence: Synthetic oligonucleotide
  misc_feature 1..20: note = Target: ANGPTL3; (-) strand; PAM type: NAAAAC; PAM sequence: AAAAAC
  source 1..20: mol_type = other DNA
aaattatttttattggaatt

SEQ ID NO: 5321 - DNA, 20 bp, synthetic construct
  misc_feature 1..20: note = Description of Artificial Sequence: Synthetic oligonucleotide
  misc_feature 1..20: note = Target: ANGPTL3; (-) strand; PAM type: NAAAAC; PAM sequence: TAAAAC
  source 1..20: mol_type = other DNA
tatcttaaaataataccttt

SEQ ID NO: 5322 - DNA, 20 bp, synthetic construct
  misc_feature 1..20: note = Description of Artificial Sequence: Synthetic oligonucleotide
  misc_feature 1..20: note = Target: ANGPTL3; (-) strand; PAM type: NAAAAC; PAM sequence: TAAAAC
  source 1..20: mol_type = other DNA
cagtcttccaactcaattcg

SEQ ID NO: 5323 - DNA, 20 bp, synthetic construct
  misc_feature 1..20: note = Description of Artificial Sequence: Synthetic oligonucleotide
  misc_feature 1..20: note = Target: ANGPTL3; (-) strand; PAM type: NAAAAC; PAM sequence: GAAAAC
  source 1..20: mol_type = other DNA
ttgctttgtgatcccaagta

SEQ ID NO: 5324 - DNA, 20 bp, synthetic construct
  misc_feature 1..20: note = Description of Artificial Sequence: Synthetic oligonucleotide
  misc_feature 1..20: note = Target: ANGPTL3; (-) strand; PAM type: NAAAAC; PAM sequence: GAAAAC
  source 1..20: mol_type = other DNA
aagaggttttcgtctagaga

SEQ ID NO: 5325 - DNA, 20 bp, synthetic construct
  misc_feature 1..20: note = Description of Artificial Sequence: Synthetic oligonucleotide
  misc_feature 1..20: note = Target: ANGPTL3; (-) strand; PAM type: NAAAAC; PAM sequence: TAAAAC
  source 1..20: mol_type = other DNA
gattcccacatcacaaaatt

SEQ ID NO: 5326 - DNA, 20 bp, synthetic construct
  misc_feature 1..20: note = Description of Artificial Sequence: Synthetic oligonucleotide
  misc_feature 1..20: note = Target: ANGPTL3; (-) strand; PAM type: NAAAAC; PAM sequence: GAAAAC
  source 1..20: mol_type = other DNA
tacgaggtttatttctactt

SEQ ID NO: 5327 - DNA, 20 bp, synthetic construct
  misc_feature 1..20: note = Description of Artificial Sequence: Synthetic oligonucleotide
  misc_feature 1..20: note = Target: ANGPTL3; (-) strand; PAM type: NAAAAC; PAM sequence: GAAAAC
  source 1..20: mol_type = other DNA
agaaaaaagctttatatggg

SEQ ID NO: 5328 - DNA, 20 bp, synthetic construct
  misc_feature 1..20: note = Description of Artificial Sequence: Synthetic oligonucleotide
  misc_feature 1..20: note = Target: ANGPTL3; (-) strand; PAM type: NAAAAC; PAM sequence: TAAAAC
  source 1..20: mol_type = other DNA
gaagatagatttataaagta

SEQ ID NO: 5329 - DNA, 20 bp, synthetic construct
  misc_feature 1..20: note = Description of Artificial Sequence: Synthetic oligonucleotide
  misc_feature 1..20: note = Target: ANGPTL3; (-) strand; PAM type: NAAAAC; PAM sequence: GAAAAC
  source 1..20: mol_type = other DNA
gccaggtgatagagactttt

SEQ ID NO: 5330 - DNA, 20 bp, synthetic construct
  misc_feature 1..20: note = Description of Artificial Sequence: Synthetic oligonucleotide
  misc_feature 1..20: note = Target: ANGPTL3; (-) strand; PAM type: NAAAAC; PAM sequence: TAAAAC
  source 1..20: mol_type = other DNA
ggtcactttcttttcatttt

SEQ ID NO: 5331 - DNA, 20 bp, synthetic construct
  misc_feature 1..20: note = Description of Artificial Sequence: Synthetic oligonucleotide
  misc_feature 1..20: note = Target: ANGPTL3; (-) strand; PAM type: NAAAAC; PAM sequence: TAAAAC
  source 1..20: mol_type = other DNA
tatatttcctaaaatgtcat

SEQ ID NO: 5332 - DNA, 20 bp, synthetic construct
  misc_feature 1..20: note = Description of Artificial Sequence: Synthetic oligonucleotide
  misc_feature 1..20: note = Target: ANGPTL3; (-) strand; PAM type: NAAAAC; PAM sequence: AAAAAC
  source 1..20: mol_type = other DNA
ggactaaacatgaatttagg

SEQ ID NO: 5333 - DNA, 20 bp, synthetic construct
  misc_feature 1..20: note = Description of Artificial Sequence: Synthetic oligonucleotide
  misc_feature 1..20: note = Target: ANGPTL3; (-) strand; PAM type: NAAAAC; PAM sequence: AAAAAC
  source 1..20: mol_type = other DNA
tcctagtttattttaactat

SEQ ID NO: 5334 - DNA, 20 bp, synthetic construct
  misc_feature 1..20: note = Description of Artificial Sequence: Synthetic oligonucleotide
  misc_feature 1..20: note = Target: ANGPTL3; (-) strand; PAM type: NAAAAC; PAM sequence: CAAAAC
  source 1..20: mol_type = other DNA
ccacgtgtatacctatgtaa

SEQ ID NO: 5335 - DNA, 20 bp, synthetic construct
  misc_feature 1..20: note = Description of Artificial Sequence: Synthetic oligonucleotide
  misc_feature 1..20: note = Target: ANGPTL3; (-) strand; PAM type: NAAAAC; PAM sequence: GAAAAC
  source 1..20: mol_type = other DNA
agcaaactaacacaggaaca

SEQ ID NO: 5336 - DNA, 20 bp, synthetic construct
  misc_feature 1..20: note = Description of Artificial Sequence: Synthetic oligonucleotide
  misc_feature 1..20: note = Target: ANGPTL3; (+) strand; PAM type: NAAAAC; PAM sequence: CAAAAC
  source 1..20: mol_type = other DNA
acggcaacagagatggccag

SEQ ID NO: 5337 - DNA, 20 bp, synthetic construct
  misc_feature 1..20: note = Description of Artificial Sequence: Synthetic oligonucleotide
  misc_feature 1..20: note = Target: ANGPTL3; (+) strand; PAM type: NAAAAC; PAM sequence: CAAAAC
  source 1..20: mol_type = other DNA
ccagcctgggcaacaaagag

SEQ ID NO: 5338 - DNA, 20 bp, synthetic construct
  misc_feature 1..20: note = Description of Artificial Sequence: Synthetic oligonucleotide
  misc_feature 1..20: note = Target: ANGPTL3; (+) strand; PAM type: NAAAAC; PAM sequence: TAAAAC
  source 1..20: mol_type = other DNA
aactaaaaaatatatatgta

SEQ ID NO: 5339 - DNA, 20 bp, synthetic construct
  misc_feature 1..20: note = Description of Artificial Sequence: Synthetic oligonucleotide
  misc_feature 1..20: note = Target: ANGPTL3; (+) strand; PAM type: NAAAAC; PAM sequence: CAAAAC
  source 1..20: mol_type = other DNA
acatgttaatagtgaacaca

SEQ ID NO: 5340 - DNA, 20 bp, synthetic construct
  misc_feature 1..20: note = Description of Artificial Sequence: Synthetic oligonucleotide
  misc_feature 1..20: note = Target: ANGPTL3; (+) strand; PAM type: NAAAAC; PAM sequence: TAAAAC
  source 1..20: mol_type = other DNA
actgagatatgttctcagta

SEQ ID NO: 5341 - DNA, 20 bp, synthetic construct
  misc_feature 1..20: note = Description of Artificial Sequence: Synthetic oligonucleotide
  misc_feature 1..20: note = Target: ANGPTL3; (+) strand; PAM type: NAAAAC; PAM sequence: AAAAAC
  source 1..20: mol_type = other DNA
ttcctatacaacattaatta

SEQ ID NO: 5342 - DNA, 20 bp, synthetic construct
  misc_feature 1..20: note = Description of Artificial Sequence: Synthetic oligonucleotide
  misc_feature 1..20: note = Target: ANGPTL3; (+) strand; PAM type: NAAAAC; PAM sequence: AAAAAC
  source 1..20: mol_type = other DNA
cattataaggaatataagtt

SEQ ID NO: 5343 - DNA, 20 bp, synthetic construct
  misc_feature 1..20: note = Description of Artificial Sequence: Synthetic oligonucleotide
  misc_feature 1..20: note = Target: ANGPTL3; (+) strand; PAM type: NAAAAC; PAM sequence: GAAAAC
  source 1..20: mol_type = other DNA
tattctcactggagagatga

SEQ ID NO: 5344 - DNA, 20 bp, synthetic construct
  misc_feature 1..20: note = Description of Artificial Sequence: Synthetic oligonucleotide
  misc_feature 1..20: note = Target: ANGPTL3; (+) strand; PAM type: NAAAAC; PAM sequence: CAAAAC
  source 1..20: mol_type = other DNA
tctactgtaactattatacc

SEQ ID NO: 5345 - DNA, 20 bp, synthetic construct
  misc_feature 1..20: note = Description of Artificial Sequence: Synthetic oligonucleotide
  misc_feature 1..20: note = Target: ANGPTL3; (+) strand; PAM type: NAAAAC; PAM sequence: TAAAAC
  source 1..20: mol_type = other DNA
tacactgaaatttattatga

SEQ ID NO: 5346 - DNA, 20 bp, synthetic construct
  misc_feature 1..20: note = Description of Artificial Sequence: Synthetic oligonucleotide
  misc_feature 1..20: note = Target: ANGPTL3; (+) strand; PAM type: NAAAAC; PAM sequence: AAAAAC
  source 1..20: mol_type = other DNA
actaagctaacaaacttcag

SEQ ID NO: 5347 - DNA, 20 bp, synthetic construct
  misc_feature 1..20: note = Description of Artificial Sequence: Synthetic oligonucleotide
  misc_feature 1..20: note = Target: ANGPTL3; (+) strand; PAM type: NAAAAC; PAM sequence: AAAAAC
  source 1..20: mol_type = other DNA
agacatataaggtgatgcaa

SEQ ID NO: 5348 - DNA, 20 bp, synthetic construct
  misc_feature 1..20: note = Description of Artificial Sequence: Synthetic oligonucleotide
  misc_feature 1..20: note = Target: ANGPTL3; (+) strand; PAM type: NAAAAC; PAM sequence: AAAAAC
  source 1..20: mol_type = other DNA
aaaaagtaaaattagctttt

SEQ ID NO: 5349 - DNA, 20 bp, synthetic construct
  misc_feature 1..20: note = Description of Artificial Sequence: Synthetic oligonucleotide
  misc_feature 1..20: note = Target: ANGPTL3; (+) strand; PAM type: NAAAAC; PAM sequence: GAAAAC
  source 1..20: mol_type = other DNA
gtctaggtctgcttccagaa

SEQ ID NO: 5350 - DNA, 20 bp, synthetic construct
  misc_feature 1..20: note = Description of Artificial Sequence: Synthetic oligonucleotide
  misc_feature 1..20: note = Target: ANGPTL3; (+) strand; PAM type: NAAAAC; PAM sequence: AAAAAC
  source 1..20: mol_type = other DNA
ccaaattaatgacatatttc

SEQ ID NO: 5351 - DNA, 20 bp, synthetic construct
  misc_feature 1..20: note = Description of Artificial Sequence: Synthetic oligonucleotide
  misc_feature 1..20: note = Target: ANGPTL3; (+) strand; PAM type: NAAAAC; PAM sequence: CAAAAC
  source 1..20: mol_type = other DNA
tatgtcacttgaactcaact

SEQ ID NO: 5352 - DNA, 20 bp, synthetic construct
  misc_feature 1..20: note = Description of Artificial Sequence: Synthetic oligonucleotide
  misc_feature 1..20: note = Target: ANGPTL3; (+) strand; PAM type: NAAAAC; PAM sequence: GAAAAC
  source 1..20: mol_type = other DNA
gtttccctaatgttatatat

SEQ ID NO: 5353 - DNA, 20 bp, synthetic construct
  misc_feature 1..20: note = Description of Artificial Sequence: Synthetic oligonucleotide
  misc_feature 1..20: note = Target: ANGPTL3; (+) strand; PAM type: NAAAAC; PAM sequence: TAAAAC
  source 1..20: mol_type = other DNA
gtaaaaagttaaaaaaaatt

SEQ ID NO: 5354 - DNA, 20 bp, synthetic construct
  misc_feature 1..20: note = Description of Artificial Sequence: Synthetic oligonucleotide
  misc_feature 1..20: note = Target: ANGPTL3; (+) strand; PAM type: NAAAAC; PAM sequence: TAAAAC
  source 1..20: mol_type = other DNA
taaaactattctccagtgtt

SEQ ID NO: 5355 - DNA, 20 bp, synthetic construct
  misc_feature 1..20: note = Description of Artificial Sequence: Synthetic oligonucleotide
  misc_feature 1..20: note = Target: ANGPTL3; (+) strand; PAM type: NAAAAC; PAM sequence: AAAAAC
  source 1..20: mol_type = other DNA
ctatatccagacttttgtag

SEQ ID NO: 5356 - DNA, 20 bp, synthetic construct
  misc_feature 1..20: note = Description of Artificial Sequence: Synthetic oligonucleotide
  misc_feature 1..20: note = Target: ANGPTL3; (+) strand; PAM type: NAAAAC; PAM sequence: AAAAAC
  source 1..20: mol_type = other DNA
catctttcacacaggtctgt

SEQ ID NO: 5357 - DNA, 20 bp, synthetic construct
  misc_feature 1..20: note = Description of Artificial Sequence: Synthetic oligonucleotide
  misc_feature 1..20: note = Target: ANGPTL3; (+) strand; PAM type: NAAAAC; PAM sequence: TAAAAC
  source 1..20: mol_type = other DNA
ctgcatttaaaccatggctc

SEQ ID NO: 5358 - DNA, 20 bp, synthetic construct
  misc_feature 1..20: note = Description of Artificial Sequence: Synthetic oligonucleotide
  misc_feature 1..20: note = Target: ANGPTL3; (+) strand; PAM type: NAAAAC; PAM sequence: CAAAAC
  source 1..20: mol_type = other DNA
agatcatgtttctctttgct

SEQ ID NO: 5359 - DNA, 20 bp, synthetic construct
  misc_feature 1..20: note = Description of Artificial Sequence: Synthetic oligonucleotide
  misc_feature 1..20: note = Target: ANGPTL3; (+) strand; PAM type: NAAAAC; PAM sequence: GAAAAC
  source 1..20: mol_type = other DNA
aaccgcctggtcccatccct

SEQ ID NO: 5360 - DNA, 20 bp, synthetic construct
  misc_feature 1..20: note = Description of Artificial Sequence: Synthetic oligonucleotide
  misc_feature 1..20: note = Target: ANGPTL3; (+) strand; PAM type: NAAAAC; PAM sequence: AAAAAC
  source 1..20: mol_type = other DNA
cagctattcaagaggattca

SEQ ID NO: 5361 - DNA, 20 bp, synthetic construct
  misc_feature 1..20: note = Description of Artificial Sequence: Synthetic oligonucleotide
  misc_feature 1..20: note = Target: ANGPTL3; (+) strand; PAM type: NAAAAC; PAM sequence: TAAAAC
  source 1..20: mol_type = other DNA
aaaatcattttcaagagata

SEQ ID NO: 5362 - DNA, 20 bp, synthetic construct
  misc_feature 1..20: note = Description of Artificial Sequence: Synthetic oligonucleotide
  misc_feature 1..20: note = Target: ANGPTL3; (+) strand; PAM type: NAAAAC; PAM sequence: CAAAAC
  source 1..20: mol_type = other DNA
ataaaaatgtgtgaagaaac

SEQ ID NO: 5363 - DNA, 20 bp, synthetic construct
  misc_feature 1..20: note = Description of Artificial Sequence: Synthetic oligonucleotide
  misc_feature 1..20: note = Target: ANGPTL3; (+) strand; PAM type: NAAAAC; PAM sequence: AAAAAC
  source 1..20: mol_type = other DNA
ctttctcatatttaaattaa

SEQ ID NO: 5364 - DNA, 20 bp, synthetic construct
  misc_feature 1..20: note = Description of Artificial Sequence: Synthetic oligonucleotide
  misc_feature 1..20: note = Target: ANGPTL3; (+) strand; PAM type: NAAAAC; PAM sequence: CAAAAC
  source 1..20: mol_type = other DNA
tcatatttaaattaaaaaaa

SEQ ID NO: 5365 - DNA, 20 bp, synthetic construct
  misc_feature 1..20: note = Description of Artificial Sequence: Synthetic oligonucleotide
  misc_feature 1..20: note = Target: ANGPTL3; (+) strand; PAM type: NAAAAC; PAM sequence: AAAAAC
  source 1..20: mol_type = other DNA
tatcattcatgccagcatca

SEQ ID NO: 5366 - DNA, 20 bp, synthetic construct
  misc_feature 1..20: note = Description of Artificial Sequence: Synthetic oligonucleotide
  misc_feature 1..20: note = Target: ANGPTL3; (+) strand; PAM type: NAAAAC; PAM sequence: AAAAAC
  source 1..20: mol_type = other DNA
cttttcttactgtcaatgag

SEQ ID NO: 5367 - DNA, 20 bp, synthetic construct
  misc_feature 1..20: note = Description of Artificial Sequence: Synthetic oligonucleotide
  misc_feature 1..20: note = Target: ANGPTL3; (+) strand; PAM type: NAAAAC; PAM sequence: TAAAAC
  source 1..20: mol_type = other DNA
gtctgaagatcagtaagacc

SEQ ID NO: 5368 - DNA, 20 bp, synthetic construct
  misc_feature 1..20: note = Description of Artificial Sequence: Synthetic oligonucleotide
  misc_feature 1..20: note = Target: ANGPTL3; (+) strand; PAM type: NAAAAC; PAM sequence: AAAAAC
  source 1..20: mol_type = other DNA
gtatattcagtatcatttta

SEQ ID NO: 5369 - DNA, 20 bp, synthetic construct
  misc_feature 1..20: note = Description of Artificial Sequence: Synthetic oligonucleotide
  misc_feature 1..20: note = Target: ANGPTL3; (+) strand; PAM type: NAAAAC; PAM sequence: TAAAAC
  source 1..20: mol_type = other DNA
gttgaatgaaataagaaatg

SEQ ID NO: 5370 - DNA, 20 bp, synthetic construct
  misc_feature 1..20: note = Description of Artificial Sequence: Synthetic oligonucleotide
  misc_feature 1..20: note = Target: ANGPTL3; (+) strand; PAM type: NAAAAC; PAM sequence: TAAAAC
  source 1..20: mol_type = other DNA
tactgtgatgttatatcagg

SEQ ID NO: 5371 - DNA, 20 bp, synthetic construct
  misc_feature 1..20: note = Description of Artificial Sequence: Synthetic oligonucleotide
  misc_feature 1..20: note = Target: ANGPTL3; (+) strand; PAM type: NAAAAC; PAM sequence: CAAAAC
  source 1..20: mol_type = other DNA
aacattaataaactacctta

SEQ ID NO: 5372 - DNA, 20 bp, synthetic construct
  misc_feature 1..20: note = Description of Artificial Sequence: Synthetic oligonucleotide
  misc_feature 1..20: note = Target: ANGPTL3; (+) strand; PAM type: NAAAAC; PAM sequence: CAAAAC
  source 1..20: mol_type = other DNA
aacatcgaatagatggatca

SEQ ID NO: 5373 - DNA, 20 bp, synthetic construct
  misc_feature 1..20: note = Description of Artificial Sequence: Synthetic oligonucleotide
  misc_feature 1..20: note = Target: ANGPTL3; (+) strand; PAM type: NAAAAC; PAM sequence: GAAAAC
  source 1..20: mol_type = other DNA
gacaatagtgaatgtttaat

SEQ ID NO: 5374 - DNA, 20 bp, synthetic construct
  misc_feature 1..20: note = Description of Artificial Sequence: Synthetic oligonucleotide
  misc_feature 1..20: note = Target: ANGPTL3; (+) strand; PAM type: NAAAAC; PAM sequence: AAAAAC
  source 1..20: mol_type = other DNA
ctcaattagttgcaccaata

SEQ ID NO: 5375 - DNA, 20 bp, synthetic construct
  misc_feature 1..20: note = Description of Artificial Sequence: Synthetic oligonucleotide
  misc_feature 1..20: note = Target: ANGPTL3; (+) strand; PAM type: NAAAAC; PAM sequence: AAAAAC
  source 1..20: mol_type = other DNA
caccaataaaaaacacttaa

SEQ ID NO: 5376 - DNA, 20 bp, synthetic construct
  misc_feature 1..20: note = Description of Artificial Sequence: Synthetic oligonucleotide
  misc_feature 1..20: note = Target: ANGPTL3; (+) strand; PAM type: NAAAAC; PAM sequence: TAAAAC
  source 1..20: mol_type = other DNA
cttaataactcacagatttt

SEQ ID NO: 5377 - DNA, 20 bp, synthetic construct
  misc_feature 1..20: note = Description of Artificial Sequence: Synthetic oligonucleotide
  misc_feature 1..20: note = Target: ANGPTL3; (+) strand; PAM type: NAAAAC; PAM sequence: GAAAAC
  source 1..20: mol_type = other DNA
atgtccccaatgcaatcccg

SEQ ID NO: 5378 - DNA, 20 bp, synthetic construct
  misc_feature 1..20: note = Description of Artificial Sequence: Synthetic oligonucleotide
  misc_feature 1..20: note = Target: ANGPTL3; (+) strand; PAM type: NAAAAC; PAM sequence: GAAAAC
  source 1..20: mol_type = other DNA
taagcgttttctctctagac

SEQ ID NO: 5379 - DNA, 20 bp, synthetic construct
  misc_feature 1..20: note = Description of Artificial Sequence: Synthetic oligonucleotide
  misc_feature 1..20: note = Target: ANGPTL3; (+) strand; PAM type: NAAAAC; PAM sequence: TAAAAC
  source 1..20: mol_type = other DNA
tgggacttatacagattatt

SEQ ID NO: 5380 - DNA, 20 bp, synthetic construct
  misc_feature 1..20: note = Description of Artificial Sequence: Synthetic oligonucleotide
  misc_feature 1..20: note = Target: ANGPTL3; (+) strand; PAM type: NAAAAC; PAM sequence: TAAAAC
  source 1..20: mol_type = other DNA
aaaactgggatacatgcatc

SEQ ID NO: 5381 - DNA, 20 bp, synthetic construct
  misc_feature 1..20: note = Description of Artificial Sequence: Synthetic oligonucleotide
  misc_feature 1..20: note = Target: ANGPTL3; (+) strand; PAM type: NAAAAC; PAM sequence: GAAAAC
  source 1..20: mol_type = other DNA
ggtggcatgatgagtgtgga

SEQ ID NO: 5382 - DNA, 20 bp, synthetic construct
  misc_feature 1..20: note = Description of Artificial Sequence: Synthetic oligonucleotide
  misc_feature 1..20: note = Target: ANGPTL3; (+) strand; PAM type: NAAAAC; PAM sequence: AAAAAC
  source 1..20: mol_type = other DNA
atcacaactttcccagttta

SEQ ID NO: 5383 - DNA, 20 bp, synthetic construct
  misc_feature 1..20: note = Description of Artificial Sequence: Synthetic oligonucleotide
  misc_feature 1..20: note = Target: ANGPTL3; (+) strand; PAM type: NAAAAC; PAM sequence: TAAAAC
  source 1..20: mol_type = other DNA
taaaaaactagtactcttgt

SEQ ID NO: 5384 - DNA, 20 bp, synthetic construct
  misc_feature 1..20: note = Description of Artificial Sequence: Synthetic oligonucleotide
  misc_feature 1..20: note = Target: ANGPTL3; (+) strand; PAM type: NAAAAC; PAM sequence: CAAAAC
  source 1..20: mol_type = other DNA
aaatgttgtagtattaattt

SEQ ID NO: 5385 - DNA, 20 bp, synthetic construct
  misc_feature 1..20: note = Description of Artificial Sequence: Synthetic oligonucleotide
  misc_feature 1..20: note = Target: ANGPTL3; (+) strand; PAM type: NAAAAC; PAM sequence: GAAAAC
  source 1..20: mol_type = other DNA
attttaacacttaatactat

SEQ ID NO: 5386 - DNA, 20 bp, synthetic construct
  misc_feature 1..20: note = Description of Artificial Sequence: Synthetic oligonucleotide
  misc_feature 1..20: note = Target: ANGPTL3; (+) strand; PAM type: NAAAAC; PAM sequence: TAAAAC
  source 1..20: mol_type = other DNA
tatttttaaatatgattttt

SEQ ID NO: 5387 - DNA, 20 bp, synthetic construct
  misc_feature 1..20: note = Description of Artificial Sequence: Synthetic oligonucleotide
  misc_feature 1..20: note = Target: ANGPTL3; (+) strand; PAM type: NAAAAC; PAM sequence: AAAAAC
  source 1..20: mol_type = other DNA
ttggtttccttaaaaaaaaa

SEQ ID NO: 5388 - DNA, 20 bp, synthetic construct
  misc_feature 1..20: note = Description of Artificial Sequence: Synthetic oligonucleotide
  misc_feature 1..20: note = Target: ANGPTL3; (+) strand; PAM type: NAAAAC; PAM sequence: GAAAAC
  source 1..20: mol_type = other DNA
gtgtaacagcagaggataat

SEQ ID NO: 5389 - DNA, 20 bp, synthetic construct
  misc_feature 1..20: note = Description of Artificial Sequence: Synthetic oligonucleotide
  misc_feature 1..20: note = Target: ANGPTL3; (+) strand; PAM type: NAAAAC; PAM sequence: CAAAAC
  source 1..20: mol_type = other DNA
gatcagcctgtgcaacacgg

SEQ ID NO: 5390 - DNA, 20 bp, synthetic construct
  misc_feature 1..20: note = Description of Artificial Sequence: Synthetic oligonucleotide
  misc_feature 1..20: note = Target: ANGPTL3; (+) strand; PAM type: NAAAAC; PAM sequence: CAAAAC
  source 1..20: mol_type = other DNA
cacaaaccttctgctctcat

SEQ ID NO: 5391 - DNA, 20 bp, synthetic construct
  misc_feature 1..20: note = Description of Artificial Sequence: Synthetic oligonucleotide
  misc_feature 1..20: note = Target: ANGPTL3; (+) strand; PAM type: NAAAAC; PAM sequence: AAAAAC
  source 1..20: mol_type = other DNA
tctactatttgtctccttta

SEQ ID NO: 5392 - DNA, 20 bp, synthetic construct
  misc_feature 1..20: note = Description of Artificial Sequence: Synthetic oligonucleotide
  misc_feature 1..20: note = Target: ANGPTL3; (+) strand; PAM type: NAAAAC; PAM sequence: AAAAAC
  source 1..20: mol_type = other DNA
aacaaatgtatatacttttt

SEQ ID NO: 5393 - DNA, 20 bp, synthetic construct
  misc_feature 1..20: note = Description of Artificial Sequence: Synthetic oligonucleotide
  misc_feature 1..20: note = Target: ANGPTL3; (+) strand; PAM type: NAAAAC; PAM sequence: CAAAAC
  source 1..20: mol_type = other DNA
taattctcaggacagaagaa

SEQ ID NO: 5394 - DNA, 20 bp, synthetic construct
  misc_feature 1..20: note = Description of Artificial Sequence: Synthetic oligonucleotide
  misc_feature 1..20: note = Target: ANGPTL3; (+) strand; PAM type: NAAAAC; PAM sequence: AAAAAC
  source 1..20: mol_type = other DNA
tcagatgcaagcccctaact

SEQ ID NO: 5395 - DNA, 20 bp, synthetic construct
  misc_feature 1..20: note = Description of Artificial Sequence: Synthetic oligonucleotide
  misc_feature 1..20: note = Target: ANGPTL3; (+) strand; PAM type: NAAAAC; PAM sequence: TAAAAC
  source 1..20: mol_type = other DNA
ctaggaccaattcgatagaa

SEQ ID NO: 5396 - DNA, 20 bp, synthetic construct
  misc_feature 1..20: note = Description of Artificial Sequence: Synthetic oligonucleotide
  misc_feature 1..20: note = Target: ANGPTL3; (+) strand; PAM type: NAAAAC; PAM sequence: CAAAAC
  source 1..20: mol_type = other DNA
tcagagtggtataacaagga

SEQ ID NO: 5397 - DNA, 20 bp, synthetic construct
  misc_feature 1..20: note = Description of Artificial Sequence: Synthetic oligonucleotide
  misc_feature 1..20: note = Target: ANGPTL3; (+) strand; PAM type: NAAAAC; PAM sequence: AAAAAC
  source 1..20: mol_type = other DNA
catctatgaactctaaaaat

SEQ ID NO: 5398 - DNA, 20 bp, synthetic construct
  misc_feature 1..20: note = Description of Artificial Sequence: Synthetic oligonucleotide
  misc_feature 1..20: note = Target: ANGPTL3; (+) strand; PAM type: NAAAAC; PAM sequence: AAAAAC
  source 1..20: mol_type = other DNA
tgaactctaaaaataaaaac

SEQ ID NO: 5399 - DNA, 20 bp, synthetic construct
  misc_feature 1..20: note = Description of Artificial Sequence: Synthetic oligonucleotide
  misc_feature 1..20: note = Target: ANGPTL3; (-) strand; PAM type: NNAGAAW; PAM sequence: ATAGAAA
  source 1..20: mol_type = other DNA
tctaattataaacagtatgt

SEQ ID NO: 5400 - DNA, 20 bp, synthetic construct
  misc_feature 1..20: note = Description of Artificial Sequence: Synthetic oligonucleotide
  misc_feature 1..20: note = Target: ANGPTL3; (-) strand; PAM type: NNAGAAW; PAM sequence: AGAGAAT
  source 1..20: mol_type = other DNA
tataaaaatttcttagctac

SEQ ID NO: 5401 - DNA, 20 bp, synthetic construct
  misc_feature 1..20: note = Description of Artificial Sequence: Synthetic oligonucleotide
  misc_feature 1..20: note = Target: ANGPTL3; (-) strand; PAM type: NNAGAAW; PAM sequence: GCAGAAT
  source 1..20: mol_type = other DNA
ctgagtacacactgctaaaa

SEQ ID NO: 5402 - DNA, 20 bp, synthetic construct
  misc_feature 1..20: note = Description of Artificial Sequence: Synthetic oligonucleotide
  misc_feature 1..20: note = Target: ANGPTL3; (-) strand; PAM type: NNAGAAW; PAM sequence: GCAGAAT
  source 1..20: mol_type = other DNA
acatatagggatttctaagt

SEQ ID NO: 5403 - DNA, 20 bp, synthetic construct
  misc_feature 1..20: note = Description of Artificial Sequence: Synthetic oligonucleotide
  misc_feature 1..20: note = Target: ANGPTL3; (-) strand; PAM type: NNAGAAW; PAM sequence: AGAGAAT
  source 1..20: mol_type = other DNA
gaaacaatatttattgaata

SEQ ID NO: 5404 - DNA, 20 bp, synthetic construct
  misc_feature 1..20: note = Description of Artificial Sequence: Synthetic oligonucleotide
  misc_feature 1..20: note = Target: ANGPTL3; (-) strand; PAM type: NNAGAAW; PAM sequence: GTAGAAA
  source 1..20: mol_type = other DNA
acagtaatgccttacacatt

SEQ ID NO: 5405 - DNA, 20 bp, synthetic construct
  misc_feature 1..20: note = Description of Artificial Sequence: Synthetic oligonucleotide
  misc_feature 1..20: note = Target: ANGPTL3; (-) strand; PAM type: NNAGAAW; PAM sequence: GGAGAAT
  source 1..20: mol_type = other DNA
tcatccacttgctagttgag

SEQ ID NO: 5406 - DNA, 20 bp, synthetic construct
  misc_feature 1..20: note = Description of Artificial Sequence: Synthetic oligonucleotide
  misc_feature 1..20: note = Target: ANGPTL3; (-) strand; PAM type: NNAGAAW; PAM sequence: ATAGAAA
  source 1..20: mol_type = other DNA
caaattttctccttctttaa

SEQ ID NO: 5407 - DNA, 20 bp, synthetic construct
  misc_feature 1..20: note = Description of Artificial Sequence: Synthetic oligonucleotide
  misc_feature 1..20: note = Target: ANGPTL3; (-) strand; PAM type: NNAGAAW; PAM sequence: GAAGAAA
  source 1..20: mol_type = other DNA
gaagtgtatgttgagctaga

SEQ ID NO: 5408 - DNA, 20 bp, synthetic construct
  misc_feature 1..20: note = Description of Artificial Sequence: Synthetic oligonucleotide
  misc_feature 1..20: note = Target: ANGPTL3; (-) strand; PAM type: NNAGAAW; PAM sequence: TAAGAAA
  source 1..20: mol_type = other DNA
aatatagaaccacaaaaggg

SEQ ID NO: 5409 - DNA, 20 bp, synthetic construct
  misc_feature 1..20: note = Description of Artificial Sequence: Synthetic oligonucleotide
  misc_feature 1..20: note = Target: ANGPTL3; (-) strand; PAM type: NNAGAAW; PAM sequence: AAAGAAT
  source 1..20: mol_type = other DNA
ttttggtctcgtaccttttt

SEQ ID NO: 5410 - DNA, 20 bp, synthetic construct
  misc_feature 1..20: note = Description of Artificial Sequence: Synthetic oligonucleotide
  misc_feature 1..20: note = Target: ANGPTL3; (-) strand; PAM type: NNAGAAW; PAM sequence: TGAGAAA
  source 1..20: mol_type = other DNA
catattaagataatgtaaat

SEQ ID NO: 5411 - DNA, 20 bp, synthetic construct
  misc_feature 1..20: note = Description of Artificial Sequence: Synthetic oligonucleotide
  misc_feature 1..20: note = Target: ANGPTL3; (-) strand; PAM type: NNAGAAW; PAM sequence: TGAGAAT
  source 1..20: mol_type = other DNA
ctgttttctcatctctccag

SEQ ID NO: 5412 - DNA, 20 bp, synthetic construct
  misc_feature 1..20: note = Description of Artificial Sequence: Synthetic oligonucleotide
  misc_feature 1..20: note = Target: ANGPTL3; (-) strand; PAM type: NNAGAAW; PAM sequence: TCAGAAT
  source 1..20: mol_type = other DNA
ctggaataagactgcctgaa

SEQ ID NO: 5413 - DNA, 20 bp, synthetic construct
  misc_feature 1..20: note = Description of Artificial Sequence: Synthetic oligonucleotide
  misc_feature 1..20: note = Target: ANGPTL3; (-) strand; PAM type: NNAGAAW; PAM sequence: TTAGAAA
  source 1..20: mol_type = other DNA
tcgtccctaaatttctattc

SEQ ID NO: 5414 - DNA, 20 bp, synthetic construct
  misc_feature 1..20: note = Description of Artificial Sequence: Synthetic oligonucleotide
  misc_feature 1..20: note = Target: ANGPTL3; (-) strand; PAM type: NNAGAAW; PAM sequence: AAAGAAA
  source 1..20: mol_type = other DNA
tatataatcaaccttaccta

SEQ ID NO: 5415 - DNA, 20 bp, synthetic construct
  misc_feature 1..20: note = Description of Artificial Sequence: Synthetic oligonucleotide
  misc_feature 1..20: note = Target: ANGPTL3; (-) strand; PAM type: NNAGAAW; PAM sequence: TAAGAAT
  source 1..20: mol_type = other DNA
tattaatatggtgaaattgt

SEQ ID NO: 5416 - DNA, 20 bp, synthetic construct
  misc_feature 1..20: note = Description of Artificial Sequence: Synthetic oligonucleotide
  misc_feature 1..20: note = Target: ANGPTL3; (-) strand; PAM type: NNAGAAW; PAM sequence: TGAGAAA
  source 1..20: mol_type = other DNA
tgttcatattaagaaatttg

SEQ ID NO: 5417 - DNA, 20 bp, synthetic construct
  misc_feature 1..20: note = Description of Artificial Sequence: Synthetic oligonucleotide
  misc_feature 1..20: note = Target: ANGPTL3; (-) strand; PAM type: NNAGAAW; PAM sequence: TAAGAAA
  source 1..20: mol_type = other DNA
ttcttattgagtgttcatat

SEQ ID NO: 5418 - DNA, 20 bp, synthetic construct
  misc_feature 1..20: note = Description of Artificial Sequence: Synthetic oligonucleotide
  misc_feature 1..20: note = Target: ANGPTL3; (-) strand; PAM type: NNAGAAW; PAM sequence: CTAGAAT
  source 1..20: mol_type = other DNA
tgtggtcatctaggaccaaa

SEQ ID NO: 5419 - DNA, 20 bp, synthetic construct
  misc_feature 1..20: note = Description of Artificial Sequence: Synthetic oligonucleotide
  misc_feature 1..20: note = Target: ANGPTL3; (-) strand; PAM type: NNAGAAW; PAM sequence: AAAGAAA
  source 1..20: mol_type = other DNA
gatcaatgctaaatgaaatc

SEQ ID NO: 5420 - DNA, 20 bp, synthetic construct
  misc_feature 1..20: note = Description of Artificial Sequence: Synthetic oligonucleotide
  misc_feature 1..20: note = Target: ANGPTL3; (-) strand; PAM type: NNAGAAW; PAM sequence: CCAGAAA
  source 1..20: mol_type = other DNA
ctatatataccaatatttgc

SEQ ID NO: 5421 - DNA, 20 bp, synthetic construct
  misc_feature 1..20: note = Description of Artificial Sequence: Synthetic oligonucleotide
  misc_feature 1..20: note = Target: ANGPTL3; (-) strand; PAM type: NNAGAAW; PAM sequence: AGAGAAT
  source 1..20: mol_type = other DNA
ttgattttggctctggagat

SEQ ID NO: 5422 - DNA, 20 bp, synthetic construct
  misc_feature 1..20: note = Description of Artificial Sequence: Synthetic oligonucleotide
  misc_feature 1..20: note = Target: ANGPTL3; (-) strand; PAM type: NNAGAAW; PAM sequence: GTAGAAT
  source 1..20: mol_type = other DNA
atatttcactttttgttgaa

SEQ ID NO: 5423 - DNA, 20 bp, synthetic construct
  misc_feature 1..20: note = Description of Artificial Sequence: Synthetic oligonucleotide
  misc_feature 1..20: note = Target: ANGPTL3; (-) strand; PAM type: NNAGAAW; PAM sequence: TTAGAAA
  source 1..20: mol_type = other DNA
agtatttcaaatggcatgcc

SEQ ID NO: 5424 - DNA, 20 bp, synthetic construct
  misc_feature 1..20: note = Description of Artificial Sequence: Synthetic oligonucleotide
  misc_feature 1..20: note = Target: ANGPTL3; (-) strand; PAM type: NNAGAAW; PAM sequence: GGAGAAT
  source 1..20: mol_type = other DNA
tttaatctgttttaaacact

SEQ ID NO: 5425 - DNA, 20 bp, synthetic construct
  misc_feature 1..20: note = Description of Artificial Sequence: Synthetic oligonucleotide
  misc_feature 1..20: note = Target: ANGPTL3; (-) strand; PAM type: NNAGAAW; PAM sequence: AAAGAAA
  source 1..20: mol_type = other DNA
gattttctgaacttcaatta

SEQ ID NO: 5426 - DNA, 20 bp, synthetic construct
  misc_feature 1..20: note = Description of Artificial Sequence: Synthetic oligonucleotide
  misc_feature 1..20: note = Target: ANGPTL3; (-) strand; PAM type: NNAGAAW; PAM sequence: AGAGAAA
  source 1..20: mol_type = other DNA
tattgtgtggttttgagcaa

SEQ ID NO: 5427 - DNA, 20 bp, synthetic construct
  misc_feature 1..20: note = Description of Artificial Sequence: Synthetic oligonucleotide
  misc_feature 1..20: note = Target: ANGPTL3; (-) strand; PAM type: NNAGAAW; PAM sequence: TCAGAAT
  source 1..20: mol_type = other DNA
tttgaatactggtaaagcgg

SEQ ID NO: 5428 - DNA, 20 bp, synthetic construct
  misc_feature 1..20: note = Description of Artificial Sequence: Synthetic oligonucleotide
  misc_feature 1..20: note = Target: ANGPTL3; (-) strand; PAM type: NNAGAAW; PAM sequence: GGAGAAA
  source 1..20: mol_type = other DNA
taaataaaggtgagtgtgca

SEQ ID NO: 5429 - DNA, 20 bp, synthetic construct
  misc_feature 1..20: note = Description of Artificial Sequence: Synthetic oligonucleotide
  misc_feature 1..20: note = Target: ANGPTL3; (-) strand; PAM type: NNAGAAW; PAM sequence: ACAGAAA
  source 1..20: mol_type = other DNA
acattacatttattaattca

SEQ ID NO: 5430 - DNA, 20 bp, synthetic construct
  misc_feature 1..20: note = Description of Artificial Sequence: Synthetic oligonucleotide
  misc_feature 1..20: note = Target: ANGPTL3; (-) strand; PAM type: NNAGAAW; PAM sequence: TTAGAAT
  source 1..20: mol_type = other DNA
ttaaactattgtactgcata

SEQ ID NO: 5431 - DNA, 20 bp, synthetic construct
  misc_feature 1..20: note = Description of Artificial Sequence: Synthetic oligonucleotide
  misc_feature 1..20: note = Target: ANGPTL3; (-) strand; PAM type: NNAGAAW; PAM sequence: TTAGAAT
  source 1..20: mol_type = other DNA
aagatataattgaaaagaat

SEQ ID NO: 5432 - DNA, 20 bp, synthetic construct
  misc_feature 1..20: note = Description of Artificial Sequence: Synthetic oligonucleotide
  misc_feature 1..20: note = Target: ANGPTL3; (-) strand; PAM type: NNAGAAW; PAM sequence: AAAGAAT
  source 1..20: mol_type = other DNA
atagtaaaagatataattga

SEQ ID NO: 5433 - DNA, 20 bp, synthetic construct
  misc_feature 1..20: note = Description of Artificial Sequence: Synthetic oligonucleotide
  misc_feature 1..20: note = Target: ANGPTL3; (-) strand; PAM type: NNAGAAW; PAM sequence: TCAGAAA
  source 1..20: mol_type = other DNA
gatctaactcttcttccaac

SEQ ID NO: 5434 - DNA, 20 bp, synthetic construct
  misc_feature 1..20: note = Description of Artificial Sequence: Synthetic oligonucleotide
  misc_feature 1..20: note = Target: ANGPTL3; (-) strand; PAM type: NNAGAAW; PAM sequence: TGAGAAA
  source 1..20: mol_type = other DNA
ttgtttttttaatttaaata

SEQ ID NO: 5435 - DNA, 20 bp, synthetic construct
  misc_feature 1..20: note = Description of Artificial Sequence: Synthetic oligonucleotide
  misc_feature 1..20: note = Target: ANGPTL3; (-) strand; PAM type: NNAGAAW; PAM sequence: GCAGAAT
  source 1..20: mol_type = other DNA
tctcattgacagtaagaaaa

SEQ ID NO: 5436 - DNA, 20 bp, synthetic construct
  misc_feature 1..20: note = Description of Artificial Sequence: Synthetic oligonucleotide
  misc_feature 1..20: note = Target: ANGPTL3; (-) strand; PAM type: NNAGAAW; PAM sequence: TAAGAAA
  source 1..20: mol_type = other DNA
atagtttttctcattgacag

SEQ ID NO: 5437 - DNA, 20 bp, synthetic construct
  misc_feature 1..20: note = Description of Artificial Sequence: Synthetic oligonucleotide
  misc_feature 1..20: note = Target: ANGPTL3; (-) strand; PAM type: NNAGAAW; PAM sequence: TTAGAAT
  source 1..20: mol_type = other DNA
aaaagtagagactgctttgc

SEQ ID NO: 5438 - DNA, 20 bp, synthetic construct
  misc_feature 1..20: note = Description of Artificial Sequence: Synthetic oligonucleotide
  misc_feature 1..20: note = Target: ANGPTL3; (-) strand; PAM type: NNAGAAW; PAM sequence: AAAGAAT
  source 1..20: mol_type = other DNA
ctagtccttctgagctgata

SEQ ID NO: 5439 - DNA, 20 bp, synthetic construct
  misc_feature 1..20: note = Description of Artificial Sequence: Synthetic oligonucleotide
  misc_feature 1..20: note = Target: ANGPTL3; (-) strand; PAM type: NNAGAAW; PAM sequence: AGAGAAA
  source 1..20: mol_type = other DNA
gtgctcttggcttggaagat

SEQ ID NO: 5440 - DNA, 20 bp, synthetic construct
  misc_feature 1..20: note = Description of Artificial Sequence: Synthetic oligonucleotide
  misc_feature 1..20: note = Target: ANGPTL3; (-) strand; PAM type: NNAGAAW; PAM sequence: GAAGAAA
  source 1..20: mol_type = other DNA
atttcttatttcattcaact

SEQ ID NO: 5441 - DNA, 20 bp, synthetic construct
  misc_feature 1..20: note = Description of Artificial Sequence: Synthetic oligonucleotide
  misc_feature 1..20: note = Target: ANGPTL3; (-) strand; PAM type: NNAGAAW; PAM sequence: TAAGAAT
  source 1..20: mol_type = other DNA
ttttagtctagaacaagtcc

SEQ ID NO: 5442 - DNA, 20 bp, synthetic construct
  misc_feature 1..20: note = Description of Artificial Sequence: Synthetic oligonucleotide
  misc_feature 1..20: note = Target: ANGPTL3; (-) strand; PAM type: NNAGAAW; PAM sequence: TAAGAAA
  source 1..20: mol_type = other DNA
tgcaataccatgatcacatc

SEQ ID NO: 5443 - DNA, 20 bp, synthetic construct
  misc_feature 1..20: note = Description of Artificial Sequence: Synthetic oligonucleotide
  misc_feature 1..20: note = Target: ANGPTL3; (-) strand; PAM type: NNAGAAW; PAM sequence: TAAGAAT
  source 1..20: mol_type = other DNA
tggcgtgttatttaagaatg

SEQ ID NO: 5444 - DNA, 20 bp, synthetic construct
  misc_feature 1..20: note = Description of Artificial Sequence: Synthetic oligonucleotide
  misc_feature 1..20: note = Target: ANGPTL3; (-) strand; PAM type: NNAGAAW; PAM sequence: TAAGAAT
  source 1..20: mol_type = other DNA
ttcttagatggcgtgttatt

SEQ ID NO: 5445 - DNA, 20 bp, synthetic construct
  misc_feature 1..20: note = Description of Artificial Sequence: Synthetic oligonucleotide
  misc_feature 1..20: note = Target: ANGPTL3; (-) strand; PAM type: NNAGAAW; PAM sequence: CTAGAAT
  source 1..20: mol_type = other DNA
ggtacattcagcaggaatgc

SEQ ID NO: 5446 - DNA, 20 bp, synthetic construct
  misc_feature 1..20: note = Description of Artificial Sequence: Synthetic oligonucleotide
  misc_feature 1..20: note = Target: ANGPTL3; (-) strand; PAM type: NNAGAAW; PAM sequence: GGAGAAT
  source 1..20: mol_type = other DNA
cagattattttagaggaaaa

SEQ ID NO: 5447 - DNA, 20 bp, synthetic construct
  misc_feature 1..20: note = Description of Artificial Sequence: Synthetic oligonucleotide
  misc_feature 1..20: note = Target: ANGPTL3; (-) strand; PAM type: NNAGAAW; PAM sequence: AGAGAAT
  source 1..20: mol_type = other DNA
tgatatgtaaaacgttaatg

SEQ ID NO: 5448 - DNA, 20 bp, synthetic construct
  misc_feature 1..20: note = Description of Artificial Sequence: Synthetic oligonucleotide
  misc_feature 1..20: note = Target: ANGPTL3; (-) strand; PAM type: NNAGAAW; PAM sequence: ATAGAAT
  source 1..20: mol_type = other DNA
ttttactatttgtaatcaaa

SEQ ID NO: 5449 - DNA, 20 bp, synthetic construct
  misc_feature 1..20: note = Description of Artificial Sequence: Synthetic oligonucleotide
  misc_feature 1..20: note = Target: ANGPTL3; (-) strand; PAM type: NNAGAAW; PAM sequence: CCAGAAT
  source 1..20: mol_type = other DNA
acaaatgggttgctttctta

SEQ ID NO: 5450 - DNA, 20 bp, synthetic construct
  misc_feature 1..20: note = Description of Artificial Sequence: Synthetic oligonucleotide
  misc_feature 1..20: note = Target: ANGPTL3; (-) strand; PAM type: NNAGAAW; PAM sequence: GTAGAAA
  source 1..20: mol_type = other DNA
gcttaatgtatgctttcttt

SEQ ID NO: 5451 - DNA, 20 bp, synthetic construct
  misc_feature 1..20: note = Description of Artificial Sequence: Synthetic oligonucleotide
  misc_feature 1..20: note = Target: ANGPTL3; (-) strand; PAM type: NNAGAAW; PAM sequence: AAAGAAA
  source 1..20: mol_type = other DNA
cccaaccaaaattctcctga

SEQ ID NO: 5452 - DNA, 20 bp, synthetic construct
  misc_feature 1..20: note = Description of Artificial Sequence: Synthetic oligonucleotide
  misc_feature 1..20: note = Target: ANGPTL3; (-) strand; PAM type: NNAGAAW; PAM sequence: AAAGAAT
  source 1..20: mol_type = other DNA
tttcgtgatttcccaagtaa

SEQ ID NO: 5453 - DNA, 20 bp, synthetic construct
  misc_feature 1..20: note = Description of Artificial Sequence: Synthetic oligonucleotide
  misc_feature 1..20: note = Target: ANGPTL3; (-) strand; PAM type: NNAGAAW; PAM sequence: GTAGAAA
  source 1..20: mol_type = other DNA
cttttgctttgtgatcccaa

SEQ ID NO: 5454 - DNA, 20 bp, synthetic construct
  misc_feature 1..20: note = Description of Artificial Sequence: Synthetic oligonucleotide
  misc_feature 1..20: note = Target: ANGPTL3; (-) strand; PAM type: NNAGAAW; PAM sequence: TCAGAAA
  source 1..20: mol_type = other DNA
atgaaaataaagtattggta

SEQ ID NO: 5455 - DNA, 20 bp, synthetic construct
  misc_feature 1..20: note = Description of Artificial Sequence: Synthetic oligonucleotide
  misc_feature 1..20: note = Target: ANGPTL3; (-) strand; PAM type: NNAGAAW; PAM sequence: AGAGAAA
  source 1..20: mol_type = other DNA
gttaagaggttttcgtctag

SEQ ID NO: 5456 - DNA, 20 bp, synthetic construct
  misc_feature 1..20: note = Description of Artificial Sequence: Synthetic oligonucleotide
  misc_feature 1..20: note = Target: ANGPTL3; (-) strand; PAM type: NNAGAAW; PAM sequence: CTAGAAT
  source 1..20: mol_type = other DNA
aggtaaaatacctgattgaa

SEQ ID NO: 5457 - DNA, 20 bp, synthetic construct
  misc_feature 1..20: note = Description of Artificial Sequence: Synthetic oligonucleotide
  misc_feature 1..20: note = Target: ANGPTL3; (-) strand; PAM type: NNAGAAW; PAM sequence: ATAGAAA
  source 1..20: mol_type = other DNA
aatctatacactaccaaaaa

SEQ ID NO: 5458 - DNA, 20 bp, synthetic construct
  misc_feature 1..20: note = Description of Artificial Sequence: Synthetic oligonucleotide
  misc_feature 1..20: note = Target: ANGPTL3; (-) strand; PAM type: NNAGAAW; PAM sequence: TGAGAAA
  source 1..20: mol_type = other DNA
agtattataagaattttgat

SEQ ID NO: 5459 - DNA, 20 bp, synthetic construct
  misc_feature 1..20: note = Description of Artificial Sequence: Synthetic oligonucleotide
  misc_feature 1..20: note = Target: ANGPTL3; (-) strand; PAM type: NNAGAAW; PAM sequence: TAAGAAT
  source 1..20: mol_type = other DNA
atttaaaacaaatagtatta

SEQ ID NO: 5460 - DNA, 20 bp, synthetic construct
  misc_feature 1..20: note = Description of Artificial Sequence: Synthetic oligonucleotide
  misc_feature 1..20: note = Target: ANGPTL3; (-) strand; PAM type: NNAGAAW; PAM sequence: TTAGAAA
  source 1..20: mol_type = other DNA
aaagtctctaaattttttat

SEQ ID NO: 5461 - DNA, 20 bp, synthetic construct
  misc_feature 1..20: note = Description of Artificial Sequence: Synthetic oligonucleotide
  misc_feature 1..20: note = Target: ANGPTL3; (-) strand; PAM type: NNAGAAW; PAM sequence: TTAGAAT
  source 1..20: mol_type = other DNA
tgaaaacctacacgaatgta

SEQ ID NO: 5462 - DNA, 20 bp, synthetic construct
  misc_feature 1..20: note = Description of Artificial Sequence: Synthetic oligonucleotide
  misc_feature 1..20: note = Target: ANGPTL3; (-) strand; PAM type: NNAGAAW; PAM sequence: CAAGAAT
  source 1..20: mol_type = other DNA
ttgtgatgtcgataaacatg

SEQ ID NO: 5463 - DNA, 20 bp, synthetic construct
  misc_feature 1..20: note = Description of Artificial Sequence: Synthetic oligonucleotide
  misc_feature 1..20: note = Target: ANGPTL3; (-) strand; PAM type: NNAGAAW; PAM sequence: GTAGAAA
  source 1..20: mol_type = other DNA
ctaccagaagtatctttctg

SEQ ID NO: 5464 - DNA, 20 bp, synthetic construct
  misc_feature 1..20: note = Description of Artificial Sequence: Synthetic oligonucleotide
  misc_feature 1..20: note = Target: ANGPTL3; (-) strand; PAM type: NNAGAAW; PAM sequence: TGAGAAA
  source 1..20: mol_type = other DNA
ttggcccacagtactaaata

SEQ ID NO: 5465 - DNA, 20 bp, synthetic construct
  misc_feature 1..20: note = Description of Artificial Sequence: Synthetic oligonucleotide
  misc_feature 1..20: note = Target: ANGPTL3; (-) strand; PAM type: NNAGAAW; PAM sequence: GTAGAAA
  source 1..20: mol_type = other DNA
tagaatgtctgagggtcagt

SEQ ID NO: 5466 - DNA, 20 bp, synthetic construct
  misc_feature 1..20: note = Description of Artificial Sequence: Synthetic oligonucleotide
  misc_feature 1..20: note = Target: ANGPTL3; (-) strand; PAM type: NNAGAAW; PAM sequence: ATAGAAT
  source 1..20: mol_type = other DNA
aaaggagtccgtgagagcag

SEQ ID NO: 5467 - DNA, 20 bp, synthetic construct
  misc_feature 1..20: note = Description of Artificial Sequence: Synthetic oligonucleotide
  misc_feature 1..20: note = Target: ANGPTL3; (-) strand; PAM type: NNAGAAW; PAM sequence: GGAGAAA
  source 1..20: mol_type = other DNA
tgaagtatagggtattgaag

SEQ ID NO: 5468 - DNA, 20 bp, synthetic construct
  misc_feature 1..20: note = Description of Artificial Sequence: Synthetic oligonucleotide
  misc_feature 1..20: note = Target: ANGPTL3; (-) strand; PAM type: NNAGAAW; PAM sequence: GTAGAAA
  source 1..20: mol_type = other DNA
tataaaggagggaaaggtgg

SEQ ID NO: 5469 - DNA, 20 bp, synthetic construct
  misc_feature 1..20: note = Description of Artificial Sequence: Synthetic oligonucleotide
  misc_feature 1..20: note = Target: ANGPTL3; (-) strand; PAM type: NNAGAAW; PAM sequence: GAAGAAA
  source 1..20: mol_type = other DNA
agttaaagacagtctttggg

SEQ ID NO: 5470 - DNA, 20 bp, synthetic construct
  misc_feature 1..20: note = Description of Artificial Sequence: Synthetic oligonucleotide
  misc_feature 1..20: note = Target: ANGPTL3; (-) strand; PAM type: NNAGAAW; PAM sequence: AAAGAAA
  source 1..20: mol_type = other DNA
aagatcccaataagattctg

SEQ ID NO: 5471 - DNA, 20 bp, synthetic construct
  misc_feature 1..20: note = Description of Artificial Sequence: Synthetic oligonucleotide
  misc_feature 1..20: note = Target: ANGPTL3; (-) strand; PAM type: NNAGAAW; PAM sequence: CTAGAAT
  source 1..20: mol_type = other DNA
gtctcactctgttgcccagg

SEQ ID NO: 5472 - DNA, 20 bp, synthetic construct
  misc_feature 1..20: note = Description of Artificial Sequence: Synthetic oligonucleotide
  misc_feature 1..20: note = Target: ANGPTL3; (-) strand; PAM type: NNAGAAW; PAM sequence: TCAGAAA
  source 1..20: mol_type = other DNA
atacggcacaatctagccaa

SEQ ID NO: 5473 - DNA, 20 bp, synthetic construct
  misc_feature 1..20: note = Description of Artificial Sequence: Synthetic oligonucleotide
  misc_feature 1..20: note = Target: ANGPTL3; (-) strand; PAM type: NNAGAAW; PAM sequence: GAAGAAT
  source 1..20: mol_type = other DNA
catttactagaatatttgtg

SEQ ID NO: 5474 - DNA, 20 bp, synthetic construct
  misc_feature 1..20: note = Description of Artificial Sequence: Synthetic oligonucleotide
  misc_feature 1..20: note = Target: ANGPTL3; (-) strand; PAM type: NNAGAAW; PAM sequence: CTAGAAT
  source 1..20: mol_type = other DNA
gatgaacaagctgccattta

SEQ ID NO: 5475 - DNA, 20 bp, synthetic construct
  misc_feature 1..20: note = Description of Artificial Sequence: Synthetic oligonucleotide
  misc_feature 1..20: note = Target: ANGPTL3; (-) strand; PAM type: NNAGAAW; PAM sequence: TCAGAAT
  source 1..20: mol_type = other DNA
ggagcttttagtactatttt

SEQ ID NO: 5476 - DNA, 20 bp, synthetic construct
  misc_feature 1..20: note = Description of Artificial Sequence: Synthetic oligonucleotide
  misc_feature 1..20: note = Target: ANGPTL3; (-) strand; PAM type: NNAGAAW; PAM sequence: ATAGAAA
  source 1..20: mol_type = other DNA
gttcaaaataaactcttgat

SEQ ID NO: 5477 - DNA, 20 bp, synthetic construct
  misc_feature 1..20: note = Description of Artificial Sequence: Synthetic oligonucleotide
  misc_feature 1..20: note = Target: ANGPTL3; (-) strand; PAM type: NNAGAAW; PAM sequence: ATAGAAT
  source 1..20: mol_type = other DNA
aaacagcctttgtattttag

SEQ ID NO: 5478 - DNA, 20 bp, synthetic construct
  misc_feature 1..20: note = Description of Artificial Sequence: Synthetic oligonucleotide
  misc_feature 1..20: note = Target: ANGPTL3; (-) strand; PAM type: NNAGAAW; PAM sequence: TGAGAAT
  source 1..20: mol_type = other DNA
gcagttttgttcttctgtcc

SEQ ID NO: 5479 - DNA, 20 bp, synthetic construct
  misc_feature 1..20: note = Description of Artificial Sequence: Synthetic oligonucleotide
  misc_feature 1..20: note = Target: ANGPTL3; (-) strand; PAM type: NNAGAAW; PAM sequence: CCAGAAA
  source 1..20: mol_type = other DNA
tgaagggaaggagtaaagtt

SEQ ID NO: 5480 - DNA, 20 bp, synthetic construct
  misc_feature 1..20: note = Description of Artificial Sequence: Synthetic oligonucleotide
  misc_feature 1..20: note = Target: ANGPTL3; (-) strand; PAM type: NNAGAAW; PAM sequence: AAAGAAT
  source 1..20: mol_type = other DNA
agactccatctcgaaaaaaa

SEQ ID NO: 5481 - DNA, 20 bp, synthetic construct
  misc_feature 1..20: note = Description of Artificial Sequence: Synthetic oligonucleotide
  misc_feature 1..20: note = Target: ANGPTL3; (-) strand; PAM type: NNAGAAW; PAM sequence: GGAGAAT
  source 1..20: mol_type = other DNA
ctactcaggagtctgaggca

SEQ ID NO: 5482 - DNA, 20 bp, synthetic construct
  misc_feature 1..20: note = Description of Artificial Sequence: Synthetic oligonucleotide
  misc_feature 1..20: note = Target: ANGPTL3; (-) strand; PAM type: NNAGAAW; PAM sequence: TCAGAAA
  source 1..20: mol_type = other DNA
caagtgtatggttctctgct

SEQ ID NO: 5483 - DNA, 20 bp, synthetic construct
  misc_feature 1..20: note = Description of Artificial Sequence: Synthetic oligonucleotide
  misc_feature 1..20: note = Target: ANGPTL3; (-) strand; PAM type: NNAGAAW; PAM sequence: GGAGAAA
  source 1..20: mol_type = other DNA
ctaggggagggatagcatta

SEQ ID NO: 5484 - DNA, 20 bp, synthetic construct
  misc_feature 1..20: note = Description of Artificial Sequence: Synthetic oligonucleotide
  misc_feature 1..20: note = Target: ANGPTL3; (-) strand; PAM type: NNAGAAW; PAM sequence: ACAGAAA
  source 1..20: mol_type = other DNA
ctcagcaaactaacacagga

SEQ ID NO: 5485 - DNA, 20 bp, synthetic construct
  misc_feature 1..20: note = Description of Artificial Sequence: Synthetic oligonucleotide
  misc_feature 1..20: note = Target: ANGPTL3; (-) strand; PAM type: NNAGAAW; PAM sequence: GAAGAAA
  source 1..20: mol_type = other DNA
ccatcaatgatagactggat

SEQ ID NO: 5486 - DNA, 20 bp, synthetic construct
  misc_feature 1..20: note = Description of Artificial Sequence: Synthetic oligonucleotide
  misc_feature 1..20: note = Target: ANGPTL3; (-) strand; PAM type: NNAGAAW; PAM sequence: CTAGAAA
  source 1..20: mol_type = other DNA
gattcctcaaggaactagaa

SEQ ID NO: 5487 - DNA, 20 bp, synthetic construct
  misc_feature 1..20: note = Description of Artificial Sequence: Synthetic oligonucleotide
  misc_feature 1..20: note = Target: ANGPTL3; (+) strand; PAM type: NNAGAAW; PAM sequence: GAAGAAA
  source 1..20: mol_type = other DNA
tgataccataaacgcaggag

SEQ ID NO: 5488 - DNA, 20 bp, synthetic construct
  misc_feature 1..20: note = Description of Artificial Sequence: Synthetic oligonucleotide
  misc_feature 1..20: note = Target: ANGPTL3; (+) strand; PAM type: NNAGAAW; PAM sequence: AAAGAAT
  source 1..20: mol_type = other DNA
ttgtttgttatatatataac

SEQ ID NO: 5489 - DNA, 20 bp, synthetic construct
  misc_feature 1..20: note = Description of Artificial Sequence: Synthetic oligonucleotide
  misc_feature 1..20: note = Target: ANGPTL3; (+) strand; PAM type: NNAGAAW; PAM sequence: TCAGAAA
  source 1..20: mol_type = other DNA
taaataattcctaaaattag

SEQ ID NO: 5490 - DNA, 20 bp, synthetic construct
  misc_feature 1..20: note = Description of Artificial Sequence: Synthetic oligonucleotide
  misc_feature 1..20: note = Target: ANGPTL3; (+) strand; PAM type: NNAGAAW; PAM sequence: TTAGAAA
  source 1..20: mol_type = other DNA
tctatacatactgtttataa

SEQ ID NO: 5491 - DNA, 20 bp, synthetic construct
  misc_feature 1..20: note = Description of Artificial Sequence: Synthetic oligonucleotide
  misc_feature 1..20: note = Target: ANGPTL3; (+) strand; PAM type: NNAGAAW; PAM sequence: GGAGAAT
  source 1..20: mol_type = other DNA
atactcgggaagctgagaca

SEQ ID NO: 5492 - DNA, 20 bp, synthetic construct
  misc_feature 1..20: note = Description of Artificial Sequence: Synthetic oligonucleotide
  misc_feature 1..20: note = Target: ANGPTL3; (+) strand; PAM type: NNAGAAW; PAM sequence: AAAGAAA
  source 1..20: mol_type = other DNA
actccgtctcaaaaataaat

SEQ ID NO: 5493 - DNA, 20 bp, synthetic construct
  misc_feature 1..20: note = Description of Artificial Sequence: Synthetic oligonucleotide
  misc_feature 1..20: note = Target: ANGPTL3; (+) strand; PAM type: NNAGAAW; PAM sequence: TAAGAAA
  source 1..20: mol_type = other DNA
gtcctaaaattctctgtagc

SEQ ID NO: 5494 - DNA, 20 bp, synthetic construct
  misc_feature 1..20: note = Description of Artificial Sequence: Synthetic oligonucleotide
  misc_feature 1..20: note = Target: ANGPTL3; (+) strand; PAM type: NNAGAAW; PAM sequence: GCAGAAA
  source 1..20: mol_type = other DNA
caggaagtattaaaaggcag

SEQ ID NO: 5495 - DNA, 20 bp, synthetic construct
  misc_feature 1..20: note = Description of Artificial Sequence: Synthetic oligonucleotide
  misc_feature 1..20: note = Target: ANGPTL3; (+) strand; PAM type: NNAGAAW; PAM sequence: TAAGAAT
  source 1..20: mol_type = other DNA
taatgctgttcaaattacta

SEQ ID NO: 5496 - DNA, 20 bp, synthetic construct
  misc_feature 1..20: note = Description of Artificial Sequence: Synthetic oligonucleotide
  misc_feature 1..20: note = Target: ANGPTL3; (+) strand; PAM type: NNAGAAW; PAM sequence: CTAGAAA
  source 1..20: mol_type = other DNA
ttataccaagagacaatata

SEQ ID NO: 5497 - DNA, 20 bp, synthetic construct
  misc_feature 1..20: note = Description of Artificial Sequence: Synthetic oligonucleotide
  misc_feature 1..20: note = Target: ANGPTL3; (+) strand; PAM type: NNAGAAW; PAM sequence: TGAGAAA
  source 1..20: mol_type = other DNA
tactctgtcagtgttatttg

SEQ ID NO: 5498 - DNA, 20 bp, synthetic construct
  misc_feature 1..20: note = Description of Artificial Sequence: Synthetic oligonucleotide
  misc_feature 1..20: note = Target: ANGPTL3; (+) strand; PAM type: NNAGAAW; PAM sequence: AAAGAAT
  source 1..20: mol_type = other DNA
cttcaaattcccttctctaa

SEQ ID NO: 5499 - DNA, 20 bp, synthetic construct
  misc_feature 1..20: note = Description of Artificial Sequence: Synthetic oligonucleotide
  misc_feature 1..20: note = Target: ANGPTL3; (+) strand; PAM type: NNAGAAW; PAM sequence: TTAGAAA
  source 1..20: mol_type = other DNA
actacgtatacattctgcac

SEQ ID NO: 5500 - DNA, 20 bp, synthetic construct
  misc_feature 1..20: note = Description of Artificial Sequence: Synthetic oligonucleotide
  misc_feature 1..20: note = Target: ANGPTL3; (+) strand; PAM type: NNAGAAW; PAM sequence: GGAGAAA
  source 1..20: mol_type = other DNA
taacttttctatttaaagaa

SEQ ID NO: 5501 - DNA, 20 bp, synthetic construct
  misc_feature 1..20: note = Description of Artificial Sequence: Synthetic oligonucleotide
  misc_feature 1..20: note = Target: ANGPTL3; (+) strand; PAM type: NNAGAAW; PAM sequence: GAAGAAT
  source 1..20: mol_type = other DNA
gtaaagggtaagatggaaat

SEQ ID NO: 5502 - DNA, 20 bp, synthetic construct
  misc_feature 1..20: note = Description of Artificial Sequence: Synthetic oligonucleotide
  misc_feature 1..20: note = Target: ANGPTL3; (+) strand; PAM type: NNAGAAW; PAM sequence: TCAGAAA
  source 1..20: mol_type = other DNA
aaaaggtacgagaccaaaat

SEQ ID NO: 5503 - DNA, 20 bp, synthetic construct
  misc_feature 1..20: note = Description of Artificial Sequence: Synthetic oligonucleotide
  misc_feature 1..20: note = Target: ANGPTL3; (+) strand; PAM type: NNAGAAW; PAM sequence: TGAGAAA
  source 1..20: mol_type = other DNA
tgttattctcactggagaga

SEQ ID NO: 5504 - DNA, 20 bp, synthetic construct
  misc_feature 1..20: note = Description of Artificial Sequence: Synthetic oligonucleotide
  misc_feature 1..20: note = Target: ANGPTL3; (+) strand; PAM type: NNAGAAW; PAM sequence: GAAGAAT
  source 1..20: mol_type = other DNA
tgaccaaaggtcacaaagct

SEQ ID NO: 5505 - DNA, 20 bp, synthetic construct
  misc_feature 1..20: note = Description of Artificial Sequence: Synthetic oligonucleotide
  misc_feature 1..20: note = Target: ANGPTL3; (+) strand; PAM type: NNAGAAW; PAM sequence: CCAGAAT
  source 1..20: mol_type = other DNA
ctgattcaggcagtcttatt

SEQ ID NO: 5506 - DNA, 20 bp, synthetic construct
  misc_feature 1..20: note = Description of Artificial Sequence: Synthetic oligonucleotide
  misc_feature 1..20: note = Target: ANGPTL3; (+) strand; PAM type: NNAGAAW; PAM sequence: TAAGAAT
  source 1..20: mol_type = other DNA
acacaatgaagaggcatttc

SEQ ID NO: 5507 - DNA, 20 bp, synthetic construct
  misc_feature 1..20: note = Description of Artificial Sequence: Synthetic oligonucleotide
  misc_feature 1..20: note = Target: ANGPTL3; (+) strand; PAM type: NNAGAAW; PAM sequence: ATAGAAA
  source 1..20: mol_type = other DNA
atgaagaggcatttctaaga

SEQ ID NO: 5508 - DNA, 20 bp, synthetic construct
  misc_feature 1..20: note = Description of Artificial Sequence: Synthetic oligonucleotide
  misc_feature 1..20: note = Target: ANGPTL3; (+) strand; PAM type: NNAGAAW; PAM sequence: AAAGAAA
  source 1..20: mol_type = other DNA
agcaagaccctgtctctaaa

SEQ ID NO: 5509 - DNA, 20 bp, synthetic construct
  misc_feature 1..20: note = Description of Artificial Sequence: Synthetic oligonucleotide
  misc_feature 1..20: note = Target: ANGPTL3; (+) strand; PAM type: NNAGAAW; PAM sequence: AAAGAAA
  source 1..20: mol_type = other DNA
gaccctgtctctaaaaaaga

SEQ ID NO: 5510 - DNA, 20 bp, synthetic construct
  misc_feature 1..20: note = Description of Artificial Sequence: Synthetic oligonucleotide
  misc_feature 1..20: note = Target: ANGPTL3; (+) strand; PAM type: NNAGAAW; PAM sequence: TAAGAAT
  source 1..20: mol_type = other DNA
ttcttaatatgaacactcaa

SEQ ID NO: 5511 - DNA, 20 bp, synthetic construct
  misc_feature 1..20: note = Description of Artificial Sequence: Synthetic oligonucleotide
  misc_feature 1..20: note = Target: ANGPTL3; (+) strand; PAM type: NNAGAAW; PAM sequence: TTAGAAA
  source 1..20: mol_type = other DNA
gcatagtggaacatttattt

SEQ ID NO: 5512 - DNA, 20 bp, synthetic construct
  misc_feature 1..20: note = Description of Artificial Sequence: Synthetic oligonucleotide
  misc_feature 1..20: note = Target: ANGPTL3; (+) strand; PAM type: NNAGAAW; PAM sequence: AAAGAAT
  source 1..20: mol_type = other DNA
aattttgggaggccaaggta

SEQ ID NO: 5513 - DNA, 20 bp, synthetic construct
  misc_feature 1..20: note = Description of Artificial Sequence: Synthetic oligonucleotide
  misc_feature 1..20: note = Target: ANGPTL3; (+) strand; PAM type: NNAGAAW; PAM sequence: TCAGAAA
  source 1..20: mol_type = other DNA
tgttactaagctaacaaact

SEQ ID NO: 5514 - DNA, 20 bp, synthetic construct
  misc_feature 1..20: note = Description of Artificial Sequence: Synthetic oligonucleotide
  misc_feature 1..20: note = Target: ANGPTL3; (+) strand; PAM type: NNAGAAW; PAM sequence: GGAGAAA
  source 1..20: mol_type = other DNA
acagagacacagaacacagt

SEQ ID NO: 5515 - DNA, 20 bp, synthetic construct
  misc_feature 1..20: note = Description of Artificial Sequence: Synthetic oligonucleotide
  misc_feature 1..20: note = Target: ANGPTL3; (+) strand; PAM type: NNAGAAW; PAM sequence: GGAGAAA
  source 1..20: mol_type = other DNA
gtaacaccacctgagggagt

SEQ ID NO: 5516 - DNA, 20 bp, synthetic construct
  misc_feature 1..20: note = Description of Artificial Sequence: Synthetic oligonucleotide
  misc_feature 1..20: note = Target: ANGPTL3; (+) strand; PAM type: NNAGAAW; PAM sequence: AGAGAAA
  source 1..20: mol_type = other DNA
ggagtggagaaaggcttcag

SEQ ID NO: 5517 - DNA, 20 bp, synthetic construct
  misc_feature 1..20: note = Description of Artificial Sequence: Synthetic oligonucleotide
  misc_feature 1..20: note = Target: ANGPTL3; (+) strand; PAM type: NNAGAAW; PAM sequence: TGAGAAA
  source 1..20: mol_type = other DNA
aaaagaactaaagtacagtt

SEQ ID NO: 5518 - DNA, 20 bp, synthetic construct
  misc_feature 1..20: note = Description of Artificial Sequence: Synthetic oligonucleotide
  misc_feature 1..20: note = Target: ANGPTL3; (+) strand; PAM type: NNAGAAW; PAM sequence: GAAGAAA
  source 1..20: mol_type = other DNA
gaagtctaggtctgcttcca

SEQ ID NO: 5519 - DNA, 20 bp, synthetic construct
  misc_feature 1..20: note = Description of Artificial Sequence: Synthetic oligonucleotide
  misc_feature 1..20: note = Target: ANGPTL3; (+) strand; PAM type: NNAGAAW; PAM sequence: CCAGAAT
  source 1..20: mol_type = other DNA
tgttcctctagttatttcct

SEQ ID NO: 5520 - DNA, 20 bp, synthetic construct
  misc_feature 1..20: note = Description of Artificial Sequence: Synthetic oligonucleotide
  misc_feature 1..20: note = Target: ANGPTL3; (+) strand; PAM type: NNAGAAW; PAM sequence: GAAGAAA
  source 1..20: mol_type = other DNA
aaaccagtgaaatcaaagaa

SEQ ID NO: 5521 - DNA, 20 bp, synthetic construct
  misc_feature 1..20: note = Description of Artificial Sequence: Synthetic oligonucleotide
  misc_feature 1..20: note = Target: ANGPTL3; (+) strand; PAM type: NNAGAAW; PAM sequence: AAAGAAT
  source 1..20: mol_type = other DNA
caagtcaaaaatgaagaggt

SEQ ID NO: 5522 - DNA, 20 bp, synthetic construct
  misc_feature 1..20: note = Description of Artificial Sequence: Synthetic oligonucleotide
  misc_feature 1..20: note = Target: ANGPTL3; (+) strand; PAM type: NNAGAAW; PAM sequence: GAAGAAA
  source 1..20: mol_type = other DNA
caaaacttgaaagcctccta

SEQ ID NO: 5523 - DNA, 20 bp, synthetic construct
  misc_feature 1..20: note = Description of Artificial Sequence: Synthetic oligonucleotide
  misc_feature 1..20: note = Target: ANGPTL3; (+) strand; PAM type: NNAGAAW; PAM sequence: GTAGAAA
  source 1..20: mol_type = other DNA
agtaacttcacttaaagtaa

SEQ ID NO: 5524 - DNA, 20 bp, synthetic construct
  misc_feature 1..20: note = Description of Artificial Sequence: Synthetic oligonucleotide
  misc_feature 1..20: note = Target: ANGPTL3; (+) strand; PAM type: NNAGAAW; PAM sequence: CAAGAAA
  source 1..20: mol_type = other DNA
tgttgaaatacttttttttc

SEQ ID NO: 5525 - DNA, 20 bp, synthetic construct
  misc_feature 1..20: note = Description of Artificial Sequence: Synthetic oligonucleotide
  misc_feature 1..20: note = Target: ANGPTL3; (+) strand; PAM type: NNAGAAW; PAM sequence: CCAGAAA
  source 1..20: mol_type = other DNA
ttttccaagaaaaataatct

SEQ ID NO: 5526 - DNA, 20 bp, synthetic construct
  misc_feature 1..20: note = Description of Artificial Sequence: Synthetic oligonucleotide
  misc_feature 1..20: note = Target: ANGPTL3; (+) strand; PAM type: NNAGAAW; PAM sequence: TCAGAAA
  source 1..20: mol_type = other DNA
ctttttcttttaattgaagt

SEQ ID NO: 5527 - DNA, 20 bp, synthetic construct
  misc_feature 1..20: note = Description of Artificial Sequence: Synthetic oligonucleotide
  misc_feature 1..20: note = Target: ANGPTL3; (+) strand; PAM type: NNAGAAW; PAM sequence: ATAGAAA
  source 1..20: mol_type = other DNA
gatagtgttacaggaaatta

SEQ ID NO: 5528 - DNA, 20 bp, synthetic construct
  misc_feature 1..20: note = Description of Artificial Sequence: Synthetic oligonucleotide
  misc_feature 1..20: note = Target: ANGPTL3; (+) strand; PAM type: NNAGAAW; PAM sequence: AAAGAAA
  source 1..20: mol_type = other DNA
tgttacaggaaattaataga

SEQ ID NO: 5529 - DNA, 20 bp, synthetic construct
  misc_feature 1..20: note = Description of Artificial Sequence: Synthetic oligonucleotide
  misc_feature 1..20: note = Target: ANGPTL3; (+) strand; PAM type: NNAGAAW; PAM sequence: GTAGAAA
  source 1..20: mol_type = other DNA
ctctctatatccagactttt

SEQ ID NO: 5530 - DNA, 20 bp, synthetic construct
  misc_feature 1..20: note = Description of Artificial Sequence: Synthetic oligonucleotide
  misc_feature 1..20: note = Target: ANGPTL3; (+) strand; PAM type: NNAGAAW; PAM sequence: AAAGAAA
  source 1..20: mol_type = other DNA
accaacagcatagtcaaata

SEQ ID NO: 5531 - DNA, 20 bp, synthetic construct
  misc_feature 1..20: note = Description of Artificial Sequence: Synthetic oligonucleotide
  misc_feature 1..20: note = Target: ANGPTL3; (+) strand; PAM type: NNAGAAW; PAM sequence: ATAGAAA
  source 1..20: mol_type = other DNA
agcatagtcaaataaaagaa

SEQ ID NO: 5532 - DNA, 20 bp, synthetic construct
  misc_feature 1..20: note = Description of Artificial Sequence: Synthetic oligonucleotide
  misc_feature 1..20: note = Target: ANGPTL3; (+) strand; PAM type: NNAGAAW; PAM sequence: TAAGAAA
  source 1..20: mol_type = other DNA
cagaacttataggattattg

SEQ ID NO: 5533 - DNA, 20 bp, synthetic construct
  misc_feature 1..20: note = Description of Artificial Sequence: Synthetic oligonucleotide
  misc_feature 1..20: note = Target: ANGPTL3; (+) strand; PAM type: NNAGAAW; PAM sequence: CCAGAAT
  source 1..20: mol_type = other DNA
ttccattatttgtatatact

SEQ ID NO: 5534 - DNA, 20 bp, synthetic construct
  misc_feature 1..20: note = Description of Artificial Sequence: Synthetic oligonucleotide
  misc_feature 1..20: note = Target: ANGPTL3; (+) strand; PAM type: NNAGAAW; PAM sequence: ATAGAAT
  source 1..20: mol_type = other DNA
atttgtatatactccagaat

SEQ ID NO: 5535 - DNA, 20 bp, synthetic construct
  misc_feature 1..20: note = Description of Artificial Sequence: Synthetic oligonucleotide
  misc_feature 1..20: note = Target: ANGPTL3; (+) strand; PAM type: NNAGAAW; PAM sequence: CTAGAAA
  source 1..20: mol_type = other DNA
gattattattacttggatta

SEQ ID NO: 5536 - DNA, 20 bp, synthetic construct
  misc_feature 1..20: note = Description of Artificial Sequence: Synthetic oligonucleotide
  misc_feature 1..20: note = Target: ANGPTL3; (+) strand; PAM type: NNAGAAW; PAM sequence: TTAGAAA
  source 1..20: mol_type = other DNA
tgacagagggaagcacttgt

SEQ ID NO: 5537 - DNA, 20 bp, synthetic construct
  misc_feature 1..20: note = Description of Artificial Sequence: Synthetic oligonucleotide
  misc_feature 1..20: note = Target: ANGPTL3; (+) strand; PAM type: NNAGAAW; PAM sequence: TCAGAAT
  source 1..20: mol_type = other DNA
ttgtttagaaaaaagctatg

SEQ ID NO: 5538 - DNA, 20 bp, synthetic construct
  misc_feature 1..20: note = Description of Artificial Sequence: Synthetic oligonucleotide
  misc_feature 1..20: note = Target: ANGPTL3; (+) strand; PAM type: NNAGAAW; PAM sequence: AGAGAAA
  source 1..20: mol_type = other DNA
aaaaaacataatataaactc

SEQ ID NO: 5539 - DNA, 20 bp, synthetic construct
  misc_feature 1..20: note = Description of Artificial Sequence: Synthetic oligonucleotide
  misc_feature 1..20: note = Target: ANGPTL3; (+) strand; PAM type: NNAGAAW; PAM sequence: GAAGAAA
  source 1..20: mol_type = other DNA
gtctaaaaataaaaatgtgt

SEQ ID NO: 5540 - DNA, 20 bp, synthetic construct
  misc_feature 1..20: note = Description of Artificial Sequence: Synthetic oligonucleotide
  misc_feature 1..20: note = Target: ANGPTL3; (+) strand; PAM type: NNAGAAW; PAM sequence: GTAGAAA
  source 1..20: mol_type = other DNA
taagatcacatagttactta

SEQ ID NO: 5541 - DNA, 20 bp, synthetic construct
  misc_feature 1..20: note = Description of Artificial Sequence: Synthetic oligonucleotide
  misc_feature 1..20: note = Target: ANGPTL3; (+) strand; PAM type: NNAGAAW; PAM sequence: TGAGAAA
  source 1..20: mol_type = other DNA
tctgcttttcttactgtcaa

SEQ ID NO: 5542 - DNA, 20 bp, synthetic construct
  misc_feature 1..20: note = Description of Artificial Sequence: Synthetic oligonucleotide
  misc_feature 1..20: note = Target: ANGPTL3; (+) strand; PAM type: NNAGAAW; PAM sequence: ATAGAAA
  source 1..20: mol_type = other DNA
aacgataaactactgaatat

SEQ ID NO: 5543 - DNA, 20 bp, synthetic construct
  misc_feature 1..20: note = Description of Artificial Sequence: Synthetic oligonucleotide
  misc_feature 1..20: note = Target: ANGPTL3; (+) strand; PAM type: NNAGAAW; PAM sequence: CAAGAAA
  source 1..20: mol_type = other DNA
gtcaaaaattatcaaattat

SEQ ID NO: 5544 - DNA, 20 bp, synthetic construct
  misc_feature 1..20: note = Description of Artificial Sequence: Synthetic oligonucleotide
  misc_feature 1..20: note = Target: ANGPTL3; (+) strand; PAM type: NNAGAAW; PAM sequence: ACAGAAT
  source 1..20: mol_type = other DNA
ttattaaacttaaaatctga

SEQ ID NO: 5545 - DNA, 20 bp, synthetic construct
  misc_feature 1..20: note = Description of Artificial Sequence: Synthetic oligonucleotide
  misc_feature 1..20: note = Target: ANGPTL3; (+) strand; PAM type: NNAGAAW; PAM sequence: AAAGAAT
  source 1..20: mol_type = other DNA
atattttattcatataaata

SEQ ID NO: 5546 - DNA, 20 bp, synthetic construct
  misc_feature 1..20: note = Description of Artificial Sequence: Synthetic oligonucleotide
  misc_feature 1..20: note = Target: ANGPTL3; (+) strand; PAM type: NNAGAAW; PAM sequence: ACAGAAA
  source 1..20: mol_type = other DNA
ggactagtattcaagaaccc

SEQ ID NO: 5547 - DNA, 20 bp, synthetic construct
  misc_feature 1..20: note = Description of Artificial Sequence: Synthetic oligonucleotide
  misc_feature 1..20: note = Target: ANGPTL3; (+) strand; PAM type: NNAGAAW; PAM sequence: TAAGAAA
  source 1..20: mol_type = other DNA
ctttcttcagttgaatgaaa

SEQ ID NO: 5548 - DNA, 20 bp, synthetic construct
  misc_feature 1..20: note = Description of Artificial Sequence: Synthetic oligonucleotide
  misc_feature 1..20: note = Target: ANGPTL3; (+) strand; PAM type: NNAGAAW; PAM sequence: AGAGAAA
  source 1..20: mol_type = other DNA
aagacatacctaagacaatc

SEQ ID NO: 5549 - DNA, 20 bp, synthetic construct
  misc_feature 1..20: note = Description of Artificial Sequence: Synthetic oligonucleotide
  misc_feature 1..20: note = Target: ANGPTL3; (+) strand; PAM type: NNAGAAW; PAM sequence: AAAGAAA
  source 1..20: mol_type = other DNA
aaaaaataattaatttttta

SEQ ID NO: 5550 - DNA, 20 bp, synthetic construct
  misc_feature 1..20: note = Description of Artificial Sequence: Synthetic oligonucleotide
  misc_feature 1..20: note = Target: ANGPTL3; (+) strand; PAM type: NNAGAAW; PAM sequence: TAAGAAA
  source 1..20: mol_type = other DNA
ttcttaaataacacgccatc

SEQ ID NO: 5551 - DNA, 20 bp, synthetic construct
  misc_feature 1..20: note = Description of Artificial Sequence: Synthetic oligonucleotide
  misc_feature 1..20: note = Target: ANGPTL3; (+) strand; PAM type: NNAGAAW; PAM sequence: GGAGAAT
  source 1..20: mol_type = other DNA
atcaggtaaaacctgtctaa

SEQ ID NO: 5552 - DNA, 20 bp, synthetic construct
  misc_feature 1..20: note = Description of Artificial Sequence: Synthetic oligonucleotide
  misc_feature 1..20: note = Target: ANGPTL3; (+) strand; PAM type: NNAGAAW; PAM sequence: ATAGAAT
  source 1..20: mol_type = other DNA
caattatttaaatataatat

SEQ ID NO: 5553 - DNA, 20 bp, synthetic construct
  misc_feature 1..20: note = Description of Artificial Sequence: Synthetic oligonucleotide
  misc_feature 1..20: note = Target: ANGPTL3; (+) strand; PAM type: NNAGAAW; PAM sequence: CGAGAAT
  source 1..20: mol_type = other DNA
taaaaggctgacaggtaagt

SEQ ID NO: 5554 - DNA, 20 bp, synthetic construct
  misc_feature 1..20: note = Description of Artificial Sequence: Synthetic oligonucleotide
  misc_feature 1..20: note = Target: ANGPTL3; (+) strand; PAM type: NNAGAAW; PAM sequence: TAAGAAA
  source 1..20: mol_type = other DNA
gaatactcacttaattctgg

SEQ ID NO: 5555 - DNA, 20 bp, synthetic construct
  misc_feature 1..20: note = Description of Artificial Sequence: Synthetic oligonucleotide
  misc_feature 1..20: note = Target: ANGPTL3; (+) strand; PAM type: NNAGAAW; PAM sequence: ACAGAAA
  source 1..20: mol_type = other DNA
taaaaataatttttaaaatt

SEQ ID NO: 5556 - DNA, 20 bp, synthetic construct
  misc_feature 1..20: note = Description of Artificial Sequence: Synthetic oligonucleotide
  misc_feature 1..20: note = Target: ANGPTL3; (+) strand; PAM type: NNAGAAW; PAM sequence: AAAGAAA
  source 1..20: mol_type = other DNA
ttattcctgtctttttctac

SEQ ID NO: 5557 - DNA, 20 bp, synthetic construct
  misc_feature 1..20: note = Description of Artificial Sequence: Synthetic oligonucleotide
  misc_feature 1..20: note = Target: ANGPTL3; (+) strand; PAM type: NNAGAAW; PAM sequence: GAAGAAA
  source 1..20: mol_type = other DNA
caaaggccaggtttacattt

SEQ ID NO: 5558 - DNA, 20 bp, synthetic construct
  misc_feature 1..20: note = Description of Artificial Sequence: Synthetic oligonucleotide
  misc_feature 1..20: note = Target: ANGPTL3; (+) strand; PAM type: NNAGAAW; PAM sequence: ATAGAAA
  source 1..20: mol_type = other DNA
catgtcttgtcatatgcatt

SEQ ID NO: 5559 - DNA, 20 bp, synthetic construct
  misc_feature 1..20: note = Description of Artificial Sequence: Synthetic oligonucleotide
  misc_feature 1..20: note = Target: ANGPTL3; (+) strand; PAM type: NNAGAAW; PAM sequence: GGAGAAT
  source 1..20: mol_type = other DNA
ttttaaaacttttcttttca

SEQ ID NO: 5560 - DNA, 20 bp, synthetic construct
  misc_feature 1..20: note = Description of Artificial Sequence: Synthetic oligonucleotide
  misc_feature 1..20: note = Target: ANGPTL3; (+) strand; PAM type: NNAGAAW; PAM sequence: TAAGAAA
  source 1..20: mol_type = other DNA
ctaaaacactgtaatattta

SEQ ID NO: 5561 - DNA, 20 bp, synthetic construct
  misc_feature 1..20: note = Description of Artificial Sequence: Synthetic oligonucleotide
  misc_feature 1..20: note = Target: ANGPTL3; (+) strand; PAM type: NNAGAAW; PAM sequence: GGAGAAA
  source 1..20: mol_type = other DNA
ggtggtggcatgatgagtgt

SEQ ID NO: 5562 - DNA, 20 bp, synthetic construct
  misc_feature 1..20: note = Description of Artificial Sequence: Synthetic oligonucleotide
  misc_feature 1..20: note = Target: ANGPTL3; (+) strand; PAM type: NNAGAAW; PAM sequence: TCAGAAA
  source 1..20: mol_type = other DNA
tgttgatccatccaacagat

SEQ ID NO: 5563 - DNA, 20 bp, synthetic construct
  misc_feature 1..20: note = Description of Artificial Sequence: Synthetic oligonucleotide
  misc_feature 1..20: note = Target: ANGPTL3; (+) strand; PAM type: NNAGAAW; PAM sequence: AGAGAAA
  source 1..20: mol_type = other DNA
aatctggtattaaatcctta

SEQ ID NO: 5564 - DNA, 20 bp, synthetic construct
  misc_feature 1..20: note = Description of Artificial Sequence: Synthetic oligonucleotide
  misc_feature 1..20: note = Target: ANGPTL3; (+) strand; PAM type: NNAGAAW; PAM sequence: TGAGAAA
  source 1..20: mol_type = other DNA
taaatccttaagagaaagct

SEQ ID NO: 5565 - DNA, 20 bp, synthetic construct
  misc_feature 1..20: note = Description of Artificial Sequence: Synthetic oligonucleotide
  misc_feature 1..20: note = Target: ANGPTL3; (+) strand; PAM type: NNAGAAW; PAM sequence: AAAGAAT
  source 1..20: mol_type = other DNA
acatacaatcacataacctt

SEQ ID NO: 5566 - DNA, 20 bp, synthetic construct
  misc_feature 1..20: note = Description of Artificial Sequence: Synthetic oligonucleotide
  misc_feature 1..20: note = Target: ANGPTL3; (+) strand; PAM type: NNAGAAW; PAM sequence: GCAGAAT
  source 1..20: mol_type = other DNA
tatttatgaaacctaatgaa

SEQ ID NO: 5567 - DNA, 20 bp, synthetic construct
  misc_feature 1..20: note = Description of Artificial Sequence: Synthetic oligonucleotide
  misc_feature 1..20: note = Target: ANGPTL3; (+) strand; PAM type: NNAGAAW; PAM sequence: TAAGAAT
  source 1..20: mol_type = other DNA
ggaatcttgtcagattacag

SEQ ID NO: 5568 - DNA, 20 bp, synthetic construct
  misc_feature 1..20: note = Description of Artificial Sequence: Synthetic oligonucleotide
  misc_feature 1..20: note = Target: ANGPTL3; (+) strand; PAM type: NNAGAAW; PAM sequence: GTAGAAA
  source 1..20: mol_type = other DNA
acattcgtgtaggttttcaa

SEQ ID NO: 5569 - DNA, 20 bp, synthetic construct
  misc_feature 1..20: note = Description of Artificial Sequence: Synthetic oligonucleotide
  misc_feature 1..20: note = Target: ANGPTL3; (+) strand; PAM type: NNAGAAW; PAM sequence: ATAGAAA
  source 1..20: mol_type = other DNA
aaagacccagtccctaaatt

SEQ ID NO: 5570 - DNA, 20 bp, synthetic construct
  misc_feature 1..20: note = Description of Artificial Sequence: Synthetic oligonucleotide
  misc_feature 1..20: note = Target: ANGPTL3; (+) strand; PAM type: NNAGAAW; PAM sequence: TCAGAAT
  source 1..20: mol_type = other DNA
ttttaccacagtatcacttg

SEQ ID NO: 5571 - DNA, 20 bp, synthetic construct
  misc_feature 1..20: note = Description of Artificial Sequence: Synthetic oligonucleotide
  misc_feature 1..20: note = Target: ANGPTL3; (+) strand; PAM type: NNAGAAW; PAM sequence: TAAGAAA
  source 1..20: mol_type = other DNA
tgattttttaaaactgccag

SEQ ID NO: 5572 - DNA, 20 bp, synthetic construct
  misc_feature 1..20: note = Description of Artificial Sequence: Synthetic oligonucleotide
  misc_feature 1..20: note = Target: ANGPTL3; (+) strand; PAM type: NNAGAAW; PAM sequence: CCAGAAA
  source 1..20: mol_type = other DNA
tcctaagtaaatattttgtt

SEQ ID NO: 5573 - DNA, 20 bp, synthetic construct
  misc_feature 1..20: note = Description of Artificial Sequence: Synthetic oligonucleotide
  misc_feature 1..20: note = Target: ANGPTL3; (+) strand; PAM type: NNAGAAW; PAM sequence: CCAGAAT
  source 1..20: mol_type = other DNA
taacgctgatttttttaggg

SEQ ID NO: 5574 - DNA, 20 bp, synthetic construct
  misc_feature 1..20: note = Description of Artificial Sequence: Synthetic oligonucleotide
  misc_feature 1..20: note = Target: ANGPTL3; (+) strand; PAM type: NNAGAAW; PAM sequence: CCAGAAA
  source 1..20: mol_type = other DNA
ccatataaagcttttttcta

SEQ ID NO: 5575 - DNA, 20 bp, synthetic construct
  misc_feature 1..20: note = Description of Artificial Sequence: Synthetic oligonucleotide
  misc_feature 1..20: note = Target: ANGPTL3; (+) strand; PAM type: NNAGAAW; PAM sequence: AGAGAAA
  source 1..20: mol_type = other DNA
aagatacttctggtagaaga

SEQ ID NO: 5576 - DNA, 20 bp, synthetic construct
  misc_feature 1..20: note = Description of Artificial Sequence: Synthetic oligonucleotide
  misc_feature 1..20: note = Target: ANGPTL3; (+) strand; PAM type: NNAGAAW; PAM sequence: TAAGAAT
  source 1..20: mol_type = other DNA
atctctctactacttaataa

SEQ ID NO: 5577 - DNA, 20 bp, synthetic construct
  misc_feature 1..20: note = Description of Artificial Sequence: Synthetic oligonucleotide
  misc_feature 1..20: note = Target: ANGPTL3; (+) strand; PAM type: NNAGAAW; PAM sequence: GGAGAAT
  source 1..20: mol_type = other DNA
ctactcaagaggctgagaca

SEQ ID NO: 5578 - DNA, 20 bp, synthetic construct
  misc_feature 1..20: note = Description of Artificial Sequence: Synthetic oligonucleotide
  misc_feature 1..20: note = Target: ANGPTL3; (+) strand; PAM type: NNAGAAW; PAM sequence: TCAGAAT
  source 1..20: mol_type = other DNA
actatatgcacaaatttctt

SEQ ID NO: 5579 - DNA, 20 bp, synthetic construct
  misc_feature 1..20: note = Description of Artificial Sequence: Synthetic oligonucleotide
  misc_feature 1..20: note = Target: ANGPTL3; (+) strand; PAM type: NNAGAAW; PAM sequence: TTAGAAT
  source 1..20: mol_type = other DNA
ttgggatcttagcttaaatc

SEQ ID NO: 5580 - DNA, 20 bp, synthetic construct
  misc_feature 1..20: note = Description of Artificial Sequence: Synthetic oligonucleotide
  misc_feature 1..20: note = Target: ANGPTL3; (+) strand; PAM type: NNAGAAW; PAM sequence: GGAGAAT
  source 1..20: mol_type = other DNA
ctacttgggaggctgaggca

SEQ ID NO: 5581 - DNA, 20 bp, synthetic construct
  misc_feature 1..20: note = Description of Artificial Sequence: Synthetic oligonucleotide
  misc_feature 1..20: note = Target: ANGPTL3; (+) strand; PAM type: NNAGAAW; PAM sequence: CAAGAAT
  source 1..20: mol_type = other DNA
cccatatagttgtgccctca

SEQ ID NO: 5582 - DNA, 20 bp, synthetic construct
  misc_feature 1..20: note = Description of Artificial Sequence: Synthetic oligonucleotide
  misc_feature 1..20: note = Target: ANGPTL3; (+) strand; PAM type: NNAGAAW; PAM sequence: CTAGAAT
  source 1..20: mol_type = other DNA
tcctaatgtattccatttgt

SEQ ID NO: 5583 - DNA, 20 bp, synthetic construct
  misc_feature 1..20: note = Description of Artificial Sequence: Synthetic oligonucleotide
  misc_feature 1..20: note = Target: ANGPTL3; (+) strand; PAM type: NNAGAAW; PAM sequence: ACAGAAT
  source 1..20: mol_type = other DNA
gcttgttcatctgaaaccac

SEQ ID NO: 5584 - DNA, 20 bp, synthetic construct
  misc_feature 1..20: note = Description of Artificial Sequence: Synthetic oligonucleotide
  misc_feature 1..20: note = Target: ANGPTL3; (+) strand; PAM type: NNAGAAW; PAM sequence: TGAGAAA
  source 1..20: mol_type = other DNA
acacctcaaatggcacttag

SEQ ID NO: 5585 - DNA, 20 bp, synthetic construct
  misc_feature 1..20: note = Description of Artificial Sequence: Synthetic oligonucleotide
  misc_feature 1..20: note = Target: ANGPTL3; (+) strand; PAM type: NNAGAAW; PAM sequence: ACAGAAT
  source 1..20: mol_type = other DNA
ggcacttagtgagaaaatac

SEQ ID NO: 5586 - DNA, 20 bp, synthetic construct
  misc_feature 1..20: note = Description of Artificial Sequence: Synthetic oligonucleotide
  misc_feature 1..20: note = Target: ANGPTL3; (+) strand; PAM type: NNAGAAW; PAM sequence: TTAGAAA
  source 1..20: mol_type = other DNA
aactaactcattcattaatt

SEQ ID NO: 5587 - DNA, 20 bp, synthetic construct
  misc_feature 1..20: note = Description of Artificial Sequence: Synthetic oligonucleotide
  misc_feature 1..20: note = Target: ANGPTL3; (+) strand; PAM type: NNAGAAW; PAM sequence: AAAGAAA
  source 1..20: mol_type = other DNA
cacagcagttttaaaaatga

SEQ ID NO: 5588 - DNA, 20 bp, synthetic construct
  misc_feature 1..20: note = Description of Artificial Sequence: Synthetic oligonucleotide
  misc_feature 1..20: note = Target: ANGPTL3; (+) strand; PAM type: NNAGAAW; PAM sequence: TAAGAAT
  source 1..20: mol_type = other DNA
taggaaatataaaataaact

SEQ ID NO: 5589 - DNA, 20 bp, synthetic construct
  misc_feature 1..20: note = Description of Artificial Sequence: Synthetic oligonucleotide
  misc_feature 1..20: note = Target: ANGPTL3; (+) strand; PAM type: NNAGAAW; PAM sequence: TCAGAAT
  source 1..20: mol_type = other DNA
taggaaatagagctcttgac

SEQ ID NO: 5590 - DNA, 20 bp, synthetic construct
  misc_feature 1..20: note = Description of Artificial Sequence: Synthetic oligonucleotide
  misc_feature 1..20: note = Target: ANGPTL3; (+) strand; PAM type: NNAGAAW; PAM sequence: ATAGAAT
  source 1..20: mol_type = other DNA
aataaactaggaccaattcg

SEQ ID NO: 5591 - DNA, 20 bp, synthetic construct
  misc_feature 1..20: note = Description of Artificial Sequence: Synthetic oligonucleotide
  misc_feature 1..20: note = Target: ANGPTL3; (+) strand; PAM type: NNAGAAW; PAM sequence: ATAGAAA
  source 1..20: mol_type = other DNA
gcagagaaccatacacttga

SEQ ID NO: 5592 - DNA, 20 bp, synthetic construct
  misc_feature 1..20: note = Description of Artificial Sequence: Synthetic oligonucleotide
  misc_feature 1..20: note = Target: ANGPTL3; (+) strand; PAM type: NNAGAAW; PAM sequence: ATAGAAA
  source 1..20: mol_type = other DNA
tatataagattttgtcatta

SEQ ID NO: 5593 - DNA, 20 bp, synthetic construct
  misc_feature 1..20: note = Description of Artificial Sequence: Synthetic oligonucleotide
  misc_feature 1..20: note = Target: ANGPTL3; (+) strand; PAM type: NNAGAAW; PAM sequence: TGAGAAT
  source 1..20: mol_type = other DNA
ctgttcctgtgttagtttgc

SEQ ID NO: 5594 - DNA, 20 bp, synthetic construct
  misc_feature 1..20: note = Description of Artificial Sequence: Synthetic oligonucleotide
  misc_feature 1..20: note = Target: ANGPTL3; (+) strand; PAM type: NNAGAAW; PAM sequence: GTAGAAT
  source 1..20: mol_type = other DNA
tgtgtgcatgtgtctttata

SEQ ID NO: 5595 - DNA, 20 bp, synthetic construct
  misc_feature 1..20: note = Description of Artificial Sequence: Synthetic oligonucleotide
  misc_feature 1..20: note = Target: ANGPTL3; (+) strand; PAM type: NNAGAAW; PAM sequence: TTAGAAA
  source 1..20: mol_type = other DNA
ttgttgatgcttattactat

SEQ ID NO: 5596 - DNA, 20 bp, synthetic construct
  misc_feature 1..20: note = Description of Artificial Sequence: Synthetic oligonucleotide
  misc_feature 1..20: note = Target: ANGPTL3; (-) strand; PAM type: NNGRRT; PAM sequence: GTGGAT
  source 1..20: mol_type = other DNA
ttaggaattatttacatatt

SEQ ID NO: 5597 - DNA, 20 bp, synthetic construct
  misc_feature 1..20: note = Description of Artificial Sequence: Synthetic oligonucleotide
  misc_feature 1..20: note = Target: ANGPTL3; (-) strand; PAM type: NNGRRT; PAM sequence: AGGAAT
  source 1..20: mol_type = other DNA
gtctctttctgactaatttt

SEQ ID NO: 5598 - DNA, 20 bp, synthetic construct
  misc_feature 1..20: note = Description of Artificial Sequence: Synthetic oligonucleotide
  misc_feature 1..20: note = Target: ANGPTL3; (-) strand; PAM type: NNGRRT; PAM sequence: GCGAAT
  source 1..20: mol_type = other DNA
ccatctctgttgccgtcttt

SEQ ID NO: 5599 - DNA, 20 bp, synthetic construct
  misc_feature 1..20: note = Description of Artificial Sequence: Synthetic oligonucleotide
  misc_feature 1..20: note = Target: ANGPTL3; (-) strand; PAM type: NNGRRT; PAM sequence: GAGAGT
  source 1..20: mol_type = other DNA
catccctgccaggagtatat

SEQ ID NO: 5600 - DNA, 20 bp, synthetic construct
  misc_feature 1..20: note = Description of Artificial Sequence: Synthetic oligonucleotide
  misc_feature 1..20: note = Target: ANGPTL3; (-) strand; PAM type: NNGRRT; PAM sequence: AGGAGT
  source 1..20: mol_type = other DNA
taccaatttacatccctgcc

SEQ ID NO: 5601 - DNA, 20 bp, synthetic construct
  misc_feature 1..20: note = Description of Artificial Sequence: Synthetic oligonucleotide
  misc_feature 1..20: note = Target: ANGPTL3; (-) strand; PAM type: NNGRRT; PAM sequence: AAGGGT
  source 1..20: mol_type = other DNA
tttgtcagattgtccttcaa

SEQ ID NO: 5602 - DNA, 20 bp, synthetic construct
  misc_feature 1..20: note = Description of Artificial Sequence: Synthetic oligonucleotide
  misc_feature 1..20: note = Target: ANGPTL3; (-) strand; PAM type: NNGRRT; PAM sequence: TAGAGT
  source 1..20: mol_type = other DNA
tattttcctatgaatgtcta

SEQ ID NO: 5603 - DNA, 20 bp, synthetic construct
  misc_feature 1..20: note = Description of Artificial Sequence: Synthetic oligonucleotide
  misc_feature 1..20: note = Target: ANGPTL3; (-) strand; PAM type: NNGRRT; PAM sequence: ATGAAT
  source 1..20: mol_type = other DNA
attttaaaatttattttcct

SEQ ID NO: 5604 - DNA, 20 bp, synthetic construct
  misc_feature 1..20: note = Description of Artificial Sequence: Synthetic oligonucleotide
  misc_feature 1..20: note = Target: ANGPTL3; (-) strand; PAM type: NNGRRT; PAM sequence: CAGGAT
  source 1..20: mol_type = other DNA
ctcatgatatatatatcatt

SEQ ID NO: 5605 - DNA, 20 bp, synthetic construct
  misc_feature 1..20: note = Description of Artificial Sequence: Synthetic oligonucleotide
  misc_feature 1..20: note = Target: ANGPTL3; (-) strand; PAM type: NNGRRT; PAM sequence: TGGGAT
  source 1..20: mol_type = other DNA
ataattttttataacacaag

SEQ ID NO: 5606 - DNA, 20 bp, synthetic construct
  misc_feature 1..20: note = Description of Artificial Sequence: Synthetic oligonucleotide
  misc_feature 1..20: note = Target: ANGPTL3; (-) strand; PAM type: NNGRRT; PAM sequence: TTGAAT
  source 1..20: mol_type = other DNA
ggtctatcataccagaccct

SEQ ID NO: 5607 - DNA, 20 bp, synthetic construct
  misc_feature 1..20: note = Description of Artificial Sequence: Synthetic oligonucleotide
  misc_feature 1..20: note = Target: ANGPTL3; (-) strand; PAM type: NNGRRT; PAM sequence: TTGGGT
  source 1..20: mol_type = other DNA
atctcgactctattaacatt

SEQ ID NO: 5608 - DNA, 20 bp, synthetic construct
  misc_feature 1..20: note = Description of Artificial Sequence: Synthetic oligonucleotide
  misc_feature 1..20: note = Target: ANGPTL3; (-) strand; PAM type: NNGRRT; PAM sequence: TGGGAT
  source 1..20: mol_type = other DNA
accttggcctcccagagtgc

SEQ ID NO: 5609 - DNA, 20 bp, synthetic construct
  misc_feature 1..20: note = Description of Artificial Sequence: Synthetic oligonucleotide
  misc_feature 1..20: note = Target: ANGPTL3; (-) strand; PAM type: NNGRRT; PAM sequence: CAGAGT
  source 1..20: mol_type = other DNA
atctgcctaccttggcctcc

SEQ ID NO: 5610 - DNA, 20 bp, synthetic construct
  misc_feature 1..20: note = Description of Artificial Sequence: Synthetic oligonucleotide
  misc_feature 1..20: note = Target: ANGPTL3; (-) strand; PAM type: NNGRRT; PAM sequence: CGGGGT
  source 1..20: mol_type = other DNA
ttttgtatttttagtagaga

SEQ ID NO: 5611 - DNA, 20 bp, synthetic construct
  misc_feature 1..20: note = Description of Artificial Sequence: Synthetic oligonucleotide
  misc_feature 1..20: note = Target: ANGPTL3; (-) strand; PAM type: NNGRRT; PAM sequence: TGGAAT
  source 1..20: mol_type = other DNA
gtctcagcttcccgagtatc

SEQ ID NO: 5612 - DNA, 20 bp, synthetic construct
  misc_feature 1..20: note = Description of Artificial Sequence: Synthetic oligonucleotide
  misc_feature 1..20: note = Target: ANGPTL3; (-) strand; PAM type: NNGRRT; PAM sequence: CCGAGT
  source 1..20: mol_type = other DNA
gattctcctgtctcagcttc

SEQ ID NO: 5613 - DNA, 20 bp, synthetic construct
  misc_feature 1..20: note = Description of Artificial Sequence: Synthetic oligonucleotide
  misc_feature 1..20: note = Target: ANGPTL3; (-) strand; PAM type: NNGRRT; PAM sequence: CTGGGT
  source 1..20: mol_type = other DNA
ctcactgcaacttccccctc

SEQ ID NO: 5614 - DNA, 20 bp, synthetic construct
  misc_feature 1..20: note = Description of Artificial Sequence: Synthetic oligonucleotide
  misc_feature 1..20: note = Target: ANGPTL3; (-) strand; PAM type: NNGRRT; PAM sequence: TGGAGT
  source 1..20: mol_type = other DNA
ttgctctttgttgcccaggc

SEQ ID NO: 5615 - DNA, 20 bp, synthetic construct
  misc_feature 1..20: note = Description of Artificial Sequence: Synthetic oligonucleotide
  misc_feature 1..20: note = Target: ANGPTL3; (-) strand; PAM type: NNGRRT; PAM sequence: CGGAGT
  source 1..20: mol_type = other DNA
ttctttatttatttttgaga

SEQ ID NO: 5616 - DNA, 20 bp, synthetic construct
  misc_feature 1..20: note = Description of Artificial Sequence: Synthetic oligonucleotide
  misc_feature 1..20: note = Target: ANGPTL3; (-) strand; PAM type: NNGRRT; PAM sequence: AGGAAT
  source 1..20: mol_type = other DNA
agaggttaagtgagctttga

SEQ ID NO: 5617 - DNA, 20 bp, synthetic construct
  misc_feature 1..20: note = Description of Artificial Sequence: Synthetic oligonucleotide
  misc_feature 1..20: note = Target: ANGPTL3; (-) strand; PAM type: NNGRRT; PAM sequence: GAGAAT
  source 1..20: mol_type = other DNA
ataaaaatttcttagctaca

SEQ ID NO: 5618 - DNA, 20 bp, synthetic construct
  misc_feature 1..20: note = Description of Artificial Sequence: Synthetic oligonucleotide
  misc_feature 1..20: note = Target: ANGPTL3; (-) strand; PAM type: NNGRRT; PAM sequence: AAGGAT
  source 1..20: mol_type = other DNA
gcaaatgtagggcctaattt

SEQ ID NO: 5619 - DNA, 20 bp, synthetic construct
  misc_feature 1..20: note = Description of Artificial Sequence: Synthetic oligonucleotide
  misc_feature 1..20: note = Target: ANGPTL3; (-) strand; PAM type: NNGRRT; PAM sequence: CAGAAT
  source 1..20: mol_type = other DNA
tgagtacacactgctaaaag

SEQ ID NO: 5620 - DNA, 20 bp, synthetic construct
  misc_feature 1..20: note = Description of Artificial Sequence: Synthetic oligonucleotide
  misc_feature 1..20: note = Target: ANGPTL3; (-) strand; PAM type: NNGRRT; PAM sequence: CTGAGT
  source 1..20: mol_type = other DNA
tgccttttaatacttcctgt

SEQ ID NO: 5621 - DNA, 20 bp, synthetic construct
  misc_feature 1..20: note = Description of Artificial Sequence: Synthetic oligonucleotide
  misc_feature 1..20: note = Target: ANGPTL3; (-) strand; PAM type: NNGRRT; PAM sequence: AAGGAT
  source 1..20: mol_type = other DNA
ttgaaagtagtaattttata

SEQ ID NO: 5622 - DNA, 20 bp, synthetic construct
  misc_feature 1..20: note = Description of Artificial Sequence: Synthetic oligonucleotide
  misc_feature 1..20: note = Target: ANGPTL3; (-) strand; PAM type: NNGRRT; PAM sequence: CAGAGT
  source 1..20: mol_type = other DNA
tttctcacaaataacactga

SEQ ID NO: 5623 - DNA, 20 bp, synthetic construct
  misc_feature 1..20: note = Description of Artificial Sequence: Synthetic oligonucleotide
  misc_feature 1..20: note = Target: ANGPTL3; (-) strand; PAM type: NNGRRT; PAM sequence: TAGGAT
  source 1..20: mol_type = other DNA
tatattatatcctactgtag

SEQ ID NO: 5624 - DNA, 20 bp, synthetic construct
  misc_feature 1..20: note = Description of Artificial Sequence: Synthetic oligonucleotide
  misc_feature 1..20: note = Target: ANGPTL3; (-) strand; PAM type: NNGRRT; PAM sequence: AAGAGT
  source 1..20: mol_type = other DNA
tttttagagaagggaatttg

SEQ ID NO: 5625 - DNA, 20 bp, synthetic construct
  misc_feature 1..20: note = Description of Artificial Sequence: Synthetic oligonucleotide
  misc_feature 1..20: note = Target: ANGPTL3; (-) strand; PAM type: NNGRRT; PAM sequence: GGGAAT
  source 1..20: mol_type = other DNA
agtacattctttttagagaa

SEQ ID NO: 5626 - DNA, 20 bp, synthetic construct
  misc_feature 1..20: note = Description of Artificial Sequence: Synthetic oligonucleotide
  misc_feature 1..20: note = Target: ANGPTL3; (-) strand; PAM type: NNGRRT; PAM sequence: CAGAAT
  source 1..20: mol_type = other DNA
catatagggatttctaagtg

SEQ ID NO: 5627 - DNA, 20 bp, synthetic construct
  misc_feature 1..20: note = Description of Artificial Sequence: Synthetic oligonucleotide
  misc_feature 1..20: note = Target: ANGPTL3; (-) strand; PAM type: NNGRRT; PAM sequence: AGGGAT
  source 1..20: mol_type = other DNA
gaatgataaaatcaacatat

SEQ ID NO: 5628 - DNA, 20 bp, synthetic construct
  misc_feature 1..20: note = Description of Artificial Sequence: Synthetic oligonucleotide
  misc_feature 1..20: note = Target: ANGPTL3; (-) strand; PAM type: NNGRRT; PAM sequence: GAGAAT
  source 1..20: mol_type = other DNA
aaacaatatttattgaataa

SEQ ID NO: 5629 - DNA, 20 bp, synthetic construct
  misc_feature 1..20: note = Description of Artificial Sequence: Synthetic oligonucleotide
  misc_feature 1..20: note = Target: ANGPTL3; (-) strand; PAM type: NNGRRT; PAM sequence: TTGAAT
  source 1..20: mol_type = other DNA
cattgtagaaacaatattta

SEQ ID NO: 5630 - DNA, 20 bp, synthetic construct
  misc_feature 1..20: note = Description of Artificial Sequence: Synthetic oligonucleotide
  misc_feature 1..20: note = Target: ANGPTL3; (-) strand; PAM type: NNGRRT; PAM sequence: GAGAAT
  source 1..20: mol_type = other DNA
catccacttgctagttgagg

SEQ ID NO: 5631 - DNA, 20 bp, synthetic construct
  misc_feature 1..20: note = Description of Artificial Sequence: Synthetic oligonucleotide
  misc_feature 1..20: note = Target: ANGPTL3; (-) strand; PAM type: NNGRRT; PAM sequence: TGGAAT
  source 1..20: mol_type = other DNA
ctttactctggttcatgtaa

SEQ ID NO: 5632 - DNA, 20 bp, synthetic construct
  misc_feature 1..20: note = Description of Artificial Sequence: Synthetic oligonucleotide
  misc_feature 1..20: note = Target: ANGPTL3; (-) strand; PAM type: NNGRRT; PAM sequence: AAGGGT
  source 1..20: mol_type = other DNA
tgtccaatatagaaccacaa

SEQ ID NO: 5633 - DNA, 20 bp, synthetic construct
  misc_feature 1..20: note = Description of Artificial Sequence: Synthetic oligonucleotide
  misc_feature 1..20: note = Target: ANGPTL3; (-) strand; PAM type: NNGRRT; PAM sequence: AAGAAT
  source 1..20: mol_type = other DNA
tttggtctcgtaccttttta

SEQ ID NO: 5634 - DNA, 20 bp, synthetic construct
  misc_feature 1..20: note = Description of Artificial Sequence: Synthetic oligonucleotide
  misc_feature 1..20: note = Target: ANGPTL3; (-) strand; PAM type: NNGRRT; PAM sequence: CTGAAT
  source 1..20: mol_type = other DNA
tttgttatagtctagatttt

SEQ ID NO: 5635 - DNA, 20 bp, synthetic construct
  misc_feature 1..20: note = Description of Artificial Sequence: Synthetic oligonucleotide
  misc_feature 1..20: note = Target: ANGPTL3; (-) strand; PAM type: NNGRRT; PAM sequence: TAGGGT
  source 1..20: mol_type = other DNA
tgagaataacacctatttta

SEQ ID NO: 5636 - DNA, 20 bp, synthetic construct
  misc_feature 1..20: note = Description of Artificial Sequence: Synthetic oligonucleotide
  misc_feature 1..20: note = Target: ANGPTL3; (-) strand; PAM type: NNGRRT; PAM sequence: GAGAAT
  source 1..20: mol_type = other DNA
tgttttctcatctctccagt

SEQ ID NO: 5637 - DNA, 20 bp, synthetic construct
  misc_feature 1..20: note = Description of Artificial Sequence: Synthetic oligonucleotide
  misc_feature 1..20: note = Target: ANGPTL3; (-) strand; PAM type: NNGRRT; PAM sequence: CCGGAT
  source 1..20: mol_type = other DNA
agactgcctgaatcagaatc

SEQ ID NO: 5638 - DNA, 20 bp, synthetic construct
  misc_feature 1..20: note = Description of Artificial Sequence: Synthetic oligonucleotide
  misc_feature 1..20: note = Target: ANGPTL3; (-) strand; PAM type: NNGRRT; PAM sequence: CAGAAT
  source 1..20: mol_type = other DNA
tggaataagactgcctgaat

SEQ ID NO: 5639 - DNA, 20 bp, synthetic construct
  misc_feature 1..20: note = Description of Artificial Sequence: Synthetic oligonucleotide
  misc_feature 1..20: note = Target: ANGPTL3; (-) strand; PAM type: NNGRRT; PAM sequence: CTGAAT
  source 1..20: mol_type = other DNA
tgattctggaataagactgc

SEQ ID NO: 5640 - DNA, 20 bp, synthetic construct
  misc_feature 1..20: note = Description of Artificial Sequence: Synthetic oligonucleotide
  misc_feature 1..20: note = Target: ANGPTL3; (-) strand; PAM type: NNGRRT; PAM sequence: TGGAAT
  source 1..20: mol_type = other DNA
agtggttaagagcatgattc

SEQ ID NO: 5641 - DNA, 20 bp, synthetic construct
  misc_feature 1..20: note = Description of Artificial Sequence: Synthetic oligonucleotide
  misc_feature 1..20: note = Target: ANGPTL3; (-) strand; PAM type: NNGRRT; PAM sequence: TTGGGT
  source 1..20: mol_type = other DNA
atgacttaggattaagggtt

SEQ ID NO: 5642 - DNA, 20 bp, synthetic construct
  misc_feature 1..20: note = Description of Artificial Sequence: Synthetic oligonucleotide
  misc_feature 1..20: note = Target: ANGPTL3; (-) strand; PAM type: NNGRRT; PAM sequence: AAGGGT
  source 1..20: mol_type = other DNA
ccttttgatgacttaggatt

SEQ ID NO: 5643 - DNA, 20 bp, synthetic construct
  misc_feature 1..20: note = Description of Artificial Sequence: Synthetic oligonucleotide
  misc_feature 1..20: note = Target: ANGPTL3; (-) strand; PAM type: NNGRRT; PAM sequence: TAGGAT
  source 1..20: mol_type = other DNA
ggctcttccttttgatgact

SEQ ID NO: 5644 - DNA, 20 bp, synthetic construct
  misc_feature 1..20: note = Description of Artificial Sequence: Synthetic oligonucleotide
  misc_feature 1..20: note = Target: ANGPTL3; (-) strand; PAM type: NNGRRT; PAM sequence: AGGAGT
  source 1..20: mol_type = other DNA
tctcaaagtgctgatattaa

SEQ ID NO: 5645 - DNA, 20 bp, synthetic construct
  misc_feature 1..20: note = Description of Artificial Sequence: Synthetic oligonucleotide
  misc_feature 1..20: note = Target: ANGPTL3; (-) strand; PAM type: NNGRRT; PAM sequence: TGGAGT
  source 1..20: mol_type = other DNA
tcttgctctgttgtccaggc

SEQ ID NO: 5646 - DNA, 20 bp, synthetic construct
  misc_feature 1..20: note = Description of Artificial Sequence: Synthetic oligonucleotide
  misc_feature 1..20: note = Target: ANGPTL3; (-) strand; PAM type: NNGRRT; PAM sequence: CAGGGT
  source 1..20: mol_type = other DNA
tttcttttcttttttagaga

SEQ ID NO: 5647 - DNA, 20 bp, synthetic construct
  misc_feature 1..20: note = Description of Artificial Sequence: Synthetic oligonucleotide
  misc_feature 1..20: note = Target: ANGPTL3; (-) strand; PAM type: NNGRRT; PAM sequence: GTGGGT
  source 1..20: mol_type = other DNA
cttttaacctgtgtatgtgt

SEQ ID NO: 5648 - DNA, 20 bp, synthetic construct
  misc_feature 1..20: note = Description of Artificial Sequence: Synthetic oligonucleotide
  misc_feature 1..20: note = Target: ANGPTL3; (-) strand; PAM type: NNGRRT; PAM sequence: TGGGGT
  source 1..20: mol_type = other DNA
agtctcctcatctgtaaagc

SEQ ID NO: 5649 - DNA, 20 bp, synthetic construct
  misc_feature 1..20: note = Description of Artificial Sequence: Synthetic oligonucleotide
  misc_feature 1..20: note = Target: ANGPTL3; (-) strand; PAM type: NNGRRT; PAM sequence: ATGGAT
  source 1..20: mol_type = other DNA
acaagttacttaacctcccc

SEQ ID NO: 5650 - DNA, 20 bp, synthetic construct
  misc_feature 1..20: note = Description of Artificial Sequence: Synthetic oligonucleotide
  misc_feature 1..20: note = Target: ANGPTL3; (-) strand; PAM type: NNGRRT; PAM sequence: GTGGGT
  source 1..20: mol_type = other DNA
tgctggagtcagactgtggt

SEQ ID NO: 5651 - DNA, 20 bp, synthetic construct
  misc_feature 1..20: note = Description of Artificial Sequence: Synthetic oligonucleotide
  misc_feature 1..20: note = Target: ANGPTL3; (-) strand; PAM type: NNGRRT; PAM sequence: TGGAGT
  source 1..20: mol_type = other DNA
attgttaagaatatgggtgc

SEQ ID NO: 5652 - DNA, 20 bp, synthetic construct
  misc_feature 1..20: note = Description of Artificial Sequence: Synthetic oligonucleotide
  misc_feature 1..20: note = Target: ANGPTL3; (-) strand; PAM type: NNGRRT; PAM sequence: ATGGGT
  source 1..20: mol_type = other DNA
atggtgaaattgttaagaat

SEQ ID NO: 5653 - DNA, 20 bp, synthetic construct
  misc_feature 1..20: note = Description of Artificial Sequence: Synthetic oligonucleotide
  misc_feature 1..20: note = Target: ANGPTL3; (-) strand; PAM type: NNGRRT; PAM sequence: AAGAAT
  source 1..20: mol_type = other DNA
attaatatggtgaaattgtt

SEQ ID NO: 5654 - DNA, 20 bp, synthetic construct
  misc_feature 1..20: note = Description of Artificial Sequence: Synthetic oligonucleotide
  misc_feature 1..20: note = Target: ANGPTL3; (-) strand; PAM type: NNGRRT; PAM sequence: TTGAGT
  source 1..20: mol_type = other DNA
tatattagtgattattctta

SEQ ID NO: 5655 - DNA, 20 bp, synthetic construct
  misc_feature 1..20: note = Description of Artificial Sequence: Synthetic oligonucleotide
  misc_feature 1..20: note = Target: ANGPTL3; (-) strand; PAM type: NNGRRT; PAM sequence: TTGAAT
  source 1..20: mol_type = other DNA
catctaggaccaaactagaa

SEQ ID NO: 5656 - DNA, 20 bp, synthetic construct
  misc_feature 1..20: note = Description of Artificial Sequence: Synthetic oligonucleotide
  misc_feature 1..20: note = Target: ANGPTL3; (-) strand; PAM type: NNGRRT; PAM sequence: TAGAAT
  source 1..20: mol_type = other DNA
gtggtcatctaggaccaaac

SEQ ID NO: 5657 - DNA, 20 bp, synthetic construct
  misc_feature 1..20: note = Description of Artificial Sequence: Synthetic oligonucleotide
  misc_feature 1..20: note = Target: ANGPTL3; (-) strand; PAM type: NNGRRT; PAM sequence: ATGGAT
  source 1..20: mol_type = other DNA
atgtgctcgttgaaggaaca

SEQ ID NO: 5658 - DNA, 20 bp, synthetic construct
  misc_feature 1..20: note = Description of Artificial Sequence: Synthetic oligonucleotide
  misc_feature 1..20: note = Target: ANGPTL3; (-) strand; PAM type: NNGRRT; PAM sequence: ATGAAT
  source 1..20: mol_type = other DNA
aagttgaggggaaaaaagta

SEQ ID NO: 5659 - DNA, 20 bp, synthetic construct
  misc_feature 1..20: note = Description of Artificial Sequence: Synthetic oligonucleotide
  misc_feature 1..20: note = Target: ANGPTL3; (-) strand; PAM type: NNGRRT; PAM sequence: TTGGGT
  source 1..20: mol_type = other DNA
gtcaaaaataaacttttttg

SEQ ID NO: 5660 - DNA, 20 bp, synthetic construct
  misc_feature 1..20: note = Description of Artificial Sequence: Synthetic oligonucleotide
  misc_feature 1..20: note = Target: ANGPTL3; (-) strand; PAM type: NNGRRT; PAM sequence: TTGAGT
  source 1..20: mol_type = other DNA
gaatgtaaccttcttccaca

SEQ ID NO: 5661 - DNA, 20 bp, synthetic construct
  misc_feature 1..20: note = Description of Artificial Sequence: Synthetic oligonucleotide
  misc_feature 1..20: note = Target: ANGPTL3; (-) strand; PAM type: NNGRRT; PAM sequence: ACGAAT
  source 1..20: mol_type = other DNA
attaagccgtgttaacttgc

SEQ ID NO: 5662 - DNA, 20 bp, synthetic construct
  misc_feature 1..20: note = Description of Artificial Sequence: Synthetic oligonucleotide
  misc_feature 1..20: note = Target: ANGPTL3; (-) strand; PAM type: NNGRRT; PAM sequence: ATGAAT
  source 1..20: mol_type = other DNA
tggagatagagaatcaaatg

SEQ ID NO: 5663 - DNA, 20 bp, synthetic construct
  misc_feature 1..20: note = Description of Artificial Sequence: Synthetic oligonucleotide
  misc_feature 1..20: note = Target: ANGPTL3; (-) strand; PAM type: NNGRRT; PAM sequence: GAGAAT
  source 1..20: mol_type = other DNA
tgattttggctctggagata

SEQ ID NO: 5664 - DNA, 20 bp, synthetic construct
  misc_feature 1..20: note = Description of Artificial Sequence: Synthetic oligonucleotide
  misc_feature 1..20: note = Target: ANGPTL3; (-) strand; PAM type: NNGRRT; PAM sequence: TTGAGT
  source 1..20: mol_type = other DNA
aaaaagactgatcaaatatg

SEQ ID NO: 5665 - DNA, 20 bp, synthetic construct
  misc_feature 1..20: note = Description of Artificial Sequence: Synthetic oligonucleotide
  misc_feature 1..20: note = Target: ANGPTL3; (-) strand; PAM type: NNGRRT; PAM sequence: TTGAGT
  source 1..20: mol_type = other DNA
ggaggctttcaagttttgag

SEQ ID NO: 5666 - DNA, 20 bp, synthetic construct
  misc_feature 1..20: note = Description of Artificial Sequence: Synthetic oligonucleotide
  misc_feature 1..20: note = Target: ANGPTL3; (-) strand; PAM type: NNGRRT; PAM sequence: TTGAGT
  source 1..20: mol_type = other DNA
ttctaggaggctttcaagtt

SEQ ID NO: 5667 - DNA, 20 bp, synthetic construct
  misc_feature 1..20: note = Description of Artificial Sequence: Synthetic oligonucleotide
  misc_feature 1..20: note = Target: ANGPTL3; (-) strand; PAM type: NNGRRT; PAM sequence: TAGAAT
  source 1..20: mol_type = other DNA
tatttcactttttgttgaag

SEQ ID NO: 5668 - DNA, 20 bp, synthetic construct
  misc_feature 1..20: note = Description of Artificial Sequence: Synthetic oligonucleotide
  misc_feature 1..20: note = Target: ANGPTL3; (-) strand; PAM type: NNGRRT; PAM sequence: TTGAAT
  source 1..20: mol_type = other DNA
tctggagtttcaggttgatt

SEQ ID NO: 5669 - DNA, 20 bp, synthetic construct
  misc_feature 1..20: note = Description of Artificial Sequence: Synthetic oligonucleotide
  misc_feature 1..20: note = Target: ANGPTL3; (-) strand; PAM type: NNGRRT; PAM sequence: TGGAGT
  source 1..20: mol_type = other DNA
gaagttacttctgggtgttc

SEQ ID NO: 5670 - DNA, 20 bp, synthetic construct
  misc_feature 1..20: note = Description of Artificial Sequence: Synthetic oligonucleotide
  misc_feature 1..20: note = Target: ANGPTL3; (-) strand; PAM type: NNGRRT; PAM sequence: CTGGGT
  source 1..20: mol_type = other DNA
tactttaagtgaagttactt

SEQ ID NO: 5671 - DNA, 20 bp, synthetic construct
  misc_feature 1..20: note = Description of Artificial Sequence: Synthetic oligonucleotide
  misc_feature 1..20: note = Target: ANGPTL3; (-) strand; PAM type: NNGRRT; PAM sequence: GAGAAT
  source 1..20: mol_type = other DNA
ttaatctgttttaaacactg

SEQ ID NO: 5672 - DNA, 20 bp, synthetic construct
  misc_feature 1..20: note = Description of Artificial Sequence: Synthetic oligonucleotide
  misc_feature 1..20: note = Target: ANGPTL3; (-) strand; PAM type: NNGRRT; PAM sequence: ATGAAT
  source 1..20: mol_type = other DNA
aaagcccagcatattttcat

SEQ ID NO: 5673 - DNA, 20 bp, synthetic construct
  misc_feature 1..20: note = Description of Artificial Sequence: Synthetic oligonucleotide
  misc_feature 1..20: note = Target: ANGPTL3; (-) strand; PAM type: NNGRRT; PAM sequence: ATGAAT
  source 1..20: mol_type = other DNA
actaataatggatttgaaaa

SEQ ID NO: 5674 - DNA, 20 bp, synthetic construct
  misc_feature 1..20: note = Description of Artificial Sequence: Synthetic oligonucleotide
  misc_feature 1..20: note = Target: ANGPTL3; (-) strand; PAM type: NNGRRT; PAM sequence: ATGGAT
  source 1..20: mol_type = other DNA
tctaaatttttaaactaata

SEQ ID NO: 5675 - DNA, 20 bp, synthetic construct
  misc_feature 1..20: note = Description of Artificial Sequence: Synthetic oligonucleotide
  misc_feature 1..20: note = Target: ANGPTL3; (-) strand; PAM type: NNGRRT; PAM sequence: GAGAGT
  source 1..20: mol_type = other DNA
tctacaaaagtctggatata

SEQ ID NO: 5676 - DNA, 20 bp, synthetic construct
  misc_feature 1..20: note = Description of Artificial Sequence: Synthetic oligonucleotide
  misc_feature 1..20: note = Target: ANGPTL3; (-) strand; PAM type: NNGRRT; PAM sequence: CTGGAT
  source 1..20: mol_type = other DNA
tcttgtttttctacaaaagt

SEQ ID NO: 5677 - DNA, 20 bp, synthetic construct
  misc_feature 1..20: note = Description of Artificial Sequence: Synthetic oligonucleotide
  misc_feature 1..20: note = Target: ANGPTL3; (-) strand; PAM type: NNGRRT; PAM sequence: TAGGAT
  source 1..20: mol_type = other DNA
ttaaagcttgtaaataattt

SEQ ID NO: 5678 - DNA, 20 bp, synthetic construct
  misc_feature 1..20: note = Description of Artificial Sequence: Synthetic oligonucleotide
  misc_feature 1..20: note = Target: ANGPTL3; (-) strand; PAM type: NNGRRT; PAM sequence: AGGGGT
  source 1..20: mol_type = other DNA
gtgaggaaactgagagataa

SEQ ID NO: 5679 - DNA, 20 bp, synthetic construct
  misc_feature 1..20: note = Description of Artificial Sequence: Synthetic oligonucleotide
  misc_feature 1..20: note = Target: ANGPTL3; (-) strand; PAM type: NNGRRT; PAM sequence: ATGAAT
  source 1..20: mol_type = other DNA
gtaagatgacattggctgct

SEQ ID NO: 5680 - DNA, 20 bp, synthetic construct
  misc_feature 1..20: note = Description of Artificial Sequence: Synthetic oligonucleotide
  misc_feature 1..20: note = Target: ANGPTL3; (-) strand; PAM type: NNGRRT; PAM sequence: TTGAAT
  source 1..20: mol_type = other DNA
aaagagaaacatgatctaat

SEQ ID NO: 5681 - DNA, 20 bp, synthetic construct
  misc_feature 1..20: note = Description of Artificial Sequence: Synthetic oligonucleotide
  misc_feature 1..20: note = Target: ANGPTL3; (-) strand; PAM type: NNGRRT; PAM sequence: ATGAGT
  source 1..20: mol_type = other DNA
tcttggtctaaagagccaat

SEQ ID NO: 5682 - DNA, 20 bp, synthetic construct
  misc_feature 1..20: note = Description of Artificial Sequence: Synthetic oligonucleotide
  misc_feature 1..20: note = Target: ANGPTL3; (-) strand; PAM type: NNGRRT; PAM sequence: TTGGGT
  source 1..20: mol_type = other DNA
gtcagtgagatgacgaaggg

SEQ ID NO: 5683 - DNA, 20 bp, synthetic construct
  misc_feature 1..20: note = Description of Artificial Sequence: Synthetic oligonucleotide
  misc_feature 1..20: note = Target: ANGPTL3; (-) strand; PAM type: NNGRRT; PAM sequence: AAGGGT
  source 1..20: mol_type = other DNA
gtgaagtcagtgagatgacg

SEQ ID NO: 5684 - DNA, 20 bp, synthetic construct
  misc_feature 1..20: note = Description of Artificial Sequence: Synthetic oligonucleotide
  misc_feature 1..20: note = Target: ANGPTL3; (-) strand; PAM type: NNGRRT; PAM sequence: TAGAGT
  source 1..20: mol_type = other DNA
ggtaaagcggtcagaataac

SEQ ID NO: 5685 - DNA, 20 bp, synthetic construct
  misc_feature 1..20: note = Description of Artificial Sequence: Synthetic oligonucleotide
  misc_feature 1..20: note = Target: ANGPTL3; (-) strand; PAM type: NNGRRT; PAM sequence: CAGAAT
  source 1..20: mol_type = other DNA
ttgaatactggtaaagcggt

SEQ ID NO: 5686 - DNA, 20 bp, synthetic construct
  misc_feature 1..20: note = Description of Artificial Sequence: Synthetic oligonucleotide
  misc_feature 1..20: note = Target: ANGPTL3; (-) strand; PAM type: NNGRRT; PAM sequence: TTGAAT
  source 1..20: mol_type = other DNA
tggcagtatgtttgatgtgt

SEQ ID NO: 5687 - DNA, 20 bp, synthetic construct
  misc_feature 1..20: note = Description of Artificial Sequence: Synthetic oligonucleotide
  misc_feature 1..20: note = Target: ANGPTL3; (-) strand; PAM type: NNGRRT; PAM sequence: GAGAGT
  source 1..20: mol_type = other DNA
aacgaccctaagggaaatca

SEQ ID NO: 5688 - DNA, 20 bp, synthetic construct
  misc_feature 1..20: note = Description of Artificial Sequence: Synthetic oligonucleotide
  misc_feature 1..20: note = Target: ANGPTL3; (-) strand; PAM type: NNGRRT; PAM sequence: GGGAAT
  source 1..20: mol_type = other DNA
tgaccttgtaagtcttcatt

SEQ ID NO: 5689 - DNA, 20 bp, synthetic construct
  misc_feature 1..20: note = Description of Artificial Sequence: Synthetic oligonucleotide
  misc_feature 1..20: note = Target: ANGPTL3; (-) strand; PAM type: NNGRRT; PAM sequence: AGGGAT
  source 1..20: mol_type = other DNA
ctaaggaagtagaagttttc

SEQ ID NO: 5690 - DNA, 20 bp, synthetic construct
  misc_feature 1..20: note = Description of Artificial Sequence: Synthetic oligonucleotide
  misc_feature 1..20: note = Target: ANGPTL3; (-) strand; PAM type: NNGRRT; PAM sequence: GTGAGT
  source 1..20: mol_type = other DNA
ttatgttatgttaaataaag

SEQ ID NO: 5691 - DNA, 20 bp, synthetic construct
  misc_feature 1..20: note = Description of Artificial Sequence: Synthetic oligonucleotide
  misc_feature 1..20: note = Target: ANGPTL3; (-) strand; PAM type: NNGRRT; PAM sequence: AGGAAT
  source 1..20: mol_type = other DNA
cagagcttacattttagtgc

SEQ ID NO: 5692 - DNA, 20 bp, synthetic construct
  misc_feature 1..20: note = Description of Artificial Sequence: Synthetic oligonucleotide
  misc_feature 1..20: note = Target: ANGPTL3; (-) strand; PAM type: NNGRRT; PAM sequence: TGGAGT
  source 1..20: mol_type = other DNA
ccatacagtattctatattc

SEQ ID NO: 5693 - DNA, 20 bp, synthetic construct
  misc_feature 1..20: note = Description of Artificial Sequence: Synthetic oligonucleotide
  misc_feature 1..20: note = Target: ANGPTL3; (-) strand; PAM type: NNGRRT; PAM sequence: GTGAAT
  source 1..20: mol_type = other DNA
atcatagcacacgcttctgt

SEQ ID NO: 5694 - DNA, 20 bp, synthetic construct
  misc_feature 1..20: note = Description of Artificial Sequence: Synthetic oligonucleotide
  misc_feature 1..20: note = Target: ANGPTL3; (-) strand; PAM type: NNGRRT; PAM sequence: TTGAAT
  source 1..20: mol_type = other DNA
attgtagattaattacattg

SEQ ID NO: 5695 - DNA, 20 bp, synthetic construct
  misc_feature 1..20: note = Description of Artificial Sequence: Synthetic oligonucleotide
  misc_feature 1..20: note = Target: ANGPTL3; (-) strand; PAM type: NNGRRT; PAM sequence: ATGGAT
  source 1..20: mol_type = other DNA
tgtactgcatattagaatac

SEQ ID NO: 5696 - DNA, 20 bp, synthetic construct
  misc_feature 1..20: note = Description of Artificial Sequence: Synthetic oligonucleotide
  misc_feature 1..20: note = Target: ANGPTL3; (-) strand; PAM type: NNGRRT; PAM sequence: TAGAAT
  source 1..20: mol_type = other DNA
taaactattgtactgcatat

SEQ ID NO: 5697 - DNA, 20 bp, synthetic construct
  misc_feature 1..20: note = Description of Artificial Sequence: Synthetic oligonucleotide
  misc_feature 1..20: note = Target: ANGPTL3; (-) strand; PAM type: NNGRRT; PAM sequence: GAGAGT
  source 1..20: mol_type = other DNA
atcctcttgaatagctgttt

SEQ ID NO: 5698 - DNA, 20 bp, synthetic construct
  misc_feature 1..20: note = Description of Artificial Sequence: Synthetic oligonucleotide
  misc_feature 1..20: note = Target: ANGPTL3; (-) strand; PAM type: NNGRRT; PAM sequence: TTGAAT
  source 1..20: mol_type = other DNA
attatgttttttgaatcctc

SEQ ID NO: 5699 - DNA, 20 bp, synthetic construct
  misc_feature 1..20: note = Description of Artificial Sequence: Synthetic oligonucleotide
  misc_feature 1..20: note = Target: ANGPTL3; (-) strand; PAM type: NNGRRT; PAM sequence: TTGAAT
  source 1..20: mol_type = other DNA
ctgagtttatattatgtttt

SEQ ID NO: 5700 - DNA, 20 bp, synthetic construct
  misc_feature 1..20: note = Description of Artificial Sequence: Synthetic oligonucleotide
  misc_feature 1..20: note = Target: ANGPTL3; (-) strand; PAM type: NNGRRT; PAM sequence: CTGAGT
  source 1..20: mol_type = other DNA
gattttgtttaccagtttct

SEQ ID NO: 5701 - DNA, 20 bp, synthetic construct
  misc_feature 1..20: note = Description of Artificial Sequence: Synthetic oligonucleotide
  misc_feature 1..20: note = Target: ANGPTL3; (-) strand; PAM type: NNGRRT; PAM sequence: TAGAAT
  source 1..20: mol_type = other DNA
agatataattgaaaagaatt

SEQ ID NO: 5702 - DNA, 20 bp, synthetic construct
  misc_feature 1..20: note = Description of Artificial Sequence: Synthetic oligonucleotide
  misc_feature 1..20: note = Target: ANGPTL3; (-) strand; PAM type: NNGRRT; PAM sequence: AAGAAT
  source 1..20: mol_type = other DNA
tagtaaaagatataattgaa

SEQ ID NO: 5703 - DNA, 20 bp, synthetic construct
  misc_feature 1..20: note = Description of Artificial Sequence: Synthetic oligonucleotide
  misc_feature 1..20: note = Target: ANGPTL3; (-) strand; PAM type: NNGRRT; PAM sequence: TAGAGT
  source 1..20: mol_type = other DNA
cttaaagttacttaaatttt

SEQ ID NO: 5704 - DNA, 20 bp, synthetic construct
  misc_feature 1..20: note = Description of Artificial Sequence: Synthetic oligonucleotide
  misc_feature 1..20: note = Target: ANGPTL3; (-) strand; PAM type: NNGRRT; PAM sequence: CTGGGT
  source 1..20: mol_type = other DNA
tctattgtaaagtttgcttg

SEQ ID NO: 5705 - DNA, 20 bp, synthetic construct
  misc_feature 1..20: note = Description of Artificial Sequence: Synthetic oligonucleotide
  misc_feature 1..20: note = Target: ANGPTL3; (-) strand; PAM type: NNGRRT; PAM sequence: AAGGAT
  source 1..20: mol_type = other DNA
tttcctaggaccttatttaa

SEQ ID NO: 5706 - DNA, 20 bp, synthetic construct
  misc_feature 1..20: note = Description of Artificial Sequence: Synthetic oligonucleotide
  misc_feature 1..20: note = Target: ANGPTL3; (-) strand; PAM type: NNGRRT; PAM sequence: ATGAAT
  source 1..20: mol_type = other DNA
gttagttttttgatgctggc

SEQ ID NO: 5707 - DNA, 20 bp, synthetic construct
  misc_feature 1..20: note = Description of Artificial Sequence: Synthetic oligonucleotide
  misc_feature 1..20: note = Target: ANGPTL3; (-) strand; PAM type: NNGRRT; PAM sequence: CAGAAT
  source 1..20: mol_type = other DNA
ctcattgacagtaagaaaag

SEQ ID NO: 5708 - DNA, 20 bp, synthetic construct
  misc_feature 1..20: note = Description of Artificial Sequence: Synthetic oligonucleotide
  misc_feature 1..20: note = Target: ANGPTL3; (-) strand; PAM type: NNGRRT; PAM sequence: TTGAAT
  source 1..20: mol_type = other DNA
tgtgttgggtttgcaattta

SEQ ID NO: 5709 - DNA, 20 bp, synthetic construct
  misc_feature 1..20: note = Description of Artificial Sequence: Synthetic oligonucleotide
  misc_feature 1..20: note = Target: ANGPTL3; (-) strand; PAM type: NNGRRT; PAM sequence: TTGGGT
  source 1..20: mol_type = other DNA
tttatttttatttaagtgtg

SEQ ID NO: 5710 - DNA, 20 bp, synthetic construct
  misc_feature 1..20: note = Description of Artificial Sequence: Synthetic oligonucleotide
  misc_feature 1..20: note = Target: ANGPTL3; (-) strand; PAM type: NNGRRT; PAM sequence: ATGAAT
  source 1..20: mol_type = other DNA
taatgtattcttttatttat

SEQ ID NO: 5711 - DNA, 20 bp, synthetic construct
  misc_feature 1..20: note = Description of Artificial Sequence: Synthetic oligonucleotide
  misc_feature 1..20: note = Target: ANGPTL3; (-) strand; PAM type: NNGRRT; PAM sequence: TAGAAT
  source 1..20: mol_type = other DNA
aaagtagagactgctttgct

SEQ ID NO: 5712 - DNA, 20 bp, synthetic construct
  misc_feature 1..20: note = Description of Artificial Sequence: Synthetic oligonucleotide
  misc_feature 1..20: note = Target: ANGPTL3; (-) strand; PAM type: NNGRRT; PAM sequence: AAGGAT
  source 1..20: mol_type = other DNA
caattaggggaaatctgagt

SEQ ID NO: 5713 - DNA, 20 bp, synthetic construct
  misc_feature 1..20: note = Description of Artificial Sequence: Synthetic oligonucleotide
  misc_feature 1..20: note = Target: ANGPTL3; (-) strand; PAM type: NNGRRT; PAM sequence: CTGAGT
  source 1..20: mol_type = other DNA
aatatacaattaggggaaat

SEQ ID NO: 5714 - DNA, 20 bp, synthetic construct
  misc_feature 1..20: note = Description of Artificial Sequence: Synthetic oligonucleotide
  misc_feature 1..20: note = Target: ANGPTL3; (-) strand; PAM type: NNGRRT; PAM sequence: CTGAAT
  source 1..20: mol_type = other DNA
atctgttttttaaaatgata

SEQ ID NO: 5715 - DNA, 20 bp, synthetic construct
  misc_feature 1..20: note = Description of Artificial Sequence: Synthetic oligonucleotide
  misc_feature 1..20: note = Target: ANGPTL3; (-) strand; PAM type: NNGRRT; PAM sequence: AAGAAT
  source 1..20: mol_type = other DNA
tagtccttctgagctgataa

SEQ ID NO: 5716 - DNA, 20 bp, synthetic construct
  misc_feature 1..20: note = Description of Artificial Sequence: Synthetic oligonucleotide
  misc_feature 1..20: note = Target: ANGPTL3; (-) strand; PAM type: NNGRRT; PAM sequence: TTGAAT
  source 1..20: mol_type = other DNA
agagaaatttctgtgggttc

SEQ ID NO: 5717 - DNA, 20 bp, synthetic construct
  misc_feature 1..20: note = Description of Artificial Sequence: Synthetic oligonucleotide
  misc_feature 1..20: note = Target: ANGPTL3; (-) strand; PAM type: NNGRRT; PAM sequence: GTGGGT
  source 1..20: mol_type = other DNA
tggaagatagagaaatttct

SEQ ID NO: 5718 - DNA, 20 bp, synthetic construct
  misc_feature 1..20: note = Description of Artificial Sequence: Synthetic oligonucleotide
  misc_feature 1..20: note = Target: ANGPTL3; (-) strand; PAM type: NNGRRT; PAM sequence: GGGAGT
  source 1..20: mol_type = other DNA
atttcattcaactgaagaaa

SEQ ID NO: 5719 - DNA, 20 bp, synthetic construct
  misc_feature 1..20: note = Description of Artificial Sequence: Synthetic oligonucleotide
  misc_feature 1..20: note = Target: ANGPTL3; (-) strand; PAM type: NNGRRT; PAM sequence: GGGAAT
  source 1..20: mol_type = other DNA
tagaacaagtcctaagaata

SEQ ID NO: 5720 - DNA, 20 bp, synthetic construct
  misc_feature 1..20: note = Description of Artificial Sequence: Synthetic oligonucleotide
  misc_feature 1..20: note = Target: ANGPTL3; (-) strand; PAM type: NNGRRT; PAM sequence: AAGAAT
  source 1..20: mol_type = other DNA
tttagtctagaacaagtcct

SEQ ID NO: 5721 - DNA, 20 bp, synthetic construct
  misc_feature 1..20: note = Description of Artificial Sequence: Synthetic oligonucleotide
  misc_feature 1..20: note = Target: ANGPTL3; (-) strand; PAM type: NNGRRT; PAM sequence: ATGGAT
  source 1..20: mol_type = other DNA
aggttgatacattgtatttg

SEQ ID NO: 5722 - DNA, 20 bp, synthetic construct
  misc_feature 1..20: note = Description of Artificial Sequence: Synthetic oligonucleotide
  misc_feature 1..20: note = Target: ANGPTL3; (-) strand; PAM type: NNGRRT; PAM sequence: TAGGGT
  source 1..20: mol_type = other DNA
tgtcttaggtatgtctttta

SEQ ID NO: 5723 - DNA, 20 bp, synthetic construct
  misc_feature 1..20: note = Description of Artificial Sequence: Synthetic oligonucleotide
  misc_feature 1..20: note = Target: ANGPTL3; (-) strand; PAM type: NNGRRT; PAM sequence: TGGAGT
  source 1..20: mol_type = other DNA
gtcttgttctatcaccagtc

SEQ ID NO: 5724 - DNA, 20 bp, synthetic construct
  misc_feature 1..20: note = Description of Artificial Sequence: Synthetic oligonucleotide
  misc_feature 1..20: note = Target: ANGPTL3; (-) strand; PAM type: NNGRRT; PAM sequence: CAGAGT
  source 1..20: mol_type = other DNA
aattaattattttttagaga

SEQ ID NO: 5725 - DNA, 20 bp, synthetic construct
  misc_feature 1..20: note = Description of Artificial Sequence: Synthetic oligonucleotide
  misc_feature 1..20: note = Target: ANGPTL3; (-) strand; PAM type: NNGRRT; PAM sequence: AAGAAT
  source 1..20: mol_type = other DNA
ggcgtgttatttaagaatgt

SEQ ID NO: 5726 - DNA, 20 bp, synthetic construct
  misc_feature 1..20: note = Description of Artificial Sequence: Synthetic oligonucleotide
  misc_feature 1..20: note = Target: ANGPTL3; (-) strand; PAM type: NNGRRT; PAM sequence: AAGAAT
  source 1..20: mol_type = other DNA
tcttagatggcgtgttattt

SEQ ID NO: 5727 - DNA, 20 bp, synthetic construct
  misc_feature 1..20: note = Description of Artificial Sequence: Synthetic oligonucleotide
  misc_feature 1..20: note = Target: ANGPTL3; (-) strand; PAM type: NNGRRT; PAM sequence: AGGAAT
  source 1..20: mol_type = other DNA
attacatcagatttagtaat

SEQ ID NO: 5728 - DNA, 20 bp, synthetic construct
  misc_feature 1..20: note = Description of Artificial Sequence: Synthetic oligonucleotide
  misc_feature 1..20: note = Target: ANGPTL3; (-) strand; PAM type: NNGRRT; PAM sequence: TAGAAT
  source 1..20: mol_type = other DNA
gtacattcagcaggaatgcc

SEQ ID NO: 5729 - DNA, 20 bp, synthetic construct
  misc_feature 1..20: note = Description of Artificial Sequence: Synthetic oligonucleotide
  misc_feature 1..20: note = Target: ANGPTL3; (-) strand; PAM type: NNGRRT; PAM sequence: AGGAAT
  source 1..20: mol_type = other DNA
taaatggtggtacattcagc

SEQ ID NO: 5730 - DNA, 20 bp, synthetic construct
  misc_feature 1..20: note = Description of Artificial Sequence: Synthetic oligonucleotide
  misc_feature 1..20: note = Target: ANGPTL3; (-) strand; PAM type: NNGRRT; PAM sequence: CTGGGT
  source 1..20: mol_type = other DNA
catgaaaaacttgagagttg

SEQ ID NO: 5731 - DNA, 20 bp, synthetic construct
  misc_feature 1..20: note = Description of Artificial Sequence: Synthetic oligonucleotide
  misc_feature 1..20: note = Target: ANGPTL3; (-) strand; PAM type: NNGRRT; PAM sequence: GAGAGT
  source 1..20: mol_type = other DNA
acagtagacatgaaaaactt

SEQ ID NO: 5732 - DNA, 20 bp, synthetic construct
  misc_feature 1..20: note = Description of Artificial Sequence: Synthetic oligonucleotide
  misc_feature 1..20: note = Target: ANGPTL3; (-) strand; PAM type: NNGRRT; PAM sequence: ATGAGT
  source 1..20: mol_type = other DNA
gttaatcttcctaatacgta

SEQ ID NO: 5733 - DNA, 20 bp, synthetic construct
  misc_feature 1..20: note = Description of Artificial Sequence: Synthetic oligonucleotide
  misc_feature 1..20: note = Target: ANGPTL3; (-) strand; PAM type: NNGRRT; PAM sequence: ACGAAT
  source 1..20: mol_type = other DNA
ggtaaaagtattatatttat

SEQ ID NO: 5734 - DNA, 20 bp, synthetic construct
  misc_feature 1..20: note = Description of Artificial Sequence: Synthetic oligonucleotide
  misc_feature 1..20: note = Target: ANGPTL3; (-) strand; PAM type: NNGRRT; PAM sequence: TTGAGT
  source 1..20: mol_type = other DNA
tttagaggaaaaggagaata

SEQ ID NO: 5735 - DNA, 20 bp, synthetic construct
  misc_feature 1..20: note = Description of Artificial Sequence: Synthetic oligonucleotide
  misc_feature 1..20: note = Target: ANGPTL3; (-) strand; PAM type: NNGRRT; PAM sequence: GAGAAT
  source 1..20: mol_type = other DNA
agattattttagaggaaaag

SEQ ID NO: 5736 - DNA, 20 bp, synthetic construct
  misc_feature 1..20: note = Description of Artificial Sequence: Synthetic oligonucleotide
  misc_feature 1..20: note = Target: ANGPTL3; (-) strand; PAM type: NNGRRT; PAM sequence: ATGAAT
  source 1..20: mol_type = other DNA
agttaagtgaaaggcaatta

SEQ ID NO: 5737 - DNA, 20 bp, synthetic construct
  misc_feature 1..20: note = Description of Artificial Sequence: Synthetic oligonucleotide
  misc_feature 1..20: note = Target: ANGPTL3; (-) strand; PAM type: NNGRRT; PAM sequence: ATGAAT
  source 1..20: mol_type = other DNA
ccatggactacctgaatata

SEQ ID NO: 5738 - DNA, 20 bp, synthetic construct
  misc_feature 1..20: note = Description of Artificial Sequence: Synthetic oligonucleotide
  misc_feature 1..20: note = Target: ANGPTL3; (-) strand; PAM type: NNGRRT; PAM sequence: CTGAAT
  source 1..20: mol_type = other DNA
aattaatgtccatggactac

SEQ ID NO: 5739 - DNA, 20 bp, synthetic construct
  misc_feature 1..20: note = Description of Artificial Sequence: Synthetic oligonucleotide
  misc_feature 1..20: note = Target: ANGPTL3; (-) strand; PAM type: NNGRRT; PAM sequence: TTGAAT
  source 1..20: mol_type = other DNA
tgtgatccatctattcgatg

SEQ ID NO: 5740 - DNA, 20 bp, synthetic construct
  misc_feature 1..20: note = Description of Artificial Sequence: Synthetic oligonucleotide
  misc_feature 1..20: note = Target: ANGPTL3; (-) strand; PAM type: NNGRRT; PAM sequence: TTGAAT
  source 1..20: mol_type = other DNA
attagcaagtgaatgaatga

SEQ ID NO: 5741 - DNA, 20 bp, synthetic construct
  misc_feature 1..20: note = Description of Artificial Sequence: Synthetic oligonucleotide
  misc_feature 1..20: note = Target: ANGPTL3; (-) strand; PAM type: NNGRRT; PAM sequence: ATGAAT
  source 1..20: mol_type = other DNA
atttgtagattagcaagtga

SEQ ID NO: 5742 - DNA, 20 bp, synthetic construct
  misc_feature 1..20: note = Description of Artificial Sequence: Synthetic oligonucleotide
  misc_feature 1..20: note = Target: ANGPTL3; (-) strand; PAM type: NNGRRT; PAM sequence: GTGAAT
  source 1..20: mol_type = other DNA
aaatatttgtagattagcaa

SEQ ID NO: 5743 - DNA, 20 bp, synthetic construct
  misc_feature 1..20: note = Description of Artificial Sequence: Synthetic oligonucleotide
  misc_feature 1..20: note = Target: ANGPTL3; (-) strand; PAM type: NNGRRT; PAM sequence: TGGAAT
  source 1..20: mol_type = other DNA
gttatgatcattgtaagccg

SEQ ID NO: 5744 - DNA, 20 bp, synthetic construct
  misc_feature 1..20: note = Description of Artificial Sequence: Synthetic oligonucleotide
  misc_feature 1..20: note = Target: ANGPTL3; (-) strand; PAM type: NNGRRT; PAM sequence: AGGAGT
  source 1..20: mol_type = other DNA
agaatagagtgactaatgct

SEQ ID NO: 5745 - DNA, 20 bp, synthetic construct
  misc_feature 1..20: note = Description of Artificial Sequence: Synthetic oligonucleotide
  misc_feature 1..20: note = Target: ANGPTL3; (-) strand; PAM type: NNGRRT; PAM sequence: TAGAGT
  source 1..20: mol_type = other DNA
gtaaaacgttaatgagagaa

SEQ ID NO: 5746 - DNA, 20 bp, synthetic construct
  misc_feature 1..20: note = Description of Artificial Sequence: Synthetic oligonucleotide
  misc_feature 1..20: note = Target: ANGPTL3; (-) strand; PAM type: NNGRRT; PAM sequence: GAGAAT
  source 1..20: mol_type = other DNA
gatatgtaaaacgttaatga

SEQ ID NO: 5747 - DNA, 20 bp, synthetic construct
  misc_feature 1..20: note = Description of Artificial Sequence: Synthetic oligonucleotide
  misc_feature 1..20: note = Target: ANGPTL3; (-) strand; PAM type: NNGRRT; PAM sequence: CTGAGT
  source 1..20: mol_type = other DNA
ttaaaatgtatactgtatgt

SEQ ID NO: 5748 - DNA, 20 bp, synthetic construct
  misc_feature 1..20: note = Description of Artificial Sequence: Synthetic oligonucleotide
  misc_feature 1..20: note = Target: ANGPTL3; (-) strand; PAM type: NNGRRT; PAM sequence: TTGAGT
  source 1..20: mol_type = other DNA
tcaaaatagaataatttgca

SEQ ID NO: 5749 - DNA, 20 bp, synthetic construct
  misc_feature 1..20: note = Description of Artificial Sequence: Synthetic oligonucleotide
  misc_feature 1..20: note = Target: ANGPTL3; (-) strand; PAM type: NNGRRT; PAM sequence: TAGAAT
  source 1..20: mol_type = other DNA
tttactatttgtaatcaaaa

SEQ ID NO: 5750 - DNA, 20 bp, synthetic construct
  misc_feature 1..20: note = Description of Artificial Sequence: Synthetic oligonucleotide
  misc_feature 1..20: note = Target: ANGPTL3; (-) strand; PAM type: NNGRRT; PAM sequence: TTGGAT
  source 1..20: mol_type = other DNA
tggatttttgtatgtgcttt

SEQ ID NO: 5751 - DNA, 20 bp, synthetic construct
  misc_feature 1..20: note = Description of Artificial Sequence: Synthetic oligonucleotide
  misc_feature 1..20: note = Target: ANGPTL3; (-) strand; PAM type: NNGRRT; PAM sequence: ATGGAT
  source 1..20: mol_type = other DNA
tgagtacttagacatcattc

SEQ ID NO: 5752 - DNA, 20 bp, synthetic construct
  misc_feature 1..20: note = Description of Artificial Sequence: Synthetic oligonucleotide
  misc_feature 1..20: note = Target: ANGPTL3; (-) strand; PAM type: NNGRRT; PAM sequence: GTGAGT
  source 1..20: mol_type = other DNA
gaatgtcttctactttataa

SEQ ID NO: 5753 - DNA, 20 bp, synthetic construct
  misc_feature 1..20: note = Description of Artificial Sequence: Synthetic oligonucleotide
  misc_feature 1..20: note = Target: ANGPTL3; (-) strand; PAM type: NNGRRT; PAM sequence: ATGAAT
  source 1..20: mol_type = other DNA
tttaaaaatttgatataata

SEQ ID NO: 5754 - DNA, 20 bp, synthetic construct
  misc_feature 1..20: note = Description of Artificial Sequence: Synthetic oligonucleotide
  misc_feature 1..20: note = Target: ANGPTL3; (-) strand; PAM type: NNGRRT; PAM sequence: TTGAAT
  source 1..20: mol_type = other DNA
gtagggctttcactggtagt

SEQ ID NO: 5755 - DNA, 20 bp, synthetic construct
  misc_feature 1..20: note = Description of Artificial Sequence: Synthetic oligonucleotide
  misc_feature 1..20: note = Target: ANGPTL3; (-) strand; PAM type: NNGRRT; PAM sequence: CTGAGT
  source 1..20: mol_type = other DNA
tggagctacaaaacttatca

SEQ ID NO: 5756 - DNA, 20 bp, synthetic construct
  misc_feature 1..20: note = Description of Artificial Sequence: Synthetic oligonucleotide
  misc_feature 1..20: note = Target: ANGPTL3; (-) strand; PAM type: NNGRRT; PAM sequence: TGGGGT
  source 1..20: mol_type = other DNA
tacctgtcagccttttattt

SEQ ID NO: 5757 - DNA, 20 bp, synthetic construct
  misc_feature 1..20: note = Description of Artificial Sequence: Synthetic oligonucleotide
  misc_feature 1..20: note = Target: ANGPTL3; (-) strand; PAM type: NNGRRT; PAM sequence: GTGAGT
  source 1..20: mol_type = other DNA
tgctttcttaccagaattaa

SEQ ID NO: 5758 - DNA, 20 bp, synthetic construct
  misc_feature 1..20: note = Description of Artificial Sequence: Synthetic oligonucleotide
  misc_feature 1..20: note = Target: ANGPTL3; (-) strand; PAM type: NNGRRT; PAM sequence: CAGAAT
  source 1..20: mol_type = other DNA
caaatgggttgctttcttac

SEQ ID NO: 5759 - DNA, 20 bp, synthetic construct
  misc_feature 1..20: note = Description of Artificial Sequence: Synthetic oligonucleotide
  misc_feature 1..20: note = Target: ANGPTL3; (-) strand; PAM type: NNGRRT; PAM sequence: ATGGGT
  source 1..20: mol_type = other DNA
gctggtaaatacaagtacaa

SEQ ID NO: 5760 - DNA, 20 bp, synthetic construct
  misc_feature 1..20: note = Description of Artificial Sequence: Synthetic oligonucleotide
  misc_feature 1..20: note = Target: ANGPTL3; (-) strand; PAM type: NNGRRT; PAM sequence: AAGGAT
  source 1..20: mol_type = other DNA
ttagtaggaagcttcatttt

SEQ ID NO: 5761 - DNA, 20 bp, synthetic construct
  misc_feature 1..20: note = Description of Artificial Sequence: Synthetic oligonucleotide
  misc_feature 1..20: note = Target: ANGPTL3; (-) strand; PAM type: NNGRRT; PAM sequence: TTGAGT
  source 1..20: mol_type = other DNA
tcactattgtcttattgcta

SEQ ID NO: 5762 - DNA, 20 bp, synthetic construct
  misc_feature 1..20: note = Description of Artificial Sequence: Synthetic oligonucleotide
  misc_feature 1..20: note = Target: ANGPTL3; (-) strand; PAM type: NNGRRT; PAM sequence: TGGAAT
  source 1..20: mol_type = other DNA
attttaaaaattatttttat

SEQ ID NO: 5763 - DNA, 20 bp, synthetic construct
  misc_feature 1..20: note = Description of Artificial Sequence: Synthetic oligonucleotide
  misc_feature 1..20: note = Target: ANGPTL3; (-) strand; PAM type: NNGRRT; PAM sequence: AGGAAT
  source 1..20: mol_type = other DNA
ctttctttgtagaaaaagac

SEQ ID NO: 5764 - DNA, 20 bp, synthetic construct
  misc_feature 1..20: note = Description of Artificial Sequence: Synthetic oligonucleotide
  misc_feature 1..20: note = Target: ANGPTL3; (-) strand; PAM type: NNGRRT; PAM sequence: TTGAGT
  source 1..20: mol_type = other DNA
tgttaagtattcctagagac

SEQ ID NO: 5765 - DNA, 20 bp, synthetic construct
  misc_feature 1..20: note = Description of Artificial Sequence: Synthetic oligonucleotide
  misc_feature 1..20: note = Target: ANGPTL3; (-) strand; PAM type: NNGRRT; PAM sequence: ATGGAT
  source 1..20: mol_type = other DNA
gaatatttgcaagtctttat

SEQ ID NO: 5766 - DNA, 20 bp, synthetic construct
  misc_feature 1..20: note = Description of Artificial Sequence: Synthetic oligonucleotide
  misc_feature 1..20: note = Target: ANGPTL3; (-) strand; PAM type: NNGRRT; PAM sequence: AGGAAT
  source 1..20: mol_type = other DNA
taaagtctcgtcattggtag

SEQ ID NO: 5767 - DNA, 20 bp, synthetic construct
  misc_feature 1..20: note = Description of Artificial Sequence: Synthetic oligonucleotide
  misc_feature 1..20: note = Target: ANGPTL3; (-) strand; PAM type: NNGRRT; PAM sequence: TTGAAT
  source 1..20: mol_type = other DNA
actaattgagttgtttagtc

SEQ ID NO: 5768 - DNA, 20 bp, synthetic construct
  misc_feature 1..20: note = Description of Artificial Sequence: Synthetic oligonucleotide
  misc_feature 1..20: note = Target: ANGPTL3; (-) strand; PAM type: NNGRRT; PAM sequence: TTGAGT
  source 1..20: mol_type = other DNA
ttttttattggtgcaactaa

SEQ ID NO: 5769 - DNA, 20 bp, synthetic construct
  misc_feature 1..20: note = Description of Artificial Sequence: Synthetic oligonucleotide
  misc_feature 1..20: note = Target: ANGPTL3; (-) strand; PAM type: NNGRRT; PAM sequence: GTGAGT
  source 1..20: mol_type = other DNA
aagaaaagttttaaaaatct

SEQ ID NO: 5770 - DNA, 20 bp, synthetic construct
  misc_feature 1..20: note = Description of Artificial Sequence: Synthetic oligonucleotide
  misc_feature 1..20: note = Target: ANGPTL3; (-) strand; PAM type: NNGRRT; PAM sequence: TGGAGT
  source 1..20: mol_type = other DNA
ataattagattgcttcacta

SEQ ID NO: 5771 - DNA, 20 bp, synthetic construct
  misc_feature 1..20: note = Description of Artificial Sequence: Synthetic oligonucleotide
  misc_feature 1..20: note = Target: ANGPTL3; (-) strand; PAM type: NNGRRT; PAM sequence: AAGAAT
  source 1..20: mol_type = other DNA
ttcgtgatttcccaagtaaa

SEQ ID NO: 5772 - DNA, 20 bp, synthetic construct
  misc_feature 1..20: note = Description of Artificial Sequence: Synthetic oligonucleotide
  misc_feature 1..20: note = Target: ANGPTL3; (-) strand; PAM type: NNGRRT; PAM sequence: CGGGAT
  source 1..20: mol_type = other DNA
aacaccaaatctttgttttc

SEQ ID NO: 5773 - DNA, 20 bp, synthetic construct
  misc_feature 1..20: note = Description of Artificial Sequence: Synthetic oligonucleotide
  misc_feature 1..20: note = Target: ANGPTL3; (-) strand; PAM type: NNGRRT; PAM sequence: CTGAAT
  source 1..20: mol_type = other DNA
ttggtatcagaaaaagatac

SEQ ID NO: 5774 - DNA, 20 bp, synthetic construct
  misc_feature 1..20: note = Description of Artificial Sequence: Synthetic oligonucleotide
  misc_feature 1..20: note = Target: ANGPTL3; (-) strand; PAM type: NNGRRT; PAM sequence: TCGGAT
  source 1..20: mol_type = other DNA
agaaaacgcttatttgggat

SEQ ID NO: 5775 - DNA, 20 bp, synthetic construct
  misc_feature 1..20: note = Description of Artificial Sequence: Synthetic oligonucleotide
  misc_feature 1..20: note = Target: ANGPTL3; (-) strand; PAM type: NNGRRT; PAM sequence: TGGGAT
  source 1..20: mol_type = other DNA
ctagagagaaaacgcttatt

SEQ ID NO: 5776 - DNA, 20 bp, synthetic construct
  misc_feature 1..20: note = Description of Artificial Sequence: Synthetic oligonucleotide
  misc_feature 1..20: note = Target: ANGPTL3; (-) strand; PAM type: NNGRRT; PAM sequence: TAGAAT
  source 1..20: mol_type = other DNA
ggtaaaatacctgattgaac

SEQ ID NO: 5777 - DNA, 20 bp, synthetic construct
  misc_feature 1..20: note = Description of Artificial Sequence: Synthetic oligonucleotide
  misc_feature 1..20: note = Target: ANGPTL3; (-) strand; PAM type: NNGRRT; PAM sequence: ATGGGT
  source 1..20: mol_type = other DNA
ggagatagatatgcaattta

SEQ ID NO: 5778 - DNA, 20 bp, synthetic construct
  misc_feature 1..20: note = Description of Artificial Sequence: Synthetic oligonucleotide
  misc_feature 1..20: note = Target: ANGPTL3; (-) strand; PAM type: NNGRRT; PAM sequence: TAGAGT
  source 1..20: mol_type = other DNA
caacattttggttgatttta

SEQ ID NO: 5779 - DNA, 20 bp, synthetic construct
  misc_feature 1..20: note = Description of Artificial Sequence: Synthetic oligonucleotide
  misc_feature 1..20: note = Target: ANGPTL3; (-) strand; PAM type: NNGRRT; PAM sequence: ATGGAT
  source 1..20: mol_type = other DNA
aagctttctgaatctgttgg

SEQ ID NO: 5780 - DNA, 20 bp, synthetic construct
  misc_feature 1..20: note = Description of Artificial Sequence: Synthetic oligonucleotide
  misc_feature 1..20: note = Target: ANGPTL3; (-) strand; PAM type: NNGRRT; PAM sequence: TTGGAT
  source 1..20: mol_type = other DNA
ttcaaagctttctgaatctg

SEQ ID NO: 5781 - DNA, 20 bp, synthetic construct
  misc_feature 1..20: note = Description of Artificial Sequence: Synthetic oligonucleotide
  misc_feature 1..20: note = Target: ANGPTL3; (-) strand; PAM type: NNGRRT; PAM sequence: CTGAAT
  source 1..20: mol_type = other DNA
ctcagttcattcaaagcttt

SEQ ID NO: 5782 - DNA, 20 bp, synthetic construct
  misc_feature 1..20: note = Description of Artificial Sequence: Synthetic oligonucleotide
  misc_feature 1..20: note = Target: ANGPTL3; (-) strand; PAM type: NNGRRT; PAM sequence: TGGAAT
  source 1..20: mol_type = other DNA
attattagaccacattaact

SEQ ID NO: 5783 - DNA, 20 bp, synthetic construct
  misc_feature 1..20: note = Description of Artificial Sequence: Synthetic oligonucleotide
  misc_feature 1..20: note = Target: ANGPTL3; (-) strand; PAM type: NNGRRT; PAM sequence: AAGGAT
  source 1..20: mol_type = other DNA
tatttctcaagctttctctt

SEQ ID NO: 5784 - DNA, 20 bp, synthetic construct
  misc_feature 1..20: note = Description of Artificial Sequence: Synthetic oligonucleotide
  misc_feature 1..20: note = Target: ANGPTL3; (-) strand; PAM type: NNGRRT; PAM sequence: AAGAAT
  source 1..20: mol_type = other DNA
tttaaaacaaatagtattat

SEQ ID NO: 5785 - DNA, 20 bp, synthetic construct
  misc_feature 1..20: note = Description of Artificial Sequence: Synthetic oligonucleotide
  misc_feature 1..20: note = Target: ANGPTL3; (-) strand; PAM type: NNGRRT; PAM sequence: AAGAGT
  source 1..20: mol_type = other DNA
gtcaagtttagagttttaac

SEQ ID NO: 5786 - DNA, 20 bp, synthetic construct
  misc_feature 1..20: note = Description of Artificial Sequence: Synthetic oligonucleotide
  misc_feature 1..20: note = Target: ANGPTL3; (-) strand; PAM type: NNGRRT; PAM sequence: TAGAGT
  source 1..20: mol_type = other DNA
cctctgtatttagtcaagtt

SEQ ID NO: 5787 - DNA, 20 bp, synthetic construct
  misc_feature 1..20: note = Description of Artificial Sequence: Synthetic oligonucleotide
  misc_feature 1..20: note = Target: ANGPTL3; (-) strand; PAM type: NNGRRT; PAM sequence: TAGAAT
  source 1..20: mol_type = other DNA
gaaaacctacacgaatgtat

SEQ ID NO: 5788 - DNA, 20 bp, synthetic construct
  misc_feature 1..20: note = Description of Artificial Sequence: Synthetic oligonucleotide
  misc_feature 1..20: note = Target: ANGPTL3; (-) strand; PAM type: NNGRRT; PAM sequence: ACGAAT
  source 1..20: mol_type = other DNA
atttctacttgaaaacctac

SEQ ID NO: 5789 - DNA, 20 bp, synthetic construct
  misc_feature 1..20: note = Description of Artificial Sequence: Synthetic oligonucleotide
  misc_feature 1..20: note = Target: ANGPTL3; (-) strand; PAM type: NNGRRT; PAM sequence: TTGAAT
  source 1..20: mol_type = other DNA
agggactgggtctttgttta

SEQ ID NO: 5790 - DNA, 20 bp, synthetic construct
  misc_feature 1..20: note = Description of Artificial Sequence: Synthetic oligonucleotide
  misc_feature 1..20: note = Target: ANGPTL3; (-) strand; PAM type: NNGRRT; PAM sequence: CTGGGT
  source 1..20: mol_type = other DNA
aaatttctataatttaggga

SEQ ID NO: 5791 - DNA, 20 bp, synthetic construct
  misc_feature 1..20: note = Description of Artificial Sequence: Synthetic oligonucleotide
  misc_feature 1..20: note = Target: ANGPTL3; (-) strand; PAM type: NNGRRT; PAM sequence: AAGAAT
  source 1..20: mol_type = other DNA
tgtgatgtcgataaacatgc

SEQ ID NO: 5792 - DNA, 20 bp, synthetic construct
  misc_feature 1..20: note = Description of Artificial Sequence: Synthetic oligonucleotide
  misc_feature 1..20: note = Target: ANGPTL3; (-) strand; PAM type: NNGRRT; PAM sequence: AGGGAT
  source 1..20: mol_type = other DNA
ctttagggatttagggattt

SEQ ID NO: 5793 - DNA, 20 bp, synthetic construct
  misc_feature 1..20: note = Description of Artificial Sequence: Synthetic oligonucleotide
  misc_feature 1..20: note = Target: ANGPTL3; (-) strand; PAM type: NNGRRT; PAM sequence: AGGGAT
  source 1..20: mol_type = other DNA
tatctaatctttagggattt

SEQ ID NO: 5794 - DNA, 20 bp, synthetic construct
  misc_feature 1..20: note = Description of Artificial Sequence: Synthetic oligonucleotide
  misc_feature 1..20: note = Target: ANGPTL3; (-) strand; PAM type: NNGRRT; PAM sequence: AGGGAT
  source 1..20: mol_type = other DNA
aaaatttgtatctaatcttt

SEQ ID NO: 5795 - DNA, 20 bp, synthetic construct
  misc_feature 1..20: note = Description of Artificial Sequence: Synthetic oligonucleotide
  misc_feature 1..20: note = Target: ANGPTL3; (-) strand; PAM type: NNGRRT; PAM sequence: ATGGGT
  source 1..20: mol_type = other DNA
ggcactatatcctttaacaa

SEQ ID NO: 5796 - DNA, 20 bp, synthetic construct
  misc_feature 1..20: note = Description of Artificial Sequence: Synthetic oligonucleotide
  misc_feature 1..20: note = Target: ANGPTL3; (-) strand; PAM type: NNGRRT; PAM sequence: TTGGAT
  source 1..20: mol_type = other DNA
aaatatatatgacatgtata

SEQ ID NO: 5797 - DNA, 20 bp, synthetic construct
  misc_feature 1..20: note = Description of Artificial Sequence: Synthetic oligonucleotide
  misc_feature 1..20: note = Target: ANGPTL3; (-) strand; PAM type: NNGRRT; PAM sequence: TAGGAT
  source 1..20: mol_type = other DNA
tctggaacaaaatatttact

SEQ ID NO: 5798 - DNA, 20 bp, synthetic construct
  misc_feature 1..20: note = Description of Artificial Sequence: Synthetic oligonucleotide
  misc_feature 1..20: note = Target: ANGPTL3; (-) strand; PAM type: NNGRRT; PAM sequence: ATGAAT
  source 1..20: mol_type = other DNA
agcaactcatatattaaata

SEQ ID NO: 5799 - DNA, 20 bp, synthetic construct
  misc_feature 1..20: note = Description of Artificial Sequence: Synthetic oligonucleotide
  misc_feature 1..20: note = Target: ANGPTL3; (-) strand; PAM type: NNGRRT; PAM sequence: GAGAGT
  source 1..20: mol_type = other DNA
caaaatgaaacatgtcctat

SEQ ID NO: 5800 - DNA, 20 bp, synthetic construct
  misc_feature 1..20: note = Description of Artificial Sequence: Synthetic oligonucleotide
  misc_feature 1..20: note = Target: ANGPTL3; (-) strand; PAM type: NNGRRT; PAM sequence: TGGAAT
  source 1..20: mol_type = other DNA
tagacaactgtgagtagtga

SEQ ID NO: 5801 - DNA, 20 bp, synthetic construct
  misc_feature 1..20: note = Description of Artificial Sequence: Synthetic oligonucleotide
  misc_feature 1..20: note = Target: ANGPTL3; (-) strand; PAM type: NNGRRT; PAM sequence: GTGAGT
  source 1..20: mol_type = other DNA
tagacttagattagacaact

SEQ ID NO: 5802 - DNA, 20 bp, synthetic construct
  misc_feature 1..20: note = Description of Artificial Sequence: Synthetic oligonucleotide
  misc_feature 1..20: note = Target: ANGPTL3; (-) strand; PAM type: NNGRRT; PAM sequence: GGGGAT
  source 1..20: mol_type = other DNA
aggtagtctgagagatcaaa

SEQ ID NO: 5803 - DNA, 20 bp, synthetic construct
  misc_feature 1..20: note = Description of Artificial Sequence: Synthetic oligonucleotide
  misc_feature 1..20: note = Target: ANGPTL3; (-) strand; PAM type: NNGRRT; PAM sequence: GAGAGT
  source 1..20: mol_type = other DNA
cagataagggataatccatg

SEQ ID NO: 5804 - DNA, 20 bp, synthetic construct
  misc_feature 1..20: note = Description of Artificial Sequence: Synthetic oligonucleotide
  misc_feature 1..20: note = Target: ANGPTL3; (-) strand; PAM type: NNGRRT; PAM sequence: AGGGAT
  source 1..20: mol_type = other DNA
tataaagatggattcagata

SEQ ID NO: 5805 - DNA, 20 bp, synthetic construct
  misc_feature 1..20: note = Description of Artificial Sequence: Synthetic oligonucleotide
  misc_feature 1..20: note = Target: ANGPTL3; (-) strand; PAM type: NNGRRT; PAM sequence: ATGGAT
  source 1..20: mol_type = other DNA
aaaggaatagggttataaag

SEQ ID NO: 5806 - DNA, 20 bp, synthetic construct
  misc_feature 1..20: note = Description of Artificial Sequence: Synthetic oligonucleotide
  misc_feature 1..20: note = Target: ANGPTL3; (-) strand; PAM type: NNGRRT; PAM sequence: TAGGGT
  source 1..20: mol_type = other DNA
tactaaatatgagaaaggaa

SEQ ID NO: 5807 - DNA, 20 bp, synthetic construct
  misc_feature 1..20: note = Description of Artificial Sequence: Synthetic oligonucleotide
  misc_feature 1..20: note = Target: ANGPTL3; (-) strand; PAM type: NNGRRT; PAM sequence: AGGAAT
  source 1..20: mol_type = other DNA
cacagtactaaatatgagaa

SEQ ID NO: 5808 - DNA, 20 bp, synthetic construct
  misc_feature 1..20: note = Description of Artificial Sequence: Synthetic oligonucleotide
  misc_feature 1..20: note = Target: ANGPTL3; (-) strand; PAM type: NNGRRT; PAM sequence: GAGGGT
  source 1..20: mol_type = other DNA
tgagagcagatagaatgtct

SEQ ID NO: 5809 - DNA, 20 bp, synthetic construct
  misc_feature 1..20: note = Description of Artificial Sequence: Synthetic oligonucleotide
  misc_feature 1..20: note = Target: ANGPTL3; (-) strand; PAM type: NNGRRT; PAM sequence: TAGAAT
  source 1..20: mol_type = other DNA
aaggagtccgtgagagcaga

SEQ ID NO: 5810 - DNA, 20 bp, synthetic construct
  misc_feature 1..20: note = Description of Artificial Sequence: Synthetic oligonucleotide
  misc_feature 1..20: note = Target: ANGPTL3; (-) strand; PAM type: NNGRRT; PAM sequence: AGGAGT
  source 1..20: mol_type = other DNA
actttattcatggtaaataa

SEQ ID NO: 5811 - DNA, 20 bp, synthetic construct
  misc_feature 1..20: note = Description of Artificial Sequence: Synthetic oligonucleotide
  misc_feature 1..20: note = Target: ANGPTL3; (-) strand; PAM type: NNGRRT; PAM sequence: ATGAAT
  source 1..20: mol_type = other DNA
gaactggaaagagacttggg

SEQ ID NO: 5812 - DNA, 20 bp, synthetic construct
  misc_feature 1..20: note = Description of Artificial Sequence: Synthetic oligonucleotide
  misc_feature 1..20: note = Target: ANGPTL3; (-) strand; PAM type: NNGRRT; PAM sequence: TGGGAT
  source 1..20: mol_type = other DNA
aggggaactggaaagagact

SEQ ID NO: 5813 - DNA, 20 bp, synthetic construct
  misc_feature 1..20: note = Description of Artificial Sequence: Synthetic oligonucleotide
  misc_feature 1..20: note = Target: ANGPTL3; (-) strand; PAM type: NNGRRT; PAM sequence: TAGGGT
  source 1..20: mol_type = other DNA
tgttgaatttgagtgaagta

SEQ ID NO: 5814 - DNA, 20 bp, synthetic construct
  misc_feature 1..20: note = Description of Artificial Sequence: Synthetic oligonucleotide
  misc_feature 1..20: note = Target: ANGPTL3; (-) strand; PAM type: NNGRRT; PAM sequence: TTGAGT
  source 1..20: mol_type = other DNA
ttatttttggtatgttgaat

SEQ ID NO: 5815 - DNA, 20 bp, synthetic construct
  misc_feature 1..20: note = Description of Artificial Sequence: Synthetic oligonucleotide
  misc_feature 1..20: note = Target: ANGPTL3; (-) strand; PAM type: NNGRRT; PAM sequence: TTGAAT
  source 1..20: mol_type = other DNA
ggccttttatttttggtatg

SEQ ID NO: 5816 - DNA, 20 bp, synthetic construct
  misc_feature 1..20: note = Description of Artificial Sequence: Synthetic oligonucleotide
  misc_feature 1..20: note = Target: ANGPTL3; (-) strand; PAM type: NNGRRT; PAM sequence: TGGGAT
  source 1..20: mol_type = other DNA
gcctcagcctcccaaagtcc

SEQ ID NO: 5817 - DNA, 20 bp, synthetic construct
  misc_feature 1..20: note = Description of Artificial Sequence: Synthetic oligonucleotide
  misc_feature 1..20: note = Target: ANGPTL3; (-) strand; PAM type: NNGRRT; PAM sequence: CGGGGT
  source 1..20: mol_type = other DNA
ttttgtattttaggtagaga

SEQ ID NO: 5818 - DNA, 20 bp, synthetic construct
  misc_feature 1..20: note = Description of Artificial Sequence: Synthetic oligonucleotide
  misc_feature 1..20: note = Target: ANGPTL3; (-) strand; PAM type: NNGRRT; PAM sequence: TTGAGT
  source 1..20: mol_type = other DNA
gattctcctgtctcagcctc

SEQ ID NO: 5819 - DNA, 20 bp, synthetic construct
  misc_feature 1..20: note = Description of Artificial Sequence: Synthetic oligonucleotide
  misc_feature 1..20: note = Target: ANGPTL3; (-) strand; PAM type: NNGRRT; PAM sequence: CTGGGT
  source 1..20: mol_type = other DNA
ctcactgcaacctccgcctc

SEQ ID NO: 5820 - DNA, 20 bp, synthetic construct
  misc_feature 1..20: note = Description of Artificial Sequence: Synthetic oligonucleotide
  misc_feature 1..20: note = Target: ANGPTL3; (-) strand; PAM type: NNGRRT; PAM sequence: TTGAGT
  source 1..20: mol_type = other DNA
aatttgttatttattttttt

SEQ ID NO: 5821 - DNA, 20 bp, synthetic construct
  misc_feature 1..20: note = Description of Artificial Sequence: Synthetic oligonucleotide
  misc_feature 1..20: note = Target: ANGPTL3; (-) strand; PAM type: NNGRRT; PAM sequence: GGGAAT
  source 1..20: mol_type = other DNA
gcagtagcagtaaggggctg

SEQ ID NO: 5822 - DNA, 20 bp, synthetic construct
  misc_feature 1..20: note = Description of Artificial Sequence: Synthetic oligonucleotide
  misc_feature 1..20: note = Target: ANGPTL3; (-) strand; PAM type: NNGRRT; PAM sequence: AGGGAT
  source 1..20: mol_type = other DNA
ggagggaaaggtgggtagaa

SEQ ID NO: 5823 - DNA, 20 bp, synthetic construct
  misc_feature 1..20: note = Description of Artificial Sequence: Synthetic oligonucleotide
  misc_feature 1..20: note = Target: ANGPTL3; (-) strand; PAM type: NNGRRT; PAM sequence: GTGGGT
  source 1..20: mol_type = other DNA
agagtataaaggagggaaag

SEQ ID NO: 5824 - DNA, 20 bp, synthetic construct
  misc_feature 1..20: note = Description of Artificial Sequence: Synthetic oligonucleotide
  misc_feature 1..20: note = Target: ANGPTL3; (-) strand; PAM type: NNGRRT; PAM sequence: AAGAGT
  source 1..20: mol_type = other DNA
aagtgaggaagatggtgtga

SEQ ID NO: 5825 - DNA, 20 bp, synthetic construct
  misc_feature 1..20: note = Description of Artificial Sequence: Synthetic oligonucleotide
  misc_feature 1..20: note = Target: ANGPTL3; (-) strand; PAM type: NNGRRT; PAM sequence: ATGGAT
  source 1..20: mol_type = other DNA
ggaacatgctggtcatatta

SEQ ID NO: 5826 - DNA, 20 bp, synthetic construct
  misc_feature 1..20: note = Description of Artificial Sequence: Synthetic oligonucleotide
  misc_feature 1..20: note = Target: ANGPTL3; (-) strand; PAM type: NNGRRT; PAM sequence: CCGGGT
  source 1..20: mol_type = other DNA
tgaaaagccagagatgtctt

SEQ ID NO: 5827 - DNA, 20 bp, synthetic construct
  misc_feature 1..20: note = Description of Artificial Sequence: Synthetic oligonucleotide
  misc_feature 1..20: note = Target: ANGPTL3; (-) strand; PAM type: NNGRRT; PAM sequence: TTGAGT
  source 1..20: mol_type = other DNA
aaaagaggtagtttacaaag

SEQ ID NO: 5828 - DNA, 20 bp, synthetic construct
  misc_feature 1..20: note = Description of Artificial Sequence: Synthetic oligonucleotide
  misc_feature 1..20: note = Target: ANGPTL3; (-) strand; PAM type: NNGRRT; PAM sequence: AAGGAT
  source 1..20: mol_type = other DNA
cctgtaactccagacaataa

SEQ ID NO: 5829 - DNA, 20 bp, synthetic construct
  misc_feature 1..20: note = Description of Artificial Sequence: Synthetic oligonucleotide
  misc_feature 1..20: note = Target: ANGPTL3; (-) strand; PAM type: NNGRRT; PAM sequence: TTGGAT
  source 1..20: mol_type = other DNA
gccccggcctcccaaaatac

SEQ ID NO: 5830 - DNA, 20 bp, synthetic construct
  misc_feature 1..20: note = Description of Artificial Sequence: Synthetic oligonucleotide
  misc_feature 1..20: note = Target: ANGPTL3; (-) strand; PAM type: NNGRRT; PAM sequence: CTGGGT
  source 1..20: mol_type = other DNA
cacaggctgatcttggactc

SEQ ID NO: 5831 - DNA, 20 bp, synthetic construct
  misc_feature 1..20: note = Description of Artificial Sequence: Synthetic oligonucleotide
  misc_feature 1..20: note = Target: ANGPTL3; (-) strand; PAM type: NNGRRT; PAM sequence: TGGAGT
  source 1..20: mol_type = other DNA
ttttgtattttttgtagagg

SEQ ID NO: 5832 - DNA, 20 bp, synthetic construct
  misc_feature 1..20: note = Description of Artificial Sequence: Synthetic oligonucleotide
  misc_feature 1..20: note = Target: ANGPTL3; (-) strand; PAM type: NNGRRT; PAM sequence: TGGGAT
  source 1..20: mol_type = other DNA
gcctcagcctcccaagtagt

SEQ ID NO: 5833 - DNA, 20 bp, synthetic construct
  misc_feature 1..20: note = Description of Artificial Sequence: Synthetic oligonucleotide
  misc_feature 1..20: note = Target: ANGPTL3; (-) strand; PAM type: NNGRRT; PAM sequence: TAGGAT
  source 1..20: mol_type = other DNA
cccaggctagaatgcagtgt

SEQ ID NO: 5834 - DNA, 20 bp, synthetic construct
  misc_feature 1..20: note = Description of Artificial Sequence: Synthetic oligonucleotide
  misc_feature 1..20: note = Target: ANGPTL3; (-) strand; PAM type: NNGRRT; PAM sequence: TAGAAT
  source 1..20: mol_type = other DNA
tctcactctgttgcccaggc

SEQ ID NO: 5835 - DNA, 20 bp, synthetic construct
  misc_feature 1..20: note = Description of Artificial Sequence: Synthetic oligonucleotide
  misc_feature 1..20: note = Target: ANGPTL3; (-) strand; PAM type: NNGRRT; PAM sequence: CAGAGT
  source 1..20: mol_type = other DNA
tatgaagattttttttgaga

SEQ ID NO: 5836 - DNA, 20 bp, synthetic construct
  misc_feature 1..20: note = Description of Artificial Sequence: Synthetic oligonucleotide
  misc_feature 1..20: note = Target: ANGPTL3; (-) strand; PAM type: NNGRRT; PAM sequence: CAGGAT
  source 1..20: mol_type = other DNA
atatgggacgtgcaagttca

SEQ ID NO: 5837 - DNA, 20 bp, synthetic construct
  misc_feature 1..20: note = Description of Artificial Sequence: Synthetic oligonucleotide
  misc_feature 1..20: note = Target: ANGPTL3; (-) strand; PAM type: NNGRRT; PAM sequence: TGGAGT
  source 1..20: mol_type = other DNA
aaggcctatactcttctaat

SEQ ID NO: 5838 - DNA, 20 bp, synthetic construct
  misc_feature 1..20: note = Description of Artificial Sequence: Synthetic oligonucleotide
  misc_feature 1..20: note = Target: ANGPTL3; (-) strand; PAM type: NNGRRT; PAM sequence: TTGGAT
  source 1..20: mol_type = other DNA
tttgaaaacctggaaggatt

SEQ ID NO: 5839 - DNA, 20 bp, synthetic construct
  misc_feature 1..20: note = Description of Artificial Sequence: Synthetic oligonucleotide
  misc_feature 1..20: note = Target: ANGPTL3; (-) strand; PAM type: NNGRRT; PAM sequence: AAGGAT
  source 1..20: mol_type = other DNA
agagacttttgaaaacctgg

SEQ ID NO: 5840 - DNA, 20 bp, synthetic construct
  misc_feature 1..20: note = Description of Artificial Sequence: Synthetic oligonucleotide
  misc_feature 1..20: note = Target: ANGPTL3; (-) strand; PAM type: NNGRRT; PAM sequence: TGGAAT
  source 1..20: mol_type = other DNA
ggggagacattctagacaaa

SEQ ID NO: 5841 - DNA, 20 bp, synthetic construct
  misc_feature 1..20: note = Description of Artificial Sequence: Synthetic oligonucleotide
  misc_feature 1..20: note = Target: ANGPTL3; (-) strand; PAM type: NNGRRT; PAM sequence: AAGAAT
  source 1..20: mol_type = other DNA
atttactagaatatttgtgg

SEQ ID NO: 5842 - DNA, 20 bp, synthetic construct
  misc_feature 1..20: note = Description of Artificial Sequence: Synthetic oligonucleotide
  misc_feature 1..20: note = Target: ANGPTL3; (-) strand; PAM type: NNGRRT; PAM sequence: TAGAAT
  source 1..20: mol_type = other DNA
atgaacaagctgccatttac

SEQ ID NO: 5843 - DNA, 20 bp, synthetic construct
  misc_feature 1..20: note = Description of Artificial Sequence: Synthetic oligonucleotide
  misc_feature 1..20: note = Target: ANGPTL3; (-) strand; PAM type: NNGRRT; PAM sequence: CAGAAT
  source 1..20: mol_type = other DNA
gagcttttagtactattttt

SEQ ID NO: 5844 - DNA, 20 bp, synthetic construct
  misc_feature 1..20: note = Description of Artificial Sequence: Synthetic oligonucleotide
  misc_feature 1..20: note = Target: ANGPTL3; (-) strand; PAM type: NNGRRT; PAM sequence: CAGAGT
  source 1..20: mol_type = other DNA
atatgctgattccaggatga

SEQ ID NO: 5845 - DNA, 20 bp, synthetic construct
  misc_feature 1..20: note = Description of Artificial Sequence: Synthetic oligonucleotide
  misc_feature 1..20: note = Target: ANGPTL3; (-) strand; PAM type: NNGRRT; PAM sequence: CAGGAT
  source 1..20: mol_type = other DNA
gcatgaaaatatgctgattc

SEQ ID NO: 5846 - DNA, 20 bp, synthetic construct
  misc_feature 1..20: note = Description of Artificial Sequence: Synthetic oligonucleotide
  misc_feature 1..20: note = Target: ANGPTL3; (-) strand; PAM type: NNGRRT; PAM sequence: ATGAGT
  source 1..20: mol_type = other DNA
gaatgagttagttgacttcc

SEQ ID NO: 5847 - DNA, 20 bp, synthetic construct
  misc_feature 1..20: note = Description of Artificial Sequence: Synthetic oligonucleotide
  misc_feature 1..20: note = Target: ANGPTL3; (-) strand; PAM type: NNGRRT; PAM sequence: ATGAGT
  source 1..20: mol_type = other DNA
accatttctaaaattaatga

SEQ ID NO: 5848 - DNA, 20 bp, synthetic construct
  misc_feature 1..20: note = Description of Artificial Sequence: Synthetic oligonucleotide
  misc_feature 1..20: note = Target: ANGPTL3; (-) strand; PAM type: NNGRRT; PAM sequence: ATGAAT
  source 1..20: mol_type = other DNA
gaataccatttctaaaatta

SEQ ID NO: 5849 - DNA, 20 bp, synthetic construct
  misc_feature 1..20: note = Description of Artificial Sequence: Synthetic oligonucleotide
  misc_feature 1..20: note = Target: ANGPTL3; (-) strand; PAM type: NNGRRT; PAM sequence: ATGAAT
  source 1..20: mol_type = other DNA
tgctcaataagtgttgttta

SEQ ID NO: 5850 - DNA, 20 bp, synthetic construct
  misc_feature 1..20: note = Description of Artificial Sequence: Synthetic oligonucleotide
  misc_feature 1..20: note = Target: ANGPTL3; (-) strand; PAM type: NNGRRT; PAM sequence: TGGAAT
  source 1..20: mol_type = other DNA
agtatatatgagtacaaatt

SEQ ID NO: 5851 - DNA, 20 bp, synthetic construct
  misc_feature 1..20: note = Description of Artificial Sequence: Synthetic oligonucleotide
  misc_feature 1..20: note = Target: ANGPTL3; (-) strand; PAM type: NNGRRT; PAM sequence: ATGAGT
  source 1..20: mol_type = other DNA
cagcagaaggtagagtatat

SEQ ID NO: 5852 - DNA, 20 bp, synthetic construct
  misc_feature 1..20: note = Description of Artificial Sequence: Synthetic oligonucleotide
  misc_feature 1..20: note = Target: ANGPTL3; (-) strand; PAM type: NNGRRT; PAM sequence: TAGAGT
  source 1..20: mol_type = other DNA
gattatcctacagcagaagg

SEQ ID NO: 5853 - DNA, 20 bp, synthetic construct
  misc_feature 1..20: note = Description of Artificial Sequence: Synthetic oligonucleotide
  misc_feature 1..20: note = Target: ANGPTL3; (-) strand; PAM type: NNGRRT; PAM sequence: CAGAGT
  source 1..20: mol_type = other DNA
cagtagtacatacataagtg

SEQ ID NO: 5854 - DNA, 20 bp, synthetic construct
  misc_feature 1..20: note = Description of Artificial Sequence: Synthetic oligonucleotide
  misc_feature 1..20: note = Target: ANGPTL3; (-) strand; PAM type: NNGRRT; PAM sequence: TTGGGT
  source 1..20: mol_type = other DNA
tttgataaaagggccaattg

SEQ ID NO: 5855 - DNA, 20 bp, synthetic construct
  misc_feature 1..20: note = Description of Artificial Sequence: Synthetic oligonucleotide
  misc_feature 1..20: note = Target: ANGPTL3; (-) strand; PAM type: NNGRRT; PAM sequence: GAGGAT
  source 1..20: mol_type = other DNA
ttttattaagggttataata

SEQ ID NO: 5856 - DNA, 20 bp, synthetic construct
  misc_feature 1..20: note = Description of Artificial Sequence: Synthetic oligonucleotide
  misc_feature 1..20: note = Target: ANGPTL3; (-) strand; PAM type: NNGRRT; PAM sequence: AAGGGT
  source 1..20: mol_type = other DNA
cattaaaacctcattttatt

SEQ ID NO: 5857 - DNA, 20 bp, synthetic construct
  misc_feature 1..20: note = Description of Artificial Sequence: Synthetic oligonucleotide
  misc_feature 1..20: note = Target: ANGPTL3; (-) strand; PAM type: NNGRRT; PAM sequence: TAGAAT
  source 1..20: mol_type = other DNA
aacagcctttgtattttaga

SEQ ID NO: 5858 - DNA, 20 bp, synthetic construct
  misc_feature 1..20: note = Description of Artificial Sequence: Synthetic oligonucleotide
  misc_feature 1..20: note = Target: ANGPTL3; (-) strand; PAM type: NNGRRT; PAM sequence: ATGAAT
  source 1..20: mol_type = other DNA
gactgttcttaggactaaac

SEQ ID NO: 5859 - DNA, 20 bp, synthetic construct
  misc_feature 1..20: note = Description of Artificial Sequence: Synthetic oligonucleotide
  misc_feature 1..20: note = Target: ANGPTL3; (-) strand; PAM type: NNGRRT; PAM sequence: TTGGGT
  source 1..20: mol_type = other DNA
aggattattattcccatcta

SEQ ID NO: 5860 - DNA, 20 bp, synthetic construct
  misc_feature 1..20: note = Description of Artificial Sequence: Synthetic oligonucleotide
  misc_feature 1..20: note = Target: ANGPTL3; (-) strand; PAM type: NNGRRT; PAM sequence: CAGGAT
  source 1..20: mol_type = other DNA
tgaagtattaatagatttga

SEQ ID NO: 5861 - DNA, 20 bp, synthetic construct
  misc_feature 1..20: note = Description of Artificial Sequence: Synthetic oligonucleotide
  misc_feature 1..20: note = Target: ANGPTL3; (-) strand; PAM type: NNGRRT; PAM sequence: AGGAAT
  source 1..20: mol_type = other DNA
tgtagagattatttacttaa

SEQ ID NO: 5862 - DNA, 20 bp, synthetic construct
  misc_feature 1..20: note = Description of Artificial Sequence: Synthetic oligonucleotide
  misc_feature 1..20: note = Target: ANGPTL3; (-) strand; PAM type: NNGRRT; PAM sequence: GAGAAT
  source 1..20: mol_type = other DNA
cagttttgttcttctgtcct

SEQ ID NO: 5863 - DNA, 20 bp, synthetic construct
  misc_feature 1..20: note = Description of Artificial Sequence: Synthetic oligonucleotide
  misc_feature 1..20: note = Target: ANGPTL3; (-) strand; PAM type: NNGRRT; PAM sequence: AGGAGT
  source 1..20: mol_type = other DNA
tatcttagattgtgaaggga

SEQ ID NO: 5864 - DNA, 20 bp, synthetic construct
  misc_feature 1..20: note = Description of Artificial Sequence: Synthetic oligonucleotide
  misc_feature 1..20: note = Target: ANGPTL3; (-) strand; PAM type: NNGRRT; PAM sequence: TGGAGT
  source 1..20: mol_type = other DNA
gggcttgcatctgaaggtga

SEQ ID NO: 5865 - DNA, 20 bp, synthetic construct
  misc_feature 1..20: note = Description of Artificial Sequence: Synthetic oligonucleotide
  misc_feature 1..20: note = Target: ANGPTL3; (-) strand; PAM type: NNGRRT; PAM sequence: CTGAGT
  source 1..20: mol_type = other DNA
tctcgaaaaaaaaaagaatt

SEQ ID NO: 5866 - DNA, 20 bp, synthetic construct
  misc_feature 1..20: note = Description of Artificial Sequence: Synthetic oligonucleotide
  misc_feature 1..20: note = Target: ANGPTL3; (-) strand; PAM type: NNGRRT; PAM sequence: AAGAAT
  source 1..20: mol_type = other DNA
gactccatctcgaaaaaaaa

SEQ ID NO: 5867 - DNA, 20 bp, synthetic construct
  misc_feature 1..20: note = Description of Artificial Sequence: Synthetic oligonucleotide
  misc_feature 1..20: note = Target: ANGPTL3; (-) strand; PAM type: NNGRRT; PAM sequence: CTGGGT
  source 1..20: mol_type = other DNA
cagtgccactgcactccagc

SEQ ID NO: 5868 - DNA, 20 bp, synthetic construct
  misc_feature 1..20: note = Description of Artificial Sequence: Synthetic oligonucleotide
  misc_feature 1..20: note = Target: ANGPTL3; (-) strand; PAM type: NNGRRT; PAM sequence: GAGAAT
  source 1..20: mol_type = other DNA
tactcaggagtctgaggcag

SEQ ID NO: 5869 - DNA, 20 bp, synthetic construct
  misc_feature 1..20: note = Description of Artificial Sequence: Synthetic oligonucleotide
  misc_feature 1..20: note = Target: ANGPTL3; (-) strand; PAM type: NNGRRT; PAM sequence: AGGAGT
  source 1..20: mol_type = other DNA
acctgtaatcctagctactc

SEQ ID NO: 5870 - DNA, 20 bp, synthetic construct
  misc_feature 1..20: note = Description of Artificial Sequence: Synthetic oligonucleotide
  misc_feature 1..20: note = Target: ANGPTL3; (-) strand; PAM type: NNGRRT; PAM sequence: AGGAGT
  source 1..20: mol_type = other DNA
ggaaggcggatcacgaggtc

SEQ ID NO: 5871 - DNA, 20 bp, synthetic construct
  misc_feature 1..20: note = Description of Artificial Sequence: Synthetic oligonucleotide
  misc_feature 1..20: note = Target: ANGPTL3; (-) strand; PAM type: NNGRRT; PAM sequence: GCGGAT
  source 1..20: mol_type = other DNA
actttgggaggccgaggaag

SEQ ID NO: 5872 - DNA, 20 bp, synthetic construct
  misc_feature 1..20: note = Description of Artificial Sequence: Synthetic oligonucleotide
  misc_feature 1..20: note = Target: ANGPTL3; (-) strand; PAM type: NNGRRT; PAM sequence: CTGAGT
  source 1..20: mol_type = other DNA
gtttattttaactataaaaa

SEQ ID NO: 5873 - DNA, 20 bp, synthetic construct
  misc_feature 1..20: note = Description of Artificial Sequence: Synthetic oligonucleotide
  misc_feature 1..20: note = Target: ANGPTL3; (-) strand; PAM type: NNGRRT; PAM sequence: TCGAAT
  source 1..20: mol_type = other DNA
ccactctgagttttattcta

SEQ ID NO: 5874 - DNA, 20 bp, synthetic construct
  misc_feature 1..20: note = Description of Artificial Sequence: Synthetic oligonucleotide
  misc_feature 1..20: note = Target: ANGPTL3; (-) strand; PAM type: NNGRRT; PAM sequence: CTGAGT
  source 1..20: mol_type = other DNA
tttgtccttgttataccact

SEQ ID NO: 5875 - DNA, 20 bp, synthetic construct
  misc_feature 1..20: note = Description of Artificial Sequence: Synthetic oligonucleotide
  misc_feature 1..20: note = Target: ANGPTL3; (-) strand; PAM type: NNGRRT; PAM sequence: TAGAGT
  source 1..20: mol_type = other DNA
ttggtttttgtttttatttt

SEQ ID NO: 5876 - DNA, 20 bp, synthetic construct
  misc_feature 1..20: note = Description of Artificial Sequence: Synthetic oligonucleotide
  misc_feature 1..20: note = Target: ANGPTL3; (-) strand; PAM type: NNGRRT; PAM sequence: ATGGGT
  source 1..20: mol_type = other DNA
ctaatgtagatgacgggttg

SEQ ID NO: 5877 - DNA, 20 bp, synthetic construct
  misc_feature 1..20: note = Description of Artificial Sequence: Synthetic oligonucleotide
  misc_feature 1..20: note = Target: ANGPTL3; (-) strand; PAM type: NNGRRT; PAM sequence: ACGGGT
  source 1..20: mol_type = other DNA
agaaatacctaatgtagatg

SEQ ID NO: 5878 - DNA, 20 bp, synthetic construct
  misc_feature 1..20: note = Description of Artificial Sequence: Synthetic oligonucleotide
  misc_feature 1..20: note = Target: ANGPTL3; (-) strand; PAM type: NNGRRT; PAM sequence: AGGGAT
  source 1..20: mol_type = other DNA
tgtcggggtggggctagggg

SEQ ID NO: 5879 - DNA, 20 bp, synthetic construct
  misc_feature 1..20: note = Description of Artificial Sequence: Synthetic oligonucleotide
  misc_feature 1..20: note = Target: ANGPTL3; (-) strand; PAM type: NNGRRT; PAM sequence: CGGGGT
  source 1..20: mol_type = other DNA
catcacacactgggacctgt

SEQ ID NO: 5880 - DNA, 20 bp, synthetic construct
  misc_feature 1..20: note = Description of Artificial Sequence: Synthetic oligonucleotide
  misc_feature 1..20: note = Target: ANGPTL3; (-) strand; PAM type: NNGRRT; PAM sequence: ATGGAT
  source 1..20: mol_type = other DNA
ttcatgtcctttgtagggac

SEQ ID NO: 5881 - DNA, 20 bp, synthetic construct
  misc_feature 1..20: note = Description of Artificial Sequence: Synthetic oligonucleotide
  misc_feature 1..20: note = Target: ANGPTL3; (-) strand; PAM type: NNGRRT; PAM sequence: ATGAGT
  source 1..20: mol_type = other DNA
ctatgcagccataaaaaagg

SEQ ID NO: 5882 - DNA, 20 bp, synthetic construct
  misc_feature 1..20: note = Description of Artificial Sequence: Synthetic oligonucleotide
  misc_feature 1..20: note = Target: ANGPTL3; (-) strand; PAM type: NNGRRT; PAM sequence: AAGGAT
  source 1..20: mol_type = other DNA
aatactatgcagccataaaa

SEQ ID NO: 5883 - DNA, 20 bp, synthetic construct
  misc_feature 1..20: note = Description of Artificial Sequence: Synthetic oligonucleotide
  misc_feature 1..20: note = Target: ANGPTL3; (-) strand; PAM type: NNGRRT; PAM sequence: TGGAAT
  source 1..20: mol_type = other DNA
aatgtggcacatatacacca

SEQ ID NO: 5884 - DNA, 20 bp, synthetic construct
  misc_feature 1..20: note = Description of Artificial Sequence: Synthetic oligonucleotide
  misc_feature 1..20: note = Target: ANGPTL3; (-) strand; PAM type: NNGRRT; PAM sequence: CTGGAT
  source 1..20: mol_type = other DNA
aaatgcccatcaatgataga

SEQ ID NO: 5885 - DNA, 20 bp, synthetic construct
  misc_feature 1..20: note = Description of Artificial Sequence: Synthetic oligonucleotide
  misc_feature 1..20: note = Target: ANGPTL3; (-) strand; PAM type: NNGRRT; PAM sequence: AAGGAT
  source 1..20: mol_type = other DNA
cattattgggtatatattca

SEQ ID NO: 5886 - DNA, 20 bp, synthetic construct
  misc_feature 1..20: note = Description of Artificial Sequence: Synthetic oligonucleotide
  misc_feature 1..20: note = Target: ANGPTL3; (-) strand; PAM type: NNGRRT; PAM sequence: TTGGGT
  source 1..20: mol_type = other DNA
ttgacccagtaatcccatta

SEQ ID NO: 5887 - DNA, 20 bp, synthetic construct
  misc_feature 1..20: note = Description of Artificial Sequence: Synthetic oligonucleotide
  misc_feature 1..20: note = Target: ANGPTL3; (+) strand; PAM type: NNGRRT; PAM sequence: AAGAAT
  source 1..20: mol_type = other DNA
tgtttgttatatatataaca

SEQ ID NO: 5888 - DNA, 20 bp, synthetic construct
  misc_feature 1..20: note = Description of Artificial Sequence: Synthetic oligonucleotide
  misc_feature 1..20: note = Target: ANGPTL3; (+) strand; PAM type: NNGRRT; PAM sequence: GAGGGT
  source 1..20: mol_type = other DNA
gaaagagacaaacttaaaaa

SEQ ID NO: 5889 - DNA, 20 bp, synthetic construct
  misc_feature 1..20: note = Description of Artificial Sequence: Synthetic oligonucleotide
  misc_feature 1..20: note = Target: ANGPTL3; (+) strand; PAM type: NNGRRT; PAM sequence: AAGGAT
  source 1..20: mol_type = other DNA
ttcattaaaagcatttgtaa

SEQ ID NO: 5890 - DNA, 20 bp, synthetic construct
  misc_feature 1..20: note = Description of Artificial Sequence: Synthetic oligonucleotide
  misc_feature 1..20: note = Target: ANGPTL3; (+) strand; PAM type: NNGRRT; PAM sequence: AGGGAT
  source 1..20: mol_type = other DNA
aactctcatatactcctggc

SEQ ID NO: 5891 - DNA, 20 bp, synthetic construct
  misc_feature 1..20: note = Description of Artificial Sequence: Synthetic oligonucleotide
  misc_feature 1..20: note = Target: ANGPTL3; (+) strand; PAM type: NNGRRT; PAM sequence: ATGAAT
  source 1..20: mol_type = other DNA
taagttacaagtcaacatct

SEQ ID NO: 5892 - DNA, 20 bp, synthetic construct
  misc_feature 1..20: note = Description of Artificial Sequence: Synthetic oligonucleotide
  misc_feature 1..20: note = Target: ANGPTL3; (+) strand; PAM type: NNGRRT; PAM sequence: CAGGAT
  source 1..20: mol_type = other DNA
attaaggttcatctatataa

SEQ ID NO: 5893 - DNA, 20 bp, synthetic construct
  misc_feature 1..20: note = Description of Artificial Sequence: Synthetic oligonucleotide
  misc_feature 1..20: note = Target: ANGPTL3; (+) strand; PAM type: NNGRRT; PAM sequence: CTGAAT
  source 1..20: mol_type = other DNA
aattttaaaatactaagatc

SEQ ID NO: 5894 - DNA, 20 bp, synthetic construct
  misc_feature 1..20: note = Description of Artificial Sequence: Synthetic oligonucleotide
  misc_feature 1..20: note = Target: ANGPTL3; (+) strand; PAM type: NNGRRT; PAM sequence: AAGGGT
  source 1..20: mol_type = other DNA
aaattatgtttagtcattca

SEQ ID NO: 5895 - DNA, 20 bp, synthetic construct
  misc_feature 1..20: note = Description of Artificial Sequence: Synthetic oligonucleotide
  misc_feature 1..20: note = Target: ANGPTL3; (+) strand; PAM type: NNGRRT; PAM sequence: TAGAGT
  source 1..20: mol_type = other DNA
tgatagacccaaaatgttaa

SEQ ID NO: 5896 - DNA, 20 bp, synthetic construct
  misc_feature 1..20: note = Description of Artificial Sequence: Synthetic oligonucleotide
  misc_feature 1..20: note = Target: ANGPTL3; (+) strand; PAM type: NNGRRT; PAM sequence: CTGAAT
  source 1..20: mol_type = other DNA
tttataggtttttgaaatac

SEQ ID NO: 5897 - DNA, 20 bp, synthetic construct
  misc_feature 1..20: note = Description of Artificial Sequence: Synthetic oligonucleotide
  misc_feature 1..20: note = Target: ANGPTL3; (+) strand; PAM type: NNGRRT; PAM sequence: AGGAGT
  source 1..20: mol_type = other DNA
taggcagatcacctgaggtc

SEQ ID NO: 5898 - DNA, 20 bp, synthetic construct
  misc_feature 1..20: note = Description of Artificial Sequence: Synthetic oligonucleotide
  misc_feature 1..20: note = Target: ANGPTL3; (+) strand; PAM type: NNGRRT; PAM sequence: GGGGGT
  source 1..20: mol_type = other DNA
aaaattagccaggcttggtt

SEQ ID NO: 5899 - DNA, 20 bp, synthetic construct
  misc_feature 1..20: note = Description of Artificial Sequence: Synthetic oligonucleotide
  misc_feature 1..20: note = Target: ANGPTL3; (+) strand; PAM type: NNGRRT; PAM sequence: GAGAAT
  source 1..20: mol_type = other DNA
tactcgggaagctgagacag

SEQ ID NO: 5900 - DNA, 20 bp, synthetic construct
  misc_feature 1..20: note = Description of Artificial Sequence: Synthetic oligonucleotide
  misc_feature 1..20: note = Target: ANGPTL3; (+) strand; PAM type: NNGRRT; PAM sequence: CTGGAT
  source 1..20: mol_type = other DNA
cttcaaagctcacttaacct

SEQ ID NO: 5901 - DNA, 20 bp, synthetic construct
  misc_feature 1..20: note = Description of Artificial Sequence: Synthetic oligonucleotide
  misc_feature 1..20: note = Target: ANGPTL3; (+) strand; PAM type: NNGRRT; PAM sequence: GTGAGT
  source 1..20: mol_type = other DNA
gacaattgagcacttgatag

SEQ ID NO: 5902 - DNA, 20 bp, synthetic construct
  misc_feature 1..20: note = Description of Artificial Sequence: Synthetic oligonucleotide
  misc_feature 1..20: note = Target: ANGPTL3; (+) strand; PAM type: NNGRRT; PAM sequence: TAGGAT
  source 1..20: mol_type = other DNA
tctcagtataaaacatacaa

SEQ ID NO: 5903 - DNA, 20 bp, synthetic construct
  misc_feature 1..20: note = Description of Artificial Sequence: Synthetic oligonucleotide
  misc_feature 1..20: note = Target: ANGPTL3; (+) strand; PAM type: NNGRRT; PAM sequence: TAGGAT
  source 1..20: mol_type = other DNA
taagattacacaacctcgtg

SEQ ID NO: 5904 - DNA, 20 bp, synthetic construct
  misc_feature 1..20: note = Description of Artificial Sequence: Synthetic oligonucleotide
  misc_feature 1..20: note = Target: ANGPTL3; (+) strand; PAM type: NNGRRT; PAM sequence: TGGAAT
  source 1..20: mol_type = other DNA
ataaaggactttgctttgct

SEQ ID NO: 5905 - DNA, 20 bp, synthetic construct
  misc_feature 1..20: note = Description of Artificial Sequence: Synthetic oligonucleotide
  misc_feature 1..20: note = Target: ANGPTL3; (+) strand; PAM type: NNGRRT; PAM sequence: AGGAAT
  source 1..20: mol_type = other DNA
tatattggttcctaggaact

SEQ ID NO: 5906 - DNA, 20 bp, synthetic construct
  misc_feature 1..20: note = Description of Artificial Sequence: Synthetic oligonucleotide
  misc_feature 1..20: note = Target: ANGPTL3; (+) strand; PAM type: NNGRRT; PAM sequence: CAGGGT
  source 1..20: mol_type = other DNA
cattactggttatatttgat

SEQ ID NO: 5907 - DNA, 20 bp, synthetic construct
  misc_feature 1..20: note = Description of Artificial Sequence: Synthetic oligonucleotide
  misc_feature 1..20: note = Target: ANGPTL3; (+) strand; PAM type: NNGRRT; PAM sequence: AAGAAT
  source 1..20: mol_type = other DNA
aatgctgttcaaattactat

SEQ ID NO: 5908 - DNA, 20 bp, synthetic construct
  misc_feature 1..20: note = Description of Artificial Sequence: Synthetic oligonucleotide
  misc_feature 1..20: note = Target: ANGPTL3; (+) strand; PAM type: NNGRRT; PAM sequence: TAGGAT
  source 1..20: mol_type = other DNA
gtgttagtatcctactacag

SEQ ID NO: 5909 - DNA, 20 bp, synthetic construct
  misc_feature 1..20: note = Description of Artificial Sequence: Synthetic oligonucleotide
  misc_feature 1..20: note = Target: ANGPTL3; (+) strand; PAM type: NNGRRT; PAM sequence: AAGAAT
  source 1..20: mol_type = other DNA
ttcaaattcccttctctaaa

SEQ ID NO: 5910 - DNA, 20 bp, synthetic construct
  misc_feature 1..20: note = Description of Artificial Sequence: Synthetic oligonucleotide
  misc_feature 1..20: note = Target: ANGPTL3; (+) strand; PAM type: NNGRRT; PAM sequence: GGGGGT
  source 1..20: mol_type = other DNA
aagaatgtactatatcaaaa

SEQ ID NO: 5911 - DNA, 20 bp, synthetic construct
  misc_feature 1..20: note = Description of Artificial Sequence: Synthetic oligonucleotide
  misc_feature 1..20: note = Target: ANGPTL3; (+) strand; PAM type: NNGRRT; PAM sequence: AGGAAT
  source 1..20: mol_type = other DNA
tactgtactaaagcattata

SEQ ID NO: 5912 - DNA, 20 bp, synthetic construct
  misc_feature 1..20: note = Description of Artificial Sequence: Synthetic oligonucleotide
  misc_feature 1..20: note = Target: ANGPTL3; (+) strand; PAM type: NNGRRT; PAM sequence: GTGGAT
  source 1..20: mol_type = other DNA
tattctccctcaactagcaa

SEQ ID NO: 5913 - DNA, 20 bp, synthetic construct
  misc_feature 1..20: note = Description of Artificial Sequence: Synthetic oligonucleotide
  misc_feature 1..20: note = Target: ANGPTL3; (+) strand; PAM type: NNGRRT; PAM sequence: CAGGGT
  source 1..20: mol_type = other DNA
ctagcaagtggatgaaatat

SEQ ID NO: 5914 - DNA, 20 bp, synthetic construct
  misc_feature 1..20: note = Description of Artificial Sequence: Synthetic oligonucleotide
  misc_feature 1..20: note = Target: ANGPTL3; (+) strand; PAM type: NNGRRT; PAM sequence: TTGAAT
  source 1..20: mol_type = other DNA
tatttaaagaaggagaaaat

SEQ ID NO: 5915 - DNA, 20 bp, synthetic construct
  misc_feature 1..20: note = Description of Artificial Sequence: Synthetic oligonucleotide
  misc_feature 1..20: note = Target: ANGPTL3; (+) strand; PAM type: NNGRRT; PAM sequence: CAGAGT
  source 1..20: mol_type = other DNA
tataattccattacatgaac

SEQ ID NO: 5916 - DNA, 20 bp, synthetic construct
  misc_feature 1..20: note = Description of Artificial Sequence: Synthetic oligonucleotide
  misc_feature 1..20: note = Target: ANGPTL3; (+) strand; PAM type: NNGRRT; PAM sequence: AAGGGT
  source 1..20: mol_type = other DNA
ccattacatgaaccagagta

SEQ ID NO: 5917 - DNA, 20 bp, synthetic construct
  misc_feature 1..20: note = Description of Artificial Sequence: Synthetic oligonucleotide
  misc_feature 1..20: note = Target: ANGPTL3; (+) strand; PAM type: NNGRRT; PAM sequence: AAGAAT
  source 1..20: mol_type = other DNA
taaagggtaagatggaaatg

SEQ ID NO: 5918 - DNA, 20 bp, synthetic construct
  misc_feature 1..20: note = Description of Artificial Sequence: Synthetic oligonucleotide
  misc_feature 1..20: note = Target: ANGPTL3; (+) strand; PAM type: NNGRRT; PAM sequence: ATGGGT
  source 1..20: mol_type = other DNA
caccagtaaaatactatagt

SEQ ID NO: 5919 - DNA, 20 bp, synthetic construct
  misc_feature 1..20: note = Description of Artificial Sequence: Synthetic oligonucleotide
  misc_feature 1..20: note = Target: ANGPTL3; (+) strand; PAM type: NNGRRT; PAM sequence: AGGGGT
  source 1..20: mol_type = other DNA
cactggagagatgagaaaac

SEQ ID NO: 5920 - DNA, 20 bp, synthetic construct
  misc_feature 1..20: note = Description of Artificial Sequence: Synthetic oligonucleotide
  misc_feature 1..20: note = Target: ANGPTL3; (+) strand; PAM type: NNGRRT; PAM sequence: AAGAAT
  source 1..20: mol_type = other DNA
gaccaaaggtcacaaagctg

SEQ ID NO: 5921 - DNA, 20 bp, synthetic construct
  misc_feature 1..20: note = Description of Artificial Sequence: Synthetic oligonucleotide
  misc_feature 1..20: note = Target: ANGPTL3; (+) strand; PAM type: NNGRRT; PAM sequence: CGGGAT
  source 1..20: mol_type = other DNA
aagctgaagaatatgaaatc

SEQ ID NO: 5922 - DNA, 20 bp, synthetic construct
  misc_feature 1..20: note = Description of Artificial Sequence: Synthetic oligonucleotide
  misc_feature 1..20: note = Target: ANGPTL3; (+) strand; PAM type: NNGRRT; PAM sequence: CAGAAT
  source 1..20: mol_type = other DNA
tgattcaggcagtcttattc

SEQ ID NO: 5923 - DNA, 20 bp, synthetic construct
  misc_feature 1..20: note = Description of Artificial Sequence: Synthetic oligonucleotide
  misc_feature 1..20: note = Target: ANGPTL3; (+) strand; PAM type: NNGRRT; PAM sequence: TGGAAT
  source 1..20: mol_type = other DNA
aatcatgctcttaaccacta

SEQ ID NO: 5924 - DNA, 20 bp, synthetic construct
  misc_feature 1..20: note = Description of Artificial Sequence: Synthetic oligonucleotide
  misc_feature 1..20: note = Target: ANGPTL3; (+) strand; PAM type: NNGRRT; PAM sequence: AAGAAT
  source 1..20: mol_type = other DNA
cacaatgaagaggcatttct

SEQ ID NO: 5925 - DNA, 20 bp, synthetic construct
  misc_feature 1..20: note = Description of Artificial Sequence: Synthetic oligonucleotide
  misc_feature 1..20: note = Target: ANGPTL3; (+) strand; PAM type: NNGRRT; PAM sequence: AGGAGT
  source 1..20: mol_type = other DNA
tgggaggttcacttgaagtc

SEQ ID NO: 5926 - DNA, 20 bp, synthetic construct
  misc_feature 1..20: note = Description of Artificial Sequence: Synthetic oligonucleotide
  misc_feature 1..20: note = Target: ANGPTL3; (+) strand; PAM type: NNGRRT; PAM sequence: CTGGGT
  source 1..20: mol_type = other DNA
acaaaatatttaaaaattag

SEQ ID NO: 5927 - DNA, 20 bp, synthetic construct
  misc_feature 1..20: note = Description of Artificial Sequence: Synthetic oligonucleotide
  misc_feature 1..20: note = Target: ANGPTL3; (+) strand; PAM type: NNGRRT; PAM sequence: AGGAGT
  source 1..20: mol_type = other DNA
gaggaggcttgctcgagccc

SEQ ID NO: 5928 - DNA, 20 bp, synthetic construct
  misc_feature 1..20: note = Description of Artificial Sequence: Synthetic oligonucleotide
  misc_feature 1..20: note = Target: ANGPTL3; (+) strand; PAM type: NNGRRT; PAM sequence: ATGAAT
  source 1..20: mol_type = other DNA
tgttaaattatcataacact

SEQ ID NO: 5929 - DNA, 20 bp, synthetic construct
  misc_feature 1..20: note = Description of Artificial Sequence: Synthetic oligonucleotide
  misc_feature 1..20: note = Target: ANGPTL3; (+) strand; PAM type: NNGRRT; PAM sequence: AAGGAT
  source 1..20: mol_type = other DNA
gtcaagattaagcagtttta

SEQ ID NO: 5930 - DNA, 20 bp, synthetic construct
  misc_feature 1..20: note = Description of Artificial Sequence: Synthetic oligonucleotide
  misc_feature 1..20: note = Target: ANGPTL3; (+) strand; PAM type: NNGRRT; PAM sequence: AAGAAT
  source 1..20: mol_type = other DNA
tcttaatatgaacactcaat

SEQ ID NO: 5931 - DNA, 20 bp, synthetic construct
  misc_feature 1..20: note = Description of Artificial Sequence: Synthetic oligonucleotide
  misc_feature 1..20: note = Target: ANGPTL3; (+) strand; PAM type: NNGRRT; PAM sequence: AAGAAT
  source 1..20: mol_type = other DNA
attttgggaggccaaggtaa

SEQ ID NO: 5932 - DNA, 20 bp, synthetic construct
  misc_feature 1..20: note = Description of Artificial Sequence: Synthetic oligonucleotide
  misc_feature 1..20: note = Target: ANGPTL3; (+) strand; PAM type: NNGRRT; PAM sequence: GGGAGT
  source 1..20: mol_type = other DNA
acagaacacagtggagaaaa

SEQ ID NO: 5933 - DNA, 20 bp, synthetic construct
  misc_feature 1..20: note = Description of Artificial Sequence: Synthetic oligonucleotide
  misc_feature 1..20: note = Target: ANGPTL3; (+) strand; PAM type: NNGRRT; PAM sequence: TGGGAT
  source 1..20: mol_type = other DNA
ttaatgacacttactatata

SEQ ID NO: 5934 - DNA, 20 bp, synthetic construct
  misc_feature 1..20: note = Description of Artificial Sequence: Synthetic oligonucleotide
  misc_feature 1..20: note = Target: ANGPTL3; (+) strand; PAM type: NNGRRT; PAM sequence: AAGGAT
  source 1..20: mol_type = other DNA
gggattttgtgacaatatac

SEQ ID NO: 5935 - DNA, 20 bp, synthetic construct
  misc_feature 1..20: note = Description of Artificial Sequence: Synthetic oligonucleotide
  misc_feature 1..20: note = Target: ANGPTL3; (+) strand; PAM type: NNGRRT; PAM sequence: CAGAGT
  source 1..20: mol_type = other DNA
taattatacattgatttata

SEQ ID NO: 5936 - DNA, 20 bp, synthetic construct
  misc_feature 1..20: note = Description of Artificial Sequence: Synthetic oligonucleotide
  misc_feature 1..20: note = Target: ANGPTL3; (+) strand; PAM type: NNGRRT; PAM sequence: GGGAGT
  source 1..20: mol_type = other DNA
agagccgtaacaccacctga

SEQ ID NO: 5937 - DNA, 20 bp, synthetic construct
  misc_feature 1..20: note = Description of Artificial Sequence: Synthetic oligonucleotide
  misc_feature 1..20: note = Target: ANGPTL3; (+) strand; PAM type: NNGRRT; PAM sequence: TGGAAT
  source 1..20: mol_type = other DNA
ttcagagagaaagtgttttt

SEQ ID NO: 5938 - DNA, 20 bp, synthetic construct
  misc_feature 1..20: note = Description of Artificial Sequence: Synthetic oligonucleotide
  misc_feature 1..20: note = Target: ANGPTL3; (+) strand; PAM type: NNGRRT; PAM sequence: ATGGAT
  source 1..20: mol_type = other DNA
gagagaaagtgttttttgga

SEQ ID NO: 5939 - DNA, 20 bp, synthetic construct
  misc_feature 1..20: note = Description of Artificial Sequence: Synthetic oligonucleotide
  misc_feature 1..20: note = Target: ANGPTL3; (+) strand; PAM type: NNGRRT; PAM sequence: TTGAAT
  source 1..20: mol_type = other DNA
aacaggtagtcaccatagca

SEQ ID NO: 5940 - DNA, 20 bp, synthetic construct
  misc_feature 1..20: note = Description of Artificial Sequence: Synthetic oligonucleotide
  misc_feature 1..20: note = Target: ANGPTL3; (+) strand; PAM type: NNGRRT; PAM sequence: TAGAGT
  source 1..20: mol_type = other DNA
tgggcaaatattggtatata

SEQ ID NO: 5941 - DNA, 20 bp, synthetic construct
  misc_feature 1..20: note = Description of Artificial Sequence: Synthetic oligonucleotide
  misc_feature 1..20: note = Target: ANGPTL3; (+) strand; PAM type: NNGRRT; PAM sequence: CAGAAT
  source 1..20: mol_type = other DNA
gttcctctagttatttcctc

SEQ ID NO: 5942 - DNA, 20 bp, synthetic construct
  misc_feature 1..20: note = Description of Artificial Sequence: Synthetic oligonucleotide
  misc_feature 1..20: note = Target: ANGPTL3; (+) strand; PAM type: NNGRRT; PAM sequence: AAGAAT
  source 1..20: mol_type = other DNA
aagtcaaaaatgaagaggta

SEQ ID NO: 5943 - DNA, 20 bp, synthetic construct
  misc_feature 1..20: note = Description of Artificial Sequence: Synthetic oligonucleotide
  misc_feature 1..20: note = Target: ANGPTL3; (+) strand; PAM type: NNGRRT; PAM sequence: GAGGGT
  source 1..20: mol_type = other DNA
taaagtaagtagaaaataaa

SEQ ID NO: 5944 - DNA, 20 bp, synthetic construct
  misc_feature 1..20: note = Description of Artificial Sequence: Synthetic oligonucleotide
  misc_feature 1..20: note = Target: ANGPTL3; (+) strand; PAM type: NNGRRT; PAM sequence: GTGGAT
  source 1..20: mol_type = other DNA
ttcatgtttatgttttcaat

SEQ ID NO: 5945 - DNA, 20 bp, synthetic construct
  misc_feature 1..20: note = Description of Artificial Sequence: Synthetic oligonucleotide
  misc_feature 1..20: note = Target: ANGPTL3; (+) strand; PAM type: NNGRRT; PAM sequence: AGGAAT
  source 1..20: mol_type = other DNA
gaaagaagcatacaagggga

SEQ ID NO: 5946 - DNA, 20 bp, synthetic construct
  misc_feature 1..20: note = Description of Artificial Sequence: Synthetic oligonucleotide
  misc_feature 1..20: note = Target: ANGPTL3; (+) strand; PAM type: NNGRRT; PAM sequence: CTGAAT
  source 1..20: mol_type = other DNA
cacacaggtctgtaaaaaca

SEQ ID NO: 5947 - DNA, 20 bp, synthetic construct
  misc_feature 1..20: note = Description of Artificial Sequence: Synthetic oligonucleotide
  misc_feature 1..20: note = Target: ANGPTL3; (+) strand; PAM type: NNGRRT; PAM sequence: CTGGAT
  source 1..20: mol_type = other DNA
aaattatttacaagctttaa

SEQ ID NO: 5948 - DNA, 20 bp, synthetic construct
  misc_feature 1..20: note = Description of Artificial Sequence: Synthetic oligonucleotide
  misc_feature 1..20: note = Target: ANGPTL3; (+) strand; PAM type: NNGRRT; PAM sequence: ATGAGT
  source 1..20: mol_type = other DNA
ttacaagctttaactggatc

SEQ ID NO: 5949 - DNA, 20 bp, synthetic construct
  misc_feature 1..20: note = Description of Artificial Sequence: Synthetic oligonucleotide
  misc_feature 1..20: note = Target: ANGPTL3; (+) strand; PAM type: NNGRRT; PAM sequence: TTGAAT
  source 1..20: mol_type = other DNA
ctctaaaactttgtgtgacc

SEQ ID NO: 5950 - DNA, 20 bp, synthetic construct
  misc_feature 1..20: note = Description of Artificial Sequence: Synthetic oligonucleotide
  misc_feature 1..20: note = Target: ANGPTL3; (+) strand; PAM type: NNGRRT; PAM sequence: TAGGAT
  source 1..20: mol_type = other DNA
aaagataataacagaactta

SEQ ID NO: 5951 - DNA, 20 bp, synthetic construct
  misc_feature 1..20: note = Description of Artificial Sequence: Synthetic oligonucleotide
  misc_feature 1..20: note = Target: ANGPTL3; (+) strand; PAM type: NNGRRT; PAM sequence: TAGGGT
  source 1..20: mol_type = other DNA
gcccactctctgatttccct

SEQ ID NO: 5952 - DNA, 20 bp, synthetic construct
  misc_feature 1..20: note = Description of Artificial Sequence: Synthetic oligonucleotide
  misc_feature 1..20: note = Target: ANGPTL3; (+) strand; PAM type: NNGRRT; PAM sequence: GTGAAT
  source 1..20: mol_type = other DNA
tgcactaaaatgtaagctct

SEQ ID NO: 5953 - DNA, 20 bp, synthetic construct
  misc_feature 1..20: note = Description of Artificial Sequence: Synthetic oligonucleotide
  misc_feature 1..20: note = Target: ANGPTL3; (+) strand; PAM type: NNGRRT; PAM sequence: AGGGAT
  source 1..20: mol_type = other DNA
aatgtaagctctgtgaatac

SEQ ID NO: 5954 - DNA, 20 bp, synthetic construct
  misc_feature 1..20: note = Description of Artificial Sequence: Synthetic oligonucleotide
  misc_feature 1..20: note = Target: ANGPTL3; (+) strand; PAM type: NNGRRT; PAM sequence: CAGAAT
  source 1..20: mol_type = other DNA
tccattatttgtatatactc

SEQ ID NO: 5955 - DNA, 20 bp, synthetic construct
  misc_feature 1..20: note = Description of Artificial Sequence: Synthetic oligonucleotide
  misc_feature 1..20: note = Target: ANGPTL3; (+) strand; PAM type: NNGRRT; PAM sequence: TAGAAT
  source 1..20: mol_type = other DNA
tttgtatatactccagaata

SEQ ID NO: 5956 - DNA, 20 bp, synthetic construct
  misc_feature 1..20: note = Description of Artificial Sequence: Synthetic oligonucleotide
  misc_feature 1..20: note = Target: ANGPTL3; (+) strand; PAM type: NNGRRT; PAM sequence: TTGAAT
  source 1..20: mol_type = other DNA
gcacacagtaggcatttctg

SEQ ID NO: 5957 - DNA, 20 bp, synthetic construct
  misc_feature 1..20: note = Description of Artificial Sequence: Synthetic oligonucleotide
  misc_feature 1..20: note = Target: ANGPTL3; (+) strand; PAM type: NNGRRT; PAM sequence: TTGGAT
  source 1..20: mol_type = other DNA
tgtgctatgattattattac

SEQ ID NO: 5958 - DNA, 20 bp, synthetic construct
  misc_feature 1..20: note = Description of Artificial Sequence: Synthetic oligonucleotide
  misc_feature 1..20: note = Target: ANGPTL3; (+) strand; PAM type: NNGRRT; PAM sequence: CAGAAT
  source 1..20: mol_type = other DNA
tgtttagaaaaaagctatgt

SEQ ID NO: 5959 - DNA, 20 bp, synthetic construct
  misc_feature 1..20: note = Description of Artificial Sequence: Synthetic oligonucleotide
  misc_feature 1..20: note = Target: ANGPTL3; (+) strand; PAM type: NNGRRT; PAM sequence: GAGGAT
  source 1..20: mol_type = other DNA
actctcaaacagctattcaa

SEQ ID NO: 5960 - DNA, 20 bp, synthetic construct
  misc_feature 1..20: note = Description of Artificial Sequence: Synthetic oligonucleotide
  misc_feature 1..20: note = Target: ANGPTL3; (+) strand; PAM type: NNGRRT; PAM sequence: ATGAAT
  source 1..20: mol_type = other DNA
tgtgtgaagaaaccaaaaca

SEQ ID NO: 5961 - DNA, 20 bp, synthetic construct
  misc_feature 1..20: note = Description of Artificial Sequence: Synthetic oligonucleotide
  misc_feature 1..20: note = Target: ANGPTL3; (+) strand; PAM type: NNGRRT; PAM sequence: CTGAGT
  source 1..20: mol_type = other DNA
gaaaccaaaacaatgaattt

SEQ ID NO: 5962 - DNA, 20 bp, synthetic construct
  misc_feature 1..20: note = Description of Artificial Sequence: Synthetic oligonucleotide
  misc_feature 1..20: note = Target: ANGPTL3; (+) strand; PAM type: NNGRRT; PAM sequence: AAGAGT
  source 1..20: mol_type = other DNA
atgaatttctgagttggaag

SEQ ID NO: 5963 - DNA, 20 bp, synthetic construct
  misc_feature 1..20: note = Description of Artificial Sequence: Synthetic oligonucleotide
  misc_feature 1..20: note = Target: ANGPTL3; (+) strand; PAM type: NNGRRT; PAM sequence: AAGAGT
  source 1..20: mol_type = other DNA
cacatagttacttagtagaa

SEQ ID NO: 5964 - DNA, 20 bp, synthetic construct
  misc_feature 1..20: note = Description of Artificial Sequence: Synthetic oligonucleotide
  misc_feature 1..20: note = Target: ANGPTL3; (+) strand; PAM type: NNGRRT; PAM sequence: CTGAAT
  source 1..20: mol_type = other DNA
gctaaactaacgataaacta

SEQ ID NO: 5965 - DNA, 20 bp, synthetic construct
  misc_feature 1..20: note = Description of Artificial Sequence: Synthetic oligonucleotide
  misc_feature 1..20: note = Target: ANGPTL3; (+) strand; PAM type: NNGRRT; PAM sequence: CAGAAT
  source 1..20: mol_type = other DNA
tattaaacttaaaatctgaa

SEQ ID NO: 5966 - DNA, 20 bp, synthetic construct
  misc_feature 1..20: note = Description of Artificial Sequence: Synthetic oligonucleotide
  misc_feature 1..20: note = Target: ANGPTL3; (+) strand; PAM type: NNGRRT; PAM sequence: AAGAAT
  source 1..20: mol_type = other DNA
tattttattcatataaataa

SEQ ID NO: 5967 - DNA, 20 bp, synthetic construct
  misc_feature 1..20: note = Description of Artificial Sequence: Synthetic oligonucleotide
  misc_feature 1..20: note = Target: ANGPTL3; (+) strand; PAM type: NNGRRT; PAM sequence: CTGAAT
  source 1..20: mol_type = other DNA
gaacaggtaatctgtacaat

SEQ ID NO: 5968 - DNA, 20 bp, synthetic construct
  misc_feature 1..20: note = Description of Artificial Sequence: Synthetic oligonucleotide
  misc_feature 1..20: note = Target: ANGPTL3; (+) strand; PAM type: NNGRRT; PAM sequence: TTGAAT
  source 1..20: mol_type = other DNA
gaactactccctttcttcag

SEQ ID NO: 5969 - DNA, 20 bp, synthetic construct
  misc_feature 1..20: note = Description of Artificial Sequence: Synthetic oligonucleotide
  misc_feature 1..20: note = Target: ANGPTL3; (+) strand; PAM type: NNGRRT; PAM sequence: GTGGGT
  source 1..20: mol_type = other DNA
catgatggtaagacactttg

SEQ ID NO: 5970 - DNA, 20 bp, synthetic construct
  misc_feature 1..20: note = Description of Artificial Sequence: Synthetic oligonucleotide
  misc_feature 1..20: note = Target: ANGPTL3; (+) strand; PAM type: NNGRRT; PAM sequence: CTGGAT
  source 1..20: mol_type = other DNA
atacaatgtatcaacctaaa

SEQ ID NO: 5971 - DNA, 20 bp, synthetic construct
  misc_feature 1..20: note = Description of Artificial Sequence: Synthetic oligonucleotide
  misc_feature 1..20: note = Target: ANGPTL3; (+) strand; PAM type: NNGRRT; PAM sequence: TGGGGT
  source 1..20: mol_type = other DNA
tatcaacctaaactggatgc

SEQ ID NO: 5972 - DNA, 20 bp, synthetic construct
  misc_feature 1..20: note = Description of Artificial Sequence: Synthetic oligonucleotide
  misc_feature 1..20: note = Target: ANGPTL3; (+) strand; PAM type: NNGRRT; PAM sequence: CGGAGT
  source 1..20: mol_type = other DNA
gatacatgctgaaatattta

SEQ ID NO: 5973 - DNA, 20 bp, synthetic construct
  misc_feature 1..20: note = Description of Artificial Sequence: Synthetic oligonucleotide
  misc_feature 1..20: note = Target: ANGPTL3; (+) strand; PAM type: NNGRRT; PAM sequence: CTGAAT
  source 1..20: mol_type = other DNA
attgattctaggcattcctg

SEQ ID NO: 5974 - DNA, 20 bp, synthetic construct
  misc_feature 1..20: note = Description of Artificial Sequence: Synthetic oligonucleotide
  misc_feature 1..20: note = Target: ANGPTL3; (+) strand; PAM type: NNGRRT; PAM sequence: GAGAAT
  source 1..20: mol_type = other DNA
tcaggtaaaacctgtctaag

SEQ ID NO: 5975 - DNA, 20 bp, synthetic construct
  misc_feature 1..20: note = Description of Artificial Sequence: Synthetic oligonucleotide
  misc_feature 1..20: note = Target: ANGPTL3; (+) strand; PAM type: NNGRRT; PAM sequence: ATGAGT
  source 1..20: mol_type = other DNA
catatatatatgaaatatat

SEQ ID NO: 5976 - DNA, 20 bp, synthetic construct
  misc_feature 1..20: note = Description of Artificial Sequence: Synthetic oligonucleotide
  misc_feature 1..20: note = Target: ANGPTL3; (+) strand; PAM type: NNGRRT; PAM sequence: TCGAAT
  source 1..20: mol_type = other DNA
ccatggacattaattcaaca

SEQ ID NO: 5977 - DNA, 20 bp, synthetic construct
  misc_feature 1..20: note = Description of Artificial Sequence: Synthetic oligonucleotide
  misc_feature 1..20: note = Target: ANGPTL3; (+) strand; PAM type: NNGRRT; PAM sequence: ATGGAT
  source 1..20: mol_type = other DNA
attaattcaacatcgaatag

SEQ ID NO: 5978 - DNA, 20 bp, synthetic construct
  misc_feature 1..20: note = Description of Artificial Sequence: Synthetic oligonucleotide
  misc_feature 1..20: note = Target: ANGPTL3; (+) strand; PAM type: NNGRRT; PAM sequence: TTGAAT
  source 1..20: mol_type = other DNA
cttattacaactgttattat

SEQ ID NO: 5979 - DNA, 20 bp, synthetic construct
  misc_feature 1..20: note = Description of Artificial Sequence: Synthetic oligonucleotide
  misc_feature 1..20: note = Target: ANGPTL3; (+) strand; PAM type: NNGRRT; PAM sequence: TAGAAT
  source 1..20: mol_type = other DNA
aattatttaaatataatata

SEQ ID NO: 5980 - DNA, 20 bp, synthetic construct
  misc_feature 1..20: note = Description of Artificial Sequence: Synthetic oligonucleotide
  misc_feature 1..20: note = Target: ANGPTL3; (+) strand; PAM type: NNGRRT; PAM sequence: ATGAAT
  source 1..20: mol_type = other DNA
tatagaatgtatggcttata

SEQ ID NO: 5981 - DNA, 20 bp, synthetic construct
  misc_feature 1..20: note = Description of Artificial Sequence: Synthetic oligonucleotide
  misc_feature 1..20: note = Target: ANGPTL3; (+) strand; PAM type: NNGRRT; PAM sequence: ATGAAT
  source 1..20: mol_type = other DNA
aaaagcacatacaaaaatcc

SEQ ID NO: 5982 - DNA, 20 bp, synthetic construct
  misc_feature 1..20: note = Description of Artificial Sequence: Synthetic oligonucleotide
  misc_feature 1..20: note = Target: ANGPTL3; (+) strand; PAM type: NNGRRT; PAM sequence: GTGAGT
  source 1..20: mol_type = other DNA
tagctccaaatcttctaata

SEQ ID NO: 5983 - DNA, 20 bp, synthetic construct
  misc_feature 1..20: note = Description of Artificial Sequence: Synthetic oligonucleotide
  misc_feature 1..20: note = Target: ANGPTL3; (+) strand; PAM type: NNGRRT; PAM sequence: GAGAAT
  source 1..20: mol_type = other DNA
aaaaggctgacaggtaagtc

SEQ ID NO: 5984 - DNA, 20 bp, synthetic construct
  misc_feature 1..20: note = Description of Artificial Sequence: Synthetic oligonucleotide
  misc_feature 1..20: note = Target: ANGPTL3; (+) strand; PAM type: NNGRRT; PAM sequence: GTGAAT
  source 1..20: mol_type = other DNA
tcaatagcaataagacaata

SEQ ID NO: 5985 - DNA, 20 bp, synthetic construct
  misc_feature 1..20: note = Description of Artificial Sequence: Synthetic oligonucleotide
  misc_feature 1..20: note = Target: ANGPTL3; (+) strand; PAM type: NNGRRT; PAM sequence: AAGGAT
  source 1..20: mol_type = other DNA
tttataaatactttaataaa

SEQ ID NO: 5986 - DNA, 20 bp, synthetic construct
  misc_feature 1..20: note = Description of Artificial Sequence: Synthetic oligonucleotide
  misc_feature 1..20: note = Target: ANGPTL3; (+) strand; PAM type: NNGRRT; PAM sequence: AGGAAT
  source 1..20: mol_type = other DNA
ttattattactcaagtctct

SEQ ID NO: 5987 - DNA, 20 bp, synthetic construct
  misc_feature 1..20: note = Description of Artificial Sequence: Synthetic oligonucleotide
  misc_feature 1..20: note = Target: ANGPTL3; (+) strand; PAM type: NNGRRT; PAM sequence: ATGGAT
  source 1..20: mol_type = other DNA
aacacatctcttgactgtat

SEQ ID NO: 5988 - DNA, 20 bp, synthetic construct
  misc_feature 1..20: note = Description of Artificial Sequence: Synthetic oligonucleotide
  misc_feature 1..20: note = Target: ANGPTL3; (+) strand; PAM type: NNGRRT; PAM sequence: AAGGAT
  source 1..20: mol_type = other DNA
cttgtcatatgcattataga

SEQ ID NO: 5989 - DNA, 20 bp, synthetic construct
  misc_feature 1..20: note = Description of Artificial Sequence: Synthetic oligonucleotide
  misc_feature 1..20: note = Target: ANGPTL3; (+) strand; PAM type: NNGRRT; PAM sequence: AGGGAT
  source 1..20: mol_type = other DNA
aagatacactaaaatgatca

SEQ ID NO: 5990 - DNA, 20 bp, synthetic construct
  misc_feature 1..20: note = Description of Artificial Sequence: Synthetic oligonucleotide
  misc_feature 1..20: note = Target: ANGPTL3; (+) strand; PAM type: NNGRRT; PAM sequence: GAGAAT
  source 1..20: mol_type = other DNA
tttaaaacttttcttttcag

SEQ ID NO: 5991 - DNA, 20 bp, synthetic construct
  misc_feature 1..20: note = Description of Artificial Sequence: Synthetic oligonucleotide
  misc_feature 1..20: note = Target: ANGPTL3; (+) strand; PAM type: NNGRRT; PAM sequence: ACGAAT
  source 1..20: mol_type = other DNA
aagcaatctaattatgtttt

SEQ ID NO: 5992 - DNA, 20 bp, synthetic construct
  misc_feature 1..20: note = Description of Artificial Sequence: Synthetic oligonucleotide
  misc_feature 1..20: note = Target: ANGPTL3; (+) strand; PAM type: NNGRRT; PAM sequence: TTGAGT
  source 1..20: mol_type = other DNA
atctaattatgttttacgaa

SEQ ID NO: 5993 - DNA, 20 bp, synthetic construct
  misc_feature 1..20: note = Description of Artificial Sequence: Synthetic oligonucleotide
  misc_feature 1..20: note = Target: ANGPTL3; (+) strand; PAM type: NNGRRT; PAM sequence: TTGAAT
  source 1..20: mol_type = other DNA
gaaagacaacaaacattata

SEQ ID NO: 5994 - DNA, 20 bp, synthetic construct
  misc_feature 1..20: note = Description of Artificial Sequence: Synthetic oligonucleotide
  misc_feature 1..20: note = Target: ANGPTL3; (+) strand; PAM type: NNGRRT; PAM sequence: TGGGAT
  source 1..20: mol_type = other DNA
aagatttggtgttttctact

SEQ ID NO: 5995 - DNA, 20 bp, synthetic construct
  misc_feature 1..20: note = Description of Artificial Sequence: Synthetic oligonucleotide
  misc_feature 1..20: note = Target: ANGPTL3; (+) strand; PAM type: NNGRRT; PAM sequence: GAGGGT
  source 1..20: mol_type = other DNA
aaggacacttcaactgtcca

SEQ ID NO: 5996 - DNA, 20 bp, synthetic construct
  misc_feature 1..20: note = Description of Artificial Sequence: Synthetic oligonucleotide
  misc_feature 1..20: note = Target: ANGPTL3; (+) strand; PAM type: NNGRRT; PAM sequence: CCGAAT
  source 1..20: mol_type = other DNA
caatgacaacttttaaaaat

SEQ ID NO: 5997 - DNA, 20 bp, synthetic construct
  misc_feature 1..20: note = Description of Artificial Sequence: Synthetic oligonucleotide
  misc_feature 1..20: note = Target: ANGPTL3; (+) strand; PAM type: NNGRRT; PAM sequence: TGGGAT
  source 1..20: mol_type = other DNA
ttatacagattatttaaaac

SEQ ID NO: 5998 - DNA, 20 bp, synthetic construct
  misc_feature 1..20: note = Description of Artificial Sequence: Synthetic oligonucleotide
  misc_feature 1..20: note = Target: ANGPTL3; (+) strand; PAM type: NNGRRT; PAM sequence: ACGAGT
  source 1..20: mol_type = other DNA
tacagtaacagtaactacat

SEQ ID NO: 5999 - DNA, 20 bp, synthetic construct
  misc_feature 1..20: note = Description of Artificial Sequence: Synthetic oligonucleotide
  misc_feature 1..20: note = Target: ANGPTL3; (+) strand; PAM type: NNGRRT; PAM sequence: ATGAGT
  source 1..20: mol_type = other DNA
aggaggctggtggtggcatg

SEQ ID NO: 6000 - DNA, 20 bp, synthetic construct
  misc_feature 1..20: note = Description of Artificial Sequence: Synthetic oligonucleotide
  misc_feature 1..20: note = Target: ANGPTL3; (+) strand; PAM type: NNGRRT; PAM sequence: GAGGAT
  source 1..20: mol_type = other DNA
atctaagccagagaggagaa

SEQ ID NO: 6001 - DNA, 20 bp, synthetic construct
  misc_feature 1..20: note = Description of Artificial Sequence: Synthetic oligonucleotide
  misc_feature 1..20: note = Target: ANGPTL3; (+) strand; PAM type: NNGRRT; PAM sequence: TTGAAT
  source 1..20: mol_type = other DNA
tccaacagattcagaaagct

SEQ ID NO: 6002 - DNA, 20 bp, synthetic construct
  misc_feature 1..20: note = Description of Artificial Sequence: Synthetic oligonucleotide
  misc_feature 1..20: note = Target: ANGPTL3; (+) strand; PAM type: NNGRRT; PAM sequence: AAGAAT
  source 1..20: mol_type = other DNA
catacaatcacataacctta

SEQ ID NO: 6003 - DNA, 20 bp, synthetic construct
  misc_feature 1..20: note = Description of Artificial Sequence: Synthetic oligonucleotide
  misc_feature 1..20: note = Target: ANGPTL3; (+) strand; PAM type: NNGRRT; PAM sequence: GGGAAT
  source 1..20: mol_type = other DNA
tgttttaaattttgtgatgt

SEQ ID NO: 6004 - DNA, 20 bp, synthetic construct
  misc_feature 1..20: note = Description of Artificial Sequence: Synthetic oligonucleotide
  misc_feature 1..20: note = Target: ANGPTL3; (+) strand; PAM type: NNGRRT; PAM sequence: CAGAGT
  source 1..20: mol_type = other DNA
aaaactaaaaatcgtcagca

SEQ ID NO: 6005 - DNA, 20 bp, synthetic construct
  misc_feature 1..20: note = Description of Artificial Sequence: Synthetic oligonucleotide
  misc_feature 1..20: note = Target: ANGPTL3; (+) strand; PAM type: NNGRRT; PAM sequence: TGGAGT
  source 1..20: mol_type = other DNA
cattttgctacaaaataatt

SEQ ID NO: 6006 - DNA, 20 bp, synthetic construct
  misc_feature 1..20: note = Description of Artificial Sequence: Synthetic oligonucleotide
  misc_feature 1..20: note = Target: ANGPTL3; (+) strand; PAM type: NNGRRT; PAM sequence: CAGAAT
  source 1..20: mol_type = other DNA
atttatgaaacctaatgaag

SEQ ID NO: 6007 - DNA, 20 bp, synthetic construct
  misc_feature 1..20: note = Description of Artificial Sequence: Synthetic oligonucleotide
  misc_feature 1..20: note = Target: ANGPTL3; (+) strand; PAM type: NNGRRT; PAM sequence: AGGAAT
  source 1..20: mol_type = other DNA
atgaaaacaaataattgtaa

SEQ ID NO: 6008 - DNA, 20 bp, synthetic construct
  misc_feature 1..20: note = Description of Artificial Sequence: Synthetic oligonucleotide
  misc_feature 1..20: note = Target: ANGPTL3; (+) strand; PAM type: NNGRRT; PAM sequence: AAGAAT
  source 1..20: mol_type = other DNA
gaatcttgtcagattacagt

SEQ ID NO: 6009 - DNA, 20 bp, synthetic construct
  misc_feature 1..20: note = Description of Artificial Sequence: Synthetic oligonucleotide
  misc_feature 1..20: note = Target: ANGPTL3; (+) strand; PAM type: NNGRRT; PAM sequence: TCGAGT
  source 1..20: mol_type = other DNA
gaatgaacatatttgtggca

SEQ ID NO: 6010 - DNA, 20 bp, synthetic construct
  misc_feature 1..20: note = Description of Artificial Sequence: Synthetic oligonucleotide
  misc_feature 1..20: note = Target: ANGPTL3; (+) strand; PAM type: NNGRRT; PAM sequence: CAGAAT
  source 1..20: mol_type = other DNA
tttaccacagtatcacttgt

SEQ ID NO: 6011 - DNA, 20 bp, synthetic construct
  misc_feature 1..20: note = Description of Artificial Sequence: Synthetic oligonucleotide
  misc_feature 1..20: note = Target: ANGPTL3; (+) strand; PAM type: NNGRRT; PAM sequence: AAGGAT
  source 1..20: mol_type = other DNA
taaattaaacccatttgtta

SEQ ID NO: 6012 - DNA, 20 bp, synthetic construct
  misc_feature 1..20: note = Description of Artificial Sequence: Synthetic oligonucleotide
  misc_feature 1..20: note = Target: ANGPTL3; (+) strand; PAM type: NNGRRT; PAM sequence: GTGAAT
  source 1..20: mol_type = other DNA
aaaagatatgtatgatctat

SEQ ID NO: 6013 - DNA, 20 bp, synthetic construct
  misc_feature 1..20: note = Description of Artificial Sequence: Synthetic oligonucleotide
  misc_feature 1..20: note = Target: ANGPTL3; (+) strand; PAM type: NNGRRT; PAM sequence: CAGAAT
  source 1..20: mol_type = other DNA
aacgctgatttttttagggc

SEQ ID NO: 6014 - DNA, 20 bp, synthetic construct
  misc_feature 1..20: note = Description of Artificial Sequence: Synthetic oligonucleotide
  misc_feature 1..20: note = Target: ANGPTL3; (+) strand; PAM type: NNGRRT; PAM sequence: ATGAGT
  source 1..20: mol_type = other DNA
aataattcattatttaatat

SEQ ID NO: 6015 - DNA, 20 bp, synthetic construct
  misc_feature 1..20: note = Description of Artificial Sequence: Synthetic oligonucleotide
  misc_feature 1..20: note = Target: ANGPTL3; (+) strand; PAM type: NNGRRT; PAM sequence: AGGAGT
  source 1..20: mol_type = other DNA
tgtttcattttgttcctttc

SEQ ID NO: 6016 - DNA, 20 bp, synthetic construct
  misc_feature 1..20: note = Description of Artificial Sequence: Synthetic oligonucleotide
  misc_feature 1..20: note = Target: ANGPTL3; (+) strand; PAM type: NNGRRT; PAM sequence: AAGAAT
  source 1..20: mol_type = other DNA
tctctctactacttaataat

SEQ ID NO: 6017 - DNA, 20 bp, synthetic construct
  misc_feature 1..20: note = Description of Artificial Sequence: Synthetic oligonucleotide
  misc_feature 1..20: note = Target: ANGPTL3; (+) strand; PAM type: NNGRRT; PAM sequence: ATGGAT
  source 1..20: mol_type = other DNA
ttcacaatactatactctcc

SEQ ID NO: 6018 - DNA, 20 bp, synthetic construct
  misc_feature 1..20: note = Description of Artificial Sequence: Synthetic oligonucleotide
  misc_feature 1..20: note = Target: ANGPTL3; (+) strand; PAM type: NNGRRT; PAM sequence: CTGAAT
  source 1..20: mol_type = other DNA
ctccatggattatcccttat

SEQ ID NO: 6019 - DNA, 20 bp, synthetic construct
  misc_feature 1..20: note = Description of Artificial Sequence: Synthetic oligonucleotide
  misc_feature 1..20: note = Target: ANGPTL3; (+) strand; PAM type: NNGRRT; PAM sequence: ATGAAT
  source 1..20: mol_type = other DNA
cacggactcctttatttacc

SEQ ID NO: 6020 - DNA, 20 bp, synthetic construct
  misc_feature 1..20: note = Description of Artificial Sequence: Synthetic oligonucleotide
  misc_feature 1..20: note = Target: ANGPTL3; (+) strand; PAM type: NNGRRT; PAM sequence: GTGGAT
  source 1..20: mol_type = other DNA
actttgggaggctgaggcag

SEQ ID NO: 6021 - DNA, 20 bp, synthetic construct
  misc_feature 1..20: note = Description of Artificial Sequence: Synthetic oligonucleotide
  misc_feature 1..20: note = Target: ANGPTL3; (+) strand; PAM type: NNGRRT; PAM sequence: AGGAGT
  source 1..20: mol_type = other DNA
caggtggatcacctgaggtc

SEQ ID NO: 6022 - DNA, 20 bp, synthetic construct
  misc_feature 1..20: note = Description of Artificial Sequence: Synthetic oligonucleotide
  misc_feature 1..20: note = Target: ANGPTL3; (+) strand; PAM type: NNGRRT; PAM sequence: GAGAAT
  source 1..20: mol_type = other DNA
tactcaagaggctgagacag

SEQ ID NO: 6023 - DNA, 20 bp, synthetic construct
  misc_feature 1..20: note = Description of Artificial Sequence: Synthetic oligonucleotide
  misc_feature 1..20: note = Target: ANGPTL3; (+) strand; PAM type: NNGRRT; PAM sequence: CTGGGT
  source 1..20: mol_type = other DNA
gctgagatcacaccaatgca

SEQ ID NO: 6024 - DNA, 20 bp, synthetic construct
  misc_feature 1..20: note = Description of Artificial Sequence: Synthetic oligonucleotide
  misc_feature 1..20: note = Target: ANGPTL3; (+) strand; PAM type: NNGRRT; PAM sequence: AGGAAT
  source 1..20: mol_type = other DNA
tccctgtcaatcttccgaaa

SEQ ID NO: 6025 - DNA, 20 bp, synthetic construct
  misc_feature 1..20: note = Description of Artificial Sequence: Synthetic oligonucleotide
  misc_feature 1..20: note = Target: ANGPTL3; (+) strand; PAM type: NNGRRT; PAM sequence: GAGGAT
  source 1..20: mol_type = other DNA
actgaagaagtgtaacagca

SEQ ID NO: 6026 - DNA, 20 bp, synthetic construct
  misc_feature 1..20: note = Description of Artificial Sequence: Synthetic oligonucleotide
  misc_feature 1..20: note = Target: ANGPTL3; (+) strand; PAM type: NNGRRT; PAM sequence: TGGAGT
  source 1..20: mol_type = other DNA
aaacaaatccttttattgtc

SEQ ID NO: 6027 - DNA, 20 bp, synthetic construct
  misc_feature 1..20: note = Description of Artificial Sequence: Synthetic oligonucleotide
  misc_feature 1..20: note = Target: ANGPTL3; (+) strand; PAM type: NNGRRT; PAM sequence: CAGGAT
  source 1..20: mol_type = other DNA
ccttttattgtctggagtta

SEQ ID NO: 6028 - DNA, 20 bp, synthetic construct
  misc_feature 1..20: note = Description of Artificial Sequence: Synthetic oligonucleotide
  misc_feature 1..20: note = Target: ANGPTL3; (+) strand; PAM type: NNGRRT; PAM sequence: CAGAAT
  source 1..20: mol_type = other DNA
ctatatgcacaaatttcttt

SEQ ID NO: 6029 - DNA, 20 bp, synthetic construct
  misc_feature 1..20: note = Description of Artificial Sequence: Synthetic oligonucleotide
  misc_feature 1..20: note = Target: ANGPTL3; (+) strand; PAM type: NNGRRT; PAM sequence: TGGGAT
  source 1..20: mol_type = other DNA
aatttctttcagaatcttat

SEQ ID NO: 6030 - DNA, 20 bp, synthetic construct
  misc_feature 1..20: note = Description of Artificial Sequence: Synthetic oligonucleotide
  misc_feature 1..20: note = Target: ANGPTL3; (+) strand; PAM type: NNGRRT; PAM sequence: TAGAAT
  source 1..20: mol_type = other DNA
tgggatcttagcttaaatct

SEQ ID NO: 6031 - DNA, 20 bp, synthetic construct
  misc_feature 1..20: note = Description of Artificial Sequence: Synthetic oligonucleotide
  misc_feature 1..20: note = Target: ANGPTL3; (+) strand; PAM type: NNGRRT; PAM sequence: ATGAAT
  source 1..20: mol_type = other DNA
attttactttaaaattgcat

SEQ ID NO: 6032 - DNA, 20 bp, synthetic construct
  misc_feature 1..20: note = Description of Artificial Sequence: Synthetic oligonucleotide
  misc_feature 1..20: note = Target: ANGPTL3; (+) strand; PAM type: NNGRRT; PAM sequence: GGGAGT
  source 1..20: mol_type = other DNA
gtattttgggaggccggggc

SEQ ID NO: 6033 - DNA, 20 bp, synthetic construct
  misc_feature 1..20: note = Description of Artificial Sequence: Synthetic oligonucleotide
  misc_feature 1..20: note = Target: ANGPTL3; (+) strand; PAM type: NNGRRT; PAM sequence: AGGAGT
  source 1..20: mol_type = other DNA
cgggagtactgcttgaaccc

SEQ ID NO: 6034 - DNA, 20 bp, synthetic construct
  misc_feature 1..20: note = Description of Artificial Sequence: Synthetic oligonucleotide
  misc_feature 1..20: note = Target: ANGPTL3; (+) strand; PAM type: NNGRRT; PAM sequence: CTGGGT
  source 1..20: mol_type = other DNA
acaaaaaatacaaaaattag

SEQ ID NO: 6035 - DNA, 20 bp, synthetic construct
  misc_feature 1..20: note = Description of Artificial Sequence: Synthetic oligonucleotide
  misc_feature 1..20: note = Target: ANGPTL3; (+) strand; PAM type: NNGRRT; PAM sequence: GAGAAT
  source 1..20: mol_type = other DNA
tacttgggaggctgaggcag

SEQ ID NO: 6036 - DNA, 20 bp, synthetic construct
  misc_feature 1..20: note = Description of Artificial Sequence: Synthetic oligonucleotide
  misc_feature 1..20: note = Target: ANGPTL3; (+) strand; PAM type: NNGRRT; PAM sequence: CAGAGT
  source 1..20: mol_type = other DNA
ctgcattctagcctgggcaa

SEQ ID NO: 6037 - DNA, 20 bp, synthetic construct
  misc_feature 1..20: note = Description of Artificial Sequence: Synthetic oligonucleotide
  misc_feature 1..20: note = Target: ANGPTL3; (+) strand; PAM type: NNGRRT; PAM sequence: AAGAAT
  source 1..20: mol_type = other DNA
ccatatagttgtgccctcac

SEQ ID NO: 6038 - DNA, 20 bp, synthetic construct
  misc_feature 1..20: note = Description of Artificial Sequence: Synthetic oligonucleotide
  misc_feature 1..20: note = Target: ANGPTL3; (+) strand; PAM type: NNGRRT; PAM sequence: AAGAGT
  source 1..20: mol_type = other DNA
agaatgtatactccaattag

SEQ ID NO: 6039 - DNA, 20 bp, synthetic construct
  misc_feature 1..20: note = Description of Artificial Sequence: Synthetic oligonucleotide
  misc_feature 1..20: note = Target: ANGPTL3; (+) strand; PAM type: NNGRRT; PAM sequence: TAGAAT
  source 1..20: mol_type = other DNA
cctaatgtattccatttgtc

SEQ ID NO: 6040 - DNA, 20 bp, synthetic construct
  misc_feature 1..20: note = Description of Artificial Sequence: Synthetic oligonucleotide
  misc_feature 1..20: note = Target: ANGPTL3; (+) strand; PAM type: NNGRRT; PAM sequence: CAGAAT
  source 1..20: mol_type = other DNA
cttgttcatctgaaaccaca

SEQ ID NO: 6041 - DNA, 20 bp, synthetic construct
  misc_feature 1..20: note = Description of Artificial Sequence: Synthetic oligonucleotide
  misc_feature 1..20: note = Target: ANGPTL3; (+) strand; PAM type: NNGRRT; PAM sequence: CAGAAT
  source 1..20: mol_type = other DNA
gcacttagtgagaaaataca

SEQ ID NO: 6042 - DNA, 20 bp, synthetic construct
  misc_feature 1..20: note = Description of Artificial Sequence: Synthetic oligonucleotide
  misc_feature 1..20: note = Target: ANGPTL3; (+) strand; PAM type: NNGRRT; PAM sequence: GTGAAT
  source 1..20: mol_type = other DNA
agtcagtttacctgatttta

SEQ ID NO: 6043 - DNA, 20 bp, synthetic construct
  misc_feature 1..20: note = Description of Artificial Sequence: Synthetic oligonucleotide
  misc_feature 1..20: note = Target: ANGPTL3; (+) strand; PAM type: NNGRRT; PAM sequence: AAGAGT
  source 1..20: mol_type = other DNA
tactgaaaaatttctatatc

SEQ ID NO: 6044 - DNA, 20 bp, synthetic construct
  misc_feature 1..20: note = Description of Artificial Sequence: Synthetic oligonucleotide
  misc_feature 1..20: note = Target: ANGPTL3; (+) strand; PAM type: NNGRRT; PAM sequence: ATGAAT
  source 1..20: mol_type = other DNA
agagtttattttgaaccagt

SEQ ID NO: 6045 - DNA, 20 bp, synthetic construct
  misc_feature 1..20: note = Description of Artificial Sequence: Synthetic oligonucleotide
  misc_feature 1..20: note = Target: ANGPTL3; (+) strand; PAM type: NNGRRT; PAM sequence: TGGAAT
  source 1..20: mol_type = other DNA
ttccatacactctgtcatcc

SEQ ID NO: 6046 - DNA, 20 bp, synthetic construct
  misc_feature 1..20: note = Description of Artificial Sequence: Synthetic oligonucleotide
  misc_feature 1..20: note = Target: ANGPTL3; (+) strand; PAM type: NNGRRT; PAM sequence: TAGGAT
  source 1..20: mol_type = other DNA
atatactctaccttctgctg

SEQ ID NO: 6047 - DNA, 20 bp, synthetic construct
  misc_feature 1..20: note = Description of Artificial Sequence: Synthetic oligonucleotide
  misc_feature 1..20: note = Target: ANGPTL3; (+) strand; PAM type: NNGRRT; PAM sequence: CTGAGT
  source 1..20: mol_type = other DNA
ctgcacttatgtatgtacta

SEQ ID NO: 6048 - DNA, 20 bp, synthetic construct
  misc_feature 1..20: note = Description of Artificial Sequence: Synthetic oligonucleotide
  misc_feature 1..20: note = Target: ANGPTL3; (+) strand; PAM type: NNGRRT; PAM sequence: TAGGGT
  source 1..20: mol_type = other DNA
tattatcatggcaaatcaac

SEQ ID NO: 6049 - DNA, 20 bp, synthetic construct
  misc_feature 1..20: note = Description of Artificial Sequence: Synthetic oligonucleotide
  misc_feature 1..20: note = Target: ANGPTL3; (+) strand; PAM type: NNGRRT; PAM sequence: AAGAAT
  source 1..20: mol_type = other DNA
aggaaatataaaataaactt

SEQ ID NO: 6050 - DNA, 20 bp, synthetic construct
  misc_feature 1..20: note = Description of Artificial Sequence: Synthetic oligonucleotide
  misc_feature 1..20: note = Target: ANGPTL3; (+) strand; PAM type: NNGRRT; PAM sequence: CTGGGT
  source 1..20: mol_type = other DNA
tcatacatctaataaaatga

SEQ ID NO: 6051 - DNA, 20 bp, synthetic construct
  misc_feature 1..20: note = Description of Artificial Sequence: Synthetic oligonucleotide
  misc_feature 1..20: note = Target: ANGPTL3; (+) strand; PAM type: NNGRRT; PAM sequence: GGGAAT
  source 1..20: mol_type = other DNA
agtttccacacccaatagat

SEQ ID NO: 6052 - DNA, 20 bp, synthetic construct
  misc_feature 1..20: note = Description of Artificial Sequence: Synthetic oligonucleotide
  misc_feature 1..20: note = Target: ANGPTL3; (+) strand; PAM type: NNGRRT; PAM sequence: TGGGAT
  source 1..20: mol_type = other DNA
tcaaatctattaatacttca

SEQ ID NO: 6053 - DNA, 20 bp, synthetic construct
  misc_feature 1..20: note = Description of Artificial Sequence: Synthetic oligonucleotide
  misc_feature 1..20: note = Target: ANGPTL3; (+) strand; PAM type: NNGRRT; PAM sequence: TTGAAT
  source 1..20: mol_type = other DNA
catcaagccagataatgtat

SEQ ID NO: 6054 - DNA, 20 bp, synthetic construct
  misc_feature 1..20: note = Description of Artificial Sequence: Synthetic oligonucleotide
  misc_feature 1..20: note = Target: ANGPTL3; (+) strand; PAM type: NNGRRT; PAM sequence: CAGAGT
  source 1..20: mol_type = other DNA
aagaacaaaactgcccttct

SEQ ID NO: 6055 - DNA, 20 bp, synthetic construct
  misc_feature 1..20: note = Description of Artificial Sequence: Synthetic oligonucleotide
  misc_feature 1..20: note = Target: ANGPTL3; (+) strand; PAM type: NNGRRT; PAM sequence: CTGGGT
  source 1..20: mol_type = other DNA
aagcccctaactaaaaactt

SEQ ID NO: 6056 - DNA, 20 bp, synthetic construct
  misc_feature 1..20: note = Description of Artificial Sequence: Synthetic oligonucleotide
  misc_feature 1..20: note = Target: ANGPTL3; (+) strand; PAM type: NNGRRT; PAM sequence: CAGAAT
  source 1..20: mol_type = other DNA
aggaaatagagctcttgact

SEQ ID NO: 6057 - DNA, 20 bp, synthetic construct
  misc_feature 1..20: note = Description of Artificial Sequence: Synthetic oligonucleotide
  misc_feature 1..20: note = Target: ANGPTL3; (+) strand; PAM type: NNGRRT; PAM sequence: TGGAGT
  source 1..20: mol_type = other DNA
aattcttttttttttcgaga

SEQ ID NO: 6058 - DNA, 20 bp, synthetic construct
  misc_feature 1..20: note = Description of Artificial Sequence: Synthetic oligonucleotide
  misc_feature 1..20: note = Target: ANGPTL3; (+) strand; PAM type: NNGRRT; PAM sequence: TGGAGT
  source 1..20: mol_type = other DNA
tctcgctctgtcacccaggc

SEQ ID NO: 6059 - DNA, 20 bp, synthetic construct
  misc_feature 1..20: note = Description of Artificial Sequence: Synthetic oligonucleotide
  misc_feature 1..20: note = Target: ANGPTL3; (+) strand; PAM type: NNGRRT; PAM sequence: CTGAGT
  source 1..20: mol_type = other DNA
cagtggcactgcacagtgag

SEQ ID NO: 6060 - DNA, 20 bp, synthetic construct
  misc_feature 1..20: note = Description of Artificial Sequence: Synthetic oligonucleotide
  misc_feature 1..20: note = Target: ANGPTL3; (+) strand; PAM type: NNGRRT; PAM sequence: CTGGGT
  source 1..20: mol_type = other DNA
ctctctgcaacctccgcctc

SEQ ID NO: 6061 - DNA, 20 bp, synthetic construct
  misc_feature 1..20: note = Description of Artificial Sequence: Synthetic oligonucleotide
  misc_feature 1..20: note = Target: ANGPTL3; (+) strand; PAM type: NNGRRT; PAM sequence: CTGAGT
  source 1..20: mol_type = other DNA
gattctcctgcctcagactc

SEQ ID NO: 6062 - DNA, 20 bp, synthetic construct
  misc_feature 1..20: note = Description of Artificial Sequence: Synthetic oligonucleotide
  misc_feature 1..20: note = Target: ANGPTL3; (+) strand; PAM type: NNGRRT; PAM sequence: TAGGAT
  source 1..20: mol_type = other DNA
gcctcagactcctgagtagc

SEQ ID NO: 6063 - DNA, 20 bp, synthetic construct
  misc_feature 1..20: note = Description of Artificial Sequence: Synthetic oligonucleotide
  misc_feature 1..20: note = Target: ANGPTL3; (+) strand; PAM type: NNGRRT; PAM sequence: CGGAGT
  source 1..20: mol_type = other DNA
ttttgtatttttagtagaga

SEQ ID NO: 6064 - DNA, 20 bp, synthetic construct
  misc_feature 1..20: note = Description of Artificial Sequence: Synthetic oligonucleotide
  misc_feature 1..20: note = Target: ANGPTL3; (+) strand; PAM type: NNGRRT; PAM sequence: TAGAAT
  source 1..20: mol_type = other DNA
ataaactaggaccaattcga

SEQ ID NO: 6065 - DNA, 20 bp, synthetic construct
  misc_feature 1..20: note = Description of Artificial Sequence: Synthetic oligonucleotide
  misc_feature 1..20: note = Target: ANGPTL3; (+) strand; PAM type: NNGRRT; PAM sequence: CAGAGT
  source 1..20: mol_type = other DNA
caattcgatagaataaaact

SEQ ID NO: 6066 - DNA, 20 bp, synthetic construct
  misc_feature 1..20: note = Description of Artificial Sequence: Synthetic oligonucleotide
  misc_feature 1..20: note = Target: ANGPTL3; (+) strand; PAM type: NNGRRT; PAM sequence: CAGAGT
  source 1..20: mol_type = other DNA
caaggacaaaaccaaaatag

SEQ ID NO: 6067 - DNA, 20 bp, synthetic construct
  misc_feature 1..20: note = Description of Artificial Sequence: Synthetic oligonucleotide
  misc_feature 1..20: note = Target: ANGPTL3; (+) strand; PAM type: NNGRRT; PAM sequence: TTGAAT
  source 1..20: mol_type = other DNA
tgaagcagagaaccatacac

SEQ ID NO: 6068 - DNA, 20 bp, synthetic construct
  misc_feature 1..20: note = Description of Artificial Sequence: Synthetic oligonucleotide
  misc_feature 1..20: note = Target: ANGPTL3; (+) strand; PAM type: NNGRRT; PAM sequence: CTGAAT
  source 1..20: mol_type = other DNA
gaatagaaaaaaaaatgctc

SEQ ID NO: 6069 - DNA, 20 bp, synthetic construct
  misc_feature 1..20: note = Description of Artificial Sequence: Synthetic oligonucleotide
  misc_feature 1..20: note = Target: ANGPTL3; (+) strand; PAM type: NNGRRT; PAM sequence: ATGAAT
  source 1..20: mol_type = other DNA
aatttatacttccttaaatt

SEQ ID NO: 6070 - DNA, 20 bp, synthetic construct
  misc_feature 1..20: note = Description of Artificial Sequence: Synthetic oligonucleotide
  misc_feature 1..20: note = Target: ANGPTL3; (+) strand; PAM type: NNGRRT; PAM sequence: TGGGAT
  source 1..20: mol_type = other DNA
tattattatactttaagttc

SEQ ID NO: 6071 - DNA, 20 bp, synthetic construct
  misc_feature 1..20: note = Description of Artificial Sequence: Synthetic oligonucleotide
  misc_feature 1..20: note = Target: ANGPTL3; (+) strand; PAM type: NNGRRT; PAM sequence: ATGAGT
  source 1..20: mol_type = other DNA
tcattgtttagctcccactt

SEQ ID NO: 6072 - DNA, 20 bp, synthetic construct
  misc_feature 1..20: note = Description of Artificial Sequence: Synthetic oligonucleotide
  misc_feature 1..20: note = Target: ANGPTL3; (+) strand; PAM type: NNGRRT; PAM sequence: GAGAAT
  source 1..20: mol_type = other DNA
tgttcctgtgttagtttgct

SEQ ID NO: 6073 - DNA, 20 bp, synthetic construct
  misc_feature 1..20: note = Description of Artificial Sequence: Synthetic oligonucleotide
  misc_feature 1..20: note = Target: ANGPTL3; (+) strand; PAM type: NNGRRT; PAM sequence: TTGGGT
  source 1..20: mol_type = other DNA
agtctatcattgatgggcat

SEQ ID NO: 6074 - DNA, 20 bp, synthetic construct
  misc_feature 1..20: note = Description of Artificial Sequence: Synthetic oligonucleotide
  misc_feature 1..20: note = Target: ANGPTL3; (+) strand; PAM type: NNGRRT; PAM sequence: GTGAAT
  source 1..20: mol_type = other DNA
ggttccaagtctttgttatt

SEQ ID NO: 6075 - DNA, 20 bp, synthetic construct
  misc_feature 1..20: note = Description of Artificial Sequence: Synthetic oligonucleotide
  misc_feature 1..20: note = Target: ANGPTL3; (+) strand; PAM type: NNGRRT; PAM sequence: TAGAAT
  source 1..20: mol_type = other DNA
gtgtgcatgtgtctttatag

SEQ ID NO: 6076 - DNA, 20 bp, synthetic construct
  misc_feature 1..20: note = Description of Artificial Sequence: Synthetic oligonucleotide
  misc_feature 1..20: note = Target: ANGPTL3; (+) strand; PAM type: NNGRRT; PAM sequence: TTGAAT
  source 1..20: mol_type = other DNA
gtagaatgatttataatcct

SEQ ID NO: 6077 - DNA, 20 bp, synthetic construct
  misc_feature 1..20: note = Description of Artificial Sequence: Synthetic oligonucleotide
  misc_feature 1..20: note = Target: ANGPTL3; (+) strand; PAM type: NNGRRT; PAM sequence: TGGGAT
  source 1..20: mol_type = other DNA
tttgaatatatacccaataa

SEQ ID NO: 6078 - DNA, 20 bp, synthetic construct
  misc_feature 1..20: note = Description of Artificial Sequence: Synthetic oligonucleotide
  misc_feature 1..20: note = Target: ANGPTL3; (+) strand; PAM type: NNGRRT; PAM sequence: CTGGGT
  source 1..20: mol_type = other DNA
tatacccaataatgggatta

SEQ ID NO: 6079 - DNA, 20 bp, synthetic construct
  misc_feature 1..20: note = Description of Artificial Sequence: Synthetic oligonucleotide
  misc_feature 1..20: note = Target: ANGPTL3; (+) strand; PAM type: NNGRRT; PAM sequence: AGGAAT
  source 1..20: mol_type = other DNA
tttctagttctagttccttg

SEQ ID NO: 6080 - DNA, 20 bp, synthetic construct
  misc_feature 1..20: note = Description of Artificial Sequence: Synthetic oligonucleotide
  misc_feature 1..20: note = Target: ANGPTL3; (-) strand; PAM type: NNNNGHTT; PAM sequence: CTGCGTTT
  source 1..20: mol_type = other DNA
agtttgtcattttcttcctc

SEQ ID NO: 6081 - DNA, 20 bp, synthetic construct
  misc_feature 1..20: note = Description of Artificial Sequence: Synthetic oligonucleotide
  misc_feature 1..20: note = Target: ANGPTL3; (-) strand; PAM type: NNNNGHTT; PAM sequence: TTCAGTTT
  source 1..20: mol_type = other DNA
tataacaaacaatagatttt

SEQ ID NO: 6082 - DNA, 20 bp, synthetic construct
  misc_feature 1..20: note = Description of Artificial Sequence: Synthetic oligonucleotide
  misc_feature 1..20: note = Target: ANGPTL3; (-) strand; PAM type: NNNNGHTT; PAM sequence: AATAGATT
  source 1..20: mol_type = other DNA
ttgttatatatataacaaac

SEQ ID NO: 6083 - DNA, 20 bp, synthetic construct
  misc_feature 1..20: note = Description of Artificial Sequence: Synthetic oligonucleotide
  misc_feature 1..20: note = Target: ANGPTL3; (-) strand; PAM type: NNNNGHTT; PAM sequence: TTAAGTTT
  source 1..20: mol_type = other DNA
ccctccttgttaccctcttt

SEQ ID NO: 6084 - DNA, 20 bp, synthetic construct
  misc_feature 1..20: note = Description of Artificial Sequence: Synthetic oligonucleotide
  misc_feature 1..20: note = Target: ANGPTL3; (-) strand; PAM type: NNNNGHTT; PAM sequence: GTTTGTTT
  source 1..20: mol_type = other DNA
aatagacaagtatatatcta

SEQ ID NO: 6085 - DNA, 20 bp, synthetic construct
  misc_feature 1..20: note = Description of Artificial Sequence: Synthetic oligonucleotide
  misc_feature 1..20: note = Target: ANGPTL3; (-) strand; PAM type: NNNNGHTT; PAM sequence: TCTAGTTT
  source 1..20: mol_type = other DNA
atctaatagacaagtatata

SEQ ID NO: 6086 - DNA, 20 bp, synthetic construct
  misc_feature 1..20: note = Description of Artificial Sequence: Synthetic oligonucleotide
  misc_feature 1..20: note = Target: ANGPTL3; (-) strand; PAM type: NNNNGHTT; PAM sequence: AAATGCTT
  source 1..20: mol_type = other DNA
cttttcctatatccttttac

SEQ ID NO: 6087 - DNA, 20 bp, synthetic construct
  misc_feature 1..20: note = Description of Artificial Sequence: Synthetic oligonucleotide
  misc_feature 1..20: note = Target: ANGPTL3; (-) strand; PAM type: NNNNGHTT; PAM sequence: GTCAGATT
  source 1..20: mol_type = other DNA
tgtaacttacgattgctttt

SEQ ID NO: 6088 - DNA, 20 bp, synthetic construct
  misc_feature 1..20: note = Description of Artificial Sequence: Synthetic oligonucleotide
  misc_feature 1..20: note = Target: ANGPTL3; (-) strand; PAM type: NNNNGHTT; PAM sequence: GATTGCTT
  source 1..20: mol_type = other DNA
gatgttgacttgtaacttac

SEQ ID NO: 6089 - DNA, 20 bp, synthetic construct
  misc_feature 1..20: note = Description of Artificial Sequence: Synthetic oligonucleotide
  misc_feature 1..20: note = Target: ANGPTL3; (-) strand; PAM type: NNNNGHTT; PAM sequence: TTACGATT
  source 1..20: mol_type = other DNA
catagatgttgacttgtaac

SEQ ID NO: 6090 - DNA, 20 bp, synthetic construct
  misc_feature 1..20: note = Description of Artificial Sequence: Synthetic oligonucleotide
  misc_feature 1..20: note = Target: ANGPTL3; (-) strand; PAM type: NNNNGHTT; PAM sequence: AAATGCTT
  source 1..20: mol_type = other DNA
ttataaacagtatgtataga

SEQ ID NO: 6091 - DNA, 20 bp, synthetic construct
  misc_feature 1..20: note = Description of Artificial Sequence: Synthetic oligonucleotide
  misc_feature 1..20: note = Target: ANGPTL3; (-) strand; PAM type: NNNNGHTT; PAM sequence: ATTTGTTT
  source 1..20: mol_type = other DNA
taatcagcccccttttaatc

SEQ ID NO: 6092 - DNA, 20 bp, synthetic construct
  misc_feature 1..20: note = Description of Artificial Sequence: Synthetic oligonucleotide
  misc_feature 1..20: note = Target: ANGPTL3; (-) strand; PAM type: NNNNGHTT; PAM sequence: CTAAGATT
  source 1..20: mol_type = other DNA
gcgtgagccaccatgcccag

SEQ ID NO: 6093 - DNA, 20 bp, synthetic construct
  misc_feature 1..20: note = Description of Artificial Sequence: Synthetic oligonucleotide
  misc_feature 1..20: note = Target: ANGPTL3; (-) strand; PAM type: NNNNGHTT; PAM sequence: CTGGGATT
  source 1..20: mol_type = other DNA
taccttggcctcccagagtg

SEQ ID NO: 6094 - DNA, 20 bp, synthetic construct
  misc_feature 1..20: note = Description of Artificial Sequence: Synthetic oligonucleotide
  misc_feature 1..20: note = Target: ANGPTL3; (-) strand; PAM type: NNNNGHTT; PAM sequence: CGGGGTTT
  source 1..20: mol_type = other DNA
ttttgtatttttagtagaga

SEQ ID NO: 6095 - DNA, 20 bp, synthetic construct
  misc_feature 1..20: note = Description of Artificial Sequence: Synthetic oligonucleotide
  misc_feature 1..20: note = Target: ANGPTL3; (-) strand; PAM type: NNNNGHTT; PAM sequence: CTCAGCTT
  source 1..20: mol_type = other DNA
ggttcaagcgattctcctgt

SEQ ID NO: 6096 - DNA, 20 bp, synthetic construct
  misc_feature 1..20: note = Description of Artificial Sequence: Synthetic oligonucleotide
  misc_feature 1..20: note = Target: ANGPTL3; (-) strand; PAM type: NNNNGHTT; PAM sequence: AAGCGATT
  source 1..20: mol_type = other DNA
aacttccccctcctgggttc

SEQ ID NO: 6097 - DNA, 20 bp, synthetic construct
  misc_feature 1..20: note = Description of Artificial Sequence: Synthetic oligonucleotide
  misc_feature 1..20: note = Target: ANGPTL3; (-) strand; PAM type: NNNNGHTT; PAM sequence: CGGAGTTT
  source 1..20: mol_type = other DNA
ttctttatttatttttgaga

SEQ ID NO: 6098 - DNA, 20 bp, synthetic construct
  misc_feature 1..20: note = Description of Artificial Sequence: Synthetic oligonucleotide
  misc_feature 1..20: note = Target: ANGPTL3; (-) strand; PAM type: NNNNGHTT; PAM sequence: TAAAGATT
  source 1..20: mol_type = other DNA
cagccgtatctttggacatg

SEQ ID NO: 6099 - DNA, 20 bp, synthetic construct
  misc_feature 1..20: note = Description of Artificial Sequence: Synthetic oligonucleotide
  misc_feature 1..20: note = Target: ANGPTL3; (-) strand; PAM type: NNNNGHTT; PAM sequence: TTAAGTTT
  source 1..20: mol_type = other DNA
gtgtgttcactattaacatg

SEQ ID NO: 6100 - DNA, 20 bp, synthetic construct
  misc_feature 1..20: note = Description of Artificial Sequence: Synthetic oligonucleotide
  misc_feature 1..20: note = Target: ANGPTL3; (-) strand; PAM type: NNNNGHTT; PAM sequence: TACTGTTT
  source 1..20: mol_type = other DNA
aggaataattttatctatct

SEQ ID NO: 6101 - DNA, 20 bp, synthetic construct
  misc_feature 1..20: note = Description of Artificial Sequence: Synthetic oligonucleotide
  misc_feature 1..20: note = Target: ANGPTL3; (-) strand; PAM type: NNNNGHTT; PAM sequence: GTGAGCTT
  source 1..20: mol_type = other DNA
agtgtagatccagaggttaa

SEQ ID NO: 6102 - DNA, 20 bp, synthetic construct
  misc_feature 1..20: note = Description of Artificial Sequence: Synthetic oligonucleotide
  misc_feature 1..20: note = Target: ANGPTL3; (-) strand; PAM type: NNNNGHTT; PAM sequence: GTATGTTT
  source 1..20: mol_type = other DNA
ttgtataggaagatcctatt

SEQ ID NO: 6103 - DNA, 20 bp, synthetic construct
  misc_feature 1..20: note = Description of Artificial Sequence: Synthetic oligonucleotide
  misc_feature 1..20: note = Target: ANGPTL3; (-) strand; PAM type: NNNNGHTT; PAM sequence: GTTTGTTT
  source 1..20: mol_type = other DNA
tttcctttttaactacaata

SEQ ID NO: 6104 - DNA, 20 bp, synthetic construct
  misc_feature 1..20: note = Description of Artificial Sequence: Synthetic oligonucleotide
  misc_feature 1..20: note = Target: ANGPTL3; (-) strand; PAM type: NNNNGHTT; PAM sequence: AATAGTTT
  source 1..20: mol_type = other DNA
attttttcctttttaactac

SEQ ID NO: 6105 - DNA, 20 bp, synthetic construct
  misc_feature 1..20: note = Description of Artificial Sequence: Synthetic oligonucleotide
  misc_feature 1..20: note = Target: ANGPTL3; (-) strand; PAM type: NNNNGHTT; PAM sequence: AATTGTTT
  source 1..20: mol_type = other DNA
ttaggacatttaagagccta

SEQ ID NO: 6106 - DNA, 20 bp, synthetic construct
  misc_feature 1..20: note = Description of Artificial Sequence: Synthetic oligonucleotide
  misc_feature 1..20: note = Target: ANGPTL3; (-) strand; PAM type: NNNNGHTT; PAM sequence: TAAGGATT
  source 1..20: mol_type = other DNA
agcaaatgtagggcctaatt

SEQ ID NO: 6107 - DNA, 20 bp, synthetic construct
  misc_feature 1..20: note = Description of Artificial Sequence: Synthetic oligonucleotide
  misc_feature 1..20: note = Target: ANGPTL3; (-) strand; PAM type: NNNNGHTT; PAM sequence: CTTTGCTT
  source 1..20: mol_type = other DNA
tgctaaaagcagaatctgat

SEQ ID NO: 6108 - DNA, 20 bp, synthetic construct
  misc_feature 1..20: note = Description of Artificial Sequence: Synthetic oligonucleotide
  misc_feature 1..20: note = Target: ANGPTL3; (-) strand; PAM type: NNNNGHTT; PAM sequence: AAAGGATT
  source 1..20: mol_type = other DNA
attgaaagtagtaattttat

SEQ ID NO: 6109 - DNA, 20 bp, synthetic construct
  misc_feature 1..20: note = Description of Artificial Sequence: Synthetic oligonucleotide
  misc_feature 1..20: note = Target: ANGPTL3; (-) strand; PAM type: NNNNGHTT; PAM sequence: TATTGATT
  source 1..20: mol_type = other DNA
tatagtaatttgaacagcat

SEQ ID NO: 6110 - DNA, 20 bp, synthetic construct
  misc_feature 1..20: note = Description of Artificial Sequence: Synthetic oligonucleotide
  misc_feature 1..20: note = Target: ANGPTL3; (-) strand; PAM type: NNNNGHTT; PAM sequence: CTTGGTTT
  source 1..20: mol_type = other DNA
agaggtaatggtcacgtagt

SEQ ID NO: 6111 - DNA, 20 bp, synthetic construct
  misc_feature 1..20: note = Description of Artificial Sequence: Synthetic oligonucleotide
  misc_feature 1..20: note = Target: ANGPTL3; (-) strand; PAM type: NNNNGHTT; PAM sequence: ACAGGCTT
  source 1..20: mol_type = other DNA
actgagcactagtaccaaag

SEQ ID NO: 6112 - DNA, 20 bp, synthetic construct
  misc_feature 1..20: note = Description of Artificial Sequence: Synthetic oligonucleotide
  misc_feature 1..20: note = Target: ANGPTL3; (-) strand; PAM type: NNNNGHTT; PAM sequence: TAGTGTTT
  source 1..20: mol_type = other DNA
agtgcagaatgtatacgtag

SEQ ID NO: 6113 - DNA, 20 bp, synthetic construct
  misc_feature 1..20: note = Description of Artificial Sequence: Synthetic oligonucleotide
  misc_feature 1..20: note = Target: ANGPTL3; (-) strand; PAM type: NNNNGHTT; PAM sequence: TAGGGATT
  source 1..20: mol_type = other DNA
agaatgataaaatcaacata

SEQ ID NO: 6114 - DNA, 20 bp, synthetic construct
  misc_feature 1..20: note = Description of Artificial Sequence: Synthetic oligonucleotide
  misc_feature 1..20: note = Target: ANGPTL3; (-) strand; PAM type: NNNNGHTT; PAM sequence: TAATGCTT
  source 1..20: mol_type = other DNA
tttttaacttatattcctta

SEQ ID NO: 6115 - DNA, 20 bp, synthetic construct
  misc_feature 1..20: note = Description of Artificial Sequence: Synthetic oligonucleotide
  misc_feature 1..20: note = Target: ANGPTL3; (-) strand; PAM type: NNNNGHTT; PAM sequence: ATGTGTTT
  source 1..20: mol_type = other DNA
tgttgattggcaagatttgt

SEQ ID NO: 6116 - DNA, 20 bp, synthetic construct
  misc_feature 1..20: note = Description of Artificial Sequence: Synthetic oligonucleotide
  misc_feature 1..20: note = Target: ANGPTL3; (-) strand; PAM type: NNNNGHTT; PAM sequence: GCAAGATT
  source 1..20: mol_type = other DNA
acactataagctgttgattg

SEQ ID NO: 6117 - DNA, 20 bp, synthetic construct
  misc_feature 1..20: note = Description of Artificial Sequence: Synthetic oligonucleotide
  misc_feature 1..20: note = Target: ANGPTL3; (-) strand; PAM type: NNNNGHTT; PAM sequence: TGTTGATT
  source 1..20: mol_type = other DNA
tcccctattacactataagc

SEQ ID NO: 6118 - DNA, 20 bp, synthetic construct
  misc_feature 1..20: note = Description of Artificial Sequence: Synthetic oligonucleotide
  misc_feature 1..20: note = Target: ANGPTL3; (-) strand; PAM type: NNNNGHTT; PAM sequence: GCCAGCTT
  source 1..20: mol_type = other DNA
ttgagggagaatatagatgg

SEQ ID NO: 6119 - DNA, 20 bp, synthetic construct
  misc_feature 1..20: note = Description of Artificial Sequence: Synthetic oligonucleotide
  misc_feature 1..20: note = Target: ANGPTL3; (-) strand; PAM type: NNNNGHTT; PAM sequence: TGTGGCTT
  source 1..20: mol_type = other DNA
ttaattaagctgtcagcttt

SEQ ID NO: 6120 - DNA, 20 bp, synthetic construct
  misc_feature 1..20: note = Description of Artificial Sequence: Synthetic oligonucleotide
  misc_feature 1..20: note = Target: ANGPTL3; (-) strand; PAM type: NNNNGHTT; PAM sequence: GTCAGCTT
  source 1..20: mol_type = other DNA
aaacttctcttaattaagct

SEQ ID NO: 6121 - DNA, 20 bp, synthetic construct
  misc_feature 1..20: note = Description of Artificial Sequence: Synthetic oligonucleotide
  misc_feature 1..20: note = Target: ANGPTL3; (-) strand; PAM type: NNNNGHTT; PAM sequence: GTATGATT
  source 1..20: mol_type = other DNA
acatcttttgattaggttgt

SEQ ID NO: 6122 - DNA, 20 bp, synthetic construct
  misc_feature 1..20: note = Description of Artificial Sequence: Synthetic oligonucleotide
  misc_feature 1..20: note = Target: ANGPTL3; (-) strand; PAM type: NNNNGHTT; PAM sequence: TTTTGATT
  source 1..20: mol_type = other DNA
cctttttaaagaattacatc

SEQ ID NO: 6123 - DNA, 20 bp, synthetic construct
  misc_feature 1..20: note = Description of Artificial Sequence: Synthetic oligonucleotide
  misc_feature 1..20: note = Target: ANGPTL3; (-) strand; PAM type: NNNNGHTT; PAM sequence: TCTAGATT
  source 1..20: mol_type = other DNA
attgagaaattttgttatag

SEQ ID NO: 6124 - DNA, 20 bp, synthetic construct
  misc_feature 1..20: note = Description of Artificial Sequence: Synthetic oligonucleotide
  misc_feature 1..20: note = Target: ANGPTL3; (-) strand; PAM type: NNNNGHTT; PAM sequence: AAAAGTTT
  source 1..20: mol_type = other DNA
atagggtcgtataaaagatt

SEQ ID NO: 6125 - DNA, 20 bp, synthetic construct
  misc_feature 1..20: note = Description of Artificial Sequence: Synthetic oligonucleotide
  misc_feature 1..20: note = Target: ANGPTL3; (-) strand; PAM type: NNNNGHTT; PAM sequence: AAAAGATT
  source 1..20: mol_type = other DNA
cctattttatagggtcgtat

SEQ ID NO: 6126 - DNA, 20 bp, synthetic construct
  misc_feature 1..20: note = Description of Artificial Sequence: Synthetic oligonucleotide
  misc_feature 1..20: note = Target: ANGPTL3; (-) strand; PAM type: NNNNGHTT; PAM sequence: CCCTGTTT
  source 1..20: mol_type = other DNA
attacttcacatctctgaac

SEQ ID NO: 6127 - DNA, 20 bp, synthetic construct
  misc_feature 1..20: note = Description of Artificial Sequence: Synthetic oligonucleotide
  misc_feature 1..20: note = Target: ANGPTL3; (-) strand; PAM type: NNNNGHTT; PAM sequence: TTCAGCTT
  source 1..20: mol_type = other DNA
gaatcccggatttcatattc

SEQ ID NO: 6128 - DNA, 20 bp, synthetic construct
  misc_feature 1..20: note = Description of Artificial Sequence: Synthetic oligonucleotide
  misc_feature 1..20: note = Target: ANGPTL3; (-) strand; PAM type: NNNNGHTT; PAM sequence: CCCGGATT
  source 1..20: mol_type = other DNA
aagactgcctgaatcagaat

SEQ ID NO: 6129 - DNA, 20 bp, synthetic construct
  misc_feature 1..20: note = Description of Artificial Sequence: Synthetic oligonucleotide
  misc_feature 1..20: note = Target: ANGPTL3; (-) strand; PAM type: NNNNGHTT; PAM sequence: GCATGATT
  source 1..20: mol_type = other DNA
gtattccatagtggttaaga

SEQ ID NO: 6130 - DNA, 20 bp, synthetic construct
  misc_feature 1..20: note = Description of Artificial Sequence: Synthetic oligonucleotide
  misc_feature 1..20: note = Target: ANGPTL3; (-) strand; PAM type: NNNNGHTT; PAM sequence: AAGGGTTT
  source 1..20: mol_type = other DNA
ccttttgatgacttaggatt

SEQ ID NO: 6131 - DNA, 20 bp, synthetic construct
  misc_feature 1..20: note = Description of Artificial Sequence: Synthetic oligonucleotide
  misc_feature 1..20: note = Target: ANGPTL3; (-) strand; PAM type: NNNNGHTT; PAM sequence: TTAGGATT
  source 1..20: mol_type = other DNA
aggctcttccttttgatgac

SEQ ID NO: 6132 - DNA, 20 bp, synthetic construct
  misc_feature 1..20: note = Description of Artificial Sequence: Synthetic oligonucleotide
  misc_feature 1..20: note = Target: ANGPTL3; (-) strand; PAM type: NNNNGHTT; PAM sequence: CTGTGTTT
  source 1..20: mol_type = other DNA
ttttaaatattttgtagaga

SEQ ID NO: 6133 - DNA, 20 bp, synthetic construct
  misc_feature 1..20: note = Description of Artificial Sequence: Synthetic oligonucleotide
  misc_feature 1..20: note = Target: ANGPTL3; (-) strand; PAM type: NNNNGHTT; PAM sequence: AAAAGTTT
  source 1..20: mol_type = other DNA
aatagctttttaacacaggg

SEQ ID NO: 6134 - DNA, 20 bp, synthetic construct
  misc_feature 1..20: note = Description of Artificial Sequence: Synthetic oligonucleotide
  misc_feature 1..20: note = Target: ANGPTL3; (-) strand; PAM type: NNNNGHTT; PAM sequence: AATAGCTT
  source 1..20: mol_type = other DNA
aagaaatttttcataaagtt

SEQ ID NO: 6135 - DNA, 20 bp, synthetic construct
  misc_feature 1..20: note = Description of Artificial Sequence: Synthetic oligonucleotide
  misc_feature 1..20: note = Target: ANGPTL3; (-) strand; PAM type: NNNNGHTT; PAM sequence: CATGGATT
  source 1..20: mol_type = other DNA
gacaagttacttaacctccc

SEQ ID NO: 6136 - DNA, 20 bp, synthetic construct
  misc_feature 1..20: note = Description of Artificial Sequence: Synthetic oligonucleotide
  misc_feature 1..20: note = Target: ANGPTL3; (-) strand; PAM type: NNNNGHTT; PAM sequence: AACTGCTT
  source 1..20: mol_type = other DNA
gagaaaatagcatcctttaa

SEQ ID NO: 6137 - DNA, 20 bp, synthetic construct
  misc_feature 1..20: note = Description of Artificial Sequence: Synthetic oligonucleotide
  misc_feature 1..20: note = Target: ANGPTL3; (-) strand; PAM type: NNNNGHTT; PAM sequence: TAGTGATT
  source 1..20: mol_type = other DNA
aaaatactaaatgcttatat

SEQ ID NO: 6138 - DNA, 20 bp, synthetic construct
  misc_feature 1..20: note = Description of Artificial Sequence: Synthetic oligonucleotide
  misc_feature 1..20: note = Target: ANGPTL3; (-) strand; PAM type: NNNNGHTT; PAM sequence: AAATGCTT
  source 1..20: mol_type = other DNA
cttagtgttaaaaaaatact

SEQ ID NO: 6139 - DNA, 20 bp, synthetic construct
  misc_feature 1..20: note = Description of Artificial Sequence: Synthetic oligonucleotide
  misc_feature 1..20: note = Target: ANGPTL3; (-) strand; PAM type: NNNNGHTT; PAM sequence: CTATGCTT
  source 1..20: mol_type = other DNA
ttctaaaaataaatgttcca

SEQ ID NO: 6140 - DNA, 20 bp, synthetic construct
  misc_feature 1..20: note = Description of Artificial Sequence: Synthetic oligonucleotide
  misc_feature 1..20: note = Target: ANGPTL3; (-) strand; PAM type: NNNNGHTT; PAM sequence: AGCCGATT
  source 1..20: mol_type = other DNA
aaatttacaggcatgagccc

SEQ ID NO: 6141 - DNA, 20 bp, synthetic construct
  misc_feature 1..20: note = Description of Artificial Sequence: Synthetic oligonucleotide
  misc_feature 1..20: note = Target: ANGPTL3; (-) strand; PAM type: NNNNGHTT; PAM sequence: AGGAGATT
  source 1..20: mol_type = other DNA
aatatacatttaacaaaaag

SEQ ID NO: 6142 - DNA, 20 bp, synthetic construct
  misc_feature 1..20: note = Description of Artificial Sequence: Synthetic oligonucleotide
  misc_feature 1..20: note = Target: ANGPTL3; (-) strand; PAM type: NNNNGHTT; PAM sequence: GTTAGCTT
  source 1..20: mol_type = other DNA
cataagtttttctgaagttt

SEQ ID NO: 6143 - DNA, 20 bp, synthetic construct
  misc_feature 1..20: note = Description of Artificial Sequence: Synthetic oligonucleotide
  misc_feature 1..20: note = Target: ANGPTL3; (-) strand; PAM type: NNNNGHTT; PAM sequence: TGAAGTTT
  source 1..20: mol_type = other DNA
ttgcccatcataagtttttc

SEQ ID NO: 6144 - DNA, 20 bp, synthetic construct
  misc_feature 1..20: note = Description of Artificial Sequence: Synthetic oligonucleotide
  misc_feature 1..20: note = Target: ANGPTL3; (-) strand; PAM type: NNNNGHTT; PAM sequence: ATAAGTTT
  source 1..20: mol_type = other DNA
tcacaagcagcttgcccatc

SEQ ID NO: 6145 - DNA, 20 bp, synthetic construct
  misc_feature 1..20: note = Description of Artificial Sequence: Synthetic oligonucleotide
  misc_feature 1..20: note = Target: ANGPTL3; (-) strand; PAM type: NNNNGHTT; PAM sequence: AGCAGCTT
  source 1..20: mol_type = other DNA
taaataccttcaatgtcaca

SEQ ID NO: 6146 - DNA, 20 bp, synthetic construct
  misc_feature 1..20: note = Description of Artificial Sequence: Synthetic oligonucleotide
  misc_feature 1..20: note = Target: ANGPTL3; (-) strand; PAM type: NNNNGHTT; PAM sequence: ATATGTTT
  source 1..20: mol_type = other DNA
ttttgtcactataattgtta

SEQ ID NO: 6147 - DNA, 20 bp, synthetic construct
  misc_feature 1..20: note = Description of Artificial Sequence: Synthetic oligonucleotide
  misc_feature 1..20: note = Target: ANGPTL3; (-) strand; PAM type: NNNNGHTT; PAM sequence: AAGAGATT
  source 1..20: mol_type = other DNA
ttttacttttttatgatttt

SEQ ID NO: 6148 - DNA, 20 bp, synthetic construct
  misc_feature 1..20: note = Description of Artificial Sequence: Synthetic oligonucleotide
  misc_feature 1..20: note = Target: ANGPTL3; (-) strand; PAM type: NNNNGHTT; PAM sequence: TTATGATT
  source 1..20: mol_type = other DNA
taaaagctaattttactttt

SEQ ID NO: 6149 - DNA, 20 bp, synthetic construct
  misc_feature 1..20: note = Description of Artificial Sequence: Synthetic oligonucleotide
  misc_feature 1..20: note = Target: ANGPTL3; (-) strand; PAM type: NNNNGHTT; PAM sequence: ACCTGTTT
  source 1..20: mol_type = other DNA
cattcaatgctatggtgact

SEQ ID NO: 6150 - DNA, 20 bp, synthetic construct
  misc_feature 1..20: note = Description of Artificial Sequence: Synthetic oligonucleotide
  misc_feature 1..20: note = Target: ANGPTL3; (-) strand; PAM type: NNNNGHTT; PAM sequence: AACTGTTT
  source 1..20: mol_type = other DNA
ttcaatttcaagcaacgtgg

SEQ ID NO: 6151 - DNA, 20 bp, synthetic construct
  misc_feature 1..20: note = Description of Artificial Sequence: Synthetic oligonucleotide
  misc_feature 1..20: note = Target: ANGPTL3; (-) strand; PAM type: NNNNGHTT; PAM sequence: TCTTGATT
  source 1..20: mol_type = other DNA
cttaattgtgaacattttta

SEQ ID NO: 6152 - DNA, 20 bp, synthetic construct
  misc_feature 1..20: note = Description of Artificial Sequence: Synthetic oligonucleotide
  misc_feature 1..20: note = Target: ANGPTL3; (-) strand; PAM type: NNNNGHTT; PAM sequence: AGGAGCTT
  source 1..20: mol_type = other DNA
ctagaggaacaataaaaaga

SEQ ID NO: 6153 - DNA, 20 bp, synthetic construct
  misc_feature 1..20: note = Description of Artificial Sequence: Synthetic oligonucleotide
  misc_feature 1..20: note = Target: ANGPTL3; (-) strand; PAM type: NNNNGHTT; PAM sequence: TCTTGATT
  source 1..20: mol_type = other DNA
acatcgtctaacatagcaaa

SEQ ID NO: 6154 - DNA, 20 bp, synthetic construct
  misc_feature 1..20: note = Description of Artificial Sequence: Synthetic oligonucleotide
  misc_feature 1..20: note = Target: ANGPTL3; (-) strand; PAM type: NNNNGHTT; PAM sequence: TTGAGTTT
  source 1..20: mol_type = other DNA
aaaaagactgatcaaatatg

SEQ ID NO: 6155 - DNA, 20 bp, synthetic construct
  misc_feature 1..20: note = Description of Artificial Sequence: Synthetic oligonucleotide
  misc_feature 1..20: note = Target: ANGPTL3; (-) strand; PAM type: NNNNGHTT; PAM sequence: ACTGGTTT
  source 1..20: mol_type = other DNA
ttttcttcttctttgatttc

SEQ ID NO: 6156 - DNA, 20 bp, synthetic construct
  misc_feature 1..20: note = Description of Artificial Sequence: Synthetic oligonucleotide
  misc_feature 1..20: note = Target: ANGPTL3; (-) strand; PAM type: NNNNGHTT; PAM sequence: CTTTGATT
  source 1..20: mol_type = other DNA
tctcagttccttttcttctt

SEQ ID NO: 6157 - DNA, 20 bp, synthetic construct
  misc_feature 1..20: note = Description of Artificial Sequence: Synthetic oligonucleotide
  misc_feature 1..20: note = Target: ANGPTL3; (-) strand; PAM type: NNNNGHTT; PAM sequence: TGTAGTTT
  source 1..20: mol_type = other DNA
ttacctcttcatttttgact

SEQ ID NO: 6158 - DNA, 20 bp, synthetic construct
  misc_feature 1..20: note = Description of Artificial Sequence: Synthetic oligonucleotide
  misc_feature 1..20: note = Target: ANGPTL3; (-) strand; PAM type: NNNNGHTT; PAM sequence: TCAAGTTT
  source 1..20: mol_type = other DNA
ttttttcttctaggaggctt

SEQ ID NO: 6159 - DNA, 20 bp, synthetic construct
  misc_feature 1..20: note = Description of Artificial Sequence: Synthetic oligonucleotide
  misc_feature 1..20: note = Target: ANGPTL3; (-) strand; PAM type: NNNNGHTT; PAM sequence: GGAGGCTT
  source 1..20: mol_type = other DNA
aagtagaattttttcttcta

SEQ ID NO: 6160 - DNA, 20 bp, synthetic construct
  misc_feature 1..20: note = Description of Artificial Sequence: Synthetic oligonucleotide
  misc_feature 1..20: note = Target: ANGPTL3; (-) strand; PAM type: NNNNGHTT; PAM sequence: GGTTGATT
  source 1..20: mol_type = other DNA
ctgggtgttctggagtttca

SEQ ID NO: 6161 - DNA, 20 bp, synthetic construct
  misc_feature 1..20: note = Description of Artificial Sequence: Synthetic oligonucleotide
  misc_feature 1..20: note = Target: ANGPTL3; (-) strand; PAM type: NNNNGHTT; PAM sequence: TGGAGTTT
  source 1..20: mol_type = other DNA
gaagttacttctgggtgttc

SEQ ID NO: 6162 - DNA, 20 bp, synthetic construct
  misc_feature 1..20: note = Description of Artificial Sequence: Synthetic oligonucleotide
  misc_feature 1..20: note = Target: ANGPTL3; (-) strand; PAM type: NNNNGHTT; PAM sequence: TGGAGATT
  source 1..20: mol_type = other DNA
taataggaaattttattttc

SEQ ID NO: 6163 - DNA, 20 bp, synthetic construct
  misc_feature 1..20: note = Description of Artificial Sequence: Synthetic oligonucleotide
  misc_feature 1..20: note = Target: ANGPTL3; (-) strand; PAM type: NNNNGHTT; PAM sequence: CAGTGTTT
  source 1..20: mol_type = other DNA
tcatataaaatgcaaatttt

SEQ ID NO: 6164 - DNA, 20 bp, synthetic construct
  misc_feature 1..20: note = Description of Artificial Sequence: Synthetic oligonucleotide
  misc_feature 1..20: note = Target: ANGPTL3; (-) strand; PAM type: NNNNGHTT; PAM sequence: AACCGATT
  source 1..20: mol_type = other DNA
tgttctagattgtataattt

SEQ ID NO: 6165 - DNA, 20 bp, synthetic construct
  misc_feature 1..20: note = Description of Artificial Sequence: Synthetic oligonucleotide
  misc_feature 1..20: note = Target: ANGPTL3; (-) strand; PAM type: NNNNGHTT; PAM sequence: TCTAGATT
  source 1..20: mol_type = other DNA
atagtgtaatgacatagtgt

SEQ ID NO: 6166 - DNA, 20 bp, synthetic construct
  misc_feature 1..20: note = Description of Artificial Sequence: Synthetic oligonucleotide
  misc_feature 1..20: note = Target: ANGPTL3; (-) strand; PAM type: NNNNGHTT; PAM sequence: AATAGTTT
  source 1..20: mol_type = other DNA
atctgttttaaacactggag

SEQ ID NO: 6167 - DNA, 20 bp, synthetic construct
  misc_feature 1..20: note = Description of Artificial Sequence: Synthetic oligonucleotide
  misc_feature 1..20: note = Target: ANGPTL3; (-) strand; PAM type: NNNNGHTT; PAM sequence: ATCTGTTT
  source 1..20: mol_type = other DNA
tccatttactgtattattta

SEQ ID NO: 6168 - DNA, 20 bp, synthetic construct
  misc_feature 1..20: note = Description of Artificial Sequence: Synthetic oligonucleotide
  misc_feature 1..20: note = Target: ANGPTL3; (-) strand; PAM type: NNNNGHTT; PAM sequence: ATTTGATT
  source 1..20: mol_type = other DNA
taaattgtactatctctaaa

SEQ ID NO: 6169 - DNA, 20 bp, synthetic construct
  misc_feature 1..20: note = Description of Artificial Sequence: Synthetic oligonucleotide
  misc_feature 1..20: note = Target: ANGPTL3; (-) strand; PAM type: NNNNGHTT; PAM sequence: GTATGCTT
  source 1..20: mol_type = other DNA
attggcaattccttcccctt

SEQ ID NO: 6170 - DNA, 20 bp, synthetic construct
  misc_feature 1..20: note = Description of Artificial Sequence: Synthetic oligonucleotide
  misc_feature 1..20: note = Target: ANGPTL3; (-) strand; PAM type: NNNNGHTT; PAM sequence: AATGGATT
  source 1..20: mol_type = other DNA
atctaaatttttaaactaat

SEQ ID NO: 6171 - DNA, 20 bp, synthetic construct
  misc_feature 1..20: note = Description of Artificial Sequence: Synthetic oligonucleotide
  misc_feature 1..20: note = Target: ANGPTL3; (-) strand; PAM type: NNNNGHTT; PAM sequence: AGTTGCTT
  source 1..20: mol_type = other DNA
tagagagtaggttggttata

SEQ ID NO: 6172 - DNA, 20 bp, synthetic construct
  misc_feature 1..20: note = Description of Artificial Sequence: Synthetic oligonucleotide
  misc_feature 1..20: note = Target: ANGPTL3; (-) strand; PAM type: NNNNGHTT; PAM sequence: TCTTGTTT
  source 1..20: mol_type = other DNA
gaaggtctttgatgctatta

SEQ ID NO: 6173 - DNA, 20 bp, synthetic construct
  misc_feature 1..20: note = Description of Artificial Sequence: Synthetic oligonucleotide
  misc_feature 1..20: note = Target: ANGPTL3; (-) strand; PAM type: NNNNGHTT; PAM sequence: AATTGTTT
  source 1..20: mol_type = other DNA
tttgactatgctgttggttt

SEQ ID NO: 6174 - DNA, 20 bp, synthetic construct
  misc_feature 1..20: note = Description of Artificial Sequence: Synthetic oligonucleotide
  misc_feature 1..20: note = Target: ANGPTL3; (-) strand; PAM type: NNNNGHTT; PAM sequence: GTTGGTTT
  source 1..20: mol_type = other DNA
ttcttttatttgactatgct

SEQ ID NO: 6175 - DNA, 20 bp, synthetic construct
  misc_feature 1..20: note = Description of Artificial Sequence: Synthetic oligonucleotide
  misc_feature 1..20: note = Target: ANGPTL3; (-) strand; PAM type: NNNNGHTT; PAM sequence: ACCTGATT
  source 1..20: mol_type = other DNA
taccattaaaatactgactt

SEQ ID NO: 6176 - DNA, 20 bp, synthetic construct
  misc_feature 1..20: note = Description of Artificial Sequence: Synthetic oligonucleotide
  misc_feature 1..20: note = Target: ANGPTL3; (-) strand; PAM type: NNNNGHTT; PAM sequence: CAGTGTTT
  source 1..20: mol_type = other DNA
ttgtaaataattttaggatt

SEQ ID NO: 6177 - DNA, 20 bp, synthetic construct
  misc_feature 1..20: note = Description of Artificial Sequence: Synthetic oligonucleotide
  misc_feature 1..20: note = Target: ANGPTL3; (-) strand; PAM type: NNNNGHTT; PAM sequence: TTAGGATT
  source 1..20: mol_type = other DNA
gttaaagcttgtaaataatt

SEQ ID NO: 6178 - DNA, 20 bp, synthetic construct
  misc_feature 1..20: note = Description of Artificial Sequence: Synthetic oligonucleotide
  misc_feature 1..20: note = Target: ANGPTL3; (-) strand; PAM type: NNNNGHTT; PAM sequence: TAAAGCTT
  source 1..20: mol_type = other DNA
aattttactcatgatccagt

SEQ ID NO: 6179 - DNA, 20 bp, synthetic construct
  misc_feature 1..20: note = Description of Artificial Sequence: Synthetic oligonucleotide
  misc_feature 1..20: note = Target: ANGPTL3; (-) strand; PAM type: NNNNGHTT; PAM sequence: ATTAGCTT
  source 1..20: mol_type = other DNA
ggtttaaatgcaggtagttt

SEQ ID NO: 6180 - DNA, 20 bp, synthetic construct
  misc_feature 1..20: note = Description of Artificial Sequence: Synthetic oligonucleotide
  misc_feature 1..20: note = Target: ANGPTL3; (-) strand; PAM type: NNNNGHTT; PAM sequence: GGTAGTTT
  source 1..20: mol_type = other DNA
agagccatggtttaaatgca

SEQ ID NO: 6181 - DNA, 20 bp, synthetic construct
  misc_feature 1..20: note = Description of Artificial Sequence: Synthetic oligonucleotide
  misc_feature 1..20: note = Target: ANGPTL3; (-) strand; PAM type: NNNNGHTT; PAM sequence: CATGGTTT
  source 1..20: mol_type = other DNA
gtcacacaaagttttagagc

SEQ ID NO: 6182 - DNA, 20 bp, synthetic construct
  misc_feature 1..20: note = Description of Artificial Sequence: Synthetic oligonucleotide
  misc_feature 1..20: note = Target: ANGPTL3; (-) strand; PAM type: NNNNGHTT; PAM sequence: CAAAGTTT
  source 1..20: mol_type = other DNA
gtaatttattcaaggtcaca

SEQ ID NO: 6183 - DNA, 20 bp, synthetic construct
  misc_feature 1..20: note = Description of Artificial Sequence: Synthetic oligonucleotide
  misc_feature 1..20: note = Target: ANGPTL3; (-) strand; PAM type: NNNNGHTT; PAM sequence: TGTGGTTT
  source 1..20: mol_type = other DNA
agtgaaatggaaagctattg

SEQ ID NO: 6184 - DNA, 20 bp, synthetic construct
  misc_feature 1..20: note = Description of Artificial Sequence: Synthetic oligonucleotide
  misc_feature 1..20: note = Target: ANGPTL3; (-) strand; PAM type: NNNNGHTT; PAM sequence: ATGTGTTT
  source 1..20: mol_type = other DNA
ttgaggtggcagtatgtttg

SEQ ID NO: 6185 - DNA, 20 bp, synthetic construct
  misc_feature 1..20: note = Description of Artificial Sequence: Synthetic oligonucleotide
  misc_feature 1..20: note = Target: ANGPTL3; (-) strand; PAM type: NNNNGHTT; PAM sequence: GTATGTTT
  source 1..20: mol_type = other DNA
gcaaaggctttgaggtggca

SEQ ID NO: 6186 - DNA, 20 bp, synthetic construct
  misc_feature 1..20: note = Description of Artificial Sequence: Synthetic oligonucleotide
  misc_feature 1..20: note = Target: ANGPTL3; (-) strand; PAM type: NNNNGHTT; PAM sequence: AAAGGCTT
  source 1..20: mol_type = other DNA
ttagaggaaacaacaagggc

SEQ ID NO: 6187 - DNA, 20 bp, synthetic construct
  misc_feature 1..20: note = Description of Artificial Sequence: Synthetic oligonucleotide
  misc_feature 1..20: note = Target: ANGPTL3; (-) strand; PAM type: NNNNGHTT; PAM sequence: TTTTGTTT
  source 1..20: mol_type = other DNA
gtaagtcttcattgggaatt

SEQ ID NO: 6188 - DNA, 20 bp, synthetic construct
  misc_feature 1..20: note = Description of Artificial Sequence: Synthetic oligonucleotide
  misc_feature 1..20: note = Target: ANGPTL3; (-) strand; PAM type: NNNNGHTT; PAM sequence: TTGTGATT
  source 1..20: mol_type = other DNA
tcagggatgggaccaggcgg

SEQ ID NO: 6189 - DNA, 20 bp, synthetic construct
  misc_feature 1..20: note = Description of Artificial Sequence: Synthetic oligonucleotide
  misc_feature 1..20: note = Target: ANGPTL3; (-) strand; PAM type: NNNNGHTT; PAM sequence: AGAAGTTT
  source 1..20: mol_type = other DNA
agaaaagtagctaaggaagt

SEQ ID NO: 6190 - DNA, 20 bp, synthetic construct
  misc_feature 1..20: note = Description of Artificial Sequence: Synthetic oligonucleotide
  misc_feature 1..20: note = Target: ANGPTL3; (-) strand; PAM type: NNNNGHTT; PAM sequence: CAGAGCTT
  source 1..20: mol_type = other DNA
ggaaaaaatccctgtattca

SEQ ID NO: 6191 - DNA, 20 bp, synthetic construct
  misc_feature 1..20: note = Description of Artificial Sequence: Synthetic oligonucleotide
  misc_feature 1..20: note = Target: ANGPTL3; (-) strand; PAM type: NNNNGHTT; PAM sequence: ACACGCTT
  source 1..20: mol_type = other DNA
caagtaataataatcatagc

SEQ ID NO: 6192 - DNA, 20 bp, synthetic construct
  misc_feature 1..20: note = Description of Artificial Sequence: Synthetic oligonucleotide
  misc_feature 1..20: note = Target: ANGPTL3; (-) strand; PAM type: NNNNGHTT; PAM sequence: TGTAGATT
  source 1..20: mol_type = other DNA
acttcaccagatgtttacat

SEQ ID NO: 6193 - DNA, 20 bp, synthetic construct
  misc_feature 1..20: note = Description of Artificial Sequence: Synthetic oligonucleotide
  misc_feature 1..20: note = Target: ANGPTL3; (-) strand; PAM type: NNNNGHTT; PAM sequence: AGATGTTT
  source 1..20: mol_type = other DNA
cttccctctgtcacttcacc

SEQ ID NO: 6194 - DNA, 20 bp, synthetic construct
  misc_feature 1..20: note = Description of Artificial Sequence: Synthetic oligonucleotide
  misc_feature 1..20: note = Target: ANGPTL3; (-) strand; PAM type: NNNNGHTT; PAM sequence: AAGTGCTT
  source 1..20: mol_type = other DNA
gacatagcttttttctaaac

SEQ ID NO: 6195 - DNA, 20 bp, synthetic construct
  misc_feature 1..20: note = Description of Artificial Sequence: Synthetic oligonucleotide
  misc_feature 1..20: note = Target: ANGPTL3; (-) strand; PAM type: NNNNGHTT; PAM sequence: CATAGCTT
  source 1..20: mol_type = other DNA
ttagaatacatggattctga

SEQ ID NO: 6196 - DNA, 20 bp, synthetic construct
  misc_feature 1..20: note = Description of Artificial Sequence: Synthetic oligonucleotide
  misc_feature 1..20: note = Target: ANGPTL3; (-) strand; PAM type: NNNNGHTT; PAM sequence: CATGGATT
  source 1..20: mol_type = other DNA
ttgtactgcatattagaata

SEQ ID NO: 6197 - DNA, 20 bp, synthetic construct
  misc_feature 1..20: note = Description of Artificial Sequence: Synthetic oligonucleotide
  misc_feature 1..20: note = Target: ANGPTL3; (-) strand; PAM type: NNNNGHTT; PAM sequence: AGCTGTTT
  source 1..20: mol_type = other DNA
ttttttgaatcctcttgaat

SEQ ID NO: 6198 - DNA, 20 bp, synthetic construct
  misc_feature 1..20: note = Description of Artificial Sequence: Synthetic oligonucleotide
  misc_feature 1..20: note = Target: ANGPTL3; (-) strand; PAM type: NNNNGHTT; PAM sequence: TTATGTTT
  source 1..20: mol_type = other DNA
ccagtttctctgagtttata

SEQ ID NO: 6199 - DNA, 20 bp, synthetic construct
  misc_feature 1..20: note = Description of Artificial Sequence: Synthetic oligonucleotide
  misc_feature 1..20: note = Target: ANGPTL3; (-) strand; PAM type: NNNNGHTT; PAM sequence: CTGAGTTT
  source 1..20: mol_type = other DNA
gattttgtttaccagtttct

SEQ ID NO: 6200 - DNA, 20 bp, synthetic construct
  misc_feature 1..20: note = Description of Artificial Sequence: Synthetic oligonucleotide
  misc_feature 1..20: note = Target: ANGPTL3; (-) strand; PAM type: NNNNGHTT; PAM sequence: ACCAGTTT
  source 1..20: mol_type = other DNA
tcttgaaaatgattttgttt

SEQ ID NO: 6201 - DNA, 20 bp, synthetic construct
  misc_feature 1..20: note = Description of Artificial Sequence: Synthetic oligonucleotide
  misc_feature 1..20: note = Target: ANGPTL3; (-) strand; PAM type: NNNNGHTT; PAM sequence: TTTTGTTT
  source 1..20: mol_type = other DNA
tttatatctcttgaaaatga

SEQ ID NO: 6202 - DNA, 20 bp, synthetic construct
  misc_feature 1..20: note = Description of Artificial Sequence: Synthetic oligonucleotide
  misc_feature 1..20: note = Target: ANGPTL3; (-) strand; PAM type: NNNNGHTT; PAM sequence: AAATGATT
  source 1..20: mol_type = other DNA
atttgttttatatctcttga

SEQ ID NO: 6203 - DNA, 20 bp, synthetic construct
  misc_feature 1..20: note = Description of Artificial Sequence: Synthetic oligonucleotide
  misc_feature 1..20: note = Target: ANGPTL3; (-) strand; PAM type: NNNNGHTT; PAM sequence: ATTTGTTT
  source 1..20: mol_type = other DNA
tagtggaaattggtaataat

SEQ ID NO: 6204 - DNA, 20 bp, synthetic construct
  misc_feature 1..20: note = Description of Artificial Sequence: Synthetic oligonucleotide
  misc_feature 1..20: note = Target: ANGPTL3; (-) strand; PAM type: NNNNGHTT; PAM sequence: GTTTGTTT
  source 1..20: mol_type = other DNA
agcagcactactaacattat

SEQ ID NO: 6205 - DNA, 20 bp, synthetic construct
  misc_feature 1..20: note = Description of Artificial Sequence: Synthetic oligonucleotide
  misc_feature 1..20: note = Target: ANGPTL3; (-) strand; PAM type: NNNNGHTT; PAM sequence: TTATGTTT
  source 1..20: mol_type = other DNA
ttttagcagcactactaaca

SEQ ID NO: 6206 - DNA, 20 bp, synthetic construct
  misc_feature 1..20: note = Description of Artificial Sequence: Synthetic oligonucleotide
  misc_feature 1..20: note = Target: ANGPTL3; (-) strand; PAM type: NNNNGHTT; PAM sequence: TTTTGCTT
  source 1..20: mol_type = other DNA
tgtatattactatagtaaca

SEQ ID NO: 6207 - DNA, 20 bp, synthetic construct
  misc_feature 1..20: note = Description of Artificial Sequence: Synthetic oligonucleotide
  misc_feature 1..20: note = Target: ANGPTL3; (-) strand; PAM type: NNNNGHTT; PAM sequence: TTTGGTTT
  source 1..20: mol_type = other DNA
ccaactcagaaattcattgt

SEQ ID NO: 6208 - DNA, 20 bp, synthetic construct
  misc_feature 1..20: note = Description of Artificial Sequence: Synthetic oligonucleotide
  misc_feature 1..20: note = Target: ANGPTL3; (-) strand; PAM type: NNNNGHTT; PAM sequence: CATTGTTT
  source 1..20: mol_type = other DNA
cttcttccaactcagaaatt

SEQ ID NO: 6209 - DNA, 20 bp, synthetic construct
  misc_feature 1..20: note = Description of Artificial Sequence: Synthetic oligonucleotide
  misc_feature 1..20: note = Target: ANGPTL3; (-) strand; PAM type: NNNNGHTT; PAM sequence: TTTTGTTT
  source 1..20: mol_type = other DNA
agttacttaaatttttagag

SEQ ID NO: 6210 - DNA, 20 bp, synthetic construct
  misc_feature 1..20: note = Description of Artificial Sequence: Synthetic oligonucleotide
  misc_feature 1..20: note = Target: ANGPTL3; (-) strand; PAM type: NNNNGHTT; PAM sequence: TAGAGTTT
  source 1..20: mol_type = other DNA
cttaaagttacttaaatttt

SEQ ID NO: 6211 - DNA, 20 bp, synthetic construct
  misc_feature 1..20: note = Description of Artificial Sequence: Synthetic oligonucleotide
  misc_feature 1..20: note = Target: ANGPTL3; (-) strand; PAM type: NNNNGHTT; PAM sequence: GTTTGCTT
  source 1..20: mol_type = other DNA
ttaaaaggatctattgtaaa

SEQ ID NO: 6212 - DNA, 20 bp, synthetic construct
  misc_feature 1..20: note = Description of Artificial Sequence: Synthetic oligonucleotide
  misc_feature 1..20: note = Target: ANGPTL3; (-) strand; PAM type: NNNNGHTT; PAM sequence: TAAAGTTT
  source 1..20: mol_type = other DNA
ttatttaaaaggatctattg

SEQ ID NO: 6213 - DNA, 20 bp, synthetic construct
  misc_feature 1..20: note = Description of Artificial Sequence: Synthetic oligonucleotide
  misc_feature 1..20: note = Target: ANGPTL3; (-) strand; PAM type: NNNNGHTT; PAM sequence: GTTAGTTT
  source 1..20: mol_type = other DNA
taatatcttgcattattagt

SEQ ID NO: 6214 - DNA, 20 bp, synthetic construct
  misc_feature 1..20: note = Description of Artificial Sequence: Synthetic oligonucleotide
  misc_feature 1..20: note = Target: ANGPTL3; (-) strand; PAM type: NNNNGHTT; PAM sequence: GATAGTTT
  source 1..20: mol_type = other DNA
gggtttgcaatttattgaat

SEQ ID NO: 6215 - DNA, 20 bp, synthetic construct
  misc_feature 1..20: note = Description of Artificial Sequence: Synthetic oligonucleotide
  misc_feature 1..20: note = Target: ANGPTL3; (-) strand; PAM type: NNNNGHTT; PAM sequence: TTGGGTTT
  source 1..20: mol_type = other DNA
tttatttttatttaagtgtg

SEQ ID NO: 6216 - DNA, 20 bp, synthetic construct
  misc_feature 1..20: note = Description of Artificial Sequence: Synthetic oligonucleotide
  misc_feature 1..20: note = Target: ANGPTL3; (-) strand; PAM type: NNNNGHTT; PAM sequence: GTTAGTTT
  source 1..20: mol_type = other DNA
tatatattcagtagtttatc

SEQ ID NO: 6217 - DNA, 20 bp, synthetic construct
  misc_feature 1..20: note = Description of Artificial Sequence: Synthetic oligonucleotide
  misc_feature 1..20: note = Target: ANGPTL3; (-) strand; PAM type: NNNNGHTT; PAM sequence: AGTAGTTT
  source 1..20: mol_type = other DNA
tgcttactttctatatattc

SEQ ID NO: 6218 - DNA, 20 bp, synthetic construct
  misc_feature 1..20: note = Description of Artificial Sequence: Synthetic oligonucleotide
  misc_feature 1..20: note = Target: ANGPTL3; (-) strand; PAM type: NNNNGHTT; PAM sequence: GTTTGCTT
  source 1..20: mol_type = other DNA
gttggcaggttggcaagttt

SEQ ID NO: 6219 - DNA, 20 bp, synthetic construct
  misc_feature 1..20: note = Description of Artificial Sequence: Synthetic oligonucleotide
  misc_feature 1..20: note = Target: ANGPTL3; (-) strand; PAM type: NNNNGHTT; PAM sequence: GTTTGTTT
  source 1..20: mol_type = other DNA
agatgttggcaggttggcaa

SEQ ID NO: 6220 - DNA, 20 bp, synthetic construct
  misc_feature 1..20: note = Description of Artificial Sequence: Synthetic oligonucleotide
  misc_feature 1..20: note = Target: ANGPTL3; (-) strand; PAM type: NNNNGHTT; PAM sequence: GCAAGTTT
  source 1..20: mol_type = other DNA
ctgtagatgttggcaggttg

SEQ ID NO: 6221 - DNA, 20 bp, synthetic construct
  misc_feature 1..20: note = Description of Artificial Sequence: Synthetic oligonucleotide
  misc_feature 1..20: note = Target: ANGPTL3; (-) strand; PAM type: NNNNGHTT; PAM sequence: CCAGGCTT
  source 1..20: mol_type = other DNA
gacataatacataatttgaa

SEQ ID NO: 6222 - DNA, 20 bp, synthetic construct
  misc_feature 1..20: note = Description of Artificial Sequence: Synthetic oligonucleotide
  misc_feature 1..20: note = Target: ANGPTL3; (-) strand; PAM type: NNNNGHTT; PAM sequence: TTCAGTTT
  source 1..20: mol_type = other DNA
agattttaagtttaataatt

SEQ ID NO: 6223 - DNA, 20 bp, synthetic construct
  misc_feature 1..20: note = Description of Artificial Sequence: Synthetic oligonucleotide
  misc_feature 1..20: note = Target: ANGPTL3; (-) strand; PAM type: NNNNGHTT; PAM sequence: TTAAGTTT
  source 1..20: mol_type = other DNA
tttgatattctgttcagatt

SEQ ID NO: 6224 - DNA, 20 bp, synthetic construct
  misc_feature 1..20: note = Description of Artificial Sequence: Synthetic oligonucleotide
  misc_feature 1..20: note = Target: ANGPTL3; (-) strand; PAM type: NNNNGHTT; PAM sequence: TTCAGATT
  source 1..20: mol_type = other DNA
aaaatatatttgatattctg

SEQ ID NO: 6225 - DNA, 20 bp, synthetic construct
  misc_feature 1..20: note = Description of Artificial Sequence: Synthetic oligonucleotide
  misc_feature 1..20: note = Target: ANGPTL3; (-) strand; PAM type: NNNNGHTT; PAM sequence: CTTTGCTT
  source 1..20: mol_type = other DNA
aaggccaaaagtagagactg

SEQ ID NO: 6226 - DNA, 20 bp, synthetic construct
  misc_feature 1..20: note = Description of Artificial Sequence: Synthetic oligonucleotide
  misc_feature 1..20: note = Target: ANGPTL3; (-) strand; PAM type: NNNNGHTT; PAM sequence: GACTGCTT
  source 1..20: mol_type = other DNA
agagcaaggccaaaagtaga

SEQ ID NO: 6227 - DNA, 20 bp, synthetic construct
  misc_feature 1..20: note = Description of Artificial Sequence: Synthetic oligonucleotide
  misc_feature 1..20: note = Target: ANGPTL3; (-) strand; PAM type: NNNNGHTT; PAM sequence: TACAGATT
  source 1..20: mol_type = other DNA
aaacagtgttattcagattg

SEQ ID NO: 6228 - DNA, 20 bp, synthetic construct
  misc_feature 1..20: note = Description of Artificial Sequence: Synthetic oligonucleotide
  misc_feature 1..20: note = Target: ANGPTL3; (-) strand; PAM type: NNNNGHTT; PAM sequence: TTCAGATT
  source 1..20: mol_type = other DNA
tatttagataaacagtgtta

SEQ ID NO: 6229 - DNA, 20 bp, synthetic construct
  misc_feature 1..20: note = Description of Artificial Sequence: Synthetic oligonucleotide
  misc_feature 1..20: note = Target: ANGPTL3; (-) strand; PAM type: NNNNGHTT; PAM sequence: CGGTGTTT
  source 1..20: mol_type = other DNA
ttcagttcataatgttataa

SEQ ID NO: 6230 - DNA, 20 bp, synthetic construct
  misc_feature 1..20: note = Description of Artificial Sequence: Synthetic oligonucleotide
  misc_feature 1..20: note = Target: ANGPTL3; (-) strand; PAM type: NNNNGHTT; PAM sequence: TACAGTTT
  source 1..20: mol_type = other DNA
ctgagtaaggatgtcagaag

SEQ ID NO: 6231 - DNA, 20 bp, synthetic construct
  misc_feature 1..20: note = Description of Artificial Sequence: Synthetic oligonucleotide
  misc_feature 1..20: note = Target: ANGPTL3; (-) strand; PAM type: NNNNGHTT; PAM sequence: ATCTGTTT
  source 1..20: mol_type = other DNA
gagctgataaaagaatataa

SEQ ID NO: 6232 - DNA, 20 bp, synthetic construct
  misc_feature 1..20: note = Description of Artificial Sequence: Synthetic oligonucleotide
  misc_feature 1..20: note = Target: ANGPTL3; (-) strand; PAM type: NNNNGHTT; PAM sequence: CTTGGCTT
  source 1..20: mol_type = other DNA
agggagtagttcttggtgct

SEQ ID NO: 6233 - DNA, 20 bp, synthetic construct
  misc_feature 1..20: note = Description of Artificial Sequence: Synthetic oligonucleotide
  misc_feature 1..20: note = Target: ANGPTL3; (-) strand; PAM type: NNNNGHTT; PAM sequence: TCATGTTT
  source 1..20: mol_type = other DNA
cccaccaaagtgtcttacca

SEQ ID NO: 6234 - DNA, 20 bp, synthetic construct
  misc_feature 1..20: note = Description of Artificial Sequence: Synthetic oligonucleotide
  misc_feature 1..20: note = Target: ANGPTL3; (-) strand; PAM type: NNNNGHTT; PAM sequence: AATAGCTT
  source 1..20: mol_type = other DNA
agaatagggaatttgataat

SEQ ID NO: 6235 - DNA, 20 bp, synthetic construct
  misc_feature 1..20: note = Description of Artificial Sequence: Synthetic oligonucleotide
  misc_feature 1..20: note = Target: ANGPTL3; (-) strand; PAM type: NNNNGHTT; PAM sequence: TCCAGTTT
  source 1..20: mol_type = other DNA
gtgtaaaaagaaccccagca

SEQ ID NO: 6236 - DNA, 20 bp, synthetic construct
  misc_feature 1..20: note = Description of Artificial Sequence: Synthetic oligonucleotide
  misc_feature 1..20: note = Target: ANGPTL3; (-) strand; PAM type: NNNNGHTT; PAM sequence: CTCTGATT
  source 1..20: mol_type = other DNA
tcaagtccatatttgtattt

SEQ ID NO: 6237 - DNA, 20 bp, synthetic construct
  misc_feature 1..20: note = Description of Artificial Sequence: Synthetic oligonucleotide
  misc_feature 1..20: note = Target: ANGPTL3; (-) strand; PAM type: NNNNGHTT; PAM sequence: AGGAGATT
  source 1..20: mol_type = other DNA
tcagcatgtatctcttaaac

SEQ ID NO: 6238 - DNA, 20 bp, synthetic construct
  misc_feature 1..20: note = Description of Artificial Sequence: Synthetic oligonucleotide
  misc_feature 1..20: note = Target: ANGPTL3; (-) strand; PAM type: NNNNGHTT; PAM sequence: TAATGTTT
  source 1..20: mol_type = other DNA
caaatgtagcattttttcag

SEQ ID NO: 6239 - DNA, 20 bp, synthetic construct
  misc_feature 1..20: note = Description of Artificial Sequence: Synthetic oligonucleotide
  misc_feature 1..20: note = Target: ANGPTL3; (-) strand; PAM type: NNNNGHTT; PAM sequence: TTGAGATT
  source 1..20: mol_type = other DNA
aggaataatatctttggagc

SEQ ID NO: 6240 - DNA, 20 bp, synthetic construct
  misc_feature 1..20: note = Description of Artificial Sequence: Synthetic oligonucleotide
  misc_feature 1..20: note = Target: ANGPTL3; (-) strand; PAM type: NNNNGHTT; PAM sequence: TGGAGCTT
  source 1..20: mol_type = other DNA
agtaataggaataatatctt

SEQ ID NO: 6241 - DNA, 20 bp, synthetic construct
  misc_feature 1..20: note = Description of Artificial Sequence: Synthetic oligonucleotide
  misc_feature 1..20: note = Target: ANGPTL3; (-) strand; PAM type: NNNNGHTT; PAM sequence: ATCAGATT
  source 1..20: mol_type = other DNA
aatcaataaaatgttattac

SEQ ID NO: 6242 - DNA, 20 bp, synthetic construct
  misc_feature 1..20: note = Description of Artificial Sequence: Synthetic oligonucleotide
  misc_feature 1..20: note = Target: ANGPTL3; (-) strand; PAM type: NNNNGHTT; PAM sequence: ACAGGTTT
  source 1..20: mol_type = other DNA
ctactgtctattctccttag

SEQ ID NO: 6243 - DNA, 20 bp, synthetic construct
  misc_feature 1..20: note = Description of Artificial Sequence: Synthetic oligonucleotide
  misc_feature 1..20: note = Target: ANGPTL3; (-) strand; PAM type: NNNNGHTT; PAM sequence: TTCAGATT
  source 1..20: mol_type = other DNA
aacttattgataatagtcac

SEQ ID NO: 6244 - DNA, 20 bp, synthetic construct
  misc_feature 1..20: note = Description of Artificial Sequence: Synthetic oligonucleotide
  misc_feature 1..20: note = Target: ANGPTL3; (-) strand; PAM type: NNNNGHTT; PAM sequence: GGTAGTTT
  source 1..20: mol_type = other DNA
tttaattggtggttttgtaa

SEQ ID NO: 6245 - DNA, 20 bp, synthetic construct
  misc_feature 1..20: note = Description of Artificial Sequence: Synthetic oligonucleotide
  misc_feature 1..20: note = Target: ANGPTL3; (-) strand; PAM type: NNNNGHTT; PAM sequence: GGTGGTTT
  source 1..20: mol_type = other DNA
ttgtttgtttgattttaatt

SEQ ID NO: 6246 - DNA, 20 bp, synthetic construct
  misc_feature 1..20: note = Description of Artificial Sequence: Synthetic oligonucleotide
  misc_feature 1..20: note = Target: ANGPTL3; (-) strand; PAM type: NNNNGHTT; PAM sequence: GTTTGATT
  source 1..20: mol_type = other DNA
taaataacacttttttgttt

SEQ ID NO: 6247 - DNA, 20 bp, synthetic construct
  misc_feature 1..20: note = Description of Artificial Sequence: Synthetic oligonucleotide
  misc_feature 1..20: note = Target: ANGPTL3; (-) strand; PAM type: NNNNGHTT; PAM sequence: GTTTGTTT
  source 1..20: mol_type = other DNA
gatgtaaataacactttttt

SEQ ID NO: 6248 - DNA, 20 bp, synthetic construct
  misc_feature 1..20: note = Description of Artificial Sequence: Synthetic oligonucleotide
  misc_feature 1..20: note = Target: ANGPTL3; (-) strand; PAM type: NNNNGHTT; PAM sequence: TTTTGTTT
  source 1..20: mol_type = other DNA
gacagatgtaaataacactt

SEQ ID NO: 6249 - DNA, 20 bp, synthetic construct
  misc_feature 1..20: note = Description of Artificial Sequence: Synthetic oligonucleotide
  misc_feature 1..20: note = Target: ANGPTL3; (-) strand; PAM type: NNNNGHTT; PAM sequence: AGTAGATT
  source 1..20: mol_type = other DNA
gaatgaaatcatgtattttt

SEQ ID NO: 6250 - DNA, 20 bp, synthetic construct
  misc_feature 1..20: note = Description of Artificial Sequence: Synthetic oligonucleotide
  misc_feature 1..20: note = Target: ANGPTL3; (-) strand; PAM type: NNNNGHTT; PAM sequence: TGAAGTTT
  source 1..20: mol_type = other DNA
gtagttctcccacgtttcat

SEQ ID NO: 6251 - DNA, 20 bp, synthetic construct
  misc_feature 1..20: note = Description of Artificial Sequence: Synthetic oligonucleotide
  misc_feature 1..20: note = Target: ANGPTL3; (-) strand; PAM type: NNNNGHTT; PAM sequence: CCACGTTT
  source 1..20: mol_type = other DNA
aaaccatatttgtagttctc

SEQ ID NO: 6252 - DNA, 20 bp, synthetic construct
  misc_feature 1..20: note = Description of Artificial Sequence: Synthetic oligonucleotide
  misc_feature 1..20: note = Target: ANGPTL3; (-) strand; PAM type: NNNNGHTT; PAM sequence: GAATGATT
  source 1..20: mol_type = other DNA
ttgtagattagcaagtgaat

SEQ ID NO: 6253 - DNA, 20 bp, synthetic construct
  misc_feature 1..20: note = Description of Artificial Sequence: Synthetic oligonucleotide
  misc_feature 1..20: note = Target: ANGPTL3; (-) strand; PAM type: NNNNGHTT; PAM sequence: TGTAGATT
  source 1..20: mol_type = other DNA
agaggttctcagtaaatatt

SEQ ID NO: 6254 - DNA, 20 bp, synthetic construct
  misc_feature 1..20: note = Description of Artificial Sequence: Synthetic oligonucleotide
  misc_feature 1..20: note = Target: ANGPTL3; (-) strand; PAM type: NNNNGHTT; PAM sequence: GACTGCTT
  source 1..20: mol_type = other DNA
ataaattatatgaaggctga

SEQ ID NO: 6255 - DNA, 20 bp, synthetic construct
  misc_feature 1..20: note = Description of Artificial Sequence: Synthetic oligonucleotide
  misc_feature 1..20: note = Target: ANGPTL3; (-) strand; PAM type: NNNNGHTT; PAM sequence: AATTGTTT
  source 1..20: mol_type = other DNA
taatttactaacaaatgtgt

SEQ ID NO: 6256 - DNA, 20 bp, synthetic construct
  misc_feature 1..20: note = Description of Artificial Sequence: Synthetic oligonucleotide
  misc_feature 1..20: note = Target: ANGPTL3; (-) strand; PAM type: NNNNGHTT; PAM sequence: CACAGCTT
  source 1..20: mol_type = other DNA
atgctaggagtggttctttt

SEQ ID NO: 6257 - DNA, 20 bp, synthetic construct
  misc_feature 1..20: note = Description of Artificial Sequence: Synthetic oligonucleotide
  misc_feature 1..20: note = Target: ANGPTL3; (-) strand; PAM type: NNNNGHTT; PAM sequence: CTGAGTTT
  source 1..20: mol_type = other DNA
ttaaaatgtatactgtatgt

SEQ ID NO: 6258 - DNA, 20 bp, synthetic construct
  misc_feature 1..20: note = Description of Artificial Sequence: Synthetic oligonucleotide
  misc_feature 1..20: note = Target: ANGPTL3; (-) strand; PAM type: NNNNGHTT; PAM sequence: TCTTGCTT
  source 1..20: mol_type = other DNA
tttaaacatctgttatttta

SEQ ID NO: 6259 - DNA, 20 bp, synthetic construct
  misc_feature 1..20: note = Description of Artificial Sequence: Synthetic oligonucleotide
  misc_feature 1..20: note = Target: ANGPTL3; (-) strand; PAM type: NNNNGHTT; PAM sequence: TTTGGATT
  source 1..20: mol_type = other DNA
atggatttttgtatgtgctt

SEQ ID NO: 6260 - DNA, 20 bp, synthetic construct
  misc_feature 1..20: note = Description of Artificial Sequence: Synthetic oligonucleotide
  misc_feature 1..20: note = Target: ANGPTL3; (-) strand; PAM type: NNNNGHTT; PAM sequence: ATGTGCTT
  source 1..20: mol_type = other DNA
catcattcatggatttttgt

SEQ ID NO: 6261 - DNA, 20 bp, synthetic construct
  misc_feature 1..20: note = Description of Artificial Sequence: Synthetic oligonucleotide
  misc_feature 1..20: note = Target: ANGPTL3; (-) strand; PAM type: NNNNGHTT; PAM sequence: CATGGATT
  source 1..20: mol_type = other DNA
gtgagtacttagacatcatt

SEQ ID NO: 6262 - DNA, 20 bp, synthetic construct
  misc_feature 1..20: note = Description of Artificial Sequence: Synthetic oligonucleotide
  misc_feature 1..20: note = Target: ANGPTL3; (-) strand; PAM type: NNNNGHTT; PAM sequence: GGTAGTTT
  source 1..20: mol_type = other DNA
ttctaggtagggctttcact

SEQ ID NO: 6263 - DNA, 20 bp, synthetic construct
  misc_feature 1..20: note = Description of Artificial Sequence: Synthetic oligonucleotide
  misc_feature 1..20: note = Target: ANGPTL3; (-) strand; PAM type: NNNNGHTT; PAM sequence: TAGGGCTT
  source 1..20: mol_type = other DNA
cactgagtataccttctagg

SEQ ID NO: 6264 - DNA, 20 bp, synthetic construct
  misc_feature 1..20: note = Description of Artificial Sequence: Synthetic oligonucleotide
  misc_feature 1..20: note = Target: ANGPTL3; (-) strand; PAM type: NNNNGHTT; PAM sequence: AGAAGATT
  source 1..20: mol_type = other DNA
ttggggttacactcactatt

SEQ ID NO: 6265 - DNA, 20 bp, synthetic construct
  misc_feature 1..20: note = Description of Artificial Sequence: Synthetic oligonucleotide
  misc_feature 1..20: note = Target: ANGPTL3; (-) strand; PAM type: NNNNGHTT; PAM sequence: GGTTGCTT
  source 1..20: mol_type = other DNA
ggtaaatacaagtacaaatg

SEQ ID NO: 6266 - DNA, 20 bp, synthetic construct
  misc_feature 1..20: note = Description of Artificial Sequence: Synthetic oligonucleotide
  misc_feature 1..20: note = Target: ANGPTL3; (-) strand; PAM type: NNNNGHTT; PAM sequence: TAAGGATT
  source 1..20: mol_type = other DNA
gttagtaggaagcttcattt

SEQ ID NO: 6267 - DNA, 20 bp, synthetic construct
  misc_feature 1..20: note = Description of Artificial Sequence: Synthetic oligonucleotide
  misc_feature 1..20: note = Target: ANGPTL3; (-) strand; PAM type: NNNNGHTT; PAM sequence: GGAAGCTT
  source 1..20: mol_type = other DNA
ttattgctattgagttagta

SEQ ID NO: 6268 - DNA, 20 bp, synthetic construct
  misc_feature 1..20: note = Description of Artificial Sequence: Synthetic oligonucleotide
  misc_feature 1..20: note = Target: ANGPTL3; (-) strand; PAM type: NNNNGHTT; PAM sequence: TACTGTTT
  source 1..20: mol_type = other DNA
ttattaaagtatttataaaa

SEQ ID NO: 6269 - DNA, 20 bp, synthetic construct
  misc_feature 1..20: note = Description of Artificial Sequence: Synthetic oligonucleotide
  misc_feature 1..20: note = Target: ANGPTL3; (-) strand; PAM type: NNNNGHTT; PAM sequence: AATAGATT
  source 1..20: mol_type = other DNA
aaaaacaaataacaaatata

SEQ ID NO: 6270 - DNA, 20 bp, synthetic construct
  misc_feature 1..20: note = Description of Artificial Sequence: Synthetic oligonucleotide
  misc_feature 1..20: note = Target: ANGPTL3; (-) strand; PAM type: NNNNGHTT; PAM sequence: GTATGCTT
  source 1..20: mol_type = other DNA
gcctttggtatttgcttaat

SEQ ID NO: 6271 - DNA, 20 bp, synthetic construct
  misc_feature 1..20: note = Description of Artificial Sequence: Synthetic oligonucleotide
  misc_feature 1..20: note = Target: ANGPTL3; (-) strand; PAM type: NNNNGHTT; PAM sequence: ATTTGCTT
  source 1..20: mol_type = other DNA
atgtaaacctggcctttggt

SEQ ID NO: 6272 - DNA, 20 bp, synthetic construct
  misc_feature 1..20: note = Description of Artificial Sequence: Synthetic oligonucleotide
  misc_feature 1..20: note = Target: ANGPTL3; (-) strand; PAM type: NNNNGHTT; PAM sequence: ACATGTTT
  source 1..20: mol_type = other DNA
tctataatgcatatgacaag

SEQ ID NO: 6273 - DNA, 20 bp, synthetic construct
  misc_feature 1..20: note = Description of Artificial Sequence: Synthetic oligonucleotide
  misc_feature 1..20: note = Target: ANGPTL3; (-) strand; PAM type: NNNNGHTT; PAM sequence: GTCTGATT
  source 1..20: mol_type = other DNA
aaatattaatataactgaaa

SEQ ID NO: 6274 - DNA, 20 bp, synthetic construct
  misc_feature 1..20: note = Description of Artificial Sequence: Synthetic oligonucleotide
  misc_feature 1..20: note = Target: ANGPTL3; (-) strand; PAM type: NNNNGHTT; PAM sequence: AGTTGTTT
  source 1..20: mol_type = other DNA
tttattggtgcaactaattg

SEQ ID NO: 6275 - DNA, 20 bp, synthetic construct
  misc_feature 1..20: note = Description of Artificial Sequence: Synthetic oligonucleotide
  misc_feature 1..20: note = Target: ANGPTL3; (-) strand; PAM type: NNNNGHTT; PAM sequence: AAGTGTTT
  source 1..20: mol_type = other DNA
tggacactgacagttttttt

SEQ ID NO: 6276 - DNA, 20 bp, synthetic construct
  misc_feature 1..20: note = Description of Artificial Sequence: Synthetic oligonucleotide
  misc_feature 1..20: note = Target: ANGPTL3; (-) strand; PAM type: NNNNGHTT; PAM sequence: GACAGTTT
  source 1..20: mol_type = other DNA
ttaagtacaggttggacact

SEQ ID NO: 6277 - DNA, 20 bp, synthetic construct
  misc_feature 1..20: note = Description of Artificial Sequence: Synthetic oligonucleotide
  misc_feature 1..20: note = Target: ANGPTL3; (-) strand; PAM type: NNNNGHTT; PAM sequence: AAAAGTTT
  source 1..20: mol_type = other DNA
accaaaattctcctgaaaag

SEQ ID NO: 6278 - DNA, 20 bp, synthetic construct
  misc_feature 1..20: note = Description of Artificial Sequence: Synthetic oligonucleotide
  misc_feature 1..20: note = Target: ANGPTL3; (-) strand; PAM type: NNNNGHTT; PAM sequence: GATTGCTT
  source 1..20: mol_type = other DNA
caattcgtaaaacataatta

SEQ ID NO: 6279 - DNA, 20 bp, synthetic construct
  misc_feature 1..20: note = Description of Artificial Sequence: Synthetic oligonucleotide
  misc_feature 1..20: note = Target: ANGPTL3; (-) strand; PAM type: NNNNGHTT; PAM sequence: ATTAGATT
  source 1..20: mol_type = other DNA
aactcaattcgtaaaacata

SEQ ID NO: 6280 - DNA, 20 bp, synthetic construct
  misc_feature 1..20: note = Description of Artificial Sequence: Synthetic oligonucleotide
  misc_feature 1..20: note = Target: ANGPTL3; (-) strand; PAM type: NNNNGHTT; PAM sequence: TAATGTTT
  source 1..20: mol_type = other DNA
agtaaaaagaatattcaata

SEQ ID NO: 6281 - DNA, 20 bp, synthetic construct
  misc_feature 1..20: note = Description of Artificial Sequence: Synthetic oligonucleotide
  misc_feature 1..20: note = Target: ANGPTL3; (-) strand; PAM type: NNNNGHTT; PAM sequence: TCGTGATT
  source 1..20: mol_type = other DNA
gatgtagcgtatagttggtt

SEQ ID NO: 6282 - DNA, 20 bp, synthetic construct
  misc_feature 1..20: note = Description of Artificial Sequence: Synthetic oligonucleotide
  misc_feature 1..20: note = Target: ANGPTL3; (-) strand; PAM type: NNNNGHTT; PAM sequence: GTTGGTTT
  source 1..20: mol_type = other DNA
gcaactagatgtagcgtata

SEQ ID NO: 6283 - DNA, 20 bp, synthetic construct
  misc_feature 1..20: note = Description of Artificial Sequence: Synthetic oligonucleotide
  misc_feature 1..20: note = Target: ANGPTL3; (-) strand; PAM type: NNNNGHTT; PAM sequence: CCGGGATT
  source 1..20: mol_type = other DNA
aaacaccaaatctttgtttt

SEQ ID NO: 6284 - DNA, 20 bp, synthetic construct
  misc_feature 1..20: note = Description of Artificial Sequence: Synthetic oligonucleotide
  misc_feature 1..20: note = Target: ANGPTL3; (-) strand; PAM type: NNNNGHTT; PAM sequence: CTTTGTTT
  source 1..20: mol_type = other DNA
ccaagtagaaaacaccaaat

SEQ ID NO: 6285 - DNA, 20 bp, synthetic construct
  misc_feature 1..20: note = Description of Artificial Sequence: Synthetic oligonucleotide
  misc_feature 1..20: note = Target: ANGPTL3; (-) strand; PAM type: NNNNGHTT; PAM sequence: TTTTGCTT
  source 1..20: mol_type = other DNA
tctggacagttgaagtgtcc

SEQ ID NO: 6286 - DNA, 20 bp, synthetic construct
  misc_feature 1..20: note = Description of Artificial Sequence: Synthetic oligonucleotide
  misc_feature 1..20: note = Target: ANGPTL3; (-) strand; PAM type: NNNNGHTT; PAM sequence: TTCGGATT
  source 1..20: mol_type = other DNA
gagaaaacgcttatttggga

SEQ ID NO: 6287 - DNA, 20 bp, synthetic construct
  misc_feature 1..20: note = Description of Artificial Sequence: Synthetic oligonucleotide
  misc_feature 1..20: note = Target: ANGPTL3; (-) strand; PAM type: NNNNGHTT; PAM sequence: TTGGGATT
  source 1..20: mol_type = other DNA
tctagagagaaaacgcttat

SEQ ID NO: 6288 - DNA, 20 bp, synthetic construct
  misc_feature 1..20: note = Description of Artificial Sequence: Synthetic oligonucleotide
  misc_feature 1..20: note = Target: ANGPTL3; (-) strand; PAM type: NNNNGHTT; PAM sequence: AAACGCTT
  source 1..20: mol_type = other DNA
gaggttttcgtctagagaga

SEQ ID NO: 6289 - DNA, 20 bp, synthetic construct
  misc_feature 1..20: note = Description of Artificial Sequence: Synthetic oligonucleotide
  misc_feature 1..20: note = Target: ANGPTL3; (-) strand; PAM type: NNNNGHTT; PAM sequence: AGAGGTTT
  source 1..20: mol_type = other DNA
gaacactttcattatagtta

SEQ ID NO: 6290 - DNA, 20 bp, synthetic construct
  misc_feature 1..20: note = Description of Artificial Sequence: Synthetic oligonucleotide
  misc_feature 1..20: note = Target: ANGPTL3; (-) strand; PAM type: NNNNGHTT; PAM sequence: ACCTGATT
  source 1..20: mol_type = other DNA
aggaagattagaggtaaaat

SEQ ID NO: 6291 - DNA, 20 bp, synthetic construct
  misc_feature 1..20: note = Description of Artificial Sequence: Synthetic oligonucleotide
  misc_feature 1..20: note = Target: ANGPTL3; (-) strand; PAM type: NNNNGHTT; PAM sequence: GGAAGATT
  source 1..20: mol_type = other DNA
ccaaaaaatagaaaatctga

SEQ ID NO: 6292 - DNA, 20 bp, synthetic construct
  misc_feature 1..20: note = Description of Artificial Sequence: Synthetic oligonucleotide
  misc_feature 1..20: note = Target: ANGPTL3; (-) strand; PAM type: NNNNGHTT; PAM sequence: CCCAGTTT
  source 1..20: mol_type = other DNA
agtgttttagatgcatgtat

SEQ ID NO: 6293 - DNA, 20 bp, synthetic construct
  misc_feature 1..20: note = Description of Artificial Sequence: Synthetic oligonucleotide
  misc_feature 1..20: note = Target: ANGPTL3; (-) strand; PAM type: NNNNGHTT; PAM sequence: CAGTGTTT
  source 1..20: mol_type = other DNA
ttcctttcttataaatatta

SEQ ID NO: 6294 - DNA, 20 bp, synthetic construct
  misc_feature 1..20: note = Description of Artificial Sequence: Synthetic oligonucleotide
  misc_feature 1..20: note = Target: ANGPTL3; (-) strand; PAM type: NNNNGHTT; PAM sequence: GTAAGTTT
  source 1..20: mol_type = other DNA
tactgttactgtatttcccc

SEQ ID NO: 6295 - DNA, 20 bp, synthetic construct
  misc_feature 1..20: note = Description of Artificial Sequence: Synthetic oligonucleotide
  misc_feature 1..20: note = Target: ANGPTL3; (-) strand; PAM type: NNNNGHTT; PAM sequence: GGTTGTTT
  source 1..20: mol_type = other DNA
tttgttatatttaccattta

SEQ ID NO: 6296 - DNA, 20 bp, synthetic construct
  misc_feature 1..20: note = Description of Artificial Sequence: Synthetic oligonucleotide
  misc_feature 1..20: note = Target: ANGPTL3; (-) strand; PAM type: NNNNGHTT; PAM sequence: CTTGGTTT
  source 1..20: mol_type = other DNA
tctctggcttagattttgct

SEQ ID NO: 6297 - DNA, 20 bp, synthetic construct
  misc_feature 1..20: note = Description of Artificial Sequence: Synthetic oligonucleotide
  misc_feature 1..20: note = Target: ANGPTL3; (-) strand; PAM type: NNNNGHTT; PAM sequence: CTTAGATT
  source 1..20: mol_type = other DNA
aatcctcttctcctctctgg

SEQ ID NO: 6298 - DNA, 20 bp, synthetic construct
  misc_feature 1..20: note = Description of Artificial Sequence: Synthetic oligonucleotide
  misc_feature 1..20: note = Target: ANGPTL3; (-) strand; PAM type: NNNNGHTT; PAM sequence: TCTGGCTT
  source 1..20: mol_type = other DNA
aagataatcctcttctcctc

SEQ ID NO: 6299 - DNA, 20 bp, synthetic construct
  misc_feature 1..20: note = Description of Artificial Sequence: Synthetic oligonucleotide
  misc_feature 1..20: note = Target: ANGPTL3; (-) strand; PAM type: NNNNGHTT; PAM sequence: GGTTGATT
  source 1..20: mol_type = other DNA
gttggatggatcaacatttt

SEQ ID NO: 6300 - DNA, 20 bp, synthetic construct
  misc_feature 1..20: note = Description of Artificial Sequence: Synthetic oligonucleotide
  misc_feature 1..20: note = Target: ANGPTL3; (-) strand; PAM type: NNNNGHTT; PAM sequence: CAAAGCTT
  source 1..20: mol_type = other DNA
taaatttgcctcagttcatt

SEQ ID NO: 6301 - DNA, 20 bp, synthetic construct
  misc_feature 1..20: note = Description of Artificial Sequence: Synthetic oligonucleotide
  misc_feature 1..20: note = Target: ANGPTL3; (-) strand; PAM type: NNNNGHTT; PAM sequence: TAATGTTT
  source 1..20: mol_type = other DNA
acattaacttggaatgaggt

SEQ ID NO: 6302 - DNA, 20 bp, synthetic construct
  misc_feature 1..20: note = Description of Artificial Sequence: Synthetic oligonucleotide
  misc_feature 1..20: note = Target: ANGPTL3; (-) strand; PAM type: NNNNGHTT; PAM sequence: ACCAGATT
  source 1..20: mol_type = other DNA
ctttctcttaaggatttaat

SEQ ID NO: 6303 - DNA, 20 bp, synthetic construct
  misc_feature 1..20: note = Description of Artificial Sequence: Synthetic oligonucleotide
  misc_feature 1..20: note = Target: ANGPTL3; (-) strand; PAM type: NNNNGHTT; PAM sequence: TAAGGATT
  source 1..20: mol_type = other DNA
ctatttctcaagctttctct

SEQ ID NO: 6304 - DNA, 20 bp, synthetic construct
  misc_feature 1..20: note = Description of Artificial Sequence: Synthetic oligonucleotide
  misc_feature 1..20: note = Target: ANGPTL3; (-) strand; PAM type: NNNNGHTT; PAM sequence: TCAAGCTT
  source 1..20: mol_type = other DNA
agataaaaaaaatctatttc

SEQ ID NO: 6305 - DNA, 20 bp, synthetic construct
  misc_feature 1..20: note = Description of Artificial Sequence: Synthetic oligonucleotide
  misc_feature 1..20: note = Target: ANGPTL3; (-) strand; PAM type: NNNNGHTT; PAM sequence: GTATGTTT
  source 1..20: mol_type = other DNA
ttctttaaggttatgtgatt

SEQ ID NO: 6306 - DNA, 20 bp, synthetic construct
  misc_feature 1..20: note = Description of Artificial Sequence: Synthetic oligonucleotide
  misc_feature 1..20: note = Target: ANGPTL3; (-) strand; PAM type: NNNNGHTT; PAM sequence: ATGTGATT
  source 1..20: mol_type = other DNA
aaacggtattctttaaggtt

SEQ ID NO: 6307 - DNA, 20 bp, synthetic construct
  misc_feature 1..20: note = Description of Artificial Sequence: Synthetic oligonucleotide
  misc_feature 1..20: note = Target: ANGPTL3; (-) strand; PAM type: NNNNGHTT; PAM sequence: TTTTGATT
  source 1..20: mol_type = other DNA
aacaaatagtattataagaa

SEQ ID NO: 6308 - DNA, 20 bp, synthetic construct
  misc_feature 1..20: note = Description of Artificial Sequence: Synthetic oligonucleotide
  misc_feature 1..20: note = Target: ANGPTL3; (-) strand; PAM type: NNNNGHTT; PAM sequence: AATTGATT
  source 1..20: mol_type = other DNA
tctagattgtgaccatctaa

SEQ ID NO: 6309 - DNA, 20 bp, synthetic construct
  misc_feature 1..20: note = Description of Artificial Sequence: Synthetic oligonucleotide
  misc_feature 1..20: note = Target: ANGPTL3; (-) strand; PAM type: NNNNGHTT; PAM sequence: TCTAGATT
  source 1..20: mol_type = other DNA
agttcacctattgattataa

SEQ ID NO: 6310 - DNA, 20 bp, synthetic construct
  misc_feature 1..20: note = Description of Artificial Sequence: Synthetic oligonucleotide
  misc_feature 1..20: note = Target: ANGPTL3; (-) strand; PAM type: NNNNGHTT; PAM sequence: TATTGATT
  source 1..20: mol_type = other DNA
agttatttaataagttcacc

SEQ ID NO: 6311 - DNA, 20 bp, synthetic construct
  misc_feature 1..20: note = Description of Artificial Sequence: Synthetic oligonucleotide
  misc_feature 1..20: note = Target: ANGPTL3; (-) strand; PAM type: NNNNGHTT; PAM sequence: ACTAGTTT
  source 1..20: mol_type = other DNA
tttagagttttaacaagagt

SEQ ID NO: 6312 - DNA, 20 bp, synthetic construct
  misc_feature 1..20: note = Description of Artificial Sequence: Synthetic oligonucleotide
  misc_feature 1..20: note = Target: ANGPTL3; (-) strand; PAM type: NNNNGHTT; PAM sequence: TAGAGTTT
  source 1..20: mol_type = other DNA
cctctgtatttagtcaagtt

SEQ ID NO: 6313 - DNA, 20 bp, synthetic construct
  misc_feature 1..20: note = Description of Artificial Sequence: Synthetic oligonucleotide
  misc_feature 1..20: note = Target: ANGPTL3; (-) strand; PAM type: NNNNGHTT; PAM sequence: TCAAGTTT
  source 1..20: mol_type = other DNA
taccagtcctctgtatttag

SEQ ID NO: 6314 - DNA, 20 bp, synthetic construct
  misc_feature 1..20: note = Description of Artificial Sequence: Synthetic oligonucleotide
  misc_feature 1..20: note = Target: ANGPTL3; (-) strand; PAM type: NNNNGHTT; PAM sequence: TTTAGTTT
  source 1..20: mol_type = other DNA
catactctgtgctgacgatt

SEQ ID NO: 6315 - DNA, 20 bp, synthetic construct
  misc_feature 1..20: note = Description of Artificial Sequence: Synthetic oligonucleotide
  misc_feature 1..20: note = Target: ANGPTL3; (-) strand; PAM type: NNNNGHTT; PAM sequence: TGACGATT
  source 1..20: mol_type = other DNA
tttttacacatactctgtgc

SEQ ID NO: 6316 - DNA, 20 bp, synthetic construct
  misc_feature 1..20: note = Description of Artificial Sequence: Synthetic oligonucleotide
  misc_feature 1..20: note = Target: ANGPTL3; (-) strand; PAM type: NNNNGHTT; PAM sequence: TACAGATT
  source 1..20: mol_type = other DNA
atcagtttaaaaatttgtat

SEQ ID NO: 6317 - DNA, 20 bp, synthetic construct
  misc_feature 1..20: note = Description of Artificial Sequence: Synthetic oligonucleotide
  misc_feature 1..20: note = Target: ANGPTL3; (-) strand; PAM type: NNNNGHTT; PAM sequence: ATCAGTTT
  source 1..20: mol_type = other DNA
attttgtagcaaaatgaagc

SEQ ID NO: 6318 - DNA, 20 bp, synthetic construct
  misc_feature 1..20: note = Description of Artificial Sequence: Synthetic oligonucleotide
  misc_feature 1..20: note = Target: ANGPTL3; (-) strand; PAM type: NNNNGHTT; PAM sequence: TTAGGTTT
  source 1..20: mol_type = other DNA
cagtatttaattctgcttca

SEQ ID NO: 6319 - DNA, 20 bp, synthetic construct
  misc_feature 1..20: note = Description of Artificial Sequence: Synthetic oligonucleotide
  misc_feature 1..20: note = Target: ANGPTL3; (-) strand; PAM type: NNNNGHTT; PAM sequence: TTCTGCTT
  source 1..20: mol_type = other DNA
tattttaatacagtatttaa

SEQ ID NO: 6320 - DNA, 20 bp, synthetic construct
  misc_feature 1..20: note = Description of Artificial Sequence: Synthetic oligonucleotide
  misc_feature 1..20: note = Target: ANGPTL3; (-) strand; PAM type: NNNNGHTT; PAM sequence: ATTTGTTT
  source 1..20: mol_type = other DNA
gtgacttagtagtcatctcc

SEQ ID NO: 6321 - DNA, 20 bp, synthetic construct
  misc_feature 1..20: note = Description of Artificial Sequence: Synthetic oligonucleotide
  misc_feature 1..20: note = Target: ANGPTL3; (-) strand; PAM type: NNNNGHTT; PAM sequence: ATTTGTTT
  source 1..20: mol_type = other DNA
gacaagattcctttacaatt

SEQ ID NO: 6322 - DNA, 20 bp, synthetic construct
  misc_feature 1..20: note = Description of Artificial Sequence: Synthetic oligonucleotide
  misc_feature 1..20: note = Target: ANGPTL3; (-) strand; PAM type: NNNNGHTT; PAM sequence: ACAAGATT
  source 1..20: mol_type = other DNA
ttcattcttactgtaatctg

SEQ ID NO: 6323 - DNA, 20 bp, synthetic construct
  misc_feature 1..20: note = Description of Artificial Sequence: Synthetic oligonucleotide
  misc_feature 1..20: note = Target: ANGPTL3; (-) strand; PAM type: NNNNGHTT; PAM sequence: CGAGGTTT
  source 1..20: mol_type = other DNA
aaacgttcagtaacttgtta

SEQ ID NO: 6324 - DNA, 20 bp, synthetic construct
  misc_feature 1..20: note = Description of Artificial Sequence: Synthetic oligonucleotide
  misc_feature 1..20: note = Target: ANGPTL3; (-) strand; PAM type: NNNNGHTT; PAM sequence: GGCTGTTT
  source 1..20: mol_type = other DNA
acatatatacatgcttgtca

SEQ ID NO: 6325 - DNA, 20 bp, synthetic construct
  misc_feature 1..20: note = Description of Artificial Sequence: Synthetic oligonucleotide
  misc_feature 1..20: note = Target: ANGPTL3; (-) strand; PAM type: NNNNGHTT; PAM sequence: ACATGCTT
  source 1..20: mol_type = other DNA
attgaattttaaacatatat

SEQ ID NO: 6326 - DNA, 20 bp, synthetic construct
  misc_feature 1..20: note = Description of Artificial Sequence: Synthetic oligonucleotide
  misc_feature 1..20: note = Target: ANGPTL3; (-) strand; PAM type: NNNNGHTT; PAM sequence: CTTTGTTT
  source 1..20: mol_type = other DNA
ctataatttagggactgggt

SEQ ID NO: 6327 - DNA, 20 bp, synthetic construct
  misc_feature 1..20: note = Description of Artificial Sequence: Synthetic oligonucleotide
  misc_feature 1..20: note = Target: ANGPTL3; (-) strand; PAM type: NNNNGHTT; PAM sequence: TAGGGATT
  source 1..20: mol_type = other DNA
gtatctaatctttagggatt

SEQ ID NO: 6328 - DNA, 20 bp, synthetic construct
  misc_feature 1..20: note = Description of Artificial Sequence: Synthetic oligonucleotide
  misc_feature 1..20: note = Target: ANGPTL3; (-) strand; PAM type: NNNNGHTT; PAM sequence: TAGGGATT
  source 1..20: mol_type = other DNA
aaaaatttgtatctaatctt

SEQ ID NO: 6329 - DNA, 20 bp, synthetic construct
  misc_feature 1..20: note = Description of Artificial Sequence: Synthetic oligonucleotide
  misc_feature 1..20: note = Target: ANGPTL3; (-) strand; PAM type: NNNNGHTT; PAM sequence: GGCAGTTT
  source 1..20: mol_type = other DNA
ttaatttaaaatttcttact

SEQ ID NO: 6330 - DNA, 20 bp, synthetic construct
  misc_feature 1..20: note = Description of Artificial Sequence: Synthetic oligonucleotide
  misc_feature 1..20: note = Target: ANGPTL3; (-) strand; PAM type: NNNNGHTT; PAM sequence: ATGGGTTT
  source 1..20: mol_type = other DNA
ggcactatatcctttaacaa

SEQ ID NO: 6331 - DNA, 20 bp, synthetic construct
  misc_feature 1..20: note = Description of Artificial Sequence: Synthetic oligonucleotide
  misc_feature 1..20: note = Target: ANGPTL3; (-) strand; PAM type: NNNNGHTT; PAM sequence: TTAGGATT
  source 1..20: mol_type = other DNA
ttctggaacaaaatatttac

SEQ ID NO: 6332 - DNA, 20 bp, synthetic construct
  misc_feature 1..20: note = Description of Artificial Sequence: Synthetic oligonucleotide
  misc_feature 1..20: note = Target: ANGPTL3; (-) strand; PAM type: NNNNGHTT; PAM sequence: TATAGATT
  source 1..20: mol_type = other DNA
tagtctgtggtcctgaaaat

SEQ ID NO: 6333 - DNA, 20 bp, synthetic construct
  misc_feature 1..20: note = Description of Artificial Sequence: Synthetic oligonucleotide
  misc_feature 1..20: note = Target: ANGPTL3; (-) strand; PAM type: NNNNGHTT; PAM sequence: GACAGCTT
  source 1..20: mol_type = other DNA
aaaaaatcagcgttaatttc

SEQ ID NO: 6334 - DNA, 20 bp, synthetic construct
  misc_feature 1..20: note = Description of Artificial Sequence: Synthetic oligonucleotide
  misc_feature 1..20: note = Target: ANGPTL3; (-) strand; PAM type: NNNNGHTT; PAM sequence: GAGAGTTT
  source 1..20: mol_type = other DNA
caaaatgaaacatgtcctat

SEQ ID NO: 6335 - DNA, 20 bp, synthetic construct
  misc_feature 1..20: note = Description of Artificial Sequence: Synthetic oligonucleotide
  misc_feature 1..20: note = Target: ANGPTL3; (-) strand; PAM type: NNNNGHTT; PAM sequence: AAAAGCTT
  source 1..20: mol_type = other DNA
gaagtatctttctggtagaa

SEQ ID NO: 6336 - DNA, 20 bp, synthetic construct
  misc_feature 1..20: note = Description of Artificial Sequence: Synthetic oligonucleotide
  misc_feature 1..20: note = Target: ANGPTL3; (-) strand; PAM type: NNNNGHTT; PAM sequence: CTTAGATT
  source 1..20: mol_type = other DNA
agagatcaaaggggattaga

SEQ ID NO: 6337 - DNA, 20 bp, synthetic construct
  misc_feature 1..20: note = Description of Artificial Sequence: Synthetic oligonucleotide
  misc_feature 1..20: note = Target: ANGPTL3; (-) strand; PAM type: NNNNGHTT; PAM sequence: AGGGGATT
  source 1..20: mol_type = other DNA
aaggtagtctgagagatcaa

SEQ ID NO: 6338 - DNA, 20 bp, synthetic construct
  misc_feature 1..20: note = Description of Artificial Sequence: Synthetic oligonucleotide
  misc_feature 1..20: note = Target: ANGPTL3; (-) strand; PAM type: NNNNGHTT; PAM sequence: TCAAGTTT
  source 1..20: mol_type = other DNA
ttgtgaaagcaaaatgaagg

SEQ ID NO: 6339 - DNA, 20 bp, synthetic construct
  misc_feature 1..20: note = Description of Artificial Sequence: Synthetic oligonucleotide
  misc_feature 1..20: note = Target: ANGPTL3; (-) strand; PAM type: NNNNGHTT; PAM sequence: GATGGATT
  source 1..20: mol_type = other DNA
gaaaggaatagggttataaa

SEQ ID NO: 6340 - DNA, 20 bp, synthetic construct
  misc_feature 1..20: note = Description of Artificial Sequence: Synthetic oligonucleotide
  misc_feature 1..20: note = Target: ANGPTL3; (-) strand; PAM type: NNNNGHTT; PAM sequence: AGATGATT
  source 1..20: mol_type = other DNA
tctgagggtcagtgtagaaa

SEQ ID NO: 6341 - DNA, 20 bp, synthetic construct
  misc_feature 1..20: note = Description of Artificial Sequence: Synthetic oligonucleotide
  misc_feature 1..20: note = Target: ANGPTL3; (-) strand; PAM type: NNNNGHTT; PAM sequence: TGTAGATT
  source 1..20: mol_type = other DNA
aaagagacttgggatgaata

SEQ ID NO: 6342 - DNA, 20 bp, synthetic construct
  misc_feature 1..20: note = Description of Artificial Sequence: Synthetic oligonucleotide
  misc_feature 1..20: note = Target: ANGPTL3; (-) strand; PAM type: NNNNGHTT; PAM sequence: CTGGGATT
  source 1..20: mol_type = other DNA
tgcctcagcctcccaaagtc

SEQ ID NO: 6343 - DNA, 20 bp, synthetic construct
  misc_feature 1..20: note = Description of Artificial Sequence: Synthetic oligonucleotide
  misc_feature 1..20: note = Target: ANGPTL3; (-) strand; PAM type: NNNNGHTT; PAM sequence: CGGGGTTT
  source 1..20: mol_type = other DNA
ttttgtattttaggtagaga

SEQ ID NO: 6344 - DNA, 20 bp, synthetic construct
  misc_feature 1..20: note = Description of Artificial Sequence: Synthetic oligonucleotide
  misc_feature 1..20: note = Target: ANGPTL3; (-) strand; PAM type: NNNNGHTT; PAM sequence: AAGCGATT
  source 1..20: mol_type = other DNA
aacctccgcctcctgggttc

SEQ ID NO: 6345 - DNA, 20 bp, synthetic construct
  misc_feature 1..20: note = Description of Artificial Sequence: Synthetic oligonucleotide
  misc_feature 1..20: note = Target: ANGPTL3; (-) strand; PAM type: NNNNGHTT; PAM sequence: CCAGGCTT
  source 1..20: mol_type = other DNA
ccagagatgtcttccgggtt

SEQ ID NO: 6346 - DNA, 20 bp, synthetic construct
  misc_feature 1..20: note = Description of Artificial Sequence: Synthetic oligonucleotide
  misc_feature 1..20: note = Target: ANGPTL3; (-) strand; PAM type: NNNNGHTT; PAM sequence: GGTAGTTT
  source 1..20: mol_type = other DNA
gtggcttatgatacaaaaga

SEQ ID NO: 6347 - DNA, 20 bp, synthetic construct
  misc_feature 1..20: note = Description of Artificial Sequence: Synthetic oligonucleotide
  misc_feature 1..20: note = Target: ANGPTL3; (-) strand; PAM type: NNNNGHTT; PAM sequence: GGTGGCTT
  source 1..20: mol_type = other DNA
gagaagattgtattgaactt

SEQ ID NO: 6348 - DNA, 20 bp, synthetic construct
  misc_feature 1..20: note = Description of Artificial Sequence: Synthetic oligonucleotide
  misc_feature 1..20: note = Target: ANGPTL3; (-) strand; PAM type: NNNNGHTT; PAM sequence: AGAAGATT
  source 1..20: mol_type = other DNA
agattaagagacgtttcaag

SEQ ID NO: 6349 - DNA, 20 bp, synthetic construct
  misc_feature 1..20: note = Description of Artificial Sequence: Synthetic oligonucleotide
  misc_feature 1..20: note = Target: ANGPTL3; (-) strand; PAM type: NNNNGHTT; PAM sequence: AGACGTTT
  source 1..20: mol_type = other DNA
agaaagcttataagattaag

SEQ ID NO: 6350 - DNA, 20 bp, synthetic construct
  misc_feature 1..20: note = Description of Artificial Sequence: Synthetic oligonucleotide
  misc_feature 1..20: note = Target: ANGPTL3; (-) strand; PAM type: NNNNGHTT; PAM sequence: ATAAGATT
  source 1..20: mol_type = other DNA
gtctttggggaagaaagctt

SEQ ID NO: 6351 - DNA, 20 bp, synthetic construct
  misc_feature 1..20: note = Description of Artificial Sequence: Synthetic oligonucleotide
  misc_feature 1..20: note = Target: ANGPTL3; (-) strand; PAM type: NNNNGHTT; PAM sequence: GAAAGCTT
  source 1..20: mol_type = other DNA
taaagacagtctttggggaa

SEQ ID NO: 6352 - DNA, 20 bp, synthetic construct
  misc_feature 1..20: note = Description of Artificial Sequence: Synthetic oligonucleotide
  misc_feature 1..20: note = Target: ANGPTL3; (-) strand; PAM type: NNNNGHTT; PAM sequence: GGAAGATT
  source 1..20: mol_type = other DNA
gccattacaaattccttttc

SEQ ID NO: 6353 - DNA, 20 bp, synthetic construct
  misc_feature 1..20: note = Description of Artificial Sequence: Synthetic oligonucleotide
  misc_feature 1..20: note = Target: ANGPTL3; (-) strand; PAM type: NNNNGHTT; PAM sequence: ATGAGCTT
  source 1..20: mol_type = other DNA
ctgttacacttcttcagtag

SEQ ID NO: 6354 - DNA, 20 bp, synthetic construct
  misc_feature 1..20: note = Description of Artificial Sequence: Synthetic oligonucleotide
  misc_feature 1..20: note = Target: ANGPTL3; (-) strand; PAM type: NNNNGHTT; PAM sequence: ATTTGTTT
  source 1..20: mol_type = other DNA
taactccagacaataaaagg

SEQ ID NO: 6355 - DNA, 20 bp, synthetic construct
  misc_feature 1..20: note = Description of Artificial Sequence: Synthetic oligonucleotide
  misc_feature 1..20: note = Target: ANGPTL3; (-) strand; PAM type: NNNNGHTT; PAM sequence: AAAGGATT
  source 1..20: mol_type = other DNA
tcctgtaactccagacaata

SEQ ID NO: 6356 - DNA, 20 bp, synthetic construct
  misc_feature 1..20: note = Description of Artificial Sequence: Synthetic oligonucleotide
  misc_feature 1..20: note = Target: ANGPTL3; (-) strand; PAM type: NNNNGHTT; PAM sequence: ATAAGATT
  source 1..20: mol_type = other DNA
agatttaagctaagatccca

SEQ ID NO: 6357 - DNA, 20 bp, synthetic construct
  misc_feature 1..20: note = Description of Artificial Sequence: Synthetic oligonucleotide
  misc_feature 1..20: note = Target: ANGPTL3; (-) strand; PAM type: NNNNGHTT; PAM sequence: CTAAGATT
  source 1..20: mol_type = other DNA
tgcaattttaaagtaaaatt

SEQ ID NO: 6358 - DNA, 20 bp, synthetic construct
  misc_feature 1..20: note = Description of Artificial Sequence: Synthetic oligonucleotide
  misc_feature 1..20: note = Target: ANGPTL3; (-) strand; PAM type: NNNNGHTT; PAM sequence: GATAGATT
  source 1..20: mol_type = other DNA
tgagccactgcaggcatgaa

SEQ ID NO: 6359 - DNA, 20 bp, synthetic construct
  misc_feature 1..20: note = Description of Artificial Sequence: Synthetic oligonucleotide
  misc_feature 1..20: note = Target: ANGPTL3; (-) strand; PAM type: NNNNGHTT; PAM sequence: CTTGGATT
  source 1..20: mol_type = other DNA
cgccccggcctcccaaaata

SEQ ID NO: 6360 - DNA, 20 bp, synthetic construct
  misc_feature 1..20: note = Description of Artificial Sequence: Synthetic oligonucleotide
  misc_feature 1..20: note = Target: ANGPTL3; (-) strand; PAM type: NNNNGHTT; PAM sequence: TGGAGTTT
  source 1..20: mol_type = other DNA
ttttgtattttttgtagagg

SEQ ID NO: 6361 - DNA, 20 bp, synthetic construct
  misc_feature 1..20: note = Description of Artificial Sequence: Synthetic oligonucleotide
  misc_feature 1..20: note = Target: ANGPTL3; (-) strand; PAM type: NNNNGHTT; PAM sequence: TTGGGATT
  source 1..20: mol_type = other DNA
tgcctcagcctcccaagtag

SEQ ID NO: 6362 - DNA, 20 bp, synthetic construct
  misc_feature 1..20: note = Description of Artificial Sequence: Synthetic oligonucleotide
  misc_feature 1..20: note = Target: ANGPTL3; (-) strand; PAM type: NNNNGHTT; PAM sequence: CAGCGATT
  source 1..20: mol_type = other DNA
aggcttgacttcccaggctc

SEQ ID NO: 6363 - DNA, 20 bp, synthetic construct
  misc_feature 1..20: note = Description of Artificial Sequence: Synthetic oligonucleotide
  misc_feature 1..20: note = Target: ANGPTL3; (-) strand; PAM type: NNNNGHTT; PAM sequence: GCAGGCTT
  source 1..20: mol_type = other DNA
tgttaggatcatggttcgct

SEQ ID NO: 6364 - DNA, 20 bp, synthetic construct
  misc_feature 1..20: note = Description of Artificial Sequence: Synthetic oligonucleotide
  misc_feature 1..20: note = Target: ANGPTL3; (-) strand; PAM type: NNNNGHTT; PAM sequence: TGAAGATT
  source 1..20: mol_type = other DNA
gggaaataaatatttttata

SEQ ID NO: 6365 - DNA, 20 bp, synthetic construct
  misc_feature 1..20: note = Description of Artificial Sequence: Synthetic oligonucleotide
  misc_feature 1..20: note = Target: ANGPTL3; (-) strand; PAM type: NNNNGHTT; PAM sequence: TTTGGATT
  source 1..20: mol_type = other DNA
ttttgaaaacctggaaggat

SEQ ID NO: 6366 - DNA, 20 bp, synthetic construct
  misc_feature 1..20: note = Description of Artificial Sequence: Synthetic oligonucleotide
  misc_feature 1..20: note = Target: ANGPTL3; (-) strand; PAM type: NNNNGHTT; PAM sequence: GAAGGATT
  source 1..20: mol_type = other DNA
tagagacttttgaaaacctg

SEQ ID NO: 6367 - DNA, 20 bp, synthetic construct
  misc_feature 1..20: note = Description of Artificial Sequence: Synthetic oligonucleotide
  misc_feature 1..20: note = Target: ANGPTL3; (-) strand; PAM type: NNNNGHTT; PAM sequence: GAAGGTTT
  source 1..20: mol_type = other DNA
agatcgttttgatgagagca

SEQ ID NO: 6368 - DNA, 20 bp, synthetic construct
  misc_feature 1..20: note = Description of Artificial Sequence: Synthetic oligonucleotide
  misc_feature 1..20: note = Target: ANGPTL3; (-) strand; PAM type: NNNNGHTT; PAM sequence: GATCGTTT
  source 1..20: mol_type = other DNA
agaggagatgtttaaaagta

SEQ ID NO: 6369 - DNA, 20 bp, synthetic construct
  misc_feature 1..20: note = Description of Artificial Sequence: Synthetic oligonucleotide
  misc_feature 1..20: note = Target: ANGPTL3; (-) strand; PAM type: NNNNGHTT; PAM sequence: AGATGTTT
  source 1..20: mol_type = other DNA
acattaggaaggcatagagg

SEQ ID NO: 6370 - DNA, 20 bp, synthetic construct
  misc_feature 1..20: note = Description of Artificial Sequence: Synthetic oligonucleotide
  misc_feature 1..20: note = Target: ANGPTL3; (-) strand; PAM type: NNNNGHTT; PAM sequence: TGTGGTTT
  source 1..20: mol_type = other DNA
gtgtatggacagtaattctg

SEQ ID NO: 6371 - DNA, 20 bp, synthetic construct
  misc_feature 1..20: note = Description of Artificial Sequence: Synthetic oligonucleotide
  misc_feature 1..20: note = Target: ANGPTL3; (-) strand; PAM type: NNNNGHTT; PAM sequence: TTATGATT
  source 1..20: mol_type = other DNA
atttttcagaatttttatta

SEQ ID NO: 6372 - DNA, 20 bp, synthetic construct
  misc_feature 1..20: note = Description of Artificial Sequence: Synthetic oligonucleotide
  misc_feature 1..20: note = Target: ANGPTL3; (-) strand; PAM type: NNNNGHTT; PAM sequence: TGGAGCTT
  source 1..20: mol_type = other DNA
ctgactatctttgatgcttt

SEQ ID NO: 6373 - DNA, 20 bp, synthetic construct
  misc_feature 1..20: note = Description of Artificial Sequence: Synthetic oligonucleotide
  misc_feature 1..20: note = Target: ANGPTL3; (-) strand; PAM type: NNNNGHTT; PAM sequence: TGATGCTT
  source 1..20: mol_type = other DNA
tcaggtaaactgactatctt

SEQ ID NO: 6374 - DNA, 20 bp, synthetic construct
  misc_feature 1..20: note = Description of Artificial Sequence: Synthetic oligonucleotide
  misc_feature 1..20: note = Target: ANGPTL3; (-) strand; PAM type: NNNNGHTT; PAM sequence: CTTGGTTT
  source 1..20: mol_type = other DNA
cataatgagacatgtgtgta

SEQ ID NO: 6375 - DNA, 20 bp, synthetic construct
  misc_feature 1..20: note = Description of Artificial Sequence: Synthetic oligonucleotide
  misc_feature 1..20: note = Target: ANGPTL3; (-) strand; PAM type: NNNNGHTT; PAM sequence: ACTAGATT
  source 1..20: mol_type = other DNA
atggaaatagattatactac

SEQ ID NO: 6376 - DNA, 20 bp, synthetic construct
  misc_feature 1..20: note = Description of Artificial Sequence: Synthetic oligonucleotide
  misc_feature 1..20: note = Target: ANGPTL3; (-) strand; PAM type: NNNNGHTT; PAM sequence: AATAGATT
  source 1..20: mol_type = other DNA
aggatgacagagtgtatgga

SEQ ID NO: 6377 - DNA, 20 bp, synthetic construct
  misc_feature 1..20: note = Description of Artificial Sequence: Synthetic oligonucleotide
  misc_feature 1..20: note = Target: ANGPTL3; (-) strand; PAM type: NNNNGHTT; PAM sequence: TGCTGATT
  source 1..20: mol_type = other DNA
aagatacaagcatgaaaata

SEQ ID NO: 6378 - DNA, 20 bp, synthetic construct
  misc_feature 1..20: note = Description of Artificial Sequence: Synthetic oligonucleotide
  misc_feature 1..20: note = Target: ANGPTL3; (-) strand; PAM type: NNNNGHTT; PAM sequence: TGTTGTTT
  source 1..20: mol_type = other DNA
aatagtagatgctcaataag

SEQ ID NO: 6379 - DNA, 20 bp, synthetic construct
  misc_feature 1..20: note = Description of Artificial Sequence: Synthetic oligonucleotide
  misc_feature 1..20: note = Target: ANGPTL3; (-) strand; PAM type: NNNNGHTT; PAM sequence: ATATGTTT
  source 1..20: mol_type = other DNA
tatatgagtacaaatttgga

SEQ ID NO: 6380 - DNA, 20 bp, synthetic construct
  misc_feature 1..20: note = Description of Artificial Sequence: Synthetic oligonucleotide
  misc_feature 1..20: note = Target: ANGPTL3; (-) strand; PAM type: NNNNGHTT; PAM sequence: ATTTGATT
  source 1..20: mol_type = other DNA
gggaaaaaaatcacaaggaa

SEQ ID NO: 6381 - DNA, 20 bp, synthetic construct
  misc_feature 1..20: note = Description of Artificial Sequence: Synthetic oligonucleotide
  misc_feature 1..20: note = Target: ANGPTL3; (-) strand; PAM type: NNNNGHTT; PAM sequence: CAGAGTTT
  source 1..20: mol_type = other DNA
cagtagtacatacataagtg

SEQ ID NO: 6382 - DNA, 20 bp, synthetic construct
  misc_feature 1..20: note = Description of Artificial Sequence: Synthetic oligonucleotide
  misc_feature 1..20: note = Target: ANGPTL3; (-) strand; PAM type: NNNNGHTT; PAM sequence: CTGTGTTT
  source 1..20: mol_type = other DNA
tcttttcatttttaaaactg

SEQ ID NO: 6383 - DNA, 20 bp, synthetic construct
  misc_feature 1..20: note = Description of Artificial Sequence: Synthetic oligonucleotide
  misc_feature 1..20: note = Target: ANGPTL3; (-) strand; PAM type: NNNNGHTT; PAM sequence: AGTTGATT
  source 1..20: mol_type = other DNA
cagttaagtaattttaccct

SEQ ID NO: 6384 - DNA, 20 bp, synthetic construct
  misc_feature 1..20: note = Description of Artificial Sequence: Synthetic oligonucleotide
  misc_feature 1..20: note = Target: ANGPTL3; (-) strand; PAM type: NNNNGHTT; PAM sequence: AGAGGATT
  source 1..20: mol_type = other DNA
attttattaagggttataat

SEQ ID NO: 6385 - DNA, 20 bp, synthetic construct
  misc_feature 1..20: note = Description of Artificial Sequence: Synthetic oligonucleotide
  misc_feature 1..20: note = Target: ANGPTL3; (-) strand; PAM type: NNNNGHTT; PAM sequence: TTAAGTTT
  source 1..20: mol_type = other DNA
ttgtattttagatagaattc

SEQ ID NO: 6386 - DNA, 20 bp, synthetic construct
  misc_feature 1..20: note = Description of Artificial Sequence: Synthetic oligonucleotide
  misc_feature 1..20: note = Target: ANGPTL3; (-) strand; PAM type: NNNNGHTT; PAM sequence: TGAGGTTT
  source 1..20: mol_type = other DNA
catctattgggtgtggaaac

SEQ ID NO: 6387 - DNA, 20 bp, synthetic construct
  misc_feature 1..20: note = Description of Artificial Sequence: Synthetic oligonucleotide
  misc_feature 1..20: note = Target: ANGPTL3; (-) strand; PAM type: NNNNGHTT; PAM sequence: ACAGGATT
  source 1..20: mol_type = other DNA
atgaagtattaatagatttg

SEQ ID NO: 6388 - DNA, 20 bp, synthetic construct
  misc_feature 1..20: note = Description of Artificial Sequence: Synthetic oligonucleotide
  misc_feature 1..20: note = Target: ANGPTL3; (-) strand; PAM type: NNNNGHTT; PAM sequence: AATAGATT
  source 1..20: mol_type = other DNA
ttacaatcccatgaagtatt

SEQ ID NO: 6389 - DNA, 20 bp, synthetic construct
  misc_feature 1..20: note = Description of Artificial Sequence: Synthetic oligonucleotide
  misc_feature 1..20: note = Target: ANGPTL3; (-) strand; PAM type: NNNNGHTT; PAM sequence: TGATGATT
  source 1..20: mol_type = other DNA
ttcaaatacattatctggct

SEQ ID NO: 6390 - DNA, 20 bp, synthetic construct
  misc_feature 1..20: note = Description of Artificial Sequence: Synthetic oligonucleotide
  misc_feature 1..20: note = Target: ANGPTL3; (-) strand; PAM type: NNNNGHTT; PAM sequence: TCTGGCTT
  source 1..20: mol_type = other DNA
aaagctattcaaatacatta

SEQ ID NO: 6391 - DNA, 20 bp, synthetic construct
  misc_feature 1..20: note = Description of Artificial Sequence: Synthetic oligonucleotide
  misc_feature 1..20: note = Target: ANGPTL3; (-) strand; PAM type: NNNNGHTT; PAM sequence: ATTTGTTT
  source 1..20: mol_type = other DNA
tgtttttaaaaagtatatac

SEQ ID NO: 6392 - DNA, 20 bp, synthetic construct
  misc_feature 1..20: note = Description of Artificial Sequence: Synthetic oligonucleotide
  misc_feature 1..20: note = Target: ANGPTL3; (-) strand; PAM type: NNNNGHTT; PAM sequence: ACCTGTTT
  source 1..20: mol_type = other DNA
gtgaaaaatgacacggaaga

SEQ ID NO: 6393 - DNA, 20 bp, synthetic construct
  misc_feature 1..20: note = Description of Artificial Sequence: Synthetic oligonucleotide
  misc_feature 1..20: note = Target: ANGPTL3; (-) strand; PAM type: NNNNGHTT; PAM sequence: TAGAGATT
  source 1..20: mol_type = other DNA
gttcagttaggaagcgtttg

SEQ ID NO: 6394 - DNA, 20 bp, synthetic construct
  misc_feature 1..20: note = Description of Artificial Sequence: Synthetic oligonucleotide
  misc_feature 1..20: note = Target: ANGPTL3; (-) strand; PAM type: NNNNGHTT; PAM sequence: AAGCGTTT
  source 1..20: mol_type = other DNA
ttataatatgttcagttagg

SEQ ID NO: 6395 - DNA, 20 bp, synthetic construct
  misc_feature 1..20: note = Description of Artificial Sequence: Synthetic oligonucleotide
  misc_feature 1..20: note = Target: ANGPTL3; (-) strand; PAM type: NNNNGHTT; PAM sequence: GGCAGTTT
  source 1..20: mol_type = other DNA
cagatgcaaactctgagaag

SEQ ID NO: 6396 - DNA, 20 bp, synthetic construct
  misc_feature 1..20: note = Description of Artificial Sequence: Synthetic oligonucleotide
  misc_feature 1..20: note = Target: ANGPTL3; (-) strand; PAM type: NNNNGHTT; PAM sequence: CTTAGATT
  source 1..20: mol_type = other DNA
tgaaggtgatggagtgttat

SEQ ID NO: 6397 - DNA, 20 bp, synthetic construct
  misc_feature 1..20: note = Description of Artificial Sequence: Synthetic oligonucleotide
  misc_feature 1..20: note = Target: ANGPTL3; (-) strand; PAM type: NNNNGHTT; PAM sequence: AGGGGCTT
  source 1..20: mol_type = other DNA
ccacccagaagtttttagtt

SEQ ID NO: 6398 - DNA, 20 bp, synthetic construct
  misc_feature 1..20: note = Description of Artificial Sequence: Synthetic oligonucleotide
  misc_feature 1..20: note = Target: ANGPTL3; (-) strand; PAM type: NNNNGHTT; PAM sequence: AGAAGTTT
  source 1..20: mol_type = other DNA
acattttaacatagccaccc

SEQ ID NO: 6399 - DNA, 20 bp, synthetic construct
  misc_feature 1..20: note = Description of Artificial Sequence: Synthetic oligonucleotide
  misc_feature 1..20: note = Target: ANGPTL3; (-) strand; PAM type: NNNNGHTT; PAM sequence: CCTAGTTT
  source 1..20: mol_type = other DNA
ttttattctatcgaattggt

SEQ ID NO: 6400 - DNA, 20 bp, synthetic construct
  misc_feature 1..20: note = Description of Artificial Sequence: Synthetic oligonucleotide
  misc_feature 1..20: note = Target: ANGPTL3; (-) strand; PAM type: NNNNGHTT; PAM sequence: CTGAGTTT
  source 1..20: mol_type = other DNA
tttgtccttgttataccact

SEQ ID NO: 6401 - DNA, 20 bp, synthetic construct
  misc_feature 1..20: note = Description of Artificial Sequence: Synthetic oligonucleotide
  misc_feature 1..20: note = Target: ANGPTL3; (-) strand; PAM type: NNNNGHTT; PAM sequence: TTTGGTTT
  source 1..20: mol_type = other DNA
actgccacatactctgctat

SEQ ID NO: 6402 - DNA, 20 bp, synthetic construct
  misc_feature 1..20: note = Description of Artificial Sequence: Synthetic oligonucleotide
  misc_feature 1..20: note = Target: ANGPTL3; (-) strand; PAM type: NNNNGHTT; PAM sequence: TTTTGTTT
  source 1..20: mol_type = other DNA
ctgcttcagaaagtattggt

SEQ ID NO: 6403 - DNA, 20 bp, synthetic construct
  misc_feature 1..20: note = Description of Artificial Sequence: Synthetic oligonucleotide
  misc_feature 1..20: note = Target: ANGPTL3; (-) strand; PAM type: NNNNGHTT; PAM sequence: ATTGGTTT
  source 1..20: mol_type = other DNA
ggttctctgcttcagaaagt

SEQ ID NO: 6404 - DNA, 20 bp, synthetic construct
  misc_feature 1..20: note = Description of Artificial Sequence: Synthetic oligonucleotide
  misc_feature 1..20: note = Target: ANGPTL3; (-) strand; PAM type: NNNNGHTT; PAM sequence: CTCTGCTT
  source 1..20: mol_type = other DNA
ttctattcaagtgtatggtt

SEQ ID NO: 6405 - DNA, 20 bp, synthetic construct
  misc_feature 1..20: note = Description of Artificial Sequence: Synthetic oligonucleotide
  misc_feature 1..20: note = Target: ANGPTL3; (-) strand; PAM type: NNNNGHTT; PAM sequence: GTTGGTTT
  source 1..20: mol_type = other DNA
atactggtaatactgctgtg

SEQ ID NO: 6406 - DNA, 20 bp, synthetic construct
  misc_feature 1..20: note = Description of Artificial Sequence: Synthetic oligonucleotide
  misc_feature 1..20: note = Target: ANGPTL3; (-) strand; PAM type: NNNNGHTT; PAM sequence: GTATGTTT
  source 1..20: mol_type = other DNA
taataataataatagtaaat

SEQ ID NO: 6407 - DNA, 20 bp, synthetic construct
  misc_feature 1..20: note = Description of Artificial Sequence: Synthetic oligonucleotide
  misc_feature 1..20: note = Target: ANGPTL3; (-) strand; PAM type: NNNNGHTT; PAM sequence: ACATGTTT
  source 1..20: mol_type = other DNA
tactataaagacacatgcac

SEQ ID NO: 6408 - DNA, 20 bp, synthetic construct
  misc_feature 1..20: note = Description of Artificial Sequence: Synthetic oligonucleotide
  misc_feature 1..20: note = Target: ANGPTL3; (-) strand; PAM type: NNNNGHTT; PAM sequence: AAAGGATT
  source 1..20: mol_type = other DNA
ccattattgggtatatattc

SEQ ID NO: 6409 - DNA, 20 bp, synthetic construct
  misc_feature 1..20: note = Description of Artificial Sequence: Synthetic oligonucleotide
  misc_feature 1..20: note = Target: ANGPTL3; (-) strand; PAM type: NNNNGHTT; PAM sequence: TGGCGATT
  source 1..20: mol_type = other DNA
aaccattgtggaagacagtg

SEQ ID NO: 6410 - DNA, 20 bp, synthetic construct
  misc_feature 1..20: note = Description of Artificial Sequence: Synthetic oligonucleotide
  misc_feature 1..20: note = Target: ANGPTL3; (-) strand; PAM type: NNNNGHTT; PAM sequence: GTATGTTT
  source 1..20: mol_type = other DNA
tagttgtgatataaaaatat

SEQ ID NO: 6411 - DNA, 20 bp, synthetic construct
  misc_feature 1..20: note = Description of Artificial Sequence: Synthetic oligonucleotide
  misc_feature 1..20: note = Target: ANGPTL3; (+) strand; PAM type: NNNNGHTT; PAM sequence: TATTGTTT
  source 1..20: mol_type = other DNA
aatgacaaactgaaaaaatc

SEQ ID NO: 6412 - DNA, 20 bp, synthetic construct
  misc_feature 1..20: note = Description of Artificial Sequence: Synthetic oligonucleotide
  misc_feature 1..20: note = Target: ANGPTL3; (+) strand; PAM type: NNNNGHTT; PAM sequence: AGATGATT
  source 1..20: mol_type = other DNA
agcaaattatgtacataacc

SEQ ID NO: 6413 - DNA, 20 bp, synthetic construct
  misc_feature 1..20: note = Description of Artificial Sequence: Synthetic oligonucleotide
  misc_feature 1..20: note = Target: ANGPTL3; (+) strand; PAM type: NNNNGHTT; PAM sequence: ATTAGATT
  source 1..20: mol_type = other DNA
aactagatatatacttgtct

SEQ ID NO: 6414 - DNA, 20 bp, synthetic construct
  misc_feature 1..20: note = Description of Artificial Sequence: Synthetic oligonucleotide
  misc_feature 1..20: note = Target: ANGPTL3; (+) strand; PAM type: NNNNGHTT; PAM sequence: TACTGTTT
  source 1..20: mol_type = other DNA
ataaaagcattttctataca

SEQ ID NO: 6415 - DNA, 20 bp, synthetic construct
  misc_feature 1..20: note = Description of Artificial Sequence: Synthetic oligonucleotide
  misc_feature 1..20: note = Target: ANGPTL3; (+) strand; PAM type: NNNNGHTT; PAM sequence: AAATGATT
  source 1..20: mol_type = other DNA
ataattagaaaattggaaac

SEQ ID NO: 6416 - DNA, 20 bp, synthetic construct
  misc_feature 1..20: note = Description of Artificial Sequence: Synthetic oligonucleotide
  misc_feature 1..20: note = Target: ANGPTL3; (+) strand; PAM type: NNNNGHTT; PAM sequence: GGCTGATT
  source 1..20: mol_type = other DNA
gaaacaaatgattaaaaggg

SEQ ID NO: 6417 - DNA, 20 bp, synthetic construct
  misc_feature 1..20: note = Description of Artificial Sequence: Synthetic oligonucleotide
  misc_feature 1..20: note = Target: ANGPTL3; (+) strand; PAM type: NNNNGHTT; PAM sequence: ACAGGATT
  source 1..20: mol_type = other DNA
aattaaggttcatctatata

SEQ ID NO: 6418 - DNA, 20 bp, synthetic construct
  misc_feature 1..20: note = Description of Artificial Sequence: Synthetic oligonucleotide
  misc_feature 1..20: note = Target: ANGPTL3; (+) strand; PAM type: NNNNGHTT; PAM sequence: TTATGTTT
  source 1..20: mol_type = other DNA
cccacttgtgttataaaaaa

SEQ ID NO: 6419 - DNA, 20 bp, synthetic construct
  misc_feature 1..20: note = Description of Artificial Sequence: Synthetic oligonucleotide
  misc_feature 1..20: note = Target: ANGPTL3; (+) strand; PAM type: NNNNGHTT; PAM sequence: TCGAGATT
  source 1..20: mol_type = other DNA
gacccaaaatgttaatagag

SEQ ID NO: 6420 - DNA, 20 bp, synthetic construct
  misc_feature 1..20: note = Description of Artificial Sequence: Synthetic oligonucleotide
  misc_feature 1..20: note = Target: ANGPTL3; (+) strand; PAM type: NNNNGHTT; PAM sequence: ATAGGTTT
  source 1..20: mol_type = other DNA
agtcgagatttttatttttt

SEQ ID NO: 6421 - DNA, 20 bp, synthetic construct
  misc_feature 1..20: note = Description of Artificial Sequence: Synthetic oligonucleotide
  misc_feature 1..20: note = Target: ANGPTL3; (+) strand; PAM type: NNNNGHTT; PAM sequence: TCACGCTT
  source 1..20: mol_type = other DNA
tcttagctgggcatggtggc

SEQ ID NO: 6422 - DNA, 20 bp, synthetic construct
  misc_feature 1..20: note = Description of Artificial Sequence: Synthetic oligonucleotide
  misc_feature 1..20: note = Target: ANGPTL3; (+) strand; PAM type: NNNNGHTT; PAM sequence: CCAGGCTT
  source 1..20: mol_type = other DNA
actaaaaatacaaaaattag

SEQ ID NO: 6423 - DNA, 20 bp, synthetic construct
  misc_feature 1..20: note = Description of Artificial Sequence: Synthetic oligonucleotide
  misc_feature 1..20: note = Target: ANGPTL3; (+) strand; PAM type: NNNNGHTT; PAM sequence: AATCGCTT
  source 1..20: mol_type = other DNA
tcgggaagctgagacaggag

SEQ ID NO: 6424 - DNA, 20 bp, synthetic construct
  misc_feature 1..20: note = Description of Artificial Sequence: Synthetic oligonucleotide
  misc_feature 1..20: note = Target: ANGPTL3; (+) strand; PAM type: NNNNGHTT; PAM sequence: ATAAGATT
  source 1..20: mol_type = other DNA
tatttgaaagacatatctcc

SEQ ID NO: 6425 - DNA, 20 bp, synthetic construct
  misc_feature 1..20: note = Description of Artificial Sequence: Synthetic oligonucleotide
  misc_feature 1..20: note = Target: ANGPTL3; (+) strand; PAM type: NNNNGHTT; PAM sequence: CTTTGCTT
  source 1..20: mol_type = other DNA
acctcgtgtaggataaagga

SEQ ID NO: 6426 - DNA, 20 bp, synthetic construct
  misc_feature 1..20: note = Description of Artificial Sequence: Synthetic oligonucleotide
  misc_feature 1..20: note = Target: ANGPTL3; (+) strand; PAM type: NNNNGHTT; PAM sequence: CTTTGCTT
  source 1..20: mol_type = other DNA
gtgtaggataaaggactttg

SEQ ID NO: 6427 - DNA, 20 bp, synthetic construct
  misc_feature 1..20: note = Description of Artificial Sequence: Synthetic oligonucleotide
  misc_feature 1..20: note = Target: ANGPTL3; (+) strand; PAM type: NNNNGHTT; PAM sequence: ATTTGCTT
  source 1..20: mol_type = other DNA
atccttaaattaggccctac

SEQ ID NO: 6428 - DNA, 20 bp, synthetic construct
  misc_feature 1..20: note = Description of Artificial Sequence: Synthetic oligonucleotide
  misc_feature 1..20: note = Target: ANGPTL3; (+) strand; PAM type: NNNNGHTT; PAM sequence: ACAAGTTT
  source 1..20: mol_type = other DNA
attaggccctacatttgctt

SEQ ID NO: 6429 - DNA, 20 bp, synthetic construct
  misc_feature 1..20: note = Description of Artificial Sequence: Synthetic oligonucleotide
  misc_feature 1..20: note = Target: ANGPTL3; (+) strand; PAM type: NNNNGHTT; PAM sequence: TTTAGTTT
  source 1..20: mol_type = other DNA
ttttccttggcataaaattt

SEQ ID NO: 6430 - DNA, 20 bp, synthetic construct
  misc_feature 1..20: note = Description of Artificial Sequence: Synthetic oligonucleotide
  misc_feature 1..20: note = Target: ANGPTL3; (+) strand; PAM type: NNNNGHTT; PAM sequence: ATCAGATT
  source 1..20: mol_type = other DNA
aggcacaagttcaagcaaag

SEQ ID NO: 6431 - DNA, 20 bp, synthetic construct
  misc_feature 1..20: note = Description of Artificial Sequence: Synthetic oligonucleotide
  misc_feature 1..20: note = Target: ANGPTL3; (+) strand; PAM type: NNNNGHTT; PAM sequence: TTCTGCTT
  source 1..20: mol_type = other DNA
aagttcaagcaaagatcaga

SEQ ID NO: 6432 - DNA, 20 bp, synthetic construct
  misc_feature 1..20: note = Description of Artificial Sequence: Synthetic oligonucleotide
  misc_feature 1..20: note = Target: ANGPTL3; (+) strand; PAM type: NNNNGHTT; PAM sequence: AAATGCTT
  source 1..20: mol_type = other DNA
caatgcattttcccacgttg

SEQ ID NO: 6433 - DNA, 20 bp, synthetic construct
  misc_feature 1..20: note = Description of Artificial Sequence: Synthetic oligonucleotide
  misc_feature 1..20: note = Target: ANGPTL3; (+) strand; PAM type: NNNNGHTT; PAM sequence: TGCAGTTT
  source 1..20: mol_type = other DNA
ttcccacgttgaaatgcttc

SEQ ID NO: 6434 - DNA, 20 bp, synthetic construct
  misc_feature 1..20: note = Description of Artificial Sequence: Synthetic oligonucleotide
  misc_feature 1..20: note = Target: ANGPTL3; (+) strand; PAM type: NNNNGHTT; PAM sequence: TGTTGATT
  source 1..20: mol_type = other DNA
tgcacttagaaatccctata

SEQ ID NO: 6435 - DNA, 20 bp, synthetic construct
  misc_feature 1..20: note = Description of Artificial Sequence: Synthetic oligonucleotide
  misc_feature 1..20: note = Target: ANGPTL3; (+) strand; PAM type: NNNNGHTT; PAM sequence: TATTGTTT
  source 1..20: mol_type = other DNA
tcattctcttattcaataaa

SEQ ID NO: 6436 - DNA, 20 bp, synthetic construct
  misc_feature 1..20: note = Description of Artificial Sequence: Synthetic oligonucleotide
  misc_feature 1..20: note = Target: ANGPTL3; (+) strand; PAM type: NNNNGHTT; PAM sequence: AACAGCTT
  source 1..20: mol_type = other DNA
acatacaaatcttgccaatc

SEQ ID NO: 6437 - DNA, 20 bp, synthetic construct
  misc_feature 1..20: note = Description of Artificial Sequence: Synthetic oligonucleotide
  misc_feature 1..20: note = Target: ANGPTL3; (+) strand; PAM type: NNNNGHTT; PAM sequence: GACAGCTT
  source 1..20: mol_type = other DNA
agttataagccacaaaagct

SEQ ID NO: 6438 - DNA, 20 bp, synthetic construct
  misc_feature 1..20: note = Description of Artificial Sequence: Synthetic oligonucleotide
  misc_feature 1..20: note = Target: ANGPTL3; (+) strand; PAM type: NNNNGHTT; PAM sequence: AGAAGTTT
  source 1..20: mol_type = other DNA
aagctgacagcttaattaag

SEQ ID NO: 6439 - DNA, 20 bp, synthetic construct
  misc_feature 1..20: note = Description of Artificial Sequence: Synthetic oligonucleotide
  misc_feature 1..20: note = Target: ANGPTL3; (+) strand; PAM type: NNNNGHTT; PAM sequence: CATTGATT
  source 1..20: mol_type = other DNA
ctatagtatgggtacaaatg

SEQ ID NO: 6440 - DNA, 20 bp, synthetic construct
  misc_feature 1..20: note = Description of Artificial Sequence: Synthetic oligonucleotide
  misc_feature 1..20: note = Target: ANGPTL3; (+) strand; PAM type: NNNNGHTT; PAM sequence: TAGTGTTT
  source 1..20: mol_type = other DNA
ggctaatatataatactgtg

SEQ ID NO: 6441 - DNA, 20 bp, synthetic construct
  misc_feature 1..20: note = Description of Artificial Sequence: Synthetic oligonucleotide
  misc_feature 1..20: note = Target: ANGPTL3; (+) strand; PAM type: NNNNGHTT; PAM sequence: CCGGGATT
  source 1..20: mol_type = other DNA
aaagctgaagaatatgaaat

SEQ ID NO: 6442 - DNA, 20 bp, synthetic construct
  misc_feature 1..20: note = Description of Artificial Sequence: Synthetic oligonucleotide
  misc_feature 1..20: note = Target: ANGPTL3; (+) strand; PAM type: NNNNGHTT; PAM sequence: TTCTGATT
  source 1..20: mol_type = other DNA
gaagaatatgaaatccggga

SEQ ID NO: 6443 - DNA, 20 bp, synthetic construct
  misc_feature 1..20: note = Description of Artificial Sequence: Synthetic oligonucleotide
  misc_feature 1..20: note = Target: ANGPTL3; (+) strand; PAM type: NNNNGHTT; PAM sequence: AGTGGCTT
  source 1..20: mol_type = other DNA
agaaatttagggacgagcac

SEQ ID NO: 6444 - DNA, 20 bp, synthetic construct
  misc_feature 1..20: note = Description of Artificial Sequence: Synthetic oligonucleotide
  misc_feature 1..20: note = Target: ANGPTL3; (+) strand; PAM type: NNNNGHTT; PAM sequence: GTCAGCTT
  source 1..20: mol_type = other DNA
cttgaagtcaggagttcaag

SEQ ID NO: 6445 - DNA, 20 bp, synthetic construct
  misc_feature 1..20: note = Description of Artificial Sequence: Synthetic oligonucleotide
  misc_feature 1..20: note = Target: ANGPTL3; (+) strand; PAM type: NNNNGHTT; PAM sequence: GGAGGCTT
  source 1..20: mol_type = other DNA
ctacttgggagacagaggga

SEQ ID NO: 6446 - DNA, 20 bp, synthetic construct
  misc_feature 1..20: note = Description of Artificial Sequence: Synthetic oligonucleotide
  misc_feature 1..20: note = Target: ANGPTL3; (+) strand; PAM type: NNNNGHTT; PAM sequence: AATGGTTT
  source 1..20: mol_type = other DNA
aaaaagaaaagaaatttgga

SEQ ID NO: 6447 - DNA, 20 bp, synthetic construct
  misc_feature 1..20: note = Description of Artificial Sequence: Synthetic oligonucleotide
  misc_feature 1..20: note = Target: ANGPTL3; (+) strand; PAM type: NNNNGHTT; PAM sequence: GGTTGATT
  source 1..20: mol_type = other DNA
gaaaaatttcttttaggtaa

SEQ ID NO: 6448 - DNA, 20 bp, synthetic construct
  misc_feature 1..20: note = Description of Artificial Sequence: Synthetic oligonucleotide
  misc_feature 1..20: note = Target: ANGPTL3; (+) strand; PAM type: NNNNGHTT; PAM sequence: GTTAGTTT
  source 1..20: mol_type = other DNA
cacacatacacaggttaaaa

SEQ ID NO: 6449 - DNA, 20 bp, synthetic construct
  misc_feature 1..20: note = Description of Artificial Sequence: Synthetic oligonucleotide
  misc_feature 1..20: note = Target: ANGPTL3; (+) strand; PAM type: NNNNGHTT; PAM sequence: ACCTGTTT
  source 1..20: mol_type = other DNA
taactagcattttgagcact

SEQ ID NO: 6450 - DNA, 20 bp, synthetic construct
  misc_feature 1..20: note = Description of Artificial Sequence: Synthetic oligonucleotide
  misc_feature 1..20: note = Target: ANGPTL3; (+) strand; PAM type: NNNNGHTT; PAM sequence: CCCAGCTT
  source 1..20: mol_type = other DNA
gaattatgtactataattac

SEQ ID NO: 6451 - DNA, 20 bp, synthetic construct
  misc_feature 1..20: note = Description of Artificial Sequence: Synthetic oligonucleotide
  misc_feature 1..20: note = Target: ANGPTL3; (+) strand; PAM type: NNNNGHTT; PAM sequence: GCCGGCTT
  source 1..20: mol_type = other DNA
tccaaggccagacagctaga

SEQ ID NO: 6452 - DNA, 20 bp, synthetic construct
  misc_feature 1..20: note = Description of Artificial Sequence: Synthetic oligonucleotide
  misc_feature 1..20: note = Target: ANGPTL3; (+) strand; PAM type: NNNNGHTT; PAM sequence: TCAAGATT
  source 1..20: mol_type = other DNA
aatttcaccatattaatatg

SEQ ID NO: 6453 - DNA, 20 bp, synthetic construct
  misc_feature 1..20: note = Description of Artificial Sequence: Synthetic oligonucleotide
  misc_feature 1..20: note = Target: ANGPTL3; (+) strand; PAM type: NNNNGHTT; PAM sequence: AGCAGTTT
  source 1..20: mol_type = other DNA
atattaatatgtcaagatta

SEQ ID NO: 6454 - DNA, 20 bp, synthetic construct
  misc_feature 1..20: note = Description of Artificial Sequence: Synthetic oligonucleotide
  misc_feature 1..20: note = Target: ANGPTL3; (+) strand; PAM type: NNNNGHTT; PAM sequence: TCACGCTT
  source 1..20: mol_type = other DNA
atattattaattggctgggc

SEQ ID NO: 6455 - DNA, 20 bp, synthetic construct
  misc_feature 1..20: note = Description of Artificial Sequence: Synthetic oligonucleotide
  misc_feature 1..20: note = Target: ANGPTL3; (+) strand; PAM type: NNNNGHTT; PAM sequence: AATTGCTT
  source 1..20: mol_type = other DNA
ttgggaggccaaggtaaaag

SEQ ID NO: 6456 - DNA, 20 bp, synthetic construct
  misc_feature 1..20: note = Description of Artificial Sequence: Synthetic oligonucleotide
  misc_feature 1..20: note = Target: ANGPTL3; (+) strand; PAM type: NNNNGHTT; PAM sequence: AGCTGCTT
  source 1..20: mol_type = other DNA
agaaaaacttatgatgggca

SEQ ID NO: 6457 - DNA, 20 bp, synthetic construct
  misc_feature 1..20: note = Description of Artificial Sequence: Synthetic oligonucleotide
  misc_feature 1..20: note = Target: ANGPTL3; (+) strand; PAM type: NNNNGHTT; PAM sequence: TTAAGATT
  source 1..20: mol_type = other DNA
gcttgtgacattgaaggtat

SEQ ID NO: 6458 - DNA, 20 bp, synthetic construct
  misc_feature 1..20: note = Description of Artificial Sequence: Synthetic oligonucleotide
  misc_feature 1..20: note = Target: ANGPTL3; (+) strand; PAM type: NNNNGHTT; PAM sequence: TCTAGTTT
  source 1..20: mol_type = other DNA
gaaggtatttaagattcaat

SEQ ID NO: 6459 - DNA, 20 bp, synthetic construct
  misc_feature 1..20: note = Description of Artificial Sequence: Synthetic oligonucleotide
  misc_feature 1..20: note = Target: ANGPTL3; (+) strand; PAM type: NNNNGHTT; PAM sequence: ATGGGATT
  source 1..20: mol_type = other DNA
tttaatgacacttactatat

SEQ ID NO: 6460 - DNA, 20 bp, synthetic construct
  misc_feature 1..20: note = Description of Artificial Sequence: Synthetic oligonucleotide
  misc_feature 1..20: note = Target: ANGPTL3; (+) strand; PAM type: NNNNGHTT; PAM sequence: CATTGATT
  source 1..20: mol_type = other DNA
atgaggagcatataattata

SEQ ID NO: 6461 - DNA, 20 bp, synthetic construct
  misc_feature 1..20: note = Description of Artificial Sequence: Synthetic oligonucleotide
  misc_feature 1..20: note = Target: ANGPTL3; (+) strand; PAM type: NNNNGHTT; PAM sequence: AAAGGCTT
  source 1..20: mol_type = other DNA
caccacctgagggagtggag

SEQ ID NO: 6462 - DNA, 20 bp, synthetic construct
  misc_feature 1..20: note = Description of Artificial Sequence: Synthetic oligonucleotide
  misc_feature 1..20: note = Target: ANGPTL3; (+) strand; PAM type: NNNNGHTT; PAM sequence: AAGTGTTT
  source 1..20: mol_type = other DNA
ggagaaaggcttcagagaga

SEQ ID NO: 6463 - DNA, 20 bp, synthetic construct
  misc_feature 1..20: note = Description of Artificial Sequence: Synthetic oligonucleotide
  misc_feature 1..20: note = Target: ANGPTL3; (+) strand; PAM type: NNNNGHTT; PAM sequence: CACTGTTT
  source 1..20: mol_type = other DNA
aagtgttttttggaatggat

SEQ ID NO: 6464 - DNA, 20 bp, synthetic construct
  misc_feature 1..20: note = Description of Artificial Sequence: Synthetic oligonucleotide
  misc_feature 1..20: note = Target: ANGPTL3; (+) strand; PAM type: NNNNGHTT; PAM sequence: TACAGTTT
  source 1..20: mol_type = other DNA
tgtttccaaaagaactaaag

SEQ ID NO: 6465 - DNA, 20 bp, synthetic construct
  misc_feature 1..20: note = Description of Artificial Sequence: Synthetic oligonucleotide
  misc_feature 1..20: note = Target: ANGPTL3; (+) strand; PAM type: NNNNGHTT; PAM sequence: AAAAGTTT
  source 1..20: mol_type = other DNA
ataataaatttacccaacaa

SEQ ID NO: 6466 - DNA, 20 bp, synthetic construct
  misc_feature 1..20: note = Description of Artificial Sequence: Synthetic oligonucleotide
  misc_feature 1..20: note = Target: ANGPTL3; (+) strand; PAM type: NNNNGHTT; PAM sequence: ATTAGCTT
  source 1..20: mol_type = other DNA
taaaatcataaaaaagtaaa

SEQ ID NO: 6467 - DNA, 20 bp, synthetic construct
  misc_feature 1..20: note = Description of Artificial Sequence: Synthetic oligonucleotide
  misc_feature 1..20: note = Target: ANGPTL3; (+) strand; PAM type: NNNNGHTT; PAM sequence: TGTAGTTT
  source 1..20: mol_type = other DNA
agtcaccatagcattgaatg

SEQ ID NO: 6468 - DNA, 20 bp, synthetic construct
  misc_feature 1..20: note = Description of Artificial Sequence: Synthetic oligonucleotide
  misc_feature 1..20: note = Target: ANGPTL3; (+) strand; PAM type: NNNNGHTT; PAM sequence: CTTTGATT
  source 1..20: mol_type = other DNA
attaagttagttgctcattt

(The sequence listing continues in the following parts.)

1.-24. (canceled)

25. A composition, comprising:
(a) a guide RNA (gRNA) that targets an ANGPTL3 genomic locus (ANGPTL3 gRNA), or a nucleic acid encoding an ANGPTL3 gRNA; and
(b) a Cas9 endonuclease or a nucleic acid encoding a Cas9 endonuclease;
wherein the ANGPTL3 gRNA comprises a spacer sequence that is a RNA sequence having the nucleic acid sequence of SEQ ID NO: 9199, 9109, 7094, 7168, 7061, 7165, or 9110 in which T is substituted for U.

26. The composition of claim 25, wherein the Cas9 endonuclease is selected from the group consisting of S. pyogenes Cas9, S. aureus Cas9, N. meningitides Cas9, S. thermophilus CRISPR1 Cas9, S. thermophilus CRISPR 3 Cas9, and T. denticola Cas9.

27. The composition of claim 25, wherein the Cas9 endonuclease comprises a sequence selected from the group consisting of SEQ ID NOs: 1-620.

28. The composition of claim 25, the gRNA is a single-guide RNA (sgRNA).

29. The composition of claim 25, the gRNA is a chemically-modified gRNA.

30. The composition of claim 29, wherein the chemically-modified gRNA comprises a phosphorothioate backbone and/or 2′-O-methyl nucleotides at the 3′ end and/or the 5′end of the gRNA.

31. The composition of claim 25, wherein the composition comprises (a) the ANGPTL3 gRNA and (b) the Cas9 endonuclease, and the ANGPTL3 gRNA and Cas 9 endonuclease are formulated as a ribonucleoprotein particle (RNP).

32. The composition of claim 25, wherein the composition comprises (a) a nucleic acid encoding a ANGPTL3 gRNA and (b) a nucleic acid encoding a Cas9 endonuclease, and wherein (a) and/or (b) is present on a viral vector.

33. The composition of claim 32, wherein the viral vector is an adeno-associated viral vector.

34. The composition of claim 25, wherein (a), (b), or both are delivered to the population of cells in a liposome or lipid nanoparticle (LNP).

35. The composition of claim 25, wherein the population of cells comprises hepatocytes.

36. The composition of claim 25, wherein the population of cells is present in a subject having an ANGPTL3-related condition.

37. The composition of claim 36, wherein the subject is human.

38. The composition of claim 25, wherein at least 50% of the cells of the population of cells comprise a modification in the ANGPTL3 gene.

39. The composition of claim 25, wherein 50%-70% of the cells of the population of cells comprise a modification in the ANGPTL3 gene.

40. The composition of claim 25, wherein the ANGPTL3 gRNA comprises a spacer sequence that is a RNA sequence and comprises the sequence of SEQ ID NO: 7094 in which T is substituted for U.

41. The composition of claim 40, comprising (b) an mRNA encoding a Cas9 endonuclease.

42. A method of producing a population of cells comprising a modification in the Angiopoietin-like 3 (ANGPTL3) gene, the method comprising:
introducing into cells (a) a guide RNA (gRNA) that targets an ANGPTL3 genomic locus (ANGPTL3 gRNA) or a nucleic acid encoding an ANGPTL3 gRNA, and (b) a Cas9 endonuclease or a nucleic acid encoding a Cas9 endonuclease; and
producing a population of cells that comprise a modification in the ANGPTL3 gene, wherein the gRNA comprises a spacer sequence that is an RNA sequence having the nucleic acid sequence of SEQ ID NO: 7094 in which T is substituted for U, thereby producing the population of cells that comprise a modification in the ANGPTL3 gene.

43. The method of claim 42, wherein at least 50% of the cells of the population comprise a modification in the ANGPTL3 gene.

44. The method of claim 42, wherein ANGPTL3 protein expression level in the population is reduced by at least 2-fold relative to an unedited cell.

45. A guide RNA (gRNA) or a nucleic acid encoding a gRNA, comprising a spacer sequence that is an RNA sequence having the nucleic acid sequence of SEQ ID NO: 9109, 7168, 7061, 7165, or 9110 in which T is substituted for U.
